United States Patent Application Publication US 2022/0090207 A1 - sequence listing, part 22

SEQ ID NO: 283986 - DNA, 591 bp, Homo sapiens
  chr6:36354736-36355327
  hyper
aactgcctgggaaacgccagccacggagctgctgaggatcagactcctgggtttcagcatggaggccagggaagggtctgataatgggtatgggtcctggcgagaggggagtggagaaaggccttggagtgggacggggcgccagctctgggggcagtctcgaggcacctagaaaaccggcgagtggggagaggctgctaaagaggggctccctgcgagaatgcgttcaccagctgtgaggacctggctggcgcacgaacttccaaagacctcacatctggttggtgtaggggcgaccagtggtaagggggctgcggaaagggcccgcaggggctgtgcgtgatgccttcagagctgtgtatgacaccgagagagtcaggggcggtgacccgcgtctggaggtggaaggggaagtgagtgagggatggatgtgaggtttaggaatgtgttggaaagagagattcccgccaggtaaaaggtctgataaaataggtttggaaatctaggtggtgaggaaaggatgcgggagcaggtggctctgcgtgcgcgctgcgtgttcagccgccaggctcttacctgcattacaggtgg

SEQ ID NO: 283987 - DNA, 428 bp, Homo sapiens; identical to SEQ ID NO: 200419
  chr6:36355357-36355785
  hyper

SEQ ID NO: 283988 - DNA, 270 bp, Homo sapiens
  chr6:36391057-36391327
  hyper
ttctcaggctccccgccagagagcgccgccaggtcctcggaaccacctcgcgcactttagctgggcgcgcgacccgcgcaaccagtgagaaccccgctcccgccctaggctttctgtggtggaaaaagcgcgcgcgcggacgagcaggttaggcgatagaggtcacgtgggccagctgtggccaatggggagcgcacatggcgacgcggccggcggcggcgcgcgcgtagctcgcctcgggctcctggcgggagcgggagttagggaggc

SEQ ID NO: 283989 - DNA, 97 bp, Homo sapiens; identical to SEQ ID NO: 200420
  chr6:36410471-36410568
  hyper

SEQ ID NO: 283990 - DNA, 142 bp, Homo sapiens; identical to SEQ ID NO: 232026
  chr6:36563963-36564105
  hyper

SEQ ID NO: 283991 - DNA, 343 bp, Homo sapiens; identical to SEQ ID NO: 232028
  chr6:36646212-36646555
  hyper

SEQ ID NO: 283992 - DNA, 129 bp, Homo sapiens; identical to SEQ ID NO: 232029
  chr6:36703003-36703132
  hyper

SEQ ID NO: 283993 - DNA, 91 bp, Homo sapiens
  chr6:36807968-36808059
  hyper
gtggtcctggtcgcgcgcatcttcatttgcgcccgccccctctcaccacccctatctcccatcaggggtctccatcctgggggagggggag

SEQ ID NO: 283994 - DNA, 126 bp, Homo sapiens
  chr6:36954119-36954245
  hyper
ggacactgggctgcgggccgggggtcaatggtggcgggcagccggggccccgggctcgggagctgtggcggcagccgcaggccggggcgctcccccgggatgcccagagcacgcgggggcggggtt

SEQ ID NO: 283995 - DNA, 629 bp, Homo sapiens
  chr6:37138570-37139199
  hyper
gtcgcagtaccaggtgggcccgctactgggcagcggcggcttcggctcggtctactcaggcatccgcgtctccgacaacttgccggtgagtgggcgccccgcggtggggagggcgcgccgggcggggggcgcacgggcgtgctttagcccggacgagggaacctgacggagaccctgggcttccaggtggccatcaaacacgtggagaaggaccggatttccgactggggagagctggtgagtgccctgcaggagcgacccccaggatgagtgggtggggtgaggggcgcccccgactcccgccctaacgcggccccctcgcccctgcagcctaatggcactcgagtgcccatggaagtggtcctgctgaagaaggtgagctcgggtttctccggcgtcattaggctcctggactggttcgagaggcccgacagtttcgtcctgatcctggagaggcccgagccggtgcaagatctcttcgacttcatcacggaaaggggagccctgcaagaggagctggcccgcagcttcttctggcaggtgctggaggccgtgcggcactgccacaactgcggggtgctccaccgcgacatcaaggacgaaaacatccttatcgacctcaatcgcgg

SEQ ID NO: 283996 - DNA, 328 bp, Homo sapiens
  chr6:37139229-37139557
  hyper
ggcgctgctcaaggacaccgtctacacggacttcgatggtgagccaggcccgggagggagctgcccaggtgactcggcccggcccggcccagtccggaggcctcggccagtctcccgcgccagccttttgtaaaggtcattgggccgcctggctcgatgctagccggggtgggacgcaggagagcctcccagcgtagtaaagccggggattttcagccagctgaacctgtaatgtttctggcatgattttattcttcaagtggaattcagttagttccaggctttcccgatgaataagaggttgtgggcaaccggcggtagcccagat

SEQ ID NO: 283997 - DNA, 167 bp, Homo sapiens; identical to SEQ ID NO: 232035
  chr6:37225492-37225659
  hyper

SEQ ID NO: 283998 - DNA, 45 bp, Homo sapiens; identical to SEQ ID NO: 232036
  chr6:37226110-37226155
  hyper

SEQ ID NO: 283999 - DNA, 138 bp, Homo sapiens; identical to SEQ ID NO: 232037
  chr6:37483957-37484095
  hyper

SEQ ID NO: 284000 - DNA, 466 bp, Homo sapiens
  chr6:37665241-37665707
  hyper
agccgagccgccgataaacccgggggaagaatagcagcccggcgccccgcgggaatctggagagcaattccaggcaagaagggccccagaaaacggggaaaggaggaaagtttgagtcttttgaaaaatattcgcgctctcgcccaggccggggctgcggcgcgggcgccgctcgccgcctccgctcgccgcgctcctctcccgccgtctggccgcggccgtagccctcccgggctccgagctctcgggagagcggggctacgccgcgccccaagttggtcgtccccgcccccgcccggcggccttggcctgcgggggcccagagcgggcggggccgggccgggctccggggcgcggcggccgctcggctccgggccgcgggagcgctccgctcgctcagcaacttgggctttgctgtgctgctttttcgcccctccgagcttttcattccgcgctcctcccgcct

SEQ ID NO: 284001 - DNA, 381 bp, Homo sapiens
  chr6:37666463-37666844
  hyper
gggtcctgcagccgcgcgagacgggccgcggctgtgggtctgcaaggctgtctgcccggctcgagaggcccccgcccctttccaggcgtctggtgctggggccgggccggagcagctggcggagaggtcgcgctgagagctcctgcccttgccgcggcccacaggttgccaacaggtttgctcgcacgacccctccgccagagcttccctaagtcaccccacattttcctcggctagccactcttcccatcttgcctcccctcgggacctcaggcgcccccaagcgccccgggggcacacctccttccggctgccgaacccgagccccgctccagcggcgggagtccggcactcgggtctcagccgcctcgaaggggccct

SEQ ID NO: 284002 - DNA, 221 bp, Homo sapiens; identical to SEQ ID NO: 42916
  chr6:37666866-37667087
  hyper

SEQ ID NO: 284003 - DNA, 113 bp, Homo sapiens; identical to SEQ ID NO: 232042
  chr6:38607281-38607394
  hyper

SEQ ID NO: 284004 - DNA, 76 bp, Homo sapiens; identical to SEQ ID NO: 232043
  chr6:38670958-38671034
  hyper

SEQ ID NO: 284005 - DNA, 224 bp, Homo sapiens; identical to SEQ ID NO: 232045
  chr6:39082798-39083022
  hyper

SEQ ID NO: 284006 - DNA, 205 bp, Homo sapiens
  chr6:39196879-39197084
  hyper
tccaccatggctcccgagcggccgcctcctagagaaagcctctcctagccccagctgctaccagtccgcccgccctccagcctctgaaaacagctgtttgaatttggagctccgcatgcgcagtgcccggtactcaccccccgcaagcaccgctccccggacagagttgcttggccaagttggcccacggagtgcggggagctgc

SEQ ID NO: 284007 - DNA, 161 bp, Homo sapiens
  chr6:39197391-39197552
  hyper
gaggtgagcgctagaagaggcttggcgctccccgcgctcccagggtcagccgccaggggaggctgcgccgcccgcccagacctgcacgccctgcggtgcccgaggggttgcggtctcagggactcgtgtttgttattaggactggcgtgttaactaaaatg

SEQ ID NO: 284008 - DNA, 46 bp, Homo sapiens; identical to SEQ ID NO: 200426
  chr6:39271082-39271128
  hyper

SEQ ID NO: 284009 - DNA, 137 bp, Homo sapiens
  chr6:39281999-39282136
  hyper
ggtaagccaggtaggcgagcagcaggagcacggtgctgggcaccgcgcagccccggaccctgccctcgggagccgcccgggctcgcggtcggtacatagcgggagaggcggggagccggcgccgggagcggtggact

SEQ ID NO: 284010 - DNA, 667 bp, Homo sapiens
  chr6:39692723-39693390
  hyper
aacatgcactagtctgcccccgcgtgaacacgtgtgcctgggtgcaaaaaaaatggctctctgccgggtctgcgctgtgccaggtaggagtggcctggctgtcggtcgcgtagctgacagcagtgcgcgggggtcttcgcggctgcagggctcctcggtcagtgtgtgcgggattccgggcggcctcggcgcccaccagcaagcccctcacctccgcccagccccttcgcgtgccgccgcccgaccccagcccaagaggccccgccgcgccggcgccccggaggctccagcccgtaccccttgttggtgcttccggacagggggcttcaccctcgcgaatatctggatagtctgcttcaccatctcctccctggctctgcaatgacccttgacctctctcaggcccgggctgccaaaactaactcccaccacctccggcgacccacagtcttagcaacagtagctagggacactacccagtgagcaccttggcagccaggatcccgcctcctccctctaattggtcgcgaccggaaggaggccactacggggcggggctagggaggggagggcgggggtggagaggagagcgctgcgcatgcgcatgagcgagtgtctgggctctgggtttagcgccggacccggcctggaccgtgtggttaaaggg

SEQ ID NO: 284011 - DNA, 50 bp, Homo sapiens; identical to SEQ ID NO: 200428
  chr6:39902362-39902412
  hyper

SEQ ID NO: 284012 - DNA, 170 bp, Homo sapiens; identical to SEQ ID NO: 200429
  chr6:40554350-40554520
  hyper

SEQ ID NO: 284013 - DNA, 315 bp, Homo sapiens
  chr6:40554860-40555175
  hyper
gagccgcttattcagttatatccatggcatttagcaagaagaaggggggaaaagcacaacttgttctcttctcttccagattaaagaaaaataataataataatccctccctaggaggatgccggtaggattttccggatcgaagaaccccaggcattcccaggaacctcgggcatcttggaatgtggggtgtcttcaagttcagacgagcctgccgggttgtgtatgtgtgagtgtatgtgtgtctcagcgagagggagccaggcactcacacccacacgcacacacaaacacactcccccgtactccccgcat

SEQ ID NO: 284014 - DNA, 62 bp, Homo sapiens
  chr6:40555854-40555916
  hyper
ggggcccagttcagattctcgaatcctggtaagggacctatgaataacgagcgccccgtgca

SEQ ID NO: 284015 - DNA, 232 bp, Homo sapiens
  chr6:41039968-41040200
  hyper
tcctaccctagggcgggtcagcgaggacgcagtctgtcctggggtcctatgggagggtgcggggaggctcgctcaaagccccaacgtacccaagtcacccttcacctggaaaggagtcggttgtttggaggtccccgccccgcggggaagggctccggatccgaccctggtaggtggggagcagcggaccagcccaaacgcggagccaatcccgccaaagcccttaattgca

SEQ ID NO: 284016 - DNA, 170 bp, Homo sapiens; identical to SEQ ID NO: 200431
  chr6:41040504-41040674
  hyper

SEQ ID NO: 284017 - DNA, 151 bp, Homo sapiens; identical to SEQ ID NO: 200432
  chr6:41339070-41339221
  hyper

SEQ ID NO: 284018 - DNA, 680 bp, Homo sapiens
  chr6:41340027-41340707
  hyper
ctgacacgcacacacacacacacacacactcgagacactgcagggccctgcccatcctcgagttcacaccagccccgccactattatgggcactgccggggctgtggacgctcaaagaatagatcctcattagcatcttgctttgaatatcatttgcattttattcatttcatgtcaaaacgctcagaactctccccagcccgcaccttccccagagcttgggagtcatgggtttccagctcaagccccttctctgtgggccccacgcttgctggctacccccaccccacctaccctgcgccacagcccccacaaaatgaattgacgtctcctaagcacttggcaagttccatctcctgcgctagggtgcattgtctcatctaatcctgacagcaactcaaggagcaaagcactatactatacccatttgagagtcgaggaaactgagtcacaaaggtgacttgaccaaggtcgtggagctaaaaaccgaggaggagaaactgaaacccaaggcgaccaaacaccaaacccaaagagcttaaccgcttcgctgccccggctcaggcaaggtcaaagctaaggtatgataactctggcaggagaaagtctgttttcctacgtggtagaaagtccttgggcccgccacgacccttcccccatcccggccgctggggcaccgg

SEQ ID NO: 284019 - DNA, 90 bp, Homo sapiens; identical to SEQ ID NO: 232059
  chr6:41343716-41343806
  hyper

SEQ ID NO: 284020 - DNA, 114 bp, Homo sapiens; identical to SEQ ID NO: 200434
  chr6:41472018-41472132
  hyper

SEQ ID NO: 284021 - DNA, 68 bp, Homo sapiens; identical to SEQ ID NO: 232062
  chr6:41513949-41514017
  hyper

SEQ ID NO: 284022 - DNA, 90 bp, Homo sapiens
  chr6:41605676-41605766
  hyper
tctggcgctgtgggcgggtggcctgggagcccagatccctgtccctggcttaggaccccgggaggagaccgagggggtgggtaaaacgtg

SEQ ID NO: 284023 - DNA, 112 bp, Homo sapiens; identical to SEQ ID NO: 232064
  chr6:41651428-41651540
  hyper

SEQ ID NO: 284024 - DNA, 35 bp, Homo sapiens; identical to SEQ ID NO: 200435
  chr6:41747771-41747806
  hyper

SEQ ID NO: 284025 - DNA, 123 bp, Homo sapiens; identical to SEQ ID NO: 232066
  chr6:41754978-41755101
  hyper

SEQ ID NO: 284026 - DNA, 256 bp, Homo sapiens; identical to SEQ ID NO: 232067
  chr6:41755385-41755641
  hyper

SEQ ID NO: 284027 - DNA, 170 bp, Homo sapiens; identical to SEQ ID NO: 232068
  chr6:41862277-41862447
  hyper

SEQ ID NO: 284028 - DNA, 156 bp, Homo sapiens; identical to SEQ ID NO: 200437
  chr6:41888908-41889064
  hyper

SEQ ID NO: 284029 - DNA, 50 bp, Homo sapiens; identical to SEQ ID NO: 113330
  chr6:42072647-42072697
  hyper

SEQ ID NO: 284030 - DNA, 310 bp, Homo sapiens
  chr6:42109902-42110212
  hyper
cccggcggctgctctcggccagtccgcaggttccaacgtgtccctcccctccgcgcctccaggagacagcaccgccggccctgccccagcgccctccgtccccgccccagcgccctccgtccccggagtactcaccgaagcccccggtcccctcctccggggcctcctgggtgaagatccagggcggattggtggcgtagagggaggtgctgggggtcgtggtgtgcttcttcccgaagagtttgctgaaggtgccctgcaccgtctgcttctttttcatgctgccgcagcccgcgcgggcgccagggaa

SEQ ID NO: 284031 - DNA, 345 bp, Homo sapiens
  chr6:42110273-42110618
  hyper
actctaccaggccatgtcccccgccgtcctccccgcccgcgcaccgggcaacaggtgctgcgggcgccgccgcttgccgggaaatgcgagctacctggccaggtaaaaggcagccgcttggccgggccccgccccgccgccgcccagctccccaggccgcattccttcccgcctccttctacaacaggccattgttggcacggcccggtgggctggggacctcgcccggcccacgcccagcctgggagacgggccaccccctcccccaggttcctccctgcacgcctccttcaccccacttccccctagtccgggaaaggaggcgggtgagtttccagcctctca

SEQ ID NO: 284032 - DNA, 37 bp, Homo sapiens
  chr6:42145868-42145905
  hyper
cctcgctgcatctccgagggtccgggtctcccctcag

SEQ ID NO: 284033 - DNA, 43 bp, Homo sapiens; identical to SEQ ID NO: 113333
  chr6:42145975-42146018
  hyper

SEQ ID NO: 284034 - DNA, 176 bp, Homo sapiens; identical to SEQ ID NO: 200438
  chr6:42418934-42419110
  hyper

SEQ ID NO: 284035 - DNA, 105 bp, Homo sapiens; identical to SEQ ID NO: 42964
  chr6:42531901-42532006
  hyper

SEQ ID NO: 284036 - DNA, 49 bp, Homo sapiens; identical to SEQ ID NO: 232077
  chr6:42896709-42896758
  hyper

SEQ ID NO: 284037 - DNA, 61 bp, Homo sapiens
  chr6:42928260-42928321
  hyper
gagggtcctctcccgccgtgggattgcacagagggctgggtccgcaggctggctaaaagga

SEQ ID NO: 284038 - DNA, 78 bp, Homo sapiens; identical to SEQ ID NO: 200440
  chr6:42928454-42928532
  hyper

SEQ ID NO: 284039 - DNA, 172 bp, Homo sapiens; identical to SEQ ID NO: 200441
  chr6:42947095-42947267
  hyper

SEQ ID NO: 284040 - DNA, 321 bp, Homo sapiens; identical to SEQ ID NO: 232080
  chr6:42952280-42952601
  hyper

SEQ ID NO: 284041 - DNA, 273 bp, Homo sapiens; identical to SEQ ID NO: 232081
  chr6:42981636-42981909
  hyper

SEQ ID NO: 284042 - DNA, 35 bp, Homo sapiens; identical to SEQ ID NO: 232082
  chr6:42989814-42989849
  hyper

SEQ ID NO: 284043 - DNA, 303 bp, Homo sapiens; identical to SEQ ID NO: 232083
  chr6:43027111-43027414
  hyper

SEQ ID NO: 284044 - DNA, 125 bp, Homo sapiens; identical to SEQ ID NO: 222857
  chr6:43081636-43081761
  hyper

SEQ ID NO: 284045 - DNA, 168 bp, Homo sapiens; identical to SEQ ID NO: 200442
  chr6:43138368-43138536
  hyper

SEQ ID NO: 284046 - DNA, 572 bp, Homo sapiens; identical to SEQ ID NO: 232085
  chr6:43138813-43139385
  hyper

SEQ ID NO: 284047 - DNA, 173 bp, Homo sapiens; identical to SEQ ID NO: 232086
  chr6:43196993-43197166
  hyper

SEQ ID NO: 284048 - DNA, 35 bp, Homo sapiens; identical to SEQ ID NO: 200443
  chr6:43237210-43237245
  hyper

SEQ ID NO: 284049 - DNA, 51 bp, Homo sapiens; identical to SEQ ID NO: 200444
  chr6:43242933-43242984
  hyper

SEQ ID NO: 284050 - DNA, 175 bp, Homo sapiens
  chr6:43243258-43243433
  hyper
taagcctccaggctcggagggccctgtcgccccacccctgactcccgttacctcactgcccgtcgggctgccccccaccccgccccaataattggccttgcaattggatgccaaagagcccagagttgagggggagcagagctttgagcccaggtctctcagagcaacccaacag

SEQ ID NO: 284051 - DNA, 557 bp, Homo sapiens
  chr6:43243475-43244032
  hyper
cccaccactgagggccctgggggtcaccaaacatgcccccccatttccagctcttcccacacccccacccccgaaaataaaactcagggaccaacatctgcttcctttgcacttgctccgtcgaccccgctccccgctcggaggggcttccgtgggggagggggcggggctccgggccctcagagttctcagtgtcgagcgaggagaggggctggcccctgcccccggagaagcgggactggtaggagagagaaactcagcaccggggcccagctgagccccttcctgcgtaaggagacgccttctaattgcggggtgggggcggagtaggggagggataggaaggggattagcgagaggaccctcgcggaggtcctgagtcccagtcggtttattcctgagccttcccctcccatcgtaagtccttccctcgaccccccattttgtactgcaataatactgtattatacgcttgcactatttcccgaccctggccagcggaagcatgcacgaaaaactcaaaaccacacacacgctcacacgcacacacacgcaca

SEQ ID NO: 284052 - DNA, 121 bp, Homo sapiens
  chr6:43276399-43276520
  hyper
ctacactgtggctagccctccgcgtcctcagggaatccagcggctcccattcgccccatcttctccccctccgcagcccgggcctcaccgaagaaaacaggttgctggcaacgcggacagg

SEQ ID NO: 284053 - DNA, 67 bp, Homo sapiens
  chr6:43276612-43276679
  hyper
cggctcagctttgagcctccctgggcggaatccgcggttcctcggcgctcattggttatcagaaatt

SEQ ID NO: 284054 - DNA, 75 bp, Homo sapiens; identical to SEQ ID NO: 232092
  chr6:43337694-43337769
  hyper

SEQ ID NO: 284055 - DNA, 56 bp, Homo sapiens; identical to SEQ ID NO: 200447
  chr6:43423048-43423104
  hyper

SEQ ID NO: 284056 - DNA, 92 bp, Homo sapiens; identical to SEQ ID NO: 222858
  chr6:43477369-43477461
  hyper

SEQ ID NO: 284057 - DNA, 38 bp, Homo sapiens; identical to SEQ ID NO: 200448
  chr6:43478199-43478237
  hyper

SEQ ID NO: 284058 - DNA, 252 bp, Homo sapiens; identical to SEQ ID NO: 232095
  chr6:43543534-43543786
  hyper

SEQ ID NO: 284059 - DNA, 98 bp, Homo sapiens; identical to SEQ ID NO: 200449
  chr6:43596713-43596811
  hyper

SEQ ID NO: 284060 - DNA, 126 bp, Homo sapiens; identical to SEQ ID NO: 232096
  chr6:43597011-43597137
  hyper

SEQ ID NO: 284061 - DNA, 141 bp, Homo sapiens; identical to SEQ ID NO: 232097
  chr6:43597646-43597787
  hyper

SEQ ID NO: 284062 - DNA, 133 bp, Homo sapiens; identical to SEQ ID NO: 232098
  chr6:43598079-43598212
  hyper

SEQ ID NO: 284063 - DNA, 152 bp, Homo sapiens; identical to SEQ ID NO: 232099
  chr6:43603409-43603561
  hyper

SEQ ID NO: 284064 - DNA, 469 bp, Homo sapiens
  chr6:43969983-43970452
  hyper
ggccgccttctcccccgccgcccgcgcccacgccctcccccgcggggccgtggcagtgccaccaagggcctctttaagcccctttgaagccgcggagccccgcgccgcaggaggccccgccgctatgccagctatgccagctatgtccctgctgccgccggccgccaccgctcccccattaatgctggctaatctggctaataaataaactcccctcccagccccagccccgcgccgactcctccccgcccccgcagaatcgatgtcagggctcgactagagcaagcgcccgcactccaccccactccctcgagatgtagctgacgttttttcttatggctgccctaggtctgtagcccgtcggggattctcggggagacgtgggatttgggaggtctccgcctagccactgcgtttgccttcctcttttccagtccacctgcgcaccaggggcaggacacgtggctgg

SEQ ID NO: 284065 - DNA, 196 bp, Homo sapiens
  chr6:44044181-44044377
  hyper
gcagcccattttaaatacaacggggcctgaaggctaacttctggccttcctgcttcgggaaatcattccaataaccgggaaaaaagggggcccgaggacagagcccctgccgggccccagggggagtgtcgtcggctcctttgcgtcgccggccggcggcgtggcggggactctggccggcagcctcccgcgccgt

SEQ ID NO: 284066 - DNA, 118 bp, Homo sapiens
  chr6:44044450-44044568
  hyper
gtcgcgggcgccgcggcagggaaatgtgggggcgggccggcgcgccccctcccccccgcctacgctggcccattcataaaacctgcaggcgctgcccggcctggcagccttggtctcc

SEQ ID NO: 284067 - DNA, 66 bp, Homo sapiens; identical to SEQ ID NO: 200450
  chr6:44094340-44094406
  hyper

SEQ ID NO: 284068 - DNA, 270 bp, Homo sapiens; identical to SEQ ID NO: 200451
  chr6:44095871-44096141
  hyper

SEQ ID NO: 284069 - DNA, 58 bp, Homo sapiens; identical to SEQ ID NO: 200452
  chr6:44187017-44187075
  hyper

SEQ ID NO: 284070 - DNA, 482 bp, Homo sapiens; identical to SEQ ID NO: 113406
  chr6:44187131-44187613
  hyper

SEQ ID NO: 284071 - DNA, 42 bp, Homo sapiens; identical to SEQ ID NO: 232105
  chr6:44225458-44225500
  hyper

SEQ ID NO: 284072 - DNA, 261 bp, Homo sapiens; identical to SEQ ID NO: 200454
  chr6:44265267-44265528
  hyper

SEQ ID NO: 284073 - DNA, 34 bp, Homo sapiens; identical to SEQ ID NO: 232107
  chr6:44355180-44355214
  hyper

SEQ ID NO: 284074 - DNA, 127 bp, Homo sapiens; identical to SEQ ID NO: 232108
  chr6:45345432-45345559
  hyper

SEQ ID NO: 284075 - DNA, 273 bp, Homo sapiens; identical to SEQ ID NO: 200455
  chr6:45387305-45387578
  hyper

SEQ ID NO: 284076 - DNA, 261 bp, Homo sapiens; identical to SEQ ID NO: 200456
  chr6:45388098-45388359
  hyper

SEQ ID NO: 284077 - DNA, 319 bp, Homo sapiens; identical to SEQ ID NO: 200457
  chr6:45388397-45388716
  hyper

SEQ ID NO: 284078 - DNA, 43 bp, Homo sapiens; identical to SEQ ID NO: 232110
  chr6:45390376-45390419
  hyper

SEQ ID NO: 284079 - DNA, 325 bp, Homo sapiens
  chr6:45390539-45390864
  hyper
tgccccggttgcggccgccccacgacaaccgcaccatggtggagatcatcgccgaccacccggccgaactcgtccgcaccgacagccccaacttcctgtgctcggtgctgccctcgcactggcgctgcaacaagaccctgcccgtggccttcaaggtaagaggctacaccgccccccgcccccggccgggagcggcggaacctgcccgccggtgtcttcctgcccacggggctgggccccggacgtcctccaagacctcctgccttggcggctctaaccccagaaacccccggccgggcctccctccggatgccctggcgggctc

SEQ ID NO: 284080 - DNA, 37 bp, Homo sapiens
  chr6:45631099-45631136
  hyper
gccccgcgtctggtcgactggctccccggttgccctt

SEQ ID NO: 284081 - DNA, 224 bp, Homo sapiens; identical to SEQ ID NO: 200458
  chr6:45982991-45983215
  hyper

SEQ ID NO: 284082 - DNA, 373 bp, Homo sapiens; identical to SEQ ID NO: 200459
  chr6:46097249-46097622
  hyper

SEQ ID NO: 284083 - DNA, 535 bp, Homo sapiens; identical to SEQ ID NO: 113429
  chr6:46097694-46098229
  hyper

SEQ ID NO: 284084 - DNA, 331 bp, Homo sapiens; identical to SEQ ID NO: 200461
  chr6:46138267-46138598
  hyper

SEQ ID NO: 284085 - DNA, 171 bp, Homo sapiens; identical to SEQ ID NO: 200462
  chr6:46138801-46138972
  hyper

SEQ ID NO: 284086 - DNA, 538 bp, Homo sapiens; identical to SEQ ID NO: 232115
  chr6:46459377-46459915
  hyper

SEQ ID NO: 284087 - DNA, 87 bp, Homo sapiens; identical to SEQ ID NO: 200463
  chr6:46816765-46816852
  hyper

SEQ ID NO: 284088 - DNA, 996 bp, Homo sapiens; identical to SEQ ID NO: 232117
  chr6:47276365-47277361
  hyper

SEQ ID NO: 284089 - DNA, 127 bp, Homo sapiens; identical to SEQ ID NO: 232118
  chr6:47382532-47382659
  hyper

SEQ ID NO: 284090 - DNA, 78 bp, Homo sapiens; identical to SEQ ID NO: 232119
  chr6:47755947-47756025
  hyper

SEQ ID NO: 284091 - DNA, 436 bp, Homo sapiens
  chr6:49518140-49518576
  hyper
ttgcgcctcagctccggagaaaaacgaaaggtgggtgggaaactaggatagaggtgaaaagtaagaggggactgaatcagcgaatgacaaagggagcagggctccggacaggggtaggaggaagaagaggagtgactggggcttgtgtcaagcttcttctgaatggctagacagccgccaggtgggagaggcggagggtgaagaggcgggttccgcacgcggttagcctggggctgatctagtcttcagctttcaccggctgggagtccggagctgcagcagaggccacacccagggcttggtggtcccgcgctttccggagctcagcaggcgcttgctgcttgaaccggtcaaagaaggaacgaatgaatgacccttttgccaggatggagacccgggggcctcagggagctgcgaatcccatggactcctcccg

SEQ ID NO: 284092 - DNA, 276 bp, Homo sapiens; identical to SEQ ID NO: 200466
  chr6:49519000-49519276
  hyper

SEQ ID NO: 284093 - DNA, 62 bp, Homo sapiens; identical to SEQ ID NO: 200467
  chr6:50674750-50674812
  hyper

SEQ ID NO: 284094 - DNA, 188 bp, Homo sapiens; identical to SEQ ID NO: 232124
  chr6:50683584-50683772
  hyper

SEQ ID NO: 284095 - DNA, 85 bp, Homo sapiens
  chr6:50684820-50684905
  hyper
tatttactccttttaatagccgcgtctgctgctgatttttttgtatctgtacaaattttttttctgtgctaggcacaaagccgag

SEQ ID NO: 284096 - DNA, 88 bp, Homo sapiens
  chr6:50684969-50685057
  hyper
aggacaccgtagtttatccaattttcgacttagtgccattcaactggtcatttatgcaatgtcatccgaccaaacaacatgttttact

SEQ ID NO: 284097 - DNA, 368 bp, Homo sapiens
  chr6:50690697-50691065
  hyper
aggagcgctttcctgattgcccgtggctacacaaaatacaaactactttgaatcaaaacattttggaggaattaatatgatctgaactctgcacgttttaagagagtttgagtttgtcagagcgcttagaggtgactggcacgccaaggcaaaggcatttacgccgcggtacaaacattgtcagatctgatttaatttctttaaaaaaaaaattccttgaaatggaaccttagcttcaattgctcagtctgcccataacagagtagaaggacctgatcgcttttccctttagccggcctcaaggccggcagcaggctgcttggcaggaggaagcgatttcctctgcttctctgggtttcaggaaggcc

SEQ ID NO: 284098 - DNA, 98 bp, Homo sapiens
  chr6:50691095-50691193
  hyper
cgtggattctttcagcagctcctgaaggagtacaattggaggagcgtgggaagccttgctcttcttcctttgtcagtactcttcggattccagatgga

SEQ ID NO: 284099 - DNA, 74 bp, Homo sapiens
  chr6:50692556-50692630
  hyper
tttaaaaaaaagtggcggggttgggtggcctataatcaggttgccgagcgtgcgtgcatccatttcccattgca

SEQ ID NO: 284100 - DNA, 195 bp, Homo sapiens; identical to SEQ ID NO: 232129
  chr6:50785153-50785348
  hyper

SEQ ID NO: 284101 - DNA, 35 bp, Homo sapiens
  chr6:50789339-50789374
  hyper
tttgccagccccctcgtctgattacatctagtaat

SEQ ID NO: 284102 - DNA, 36 bp, Homo sapiens
  chr6:50789579-50789615
  hyper
tgcatctggagccccgaagaacggcagaagaaaaga

SEQ ID NO: 284103 - DNA, 105 bp, Homo sapiens
  chr6:50793882-50793987
  hyper
cactggtccagtctttaaaagggcctgcactggtccagtctttaaaaggaccagagagtgcctaggcctggaccttaaagtcacttgttccgatctcaaggacct

SEQ ID NO: 284104 - DNA, 33 bp, Homo sapiens; identical to SEQ ID NO: 232134
  chr6:50794270-50794303
  hyper

SEQ ID NO: 284105 - DNA, 33 bp, Homo sapiens; identical to SEQ ID NO: 200468
  chr6:50803771-50803804
  hyper

SEQ ID NO: 284106 - DNA, 63 bp, Homo sapiens; identical to SEQ ID NO: 200469
  chr6:50805675-50805738
  hyper

SEQ ID NO: 284107 - DNA, 198 bp, Homo sapiens; identical to SEQ ID NO: 200470
  chr6:50808433-50808631
  hyper

SEQ ID NO: 284108 - DNA, 42 bp, Homo sapiens; identical to SEQ ID NO: 200471
  chr6:50810509-50810551
  hyper

SEQ ID NO: 284109 - DNA, 211 bp, Homo sapiens; identical to SEQ ID NO: 200472
  chr6:50811605-50811816
  hyper

SEQ ID NO: 284110 - DNA, 327 bp, Homo sapiens
  chr6:50813939-50814266
  hyper
ctaccccttctccctccctcacttctcctttcatgtaggacccccgcccccttgctttccttagccaggcccgctacatttatctgataattgagttattaaaagatttggtttccttgggcctataaatcaataaacagtaggattaacgcaatagtttgccttttaagtcaagggagacgtttaaggcaagcccctttgagctttgttttcaaaccaaacaggtgagttgcagctctccccccggcccctgcactcttcagacatttggtccctgcccactcctaaacgctcagtcccaaaacaaaatagcgaaagacaggagga

SEQ ID NO: 284111 - DNA, 124 bp, Homo sapiens
  chr6:50814599-50814723
  hyper
agacctggctgctttgttttccttggccaaggaagccactttctctcaagcaattatttcatatcctacgaaaactttggtcgaatggaaaactcgaaacctcgagcttatctacacactgttc

SEQ ID NO: 284112 - DNA, 45 bp, Homo sapiens
  chr6:50817420-50817465
  hyper
agctgccttccacgcttggactttgagggcggttgtctgtcatgt

SEQ ID NO: 284113 - DNA, 61 bp, Homo sapiens
  chr6:50817757-50817818
  hyper
gggaggaactgcgcgcggtcggagggagtggataaaaaagacagggcgaaaactcattttt

SEQ ID NO: 284114 - DNA, 273 bp, Homo sapiens; identical to SEQ ID NO: 232147
  chr6:52149493-52149766
  hyper

SEQ ID NO: 284115 - DNA, 954 bp, Homo sapiens; identical to SEQ ID NO: 200474
  chr6:52226797-52227751
  hyper

SEQ ID NO: 284116 - DNA, 132 bp, Homo sapiens; identical to SEQ ID NO: 200475
  chr6:52227876-52228008
  hyper

SEQ ID NO: 284117 - DNA, 405 bp, Homo sapiens; identical to SEQ ID NO: 232149
  chr6:52284759-52285164
  hyper

SEQ ID NO: 284118 - DNA, 199 bp, Homo sapiens
  chr6:52441278-52441477
  hyper
ccatggtggcagcgcggcggttggttcgaggccaggctggggtttcagggctgcagacagagctgcaggatacgatgagtgcccaagggggcggcagagcatggcatggctggcacggcgcggagctgggggtgctgtctgggctggccggggtacaggccggaggggtacagtgcacaaagccggggtgcagataacg

SEQ ID NO: 284119 - DNA, 282 bp, Homo sapiens; identical to SEQ ID NO: 232151
  chr6:52535661-52535943
  hyper

SEQ ID NO: 284120 - DNA, 140 bp, Homo sapiens; identical to SEQ ID NO: 222868
  chr6:52859558-52859698
  hyper

SEQ ID NO: 284121 - DNA, 34 bp, Homo sapiens; identical to SEQ ID NO: 232152
  chr6:52926828-52926862
  hyper

SEQ ID NO: 284122 - DNA, 420 bp, Homo sapiens; identical to SEQ ID NO: 232153
  chr6:52929646-52930066
  hyper

SEQ ID NO: 284123 - DNA, 133 bp, Homo sapiens; identical to SEQ ID NO: 200478
  chr6:53212358-53212491
  hyper

SEQ ID NO: 284124 - DNA, 215 bp, Homo sapiens; identical to SEQ ID NO: 200479
  chr6:53213970-53214185
  hyper

SEQ ID NO: 284125 - DNA, 186 bp, Homo sapiens; identical to SEQ ID NO: 232156
  chr6:53224377-53224563
  hyper

SEQ ID NO: 284126 - DNA, 623 bp, Homo sapiens
  chr6:53408897-53409520
  hyper
taaatctctttcatattgaccgcaaaagcgaattttgagcctgtaaggtggatcatggtagttgccggtctgcagatacactaggttgaagactcgcagcacctaatgtcactttttcatgctcacgccctcccagcgcccaatccgtgtttatggaatgaaggggaaaacccaaaagaatgaatgaacaagaaaggagtctagtcaggaggatggccctggacgcggactaggcgaaagcagggacgatgctcccggggccgggaggcgctcgaggacccccgggcgcagtggagaacgcggaccgcgatagggccgggggcgtagggcaagacaaaggcagcgcgggcggccagacacgggtgcccggcggggacggggaccgcgggcgctcacctcatcgccccacttgagaacgtccttgtgccggtccttgacggcgtggtagatgtgcaggaactggaggatcccgtgccgccgcacgtggtcggcatggcgcttggtttcctcccagctcagcggcgagccctgggacagcagccccatggccgccccctcctcctcctcctcctcctccgggctgacggcggtcgcccgctccgggcgcgagacggacactcagc

SEQ ID NO: 284127 - DNA, 539 bp, Homo sapiens; identical to SEQ ID NO: 43077
  chr6:53409552-53410091
  hyper

SEQ ID NO: 284128 - DNA, 291 bp, Homo sapiens; identical to SEQ ID NO: 200482
  chr6:53659861-53660152
  hyper

SEQ ID NO: 284129 - DNA, 470 bp, Homo sapiens
  chr6:53660404-53660874
  hyper
tattcaaagtgaccggatattttgcgcgtagtcactggggctcgtgctattggagaagcgttctggactgttaagtaacttagatccatgctaggtactgacacctggcacttgtgcccggtcaggtgagaagccgggtgattcgggctgtttccatctggaagctacagagcactgcatcctccccccctccactccccggggtcgttcccccaccaagggccgggcgcgcctctcctttagtcaaggcatgtcccggaggaccttgtgacctgggcagcgctcaagcgggccgcactatctcggcatcttgggaggaatgaggaatgtgctccgtgctttatcgcgggtgggcttggccggctggcctgcggtggctgcgggggtggacgcgagatgggcgcaggggagagctgggcctggagcgctaggggcaggtgcccagatgccggccgcccgggccttgccta

SEQ ID NO: 284130 - DNA, 62 bp, Homo sapiens; identical to SEQ ID NO: 113504
  chr6:53660908-53660970
  hyper

SEQ ID NO: 284131 - DNA, 336 bp, Homo sapiens; identical to SEQ ID NO: 113506
  chr6:54711661-54711997
  hyper

SEQ ID NO: 284132 - DNA, 204 bp, Homo sapiens; identical to SEQ ID NO: 200483
  chr6:56716695-56716899
  hyper

SEQ ID NO: 284133 - DNA, 258 bp, Homo sapiens
  chr6:56818398-56818656
  hyper
ttgctaaaaccgttcgctgggcactaatatgaaatcacttaaaaggaaacatgccactttcggctaggggacagcatgttcgtcattcagtgtcctactggtttcttaacacgcatataattaatattggtactcaggaaagagaacttcttctgaccttgagcgtgcgcgctaaataaattacctcagaacgaaagtggtgcgatctcaaaacagcatctggggagaaaagagataaatgagacttcatttaactcc

SEQ ID NO: 284134 - DNA, 145 bp, Homo sapiens
  chr6:56820270-56820415
  hyper
ttgtgggggtttcctcgcactctgaagcgcgagcgccgggaagggccttccctgggaattgggatactccaggaacgggaggcccactcctctccaagcctctctaaactaggagcgctccggggtagtacgctctggtcggcag

SEQ ID NO: 284135 - DNA, 85 bp, Homo sapiens; identical to SEQ ID NO: 200485
  chr6:56820671-56820756
  hyper

SEQ ID NO: 284136 - DNA, 661 bp, Homo sapiens; identical to SEQ ID NO: 232166
  chr6:57036934-57037595
  hyper

SEQ ID NO: 284137 - DNA, 168 bp, Homo sapiens; identical to SEQ ID NO: 200487
  chr6:57086140-57086308
  hyper

SEQ ID NO: 284138 - DNA, 233 bp, Homo sapiens; identical to SEQ ID NO: 232168
  chr6:57087024-57087257
  hyper

SEQ ID NO: 284139 - DNA, 197 bp, Homo sapiens
  chr6:58149331-58149528
  hyper
cttttctaatgtttatttcacagtaacaattatgtttcacagtagcaactgtgggcagtgatacagaaagtcatgagagaacacgaaagtaaatgtaattgtacccagtaatcttgatgggacgtagtccgctgaatcgtacggttgcgtttgcagtttagtgttcctgcaagagcagatgacgaagagagctaaga

SEQ ID NO: 284140 - DNA, 52 bp, Homo sapiens; identical to SEQ ID NO: 200489
  chr6:64283088-64283140
  hyper

SEQ ID NO: 284141 - DNA, 71 bp, Homo sapiens; identical to SEQ ID NO: 232174
  chr6:64345435-64345506
  hyper

SEQ ID NO: 284142 - DNA, 220 bp, Homo sapiens
  chr6:69344103-69344323
  hyper
ttatcagacacttcgtcagccaactgtccaggaggcaaaatgactatctatgatgatagatagacagacagatagatagttagattaaaaggtggggaaacatcccttttccctttttcctttctatataatctggttttttctcttcaccccttttctcgcttcttcccaccccgtccccaaacctgttactagggaaacttgaaaaagaatcagatac

SEQ ID NO: 284143 - DNA, 294 bp, Homo sapiens; identical to SEQ ID NO: 200490
  chr6:69344649-69344943
  hyper

SEQ ID NO: 284144 - DNA, 87 bp, Homo sapiens; identical to SEQ ID NO: 200491
  chr6:69346042-69346129
  hyper

SEQ ID NO: 284145 - DNA, 135 bp, Homo sapiens; identical to SEQ ID NO: 200492
  chr6:69942708-69942843
  hyper

SEQ ID NO: 284146 - DNA, 484 bp, Homo sapiens; identical to SEQ ID NO: 232178
  chr6:70506529-70507013
  hyper

SEQ ID NO: 284147 - DNA, 586 bp, Homo sapiens; identical to SEQ ID NO: 200493
  chr6:70576373-70576959
  hyper

SEQ ID NO: 284148 - DNA, 298 bp, Homo sapiens; identical to SEQ ID NO: 200494
  chr6:70576997-70577295
  hyper

SEQ ID NO: 284149 - DNA, 566 bp, Homo sapiens
  chr6:71123138-71123704
  hyper
cggggacctgttgatcgcaggtatagccggctggcccgggctccctcgggactggggcgactgcgcatgctcgctggccgcgctgggccagtagccgagccgcggtgacgaaccggctccgcggttgcggtgtttgcggttgctgtgatggcgatgtgagggggcccggggcgggatggtgctgacccgggtcgggccgtcttcttgcagctggacaacgagctcctccgttcgacaggcgggggaagaggccgagccgggcgagaggtaacccccttactgtcccctctggctcccccggctcccgacacccacgacccctccctccgtccctcttgcccaggggccaggaaggaagcggcctcctcttcgtccgccgttcgcccgccgcggcccctcacccgactgctggcggtcggagcctggccccggccccgttgaaggtcggtggggacggcggtgcggagcgctctgagggaggcgaggggccgcggcgcgctgctctcccggtgcccgcggccgcccctgcccctgcgcgcgtccctcgacccgttcttcctgaacct

SEQ ID NO: 284150 - DNA, 304 bp, Homo sapiens; identical to SEQ ID NO: 43113
  chr6:71123746-71124050
  hyper

SEQ ID NO: 284151 - DNA, 78 bp, Homo sapiens; identical to SEQ ID NO: 232183
  chr6:71377331-71377409
  hyper

SEQ ID NO: 284152 - DNA, 54 bp, Homo sapiens; identical to SEQ ID NO: 200498
  chr6:71665452-71665506
  hyper

SEQ ID NO: 284153 - DNA, 222 bp, Homo sapiens; identical to SEQ ID NO: 200499
  chr6:71665723-71665945
  hyper

SEQ ID NO: 284154 - DNA, 159 bp, Homo sapiens
  chr6:71666986-71667145
  hyper
gggaggagcgtccccgcggggctgcacgacctcctggagggggtgatgctcgttcacctctcttcagctttgtgaaataccgcaaggtctttggagatgagccaggaaaatccattcacgtgcggaaatttgccgggctacgcgcgttgctgctgatgc

SEQ ID NO: 284155 - DNA, 977 bp, Homo sapiens; identical to SEQ ID NO: 232186
  chr6:71998102-71999079
  hyper

SEQ ID NO: 284156 - DNA, 164 bp, Homo sapiens; identical to SEQ ID NO: 200500
  chr6:72129568-72129732
  hyper

SEQ ID NO: 284157 - DNA, 75 bp, Homo sapiens; identical to SEQ ID NO: 113556
  chr6:72130646-72130721
  hyper

SEQ ID NO: 284158 - DNA, 226 bp, Homo sapiens; identical to SEQ ID NO: 200502
  chr6:72596315-72596541
  hyper

SEQ ID NO: 284159 - DNA, 183 bp, Homo sapiens; identical to SEQ ID NO: 200503
  chr6:73329601-73329784
  hyper

SEQ ID NO: 284160 - DNA, 103 bp, Homo sapiens; identical to SEQ ID NO: 200504
  chr6:73330126-73330229
  hyper

SEQ ID NO: 284161 - DNA, 55 bp, Homo sapiens; identical to SEQ ID NO: 200505
  chr6:74019358-74019413
  hyper

SEQ ID NO: 284162 - DNA, 116 bp, Homo sapiens; identical to SEQ ID NO: 200506
  chr6:74020094-74020210
  hyper

SEQ ID NO: 284163 - DNA, 134 bp, Homo sapiens
  chr6:74161043-74161177
  hyper
gtaccggttggttgtctgatcgttggatgtgtagatgaataaacgaacggtttgtcgttttacttagactaggctaccgaaaaacatgcaaaagtctaagttacttccgaagggaagtgaggggcgcgacccgg

SEQ ID NO: 284164 - DNA, 178 bp, Homo sapiens; identical to SEQ ID NO: 200507
  chr6:74161321-74161499
  hyper

SEQ ID NO: 284165 - DNA, 290 bp, Homo sapiens
  chr6:74405623-74405913
  hyper
gctctgttctccgcggccagctgggacgccgggccaggtggggccgcctgcgtttagcaactgctttctcaccccctggatttgcgatgtttgccacagcagcgagaagcgccattgtaatggggatgggaggggtggagcctccaagtcctgtctcaatttagatctctcactctgctgttaggcgcgcccatttcagattactaaactcgaattaagagggaaaaaaaatcagggaggaggtggcaagccacaccccacggtgcccgcgaacttccccggcagcggac

SEQ ID NO: 284166 - DNA, 189 bp, Homo sapiens
  chr6:74406015-74406204
  hyper
ggaacgtgggcgcgcggggggcgcgcgggcgcgcgggcctgggccgctctgcggctctgggccagggcttcggggaggtggcggctgctgtgcagcagcgggtgggaaatgccctcgcggctgcagtccccagcctggtactggcctggaggtttgaccatatgtagcttcagcgtggctctccatggg

SEQ ID NO: 284167 - DNA, 285 bp, Homo sapiens; identical to SEQ ID NO: 232195
  chr6:75911844-75912129
  hyper

SEQ ID NO: 284168 - DNA, 91 bp, Homo sapiens
  chr6:75914015-75914106
  hyper
cgagaagttaaaggcgaacaatcgacccaccgaaaagctgtgcgcagatttttttttaacagctgaactcaacgaaaacctgagtggtaac

SEQ ID NO: 284169 - DNA, 303 bp, Homo sapiens
  chr6:75914158-75914461
  hyper
aatgaatcatctcgcgccgggatatcggaacgccagccagccaagcatcccgtcaatatatgttttaaaaaagaaaatgctttctctcctttttagccaaaacattcatttgaatgcttagcaacacttcattgagcattctcagacataaatatctgaaagcggccgcccctacgtggcagcgaggactccctcacttcaccctcatgaataaaaatgagtccactggggtgggagtgggggctaagtggactcgtccccttctgccaactcgccccctcccaattccctgctggaagaacc

SEQ ID NO: 284170 - DNA, 106 bp, Homo sapiens; identical to SEQ ID NO: 200508
  chr6:75914599-75914705
  hyper

SEQ ID NO: 284171 - DNA, 143 bp, Homo sapiens; identical to SEQ ID NO: 200509
  chr6:75914738-75914881
  hyper

SEQ ID NO: 284172 - DNA, 280 bp, Homo sapiens
  chr6:75915989-75916269
  hyper
agaagggagggagcgtagagggggacagccgcagccgggttccctgccaagggaagccgcgtactccgccacttggggcggactgggatttctttaatgaagctcgggtttccctatccctgagatttctttaatgaatttttctacattaagaacaatggggaggggaccgactcccattttcggaaatgcaaggatgcgtaacccattcacccccgctcctgcggatctccatccttcatctgatatcaccacctccatcttcctccccctctgtcct

SEQ ID NO: 284173 - DNA, 206 bp, Homo sapiens; identical to SEQ ID NO: 200511
  chr6:75916810-75917016
  hyper

SEQ ID NO: 284174 - DNA, 299 bp, Homo sapiens; identical to SEQ ID NO: 232199
  chr6:75994549-75994848
  hyper

SEQ ID NO: 284175 - DNA, 86 bp, Homo sapiens; identical to SEQ ID NO: 200513
  chr6:76458864-76458950
  hyper

SEQ ID NO: 284176 - DNA, 33 bp, Homo sapiens; identical to SEQ ID NO: 232200
  chr6:76459159-76459192
  hyper

SEQ ID NO: 284177 - DNA, 432 bp, Homo sapiens; identical to SEQ ID NO: 200514
  chr6:78173264-78173696
  hyper

SEQ ID NO: 284178 - DNA, 132 bp, Homo sapiens; identical to SEQ ID NO: 200515
  chr6:78174056-78174188
  hyper

SEQ ID NO: 284179 - DNA, 124 bp, Homo sapiens; identical to SEQ ID NO: 200516
  chr6:78175791-78175915
  hyper

SEQ ID NO: 284180 - DNA, 296 bp, Homo sapiens; identical to SEQ ID NO: 200517
  chr6:78176149-78176445
  hyper

SEQ ID NO: 284181 - DNA, 94 bp, Homo sapiens; identical to SEQ ID NO: 232203
  chr6:79577181-79577275
  hyper

SEQ ID NO: 284182 - DNA, 70 bp, Homo sapiens; identical to SEQ ID NO: 200518
  chr6:79620218-79620288
  hyper

SEQ ID NO: 284183 - DNA, 526 bp, Homo sapiens; identical to SEQ ID NO: 232205
  chr6:79788062-79788588
  hyper

SEQ ID NO: 284184 - DNA, 155 bp, Homo sapiens
  chr6:80246696-80246851
  hyper
gtcttccttctcctcgcggtccctacatcctcccccatccctaatcccttcatcttccctgctttaagaaccacccgcaggcccccatccacgaacgccccttcactagctaccagacgcttcaacccagcctcacctcgcacctccacctcccc

SEQ ID NO: 284185 - DNA, 517 bp, Homo sapiens; identical to SEQ ID NO: 113601
  chr6:80246889-80247406
  hyper

SEQ ID NO: 284186 - DNA, 389 bp, Homo sapiens; identical to SEQ ID NO: 200520
  chr6:80340635-80341024
  hyper

SEQ ID NO: 284187 - DNA, 220 bp, Homo sapiens; identical to SEQ ID NO: 200521
  chr6:80341054-80341274
  hyper

SEQ ID NO: 284188 - DNA, 231 bp, Homo sapiens; identical to SEQ ID NO: 200522
  chr6:80341326-80341557
  hyper

SEQ ID NO: 284189 - DNA, 418 bp, Homo sapiens; identical to SEQ ID NO: 232208
  chr6:80487603-80488021
  hyper

SEQ ID NO: 284190 - DNA, 104 bp, Homo sapiens; identical to SEQ ID NO: 200523
  chr6:80657600-80657704
  hyper

SEQ ID NO: 284191 - DNA, 347 bp, Homo sapiens; identical to SEQ ID NO: 232210
  chr6:80714142-80714489
  hyper

SEQ ID NO: 284192 - DNA, 107 bp, Homo sapiens; identical to SEQ ID NO: 232211
  chr6:80816125-80816232
  hyper

SEQ ID NO: 284193 - DNA, 165 bp, Homo sapiens; identical to SEQ ID NO: 232212
  chr6:80816657-80816822
  hyper

SEQ ID NO: 284194 - DNA, 92 bp, Homo sapiens
  chr6:82461597-82461689
  hyper
gcgcccgtgaatcggaatggtctcgctcaggatgccgtccagccgctgcacttgctcccagttcagcacattgcagtgcgccgtagggcttt

SEQ ID NO: 284195 - DNA, 1071 bp, Homo sapiens
  chr6:82461728-82462799
  hyper
cgccgaagtcgccgccgccgaagtcgccgccgccgaagtcgccgccgccgaagtcgccgcctagggggatgtaggggctgcaggccagctcgtcctcagacatggcgaagtacccttcaccctccgccatgtagtgcccgccgagcgccacttggccctggtcagtcctaaaaagaaagggaaaggagcgcggtgaggacgcgcggcggcggagagcacgcgcggcggcggagagcagaggcccgccaggaaaagagcgccccctcccccgatagttccctgaccccgggcctcctcggagactccctcccccggcccttacagtccccagccgcgcaccgcgccccgcagagcagccccgcaccaaaagtatctctgatgcatctggaaagcgcaagcgagagtcccgtctgtgtcacctggaggcggccgccccttctaggagcgcagcgagcgagagcgaaaccgagaggcggcaacacttccaggagctgcgagcgcgctcagacagcaaatagcgacttcgtctttcccagacccctgccgcctgcgctcaccactccctccccgcgacccctcctgcgccgctgccaccccagctgcggtggtcccgaactggcggctcttgctgccacacacgctcgtgtctctggagctttagcagttgtgcggggaaaatgtcttcagtactttttttataccgggcttctctgcgcttccggggcccagagcggcacgttcgccacaccctcctcatctgcatagggcgccgccccctctgccctcccccgcccgcagggcacgcagctgactagcccagcagttagtgcgggacgactgccggtgagcgtgaggtcctgggctgtatgtgcggatactgtgtgcgcccgtagatgcgtgtatttatacatacatttaatttatgtacgccccctcccacaaatctcttttcattttccccaggaggagacactttaaatgccccaggaatcataagtggtcatcaaaaccagatcacgactaaaatcctgcaactgcagaaacttcccaaaattctcgcggactcagccc

SEQ ID NO: 284196 - DNA, 441 bp, Homo sapiens; identical to SEQ ID NO: 200525
  chr6:82462829-82463270
  hyper

SEQ ID NO: 284197 - DNA, 501 bp, Homo sapiens; identical to SEQ ID NO: 200526
  chr6:82463310-82463811
  hyper

SEQ ID NO: 284198 - DNA, 178 bp, Homo sapiens
  chr6:83073030-83073208
  hyper
aaatctgaagtttgcggcctcaagtaccactttgatggggagagcttctgaagcttccatacaacctgccgtgcctttgctgctgccgcagtagattttcagctcatttctttctgctgctgcttcgcgctgctctgtcatgcctaaatctatctcgtcactgccaaaggtgcctgaa

SEQ ID NO: 284199 - DNA, 268 bp, Homo sapiens
  chr6:83073251-83073519
  hyper
ccaaggtaaatacagtatgcaaaatgaggaaccacccaaggatgtcggggaggggggagagaaagggattccctcaccttttccggcacattcctcgttaatttccaccaggaggaggcgcgcagcccagctcccctagtctctcttcttaaatccccctacctacggctgccgaggttggccgcgcgtcgggaatctccccgacagtcctggccctcccccgccccccgggttggtttttcccagctgcggaggttgggaggttggg

SEQ ID NO: 284200 - DNA, 213 bp, Homo sapiens
  chr6:83073590-83073803
  hyper
actcagagttggttctggaggcggcggacgcggaggtgagcagtgggagcccgcggcctgggagagacccgggaggcgtcgttggggcccctccccatcctcgggtggagagtagggttggttcgggttgccactgtaccccgagtcccactgctgctttgttcccagactctcccctcctctttggagatgacttgaacccctttgagatcc

SEQ ID NO: 284201 - DNA, 682 bp, Homo sapiens; identical to SEQ ID NO: 200530
  chr6:83073835-83074517
  hyper

SEQ ID NO: 284202 - DNA, 70 bp, Homo sapiens; identical to SEQ ID NO: 200531
  chr6:83074829-83074899
  hyper

SEQ ID NO: 284203 - DNA, 215 bp, Homo sapiens; identical to SEQ ID NO: 200532
  chr6:83775565-83775780
  hyper

SEQ ID NO: 284204 - DNA, 91 bp, Homo sapiens; identical to SEQ ID NO: 232216
  chr6:83902912-83903003
  hyper

SEQ ID NO: 284205 - DNA, 196 bp, Homo sapiens; identical to SEQ ID NO: 232217
  chr6:83903545-83903741
  hyper

SEQ ID NO: 284206 - DNA, 138 bp, Homo sapiens; identical to SEQ ID NO: 232218
  chr6:84221725-84221863
  hyper

SEQ ID NO: 284207 - DNA, 71 bp, Homo sapiens; identical to SEQ ID NO: 200533
  chr6:84419415-84419486
  hyper

SEQ ID NO: 284208 - DNA, 70 bp, Homo sapiens; identical to SEQ ID NO: 200534
  chr6:84569263-84569333
  hyper

SEQ ID NO: 284209 - DNA, 157 bp, Homo sapiens; identical to SEQ ID NO: 200535
  chr6:84743222-84743379
  hyper

SEQ ID NO: 284210 - DNA, 651 bp, Homo sapiens; identical to SEQ ID NO: 232225
  chr6:84743595-84744246
  hyper

SEQ ID NO: 284211 - DNA, 102 bp, Homo sapiens; identical to SEQ ID NO: 232226
  chr6:84937361-84937463
  hyper

SEQ ID NO: 284212 - DNA, 31 bp, Homo sapiens; identical to SEQ ID NO: 200536
  chr6:85472293-85472324
  hyper

SEQ ID NO: 284213 - DNA, 164 bp, Homo sapiens; identical to SEQ ID NO: 200537
  chr6:85475698-85475862
  hyper

SEQ ID NO: 284214 - DNA, 39 bp, Homo sapiens; identical to SEQ ID NO: 200538
  chr6:85476132-85476171
  hyper

SEQ ID NO: 284215 - DNA, 191 bp, Homo sapiens; identical to SEQ ID NO: 200539
  chr6:85476714-85476905
  hyper

SEQ ID NO: 284216 - DNA, 76 bp, Homo sapiens; identical to SEQ ID NO: 200540
  chr6:85476922-85476998
  hyper

SEQ ID NO: 284217 - DNA, 121 bp, Homo sapiens
  chr6:85478297-85478418
  hyper
tgaacatcagcctacgctgagtcaccaggcagcgccgcacaaatgggctagggcttcccctttccgcgattcctgtccctactctttcccactctctttcttctctttgcacatacttttc

SEQ ID NO: 284218 - DNA, 58 bp, Homo sapiens
  chr6:85478456-85478514
  hyper
tttatcttgtacaagtttataaagcctacggtagtaaattcaggcgtcccagggctca

SEQ ID NO: 284219 - DNA, 70 bp, Homo sapiens; identical to SEQ ID NO: 232232
  chr6:85481724-85481794
  hyper

SEQ ID NO: 284220 - DNA, 243 bp, Homo sapiens
  chr6:85482158-85482401
  hyper
ggaattcgtatttccgatgaagttccaaagctgaaattaaaatccagtctgggtttctgaagctcatattgttttggacaatatctgcgttttctttcatttagttttcgttctttctggttttggtgctttttcttttcttttcttcttttttttttttttttacattgccgaagacaatctgatttacagtttgactgagagttgcatttctgtttagaaggtgaaacgtctaaatcgctt

SEQ ID NO: 284221 - DNA, 360 bp, Homo sapiens
  chr6:86159088-86159448
  hyper
agctgtccgcgcgtcgcctctgttttatcactaaggttttaattgtgaataaacaaggaactggattcgaatgatttcttagtttctgagatttttttgtctaagcatcgtagacttcgtgcgttctcaacccaacaggaagcgtcacatctcagtgagcttcggctctcacagcccgaaactgcaaggagctcctctgcccggcctctctttactcctcctctctgcccctcagctcgctcatctttcttcccgccccctctcttttccttctttggttctttgaagtgatgagctagcgcaaccacaaaccatacattccttttgtagaaaaacccgtgcctcgaatgaggcgagact

SEQ ID NO: 284222 - DNA, 269 bp, Homo sapiens; identical to SEQ ID NO: 200542
  chr6:86159509-86159778
  hyper

SEQ ID NO: 284223 - DNA, 243 bp, Homo sapiens; identical to SEQ ID NO: 200543
  chr6:86159903-86160146
  hyper

SEQ ID NO: 284224 - DNA, 1516 bp, Homo sapiens; identical to SEQ ID NO: 232236
  chr6:86302912-86304428
  hyper

SEQ ID NO: 284225 - DNA, 103 bp, Homo sapiens; identical to SEQ ID NO: 232237
  chr6:86388826-86388929
  hyper

SEQ ID NO: 284226 - DNA, 143 bp, Homo sapiens
  chr6:87646717-87646860
  hyper
ggtctgtttgccattggaaccgcgtagagaaagcgtgcaaacccgtcaactgctcccgccgttcctctccctcctcaacccaggctcgctacagaagaagggagtagggtctgcccccttgttgtatctattttccccttctc

SEQ ID NO: 284227 - DNA, 170 bp, Homo sapiens; identical to SEQ ID NO: 200546
  chr6:87646944-87647114
  hyper

SEQ ID NO: 284228 - DNA, 74 bp, Homo sapiens; identical to SEQ ID NO: 200547
  chr6:87647143-87647217
  hyper

SEQ ID NO: 284229 - DNA, 145 bp, Homo sapiens; identical to SEQ ID NO: 222892
  chr6:87832386-87832531
  hyper

SEQ ID NO: 284230 - DNA, 62 bp, Homo sapiens; identical to SEQ ID NO: 200548
  chr6:87861486-87861548
  hyper

SEQ ID NO: 284231 - DNA, 40 bp, Homo sapiens; identical to SEQ ID NO: 200549
  chr6:88032035-88032075
  hyper

SEQ ID NO: 284232 - DNA, 251 bp, Homo sapiens; identical to SEQ ID NO: 232241
  chr6:88117490-88117741
  hyper

SEQ ID NO: 284233 - DNA, 168 bp, Homo sapiens; identical to SEQ ID NO: 113664
  chr6:88182441-88182609
  hyper

SEQ ID NO: 284234 - DNA, 329 bp, Homo sapiens; identical to SEQ ID NO: 232243
  chr6:88299609-88299938
  hyper

SEQ ID NO: 284235 - DNA, 36 bp, Homo sapiens; identical to SEQ ID NO: 232244
  chr6:88410992-88411028
  hyper

SEQ ID NO: 284236 - DNA, 308 bp, Homo sapiens; identical to SEQ ID NO: 232245
  chr6:88678313-88678621
  hyper

SEQ ID NO: 284237 - DNA, 332 bp, Homo sapiens
  chr6:89827121-89827453
  hyper
ggagggttggatgcgcgcgattttatcggggcacggcgacaaaggagctgaaacgcgggcactcgctggagcgcaaaccctcccgactcccggcggggagcgacctgagctcgggagaggggcgccccgtgtcccacggcccgccggctgcggtgctgaaccgcggaaagcgacgcgggcccgggacacgatgtgcgcggcgccggggctgaaagctggccgggagggcggaggcgcgagttccgccctgggccgcggagtagtccgagggctcacacctccccaagtggcgcagcctgggcccgcggggaggctccgcgcagctcccccga

SEQ ID NO: 284238 - DNA, 244 bp, Homo sapiens
  chr6:89827501-89827745
  hyper
ccctcctccgcgcccccaacctgcagccgcggccgttcacctggtggcgtccgcgacgttcctgatgaacagggaggtgttggggggcctcgtgtagcgagacatgaccgcttcctccgttccctccgggtctgcccgcggccgctggactcgctccgtctcccgctaccgctgctaccaccacaggagctccgccggcccccggcgcgacccccacccctcggcctcagccccgccagcgcgc

SEQ ID NO: 284239 - DNA, 142 bp, Homo sapiens; identical to SEQ ID NO: 200550
  chr6:89827793-89827935
  hyper

SEQ ID NO: 284240 - DNA, 810 bp, Homo sapiens; identical to SEQ ID NO: 232250
  chr6:89855491-89856301
  hyper

SEQ ID NO: 284241 - DNA, 337 bp, Homo sapiens
  chr6:90062614-90062951
  hyper
gccgcccggcttgcgtcacccgccctcgtccgggatttgtgaagttgccctgacgtggcagtagcttcgtggcggtcggtcactacccagccgccgcccgcccggcgaagccggcttggggaggtgcaggagcgagcggcgtcctcgtcctctcgtcccggccctgcccgctgtaggcgaggtccgggacccccgggccctcgagagctcggagggggcgccgggctccggctgcaaagctgtccgcagccggctgcccgcgcgcggtcccgcagggtctgggaaaggctttgtttttagattcagttgctgttgcgaggggcgggggttaagtgag

SEQ ID NO: 284242 - DNA, 304 bp, Homo sapiens; identical to SEQ ID NO: 200552
  chr6:90121293-90121597
  hyper

SEQ ID NO: 284243 - DNA, 709 bp, Homo sapiens
  chr6:90121684-90122393
  hyper
gctgcggcttccccagcacctggctcatcgtgcccaccggccggccggcccggggacggcgggggtcccggggtgggggccaagcctcctagccggccgcccgcagcctatttctgaagcggaggtttgtctagagctcagcggggcccggcggaagcgggggccgcgcgtcccccggcgggcggcgcccaggtccgggtcccgcggttcccagcgcgcccgaagccccctcccccgccccgcccgccggcggaggagtcagccggagcgcggcagttcctcccggaggagggagagagagagagactgcgtgacccgagtcacctgacacacactgtcacatactcacatacacaccccgcacgggcgcgcgcgcgctcgcccggccgcgggcaccactcggcggggcgctgggccgaggacacacatgcacacgcacacgcacacgcacgaggagaccggggaggcgcggggcccctgcaccctcccagactcacaccgacacacgccccgtacacggggcccccgggacgccggccgtcacccaccgcggctgcgcgccaggggcccccacgcgcctctccttcacgtggtccccgcacaggcaggggagggggcgccgcacaccctcaatgtcccccccgccgtcccactcccacacgcccgcagagcgtctaccgtgggcggatgcctcctgcttacagtcctg

SEQ ID NO: 284244 - DNA, 89 bp, Homo sapiens; identical to SEQ ID NO: 200555
  chr6:90122423-90122512
  hyper

SEQ ID NO: 284245 - DNA, 267 bp, Homo sapiens; identical to SEQ ID NO: 200556
  chr6:90142635-90142902
  hyper

SEQ ID NO: 284246 - DNA, 97 bp, Homo sapiens; identical to SEQ ID NO: 232255
  chr6:90348368-90348465
  hyper

SEQ ID NO: 284247 - DNA, 149 bp, Homo sapiens; identical to SEQ ID NO: 232256
  chr6:90529581-90529730
  hyper

SEQ ID NO: 284248 - DNA, 245 bp, Homo sapiens; identical to SEQ ID NO: 232257
  chr6:90539225-90539470
  hyper

SEQ ID NO: 284249 - DNA, 1051 bp, Homo sapiens
  chr6:91005702-91006753
  hyper
gagggttaaggaggaggccgcccggcctggagctgggatcgcaggctgggggccgggacacccgggcctcgccgggccgggggcagggccgcgggtctgacagctgctgcggctcgcgcggacgcgcgcctcctgcagcccgccctccccatgcctgacttattactctctgctcctcctccctctgctgttccaaaacacccttcgacgccagcaaaatacaatgcgcctcggccgccgtaaacagccgggagggagagcacacattcggcgcggcgcggccgccggctcggctcccacccccttcccgttcctagaaaatgccataaaagcgggcagggcgcggggagggcggctgcgcgcccggcggccggggctcccttcccgcgccgtttccccacgcctccccgcccgccccgcgcgcccgctccccccgcaaacttgccccgccaccccgcccagcggcggggcccggggcccggggcccgggactcacctcgccggagaactttgcgtccttttccgcctcctcttccccgcgtcttcccggctcgcagccccctcccggcagccggcgaggtgggcagttcgtgggtcaccgaaagctcgcggaggggacgcgcatcacatggcagctcgttcccagccccccgagtgcgccgggaagggggaggggaaggggcgaggggaggccggggggaaagcgagagcggggcggcggcgggagtgggcaggcggggtggcgagggcggcggccgctcacgttagcgctgtgcgaccgcagcccgggcgtgcacggccgctgctgccgctgctgctgctgctgctgctgctgaggcggcggcggctcggcgctgtttgctccgcgccgcgcggcttgcgctctccccggaacgcccacactctcaatcgctacattgttgacattcggcgctgacgtcacccgctccccattcacaataactttacgggagccgggcagcgcacctccccggccgctggggcgcggtacgcccggcgactagcgtaagccgctccgcgaatggcgctc

SEQ ID NO: 284250 - DNA, 104 bp, Homo sapiens; identical to SEQ ID NO: 113693
  chr6:91006779-91006883
  hyper

SEQ ID NO: 284251 - DNA, 191 bp, Homo sapiens; identical to SEQ ID NO: 232259
  chr6:91297176-91297367
  hyper

SEQ ID NO: 284252 - DNA, 37 bp, Homo sapiens
  chr6:91320248-91320285
  hyper
tttgtgtagtaagccgagttctttcttgactgtctgt

SEQ ID NO: 284253 - DNA, 286 bp, Homo sapiens; identical to SEQ ID NO: 200558
  chr6:94127131-94127417
  hyper

SEQ ID NO: 284254 - DNA, 368 bp, Homo sapiens; identical to SEQ ID NO: 200559
  chr6:94127997-94128365
  hyper

SEQ ID NO: 284255 - DNA, 31 bp, Homo sapiens; identical to SEQ ID NO: 200560
  chr6:94128399-94128430
  hyper

SEQ ID NO: 284256 - DNA, 260 bp, Homo sapiens; identical to SEQ ID NO: 200561
  chr6:94128907-94129167
  hyper

SEQ ID NO: 284257 - DNA, 31 bp, Homo sapiens; identical to SEQ ID NO: 200562
  chr6:94130101-94130132
  hyper

SEQ ID NO: 284258 - DNA, 79 bp, Homo sapiens; identical to SEQ ID NO: 200563
  chr6:96463090-96463169
  hyper

SEQ ID NO: 284259 - DNA, 222 bp, Homo sapiens; identical to SEQ ID NO: 200564
  chr6:96463860-96464082
  hyper

SEQ ID NO: 284260 - DNA, 253 bp, Homo sapiens
  chr6:96464204-96464457
  hyper
gggtccagggagggtgttgctctgtggtccccaaggggatgtttgatttcaactccacctgctggcaacctgaacccctctccgtcttggggacagctgcctgcagctcgcagtcccgcctcaccttccagcccccaggctcccacactagcagcagtagatggccccgaccctctggtcaccccaaacagggtcatctctactgttactgtccctgcgttcccaccttatgccagtgcacaaacgcccctat

SEQ ID NO: 284261 - DNA, 149 bp, Homo sapiens; identical to SEQ ID NO: 232265
  chr6:96839753-96839902
  hyper

SEQ ID NO: 284262 - DNA, 118 bp, Homo sapiens; identical to SEQ ID NO: 200566
  chr6:96969409-96969527
  hyper

SEQ ID NO: 284263 - DNA, 113 bp, Homo sapiens; identical to SEQ ID NO: 200567
  chr6:97284791-97284904
  hyper

SEQ ID NO: 284264 - DNA, 126 bp, Homo sapiens; identical to SEQ ID NO: 232268
  chr6:97345804-97345930
  hyper

SEQ ID NO: 284265 - DNA, 143 bp, Homo sapiens; identical to SEQ ID NO: 232269
  chr6:97372842-97372985
  hyper

SEQ ID NO: 284266 - DNA, 151 bp, Homo sapiens; identical to SEQ ID NO: 200568
  chr6:97731282-97731433
  hyper

SEQ ID NO: 284267 - DNA, 217 bp, Homo sapiens
  chr6:99272867-99273084
  hyper
ctgcggactgccccaaggaatggaaaacctgcactcagaagccaccccccaccccgcctctgccgtatctgctaactttgctaacactccccttcccctgccttgtaagtcactatttacgaccgcgtcgactcgcgctcacgcacgcctgcccttttctccagaagcctgaaagtggctgaattcaaacactgacacgtgaaaactctattctgag

SEQ ID NO: 284268 - DNA, 208 bp, Homo sapiens; identical to SEQ ID NO: 200570
  chr6:99273114-99273322
  hyper

SEQ ID NO: 284269 - DNA, 246 bp, Homo sapiens; identical to SEQ ID NO: 200571
  chr6:99273602-99273848
  hyper

SEQ ID NO: 284270 - DNA, 126 bp, Homo sapiens; identical to SEQ ID NO: 200572
  chr6:99273901-99274027
  hyper

SEQ ID NO: 284271 - DNA, 67 bp, Homo sapiens; identical to SEQ ID NO: 232274
  chr6:99275314-99275381
  hyper

SEQ ID NO: 284272 - DNA, 211 bp, Homo sapiens; identical to SEQ ID NO: 200573
  chr6:99275630-99275841
  hyper

SEQ ID NO: 284273 - DNA, 50 bp, Homo sapiens; identical to SEQ ID NO: 200574
  chr6:99276008-99276058
  hyper

SEQ ID NO: 284274 - DNA, 121 bp, Homo sapiens; identical to SEQ ID NO: 200575
  chr6:99276259-99276380
  hyper

SEQ ID NO: 284275 - DNA, 274 bp, Homo sapiens; identical to SEQ ID NO: 200576
  chr6:99276430-99276704
  hyper

SEQ ID NO: 284276 - DNA, 399 bp, Homo sapiens; identical to SEQ ID NO: 200577
  chr6:99276781-99277180
  hyper

SEQ ID NO: 284277 - DNA, 252 bp, Homo sapiens; identical to SEQ ID NO: 200578
  chr6:99279098-99279350
  hyper

SEQ ID NO: 284278 - DNA, 354 bp, Homo sapiens
  chr6:99281492-99281846
  hyper
agcactccggcagcctcgcacaagacggagcccacgcaggcttctagttttctaaaccaaaaactgcacgcgccggcgtgtgaatctgacggagagacttttagagttttgtttggttttcagttcagaccgctacgctgtcagagcaagcaactccgagccttgatgggaatgacttacaagccgcggtgcgggctgagcctgcctctctcggggttctttccccaagggagtgggagacaattgggcctggaacctaaaaggaagagagcctgtgctagccgcggggtagaggggaaggagaagagctttgggccgaagtgtccgcacaccctggagcaagagacacttgtg

SEQ ID NO: 284279 - DNA, 478 bp, Homo sapiens
  chr6:99282053-99282531
  hyper
ctgcctcccgccccccaccccaatccaagtcttccaagtgtctgtggccgataagagcaccgggaccgcccccctgccggtcttctctgcctgggagacagatggggggcggggcccatccgagagagggcggaggaggccccgggtgaggaagaagcgggggggtgagaactgagagaatctgaatcgggaggcgaaggggacggggaggagggctaggaggactccgagcccgggggagggggagggagtagctctgcgccaatcagtggcgccggcctgggaggttgctagcggtatccacgtaaatcaaagggcgcggagccaatgggagggggcggagggggcggggcccaggcgcgtgccgctgcgagccggcgctgccaagagagcgggagagagctggagagagcagggagaggggggagcgccgagctagtcagagagtgagcgagagcgagaaggagggagaggagga

SEQ ID NO: 284280 - DNA, 206 bp, Homo sapiens
  chr6:99282572-99282778
  hyper
cagcagcagtaatagcaggagcagcaacagaaggcgtcggagcgggcgtcggagctgcccgctgtgggagagagaggagacagaaagagcgagcgaggagagggagcccgaggcgaaaaagtaactgtcaaatgcgcggctcctttaaccggagcgctcagtccggctccgagagtcatggcgaccgcagcgtctaaccactacag

SEQ ID NO: 284281 - DNA, 38 bp, Homo sapiens; identical to SEQ ID NO: 200580
  chr6:99283080-99283118
  hyper

SEQ ID NO: 284282 - DNA, 161 bp, Homo sapiens; identical to SEQ ID NO: 200581
  chr6:99283178-99283339
  hyper

SEQ ID NO: 284283 - DNA, 82 bp, Homo sapiens; identical to SEQ ID NO: 5009
  chr6:99290709-99290791
  hyper

SEQ ID NO: 284284 - DNA, 80 bp, Homo sapiens; identical to SEQ ID NO: 200583
  chr6:99292123-99292203
  hyper

SEQ ID NO: 284285 - DNA, 137 bp, Homo sapiens; identical to SEQ ID NO: 200584
  chr6:99292521-99292658
  hyper

SEQ ID NO: 284286 - DNA, 569 bp, Homo sapiens; identical to SEQ ID NO: 200585
  chr6:99292688-99293257
  hyper

SEQ ID NO: 284287 - DNA, 345 bp, Homo sapiens; identical to SEQ ID NO: 200586
  chr6:99293287-99293632
  hyper

SEQ ID NO: 284288 - DNA, 183 bp, Homo sapiens; identical to SEQ ID NO: 200587
  chr6:99872772-99872955
  hyper

SEQ ID NO: 284289 - DNA, 355 bp, Homo sapiens; identical to SEQ ID NO: 232286
  chr6:99873214-99873569
  hyper

SEQ ID NO: 284290 - DNA, 66 bp, Homo sapiens; identical to SEQ ID NO: 200588
  chr6:99962859-99962925
  hyper

SEQ ID NO: 284291 - DNA, 219 bp, Homo sapiens; identical to SEQ ID NO: 232287
  chr6:99963448-99963667
  hyper

SEQ ID NO: 284292 - DNA, 247 bp, Homo sapiens; identical to SEQ ID NO: 232288
  chr6:100016525-100016772
  hyper

SEQ ID NO: 284293 - DNA, 182 bp, Homo sapiens
  chr6:100036480-100036662
  hyper
gagtagagaagtaacgactacactgcgcttcctttggagagagacactggagaactaaaaccgacccaagcgctaagcgatctgcctaatagagggaacgccagctgagaccagcgcaaggcgggcgctgggtggcgtgcgcgactgcaaagtctggcatgcccaggttctgctccttgggc

SEQ ID NO: 284294 - DNA, 227 bp, Homo sapiens
  chr6:100036732-100036959
  hyper
ccctgaggatgcgccccaggcgttctgccctggctcccagccgcctcccggtgctccggggttcggcctcacacacctgtcgaccgcgtcggcccagctgcggcccaagcctgtgggactccggggagcgaggcgccccctgctccaggctgggaaccagaaatgcagcagggcctcaaaaagaaacaaaattctttccctcggggttgctgctgccgcacaacctt

SEQ ID NO: 284295 - DNA, 118 bp, Homo sapiens
  chr6:100039474-100039592
  hyper
tcgcaagggggctgaagagccaaatggggaaactgatggagcctcacaagtttattcctttcccacgtctgtgtttgtctaagggtgctttctgtgcggctttctgaacttgagcatc

SEQ ID NO: 284296 - DNA, 229 bp, Homo sapiens
  chr6:100050525-100050754
  hyper
agtttctccatgcaatctttataaatctcccctggaggagaagtgtccgagcgggtggaagtctgaacacaatgcaacctgagaatttctgtcactctctgcatatgctcctaagtgctttaatcccaattaggggcggctgacacacggtcctattcattcccatcagctcttgaatacatttgcctagaaatgaacttcacaaatagaggagctcctaaatgtgccc

SEQ ID NO: 284297 - DNA, 102 bp, Homo sapiens
  chr6:100052347-100052449
  hyper
agtctctttcttctcgcggggctgggaaccagccacaattggctatattaataaataactttcctcacagtcggcctttacatggtcctattgataaaattg

SEQ ID NO: 284298 - DNA, 167 bp, Homo sapiens
  chr6:100054672-100054839
  hyper
ctctgcagctgcttcgcagcgcaactctctcaccaaactccgcgcccttgcgctagcggtgccaaaaggctcccgccccgattgaaaaggcgcagtgcatgcccgcccgcgtcactccgcgggcggaggacgcacgtcggggcgcggctctctggctagcgcgcagc

SEQ ID NO: 284299 - DNA, 227 bp, Homo sapiens
  chr6:100055831-100056058
  hyper
cgtcccaggagccaaaggtcggcaaacagcgaccgggaaatgaaggcagaagtctggggtagaagaaaggactttggcttccttggctttagcttgccttgcttggagctttctagtaaaaagctccggtgtccagccagcgggacttgcacctcgctcctcctgcaatcacgccccccactacagtctaaagcggggtttggtgcccaccgcgcattcctctttaa

SEQ ID NO: 284300 - DNA, 400 bp, Homo sapiens; identical to SEQ ID NO: 232299
  chr6:100676760-100677160
  hyper

SEQ ID NO: 284301 - DNA, 67 bp, Homo sapiens; identical to SEQ ID NO: 232301
  chr6:100902142-100902209
  hyper

SEQ ID NO: 284302 - DNA, 157 bp, Homo sapiens
  chr6:100902484-100902641
  hyper
ttgagactcattcaacttttctactttccaggtactgtattctattaacaaagaccctctctttctctccttggtgtttccccgttaagatctttggaggctttgccgcaaactttctctggtgatgcccaaaaaaataaaacgctccggactcttg

SEQ ID NO: 284303 - DNA, 47 bp, Homo sapiens
  chr6:100905736-100905783
  hyper
tgtgtgcctgcactcggcagtgccctgatctctcctgcctgctgatc

SEQ ID NO: 284304 - DNA, 268 bp, Homo sapiens
  chr6:100911729-100911997
  hyper
ttgctcttcagtctcgcggcatttaaggtatctccgagcccctttgggaagagcaggaaccccagacaactctttcaaggccctgtgaagacaacagcatcagagcataagagatcagcggctccacaagtactcacacactcgtcccaattccaaaaacacggccggaaagggcctcagtgcgcctagccaggcgttttgggtttgtttttaaagaaacgggtaaatcggcagcgagacagccccctgcaaataatgctggcattcc

SEQ ID NO: 284305 - DNA, 41 bp, Homo sapiens; identical to SEQ ID NO: 113780
  chr6:100913285-100913326
  hyper

SEQ ID NO: 284306 - DNA, 125 bp, Homo sapiens; identical to SEQ ID NO: 200593
  chr6:101329394-101329519
  hyper

SEQ ID NO: 284307 - DNA, 226 bp, Homo sapiens
  chr6:101840315-101840541
  hyper
cttgagcccagtgcgcctggcctgttcccgcttagcctcacttaaatctcctcgcgaatctgagctggccaacttcctctgggggaaactgctaaactcagctccagttaatattgtagggctgaggataaaatagcaacggttttgaatagatgttgacttttccgacccagaggagcggaactcagggattgtttgcaaaagctaatcgtttccacagtgaagc

SEQ ID NO: 284308 - DNA, 192 bp, Homo sapiens
  chr6:101841974-101842166
  hyper
cataaaatgatttaagaagtggacgtgtcaggaagtggcctcagctacggggactcacgcgaggcgaagagaatgagacagatggcaagaagctgtgtggctgccggcgggtctgacgaactccccatccctccttctgcccacccatccttccattaaccctactccttagttctgcgctgaggaagtata

SEQ ID NO: 284309 - DNA, 90 bp, Homo sapiens
  chr6:101846692-101846782
  hyper
taatcttggcttcacgtcagaagctgtgcagcagtgcagtagaatagggcctggcaaaacctttgctagcaaagcgccttttgtgccggg

SEQ ID NO: 284310 - DNA, 273 bp, Homo sapiens
  chr6:101846865-101847138
  hyper
cgcggccggacattgtgggtgtgcgtgctggatttctcccggatgctctccgactaacatggatgtcccaccattccttgcagtggaaggttgttccttggcgcagtgagtgaagaacatgcagcgattgctaatgggtttgggaagcggagactccttcctctctctatgaccatgccgtgatcgtgtctgcggtcaccactcgacgcatcctcatttctacccgaacccaggagccgaacgctagatcggggaagtgggtgccgtgcgtgt

SEQ ID NO: 284311 - DNA, 239 bp, Homo sapiens; identical to SEQ ID NO: 113793
  chr6:101847638-101847877
  hyper

SEQ ID NO: 284312 - DNA, 233 bp, Homo sapiens
  chr6:101849705-101849938
  hyper
agcttggagttgcacgtggcgcagctgccccagtggtggagagacccgccgcctctgctggggaggcagcatccagtgtcccttccatcccccacccttggcgtggctaggcgccggcagccgccaggcgcctccgccgcggcgctatggcaacggcggagcccgcccaggcggccaccccagccccccttccccgctagttaaggctctgtgttatccttccccttgctccc

SEQ ID NO: 284313 - DNA, 200 bp, Homo sapiens
  chr6:101850275-101850475
  hyper
tcccccttaacctccagcctcagccgactcccacttggctgcacaggctggcctgctcctctgcagccgctcagcaaacatctctgagaaaaggtatccggagcaccgaccctagggtgctgccccgaggctctatggcagcgacctgagggtcaaccaagggtcacctccaggcaggcgggcgagcccctgacattgag

SEQ ID NO: 284314 - DNA, 56 bp, Homo sapiens; identical to SEQ ID NO: 43308
  chr6:101850938-101850994
  hyper

SEQ ID NO: 284315 - DNA, 59 bp, Homo sapiens; identical to SEQ ID NO: 222906
  chr6:105307082-105307141
  hyper

SEQ ID NO: 284316 - DNA, 100 bp, Homo sapiens; identical to SEQ ID NO: 232315
  chr6:105307822-105307922
  hyper

SEQ ID NO: 284317 - DNA, 62 bp, Homo sapiens; identical to SEQ ID NO: 232316
  chr6:105388540-105388602
  hyper

SEQ ID NO: 284318 - DNA, 73 bp, Homo sapiens
  chr6:105389710-105389783
  hyper
gatttgtactccaaaaactttttttaaaaattgcacgttggtaaatattgagtgttttcgagtaaaatctaac

SEQ ID NO: 284319 - DNA, 203 bp, Homo sapiens
  chr6:105404674-105404877
  hyper
gactgcctttttttctaaatctatgattcacaaggtccctccattgtgtttaagtagaagcacgaaatcagcattctgatttatcctaaagaagcgttccaaattgtctttaagataacatgtttgagtttttcgtgttcattcataaattattttgatgtcagcatagatgaaatggcgattggttatctcttcctcttgcc

SEQ ID NO: 284320 - DNA, 140 bp, Homo sapiens; identical to SEQ ID NO: 200597
  chr6:105627228-105627368
  hyper

SEQ ID NO: 284321 - DNA, 155 bp, Homo sapiens; identical to SEQ ID NO: 200598
  chr6:105628083-105628238
  hyper

SEQ ID NO: 284322 - DNA, 82 bp, Homo sapiens; identical to SEQ ID NO: 200599
  chr6:106443120-106443202
  hyper

SEQ ID NO: 284323 - DNA, 351 bp, Homo sapiens
  chr6:106533694-106534045
  hyper
gttagcaggagaaacggaatgttacaacttttggggcggggggcggggaaacgtgcgttacatacacaacagcttgaggaccagacagctccactgtattacactagctgcaaaaacaatttaacttgctcttttgaagtaagatttgtgtcttttgtacctggggatttgagctgagaaatcagaaactgtgtaggtaaattttaagtttccttaatttaaggaacgtgcgccccctaattctgccgcgccaggaaggagggcgatctggagtgtttagaatacaatagagcccaagtaagcgttgaggttaagtgccttcaaagggaagtaagaagattccaagtcaat

SEQ ID NO: 284324 - DNA, 409 bp, Homo sapiens; identical to SEQ ID NO: 200601
  chr6:106534075-106534484
  hyper

SEQ ID NO: 284325 - DNA, 245 bp, Homo sapiens
  chr6:106808610-106808855
  hyper
tgggtgctggttctgcaacccgcggccgtccccccgcatccgcgacgagggggcggggtcccacggcgcgctgagaaaggcgggcgagctggcgctcaggtgtgttcttccatagggcccgggcggcagagaggaccgcgtcccggcagtcggagcgggaggaggacaagacgatgccgctgtccccgccagcccagggcgaccccggggagcccagcccgtgcaggccccctaagaagcacacc

SEQ ID NO: 284326 - DNA, 134 bp, Homo sapiens; identical to SEQ ID NO: 200602
  chr6:106809184-106809318
  hyper

SEQ ID NO: 284327 - DNA, 115 bp, Homo sapiens; identical to SEQ ID NO: 200603
  chr6:106958125-106958240
  hyper

SEQ ID NO: 284328 - DNA, 425 bp, Homo sapiens; identical to SEQ ID NO: 200604
  chr6:106958337-106958762
  hyper

SEQ ID NO: 284329 - DNA, 333 bp, Homo sapiens; identical to SEQ ID NO: 200605
  chr6:106959606-106959939
  hyper

SEQ ID NO: 284330 - DNA, 262 bp, Homo sapiens; identical to SEQ ID NO: 200606
  chr6:106960046-106960308
  hyper

SEQ ID NO: 284331 - DNA, 156 bp, Homo sapiens; identical to SEQ ID NO: 200607
  chr6:106961023-106961179
  hyper

SEQ ID NO: 284332 - DNA, 66 bp, Homo sapiens; identical to SEQ ID NO: 232332
  chr6:107077423-107077489
  hyper

SEQ ID NO: 284333 - DNA, 74 bp, Homo sapiens; identical to SEQ ID NO: 200608
  chr6:107780253-107780327
  hyper

SEQ ID NO: 284334 - DNA, 314 bp, Homo sapiens; identical to SEQ ID NO: 200609
  chr6:107810308-107810622
  hyper

SEQ ID NO: 284335 - DNA, 436 bp, Homo sapiens
  chr6:107810665-107811101
  hyper
gggcggggcgcggggacctctccaaggggtctccagcctccgcgcactctgcggtggcccccggagggggaaactattctggcagctcagtggggggaagctcgtccgggctgtggtttcctttccccgagaccccagcgttgcacccccgaggcggcaggctcagtcaaccctccccgggggacggcggccctctagccaggcgacctcaggtctcgcgacctcccgccgcccaaccttctcctttcacccccattcatttttcctcagcggctcctaggacgggctcaaaaaccaactccacacgcaacccagcccacctcgcggagctgagaagcagggctgggttccgagcgggcgccggcgcccctggcgtgtggcggggaggtggcggccgcggggggcgccgcgagccgcccgtgcccgccgcggatga

SEQ ID NO: 284336 - DNA, 112 bp, Homo sapiens; identical to SEQ ID NO: 232336
  chr6:108169775-108169887
  hyper

SEQ ID NO: 284337 - DNA, 58 bp, Homo sapiens; identical to SEQ ID NO: 232337
  chr6:108396125-108396183
  hyper

SEQ ID NO: 284338 - DNA, 93 bp, Homo sapiens
  chr6:108434832-108434925
  hyper
cttccaccaggggtcggctttgtttcttttttccgagactgatgcggctcccctactgccagagatcttagtccagaaacagccttttttggg

SEQ ID NO: 284339 - DNA, 104 bp, Homo sapiens
  chr6:108435263-108435367
  hyper
gcttgggtcagagcccaggaggtggcgtggtggtggtggtggacgggcctgagcgtctcagccctgacggtctaggccaggtttgtccgcggggccaagactca

SEQ ID NO: 284340 - DNA, 85 bp, Homo sapiens
  chr6:108435949-108436034
  hyper
ccagaataatcctggcggtttagtcatcattcctaataacaaggatgttgctaagaacagaaattttacatgattttcatacatt

SEQ ID NO: 284341 - DNA, 349 bp, Homo sapiens
  chr6:108436829-108437178
  hyper
ggccgggtaatgcactgatcgagggtgaggagggatgtttcatagccttttccgacatacctcacgacaaaacacctttcactctctatgagcaaaggaaagaagaaatgtcccacaccctctattttgacttcttgggaaacacaatgcctctcaaattgggcctgcgagaaaggtgtgacccgggagggttgtggggtcccgggaccttggccgggtgtcggtgacgggactgcctgaggccagaagataggttctaggtctcagtccacctggtgctggacgtcgaggaacccaaaactgtccactggaggcgccctgacgctttggtcaacgagggctgcttctg

SEQ ID NO: 284342 - DNA, 179 bp, Homo sapiens
  chr6:108438577-108438756
  hyper
aaagcacgcgcaggggtgtgcctgggtgcgcaggagtatgtgtgtgtgtgtgtgtgtttgtgtatgcgtgtgcaggtgagtccagctgtcgtgtaaatgtgactctacataagcttgttgctgtgtaaatgtgttttttcttggtataggcacaaacgtgtgaacgttggtctaaatgg

SEQ ID NO: 284343 - DNA, 178 bp, Homo sapiens; identical to SEQ ID NO: 222913
  chr6:108455183-108455361
  hyper

SEQ ID NO: 284344 - DNA, 195 bp, Homo sapiens
  chr6:108478326-108478521
  hyper
ccccatactgaccgcggtccctcacctgctgactgattgacttataaatctgccccccacccacttgtctgtccattgaaggcaaattcgccatcgggaacacagtagtttctcaataactatctaatgcatggccacccttcccaggatttagaatatcaaagggacgtgttctttcctcccaaatcacctgcc

SEQ ID NO: 284345 - DNA, 255 bp, Homo sapiens
  chr6:108478551-108478806
  hyper
tcacctcggtccggccaccacctcatcccgcttcttcgcggcttccaggcctcgggctgggatctcagcccctgcctgtaggtgcggcccagagggtgcgacacgcgtcggagcggggcagcggaggaggggacagggacgcggcagccacacccgcatctctttcccctctcgggcatccccgagggcccttctgcctccagttccttgagcccccgaagccccccatgcggcaagagcgagtcgcaggaacaa

SEQ ID NO: 284346 - DNA, 64 bp, Homo sapiens; identical to SEQ ID NO: 200612
  chr6:108484808-108484872
  hyper

SEQ ID NO: 284347 - DNA, 39 bp, Homo sapiens; identical to SEQ ID NO: 200613
  chr6:108487482-108487521
  hyper

SEQ ID NO: 284348 - DNA, 216 bp, Homo sapiens
  chr6:108491987-108492203
  hyper
cccgaaccactttgcggagaaaataattttttcctaaaagaaataatttctctaaagcgactcaccaagcattttttaaataggtaaagcgaaagttggccaattaccactacccttattatcattaataatccaagtattagcattacaataataatcctaataataacaccgcccggcggagctcagagaaaactcgattgccttccagctgcc

SEQ ID NO: 284349 - DNA, 83 bp, Homo sapiens; identical to SEQ ID NO: 232350
  chr6:108492638-108492721
  hyper

SEQ ID NO: 284350 - DNA, 159 bp, Homo sapiens; identical to SEQ ID NO: 200614
  chr6:108496966-108497125
  hyper

SEQ ID NO: 284351 - DNA, 106 bp, Homo sapiens; identical to SEQ ID NO: 200615
  chr6:108582547-108582653
  hyper

SEQ ID NO: 284352 - DNA, 35 bp, Homo sapiens; identical to SEQ ID NO: 232354
  chr6:108881856-108881891
  hyper

SEQ ID NO: 284353 - DNA, 183 bp, Homo sapiens; identical to SEQ ID NO: 200616
  chr6:108882164-108882347
  hyper

SEQ ID NO: 284354 - DNA, 75 bp, Homo sapiens; identical to SEQ ID NO: 43356
  chr6:108882975-108883050
  hyper

SEQ ID NO: 284355 - DNA, 59 bp, Homo sapiens; identical to SEQ ID NO: 232356
  chr6:109169455-109169514
  hyper

SEQ ID NO: 284356 - DNA, 170 bp, Homo sapiens
  chr6:109330988-109331158
  hyper
ggccgcgaggtgagcgtgcactgtcaggaaggtgcagcacgagtcttcgggcttcagggacaggggaatctgccccctacacccctgctcggccatttacctagaaccaaacagcagccaacctcgagactgattctgacagcaccaggagtaatgaagttctctaaatt

SEQ ID NO: 284357 - DNA, 241 bp, Homo sapiens; identical to SEQ ID NO: 113875
  chr6:109331216-109331457
  hyper

SEQ ID NO: 284358 - DNA, 34 bp, Homo sapiens; identical to SEQ ID NO: 232358
  chr6:109416223-109416257
  hyper

SEQ ID NO: 284359 - DNA, 241 bp, Homo sapiens; identical to SEQ ID NO: 232359
  chr6:109703795-109704036
  hyper

SEQ ID NO: 284360 - DNA, 53 bp, Homo sapiens; identical to SEQ ID NO: 200618
  chr6:109776898-109776951
  hyper

SEQ ID NO: 284361 - DNA, 429 bp, Homo sapiens; identical to SEQ ID NO: 200619
  chr6:109777177-109777606
  hyper

SEQ ID NO: 284362 - DNA, 320 bp, Homo sapiens; identical to SEQ ID NO: 232362
  chr6:110012081-110012401
  hyper

SEQ ID NO: 284363 - DNA, 60 bp, Homo sapiens; identical to SEQ ID NO: 200621
  chr6:110500677-110500737
  hyper

SEQ ID NO: 284364 - DNA, 95 bp, Homo sapiens; identical to SEQ ID NO: 232364
  chr6:110501273-110501368
  hyper

SEQ ID NO: 284365 - DNA, 125 bp, Homo sapiens; identical to SEQ ID NO: 232365
  chr6:110501596-110501721
  hyper

SEQ ID NO: 284366 - DNA, 126 bp, Homo sapiens
  chr6:111136354-111136480
  hyper
tagaggcacgggacgcgggggccgccgccgctcagtccctcctcctcctccccccgcgaccgccgctccacttctccaacagccgcctctcgcgcgcgcgcgcgcgccgcccgccgcccgccgctc

SEQ ID NO: 284367 - DNA, 40 bp, Homo sapiens; identical to SEQ ID NO: 232368
  chr6:111195962-111196002
  hyper

SEQ ID NO: 284368 - DNA, 585 bp, Homo sapiens
  chr6:111408731-111409316
  hyper
gaggcttcagtgtcgatccccgaggtgttcgcgcgcgccagctgtcctcgcggccgcctgcgcgctggccgcctgcgcgctgccagcccgcccgcccgccaggggctccgccgccctcgcctcggcctcgttagcccgccaggagccccgcagctcctccgggagcccgctggtaactcgcgtccctcgcgcttctccggcgcctgaggggcccgcctcgggccatggtgctctcccaggaggagccggactccgcgcggggcacgagcgaggcgcagccgctcggccccgcgcccacgggggccgctccgccgcccggcccgggaccctcggacagccccgaggcggctgtcgagaaggtggaggtggagctggcggggccggcgaccgcggagccccatgagccccccgaaccccccgagggcggctggggctggctggtgatgctggcggccatgtggtgcaacgggtcggtgttcggcatccagaacgcttgcggggtgctcttcgtgtccatgctggaaaccttcggctccaaagacgatgacaagatggtctttaagacaggtgaggcgcggcgcccgc

SEQ ID NO: 284369 - DNA, 273 bp, Homo sapiens; identical to SEQ ID NO: 200623
  chr6:111409368-111409641
  hyper

SEQ ID NO: 284370 - DNA, 48 bp, Homo sapiens; identical to SEQ ID NO: 232370
  chr6:111580350-111580398
  hyper

SEQ ID NO: 284371 - DNA, 211 bp, Homo sapiens; identical to SEQ ID NO: 232371
  chr6:111580690-111580901
  hyper

SEQ ID NO: 284372 - DNA, 89 bp, Homo sapiens; identical to SEQ ID NO: 200624
  chr6:111804030-111804119
  hyper

SEQ ID NO: 284373 - DNA, 40 bp, Homo sapiens; identical to SEQ ID NO: 232373
  chr6:111927298-111927338
  hyper

SEQ ID NO: 284374 - DNA, 951 bp, Homo sapiens; identical to SEQ ID NO: 232374
  chr6:112193850-112194801
  hyper

SEQ ID NO: 284375 - DNA, 765 bp, Homo sapiens; identical to SEQ ID NO: 232375
  chr6:114176477-114177242
  hyper

SEQ ID NO: 284376 - DNA, 100 bp, Homo sapiens
  chr6:114177462-114177562
  hyper
ttctccttagaactgcaatccggtttagaatgtcatcgttgctgctgcctcccttcctttcaggagcacattcgcctgcgtgcgcactcacacacacgtt

SEQ ID NO: 284377 - DNA, 112 bp, Homo sapiens
  chr6:114177615-114177727
  hyper
cgaataacatcccaactgtaaatatggattcgtctactcgaggctgtgtctcatttcaccatagaggaaaattatgtcatttaaaacagtgataaaacgcgaagagtttcga

SEQ ID NO: 284378 - DNA, 31 bp, Homo sapiens; identical to SEQ ID NO: 232377
  chr6:114178491-114178522
  hyper

SEQ ID NO: 284379 - DNA, 52 bp, Homo sapiens; identical to SEQ ID NO: 200626
  chr6:114194490-114194542
  hyper

SEQ ID NO: 284380 - DNA, 39 bp, Homo sapiens; identical to SEQ ID NO: 232379
  chr6:114292435-114292474
  hyper

SEQ ID NO: 284381 - DNA, 199 bp, Homo sapiens; identical to SEQ ID NO: 200627
  chr6:114662113-114662312
  hyper

SEQ ID NO: 284382 - DNA, 404 bp, Homo sapiens
  chr6:114662599-114663003
  hyper
caccttaagctggacgctccttgcaggttgccctaaaccaaggtggtcgcccaagtaacaggagcaggagtctcagcgctccagtgagtagcgacagcgacctctcagacttgtttgtagtaacagtatgaccacccttcgactgcatccatcccgcgcgcgcgcgcgcgtgtgtgttgggtgggaagagatgcataaagtggggctgtgaggggtgtggggggggccagctgggaagagaaaaccccacccacatgttaacttagcctttgcctgttctttgcctgccctctgcctgtcctctgctggggcctcgcaggcccccactgtcccaaagctgccctcgcgctccaaacagctccacagccaccccagaagtgaccgaacgcgaacccctaaactct

SEQ ID NO: 284383 - DNA, 121 bp, Homo sapiens; identical to SEQ ID NO: 232383
  chr6:116421722-116421843
  hyper

SEQ ID NO: 284384 - DNA, 57 bp, Homo sapiens; identical to SEQ ID NO: 232384
  chr6:116575297-116575354
  hyper

SEQ ID NO: 284385 - DNA, 94 bp, Homo sapiens; identical to SEQ ID NO: 232385
  chr6:116691812-116691906
  hyper

SEQ ID NO: 284386 - DNA, 203 bp, Homo sapiens; identical to SEQ ID NO: 232386
  chr6:116692734-116692937
  hyper

SEQ ID NO: 284387 - DNA, 53 bp, Homo sapiens
  chr6:116938062-116938115
  hyper
tctccttctcccctggctccggccagacaagacctcgcggcaccacctcagtc

SEQ ID NO: 284388 - DNA, 114 bp, Homo sapiens; identical to SEQ ID NO: 232388
  chr6:117002085-117002199
  hyper

SEQ ID NO: 284389 - DNA, 40 bp, Homo sapiens
  chr6:117086156-117086196
  hyper
gtgtgggtaaactccgtgtgtggtgggtgatattgcgaag

SEQ ID NO: 284390 - DNA, 44 bp, Homo sapiens; identical to SEQ ID NO: 113942
  chr6:117086902-117086946
  hyper

SEQ ID NO: 284391 - DNA, 351 bp, Homo sapiens
  chr6:117197786-117198137
  hyper
ccactgtgcaccctcgagcaaagcagtgtgtgacgagatgggatcttccctcaaatgctgagaagagccctcgccaatccctcggaaggttcccagaataaaaagcccggtccctgctgtgcaaagactgagcggtactccggtgtactttttccctgtcccaggcgtgcagagtccacgccgcgcggccaggtgccccaatagtgtacctgaaagtagggatggggccagttacagctgcactttccctgcagaagacagtgagccttcccgggatctttctgggagctctgagtgtgaaaacggtcctccggccagcgcaggttgagagaacgggaaggagggggaagc

SEQ ID NO: 284392 - DNA, 205 bp, Homo sapiens
  chr6:117198339-117198544
  hyper
cggccccgggtcccagccccgccccgccccgccccgggctggggctccgctggggaaccggccgagcggcgcgcgcggaggtgtccggcggccaggaggatggccaaggtcccggagctggaagacaccttcctgcaggcgcagcctgcgccccaactgtccccggggatccaggaagactgctgtgtgcagctcctgggcaagg

SEQ ID NO: 284393 - DNA, 184 bp, Homo sapiens; identical to SEQ ID NO: 200630
  chr6:117198574-117198758
  hyper

SEQ ID NO: 284394 - DNA, 126 bp, Homo sapiens
  chr6:117585720-117585846
  hyper
tccaaaatgaaacataccatcgcagctggtattaccggctgaataggcagcaaaagacctctctgtgtacgggtcctagtatgcttcttcttagcgccaacgagtccttgtccccaaagttgccaa

SEQ ID NO: 284395 - DNA, 166 bp, Homo sapiens
  chr6:117592207-117592373
  hyper
gggcctcagcgtggactcaggtaagcagaggaagaagtttggtctccgcggagccgctcggccccgtacccgaccctgggctgtgcctagaccccttaatcctccttggagaccttgaattctgtggcccaaggatctgcatgccacggtcgtgtttccactgata

SEQ ID NO: 284396 - DNA, 821 bp, Homo sapiens
  chr6:117803613-117804434
  hyper
aaggcaaggaaggagcgcagcagggcgcgccagatacgtggaggggagcgcgggcggcgcctcgctcgcctccggcttcgccgtcggtcactgcctgggaacgcgacttcctcctctaggggccgacgtgcggggcggggcggggccgggcgggagacgcccccgcagggctgggctgaaagccgccccaatgggattcggtgcggggcagcgactgcgccccgtcccggcgccgcgctcgtccgcagaggaggcggcccggcccgggcagctgcggctcgggatccgtcgaggggaggccgagcttgccaagctggcgcccagcggggtcatggtgcccggcgcccgcggcggcggcgcactggcgcgggctgccgggcggggcctcctggctttgctgctcgcggtctccgccccgctccggctgcaggcggaggagctgggtgagtggagcgcgtccggctggcggcgggacccgaggcgccaggggcgggctgagggctgcggggcgggccgggccgggccgagggctacggggcgggccgggcctggggggacggagcgcgggaggaagtcgggctcgccgcctgccatccgcggagtccggctctacccgcggggctgggggtgaagtaggttactgcattccttgtcgctcccccaccaaactccttccttcccccaaaaccagagaattaacctggcgtctctgcactttctctccgccgccccccagcccatttcacttagtttccagacttcctgactctgctggccccgtgagaagtgacctgaccccgagggtcgccttaggggacagc

SEQ ID NO: 284397 - DNA, 298 bp, Homo sapiens; identical to SEQ ID NO: 43413
  chr6:117804487-117804785
  hyper

SEQ ID NO: 284398 - DNA, 148 bp, Homo sapiens; identical to SEQ ID NO: 200633
  chr6:118241526-118241674
  hyper

SEQ ID NO: 284399 - DNA, 85 bp, Homo sapiens; identical to SEQ ID NO: 232397
  chr6:118973007-118973092
  hyper

SEQ ID NO: 284400 - DNA, 83 bp, Homo sapiens
  chr6:119030678-119030761
  hyper
cagtaacaacaattggcgtgtgtgtgtgtgtgtgtgtgtgtgagagagagagagagagagagagagagcgctcccagttggcc

SEQ ID NO: 284401 - DNA, 857 bp, Homo sapiens
  chr6:119399619-119400476
  hyper
ccccgggtcacccctggaagggacggggcggtcccgccggcccgaagccgcggggacaacggcgcggggcagatgcccggggttgggcggcggcggccgggggccgggccagctcttggaggctcctcggcccgcgcctggcggaggcgtcgaggacagcgcagctccgcgggtcccgctcgcagcccgcaccgaggactcggcgaggctgcggagggaggaggagacggggcgggctgcggcggggataggcggggacatggaggaggacgcgggagccgccgttaccagggcgcgcgcggggacggcgacgtcatttccccgcagccaagccccgcccagccccgcgcagccgccgccgccgccgccagtcccgcagccccgcggccagtgcgggcgcctcgcgaggtcgatccgggatcgtgccgccagtgcttcccccgtgtggcggggatccagcagcccagccctggcggcgatccccgtgcagcgagcgtgaggcctgacgtaaaaaaaaaaagtatccccaagaagacggtgctgtaatcaccttcggttagcagaacgggtgtcgatttacagaccctttccacatgcgtcctcgtgtgtgcagggccccaagaagtggctcttccccaagaagagaggcaagcccaatccagagacatgagtagtgaagtagcgaggattccctgccctgaccttccttccaatggcacacaagtgaccgtgacactgtcttagccgccccctcccaccccgagtgcccggccactgcccccagttcagtgctgagtgtatgtgtggagggaacgctccttttcagtcagctggtggagcaccgcatagctactttc

SEQ ID NO: 284402 - DNA, 246 bp, Homo sapiens; identical to SEQ ID NO: 232400
  chr6:119670868-119671114
  hyper

SEQ ID NO: 284403 - DNA, 575 bp, Homo sapiens; identical to SEQ ID NO: 232401
  chr6:119671587-119672162
  hyper

SEQ ID NO: 284404 - DNA, 40 bp, Homo sapiens; identical to SEQ ID NO: 222921
  chr6:119762016-119762056
  hyper

SEQ ID NO: 284405 - DNA, 214 bp, Homo sapiens; identical to SEQ ID NO: 232402
  chr6:121757804-121758018
  hyper

SEQ ID NO: 284406 - DNA, 69 bp, Homo sapiens
  chr6:121758306-121758375
  hyper
ctcggtcttgggacgtttcccccaaatcctcacaagtcaaatcgaactcaggtccgagttcgtcactgc

SEQ ID NO: 284407 - DNA, 151 bp, Homo sapiens; identical to SEQ ID NO: 200636
  chr6:121758994-121759145
  hyper

SEQ ID NO: 284408 - DNA, 155 bp, Homo sapiens; identical to SEQ ID NO: 232405
  chr6:122720534-122720689
  hyper

SEQ ID NO: 284409 - DNA, 143 bp, Homo sapiens; identical to SEQ ID NO: 232406
  chr6:122792745-122792888
  hyper

SEQ ID NO: 284410 - DNA, 182 bp, Homo sapiens; identical to SEQ ID NO: 232407
  chr6:122793171-122793353
  hyper

SEQ ID NO: 284411 - DNA, 561 bp, Homo sapiens
  chr6:122931206-122931767
  hyper
gaattgaaattcccgcagtcacgtcacagaaatcttagcagaacctcatcatcgcccaagggaactgggagtggcgggcggggaggacgcgggttgtgtgacgatcaccgataattagttggtggttaacgcacaagtaggataaaagagctcgccccaggctgccagcagaaaaaagctaccgtggcacgtgccccggggagtgatgcggtggcccggtttgcacggagagcgggacaccgcctggggagccgcgctcgtagcctgggggcgggacgcggcggccgctccctccgcccccgagtagctgccaccgcctggctgcgccccagcccagtagctcagacgcggccgcatcccggtggactgtagaggcggcagcgagctagagcccgagtcgcagctccgggccgcagagcgctgggcgagcgcgagcgccagggcaccggcagggcaggcagctgcgcgcggctggtacgtacctggtggagcgggcgcgtgagtgggtgtccctatgcgaggagggaggagtgggacttgggaagtcgggggagactgacc

SEQ ID NO: 284412 - DNA, 45 bp, Homo sapiens
  chr6:122932014-122932059
  hyper
tccttcggctctcgcgccagcaatgccaagtctttcccctgggcg

SEQ ID NO: 284413 - DNA, 35 bp, Homo sapiens; identical to SEQ ID NO: 200638
  chr6:122932470-122932505
  hyper

SEQ ID NO: 284414 - DNA, 105 bp, Homo sapiens; identical to SEQ ID NO: 222922
  chr6:123110275-123110380
  hyper

SEQ ID NO: 284415 - DNA, 420 bp, Homo sapiens; identical to SEQ ID NO: 222923
  chr6:123110438-123110858
  hyper

SEQ ID NO: 284416 - DNA, 376 bp, Homo sapiens
  chr6:124123917-124124293
  hyper
tgcaggtagcagccgcttcacagctttcaggccggtgctcagcggaggctggtgcatctccactaggaatccacacccagctgggactgctgtgaagctgaagtaactgagtattaaactagtctccgactctttagtattttaagtgaaaacaaacaacagtttgaagcagcaacagcaactcattgcatccctattccctccggttgctaatttttcccaactccagcagcaactcggtccccttccccaagcagggtcggctccgtagctctccgcgctccgacccttcagatcctcgggagcccaggggagccaggtgctgggcggtgcgtccggtgccgccgcgccccttctcgccacctctggcctctcc

SEQ ID NO: 284417 - DNA, 233 bp, Homo sapiens; identical to SEQ ID NO: 200641
  chr6:124125086-124125319
  hyper

SEQ ID NO: 284418 - DNA, 278 bp, Homo sapiens
  chr6:125282855-125283133
  hyper
tatttctctgaactcgacatcctaaatagccagcgtttactaattccagagctgagtgtagttttgtaggaagttctactgaatgcggagaccaaaggggagcctgcctgctctgagggttttgttgaggctgagtgtgaactccgggcgagaaagcgcatctcagctcttagatcacacccactcagggtgtgcgtgtgtgtgtgcgcgggtgcctgcgcgcgtgtgtacgtgtggggaggtgtgcgccaaaggggtggggtgaggggcggcgagga

SEQ ID NO: 284419 - DNA, 54 bp, Homo sapiens; identical to SEQ ID NO: 200642
  chr6:125284305-125284359
  hyper

SEQ ID NO: 284420 - DNA, 78 bp, Homo sapiens
  chr6:125420731-125420809
  hyper
cactgatggctccgcgccgctcagttgatcccttcccactgcacggagcgggagactaaaggcccactgcccatggct

SEQ ID NO: 284421 - DNA, 517 bp, Homo sapiens
  chr6:125475030-125475547
  hyper
cgcagctgccatctgctctgggaagcaccagggtgtccccgccgccctcagctcgaagtcagccaccatggaggcgcaggcacaaggtgagtggtcgccgatcgccccgagagtcaggtcctggggcgcgcataaaggctcttttcctgcaccacctaacttcgctctcggacagaacagattggtgccgtgttgcacatccagaactccactcccacccgcgcctttggtataatgcctgctgcccaaactcaggatttgctgtgggtctggggatcaataaagtgacaggggatccgtaagtggagaggcccctcctcaggaaatgcgcccgtggaatgctctaccctcttccgcagccagtcgcccctggccttcccaacctcgcggctgcccgaaggacctgttgtgccgggtccggaaagcgtgtttcgctccctttcccttgagggagtggggagggaatgtgactcttttcgcccagcgccgtggactcgcggcttgtggctcccaagtt

SEQ ID NO: 284422 - DNA, 134 bp, Homo sapiens; identical to SEQ ID NO: 113988
  chr6:125475739-125475873
  hyper

SEQ ID NO: 284423 - DNA, 279 bp, Homo sapiens; identical to SEQ ID NO: 232416
  chr6:125622712-125622991
  hyper

SEQ ID NO: 284424 - DNA, 33 bp, Homo sapiens
  chr6:125684496-125684529
  hyper
ctgcggctgcactcgcttctccctcctgcagac

SEQ ID NO: 284425 - DNA, 98 bp, Homo sapiens
  chr6:125684697-125684795
  hyper
gccccctcctggctgtgccgcggggggatgcgcagcccctcgcaccgactgcgggaaggagagtgtgggtggccggcgcgcccggtccagctgccggc

SEQ ID NO: 284426 - DNA, 155 bp, Homo sapiens; identical to SEQ ID NO: 200643
  chr6:126067852-126068007
  hyper

SEQ ID NO: 284427 - DNA, 177 bp, Homo sapiens; identical to SEQ ID NO: 200644
  chr6:126068252-126068429
  hyper

SEQ ID NO: 284428 - DNA, 72 bp, Homo sapiens
  chr6:126068708-126068780
  hyper
ggttttgcctcaggcgtttggacgcgcccgctaattgcccgtgtggcaaacatgagttgcacctgcaggcat

SEQ ID NO: 284429 - DNA, 164 bp, Homo sapiens
  chr6:126069942-126070106
  hyper
atgcccgcgtcattgatctagtctttcctaccatcagagctgacacagctccagtccacgggcttctccgcggggtctaggatccacagtccctgggggctgaagacccaatggaagtaactgatggatcgcaaattggaaatcgtaacgtggccgacagacct

SEQ ID NO: 284430 - DNA, 53 bp, Homo sapiens
  chr6:126071132-126071185
  hyper
gagaaagtttgagtggtgggcgctcgcagagcgtgagttgggatggggcaagg

SEQ ID NO: 284431 - DNA, 149 bp, Homo sapiens
  chr6:126071333-126071482
  hyper
tgaaaccgtatttgggggcactttcaaaatagatcaggagaaaataaaaacaatttgatttttgatttttagagataccaaaatcacaacttgatttttggaggaattaaagcaacctgcgatgtcaaggctacgtaggttgaactttg

SEQ ID NO: 284432 - DNA, 275 bp, Homo sapiens; identical to SEQ ID NO: 232421
  chr6:126307441-126307716
  hyper

SEQ ID NO: 284433 - DNA, 262 bp, Homo sapiens; identical to SEQ ID NO: 232422
  chr6:126661122-126661384
  hyper

SEQ ID NO: 284434 - DNA, 51 bp, Homo sapiens
  chr6:127439527-127439578
  hyper
cagagatgctgcgctgtagacccgggaccccttaggcgcctcttcccgtcc

SEQ ID NO: 284435 - DNA, 311 bp, Homo sapiens
  chr6:127442338-127442649
  hyper
gggcccctgattctgaaggaagacacaggaaagaaagcttgtagtccttttgtgcccacctcccccagcgaggaccacggcgcaggaagctttccccgggcgctgcctcagggagctgtgggatgatgcacctctaggttgggccgagaggagtcaaaaggcaaactgcttttcgacctgccttaatcatctcaaggccaagtcaaaggagacctctgtttgtgttgaggggatgaaagaaggaatagtggaactgggttgcaattccaatttttctgtgggagtgggactgggagacagcacccacagcg

SEQ ID NO: 284436 - DNA, 51 bp, Homo sapiens
  chr6:127442699-127442750
  hyper
gtgcaatcctggtagaggggcgaccccttgcgtcctcggaggagacagact

SEQ ID NO: 284437 - DNA, 53 bp, Homo sapiens; identical to SEQ ID NO: 232427
  chr6:127468330-127468383
  hyper

SEQ ID NO: 284438 - DNA, 209 bp, Homo sapiens; identical to SEQ ID NO: 232428
  chr6:127587640-127587849
  hyper

SEQ ID NO: 284439 - DNA, 723 bp, Homo sapiens; identical to SEQ ID NO: 200645
  chr6:127664172-127664895
  hyper

SEQ ID NO: 284440 - DNA, 439 bp, Homo sapiens
  chr6:127836226-127836665
  hyper
ctcgcttccagcccttccgacacacaccgtacacaccccattccaattccaaattctcagctttaattgccctctctctccacgagacaggagtgacaaggagctgagtacagaagaggaaactgggggaaaaaggcccactttaggccctctctcgttctcttactctacctctctccaggaagaagtgtgacaaaccattataattagagaaacggaggcccagatttgaatttaaatgaaaacctcgcgttactgagagcagattcaaattccggcaaggcctaggaaaccccctccctcctttcttgttctcctccctcttcaaggctccctaacaggttagcagcctctgatccctgccggtacacgccctaatcctcccaggcccactcttcccatcccccagccgggtccccccaccctcctcaccttgaga

SEQ ID NO: 284441 - DNA, 52 bp, Homo sapiens; identical to SEQ ID NO: 200647
  chr6:127837749-127837801
  hyper

SEQ ID NO: 284442 - DNA, 77 bp, Homo sapiens; identical to SEQ ID NO: 200648
  chr6:127840693-127840770
  hyper

SEQ ID NO: 284443 - DNA, 217 bp, Homo sapiens; identical to SEQ ID NO: 200649
  chr6:128840108-128840325
  hyper

SEQ ID NO: 284444 - DNA, 664 bp, Homo sapiens; identical to SEQ ID NO: 200650
  chr6:128840373-128841037
  hyper

SEQ ID NO: 284445 - DNA, 476 bp, Homo sapiens; identical to SEQ ID NO: 200651
  chr6:128841101-128841577
  hyper

SEQ ID NO: 284446 - DNA, 701 bp, Homo sapiens
  chr6:128841719-128842420
  hyper
ctcggcggaggctgctcctgttagtcaagagttactttgctcggggagggacgggggcggagccgggggtgacgtcgccccgcgggctccgggcgcttctgaggaatgcgggctcgggcgcggcgccgccaccgcctcctgccggagagacgcgcgccagccccggccgcgcgccccgcgccgcctttgttcgcagcctgggccccgccgccagccgctgctcggagggagcgagcgagaaaggggagccggcgcagctcgctgccctgttccagaactcagaatttgagaggcgagagttcggtaagccgtgcgaccagacgaccgaggacgcgcgcagagaaacccccgccgtccgaggagaggcgtcctggggttccgtcccaaggtggaggtccccccgagcggttgctgattgaaaggggagtgtggaagcgccctgaggaaacacccgcctgccttgaaaactccccgttccttattcttgtaataaggaataagacaccccacccccatcgaaaacttgtcccttattcatagaataaataaaacttgaaccagaataaacgatcagtaactttccagcgtgaacagctggcgtgtctcctttctggtttatttgtcattggccaagtatttggatttactctgcttcactgactttgcttgttgctctgaaaccctccggcccctttccagtt

SEQ ID NO: 284447 - DNA, 55 bp, Homo sapiens
  chr6:129204234-129204289
  hyper
ccaccctcaggcggcggcccggccaaagccagagggggctgtctcctcctcttcc

SEQ ID NO: 284448 - DNA, 306 bp, Homo sapiens
  chr6:130088466-130088772
  hyper
ctgtcatttcggcttattcatccagcagctgccggaaggaccgggctgaagcgtggccacgaggagggggatacccgtgcgagcgctgagccggcagagcggctgcagcccacgggctcctcggacccccgctgctgcgccgctgcagctgaccgtgcgaaagccgcatgttattgggtagagatcagctttccaggaacaggcatcagctgtgcacgagcccggcagcatctcgagacaagtgctagccggtgttggtgcaaaccaaagcttgctatgtgctcagaaagcggccccagctactga

SEQ ID NO: 284449 - DNA, 56 bp, Homo sapiens
  chr6:130339514-130339570
  hyper
tctgaggcggtgaccgggctattgaaaagatgcacctgaaacaggatctgcgggca

SEQ ID NO: 284450 - DNA, 390 bp, Homo sapiens
  chr6:130339684-130340074
  hyper
caccagcgcagtttcccctctccccagccctgactctacgcgcacatgcgcattgcgcccgcagccctggaccatttgtcaggactactcgtgagacggagaaaaaaaaaagagaaaatttgggggtaagaagcggttgatcggatctaatctctaattaatctgaagatttgtccgtgcaaaagccattcatttatttttctgggtgaggatgaaagttaagagccctatagagggaaggaagcgcaccctcgtcttgtgaaacagatcaggggaggggagggacagaaggggtttctcccccacttctctgcgcctctgggaaagaggagaaaacttaatcccggggaaaaaagtgggcaagtgactcggaaacggctggagggggag

SEQ ID NO: 284451 - DNA, 55 bp, Homo sapiens; identical to SEQ ID NO: 232437
  chr6:130342006-130342061
  hyper

SEQ ID NO: 284452 - DNA, 380 bp, Homo sapiens; identical to SEQ ID NO: 43472
  chr6:131383361-131383741
  hyper

SEQ ID NO: 284453 - DNA, 55 bp, Homo sapiens
  chr6:131602722-131602777
  hyper
aggctggtggagaacgcggtgctcaaggctgtccagcagtatctggaggaaacac

SEQ ID NO: 284454 - DNA, 389 bp, Homo sapiens
  chr6:132128670-132129059
  hyper
ttcatttgcatttccatccagaaactcacaggtcgaccccaagactccactctctcccgcctttgagaagccggaccggcatcggcggctgcatccttctcctcctccccgctctattttggggccccatgatctcatgccctctgcagaccacacgctgcaattccagcccagcccgcgccgcgaggccacgcagggcgattcctgcaagtgtcgggagggtggccggggcgcggggaggggacggcttggggggaagtttaagacacgcccacgtaagggacccaaaataaccgacacacagagtgcccgaaatcagacaggaagccaaataatccggggcgttgagtcgctttgccctgactgcgagagccgggtgtagggcgggg

SEQ ID NO: 284455 - DNA, 196 bp, Homo sapiens; identical to SEQ ID NO: 232440
  chr6:132129409-132129605
  hyper

SEQ ID NO: 284456 - DNA, 209 bp, Homo sapiens; identical to SEQ ID NO: 200655
  chr6:132271777-132271986
  hyper

SEQ ID NO: 284457 - DNA, 93 bp, Homo sapiens; identical to SEQ ID NO: 200656
  chr6:132272531-132272624
  hyper

SEQ ID NO: 284458 - DNA, 194 bp, Homo sapiens
  chr6:132721835-132722029
  hyper
ctcccaaatagccacgatttgggaagttctgagatttccactcctagacagcaagtccgcgacgtactaaagcgctctgtcccttccctcctctgagagctgtcccattaggtccccaaagccaaagcctaggtccttctcccttcccatcagggatgaagcggggtgtattgcaggtgtgtaggcgggggggc

SEQ ID NO: 284459 - DNA, 262 bp, Homo sapiens; identical to SEQ ID NO: 232444
  chr6:132834326-132834588
  hyper

SEQ ID NO: 284460 - DNA, 193 bp, Homo sapiens; identical to SEQ ID NO: 222933
  chr6:133146628-133146821
  hyper

SEQ ID NO: 284461 - DNA, 58 bp, Homo sapiens; identical to SEQ ID NO: 232447
  chr6:133890489-133890547
  hyper

SEQ ID NO: 284462 - DNA, 159 bp, Homo sapiens; identical to SEQ ID NO: 232448
  chr6:134175362-134175521
  hyper

SEQ ID NO: 284463 - DNA, 178 bp, Homo sapiens
  chr6:134176054-134176232
  hyper
taaaagtgactgcgatttatttggattagtcagtataaaggtctggggagacagctatttattcgatacgggaccttgacaaattgggcagtgcaagaaaggacagtccctctgacctcaggcggtgctggggcggaaggtaggaacctcccacctgctcctggccccagggggcgcg

SEQ ID NO: 284464 - DNA, 139 bp, Homo sapiens; identical to SEQ ID NO: 43490
  chr6:134176376-134176515
  hyper

SEQ ID NO: 284465 - DNA, 697 bp, Homo sapiens
  chr6:134212421-134213118
  hyper
ccaggagggcgcttcgccccgaactcggtgcccagtaggcacaaggtcgttctgggcttcccggctcagactgccaaagcgtctgcctccaggcagtgccacagcaccacccactctcccactctcggcttgcccggggcttcctgcattgagtctcacaaggaacccagtataagcccttttggctctcattctaaaagaccaccaccagcaccaccaccacctcgagctgtgacttggcgccaaagcagctatttgctttatgcagccgcagggtgcgctaggaccgggagtaaattgcagagataaccggtctctccagagcaccgcctgcccccaccgccccccttcctttcatctcaggccccgagtccaccccaccccctccgccacggccacttacctcctccaccctcttctttcccgcagacgtggccctttatggtggccgggaaacccgagagtgacctgaaagaagtggtgaccgcgagccgcttatgtggaaccaccgcgtcctgaccttggaggtgcgagtctgggaaaggcgcgctcccggggggagcgggccccgggaaggcgacccctgccctcagtgctctctgtctctgcttccccctcgcaatgctcctctctctgtcccaccccgcgagaacactttacaacgacgaggagattcgtttccaaaccagaggagatc

SEQ ID NO: 284466 - DNA, 142 bp, Homo sapiens; identical to SEQ ID NO: 200657
  chr6:134216762-134216904
  hyper

SEQ ID NO: 284467 - DNA, 369 bp, Homo sapiens; identical to SEQ ID NO: 200658
  chr6:134217001-134217370
  hyper

SEQ ID NO: 284468 - DNA, 77 bp, Homo sapiens; identical to SEQ ID NO: 200659
  chr6:134217461-134217538
  hyper

SEQ ID NO: 284469 - DNA, 149 bp, Homo sapiens; identical to SEQ ID NO: 232454
  chr6:134496207-134496356
  hyper

SEQ ID NO: 284470 - DNA, 104 bp, Homo sapiens; identical to SEQ ID NO: 200660
  chr6:134499449-134499553
  hyper

SEQ ID NO: 284471 - DNA, 174 bp, Homo sapiens; identical to SEQ ID NO: 200661
  chr6:134639003-134639177
  hyper

SEQ ID NO: 284472 - DNA, 166 bp, Homo sapiens; identical to SEQ ID NO: 232457
  chr6:135501660-135501826
  hyper

SEQ ID NO: 284473 - DNA, 445 bp, Homo sapiens; identical to SEQ ID NO: 232458
  chr6:135502364-135502809
  hyper

SEQ ID NO: 284474 - DNA, 44 bp, Homo sapiens; identical to SEQ ID NO: 200662
  chr6:135503608-135503652
  hyper

SEQ ID NO: 284475 - DNA, 214 bp, Homo sapiens; identical to SEQ ID NO: 200663
  chr6:135503875-135504089
  hyper

SEQ ID NO: 284476 - DNA, 56 bp, Homo sapiens; identical to SEQ ID NO: 232460
  chr6:135504369-135504425
  hyper

SEQ ID NO: 284477 - DNA, 111 bp, Homo sapiens; identical to SEQ ID NO: 232461
  chr6:135504753-135504864
  hyper

SEQ ID NO: 284478 - DNA, 69 bp, Homo sapiens; identical to SEQ ID NO: 232462
  chr6:136571551-136571620
  hyper

SEQ ID NO: 284479 - DNA, 210 bp, Homo sapiens; identical to SEQ ID NO: 232463
  chr6:136610843-136611053
  hyper

SEQ ID NO: 284480 - DNA, 112 bp, Homo sapiens; identical to SEQ ID NO: 232464
  chr6:136611539-136611651
  hyper

SEQ ID NO: 284481 - DNA, 563 bp, Homo sapiens; identical to SEQ ID NO: 200664
  chr6:136870742-136871305
  hyper

SEQ ID NO: 284482 - DNA, 551 bp, Homo sapiens; identical to SEQ ID NO: 200665
  chr6:136871695-136872246
  hyper

SEQ ID NO: 284483 - DNA, 337 bp, Homo sapiens; identical to SEQ ID NO: 200666
  chr6:137112602-137112939
  hyper

SEQ ID NO: 284484 - DNA, 70 bp, Homo sapiens; identical to SEQ ID NO: 200667
  chr6:137112940-137113010
  hyper

SEQ ID NO: 284485 - DNA, 194 bp, Homo sapiens; identical to SEQ ID NO: 232467
  chr6:137143483-137143677
  hyper

SEQ ID NO: 284486 - DNA, 48 bp, Homo sapiens; identical to SEQ ID NO: 200668
  chr6:137243410-137243458
  hyper

SEQ ID NO: 284487 - DNA, 216 bp, Homo sapiens
  chr6:137310942-137311158
  hyper
accaggcgcagcgagtaaccctactccgtttctgaacgcacgcgggggcgctgccaatgtaaggctccctgttaggaacgggtcctagccctcagcggagggtcacaaagaaatgagactttcctggcaagactgtggaatcagatcgagccatttttaactgtaaatgtctggctttgcctgcagcatttcaaggaagacttgactgctgtgcgt

SEQ ID NO: 284488 - DNA, 44 bp, Homo sapiens; identical to SEQ ID NO: 232471
  chr6:137365286-137365330
  hyper

SEQ ID NO: 284489 - DNA, 280 bp, Homo sapiens; identical to SEQ ID NO: 232472
  chr6:137365624-137365904
  hyper

SEQ ID NO: 284490 - DNA, 60 bp, Homo sapiens
  chr6:137808692-137808752
  hyper
tccttgtcctttcccggagtagacggaagggaggcgagatggtgggaggctgaataacca

SEQ ID NO: 284491 - DNA, 34 bp, Homo sapiens
  chr6:137811294-137811328
  hyper
ttttctggcgtcgataattcgagtatttaaaggg

SEQ ID NO: 284492 - DNA, 161 bp, Homo sapiens; identical to SEQ ID NO: 200670
  chr6:138132643-138132804
  hyper

SEQ ID NO: 284493 - DNA, 193 bp, Homo sapiens; identical to SEQ ID NO: 232480
  chr6:138188397-138188590
  hyper

SEQ ID NO: 284494 - DNA, 227 bp, Homo sapiens
  chr6:138428363-138428590
  hyper
agactgcaaccagccgcggccggccagcgcgatgatgtcgaaggcgatggcgctgagtaggagcaggggcaggatccagcggcagcgctcgcaggccaggccgcagcggatcatgttgacgggcggcgcggggccgagcggagcggagcggagcgggtcggaggagcgcgcgggacgggcgacagcagagagtggcctgcgagcgcgggcgccgccacaaaagcgaa

SEQ ID NO: 284495 - DNA, 527 bp, Homo sapiens; identical to SEQ ID NO: 232482
  chr6:138428798-138429325
  hyper

SEQ ID NO: 284496 - DNA, 444 bp, Homo sapiens; identical to SEQ ID NO: 200673
  chr6:138482425-138482869
  hyper

SEQ ID NO: 284497 - DNA, 822 bp, Homo sapiens; identical to SEQ ID NO: 114116
  chr6:138482902-138483724
  hyper

SEQ ID NO: 284498 - DNA, 266 bp, Homo sapiens; identical to SEQ ID NO: 200675
  chr6:138724516-138724782
  hyper

SEQ ID NO: 284499 - DNA, 357 bp, Homo sapiens; identical to SEQ ID NO: 232485
  chr6:138725857-138726214
  hyper

SEQ ID NO: 284500 - DNA, 324 bp, Homo sapiens; identical to SEQ ID NO: 232486
  chr6:138914348-138914672
  hyper

SEQ ID NO: 284501 - DNA, 483 bp, Homo sapiens
  chr6:139013361-139013844
  hyper
caattcccaccctccgcgcccactctctcgaggtagccaagaccctccaggagtccgaaagtcacagagcgctctgcgcccctgccacctgcccagcctcccgctggggtccggcagtccccactggagaccccgacatcgcggggctccgcggcccccgcgccgacccagggccgccagggggcgggcgggagcagctctccgggtgcctcccccgccggttcccctcccccggcccgccggccactcacggattttcactcggcggtggtccaggcgcgcagcggcggcttgcagggcgtcgaggcggcggtgcagcgcggcggtgcggtggcccagcgcggccgcctggccctcgagctcgccgaagatgtccccggcgcagcgcgacaggtcggccagctgcgccagcaggcagcccagggcatgcgagctgacctgctccagcgagcggaagagtggcgcgcccgcagccccggcccc

SEQ ID NO: 284502 - DNA, 205 bp, Homo sapiens; identical to SEQ ID NO: 114124
  chr6:139094532-139094737
  hyper

SEQ ID NO: 284503 - DNA, 81 bp, Homo sapiens; identical to SEQ ID NO: 232490
  chr6:139309544-139309625
  hyper

SEQ ID NO: 284504 - DNA, 236 bp, Homo sapiens; identical to SEQ ID NO: 232491
  chr6:139349617-139349853
  hyper

SEQ ID NO: 284505 - DNA, 294 bp, Homo sapiens; identical to SEQ ID NO: 232492
  chr6:139350905-139351199
  hyper

SEQ ID NO: 284506 - DNA, 251 bp, Homo sapiens; identical to SEQ ID NO: 232493
  chr6:139694251-139694502
  hyper

SEQ ID NO: 284507 - DNA, 407 bp, Homo sapiens
  chr6:139694964-139695371
  hyper
gtggtgatgggggctcgggaactgccccatgcccatgcggtgggcagggtgatggtgcagcccattggtgccgtcggggaagcgcccgtggttcatggccatcatatggtctgccatttccagtcctggaagtgaaaagggcagataatgagacccgcgccacacgtgtcgcccaccacagcgcaccccacttttgctcgcctctgccccccaggattcccgggcgcacgtcggctgcgaaccaccacccccaagatcccactaacagcctgtgcacccgggctagccaccacggaagagctaccactcataacacagccggacgctgcacaaacagccccttcccctgcgatcgggcggggggacccgagcccacaccccctttgctccccgaagtggcctaataa

SEQ ID NO: 284508 - DNA, 447 bp, Homo sapiens; identical to SEQ ID NO: 232496
  chr6:139695584-139696031
  hyper

SEQ ID NO: 284509 - DNA, 264 bp, Homo sapiens; identical to SEQ ID NO: 232498
  chr6:142468183-142468447
  hyper

SEQ ID NO: 284510 - DNA, 185 bp, Homo sapiens
  chr6:142622529-142622714
  hyper
agacagaaaagttaagtaaagaaagtggcagaaaagtgaagcaaagcaacagcccgggagcgtggcggggggacccgcgcggggactcgggtaggctgcaaacgctggggagatgccacaggagcgcctgccttcccagcttctcctttctctcgccgagggtctctggggttcagcgctcccgg

SEQ ID NO: 284511 - DNA, 485 bp, Homo sapiens
  chr6:142622963-142623448
  hyper
acgccgccggggccgccgcacctgagcccagctccagtcacgccggaagcgcgggcggagcgcacgggtccggggagagtcgcctgcgcccgcgagggggacccaagtacctagggtggtggccgagtcccgcctcccgccagcgggggcgaggacctgcgacgcgcacccctgcctggcccggtctcctcagcaccagccccacgcacaccctacttcctcagcttctcgccctcaccctgccaacttccctgcgaggagggacctgccgccagcctgcttcctcgtccgcaggccctgcgctgaacgctgccgcgcccagggttcaccttgcgccgtcgggaaagcccatgaactctccagaaacggcgtaaaggagggtcccgccgcggcgcagggctggggcgcctgggttccccctgggtggagcagcggcagcagagcgggaaagtggtggaggatgatcttgcggccaaaggggacct

SEQ ID NO: 284512 - DNA, 368 bp, Homo sapiens; identical to SEQ ID NO: 200679
  chr6:143247975-143248343
  hyper

SEQ ID NO: 284513 - DNA, 222 bp, Homo sapiens
  chr6:143248451-143248673
  hyper
gatgactcttttttccactaggattatttccaagtcatcaaaagtgaaaaatcacgtaagtgttgttgcagttgttttcccctcgttttctatctcctttccaattgtgaattccgtaaataactgtcagacataaaacaggaaaaggaacatttcttcactgcagagctccagtaaggtgaaagtaggcaagaaggccccctgagacgtttctaaaagcat

SEQ ID NO: 284514 - DNA, 198 bp, Homo sapiens; identical to SEQ ID NO: 200681
  chr6:143266117-143266315
  hyper

SEQ ID NO: 284515 - DNA, 173 bp, Homo sapiens; identical to SEQ ID NO: 232503
  chr6:143267435-143267608
  hyper

SEQ ID NO: 284516 - DNA, 35 bp, Homo sapiens; identical to SEQ ID NO: 232504
  chr6:143268449-143268484
  hyper

SEQ ID NO: 284517 - DNA, 396 bp, Homo sapiens; identical to SEQ ID NO: 232505
  chr6:143268758-143269154
  hyper

SEQ ID NO: 284518 - DNA, 458 bp, Homo sapiens; identical to SEQ ID NO: 232506
  chr6:143771538-143771996
  hyper

SEQ ID NO: 284519 - DNA, 713 bp, Homo sapiens; identical to SEQ ID NO: 222946
  chr6:143998943-143999656
  hyper

SEQ ID NO: 284520 - DNA, 314 bp, Homo sapiens; identical to SEQ ID NO: 232507
  chr6:144164206-144164520
  hyper

SEQ ID NO: 284521 - DNA, 358 bp, Homo sapiens; identical to SEQ ID NO: 200685
  chr6:144384552-144384910
  hyper

SEQ ID NO: 284522 - DNA, 46 bp, Homo sapiens; identical to SEQ ID NO: 200686
  chr6:144537939-144537985
  hyper

SEQ ID NO: 284523 - DNA, 155 bp, Homo sapiens; identical to SEQ ID NO: 232509
  chr6:144605317-144605472
  hyper

SEQ ID NO: 284524 - DNA, 96 bp, Homo sapiens; identical to SEQ ID NO: 232510
  chr6:144605682-144605778
  hyper

SEQ ID NO: 284525 - DNA, 487 bp, Homo sapiens; identical to SEQ ID NO: 200687
  chr6:144606893-144607380
  hyper

SEQ ID NO: 284526 - DNA, 535 bp, Homo sapiens; identical to SEQ ID NO: 200688
  chr6:146136028-146136563
  hyper

SEQ ID NO: 284527 - DNA, 246 bp, Homo sapiens; identical to SEQ ID NO: 200689
  chr6:146136564-146136810
  hyper

SEQ ID NO: 284528 - DNA, 304 bp, Homo sapiens; identical to SEQ ID NO: 232513
  chr6:146285325-146285629
  hyper

SEQ ID NO: 284529 - DNA, 471 bp, Homo sapiens
  chr6:146348676-146349147
  hyper
tccctctatcaaacgactgatttttatacatgagataatagacaagccttgggtgacctgtttttttttttcttccctccccctctttttcccttgcggtaaaatagtgctgaagaaagagggcactagtgtacagcccagatcgcatccttgcaccgtctggattagagctgaggcgtctgcaagccgagcgtggccacggtcctctggccccgggaccatagcgctgtctaccccgactcaggtactcaggtatgtctcaagtccatgtcctccaaacagactcaggtgagcggacacttcctccggtgaaacccacccacaacggcagacaaagtcccagtctatcagattttcctccgggtcccaggcgcattctcgcttatgtatttcttttcgtcctgtatcctcaggaagagtcgggaccaatgggtgcctgggttttctttctcctttttctgcctcacctcc

SEQ ID NO: 284530 - DNA, 63 bp, Homo sapiens
  chr6:146349296-146349359
  hyper
atatacctgcacaagcggtgcaaggtgatgagaatgagggcggaggggcggtggggactcgag

SEQ ID NO: 284531 - DNA, 92 bp, Homo sapiens
  chr6:146349419-146349511
  hyper
taaagaactcagaggagggaggttgaaagagcaaagcgggtcagggaattgcaactcactggtcaaagcgtcccttgcaggccctgccaggg

SEQ ID NO: 284532 - DNA, 254 bp, Homo sapiens; identical to SEQ ID NO: 200691
  chr6:146864508-146864762
  hyper

SEQ ID NO: 284533 - DNA, 399 bp, Homo sapiens
  chr6:146864878-146865277
  hyper
agcgggcgcggcggagggctggccggcctcgggggagtttccgcggccgccgggggcgcggcggcagagcgcgaggccgggcagggggccagactcggagtcgaggcgcgcccgacagccgcagcgctcatggcgggcggaggagccggggaccccggcctgggggcggccgccgccccagcgcccgagacccgcgagcacctcttcaaggtgctggtgatcggcgagcttggcgtgggcaagaccagcatcatcaagcgctacgtccaccagctcttctcccagcactaccgggccaccatcggggtggacttcgccctcaaggtcctcaactgggacagcaggactctggtgcgcctgcagctgtgggacatcgcgggtaagcgcggccgcgagttt

SEQ ID NO: 284534 - DNA, 570 bp, Homo sapiens
  chr6:147828685-147829255
  hyper
atgatggggaaactcgattgattttgttacctcctagagggaaaatgccgtgggcggagatgtctgagcgtcccttccaacacgagctgggtggtgctctattgattttcacgcgatccccgggcgggagcgagaggataggctcggattcccgggctccaggaccgaacgcctggcagtgtccccgggggcaaagccaccccgggagcccgtgcagtatactaggtggggggcccggagagaaagcatagcgccgacgagggggaggggccgggcagaaaggagggtggggtaccgggtgggacacactgacctaggagaaagtacaacccaccccaaactttcgcagacccgggagcttaggaagggagagccaggaagacagcagcctctcctgccgcccaacgtgcccagctgcagcgaggaggggcggcgcgcaagccggctggacccgggcggtccccacgttgcgcccaccctccgggccaaaacgccgccgctcgggtcactgagtggccgcccacggaagaagtcagatcgccgggctctgggctgcgtacgggatccgag

SEQ ID NO: 284535 - DNA, 258 bp, Homo sapiens
  chr6:147829501-147829759
  hyper
aggactacagtgactgacactcgcgaagactaggcgctcccagcggccgcgggtctgcgtggagaagtcgcctcgcggcgcggagcgcgccagcggcggcggcggctgccagagcgcgagatgcggcgcgcagccgccggaccgtcccggctgggaaaactcgcgggcggcactgcgcagcgctgacccggcgcaggtccgaggggtgtgccccggcccctcccgtctccgccccctcccgcgccagtcgcgcgcccc

SEQ ID NO: 284536 - DNA, 241 bp, Homo sapiens
  chr6:147829798-147830039
  hyper
cgcggagccttgctcagcccagcagccagtgcctgcgagctccgctgctgcttggggaattcactttgctgcttgttcgcttctcccttcctcaggcttcttctgatggttttccgtctcctgcccgagcctttcctttaaaaggaaaactttactgcgatacccttttccccttggaggagaggattaaaagttccaagaactggtgccgcccgtgccatttgggcgctgggaaggtgct

SEQ ID NO: 284537 - DNA, 349 bp, Homo sapiens
  chr6:147830113-147830462
  hyper
agtacgcggagtccttcgtggataacggctacgatgacctggaggtgtgcaagcagatcggggacccggacctggatgccatcggggtgctggcgcccgcgcaccgccgccgtatcctggaggccgtgcgccggctgcgggagcaggacgccaacgccgccggcctctacttcacgcttgagccgcagccggcgccccccgggccgcccgccgacgccgtccccaccggccgccggggggagccgtgcggcggcccggcccagggcacccgcggggactctcgcggccacacgaccgccccccgcagcagggagctggtgagctaccccaaactgaagctgaagatcat

SEQ ID NO: 284538 - DNA, 213 bp, Homo sapiens; identical to SEQ ID NO: 200695
  chr6:148663794-148664007
  hyper

SEQ ID NO: 284539 - DNA, 195 bp, Homo sapiens; identical to SEQ ID NO: 200696
  chr6:148664163-148664358
  hyper

SEQ ID NO: 284540 - DNA, 277 bp, Homo sapiens; identical to SEQ ID NO: 232519
  chr6:149067613-149067890
  hyper

SEQ ID NO: 284541 - DNA, 352 bp, Homo sapiens; identical to SEQ ID NO: 232520
  chr6:149068102-149068454
  hyper

SEQ ID NO: 284542 - DNA, 258 bp, Homo sapiens; identical to SEQ ID NO: 200697
  chr6:149068930-149069188
  hyper

SEQ ID NO: 284543 - DNA, 223 bp, Homo sapiens
  chr6:149069508-149069731
  hyper
tgtgcgtctcaagctcaagtcaaaacttgtgtgtgtgtgtgtgtgtgtgtgtgtgtgtgtgtgtgtgtgtgtgtgtgtgtggtttattaggagagaggccgcctgtctttagcagaagtaaggaaggggtttgacgggagggaaagagccgctccagcgagaaggcgtgaccccgcagctccctcgtctcggctgcgggagccaggggtgccagggacaggcg

SEQ ID NO: 284544 - DNA, 69 bp, Homo sapiens
  chr6:149069769-149069838
  hyper
cgttcgagccaagggaggatgcagatccctcccaagtctgtggccagaagaggtcgtgcgggggtgaag

SEQ ID NO: 284545 - DNA, 189 bp, Homo sapiens; identical to SEQ ID NO: 232522
  chr6:149637867-149638056
  hyper

SEQ ID NO: 284546 - DNA, 324 bp, Homo sapiens
  chr6:149771949-149772273
  hyper
gcgcgatgcgagcccgggcgcgcgcgtccccctcgtcgtcctcggtcgcgtacactgaaagtcccccagtggcgccgtcgccccaggccggctccgcccagacggagcgcccagggaagcggtcggagcggggtggacgggcccacgggtcgtcgggtggcctgcgcggggaaagcaagtcgccgtgcaggtccctagggcggtgttcgccccgcggctggagctgcaggccgggcggaggcgggaggtcgcccggggagaactggctctccgggctagggaggctgagcgggcctggcacccggccgcccgcggacacccagt

SEQ ID NO: 284547 - DNA, 169 bp, Homo sapiens; identical to SEQ ID NO: 114190
  chr6:149772292-149772461
  hyper

SEQ ID NO: 284548 - DNA, 48 bp, Homo sapiens; identical to SEQ ID NO: 232523
  chr6:149867345-149867393
  hyper

SEQ ID NO: 284549 - DNA, 51 bp, Homo sapiens; identical to SEQ ID NO: 232524
  chr6:149887282-149887333
  hyper

SEQ ID NO: 284550 - DNA, 235 bp, Homo sapiens; identical to SEQ ID NO: 232525
  chr6:149969554-149969789
  hyper

SEQ ID NO: 284551 - DNA, 580 bp, Homo sapiens; identical to SEQ ID NO: 232526
  chr6:150039176-150039756
  hyper

SEQ ID NO: 284552 - DNA, 31 bp, Homo sapiens; identical to SEQ ID NO: 200700
  chr6:150071940-150071971
  hyper

SEQ ID NO: 284553 - DNA, 135 bp, Homo sapiens; identical to SEQ ID NO: 200701
  chr6:150072001-150072136
  hyper

SEQ ID NO: 284554 - DNA, 286 bp, Homo sapiens
  chr6:150185355-150185641
  hyper
tagccggcccagccgggcaccgctccttgccctcgccggagactgcccagcgccctgcgcctctccgccccggcctgcggcgcgctgggtggcgacgagtcggcctcggcgttgatcagcaccaggtgtgtgcgaacagtggccgcggcggggtggagccttggtgagccccgcccccccgcgcggccccgcccccgcgcgtctcgcgccggctcctccagggctgggagagcaggccccggggagggcagcctcagaacaactttgctcccgcgccgctgcccag

SEQ ID NO: 284555 - DNA, 291 bp, Homo sapiens
  chr6:150246875-150247166
  hyper
aagacccggaaggactcgccggtcgcggcaagggacaggcggttcctgagacaggaggagccaggaaatgcggggcctggtggggtgaggagcacggggttcctccttcatcctcgcggggactttgccaccggctcagtgtggaggcctcaccgtcccgcccggatccgtggggctccgacagtgtggcccctgcgaggaccccccccatcctcctcgccctggggctgctgcgggagggcgcccgggcagcactaggtcctgagtgtccagggtccggcaggggcttcc

SEQ ID NO: 284556 - DNA, 648 bp, Homo sapiens; identical to SEQ ID NO: 232532
  chr6:150259501-150260149
  hyper

SEQ ID NO: 284557 - DNA, 659 bp, Homo sapiens
  chr6:150262844-150263503
  hyper
acagggagacgccgccgccgctgaatattcctctgcaagtttcttcaccttcaataaaaaaatgttgtgatgattaaatgagtctgtcgtggaaggaaccgtgtcttggcaggagccgggcggacacccagacaccaacccgaagggggttgggacaaaggggagggacgcccgggaaggggagggacaccgtcagggcagccaatcatatttctagccgcgtgacgctatgacccgcttgacgctatgacagcgggaaacggggggcgcgcccgtacatagggaggctttaaaaccttgaggtgattcatcttccaggctctccttccatcaagtctctcatccctagcgctctgggtccttaatggcagcagccgccgctaccaagatccttctgtgcctcccgcttctgctcctgctgtccggctggtcccgggctgggcgagccggtgagttcgtggatggagcctaagccgggcggggaccaagcctggagggctgtgaactgccgcgggtttcagaggaggggaggcttctagaaggacgggggagatctcccctaactgcgcccccgttcagttccggtcggcggctccttcctgctgggtgcagtccccgaggctgcttcttgcccgggaagaggcgaaaaggagcggggt

SEQ ID NO: 284558 - DNA, 86 bp, Homo sapiens; identical to SEQ ID NO: 200703
  chr6:150284581-150284667
  hyper

SEQ ID NO: 284559 - DNA, 122 bp, Homo sapiens
  chr6:150311445-150311567
  hyper
ctgcagcagaagcagagccagaatgcaatgaatcaacgtggggccctcagccagcgcctttgggaccgggacctggcgacggaatgccgaggacaccggtgttcgccgcgcaggggaaactg

SEQ ID NO: 284560 - DNA, 194 bp, Homo sapiens
  chr6:150312215-150312409
  hyper
tcctacagcctggtgctgggcgcggggaggactttacacccagctcctgccgagacgtgaccttacagctggggtccttggggctccaaaagtgcggcttccgcgcggatcccattcctgcttgctttgaggctgctggtgagcggcgcctgcgcaggggaagttgtgtgcccgagttgcttacttgtgtttta

SEQ ID NO: 284561 - DNA, 236 bp, Homo sapiens; identical to SEQ ID NO: 232538
  chr6:150326375-150326611
  hyper

SEQ ID NO: 284562 - DNA, 70 bp, Homo sapiens; identical to SEQ ID NO: 232539
  chr6:150336633-150336703
  hyper

SEQ ID NO: 284563 - DNA, 598 bp, Homo sapiens; identical to SEQ ID NO: 232541
  chr6:150463460-150464058
  hyper

SEQ ID NO: 284564 - DNA, 332 bp, Homo sapiens; identical to SEQ ID NO: 200705
  chr6:150920422-150920754
  hyper

SEQ ID NO: 284565 - DNA, 82 bp, Homo sapiens; identical to SEQ ID NO: 200706
  chr6:150920982-150921064
  hyper

SEQ ID NO: 284566 - DNA, 766 bp, Homo sapiens; identical to SEQ ID NO: 200707
  chr6:150921277-150922043
  hyper

SEQ ID NO: 284567 - DNA, 70 bp, Homo sapiens; identical to SEQ ID NO: 232545
  chr6:150962776-150962846
  hyper

SEQ ID NO: 284568 - DNA, 70 bp, Homo sapiens; identical to SEQ ID NO: 200708
  chr6:151562596-151562666
  hyper

SEQ ID NO: 284569 - DNA, 234 bp, Homo sapiens; identical to SEQ ID NO: 200709
  chr6:151815611-151815845
  hyper

SEQ ID NO: 284570 - DNA, 78 bp, Homo sapiens; identical to SEQ ID NO: 200710
  chr6:151815879-151815957
  hyper

SEQ ID NO: 284571 - DNA, 195 bp, Homo sapiens; identical to SEQ ID NO: 200711
  chr6:152622719-152622914
  hyper

SEQ ID NO: 284572 - DNA, 37 bp, Homo sapiens; identical to SEQ ID NO: 200712
  chr6:152623493-152623530
  hyper

SEQ ID NO: 284573 - DNA, 57 bp, Homo sapiens; identical to SEQ ID NO: 232549
  chr6:153022495-153022552
  hyper

SEQ ID NO: 284574 - DNA, 193 bp, Homo sapiens; identical to SEQ ID NO: 232550
  chr6:153304117-153304310
  hyper

SEQ ID NO: 284575 - DNA, 79 bp, Homo sapiens; identical to SEQ ID NO: 200713
  chr6:153304958-153305037
  hyper

SEQ ID NO: 284576 - DNA, 264 bp, Homo sapiens; identical to SEQ ID NO: 200714
  chr6:153323865-153324129
  hyper

SEQ ID NO: 284577 - DNA, 63 bp, Homo sapiens; identical to SEQ ID NO: 200715
  chr6:153452827-153452890
  hyper

SEQ ID NO: 284578 - DNA, 244 bp, Homo sapiens; identical to SEQ ID NO: 200716
  chr6:154360330-154360574
  hyper

SEQ ID NO: 284579 - DNA, 45 bp, Homo sapiens
  chr6:154830547-154830592
  hyper
cctgaaaatgcagcgccaccggggatactggcgcctcccggagca

SEQ ID NO: 284580 - DNA, 1435 bp, Homo sapiens
  chr6:154830765-154832200
  hyper
ctgggcaggcggcatggacgaggtcccgcgggagtcacccacacaaaggcaccttgtgcctctgcactcgggcccccgggtcgccgggcaccgcaccggggccaggcagggagagcgccccccggcccgagtgccgagtcccgagatcggcatccccagccctcaaccgccacagaaaggccacccctactccctggtttaaagatagggctcccctcggcttgccacaatccgcaccctggaaaggaagagctcggagcaggtacgagagataggagcgcacaggccactcggcagaagtttgcattgtcaccgggctgtgccctcaccgcttctcgccgggaggaagggccaagtaccctcttccccagctcctcgtccgccccatccccgaggctggaggactccggacccccccaaggcccgcgcacctctagtccagtccaccacttgtttggggctccacttggtcacgggttccatggtaaaccgcttcgcctctcgctgggctggagagtcgcagataaagtgctgctgcctgcgctccggtgccccttcccgggagggcgcgcccgcggctgctcccctgcgcccgagcgactccgtcaagactgcatggccgcggtcagccagtcgtcccagcgcggctccgccaggggagcccggccctctccctccagctgccacagtccagctgcagctcctccttcccccgccgccgccgggatcccgggcacagctgctgctcccgagcgacggcagctgcaggcacgccgggctgcgaccccagacccctggcctcggctcggcacgggagcctcccggcccgcgaccacttcctcggatctctcgaggcgcgatcggctctccctcggccggtcttctcgcctgctggctctccggggtccccgctccgcgtgcgctggcgtcccggagccttcccggcgcaggtcccacctcctgcgccgccctcccgtgccgccctggcagggccgagcgcagagcgtgcgcgctcgggttgcaaagtttcagctccggttgctgcaaaccgaataaaagagagggcggggccgagggtctagggaaactcgtgggagggggcgggtccgcccgaagcggcggactcgggttactttccctctctaagccggtccggctcacacccgcagcgtcccgggccccgctttccttttcaaggggcgggttgtagatcgcgcgcgcaccctggagagcccgctggtttgtgtgaggccctggccctgtgggtagcagaacactctgtctcgctgtgagcaacaatacactaaaaaaaaaagaaaagaaaaaaaaaagtaagatctgcatgttctgttcattttaaatgctttatatcgtaatactactctgccattaagccgtcattttaggtttcttaaagtagaacaatttttttttt

SEQ ID NO: 284581 - DNA, 412 bp, Homo sapiens; identical to SEQ ID NO: 232558
  chr6:155635391-155635803
  hyper

SEQ ID NO: 284582 - DNA, 341 bp, Homo sapiens; identical to SEQ ID NO: 232559
  chr6:157098324-157098665
  hyper

SEQ ID NO: 284583 - DNA, 40 bp, Homo sapiens; identical to SEQ ID NO: 232561
  chr6:157744526-157744566
  hyper

SEQ ID NO: 284584 - DNA, 84 bp, Homo sapiens; identical to SEQ ID NO: 232562
  chr6:157745202-157745286
  hyper

SEQ ID NO: 284585 - DNA, 37 bp, Homo sapiens; identical to SEQ ID NO: 232563
  chr6:157802482-157802519
  hyper

SEQ ID NO: 284586 - DNA, 59 bp, Homo sapiens; identical to SEQ ID NO: 200718
  chr6:157802884-157802943
  hyper

SEQ ID NO: 284587 - DNA, 168 bp, Homo sapiens; identical to SEQ ID NO: 222962
  chr6:157803299-157803467
  hyper

SEQ ID NO: 284588 - DNA, 571 bp, Homo sapiens
  chr6:158244130-158244701
  hyper
aggaggcgaggaggccgggccgcggccgagggcccagggcgcgcttccggcgggcgtcgcgcgcgccgcggtaaatgggaggctcggccgacaggggcgggggccgcgcagccggggactttcaggaactgcaggagcgtgcggcgcgggagtagccgagcgcccagcggctgggcctgagcgtcgagactcggggccgaggcggaggagcggccgccgcgccggggcccagccggagccgccgccctcgcccttgcctttgcctgcgcggctcagaatcaccatccgcggcgcgggagacgagccggccgtcccgggccgggggacccgcccgccatggccaccaaggtgaggggcgcgcggcgcaggccgggccggtcgctcaggcccggggcggcgcggagagggtcggggccggggccgcggggagggtcggggccaggggtggtcgaggggccactccgcttcctcggtggagtccccgggcgggtccgcggcccagccagtcccttctgggcatgggtgcggcgggcagtgcagacagaccaccaggatcgcaccgggggacggc

SEQ ID NO: 284589 - DNA, 519 bp, Homo sapiens; identical to SEQ ID NO: 200720
  chr6:158402115-158402634
  hyper

SEQ ID NO: 284590 - DNA, 155 bp, Homo sapiens; identical to SEQ ID NO: 200721
  chr6:158402898-158403053
  hyper

SEQ ID NO: 284591 - DNA, 362 bp, Homo sapiens
  chr6:158588748-158589110
  hyper
aaaatgaccgttgccgagtttagagctctctcagcattcaatctattccatctctggggttagagagggagcaggaagcggtggtctgcaaggctcagaagtgactggtgaggccctttcctcctcctcctcatctctccgtgactaccgagcccgggaagacggaccggcaggtgcactccccaaggcctcgacagcagccagagaaaggcagcgacagggaaagacgagtcaggctcgcgaccaccagagagagaggccctcacgcccagccgagcgtcagctggtcggtccggtccgcgcgccagacggcggtgctcggccgtgcccggtccctgccctccccattctccgctccccac

SEQ ID NO: 284592 - DNA, 325 bp, Homo sapiens; identical to SEQ ID NO: 114279
  chr6:158589138-158589463
  hyper

SEQ ID NO: 284593 - DNA, 75 bp, Homo sapiens; identical to SEQ ID NO: 200723
  chr6:158957207-158957282
  hyper

SEQ ID NO: 284594 - DNA, 430 bp, Homo sapiens; identical to SEQ ID NO: 200724
  chr6:158957317-158957747
  hyper

SEQ ID NO: 284595 - DNA, 206 bp, Homo sapiens
  chr6:158957988-158958194
  hyper
cccgccgacggccgcctccgccggccgggcgcggagcctacggatggggacggggtcggggcggggatctgggagggaccaggaaggggacggggagcagggatactggcagcggcgggcaggttcctggattcagggcagcccggcgcccccgggcgaagggccgatttccgttcagctgaaacccaagccgaggctcccgcctc

SEQ ID NO: 284596 - DNA, 139 bp, Homo sapiens
  chr6:159290684-159290823
  hyper
cgccccgccgcccccggatccgcgcggctgccagaagctcccctcccccagatcttggcccctccctgaggcgcgcgagcgtgtcgtcgcccgctcccggccaatcagggcgcgcgaccaaaatagcgccatataaaag

SEQ ID NO: 284597 - DNA, 311 bp, Homo sapiens
  chr6:159290852-159291163
  hyper
ctcgcgctggggtggggttgcgcgcgcaggtgaggggggcggggccggcgcgaccggcggggcggggcggacactcccaccgcgcacctgcttctgcctgacgtgtacccggaaggtcgtcagctcaggctccaaatatgtaacagtgagtttctaagtgagtcacacggacgcggttggtttccagtgaggcataactcatcgcttcactcttctcaacggttccctcttcggaaggaagcgcagtccgcagcgtcgtccgagggcgtgatcgcctgcgtcgcacccgcgtctccagtggccaccccttg

SEQ ID NO: 284598 - DNA, 42 bp, Homo sapiens; identical to SEQ ID NO: 232569
  chr6:159421501-159421543
  hyper

SEQ ID NO: 284599 - DNA, 224 bp, Homo sapiens
  chr6:159589686-159589910
  hyper
ggcggacagcagcacgcggcgtccaggacccggccttcctagagcttaggtcactgtagcctccaggggcgctccgagtccatctggagggccgcgaggcttccaggctggaaggaggaatagggagaaggaggaatagggagacctggggcagtgttacaattacagaaaagggagaggcgaggtccgctgagtccttggcctgggcaacaaggcacactgaa

SEQ ID NO: 284600 - DNA, 62 bp, Homo sapiens; identical to SEQ ID NO: 200727
  chr6:159591277-159591339
  hyper

SEQ ID NO: 284601 - DNA, 250 bp, Homo sapiens; identical to SEQ ID NO: 200728
  chr6:159654647-159654897
  hyper

SEQ ID NO: 284602 - DNA, 62 bp, Homo sapiens; identical to SEQ ID NO: 200729
  chr6:159655003-159655065
  hyper

SEQ ID NO: 284603 - DNA, 254 bp, Homo sapiens; identical to SEQ ID NO: 114298
  chr6:159655082-159655336
  hyper

SEQ ID NO: 284604 - DNA, 58 bp, Homo sapiens; identical to SEQ ID NO: 232573
  chr6:160112589-160112647
  hyper

SEQ ID NO: 284605 - DNA, 40 bp, Homo sapiens; identical to SEQ ID NO: 232574
  chr6:160182804-160182844
  hyper

SEQ ID NO: 284606 - DNA, 196 bp, Homo sapiens; identical to SEQ ID NO: 232575
  chr6:160209889-160210085
  hyper

SEQ ID NO: 284607 - DNA, 470 bp, Homo sapiens
  chr6:160389587-160390057
  hyper
tgtaggaagcccacgcttgggaaataacattcccacagaaggtctgagaggctctgacgggccaaggttgtaaacccccatgatttgactccacgggcagttaaagtgtgttcccaccccccacggatccgctgccactaggctgtgcgaaggcatttacctccctggcactttgatccaagttccctattttcccctactggtcgatcgaggttgggaacagttgctctaacctgggaagcacccgccacgatccagcagggcgcggtgggaggggaaactgaggcccggctaggcacccccgccgcgcccagcccgccgagaggctcaggccccgggaggcacctggagcctgcgccccgcccgcgccgcttcctgtcccgcgcgctgcgctcacgtgacccgggcctgggaggagccggggcgggcgggggtcacctgaacaagggagtcacgtgagcggggggcgg

SEQ ID NO: 284608 - DNA, 131 bp, Homo sapiens
  chr6:160402882-160403013
  hyper
gcttccagccggatccctctccatacaccgggcttccttccagaccctgcatacctctcagggaaaaccaaaggctgacgtttggcatttccctgcttctatttatttgtatttgtcggccctgtatcttt

SEQ ID NO: 284609 - DNA, 287 bp, Homo sapiens
  chr6:160769014-160769301
  hyper
gttccgggagtggtcgggtgaccctggaactttcttcttctggagcccgacctggggctgactgcagagcaggctgctggcagggaccaaaaggagctccgcgccaggccggaggctgcgcccgtcactcgcggtcccggccgggtccctggcgcgtagtcaggccgcaccgcccgagccccaccgcgcgcccaccccggccgggtgcgtccggctcgcggccgtccctcccgcgacctgtggcccggggctgctgcgggcgcccggggaagagaggcgggggccgc

SEQ ID NO: 284610 - DNA, 304 bp, Homo sapiens; identical to SEQ ID NO: 200733
  chr6:160769935-160770239
  hyper

SEQ ID NO: 284611 - DNA, 67 bp, Homo sapiens; identical to SEQ ID NO: 200734
  chr6:160770300-160770367
  hyper

SEQ ID NO: 284612 - DNA, 128 bp, Homo sapiens
  chr6:161188108-161188236
  hyper
cgccctggaacacggagctggcgagaaggagaaaagcccagctggcggcgtaggggcgagggtcctgcctttcccggcggcctcgccctggccatcctggccctgcgggaaggggtcagcccacccga

SEQ ID NO: 284613 - DNA, 80 bp, Homo sapiens; identical to SEQ ID NO: 200735
  chr6:161413419-161413499
  hyper

SEQ ID NO: 284614 - DNA, 181 bp, Homo sapiens
  chr6:163148704-163148885
  hyper
actgggtaggtggcggctgcgggccaggaacaggcccatgcgcgcagcggcgccagccgcgcctcccaccagcggctctcctgggttaaatcctccaggcctccccgcccccgcgcccggccctaggaatgcgcacgcgcggagggcgcggcccagggcctgctgggagtcgtagttctaa

SEQ ID NO: 284615 - DNA, 104 bp, Homo sapiens; identical to SEQ ID NO: 200736
  chr6:163834161-163834265
  hyper

SEQ ID NO: 284616 - DNA, 96 bp, Homo sapiens; identical to SEQ ID NO: 200737
  chr6:163834987-163835083
  hyper

SEQ ID NO: 284617 - DNA, 666 bp, Homo sapiens
  chr6:163835131-163835797
  hyper
gaaagtcccccgtgaagcaacaggacgttaaaaaaaaatttctcttctgcggggtggataagaggttctgaaaaaactatagtaacgggaggcgaggcggaggcagcgctggcgcgtcccgctggaattcctctcgcctgccgcgccagccccgaccgcgcccgcagccccacccgccccgtgccgtggaaagccccgcgccccccccgcggccgtcggccccgcagcccacacccacccgccccgggcgccccgcacggcggcgacccagtccttgcgcccaggcccgccgagcgccgcagtccgtcacactcccgttgcccccgtcgcccgccccgccggggaggcagggaggagggggcgcggcgccggcggctgccccggtcgcggggcggcgggcagcaggcagcgggagcgcgccggccgggacccgctaacggccgccctgcgcggccccgcccgccgcccgcccccggccctccccgcgccgctgcccctccccccgccgccgccgctgctgccgccgccgctggcagcgccgcctgaactgaggcgaactccgccgccaagtgagtgaggaggaggaggaggagaaggaggaggaggaagaggaggagcgcagtcggagcgcggcggcagcggcagaggcgccgcggcggggaccag

SEQ ID NO: 284618 - DNA, 291 bp, Homo sapiens; identical to SEQ ID NO: 200740
  chr6:163835906-163836197
  hyper

SEQ ID NO: 284619 - DNA, 238 bp, Homo sapiens; identical to SEQ ID NO: 200741
  chr6:163837231-163837469
  hyper

SEQ ID NO: 284620 - DNA, 120 bp, Homo sapiens; identical to SEQ ID NO: 232586
  chr6:164377731-164377851
  hyper

SEQ ID NO: 284621 - DNA, 205 bp, Homo sapiens; identical to SEQ ID NO: 200742
  chr6:165722844-165723049
  hyper

SEQ ID NO: 284622 - DNA, 243 bp, Homo sapiens
  chr6:166075524-166075767
  hyper
ccgcggcggcgagggcgaagctggcgccctggggacgccgcggagtttggccgccgccgcctgggccggcgccggggaagccgggggagcccgcgcggcgggcggcctggccaagggggagccggggcggcggcggcggccggggaccggcacgggctggaagcagcaagccctggagcgcaggcgagaggaagagccgccgccgcccgccgccgctgccaccgccgccgcggtgactactgc

SEQ ID NO: 284623 - DNA, 84 bp, Homo sapiens
  chr6:166076011-166076095
  hyper
ggccgcgacccagccgcagccgccgccgcgcgcagagagggcgccggggcccccagcggggctggggcggcctgcggaggagag

SEQ ID NO: 284624 - DNA, 276 bp, Homo sapiens
  chr6:166077059-166077335
  hyper
cagtcagagttcccgggagagagttccaactcggacctttggttggagtttaaatcaactcgcagtgtttcccataaactagggtttgaaatacggttcctccccaggactccctttcgcatactcactttaaaacgaacttcgtgtgcacaagcccagtttgccttggttggggttagagaacggaaagggcaaactgtggccaaaaatgagcaagactgtgcgatcattgccccaaaccctgagaccgccttgccatatgcggctctcttggac

SEQ ID NO: 284625 - DNA, 163 bp, Homo sapiens; identical to SEQ ID NO: 232590
  chr6:166188884-166189047
  hyper

SEQ ID NO: 284626 - DNA, 367 bp, Homo sapiens
  chr6:166218179-166218546
  hyper
gaagagcagaggcaccggctcggctgcaggtgggagggtgtccgggtgaggggtgagcgcggggtcggggagcggcggcgggggactgggcgacggccccggggccgggccgcgggcggagactgacaggcgtgggcggcgacagctgcagctccgaagctcccagcgtggagtcacgcgccagcgcgcggaggggagtggggcgtggggcaagcagaggggcgcacggaggggagcatggagggacgtggggagcatggagagacgtgggggcgcacggagggacggcggggcctggagcgagcataggggcgcacggaggggcatctgggcgtggggcgagcacaggggcgcacggagaggagca

SEQ ID NO: 284627 - DNA, 62 bp, Homo sapiens; identical to SEQ ID NO: 114344
  chr6:166268182-166268244
  hyper

SEQ ID NO: 284628 - DNA, 144 bp, Homo sapiens
  chr6:166298522-166298666
  hyper
ttaccgccaggtggcagcgtagaccaagtaaggaagccggcccacccagagctgggaactacaggggtgtgctttgtggctttcagactcacaaagattccagatgaacatgatgtctctttttaaaatcgatttgaaacgcag

SEQ ID NO: 284629 - DNA, 75 bp, Homo sapiens
  chr6:166400480-166400555
  hyper
gtggcggcagaggcgaggatcaaaagagcagggggtcctgtccccactgagaactggagaagggcggctggctcg

SEQ ID NO: 284630 - DNA, 434 bp, Homo sapiens
  chr6:166401500-166401934
  hyper
tttgggggtgcttgtgctctcaggaacgactctcccggctgcccggaacttagagagtttccctttaagccggagatgctgctcggacacccccccgcgtccaacaggaggcgatgacgtctgtagcctcgttgccagaacagtccccaggctaccgctgccgttcattgacaggagcgggcgctcggacgtcagcagccggacctttggcaaggctgctcccgcggagacggctcccacccccgcacctgccagcccgcccccccggggggtggtcacgaaatcaaagccaccagaggaggggcccggggaggtgctggggctgggggagggggatgactcggatctgccctctttgtcctggagcaccggagtatataaatagtgcagtctccagccagactctctcccagtcttgcacgcccccgcagtcc

SEQ ID NO: 284631 - DNA, 151 bp, Homo sapiens; identical to SEQ ID NO: 5249
  chr6:166402752-166402903
  hyper

SEQ ID NO: 284632 - DNA, 227 bp, Homo sapiens; identical to SEQ ID NO: 200747
  chr6:166419579-166419806
  hyper

SEQ ID NO: 284633 - DNA, 65 bp, Homo sapiens; identical to SEQ ID NO: 200748
  chr6:166422281-166422346
  hyper

SEQ ID NO: 284634 - DNA, 42 bp, Homo sapiens
  chr6:166583394-166583436
  hyper
gcggccgcttttcccacagtcgggaagcgccaaagaagactg

SEQ ID NO: 284635 - DNA, 228 bp, Homo sapiens
  chr6:166667296-166667524
  hyper
taaaccgttctcaggtggttttttctggaagcagcagtggtttgtccagcaaggattaactctttgccttttcccgtctaaacttctgaagacacctgacagctcgttttaactctgcaaacgacagttcatcctccggggtgtggattcgggctcccacggctgccgcctggggcaagtgcgtctccccgggcgcctacgcggccccgcgcgctcctggcagcgtcg

SEQ ID NO: 284636 - DNA, 42 bp, Homo sapiens
  chr6:166667590-166667632
  hyper
ccccacaggttccttcctcccggggtttcccagcagaccaca

SEQ ID NO: 284637 - DNA, 32 bp, Homo sapiens
  chr6:166721134-166721166
  hyper
aggggaagggcctgcggggccgcgccagcagc

SEQ ID NO: 284638 - DNA, 214 bp, Homo sapiens
  chr6:166721444-166721658
  hyper
ggggccgcgccgggccggcggcctcttgagcgtggcggagggccaggagctggagaggagcccctcgggccgctgtgggggcctcttcttcttgtcccccgcggcgcagggcctccggggtaactggcgcgcggcttgggcccccggggcgggggcgggcggcggcggcatgggcgggaagggcatagtgcagccgagccgccggatcctcagc

SEQ ID NO: 284639 - DNA, 41 bp, Homo sapiens
  chr6:166722138-166722179
  hyper
ttcccctgggggagccggcagccttccggagtcacaggtgg

SEQ ID NO: 284640 - DNA, 85 bp, Homo sapiens; identical to SEQ ID NO: 232603
  chr6:166755972-166756057
  hyper

SEQ ID NO: 284641 - DNA, 326 bp, Homo sapiens; identical to SEQ ID NO: 232604
  chr6:166797106-166797432
  hyper

SEQ ID NO: 284642 - DNA, 331 bp, Homo sapiens
  chr6:167039796-167040127
  hyper
atctgtatcagcctcggcgctgcgaggatattgcatcaggctctttactcctgaacgccgttttagacgcctaagcagattgtgctgctgcctgttcttccccgttctgtgaattctacactgacttcaagtgcacgaatgagctacaagataaggtggaacctgccggccgggcacggcagacagcacctgatcagcgcctcggagggcggagctggggggcttctccactcgggactttgagggacccccgcggagcgctccgcgccactcggcggtctagctgcagagaaagcccctcctcacccggggctccctgtggcccacaggg

SEQ ID NO: 284643 - DNA, 425 bp, Homo sapiens
  chr6:167040325-167040750
  hyper
acccaggggtggcgaggcgggctcgggcgaccacggcccgctcagtgcccggcacctgcgcgccccgagggcggccgcattacctcgagccggctcaggctggagctcttggagcgcgacttcctgcgcaggtacacagagaagaacctgcgcacggcgaacttcttcatgctcaggtccatcgccccgcgcccagcccggagcagccgcagggccgggggacgcgcatccccggcatcccaggcgcggggctcaggtccgcgggcgggcacgcgtggccagggagcccggcacggcggccatgggcgcggggcgtggggcgcgagctgcggtcacaaagggcaggccgcgccggccaccgcggccggggccacaatcgctccctccgcctccttctccgcctcccctgcgagtaccagcgccgg

SEQ ID NO: 284644 - DNA, 49 bp, Homo sapiens
  chr6:167276260-167276309
  hyper
ccgccgcgcctccccggagacccacaccgccacctcccgccgcagaacg

SEQ ID NO: 284645 - DNA, 338 bp, Homo sapiens
  chr6:167764613-167764951
  hyper
gagccccgcaggcccgtggccccctgcctggttctcccgcctctgcaagcctagccttcaggactccgcctcgcccccctcttttctgttcggagactcacggggccgtctgtctggaccacgtgtgcacatttctgaccacgattcctccgcacaccagctacaggcaccgcagcgctggggacggcacagctgaactgtgctggcagcgaaggggcctcacggggacggctcagctccctgagggcgcaacccacctggtccgggggcgggggggggggtgaggaataaacttccgcggttttcagtgacccagtttgttgcatggcacatgttgg

SEQ ID NO: 284646 - DNA, 44 bp, Homo sapiens
  chr6:167765145-167765189
  hyper
tgcgccttgctctattgtgcctcgcagatactgcacttgttttt

SEQ ID NO: 284647 - DNA, 930 bp, Homo sapiens
  chr6:168226538-168227468
  hyper
ccggccctgcgctccgtacctgtgccgccacgcccaccggtcccctgctgagcctagcaccgcccatttagacccagcaccacccgtccggaccgaacctagcaccgcccgtccggacccagcagcgcccatttggatactgcaccgcccgtccagacccagaaccgcccgtccggacccagtaccacccatcggacccagcgccgcccatttagacccagcaccgccagtccgaaccgaacctagcaccgcccatgggacccatcgcccgttcggacccagcaccgcccgtccagatccagcactgcacccccatttggatccagcaccgcccgtccagacccggacccgccagtccggaccgaacccagcaccgcccatcggatccggcgccgcccatttagacctagcaccacccatccgaaccgaacctagcaccgcccatcggacccaccgcccgtctggacccagcaccgcccgtctggaaccagcaccgcccgtccacagatccatcaccacccatttggacccagcaccgcccgtccccgcccgtccggaccgaacgcagcaccgcccatcggacccagcagcgcccatttagacctagcaccgcccgtccgaaccgaacatagcaccgcccatcggacccatcaccgcccgtccagatccagcaccgcccatttggatccagcaccgcccgtccggactctgcaccgcgcgtccggacccaacacagcaccacccatcggacccagcactgcccatttagatccagcagcgcgcgtccgaaccgaacctagcaccgctggtcgggaaggaacccggtaccgccggttgggacccaccaccgccagtccagacggaaccctagcaccgcgcggggcccgccctccgacacctccctccctggcggccgcggcagcagcacct

SEQ ID NO: 284648 - DNA, 33 bp, Homo sapiens; identical to SEQ ID NO: 200752
  chr6:168227910-168227943
  hyper

SEQ ID NO: 284649 - DNA, 84 bp, Homo sapiens; identical to SEQ ID NO: 200753
  chr6:168228222-168228306
  hyper

SEQ ID NO: 284650 - DNA, 33 bp, Homo sapiens; identical to SEQ ID NO: 200754
  chr6:168228539-168228572
  hyper

SEQ ID NO: 284651 - DNA, 622 bp, Homo sapiens
  chr6:168720072-168720694
  hyper
gctcctgcagcgcggccagcgccgcctccagctgctgctcggggccgtggaggccgtgggggccgcagggcgcggcgggcgcgggcgggggctgcagggccagggcgccccgtacccgctcctgctgcgtggctcgcagcccctgcagctcctgcagccccgcgaacgccgcgcgcaacctcgcgcccaacctacggcggtcccagcccgcggaccccgggggtccgcccggcgtccacatctcccgggcagggtcccggcctcccgaaccccacgagcggcgccggaggcccagcgcgcgcggatcccgagctgtgtcgcgggtcctcctgcgcctcctctctccgcccccggctccgcaggtcgccaaggtgggctggaatctgtggccaggcgcggagggcggggtctgcacgcgccccgaggtcaccgcggcctcccccggacccgccccgccgaccccccagggcccctcgccggctgcgggcagggcgggcgcacccagaccccggggccagctgagcgcctccgtgacttcagcggggagggccagccgggaggaggagcccgggggagaggggcaaagaggcgcaagtggaacaaaggcggagaaaggcttgtt

SEQ ID NO: 284652 - DNA, 329 bp, Homo sapiens
  chr6:168842518-168842847
  hyper
gcctgagcctgtggggaaccaggtctgggagcgccggcgccgccccgcggactgtcccaaggccaagacagacccgccgggactgggcgcccacctcgcccacggggacccggcctggagcgtgttctcccgaccgctttgggctcgtgcgccgcgcggatcccgggcctctcgccggctgaaggggctgccagtcgtgggccccactcgtgggtctgactctcccagagaccctcgtaagtgagccgaggaagaagcagatgaggttacagatgattcttcacgggcctgagtgttattagagaagcgctttcttcccttctcaggac

SEQ ID NO: 284653 - DNA, 224 bp, Homo sapiens; identical to SEQ ID NO: 200756
  chr6:169613106-169613330
  hyper

SEQ ID NO: 284654 - DNA, 156 bp, Homo sapiens; identical to SEQ ID NO: 200757
  chr6:169653482-169653638
  hyper

SEQ ID NO: 284655 - DNA, 523 bp, Homo sapiens; identical to SEQ ID NO: 200758
  chr6:170124883-170125406
  hyper

SEQ ID NO: 284656 - DNA, 339 bp, Homo sapiens; identical to SEQ ID NO: 232617
  chr6:170151379-170151718
  hyper

SEQ ID NO: 284657 - DNA, 45 bp, Homo sapiens
  chr6:170598159-170598204
  hyper
aggatggggtggaagaggcccgagggcccttgtcatttttcttgg

SEQ ID NO: 284658 - DNA, 265 bp, Homo sapiens
  chr6:170598840-170599105
  hyper
cccttcttgttgacgaactcctgcagcttcagttcgaacaccccagagctccagacctgcacgggggagggcgggggcgtgaggacgcgggtcccgcccgagctagggggcgtgaggcctgggtggggggtgtgcggagagcctggaagggctcaggggccgagcgcgctcgctgcacggccggcgctggggtcgtcgcccccgggattcatcttccgggccgtggctggcgcggcccgtgccgctgtccgcccctccccgcgcg

SEQ ID NO: 284659 - DNA, 441 bp, Homo sapiens; identical to SEQ ID NO: 232619
  chr6:170599640-170600081
  hyper

SEQ ID NO: 284660 - DNA, 155 bp, Homo sapiens; identical to SEQ ID NO: 232620
  chr6:170604989-170605144
  hyper

SEQ ID NO: 284661 - DNA, 98 bp, Homo sapiens
  chr6:170605422-170605520
  hyper
ggaggtggtggcggcgccaggcagcattacgaggggcaccagtgcaaggcccaaagcgcgagggcacaggcggcgcggccgtgcggcgggtcatccct

SEQ ID NO: 284662 - DNA, 132 bp, Homo sapiens
  chr6:170605940-170606072
  hyper
ggtcgaggcgtcgcacctggaaatcgcagcctgtgactttgtaaaaaagtgaatggggaagaaaaggcgctgagaggggcgatgggcggacgggccgtgcccaccacagggaggtcgcggcacctgtcgctc

SEQ ID NO: 284663 - DNA, 136 bp, Homo sapiens; identical to SEQ ID NO: 232621
  chr6:170615733-170615869
  hyper

SEQ ID NO: 284664 - DNA, 43 bp, Homo sapiens; identical to SEQ ID NO: 200760
  chr6:170862217-170862260
  hyper

SEQ ID NO: 284665 - DNA, 323 bp, Homo sapiens; identical to SEQ ID NO: 232623
  chr6:170863273-170863596
  hyper

SEQ ID NO: 284666 - DNA, 99 bp, Homo sapiens; identical to SEQ ID NO: 232624
  chr6:170893981-170894080
  hyper

SEQ ID NO: 284667 - DNA, 90 bp, Homo sapiens
  chr7:149020-149110
  hyper
taggcgggagaacacggtcaggcccgcaggagacgccgcggcacctgccagaaagagagccgcaggccaagaccaggagacgcgagagag

SEQ ID NO: 284668 - DNA, 589 bp, Homo sapiens
  chr7:149220-149809
  hyper
tgcgccggcgccggggcttcctccacaccgcgcctgcgccgatgacaacccgcctctacaggacgcctgcgcaacgccatagtcacctcatcagctccgtgcacttacgagtctctctctgatcgaccacgtgttcctgtcggctcacagaggccgcctcagggtcctcccccattgtcttcctcgcaccctccactgttcccggcccttcactctgcgcttgcgcaggagtcgctcgctcctctctgcgcctgcgcagaggccacctcctccccgcccgtccgctcccttggcgtcgtcttgggccgcgccccgaccccttctgtttacgcatgcgcaggagccgccctgcgcgggtggggggctgagcccctgtggcttcaggtttaaaggcgcgagcgccacccacgcaggcacaagggctcctagtcgttttatttttagcgtaaggttttcctctttaacaaggaagtaaaaaaaaaagttgtgcaataaatattaatcgtccttatatgtactcgggaacgttcgtcctttaggttttctcctggcgcatgggcgccgccaatcatttcggggcttattttgg

SEQ ID NO: 284669 - DNA, 438 bp, Homo sapiens
  chr7:191992-192430
  hyper
acgggaccggtgccgggagctccgctgccctggcgtcccctgggtccaggcccagtcgctccttgggcctctctcgcggggccgcctccgcctcctccttgccgagacgggcgtggggcacggggtcgccgcccggcggggagctcatccggcggcgcagacgccccgcggctccggggagggacttggcctgggccccggccccgcgctcctctggggaggagccgagaggctgcagctggcggcggcggccccgggcgggagggggtcccaggaagcggccaggccggagccccccactcggccgcagctgctggcctggccagaaccgagcgcgccctcccggtctccgccgcttccctctgcaaaccgcgggcaggaggagccctctccttagcgggcccggagctcagaggcgtcgcggggcgcggccgaggg

SEQ ID NO: 284670 - DNA, 362 bp, Homo sapiens
  chr7:192614-192976
  hyper
acctgcccgggaccccgccggccgctccccgcgcccaccccttccgcccttcgccccccccttccccccagccccggtctcccgggcgcggcgtgagagcagagcccggcccggaggagccgccccttccccgcccgcccgcccggcgcctggagaggagcgcgctgaggatcgggacgcctgcggccgccgccaccgcccaggcccgtcgcgccccggccgggatggacccacacgcccgatgagccccgcgccggcggctgcgagcgccgagcctccccctgctgcggccccagccgccccccgcgcgcccggctccgcggaccaggacccctgggctccccggctgagggcgcggccgc

SEQ ID NO: 284671 - DNA, 511 bp, Homo sapiens
  chr7:193101-193612
  hyper
gaccttgacccgcgaggcggcgccgcgctcgtgcccagctgcagctagaggggcgcgcgggcagaacgcgctccaggcccgggccggcccgcgcggccatgaagatgatgctggtgcgccggttccgcgtgctcatcctgatggtgttcctggtggcctgcgcgctgcacatcgccctggacctgctgcccaggctggagcgacgcggcgcgcggccctcgggggagcccggctgttcgtgcgcgcagcccgccgccgaggtggccgcgcccggctgggcccaggttcggggccgccccggggagcccccggccgcctcctccgccgccggcgacgcgggctggcccaacaagcacacgctccgcatcctgcaggacttcagctccgacccctcctccaacctctcgtcccactcgctggagaaactgccgcccgcggccgagccggccgagcgcgccttgcgggggcgggatcccggcgccctaagaccccacgaccccgcgcaccggcc

SEQ ID NO: 284672 - DNA, 276 bp, Homo sapiens
  chr7:193708-193984
  hyper
ccgggtggcggttccgccgctcacggaggaggacgtcctgttcaatgtgaacagcgacaccaggctcagccccaaagcggcggagaacccggactggtgagtgggggctggcaggtgcccacccccaagggagccgtgagcccaaggcatggtgtagagaggttcaggggccccagagggccgccccccatggaagaggccgggcagggagtgtggtgcgggaggaggcagccgcctacctcagggcgctgcctttgtctccagaataacctcctc

SEQ ID NO: 284673 - DNA, 101 bp, Homo sapiens; identical to SEQ ID NO: 232626
  chr7:362170-362271
  hyper

SEQ ID NO: 284674 - DNA, 472 bp, Homo sapiens; identical to SEQ ID NO: 232627
  chr7:372708-373180
  hyper

SEQ ID NO: 284675 - DNA, 213 bp, Homo sapiens; identical to SEQ ID NO: 232628
  chr7:402448-402661
  hyper

SEQ ID NO: 284676 - DNA, 129 bp, Homo sapiens; identical to SEQ ID NO: 200764
  chr7:556557-556686
  hyper

SEQ ID NO: 284677 - DNA, 212 bp, Homo sapiens; identical to SEQ ID NO: 200765
  chr7:556716-556928
  hyper

SEQ ID NO: 284678 - DNA, 110 bp, Homo sapiens; identical to SEQ ID NO: 200766
  chr7:556983-557093
  hyper

SEQ ID NO: 284679 - DNA, 91 bp, Homo sapiens; identical to SEQ ID NO: 200767
  chr7:557220-557311
  hyper

SEQ ID NO: 284680 - DNA, 34 bp, Homo sapiens; identical to SEQ ID NO: 200768
  chr7:557626-557660
  hyper

SEQ ID NO: 284681 - DNA, 294 bp, Homo sapiens; identical to SEQ ID NO: 200769
  chr7:557697-557991
  hyper

SEQ ID NO: 284682 - DNA, 36 bp, Homo sapiens; identical to SEQ ID NO: 222989
  chr7:558727-558763
  hyper

SEQ ID NO: 284683 - DNA, 505 bp, Homo sapiens; identical to SEQ ID NO: 222990
  chr7:558986-559491
  hyper

SEQ ID NO: 284684 - DNA, 212 bp, Homo sapiens
  chr7:560342-560554
  hyper
tcagagcgcgatgcgggggaggaacgcgcgcggaggccgaggtctgagcgtggctagacggctcccacgccgagaaagggcgggtgcgcctgggctggatggatttcgcctccctagaccaggagggattggaccctgactacaggtccaggtgctcgtcagtgccctgccagggggtctacgcgtcctggtaccgggtccagcggggtggc

SEQ ID NO: 284685 - DNA, 35 bp, Homo sapiens; identical to SEQ ID NO: 200771
  chr7:560650-560685
  hyper

SEQ ID NO: 284686 - DNA, 51 bp, Homo sapiens; identical to SEQ ID NO: 200772
  chr7:560731-560782
  hyper

SEQ ID NO: 284687 - DNA, 194 bp, Homo sapiens
  chr7:561245-561439
  hyper
ggggttagaggactcggtaagacggtgtggaaggcaaggaggaaggtcgcgttgtattggggatggggtacccgtccctcccagcttgagggatcctgggggtcctcgccgcctctgagggcctagatggctgcttccctcggctcccctgcccggcctggagctacgggtgcgcccagctagagtttagggcc

SEQ ID NO: 284688 - DNA, 256 bp, Homo sapiens
  chr7:822392-822648
  hyper
actcgatcttcctggcgtggccgcctcccgtcacgcagcgtcagaaactcggtcttcctgccatggccacctcccatccggcggcatcagaaactcggaccttcctggcgtggccgcgtcccctcacacaacgtcagaaactcgatcttcctggcgtggccacctcccctccggcggcatcagaaactcggatcgtcctggggtggctgctcttgttacgcaacgtcagaaactctcctgcgtgggcaccaggctc

SEQ ID NO: 284689 - DNA, 42 bp, Homo sapiens; identical to SEQ ID NO: 200773
  chr7:852797-852839
  hyper

SEQ ID NO: 284690 - DNA, 42 bp, Homo sapiens; identical to SEQ ID NO: 200774
  chr7:852899-852941
  hyper

SEQ ID NO: 284691 - DNA, 198 bp, Homo sapiens; identical to SEQ ID NO: 114434
  chr7:853018-853216
  hyper

SEQ ID NO: 284692 - DNA, 286 bp, Homo sapiens
  chr7:889350-889636
  hyper
tcactgatgacgacgggctgttggagctgctgcttaagccctcatcacagaagctcatagccaccagatcgcatttgctttgattgttgactgtctcgtgtgtaattgagtttcccagtttctacagactgccattgctatgcacggctgagatggacagagtttgcttgtgaatccgccacactcactgcctgtcaccacacctgcaggcgacgactgtaagggcaagaggcacctcgacgcgcacacagccgcccactcgcagtcgccacggctgcccggtcgg

SEQ ID NO: 284693 - DNA, 99 bp, Homo sapiens; identical to SEQ ID NO: 232636
  chr7:915758-915857
  hyper

SEQ ID NO: 284694 - DNA, 473 bp, Homo sapiens
  chr7:932819-933292
  hyper
tgttgggcgcgggcgcggtggtgtgtgcaggtgagtgttgggcgtgggcgtggtggtgtgtgcaggtgagtgttgggcgcgggcgcggtggtgtgtgcaggtgagtgttgggcgcgggcgcggtggtgtgtgcaggtgagtgttgggcgcgggcgtggtggtggttgcaggtgagtgttgggtgtgggcgtggtgtgtgcaggtgagtgttgggcgtgggcgcggtggtgtgtgcaggtgagtgttgggtgcaggcatggttgcaggtgagtgttgggcgcgggcgcggtggtttgtgcaggtgagtgttgggtgcgggcatggtggttgcaggtgagtgttgggtgtaggcgtggtggtgtgtgcaggtgagtgttgggcgtaggcgtggtggttgcaggtgagtgttgggcatgggcgcggtgtgtgcaggtgagtgttgggcgcgggcgtggtggtgtgtgcaggtgagt

SEQ ID NO: 284695 - DNA, 351 bp, Homo sapiens
  chr7:1001818-1002169
  hyper
cctgcgatgtgggccgcgaccgtcccggcccgtgcaggaccactgtgggcgaggggctgtgaccgtcccggcccgtgaaggatcaatgtgggcgaggggccgtgaccgtcacggcccgtgcaggatcaatgtgggcgaggggccgtgaccgtcccggcccatgcaggatcaatgtgggcaaggggccgtgaccgtcccggcccgttcaggacagtggcctataacctctgacatggggtcacaggagaatgcggcttctgccttgcccctcgcccctgccccgcctccacatacacagctgggctcccctgcagcctccacgctgcagaggccacgcggacagagcccagg

SEQ ID NO: 284696 - DNA, 804 bp, Homo sapiens
  chr7:1007358-1008162
  hyper
gctcggaggggctcgcggccggctatgcccatcagttccagctcctccttctggatttctcgtttgtagtttcctgtgtccctgcctgtctccacttcacagtaagctcacgccatatagccgcactgcgttggcgagctcatggcacgtggccacaccgcgtcagcgccgactccacggtggctgcgtcacggctcacgtgcactgtgaggacactggggttgctatagacagtgctggggcaaccctgtgcctacacaaaatattctaataagaaacaagactttccatcaactagcggtgatatgttaatacgtctgcagcactcagaggcctgacagagagcagacacgggacagtgacagctgcagccgaatcaggtggtagaacccatgggtgcagggacacagggttgggcgggcccagccgcaataggtactcagttctgtgaggaggggagggacatgtttaaccacgaaagggccaccactgcaggacagaaacagagggcctttgctgcagagaactggagatgggctgagaagcctcagccacccacaggcagagggacgagggcagcctgtttcccagagcctgaggtcggccagattggtggccccacctgccagggcttggagacagccactgccagggtcgccagagaggacgtgacctggacctccccaccccgtctcctgccaccatcctccactgaccagacaggagccagcccctttccgacagtgcctgggaaggagacaggtctggctgaggccccagatgtgcaggcacctgcgttccatc

SEQ ID NO: 284697 - DNA, 332 bp, Homo sapiens
  chr7:1069637-1069969
  hyper
tctgccactggtgtccgcaccccgctttcagagaaggaagtgtgtgctcagtcaccggtttcatgggagggactcaattctgggccttctgagccccagtggccttgtgtgctgactccccagtgtgtccccagcatgaatgcgccagcccacacagtcacctgcctccatgaacgcgccaactccgcgcatccacctgtcttcccgaacgcaacgacccacgcatccacccacctccataaacgcgccaatcctgctcatatgccgtcttcaccaacgcaccaactcgcacagccacccgcctccacacctgagcccggggaccaggtttc

SEQ ID NO: 284698 - DNA, 338 bp, Homo sapiens
  chr7:1083896-1084234
  hyper
tgtaaaaagaaaccgcgctgggcactaagagaattctcaaaaactcccagagccctgggtgtgtgtcctcccacagggaatctcgcacgagttcgtcaaatggctggtctcaggttacacaaccagcactgcctccaccgccaccgccccccaacctcactggtccgagcggttccccgcggtctagccgcgagggcggggccggggggcggaggccagggcgggaccaaggctgggggcggggccaggcatggctgccgctcgccggccgggggcggggccgacggtcacgtgtgtacacagggcccgggcggcgtgcgcgccgtgagccccgccgc

SEQ ID NO: 284699 - DNA, 256 bp, Homo sapiens
  chr7:1105259-1105515
  hyper
cgacacagcggcgacgagggccgggtctgggagggcgtgggccagggaggggcgacggaggcggtctcccttgccggggtgctggtgacacagcggctgcacctgtcagaacacgccagggtggagacaggagatctgtgtgcttcccgagtacagatcacggctcagcatctcatgggaaagggacagggctctcttcaggacacgcagtaagatttcaagtgcgggcacttttaatactccgcgatccaaaggc

SEQ ID NO: 284700 - DNA, 104 bp, Homo sapiens
  chr7:1263476-1263580
  hyper
cctctcccatgagcagtagtcgaagaggctgcacggaggtcccggcctccgtgagggcggtgggttggagagggcgcctggggcctcaggaccctgctccctcc

SEQ ID NO: 284701 - DNA, 105 bp, Homo sapiens
  chr7:1264273-1264378
  hyper
ccagttaaccaggcctggccggcgcgggccccacgccccaggctggagcggtgccgaagcgcagagcagaccggcttctgctgcgtgcgcgagtcctgcaccccg

SEQ ID NO: 284702 - DNA, 56 bp, Homo sapiens; identical to SEQ ID NO: 232641
  chr7:1265621-1265677
  hyper

SEQ ID NO: 284703 - DNA, 56 bp, Homo sapiens; identical to SEQ ID NO: 232642
  chr7:1268389-1268445
  hyper

SEQ ID NO: 284704 - DNA, 292 bp, Homo sapiens; identical to SEQ ID NO: 200779
  chr7:1269808-1270100
  hyper

SEQ ID NO: 284705 - DNA, 243 bp, Homo sapiens
  chr7:1270795-1271038
  hyper
gggctccccaaattccaggccgcctctcggtctcctggattggctgggcctggtcctcaaccctgcgccgtcccctcctctcccgcaaggagagacaagagggtcattgaagtcggagtcagcgtggatcggcccgtccacgaccttcagttaggaacagggccagactgtgggtccagtcgcagggacaggcagtcgtgtggcaggacggggtggccttgcgcccgccaacccaagcattcc

SEQ ID NO: 284706 - DNA, 146 bp, Homo sapiens; identical to SEQ ID NO: 200780
  chr7:1272152-1272298
  hyper

SEQ ID NO: 284707 - DNA, 275 bp, Homo sapiens
  chr7:1275268-1275543
  hyper
ggtggaaaaggcgctcgctggaacctgcagctccagtggcaaagcccagctcagggcccgctcggccgcgcggcttcactcctgccccggccgagcggaggttgtgcaggcccctctggggggagcggggaggtcctcggccccggcggccagcccgccgcctgattgtggcttcctctcccctatccggctgctctaggtctggttccaaaaccgccgggccaagtggaggaagaaggagaacacgaaaaagggcccggggcggccggcgcaca

SEQ ID NO: 284708 - DNA, 97 bp, Homo sapiens
  chr7:1276567-1276664
  hyper
ggccggacccagcccgccggagggcgaggagctggacatggactgaggccgcggcggccgggagaggcgcgtagccggcccgcggccgctcgctcag

SEQ ID NO: 284709 - DNA, 261 bp, Homo sapiens
  chr7:1277556-1277817
  hyper
ctgcactctttgtcagcgctcttgtagccggctatattaagatagatgcccaatgatatccctcattgttctgtcgcttatattgatgttgctgcgttatcagcctattgatcatgtgtcgcctgtaataggacaggcgccgccaacgcgactctttacaaaagccgtgcacatttgttctaatagggtccgggtccccaggggacccttcggggacttcaggacatctgcagcgaagaaatattagcaaacttggctgga

SEQ ID NO: 284710 - DNA, 157 bp, Homo sapiens
  chr7:1278131-1278288
  hyper
ctttcctcctcgcgcgggcgcaaatgaatttcggagcccgagtccctttaataatatttacataattttcgctcagtgactctgatatttgctctctaggagaccgagcttataggaaaaataattagatcaaaagaaaagtgagagggggaaggaa

SEQ ID NO: 284711 - DNA, 46 bp, Homo sapiens
  chr7:1279053-1279099
  hyper
tttttgctctattatgcatccgacgccatcatttttctttctaatt

SEQ ID NO: 284712 - DNA, 127 bp, Homo sapiens; identical to SEQ ID NO: 200781
  chr7:1280222-1280349
  hyper

SEQ ID NO: 284713 - DNA, 356 bp, Homo sapiens
  chr7:1282150-1282506
  hyper
attgctgctaattttgttccattaactttatttactcttgaaccccttaattgttttccacttatttttagtaattttataatgcactaataaccaccccccccccagcctgcggacgcctcccgcctcctcctccccgctccctcctcgcttcccctccctgagcgcgacctcccaggcttcccagccactggccgcgggctccgcgtggcgctggcctccgggcacacagagaagccgcggggtgagcgagagctcggcctggggccacgggtgccggtgggtccccccgggattccgcggggagggcagctggctaggaccaggaccagtgtctccgcgccggaggccagagg

SEQ ID NO: 284714 - DNA, 119 bp, Homo sapiens; identical to SEQ ID NO: 200783
  chr7:1283941-1284060
  hyper

SEQ ID NO: 284715 - DNA, 102 bp, Homo sapiens
  chr7:1286444-1286546
  hyper
cggctgggaaacggcccctcccggcgcctccccgaccccagggcagggcccgggaccacacagacccccgcaggccggcggccggagccctggcagccgggc

SEQ ID NO: 284716 - DNA, 58 bp, Homo sapiens
  chr7:1286612-1286670
  hyper
cggtgcagatgtaacatctcatttacagcgtggcctccgggcatagaaacaattggca

SEQ ID NO: 284717 - DNA, 192 bp, Homo sapiens
  chr7:1287431-1287623
  hyper
cgggccgcaccccccggaccctcaggacctggagcgcgtggagggcgtggaccaccccggatcccccaccaccgggcgtgtctgccaagggtgtcattgggcgccgcgcagaaggggcttccgaggacccgcccctcccccgcagccgtcagggcgctgacggaggcagctgcgcctgtttaactgggagcc

SEQ ID NO: 284718 - DNA, 39 bp, Homo sapiens; identical to SEQ ID NO: 200784
  chr7:1408440-1408479
  hyper

SEQ ID NO: 284719 - DNA, 1008 bp, Homo sapiens
  chr7:1498585-1499593
  hyper
cacgtctgactcagccggcgggcgggggatgccatggctctggcccagctgcattcggtgtccgggcacactgaggccactgaggacagcctcggggggctgcacggtgggctgtgcctgcccagtcccacgcctcggctccccatcccccagccgcccgggcctcagtttccccgcccgtgtcagcgcgcagccgaacagcagaagaatcaaagggcgccaggcaggacttacatgaggtcgggccggtggcggtgcaggatggcgcagaaagccaggccgtcgcggaacgacgtggtcatgttgcagatattcacgtcgcggtagccctcgcactgctgccggcaccactgttgcagcgccctgatggccgccatgtgggcggcgcgcccgccgcgcggcggaaccgccctccgacaccttcccgcggctgtgccgcgaccgcccggccggcgggacagacgctgggaccgctacggaaccgccagacccacggcgcccagccccagctgagccggactgagggcgacgagtgccgggtccctaagagaagccgagcccggccccgcccccgccggccccgcctccttgtaggccccgcccccagccgccaagtcctgcctccggataggccccgtcctcacacctcccagccccggcataggctcccgcccaggcaggccccacctcccgacaggccccgcccccagccgccgggtcctgcctcctgataggccccgttcccacgcctcctggccccggcacaggctcccgctccaggcaggccccgactccggacaggccccgcccccagcctccaggttttgcctcccgagaggccccgccccacgccgcccggccccagtacgggctcgcgccctaggcacgtcccgcctcctggtaagtcccgcccccacgctgtcaggtcccgcccgacaggccccgccccacgccgcctggcccctccccaggccccgccccgccgctgagggccgagacccccaaccg

SEQ ID NO: 284720 - DNA, 186 bp, Homo sapiens; identical to SEQ ID NO: 232658
  chr7:1546635-1546821
  hyper

SEQ ID NO: 284721 - DNA, 458 bp, Homo sapiens; identical to SEQ ID NO: 200786
  chr7:1571091-1571549
  hyper

SEQ ID NO: 284722 - DNA, 400 bp, Homo sapiens; identical to SEQ ID NO: 232660
  chr7:1572209-1572609
  hyper

SEQ ID NO: 284723 - DNA, 94 bp, Homo sapiens; identical to SEQ ID NO: 232661
  chr7:1609779-1609873
  hyper

SEQ ID NO: 284724 - DNA, 233 bp, Homo sapiens
  chr7:1705153-1705386
  hyper
agcggggcgggccaggaggagggggcgaggccgccactcggcttcccacgccgcccccgcggctggctccaacttcccctccggagcccccctccggccaccccccagcccaccgacgtgcgggcagcgaccccgccccccgcccctccggtcgcccccgccgcggcccccgccccctccccatccctccccgcgcgctctcccacatgaaaccttccatcacgctcagaaag

SEQ ID NO: 284725 - DNA, 502 bp, Homo sapiens
  chr7:1705693-1706195
  hyper
aggaggaaggaggggaagccgccgccgccgccgccgcgctcggggaaccggggtgcgcgcgctctgctcgcccgcgacagtgcctccagcccggggcccgcaccccggcccaggtaagaaggggcctgaggggcagggggctgtccggggccgggggacccctctgtcgccgctgcgggatcggagggtccccgcccctaggggaggcagggaagaggatgctctctggggggggcggcggggggcagcgcagggtccccagcggctctcgcagcccgggccaccccatccctggtgccctgacctcggcgtccgcgccagggccgagtctccccgcccgcggggctctggatgcggcgctcggggcccgcggctcccgggcgtccccatccacccacccaggttcggaggcgggcgcacccgaagttagcggccgccgagcctgggccggacaaacttccctccccgacgccgcggctggaagggccaggactccggaccc

SEQ ID NO: 284726 - DNA, 206 bp, Homo sapiens
  chr7:1706733-1706939
  hyper
cattttccctcttcgatctcggggtgtcggcccccccccgaactttttctcttcccaaactgcacggtggccacccggtcacggccctgggccgtacccgcgcaatctcagcaccattcccgaccgagtcctccgccgcgggctgagcgcgagtccccggggccaggctgcccagggaggagcagggacttcctacaatccgcgcc

SEQ ID NO: 284727 - DNA, 310 bp, Homo sapiens
  chr7:1707309-1707619
  hyper
ccccagggccagcgccggccccgccccccgccccgttaactccgggactccgccgccctccaggttccaacctcccagcttcaccgccgcgtcctctccccggttctgggtctgggggaggggcagggggcgtggagcgcggcgttgggccccggacagatgtcctcgcggcggcggcgccggcgtccgggtaacagcaggccgccaatcggcgcggccacgggggaggggcgacccggccgggactccggggactcggtcgcagccggacggcgcagcctccgctcggggtggggggggggggcggccg

SEQ ID NO: 284728 - DNA, 154 bp, Homo sapiens; identical to SEQ ID NO: 200790
  chr7:1708906-1709060
  hyper

SEQ ID NO: 284729 - DNA, 146 bp, Homo sapiens
  chr7:1710370-1710516
  hyper
cccttcccggaaattagggggctgtcctcacctcctggccgagtcgctgacccctccccaggctcgcatcgccctccctgctgggccgccctccccccgacgctgcgagcctcctcgctccgcgcggggaccgtccagtcacgcac

SEQ ID NO: 284730 - DNA, 463 bp, Homo sapiens
  chr7:1785930-1786393
  hyper
cagatcatcaacaactgcatcgacgcgctcaagtccgagtccacctccttccagggcgtcaagtcggggcccgtgtccgtcgcggagccgccgctggtgctgctgtccgagccgctggccgccaagcacggcttcctggcgcccgggtacaaggacgccttcggccacagcctgcagcggcaccacagcgtggaggccgccgggccccctcgtgccagcacctcgtccagcggctccgtgcgcagcccccgcgccttccgagccgaggccgtcggggtgcacaaggccgcggccgccgaggccaagtacatcgagaagggctcccccgcggccgacgccatcctcactgtgacacccgcggccgccgtgctgcgggccgaggccgagaagggtcgccagtacggcgagcaccggcactcgtaccccggctcccacccggccgagccacctgcgccccccgggc

SEQ ID NO: 284731 - DNA, 103 bp, Homo sapiens
  chr7:1786899-1787002
  hyper
ggtcctgggatgcgcttgtcgccccgggtggcacgtgtccacacacacacacacacacacacacacacacacgagggacttcggaaaactgtgtcttagggat

SEQ ID NO: 284732 - DNA, 151 bp, Homo sapiens
  chr7:2018616-2018767
  hyper
cgctggaggaacatcgaatctagaaggcatcatagctgccatgtgcagagcacttcctgggccggggccacactaaaggcagcccttttcctgctttactctcggcaaccctgagaaagaggggccatccacaggtgaaaactggaacccc

SEQ ID NO: 284733 - DNA, 50 bp, Homo sapiens; identical to SEQ ID NO: 232668
  chr7:2027579-2027629
  hyper

SEQ ID NO: 284734 - DNA, 202 bp, Homo sapiens; identical to SEQ ID NO: 200791
  chr7:2195725-2195927
  hyper

SEQ ID NO: 284735 - DNA, 359 bp, Homo sapiens; identical to SEQ ID NO: 232669
  chr7:2443784-2444143
  hyper

SEQ ID NO: 284736 - DNA, 319 bp, Homo sapiens; identical to SEQ ID NO: 232670
  chr7:2517234-2517553
  hyper

SEQ ID NO: 284737 - DNA, 77 bp, Homo sapiens; identical to SEQ ID NO: 223010
  chr7:2555344-2555421
  hyper

SEQ ID NO: 284738 - DNA, 231 bp, Homo sapiens; identical to SEQ ID NO: 114515
  chr7:2558675-2558906
  hyper

SEQ ID NO: 284739 - DNA, 167 bp, Homo sapiens; identical to SEQ ID NO: 200792
  chr7:2559952-2560119
  hyper

SEQ ID NO: 284740 - DNA, 268 bp, Homo sapiens; identical to SEQ ID NO: 232673
  chr7:2561982-2562250
  hyper

SEQ ID NO: 284741 - DNA, 81 bp, Homo sapiens; identical to SEQ ID NO: 232674
  chr7:2595523-2595604
  hyper

SEQ ID NO: 284742 - DNA, 43 bp, Homo sapiens
  chr7:2728259-2728302
  hyper
ggggacgggtcgggaatccagggccaagcgcccgaaagaaggc

SEQ ID NO: 284743 - DNA, 430 bp, Homo sapiens; identical to SEQ ID NO: 232675
  chr7:3018094-3018524
  hyper

SEQ ID NO: 284744 - DNA, 407 bp, Homo sapiens
  chr7:3082719-3083126
  hyper
tagtacagtccccgcggggggctgtcctctcccatctcccagctccacacccacttttggtgcggctgcccttcctccctgagccaggccccaccttcccaggagcctctgagtcaggctgggctgtggtctgcaaacttccgggcctttcaggtgtcagaaaagtttctcttcctccctctggggcaggtgcaccaaggggctgcagcctcctgacccccgattttttcctgtccagtaggaggaggtgggggctttgctgggcggtgatactcagagacgctcaaagagacacggaggagaggcacacgaggtggaaagtgagggagaaaaagggttggaagggaaaaaggggagaggagagtgagagagagaaggggggcagggggacagagatggagagggaa

SEQ ID NO: 284745 - DNA, 98 bp, Homo sapiens; identical to SEQ ID NO: 200794
  chr7:3083602-3083700
  hyper

SEQ ID NO: 284746 - DNA, 50 bp, Homo sapiens; identical to SEQ ID NO: 200795
  chr7:4770079-4770129
  hyper

SEQ ID NO: 284747 - DNA, 119 bp, Homo sapiens
  chr7:4770153-4770272
  hyper
gggaggggatggacgtttgtgttgctgtcagggaccttgccgacccagcccccgccccgccttcaagtttgtgccttattttccaaagccgccacacttgagacgtccttgctgcgggt

SEQ ID NO: 284748 - DNA, 132 bp, Homo sapiens
  chr7:4784755-4784887
  hyper
cgggaggtgggagcggggccaggccagaagagctggctgcctgcaaggctgtcccctcccagtgccgccccgcccccgcggtgcctgccttcctaatttggtgtgcattcgcctcgccagtcctcattggcc

SEQ ID NO: 284749 - DNA, 307 bp, Homo sapiens
  chr7:4922242-4922549
  hyper
agcaggagggaaaacgaagcgcagactttacacactcagctctctcccctccttccatgaatcctatctttacagccccagcccgagccacgctttcaaatgcaaacataattcaatcagatttaattctgacctgctagctgctggagaggagaccgacttgccccccagcaaaagggactttcaagactggttcctgtctggaatgcacaagaggtggcctatattaaccgcgggacacgagcaatcagattcttctgtgcaattcagattagccaaacacttgacaggcgacagggcagggcag

SEQ ID NO: 284750 - DNA, 203 bp, Homo sapiens; identical to SEQ ID NO: 200798
  chr7:5085238-5085441
  hyper

SEQ ID NO: 284751 - DNA, 83 bp, Homo sapiens; identical to SEQ ID NO: 232684
  chr7:5125291-5125374
  hyper

SEQ ID NO: 284752 - DNA, 42 bp, Homo sapiens; identical to SEQ ID NO: 232685
  chr7:5229794-5229836
  hyper

SEQ ID NO: 284753 - DNA, 158 bp, Homo sapiens; identical to SEQ ID NO: 232686
  chr7:5230315-5230473
  hyper

SEQ ID NO: 284754 - DNA, 450 bp, Homo sapiens
  chr7:5458489-5458939
  hyper
taatgggattagcacgggcttggctctgggcgttggcctggggtccgaggtctccttgcggctactcgaagtgggggagggggacagccagaaccagcaccggcccccacctttccctcccgggtgagcacggggttcaagggggcggcagctgtcctcctgctgtttcctccccgacctcagcctcggcgtgcagaagtcaggcagctcccagcgagcgcagaaggtgcgcagaggcagggctccgaggctacctcccgctgggcttccgaggctggtggcttggccttccctccacctcagcctcaccatccagcaaatgggcattaggccgtctgactgctgcgtcagattaggcgcggccctggcactgtgcatgcatgcatgagtagtagcttgttttcaccgcttcgcattagggcactttgccttgccaggccggagccagat

SEQ ID NO: 284755 - DNA, 880 bp, Homo sapiens; identical to SEQ ID NO: 200799
  chr7:5459600-5460480
  hyper

SEQ ID NO: 284756 - DNA, 859 bp, Homo sapiens
  chr7:5460573-5461432
  hyper
ccccgtggccgaccgaaggagagtcgccgagccccggccgcgagtgcacaggaggacccggccgagtggatctccctgggaagacaggaggggacgggcacggcgcggggcacttacccgggtgcggatggagattcaggccggccatgtacttcccgggcggcagcgggccgggcaagcccgaggcgggcaagcgtccggcagtggccgcgcccacgcggtggctgtccatggccaggccggacagcagcggcggcgggggaccgtgcacggaccgctggggcccgaagtctcggccatccatcctccgcgggagtgccgcgatcagccccccacccggcccgcaggcctagctcagtgggacctaaaagttcggcctcggcgtagtcccagagtcctcgggcggcgggggctccgcggcgtgcatggcggcggccagcggggcttgcgctcggcggcgggcccgcggcccggggcgcacaggcggccggcggtggggcccctccgggcggccaggcggagctgcgcgaggcggcgcacacggcgtcttggcggggaggagacaggccgcggaagaaatagaaagggggaaagaaaaaagggaaaaaaaaataaagtaacaagtttcagaaagtcgcctcgcccttcaggatcggggggtgccgactgagtggccagaaatgaaatcgggagtagcccctttccactgaaaaatgaaatccaaactccttccgccggcggcttcaggctcccgggacctggctcggaaaagtgaccggcggcggtggcgcgctgcgccccagcccggactctgcctcggcggctgccgggtcctcccgaaaccggggagggctcctcg

SEQ ID NO: 284757 - DNA, 221 bp, Homo sapiens; identical to SEQ ID NO: 200801
  chr7:5462090-5462311
  hyper

SEQ ID NO: 284758 - DNA, 93 bp, Homo sapiens; identical to SEQ ID NO: 232689
  chr7:5463270-5463363
  hyper

SEQ ID NO: 284759 - DNA, 419 bp, Homo sapiens; identical to SEQ ID NO: 200802
  chr7:5464580-5464999
  hyper

SEQ ID NO: 284760 - DNA, 1428 bp, Homo sapiens
  chr7:5465049-5466477
  hyper
cgcattgcccgttctgttttttttaaatcaatttttaaggcaactttttgggaggggggaaaaatgagcgagttagtgcccattcgttctattttcttttctccacttttagaaaaaagtggggggaggcttcgagaacgaacgggggggtgtctaatttaattccaggataaatttgaggaaaaaagttcagcctcttgagggcagtttcaagttgcccttcctggagcttcctgcgttagtttctaggctgccctcttttggaagctgtagctccgctggggaggagggaggagtgagaaggaaagaaaggaacaaaaatagccggagccgaggggaacaagccacggtgtccgcgtttggagctgggcgtgcgggtctcagtggcggcctcggcattcggggcggcgggaggcgcccggtgcatccccgggacggccaggagcaaagacggagaggagaggggggttagagaaaggaggtattgtgtctgtgtgccttaggggaggaggggactgcaggaatcgaataaacgcagtcgagctgcgcggggctgctggaagcccaggcgggggaagggggccgtgtgtgggggcgcagagcgcccttgagccttacgcagaggtcttgtgtgttcctagttaagccctcccacgcccgaggccccatcgcttcctctccaccctctttacccaccaatattccaagcccagatcctaattccccaccgcattaccccgccctggatttggggaatgtttttctttattttaatatagctcaaggaaaaaatacgtatatcttgagagatttggggtggggaaaacaaaagccttgcggagtagaaaaaacaaaggcttatttttataaatgtttaatgttttcaccccctggatgctccgagacgccgtaattgtgacggcggggtacgtgtgccataaatcatttagttgctaataaaaattctgcctgtttgccctggatttgccaatggcgtttgcatttttcaagtgtgcgcctcggcggtgtgacgaacccagccggtatttcattagggccgcggttcggggcagaggaggtcccctccccgcctgggctttgtgcgcccagcccccttgcaccggcccttccatacctgcccccggcacccactccatatttgcgcggccctgcagccaccggagtccggccggggagcagggcctggggacgcggtggtggtggtggctcccagttcctggccaccaggcggggcggccaggacgcatcctgcccacgcggttttccagggctgccgcgtgcttgggggcgcgggcgggccacgcggagaggccacctgcccgggccaatctgtacgctccgtgatcttcgcccgctccccggccccgcgccctggtgtccctgcagtcgctgagtaaacagcgactg

SEQ ID NO: 284761 - DNA, 682 bp, Homo sapiens; identical to SEQ ID NO: 200805
  chr7:5466507-5467189
  hyper

SEQ ID NO: 284762 - DNA, 116 bp, Homo sapiens; identical to SEQ ID NO: 200806
  chr7:5467905-5468021
  hyper

SEQ ID NO: 284763 - DNA, 54 bp, Homo sapiens
  chr7:5526404-5526458
  hyper
caggtcaccggcgacaggtcagcagccacgacaccggccggccctgcaggctga

SEQ ID NO: 284764 - DNA, 633 bp, Homo sapiens
  chr7:5594638-5595271
  hyper
tctcagcttggggtgcgggggccgactctgcccgggctgggtggatagttgttatcgggagctcccaggcccgcgcggctcacgtgggccgcagctcgcggcgcctcccgcgtcccagggccgcgaggcgctccgggagataagccaggccccgtgcgagtccagcgcggacccggccggcccccagcccgcccctcaccggcccccaccccgcccctcggccggcccggcccacttggcccgagttcctctccataaaaggcgaggtttgggagcgcccggggagggggcgttgggtccacgggccgcccccgcccaccgtgttcccctccctcactgcgagccctcgccggcccgggggtgcagcccagcccccctgccgcgacccccacgccgggcccgtagaccacgaccctgaccccagtccccactccggatcgggcccacagcaccccccgccggtccccgcgagtcccgcgctctgtccccattttgcgattgaagaaattgaggcccgcagcgtgcgtagcccggctggggccacggggttggggactgaacggccggaaacgccacacgtgcctccaggtggcaagccagctcctcatagacgcacacgaacccttctgcaag

SEQ ID NO: 284765 - DNA, 120 bp, Homo sapiens; identical to SEQ ID NO: 232693
  chr7:5595699-5595819
  hyper

SEQ ID NO: 284766 - DNA, 141 bp, Homo sapiens; identical to SEQ ID NO: 232694
  chr7:5602625-5602766
  hyper

SEQ ID NO: 284767 - DNA, 291 bp, Homo sapiens; identical to SEQ ID NO: 232695
  chr7:5603111-5603402
  hyper

SEQ ID NO: 284768 - DNA, 637 bp, Homo sapiens; identical to SEQ ID NO: 200808
  chr7:5632266-5632903
  hyper

SEQ ID NO: 284769 - DNA, 138 bp, Homo sapiens; identical to SEQ ID NO: 200809
  chr7:5633472-5633610
  hyper

SEQ ID NO: 284770 - DNA, 148 bp, Homo sapiens; identical to SEQ ID NO: 232697
  chr7:6098848-6098996
  hyper

SEQ ID NO: 284771 - DNA, 61 bp, Homo sapiens; identical to SEQ ID NO: 232698
  chr7:6144353-6144414
  hyper

SEQ ID NO: 284772 - DNA, 123 bp, Homo sapiens; identical to SEQ ID NO: 232699
  chr7:6388587-6388710
  hyper

SEQ ID NO: 284773 - DNA, 35 bp, Homo sapiens; identical to SEQ ID NO: 232700
  chr7:6414182-6414217
  hyper

SEQ ID NO: 284774 - DNA, 60 bp, Homo sapiens; identical to SEQ ID NO: 200810
  chr7:6523872-6523932
  hyper

SEQ ID NO: 284775 - DNA, 251 bp, Homo sapiens
  chr7:6543240-6543491
  hyper
ccaggcgccggggctccatgctcatcagcacctggcgcagctccgcggggctcagcttcaggtgtgccaagaggatggctgcgggcggggcggggcggtgagctgggcggggccggagcggggccggatgggacccaagacggagagggcagggcagaggcggggagagggcggacacggggcggggcctaggggagaggacggggccttgaggctggaaggacaagaaacgcggacggggacaagaggct

SEQ ID NO: 284776 - DNA, 75 bp, Homo sapiens
  chr7:6570379-6570454
  hyper
ctgtcctgtcccctcgaccagcccaattgtaggaaggaaagtgggctttcaatcccagccttttatcccaacacc

SEQ ID NO: 284777 - DNA, 92 bp, Homo sapiens
  chr7:6575941-6576033
  hyper
acagcagaggctgccgtttcaagctgcggggactgggcatccccaggtgtccagggctcccgctgcccaggctctaaatcgagcgcgcccaa

SEQ ID NO: 284778 - DNA, 62 bp, Homo sapiens
  chr7:6655356-6655418
  hyper
cggcccaggccgcccgcaggctccgggcacctgtagcccccgaggacccgcgtcgcctggcc

SEQ ID NO: 284779 - DNA, 220 bp, Homo sapiens
  chr7:6655448-6655668
  hyper
gtgccgaccccgggcgccggcctggatcccgctgcccgcgatggtcccggggggccggccctgagccccgcgcgggattcggggccctgcctcccgccccagcccccgccggagagtctccaccaacttctgctcggccgctcctctcagccccttcccttggcccagggcgacctcggcagcccagagggcgtggaccctccggagtgcccagaaagcc

SEQ ID NO: 284780 - DNA, 167 bp, Homo sapiens
  chr7:6655854-6656021
  hyper
gacgcgtcccttgagagagtttggactggatggcacgagtcggcctgtttaggggagaggggccagctctgcacgggccagggtggactctcaggagcgcctgggcacagggccaggccgtgggtgacagtgctctggacacctgccttgcccgggagctggggtgg

SEQ ID NO: 284781 - DNA, 90 bp, Homo sapiens; identical to SEQ ID NO: 232705
  chr7:6677419-6677509
  hyper

SEQ ID NO: 284782 - DNA, 71 bp, Homo sapiens
  chr7:6966984-6967055
  hyper
gatggttctcctttgcctccgtctctttccccgattgatttttccaaatggggagtcgtggcttggtcctg

SEQ ID NO: 284783 - DNA, 68 bp, Homo sapiens; identical to SEQ ID NO: 232707
  chr7:7222007-7222075
  hyper

SEQ ID NO: 284784 - DNA, 257 bp, Homo sapiens; identical to SEQ ID NO: 232708
  chr7:7606359-7606616
  hyper

SEQ ID NO: 284785 - DNA, 246 bp, Homo sapiens; identical to SEQ ID NO: 232709
  chr7:8008152-8008398
  hyper

SEQ ID NO: 284786 - DNA, 618 bp, Homo sapiens; identical to SEQ ID NO: 200812
  chr7:8009322-8009940
  hyper

SEQ ID NO: 284787 - DNA, 77 bp, Homo sapiens
  chr7:8301294-8301371
  hyper
caagtcaaccctggacgcaagtccctgcccaccagggagctcggggtcctggggccggagccgccgggaaggcgagg

SEQ ID NO: 284788 - DNA, 538 bp, Homo sapiens; identical to SEQ ID NO: 232712
  chr7:8301668-8302206
  hyper

SEQ ID NO: 284789 - DNA, 329 bp, Homo sapiens; identical to SEQ ID NO: 200813
  chr7:8476750-8477079
  hyper

SEQ ID NO: 284790 - DNA, 348 bp, Homo sapiens; identical to SEQ ID NO: 232715
  chr7:8479986-8480334
  hyper

SEQ ID NO: 284791 - DNA, 68 bp, Homo sapiens; identical to SEQ ID NO: 200815
  chr7:8480572-8480640
  hyper

SEQ ID NO: 284792 - DNA, 151 bp, Homo sapiens; identical to SEQ ID NO: 200816
  chr7:8481159-8481310
  hyper

SEQ ID NO: 284793 - DNA, 138 bp, Homo sapiens; identical to SEQ ID NO: 232719
  chr7:10979885-10980023
  hyper

SEQ ID NO: 284794 - DNA, 69 bp, Homo sapiens; identical to SEQ ID NO: 232720
  chr7:10980264-10980333
  hyper

SEQ ID NO: 284795 - DNA, 107 bp, Homo sapiens; identical to SEQ ID NO: 232721
  chr7:11870585-11870692
  hyper

SEQ ID NO: 284796 - DNA, 273 bp, Homo sapiens
  chr7:11871119-11871392
  hyper
atcatggaagtgcgcgttgccctcattacagagctgcgagagaaatattccagctactcactgttgcctcttagttgttatgcttttctttcctaattgcatcggacatgacctatttgcttcctaagaaatcatactttttaccttaggataccagcataaccaagccatccaaaagcaccggggtccctacagaagcccaccagctccttaatgtggccccagatgtgaagatggggaaagggtaactccgtcccacttaccagtcttcca

SEQ ID NO: 284797 - DNA, 72 bp, Homo sapiens; identical to SEQ ID NO: 200818
  chr7:11871857-11871929
  hyper

SEQ ID NO: 284798 - DNA, 233 bp, Homo sapiens; identical to SEQ ID NO: 232724
  chr7:12250503-12250736
  hyper

SEQ ID NO: 284799 - DNA, 46 bp, Homo sapiens
  chr7:12442874-12442920
  hyper
ttggaggtggaattcgtgcagtatggaattcaactctgttctgaga

SEQ ID NO: 284800 - DNA, 344 bp, Homo sapiens
  chr7:12442950-12443294
  hyper
gcagatccggcgaaagtttcttacagtaaattacaatgacctcaaagagcaggataacagcaggaaacaaccaaaaacagaaccaagggtcgtagagtaagaggaggcaacaaccgcatgtgcgcaaaagaaaagtgtagagttttcaagctggaaattgaccttttcaaagacagcagagggacagagaggaggcgggtgaggaacaaacatcgcttgctgccttaaaacgcacagggacgctccccaagtcgtccaaaaagtctagcctagtccctctaccgcccacgcggcgccactgcgcgcccacccccgcgcgccctacctcgcttaccttcccccca

SEQ ID NO: 284801 - DNA, 66 bp, Homo sapiens; identical to SEQ ID NO: 200820
  chr7:12443718-12443784
  hyper

SEQ ID NO: 284802 - DNA, 149 bp, Homo sapiens; identical to SEQ ID NO: 200821
  chr7:12610063-12610212
  hyper

SEQ ID NO: 284803 - DNA, 97 bp, Homo sapiens; identical to SEQ ID NO: 200822
  chr7:12610242-12610339
  hyper

SEQ ID NO: 284804 - DNA, 160 bp, Homo sapiens; identical to SEQ ID NO: 200823
  chr7:12610476-12610636
  hyper

SEQ ID NO: 284805 - DNA, 121 bp, Homo sapiens; identical to SEQ ID NO: 114645
  chr7:12610726-12610847
  hyper

SEQ ID NO: 284806 - DNA, 1160 bp, Homo sapiens; identical to SEQ ID NO: 200824
  chr7:12726287-12727447
  hyper

SEQ ID NO: 284807 - DNA, 365 bp, Homo sapiens
  chr7:14028676-14029041
  hyper
tgctgctgctcttcgcaaatctcagctcagtattttatattttgagcatttagctggagatttcctcaggatctggacttctatcaacctagaggggaacaagatggcttttaggcttaaaaaaaaatcatgaatgaagctcttgaatttgcatagctaattaccctccgacagtcccattcacaaaaataaccctccctacaccgcctccttcacctggatccaaagagagccaacagagttcacaatttacatattttcggtagtagcaaaaatccgaacaagaggcgatgtatttatttacactctcgatgtttccctgcgcggtcggtgtaccccgggcagctctgattcgcaaacgtgtg

SEQ ID NO: 284808 - DNA, 422 bp, Homo sapiens
  chr7:14029071-14029493
  hyper
gctttgcacctaacgggactaaagagacggagacacctctttcatcaggatagtttttgcgacccacaaccatgcaattatctggagagacataaaaagttgttggaaagacccacctgaaggccacgctaggcgaaaggctgcaaaaacttccctccaaatttaataaaaacattaattatagcccagcacttcccccttggaagccgaaagcgcctctgacagagctcaattcggtggtttttcctctacttctcctccaggggcctccaatccaaactgatggatcgctgcctcccattggctccgcgtctctttcacaagatcagatttcgggctgtcaatcaggcggcttgctgccccttcccgcgggtctccctcgcccctctgccctagggggtgctcggccggtaggcgctggg

SEQ ID NO: 284809 - DNA, 330 bp, Homo sapiens; identical to SEQ ID NO: 200827
  chr7:14029555-14029885
  hyper

SEQ ID NO: 284810 - DNA, 929 bp, Homo sapiens
  chr7:14030269-14031198
  hyper
ataactaggacgttaagcagtgagggctgcatctctgaagccacttgccctgatcctcctatgggactcagaacagtaaagcgtcactttaaggagccagtgtccaacagcggacgggaggccgcggggataggaccagggactcaatgctgttgaaattcatttgtgaccagaactagtgaccaaaagacgtttccggcagctgttccgcccgttaggaaacgtgctgcagttctcaatttctatttgaaagtttccttccttaaatagaacgttatggagacacattaaaatggagtgtaagagcgcacagcactcaaccccggacctgggcaggagaaagatctacttaaaaaagaagcaaacaaacaaacaatcaacacttattactgggaaaacaaccaataactatggacagcaaagacagaccccgcgcattcccggaaactactaaatcggagttcacaacgcgcgcacctataagcattttgagcgggaactgcattttaaccccggccaaggagagattccaggaagcgcctgggccccgaggctgaacagtgaagctcatgggtactatctgagggtgcaaccaagcagggggtcaataacaagggtcctccaccaccctgcactcctggaataacccagcgcctgtaatctgagcaacagtttccaaagaccttctctgcagcccgagcctgacgggtatccagggtaaccgcgagggggcggagcttcgggttaggtcccggcgaggttcttcccgcagccaataacgagccgtaaatccccagcccattgttgtttattgctgacccctcagcgctccgctaggagattggccgctttagggaagggggcggagtcccgcccgccccaacagccacctttcgtctccattcacaaaattccggcccttcttggtc

SEQ ID NO: 284811 - DNA, 151 bp, Homo sapiens; identical to SEQ ID NO: 200829
  chr7:15725485-15725636
  hyper

SEQ ID NO: 284812 - DNA, 50 bp, Homo sapiens; identical to SEQ ID NO: 200830
  chr7:15726407-15726457
  hyper

SEQ ID NO: 284813 - DNA, 101 bp, Homo sapiens
  chr7:15727077-15727178
  hyper
ccacttgtccaccaagaagaacttttcctgggtcaagaatatttccaagcgattgtgtcccggtcatatgagatgtgtagattgcacgcgcatttctagcc

SEQ ID NO: 284814 - DNA, 58 bp, Homo sapiens; identical to SEQ ID NO: 232731
  chr7:15727422-15727480
  hyper

SEQ ID NO: 284815 - DNA, 373 bp, Homo sapiens
  chr7:16460517-16460890
  hyper
aaggccagaacttcccatctctgaaatgcgggagggaacagagctcaagcttgaataactgagcgcggcccggcagtcccccaagtgaaggtgctagcgctagagcagcggcagggcggggagcgggaggccgggccccagggaaccgcggggcgcgcccggcgccgcattacctctccagggcctgtagggtgtagctgatgagcggcctctccaggatggggcagaattgcttcggggtggggacccccatcctctccccgcaccccccggcaggcaacacagctgccacggcttgcgggtggcgcccgggctcggtcccggccacgctctgcagggaggcggaagccgtgtggtccgcgccgcgctgacc

SEQ ID NO: 284816 - DNA, 499 bp, Homo sapiens; identical to SEQ ID NO: 232733
  chr7:16685459-16685958
  hyper

SEQ ID NO: 284817 - DNA, 285 bp, Homo sapiens
  chr7:16793057-16793342
  hyper
tcaaaatggtgccacgtcatctgccagggccaagaatccagaggtgctgtcatatttctccttgccagcgtggatctcctccgagccccgccctccctcctcacctgctcctggggaaactacaccaaggccgccgctctggcctggggctccctcccacacggccttggccctctccccctcgccccgggaccgctccgcccctcccggatcccggtcggcggagcgcatttatttgcatatttctacctttgttccctgccagcggccaatcagcgcgcgggg

SEQ ID NO: 284818 - DNA, 182 bp, Homo sapiens; identical to SEQ ID NO: 114656
  chr7:16793380-16793562
  hyper

SEQ ID NO: 284819 - DNA, 1038 bp, Homo sapiens; identical to SEQ ID NO: 200834
  chr7:17338062-17339100
  hyper

SEQ ID NO: 284820 - DNA, 229 bp, Homo sapiens
  chr7:17339332-17339561
  hyper
gttaggttagaggacggtcttaattctcattcttcgtagagtttggtaaggcgagatgttttaaagagctaaacacatgctgacttttacgaaggggctgagtgcctctaaaggtactttttggtccccaccaactggctttgtgttgcgctcatatttacttatttggcagcaattttgtagcgctcatcgtgaccatatcggtaaagtggatagaagtggtagcagg

SEQ ID NO: 284821 - DNA, 274 bp, Homo sapiens
  chr7:17339591-17339865
  hyper
ggaggatttgtattcttcagacatctttttcggaagcttgcttatcacttttggggtggctttagggtctgtaaaataaaagatttagaactgcatttgagagaggttttcattcttaacatctacctctaattcttttccccttcaaagttttcttctagttgagtgagtacaaacttgcttttgtcgttgtcggttgattttggtggaatatttgtgtgagatggccaattttttgtgtgtgtcagaaaaaactatccgtgctcaaaacatt

SEQ ID NO: 284822 - DNA, 105 bp, Homo sapiens; identical to SEQ ID NO: 200837
  chr7:18125867-18125972
  hyper

SEQ ID NO: 284823 - DNA, 218 bp, Homo sapiens; identical to SEQ ID NO: 200838
  chr7:18126225-18126443
  hyper

SEQ ID NO: 284824 - DNA, 96 bp, Homo sapiens; identical to SEQ ID NO: 200839
  chr7:19146829-19146925
  hyper

SEQ ID NO: 284825 - DNA, 59 bp, Homo sapiens; identical to SEQ ID NO: 200840
  chr7:19156644-19156703
  hyper

SEQ ID NO: 284826 - DNA, 128 bp, Homo sapiens
  chr7:19183519-19183647
  hyper
gcggtggctggtggcgaagctgcagggcgcccaaggccccctgcggcccaggagtgacccgagtgcactcgccccttactctggcctggggcctgaagaaggcactggaacacggaagctgatgctgc

SEQ ID NO: 284827 - DNA, 312 bp, Homo sapiens
  chr7:19183746-19184058
  hyper
aggtggcgaaggggagggagaaaggaagagagagggcttgcgcgcgggagagaggaagggacgggagggagagggaatggaagacaggaagggtgtcccttctcagaggtcgcactttgtcagcagttcctctcgactgctctgccttccatttttcctttcctcagttcctggacaagcctcggaggaccaggcagaaccctctggctagcagaaaagctcgcacccccgcacccttgcggcgtctgcttcagaccctccacgcaggcgcccgctggagcgcctgctggggatggcgtaccaccgaccctt

SEQ ID NO: 284828 - DNA, 304 bp, Homo sapiens; identical to SEQ ID NO: 232743
  chr7:20369105-20369409
  hyper

SEQ ID NO: 284829 - DNA, 272 bp, Homo sapiens; identical to SEQ ID NO: 200841
  chr7:20370484-20370756
  hyper

SEQ ID NO: 284830 - DNA, 33 bp, Homo sapiens; identical to SEQ ID NO: 200842
  chr7:20816219-20816252
  hyper

SEQ ID NO: 284831 - DNA, 99 bp, Homo sapiens
  chr7:20817281-20817380
  hyper
ccacctatggaggacgctgcactttgacgtcgctggggagaggaggcgggtgcgagtgaacacaaagcagtttggccaagaaaagagcacaggaggtga

SEQ ID NO: 284832 - DNA, 127 bp, Homo sapiens; identical to SEQ ID NO: 200844
  chr7:20817410-20817537
  hyper

SEQ ID NO: 284833 - DNA, 119 bp, Homo sapiens; identical to SEQ ID NO: 200845
  chr7:20825260-20825379
  hyper

SEQ ID NO: 284834 - DNA, 554 bp, Homo sapiens
  chr7:20825559-20826113
  hyper
aactcacctggcacccccaacagccccggcgcccggccgcttcctactctacaggaggggacaagtttggctgccggcgtctgattcgggagcaagcaccacgctaaagaagagtttgacaagtattctcacctaaaacaacactctcttgcacacaaagccccagacacttcgtaacaaacaagcaaaaagtccagattggagaggaaggaagttttctttgccgagaagcctgggggaaaaccattggattgcttttaagagcgcttccctgtaatccggagagctttgaaaaacctgttcgggtccccagaaacccatcctgggttgtttctcccaggccaaaagaaatcaaactgtagggctcactctttcttcctgcttttctttctttctttttttaaaagcatatctacagtagtaaaaacgagacgagttcaacgtacctgcgagacaaggcgggctgcagaatttttttttaagggttaggggaagaatctgcactttgcccagaaggaaaaacttgctctctttacccccgaaatcggtgcctg

SEQ ID NO: 284835 - DNA, 297 bp, Homo sapiens; identical to SEQ ID NO: 200847
  chr7:20826202-20826499
  hyper

SEQ ID NO: 284836 - DNA, 32 bp, Homo sapiens
  chr7:20826838-20826870
  hyper
gtggtaaaggcggggagtggagagagtgcaga

SEQ ID NO: 284837 - DNA, 60 bp, Homo sapiens
  chr7:20827463-20827523
  hyper
ttgtttctttgatgccgtggctttttttttttttttttttttttttttccctgaggtgga

SEQ ID NO: 284838 - DNA, 93 bp, Homo sapiens
  chr7:20827557-20827650
  hyper
gaggaggtgtgtgtgtcccgtggtgttgagtaaatttcaatacaaaaggattagatagagaagagagtaagcgagggtcgttttttctttggg

SEQ ID NO: 284839 - DNA, 40 bp, Homo sapiens
  chr7:20828444-20828484
  hyper
tttctttctctgagggctgacgcttaccataaatgtcgtg

SEQ ID NO: 284840 - DNA, 61 bp, Homo sapiens; identical to SEQ ID NO: 200848
  chr7:20830547-20830608
  hyper

SEQ ID NO: 284841 - DNA, 50 bp, Homo sapiens; identical to SEQ ID NO: 200849
  chr7:20833039-20833089
  hyper

SEQ ID NO: 284842 - DNA, 102 bp, Homo sapiens; identical to SEQ ID NO: 200850
  chr7:20833543-20833645
  hyper

SEQ ID NO: 284843 - DNA, 168 bp, Homo sapiens
  chr7:20836997-20837165
  hyper
cttcggaagtgctcctgcttccggtttcacgtatacctgggatgcgttgccatacaggtttgtcccgttttaatgctttgacccatctaagatacgaggacaggagactggagaagtaaacgaaaggcaatggccgaggggtaaggcggggaacacagcaggaaaagg

SEQ ID NO: 284844 - DNA, 70 bp, Homo sapiens; identical to SEQ ID NO: 200851
  chr7:20837557-20837627
  hyper

SEQ ID NO: 284845 - DNA, 182 bp, Homo sapiens; identical to SEQ ID NO: 43954
  chr7:20837650-20837832
  hyper

SEQ ID NO: 284846 - DNA, 115 bp, Homo sapiens; identical to SEQ ID NO: 200853
  chr7:20838169-20838284
  hyper

SEQ ID NO: 284847 - DNA, 296 bp, Homo sapiens; identical to SEQ ID NO: 232759
  chr7:21293815-21294111
  hyper

SEQ ID NO: 284848 - DNA, 45 bp, Homo sapiens; identical to SEQ ID NO: 200854
  chr7:21582475-21582520
  hyper

SEQ ID NO: 284849 - DNA, 174 bp, Homo sapiens; identical to SEQ ID NO: 200855
  chr7:21583452-21583626
  hyper

SEQ ID NO: 284850 - DNA, 1127 bp, Homo sapiens
  chr7:21984772-21985899
  hyper
agttaggcccttaacgcgtaattggggtcgtgctgtgcatatgatttgggatcttgcagcttgtttaactcggcccaatgacgttaccatttcccccaaatggttactaattccttgaaaacgtttacaaaagttctagaataaacactaaagttattatttttaaactccattatccaagttggactggtctggcgatcgactgttaaaaaaaaaaaattacaactttcttaagcttcctgatctctgtgccaattcccggagaaagtgtggggagtgcacaaaaaaagcccctcccccgtctcacgagggctgcaaacgcaggcgctgcgccccgctagctccccgcctgcacccccggcggccacccgagactgagcagagcgccaggctgagcgcggttgtgtgctggggcgaccggcctctgtggtccgcgtagcacaaacgtgacccactgcgcacacctgcagggcgcgcccactccggcactcaaccggctgggcgcgccagatccccagtgccgcagccaagggccacgtttccagcccaaggccagcaggaccgggtggcaaagggaagtcaaactgtgggtgcgtccggacggcggcgggcggccggaccctcacctggtagcgagtcgccaactccattcttcctaaccgggctccagtctcctcccagcacgcggccacgggagcccggactcaccacggcccggcgcaccaagaacgccccgcgcccgagcagctagcgcgctccgcccggagcacaggcgggccccgggaggggcgcacttgacgccctggacagggggagcgcgttgcgctgccccctcggtgccgcctcactgggcctcgtggctccgatcacgttccaacttcgcggccactgaccttgtcttcgcaggcggcgcgagagggggctgcagttgggcgcggcaagagcaattaccagtgttagggcgccgggctcccccctgcagcagagggagggagtggagccgtccggcggggtttagcgcgggagaaatgagggggctgtcccggcgcagcctccagctggcacgcgcgctggatacttggcagggtttattccaggtcatgccctggggcgcgagcttctgctgc

SEQ ID NO: 284851 - DNA, 184 bp, Homo sapiens
  chr7:22143358-22143542
  hyper
acagcctcaaagcccagtgtcgggcagtttggatctgagtcaagcagtaatcagagcggttaggcttagtcagtattctctgaatgaaaattttgccgatgaacctttttctgcagagcggaagtggctgggcacccttgcgagatgagaaccaccagatggcgctgaatcctcaataagaaaa

SEQ ID NO: 284852 - DNA, 137 bp, Homo sapiens
  chr7:22589952-22590089
  hyper
ccgcagccccagggaaatggcagtgacacaggtggcagccaccttcagagcgccaggcccccgccagcacatctgcaggtagcagctttggccacaggaaggcgcatctgcactgccgggttcgcaaaagcggggcg

SEQ ID NO: 284853 - DNA, 154 bp, Homo sapiens; identical to SEQ ID NO: 200858
  chr7:22893423-22893577
  hyper

SEQ ID NO: 284854 - DNA, 1093 bp, Homo sapiens; identical to SEQ ID NO: 200859
  chr7:22893607-22894700
  hyper

SEQ ID NO: 284855 - DNA, 223 bp, Homo sapiens
  chr7:23052804-23053027
  hyper
ttcagccaaacccccgaggattcccgagtatgttaaaatgagcctcaggagaggaataactcatagaaagaaggggcaagggctcaagaagagatcttcagcgaaataaccaaggaaggaagcgtggctgctgtctgaacctctccgccctgcaggggaccaaagaccgactcgggccaacgctgctctccagggggcgagggcggggggtcgacagtgacca

SEQ ID NO: 284856 - DNA, 713 bp, Homo sapiens
  chr7:23053080-23053793
  hyper
gagtgggagaggaggcagaggccagagcatccgccgcggcagggaggggacggggggctcccgccccaggcccacccggcagaggggcggccggtggggccgaggcggcggcacccgggtcacagcaggaggctggactgctcctcgccgggaaggaaagacccgagtcgcgcgcacaaagctgccgccctccaggcagcgggcaggctgcgcccaacttcggggcgagcagcgccggccgcagcccacccgcccgccagccgcccccagcgccccgcgccgcctcgcacccacccatggcgcctcgcgcgggagccgttacccccagtggagccgcggccccagggacaaagtcccggtcctgtcctcgccgccgcctcgccccggctcctccctgacaaaaaaaagttatccgttgccggacgccctgggggcccggcgtgggtctctcggctggactcaccagggcggctgccggagctccacctgcaggacctcgactcgtgaggctctcagcgacagcgacggaggctgctctgcttcctcccgagtagcagcaccacctgctccccttcttcctagcagaacgggtcccggtgagccatcttccccctcctctcactgactgacaacccagccgggagagccaccactgccgccagcctctctgacaggcacgaccagggacccgtcctcaagcagccaaccaccac

SEQ ID NO: 284857 - DNA, 260 bp, Homo sapiens; identical to SEQ ID NO: 114713
  chr7:23053819-23054079
  hyper

SEQ ID NO: 284858 - DNA, 121 bp, Homo sapiens; identical to SEQ ID NO: 200862
  chr7:23287654-23287775
  hyper

SEQ ID NO: 284859 - DNA, 526 bp, Homo sapiens; identical to SEQ ID NO: 200863
  chr7:23507576-23508102
  hyper

SEQ ID NO: 284860 - DNA, 773 bp, Homo sapiens
  chr7:23510068-23510841
  hyper
acccctttggcttcggccagcggactgtgaaaatatcacactacgtgaggcaggcgccgcctccccataaaaaacccagaagggtgactggcaggagggaggggagaggaggaggaggaggagggaggaaggcgcaggaggcggaaaaaatccgctccgagtgtccggctttttgaatgagccacgtgttcaaactacaaatcaacgtctcacgtgaggaatcccagagcctcaattagagtgggtttcggagaaaaaagcgagcgagaggaagagggggaggggaaacgagattgggagagggactctgagaagggggaggaggaagaaggaaaatgctaaaggaaccgcagccggcaccaagcggggcgctgacggtcacaactcgagtttgtaaagggttatctggtctgggcggatcctgggagggagggctggaatattgatttttttttttttaatgaggaaatgggcagaggtactaacaggcagttcctcagcgctagttaccgtagttttaatcattcgatttttcaaaataggttattaacaacaaaaccagagtcacaatcccgaactcgcctggtggctttaatggcattagaagtgtaaccccagcaaagccgcaggcacgtttctaaggctggcatggacggaaatgctgcgaggaggggtgggggagtgggtgaggggggcagggggtgggggcaagacaggcgggcgacgcgccccaccccgtgcgcccttctcgggccctgggcaccgcgcgagtg

SEQ ID NO: 284861 - DNA, 248 bp, Homo sapiens; identical to SEQ ID NO: 200866
  chr7:23513226-23513474
  hyper

SEQ ID NO: 284862 - DNA, 241 bp, Homo sapiens
  chr7:23514425-23514666
  hyper
ctggagtcacatcttcgtttccctgcccatttccaacatcttagagttgatgcgtccttttttacttaaaacaactacaaccaaccatgttctcaggtaccagaacttttctgggcttctagagaaatcgactcgccctgcccgctcccttcctaaacccctttgtggtccacagggttgttttaagcaaaatcaaacaacccctccaaaaaaagcaaacgaaaaattccgggtaaaatca

SEQ ID NO: 284863 - DNA, 249 bp, Homo sapiens; identical to SEQ ID NO: 223043
  chr7:23570143-23570392
  hyper

SEQ ID NO: 284864 - DNA, 299 bp, Homo sapiens; identical to SEQ ID NO: 200868
  chr7:23570648-23570947
  hyper

SEQ ID NO: 284865 - DNA, 149 bp, Homo sapiens; identical to SEQ ID NO: 232771
  chr7:23636896-23637045
  hyper

SEQ ID NO: 284866 - DNA, 39 bp, Homo sapiens; identical to SEQ ID NO: 200869
  chr7:23719658-23719697
  hyper

SEQ ID NO: 284867 - DNA, 146 bp, Homo sapiens; identical to SEQ ID NO: 200870
  chr7:24323183-24323329
  hyper

SEQ ID NO: 284868 - DNA, 155 bp, Homo sapiens; identical to SEQ ID NO: 200871
  chr7:24323343-24323498
  hyper

SEQ ID NO: 284869 - DNA, 235 bp, Homo sapiens; identical to SEQ ID NO: 200872
  chr7:24323528-24323763
  hyper

SEQ ID NO: 284870 - DNA, 89 bp, Homo sapiens; identical to SEQ ID NO: 200873
  chr7:24323939-24324028
  hyper

SEQ ID NO: 284871 - DNA, 34 bp, Homo sapiens; identical to SEQ ID NO: 200874
  chr7:24324151-24324185
  hyper

SEQ ID NO: 284872 - DNA, 441 bp, Homo sapiens
  chr7:24324248-24324689
  hyper
cgcggtaggaaggtttccccggcagcgccatcgagtgaggaatccctggagctctagagccccgcgccctgccacctccctggattcttgggctccaaatctctttggagcaattctggcccagggagcaattctctttccccttccccaccgcagtcgtcaccccgaggtgatctctgctgtcagcgttgatcccctgaagctaggcagaccagaagtaacagagaagaaacttttcttcccagacaagagtttgggcaagaagggagaaaagtgacccagcaggaagaacttccaattcggttttgaatgctaaactggcggggcccccaccttgcactctcgccgcgcgcttcttggtccctgagacttcgaacgaagttgcgcgaagttttcaggtggagcagaggggcaggtcccgaccggacggcgcccggagcc

SEQ ID NO: 284873 - DNA, 211 bp, Homo sapiens
  chr7:24324754-24324965
  hyper
cgcgtgtggtagcaggaggaggagcgcggggggcagaggagggaggtgctgcgcgtgggtgctctgaatccccaagcccgtccgttgagccttctgtgcctgcagatgctaggtaacaagcgactggggctgtccggactgaccctcgccctgtccctgctcgtgtgcctgggtgcgctggccgaggcgtacccctccaagccggacaacc

SEQ ID NO: 284874 - DNA, 302 bp, Homo sapiens; identical to SEQ ID NO: 232778
  chr7:24612554-24612856
  hyper

SEQ ID NO: 284875 - DNA, 891 bp, Homo sapiens; identical to SEQ ID NO: 232779
  chr7:24613106-24613997
  hyper

SEQ ID NO: 284876 - DNA, 1200 bp, Homo sapiens; identical to SEQ ID NO: 200875
  chr7:25019060-25020260
  hyper

SEQ ID NO: 284877 - DNA, 96 bp, Homo sapiens; identical to SEQ ID NO: 232782
  chr7:25165221-25165317
  hyper

SEQ ID NO: 284878 - DNA, 571 bp, Homo sapiens; identical to SEQ ID NO: 200876
  chr7:25219529-25220100
  hyper

SEQ ID NO: 284879 - DNA, 47 bp, Homo sapiens; identical to SEQ ID NO: 200877
  chr7:25891899-25891946
  hyper

SEQ ID NO: 284880 - DNA, 188 bp, Homo sapiens; identical to SEQ ID NO: 200878
  chr7:25892243-25892431
  hyper

SEQ ID NO: 284881 - DNA, 379 bp, Homo sapiens; identical to SEQ ID NO: 200879
  chr7:25894658-25895037
  hyper

SEQ ID NO: 284882 - DNA, 195 bp, Homo sapiens
  chr7:25896938-25897133
  hyper
ttgtaacactttgggaagttattaaaaggaagatctactgcttcctccttttgggttaaactggatggcaatgtttgtcactggcccttattagagaagagtgtggcgaggtggagggccgttggacgctgggtttgtttgtgtgggtcttgttttttattacaagacacattatccttttaattacaagctgta

SEQ ID NO: 284883 - DNA, 123 bp, Homo sapiens
  chr7:25897246-25897369
  hyper
ctcaggaaggtgttgcaacctttggttgtaccagaaggaaataagcaaactcccatcacccccacccccattccccgccctaacacggagtaaacttcggcctttttccgcttggatgctcat

SEQ ID NO: 284884 - DNA, 153 bp, Homo sapiens; identical to SEQ ID NO: 232788
  chr7:25897850-25898003
  hyper

SEQ ID NO: 284885 - DNA, 316 bp, Homo sapiens
  chr7:25900061-25900377
  hyper
caacttgatccatgcgtttccactttggtttctgaaccgaaggaggagtgccggcaagggagcgcccgcagtcctgcggtacagggctggcgcagcctctgagtgcgtgtgtgaactctgccaggaagctgtgagagccagcccaggattcagtgaccctgtttcccaacccacaaggacaagtacatggttttctctcttatcaattccagccccgcgcaaccaagtgaaagcaaatgcactggaccgcttcggaattaaaatgaattgctaaaaccacggaccgctctgtccggggcccagacctgtctcaact

SEQ ID NO: 284886 - DNA, 76 bp, Homo sapiens; identical to SEQ ID NO: 114749
  chr7:25900433-25900509
  hyper

SEQ ID NO: 284887 - DNA, 315 bp, Homo sapiens; identical to SEQ ID NO: 200881
  chr7:25901791-25902106
  hyper

SEQ ID NO: 284888 - DNA, 207 bp, Homo sapiens; identical to SEQ ID NO: 200882
  chr7:25902138-25902345
  hyper

SEQ ID NO: 284889 - DNA, 181 bp, Homo sapiens; identical to SEQ ID NO: 232792
  chr7:25935087-25935268
  hyper

SEQ ID NO: 284890 - DNA, 95 bp, Homo sapiens; identical to SEQ ID NO: 200883
  chr7:25989915-25990010
  hyper

SEQ ID NO: 284891 - DNA, 593 bp, Homo sapiens
  chr7:25990228-25990821
  hyper
ccatcccctccgttccacccacccactctttgggattctccctgccccattaggcagtgcttcccgcggaccccgttcgcgcacaaccttgcacacagtccccaagactgctcttctccccctcccggcacccccttttccctgcagcataagcgaccactctgtcccccatcctagcagaccccctccccccacataccgcacctgaacagctgttgcgcgcgtgcaacaggtctggaaagtgctttcccatcttcccccaaacccctcgccaccgttccatcccccgccacccctaagagacaaggccggaggggcagtgggctgcgtcccccgggccggggtgcacgggcggctggcggagtgcggggcgcccagaggctcccggggttgggggcggtggtcgcgctgggccgggacaccttcgcgagtggcccctcgtgcgcccgccgcaggctccccagcctgcccctccagcgccggccgccaggcattcccgggccggctcccccctcgcgctccgctccgctcccttccatcttgacttttgccgacgtggaaattttgggtttggagacgacctgcgctcttat

SEQ ID NO: 284892 - DNA, 223 bp, Homo sapiens
  chr7:26192424-26192647
  hyper
gtccctcgcaccagcgtggatgcatggctggtgcacagcgtggctgccgggagcgcggacgaggcccacgggctgctcggcgccgccgccgcctcgtccaccggaggagccggcgccagcgtggacggcggcagccaggctgtgcaggggggcggcggggacccccgagcggctcggagtggccccttggacgccggggaagaggagaaggcacccgcggaac

SEQ ID NO: 284893 - DNA, 111 bp, Homo sapiens; identical to SEQ ID NO: 200885
  chr7:26192748-26192859
  hyper

SEQ ID NO: 284894 - DNA, 252 bp, Homo sapiens; identical to SEQ ID NO: 232797
  chr7:26240889-26241141
  hyper

SEQ ID NO: 284895 - DNA, 162 bp, Homo sapiens; identical to SEQ ID NO: 232798
  chr7:26331325-26331487
  hyper

SEQ ID NO: 284896 - DNA, 48 bp, Homo sapiens; identical to SEQ ID NO: 200887
  chr7:26415726-26415774
  hyper

SEQ ID NO: 284897 - DNA, 55 bp, Homo sapiens; identical to SEQ ID NO: 232800
  chr7:26904456-26904511
  hyper

SEQ ID NO: 284898 - DNA, 104 bp, Homo sapiens; identical to SEQ ID NO: 200888
  chr7:27135162-27135266
  hyper

SEQ ID NO: 284899 - DNA, 145 bp, Homo sapiens; identical to SEQ ID NO: 200889
  chr7:27136790-27136935
  hyper

SEQ ID NO: 284900 - DNA, 32 bp, Homo sapiens; identical to SEQ ID NO: 114773
  chr7:27146541-27146573
  hyper

SEQ ID NO: 284901 - DNA, 477 bp, Homo sapiens
  chr7:27191584-27192061
  hyper
gagagacgacccaagggatgctgccctgtgccttggcgctgtgccacggagggccgaaggaaggcgggcacttactgccaaggcgagccagggaggggagagaaagggagtggtgtgtgtgtgtgtgtgcgtgcgcgcgtgtgtgcctgtgtgtgtgacgtgtgtgggctgtagtgtgtgatgggggcaagtgtgaatgggtgagtatgggtaagggggagtatgcccctcttaaagcctccctgggtgccctctcccaccgctaccgccgccggctgtcgcctcaccacctttgctcctatctcctccccacatgtctcaccttcagacggtggctcccagaagctcctgcccctctgacagctgtcgcttgggcagcccgagagaagaattgtcctctttcctggtgccagaggacgcaggaaattagccaggttgcgagttgcaaagctgctgccgcggcgccgggaacggagc

SEQ ID NO: 284902 - DNA, 320 bp, Homo sapiens
  chr7:27192098-27192418
  hyper
ggccggggcttcccttcgctcgccatctccggacaaagcacagccgagcccggctggaaggcagagctccgaagcaggcaggacggagcggagcaaaagaatgcggctctattctcgcaagggaaattataaaaaagttcatgttcacggttctcatccacatgaccgacagcggccaatggaagggccgaacaactcataaagttgtattgcaaagttgtaaattttcataaacaacaacggatttatgaccctttccccatcactgagaggaggcagctcttacaccggcgccatcttaccaccgaggccgccccgac

SEQ ID NO: 284903 - DNA, 35 bp, Homo sapiens
  chr7:27196839-27196874
  hyper
tgtggttcgaataaagtcaacgtctcccagcttcc

SEQ ID NO: 284904 - DNA, 69 bp, Homo sapiens; identical to SEQ ID NO: 200891
  chr7:27203935-27204004
  hyper

SEQ ID NO: 284905 - DNA, 243 bp, Homo sapiens; identical to SEQ ID NO: 200892
  chr7:27204141-27204384
  hyper

SEQ ID NO: 284906 - DNA, 418 bp, Homo sapiens
  chr7:27209044-27209462
  hyper
cgtgatgccccgcccggcccgacccccgcgcgcagaggtacctggagacgatttcaactgaagtaatgaaggcagtgtcgtgctgtcgagagaaaggtggatcccaacaacaggaaactacctaaatcaccgaccagttctggtgctgcccgcgaagggctgcctcgcccgccgccgccgccgcctccgccgctgccgccgccgccaaggagagaaccctgccatcgcgcctggcccggcccagcccagcccctaggcaacctgcgcccgccagtgcaacagagtgccccaggcggccgcaaatgcgtcaaggaaggggaagccacaggccccagtaaggtattcctgggagggagagggaggaaaagagagggaggaaaggcagggagagaggaataaaggcggggagcaggcgaga

SEQ ID NO: 284907 - DNA, 108 bp, Homo sapiens
  chr7:27209681-27209789
  hyper
gcccccgccccccccactctggcaagcaggaaacgcgtggccctaaggagtgccgccaggtgggggaggccgtactgggggagggggaggcccccatgcagtccagcc

SEQ ID NO: 284908 - DNA, 33 bp, Homo sapiens; identical to SEQ ID NO: 44025
  chr7:27209886-27209919
  hyper

SEQ ID NO: 284909 - DNA, 118 bp, Homo sapiens
  chr7:27222996-27223114
  hyper
actaaacaaacagccgcctgcggacatttcaccttccagcacctgggctgccccttcccaaggcagtaaaggcggctccagtcccagtctttcccggctgcggccaagactgggcagt

SEQ ID NO: 284910 - DNA, 268 bp, Homo sapiens; identical to SEQ ID NO: 200894
  chr7:27223306-27223574
  hyper

SEQ ID NO: 284911 - DNA, 169 bp, Homo sapiens
  chr7:27225249-27225418
  hyper
gggtgggtgagggatgccctggactggggatagccaggtgggagtccgtcgctgtgtggcctgtggtctcggagtctgttctcctggagtctcgcatttgcacccccttcttcgcagtccccctcccatagacttgctctgggaagcgcctctgcctccgaccctagcc

SEQ ID NO: 284912 - DNA, 281 bp, Homo sapiens; identical to SEQ ID NO: 200896
  chr7:27227348-27227629
  hyper

SEQ ID NO: 284913 - DNA, 632 bp, Homo sapiens
  chr7:27228044-27228676
  hyper
gttcggaatatgctggcggtgtgaatgtgaaggtttctccaggcaggcggctggggcgaggggtgggcgcagctctgaggatcagaccaaatctaggggaaaaaggggaggcagaccttcgggtccttggttttgactttgctctgagcctatgattgactcttccgctttgcaggaggtccaacagccgagcttagcccaccgggctctgggaaagacccgactgaggctaaagccgccccggaaggccaagtccgagttccatttcttgaagaggccggcgcgcgtaaggctgtgacattggccctggcgactggcttcccaggagctgttctttctcaggagctccacagcgcgggccatctccagaaaactgtcttcagagtgtatttccttttatcgtcaacccagagccccaccgcggctaatgcaagaggccaaaaaatgtttggaggaagaaaaacaaaggcaggaagtggcggcggcctgacggtgcgtgtgtgtctgcagagaagggagggagccggctcagtctcttcttgtttttccaaacttcaaggtccaggcagccctctgcagggccgggccccattgctccccgcgcggcattggaggtggccgcccggagagga

SEQ ID NO: 284914 - DNA, 57 bp, Homo sapiens
  chr7:27233098-27233155
  hyper
gcagaaatgaaatcaactgtggcaaggccttggctgctttcacggaggagtttttct

SEQ ID NO: 284915 - DNA, 172 bp, Homo sapiens
  chr7:27237358-27237530
  hyper
tttacctgagcagacgcttaacatgcaaagggaatggcgacctaagaaggacaagcagatgtttacaatggcctcttgcgtttgtaaccaacttccagattattaccatctaacgcagtgtcctaaaatgtaacgatcacttaaatacttacaagatttcagtaactgcgta

SEQ ID NO: 284916 - DNA, 228 bp, Homo sapiens; identical to SEQ ID NO: 200898
  chr7:27237763-27237991
  hyper

SEQ ID NO: 284917 - DNA, 199 bp, Homo sapiens; identical to SEQ ID NO: 200899
  chr7:27238170-27238369
  hyper

SEQ ID NO: 284918 - DNA, 224 bp, Homo sapiens; identical to SEQ ID NO: 200900
  chr7:27238917-27239141
  hyper

SEQ ID NO: 284919 - DNA, 45 bp, Homo sapiens; identical to SEQ ID NO: 200901
  chr7:27241173-27241218
  hyper

SEQ ID NO: 284920 - DNA, 85 bp, Homo sapiens; identical to SEQ ID NO: 200902
  chr7:27245310-27245395
  hyper

SEQ ID NO: 284921 - DNA, 265 bp, Homo sapiens; identical to SEQ ID NO: 200903
  chr7:27250231-27250496
  hyper

SEQ ID NO: 284922 - DNA, 32 bp, Homo sapiens
  chr7:27274930-27274962
  hyper
ctgtctagagaagccgaggttaagtggctctg

SEQ ID NO: 284923 - DNA, 47 bp, Homo sapiens; identical to SEQ ID NO: 200904
  chr7:27275466-27275513
  hyper

SEQ ID NO: 284924 - DNA, 103 bp, Homo sapiens; identical to SEQ ID NO: 200905
  chr7:27275543-27275646
  hyper

SEQ ID NO: 284925 - DNA, 35 bp, Homo sapiens; identical to SEQ ID NO: 200906
  chr7:27278959-27278994
  hyper

SEQ ID NO: 284926 - DNA, 498 bp, Homo sapiens; identical to SEQ ID NO: 200907
  chr7:27279659-27280157
  hyper

SEQ ID NO: 284927 - DNA, 90 bp, Homo sapiens
  chr7:27281858-27281948
  hyper
gaatacatttttccgtagcttgtaaaaagacttttcagccagtttgaggttagctgccaggggcagacagttgtaataatgccgacagaa

SEQ ID NO: 284928 - DNA, 60 bp, Homo sapiens
  chr7:27284595-27284655
  hyper
ctacagccccacttcaatggcgtttgtgtgtctgtgtctgtacacgcctgtgctctggac

SEQ ID NO: 284929 - DNA, 59 bp, Homo sapiens; identical to SEQ ID NO: 200908
  chr7:27285386-27285445
  hyper

SEQ ID NO: 284930 - DNA, 32 bp, Homo sapiens; identical to SEQ ID NO: 200909
  chr7:27288913-27288945
  hyper

SEQ ID NO: 284931 - DNA, 193 bp, Homo sapiens; identical to SEQ ID NO: 223061
  chr7:27701810-27702003
  hyper

SEQ ID NO: 284932 - DNA, 114 bp, Homo sapiens; identical to SEQ ID NO: 232832
  chr7:27702686-27702800
  hyper

SEQ ID NO: 284933 - DNA, 113 bp, Homo sapiens; identical to SEQ ID NO: 232833
  chr7:27779469-27779582
  hyper

SEQ ID NO: 284934 - DNA, 371 bp, Homo sapiens
  chr7:28450240-28450611
  hyper
cttgctcaaggccggggactggagcgggctacttgtatatttcgttgtcagtctgcagaatgtgtttgatttttatttttccctccttctctgacatgtgtcaaggaataaagactggatacaggtccattacgtcattctgcaggccagtaagtgtttgattaacggcttgagctcctcaagggttcaggagcttagaatgctgacaaagcaactctgctttgcatccccctaccctccccacaacacactcgtgcaatcgccggctccctgggcatctttattgccctctcttcccagcccctccctctccaccactcccccgtctacaccgttatcactctagccccgcccccgcctttttacagctt

SEQ ID NO: 284935 - DNA, 59 bp, Homo sapiens; identical to SEQ ID NO: 200910
  chr7:28725632-28725691
  hyper

SEQ ID NO: 284936 - DNA, 188 bp, Homo sapiens; identical to SEQ ID NO: 200911
  chr7:28995379-28995567
  hyper

SEQ ID NO: 284937 - DNA, 332 bp, Homo sapiens; identical to SEQ ID NO: 200912
  chr7:28995992-28996324
  hyper

SEQ ID NO: 284938 - DNA, 54 bp, Homo sapiens; identical to SEQ ID NO: 200913
  chr7:28998209-28998263
  hyper

SEQ ID NO: 284939 - DNA, 175 bp, Homo sapiens; identical to SEQ ID NO: 200914
  chr7:29185640-29185815
  hyper

SEQ ID NO: 284940 - DNA, 37 bp, Homo sapiens; identical to SEQ ID NO: 200915
  chr7:29186197-29186234
  hyper

SEQ ID NO: 284941 - DNA, 496 bp, Homo sapiens; identical to SEQ ID NO: 200916
  chr7:29234008-29234504
  hyper

SEQ ID NO: 284942 - DNA, 180 bp, Homo sapiens; identical to SEQ ID NO: 200917
  chr7:29234886-29235066
  hyper

SEQ ID NO: 284943 - DNA, 333 bp, Homo sapiens; identical to SEQ ID NO: 200918
  chr7:29602676-29603009
  hyper

SEQ ID NO: 284944 - DNA, 87 bp, Homo sapiens; identical to SEQ ID NO: 200919
  chr7:29604726-29604813
  hyper

SEQ ID NO: 284945 - DNA, 369 bp, Homo sapiens; identical to SEQ ID NO: 200920
  chr7:29724332-29724701
  hyper

SEQ ID NO: 284946 - DNA, 54 bp, Homo sapiens; identical to SEQ ID NO: 200921
  chr7:29725077-29725131
  hyper

SEQ ID NO: 284947 - DNA, 205 bp, Homo sapiens; identical to SEQ ID NO: 200922
  chr7:29845997-29846202
  hyper

SEQ ID NO: 284948 - DNA, 47 bp, Homo sapiens; identical to SEQ ID NO: 200923
  chr7:29846749-29846796
  hyper

SEQ ID NO: 284949 - DNA, 155 bp, Homo sapiens; identical to SEQ ID NO: 232840
  chr7:29847070-29847225
  hyper

SEQ ID NO: 284950 - DNA, 369 bp, Homo sapiens; identical to SEQ ID NO: 200924
  chr7:30028879-30029248
  hyper

SEQ ID NO: 284951 - DNA, 400 bp, Homo sapiens
  chr7:30029302-30029702
  hyper
aggctgcggccgccgagggtgcgggtgctgccgggtccggattactgcggcgacctcgggggctgcagctgcagtggcggaggcggccgccgggcgcttccccctacccagactcccggcgctggggcccgccgccccccgcagcagctggcccgactcacgtgaccgcgggcccaccctccgcctcccccaccccggcccccggggccccgccgcaccccgcgcgtctggctgcacgggccgcggcgctgctcaccgtcgagtagggagggggcctgggagctggaggagcggccgagagggcgtatctcgccgcagaaagtggccccctctttgctagatttttatttcttggttgtggctctcaaaagggaaaacccgggcttcaaggagccaggcc

SEQ ID NO: 284952 - DNA, 217 bp, Homo sapiens; identical to SEQ ID NO: 232842
  chr7:30065744-30065961
  hyper

SEQ ID NO: 284953 - DNA, 304 bp, Homo sapiens; identical to SEQ ID NO: 232843
  chr7:30066334-30066638
  hyper

SEQ ID NO: 284954 - DNA, 246 bp, Homo sapiens; identical to SEQ ID NO: 200927
  chr7:30067778-30068024
  hyper

SEQ ID NO: 284955 - DNA, 256 bp, Homo sapiens; identical to SEQ ID NO: 200928
  chr7:30517956-30518212
  hyper

SEQ ID NO: 284956 - DNA, 121 bp, Homo sapiens; identical to SEQ ID NO: 200929
  chr7:31091704-31091825
  hyper

SEQ ID NO: 284957 - DNA, 69 bp, Homo sapiens; identical to SEQ ID NO: 200930
  chr7:31091826-31091895
  hyper

SEQ ID NO: 284958 - DNA, 76 bp, Homo sapiens
  chr7:31232602-31232678
  hyper
ctgcatctgagagcactccacgcagattttcttggccggctccagctggaagccttcggtgtctccttttgtgtgc

SEQ ID NO: 284959 - DNA, 191 bp, Homo sapiens; identical to SEQ ID NO: 200932
  chr7:31232718-31232909
  hyper

SEQ ID NO: 284960 - DNA, 48 bp, Homo sapiens; identical to SEQ ID NO: 200933
  chr7:31232939-31232987
  hyper

SEQ ID NO: 284961 - DNA, 263 bp, Homo sapiens; identical to SEQ ID NO: 200934
  chr7:31375702-31375965
  hyper

SEQ ID NO: 284962 - DNA, 109 bp, Homo sapiens; identical to SEQ ID NO: 200935
  chr7:31376218-31376327
  hyper

SEQ ID NO: 284963 - DNA, 51 bp, Homo sapiens; identical to SEQ ID NO: 200936
  chr7:31528306-31528357
  hyper

SEQ ID NO: 284964 - DNA, 40 bp, Homo sapiens; identical to SEQ ID NO: 232857
  chr7:32468314-32468354
  hyper

SEQ ID NO: 284965 - DNA, 291 bp, Homo sapiens; identical to SEQ ID NO: 232858
  chr7:32767520-32767811
  hyper

SEQ ID NO: 284966 - DNA, 375 bp, Homo sapiens
  chr7:32768220-32768595
  hyper
gcacgcgcgcgtactcggctcggatctaccttccagtagcagcggagtggccaatgggaccgggaccagggctgggggccggggggccgccgccgcggggaggttcccggctcaggtgcccagcgctcaccagcccagcgcctcgggcggcgccgcggtggccccggcagccccgcgcagctgtttcctggggggcgtggcgtcgggggcccgcgcggcgcagtcctccttcagcatcccgaacagcagcagcggtccgcaggactcgcaggactcggtgcacagcagccctgaggatggcggcggcggcggccagcaccggccggtgggcgggagccccggcgggccgcgcctggtgatcggctccttaccagc

SEQ ID NO: 284967 - DNA, 346 bp, Homo sapiens
  chr7:32981766-32982112
  hyper
tggagccacgggagcgcaaggcctcccaagtcagggcccgaattccgcgtggtgccaaacggcagctggctccctgaatgcccaccctgaaccctggtaaaaaataaaaaaaacaacaacaaaattccctccaacccggagaaaacaagtccgcctctgttctacctagcagcgccgtggccagtccccgccgcccattctctcttcttccgggcctcgccacaccaacactgcaggacccgtgtcctcgtcccttctccgtagcagaggatgaaaagaacggggtttctccatgtcgcagtggcccagggaactcagaggtggagcgcgggggcagcgtgctcgg

SEQ ID NO: 284968 - DNA, 701 bp, Homo sapiens; identical to SEQ ID NO: 200939
  chr7:32982270-32982971
  hyper

SEQ ID NO: 284969 - DNA, 227 bp, Homo sapiens; identical to SEQ ID NO: 200940
  chr7:32996717-32996944
  hyper

SEQ ID NO: 284970 - DNA, 157 bp, Homo sapiens; identical to SEQ ID NO: 200941
  chr7:32997454-32997611
  hyper

SEQ ID NO: 284971 - DNA, 35 bp, Homo sapiens
  chr7:33943416-33943451
  hyper
cccttctcttatttttcccacgtcacagcaacgtg

SEQ ID NO: 284972 - DNA, 110 bp, Homo sapiens; identical to SEQ ID NO: 232868
  chr7:35288337-35288447
  hyper

SEQ ID NO: 284973 - DNA, 55 bp, Homo sapiens
  chr7:35298172-35298227
  hyper
cagtggaagaatcagcgtgctaacattgtgtgcaaaactcgcagcgtgatcaaga

SEQ ID NO: 284974 - DNA, 326 bp, Homo sapiens; identical to SEQ ID NO: 232874
  chr7:35576958-35577284
  hyper

SEQ ID NO: 284975 - DNA, 257 bp, Homo sapiens; identical to SEQ ID NO: 232875
  chr7:35734777-35735034
  hyper

SEQ ID NO: 284976 - DNA, 168 bp, Homo sapiens
  chr7:35839772-35839940
  hyper
acagcgacattcatcgctacagtagaaactcacacaatcgcagccctttattagtattttgttacccagtagttcctgtgtccattcatttcctcaactggagtgtgagctccaagaggaccgaaccgggcaccgacaaggtgagccaatatgaatgtggcgagtccg

SEQ ID NO: 284977 - DNA, 70 bp, Homo sapiens
  chr7:35840078-35840148
  hyper
atggggagcacagacacctgcctcgaagtgtctcttcactttcactcacaaagccgtcgggtcagtaacc

SEQ ID NO: 284978 - DNA, 1059 bp, Homo sapiens
  chr7:36192233-36193292
  hyper
agcagatctcgcctcgggcaatcctaaacagcctctaccaggcacaaccagtcctaggccccgggcggcaaccatggtccgggggcagctgacttaggacagcctccctgtgacccgccctcgccggcacggcgccggctccgccccttaagccccctaagtcccgcctctgcgctcccggggcctacccccgcgctcatggccccgcccccgcttttcctaccccatcgcgccctggccccgctcccacactctatgaccccgcctctcgcactccaggcccgccccacgcgctccagggttctgctctccacccatttgtgccaggccacgcccccacacccatggctcctcctctcgcacgccagggcctcccctcgcgctctctggttcgttctccaccctcttgagccttgatgccgccccctcttccatggccccgcctctcccactccaggcccgcccttgcgctctcgggttcctctctccacccactggtgccaggcctcgccccgcgccagggcccctcccccacgtgccctcgggagtcccggggaggagttgccgcgcggaggaggcgtggccgcggtgcctgcggaggcgcgagcggcgcggcgcggcgcggccgggactttggctttgacaccgactgcgagcgggagccgtgcggctggtgctgggtctggactggctctggcggatccccgcccgagttgggcgcaggactttttgccggggtaaacgcaactgcggcggcgccgccgcaagccccggtgcagcctcggcggcgggtttcgccgccgctgccgccgcctccgagcagccctgcggcttctattcactctgggagagcgatgctaagtttctcccatagaaagagccgggacacgcagaccgaagcggcgtagtcggcttccagggcctgaccagtgacccacacccgcgcggacgcctaggctggaggcagggggcccgtgctgtcccgggctgggctcaggcttccgagccgcaggtggaagaggaaccggcgccccgcagagcggccgagaggtggggcgc

SEQ ID NO: 284979 - DNA, 86 bp, Homo sapiens; identical to SEQ ID NO: 232878
  chr7:36406996-36407082
  hyper

SEQ ID NO: 284980 - DNA, 244 bp, Homo sapiens; identical to SEQ ID NO: 232879
  chr7:36429677-36429921
  hyper

SEQ ID NO: 284981 - DNA, 206 bp, Homo sapiens; identical to SEQ ID NO: 232880
  chr7:37873162-37873368
  hyper

SEQ ID NO: 284982 - DNA, 60 bp, Homo sapiens; identical to SEQ ID NO: 200944
  chr7:37955577-37955637
  hyper

SEQ ID NO: 284983 - DNA, 204 bp, Homo sapiens; identical to SEQ ID NO: 200945
  chr7:37956056-37956260
  hyper

SEQ ID NO: 284984 - DNA, 134 bp, Homo sapiens; identical to SEQ ID NO: 200946
  chr7:37956568-37956702
  hyper

SEQ ID NO: 284985 - DNA, 189 bp, Homo sapiens; identical to SEQ ID NO: 200947
  chr7:37960958-37961147
  hyper

SEQ ID NO: 284986 - DNA, 719 bp, Homo sapiens; identical to SEQ ID NO: 232882
  chr7:38217488-38218207
  hyper

SEQ ID NO: 284987 - DNA, 35 bp, Homo sapiens; identical to SEQ ID NO: 200949
  chr7:39453506-39453541
  hyper

SEQ ID NO: 284988 - DNA, 67 bp, Homo sapiens; identical to SEQ ID NO: 200950
  chr7:39454304-39454371
  hyper

SEQ ID NO: 284989 - DNA, 359 bp, Homo sapiens; identical to SEQ ID NO: 232886
  chr7:39605669-39606028
  hyper

SEQ ID NO: 284990 - DNA, 109 bp, Homo sapiens; identical to SEQ ID NO: 232887
  chr7:40174396-40174505
  hyper

SEQ ID NO: 284991 - DNA, 119 bp, Homo sapiens; identical to SEQ ID NO: 114938
  chr7:40174877-40174996
  hyper

SEQ ID NO: 284992 - DNA, 139 bp, Homo sapiens
  chr7:41745252-41745391
  hyper
cccccttctgagtgcggagcgcggtcctccagcgactgcactagcaaagtggcccgctgccaccgcgttattcacctagtggaggcggcctgatttactggcgacttcacaaacccaactccacgctggagcatttgca

SEQ ID NO: 284993 - DNA, 63 bp, Homo sapiens; identical to SEQ ID NO: 200952
  chr7:42267545-42267608
  hyper

SEQ ID NO: 284994 - DNA, 153 bp, Homo sapiens; identical to SEQ ID NO: 200953
  chr7:42267822-42267975
  hyper

SEQ ID NO: 284995 - DNA, 408 bp, Homo sapiens; identical to SEQ ID NO: 200954
  chr7:42276904-42277312
  hyper

SEQ ID NO: 284996 - DNA, 60 bp, Homo sapiens; identical to SEQ ID NO: 200955
  chr7:42277588-42277648
  hyper

SEQ ID NO: 284997 - DNA, 71 bp, Homo sapiens
  chr7:42927719-42927790
  hyper
ggatctgtaagtaccaaaaacgcttaaactttcacactgcggttgtgtcactgaagcagtgcctgaaatct

SEQ ID NO: 284998 - DNA, 410 bp, Homo sapiens; identical to SEQ ID NO: 200956
  chr7:42928175-42928585
  hyper

SEQ ID NO: 284999 - DNA, 265 bp, Homo sapiens; identical to SEQ ID NO: 232897
  chr7:42951543-42951808
  hyper

SEQ ID NO: 285000 - DNA, 109 bp, Homo sapiens; identical to SEQ ID NO: 200957
  chr7:43153584-43153693
  hyper

SEQ ID NO: 285001 - DNA, 108 bp, Homo sapiens; identical to SEQ ID NO: 200958
  chr7:43622286-43622394
  hyper

SEQ ID NO: 285002 - DNA, 107 bp, Homo sapiens; identical to SEQ ID NO: 232901
  chr7:43769000-43769107
  hyper

SEQ ID NO: 285003 - DNA, 67 bp, Homo sapiens
  chr7:43798005-43798072
  hyper
ccctccggtcggccggcacccaccacccacccctcgccaccaagctgggtgcagagaacagggcagg

SEQ ID NO: 285004 - DNA, 213 bp, Homo sapiens; identical to SEQ ID NO: 232903
  chr7:43798608-43798821
  hyper

SEQ ID NO: 285005 - DNA, 77 bp, Homo sapiens; identical to SEQ ID NO: 232904
  chr7:43909236-43909313
  hyper

SEQ ID NO: 285006 - DNA, 34 bp, Homo sapiens; identical to SEQ ID NO: 200959
  chr7:44122205-44122239
  hyper

SEQ ID NO: 285007 - DNA, 232 bp, Homo sapiens; identical to SEQ ID NO: 232907
  chr7:44240366-44240598
  hyper

SEQ ID NO: 285008 - DNA, 36 bp, Homo sapiens
  chr7:44349523-44349559
  hyper
cgcctgagcagccagaaccaggccgaggccgcgcgg

SEQ ID NO: 285009 - DNA, 36 bp, Homo sapiens
  chr7:44364449-44364485
  hyper
cggatggggccacgcgcaggagcaggcgcaagcagg

SEQ ID NO: 285010 - DNA, 384 bp, Homo sapiens
  chr7:44365258-44365642
  hyper
caccgccgccgccgccgcgcccgccccgcccgccgccccctgcacgcgccttccccgcgccctgcacacgctgctcctgcacccgcacccgcagggcaccggcgccctgcatctgcacacgcgccctgcacacacacccttgccccgcacccgcaacgcacctgcacctgcacctgcactcacacgcgcgcccgcccccgcccgcccccgcaccccacacacacacccgcgccctgtactgacgccttcatcctctacccgcaccacgcccgcacctcgcgcacgcaggccacttgctgctgccgacccctcgctctcacataacacagaagagtgcacataatgaacgcagcctcctctctctctctcgaaggcccacctagc

SEQ ID NO: 285011 - DNA, 55 bp, Homo sapiens; identical to SEQ ID NO: 232909
  chr7:44530400-44530455
  hyper

SEQ ID NO: 285012 - DNA, 157 bp, Homo sapiens
  chr7:44621889-44622046
  hyper
aagaggacgcctgcgcagtgatatgtactcgccgtctcctgcaactccatccgtaccgaacactgccgcgccccgccccctcacacagcccggcgcccgcctacccccgcaacgagagtagagggcgcatgcgcaatgacgttcgcccttaatttct

SEQ ID NO: 285013 - DNA, 191 bp, Homo sapiens; identical to SEQ ID NO: 232911
  chr7:44645927-44646118
  hyper

SEQ ID NO: 285014 - DNA, 43 bp, Homo sapiens; identical to SEQ ID NO: 232912
  chr7:44646791-44646834
  hyper

SEQ ID NO: 285015 - DNA, 232 bp, Homo sapiens; identical to SEQ ID NO: 232913
  chr7:44788901-44789133
  hyper

SEQ ID NO: 285016 - DNA, 174 bp, Homo sapiens
  chr7:44924079-44924253
  hyper
gcttatccctctgtcgttcctggatttctttcatctcatccgcataccggcaaaaggcgcctccgaacttgccccaggctttgaagggtacggtgatggcattgcggtaggacggcttcacctcgctcactcgcagaaacaccccgtatttgttgcagcccacatcgaagaaga

SEQ ID NO: 285017 - DNA, 309 bp, Homo sapiens; identical to SEQ ID NO: 200961
  chr7:44924469-44924778
  hyper

SEQ ID NO: 285018 - DNA, 623 bp, Homo sapiens; identical to SEQ ID NO: 223093
  chr7:45026005-45026628
  hyper

SEQ ID NO: 285019 - DNA, 178 bp, Homo sapiens; identical to SEQ ID NO: 232915
  chr7:45151426-45151604
  hyper

SEQ ID NO: 285020 - DNA, 72 bp, Homo sapiens
  chr7:45197304-45197376
  hyper
tggtctgggggtgcggcctgagggcggaccccctgaggccccgccccaccccaaccccaaccgggcgtcccc

SEQ ID NO: 285021 - DNA, 189 bp, Homo sapiens; identical to SEQ ID NO: 44188
  chr7:45299683-45299872
  hyper

SEQ ID NO: 285022 - DNA, 104 bp, Homo sapiens; identical to SEQ ID NO: 115000
  chr7:45615102-45615206
  hyper

SEQ ID NO: 285023 - DNA, 182 bp, Homo sapiens; identical to SEQ ID NO: 200963
  chr7:45927932-45928114
  hyper

SEQ ID NO: 285024 - DNA, 202 bp, Homo sapiens; identical to SEQ ID NO: 200964
  chr7:45928147-45928349
  hyper

SEQ ID NO: 285025 - DNA, 180 bp, Homo sapiens
  chr7:45961576-45961756
  hyper
tccttaaggcagggcttttcaaatattttaaatgacaactgttcttcttgtcttgggtattctccctgattatgttttcaaatggagtttacacccatgacaaaagaataataaagacaataaactgggcactgctgaaacgtaattaaccaaatagtcctttaataggcaattttcatt

SEQ ID NO: 285026 - DNA, 277 bp, Homo sapiens
  chr7:45961974-45962251
  hyper
attggattgaggattaaatttttcaaggcacttttccaaagagtttgtgggggtggagtgggaagcggtgagacctccgcgggaggagactttcctgaacgctgttgaaattggacgcttgccttaggaggtggataggtgacttgaaggagccctttgcagtttggagtagtaatagcaaatcaggagctcctccattcccctccagcacgaagccttgggtgaagttaatcttcattcatcatttctgtctctcctaatcgatctctcgcccagt

SEQ ID NO: 285027 - DNA, 153 bp, Homo sapiens; identical to SEQ ID NO: 223096
  chr7:47293661-47293814
  hyper

SEQ ID NO: 285028 - DNA, 173 bp, Homo sapiens; identical to SEQ ID NO: 200965
  chr7:47294081-47294254
  hyper

SEQ ID NO: 285029 - DNA, 335 bp, Homo sapiens; identical to SEQ ID NO: 200966
  chr7:47621011-47621346
  hyper

SEQ ID NO: 285030 - DNA, 221 bp, Homo sapiens; identical to SEQ ID NO: 200967
  chr7:47621699-47621920
  hyper

SEQ ID NO: 285031 - DNA, 55 bp, Homo sapiens; identical to SEQ ID NO: 200968
  chr7:48075904-48075959
  hyper

SEQ ID NO: 285032 - DNA, 262 bp, Homo sapiens; identical to SEQ ID NO: 200969
  chr7:48127995-48128257
  hyper

SEQ ID NO: 285033 - DNA, 116 bp, Homo sapiens; identical to SEQ ID NO: 200970
  chr7:50344738-50344854
  hyper

SEQ ID NO: 285034 - DNA, 55 bp, Homo sapiens; identical to SEQ ID NO: 200971
  chr7:50860138-50860193
  hyper

SEQ ID NO: 285035 - DNA, 208 bp, Homo sapiens; identical to SEQ ID NO: 200972
  chr7:50861127-50861335
  hyper

SEQ ID NO: 285036 - DNA, 110 bp, Homo sapiens; identical to SEQ ID NO: 200973
  chr7:50861531-50861641
  hyper

SEQ ID NO: 285037 - DNA, 362 bp, Homo sapiens; identical to SEQ ID NO: 200974
  chr7:51383392-51383754
  hyper

SEQ ID NO: 285038 - DNA, 461 bp, Homo sapiens; identical to SEQ ID NO: 200975
  chr7:51383790-51384251
  hyper

SEQ ID NO: 285039 - DNA, 160 bp, Homo sapiens
  chr7:51384951-51385111
  hyper
atccgtgcagcaaatgtctagtgcgtagggtcgcaaagtgggagtcccgaccgggagcgtcaggaacacctgggaacttgttagaaatgcagatttctggggcccaccaggtcccacggaatcagaaacagtgcgggctggagcgcggcctcgctttgct

SEQ ID NO: 285040 - DNA, 67 bp, Homo sapiens; identical to SEQ ID NO: 200977
  chr7:54610336-54610403
  hyper

SEQ ID NO: 285041 - DNA, 223 bp, Homo sapiens
  chr7:54614157-54614380
  hyper
aacaaaggcgcgaaaattcgtcccggagcacttcaccttcactcacgccggccgccccacccctggcgcccgcccgcctcacccctggcgcccccccgcctgcccgcccgcccacccacctccgggcgcgcgtccgcacgggtcaacccgcgaaaaagacccggcggctcccggccccgcctccagagcgcagcatccgcgcggcagggacagcgccgggaca

SEQ ID NO: 285042 - DNA, 206 bp, Homo sapiens; identical to SEQ ID NO: 200978
  chr7:54614533-54614739
  hyper

SEQ ID NO: 285043 - DNA, 34 bp, Homo sapiens; identical to SEQ ID NO: 200979
  chr7:54614777-54614811
  hyper

SEQ ID NO: 285044 - DNA, 199 bp, Homo sapiens
  chr7:54731845-54732044
  hyper
tgacctcccagcgccgtcctgggctgcaataatcaatcaatctgtgctgcatgctggcccccactggacagtggctaattgatccattcacgagggaagacgcagatctgacaggccgcgcgcagttccacacagccgcgctgggctcccgtcacctccctccgggatgagtgtggaaggcgctctgcaccaggagcac

SEQ ID NO: 285045 - DNA, 294 bp, Homo sapiens; identical to SEQ ID NO: 200980
  chr7:55086689-55086983
  hyper

SEQ ID NO: 285046 - DNA, 144 bp, Homo sapiens; identical to SEQ ID NO: 200981
  chr7:55087803-55087947
  hyper

SEQ ID NO: 285047 - DNA, 82 bp, Homo sapiens; identical to SEQ ID NO: 44222
  chr7:55087982-55088064
  hyper

SEQ ID NO: 285048 - DNA, 115 bp, Homo sapiens; identical to SEQ ID NO: 200983
  chr7:55593336-55593451
  hyper

SEQ ID NO: 285049 - DNA, 189 bp, Homo sapiens; identical to SEQ ID NO: 200984
  chr7:55639104-55639293
  hyper

SEQ ID NO: 285050 - DNA, 402 bp, Homo sapiens; identical to SEQ ID NO: 232935
  chr7:55640382-55640784
  hyper

SEQ ID NO: 285051 - DNA, 169 bp, Homo sapiens; identical to SEQ ID NO: 232936
  chr7:56019824-56019993
  hyper

SEQ ID NO: 285052 - DNA, 209 bp, Homo sapiens; identical to SEQ ID NO: 232937
  chr7:56119352-56119561
  hyper

SEQ ID NO: 285053 - DNA, 211 bp, Homo sapiens; identical to SEQ ID NO: 232938
  chr7:56174011-56174222
  hyper

SEQ ID NO: 285054 - DNA, 44 bp, Homo sapiens
  chr7:56355744-56355788
  hyper
acgactagggccgctctcccagctctctgcgtgccgcgccgctg

SEQ ID NO: 285055 - DNA, 64 bp, Homo sapiens
  chr7:57928159-57928223
  hyper
agcggcggcgggggcaaaaagccgcagcggcaaaaagcctcagcggcgggggcaaaaagccacg

SEQ ID NO: 285056 - DNA, 80 bp, Homo sapiens
  chr7:57928240-57928320
  hyper
cagcggcaggggcaaaaagccacggcggcagggagcaaaaacccgcgggggtaggcgcaaaaagccgcggcggggggtta

SEQ ID NO: 285057 - DNA, 78 bp, Homo sapiens; identical to SEQ ID NO: 200986
  chr7:63767196-63767274
  hyper

SEQ ID NO: 285058 - DNA, 318 bp, Homo sapiens; identical to SEQ ID NO: 232944
  chr7:63774383-63774701
  hyper

SEQ ID NO: 285059 - DNA, 46 bp, Homo sapiens
  chr7:64030435-64030481
  hyper
aggtagacctgagtggtgtacggctggtggcgggtctggaaggagc

SEQ ID NO: 285060 - DNA, 124 bp, Homo sapiens; identical to SEQ ID NO: 232946
  chr7:64254687-64254811
  hyper

SEQ ID NO: 285061 - DNA, 143 bp, Homo sapiens
  chr7:64337834-64337977
  hyper
ggctctgcctgctccgttttcctctgcttagacaggctgacagccctgacaacctgtcgcccgagtgcgcctcgcgaatgcgcatgcgccagtagcggggctccaggcgcgagccctgagctgcgtctcgcctcacagtgaac

SEQ ID NO: 285062 - DNA, 357 bp, Homo sapiens
  chr7:64348611-64348968
  hyper
cagccagaggagggcgctccctcgtcagatgtccctgtctctatgggggtccttcctcctgtgagctccgtggcctcgcacaggctgctcaacacctctgagctcaaattcctgctcccagggggaagcgggttatgaagatgagagggagagagagcgagctgtaagggaagcaggtgacacggggctggacagggaagggcctggctctcaaggaagggagcttctccaggtggcttcctcctctgtcaaatgggcccacgaataccctattgatggtgagaattaagagatacgaaacccattcgttctttattatgatgatttttattttcacagtagcacttagcacctgcc

SEQ ID NO: 285063 - DNA, 192 bp, Homo sapiens; identical to SEQ ID NO: 200988
  chr7:64349139-64349331
  hyper

SEQ ID NO: 285064 - DNA, 412 bp, Homo sapiens; identical to SEQ ID NO: 200989
  chr7:64349470-64349882
  hyper

SEQ ID NO: 285065 - DNA, 62 bp, Homo sapiens
  chr7:64350036-64350098
  hyper
tggaaccgtcgccctggggcccctccgccccgcaaacgctcgggatgcggtttgggagtgta

SEQ ID NO: 285066 - DNA, 135 bp, Homo sapiens
  chr7:64700148-64700283
  hyper
cgccaggctgagcgcgagggcggggcggggcgtccatggcaggggcgggtgtcctggcgtcctcagtctcccagagggtggcgacccccgcgtcccgctccggcaccggcgggaagagagcgcctcccggaatct

SEQ ID NO: 285067 - DNA, 70 bp, Homo sapiens; identical to SEQ ID NO: 200990
  chr7:64734126-64734196
  hyper

SEQ ID NO: 285068 - DNA, 36 bp, Homo sapiens; identical to SEQ ID NO: 232953
  chr7:64838772-64838808
  hyper

SEQ ID NO: 285069 - DNA, 120 bp, Homo sapiens; identical to SEQ ID NO: 200991
  chr7:64974034-64974154
  hyper

SEQ ID NO: 285070 - DNA, 60 bp, Homo sapiens; identical to SEQ ID NO: 200992
  chr7:64974448-64974508
  hyper

SEQ ID NO: 285071 - DNA, 50 bp, Homo sapiens; identical to SEQ ID NO: 200993
  chr7:65037711-65037761
  hyper

SEQ ID NO: 285072 - DNA, 469 bp, Homo sapiens; identical to SEQ ID NO: 200994
  chr7:65509043-65509512
  hyper

SEQ ID NO: 285073 - DNA, 65 bp, Homo sapiens; identical to SEQ ID NO: 200995
  chr7:65509542-65509607
  hyper

SEQ ID NO: 285074 - DNA, 38 bp, Homo sapiens; identical to SEQ ID NO: 200996
  chr7:65541037-65541075
  hyper

SEQ ID NO: 285075 - DNA, 37 bp, Homo sapiens; identical to SEQ ID NO: 200997
  chr7:65579919-65579956
  hyper

SEQ ID NO: 285076 - DNA, 104 bp, Homo sapiens; identical to SEQ ID NO: 232957
  chr7:66093260-66093364
  hyper

SEQ ID NO: 285077 - DNA, 137 bp, Homo sapiens; identical to SEQ ID NO: 200998
  chr7:66094049-66094186
  hyper

SEQ ID NO: 285078 - DNA, 494 bp, Homo sapiens; identical to SEQ ID NO: 232958
  chr7:66309613-66310107
  hyper

SEQ ID NO: 285079 - DNA, 551 bp, Homo sapiens; identical to SEQ ID NO: 232959
  chr7:66386845-66387396
  hyper

SEQ ID NO: 285080 - DNA, 170 bp, Homo sapiens; identical to SEQ ID NO: 200999
  chr7:69062189-69062359
  hyper

SEQ ID NO: 285081 - DNA, 421 bp, Homo sapiens; identical to SEQ ID NO: 201000
  chr7:69063038-69063459
  hyper

SEQ ID NO: 285082 - DNA, 318 bp, Homo sapiens; identical to SEQ ID NO: 201001
  chr7:69063552-69063870
  hyper

SEQ ID NO: 285083 - DNA, 282 bp, Homo sapiens; identical to SEQ ID NO: 201002
  chr7:69063900-69064182
  hyper

SEQ ID NO: 285084 - DNA, 205 bp, Homo sapiens
  chr7:69065161-69065366
  hyper
ttcctcgctcgcctttcccctgcgccccctccctgcaccccctccacagcagatgggcagaaagaaaggggttcgggcatcacaacaatgcgccccctctccacagagagctctgcccccactccttcctcctctccctccccaatcatggcttcttggctggtggaagtctctttgctgggtttggggcgcctgtggacggttc

SEQ ID NO: 285085 - DNA, 201 bp, Homo sapiens
  chr7:70060814-70061015
  hyper
gtggggcagttttgtggttccggcaccgacaccgtccctttcacacggtactgagccgcgggctgcttcggggcggccctccccgccccgtgccttgccgggatggcagagcggatcagaagctgcgcgcgctctgcctgcgcgctttgcctgcgcgctttgccgccgcaacccgcgcagcagccaatccgctggtgcact

SEQ ID NO: 285086 - DNA, 246 bp, Homo sapiens
  chr7:70061149-70061395
  hyper
cgcgggccggggcggggctggggcgggcggcgcgcagctcctgggccgaggcatccgcgagccgcgggtagatcgctcgcgtctgatcgccgcccgggagctcccgcggagccggctgccaggactcgttccagctccagtgcggggctgcccgggcgtccagaggcggcggacggcgtgccggcaagtttccccggcacctgccagtgcccgcgaacccacctcggaagccagacccggggaggc

SEQ ID NO: 285087 - DNA, 43 bp, Homo sapiens; identical to SEQ ID NO: 232964
  chr7:70294497-70294540
  hyper

SEQ ID NO: 285088 - DNA, 89 bp, Homo sapiens
  chr7:70596058-70596147
  hyper
gaattccagtatttcgagttcctgggttttgggaagaggaagaggtagtggaaaaccaggagccaaatgaatatgcttcttataataaa

SEQ ID NO: 285089 - DNA, 39 bp, Homo sapiens
  chr7:70597367-70597406
  hyper
ggcacctgtgcgccgctccctctgtgcctcccgggcagc

SEQ ID NO: 285090 - DNA, 39 bp, Homo sapiens
  chr7:70597451-70597490
  hyper
cagaggcgaaccacttgctggtgcagaagagaaaccctc

SEQ ID NO: 285091 - DNA, 177 bp, Homo sapiens; identical to SEQ ID NO: 201006
  chr7:70597658-70597835
  hyper

SEQ ID NO: 285092 - DNA, 88 bp, Homo sapiens; identical to SEQ ID NO: 223123
  chr7:71198521-71198609
  hyper

SEQ ID NO: 285093 - DNA, 37 bp, Homo sapiens; identical to SEQ ID NO: 201007
  chr7:71217332-71217369
  hyper

SEQ ID NO: 285094 - DNA, 1003 bp, Homo sapiens; identical to SEQ ID NO: 232972
  chr7:75931592-75932595
  hyper

SEQ ID NO: 285095 - DNA, 343 bp, Homo sapiens; identical to SEQ ID NO: 232973
  chr7:75932655-75932998
  hyper

SEQ ID NO: 285096 - DNA, 72 bp, Homo sapiens
  chr7:76145289-76145361
  hyper
tcaggcccttagaccgtcaccccagtaggctctccaggacccaggagcctccatcacctggaaggaccctct

SEQ ID NO: 285097 - DNA, 103 bp, Homo sapiens
  chr7:76751573-76751676
  hyper
ttggcttgactaggcgatgtaaacatcagctgcgtaatccccaggggcaagttgggatttgaaagctctgaactctgacctggaccccttgcctaagtccacc

SEQ ID NO: 285098 - DNA, 244 bp, Homo sapiens
  chr7:76751716-76751960
  hyper
gtggaaagtcgcagagctccgcctcttagaaaccacatatcccaggaggcaatgcgcaggggagcacgggtaagagggcaggtgttagaatcgctggaaaggcgggcgccctttgtttcaagaccattggctattggaggggcggtacatgggaggccactggccaatgggaagcacggaagggggcaacgagggtaaagctgcatggtcaccttggataccaaggacgcgacttcttgtttgg

SEQ ID NO: 285099 - DNA, 421 bp, Homo sapiens
  chr7:77167456-77167877
  hyper
gctggtctcaaagcgggcagggtaggacttaggccgtttctggggtcgcagtcatgatctccaacgcttgggaaaggattgcccataaggaatctcatgggtttacctaatttccatttacccgcgtcccgcttctcctctcctgaggcccaggtttgaggtggtcttggggtccgtgtgactataggttcaggggataagtgtgggtgggggaattatcctgaaggaagccagccgacttcggactccccaggggatattgccgaaggcggaggggatgtgactatcacttcctatccggggtgggggtggggaacttgggaacaatagtcctggtggggcggaggcgacgctacgggccgaagccctgaactgggagataaccttcccagcgcccccccgcctccgccaccccctactt

SEQ ID NO: 285100 - DNA, 178 bp, Homo sapiens; identical to SEQ ID NO: 232978
  chr7:77325999-77326177
  hyper

SEQ ID NO: 285101 - DNA, 102 bp, Homo sapiens; identical to SEQ ID NO: 232979
  chr7:77427837-77427939
  hyper

SEQ ID NO: 285102 - DNA, 148 bp, Homo sapiens; identical to SEQ ID NO: 201011
  chr7:77428716-77428864
  hyper

SEQ ID NO: 285103 - DNA, 36 bp, Homo sapiens; identical to SEQ ID NO: 201012
  chr7:77649269-77649305
  hyper

SEQ ID NO: 285104 - DNA, 235 bp, Homo sapiens; identical to SEQ ID NO: 201013
  chr7:79081510-79081745
  hyper

SEQ ID NO: 285105 - DNA, 131 bp, Homo sapiens
  chr7:79081892-79082023
  hyper
cttctcttcccagacccgctggtgatgccgctgcaccctgaagttgctccttccttctttccctcccttcctcccattctttctttcttttcttccttcctcccttccccaaaagctcttcatccgcttcg

SEQ ID NO: 285106 - DNA, 441 bp, Homo sapiens
  chr7:79082579-79083020
  hyper
gacactctcatggactttgctagtccagtggcttttctttttcaagcttttggacatggcagtggggcgagtcgcctcagttcctgggctccttggggttaggggggctggtggtgagagaatgaggatggaggagcaagggggcccagggggaagaacagcagactttgccttcgcccccctctattcggtgctttccctcttctttggatggagtgtggacgaggaatggggaggatgagagggacggctgggcagaggtaggagagcttggatgaggttgtgctgtcccttgaatgacactcaaggctgtggccccgcagcagaggaagcagtggtggtggcgtcggcggcggcggcggcggcagccggagcgagcagtagccgagctggtgagcgggtgtggtgggggtggggaaggagggtagggatgccgggggc

SEQ ID NO: 285107 - DNA, 130 bp, Homo sapiens
  chr7:79084011-79084141
  hyper
ggagacactcccttgcccaggaaagccgccagagtccggcttgtacctggggaagaatccttaagacggtctggcccaacactcctttgctcacagagaaaggggagaagactcccgagggtgaaaatgg

SEQ ID NO: 285108 - DNA, 258 bp, Homo sapiens; identical to SEQ ID NO: 201015
  chr7:79764213-79764471
  hyper

SEQ ID NO: 285109 - DNA, 216 bp, Homo sapiens; identical to SEQ ID NO: 201016
  chr7:79764712-79764928
  hyper

SEQ ID NO: 285110 - DNA, 243 bp, Homo sapiens
  chr7:79765213-79765456
  hyper
ttttcttgctgtgggggcatggaagccacccaagtggggttgggaagctttgctttagtagtaggcaaggcagatactcgagtggtgaaaactgctgtgaaagagcgagagggtcacgccagacaacagggttctgtctccgctgccaccgtttctgatgaatgagatttgccaggtacacgcaaggcttttatttgttcttagcactgttctgttcgtgaaacgctacgtggaggtcttttc

SEQ ID NO: 285111 - DNA, 250 bp, Homo sapiens
  chr7:80548007-80548257
  hyper
cttccctgacaaaccgcgtgtgttcttaagaaaatgtccaggcttgagcataccaatgtatgaaaaatcaatatacaggccaaaaaagttatactttgctaaatctgtaatgcggaaaatgaccaatttagcttaccgaggttgaaagaaatcagcacggaaaagtcatcagtttgctaccggggttggatgcgcttgtgtctccagtccttttcccagacgaccttattttctagcacgtcgcaaaggt

SEQ ID NO: 285112 - DNA, 460 bp, Homo sapiens
  chr7:80548403-80548863
  hyper
ttggtgtccgattacagcgccgcggcgcgcggctccggctgccccggcgcgccgccctgcaggctcgcatcaccaccgcgcagccccggccgcatctccgccagccgcgaggccccaccccgagcgcgcccgcgagagcctggcagggagccgcgggggcggaccgggcggggccgacccttagagctcgcggctggccagacgcaagaatgcgcggccgcaggctggagccctagctccgcaaccctgctcctttcgcagtccgcggcggagtgagcaacttgctgggtgcgctccacggtttttgttgccggcggctctcgaagacttacacaggctttgcctggccgtaaatatcaaagtgcaaagcagttgtggttttttatttttgccagggaaggatcactgcagccttttaaggcaaagagatgcgtttttaaaaggacgtgagttttgtcct

SEQ ID NO: 285113 - DNA, 351 bp, Homo sapiens; identical to SEQ ID NO: 201017
  chr7:82072703-82073054
  hyper

SEQ ID NO: 285114 - DNA, 176 bp, Homo sapiens; identical to SEQ ID NO: 201018
  chr7:82073319-82073495
  hyper

SEQ ID NO: 285115 - DNA, 55 bp, Homo sapiens; identical to SEQ ID NO: 201019
  chr7:82073533-82073588
  hyper

SEQ ID NO: 285116 - DNA, 415 bp, Homo sapiens
  chr7:82791563-82791978
  hyper
catatatgtaccgccgtgctggcacatacaggctggcacatatgtgcacgggaagctgtacatatatgcccggacatatacatcatgctgtgcatgcctgtgcatggaaggcgactccgcagcggccggggggacgcttcccttgggcagcccctgcgcccttgacatgacagcggcgatctgtctcctctcctcttcgctcagctggctcaaatccgcctccatgccggccgggatcgcggtgtgagaggggctccccgccccgctagctcctcctccagccgctgcggccgccgccagcccttcggggagcccttccccttccaagctcgcctcgttgcccatggctcagggagactcggggccgccgcgctccctcctcgcgccgcgtcccagtcgagaagcccgcggccag

SEQ ID NO: 285117 - DNA, 297 bp, Homo sapiens; identical to SEQ ID NO: 44343
  chr7:82792128-82792425
  hyper

SEQ ID NO: 285118 - DNA, 93 bp, Homo sapiens; identical to SEQ ID NO: 201021
  chr7:83277832-83277925
  hyper

SEQ ID NO: 285119 - DNA, 258 bp, Homo sapiens; identical to SEQ ID NO: 201022
  chr7:83277959-83278217
  hyper

SEQ ID NO: 285120 - DNA, 102 bp, Homo sapiens
  chr7:84815039-84815141
  hyper
tcagcccaggaggttgaactcgagtcatcagagaaggagaaacagtgccgaaaacggcccgtgcgctaccagggtagcccattaacgcattaactccaggct

SEQ ID NO: 285121 - DNA, 266 bp, Homo sapiens
  chr7:84815451-84815717
  hyper
ttccttgcccctttcccttctcccagaccaacaaggaaaggagcgagcgagggcgcagatgccctttggtcaagtactccccggatgttcccgactaaagcgtctccaaatgaacctgcagcctgcggaagccggggacacattcatagacgctctctgctgcccagaccaggaggggtggtgggggaaccaggaagccagggagagagcaaagttcctggacgcgtctcaggaggaaaactttgtgcagtgctgccaggcggagg

SEQ ID NO: 285122 - DNA, 41 bp, Homo sapiens; identical to SEQ ID NO: 201024
  chr7:84816488-84816529
  hyper

SEQ ID NO: 285123 - DNA, 164 bp, Homo sapiens; identical to SEQ ID NO: 201025
  chr7:86273044-86273208
  hyper

SEQ ID NO: 285124 - DNA, 155 bp, Homo sapiens; identical to SEQ ID NO: 232995
  chr7:86781443-86781598
  hyper

SEQ ID NO: 285125 - DNA, 60 bp, Homo sapiens; identical to SEQ ID NO: 232996
  chr7:86782566-86782626
  hyper

SEQ ID NO: 285126 - DNA, 148 bp, Homo sapiens; identical to SEQ ID NO: 201026
  chr7:86848939-86849087
  hyper

SEQ ID NO: 285127 - DNA, 109 bp, Homo sapiens; identical to SEQ ID NO: 201027
  chr7:86849527-86849636
  hyper

SEQ ID NO: 285128 - DNA, 277 bp, Homo sapiens; identical to SEQ ID NO: 232998
  chr7:86974660-86974937
  hyper

SEQ ID NO: 285129 - DNA, 31 bp, Homo sapiens; identical to SEQ ID NO: 201028
  chr7:87104710-87104741
  hyper

SEQ ID NO: 285130 - DNA, 60 bp, Homo sapiens; identical to SEQ ID NO: 201029
  chr7:87258398-87258458
  hyper

SEQ ID NO: 285131 - DNA, 67 bp, Homo sapiens; identical to SEQ ID NO: 233002
  chr7:87505447-87505514
  hyper

SEQ ID NO: 285132 - DNA, 181 bp, Homo sapiens
  chr7:87563189-87563370
  hyper
cagctctttaaggacgatgcagatgaatactggctgctgtaacggcccagttggtgcatctcggatgccaggaggcggtccagtgctgatctctttcttttgcccttccctcccgcccttccagtctgtgggatatagaggacctcacagtcacgaggtcgcgacggtccgtgccgtcgtg

SEQ ID NO: 285133 - DNA, 215 bp, Homo sapiens
  chr7:87563614-87563829
  hyper
cactgagccgcggtggaggttgcagcgccacggccgccgcagcaccggccggggctgggtggaggtggccgcggggaccccgggggcgcggagcgagggaaacggactcggcggcgccggcatgaggagctgagcgtctcgggcgaggcgggctgacggcagcaccatgcaggcggcagtggctgtgtccgtgcccttcttgctgctctgtgtcc

SEQ ID NO: 285134 - DNA, 439 bp, Homo sapiens
  chr7:87563890-87564329
  hyper
tgggccataccatttcccgggaatctttggagccctcaggcgtattgaaaagggggcatccccatttcccgagtgcgcggggagattttttttttttttttttttaattcgggagggtggtgagaagtggagcaaaaatatatgtgtggaggcgcgcagatgcactggaagccttcggtcaaagcctgtttttctccttctgaagaggaatggggagaatgggaaaggggtgccctgcttctgggccccgctcctggttgctctcggatgagctggtccaaggctctcgggctggtgtctctgcgtccttcccagttgggttccgagagggagggggcggtggggattttcgtaggggagacgtaggactgcaggatggaggagtgagggtcagggtcattattttcgccttttctctccactccctcctttcccggtt

SEQ ID NO: 285135 - DNA, 205 bp, Homo sapiens
  chr7:87564359-87564564
  hyper
gctagagaagaggaaggaaaaccgcttcgtggagcgccagagcatcgtgccactgcgcctcatctaccgctcgggcggcgaagacgaaagtcggcacgacgcgctcgacacgcgggtgcggggcgacctcggtggcccgcaggtgagaggctcggtccgggaggtggtcctccgcgcctcccggcccacccgagaccccacgatt

SEQ ID NO: 285136 - DNA, 203 bp, Homo sapiens; identical to SEQ ID NO: 233005
  chr7:87849003-87849206
  hyper

SEQ ID NO: 285137 - DNA, 481 bp, Homo sapiens; identical to SEQ ID NO: 201030
  chr7:87849420-87849901
  hyper

SEQ ID NO: 285138 - DNA, 120 bp, Homo sapiens; identical to SEQ ID NO: 201031
  chr7:87936000-87936120
  hyper

SEQ ID NO: 285139 - DNA, 209 bp, Homo sapiens; identical to SEQ ID NO: 201032
  chr7:87936226-87936435
  hyper

SEQ ID NO: 285140 - DNA, 195 bp, Homo sapiens; identical to SEQ ID NO: 201033
  chr7:88387787-88387982
  hyper

SEQ ID NO: 285141 - DNA, 36 bp, Homo sapiens; identical to SEQ ID NO: 201034
  chr7:88388246-88388282
  hyper

SEQ ID NO: 285142 - DNA, 48 bp, Homo sapiens
  chr7:88389356-88389404
  hyper
gtcttcaggggacccctgtgcaagaacggatctccctctccggtaatg

SEQ ID NO: 285143 - DNA, 53 bp, Homo sapiens
  chr7:89747943-89747996
  hyper
ccaccggactcacgcgggctctgccacgtgttgcccgcagtctcggcccgttc

SEQ ID NO: 285144 - DNA, 110 bp, Homo sapiens
  chr7:89748563-89748673
  hyper
gggggctgtgcgtggggctgctctcaccggaagctgcacgctcggggaagcgcggaggcgggggtgctgcgcgcttgggagcacgtgggggaacacgcagggactgccgg

SEQ ID NO: 285145 - DNA, 207 bp, Homo sapiens
  chr7:89748718-89748925
  hyper
cgccatgacgaccggtaggtccgcaacggctgcggggacaagaccgttgaggctgccaggcgagtcaggcctttctggacctcgcctgactcggctgggctgtgcctgaaattgacccagctctatcagggattatgaaaaaacaaggagtaagcccgaagccgctgcagtcttcccgccccagccagtctaagcggcggtgcgggc

SEQ ID NO: 285146 - DNA, 126 bp, Homo sapiens; identical to SEQ ID NO: 201035
  chr7:89783802-89783928
  hyper

SEQ ID NO: 285147 - DNA, 196 bp, Homo sapiens; identical to SEQ ID NO: 201036
  chr7:89840694-89840890
  hyper

SEQ ID NO: 285148 - DNA, 91 bp, Homo sapiens; identical to SEQ ID NO: 201037
  chr7:89841066-89841157
  hyper

SEQ ID NO: 285149 - DNA, 54 bp, Homo sapiens; identical to SEQ ID NO: 201038
  chr7:89841396-89841450
  hyper

SEQ ID NO: 285150 - DNA, 1025 bp, Homo sapiens; identical to SEQ ID NO: 233012
  chr7:89874391-89875416
  hyper

SEQ ID NO: 285151 - DNA, 146 bp, Homo sapiens; identical to SEQ ID NO: 233014
  chr7:90032703-90032849
  hyper

SEQ ID NO: 285152 - DNA, 634 bp, Homo sapiens
  chr7:90225111-90225745
  hyper
tggaaggagaaaaccgctcaaacaactggactcggcccgtttcctttcggtaacctccccacagcccaacacgctgtccccagacgctgcccgctcccaccccggtcccttcgtgatcctcccgcgcgcgggcggggcgggggaggagcgcgggggcggccgggaggggcgcggccgggagggggcgccgccggggcgcgagccagacacagagggccgcggaggacgcgggaggcgagcggggagccgaggtcgtgctaggatcccgcgcccaggggccttcgtcgagggaggggcgtggcggcggcagcaggagggcagcaggagctgtcaggctggcggttccgcgccgcggctccttctgcgctgcgcccgcaactctgggctgagaacttctcccgccggcccactcgccctcgccccgcgcactcggcgccaggcgactcccgcaccttgtacccggcccgccccgcctcctccttcggccgcaccactccccctgccggccgcgcttctctccgttacaaaggagggaaaatgagccgggcggcggcggcgcggcgcggggccaccacggcggcggcgagcgcggccgcccccggcaccacgtaaaccgcccccgcccgcccagctg

SEQ ID NO: 285153 - DNA, 211 bp, Homo sapiens; identical to SEQ ID NO: 201040
  chr7:90226057-90226268
  hyper

SEQ ID NO: 285154 - DNA, 194 bp, Homo sapiens; identical to SEQ ID NO: 201041
  chr7:90893324-90893518
  hyper

SEQ ID NO: 285155 - DNA, 377 bp, Homo sapiens
  chr7:90894561-90894938
  hyper
ctgtgcacggacatcgcgtacaaccagaccatcatgcccaacctgctgggccacacgaaccaggaggacgcgggcctggaggtgcaccagttctaccctctagtgaaagtgcagtgttccgctgagctcaagttcttcctgtgctccatgtacgcgcccgtgtgcaccgtgctagagcaggcgctgccgccctgccgctccctgtgcgagcgcgcgcgccagggctgcgaggcgctcatgaacaagttcggcttccagtggccagacacgctcaagtgtgagaagttcccggtgcacggcgccggcgagctgtgcgtgggccagaacacgtccgacaagggcaccccgacgccctcgctgcttccagagttctggac

SEQ ID NO: 285156 - DNA, 311 bp, Homo sapiens; identical to SEQ ID NO: 233018
  chr7:91569809-91570120
  hyper

SEQ ID NO: 285157 - DNA, 381 bp, Homo sapiens; identical to SEQ ID NO: 233019
  chr7:91763723-91764104
  hyper

SEQ ID NO: 285158 - DNA, 49 bp, Homo sapiens; identical to SEQ ID NO: 233020
  chr7:91875200-91875249
  hyper

SEQ ID NO: 285159 - DNA, 143 bp, Homo sapiens; identical to SEQ ID NO: 201043
  chr7:92219764-92219907
  hyper

SEQ ID NO: 285160 - DNA, 1229 bp, Homo sapiens; identical to SEQ ID NO: 44386
  chr7:92462187-92463416
  hyper

SEQ ID NO: 285161 - DNA, 247 bp, Homo sapiens; identical to SEQ ID NO: 201045
  chr7:92463701-92463948
  hyper

SEQ ID NO: 285162 - DNA, 262 bp, Homo sapiens
  chr7:92464877-92465139
  hyper
ttccgcattcctccgcgactacaaaggctgcagccgcctccttctgctttctgtctctgctctctgtcttcacactcaatgaaatccttcatgcgcctctcccgaagcctgccaagcaccacaagggtcgccaccagcacagcgacaagaggccacaccggggaccgcgactcccgcgtgtgcgcacacgcagatgcgcccatatgcacacggacgggcgcgctgcggggaccagggctgctcactgcggggcgtgtgttta

SEQ ID NO: 285163 - DNA, 47 bp, Homo sapiens; identical to SEQ ID NO: 201046
  chr7:92466481-92466528
  hyper

SEQ ID NO: 285164 - DNA, 421 bp, Homo sapiens; identical to SEQ ID NO: 233022
  chr7:92861272-92861693
  hyper

SEQ ID NO: 285165 - DNA, 250 bp, Homo sapiens
  chr7:93203796-93204046
  hyper
agacgctggtgggctggctttcctagtttgatgcgagagcaaactgcgttagtctcagtcctccctctccgcccctctcctggttttctgacactttaaatctgtcttaggtggttcagacccaagtctaggttgtattatcagctaaaagacaactgttctttcccctggcttgctttctacctccccagagtccaggaggctcaccttcccggcgccttcctgcgctctcccagctgtgaagctgtgc

SEQ ID NO: 285166 - DNA, 170 bp, Homo sapiens
  chr7:93204047-93204217
  hyper
caaacttctcctgacttaagagtctcaatcctagcctgcgctcccgccccacccccgcccgcctcccgacaggcggcagaggaggtggcagcagaattgatgagagccagccccccttcccggaccccgccaccccagtcagccccctcctgtcccaggagagggagggg

SEQ ID NO: 285167 - DNA, 133 bp, Homo sapiens; identical to SEQ ID NO: 201049
  chr7:93633682-93633815
  hyper

SEQ ID NO: 285168 - DNA, 137 bp, Homo sapiens
  chr7:94285147-94285284
  hyper
cagggtgtactgaaggaggggtacggtggggtccgggacagaaagagaggctggtgcccaaagggcgcgctcaggcgcccggaacccgagcgggggagggggaggcggcggcctgttggccccgggacctccacgtc

SEQ ID NO: 285169 - DNA, 39 bp, Homo sapiens; identical to SEQ ID NO: 201050
  chr7:94536808-94536847
  hyper

SEQ ID NO: 285170 - DNA, 279 bp, Homo sapiens; identical to SEQ ID NO: 201051
  chr7:94537598-94537877
  hyper

SEQ ID NO: 285171 - DNA, 469 bp, Homo sapiens
  chr7:95025596-95026065
  hyper
caggaacatctccccgactaaggacaggccgacccccagcaggaccagcgccacgagcttccccatggtctcggggtgcccagcggcgactgcgcggcgccgagagctctcgggggcgcggcgggcggttcctgcctcgcgtacggattggggcccgctcggccccgcccgcacacgcctcctacttacctgagcggcccgggtgccgcagcagggcgctgacgagtcccgccgagccccgccgcccgggttcaaggccgccttcacgcccacgattccttgttttttgggcagaggtcaaggctcaacggagagggagcccgggaccgagttgtggtgggagtttgctcctaacacccgcgaaatcctacctcaattcctcagatggcctgagggagaaaccggagggcccgggaatggcggggagctccagttcagagccggaactccggacttctgcaaggccaga

SEQ ID NO: 285172 - DNA, 437 bp, Homo sapiens; identical to SEQ ID NO: 201052
  chr7:95064141-95064578
  hyper

SEQ ID NO: 285173 - DNA, 116 bp, Homo sapiens
  chr7:95226207-95226323
  hyper
tgtcaagtactcctggccacaaactgtttccaagagtttggactccgcgtgctcattggtccttgctcagagcagggcttttacagtagccaacaagctgcgttcaaaagtatggg

SEQ ID NO: 285174 - DNA, 211 bp, Homo sapiens
  chr7:95401814-95402025
  hyper
aggaggggcgcgggcgtggagggcgtgggcagggggcggggcgagccccgcagactgagtgctccggggagctgtcagtgtcaggctctgggagagaggaagtgatcgctcccggaggagcgcgagccgagcggccggcgcagcgtgagacagcacatcctgcccgcgccggccccgccaccttcgggagccgcctgcaccaacgctgccg

SEQ ID NO: 285175 - DNA, 767 bp, Homo sapiens; identical to SEQ ID NO: 201053
  chr7:95704890-95705657
  hyper

SEQ ID NO: 285176 - DNA, 39 bp, Homo sapiens
  chr7:96622655-96622694
  hyper
tgataaggctcgcacgtgagccaactccggcgcagccca

SEQ ID NO: 285177 - DNA, 202 bp, Homo sapiens
  chr7:96626212-96626414
  hyper
ctccccatcccagactgctctgcttgtcccatgaaagcagagaaaagaaaccatagggtgcggaacggacctcagtagtattcaagacaacacttcaccgtgaaatgtaaagttctcctttaagaattcctgcctaatattgagaacaacagccatgtcaattgatagccgttctaacagacagtccgaactgctccaaacc

SEQ ID NO: 285178 - DNA, 607 bp, Homo sapiens
  chr7:96627434-96628041
  hyper
gtggagtggggaggggaggaaaaaaaaaggggcggccagccaaatcaaagcttgggagacattttgacagtgcgcttgaaataatgctcttaatttttggaaggttttcaagaagggggtggggggcacgtgggagaaccacaactttctcctgtctgtcactcaagcggccagagagggctccaacctccagctcccgcggcaacacacagtgggaaattgcttcaagatacagtggggctctattctttctctacccctgccccgcctttcccgagcagtgaacttcacagagagggtggtaagggagggttatcctgggtgtcaaaaatctgtgcatagcctgagatcagaagagttaaccccaggccctagacccagcccagcggccaaactggcaccccgtgctgatcagcccccgcatccccatatctgcatccccatatctacctccccagtcgggggtggtgaggtttgggggaggggggcgacactaccatatgcatccaccacctaagtccagcccaggctggcttcaatgaaagctggcaaatccggcgaatctcgcagaaattttcttcgaacttaattcaattttaaagtggat

SEQ ID NO: 285179 - DNA, 149 bp, Homo sapiens
  chr7:96628077-96628226
  hyper
attaatctgactgtacggttttaattacagtgagggtttctctacaaatctgtacaagacagtggctggttcttggaggatctctgcctcctgaattccattatcgggcccctggttccctgcagacggcagctcgtgggagccagctg

SEQ ID NO: 285180 - DNA, 158 bp, Homo sapiens
  chr7:96632631-96632789
  hyper
tgccgatttgtaaacgtgtagatcgtgttactggttcgcgtgttaaagtgcacctcttgttaaaaggtggggaacagggcacgccacttaaaaatgaattcagagttactgaaccggctccccagactcaagaacttaagcgcaacgggctgggaaaa

SEQ ID NO: 285181 - DNA, 191 bp, Homo sapiens
  chr7:96632819-96633010
  hyper
cctgggaactcggaggaaactcgcgggcagcgagcttcaggtcttctgatacattgaaggaaagaaagaaagacagaaaaagaaaaaaacaaactgtcctggagatagctagacatccagggctgggagctgggaaaatcaattggcataagccgctgccggcgggcttcgcgcaacgtaaaaaataaagt

SEQ ID NO: 285182 - DNA, 319 bp, Homo sapiens
  chr7:96634326-96634645
  hyper
tctgatttttctttttctgtaccaccccccagtggggtggagcccaggtgtgagggttcgtcttccttctgtggtttcaataaaatacgtctagaaaaatccacggtgacaaggagctcccacaagagtgtagtaggaccagagtggcagggacgtcaagaaaggggggcctggatttaatgcgggggtggggtcactgcttctaagcacaggcaacctacaagggtgcaaagggattgaaagagagcagcccccagttggctgtttcaaggctgagatattggcaactggggctccgggatttggggcacgagctgcg

SEQ ID NO: 285183 - DNA, 45 bp, Homo sapiens
  chr7:96636807-96636852
  hyper
aagagaggtcggggcatcatagggatttttcgaggtaacccttat

SEQ ID NO: 285184 - DNA, 117 bp, Homo sapiens
  chr7:96639201-96639318
  hyper
cggccctgtcgccacgctcgccagcgctgcctccagtctgggacgtttctgcctcggccaagggtgtcagtatgccccccaacagctacatgcctggctattctcactggtactcct

SEQ ID NO: 285185 - DNA, 150 bp, Homo sapiens
  chr7:96639348-96639498
  hyper
agatgatgtgagttgcccaagggaacaccctagggaaacgtctgaacaaggaaaagaggatccgggacctgcttgtatctgcgaaaaggagccaaaggagcaggcttaggagagctcataagtgtggcaagaagccgactaggctcattc

SEQ ID NO: 285186 - DNA, 55 bp, Homo sapiens
  chr7:96642693-96642748
  hyper
tggaggaaagatgtcgaaggggcttcaccgtccagagattcatcagactacacct

SEQ ID NO: 285187 - DNA, 203 bp, Homo sapiens
  chr7:96647337-96647540
  hyper
gctaaaaaataaaaaccgcacgagagaaaaggcctttgcgagtggaagaagtgaggttggcacaagggaaggaatcctgaaaccaagtctgtgtccgcgcggcgttggtctgggccacctcgcaatgaggctttagtgatcttaacgacaagcagcctcaaagctagggtggaggagtggtcatttagaaagagcttccctct

SEQ ID NO: 285188 - DNA, 147 bp, Homo sapiens
  chr7:96652430-96652577
  hyper
aagttcagcaagagtcacacactgagaaggaaccggtggtggggtgttttcgtaggaaaggggcggcaggtcaggatgagattctcactgtcatgagtatgggtttgggcgggagggggagggattgccaaacgcgtgttgtacaaa

SEQ ID NO: 285189 - DNA, 261 bp, Homo sapiens
  chr7:96652921-96653182
  hyper
tgggcgcctatggagacagaaaaaaaaatctatcctacaacgtgacccctcagcaaccctcctccacctttaaatggctttttgtttttggaaatgcctggataaaccgcaaaactctcggcgcgctcttctctggctggctacaactccttaacccccccacccccacccagcgtgctcagggcacccgcaccgtgctagcttgtggcggctctcaaactaatcctgactgagtttttgaggcagccttctattcccact

SEQ ID NO: 285190 - DNA, 31 bp, Homo sapiens; identical to SEQ ID NO: 201056
  chr7:96654166-96654197
  hyper

SEQ ID NO: 285191 - DNA, 365 bp, Homo sapiens
  chr7:96746747-96747112
  hyper
ctctctttcaaggcctgtgtcgtcaggacgcaggccagaagaagccacgacgaggcgcaggcgcgactccacgagggccacgcccctcctagagaaggaccgacccgttttccgcccgcagcggagcttgggtttccgggaggacctgattgtgcaagggaccaaaccggatagaggtcgcgcgccctctttcgtctgccttccggttcactaatacgcaagttcgcagaagtgcgggaacgcgccgtccctctgcgcaggcgcagtcggcggtcggcgtggggcgctatgccggggcggcacgtttctcgagtccgggcattgtacaagcgcgtcttgcagctgcaccgtgttctgcccccgga

SEQ ID NO: 285192 - DNA, 417 bp, Homo sapiens
  chr7:96747151-96747568
  hyper
taggagacataagaccgttggttctgacgaggcacagcgtttcttgcaagaatgggaggcaagtgacgctcccttctctttgcccaagacctttggggttcctcggtgtccaggtttctagttccagtcccccatgcggggttaaacagagcagcaacctgttctgtttgaaatagcgtaatgctgttcaggtaacactttccaaagtttctcccacgggtttctcactagagcagatcctgttacttcagcgtccccaattcagttcaacttttgagctcctgcagatgccaggtgctcaaagggtgagggtaggaggtcacaaaaatgagcaagtcgtcgttaagtgctcaaaaacctcaggagctttttgtccttttaagtgcctttgcacctagtaagcgcccattaataaat

SEQ ID NO: 285193 - DNA, 188 bp, Homo sapiens; identical to SEQ ID NO: 201057
  chr7:97361999-97362187
  hyper

SEQ ID NO: 285194 - DNA, 674 bp, Homo sapiens; identical to SEQ ID NO: 223150
  chr7:97501249-97501923
  hyper

SEQ ID NO: 285195 - DNA, 41 bp, Homo sapiens; identical to SEQ ID NO: 233059
  chr7:97736112-97736153
  hyper

SEQ ID NO: 285196 - DNA, 51 bp, Homo sapiens; identical to SEQ ID NO: 233060
  chr7:98030099-98030150
  hyper

SEQ ID NO: 285197 - DNA, 236 bp, Homo sapiens; identical to SEQ ID NO: 201059
  chr7:98030420-98030656
  hyper

SEQ ID NO: 285198 - DNA, 145 bp, Homo sapiens; identical to SEQ ID NO: 233063
  chr7:98923236-98923381
  hyper

SEQ ID NO: 285199 - DNA, 77 bp, Homo sapiens; identical to SEQ ID NO: 201060
  chr7:98971600-98971677
  hyper

SEQ ID NO: 285200 - DNA, 402 bp, Homo sapiens; identical to SEQ ID NO: 115310
  chr7:98971810-98972212
  hyper

SEQ ID NO: 285201 - DNA, 231 bp, Homo sapiens; identical to SEQ ID NO: 233064
  chr7:99006252-99006483
  hyper

SEQ ID NO: 285202 - DNA, 457 bp, Homo sapiens; identical to SEQ ID NO: 233065
  chr7:99036314-99036771
  hyper

SEQ ID NO: 285203 - DNA, 127 bp, Homo sapiens; identical to SEQ ID NO: 115320
  chr7:99097908-99098035
  hyper

SEQ ID NO: 285204 - DNA, 119 bp, Homo sapiens; identical to SEQ ID NO: 233067
  chr7:99102377-99102496
  hyper

SEQ ID NO: 285205 - DNA, 489 bp, Homo sapiens
  chr7:99149422-99149911
  hyper
tccagtcccaggggtgtctccaatccggaaaccaaaacttcgttcccttcccacctgtatccagggacacctctgctgggggacagcgcttgccaccgccgaggctggcgcgaggaacgggggcacggacccgcttccactccgtcccgggcggtcgtggcgaggggattgcaggacacagccatgcacgtccaactctgtccccgcccggagaagtctgggatgctgggatagaaggggttgtgactttggggaccaggagcactagactcacatccaagccccctggccttcagagcccagggaaagcgtcacaaaagccggaagtgcgtcacacccgccttccggagctgcgctccgcttcggggtcctctctaggatcgcgggaggactttgcatccctgtgtagggctctaatctcgggtttggggatcttgctcctcagcttgtccgctccgaggaggtgcacagggcggggaaaaagggatg

SEQ ID NO: 285206 - DNA, 92 bp, Homo sapiens; identical to SEQ ID NO: 201063
  chr7:99155659-99155751
  hyper

SEQ ID NO: 285207 - DNA, 215 bp, Homo sapiens; identical to SEQ ID NO: 201064
  chr7:99156600-99156815
  hyper

SEQ ID NO: 285208 - DNA, 74 bp, Homo sapiens; identical to SEQ ID NO: 201065
  chr7:99156982-99157056
  hyper

SEQ ID NO: 285209 - DNA, 126 bp, Homo sapiens
  chr7:99613133-99613259
  hyper
tgcaaagtcctcccgcgctcctagagaggacccggaagcgcggcgcggtcccggaagacgaggtggtgacacgcttccggcctttgtgactcattgtgtctgtgtcgaggcgtcgggagggcctaa

SEQ ID NO: 285210 - DNA, 140 bp, Homo sapiens; identical to SEQ ID NO: 201066
  chr7:99679773-99679913
  hyper

SEQ ID NO: 285211 - DNA, 199 bp, Homo sapiens; identical to SEQ ID NO: 201067
  chr7:99680213-99680412
  hyper

SEQ ID NO: 285212 - DNA, 334 bp, Homo sapiens
  chr7:99698203-99698537
  hyper
cctccgcccagggcgggagccagtccagccattggccatcacacccagagacaccgcgatcccagcccactgccgcctttcccgggcccgagcgaagctccggatcccaggcacgcccccccgggccgcagctctctccgcggccgccgcgcggaaggacactgtttacacgacactccctccagcctcctcgcgccacttccgcccggctccacttccgctcggagggcggcctcaaacggccaatcccggcgcgcagcggccccggcctgcccgcccccggggcctacgcgcgcctggggagggcgcgggaacctgggaatgcccaaaagcg

SEQ ID NO: 285213 - DNA, 226 bp, Homo sapiens; identical to SEQ ID NO: 233075
  chr7:99699434-99699660
  hyper

SEQ ID NO: 285214 - DNA, 52 bp, Homo sapiens; identical to SEQ ID NO: 233076
  chr7:99717143-99717195
  hyper

SEQ ID NO: 285215 - DNA, 169 bp, Homo sapiens
  chr7:99725637-99725806
  hyper
gtgaagaccccgcagcccaggagcggagccggaagagggtcctggtcgttgccgacgtggtcgtacctggtcacgggcccccctttcgagtgttaagggaagcctcgcagcccgagacggagggtggagggaacagccagcaggagccggtggtcggagacgaggagcc

SEQ ID NO: 285216 - DNA, 122 bp, Homo sapiens; identical to SEQ ID NO: 201068
  chr7:100027394-100027516
  hyper

SEQ ID NO: 285217 - DNA, 263 bp, Homo sapiens; identical to SEQ ID NO: 201069
  chr7:100167116-100167379
  hyper

SEQ ID NO: 285218 - DNA, 239 bp, Homo sapiens
  chr7:100167621-100167860
  hyper
acccctgctggcctctccccgtgctcaagacacgagacccagccgtctctgcctcttctgcagccactttattgccttcgcccctgaatgaagcccgcaggcggcggccccggggagagccgggaatggccgccgtgcccctcagccagccgctgccctgggcctgccctgccgacgtgcggttctgcggccacctgcgcgcagacccgccgcgtcccgagtgttccgagagcgagcag

SEQ ID NO: 285219 - DNA, 143 bp, Homo sapiens; identical to SEQ ID NO: 201071
  chr7:100168054-100168197
  hyper

SEQ ID NO: 285220 - DNA, 755 bp, Homo sapiens; identical to SEQ ID NO: 233080
  chr7:100202090-100202845
  hyper

SEQ ID NO: 285221 - DNA, 289 bp, Homo sapiens
  chr7:100203046-100203335
  hyper
cctggtataacacgcgggcctgtcacttgtgagtgcgccaggacttgaccttgccaaccacgacgaccgacacccctgcagggtcccatgggtgtgtgtggtcctccgtgctgtggtgtgaacgccttcaggaggggggcccagaggacgcgggaggtgggagtgggagctgctgcaggcacccagtaggagatgaggtgcaggcgcccaggggtgtcccgccgcgcagtccccgcctccgcccgccgccaggtcatcgcgctgaccttcgagaagtttgacctggagc

SEQ ID NO: 285222 - DNA, 105 bp, Homo sapiens
  chr7:100203366-100203471
  hyper
cgtgttcaacggagccgtgagcgacgactcccggaggctggggaagttctgcggcgacgcagtcccggggtgaggggcgggacctgggcgagtccgggagagagt

SEQ ID NO: 285223 - DNA, 64 bp, Homo sapiens; identical to SEQ ID NO: 115364
  chr7:100203505-100203569
  hyper

SEQ ID NO: 285224 - DNA, 413 bp, Homo sapiens; identical to SEQ ID NO: 201073
  chr7:100224177-100224590
  hyper

SEQ ID NO: 285225 - DNA, 79 bp, Homo sapiens
  chr7:100254132-100254211
  hyper
cgagacaatgaccgaccgggggcagctgctttaaaggggaagatacactctattaagcggccaggaggagatggggcag

SEQ ID NO: 285226 - DNA, 237 bp, Homo sapiens; identical to SEQ ID NO: 233084
  chr7:100271101-100271338
  hyper

SEQ ID NO: 285227 - DNA, 141 bp, Homo sapiens; identical to SEQ ID NO: 201074
  chr7:100303156-100303297
  hyper

SEQ ID NO: 285228 - DNA, 1470 bp, Homo sapiens
  chr7:100424341-100425811
  hyper
agttcggggagcccgggcaggggaatgtcccgggtcgtagccagactccatctctttcccaaacaaaagaaaactccactacccgtcgggcgcctcttccccgcccccctcccgttccagcactatcggtccgaagtgtttgggactgcagtgcccgggtaggggtagtcagaggccggcccctccactccgaggcccagatgttgggggggaggtcccaggagtgacggggtgcgcccccccccgcaaggaaactcaccttccaaagctgcggccaacgaagcccagcagagcagcacccggagctccatggcgccgcctcactcgggtaggatccgaactgagtttggggggccctcgcccccccaggtctgactctccctgggcgggtggacgccgatactccgcgcgggactcctcgtcggggccctcagcgcgggcccatgcgagcgtgcggggcaccgggcggcggcgccaagtgtggccccgcgtctgtgccgcgcgcgcgggcggcgggcccggagcgtgctggcagtggccgcgccgggcgggcgcgcagcaagacgtggctggagttggggtccctccggggcctcggggtcccgccccgggtggcgggggctgagccggccgctcgcggtctccccccctccctggagtggctctgctcgcgccgccgggccgagtgctctcctcgcgggcggggatggtgggagcccgagcggggacggagcgggagggagggagactgcggcgcggagccgggcgggccgggccgggcaggggctgagctgcgctggaactgggccgggcggcgccgggcccgggagggaggggcgcgcggggggcgggggcagctctcccaacgcgggggctccgcgagtgagccccgggcgcgctgattggagctcacgctactgaataattcatgagggaagcggagaggggcaccgagtggagcaggtcgggaagttgagagaaagtttggagaagggggaggggcggcgggtgaggaaccccgggaccgcccagatgtgcgccgtggcggtgcgcgctgtccaggaccgagcatgtcggggctggggcccagggacccccgggacaggcccgaacccggctggcaccagggagcagagaaaacacacacccagcagcaacacggagggccgcccaggcgtgcacgtaaatgttcaccgcgcacacaaagcccgctctgaccttgctgcggactctagatgccgctcttggatgcgcccaccaccctctagtgggcgcagggactgcgttttgggggaaaaggaaggaaaagggagtagaagctttggagaattgacggccgcccagggggcctcaaggagcaatcccagtttggatagccttgcagcgaacgttcacacagtcaccccataaacattcagtgttggggacctactgtgcgcgcaaccaagccctgaaaaatgtccagaggag

SEQ ID NO: 285229 - DNA, 133 bp, Homo sapiens
  chr7:100546904-100547037
  hyper
ccctccacgggtgtcggggaggaagggcagcttccaggcagttccatgtgggccaggcaggctgtggggctgagccaatagcagctcttcctgcctgacacttcctggacttgtcctatctttttcccccgtg

SEQ ID NO: 285230 - DNA, 83 bp, Homo sapiens
  chr7:100547073-100547156
  hyper
gtgcagggagaagggaggaagaggggagaggtggggcggtgcaaaggtgaggctgtgctcagccctgacgctcagcaaaaccg

SEQ ID NO: 285231 - DNA, 152 bp, Homo sapiens; identical to SEQ ID NO: 201076
  chr7:100608956-100609108
  hyper

SEQ ID NO: 285232 - DNA, 137 bp, Homo sapiens
  chr7:100609361-100609498
  hyper
ctacggtggattccggccgcttgtctagggtggaaccccccagcttgccctagggtggaacccccccgctgccctaggctggagccccgccccctcacccgcccccgcggggcccaggtgcacgcgtggaccccgag

SEQ ID NO: 285233 - DNA, 256 bp, Homo sapiens
  chr7:100660367-100660623
  hyper
tgcagggagagccccggagtccagagagtgagtggttctgcgggaccaggaagtaagtgatcgctgtgctccgggaggatgctggaagaagattccagacgcagcttttttgcctgctatggttaccgttgctatgaaggagggcggccctgctgacccagagccagccctgtctcccgctccactctgacctcacccctgagtccagggctgaacgcacgctcctccgtggcccccgcttccaccccgtgcatgt

SEQ ID NO: 285234 - DNA, 242 bp, Homo sapiens
  chr7:100660682-100660924
  hyper
gctctgcacttacccgcagcccagtgatgcagggtcggaggggtggtcggcagtgggaaagggcgtagggcagatgccgggctgactcttccttttgccagaggaaatcccctctgccccctagtcctccccctaccaaggctcccatcactcatcacggcctctccctacagaccagaatctgagggagagcagattcggccttgagaacgcctacaacaacttccggcccaccctggaga

SEQ ID NO: 285235 - DNA, 233 bp, Homo sapiens; identical to SEQ ID NO: 233093
  chr7:100728513-100728746
  hyper

SEQ ID NO: 285236 - DNA, 191 bp, Homo sapiens; identical to SEQ ID NO: 201078
  chr7:100770300-100770491
  hyper

SEQ ID NO: 285237 - DNA, 37 bp, Homo sapiens; identical to SEQ ID NO: 233095
  chr7:100797581-100797618
  hyper

SEQ ID NO: 285238 - DNA, 1329 bp, Homo sapiens; identical to SEQ ID NO: 201079
  chr7:100806065-100807394
  hyper

SEQ ID NO: 285239 - DNA, 101 bp, Homo sapiens; identical to SEQ ID NO: 201080
  chr7:100808059-100808160
  hyper

SEQ ID NO: 285240 - DNA, 562 bp, Homo sapiens
  chr7:100808502-100809064
  hyper
gagaaaaagctgcgactcccccgtttaccggggacccttaccagggggctccccgctgtgtttgcaacacccccatcgagaggagagagaaccctccctcacgcccacggctggctgccgagggtttgagggacgaacagcggagtatttaccagctggtgtcacgacgcgagaggtggagaggagggtcggggcagggtggggacaggggaagatcgggacgcgtccgcctcggctccgagcggtggccggggtaggagcgacggtcgaggtctggcgtcccgtgggctgggctcagctgggtcggcgcggctccgggcggctagctcgctccggcttcagcacgctggacagcgcccgcgcctccaccgccttataaaggggagcgcgcggggtcacgtgggcgcgccccgccccattgacgtcaatgttcattcatggggaagcgggcggccgcccggaggaggaaggacgcccgacgattggagggtgcctgcctctcccggcctgcgcctgcgcgctggggccttcggctgaaggggtgtgcgctagcggagctccg

SEQ ID NO: 285241 - DNA, 41 bp, Homo sapiens; identical to SEQ ID NO: 233099
  chr7:100809971-100810012
  hyper

SEQ ID NO: 285242 - DNA, 181 bp, Homo sapiens
  chr7:100815471-100815652
  hyper
agctggcacatgacgttgaggccaacgaggcgcggggcctggcgctgcaggtgccacagcagctggctctgcacctgcgcgccgtcgctaccgaaggcgtcgatgttgagatagcgccaagtgccgtcccctccgtgcgggatggggaaggggcgcgtgcacagcgtgagcacgcgcgggc

SEQ ID NO: 285243 - DNA, 103 bp, Homo sapiens
  chr7:100815930-100816033
  hyper
ccctgcggggggcacgagtgagcgcggggagggggggcgcagcagggctggcgagcccggcgcctctcggcaggcatcttcactcccacgttcacgcccacgg

SEQ ID NO: 285244 - DNA, 272 bp, Homo sapiens
  chr7:100816655-100816927
  hyper
cccgggtgctgtctcttgaccagctgcgagcagaagcgctgcagcagcccggccacgcccttcccgcgctcccagggcgccacgcgcagcccctccaccagcaccgtctccccggcgtcgatcacgttcaccgactccagcgcgatctgcggaccgaggccgttagcgcggggccctccccgcctgcgcccctgccagggctgtcggttcactgggctctcctcttcccacacgctgagcactccgcgtcaccacccgggcaccaggccagg

SEQ ID NO: 285245 - DNA, 41 bp, Homo sapiens
  chr7:100823770-100823811
  hyper
actgaggatggtggtgtctcgggttttggtggtggtgatgc

SEQ ID NO: 285246 - DNA, 177 bp, Homo sapiens; identical to SEQ ID NO: 201082
  chr7:100845024-100845201
  hyper

SEQ ID NO: 285247 - DNA, 45 bp, Homo sapiens; identical to SEQ ID NO: 201083
  chr7:100845248-100845293
  hyper

SEQ ID NO: 285248 - DNA, 40 bp, Homo sapiens; identical to SEQ ID NO: 233103
  chr7:100861069-100861109
  hyper

SEQ ID NO: 285249 - DNA, 287 bp, Homo sapiens
  chr7:100951542-100951829
  hyper
gaccctccagggaacgcccttgagtaactcgcgcacttggggcccgtttccacctaggactacaggctcaagatggcctggtagatgcagccggcacgcacctctcctctgacgggaaccgaaggagccggtaggttttcacacttgcagcagatccgctaagagaacgcgggattcagccgagaagccacggggagcccgaggagcggagcagaggcacccaggcagcctgcgcggagaaattggatcggcggggacggcctgcagctcccgcgcgcggggaaagg

SEQ ID NO: 285250 - DNA, 178 bp, Homo sapiens; identical to SEQ ID NO: 201084
  chr7:101006949-101007127
  hyper

SEQ ID NO: 285251 - DNA, 83 bp, Homo sapiens; identical to SEQ ID NO: 233106
  chr7:101268843-101268926
  hyper

SEQ ID NO: 285252 - DNA, 198 bp, Homo sapiens; identical to SEQ ID NO: 201085
  chr7:101447357-101447555
  hyper

SEQ ID NO: 285253 - DNA, 336 bp, Homo sapiens; identical to SEQ ID NO: 201086
  chr7:101457433-101457769
  hyper

SEQ ID NO: 285254 - DNA, 467 bp, Homo sapiens; identical to SEQ ID NO: 201087
  chr7:101458246-101458713
  hyper

SEQ ID NO: 285255 - DNA, 190 bp, Homo sapiens; identical to SEQ ID NO: 201088
  chr7:101459183-101459373
  hyper

SEQ ID NO: 285256 - DNA, 496 bp, Homo sapiens; identical to SEQ ID NO: 223167
  chr7:101460545-101461041
  hyper

SEQ ID NO: 285257 - DNA, 166 bp, Homo sapiens; identical to SEQ ID NO: 201090
  chr7:101499970-101500136
  hyper

SEQ ID NO: 285258 - DNA, 88 bp, Homo sapiens; identical to SEQ ID NO: 233111
  chr7:101500354-101500442
  hyper

SEQ ID NO: 285259 - DNA, 111 bp, Homo sapiens; identical to SEQ ID NO: 201091
  chr7:101559394-101559505
  hyper

SEQ ID NO: 285260 - DNA, 48 bp, Homo sapiens; identical to SEQ ID NO: 201092
  chr7:101671377-101671425
  hyper

SEQ ID NO: 285261 - DNA, 79 bp, Homo sapiens; identical to SEQ ID NO: 201093
  chr7:101713618-101713697
  hyper

SEQ ID NO: 285262 - DNA, 138 bp, Homo sapiens; identical to SEQ ID NO: 201094
  chr7:101740643-101740781
  hyper

SEQ ID NO: 285263 - DNA, 124 bp, Homo sapiens; identical to SEQ ID NO: 201095
  chr7:101747615-101747739
  hyper

SEQ ID NO: 285264 - DNA, 77 bp, Homo sapiens; identical to SEQ ID NO: 201096
  chr7:101754977-101755054
  hyper

SEQ ID NO: 285265 - DNA, 67 bp, Homo sapiens; identical to SEQ ID NO: 201097
  chr7:101758486-101758553
  hyper

SEQ ID NO: 285266 - DNA, 49 bp, Homo sapiens; identical to SEQ ID NO: 201098
  chr7:101801839-101801888
  hyper

SEQ ID NO: 285267 - DNA, 105 bp, Homo sapiens; identical to SEQ ID NO: 201099
  chr7:101813725-101813830
  hyper

SEQ ID NO: 285268 - DNA, 189 bp, Homo sapiens; identical to SEQ ID NO: 201100
  chr7:101821748-101821937
  hyper

SEQ ID NO: 285269 - DNA, 59 bp, Homo sapiens; identical to SEQ ID NO: 201101
  chr7:101833092-101833151
  hyper

SEQ ID NO: 285270 - DNA, 49 bp, Homo sapiens; identical to SEQ ID NO: 201102
  chr7:101837121-101837170
  hyper

SEQ ID NO: 285271 - DNA, 97 bp, Homo sapiens; identical to SEQ ID NO: 201103
  chr7:101838786-101838883
  hyper

SEQ ID NO: 285272 - DNA, 672 bp, Homo sapiens; identical to SEQ ID NO: 201104
  chr7:101839913-101840585
  hyper

SEQ ID NO: 285273 - DNA, 66 bp, Homo sapiens; identical to SEQ ID NO: 201105
  chr7:101842081-101842147
  hyper

SEQ ID NO: 285274 - DNA, 102 bp, Homo sapiens; identical to SEQ ID NO: 201106
  chr7:101843350-101843452
  hyper

SEQ ID NO: 285275 - DNA, 845 bp, Homo sapiens; identical to SEQ ID NO: 201107
  chr7:101844639-101845484
  hyper

SEQ ID NO: 285276 - DNA, 166 bp, Homo sapiens; identical to SEQ ID NO: 201108
  chr7:101847670-101847836
  hyper

SEQ ID NO: 285277 - DNA, 57 bp, Homo sapiens; identical to SEQ ID NO: 201109
  chr7:101848393-101848450
  hyper

SEQ ID NO: 285278 - DNA, 303 bp, Homo sapiens; identical to SEQ ID NO: 201110
  chr7:101870646-101870949
  hyper

SEQ ID NO: 285279 - DNA, 189 bp, Homo sapiens; identical to SEQ ID NO: 201111
  chr7:101877331-101877520
  hyper

SEQ ID NO: 285280 - DNA, 265 bp, Homo sapiens; identical to SEQ ID NO: 201112
  chr7:101882599-101882864
  hyper

SEQ ID NO: 285281 - DNA, 9822 bp, Homo sapiens; identical to SEQ ID NO: 201113
  chr7:101891691-101901513
  hyper

SEQ ID NO: 285282 - DNA, 128 bp, Homo sapiens; identical to SEQ ID NO: 201114
  chr7:101916636-101916764
  hyper

SEQ ID NO: 285283 - DNA, 67 bp, Homo sapiens; identical to SEQ ID NO: 201115
  chr7:101917514-101917581
  hyper

SEQ ID NO: 285284 - DNA, 113 bp, Homo sapiens; identical to SEQ ID NO: 201116
  chr7:101918517-101918630
  hyper

SEQ ID NO: 285285 - DNA, 117 bp, Homo sapiens; identical to SEQ ID NO: 201117
  chr7:101921219-101921336
  hyper

SEQ ID NO: 285286 - DNA, 84 bp, Homo sapiens; identical to SEQ ID NO: 201118
  chr7:101923328-101923412
  hyper

SEQ ID NO: 285287 - DNA, 57 bp, Homo sapiens; identical to SEQ ID NO: 201119
  chr7:101924095-101924152
  hyper

SEQ ID NO: 285288 - DNA, 81 bp, Homo sapiens; identical to SEQ ID NO: 201120
  chr7:101925131-101925212
  hyper

SEQ ID NO: 285289 - DNA, 65 bp, Homo sapiens; identical to SEQ ID NO: 201121
  chr7:101926003-101926068
  hyper

SEQ ID NO: 285290 - DNA, 938 bp, Homo sapiens; identical to SEQ ID NO: 201122
  chr7:101926312-101927250
  hyper

SEQ ID NO: 285291 - DNA, 346 bp, Homo sapiens; identical to SEQ ID NO: 233112
  chr7:102104793-102105139
  hyper

SEQ ID NO: 285292 - DNA, 230 bp, Homo sapiens; identical to SEQ ID NO: 233113
  chr7:102389177-102389407
  hyper

SEQ ID NO: 285293 - DNA, 142 bp, Homo sapiens; identical to SEQ ID NO: 233114
  chr7:102789382-102789524
  hyper

SEQ ID NO: 285294 - DNA, 544 bp, Homo sapiens
  chr7:102920838-102921382
  hyper
agcacccccgcctccgcgcttccccgagcgtgcagcttccggtgagggcagccccacgcacagccccccacaccctccccagcgcctgcagacttcggtgcgcgcagttcctaagcccacatgcgcagttctcaccttgcgcgcagcctcacgtacagcccccgacaggctcccagccccactggcgcagaacccatcaccgcttgcccttcacgcgcttcattgggagtgcagcccccaccccgagcgcacagctccacgcagcctctccacactctccccagcgcctgcagcacccgcagtgcgcacagctccgccagtagcttccccgcgcgccgcccctgcaccgcttcgggccataaccttgctggcgactaagtctgaagaacttcccgtggtttcattcttttcttcgcgtttagtcttagctctgacattttaaccaaaaggttacacgttaattaacgaggtattgaaggggaagatctcagctgaaagaaatgactgtaggaagtgtgtcagggaagccaacggaaccgccggc

SEQ ID NO: 285295 - DNA, 52 bp, Homo sapiens
  chr7:102937735-102937787
  hyper
atttggtaaagaccgctcagcatcatggtcgggccctgattgctttcacaac

SEQ ID NO: 285296 - DNA, 87 bp, Homo sapiens; identical to SEQ ID NO: 233116
  chr7:102985260-102985347
  hyper

SEQ ID NO: 285297 - DNA, 81 bp, Homo sapiens
  chr7:103085750-103085831
  hyper
gcccggcccaggtgcgcactagatgaggcagtcaaccaagtcaattggttcccgatcaactaaatctctcctaaaaataaa

SEQ ID NO: 285298 - DNA, 197 bp, Homo sapiens
  chr7:103086734-103086931
  hyper
tgggacgccggggcgcgggcatccctgccgcctacggatctcttcccaagcacctagaactttccaaagcgtgcttggaatttaacaccttggtcgtcgatccccgcaaatatactctgatgagaccggctttcttcccataccgcccaggagtttctccaggtggcattcctgtcgccttgaggtggaacatcagt

SEQ ID NO: 285299 - DNA, 86 bp, Homo sapiens; identical to SEQ ID NO: 233119
  chr7:103087709-103087795
  hyper

SEQ ID NO: 285300 - DNA, 101 bp, Homo sapiens; identical to SEQ ID NO: 201125
  chr7:103631018-103631119
  hyper

SEQ ID NO: 285301 - DNA, 38 bp, Homo sapiens; identical to SEQ ID NO: 233124
  chr7:104652243-104652281
  hyper

SEQ ID NO: 285302 - DNA, 37 bp, Homo sapiens; identical to SEQ ID NO: 233125
  chr7:104652581-104652618
  hyper

SEQ ID NO: 285303 - DNA, 278 bp, Homo sapiens; identical to SEQ ID NO: 233126
  chr7:104654732-104655010
  hyper

SEQ ID NO: 285304 - DNA, 165 bp, Homo sapiens; identical to SEQ ID NO: 201126
  chr7:105162864-105163029
  hyper

SEQ ID NO: 285305 - DNA, 195 bp, Homo sapiens; identical to SEQ ID NO: 233128
  chr7:105221811-105222006
  hyper

SEQ ID NO: 285306 - DNA, 137 bp, Homo sapiens; identical to SEQ ID NO: 201127
  chr7:105331662-105331799
  hyper

SEQ ID NO: 285307 - DNA, 626 bp, Homo sapiens; identical to SEQ ID NO: 233130
  chr7:105332030-105332656
  hyper

SEQ ID NO: 285308 - DNA, 189 bp, Homo sapiens; identical to SEQ ID NO: 201128
  chr7:105516545-105516734
  hyper

SEQ ID NO: 285309 - DNA, 241 bp, Homo sapiens
  chr7:105517690-105517931
  hyper
ttctgaaacgcaggtgagtttggagcgctacgagctaccttcccatctcaggctgcggggcgtgcaaaactcaaaagttagggcccccggacccccgggttccccgcgcggtgcgtatctccggctctcagagaaccactgcatggactttgctccagggtcagcagagcgggagggcgaatttacggctcttggaagacgacgctaacgggcctagcccctgagccgtttccagcgctcc

SEQ ID NO: 285310 - DNA, 39 bp, Homo sapiens; identical to SEQ ID NO: 233132
  chr7:106239344-106239383
  hyper

SEQ ID NO: 285311 - DNA, 411 bp, Homo sapiens; identical to SEQ ID NO: 201129
  chr7:106508245-106508656
  hyper

SEQ ID NO: 285312 - DNA, 32 bp, Homo sapiens; identical to SEQ ID NO: 201130
  chr7:106684800-106684832
  hyper

SEQ ID NO: 285313 - DNA, 251 bp, Homo sapiens; identical to SEQ ID NO: 201131
  chr7:106684920-106685171
  hyper

SEQ ID NO: 285314 - DNA, 242 bp, Homo sapiens; identical to SEQ ID NO: 201132
  chr7:106685920-106686162
  hyper

SEQ ID NO: 285315 - DNA, 197 bp, Homo sapiens; identical to SEQ ID NO: 201133
  chr7:106808942-106809139
  hyper

SEQ ID NO: 285316 - DNA, 272 bp, Homo sapiens; identical to SEQ ID NO: 233135
  chr7:107220331-107220603
  hyper

SEQ ID NO: 285317 - DNA, 186 bp, Homo sapiens; identical to SEQ ID NO: 201134
  chr7:107302345-107302531
  hyper

SEQ ID NO: 285318 - DNA, 94 bp, Homo sapiens; identical to SEQ ID NO: 233137
  chr7:107383748-107383842
  hyper

SEQ ID NO: 285319 - DNA, 182 bp, Homo sapiens; identical to SEQ ID NO: 233138
  chr7:107384544-107384726
  hyper

SEQ ID NO: 285320 - DNA, 322 bp, Homo sapiens; identical to SEQ ID NO: 201135
  chr7:107531675-107531997
  hyper

SEQ ID NO: 285321 - DNA, 688 bp, Homo sapiens
  chr7:107641951-107642639
  hyper
tggacgggaggaggcgctagcagagcctcgaaccccgctctcagccctcacctgcaagtggctgacgatacagtagggttcgggcttgtgcagcccgcacgtcgaggtcaccgaaagcttctgtgctcggccgatgagaaggtcgcccgtggcgggatagcagctgccttctgcgcagccgtagctgaactcgggttcctgagcgcgcactcgggctctgcacagggctgcgggaaggacaggcaacagagttggggggacacaagcagggagtggagcccgaaaaaaacgaacaagcgggggcgggggagtgggtgcggagagaggacagtccattcggaagaaagcaaaatgcacagaaaagacaatggagagatgagcgcaggagaggctgggaaggcagggactccgaaaggagaaggacacggaaagaaacccacacacgtcatcaggtctgtccagcagcgagagcctccctcccgggaaacccaccgacgctcgcgcccaccctgatcagccccggggagcagctcccccaacaaagggtggatgtgtagaccctccacttcgacgtgtccggagcccggcgcagggaggctgacccccaaagggccacacacccacgcacgtgaacccgcgtgcacgcggcagcccgcgcatcctcggtgtgagtgtgcgcgtggagatc

SEQ ID NO: 285322 - DNA, 342 bp, Homo sapiens
  chr7:107642728-107643070
  hyper
acgccgctttccggagctaggggagcccatggacagtccctggggctctggagtggtttcaaggcttctccattccagggaagcgccaggtcctgctgtttctggtgccatccggagacaaacagagatggttaattaaagccacatggcccccatctgttcccagaatgaagcctccgctcagctcaggcactctcctgggcaatggatttttggagagccctcctcggtcagcaccgccaaccccagggaacctgccctctgcggtggggaaacccagggtgaaccggccgagggtgcaaaaccctgagcgggggccgcgggaggccgcaggggccgggg

SEQ ID NO: 285323 - DNA, 539 bp, Homo sapiens
  chr7:107643183-107643722
  hyper
gtccctctcccaagcccccaggatcccacgaaggtgagcaagcagcttttgggttttccttccccatgcccaagtccgtccgcctccccgcaccgtttccacggaattacctaagaaactgaaagctagcaactggagaagccccatgccggctccctgcagccacggggacgcggcagaggagtggagaagacgcccgccgagccgcctgccctttcttcccgtcttcctttctggagaggtggaaaggaggggaaaaaaggcaaatgttcaaagagagaagaggcgcccttccatttcctgtcgctcccacggaagcggggggtgggctggaaagtggggaaaatcgtgcagccactttgttctcctcacccggcgacgcgagctctcgccctgctccgggagcccccgagcccaaagaagggaattagaaagtttagccttgggaggaacagagggaggcgcctctgctcatgcgcatacggagagccggggctgaaggggcgggcggccgcaactctgcgaggaccgggtgaggt

SEQ ID NO: 285324 - DNA, 76 bp, Homo sapiens; identical to SEQ ID NO: 201138
  chr7:107643995-107644071
  hyper

SEQ ID NO: 285325 - DNA, 43 bp, Homo sapiens; identical to SEQ ID NO: 201139
  chr7:108095229-108095272
  hyper

SEQ ID NO: 285326 - DNA, 87 bp, Homo sapiens
  chr7:108210024-108210111
  hyper
ggcccctggagaccggggccggcgacggatgcagggcggccctcctcactgaggatgcgccacaggtccaggcctctcgagcccctg

SEQ ID NO: 285327 - DNA, 58 bp, Homo sapiens; identical to SEQ ID NO: 115518
  chr7:108210172-108210230
  hyper

SEQ ID NO: 285328 - DNA, 45 bp, Homo sapiens; identical to SEQ ID NO: 233144
  chr7:111202652-111202697
  hyper

SEQ ID NO: 285329 - DNA, 211 bp, Homo sapiens
  chr7:111844265-111844476
  hyper
gcaagagaggaactaatcgataccagcaccccagctgtgacctggcacatgaagaaatcaagaaaataaatcccatccataatctgtataatttaacacttggaagaaagcaacatctgggatcgactccaagcaggacagttttgcctggatggatctgagcttcctgcactgagtgttaaagccgcttaggaggcgatgccctcgggtc

SEQ ID NO: 285330 - DNA, 66 bp, Homo sapiens; identical to SEQ ID NO: 233146
  chr7:111846864-111846930
  hyper

SEQ ID NO: 285331 - DNA, 57 bp, Homo sapiens; identical to SEQ ID NO: 233147
  chr7:112090452-112090509
  hyper

SEQ ID NO: 285332 - DNA, 182 bp, Homo sapiens; identical to SEQ ID NO: 201140
  chr7:112430003-112430185
  hyper

SEQ ID NO: 285333 - DNA, 142 bp, Homo sapiens; identical to SEQ ID NO: 201141
  chr7:112430224-112430366
  hyper

SEQ ID NO: 285334 - DNA, 45 bp, Homo sapiens; identical to SEQ ID NO: 44610
  chr7:112430590-112430635
  hyper

SEQ ID NO: 285335 - DNA, 253 bp, Homo sapiens; identical to SEQ ID NO: 233149
  chr7:112579978-112580231
  hyper

SEQ ID NO: 285336 - DNA, 239 bp, Homo sapiens; identical to SEQ ID NO: 201143
  chr7:112726614-112726853
  hyper

SEQ ID NO: 285337 - DNA, 154 bp, Homo sapiens; identical to SEQ ID NO: 201144
  chr7:113724592-113724746
  hyper

SEQ ID NO: 285338 - DNA, 229 bp, Homo sapiens; identical to SEQ ID NO: 201145
  chr7:113725472-113725701
  hyper

SEQ ID NO: 285339 - DNA, 229 bp, Homo sapiens; identical to SEQ ID NO: 201146
  chr7:113725858-113726087
  hyper

SEQ ID NO: 285340 - DNA, 482 bp, Homo sapiens
  chr7:113726887-113727369
  hyper
cacttgttgttctctttcattttgctttgtgatgggggaaaaaggggtggagaggggagatttgctgttggctcacggatgatttttagtttggataatgcaaaatgttgcttcgtccggagagacctcggctggaggagaatgtgtgtcgaaacaccagatgtgtgtttgtttactctcttctttttaattgtttgttgtcttttccccttcctccccgcacccccacccccaacctcgggaggagaaacaacagtaaaaacatctggcggttagaagcacacactttattgatccaactgctgacctttatttactcagttgggcaagtgcacgcttctcgcgtctaagttgggcacttcagcgttcatctcagaagtacttctccaggaaggagagagatggaaaggggacactcctgtttctggagtcaagaaactcctgggccctactgacgcttcgggataaccgtgcacagggat

SEQ ID NO: 285341 - DNA, 116 bp, Homo sapiens; identical to SEQ ID NO: 201149
  chr7:115117319-115117435
  hyper

SEQ ID NO: 285342 - DNA, 41 bp, Homo sapiens; identical to SEQ ID NO: 201150
  chr7:115850424-115850465
  hyper

SEQ ID NO: 285343 - DNA, 81 bp, Homo sapiens
  chr7:116139783-116139864
  hyper
cgggagccgcaccgcgccagccgggctgcagcggccgcgcaccaaggctgcgatggggctggagacggagaaggcggacgt

SEQ ID NO: 285344 - DNA, 61 bp, Homo sapiens; identical to SEQ ID NO: 201151
  chr7:116140191-116140252
  hyper

SEQ ID NO: 285345 - DNA, 163 bp, Homo sapiens; identical to SEQ ID NO: 201152
  chr7:116164619-116164782
  hyper

SEQ ID NO: 285346 - DNA, 387 bp, Homo sapiens
  chr7:116166325-116166712
  hyper
ggggaggcaggcgcgccctgcagagtacagaggggtgtggtgtcctctgcgagatcctcttaaaaagctggctacgcgcaggcggtttctgtgcacggagccgtagctgtcggagcggttagttcgatttcgagctcgaggtttcccccgccgccaggctgacttctcatcgcttgtttttctttttgcatttttcctcccaccgccgttgccgccctccccgtcctggccgtccgccctccgccctctgcagggacatctctacaccgttcccatccgggaacagggcaacatctacaagcccaacaacaaggccatggcagacgagctgagcgagaagcaagtgtacgacgcgcacaccaaggagatcgacctggtcaaccgcga

SEQ ID NO: 285347 - DNA, 77 bp, Homo sapiens; identical to SEQ ID NO: 233160
  chr7:116503304-116503381
  hyper

SEQ ID NO: 285348 - DNA, 302 bp, Homo sapiens; identical to SEQ ID NO: 201154
  chr7:116592940-116593242
  hyper

SEQ ID NO: 285349 - DNA, 100 bp, Homo sapiens; identical to SEQ ID NO: 115556
  chr7:116593274-116593374
  hyper

SEQ ID NO: 285350 - DNA, 226 bp, Homo sapiens; identical to SEQ ID NO: 233162
  chr7:116594407-116594633
  hyper

SEQ ID NO: 285351 - DNA, 118 bp, Homo sapiens; identical to SEQ ID NO: 233163
  chr7:116759580-116759698
  hyper

SEQ ID NO: 285352 - DNA, 258 bp, Homo sapiens
  chr7:117513178-117513436
  hyper
ggatccccagccagggtggccgctccgctcccccccgcggcctccgccgtgtgggcatcccgaggaaggggggccccgatgaaggggcaccggagagtcccgggcttacggaacgccccgggggtgcgaagtcgggtccggctgggaccccggcgccgcccccggcccgcgtctacactagccccgcgcccgccccgggaactcggttaccgccgcctccgccgcggcccccgccgcgtcctccggggcccgggacaa

SEQ ID NO: 285353 - DNA, 204 bp, Homo sapiens
  chr7:117513471-117513675
  hyper
tcctgctctagcggatccgaatgcgagctcggagccgcggctccggactcagccgtctccgcgcgggcggcacttaacccgctgctgtccgggacgcgggcgcctggagccgggagccgggagccgcggcactccctccgcccctcgccaccgccctcgccgcttaacccgctgcgcgccggagcgccccgcctcggtcccgcc

SEQ ID NO: 285354 - DNA, 183 bp, Homo sapiens
  chr7:117513849-117514032
  hyper
aagccggagaaatccgtgcacagaccagattaaatgtcaggcctcctgaatctgaattctctgaaagatcagggaaaatcctacacttcagctccctctatcccaccgcgaggaatcacacagggcacccctttcttcttaaattgctctttcttaaatttcattgccgccagggtgttttta

SEQ ID NO: 285355 - DNA, 569 bp, Homo sapiens; identical to SEQ ID NO: 201155
  chr7:119912399-119912968
  hyper

SEQ ID NO: 285356 - DNA, 118 bp, Homo sapiens; identical to SEQ ID NO: 201156
  chr7:119913785-119913903
  hyper

SEQ ID NO: 285357 - DNA, 762 bp, Homo sapiens
  chr7:120496812-120497574
  hyper
gccattgtgagccccgtaagggagaagccccatcctttcaccacatcctactcccaagggcaaaacggcagcgatctgcagggggcgggggagagagaacacgggacatctcaccatcacgcttcccacagcctgcccgtccctcctccacccgccctcagcagggtccagagggtcccgaggcccagtgcattcgagacatcgcctcatcaaaaatcatttgttaaaatcataatggtaactaaactcccaaaagttccaaaccggcttcagataacacctgctgggaaaagaaaagagcaactatccggatgaatgaagtcgcacagtaaactcgcgttctcaggggacacgcggcggagccctgtgcattctgatgagacgctcttgaaaacctccctcactccacgcccctcctcgaggacagctgtgctcggcactgtcctgaaggtgagaaaccacactgccccctaccccggacacgtcagaggcgccaccggcaagcccgagagaatgagcgcccttctagttaggacagttcctgggcactccaactccgcacccctctaccccgtcccgcagctcgggtgtgaatgcaagggactggggcggcggggcgggggcgggggcgggggcgagggggcagcgcggagttgagattccgcccggctactagggtttctctgggagaacgtgagaaatgatgttttcggccccagaatgatggattagcctgggacagtgggcggggggcggggggcg

SEQ ID NO: 285358 - DNA, 548 bp, Homo sapiens; identical to SEQ ID NO: 201158
  chr7:120497836-120498384
  hyper

SEQ ID NO: 285359 - DNA, 140 bp, Homo sapiens; identical to SEQ ID NO: 233171
  chr7:120627988-120628128
  hyper

SEQ ID NO: 285360 - DNA, 532 bp, Homo sapiens; identical to SEQ ID NO: 201159
  chr7:120628558-120629090
  hyper

SEQ ID NO: 285361 - DNA, 273 bp, Homo sapiens
  chr7:120969353-120969626
  hyper
gggcggcgctcctgggactggcccgcttgtgcgcgctgtgggcagccctgctcgtgctgttcccctacggagcccaaggaaactggatgtgagtatggaggtggcagggaagcatcgggtaggtggcaaaaggggtgcccaatcctagggaactttcaactgaggctgggggagaagggcggggacccttagacgagtgacctaatttttcggaaaacatctggaattggggagcggcttaacgctacgggcggccgtgtcttacaggtggtt

SEQ ID NO: 285362 - DNA, 48 bp, Homo sapiens; identical to SEQ ID NO: 5836
  chr7:120970733-120970781
  hyper

SEQ ID NO: 285363 - DNA, 89 bp, Homo sapiens; identical to SEQ ID NO: 233174
  chr7:121036655-121036744
  hyper

SEQ ID NO: 285364 - DNA, 428 bp, Homo sapiens; identical to SEQ ID NO: 201161
  chr7:121512905-121513333
  hyper

SEQ ID NO: 285365 - DNA, 130 bp, Homo sapiens; identical to SEQ ID NO: 201162
  chr7:121513393-121513523
  hyper

SEQ ID NO: 285366 - DNA, 154 bp, Homo sapiens
  chr7:121783354-121783508
  hyper
ttcattctctctcgcgctcgagcgctctttctctctctctcttccgctccccccacccccattcccctgaaatcaatgtctgaaaagcacatttcttcttctgaagctgtcaggatagacagacattcagccccattcaaccgaggagggtggg

SEQ ID NO: 285367 - DNA, 89 bp, Homo sapiens
  chr7:121784282-121784371
  hyper
tccgaattcctagaagaaactgggatggaaggccgggaagtaggaggtgtttgctcaacttctgaggacgtcacgcctctgcctcccgt

SEQ ID NO: 285368 - DNA, 130 bp, Homo sapiens; identical to SEQ ID NO: 201163
  chr7:121863466-121863596
  hyper

SEQ ID NO: 285369 - DNA, 133 bp, Homo sapiens
  chr7:121942391-121942524
  hyper
tgtggtttttgtaattccctgaaacacacaaatgacaggaatatggttctgaaaaaaaaaatagcttaaaaagggaggagcagacacgtggaaggtagcgccaggcaagcagaagagccgccacaggtcccac

SEQ ID NO: 285370 - DNA, 67 bp, Homo sapiens; identical to SEQ ID NO: 233180
  chr7:121943301-121943368
  hyper

SEQ ID NO: 285371 - DNA, 229 bp, Homo sapiens
  chr7:121944392-121944621
  hyper
aatggagaaagccaagggtttggacgtgctcatcatgttgccccgagctggagcagtcgctaacattttggtagtcgcgttgtggcagctactgtccatgtctgagtcgccagcgtccgtcagccggggctgggttgcgccgtccgttgccttgttccctgcttgtcacagacctgcggagagggggacgggcaccatcaccaccagtagcctcctcctcctcctcctc

SEQ ID NO: 285372 - DNA, 278 bp, Homo sapiens
  chr7:121944651-121944929
  hyper
agcccaatggactcctgccagcccatcgcagagttcttggcgcaccaatgactcggggacaatcactacttatttctatcaatagaaagtgttgtgtcaataacgcagccaagatctcgccaatcgttaacttccaagaggagaaggtaaactagataattgctcaattcgcttccaacagtcaacaggaaaacttttttttttttcatctgcagtcagtaactacttttcattggtgagtgaggttccccgcccagaaaaggcgggggcgctttcac

SEQ ID NO: 285373 - DNA, 477 bp, Homo sapiens
  chr7:121945134-121945611
  hyper
ctaaataaggaaacggagtctaattcaggggcaaacgccaggctatatttatcaaacgccaagctccagaaagcctcggctaggaagcctcggcagtgaaatccgaggtttcgctgcttggttccactgggcctgggtgggccgggctgggccgggctgggccgggtcagatctgtgccacctccgcagacctatttcttcctccagggctcggggttgcccgctcccggaatcccggagtctccgcggcccgaaccgagtctggaccatttagaagacgccggcaggtaactggcctccccaaacgccccgaaaattaaaagccttaggaggcttgttctgtgtttgtggttttgtaaaggcaatgcccgcggcaataggcctgggaaagtcgcactttcatccacaaagttgaggagttgcaaggaataattgggtgtcacaccacaagcaaccttgactcgatcggaccccacc

SEQ ID NO: 285374 - DNA, 226 bp, Homo sapiens; identical to SEQ ID NO: 201166
  chr7:121946146-121946372
  hyper

SEQ ID NO: 285375 - DNA, 326 bp, Homo sapiens
  chr7:121954944-121955270
  hyper
agggagataaaagacgtcatcgtattgagtcactgggtctaggactcagaagctgccgctggctactttaaaaaaatgactggggggagaccaccagtcgggttaaacaagtggctccagtcccagcttaatgccaggcacggtctcttcccctttccagagtgctcagtttctacctccccaaggccacagagtgctagacccccagaccgccagggcgcgcgtctcccatgccaccgacgtgctgggttgtgaccctggggcgcacccttgccccaccctgtgccgccgcgttgctcaagtgttcctgggagcctagaagtact

SEQ ID NO: 285376 - DNA, 60 bp, Homo sapiens
  chr7:121955315-121955375
  hyper
aagcgcttgtgcgctctctctctctctctctctctctctctctctctctctctctctcgt

SEQ ID NO: 285377 - DNA, 75 bp, Homo sapiens
  chr7:121955840-121955915
  hyper
ttctagcaagttcacagacacgccaggggctaggctgaagatcctcagagctgcgtgtgatccaaaaggaccctg

SEQ ID NO: 285378 - DNA, 154 bp, Homo sapiens
  chr7:121956304-121956458
  hyper
acatgctcgcactccggtgactactccctgaaagccaatgagcggttgaccctctggtgacatctggaacccaggttcagagtttcgctctcgcctctactcccttaatattttactcaatgtcacagaggagaacagcttaaggcagccctgc

SEQ ID NO: 285379 - DNA, 1087 bp, Homo sapiens
  chr7:122525746-122526833
  hyper
tccggccagagctgcgcctgccgggtgcaaccgcggcgcggccggcgctgtcggtctctgtctcacggatggtgagctgacagctcctgccagcccaggcggggaggaggagaagaggtgtccgctgcagccgcatacccggcgggtgaaagcaccgtcttgtccccaaagattcctctgccctcagagactaacaaaaatacggtgtcctgcgtttcgcagaaggacgggaggcgtcccagagctctcccgggagaaaaacccagggagaagtggtggtaggaggcgcccggtcccgcaactcaccttctgctgcctccgggccatgtcggtgggctgcttggcgttgaaggggtacgcgatgcacctcacgacgaagacgtagagctgcaggcggatcctccgctcctgctcatcgtccagctgccgctggggctcgtctcgcccctcgctgagcacagaggggctcgggctcacagatctggccgcgccgccgccgcccgcgcgccccggcgcgtcccgccgcccttcccgagtcggggctggaggagctcgctgcgagctgccggctgccaccagcacatcgcggctttcctcttccagcccctcgtccgactcctcttcgctggaagacgggtccagcatggtgctcggggatccccgccgctcggcccgcggtccccaagcgcctcacccccggcggctgcgcccgcgggtctgagggagccgcggggctggctgcagcggccgcagaacgaaaggaaaactggccagggctttccggacacgtcgagttagattcaggagtgtttcctaccaccagggcgaaaggggcgggcaggagccgggaggaggattgggaggggggagagggggagccgccgggactgaataggcggagttagcgttgggggtgagcttgggcgcctcaggaattgctccgccagccccgggcgcgccgacccagcggttccccagagcccgccggcagaggcggagccgcccgagcgcccggacgcaggtggggaacctgtggcgcctacaacaagcaacacgtggaattgaatgttgaagagccgcgcggggc

SEQ ID NO: 285380 - DNA, 280 bp, Homo sapiens; identical to SEQ ID NO: 201168
  chr7:122526873-122527153
  hyper

SEQ ID NO: 285381 - DNA, 116 bp, Homo sapiens; identical to SEQ ID NO: 201169
  chr7:122527423-122527539
  hyper

SEQ ID NO: 285382 - DNA, 157 bp, Homo sapiens; identical to SEQ ID NO: 201170
  chr7:123174506-123174663
  hyper

SEQ ID NO: 285383 - DNA, 203 bp, Homo sapiens; identical to SEQ ID NO: 201171
  chr7:123673023-123673226
  hyper

SEQ ID NO: 285384 - DNA, 299 bp, Homo sapiens; identical to SEQ ID NO: 201172
  chr7:123673383-123673682
  hyper

SEQ ID NO: 285385 - DNA, 52 bp, Homo sapiens
  chr7:124404309-124404361
  hyper
tgctgtttccccggcggggacccccaggctcatggattccttcacccaagga

SEQ ID NO: 285386 - DNA, 46 bp, Homo sapiens; identical to SEQ ID NO: 201173
  chr7:124405510-124405556
  hyper

SEQ ID NO: 285387 - DNA, 219 bp, Homo sapiens
  chr7:124406227-124406446
  hyper
aggtccccgagcccgggctaggggcgggtgcggggcgggagtggggggtgggggtgggaacgggaatatgagagcggtcgggggagggaagagaggagggtagcaggggagtgagcagcagggtcccctccaatctgttgcggctgatgcgcatgcccaggtctcagctctggggggcgaggggcggggcgggggaggggcggacgggggttgggccgc

SEQ ID NO: 285388 - DNA, 163 bp, Homo sapiens; identical to SEQ ID NO: 233194
  chr7:124570033-124570196
  hyper

SEQ ID NO: 285389 - DNA, 71 bp, Homo sapiens; identical to SEQ ID NO: 201175
  chr7:126891135-126891206
  hyper

SEQ ID NO: 285390 - DNA, 204 bp, Homo sapiens; identical to SEQ ID NO: 201176
  chr7:126893238-126893442
  hyper

SEQ ID NO: 285391 - DNA, 587 bp, Homo sapiens
  chr7:126893489-126894076
  hyper
cgcggggaggcgcgacgcccgcccgagcacagcgggcagcacccgcgagcccgggtccccggtgaacacagctccagaaagcgtcaccgagaataacacatggtagatgacaagtgtcccgccacatgctttcttttcgggaatgcttaaagtagagccggcaagccgcgcggttcccttgcaaagtttgcctggcgccgcgcggcggttccgccatttgtcccgccccgcggctctggcgattgtctccccactccccgcccccgagggtctgagggacgcgtgcaacagagtccccagggctcgaggtaccacacagcgcggtccgctgcgggcactgcgcaggaaggggcatgggtggctaccgggacggtcattttattgagatgattcaaggagccgcagacgcggggcaggaaactccgggggagccgtgctcgggttctgcagggaaacctcgggattcccttcgcatgccgcatgcggaaacctgccgggctcgacgtgcacagtccagcgctcctccccactagttactgcccaggccccccgatcctgcacccgccggaatgagagaaagtagcccc

SEQ ID NO: 285392 - DNA, 79 bp, Homo sapiens
  chr7:126894197-126894276
  hyper
ggggcgcggggggagagggggcagcccaggagataaggaggatggagaaggacgggagagaccccgaaaaggcaagctc

SEQ ID NO: 285393 - DNA, 37 bp, Homo sapiens
  chr7:126988120-126988157
  hyper
ggtccccagggaggaaagacaaagatatgcgggttag

SEQ ID NO: 285394 - DNA, 77 bp, Homo sapiens
  chr7:126988206-126988283
  hyper
cccacgggcagtgcggtgccactttcgcccaacagggtgccaagagagaaaactgcggtggtcataggaaaacagat

SEQ ID NO: 285395 - DNA, 115 bp, Homo sapiens; identical to SEQ ID NO: 233199
  chr7:127032409-127032524
  hyper

SEQ ID NO: 285396 - DNA, 258 bp, Homo sapiens; identical to SEQ ID NO: 233200
  chr7:127033347-127033605
  hyper

SEQ ID NO: 285397 - DNA, 109 bp, Homo sapiens; identical to SEQ ID NO: 233201
  chr7:127228128-127228237
  hyper

SEQ ID NO: 285398 - DNA, 183 bp, Homo sapiens; identical to SEQ ID NO: 233202
  chr7:127228671-127228854
  hyper

SEQ ID NO: 285399 - DNA, 292 bp, Homo sapiens; identical to SEQ ID NO: 233203
  chr7:127291485-127291777
  hyper

SEQ ID NO: 285400 - DNA, 208 bp, Homo sapiens
  chr7:127671450-127671658
  hyper
ggcgtcggccgctccgggccggcggcagctgattgcggtcgtgagctcgcggagcggcgagagttaagaggaggtgttcgcggcgccttcgccctccccagacacacaccccctttctcctcgcctcttctcggagggtggaagagacaaaaacggggggtcagttctccagtccgccggctgccggcacgcggggcggcgctccgtc

SEQ ID NO: 285401 - DNA, 653 bp, Homo sapiens
  chr7:127775616-127776269
  hyper
tgccccccacccccgtttccacctcccgcctgcaccgccgggagctccggaggagttcccggggacctagaaacagcggcgagagcgtgagaggggaagagctgggggtccgggccaaaaggaggatggaggggctaggcttctagagcgtgggaaggggtcccagggaccgagccaagtggaaggcttgtccaggcccccgcctgctcccctggatctggagggagcctccacgtgcttccggctggggcggcaccgcgcagtgccgggagcgcccacgagggggcgcgcgagctcggcggcggcggcggcgccccagcgggagcgggaggccgcggggcacaaagagtggcggggcggaccctggggcgcccgggttccctgtcccgtgggtccccagcaaaccgcagcggtaggagaggtgggctttgcctctgaagcacagcaggcccttaacaagttttcacggactgaatgcgtgagctatgtaagccctgccgcatcgcgacgttagaggtttcccaagttacgcccccgcaggcgctctgatgctgacatattaaaagaagcccggaggaagagggcgacgcacgcgggtggctttaggccgcctatttggggaataaatgacagaaggggcgtggtggggtggg

SEQ ID NO: 285402 - DNA, 45 bp, Homo sapiens
  chr7:127776410-127776455
  hyper
gacttggtcagagaaaacgtgagacggcgccggggcagggaccct

SEQ ID NO: 285403 - DNA, 315 bp, Homo sapiens; identical to SEQ ID NO: 201178
  chr7:127807163-127807478
  hyper

SEQ ID NO: 285404 - DNA, 36 bp, Homo sapiens; identical to SEQ ID NO: 201179
  chr7:127841850-127841886
  hyper

SEQ ID NO: 285405 - DNA, 54 bp, Homo sapiens
  chr7:127991607-127991661
  hyper
cgatggcgctccccaggggctccttgtctgggggcccagtgacccagcctcccg

SEQ ID NO: 285406 - DNA, 251 bp, Homo sapiens; identical to SEQ ID NO: 233209
  chr7:128001888-128002139
  hyper

SEQ ID NO: 285407 - DNA, 120 bp, Homo sapiens; identical to SEQ ID NO: 201180
  chr7:128049871-128049991
  hyper

SEQ ID NO: 285408 - DNA, 143 bp, Homo sapiens; identical to SEQ ID NO: 233213
  chr7:128379663-128379806
  hyper

SEQ ID NO: 285409 - DNA, 262 bp, Homo sapiens; identical to SEQ ID NO: 233216
  chr7:128502879-128503141
  hyper

SEQ ID NO: 285410 - DNA, 112 bp, Homo sapiens
  chr7:128509598-128509710
  hyper
aggcggcagtcagcgtccggccgcccctcggtgccccgcccgctccaggcaggccccgatcccggcgtggggacacacccggagccgctgctgctcacggtcccgccggcgg

SEQ ID NO: 285411 - DNA, 96 bp, Homo sapiens
  chr7:128509982-128510078
  hyper
cccgaggagcccctgctgcccggatacctcggcgcgcagggtcgctggcatctcggctccggctccgcgacctgggagccgccgccgggccggggg

SEQ ID NO: 285412 - DNA, 55 bp, Homo sapiens; identical to SEQ ID NO: 201181
  chr7:128579008-128579063
  hyper

SEQ ID NO: 285413 - DNA, 318 bp, Homo sapiens; identical to SEQ ID NO: 233218
  chr7:128695028-128695346
  hyper

SEQ ID NO: 285414 - DNA, 52 bp, Homo sapiens; identical to SEQ ID NO: 201182
  chr7:128784405-128784457
  hyper

SEQ ID NO: 285415 - DNA, 248 bp, Homo sapiens; identical to SEQ ID NO: 233220
  chr7:128784698-128784946
  hyper

SEQ ID NO: 285416 - DNA, 264 bp, Homo sapiens
  chr7:128828640-128828904
  hyper
gcggggcggggaggtggctttaatggtgggagagggaatggggctggggattgggggcccaggggtctcctagggctgaagacaacttggattgcgaggctagggcttggggagtcgtgcatcccgttccgggcctccgcagcccaacatgggccccgggttccaaagtttgcgaagttgggcgccgaggggccggggcgcgcggagcgtccgggggggcccgggcccggattctctgggcgcacaggtcgcctgagccgcctc

SEQ ID NO: 285417 - DNA, 399 bp, Homo sapiens; identical to SEQ ID NO: 44729
  chr7:129418755-129419154
  hyper

SEQ ID NO: 285418 - DNA, 101 bp, Homo sapiens; identical to SEQ ID NO: 201184
  chr7:129421183-129421284
  hyper

SEQ ID NO: 285419 - DNA, 281 bp, Homo sapiens; identical to SEQ ID NO: 201185
  chr7:129421349-129421630
  hyper

SEQ ID NO: 285420 - DNA, 183 bp, Homo sapiens
  chr7:129424364-129424547
  hyper
ataaaataagcattcgggatgctgaagcctgcaggagttgaatcagagggcgagctgcagagcggaggcactggggcggcgggccttgcccgggctcttggctcccatgaatcctcgatgagtagagaatcgtcgctcggagcaaaggcgagaggagagagaagcgtgcgggtgcggcccttg

SEQ ID NO: 285421 - DNA, 119 bp, Homo sapiens; identical to SEQ ID NO: 233227
  chr7:129709789-129709908
  hyper

SEQ ID NO: 285422 - DNA, 90 bp, Homo sapiens; identical to SEQ ID NO: 233228
  chr7:129710295-129710385
  hyper

SEQ ID NO: 285423 - DNA, 114 bp, Homo sapiens; identical to SEQ ID NO: 233229
  chr7:129845324-129845438
  hyper

SEQ ID NO: 285424 - DNA, 234 bp, Homo sapiens
  chr7:129913008-129913242
  hyper
gtgctcaaggtacacggtgcagggacggttcttcctctcgatgtttctagaatctccctcctcccaggctagccggcagtcccagcttgtgctacagagaggctcctttttattactttttttttcttttcctcctaaccggtccttgctggttttgagtatccactcccccacccccgcccccttctttttctttctctctgttcctgagcaagctgacgcaggtctgcagga

SEQ ID NO: 285425 - DNA, 178 bp, Homo sapiens; identical to SEQ ID NO: 201187
  chr7:129913272-129913450
  hyper

SEQ ID NO: 285426 - DNA, 186 bp, Homo sapiens; identical to SEQ ID NO: 233231
  chr7:130741971-130742157
  hyper

SEQ ID NO: 285427 - DNA, 37 bp, Homo sapiens; identical to SEQ ID NO: 233232
  chr7:130791783-130791820
  hyper

SEQ ID NO: 285428 - DNA, 282 bp, Homo sapiens; identical to SEQ ID NO: 233233
  chr7:130794764-130795046
  hyper

SEQ ID NO: 285429 - DNA, 95 bp, Homo sapiens; identical to SEQ ID NO: 233234
  chr7:131012269-131012364
  hyper

SEQ ID NO: 285430 - DNA, 47 bp, Homo sapiens; identical to SEQ ID NO: 233235
  chr7:131013175-131013222
  hyper

SEQ ID NO: 285431 - DNA, 120 bp, Homo sapiens; identical to SEQ ID NO: 201188
  chr7:131240426-131240546
  hyper

SEQ ID NO: 285432 - DNA, 142 bp, Homo sapiens; identical to SEQ ID NO: 201189
  chr7:131242580-131242722
  hyper

SEQ ID NO: 285433 - DNA, 49 bp, Homo sapiens; identical to SEQ ID NO: 201190
  chr7:132260161-132260210
  hyper

SEQ ID NO: 285434 - DNA, 38 bp, Homo sapiens
  chr7:132262442-132262480
  hyper
acatgggtgaccggagcgcacggcgcgcgctcagaggg

SEQ ID NO: 285435 - DNA, 59 bp, Homo sapiens; identical to SEQ ID NO: 201191
  chr7:132340334-132340393
  hyper

SEQ ID NO: 285436 - DNA, 125 bp, Homo sapiens; identical to SEQ ID NO: 233243
  chr7:132766985-132767110
  hyper

SEQ ID NO: 285437 - DNA, 201 bp, Homo sapiens
  chr7:132937609-132937810
  hyper
tagctttcctgcgcgcccaggagacggagaaggaaaactacgactcccagagtgcttagagagaacacgcgcgtcgtggcctcaaaacttgctcccttagtcccgcctcctcacttcagtgattggattttccacttccgcgcctctggaattctcttcacccattggtggagactcctgcggggtcaaatacagaattta

SEQ ID NO: 285438 - DNA, 121 bp, Homo sapiens; identical to SEQ ID NO: 233246
  chr7:134001194-134001315
  hyper

SEQ ID NO: 285439 - DNA, 96 bp, Homo sapiens; identical to SEQ ID NO: 201192
  chr7:134001929-134002025
  hyper

SEQ ID NO: 285440 - DNA, 177 bp, Homo sapiens; identical to SEQ ID NO: 201193
  chr7:134331362-134331539
  hyper

SEQ ID NO: 285441 - DNA, 86 bp, Homo sapiens; identical to SEQ ID NO: 201194
  chr7:134832830-134832916
  hyper

SEQ ID NO: 285442 - DNA, 294 bp, Homo sapiens; identical to SEQ ID NO: 201195
  chr7:134855495-134855789
  hyper

SEQ ID NO: 285443 - DNA, 153 bp, Homo sapiens; identical to SEQ ID NO: 233252
  chr7:135194963-135195116
  hyper

SEQ ID NO: 285444 - DNA, 330 bp, Homo sapiens; identical to SEQ ID NO: 201196
  chr7:137028151-137028481
  hyper

SEQ ID NO: 285445 - DNA, 111 bp, Homo sapiens; identical to SEQ ID NO: 201197
  chr7:137531047-137531158
  hyper

SEQ ID NO: 285446 - DNA, 57 bp, Homo sapiens; identical to SEQ ID NO: 233257
  chr7:137685726-137685783
  hyper

SEQ ID NO: 285447 - DNA, 177 bp, Homo sapiens; identical to SEQ ID NO: 201198
  chr7:137686993-137687170
  hyper

SEQ ID NO: 285448 - DNA, 100 bp, Homo sapiens; identical to SEQ ID NO: 201199
  chr7:138665269-138665369
  hyper

SEQ ID NO: 285449 - DNA, 176 bp, Homo sapiens; identical to SEQ ID NO: 233260
  chr7:138666618-138666794
  hyper

SEQ ID NO: 285450 - DNA, 325 bp, Homo sapiens
  chr7:138720460-138720785
  hyper
ggcctggcactcgccgcgctggtagcgggcgcagaggcgcacagaggacacggccaccaccctccaggcggaggtgccgccaccgcccaccgcgccggccgccgcctcggcctccgcgtccccgaggccctcctgcgtctccacctcctgcagcaggaaacgctcgggcccggcgcgctgcagcacgtcccggagcctggcctccgacagctccacgtggccgcgcaggtccttcaggaacatgcggccgccgtgggcgcacagcaccttggtgaggaaggagcacactgtgggctccgccatggtcgctggcgcgggccctgtg

SEQ ID NO: 285451 - DNA, 43 bp, Homo sapiens; identical to SEQ ID NO: 201201
  chr7:138720909-138720952
  hyper

SEQ ID NO: 285452 - DNA, 115 bp, Homo sapiens; identical to SEQ ID NO: 233261
  chr7:138794419-138794534
  hyper

SEQ ID NO: 285453 - DNA, 32 bp, Homo sapiens; identical to SEQ ID NO: 233262
  chr7:138818580-138818612
  hyper

SEQ ID NO: 285454 - DNA, 215 bp, Homo sapiens; identical to SEQ ID NO: 233263
  chr7:139024981-139025196
  hyper

SEQ ID NO: 285455 - DNA, 283 bp, Homo sapiens; identical to SEQ ID NO: 201202
  chr7:139168725-139169008
  hyper

SEQ ID NO: 285456 - DNA, 545 bp, Homo sapiens
  chr7:139477943-139478488
  hyper
cgaagggcagagccgcgccggcggcccgaggggaccgcgctgggaggggctgccgcgcagcgcggggggactgggcgcagggcgggccccgggtagtgggtgagagggccggcctggacccggcgggcgcacggctccgagcccagcgcagccgagccggtctgcagaggggcccccagaactttgtgtgtgtgtgtgcacgcgcgcgcgtgtgtgcccaggtgcgagggttcgcgcgtgtgctggcggggagggaaccgacccgaaagagagccccacgctggcaaagtggctcgcccatctcacagccggttggcgctcgcggaggtaggagtggaatgaatgaatgaaggagtgggcgcgcgccgtgctccggaggagggcgggtgagtggaggagcttcggaaagccacacgaggtcagaggcaccgaagccctgccgtgcacgccgcggaaatgcagcccccggggtggtcgctgggttcctgccggagtctggcttccacgccaccctgatcttctcctcctcgcgtctacactgtccc

SEQ ID NO: 285457 - DNA, 217 bp, Homo sapiens
  chr7:139929834-139930051
  hyper
cctctgtcaagaccataccacggctgttttgactcctgggcttccgccctttagtttacacatttgatgattccgtttgaaaatcgcaacctgaaatactcctcttctaggctggaggcggggttgggggcgggggcggtgggtggcggaaggagggccctcaaacaaagatccgctttctcctgaacaggtgtcaggagaccaagctttgacctcc

SEQ ID NO: 285458 - DNA, 363 bp, Homo sapiens
  chr7:139930346-139930709
  hyper
ccggggtccgaagcaccgcgcactccaccccgcgacgcgcgcatccctcgaccctcgcgcgtccacaccgccgctgcgcctcgcgcccccgcacccccgcaaccccacaccacgccggccgggcggggccggatgcgcagacgtgcagcacgtgcgctgcgcagcgattggcagcgccgcccccacgccgccccgccagggaaagggtgtcccgtgccctgccgcggctgctggtcccgcgggcgggggctgtcggggcgcgcgggccgggccgtgggggtcgccgcccgaagtgaccggggaacaatgacagcccgatggggaagggcggcggcttccctagagggccggttctctggctcg

SEQ ID NO: 285459 - DNA, 190 bp, Homo sapiens
  chr7:140098064-140098254
  hyper
gggggcgagcggccgaccctgcctgggcgccccacccaaggggggccgccacctacatctccccaccgccctcccgacccgggaagcccctcggattggacccgcccccgccccagcaggtcttcggccccacgcatcaccgcttgcgcacccgagatccgcagtggtcgccgctctccagccccggctc

SEQ ID NO: 285460 - DNA, 179 bp, Homo sapiens; identical to SEQ ID NO: 115791
  chr7:140098296-140098475
  hyper

SEQ ID NO: 285461 - DNA, 236 bp, Homo sapiens; identical to SEQ ID NO: 201206
  chr7:140103657-140103893
  hyper

SEQ ID NO: 285462 - DNA, 183 bp, Homo sapiens
  chr7:140340368-140340551
  hyper
cggctggcggcgcggctcgggggcgggcggcggcgggtgccggggacgccatggccctccgccctccgcccctttgtccgccgagcctcccccggccgcccgcaagcccctgggggtccccgccgcgcgcgctcccgtggggtccccgccgcccccggccccagcggcgcgcttccctcggcc

SEQ ID NO: 285463 - DNA, 86 bp, Homo sapiens; identical to SEQ ID NO: 233271
  chr7:140373221-140373307
  hyper

SEQ ID NO: 285464 - DNA, 37 bp, Homo sapiens; identical to SEQ ID NO: 233272
  chr7:140624448-140624485
  hyper

SEQ ID NO: 285465 - DNA, 287 bp, Homo sapiens; identical to SEQ ID NO: 233273
  chr7:140714398-140714685
  hyper

SEQ ID NO: 285466 - DNA, 96 bp, Homo sapiens
  chr7:140771228-140771324
  hyper
agatggcactgaaacgcctcgttcgcgcttttcaaaatgcaggaagggcgggggagagagagagagagagagagggaaaaaaaaaaagacaaaaag

SEQ ID NO: 285467 - DNA, 219 bp, Homo sapiens
  chr7:140771550-140771769
  hyper
ggggctgaagttgggatgaagcggggcttgcctggggcccacccgctcaaggtctggggtccggcgctacctcccagagcccctgcagagcctaaatccagcggccacccttacaaaatgacaaaccctgcatcgaggtttcttttaaccccaccttccctcaacgctcgagctctccagcgttttcaaaatatctactaacggaccaccccccatcca

SEQ ID NO: 285468 - DNA, 200 bp, Homo sapiens
  chr7:140771841-140772041
  hyper
ggtggaggtgggtgtgtgtcggggtgcctggctctggcttgggactggactggggctggccggataactccgcagccgctctcagctcagtcctaggtggaaacgcctgtagcttgcaaggtagcgcctgtggctttctggggaaaaaaagatcaaatgcctcccaagacaccagcgacccaaaccggggatgcagggag

SEQ ID NO: 285469 - DNA, 140 bp, Homo sapiens; identical to SEQ ID NO: 201208
  chr7:140774419-140774559
  hyper

SEQ ID NO: 285470 - DNA, 177 bp, Homo sapiens
  chr7:140774560-140774737
  hyper
tctccttcccaggccacaggctatcaggtctctgggttccaggcggtccggttatccaggcctggctgagcctcggggccaggacttgcctcccaatagctgttaatgaagcttggtgcaggcttaactctctcccctgcctctcctttcgcgcgtctctgtcgggattcgagtgga

SEQ ID NO: 285471 - DNA, 38 bp, Homo sapiens; identical to SEQ ID NO: 201209
  chr7:141211325-141211363
  hyper

SEQ ID NO: 285472 - DNA, 357 bp, Homo sapiens; identical to SEQ ID NO: 201210
  chr7:141211599-141211956
  hyper

SEQ ID NO: 285473 - DNA, 1015 bp, Homo sapiens; identical to SEQ ID NO: 201211
  chr7:142985429-142986444
  hyper

SEQ ID NO: 285474 - DNA, 395 bp, Homo sapiens; identical to SEQ ID NO: 233279
  chr7:143059279-143059674
  hyper

SEQ ID NO: 285475 - DNA, 93 bp, Homo sapiens; identical to SEQ ID NO: 233280
  chr7:143077218-143077311
  hyper

SEQ ID NO: 285476 - DNA, 107 bp, Homo sapiens; identical to SEQ ID NO: 201212
  chr7:143105720-143105827
  hyper

SEQ ID NO: 285477 - DNA, 469 bp, Homo sapiens; identical to SEQ ID NO: 5935
  chr7:143105844-143106313
  hyper

SEQ ID NO: 285478 - DNA, 144 bp, Homo sapiens
  chr7:143579479-143579623
  hyper
agcagcggattagacgcggttctctaggtcaggccctcaggtaactcaaccacacaaagcaagcacacacaaacatcagatgtcagaacctggagaggaggagcaatgcggcagggggatgcgggacccaagcgcagaggaaaa

SEQ ID NO: 285479 - DNA, 195 bp, Homo sapiens
  chr7:143580095-143580290
  hyper
ggcattgctgtggcttagggacgcctggagaccccatcctggcagtgtggacggctgtttcattaaagatacaaacttctctgactctacattagtaagggaaaggctgagcaaattgtgggacaaacattctgcttagtattattcagttcttaggaagagcttgaatctccatttagtcggtgaatataccgt

SEQ ID NO: 285480 - DNA, 126 bp, Homo sapiens; identical to SEQ ID NO: 233283
  chr7:143598479-143598605
  hyper

SEQ ID NO: 285481 - DNA, 308 bp, Homo sapiens; identical to SEQ ID NO: 233284
  chr7:143599064-143599372
  hyper

SEQ ID NO: 285482 - DNA, 257 bp, Homo sapiens; identical to SEQ ID NO: 223241
  chr7:144100839-144101096
  hyper

SEQ ID NO: 285483 - DNA, 122 bp, Homo sapiens; identical to SEQ ID NO: 201214
  chr7:145814199-145814321
  hyper

SEQ ID NO: 285484 - DNA, 152 bp, Homo sapiens; identical to SEQ ID NO: 201215
  chr7:145981901-145982053
  hyper

SEQ ID NO: 285485 - DNA, 704 bp, Homo sapiens; identical to SEQ ID NO: 44845
  chr7:148036378-148037082
  hyper

SEQ ID NO: 285486 - DNA, 304 bp, Homo sapiens; identical to SEQ ID NO: 233288
  chr7:148394979-148395283
  hyper

SEQ ID NO: 285487 - DNA, 79 bp, Homo sapiens; identical to SEQ ID NO: 201217
  chr7:148506412-148506491
  hyper

SEQ ID NO: 285488 - DNA, 89 bp, Homo sapiens; identical to SEQ ID NO: 201218
  chr7:148507424-148507513
  hyper

SEQ ID NO: 285489 - DNA, 71 bp, Homo sapiens; identical to SEQ ID NO: 201219
  chr7:148508741-148508812
  hyper

SEQ ID NO: 285490 - DNA, 184 bp, Homo sapiens; identical to SEQ ID NO: 201220
  chr7:148511050-148511234
  hyper

SEQ ID NO: 285491 - DNA, 107 bp, Homo sapiens; identical to SEQ ID NO: 201221
  chr7:148512014-148512121
  hyper

SEQ ID NO: 285492 - DNA, 34 bp, Homo sapiens; identical to SEQ ID NO: 201222
  chr7:148513818-148513852
  hyper

SEQ ID NO: 285493 - DNA, 121 bp, Homo sapiens; identical to SEQ ID NO: 201223
  chr7:148514301-148514422
  hyper

SEQ ID NO: 285494 - DNA, 76 bp, Homo sapiens; identical to SEQ ID NO: 201224
  chr7:148515086-148515162
  hyper

SEQ ID NO: 285495 - DNA, 200 bp, Homo sapiens; identical to SEQ ID NO: 201225
  chr7:148523536-148523736
  hyper

SEQ ID NO: 285496 - DNA, 119 bp, Homo sapiens; identical to SEQ ID NO: 201226
  chr7:148526816-148526935
  hyper

SEQ ID NO: 285497 - DNA, 67 bp, Homo sapiens; identical to SEQ ID NO: 233289
  chr7:148580444-148580511
  hyper

SEQ ID NO: 285498 - DNA, 240 bp, Homo sapiens; identical to SEQ ID NO: 233290
  chr7:148762866-148763106
  hyper

SEQ ID NO: 285499 - DNA, 56 bp, Homo sapiens; identical to SEQ ID NO: 233291
  chr7:148822680-148822736
  hyper

SEQ ID NO: 285500 - DNA, 151 bp, Homo sapiens; identical to SEQ ID NO: 201227
  chr7:148892417-148892568
  hyper

SEQ ID NO: 285501 - DNA, 158 bp, Homo sapiens; identical to SEQ ID NO: 201228
  chr7:148936558-148936716
  hyper

SEQ ID NO: 285502 - DNA, 266 bp, Homo sapiens
  chr7:148959355-148959621
  hyper
ctgccgcgccgccccgggcccgacaggccgggtccagggactgcaacccagcgagggacgcgggcagccatggccgaagcggcgcctgcccgggtaagcgccctcggccccgcggacgcccggaaggcccaggccgccgccgcgtgagcccgcgcgagggactctggccgcgcgaggccgcggggtgagagggccttgcgcgcagcctccgcgctcgttgcccccggcccatcgcccagcccgcgtcgaaggcattgaccgggcgg

SEQ ID NO: 285503 - DNA, 358 bp, Homo sapiens; identical to SEQ ID NO: 201229
  chr7:148982135-148982493
  hyper

SEQ ID NO: 285504 - DNA, 46 bp, Homo sapiens; identical to SEQ ID NO: 201230
  chr7:149112425-149112471
  hyper

SEQ ID NO: 285505 - DNA, 204 bp, Homo sapiens
  chr7:149119393-149119597
  hyper
tggttcggggctgcggccgggcggctcccgcactgcgactaagggccagccggctggcaggcggggctggggctcggatgtcgggactagcgggtctctggcgcgaggcggccgccaccaccgagaaggccgcgcgcattcctagagcggccgccagcggccaggtgagggcgccgcggcctccggggcctcctcgcctctggc

SEQ ID NO: 285506 - DNA, 207 bp, Homo sapiens
  chr7:149119682-149119889
  hyper
ggcacccagcagcgcgctcccgttctcatcagacgggagaaaaaacgcccaggcagaggaacgtctaaaagtcaagtcatcaaaattaatgtaatcgagaaaatgtgcatatttaaaatatggatagagacgcataaatacatctttaaaataaaaatataatcgtttgtgttaagtccttgctccattggctctcagctgcactca

SEQ ID NO: 285507 - DNA, 51 bp, Homo sapiens
  chr7:149120073-149120124
  hyper
gggccagaggcctggcttggggaagggccccttcccggttccccaaggtcc

SEQ ID NO: 285508 - DNA, 202 bp, Homo sapiens; identical to SEQ ID NO: 233297
  chr7:149157616-149157818
  hyper

SEQ ID NO: 285509 - DNA, 185 bp, Homo sapiens; identical to SEQ ID NO: 233299
  chr7:149535232-149535417
  hyper

SEQ ID NO: 285510 - DNA, 1037 bp, Homo sapiens
  chr7:149570406-149571443
  hyper
tcccgccgggtccctgaacgccggcccggccggtccaacctcattccgcttcccgccatcgaaacgcgaagcccccgccttcccccaaacgtctcagcgccgctggggcctttctggctgcgccgcctccgaccccaggccccggtccgcgcccgccgctcgctagtcctgggagtgaggagaacgcgtgctgaggacccggccagagggacagcggggaccgccctcccgctgcgtctctgaaagcgaggccgttcctcccgcgtccgacccccgcggggccgtcaggttcggggcggcccaggctgcgggtccgcagggcgcttcgggccgagccggcgcggcgcgtgaagggcaggggacgccccgaaagaccgctggggtgggaccccaagctccaggggtctttggaaataagaatgcggcgtgacgttggctgtgcgggcgcggggctgacgcggaccctataacccatcgccgaaaccgggcggccgcgcccctattcctcggcatttctctctgtccgcggccctgctcagccaatcagcgagtgggctcctaggcaggtcctgagtgacagcgcggcgggctggatcaggagatgcgcgtgcgcggcccggcccggctgatcgcttcgggtgctcgactcctgttgcgcatgctcagcgcgctgcccggctggggacccgcgcacctgcagcgcccgctgctcggccctgcatcctgcctgggcatcctgcgcccggccatgacggcgcactcattcgccctcccggtcatcatcttcaccacgttctggggcctcgtcggcatcgccgggccctggttcgtgccgaagggacccaaccgcgggtaaggaaagcgcgcaggccctgcagacctctccaccccggccccctggcccggctcgcccctccgccccggggcggcggcttcctgctctgcagcgagcgtccgcaggagggacgccaggaccccggacgccacctctgaggtctctctgcacctgggtctctgacagccgggaacaggcagga

SEQ ID NO: 285511 - DNA, 85 bp, Homo sapiens
  chr7:149745490-149745575
  hyper
agagggcacggggtcgcacaaaaagggtgcgagggtgcgtgaagagggtggaggggcggggaccacgcgggtcgtgggtgcgggg

SEQ ID NO: 285512 - DNA, 114 bp, Homo sapiens; identical to SEQ ID NO: 233305
  chr7:150065156-150065270
  hyper

SEQ ID NO: 285513 - DNA, 184 bp, Homo sapiens; identical to SEQ ID NO: 233306
  chr7:150065987-150066171
  hyper

SEQ ID NO: 285514 - DNA, 461 bp, Homo sapiens; identical to SEQ ID NO: 233307
  chr7:150075203-150075664
  hyper

SEQ ID NO: 285515 - DNA, 42 bp, Homo sapiens; identical to SEQ ID NO: 233308
  chr7:150102886-150102928
  hyper

SEQ ID NO: 285516 - DNA, 552 bp, Homo sapiens; identical to SEQ ID NO: 201234
  chr7:150497095-150497647
  hyper

SEQ ID NO: 285517 - DNA, 318 bp, Homo sapiens
  chr7:150497885-150498203
  hyper
gccgcccgctcgcaggtcccgaggagcgcaggtgaggcggcaccccactcccggcggcccccgggcctccttccgcacgcaccccgagctgcctccgcacagttggaggagcgtaggagggacccccacccagggatgacactccaggaaggggactgcagaggaagccaggtgcggccccggcttttgacctacctccgcaccgcagcgcggtccttcacggggcaggggcggcgtgaacccgtcgggcgtgagcagcagtcggtggagcgggaggtcggcggtggcggggatgggggtatccggagcgcagccggg

SEQ ID NO: 285518 - DNA, 874 bp, Homo sapiens; identical to SEQ ID NO: 201236
  chr7:150671457-150672331
  hyper

SEQ ID NO: 285519 - DNA, 380 bp, Homo sapiens; identical to SEQ ID NO: 223261
  chr7:150676164-150676544
  hyper

SEQ ID NO: 285520 - DNA, 219 bp, Homo sapiens; identical to SEQ ID NO: 233314
  chr7:150685652-150685871
  hyper

SEQ ID NO: 285521 - DNA, 121 bp, Homo sapiens
  chr7:150714959-150715080
  hyper
gagggtgtccgtggcgcttcacatccataagggcaaaggaacagatgtccccaaccccagccacatccacagtgaagtgatgaaaaaagtcgataatctccagggcacgagggcggaacca

SEQ ID NO: 285522 - DNA, 295 bp, Homo sapiens
  chr7:150715323-150715618
  hyper
tccgcgcagacagaccccacaacttcctcctcagcccgccgtcgcgcccaccctcaccgctcggtactgcagcagctgcgccatctgccggtaggcgcggtccctgccgccggggccgggctcctccgggaggtagtgcatgtgggccagggctgtctgcagcaggagctgcggcgcacgaccctggcactgctcttccggaatgaaagacctgaaaggcgggatccgtggggggaaggggcctgcgattaggaggacgcgcggtgggatgtagggctagagggccccagtggtg

SEQ ID NO: 285523 - DNA, 449 bp, Homo sapiens; identical to SEQ ID NO: 233317
  chr7:150725069-150725518
  hyper

SEQ ID NO: 285524 - DNA, 165 bp, Homo sapiens; identical to SEQ ID NO: 233319
  chr7:150754922-150755087
  hyper

SEQ ID NO: 285525 - DNA, 56 bp, Homo sapiens; identical to SEQ ID NO: 233320
  chr7:150756477-150756533
  hyper

SEQ ID NO: 285526 - DNA, 152 bp, Homo sapiens; identical to SEQ ID NO: 233321
  chr7:150757073-150757225
  hyper

SEQ ID NO: 285527 - DNA, 115 bp, Homo sapiens; identical to SEQ ID NO: 201239
  chr7:150778108-150778223
  hyper

SEQ ID NO: 285528 - DNA, 970 bp, Homo sapiens
  chr7:150784073-150785043
  hyper
tatctacgccatctacgacctgatcgagcgcatcgaggatttggcgctgcagaaccagatccgggagcacgtcatctccatcgagggtgagcggagccgggggctgcgggagccggggcgcagtggcctctccggcgccggccgagggctccacaggccgtgcctggccatgctctccctgtcgggggtccttgcgcgcttgaggaccaggccacgaggtttgccgatctgtgttgcagaaccggcgggcagcttcgccatatctcgttcggggacactttggggttgggggttttctgctgactgtgttccagggcgcgaaggtggtgtcgcttgggggggccgggaccagatctgtccaggcctggccggggaaggtgggcgcggcagagggcttcagctgcggggaggtggggtcgtgaccggggaggcttcttagccgctgcccgggccctgctccgcagtggggcgggggatcggagcctcgcgttagtggatggcagccttcccgggcccagcgcccgcaggcccggagggtggcgctcgccgcggcgccctctcccgacgcacaccccctacgccgcggcggccaagcgggagcgggccgggcctggcgctgggctgaggctcagcgaccgcgtgggaggcgccggcaggtccatccgcgctttggccgggtcatgagcctgacggggatccgcggctcctcggtctggaggcagctgctgggcagccgggtgctgaccgaccgccagggacaccgcacccggagtcggggaccggaaacccccggccactgcgctgcctagcgcttttttctctgggcccttaggccctggactttcgaccgctgagggcacaggaagtggtggcacgctgctggcagatgcctcgcaagccctggtgtggtgggtgctggaggcacccgcaggcaccccggtggcatggtgaccttcgagcgggcacggac

SEQ ID NO: 285529 - DNA, 263 bp, Homo sapiens
  chr7:150863956-150864219
  hyper
tcagaacctgcgcgcgatctaaaggtctgggacttcaaggctccaggcaggtgccgaggtgccgaggttccgagcaggttcctgtctggaatttccaggtgaaccggcctcccgccagccctggtcggccctagcacttaccgggcagacttggaaaagtctctgagaagtgcggaggcggaggtggtgggggctctgccactttctcccgggccggcagcagctcatcagcttccagcccaccctctgggcgtcggccgcct

SEQ ID NO: 285530 - DNA, 588 bp, Homo sapiens
  chr7:150864924-150865512
  hyper
ctcccgctccctccgcagagcccgttcccagcggcccggccggccggcccgggacccccacccgccccccgcggcccaaccaactattattaatggagattgatgaggccggacacgccgctttgtgaaagtttgcggccgacgagaaggcggcggcagctgctgggccggtccccttccctccacccagtccacccccccaactcagcccacctggcccgggctccggctaggagggcaagcgggaggtggcccaggctccgatggggcggcggggccgagcgtggatgggacaccgggcggcaggcggagagggcgcaccagcagggacaggcggcggggccggacctcagcacccctctgctccgggccgccgccctccttcgggccccaagtcattccccggcgtgcctcccagctccgacacccctcccctgcccgtggagcggacgttgtggcggtccccagagcaagctccggcgcgacgggcgggacagcacggccaccgccccctccagcgagagcgcggggctgagggaggcgaggcggggccgacagggggcgcgctgggcccgcccggttctgcgg

SEQ ID NO: 285531 - DNA, 33 bp, Homo sapiens; identical to SEQ ID NO: 201242
  chr7:150869804-150869837
  hyper

SEQ ID NO: 285532 - DNA, 123 bp, Homo sapiens; identical to SEQ ID NO: 233325
  chr7:150924342-150924465
  hyper

SEQ ID NO: 285533 - DNA, 252 bp, Homo sapiens; identical to SEQ ID NO: 233326
  chr7:150929281-150929533
  hyper

SEQ ID NO: 285534 - DNA, 64 bp, Homo sapiens; identical to SEQ ID NO: 223266
  chr7:150948746-150948810
  hyper

SEQ ID NO: 285535 - DNA, 111 bp, Homo sapiens; identical to SEQ ID NO: 233327
  chr7:150974357-150974468
  hyper

SEQ ID NO: 285536 - DNA, 389 bp, Homo sapiens; identical to SEQ ID NO: 201243
  chr7:151038574-151038963
  hyper

SEQ ID NO: 285537 - DNA, 107 bp, Homo sapiens; identical to SEQ ID NO: 201244
  chr7:151136925-151137032
  hyper

SEQ ID NO: 285538 - DNA, 124 bp, Homo sapiens; identical to SEQ ID NO: 201245
  chr7:151137113-151137237
  hyper

SEQ ID NO: 285539 - DNA, 198 bp, Homo sapiens; identical to SEQ ID NO: 233330
  chr7:151215383-151215581
  hyper

SEQ ID NO: 285540 - DNA, 347 bp, Homo sapiens
  chr7:151217153-151217500
  hyper
taccgcgctgttgggcgccggctaggtttgaaggcttcaaacttccaaccggttaggggcgggcgggagaggcggagagacaaacggtggctccctggtgattggccagaacggagcgcagggcggggcaataggtgggaggtgcggtgattggcgaaacgctaagcggttggcgggttcgcgcccgctgagcccgtgaagggcgcgaggcgcgtggcctgggcgggtgggctggctcctccctcggggttttttgaaaattctccttgagctgcgttagcgttcgtgtctgggtttgaggatgtagtggtgactaagcgtcaccgacggccgaaggactgtgggaa

SEQ ID NO: 285541 - DNA, 961 bp, Homo sapiens
  chr7:151572578-151573539
  hyper
cagcccattcactgcgcactcccaccctgccccgggagagcaaaataactttctctacggagcactctggtgtgtgtgtgtgtgtgtgtgtgtgtgtgtgtgtgtgtgtgtgtgtgtgtgtacacaaacatttacttggttggctgaggcggagggtgtgacccagtgggccacacctcccaccgccctaccccgctacgtggaggcgaggaacagtggccgcgggctaccggggcgccttccgaaaagagaaccactacgcggcccgccgcccctctggctggacaaagtgaagccgcaggcagatccgagtcgccaatgtcctcccgggcggctggcgcggacggggctgaagttcaatgcagcctgcacggattagggagctccgagcccccaaataccacagagacccaaagtacactcccggggcgggggaagggaacggcggcagaggagacccccgctccaggcccagaaacgcccggagagaaactggagcggagggggtgcattggaagacgcagctacacagctccccccaacccccgccccgctgctttccccacccaccgcccctcccctctcctccctcccctcccctctctccgtctccagcagccgagcgcgggctccacctccccggagcgcagtccacaccgtcccttttcagcaaaacaacacaacgcaccgccccccgcacccgcacccggctggataccgggctacgcccagccgcccacccgccgcgcccggcgccccctctagtctgcagccgcccagcccccgccccaggcggagccccagccctggctgcacgcgggcagagagagagattgagccccggctccgccagcccagctcgggccctgtccctctaccctttccccaagccgcccgaagtgacaggaggggcacgcacggcgcgcgcggggcgtccagcgttaaccgcttcggcgccggg

SEQ ID NO: 285542 - DNA, 693 bp, Homo sapiens; identical to SEQ ID NO: 201247
  chr7:151722451-151723144
  hyper

SEQ ID NO: 285543 - DNA, 38 bp, Homo sapiens; identical to SEQ ID NO: 201248
  chr7:151723206-151723244
  hyper

SEQ ID NO: 285544 - DNA, 168 bp, Homo sapiens; identical to SEQ ID NO: 233336
  chr7:152161044-152161212
  hyper

SEQ ID NO: 285545 - DNA, 159 bp, Homo sapiens; identical to SEQ ID NO: 233337
  chr7:152161898-152162057
  hyper

SEQ ID NO: 285546 - DNA, 119 bp, Homo sapiens; identical to SEQ ID NO: 233338
  chr7:152373449-152373568
  hyper

SEQ ID NO: 285547 - DNA, 166 bp, Homo sapiens; identical to SEQ ID NO: 233339
  chr7:152591571-152591737
  hyper

SEQ ID NO: 285548 - DNA, 100 bp, Homo sapiens
  chr7:152622355-152622455
  hyper
ggtttcctgtcccgcgtggttcatggggcttgccctgggcctgggaggccggtggcgggagcctcccctacagtgaggtgggtggggggcgccacacggc

SEQ ID NO: 285549 - DNA, 40 bp, Homo sapiens
  chr7:152622456-152622496
  hyper
tctcagggagaggggagaggcggcttctgttccgggaaga

SEQ ID NO: 285550 - DNA, 94 bp, Homo sapiens; identical to SEQ ID NO: 233341
  chr7:152890309-152890403
  hyper

SEQ ID NO: 285551 - DNA, 44 bp, Homo sapiens
  chr7:153585206-153585250
  hyper
cactgggccctggcgcccgcgccggcctcggtgctccgagtccc

SEQ ID NO: 285552 - DNA, 103 bp, Homo sapiens
  chr7:153585293-153585396
  hyper
cggggcaggcgccagtcgctccgctccgttccagacgccgccgccgggcgggaccctgctccctggattggggacgctgactcccccaaaagcttgactgtgc

SEQ ID NO: 285553 - DNA, 65 bp, Homo sapiens; identical to SEQ ID NO: 201249
  chr7:154705761-154705826
  hyper

SEQ ID NO: 285554 - DNA, 109 bp, Homo sapiens; identical to SEQ ID NO: 233348
  chr7:155090929-155091038
  hyper

SEQ ID NO: 285555 - DNA, 208 bp, Homo sapiens; identical to SEQ ID NO: 201250
  chr7:155168321-155168529
  hyper

SEQ ID NO: 285556 - DNA, 35 bp, Homo sapiens; identical to SEQ ID NO: 201251
  chr7:155170943-155170978
  hyper

SEQ ID NO: 285557 - DNA, 66 bp, Homo sapiens; identical to SEQ ID NO: 201252
  chr7:155244370-155244436
  hyper

SEQ ID NO: 285558 - DNA, 102 bp, Homo sapiens
  chr7:155246273-155246375
  hyper
cccccctccccgggcgagcctgggctaagtatcaagtcaggacagaagggcggtccccagtcggctcctggcccactctgcttccccaacacctagggagct

SEQ ID NO: 285559 - DNA, 102 bp, Homo sapiens; identical to SEQ ID NO: 201254
  chr7:155257754-155257856
  hyper

SEQ ID NO: 285560 - DNA, 287 bp, Homo sapiens
  chr7:155261377-155261664
  hyper
tgcctaggacgtccctgacccgcgcgctcagtttcattcagtggccgtgggatgttgcatctgagtttttcctttaggccaaaactttgtcccgaggtttttctgagagggttttattctccaacagcaacaacaacatgcgaattcttaaaactagtatttatttcgattcaggcagtcagggaaatggcagaatcaccagccgtttgcagaattctacgctcgccaaggcaagtactattagtatattttctcccaacgttttcgttgtaaaatacacatgacaa

SEQ ID NO: 285561 - DNA, 62 bp, Homo sapiens; identical to SEQ ID NO: 201256
  chr7:155264017-155264079
  hyper

SEQ ID NO: 285562 - DNA, 290 bp, Homo sapiens; identical to SEQ ID NO: 201257
  chr7:155264356-155264646
  hyper

SEQ ID NO: 285563 - DNA, 151 bp, Homo sapiens
  chr7:155283784-155283935
  hyper
ctgccctggccggctccgggctccaccccccgcgccctggctgttgccatggttggcctcaggcatccggctcggcctacaggaaacacgcttgtaggactcgctagggcaggagagaatggggtaacgcggaagatggattttttttttt

SEQ ID NO: 285564 - DNA, 59 bp, Homo sapiens
  chr7:155301651-155301710
  hyper
tttgtctcctttcctaggagcgaatctcttgaaagttctctccttcgtcacagggtctt

SEQ ID NO: 285565 - DNA, 187 bp, Homo sapiens; identical to SEQ ID NO: 201258
  chr7:155326541-155326728
  hyper

SEQ ID NO: 285566 - DNA, 140 bp, Homo sapiens; identical to SEQ ID NO: 233375
  chr7:155437084-155437224
  hyper

SEQ ID NO: 285567 - DNA, 57 bp, Homo sapiens
  chr7:155580355-155580412
  hyper
gtgaggggtgcgccgcgggaggctctcctgccccgcggaggagggtcagagagaaag

SEQ ID NO: 285568 - DNA, 297 bp, Homo sapiens; identical to SEQ ID NO: 201259
  chr7:155600723-155601020
  hyper

SEQ ID NO: 285569 - DNA, 278 bp, Homo sapiens
  chr7:155601410-155601688
  hyper
aagcccgactctgtgcagccaccgtgaagcccagcagggccgccggggccgggctttgtgtcggcggaggccaagttgttccccacgcctgagctcccgcctacctccctgatctgcgagccgcgccggcgagtgtcaccgccagcagccggtgggcttcccccagcgcgggggcgggggcgtcccagcttcaagacagccccagcccctaaacgcacctctctccactgtcctttcccccaagcttggtggaacagcccctccccaaccccatacct

SEQ ID NO: 285570 - DNA, 800 bp, Homo sapiens
  chr7:155601951-155602751
  hyper
tgagggacttgggcggcagtcacattagagacccagagacagggagggagacagaagaagagggtcacgcacctggggcagagcctaggtggttatttaaaatgagggcggccgagcaggctccccaaacctcccgccggcctggggctcccctgccgcctcctgcaccccgcccctgccctcagcacccgagcctccgccttccccatcccttcctcccccacccttaactcctggaatcgggagaaggaaggtaggggagggatcaaccggggatacctcacagactgccagcccctacccccctcggttttaggggacctttgtggggtctgcctgataatcccggcctggctctcctcacccaacccccacttgggccgtccttccccctccttttgtgttgggaacgggaatagccactgcccaaggaaaaaagtatttgttttcgtttcgttcgtctgagggaagttgacagaaggtcagaagttcaaatgctgcctgtgcgcgcggcggcgagagtggccgggcgcggggccgctgggccctgcgtcccccggcagggcggacgggggtcggggggaggcccccgggctgggggctccggctgggacgcggaggcctagaggccaggcaggcggcggactggggatgggggcgcgtcccagggcaggccggcggagcccgcgatgcgccccggcccctgcgcgggcgcccccatctccgcgcccccgccgccggggacactacagcgagcccggcgctgctgttagctcctgcggtgcctgcgctcccgcgcg

SEQ ID NO: 285571 - DNA, 285 bp, Homo sapiens
  chr7:155603127-155603412
  hyper
ggagaactccctccagccagctgcacgcaacgggcaccccatggcccgtgcagagttaattgtggatcgcgctgctgtctggcactggcgcgcgcgtccacactcgcggtccagatttaaggtggtcgggagcagatgagggagagcaaggaaatcaggaccatttcccattcctctcccttccgacagctggagcaggctaccttgcctgcccctcgcctttctcggcctcaagcaagcctgggaatcgggtcgggaagcagggcggcacggaggtagctcctc

SEQ ID NO: 285572 - DNA, 401 bp, Homo sapiens
  chr7:155604520-155604921
  hyper
gtcatcagcctgtccgctccggtgttttcttcatccttaaatatgatgtcggggttgtaattgggggtgagttccttaaatcgctcggagtttctggagatcttcccttcataccttccgctggcgcctagggtcttctcggccacattggggataaactgcttgtaggctaaaggggtcagctttttggggtgcctcctcttcccgaaccccctgcccggtccgcacgccagtcccgagcataccagcagcgaggagacgaggactagcagcagacatctcgccagcagcagcatctcgcccatggaactgatgacttccgagctgtccccgtgcgggtccgtgcgcgagtgcgcgcggcgggtgtgtgcgtgtgcgctctctcttgcgctttcccttcc

SEQ ID NO: 285573 - DNA, 90 bp, Homo sapiens
  chr7:155605019-155605109
  hyper
cgctccccacccagacaggggctggaatggcaggctgccggccgctgataacggaacacatcggagttgggtcgcgagacagcaatcaaa

SEQ ID NO: 285574 - DNA, 345 bp, Homo sapiens; identical to SEQ ID NO: 201261
  chr7:156433175-156433520
  hyper

SEQ ID NO: 285575 - DNA, 459 bp, Homo sapiens; identical to SEQ ID NO: 201262
  chr7:156433521-156433980
  hyper

SEQ ID NO: 285576 - DNA, 46 bp, Homo sapiens; identical to SEQ ID NO: 233382
  chr7:156742210-156742256
  hyper

SEQ ID NO: 285577 - DNA, 338 bp, Homo sapiens; identical to SEQ ID NO: 201263
  chr7:156792492-156792830
  hyper

SEQ ID NO: 285578 - DNA, 42 bp, Homo sapiens; identical to SEQ ID NO: 201264
  chr7:156794956-156794998
  hyper

SEQ ID NO: 285579 - DNA, 62 bp, Homo sapiens; identical to SEQ ID NO: 201265
  chr7:156796104-156796166
  hyper

SEQ ID NO: 285580 - DNA, 62 bp, Homo sapiens; identical to SEQ ID NO: 201266
  chr7:156796432-156796494
  hyper

SEQ ID NO: 285581 - DNA, 110 bp, Homo sapiens
  chr7:156799510-156799620
  hyper
caagtggaaatggatagtttggagttaatgagaccaatttttttttttttttttgtctaggagacgtctgagtgtccctgttaaacagggcccatcgcaggaggcttcct

SEQ ID NO: 285582 - DNA, 244 bp, Homo sapiens; identical to SEQ ID NO: 233387
  chr7:156800318-156800562
  hyper

SEQ ID NO: 285583 - DNA, 249 bp, Homo sapiens; identical to SEQ ID NO: 201268
  chr7:156802164-156802413
  hyper

SEQ ID NO: 285584 - DNA, 1185 bp, Homo sapiens
  chr7:156802537-156803722
  hyper
cgccgcggagtagccgtagaccgggtggccgtagagcgccgcctgcgccgggaggcccgcgccgccctgcgcgcccccagggtgcagccccagcgccaggcccccagcggcggcggcggcggcggcggcggcggcagcggccgctgcgcccggatgcgcgtggtggtggggccccccgtgcccgccgcccgtgccgccgccgccgccgcccgcgcccaggaagcccggcttgggcagcagcgcgcagtgcgcggccagcaggcgcggcggcgacgggctctcggcgcgcaggcggtcggcgggcgcagccggcggctccgaggacgcggggctgcagctgccgctagtcccgccgctcgccccgccgccgccgccgccacctccggtgccagatgcggcggcggcgagcgacgtgaccaaggccagcggcgcgctctgcgcagaggcggctcgtggggggtccaccgccagcagggcgtcgatgcggaaatttttggatttttccatcggctcgtttggggctggcgctcagggcccggtggcgggcgacgcggccgtgtgcgggctcgcggagtcagtgcgtgcggtgcaagcccgggggctcggtattgttatggtggttatttgccaataatcaaagtcgccgccggaaactcagccgagggtgaccatggtcccggcgcctcctccgtgcgggccccgccccgggccgcgctcgcacaaactcccacgcgagtgcttccccgcgtccgggcccgggagcccggttctttgcgctgcagccctcaggcgaccgcgcggaggccgctgccgccgtggtggggacccgcgcccctccgcgcacttgaagctcagcgcggcttccgattggcgcgcgcagcgggggcccggggagggccgcgggctccgccattggccgaggggcgcacctgtcaccgtcccggccgcccgccgccccgcccccgcgccgcgaggtcctaagcagcccgggctgttgcgcggcgctggcgggcggggacaccaacggggagtggatactccgaggctcaacctggggcctctgcccgccctcccctgggtgcggagccggacggcgggcactggcaacccccgggcccctggagagccccgcggcggcccaagacccgctcccgagacacgtgggcccctccggacttggttggt

SEQ ID NO: 285585 - DNA, 818 bp, Homo sapiens
  chr7:156803796-156804614
  hyper
gcgcggtggttccacgctcctgagcgcccacgctgcgcagacctggccgctctgcgaggcgacggcagcgcactgaagaccgtggtgtttcccaagccctccctgctctcgggcctccagggcgcagcaggggagggttttgtccccgtggccaaagctctgcaggtcgaaccttatctgctatgggaaggccccgcattttcaggtgtgtgtgcgggggtgtgggggtgtaaacgcgcatgtgagtgtgagtttggcctccacgaatcctctctgggagcccctgccccagtcaaggcggagacggtagatctgggcgctctggcctgcagaacccaagtcggcttgcagacgtcgcccacgtgcctgctcagtggagcgggtcctcggtgacaaggctcttcctcgctgccgagggatgcccatgggcttgcgggagtcaaggcccacacacctcggccctgaaaaacccgtggggcccggcatccttcggaagccctgccgctgcgacccccggccagtccccgggcaggagcggggaaaggctatgtctctcgtgctgccggggcctcctgggaagtggagaggaaagggcttcccgtgagtgagcgaggcacggagtgagcatccaggtctcacccctcccccacacgcacacttcaaatatttacagtaaaaccacttccaagggcgtttttgaagctgaaagaatccacacaggggtcgggaagtcaagcggcatcaacaccaggctttgtcaatagcgccattagacccagttatcttccccagcaagcgtgagaactgggagggagttc

SEQ ID NO: 285586 - DNA, 216 bp, Homo sapiens
  chr7:156812026-156812242
  hyper
agtgcaggaccctaggacccccccaccccgggcagcgcgggcctgagcttgggggacaggcagaaggggatcaaacccgcacccagcgcagactcctacttgctcagtgacttcgcaagctcgtgggagggagctgggcgcgcccgagggcacctgggctgaggttccagtagctggctctacctgcgcttcaggtgagcggctgcaggaagggcc

SEQ ID NO: 285587 - DNA, 31 bp, Homo sapiens
  chr7:156812279-156812310
  hyper
gcccatcggccgccgccggcggaggtgaccc

SEQ ID NO: 285588 - DNA, 92 bp, Homo sapiens; identical to SEQ ID NO: 233398
  chr7:156815538-156815630
  hyper

SEQ ID NO: 285589 - DNA, 53 bp, Homo sapiens
  chr7:156870959-156871012
  hyper
ggcaagcttgggggcagggacgggaagcgaacccacgaggtgcagagagcaga

SEQ ID NO: 285590 - DNA, 32 bp, Homo sapiens
  chr7:157129285-157129317
  hyper
gctccaccgcaggaccgcggagcgagaggcgg

SEQ ID NO: 285591 - DNA, 76 bp, Homo sapiens; identical to SEQ ID NO: 233400
  chr7:157129624-157129700
  hyper

SEQ ID NO: 285592 - DNA, 333 bp, Homo sapiens; identical to SEQ ID NO: 201270
  chr7:157130634-157130967
  hyper

SEQ ID NO: 285593 - DNA, 104 bp, Homo sapiens; identical to SEQ ID NO: 223290
  chr7:157150797-157150901
  hyper

SEQ ID NO: 285594 - DNA, 219 bp, Homo sapiens; identical to SEQ ID NO: 201271
  chr7:157361386-157361605
  hyper

SEQ ID NO: 285595 - DNA, 74 bp, Homo sapiens; identical to SEQ ID NO: 45025
  chr7:157361751-157361825
  hyper

SEQ ID NO: 285596 - DNA, 216 bp, Homo sapiens
  chr7:157476655-157476871
  hyper
gatttttccccatgaatgcctggccggcctattcattatctctcttctattagtaattttctgctccgtattcagcctcccaactcttcatttcctcccgtctcccagcgtacacagtgcctcttatgtcaggccgggcccgtttttatcttgtaatcataaaggccaccaaagcaattatcgccggtcttgactggaaaagctggtcattaatta

SEQ ID NO: 285597 - DNA, 45 bp, Homo sapiens
  chr7:157486671-157486716
  hyper
ctgggggtcctggggcggccacggggccggcgaccccagagcaag

SEQ ID NO: 285598 - DNA, 270 bp, Homo sapiens; identical to SEQ ID NO: 223292
  chr7:157594763-157595033
  hyper

SEQ ID NO: 285599 - DNA, 169 bp, Homo sapiens; identical to SEQ ID NO: 201274
  chr7:157731890-157732059
  hyper

SEQ ID NO: 285600 - DNA, 111 bp, Homo sapiens
  chr7:158379699-158379810
  hyper
gacagagaggcgcgcgacccgtggccgggggcttgagacccagagcctgggggtgtcgcgctggaaccccgagacccccggagcccccgacccgctcgccaaggcgcgctc

SEQ ID NO: 285601 - DNA, 93 bp, Homo sapiens
  chr7:158380396-158380489
  hyper
cgcgcgggaggcggcgggaggcggccgagtccgggcccagggaggcgcgcgccgccggctcctcccgccgcgcctctcgcgctcttgcggcga

SEQ ID NO: 285602 - DNA, 136 bp, Homo sapiens; identical to SEQ ID NO: 116095
  chr7:158380510-158380646
  hyper

SEQ ID NO: 285603 - DNA, 223 bp, Homo sapiens; identical to SEQ ID NO: 233407
  chr7:158769733-158769956
  hyper

SEQ ID NO: 285604 - DNA, 85 bp, Homo sapiens
  chr7:158823224-158823309
  hyper
tggaaggaggaagccggcgtctcagccccgcagaagccccgaaccgtgggcctcccgccgcgtccgacaggcaggggtggggcta

SEQ ID NO: 285605 - DNA, 84 bp, Homo sapiens
  chr7:158823665-158823749
  hyper
cacaggagggcgggggacgctgccagactctaagactgtgcgtgggtggttcggggatcgccactgccgcggtaagcgcagtcc

SEQ ID NO: 285606 - DNA, 51 bp, Homo sapiens; identical to SEQ ID NO: 201275
  chr7:158937995-158938046
  hyper

SEQ ID NO: 285607 - DNA, 64 bp, Homo sapiens; identical to SEQ ID NO: 201276
  chr7:158938146-158938210
  hyper

SEQ ID NO: 285608 - DNA, 76 bp, Homo sapiens; identical to SEQ ID NO: 233411
  chr8:356768-356844
  hyper

SEQ ID NO: 285609 - DNA, 46 bp, Homo sapiens; identical to SEQ ID NO: 201277
  chr8:494135-494181
  hyper

SEQ ID NO: 285610 - DNA, 93 bp, Homo sapiens
  chr8:495072-495165
  hyper
cccacccccaaattcgacggggctccgaatcccatcccccacagaaaggtcaaccccggccccctcctcccagtgtggtccccgccaccgccc

SEQ ID NO: 285611 - DNA, 44 bp, Homo sapiens
  chr8:495479-495523
  hyper
ggcgtggccacgtccgctcgggtcaccaaggcaacggccgggag

SEQ ID NO: 285612 - DNA, 68 bp, Homo sapiens; identical to SEQ ID NO: 201278
  chr8:495635-495703
  hyper

SEQ ID NO: 285613 - DNA, 164 bp, Homo sapiens; identical to SEQ ID NO: 233414
  chr8:681198-681362
  hyper

SEQ ID NO: 285614 - DNA, 169 bp, Homo sapiens; identical to SEQ ID NO: 223302
  chr8:798795-798964
  hyper

SEQ ID NO: 285615 - DNA, 292 bp, Homo sapiens
  chr8:1771751-1772043
  hyper
ggagcaggctctgcggggaggatccagatgttgggggcggggagggcactcggtctgcccagcgacccctcccgaagtgagcgcggcccggggtccgcggggcaggagatgatccgggggcgggagcctctgccgcgcgccccctcccacgcgtgcgcagcctgggccgggcgttgggcagcgggagggggcgcgggcggccacgtggcctcgaaggaatgcgcgggcgcgagggcagggcgctgccgagaaaccggcaggctctgcggccaatgggcgcccggaacggtct

SEQ ID NO: 285616 - DNA, 158 bp, Homo sapiens; identical to SEQ ID NO: 233418
  chr8:2970509-2970667
  hyper

SEQ ID NO: 285617 - DNA, 98 bp, Homo sapiens
  chr8:4848954-4849052
  hyper
agtgacctcaactgcgaccgcctccagcctcacgactccgcaaacaggtcacgaattatgccccacgcatcaaaaactctgcgcctgccttcgccaca

SEQ ID NO: 285618 - DNA, 397 bp, Homo sapiens
  chr8:4849835-4850232
  hyper
aagcagccgagctagggccgccgcggtctccacgcagcaacctctgctaattgcgggggaaggcagccggagcgtgcggaactcgagggaaccgagagtgagctcagaggctgagttgcctgcctggaaaggaggaagccccgggcccagttaggcttggagtgcaggggaaagggcgggaagttttgcggagttgcgtggcaggtgtttcctctccacgcaggggctcggctggaaaaagccaggtcctgtcccttgggctcctgccctcaccccgctgcgacacacacgccccagcacacctcacagggcacaaccctcttttccctagactttagctgcctcgccttccaattcccagccagtccagtgctgaccagaggccgctgccagtcgg

SEQ ID NO: 285619 - DNA, 348 bp, Homo sapiens
  chr8:4850994-4851342
  hyper
ccagccttgaggtcgcagcctgtaggctacttagaagaaaacattccccaactcattcagggagaaaaccaagctcacagagccccaagcccaggagccacccagagaaactccttcccctgaccagcgtagaaggaggatacccgtgcgcccacagtgaatgtatctgacttggaagccggtccagaactcctagcctgtttcacgcaccttgccaacaccttacaacttgcaaggagcgaagtccgggggagaggaaagcgggggcgaccttctagaggcagctactcctcgccggctgaggacgttggagagggaaggaggagaggaggaatggggtgtatgggt

SEQ ID NO: 285620 - DNA, 117 bp, Homo sapiens; identical to SEQ ID NO: 201281
  chr8:4851375-4851492
  hyper

SEQ ID NO: 285621 - DNA, 73 bp, Homo sapiens; identical to SEQ ID NO: 201282
  chr8:4851508-4851581
  hyper

SEQ ID NO: 285622 - DNA, 125 bp, Homo sapiens; identical to SEQ ID NO: 201283
  chr8:4851611-4851736
  hyper

SEQ ID NO: 285623 - DNA, 34 bp, Homo sapiens; identical to SEQ ID NO: 201284
  chr8:4851780-4851814
  hyper

SEQ ID NO: 285624 - DNA, 87 bp, Homo sapiens; identical to SEQ ID NO: 201285
  chr8:4852588-4852675
  hyper

SEQ ID NO: 285625 - DNA, 41 bp, Homo sapiens; identical to SEQ ID NO: 233421
  chr8:6264167-6264208
  hyper

SEQ ID NO: 285626 - DNA, 149 bp, Homo sapiens; identical to SEQ ID NO: 201286
  chr8:6673901-6674050
  hyper

SEQ ID NO: 285627 - DNA, 207 bp, Homo sapiens; identical to SEQ ID NO: 201287
  chr8:6691844-6692051
  hyper

SEQ ID NO: 285628 - DNA, 224 bp, Homo sapiens; identical to SEQ ID NO: 201288
  chr8:6692462-6692686
  hyper

SEQ ID NO: 285629 - DNA, 211 bp, Homo sapiens; identical to SEQ ID NO: 201289
  chr8:6693170-6693381
  hyper

SEQ ID NO: 285630 - DNA, 72 bp, Homo sapiens
  chr8:8559447-8559519
  hyper
ggcgtggcccagccgcccggctgcaaggtggggtgtccccgccgctcggatccccatctcacctgccgcggg

SEQ ID NO: 285631 - DNA, 110 bp, Homo sapiens
  chr8:8559542-8559652
  hyper
cgctcacctcgggtccctccctcccgggccaggtttggccgcggcagccgcccctgggcgcccgcgcccggacccgcggtttcggtcagacccgcccgcgggctggtttc

SEQ ID NO: 285632 - DNA, 120 bp, Homo sapiens; identical to SEQ ID NO: 201290
  chr8:8639980-8640100
  hyper

SEQ ID NO: 285633 - DNA, 375 bp, Homo sapiens
  chr8:8750284-8750659
  hyper
cgcaggaccaggacgcgcaggctgcccagcgccgaccccagcccctcgggtacctcctccaggccgttgttccccaggttcagtgcctcaatgtccccgaggttggccggcagcacgagctggggggaggcgggggactcgagcgcgtcggccccggccccggggcaggccccggcggcggtaagcgtgagctggcgcaggttgctccgcagcttcctggcacgcagggcggcgtcccgccacagcctcgcggtcttcaggttgccactgtccatcccagccatggcggggccccgggccgacagcctcacgcggacgcgggagcccgcagctacatgccgcgccgcgccccgggccctccggctcctgcccctg

SEQ ID NO: 285634 - DNA, 462 bp, Homo sapiens; identical to SEQ ID NO: 223306
  chr8:8820810-8821272
  hyper

SEQ ID NO: 285635 - DNA, 33 bp, Homo sapiens
  chr8:9756515-9756548
  hyper
atggaaaaatgacctctccggggacagtccctg

SEQ ID NO: 285636 - DNA, 221 bp, Homo sapiens
  chr8:9760514-9760735
  hyper
aaaaacacagtcacggaggaaggtgttgacccacatacaatgagtcctgagcccagagaaaaatctgcacacacaagcactccgcaatgcgctcccaggcgaccccctccccacgcacaccgcatctgtgctgcacagatctgcttctgtcacagaatcagcttctgtttctctccctgagtctgtttgcatctctaagcccctgtctgtcacaggctgca

SEQ ID NO: 285637 - DNA, 260 bp, Homo sapiens
  chr8:9761155-9761415
  hyper
cagcatcctccccgccgcagctcccccaatcacacagacaatgagataacagcgacgtcttccaaaggctctttgttctcccccatcctttcgcatccaggctttttcctgcaaagcggagggggtggagggatgggggtgtgggtggaagtgggagacggaggggtgcctcccccgtgttaattaccccggctcccctcgcccctttccccgcgcctcgcctcccctgcagctccagacaatgaaaaaacaacatcgac

SEQ ID NO: 285638 - DNA, 185 bp, Homo sapiens; identical to SEQ ID NO: 223311
  chr8:10058672-10058857
  hyper

SEQ ID NO: 285639 - DNA, 217 bp, Homo sapiens; identical to SEQ ID NO: 233433
  chr8:10447760-10447977
  hyper

SEQ ID NO: 285640 - DNA, 210 bp, Homo sapiens; identical to SEQ ID NO: 201294
  chr8:10587212-10587422
  hyper

SEQ ID NO: 285641 - DNA, 54 bp, Homo sapiens; identical to SEQ ID NO: 233437
  chr8:10872634-10872688
  hyper

SEQ ID NO: 285642 - DNA, 305 bp, Homo sapiens; identical to SEQ ID NO: 201295
  chr8:10873136-10873441
  hyper

SEQ ID NO: 285643 - DNA, 240 bp, Homo sapiens; identical to SEQ ID NO: 201296
  chr8:10873649-10873889
  hyper

SEQ ID NO: 285644 - DNA, 253 bp, Homo sapiens
  chr8:10874042-10874295
  hyper
catccctgcctggctgccacccggaagtccccgtccgcgccccgacagcgccgccctccggctggctgcagcgcgggccctcggtagggggcgttccaaggccccgcctcctcgtcactgccacggatgacgacgccccaggcccccggccccgcctccgcctctgcctccgcggccagcactggggagcgtcctggcctgcgcttgctccccaacccctccttgccccgctctgagccggcgcgtccttgct

SEQ ID NO: 285645 - DNA, 319 bp, Homo sapiens
  chr8:10916680-10916999
  hyper
ttcgagggctcccgcggtttgggcgctctgcccctgcgctccccaagctgcgaccccctgcgctggccagcgtcgtgtaggccgggcccagcgcggtcctggcgcctcagaaatctttgttgagcgaatgaatgaaggaacgaatgacggaagtaaaaggtatgagcgccccggagactctggcttgcgttttccctctccagcccccagcgaactggagccgggctggcgcccgaagggagtccccggccgagggcagcgctcagctccgcgtccccgcgccggcgccgagaaggaggccccgcccgacaggcagctg

SEQ ID NO: 285646 - DNA, 191 bp, Homo sapiens; identical to SEQ ID NO: 201298
  chr8:10950049-10950240
  hyper

SEQ ID NO: 285647 - DNA, 376 bp, Homo sapiens
  chr8:11058799-11059175
  hyper
gctgagcgaagcccacccccacgccaccgccatcggatttcgccgccatcttgactctcttcccagctccggaggttgggggggagggacggcggggggggggggaagaaggcagggaacggggagggggggaaacgaatggagaggaaggggggcggggaggaagcgggggagcaaacgaacgaggggggagtgggccagggaaccccctccgcttccgggtagttggcgtcacttccgggcgagccccccaatcgcacggcgcccgcagctccccagccctaccctcccggccaagatggccgccctcctgtgcctcagctgctgggcgggggaccggggggttctccccgccagggctccccttcccctcttc

SEQ ID NO: 285648 - DNA, 172 bp, Homo sapiens; identical to SEQ ID NO: 45097
  chr8:11059210-11059382
  hyper

SEQ ID NO: 285649 - DNA, 124 bp, Homo sapiens
  chr8:11206068-11206192
  hyper
gggaggggtgcaggctgccaggaaaggtgccccctgcgtggccctgggggtgtttcttcctctttgtctcttcttaggcatctgatctcatctcttaagtgggaagagtcggggtggtggaagt

SEQ ID NO: 285650 - DNA, 174 bp, Homo sapiens; identical to SEQ ID NO: 201300
  chr8:11536631-11536805
  hyper

SEQ ID NO: 285651 - DNA, 306 bp, Homo sapiens
  chr8:11537283-11537589
  hyper
gagggagatggagacccccgaataatggaaacgcagaagcctcagagacaccagcaacagatagagaagtgtccctaagaggggaaaatgaggaagagggtaacagtattgttaactggccatgaattttaatccctgttgtgtgtcgccgaatagtttacaaactctttttgcactggggttttgtttctcccactccccgcatgatgagaagaaagaaagattgggagaagttaatcagctcaaagtcacatcgccggggtctcctgccagggggcttggaccagttgctaaaggacttcccgc

SEQ ID NO: 285652 - DNA, 146 bp, Homo sapiens; identical to SEQ ID NO: 233447
  chr8:11539330-11539476
  hyper

SEQ ID NO: 285653 - DNA, 170 bp, Homo sapiens; identical to SEQ ID NO: 201302
  chr8:11540256-11540426
  hyper

SEQ ID NO: 285654 - DNA, 274 bp, Homo sapiens; identical to SEQ ID NO: 201303
  chr8:11540456-11540730
  hyper

SEQ ID NO: 285655 - DNA, 278 bp, Homo sapiens; identical to SEQ ID NO: 116195
  chr8:11540851-11541129
  hyper

SEQ ID NO: 285656 - DNA, 251 bp, Homo sapiens
  chr8:11550368-11550619
  hyper
agcgccgccgagtttgcgccgcccgccgccccgcgctcgcctccagccgcctggggttccgcggcggccgtcagcgcgcacctcatcaataaggcctgccaggcgccggccccgcggccatccatcacccgggctgcacccccggccgcgcaccgaggcttctgccagcgcctgcggggcctctgcgtggagtgggccggcagcgtttttctacccggcaacaaatacatggctttattccacttcttaat

SEQ ID NO: 285657 - DNA, 37 bp, Homo sapiens
  chr8:11550701-11550738
  hyper
cggtggcgcatatttgtaatcccagcacttagtgagg

SEQ ID NO: 285658 - DNA, 174 bp, Homo sapiens; identical to SEQ ID NO: 201305
  chr8:11554711-11554885
  hyper

SEQ ID NO: 285659 - DNA, 54 bp, Homo sapiens; identical to SEQ ID NO: 201306
  chr8:11554915-11554969
  hyper

SEQ ID NO: 285660 - DNA, 162 bp, Homo sapiens; identical to SEQ ID NO: 201307
  chr8:11555521-11555683
  hyper

SEQ ID NO: 285661 - DNA, 290 bp, Homo sapiens
  chr8:11557848-11558138
  hyper
ctctcgtctgtaaccggctgcagagcacggttccgggcgaacagggcggaggctctacgtccactccgtatccccaagaaagagtgtccgaggcacggaccatagcaagtgaaggaaggtaggtcgacgtggccttgcagctgaattcgttctccatttttccttcagcagggacgcatcctgctctgcaccctggttctcggcgctgcgcccgcggaggctcgtgcagggcaggctgcccgtgcgggtgaggactgagtgccgcgcagggaaggagtatcgcagaccgg

SEQ ID NO: 285662 - DNA, 37 bp, Homo sapiens; identical to SEQ ID NO: 45110
  chr8:11559706-11559743
  hyper

SEQ ID NO: 285663 - DNA, 123 bp, Homo sapiens; identical to SEQ ID NO: 201308
  chr8:11561268-11561391
  hyper

SEQ ID NO: 285664 - DNA, 95 bp, Homo sapiens; identical to SEQ ID NO: 201309
  chr8:11665928-11666023
  hyper

SEQ ID NO: 285665 - DNA, 155 bp, Homo sapiens; identical to SEQ ID NO: 201310
  chr8:11726004-11726159
  hyper

SEQ ID NO: 285666 - DNA, 152 bp, Homo sapiens; identical to SEQ ID NO: 233456
  chr8:11801273-11801425
  hyper

SEQ ID NO: 285667 - DNA, 150 bp, Homo sapiens
  chr8:12808911-12809061
  hyper
ggccgaccaggtgctcccgccggggcgtcttctcctacgcaggaagggccacgccgagagaggcaggcaacaagggcacggctggaggccggaaggtcaccccgtccccggcggggcgggcgcggcccagcctcacttcccgggcacgtt

SEQ ID NO: 285668 - DNA, 185 bp, Homo sapiens
  chr8:12809462-12809647
  hyper
ggcccgcgcgcgcgctcccccacggccacgcgcgcaccctgccgcccgcacccccgcgcgccctccgtctattttttcctcttcctttcatcctcacactctaaaataggtcaaggggtggaagttacacctggtgcagccctcggctctgatgcaaaagcagcttttgcccctggctgcgggac

SEQ ID NO: 285669 - DNA, 60 bp, Homo sapiens
  chr8:12809799-12809859
  hyper
gggaggagggggcgcgacaggtcgtctagcgcgtgccccggagcccgcgcccgggtctgg

SEQ ID NO: 285670 - DNA, 324 bp, Homo sapiens
  chr8:12989711-12990035
  hyper
aactgtgtgtgtgtgtgtgtgtgtgtgtgtgtgtgtgtgtttcctagcaagaagcacgtttgcaagccacggggcttgctaaactaccccaacactctccaggtacctgcggccaccaaaccgagacttccctggccaggtctgagttaattcccagcgcttaaagtatcttacccaaaaatggttgaaaaggaaaacaagtttttggtgaactttcaggcagtgatgaaaaaaaaaaatttccaagcgccactagggtctaaaatgttcccaaacagtaaactctcccggagttcactttgattttggactaagctggtgaat

SEQ ID NO: 285671 - DNA, 238 bp, Homo sapiens; identical to SEQ ID NO: 201311
  chr8:12990148-12990386
  hyper

SEQ ID NO: 285672 - DNA, 68 bp, Homo sapiens; identical to SEQ ID NO: 201312
  chr8:12990431-12990499
  hyper

SEQ ID NO: 285673 - DNA, 157 bp, Homo sapiens
  chr8:12991337-12991494
  hyper
ggtcagtgtttccagatctgtaaaaacgagcgaagggtacctgtcccttggacattggttatttattgctaaaacccgcatgggtacggagccaatgtaggtgataaatactgccttagaggaattgagctttcactcggcacgtgctgggggtcac

SEQ ID NO: 285674 - DNA, 43 bp, Homo sapiens; identical to SEQ ID NO: 233460
  chr8:13424066-13424109
  hyper

SEQ ID NO: 285675 - DNA, 302 bp, Homo sapiens; identical to SEQ ID NO: 201313
  chr8:15094771-15095073
  hyper

SEQ ID NO: 285676 - DNA, 220 bp, Homo sapiens; identical to SEQ ID NO: 201314
  chr8:15095136-15095356
  hyper

SEQ ID NO: 285677 - DNA, 226 bp, Homo sapiens
  chr8:15397991-15398217
  hyper
ggtacctgcccaccgggagctttcccttccttctcctgctgctgctgctctgcatccagctcgggggaggacagaagaaaaaggaggtagaatggatccccttggccttcccctgtgggcgggggcgggccagggtgggccgcgttgccaggcagccctgccgtgttgctaggcagcctggtcgccggcgtgggcgatgccggcgctggggcgggagccgcgaggg

SEQ ID NO: 285678 - DNA, 84 bp, Homo sapiens; identical to SEQ ID NO: 201316
  chr8:16884239-16884323
  hyper

SEQ ID NO: 285679 - DNA, 128 bp, Homo sapiens; identical to SEQ ID NO: 201317
  chr8:17013473-17013601
  hyper

SEQ ID NO: 285680 - DNA, 221 bp, Homo sapiens
  chr8:17354230-17354451
  hyper
tggaaagtaaacggggggaccaaaaccccacttagaactctgcttagaagattcggaaatgcccttgaggtttggtcctcccaggagagcacgaagtttatcctcgcgcgcagcctctcttccccggcccgcgcccaccggcctagcccggggctagcgcccgcccacgtgtgctcggctccaggcaaaccccgctgagcagcggccgcacaccgcccacc

SEQ ID NO: 285681 - DNA, 544 bp, Homo sapiens
  chr8:17354600-17355144
  hyper
ttctgcagcgcggccggcgggcgctcctcttcgcgggaccagcgaggcggcggccgctgctccagcgtcccccagccgcgggcccccgacgcgctgcagccggcagcccaccgccgccttcttggcgcgaccccaacccagccccagtaagttgctaggtctccagccccgccgagaggccgcgggcgaggggcagcccggacgctggggccggcggggaaggagcggggcgagggcgccctggggccggcggggaactagagggtcgagggctcccggggacgagtccagctgcgcgcagctgccctgaggccgcgctccagcgagtcttcgtcagggagtcggggccgtgggctggggctgaagccgtggaccttcgtcctcggggctgcgccccggaatgcgcctcgcctcgtccggtccctgtgcagccggctctgcccggggacttcggggaccgctggaactgggagaggggctggcacggcgacttcgcggggacccttcagtcactatttccagaggagctcggcgcacccctctc

SEQ ID NO: 285682 - DNA, 399 bp, Homo sapiens
  chr8:17434527-17434926
  hyper
ggaagaagtgctgcgcaccgcggctccgccagggggcaggagaagtcacattacacagagaactaaaaaaaaaaaaaattccccaactttttcccccaaaccttgttcctcctgaagaaaccgaatcctcccgcttcggcgtcccaggagcccgcccctcgcccgccgcctcccctgcgtccccgccccgcgcagccgccgcgctcctgcgctccgaggtccgaggttcccgagatgaaggtctggctgctgcttggtcttctgctggtgcacgaagcgctggaggatggtgagtgactctgggcgcggggccacctagcttgtgccctgactttagccgggacccgaagcccccgccgccctcctgccagctcttggtctaacgttcggccctcggtg

SEQ ID NO: 285683 - DNA, 1354 bp, Homo sapiens
  chr8:17657928-17659282
  hyper
gtatgtgtaactacgcaggctaaatgaattaacctcttccttcctagtcccaaattactccaagtcaaaaatcaacaaacaacttggtagaaaggagtacgtcttcaaaaaagaacaaaaacgttcctcagtgaacacctaagtccactaagcactatagagtagtcaataaggtcaccttaattaagatgagatttttctagagcgtgaaaaagtgcaaacaagctgcagaaagtagcgaggcgccacgaggggtctttgggacctgcagcaaccctattccacccgctttctcggccccgcttgcttctgctgagaaggggccctgcgagaaggctgggaccgccgggcccgggtgggcggcgtaaggagtccacagtcaagcccctcggtcactttcaaggtgacagcgacgagatccgcatccgtcccttccgcaggctctgcgctggcccacgtgagacccgcctccgctccgccggcgctgccgccccctttagccctcagcttcggcccccaggcccctggaacgccccctcccctccccgaggaccggtcccgtcaccctgggcggcgcgctcgcctgtcccctccccaccccggccgccgggcagcgggaacagattccagcgcgcacttacccgcagctccttcaagcgctccgggagcaaagacgcagaggcggggagggctggcgccctttgcaccactggcggggtcgccgagaacccgccccggaggtctcgggggcggcgtctgcacctgggggcgcgcggcgcggcaccaccccacgcctgcggcggctaccaggcgggacccggagccccggcctccccgcctccccgcctccggggccgccagggggtggagcagggcggggagttcgggaaacttgtaaatagccgaactcgggcctcccgccccaacccggggcggctccttccgaaggctccactccagcggctcgctgcgggagaccaaggccagccgccgtcccaggggacggccctcggggaacctgaatgacgtgcgaggccgtacctcggggcgctggactccgctcgggcgctcccgctctccgctcccgctctcgggtcccaatcccgacgctccgcgcgctcccggactaagtgcggacgcgccccacgccccccggcgccagcccgggacagcgctgcacctgttgccacgtgcgacgcggcgctcagcggctgccactgccgccggcgcacctggctgcaccgcgcgtcccgggaccacgctcgtccccgcaggagcccggggctccgccgcacccagcgctagggcccaggccgggccgcggtaggtgggggatctgactcctgcttgcctc

SEQ ID NO: 285684 - DNA, 90 bp, Homo sapiens; identical to SEQ ID NO: 201320
  chr8:17659329-17659419
  hyper

SEQ ID NO: 285685 - DNA, 91 bp, Homo sapiens; identical to SEQ ID NO: 233468
  chr8:17780092-17780183
  hyper

SEQ ID NO: 285686 - DNA, 294 bp, Homo sapiens; identical to SEQ ID NO: 233469
  chr8:17940760-17941054
  hyper

SEQ ID NO: 285687 - DNA, 40 bp, Homo sapiens; identical to SEQ ID NO: 233470
  chr8:17941543-17941583
  hyper

SEQ ID NO: 285688 - DNA, 373 bp, Homo sapiens; identical to SEQ ID NO: 233471
  chr8:17942225-17942598
  hyper

SEQ ID NO: 285689 - DNA, 1085 bp, Homo sapiens
  chr8:18870212-18871297
  hyper
atactcaattacaacgaacgcattgaggcatttgttgccagaatcccacttacagtaattttccagatctccgtcttccctacaccaacacctggacccactcaagagttattctggagcggaaatcctggatcccgctatcgggagaaccagtgtctagaaaatgaaatcgtggtgcccattccatcctctgcctagtgggcgtttaacatcctttgacatcgaggggaatggcaaaacgaaacatttattatttaggtcaccaacaacattctaaacccacgtcctctaatcggtgttaatgtgtttaaaaaaaaaattcagaacatcattcgccagaacggaaagctgaaaacggcggataaagttaaatgcatgtaaaacagaatgacttaaacatctgtaaaagctcctgggaattgcaccgaataatcttcccttgtccgtttgctcgctcaattcaagtttgtttagtttagtctttttttctttctttctgacagaaacgtgatagtccctaaatacaagctgaccgggcaaagaaagatcggcatacgaggtcctctttcatgttgccttcttttgatagcttttctccaaagtctgaggttttcaaagccgaggtatgaactaaaacccctaaaccttaacaccacaaagttgaccctgctgggctcctaaaaaacacaaagcaagcaagcgcgaagagaaaaatcgcaccctgcacctatccagacagcacaaacccaggtggccccgggatcctgggggacagagcggcgacaaagcaacacaaaccccacgtcgaacagcggcgccgcgtgcgcaccccgcgcccgcgccccggccccggagctcaccgctgcgctccttccttccatcttccatcgccagcccggccgcgcgccgaaaccgccgccgggcgctccggggccgcagcctcagggcgcgagtgccggcggccagcgccgcgtgctctttgttgagctcccgggactgccgagaggcggcggcccgcgcgcaccctggcggaggctggcgaggctgcgagcccgcggcagccgcccgcccggcccccagtaacg

SEQ ID NO: 285690 - DNA, 390 bp, Homo sapiens
  chr8:18871577-18871967
  hyper
tgctttgtcttcttccttcacagttttcccaccctgagaaaagtgagaggtgctttccctggtgtttcctctcaggaagggccgtgtgactggagccgcgagttgggcgccgtctcgccggggctggaggtacgcgggcttcgggacacgcacctaggcgtccctcggggtcccggcctctctgaccgggctcccccggcaccgatccgcggccggagcgtttagtcccggggacccgtcgagccctgaaagggccatttccccctgaggcgagtccccccaggcgccccgcagcctggcctcgggactgcccccaccgacagtgcgtgcgcggggagaggtcacttaaaactgcattttcgaacattagtgccccggacccgcaccttt

SEQ ID NO: 285691 - DNA, 70 bp, Homo sapiens; identical to SEQ ID NO: 233475
  chr8:19125228-19125298
  hyper

SEQ ID NO: 285692 - DNA, 1009 bp, Homo sapiens; identical to SEQ ID NO: 233476
  chr8:19171054-19172063
  hyper

SEQ ID NO: 285693 - DNA, 56 bp, Homo sapiens
  chr8:19615264-19615320
  hyper
aactttgtaaatcgcacttcggggaattcacgctttagtcgcggtctctgctgccc

SEQ ID NO: 285694 - DNA, 163 bp, Homo sapiens; identical to SEQ ID NO: 233478
  chr8:19674699-19674862
  hyper

SEQ ID NO: 285695 - DNA, 610 bp, Homo sapiens; identical to SEQ ID NO: 201323
  chr8:19796823-19797433
  hyper

SEQ ID NO: 285696 - DNA, 70 bp, Homo sapiens; identical to SEQ ID NO: 201324
  chr8:19798019-19798089
  hyper

SEQ ID NO: 285697 - DNA, 147 bp, Homo sapiens; identical to SEQ ID NO: 233481
  chr8:20054942-20055089
  hyper

SEQ ID NO: 285698 - DNA, 215 bp, Homo sapiens; identical to SEQ ID NO: 233482
  chr8:20126214-20126429
  hyper

SEQ ID NO: 285699 - DNA, 241 bp, Homo sapiens; identical to SEQ ID NO: 233483
  chr8:21776837-21777078
  hyper

SEQ ID NO: 285700 - DNA, 363 bp, Homo sapiens; identical to SEQ ID NO: 233484
  chr8:21779567-21779930
  hyper

SEQ ID NO: 285701 - DNA, 82 bp, Homo sapiens
  chr8:21868699-21868781
  hyper
gtcccacaaaagttcggaaaatagtagaaagggggcgacgaatggtggctcatgcctgtaatcccagcactttgggaggccg

SEQ ID NO: 285702 - DNA, 518 bp, Homo sapiens
  chr8:21882027-21882545
  hyper
cacctgggaactggttagaactacaaattccctcggccccacccagaccgacgccaagggcagctgtggagtggggcgcggcaatgcgccccttaacagccctccaggtgattctgccgcgcagaggaggaaagaatgggagaagggaaggggagagggaggcggcttctttgcgactaattggacacctgcccttccccttcccaggcttcttagcccgggcttggacagccgccttccggccagaggggatgaggttgcgctgcgctccgggagcgccgatggcgtgactggccccgcgcggagcagcgacagtaaggctgtgtggggggagctgggacctaagccgcgcgcacacccctttctctgcgtctggtggaggtgcacagaggcttttgagtcaggcccaagcgcagccaggtgacctccccgcggcctttcaagcctgagctcggtggacagctccctctcccgtgagtcccgctgtcctgtacgcgcccggtcgagccccgggctgc

SEQ ID NO: 285703 - DNA, 124 bp, Homo sapiens; identical to SEQ ID NO: 201326
  chr8:21906319-21906443
  hyper

SEQ ID NO: 285704 - DNA, 100 bp, Homo sapiens; identical to SEQ ID NO: 201327
  chr8:21987761-21987861
  hyper

SEQ ID NO: 285705 - DNA, 337 bp, Homo sapiens; identical to SEQ ID NO: 201328
  chr8:21988075-21988412
  hyper

SEQ ID NO: 285706 - DNA, 206 bp, Homo sapiens; identical to SEQ ID NO: 201329
  chr8:21988468-21988674
  hyper

SEQ ID NO: 285707 - DNA, 328 bp, Homo sapiens; identical to SEQ ID NO: 233488
  chr8:22102411-22102739
  hyper

SEQ ID NO: 285708 - DNA, 451 bp, Homo sapiens; identical to SEQ ID NO: 233489
  chr8:22224959-22225410
  hyper

SEQ ID NO: 285709 - DNA, 244 bp, Homo sapiens; identical to SEQ ID NO: 233490
  chr8:22298226-22298470
  hyper

SEQ ID NO: 285710 - DNA, 235 bp, Homo sapiens; identical to SEQ ID NO: 233491
  chr8:22298921-22299156
  hyper

SEQ ID NO: 285711 - DNA, 442 bp, Homo sapiens; identical to SEQ ID NO: 233492
  chr8:22299371-22299813
  hyper

SEQ ID NO: 285712 - DNA, 107 bp, Homo sapiens
  chr8:22408652-22408759
  hyper
acccttatcctctttaggggcgcggcacgcccgggggggccgctcccttgggctgatttcctccctgtgcttgcacgtgtgtgagcgtccccacgtttgcagtgtac

SEQ ID NO: 285713 - DNA, 142 bp, Homo sapiens
  chr8:22409076-22409218
  hyper
gccagccctgcggtaggggccgggatggcagctgggaaaccagagagggctccccggggaccctcggcggcccctcccggcgccgcctccccgccggccaggcctcctcggcagggggccaccagtgtccccgcgcgcgccc

SEQ ID NO: 285714 - DNA, 142 bp, Homo sapiens; identical to SEQ ID NO: 116287
  chr8:22409253-22409395
  hyper

SEQ ID NO: 285715 - DNA, 70 bp, Homo sapiens; identical to SEQ ID NO: 201331
  chr8:22419405-22419475
  hyper

SEQ ID NO: 285716 - DNA, 892 bp, Homo sapiens; identical to SEQ ID NO: 116290
  chr8:22436855-22437747
  hyper

SEQ ID NO: 285717 - DNA, 217 bp, Homo sapiens; identical to SEQ ID NO: 223331
  chr8:22550331-22550548
  hyper

SEQ ID NO: 285718 - DNA, 256 bp, Homo sapiens; identical to SEQ ID NO: 223332
  chr8:22550912-22551168
  hyper

SEQ ID NO: 285719 - DNA, 226 bp, Homo sapiens; identical to SEQ ID NO: 233496
  chr8:22552610-22552836
  hyper

SEQ ID NO: 285720 - DNA, 168 bp, Homo sapiens
  chr8:22613669-22613837
  hyper
ccttgcgaggctagcgtgggatggtctggagacaaggtggcaagactcaggcaggagctgaacagctggcgcctccttctggcctcgcagggctggagcaggactggggagggcgggcttgtgcgagaacctctgcccctgggctcccaggatgtgaccctccctgcc

SEQ ID NO: 285721 - DNA, 55 bp, Homo sapiens
  chr8:22613867-22613922
  hyper
caggagagctaacagtgagcgagggaggctgttatgtaaccgactgaactcctcg

SEQ ID NO: 285722 - DNA, 65 bp, Homo sapiens
  chr8:22722458-22722523
  hyper
atgaggccccttcacggccactagggggcaggagtgcggggcgggcagcacgagggggcaggtgt

SEQ ID NO: 285723 - DNA, 568 bp, Homo sapiens
  chr8:22722724-22723292
  hyper
agcctggggggcggcgggagggggagggaaggtgtttttgcgaaaatgacaaaacaactccttgctcagggcagcccgggaagagcggcgggcggatgggaattaccccgggtccccctgcggcgtctcccgctgcccacccacgggcggtgacggtggcggtggcggtggcggcggcgggaccccgggcctggctgcgcgctccacctgcgcctccagggcgttgggcgggggccgcactttccccgccgcgaggtggagcgcgccaccgcccccccggccgcgcagcgagaaggagcctcggggaagagctaaaaaaggcaaggcgctgctgccggtgccggtgccgcagccgccggggaaggaattccctccgcccgggcgcacgcggccccccgcccccgccccatcctgctcagaaaagcctcggatgctgcccgggaggaggaggcaaaggaagactccgttccagccacctcccgccgcccggatcccagaggaaaggggagaggaatctccccaccggatctggtgggcggaagatgggccacgcgggaaggagatcggc

SEQ ID NO: 285724 - DNA, 309 bp, Homo sapiens; identical to SEQ ID NO: 223333
  chr8:22925472-22925781
  hyper

SEQ ID NO: 285725 - DNA, 31 bp, Homo sapiens; identical to SEQ ID NO: 233501
  chr8:22926895-22926926
  hyper

SEQ ID NO: 285726 - DNA, 131 bp, Homo sapiens
  chr8:22960452-22960583
  hyper
cctctccacgcgcacgaactcagccaacgatttctgatagatttttgggagtttgaccagagatgcaaggggtgaaggagcgcttcctaccgttagggaactctggggacagagcgccccggccgcctgat

SEQ ID NO: 285727 - DNA, 135 bp, Homo sapiens; identical to SEQ ID NO: 201335
  chr8:23021590-23021725
  hyper

SEQ ID NO: 285728 - DNA, 102 bp, Homo sapiens; identical to SEQ ID NO: 201336
  chr8:23082555-23082657
  hyper

SEQ ID NO: 285729 - DNA, 172 bp, Homo sapiens; identical to SEQ ID NO: 116316
  chr8:23082729-23082901
  hyper

SEQ ID NO: 285730 - DNA, 201 bp, Homo sapiens
  chr8:23261046-23261247
  hyper
tctcccgacccgtcccccgcgtgccccactcctcaaagccagaattccggagacgctgtccctggagccacgctgcactctccaagacgcccagcacacaccgagacttgacgggctctgtcccgcctgattacgggcgctcgggacgatccagggacccagcgcctcgctccccgggcgcgccagcagccgcgccgcgcc

SEQ ID NO: 285731 - DNA, 76 bp, Homo sapiens
  chr8:23261271-23261347
  hyper
cggggccgcccggggcggcaggaggacccgttagcctgcacgtcctcgcatcgctccccgcaagaagtctttggga

SEQ ID NO: 285732 - DNA, 338 bp, Homo sapiens
  chr8:23386092-23386430
  hyper
ggggacggattttccccgagacactgtcacccatgcctccagctctgggcataccccactgcggcccctccccaatgacctcccctgcccctcgcggaccagcccatcctcaagatagtacaactttccgggccaccccacgtctcctctcgcccccgtccggttgcttggaaatgtgcacgggacggtgacgtcacacagggaggcgggtccccactgtcccgcacaccaatggcgcggcggccgccggcctcttggttcccggcgattggtgtctctggccgctgcgctccaccccagcccgccatggcgtcaggcgccgcggccccggggaggtg

SEQ ID NO: 285733 - DNA, 44 bp, Homo sapiens; identical to SEQ ID NO: 201339
  chr8:23539860-23539904
  hyper

SEQ ID NO: 285734 - DNA, 47 bp, Homo sapiens; identical to SEQ ID NO: 233508
  chr8:23540842-23540889
  hyper

SEQ ID NO: 285735 - DNA, 182 bp, Homo sapiens; identical to SEQ ID NO: 116333
  chr8:23563265-23563447
  hyper

SEQ ID NO: 285736 - DNA, 92 bp, Homo sapiens; identical to SEQ ID NO: 201340
  chr8:23563699-23563791
  hyper

SEQ ID NO: 285737 - DNA, 182 bp, Homo sapiens; identical to SEQ ID NO: 201341
  chr8:23564470-23564652
  hyper

SEQ ID NO: 285738 - DNA, 159 bp, Homo sapiens; identical to SEQ ID NO: 233513
  chr8:23568380-23568539
  hyper

SEQ ID NO: 285739 - DNA, 60 bp, Homo sapiens; identical to SEQ ID NO: 201342
  chr8:23572273-23572333
  hyper

SEQ ID NO: 285740 - DNA, 38 bp, Homo sapiens
  chr8:23585198-23585236
  hyper
acctgcacctgccccgcacctaccccacatctgccccg

SEQ ID NO: 285741 - DNA, 121 bp, Homo sapiens
  chr8:24272711-24272832
  hyper
ataatgttgacagcagcaaagcccaggtctccatcttctgttgaatcctaggtgataacgtaacccgcggagaacggctttactgcaggcctccggctgtgctggtcgagccgtatgtgag

SEQ ID NO: 285742 - DNA, 972 bp, Homo sapiens
  chr8:24771632-24772604
  hyper
cgaccgctttgccggctacatagagaaggtgcactacctggagcagcagaataaggagattgaggcggagatccaggcgctgcggcagaagcaggcctcgcacgcccagctgggcgacgcgtacgaccaggagatccgcgagctgcgcgccaccctggagatggtgaaccacgagaaggctcaggtgcagctggactcggaccacctggaggaagacatccaccggctcaaggagcgctttgaggaggaggcgcggttgcgcgacgacactgaggcggccatccgcgcgctgcgcaaagacatcgaggaggcgtcgctggtcaaggtggagctggacaagaaggtgcagtcgctgcaggatgaggtggccttcctgcggagcaaccacgaggaggaggtggccgaccttctggcccagatccaggcatcgcacatcacggtggagcgcaaagactacctgaagacagacatctcgacggcgctgaaggaaatccgctcccagctcgaaagccactcagaccagaatatgcaccaggccgaagagtggttcaaatgccgctacgccaagctcaccgaggcggccgagcagaacaaggaggccatccgctccgccaaggaagagatcgccgagtaccggcgccagctgcagtccaagagcatcgagctagagtcggtgcgcggcaccaaggagtccctggagcggcagctcagcgacatcgaggagcgccacaaccacgacctcagcagctaccaggtaggaaccgcggctgcgcggccagcctgcgccagcgccagcgccgcgcgcccccgacacttgggctcgtgcccaggcgccctctccgccgcgctccctggtggccgctcgctagagcacgcgcgccgcagacctagggtatttgcggatcagcgtcctcgcccatctcatcctccacactccgcccccacccacctgccccagctgctaagggtctt

SEQ ID NO: 285743 - DNA, 477 bp, Homo sapiens
  chr8:24772741-24773218
  hyper
tttccggcagtgatcggaagagctctcaaaattggcttcagcccaaagggctcagatgggaatggccaggtcagccatggagtttccccatgcatgtttgtgtcctgttgagacgtgttctaagtccactggtctccgtgcgtgatgtgcccaggaagtgtcctattgtcttactgatcttgtatgttcatttgagaatcgcttagatttaaaagaaaaagggggtgggacggggggctgggagtcaggtgtcagcgaggtttgcagaagtggagggagacgggaggaggccagggggaaggggtagcaagtggtttgcgaaggaagttgctgtttgcaaggatgagtctggggagattctctgtgtctgtttcaggacaccatccagcagctggaaaatgagcttcggggcacaaagtgggaaatggctcgtcatttgcgcgaataccaggacctcctcaacgtcaagatggctct

SEQ ID NO: 285744 - DNA, 304 bp, Homo sapiens; identical to SEQ ID NO: 201345
  chr8:24812836-24813140
  hyper

SEQ ID NO: 285745 - DNA, 273 bp, Homo sapiens
  chr8:24814787-24815060
  hyper
cacacacacacactcgtgaaactgcggcactactgcaggtattggtttagcatttttaaacctttacagcagttaatccgcctgttagtgtttctagattttcacatttcttaactgagaatgaagccgcagatggctttaacgtgttgcagtgtgtgggtggtggagggcagagaaagagttggaaacacagagactgacttgctgaggcagccgcgcgctccgcagccgggagcttcaagctgcctggatcctcaccaagctaaattcctg

SEQ ID NO: 285746 - DNA, 53 bp, Homo sapiens
  chr8:24815435-24815488
  hyper
gtcccccaggtttcatggagggattgcagagatttacacgaaacacctaagat

SEQ ID NO: 285747 - DNA, 80 bp, Homo sapiens
  chr8:24816311-24816391
  hyper
cttaagtccatcagcgttttttttctttctttctttctttttttttttttttttttttctttttttccgcggctcctccc

SEQ ID NO: 285748 - DNA, 302 bp, Homo sapiens; identical to SEQ ID NO: 201346
  chr8:25041946-25042248
  hyper

SEQ ID NO: 285749 - DNA, 250 bp, Homo sapiens; identical to SEQ ID NO: 201347
  chr8:25042284-25042534
  hyper

SEQ ID NO: 285750 - DNA, 63 bp, Homo sapiens; identical to SEQ ID NO: 201348
  chr8:25042567-25042630
  hyper

SEQ ID NO: 285751 - DNA, 106 bp, Homo sapiens; identical to SEQ ID NO: 201349
  chr8:25042631-25042737
  hyper

SEQ ID NO: 285752 - DNA, 442 bp, Homo sapiens
  chr8:25042833-25043275
  hyper
ggagtaggtgaccagcccgggtcggcacatggactggtgctcattgtcccagtgctttctgccccccgctttcgtaggttcttctcagacgccccttaagtgaggagttgagggtggaaagccgccctgccccctttcctccagagactgggatcttgatgacagttgtgagctggatggaaactagagtcgtggcgtggaagtgatggaagggacaggaagttgtggcacgggaagggggtggctggcccctggggctgtttgtgcgcactcatcccctaacggagcctgtctggagagggtgtaaggctgccttccggatcctgagtttcatcctggagacgagaagaggacattttattaaggaaactgtgccagaccccgtgctgggcacttggcattcagaacagcggtgctggagagccccgggttgtgcgcaggg

SEQ ID NO: 285753 - DNA, 121 bp, Homo sapiens; identical to SEQ ID NO: 233525
  chr8:25316378-25316499
  hyper

SEQ ID NO: 285754 - DNA, 229 bp, Homo sapiens
  chr8:25897085-25897314
  hyper
ccccggaaatgagccgctggaccctctggtggtccctcgcccagactaggagtcgttccagggctttcactcagtaactccaagtggagttactggaaatctaccacaagaggcccggcgggaactccagccgatcccaaacccggcccggggttgcccagcccgcttccaccactaccactgacaagggcacagtggagactttccacgtagccggaggaaactcctg

SEQ ID NO: 285755 - DNA, 36 bp, Homo sapiens
  chr8:25898087-25898123
  hyper
gggtcagagacaggcgaagagaagccaagtggcctc

SEQ ID NO: 285756 - DNA, 74 bp, Homo sapiens; identical to SEQ ID NO: 45220
  chr8:25898395-25898469
  hyper

SEQ ID NO: 285757 - DNA, 636 bp, Homo sapiens; identical to SEQ ID NO: 233528
  chr8:25899444-25900080
  hyper

SEQ ID NO: 285758 - DNA, 144 bp, Homo sapiens
  chr8:25902185-25902329
  hyper
cggagagacagaccgtaagagcgagagacagcataataattgcgcggccgtgtcgttacctctgcgcggcgacattagcgtccaccactccgacattccggacccaggacctgaccgaatccatctccgcgcccagcgatttct

SEQ ID NO: 285759 - DNA, 499 bp, Homo sapiens
  chr8:25902969-25903468
  hyper
tttgcatggacgcgcgggattggccggcgcctggcaagccgggccgacgtcctccggcggcgcgcgccacgctctgcgttgccgggactccgggaggtgaaaggggacagaaagctgcgggcgtcgagtcctagcacgaaccccgtgtgcttgcgcaggattggggggcccccacaccctgcactgacttagggtagcaggtctctgcgggctggggacgcaggggttcggcctggctgcgggaagcctccctggatcctgcctctagatgtaggcttttgtagcctgccgggaggcacgttcgttcccggggttcggatctgtgtgcatgcttgtgagcgtggccacatgtgcttatgttttgcgcaaacgtcccccagagcacccagctccctgaatggctccccaggtctcctggagttccatggtgatatcagatgttgtgtgcggcttgcacgttgctgagagtggagaacatatgaaagaaggcgggggatgg

SEQ ID NO: 285760 - DNA, 85 bp, Homo sapiens
  chr8:25904367-25904452
  hyper
ggtccgaactgcggagattcgcttgaaaacggatagggggttagggagtttgcggggcgggtgcacggaccgtctctgcacaggc

SEQ ID NO: 285761 - DNA, 94 bp, Homo sapiens
  chr8:25904804-25904898
  hyper
tttataaatctctccgaacctcaagcaactcccccccacccccttcgtctggggtctgcgcccagcggggccaaagccttgagttccttggcag

SEQ ID NO: 285762 - DNA, 155 bp, Homo sapiens
  chr8:25905838-25905993
  hyper
cccgggtcaagaaaaatccaaaatgaacactatgattaaaattattcacaatctatttatacaaaactgggggtgtctgtcttttaccctgtccccttcttcatttacccttcccaaatgaccctcacccccgtttttttcatgtttctgtttca

SEQ ID NO: 285763 - DNA, 231 bp, Homo sapiens
  chr8:25906743-25906974
  hyper
cagaaatactgagtcgtggaggaacgttttagagacacttgatgtcggttgtatccaggccagtcggggcactgcagtaagtttacccaaaatagactggaggagccagattcaccgctaccctaacacttggcaactccagaaagtcttcctcctcgtcttcctctcctctgctcctcctccccctggtattctccttcagaaatatccctctttcccatctccttattc

SEQ ID NO: 285764 - DNA, 210 bp, Homo sapiens; identical to SEQ ID NO: 201353
  chr8:25907061-25907271
  hyper

SEQ ID NO: 285765 - DNA, 290 bp, Homo sapiens
  chr8:25908102-25908392
  hyper
ggggtcagctgcaaatatggcaccatctagaatttcattccatttagcactaggcaacctcctcctccaacacacacacgcactcgcacaccatcacgatcacctccacctacactggcacacctcactcaggtggcaagagagaaaatccaggaaagtcacttgcatagagtgcacggatttcaagaagtctttgacggtgcaaactggacttctaatcatgggatctctccaaacacagcccaaggcctagaaattccatttctggctcacggaaccttccaccccca

SEQ ID NO: 285766 - DNA, 261 bp, Homo sapiens
  chr8:25908517-25908778
  hyper
gcagctccataccaccctcgaagggggacacaacttccacttactcttttctcccaaaggagagcagatgggggtcacagggcttgggggtcactgcgttcagacagtcaccccgcgcggtaagtgcttagagcaacgtttatagggcaatgctggcctcgccgcgtaggggtcgctggactaaatgcccagaaaccctcacaacccgtgatgtccactttccgtggatctgaacccgggcaagttcggtcgtttctgttg

SEQ ID NO: 285767 - DNA, 82 bp, Homo sapiens; identical to SEQ ID NO: 201354
  chr8:25910858-25910940
  hyper

SEQ ID NO: 285768 - DNA, 311 bp, Homo sapiens
  chr8:26148759-26149070
  hyper
ccccagagccccggcgctagtgctcgaggctgggacactgctaggtgcacacagccgcggcctggcgcaggcggtgcggacagagggtatgccatggcgagacgctggcgcggcgcaggccctgccggccgggacacggagggcggggcacaggcgcagcaggaagggggcgtggccaagagccgcccggccgctcccccgcccctccccctccgctctccgccccagcccggcggctccgccccctaggtgacgtcactggccaggccagccggcgccattttgaaagtggagtcgcctgcccctgccgc

SEQ ID NO: 285769 - DNA, 66 bp, Homo sapiens; identical to SEQ ID NO: 201355
  chr8:26150336-26150402
  hyper

SEQ ID NO: 285770 - DNA, 105 bp, Homo sapiens
  chr8:26305932-26306037
  hyper
tggtgcagccggctcgtttttacctcgtctgtgctctgtgtttggggtgtgtcctgcggcaccgtccctgagcgctggaacgtgcgcggccccgcagggcagtgc

SEQ ID NO: 285771 - DNA, 50 bp, Homo sapiens; identical to SEQ ID NO: 201356
  chr8:26370013-26370063
  hyper

SEQ ID NO: 285772 - DNA, 166 bp, Homo sapiens; identical to SEQ ID NO: 201357
  chr8:26370101-26370267
  hyper

SEQ ID NO: 285773 - DNA, 68 bp, Homo sapiens; identical to SEQ ID NO: 201358
  chr8:26370481-26370549
  hyper

SEQ ID NO: 285774 - DNA, 205 bp, Homo sapiens; identical to SEQ ID NO: 201359
  chr8:26371212-26371417
  hyper

SEQ ID NO: 285775 - DNA, 270 bp, Homo sapiens; identical to SEQ ID NO: 201360
  chr8:26372150-26372420
  hyper

SEQ ID NO: 285776 - DNA, 64 bp, Homo sapiens; identical to SEQ ID NO: 223345
  chr8:26435020-26435084
  hyper

SEQ ID NO: 285777 - DNA, 220 bp, Homo sapiens; identical to SEQ ID NO: 233547
  chr8:26435404-26435624
  hyper

SEQ ID NO: 285778 - DNA, 604 bp, Homo sapiens
  chr8:26436194-26436798
  hyper
gactcctccagcagcgatggggagatggggacttggatcctccccgggtcttccgcccccacccaaaaagggctttctggagccttctccgggtccttggaaaaaggagcgggtttgagccctaaggcgtaatgacagcagagggatgctgaaaagggcagggtgtaccggaatggtgtggaaacgggaaggaaaaacagggacgaggtgatgagcagaggaggaaggcggggggcaaggcgggggcttcttgttggccaggaaccggttttgggtgccccccccccggttttctcgccctgtagttcggggctggggccctggcggggattcgggctctttttcacgtctcttttccgccccttctgccgctcaggaggcgtccgtgttggtgcatacaaagcggactgcagggtgggcgcggggaccgcggcgagcggccgggcgctaatggcgctgcgcgacgcgggagcagatggcccggccccggccagacaatgatcgcggcggccggagggctcggcgcagtgctggggcctggacttgttggtttgcaaaccacggggaaaacgtctgtgccgtgaattagcgatgcctcagagat

SEQ ID NO: 285779 - DNA, 340 bp, Homo sapiens
  chr8:26724653-26724993
  hyper
tgcattttttaaaaagagtcaaaataagaaaagaaaaaaaaatgcagataaccggtaactccacaatcacccttttaatattcagctccccgacaccagaaaagaatagcaaggaactttgcagctctcgctgacgtaactcaggcagtagcccagctagtaccgtaatctcctgctgctaccgtattactctacggcaacaggcacaagtgcgtatacagctgtaatgttttcctctggcctagagggggttgggttctagcgtttctttaaaaaggtttgtgtgtgtgtgtgtgtgtgtgtgcgcgcgcgcgcgcgcgtgtgtgtgtgtagagtcatt

SEQ ID NO: 285780 - DNA, 78 bp, Homo sapiens; identical to SEQ ID NO: 201364
  chr8:27168528-27168606
  hyper

SEQ ID NO: 285781 - DNA, 156 bp, Homo sapiens; identical to SEQ ID NO: 233550
  chr8:27168866-27169022
  hyper

SEQ ID NO: 285782 - DNA, 250 bp, Homo sapiens
  chr8:27327202-27327452
  hyper
aggaaggagcagggggaaagcggtgggtggtctgggatctccttcctcgggccagcggtgggaagacaggcgcaccacatcgatgagctgagcgatggacagtccaaagcgcacaatcaccacgtctgaagtgttgggcaccgggcgcgcccagcggttgtagccccggaagaggtgtttgaagagccggtcctcagtctcggtatgcgagcctccctgcggcaatgccgtgggactgggagaggagagt

SEQ ID NO: 285783 - DNA, 204 bp, Homo sapiens; identical to SEQ ID NO: 201365
  chr8:27348568-27348772
  hyper

SEQ ID NO: 285784 - DNA, 38 bp, Homo sapiens
  chr8:27449813-27449851
  hyper
ccccgtcctcaggccgcttcctttcctggtttccaggt

SEQ ID NO: 285785 - DNA, 181 bp, Homo sapiens
  chr8:27449881-27450062
  hyper
ctaagcccaagtcgccgtgagcccgcgctgcccccttgtggccaaagccctccccagctcaggaaacgggaacgcttggcggccaggctgagagtcggtgcgcgtgacccggcttctgctcgcagcatccaagaagttgcaataacgtggaaggatggggaacggcgcctccctggctagc

SEQ ID NO: 285786 - DNA, 90 bp, Homo sapiens; identical to SEQ ID NO: 233553
  chr8:27472371-27472461
  hyper

SEQ ID NO: 285787 - DNA, 127 bp, Homo sapiens; identical to SEQ ID NO: 201366
  chr8:27491564-27491691
  hyper

SEQ ID NO: 285788 - DNA, 31 bp, Homo sapiens; identical to SEQ ID NO: 233555
  chr8:27950284-27950315
  hyper

SEQ ID NO: 285789 - DNA, 226 bp, Homo sapiens
  chr8:28242659-28242885
  hyper
ctgcaggaatcccccgcgcctggtagcctggcatcatgggaacgcctgcccggtggaagtcctccaaggccacagggagctggccagggctgcccaaaaccgggaggcggcggcggccccccttcccgctggccaggtgggcttctttaggtctctgagtcagttccaaagtgaaggcgctgagccctgcactcccaggcagggaagaaaacgctgccttggaaat

SEQ ID NO: 285790 - DNA, 78 bp, Homo sapiens; identical to SEQ ID NO: 201368
  chr8:28258795-28258873
  hyper

SEQ ID NO: 285791 - DNA, 384 bp, Homo sapiens; identical to SEQ ID NO: 233557
  chr8:28347827-28348211
  hyper

SEQ ID NO: 285792 - DNA, 113 bp, Homo sapiens; identical to SEQ ID NO: 233558
  chr8:28352545-28352658
  hyper

SEQ ID NO: 285793 - DNA, 126 bp, Homo sapiens; identical to SEQ ID NO: 201369
  chr8:28560085-28560211
  hyper

SEQ ID NO: 285794 - DNA, 562 bp, Homo sapiens; identical to SEQ ID NO: 233560
  chr8:28747285-28747847
  hyper

SEQ ID NO: 285795 - DNA, 333 bp, Homo sapiens; identical to SEQ ID NO: 201370
  chr8:28748909-28749242
  hyper

SEQ ID NO: 285796 - DNA, 62 bp, Homo sapiens; identical to SEQ ID NO: 201371
  chr8:29120734-29120796
  hyper

SEQ ID NO: 285797 - DNA, 2288 bp, Homo sapiens
  chr8:29205973-29208261
  hyper
aaagacagccctcgcggaaaaagaaagaaaaatcagcaaaatcgccttagcagttcaaccaaaggtcaacagcagcgtttccccagcagctgacaggtcaaatgggcaggaaacaactgcggggaacaaagccccccgctgtccggcaggggcgaacccggctcctccgcactgaacagttttgttgtgctttttggaggggagaggtttccgccccctttccagctcccttcctcccgggtggacaggtcggaagaggagcggaaaggaaaggaagggagggaggcggcgaaggcgcctgcgggggggaggagcggctctttgatgggtgtgggggggtctgaactgcctaccgggctcggaagcgcagaccctacccgcgcggaagaatgcgcggaatgcggcggcgggaggcggaggcgcagcgcggcggggggcgcccggaccccacgcgccctgcccgctccctagcccgagggccgcggacccaccctgccctgcaggtgtggcgggcgccaggtccctccagggactcggacagcacgcgatttttccaggatttccgactaccaaatgtgacaagacagtctcgccgccgagagtttcgccagggctcgctaaaatccggcacgcgccgccatcagatagtcgaaaatccgggctgaacaaaaggtgatcattctccgctgcccggatttgcaggcgctagaggaccggttccgcccggcgtcccccagatacccagtccttcagcctcccgctcccagagcctggatctagcccgggacggggattggccaccttccaagctgagcttggagttgggcagcgggaacgcagatacagatcgctctacacagtgtgtgcaacccaatctccctttctgcatttgccagggtcttgttttcagtgaaactggcaaggccaattgtacctcggcgcccacccctcttcaccttttctccacctctgggattctcccggtccggctcagtgtagggccccagcacgccaaaccaacaggcctatcttgtccccacgcgccccgtggtacttggaaactgttcccgggactcaagatggaccgcgcagaggagtcgcttcatcctcgaggctaggaccgttaatgtcaataaacggggcctcgctaggacggtgcggaattgcaggtgaccggagaaacccgtccgcactttccctgaggacttgaacctcgcacttgcacagaaaccttgcaaacccctacacaccaacacacacaaaggggcgcgcggggatccccgcaaccacgaatcacgccggggactccttcccgtgccaataaggcgcaggccgccaagaccccctccatctccccgactccagctagcgcccggagccctcgtttacctttgagcaggcagatgtcggtgcgctcggcgttgcggcgcagcgcctgcaccaccagcgacacggtgctgtcctcgcggaggctctcggcgcgcgggctgcgctcgtcgtagacgatgaccgccgagtagaggccggagcgcaagcgggcgcgtacctcctcctcggcgggcaggatctgctccaggctcacggagcccttagcccgccgccgcacgatggtgttacagcgcacgttgaccgaacctaggatgtagcccgcgctgtgcgccaggaacggtctgcagtccagcagcaggcacttgccgccgctcggcagccccagggtgccgtggctgccgctgccgcccgcgccgccgccattctcgtcccggttcatcagccttttgagcacactgcagtccatctcccgcagctcctccatcgtcaccatggtcgccgggaaccgaggcggctgggcgcgcgaggaagagaagagaacccgggccgcctaggctgcagaaaggggcgggcgagagctaagaagggacgcctgcagaagtggccgcaaacttggtcctcaagggctcccgcgggagagcctcttcttccctgtccccttcctcccgcagcctcgcggtcacatagcagtcggagcggcctcgggcgcccagccgggcggcgcgcagagcggagggggaggcgccggtggaggagagtgtgtttacgagagaggaccgcggactcttttcggcgacggcctcccgtgtatttttgccggtcgcgcggctcctgtcgccactggcgccagcgctgccctgcctacgctcctccggcgctcagcgcactgccccagccagagttttctcctcggcttagaggtttattaatgctcctccgcgctcccgggggagggggcg

SEQ ID NO: 285798 - DNA, 266 bp, Homo sapiens
  chr8:29209537-29209803
  hyper
agcaagggagttacaggactcgctcgcagtttcggaggctgcagagtagcgtattccattccggggcgcgcgtggaagcccgacccaggcagcgagggcaccggtacccgccgggtctctcccgcccaagctcaccctctccccatgcctttgttccgggcggagcggctttcccgagctctcacctccggtcccgggggccatccctgcactccccgaccggagctcggcggagcctccacttccgagaccttcgactggcctcg

SEQ ID NO: 285799 - DNA, 289 bp, Homo sapiens
  chr8:29387043-29387332
  hyper
ggccctgcgccatccgtcatttctcggcttcctcccacgcgccttcatgcggatgtgtaggtatctcctctccctggctgagtcaagtcactcagagactgaaaagagagagaggatgtggcgtgaagctgaagcctgcacccagggcctggcacctactgggttgggcttggcgctgcgtgcttgcatttccgcggatagaccgagatggcatctgggctgtgacactggctgcccagcttttcttttctttttttccaacagcatctggaagaggctctgggagggt

SEQ ID NO: 285800 - DNA, 269 bp, Homo sapiens; identical to SEQ ID NO: 201374
  chr8:29387367-29387636
  hyper

SEQ ID NO: 285801 - DNA, 135 bp, Homo sapiens; identical to SEQ ID NO: 233568
  chr8:29952641-29952776
  hyper

SEQ ID NO: 285802 - DNA, 84 bp, Homo sapiens; identical to SEQ ID NO: 201375
  chr8:30241417-30241501
  hyper

SEQ ID NO: 285803 - DNA, 1018 bp, Homo sapiens; identical to SEQ ID NO: 201376
  chr8:30241612-30242630
  hyper

SEQ ID NO: 285804 - DNA, 361 bp, Homo sapiens; identical to SEQ ID NO: 201377
  chr8:30242697-30243058
  hyper

SEQ ID NO: 285805 - DNA, 213 bp, Homo sapiens; identical to SEQ ID NO: 201378
  chr8:30243175-30243388
  hyper

SEQ ID NO: 285806 - DNA, 128 bp, Homo sapiens; identical to SEQ ID NO: 201379
  chr8:30243547-30243675
  hyper

SEQ ID NO: 285807 - DNA, 385 bp, Homo sapiens; identical to SEQ ID NO: 233572
  chr8:30601508-30601893
  hyper

SEQ ID NO: 285808 - DNA, 34 bp, Homo sapiens
  chr8:30890058-30890092
  hyper
ggagctttgcttcacgtctaggtaaaacctcttt

SEQ ID NO: 285809 - DNA, 94 bp, Homo sapiens; identical to SEQ ID NO: 233575
  chr8:30890541-30890635
  hyper

SEQ ID NO: 285810 - DNA, 239 bp, Homo sapiens; identical to SEQ ID NO: 201380
  chr8:30890888-30891127
  hyper

SEQ ID NO: 285811 - DNA, 274 bp, Homo sapiens; identical to SEQ ID NO: 201381
  chr8:31497152-31497426
  hyper

SEQ ID NO: 285812 - DNA, 627 bp, Homo sapiens; identical to SEQ ID NO: 233578
  chr8:32077881-32078508
  hyper

SEQ ID NO: 285813 - DNA, 282 bp, Homo sapiens
  chr8:32405171-32405453
  hyper
cgcaacctagcatctttaaggttcgcttagcccttcctgtgcacctggaaggaagccttatcttaaactcccttccacctagagtttattttcgcctgcgtgcgacagggcttttgtacttaagtgagttaaggaatgaaccccgaactcttctgggaaagccaccaacgttccccccgcacccctcccagggttcctgaccacggagactctgcttggggcacaggtgtgggagtcgcaaacttttctctgcgccgtccttttccgcgtggaatgggacgg

SEQ ID NO: 285814 - DNA, 43 bp, Homo sapiens; identical to SEQ ID NO: 233580
  chr8:33330280-33330323
  hyper

SEQ ID NO: 285815 - DNA, 102 bp, Homo sapiens; identical to SEQ ID NO: 201383
  chr8:33370085-33370187
  hyper

SEQ ID NO: 285816 - DNA, 245 bp, Homo sapiens
  chr8:33372206-33372451
  hyper
tcccgaggagctgcttccatttaggaccttgtgactctcatagcttccacggtttcgcaggagcccgaggaggcaaacttcatttgtgccactgcacaggcgggagcttcggaccctgggaggggtggcgcgagagagacgtgtcgccagctgctcggagagggactcttattcagcctctaaggcgtcaattgcgcctccagggttccaggagtccagagaaagcccttcggggtcttctgacc

SEQ ID NO: 285817 - DNA, 35 bp, Homo sapiens
  chr8:35093916-35093951
  hyper
tggcacccctcgggcgtccttagcccgaggtccca

SEQ ID NO: 285818 - DNA, 157 bp, Homo sapiens
  chr8:37552160-37552317
  hyper
cggatccggaacttggatgtcaggactatgactacgtaaaatctctgcccagggcgaagctagcaatgcacactgtatcagaaaggcgcagggagtcgggaagggtattgttatttttaattaaaagtttttatcccgaaatttgcctggggaaagc

SEQ ID NO: 285819 - DNA, 1373 bp, Homo sapiens
  chr8:37552811-37554184
  hyper
ggcggcctctgggagaggcttgaactccagcgtcccagagcccgcgccgtgcgatccctcccaccccaccccaccccaccccaccccacctcggacacacacggcgggcggggttacagcccccgccagcatcaccccccacccacccagtggtgagaagggagagaggagagagagcggccggaaaggaggacggggcgcagagctcagggtcccggagaagtcccgtcccaggcgggggaccccagggcgaggaaggcccagtcggggggaggggaggaatcccgggagcggccgagaccgaggcagcggcggcgcgcggcgcggcccctttaaggctctccccgcccaccgatggagccggcctcagcccgccgctctccccgccccggggtcccggcgagagctgcgattgggcgggcgcggcgatccctttgaagtgtggctgccgatcgcggctatttgacgtgcggctcgaggaaggcgaaggtttttgtgttgctagccggggccagcggcggtggcggcggcggcggaggcgtcggtggaggaggggaggcggcgaggaggcgcagctcccgctgcaccgcgatcgacgctgcggagcgagcccacccgccccgggagctcgcctccccggtgctcccccgccctccccgcccccccagcggcgctgcctcctccaaatgagcgattcgcccgctggatctaacccaaggacacccgaaagcagcggcagcggcagcggcggcggcgggaagaggccggcggtgccggcagcggtgtccctcttgccaccggcggaccccctgcgccaggcgaaccggctcccgatcagggtcctgaagatgctgagcgctcacaccggtcacctcctgcacccggagtacctgcagccgctgtcctccactcccgtcagccccattgaggtcagtccccggccgctgcccccgggcgccggccccattcctcccaccgcgaccgggaccctgacccagctcccagcgccccggggctcggtgcgacacccaagtctggtcacgctggcgggctgagtgaggaggggaagaaaaccgagggatcagagcccaccagggcttccccaggcttccccgtggaagggtctccttccacgctcgcccttcggagctccgtgttttctctcggattggatttgctcctggagtcccctctgggtcctttacttttcctctgatccccagtttccagccaggagttggtctctgctgggtcttccccgccccccacgccgggctgttttctttgaagccctggctgcccgggtcccacttcgcctctgtcccatccggtgagggcgcacggcgccctggcgctcccgatcccggatcttt

SEQ ID NO: 285820 - DNA, 148 bp, Homo sapiens; identical to SEQ ID NO: 201386
  chr8:37595169-37595317
  hyper

SEQ ID NO: 285821 - DNA, 31 bp, Homo sapiens; identical to SEQ ID NO: 201387
  chr8:37595347-37595378
  hyper

SEQ ID NO: 285822 - DNA, 59 bp, Homo sapiens; identical to SEQ ID NO: 201388
  chr8:37655254-37655313
  hyper

SEQ ID NO: 285823 - DNA, 227 bp, Homo sapiens
  chr8:37756348-37756575
  hyper
aaaaaaaaagcgccccagatacggccccttcttccaagaagacccaaagctggcagagctgggcgggacagccgcagaaggggaagccaggtgagaacaccagcaccggccgagggctccgtcccgaaaggccttccccgctgctgcccggcttactctcgaagggtccagcgcccagaccgccctgccggaggggtccgcgcccccaggccgggccctcccctccc

SEQ ID NO: 285824 - DNA, 355 bp, Homo sapiens; identical to SEQ ID NO: 201389
  chr8:37756610-37756965
  hyper

SEQ ID NO: 285825 - DNA, 387 bp, Homo sapiens; identical to SEQ ID NO: 201390
  chr8:37756966-37757353
  hyper

SEQ ID NO: 285826 - DNA, 72 bp, Homo sapiens; identical to SEQ ID NO: 116490
  chr8:37823789-37823861
  hyper

SEQ ID NO: 285827 - DNA, 109 bp, Homo sapiens; identical to SEQ ID NO: 201391
  chr8:37887621-37887730
  hyper

SEQ ID NO: 285828 - DNA, 215 bp, Homo sapiens; identical to SEQ ID NO: 233593
  chr8:37888750-37888965
  hyper

SEQ ID NO: 285829 - DNA, 62 bp, Homo sapiens; identical to SEQ ID NO: 233594
  chr8:37963270-37963332
  hyper

SEQ ID NO: 285830 - DNA, 42 bp, Homo sapiens; identical to SEQ ID NO: 233596
  chr8:38034153-38034195
  hyper

SEQ ID NO: 285831 - DNA, 43 bp, Homo sapiens; identical to SEQ ID NO: 233597
  chr8:38034987-38035030
  hyper

SEQ ID NO: 285832 - DNA, 43 bp, Homo sapiens; identical to SEQ ID NO: 201393
  chr8:38089777-38089820
  hyper

SEQ ID NO: 285833 - DNA, 254 bp, Homo sapiens; identical to SEQ ID NO: 233599
  chr8:38240655-38240909
  hyper

SEQ ID NO: 285834 - DNA, 153 bp, Homo sapiens; identical to SEQ ID NO: 201395
  chr8:38324508-38324661
  hyper

SEQ ID NO: 285835 - DNA, 215 bp, Homo sapiens
  chr8:38324861-38325076
  hyper
acctattccaagagaagctaacctagccctccacgtcctccgcagttcatctcccaccccatccgaccccaacccgcaccccaggctttcccgggggtggaaaaggacttaggaatgccccggatttttagcgttgagcccaaagctacctgctgaattgggggtgaatccccaaaaggggaccaaaaagacatggagtggaatgcaacacacac

SEQ ID NO: 285836 - DNA, 226 bp, Homo sapiens; identical to SEQ ID NO: 201396
  chr8:38326050-38326276
  hyper

SEQ ID NO: 285837 - DNA, 269 bp, Homo sapiens
  chr8:38614519-38614788
  hyper
tccacctgctgccccgtgccacctaggagtttccttgccgggcgaggaggcgccgctgcccgggctccccgcagccccgcacgccccaggggctccgcatctccaggcggcagcacccgcggggccctgcaatccgcggagaagttggcggcatctgaagccacctccttccccgctttcccagcggcggggaccctacggccgggcgccccaccccgccctccctcgccccacccttcctcccgccccaccgcctccccgcccagggt

SEQ ID NO: 285838 - DNA, 103 bp, Homo sapiens
  chr8:38615060-38615163
  hyper
cggcagcggggcacgagagtttggccagcagggccccaggggcgtccggctgggagcgtcctgccaggaccccaccgcgaccggatcgcgtccgggcgtgacc

SEQ ID NO: 285839 - DNA, 124 bp, Homo sapiens; identical to SEQ ID NO: 233605
  chr8:38645089-38645213
  hyper

SEQ ID NO: 285840 - DNA, 245 bp, Homo sapiens; identical to SEQ ID NO: 233606
  chr8:38853840-38854085
  hyper

SEQ ID NO: 285841 - DNA, 140 bp, Homo sapiens; identical to SEQ ID NO: 233608
  chr8:40809174-40809314
  hyper

SEQ ID NO: 285842 - DNA, 264 bp, Homo sapiens; identical to SEQ ID NO: 201397
  chr8:41168154-41168418
  hyper

SEQ ID NO: 285843 - DNA, 240 bp, Homo sapiens; identical to SEQ ID NO: 233612
  chr8:41168656-41168896
  hyper

SEQ ID NO: 285844 - DNA, 39 bp, Homo sapiens; identical to SEQ ID NO: 233613
  chr8:41347781-41347820
  hyper

SEQ ID NO: 285845 - DNA, 47 bp, Homo sapiens; identical to SEQ ID NO: 233614
  chr8:41436144-41436191
  hyper

SEQ ID NO: 285846 - DNA, 89 bp, Homo sapiens
  chr8:41511240-41511329
  hyper
tggaggggggcgcctctgcgccctggaggccgggccggggtggcctctggcggagacggcagccgtccgggctcgccctgcagctcctc

SEQ ID NO: 285847 - DNA, 52 bp, Homo sapiens
  chr8:41625341-41625393
  hyper
cctggtgaatgggccccggagcttgccgagacgtggccggggtgagctcagc

SEQ ID NO: 285848 - DNA, 543 bp, Homo sapiens
  chr8:41685765-41686308
  hyper
ctcccgctccgccccgctccgcccgtgctgggctgtggcctccacaccaagcagccgccctgggccgccttccttcgtctgtgcgtgcagcgccgcctccttcagcttaggcccgacactccatgaactctcattttccaccttctccgtctccagcttccaagctgcacagggccaggccgaggtacgtgatggcgggcactgaattacagatcccgtctgtggccgccagcctctgtgtcctgccacctcctccgagaggacatcaccgccaccaggtggagcgagtctcctcctcggcgctccaaccacgtgctgtttattactctgtggggattcccataccgaggcctcttcagttcctggaacagtagcactaaaaggctcctgagtgcctctgttaatttgattgttctggttcgcactacaatgaccgggctggagagggggcgctcgtaatgaaacaggaactgctcctcgcgcccgctccagagtcctttacatctttggggagagggcatacggggagctacatttcatttt

SEQ ID NO: 285849 - DNA, 114 bp, Homo sapiens; identical to SEQ ID NO: 233620
  chr8:42010325-42010439
  hyper

SEQ ID NO: 285850 - DNA, 34 bp, Homo sapiens; identical to SEQ ID NO: 201399
  chr8:42040329-42040363
  hyper

SEQ ID NO: 285851 - DNA, 146 bp, Homo sapiens; identical to SEQ ID NO: 233621
  chr8:42751623-42751769
  hyper

SEQ ID NO: 285852 - DNA, 432 bp, Homo sapiens
  chr8:42996735-42997167
  hyper
tctttcccctctcgcgcccttttcttggtcagaatacgaagttttagtgtctgtgtatggagttcaaacgacccctcctctccaagcagaagctggaggagaaaggcgttgtgaattttggaaaagcggctcagaggattacattttgtgcgatccttgatccacccaaccttcatctcctgcgctcccctcctttaaaattgcaaggaccccggggaggttatgtaatctgcctgatcacaatttgtcagggactgatcccgccgaacactctttgcattttagcgccagtattagcttatcaaagggcacttacttttagagagaggtggtttgtaaatagtaatcacacgtagtgaggggaagccgcgttgggaccgcaaggctttccctgtcacctggagcccatgtttgggccgcacagctttccta

SEQ ID NO: 285853 - DNA, 60 bp, Homo sapiens
  chr8:48100697-48100757
  hyper
gctctttctgcgctgaggggtcgcggcgcggggcggaggtcgggtggggaaagctggagc

SEQ ID NO: 285854 - DNA, 96 bp, Homo sapiens; identical to SEQ ID NO: 116566
  chr8:48100826-48100922
  hyper

SEQ ID NO: 285855 - DNA, 76 bp, Homo sapiens; identical to SEQ ID NO: 201400
  chr8:48604790-48604866
  hyper

SEQ ID NO: 285856 - DNA, 1723 bp, Homo sapiens
  chr8:48649725-48651448
  hyper
gctgtagcttctttgcgctcctatgtcccaagaaactgcagcgggcacccggcggctctggctgcgccagggcagggcgcgctccgctccgggccgtcgggtctgaggtatgggtcgttgctgagtctctcccgccccggccgcgcgttaccggcagtctgctgtcccggcggccggcaggaagggcgggctgggcagctgcttgaagaactgccggaggccggccaggtcccgcgtgagctgctccacgcgctggtgcagcttctcgttctcagccgacagctccaccaacttctgctgcatctcctggttgcgccgcttggccttgtcgcggctcttgcgcacggcgatgttgttgcgctcgcgccgctgccggtactcggggctgccgcggtccgggcccctcttgccggcgctcttctcccgggcggggccgggcgcgggggtctgcctggggctgctgcgcggcggctccggcgacgtgggcggggtgggctgccctgcggccgccaagctcaccacggtctgtgcgcacgcggccacctgcgcgggcaacagcgagccgggcgcgtcgccgtcgccccagtcgggctcgcgcttgagcaggcggggagcggcagggcccgggcccaaggggcgcgcggggccgccgggaagaagctccaggggccccgcgccgcccgccttgtgattgctgttgaagaggtcggcgaagagctcgtcgtggcacagctccagggtgggcacggcggccatggagtcgatgtaggcgctgaagtcgatggcgctctcgtcgtcgtacatggcgggggcggcggcgcctggctcgcctagggcccctggctcggccccgcggcccggcttgcccgcccggcccggttcgtagaagggcgcaggctccgcaggccagggcgcgccgcgcgccgggccgtccaggctgaagagcgcggcgctcatggcggcgtcgggccgggctctgcgtccaagcgaggctgtcacctcgctgggcccagccccgccgccttttctagccccggctgacgtgcacgccccgccccgactccggcaccgcgggggcgccccggggccgcgggggaaggggcgggggcgccctgggagccccccggagccgccccgagccttcccggggcgcgccccctctcagttcctccccggggccccctccccggccctggggacccccagcccacgttgcaggagggtgcccgcgctgctgctccctccccggcccgggccggcctgcgctgcgctgctgggaatgacactccctctgccagcactccagggccttctcttcttcctgtttgtgggcttggaacctcctcgctcctcggggttgggagtgaaatcaaaaccaggacttggccgcagcgcgcgcgtcccaggccggctcctgtcgccggagggcggggggtggagacccgtgggagaggacccgcgcgtccaaggacgccccccgaccgtgggcacgcgcgtgaggccctcgccccgcgcctccaccgtgggaccagatgcgggaagaggcgtgggggaccagacgtggggacagcggcggcctggcaggcggggagggctgcccgcaccgcactcgggcgcctcggggaatccgggccggttctcgctgctctcctcggaggtcccgggtccggccggccctgggggtcgaggcccagagacgcggctgctgcgtcctggccgaaag

SEQ ID NO: 285857 - DNA, 50 bp, Homo sapiens; identical to SEQ ID NO: 201403
  chr8:48872787-48872837
  hyper

SEQ ID NO: 285858 - DNA, 69 bp, Homo sapiens; identical to SEQ ID NO: 233630
  chr8:48920804-48920873
  hyper

SEQ ID NO: 285859 - DNA, 50 bp, Homo sapiens; identical to SEQ ID NO: 233631
  chr8:49292489-49292539
  hyper

SEQ ID NO: 285860 - DNA, 111 bp, Homo sapiens; identical to SEQ ID NO: 201404
  chr8:49309646-49309757
  hyper

SEQ ID NO: 285861 - DNA, 178 bp, Homo sapiens; identical to SEQ ID NO: 6266
  chr8:49309797-49309975
  hyper

SEQ ID NO: 285862 - DNA, 68 bp, Homo sapiens
  chr8:49647749-49647817
  hyper
gggcgcgcggctaccgagaccctcgcgggacccccgcgagccctggtgctgggtcaacgcggtgaggt

SEQ ID NO: 285863 - DNA, 68 bp, Homo sapiens
  chr8:49647853-49647921
  hyper
gtgtagccaaggcaacggctcagcccgccgcggattggctcccaggctgcccgcgacgtagccaaagc

SEQ ID NO: 285864 - DNA, 108 bp, Homo sapiens
  chr8:49834211-49834319
  hyper
cggtgagccccgcccgcgatccacgctctctgggagctaggaggggcgcaggagccggggtctctgccctgcccgcctggcttccagatgtggtgcagcgccagcgcg

SEQ ID NO: 285865 - DNA, 209 bp, Homo sapiens
  chr8:50823925-50824134
  hyper
cgtgcgtgtatgtgcgcgcccctgtgcgtgcgttttctttcatttctggcattaggaaactcgtgcagggccactgaaaagtcaggggaggctcagatgttatttcccagggattcctgtttttccagaaacgttgtcaccaaataagtatgagactgttaatttggagaaacaattagcccctacaaaaaaaaaaaagaaagaaaaaa

SEQ ID NO: 285866 - DNA, 35 bp, Homo sapiens; identical to SEQ ID NO: 201407
  chr8:50824409-50824444
  hyper

SEQ ID NO: 285867 - DNA, 86 bp, Homo sapiens; identical to SEQ ID NO: 233641
  chr8:52811697-52811783
  hyper

SEQ ID NO: 285868 - DNA, 349 bp, Homo sapiens
  chr8:53852565-53852914
  hyper
ggcgccgctggcggtggctgtaccagttgtctacgcggtgatctgcgccgtgggtctggcgggcaactccgccgtgctgtacgtgttgctgcgggcgccccgcatgaagaccgtcaccaacctgttcatcctcaacctggccatcgccgacgagctcttcacgctggtgctgcccatcaacatcgccgacttcctgctgcggcagtggcccttcggggagctcatgtgcaagctcatcgtggctatcgaccagtacaacaccttctccagcctctacttcctcaccgtcatgagcgccgaccgctacctggtggtgttggccactgcggagtcgcgccgggtggccggc

SEQ ID NO: 285869 - DNA, 129 bp, Homo sapiens
  chr8:53853385-53853514
  hyper
tacgccttcctggacgccagcttccgcaggaacctccgccagctgataacttgccgcgcggcagcctgactcccccagcgtccggctccgcaactgcccgccactcctggccagcgagggaggagccgg

SEQ ID NO: 285870 - DNA, 33 bp, Homo sapiens; identical to SEQ ID NO: 201409
  chr8:54163283-54163316
  hyper

SEQ ID NO: 285871 - DNA, 232 bp, Homo sapiens
  chr8:54570291-54570523
  hyper
acgcagctcccacccggcctcccctccgcagagctgggaccgtccccccaccccccatccttgctctgtgggcgccgcctgcactctctgaagcgcgaggctctgcacggtgtggggctggggcctttcgctccccttggctggctctctcctcctttgtcatttgcctttgtttgctgtgtgtgtctggttcaaagggcacgcctaccgagctggatagagtaaaggaaga

SEQ ID NO: 285872 - DNA, 70 bp, Homo sapiens
  chr8:54570562-54570632
  hyper
cacagactcaaaacaggacaaagcaattagagaaaattatcacgggcggaaggggcggatcggtcccctg

SEQ ID NO: 285873 - DNA, 75 bp, Homo sapiens; identical to SEQ ID NO: 201410
  chr8:54754915-54754990
  hyper

SEQ ID NO: 285874 - DNA, 293 bp, Homo sapiens; identical to SEQ ID NO: 233650
  chr8:54755405-54755698
  hyper

SEQ ID NO: 285875 - DNA, 191 bp, Homo sapiens; identical to SEQ ID NO: 201411
  chr8:54795170-54795361
  hyper

SEQ ID NO: 285876 - DNA, 147 bp, Homo sapiens; identical to SEQ ID NO: 201412
  chr8:55379017-55379164
  hyper

SEQ ID NO: 285877 - DNA, 116 bp, Homo sapiens; identical to SEQ ID NO: 201413
  chr8:56014011-56014127
  hyper

SEQ ID NO: 285878 - DNA, 249 bp, Homo sapiens; identical to SEQ ID NO: 233662
  chr8:56686112-56686361
  hyper

SEQ ID NO: 285879 - DNA, 174 bp, Homo sapiens
  chr8:56791850-56792024
  hyper
aacggagaacttgccgggccatttgactctacgtcatcccctcccccatcaatgccctgaacagcctcctgtacacccttaaggaacttactttgtaatgattattaagaactcagcgagaccccgagcatcacctcggcatatcgcatcctttctctagagaacccctaatgt

SEQ ID NO: 285880 - DNA, 1174 bp, Homo sapiens; identical to SEQ ID NO: 201415
  chr8:56792065-56793239
  hyper

SEQ ID NO: 285881 - DNA, 124 bp, Homo sapiens; identical to SEQ ID NO: 233664
  chr8:56987181-56987305
  hyper

SEQ ID NO: 285882 - DNA, 39 bp, Homo sapiens
  chr8:57025552-57025591
  hyper
ctcggcctctgcgccgcgctgggtctccagcagcgctgg

SEQ ID NO: 285883 - DNA, 619 bp, Homo sapiens
  chr8:57122656-57123275
  hyper
cgttttctcattgtcggttgagttataaaaggcttttgcccttcgaaagttttaaaaaataaataaatattaactccttggtccctgcaaagtcaaaatggacttcaggggaaaggcggtacatacttttacctttagcgagaaaagggggagcatcccggatttttagggattttttgcgattttttaaaaatttttatttggttatatgcctgagttctccctccattttggttgtttatgatactgacaacaagctgtccctgctctgtgccgatctcctgctttcatttagcaccccctccccctaccccccctcgcagccacacaccccgggctcacacctccctgcagaccccgcaccccgaccccggcttgcccacctgaggaaagggcaaaaacaaattcatttctccagaaaagaaaaacctcttttgaaaaaggggcaaagttaccccaagtcactcaaagtgccccccaaatattgccgactgcgggtttccgccaggccctttgggaagcgaccttcccccgggatgttttggtggaaaatgcggagagtttactctcaaaactgaatttatattaatttttcccttatttttcgggtctctaatgt

SEQ ID NO: 285884 - DNA, 155 bp, Homo sapiens
  chr8:57123315-57123470
  hyper
cacagcaccagagaggaggaggaggaggaggaggaggaaaacttttcaaactttccagaccctgaataaaggtttttttttttttcccaccgacctcaccttcgggtccccagccgcatcgccccctgccctgtcagaagcgacttcgggagtcc

SEQ ID NO: 285885 - DNA, 258 bp, Homo sapiens
  chr8:57232275-57232533
  hyper
agcagggaacctgggcagaacggaccgaagaagagggtccggggaggcatcctgccctctgctccgggtggggagggaggctggcagctcacccccgggggcgaggggtctgcgttagccgtagccacgggagcccgggcttctgggacgctcagccgtgcgctacccggtgcagctgctttctcaccagctcgcgggtgggtcctgccgcggctcggcgacccgcgcccccttgcgagcgacccagcgtgaaaccag

SEQ ID NO: 285886 - DNA, 91 bp, Homo sapiens; identical to SEQ ID NO: 201417
  chr8:57906841-57906932
  hyper

SEQ ID NO: 285887 - DNA, 162 bp, Homo sapiens
  chr8:58906790-58906952
  hyper
ggtgggggtgcttgcgtgcggacataggtgggagtgggggatagggaggaaatggaggcgccgaccgagtggaatggggggtgggtcagggatggggtgggatgggcatcagtagcggggtggagatgttgagagagaggcagggcttggagtggaggtgcg

SEQ ID NO: 285888 - DNA, 129 bp, Homo sapiens; identical to SEQ ID NO: 201419
  chr8:58907941-58908070
  hyper

SEQ ID NO: 285889 - DNA, 101 bp, Homo sapiens
  chr8:60030068-60030169
  hyper
gaggagcttctccacggggaagtgtgtgtgtgagagcctgcctgtgtgtcaacactgtccaagactcggagctgcgactcggtcgcgtggtgcggagtcca

SEQ ID NO: 285890 - DNA, 238 bp, Homo sapiens; identical to SEQ ID NO: 201421
  chr8:60030908-60031146
  hyper

SEQ ID NO: 285891 - DNA, 349 bp, Homo sapiens; identical to SEQ ID NO: 201422
  chr8:60031791-60032140
  hyper

SEQ ID NO: 285892 - DNA, 202 bp, Homo sapiens
  chr8:60032288-60032490
  hyper
tgccgagccagagccaccagcggcctcagggcaccgtggggagcgcgcagctagggggcgctgtggcgcaccccgccccgcagccccgcccccggccctccccggccccaccccactcccaccgccctctccgcggccgtccccacccctatctccgcgacccccactcctcctcggctgttccccaaccctgtcactgtgc

SEQ ID NO: 285893 - DNA, 292 bp, Homo sapiens; identical to SEQ ID NO: 201424
  chr8:61193765-61194057
  hyper

SEQ ID NO: 285894 - DNA, 139 bp, Homo sapiens; identical to SEQ ID NO: 201425
  chr8:61822239-61822378
  hyper

SEQ ID NO: 285895 - DNA, 144 bp, Homo sapiens; identical to SEQ ID NO: 201426
  chr8:61822883-61823027
  hyper

SEQ ID NO: 285896 - DNA, 53 bp, Homo sapiens; identical to SEQ ID NO: 201427
  chr8:62200449-62200502
  hyper

SEQ ID NO: 285897 - DNA, 145 bp, Homo sapiens
  chr8:62200984-62201129
  hyper
cacaactgtgtcttgccacttagacaaagcccgaggtccgcagggcagagggaaagagctcaagttgacaggcataggaaggaaagttcaggtgaacaaacccctgaaaacaaagagagacgcctgtttgcgagaaagggaaagt

SEQ ID NO: 285898 - DNA, 1143 bp, Homo sapiens
  chr8:62626290-62627433
  hyper
ctacatacaagcaaaaatatttaaaataatttctgagagcattcaaatcactcccaacttcttccctccccctgccccccggcgcccccattttcacctcctttgagttgctctgaaacgctgctggttaggcaggaactcactttccctgactttggctcattttcaactccccaaaacacgcaaggcaaacgataaattgttctcttactcccatgttcaattccacggaaagccaagaaacagtcgttcagcaacctctgtctcggctgcgccctgcaggtgaaggaaccgctgggaaggggctccccgagactagcatcccgagggctcggaccccggtccgcctggcccctcgcccgcccgccaggcccgccgaatgcggcctccgccccgcgcgcctaaaggaggagcgtcgcgggggatggaggcggcgcgcggtgggacctggggagatgcacccgcagcgtccgccgcgccagccggctccctaccccgaggcgaggccccagatccccgccccgcagggcctctgacctctccgggccccggggctgctgctgcccgcactcgtgctaccgctgccggagccgctgctgctgctgttgccgctgctcttggcattcttacgctgggccattgcacggtccgcgggggctggtgagggctggcggacctccttcagtgcgcgggggtacacacgcgacgcgggaaccgctggcggcggcgggccgctggagcgggttcgggccgctgctcctgcagcagaccctgtgcctcagcaccgcctgcagcacctgggaagacttcacccgcctgccggctgcgcgcgcccggcctcgcgtgtacgaacctgtgactccctcccggggcgagagcgcgcggctcgccgcccgacggccacgccccttcccggcctcgccccgcccccggaaggctgagtgacggcgcctgggacccaatcgcaagggcccttacgaggcggcggtaccctgccgcgctccccgcccctgctcacttagggctgttcgggcgctacgcagctgcctgtgagcgcgagcctctttcggctttccagtttgtctcggtcctttggaacgtggcaaacgtggaagccgagagggctctcgcgagcgttggcag

SEQ ID NO: 285899 - DNA, 255 bp, Homo sapiens; identical to SEQ ID NO: 233682
  chr8:63951628-63951883
  hyper

SEQ ID NO: 285900 - DNA, 185 bp, Homo sapiens; identical to SEQ ID NO: 201430
  chr8:63998150-63998335
  hyper

SEQ ID NO: 285901 - DNA, 314 bp, Homo sapiens
  chr8:63998568-63998882
  hyper
cgcctctgccatgcccgccgccgctgctgcggccgcagctacccgggcacccgggaaaagcgcgcgccccgcgccaccctcggccccgcctctgcggccgctgcccgtcgcacaaccactctccagcctggcagggcggtctccggcctcgcacgccggacccgcggcgagcagagctgcctcttaaaggaaaccgcacagtgtccccacgggtgctagccacctgtttagcagctttagttagggaccccagctttttcccagcgagggaagccactgatgttcaaacaccgaggaaacgatgtcaaagttag

SEQ ID NO: 285902 - DNA, 249 bp, Homo sapiens
  chr8:65283513-65283762
  hyper
tgtggctgccgtgcaggtgtcccggcccagccatctgtatggggtgggggtggggtgaaagtcttggactaatggtggggtgcttgcctgtgatctctctcacgttttcctttgaggcctccactcggaataagccgccggcgagggagcggcccattcgtgggaaacgcgcccaccgcttgggttctttcctaaggcctccccaccaacaaggctgaaattccaaggccctggaagatgaggcaaagc

SEQ ID NO: 285903 - DNA, 157 bp, Homo sapiens
  chr8:65285899-65286056
  hyper
ctttccttgggctgcgtgtgccgagcgtagacaatgaaaatcttcatccccctcccccattctactaggctacaagattcttgttttcgttccttctcaccggtggaagatgtgtaaaatcaaagatgtagaggtgtgtagtgatttttttaaaagc

SEQ ID NO: 285904 - DNA, 292 bp, Homo sapiens
  chr8:65488369-65488661
  hyper
gtgaggaccagtatgttttctgtaaaatagatacagacaaggaaaatcttttcgaaagaacgctatacgaacaagtttcaactttcccacagtcgaaatttttggaattgccaagcaacttggaaagactagcaagacggggggcccttggctcactgccaggaatgcgccagctcgcgctagtcccccagcgtcgtcaccctcgctgtcctcctcctcatgagcccacacatgtggacccagtctctctgaagtgagctttgtaggactcggcggcgaaggggacgagaaa

SEQ ID NO: 285905 - DNA, 219 bp, Homo sapiens; identical to SEQ ID NO: 201432
  chr8:65489646-65489865
  hyper

SEQ ID NO: 285906 - DNA, 281 bp, Homo sapiens; identical to SEQ ID NO: 201433
  chr8:65490182-65490463
  hyper

SEQ ID NO: 285907 - DNA, 216 bp, Homo sapiens
  chr8:65490493-65490709
  hyper
tgtgcaaaagtttgttccagaagcttggatggccagggagaggagggaggtggcaggaggtcgtggagatggggtcgggaagggccacgagatgcgctcaagtgtttgttgcctaagggcgaaagacaaaggtcctgcgaagatcctgggtctagctgagctggcagggcctttgccgccctcagtgtcgcccctgctctgccatcccggctctgc

SEQ ID NO: 285908 - DNA, 67 bp, Homo sapiens; identical to SEQ ID NO: 45459
  chr8:65490762-65490829
  hyper

SEQ ID NO: 285909 - DNA, 133 bp, Homo sapiens; identical to SEQ ID NO: 116701
  chr8:65491294-65491427
  hyper

SEQ ID NO: 285910 - DNA, 37 bp, Homo sapiens; identical to SEQ ID NO: 201434
  chr8:65492340-65492377
  hyper

SEQ ID NO: 285911 - DNA, 260 bp, Homo sapiens; identical to SEQ ID NO: 201435
  chr8:65492407-65492667
  hyper

SEQ ID NO: 285912 - DNA, 288 bp, Homo sapiens; identical to SEQ ID NO: 201436
  chr8:65494311-65494599
  hyper

SEQ ID NO: 285913 - DNA, 181 bp, Homo sapiens
  chr8:65498841-65499022
  hyper
gagtggcattgacttttccaatgtaatgacttatgaaagatataatcatgtgttaaattgaatcctccgtttaactgttaatggtgtgctctgggcacatttacgtatttgatgctatggtaactaattaccactagaaaaaaggataatacacttcccagactttgaaaaataatcatga

SEQ ID NO: 285914 - DNA, 45 bp, Homo sapiens
  chr8:65499067-65499112
  hyper
gagcgaggaaacgagtggaaacccgaaagtgtgctcatggaatgc

SEQ ID NO: 285915 - DNA, 104 bp, Homo sapiens
  chr8:65499629-65499733
  hyper
aacagggctgggtaggataacgaggagagtgtttgtgctgggacctggcaggactggaggaggaaaggagccgccttccagcaggtccagcatccctaggttgc

SEQ ID NO: 285916 - DNA, 116 bp, Homo sapiens
  chr8:65710822-65710938
  hyper
ctttaatatgtacgcgtatgtgtgggaaaaagacagaagaagcctttgttattacaaagtcccaaaggaagccagtaccccgcagcaagttctgactgtctgcactggaaatcatg

SEQ ID NO: 285917 - DNA, 183 bp, Homo sapiens; identical to SEQ ID NO: 233703
  chr8:66546065-66546248
  hyper

SEQ ID NO: 285918 - DNA, 162 bp, Homo sapiens; identical to SEQ ID NO: 233704
  chr8:66546468-66546630
  hyper

SEQ ID NO: 285919 - DNA, 194 bp, Homo sapiens; identical to SEQ ID NO: 233705
  chr8:66556751-66556945
  hyper

SEQ ID NO: 285920 - DNA, 280 bp, Homo sapiens; identical to SEQ ID NO: 201437
  chr8:67025640-67025920
  hyper

SEQ ID NO: 285921 - DNA, 234 bp, Homo sapiens; identical to SEQ ID NO: 201438
  chr8:67026578-67026812
  hyper

SEQ ID NO: 285922 - DNA, 120 bp, Homo sapiens
  chr8:67089301-67089421
  hyper
agcgccgcgctccgcgagagccgcggggctgtcgagcgagcgccgaggcagcagcagctgctgcagcaacacgcggaaaaagttggcggtcgcctgttccggcgaagggcggctgccgct

SEQ ID NO: 285923 - DNA, 61 bp, Homo sapiens
  chr8:67090036-67090097
  hyper
attttcccgatcctagagaagagccacagatttaagatcccacccgcgctgactacctccc

SEQ ID NO: 285924 - DNA, 32 bp, Homo sapiens; identical to SEQ ID NO: 233710
  chr8:67090319-67090351
  hyper

SEQ ID NO: 285925 - DNA, 42 bp, Homo sapiens
  chr8:67090411-67090453
  hyper
cacgcacacacatgcatacacacgtacacaggcaggggcagc

SEQ ID NO: 285926 - DNA, 224 bp, Homo sapiens
  chr8:67344870-67345094
  hyper
gtgacccgctcagatcctgcgcagtcttctccgcttactttcaagaattcggagaatttggataccgccctgggctcccaccgcgcgccaggcggaacagcgaggtcacagagtgcgcgatgcagcctctcagggcgcagtgaggcagcctttactctgcttgtctaccgttaaagaaactgaggcccagagaggacctggtcccacatcgtagcaggcagtgg

SEQ ID NO: 285927 - DNA, 449 bp, Homo sapiens; identical to SEQ ID NO: 201440
  chr8:67417575-67418024
  hyper

SEQ ID NO: 285928 - DNA, 51 bp, Homo sapiens; identical to SEQ ID NO: 201441
  chr8:67524786-67524837
  hyper

SEQ ID NO: 285929 - DNA, 148 bp, Homo sapiens; identical to SEQ ID NO: 233714
  chr8:67687304-67687452
  hyper

SEQ ID NO: 285930 - DNA, 43 bp, Homo sapiens; identical to SEQ ID NO: 201442
  chr8:67837266-67837309
  hyper

SEQ ID NO: 285931 - DNA, 98 bp, Homo sapiens
  chr8:67941010-67941108
  hyper
gaccagttagtagccggaacaatttttggcagaccaccatttccccctaccggattatcctgccatcggctttgaccgtttcagtgcccaacaaccac

SEQ ID NO: 285932 - DNA, 221 bp, Homo sapiens; identical to SEQ ID NO: 116746
  chr8:67974225-67974446
  hyper

SEQ ID NO: 285933 - DNA, 143 bp, Homo sapiens; identical to SEQ ID NO: 233718
  chr8:68256145-68256288
  hyper

SEQ ID NO: 285934 - DNA, 45 bp, Homo sapiens; identical to SEQ ID NO: 201443
  chr8:68863998-68864043
  hyper

SEQ ID NO: 285935 - DNA, 60 bp, Homo sapiens; identical to SEQ ID NO: 201444
  chr8:68864119-68864179
  hyper

SEQ ID NO: 285936 - DNA, 276 bp, Homo sapiens; identical to SEQ ID NO: 201445
  chr8:68864195-68864471
  hyper

SEQ ID NO: 285937 - DNA, 318 bp, Homo sapiens; identical to SEQ ID NO: 116751
  chr8:68864942-68865260
  hyper

SEQ ID NO: 285938 - DNA, 56 bp, Homo sapiens; identical to SEQ ID NO: 201447
  chr8:69242747-69242803
  hyper

SEQ ID NO: 285939 - DNA, 56 bp, Homo sapiens; identical to SEQ ID NO: 201448
  chr8:69243011-69243067
  hyper

SEQ ID NO: 285940 - DNA, 37 bp, Homo sapiens; identical to SEQ ID NO: 201449
  chr8:69243994-69244031
  hyper

SEQ ID NO: 285941 - DNA, 232 bp, Homo sapiens; identical to SEQ ID NO: 201450
  chr8:69244779-69245011
  hyper

SEQ ID NO: 285942 - DNA, 1943 bp, Homo sapiens
  chr8:70745324-70747267
  hyper
agcatcccacctcgctgcgccaggggtaccgggtgttcgccgcctgggctcgcggcaccctcgggagtgaagctgccgacctgcaaagcagaaagagggcggtcagcgaagagcggctgcggcttggggctagcgtcccagcgccccggggaccagggttaggtgaccccgaaccgtccctagagggacggaggagctagtcaggagcggagccccggaggactaggcagcagccggctgcagtctccagtcccggaacaataagcagcaggcggtcggcggagactctccctcattgtctgccgcggacctgcccccgtcccgccccttctgccttaaacattgcgtttgcttttatatgttaataattatcaacctggcagctctgactcagaggcagtgtcttttaatcgagtgaactaactgcagcctttccgtactcctactccattactcaaaatagaaaatgcccaaaagaacaaaggaaactttttcacagacacacaatgtattccctgtcccaatttttctaaaaggaaaaaagaaggtgggggtaaactacgtgtgtagaaatgtgtgtgcacactggtgtgcgttggcacgtgtgcgcgactagatttgaatctgtctgctccaccagagacacacattcaaagccgaaggcagcagcaaaaaggtcaacatgcttgcctctttattcccaacaccaaaaataaccccctgaccgaaagaactcttcaattacaaataccaggggcattcgaggctgtggcccgcactaagtcccagagcgcggtatcaaacgaaaccgaaaatccgtctgctttgccgagagctagggaagccacaaccaaacaaagagatcccggcacgctgtcagagagcgcgcgaggagcccacggagccggctgggcgcacgcgggccggcggggaggtgtgctattgactgagcgcaccccgctagcgtgggcctggggagcgtgtgcgcgtgcgcggccacacacacacacacacacacacacacacacacacacacacaccggcgtactggaacctctctcgcgatcccgcacccagcttgaattcagcaagaatcgaaaacaggtgtgcccccgtggtaagaccccgcccctaatcttggggacccccactccactcctccagcctggggcaaggacggggggcggaatatgcaccaggtgggagacagccgagcttcactacactgggtttcattttgcagcgcgcctttgtgatgctgctgagaaaagaaaggaggaagggcaagggagaaaggcagagaggctgggcggccaagggtggccgctccggcatctccctcggctgtgctgggccaaacccgctcccagattcccggcctgccagccactcacaatcccgggcttccccgccgctgccttacccaggcgccttcccggggaaccccaccagccgctgcgtgaggagccggggaatcccagcaaactctcgccgctcgcggggggcgtccgaaccccctgcttaggcgagcgccctcacagcatcgcagactcggatggacacgcggatcccggcagggagctcttggagcaggcgtggaatcccagggacaccccctgcgcgcacatcacatacacgcacatcctacacacacacacacacacacacacacacacacacacacacacacagagcccgtgggaagacaagaccgccggcgacagcccgccgcgctgcccgggcgctcaagccgccgctactcactagcgagtctgtcagtctgtctgcctggctgagtagagcggcgggaggggggcactgagctacgggaatagttgggagccgcgtgaggaggcagcctccgtccagccgaagagaaatcagtgaatgagactgtgactcaggctgaactcttccccccacccctcgcctgtcacccaagc

SEQ ID NO: 285943 - DNA, 73 bp, Homo sapiens
  chr8:70945214-70945287
  hyper
cgctgcgcgtggtccgcgctcgggctcgcttgccccctctctagcccaaagccccattcgcagcgcctgggct

SEQ ID NO: 285944 - DNA, 44 bp, Homo sapiens; identical to SEQ ID NO: 201454
  chr8:71315999-71316043
  hyper

SEQ ID NO: 285945 - DNA, 329 bp, Homo sapiens
  chr8:71316515-71316844
  hyper
actagcgactgggacgggcctgggccgctgagttagaggcagtggggcctgggggctgcagacggcagggacggtgccccaggacgaagatcggggagagccgagttccagggtcgccagcagaggaccctcgcgcccgtccggccggacccttcggccagcaccctgcaccccctcgggcgcacctcaccctacccaactcccggtcctgccgctgctccccggaggcgccccgcatccgtcaagtcccctacggctccaacagggagaggcttctcccattgcagtcctagctccagaggggatggagaggcgcgactgtgggagct

SEQ ID NO: 285946 - DNA, 38 bp, Homo sapiens
  chr8:72274270-72274308
  hyper
ccccaccaaacagcagcggcagatagcatctgagaacc

SEQ ID NO: 285947 - DNA, 39 bp, Homo sapiens
  chr8:72466298-72466337
  hyper
gccggacacagggggatataaacgcgtgtagaaaattaa

SEQ ID NO: 285948 - DNA, 396 bp, Homo sapiens; identical to SEQ ID NO: 233733
  chr8:72466618-72467014
  hyper

SEQ ID NO: 285949 - DNA, 77 bp, Homo sapiens; identical to SEQ ID NO: 201455
  chr8:72470259-72470336
  hyper

SEQ ID NO: 285950 - DNA, 218 bp, Homo sapiens
  chr8:72470835-72471053
  hyper
tcctggagaaacacctttgctaatgcatttagggaggttgctaattgttagccatgtgccacctaaagccctgttggagaaagtcagagggcggatggctgtagttttctggaggtggagaaagaagtgggacattttggaggtgtcgatcaacggcttaaaaaaccactctgacagaaaacgtttgtaaaacccgacattcgttgtaagcaccttca

SEQ ID NO: 285951 - DNA, 33 bp, Homo sapiens
  chr8:72471083-72471116
  hyper
cctaatacagagcttgcacacggaagtgccatg

SEQ ID NO: 285952 - DNA, 37 bp, Homo sapiens
  chr8:72471195-72471232
  hyper
ccctatttctatgatcgttatgggacccaagtacata

SEQ ID NO: 285953 - DNA, 70 bp, Homo sapiens; identical to SEQ ID NO: 201457
  chr8:72756949-72757019
  hyper

SEQ ID NO: 285954 - DNA, 209 bp, Homo sapiens; identical to SEQ ID NO: 201458
  chr8:72917126-72917335
  hyper

SEQ ID NO: 285955 - DNA, 164 bp, Homo sapiens; identical to SEQ ID NO: 201459
  chr8:72917515-72917679
  hyper

SEQ ID NO: 285956 - DNA, 96 bp, Homo sapiens; identical to SEQ ID NO: 201460
  chr8:72917709-72917805
  hyper

SEQ ID NO: 285957 - DNA, 82 bp, Homo sapiens; identical to SEQ ID NO: 201461
  chr8:72987460-72987542
  hyper

SEQ ID NO: 285958 - DNA, 108 bp, Homo sapiens
  chr8:73448678-73448786
  hyper
ggttaaggttgccacggacccggctttaccctcaaacccaggaaagccgggtcacttggggctagggacggcccccgagcgagcggggctgcaggtgccgcgaggaaa

SEQ ID NO: 285959 - DNA, 252 bp, Homo sapiens
  chr8:73448832-73449084
  hyper
aggaaaataatcctggcaccaccactcaggagccatctgtcttcgccccagttccccggggtcgagcagtcagcccagggtcagggtcctgctgtgggcgggcgggaggacagccctgcagttggaagcagaagggccgagggaatcccgcgaagccgccggagcgcgtcgcggcggggcctcccggggctttcccggccccgggtgcgcggcagccgcgggggctgcgtccctctagtccagtgcagccgg

SEQ ID NO: 285960 - DNA, 263 bp, Homo sapiens
  chr8:73449114-73449377
  hyper
tggagccaggcccggggcagcaggagtggctggcgcgcggaagctgagggaggcaccccgccgaggtgtgggcggtgcctgcccgcgccccagccgcgccctgggcaccagagcgctgtccccggccgagcgcacagctccggcgccgcgaggcagagccccggcgtccccggcggtgcgctgccggctcgcgcagcccagccatcccgccccgccgcccaccttgacagccgggagcgctgaggaggaagagggggaggggg

SEQ ID NO: 285961 - DNA, 207 bp, Homo sapiens
  chr8:73449432-73449639
  hyper
gaggcggagcgggaggctggggtggccgcagccctgtgtgcgcgccgggccggctagctgcggggcgggggagcggcgccccagagcgccccgcctagcctcccgcgcgcagcctctaccctgctccgccacagacacacacccaccaagcacccaccgccctccgccctccgccctccgcccccgcggccgccgccgccgctgcgc

SEQ ID NO: 285962 - DNA, 40 bp, Homo sapiens; identical to SEQ ID NO: 201463
  chr8:73450162-73450202
  hyper

SEQ ID NO: 285963 - DNA, 93 bp, Homo sapiens
  chr8:73450590-73450683
  hyper
agagcttcatggctgtttccaacacactctgctaggggacttgggaatacgtttgccctgaatagcaccaaaagacatcgaccatttgcctca

SEQ ID NO: 285964 - DNA, 110 bp, Homo sapiens; identical to SEQ ID NO: 233743
  chr8:73920991-73921101
  hyper

SEQ ID NO: 285965 - DNA, 337 bp, Homo sapiens
  chr8:74005172-74005509
  hyper
ccagcctccagccgcgggcgaagcaggcggggtcccggccgggacagcagcgcccggcctcggcgcagccggcctgggccccgggccacagccgcgacagcgcgcacagcgccatccacagggtcctcatggccagggctccggcggcgcctgcgacgcgacagacccccggggcaagcgctctgatcctcggctggccgcggcccgggagctgcccgagcggccggcgaggcacagccgggccctgccctgcgcccggcccccgccctccgcgccgcccctccccagccctggcggcgcgcccgtcgaggcccgggcgggtggcggggctgccctg

SEQ ID NO: 285966 - DNA, 122 bp, Homo sapiens; identical to SEQ ID NO: 201465
  chr8:74005539-74005661
  hyper

SEQ ID NO: 285967 - DNA, 61 bp, Homo sapiens; identical to SEQ ID NO: 116796
  chr8:74005798-74005859
  hyper

SEQ ID NO: 285968 - DNA, 183 bp, Homo sapiens; identical to SEQ ID NO: 223418
  chr8:74208009-74208192
  hyper

SEQ ID NO: 285969 - DNA, 165 bp, Homo sapiens; identical to SEQ ID NO: 201467
  chr8:74791235-74791400
  hyper

SEQ ID NO: 285970 - DNA, 71 bp, Homo sapiens; identical to SEQ ID NO: 233746
  chr8:74884738-74884809
  hyper

SEQ ID NO: 285971 - DNA, 244 bp, Homo sapiens; identical to SEQ ID NO: 233747
  chr8:74888248-74888492
  hyper

SEQ ID NO: 285972 - DNA, 92 bp, Homo sapiens; identical to SEQ ID NO: 201468
  chr8:75232542-75232634
  hyper

SEQ ID NO: 285973 - DNA, 267 bp, Homo sapiens; identical to SEQ ID NO: 201469
  chr8:75232671-75232938
  hyper

SEQ ID NO: 285974 - DNA, 628 bp, Homo sapiens; identical to SEQ ID NO: 201470
  chr8:75233098-75233726
  hyper

SEQ ID NO: 285975 - DNA, 46 bp, Homo sapiens
  chr8:75233938-75233984
  hyper
cctcggcaggcgggcgcgcgcggggaccggctggcgcgcatgtgtt

SEQ ID NO: 285976 - DNA, 122 bp, Homo sapiens
  chr8:75234041-75234163
  hyper
gcctggagatgaaggcgcggctgcctgtgtgggggccgctcgcgggcgccggagcccccggtgtttgtgtttggggtttttcaaagtggttaagctcctgtgagtgcggccacgtgtgtgtt

SEQ ID NO: 285977 - DNA, 46 bp, Homo sapiens; identical to SEQ ID NO: 201471
  chr8:75896508-75896554
  hyper

SEQ ID NO: 285978 - DNA, 98 bp, Homo sapiens; identical to SEQ ID NO: 201472
  chr8:75897394-75897492
  hyper

SEQ ID NO: 285979 - DNA, 193 bp, Homo sapiens
  chr8:76316995-76317188
  hyper
attgagcccgcgcggggaggtaaggactccggcgtgggtgccaccgcggttgcgaaaaatcgggttctgaacccggtcagcaggagtggcagcgccccagcagcacctaggcaggaagaggacacttcccgttcgcgtttggtgatggtttcatgtaccaggacatgggtgcggagttgtcctcagaaatagg

SEQ ID NO: 285980 - DNA, 280 bp, Homo sapiens; identical to SEQ ID NO: 233752
  chr8:76318950-76319230
  hyper

SEQ ID NO: 285981 - DNA, 419 bp, Homo sapiens; identical to SEQ ID NO: 201475
  chr8:76319437-76319856
  hyper

SEQ ID NO: 285982 - DNA, 316 bp, Homo sapiens; identical to SEQ ID NO: 201476
  chr8:76319920-76320236
  hyper

SEQ ID NO: 285983 - DNA, 85 bp, Homo sapiens
  chr8:76320292-76320377
  hyper
ggctgaaggaggggctgagcctcaggacccctaggccaggccgtgttgaaagcagataccccgaggcctcgcccagcctgcgctg

SEQ ID NO: 285984 - DNA, 44 bp, Homo sapiens
  chr8:77586691-77586735
  hyper
caggtttggagagtctagtcctcgcccctctctataatttggga

SEQ ID NO: 285985 - DNA, 204 bp, Homo sapiens; identical to SEQ ID NO: 201478
  chr8:77589894-77590098
  hyper

SEQ ID NO: 285986 - DNA, 271 bp, Homo sapiens; identical to SEQ ID NO: 233758
  chr8:77912576-77912847
  hyper

SEQ ID NO: 285987 - DNA, 556 bp, Homo sapiens; identical to SEQ ID NO: 233760
  chr8:79716726-79717282
  hyper

SEQ ID NO: 285988 - DNA, 149 bp, Homo sapiens
  chr8:80524696-80524845
  hyper
cttaagttaagccacgcgaaatttccgttttgtgggtcagacagtgccaaatatcggcaatttcataagctcagagagacaagacagtggagacacaggatgaccggaaaagattctggattcagggccttcatccgcaattggtcttg

SEQ ID NO: 285989 - DNA, 231 bp, Homo sapiens
  chr8:80677512-80677743
  hyper
agacagtaagtggaaggagccgaaagagaaggggaaggccgacagggaggccactgaggagagcagaggcggcgacagtttggaggcggaggtgaccacagggagcaccggtccgaggctgccgctagggggcgctcgcaaagcaggcgcctccggatgtgccgagcccagcctgccctggtggtgcggttccgtgggtgaggccgtggtgcccgcgttcccgtggccgtt

SEQ ID NO: 285990 - DNA, 235 bp, Homo sapiens
  chr8:80677781-80678016
  hyper
gtccgaagacggtcccccagggaatgtgtccgaggcccgcgtgggcgccgctcgcggcttcccgctgggaagcgtagttgttgagatgcgaaaccagtcgaactcgaagcgggtcagaggcatctagtccttcaatgatgctcagataacgcgcaacttctgccaggcattcccgaaatcccaaactccgatagtccatagcaagggcgtgcgcgtcaaagtaacctaagcaaaa

SEQ ID NO: 285991 - DNA, 112 bp, Homo sapiens; identical to SEQ ID NO: 201479
  chr8:80695946-80696058
  hyper

SEQ ID NO: 285992 - DNA, 132 bp, Homo sapiens; identical to SEQ ID NO: 201480
  chr8:80696101-80696233
  hyper

SEQ ID NO: 285993 - DNA, 316 bp, Homo sapiens
  chr8:80696263-80696579
  hyper
gtgtgcagacccccacagggcggaggcgagcggcgcgacccactggacggacgcggcccggagctccaggcgcccggacctggcgggccctccctgggcgggcgggtggcgcgtcgcccgccgccgatccgggcggggtgaggggggcgctgtaattgcagcgcagctcgggttcccacgctcctattgttggcgactttgtttccaattcccatcacgtgtgctaattagttagcgctgctggctggctgggaggcgtgtggctggcctaaaagcagaaagatcacttcctgtagggagccgggccggctgaata

SEQ ID NO: 285994 - DNA, 208 bp, Homo sapiens; identical to SEQ ID NO: 201482
  chr8:80803900-80804108
  hyper

SEQ ID NO: 285995 - DNA, 289 bp, Homo sapiens; identical to SEQ ID NO: 116839
  chr8:80942045-80942334
  hyper

SEQ ID NO: 285996 - DNA, 200 bp, Homo sapiens; identical to SEQ ID NO: 201483
  chr8:81397818-81398018
  hyper

SEQ ID NO: 285997 - DNA, 273 bp, Homo sapiens; identical to SEQ ID NO: 201484
  chr8:81398155-81398428
  hyper

SEQ ID NO: 285998 - DNA, 836 bp, Homo sapiens
  chr8:81399496-81400332
  hyper
ggcatttcaatgggcgagggccggcgactgtggatctggagctggacgcgctggaggggaaggagttgatgcaggacggcgcgtccctgagcgacagcaccgaggacgaggaggagggggcgagcctgggcgacggcagcggggcggaaggcggcagctgcagcagcagcaggcggtcgggcggcgatggcggggacgaagtggagggcagcggtgtgggagctggcgaaggagagactgtccagcacttcccgctcgcgcggcccaagtctctaatgcagaagctccaatgctccttccagacctcctggctcaaggactttccctggctgcgctattccaaggatactggtcttatgtcttgcggctggtgccaaaagacccctgcagatgggggaagcgtggaccttcccccagtggggcatgatgagctttcgcgagggacccgcaactacaagaaaaccctcctcctgaggcaccacgtctctaccgagcacaaactccacgaagccaacgcccaggtacagtatatcctgctcctacttttttgagatcttttagggaaaggtttatcagcactcccttcacccccacccacccccgaaaaaaaacctcaaaaccattttcctgggtgaagacatcgttccagttgagaggtgcgggaagcttaggcgtgggggtttagaaagcctgggaacaagttttataaaagttctgtatgtgttgtggggggaaggggatggaatgacaattgtcgtggcgctggattttcttttttatgactcatttcttatcagattgaatcaaaaagaaagtgaggttgaaggttttaacct

SEQ ID NO: 285999 - DNA, 364 bp, Homo sapiens
  chr8:81490259-81490623
  hyper
tcggaattccctccgcggccggcgcctcccctccgggggcctggctcgcagcccgtggggacgagggcctgcacgtccccgggggactgagggctgctctgggtgaggatgggaaggcgggtgccgcttccgagggctcctctcgccaagggagagagccctagacccgttcccggggcgctgctcttcccgggctggggtgggctgcagcggcggcaggacctcgccccctcccggccgcccgcacccccgcgcctcctcctagggcccggtgtcccacgggcctgccgcggtccccgccctctccggctcccgcgactccctcccccaggcagctggggcaggaattcggctggagaatctg

SEQ ID NO: 286000 - DNA, 119 bp, Homo sapiens; identical to SEQ ID NO: 223427
  chr8:81599502-81599621
  hyper

SEQ ID NO: 286001 - DNA, 300 bp, Homo sapiens; identical to SEQ ID NO: 201486
  chr8:81785141-81785441
  hyper

SEQ ID NO: 286002 - DNA, 1363 bp, Homo sapiens
  chr8:81785467-81786830
  hyper
cccaagttccccacctcactggggagaagcgccctttcccggcacccacaccaaacaacaaacccgacacggcctttgaggaaagcgggagccgccgcctgggagagacgcaggggcccaaggcgcaggcaaatcaacagttcctcgcgctgccccgcgcggccgcccgcgccgcctgacacacccctcctggccgggtctctccccggcgccgctgaccgtcctcggccaggcgccttgccccggggcccgggcccgtccccctccccgggctggcgggtcccacgcgcgccaccgcgcccaacacgcaccttcaacgcgccccgggccgggcccctggggactgcgtggccgggtccgaggggcacgaaacgctcctcgccgtcctcgtcgtcttcgtcgccgtccaccacctcgacgaccacctcctcgtcctcctcttcctcgtcgtcatcctcctcctccgcgccccctcggggcttctcctccacacgcccgagccccctccgccgcctgctcccgccctcctcgtcctcgtcttcctcccctagaagcagcagcaccggcgacgaggcggcggcggcggccccggtggcccgaggggggccggtcccggcgctgcgcggcggcggcggcagcggcggcctccagctctccggggcgggcgccggggccgggcccgggacagggggcgggagcccgggtagggcggcttccttggcgggcgcgggcgccggcccggcaggctgcagcgcggcgcccccccggcggctgcccaggctggagcgcttggctagacgccgcgcctgcatgcctgagcgcggggttgcgggccgcggcgcggggccggagagtttgtcacctcctcttcctcctctgcctccgccggtggccgcagggccggggactcgcggccgcaaggggctgcaggagccgccggccaggacccgcggctgccactggctgcagaggcgcgggcgccgccttcgctggaccggccggcggggacgccggcggccggcggctacggcggggcggcgcggcggccgcgggcgggggtgggtgtgagcgagcggcgcgctgccgcctccgccgccgccgccgccgcccgggagccgcgggccgcgctgcgctccatgcggccggcggccgagcccgcgcgcgcctctcccggccggctgcgcccgcgcgctccgggcctaccgctgccgtgcctcggcgcgagctgtttgtgttgtatgttttccaccaccgcccccctcttcgcgagccattcctcacaaccctccggtccccccgctcagacaaaacccggactggattttttttttctcttacccacagtctccgaaagtctggcgct

SEQ ID NO: 286003 - DNA, 207 bp, Homo sapiens
  chr8:82192417-82192624
  hyper
gaaaggaaaaacggcggtggatatgttgtcaaacggaggggtgcaggagaggcggggccaggcctccaggtgacccctctggcttcctgggcctgcagaggcgccgaaacgtgcaggcgccggcgtccatgaggcgtggggcgcgccgggcgagtccctgcttgcaggaggcgcccgagaggccgtcgcgtaccctggcaagaggag

SEQ ID NO: 286004 - DNA, 113 bp, Homo sapiens; identical to SEQ ID NO: 201490
  chr8:82193698-82193811
  hyper

SEQ ID NO: 286005 - DNA, 192 bp, Homo sapiens; identical to SEQ ID NO: 233775
  chr8:82598487-82598679
  hyper

SEQ ID NO: 286006 - DNA, 33 bp, Homo sapiens; identical to SEQ ID NO: 201491
  chr8:82633554-82633587
  hyper

SEQ ID NO: 286007 - DNA, 74 bp, Homo sapiens; identical to SEQ ID NO: 233777
  chr8:82692881-82692955
  hyper

SEQ ID NO: 286008 - DNA, 103 bp, Homo sapiens; identical to SEQ ID NO: 233778
  chr8:82754299-82754402
  hyper

SEQ ID NO: 286009 - DNA, 132 bp, Homo sapiens; identical to SEQ ID NO: 201492
  chr8:85094384-85094516
  hyper

SEQ ID NO: 286010 - DNA, 118 bp, Homo sapiens; identical to SEQ ID NO: 45583
  chr8:85094922-85095040
  hyper

SEQ ID NO: 286011 - DNA, 272 bp, Homo sapiens
  chr8:85095711-85095983
  hyper
ggcagagactgcgagaaaaaaacgcgcttcattccttcttccaccgccatactgtattttatactaaatctcatttttattccaacattttactcccgctcggtgagtaccttctcagtggcattcttgtcctattcttttttttgtccttttttttggttttttgttttttttgtttttgttttttttctttttttccacttctttgattattgtttatatttgggaaagctggaggagcatggttttgagccttttcctgaatccaagtt

SEQ ID NO: 286012 - DNA, 196 bp, Homo sapiens; identical to SEQ ID NO: 201495
  chr8:86089319-86089515
  hyper

SEQ ID NO: 286013 - DNA, 67 bp, Homo sapiens; identical to SEQ ID NO: 233784
  chr8:86090172-86090239
  hyper

SEQ ID NO: 286014 - DNA, 250 bp, Homo sapiens
  chr8:86132759-86133009
  hyper
ggtgcagtgaaaaagcgaagccccacccatagagcgaggttcggaagtccagtctcattagcatcccttgtcttccgcggtgttgcagacttatcctcagctcaagcgagtttggggcgttatggagccagccaagtctccccttgctggcgtgggtacttgtgcagaaacttcccgaggtgcttctgagactgcacagtgaagaccgccgcaccggaggtcagcgctccgccgcggactcccggctgac

SEQ ID NO: 286015 - DNA, 66 bp, Homo sapiens; identical to SEQ ID NO: 201497
  chr8:86157559-86157625
  hyper

SEQ ID NO: 286016 - DNA, 57 bp, Homo sapiens; identical to SEQ ID NO: 116870
  chr8:86350926-86350983
  hyper

SEQ ID NO: 286017 - DNA, 89 bp, Homo sapiens; identical to SEQ ID NO: 201499
  chr8:87527032-87527121
  hyper

SEQ ID NO: 286018 - DNA, 169 bp, Homo sapiens; identical to SEQ ID NO: 233790
  chr8:90769556-90769725
  hyper

SEQ ID NO: 286019 - DNA, 219 bp, Homo sapiens; identical to SEQ ID NO: 233791
  chr8:90770542-90770761
  hyper

SEQ ID NO: 286020 - DNA, 210 bp, Homo sapiens; identical to SEQ ID NO: 233792
  chr8:90914087-90914297
  hyper

SEQ ID NO: 286021 - DNA, 153 bp, Homo sapiens; identical to SEQ ID NO: 233793
  chr8:90996934-90997087
  hyper

SEQ ID NO: 286022 - DNA, 198 bp, Homo sapiens; identical to SEQ ID NO: 233794
  chr8:91012993-91013191
  hyper

SEQ ID NO: 286023 - DNA, 165 bp, Homo sapiens; identical to SEQ ID NO: 233795
  chr8:91014313-91014478
  hyper

SEQ ID NO: 286024 - DNA, 263 bp, Homo sapiens
  chr8:91657128-91657391
  hyper
ttatctaacaaactctctttcgaggctccgcgttaggtatgttttatgtgtaggacagacttcccaggctgcgatggaaagtaatcgtaactcctgccgtcaatgtcacttctctgctggtatttatctgatagagcgccctcctagggccgccacaagaccgctcaaaaacagacttggagagggataggccagcgggaccccacttaccgaaaacactgcattctgaagcccaaaaggtatgggtgtcagtctggccagcg

SEQ ID NO: 286025 - DNA, 266 bp, Homo sapiens
  chr8:91657421-91657687
  hyper
ctacgcgaataaccgcgctcagcttctcgctgctctggatcctggcggccacccaggcggtgaggagccgcttgcagaccacatgggcgatgaaggtgccgatgaggacgcccaccatcatcagacccatgcccagcacgaagccgtacaggtagccagcggccacgttgagcacgatgtagccccagccgcaggggaaagagaccacgatgaagcccacgacgaagagcaggacccccagcagcgagtcaaggctctccacccac

SEQ ID NO: 286026 - DNA, 80 bp, Homo sapiens; identical to SEQ ID NO: 201501
  chr8:91996905-91996985
  hyper

SEQ ID NO: 286027 - DNA, 238 bp, Homo sapiens; identical to SEQ ID NO: 233801
  chr8:92082264-92082502
  hyper

SEQ ID NO: 286028 - DNA, 82 bp, Homo sapiens
  chr8:93113864-93113946
  hyper
ggggagagggggagggaaggcggctatttttagtaacagttgtggctcacatcctacttcccggaatcatagtactcaaact

SEQ ID NO: 286029 - DNA, 242 bp, Homo sapiens; identical to SEQ ID NO: 201502
  chr8:93115140-93115382
  hyper

SEQ ID NO: 286030 - DNA, 492 bp, Homo sapiens
  chr8:93977674-93978166
  hyper
gtatgcaaatactcgttcattaataagaggaagcaggaaaaagagtgaagaggagtaccatgggaaagggggccccaaaagggaacggcagaacccagagagctgcactgacaagtaagcgaccgcgagtaatcggtcagcacaaaggagccaatcccgagccgcgtggaagaccttgggaggtgggcgggactaacgtgtccagggcccagcggctggcgccagacacgctggcagggcgggaaccgcgcgttccttagcaaccgcaatggccacgcccaccgaacccagcaccctccatcccccatcccgcagccagcgccctactcaacgggaacgggtccttcagtgatcaccgtacctactgggtttcccggactccgggtttctcttgcagagcctccctccgcccagccccaccaagtgccgctcccagggacggaacgatcgtctcccaaacgctttagggctcgctaaagaggtgcgcccgct

SEQ ID NO: 286031 - DNA, 315 bp, Homo sapiens; identical to SEQ ID NO: 201503
  chr8:93978235-93978550
  hyper

SEQ ID NO: 286032 - DNA, 65 bp, Homo sapiens; identical to SEQ ID NO: 201504
  chr8:94712353-94712418
  hyper

SEQ ID NO: 286033 - DNA, 248 bp, Homo sapiens
  chr8:94712881-94713129
  hyper
aggcgcaccctggaaaaccggtaacagcccgagcccagctgcccagggccgcccacactggagggctggggtgagggaagtggaagcctctgtccatggggcctctgcgccgaattccgaccctgagtgggaggctgcacggtccccgctgtgacctggggcctaattccttgggctgcagccaccgccggcggcgaagaggagcccggggcccggccggctgccacccacccacgccaccgggtctc

SEQ ID NO: 286034 - DNA, 180 bp, Homo sapiens; identical to SEQ ID NO: 233805
  chr8:94766989-94767169
  hyper

SEQ ID NO: 286035 - DNA, 209 bp, Homo sapiens; identical to SEQ ID NO: 201506
  chr8:94929137-94929346
  hyper

SEQ ID NO: 286036 - DNA, 295 bp, Homo sapiens; identical to SEQ ID NO: 233806
  chr8:95003743-95004038
  hyper

SEQ ID NO: 286037 - DNA, 184 bp, Homo sapiens; identical to SEQ ID NO: 201507
  chr8:95246499-95246683
  hyper

SEQ ID NO: 286038 - DNA, 71 bp, Homo sapiens; identical to SEQ ID NO: 201508
  chr8:95651655-95651726
  hyper

SEQ ID NO: 286039 - DNA, 190 bp, Homo sapiens; identical to SEQ ID NO: 201509
  chr8:95651845-95652035
  hyper

SEQ ID NO: 286040 - DNA, 223 bp, Homo sapiens; identical to SEQ ID NO: 201510
  chr8:95652591-95652814
  hyper

SEQ ID NO: 286041 - DNA, 377 bp, Homo sapiens; identical to SEQ ID NO: 201511
  chr8:95652863-95653240
  hyper

SEQ ID NO: 286042 - DNA, 52 bp, Homo sapiens; identical to SEQ ID NO: 201512
  chr8:95653290-95653342
  hyper

SEQ ID NO: 286043 - DNA, 123 bp, Homo sapiens
  chr8:95653451-95653574
  hyper
tcttagaagagggtttagcacaggttttttcgttctcacttccacaccaccttaccgcctcccgaccccccctctccccctccccacctatcgtcatgacggcctctccggattacttggtgg

SEQ ID NO: 286044 - DNA, 163 bp, Homo sapiens; identical to SEQ ID NO: 201513
  chr8:95653853-95654016
  hyper

SEQ ID NO: 286045 - DNA, 416 bp, Homo sapiens
  chr8:95654337-95654753
  hyper
accccagcctgggcccaaccccaccgcaccctacgccctctcagggcggcccacgcgtgttcccggagcagggtggcgagacgcctgcccggccgcgtgggtgggagcccagcctgagggccggggcgcaccgtttgggcgggggtcgctgcttctcttcatctcccagcccccagggtttgggaccgacattcactagttttcgagttgcttcctgagtagttactggagccggagagtcagctccattttgccaattgattgacgtgcggagtttgaatcctagcgcccccatctccaggtccagaccccagacgcgccgctcccctgcggggtttgggcccacagccttcgggcagggggcgctgtggcgtagacgtgcaggtgggcccggcgggtgtgcaagaagtagcact

SEQ ID NO: 286046 - DNA, 52 bp, Homo sapiens; identical to SEQ ID NO: 233811
  chr8:95835299-95835351
  hyper

SEQ ID NO: 286047 - DNA, 1024 bp, Homo sapiens
  chr8:96145958-96146982
  hyper
ccgcgcgctcgcgcccggagtgtggacgggggcgcgcccgtgcgcgcgcaggggagaggccagcccaggcagccgttgtcgggttcgactggaggggcgggggagtcacctgcgagcggctgcgctggcggccagcccgcccaccgcgtctggatcgcgccggctgcgcggggctgcggacagcacacaccctggaaggccccggcggggaacgggcagagtccgcgccctgcgtccgcgaccaggaggatcggaccttcgccttcgctgtcgccgccgccgccgcccgcggccgtcggggtaggtgaagcccgggtgggtggtccgccggctcctgacgggccgggaggggagacgcgaaactttccgggcgcttcctcccgcggtcccggagccgtcgcagcgccgggaggtgtcgtcgtcgcgggcggtggcggccgacgccatgttggggtctgtgagaaacggggcgctcccggccgctcccctcgcgccggggccggcccgcgggccagttgccgccgccgtcccgccagcccgggagcgagccgcgcccgcccgtaggacgccgccgccgccgcggggggacgggggccgccgggtagggtccggtccacgggtctgcggggcgggggccggcggacgcgggaaggagccccgaggccgggcgagaagttgtggggcctgaggacgggggtcctggacacggccgggggcgtctcagggtcgcgacaaatttctggccgaaaagtttgcagggtctgcgtgtcggggaccttatgacctgaactacatatttgtatgtcacttgggagacgaaaatggccccgcagaacttgctctgatagaagcgatggtttatttatttggagccttttcaagttttatgatcctttgacgaatttatttttctttttaaaaatgtgattgaaggccgagagcgcgctgccggtgttgcttgaatagccttgtgtgctctccgtacattccagcaataacttgagtgtgcggtggaagtgggtat

SEQ ID NO: 286048 - DNA, 136 bp, Homo sapiens; identical to SEQ ID NO: 233813
  chr8:96147206-96147342
  hyper

SEQ ID NO: 286049 - DNA, 57 bp, Homo sapiens
  chr8:97156907-97156964
  hyper
gggcggggtggagccggggtccatggagttcatcagcgtctggatgatggcgtggtt

SEQ ID NO: 286050 - DNA, 73 bp, Homo sapiens
  chr8:97165551-97165624
  hyper
gcttctcttttcaacggggtcccattctgggctcccgaccacagcggctcaaatcttaatttgacatcactgc

SEQ ID NO: 286051 - DNA, 76 bp, Homo sapiens; identical to SEQ ID NO: 201517
  chr8:97166797-97166873
  hyper

SEQ ID NO: 286052 - DNA, 275 bp, Homo sapiens; identical to SEQ ID NO: 201518
  chr8:97166903-97167178
  hyper

SEQ ID NO: 286053 - DNA, 219 bp, Homo sapiens; identical to SEQ ID NO: 201519
  chr8:97167223-97167442
  hyper

SEQ ID NO: 286054 - DNA, 223 bp, Homo sapiens; identical to SEQ ID NO: 201520
  chr8:97167855-97168078
  hyper

SEQ ID NO: 286055 - DNA, 69 bp, Homo sapiens; identical to SEQ ID NO: 233823
  chr8:97174101-97174170
  hyper

SEQ ID NO: 286056 - DNA, 101 bp, Homo sapiens; identical to SEQ ID NO: 201521
  chr8:97507728-97507829
  hyper

SEQ ID NO: 286057 - DNA, 33 bp, Homo sapiens; identical to SEQ ID NO: 233825
  chr8:97657330-97657363
  hyper

SEQ ID NO: 286058 - DNA, 35 bp, Homo sapiens
  chr8:97657755-97657790
  hyper
ccagcatcgctcattcgggggcgtgacgggaggac

SEQ ID NO: 286059 - DNA, 191 bp, Homo sapiens; identical to SEQ ID NO: 233828
  chr8:98657023-98657214
  hyper

SEQ ID NO: 286060 - DNA, 407 bp, Homo sapiens; identical to SEQ ID NO: 233829
  chr8:98657501-98657908
  hyper

SEQ ID NO: 286061 - DNA, 224 bp, Homo sapiens; identical to SEQ ID NO: 233830
  chr8:98787240-98787464
  hyper

SEQ ID NO: 286062 - DNA, 185 bp, Homo sapiens; identical to SEQ ID NO: 201522
  chr8:98787803-98787988
  hyper

SEQ ID NO: 286063 - DNA, 355 bp, Homo sapiens; identical to SEQ ID NO: 201523
  chr8:98788437-98788792
  hyper

SEQ ID NO: 286064 - DNA, 765 bp, Homo sapiens
  chr8:98881052-98881817
  hyper
ggacccctggagtctgatgcccgcctgggctcaggcacggacggagtggagccaggtggcagcaggcagggcgcgccgccagagtgcccagctcccggggctgcccacagggtggggccgccctcgccgccgctccctctccgcgccttccccatccccaaagaggacacccctccttccgcccggcccgctccccacccccgccgcggcaccgcctccccagccgcccgcccttgcccagcgcctcccaggcagccagcgagcgaagggagcgctctgggatgggacttggagcaagcggcggcggcggagacagaggcagaggcagaagctggggctccgtcctcgcctcccacgagcgatccccgaggagagccgcggccctcggcgaggcgaagaggccgacgaggaagacccgggtggctgcgcccctgcctcgcttcccaggcgccggcggctgcaggtgagcgcggcgcgctttcccccggctctgcgcggccgggcggcctcgaagtgcaggcggaccgacccaccgacagaataccgagcctgggctgcccgacgcgcaggcgccctccccaggcccgcactgcagcccccagcgccccggggccccggcgccttcgacccctccgaggacagggggagagggagggcggcgctgcccgacccctcggccgggagagctgggcgcgctccctgcgcaggacaagccgcgctgcagccgccccggagtgccccgtgggggcgctgtggcacgcagcg

SEQ ID NO: 286065 - DNA, 58 bp, Homo sapiens
  chr8:98881884-98881942
  hyper
attcctattccacggacagccgatggctcccccttccctcttcggaacctggtatttt

SEQ ID NO: 286066 - DNA, 49 bp, Homo sapiens; identical to SEQ ID NO: 201525
  chr8:99077294-99077343
  hyper

SEQ ID NO: 286067 - DNA, 119 bp, Homo sapiens; identical to SEQ ID NO: 233835
  chr8:99129466-99129585
  hyper

SEQ ID NO: 286068 - DNA, 175 bp, Homo sapiens; identical to SEQ ID NO: 233836
  chr8:99182336-99182511
  hyper

SEQ ID NO: 286069 - DNA, 74 bp, Homo sapiens
  chr8:99438739-99438813
  hyper
cgccccccgcgtactaagccgatctccaccttggacttcccggccccctcttttcccctccagctcctgttccc

SEQ ID NO: 286070 - DNA, 54 bp, Homo sapiens; identical to SEQ ID NO: 223447
  chr8:99837477-99837531
  hyper

SEQ ID NO: 286071 - DNA, 73 bp, Homo sapiens
  chr8:99953137-99953210
  hyper
agcttattggccctgagaataggcccaggccctctccacaggacccctaccgcacacgcgactctttctctgc

SEQ ID NO: 286072 - DNA, 369 bp, Homo sapiens; identical to SEQ ID NO: 201527
  chr8:99953787-99954156
  hyper

SEQ ID NO: 286073 - DNA, 418 bp, Homo sapiens; identical to SEQ ID NO: 201528
  chr8:99954762-99955180
  hyper

SEQ ID NO: 286074 - DNA, 140 bp, Homo sapiens; identical to SEQ ID NO: 201529
  chr8:99955428-99955568
  hyper

SEQ ID NO: 286075 - DNA, 126 bp, Homo sapiens
  chr8:99956023-99956149
  hyper
tattggaagaaatttctcctggggcattccacgcgtctttgcaataattactaaattagtcaattgccacctctgtaaacaaacttcgtttagaaaacagcaggcgaaagcagactacacatgtag

SEQ ID NO: 286076 - DNA, 833 bp, Homo sapiens
  chr8:99956453-99957286
  hyper
tcacctacggctgcgtctctataacagggaaacctcgagcaaacctgtgcctttaagactcagttgctatccaaacagaagtaaacagagtggaccattagcagacgccgggcgcggaggcggagccagggcgctgagggccccgcgcggcggcgggacgcccgcccgaaggggaggcggggccgctactaaagcccaagactcccggcctggggcagcctggggagggacgcgggcggggacggagctcggcgtgcttgctgctggagggtgatggccctgcaaggctgtgggctccgacctcaccgggagtcgacagcgagaggttcgccgaagagcgaggttctgggcgagcgctgaacgccggccccaagcaccccgggtctttacacagtccgcgtccacagactctgacgaagacgtggatctgctctcgctttagctgctcgcggtcctccagatcatgtccgcgactcctgcgactccgcgcggaaaaaaaagtttgccaggcgtggactcaatgacctttccaagctgtgcgcctcgctgcctggaccgggtctgagcgcggctgcccaggttgacctttctgcgggaggtgagtgttcgctctgggaaggggctgtagctgccctttggaaggaagggtttgggggtgtaagaggcgttcagattctcggtctggtgtgccccaaattcagatgtgaaaatagatcatggggatgcaatcccagggcactgtatttctcacttccttgggtccctggcacgcgactcccagctaacacccaaccacacacatttctacatactgtttcttaattttgttttgg

SEQ ID NO: 286077 - DNA, 57 bp, Homo sapiens; identical to SEQ ID NO: 201531
  chr8:99957709-99957766
  hyper

SEQ ID NO: 286078 - DNA, 100 bp, Homo sapiens; identical to SEQ ID NO: 201532
  chr8:99963488-99963588
  hyper

SEQ ID NO: 286079 - DNA, 100 bp, Homo sapiens; identical to SEQ ID NO: 201533
  chr8:99963900-99964000
  hyper

SEQ ID NO: 286080 - DNA, 433 bp, Homo sapiens; identical to SEQ ID NO: 233851
  chr8:101170171-101170604
  hyper

SEQ ID NO: 286081 - DNA, 107 bp, Homo sapiens; identical to SEQ ID NO: 233852
  chr8:101322699-101322806
  hyper

SEQ ID NO: 286082 - DNA, 82 bp, Homo sapiens; identical to SEQ ID NO: 233853
  chr8:101572036-101572118
  hyper

SEQ ID NO: 286083 - DNA, 264 bp, Homo sapiens; identical to SEQ ID NO: 201535
  chr8:101661576-101661840
  hyper

SEQ ID NO: 286084 - DNA, 83 bp, Homo sapiens; identical to SEQ ID NO: 201536
  chr8:101661991-101662074
  hyper

SEQ ID NO: 286085 - DNA, 183 bp, Homo sapiens; identical to SEQ ID NO: 201537
  chr8:101920199-101920382
  hyper

SEQ ID NO: 286086 - DNA, 91 bp, Homo sapiens; identical to SEQ ID NO: 201538
  chr8:101920468-101920559
  hyper

SEQ ID NO: 286087 - DNA, 43 bp, Homo sapiens; identical to SEQ ID NO: 201539
  chr8:101920619-101920662
  hyper

SEQ ID NO: 286088 - DNA, 85 bp, Homo sapiens; identical to SEQ ID NO: 201540
  chr8:101962307-101962392
  hyper

SEQ ID NO: 286089 - DNA, 285 bp, Homo sapiens; identical to SEQ ID NO: 233859
  chr8:101965389-101965674
  hyper

SEQ ID NO: 286090 - DNA, 90 bp, Homo sapiens; identical to SEQ ID NO: 233860
  chr8:102038370-102038460
  hyper

SEQ ID NO: 286091 - DNA, 45 bp, Homo sapiens
  chr8:102092939-102092984
  hyper
gaggcttccctgcccgcctcggcctcgcttacaccgcaggtgctg

SEQ ID NO: 286092 - DNA, 142 bp, Homo sapiens
  chr8:102093137-102093279
  hyper
ggcaggaggcctccgcccggcttctcgctccctcttccctctccccgaccccctcccgggctgtcagccgactgccaccgtcaccatggctacgcggctcccgctcagttccacagtcagcaggagtcgagcaggggaggcg

SEQ ID NO: 286093 - DNA, 106 bp, Homo sapiens; identical to SEQ ID NO: 233862
  chr8:102218020-102218126
  hyper

SEQ ID NO: 286094 - DNA, 32 bp, Homo sapiens; identical to SEQ ID NO: 201542
  chr8:102504696-102504728
  hyper

SEQ ID NO: 286095 - DNA, 164 bp, Homo sapiens; identical to SEQ ID NO: 201543
  chr8:102504760-102504924
  hyper

SEQ ID NO: 286096 - DNA, 40 bp, Homo sapiens; identical to SEQ ID NO: 201544
  chr8:102506365-102506405
  hyper

SEQ ID NO: 286097 - DNA, 270 bp, Homo sapiens; identical to SEQ ID NO: 233864
  chr8:103136687-103136957
  hyper

SEQ ID NO: 286098 - DNA, 231 bp, Homo sapiens; identical to SEQ ID NO: 233865
  chr8:103424261-103424492
  hyper

SEQ ID NO: 286099 - DNA, 276 bp, Homo sapiens; identical to SEQ ID NO: 233866
  chr8:103667886-103668162
  hyper

SEQ ID NO: 286100 - DNA, 223 bp, Homo sapiens; identical to SEQ ID NO: 233867
  chr8:103822601-103822824
  hyper

SEQ ID NO: 286101 - DNA, 31 bp, Homo sapiens; identical to SEQ ID NO: 201547
  chr8:103876453-103876484
  hyper

SEQ ID NO: 286102 - DNA, 189 bp, Homo sapiens; identical to SEQ ID NO: 233869
  chr8:104033104-104033293
  hyper

SEQ ID NO: 286103 - DNA, 171 bp, Homo sapiens
  chr8:104310699-104310870
  hyper
agcaaattggctccgtttaaggattcttgactcctgaaatccgcaaggaagtgggttcttttagagccagcgccaagagcttcaaaaaatccttctaaggtgaacccctccggacccggatagcgagatggggctcagccttgcgcctcgggggtcgtaacagacggcaag

SEQ ID NO: 286104 - DNA, 63 bp, Homo sapiens
  chr8:104310963-104311026
  hyper
cggcgcagcgcaggcggtgcccgggcgcagggccagtcccgccgccgccgccgccgccgccgc

SEQ ID NO: 286105 - DNA, 117 bp, Homo sapiens
  chr8:104311421-104311538
  hyper
gcggcgccgcgcaggccaggaacgctgctgtctggctctaggcctggggcaggttcccgggtgtggggcgctggcggaccgggcatcagtgtgtgttggggcgcgggtaattcgtaa

SEQ ID NO: 286106 - DNA, 79 bp, Homo sapiens; identical to SEQ ID NO: 233873
  chr8:104427306-104427385
  hyper

SEQ ID NO: 286107 - DNA, 429 bp, Homo sapiens; identical to SEQ ID NO: 201548
  chr8:104511554-104511983
  hyper

SEQ ID NO: 286108 - DNA, 69 bp, Homo sapiens; identical to SEQ ID NO: 201549
  chr8:105236123-105236192
  hyper

SEQ ID NO: 286109 - DNA, 47 bp, Homo sapiens
  chr8:105600479-105600526
  hyper
ggaccctgcacgcccggattcggcagagcccttgcccccgaggtgga

SEQ ID NO: 286110 - DNA, 329 bp, Homo sapiens; identical to SEQ ID NO: 201550
  chr8:105600681-105601010
  hyper

SEQ ID NO: 286111 - DNA, 244 bp, Homo sapiens; identical to SEQ ID NO: 201551
  chr8:105601687-105601931
  hyper

SEQ ID NO: 286112 - DNA, 144 bp, Homo sapiens
  chr8:105602083-105602227
  hyper
cgactttcagggtagatatattgaaaggaggattcgcccatcacgctgcagtttccctaaagctcttttctcactcccagcaaatgggagtcctcctttacttagatccccagaacacttttctaagtacgtctgtagtgacgc

SEQ ID NO: 286113 - DNA, 42 bp, Homo sapiens
  chr8:106330393-106330435
  hyper
tggcagctgcccagcgttgacgcggtgacaactgcagaaggt

SEQ ID NO: 286114 - DNA, 400 bp, Homo sapiens; identical to SEQ ID NO: 201553
  chr8:106331443-106331843
  hyper

SEQ ID NO: 286115 - DNA, 103 bp, Homo sapiens
  chr8:107281806-107281909
  hyper
aacccccttcagcccgctccaagctgccttgggtccctttctaggctgtcagacttcgccttcctttcctccttgtttttcccagcaaccaaagcatctgaag

SEQ ID NO: 286116 - DNA, 217 bp, Homo sapiens; identical to SEQ ID NO: 201555
  chr8:107282895-107283112
  hyper

SEQ ID NO: 286117 - DNA, 637 bp, Homo sapiens; identical to SEQ ID NO: 201556
  chr8:107669366-107670003
  hyper

SEQ ID NO: 286118 - DNA, 633 bp, Homo sapiens; identical to SEQ ID NO: 201557
  chr8:107670289-107670922
  hyper

SEQ ID NO: 286119 - DNA, 119 bp, Homo sapiens; identical to SEQ ID NO: 201558
  chr8:107670978-107671097
  hyper

SEQ ID NO: 286120 - DNA, 80 bp, Homo sapiens; identical to SEQ ID NO: 201559
  chr8:108509697-108509777
  hyper

SEQ ID NO: 286121 - DNA, 33 bp, Homo sapiens
  chr8:109093646-109093679
  hyper
attcatgaacccggcgacaaattctaattgcgc

SEQ ID NO: 286122 - DNA, 166 bp, Homo sapiens; identical to SEQ ID NO: 233885
  chr8:109260968-109261134
  hyper

SEQ ID NO: 286123 - DNA, 239 bp, Homo sapiens; identical to SEQ ID NO: 201560
  chr8:109799175-109799414
  hyper

SEQ ID NO: 286124 - DNA, 63 bp, Homo sapiens; identical to SEQ ID NO: 201561
  chr8:109799903-109799966
  hyper

SEQ ID NO: 286125 - DNA, 87 bp, Homo sapiens; identical to SEQ ID NO: 201562
  chr8:110346426-110346513
  hyper

SEQ ID NO: 286126 - DNA, 312 bp, Homo sapiens; identical to SEQ ID NO: 233888
  chr8:110552599-110552911
  hyper

SEQ ID NO: 286127 - DNA, 68 bp, Homo sapiens; identical to SEQ ID NO: 201563
  chr8:110703933-110704001
  hyper

SEQ ID NO: 286128 - DNA, 45 bp, Homo sapiens; identical to SEQ ID NO: 201564
  chr8:110704144-110704189
  hyper

SEQ ID NO: 286129 - DNA, 119 bp, Homo sapiens; identical to SEQ ID NO: 201565
  chr8:110986093-110986212
  hyper

SEQ ID NO: 286130 - DNA, 173 bp, Homo sapiens
  chr8:110987222-110987395
  hyper
ttgagaatttatattcctcccttttcttttactgctgcttcataggcctcccccggggtgttcgctgggggtgtgagcaggtgggggagggttctctgggtgagggggccgcaccattttctcccaattcactctcattctagtctgatgatcactgacgctccattttcttc

SEQ ID NO: 286131 - DNA, 78 bp, Homo sapiens; identical to SEQ ID NO: 201566
  chr8:110987603-110987681
  hyper

SEQ ID NO: 286132 - DNA, 315 bp, Homo sapiens
  chr8:110987956-110988271
  hyper
ggaaactgtgttccagctgagctctacccagcgcctgctgccttgccttgccccgcctccacctccctccgggctcctggcccctgcgcttacgctaagcgtgtccgccccgcccgctctagctctgagagccactcgcccagtgcttccagcaccagcagaggggagtggcaggatctaagggagggaggtgagacggcgggggtggaggcggggggtagtgaggtgcccggtgacactcaatattacattcatcctgaatacacttgcagaattactgcatttgattcccgtttccccggatctgtgcttttg

SEQ ID NO: 286133 - DNA, 39 bp, Homo sapiens; identical to SEQ ID NO: 201567
  chr8:114444541-114444580
  hyper

SEQ ID NO: 286134 - DNA, 51 bp, Homo sapiens
  chr8:114446354-114446405
  hyper
cattgctgttgaacgcaaaggtgagatggtggagggatgaaaactgtaggc

SEQ ID NO: 286135 - DNA, 99 bp, Homo sapiens
  chr8:114446435-114446534
  hyper
tcacgtggaaaactgcctgcctcggacttcctggaccctcacgctagtctagattagaacctgcaaaatccttacaacggctccccagtctgaggtttt

SEQ ID NO: 286136 - DNA, 341 bp, Homo sapiens
  chr8:114447448-114447789
  hyper
ctgaggccccagagagaaaagaaaaatcaagcttcaaggagcaggttgggattacaaggcagttgctgccacagagaccggggcgactgacttcctggcattttgggatgtaaattaaaattctagacatgccacccatcattggttatagtagagggaaaggtaacctctccagctccctcctcccaaaacatgaattatcatttccactgaatgcaaatgagctgccttccgtggggggacagccagctgcaagctggacaataaactgtttcatagagacgcggcccgattgcagttcagagaggcactcctttacaaaggaagaagcgtccagtttg

SEQ ID NO: 286137 - DNA, 102 bp, Homo sapiens
  chr8:114448651-114448753
  hyper
caactcacgtattcgtttgagcatactgcaagaatatttattgagcacaagctcaatcaccgcattgaacgccaaatctggcaagcaaaatgcatttcctat

SEQ ID NO: 286138 - DNA, 826 bp, Homo sapiens
  chr8:114449602-114450428
  hyper
tgtgttactactgtagttgcagtatatttcaggcaggcttctcccatttattatcctgtgatttaattgaaaaaggaaatcacagagaattttctcaataaattctgccttcacacggaaaagaatgtatttgaacacatgtatttacatactcaaataactacgtgtaaacccttcaccgggtttttatgattcgggaaacggatttcatccgtggcctgggcgggggtggggtggggagggaagtcaatgtcgtttcctcaaatagttctccctttcatcctcccaacccccttttcagtttgtgtgtgccgcagttaaactactttatctgtggtagttatctagaacaaacccatttgtcttaattctgaatcggtaccaaatatgtaaataggaggtttctttcaaaacgaaaaatgtatgtatctatacatctggatctgcttcccccatgcaccacgcaagggttaagattgcacaagggaagagttcttgcgccatctactggccgtctccgagccgcccgttcttccttcgcatgtataagggaccctgtttttgccatcccttggtgtcaggggagctgtgtccccgggaccagtatgtcgtgctccttgatttttttcgaccacggtcctggcccaaatctttcaatgaacaagttccttagattaggcaactgattggtgatctgaccttttcgggaatctggtcccctctcagcagtggggagtgccacagcgctagttctgaaacaggatattgctgttgcgtgtggctccatttaactgcctcaggctatcatgggcgtgagcgtctatca

SEQ ID NO: 286139 - DNA, 218 bp, Homo sapiens; identical to SEQ ID NO: 233898
  chr8:116680622-116680840
  hyper

SEQ ID NO: 286140 - DNA, 151 bp, Homo sapiens; identical to SEQ ID NO: 201570
  chr8:116681608-116681759
  hyper

SEQ ID NO: 286141 - DNA, 391 bp, Homo sapiens; identical to SEQ ID NO: 233900
  chr8:117767860-117768251
  hyper

SEQ ID NO: 286142 - DNA, 327 bp, Homo sapiens; identical to SEQ ID NO: 233901
  chr8:117778474-117778801
  hyper

SEQ ID NO: 286143 - DNA, 1758 bp, Homo sapiens; identical to SEQ ID NO: 201571
  chr8:117858172-117859930
  hyper

SEQ ID NO: 286144 - DNA, 84 bp, Homo sapiens; identical to SEQ ID NO: 201572
  chr8:117861184-117861268
  hyper

SEQ ID NO: 286145 - DNA, 161 bp, Homo sapiens; identical to SEQ ID NO: 201573
  chr8:117862856-117863017
  hyper

SEQ ID NO: 286146 - DNA, 149 bp, Homo sapiens; identical to SEQ ID NO: 201574
  chr8:117864186-117864335
  hyper

SEQ ID NO: 286147 - DNA, 174 bp, Homo sapiens; identical to SEQ ID NO: 201575
  chr8:117864773-117864947
  hyper

SEQ ID NO: 286148 - DNA, 224 bp, Homo sapiens; identical to SEQ ID NO: 201576
  chr8:117866483-117866707
  hyper

SEQ ID NO: 286149 - DNA, 123 bp, Homo sapiens; identical to SEQ ID NO: 201577
  chr8:117868404-117868527
  hyper

SEQ ID NO: 286150 - DNA, 133 bp, Homo sapiens; identical to SEQ ID NO: 201578
  chr8:117868877-117869010
  hyper

SEQ ID NO: 286151 - DNA, 221 bp, Homo sapiens; identical to SEQ ID NO: 201579
  chr8:117869491-117869712
  hyper

SEQ ID NO: 286152 - DNA, 107 bp, Homo sapiens; identical to SEQ ID NO: 201580
  chr8:117870590-117870697
  hyper

SEQ ID NO: 286153 - DNA, 112 bp, Homo sapiens; identical to SEQ ID NO: 201581
  chr8:117874067-117874179
  hyper

SEQ ID NO: 286154 - DNA, 130 bp, Homo sapiens; identical to SEQ ID NO: 201582
  chr8:117875368-117875498
  hyper

SEQ ID NO: 286155 - DNA, 176 bp, Homo sapiens; identical to SEQ ID NO: 201583
  chr8:117878824-117879000
  hyper

SEQ ID NO: 286156 - DNA, 114 bp, Homo sapiens; identical to SEQ ID NO: 201584
  chr8:117886849-117886963
  hyper

SEQ ID NO: 286157 - DNA, 237 bp, Homo sapiens; identical to SEQ ID NO: 117113
  chr8:117887066-117887303
  hyper

SEQ ID NO: 286158 - DNA, 207 bp, Homo sapiens; identical to SEQ ID NO: 201586
  chr8:119123498-119123705
  hyper

SEQ ID NO: 286159 - DNA, 75 bp, Homo sapiens; identical to SEQ ID NO: 201587
  chr8:120220353-120220428
  hyper

SEQ ID NO: 286160 - DNA, 340 bp, Homo sapiens; identical to SEQ ID NO: 45800
  chr8:120220895-120221235
  hyper

SEQ ID NO: 286161 - DNA, 103 bp, Homo sapiens
  chr8:120428388-120428491
  hyper
caggaggaaacgggcgtttccttcccacgcgctcgagcgagccctgggtcctggcctcggaactccacccagcccctccccaccctctgggaaaagccagtcg

SEQ ID NO: 286162 - DNA, 201 bp, Homo sapiens
  chr8:120428722-120428923
  hyper
tacagcgaagaaagtctcgtttggtaaaagcgagaggggaaagcctgagcatgcagagtgtgcagagcacgagcttttgtctccgaaagcagtgcctttgcctgaccttcctgcttctccatctcctgggacaggtaagtggcacacccttaagatgcccccaagttactttgcccgccttggtggcccccatttggtcac

SEQ ID NO: 286163 - DNA, 128 bp, Homo sapiens
  chr8:120429056-120429184
  hyper
gggtgcgcgcggtgctggacggctgctcatgctgtctggtgtgtgcccgccagcgtggcgagagctgctcagatctggagccatgcgacgagagcagtggcctctactgtgatcgcagcgcggacccc

SEQ ID NO: 286164 - DNA, 175 bp, Homo sapiens; identical to SEQ ID NO: 233907
  chr8:120844818-120844993
  hyper

SEQ ID NO: 286165 - DNA, 365 bp, Homo sapiens; identical to SEQ ID NO: 233908
  chr8:120885801-120886166
  hyper

SEQ ID NO: 286166 - DNA, 138 bp, Homo sapiens; identical to SEQ ID NO: 201589
  chr8:121136688-121136826
  hyper

SEQ ID NO: 286167 - DNA, 210 bp, Homo sapiens; identical to SEQ ID NO: 201590
  chr8:121137782-121137992
  hyper

SEQ ID NO: 286168 - DNA, 117 bp, Homo sapiens; identical to SEQ ID NO: 233910
  chr8:121457554-121457671
  hyper

SEQ ID NO: 286169 - DNA, 555 bp, Homo sapiens
  chr8:121823346-121823901
  hyper
tgctgccaccccctgcgccacccttcccccccccccaacacacacacacccggccccctggggtgtgtccgcatgtggccgagtgagtgtgagtgtgagcgtgcgggtgggaagccgagcaggtgtgtgcgcgcccggcgcggcccgcgcgctgttaaccccttaccttccagcagcacttccttgcccgcgcgcttcaacgcctgcaccgcctcgtcgtgggtggcgtcccgcaggtcggctccgttcacggacaggatggcgtcgcccacgtacagggcttgggtctggtccgccgccagccccttgaagatcttgctgatgaggatgggcatcttgttctccttgccccccttgatgctgatccccagcccgcccagctcctgcttcagcaccttcacgccacgcttctggttcgagatggactcgggcacctgctcgggcaggtcggtgaaagcggtgcggaccccggcgggcgagtccgggggctgcgcgccgcccgcgcccgggtgcccagccccggcgcccctgcagaacgagccattggtggcggtc

SEQ ID NO: 286170 - DNA, 35 bp, Homo sapiens
  chr8:121823930-121823965
  hyper
ctcgctgctcagaaccagggcgtcctcgctcaagt

SEQ ID NO: 286171 - DNA, 220 bp, Homo sapiens; identical to SEQ ID NO: 201592
  chr8:121824481-121824701
  hyper

SEQ ID NO: 286172 - DNA, 261 bp, Homo sapiens; identical to SEQ ID NO: 201593
  chr8:122651465-122651726
  hyper

SEQ ID NO: 286173 - DNA, 49 bp, Homo sapiens; identical to SEQ ID NO: 233915
  chr8:122653605-122653654
  hyper

SEQ ID NO: 286174 - DNA, 188 bp, Homo sapiens; identical to SEQ ID NO: 233916
  chr8:123792666-123792854
  hyper

SEQ ID NO: 286175 - DNA, 44 bp, Homo sapiens; identical to SEQ ID NO: 233917
  chr8:123793463-123793507
  hyper

SEQ ID NO: 286176 - DNA, 178 bp, Homo sapiens; identical to SEQ ID NO: 233918
  chr8:124054654-124054832
  hyper

SEQ ID NO: 286177 - DNA, 108 bp, Homo sapiens; identical to SEQ ID NO: 233919
  chr8:124170646-124170754
  hyper

SEQ ID NO: 286178 - DNA, 86 bp, Homo sapiens; identical to SEQ ID NO: 233921
  chr8:124253464-124253550
  hyper

SEQ ID NO: 286179 - DNA, 199 bp, Homo sapiens; identical to SEQ ID NO: 201594
  chr8:124408729-124408928
  hyper

SEQ ID NO: 286180 - DNA, 259 bp, Homo sapiens; identical to SEQ ID NO: 223478
  chr8:124552598-124552857
  hyper

SEQ ID NO: 286181 - DNA, 107 bp, Homo sapiens; identical to SEQ ID NO: 233923
  chr8:124778491-124778598
  hyper

SEQ ID NO: 286182 - DNA, 158 bp, Homo sapiens; identical to SEQ ID NO: 233924
  chr8:125385116-125385274
  hyper

SEQ ID NO: 286183 - DNA, 227 bp, Homo sapiens; identical to SEQ ID NO: 233925
  chr8:125551279-125551506
  hyper

SEQ ID NO: 286184 - DNA, 334 bp, Homo sapiens; identical to SEQ ID NO: 223479
  chr8:125985497-125985831
  hyper

SEQ ID NO: 286185 - DNA, 75 bp, Homo sapiens; identical to SEQ ID NO: 201595
  chr8:126010222-126010297
  hyper

SEQ ID NO: 286186 - DNA, 655 bp, Homo sapiens; identical to SEQ ID NO: 233927
  chr8:126010860-126011515
  hyper

SEQ ID NO: 286187 - DNA, 67 bp, Homo sapiens; identical to SEQ ID NO: 233929
  chr8:126442420-126442487
  hyper

SEQ ID NO: 286188 - DNA, 194 bp, Homo sapiens; identical to SEQ ID NO: 201597
  chr8:127569427-127569621
  hyper

SEQ ID NO: 286189 - DNA, 1247 bp, Homo sapiens
  chr8:127569676-127570923
  hyper
cgaaaccaactccagggtcatttgcacaggtccccggacaggggctgaggctacctgttgggagaggaaggcaagaaagccatgcaggagcccctccgtgaaaagggcgttttgttccgaaaaagaatcggtgggggctcagcacctggagccattttagggggaagtctcgggtgtagcgagctttccctcgtttctccacctgtaaggtcacggtcacaggagactgggcaactcctgttctccctgtccccagcccttcgcctggccctggcaaaagcccattgcatcagcagcttctactgcttccgcctgcgccctacctgccaagcttgggcaggaagagggaaggaaagagaaactttacgccaatcccccccctcctctgctaacttcccctcccaccctcgggccctaactagccccggggacgcctcctccccaccaacgcatccatccccagaggaacaagcgaggatctcagagcgcgacctggacaggtgagtcaccctacctggctcacctgcagcgctacctcctcccggctcgcccgcccttcccccgcgcccgccctcaggctcgggttacctgcacaaactcacccgcggagaggtgaaggccgtggggcctggggaagggctccctgccgcgccccgagacttctagggcgagtttgaaggtgtaggctcggcagtccctcctctcccggcgcgggcggcagcgaggctgggcagagggcagcgcagcgggcagactaggggcatgtctttcccccgcggctgcgtagcgccccgatacttgaaggcggggggcaatccctgttcacaccgcgcttcctcccgccagctggggctgctgcccctcctcagccagctctcgggggaggtggggcgcgaggaggagaggacggcagcctcgcagcctggcggcaacagctcccgcttgggccgggcgagcaacaagcaccggagctggagggacgggattgtagatccggctccgggctcccgggcgggagcgcagcccgtggcatttaaagagacaggcgctcactccccgagctcgggtctttttcacattgcgccgagcggccgggagccccgcccccgccccgcccactcgggcctcgggactccgcccggccacgcccccgcgccggagcgggtttaaatccccctgtaaataatccacccgccgcctggggctggtgctgtgagctctgcttgccttccgagacaagttagaag

SEQ ID NO: 286190 - DNA, 582 bp, Homo sapiens; identical to SEQ ID NO: 233932
  chr8:128747187-128747769
  hyper

SEQ ID NO: 286191 - DNA, 168 bp, Homo sapiens; identical to SEQ ID NO: 233933
  chr8:128747994-128748162
  hyper

SEQ ID NO: 286192 - DNA, 126 bp, Homo sapiens; identical to SEQ ID NO: 233934
  chr8:128749400-128749526
  hyper

SEQ ID NO: 286193 - DNA, 306 bp, Homo sapiens; identical to SEQ ID NO: 233935
  chr8:128806647-128806953
  hyper

SEQ ID NO: 286194 - DNA, 106 bp, Homo sapiens
  chr8:131455078-131455184
  hyper
tcgctctcagaaaacgcagcaggtcccaaaatggtacaagcagaaaacacaagccacttcacggtccgcccaggagccaaccccaagctccaagtaggactccccc

SEQ ID NO: 286195 - DNA, 87 bp, Homo sapiens
  chr8:131456212-131456299
  hyper
gggtgggatttatccacagaaaaccctggacgcggaaggtgcctttctaaggccgggacagcggcaaaggacgtgcctgtcttccat

SEQ ID NO: 286196 - DNA, 121 bp, Homo sapiens; identical to SEQ ID NO: 201600
  chr8:132917187-132917308
  hyper

SEQ ID NO: 286197 - DNA, 202 bp, Homo sapiens
  chr8:133491909-133492111
  hyper
cactatgggtggtgcgcacccctcccatccccaactaaactcagtggcgatcccaacagaagggatccacccgaaacagaaacacagagctcacgggaggacccgctttatcctcttcaaccctcacattaattggaaaaacccacataattattttaagcttccaaaccaacacccctagaagatgtcataaatgtgcacc

SEQ ID NO: 286198 - DNA, 63 bp, Homo sapiens; identical to SEQ ID NO: 201602
  chr8:133492127-133492190
  hyper

SEQ ID NO: 286199 - DNA, 310 bp, Homo sapiens
  chr8:133493185-133493495
  hyper
agcccggtgccagccgccctcccgcccgccagccacacgcgccgccgccgccgcctcctccctcctccgcgctcccacccgcgcccctccccgcccgttccagcctcagcctgtcagcagcagcagcagcgagcgcgccgcgggccgagagcacgccgcgtccctccctccctccttccccggggtggggccccattgtcccgccccgtcgcggcgggaggcccgggcggcggcgccccgcctcttcccgccgacccccaccgctgattgtctggggacccaggatcgcctgggctaccgccgcccccgt

SEQ ID NO: 286200 - DNA, 606 bp, Homo sapiens; identical to SEQ ID NO: 233943
  chr8:133687388-133687994
  hyper

SEQ ID NO: 286201 - DNA, 364 bp, Homo sapiens; identical to SEQ ID NO: 201605
  chr8:134232709-134233073
  hyper

SEQ ID NO: 286202 - DNA, 677 bp, Homo sapiens
  chr8:134308718-134309395
  hyper
ctccccccacacacacgcttacactcacacatgcacaccgccctgtgtgtgctacgggactgaagcgccaccagcctctcggatccacacccgttcccgacccagtctgcaagccagacacacccacgcccccctctccagcctccttgccagcgccactcacctctaccaacccctcatctacacactcgcgcgcaatctctccgttcccagacacagacacacacacacacacacacacacacacacacacacactcacctagtcccttctgcacccacgtccagcgcgcacccctgccagcggcgccagctgggattcggagacgacgccaggaaacgctatcctggtattttttcggaccgtctcatcgcccccttcccgacctccagaaccccaatccccagctaggggggagatgaatgggaccctgtctttttttcctccctttccgtaattgaaccccccacttcagcggtgtctgcacccaaagccccctcgcgcccgcgccccggggtgaccgcgcacttgcagctccggggcgcttactcctggagtacgcggggctacaaagggcggtcctggcgctccagcggcaccgcacgggcggcccctttctgctccgcgtcgcgcctgggagaagagggcgcgggcttacctaacgcgagggagaaagg

SEQ ID NO: 286203 - DNA, 144 bp, Homo sapiens; identical to SEQ ID NO: 201607
  chr8:134465706-134465850
  hyper

SEQ ID NO: 286204 - DNA, 56 bp, Homo sapiens; identical to SEQ ID NO: 201608
  chr8:134581293-134581349
  hyper

SEQ ID NO: 286205 - DNA, 1441 bp, Homo sapiens
  chr8:134581732-134583173
  hyper
tatagaaactgagacgccgagaggttaagtctggcgaccaaagagagacagagacagagagacgggagactagaagaggccccacgctgtacccagatattggcagaggctgaggggcacggagtggtgaactctagtcagtcatttcagccaaccatgggatttcagaaaacagccggcaggggtcctaatgtttggggcaggaaggggaggtgcgggaaggcactgagggacccccgcactgggcgccccttccccaccgcagagacaagcggcagtttccacagcagccggcagggggcagtgcaccttgccttttcgaagcctctgggcgcttgggcagcgcggggtaaagaaaatcaggaggctccgcccgcagcttctacgaacaggccaggagtagagcccccgcacgtagtaggtgctccaggcacgtctagaagcctaaagggcttggtcgatacatttgaactccattttagagactggaagggaagaagggggcgtccgggcccctgccagcaccttccaccttggggccttgtcaatgaacactgcgttagcacctacgacgtgccaggcgccctggcgactattggaaaacccggctcccctctcaccccgttttcctcgttggcgagtcggcctcgcctcctcctcccgtctcttcctctcaccacacacacccagccgcagagcgggggtgggcgctcgctgtctccctggagaaccagctcgtcgcaaacttgcggggcttggggacccgcgagggggagaagtcgggagaggccaggggtgcccggaaacaatcacgagaaagccgggcgaatgcctgatgcagggacgcggcgagccagtcactgccctcagggtcacggctgactccctctgcgggactcgcccagcccgcgagacgcagtgacctgcccaacccccacccccttgcgcgcttctgggtgcgcacgtgtcccctcgcccaacacaccaccgagccccgcgcatggtacggccgccgaggaccctagcgtaggagggaggagcgagtcagggctccagctgacgagcagagccagacgatccccacacgcttcctgggagacccggctgcaaggccaggctaatgcgcgctccgacgtctctgtgccaagccggggcgcaagctcaacccccatctcaagttcagccgcgcttcctcccgcaaggtcacgcttaaacactcgcgcagagaaaggaggagcggaaagttgcgccaccgtcccgattccaaactaactgtaccctcaccagagcgcctcgccccagggtcaccgctgtccgtccccgtgcgctcccagaaggggtggccctgcccccacgcaggtcacacacacgagagacacaggcaagttgctaacttttgtcagattatttcttgggagctgcgacgcctcacggggttggg

SEQ ID NO: 286206 - DNA, 924 bp, Homo sapiens
  chr8:134583293-134584217
  hyper
cccccagatccggagcagcgcgctctgacggcgtccccggggccgatagccacctcccggatctgcgcctgcttgcagcggattgggggactcgatccggatactgtcccacggccgctcgtccagaacactggcggcctccgcggtgtcccagcctgtgaccccaaatccgctcgagagcgcctgagcccggccacccagcgaggtctcctcccacgggcggccccagcggaggagatcccagcccggcgccgggtgcaatgtcactggggctgctttcgggaaccgctgcccgggacttggcgtaggttccccacagagctccaggcagctcctccagtgtcggccgaagacccctaagcccgaacctccaccccgaccttcttcctctcccaaagccctgggtggtcgccgctgccaaggaaggggtctcccttcgaatgtcttccactagaatcccggggtcttcagtcccagctccactgtcacaccctcctagtcccctccccaccccttcagttcccgggtccagacaatcaaccttccactccgagaatccacaggaaactgcccgagccccaactcaggcggacgcagcccccgcgcaccccgagcagggttcgcctccgcgcgcgcactcaccacggctggagacacgctggagtttccgggatttgggcatgaaggggttcggaggagaatacaggggtgtgggtgtcccggacacttgcccccttcccagctcacatcgcctcttccttctctctccgctcttcttcctcctcctcctccctccggtctagggctctttgtctttgcaaagtgtcgaaactgtctggcatagtgggctccgccggcggaggctggagccgaggaagcgaggaggcgggatgagggtgggagagggctcgggaacaccttccc

SEQ ID NO: 286207 - DNA, 485 bp, Homo sapiens
  chr8:134584529-134585014
  hyper
ggggacctgatcggcgccccgagaggagctccccgctctctggacgcggccctcaagctggcggggctaaggaagagcgcccgggaggcccgggagccactggggtccgtttcagcaggaagacgggcacgcaccgagaggatggcagtgcccagaagaactcgagtcgggggcacggtggggagaaggggccgatcccctgctggcgaccgggcagagccacccacttcctctaagggcgcgggactcgaggtgggatttagggagggggaagggaggagcgtgggctggacgactcttgcggccagaaccgcgttcagagccacagagccgggcactgcggccggccctggtcccggccccggccctggcccagcccttgccctggctcgcctgccgccgctttttccttccagatgcggaggctgcggctggagcttggggtttgcggattaggcttgcagttattcagccctccctctttt

SEQ ID NO: 286208 - DNA, 90 bp, Homo sapiens
  chr8:134585080-134585170
  hyper
tgcagtacacaagtcatgtaaatctggttttacggttcttaaccccttactgagactacctctttcgcaacttttcggaggaatgttaga

SEQ ID NO: 286209 - DNA, 37 bp, Homo sapiens; identical to SEQ ID NO: 233950
  chr8:135844538-135844575
  hyper

SEQ ID NO: 286210 - DNA, 111 bp, Homo sapiens
  chr8:136468961-136469072
  hyper
cctctccccaggagcggatgagctcagacgcggctcactcagctgtgtccaggcacagccggtttatgacctaagagaatgacaacccaggagcaagtcgggatgacaaag

SEQ ID NO: 286211 - DNA, 853 bp, Homo sapiens
  chr8:136469302-136470155
  hyper
ttcccagctccagctcggcccttgtcccctcttcccaggatcactcgctgggtgaccttgggcgagccacttgacttctctgagccccagtttcccagtccgtgcatctgaaaggctgtaatagcgtcgtggggctccccactcggccctcagggccaaaggtgggcgccggacacgcgggaggggcccttggacgcaccccctctcgcaaacgcccggttagtcccggcggactcgcagtggagagcggccccaggaggcggcgggcggcggggcggtgggcgccagtgcgcaggcgcggcgcggcagggcggggcggcgggcgcggggcggggcggggcggagccgggcggggcggggccggcggcaggcgctgggcgctcggcgcggtggctcagagtgcgcggggcggcgcgcggcgtgcaggtcgcagctgtggctcgggtgctggcaggtgctggcgggactggcggggatcgccgtggactgcctcaggggcgccgcagcccgctcggcccgagggcccgcctaaccgcgccgcccgcgcccgctcctcctcggcccgcgcccggagcgcgggggccgccggcgctgggtactcggcggccaccggggatcggggctgagcggtcggttcccgcccccgtgccgccgccgccgccttccggccgaccgcccggcttggccgctgctgccgcgtctggcccccgggtccccgccgctgggggcgcgggcggggtcgggggttgccgggcgccgccccccgtgcgcctggagtccacatcccgggcccggcggccggcgagcatggaggagaagtacctgcccgagctgatggcggagaaggactccc

SEQ ID NO: 286212 - DNA, 220 bp, Homo sapiens
  chr8:136470313-136470533
  hyper
cccgggtggcccccggggtcgtttgcacggggacctgggaggctgtgggacacctaggggaagaccctgatgtgaattttggggacttggaaggagaaggctggggcgcatgggtgagacttgaaggaaatctttggggactcgggcacacccaggggaaacttctgggtgggggacagcgaccatctgggggcttcgttgggaacgaggttgaattatg

SEQ ID NO: 286213 - DNA, 102 bp, Homo sapiens
  chr8:139509549-139509651
  hyper
cgcgaggccctgatgggagcccggggcgggccgcccggcggccaaaccccgcccgctcggccgcccgggtgcccagggcgcaggctgcggccccgcgtgcgg

SEQ ID NO: 286214 - DNA, 147 bp, Homo sapiens
  chr8:140643195-140643342
  hyper
atggtccgctaggacggagagcctgtgcctcaggggctccgctccctgcaagaggggctctgcgcagcgccggccaccggagaggcaacggcgccctctggcgggcactcgggcgactgcagggacacggccccgggtgcggggtcg

SEQ ID NO: 286215 - DNA, 203 bp, Homo sapiens; identical to SEQ ID NO: 201610
  chr8:140716452-140716655
  hyper

SEQ ID NO: 286216 - DNA, 188 bp, Homo sapiens; identical to SEQ ID NO: 223497
  chr8:141260487-141260675
  hyper

SEQ ID NO: 286217 - DNA, 81 bp, Homo sapiens; identical to SEQ ID NO: 201611
  chr8:141644414-141644495
  hyper

SEQ ID NO: 286218 - DNA, 145 bp, Homo sapiens; identical to SEQ ID NO: 233958
  chr8:141647528-141647673
  hyper

SEQ ID NO: 286219 - DNA, 761 bp, Homo sapiens; identical to SEQ ID NO: 201612
  chr8:142010302-142011063
  hyper

SEQ ID NO: 286220 - DNA, 1210 bp, Homo sapiens; identical to SEQ ID NO: 45893
  chr8:142011091-142012301
  hyper

SEQ ID NO: 286221 - DNA, 1660 bp, Homo sapiens
  chr8:142138200-142139860
  hyper
cctggaggcggcagcgggcggcgcgtccggcctttgtccccccacgctctccagggtaggtccagggactgccagatcaggggaccctttgcgtcctggagccttgggggctggatgacgtcgccgggcacctgaggaccccgcccattcctccctcggttccccagggagcgggcggccggcggggctgggcggggccgaaggaaggggccgcttgctccgacgccgcgcacgcgccagggcccgcaggcgggttaggaaatgacgaccgcgcgcgggtctccagcagcacccgccctaggaccggccccgcccccaagtcccggtccctagggccgggcacgccactccaggccccgcccagaacctccccgcccagtcaagccccgcccccaaactctgtctccccgcggtatcctctggggctctccaggccccgcctcggctcgggccccgcccctccaggccccgcctccagccccgccccgcagacggcgctcgcagcgcccccggcccccaggcggcgcggctggtccccaggggtctgcgggcgactgcgcggctgaggcgcccgagtgcggtactggcggcgggcggcgggcagccatggcggaggccgcgtcgccgcacttgtcgctgccctcggggctgctggagctctgcgcgctgctgggcgccccccgggacagtctccgaagtctcgagcaggtgaggggcggggaaactgaggcggacgtgggccacgagtcggcagccgggacagcagtcggagagcgggcgcccgggtgccctgtgggttggcgcggactttccgagggctgagtcccggtcccccggcggtgaccccgcgcgcctgtggccggggatcgcgcccgagctcaggcaggtgccctggagcagcgccctgctcccctcccctcttctctcctctccccgcccggggcccttggtgtgagacatgtcttttgagagctgcgaacttggtccgccggccgggaatctgggggtgccgcccctcggagagtctctggggcctctctcttcagtcgctcccatcttgggcaggtgcttctgaaggtggggtgcaccagacaacgggcggaagccgccggagcctcacggtctagcgggcccagccctcgctgctgaaatgatttcattctttatgctgggatgtgttgtcccctgagtagtgggttttgcaccaggcacagaataacgagagagcaatcttagagttagccgccggcctcgcgtattctgcatgaacccctttgcgatgaagcctatagctatttttctcccttgcggtaccacccccacccccaacccttcctccatctctgcaccctcgcagccaaagtgacaacttcatctcccttctgctgggaaagcggcagttttggaaattctcgttttcctttttcttccccagcttttcttaattctgtaacgctggctttccctggaatccatctgtgtctctggtttcctcctggtccgcctgtctgtgacaccgtgactgggtcatgttacctagagatcccggcgtcactggccagccgtctgcacaggtccgttcatctctttgcagacaacagcatagaaaggcagagaggcttctgagtatttaaatgacgctgggctatccagggaaaat

SEQ ID NO: 286222 - DNA, 57 bp, Homo sapiens; identical to SEQ ID NO: 233965
  chr8:142140082-142140139
  hyper

SEQ ID NO: 286223 - DNA, 42 bp, Homo sapiens; identical to SEQ ID NO: 226542
  chr8:142141062-142141104
  hyper

SEQ ID NO: 286224 - DNA, 159 bp, Homo sapiens
  chr8:142297598-142297757
  hyper
ttcccatttccatggccaggacgctgggcttctggcctccttggctgactggacaattacagacagttgagtactgtcttttctgtgaacactagcatgtatttagcttaaaaggatcttctgtgcggcatcttttcagtctagcgagagaatgcttta

SEQ ID NO: 286225 - DNA, 448 bp, Homo sapiens; identical to SEQ ID NO: 201616
  chr8:142317707-142318155
  hyper

SEQ ID NO: 286226 - DNA, 413 bp, Homo sapiens; identical to SEQ ID NO: 201617
  chr8:142318184-142318597
  hyper

SEQ ID NO: 286227 - DNA, 233 bp, Homo sapiens
  chr8:142425567-142425800
  hyper
ggaccagggtgcccgccgcagccctgggaccctgcggccccggtccctattcgaggccccagccggagcgttccgggatccttcgggggagtgcccagccccgcgcccccgcctcccacatgactccgggtgggcccttttgacgtgcgcggagggcggggggcagggggcggggcgggggggcagggggcaggggtggtgaagggtagggggcgtggcggggagaggggatg

SEQ ID NO: 286228 - DNA, 116 bp, Homo sapiens
  chr8:142427479-142427595
  hyper
gaggagtgcccgggcggtggggctggtgggctgggcagggggtctgaactggagggactcgggcgccctcctcctcagggtgcaggacagcacctgcacggcggggccgcatttcc

SEQ ID NO: 286229 - DNA, 327 bp, Homo sapiens
  chr8:142427700-142428027
  hyper
gggggccagggggagctccgaggttctagggagggcgcgcaccgggagagggcgccgggccggccggcgggaggaaggaggggtcccgggcggcagcgcccccggccctcgccgcgccccgcacttccctttcctggctgggcttcctcttccccgcgcccgccctgcgcggcccctttgtttcccgggcagggcgcggctatatttaggcggcaggtgtgggagcccccggcagccgggtcgcccgccggtcacgccccccacgtgacgcccgggcgctataaatagccgcaggcggcggtggcggcagcgcctggagccggctcc

SEQ ID NO: 286230 - DNA, 41 bp, Homo sapiens; identical to SEQ ID NO: 201620
  chr8:143429133-143429174
  hyper

SEQ ID NO: 286231 - DNA, 97 bp, Homo sapiens; identical to SEQ ID NO: 233970
  chr8:143483645-143483742
  hyper

SEQ ID NO: 286232 - DNA, 207 bp, Homo sapiens; identical to SEQ ID NO: 201621
  chr8:143531771-143531978
  hyper

SEQ ID NO: 286233 - DNA, 295 bp, Homo sapiens; identical to SEQ ID NO: 201622
  chr8:143556723-143557018
  hyper

SEQ ID NO: 286234 - DNA, 49 bp, Homo sapiens
  chr8:143592687-143592736
  hyper
gggtgggtcccatctcccctggccttggaggcccgggatctccgaggga

SEQ ID NO: 286235 - DNA, 90 bp, Homo sapiens; identical to SEQ ID NO: 201623
  chr8:143695816-143695906
  hyper

SEQ ID NO: 286236 - DNA, 56 bp, Homo sapiens
  chr8:143859071-143859127
  hyper
cggctcgccgggcaagcgctgggaccccgaggccagtccaggcatctggatctccg

SEQ ID NO: 286237 - DNA, 64 bp, Homo sapiens
  chr8:143859361-143859425
  hyper
ccgcctcgctgcccatggcctccgcctgcctcccctgcgctcagctcccgcttctggtccctgt

SEQ ID NO: 286238 - DNA, 1065 bp, Homo sapiens
  chr8:144099693-144100758
  hyper
cgggtggaaggaggccgggcctggccgtggctcaggcgccacctcactggggaaactgggaggtggtctcagcccccttctgggcctcagcttccccatctatcccaaggagccggggtaggcctgggcggcgcggggacccccaccgcgggctcgccgactccgcccgccggaggcccctcccgcgtcccgcccctgcccccgccccggggccgcgcggctgcctgggaggctccgggccagccgcggtccagagcgcgcgaggttcggggagctcggccaggctgctggtacctgcgtccgcccggcggtgagtccgcgggcccccggccgggacgcccccgccacctgcgcgcacgcgctcagacccggcggcctcggctgcggtgcacgcggccccggctcagccacgcgcggcggaaggcgccctgcgggggccggggcgggagagggtgggagagagcaagaggggcgcacggggaggcgcaggagaggggctggggctgccggtgggttggtccccagagagctgagcttctcctcccatcccccgcaggcctccccgaatgtttccaaagatctggggcgggagcgggcggagactgccgccaggagcctcccggccgccccagggctgcgcagccactggagcccatcacccaactccagacgctcctggctcctctacgtgggccgggagggacagccttgaggactaggggagggggcacgggaccttgcagagctcctggccggaaagggaggattgaccgcccccggcatatcaccccggagcactggaacccgcccccgcttcttgttttggcactggtggtgcttgcggtgaggtccaaggagcccagcctccctgagtggaccgccgggcccctccccgttccgggacacaggagaggctcccgccccttgctggctgggcagcccctagatacctggctcccaggggccagcttccctgagcctggggatgagccatgagcctgcagcctgggccccaggggcgccccccacggcctgccggctggctccctccgggctccatggccc

SEQ ID NO: 286239 - DNA, 240 bp, Homo sapiens; identical to SEQ ID NO: 233981
  chr8:144162347-144162587
  hyper

SEQ ID NO: 286240 - DNA, 231 bp, Homo sapiens
  chr8:144240968-144241199
  hyper
cctgacccagcccgcgggccccctactcaccgggcgccgagcacagcaggacggccagcagcgccaggccgaggcccttcatggctgcaggcagcatgctccgggtgggcctgggggcggcgcgggggcttggggcgcgggtcctctggggcgcaagcctggaggggagaagcatcggtcaggagaccccaaagaccctctcctttcccagcctcaggatgcaaccttctc

SEQ ID NO: 286241 - DNA, 56 bp, Homo sapiens
  chr8:144328117-144328173
  hyper
acgcggggctctggcgggcctggcggctcagtgcgatctgggcaggcaggaagtgg

SEQ ID NO: 286242 - DNA, 273 bp, Homo sapiens; identical to SEQ ID NO: 233985
  chr8:144373098-144373371
  hyper

SEQ ID NO: 286243 - DNA, 132 bp, Homo sapiens; identical to SEQ ID NO: 201626
  chr8:144417146-144417278
  hyper

SEQ ID NO: 286244 - DNA, 135 bp, Homo sapiens; identical to SEQ ID NO: 223520
  chr8:144484160-144484295
  hyper

SEQ ID NO: 286245 - DNA, 96 bp, Homo sapiens
  chr8:144503284-144503380
  hyper
cgggcaggcgaggcctcctggaggcccggcgggctcttccccctccctccccgcccttttcctctcccgatttcctggccaccctctggcttagtc

SEQ ID NO: 286246 - DNA, 96 bp, Homo sapiens
  chr8:144503726-144503822
  hyper
acgcttctgagacaggcgagccgtgctccgtgctccgtgctccgggacgaagggggctgtggggtcggcagagggcttcccgtgaggaggagcaca

SEQ ID NO: 286247 - DNA, 268 bp, Homo sapiens; identical to SEQ ID NO: 201627
  chr8:144508751-144509019
  hyper

SEQ ID NO: 286248 - DNA, 101 bp, Homo sapiens
  chr8:144512372-144512473
  hyper
gaagctgggcgaggagggcacggaggagcagggcgtgctgagcggcgtcgaggacagcgagcctggcggcaggcggtggcagaagcgctcggcctcgggag

SEQ ID NO: 286249 - DNA, 310 bp, Homo sapiens
  chr8:144512503-144512813
  hyper
cgaagtcgttgacgtactcgatggccagcgggctgctgggcagctcggcgcccatcgccagctccgcggccatcgcccggggcccgcgcccggccgcgccccgacgggcggcgtgggagtggggggggagctgcaggcctctcccccccctgctccccgcgggcggcggtcccggcgggggcgggggggcgccggcgcggggcggcggcgccgaggggcgcagggaaaagtttcacgtggtcaactccggggcggcgcgctaggggcaccgctggccaggtgtctcgggcgaccccgggcccgcgtcgcc

SEQ ID NO: 286250 - DNA, 65 bp, Homo sapiens; identical to SEQ ID NO: 201628
  chr8:144594949-144595014
  hyper

SEQ ID NO: 286251 - DNA, 170 bp, Homo sapiens; identical to SEQ ID NO: 201629
  chr8:144614411-144614581
  hyper

SEQ ID NO: 286252 - DNA, 281 bp, Homo sapiens; identical to SEQ ID NO: 233992
  chr8:144635847-144636128
  hyper

SEQ ID NO: 286253 - DNA, 120 bp, Homo sapiens
  chr8:144636569-144636689
  hyper
gcgcacacgtacgtgtatgcacacgcgcacaaacatgcacaaaacacggacgtgcatgcacacgcgcacatgtacacaacacgcacgtgcatacacatacgcacaatacgcacgtgtgtg

SEQ ID NO: 286254 - DNA, 449 bp, Homo sapiens; identical to SEQ ID NO: 201631
  chr8:144640321-144640770
  hyper

SEQ ID NO: 286255 - DNA, 120 bp, Homo sapiens; identical to SEQ ID NO: 201632
  chr8:144641059-144641179
  hyper

SEQ ID NO: 286256 - DNA, 32 bp, Homo sapiens
  chr8:144653958-144653990
  hyper
ctgcgccagcagcccacgcaccagagcatgca

SEQ ID NO: 286257 - DNA, 85 bp, Homo sapiens; identical to SEQ ID NO: 223525
  chr8:144680874-144680959
  hyper

SEQ ID NO: 286258 - DNA, 53 bp, Homo sapiens; identical to SEQ ID NO: 201633
  chr8:144691796-144691849
  hyper

SEQ ID NO: 286259 - DNA, 44 bp, Homo sapiens; identical to SEQ ID NO: 233996
  chr8:144692239-144692283
  hyper

SEQ ID NO: 286260 - DNA, 200 bp, Homo sapiens; identical to SEQ ID NO: 233997
  chr8:145149554-145149754
  hyper

SEQ ID NO: 286261 - DNA, 61 bp, Homo sapiens; identical to SEQ ID NO: 201634
  chr8:145687374-145687435
  hyper

SEQ ID NO: 286262 - DNA, 116 bp, Homo sapiens; identical to SEQ ID NO: 201635
  chr8:145692490-145692606
  hyper

SEQ ID NO: 286263 - DNA, 207 bp, Homo sapiens
  chr8:145697349-145697556
  hyper
tgctgtcctgcctccgaggctacagcgtctgcatcttcacctatggccagacaggcaccgggaagacctacagcatggaggtgggacagagctcacgccccagtgggagaggccccaggggccctgcatgacttggatgtgagcccggtgtgcaccccaccccatcctcagggccctcctgaggaccccggcatagttcctagggcg

SEQ ID NO: 286264 - DNA, 78 bp, Homo sapiens; identical to SEQ ID NO: 201636
  chr8:145698674-145698752
  hyper

SEQ ID NO: 286265 - DNA, 41 bp, Homo sapiens
  chr8:145700801-145700842
  hyper
ggggctcccggagaagggtcgtgccttgaggccctcagctc

SEQ ID NO: 286266 - DNA, 477 bp, Homo sapiens; identical to SEQ ID NO: 223529
  chr8:145726121-145726598
  hyper

SEQ ID NO: 286267 - DNA, 433 bp, Homo sapiens; identical to SEQ ID NO: 201637
  chr8:145733644-145734077
  hyper

SEQ ID NO: 286268 - DNA, 211 bp, Homo sapiens
  chr8:145747532-145747743
  hyper
cccgtcggcactgccggccagtccttgctcttcccacctttcggaggcccaagatcctactgtggccggccagggccagcgagggaccccccccatgcagagctggaggttggggtgatgtcttttcggaagagcttcaagggaggtgttggggcctccccggccaccttccattgctaccccaggattcccgagtgcaacgttcccggct

SEQ ID NO: 286269 - DNA, 390 bp, Homo sapiens; identical to SEQ ID NO: 234005
  chr8:145909602-145909992
  hyper

SEQ ID NO: 286270 - DNA, 95 bp, Homo sapiens; identical to SEQ ID NO: 201639
  chr8:145910220-145910315
  hyper

SEQ ID NO: 286271 - DNA, 249 bp, Homo sapiens
  chr8:145910532-145910781
  hyper
ctcacacctccctcgggcaggagcacactcacacccccctggggccggacacacccacactcccctcgggccgggcacactcatacccaccgtggacaggggcacactcacactcactctggacaggggcacacccacacccacattggggccgggcacactcacacccacctagggcagggacacaactcactctggacagggtacagtcacacccacttcgggccgggcacacgcgaactcacccac

SEQ ID NO: 286272 - DNA, 542 bp, Homo sapiens; identical to SEQ ID NO: 223532
  chr8:145910994-145911536
  hyper

SEQ ID NO: 286273 - DNA, 94 bp, Homo sapiens; identical to SEQ ID NO: 234008
  chr8:145981131-145981225
  hyper

SEQ ID NO: 286274 - DNA, 184 bp, Homo sapiens
  chr8:146052022-146052206
  hyper
tccctcctggacccccgccccgttcttcccgtggggaggggcgcgtcaggcggacctggcaccctccggctgctgggcttcgccgggagccacgcggggaggtccaggcagtcgggacgcaggcagcgtcctcgccgaggctgcgagtccgtggccgtccgggggaggcgcgcaggctctgccg

SEQ ID NO: 286275 - DNA, 36 bp, Homo sapiens; identical to SEQ ID NO: 201641
  chr8:146078071-146078107
  hyper

SEQ ID NO: 286276 - DNA, 103 bp, Homo sapiens; identical to SEQ ID NO: 234010
  chr8:146125625-146125728
  hyper

SEQ ID NO: 286277 - DNA, 69 bp, Homo sapiens; identical to SEQ ID NO: 234011
  chr8:146278304-146278373
  hyper

SEQ ID NO: 286278 - DNA, 51 bp, Homo sapiens; identical to SEQ ID NO: 117369
  chr9:118139-118190
  hyper

SEQ ID NO: 286279 - DNA, 106 bp, Homo sapiens
  chr9:214545-214651
  hyper
ttgtggggctcccccgacttgcctacattccctggcagcctcgcagcttcgggcagatggagcttccggcctgcgcgcagtggtcgcctgtcgtccgcccgcgctc

SEQ ID NO: 286280 - DNA, 177 bp, Homo sapiens; identical to SEQ ID NO: 201642
  chr9:215348-215525
  hyper

SEQ ID NO: 286281 - DNA, 243 bp, Homo sapiens; identical to SEQ ID NO: 234014
  chr9:470095-470338
  hyper

SEQ ID NO: 286282 - DNA, 1688 bp, Homo sapiens
  chr9:503916-505604
  hyper
gacctgcaaccttctgaacacgcatcctcccctttccgccgaggactctgtcctgcagccgagccagggcgaatgcacggaggtcacaagggaggtgcccttggaggcgggaggtttctggccgccggggcgaccgtgctgacgaggcacctgcaggaaacagagctctgcacgctccggtccccctcacccggggagggagaggaggtacagaggcgctgggggaggacgtcgagcaggccagcctcgttgccagaacccccgccccagccggagatgggagcaccgcaccgtctcacgggggctggatttcttctccccttgcgggtgtgtgtgcgaggatggacgtggtaaatacgggttggcagaaggagcgaaccgcggtggaggaagttcttctgcttagttctcgccgcggcgaggcccgcgggccaggcgcggcgacgaaggtgcacgaaggtgccccgcgggcctggtggagttgcagcggcgcgcaggcgcactgagggccgcccgcggccggctccgcggtacaaagagcgcccccgcggggagccgggcgtcctctgggcggagggagcagccggggcttcgccggcccgcgccgttcttctcacgcgccgctccggggcgcagccacagctgtcgcccaccgcgggtgagaggcttgctggtccgccccggcttccccgccccggcggcggccgtgcggttcgggctttaattctggcgcttgccagccggggccgactccgccccctgcgccccgcccttccccgagctccgggtccgcggcggagcgagcgagcggccggcaggttgggaggagcggccgaaggtgagtgacgcggcggggccgtgccgcgccccgtgccgcggcgaggttgtcccggagcgcgaggcccctacccctgcctcgggctggccccgcgcggagccgacttggcgcgcgccggggttgcgcggcggccgtggcggtggcggagggcagcccccgcgggctcccgctcgtgcgggtgaacccggcggcctcggggcggtcctgggggggggtccgagaggtggcgtcggccccgcggccgtcggagtttggcgcgctctgcagcggcggcgctcggccggtctggaggagggagaggcgcgccgggcacggagcagcgagaaagttcgggccgggccggccggcgggagggtgcgggcgcctggctaccccggcccggcgctctgtccctcggatgcctctgggcccttccctagcccggggcggaacgggggaccctctctgaagcggctctccgtggagttggatgttgcccttcgcgggagggagtggcggtcaagacccctttatcctcggccccagaggggcaggtggcctcgggtcgccctccgccaactccgaggtggcttcggccggggctggagggcggggaggcgggggaggggcgtgggcgctgcggcctctggggcggcccaacccggcgcgggcagcgtgggtttccgaggtcccgcggttccaggtcgagggaaggtgtaggggccctgaagcgggctggtccccgaatgttgcgttttctgtgccgctttgggcaacacgcagtggcgctcgcggcagccacggctccttgaccgttcatctccttcacccgggtcccgtggaactttcagaggcaactgttcttggtggc

SEQ ID NO: 286283 - DNA, 103 bp, Homo sapiens
  chr9:505639-505742
  hyper
tgacctagtgaaggccttgggcgagttggcgttaacaatttatggcgtccgccagcgctcgctttccgcacgtggcctctgcggagggtcagcccatcttatt

SEQ ID NO: 286284 - DNA, 138 bp, Homo sapiens
  chr9:706973-707111
  hyper
ttttcagaagataccggtttcctgttttcattaagaaaacagggaatgcggaacagctgagtgcggcgggggtggtgtcactgcagccggagggagacctcgccggtgaaagctcagcctatggcatccgagcgtggc

SEQ ID NO: 286285 - DNA, 239 bp, Homo sapiens; identical to SEQ ID NO: 45981
  chr9:707165-707404
  hyper

SEQ ID NO: 286286 - DNA, 41 bp, Homo sapiens; identical to SEQ ID NO: 201645
  chr9:841326-841367
  hyper

SEQ ID NO: 286287 - DNA, 115 bp, Homo sapiens; identical to SEQ ID NO: 234019
  chr9:968066-968181
  hyper

SEQ ID NO: 286288 - DNA, 214 bp, Homo sapiens
  chr9:971638-971852
  hyper
cgtccgccgggcgggttagggtcgtggcagcctgcccgcgcgccgctgactctggaattttgtccgggaaactggcgtagggccctggctctcccttcgccctccgcgcacacgcggacgaggccttagatccacagccttttctaggccctgcgcctttgaagctgggccactgccaaccgctcgcgattctcaccttcaacagtcgccccct

SEQ ID NO: 286289 - DNA, 87 bp, Homo sapiens
  chr9:974427-974514
  hyper
agtatttagatctcagcccccgatgtgcaccggagtgaaacgggcccccgggaccaaatgccagactgtttgagtggcaacgagata

SEQ ID NO: 286290 - DNA, 47 bp, Homo sapiens
  chr9:975070-975117
  hyper
ctcccggacgcgtatgaaacgggaacagctaagggcttcaagggaaa

SEQ ID NO: 286291 - DNA, 166 bp, Homo sapiens
  chr9:975167-975333
  hyper
tgggcagagggttggctgctagaacgcctggaggtgcttcccttgaattcatggcaaacaccagaggaaagttttcaggttgcttgcttacttccagggcagtacagagaaaagcggcctccccgaggggacaagggcctctgtgcccatgaggggtcggacattg

SEQ ID NO: 286292 - DNA, 210 bp, Homo sapiens; identical to SEQ ID NO: 201646
  chr9:976961-977171
  hyper

SEQ ID NO: 286293 - DNA, 263 bp, Homo sapiens
  chr9:1049910-1050173
  hyper
aggcatcatttttacgcccagtttggattaatgattgattgagtcgcagaaatgcttgtgatgctgatagaggccaatactggtctttctgatctcttcctcgtcgtttattaccttctcttgtggacaacgcattcctaagaatgtatctctgcttgtttcccagtccgcgagataaatggtgacttctctcttgcaggcaccgtcatacctcgggtttagattctggacaggcgagccggctgcaccgaaggcccggtagg

SEQ ID NO: 286294 - DNA, 283 bp, Homo sapiens; identical to SEQ ID NO: 46004
  chr9:1050390-1050673
  hyper

SEQ ID NO: 286295 - DNA, 161 bp, Homo sapiens; identical to SEQ ID NO: 234028
  chr9:2014343-2014504
  hyper

SEQ ID NO: 286296 - DNA, 182 bp, Homo sapiens; identical to SEQ ID NO: 234029
  chr9:2015621-2015803
  hyper

SEQ ID NO: 286297 - DNA, 98 bp, Homo sapiens
  chr9:2621195-2621293
  hyper
ggatagaggaggcccgaagaagatgctacctaccagcctctctcaggggcgcaggagagggtggtagagagatgcttgttgcccctggaaactgcaag

SEQ ID NO: 286298 - DNA, 207 bp, Homo sapiens
  chr9:2621726-2621933
  hyper
cccgcccgcccgccgcgcctcccgttgaccacgccccctccggccccctccccgctgctcaccccgctctccggccgccgccggtgcgggtgctccgctaccggctcctctccgttctgtgctctcttctgctctcggctccccaccccctctcccttccctcctctccccttgcctcccctcctctgcagcgcctgcattattttc

SEQ ID NO: 286299 - DNA, 686 bp, Homo sapiens
  chr9:2622256-2622942
  hyper
gcgccaccggaaccggtgagtgaggacgcgcccctccgccggcgggcgggacccagccggggcaccgggagaccccgaggcgtaggtctccgtttgcccacccgcctcctaggaggcgcctctcggttctcctcgccttccctccctcccctccgtggtggcgcctctgagctgtcagcgccgaggctaaagggagccgggcttggggaacagcggggttcggggtgccccgacgcctcgcctgaactagtcttctgcccctcactccgcctcccccagagccgctgcttcgcctcgtttctcgccctcttgacgggcgccgaggtgcgtgggcttctgagcattgaacaatggttctgcctcctctgccaggcgcagtgttgggaaggaggcagagggccaagacgtgtgcggcagcctcgggcgcaccctcgaaccccggggagtgcgggagcggacggggggagaaggtgagcgcctccggggacgcggagcgccaggggccggccgggcttcagagtcttccggcggccgcgagctggcgcacgttcggtgggcggcggccgggaggctccgcggagccgagggcacccggactgcgactcccccggcgcggggccgcctctccggcgtgcggggtaggggagcggcggggctttacgcaggactctgctctgggcgcttct

SEQ ID NO: 286300 - DNA, 438 bp, Homo sapiens; identical to SEQ ID NO: 201650
  chr9:2623022-2623460
  hyper

SEQ ID NO: 286301 - DNA, 100 bp, Homo sapiens; identical to SEQ ID NO: 201651
  chr9:3181024-3181124
  hyper

SEQ ID NO: 286302 - DNA, 64 bp, Homo sapiens; identical to SEQ ID NO: 201652
  chr9:3181880-3181944
  hyper

SEQ ID NO: 286303 - DNA, 403 bp, Homo sapiens; identical to SEQ ID NO: 234033
  chr9:4297351-4297754
  hyper

SEQ ID NO: 286304 - DNA, 217 bp, Homo sapiens
  chr9:4298792-4299009
  hyper
cgggccggtacccgcgaggagtgtaggtaccctcagcccgaccacctcccgcaatcatggggacaccggcttggatgagacacaggcgtggaaaacagccttcgtgaaactccacaaacacgtggaacttgaaaagacaactacagccccgcgtgtgcgcgagagacctcacgtcaccccatcagttcccacttcgccaaagtttcccttcagtggg

SEQ ID NO: 286305 - DNA, 320 bp, Homo sapiens; identical to SEQ ID NO: 234035
  chr9:4491100-4491420
  hyper

SEQ ID NO: 286306 - DNA, 99 bp, Homo sapiens; identical to SEQ ID NO: 201655
  chr9:5022028-5022127
  hyper

SEQ ID NO: 286307 - DNA, 248 bp, Homo sapiens; identical to SEQ ID NO: 201656
  chr9:5054640-5054888
  hyper

SEQ ID NO: 286308 - DNA, 82 bp, Homo sapiens; identical to SEQ ID NO: 201657
  chr9:5069924-5070006
  hyper

SEQ ID NO: 286309 - DNA, 152 bp, Homo sapiens; identical to SEQ ID NO: 201658
  chr9:5080228-5080380
  hyper

SEQ ID NO: 286310 - DNA, 99 bp, Homo sapiens; identical to SEQ ID NO: 201659
  chr9:5081712-5081811
  hyper

SEQ ID NO: 286311 - DNA, 84 bp, Homo sapiens
  chr9:6412900-6412984
  hyper
ggcacccgccccctcagctctgaaacgaggcctcaaaacggcaaccgatgtggtagccgcgcaatcttccgaaacccaaaggct

SEQ ID NO: 286312 - DNA, 248 bp, Homo sapiens; identical to SEQ ID NO: 234037
  chr9:6414082-6414330
  hyper

SEQ ID NO: 286313 - DNA, 315 bp, Homo sapiens
  chr9:6644554-6644869
  hyper
cacaaaagacaaataggccagaataatctaagtccaagggagccctcccggccacttacaaacagggtcttccattttcaagggtcttttcaaacggatgttggcagggaccgtcttctcgatcaattcatcaatgctctaaaattaaaacgcaaggcagaggaaagtgcctctgagttaaaagagtcacctctgtgttttgcgactacaaagccttgtgggaacctcattgaaatcgcctaattagggttctttttaaaagaaaaggaaaactctgagcaagccagaatgatttggaggaaagaaaatcgtgaa

SEQ ID NO: 286314 - DNA, 352 bp, Homo sapiens; identical to SEQ ID NO: 201663
  chr9:8856995-8857347
  hyper

SEQ ID NO: 286315 - DNA, 37 bp, Homo sapiens; identical to SEQ ID NO: 201664
  chr9:8857406-8857443
  hyper

SEQ ID NO: 286316 - DNA, 49 bp, Homo sapiens; identical to SEQ ID NO: 201665
  chr9:10612635-10612684
  hyper

SEQ ID NO: 286317 - DNA, 157 bp, Homo sapiens; identical to SEQ ID NO: 201666
  chr9:10613299-10613456
  hyper

SEQ ID NO: 286318 - DNA, 155 bp, Homo sapiens; identical to SEQ ID NO: 234041
  chr9:12775118-12775273
  hyper

SEQ ID NO: 286319 - DNA, 178 bp, Homo sapiens
  chr9:12775486-12775664
  hyper
cggaggagtcgcagcggactgggaactgcagctgcgaccccccgcgtcctgtgcggatttcagggctgataccgcataggcggttatggaaaggacggtacaccggagcggcggaggatagagaccctggcccccggagaggtctgctgatttcgcagcagccttcgaagccgtggct

SEQ ID NO: 286320 - DNA, 337 bp, Homo sapiens
  chr9:12775826-12776163
  hyper
gggacagggacccctgcggggggagcggtggtggtggcggcggcggcggcggctgcagtagcagcagcagctactgcagcttccctccctccttgtcgtcctcctcttcgtcctccccaacctctggctccccacgaggtagccactctagcgccctggagaggctagaaaccaagcttcacctcctcaggcaagagatggtgagtgtggtgcgccagccgcgggggctgggacctgggctgggccaaaagatggggcgatctgagaatggggctgggagagaggacggcaggggctgcagagcggagcgctgggcgcgtgggaaatgctgggtgga

SEQ ID NO: 286321 - DNA, 369 bp, Homo sapiens
  chr9:12776216-12776585
  hyper
gcggactttgctcggtcacggtttgcaaagacagcacagtcggctggctccactctgtgtactttcggacaacgcgactcactgcgccgggctctatttagctgccagcccgtagcctcttaggcaccagcccgttgagagtttgcagttattgcacccatctaaggcctgctgtgcgctgttaacacttcgggtaggttcaaaaggtggctcagtccaatgcacttactgcaaaaatacttcctggtttgccgggaggtggcgtggcagggtccttgcagcctttcctcctagctcacccttccaccagtaccgctccgccctcctgccctcccttcttggtgcagcagccgcagctgttccaaggcc

SEQ ID NO: 286322 - DNA, 335 bp, Homo sapiens; identical to SEQ ID NO: 201668
  chr9:13034172-13034507
  hyper

SEQ ID NO: 286323 - DNA, 100 bp, Homo sapiens
  chr9:13278635-13278735
  hyper
gacgcccatcagcgcggggggtgaggagactaagggagagacaagaccaacgtgctcccaccaacgggagcggcggttaaaagggcgccggtgccagggg

SEQ ID NO: 286324 - DNA, 347 bp, Homo sapiens
  chr9:13278956-13279303
  hyper
acaccccacccccagccccccgacaccaagactgtgcccctctgggtcaaggaaaaggaaaaacttttaaacctcttagtcagcgagagcaaaagaaaggggtggcgggggtgctgaaaggtctaggattatccaccgcggggctggggggagtggagacttgcgagtagcaaaggaaacttctagaccccatccttttaaaaaagccacagcagcggcttccgcgaagcgccgggccgcgcggggtggggcaagcgcaccgccccaccgccccacggcccgccgccacccctacccccacccccacccccacccccatccccgcccccacccccacccccaagcgc

SEQ ID NO: 286325 - DNA, 227 bp, Homo sapiens; identical to SEQ ID NO: 201670
  chr9:13279406-13279633
  hyper

SEQ ID NO: 286326 - DNA, 186 bp, Homo sapiens
  chr9:13568805-13568991
  hyper
cctgctgtcacttacggtgggctcggggaacaatgttgcaggaacatagagcttttgagggaaatgtaaatcgccggcgacactgagtcccgtctgttttctcatcggaaagcagcatttcagagagctgaactggcgacactgcttggcgaagacacgccgagttcaggaatattccctgttccc

SEQ ID NO: 286327 - DNA, 63 bp, Homo sapiens
  chr9:13569061-13569124
  hyper
actttcagaagcagatgctcctggcttcggaaggaaagctgctctaatcggagttcagccgtc

SEQ ID NO: 286328 - DNA, 223 bp, Homo sapiens; identical to SEQ ID NO: 201671
  chr9:14313096-14313319
  hyper

SEQ ID NO: 286329 - DNA, 2025 bp, Homo sapiens
  chr9:14313785-14315810
  hyper
cgccgccgccgccggtgttggctgcttttcgcctgggtttggggatttgttttctattttgcagttgttgttgttgttggggtgtagggggtgcgcgaaggttcggtgtgggttggattggggtggtggttggtggtaaaatgctttttcaaaaaaggcggggaggggggcgcgggagggcgcaggagggcgagcgggcgggcgggagggagagcggggagaatgtgtcaccgcgctgggaaagttcaaggttacagccccaagcactgcggcaggatcccggagtggtgatcgcaggcgaaactttgccgcgagccgaccatgtgtgtgcgcgaggggcagcgtgagcgagtgcgcgcgggtggcggggcgcgcgcgggagagggccggggtgggggcggggtgggatgggggagaagggagaggccggggtgagggagggggcgcgagcgctgatctctggggcggaagaggctcgcggcgcgtggtccccggcagcagcagccgccgccgcccgcgccgggtcttcggcgcccggccgcccgcccgcccgcctcgccccgcgtctgacccggccgagcgtggaggctgctgttgccgccgctgcccagagcccaggggtatcaaaacgatctcctgaaaaattccaaacgataaatcccgctctcccgctcggctccaaactcctctcttttctgctctaggctcttttttttccctccctctcttgctttctttcgttgcaaaacttggaagttgaaaaattcaccggttccaccctctggaccccgctcgagctctctccaaatcagacttaaggattgttttattatttaattacacaatcatcgctttactcctcctcctgcaaacgcgcattccttttgcaccagcctctccacaccccccgcccccccaccttcctcctcctcctccttctccttctctccccccacctctccctcatttgttaaaggtatcctaccggtgctacagaaccatgactttttttttttttccaaaatagctcttctttccgctgccctccccacaccagcacacacatacacacccccgaaaacccgccctggaagaggtatttcggtgctcgctgcggactcttttaagccgcgggaacatccgagtgggagaagcaccgaaaccgtctgagcccgagaaaggaacgagtggaaaattccctcacacccaggccgcccccaggccggggctggggcgcggacactcgcacccggggcgggctcagtccgcggagcctgcggctgccgggaaaagggggaggccgagcaggcggggacctgagcgaacttgggctcaagtagttggggcgcgccggcgtggaccaggggggtgcggcgcccagcccccgacggccccgcccggagcccgggttcgcggatagggagggggtgcgggttcgtcccgggtctgcccaccaggggcccgcacccgaggcagtcgcggcgcgcggcgcttcgccgcggtttgccgccctccccgggggtgccccgtgcacgtggcctcgctctgagcgggaggaccgggccgagccgccgccgccgcctcttgctccctccacctcctccccgcgcccggcttcgctctcctcctcctcctcctgcagccccgctggctggctcccaatccccaccccccggggcccggggcgccggcggaaagcgtctccctacccgcccgggtgcaggcggggcggggccgcggcgcgcccggggctgcggggcgggccggcgggcgcgcgcgcgccgctgcagccctccagaggctgcgggccctgagccgctcggcgcccgcgccggctccccaccgcggcgctgccccgcccccaccccgtcgcccgtgcaggctccgagtgaatgaacttgattccagggattttgaagaaggcggttcgccttgcaccctttctgcaccccccgcccacatacacacaccgccccccaaatccagttttctgcttggggtggatggggacgagggggaagcaaa

SEQ ID NO: 286330 - DNA, 845 bp, Homo sapiens; identical to SEQ ID NO: 201674
  chr9:14322293-14323138
  hyper

SEQ ID NO: 286331 - DNA, 77 bp, Homo sapiens; identical to SEQ ID NO: 234052
  chr9:14347274-14347351
  hyper

SEQ ID NO: 286332 - DNA, 434 bp, Homo sapiens
  chr9:14347673-14348107
  hyper
aggcactggggggtcgggtgactgtgcggagtgtaaaagacatttccttaggaaacagacaaggcagggccaggagttccgcggttttttttccgtgcagaaatcactacccggcgacggctcagggcggtagagggcaagtcttatctgccaaggcgggattagattctctcgccgagggtcccagtatcccgccgcccagcaagggccgagcgcgcgcgcgcgccagggagctttggagcgacgcgcgtagtttcgcgtcgcacgcggtgtctggtctccgcgcaccacgtgcgctcgcggtccttggcggggacgttggtgctagcgatccgacagagcacccaggactaggtttttgtgatgccctaacctgggcatttatgctgggggcggaacgaagtcgcccaacccaagttctccctgcaccctgg

SEQ ID NO: 286333 - DNA, 608 bp, Homo sapiens
  chr9:14348452-14349060
  hyper
ggtggagagaaaacaaggttatttaaagtgactcccagaacgcagctttcgttcctagactctttaggtgtcagtgcttcggctccagtttagcacggcacaggcggcccagcctttgatatttaagccaggccagcgcccgggtgaaactacctgttgggggattctgccgcctggaacccttcttcttctgcgcaatactggcagcagtgggatggctctgggggtgccacgcgaagagagagggcggaagagccgggagcagcggacagtcagctgcatgtggcagtgcctagcgagctgctcccgcgcctctgctcgctctttgaaaactggaaacagccccctgtgctctgtgctgggcccctggctgcggagatgggcccaaactcggcacgattctctaagttcggaaaccacgaagcttgcgccttcatgcgtgtctaacattaaaaacaaaaaaacctcctggcggcttcctgggctcccgcccccaccttgcgctccaacacccggcacttttccctgtaccgaaattcactttactacttcttgaaattcggaaaactccaccgacgcttggactcgctgcaacccaggggctgcct

SEQ ID NO: 286334 - DNA, 623 bp, Homo sapiens
  chr9:15306323-15306946
  hyper
gctcaggcccgggcgcgccacgactgaaggagtggctaattactcaaacacagttgaaaccaaaggaggccggagtcggttctcaaagtggtttccctccggccaccaccgactctgaggacctgctaggggaagtgtcccggccccgtggagggagagggaagcaccacagcctgggctgcggctctagccctccagccccagcccctggcagccctgccctgctgtcgcggcaggtacccctctactcattgttcctcaggctgccccctcttttcatcaatcgtaagcctttcggttctgccaccaggaaacttccatagaaggtgagattcccaggtcgagggatgattccacgaacacccagagagccagtgccaggacttcagggtcagacttcgtaaagcccaggcgtcgctgggccggcccggaacagctcagagctgcgggtcctatggtcccgcgccctcacgcccatccaagtgctggcaggacgtgggtcctccatccccacgactcgcggggccggcgctccgaacctcggcactgcgtccgctccgcgcgccgcagggaccctcctagctccagcggggacagacctaccaaggccgggcgcccccacc

SEQ ID NO: 286335 - DNA, 393 bp, Homo sapiens; identical to SEQ ID NO: 117474
  chr9:15306998-15307391
  hyper

SEQ ID NO: 286336 - DNA, 238 bp, Homo sapiens; identical to SEQ ID NO: 234055
  chr9:16133902-16134140
  hyper

SEQ ID NO: 286337 - DNA, 76 bp, Homo sapiens; identical to SEQ ID NO: 201678
  chr9:16154771-16154847
  hyper

SEQ ID NO: 286338 - DNA, 161 bp, Homo sapiens; identical to SEQ ID NO: 234057
  chr9:16192255-16192416
  hyper

SEQ ID NO: 286339 - DNA, 308 bp, Homo sapiens
  chr9:16870325-16870633
  hyper
cctagccagccgctcaccttcgcgcggaagccgcgagcggggccgaccttgagaagccccctctcacgtgcaccctcccacctagagctcgcctcagaaacttggggccaagtttaggggaggccactgggagcgcagcggggatcaggtcggaccggggttctggtccccggcccgccctcctcagcgccccttgcccctcacgccgcgggccggagggcggacacggcccccgggcggccccggtggcgctcgggcgcgggggtcatttctgaggaagtctagaataaaagaggaaggagggtgga

SEQ ID NO: 286340 - DNA, 216 bp, Homo sapiens
  chr9:16871199-16871415
  hyper
ggcttgtttgttgtttgggttgttcttgctctctctttctggggatggaaaaaacaactttgtggggatggaaaaacaaccctggcgcccccccccccccccggggagctgcgggcgtggaggtagaggtggccgctagcgcccagctgtcacacacacacaaaaaaaaattgcggggcgggggtggggagcggagcaaggagaggaggctgcgaa

SEQ ID NO: 286341 - DNA, 38 bp, Homo sapiens
  chr9:17134993-17135031
  hyper
gggctcgccgggttggggaaagggaggtggagtttcca

SEQ ID NO: 286342 - DNA, 62 bp, Homo sapiens
  chr9:17579748-17579810
  hyper
cggtttgcgctcctctcccttaccctgttgtcagaaccctccttccccgccgcccgcaggct

SEQ ID NO: 286343 - DNA, 67 bp, Homo sapiens
  chr9:17905991-17906058
  hyper
gcctacccagctgtcgtgggtccccgtcactcccgggcgcatgttgcaaaacaaatcaactccatgg

SEQ ID NO: 286344 - DNA, 257 bp, Homo sapiens
  chr9:17906726-17906983
  hyper
gcctgccggccgccgccgcggagccaccgcaatcagcgcaggaggcggccacctcttcgagggaggggtctcgcctgagactccccttggtccccgccatggggaccatggcacgactggaggcgccccagtgccccgggttcctggcccgcctcctcggtggcacctggtgcctgctctgtatcgccggacaggtagggtagcctgtgcgtcttgcgtccctcccggggactctgcttctaaagcctgtgctacag

SEQ ID NO: 286345 - DNA, 301 bp, Homo sapiens; identical to SEQ ID NO: 234064
  chr9:18473916-18474217
  hyper

SEQ ID NO: 286346 - DNA, 116 bp, Homo sapiens
  chr9:19127115-19127231
  hyper
caagcaggccaagggacattcgatagcaatcgccctaaatctgttggcaggaaagaagcctcaacgcacaaaggcaagggtcgaaagcgcgggttcagcagaccgcccctacccag

SEQ ID NO: 286347 - DNA, 149 bp, Homo sapiens; identical to SEQ ID NO: 234066
  chr9:19229764-19229913
  hyper

SEQ ID NO: 286348 - DNA, 355 bp, Homo sapiens; identical to SEQ ID NO: 201680
  chr9:20620358-20620713
  hyper

SEQ ID NO: 286349 - DNA, 1618 bp, Homo sapiens; identical to SEQ ID NO: 201681
  chr9:20620754-20622372
  hyper

SEQ ID NO: 286350 - DNA, 35 bp, Homo sapiens; identical to SEQ ID NO: 223568
  chr9:21032003-21032038
  hyper

SEQ ID NO: 286351 - DNA, 91 bp, Homo sapiens; identical to SEQ ID NO: 201682
  chr9:21395908-21395999
  hyper

SEQ ID NO: 286352 - DNA, 57 bp, Homo sapiens; identical to SEQ ID NO: 201683
  chr9:21396327-21396384
  hyper

SEQ ID NO: 286353 - DNA, 134 bp, Homo sapiens; identical to SEQ ID NO: 201684
  chr9:21559113-21559247
  hyper

SEQ ID NO: 286354 - DNA, 284 bp, Homo sapiens; identical to SEQ ID NO: 201685
  chr9:21559381-21559665
  hyper

SEQ ID NO: 286355 - DNA, 73 bp, Homo sapiens; identical to SEQ ID NO: 201686
  chr9:21559702-21559775
  hyper

SEQ ID NO: 286356 - DNA, 68 bp, Homo sapiens; identical to SEQ ID NO: 223569
  chr9:21802584-21802652
  hyper

SEQ ID NO: 286357 - DNA, 36 bp, Homo sapiens; identical to SEQ ID NO: 201687
  chr9:21965786-21965822
  hyper

SEQ ID NO: 286358 - DNA, 136 bp, Homo sapiens
  chr9:21967409-21967545
  hyper
gggttggctggattcagttacctggctgaggcctggtgagcaaaatatcccaaacctcgcgtgatctggaaggggaagccggataaatacggatctccagatgtgccagtctcgagtctatcgatatgaggtcccc

SEQ ID NO: 286359 - DNA, 213 bp, Homo sapiens
  chr9:21994237-21994450
  hyper
cgtgagccgcgggatgtgaaccacgaaaaccctcactcgcggcgggccgcacgcgcgccgaatccggagggtcaccaagaacctgcgcaccatgttctcgccgcctccagggccgagctcggcagccgctgcgccgccctttggcaccagaggtgagcagcgccactcctgcccccttaactgcagactgggacccacgcaccgccccctgcc

SEQ ID NO: 286360 - DNA, 161 bp, Homo sapiens
  chr9:21995749-21995910
  hyper
tcggctctcgtccaggaactcggacgcgggctcgccggctctccgcgcgcgggaagtcgagcccaggacgccgccttcaggccggcgcgctgacccggtgccccgacccggagcctgcggtctgcctggatccgtcctaaacctcgcgggctggacccgcg

SEQ ID NO: 286361 - DNA, 90 bp, Homo sapiens
  chr9:22005969-22006059
  hyper
gctggggaacctggcgtcagtcccccgtggctgtgcgcaggtaccctgcaacgtcgcggtggccccgctcctcggccaagtccacgggca

SEQ ID NO: 286362 - DNA, 246 bp, Homo sapiens; identical to SEQ ID NO: 201689
  chr9:22446679-22446925
  hyper

SEQ ID NO: 286363 - DNA, 212 bp, Homo sapiens; identical to SEQ ID NO: 201690
  chr9:22447276-22447488
  hyper

SEQ ID NO: 286364 - DNA, 72 bp, Homo sapiens
  chr9:23821662-23821734
  hyper
ggaggagtcgctcggggcgagctccgcggagaggcggtggcggcggcggcggcgggaaaggggactggaagc

SEQ ID NO: 286365 - DNA, 95 bp, Homo sapiens
  chr9:23822017-23822112
  hyper
cgagtctcaccaggcttccccgacaaggtttctctggactcggtggagagcgttgagcgcccagaggaggctgattccaggtgcaagtttgcaaa

SEQ ID NO: 286366 - DNA, 353 bp, Homo sapiens
  chr9:23825940-23826293
  hyper
aaataaaaagaaacgctttcgaccccaaagtccaatgctaaaagaaatggcgaaaaaaaatatgaaaggggaggggaaacttaaaaaagagtttaaaaagacggagagactaccctcctattgccgttcaactaaacaaaaaggggcaagaaaaacaaaccaaggaacaaagaaaagagacgaaagaacgttttttcaaaaagacgatgtctttctccttgttgctttttagtaggtcgctacaggagtaagctgctgcatctctaactaagaacagaaataggggggaggacgtcttaaaagggaggtggactggaccacagatttatagcaccgtatcaccaaccccttct

SEQ ID NO: 286367 - DNA, 47 bp, Homo sapiens
  chr9:23826475-23826522
  hyper
ttgtgtcactctcgagagctcaatggagtcccgtttcaaggtaagtt

SEQ ID NO: 286368 - DNA, 37 bp, Homo sapiens; identical to SEQ ID NO: 234086
  chr9:23830865-23830902
  hyper

SEQ ID NO: 286369 - DNA, 149 bp, Homo sapiens
  chr9:23831484-23831633
  hyper
aagaagactgaggcccggggagacacagcggctagagaaacagctgtcttatcagcccgctgcagagatggagatggcttgagaggtcctcaacagataatcacttgaataggtttgcaatgcgccaaacttcacgcttgataaggcca

SEQ ID NO: 286370 - DNA, 89 bp, Homo sapiens
  chr9:23849752-23849841
  hyper
actactggtttgtacgggtttctttttgttgttgtttaacgaccccctcctcccagcccccaaccctttgtgtgtgaggattccccttc

SEQ ID NO: 286371 - DNA, 169 bp, Homo sapiens
  chr9:23850241-23850410
  hyper
gcccccagcacccccgcgattacccgagtgactgcacttgcctccagccagctcaactgcaggagaggaaagccccatctaagttcactagccctgccacagtcttccactgcctgatgggttccttcaggaaaacacttccagaggcattcatccacttgaggtctgg

SEQ ID NO: 286372 - DNA, 293 bp, Homo sapiens
  chr9:23851182-23851475
  hyper
ccgggacggtgtcgggggcgggctgcacggcgagaagggcaaaataaaaccagcccgagaggccctggctggggttgagactgcaggagtaacttctgcaccgaggcagcgcgcagccagtcggggaagaactctgcaacctgaccgaaagaaagtccgaccctctcgggagggctgccaggatgctggagcgagtgtcagggtccgagactcccaagtcgggcgagggctcctgcccctggccattgggtacccccctccgaccaacacccccgtcccgcttcagagcgtcg

SEQ ID NO: 286373 - DNA, 92 bp, Homo sapiens
  chr9:25677513-25677605
  hyper
ggccaagcgccacccggaagtgtccactggtgggggcgggaaggcaccgtagtccaaggtatccgcgggcagggagcgggccagggcgtgcg

SEQ ID NO: 286374 - DNA, 426 bp, Homo sapiens
  chr9:25677627-25678053
  hyper
cggaggaggaggggcccgctcgaggctccgcctctcaccggctgcggcctcggctacagccagggcccagagggctccgagtcccgggagcggaggccggagtcgggttcctgtagaggctgctcctccttgtccccgctcggacgtggtccccgctgctcgaggtgcagctgcagcagggcccggcggtacatggcttccagcttctcaagtcgggccctcagggccctggggctgcccggctcgtcctctcggccgctgtctctagccctccggttcgtgctggcctcttcagggacccggcgtgcctccgcgggcgtcccgttgccgccttcgccggggagccgcaaagcctgacggaagaggctgcggttctcgcgcttcagccgccggttctcgagccgcagccgggcgttctcctgacgc

SEQ ID NO: 286375 - DNA, 490 bp, Homo sapiens
  chr9:25678127-25678617
  hyper
ccgctcctccagctgctgtcgggcgccgtccgcgcggcctcgccagcccacgccgccgccgccgccgctggggctgcccccaccacgagcccggccggagcggcctggccctcggccgtccgcagcaccgtccccgccgcagcaactcccgcgcctagtggcgccaccacgcatgcgccacatcggtcccatcccaaccgcgccgccagccccgtgggctgaggggccgcgcggccaggcgcgggcaagttcggggctggcagggcggccggggtgacgacggaggaggagaggaggtcgcgggcggcggctgctggcttagagccaaaggaggccgggaatttgcccagactgaggcgtgtcctgtctcctgtggtggagctgccccctgggcctgctctctccaggctgcgctgacacacagttcccccggggagtgctttgctgttcagccctccggctgcgcgggaaaaagcgtgtatcctcagct

SEQ ID NO: 286376 - DNA, 688 bp, Homo sapiens; identical to SEQ ID NO: 234093
  chr9:26892268-26892956
  hyper

SEQ ID NO: 286377 - DNA, 63 bp, Homo sapiens; identical to SEQ ID NO: 234094
  chr9:26956461-26956524
  hyper

SEQ ID NO: 286378 - DNA, 567 bp, Homo sapiens; identical to SEQ ID NO: 201691
  chr9:27528537-27529104
  hyper

SEQ ID NO: 286379 - DNA, 182 bp, Homo sapiens; identical to SEQ ID NO: 201692
  chr9:27529157-27529339
  hyper

SEQ ID NO: 286380 - DNA, 581 bp, Homo sapiens; identical to SEQ ID NO: 201693
  chr9:27529340-27529921
  hyper

SEQ ID NO: 286381 - DNA, 299 bp, Homo sapiens
  chr9:29212828-29213127
  hyper
tcctaacttgacttaacccccaccccatccccaacatctattttaagttattgtctctggcaattcaagcagcagctttgctgcctcttaccttgaggcgctgttaattctccttcgtgtccttaaaatcccaagccaaggatgcgacgcacacaagtccaggggcttttcctggacttccccctcctcagctctgaaggctcctcctttccaagggatcaggaggggatggcggttcaaaagccctcaccatagaggcgcctccaagccttcgtaccagtggaaatggagaccgggac

SEQ ID NO: 286382 - DNA, 225 bp, Homo sapiens; identical to SEQ ID NO: 234100
  chr9:33166527-33166752
  hyper

SEQ ID NO: 286383 - DNA, 85 bp, Homo sapiens; identical to SEQ ID NO: 234101
  chr9:33290497-33290582
  hyper

SEQ ID NO: 286384 - DNA, 60 bp, Homo sapiens
  chr9:33524278-33524338
  hyper
ctgcgagtgtcgctgctgaaggctgtagtggaccgggctggatcgcggattctgagctac

SEQ ID NO: 286385 - DNA, 121 bp, Homo sapiens; identical to SEQ ID NO: 234104
  chr9:33816693-33816814
  hyper

SEQ ID NO: 286386 - DNA, 191 bp, Homo sapiens; identical to SEQ ID NO: 234105
  chr9:34178911-34179102
  hyper

SEQ ID NO: 286387 - DNA, 51 bp, Homo sapiens; identical to SEQ ID NO: 201695
  chr9:34377388-34377439
  hyper

SEQ ID NO: 286388 - DNA, 205 bp, Homo sapiens; identical to SEQ ID NO: 201696
  chr9:34379700-34379905
  hyper

SEQ ID NO: 286389 - DNA, 351 bp, Homo sapiens
  chr9:34380723-34381074
  hyper
caggccttggagcccgagggcgggacacggcagggcctcgagagcgtgcagcgcggggctagagcaggctgggggcctgcacggaagctggccgggctggaagggggcggggttctggggcggggcttgtgtggggtggagcccggctgaggcgggcggagccctgcgaaccttacagtcggttgctcccggcaccaaggccgcaggcggcggtcggtgcagggcgccccgctggcgtagtagtccatcccgcgcagacagtagtggcggcccgagcaagcactttcgtaaccatggaagggcaggcggccgggcagcgggtccacgcacccgcatcggggcgtgatccgc

SEQ ID NO: 286390 - DNA, 155 bp, Homo sapiens; identical to SEQ ID NO: 234109
  chr9:34458519-34458674
  hyper

SEQ ID NO: 286391 - DNA, 291 bp, Homo sapiens
  chr9:34589598-34589889
  hyper
cccggcagcgagcgaggcagggagcgcggagctagcaccgcccgccggatcccaccgccgagcctcgcgccgcgccggctggagccgccgcctccgctgccgccgccgccgccgcccgctctgcaccggctcttcagcgctcggcggctttaacccccccatcctcctccctccctcgcgcgctccctccctccttctctcgcccatgtgaccgcgggcgcccgctcggccgcgcgcgccctcgctcccctccccctcttgccttgtctccccgcgcctccgcggccgcgc

SEQ ID NO: 286392 - DNA, 278 bp, Homo sapiens
  chr9:34591177-34591455
  hyper
ctggagctcagagacggccagctaggacttcaggacacacagcaaactagctgcgccccgctgagggtcagcgcacagccgcccacacaaggtgtcctctccccgggctctctgggccgccggcctcctgcttcccgtgccgcagaccgggattagactgtggacgcggggaaggaagggggcgttgcgacgggatcttgaggggagcaggacttgcccctgcccctgcggcgaagctctaggccctggcaaggttcggtacaccgggggccgctcct

SEQ ID NO: 286393 - DNA, 39 bp, Homo sapiens
  chr9:34591656-34591695
  hyper
tgctgtcggcagagcagcagtccacggctgcggggacaa

SEQ ID NO: 286394 - DNA, 77 bp, Homo sapiens; identical to SEQ ID NO: 201697
  chr9:34646925-34647002
  hyper

SEQ ID NO: 286395 - DNA, 82 bp, Homo sapiens; identical to SEQ ID NO: 201698
  chr9:34647225-34647307
  hyper

SEQ ID NO: 286396 - DNA, 88 bp, Homo sapiens
  chr9:34664959-34665047
  hyper
tggggaggggcgctcggctcgaatggcgacagcggcggcagagtcaggaggtcagtacggtgggcttcggtttaaatctttaatgcac

SEQ ID NO: 286397 - DNA, 90 bp, Homo sapiens
  chr9:34665215-34665305
  hyper
gcggggcgggagctaccggattccccccgatgggtcctcagagactgagtcccgtccatgcccggggcgggtccgcggtatcgcagcctc

SEQ ID NO: 286398 - DNA, 542 bp, Homo sapiens
  chr9:34701753-34702295
  hyper
cacccaggcccccgagcctcgggggtcctctgcggggccggcccagcccggtggccgggggaaggcccgtgtttgtcggcgaatatgaagcatttatctttccctcccacgccccaaatagtcccgatttacccagagcccaaggtgcccaatgttgaagtcttgaaataattactgtttggcttaaaggctgaaggagggttcacatcacctctggcacttcgctcgcacccgatagatatcttacaccactcattacggggccaacgctaagaaaggtttccttattccaaggaaatatattaggcgcgaggctggggctggaggatgaagggctatagcctgacatgggcggaaaaggaacttgtcttgcccataagtggacacagggaaacgcgcaacctttggcctagaatgagacacatgtgagaacaaatcgtgaaaataattgaaaacaaattggtcctagaaagatgaaggaaatgagaatggaaaattcaacccccactcctgttttcctgtagcagacagaggactgctgc

SEQ ID NO: 286399 - DNA, 172 bp, Homo sapiens
  chr9:34957704-34957876
  hyper
cagtgccaggggtcgtgagcccggagccctgcgggggacggctggtaggccctgctggatgagtcattctccccaccccgggcacgtgctggtggcggcatccacccggaccccgccttccccccacccaacccccggcgcggaacgcgagcggtgagcggccccagcgccc

SEQ ID NO: 286400 - DNA, 345 bp, Homo sapiens
  chr9:34958128-34958473
  hyper
cggggcggggcgcgcccaccggccggcccagggcacctcgcgcgggtgcacacgccgcagccccccggggcgggtgggtgtgctccggccgcgcgcgccgccgccgccgccgccgccgccgccgcctcctcagcctgccgctccgcccgcgccgcctgctgccggcgctcggcccagcacgccggctctcgggctgccgtgggctgcgcggggcccgcggtgtgtagagtccgccgccccggagccgcgtcccgcacccggacggtcccggtaagcgggggcgggggcggcggggaccgggccgtcacctgaggggcgggtctgcggccgcggacagtcctccgg

SEQ ID NO: 286401 - DNA, 36 bp, Homo sapiens; identical to SEQ ID NO: 234116
  chr9:34989007-34989043
  hyper

SEQ ID NO: 286402 - DNA, 33 bp, Homo sapiens; identical to SEQ ID NO: 201699
  chr9:35072284-35072317
  hyper

SEQ ID NO: 286403 - DNA, 228 bp, Homo sapiens; identical to SEQ ID NO: 234117
  chr9:35096044-35096272
  hyper

SEQ ID NO: 286404 - DNA, 179 bp, Homo sapiens; identical to SEQ ID NO: 201700
  chr9:35116361-35116540
  hyper

SEQ ID NO: 286405 - DNA, 296 bp, Homo sapiens; identical to SEQ ID NO: 201701
  chr9:35161757-35162053
  hyper

SEQ ID NO: 286406 - DNA, 257 bp, Homo sapiens
  chr9:35162422-35162679
  hyper
tattattttggcaatcacttaacaatcacttgagttctttccactttcttgttttcccccaagctcctgcaagggacgattagctctccattctggtagccatgtgacaatgttgttggactgcaggctcagatcctattaaacagtgactggggttctctagtgagagtggacgagttagaagaccgcggatggttggtgcctgtgaatggtgggcagcctctcattcttttcctcctcctcgcaccgtaacgcta

SEQ ID NO: 286407 - DNA, 131 bp, Homo sapiens; identical to SEQ ID NO: 201703
  chr9:35489689-35489820
  hyper

SEQ ID NO: 286408 - DNA, 46 bp, Homo sapiens; identical to SEQ ID NO: 234121
  chr9:35490107-35490153
  hyper

SEQ ID NO: 286409 - DNA, 59 bp, Homo sapiens
  chr9:35617365-35617424
  hyper
ctgctctgggacacagtgtcactctcctgagttcctcctctgcccgggactctctcggc

SEQ ID NO: 286410 - DNA, 48 bp, Homo sapiens
  chr9:35676180-35676228
  hyper
aaggccaccgtttccctgccgaggtgagcgcggagctggccgagaagg

SEQ ID NO: 286411 - DNA, 73 bp, Homo sapiens; identical to SEQ ID NO: 234125
  chr9:35676258-35676331
  hyper

SEQ ID NO: 286412 - DNA, 922 bp, Homo sapiens; identical to SEQ ID NO: 201704
  chr9:35756561-35757483
  hyper

SEQ ID NO: 286413 - DNA, 145 bp, Homo sapiens; identical to SEQ ID NO: 201705
  chr9:35814690-35814835
  hyper

SEQ ID NO: 286414 - DNA, 231 bp, Homo sapiens; identical to SEQ ID NO: 234127
  chr9:35815225-35815456
  hyper

SEQ ID NO: 286415 - DNA, 35 bp, Homo sapiens; identical to SEQ ID NO: 201706
  chr9:36036748-36036783
  hyper

SEQ ID NO: 286416 - DNA, 998 bp, Homo sapiens; identical to SEQ ID NO: 234129
  chr9:36136266-36137264
  hyper

SEQ ID NO: 286417 - DNA, 70 bp, Homo sapiens; identical to SEQ ID NO: 201708
  chr9:36257445-36257515
  hyper

SEQ ID NO: 286418 - DNA, 220 bp, Homo sapiens; identical to SEQ ID NO: 234132
  chr9:36572867-36573087
  hyper

SEQ ID NO: 286419 - DNA, 207 bp, Homo sapiens
  chr9:37028510-37028717
  hyper
gggctaaggctttgggccaggttgcccaagcagagtggctggccctctttcctgcctcagatcaggaactgccagaggctttgggagctggtgttgcgcttctgtccaccggagaaattccgcacccggctcaaggcttcttgagaaccgaatgagccaagtcgcgtccagggctaataagggtccctgaagcgggcgggtggacag

SEQ ID NO: 286420 - DNA, 50 bp, Homo sapiens; identical to SEQ ID NO: 201709
  chr9:37030790-37030840
  hyper

SEQ ID NO: 286421 - DNA, 82 bp, Homo sapiens; identical to SEQ ID NO: 201710
  chr9:37034115-37034197
  hyper

SEQ ID NO: 286422 - DNA, 241 bp, Homo sapiens
  chr9:37035886-37036127
  hyper
accccgggctgggggcggggggtgttggtgttttgttgttgttgttgtttccatttagagggcttgttttgtttttgtttgttttctgtgagttttcatttttccatgggatattcttttgtttcgggtgttttgcgtgttgttttttcgtgggattgattttagcgggttttgctctgtaagtcctggtctttggggtgagttttgattttgtgtaattttgtactttgtccttgtaggc

SEQ ID NO: 286423 - DNA, 111 bp, Homo sapiens; identical to SEQ ID NO: 234147
  chr9:37465508-37465619
  hyper

SEQ ID NO: 286424 - DNA, 148 bp, Homo sapiens; identical to SEQ ID NO: 234148
  chr9:37466215-37466363
  hyper

SEQ ID NO: 286425 - DNA, 104 bp, Homo sapiens; identical to SEQ ID NO: 234149
  chr9:37485788-37485892
  hyper

SEQ ID NO: 286426 - DNA, 43 bp, Homo sapiens
  chr9:37576015-37576058
  hyper
cgcggagccgcgggcggcctgagggtacgcctcatggtcctgc

SEQ ID NO: 286427 - DNA, 234 bp, Homo sapiens
  chr9:37576349-37576583
  hyper
ggatcgtgcggagccgccgccgtcatgtgacgcgcaaggcggcgaaggatgccgggagcagctggctggccggggctgggcttcccgaccaccgcgcataaaagctgtatctgcaggaggggcaccgggaggcgggaggaaggcagacgaggagggggcgcgtggggcttcgggtactgcaaaggcgagcttgcggaaggacgattcaggctcgtgttgcgtggccccagaagg

SEQ ID NO: 286428 - DNA, 45 bp, Homo sapiens
  chr9:37998720-37998765
  hyper
attacaggtgtgagctgccctgcctgtcctcgaaatcctattttg

SEQ ID NO: 286429 - DNA, 95 bp, Homo sapiens; identical to SEQ ID NO: 201712
  chr9:38067583-38067678
  hyper

SEQ ID NO: 286430 - DNA, 413 bp, Homo sapiens; identical to SEQ ID NO: 201713
  chr9:38067708-38068121
  hyper

SEQ ID NO: 286431 - DNA, 749 bp, Homo sapiens; identical to SEQ ID NO: 201714
  chr9:38068158-38068907
  hyper

SEQ ID NO: 286432 - DNA, 188 bp, Homo sapiens; identical to SEQ ID NO: 201715
  chr9:38069786-38069974
  hyper

SEQ ID NO: 286433 - DNA, 40 bp, Homo sapiens
  chr9:38424026-38424066
  hyper
gcgcgcaggcgcagcgcgcagacgctggggtacgagcgac

SEQ ID NO: 286434 - DNA, 221 bp, Homo sapiens
  chr9:38424081-38424302
  hyper
cggtgccgcgctgcgcgcacacgcagagcccggtgccctcgggcgctgccccagcggcctggctcgcgcataccaggccggggccacagcgcccgccggcgcggcccccgcagctcgcgccctcggctcccaggcagcgggcgcagcagccgcactcgtcgagcgccgagatcccgggcgccgggcagggcgcaggcgccgggcagccctctggccggcac

SEQ ID NO: 286435 - DNA, 133 bp, Homo sapiens; identical to SEQ ID NO: 201716
  chr9:38619920-38620053
  hyper

SEQ ID NO: 286436 - DNA, 127 bp, Homo sapiens; identical to SEQ ID NO: 201717
  chr9:38620403-38620530
  hyper

SEQ ID NO: 286437 - DNA, 60 bp, Homo sapiens; identical to SEQ ID NO: 201718
  chr9:38620821-38620881
  hyper

SEQ ID NO: 286438 - DNA, 343 bp, Homo sapiens
  chr9:38621986-38622329
  hyper
acccggcgcaggcggcagtggaaggcggcctgctagcacggctcccgcggccccaggaccaggggtgcggccagcaccgccctcactccccgcgtctcgtggatattgccctccctggaggcggctggacctaagcgaggctcgcagcgatcggccccgcgaagactcgcatgcagggctcaggatcccgcattctggcgccgcggcaccgcacctttcagcagccctgctcctcttcttgttggtaaacttttgtcactctgccatgaaaagcatccaggcgtccttgatttcgacattgcgtgcacgctcagccgagctcatcagacgggcggttgtcccc

SEQ ID NO: 286439 - DNA, 120 bp, Homo sapiens; identical to SEQ ID NO: 234157
  chr9:66455089-66455209
  hyper

SEQ ID NO: 286440 - DNA, 52 bp, Homo sapiens
  chr9:66455877-66455929
  hyper
cctgcctgattccaggcgtcaccaccaacccgggggccgcgaggctgggatc

SEQ ID NO: 286441 - DNA, 206 bp, Homo sapiens
  chr9:66458086-66458292
  hyper
cgcagttgggaagcacggagacaaaagggggaaagaaggagggagcgggaagccaaaagcctacggtaccgctattaccaggcggaatcccatccaagtactaaccagtcccgaccctgcttagcttcaacagatcagaggcgagccgggcgcgttcagggtggtgtggcctagacgccagcagcggcgcctggctgccccaagag

SEQ ID NO: 286442 - DNA, 477 bp, Homo sapiens; identical to SEQ ID NO: 234161
  chr9:71319341-71319818
  hyper

SEQ ID NO: 286443 - DNA, 35 bp, Homo sapiens; identical to SEQ ID NO: 201719
  chr9:71320186-71320221
  hyper

SEQ ID NO: 286444 - DNA, 370 bp, Homo sapiens; identical to SEQ ID NO: 234163
  chr9:71320587-71320957
  hyper

SEQ ID NO: 286445 - DNA, 44 bp, Homo sapiens
  chr9:71735686-71735730
  hyper
ctgggtagtgctcccgccctcacctattgtccgggtggaggaac

SEQ ID NO: 286446 - DNA, 468 bp, Homo sapiens; identical to SEQ ID NO: 46199
  chr9:71735786-71736254
  hyper

SEQ ID NO: 286447 - DNA, 42 bp, Homo sapiens; identical to SEQ ID NO: 223596
  chr9:71736563-71736605
  hyper

SEQ ID NO: 286448 - DNA, 308 bp, Homo sapiens; identical to SEQ ID NO: 234165
  chr9:71736985-71737293
  hyper

SEQ ID NO: 286449 - DNA, 400 bp, Homo sapiens; identical to SEQ ID NO: 201720
  chr9:71788550-71788950
  hyper

SEQ ID NO: 286450 - DNA, 59 bp, Homo sapiens; identical to SEQ ID NO: 201721
  chr9:71789757-71789816
  hyper

SEQ ID NO: 286451 - DNA, 229 bp, Homo sapiens
  chr9:71939504-71939733
  hyper
tcctaccgagatgccgggaaagcactcccgcgccgatgcgaggtaggcacgtcctgcgccctgtgagcggtaactgcgctcggcgtcgtccttcccgaagtccttggcttacacctcttcccatcgagtcgccccaaagcccctcctccaggcatccccctccttgggcaaaagtttaagggcgggcccccttctcactaaagcgcgccagggcctctctcgtggctgg

SEQ ID NO: 286452 - DNA, 232 bp, Homo sapiens
  chr9:71939984-71940216
  hyper
gggtgcgcccagggccagcgggaggcggacccgccaggcggcaggtgggtgcggccggctggagccagggcagcggcagcggcggcagcaagtggttgggccgtgcgcatttccttccctccccctcggcctcggagcccgtctgcagtgcccagtgtgctgcgccttcggctcggctccgctccgcgtcctctgcccgccgcagccggccgcacccggccgcacccttccc

SEQ ID NO: 286453 - DNA, 381 bp, Homo sapiens; identical to SEQ ID NO: 117678
  chr9:71940263-71940644
  hyper

SEQ ID NO: 286454 - DNA, 52 bp, Homo sapiens; identical to SEQ ID NO: 234169
  chr9:72288142-72288194
  hyper

SEQ ID NO: 286455 - DNA, 189 bp, Homo sapiens; identical to SEQ ID NO: 234170
  chr9:72435610-72435799
  hyper

SEQ ID NO: 286456 - DNA, 178 bp, Homo sapiens
  chr9:72874088-72874266
  hyper
ggaagaattcggccccgcagctgccgctgttgcagtcgtccgggcctttcgtggaaggctctatcgtccgcatctcgatggagaacttcctgtaagttgcccggaggccgcgccgcgggtgtggaggtgtgctggccagcaggccccggggctccggcagcgcgcgggcgtgggcgtg

SEQ ID NO: 286457 - DNA, 385 bp, Homo sapiens; identical to SEQ ID NO: 201725
  chr9:73027584-73027969
  hyper

SEQ ID NO: 286458 - DNA, 733 bp, Homo sapiens; identical to SEQ ID NO: 201726
  chr9:73028305-73029038
  hyper

SEQ ID NO: 286459 - DNA, 254 bp, Homo sapiens; identical to SEQ ID NO: 234174
  chr9:73033410-73033664
  hyper

SEQ ID NO: 286460 - DNA, 169 bp, Homo sapiens; identical to SEQ ID NO: 201727
  chr9:74061493-74061662
  hyper

SEQ ID NO: 286461 - DNA, 35 bp, Homo sapiens; identical to SEQ ID NO: 234175
  chr9:74382903-74382938
  hyper

SEQ ID NO: 286462 - DNA, 279 bp, Homo sapiens
  chr9:74639982-74640261
  hyper
caggaactctggtgtgagaccgaatgatgaaagccgtccaggggattccgatgctgctcagggttaaaaaccacagcttgatctgaagagctgcaggggacagcgccctctggaggccacgtgatcacagcagccatagaaaagcagctgcatccagagaaaggagcaagagtctaggtttccgagtcctgttgtcccttctcatgcaaagagacttctatggtggtcaactttagagatcctgacttgatttaattaaaggatattgctggttttttt

SEQ ID NO: 286463 - DNA, 49 bp, Homo sapiens; identical to SEQ ID NO: 201728
  chr9:74764248-74764297
  hyper

SEQ ID NO: 286464 - DNA, 63 bp, Homo sapiens; identical to SEQ ID NO: 201729
  chr9:74764879-74764942
  hyper

SEQ ID NO: 286465 - DNA, 49 bp, Homo sapiens; identical to SEQ ID NO: 201730
  chr9:74979547-74979596
  hyper

SEQ ID NO: 286466 - DNA, 32 bp, Homo sapiens; identical to SEQ ID NO: 234178
  chr9:74980723-74980755
  hyper

SEQ ID NO: 286467 - DNA, 111 bp, Homo sapiens; identical to SEQ ID NO: 201731
  chr9:77111652-77111763
  hyper

SEQ ID NO: 286468 - DNA, 118 bp, Homo sapiens
  chr9:77114952-77115070
  hyper
agaagctggaaggattgaaagccaggcgctggtcctcatgctcaccttgagaaaaccagtttaagcccacagacctatcaaagagggcgccagcctcgccaggcgccctaggacccct

SEQ ID NO: 286469 - DNA, 173 bp, Homo sapiens
  chr9:77115484-77115657
  hyper
ggtggtcctagttagcgcctgggctccacagtttgcagctgacaactgtcctgaatcagggcgctttgagcgacggaaaggtgatctgggattcagtggtctccctcggggccaatccggcaaacctattcccaccccctactcctcccccgcctagggcatttaagagacta

SEQ ID NO: 286470 - DNA, 107 bp, Homo sapiens; identical to SEQ ID NO: 201732
  chr9:77501917-77502024
  hyper

SEQ ID NO: 286471 - DNA, 380 bp, Homo sapiens; identical to SEQ ID NO: 201733
  chr9:77502233-77502613
  hyper

SEQ ID NO: 286472 - DNA, 77 bp, Homo sapiens; identical to SEQ ID NO: 234186
  chr9:77567960-77568037
  hyper

SEQ ID NO: 286473 - DNA, 625 bp, Homo sapiens; identical to SEQ ID NO: 201734
  chr9:78504963-78505588
  hyper

SEQ ID NO: 286474 - DNA, 717 bp, Homo sapiens
  chr9:78505622-78506339
  hyper
gagggagcgctgggagcgagcaagcgagcgtttggagcccgggccagcagagggggcgcccggtcgctgcctgtaccgctcccgctggtcatctccgccgcgctcgggggccccgggaggagcgagaccgagtcggagagtccgggagccaagccgggcgaaacccaactgcggaggacgcccgccccactcagcctcctcctgcgtccgagccggggagcatcgccgagcgccccacgggccggagagctgggagcacaggtcccggcagccccagggatggtctaggagccggcgtaaggctcgctgctctgctccctgccggggctagccgcctcctgccgatcgcccggggctgcgagctgcggcggcccggggctgctcgccgggcggcgcaggccggagaagttagttgtgcgcgcccttagtgcgcggaaccagccagcgagcgagggagcagcgaggcgccgggaccatgggctgggggagccgctgctgctgcccgggacgtttggacctgctgtgcgtgctggcgctgctcgggggctgcctgctccccgtgtgtcggacgcgcgtctacaccaaccactgggcagtcaaaatcgccgggggcttcccggaggccaaccgtatcgccagcaagtacggattcatcaacataggacaggtaacgaactacaggctagcccagccctcggccctgaagccactgggggc

SEQ ID NO: 286475 - DNA, 620 bp, Homo sapiens
  chr9:78506732-78507352
  hyper
ctttcctgctcggacctgaatttagcccagaaagaagtttcctcttgggcgagagaacctctggcgctggagactccggaggcgcggggactggagctggaagggaggagaaaggagggggagggaagagggggccggccccggtgtgagtgcagatttaggggagacctctaggctttctcgccttaagcgaggtccgcgtgggggctcccggaagggagttgtagtggggaggtgggaaacttccgaaaccggctggctgggttccgctccgggaaaacgaggagtcttaccccgggacggaaggtgccgggccgggaggttgcgccgtggggcgagagttgggcaggcagcaggggcgcggggtttttgtggggtgccgctctcgggcttttggcagagctctcctgctagggagaaatgcccataaactaaggtgatgctatgaggatgattggaagcgtaacagatttggaagtactccgggttcagtggtcttggctttctggttctcttcccccgacacccctgcgagaaatgggggtagagagggctatgaaagtgggtcccagaaagtacccccctccacatacacaccgcaagcatctttggggttggcc

SEQ ID NO: 286476 - DNA, 231 bp, Homo sapiens; identical to SEQ ID NO: 201737
  chr9:78507353-78507584
  hyper

SEQ ID NO: 286477 - DNA, 142 bp, Homo sapiens; identical to SEQ ID NO: 234189
  chr9:79306756-79306898
  hyper

SEQ ID NO: 286478 - DNA, 275 bp, Homo sapiens; identical to SEQ ID NO: 234190
  chr9:79319765-79320040
  hyper

SEQ ID NO: 286479 - DNA, 429 bp, Homo sapiens; identical to SEQ ID NO: 201738
  chr9:79520874-79521303
  hyper

SEQ ID NO: 286480 - DNA, 231 bp, Homo sapiens; identical to SEQ ID NO: 201739
  chr9:79521333-79521564
  hyper

SEQ ID NO: 286481 - DNA, 179 bp, Homo sapiens; identical to SEQ ID NO: 201740
  chr9:79629671-79629850
  hyper

SEQ ID NO: 286482 - DNA, 54 bp, Homo sapiens; identical to SEQ ID NO: 201741
  chr9:79630437-79630491
  hyper

SEQ ID NO: 286483 - DNA, 472 bp, Homo sapiens; identical to SEQ ID NO: 201742
  chr9:79630544-79631016
  hyper

SEQ ID NO: 286484 - DNA, 173 bp, Homo sapiens; identical to SEQ ID NO: 201743
  chr9:79632239-79632412
  hyper

SEQ ID NO: 286485 - DNA, 291 bp, Homo sapiens
  chr9:79632921-79633212
  hyper
tgcctattctattaatttcttggttactgttcgtctcaccctctataccgcgatggtggagctcggatactgtctcctgtctccctgcacctggtgcctcacatgcagttggcgcgcaataaaactgagatgaatttggcatttggtgaaaacaccccatgctttcttccccatgagtttttccctccagccctctaatcatcggggtttcttgcagagaagaggccttgaggacacgatactctgaacttgacccagagtgtctagcccaggaaaaagggtttgtaagga

SEQ ID NO: 286486 - DNA, 276 bp, Homo sapiens
  chr9:80263018-80263294
  hyper
cgggaagatgcgcgcgccccttggcacaggagccggacagcagtcgggggcgcagacgagttggaacgtcggtgctcgggggagagtaggatctcctgggcctaggggtgtccccaggcgggaggtaggcgcggagtgggttggaggcaaaggacctggctggcctttgcctggaaagttctgaaaacctcagcagtgaccgcagactaagactgagtggaaaggttcccgctagcgtttgtggctctaagtggcaggaggaggcggagcatcttg

SEQ ID NO: 286487 - DNA, 232 bp, Homo sapiens
  chr9:80263517-80263749
  hyper
tttcgccaactcactcgctcggagaaggcggcagcaggctggaagaggagcggcgccaagcgtctgttgcgggacacaaagccccggacctgaagtggaagcttgcccaccagcttcaccaccacgcacacccggatttcctagactggctccttccgcttcccggacgccccggcccagctcgggcttggccaaagcccttggtcagctcggcaatttgcctgtaaagtgt

SEQ ID NO: 286488 - DNA, 321 bp, Homo sapiens
  chr9:80645546-80645867
  hyper
aacgtgccccggctccgctcgccacccgctgggccacacacacggctccccacgccaccaccccatggggtgccgcggccacgacactggaagttcaacccctctgcccacctttccacccccgcgcctctggtcggagtgatctgccatttagcagatgcacagcagataaggtacagccctcagggacacgaaaaggaacaagccaaggcaccgggcagggcagccccgacccctgtgctgcgtgtgtgtgtcgctgtgtgtgtgtgtgtgtgtgtgtgtgtgtgtgtctgtgtgtaacgcgcccgcgcgcccgcgcgg

SEQ ID NO: 286489 - DNA, 421 bp, Homo sapiens; identical to SEQ ID NO: 201747
  chr9:80645902-80646323
  hyper

SEQ ID NO: 286490 - DNA, 662 bp, Homo sapiens; identical to SEQ ID NO: 201748
  chr9:80646509-80647171
  hyper

SEQ ID NO: 286491 - DNA, 397 bp, Homo sapiens; identical to SEQ ID NO: 201749
  chr9:80647247-80647644
  hyper

SEQ ID NO: 286492 - DNA, 187 bp, Homo sapiens; identical to SEQ ID NO: 201750
  chr9:80911704-80911891
  hyper

SEQ ID NO: 286493 - DNA, 728 bp, Homo sapiens; identical to SEQ ID NO: 201751
  chr9:80912036-80912764
  hyper

SEQ ID NO: 286494 - DNA, 166 bp, Homo sapiens
  chr9:82185179-82185345
  hyper
cgcatagaaataaacgtctaaaacccagcctgttacattagccaacactcttcttgactttttccgaattttttccctgtccccaagattagccgctcgctagaaaagactgcgagcctcagcagcctccccttgaactggggcgctgcctccagctggacacgga

SEQ ID NO: 286495 - DNA, 260 bp, Homo sapiens
  chr9:82185383-82185643
  hyper
tttcccaggcccctccctaggggtgcccctcctcagccatggctgcccctttctctcctcctccagcatctgcccctggggccacccccacctttccgccatctctcgggcccgcgtggcaccctgctctgtttttaacggggataaacttgacttgcttctccaaagagcgggaaaaagaggcgcagtcttggtactgatctgggggagggaacgtcccagggcgcgcaggggcgttttctacccgtgccccgtcggcc

SEQ ID NO: 286496 - DNA, 974 bp, Homo sapiens
  chr9:82185703-82186677
  hyper
ggaggtccagcgtctctgattcccggatcttcagccccacccggagcccccacggttactgccccccgcgacccccgatggagcgtcgggatgcgctttctctccgagtgcctccgggggtggagggagggaggcctgtttcggaactaaatggcaatcacagcccccgcggggcttggagggacgagctccccgcccaccccgcggccccggccccagccagcatctcgcgactccatttctggctctaaacaagaacggggaccgagtcgcgttcacacggaaaattatgccggctccagcggcgcgtaaaattgatgtgaaccgaacgaagtaagatcagcgtgatcctccccctcttgtctcaacaggggtttcggcgcgttacacaaggccgagcttgtctctttaaggagacattggaccctaattagtccgcattcctggcgcggctgcggagcgaggggccgaaggtgtctgggttgggagacgggtgggcgggaggacgagactcggaagaagatcttttgaccagcccccaggctcaccgctccctccaccctctttattttgccgccaccaccaccaccaccaccaacacctaattctgaagatgcagccagggcagcagcaacagcagcagccgccgattctcccagccccacgttactttgattgacagctgaacaaatgttttcccggttcgaacgctcgcgctaaggaacgtcagccaaggcgaagctccgccttgggcgggccatctccgccccgcctccgccaacctcattcctcttcgttaattggtcggagctacaggcgacgcccggcccccacgtgggtttcagctgggttggctcctccccgctggcttgccatttgtcagcagtgaaatgatgggcactaacacagaacggcgattaatgttcagccacctctgattggttggtggagacgcctaccgcaacgggggtggg

SEQ ID NO: 286497 - DNA, 492 bp, Homo sapiens
  chr9:82187755-82188247
  hyper
tgcgggcggcggggcgcgggctcgccgggtgctgggggattccccgcgtcgccccctgcgcaccgagttgtgtcttttggccggaggggcgtggagagccgcccgaaatcggcgccccgcgccgggagcagcccgcccgccatcacccccaccccccggcgcggtggccctcggagggggtgcggagaggcaattgagttgtagccattttcttattgttgtctttgaagcccctggaagccgcgccgagccgtttgcggtccccgcgccgcgactcctcgagggggggtggcgagcgatgaaggaggcgcgactccgcgcccgggcggggagggcgccctcggcagcggcgctgctgggctggctgcggtttggaagtgcggggcgccggcccctcgcgccgcgggccgccggggcgagcgggcgaacgaacgagccgagagggtggcggccgcctccctcctcccccggcctgaccgcagcccgacgcca

SEQ ID NO: 286498 - DNA, 89 bp, Homo sapiens; identical to SEQ ID NO: 223613
  chr9:82188485-82188574
  hyper

SEQ ID NO: 286499 - DNA, 1035 bp, Homo sapiens
  chr9:84302131-84303166
  hyper
actccacacgccaccgcctggacgcaagaactaagtacaggcgccgccgccacccggctgggtgcaaggggcaccgggacgcccgcgaccactcgcatggcgcggccggacacgcacctgtgatactgcgcctgcaggaactggaattcctctttaatccggtccagggactccgggatagtgaacttgaagggctggcctgcagcctggtgcggcgtctgggggcgaccagcgagggggaccgagggacgggaatgcgggcggatgaataaagcagtaagtcagagaaggcaagaacgggtgggacataaacataaagttagaagtggctgaaaacgaggccccaaactcgagtttgcccttcactatggggagggggaaagcggaccctccccgggccccggcttctaaagaggctcggaagctcttcccagtctccagggcggattgcgctaagtgcgcccgggtcaccaggccaaagggaagggggctccccggcggccagggaagaccaggccagattgtcggtgtcgccgccccttcccccacggcggcgataatgaccccggggaccagaggagaaaaacaactcctttacgctccccattcccagagtcgccggggccacctccagacgcaccggaaccggggccgcattgacatgtaaataggcgagaggagaaacaaaggggggggcgccctgcccccactcggggaaggtagaggggatatggctgcaggagagaaaccccagccttccccagcgcccctgtccgctcggtatagacgtcaagtaggaaggagcccaaagggagggagaaaattaagagtttcggcccactccccaccccaggaagagagggccccagacctccccagccttacaccgctgagggcgagaaggtccgccgggcctcagaagccaccagtctccctaccgcccgggagaagcgcctccccaacgatcctggccccccaccaccacccagccgcgcctcaccgggtgccggctctgcgggaacatcgctctggcgg

SEQ ID NO: 286500 - DNA, 673 bp, Homo sapiens; identical to SEQ ID NO: 201755
  chr9:84303267-84303940
  hyper

SEQ ID NO: 286501 - DNA, 196 bp, Homo sapiens; identical to SEQ ID NO: 234211
  chr9:84304433-84304629
  hyper

SEQ ID NO: 286502 - DNA, 811 bp, Homo sapiens
  chr9:85677094-85677905
  hyper
tcctgtaatgaacacgccgccctttgcaggctcaggattcagcacgtaaaactttctccccaaacgctgactctctgactcctttttcttaactctagcggatcttggaaaagtcaaagcgagtaggtgaaggaagacaagcaactcacagagaagactaggggggggggccattgggtctgcacacctgcaagtaagtgggaagaagcaagcaggaagcgccagaataacctcccgcccccagctcacactcgcacctgggaatgaacttggcttcgtccccaagtcgcgcctggaaatcctgccaagcccggccgggactcgccgggccgcacgaggtggccagcgccgccgccgcgtcctcgtcgccttcgtcctcctcgctgtcgtgtgtctccggccccgcctcagacacggcgggcgcgggatccagaggaccccagtcccggcgccgccccccgcggagggacccgaggaagccacgcgcgaactcctggaaggtgatggcgccgtcacggtcggcgtccagccgctggaatactgcctcggcgtcggccggccgcacccgcagctccgtgcacagtgcccggaactcctcgcgctccaggcgccccgagcggttcgcgtcgcaggcggcgaagactgagcgcagccgggccagctcctctccgtccccatccgcctccatcccgcctggcgggggcggccgagagggctccggagcgccgcggggcgcagggccctccctggaaggacggggccacctgctgccgccgggaggcccggcgagtttggctcgtccggctggttc

SEQ ID NO: 286503 - DNA, 267 bp, Homo sapiens
  chr9:85677992-85678259
  hyper
caggtcccgggagcggtggggtgcgcccgggctccaggcaccgccaaggagcgcctcctgcgactgagcgcccaagcgccgaggtggctctcgccactttcccggcgggtgcagctccgcccagccagggaggaggagcgcgcgccaccgcttctccagttcccacgccccggagtccaccgctgcttgccgcgcaggtgggggagacctggctggccggaactgggattcggggggagcattgcccttcggcgtaagcgctgctca

SEQ ID NO: 286504 - DNA, 68 bp, Homo sapiens
  chr9:86152304-86152372
  hyper
acaatcccttttcctttctccgaaacactcagacttcacacattcctttcgaggtagctccagtccgg

SEQ ID NO: 286505 - DNA, 368 bp, Homo sapiens
  chr9:86152964-86153332
  hyper
gtgtgccccgcgccctcgcccggttccacgcgcacctggatgtggcaggagatctccgagtcgtccagcagccggatggtgcatctcatctcctggctgagcgatttgacgctggagctccgaaagtggatcattttcatggtcctcctgcctctcggcacacagtggcaggaggcgaacatgcaccgcggccgtggggagcgagcgggaggctcagggccggcgcggtgctcgcctgcgcggacacacacgctcgcacgcactgtccgggacacctgggcgcggctcagccccgggacatcggcagcgtcgggcgcctgcggacacacatgcccagcggccggggcgcggcgggcgggtccctccct

SEQ ID NO: 286506 - DNA, 227 bp, Homo sapiens
  chr9:86153544-86153771
  hyper
tggcctgctcagtcgcagccgccgctgcgtcaagctgggcccgactgccttcctcagcctcaccgcctcctccctcccctggccgctgtcgctcgggctcccggttgtgctcgtcccggccccggctccccaacgcgctcgacagcgccctgctctgctcagctccagggacctggcgcgggtaggggacggagagcgatcctgacccacaccgccagggggattcc

SEQ ID NO: 286507 - DNA, 339 bp, Homo sapiens; identical to SEQ ID NO: 201757
  chr9:86238306-86238645
  hyper

SEQ ID NO: 286508 - DNA, 309 bp, Homo sapiens
  chr9:87282690-87282999
  hyper
gtgttcctcaggggcttctccgcttaaggttcactgacaagacaggcggagttttacgtgcgtctgagaccaggtcatttttgcccttggcgtctcttccttggcgcgtcctcacctagtagagaatagaggcgcagctcaggagtaaacttcagcctggccgttcaccactcgatgtgtgttacagccgagtgacagtggtgagatagacctgctggccttgctttcgggacctgcagcaagatttttgggtgctgtccaagaattcccgcggttacactcagcgcccaggatctgtacaaaaaagcc

SEQ ID NO: 286509 - DNA, 243 bp, Homo sapiens; identical to SEQ ID NO: 201759
  chr9:87283766-87284009
  hyper

SEQ ID NO: 286510 - DNA, 261 bp, Homo sapiens
  chr9:87284294-87284555
  hyper
tagggaccgggaggcgtcgaacggaggaacggttcatcttagaggtacctggatgtaaatgcacacacacacacagacacacacacgcacgcgcgtgcatgtctacacggccaggatgtgtgcgtgtgtgcgcgcgtgtgtgaactcccacatgctgctgctgtctgcttctggccagtggcaccgatgcctccctcctccctgctcgcccccagattcccctcccctccctggtgcttttgtctggagggtgttatgggt

SEQ ID NO: 286511 - DNA, 202 bp, Homo sapiens; identical to SEQ ID NO: 201761
  chr9:87284994-87285196
  hyper

SEQ ID NO: 286512 - DNA, 291 bp, Homo sapiens
  chr9:88355780-88356071
  hyper
aagctatgttaaaacgggaaatgggctttaaattatcaacattcacatcgattacactatgatgcatgaaaactccattctacaatgagtaaacgcccaagaaaggaacccaaccaactccaattgccctggtgctcgtaagaggtttataccgcacaaggggtaaaacaacggtagagtcgagcaagcctttgggttacaacagtccttgaacacttgcaattgagaacccgcaattcaggaaggaagacactaaggaaactctgcactgtcatccagggtgatctgatt

SEQ ID NO: 286513 - DNA, 224 bp, Homo sapiens; identical to SEQ ID NO: 234221
  chr9:88713662-88713886
  hyper

SEQ ID NO: 286514 - DNA, 267 bp, Homo sapiens; identical to SEQ ID NO: 234222
  chr9:88714740-88715007
  hyper

SEQ ID NO: 286515 - DNA, 98 bp, Homo sapiens
  chr9:89517557-89517655
  hyper
caggaacgtgaatgcggcccttccccaccacacacaggctctctcccaccccctgccagctatccctgctctgacctccccgggcctccctaagggga

SEQ ID NO: 286516 - DNA, 182 bp, Homo sapiens
  chr9:89517860-89518042
  hyper
cgcggcaccaagacccccatttctatgcaccctggaaagggtgattaatttaaagtgagtggagtctgtttctttaagacaagctcataaatcgtgaaagatcaccacttcttttcaaaagcctctccacggtctgagtctcccttctgggtcagtaaagtcattgaagctttaacggcatg

SEQ ID NO: 286517 - DNA, 219 bp, Homo sapiens; identical to SEQ ID NO: 201762
  chr9:89560475-89560694
  hyper

SEQ ID NO: 286518 - DNA, 431 bp, Homo sapiens; identical to SEQ ID NO: 201763
  chr9:89561318-89561749
  hyper

SEQ ID NO: 286519 - DNA, 783 bp, Homo sapiens
  chr9:89561779-89562562
  hyper
tccaagtcctgcccacttcttgcatgagtgtcttcataaatccatgcgcgccgctggctgatgccccgctggtggcagaaggtcccctttcgctctggctgcggtggcttcctggaaatgaacagctgtcgagatctggtcccgctctcccacccgagagccctccgctcggcccccggtggtggcgggagaggctcactgtcgccccgggggggtgcgggccgcggggccgtggcggggctgcaggaccgcgcggcgcggcgggtgcattttgctccgcgcctgcagatccgttgtgcggccggctgtccccgtgccggctgctcgcgctgcggccgcggcggctccttcctcctgggctcagtgcctcgccgccgccaccgccgccgcggtctctcgcatcgcgccgcttcctggcccggcgtccgcgcgctgcccgccttcccgcggcccggccgccccgcgtcccctccccctccgcccgcggcaaccccggcctccgcagagctccggggagctctttccgggaagcgcggggagaacaagaaagtcggcgctgccggagagcggctccctggcttcactcggcggcagcttctcgggtgaccaagagcccggggagcggatccgctgagcccggctgcagactcgttagcagcgaggctttaaatacaaaagtgggccgggagcccccgcgtggtgccgcggtgccccctcattatgcatgcatggaaaagcaaacaaacaaaaacattagcaacgctcctccggctcgccgagccc

SEQ ID NO: 286520 - DNA, 66 bp, Homo sapiens
  chr9:90112364-90112430
  hyper
taaaaaaatctgttttgttctatgtgattttcccataccaagcaccgtgcccggcacaagctggga

SEQ ID NO: 286521 - DNA, 296 bp, Homo sapiens; identical to SEQ ID NO: 201766
  chr9:90112494-90112790
  hyper

SEQ ID NO: 286522 - DNA, 270 bp, Homo sapiens; identical to SEQ ID NO: 201767
  chr9:90112856-90113126
  hyper

SEQ ID NO: 286523 - DNA, 509 bp, Homo sapiens; identical to SEQ ID NO: 201768
  chr9:90113156-90113665
  hyper

SEQ ID NO: 286524 - DNA, 216 bp, Homo sapiens
  chr9:90340629-90340845
  hyper
gtacacttgactctcggctctgcggaccaaaaattccaggactaaggaatagcaaggttaggctgaaacagtccacacagggcttgcggtaaacgtcttttcaggagccactcgcccagtgcagtaagtcgtgtacttagttgactcgagcgctccagggagacgcccgaccctactctgcgccgccccggggcaccagctctgcttcctccaggt

SEQ ID NO: 286525 - DNA, 321 bp, Homo sapiens; identical to SEQ ID NO: 201770
  chr9:90340943-90341264
  hyper

SEQ ID NO: 286526 - DNA, 219 bp, Homo sapiens; identical to SEQ ID NO: 201771
  chr9:90341343-90341562
  hyper

SEQ ID NO: 286527 - DNA, 305 bp, Homo sapiens
  chr9:90589287-90589592
  hyper
tccacgtgcttggccttgaagacgatgccgtgggcgccctccccgatgcggcccaggatgcagtactggtccatcccgctgcagtcgtgggcctgtgcccctgtgcccctgaacttccaaactccacttctcctccaccccacgctgatctgagctcgcacgctgttgcctagcaacagcgcggcagctgaccactggggcggttcctgtaggcgacgtcaccaggagaacggaagctgcgtcgagtcaggggtgacagctccgggccccactgcgccttttcctagccctccgctgtcacgcag

SEQ ID NO: 286528 - DNA, 44 bp, Homo sapiens
  chr9:90589776-90589820
  hyper
tgtaagtagaggttcaggcttcgaccacgcgcaggtgctgtttt

SEQ ID NO: 286529 - DNA, 785 bp, Homo sapiens
  chr9:90691187-90691972
  hyper
tctgcactgacgcgtggagtcgccgagaagctgcctggcggctccagcagcctccacgcctagagggctgcgcgtccgggatcgcagcgccttagcgtctccttcccgcctccctccgccctcccgccagcgagcgcgtggcgccccggaggtgcagggttgaccagggtgcacccctctactcctaagccaacctaggcagggcccttccagtttctgccgcagcatttccagcccctcgagcccctgcagctcctgagggtagctcagcagccagcccagcgcaccctcttccggggctagcgcgcactccctcggctctgcttgcggtccctcggtgtccttctgcccctggcagaagctctcacaccaccctcccttcatttcccctgccgggcggggctcgctattcagctccctgtgctcagtctgacccctcagcctgctgtacccgcaggctctgcggaatgagcccgggccccagcccttgccctcccgcccgccaccacgtccctcctcccgcctggagcttccagggccctgccgcgggcccctgcatctcccgccaggccgtctctctctgcctccgtctcctgcagcccagctccgcctcattctccattcctcgcccagaaacctgtacattctgtccgcggtcgccgcctgcggttcctccacgtcacgcaggcagacgccaggctccgccagctcacagaactgctcttgccgaaccccgaaggcctccacctggttgaccttggcagccagcccggccttccttggca

SEQ ID NO: 286530 - DNA, 308 bp, Homo sapiens; identical to SEQ ID NO: 234229
  chr9:91002684-91002992
  hyper

SEQ ID NO: 286531 - DNA, 119 bp, Homo sapiens; identical to SEQ ID NO: 201775
  chr9:91149014-91149133
  hyper

SEQ ID NO: 286532 - DNA, 94 bp, Homo sapiens
  chr9:91149326-91149420
  hyper
ggcgcagtggggatgggggcgggggcgcgggatgtggtagggggcgtagtggggagagagtgcaggagtgtgggcagggcgcagtgtggggagg

SEQ ID NO: 286533 - DNA, 86 bp, Homo sapiens
  chr9:91149638-91149724
  hyper
gaatgtgggcgaggcgcagttggagaagagtgcggggatgtgggcggggcgcagtgaggggaaactgtggaatgtgggcgaggcgc

SEQ ID NO: 286534 - DNA, 222 bp, Homo sapiens
  chr9:91149754-91149976
  hyper
ggtgcggtgggggagggtgcggagatgtgggcggggcgcagtgggtggagagtgtagggatgtgggcccagcgcagtgggggacagtgtggggatgcgggcgaggcgcagtgggggcgggggcggggatgtgggcggggcgcagtgggtggagagtgcgggatgtgggcggggcgcagtgggtggagagtgcggaatgtgggcggggcgcagttggggagct

SEQ ID NO: 286535 - DNA, 236 bp, Homo sapiens; identical to SEQ ID NO: 201776
  chr9:91150385-91150621
  hyper

SEQ ID NO: 286536 - DNA, 137 bp, Homo sapiens; identical to SEQ ID NO: 201777
  chr9:91793599-91793736
  hyper

SEQ ID NO: 286537 - DNA, 183 bp, Homo sapiens; identical to SEQ ID NO: 234234
  chr9:92220603-92220786
  hyper

SEQ ID NO: 286538 - DNA, 31 bp, Homo sapiens; identical to SEQ ID NO: 234236
  chr9:93563762-93563793
  hyper

SEQ ID NO: 286539 - DNA, 275 bp, Homo sapiens
  chr9:93564135-93564410
  hyper
tggccccgcgctgcgcccgccctcgcctcacctggcgcaggtaggtgtggccgcgtcccctacccggccgggactttctggtaaggagaggaggttacggggaacgacgcgctgctttcatgccctttcttgttctaccttcatcggccgaggtaaaagtgctgaaaccatgtgaataaaatacaggtgggttccgccagcttcgctcctgaacctacccgcgctcgggatccagaagctgcgccgggagagaggggctcaggcctgggcggagg

SEQ ID NO: 286540 - DNA, 546 bp, Homo sapiens
  chr9:93955383-93955929
  hyper
tgcgtgaaacacaacgtgagaatgggaatctgacatatgagtaacccggccgagaggcacctcttggaaatgacactgggccttggctagaattacgcacaggccctgggagggctgcggctcgtaggcccgtagggggcagggtgagggcggaggtcctggcgcccccaggcctgacccgcccgcaccgctgggctatttttagcgtccactaaacttagccgactccaccctcttgaataacccacatcttaaaatgctatttttctccaacaggtcaaaagaattctgcgagttagagcgcagattaagttgctagcgacgggcattgaaggttttagaaccgagaaaatgagccggtggcggggagcgcgtcctcagcggccaggcccggcacggggctcgggcactcggggacacacggtggtcgtcgctgtgtctcagcaggaccctgtgcgctggagagcttggggccgcgagtcgcgcagcaaggaggcttctggcttctctatttttagcctctgaacgttttccaaaataattacc

SEQ ID NO: 286541 - DNA, 267 bp, Homo sapiens; identical to SEQ ID NO: 201780
  chr9:93956177-93956444
  hyper

SEQ ID NO: 286542 - DNA, 35 bp, Homo sapiens; identical to SEQ ID NO: 201781
  chr9:94183954-94183989
  hyper

SEQ ID NO: 286543 - DNA, 343 bp, Homo sapiens
  chr9:94186868-94187211
  hyper
agggaaagctccacgcacaaacaccgccccctgcacaattagggcgaagatgacggctgcaaagttgttgcgtaacacgactgggaaacgaggctcgctgaggtccatctacccacccccgccacgcgggtgcggcgttcctcggaggatgtgaaggtccgcgctcgggtgcccccgctgggacgcccactgtcgtttggtgctggggcttgagacgaccgcgcgggatctcttcctgtgattttgagctgatagctgcttagtgttatttctgcgtctaactggatacggtagtcttctctcccaaattcccgggctacggaagagacgtaaaaaaatggaa

SEQ ID NO: 286544 - DNA, 110 bp, Homo sapiens
  chr9:94187243-94187353
  hyper
tcgcgctagactgtcaaggcacgtggcacactccctgcgtttaccgatacacggatagtggtcagtgctggccttggcgaagggagccatgttcccgacagtgactcaca

SEQ ID NO: 286545 - DNA, 130 bp, Homo sapiens; identical to SEQ ID NO: 234244
  chr9:95056116-95056246
  hyper

SEQ ID NO: 286546 - DNA, 136 bp, Homo sapiens; identical to SEQ ID NO: 234245
  chr9:95088346-95088482
  hyper

SEQ ID NO: 286547 - DNA, 60 bp, Homo sapiens; identical to SEQ ID NO: 201782
  chr9:95570721-95570781
  hyper

SEQ ID NO: 286548 - DNA, 369 bp, Homo sapiens; identical to SEQ ID NO: 201783
  chr9:95570986-95571355
  hyper

SEQ ID NO: 286549 - DNA, 54 bp, Homo sapiens
  chr9:95572268-95572322
  hyper
cctcagactgctttccatcgctggcaattccccgtctgtagcacttggtggata

SEQ ID NO: 286550 - DNA, 65 bp, Homo sapiens
  chr9:95709628-95709693
  hyper
tgcacccgagccggcgcccctagccctcccactggctctccgcaggcggctttgtcagggctcag

SEQ ID NO: 286551 - DNA, 238 bp, Homo sapiens
  chr9:95820724-95820962
  hyper
gtgttgggcagaggtagccacgcgtgcaacgccccggagtagcaacactttccgctcagccggctgccttggcccgctgggtatttggtctccccaagggcccccgcccacagcccccggccggacctcggccccagtccaacgtgtgggcgtggtctgtaagttgcatggaaccgcccctgggcgggcgtggagggcggggcctccccgcccctcacccaggcccaggcccaggccc

SEQ ID NO: 286552 - DNA, 214 bp, Homo sapiens
  chr9:95821006-95821220
  hyper
cgcctcggagcgcgcaggatgcgctgggcggccgccaccctccgtggcaaggcgaggccccgggggcgggccggggtcaccacgcctgccccagggaaccgcacaggtgagggctggggccgagtggccgcgtgcggggctctgcgcccatttcacagacgggaaagccgaggggagggggtcgcggggccgcacagccgtgggtgggggccac

SEQ ID NO: 286553 - DNA, 113 bp, Homo sapiens
  chr9:95946019-95946132
  hyper
gggcaggaaaggacacgctgagccccaccaggcttagccccaggctgggctcccgagggcggcggtacccctggtccttttcttcctagcctgcccattctgtcctggcacag

SEQ ID NO: 286554 - DNA, 267 bp, Homo sapiens; identical to SEQ ID NO: 201785
  chr9:95946562-95946829
  hyper

SEQ ID NO: 286555 - DNA, 271 bp, Homo sapiens; identical to SEQ ID NO: 201786
  chr9:95946859-95947130
  hyper

SEQ ID NO: 286556 - DNA, 176 bp, Homo sapiens; identical to SEQ ID NO: 201787
  chr9:95947296-95947472
  hyper

SEQ ID NO: 286557 - DNA, 89 bp, Homo sapiens; identical to SEQ ID NO: 117831
  chr9:95947484-95947573
  hyper

SEQ ID NO: 286558 - DNA, 244 bp, Homo sapiens; identical to SEQ ID NO: 234252
  chr9:96215823-96216067
  hyper

SEQ ID NO: 286559 - DNA, 278 bp, Homo sapiens; identical to SEQ ID NO: 201789
  chr9:96711697-96711975
  hyper

SEQ ID NO: 286560 - DNA, 34 bp, Homo sapiens; identical to SEQ ID NO: 201790
  chr9:96712753-96712787
  hyper

SEQ ID NO: 286561 - DNA, 383 bp, Homo sapiens; identical to SEQ ID NO: 201791
  chr9:96714479-96714862
  hyper

SEQ ID NO: 286562 - DNA, 121 bp, Homo sapiens; identical to SEQ ID NO: 201792
  chr9:96714974-96715095
  hyper

SEQ ID NO: 286563 - DNA, 86 bp, Homo sapiens
  chr9:96716245-96716331
  hyper
aagggctggggtcccggctacagcgtaggagcctcccttccccgacaggcctgtcactgaggtgcgagtcctagcctggctggagt

SEQ ID NO: 286564 - DNA, 174 bp, Homo sapiens; identical to SEQ ID NO: 201793
  chr9:96717633-96717807
  hyper

SEQ ID NO: 286565 - DNA, 166 bp, Homo sapiens; identical to SEQ ID NO: 201794
  chr9:96720637-96720803
  hyper

SEQ ID NO: 286566 - DNA, 255 bp, Homo sapiens; identical to SEQ ID NO: 234264
  chr9:96929092-96929347
  hyper

SEQ ID NO: 286567 - DNA, 189 bp, Homo sapiens
  chr9:97402080-97402269
  hyper
agaaagctatgactgtttcctccaaaatcataaaacggaagttcagaaaggttaagtaacttgctcaatgccaccagctaggcagcgaaacccgcagccagtccacatggcctggctttagctctgcagctcctgccccgtgtggctgcctgcccccgccccctgcccaagccccgtccactctgcctg

SEQ ID NO: 286568 - DNA, 443 bp, Homo sapiens; identical to SEQ ID NO: 201796
  chr9:97767419-97767862
  hyper

SEQ ID NO: 286569 - DNA, 471 bp, Homo sapiens
  chr9:97810932-97811403
  hyper
cgcagggacgggagcggggctgctatgtccctcgggcgcgctttgggacgttgctgagtggctactgcttgtgctttcttgcttccaagctggcggtaaaccttttaaattcagagtgattcaagggcataggcgtcggaattgtgatttcgtgcgtgttttatttaccaggccttcaaatcaaaaaggccaggcaaacacacgttctggggctatcaagaaagttcacacgaaggacaaatccagcagggagaaagtgacataccttgcgggctcaggcttgggatttctgcagccacgcgcgcgttcacccgacgggacctcgcctgcactgccgccgggagaagcctgctctagactccggctccaggggagagggctgggctccacagagaggagcagcctgtgagttttcaaacatttctctgtcagagttagctcttacttgttaaattccgagatgagaatcta

SEQ ID NO: 286570 - DNA, 60 bp, Homo sapiens; identical to SEQ ID NO: 223636
  chr9:98189305-98189365
  hyper

SEQ ID NO: 286571 - DNA, 46 bp, Homo sapiens; identical to SEQ ID NO: 201798
  chr9:98268140-98268186
  hyper

SEQ ID NO: 286572 - DNA, 1283 bp, Homo sapiens; identical to SEQ ID NO: 223638
  chr9:98272638-98273921
  hyper

SEQ ID NO: 286573 - DNA, 313 bp, Homo sapiens
  chr9:98278353-98278666
  hyper
accaggctgatgagcggaagccaaggtggcgaccctttcaggcgtgaaaatgggagctccggcgaccccctccgtgagaattccccccggagccgttcctcagccggggcccgccgcggccagccccctccccgccacgcggggctggcctcgggggcgggggcccgggcgtgcgagcgagcgtggaggcgcgggacccgcgctcccgcgcccaggcggcgcagcccacccggctccacggccccggcgcgcggcccgcccctcctgcccggcgctcggggctcgctcctccgtccgccgcgcggggcgtccc

SEQ ID NO: 286574 - DNA, 468 bp, Homo sapiens
  chr9:98278719-98279187
  hyper
cgtcggcggccgccgcgctggctgcactcaccatagccggccgtcaacccctgctcggagcgcgggtgccgatggcgcggacgctgggcttggatttcacatcaattccttttttttccctggcccccctttcctcgtcctccgctcctccgtcttctcccagtcttccctcgtctcccccttgccttgtcgctgcgggtctctttgtctcccctgtcgtctttttcttctcctccgttttcttcttcttcttctcctcctcctccgtctttacaaaaggaacggaaagtgtaaaaaccccggcgcgctgggccgccggaggctttcggcggagtgcagcgcggactcacaattacaagcctgtttctattaagcagttccatggccctcggcgtgggtggtctgccgcgccataggcaggacctgtcagggtcacgtgacggatccgaaaactttacccctttacaa

SEQ ID NO: 286575 - DNA, 151 bp, Homo sapiens; identical to SEQ ID NO: 234270
  chr9:98637318-98637469
  hyper

SEQ ID NO: 286576 - DNA, 248 bp, Homo sapiens
  chr9:98783525-98783773
  hyper
cccaagcaacccgttcctccgaatcaggctgcttttctctgtaaagaaaagagaaagcaagcgattaactgatggcttggccggctggaaacgggaaagcgagttctccaggagccgcacacctcggggaagcccagtccctcccgggcagggagcgaggggcggtcctgggggctgcttcccgcggggagagaagggagggcggcgcagccctctgcggggtccgcccctcggttctccggaccccc

SEQ ID NO: 286577 - DNA, 395 bp, Homo sapiens
  chr9:98784377-98784772
  hyper
accaagtcctagagagaatttctccaaaatatttcctggatccccctgccaagggccctgtcccgcccttccagctcccaactggatgcctgcagacctctccccgggttccgaggctctggcctcctccctccctaatccattttccacaccgcttccccgggagcccgttaaaatacaccgggaccgcggcgggtgcaagcctcctgtatctccacatagcaggctaaggggaattgggtagggaataaaggctgcaggggacatcggctggcaggtatgaagcccgtattgtgtgtcgtttgttaaacacttccagtggattttctcgtttaatctgcccaacaacgcttctgggccggtattcgtattgttttatagagggagaaactgag

SEQ ID NO: 286578 - DNA, 491 bp, Homo sapiens
  chr9:99145529-99146020
  hyper
cgcagcagggcaggcgcgctcaggaagagaacgactttctcaggttgtggcctgagtgtagaaagctgagcgagttctggagggcgcctgggaaactcgaccaatgtgcccagctgagactcgagggtccctgtccccacccgccctgtcccgggcgccgctgaagcgcacggaggacaggggcagccccgcactcccgcagaccccccggccccgggccccgcctcacccgtaggtggtcagcagcgccttgttgacaagcacgatgaggaaggagcaggtcccgtagaagagcgccgacagcagccgggccacccgcgagggcagccgcgccgcgccgggctccccgccagcgccctcggcctcggcctggccgccggccgtcatctcctgcggccccgcggaccccgccgcccgccagccccggctgcgcactggtcccgcccggccgggccggggaagagggcgcggcaggaacaggaagagcccgg

SEQ ID NO: 286579 - DNA, 238 bp, Homo sapiens; identical to SEQ ID NO: 117890
  chr9:99181499-99181737
  hyper

SEQ ID NO: 286580 - DNA, 155 bp, Homo sapiens
  chr9:99380838-99380993
  hyper
tcgaatgccaccaacgtgacaccttccttctcgaggccccggcggggagcggaccccgggaggcggaggcgttcggggggcgcgctagggggcagggcgcgggaggcccaggagaggggctcgggcttacgcgccggacgggcaacgcggcgccc

SEQ ID NO: 286581 - DNA, 426 bp, Homo sapiens
  chr9:99381077-99381503
  hyper
gggaatcctcaggggctgattcagaggttgtgactcgcgcgagggccaaccgggctcgcaatccctgaaggcggaatccacaggaactcagaagcagcccgcggggaggagctgcaggttcgaggcgccgggctgacgcccgcaacttagaaaggtgaccctcggtccatcttgctggtggaggagggtgcacaagctaaagttaaagctcgcagcccacgcagctagaaactcggggcggggggcgctcctcaggagccaggctcctaaagggggtgtggcggccggggcgtttaagggggtgggggcgaaggcatttcggcccggccccggaggccccgggcagcccggtgggaggtgggccagggccccgcgccgggtgcggccgtccggggccctccgcgcgcccactggccggctcaccgg

SEQ ID NO: 286582 - DNA, 629 bp, Homo sapiens; identical to SEQ ID NO: 201802
  chr9:99381680-99382309
  hyper

SEQ ID NO: 286583 - DNA, 240 bp, Homo sapiens; identical to SEQ ID NO: 201803
  chr9:99416950-99417190
  hyper

SEQ ID NO: 286584 - DNA, 409 bp, Homo sapiens; identical to SEQ ID NO: 201804
  chr9:99417397-99417806
  hyper

SEQ ID NO: 286585 - DNA, 74 bp, Homo sapiens
  chr9:99449021-99449095
  hyper
ctcctggcccaggccgagctgcagggggcgccaagctgcggctatgaggggaatgcaatggaaccaaatgctct

SEQ ID NO: 286586 - DNA, 121 bp, Homo sapiens; identical to SEQ ID NO: 201805
  chr9:99539844-99539965
  hyper

SEQ ID NO: 286587 - DNA, 646 bp, Homo sapiens
  chr9:99540006-99540652
  hyper
tcatggtcaatacaataaacgcgcattcccctcctgaagccagcaccgcgttttccgacgcctggctgcattctggcgcccatacctcggcccgcaccgagcatcttccaactaggactcagccccacctaacgcccccggagcccgcccccaccggcccttctcaggctgaggtcccgggccggccgaggcacagggagcgacggcctgctttgggggagttcccgggacgtcgcgttcccgccccctggacactagcacatccctccctgcaggtccgcaatccgcgtggaggcccggcgctctcacctgagctgcgaaccctctgcaccagcaaacactaacagggagaagccggaaagtggggttgactgcacatgcgcagacgaaaacgcgcatatccgttcccagcatgctgcgcggtaacccataacatgcaagactacgtttcacatgcagtacggcgccagctgtcagtgtttttttgtttgtttttcccccaagatttatggcgtaataacatggaccgtcctgataactggagcccgggttctgtcagagccccagaggttgtgggttagacttgatgacataacagcaaatgcagcgtgtggttacagaaagcaagagccgcggaagacgtttg

SEQ ID NO: 286588 - DNA, 178 bp, Homo sapiens; identical to SEQ ID NO: 234279
  chr9:99637708-99637886
  hyper

SEQ ID NO: 286589 - DNA, 338 bp, Homo sapiens; identical to SEQ ID NO: 234280
  chr9:99638089-99638427
  hyper

SEQ ID NO: 286590 - DNA, 450 bp, Homo sapiens; identical to SEQ ID NO: 201807
  chr9:99801107-99801557
  hyper

SEQ ID NO: 286591 - DNA, 45 bp, Homo sapiens; identical to SEQ ID NO: 6930
  chr9:99984107-99984152
  hyper

SEQ ID NO: 286592 - DNA, 239 bp, Homo sapiens
  chr9:100000500-100000739
  hyper
agaacgtgttggcccgggcctccataaccatggctgctaggggcggggactgggagcgcgggtcccgggactgggagcgcgggtcccaggccagggtgcgggctgggaagactcggtcctccactgccccagcaggccacgcgcccgcgcgtagcctcccgccccgctagcagcacgctgcgtggctgctcgttggctacttacgacggaagctcggttggggtttctgcagaagtttc

SEQ ID NO: 286593 - DNA, 113 bp, Homo sapiens; identical to SEQ ID NO: 201809
  chr9:100263429-100263542
  hyper

SEQ ID NO: 286594 - DNA, 107 bp, Homo sapiens
  chr9:100264592-100264699
  hyper
ggatcccaggttcgcgctgagagtgtttggggcaggtgaagtttcccaaactgggagagacaaggtttaaagcaccacgacacgcgctacgcggccaagtggagctg

SEQ ID NO: 286595 - DNA, 122 bp, Homo sapiens
  chr9:100264871-100264993
  hyper
gcgctccccacacctgttcaccctctccgggcctgggacgctggggtcccagccgcgcacatgcggagacgctgcagaaatcggagactgactgccccagactcgatcgtatcctgggactc

SEQ ID NO: 286596 - DNA, 229 bp, Homo sapiens; identical to SEQ ID NO: 234288
  chr9:100459620-100459849
  hyper

SEQ ID NO: 286597 - DNA, 113 bp, Homo sapiens; identical to SEQ ID NO: 201810
  chr9:100503320-100503433
  hyper

SEQ ID NO: 286598 - DNA, 303 bp, Homo sapiens; identical to SEQ ID NO: 201811
  chr9:100565762-100566065
  hyper

SEQ ID NO: 286599 - DNA, 201 bp, Homo sapiens; identical to SEQ ID NO: 201812
  chr9:100610480-100610681
  hyper

SEQ ID NO: 286600 - DNA, 194 bp, Homo sapiens; identical to SEQ ID NO: 234295
  chr9:100818670-100818864
  hyper

SEQ ID NO: 286601 - DNA, 78 bp, Homo sapiens
  chr9:101472009-101472087
  hyper
ccaagcaaagctggggtcccaaccttacgtgcgctaccgccccctccaggcatttgacctccccgcgtccccattctt

SEQ ID NO: 286602 - DNA, 52 bp, Homo sapiens; identical to SEQ ID NO: 201813
  chr9:101558601-101558653
  hyper

SEQ ID NO: 286603 - DNA, 64 bp, Homo sapiens; identical to SEQ ID NO: 201814
  chr9:101558886-101558950
  hyper

SEQ ID NO: 286604 - DNA, 42 bp, Homo sapiens
  chr9:101559227-101559269
  hyper
tgaacctgcccttctagaataaggaagcggctgaattaagga

SEQ ID NO: 286605 - DNA, 725 bp, Homo sapiens
  chr9:101569829-101570554
  hyper
gcgcttgggctggcgcggggctggacggaaagggggcggcgcgcaggtggggcgggccgggggcggggcggcacggcggttccgggatccgggtcctggcctccaccgccgccttggggcgcgcagatcgctggctgcagttggcgggcgcatgtgggggcgcacggcgcggcggcgctgcccgcgggaactgcggcgcggccgggaggcgctgttggtgctcctggcgctactggcgttggccgggctgggctcggtgctgcgggcgcagcgtggggccggggccggggctgccgagccgggacccccgcgcaccccgcgccccgggcggcgcgagccggtcatgccgcggccgccggtgccggcgaacgcgctgggcgcgcggggcgaggcggtgcggctgcagctgcagggcgaggagctgcggctgcaggaggagagcgtgcggctgcaccagattaacatctacctcagcgaccgcatctcactgcaccgccgcctgcccgagcgctggaacccgctgtgagtgcacagctctggggaggaagcccgccctcagagccccgggcctcagtttctccatcagagcagtggcagggcggggagctggggtctccaggatggcgcgtcttattgagtctttctccgaagacgatagtgtaagagctcacatgggggcggggaggcaagaaagtaaaaaagacgaaagtagaaaaaaaattacc

SEQ ID NO: 286606 - DNA, 55 bp, Homo sapiens
  chr9:101706896-101706951
  hyper
ctggtaagggcaggtctggtgcctctccgcacacaggtgcgaagcatgaacaccg

SEQ ID NO: 286607 - DNA, 96 bp, Homo sapiens; identical to SEQ ID NO: 201817
  chr9:101866822-101866918
  hyper

SEQ ID NO: 286608 - DNA, 147 bp, Homo sapiens; identical to SEQ ID NO: 234306
  chr9:102585801-102585948
  hyper

SEQ ID NO: 286609 - DNA, 455 bp, Homo sapiens
  chr9:102586189-102586644
  hyper
agggttggaaactccgcagaggagccccggtcacaatggtgcgtttcacggtttcctccacacacttcaccaccgggaggggaacacgggggtgttcctttcgtctgcccacgagaaagaaaggggctttgacagaggtagttatttcttcctaatttacaaccccaaggctctgtgctcccggccccggcggccgcaagcaggagcggcggaacgtgtttccaggcactgaggctttgcctaggtaaccggccgcttgtggggtggagagagcggcggggcgctgggctgggctggaggaaaggctgtgtgggtccctcccgcgaacgctgggcgctcgaggggaactccttcgttggggagaggcggtccccgcccacccgagttctgaggcctcctctcagagaacgactccgcttgaaaggccctcagggaatgcgggacgggaatgcggg

SEQ ID NO: 286610 - DNA, 232 bp, Homo sapiens; identical to SEQ ID NO: 201818
  chr9:102586985-102587217
  hyper

SEQ ID NO: 286611 - DNA, 89 bp, Homo sapiens
  chr9:103190036-103190125
  hyper
atcactgtgctcggcgcttttccatacttgtctcctttaagacctccagtgccccgcccgtccagagtgtaacgggagggatccctcac

SEQ ID NO: 286612 - DNA, 412 bp, Homo sapiens
  chr9:103235930-103236342
  hyper
cgggagccgcgcgtccaaccagcccccgggtggtggcggcggcagcggcggggactgtcccggcggcaaaggcaagagcatcaactgctcaggtaggaccggtcggagccggccctaggtcttcccacccctccgttgccgcctccctcgtggtccctgcggtcggccgggctgggaaagaccccgtcgtgggggtcccaggggtgggcccgagggtgagcgagggcggagggcagggcgcgagcgtgcggtgtggctttgggaccggcgctggggatgggagtggccgtgggtgcgtccgagtgtgtcgagtggctgggcgagggcggcccggcgtgtggggaggcggtggggccggggccggggccggcgaggctgagcggccggccggggctcccggtgtggtcgtggg

SEQ ID NO: 286613 - DNA, 273 bp, Homo sapiens
  chr9:103790689-103790962
  hyper
gggagaggacagccccacgttaccgaggactcgaggcagaagcggtctccaaggatgggtggggatcccaccactggcttccagctctgcatgcgccgcggagtccccgcgcagggcgcacctttgcggcggggtttccccgctgccttctgggaaccccgcggagcgactgccgctggacgcaatctggctggcttgcctctaccccgagctcactctctctgctctgtctgggctctggagccagagctgagtctctcttgagcatgcgca

SEQ ID NO: 286614 - DNA, 203 bp, Homo sapiens; identical to SEQ ID NO: 201821
  chr9:103791017-103791220
  hyper

SEQ ID NO: 286615 - DNA, 36 bp, Homo sapiens; identical to SEQ ID NO: 201822
  chr9:103791704-103791740
  hyper

SEQ ID NO: 286616 - DNA, 156 bp, Homo sapiens
  chr9:103792080-103792236
  hyper
tcctcagggaaggtgctgtcttcacgcacaccatcgcggcagcgctgggagctgaacaggggctgctgctgcggcggcggcagtgggaagacggggctttatcctctcccaacccatttcccaagggttttatgacacgcacgtgtggaatatgtg

SEQ ID NO: 286617 - DNA, 227 bp, Homo sapiens; identical to SEQ ID NO: 234311
  chr9:104161277-104161504
  hyper

SEQ ID NO: 286618 - DNA, 148 bp, Homo sapiens; identical to SEQ ID NO: 201823
  chr9:104248697-104248845
  hyper

SEQ ID NO: 286619 - DNA, 499 bp, Homo sapiens; identical to SEQ ID NO: 201824
  chr9:104248975-104249474
  hyper

SEQ ID NO: 286620 - DNA, 79 bp, Homo sapiens
  chr9:107526188-107526267
  hyper
atctacacaactgcgcatcggagcgaatgaggtcagggcccagaaaggtggggcaggaacgatcccagccttcagctaa

SEQ ID NO: 286621 - DNA, 88 bp, Homo sapiens
  chr9:108418383-108418471
  hyper
cacaagagagagttggtctccggaagccagggcgcggagagtggggaggaaacggtgggagtccccgtcgggaaggggcccccgggcc

SEQ ID NO: 286622 - DNA, 185 bp, Homo sapiens
  chr9:108418947-108419132
  hyper
tagatgctttcctggactccctaaatacttaatcattaggcaaggcaatggtttgcaagggggagcaaaagttataaaaagaaaaagggaaaggcctggaagcgaagcgggcaagggaagaagcttgggcagagtattcgagatgcgtccaggctgcacggtgcaggggtcgggtgcatcttaga

SEQ ID NO: 286623 - DNA, 330 bp, Homo sapiens; identical to SEQ ID NO: 234315
  chr9:108455719-108456049
  hyper

SEQ ID NO: 286624 - DNA, 296 bp, Homo sapiens; identical to SEQ ID NO: 201825
  chr9:109622313-109622609
  hyper

SEQ ID NO: 286625 - DNA, 140 bp, Homo sapiens; identical to SEQ ID NO: 201826
  chr9:109623658-109623798
  hyper

SEQ ID NO: 286626 - DNA, 349 bp, Homo sapiens
  chr9:109624113-109624462
  hyper
gcttcatcttggctcgcgtgtcttcaacaccatgacaccttatcattaagagcgctgattgttactttccgagcctttagatgatcagccagaaagtgcaaacaacgcggggctggagggtgtaaagttatttaagcaggcgttctttttttcttttggtgcgcagtcaaaacatttcacaagttaggaaaagaaagtggtggttccgaagctcggaatgatgggctcttttcctcctccacccccccaccttccatatcaggaaagaaataaaacgcacaatgagcctttatttcaggagagaagacttcaaaatacgtgccagtaatggacaatttgagcttttcac

SEQ ID NO: 286627 - DNA, 164 bp, Homo sapiens; identical to SEQ ID NO: 201828
  chr9:109624564-109624728
  hyper

SEQ ID NO: 286628 - DNA, 316 bp, Homo sapiens; identical to SEQ ID NO: 234319
  chr9:110187425-110187741
  hyper

SEQ ID NO: 286629 - DNA, 59 bp, Homo sapiens
  chr9:110249880-110249939
  hyper
ggcgccaccaccaccgggtggctgccgtcagggctgcctttgctgacgctgatgaccga

SEQ ID NO: 286630 - DNA, 122 bp, Homo sapiens; identical to SEQ ID NO: 201829
  chr9:110250497-110250619
  hyper

SEQ ID NO: 286631 - DNA, 469 bp, Homo sapiens; identical to SEQ ID NO: 201830
  chr9:110250630-110251099
  hyper

SEQ ID NO: 286632 - DNA, 259 bp, Homo sapiens; identical to SEQ ID NO: 201831
  chr9:110251129-110251388
  hyper

SEQ ID NO: 286633 - DNA, 44 bp, Homo sapiens; identical to SEQ ID NO: 201832
  chr9:110251418-110251462
  hyper

SEQ ID NO: 286634 - DNA, 220 bp, Homo sapiens; identical to SEQ ID NO: 201833
  chr9:110252078-110252298
  hyper

SEQ ID NO: 286635 - DNA, 118 bp, Homo sapiens; identical to SEQ ID NO: 201834
  chr9:110252515-110252633
  hyper

SEQ ID NO: 286636 - DNA, 85 bp, Homo sapiens
  chr9:110252700-110252785
  hyper
gaggaggcagtgcccagcactgtgcagcgtgaactgggagcctcaagagaaggccagaggagtgttccgccgggaacaggcggaa

SEQ ID NO: 286637 - DNA, 189 bp, Homo sapiens; identical to SEQ ID NO: 234323
  chr9:111696912-111697101
  hyper

SEQ ID NO: 286638 - DNA, 80 bp, Homo sapiens; identical to SEQ ID NO: 201835
  chr9:112081254-112081334
  hyper

SEQ ID NO: 286639 - DNA, 130 bp, Homo sapiens; identical to SEQ ID NO: 201836
  chr9:112081563-112081693
  hyper

SEQ ID NO: 286640 - DNA, 1729 bp, Homo sapiens
  chr9:112081773-112083502
  hyper
ctcccaagtcaccctacccgctgcgaggaggctgcggggcagatggggctcagggaatgggaatggggtgtatccagaagggatcagcagagagcagaaatggtctaacccccgcctcccaaacttggggcgcctgccgagcagcaagcgaggggatctcctctctgctgtctcatcaaggcctgatggcgagtttgaggggggacaagctggacaccccaggacggcctcacattgatttgagattttctacccaataacccagtatcaggaagacccctgctggaagctagggacggaaggggagcgccggccacccacaccagggggggcggggtctcgggacttggggaccgtgtgtactggggagggggcgaggccccaaggactaggtgggcgccagagaaatcgcaaccccgcggcgcaatgtgccaaggagggggcacgggccaaaggtggggccccggaagagaccgggacggggtggcccaagaagaaaaagggttgaggagtgctcggagaagaggatgggggaggggatccccagggaggtgcaagggaagcgcccccgatgcaagcactgggggagggggagctgcctccaggggcgcgaggtgccagtgccccagactggccccgtcactcaccggcaggtccacgctcacttcggtcccgtcgagcaggaagacgcggcagtagagggtggccttggcggcgccggcggcggagatgtgcacggccgcgccgccggtgagcaggggcccgccgcccgccgggaacacgctgcccccgggcgcggcgggcagcgccgaggaggaggcggcggcggccgggcccccccgtggccccccatcgcgctcgtcccccagcccggcggccccgcgccccgccgcgccccgcgcgtagcgctgcatggagcggcggccaaaggtccggcgcaggaaccgcagcatcctggctgggggcgccccctgcctccgccccctgcgctgccgctgccgctgccgctgccgctgcgccgccgcccgggagcgtcccgcgacgccgtcagtgccctcggccgcccgcgccgcctctcgcgggctacggcccggggcaagcccgcgccgaggccgaggccgcgctctagccgcctgcggggcgcgccggcccggccagcgccggctgcgagtggccgcaggcgggagggcgcgctcggggccgtcccgccgccgccgccgccgcgcgctctcccgggccggcggcctgcgcgggctgccgaggggctgctccggacgggcggctgcgggctgccagggggctgccgggggcgcgggaggcgggctgcgggctgctcccgcgccgcgcgccggccgagggccagccggagcagggcgcctgcgtggtcctggcgcgctcgctcccactcgccgcgccgcgcccggggcccgaggaggccccgccgagcgcccgctcccaaggcgccttttcctgcgcccgcagcccccgcctcccacctgggaggctgcacctccagccgccgccgccgccgccgccgccgctgccgccgggactgcagcacgccctcctccctcggggctgcgccgggtaattgcaagccgggtctgtgctgccccctgccggcccgagcgccccctgctgctgtaggtgtgctcacgtgtgtacacgtaggtgagcacacacgtgtttccggcgcccagagccctggaggcgccgagtgcccctttgc

SEQ ID NO: 286641 - DNA, 216 bp, Homo sapiens; identical to SEQ ID NO: 201839
  chr9:112260252-112260468
  hyper

SEQ ID NO: 286642 - DNA, 160 bp, Homo sapiens; identical to SEQ ID NO: 201840
  chr9:112260523-112260683
  hyper

SEQ ID NO: 286643 - DNA, 292 bp, Homo sapiens; identical to SEQ ID NO: 234328
  chr9:112262008-112262300
  hyper

SEQ ID NO: 286644 - DNA, 73 bp, Homo sapiens; identical to SEQ ID NO: 201841
  chr9:112402426-112402499
  hyper

SEQ ID NO: 286645 - DNA, 108 bp, Homo sapiens; identical to SEQ ID NO: 201842
  chr9:112542127-112542235
  hyper

SEQ ID NO: 286646 - DNA, 243 bp, Homo sapiens
  chr9:113017456-113017699
  hyper
cagggcacccgaggcgggcgaggacccgccctcctctgcttcccgcaggtagggaggggtaatcgcagggtaggcgctggcgaggggtcttctaccgttcgagcagtatcaatttcctccactcacttttctgacgctgcatttaacaaatatttctggagtggctacattggactagacactgcgcgttaggctctgggtttcccagtctacaaggttttaggcttgcaataactttcaaac

SEQ ID NO: 286647 - DNA, 31 bp, Homo sapiens
  chr9:113017729-113017760
  hyper
taagaggacaaaacaacgatcgggataccga

SEQ ID NO: 286648 - DNA, 101 bp, Homo sapiens
  chr9:113017835-113017936
  hyper
ggtgaatcatggacgggcagggcagccgaggcccccgggcccaaccttggggactcagtcattccaaagccactgctgccggaaacgcgccctgcgccaca

SEQ ID NO: 286649 - DNA, 220 bp, Homo sapiens; identical to SEQ ID NO: 201843
  chr9:113799864-113800084
  hyper

SEQ ID NO: 286650 - DNA, 287 bp, Homo sapiens
  chr9:113800481-113800768
  hyper
gcccccgggctggcttcaggccgcgcgcccagtcccggcggcccccgccccaccgccagccgagcccggccctccgcccgcccctcggcagtcgcccagagcggggccgccccctgcgcccaccccgccggggtcccgtgctcggccgggcggcggggagggctccgcggctccgggccctggccgccccagatccggcccgcgctccgcagcggggctggagacggagtcgccactcagggagcgtcagccgccagtcggcccctactgcccggctttggcgcgct

SEQ ID NO: 286651 - DNA, 282 bp, Homo sapiens; identical to SEQ ID NO: 201845
  chr9:113800798-113801080
  hyper

SEQ ID NO: 286652 - DNA, 80 bp, Homo sapiens; identical to SEQ ID NO: 201846
  chr9:113801414-113801494
  hyper

SEQ ID NO: 286653 - DNA, 269 bp, Homo sapiens; identical to SEQ ID NO: 201847
  chr9:114360505-114360774
  hyper

SEQ ID NO: 286654 - DNA, 109 bp, Homo sapiens
  chr9:114361074-114361183
  hyper
ctacgtatcatttttacggtgagacatttgcagtttactctgttatttcgaaatacacattattggctctagtcactctgctgtgcaacagatctcagaacctactcct

SEQ ID NO: 286655 - DNA, 341 bp, Homo sapiens; identical to SEQ ID NO: 201848
  chr9:114361444-114361785
  hyper

SEQ ID NO: 286656 - DNA, 238 bp, Homo sapiens
  chr9:114361815-114362053
  hyper
caggaagaaagcaagggggttagaggagggagaaaagggaaggaaagaaagcaggaggtctacttacaggagcccgaaggttccactgcctggggaaggcggctgggactgcgcagccgggcgcccggggtccgacttatgacaggtcccaagagagggtggggccaccccagggcggggctgcttctttagggtgagagcccggccccgaaagggtcacaggaggaaaaccagggtc

SEQ ID NO: 286657 - DNA, 192 bp, Homo sapiens; identical to SEQ ID NO: 223662
  chr9:114937755-114937947
  hyper

SEQ ID NO: 286658 - DNA, 43 bp, Homo sapiens; identical to SEQ ID NO: 234337
  chr9:115095506-115095549
  hyper

SEQ ID NO: 286659 - DNA, 34 bp, Homo sapiens; identical to SEQ ID NO: 234338
  chr9:115480611-115480645
  hyper

SEQ ID NO: 286660 - DNA, 68 bp, Homo sapiens; identical to SEQ ID NO: 234339
  chr9:115607127-115607195
  hyper

SEQ ID NO: 286661 - DNA, 232 bp, Homo sapiens; identical to SEQ ID NO: 201850
  chr9:115774339-115774571
  hyper

SEQ ID NO: 286662 - DNA, 183 bp, Homo sapiens
  chr9:115818681-115818864
  hyper
ccacagataactcagaacaccgacctcccaaaagaccatctagcatcgattccaccaattcccaaatcacctatcgtcacagactactccaatcactgccccgcaagtacaccatctctgaccgccaaaacaccctgtctcatcacagctctcaccgcggcgctggcctcgggctcggacaca

SEQ ID NO: 286663 - DNA, 332 bp, Homo sapiens
  chr9:115818917-115819249
  hyper
gtccacggtctctggctttgtcagaatctggacgccgctggagaccgacatggcggctacccggagggcggccttagcgggtccggcagccgcgatggcggcgcccttcggtaatagcgcacgggcgcggccatcttggcaaacactcagccgtacagcggaagtgcggggacttctgggacaattagatcgggaggtggaagctggcgagggcgttacttgcaggatgcaggagtgatgcgatcagagccagccggaaccgagttccgttacgcactacaggactgacctgggcctgacaacccactgccggagttcggatcgcatcactg

SEQ ID NO: 286664 - DNA, 215 bp, Homo sapiens; identical to SEQ ID NO: 234343
  chr9:116102325-116102540
  hyper

SEQ ID NO: 286665 - DNA, 401 bp, Homo sapiens; identical to SEQ ID NO: 223663
  chr9:116111661-116112062
  hyper

SEQ ID NO: 286666 - DNA, 137 bp, Homo sapiens; identical to SEQ ID NO: 234344
  chr9:116163725-116163862
  hyper

SEQ ID NO: 286667 - DNA, 36 bp, Homo sapiens
  chr9:116450196-116450232
  hyper
ttttccaggctgcgcggtgcctcgcgctccggggta

SEQ ID NO: 286668 - DNA, 242 bp, Homo sapiens
  chr9:116638746-116638988
  hyper
gcccggggcgctgcgccacttcattgcaagatttgcaaaatgcaaagtgcctgggcacgtttgcgggctttttgtgggcgcaatcgggagggtcggggtccggagagcacccccccgggcgctgcggggtgcgaggagggtgggggtgacgagggggtcttttggggcccccacccagcgccccctccggccccgggctcggaccggagcccagaaaacaaagcggcgagagaacagagcag

SEQ ID NO: 286669 - DNA, 94 bp, Homo sapiens; identical to SEQ ID NO: 201853
  chr9:116860421-116860515
  hyper

SEQ ID NO: 286670 - DNA, 135 bp, Homo sapiens
  chr9:116916214-116916349
  hyper
ctacctcccctctctcggcttgggacttttcctaaagtttgttgaaaccagacaccttgctcgaccgagcccgcgtgcagccagggtttaaaaggccgccttcagcgccccctccccgcccccagcggagacttc

SEQ ID NO: 286671 - DNA, 347 bp, Homo sapiens
  chr9:116916570-116916917
  hyper
ggctgcggggacccatgaatacaaatgccgttaggcgccggaggaaggaccgaccggccagcctcgcacgtagggacccagtaagtgcttgggggctcctggagcggtgcgaagtgttatatgcctgtgtgtgcgcgcgcctaaaggtgtgcgcgtatggggaggtgggtacacgcgtgaggagtgaatgcgtgtgtgcacatgtgcggtgggcactctcggagaactgtgtgcaagtgagggtgtgcgcgcgtgtgtccacccggggtgtgtacatgtgtgggggcgatatggccaggatagcgtgcatttgtgcctgtgtaagcatccgtgtgcatgcttctgcg

SEQ ID NO: 286672 - DNA, 145 bp, Homo sapiens
  chr9:116917003-116917148
  hyper
atgggaccgtgtgtgagcgtgtgtctgagtttggggaaagggtggatacgtgtgggagtgtgtgtgtgcaccggtgaataagtgtaactttgctcgtgaacgagtggcaagaggtggtagaggcggagggagctgtggtcccagg

SEQ ID NO: 286673 - DNA, 299 bp, Homo sapiens; identical to SEQ ID NO: 201854
  chr9:116918463-116918762
  hyper

SEQ ID NO: 286674 - DNA, 181 bp, Homo sapiens
  chr9:117267296-117267477
  hyper
tggaatccgggggacgcggagacgtcggcgggttcctgagagacacaagagttggctgctggagcccggaggtggcggagactgctgctggagtccggggggcgcggggtcagcagctacattctggagggcacggagacgacgggtggctggagtttgggggcgccgcaaagctgacctg

SEQ ID NO: 286675 - DNA, 157 bp, Homo sapiens; identical to SEQ ID NO: 201855
  chr9:117268030-117268187
  hyper

SEQ ID NO: 286676 - DNA, 146 bp, Homo sapiens
  chr9:117880425-117880571
  hyper
aggctgtggccggtgcagccaactttggctggcttatatagcgagctccttcctctgtaatgggacgcctcgcctccagacatcctttcccactttttcagttggcgaattaaaggaacagccctcccagcggaacagggttagct

SEQ ID NO: 286677 - DNA, 109 bp, Homo sapiens; identical to SEQ ID NO: 201856
  chr9:118917079-118917188
  hyper

SEQ ID NO: 286678 - DNA, 83 bp, Homo sapiens
  chr9:120175190-120175273
  hyper
gccccacaggtgcacgtgggaagagctactggtttgtgtgtgtctgtgtgtgtgtgcttggtgcgtcgcaccccagaagcgcc

SEQ ID NO: 286679 - DNA, 336 bp, Homo sapiens; identical to SEQ ID NO: 201857
  chr9:120176358-120176694
  hyper

SEQ ID NO: 286680 - DNA, 161 bp, Homo sapiens; identical to SEQ ID NO: 234357
  chr9:120249908-120250069
  hyper

SEQ ID NO: 286681 - DNA, 162 bp, Homo sapiens
  chr9:122130811-122130973
  hyper
tttcccggtgactacgtgatcctatagtaagggtcccattccgtgtaagctggagagacctaattaaaaagacacacgagggcacacatacaaacacatacgtacaaacatgcacacacacatcgcgccgtaagtaggttataggacctctctctcttcacc

SEQ ID NO: 286682 - DNA, 405 bp, Homo sapiens; identical to SEQ ID NO: 234359
  chr9:122318422-122318827
  hyper

SEQ ID NO: 286683 - DNA, 334 bp, Homo sapiens; identical to SEQ ID NO: 234360
  chr9:123883882-123884216
  hyper

SEQ ID NO: 286684 - DNA, 192 bp, Homo sapiens; identical to SEQ ID NO: 234361
  chr9:124062289-124062481
  hyper

SEQ ID NO: 286685 - DNA, 1032 bp, Homo sapiens
  chr9:124131788-124132820
  hyper
cgaggaacaaaagccgggaaggagagttctccaaaacgcagaggaaagcggagggggaaaaatggggcagaaagtggagctagaaagagaggtaagaagaaagccagagagacttcttccttctgcaaatcggtctaagtttcgggaggtgggattgggggaggagggggttcaccctggggccaggccagggctgggtggaggaggcggccttcgagagagtgagtcgggaaagaaggggagtgggcaaagggtgagatgtggggtcccggtccccgcctcgctggctgccagttccctctgcgtttcctagtccgcgtgcgtgacacgagatagtgcagccctggcatggggcttggcatctggcggccgcgagataaccagggcccgtgcgatgggaaacgtgccgttggcagcccgccacccctccatcgtgacctcagtctgccaaacagggttcgtgatgctcagtttactagggaggagccgcggctttgagatctcgcccagcccgaagcagcggagactggccaggagcccggctgtcagacctcggagcgcacgctgcgggcgggggctcggtccacgggggagggtcaggggacgcgggactcacccttgaaggagtcggggagccgctgggcttcggagtcccgtgtgtgccgcttctcggccatgctgcccgagacgcagtcgcactcccccgtcctcgttgccaaacccggagccgccgggaatgccctgaggagccagaggcacaagacccagattgccgccccgcccccaatcgaggtcccgccctcgtgagagttggccaatcaacgcccaggatcgaggaggacccacctcccaatccccgccctcctgtccctccacggcgcgactgcttcgcagtcacttcccgctagttctgtgggctgaggggcgtggcctgaggggcgtggcctgaggggcgagagcccccaaggctgtgggtatgaggccggggccctgcaccggaagggagggcggaagccacgggacgtggagcag

SEQ ID NO: 286686 - DNA, 45 bp, Homo sapiens; identical to SEQ ID NO: 201859
  chr9:124262330-124262375
  hyper

SEQ ID NO: 286687 - DNA, 253 bp, Homo sapiens; identical to SEQ ID NO: 201860
  chr9:124361930-124362183
  hyper

SEQ ID NO: 286688 - DNA, 35 bp, Homo sapiens; identical to SEQ ID NO: 201861
  chr9:124362324-124362359
  hyper

SEQ ID NO: 286689 - DNA, 181 bp, Homo sapiens; identical to SEQ ID NO: 223669
  chr9:124622036-124622217
  hyper

SEQ ID NO: 286690 - DNA, 296 bp, Homo sapiens; identical to SEQ ID NO: 234367
  chr9:124857515-124857811
  hyper

SEQ ID NO: 286691 - DNA, 63 bp, Homo sapiens
  chr9:124981571-124981634
  hyper
gttccctcaggaggcgcagagcaccttcgttgaatccaccgctcccctaagcacaggcggttc

SEQ ID NO: 286692 - DNA, 140 bp, Homo sapiens; identical to SEQ ID NO: 118090
  chr9:124981877-124982017
  hyper

SEQ ID NO: 286693 - DNA, 102 bp, Homo sapiens; identical to SEQ ID NO: 201862
  chr9:124990418-124990520
  hyper

SEQ ID NO: 286694 - DNA, 150 bp, Homo sapiens; identical to SEQ ID NO: 201863
  chr9:124991012-124991162
  hyper

SEQ ID NO: 286695 - DNA, 85 bp, Homo sapiens
  chr9:126135525-126135610
  hyper
gaggcctggctgctgcgtgccgcggcgggcgccctggaaggcgtgtggctggcggtgcgcaatggctcgctggcggggggcgtgc

SEQ ID NO: 286696 - DNA, 246 bp, Homo sapiens; identical to SEQ ID NO: 201864
  chr9:126759127-126759373
  hyper

SEQ ID NO: 286697 - DNA, 127 bp, Homo sapiens
  chr9:126761349-126761476
  hyper
tgcatttgaggaggcgtgaacttcaacaggggaccacaggcacggggcacctcctgcgtcccccatcgccaccccacctagagctgctcatcaactccttttagagacaggaaactgcagccctggc

SEQ ID NO: 286698 - DNA, 165 bp, Homo sapiens
  chr9:126762044-126762209
  hyper
ggcagctggcaacgcggggcgagcggggagccgcgcgccgcagcccgggtggccgctcccggcgcccggctggccctgattgatttgtcagccgaggcaagaaaaacggcccctctgatccgcgcgcccagtcctcggctccccgggcgccgggcctccctcccg

SEQ ID NO: 286699 - DNA, 299 bp, Homo sapiens
  chr9:126762231-126762530
  hyper
cggccccgcaggctggagcaccccgcccgcctcaggagggagccctccgccctccggcccgggccccggcgcccctccccggccccgcgcgccgcgcacctcctccggctcggcccggcccgcccgagggccctggggctgccaacggccccctcacccccgctgggcaccgtgcccgcgcccccagccctcaccctgccgctcccccctagcccggcacccccgccccccgccccccggccctggcccggggccgcccgcagagccggccacacccgctgcggaggactcaccaaggt

SEQ ID NO: 286700 - DNA, 67 bp, Homo sapiens
  chr9:126762606-126762673
  hyper
gacccggaccgggaaccgccgctgccactgagccgggagcacgggagggccccgtcgggccgggagg

SEQ ID NO: 286701 - DNA, 251 bp, Homo sapiens; identical to SEQ ID NO: 234373
  chr9:126769112-126769363
  hyper

SEQ ID NO: 286702 - DNA, 368 bp, Homo sapiens
  chr9:126771808-126772176
  hyper
cctcccgagagtggagttgcaccaaggacaaacactctagcgtcattacaaattttttctgccccttgggcgacctccagatgaaccctggtgactctcagattggattttcattccttactttctttgaaagaaagtgccccagatgcgtcaataaaacatgcctatgtattcgtgtaggcgtccgcatgcctgcgcgccggccgtgtgcaggcgccgaagcacacgtctgtgtgaacacacgggcacgcgcgtctttgggtttagtggtccttccctcgcgttggggcatctgtacacatgcagaatatacacatatgattgtaacttcaagttttttcaattatgcaaaacgacctcgtaggagc

SEQ ID NO: 286703 - DNA, 71 bp, Homo sapiens
  chr9:126773160-126773231
  hyper
taaatggcagagctaggattcgaaccctggcctttctgagttcctaaagccatgctcgcccccactcttcc

SEQ ID NO: 286704 - DNA, 60 bp, Homo sapiens; identical to SEQ ID NO: 201866
  chr9:126773978-126774038
  hyper

SEQ ID NO: 286705 - DNA, 127 bp, Homo sapiens
  chr9:126775917-126776044
  hyper
cctaaacacagcccgagcattttgggggaaaggacagggaggactggaaggaagagaggtaagcaccagagccatttaggccaggagcccggcctgggcccgtggctggcgagggctgcgcaggcag

SEQ ID NO: 286706 - DNA, 45 bp, Homo sapiens
  chr9:126776386-126776431
  hyper
gagctcacctgtttcagcaaggacggtagcatctactgcaaggaa

SEQ ID NO: 286707 - DNA, 227 bp, Homo sapiens
  chr9:126777302-126777529
  hyper
aggggattgccccccgcagcagcagcggcacctggaggaggaaaaggggggtacccaaccgtgtgttcccacagcccctccctccatggtccctacaggcgcttctctgtgcagcgctgcgcccgctgccacctgggcatctcggcctcggagatggtgatgcgcgctcgggacttggtttatcacctcaactgcttcacgtgcaccacgtgtaacaagatgctgac

SEQ ID NO: 286708 - DNA, 133 bp, Homo sapiens
  chr9:126778106-126778239
  hyper
cagggatggagaaagcaaggcggcgctgacgccaaacaggttttgggttggcgcggctgagggccgggaactggggcagcgaaggaacgaggcagggcggcgagggtcccaagagaaagggctggctgtggcc

SEQ ID NO: 286709 - DNA, 124 bp, Homo sapiens
  chr9:126778518-126778642
  hyper
tggggtgaggtggggggcttggttcggatttccggcatctttgaaccccaggccattcccggagaagctctgccccctcccgcgcccctccctgctcaggacagctgcagaggttctgagttcc

SEQ ID NO: 286710 - DNA, 84 bp, Homo sapiens
  chr9:126778685-126778769
  hyper
gaaaggtttatgactctccgggcttccgaactagagtttatgtgcaattattttctttctttcgtttgcaacagaattagattt

SEQ ID NO: 286711 - DNA, 123 bp, Homo sapiens
  chr9:126779024-126779147
  hyper
aaatggtgaagcagcggtaggccggtcggtggcgcggatttaagatttgctgaaggcactaccacagatgtagctctctggaacttccatccctcctctcctaccaccccccaaaaaaagaca

SEQ ID NO: 286712 - DNA, 249 bp, Homo sapiens; identical to SEQ ID NO: 201867
  chr9:126780315-126780564
  hyper

SEQ ID NO: 286713 - DNA, 248 bp, Homo sapiens
  chr9:126782445-126782693
  hyper
ctctaaaatgggaatagtcatagccacctctctgagaggtaatgatgtacagtgacatttgtaaagccaaacacacaccataggtgtctactacatgtttatttctgcctcggacttccttccccgtccactctgccgctctctgtggactgccgcagatctctgaacttccccgagcctaatttgctccacttgttcacggagaaacaatcatcttacagggtagcgatgaggattaaactgcaaaa

SEQ ID NO: 286714 - DNA, 53 bp, Homo sapiens; identical to SEQ ID NO: 201868
  chr9:126783540-126783593
  hyper

SEQ ID NO: 286715 - DNA, 217 bp, Homo sapiens; identical to SEQ ID NO: 201869
  chr9:126784840-126785057
  hyper

SEQ ID NO: 286716 - DNA, 42 bp, Homo sapiens; identical to SEQ ID NO: 201870
  chr9:126785351-126785393
  hyper

SEQ ID NO: 286717 - DNA, 94 bp, Homo sapiens
  chr9:126794701-126794795
  hyper
tggttccagaacgcccgagccaagttcaggcgcaacctcttacggcaggaaaacacgggcgtggacaagtcgacagacgcggcgctgcagacag

SEQ ID NO: 286718 - DNA, 39 bp, Homo sapiens; identical to SEQ ID NO: 201871
  chr9:126872740-126872779
  hyper

SEQ ID NO: 286719 - DNA, 171 bp, Homo sapiens; identical to SEQ ID NO: 201872
  chr9:127005138-127005309
  hyper

SEQ ID NO: 286720 - DNA, 278 bp, Homo sapiens
  chr9:127215312-127215590
  hyper
ggtgcgcgcaccaccgccgtgctggtgttcgacgagaggacggctgaccgggcggcgcggctgcggagccctctgcctgagctggcagcgctgaccgcgtgtactcacgtgcagtgggactgtgcctcgcccgaccccgcagcgctcttctccgttgccgcgcccgcgctgcccaacgcgctgcagctgcgcgccttcgccgagccggggggcgtcgtgcgcgctgcgctggtggtgcgtgggcagcacgcgcccttcctcgcagccttccgcgccga

SEQ ID NO: 286721 - DNA, 124 bp, Homo sapiens
  chr9:127215678-127215802
  hyper
cgggggctgggcgccggccacccggtgccgtccggcggcatcctggtgctgggccaggatcaggactctctgggcggtggcttctcggtgcgtcacgccctcagcggcaacctcaccgacttcc

SEQ ID NO: 286722 - DNA, 49 bp, Homo sapiens
  chr9:127215973-127216022
  hyper
cggccccaccccatggccccgaatccttcccttccgaccctggaactcg

SEQ ID NO: 286723 - DNA, 140 bp, Homo sapiens
  chr9:127421529-127421669
  hyper
gggtgagacaggtcagccagctgcaggggcgggagcgggggggcgggtagggacatggatgtgtgaggtgctcatgcgtgcgatcgtgactagattctgaaactgccagccattttcccagctccgctttgtgcaatcta

SEQ ID NO: 286724 - DNA, 427 bp, Homo sapiens; identical to SEQ ID NO: 234393
  chr9:127531978-127532405
  hyper

SEQ ID NO: 286725 - DNA, 92 bp, Homo sapiens; identical to SEQ ID NO: 234394
  chr9:127533784-127533876
  hyper

SEQ ID NO: 286726 - DNA, 127 bp, Homo sapiens; identical to SEQ ID NO: 201874
  chr9:127534416-127534543
  hyper

SEQ ID NO: 286727 - DNA, 96 bp, Homo sapiens; identical to SEQ ID NO: 234395
  chr9:127905903-127905999
  hyper

SEQ ID NO: 286728 - DNA, 248 bp, Homo sapiens; identical to SEQ ID NO: 234396
  chr9:127962948-127963196
  hyper

SEQ ID NO: 286729 - DNA, 224 bp, Homo sapiens; identical to SEQ ID NO: 234397
  chr9:128510756-128510980
  hyper

SEQ ID NO: 286730 - DNA, 327 bp, Homo sapiens
  chr9:128985077-128985404
  hyper
taaggaccgctcggatccttaacagtagtcgcatgtcttattaaactaatatttcacaaacttttattctccctgtggttggaggtcgggagcgaagccccccgccccctaccccgctggctctgcacagcctggggcggaccctggatgggaggagctcagcgcgcccggcagggccctggagggggacacctctcgcccccgtctcccctgtgggttccttctttcaactcacgtggccctggttcctcccctgtgccaggccctgcccagaggatacagatgggtccaccccgctccctctcaaggagccccctgggcccggga

SEQ ID NO: 286731 - DNA, 320 bp, Homo sapiens; identical to SEQ ID NO: 201876
  chr9:129372402-129372722
  hyper

SEQ ID NO: 286732 - DNA, 225 bp, Homo sapiens; identical to SEQ ID NO: 201877
  chr9:129373385-129373610
  hyper

SEQ ID NO: 286733 - DNA, 67 bp, Homo sapiens; identical to SEQ ID NO: 201878
  chr9:129373640-129373707
  hyper

SEQ ID NO: 286734 - DNA, 110 bp, Homo sapiens
  chr9:129375185-129375295
  hyper
actgtccttgatccgcgcgtcccagcgacccctggccgggcacccgacccgccaaaggaccccgatcttggcagccaacctaatttcttcagagccgctaccctggggcc

SEQ ID NO: 286735 - DNA, 62 bp, Homo sapiens; identical to SEQ ID NO: 201879
  chr9:129375663-129375725
  hyper

SEQ ID NO: 286736 - DNA, 91 bp, Homo sapiens
  chr9:129376798-129376889
  hyper
tgttggacggcatcaagatggaggagcacgccctgcgccccgggcccgccactctgggggtgctgctgggtgagtgcggggtcggaacgcc

SEQ ID NO: 286737 - DNA, 35 bp, Homo sapiens
  chr9:129376918-129376953
  hyper
cgtccggctgtggacacgggcgttggggccaacgg

SEQ ID NO: 286738 - DNA, 166 bp, Homo sapiens; identical to SEQ ID NO: 234406
  chr9:129384573-129384739
  hyper

SEQ ID NO: 286739 - DNA, 62 bp, Homo sapiens
  chr9:129385810-129385872
  hyper
actctgtagcagatttttcccggcccagagttaccctgtagcagatttcccccccaggcggg

SEQ ID NO: 286740 - DNA, 652 bp, Homo sapiens
  chr9:129386782-129387434
  hyper
gacccttttcccgcctgagaaacgtgcgaagtccctcagctcctggaggcaaccaggcggcccgaaagccgagttcccggcgcggatgctagggccgaccccagccccctccctcctgcgccccagcccgagggcggcgagtggcaggtttttttttatcttgtttttttttttttggatttggtttgcaggggggaaatgtggttgtatcaatccacaaatatttactcttaacagacttgtatctgtggagatttcgaacaaagacagtttagggggattacaaaaaccctaaaccccgtttttctcccggacttggtgctttaaatgccaattataggcgagccatatccaacagcaacggggaaaggcgagcaggctccggggagggaggtggggggagagtccggccattaaatgtaacttttcattatgaaaaggatttcgccggttttatcttctaataagattatgtcacgaacacaagtacctaggatggtgctgagtgacagggctctgtcgtttaatcagaggctgtgccgctcaaaccgcggggccctttgtcccacggagtgaacgacggaaacttgccatcctaatccccttattcatgtcaagcacagaaaagaagccgagcaccttacaaccgtgt

SEQ ID NO: 286741 - DNA, 51 bp, Homo sapiens; identical to SEQ ID NO: 201882
  chr9:129387464-129387515
  hyper

SEQ ID NO: 286742 - DNA, 259 bp, Homo sapiens; identical to SEQ ID NO: 234408
  chr9:129393156-129393415
  hyper

SEQ ID NO: 286743 - DNA, 155 bp, Homo sapiens; identical to SEQ ID NO: 201883
  chr9:129400693-129400848
  hyper

SEQ ID NO: 286744 - DNA, 361 bp, Homo sapiens; identical to SEQ ID NO: 234410
  chr9:129439099-129439460
  hyper

SEQ ID NO: 286745 - DNA, 187 bp, Homo sapiens
  chr9:129485493-129485680
  hyper
aacttgtccctctcctttctcggtgtccatggtgggtctggttcccaccgctccctccctccccgcacagtctgagacccccttccccgggccgccccgtcgatcccaggtgatggatggagccttcagggagcccgcgcgggcgggctaggctcgggcggaaatgaagaggataagatctgcgagc

SEQ ID NO: 286746 - DNA, 658 bp, Homo sapiens; identical to SEQ ID NO: 223678
  chr9:130158818-130159476
  hyper

SEQ ID NO: 286747 - DNA, 254 bp, Homo sapiens; identical to SEQ ID NO: 234413
  chr9:130213934-130214188
  hyper

SEQ ID NO: 286748 - DNA, 209 bp, Homo sapiens; identical to SEQ ID NO: 234414
  chr9:130308066-130308275
  hyper

SEQ ID NO: 286749 - DNA, 473 bp, Homo sapiens; identical to SEQ ID NO: 201885
  chr9:130330786-130331259
  hyper

SEQ ID NO: 286750 - DNA, 158 bp, Homo sapiens; identical to SEQ ID NO: 223680
  chr9:130374196-130374354
  hyper

SEQ ID NO: 286751 - DNA, 36 bp, Homo sapiens; identical to SEQ ID NO: 223681
  chr9:130374657-130374693
  hyper

SEQ ID NO: 286752 - DNA, 203 bp, Homo sapiens; identical to SEQ ID NO: 234417
  chr9:130477657-130477860
  hyper

SEQ ID NO: 286753 - DNA, 141 bp, Homo sapiens
  chr9:130616612-130616753
  hyper
gagggagcgtgccgcggtccatgctgtccacgtgggggcctgtgcgctgggccttatcctgtgtccagtggcagggctgcgggcgggcaccggggccggcgtgggctcgcacggggacccgaggggagcaggcggccggag

SEQ ID NO: 286754 - DNA, 210 bp, Homo sapiens; identical to SEQ ID NO: 201886
  chr9:130639768-130639978
  hyper

SEQ ID NO: 286755 - DNA, 124 bp, Homo sapiens; identical to SEQ ID NO: 201887
  chr9:130640012-130640136
  hyper

SEQ ID NO: 286756 - DNA, 139 bp, Homo sapiens; identical to SEQ ID NO: 201888
  chr9:130661051-130661190
  hyper

SEQ ID NO: 286757 - DNA, 497 bp, Homo sapiens; identical to SEQ ID NO: 201889
  chr9:130674526-130675023
  hyper

SEQ ID NO: 286758 - DNA, 376 bp, Homo sapiens; identical to SEQ ID NO: 201890
  chr9:130679368-130679744
  hyper

SEQ ID NO: 286759 - DNA, 49 bp, Homo sapiens
  chr9:130689371-130689420
  hyper
ggtgcttcgggccgcgagtttcggctgggatgggggcccaaacctgctt

SEQ ID NO: 286760 - DNA, 418 bp, Homo sapiens
  chr9:130689749-130690167
  hyper
gacccgatcccacccctaaacacagccccagtggtgccccgcccccacgtatggccccacccccatgccctacaaccccaaatccgcccatttgggccccgcccacataccccgccctccccaggtatatgatgacctaggacccgcccccaccgagccccgcccccagccaagtacccagcaaccgcgccagcagcgagtgcgggtgccgctgcaggtgctgcacgtagcggggcaggtgggcgagcagagcctgcacctctcggcgcccctgggtcttcaggaagaagcgctggtcgtggctggggggcaagagaaagaggtcactgcccaggcctggctggagcggctcccacccggcccccttccccgacctgtgcacgtggatctcgctcccaggtctcggcaccgcctctct

SEQ ID NO: 286761 - DNA, 146 bp, Homo sapiens; identical to SEQ ID NO: 201891
  chr9:131127341-131127487
  hyper

SEQ ID NO: 286762 - DNA, 83 bp, Homo sapiens; identical to SEQ ID NO: 226543
  chr9:131132510-131132593
  hyper

SEQ ID NO: 286763 - DNA, 182 bp, Homo sapiens; identical to SEQ ID NO: 234422
  chr9:131133703-131133885
  hyper

SEQ ID NO: 286764 - DNA, 220 bp, Homo sapiens
  chr9:131183034-131183254
  hyper
gagggtgcactgccccgccctctccgggtctgcctcggccccgcccgggccccaggccccgccccctcccctcggccggcccgagagctccgggggccgctgcagccgcccaagcgcccgccatgcgcgctgcccgcgccgcgccgctgctccagctgctgctcctgctggggccgtggctggaggctgcgggcgttgcggagtcgccgctgcccgccgt

SEQ ID NO: 286765 - DNA, 89 bp, Homo sapiens; identical to SEQ ID NO: 201893
  chr9:131219288-131219377
  hyper

SEQ ID NO: 286766 - DNA, 86 bp, Homo sapiens; identical to SEQ ID NO: 234425
  chr9:131419086-131419172
  hyper

SEQ ID NO: 286767 - DNA, 251 bp, Homo sapiens; identical to SEQ ID NO: 234426
  chr9:131486506-131486757
  hyper

SEQ ID NO: 286768 - DNA, 399 bp, Homo sapiens
  chr9:131709401-131709800
  hyper
cccacttgtattggacgtagaaggcctgcactgcgagggccacggcgcaccacgagtatcggtcccatacggttgcgtggatgctcagcaccactgcaaacactactgccgcctctgccagcaccgatccactcagcggagccccaggccccggggccggagatgggcactctcgggtcatatctctagacctggggcttcacggaggccggggcgactacggacgccctagacttcgggcccctcagccccgtcaagcagagggaggcactttcacccggccagcaaccttctccctccgttctccagcagcgaggagggaactccaccgcaggtcacttctgcggcctgggagctggcgcccggccaccccccacagcctccaacctacggcgtaga

SEQ ID NO: 286769 - DNA, 102 bp, Homo sapiens
  chr9:131842775-131842877
  hyper
tttgacaaaaaggtcgcctgctctgtgtgacttgccctttcgccggccagtatggggcagagggaaataagccccctctgctctctggtctcagtttactcg

SEQ ID NO: 286770 - DNA, 702 bp, Homo sapiens
  chr9:131842946-131843648
  hyper
ggacgcgcaggtccccaagaccgcggatcggcagggggtaccagggaagccttcattcagggcgcaggtcccagccgaaccaaagctcccaccaaagttcaacacgcccccaaagccagcgcctgattggcccgccctgcccacaagctgaggcagcctcaccttctgattggctgttatgctccctgttcggtgctggaaccctccccttctctgattggccagatgcctacctgcgctcgccccagattgggcgccagctggggcggctcgttggctcccaggggccccgctctctgattcgccgctcgggccagcccccacggcctgcacgctgaatggctgcgccgctacctatattggcctccgattgggtgcacggcgcctccccggcgtgataggtcaggaccaccgcccccctggctccccattggctgctcgaagaagcccggtctccgggtaagatggcagcggacggacagtgctcgctccccgcttcatggcggccggtgaccctcacccacgtcgaatatcctgcaggtaaaaggcggtcccggctccaaggacgccttcccagggacggcctctcagtcccgggcgctccggcctgctcgagcccgcggagggggcgccgggggaccggggtgggaactgtcaaatagtgaaccacggaggggctcggccggcgcgcgcgccgcgcag

SEQ ID NO: 286771 - DNA, 277 bp, Homo sapiens
  chr9:131940269-131940546
  hyper
gagctgtggatcttgcgcagggagatgctgatcaggctctgggcgtccagggcgcactccatgctcccgcggagacggcggcggagcagccgccgccgctgctgctgttaacgcttctgctgtttctgcctccagccggccgccggggcgcgccgggcaggggtaacggagtccgggtcagaggttcggctgcgctccgaaaggagccgccaccatgcgccgcgcgccacccgcgggctcgcgctccccagacggcgccaaagcaatgagtctcggc

SEQ ID NO: 286772 - DNA, 390 bp, Homo sapiens; identical to SEQ ID NO: 46623
  chr9:131940585-131940975
  hyper

SEQ ID NO: 286773 - DNA, 118 bp, Homo sapiens; identical to SEQ ID NO: 234434
  chr9:131965405-131965523
  hyper

SEQ ID NO: 286774 - DNA, 272 bp, Homo sapiens
  chr9:132020645-132020917
  hyper
agatgtcaaaaatacgcggtaagacgtcagcccggtgagcatcctccgcactgcggaccgcccggggtcggggtcacccgggccccgccccgagcttgctgtcgtatcggccccgccccacccacgccctcccggcccctcctgctccgggcgcgctcggctccgcccccacgggcaacacggcctcccattggccgcggtttccatggttacgcgggccggcggagctgcgggctcccagacacgtgtccccgggagccgcccagaatttg

SEQ ID NO: 286775 - DNA, 71 bp, Homo sapiens
  chr9:132021110-132021181
  hyper
gagaggaacccagtcaatttcacctgctccccttcctccaggaagaatcgggtacgcgggcatctgagaac

SEQ ID NO: 286776 - DNA, 292 bp, Homo sapiens; identical to SEQ ID NO: 223690
  chr9:132145469-132145761
  hyper

SEQ ID NO: 286777 - DNA, 180 bp, Homo sapiens; identical to SEQ ID NO: 201897
  chr9:132176628-132176808
  hyper

SEQ ID NO: 286778 - DNA, 80 bp, Homo sapiens; identical to SEQ ID NO: 234437
  chr9:132200925-132201005
  hyper

SEQ ID NO: 286779 - DNA, 34 bp, Homo sapiens; identical to SEQ ID NO: 223691
  chr9:132222864-132222898
  hyper

SEQ ID NO: 286780 - DNA, 200 bp, Homo sapiens; identical to SEQ ID NO: 201898
  chr9:132244499-132244699
  hyper

SEQ ID NO: 286781 - DNA, 554 bp, Homo sapiens; identical to SEQ ID NO: 201899
  chr9:132244741-132245295
  hyper

SEQ ID NO: 286782 - DNA, 730 bp, Homo sapiens
  chr9:132245345-132246075
  hyper
cttcccaggagctcggctccccgggatggaagggactgatacccagttaatgggcgtggagcctgagcccctgagggtcgtcgctaacgggggtcgctcagcagggccggcctccgctgcctgcccggggtgtctaatcacctctccgatcctttgcccggatctgagcttcgtcattcacgcccctcctccctggcgactttgggcctggtgacagtcccccgaccctcgcagagccaggggcacagtaggcgccttagccactggcagaatttcaccggcgctctgcccgacgcccccagccccagggccgggcgtgggtggaagtgtctggaagggtgggttcaccagggctgggcacgtcagcggccccgtacagagaatccggtgcctggggtctctggagggggtactcagagtatccgaggaggagactcctggatgctaacagagcccccagttaggagcagtccgcgagacagttggtaacagtgctggccttgcccgggcgccggaaggttccgtgaggcccagcaagtcctgacttggcacagggcccagcacacggtaagcgctcggtacttggtcactgttgcttgattttaccatttcggaggggctcatctacgcctagcaaagcccccctcccggtgacccaaggggagctccagaatgttgagcggctgagcggcctggctcctcctctcgaccccatcgagccaagtgtcga

SEQ ID NO: 286783 - DNA, 56 bp, Homo sapiens; identical to SEQ ID NO: 223693
  chr9:132250698-132250754
  hyper

SEQ ID NO: 286784 - DNA, 707 bp, Homo sapiens; identical to SEQ ID NO: 201901
  chr9:132258223-132258930
  hyper

SEQ ID NO: 286785 - DNA, 197 bp, Homo sapiens
  chr9:132312371-132312568
  hyper
ccccaagagagccccggccgggacgcgcggaccccagaagctcgggcgggggcgcccctcggaggaatgtttccggggcccggaccgcgccgccgccgcagcctttcctccctctccccgcccggctcgccggccgccctcgcgccccctccagggccccctatcttcccccacccgaaccccacatcactgccctc

SEQ ID NO: 286786 - DNA, 178 bp, Homo sapiens; identical to SEQ ID NO: 118272
  chr9:132312620-132312798
  hyper

SEQ ID NO: 286787 - DNA, 551 bp, Homo sapiens
  chr9:132330680-132331231
  hyper
ttagtttcctcatttgtaaaacggggatatggcccgtctcctagagtgaccgggaagatcggtggtatcaacgcaaactacagcccggcagcttccaggcgaactcacttctcaggacgcctctcctgctgtcctctcaaagcgggggacgaagccaccaccacccagtttacagatggggaaactgaggctcagggagatctggaaaccttcccgggcagctgggctccgaacccagggctgcgagcacaagggctggctcccgcccccggccctggtccctccttccccggggcatggcccggccgtgccaggcgctcggtgacagcccccgcgggggaggccgggctgggaaaggagagggcagcgggcgggggcgcctggccgcgcggggtcggccgcgggtcgatacggcggcaggatgaatgggagaggggagcgcgggcgggaggaggagggaggaggagggggaggagggagaggccggagcagggggagggcccgcccccgccgccccccaggcccccgccccgcccagcgggcttggccgg

SEQ ID NO: 286788 - DNA, 321 bp, Homo sapiens
  chr9:132331336-132331657
  hyper
ggcagctgcgagcaaggcccccagcccggcgcgcagccccgcccgcgcgcgatcaattgacaccgccaccgggcggcaggaaaactcatttttctctccctccccggctccgggtgggcgcgggctgagctctgccaagggccgggggctacgcggggccggggccggggccggggccggggccaggccagggagggagggcagggcccgaggagggggcgggggcgcgggcgcgggtgtgggaaggaggcttgcaaggaatccgaggaggcggggtgcctcagtttcttcactctaccacaggggcgtggccgaaggcgt

SEQ ID NO: 286789 - DNA, 174 bp, Homo sapiens; identical to SEQ ID NO: 201903
  chr9:132373579-132373753
  hyper

SEQ ID NO: 286790 - DNA, 162 bp, Homo sapiens; identical to SEQ ID NO: 234443
  chr9:132387303-132387465
  hyper

SEQ ID NO: 286791 - DNA, 65 bp, Homo sapiens
  chr9:132427556-132427621
  hyper
ctctgtcggccagcgcgggcgggcggggccgttgttgggggcgctgaggcgagtgaggctggagc

SEQ ID NO: 286792 - DNA, 142 bp, Homo sapiens
  chr9:132427910-132428052
  hyper
tgtggccggcgcagcgcgtgcaccagcggctccggagcgagcggccgtggctgagaaggggagggcggaaagtttgtttccccgacgtcagcgccgggcgggccgcgaggctaggaggcggcgggagctgggcagagcgcgg

SEQ ID NO: 286793 - DNA, 197 bp, Homo sapiens
  chr9:132428123-132428320
  hyper
cccccccggggccgctcgcgggcatggacagcgcggccgccgccttcgccctggacaagccggcgctgggcccggggccgccgccgcctccacccgcgctggggcccggcgactgcgcccaggcgcgcaagaacttctcggtgagccacctcctggacctggaagaggtggcggcggccgggcggctggcggcgcgc

SEQ ID NO: 286794 - DNA, 475 bp, Homo sapiens; identical to SEQ ID NO: 234447
  chr9:132499948-132500423
  hyper

SEQ ID NO: 286795 - DNA, 664 bp, Homo sapiens; identical to SEQ ID NO: 234448
  chr9:132647780-132648444
  hyper

SEQ ID NO: 286796 - DNA, 121 bp, Homo sapiens; identical to SEQ ID NO: 201904
  chr9:132804284-132804405
  hyper

SEQ ID NO: 286797 - DNA, 207 bp, Homo sapiens; identical to SEQ ID NO: 201905
  chr9:132804455-132804662
  hyper

SEQ ID NO: 286798 - DNA, 103 bp, Homo sapiens; identical to SEQ ID NO: 201906
  chr9:132804693-132804796
  hyper

SEQ ID NO: 286799 - DNA, 290 bp, Homo sapiens; identical to SEQ ID NO: 201907
  chr9:132805028-132805318
  hyper

SEQ ID NO: 286800 - DNA, 292 bp, Homo sapiens; identical to SEQ ID NO: 201908
  chr9:132805445-132805737
  hyper

SEQ ID NO: 286801 - DNA, 55 bp, Homo sapiens; identical to SEQ ID NO: 201909
  chr9:132805893-132805948
  hyper

SEQ ID NO: 286802 - DNA, 136 bp, Homo sapiens
  chr9:133308611-133308747
  hyper
agaaggacgggcagcgcgtgggcggaactgcaggggctggcagggaggtctgagttacgcggatgggccacgctccgaccgcacccccgagtccgcctgtccgtgtgtctgtgccgcccgcaggacgtgcttccgg

SEQ ID NO: 286803 - DNA, 67 bp, Homo sapiens
  chr9:133308769-133308836
  hyper
cgggcggcccctctacgctgcagtaccggctgctgccgctgcccctgggcgtgcgcgcccaccacga

SEQ ID NO: 286804 - DNA, 207 bp, Homo sapiens
  chr9:133309052-133309259
  hyper
catcgccgtgtccccctacccctactaaacgggagagggcattggcggccgccctggcgtgacccccgaggaaggggtcgaggagaagcttggtccacgccacctgctgtggcaagcggagcgtcatcgtctcccgccccgtgcgtcagcgagaccttgggtcaacacgaccctgcgcacagccttgacccccgacagcgaggacct

SEQ ID NO: 286805 - DNA, 181 bp, Homo sapiens
  chr9:133319785-133319966
  hyper
tttctcatccttactcggctaccagaggctatggttggggagggagggggctctgggggctgcagaaggcccaggctgccggcaccggatagaagtgagcacgaagctccctgcgccagtggaacttttatcccggctcccaccgcgaagcgtttaaattgcttccccagggccaggaggc

SEQ ID NO: 286806 - DNA, 55 bp, Homo sapiens
  chr9:133320002-133320057
  hyper
cctgagttacatgggtcgcagccactgccgccctccttggcgcctccagcccgcg

SEQ ID NO: 286807 - DNA, 331 bp, Homo sapiens
  chr9:133540728-133541059
  hyper
agccgcggggagagcgagggagagaaagagagagcgagaaaagtttcttttctttaagatgtctcaagttcttattcctcattcatcaacccgcaaacaatatctttccctggctctggcatctctgcgcgtcgccctcttttccccctttacgatttctgttcctctcttaatttaccgtgaagactaattccacttccattcacgctatgtcaaccatctaatcccccttttttgtaaggggaattcctcggccccttttaaacaagtcccctccgcattgagctacaatttactgctacagcattcttccagggctaatgaatttaga

SEQ ID NO: 286808 - DNA, 274 bp, Homo sapiens; identical to SEQ ID NO: 234461
  chr9:133568977-133569251
  hyper

SEQ ID NO: 286809 - DNA, 1392 bp, Homo sapiens; identical to SEQ ID NO: 201911
  chr9:133710035-133711427
  hyper

SEQ ID NO: 286810 - DNA, 400 bp, Homo sapiens
  chr9:133814235-133814635
  hyper
gcgccgtccccgctcccggctccggcgcctccccggcgcgctcctctctctcctccctcgtccctcctccctccttctcaatctccgcatcttttctggtctcggactctctttgctttttattgctcccctcggcctcccccgacacactcacacacacgcgcgcgctcacacccgcggacttggatactaaactccgcctccgaaaagacctagggaaaggaggccgaactggcccccagataacgcggccggccggagggcagcaaacagccgcgggcggcccggctcctgctggctcccggaggggcctgagagccccccggcggcgcctctgcacaaacttcctcccggaccggactcacacaagtcaccatgcgcggggcgggccccgagggcg

SEQ ID NO: 286811 - DNA, 306 bp, Homo sapiens
  chr9:133814911-133815217
  hyper
tcgcgcccgcggtcggaaagcccacacgacgcccccttgcccgggcggcccgtgggcgaaatgggggtccccaccactgccacagccgccggcgctgtggtcgcgagtaccagccgctccgcgctcggccgcgctcccggccgatcgcccgcgctccccggcgcgccccgcgtggtcccagcccccgccttctcctccgccgggaggggatttgtgccaggagggggcttcttagttgccccttcccaccagcagcacttttaaaagcatttaatccgcccggagcggccttcggaggtaattgac

SEQ ID NO: 286812 - DNA, 190 bp, Homo sapiens
  chr9:133815287-133815477
  hyper
acgccgcgctcccctcccgccgccccgccgagcccgccggccgcccctcctccgcccctttctgcgtccccatctttttctgctcccccagctccagacagacccccgttccccgcccccgcttctccccaaagctgttttccggctcccggggcgccttggccgccgcgctgttccctggcaccgtctc

SEQ ID NO: 286813 - DNA, 143 bp, Homo sapiens
  chr9:133815528-133815671
  hyper
cgatccctctacgcgtccggcactggcggggcagactggttgggggtgggggccgcgtccagcctgggctggggcactccctggaccccggagcgggggaccctgtggcccggtgccatccgaggagactgccacccgccagg

SEQ ID NO: 286814 - DNA, 496 bp, Homo sapiens
  chr9:133972138-133972634
  hyper
gtggcccgaagaggaccccgcttcccaggccgcctctttgtctcctccaggagggaaggcgttcggcttgctcaaagcccggcaggagaggaggctggccgagatcaaccgggtaagccccgcgcccagggcagcacgcgagtcccgagccgcgcgctgcgcgggtgccacctctccttccgcgaggccgtgcccgcctccagatctaccctcttccttcccttcccctgggcttccctcaggtgcctccctccgcccccagccccgtcgcctccgactccaggtaggtccgcctccgcctcccgcctccggtctcgggttgcaagttgttactcttgcaactggggactggggaggtggggccgggtcaggagctcggatgccagccggctcgtggctccccgcaagcccgcttgggagcagcccaaggatttggcgcgggaagggccctaggccagtgatctctccagctcagaacacaggctccgggtcattt

SEQ ID NO: 286815 - DNA, 101 bp, Homo sapiens
  chr9:134131797-134131898
  hyper
cgtggagctcggccagcaatgcctgttatgcaatttcctgctttggtgtctcagccccaggaggcaggatgtgagcgccgttggtttgctgcaacgtggag

SEQ ID NO: 286816 - DNA, 173 bp, Homo sapiens; identical to SEQ ID NO: 201913
  chr9:134158023-134158196
  hyper

SEQ ID NO: 286817 - DNA, 203 bp, Homo sapiens
  chr9:134421320-134421523
  hyper
ggtgccccggaggccggcggtagcaagatgggggagaatgcccggcccaggacaccccatccggagccagggtggggagagccaggaagctgctgtggaaagttcaggagctctgggggcgcccctgcgggcaagccagggagggggcagcggcggttcattctctgagcattttgcccactcccgccccgtgtcccgcctct

SEQ ID NO: 286818 - DNA, 239 bp, Homo sapiens
  chr9:134421558-134421797
  hyper
ccttgcagcaggggagtgggcgaccctggccagggcggggtggagacagagcctgcagtagggagcacgacctgggaagagaccccacgggctaattcggggacggagagctggagacagggaccgagagaggtggggtgggggcagagctggagagaggcgcggacgcgggtgggatccggccaaggctgcgaccaactcgacgtcgcccacccccaggcgtcaggcgctggaagggg

SEQ ID NO: 286819 - DNA, 71 bp, Homo sapiens
  chr9:134421835-134421906
  hyper
gagtctctggctggctggaagcagtggggcggtggcagtgggacccctgcagagtctcgcgcactccccgc

SEQ ID NO: 286820 - DNA, 363 bp, Homo sapiens
  chr9:134421967-134422330
  hyper
tgcaagcagctccgggagatgctggagcgctggcccctccccgccgccccgccctccaggactcccccccagaccctcaagcacttgcccagcggggagcccggaccccccttcccagctggaatgcctggcggaggctccggtgtcaagagcctgagaacctgagaacccacccgaggcccccgccaggcagcgccgccagcagatttatttactctggggccctatctccgcgccatcgggccagatatttgccctggcgggatccagggaaactgcggtttttgttatgatagctggggcagggacaccatcccggagagacctgtttagagtggagagctgactcgctgagacccacgt

SEQ ID NO: 286821 - DNA, 80 bp, Homo sapiens; identical to SEQ ID NO: 234469
  chr9:134989616-134989696
  hyper

SEQ ID NO: 286822 - DNA, 120 bp, Homo sapiens; identical to SEQ ID NO: 201915
  chr9:135037440-135037560
  hyper

SEQ ID NO: 286823 - DNA, 221 bp, Homo sapiens; identical to SEQ ID NO: 201916
  chr9:135117799-135118020
  hyper

SEQ ID NO: 286824 - DNA, 130 bp, Homo sapiens
  chr9:135118060-135118190
  hyper
gagagaaggaaggggtggggggcctggaaacttcgttctgtagagaactatttttgtttgtattcactgtcccctgcaagggggacggggcgggagcactggtcaccgcgggggccgatggtggagaatc

SEQ ID NO: 286825 - DNA, 644 bp, Homo sapiens; identical to SEQ ID NO: 201918
  chr9:135286324-135286968
  hyper

SEQ ID NO: 286826 - DNA, 161 bp, Homo sapiens; identical to SEQ ID NO: 223714
  chr9:135395349-135395510
  hyper

SEQ ID NO: 286827 - DNA, 60 bp, Homo sapiens
  chr9:135456936-135456996
  hyper
acacacacacacacacacacacacacacacacaccacacttcttcctccgctggttttag

SEQ ID NO: 286828 - DNA, 37 bp, Homo sapiens
  chr9:135464627-135464664
  hyper
cgacagacggccgtcgggttggagctgctggcggagg

SEQ ID NO: 286829 - DNA, 65 bp, Homo sapiens
  chr9:135465126-135465191
  hyper
gcggccgctctgtccgggagccatccccacccgccgggtgtacatacgcgtctctgccactcccc

SEQ ID NO: 286830 - DNA, 227 bp, Homo sapiens; identical to SEQ ID NO: 201919
  chr9:135644985-135645212
  hyper

SEQ ID NO: 286831 - DNA, 473 bp, Homo sapiens; identical to SEQ ID NO: 201920
  chr9:135645250-135645723
  hyper

SEQ ID NO: 286832 - DNA, 180 bp, Homo sapiens; identical to SEQ ID NO: 201921
  chr9:135906376-135906556
  hyper

SEQ ID NO: 286833 - DNA, 469 bp, Homo sapiens; identical to SEQ ID NO: 201922
  chr9:136399643-136400112
  hyper

SEQ ID NO: 286834 - DNA, 71 bp, Homo sapiens
  chr9:136603451-136603522
  hyper
agcagtggcctggccggaactccaggcctcccccgccccccaccctcgctgccagccccatgtctccgccc

SEQ ID NO: 286835 - DNA, 43 bp, Homo sapiens
  chr9:136603632-136603675
  hyper
gtgaaccccatgccccattacccgtaggcgacctggcagtcac

SEQ ID NO: 286836 - DNA, 115 bp, Homo sapiens; identical to SEQ ID NO: 201923
  chr9:136856335-136856450
  hyper

SEQ ID NO: 286837 - DNA, 159 bp, Homo sapiens; identical to SEQ ID NO: 234487
  chr9:136890934-136891093
  hyper

SEQ ID NO: 286838 - DNA, 219 bp, Homo sapiens
  chr9:137273878-137274097
  hyper
ttgggagaggccagcgggccagctgggcactttggtctctgtaatgaggaccctcccaccccaccaagatgcacacatgccctgccaggatgtgggggggcgcagggcagtgggctgagccaaggtgtagatgctgggaggtaaggttaccctccccctgggctggcgtctgcctccccgcctgctgctgcccctgtggccggccgcatgtggggagga

SEQ ID NO: 286839 - DNA, 129 bp, Homo sapiens
  chr9:137298990-137299119
  hyper
ctcattccaggcaccgaggtccatgtgaaaggaggctttgcggtggtttctgctttgcttgcattgagcctcaaactcttcctgtcccgtgagaaggggggatgggatttggaggcctgaggaaggaag

SEQ ID NO: 286840 - DNA, 369 bp, Homo sapiens
  chr9:137533127-137533496
  hyper
ccacagtcttgggcgccctgatctggctggatgggaagtttagtctccacccagaagaggagctctgaactcctccacgttaaagaaaaagttaggcggggtaaactgcaactttctttttaacccgaagtgatcaaacctcggggcccctctgcactggttcttggagcatggccaggtgcgggcacctggggtgggaacagtggggggaccagggtgggcccctgggctccgaggccgccccaggcccgcccgcctaccggctctcagagaaagaacagggggccgcgcccgccccacgtccgctccgccccgggccagccccttcctcgctgcgactcgcccgctgtccccaccccctcgcccgcg

SEQ ID NO: 286841 - DNA, 62 bp, Homo sapiens; identical to SEQ ID NO: 201925
  chr9:137967132-137967194
  hyper

SEQ ID NO: 286842 - DNA, 161 bp, Homo sapiens; identical to SEQ ID NO: 234492
  chr9:137979100-137979261
  hyper

SEQ ID NO: 286843 - DNA, 151 bp, Homo sapiens; identical to SEQ ID NO: 223720
  chr9:138372138-138372289
  hyper

SEQ ID NO: 286844 - DNA, 113 bp, Homo sapiens; identical to SEQ ID NO: 201926
  chr9:138986159-138986272
  hyper

SEQ ID NO: 286845 - DNA, 824 bp, Homo sapiens; identical to SEQ ID NO: 201927
  chr9:138986333-138987157
  hyper

SEQ ID NO: 286846 - DNA, 560 bp, Homo sapiens; identical to SEQ ID NO: 46735
  chr9:138987167-138987727
  hyper

SEQ ID NO: 286847 - DNA, 40 bp, Homo sapiens; identical to SEQ ID NO: 201929
  chr9:139001729-139001769
  hyper

SEQ ID NO: 286848 - DNA, 56 bp, Homo sapiens; identical to SEQ ID NO: 201930
  chr9:139294771-139294827
  hyper

SEQ ID NO: 286849 - DNA, 247 bp, Homo sapiens
  chr9:139334259-139334506
  hyper
cggagtcagcccggccgggacccagcaaccgccgccgcggggccgcgcccggtccccgccccgcgccccggccccgcccacagcggcccctggcggccggaggactgcgccgcaccggacccggacgggtctcccacgcccctcccaacccggcagccccgcagtccggcaggtcccagcgaggcaggtgcaggtccccggagaggacctgggtgcggtccaggacagcgccgaggcctgcggacac

SEQ ID NO: 286850 - DNA, 119 bp, Homo sapiens; identical to SEQ ID NO: 201932
  chr9:139377007-139377126
  hyper

SEQ ID NO: 286851 - DNA, 382 bp, Homo sapiens
  chr9:139401222-139401604
  hyper
ctgggtgccacgggcgtcgcagggattggacaggcactcgttgacatccccctcacagcgctcacccacgaagcccggcgggcaggtgcagctgtagccgcccacctggtccacgcaggtgccgttgttaaagcacttggggctccgggacacggggtcaacggggggattgcagtcgtccacgttgatctcacagtgcacacctgcggggccaggtttcgtcagtggcccaagcccgccacaccccggccctgccgtgccgcgtgtccgtcccggaagacgagcgctcaggtctggggctgcacggacactcgggagaggcaggtgtcaagggtgccgtggagacgcccttcccactgggacccccgctctgggccctttc

SEQ ID NO: 286852 - DNA, 215 bp, Homo sapiens
  chr9:139440690-139440905
  hyper
ggtcgggagcgggcgcctgggactacttctcgtttgaaagttttcagaggccaaaagtttgagccggggctgcggaaggatccggctctggcggttgccgcgctcggcgacaactggcgactgaaatttgcatgtgaataagcggaggagcccggggcggaatggggagggcgaggccgcggacagccgtgtgcaccgtgcgctgggccgggcgg

SEQ ID NO: 286853 - DNA, 104 bp, Homo sapiens; identical to SEQ ID NO: 201934
  chr9:139519836-139519940
  hyper

SEQ ID NO: 286854 - DNA, 109 bp, Homo sapiens; identical to SEQ ID NO: 201935
  chr9:139580674-139580783
  hyper

SEQ ID NO: 286855 - DNA, 283 bp, Homo sapiens
  chr9:139580987-139581270
  hyper
actcttccttcccttcgcttggaagctgggcccccggagctgtaggccaggggcgcgctccccagcacggaagcaggtcccctccgggtcccccacctccctgcgaagaggaaagggagagaaaggggaacccgccccacaggtgcgcccatcaccgggcggacagtcaggagggggtcggagggaggccgaggggtgcccccacgccgtcgtgcgccctgatcaatagccctggggcaagtccccgccgccccggcctcggtttccccgctcaggaagcagg

SEQ ID NO: 286856 - DNA, 144 bp, Homo sapiens; identical to SEQ ID NO: 223733
  chr9:139581731-139581875
  hyper

SEQ ID NO: 286857 - DNA, 243 bp, Homo sapiens
  chr9:139606720-139606963
  hyper
cgagacgcccaggagcccgacaggcgcgcccccggccccggctccgcctcccggcccatcccgcgcgcccccagcccctcccgcagcaccgttgcatgaggggcggggtctgcgggtgggcggggcctcggtgcccgccccctcctcagccgagccgggggtcgaaggcgggccgcgcgccaagccccgcccccgcgcgcctccgccgcgaccctcccccgcgcgcccccgccgcgccgccgt

SEQ ID NO: 286858 - DNA, 403 bp, Homo sapiens
  chr9:139607299-139607702
  hyper
cccggggtgggcagcggggagggggcgagtggctccggaaggacgggacgctgggggaggggcggtggcggcgacaggagggtccgggcgcggggatgctgcggcctggaggccctcgccccgacctgcaggcggtccctgccccccaggcccagaaaccacaccgaagtcctttcttcttttctccacttaaaaaatgaggtgtgttattctgcggtagaaaacttgggacgcacagaaacgccctggcaaggacatgacctccccgccccctgccccttcatcccatcagccagccgtagcgcggggaccctgccctgaccccgggatgaccttgaaccaccgtcccctccaggggcctggccgggtccgcaggggaggcccgggccgccttgggttccag

SEQ ID NO: 286859 - DNA, 102 bp, Homo sapiens; identical to SEQ ID NO: 234507
  chr9:139621210-139621312
  hyper

SEQ ID NO: 286860 - DNA, 238 bp, Homo sapiens; identical to SEQ ID NO: 234508
  chr9:139694853-139695091
  hyper

SEQ ID NO: 286861 - DNA, 148 bp, Homo sapiens; identical to SEQ ID NO: 234509
  chr9:139703273-139703421
  hyper

SEQ ID NO: 286862 - DNA, 139 bp, Homo sapiens
  chr9:139740877-139741016
  hyper
ggcgcaccgagaccatgttcaacgcctgcctctacttcaagtcctgccacagctgctacacctactactgctcgcgcctgtgccgccgcgaggactgggacgcccacaaggcgcgctgcgtgtacggccgcgtgggcag

SEQ ID NO: 286863 - DNA, 155 bp, Homo sapiens; identical to SEQ ID NO: 201937
  chr9:139838241-139838396
  hyper

SEQ ID NO: 286864 - DNA, 40 bp, Homo sapiens; identical to SEQ ID NO: 234513
  chr9:139872823-139872863
  hyper

SEQ ID NO: 286865 - DNA, 194 bp, Homo sapiens; identical to SEQ ID NO: 201938
  chr9:139923388-139923582
  hyper

SEQ ID NO: 286866 - DNA, 59 bp, Homo sapiens; identical to SEQ ID NO: 234515
  chr9:139940159-139940218
  hyper

SEQ ID NO: 286867 - DNA, 54 bp, Homo sapiens
  chr9:139943294-139943348
  hyper
cactgcagtgtccgcggcctgcggggaagggcgtggcctcagctcccgagaggc

SEQ ID NO: 286868 - DNA, 531 bp, Homo sapiens
  chr9:139948373-139948904
  hyper
acagcagtaggaggccggcgaggcccgcggcggccagcagcagcggcggcagcagtgaccgcaccttcccggccatgggcgggcgggcgcgcgggaggacgatgcgtggacccggagagtgcggggagccggaggcggaggcgggcggggccgcgggaccgcggggtaggggccccggggcgggacgaggggcgggaggccgggcgggcccgcccatcaccggccacgcccacgggcggacaggtttcgcctccgctcccaagcttccgccgtccggcccgcgcaggtgagagacgcgggcgcggctgagtcaccagcaccgccccccggctcccgggtctgagcccgggcgccccgcggctatggcccaccttccccttcccgcccactcagcaaggggatcccccggccgtggaggcaggagacctggcgtgggggtgggcgggcgaggctggctcggagggtcctgtgctggagagccgcgcttttcccgggcccgggaaaggaggccagactcgcttgcaggaatga

SEQ ID NO: 286869 - DNA, 360 bp, Homo sapiens; identical to SEQ ID NO: 46772
  chr9:139964731-139965091
  hyper

SEQ ID NO: 286870 - DNA, 711 bp, Homo sapiens
  chr9:140023901-140024612
  hyper
cgcaggctgggagggcggcgggcgcagcgaccccgggcctcggtccgcccggcgcggtcctcaccctgcagcacaagagccgccggcagttcttgctgttgccgtagctctcgccaaagctctgcgtcaccgaaatgaagtcctgatgaagcagcggcggcggatgcgtggaagggggcctcgaggaaccaccggcggcatcaggagacccggtcctgtaaaagactgagagctccgcctctccgatactcgcgggcagccattgcggcgcacagaaccgtccgcgtgtgagcagcgcgcacgcgcacgcaatgcgcctcaaccccgcagcctatgcgcctgcactgagagctcacggcttgcggcgcctgcgtctaccccgcgcgcagtcgccacggcaacagggcgggccttggttctgcttcgggcgtggtcggtgcatggtcctccagcactgttcgccccgcgggtctggtcctgggttcctttcgcctcctgtcgtcggacggcaccggctttgcccacggcctcgcggggagacgcagacacccgggacccggggaggcgcccgggcgccgccgccatgttgtcagggagcgcccgctcccagctcttcggttccgggacccgcggcgcggggatggggctgggccgcccttggtagccgtcctgggctgggggccaccctggccgcgtggtcaccggcaagaa

SEQ ID NO: 286871 - DNA, 143 bp, Homo sapiens; identical to SEQ ID NO: 234520
  chr9:140095337-140095480
  hyper

SEQ ID NO: 286872 - DNA, 98 bp, Homo sapiens; identical to SEQ ID NO: 234521
  chr9:140100291-140100389
  hyper

SEQ ID NO: 286873 - DNA, 91 bp, Homo sapiens; identical to SEQ ID NO: 118518
  chr9:140172875-140172966
  hyper

SEQ ID NO: 286874 - DNA, 98 bp, Homo sapiens; identical to SEQ ID NO: 201942
  chr9:140195121-140195219
  hyper

SEQ ID NO: 286875 - DNA, 614 bp, Homo sapiens; identical to SEQ ID NO: 201943
  chr9:140195552-140196166
  hyper

SEQ ID NO: 286876 - DNA, 926 bp, Homo sapiens
  chr9:140196196-140197122
  hyper
cgtcgatgaccgactggtgcagcgccgtctggccctcgggcccgaacgagttcacgttgaactcgcagttggtcatgttctgcagcagcgactgcagctcctgcgtgttgcccttgcgcacagcctcctggaagatgcgctgcgtctgcggcgcggagcaggtggacagctcggcctggctcatgctgccgccgggcgcgggccgcgggccgggccggggctcagcgcgggcggcggctgcggcgcgggcccccggctgtctcggggcgcgcctcggcgcatggagggcgcggcgtccccgggccccgcacgccgcctctgggcgctccgggcgctcggggccgggggtcgccgccgcggggaccccgccgcatccagccgcgcccgggtgggcgacgggggcgcgcgctcggctcgcgggggccgggcccggccggggacggcggcgccgcgcggtcccggtccctactcggttcggctgcggctcccacgcggtcccaaggcgcctccccacgcgccgcagcactagctcgcccgccgcgccggggcgccttttaccttctttatatttgcataacaatggcagcccgtgacgcgcgcgccggcggccccgggattgggccgcgcccacatgggggcggggcgtgggcggtgccgtgcgcaggggtccgggggcgggtcccggcggcggcgcgcttcgcggcagggggcgctggtcgccggcagcgcctgggcgggggaggccaggtggccgccgggggggtccagctccgtcgccgccgccgtccgcgcgccccccgggcgctccgcgtctctttgcggtcgtcccgccccttctccctccggccacccggggaattccaagctccctcagcagccagacccaggccttgcccggtacccgagcgcgaccgccaggtggcccc

SEQ ID NO: 286877 - DNA, 154 bp, Homo sapiens; identical to SEQ ID NO: 201946
  chr9:140197263-140197417
  hyper

SEQ ID NO: 286878 - DNA, 729 bp, Homo sapiens
  chr9:140445746-140446475
  hyper
ttaatttgggcaccgcgagggctcgagtccccccacaccactgcccggcctgcgggggagcacagacagcccgggccctcccggctgcaggtcccgggctttccccgcgcggttgccggctccgcccagaggagccgcgcccggcggaggggtaagaaaggcagggtcgcggcgtcaacgcggcggccgtctcgagtccagggcccgcgtcctccccgacctcccgacgccacctcacggcctcagggggactgggctcccgggaaaccgccggccacctggcggacgaacacaggcagtggcgggcagtggagacgccagggaccaccgcgctgagagcgatcactcatccgccagccccgccccgcgagccccgccccgcgagccccgccccgcgagccccgccccgcgagccccgccccgcgagccccgccccgcgagccccgcaccgccggccccgcaccgccagccccgcgagccccgccccgccccgcgcgctcctcgcattggccgagtccccgcggccacaccccctaccagattggggccgctattggacgcggcggccgcggccaatcggagccgctcttgctgcgacgcagcggtcggaagcggagcaaggtcgaggccgggttggcgccggagccggggccgcttggagctcgtgtggggtctccggtccaggtgagtctgtcggattggggcgggcgccgcgcgcggccaggggcg

SEQ ID NO: 286879 - DNA, 122 bp, Homo sapiens; identical to SEQ ID NO: 201948
  chr9:140473437-140473559
  hyper

SEQ ID NO: 286880 - DNA, 162 bp, Homo sapiens; identical to SEQ ID NO: 234527
  chr9:140500666-140500828
  hyper

SEQ ID NO: 286881 - DNA, 208 bp, Homo sapiens; identical to SEQ ID NO: 201949
  chr9:140703838-140704046
  hyper

SEQ ID NO: 286882 - DNA, 328 bp, Homo sapiens; identical to SEQ ID NO: 201950
  chr9:140704131-140704459
  hyper

SEQ ID NO: 286883 - DNA, 252 bp, Homo sapiens
  chr10:734724-734976
  hyper
cacaaaccctcctacgagaggaccaggacggcaaggccggagcccggcccggggggaggttgacgattccgcccagccctccccgcgcagcgcccgcgaacaatgggggtgggatcccccgggccgcgccaggaccgctgcacggcctgagccaccagagatcgaacccggggtccaacgacaagtttcgcattgaaatctggccgggcgttccaggccgaacccgccagcgaggaggtggcgcgcaccgcg

SEQ ID NO: 286884 - DNA, 175 bp, Homo sapiens
  chr10:735049-735224
  hyper
ctgcgtccccgcgcggcgcccaggccccacagacacccccagggcgcggggggatcgcggccccacaaacatcccagggcgcgggggatcgcggccccacaaacacccccagagcgcgaggggatcccaggccccacagacacccccagggcgcggggaatcgcggccccacaaa

SEQ ID NO: 286885 - DNA, 882 bp, Homo sapiens; identical to SEQ ID NO: 118540
  chr10:735245-736127
  hyper

SEQ ID NO: 286886 - DNA, 57 bp, Homo sapiens
  chr10:830674-830731
  hyper
gaagccaggacctacgcacacccctggccggctccccgctggcccctctgcgcgtgg

SEQ ID NO: 286887 - DNA, 168 bp, Homo sapiens
  chr10:830910-831078
  hyper
ctttcctccgagcgctgacgacagcgactccaccggcagctgcttcccagcgtctcacggcgggcccttggctcccctctctgctgtttaatccgctgaggagccctggtgagcacgagaggggctcgtggctgatcaatgcgggccgaggctgctggcacctttctc

SEQ ID NO: 286888 - DNA, 101 bp, Homo sapiens; identical to SEQ ID NO: 234531
  chr10:1034387-1034488
  hyper

SEQ ID NO: 286889 - DNA, 152 bp, Homo sapiens; identical to SEQ ID NO: 234532
  chr10:1094292-1094444
  hyper

SEQ ID NO: 286890 - DNA, 66 bp, Homo sapiens; identical to SEQ ID NO: 118547
  chr10:1095030-1095096
  hyper

SEQ ID NO: 286891 - DNA, 89 bp, Homo sapiens; identical to SEQ ID NO: 234534
  chr10:1102299-1102388
  hyper

SEQ ID NO: 286892 - DNA, 231 bp, Homo sapiens; identical to SEQ ID NO: 234535
  chr10:1462892-1463123
  hyper

SEQ ID NO: 286893 - DNA, 244 bp, Homo sapiens
  chr10:1651054-1651298
  hyper
gtagggacagcatttccctccgcattgccggccctctgtcttgagcccctgcagggtgccggatggccatgccctattgtgcgtccctcttgcagcaacaccacattaaaccgtggcatcctcttgaggctgcccctgcggattgcacggctaatgcagaaggctagaaagaaggacccgaaacgcccaccaaactataaattaaggcgaagatctcaggagcaatgtgcctggtgcccggcgt

SEQ ID NO: 286894 - DNA, 110 bp, Homo sapiens; identical to SEQ ID NO: 201951
  chr10:1780056-1780166
  hyper

SEQ ID NO: 286895 - DNA, 192 bp, Homo sapiens
  chr10:3109168-3109360
  hyper
tccgcgcccccattccacccctccccgccatcggcgctccccgcaactgcggggtttccacccgccccggcgctcgcgcccactcacggtctccctcgcccccccgggagatgctcccggcgttctatcccgccccgccctggcgcgccccgcaaacgatgtgaccccggccccctgcggtctcccctcctc

SEQ ID NO: 286896 - DNA, 1901 bp, Homo sapiens
  chr10:3109459-3111360
  hyper
ggccccactagcagggacccgcccacctgtggcgctacccctgcctctgccgcctcccgcaccgctagcgcggcccccacctacgacgacccccgcgtagatgctcctgcccacacccgccccagccccggcccctgcccctagccgcgcccgcgccccctcccccgcagcccctcccatacgctcgggccccgcccgtcaccgcccattggcgctggggccgggcgggggcgcgggcggggcggcggttccgagtcaggcgcgcgcgggcagggtccccattgcctgctgcgcacccggacgtgcggctcccctcggcctcctcgccatggacgcggacgactcccgggcccccaagggctccttgcggaagttcctggagcacctctccggggccggcaaggccatcggcgtgctgaccagcggcggggatgctcaaggtgcgcgcccccctcccggcggcgagggagggacggacggacggagctggggagaaccgggcgaaggcgatggggtgaccggagagaagaggggggaagcgatgggggggacccggggaaaggtggcgaagcgatggggagaaccggggagaagagcggggaagcgatggggagaaccgggaagaagcccgcgcccggaagcggcaggggtacctgcggggcggcatgagccggcgaggcagccccggggtccttgcccggtggggcgggggaggaagggacatggcggtaggaacctccatccggaagatcagtgagttttccaccttcggttttgttttaaatggaacctggcagagggagtcgcctgaagcgccctcgggggtcgttctgcctctgagctgtaggacggggccgggcgtcccctccgaagcgtgggtacagcgcgatcacttcctaagtgcccccccgccccccaactccgccgcacgccaccccctagaatgtcgaggaagaaacggctgggtccccgcgcgcctcctgtcgcctcgtgccctgcgcggcgtgggcggggtcctggctgctgcaatgcgggacgcggcgggggtgcgcggggttcccgcctggcgtctccagggcggtccggcagcccctcgcgtttccgctgggagatttttaaaaagggtttcctgcgctcgcatgtgctgtcgccttccggctcgtgacaaaaacgaaaaccaaaatgggtcccaggccctccccgccagcctccgcagacgggaaggatcaggaagcggggactccgggatgtcagcggcgccgcggcgcgggctccgggcttccctgccctgcaatgtggaagctgctctctaggaggggcccgaggctgggcccacggacgcgggcgcgccgggaggatatttaacattgaagagcggaaggtggcggagactcggcgcgccccaggccccgggtgcacgtgggggcgccggtgcccggatgatggagtgtcccgatccgtgcaatccctggcgggtagatcggcgcttcccaggcgaacgcaacctgggagccttagcgatcgcgcaggctggagacgcggcgcgccccgagctgggttttgatttttgttttcccggttcctcctgccgcagatgcgtggaaaggcccggatggcggatttcctcccgtttcggggccgcgcactgcacagggttggagcggggatgcaccccctgcccactgcgcgggtgaccttcccttcgcccttgagcgcgcggggcgggcgcgggtgccgcaggttgaggcgctgtgggcgccgccccgcccgccacgagcgcctacgtgatgcccggcccgtcgtctccacgagccccggccccgacacccgtgcgccgcgcgctccccaggcccgcagcgcagcctccccaggcccagcgccccccgcgggagacccgggtg

SEQ ID NO: 286897 - DNA, 115 bp, Homo sapiens; identical to SEQ ID NO: 7163
  chr10:3214966-3215081
  hyper

SEQ ID NO: 286898 - DNA, 43 bp, Homo sapiens; identical to SEQ ID NO: 201957
  chr10:3239422-3239465
  hyper

SEQ ID NO: 286899 - DNA, 99 bp, Homo sapiens; identical to SEQ ID NO: 201958
  chr10:3239495-3239594
  hyper

SEQ ID NO: 286900 - DNA, 78 bp, Homo sapiens; identical to SEQ ID NO: 201959
  chr10:3827581-3827659
  hyper

SEQ ID NO: 286901 - DNA, 255 bp, Homo sapiens
  chr10:3862675-3862930
  hyper
cagatggtgacggccgggcatcagaggccacaccttcaactggagctccaaccccacagcgtcagcacctttctgtcggggagagagtgtgaccgtgatgagaacaacagtgcttccacacggtcttcccttgcagaaggagaacgtcagacagagttctagttatacctcgacatagcttttcagctgaaaaattccattttaccagctgagcatgtggcttggtctgggatatttggtcgcaaaacaaaacaa

SEQ ID NO: 286902 - DNA, 238 bp, Homo sapiens; identical to SEQ ID NO: 201961
  chr10:5454341-5454579
  hyper

SEQ ID NO: 286903 - DNA, 157 bp, Homo sapiens; identical to SEQ ID NO: 223749
  chr10:5488421-5488578
  hyper

SEQ ID NO: 286904 - DNA, 855 bp, Homo sapiens
  chr10:5707985-5708840
  hyper
tcggggtcacgcggacgcctctgcaggatgctcggacactgcgccacggcctcacccgcgccagtggaggggggtttagctcttaccgtgggctcgcgcctggcttccccgagagggagcaccgtgggcgtttcccaggctctcccccgccactgggcaacggccccgcacgcgtcccgcaccttccccagggcgcgcggcgctcggtgggtttgcggttgcgaaaccccacacctggcgagccgcacggactgcaaccccgcagtgcgctggcctgggacaaggcaccagacatgagagcccgtctgggatgcgcggcaccactgggaccctgctttcaccgcggcccaccccgccaaacgcccccgcccacggagccagcgcggggcgcgccaccacctccccggcgcaggccatcggatacgcggccggcctcaggagccggcgccgctgcctcgctctgacctccgcggcgcccgcacgtacccacgtcgcccaggaagcagccgtccgccgcccggggctccatgcggctcaccggcggccgcgcggcgactctgggcgccgggacctgggccgggccgcgcggggccgctgggcggggccagtctgcgctgggccgcgcgtcgtcccgaggcgaccgagccgggagttgtagttcccgccgccttggcgaggttcccggaggcgctgtccctgggtccggactccgctgtcgctgcccaccccgcttcgcccgtcgcgccgaggagtgtgtgtgcttgcatctgcaaaccgtgcgtcccgtgcacagaatacgtccggtgcaaaacgtgtcctgtgcacttgtcctatgtaaacgtgtgtgtccgtgtg

SEQ ID NO: 286905 - DNA, 40 bp, Homo sapiens; identical to SEQ ID NO: 201963
  chr10:6018596-6018636
  hyper

SEQ ID NO: 286906 - DNA, 303 bp, Homo sapiens
  chr10:6018666-6018969
  hyper
gcgacccgctttcttctcgaatacaccaagcgatcacagatctcttccccctttttctgcgagtgtagactccaggctggcccccactccccacccccatccggtcccgaccgcctctgctggtttcctgatcgcttaagaattggaagttgtttccaggtccccaggtgtgcaacttgcccgacgcgtttccccctgggacacagctcctccccaccctcccagctcccactgacataatttacttttgcctgggagtcgggaggagtagtttctcccggacccctccgaggaccgcgtgct

SEQ ID NO: 286907 - DNA, 106 bp, Homo sapiens; identical to SEQ ID NO: 234547
  chr10:6130773-6130879
  hyper

SEQ ID NO: 286908 - DNA, 199 bp, Homo sapiens; identical to SEQ ID NO: 234548
  chr10:6244500-6244699
  hyper

SEQ ID NO: 286909 - DNA, 282 bp, Homo sapiens; identical to SEQ ID NO: 234549
  chr10:6245257-6245539
  hyper

SEQ ID NO: 286910 - DNA, 145 bp, Homo sapiens; identical to SEQ ID NO: 234550
  chr10:6246027-6246172
  hyper

SEQ ID NO: 286911 - DNA, 680 bp, Homo sapiens
  chr10:6621840-6622520
  hyper
ccttcttccctccccgcaggccccctttcgttcaggtgagaaggaaaagggagaagaaaggaggaagcgcccccaggccggcggcccccacccggctaaggtcgccagcatcccgcatcccgtgcgacctgcgtcccagaaacccagcggggaaattcttcccggtgcgctcttgcgcccgcttggttccatttcctactccgcctgctcacccggcagccctcaccccttcccggaggctctccgaggggcccgggtagcccttctcgccacgggtctcggcccctccagcccgctccctcccggcggcggcgcggggcgcggggccctacctggagcgagcacggcgccgctgctgcccggtggcgctgggactgcgcggggactgcgcggggactgcgcggggactggcggggctggcggggctggcggggctggcggggctggcgggcccggcgcactgcgggtgcgcctagaaggcggtgcccgccagggggcgctcgccagcctccccgccagcccggcctcccgggacccggcacctctagccagggacgcgcgctcggtcccccgccgtgcgcccccggtcccgcgcccaggctcccgcccctggcctccttaccagccacttgtcgcccagctgcgaactggagcgggaggcggcggccggagggcccagg

SEQ ID NO: 286912 - DNA, 101 bp, Homo sapiens
  chr10:6622706-6622807
  hyper
gtaaacattgttccttttaaaatgacctaccccaggcatttgtttgggcacacttctgtcctggggtcatcgttcctaggtggcttcggacctgggacttt

SEQ ID NO: 286913 - DNA, 56 bp, Homo sapiens; identical to SEQ ID NO: 201966
  chr10:7449898-7449954
  hyper

SEQ ID NO: 286914 - DNA, 60 bp, Homo sapiens; identical to SEQ ID NO: 201967
  chr10:7453036-7453096
  hyper

SEQ ID NO: 286915 - DNA, 228 bp, Homo sapiens
  chr10:7454077-7454305
  hyper
tttatggttgccaaagggggtaaaattacccagtcccccaaatctgtgtcccatgaatccctctcatagtacccctctccagggggccaagaggtcctccaggtccccgtgggttcgcagctccacccgcccttcctcgccctgcatccctaaggagaggtgtccgctctgaagggctaggggccagccatggagtgaggggaccggggctgaccacgcgcggcacag

SEQ ID NO: 286916 - DNA, 106 bp, Homo sapiens; identical to SEQ ID NO: 201968
  chr10:7708304-7708410
  hyper

SEQ ID NO: 286917 - DNA, 71 bp, Homo sapiens; identical to SEQ ID NO: 201969
  chr10:7729413-7729484
  hyper

SEQ ID NO: 286918 - DNA, 202 bp, Homo sapiens; identical to SEQ ID NO: 234559
  chr10:7829457-7829659
  hyper

SEQ ID NO: 286919 - DNA, 41 bp, Homo sapiens; identical to SEQ ID NO: 234560
  chr10:7829885-7829926
  hyper

SEQ ID NO: 286920 - DNA, 131 bp, Homo sapiens
  chr10:8075799-8075930
  hyper
cccagggcaaggctcgccggcttcctttccctcccaactcccctgctctaggccactgcctctggggtggggcgccgagaaggaggccctggggacctacccccggctcttctgagccaagtgagttccca

SEQ ID NO: 286921 - DNA, 114 bp, Homo sapiens
  chr10:8078243-8078357
  hyper
tcaacaataaagaaaaaaaagaagaccttacagcgcgaagaagcgggctttagttaatcgatttcaaacacgcctgtggtgcggctcagtgaccccctccgctcggctgagtcc

SEQ ID NO: 286922 - DNA, 75 bp, Homo sapiens
  chr10:8079315-8079390
  hyper
ggggggagacggggagaacctgatagctggaaactcgttttctccaaaggctttcgggacattttagcccggctc

SEQ ID NO: 286923 - DNA, 66 bp, Homo sapiens; identical to SEQ ID NO: 201970
  chr10:8079655-8079721
  hyper

SEQ ID NO: 286924 - DNA, 62 bp, Homo sapiens; identical to SEQ ID NO: 234566
  chr10:8079998-8080060
  hyper

SEQ ID NO: 286925 - DNA, 371 bp, Homo sapiens
  chr10:8082851-8083222
  hyper
gataaggaaagagtcgtttataattctccacctcgtctaatattttaaaataaagtcagaggcaagaaaacgccataaaacactggtgagcaggcaagcgccgaatgaaaaatcacttccatgttattatatccacagtaagatttaattaaaattctccacgtccacgtgctttattttcagataggattttttcccatcacgtaataattgataggaatttgcaaacggggctatttatttagggcgcctgggtggaataggtctgatttttttttttaattttcagtcattgcttttgaaactttcatttgcgatatccatagtttcagaccacctaggcccccatcacccacccgccccacccgggc

SEQ ID NO: 286926 - DNA, 145 bp, Homo sapiens; identical to SEQ ID NO: 201971
  chr10:8086048-8086193
  hyper

SEQ ID NO: 286927 - DNA, 117 bp, Homo sapiens
  chr10:8086740-8086857
  hyper
tgcacctcctaacttttacggggcaactacggctcaggagagatgaaagtagaatgggggcgttttggaggcatcagcatagacagaaacaggagaaatagtcggaagggagaggga

SEQ ID NO: 286928 - DNA, 601 bp, Homo sapiens
  chr10:8090758-8091359
  hyper
cctgccctctcccttcctgtctccccctttccgctgcacccctacctacccaatttttatctcgctacaatcaggggttttctcaaccggggaaaaggtggtagtggcggtgggagggtcaggatccctcgaagtggaggccggggccgggctgggggcggagtgcgggggcggggggaatctcccagcgcatctcctcttttttgactctccccacggctcgcggctctcctggcctgggcgggtttccttccgagttttaaacggtgatcgatgaataagcaaaacaaacaaacaaacagaaaaaaaaagaaaaaagaaaaagaaaaaagaactaaaggaaggaaaagaaaaaagggtaaatcaaatcacataccatccccaaaacgatagctcatttcacggggaaggtagactcctggcccggggcgcgtgggcgtgggagccgcgaggagagttgccccttggacgcacccgcctccatcatcttcccattgccagtgagttttagggtccctctttctctgctttcccccaagttccctgctctctgggttttgtttgaagagagccagccttgctgggccgggatcctcaacca

SEQ ID NO: 286929 - DNA, 168 bp, Homo sapiens; identical to SEQ ID NO: 201973
  chr10:8092278-8092446
  hyper

SEQ ID NO: 286930 - DNA, 623 bp, Homo sapiens
  chr10:8092535-8093158
  hyper
ggcctttggtgtcgctccccgccccccagccccgcagattcccggcttcttttctgtctgcgcggccgggaccgcccaggcaggcgccggggctccggggctccggggggagggactcggcggctcggctcggctccgcttctttcttctgcctgcaaatatttgctgcctcgctggaaatccgacgatttcgcgcgcgctctgcttgcaaagtctttaagtaaacacgctcaaatgaccgccccgggcggcccgaggcacgctctctccccctccgcgggattagtaactttaggacttcgaccccggggctccgctttgcctgttacccaggtcgggcagcgcgcgggcgcccggggccgcttctcccggcacctcggccccgcggagctcgcctggaagcgccggttgcctggctctggtgggtggcccggccgcgagcatctccgcgccctgggtctgtagccctagggctgagccccagaaagccgcgcctccgctctgcgccatggcctctgctttctgtacccgactgggtttccccacttccactgggacagggtctcttcgcccctgggagggcgggtgggagggacttgcacgtgggcatgtgtttgggggtg

SEQ ID NO: 286931 - DNA, 102 bp, Homo sapiens; identical to SEQ ID NO: 201975
  chr10:8094141-8094243
  hyper

SEQ ID NO: 286932 - DNA, 83 bp, Homo sapiens
  chr10:8094348-8094431
  hyper
gaaggcctcctcaccagtcttttctttttgtctttgaaataattcttagcctcagaagtcagcattttcaagacctggcatcc

SEQ ID NO: 286933 - DNA, 132 bp, Homo sapiens
  chr10:8094540-8094672
  hyper
tggcgcatccacccctcgattgacgcgcggagaagcatttttcattttttctttcagcttgtatccttaaatcttaatcccgggcttcttagcaaaaatgcgtgtgcattcgtttctccttgtttatggaga

SEQ ID NO: 286934 - DNA, 91 bp, Homo sapiens; identical to SEQ ID NO: 201976
  chr10:8095107-8095198
  hyper

SEQ ID NO: 286935 - DNA, 99 bp, Homo sapiens; identical to SEQ ID NO: 201977
  chr10:8095845-8095944
  hyper

SEQ ID NO: 286936 - DNA, 51 bp, Homo sapiens
  chr10:8097537-8097588
  hyper
cccgacctcccaggcggaccgccctccctccccgcgcgcgggttccgggcc

SEQ ID NO: 286937 - DNA, 53 bp, Homo sapiens
  chr10:8374272-8374325
  hyper
gaactgttgagaagggcttacgatgatctttgtaaaaagaaacatctcgtaag

SEQ ID NO: 286938 - DNA, 63 bp, Homo sapiens; identical to SEQ ID NO: 201978
  chr10:11060746-11060809
  hyper

SEQ ID NO: 286939 - DNA, 100 bp, Homo sapiens; identical to SEQ ID NO: 201979
  chr10:11207330-11207430
  hyper

SEQ ID NO: 286940 - DNA, 155 bp, Homo sapiens
  chr10:11207724-11207879
  hyper
caggaggaagggcgggtaggcaggagggctggaagcagccggtgctggcggcccctgtgctccaggggctgctcccgactcctccccgcacccccgcccgcctgcccgccgggacaggttggaggcgggagagagggaccgaggcagggcgggag

SEQ ID NO: 286941 - DNA, 105 bp, Homo sapiens; identical to SEQ ID NO: 201981
  chr10:11652860-11652965
  hyper

SEQ ID NO: 286942 - DNA, 168 bp, Homo sapiens; identical to SEQ ID NO: 234578
  chr10:11653475-11653643
  hyper

SEQ ID NO: 286943 - DNA, 870 bp, Homo sapiens
  chr10:11865127-11865997
  hyper
cgtgggtcgctcggcgatggggttggggattttcacggtgctgtcccccaactcgaacttcacaccttgaccgaggacccccgggaggcggccgcgaggtcccccagcgcggcggggcccggccctttaagcgccgcgggcgcgcgcagtgcgtgcctaaggagtgcgagttcgggcggcgcgagcgcgcggcggcagtagagcgcgcgcgggtgggcgcgcacagggagagcgcgcggcggggcgtcccggaacagtctgcgccagacgggcggcggcgtgagggctccgggtcgctggcggcgtggacacctgagtcccggggtaggggtctcccgcgaggtgagtggggccctaggactccgggcagggctggagcgacgggagggcgtcctggcggcggtggcggcgctgggctctggctgggacgccggcgggtcgggcagagagggggcgccggaccctgccttggcgcgctcctcgctctgactaggggagcccggcgccgccgccgcagaggccacccggtgcccgacccccgaccccggggcgtcgctgcctcctcggggacctcggagtcggggcgcggcggggagcgcgctgggttccgagtctggggctatcctgggggctcaggggtggaggcgggtttcccagccttgggcgcagagggtccccgctgtccccaccgtccgtcccccaacccgggacccctgtcctttgcgccgtgggaccccatgcggcctcggggagagggtgcgggtccgacacggcgggcggagccacctgttccacccgggcccccaggtcctggaatcacgcggggatgtgcagggtctgcccagcccagcgcggcgggagggactaaaa

SEQ ID NO: 286944 - DNA, 47 bp, Homo sapiens; identical to SEQ ID NO: 234580
  chr10:12110722-12110769
  hyper

SEQ ID NO: 286945 - DNA, 194 bp, Homo sapiens; identical to SEQ ID NO: 234581
  chr10:12237744-12237938
  hyper

SEQ ID NO: 286946 - DNA, 53 bp, Homo sapiens; identical to SEQ ID NO: 234582
  chr10:12238327-12238380
  hyper

SEQ ID NO: 286947 - DNA, 127 bp, Homo sapiens
  chr10:12390698-12390825
  hyper
cttcgaggggactgcggggcagacgatcacttctttccactgagtctctgggaggagacagggagatgccagaaggggccaagcgtgagccagggcaaccaggccggccaggcccgccggccgctcc

SEQ ID NO: 286948 - DNA, 875 bp, Homo sapiens; identical to SEQ ID NO: 201983
  chr10:12390995-12391870
  hyper

SEQ ID NO: 286949 - DNA, 338 bp, Homo sapiens; identical to SEQ ID NO: 201984
  chr10:12392327-12392665
  hyper

SEQ ID NO: 286950 - DNA, 100 bp, Homo sapiens
  chr10:13043901-13044001
  hyper
aattggggacagtggcccagcaatctcctggcgccccacgatggacgtggtccgagcttgccaggcgtaaagcctgtttgcaaacgcaaggcattcatta

SEQ ID NO: 286951 - DNA, 82 bp, Homo sapiens; identical to SEQ ID NO: 234587
  chr10:13141818-13141900
  hyper

SEQ ID NO: 286952 - DNA, 241 bp, Homo sapiens; identical to SEQ ID NO: 201985
  chr10:13341387-13341628
  hyper

SEQ ID NO: 286953 - DNA, 145 bp, Homo sapiens; identical to SEQ ID NO: 234588
  chr10:13570123-13570268
  hyper

SEQ ID NO: 286954 - DNA, 33 bp, Homo sapiens; identical to SEQ ID NO: 201986
  chr10:13629001-13629034
  hyper

SEQ ID NO: 286955 - DNA, 99 bp, Homo sapiens
  chr10:13933035-13933134
  hyper
gagcagctgcctccaatatagaagcactgcatttagccaattttaaatgagcacgtactaaagggggttcccttctgttctcctccccttccgagcgtc

SEQ ID NO: 286956 - DNA, 190 bp, Homo sapiens; identical to SEQ ID NO: 201987
  chr10:13933246-13933436
  hyper

SEQ ID NO: 286957 - DNA, 277 bp, Homo sapiens
  chr10:14215913-14216190
  hyper
gaaatgagacaaaagctccgtgagcctcctcccatgcacagagccttttctgtccctccaagcagaaggaaaagaaatccagatccactccccttaccttcgtcctcatcggagacaggagcccttccatggtggcagaatcctcatgccagtttctgtctcctgcaagttactctctctgtgtgccgtgcttaagcatcccacatgaaaagagccatgtcgggagccgtggtggctcccctctcccgggtggcgcctctgcaccgccacccggtct

SEQ ID NO: 286958 - DNA, 71 bp, Homo sapiens; identical to SEQ ID NO: 223767
  chr10:14646262-14646333
  hyper

SEQ ID NO: 286959 - DNA, 100 bp, Homo sapiens; identical to SEQ ID NO: 223768
  chr10:14646654-14646754
  hyper

SEQ ID NO: 286960 - DNA, 114 bp, Homo sapiens; identical to SEQ ID NO: 234593
  chr10:14879967-14880081
  hyper

SEQ ID NO: 286961 - DNA, 773 bp, Homo sapiens; identical to SEQ ID NO: 201988
  chr10:14995671-14996444
  hyper

SEQ ID NO: 286962 - DNA, 39 bp, Homo sapiens; identical to SEQ ID NO: 234595
  chr10:15130885-15130924
  hyper

SEQ ID NO: 286963 - DNA, 342 bp, Homo sapiens; identical to SEQ ID NO: 234596
  chr10:15481461-15481803
  hyper

SEQ ID NO: 286964 - DNA, 178 bp, Homo sapiens
  chr10:15762154-15762332
  hyper
aagctatttattgctttagaagcaatgccccaggtggagcgagagcttgctccagttgtgtcaaaggcgcagcttggatggagaatgtgaaaaccaaccccaccaccaggaggggcaaagcaattatctcttcatcacctctgcagcctgacctcagcgttcacggctttgcacgtct

SEQ ID NO: 286965 - DNA, 41 bp, Homo sapiens; identical to SEQ ID NO: 234599
  chr10:15902579-15902620
  hyper

SEQ ID NO: 286966 - DNA, 329 bp, Homo sapiens; identical to SEQ ID NO: 234600
  chr10:16478540-16478869
  hyper

SEQ ID NO: 286967 - DNA, 148 bp, Homo sapiens; identical to SEQ ID NO: 201991
  chr10:16870093-16870241
  hyper

SEQ ID NO: 286968 - DNA, 52 bp, Homo sapiens; identical to SEQ ID NO: 201992
  chr10:17243812-17243864
  hyper

SEQ ID NO: 286969 - DNA, 208 bp, Homo sapiens; identical to SEQ ID NO: 201993
  chr10:17270445-17270653
  hyper

SEQ ID NO: 286970 - DNA, 368 bp, Homo sapiens
  chr10:17272233-17272601
  hyper
atttcttaaaactaccactttgtgtgcagttgaaggcccttgggcacaatgagagccagtcctccaaactttcagaaagtttcctgccccttctggcaggctgccaatcaccgggcgggagaaggaaggaggggaaggcggtggagggagcgagacaaagggatggtccctcgggggcggggatggcggggctgtcctgtaggtctgtgcggccaccgtgattgcccctctgcgcggtgcccgaagtcccgctgaaacctgccgagggcagcaggtctgaaagctgcaggcgctagttgcgcggaggtggcgcagctgctctggaggcgcagagcgaatacgtggtgtttgggtgtggccgccccgcc

SEQ ID NO: 286971 - DNA, 272 bp, Homo sapiens; identical to SEQ ID NO: 201995
  chr10:17495120-17495392
  hyper

SEQ ID NO: 286972 - DNA, 322 bp, Homo sapiens; identical to SEQ ID NO: 201996
  chr10:17495680-17496002
  hyper

SEQ ID NO: 286973 - DNA, 126 bp, Homo sapiens; identical to SEQ ID NO: 201997
  chr10:18429023-18429149
  hyper

SEQ ID NO: 286974 - DNA, 63 bp, Homo sapiens; identical to SEQ ID NO: 201998
  chr10:18430247-18430310
  hyper

SEQ ID NO: 286975 - DNA, 343 bp, Homo sapiens; identical to SEQ ID NO: 201999
  chr10:20104362-20104705
  hyper

SEQ ID NO: 286976 - DNA, 694 bp, Homo sapiens; identical to SEQ ID NO: 202000
  chr10:20104724-20105418
  hyper

SEQ ID NO: 286977 - DNA, 796 bp, Homo sapiens
  chr10:20105655-20106451
  hyper
gtcaccgtccgcgggcaccgggttggcgctgcccgagtggaaccgacagtttgcgagcctcggctgcaagtggcctctcctccccgcggttgttgttcagtgtcgggtgagggctgcgagtgtggcaagttgcaaagagagcctcagaggtccgaagagcgctgcgctcctactcgcgttcgcttcttcctcttctcggttccctactgtgaaatcgcagcgacatttacaaaggcctccgggtcctaccgagaccgatccgcagcgtttggcccggtcgtgcctattgcatcgggagcccccgagcaccggcgaaggactggcgggtggggtagggaggtggcggcggcggcatggcgaggttcccgaaggccgacctggccgctgcaggagttatgttactttgccacttcttcacggaccagtttcagttcgccgatgggaaacccggagaccaaatccttggtaagtaagatgcactttagcttgctgattttgtgcgcagctgaagacctctctggcactctcgtgctccctaccctctccccccaacatcacctatctgcccttgggaaacttattgcagttgcttttcggctaaacttaggcttcccaaatggggaaagagggttatcaagagaaggacgccggggactaggggttttcttgaggctttcgggcttacttcacctgggcggcagggggtggtactgtctccccaaagtagcccagggagggcttcagtgtgagagcaaagcttcttccgtggatacatctcctaggacctggcatctcc

SEQ ID NO: 286978 - DNA, 227 bp, Homo sapiens; identical to SEQ ID NO: 202002
  chr10:20106694-20106921
  hyper

SEQ ID NO: 286979 - DNA, 234 bp, Homo sapiens; identical to SEQ ID NO: 202003
  chr10:21462299-21462533
  hyper

SEQ ID NO: 286980 - DNA, 299 bp, Homo sapiens
  chr10:21462671-21462970
  hyper
ggcccggcgccccctcgctcaccttatccaggcagttgactttctcggtgggatacacgacttttccgcaacgggcgcactgggggttcatgatcgcggttcccgggggcggcggcggcggcggctgctggctcccaggagccgctgtgacatcccccggcgagccccgcaccgcctcctggcaggcgggagggctgcgggcggcgggcgccgggtagggagtcggcgccgggccacgggtgagtgcacggggagggcgacggggcctggcgcctggggccggccgcgctctcgggctc

SEQ ID NO: 286981 - DNA, 550 bp, Homo sapiens
  chr10:21463023-21463573
  hyper
gctcgcactccaggtacgggtgactcacacagtcactcgcgcccgcccctcgcgctcactcgctcccccgcctcgccgccgccgccgcgcaggccaaacccaccggcgcgcccggaccgaagtggcagggaacgtgcacgtcgggcaccctgggagggagggcgcagcgggggagggggcgggcagagacccggaaagctccgcagaccgccgtgggtgcgactgtgcggcctggggagtgagcctcgcgccaccgccgctgcaggccggggagcccaggtgggcggcggctggggagggagggatccaggcgggggaggtgacaaacaccggtggggagagtgctcaaacccgcgtactcccttccctccctcttctcttccccagccgggggcaccctcatcccaggctgactgacgtccctggcacccaaatgtcgcggggagtgcggggccagggtgcgccctccctcctcctccagccagtgaaacccgggacagcggcacccagccccagggcggaggccgtctctgctgcgcgcagcgacgca

SEQ ID NO: 286982 - DNA, 421 bp, Homo sapiens
  chr10:21783758-21784179
  hyper
cagggcggagcctaggccgcgcgccccggggttggaggttcccacggagccgggaaactgcgcgccccaggtccgcaggccgcctcccttccctcgcgccctcgcacccgccctctgctctgccgctcccggtcctgggtgtgcgggagtcccgggggtccctctcctggacgcagaggaggaatttggagcaaaaggaagggaatttactgcggatggcaccggaacctgaattgacttgtgcgtttcctgctctgggcacgtaggtttcccctaggaatctggagttcgctgaggacacttaattccaagagatgatgggttcacataaacataccatttagttaagaaaaatatttaaaataaagaaaaaagaaaaactgaacttcgatcttcttctccacgttccctggtgtcacca

SEQ ID NO: 286983 - DNA, 334 bp, Homo sapiens
  chr10:21784246-21784580
  hyper
ctgcgggtccgccactgcccccggcctccagcactgcactgcccacgagtttgcggggtgtgagcgccgaaggagaaccccggaccgcccagtctcagcctaaaaacttggatccaagagtcctacggttgtggatgtgccagtcctccgcgaccctttcctgctggccttctgctttttataaacgaaaataaaagtttgatttaggcttaaagaaatgtcattctggtcgttcctccctgaagcgggacttactcaacctcatatactcgcccggaattttcaatctcgcctgtcgaaatcgctagctgcgcatccgcggaagaagtcctgg

SEQ ID NO: 286984 - DNA, 203 bp, Homo sapiens; identical to SEQ ID NO: 202007
  chr10:21785547-21785750
  hyper

SEQ ID NO: 286985 - DNA, 49 bp, Homo sapiens
  chr10:21785786-21785835
  hyper
tcggatggagacatcgcggagggaagcgaggggacagggatgcggtagt

SEQ ID NO: 286986 - DNA, 54 bp, Homo sapiens
  chr10:21805363-21805417
  hyper
ctctgcactgacacttggctggagccggagctggagtccgactcggtggacgag

SEQ ID NO: 286987 - DNA, 153 bp, Homo sapiens; identical to SEQ ID NO: 223775
  chr10:21805907-21806060
  hyper

SEQ ID NO: 286988 - DNA, 318 bp, Homo sapiens
  chr10:21814235-21814553
  hyper
aaaggagagggattcgtattgaaatgcatttgctttggggtacgctggttatccgcaagtctggctttgtgggtctgcgtggctgaataagtgaccaagtgccttcggcattatataaacggatcgatgtgtgcgggagtccccaaagccgtcgagcacgtgaaacgcgactttttactgccctccaagcggcgaccaagccccgctccaccccaccccgcctcaaaatccgtatattacctgccctgttacagtgacacatgtttatgtttatagtcctggtttgtagtagtgtcaagaaccgcagcaagaggaagg

SEQ ID NO: 286989 - DNA, 886 bp, Homo sapiens; identical to SEQ ID NO: 223777
  chr10:21815634-21816520
  hyper

SEQ ID NO: 286990 - DNA, 129 bp, Homo sapiens; identical to SEQ ID NO: 234615
  chr10:21822289-21822418
  hyper

SEQ ID NO: 286991 - DNA, 67 bp, Homo sapiens; identical to SEQ ID NO: 234616
  chr10:21823423-21823490
  hyper

SEQ ID NO: 286992 - DNA, 142 bp, Homo sapiens; identical to SEQ ID NO: 223778
  chr10:21824264-21824406
  hyper

SEQ ID NO: 286993 - DNA, 240 bp, Homo sapiens
  chr10:22032716-22032956
  hyper
tgtaaagcactgtgcggtacaaacccacctcgggctcagagatcttggatcatcctcagatgagacggagagagaagagggaaacagccttggtggagataaaaggaaaacaaagtccttttagatgagataattagagcccgttgataaagcagtactcacacttggtagagagagattcttcttctttatacagttagctttaactagaggcatatccatgaaagagaagcccaatct

SEQ ID NO: 286994 - DNA, 213 bp, Homo sapiens; identical to SEQ ID NO: 234617
  chr10:22292569-22292782
  hyper

SEQ ID NO: 286995 - DNA, 110 bp, Homo sapiens; identical to SEQ ID NO: 202009
  chr10:22517901-22518011
  hyper

SEQ ID NO: 286996 - DNA, 58 bp, Homo sapiens; identical to SEQ ID NO: 202010
  chr10:22518450-22518508
  hyper

SEQ ID NO: 286997 - DNA, 33 bp, Homo sapiens; identical to SEQ ID NO: 202011
  chr10:22518859-22518892
  hyper

SEQ ID NO: 286998 - DNA, 266 bp, Homo sapiens; identical to SEQ ID NO: 234620
  chr10:22519355-22519621
  hyper

SEQ ID NO: 286999 - DNA, 77 bp, Homo sapiens; identical to SEQ ID NO: 202012
  chr10:22540630-22540707
  hyper

SEQ ID NO: 287000 - DNA, 44 bp, Homo sapiens; identical to SEQ ID NO: 234622
  chr10:22609889-22609933
  hyper

SEQ ID NO: 287001 - DNA, 966 bp, Homo sapiens
  chr10:22614079-22615045
  hyper
gcctttccaaaactttgtatcgctcatttaatctacaggagagcgtcacattagagaaggaagttttaaagaggttcggttcaataaacatctctgcaatttgagccctgacggtttcgggctaagtgcacagttggcaattctcaaaaaatcccttcgtgaaatttctgaccgagtgattgcagacaggacagaccgagagagtcgagatctgaaaccagctctgcgcaccaagtcgacgtgaaaagaggcccccggagtgtccgaaatggccgggagtgcggtttgcattttcctttcgcgggcgctgccgcaggctccggggtccccgccgcccaggactgggtccctggtccccgatccccgctccccgctccccagcgctgtggcctcgtggggctgccccgcccccccggcgtcgccgcacccaccccgcccccgcgccggccccgcccccgcggcgcgccgcccctcccccgcccgcccgcccgcccgccgccccgcacgcccgccgaggctcggggctcgggccgggctccgcgcggagttgcagcggtggccggatgccaagtgtaagtgtaagttgctatggaaaccccgaccgaggcgagttccgaatccggagcgagacggagccccgggcgccgccggatccgcccctcgcatcccggcccccgggcgtccgccgcgctcaggccccggcccaggccgactggaggtgctcctcctgcggccccagcacccggctccggaaatgccagggatgcagggagggcagaattgttttccctgcgcgtcgcgtaaaaacgtgccaggttctgcttgctggaaccgtctaaaacaaccggaaccccggattttcacttgcagattcttgaggaagttttataataaattcggagacctggaacaagccctagtggttggtaaatatccgcggggattgtgtggcgtctgcagcagcct

SEQ ID NO: 287002 - DNA, 46 bp, Homo sapiens
  chr10:22626103-22626149
  hyper
ttttgcatgaaatccagaatgtaaccatttgcgttgacttaactgt

SEQ ID NO: 287003 - DNA, 184 bp, Homo sapiens; identical to SEQ ID NO: 234627
  chr10:22726716-22726900
  hyper

SEQ ID NO: 287004 - DNA, 41 bp, Homo sapiens; identical to SEQ ID NO: 234629
  chr10:23001787-23001828
  hyper

SEQ ID NO: 287005 - DNA, 214 bp, Homo sapiens
  chr10:23001984-23002198
  hyper
ccccagatgctaagtgactgcagtggctaaggtcatggtcaaaattcacagctcgtttaaactttcctggctgagccaacagctccgatcatgtttcctgatcctatcgaagtggattaaaactgcaggagtttctcgctgtcagatcagcaggaggctatttcagaccctcgaaccgcagtccgcatagcccgcagcggcgcatcctccaatc

SEQ ID NO: 287006 - DNA, 301 bp, Homo sapiens
  chr10:23002228-23002529
  hyper
gcgttctccagcctttcccacaccccccacagcgggtgcggccaactcgggaccccctccgcccgcgcccgccgggacccccgcctgctgtccccgccccggccgcccttccgcagtcggtgacttctgcctgactccccaaagtggggggaggcgacgaagggaggaagactccccgccaagggctctccagcccgcacagcggcagggcgatgcgggagaagcgcagggatgccgcccgacgccagagccatatttacatcggctgctgctttgccaaaaagccgacttgtgcccagta

SEQ ID NO: 287007 - DNA, 96 bp, Homo sapiens
  chr10:23460471-23460567
  hyper
cagaactgcaataaaaaatgttatttctcaatgaaattcaccttcctaactcatgaattgcgcttcattcattgctcttcacgaagtggtcattgg

SEQ ID NO: 287008 - DNA, 71 bp, Homo sapiens
  chr10:23491090-23491161
  hyper
cctccaaactatttcgatacaatatgtttccatgatgcacttaatgtgctagggacatagaactcattaca

SEQ ID NO: 287009 - DNA, 92 bp, Homo sapiens
  chr10:23491237-23491329
  hyper
gctttctgaaatgctaaagcatgcgtcatttttcaccaggtctcgtcttgatatcctcaaaagacaaactatgaaaccggcctcagcccttt

SEQ ID NO: 287010 - DNA, 189 bp, Homo sapiens; identical to SEQ ID NO: 234645
  chr10:24497858-24498047
  hyper

SEQ ID NO: 287011 - DNA, 241 bp, Homo sapiens
  chr10:25011170-25011411
  hyper
gggtcgtgaaggttcgagtgtcagctcctagagagatcctaggaaaacgagaagttaaaggtcatgaactttctccaggcgcctatcactgtcttgcccacatgtccacaccaagttcgcgtttcctcccgagcaaaacaaacaaaaaaaaattttaacgtaaacaaacaaaaagcctataaattcgagggggtgtttaaaaaagagaaatctcgaaactgcccagcggttgcgtcaaaca

SEQ ID NO: 287012 - DNA, 239 bp, Homo sapiens; identical to SEQ ID NO: 234647
  chr10:25011795-25012034
  hyper

SEQ ID NO: 287013 - DNA, 164 bp, Homo sapiens; identical to SEQ ID NO: 202016
  chr10:25012546-25012710
  hyper

SEQ ID NO: 287014 - DNA, 470 bp, Homo sapiens
  chr10:25241260-25241730
  hyper
gggactcagagtttcgtcagattgggggcggggagaggaggcccgggtccgaggatggaagcgatccccgccgggagggagaacaaagcggtggccctctctctcccccgacgcacggcaagcatttaatctacaagcagggtgccagggagggaggggagcgggccgagccccaaaatagggagtttgcatttaccacgacgcctcgcccgtagtctggcgcctcctcgctgctcccggccatgtttctcccggggaacgcgggaagggaagacggcgcgggaaggagcagggagggcgaaggctgcgtgggggatgggacgtggggatggggacggggacggggacggggacggggacggggacgggtccgccccgccccgggcccgccggcgggaagcagcggcctgacgcggatccatggccccggcgctgcgccccctcccctggctaggccgcgggggcgcggg

SEQ ID NO: 287015 - DNA, 49 bp, Homo sapiens; identical to SEQ ID NO: 234649
  chr10:25305303-25305352
  hyper

SEQ ID NO: 287016 - DNA, 112 bp, Homo sapiens
  chr10:25463329-25463441
  hyper
atttaactaagcatgcaagacgccaacaccctccccctcagtacgtccaagtttccttcgctctgagccaccgaatctctgcttctcccccctctgccgcccaccctacgcc

SEQ ID NO: 287017 - DNA, 627 bp, Homo sapiens; identical to SEQ ID NO: 202018
  chr10:25463893-25464520
  hyper

SEQ ID NO: 287018 - DNA, 186 bp, Homo sapiens; identical to SEQ ID NO: 202019
  chr10:25464915-25465101
  hyper

SEQ ID NO: 287019 - DNA, 85 bp, Homo sapiens; identical to SEQ ID NO: 202020
  chr10:25465600-25465685
  hyper

SEQ ID NO: 287020 - DNA, 65 bp, Homo sapiens
  chr10:26055994-26056059
  hyper
aaccttatcaacgtcggcctatctaagagtctgacgtactcagcgtttgatttggttttcaaata

SEQ ID NO: 287021 - DNA, 42 bp, Homo sapiens
  chr10:26222950-26222992
  hyper
cggagtcccgggaagcccctcggcagccagccaagggccctg

SEQ ID NO: 287022 - DNA, 139 bp, Homo sapiens
  chr10:26501589-26501728
  hyper
acccagccacttcagacaaacacaatctaagctaaaaccccttgccacacaaacgcagaggcctccaatgtctaaatccccaacacaccacacgtgctcgcctgcacgatgccttcccaatctgcgtgactgtctttgg

SEQ ID NO: 287023 - DNA, 77 bp, Homo sapiens; identical to SEQ ID NO: 202021
  chr10:26503616-26503693
  hyper

SEQ ID NO: 287024 - DNA, 92 bp, Homo sapiens; identical to SEQ ID NO: 202022
  chr10:26726984-26727076
  hyper

SEQ ID NO: 287025 - DNA, 79 bp, Homo sapiens; identical to SEQ ID NO: 202023
  chr10:26728108-26728187
  hyper

SEQ ID NO: 287026 - DNA, 239 bp, Homo sapiens; identical to SEQ ID NO: 234662
  chr10:26986366-26986605
  hyper

SEQ ID NO: 287027 - DNA, 241 bp, Homo sapiens; identical to SEQ ID NO: 234663
  chr10:27444473-27444714
  hyper

SEQ ID NO: 287028 - DNA, 70 bp, Homo sapiens
  chr10:27529644-27529714
  hyper
gcatcggtggccgcggagccgctctcccaccctggggaccctggcggagcagccacaccccccattccgc

SEQ ID NO: 287029 - DNA, 209 bp, Homo sapiens
  chr10:28031105-28031314
  hyper
catcatgtaaggtaaaaagacctcaggaaaagcacattcaaagggggaggaggcagaggcagccaggagcctggagcgtggcctggggcgctgcgctccctcacgggtccgggaggtgtcgcgcgcggccgccagcgagcccagccgctccccgaggcttgcgcgcctgcgccggagcctcctgggtttctgcctctttaaacactttg

SEQ ID NO: 287030 - DNA, 225 bp, Homo sapiens; identical to SEQ ID NO: 202026
  chr10:28031638-28031863
  hyper

SEQ ID NO: 287031 - DNA, 208 bp, Homo sapiens; identical to SEQ ID NO: 202027
  chr10:28032744-28032952
  hyper

SEQ ID NO: 287032 - DNA, 149 bp, Homo sapiens
  chr10:28287169-28287318
  hyper
gaccgacagaaaatcgaacttttagacatgacatgaacagggccctaagtaaaaccaaagctaagcctagtgtgggatgacggcccccaccagactcgttacaagaagggggcgtcagagctgagaccctaagtttccaggaatggatt

SEQ ID NO: 287033 - DNA, 220 bp, Homo sapiens
  chr10:28287557-28287777
  hyper
gagatggggctgggagagagaagggaagggggcgggtcttggtccccgggagggaaaggggagcaggcgagagcggcagcggcggggccagagagccgcctctgtttcccgatccacgcgggcggctgcagaacccctgcgggggtgagcgtggagacccccagccgcactcacctgcagcaccctgccccccgcagtcggcgcccgcctgttgctagga

SEQ ID NO: 287034 - DNA, 160 bp, Homo sapiens; identical to SEQ ID NO: 234670
  chr10:28591947-28592107
  hyper

SEQ ID NO: 287035 - DNA, 166 bp, Homo sapiens; identical to SEQ ID NO: 234671
  chr10:28821230-28821396
  hyper

SEQ ID NO: 287036 - DNA, 35 bp, Homo sapiens
  chr10:28957388-28957423
  hyper
aaaaccttttcctatcctgtcggccacattcacga

SEQ ID NO: 287037 - DNA, 420 bp, Homo sapiens
  chr10:28965881-28966301
  hyper
gagggggtggggggcgaaggctgaatgcagaccccagcgctgggccgcctcccccgggctcccacccgaaccctcctccgccacctgcacaggccggggcattgtcactcgcccctgggggttccagaaaacgcagtgcggccggggaggacgaccacacggaccccctgcgtgtttcggggggcacccaaaagaagccccgcgctggggaacgctgaccacccgaggctgagccgtcagggtctcggaggcgggttcccgagccggtcccggggctgggctcccccggcgcctcgcgaaggtcactgacgcgcaggcctccgcaagggggagcgcgggagacggcagcgcaccagccgggcgccccagccgggcgccccagacgccggcgccgctcggagccgccgggcaggtccccca

SEQ ID NO: 287038 - DNA, 239 bp, Homo sapiens; identical to SEQ ID NO: 202029
  chr10:28966598-28966837
  hyper

SEQ ID NO: 287039 - DNA, 308 bp, Homo sapiens; identical to SEQ ID NO: 202030
  chr10:28968985-28969293
  hyper

SEQ ID NO: 287040 - DNA, 342 bp, Homo sapiens
  chr10:29011162-29011504
  hyper
tgaattaatgggttcagcttcatgttgagcacaagtgggaggctattttagagaaaccttcccaggccagccgtcactgatgtggcaaactcagcctctgggcagaccggctggaaatagaaacgtctccgcttcacgatggcgcacgcccggacgtccccttccgagagcgggtcccctttgtcccccgaggccccgccgccctgtgtcacgtccccacctcgctctgggtccactgatctcttgatgcacgcgtcccatcagcagcagccgaaagagggtgctcgggcgggagtgaaatccctgtgaaatgtgatcaagaacacaaaatgctgaggcagc

SEQ ID NO: 287041 - DNA, 78 bp, Homo sapiens; identical to SEQ ID NO: 202031
  chr10:29738055-29738133
  hyper

SEQ ID NO: 287042 - DNA, 92 bp, Homo sapiens
  chr10:30023989-30024081
  hyper
tgtaatgcaattaccgccttctggagctccactcggggtgccagggactgctggctgtcacccggggactaaaccactcccttcggggagcc

SEQ ID NO: 287043 - DNA, 734 bp, Homo sapiens; identical to SEQ ID NO: 202032
  chr10:30024793-30025527
  hyper

SEQ ID NO: 287044 - DNA, 138 bp, Homo sapiens
  chr10:30509063-30509201
  hyper
acaaaagcaatgggcgctcttcccgggcagccccatgttccagggagccaaagcttgcagcgtgagagggtctctttttggaacaaaggtcggtgagtgaagtcaagtccaggcttggttttgagagatcacatgtca

SEQ ID NO: 287045 - DNA, 70 bp, Homo sapiens; identical to SEQ ID NO: 234682
  chr10:30722681-30722751
  hyper

SEQ ID NO: 287046 - DNA, 126 bp, Homo sapiens; identical to SEQ ID NO: 234683
  chr10:30723838-30723964
  hyper

SEQ ID NO: 287047 - DNA, 251 bp, Homo sapiens
  chr10:31072973-31073224
  hyper
gctattgcccacggcggtctagttggcctccgaactgggggtggagggtgggaagtggttagaaccatccccagcaaagagagaagagagtgctgacttcaactcagtggcaaccagggggcatagatgaaaaaaacaaattgcaaattcttccacctcggcctcaatctctgtgataaaaccctgcggttctctgatgatttctggggtgatggggtggggctgggttaagaagagacttatactgtgat

SEQ ID NO: 287048 - DNA, 33 bp, Homo sapiens
  chr10:31073481-31073514
  hyper
aaaaccaaaagcatctctcgatgctggggtttc

SEQ ID NO: 287049 - DNA, 224 bp, Homo sapiens; identical to SEQ ID NO: 202033
  chr10:31073881-31074105
  hyper

SEQ ID NO: 287050 - DNA, 183 bp, Homo sapiens; identical to SEQ ID NO: 202034
  chr10:31422648-31422831
  hyper

SEQ ID NO: 287051 - DNA, 129 bp, Homo sapiens
  chr10:31423116-31423245
  hyper
gaaatgcggcagccgggggtgccggcagcttgagagaaaagtctgcgtggagggggggtgggggggatgaggggaggcccggggagacagagggcaggagaaaaaggccggccccgctcacaatggagc

SEQ ID NO: 287052 - DNA, 185 bp, Homo sapiens; identical to SEQ ID NO: 202035
  chr10:31607136-31607321
  hyper

SEQ ID NO: 287053 - DNA, 803 bp, Homo sapiens
  chr10:31607941-31608744
  hyper
tcagcagtgcccacggttgccgcaaaccgcccggtccctagcaacaaggttccggccgtagagcgagagcctctaggtgtaaggaaggtgatgtcgtaaagccgggagtgtcgtaaaccaggtgcggtggggaggggggaggggtggaggcggaggggtgggggggaagggggagggagggggaggaggtgactcgagcatttagacacaagcgagaggatcatggcggatggccccaggtgtaagcgcagaaagcaggcgaacccgcggcgcaataacggtgagtggcggaggggaccggggagcggcggagtcagggggagctgggcagccggggcgcccccgggggtgaggggggcgagccgggctgggggcagccggggcagggacggcaaagtggagtgggaaagtagaaagtagtgctctctgcccccctccgctgccgccgctgccggagccgcgccgcggccgctcgctctccctgaaccgttatgtctcttacctggtctctctccgcctagcggctcccgccgcccctgccgcctccctggaccgttagccggcgccgacgccgccgcatccccggcgcagggcgggcggccgggacgcactggccacttttctggtcccgggtggagcggctgttgcttctttccgcacttttccccactcttgtgcccttcggcgcctccctctccccctcctcctggccccctcagcgcgattctccctcagcgcccaggcccccgggagccgcggaacaaacttgtgcccggcgctgaccgtgcaaagtggcttccgcg

SEQ ID NO: 287054 - DNA, 252 bp, Homo sapiens; identical to SEQ ID NO: 202037
  chr10:31609416-31609668
  hyper

SEQ ID NO: 287055 - DNA, 99 bp, Homo sapiens; identical to SEQ ID NO: 234688
  chr10:32049025-32049124
  hyper

SEQ ID NO: 287056 - DNA, 69 bp, Homo sapiens; identical to SEQ ID NO: 202038
  chr10:32217899-32217968
  hyper

SEQ ID NO: 287057 - DNA, 106 bp, Homo sapiens; identical to SEQ ID NO: 234690
  chr10:32345462-32345568
  hyper

SEQ ID NO: 287058 - DNA, 833 bp, Homo sapiens; identical to SEQ ID NO: 202039
  chr10:33623220-33624053
  hyper

SEQ ID NO: 287059 - DNA, 45 bp, Homo sapiens; identical to SEQ ID NO: 202040
  chr10:33624447-33624492
  hyper

SEQ ID NO: 287060 - DNA, 138 bp, Homo sapiens; identical to SEQ ID NO: 202041
  chr10:33624560-33624698
  hyper

SEQ ID NO: 287061 - DNA, 447 bp, Homo sapiens; identical to SEQ ID NO: 202042
  chr10:33624841-33625288
  hyper

SEQ ID NO: 287062 - DNA, 256 bp, Homo sapiens; identical to SEQ ID NO: 202043
  chr10:33625870-33626126
  hyper

SEQ ID NO: 287063 - DNA, 77 bp, Homo sapiens; identical to SEQ ID NO: 202044
  chr10:35102970-35103047
  hyper

SEQ ID NO: 287064 - DNA, 403 bp, Homo sapiens; identical to SEQ ID NO: 202045
  chr10:35103079-35103482
  hyper

SEQ ID NO: 287065 - DNA, 544 bp, Homo sapiens; identical to SEQ ID NO: 202046
  chr10:35103534-35104078
  hyper

SEQ ID NO: 287066 - DNA, 743 bp, Homo sapiens; identical to SEQ ID NO: 202047
  chr10:35104117-35104860
  hyper

SEQ ID NO: 287067 - DNA, 340 bp, Homo sapiens
  chr10:35105213-35105553
  hyper
ctaaaggaacgtggaccgagttagggaacgtaactgaagctcattttgtcttagttatggactatgagtccttaataaatgtatgtcattatgtttaaagaatgacaaatgtctgcaaagagtggtccctgtcccaagccctttccagactatgtgaaattcttttttgccagttgtttccaagacacgtgaaagcaatcaagctcccctgggttggcgcagaacttgagcacttaagagctggaagagctggcgatcgaccatccatcccactccacctccaatcttaaaacaaggaaacaagacacgaggttcgtccgcttgccacactccctgcgct

SEQ ID NO: 287068 - DNA, 334 bp, Homo sapiens; identical to SEQ ID NO: 234695
  chr10:35415501-35415835
  hyper

SEQ ID NO: 287069 - DNA, 468 bp, Homo sapiens
  chr10:35930558-35931026
  hyper
gcccttccgcactcctttccgccgctccgggggtttgaaggcggctgcaggcgcgcgccacagtccgtaggtccgctctgctggccccgggtcgcgctcagccctcgcggcgcagagcggccgggcctcggctcatcgtcccgcgctcgctcgcctcctctccgcgcgcccgaccacttctccccgccgcgccgggcggcggtgactccgccggacagagagggcggaggcgccgcaagtttcctctggggccgcggtgcgcagtcaagatggctgggccgggccgcttgccgcgccgggtcagccctggcggccaccactcggcccccgggggctcatgcccgcccccaaggccaagccgccgccgccgccgccggagttggggacccgcctcggcccaggccgccgccctctttctccggcgtccgtccttcgtccgtccgccgccgggacagacggacccccgcc

SEQ ID NO: 287070 - DNA, 343 bp, Homo sapiens
  chr10:35931061-35931404
  hyper
cgggcgaggtgcacacagtctccttcctgctggacacccaggagcaaatccagaccggaaggcggagcggacacctgagtggcgcggcccgcgcccagccgccgcctcctcctcggcgggagcagcgcccttagcccaacttcccggctccagccccgctcgcgccgcgctgccggctcatgaatatttatacagcgcggactcggtctccgcccccagccccgcgagccaatcgccgggcggtagggcggagtccacgcgctcccagggctcagccttccttaaggcagtccccgagtgtccgcactgctgtgcgcgctctctgcggatggagagttttggt

SEQ ID NO: 287071 - DNA, 344 bp, Homo sapiens
  chr10:35931434-35931778
  hyper
ttggccatggctgtccccatggcgctgagtgcgtcggaggtcttggtccccttaccccgagtctgcccttggggacagggacggggtttggtgcagcgcgcgcctccccggcgcgtttcaaaccagccaagcccctgctgccaccctccgcaaatgtgggtgatctgcaggcggctggggtctcgtgctcctcggggcggcaggaaggtctcgcagcaggcgagcgccggggaggcctgccggggctcggcgctgcagaagacccgggaaagggtgtcctccttggggttctcagaacgatggtttctgagacttggagatgtggggggtgtggagtcattcta

SEQ ID NO: 287072 - DNA, 214 bp, Homo sapiens; identical to SEQ ID NO: 202050
  chr10:35932020-35932234
  hyper

SEQ ID NO: 287073 - DNA, 111 bp, Homo sapiens; identical to SEQ ID NO: 234698
  chr10:38146150-38146261
  hyper

SEQ ID NO: 287074 - DNA, 101 bp, Homo sapiens; identical to SEQ ID NO: 202051
  chr10:38146491-38146592
  hyper

SEQ ID NO: 287075 - DNA, 427 bp, Homo sapiens; identical to SEQ ID NO: 234700
  chr10:38265525-38265952
  hyper

SEQ ID NO: 287076 - DNA, 225 bp, Homo sapiens
  chr10:38299277-38299502
  hyper
taaactgtatggacgagatctatttcctaacatttaaacggaaaatgacacgcagcggtcctttccttgagcgtctgcgtctaaactgcccacagacctcccccgcagtatatccctttggagtgccccggggaaagccagggctgcaggcagttccagcaccaactcagaccgcatctgcccactgcctagcggggcacttctctaccaatccgaagggctgct

SEQ ID NO: 287077 - DNA, 307 bp, Homo sapiens; identical to SEQ ID NO: 234702
  chr10:43133483-43133790
  hyper

SEQ ID NO: 287078 - DNA, 163 bp, Homo sapiens; identical to SEQ ID NO: 234703
  chr10:43134086-43134249
  hyper

SEQ ID NO: 287079 - DNA, 257 bp, Homo sapiens
  chr10:43361723-43361980
  hyper
ggtcaggcgtagggtgggcccgctgccctcacacccgccccggccgcacacaggaggcgcgatcagcagagtcgttggacaggtttggacaccggctgtctctttcgggcctcggttttcgcgtctgaaataaaagcgcgcatcctggccctggcgcggtgcctctgccgcggtagaggtttccaccatgagcccagtgcgccttccaggctcgagggagagggagtgtgcgtgcgtgtgaacgcgtcacactcttg

SEQ ID NO: 287080 - DNA, 258 bp, Homo sapiens; identical to SEQ ID NO: 202052
  chr10:43428636-43428894
  hyper

SEQ ID NO: 287081 - DNA, 36 bp, Homo sapiens; identical to SEQ ID NO: 202053
  chr10:43429438-43429474
  hyper

SEQ ID NO: 287082 - DNA, 47 bp, Homo sapiens
  chr10:43571919-43571966
  hyper
tcccctgctcagctcttccccgcctcctgcctccggccccagcagag

SEQ ID NO: 287083 - DNA, 251 bp, Homo sapiens
  chr10:43572998-43573249
  hyper
ctcgggcgggagcggagcgcgggccgggccgcgggggtcggtgctcagaaccctagccatagccgcaggtctcaatctggccgcgccctgcgccaaagccgcgtcctggagcaaacgggacagccgtttcggggccgacctggcggacgggtcagggagccccgaaagcccgcgattcgtgcggagagttctgtttcggcaggagacggctccgtcctggtttccttttcccgctcagcgtccgtgcgttc

SEQ ID NO: 287084 - DNA, 34 bp, Homo sapiens
  chr10:43600323-43600357
  hyper
gcccccttcccgaggaaagcggctggcccggtcc

SEQ ID NO: 287085 - DNA, 150 bp, Homo sapiens; identical to SEQ ID NO: 202054
  chr10:43697737-43697887
  hyper

SEQ ID NO: 287086 - DNA, 124 bp, Homo sapiens; identical to SEQ ID NO: 202055
  chr10:43698155-43698279
  hyper

SEQ ID NO: 287087 - DNA, 148 bp, Homo sapiens; identical to SEQ ID NO: 234710
  chr10:43725397-43725545
  hyper

SEQ ID NO: 287088 - DNA, 506 bp, Homo sapiens
  chr10:43761673-43762179
  hyper
cccgttcctggggccggcaaggcctggggcaaagagagcgtggtccttcaaatgacccttgcccagcagggagagggagacacctggcatggccctggacctctcccccaaatgcagagctcaagccccaattcctcgccaaacagcaagggcgtgagataccacggcggggcccagaatgcagaagagcaaatggaaacttccaactgcgcagccctgagctcctccgattccccagcccccacccccacgccaggccccgggcagcgaacctgcccgcagtgcccacgcccgcccgccgcgtgcgctcctgccacgcccggcccggcccggcccggcccgccaggtgccctgaaggggcggagggtgcagggggtcctggcgccgtccagcccggggcggagttctcagcaactccgcgcgccgggatcccggccgccctccccgcgcgcgtcccccgccccgcgcccggagcccgcgccccggccccacgacggccgcgccgg

SEQ ID NO: 287089 - DNA, 228 bp, Homo sapiens
  chr10:43800185-43800413
  hyper
gagagctgaggaggcgggtcctggggcagcggcagcgttaccgcttgcaaaggcgccccttttttctgtgctgattttcgcctgtgagacttcctcccacgggcgccgctggctagtcagactttcccgcgtgcctcctgccccgccctaacaggctaacttttccgcgccgggcctggctctttgctgcagctgccgccctcggtgcagagttcccgggagcacttg

SEQ ID NO: 287090 - DNA, 69 bp, Homo sapiens; identical to SEQ ID NO: 202056
  chr10:43818308-43818377
  hyper

SEQ ID NO: 287091 - DNA, 129 bp, Homo sapiens; identical to SEQ ID NO: 202057
  chr10:43818407-43818536
  hyper

SEQ ID NO: 287092 - DNA, 51 bp, Homo sapiens
  chr10:43857868-43857919
  hyper
tagacattccttggtgctgattggctggcggccagcgcagtcctccttcct

SEQ ID NO: 287093 - DNA, 720 bp, Homo sapiens; identical to SEQ ID NO: 202058
  chr10:43892054-43892774
  hyper

SEQ ID NO: 287094 - DNA, 192 bp, Homo sapiens; identical to SEQ ID NO: 202059
  chr10:43892970-43893162
  hyper

SEQ ID NO: 287095 - DNA, 73 bp, Homo sapiens; identical to SEQ ID NO: 234716
  chr10:43904392-43904465
  hyper

SEQ ID NO: 287096 - DNA, 255 bp, Homo sapiens; identical to SEQ ID NO: 234717
  chr10:43932226-43932481
  hyper

SEQ ID NO: 287097 - DNA, 236 bp, Homo sapiens
  chr10:44185104-44185340
  hyper
tcttggtgaccactgtgagccggcgaggtccactgggccagaccctggcccgaggtggccccggagctgtgagcgggaggaagagggaagggcggagtctggagccctcacgccttccgccttgtgcgcggtgcaggctgccgagagcccggccgggcaagcctttccgccgtggtcagtgactcgtttgcacaaggactttttagggaagagagaagccaggccttcgctgtggg

SEQ ID NO: 287098 - DNA, 77 bp, Homo sapiens; identical to SEQ ID NO: 202061
  chr10:44186043-44186120
  hyper

SEQ ID NO: 287099 - DNA, 128 bp, Homo sapiens; identical to SEQ ID NO: 202062
  chr10:44806674-44806802
  hyper

SEQ ID NO: 287100 - DNA, 427 bp, Homo sapiens; identical to SEQ ID NO: 202063
  chr10:44879396-44879823
  hyper

SEQ ID NO: 287101 - DNA, 204 bp, Homo sapiens
  chr10:44882093-44882297
  hyper
aggcagccgtcgggcgtccccaggcctttgctgggctgggccggggagcctggccgctcaccggccgcagcgctggggctccggcgccctctggtggcggcgcctccctccccgctcccagagctctggccagctccattcctgcgcagctgatgaaacccgggagggcgaaggggtccgcgggaaatctacacccgggtggag

SEQ ID NO: 287102 - DNA, 35 bp, Homo sapiens; identical to SEQ ID NO: 202065
  chr10:44882362-44882397
  hyper

SEQ ID NO: 287103 - DNA, 281 bp, Homo sapiens; identical to SEQ ID NO: 234722
  chr10:45470472-45470753
  hyper

SEQ ID NO: 287104 - DNA, 50 bp, Homo sapiens; identical to SEQ ID NO: 202066
  chr10:49514479-49514529
  hyper

SEQ ID NO: 287105 - DNA, 33 bp, Homo sapiens
  chr10:49731361-49731394
  hyper
tgagtttagggagcgctgcagtaaagggatgca

SEQ ID NO: 287106 - DNA, 201 bp, Homo sapiens
  chr10:49731801-49732002
  hyper
cctggagggcggaccctcccctccgctctacccactcccgcccaggggccggaccccacccccactcccacatggggaccgaggagccccaggatgcgcccccgcgccccgagtgaaggggagcctccccttccaaagttaggagactcagaggagcagcagccgcacctgagccctttccaaagctgaggcaggtgcggg

SEQ ID NO: 287107 - DNA, 73 bp, Homo sapiens; identical to SEQ ID NO: 202068
  chr10:50323149-50323222
  hyper

SEQ ID NO: 287108 - DNA, 325 bp, Homo sapiens
  chr10:50603423-50603748
  hyper
ggagaccctggggcgcagcgcttacttaccctctagctgtggcgggcagtggaaataaaacatcgccggctgtcagatcggctggacggccgagacctgggagggtggcagcagaacggacccgcgcgcgttgctcctgcctggctgcaaagcaaacagcgatagagcttcaagtctccctctgccagcgctcccgcccagccctagggcgcacccggcgctcccctcctggaaagtccctcccaacgccctcatctcactgcgggggacaggagggaaggcggcagccccgtcgcaagcagcaaccccacagggcagtccttcg

SEQ ID NO: 287109 - DNA, 115 bp, Homo sapiens; identical to SEQ ID NO: 202069
  chr10:50606762-50606877
  hyper

SEQ ID NO: 287110 - DNA, 68 bp, Homo sapiens; identical to SEQ ID NO: 202070
  chr10:50814999-50815067
  hyper

SEQ ID NO: 287111 - DNA, 165 bp, Homo sapiens
  chr10:50815344-50815509
  hyper
tgaaagttagagaatgagggagtttagtgtctttggagcctccttagggagccagcccaggaccttcctcctcccatgggtcttgatctgctcctcacccctacactgccagcgtgcggccaccttggagatggagcagcaggagcacgacgccgtgccgggaat

SEQ ID NO: 287112 - DNA, 128 bp, Homo sapiens
  chr10:50819280-50819408
  hyper
tacagtcctgttcgccttcgccgaggactacgccacgctgttcgcggcgcgcagcctgcagggcctgggctcagccttcgccgacacgtctggcatagccatgatcgccgataagtacccggaggagc

SEQ ID NO: 287113 - DNA, 35 bp, Homo sapiens; identical to SEQ ID NO: 202071
  chr10:50821017-50821052
  hyper

SEQ ID NO: 287114 - DNA, 224 bp, Homo sapiens
  chr10:50969672-50969896
  hyper
gggtctctccggttcggcgaatgcgtactgcagcctgctgtggcctcgggattaccccgtccccctcccacatctcccggggggcggaagaagcgcatcccatgcaagcagcgacctcaggccatgccgccctctctcaggcctcagttttctcatctgtaatcggagaccgcggttaaaaccgtctattaggctccttggtagtccgaagctgcctatgggtc

SEQ ID NO: 287115 - DNA, 194 bp, Homo sapiens; identical to SEQ ID NO: 202073
  chr10:50970412-50970606
  hyper

SEQ ID NO: 287116 - DNA, 98 bp, Homo sapiens
  chr10:50976517-50976615
  hyper
tgcctagcccggctctcaggacacctctgtctgcgtctccttcgtcgccactccgggtttcgactccgcgtggccaggcaccccgggtcaccacctct

SEQ ID NO: 287117 - DNA, 31 bp, Homo sapiens; identical to SEQ ID NO: 202074
  chr10:52177704-52177735
  hyper

SEQ ID NO: 287118 - DNA, 53 bp, Homo sapiens; identical to SEQ ID NO: 234742
  chr10:52383839-52383892
  hyper

SEQ ID NO: 287119 - DNA, 167 bp, Homo sapiens; identical to SEQ ID NO: 202075
  chr10:52750721-52750888
  hyper

SEQ ID NO: 287120 - DNA, 281 bp, Homo sapiens; identical to SEQ ID NO: 202076
  chr10:52751102-52751383
  hyper

SEQ ID NO: 287121 - DNA, 233 bp, Homo sapiens; identical to SEQ ID NO: 202077
  chr10:52751562-52751795
  hyper

SEQ ID NO: 287122 - DNA, 64 bp, Homo sapiens
  chr10:52751961-52752025
  hyper
ggagaggcgggacaggggcttgtctctagggcagggatccagcctggagcgtgggggcgaggag

SEQ ID NO: 287123 - DNA, 139 bp, Homo sapiens
  chr10:52833429-52833568
  hyper
ctatctggagcaggcgaagagtagcaacgcctcgggtgctaaaatcggaaaccccaccccctaccccacaaccctttcccaaaggtagtaggctgaaagggggaattcctcgcgggcgccgactcgctcgcatctcctg

SEQ ID NO: 287124 - DNA, 280 bp, Homo sapiens; identical to SEQ ID NO: 202079
  chr10:52834081-52834361
  hyper

SEQ ID NO: 287125 - DNA, 109 bp, Homo sapiens; identical to SEQ ID NO: 202080
  chr10:52834756-52834865
  hyper

SEQ ID NO: 287126 - DNA, 450 bp, Homo sapiens; identical to SEQ ID NO: 234745
  chr10:53459323-53459773
  hyper

SEQ ID NO: 287127 - DNA, 461 bp, Homo sapiens
  chr10:54073737-54074198
  hyper
ttactgccaggcaagggcacccaagttcccagagttcctgctgccgcctgcatttattaaagtcgtctgctataacgctcgctggtagccttcaccccgaaggtgagccgggccagccgagcgactaagcaagggaggggcggggtgaagagtgtcaaaggccccccttcatgtacacaaacacaccccctcccagcccctcccagcgctttgaaatcccatcccggctttgttgtctccctcccaaggggccggaatgctccgggcccgcggtataaaggcagccgcggtggcggtggcggcgcagagctctgtgctccctgcagtcaggactctgggaccgcagggggctcccggaccctgactctgcagccgaaccggcacggtttcgtggggacccaggcttgcaaagtgacggtcattttctctttctttctccctcttgagtccttctgagatga

SEQ ID NO: 287128 - DNA, 296 bp, Homo sapiens
  chr10:54074418-54074714
  hyper
gaccattgacaactaccaggtgagaggggtcgggcactcagaggatgctctgaccttgaaagggtcctatctggagacgagggagtagaacgtgctgaatgtgtgcggttcagggagcatttggtaaccctgcatttgggagcagtgggcagtaacaggttttggagaggtggacagataaggactgtgatcagcgcccgggtccaagagggcgggtacctggacgtctgggtgcctcaccctctccccgaacccttcccacagccgtacccgtgcgcagaggacgaggagtgcgg

SEQ ID NO: 287129 - DNA, 457 bp, Homo sapiens; identical to SEQ ID NO: 202082
  chr10:57390676-57391133
  hyper

SEQ ID NO: 287130 - DNA, 57 bp, Homo sapiens; identical to SEQ ID NO: 234750
  chr10:58121111-58121168
  hyper

SEQ ID NO: 287131 - DNA, 48 bp, Homo sapiens
  chr10:60026209-60026257
  hyper
cgtgacttcaggcacgtcattcttaaccagggttggccttagtcacct

SEQ ID NO: 287132 - DNA, 312 bp, Homo sapiens; identical to SEQ ID NO: 202083
  chr10:60028787-60029099
  hyper

SEQ ID NO: 287133 - DNA, 190 bp, Homo sapiens; identical to SEQ ID NO: 202084
  chr10:60272365-60272555
  hyper

SEQ ID NO: 287134 - DNA, 211 bp, Homo sapiens; identical to SEQ ID NO: 202085
  chr10:60273346-60273557
  hyper

SEQ ID NO: 287135 - DNA, 36 bp, Homo sapiens; identical to SEQ ID NO: 202086
  chr10:60273587-60273623
  hyper

SEQ ID NO: 287136 - DNA, 313 bp, Homo sapiens
  chr10:60935996-60936309
  hyper
ccaattcttggtaaacaacaaacatgctcgccctcgcctccccgtgcagacgcctcagggccaactcgggcttcgccaggcaccgagagcagacagaagacgccaaatggctatcaccaggagagagggcgaggcagccgcgcggcgtatagcgctcgcccttcccgcgcgctcggtcgcccgacgcctcacgcgcgaggttgccttggcagtggctggagggcaggtgggggcgcgtgcgcgcagaagggcgggggagggaccaccgcgcgccagcaggtgggcgcgttctcccgcgcgcgtgcgcgcgtcg

SEQ ID NO: 287137 - DNA, 496 bp, Homo sapiens
  chr10:61121994-61122490
  hyper
ctgggccccaccagtcagcacgtctcacggtcttcacagccccagattccgggagacaatgcatctaaaacgaacagcggctgggaacggtggaggataccttcacgatagttgcttccagagaaaggcatgcaagtctaattttaatggtaagaatcacttactctgttacagtggtgctgctgaaggaattatcctgaaggctgaaacagaaacaagaaaacatcagccaagtctggccggggagccgtctccctgattgctctccgggagtgagcacatacacaaacatggcattgcaaggcaagtctccgggctcgcccggcacgctcgctctaccttgggctgctgtctgcacatgctcgtaacgacacccccagcaggggcccagcggcacgggcgaaccacaaagcccggcagcccgcgaggctgcggggacagagctgggcggggcgcggcggcggggctgggaccccgggatccagcgaggagcacc

SEQ ID NO: 287138 - DNA, 95 bp, Homo sapiens
  chr10:61122636-61122731
  hyper
cttccacatgtctcctaccaattttacagagctcaccccaaccccccacactcccaccccacccccagggatggaggctcgcagagattcatcca

SEQ ID NO: 287139 - DNA, 202 bp, Homo sapiens
  chr10:61468534-61468736
  hyper
aggttacctagggcgaaccaaagatggggcattaagcaccaagtcctcccaagtgctggctgagggtccaggtgggcgcggtgccggtgcctcctgcggcggtggcgaaggctgggctcccgcgctcgcccagggctgccgggtggtgctgaacctggcgccaacgtgcagaatccgccggccctgcgcgctgcgctccacg

SEQ ID NO: 287140 - DNA, 76 bp, Homo sapiens
  chr10:61468771-61468847
  hyper
cctccgggggcacctggttgctcgcgctccggaccaaggcagttggaggcctttcggtcctctgggaaatggaggc

SEQ ID NO: 287141 - DNA, 63 bp, Homo sapiens
  chr10:61469829-61469892
  hyper
gtgcgcacacacgcgcgtccccaggcgccgctgtgcccccgccgcccaccacgtgccctggcc

SEQ ID NO: 287142 - DNA, 269 bp, Homo sapiens; identical to SEQ ID NO: 234759
  chr10:62492575-62492844
  hyper

SEQ ID NO: 287143 - DNA, 85 bp, Homo sapiens; identical to SEQ ID NO: 202089
  chr10:62538165-62538250
  hyper

SEQ ID NO: 287144 - DNA, 192 bp, Homo sapiens
  chr10:62703331-62703523
  hyper
ctgtccgggtcctccggtccccgcccggcctccccatactggccttcgaaggggaagcgccttctcgtcggcgcggcaccaccccctccctggcgcagccagcctgctaagggtgcctgttgtacattttctcagctccaagttaggggtgcggctgtgcgggcgctcctagaaatctcttgtgcttgcctc

SEQ ID NO: 287145 - DNA, 180 bp, Homo sapiens; identical to SEQ ID NO: 202090
  chr10:62703652-62703832
  hyper

SEQ ID NO: 287146 - DNA, 101 bp, Homo sapiens
  chr10:62704082-62704183
  hyper
gtgacgttagcagccttcgcggctatttatatccacacgattggatttcattcatgaaaccggggcctggtgtgtctgtgctctgggacacgggtggcaaa

SEQ ID NO: 287147 - DNA, 308 bp, Homo sapiens
  chr10:62761013-62761321
  hyper
tgctccaagctctcgcgtccccatgagcctgcggatgtggggactgcgggtgggcagagagaccccccataatcccgcccaccctggcgcggctcctcccgggcgcgctcccgccccgccacgccccgcgacgcccgcgctacctggggacgctggaagctcccgcggcggctctgggtcccgccgggcggccgaggctggcgcgggctttgtaaagccgccgggacagcgccgaccccgccccgccccgccgaccccgccctctcccacctcggccgcctcccccgcctgcatcccgggccacagtc

SEQ ID NO: 287148 - DNA, 76 bp, Homo sapiens
  chr10:62761372-62761448
  hyper
ggaccacgggtccctccacatcctcgcggcctgccggacagtcctgcgggcggggccccaacgcctaggcggtccc

SEQ ID NO: 287149 - DNA, 32 bp, Homo sapiens; identical to SEQ ID NO: 202091
  chr10:63211995-63212027
  hyper

SEQ ID NO: 287150 - DNA, 141 bp, Homo sapiens
  chr10:63213212-63213353
  hyper
ttcccaagaacttccccatcacgagggggcggaaagaggagggaggaggactgaaggtcaaggtgcagcacagccagaaaggcggaggaggagagcatctctggcagctccgccttacttttccaccgaagtactttaatt

SEQ ID NO: 287151 - DNA, 208 bp, Homo sapiens
  chr10:63656687-63656895
  hyper
gggatcacttgctccgagttccctgtgtctctcttggctccggctccaagttcatgagaaatctgtccccatacccatccttctgaagcttccagcctttaccacctggacctgggctggagtcccacccccaccacagctcttgagacaggcgacgaatagacccaaatttgagatgtagctcaacctttgaccactagaggtctcc

SEQ ID NO: 287152 - DNA, 206 bp, Homo sapiens; identical to SEQ ID NO: 223828
  chr10:64028003-64028209
  hyper

SEQ ID NO: 287153 - DNA, 86 bp, Homo sapiens; identical to SEQ ID NO: 202092
  chr10:64133781-64133867
  hyper

SEQ ID NO: 287154 - DNA, 43 bp, Homo sapiens; identical to SEQ ID NO: 234765
  chr10:64564430-64564473
  hyper

SEQ ID NO: 287155 - DNA, 238 bp, Homo sapiens; identical to SEQ ID NO: 234766
  chr10:64576165-64576403
  hyper

SEQ ID NO: 287156 - DNA, 78 bp, Homo sapiens; identical to SEQ ID NO: 202093
  chr10:64578688-64578766
  hyper

SEQ ID NO: 287157 - DNA, 82 bp, Homo sapiens; identical to SEQ ID NO: 234768
  chr10:65029101-65029183
  hyper

SEQ ID NO: 287158 - DNA, 115 bp, Homo sapiens; identical to SEQ ID NO: 234769
  chr10:65225530-65225645
  hyper

SEQ ID NO: 287159 - DNA, 444 bp, Homo sapiens
  chr10:65225896-65226340
  hyper
agaggcggcggcggcggcggcagcgggagacgaaaaaatgaagagggccgcgggaaagtaggcgacagctattcaaagcttttgggggtctacctttgtattcgttgctccctcagaggtggaggtgaggggaaagtgaagtgtagtggttccactctgatcacaaaataaactcctgggttgacgcctcacccgcggtttgatgttcagagcacacagcgcccgccgcctgagttagcctgaattagcagtcccgcagtaacagcagcagagcaggacaacacttctactgaaaactaagccccaaagtcacagcagaaccaaccgttcatgacttcaagggaaaacgagggggaaaatgtgatcctttcattcttctcatttgtggtgatactaattacatgtttaagctattcacagatttaaattcgtcactgctttatt

SEQ ID NO: 287160 - DNA, 70 bp, Homo sapiens; identical to SEQ ID NO: 234771
  chr10:68685828-68685898
  hyper

SEQ ID NO: 287161 - DNA, 396 bp, Homo sapiens; identical to SEQ ID NO: 234772
  chr10:68687786-68688182
  hyper

SEQ ID NO: 287162 - DNA, 457 bp, Homo sapiens; identical to SEQ ID NO: 234773
  chr10:69523830-69524287
  hyper

SEQ ID NO: 287163 - DNA, 167 bp, Homo sapiens; identical to SEQ ID NO: 202095
  chr10:69834339-69834506
  hyper

SEQ ID NO: 287164 - DNA, 80 bp, Homo sapiens; identical to SEQ ID NO: 202096
  chr10:69834887-69834967
  hyper

SEQ ID NO: 287165 - DNA, 120 bp, Homo sapiens; identical to SEQ ID NO: 234776
  chr10:69835218-69835338
  hyper

SEQ ID NO: 287166 - DNA, 71 bp, Homo sapiens; identical to SEQ ID NO: 234777
  chr10:69991508-69991579
  hyper

SEQ ID NO: 287167 - DNA, 152 bp, Homo sapiens; identical to SEQ ID NO: 119025
  chr10:70091480-70091632
  hyper

SEQ ID NO: 287168 - DNA, 436 bp, Homo sapiens; identical to SEQ ID NO: 234779
  chr10:70092802-70093238
  hyper

SEQ ID NO: 287169 - DNA, 139 bp, Homo sapiens; identical to SEQ ID NO: 234780
  chr10:70166193-70166332
  hyper

SEQ ID NO: 287170 - DNA, 32 bp, Homo sapiens; identical to SEQ ID NO: 234781
  chr10:70167001-70167033
  hyper

SEQ ID NO: 287171 - DNA, 35 bp, Homo sapiens; identical to SEQ ID NO: 234782
  chr10:70167244-70167279
  hyper

SEQ ID NO: 287172 - DNA, 493 bp, Homo sapiens; identical to SEQ ID NO: 234784
  chr10:70660994-70661487
  hyper

SEQ ID NO: 287173 - DNA, 231 bp, Homo sapiens; identical to SEQ ID NO: 234785
  chr10:70715515-70715746
  hyper

SEQ ID NO: 287174 - DNA, 352 bp, Homo sapiens; identical to SEQ ID NO: 234786
  chr10:70748247-70748599
  hyper

SEQ ID NO: 287175 - DNA, 324 bp, Homo sapiens; identical to SEQ ID NO: 234787
  chr10:70748846-70749170
  hyper

SEQ ID NO: 287176 - DNA, 57 bp, Homo sapiens; identical to SEQ ID NO: 202101
  chr10:70883516-70883573
  hyper

SEQ ID NO: 287177 - DNA, 146 bp, Homo sapiens; identical to SEQ ID NO: 234789
  chr10:70939962-70940108
  hyper

SEQ ID NO: 287178 - DNA, 1257 bp, Homo sapiens; identical to SEQ ID NO: 202102
  chr10:71078140-71079397
  hyper

SEQ ID NO: 287179 - DNA, 112 bp, Homo sapiens; identical to SEQ ID NO: 202103
  chr10:71211454-71211566
  hyper

SEQ ID NO: 287180 - DNA, 85 bp, Homo sapiens; identical to SEQ ID NO: 202104
  chr10:71267678-71267763
  hyper

SEQ ID NO: 287181 - DNA, 59 bp, Homo sapiens; identical to SEQ ID NO: 202105
  chr10:71267805-71267864
  hyper

SEQ ID NO: 287182 - DNA, 109 bp, Homo sapiens
  chr10:71327766-71327875
  hyper
gtcatttcagcaccatggtcaggggcgcgcagctgcatttcgggatctcagagcaactgctagacagccttagctggacaggcgtccgctccgtcggccttggcccaca

SEQ ID NO: 287183 - DNA, 74 bp, Homo sapiens
  chr10:71328699-71328773
  hyper
cgcctgtggggtcgcgtgcgccccgggccccgcctacctttgtgccagcccagcggcctggctcccagacatta

SEQ ID NO: 287184 - DNA, 99 bp, Homo sapiens
  chr10:71333132-71333231
  hyper
gctctctctcgaggcgcggcggtgagaccgcagggatttcctgagcagcaagtcgtgtgccccttggcacgctttatctgcttcgcccgggccaggagc

SEQ ID NO: 287185 - DNA, 188 bp, Homo sapiens
  chr10:71334639-71334827
  hyper
cctcctcttgtccccgcctgggacatcccgtggtcttctgcttccggtcactcagagtgaggggttgcagcttccgcttctctctcttgacccggtcgtgcctggaggaagacgccgaggcgggaggtttaagtatcccggtttaagtctccttaggcgaggaaggcttctctttctagcaggtccag

SEQ ID NO: 287186 - DNA, 86 bp, Homo sapiens
  chr10:71334956-71335042
  hyper
ggggcaaattttcctccaaggaagagggtggtatgctcaggaaccagcgagaggggggctctaggactgggcgggggtgtggcgcg

SEQ ID NO: 287187 - DNA, 493 bp, Homo sapiens
  chr10:71336491-71336984
  hyper
cctgagacctaagtttgcctggaggctgaggggtcccggagagaggcggtagccagacgcctggagaccgcgggcacattggaaaagaaggaaggcagcggcccgccttcctgccttcttgtcggcgggggtagttttagcattgcctgggggctctttgagaattgtgcagggagggaggggggccatgggaagctgaatagctaatggcttgccagaggagggggattctttctctcgccttcagctcagcagtgaaagaggggaagacaaaaatctggcgagcgagctgcccgggccgagactggccacttcaaacagcccttcaaacaaaaggagacgacgaaaagaaagccccacctgtctccagtgtttgctaaaataataataaatagatttcgtttaataaataattacaagagattgtaaagtggagtgctttggaaaacatctaccgcgggagtccgtgcagccagccgtcacctgctcctaa

SEQ ID NO: 287188 - DNA, 218 bp, Homo sapiens
  chr10:71337422-71337640
  hyper
cagggtagggagagataagacgggctcctcacccactttcggagagaagccgttccctcagagactccccctccccaggctcagggacctcgtgcgctcttgaaagggtggccggttctttttcttgggtaggtgacagggcgccatatgccaccccccagggcgcacacgggagctccggcccagggagtcttcgaacaaagggaagagagggcccg

SEQ ID NO: 287189 - DNA, 43 bp, Homo sapiens
  chr10:71337670-71337713
  hyper
ccagatcccccctccctgctcagggccgcctcccctaggcgtc

SEQ ID NO: 287190 - DNA, 375 bp, Homo sapiens
  chr10:71337726-71338101
  hyper
cggcgcctggaaacaaagtgtccacattatcctcgccggcggctgagaccgtcaatgcgtgaaaaggtgcattgcgcaccaagacacctgttgaagcggctcctcttctcagcgcccctctctgctctgcgctcggtcaggagccgcgcagggagcggggggtgggaggagggagagacactgtgatttgtggcgacatatgttgagcagatcgttgtgtactcttcacagggacacatgcaccctcgctcccatacacaccccgcgagaaggagcagctgctctcctcaccttctcccaacataatacctgggccaggcgctttggcctcgccttttgagagtttagctctcctccaccccccaccccccgtct

SEQ ID NO: 287191 - DNA, 249 bp, Homo sapiens
  chr10:71338326-71338575
  hyper
attttccctccccaggaagaaataaacaacggaacccggcgggggaggggaggccacctccaggcggctccagtttggagctcttgccctttggcgcgttgcgccacctcacagtgctggcagccaggagagcgcagggcagcggaggaagagcgcggcttgccaaaaggcggctgggacaggggccgctggacggagcggagagggttggaaagtctgggggtgctcgctgggcatcgcctgacccct

SEQ ID NO: 287192 - DNA, 198 bp, Homo sapiens; identical to SEQ ID NO: 202107
  chr10:71389862-71390060
  hyper

SEQ ID NO: 287193 - DNA, 154 bp, Homo sapiens; identical to SEQ ID NO: 202108
  chr10:71390109-71390263
  hyper

SEQ ID NO: 287194 - DNA, 348 bp, Homo sapiens; identical to SEQ ID NO: 202109
  chr10:71561445-71561793
  hyper

SEQ ID NO: 287195 - DNA, 269 bp, Homo sapiens
  chr10:71561837-71562106
  hyper
acagcgcggcaccaactgctctgcagacacttgaagggaaagactgggcggagagaaggagagccggtcagattcccctaactttcctggacttggaacgttcttcgaaataacttttttctcacctaggtgtaccccaattaccgctggttgtgctttttcggcacttcctctcctactgctaatttttccgtcctctttgccgggagcagcggaaagggacgttttccagcgatacaagccctttccccctgccccgcagtttggat

SEQ ID NO: 287196 - DNA, 44 bp, Homo sapiens
  chr10:71562793-71562837
  hyper
cctccctttcgggacccggccagggtggtgtgacagccgccccg

SEQ ID NO: 287197 - DNA, 794 bp, Homo sapiens; identical to SEQ ID NO: 202111
  chr10:71812306-71813100
  hyper

SEQ ID NO: 287198 - DNA, 699 bp, Homo sapiens
  chr10:71892160-71892859
  hyper
tgttccctcttccccggttcgcccttcccggcctaagcccatcttccttaggaaaacttagcagggatttaggggccaaaccaggagggtggagttttctttgccctcggccaggagcacatctccctgttgcgttttttgggggagacagagaggggcgggcctgagtcgagtatccctctcctcgcagcgccacaactgcgcgcaccgacctccccacgccagacgcggcgtgagccaggcctctaatccgctcgcccctcttccgggtcccggtcccgcccggggcgcccggggtctcgagagcccgcctggcggcgcgatctcacctgtcggccgcgcccgcgcgctctcgctccggctcccgctcccgctcccgctcccgcttggtcgtcttcccgagttactgacccgaggcgctcccgggcggggcgtgactcagcactcgtgctggtccccgaccccgcggcaacgccccggccaggccccggaaacggtcctggcacgctggggctggtctccgaacggcccgccggactaaccttgaccctgagcgaacggccttgaactttgaaacaaatgctcccatggccagatgtcgcctctccggctcctgccagcacccgcgccccagtcctgccgagccattcagacttggtttaaagtgtcctttcagcatactttaaagcaaaaaagaga

SEQ ID NO: 287199 - DNA, 128 bp, Homo sapiens
  chr10:71892896-71893024
  hyper
agagagagagagagagaaggaaggaaggaaaacaagcatccccctgttcctctgattttctcgaggacacctttaaagccactggaaccttggagagtggggttcccctcacacgttgggcgcactgc

SEQ ID NO: 287200 - DNA, 388 bp, Homo sapiens; identical to SEQ ID NO: 234805
  chr10:71906296-71906684
  hyper

SEQ ID NO: 287201 - DNA, 195 bp, Homo sapiens; identical to SEQ ID NO: 234806
  chr10:71993193-71993388
  hyper

SEQ ID NO: 287202 - DNA, 81 bp, Homo sapiens
  chr10:72015069-72015150
  hyper
ggggaaggcgtagacggtgaccaggtgcagctgcggcgcgctgagctgcccgtagtcgatgagcagcagcagcgcccagag

SEQ ID NO: 287203 - DNA, 149 bp, Homo sapiens; identical to SEQ ID NO: 234809
  chr10:72142502-72142651
  hyper

SEQ ID NO: 287204 - DNA, 326 bp, Homo sapiens
  chr10:72238258-72238584
  hyper
agccgcactagcgacgagggaagaggaactggcttcccgggcagtctcccccgccccaaacttttcctcctcgcggagggtgggcgggcggagggaggaagcgcagccggggaacgtggcgcccgcgttcctcccgcccgggggctgcggctgggctgagtgtgtctttaaatctgagccccccgcccctcgcggtggggccgggactcgcggtccgggcgggggcgggcgcggtgattggcggccgggtcgggtccgcccctcggcgttgggtagcggggcgctggggagcagcgcggcgcgcacgggccggggcgcgcaggtcc

SEQ ID NO: 287205 - DNA, 50 bp, Homo sapiens
  chr10:72238858-72238908
  hyper
tctggaatcccccgggcaccccccagcccgaggctgctccagacaccaac

SEQ ID NO: 287206 - DNA, 89 bp, Homo sapiens
  chr10:72972345-72972434
  hyper
gccggctagggcgccggagccgcacgcagccgcggggctccgagaggcgcgcactggggctgggactgcgcggcgccgccgctgcgagc

SEQ ID NO: 287207 - DNA, 271 bp, Homo sapiens
  chr10:72972543-72972814
  hyper
ggcacccaccgcgctccgagtgccaggcggccctccgcgcagcgtggcttccgctgcccccacggaaggcacgggctggcgctgccgggcgccggggaggacggcgaggaggaggcggcggcggcggagacggcggcggcgagactggggccagggagacagccctgggggagaggcgcccgaaccaggccgcgggagcatgggggcccggagcggagctcggggcgcgctgctgctggcactgctgctctgctgggacccgaggctgagc

SEQ ID NO: 287208 - DNA, 180 bp, Homo sapiens
  chr10:72972950-72973130
  hyper
gtagattttactgcctcccaaagtgggcaatggcgcatccacatcgcgggagcggggagcagggaaggggcttcacagtaagctgaaaggtccctgctcgctcctgaaagggatcccttcttctccctggaaggggtgtaggagtcagggtctgagtctccgggaggatccgcctcctgg

SEQ ID NO: 287209 - DNA, 43 bp, Homo sapiens; identical to SEQ ID NO: 202114
  chr10:72973180-72973223
  hyper

SEQ ID NO: 287210 - DNA, 217 bp, Homo sapiens
  chr10:72973382-72973599
  hyper
cttgcacacatagctttccccgagatcgctgggcccgcaggtctggaagaattattattattattattattattattattattaattttctgagtgttggagagtgtgtgtgtgtgtgtgtgtgtgtgtgtgtgtgttggatgcgggtaggggttcttagcgatcctgcggagtttccttttaaattggtcactgacattctcgctgtccggggaac

SEQ ID NO: 287211 - DNA, 37 bp, Homo sapiens; identical to SEQ ID NO: 202115
  chr10:73113223-73113260
  hyper

SEQ ID NO: 287212 - DNA, 103 bp, Homo sapiens; identical to SEQ ID NO: 234815
  chr10:73610994-73611097
  hyper

SEQ ID NO: 287213 - DNA, 340 bp, Homo sapiens
  chr10:73723762-73724102
  hyper
aagggggttctccaagcagcctccacccaccagcctcgccaggagagcgtggatacccgagcggccccaagcgagtccccggggactggagggccgaggggcagcgcccggaacaaaggcccgcagaggggtcctggagacagcggctccccgggggcggctcccctctctcccctctctcccctcctctcctctcccgccagctcctccttctcctccccttcctcccccagaggcccggccggctcgcggcccgagcagcgccaacttcgccaacggttcccaagttgccgggcgcgcaggggtgggagctgggtggggtgaggaagaggaggaggag

SEQ ID NO: 287214 - DNA, 194 bp, Homo sapiens; identical to SEQ ID NO: 202117
  chr10:73724616-73724810
  hyper

SEQ ID NO: 287215 - DNA, 145 bp, Homo sapiens
  chr10:73846837-73846982
  hyper
ggcgtcgcctctggcgcatccgggcccatcccccacagcacccccaacgatctcggggtccagccacaccctccgcccgccctgcctcacccctgcttccccagcccccaacccggcccggccgagaggaaggagccagccccgc

SEQ ID NO: 287216 - DNA, 261 bp, Homo sapiens; identical to SEQ ID NO: 202119
  chr10:73847427-73847688
  hyper

SEQ ID NO: 287217 - DNA, 147 bp, Homo sapiens
  chr10:73848222-73848369
  hyper
agtgggtcgcggctgaaatgtgacctggttaggagatgcacttgtctgaaaaagcccagcactggacgcggagagggagagagaatcagagaggctgcgccagcaggggctgtaactgtagcatcagcatcacgtttgacatcatca

SEQ ID NO: 287218 - DNA, 379 bp, Homo sapiens
  chr10:74020597-74020976
  hyper
tgcccccacccagccgccggggccccaaatgctgagctcagcatctctgtggcctggctgccctcctcccgggcagtgggaggagcctccttcctcccgagggtgggcggggccagggccagccccgccctcctccccgttccccctctccctccatccccctcccgttcctcagtcgcacgttctccaagtcacgtcccccgcttcccctagtagggggtcgacggagattggacccttcccccagtcagctgctctgcatctgtcacctcggcggcagcgctcccttgaggtcgcacctccgctgtggagggaggcgagagcgagctgagtggggggtcttcccttcccccatcccgctggccccagacaagccacc

SEQ ID NO: 287219 - DNA, 466 bp, Homo sapiens
  chr10:74032435-74032901
  hyper
aagcaagcctgacccgaggcaaggcccgcctatctggttaggttccttgcccgcccccggggccctgggcatctgatgtaagtttggctccctcttccatcagggtcctcctgtcccagactgataaacctttagagcaataaaggtcgagtccgtctcaacctccacccaccctcagcaaccactgttagcctctgagcactgctgccaggccagatttcctgtggccccgcctgaatgatgaaacacgggatggccattgcactccctggcttttccagagatctcggtcctcggtcctgatgcaaccgtctggatcttttacacaaagcgctaggcgagcgctgggtgctaggacccggggggcgcccgggcagggaggtccggctgcgctgcctgcagtccgcggggagggcggatgggtctgtgagtccgactgctgtgaatcctcgcttccatccctgca

SEQ ID NO: 287220 - DNA, 260 bp, Homo sapiens; identical to SEQ ID NO: 202123
  chr10:74057402-74057662
  hyper

SEQ ID NO: 287221 - DNA, 296 bp, Homo sapiens; identical to SEQ ID NO: 7423
  chr10:74057707-74058003
  hyper

SEQ ID NO: 287222 - DNA, 418 bp, Homo sapiens; identical to SEQ ID NO: 202125
  chr10:74079275-74079693
  hyper

SEQ ID NO: 287223 - DNA, 193 bp, Homo sapiens; identical to SEQ ID NO: 7426
  chr10:74079752-74079945
  hyper

SEQ ID NO: 287224 - DNA, 199 bp, Homo sapiens; identical to SEQ ID NO: 202127
  chr10:74114846-74115045
  hyper

SEQ ID NO: 287225 - DNA, 69 bp, Homo sapiens; identical to SEQ ID NO: 234825
  chr10:74386146-74386215
  hyper

SEQ ID NO: 287226 - DNA, 116 bp, Homo sapiens; identical to SEQ ID NO: 202128
  chr10:74451757-74451873
  hyper

SEQ ID NO: 287227 - DNA, 147 bp, Homo sapiens; identical to SEQ ID NO: 234827
  chr10:74927731-74927878
  hyper

SEQ ID NO: 287228 - DNA, 33 bp, Homo sapiens; identical to SEQ ID NO: 234828
  chr10:75007237-75007270
  hyper

SEQ ID NO: 287229 - DNA, 184 bp, Homo sapiens; identical to SEQ ID NO: 234829
  chr10:75012129-75012313
  hyper

SEQ ID NO: 287230 - DNA, 84 bp, Homo sapiens; identical to SEQ ID NO: 234830
  chr10:75012575-75012659
  hyper

SEQ ID NO: 287231 - DNA, 224 bp, Homo sapiens; identical to SEQ ID NO: 234831
  chr10:75173165-75173389
  hyper

SEQ ID NO: 287232 - DNA, 284 bp, Homo sapiens; identical to SEQ ID NO: 234832
  chr10:75173746-75174030
  hyper

SEQ ID NO: 287233 - DNA, 179 bp, Homo sapiens; identical to SEQ ID NO: 202129
  chr10:75385748-75385927
  hyper

SEQ ID NO: 287234 - DNA, 40 bp, Homo sapiens; identical to SEQ ID NO: 202130
  chr10:75407358-75407398
  hyper

SEQ ID NO: 287235 - DNA, 276 bp, Homo sapiens
  chr10:75408169-75408445
  hyper
gcatggctgctggttcgacccgtgccagttcctgggtgctggagtctgcgcgctggcgctgctgttcaaagagctgcacccctcgcccagagacctcactcagctgccctcccagcccagagccctggccctctgatgctcttgagcccgccctggcaagctccatgtccagatagggactgtcccagtcagattgattggtgaggctgcgggcgtcagagaaggcttcttcgtccagctcggactcactcgtggggggaacgccgtcctcctcct

SEQ ID NO: 287236 - DNA, 145 bp, Homo sapiens; identical to SEQ ID NO: 234835
  chr10:75503717-75503862
  hyper

SEQ ID NO: 287237 - DNA, 157 bp, Homo sapiens; identical to SEQ ID NO: 234836
  chr10:75504289-75504446
  hyper

SEQ ID NO: 287238 - DNA, 227 bp, Homo sapiens; identical to SEQ ID NO: 234837
  chr10:75531957-75532184
  hyper

SEQ ID NO: 287239 - DNA, 95 bp, Homo sapiens; identical to SEQ ID NO: 234838
  chr10:75542070-75542165
  hyper

SEQ ID NO: 287240 - DNA, 39 bp, Homo sapiens; identical to SEQ ID NO: 202131
  chr10:75639673-75639712
  hyper

SEQ ID NO: 287241 - DNA, 86 bp, Homo sapiens; identical to SEQ ID NO: 202132
  chr10:75670639-75670725
  hyper

SEQ ID NO: 287242 - DNA, 53 bp, Homo sapiens; identical to SEQ ID NO: 202133
  chr10:75670755-75670808
  hyper

SEQ ID NO: 287243 - DNA, 113 bp, Homo sapiens; identical to SEQ ID NO: 202134
  chr10:75671364-75671477
  hyper

SEQ ID NO: 287244 - DNA, 161 bp, Homo sapiens; identical to SEQ ID NO: 234842
  chr10:75910774-75910935
  hyper

SEQ ID NO: 287245 - DNA, 150 bp, Homo sapiens; identical to SEQ ID NO: 234843
  chr10:75936204-75936354
  hyper

SEQ ID NO: 287246 - DNA, 103 bp, Homo sapiens; identical to SEQ ID NO: 234844
  chr10:76586294-76586397
  hyper

SEQ ID NO: 287247 - DNA, 206 bp, Homo sapiens; identical to SEQ ID NO: 202135
  chr10:76970482-76970688
  hyper

SEQ ID NO: 287248 - DNA, 389 bp, Homo sapiens
  chr10:77054513-77054902
  hyper
gagagaaagaagggagaccccggagaggaagagggggaggcccgggagggcgcgcggagggggtgtcagcgaggggccgcctgtcagggttctatctgcgcgatgattgatgcgggcccgggtttttctgtcagcctgtcacggcgcaggaatgtttaatgttctcattattggttacgctgttgtgtatatttctctgtcagcaccgcggacccagctgaactggcagagcacttcaaaggcctacgggtcattcatcatccccatgacgctccggcaaatgctcagcttcagccccgcgccagggatttgttatgacttgcgagccgcctgacagacagggctgcggcggccgggaggggacgcgcgggaggcgggctccgggccct

SEQ ID NO: 287249 - DNA, 359 bp, Homo sapiens; identical to SEQ ID NO: 202136
  chr10:77159568-77159927
  hyper

SEQ ID NO: 287250 - DNA, 1015 bp, Homo sapiens
  chr10:77160017-77161032
  hyper
cgccgcccccgttggaggcaaccgaggagagtttggaggagggcgaggggtcgggcttcccgatctgcgaacatgtttgcgccaacagcgccagcgggctcttcttggcatcgagctgcggggtcagacgatggggggggagcgtcacacagagaaagaagtggaaaccctttagaatcctggcttctggggttcaaatgcctctccgcaacagcccacgaagatcctcccagccccaaggcgcaattctaggcggcaccccctcttcaacacccactcacaaacattctcgccgttgggaaaggcagcagattgctccccccgcccaaccaccacccccagcagcatctttcctgccctctctgagcgctaactagatttttaaagagcaaaatgttttggttttcggttcctagacccagaactgtaccccctccccacaaacactccttaattcttcagagtaagggctcgggcggctggcgcctcagaggctgtgtgcacacactggcttctgcggatacgaaggacggcgactttggaaccgtatttcagacctccgcctgccttcggtgccgagtgaaggggcctgggtcggggtaggggctttcatatcgaaaggagaaacaagtattggcagccttgctccctagcatgcacgccccattccacttcctcccccttttccgccctagttttgaggtacggaagcagtagcctcttcccccattcgggagctgaatcactccgacccccccacctccgcccagatcccgagaaaaagaaagccctagggtggcagccagggtagtggtcccagtgcgatccagagagagggtccttacctcgatggggctgaccggcgtggaaggcaggggctgcaggtactcggggtgcaaaatgtggccagttcgtgccgtcagcatcttcagcaccttgattggcaggcggttggcctggcgcagggggtcagaggggggcacggcgtgcacaaaaggcttggtgctgccggccg

SEQ ID NO: 287251 - DNA, 217 bp, Homo sapiens; identical to SEQ ID NO: 202139
  chr10:77161406-77161623
  hyper

SEQ ID NO: 287252 - DNA, 1015 bp, Homo sapiens; identical to SEQ ID NO: 202140
  chr10:77161691-77162706
  hyper

SEQ ID NO: 287253 - DNA, 324 bp, Homo sapiens; identical to SEQ ID NO: 202141
  chr10:77163338-77163662
  hyper

SEQ ID NO: 287254 - DNA, 89 bp, Homo sapiens; identical to SEQ ID NO: 202142
  chr10:77163726-77163815
  hyper

SEQ ID NO: 287255 - DNA, 324 bp, Homo sapiens
  chr10:77168771-77169095
  hyper
aacctgggaatgtgcgcgctcgggaggggaggctgtcaaaacccagtcatcgcggggactggatgggggacaattctccgacgccgcggcctggacccgcccccacccaaccggcgcaccacctcccaggcaccacggagcctgcgcaagctgcggggccgtaaaggaaccggcccccaatctccggggcttcagtcccgcccctctctccccccagtgccctgcagcgctcccagggtccgtgtctgccctccccaagcccccactgtcaatacaatccctgttaaaaaaaaaaaatctttttagagccaggcacgtgccgtc

SEQ ID NO: 287256 - DNA, 361 bp, Homo sapiens
  chr10:77169218-77169579
  hyper
agggctggggagtgagaaggacagagagcaccgcccgacacaaccagacgcgcggacccggggcctcctctctggaccggtgctggggccctggtagaaccagctccgggagccgaaattgagccatgaagagtgggccgagggaggggcgaggggaacgggcctcaggagggaggggcgggcccggcggcacttccgttgggggtggggctgcgggctgccgcgccggtcccgcccctccgccgcgcgggcccgcccgctccaggccaggctccgcccccaccgactcggagctggatctcaggccacggcgcccccccagtcgcgcccccaaccccggaggcctcgggctgaaccgggt

SEQ ID NO: 287257 - DNA, 220 bp, Homo sapiens; identical to SEQ ID NO: 202145
  chr10:77190965-77191185
  hyper

SEQ ID NO: 287258 - DNA, 104 bp, Homo sapiens; identical to SEQ ID NO: 202146
  chr10:79396527-79396631
  hyper

SEQ ID NO: 287259 - DNA, 253 bp, Homo sapiens
  chr10:79471071-79471324
  hyper
gggcgcgggcacccctgggctctgaggggcgcgctctgaagggcggcggacttcagggccatgctggctgtccccagaaagcaggagcccgaaaccgcggggccaacgaacgcccacattctctgctacaacctcgccactcccctgcgcctctccccttgccccctgcccccacaggtaacgcccagaacgagtgcttctcccggtggggtactgaggagcctgggctgcagctgccgagccgccacagcca

SEQ ID NO: 287260 - DNA, 73 bp, Homo sapiens; identical to SEQ ID NO: 202148
  chr10:79606676-79606749
  hyper

SEQ ID NO: 287261 - DNA, 220 bp, Homo sapiens; identical to SEQ ID NO: 202149
  chr10:79685704-79685924
  hyper

SEQ ID NO: 287262 - DNA, 45 bp, Homo sapiens; identical to SEQ ID NO: 223849
  chr10:79686268-79686313
  hyper

SEQ ID NO: 287263 - DNA, 469 bp, Homo sapiens; identical to SEQ ID NO: 223850
  chr10:79686575-79687044
  hyper

SEQ ID NO: 287264 - DNA, 34 bp, Homo sapiens; identical to SEQ ID NO: 234856
  chr10:79793411-79793445
  hyper

SEQ ID NO: 287265 - DNA, 115 bp, Homo sapiens; identical to SEQ ID NO: 202151
  chr10:80733746-80733861
  hyper

SEQ ID NO: 287266 - DNA, 115 bp, Homo sapiens; identical to SEQ ID NO: 202152
  chr10:80827233-80827348
  hyper

SEQ ID NO: 287267 - DNA, 407 bp, Homo sapiens
  chr10:80828532-80828939
  hyper
aaaggggaaagagagcgcagagcgcgagccaagccgagcgccggcagcggcggcggcgcggcgcggcgctccactccggcctgactccgcaccggcttttgcgggcggccggcggcgcggggccctttggaaatagaatagccaatgtaatctgacacttcaacttgctcggctccgggcgagttgattcacttactcaccccctaacgccgagttccttttcactgtctgtggacattaaaaaagcgagcggcggcggcgggcgccggggagagcgggcggccgggcggcaggcgggcgagcagcgatcgggcggccgagcgagcgagcaacgccggcgcagcgcggtgaccccagccccagccggcgcggagcaggagccggagccgagcggatctcggcgccct

SEQ ID NO: 287268 - DNA, 189 bp, Homo sapiens
  chr10:80830746-80830935
  hyper
ggcggctgggctggcggggtgagggcacggctcggccagcctttccctcctctctgctctgccacggacatttggagccctctgggtggacagcccagggcatgggagagtagggcccagccccaaagatttaaaagggcagtgggcggccgcctgtggaagcccctggctccgcgccgggtgcagagc

SEQ ID NO: 287269 - DNA, 146 bp, Homo sapiens; identical to SEQ ID NO: 119197
  chr10:81002562-81002708
  hyper

SEQ ID NO: 287270 - DNA, 57 bp, Homo sapiens; identical to SEQ ID NO: 234859
  chr10:81107046-81107103
  hyper

SEQ ID NO: 287271 - DNA, 250 bp, Homo sapiens; identical to SEQ ID NO: 234860
  chr10:81107654-81107904
  hyper

SEQ ID NO: 287272 - DNA, 140 bp, Homo sapiens; identical to SEQ ID NO: 234861
  chr10:81204444-81204584
  hyper

SEQ ID NO: 287273 - DNA, 62 bp, Homo sapiens
  chr10:81664375-81664437
  hyper
agccatagtccattcgtccggagcacggtcactccggggtggccaggaccaaatgtgcctcc

SEQ ID NO: 287274 - DNA, 107 bp, Homo sapiens
  chr10:81741259-81741366
  hyper
ccgcctgggcaccccgaccttcgcggcccagatcctcccgccagcccagcccagggggagcgaggcgacggttgccgggaagcgcgcagcacccctccctcccattc

SEQ ID NO: 287275 - DNA, 349 bp, Homo sapiens; identical to SEQ ID NO: 202154
  chr10:81741931-81742280
  hyper

SEQ ID NO: 287276 - DNA, 322 bp, Homo sapiens; identical to SEQ ID NO: 234864
  chr10:81838726-81839048
  hyper

SEQ ID NO: 287277 - DNA, 98 bp, Homo sapiens; identical to SEQ ID NO: 234866
  chr10:81965474-81965572
  hyper

SEQ ID NO: 287278 - DNA, 146 bp, Homo sapiens; identical to SEQ ID NO: 202156
  chr10:82213597-82213743
  hyper

SEQ ID NO: 287279 - DNA, 102 bp, Homo sapiens
  chr10:83634159-83634261
  hyper
ccgggacccccgacgcagtctcccgcttccgtcccccacgctcaaccgggcagggcgccggggcgtgatttccgatcctctgcctgcttgttgggtccctcg

SEQ ID NO: 287280 - DNA, 260 bp, Homo sapiens
  chr10:83634499-83634759
  hyper
tgcacctcaccgcccgggctcgcggagcagccgccgaagatcgcggcggccaggcaggccctctgtgtcggaatgcgggtggcgggcacccggcaccccgcgaccggccgccggggccactgaaggcggcgcgaggcccaggcgcggcgcgagcgggcgccccagggagcgggctgggcgcggtgccccgaggatgtcggcgctcctggagcgcacgcaggcggcgggcagcagcagcagcagcgggcgcggggacccgg

SEQ ID NO: 287281 - DNA, 122 bp, Homo sapiens
  chr10:83634796-83634918
  hyper
cgccgctctctgaccgaccggaggcgccgggggcccgtctcgcccctcttccgagctccttaccgccccctccccggccccgtcccctcccccgctcctctcctccccgcccgccgcccgcc

SEQ ID NO: 287282 - DNA, 415 bp, Homo sapiens
  chr10:83635818-83636233
  hyper
ctggaccctgtctccctttcaggatgctgcctcctcttcttcctcttcttcctcctccgctaccaccaccacaccagaaactagcaccagccccaaatttcgtaagtaaacactgtgtctcaactatgatttactactgagtttcccttctgccctcctgctgtctttttccctcgccgcctgttttctagcaagccccctcccccatcccaggtttggggcagagtgagagctgattaaaactggccaccagcggggaagaaggtgccagcctgctctggttctgggggggtgggggcgtgtaggaacgggagggagattgtcaggctccactggccccactttagcgggtcccaagtgagaacagatctcccaactcccttcaaagggttaacgcgagtgcgatccctcctca

SEQ ID NO: 287283 - DNA, 85 bp, Homo sapiens
  chr10:83636388-83636473
  hyper
ggaagttatgtccttgtgtggggtgacgagttgatggagataatggtagaatgttgctgaggacgcttccagcagccctgacctg

SEQ ID NO: 287284 - DNA, 130 bp, Homo sapiens; identical to SEQ ID NO: 202159
  chr10:85899676-85899806
  hyper

SEQ ID NO: 287285 - DNA, 110 bp, Homo sapiens; identical to SEQ ID NO: 202160
  chr10:85954179-85954289
  hyper

SEQ ID NO: 287286 - DNA, 42 bp, Homo sapiens; identical to SEQ ID NO: 202161
  chr10:86088147-86088189
  hyper

SEQ ID NO: 287287 - DNA, 56 bp, Homo sapiens; identical to SEQ ID NO: 223859
  chr10:87493570-87493626
  hyper

SEQ ID NO: 287288 - DNA, 58 bp, Homo sapiens; identical to SEQ ID NO: 202162
  chr10:88124922-88124980
  hyper

SEQ ID NO: 287289 - DNA, 41 bp, Homo sapiens; identical to SEQ ID NO: 202163
  chr10:88149246-88149287
  hyper

SEQ ID NO: 287290 - DNA, 82 bp, Homo sapiens
  chr10:88224575-88224657
  hyper
ggggcaagacttcgtctcaaaaaaacaaacaaacaaacaaaaaaaagttttacatgtagcatacagacgatgtgatgacatg

SEQ ID NO: 287291 - DNA, 316 bp, Homo sapiens; identical to SEQ ID NO: 234876
  chr10:88281851-88282167
  hyper

SEQ ID NO: 287292 - DNA, 212 bp, Homo sapiens
  chr10:88294492-88294704
  hyper
ccattcctctgatgcgcccctagcctggcccatagtttgggttgtttgggcagccctgcagattccctgagctgaggggcctctctctggagagtgggaaagaattctggcctttgtgtaactggctttattatgtatgaatgttggctcccttggttgaaaaatgatcactctattgggttctcccagcttgaggcgaaaccttttggaag

SEQ ID NO: 287293 - DNA, 383 bp, Homo sapiens; identical to SEQ ID NO: 202164
  chr10:88515316-88515699
  hyper

SEQ ID NO: 287294 - DNA, 49 bp, Homo sapiens
  chr10:88731054-88731103
  hyper
gagtggggcgctgccgcccggcggggtcccgccccgccactccccgggg

SEQ ID NO: 287295 - DNA, 176 bp, Homo sapiens
  chr10:88731133-88731309
  hyper
gagaacgaagcacggttgtggggggggcatgcacgtgcgcgctcgcgtgcgggagacccctcccttccacaccacttcctttcgggacaaaccggtaacctccggccctggaaggttttgtctagtgggttccggatggactggtgttcccagcacccccccggcacgtgtccacg

SEQ ID NO: 287296 - DNA, 179 bp, Homo sapiens; identical to SEQ ID NO: 234879
  chr10:88853594-88853773
  hyper

SEQ ID NO: 287297 - DNA, 113 bp, Homo sapiens; identical to SEQ ID NO: 234880
  chr10:89265586-89265699
  hyper

SEQ ID NO: 287298 - DNA, 469 bp, Homo sapiens; identical to SEQ ID NO: 234881
  chr10:89577722-89578191
  hyper

SEQ ID NO: 287299 - DNA, 431 bp, Homo sapiens
  chr10:89621328-89621759
  hyper
actctcagcatttccgaatcagctctctcacggtgacaggtcagcccaatcggggctgtaaacagacttgacaggtttgttctgggctgacggccattgactaggttctcagaccagataagtcacttggctgagtccacagtaggtggggcgcgctcaccagctcaggggtagtgactggacgtttgttgcaacatcggagaatgcacgctctgggctgcagcaggagataccctcaagcacagaaccaaaagggttcaccctaagcggcagggcatcagcgatggagaggcccgagagccctagcgcccagctccttttcccacgtttgggaaggcgcagaataggtcgatgtagagcaaggagtgagtctcaggtctcagtcctttggcttgctcttagggtagcaggcgaggagtggcaccagtttg

SEQ ID NO: 287300 - DNA, 148 bp, Homo sapiens; identical to SEQ ID NO: 202167
  chr10:89621836-89621984
  hyper

SEQ ID NO: 287301 - DNA, 867 bp, Homo sapiens; identical to SEQ ID NO: 202168
  chr10:89621985-89622852
  hyper

SEQ ID NO: 287302 - DNA, 232 bp, Homo sapiens; identical to SEQ ID NO: 234883
  chr10:89623143-89623375
  hyper

SEQ ID NO: 287303 - DNA, 57 bp, Homo sapiens; identical to SEQ ID NO: 202169
  chr10:90342573-90342630
  hyper

SEQ ID NO: 287304 - DNA, 174 bp, Homo sapiens; identical to SEQ ID NO: 234885
  chr10:90639670-90639844
  hyper

SEQ ID NO: 287305 - DNA, 53 bp, Homo sapiens; identical to SEQ ID NO: 234886
  chr10:90735036-90735089
  hyper

SEQ ID NO: 287306 - DNA, 156 bp, Homo sapiens; identical to SEQ ID NO: 234887
  chr10:90749778-90749934
  hyper

SEQ ID NO: 287307 - DNA, 79 bp, Homo sapiens; identical to SEQ ID NO: 47395
  chr10:90750154-90750233
  hyper

SEQ ID NO: 287308 - DNA, 183 bp, Homo sapiens
  chr10:90750730-90750913
  hyper
ggcgcgggacgcgtgcgggattgcggcggcagcggcgcacgcgggcacctgggagcggcgggctgctgcgggaggcgttggagactggctcccgggggctgttaggaccttccctcaggcccgggtgctcagaacgctggaggacttgcttttcttgggccttgatgcgaagtgctgaccccg

SEQ ID NO: 287309 - DNA, 250 bp, Homo sapiens; identical to SEQ ID NO: 234892
  chr10:91403631-91403881
  hyper

SEQ ID NO: 287310 - DNA, 273 bp, Homo sapiens; identical to SEQ ID NO: 234893
  chr10:91461093-91461366
  hyper

SEQ ID NO: 287311 - DNA, 81 bp, Homo sapiens
  chr10:92617016-92617097
  hyper
cgaagggcatgaccgccacagccaccgagaggtcggccagcgccagggacacgatcaggtagttggagggctggcggagct

SEQ ID NO: 287312 - DNA, 508 bp, Homo sapiens
  chr10:92617539-92618047
  hyper
gcccgcgccgaccgctggggggcgcctggctctgtctcggagccccgcactccccggacccccggccgctgcgggtaacgcggcagcgcggcctcacggggactccctgcgggaggcgcttcggcccccgacggacgcctgggacgcgcggagtcgagggagctcgggctgggctccgctggcagctccacagttcgcagcagcagctcggctgcgccgagagcgcccgggcggcagcggcagaagttgcggagtgcgccccgcccctcgcgcccgccgccgccgccgccgccgccgccgctcccctgcggcagccgcgccgcgtccccgccgccgccgcctccggccgctgcccgctccctcgcgctcctgggacgggatacccgggctgggcaggcaccgccgcctctcccgcgcctccctactgtgagggggcggcgctgcacgcgcctcccgggatcccgggtcccctcgcccgggaagctgtccttgccgcatgatagatact

SEQ ID NO: 287313 - DNA, 79 bp, Homo sapiens
  chr10:92618077-92618156
  hyper
cacactagtcagccacagttcagtgggggcatttttcttttgttaagaggcctaatgagccagcggatgtttgggctca

SEQ ID NO: 287314 - DNA, 219 bp, Homo sapiens; identical to SEQ ID NO: 234897
  chr10:92631512-92631731
  hyper

SEQ ID NO: 287315 - DNA, 177 bp, Homo sapiens; identical to SEQ ID NO: 234898
  chr10:92979925-92980102
  hyper

SEQ ID NO: 287316 - DNA, 356 bp, Homo sapiens; identical to SEQ ID NO: 234899
  chr10:92980921-92981277
  hyper

SEQ ID NO: 287317 - DNA, 49 bp, Homo sapiens; identical to SEQ ID NO: 202174
  chr10:93393014-93393063
  hyper

SEQ ID NO: 287318 - DNA, 33 bp, Homo sapiens; identical to SEQ ID NO: 202175
  chr10:93557957-93557990
  hyper

SEQ ID NO: 287319 - DNA, 78 bp, Homo sapiens; identical to SEQ ID NO: 202176
  chr10:93647662-93647740
  hyper

SEQ ID NO: 287320 - DNA, 66 bp, Homo sapiens; identical to SEQ ID NO: 234903
  chr10:93669233-93669299
  hyper

SEQ ID NO: 287321 - DNA, 188 bp, Homo sapiens; identical to SEQ ID NO: 202177
  chr10:94000529-94000717
  hyper

SEQ ID NO: 287322 - DNA, 230 bp, Homo sapiens; identical to SEQ ID NO: 234905
  chr10:94051615-94051845
  hyper

SEQ ID NO: 287323 - DNA, 319 bp, Homo sapiens; identical to SEQ ID NO: 234907
  chr10:94333923-94334242
  hyper

SEQ ID NO: 287324 - DNA, 83 bp, Homo sapiens; identical to SEQ ID NO: 234908
  chr10:94352686-94352769
  hyper

SEQ ID NO: 287325 - DNA, 79 bp, Homo sapiens
  chr10:94449318-94449397
  hyper
gcagaggtgcctcggggccgcggacagggccgctggagcccgcactccagaaggcggtcttcctcgcgcctcccccgac

SEQ ID NO: 287326 - DNA, 643 bp, Homo sapiens
  chr10:94450726-94451369
  hyper
gttcatttcctctgtgtgggatgtgactttatggcagctaaaataaccagttgcttcctattttttttcgaggctgttttgcaccagtctgaagcctgacgcaagcaaaatctcgaaaaaacaatgctagctttcaaagcgttgaggtgcaggcctgcagacggacggacggaccgaccgacactactttgggagtaggaagcagcagctcctggtcgccagttaggaagggaagcagggacacatagggcatatattccagaacttcggggcttgtcccctcaatgtgcggcctaacaaataagccgcccgtggtccgcgctgtgggtgacccttggcgccttcgaggtctggagccctagggtaaataaggaaacggggcgcctctagagttttaaatgaactctgttattggaagcttcagtagggaccctgaaaacaattaacgtcttaattagcattttaatgtctccattattacggcgcgggctctagctcagccctttaccttaccttctcaccgttaacaggggagggggattgtatttttagttcatctttttatgtttttgagttgttatcctgtctgtctgattccagcctcgagggtttgatgatgcggcccgagcctggctgtggtcgc

SEQ ID NO: 287327 - DNA, 155 bp, Homo sapiens; identical to SEQ ID NO: 234911
  chr10:94459542-94459697
  hyper

SEQ ID NO: 287328 - DNA, 340 bp, Homo sapiens; identical to SEQ ID NO: 234912
  chr10:94607752-94608092
  hyper

SEQ ID NO: 287329 - DNA, 233 bp, Homo sapiens; identical to SEQ ID NO: 202182
  chr10:94831377-94831610
  hyper

SEQ ID NO: 287330 - DNA, 283 bp, Homo sapiens
  chr10:94832388-94832671
  hyper
ctcccattaggggtcggtagagccctgagtttagggccgagcaccccctcacctggatgaggacagtggctttactctgggtgggacttgggagagaggaggaggactccagtgcccggtgtaccggacacccaggtaacgcagtctaccgtgcctggagctgggaagagtagttgcaaccggagcccccttttgggaactcactaccctgaggcttagacaggtcgggaatgatcgcctcccggttaaggaggaggaaacaggcacagtgatgtgtggtgac

SEQ ID NO: 287331 - DNA, 143 bp, Homo sapiens
  chr10:94832701-94832844
  hyper
gccgggcctcggagccaggactcctgggctccccttcctcttataccgtctctttatcctgccagggctaaggacccccttccctgctgtccagctggggcgccaagcagcagggccctccgaataggcgagctgtgcttgga

SEQ ID NO: 287332 - DNA, 384 bp, Homo sapiens
  chr10:94833649-94834033
  hyper
gctggcggcggcggcaggtggcgcgggaggtcgcggcgcgccatggggctcccggcgctgctggccagtgcgctctgcaccttcgtgctgccgctgctgctcttcctggctgcgatcaagctctgggacctgtactgcgtgagcggccgcgaccgcagttgtgccctcccattgccccccgggactatgggcttccccttctttggggaaaccttgcagatggtactgcaggtaagggagggtggggcgggacaggctgcttccccggagcccggcgcggctctgggcttctgctgaagtcggggtaggcgcccccgggaggcatgctattgcggctaggagcagggctggcgggagcgcggcgctccccggcgccccctcatg

SEQ ID NO: 287333 - DNA, 205 bp, Homo sapiens; identical to SEQ ID NO: 234919
  chr10:95242142-95242347
  hyper

SEQ ID NO: 287334 - DNA, 791 bp, Homo sapiens
  chr10:95326192-95326983
  hyper
ctggcttctggatacactttcaaagggccagagggcacgaggcttccgccttggccgccacctccccggccagctgcggtgttcgcggccagtgttgccgggcacttcctggttcccgcgcgccccgggtgcagctccctgcacccagtgctggcgctcctcagaagggagggggccagaggcgagatgtcgcaaccgcctccctccctctttccccgccttggcactcagtcgcctcccagatgagcactctctcagaccgctgcgggccgccaggcgccgggaatgtcccctgaatgcgcgcgggcagcgggcgacgcgcccttgcgcagcctggagcaagccaaccgcacccgctttcccttcttctccgacgtcaagggcgaccaccggctggtgctggccgcggtggagacaaccgtgctggtgctcatctttgcagtgtcgctgctgggcaacgtgtgcgccctggtgctggtggcgcgccgacgacgccgcggcgcgactgcctgcctggtactcaacctcttctgcgcggacctgctcttcatcagcgctatccctctggtgctggccgtgcgctggactgaggcctggctgctgggccccgttgcctgccacctgctcttctacgtgatgaccctgagcggcagcgtcaccatcctcacgctggccgcggtcagcctggagcgcatggtgtgcatcgtgcacctgcagcgcggcgtgcggggtcctgggcggcgggcgcgggcagtgctgctggcgctcatctggggctattcggcggtcgc

SEQ ID NO: 287335 - DNA, 141 bp, Homo sapiens
  chr10:95360575-95360716
  hyper
cagcaggggtttggcgtccgggggcgcacggcgggccgcggggagggcggggatggggtggggacctgggccgcctgggccccctgggccgatacctacgcgagccttgtcgaagttctccttgactcggaagctgctcac

SEQ ID NO: 287336 - DNA, 409 bp, Homo sapiens
  chr10:95360750-95361159
  hyper
gccgccaacagcaagagcgcccacacccacttcatcttgcccaggaatccgccctgcgggagacgcgcctccgtcagtgcccggcagccgacccccgccgccgtatcccacctcaccccaccccaccccaccccggcccatcccgccgccggccccgaggccccggccgcgactcaccaccgggaggggaaccgcgcgcaagcctggccgccgagtccgggcgcgcgtggagcgagggaggcgagcgcgccgcggccgccccgctgctttatagcgccggggggagggggtcgcgctttcgtaaccgcgcggggtgaaagaccgaaggggaggcgccgggggcacttgcataacgcgccctgactcaccggagcccgggcacgggcagggtccctgtgggccggcctca

SEQ ID NO: 287337 - DNA, 126 bp, Homo sapiens
  chr10:95753358-95753484
  hyper
gtgtgcagagttcccgcccttcccggagccgggcgccccaggagcgctctctctggctcccgccagaaaggatggctcctaggggtcagggccaggggtctgggaaggggtcgcgccgccagcagc

SEQ ID NO: 287338 - DNA, 372 bp, Homo sapiens
  chr10:95753760-95754132
  hyper
gcaacgcggcgggcggcgggctcgcgcggcgggaggggcagcggcggcgcgcccgggctctacctcccgggctctgcctcccgggctctgcctctcgggcacttgcctggctcctgcgcgttcctgggcatcggctctgcagctgacacacagtagcggggacacccgacgccgctagcgacaggcgcgcggacggctggtcccagagggacgctgcgcttggggacgccggcgagactcgccaggagccaagaggtgaggaagcgactctgtagctcggttcctgaggactggagaaagggaaggatgggctggttctctcccaaggcagtcgacccgcctaagggagcagcccgactccgcgtacctggc

SEQ ID NO: 287339 - DNA, 57 bp, Homo sapiens; identical to SEQ ID NO: 202188
  chr10:95754214-95754271
  hyper

SEQ ID NO: 287340 - DNA, 151 bp, Homo sapiens; identical to SEQ ID NO: 202189
  chr10:96122665-96122816
  hyper

SEQ ID NO: 287341 - DNA, 1666 bp, Homo sapiens
  chr10:96161937-96163603
  hyper
ggaaggacttacccacgctaacacctcccaaatatgggagtattttactaccataaatgaaatacatcaagtgaatttttgctaagcgagcaatacccgcgcttcggtaagaactgtcacgcttagagcgggccaaccagcttccaccatccagatggcggatcctagattggcagcctgcgtctctctagctaccgtctctatggttcggggaatctccaggtcggggcttgaccggtccgacttttgcgcgtgcgcgagtcctggcgcgtgcccgccctcaagcaactgtccgacccagcgggtgggaggggtgggtctgggaacgttgcggcggctgtcgccgcggccccagcacccagagctgttctctggccaagcctgcgcctgtagtccttctttgcctcctggggcggccgccacccacccccagatggtgggtccggaggatgccggagcctgctcgggaagaaaccccaagttgctcccggtgcctgcgccggaccccgtgggccaggacaggaaggtaatccgggccacgggcggctttggcggaggcgtcggcgctgtggagccgccggaggaggctgacgaggaggaggaggctgacgaggaggaggagacgccgcctcggcagctccttcagcgttacctcgcggcggccggggagcagctggagccggggctctgctactgtccgctccccgctggccaggccggcgccccgccgccctcggcagccccacgatcggacgcctgcctgctgggctcgggctccaaacaccgcggcgcggaggtggctgatggccgcgcgccgcggcacgaaggcatgaccaacggcgactcgggttttctgccgggccgggactgtcgcgatctggaagaggctcgcgggctggcgcgcgccggcggccgggagtcgcgccgccgccgcccctacggccgccttcgcctggaggggcctggcgacgaggacgcggacggcgcgggaagcccgtccgattgggcctctccgcttgaggacccgctgcggagctgctgcctggtggccgcggacgcccaggagcccgagggcgcgggcagcgactcgggggacagccccgccagcagctgcagcagtagcgaggactcagagcagcggggagtcggcgccgggggtcccgaggagggcgcgccccctgccacctcggccgagaggactaatgggggtgcggagccgcgcctgggcttttctgacattcacttcaactctcgcaacacgttccaggtgagccgcggtcagagcgcccgcgatcacctgcccccggcggggccgccggtgcccttgcccgccgcggagcagggtcctgcgggggcttcggcccgggctcgacggagtggcggcttcgcggacttcttcaccaggtacagcgcaggctgcatgggactcggggcgggtccggggccggggccggagccggggtcttggtgggagtcggagccggagccggagccggagcggagagcttggtcggccgcttccgtgccagccccacacgcgtcaggacttagctttgatttgtcactggaggaagaggaactgggtcggctttgtgtttctataggagaagttgtgagctctgtggacagcgagtctttctgttgccttgtccgcgggaggctgtac

SEQ ID NO: 287342 - DNA, 189 bp, Homo sapiens
  chr10:97051016-97051205
  hyper
cctgtacgcacggccgcaccgcggctctcgggcccggggcgggtgctaggtgagagggaagcaggtcctgacagcgagacaaactcgcgcctcgtgctttgtaaaacgagaaatttgaagtgctgtgccaagtcagccctctgaggtcggctccgacttcccatttgctttttgtaatcggtaatgatg

SEQ ID NO: 287343 - DNA, 267 bp, Homo sapiens; identical to SEQ ID NO: 202192
  chr10:97055029-97055296
  hyper

SEQ ID NO: 287344 - DNA, 191 bp, Homo sapiens; identical to SEQ ID NO: 202193
  chr10:97321201-97321392
  hyper

SEQ ID NO: 287345 - DNA, 144 bp, Homo sapiens; identical to SEQ ID NO: 234928
  chr10:97416708-97416852
  hyper

SEQ ID NO: 287346 - DNA, 1214 bp, Homo sapiens; identical to SEQ ID NO: 234929
  chr10:97802913-97804127
  hyper

SEQ ID NO: 287347 - DNA, 104 bp, Homo sapiens; identical to SEQ ID NO: 234930
  chr10:98135071-98135175
  hyper

SEQ ID NO: 287348 - DNA, 237 bp, Homo sapiens; identical to SEQ ID NO: 202194
  chr10:98272408-98272645
  hyper

SEQ ID NO: 287349 - DNA, 723 bp, Homo sapiens
  chr10:98272768-98273491
  hyper
tgcccgctgtgacgcttttctttttaaaatctcccaagagtaaccacagatcttgggaaactttgcgcgaaacttaaaaatgctgtgaaatcggagccaggaactccatctgagcctcggagcgccgcgcccagtccagctcttctgctccggcccggagcgtctggcggtggccagtgctgcccactcgctgtcaggcggccctggcacccaccccggcccctgggcgccctctcggcctctggcacccgctctgattcgctttgggaacgcgccagctgtcgccccccggtgcgcaccgcaaacctggggccgggacatcccagcctcggagtggtttttaagcaattcctcggaggcattgtcttccgggggagccggggatctcaggggaggggaggggagacccgccccatagacggtagtgcaggcttgcccaccacctcatttgcatttcaaaggcaaacttctgcgggacttccccagcggcggcacctaccggctttgcaagggtcgtggtaatgctccagctgctgctccgtgccctcctcgccgtccagctctgagtagtctgcggtggcgtccgggcgctccccgagtcccccggcgccgcgaggcagcggcagcagcagcagcagtgacaccagggccccaagtgcagtcgcccggggcatggtggcgcggggccggctggggcagagggagttgcgtgcacgaaagctc

SEQ ID NO: 287350 - DNA, 37 bp, Homo sapiens; identical to SEQ ID NO: 202196
  chr10:98273889-98273926
  hyper

SEQ ID NO: 287351 - DNA, 31 bp, Homo sapiens; identical to SEQ ID NO: 234933
  chr10:98347034-98347065
  hyper

SEQ ID NO: 287352 - DNA, 761 bp, Homo sapiens; identical to SEQ ID NO: 234934
  chr10:98479728-98480489
  hyper

SEQ ID NO: 287353 - DNA, 228 bp, Homo sapiens; identical to SEQ ID NO: 223880
  chr10:98593370-98593598
  hyper

SEQ ID NO: 287354 - DNA, 47 bp, Homo sapiens; identical to SEQ ID NO: 234935
  chr10:98841573-98841620
  hyper

SEQ ID NO: 287355 - DNA, 37 bp, Homo sapiens; identical to SEQ ID NO: 202198
  chr10:98945010-98945047
  hyper

SEQ ID NO: 287356 - DNA, 220 bp, Homo sapiens; identical to SEQ ID NO: 202199
  chr10:98945252-98945472
  hyper

SEQ ID NO: 287357 - DNA, 60 bp, Homo sapiens; identical to SEQ ID NO: 202200
  chr10:98945746-98945806
  hyper

SEQ ID NO: 287358 - DNA, 94 bp, Homo sapiens; identical to SEQ ID NO: 119391
  chr10:98956313-98956407
  hyper

SEQ ID NO: 287359 - DNA, 214 bp, Homo sapiens; identical to SEQ ID NO: 234939
  chr10:99052454-99052668
  hyper

SEQ ID NO: 287360 - DNA, 123 bp, Homo sapiens; identical to SEQ ID NO: 202201
  chr10:99080677-99080800
  hyper

SEQ ID NO: 287361 - DNA, 34 bp, Homo sapiens; identical to SEQ ID NO: 234942
  chr10:99093445-99093479
  hyper

SEQ ID NO: 287362 - DNA, 49 bp, Homo sapiens; identical to SEQ ID NO: 234943
  chr10:99185972-99186021
  hyper

SEQ ID NO: 287363 - DNA, 228 bp, Homo sapiens; identical to SEQ ID NO: 234944
  chr10:99258429-99258657
  hyper

SEQ ID NO: 287364 - DNA, 336 bp, Homo sapiens; identical to SEQ ID NO: 223881
  chr10:99259373-99259709
  hyper

SEQ ID NO: 287365 - DNA, 84 bp, Homo sapiens; identical to SEQ ID NO: 234945
  chr10:99400380-99400464
  hyper

SEQ ID NO: 287366 - DNA, 122 bp, Homo sapiens; identical to SEQ ID NO: 223882
  chr10:99447292-99447414
  hyper

SEQ ID NO: 287367 - DNA, 231 bp, Homo sapiens; identical to SEQ ID NO: 234946
  chr10:99473543-99473774
  hyper

SEQ ID NO: 287368 - DNA, 110 bp, Homo sapiens
  chr10:99474283-99474393
  hyper
tccactgtcgcccgcgcccgggaaccctgacgctcagctcccgcccgacggcagcgccgccgccgcccagaatcccagcccagaatcccgaccgccgcgccggacgcgcc

SEQ ID NO: 287369 - DNA, 76 bp, Homo sapiens
  chr10:99474467-99474543
  hyper
cctcgcggttcctcttcccttccctgctgagactaagacgtggacaggggccgcgcagatccgggggaggctccca

SEQ ID NO: 287370 - DNA, 71 bp, Homo sapiens; identical to SEQ ID NO: 202203
  chr10:99496833-99496904
  hyper

SEQ ID NO: 287371 - DNA, 195 bp, Homo sapiens
  chr10:99530902-99531097
  hyper
gcgggggataattccggggacgctgggctgagctaggacagcgtgtgtgtgtgtgtgtgggcggagggggggagctgcacctcttggggggttcgcagagctgtgctaggggagctgcagggccgtcggagcgcgcggggacggcggcggcggcgctacctggaggcgcggtggcgggcaggtgcccgaactgca

SEQ ID NO: 287372 - DNA, 36 bp, Homo sapiens
  chr10:99789563-99789599
  hyper
gaatgcctgaagccggcttgcctcaggcagcctgaa

SEQ ID NO: 287373 - DNA, 123 bp, Homo sapiens; identical to SEQ ID NO: 234952
  chr10:99894650-99894773
  hyper

SEQ ID NO: 287374 - DNA, 43 bp, Homo sapiens; identical to SEQ ID NO: 202204
  chr10:100206321-100206364
  hyper

SEQ ID NO: 287375 - DNA, 47 bp, Homo sapiens; identical to SEQ ID NO: 234954
  chr10:100206738-100206785
  hyper

SEQ ID NO: 287376 - DNA, 176 bp, Homo sapiens
  chr10:100991731-100991907
  hyper
tgcatctacaccccgcaggaacagcctgttaagcagtttgggctaccagctctcagcctccaagacagccgcccagcaaaaggccggcagctgggtgagaacaacctggagaaccccctttgcgcaatgaggtcaggagttccacactgcagtgtctcctcatctgaagcttccaa

SEQ ID NO: 287377 - DNA, 35 bp, Homo sapiens; identical to SEQ ID NO: 202205
  chr10:100992007-100992042
  hyper

SEQ ID NO: 287378 - DNA, 142 bp, Homo sapiens
  chr10:100992740-100992882
  hyper
cccacaaacctccgtgcaggaggtgaaacctgccttgtttctctcagaccaggcccggcgcctgagcttaagtggattcctactttctttcttttaatgtccgagttgattttcctttttcactatattgtaaaaactgcat

SEQ ID NO: 287379 - DNA, 206 bp, Homo sapiens
  chr10:100992916-100993122
  hyper
ggtaaaccctcgcctttccaagaacacttctccactcccgcaccaccaccaccaccaccacacacacacacagtaaaggcaaagtctctttggcccctgaaataattccgcctgatctcaggaaaggtaacatcctcctccccaccccacccccgagttaggctccatctttcttctttcccacttggggccgtttggaaccgcta

SEQ ID NO: 287380 - DNA, 39 bp, Homo sapiens; identical to SEQ ID NO: 202206
  chr10:100993448-100993487
  hyper

SEQ ID NO: 287381 - DNA, 145 bp, Homo sapiens; identical to SEQ ID NO: 202207
  chr10:100994695-100994840
  hyper

SEQ ID NO: 287382 - DNA, 56 bp, Homo sapiens; identical to SEQ ID NO: 202208
  chr10:101089476-101089532
  hyper

SEQ ID NO: 287383 - DNA, 236 bp, Homo sapiens; identical to SEQ ID NO: 202209
  chr10:101089565-101089801
  hyper

SEQ ID NO: 287384 - DNA, 93 bp, Homo sapiens; identical to SEQ ID NO: 202210
  chr10:101190597-101190690
  hyper

SEQ ID NO: 287385 - DNA, 332 bp, Homo sapiens; identical to SEQ ID NO: 202211
  chr10:101279840-101280172
  hyper

SEQ ID NO: 287386 - DNA, 31 bp, Homo sapiens
  chr10:101283150-101283181
  hyper
tcagaaggcggggacgagggctggcagcccc

SEQ ID NO: 287387 - DNA, 159 bp, Homo sapiens
  chr10:101295603-101295762
  hyper
ggcttcggatcgcagctcactcgaggcctggggaaggggactcaggggcgaggaggatgactgggtccggtcgccaggactgtctctgaggcagaaacgccggctgggcgccggggaggacgatggccccgaccctggcagcgagaggagaccaggagg

SEQ ID NO: 287388 - DNA, 219 bp, Homo sapiens; identical to SEQ ID NO: 234966
  chr10:101295810-101296029
  hyper

SEQ ID NO: 287389 - DNA, 264 bp, Homo sapiens
  chr10:101296800-101297064
  hyper
ccttgtcacttgcggagaatgcctgtgcgaggcctgtgctgccacacggccgattgtgagcgtgccaaggcgggtgaatggggaggcctcagagcgccgcgccattgtggggccgggcctcgctgaaaggcggctccgggccgggaaggtgcggaaagaatggctttttattggagtcccgaacaaaaggtgtggtaggaaggcgaggtcccctgcgcgaacaaaaaccccagcgcgtcggattgacgtcccccccgagctccc

SEQ ID NO: 287390 - DNA, 236 bp, Homo sapiens
  chr10:101297130-101297366
  hyper
gggttttgttccccactttttgtgctctgggggagggggcggcagggggacgggggctgggcgggcagcagggaggggcgcgctgattaggccgggccggccggggcgctgagacgttcagcgggagtcggcggcctgaatgctgggtcattattgctacaagtttagcaatttctcccttacaggagggggtggggctgctaggctgtggcggggccgcccggctggggagctgt

SEQ ID NO: 287391 - DNA, 111 bp, Homo sapiens; identical to SEQ ID NO: 202212
  chr10:101381346-101381457
  hyper

SEQ ID NO: 287392 - DNA, 55 bp, Homo sapiens; identical to SEQ ID NO: 234970
  chr10:101491584-101491639
  hyper

SEQ ID NO: 287393 - DNA, 501 bp, Homo sapiens; identical to SEQ ID NO: 234971
  chr10:101945663-101946164
  hyper

SEQ ID NO: 287394 - DNA, 388 bp, Homo sapiens; identical to SEQ ID NO: 234972
  chr10:102046129-102046517
  hyper

SEQ ID NO: 287395 - DNA, 190 bp, Homo sapiens; identical to SEQ ID NO: 234973
  chr10:102106582-102106772
  hyper

SEQ ID NO: 287396 - DNA, 364 bp, Homo sapiens; identical to SEQ ID NO: 234974
  chr10:102132968-102133332
  hyper

SEQ ID NO: 287397 - DNA, 52 bp, Homo sapiens; identical to SEQ ID NO: 234975
  chr10:102133791-102133843
  hyper

SEQ ID NO: 287398 - DNA, 220 bp, Homo sapiens
  chr10:102321812-102322032
  hyper
acctggaaattgggacctcacgcaccatatttcccgcgctctcccctgggacgtgccgtccctgctgcagtcgcagcgtggcgccctcgctccacgcagggatcctgagccaatggcggaagcggagtgcgcggcgaggtcgcagttgcgtttctcgcactccccactgcggggagcccgtgggccccgcactgcagggaagctgccggcccaggtctcc

SEQ ID NO: 287399 - DNA, 705 bp, Homo sapiens; identical to SEQ ID NO: 234978
  chr10:102415928-102416633
  hyper

SEQ ID NO: 287400 - DNA, 98 bp, Homo sapiens; identical to SEQ ID NO: 202216
  chr10:102441134-102441232
  hyper

SEQ ID NO: 287401 - DNA, 247 bp, Homo sapiens; identical to SEQ ID NO: 202217
  chr10:102469792-102470039
  hyper

SEQ ID NO: 287402 - DNA, 210 bp, Homo sapiens
  chr10:102473073-102473283
  hyper
cttttcgccatagccggaaataccactgttggatccaccttctgcgccccaggcctccccagcctccgtacccaggaggcagccagcttagcagggtaggcatgtgggtggcccaccagctcctggaatggagcgtactccgtttctggggaggttccccgcgtcctgcctggagtctagaagggagcggggaagtgaccagcactagat

SEQ ID NO: 287403 - DNA, 92 bp, Homo sapiens; identical to SEQ ID NO: 202218
  chr10:102475169-102475261
  hyper

SEQ ID NO: 287404 - DNA, 385 bp, Homo sapiens; identical to SEQ ID NO: 202219
  chr10:102489864-102490249
  hyper

SEQ ID NO: 287405 - DNA, 330 bp, Homo sapiens; identical to SEQ ID NO: 202220
  chr10:102490316-102490646
  hyper

SEQ ID NO: 287406 - DNA, 429 bp, Homo sapiens; identical to SEQ ID NO: 202221
  chr10:102490715-102491144
  hyper

SEQ ID NO: 287407 - DNA, 101 bp, Homo sapiens; identical to SEQ ID NO: 234991
  chr10:102497995-102498096
  hyper

SEQ ID NO: 287408 - DNA, 60 bp, Homo sapiens
  chr10:102498764-102498824
  hyper
cacgcggacacacacacacacacacacacacacacacacacacggcccccatagccaccg

SEQ ID NO: 287409 - DNA, 135 bp, Homo sapiens; identical to SEQ ID NO: 202222
  chr10:102501591-102501726
  hyper

SEQ ID NO: 287410 - DNA, 181 bp, Homo sapiens
  chr10:102504567-102504748
  hyper
cgattctgaaccaagcgttctggactgcccagacccggtgggcaaggggactggggaggccctgcgcacagtcgcgtggaacgggaggggacaagacaaactgctggacacttttccgtggaatgagaagtggggggtgcgtgggtgggaaggtacctccggagggaaaggccaaagggaa

SEQ ID NO: 287411 - DNA, 112 bp, Homo sapiens; identical to SEQ ID NO: 234995
  chr10:102505252-102505364
  hyper

SEQ ID NO: 287412 - DNA, 287 bp, Homo sapiens
  chr10:102507993-102508280
  hyper
gtaacgcgagttctcccggggcctaaattattgatggtcggggtttggagggaggggagggtgagaagtggggctagagatagggagattaacggggtgggcaagggggtaaaagaaggggcttcagtctctcccagcaacgcgatcagaggtctttccccagggtttcaccgagcttgctctaggtaccccccgagaaagggaggggagagaaatgaggggggcacagatgtccccgctttctccgaaactcgcgtgaggctagcggggcaggggctgcagcttgc

SEQ ID NO: 287413 - DNA, 257 bp, Homo sapiens; identical to SEQ ID NO: 202223
  chr10:102585797-102586054
  hyper

SEQ ID NO: 287414 - DNA, 109 bp, Homo sapiens; identical to SEQ ID NO: 202224
  chr10:102587493-102587602
  hyper

SEQ ID NO: 287415 - DNA, 163 bp, Homo sapiens; identical to SEQ ID NO: 202225
  chr10:102587906-102588069
  hyper

SEQ ID NO: 287416 - DNA, 77 bp, Homo sapiens; identical to SEQ ID NO: 202226
  chr10:102588175-102588252
  hyper

SEQ ID NO: 287417 - DNA, 160 bp, Homo sapiens; identical to SEQ ID NO: 202227
  chr10:102588941-102589101
  hyper

SEQ ID NO: 287418 - DNA, 263 bp, Homo sapiens; identical to SEQ ID NO: 235002
  chr10:102671979-102672242
  hyper

SEQ ID NO: 287419 - DNA, 360 bp, Homo sapiens; identical to SEQ ID NO: 235003
  chr10:102746984-102747344
  hyper

SEQ ID NO: 287420 - DNA, 189 bp, Homo sapiens; identical to SEQ ID NO: 235004
  chr10:102758641-102758830
  hyper

SEQ ID NO: 287421 - DNA, 667 bp, Homo sapiens
  chr10:102791376-102792043
  hyper
agttctggaatggtcgcagggtggggcagctggtcccaggaccggaagaatcctaagaatccttctgatgcacttgctcggatgcagaccgcgaggttcctggggtcgtctgcccctccacatctcaggggtggggctacggtctggggtgcagggctaggggttgggagcgtaaggagaccagggacacagtggagctaggggttacagagggggagcagggagagggctggggacatagaagaggcacaggcacgacaggaacggggctgtgaagtgatgcgaatgccgcgctgctacaagaggagcttgtggatactggggtaggagcccagggggacaagcaagccaaaggccattgccaaggcagccatcaagtaaacaagccaggcggtaacccgagtccctcccggcgcgccagcagaggaccgcccctccacaccgcccacctgcgcccggggctttctctctgggcacctagaccgcttgctgcagggctgggggtctgctgaggcccgccaggggactgtaaaccaagggagcagcgcccgcggctccagcccctcctccctttggctggggagggggccagaactgatccccgaggtgggattggctctgggaagcagcttagggcctggtccaggtggcccaggctgggggcatc

SEQ ID NO: 287422 - DNA, 126 bp, Homo sapiens; identical to SEQ ID NO: 202230
  chr10:102792044-102792170
  hyper

SEQ ID NO: 287423 - DNA, 381 bp, Homo sapiens
  chr10:102802620-102803001
  hyper
tcaaagctaggctcggctccgcctccttcccgtttcccgagcaacggctttagtacctcaggccccgattctcgctcaccttccgggtcggagcctggaagctacgtctcagatccgccttcccgctgacctcgatcctgcgccgttaaatccaccaagtccccctccctcctttccaatatcgaaacccacgaattccctagcgccagccctttgacttcctgcccaaaaatccgcgaggttttcgaggaatcacgcgaggactctcctcctggatcccaagcccaggtttttttttcagctgcctctgaggctgttggctctttcttcggcgccgtcctcctcctttccctctctccacccttgcgcctaacagtccag

SEQ ID NO: 287424 - DNA, 403 bp, Homo sapiens; identical to SEQ ID NO: 235008
  chr10:102809890-102810293
  hyper

SEQ ID NO: 287425 - DNA, 598 bp, Homo sapiens; identical to SEQ ID NO: 223895
  chr10:102822296-102822894
  hyper

SEQ ID NO: 287426 - DNA, 204 bp, Homo sapiens; identical to SEQ ID NO: 235009
  chr10:102826290-102826494
  hyper

SEQ ID NO: 287427 - DNA, 120 bp, Homo sapiens; identical to SEQ ID NO: 202233
  chr10:102973524-102973644
  hyper

SEQ ID NO: 287428 - DNA, 221 bp, Homo sapiens
  chr10:102975334-102975555
  hyper
tctctgcctggggcctttcttggaccgatccatagggcctcgactggcttccacggcgcttgcaaattagagactctgatgcctcaaatttgtggggtcctgcctccagctcatccccctctcccgaggcttggcctaaaggcaccatccctgccactcctcaccccctgaattcagtcgggggcctgtgtggagggaaaggaaaacctggagagaccaag

SEQ ID NO: 287429 - DNA, 270 bp, Homo sapiens
  chr10:102975880-102976150
  hyper
acctgggaagggggtaggtggagcttgaaaggactctgggtctctctttgggaatgcaaagtcccctcaactctcctggccctcccatccgccccccacccgcgccagcgtgtggtagccccgagcctagcacgctgagatgtgggaaggtgtgggtctgcccagtgggtggccccgacagaacgaatccgaggtcctgggaggaattgggagacgtgaagagttgggtatctgccgccccaaggtggggccatccgcttggcagtttcg

SEQ ID NO: 287430 - DNA, 234 bp, Homo sapiens
  chr10:102976180-102976414
  hyper
tctagccagcccctgagagtccccgccccctccccgaggcccaaggtattagtgctgcttgatcagacctcatttcctgcgaaaatggaaacatatccagggtccttaataaagtgaatgacgaggcttcggtgtaattgggcttccgtttggtggctatttccttaaactgagagtggaaaaaaatgtaaactcacagcgctcagatgtaattatatgattatcaaaaggagt

SEQ ID NO: 287431 - DNA, 325 bp, Homo sapiens
  chr10:102976669-102976994
  hyper
ggggggtgggtgctggctacgagtcccctgaccgcctgcccggcccgcgtgcgctggctgcatatttctatgcataatccaattttctccgtgactatctagttaaactctttaacaacagctacataattagaatttggattcccattaattttccttgggcctcgaaccatttgcagctcacactggtaattaatgcgatacatcactaactttacccagcgcaggccggcccggctcaggtcgctcggccagcgcctggcgccctcgagcgggaccctgactcctgaccctgcttcccaggtgggagccgttttcctccttc

SEQ ID NO: 287432 - DNA, 180 bp, Homo sapiens; identical to SEQ ID NO: 235018
  chr10:102978304-102978484
  hyper

SEQ ID NO: 287433 - DNA, 71 bp, Homo sapiens
  chr10:102984234-102984305
  hyper
cgcctgcttagctgcgcgccccgcgggcgccgcagctcgggtgggctcagccctggggccgccgcccccag

SEQ ID NO: 287434 - DNA, 244 bp, Homo sapiens
  chr10:102984541-102984785
  hyper
tcaaattgtctacaaattgtgaagaaaattcaaaaaccatatggtcgccagcgccggcgcgctctgggctgcggagggccgcggccgtgcccgcaccgggagccgcggggggctgggcccggctattgtcgcctgtcagcggccgcccaggcccattcgtcccggccttcatggtccgcgctccgaattacagacccatccatcctaagagagggcaatttttgtcgcccgggaggaaccagcc

SEQ ID NO: 287435 - DNA, 246 bp, Homo sapiens
  chr10:102988365-102988611
  hyper
gccctgcgcgtgcttgtccgcggcggccagcaggtgcgccgccccgcacagcgagtaacttctccgcacagacggcttgttgaggatgtcctcgatgctgaacggcgtcagtggcttgttggagttggcaggcggaggcaggtggtccagcgggctgcgccgccgctcctcccccggcgccgccttgccgtcctccttggaagtcatctcggccttgttcggggtcccggccggggcggctcgggc

SEQ ID NO: 287436 - DNA, 46 bp, Homo sapiens; identical to SEQ ID NO: 202235
  chr10:102995973-102996019
  hyper

SEQ ID NO: 287437 - DNA, 245 bp, Homo sapiens; identical to SEQ ID NO: 235028
  chr10:102997850-102998095
  hyper

SEQ ID NO: 287438 - DNA, 35 bp, Homo sapiens
  chr10:103044414-103044449
  hyper
tcccctctatgggccccgcccgctgtgcaagggtg

SEQ ID NO: 287439 - DNA, 164 bp, Homo sapiens
  chr10:103052147-103052311
  hyper
ccgccccctggagcgggagcatttgggttgagctgcgcctgtcctataaatccacatataattctcctctttcctgttcagctaaggaaaataaacgtgtaaggctgtttctgggagcccagctcagggaccgctctaaattctcctcttattgagtaggggct

SEQ ID NO: 287440 - DNA, 199 bp, Homo sapiens
  chr10:103052440-103052639
  hyper
ctccagctctccccatagccgggcagatttattccgctgccaagcctgcagaaaattgacttgttcatggaggcggctattgacacatcaccggggggagggttaggggagaaagcagtggagccggcgcccctccattatacgttaatgtaatcagcagtgtgcgaaatgactgcgcggaaaatagcatcactgacat

SEQ ID NO: 287441 - DNA, 91 bp, Homo sapiens
  chr10:103326426-103326517
  hyper
ccccacccccaccccgtgccggtaacgggagccgatcctgctccgcccgccccgggagggagcccagccgctgccgccgggccgccaatca

SEQ ID NO: 287442 - DNA, 138 bp, Homo sapiens; identical to SEQ ID NO: 235034
  chr10:103329326-103329464
  hyper

SEQ ID NO: 287443 - DNA, 439 bp, Homo sapiens; identical to SEQ ID NO: 235035
  chr10:103347719-103348158
  hyper

SEQ ID NO: 287444 - DNA, 202 bp, Homo sapiens; identical to SEQ ID NO: 202237
  chr10:103348788-103348990
  hyper

SEQ ID NO: 287445 - DNA, 47 bp, Homo sapiens; identical to SEQ ID NO: 202238
  chr10:103454953-103455000
  hyper

SEQ ID NO: 287446 - DNA, 126 bp, Homo sapiens
  chr10:103535496-103535622
  hyper
ctgggcttggaggcagaggaccagcaagtgcaacagcctgtgggagacaaaagcgggcgggagagagaggcgcgggtgaggcgaggggcgcggggggcgggtggcggggcagggcggcgcggtact

SEQ ID NO: 287447 - DNA, 211 bp, Homo sapiens; identical to SEQ ID NO: 202239
  chr10:103535916-103536127
  hyper

SEQ ID NO: 287448 - DNA, 140 bp, Homo sapiens; identical to SEQ ID NO: 202240
  chr10:103543156-103543296
  hyper

SEQ ID NO: 287449 - DNA, 31 bp, Homo sapiens; identical to SEQ ID NO: 235041
  chr10:103575733-103575764
  hyper

SEQ ID NO: 287450 - DNA, 31 bp, Homo sapiens; identical to SEQ ID NO: 202241
  chr10:103576004-103576035
  hyper

SEQ ID NO: 287451 - DNA, 257 bp, Homo sapiens; identical to SEQ ID NO: 235043
  chr10:103600530-103600787
  hyper

SEQ ID NO: 287452 - DNA, 198 bp, Homo sapiens
  chr10:103824903-103825101
  hyper
ccgggccactgggcggcgtcctggggtctggggaagggcctccccctgcgccgagagcgtgcccgggcgggcgcggtccaggcgctgagcccctggggcgctcccgtggctcctcccccggcgggcgtgtagtgtcggcccagcgactgcgggaggcatcccggagccggccgggcggggcggagtcgacgctcggcc

SEQ ID NO: 287453 - DNA, 116 bp, Homo sapiens; identical to SEQ ID NO: 235046
  chr10:103880250-103880366
  hyper

SEQ ID NO: 287454 - DNA, 174 bp, Homo sapiens; identical to SEQ ID NO: 235047
  chr10:103892295-103892469
  hyper

SEQ ID NO: 287455 - DNA, 199 bp, Homo sapiens; identical to SEQ ID NO: 202242
  chr10:103912112-103912311
  hyper

SEQ ID NO: 287456 - DNA, 136 bp, Homo sapiens
  chr10:103985871-103986007
  hyper
gggtggacgttttacgggagaaaaggctggggaagtgggcgggcgatggcctacgacgggacttggggcggggtgtgcgaaacgcctggcaggcgggcccttgagtatgaccaatcagaatgcggactgcgtccca

SEQ ID NO: 287457 - DNA, 206 bp, Homo sapiens
  chr10:104001004-104001210
  hyper
ccaggtctcgttttagggattccaaggtccagcaatagctcctcggccccatgagcccctgtccttagaatggtcaaacactcacagtgcgtcctgcaacaggcagactcccagtagcggcggctgcggcggcgatctagagggcaggcaggggccaggggccgggcacccggccggagtgggggccgcccccctgctcccgggcc

SEQ ID NO: 287458 - DNA, 42 bp, Homo sapiens
  chr10:104001797-104001839
  hyper
ttctttctcctcagccgcttcgctcctgctgtttaccattct

SEQ ID NO: 287459 - DNA, 31 bp, Homo sapiens; identical to SEQ ID NO: 235050
  chr10:104005226-104005257
  hyper

SEQ ID NO: 287460 - DNA, 217 bp, Homo sapiens; identical to SEQ ID NO: 202243
  chr10:104178852-104179069
  hyper

SEQ ID NO: 287461 - DNA, 99 bp, Homo sapiens; identical to SEQ ID NO: 235053
  chr10:104179457-104179556
  hyper

SEQ ID NO: 287462 - DNA, 292 bp, Homo sapiens; identical to SEQ ID NO: 235054
  chr10:104181705-104181997
  hyper

SEQ ID NO: 287463 - DNA, 111 bp, Homo sapiens; identical to SEQ ID NO: 235055
  chr10:104192423-104192534
  hyper

SEQ ID NO: 287464 - DNA, 111 bp, Homo sapiens; identical to SEQ ID NO: 235056
  chr10:104210002-104210113
  hyper

SEQ ID NO: 287465 - DNA, 46 bp, Homo sapiens; identical to SEQ ID NO: 202244
  chr10:104220986-104221032
  hyper

SEQ ID NO: 287466 - DNA, 266 bp, Homo sapiens; identical to SEQ ID NO: 235058
  chr10:104221427-104221693
  hyper

SEQ ID NO: 287467 - DNA, 142 bp, Homo sapiens; identical to SEQ ID NO: 235059
  chr10:104262487-104262629
  hyper

SEQ ID NO: 287468 - DNA, 120 bp, Homo sapiens; identical to SEQ ID NO: 235060
  chr10:104263674-104263794
  hyper

SEQ ID NO: 287469 - DNA, 45 bp, Homo sapiens; identical to SEQ ID NO: 235061
  chr10:104474158-104474203
  hyper

SEQ ID NO: 287470 - DNA, 64 bp, Homo sapiens; identical to SEQ ID NO: 235062
  chr10:104474416-104474480
  hyper

SEQ ID NO: 287471 - DNA, 235 bp, Homo sapiens; identical to SEQ ID NO: 235063
  chr10:104613987-104614222
  hyper

SEQ ID NO: 287472 - DNA, 164 bp, Homo sapiens; identical to SEQ ID NO: 235064
  chr10:104678001-104678165
  hyper

SEQ ID NO: 287473 - DNA, 50 bp, Homo sapiens; identical to SEQ ID NO: 235065
  chr10:105025610-105025660
  hyper

SEQ ID NO: 287474 - DNA, 38 bp, Homo sapiens; identical to SEQ ID NO: 202245
  chr10:105038066-105038104
  hyper

SEQ ID NO: 287475 - DNA, 202 bp, Homo sapiens; identical to SEQ ID NO: 235068
  chr10:105110864-105111066
  hyper

SEQ ID NO: 287476 - DNA, 120 bp, Homo sapiens; identical to SEQ ID NO: 235069
  chr10:105156273-105156393
  hyper

SEQ ID NO: 287477 - DNA, 574 bp, Homo sapiens
  chr10:105253254-105253828
  hyper
tccggggagctcggcgttctcgcggccctgctccccttgttttcaagtgcaagttccatgtttccgtgctgggaataaggccagccccgggtgccaccatactcgcctgatgtcttaccccgacccgcgccgccgagagcttgcggctacgggaacgcggcgcgccccggggccacatctggcctagcgggcgcgcgcgtgtcactaagacgctcattcaccggcgcagctgtcaccataacaaccggagcgagggaatcctggagactgccggggcggggggcgggggcggcggtcgcaggagggacccggcgcgggcgggaccgcggcggtcgggggacaccagctgcgtcggagcgcccagaacgccccgcgctccgccgagccccgctccacgcagacccgcgggcgggagggagccacgcacatcgccgccgcggccgtctccgcggggcggtaaccgagcctgcctcggagccgccgaacgcccacgccagcgaccctgactctatggccccgggggagcgcgccggagccgccgcgccgcccacccccagccggaaccctagcgtcc

SEQ ID NO: 287478 - DNA, 588 bp, Homo sapiens; identical to SEQ ID NO: 119645
  chr10:105253853-105254441
  hyper

SEQ ID NO: 287479 - DNA, 249 bp, Homo sapiens
  chr10:105615413-105615662
  hyper
ctggggaggggccggcggctccccttcgccgctctccggctcgggctccggggggatcggcgctggcggaggctgtgggcgcaggaggcggaggcagggcctggcaggcagggaagggaagggagggaggggagagaggggaagcgcgcggggaggggctccgggccgggggaggggctcggggcgacggggagggggctgcagcccggccccagtggcaggggcgggccgacgagcccccacccgagc

SEQ ID NO: 287480 - DNA, 64 bp, Homo sapiens; identical to SEQ ID NO: 202247
  chr10:105615718-105615782
  hyper

SEQ ID NO: 287481 - DNA, 256 bp, Homo sapiens; identical to SEQ ID NO: 235073
  chr10:105727531-105727787
  hyper

SEQ ID NO: 287482 - DNA, 376 bp, Homo sapiens; identical to SEQ ID NO: 235074
  chr10:105991885-105992261
  hyper

SEQ ID NO: 287483 - DNA, 31 bp, Homo sapiens
  chr10:106014281-106014312
  hyper
acaggctctgaagtcgtgaagccttgggacg

SEQ ID NO: 287484 - DNA, 343 bp, Homo sapiens
  chr10:106014356-106014699
  hyper
ggtcagggtcagacgtggagccccgtggagtgcggagtggtgaccccttcgttcgggggcggagggatgactgagcatttataacttttgtgtatctccccgtgggtgcagcccttggccagcgagatgctttgacacagccccttaagatgttttaagggctatcccataaagccgggaaggcacaacgggtggagctggcggccgccgggggcaggcacttttgagctaaggaggaagcgggggagggaaggagggcgggaaggacgcgccacctacttcctgaatcccctgcaaaccccagaggagctcggcctgcgctgcgccacgatgtccggggagt

SEQ ID NO: 287485 - DNA, 158 bp, Homo sapiens; identical to SEQ ID NO: 235076
  chr10:106014939-106015097
  hyper

SEQ ID NO: 287486 - DNA, 88 bp, Homo sapiens
  chr10:106034508-106034596
  hyper
ccagatcgcttccccgtgccccgccagagcccagtagttcaaaaattaaatttggggcaaggggtgcgcgccagagcgcagctgtttc

SEQ ID NO: 287487 - DNA, 110 bp, Homo sapiens
  chr10:106034651-106034761
  hyper
ctgcgcaaaccacctggagaccatgtctggggatgcgaccaggaccctggggaaaggtgagtgctctccatggggtccgcgagctgggggcgccgcgtgacagaaaatgt

SEQ ID NO: 287488 - DNA, 736 bp, Homo sapiens
  chr10:106097223-106097959
  hyper
tttaccttcctggtcggtggctttttttttctttttctttttctttttttaagagaaagcgttttggatggggagtcccgccccgggagtcttcaccaggcggccagaatggcaaagtcacagggatggggttgagggtggggttaggggtgaaggggcagagagttatttgcagcccaagagcaagtctgcacagcgtgaggtctggcccactaatagtcccgaaagaggaagcggcggggattttatccggcctgaagcagccccataacttcactaccatgaaccgagaaaaaaaaacttcacgcctattcctcccttacaggaagggagggaaggggaaggggaaaagggggcagcaaatgagcagggcgaaccggcttttctttcttcggtagcgctctgctcagatgtgagaagtaacgggtcacctggccactaggaacaaaaatgtggtcccgctctgggctccgaggctgcgcgcgcctcgaggaggagctgcccgcagccctggctggagcgagcgcccgggacgcatcccccgacgcggcgggaacaggatgcgggaccgcgaggagacaatacgcccgcctgggcacgcgcgctttaagggaagggggtctccaaagtcagcccccacccgggaggagcaggcgcccgcgctccccacaccctcctgcgccccctctgtcggcagccatctccgacacagctcctccgagctcgcgctctccat

SEQ ID NO: 287489 - DNA, 681 bp, Homo sapiens; identical to SEQ ID NO: 119661
  chr10:106098025-106098706
  hyper

SEQ ID NO: 287490 - DNA, 102 bp, Homo sapiens; identical to SEQ ID NO: 223913
  chr10:106098946-106099048
  hyper

SEQ ID NO: 287491 - DNA, 336 bp, Homo sapiens; identical to SEQ ID NO: 47663
  chr10:106113480-106113816
  hyper

SEQ ID NO: 287492 - DNA, 307 bp, Homo sapiens
  chr10:106398982-106399289
  hyper
ttttggcaccgggtggaaaggcaagttcaagagggcgggggctctcgggaatcgctggatgtcttcttccttggccagcttagattctcagtcgcctcttctgcctcctccatccctcttggctcttacctggcgccctttcgcctcctcttctatctccctcttccttttgcaccattctctcgccccttttctccttcatcttgtctttcctctctccccttttccctctattttctccttcattccttcctctcacctttctttcctctccgcgcattcccctccctctcgctccactttaacc

SEQ ID NO: 287493 - DNA, 96 bp, Homo sapiens
  chr10:108924881-108924977
  hyper
ttctagttgaggagatagggatgggtgggcttctgctccttccctctcttatgcttcctgagttggcatcttgaccttacccgcagcagagcctgt

SEQ ID NO: 287494 - DNA, 173 bp, Homo sapiens; identical to SEQ ID NO: 202252
  chr10:109674972-109675145
  hyper

SEQ ID NO: 287495 - DNA, 52 bp, Homo sapiens; identical to SEQ ID NO: 202253
  chr10:110671595-110671647
  hyper

SEQ ID NO: 287496 - DNA, 149 bp, Homo sapiens; identical to SEQ ID NO: 235090
  chr10:111683213-111683362
  hyper

SEQ ID NO: 287497 - DNA, 766 bp, Homo sapiens; identical to SEQ ID NO: 202254
  chr10:111767116-111767882
  hyper

SEQ ID NO: 287498 - DNA, 98 bp, Homo sapiens; identical to SEQ ID NO: 202255
  chr10:111768340-111768438
  hyper

SEQ ID NO: 287499 - DNA, 48 bp, Homo sapiens; identical to SEQ ID NO: 202256
  chr10:111968983-111969031
  hyper

SEQ ID NO: 287500 - DNA, 46 bp, Homo sapiens; identical to SEQ ID NO: 202257
  chr10:111969325-111969371
  hyper

SEQ ID NO: 287501 - DNA, 249 bp, Homo sapiens; identical to SEQ ID NO: 235095
  chr10:112064510-112064759
  hyper

SEQ ID NO: 287502 - DNA, 567 bp, Homo sapiens
  chr10:112257242-112257809
  hyper
ccctggccggctccctcggccctgctcagcgcggcgcgggcgggttctcagcccacgtccgtgaagctgaaggccggatcgtgcggcgccgccccgccccccacggcgcttcctcctcggtccgcaccgcgagggtcaccgcggccccggagcgcctgggacactcgaccggcagccgcgggtgatgcgcgagtgagtccctcagcgaagcgcggaagagagaacgaagaggcgccttccacttcctctcgctctaacgccggcacccgccccgcgcgtccctcgcccccgctgccccgccccctgcagggcgtggccacggcccgaggggcggggaaacacccatatttggccttatatgggcagccgcgtcacggacggcactcattcacataaaacgctgcgcggccggcggaatccccggcttctagggcggcgagcggccgggctggctatcgagcgagcggggcgggaacgcggagttgcgccgccgctcgggcgccgggctccgtcgcggccgcagccccgcgggtcgccctcccgtgcctcgcccgcggacaccctggc

SEQ ID NO: 287503 - DNA, 353 bp, Homo sapiens; identical to SEQ ID NO: 202259
  chr10:112257978-112258331
  hyper

SEQ ID NO: 287504 - DNA, 186 bp, Homo sapiens; identical to SEQ ID NO: 202260
  chr10:112258408-112258594
  hyper

SEQ ID NO: 287505 - DNA, 385 bp, Homo sapiens
  chr10:112327397-112327782
  hyper
tgcaaggtggttccgtccgaggcgcggactccgcccccacgagcgccgccattttgtttggctgaggggagcgagcggcgctttgggggaggggtcgcgtaggcgcctcacctgaccctgcggccgtgcggttgctgctccggggcaggtctccttccaggccaggggcccggaatcatgtacataaagcaggtaaggccttcgcgtccctccaccccgtcatgggccggtaagggccgctccttgaggcgggagtgttgcggcgccacccgcagcctctcccctgtctccacaggctggaccagggctgggcggggactgtgggggaggagggagacccgggtcccgctagtgccccggctgcggggtcgcggagaattggggc

SEQ ID NO: 287506 - DNA, 76 bp, Homo sapiens; identical to SEQ ID NO: 202262
  chr10:112328695-112328771
  hyper

SEQ ID NO: 287507 - DNA, 39 bp, Homo sapiens; identical to SEQ ID NO: 202263
  chr10:112333464-112333503
  hyper

SEQ ID NO: 287508 - DNA, 68 bp, Homo sapiens; identical to SEQ ID NO: 202264
  chr10:112335093-112335161
  hyper

SEQ ID NO: 287509 - DNA, 72 bp, Homo sapiens; identical to SEQ ID NO: 202265
  chr10:112337178-112337250
  hyper

SEQ ID NO: 287510 - DNA, 80 bp, Homo sapiens; identical to SEQ ID NO: 202266
  chr10:112337592-112337672
  hyper

SEQ ID NO: 287511 - DNA, 79 bp, Homo sapiens; identical to SEQ ID NO: 202267
  chr10:112338385-112338464
  hyper

SEQ ID NO: 287512 - DNA, 118 bp, Homo sapiens; identical to SEQ ID NO: 202268
  chr10:112340661-112340779
  hyper

SEQ ID NO: 287513 - DNA, 176 bp, Homo sapiens; identical to SEQ ID NO: 202269
  chr10:112341680-112341856
  hyper

SEQ ID NO: 287514 - DNA, 81 bp, Homo sapiens; identical to SEQ ID NO: 202270
  chr10:112342319-112342400
  hyper

SEQ ID NO: 287515 - DNA, 165 bp, Homo sapiens; identical to SEQ ID NO: 202271
  chr10:112343141-112343306
  hyper

SEQ ID NO: 287516 - DNA, 122 bp, Homo sapiens; identical to SEQ ID NO: 202272
  chr10:112343598-112343720
  hyper

SEQ ID NO: 287517 - DNA, 214 bp, Homo sapiens; identical to SEQ ID NO: 202273
  chr10:112343940-112344154
  hyper

SEQ ID NO: 287518 - DNA, 387 bp, Homo sapiens; identical to SEQ ID NO: 202274
  chr10:112349362-112349749
  hyper

SEQ ID NO: 287519 - DNA, 161 bp, Homo sapiens; identical to SEQ ID NO: 202275
  chr10:112350169-112350330
  hyper

SEQ ID NO: 287520 - DNA, 142 bp, Homo sapiens; identical to SEQ ID NO: 202276
  chr10:112350748-112350890
  hyper

SEQ ID NO: 287521 - DNA, 151 bp, Homo sapiens; identical to SEQ ID NO: 202277
  chr10:112352830-112352981
  hyper

SEQ ID NO: 287522 - DNA, 153 bp, Homo sapiens; identical to SEQ ID NO: 202278
  chr10:112356155-112356308
  hyper

SEQ ID NO: 287523 - DNA, 152 bp, Homo sapiens; identical to SEQ ID NO: 202279
  chr10:112357896-112358048
  hyper

SEQ ID NO: 287524 - DNA, 159 bp, Homo sapiens; identical to SEQ ID NO: 202280
  chr10:112359411-112359570
  hyper

SEQ ID NO: 287525 - DNA, 108 bp, Homo sapiens; identical to SEQ ID NO: 202281
  chr10:112360196-112360304
  hyper

SEQ ID NO: 287526 - DNA, 109 bp, Homo sapiens; identical to SEQ ID NO: 202282
  chr10:112360779-112360888
  hyper

SEQ ID NO: 287527 - DNA, 542 bp, Homo sapiens; identical to SEQ ID NO: 202283
  chr10:112361394-112361936
  hyper

SEQ ID NO: 287528 - DNA, 817 bp, Homo sapiens; identical to SEQ ID NO: 202284
  chr10:112362231-112363048
  hyper

SEQ ID NO: 287529 - DNA, 404 bp, Homo sapiens; identical to SEQ ID NO: 202285
  chr10:112363988-112364392
  hyper

SEQ ID NO: 287530 - DNA, 232 bp, Homo sapiens
  chr10:112403994-112404226
  hyper
ggcccccgcccccgcgtggccggccgggacgagctggagcagcgggaggaggcggcgccgccaggactgcctcctccccgcccctcgcgtctcctccccgcgccaccgggaaggacaaggggactgggcacggggaccccggccagtgagcgcccgtggcccgggaccgcccctcccttgagctctctcgccgcgatcccgggcgggtctcgccccgcatggtgctggcagc

SEQ ID NO: 287531 - DNA, 57 bp, Homo sapiens; identical to SEQ ID NO: 202287
  chr10:112431815-112431872
  hyper

SEQ ID NO: 287532 - DNA, 235 bp, Homo sapiens; identical to SEQ ID NO: 202288
  chr10:112432125-112432360
  hyper

SEQ ID NO: 287533 - DNA, 106 bp, Homo sapiens; identical to SEQ ID NO: 202289
  chr10:112631244-112631350
  hyper

SEQ ID NO: 287534 - DNA, 148 bp, Homo sapiens; identical to SEQ ID NO: 202290
  chr10:112632548-112632696
  hyper

SEQ ID NO: 287535 - DNA, 69 bp, Homo sapiens; identical to SEQ ID NO: 235101
  chr10:112678715-112678784
  hyper

SEQ ID NO: 287536 - DNA, 136 bp, Homo sapiens; identical to SEQ ID NO: 235102
  chr10:112678992-112679128
  hyper

SEQ ID NO: 287537 - DNA, 877 bp, Homo sapiens
  chr10:112835845-112836722
  hyper
aggggtagacacacgagtatctgctttaggaagatttctgcaacacggcagggtgcaattcaaactctgggttctcctttcctgagcttagaaaccaatttgttcggagataggagaaggctctgttggcagaagacctaagagacgggaggaggcgcctggcgtcagcgggtcgcttctcagccgtgaccacgagcggccagcaggtgtcagtgcgtcctcgctttgccctggcgctcggctcctggacccctccccacctcggtctaagggggcgcggtccagaccccgggtcttgcgtttcccgcagacagcatcgcggctgggaggacacgtagccgcttcttccctaagcggaggtctgaactccggcttgtaccacttccccgtgggtgctgtccattccgccccaggggttccatccgaagccgcgccttcctccctctccaggacccctttctccccagcctccaggagcacctgcggaccgcgtcggctctggcccggagctgggctgctccagacgtaactcacaccggaggttacttccctcgatttgggcggggattcccttccatttttttcttcccttttctcccaagatccagcttcttgggggcactcacgggtgcccgttgcgttctgctccgtcggcccggagctgcatggccaactcccagcaggggccgctcctcccctaccccccacccccgggctccctctttaagtctctagctcaaggtacccgcctctccaaagggctcgtcccgcctgagggcaacgctccccgaggtccagcgctaggcgcgggcgctagactggcggaggggtggtgcgaggggcgggggagggtcggcttcccacgtgggggctgacg

SEQ ID NO: 287538 - DNA, 339 bp, Homo sapiens
  chr10:112836799-112837138
  hyper
tccagctcggtgcagaagcccagcagccggcgtgccgccgcccggccactccagcgccttcttccccgccttgcgctcctgccccaactcgcgctgtcgtcggaccccggcccatccagcagcgctcggcgcccaccaggcggacgcccaggagaacccctgcctccgtcgcggctcctggagagctgatcgttcacctgccccggcccgcctgaggacgggggtgccttcatgcggcccccacactcctcaccccgccgccgccgccgtcccggagctccgcacagtgtgccccagccccagcagggcgcacaactttggaagtctcgcggcgctccg

SEQ ID NO: 287539 - DNA, 691 bp, Homo sapiens
  chr10:112837170-112837861
  hyper
ccgggccgggccagaaccgcagcgtctgggggaagccagagagtcggtaatcgcttcggggatgtaaggcgacagacataggacccccgagctcgcatcagcacccttcggctgcctcccggggtgggggcgggccccgcacacggtaagacctcttgctttcgctcaggctcaagattcaagatacagatattgatatgtatatatatatttaatttcctgtcatccttccaagttatcaggccaccgatgatttttgttctcccttcttgaagaataaatctctctttacccatcggctctccctactctctcccgccgcttagaaataaaacttggctgtattaggagctcggagcaagaaggcgcccaccgagagcgtctgaagcgcgagccaggcgcagttcgcgggacccgggccatgggccgctagcggtcctccagttcgggcccggcctccctgcggccccctccctatgtgagccgcagccaggcgagcggggcgccggaggaagaggaggacccacgggcgccgggccggaaggcagctggcagcaggcccaggccagcgggcgcccgcgttcatgttccgccaggagcagccgttggccgagggcagctttgcgcccatgggctccctgcagccggacgcgggcaacgcgagctggaacgggaccgaggcgccgggggg

SEQ ID NO: 287540 - DNA, 470 bp, Homo sapiens; identical to SEQ ID NO: 235104
  chr10:114135833-114136303
  hyper

SEQ ID NO: 287541 - DNA, 181 bp, Homo sapiens
  chr10:114206543-114206724
  hyper
ccttggatgactccgtcatggacacctcagcccaggacaagcagagagcaaaccctggcagcgagaggctggagtgcgggacctgctacaagccgagcacctctcggccagcgccctcgccaggactctcccgctcaggccccctgcgcagtctctgttactgtcacttccggaggttcgc

SEQ ID NO: 287542 - DNA, 684 bp, Homo sapiens; identical to SEQ ID NO: 235106
  chr10:114708957-114709641
  hyper

SEQ ID NO: 287543 - DNA, 33 bp, Homo sapiens; identical to SEQ ID NO: 202295
  chr10:114709864-114709897
  hyper

SEQ ID NO: 287544 - DNA, 56 bp, Homo sapiens; identical to SEQ ID NO: 223949
  chr10:114710115-114710171
  hyper

SEQ ID NO: 287545 - DNA, 290 bp, Homo sapiens
  chr10:114710660-114710950
  hyper
tcaatgaatcagaaacgaatcaaaacagctcctccgattccgaggtaggaaaagcccctcgggctggtggggttttttatctgtttcctgggcttggcaaatgttgctgaaaggggagaaatcggggctgggggcggcggcggggcccggcgggcggcgtgtgcgtacggtgccaccattgcaaaaacttgtaaccctgtttttttctacccccccctcgacctcgccgattctttttctcccccttctcccccttctgcgtggcgtttgcccctcgccctccccacctc

SEQ ID NO: 287546 - DNA, 46 bp, Homo sapiens; identical to SEQ ID NO: 223951
  chr10:114711334-114711380
  hyper

SEQ ID NO: 287547 - DNA, 182 bp, Homo sapiens
  chr10:114711918-114712100
  hyper
gagaactggctagcgcgcagagcccggggccctggagaggctccttggctttctcttttgggcgactatgtatttagctttctagtggagattgctggctctcggccctccttcccccttcccctggaaggtcacacttcccagattggtcccaccgcaaacttgggggctctgaggcgtcc

SEQ ID NO: 287548 - DNA, 430 bp, Homo sapiens
  chr10:114712446-114712876
  hyper
ggagtgggccgccgatcgccggccacccaactttgggggccccagggcagcgcggggtgccgggctcggggggcgcttcctgcagggtcggtcccgcgcccaaccctgacatttgttaatacggctcatcccctcccccaccggcctgtgccccctgccctcaccctgaaccccctcctcctcatccctccctccctcttctaagaagcctggattacgaatccctggacgcaagacgcatttgtgcccggcttcccggtattgtcattttacaccttctccagtttggtcccctaccccttatttacacacacgacttttgttttttctttttcggtaactctagatagcaatttgaaataatgcacccactgttcagcagccatggattcggtgctaatggccgagggcttgccggacgggagtcgat

SEQ ID NO: 287549 - DNA, 31 bp, Homo sapiens; identical to SEQ ID NO: 235109
  chr10:115613973-115614004
  hyper

SEQ ID NO: 287550 - DNA, 262 bp, Homo sapiens; identical to SEQ ID NO: 235110
  chr10:115614294-115614556
  hyper

SEQ ID NO: 287551 - DNA, 147 bp, Homo sapiens; identical to SEQ ID NO: 235111
  chr10:115802989-115803136
  hyper

SEQ ID NO: 287552 - DNA, 241 bp, Homo sapiens; identical to SEQ ID NO: 202296
  chr10:115803386-115803627
  hyper

SEQ ID NO: 287553 - DNA, 329 bp, Homo sapiens
  chr10:115803681-115804010
  hyper
cggcggcggcggcggcggcggcagcggcagcgacagcgctcggctcctgcgggaaaggcgcccggcgcccatgcctccggccccgcgccgcggctgccctgacccggccgcgacctccctctgcgcaccacgccgcccgggcttctggggtgttccccaaccacggcccagccctgccacaccccccgcccccggcctccgcagctcggcatgggcgcgggggtgctcgtcctgggcgcctccgagcccggtaacctgtcgtcggccgcaccgctccccgacggcgcggccaccgcggcgcggctgctggtgcccgcgtcgccgcccgc

SEQ ID NO: 287554 - DNA, 64 bp, Homo sapiens; identical to SEQ ID NO: 235113
  chr10:115804304-115804368
  hyper

SEQ ID NO: 287555 - DNA, 141 bp, Homo sapiens
  chr10:115804398-115804539
  hyper
ctgacgcgcgcgcgggcgcggggcctcgtgtgcaccgtgtgggccatctcggccctggtgtccttcctgcccatcctcatgcactggtggcgggcggagagcgacgaggcgcgccgctgctacaacgaccccaagtgctgc

SEQ ID NO: 287556 - DNA, 201 bp, Homo sapiens; identical to SEQ ID NO: 202298
  chr10:115805287-115805488
  hyper

SEQ ID NO: 287557 - DNA, 189 bp, Homo sapiens; identical to SEQ ID NO: 235115
  chr10:115860785-115860974
  hyper

SEQ ID NO: 287558 - DNA, 161 bp, Homo sapiens; identical to SEQ ID NO: 235116
  chr10:115933903-115934064
  hyper

SEQ ID NO: 287559 - DNA, 49 bp, Homo sapiens; identical to SEQ ID NO: 235117
  chr10:115934454-115934503
  hyper

SEQ ID NO: 287560 - DNA, 66 bp, Homo sapiens
  chr10:115998970-115999036
  hyper
tttcaaggagctataaagcccgtggaggagtcagctgacggcacagtgttcgcggctgcaccgctc

SEQ ID NO: 287561 - DNA, 409 bp, Homo sapiens
  chr10:115999183-115999592
  hyper
caggagagacaaacaggtgtcccacgtggcagccgcgccccgggcgcccctcctgtgatcccgtagcgccccctggcccgagccgcgcccgggtctgtgagtagagccgcccgggcaccgagcgctggtcgccgctctccttccggtgagtcccagccccgagttggctctggcgcccgggtacccgccagtgccggctgccgatgaccgattcacgctcccggtactggggccccctctgcccagccacccctacccagagcacccgggctgcgcggccccgccgagggtgcgggctttgttcgcattgtctgcgcgcacctgagcgcggccttcctggcacggcggcgtcgggggaagagcgcacctggcgcgcgcctccctcgtggccactcgcggtccgtcccgg

SEQ ID NO: 287562 - DNA, 268 bp, Homo sapiens; identical to SEQ ID NO: 202299
  chr10:116163621-116163889
  hyper

SEQ ID NO: 287563 - DNA, 207 bp, Homo sapiens; identical to SEQ ID NO: 202300
  chr10:116163919-116164126
  hyper

SEQ ID NO: 287564 - DNA, 210 bp, Homo sapiens; identical to SEQ ID NO: 202301
  chr10:116164364-116164574
  hyper

SEQ ID NO: 287565 - DNA, 85 bp, Homo sapiens; identical to SEQ ID NO: 202302
  chr10:116164654-116164739
  hyper

SEQ ID NO: 287566 - DNA, 369 bp, Homo sapiens; identical to SEQ ID NO: 235120
  chr10:116286487-116286856
  hyper

SEQ ID NO: 287567 - DNA, 175 bp, Homo sapiens
  chr10:116391551-116391726
  hyper
agaacatgtccgcccggctttcgattgatcattccccgttaggtggccgagccctgcggtgccattccaacttctgcaaccatgcacagtgatcgatatttataattacctttttccttcaccatggcaaccgggtcctccgacgagcaggactgaagaaggaacgaggaataaa

SEQ ID NO: 287568 - DNA, 204 bp, Homo sapiens
  chr10:116391813-116392017
  hyper
gggctgtggtctcgagtcccgccccgcctcggcgggccccgctcccatgcccgccccgctatcgcccccgcgctcttctccgcccgcccgccgagctgcagccgcgcccagctcggggactctgccctgcggctgaaaccactcgctacagctgctgctgtaacaaatgcaaaattctactgtcctaatctctggtcactgaca

SEQ ID NO: 287569 - DNA, 933 bp, Homo sapiens; identical to SEQ ID NO: 202303
  chr10:116527400-116528333
  hyper

SEQ ID NO: 287570 - DNA, 43 bp, Homo sapiens; identical to SEQ ID NO: 235123
  chr10:116581330-116581373
  hyper

SEQ ID NO: 287571 - DNA, 108 bp, Homo sapiens; identical to SEQ ID NO: 235124
  chr10:116697880-116697988
  hyper

SEQ ID NO: 287572 - DNA, 74 bp, Homo sapiens
  chr10:116852172-116852246
  hyper
tgaaaaaaagccccgatgctgcaatatttttcaaggcagaatatcgtcccagatggaggagggagcactgacaa

SEQ ID NO: 287573 - DNA, 206 bp, Homo sapiens
  chr10:116852441-116852647
  hyper
tcgctgaccccacaacgtggtcggactgcggtgcctttaaggcttttgcctgctgcacatgctcagctctttgtgtgttgttggagtttttctctcttaagagaaaaagaagaaataggcaggaggatggggcggaggaagggggaagcgctagggaaaaagcgttgcacttttgcagctgcagacggcggacgggaaggacttct

SEQ ID NO: 287574 - DNA, 184 bp, Homo sapiens
  chr10:118031118-118031302
  hyper
cgggaaaaacttttctcttccaagtttgctctcccggccccaatgctccccaactccacctgcccgccgcggctccgcgagctcccagagactctctgggggtgcagggccctgggctggagggcttcttagtcccccgccaagttgggtcattaaaaaccacaggaaatcaaaaccaagcccg

SEQ ID NO: 287575 - DNA, 82 bp, Homo sapiens; identical to SEQ ID NO: 202306
  chr10:118034168-118034250
  hyper

SEQ ID NO: 287576 - DNA, 143 bp, Homo sapiens
  chr10:118547596-118547739
  hyper
aaggaaaaatatctgtgtcacagcaccaactggaaaccaacgcgcgtacatcctgtctctactctggccgagccgaccaaagcacatcctgcaaaattctagacccccgcaaacggcgggaggcggccgtgcgcacaacatcc

SEQ ID NO: 287577 - DNA, 587 bp, Homo sapiens
  chr10:118608718-118609305
  hyper
aattcggagctaaggctgccgcgctccggcaaaacgcgcttgatgaggtcgttaaagatttccccctctggaaaatcgccagggaaaagtggtgaaaaacgaagccgggagggccctagtctcgggagtctaggaggagcccaacccccggacctaatgccgcagggagaaaagacagagcagcgagcgcaaataccatcctagctccaataaaagggaacgacttttaccgcaggaagaacctaggcctggaagccacgcgagatctgggggtcgggatcacgttgcgttgcctagcgacagcagggacgctcgtgggaccccaggctaaaccccgctgtagccttaaatctcctaccatggaggaagaaggcggcggccgcagctgtgggaccactagggagctgcagaagctgaagcagcaggcgatggagtactaccgggagaacgacgttccgcgcaggctggaagagctgctcaactccaccttctacctccagcctgccgacgtctacgggcacctggtagggacctgggacaagcgctctcctcccgccaacccctctccccccgccccgcgctgcggc

SEQ ID NO: 287578 - DNA, 571 bp, Homo sapiens
  chr10:118764187-118764758
  hyper
ccacccgcttctccggcaaggaaggtggcactgtgcaacctcgtccgcactgaatcctcgtcccttcccccagcccccgatcgccagcaaacgcaaccagcgggcagcgggtctcgagctgcggggcctgactagccccgacactccgcgttatcctcggtccagagctttcccaggcgcgccggccacggaggacgcttctctgcgggtgacggagctactgcggtgaccacggcggccgccacgtctcccgcccggcttccaactgccctggccccagcgccctggggccgtccccgcccacgggccgcggctgcccacacctggcgcccgcgtgctgcctaccttgctccttcagactggtaatgagctgcagctgcttctcttcgtccgagctgttcattttggcgggtggggccgggaataaaagggaaagagggagcggcgcggggcacacaggaggagggggaagaaaaagcaagatgccggtggcttgcggctccactacccggaagttggatccgctcccgctcctcctcctcctggcgcggagcgcgcgagtgagatcatc

SEQ ID NO: 287579 - DNA, 180 bp, Homo sapiens
  chr10:118764980-118765160
  hyper
gagttcagagaaaaccggctgtgggttcgcagcgtgtgtgggaactccactttggacgcttcccgggggtcgctcccaaagaaccacagaggtagagcgggacgcaatgagccatgaacgcctgggcttcttccctagttttcccgcagtagactctgggggcgcggttgcaaaacctag

SEQ ID NO: 287580 - DNA, 239 bp, Homo sapiens; identical to SEQ ID NO: 202308
  chr10:118891774-118892013
  hyper

SEQ ID NO: 287581 - DNA, 88 bp, Homo sapiens; identical to SEQ ID NO: 202309
  chr10:118922943-118923031
  hyper

SEQ ID NO: 287582 - DNA, 295 bp, Homo sapiens
  chr10:118927594-118927889
  hyper
ctagagccgttcctgagctcgtcagccagcacgtatttaatgaatggccactgggtgctaggccttgcacgcaaccctttcgtcctcccccggggctgagccgagggtgacccaacactagtcggaacgagcctggagacatggcgccggggctgcgctctgcaggcctggcctggtcgctctccacgcacccctctctctgtagctgccgccccgcccggctctgcctgtgggcgccccctggcggcaggaagccgagcgcgcaccacgccctcggggctccatccccactcac

SEQ ID NO: 287583 - DNA, 72 bp, Homo sapiens; identical to SEQ ID NO: 202310
  chr10:119001564-119001636
  hyper

SEQ ID NO: 287584 - DNA, 308 bp, Homo sapiens; identical to SEQ ID NO: 202311
  chr10:119256046-119256354
  hyper

SEQ ID NO: 287585 - DNA, 220 bp, Homo sapiens
  chr10:119292343-119292563
  hyper
gagccctgcagtttgtcgtctggagcccggaacccgaggtgaaaggcctccgctgagctcccagactcctcagccgagcatatgctgcactcctcacattcatttttaattcatgacatcagtttagggatcactagagcctctaaacagcctctctcaaaaccaaaacaaccaccataacacaagcgaggacaggagacggccgcggagtccagaacat

SEQ ID NO: 287586 - DNA, 563 bp, Homo sapiens; identical to SEQ ID NO: 235144
  chr10:119293002-119293565
  hyper

SEQ ID NO: 287587 - DNA, 495 bp, Homo sapiens; identical to SEQ ID NO: 202313
  chr10:119293786-119294281
  hyper

SEQ ID NO: 287588 - DNA, 87 bp, Homo sapiens; identical to SEQ ID NO: 202314
  chr10:119295683-119295770
  hyper

SEQ ID NO: 287589 - DNA, 31 bp, Homo sapiens; identical to SEQ ID NO: 202315
  chr10:119295809-119295840
  hyper

SEQ ID NO: 287590 - DNA, 37 bp, Homo sapiens; identical to SEQ ID NO: 202316
  chr10:119295872-119295909
  hyper

SEQ ID NO: 287591 - DNA, 41 bp, Homo sapiens; identical to SEQ ID NO: 202317
  chr10:119295951-119295992
  hyper

SEQ ID NO: 287592 - DNA, 39 bp, Homo sapiens; identical to SEQ ID NO: 202318
  chr10:119296131-119296170
  hyper

SEQ ID NO: 287593 - DNA, 116 bp, Homo sapiens; identical to SEQ ID NO: 202319
  chr10:119296211-119296327
  hyper

SEQ ID NO: 287594 - DNA, 52 bp, Homo sapiens; identical to SEQ ID NO: 202320
  chr10:119296362-119296414
  hyper

SEQ ID NO: 287595 - DNA, 62 bp, Homo sapiens; identical to SEQ ID NO: 202321
  chr10:119296567-119296629
  hyper

SEQ ID NO: 287596 - DNA, 39 bp, Homo sapiens; identical to SEQ ID NO: 202322
  chr10:119300884-119300923
  hyper

SEQ ID NO: 287597 - DNA, 60 bp, Homo sapiens; identical to SEQ ID NO: 202323
  chr10:119301840-119301900
  hyper

SEQ ID NO: 287598 - DNA, 95 bp, Homo sapiens; identical to SEQ ID NO: 202324
  chr10:119302046-119302141
  hyper

SEQ ID NO: 287599 - DNA, 147 bp, Homo sapiens; identical to SEQ ID NO: 202325
  chr10:119302266-119302413
  hyper

SEQ ID NO: 287600 - DNA, 234 bp, Homo sapiens
  chr10:119302459-119302693
  hyper
aaaaaaaaagaaaaaaaattaccccaatccacgcctgcaaattcttctggaaggattttcccccctctcttcaggttgggcgcgtttggtgcaagattctcgggatcctcggctttgcctctccctctccctcccccctcctttcctttttcctttcctttcctttctttcttcctttccttccccccacccccacccccaccccaaacaaacgagtccccaattctcgtccgt

SEQ ID NO: 287601 - DNA, 229 bp, Homo sapiens; identical to SEQ ID NO: 202327
  chr10:119303721-119303950
  hyper

SEQ ID NO: 287602 - DNA, 97 bp, Homo sapiens
  chr10:119305284-119305381
  hyper
aaggaagcagctggcacacagcctcagcctcacggaaactcaggtgactgcggcccgggcgcgaggaacccatctaggcgtgcgccccctccccaaa

SEQ ID NO: 287603 - DNA, 141 bp, Homo sapiens; identical to SEQ ID NO: 202328
  chr10:119305975-119306116
  hyper

SEQ ID NO: 287604 - DNA, 57 bp, Homo sapiens
  chr10:119306372-119306429
  hyper
atggagcactttgggcgactgtggctttccgggagagcaagacggaccggcctgcgg

SEQ ID NO: 287605 - DNA, 377 bp, Homo sapiens
  chr10:119306645-119307022
  hyper
gtgggatggcagccgactcccacctcattgctcctgagacctctcacagccgctctggtgaggccgggcctccagccccaccctggtgggaagtgatgggactggggtccgaggttgtgtgaccagcagcctgttccggggctgtttagaaggagggaagagggggcttgctgtcacctccccttctcttagtttctcttactttccgtgtaacccacggtctttcagaagctttcagttttgaactcattttcctagctataaaggtacagctgggttggtctggaggcctacacactccatgtccctcctggcctcctccagccccatccccttcctgctcacctgtgagagtcccccgcacggaggatgcagct

SEQ ID NO: 287606 - DNA, 248 bp, Homo sapiens
  chr10:119307582-119307830
  hyper
tatggtttcagaaccgaagaacaaagttcaaaaggcagaagctggaggaagaaggctcagattcgcaacaaaagaaaaaagggacgcaccatattaaccggtggagaatcgccaccaagcaggcgagtccggaggaaatagacgtgacctcagatgattaaaaacataaacctaaccccacagaaacggacaacatggagcaaaagagacagggagaggtggagaaggaaaaaaccctacaaaacaaa

SEQ ID NO: 287607 - DNA, 55 bp, Homo sapiens
  chr10:119307898-119307953
  hyper
actctggacagcgagggcacagggtcccaaaccgaggccgcgccaagatggcaga

SEQ ID NO: 287608 - DNA, 141 bp, Homo sapiens; identical to SEQ ID NO: 235153
  chr10:119309782-119309923
  hyper

SEQ ID NO: 287609 - DNA, 112 bp, Homo sapiens; identical to SEQ ID NO: 202330
  chr10:119310263-119310375
  hyper

SEQ ID NO: 287610 - DNA, 71 bp, Homo sapiens
  chr10:119494303-119494374
  hyper
cagcgactctccccgggtcccccaccccagccaagagggaacctgccaatcaggctgcgccaccaccaggc

SEQ ID NO: 287611 - DNA, 223 bp, Homo sapiens; identical to SEQ ID NO: 235158
  chr10:119805618-119805841
  hyper

SEQ ID NO: 287612 - DNA, 73 bp, Homo sapiens; identical to SEQ ID NO: 235159
  chr10:119806446-119806519
  hyper

SEQ ID NO: 287613 - DNA, 171 bp, Homo sapiens; identical to SEQ ID NO: 235160
  chr10:120101736-120101907
  hyper

SEQ ID NO: 287614 - DNA, 441 bp, Homo sapiens
  chr10:120514800-120515241
  hyper
gttaccatgacgacgaggccctcgccggttcctgaggacgcgcgcggagcagtcttggcagtagctgtggactggccagagtgattggaggtgttttcctcgcgtcctccaagtctacggggccttcgcacctctgagtgcctgagagccccggcttttgcttgggacggaggtacgggaccacaagaggccccggggtcgcaggttataaacggatgagaccgccctgggcggcccgtggtccgactgctcttgggtcggtccccagccgtcgcgacacacacgcacaaaatcgagaataaaaaccgaatcacacatagcaggatggcgcaaaaaagaaatgcgtttgagttactcatgtgtttttaaaattcctttacgtttgtatgcactaaggccagcaacccaacttttaaaaatgccggctcaggccgggcgcgg

SEQ ID NO: 287615 - DNA, 84 bp, Homo sapiens; identical to SEQ ID NO: 223965
  chr10:121271622-121271706
  hyper

SEQ ID NO: 287616 - DNA, 128 bp, Homo sapiens
  chr10:121301366-121301494
  hyper
acccaaaggcctgcacaggtcgtagctattgtgatgagcaaaagggtggaaggaccggaatcaagggcacggctccaccttcaccgtggggtctttggcctatcaagttgcccgagatcgtggctcag

SEQ ID NO: 287617 - DNA, 761 bp, Homo sapiens
  chr10:121301911-121302672
  hyper
agctctgcgctcccgtcgcggctgggaccgcgaaggtgcggtacccagcggggagaggtggtgcggtcggccggggctccagtctgggaggtaccaccgagccgcgcccgagcacaagagggagggcaggaggccgggcgggcgaaacggcgccccgaccccgagcccgcgggcccccgaagccgcttacctgacggcggccgcttcctgctcagccggctcacggcgcggttgaacatcgccgcgggcgcccgaggaggaagaaggagcagcccggcggcgcggcggctgagccggaggaaggcgaggaggaggaggagggcgaggaggaggaggaggagggcaaggaggaggagcgggctcagcaccgccccggagctctaggtccccgcccgccgccctcctcctagccaggcgccgcgtggcgcgctcagtgcgccctgcccgcccccgctggtgaggactcgcggttccgctccggggtgcccgggcggggcagggcagggcagccccgggtgacccccgatcgcccagagtgtgccccgcgcctgggataaggtgcactggcccagagggagcccgcgccgccgggaacttagtagccccgcggaggcggttagcgcgtcccggggtccctggccctcgcctgagatgccgccccggcccgccccgcccagcttcaagctcccgggcccatcgcggtctcccgccttctccctgtagccccggagaaactggcacggcgccgcgggcgcaccgcg

SEQ ID NO: 287618 - DNA, 35 bp, Homo sapiens; identical to SEQ ID NO: 235163
  chr10:121303030-121303065
  hyper

SEQ ID NO: 287619 - DNA, 43 bp, Homo sapiens; identical to SEQ ID NO: 202334
  chr10:121356079-121356122
  hyper

SEQ ID NO: 287620 - DNA, 127 bp, Homo sapiens; identical to SEQ ID NO: 235164
  chr10:121356665-121356792
  hyper

SEQ ID NO: 287621 - DNA, 52 bp, Homo sapiens; identical to SEQ ID NO: 235165
  chr10:121485050-121485102
  hyper

SEQ ID NO: 287622 - DNA, 106 bp, Homo sapiens; identical to SEQ ID NO: 202335
  chr10:121632626-121632732
  hyper

SEQ ID NO: 287623 - DNA, 32 bp, Homo sapiens; identical to SEQ ID NO: 235168
  chr10:122610818-122610850
  hyper

SEQ ID NO: 287624 - DNA, 159 bp, Homo sapiens; identical to SEQ ID NO: 202336
  chr10:122708760-122708919
  hyper

SEQ ID NO: 287625 - DNA, 89 bp, Homo sapiens; identical to SEQ ID NO: 202337
  chr10:122739316-122739405
  hyper

SEQ ID NO: 287626 - DNA, 170 bp, Homo sapiens
  chr10:123356668-123356838
  hyper
gagcgggcctcctgcgccaggtccgtggtccgcgagggtcggagccagcgccacgcagggccctcggcttttttccccagcgcggccccgtggccgaaaaaaatgagcgcgcaagttagaactcgcctgcgctttcgacatctcccagccgctgcggcagagcaggcagg

SEQ ID NO: 287627 - DNA, 216 bp, Homo sapiens; identical to SEQ ID NO: 202338
  chr10:123356990-123357206
  hyper

SEQ ID NO: 287628 - DNA, 372 bp, Homo sapiens; identical to SEQ ID NO: 202339
  chr10:123357242-123357614
  hyper

SEQ ID NO: 287629 - DNA, 106 bp, Homo sapiens; identical to SEQ ID NO: 202340
  chr10:123357660-123357766
  hyper

SEQ ID NO: 287630 - DNA, 375 bp, Homo sapiens; identical to SEQ ID NO: 202341
  chr10:123357893-123358268
  hyper

SEQ ID NO: 287631 - DNA, 179 bp, Homo sapiens; identical to SEQ ID NO: 235172
  chr10:123686258-123686437
  hyper

SEQ ID NO: 287632 - DNA, 819 bp, Homo sapiens; identical to SEQ ID NO: 202342
  chr10:123872187-123873006
  hyper

SEQ ID NO: 287633 - DNA, 442 bp, Homo sapiens
  chr10:123873040-123873482
  hyper
ttcccgctcgcggttggggtccccgcgcgtggttgtggttggcgcccgtgaccaggctccctgccagggttggggtcccgcccttgggggcctccgcgccttcccaccgggctctttcccagctcgtgtggtcctactgggtcgcgtgggggcatccccggcgggccacgacggcgcgtggactagccataaaactctgcgctggatttcctccgagtttgggacttttaaattctcgaatagttacgtcagcagggccgagcgcacttcggggatccggcgcaacacgtgacccgcccgagcgtcccctccgcgtccttggctcccgccgcagagtgcgcctctgcctcggggtgtcctcgaaatccagtgtcggggcgctgggatttgctgcccaggctccgagcgccgaatacaccacgctgtggccaggtgtcctctt

SEQ ID NO: 287634 - DNA, 271 bp, Homo sapiens; identical to SEQ ID NO: 202344
  chr10:124133665-124133936
  hyper

SEQ ID NO: 287635 - DNA, 723 bp, Homo sapiens; identical to SEQ ID NO: 202345
  chr10:124134313-124135036
  hyper

SEQ ID NO: 287636 - DNA, 67 bp, Homo sapiens; identical to SEQ ID NO: 202346
  chr10:124220489-124220556
  hyper

SEQ ID NO: 287637 - DNA, 245 bp, Homo sapiens; identical to SEQ ID NO: 202347
  chr10:124220656-124220901
  hyper

SEQ ID NO: 287638 - DNA, 629 bp, Homo sapiens; identical to SEQ ID NO: 202348
  chr10:124221086-124221715
  hyper

SEQ ID NO: 287639 - DNA, 326 bp, Homo sapiens
  chr10:124221921-124222247
  hyper
ctgagggcaaccacacagcgcggggaccccaggacaaataagaggaatgggggcataaaggaaggagagaagttcaggactgggaattggcgcctcgcagagcggcttcaggaccacaagaagtcatttcggttgctttttcttctatttacgtcctccgtcccctttaaaattcactgctttgatcacgggaccgctcagtgaaaactgtatgtaactcttttggaaaggaacagtgtttgccggcccgccccggagtttctccaaaaagtctaccccgagcagggaacggtttggcaccgctctcgtttcggcggcgttgctgc

SEQ ID NO: 287640 - DNA, 69 bp, Homo sapiens; identical to SEQ ID NO: 202349
  chr10:124639063-124639132
  hyper

SEQ ID NO: 287641 - DNA, 162 bp, Homo sapiens
  chr10:124639526-124639688
  hyper
ggtgcgccgggccgccggcgaccgggtcgctgcgctcggcgactgccgcgctcctcggggaacgtgagggtctgagtccgggatccaggagagcagttggtgtcgggtctctgcgggggagcggggctgcgaggtggaggcgaggaccggggtgggcggagg

SEQ ID NO: 287642 - DNA, 35 bp, Homo sapiens; identical to SEQ ID NO: 235179
  chr10:124768241-124768276
  hyper

SEQ ID NO: 287643 - DNA, 42 bp, Homo sapiens; identical to SEQ ID NO: 202350
  chr10:124898993-124899035
  hyper

SEQ ID NO: 287644 - DNA, 367 bp, Homo sapiens; identical to SEQ ID NO: 202351
  chr10:124899187-124899554
  hyper

SEQ ID NO: 287645 - DNA, 133 bp, Homo sapiens
  chr10:124904007-124904140
  hyper
tccactcgcgtgggggcgggggggcagactgtgtttaatatttatcgaagcttgattccaagatcaaacttgtttatgacttcatctgtcatttcggagggagccttcttctattacccggctcagccagcct

SEQ ID NO: 287646 - DNA, 101 bp, Homo sapiens
  chr10:124907167-124907268
  hyper
acccccacgcagggcgccacggtcccaggagtgccggctttgcccgcccactggggctagaaggggtggagggctgggggaggatggtggagcagcctgta

SEQ ID NO: 287647 - DNA, 209 bp, Homo sapiens
  chr10:124908373-124908582
  hyper
ttcctggggaaggttgagttgttgagagagtggaccacagcgagagggacacgcggccggccttacacccggctgtcctcaatcactgcacatctggtactttctttccggacacgaggtggagatctgcaagtcgggtctgggcagtctgtctccaccgtaatctctttctgagtcttcttcctcactcgctccgtatctctgccttt

SEQ ID NO: 287648 - DNA, 203 bp, Homo sapiens; identical to SEQ ID NO: 202353
  chr10:125851929-125852132
  hyper

SEQ ID NO: 287649 - DNA, 96 bp, Homo sapiens
  chr10:125853277-125853373
  hyper
tgtgtgttgcggtgattccaaataaaagcacatcgaaacccctgaaatctggcagtgacaccttgccagatacttcttttttttaaagacagagtt

SEQ ID NO: 287650 - DNA, 97 bp, Homo sapiens; identical to SEQ ID NO: 202355
  chr10:126077712-126077809
  hyper

SEQ ID NO: 287651 - DNA, 1217 bp, Homo sapiens; identical to SEQ ID NO: 223973
  chr10:126106654-126107871
  hyper

SEQ ID NO: 287652 - DNA, 64 bp, Homo sapiens; identical to SEQ ID NO: 202357
  chr10:126136723-126136787
  hyper

SEQ ID NO: 287653 - DNA, 217 bp, Homo sapiens; identical to SEQ ID NO: 235199
  chr10:126490204-126490421
  hyper

SEQ ID NO: 287654 - DNA, 118 bp, Homo sapiens
  chr10:126847239-126847357
  hyper
ggccattgccagcagcctccaccacgagcacgcagagcggggatttctacgaaaaattcctcctcttccctataaaatcctaaacgtggggtcctctgcagccaactgccgcttgggc

SEQ ID NO: 287655 - DNA, 285 bp, Homo sapiens
  chr10:126847584-126847869
  hyper
gccgctgggcctcccgcgggagaaaggcccaggcacgccccggctcccgcgcgcctctgcccaactcgcccggggcgctgggggcagcgcgagggagagaaagaaaggcgcttcccctcggccgcgcggggccgtccggcgccgcggagggctgggaggaggaggaaccgcggcggcccggctgtccctgcgccgcaccgggtccctgccgcccggggcgcgccctagccagcccctcctgctaaactttttctttttgattcgccccacccgaaaagtgcggcc

SEQ ID NO: 287656 - DNA, 123 bp, Homo sapiens; identical to SEQ ID NO: 47906
  chr10:126847900-126848023
  hyper

SEQ ID NO: 287657 - DNA, 370 bp, Homo sapiens; identical to SEQ ID NO: 235201
  chr10:126848388-126848758
  hyper

SEQ ID NO: 287658 - DNA, 93 bp, Homo sapiens; identical to SEQ ID NO: 235202
  chr10:126849003-126849096
  hyper

SEQ ID NO: 287659 - DNA, 647 bp, Homo sapiens
  chr10:126849498-126850145
  hyper
gaaggagaaggaaaacggagagaaaaggaaaggaaagaagcggcgctggccgcagctcccggtacccgctggctgcgcaggagctaggcgggaggcgaggtgagggtcgccgctcgctcactcctcgctcctgtttttggggggggggggcaaaggcggggtctctttttgcaaaccaatgacacaaccccacatgggccggcctcgcccccttcagatactcctcactacaaatcggctctctcgggggattagtggctccgcgaaagtgcacacaagcgcggcgggcgggagggccaggggccgggcgcggcgggcactccctagcccggccccgcccgggaggccctcgggaggcgcgggggcctcggtggcaggggccgaggtcctgtcgcggtggctcggggtccgctgctcccctggcccttcatcctcctccgccccttccacgtggggtaccgggcagccggccacgtgggggaacgcgagccccgggtggccccggtcccatggggccccgcccagccagcggcgccaaccagcccccttcccggcccccgggctccaacttcctcctggtgccccgcaccggccgcttctgccttctcaggcccgcggggtcaggcgcgggccggccacagggggca

SEQ ID NO: 287660 - DNA, 59 bp, Homo sapiens; identical to SEQ ID NO: 235204
  chr10:126850346-126850405
  hyper

SEQ ID NO: 287661 - DNA, 68 bp, Homo sapiens; identical to SEQ ID NO: 235205
  chr10:127511975-127512043
  hyper

SEQ ID NO: 287662 - DNA, 137 bp, Homo sapiens
  chr10:128075549-128075686
  hyper
tttagccacattacagtagacgcggtgggggcggagggcagcagtggcaatcgcaaaataaaacgtatcataaagtggtaacggttcgtgatttaggccagttgttgaaaaataaatgcctgttatatagaatcaca

SEQ ID NO: 287663 - DNA, 220 bp, Homo sapiens; identical to SEQ ID NO: 202362
  chr10:128076024-128076244
  hyper

SEQ ID NO: 287664 - DNA, 153 bp, Homo sapiens; identical to SEQ ID NO: 202363
  chr10:128593608-128593761
  hyper

SEQ ID NO: 287665 - DNA, 871 bp, Homo sapiens
  chr10:128593793-128594664
  hyper
gcggagcgcggggctgggcgcactgggacagaggaaggggagccccggcgaccgcggggtcggggcccagggtccgcgccgagggcgggcgcagagcccgcggccgtcccgcctcccgccggcgctcccggcctttcccatccggcccgcgacgctccgcccgccccgtcccacatgacgccgcctccgccgcaaactttttcctccccatcctgtcgcggctcgaaaggaatggaaaatggcggcctagacgcggagtttcctgcccgacccgcggcggctccggcggcgccatgacgcgctgggtgcccaccaagcgcgaggagaagtacggcgtgggtgagcagcgccgccgccgccgcgcctctcgccccaagcccaggctccggcggggcgggtgtgccgggcgcctgttgccgccgccccgagcggccgccgggccggggagaggcgcttccgcccgcgcccgcgccgccgccccgctcgcaatgcccggcgaccccggccgccccgcgcccccggcggcgtcagctccagccccggggatgcgggtcgggaacacgagggggtggggtgggaatgggggcgggcgcgtccctccctagggtgtcccctccgacgcccgctcctctggacctctgccgtggagccccccgggctacccccaactccccggccccggccgctgctatctgcgcggctgggcccgtcagggaagcccaggggtcactgtctcgcggcggcttctgcttcttggatgaacttgcgtcccgcgtccgggctctgggtgggcgggctcaggtcggcgcggtcccagcggataattccgccctttcccggcggggaggagggggcgcgacctgggtggcca

SEQ ID NO: 287666 - DNA, 36 bp, Homo sapiens; identical to SEQ ID NO: 202365
  chr10:128993454-128993490
  hyper

SEQ ID NO: 287667 - DNA, 47 bp, Homo sapiens
  chr10:128994482-128994529
  hyper
ggccggcccccgcgccgcagctcgcgtcgctcgcgtccctccggccc

SEQ ID NO: 287668 - DNA, 141 bp, Homo sapiens
  chr10:128994545-128994686
  hyper
cggggaggcagcggctgggccagctccggggacgcccgcgcgctcgcttgctcgcgacgcggcggagccagccacagccacccggcttcgcgctcctccgatgtcctcatttactgcaattgtcttcggcgagatctcaga

SEQ ID NO: 287669 - DNA, 92 bp, Homo sapiens; identical to SEQ ID NO: 202366
  chr10:129534422-129534514
  hyper

SEQ ID NO: 287670 - DNA, 45 bp, Homo sapiens; identical to SEQ ID NO: 202367
  chr10:129534541-129534586
  hyper

SEQ ID NO: 287671 - DNA, 421 bp, Homo sapiens
  chr10:129705208-129705629
  hyper
ggccatacccgcctcgcaggtggggcgggcgccctggatgcgctccccgcgccgggcaccaggcgtcgcccccgctcctcgcagcgcccaggcccccgcccccgccgcggagccacagccggagctggagccgaggcggcggcgggacgcggccggccggacaaatttcctgctaggctgcggacagcgggcggcaggagccggcgcgagcggcttcaggaacccacggcctctgcgcgtccccgcgacccttcttcgcgcccggcgaagacagccgggcgccccggagggcggcgggcaggcgcccgggagatgcggagcctccgctgcagcgcgatctgcgcgaccagaccggcccccccgaggtgagcgcgcgtgcggacagggaccctgcgcccctgtggggaactgtgcaccccgg

SEQ ID NO: 287672 - DNA, 181 bp, Homo sapiens; identical to SEQ ID NO: 202368
  chr10:129706031-129706212
  hyper

SEQ ID NO: 287673 - DNA, 107 bp, Homo sapiens; identical to SEQ ID NO: 202369
  chr10:129923799-129923906
  hyper

SEQ ID NO: 287674 - DNA, 348 bp, Homo sapiens
  chr10:129948377-129948725
  hyper
gagcggagcccacgcggccctggagcgcggtggctgggcccgtagcgccacctggcggcggatcagggcccccgcgcccttgcgtcctcggaagggggaggggaagggactccaccctgcaccccccacagcgcgctcccgaggccgtttcccaaggatgcgcgggcccgaggggatggggacgcggcccgcgcggcgcgttcctggctacctggagtctgggaatggcgaatcccactcgcagcggacacaggcgaggcgcagcgggacgggattggtgggaacggaaacagcggtcacctgggagcccagaaccagcgagtgcgcggtgcagcgttcgcttaccaa

SEQ ID NO: 287675 - DNA, 36 bp, Homo sapiens
  chr10:129948755-129948791
  hyper
tctggacgccagtgggccggcgttaccctgttgagc

SEQ ID NO: 287676 - DNA, 142 bp, Homo sapiens
  chr10:130338585-130338727
  hyper
cgccaccgcaaccaacaggcctcttcatgggaaattggctgaaaatgtgctgaccggcataaaacttttattagaatccgagagcaggaggctgaacttccagggaatgacgggtctgggcgggctggggagggcgcagcca

SEQ ID NO: 287677 - DNA, 333 bp, Homo sapiens
  chr10:130338995-130339328
  hyper
gacagactttctgaaaggggaaagggacataaatcaggaaattaaaaaaaaatagtttctgcacattttcaaaacccacgttgcgctctctaaggtccttttcattttaaccaaatcagggggaacttgtcctcacagcggcgaggcagatggaacaataaatcacaggcgccgttgactgcctgcagtgcgctctccacagctgtcacttttttgtctctttggttttagctgacatggtttgaggtccactgtgaaccaatctggacttttttttacagtcatatccatcaaaacgaccagtggccatcagcccgctgcggccatcgatcg

SEQ ID NO: 287678 - DNA, 236 bp, Homo sapiens; identical to SEQ ID NO: 202371
  chr10:130339417-130339653
  hyper

SEQ ID NO: 287679 - DNA, 96 bp, Homo sapiens; identical to SEQ ID NO: 235224
  chr10:131909004-131909100
  hyper

SEQ ID NO: 287680 - DNA, 110 bp, Homo sapiens
  chr10:133110981-133111091
  hyper
catcccgggtccacagcttcagtgcagcccctggcgacgcgcgctgacagctgggcagagacttccgtgcgctgtaaaccccttaggtcgctaaacccaggaaacccaag

SEQ ID NO: 287681 - DNA, 160 bp, Homo sapiens
  chr10:133999363-133999523
  hyper
cgctcctgccgtgaccgcgcggcagcctcaggagcccgcgaggcctctggcccggcccaagcttggctgcgtgttccgctgcgtggaggacgccttcgagagcaagacgctgccgctggacgctctgggcggcggccgcccgggccctcgggttgggagg

SEQ ID NO: 287682 - DNA, 133 bp, Homo sapiens
  chr10:133999554-133999687
  hyper
cggccgcagcaagtccccgagggcagcccggcgtggcccaggcccgggacccccagcaggtagtggccgcgggacagaggccgtgggcccgggctcggactccccgagaccctcgcacccggaggacgccggg

SEQ ID NO: 287683 - DNA, 112 bp, Homo sapiens; identical to SEQ ID NO: 7815
  chr10:134045912-134046024
  hyper

SEQ ID NO: 287684 - DNA, 37 bp, Homo sapiens; identical to SEQ ID NO: 202373
  chr10:134120669-134120706
  hyper

SEQ ID NO: 287685 - DNA, 387 bp, Homo sapiens; identical to SEQ ID NO: 202374
  chr10:134121014-134121401
  hyper

SEQ ID NO: 287686 - DNA, 129 bp, Homo sapiens; identical to SEQ ID NO: 202375
  chr10:134209484-134209613
  hyper

SEQ ID NO: 287687 - DNA, 128 bp, Homo sapiens; identical to SEQ ID NO: 202376
  chr10:134209650-134209778
  hyper

SEQ ID NO: 287688 - DNA, 945 bp, Homo sapiens
  chr10:134210377-134211322
  hyper
cgggctcgtggctctcgggtcctcccgagccaggggacactcccggccagcgtgggccgcgagcccgggcgcagccccctctccagcccgggggtccgcaccgcgcgtccggccgacctctgcgggcgggcgcggcttctcccgggacgcggcggcggcgggcggggtccccgggagcggagcccgcggccgcgcgcccccggcccggctcggctcggctgtggcggccgccccagcggagctttgtgacgtcaggcggccgcggggcggcgtcacgcgcggggctgacccggcggcggcggcggcggcggcggcggcggcggggcgggggcggcctgggacgcggcgggagcatggagccgcgcgccggctgccggctgccggtgcgggtggagcaggtcgtcaacggcgcgctggtggtcacggtgagctgcggcgagcggagcttcgcggggatcctgctggactgcacgaaaaagtgagcgggggcgcgggccgggacacccccggggtccccacgcgacacccgcctccgccgcccggagacccgggacccgcctccgggttgggggtggcgtggccccggcgcccgctttcggtttctgccgagcctgagtttcggggcgcgcgagcgcggccgccactcgggggggcaaaagtggttctcaaagtcgtcgcgacttttcggggcgggcgccgggccggggcgggccggggcggggggcgcggggccggggtcccggaactccacacatctgccataattaatgcacttttctttgttcagagccactgttgaattcgactgttggcagaattgtcgttaaagcaggggagggtcagatgcgccgtggccttgccctggcagttcctcacaggtgggggtgccctgtcgaaggccacgggcccctggctgctgggagtgactccgcggctgaggtttgg

SEQ ID NO: 287689 - DNA, 57 bp, Homo sapiens; identical to SEQ ID NO: 235237
  chr10:134350649-134350706
  hyper

SEQ ID NO: 287690 - DNA, 770 bp, Homo sapiens
  chr10:134351009-134351779
  hyper
cgccggtcgcaagagcgccccgcgtaggccccgccccgaaaggaggccccgccccggggcaggccccgcctccacaaggacaccaagtcccgcacaagccacgccccccgcaggccccgccccactctgttcagatctaggcccaactcaggctccgcacctcaaggctccgcccccagcaaggctccgccccaggcccggctccaccccgcacaggccccaccccgagtcaggctccgccccgcccaggccccgccccgggctcggctccgcggggcgggacttgccctcagcctgagtcggcggcggctgcgggaactttcccagcggatctaatggctgcgcgcgggccgctgtgaggcgcggcggcgagcgacgggcgcggggccgcggagcagcgagcgagcgagcgagcgcgaggccggagccccggccaggcccggccgacccgccgagcccgcgatgcgccccggggccgccccccggcgcagctgacgccccgcggccccgcgaagaccccggccggccggtcccggaggaagcggccgccgccgccgccgcccagcccagcgcccgcgccgcccgggcaccatggcggggaaggcggccgccccgggcaccgcggtgctgctggtcacggccaacgtgggctcgctcttcgacgacgtaagtcccccgtgccggcggcaggccccaagcccggaacccccgaccctgaccccggggtcccgaactgcaagccttggaccctggaccgtgaacctccagac

SEQ ID NO: 287691 - DNA, 116 bp, Homo sapiens
  chr10:134597971-134598087
  hyper
cggggactcgaggcgggtacgcggctcacccgccctttcgggaacccccaagcgcgtccgaatccgccccgaggcgaggcgggccgggccgtacctgctgctccgtccccggctcc

SEQ ID NO: 287692 - DNA, 162 bp, Homo sapiens
  chr10:134598860-134599022
  hyper
cgaaggttttctccagcgcgaagatctgctggcccgagaaggtcgggcgcgagtgcttcttcttcccgtccttgtccaggacgccgccggccggggctgcaagggaggggaagggagggaggtcagcggccggcggggtccccctccgcgcccacccgcccc

SEQ ID NO: 287693 - DNA, 206 bp, Homo sapiens; identical to SEQ ID NO: 202379
  chr10:134600998-134601204
  hyper

SEQ ID NO: 287694 - DNA, 131 bp, Homo sapiens; identical to SEQ ID NO: 202380
  chr10:134602414-134602545
  hyper

SEQ ID NO: 287695 - DNA, 92 bp, Homo sapiens; identical to SEQ ID NO: 235242
  chr10:134650441-134650533
  hyper

SEQ ID NO: 287696 - DNA, 62 bp, Homo sapiens
  chr10:134676276-134676338
  hyper
ggcctcggggagcaggttcaggagaggctggagggggacggggcggccgggctgcactggct

SEQ ID NO: 287697 - DNA, 46 bp, Homo sapiens
  chr10:134676653-134676699
  hyper
ttcactccccaagtcccagagctcaggaccacggaggccccggcat

SEQ ID NO: 287698 - DNA, 138 bp, Homo sapiens
  chr10:134756183-134756321
  hyper
ccccgccagctccgcgggagtgagacaccagggcagcgacccccggcgaggggcgggaagaagaaaggggagggaaggcggcgtggggggacgccgggggctccgcgcgggcctcctctccccgctcagggctcctgt

SEQ ID NO: 287699 - DNA, 97 bp, Homo sapiens
  chr10:134902307-134902404
  hyper
ccttccagaggccatggaggctggcggggagcagggcgccacctgatcgcctccccctggacgcctcctccagcggcgctcacgcttccgcaacttt

SEQ ID NO: 287700 - DNA, 457 bp, Homo sapiens
  chr10:134973432-134973889
  hyper
agaccccggcccagcgaccgccccgccccccaccccgggccccgccccccaccccgggccccgcccggccctgcccaacgccgctgcagaggccaccccgggactgcggcagccccgcccggcagcagcgggggtgggacgggggcggcgggagccggcgagggggtctgcccgtccgagctttcctgggcgccggctccgcccctcgacccttggggcccaggtggggcgcagaccccgtggctccccgcggaggccacacgcctggctccgcccccggtgcctcccccaggaaggagcgacgttccctaggcgccgggtccggacagcgccgcgcagcccccgcgcaccccgcgccccccgcgccccccgggcccgccccgtatccctgaccgcgtcccctggagacactgcggcagcggcgggcgggcgggggcgggcgagggccgggcgcgtc

SEQ ID NO: 287701 - DNA, 216 bp, Homo sapiens
  chr10:135050910-135051126
  hyper
caccggcctgactctcccaccccgaagcctgctcccaacctaagtccgccctgactctcccagcctgaagcctgctcgccctcgggtgtccgggctgggcacaggcgccagcgtccccctggagaggagaggtcgcccggcacctcccaggacaggcccaagtgggagtgggaccctcctaccttcctgcagcctcggcccgcggggtggggggtt

SEQ ID NO: 287702 - DNA, 97 bp, Homo sapiens; identical to SEQ ID NO: 47990
  chr10:135071117-135071214
  hyper

SEQ ID NO: 287703 - DNA, 135 bp, Homo sapiens; identical to SEQ ID NO: 202383
  chr10:135074988-135075123
  hyper

SEQ ID NO: 287704 - DNA, 129 bp, Homo sapiens
  chr10:135090195-135090324
  hyper
ctcggggtccgcgtcgcgtcctgcggggagagccaccctgccccgcgctgcgcccgggacggttccctggaaccactcaccaggcagcatcatcgcgcccagcagccagagcccgaggccgcgcatggc

SEQ ID NO: 287705 - DNA, 106 bp, Homo sapiens; identical to SEQ ID NO: 47994
  chr10:135090391-135090497
  hyper

SEQ ID NO: 287706 - DNA, 42 bp, Homo sapiens; identical to SEQ ID NO: 120067
  chr10:135121725-135121767
  hyper

SEQ ID NO: 287707 - DNA, 120 bp, Homo sapiens
  chr10:135149102-135149222
  hyper
gggactagcctgtgtgtggggtccaacccccccaccccacacaccagaccttccctttgcattgctgcgtcatgggggcctcctcccacggatgacacgcggctcgtggaactggggggc

SEQ ID NO: 287708 - DNA, 456 bp, Homo sapiens
  chr10:135149869-135150325
  hyper
ccacccccaacccccgtgcgggcagcggctcctcggtgctctggtccgacgccccttctgtcgccctccccaccccgcctccggcggacagagctgggcgggagctgggactggtaccccctccccacctcggagacacccttaactccaggctgcgatcctcgtgccggggccccgccgtcacgggaagcctggagaccaccgccctcgggtccgcggggtcggactggcctggggcagccagaggaggcccgagggaggagggcggccgtgcagcgcgccctgcacactcgcacccgcacacgcgcctcgcacacacgcactcacaccctcatccgcacgcgcgccacgcacaagcgcactcgcgagcacacgcacctcgcacacacacccgcacacgcgcctcgcacccccgcaccccttcgggccccccgcccacattctgcaagaaatgtg

SEQ ID NO: 287709 - DNA, 151 bp, Homo sapiens; identical to SEQ ID NO: 235258
  chr10:135192040-135192191
  hyper

SEQ ID NO: 287710 - DNA, 125 bp, Homo sapiens; identical to SEQ ID NO: 235259
  chr10:135333791-135333916
  hyper

SEQ ID NO: 287711 - DNA, 229 bp, Homo sapiens; identical to SEQ ID NO: 235260
  chr11:207667-207896
  hyper

SEQ ID NO: 287712 - DNA, 37 bp, Homo sapiens
  chr11:279532-279569
  hyper
aggtggcccgcaagaccctcaagagggcggacgcgcg

SEQ ID NO: 287713 - DNA, 76 bp, Homo sapiens
  chr11:280032-280108
  hyper
gcctgccccacctccgacccttgtccccgcgctgtctcccgctgcgcccagagtacaagaagaagtaccgggagca

SEQ ID NO: 287714 - DNA, 269 bp, Homo sapiens; identical to SEQ ID NO: 120087
  chr11:280472-280741
  hyper

SEQ ID NO: 287715 - DNA, 60 bp, Homo sapiens; identical to SEQ ID NO: 202385
  chr11:308266-308326
  hyper

SEQ ID NO: 287716 - DNA, 94 bp, Homo sapiens
  chr11:308362-308456
  hyper
ggtctggtccctgttcaacaccctcttcatgaacacctgctgcctgggcttcatagcattcgcgtactccgtgaaggtgcgtatggccctggcg

SEQ ID NO: 287717 - DNA, 412 bp, Homo sapiens; identical to SEQ ID NO: 202387
  chr11:314083-314495
  hyper

SEQ ID NO: 287718 - DNA, 31 bp, Homo sapiens; identical to SEQ ID NO: 235266
  chr11:369237-369268
  hyper

SEQ ID NO: 287719 - DNA, 953 bp, Homo sapiens
  chr11:416597-417550
  hyper
ggttcgacgctcagcacccagcaccctgcgggcgactcccgctcagctcggacgcgccgcccctccgctccccgtgcgcgctgggcccccagcgcctgtcctgaagcaggaacgtgggtaaaaggctgcggccccgcaggccgaggggctctggttcgctcccctaccccgcgcccacctgcgccctgggcgccctccaagtgaggagggcggagaacgaggacgcgcgcgggaggcgggcacgggggtgcggctcggggcgctcggccggggcagaggcgcgcggatggcggaagctccacccggcgccgggcgagctcgggccccagcctgactcttggtccgccctcggcgcctcaggaagcctcgagctgggatccaggcttgggcgaccgaggtgggatccctgcgcgcctcggcgctcctagccccgctctgttctgcgcgagggtcaccaaaaagccgctgaccacgtcgggcagaggaaagggtggcccccgcccccttcgcccactttcctcccttcccccagccctggaaagggccaggacgcgggcgagctcgggcttccgggcgacgcgggaacctccccggccccgagccatttcctgagagaccgcgcccagggacaagcagcgccccgggccccgactccaggcctgcagcggctctgggaggactgcgacctccactcaccttcgcgggtctgatggcgaccgccactcacctgctgccaggacctggggctcgcgccgggcgggggcggggcagctcacctgagccaggtgcgcagcggcaacagccccggcggcggcgtagccccggcagcggcagcaggtgcggccccgccccgcagtcagggcgggggcggaccccagcgtcccgctctgcgcccaaggctggcgctggaggctgcgctgctgcccgggagccgctgccgcacgggcctgggg

SEQ ID NO: 287720 - DNA, 146 bp, Homo sapiens; identical to SEQ ID NO: 202389
  chr11:441946-442092
  hyper

SEQ ID NO: 287721 - DNA, 268 bp, Homo sapiens; identical to SEQ ID NO: 202390
  chr11:450011-450279
  hyper

SEQ ID NO: 287722 - DNA, 105 bp, Homo sapiens
  chr11:485908-486013
  hyper
acgggcgcgcgtgtgctcaccgtgcgcgcaggcgagcgtaaacagtgcacgggcgcgcgtgtgctcaccgtgcgcgcaggcgagcgtaagcagtgcacgggcgcg

SEQ ID NO: 287723 - DNA, 79 bp, Homo sapiens
  chr11:486095-486174
  hyper
ctggtgccctggtgcgtgtgtgctgtgagcacaggtgtctgtaaatgatgtaaacctcccttgacgtcaggcccaaaag

SEQ ID NO: 287724 - DNA, 182 bp, Homo sapiens; identical to SEQ ID NO: 202391
  chr11:518712-518894
  hyper

SEQ ID NO: 287725 - DNA, 61 bp, Homo sapiens
  chr11:518933-518994
  hyper
gaaaccccgcccccaaaccgaggggaacttgcggccccaagacgcggcgcgcttacgaggg

SEQ ID NO: 287726 - DNA, 399 bp, Homo sapiens; identical to SEQ ID NO: 202392
  chr11:537174-537573
  hyper

SEQ ID NO: 287727 - DNA, 211 bp, Homo sapiens
  chr11:568188-568399
  hyper
actgccgggtgggcgggcggagggattgaccccacccccgtcccctccaacttgggcgtccgagccccgccgcgcctgcccagcccgaccccccgcagcccccgcgggagggcggcctctgaggggcgccccgcccgccaacctgggatccctcgcgcgtcacctgcgaccccggcgcggggccgtcgccggctctcggcccaacttcagc

SEQ ID NO: 287728 - DNA, 184 bp, Homo sapiens; identical to SEQ ID NO: 202393
  chr11:575194-575378
  hyper

SEQ ID NO: 287729 - DNA, 221 bp, Homo sapiens; identical to SEQ ID NO: 202394
  chr11:575604-575825
  hyper

SEQ ID NO: 287730 - DNA, 60 bp, Homo sapiens; identical to SEQ ID NO: 235272
  chr11:576422-576482
  hyper

SEQ ID NO: 287731 - DNA, 93 bp, Homo sapiens
  chr11:615557-615650
  hyper
ggtgtgactgcaggtgtggccggcgcgcacacatgaagtcacaggtgttgaaccagtgtccaggcctggcgggaaggcgcaggccggaccctg

SEQ ID NO: 287732 - DNA, 151 bp, Homo sapiens; identical to SEQ ID NO: 120121
  chr11:639682-639833
  hyper

SEQ ID NO: 287733 - DNA, 268 bp, Homo sapiens
  chr11:694728-694996
  hyper
acgaggcgagaggccggcgggcgcacttgcctgcgaaggctgcggcagcggcggcctcgtcggggccgggcagggcctcggcgcccatgtccatgtgcccgggctccgccgccatcaccgccactgccgtgacccgcggcgtctcccgctccgcctccgagtctgcgtcctcctccgagtcctcgtccctgctcagcaccggctcctccgcctcgcctcctgccgcggccgcggccgccgccgccacagcggccgcggccgccaccgc

SEQ ID NO: 287734 - DNA, 687 bp, Homo sapiens; identical to SEQ ID NO: 224017
  chr11:705951-706638
  hyper

SEQ ID NO: 287735 - DNA, 189 bp, Homo sapiens; identical to SEQ ID NO: 224019
  chr11:721128-721317
  hyper

SEQ ID NO: 287736 - DNA, 177 bp, Homo sapiens; identical to SEQ ID NO: 235276
  chr11:796407-796584
  hyper

SEQ ID NO: 287737 - DNA, 67 bp, Homo sapiens; identical to SEQ ID NO: 202395
  chr11:809683-809750
  hyper

SEQ ID NO: 287738 - DNA, 93 bp, Homo sapiens
  chr11:829438-829531
  hyper
cgacgtgcagggcacggcgggctctctggatgaggaggaggaagaggaggagcgattccacactgtgctggagcagctgggggtggccccggt

SEQ ID NO: 287739 - DNA, 34 bp, Homo sapiens; identical to SEQ ID NO: 202396
  chr11:832781-832815
  hyper

SEQ ID NO: 287740 - DNA, 47 bp, Homo sapiens; identical to SEQ ID NO: 202397
  chr11:842931-842978
  hyper

SEQ ID NO: 287741 - DNA, 41 bp, Homo sapiens; identical to SEQ ID NO: 235280
  chr11:910924-910965
  hyper

SEQ ID NO: 287742 - DNA, 103 bp, Homo sapiens; identical to SEQ ID NO: 202398
  chr11:1357360-1357463
  hyper

SEQ ID NO: 287743 - DNA, 473 bp, Homo sapiens
  chr11:1357818-1358291
  hyper
ccgtcattcagacgcgaagacaaagcgtccctggctcagccctgagaagcagcgggacggcggcgcgttcctgagttcccgccacgcgggcgcccggcgagggcggggcggggcggggcgggcgggggggcggggcgtggagggcgggggggcggggcgtggagggcggggggcggggcgtggagggcgggggcggggcgtgggggcgggggcggggcgtgggggcggggcgtggagggcgggggggcggggcgtggagggcggggggcggggggatggggacaaggtaggggtcgtggggcgctgggctcaccccaggccctcaggtgtctcgagatggcccgggctccgagcgctcccggcgcttacgctagagcctcctcctgtgcgaaacgcgtccgtgcccaggcgcggggaccctgcagggctgtgggttcgcgctgccgctgatcctgcgtcttcccccctcccag

SEQ ID NO: 287744 - DNA, 52 bp, Homo sapiens
  chr11:1358332-1358384
  hyper
cctccaggtgcggatgagacgcgcggacagcgggatggagaaggtgagacct

SEQ ID NO: 287745 - DNA, 732 bp, Homo sapiens
  chr11:1410710-1411442
  hyper
ccggacgtggcagccggcgggctggaggctcccaggtcccggcctcgccctggcctcgcctcgccccctagagtctccccgagcgctcgtagcggcggggcggggtggggaggcgctgattggccggcgcgggcaccgcttgccgccgccacggcatcccgctgcgttcgtacaggctcgtgtcgactcggctccgttgcgcggcccggctcggctcccctcagctgcgctcgactccgctgttcggctcggctgttcggcttggctacagggctcggctgttcggcttggctacatggctcggctgcgcggctcggctctgttcggctcggctcggctgctgggctcggctgttcggctcagctgcgcggctcggctcgtctcggctctgttcggctcggctcggctgctgggctcggctgttcggctcagctgcacggctcggctcggctcggctcggctcggctgcgcggccgctgacgggcgtgcgctgggggcgcggggcgcggggcgcgggcctcggcggcggcggcggcggcggcggcggaagccaggtgcccccgcccgccctgtcctctcgacgaggcggaggcgtcgccgcgggccaggcctcggactgccgcgtcggagtggacgcggggggcggcggcgcgggcggacgcgggcggcgcgaagcagcggggcccgcgggggcgccccggccgggtcggcgcggacggcactcggcggacg

SEQ ID NO: 287746 - DNA, 677 bp, Homo sapiens; identical to SEQ ID NO: 235284
  chr11:1568236-1568913
  hyper

SEQ ID NO: 287747 - DNA, 498 bp, Homo sapiens; identical to SEQ ID NO: 224022
  chr11:1592747-1593245
  hyper

SEQ ID NO: 287748 - DNA, 95 bp, Homo sapiens; identical to SEQ ID NO: 202401
  chr11:1593577-1593672
  hyper

SEQ ID NO: 287749 - DNA, 117 bp, Homo sapiens; identical to SEQ ID NO: 202402
  chr11:1594039-1594156
  hyper

SEQ ID NO: 287750 - DNA, 65 bp, Homo sapiens; identical to SEQ ID NO: 202403
  chr11:1674134-1674199
  hyper

SEQ ID NO: 287751 - DNA, 152 bp, Homo sapiens
  chr11:1769712-1769864
  hyper
cgccggacccacagcgacgctgcctcagccgccaaccggcagagctagcagagcggccaaagcacctgcccacggcgcccgcggacacccgataccgccacgggcaccgccacgggctccaccgcgggctgcaccgcgggctctccagaccc

SEQ ID NO: 287752 - DNA, 216 bp, Homo sapiens; identical to SEQ ID NO: 235288
  chr11:1968629-1968845
  hyper

SEQ ID NO: 287753 - DNA, 98 bp, Homo sapiens; identical to SEQ ID NO: 202405
  chr11:1970024-1970122
  hyper

SEQ ID NO: 287754 - DNA, 90 bp, Homo sapiens; identical to SEQ ID NO: 202406
  chr11:2290847-2290937
  hyper

SEQ ID NO: 287755 - DNA, 565 bp, Homo sapiens
  chr11:2398758-2399323
  hyper
ccgcccgccgcccgcgccgccatgggagtggagggctgcaccaagtgcatcaagtacctgctcttcgtcttcaatttcgtcttctgggtaagggctgcgccgggggccggggcgggagggggcaggcacacactccacgttgggcaggtcccgcggcagcgtgctaggccccgcgggcgcagcgcgggccgcgaagttgtggggccacctgtgggctccaggagcggggtggggggtcgcccggggccaccgcgccccccgacattggggctgagggctgcgagccgagtttcggggcctctgtgctcgggggcccacctctgcggccgggccggggcttctgggggccgccgggcagttcccgctgtggtggtgatgggtgcggtggtcgcgggtcgggacccgagtacccggccgcccctcagctaaggaggggcctgcgcgggtccctggccgcggattccggactgctgcttcgcggggacgaggggggggctcgcgggcgggactcctggcgccccgcccccatgagctcatcaagagccgccgcccctggatggtgggg

SEQ ID NO: 287756 - DNA, 415 bp, Homo sapiens; identical to SEQ ID NO: 120183
  chr11:2399399-2399814
  hyper

SEQ ID NO: 287757 - DNA, 176 bp, Homo sapiens; identical to SEQ ID NO: 202407
  chr11:2421277-2421453
  hyper

SEQ ID NO: 287758 - DNA, 129 bp, Homo sapiens
  chr11:2465520-2465649
  hyper
ctcacccaggacatccctttcctccccccaaccccaactccggagtggctcagagggagggaaagtagatgccggcaccctaccccgcccctcctgcccccgctgtgccgttctcggtcgtggtatcgg

SEQ ID NO: 287759 - DNA, 172 bp, Homo sapiens
  chr11:2466004-2466176
  hyper
agccagggggtgaggcggaggcagggccaggccggtccgtggggagagggcgggccaagccggtgggcgcgggcagggacgccctgtgcgcgccggaccggcgggggcggggcgtgcaggcgggggcggggcacgccgtcccatgggaccggccctcggccactgccccctc

SEQ ID NO: 287760 - DNA, 250 bp, Homo sapiens
  chr11:2466191-2466441
  hyper
cgcccgggctgggccggcagcggccccccgcggcggggctggcagcagtggctgcccgcactgcgcccgggcgctcgccttcgctgcagctcccggtgccgccgctcgggccggccccccggcaggccctcctcgttatggccgcggcctcctccccgcccagggccgagaggaagcgctggggttggggccgcctgccaggcgcccggcggggcagcgcgggcctggccaagaagtgccccttctcgct

SEQ ID NO: 287761 - DNA, 109 bp, Homo sapiens; identical to SEQ ID NO: 202408
  chr11:2554316-2554425
  hyper

SEQ ID NO: 287762 - DNA, 64 bp, Homo sapiens; identical to SEQ ID NO: 202409
  chr11:2554454-2554518
  hyper

SEQ ID NO: 287763 - DNA, 67 bp, Homo sapiens
  chr11:2884036-2884103
  hyper
ccgggcccgggaagcgcgcttctctcttttcatttctccaaaatgggatcttaagtgattctgaatg

SEQ ID NO: 287764 - DNA, 90 bp, Homo sapiens; identical to SEQ ID NO: 235298
  chr11:2890916-2891006
  hyper

SEQ ID NO: 287765 - DNA, 349 bp, Homo sapiens
  chr11:2905510-2905859
  hyper
tacgtcgccgcgcaatgtgctgtgtaagcatttccccttgtcccgcggccaagccccccggggccgccgccgcgcttaaccccctccacgccgtgctcacggcgcccggccgcgcccggggaggggctcccgcggccgggggcgaaaactgcgctcccggggggtcgcggccgggattcagcctcccaccccgcccgcgcgaagccgctggagggcacaacaacggggcggggaggggggtaagggcgcagccgcgccctgagcgctgcgggccctttaatgccacgggaggaggcgggaacccagcgaggcccccgagggctggggggaccggccggccggacaaagc

SEQ ID NO: 287766 - DNA, 269 bp, Homo sapiens; identical to SEQ ID NO: 202412
  chr11:2906036-2906305
  hyper

SEQ ID NO: 287767 - DNA, 201 bp, Homo sapiens; identical to SEQ ID NO: 202413
  chr11:2906580-2906781
  hyper

SEQ ID NO: 287768 - DNA, 170 bp, Homo sapiens; identical to SEQ ID NO: 202414
  chr11:2906971-2907141
  hyper

SEQ ID NO: 287769 - DNA, 60 bp, Homo sapiens; identical to SEQ ID NO: 235300
  chr11:2923533-2923593
  hyper

SEQ ID NO: 287770 - DNA, 412 bp, Homo sapiens
  chr11:2950407-2950819
  hyper
gctccacgcagtccaccttgaggatggagtggaagcgcagctccttggggcgcgcgcgggggctggcggggaacaggctcaggcggtcggaggtgagcaccccgcgcttcttcttccatagctggaagaggctgtcgctgcgcttctccaactcgccctcgcgtagcacctcgtcgggggatttcatgtcgtgccgagcgcgggactgggagcggcaatgcgggcggtgacggcgccggctctgctcctcgtggccccggcgcggcctttatagctgcccctccccgccccgcccctccccgccccgccccggccctcgggccaccccgcccgcctgagccccgcgcgccccgggccataccctccccaagcccagccgtccgggcccgcaccgtcgcgtccgcgctctggt

SEQ ID NO: 287771 - DNA, 433 bp, Homo sapiens; identical to SEQ ID NO: 224029
  chr11:2951691-2952124
  hyper

SEQ ID NO: 287772 - DNA, 297 bp, Homo sapiens; identical to SEQ ID NO: 235302
  chr11:3013495-3013792
  hyper

SEQ ID NO: 287773 - DNA, 140 bp, Homo sapiens; identical to SEQ ID NO: 202415
  chr11:3014088-3014228
  hyper

SEQ ID NO: 287774 - DNA, 299 bp, Homo sapiens; identical to SEQ ID NO: 235304
  chr11:3078596-3078895
  hyper

SEQ ID NO: 287775 - DNA, 77 bp, Homo sapiens
  chr11:3181649-3181726
  hyper
gcgacccacactccccgcgtcgcattcaccctaataggcgggcatacaaatgccgttgcctggagccgcagcccagc

SEQ ID NO: 287776 - DNA, 39 bp, Homo sapiens
  chr11:3181727-3181766
  hyper
aatgggacccacagcggcgcgccctttagttgactctgt

SEQ ID NO: 287777 - DNA, 220 bp, Homo sapiens; identical to SEQ ID NO: 202416
  chr11:3186008-3186228
  hyper

SEQ ID NO: 287778 - DNA, 290 bp, Homo sapiens; identical to SEQ ID NO: 202417
  chr11:3186311-3186601
  hyper

SEQ ID NO: 287779 - DNA, 235 bp, Homo sapiens; identical to SEQ ID NO: 235308
  chr11:3224437-3224672
  hyper

SEQ ID NO: 287780 - DNA, 34 bp, Homo sapiens; identical to SEQ ID NO: 235309
  chr11:3400477-3400511
  hyper

SEQ ID NO: 287781 - DNA, 242 bp, Homo sapiens; identical to SEQ ID NO: 202418
  chr11:3444553-3444795
  hyper

SEQ ID NO: 287782 - DNA, 164 bp, Homo sapiens
  chr11:3663251-3663415
  hyper
gggagtttattgcccgccccccgccccaagtctccgcccccgactccccacaccccttcctcagagcctccagtctggggacctttccgagactgtaaaggcggggccgcagtttggctccgcctgagaggggagggccgggggcggaggacccacttgaaggc

SEQ ID NO: 287783 - DNA, 226 bp, Homo sapiens
  chr11:3663525-3663751
  hyper
cccccgcgctggtaacccgacacccctttcccagcgccgcacgcggggccgggagcgggcgcgccagggcagggactgaggagcaattccctttctcaaggcctgcggggtctttctgcgggaccctctttggctgtgagtgatggggaggaaacttgtgagactcggcctctccctcaggcgggccctgacccggtcggcccctggtccccggcccaccaggcca

SEQ ID NO: 287784 - DNA, 332 bp, Homo sapiens; identical to SEQ ID NO: 235311
  chr11:3818839-3819171
  hyper

SEQ ID NO: 287785 - DNA, 74 bp, Homo sapiens
  chr11:6281090-6281164
  hyper
gagcaggtggagccgcgttgggagcccgccgggtcgagctgagtaaggcggcgggctcggcgggggccatggag

SEQ ID NO: 287786 - DNA, 157 bp, Homo sapiens
  chr11:6341237-6341394
  hyper
taggtggatggaagcggggagcccccagctggtggcccacaggccggcaaaggcctcggattggggaccgtttgaggtcactgaccttgaagagcagaacgtggagcttcccgcgcgccaccagcagcccgtggttggcctccagccgctgcacctg

SEQ ID NO: 287787 - DNA, 285 bp, Homo sapiens
  chr11:6341484-6341769
  hyper
ggtggtgtcgtggctgcgactcagagcgcccaggccgctctggatgcggcgcacggaccctgccaggcctccctgccttcgagccaggcctccctgccgctcccgcagagtctccagcatggaggccagcttctccagcagggtcaccaccgtcacggcgtgcacgggaccccccgccggcgcctcgggcacaggcccccgctccaacgcactctccctcatgatccctgaccgctctgctccgtctgcctgcaactgctggccgcactacggtcaggggcctcc

SEQ ID NO: 287788 - DNA, 41 bp, Homo sapiens; identical to SEQ ID NO: 202420
  chr11:6440456-6440497
  hyper

SEQ ID NO: 287789 - DNA, 197 bp, Homo sapiens; identical to SEQ ID NO: 235316
  chr11:6495354-6495551
  hyper

SEQ ID NO: 287790 - DNA, 218 bp, Homo sapiens
  chr11:6502787-6503005
  hyper
aagtgagaactaagtcgtttcgaggccagacgttcagctcgcattcctgcacacatcgcgggaaccccacagggccagggatttgagggctggaaacttcgggctatggcgcgcgggcctgggaaactttgggcggcgcgaccttgactagaagtgtggggcccttatcgctgagtttgtggtcccccttttctctcagctgcgtgacttcctgttgg

SEQ ID NO: 287791 - DNA, 250 bp, Homo sapiens; identical to SEQ ID NO: 235318
  chr11:6625058-6625308
  hyper

SEQ ID NO: 287792 - DNA, 84 bp, Homo sapiens; identical to SEQ ID NO: 235319
  chr11:6640706-6640790
  hyper

SEQ ID NO: 287793 - DNA, 177 bp, Homo sapiens
  chr11:6677036-6677213
  hyper
cgctgccgcggccccgcgccccctcccctcccctccccccgccctccgcgcggtaacccgagcccccgcccctccgcccgcggagcccccgcccccgcccccacccgcgctccgcgccgccgcccccccttccccccggcgcccgcccggcctccctccgcccctccacttcccggc

SEQ ID NO: 287794 - DNA, 349 bp, Homo sapiens; identical to SEQ ID NO: 235321
  chr11:6704608-6704957
  hyper

SEQ ID NO: 287795 - DNA, 66 bp, Homo sapiens; identical to SEQ ID NO: 202422
  chr11:6947537-6947603
  hyper

SEQ ID NO: 287796 - DNA, 684 bp, Homo sapiens
  chr11:7041181-7041865
  hyper
gcactgaagacgcgcgcggcctccgttgcttatccagatccccggccagaactctgccccggcaccgaacaccgggcacccataccccggggcccaagctgcttctgccctcctctacttgcctttattaagtcttaacgtgggagagaagccgtgatgtacccatctacacgggtgtctctggggtttctaaaccggagtagcttctcagtccctgaccctcgattttctgcccctcttccttcaagcacagctcgtcttgccctgtccgcttctggctcagtcctcctgagagttcatgtcacttaacggagcctgtgagagtggaccgggatggccaaaacactcagtccacacaaacaatggccgcagcccggctggaccgaaacggaagtcccaggtcttggagtagacactcgcagtgtttccatggatacgggaggggcggggcgggaagagagagcgcgggaaaacgtgactcctgattggccagaagtatcccgcgcctcccgacctttggccgctggcattcctgcgcgggcgggagctgcgggcgctcgggggataaggcgaggacgcaccagcattaatggaataggagaactcccgaagcttttagggccctgggaaagggggcgtggctggaaacggagctactggcttcggagaattctgtgaccctca

SEQ ID NO: 287797 - DNA, 107 bp, Homo sapiens; identical to SEQ ID NO: 202424
  chr11:7272753-7272860
  hyper

SEQ ID NO: 287798 - DNA, 155 bp, Homo sapiens
  chr11:7694731-7694886
  hyper
agccttccggaatccgagccggcccgccccactccccgcccttcgcggtcccgcccacgacctctccccacgcctcccgctccggcccccaacctcccggtcggacgttcgttcccggctctagccggcctccgcgcctctggcctctttccttc

SEQ ID NO: 287799 - DNA, 164 bp, Homo sapiens; identical to SEQ ID NO: 120256
  chr11:7695108-7695272
  hyper

SEQ ID NO: 287800 - DNA, 344 bp, Homo sapiens
  chr11:8041149-8041493
  hyper
tagcgagctggcacctctgcccccaccccagctgccccgccagggtcgctccgccgggggaccccgagaaagggcgcggagggggcgccgggaggggcggggcaggggccggggtgggcccctggcgggcggggcgaggagggggcgccttcggctctgggatgcgcccgccggcgtctgcgccccgccggccctccgcagggaccgaggctggccccgggcggagtgtcccgctggctgccggggacccgcgagtcgctgcctgttccgcggggcgagatggcagcctgggccggctgtctgggcgcaggagcggcgctctcgagttgccaggctccgcgccc

SEQ ID NO: 287801 - DNA, 40 bp, Homo sapiens; identical to SEQ ID NO: 202425
  chr11:8103155-8103195
  hyper

SEQ ID NO: 287802 - DNA, 60 bp, Homo sapiens; identical to SEQ ID NO: 202426
  chr11:8284165-8284225
  hyper

SEQ ID NO: 287803 - DNA, 190 bp, Homo sapiens; identical to SEQ ID NO: 202427
  chr11:8284345-8284535
  hyper

SEQ ID NO: 287804 - DNA, 91 bp, Homo sapiens; identical to SEQ ID NO: 202428
  chr11:8284961-8285052
  hyper

SEQ ID NO: 287805 - DNA, 134 bp, Homo sapiens; identical to SEQ ID NO: 235332
  chr11:8285495-8285629
  hyper

SEQ ID NO: 287806 - DNA, 144 bp, Homo sapiens; identical to SEQ ID NO: 202429
  chr11:8615887-8616031
  hyper

SEQ ID NO: 287807 - DNA, 33 bp, Homo sapiens; identical to SEQ ID NO: 235334
  chr11:8703870-8703903
  hyper

SEQ ID NO: 287808 - DNA, 49 bp, Homo sapiens; identical to SEQ ID NO: 235335
  chr11:8704467-8704516
  hyper

SEQ ID NO: 287809 - DNA, 140 bp, Homo sapiens; identical to SEQ ID NO: 202430
  chr11:8710629-8710769
  hyper

SEQ ID NO: 287810 - DNA, 558 bp, Homo sapiens; identical to SEQ ID NO: 235337
  chr11:8892073-8892631
  hyper

SEQ ID NO: 287811 - DNA, 60 bp, Homo sapiens
  chr11:9112971-9113031
  hyper
cccggcgggacggcccccgccagcagcagcagtggcggcagcagcagcagcagcagcagc

SEQ ID NO: 287812 - DNA, 884 bp, Homo sapiens; identical to SEQ ID NO: 235341
  chr11:9286204-9287088
  hyper

SEQ ID NO: 287813 - DNA, 179 bp, Homo sapiens; identical to SEQ ID NO: 235342
  chr11:9336372-9336551
  hyper

SEQ ID NO: 287814 - DNA, 35 bp, Homo sapiens; identical to SEQ ID NO: 235343
  chr11:9406095-9406130
  hyper

SEQ ID NO: 287815 - DNA, 268 bp, Homo sapiens; identical to SEQ ID NO: 235344
  chr11:9482341-9482609
  hyper

SEQ ID NO: 287816 - DNA, 721 bp, Homo sapiens
  chr11:9596147-9596868
  hyper
gccgctcccccctcgctttcctgcgccgccccccaaagttggcagcccttgtgtttggccctgccccgaggttgtccgttgagattatgtaactgaacaatgggcctcgtctggaacttcatcttacaaaggggccgatcggcccgtccgggtggccaaggatttgccgcccgttgagtccgggccgccccgagcgtgtcagccccgagtgcggcaccgataacgcggttcgcgaggatgctggagggtgccggcccggccacctgacactcccgagccataggatgccttttaaacgcggcgatcgggcctgtaatttgggcggcgcgggcagaaggagtttaaagaaaaataattgtcccgccctgatcgtgtcgtgtcgtgtggcgtggatgggggaaaggtctggggcatgcagggagactacgcttggacttgggagtaaaggctggccttccaagcatttacagtcctacagactcatcctaagtccaggcagtactgaggcctgtttctggacaaggtcttggcccagcatttgtttttatcgtgggtttgcggtgcccagagtttggccggcctccgtgtgattaggaacatcctaccgtagataaggtatcttaaagaaggaggtgttcagcacctgtgttttgaaaggccttcgagtactgcgcagatgaccacttttaaaactgcagattttaaagctgatacttccaga

SEQ ID NO: 287817 - DNA, 173 bp, Homo sapiens; identical to SEQ ID NO: 235346
  chr11:9635931-9636104
  hyper

SEQ ID NO: 287818 - DNA, 89 bp, Homo sapiens
  chr11:9685091-9685180
  hyper
ctccccttaaacgtcgtcgctgtgtccctagaacccaagatagagtatgcatgaataaacttttgcgaaatgaaccaacaaacttccct

SEQ ID NO: 287819 - DNA, 823 bp, Homo sapiens; identical to SEQ ID NO: 120296
  chr11:9685218-9686041
  hyper

SEQ ID NO: 287820 - DNA, 123 bp, Homo sapiens; identical to SEQ ID NO: 202436
  chr11:10316353-10316476
  hyper

SEQ ID NO: 287821 - DNA, 385 bp, Homo sapiens; identical to SEQ ID NO: 235349
  chr11:10324219-10324604
  hyper

SEQ ID NO: 287822 - DNA, 409 bp, Homo sapiens
  chr11:10326039-10326448
  hyper
agctcaccccgaaacgccggggtcttggtcctctgggggactagtgagtcctgctcctctcggctttgctccgtccctgccccggcccctccgcgggagtctggggtcgcggcccggtcaggcgccaagccggcaggggggcgcggtccacttgaggccacagctccccaggtccagggctcgggccatccgcgctgtcccttccgcgggctcttgctgttcttcgccaggaggctttgcactccgggccgcatgggtcctggataaggacctcaagaggttgtagtggcgccccttcgctccggcgtactgtctgaaccctgtgcccaaagagggctgtggcagttcctgcaccaaccgcctggagcccatacctaagccctctgggcacgagggacctcctctcccc

SEQ ID NO: 287823 - DNA, 243 bp, Homo sapiens; identical to SEQ ID NO: 120302
  chr11:10326499-10326742
  hyper

SEQ ID NO: 287824 - DNA, 232 bp, Homo sapiens; identical to SEQ ID NO: 235351
  chr11:10329351-10329583
  hyper

SEQ ID NO: 287825 - DNA, 159 bp, Homo sapiens; identical to SEQ ID NO: 235352
  chr11:10562151-10562310
  hyper

SEQ ID NO: 287826 - DNA, 166 bp, Homo sapiens; identical to SEQ ID NO: 235353
  chr11:10772630-10772796
  hyper

SEQ ID NO: 287827 - DNA, 31 bp, Homo sapiens; identical to SEQ ID NO: 235354
  chr11:10830956-10830987
  hyper

SEQ ID NO: 287828 - DNA, 151 bp, Homo sapiens; identical to SEQ ID NO: 235355
  chr11:10880014-10880165
  hyper

SEQ ID NO: 287829 - DNA, 135 bp, Homo sapiens; identical to SEQ ID NO: 202437
  chr11:11642467-11642602
  hyper

SEQ ID NO: 287830 - DNA, 348 bp, Homo sapiens; identical to SEQ ID NO: 202438
  chr11:11642668-11643016
  hyper

SEQ ID NO: 287831 - DNA, 660 bp, Homo sapiens
  chr11:11643304-11643964
  hyper
gcccaagtttgcagctcctgccgctggccacccggagagaccttgacaaaggaaaccaggtggatttttttccaaattaaaaatccctgaacccttcctagaggggtcacgggtagccggcagccgcgcgtccagatgtgtacgtctgggaaactttgccactgcctgtgtcggcggccacgccgcttcccatcgccagcgccggctgccttggcggtccgaccggcccgcgctgctaggagaacagcggcagcggcagcggcggcggggagagccgcgaagcagagcggcccggccccctccgagcgacaagcgctgccaccaatcgcgctccggctcgggagaggggccggtgctgagcggcagcggaccaacggggagggagcggggggcggagtccagctcccaggccccacctgctggccgcccctggctcccgcccccagggacgcgcccgggcctccacccgcgcctgcacaggctgccccagacctgaagctcccggagagggcgcgctgccagtcccagcccttaggtcggcagcttcctccgttaggggaattccatctcttgctcttgggcaggaatctcctggttttgtggagggggtggggggttcgcacgggtcagcttctttcatccgcccggggcttctcgcat

SEQ ID NO: 287832 - DNA, 262 bp, Homo sapiens; identical to SEQ ID NO: 202440
  chr11:12030561-12030823
  hyper

SEQ ID NO: 287833 - DNA, 54 bp, Homo sapiens; identical to SEQ ID NO: 202441
  chr11:12031006-12031060
  hyper

SEQ ID NO: 287834 - DNA, 128 bp, Homo sapiens; identical to SEQ ID NO: 202442
  chr11:12131734-12131862
  hyper

SEQ ID NO: 287835 - DNA, 287 bp, Homo sapiens; identical to SEQ ID NO: 202443
  chr11:12132212-12132499
  hyper

SEQ ID NO: 287836 - DNA, 55 bp, Homo sapiens; identical to SEQ ID NO: 202444
  chr11:12399222-12399277
  hyper

SEQ ID NO: 287837 - DNA, 344 bp, Homo sapiens; identical to SEQ ID NO: 202445
  chr11:12399383-12399727
  hyper

SEQ ID NO: 287838 - DNA, 85 bp, Homo sapiens; identical to SEQ ID NO: 202446
  chr11:12399791-12399876
  hyper

SEQ ID NO: 287839 - DNA, 249 bp, Homo sapiens; identical to SEQ ID NO: 202447
  chr11:12696746-12696995
  hyper

SEQ ID NO: 287840 - DNA, 159 bp, Homo sapiens
  chr11:12715488-12715647
  hyper
cctgcctttgtaagcggtaggaagatgtatgtctgaggaacaaaggcacttgagtcaatttactgaaactgtttataatttgtggtcttgatctgaatgtcaggctgcgttggcacaccctgctctgctgtgcggcccggcacaactcagccaggaaag

SEQ ID NO: 287841 - DNA, 86 bp, Homo sapiens
  chr11:12715677-12715763
  hyper
gcaaacacatggcaaatgtttcaaggggctttagtgttccagtgaatcctaaaactaggggacatgcaagccgacactaggcagaa

SEQ ID NO: 287842 - DNA, 340 bp, Homo sapiens; identical to SEQ ID NO: 235363
  chr11:12849685-12850025
  hyper

SEQ ID NO: 287843 - DNA, 332 bp, Homo sapiens; identical to SEQ ID NO: 202448
  chr11:13031624-13031956
  hyper

SEQ ID NO: 287844 - DNA, 344 bp, Homo sapiens
  chr11:13032312-13032656
  hyper
gcctttacattgggctgcggctcaacacggacctagaggccgtcaagtcggacttggattacagccagcagcaatgggacagcaagaagcgcgagctacagggccttctgcaaactttgcacactttggagctgacggtggcaccggatggggctcctggctctggcagtccctcgcgggaacctgggcctcaagcctgcgccgacatgtgggtggaccaggcccgtggactggccaagagcggtcctggcaacgacgaagactcggatacgggactgagctctatgcatagccaagactcggactccttgcccatgtgcgaatcccttgtgtaggggtggggg

SEQ ID NO: 287845 - DNA, 76 bp, Homo sapiens; identical to SEQ ID NO: 235365
  chr11:13229521-13229597
  hyper

SEQ ID NO: 287846 - DNA, 304 bp, Homo sapiens
  chr11:13298519-13298823
  hyper
gaaatgcaatggaatcgctccgcgctcgagtattctctttggaactacgggaatgacagctccagtgggacacttggaggtcatgatgaacgcaaagaacgtgagaacacttgcagtcctcggggtggaaatgccttctagaaatactaagtatccgttctctcgttgagactttggcaaaccagggattttaggaagggtctggcactcaacgttcctaaaattggtttcctagatggagccggagggagagagggagtcaggaactgctgcttttcgtcggaatgcccggaggggagaagaa

SEQ ID NO: 287847 - DNA, 206 bp, Homo sapiens
  chr11:13300228-13300434
  hyper
tctgcgggcaggtgcgcgtcggcctggggatgtcgcccggagcccgggtgcgggccggccttggagtcccagagctccgcggagggcgcagcgagcctggctccagctccgggtttgacagatgtcagggaagaaaaggttcccgctcggctattgccgggcgttgacatcccagagagcttcccgtttgcttggaagaagacgag

SEQ ID NO: 287848 - DNA, 130 bp, Homo sapiens; identical to SEQ ID NO: 235367
  chr11:13484749-13484879
  hyper

SEQ ID NO: 287849 - DNA, 80 bp, Homo sapiens; identical to SEQ ID NO: 235368
  chr11:13485189-13485269
  hyper

SEQ ID NO: 287850 - DNA, 671 bp, Homo sapiens
  chr11:13689450-13690121
  hyper
tccataggttccctcgtgccccacccctcagaagtaaacgttattctaactcctatcactaccggtaagttttgtagggaattattttggaggaagtggaaggtggaatgaatgggcccacagtcccctgggactgggcgagacccgtggaggctccaggggtccgtagagctcttcgctctcaccgacccgggccacacccgccaagctggtagttctccgaacggatccctcacgcccagcaatggccggagggcccccgggccccaccataatagcgctaagcacgccacaatggcagccccgctgtctcccgcgcgggcctcgctgcgtgctcccaaccttgggagttggcgcccctcccgcgcgacggacagccgggcgtggccctgggcgcgacccgacaggacgccagcagccggcgggggcgctccaggactcgagatgtggggcgcgggcccattggctgagcattcccccgcgagcctcccggccgcagggcccacctcccggccctctctccgcgcccccattggccgttcgcgttccgcgggcgtccgctcccgccccactcccgcccggagggaaaccgggttgggggtgagaggctaaagcagggaggaggatgactggtcctgcggataagggtgtgcgcgagagccaatcaaaag

SEQ ID NO: 287851 - DNA, 560 bp, Homo sapiens; identical to SEQ ID NO: 202452
  chr11:13690157-13690717
  hyper

SEQ ID NO: 287852 - DNA, 203 bp, Homo sapiens
  chr11:14521221-14521424
  hyper
aagccagttcttccgactctgcccgacccaccacgcctctgggactgggggcttgtggcccactaccaggctccgaggggcagtggtttggtgcagccgcggatccgtctactgcggctccgtctactccggctatgaaccgcagcagcggcggcggcggctccagagtccttggctgacgtggaagggggtggggtaacgac

SEQ ID NO: 287853 - DNA, 170 bp, Homo sapiens; identical to SEQ ID NO: 120342
  chr11:14521484-14521654
  hyper

SEQ ID NO: 287854 - DNA, 396 bp, Homo sapiens; identical to SEQ ID NO: 235372
  chr11:14541533-14541929
  hyper

SEQ ID NO: 287855 - DNA, 137 bp, Homo sapiens; identical to SEQ ID NO: 235373
  chr11:14542171-14542308
  hyper

SEQ ID NO: 287856 - DNA, 346 bp, Homo sapiens; identical to SEQ ID NO: 202453
  chr11:14665271-14665617
  hyper

SEQ ID NO: 287857 - DNA, 298 bp, Homo sapiens; identical to SEQ ID NO: 202454
  chr11:14665651-14665949
  hyper

SEQ ID NO: 287858 - DNA, 31 bp, Homo sapiens; identical to SEQ ID NO: 202455
  chr11:14665995-14666026
  hyper

SEQ ID NO: 287859 - DNA, 440 bp, Homo sapiens
  chr11:14666056-14666496
  hyper
ggccggagctgcggctcctggtggctgctggcgctgcccgcctgctgttacctgggggacttcttggtgtggcagtggtggtcttggccttggggggatggcgacgcagggtccgcggccccgcacacgcccccggaggcggcagcgggcaggttgctgctggtgctgagctgcgtagggctgctgctgacgctcgcgcacccgctgcggctccggcactgcgttctggtgctgctcctggccagcttcgtctggtgggtctccttcaccagcctcgggtcgctgccctccgccctcaggccgctgctctccggcctggtggggggcgctggctgcctgctggccctggggttggatcacttctttcaaatcagggaagcgcctcttcatcctcgactgtccagtgccgccgaagaaaaagtgcctgtgatccgaccccg

SEQ ID NO: 287860 - DNA, 323 bp, Homo sapiens
  chr11:14666531-14666854
  hyper
cagccagttactatggcagttgcaaaatattcaggagaccgtcgttgccttgtatttccagagaacaggtatgttagctggaaggcgaggtctgggacgcgagcgggttcgggtttaccgctgcagtttccgagttgaattcgcttatttcaaagcatgttaactttcagaatggaaaaagggtgtgttgcggggggggggggggaggaaataatgttttattctggaaaggattcttaaaatacaggaagccttttaaaaatgcagaagcaagtagcttttgtcattgaatagaaatcaaatagcccgctaatcacatggca

SEQ ID NO: 287861 - DNA, 251 bp, Homo sapiens; identical to SEQ ID NO: 202457
  chr11:15671676-15671927
  hyper

SEQ ID NO: 287862 - DNA, 261 bp, Homo sapiens; identical to SEQ ID NO: 202458
  chr11:16626178-16626439
  hyper

SEQ ID NO: 287863 - DNA, 868 bp, Homo sapiens
  chr11:16626496-16627364
  hyper
tcagcagccccgggccgctcctcccggcatcggagcacaaccccagcagcctttgcacaagccctttcccttctctgcccggccctttaagggagaaggaagaaagcagctcccgcgggagcggccgggctcgggctgggtcccggggcgggtggcagcaccgccccctgccctgggccgagcccgggagcagcggaccgcggccccggctgcagaggaacggcgggtggcggggccccggcagggcgccgagaaggacggagggcgccggctgggctcagggacgcggggcggggaagaaacgtgccggcgaccgtgcgctcggccgggtgactccctggcgaagtccgcgcccggcggggctgaactacccctcgcccccgctcccgccaggtcaggcaccactgccctcgcggccagggtaaagaggaccacagatcagtcagccttggatttcggatgggcttggaattcggtttgtttattcctgaaaagatcattaaaaagtactgtccaaaaacggggggagggggaaggaagggcgacaagcggagggagctggaggcaactcgagcggtgtcccgaaaaagttgcggcggagcggcggtggggtgagggtgggaggagggagcgcaagcgttttctagcgacccgggttttcttcatgaactcctccgagtaaactttatcccggcgagagagcggcggagatcctcgactcccgcccgccctcaaccagtgtcaaccccacaaacagcctaagtttccaaaccgaaatgggggtggggtgggggtagcattaagaagcccagaagctcagcgggtcctcccgacctcccgcacccagagcctgggtgacactgaagcg

SEQ ID NO: 287864 - DNA, 300 bp, Homo sapiens
  chr11:16627410-16627710
  hyper
cttttcaagaaaacaaaatatttgctaggaaacttactttgcatttagtctctattctttgggggatgcggtttaggtcggctcgcaagggaagcccgttttgtccaggttggatattgtctacgtatggatcagcccttggatgagggtttattttaatttatggcttatgcattcttttaaggtcgatttacatgacctccggctacaactaagacagccgaggagggcactccagtcgtcagtcggccaaacccacaattaaaacagccctccccctagtctcggtgtgactagggc

SEQ ID NO: 287865 - DNA, 57 bp, Homo sapiens; identical to SEQ ID NO: 235378
  chr11:16627948-16628005
  hyper

SEQ ID NO: 287866 - DNA, 84 bp, Homo sapiens; identical to SEQ ID NO: 202460
  chr11:16628221-16628305
  hyper

SEQ ID NO: 287867 - DNA, 440 bp, Homo sapiens; identical to SEQ ID NO: 202461
  chr11:16628933-16629373
  hyper

SEQ ID NO: 287868 - DNA, 180 bp, Homo sapiens
  chr11:16632670-16632850
  hyper
tggcctcgcacctccagagaagaggcgcgaactcgcaaaaggaaaggcgcgcacggttcctggagagaggtccccctgaacttgggaaggacaaggcaattaattctgctcgagaagttagtatttaaaacacccacgcaaaaatcataacggctattaaaacctcgaattcccgctttg

SEQ ID NO: 287869 - DNA, 103 bp, Homo sapiens; identical to SEQ ID NO: 235381
  chr11:16633300-16633403
  hyper

SEQ ID NO: 287870 - DNA, 36 bp, Homo sapiens
  chr11:16634103-16634139
  hyper
tctttttaaacacattgaggcgggggggcggggttg

SEQ ID NO: 287871 - DNA, 93 bp, Homo sapiens
  chr11:16634452-16634545
  hyper
acgcaccctgccaaagtcctgtaaccatctacttcttccatctgcctaagagaaactgtaaacgggatttcccccccacgattgaatggaagc

SEQ ID NO: 287872 - DNA, 267 bp, Homo sapiens
  chr11:16635528-16635795
  hyper
gccctcagagactcgggctgacaggagtgagagctaaaacttccaactagctgaaaccaatagccgggaatcgagcgaaggcgaactctcccagcaaagtataaagcttcgggccaaagagtctgcagctccaagtcaggggctgcggctccgaaactccaaacactaactcccagggcagtggcagagggtgggggcagcttcgaagaggcataccaactgctccggtcctggccgaagaccgagctcccttctgcggtgacctcg

SEQ ID NO: 287873 - DNA, 92 bp, Homo sapiens
  chr11:16635927-16636019
  hyper
gtgcaagagaaggacgttcaggcagcccggccgcctgctgcgagagctgaacatttcccagctctatagtcgcccatttctcaggaaatcag

SEQ ID NO: 287874 - DNA, 112 bp, Homo sapiens; identical to SEQ ID NO: 202462
  chr11:16759951-16760063
  hyper

SEQ ID NO: 287875 - DNA, 1614 bp, Homo sapiens
  chr11:17034985-17036599
  hyper
cctccccgcaggcccgcgcagtggatggaggccgggggcgaggttccgactctccaagaccatcccagagcctgcggcgggagagggggcgtcctcctaagcgagattcccctagtctctccctctccccactccaaccccgcaggcccacaccaggacagaacttctcgttctactcctcccacccgagcccatccaggtcccggcactcgcctctcccggcggggcgcagccccagaccctagaggggaggcgtgcccagcccgcacaccagcacccgaatccagccggattgcaaggtccagggcgcagagtctgcggcctcttcccccccggcccaggtccccagcgtaggtgcggcccccaccgccttcctctcggaggccgccaaacaacttgggcacacaaaacgttgagtgtggccgcggcgcagcgcgcgccaacgagcccgggccggcgggagcagaggaagggcggggcgcccggcgggaacggggagggaccccccccccgcggcacaggtgcgagcgcggcggccccactcactcactcgatgaagtagctggcgccctcctccgtgaagccctcctcccagccgcggggcaggtctgcggaaacgccagaaaagtcgggtcaaacttgggccgccgctgcgcgcgccccccacccgccggcccggcgcccacctgagcggatcatgtggcccgagttgacgggctccccggtgcgcggatgcagccaggtcgtgcagcggagctggtcactgcgggcagagaggtgcacctgttagcgccgccacagcccgccgggtgcccgcccggcccccgcccccgcgcccccacccgcgtccccgcgtccccgggtcctcgcgccgcacttgatgaagaagacgcggccatcccggcacaccccgtaggaccaatgctcaggtaaagtgtcccgcccgaccgtcgccgccgccatgttcgccgagcgcggagccgccgcggggtgggggggagggggcgggggcgcgggcaggggcggaggcgggggcggtggcgggggctcggcctgcgcgtggcccggcggcgccgcgaggcgctccatccaggcgcgggctcctgagggagcgaccgcccggccgggtcctggcgcccggagttcgcagccgctccggccaacccagcgcagtgcccgcggcctttgtccccgagccttccccgcccccagcctgctggcaccggcgctcccctttgcccccgaggccgggagacccgggcggcgcggggggccgctggcgggggccgctggcgggcgcgcctgggcagcttcggggcgcgcggttggacccgaccaactccgaaaacggcgagcgcccgaacgctcagtaaaccccagccgacccgcaccacagaacttcccgacccgggaactccgcttgtgtgtgaaccaagttaacactcaggttcctgccatattcccagcctccttctcttcccctgtaaggttaatcgagtccacacgggattgttgtgtagattaaatgaagtaacaatcgcataaagtgcttaaccggaccatggcatgtagtaggtgctctatcaacggcaggccgagcgcgatttcattttc

SEQ ID NO: 287876 - DNA, 404 bp, Homo sapiens; identical to SEQ ID NO: 235387
  chr11:17228726-17229130
  hyper

SEQ ID NO: 287877 - DNA, 127 bp, Homo sapiens; identical to SEQ ID NO: 202464
  chr11:17372999-17373126
  hyper

SEQ ID NO: 287878 - DNA, 166 bp, Homo sapiens; identical to SEQ ID NO: 202465
  chr11:17373405-17373571
  hyper

SEQ ID NO: 287879 - DNA, 116 bp, Homo sapiens; identical to SEQ ID NO: 7948
  chr11:17373642-17373758
  hyper

SEQ ID NO: 287880 - DNA, 219 bp, Homo sapiens; identical to SEQ ID NO: 202467
  chr11:17373998-17374217
  hyper

SEQ ID NO: 287881 - DNA, 228 bp, Homo sapiens; identical to SEQ ID NO: 235390
  chr11:17411057-17411285
  hyper

SEQ ID NO: 287882 - DNA, 125 bp, Homo sapiens; identical to SEQ ID NO: 202469
  chr11:17497697-17497822
  hyper

SEQ ID NO: 287883 - DNA, 481 bp, Homo sapiens
  chr11:17498265-17498746
  hyper
cctggtccacccggtaggcggccgagtggttctcgctgccgcagaaggccaggggcatggcggcgcgggcgcgggctgggctcgggctcagctggctccgctggctccgcgcgcctgccgcgcctctgtcccttgcagctccgccgcccggcccggccgtcaggcccccgccccccgggccccgcccagccccgctggcctccccctccctcaccccgccctgctccaccacctgcggggccggggggcggcgaggaacccgaccggccctgctacgcttgcgcccaccttccagatgtggaggcgcgtgctcccagatgttgccggggtggcttcgtgagtgccctgatgcacgcgtgcgctgggggagaggggaaaggcaggctaagatggggagtggggtgtgggcacactggagtctgggtgggaaaggagggtggggcgtgcagaagaggagagaagggcccgcaaggcctggagt

SEQ ID NO: 287884 - DNA, 89 bp, Homo sapiens; identical to SEQ ID NO: 202471
  chr11:17740292-17740381
  hyper

SEQ ID NO: 287885 - DNA, 81 bp, Homo sapiens
  chr11:17741187-17741268
  hyper
ggggtgggggacagtgggtgggcattcagactgccagcactttgctatctacagccggggctcccgagcggcagaaagttc

SEQ ID NO: 287886 - DNA, 81 bp, Homo sapiens
  chr11:17741598-17741679
  hyper
gggccgctgcctactgtgggcctgcaaggcgtgcaagcgcaagaccaccaacgccgaccgccgcaaggccgccaccatgcg

SEQ ID NO: 287887 - DNA, 33 bp, Homo sapiens
  chr11:17742746-17742779
  hyper
tgggaggcttgtcgcggccccacccctgcttac

SEQ ID NO: 287888 - DNA, 402 bp, Homo sapiens
  chr11:17742811-17743213
  hyper
cgggaagagtgcggcggtgtcgagcctagactgcctgtccagcatcgtggagcgcatctccaccgagagccctgcggcgcccgccctcctgctggcggacgtgccttctgagtcgcctccgcgcaggcaagaggctgccgcccccagcgagggagagagcagcggcgaccccacccagtcaccggacgccgccccgcagtgccctgcgggtgcgaaccccaacccgatataccaggtgctctgaggggatggtggccgcccacccgcccgagggatggtgcccctagggtccctcgcgcccaaaagattgaacttaaatgcccccctcccaacagcgctttaaaagcgacctctcttgaggtaggagaggcgggagaactgaagtttccgcccccgccccac

SEQ ID NO: 287889 - DNA, 39 bp, Homo sapiens
  chr11:17743245-17743284
  hyper
agcacccttctcggagacccattgcgatggccgctccgt

SEQ ID NO: 287890 - DNA, 168 bp, Homo sapiens
  chr11:17756067-17756235
  hyper
gcccagacgtctctcggagcccccgcccctggagtggcgttccccgagggcggaccgtgggcgggtcccccgggagcagcaggagccgcgcggggcgggcgcccccagcgccgaggttgagggaggccgggctcggtgcggggctgggaggggggcgcggaatcaggg

SEQ ID NO: 287891 - DNA, 220 bp, Homo sapiens
  chr11:17756666-17756886
  hyper
cagcaccgccgcgggagcccaagtccgagcgcagcccagcggaaccccagctcgagcccgggctcacggagagcagcgctcggcgttagccgcacgagcaacaccccgggtgcccctgcccagggggcccgccatctcctccaggaggcggggagaaggaacgaggagggcgggcgggcaggcgggcccgccgccggggggagcaggcagccaagcaagg

SEQ ID NO: 287892 - DNA, 156 bp, Homo sapiens
  chr11:18034650-18034806
  hyper
gatgggtagggcgcggggcggggtctgtggtgggaagcggcccgcaggccgggagagagggtgcggccgggccctcgggccactggggatcagtggtgggcggggccggacgacagccccggagccgcctcccagtcagcccgccccggcggcgct

SEQ ID NO: 287893 - DNA, 114 bp, Homo sapiens; identical to SEQ ID NO: 48214
  chr11:18034821-18034935
  hyper

SEQ ID NO: 287894 - DNA, 107 bp, Homo sapiens; identical to SEQ ID NO: 235402
  chr11:18343666-18343773
  hyper

SEQ ID NO: 287895 - DNA, 1228 bp, Homo sapiens; identical to SEQ ID NO: 235403
  chr11:18415860-18417088
  hyper

SEQ ID NO: 287896 - DNA, 35 bp, Homo sapiens; identical to SEQ ID NO: 235404
  chr11:18548288-18548323
  hyper

SEQ ID NO: 287897 - DNA, 240 bp, Homo sapiens; identical to SEQ ID NO: 235405
  chr11:18548581-18548821
  hyper

SEQ ID NO: 287898 - DNA, 55 bp, Homo sapiens; identical to SEQ ID NO: 202475
  chr11:18610408-18610463
  hyper

SEQ ID NO: 287899 - DNA, 173 bp, Homo sapiens; identical to SEQ ID NO: 202476
  chr11:18610571-18610744
  hyper

SEQ ID NO: 287900 - DNA, 32 bp, Homo sapiens; identical to SEQ ID NO: 235407
  chr11:18656064-18656096
  hyper

SEQ ID NO: 287901 - DNA, 36 bp, Homo sapiens; identical to SEQ ID NO: 202477
  chr11:18742610-18742646
  hyper

SEQ ID NO: 287902 - DNA, 313 bp, Homo sapiens; identical to SEQ ID NO: 202478
  chr11:18743161-18743474
  hyper

SEQ ID NO: 287903 - DNA, 115 bp, Homo sapiens; identical to SEQ ID NO: 202479
  chr11:18743577-18743692
  hyper

SEQ ID NO: 287904 - DNA, 201 bp, Homo sapiens
  chr11:18814051-18814252
  hyper
tttctcgtgggcaccaggggcccggacgagcagggagctgcccatgtgccccacaatcctgccacaatcttccgtattctccaggctgctagtgcgctggccagaggtttccggcattccatccccatgggggcttgaggctgtgggctgcacacagggcagggatcctaaactccattttttacacggggaatcagaggc

SEQ ID NO: 287905 - DNA, 136 bp, Homo sapiens; identical to SEQ ID NO: 202481
  chr11:19093003-19093139
  hyper

SEQ ID NO: 287906 - DNA, 49 bp, Homo sapiens; identical to SEQ ID NO: 7966
  chr11:19264093-19264142
  hyper

SEQ ID NO: 287907 - DNA, 1278 bp, Homo sapiens
  chr11:19733695-19734973
  hyper
ggccagagcctgccggggtcatggagcctctcccggcttcttcaggccactctaattacagagtctgtggtaggttgcgtggaggagctgtctcggggcgggaagcttccctgcgtattgtatttgcctataaatacttcaaatagttaagtgaaatgtgcagcctttgaaaactggagaggaagccgttgggaggccccccgcccagccggcctggaagagcaggcagagaaatggctggcgcgctcttaaagcgggagacgagcttcggccctgcccaagccagatgggggcagcgaggctgcgggcgtgactccggaagactcaaaccgttaaggtgaccggagcaatttgaaaaaggaaacaaacttccctcgagccgtgcccgcgtggctctggggcggacggttgcgttcgaaagggcatttttcaaaagaagggtttcaggaacgcaggggtgtgggccccccgggaggcgcgcggccggggcagtgccgcaaagcggccaccagcccgctttgtactcgcggccaagcgcggccccagagtttcggcggcggccagagtttaggccacaccctctttgcagtgagacccgcggccgctgattggcgcaccgtggaccaatgggcgcgccggggcggccccggctgtcagcgcgcgccgcagcagcgccggcagcagcctgtcctcccctgcgctgagccccgcagccagcgcagccttcccgggaagcgcggcggccgctcccgagcgcagccctgcccggcccgccagccgcgcgtcccggcgcccgcgccccacggccacagccttgcctctatctagctcacggagcatgtgcagacccgcaggcgctaaggtgctctcagtccgggggccttctgggcagcggtgactgtcaccccaagagagacctttcgggggctcttgccgcacctctgctgcgtcgcgggtgacactgcggtgctcgcgagcagggtggcagctgcctctcggtggagacgtcttgggacccttgcgcccttcttctctccttccttcgctgctgtctcctttccttccttggctgctcgctctttctctcgccggctcagacccgtagcctccggaacgggactcgtgggtcgccgccgcctctgtctcttccaaaggggcctcctcacttcggagatgcagtgacaagttaatatgggcgtccaagcctctgtttcccaggaggaaatttgcaagaggcggcagcccctgagcgcccagagctcttgaaaggccacccag

SEQ ID NO: 287908 - DNA, 338 bp, Homo sapiens; identical to SEQ ID NO: 202485
  chr11:19735066-19735404
  hyper

SEQ ID NO: 287909 - DNA, 225 bp, Homo sapiens
  chr11:19735484-19735709
  hyper
gtggaaaacgggttcgatacccaggtgagagatgccgtttgccggggtactgttctggaaggatggatgaatagttctttcgggatggtgtgggagaaagggctggatgggagaagggtctaccatgtggccagggaagggaaccattccccttaggccggcaggttgggggatgcgcgaggagagtgggccggccggtgggtgtggcccgggtgccggaggttt

SEQ ID NO: 287910 - DNA, 918 bp, Homo sapiens; identical to SEQ ID NO: 202487
  chr11:19798523-19799441
  hyper

SEQ ID NO: 287911 - DNA, 66 bp, Homo sapiens
  chr11:20153468-20153534
  hyper
cgtgcagcaatactcgcagcgtggagagttccagtcccgaaatggcagcgtcaggcaagctgcttc

SEQ ID NO: 287912 - DNA, 98 bp, Homo sapiens
  chr11:20179003-20179101
  hyper
cacggaaacagagaaaacagcccccacaatagcctgtttcgtttttccattcagtggacttagggaaacaaacctgcgtacatcaactaaaacagcaa

SEQ ID NO: 287913 - DNA, 208 bp, Homo sapiens
  chr11:20182623-20182831
  hyper
tgttagaagtcccattctgacgactcagggaaacttggaaacggatgctttggggccactggatgtgtgtccgtaagagtggggagaggtctggagttatttcatttcgggagactggttgagtttgagcgttggtggatacctgaaaagtaaaacgagtctccttcaaattcccagcaacttggaaaacgattttctctaggagttt

SEQ ID NO: 287914 - DNA, 58 bp, Homo sapiens
  chr11:20183111-20183169
  hyper
ggcccaaggtttggcagcttcttaattaactacaacgcacaaacgcgtgaaaaccaga

SEQ ID NO: 287915 - DNA, 143 bp, Homo sapiens
  chr11:20184147-20184290
  hyper
gtttgattccctaccggtgaagcgcttgtccaagtcttccggatgatcagaatagagtctatatttgccaaaatcaacttggattttgtttttttttggaggggggaacggtaagaacttgaagccagcgtgagcccttccca

SEQ ID NO: 287916 - DNA, 83 bp, Homo sapiens
  chr11:20230315-20230398
  hyper
attcccactccagacgccgcagttttgaggcgcaatggggcctttggcctgatcatactcaggaatccttttaggccctttgg

SEQ ID NO: 287917 - DNA, 54 bp, Homo sapiens
  chr11:20230510-20230564
  hyper
tttcagcacaaaaggtttgaggtgcattgctttctttggcgtaaagcccttgcg

SEQ ID NO: 287918 - DNA, 209 bp, Homo sapiens
  chr11:20385071-20385280
  hyper
gtctactagctggcgcctgggtgagctgagcccagcaggtgagggaaaacgcgggaagagggtcttgcagattccaaacttaggaagggtcgcggctccgcgcacgtgctctcggggtcaccttccccgcgcctgtgagggtgccaggagttcgtctccaggtcccgcccctgtgggcggggcgaggcagcgtcgccgcgaggccaccc

SEQ ID NO: 287919 - DNA, 237 bp, Homo sapiens
  chr11:20385481-20385718
  hyper
gagctgggccaggtctcctggccgggccggggataccgtggggtatgcccagtgatgccagcagcttgtggcacctgggcgcaccctccagctcgggccccttccgatgggtctgctggctcaggtgcgggcgatggccggggagccgcgccccgcacgtgactcagcactttccccagagcccggactgcggagaacaatatcctcctccctaacagataaacagcccttgttcct

SEQ ID NO: 287920 - DNA, 68 bp, Homo sapiens; identical to SEQ ID NO: 235428
  chr11:20408919-20408987
  hyper

SEQ ID NO: 287921 - DNA, 59 bp, Homo sapiens
  chr11:20619974-20620033
  hyper
tcctcatccccgaggccaggggttccccgagctagaccggcaaggaaggagagaaggga

SEQ ID NO: 287922 - DNA, 166 bp, Homo sapiens; identical to SEQ ID NO: 235433
  chr11:20631747-20631913
  hyper

SEQ ID NO: 287923 - DNA, 89 bp, Homo sapiens; identical to SEQ ID NO: 235434
  chr11:20689751-20689840
  hyper

SEQ ID NO: 287924 - DNA, 249 bp, Homo sapiens
  chr11:22214111-22214360
  hyper
gggagagggacttttccccacgagaccaaaagtaactcccaactgggagaggggttctctccgagtggcacgcatgagcggatcgatgaagacccggccaaccggctgagggagcatcgggaccccctttggggatcggaggaggaggattccgacaggagggaagcggcagccctggggaaccaggattcctggtcgtgggtggacccagtggaaaaggacgtgcgaagcctgtacagaatggagcag

SEQ ID NO: 287925 - DNA, 110 bp, Homo sapiens
  chr11:22363209-22363319
  hyper
atcatgagcggcctgggcttctgcatctccttcggtatccgctgcaacctgggcgtggccattgtggacatggtcaacaacagcaccatccaccgcgggggcaaggtcat

SEQ ID NO: 287926 - DNA, 137 bp, Homo sapiens
  chr11:22646583-22646720
  hyper
ccggctgggagggcgcgacaaaaggcagcaaagacttccgaattccccagaagccagtggactagcacttggctcccctctccaggtgatttgtggatgccgggttccaactcttcttggggccgacgagacaaagg

SEQ ID NO: 287927 - DNA, 105 bp, Homo sapiens; identical to SEQ ID NO: 235445
  chr11:22647396-22647501
  hyper

SEQ ID NO: 287928 - DNA, 32 bp, Homo sapiens; identical to SEQ ID NO: 202488
  chr11:22688605-22688637
  hyper

SEQ ID NO: 287929 - DNA, 133 bp, Homo sapiens; identical to SEQ ID NO: 202489
  chr11:22850852-22850985
  hyper

SEQ ID NO: 287930 - DNA, 170 bp, Homo sapiens
  chr11:24518213-24518383
  hyper
tctctccagagcgacgttcttccaaacacggtttaagcggcgagagacacctgcctaggaccctacgcgtctggaagtctctcccagtgaattgggtctcatctcctgccgagtacgcaagttcaattatcggcagattaggtttctactctccgtgccccgccccgcgc

SEQ ID NO: 287931 - DNA, 93 bp, Homo sapiens
  chr11:24518550-24518643
  hyper
cggcggcgccgaacaatccccggcagggctcgcctcgccggtgacatcactcctgaagatactcctcgctcccagcgcctgccttccccaggc

SEQ ID NO: 287932 - DNA, 220 bp, Homo sapiens
  chr11:24518700-24518920
  hyper
ggggacagagccgggcaccaaggagcgacaggatcccgaagagagagagagaaggcagcgagggaaggaggaccccggcaggcagcagcatgaaattcagcccagcgcactacctgctgcctctcctgcctgcgctggtcctcagcaccaggtgagtccaggagcgtgagtgacctgaggccaggggcgctgccggggcgaggttggtcctactgtgggt

SEQ ID NO: 287933 - DNA, 117 bp, Homo sapiens; identical to SEQ ID NO: 235449
  chr11:27384895-27385012
  hyper

SEQ ID NO: 287934 - DNA, 284 bp, Homo sapiens; identical to SEQ ID NO: 235450
  chr11:27493263-27493547
  hyper

SEQ ID NO: 287935 - DNA, 762 bp, Homo sapiens; identical to SEQ ID NO: 202490
  chr11:27493756-27494518
  hyper

SEQ ID NO: 287936 - DNA, 221 bp, Homo sapiens; identical to SEQ ID NO: 235452
  chr11:27721074-27721295
  hyper

SEQ ID NO: 287937 - DNA, 32 bp, Homo sapiens; identical to SEQ ID NO: 235453
  chr11:27722046-27722078
  hyper

SEQ ID NO: 287938 - DNA, 405 bp, Homo sapiens
  chr11:27740493-27740898
  hyper
gcgaaaactgccaccgggcttggctctgtggccggaacaaaaggcctgagaagggggtgggggtgagggttataggagtgtggagagcctggtggcccccgcccaggggcgcctaagtccctgagctccctgaagagtggcaagaggataacgcagccgcgcgttccggcagttcgctgtcccccgggggtgcaggcgggggcgggagaggtagaacacaggtctgggcggctccgcgccgcttctatctcacccgccaagcccctcacctccacccaccgccagtcccctgcccacccgggtggcggcggcggctcagcgactagccggccgccctccaccggcgcctccggacgcaacctcgccctggcagggcggtctgcgcgtccagctgattggtggctc

SEQ ID NO: 287939 - DNA, 199 bp, Homo sapiens; identical to SEQ ID NO: 202491
  chr11:27740986-27741185
  hyper

SEQ ID NO: 287940 - DNA, 216 bp, Homo sapiens
  chr11:27743203-27743419
  hyper
tagatttacgcaaacgccctcactccgagagacacgtttccttttgagttcttacgtgattctaatgaatgagcgaggttaccaatgattgcccaactgccctgctatgtagcaggtgtttcctagggctgccttctaaccgcccgttactgggtcctggcactgaaagttcccagagaaagtgaggagtttcagggtacccctgtaaaaaaaaaa

SEQ ID NO: 287941 - DNA, 147 bp, Homo sapiens; identical to SEQ ID NO: 235459
  chr11:28129838-28129985
  hyper

SEQ ID NO: 287942 - DNA, 118 bp, Homo sapiens; identical to SEQ ID NO: 235465
  chr11:30344496-30344614
  hyper

SEQ ID NO: 287943 - DNA, 242 bp, Homo sapiens
  chr11:30606409-30606651
  hyper
ttctgacatcttttttcacttaaacttttgtttgtcccacccccccgacctgtttgtgtttgtttgcagcatctcaaatcaattatacatttttcatgacccgcatttgcacttaatttggggtgtgtgtgtgagaggggggtggtgatgtactattataaatcaacttcactggggcatccttaatttattttcttgctgacggattccaaccggctcctgagcctctagaaaaatgcccc

SEQ ID NO: 287944 - DNA, 336 bp, Homo sapiens; identical to SEQ ID NO: 202493
  chr11:30607762-30608098
  hyper

SEQ ID NO: 287945 - DNA, 135 bp, Homo sapiens
  chr11:30608219-30608354
  hyper
agaagggagctttctcccaaatggtgttcttctgcaaagagaacacccagctccccgccacccaccgacctgccaggctctgtcaggagtcctggcaccgttccaggacgcagggctcaccgcaggggtaagggg

SEQ ID NO: 287946 - DNA, 233 bp, Homo sapiens; identical to SEQ ID NO: 235468
  chr11:31391279-31391512
  hyper

SEQ ID NO: 287947 - DNA, 231 bp, Homo sapiens; identical to SEQ ID NO: 235469
  chr11:31531543-31531774
  hyper

SEQ ID NO: 287948 - DNA, 474 bp, Homo sapiens
  chr11:31818828-31819302
  hyper
ccgaagaaccccgccgatagcatgctctgctctcatttgcctctttgacattttcttaattttaaaacatggagattcacattcttatccatgttctgtctcacacaaacatacacacgggtttacacaggcagcacgcgatcgccgccaggccctgtgctgcctccagaactgacacttaagagagaaaagtcagcagggacagtagagctcaattttaaatctggaaaaaaaaaaaaaaaaaaaaaagatgggaagcggggattggaattccacagcaaaaagaaacctgtcgctgcaggatcccttctctaccccgcggggagagcggcacggagacagttcattactttagaagtggcaactgtttgcagccaggcggtgacctagcggctgctcttacataaaatgggtacatttccccccactttagtggatttgccttccactcttaaagcttttaacaaaataaaa

SEQ ID NO: 287949 - DNA, 224 bp, Homo sapiens; identical to SEQ ID NO: 202495
  chr11:31821778-31822002
  hyper

SEQ ID NO: 287950 - DNA, 39 bp, Homo sapiens
  chr11:31823126-31823165
  hyper
ggtacagaccccctcggacagtaatctgtctcggatttc

SEQ ID NO: 287951 - DNA, 44 bp, Homo sapiens
  chr11:31823252-31823296
  hyper
gattgccctgggtctgatggagccagtctcgtaatacctgccca

SEQ ID NO: 287952 - DNA, 42 bp, Homo sapiens; identical to SEQ ID NO: 202496
  chr11:31831437-31831479
  hyper

SEQ ID NO: 287953 - DNA, 142 bp, Homo sapiens; identical to SEQ ID NO: 202497
  chr11:31832139-31832281
  hyper

SEQ ID NO: 287954 - DNA, 362 bp, Homo sapiens
  chr11:31833155-31833517
  hyper
ttctgggttgggggtcgcgcccccactccccctaagctggactcgggactcccagtcctcggagggtgcaagtttctgtgctgtcctttcttgccaactccaggacagcgtggcctgccgccccgcccccgcccgcccccaccccatcccagccggggccccaagacacagagcacagcggcggccgcaccccagcccacctggccccttggaagaagaggaaaggggcgggagcgtcactgggtcctggcagctccattccagctgcggaggccgcggcgaagcctaggccgagaggaggttgccgggccgagaactaaacgaggccagaggcctccccagcccaagcctccagggcctgt

SEQ ID NO: 287955 - DNA, 180 bp, Homo sapiens; identical to SEQ ID NO: 202499
  chr11:31833906-31834086
  hyper

SEQ ID NO: 287956 - DNA, 231 bp, Homo sapiens; identical to SEQ ID NO: 202500
  chr11:31834242-31834473
  hyper

SEQ ID NO: 287957 - DNA, 226 bp, Homo sapiens; identical to SEQ ID NO: 202501
  chr11:31834848-31835074
  hyper

SEQ ID NO: 287958 - DNA, 90 bp, Homo sapiens; identical to SEQ ID NO: 235486
  chr11:31836598-31836688
  hyper

SEQ ID NO: 287959 - DNA, 104 bp, Homo sapiens
  chr11:31842276-31842380
  hyper
agtaggggaagtagtggagagagagaaagatagagaaatcggctcttggcttgaactgttgttcttgtcgaaggtatgttttcccctcccggcctctgtcgctt

SEQ ID NO: 287960 - DNA, 90 bp, Homo sapiens; identical to SEQ ID NO: 120549
  chr11:32449104-32449194
  hyper

SEQ ID NO: 287961 - DNA, 214 bp, Homo sapiens
  chr11:32455062-32455276
  hyper
cgcattccaaaaacatcccggtccctaggccctcgagtaattttgctccaggaaaagcatccgccattgtattagtaaagcgtttactaaattaccgaatcaaaccgaactggcttaggttctcaatagcgtggaaatccactgaaaataaatgaagagggcaaactacaggggctccgcaggttcgggtccgcgccgcccaggcgaaagagag

SEQ ID NO: 287962 - DNA, 97 bp, Homo sapiens; identical to SEQ ID NO: 202503
  chr11:32605170-32605267
  hyper

SEQ ID NO: 287963 - DNA, 94 bp, Homo sapiens; identical to SEQ ID NO: 235505
  chr11:32605714-32605808
  hyper

SEQ ID NO: 287964 - DNA, 412 bp, Homo sapiens; identical to SEQ ID NO: 202504
  chr11:32851553-32851965
  hyper

SEQ ID NO: 287965 - DNA, 941 bp, Homo sapiens; identical to SEQ ID NO: 202505
  chr11:32915115-32916056
  hyper

SEQ ID NO: 287966 - DNA, 97 bp, Homo sapiens
  chr11:33037370-33037467
  hyper
gagagacacgtgaccggcagcgggggcggggcctgcagggagccacgccccgcacagttaacagacgggcgctcagggagctagggagctgtgaagc

SEQ ID NO: 287967 - DNA, 291 bp, Homo sapiens
  chr11:33037640-33037931
  hyper
cgcggggcgggcggcgtggggcgttcggccgcctgcgcctgtcaacggccggctgggcgagcacagcacagctgcgaccacttggccaacgcccccgccgagcgggcggatcgagttcctctctggctggtgggctgcaagcggcagagcccgcccgcacagcccagcttttttctttctacccagactctcaacttgaccgcgcgttggtctgtgcgcccgctaacgtgccaggcacgcgccggggagctccgggatatgctccgcggtgctaccggtgacaagtgtggt

SEQ ID NO: 287968 - DNA, 101 bp, Homo sapiens; identical to SEQ ID NO: 235509
  chr11:33060993-33061094
  hyper

SEQ ID NO: 287969 - DNA, 41 bp, Homo sapiens; identical to SEQ ID NO: 235510
  chr11:33182773-33182814
  hyper

SEQ ID NO: 287970 - DNA, 264 bp, Homo sapiens; identical to SEQ ID NO: 235511
  chr11:33183094-33183358
  hyper

SEQ ID NO: 287971 - DNA, 162 bp, Homo sapiens
  chr11:33397373-33397535
  hyper
tgccgcttgggcacgttgaccatgacccccctccccggccagacgacctctctcccgccaaccttcccttctctagatgggggacaggaggggagggaagccctccccttaaggacctccgctgcgcgggagccgccgggaggggtccccctcctgggtctc

SEQ ID NO: 287972 - DNA, 852 bp, Homo sapiens
  chr11:33397642-33398494
  hyper
gtgctttctttgtcaatgaggcgccgctctgagctgcggtagcactcgcggcccgggaacccgagccggagccggggctggaacccgaagcccagcgaggagcgaggagcgaggagccaggacagcggggcgccgaggctgcagcggcggcgggagggagggacccgagcgcgccccgcggccgccacccccgttcccggcagcctcgccccctagttctgcaggagccggcccgggggagggggccccgggcggcgcccgtcccaccctcgccgccccaatcgcgccggcgcgcggcgacaggcaccgtgggaaccccggcccgcacccgccgcggctccatgcgggcccggcccctgcgcgggtgaagccgcggctccctggagcccgccccgggcgcggcaggacgagcgagccagtcgcgccgctcggcgccccctccctccggcgcccgggccgtggccggcgatgcccggtgaggaccggggcgccgagggctgggctccccggcgcggtgcagagcgaggcagcggcctggatgtgtgaagcgtccccatggctccgcaggaggccaagcctcagggctcaagggaagctgggcccgcgacgcgggggcgcgggggccggcccgtggcgcgtgggcttggtcgggctgcctggggagccgcgcgctgcacgggtgtgaggggccccggggccggcgcgtcccacgatgcgcccccgcggccaccgacgctgctgctgggacttctgctgctggcggccctcctggagcacggccaggccgacccgggtaagcgctcggcggcggggcgtccgcggaggtttctggaggagcggggcggcgggacg

SEQ ID NO: 287973 - DNA, 603 bp, Homo sapiens
  chr11:33890633-33891236
  hyper
gagcgtcccagtagcctggagtggcccgcagaggcgccgggccgacccctgtccctgccgcccgccgcccagtccctctcccagagcccccggaatcacccgggaggaaggaggagcccagcgctcggcacagggggccaagggcacgccgcgagcgcgcacctggagccccctcgcgggccgcccgggtccccccgacgctccgggacgcgaggccgtggacaccgggggtggcaggggcaggggggccgcacttactctgaagggtccaggctcttcctttcgatggccgaggacattggggagggaggcggggtgccgggcggcgggggcgctccctttgtggcgcggggctggccggctgccggggctcggaccccctcgggtgctcgggcgccgccgccgccgccgccgtcgccgccgctcctgcgcctccgcttgctccggcgctccgccggcgagctcgcccctccgcgctcaaggacagtcaccgcgctcccttcaaacgccaaagagagagagcgaatcaccgggctgcgggcgcgccgcggccgaggcgggggccggggcgcgcagcctggctccaggcggctgcagctgctg

SEQ ID NO: 287974 - DNA, 248 bp, Homo sapiens
  chr11:33891711-33891959
  hyper
gggacggggagagccgctcagcgaacacctctccttggaaaggaggctgggcaaccactaaatcattcttcagggcttcccctcttccgcctttcccttttggtttaactaaggcagaaagtaacccacgaacagctcgagcaagcaagaaaagacaagaatgtgaaataagcacctacagaaatgcaagtgttcccagtggattttccgcccgtcccaggttcgaggtcccaggtccacggacgccg

SEQ ID NO: 287975 - DNA, 134 bp, Homo sapiens; identical to SEQ ID NO: 202508
  chr11:33892127-33892261
  hyper

SEQ ID NO: 287976 - DNA, 118 bp, Homo sapiens; identical to SEQ ID NO: 235515
  chr11:34126917-34127035
  hyper

SEQ ID NO: 287977 - DNA, 34 bp, Homo sapiens; identical to SEQ ID NO: 202509
  chr11:35160296-35160330
  hyper

SEQ ID NO: 287978 - DNA, 1029 bp, Homo sapiens
  chr11:35160331-35161360
  hyper
ggaaaggagaggccaaaggctgaacccaatggtgcaaggttttacggttcggtcatcctctgtcctgacgccgcggggccagcgggagaagaaagccagtgcgtctctgggcgcaggggccagtggggctcggaggcacaggcaccccgcgacactccaggttccccgacccacgtccctggcagccccgattatttacagcctcagcagagcacggggcgggggcagaggggcccgcccgggagggctgctacttcttaaaacctctgcgggctgcttagtcacagccccccttgcttgggtgtgtccttcgctcgctccctccctccgtcttaggtcactgttttcaacctcgaataaaaactgcagccaacttccgaggcagcctcattgcccagcggaccccagcctctgccaggttcggtccgccatcctcgtcccgtcctccgccggcccctgccccgcgcccagggatcctccagctcctttcgcccgcgccctccgttcgctccggacaccatggacaagttttggtggcacgcagcctggggactctgcctcgtgccgctgagcctggcgcagatcggtgagtgcccgccgcagcctgggcagcaagatgggtgcggggtgctcagcgcggacccggcggcagcccctccggctgagtcggccctgggggactggagtcaagtgagctgtctgcgaagtgcattgggctccggaaagcagggctgggatttgcgctaaaccgttggagaatgtgtctgtggaagcaccatttggttgaaagaaaaagagaaagagaagaaagtttgttgggcaggctgccggcgcgcagttttgggcgaggtcgctagagctgcagcacatggcagaaagtaaccgttctcccggatgcgcacagtcgttgtctggactaacaggctcctgtgcccaagggctcgccaagccccaccgggctgtgtctaggcagggcagagctgggcggggcagagactggggctggaacagggcgagtggctgttatca

SEQ ID NO: 287979 - DNA, 202 bp, Homo sapiens
  chr11:35439896-35440098
  hyper
cgttttcccgcctcccgggaagcacccaaatctcttccacccttccttagagctagccagggagattccgccttccagggacaaggaccgatcggagcgggcccagcatctccatggcgactctgcaaacctggcgttcaaggccgcgcgcgctggtccttgccccgccccagggccctgtcttggctcattccttccgagc

SEQ ID NO: 287980 - DNA, 238 bp, Homo sapiens; identical to SEQ ID NO: 202513
  chr11:35440137-35440375
  hyper

SEQ ID NO: 287981 - DNA, 88 bp, Homo sapiens
  chr11:35441758-35441846
  hyper
ggggtgagtggcgggggacggttctccacccactcggcgctgctcgccgcctgcttccgtgtcccgggggcggcgcacagagacagat

SEQ ID NO: 287982 - DNA, 80 bp, Homo sapiens; identical to SEQ ID NO: 235520
  chr11:35442069-35442149
  hyper

SEQ ID NO: 287983 - DNA, 76 bp, Homo sapiens; identical to SEQ ID NO: 202514
  chr11:35547021-35547097
  hyper

SEQ ID NO: 287984 - DNA, 208 bp, Homo sapiens; identical to SEQ ID NO: 202515
  chr11:35547127-35547335
  hyper

SEQ ID NO: 287985 - DNA, 39 bp, Homo sapiens; identical to SEQ ID NO: 202516
  chr11:35547575-35547614
  hyper

SEQ ID NO: 287986 - DNA, 693 bp, Homo sapiens; identical to SEQ ID NO: 202517
  chr11:35639806-35640499
  hyper

SEQ ID NO: 287987 - DNA, 66 bp, Homo sapiens; identical to SEQ ID NO: 202518
  chr11:35641617-35641683
  hyper

SEQ ID NO: 287988 - DNA, 58 bp, Homo sapiens
  chr11:35641718-35641776
  hyper
tctctccacccagcttataaaaggattctttactgtgccagcacggggattggatccg

SEQ ID NO: 287989 - DNA, 156 bp, Homo sapiens; identical to SEQ ID NO: 202519
  chr11:35966093-35966249
  hyper

SEQ ID NO: 287990 - DNA, 79 bp, Homo sapiens; identical to SEQ ID NO: 202520
  chr11:36397978-36398057
  hyper

SEQ ID NO: 287991 - DNA, 223 bp, Homo sapiens; identical to SEQ ID NO: 202521
  chr11:36398477-36398700
  hyper

SEQ ID NO: 287992 - DNA, 199 bp, Homo sapiens; identical to SEQ ID NO: 235526
  chr11:36531740-36531939
  hyper

SEQ ID NO: 287993 - DNA, 411 bp, Homo sapiens; identical to SEQ ID NO: 235527
  chr11:36616034-36616445
  hyper

SEQ ID NO: 287994 - DNA, 184 bp, Homo sapiens; identical to SEQ ID NO: 202523
  chr11:40314508-40314692
  hyper

SEQ ID NO: 287995 - DNA, 493 bp, Homo sapiens
  chr11:40314923-40315416
  hyper
aggtgttgcagaactccgcggtcggggccgggatcacgggggagacgcaggatgcggtccctcgccggtggcccctgccagcccccgggtccccttctcctccatcagccggtagtggctccgggagcgccgaggtgatggaagttgagactggggcttttatttcaaatggggagggcgaagtgaggggacagacagggtggtaggcaaattaaaaaaaacacacacgaaaaaagaaagaaaaaaagaaaaagaagaaaaaaagaaaaaggaagaaaacgggtaaaaaaaaaattccctaatcgctggctcttctcatccttctcaaatgcaactgcagctttgatctcatttccagctgcgttgggtacattttggagccacaagttggttcccgttggcgcagaccttcccgatgtctgctagtcctctgcgaggagacgcgttctcgggagcgcagctgctccgcgccgcccttagcgccatcgccctg

SEQ ID NO: 287996 - DNA, 214 bp, Homo sapiens; identical to SEQ ID NO: 235529
  chr11:43333313-43333527
  hyper

SEQ ID NO: 287997 - DNA, 254 bp, Homo sapiens
  chr11:43569315-43569569
  hyper
ctagagagactggggagggggcttccccggggggggggggggcatcgcgcagccctaggcgcccgcccctccggcctaagcagggttcctccccaccttccttctcctcgccgccccaccctcccgcgcccttctcttcccccagctcgggctccctgggctccgaggcttcgcccccgcgcgggagctctcggggcgagggcggtgcgcagcggtgcgggggcagaggtgatgctgggcggggcggggcggca

SEQ ID NO: 287998 - DNA, 242 bp, Homo sapiens
  chr11:43596608-43596850
  hyper
tcagctcccctttcccccacacaggggagcccctaaatggctgctggccatttgcaaagggttgtgtgcatgtgtgtatttaattgcaggcttatttgtttctgctctgggagtctgtccgtctctctgtaactcggatcattgctctctgggaagctgtataactggctgattccgtgggagaccaggcaggatgcgtgggcgcaggaaacagaagagggaaaaggagggagaaaaagaga

SEQ ID NO: 287999 - DNA, 195 bp, Homo sapiens
  chr11:43597312-43597507
  hyper
gagactcaaggcggctgctccgcgctgccttcatgagtctattttctccagccccctcgtagtgaattactagaacgcaaaacacacacacagacacacatatgcagctttcaaaatatacatttccaaaggcggtgtgttgcaaacacaacgcgattttgcagagcgtgggtgggaaacgtgggaagggtatgg

SEQ ID NO: 288000 - DNA, 58 bp, Homo sapiens; identical to SEQ ID NO: 202527
  chr11:43599958-43600016
  hyper

SEQ ID NO: 288001 - DNA, 238 bp, Homo sapiens; identical to SEQ ID NO: 202528
  chr11:43600215-43600453
  hyper

SEQ ID NO: 288002 - DNA, 336 bp, Homo sapiens; identical to SEQ ID NO: 235539
  chr11:43902242-43902578
  hyper

SEQ ID NO: 288003 - DNA, 230 bp, Homo sapiens
  chr11:43964015-43964245
  hyper
gggggcgggcggcgccggggaaggggccgttactttcccagagcggcggggcgacgtcaggcggaagggcgcggggcgcgcacgctttaaatggcattcgctgtcatccgagctcagagccgtgtgggcagccgcgggctatataagccgcgagcctggccgccgcggggcagacggcgacagcagcggcggcgagcgcctcggagcgcggcggaacagcgccccccgag

SEQ ID NO: 288004 - DNA, 205 bp, Homo sapiens; identical to SEQ ID NO: 202529
  chr11:43965299-43965504
  hyper

SEQ ID NO: 288005 - DNA, 142 bp, Homo sapiens
  chr11:43966061-43966203
  hyper
ggagggtggggcatgtctttggttagagcctgaagggcacctgggtaccatcgagtccttcccttctccccgcccctgcctttgtttacatatgagaaaacaagcctagggtaacagggagaggagcgcccccagttctccg

SEQ ID NO: 288006 - DNA, 185 bp, Homo sapiens; identical to SEQ ID NO: 235544
  chr11:44087353-44087538
  hyper

SEQ ID NO: 288007 - DNA, 128 bp, Homo sapiens; identical to SEQ ID NO: 202530
  chr11:44087990-44088118
  hyper

SEQ ID NO: 288008 - DNA, 85 bp, Homo sapiens; identical to SEQ ID NO: 235546
  chr11:44117173-44117258
  hyper

SEQ ID NO: 288009 - DNA, 174 bp, Homo sapiens
  chr11:44327413-44327587
  hyper
aagaggggcagcttcccgcagcggccccgcgtctcgggacaggtagactaggaccagtacgcgccggctgcagctccggcggtcggatccggagtttgggggcgaggcgccggagtccctgccctgagtacagggaggctctctgcgtcgctgagaaacgtcggatctccaacc

SEQ ID NO: 288010 - DNA, 33 bp, Homo sapiens; identical to SEQ ID NO: 235551
  chr11:44332119-44332152
  hyper

SEQ ID NO: 288011 - DNA, 58 bp, Homo sapiens
  chr11:44337571-44337629
  hyper
tcttaaccgctgcgcgagttatcagaaatccctggagccaaacactacgggggaccgg

SEQ ID NO: 288012 - DNA, 245 bp, Homo sapiens
  chr11:44338552-44338797
  hyper
cgatggaacctggtgccccgccctctctggcaagggcaaggccaagagcgcagggcggggagaggagctccggggacccgcggaaaacctggctcgaaagccctggaggcgagctctccaccgtgttcggtggccaccttaattcttgttgaaccgagaggaagttgttgaaaccggaagtcggcctctggggtctgagcccgtccaccctttgcagatcggtaacagccgaggaaagcacagat

SEQ ID NO: 288013 - DNA, 365 bp, Homo sapiens; identical to SEQ ID NO: 235554
  chr11:44341437-44341802
  hyper

SEQ ID NO: 288014 - DNA, 137 bp, Homo sapiens; identical to SEQ ID NO: 202531
  chr11:44748053-44748190
  hyper

SEQ ID NO: 288015 - DNA, 256 bp, Homo sapiens; identical to SEQ ID NO: 202532
  chr11:44748419-44748675
  hyper

SEQ ID NO: 288016 - DNA, 313 bp, Homo sapiens; identical to SEQ ID NO: 202533
  chr11:44748871-44749184
  hyper

SEQ ID NO: 288017 - DNA, 530 bp, Homo sapiens
  chr11:44749218-44749748
  hyper
cgccacgccacccggtaagacagtgagggaccagggactgggagcggcgatcggggccgggagggctgtggggcccggcagctgcatggagggcgggctgcctttggggtccctggcagcggggcggggcggggcggaggcgccactcgttcctccaggaccccccttattccttaggtgtgtgcggtttggggaagtggagactccatggagtgctgggtgggtgggaggctcgggcacgtccagatttagggggcagtgggagccagttgggacggtgctcggctcgggtgggatcgcgccggctccgggtcctgctggagtgaggtgactgggctcccgccagggggcgcactgccccggccctcgccagcaggaagcgcgttctggctcctgcgaggcaaccgcgccgacatccaggacgcagggaccacagacacccaacttacgcggggtcccgccccgaggagcccgccctacactagccagacgggggagcgggaccaagagtgaggcgaaaggttcacagt

SEQ ID NO: 288018 - DNA, 384 bp, Homo sapiens; identical to SEQ ID NO: 235557
  chr11:44970973-44971357
  hyper

SEQ ID NO: 288019 - DNA, 374 bp, Homo sapiens
  chr11:45307446-45307820
  hyper
ctgctgtcccctccccgccaagctttgtcgcgcaaagatccacgaccgcctcccaccccagttccccctctgcagctgcccggcaaccccgccttgcccgggaagggcctgcgcgccgcccccgctcacctgttgtgcagacccgagcaagctgggcttcgccttctccaggtcggggtcctggtcccgcggcagcagccccttcttggggtgcatgtgccgacacaggcaggtgaccccgcacaacgcgaggatgctggtggctgtgcccagcgtggcgcccagcgcgatcacaggcaccgacagcaccatggtgcccgctcccggcgaggggctgggtcccgcagccgctcaccttccccgggccgggcccg

SEQ ID NO: 288020 - DNA, 155 bp, Homo sapiens; identical to SEQ ID NO: 202536
  chr11:45307857-45308012
  hyper

SEQ ID NO: 288021 - DNA, 61 bp, Homo sapiens; identical to SEQ ID NO: 235560
  chr11:45392759-45392820
  hyper

SEQ ID NO: 288022 - DNA, 96 bp, Homo sapiens; identical to SEQ ID NO: 202537
  chr11:45684299-45684395
  hyper

SEQ ID NO: 288023 - DNA, 77 bp, Homo sapiens
  chr11:45686160-45686237
  hyper
cgggagggttgttccggctttccgtggtgggctctgcaccatccggcggctccggccccacaggggcccagctcatc

SEQ ID NO: 288024 - DNA, 152 bp, Homo sapiens
  chr11:45687045-45687197
  hyper
gacccggagcgccgcagccccgggcgccggaggagagcagcagccgcaggcaccagagcctctcggagcgcccgcccgcgtccccgagccaagagcagcggcggcagcggcggctacagctccgagcgagcggcaggcgctgcggtcccggc

SEQ ID NO: 288025 - DNA, 77 bp, Homo sapiens; identical to SEQ ID NO: 235562
  chr11:45687429-45687506
  hyper

SEQ ID NO: 288026 - DNA, 186 bp, Homo sapiens; identical to SEQ ID NO: 202538
  chr11:45825485-45825671
  hyper

SEQ ID NO: 288027 - DNA, 183 bp, Homo sapiens; identical to SEQ ID NO: 235563
  chr11:45826513-45826696
  hyper

SEQ ID NO: 288028 - DNA, 217 bp, Homo sapiens; identical to SEQ ID NO: 202539
  chr11:45907277-45907494
  hyper

SEQ ID NO: 288029 - DNA, 45 bp, Homo sapiens; identical to SEQ ID NO: 235565
  chr11:46141117-46141162
  hyper

SEQ ID NO: 288030 - DNA, 615 bp, Homo sapiens
  chr11:46259484-46260099
  hyper
ggaggacagagggggaagaaacggagggagtcgctgggggacggcgacgagtgggatccgggcgggtgggactgggcgcaaaggaccgcgccgacgccgcatggctgccgggaattcagctcccccggccaggttgagcgggccccggggcccggagcgggcgtcggcatctccggcctccccgcggggctgcaggcaggcggcgccccgagcgcaccccgcgcgagcaggcgcggaacagcggacccaggccgggccttcccgcagcttttctggccgcctcggagggcagggtcccagcgcggcccgaggcgcctcttgccagcggcccgacctcctgccctcccggccccctccaggctccccgcacgtgcaggcccggcgacgtcactgcggctctgacgcgctcttggaggcccgggcggaggcggcgcggcgcgggcttcctccgggaggtcccggtcccggcagcccgcggccgcgtccttggccctcctccgggggaacctcgttcattccaaactctggaaggccggctgtccttcggttactgataaggacgcgagctcttggtaaaagatttgaacaatgcccggaaagaaatagctggaccta

SEQ ID NO: 288031 - DNA, 167 bp, Homo sapiens; identical to SEQ ID NO: 235567
  chr11:46260604-46260771
  hyper

SEQ ID NO: 288032 - DNA, 62 bp, Homo sapiens; identical to SEQ ID NO: 202540
  chr11:46264958-46265020
  hyper

SEQ ID NO: 288033 - DNA, 593 bp, Homo sapiens
  chr11:46299154-46299747
  hyper
tgtgggggcgtggcgccttggccagctgggctagccagccaggggttcccggtttcacagagaggaaagtgacagaagacgtgcggagggagacgcagagacagaggagaggccggcagccacccagtctcgggggagcacttagctcccccgccccggctcccaccctgtccggggggctcctgaagccctcagccccaaccccgggctccccatggaagccagctgtgccccaggaggagcaggaggaggtggagtcggctgaatgcccacggtgcgcccggggcccctgagcccatcccgctcctagccgctgccctaaggcccccgcgcgccccgcgccccccacccggggccgcgccgcctccgtccgcccctcccccggggcttcgccccggacctgccccccgcccgtttgccagcgctcaggcaggagctctggactgggcgcgccgccgccctggagtgagggaagcccagtggaagggggtcccgggagccggctgcgatggacgccgtcttggaacccttcccggccgacaggctgttccccggatccagcttcctggacttgggggatctgaacgagtcgg

SEQ ID NO: 288034 - DNA, 42 bp, Homo sapiens; identical to SEQ ID NO: 235570
  chr11:46402521-46402563
  hyper

SEQ ID NO: 288035 - DNA, 206 bp, Homo sapiens
  chr11:46412034-46412240
  hyper
gtgcacccacaaggcggaggcccggacagagctcgggtcaggcgagtgcaagactcttgtcctccttctctcctcaccctgcaccctaccccagaggcactgtctagcccctgtgaccaaagtggggacccagtttctcacgctagggtcgggcgggcctcgagggccgtgttttcctaggccatctggaggctcctccatgtctc

SEQ ID NO: 288036 - DNA, 308 bp, Homo sapiens; identical to SEQ ID NO: 120673
  chr11:46412276-46412584
  hyper

SEQ ID NO: 288037 - DNA, 77 bp, Homo sapiens
  chr11:46412965-46413042
  hyper
cctccgagagcccccggccttgcttccagcggggtcccccagccccggcccactgccgctcccggcccgcgctcgcc

SEQ ID NO: 288038 - DNA, 470 bp, Homo sapiens
  chr11:46413304-46413774
  hyper
ccgcagctcccggcgctgtggctccgactcgcgctcacgctcgcacttttccccgagccgcgtgatgtcacgaggaagcagccaatcgtggcggggccgcgccgcccgccccgggccggtcacccggcggcgacgcgcgggggtcaacacccgaggcgtcggagaccccggcggtccgcgcccctctcgggggctggccggcagctccctgcttgggcacagagggcgccgcccacggccagcgacgcaggggagcagggggcgctgccctccggggggtgggggtgtccgcgttgtcatggggacgcggcgccccctcgcgggctggggaaggagctggcagctgggtccggccgcgctcccgcctccgccctgaccatactcccgggaccctgagctattttcgcgcctctccgggacctcagcgccctgcgtggccccgctggcggtttggccgcgaggcgcgggag

SEQ ID NO: 288039 - DNA, 333 bp, Homo sapiens; identical to SEQ ID NO: 224102
  chr11:46564032-46564365
  hyper

SEQ ID NO: 288040 - DNA, 72 bp, Homo sapiens; identical to SEQ ID NO: 235574
  chr11:46638624-46638696
  hyper

SEQ ID NO: 288041 - DNA, 182 bp, Homo sapiens; identical to SEQ ID NO: 224103
  chr11:46848281-46848463
  hyper

SEQ ID NO: 288042 - DNA, 349 bp, Homo sapiens; identical to SEQ ID NO: 235575
  chr11:46867728-46868077
  hyper

SEQ ID NO: 288043 - DNA, 34 bp, Homo sapiens; identical to SEQ ID NO: 224105
  chr11:46939597-46939631
  hyper

SEQ ID NO: 288044 - DNA, 46 bp, Homo sapiens; identical to SEQ ID NO: 235577
  chr11:47198542-47198588
  hyper

SEQ ID NO: 288045 - DNA, 106 bp, Homo sapiens; identical to SEQ ID NO: 202543
  chr11:47208475-47208581
  hyper

SEQ ID NO: 288046 - DNA, 51 bp, Homo sapiens; identical to SEQ ID NO: 202544
  chr11:47237126-47237177
  hyper

SEQ ID NO: 288047 - DNA, 246 bp, Homo sapiens; identical to SEQ ID NO: 235580
  chr11:47279142-47279388
  hyper

SEQ ID NO: 288048 - DNA, 81 bp, Homo sapiens; identical to SEQ ID NO: 235581
  chr11:47447397-47447478
  hyper

SEQ ID NO: 288049 - DNA, 62 bp, Homo sapiens; identical to SEQ ID NO: 202545
  chr11:47448209-47448271
  hyper

SEQ ID NO: 288050 - DNA, 150 bp, Homo sapiens; identical to SEQ ID NO: 235583
  chr11:47600837-47600987
  hyper

SEQ ID NO: 288051 - DNA, 154 bp, Homo sapiens; identical to SEQ ID NO: 235584
  chr11:47664236-47664390
  hyper

SEQ ID NO: 288052 - DNA, 32 bp, Homo sapiens; identical to SEQ ID NO: 235585
  chr11:47789176-47789208
  hyper

SEQ ID NO: 288053 - DNA, 50 bp, Homo sapiens; identical to SEQ ID NO: 224106
  chr11:48002696-48002746
  hyper

SEQ ID NO: 288054 - DNA, 123 bp, Homo sapiens
  chr11:49229870-49229993
  hyper
cacccgccagcaccagcgccccagcgcacagccagcgcgggcggcgcgcggtggccacagccgagtcggtttcgtgaaggagattccacatctcggcgcgagcagagccggcctcccgggacc

SEQ ID NO: 288055 - DNA, 71 bp, Homo sapiens
  chr11:57056831-57056902
  hyper
agagaaaggcagctgtttcccgaaaacaaagggctgggtcaataaatctgccgcagcagccgtggatcagt

SEQ ID NO: 288056 - DNA, 36 bp, Homo sapiens
  chr11:57056934-57056970
  hyper
cagtttctctgaaacgtctagaacagagccatccag

SEQ ID NO: 288057 - DNA, 175 bp, Homo sapiens; identical to SEQ ID NO: 235588
  chr11:57092401-57092576
  hyper

SEQ ID NO: 288058 - DNA, 231 bp, Homo sapiens; identical to SEQ ID NO: 235589
  chr11:57103415-57103646
  hyper

SEQ ID NO: 288059 - DNA, 73 bp, Homo sapiens
  chr11:57194105-57194178
  hyper
cgaattctgaataccgtcccctaaaataatgacagcaactcaaccaggtgcagaggcagggagatttcataca

SEQ ID NO: 288060 - DNA, 41 bp, Homo sapiens; identical to SEQ ID NO: 202546
  chr11:57243625-57243666
  hyper

SEQ ID NO: 288061 - DNA, 431 bp, Homo sapiens; identical to SEQ ID NO: 202547
  chr11:57243735-57244166
  hyper

SEQ ID NO: 288062 - DNA, 78 bp, Homo sapiens; identical to SEQ ID NO: 235593
  chr11:57298238-57298316
  hyper

SEQ ID NO: 288063 - DNA, 79 bp, Homo sapiens; identical to SEQ ID NO: 235594
  chr11:57334771-57334850
  hyper

SEQ ID NO: 288064 - DNA, 53 bp, Homo sapiens; identical to SEQ ID NO: 202548
  chr11:57365687-57365740
  hyper

SEQ ID NO: 288065 - DNA, 136 bp, Homo sapiens
  chr11:57414486-57414622
  hyper
cacagctgtaagtgcggtgacagcggggcagatagctgcggaaagtcttggtggggaggcaggcagggcccggaccggggtcacagctgggcatgacgggctggaggacaatgccctggtgggctggaggggctgg

SEQ ID NO: 288066 - DNA, 39 bp, Homo sapiens; identical to SEQ ID NO: 202549
  chr11:57417004-57417043
  hyper

SEQ ID NO: 288067 - DNA, 109 bp, Homo sapiens; identical to SEQ ID NO: 202550
  chr11:57425067-57425176
  hyper

SEQ ID NO: 288068 - DNA, 51 bp, Homo sapiens; identical to SEQ ID NO: 202551
  chr11:57434928-57434979
  hyper

SEQ ID NO: 288069 - DNA, 103 bp, Homo sapiens; identical to SEQ ID NO: 235599
  chr11:57479590-57479693
  hyper

SEQ ID NO: 288070 - DNA, 116 bp, Homo sapiens; identical to SEQ ID NO: 235600
  chr11:57480293-57480409
  hyper

SEQ ID NO: 288071 - DNA, 39 bp, Homo sapiens; identical to SEQ ID NO: 202552
  chr11:58345681-58345720
  hyper

SEQ ID NO: 288072 - DNA, 429 bp, Homo sapiens; identical to SEQ ID NO: 235604
  chr11:58912103-58912532
  hyper

SEQ ID NO: 288073 - DNA, 203 bp, Homo sapiens; identical to SEQ ID NO: 202553
  chr11:58940404-58940607
  hyper

SEQ ID NO: 288074 - DNA, 200 bp, Homo sapiens; identical to SEQ ID NO: 202554
  chr11:58940666-58940866
  hyper

SEQ ID NO: 288075 - DNA, 69 bp, Homo sapiens; identical to SEQ ID NO: 202555
  chr11:58940867-58940936
  hyper

SEQ ID NO: 288076 - DNA, 142 bp, Homo sapiens; identical to SEQ ID NO: 235606
  chr11:59317876-59318018
  hyper

SEQ ID NO: 288077 - DNA, 39 bp, Homo sapiens
  chr11:59323832-59323871
  hyper
gaagggaaagaatgcggccacgtggcctattttcctgtg

SEQ ID NO: 288078 - DNA, 60 bp, Homo sapiens
  chr11:59323899-59323959
  hyper
gggcccggatagctcagtcggtagagcatcagacttttaatctgagggtccggggttcaa

SEQ ID NO: 288079 - DNA, 201 bp, Homo sapiens
  chr11:59323987-59324188
  hyper
tttccaataaaatggatttgggcgaggctgagagaaaggaacgttatgtgaaacccgcttggggtgcctcctccttgagggaaaccagaacttgctagtgggttcttaccggaagaagtgaaacgtgtggaaaatgccaagaaactttatcttccaatagcaggcttttcttttccaacctttatacgttgctttgtctta

SEQ ID NO: 288080 - DNA, 206 bp, Homo sapiens
  chr11:59333673-59333879
  hyper
aaaaggtaagacatatgtccccagtatcctccctcccaggggaaaatgacgataaggtttcccttaactgccccagcccgcgtgagaacccacagggtgttgaccctgttaactgcagaaagaccctgttaactgcagaaatcacatgtagtgatgactaacgcctaaaacggaagcgctgccgaaacccgggattgaaccaggga

SEQ ID NO: 288081 - DNA, 198 bp, Homo sapiens; identical to SEQ ID NO: 235609
  chr11:59383395-59383593
  hyper

SEQ ID NO: 288082 - DNA, 210 bp, Homo sapiens; identical to SEQ ID NO: 202557
  chr11:59523106-59523316
  hyper

SEQ ID NO: 288083 - DNA, 55 bp, Homo sapiens; identical to SEQ ID NO: 235610
  chr11:59578500-59578555
  hyper

SEQ ID NO: 288084 - DNA, 267 bp, Homo sapiens; identical to SEQ ID NO: 235611
  chr11:60674118-60674385
  hyper

SEQ ID NO: 288085 - DNA, 49 bp, Homo sapiens; identical to SEQ ID NO: 202558
  chr11:60692121-60692170
  hyper

SEQ ID NO: 288086 - DNA, 45 bp, Homo sapiens; identical to SEQ ID NO: 235613
  chr11:60737965-60738010
  hyper

SEQ ID NO: 288087 - DNA, 155 bp, Homo sapiens; identical to SEQ ID NO: 48499
  chr11:60775226-60775381
  hyper

SEQ ID NO: 288088 - DNA, 306 bp, Homo sapiens; identical to SEQ ID NO: 235614
  chr11:60928909-60929215
  hyper

SEQ ID NO: 288089 - DNA, 232 bp, Homo sapiens
  chr11:61062456-61062688
  hyper
cccggcagcaggagcgcgacacaggcggcccgaaggagcagtccggcccacatgaccggcggcggcgggtcccccgggctgggctcggctcctgcgccgcgcgcgggagagggggctgccggccctcgcccctcctcctggcgccgtggggagcgaaccagcgatccccgaaatggcacgcagagctgagcaggggggcttgggacgccgagaggaggggccgagggccgcg

SEQ ID NO: 288090 - DNA, 118 bp, Homo sapiens; identical to SEQ ID NO: 235616
  chr11:61100429-61100547
  hyper

SEQ ID NO: 288091 - DNA, 128 bp, Homo sapiens; identical to SEQ ID NO: 202560
  chr11:61159724-61159852
  hyper

SEQ ID NO: 288092 - DNA, 224 bp, Homo sapiens; identical to SEQ ID NO: 235618
  chr11:61160436-61160660
  hyper

SEQ ID NO: 288093 - DNA, 152 bp, Homo sapiens; identical to SEQ ID NO: 235619
  chr11:61197745-61197897
  hyper

SEQ ID NO: 288094 - DNA, 249 bp, Homo sapiens; identical to SEQ ID NO: 202561
  chr11:61275812-61276061
  hyper

SEQ ID NO: 288095 - DNA, 315 bp, Homo sapiens; identical to SEQ ID NO: 202562
  chr11:61276101-61276416
  hyper

SEQ ID NO: 288096 - DNA, 41 bp, Homo sapiens
  chr11:61334794-61334835
  hyper
atggagccattgagcgccccgccccccagagctgtccaagg

SEQ ID NO: 288097 - DNA, 40 bp, Homo sapiens
  chr11:61335353-61335393
  hyper
gtctgactgcatcctggccgctttggggctgcctgggtca

SEQ ID NO: 288098 - DNA, 618 bp, Homo sapiens
  chr11:61347974-61348592
  hyper
ccacacacgttgtccttgggctgttgaggggtgggggagaggtccttgtggggacactgcgaagccggtcccagacatccagcctggcagtgtccagactgcgggggaccggggtccgagccgctgccgctcgatcccgcgcccccggggctgggatgacccctgggggagcccgtgcggctccgggcggacaacagccccaggctggggctccgagacggcgtccggcgctgccgctgtcctgcccgccggtgcggggcgccccagcccgccggggccgcgcttacctgggctggccgcctccgggtcccggtacatggtcccctcgtcgccggttccctccgggctcctcagagccgcccgcggccgcgcgctgctccgccgccgccgctgggcatggggccgggcgacccccgggggcgggtccgagggcgggggccgagcgggctgcacctagccgcggagccggggagcgggggccgcccgccagccctcccgcccgcccgcggagcacgctgccgccgccgccgaacagcgccgagccgcctccctccggcctgcgcgccgcgtgtgcgcgccggagcgtgtgtgtgtgtacgaggccgtgtgtatgtgtgt

SEQ ID NO: 288099 - DNA, 217 bp, Homo sapiens; identical to SEQ ID NO: 235623
  chr11:61355115-61355332
  hyper

SEQ ID NO: 288100 - DNA, 406 bp, Homo sapiens; identical to SEQ ID NO: 235624
  chr11:61447552-61447958
  hyper

SEQ ID NO: 288101 - DNA, 519 bp, Homo sapiens
  chr11:61519848-61520367
  hyper
acccgggaaggccccgcgcccctcaagcctgggacggtctcgcgtcccccgacccgggacggccccgcgccccgcaagcctaggactgcccagcgctgagcgccgcctgcaggagtcgggagcgtggtgcccgcggccgggctgggcgcggcgcgggccggcagggggcgctgggcgcggcgggcggggcgcgtggggcgggcaggggccgggccagggacgcgcggggggcaagcgcggcggcggaccgggcgggaccgtagccggagcccagccgggactgtcgcgcgggccgcgccggcgatgccgcgcccccgggccgggctgtagcggggccgcggctggagtgtgcgccgggcaggcgggacatggaggtggtggacgagacggaggcgctgcagcgcttcttcgaaggtgagagaccgcgggctggcggcggcgaccctctggcgctgggaacccccggctgatctccccgggaactggggctcctcgctgtgtttccgcctcctctggctg

SEQ ID NO: 288102 - DNA, 166 bp, Homo sapiens; identical to SEQ ID NO: 235627
  chr11:61560143-61560309
  hyper

SEQ ID NO: 288103 - DNA, 372 bp, Homo sapiens
  chr11:61582809-61583181
  hyper
cgagtggtcactctggttgacccgcgcaagctctggcctcgcccactaggctggtcgcgtcagagggtggggcgggtcttcgccccgcagcgtctaagctctgctgcgacgttatgggaacctggtgacccgcggcacactctgggacgccagggtagtggatagggacagtggagggcatcacgctgcagggcacgggatcagagggggatgcaaggggaggggacgccattctggccgccaagggggaaacgcggtgaagggaacgccccgactttcgagtccctaggactgagtccccaggactccaacccagcagagaggcgccggggccttagctctgagggctgtggtctagaaagggaagcagca

SEQ ID NO: 288104 - DNA, 265 bp, Homo sapiens
  chr11:61583629-61583894
  hyper
ctccctcccctggccactgaccccctccctccccaggcggcctgcatccttgctctcctccctcctagcctacccagctcggggttctgtccccgcccagagacctgaggctcggggctgcagatggaatgcacggcagggaggcgggaccctttgtttgtgtgtgcgtgttgttggcctccatccccactccccagactccacttctccaggcctctctcccgccttttcatcccgcatccgcaggacacccaatcaccgggca

SEQ ID NO: 288105 - DNA, 679 bp, Homo sapiens
  chr11:61584126-61584805
  hyper
caccgctcctcgcaccctgagcgctgggccacctcgtcccaggtgaagtagcgcggggtaggtccctgagccgcggtctcggcggccaccgggtcgggggccatagctggcctggcgacgccgcgcgccgggccagcaggggctgtcaggcgcgtgctcggggtccgcgggctccaggagtggatttgctggcgcgcgcccagagccagccgcctgcgcgccgggttttcagcaccgcagggcagaccggcgggcctcgcagcgcgcgttcccattggccgagcctcgtggcgcggggagcgagatcccgtcccccggtgggtcttgggcaactcacagctgggctgccaacacgcgccccctcgcgggctccctaaaggcgtcgccgccggattcgacttcctgacgtcaggcgggcatcgcggcgttggctcccagggggcgccgcggtaggaacagcggttctagtgcaggccctgggtgcggggccgcgctgcaggagtgaatggactgaggggccagggctgcggggtggccgcaggaagggtgggcggggccggggttgaggtttttccgtgcacgaggctgcccgggcggtcgcggacatcatctttaggctgtggatgccttggccggggtctccagacgctgaccctccagggttggaaactactgcctg

SEQ ID NO: 288106 - DNA, 259 bp, Homo sapiens; identical to SEQ ID NO: 202565
  chr11:61595492-61595751
  hyper

SEQ ID NO: 288107 - DNA, 48 bp, Homo sapiens; identical to SEQ ID NO: 202566
  chr11:61596695-61596743
  hyper

SEQ ID NO: 288108 - DNA, 190 bp, Homo sapiens; identical to SEQ ID NO: 202567
  chr11:61659371-61659561
  hyper

SEQ ID NO: 288109 - DNA, 205 bp, Homo sapiens
  chr11:61684832-61685037
  hyper
tccacatcccggcgcctcggggcgcccaggcgtccgttcccagcgccgccgcgtcctcccagcgccgcgtccccgcccgccgccgactccgccaggggccgagccgccccaccgcctgtcagccctgcccgcggccggtcagtaggtctcagacgcctgggctcgcggcccccagcccagccccgaccctgccctgggcgggtca

SEQ ID NO: 288110 - DNA, 135 bp, Homo sapiens; identical to SEQ ID NO: 120808
  chr11:61685087-61685222
  hyper

SEQ ID NO: 288111 - DNA, 31 bp, Homo sapiens
  chr11:61722651-61722682
  hyper
atccccatttccttcgtgctgggtgagttcc

SEQ ID NO: 288112 - DNA, 35 bp, Homo sapiens; identical to SEQ ID NO: 235631
  chr11:61735124-61735159
  hyper

SEQ ID NO: 288113 - DNA, 39 bp, Homo sapiens
  chr11:61793299-61793338
  hyper
taacacaaaaccacgttttcggtccgtaaggcagggtct

SEQ ID NO: 288114 - DNA, 164 bp, Homo sapiens; identical to SEQ ID NO: 224119
  chr11:62192262-62192426
  hyper

SEQ ID NO: 288115 - DNA, 468 bp, Homo sapiens; identical to SEQ ID NO: 202568
  chr11:62313646-62314114
  hyper

SEQ ID NO: 288116 - DNA, 301 bp, Homo sapiens; identical to SEQ ID NO: 235634
  chr11:62314747-62315048
  hyper

SEQ ID NO: 288117 - DNA, 32 bp, Homo sapiens; identical to SEQ ID NO: 202569
  chr11:62359274-62359306
  hyper

SEQ ID NO: 288118 - DNA, 208 bp, Homo sapiens; identical to SEQ ID NO: 202570
  chr11:62369474-62369682
  hyper

SEQ ID NO: 288119 - DNA, 49 bp, Homo sapiens; identical to SEQ ID NO: 202571
  chr11:62369884-62369933
  hyper

SEQ ID NO: 288120 - DNA, 445 bp, Homo sapiens; identical to SEQ ID NO: 235638
  chr11:62389462-62389907
  hyper

SEQ ID NO: 288121 - DNA, 232 bp, Homo sapiens; identical to SEQ ID NO: 235639
  chr11:62413282-62413514
  hyper

SEQ ID NO: 288122 - DNA, 68 bp, Homo sapiens; identical to SEQ ID NO: 235640
  chr11:62414222-62414290
  hyper

SEQ ID NO: 288123 - DNA, 395 bp, Homo sapiens; identical to SEQ ID NO: 235641
  chr11:62420564-62420959
  hyper

SEQ ID NO: 288124 - DNA, 304 bp, Homo sapiens
  chr11:62432819-62433123
  hyper
gctgtagtagccagattgggcggccgggagtggtgggggtgccgggtggaaggctctgggcggggtctcaggaccctccttttcttggcggggatcgggcttgtggtgccgctccccgtaatgtacggaggaagagggaaagggctctggccccctcggcgtcatgtcttcggtgctggcggcttcccatccgctggttctatcctcaaacgccgggacaccgggaatctcggagaaggacaaccgagatccagctggctcctccatcggggtgctcacactttctcatttgatttcaggtctg

SEQ ID NO: 288125 - DNA, 231 bp, Homo sapiens; identical to SEQ ID NO: 48540
  chr11:62433206-62433437
  hyper

SEQ ID NO: 288126 - DNA, 81 bp, Homo sapiens; identical to SEQ ID NO: 235643
  chr11:62439248-62439329
  hyper

SEQ ID NO: 288127 - DNA, 239 bp, Homo sapiens; identical to SEQ ID NO: 224123
  chr11:62473884-62474123
  hyper

SEQ ID NO: 288128 - DNA, 118 bp, Homo sapiens
  chr11:62476910-62477028
  hyper
aaaggtaaacaggccgaagaggggggatttaggggagggtgcgggagtgcagtcgtacagcagaggaactcttaggagggtaggggcggagcttggcttcagttaccgcgactggagc

SEQ ID NO: 288129 - DNA, 208 bp, Homo sapiens; identical to SEQ ID NO: 120837
  chr11:62477103-62477311
  hyper

SEQ ID NO: 288130 - DNA, 249 bp, Homo sapiens; identical to SEQ ID NO: 235645
  chr11:62495747-62495996
  hyper

SEQ ID NO: 288131 - DNA, 257 bp, Homo sapiens; identical to SEQ ID NO: 235646
  chr11:62521741-62521998
  hyper

SEQ ID NO: 288132 - DNA, 316 bp, Homo sapiens
  chr11:62538724-62539040
  hyper
atcttcagcgtcacgtgaccgccggtctctacagtctgttcacactggccaatcaagagccaggaagcctcctggagggccggaaactttccaaggcgcccgccgactggctgtattggggagggcggggccggggccccgggagagggaatgagtgtgagctcgtgagtgggcgccgccgccaccgcccccgccgccgtcgtctcggtagcagccttcgccacgccggggtcttcaggtgagcaggccttgctctggtccaaggactccccattcccgacgccgactgcttactcaccagtcttggagcccgcac

SEQ ID NO: 288133 - DNA, 110 bp, Homo sapiens; identical to SEQ ID NO: 120846
  chr11:62539068-62539178
  hyper

SEQ ID NO: 288134 - DNA, 126 bp, Homo sapiens; identical to SEQ ID NO: 235648
  chr11:62554789-62554915
  hyper

SEQ ID NO: 288135 - DNA, 410 bp, Homo sapiens; identical to SEQ ID NO: 235649
  chr11:62572860-62573270
  hyper

SEQ ID NO: 288136 - DNA, 105 bp, Homo sapiens
  chr11:62609872-62609977
  hyper
taggggcgaggcacgacccgcaccttgcatttgtactgtccgccagcaaacatctggcccttcactgagagggaaagatgccctgagaaagccatttcagaggct

SEQ ID NO: 288137 - DNA, 610 bp, Homo sapiens; identical to SEQ ID NO: 235651
  chr11:62623424-62624034
  hyper

SEQ ID NO: 288138 - DNA, 206 bp, Homo sapiens; identical to SEQ ID NO: 202576
  chr11:63258404-63258610
  hyper

SEQ ID NO: 288139 - DNA, 54 bp, Homo sapiens; identical to SEQ ID NO: 202577
  chr11:63258770-63258824
  hyper

SEQ ID NO: 288140 - DNA, 276 bp, Homo sapiens; identical to SEQ ID NO: 235652
  chr11:63438923-63439199
  hyper

SEQ ID NO: 288141 - DNA, 239 bp, Homo sapiens; identical to SEQ ID NO: 235653
  chr11:63448768-63449007
  hyper

SEQ ID NO: 288142 - DNA, 209 bp, Homo sapiens; identical to SEQ ID NO: 235654
  chr11:63580539-63580748
  hyper

SEQ ID NO: 288143 - DNA, 144 bp, Homo sapiens; identical to SEQ ID NO: 235655
  chr11:63606383-63606527
  hyper

SEQ ID NO: 288144 - DNA, 106 bp, Homo sapiens; identical to SEQ ID NO: 202578
  chr11:63655734-63655840
  hyper

SEQ ID NO: 288145 - DNA, 87 bp, Homo sapiens; identical to SEQ ID NO: 202579
  chr11:63684092-63684179
  hyper

SEQ ID NO: 288146 - DNA, 245 bp, Homo sapiens; identical to SEQ ID NO: 235658
  chr11:63705651-63705896
  hyper

SEQ ID NO: 288147 - DNA, 144 bp, Homo sapiens
  chr11:63741835-63741979
  hyper
tttaggcttctcgcgtacatgattgggtggccccagatgtcattcacaagtataagccttggaggcggaacataactcgaagaagagcccttttgtgctccgcccatagcgtaggaaggtgtcaattggctgtttcgaggaacg

SEQ ID NO: 288148 - DNA, 121 bp, Homo sapiens; identical to SEQ ID NO: 120876
  chr11:63742038-63742159
  hyper

SEQ ID NO: 288149 - DNA, 93 bp, Homo sapiens; identical to SEQ ID NO: 202582
  chr11:63803767-63803860
  hyper

SEQ ID NO: 288150 - DNA, 206 bp, Homo sapiens; identical to SEQ ID NO: 235662
  chr11:63828222-63828428
  hyper

SEQ ID NO: 288151 - DNA, 47 bp, Homo sapiens; identical to SEQ ID NO: 235663
  chr11:63933982-63934029
  hyper

SEQ ID NO: 288152 - DNA, 69 bp, Homo sapiens; identical to SEQ ID NO: 235664
  chr11:63993861-63993930
  hyper

SEQ ID NO: 288153 - DNA, 71 bp, Homo sapiens; identical to SEQ ID NO: 235665
  chr11:64008118-64008189
  hyper

SEQ ID NO: 288154 - DNA, 309 bp, Homo sapiens; identical to SEQ ID NO: 235666
  chr11:64009405-64009714
  hyper

SEQ ID NO: 288155 - DNA, 217 bp, Homo sapiens; identical to SEQ ID NO: 224126
  chr11:64015094-64015311
  hyper

SEQ ID NO: 288156 - DNA, 45 bp, Homo sapiens; identical to SEQ ID NO: 202583
  chr11:64038085-64038130
  hyper

SEQ ID NO: 288157 - DNA, 116 bp, Homo sapiens
  chr11:64039091-64039207
  hyper
gagtccacaaactcgtcactcatcctccggagctcgcggccatagcgctgtgctgcccagaggttggggggcgccgagcgcgagcggccccgaaaggggctgggctcctcccccat

SEQ ID NO: 288158 - DNA, 96 bp, Homo sapiens
  chr11:64064525-64064621
  hyper
aaggtgcagggagacggaggggtcccaggtggcccctagacttcctgcatcgcccctctgcccaggctatggcaatgtggccctgcgcacagatgc

SEQ ID NO: 288159 - DNA, 379 bp, Homo sapiens; identical to SEQ ID NO: 120903
  chr11:64064662-64065041
  hyper

SEQ ID NO: 288160 - DNA, 626 bp, Homo sapiens
  chr11:64067395-64068021
  hyper
tcgctgccccgggcgggtgtatccctcacagcacctcacgactgtgcctcaaagcctgcatcaataaatgaaaacggtctgcaccgctgcgggcgtgacgctcccggacgcgagtgggtgtggaattgctttcctcgggccaccgtgggggcacctctggcctcccgtgacccccaggccgagggtccccgggcacccaggtcggtcaagtctcggccctctcaggcccgcgtctctgcctggaggagactgtgtagggtccggcgtggggatcagccaggatgggctgcgcgtctccagcctctgcacacacattggcgggtggggtgcagggagggagaggcaggggagagagaatggcatctcgcgtggagggctgtcgtttgaactctcccagcgcgagagaccctgccccgcccccttcctggagcgttgactcccttctcgtctcgaggcctgtggcgtctgggtccgttggggcagaaccatggaggaaaagccttcgaaagtaagacgtctccctaggccccttaccctgtccgctccaacccacccttggtccgactcgggcccctggcgctatttcttactcagccttggctgcccgcagcccccacccaacccca

SEQ ID NO: 288161 - DNA, 688 bp, Homo sapiens; identical to SEQ ID NO: 120905
  chr11:64068047-64068735
  hyper

SEQ ID NO: 288162 - DNA, 166 bp, Homo sapiens; identical to SEQ ID NO: 235672
  chr11:64084952-64085118
  hyper

SEQ ID NO: 288163 - DNA, 202 bp, Homo sapiens
  chr11:64410436-64410638
  hyper
caactggatcccgccgggaaatcgggggtccgcggagcggcaacgccaaggtccaggatgcctgggtccatcgcgaggagctaggggtctctctgcatcccggcggggtcggagcggcgcagagggccgtcagaaacccgggggagcgcccgggggagggggcatggtgccgagtggagagggaggggagcgcgggggccaa

SEQ ID NO: 288164 - DNA, 42 bp, Homo sapiens
  chr11:64479004-64479046
  hyper
aggacccgcccgcacttcaccacttcacggtcttggccagac

SEQ ID NO: 288165 - DNA, 240 bp, Homo sapiens
  chr11:64481256-64481496
  hyper
cgctccccgcgctgagcggggctcccttgcaggctcacagtgccatgggcccggccgcggggcgaggcgcgcagaggcccagatgccggcttccctcaggcggcggcggcggcgcccctcccccgccgcgggctccgacagaagagcagggagggatgcctgcgggagaacagagaggaaagggttaatgagaacagagaggaaaggtccaacgagaggggccgtcggtgccgggctccc

SEQ ID NO: 288166 - DNA, 82 bp, Homo sapiens; identical to SEQ ID NO: 202586
  chr11:64509680-64509762
  hyper

SEQ ID NO: 288167 - DNA, 499 bp, Homo sapiens; identical to SEQ ID NO: 48593
  chr11:64509801-64510300
  hyper

SEQ ID NO: 288168 - DNA, 96 bp, Homo sapiens; identical to SEQ ID NO: 202588
  chr11:64512084-64512180
  hyper

SEQ ID NO: 288169 - DNA, 702 bp, Homo sapiens; identical to SEQ ID NO: 202589
  chr11:64512196-64512898
  hyper

SEQ ID NO: 288170 - DNA, 73 bp, Homo sapiens; identical to SEQ ID NO: 202590
  chr11:64513748-64513821
  hyper

SEQ ID NO: 288171 - DNA, 173 bp, Homo sapiens; identical to SEQ ID NO: 235680
  chr11:64546210-64546383
  hyper

SEQ ID NO: 288172 - DNA, 246 bp, Homo sapiens; identical to SEQ ID NO: 235681
  chr11:64578117-64578363
  hyper

SEQ ID NO: 288173 - DNA, 128 bp, Homo sapiens; identical to SEQ ID NO: 235682
  chr11:64655569-64655697
  hyper

SEQ ID NO: 288174 - DNA, 198 bp, Homo sapiens; identical to SEQ ID NO: 224132
  chr11:64698945-64699143
  hyper

SEQ ID NO: 288175 - DNA, 263 bp, Homo sapiens; identical to SEQ ID NO: 235684
  chr11:64863597-64863860
  hyper

SEQ ID NO: 288176 - DNA, 215 bp, Homo sapiens; identical to SEQ ID NO: 235685
  chr11:64885145-64885360
  hyper

SEQ ID NO: 288177 - DNA, 76 bp, Homo sapiens; identical to SEQ ID NO: 235686
  chr11:64889776-64889852
  hyper

SEQ ID NO: 288178 - DNA, 91 bp, Homo sapiens; identical to SEQ ID NO: 235687
  chr11:64902078-64902169
  hyper

SEQ ID NO: 288179 - DNA, 164 bp, Homo sapiens; identical to SEQ ID NO: 235688
  chr11:64949024-64949188
  hyper

SEQ ID NO: 288180 - DNA, 71 bp, Homo sapiens; identical to SEQ ID NO: 235689
  chr11:65029047-65029118
  hyper

SEQ ID NO: 288181 - DNA, 68 bp, Homo sapiens; identical to SEQ ID NO: 235690
  chr11:65029371-65029439
  hyper

SEQ ID NO: 288182 - DNA, 195 bp, Homo sapiens
  chr11:65081963-65082158
  hyper
aatatacttgtgccggcgcttccccgacgcagccctgcagggaaggatccggtccaaggtctctctgcgatttctgaagaattcggtcttcccggagcctctcccccggctcttctagaaccgaaggttttagttcccatgggcacagccggaggccgcctgcgccacccggccctcagccgccagaaccaggac

SEQ ID NO: 288183 - DNA, 73 bp, Homo sapiens; identical to SEQ ID NO: 235692
  chr11:65121847-65121920
  hyper

SEQ ID NO: 288184 - DNA, 91 bp, Homo sapiens; identical to SEQ ID NO: 224135
  chr11:65147933-65148024
  hyper

SEQ ID NO: 288185 - DNA, 145 bp, Homo sapiens; identical to SEQ ID NO: 235693
  chr11:65153828-65153973
  hyper

SEQ ID NO: 288186 - DNA, 212 bp, Homo sapiens
  chr11:65185728-65185940
  hyper
agtgagaagccccctcctgagggtcctcccctgcctcgccttcctggtgggcggcctgctttccagcacatgtggtggaccagcccacattaggtcaaagtgttaaaaatagccggagggctcagtatgtttgggggtggggggggaatgggaggtgctgagggagggcccaggacagttgggaaggaggaagggcccgtggggctggggtt

SEQ ID NO: 288187 - DNA, 98 bp, Homo sapiens; identical to SEQ ID NO: 202592
  chr11:65189906-65190004
  hyper

SEQ ID NO: 288188 - DNA, 204 bp, Homo sapiens
  chr11:65192973-65193177
  hyper
acttaggtggttgatttgaaactgtgaaggtgtgattttttcaggagctggaagtcttagaaaagccttgtaaatgcctatattgtgggcttttaacgtatttaagggaccacttaagacgagattagatgggctcttctggatttgttcctcatttgtcacaggtgtcttgtgattgaaaatcatgagcgaagtgaaattgca

SEQ ID NO: 288189 - DNA, 221 bp, Homo sapiens; identical to SEQ ID NO: 235697
  chr11:65193823-65194044
  hyper

SEQ ID NO: 288190 - DNA, 82 bp, Homo sapiens
  chr11:65197599-65197681
  hyper
tgtctgtgaaatgcgggtaaatgaatgtagatgtttggcagcagctactccttgttgagctctcacagtgaactctcctgcc

SEQ ID NO: 288191 - DNA, 80 bp, Homo sapiens; identical to SEQ ID NO: 235699
  chr11:65264702-65264782
  hyper

SEQ ID NO: 288192 - DNA, 316 bp, Homo sapiens; identical to SEQ ID NO: 235700
  chr11:65265757-65266073
  hyper

SEQ ID NO: 288193 - DNA, 210 bp, Homo sapiens; identical to SEQ ID NO: 235701
  chr11:65266388-65266598
  hyper

SEQ ID NO: 288194 - DNA, 241 bp, Homo sapiens; identical to SEQ ID NO: 235702
  chr11:65266934-65267175
  hyper

SEQ ID NO: 288195 - DNA, 324 bp, Homo sapiens; identical to SEQ ID NO: 235703
  chr11:65267949-65268273
  hyper

SEQ ID NO: 288196 - DNA, 410 bp, Homo sapiens
  chr11:65306805-65307215
  hyper
gcgggcgcgggaggcgtcgagctggaagccgccgggacactcgcacacggcgccgcccggccgcggcacgcagcggccactcacgcagcgacactcgtctgaatcctcctctgaactgtcctcatctgcgtggcccggaacaatatggacttcaacactgagccccggccaaaggctaccaaccccgccaccgcccgacccggcagcactcacctcttgggggcttccccaacagcagggggcttgtgtcccagaaggaattgctctcgctctgcgatgtcgggcaatgggaccctgggaggagcagaactggtcagcgacgtccgggtccccgggccctggcccccatcctcgctcccggccaactcctccccgactgccttacccgcgccgcgcggcgggcacggtcg

SEQ ID NO: 288197 - DNA, 105 bp, Homo sapiens; identical to SEQ ID NO: 202597
  chr11:65339689-65339794
  hyper

SEQ ID NO: 288198 - DNA, 173 bp, Homo sapiens; identical to SEQ ID NO: 202598
  chr11:65342125-65342298
  hyper

SEQ ID NO: 288199 - DNA, 476 bp, Homo sapiens; identical to SEQ ID NO: 235706
  chr11:65343104-65343580
  hyper

SEQ ID NO: 288200 - DNA, 76 bp, Homo sapiens
  chr11:65405361-65405437
  hyper
cgctaggtggcctccgctagccctcccggttggtctggaaggcaggcacaagtttctcaggagaggaaatggcctt

SEQ ID NO: 288201 - DNA, 143 bp, Homo sapiens
  chr11:65405516-65405659
  hyper
gccggccccgcctcccggcatggccccgcctcccagcatggccccgcccccaggcggagccggcgccgggagcggtagcgggagagcggcagcgggaccccagcgcgggcggcggcggctgggcgggagccccagaggtactg

SEQ ID NO: 288202 - DNA, 434 bp, Homo sapiens
  chr11:65405774-65406208
  hyper
ccctcccaacttccctccgggctccagctcagtcccgagtcaatatgtccagccccctgtctctgaccagccgttcctactctctctgtgtgacggcttagcctggccagccagccggtgagtggaagcggcggctcctgactcctggtggcggcactgtgaccccctccccctcaacactgcaagtgtgtgcggggctcccccttattctgaggctcctcttcttcttaggcggcctccaccccagtccctggcctggcctgggaggaaacatctgtcgcgccccctggcagccgaaatggggtcatgacctccagatgtgctgggaagtggccagctcctcctcctggggcagccaggccttccggatctgtgggggcggggccggccctttccccccacccctagtgacacaggcccggaggaatgtccta

SEQ ID NO: 288203 - DNA, 144 bp, Homo sapiens; identical to SEQ ID NO: 202602
  chr11:65419839-65419983
  hyper

SEQ ID NO: 288204 - DNA, 100 bp, Homo sapiens; identical to SEQ ID NO: 202603
  chr11:65420274-65420374
  hyper

SEQ ID NO: 288205 - DNA, 62 bp, Homo sapiens; identical to SEQ ID NO: 235709
  chr11:65430497-65430559
  hyper

SEQ ID NO: 288206 - DNA, 112 bp, Homo sapiens
  chr11:65479267-65479379
  hyper
gtcctcttgcctacggaatgaagtccacagacttgggggagcgttcgaacccttctaaggccacttcctttctccagcctctcgcgcccagttgactcccggcaacacctcc

SEQ ID NO: 288207 - DNA, 111 bp, Homo sapiens; identical to SEQ ID NO: 120998
  chr11:65479399-65479510
  hyper

SEQ ID NO: 288208 - DNA, 206 bp, Homo sapiens; identical to SEQ ID NO: 224139
  chr11:65548872-65549078
  hyper

SEQ ID NO: 288209 - DNA, 32 bp, Homo sapiens; identical to SEQ ID NO: 202604
  chr11:65553781-65553813
  hyper

SEQ ID NO: 288210 - DNA, 227 bp, Homo sapiens; identical to SEQ ID NO: 202605
  chr11:65554410-65554637
  hyper

SEQ ID NO: 288211 - DNA, 1039 bp, Homo sapiens
  chr11:65554723-65555762
  hyper
ccttagcgactccttccctgttgtgcccccgttcccggcgttcagcccggccccgcaaaggtgggacggctcccggcttcagttacggaagcggcccgtgtccagcgacgagggttcgaaaatgccccgcgcgttcctggtgaagaagccgtgcgtctccacgtgcaagaggaactggagcgagctccccgacgaggagcgcggcgagatctacgtgccaggtgaggctccaaccgccctccggcctggggcacccgcggcggcgtcgaggctgcgggcgggcgggcgggcgcaggtccgcggagccaggcggcaggcgcggtgtgggcgccggggctgaatgcggccgcggcctgggctgggtgggcccgcggctctcgacccgggactcggggggcgggggcggggccggcggaagagcgctggtcggggcgggggctgcatggtggaaggggagccgctcccagggccagggggcgcggaaccgcctacccccaccccctgaaccgcggcacagaggaggcagcggggtgtgtcaccgctcaggcgaccctcggctccgacgtcgtaaatccagaaaaccgggactcgcatgaggcgggagaaggcactggagcgatgccactttggggggcggggagcgggctggagtttcggccgagatttgtgttaaaagctcagagcttcagccgctcgcacaggtccttcctcctcccccacaacactggtggccgggtcggagtgagggtcgggccggtggggggcgtgggcccccaaattttcgttgggctccggctgctagtcccgcgcagtgagccgagacggtgggacaggcgcccgctgcgccccgcttgcccttaaagcagaggtgggatcgggtctcacctctgctagaaacgcacttccttcaccttgcggagggcacaattgcatggaaagcagctgcagggagcccaccccacagcggagggccaggcccggggaagctggtgtacccagttatttttggcagacgcctagacagcgtcgactgtgagag

SEQ ID NO: 288212 - DNA, 371 bp, Homo sapiens; identical to SEQ ID NO: 202607
  chr11:65582709-65583080
  hyper

SEQ ID NO: 288213 - DNA, 89 bp, Homo sapiens; identical to SEQ ID NO: 235713
  chr11:65655412-65655501
  hyper

SEQ ID NO: 288214 - DNA, 118 bp, Homo sapiens; identical to SEQ ID NO: 202608
  chr11:65657719-65657837
  hyper

SEQ ID NO: 288215 - DNA, 628 bp, Homo sapiens; identical to SEQ ID NO: 235715
  chr11:65658812-65659440
  hyper

SEQ ID NO: 288216 - DNA, 241 bp, Homo sapiens; identical to SEQ ID NO: 202610
  chr11:65666908-65667149
  hyper

SEQ ID NO: 288217 - DNA, 57 bp, Homo sapiens; identical to SEQ ID NO: 235717
  chr11:65667910-65667967
  hyper

SEQ ID NO: 288218 - DNA, 110 bp, Homo sapiens; identical to SEQ ID NO: 235718
  chr11:65728917-65729027
  hyper

SEQ ID NO: 288219 - DNA, 120 bp, Homo sapiens
  chr11:65746278-65746398
  hyper
agctccagcgacacgcccctgggcaccgtggccctgctccaggagaagcagaaggctcagaagaccccctacatcgtgctcagcggcagcggcaagagcatgaacgcgtgagtggctcga

SEQ ID NO: 288220 - DNA, 108 bp, Homo sapiens; identical to SEQ ID NO: 235719
  chr11:65769430-65769538
  hyper

SEQ ID NO: 288221 - DNA, 50 bp, Homo sapiens
  chr11:65779604-65779654
  hyper
gcaggagcgcatggtcggagaactccgggacctgtcgcccgacgacccgc

SEQ ID NO: 288222 - DNA, 777 bp, Homo sapiens; identical to SEQ ID NO: 235721
  chr11:66035253-66036030
  hyper

SEQ ID NO: 288223 - DNA, 284 bp, Homo sapiens
  chr11:66045217-66045501
  hyper
gccgccaactcccgcggggcacacggcagaggtgtggggtcgcgcagccgctgagagggcccccactgcacctggcccaacctccttcagcgccccccaaaaccccactgctcccattcagcccctgtcctggcgtcattgtgtgtcccagccaggtgcttctgccgtctccgacagtgacaagtgcctcgcacttcagcctttgccctgagcgcccgcccgagggggccgagtgcggctgtgccggtggctggagtgccgaggggtgcggggtgccgggggcg

SEQ ID NO: 288224 - DNA, 106 bp, Homo sapiens; identical to SEQ ID NO: 202611
  chr11:66049841-66049947
  hyper

SEQ ID NO: 288225 - DNA, 202 bp, Homo sapiens; identical to SEQ ID NO: 235723
  chr11:66056757-66056959
  hyper

SEQ ID NO: 288226 - DNA, 1105 bp, Homo sapiens
  chr11:66079389-66080494
  hyper
ccctaccgaggcctcgcggtggctgtaagtccgtggggccgaggccaggtggcgccaaaggcccatcgacgccatctgcccggctgtccgggcccagtctccgggctcgcccagagaacccgaaatctggacaaacggaaaccgtaggtggaggaagaagagggctccagggccaggttcaagggcatcgtggtgagagatgaggggttcggaggactggtggatctgggcatatcgcgaaggtggtaagggacccaggggtggagtgggcggtgcttgcgccaagagggtgagcctgagtgtgggcggggcgtgcgataagaggctcgctcggtagcgctcttcgcagagccgtatttgtgcgctacgccgcagccagggcgctctgggtgggcgggactccagggcccccaggggcgtggcttgcatctttcgtgggcggccccgggggcggggctccgtgtaggtgaaccgctacctccgctcgatgtgtgaggtgtgacagtcctacgagggcgcagttcttccacttttgtgagcttgagagggggcggagcttgtagctggggacggagcctgaagaggaggttgaggggaacttcacacgtttccctggagggcggagtttacatcatcccccaacagagttaagacctctgagggattccctgcagtgtccagggctctgtgaggcgaagcttgcagttgtgttgggcggggcctgtagcgccgcgtgaagagaatgtgtaaactcggggcgaagttcatacctcctagaagccgagactaatagttccgccaatctgcgcgcgccgagcggaggaggtggggcttgtaggttgtgggcgggggactgggcggggccaagagggcagggggcgggcacaatcgctgctggaatctttgagttggcaggggcggggcttgtggctttgtgggcggggcctctggagagctcccgggggctctcttctgttctgcagcgagtaggcgtggctcgtagctcccaggtccgggctgataccgctggagtatgcagttcgccgccgcgcccgaatgaggcggggcctgcgagtaagtgggctgagcccgggctgggcgcagg

SEQ ID NO: 288227 - DNA, 235 bp, Homo sapiens; identical to SEQ ID NO: 235725
  chr11:66139091-66139326
  hyper

SEQ ID NO: 288228 - DNA, 403 bp, Homo sapiens
  chr11:66176318-66176721
  hyper
gagtggggcatcccttcctccgggcgccgggctgcacccccttaccctgggcagccgcggggccgtgacgcctggcggagggggcgcgcatctcggcgcgcgccggtcttcgcagtggctcattcatcgccgccgaggcacgccgttgccatggggacgtgatgcaggcgcggggagcgggagggagagggaggccccgggtgacgtccgcgctcttctcgcagctagtctcccgcggcctcccaattcttgcctaatttggaagagagccgcagcccttctgctgatgcgcgcgcgctggcgcctttttaaggcaactggcggagtggcggctccaccagagcctgggagctgcccccgcccccgagccgcgagccccgcgccgggccggggagtccccggc

SEQ ID NO: 288229 - DNA, 43 bp, Homo sapiens; identical to SEQ ID NO: 202614
  chr11:66186290-66186333
  hyper

SEQ ID NO: 288230 - DNA, 329 bp, Homo sapiens; identical to SEQ ID NO: 202615
  chr11:66187467-66187796
  hyper

SEQ ID NO: 288231 - DNA, 269 bp, Homo sapiens; identical to SEQ ID NO: 202616
  chr11:66187826-66188095
  hyper

SEQ ID NO: 288232 - DNA, 174 bp, Homo sapiens; identical to SEQ ID NO: 202617
  chr11:66189149-66189323
  hyper

SEQ ID NO: 288233 - DNA, 199 bp, Homo sapiens; identical to SEQ ID NO: 235729
  chr11:66206305-66206504
  hyper

SEQ ID NO: 288234 - DNA, 131 bp, Homo sapiens; identical to SEQ ID NO: 235730
  chr11:66247855-66247986
  hyper

SEQ ID NO: 288235 - DNA, 62 bp, Homo sapiens; identical to SEQ ID NO: 235731
  chr11:66277990-66278052
  hyper

SEQ ID NO: 288236 - DNA, 35 bp, Homo sapiens; identical to SEQ ID NO: 235732
  chr11:66314197-66314232
  hyper

SEQ ID NO: 288237 - DNA, 270 bp, Homo sapiens; identical to SEQ ID NO: 235733
  chr11:66335704-66335974
  hyper

SEQ ID NO: 288238 - DNA, 263 bp, Homo sapiens; identical to SEQ ID NO: 235734
  chr11:66346491-66346754
  hyper

SEQ ID NO: 288239 - DNA, 351 bp, Homo sapiens; identical to SEQ ID NO: 235735
  chr11:66445298-66445649
  hyper

SEQ ID NO: 288240 - DNA, 55 bp, Homo sapiens
  chr11:66494764-66494819
  hyper
ctgcccatacctgaaacccccgggctctccagcgttggaactgtggctgctccga

SEQ ID NO: 288241 - DNA, 140 bp, Homo sapiens; identical to SEQ ID NO: 235737
  chr11:66610583-66610723
  hyper

SEQ ID NO: 288242 - DNA, 238 bp, Homo sapiens
  chr11:66725362-66725600
  hyper
gagccacatccagtacgatggggacaacttgggctcccgatcctgacagacttgggttcgaaccctcagggacctcgcgcgaggcgctttagtcagtttctccatctgcaaaatgggcccgagagcaagaatgaggcagcccgcaggcggacgctgcggaggggcgctcgggggctgcagccgggggcgggtccgggggcgggtccagccggccgagcccccgcgcgagggggagggg

SEQ ID NO: 288243 - DNA, 308 bp, Homo sapiens
  chr11:66725637-66725945
  hyper
ccgtcgctgtctcctccagccgtcactcgcggagcccgcgccgcctttgcgcgcgcgacccttacataagcgtccctcgcagcggtgccggcgcacgtccacccgctccgacccgccgcgggaagaggaccgtgcggagcgcggcggacactcacctcctcgccgtcgccagtcctcgccgccgcctctaccgctgctgcctccactgacagagaacagctgcggtctccgtgcaaccgaacttgctgcagtcccggccccgccttacggacttcctattggcccagacagcccaacccctcccgtta

SEQ ID NO: 288244 - DNA, 33 bp, Homo sapiens; identical to SEQ ID NO: 202622
  chr11:66726353-66726386
  hyper

SEQ ID NO: 288245 - DNA, 97 bp, Homo sapiens; identical to SEQ ID NO: 48690
  chr11:66824137-66824234
  hyper

SEQ ID NO: 288246 - DNA, 127 bp, Homo sapiens; identical to SEQ ID NO: 48692
  chr11:66886029-66886156
  hyper

SEQ ID NO: 288247 - DNA, 120 bp, Homo sapiens; identical to SEQ ID NO: 202625
  chr11:66897392-66897512
  hyper

SEQ ID NO: 288248 - DNA, 89 bp, Homo sapiens; identical to SEQ ID NO: 235742
  chr11:67007554-67007643
  hyper

SEQ ID NO: 288249 - DNA, 254 bp, Homo sapiens; identical to SEQ ID NO: 235743
  chr11:67085195-67085449
  hyper

SEQ ID NO: 288250 - DNA, 175 bp, Homo sapiens; identical to SEQ ID NO: 235744
  chr11:67121085-67121260
  hyper

SEQ ID NO: 288251 - DNA, 714 bp, Homo sapiens
  chr11:67141093-67141807
  hyper
tttaataatcccatccgccaggcccactcgcaggtttttttcgctcggtttcggattttttttttttttcggtgtgggacattctgcaaactttttttttttttttctgacgtgtaaagctgtaaccacaaattgtagcggccctccccggggtgggggtaggaggggggaggagggaagggagggcttctggggctccctctccctcccacagcaccgagggggggtgaggtgaggcgaggctgtggcggtaccaccctgggcctcctgggggagggggcggggaggccatcagtccgtctgaggactcccaggagccgggggacagcgccggcttcgggtgggcttctccccaggcgttggcctgggacaccgccccctgccccctgtcccctgccgatgcggggtccctgatccaacctacctctgcctgtgcgaggtccctgctcccaccctacctctgcctcctcatctctaaccttccctcctcctcccccttgagtaaatgcaatgacacattctcccaaatgccagcgagctggcctgggagcaagtgatggtgtttttcctgctgccctttgtctgggctgaccgccccccctgcctattgtcccgccgcttgtcccatttccaaaagctagagctaagcgaggcgctggggctggggcaggtgactaaccagctcacaatgccccctgcgggggaggaagaggg

SEQ ID NO: 288252 - DNA, 169 bp, Homo sapiens; identical to SEQ ID NO: 202628
  chr11:67183098-67183267
  hyper

SEQ ID NO: 288253 - DNA, 67 bp, Homo sapiens; identical to SEQ ID NO: 235747
  chr11:67195792-67195859
  hyper

SEQ ID NO: 288254 - DNA, 234 bp, Homo sapiens; identical to SEQ ID NO: 202629
  chr11:67210770-67211004
  hyper

SEQ ID NO: 288255 - DNA, 102 bp, Homo sapiens; identical to SEQ ID NO: 235748
  chr11:67211231-67211333
  hyper

SEQ ID NO: 288256 - DNA, 119 bp, Homo sapiens; identical to SEQ ID NO: 202630
  chr11:67232283-67232402
  hyper

SEQ ID NO: 288257 - DNA, 133 bp, Homo sapiens; identical to SEQ ID NO: 121094
  chr11:67232464-67232597
  hyper

SEQ ID NO: 288258 - DNA, 115 bp, Homo sapiens; identical to SEQ ID NO: 235750
  chr11:67236852-67236967
  hyper

SEQ ID NO: 288259 - DNA, 375 bp, Homo sapiens; identical to SEQ ID NO: 202632
  chr11:67271842-67272217
  hyper

SEQ ID NO: 288260 - DNA, 44 bp, Homo sapiens; identical to SEQ ID NO: 202633
  chr11:67275125-67275169
  hyper

SEQ ID NO: 288261 - DNA, 97 bp, Homo sapiens; identical to SEQ ID NO: 235753
  chr11:67276281-67276378
  hyper

SEQ ID NO: 288262 - DNA, 214 bp, Homo sapiens
  chr11:67406911-67407125
  hyper
acctctgcttcagaacgtagcctacctgccatggagacagagaggctgtccggctcctggagaaacactgcttggctggggctgggaacctgcctgctggaaggggtggtcaccactcgtccactcggcacctcagctcagccctcaggtgctcacacaagctgtagtctctcggcaggacggtccttgcctcctcgatcgcccttcgtccacg

SEQ ID NO: 288263 - DNA, 95 bp, Homo sapiens; identical to SEQ ID NO: 202634
  chr11:67777602-67777697
  hyper

SEQ ID NO: 288264 - DNA, 360 bp, Homo sapiens; identical to SEQ ID NO: 235755
  chr11:67806323-67806683
  hyper

SEQ ID NO: 288265 - DNA, 386 bp, Homo sapiens; identical to SEQ ID NO: 224154
  chr11:67889354-67889740
  hyper

SEQ ID NO: 288266 - DNA, 142 bp, Homo sapiens; identical to SEQ ID NO: 202636
  chr11:67895653-67895795
  hyper

SEQ ID NO: 288267 - DNA, 45 bp, Homo sapiens; identical to SEQ ID NO: 235756
  chr11:68039639-68039684
  hyper

SEQ ID NO: 288268 - DNA, 110 bp, Homo sapiens; identical to SEQ ID NO: 224156
  chr11:68080104-68080214
  hyper

SEQ ID NO: 288269 - DNA, 202 bp, Homo sapiens; identical to SEQ ID NO: 202637
  chr11:68080741-68080943
  hyper

SEQ ID NO: 288270 - DNA, 283 bp, Homo sapiens
  chr11:68095751-68096034
  hyper
gggattttgtagagcgatgataaatttggcatgtctttattattattattttttcaacacttaaagaaaataaaagctggtacaaaggtatgtttgtttctgaaatgtgtttccttccccagatgttcttttctgccagttctaaaatgcgttctgagctcggtcctccagtttcctccctgtgaggaagaacaatgagacctttgtaaccacacaggggaaacggccgcttccctctgcagtgggcatgggggaggggctgggacgtcccacctcctcccac

SEQ ID NO: 288271 - DNA, 210 bp, Homo sapiens; identical to SEQ ID NO: 235759
  chr11:68227847-68228057
  hyper

SEQ ID NO: 288272 - DNA, 190 bp, Homo sapiens; identical to SEQ ID NO: 235761
  chr11:68518786-68518976
  hyper

SEQ ID NO: 288273 - DNA, 625 bp, Homo sapiens; identical to SEQ ID NO: 202638
  chr11:68606633-68607258
  hyper

SEQ ID NO: 288274 - DNA, 156 bp, Homo sapiens; identical to SEQ ID NO: 235764
  chr11:68611262-68611418
  hyper

SEQ ID NO: 288275 - DNA, 240 bp, Homo sapiens; identical to SEQ ID NO: 235765
  chr11:68671472-68671712
  hyper

SEQ ID NO: 288276 - DNA, 289 bp, Homo sapiens; identical to SEQ ID NO: 235766
  chr11:68816177-68816466
  hyper

SEQ ID NO: 288277 - DNA, 36 bp, Homo sapiens; identical to SEQ ID NO: 202640
  chr11:69062306-69062342
  hyper

SEQ ID NO: 288278 - DNA, 253 bp, Homo sapiens; identical to SEQ ID NO: 224159
  chr11:69331403-69331656
  hyper

SEQ ID NO: 288279 - DNA, 235 bp, Homo sapiens
  chr11:69451963-69452198
  hyper
gaggcgcggggatgcggggtcctccccgcagtcttccggaaagggcgggggagggcgcggcaagttccggagtggggcatgccgtgggagcccacgagggcctcagcgcggatcctccgccggaaaaccggctcccgcgagccgccgccgcaggtttcctaggccccgcgagtcccgcagcgaagccctgcgtctccgtccgacgcgggggtctgctcagcctcgggtgggccgc

SEQ ID NO: 288280 - DNA, 368 bp, Homo sapiens
  chr11:69452289-69452657
  hyper
tctcgatctgggcgcctactccccaccacttggtctgagaggggctggggccggaaggccagggaatctctggtggatttgggggttcatattgctcagggtaccagccgatgcgttttgaggggcgggagtcgaggaattagaatcgcctttaaccctcaagagttgcgccttcagcctcgggatcccagatgcgtcgttggagccagggccgcccccctacctgttgggtttgcgttttaactccagcgcacaccttgccggcagccctcggagctaggggaggggtctcgtttccccgcagcccgccggacagacgactggggcacgggaggggcggtggcagggtggtctgtgtgtggctgaaa

SEQ ID NO: 288281 - DNA, 507 bp, Homo sapiens; identical to SEQ ID NO: 235769
  chr11:69453701-69454208
  hyper

SEQ ID NO: 288282 - DNA, 1168 bp, Homo sapiens; identical to SEQ ID NO: 235770
  chr11:69454809-69455977
  hyper

SEQ ID NO: 288283 - DNA, 31 bp, Homo sapiens; identical to SEQ ID NO: 202643
  chr11:69477505-69477536
  hyper

SEQ ID NO: 288284 - DNA, 77 bp, Homo sapiens; identical to SEQ ID NO: 202644
  chr11:69516891-69516968
  hyper

SEQ ID NO: 288285 - DNA, 258 bp, Homo sapiens
  chr11:69517461-69517719
  hyper
gcgcatctgcgtctaagccacaccgtgctcctggtagattaaaaattaattctaaaaaaaaaatctctcctatcccaaatgcactgttttctgccttgcttgacaattgatttgtttttaaaggaaagttatgggtagatcctcttttttctttcccattctttttttcttcttttatactggagggagggaaacggaggcgaggaccacacacgcgcaggcagaggctgaaaaggcccgaggtgggttttcctgttt

SEQ ID NO: 288286 - DNA, 341 bp, Homo sapiens
  chr11:69518718-69519059
  hyper
gcggggctgtgagtgccgggttgggatggtcgtggccctagatcctggacgcagcgctcctgctctgacggcgcggcggctccgggccggcagccttatatagtagcgccttacgggccccacgggtaggtgcccaagacacccgagcatttcttatcgggattgcatcaagcctccgccccccgcacacacccactcacaccccgcctccggccccagccccagccccctccccgggcccgggcaggcaggcggcggcttcttgtcccagccggggtgaccccgcccaggccgttcggatctgcgggaggaggaggcctcgcttagcggccgggtttcgg

SEQ ID NO: 288287 - DNA, 229 bp, Homo sapiens
  chr11:69589517-69589746
  hyper
cgggtgtccgcgtgcgcgccgccgatgcggccgtcggggagcgcctggaggtggaagccgatgcccacgttgcagtagagccgccgcagccgcttgatgcccagcaggtagtcgccggcgccgctctggacggccgcctccttgggctgcgctgccaccggcaggcgcgccaacgagagcgccaccaggctctcccagcggcgctccagctcggcctccagcgtgccgt

SEQ ID NO: 288288 - DNA, 40 bp, Homo sapiens; identical to SEQ ID NO: 235773
  chr11:70049091-70049131
  hyper

SEQ ID NO: 288289 - DNA, 103 bp, Homo sapiens; identical to SEQ ID NO: 202648
  chr11:70117685-70117788
  hyper

SEQ ID NO: 288290 - DNA, 87 bp, Homo sapiens
  chr11:71159302-71159389
  hyper
ctggcctcacctgcgcacaccttggccactcacctgcgcacacctcggcccctcacctgcgcccaccttcccctggcctcgcttgcg

SEQ ID NO: 288291 - DNA, 52 bp, Homo sapiens; identical to SEQ ID NO: 235776
  chr11:71159694-71159746
  hyper

SEQ ID NO: 288292 - DNA, 217 bp, Homo sapiens; identical to SEQ ID NO: 235777
  chr11:71163705-71163922
  hyper

SEQ ID NO: 288293 - DNA, 355 bp, Homo sapiens; identical to SEQ ID NO: 235779
  chr11:71639580-71639935
  hyper

SEQ ID NO: 288294 - DNA, 426 bp, Homo sapiens; identical to SEQ ID NO: 235780
  chr11:71751819-71752245
  hyper

SEQ ID NO: 288295 - DNA, 46 bp, Homo sapiens; identical to SEQ ID NO: 235781
  chr11:71752691-71752737
  hyper

SEQ ID NO: 288296 - DNA, 367 bp, Homo sapiens; identical to SEQ ID NO: 235782
  chr11:71791551-71791918
  hyper

SEQ ID NO: 288297 - DNA, 197 bp, Homo sapiens; identical to SEQ ID NO: 202650
  chr11:71814206-71814403
  hyper

SEQ ID NO: 288298 - DNA, 179 bp, Homo sapiens; identical to SEQ ID NO: 235784
  chr11:71934496-71934675
  hyper

SEQ ID NO: 288299 - DNA, 397 bp, Homo sapiens
  chr11:71951738-71952135
  hyper
cacaaactcagcctcccgggctccgggttttcaaagctgcagcgccggggtagggaaccccaggggtgctgactggcctgccccctctcctcctcagctcggccctgaggtcccctgggtctccccctctagcccctcggcctccctcctggcttctcaagcatcactcggaactttctgccctaagagggagacagagcggaggtagcctggagctaaacagatcgggtctcccaagggcctccaagtccgggccctgctgcctcccgtagctgcccaagcaccctgggaccgcgccctgccttcgggctgcatctgcctgtattcccctacccccaggtgttagacattaagctcccacacctccttccatgcgcactctcgtacacacacgtgc

SEQ ID NO: 288300 - DNA, 241 bp, Homo sapiens
  chr11:72301342-72301583
  hyper
ggtccctcaggcgccgctcagctccgcgccgggcccgccgccggctcccgggatcgcctaacccgcccacctcccctccaagttctgcccggccccgccctcgtgacctgtccaggccgggccctcaccgcacagttggaggatcttgcggtcgcggtcggtgtacgccgccccgcccttctggtcttccgccgtcccctccggggggttctggacggctcggggagcctccctgggcccg

SEQ ID NO: 288301 - DNA, 859 bp, Homo sapiens; identical to SEQ ID NO: 235789
  chr11:72353615-72354474
  hyper

SEQ ID NO: 288302 - DNA, 87 bp, Homo sapiens
  chr11:72388210-72388297
  hyper
cttgagaggactgcaggctccacaggcttcagctacctctttgccgaagaaggcggcttcttctcagcgcccgcccccgccccgtcc

SEQ ID NO: 288303 - DNA, 60 bp, Homo sapiens; identical to SEQ ID NO: 235793
  chr11:72463659-72463719
  hyper

SEQ ID NO: 288304 - DNA, 106 bp, Homo sapiens; identical to SEQ ID NO: 202652
  chr11:72492447-72492553
  hyper

SEQ ID NO: 288305 - DNA, 144 bp, Homo sapiens; identical to SEQ ID NO: 235795
  chr11:72525202-72525346
  hyper

SEQ ID NO: 288306 - DNA, 318 bp, Homo sapiens; identical to SEQ ID NO: 235796
  chr11:72853956-72854274
  hyper

SEQ ID NO: 288307 - DNA, 114 bp, Homo sapiens; identical to SEQ ID NO: 202653
  chr11:72929153-72929267
  hyper

SEQ ID NO: 288308 - DNA, 1001 bp, Homo sapiens; identical to SEQ ID NO: 202654
  chr11:73018832-73019833
  hyper

SEQ ID NO: 288309 - DNA, 154 bp, Homo sapiens; identical to SEQ ID NO: 202655
  chr11:73020099-73020253
  hyper

SEQ ID NO: 288310 - DNA, 217 bp, Homo sapiens; identical to SEQ ID NO: 202656
  chr11:73087925-73088142
  hyper

SEQ ID NO: 288311 - DNA, 42 bp, Homo sapiens; identical to SEQ ID NO: 235800
  chr11:73309242-73309284
  hyper

SEQ ID NO: 288312 - DNA, 114 bp, Homo sapiens; identical to SEQ ID NO: 235801
  chr11:73358558-73358672
  hyper

SEQ ID NO: 288313 - DNA, 280 bp, Homo sapiens; identical to SEQ ID NO: 235802
  chr11:73372054-73372334
  hyper

SEQ ID NO: 288314 - DNA, 209 bp, Homo sapiens; identical to SEQ ID NO: 235803
  chr11:73472197-73472406
  hyper

SEQ ID NO: 288315 - DNA, 101 bp, Homo sapiens; identical to SEQ ID NO: 202657
  chr11:73490690-73490791
  hyper

SEQ ID NO: 288316 - DNA, 853 bp, Homo sapiens; identical to SEQ ID NO: 202658
  chr11:73693756-73694609
  hyper

SEQ ID NO: 288317 - DNA, 348 bp, Homo sapiens; identical to SEQ ID NO: 235806
  chr11:73882113-73882461
  hyper

SEQ ID NO: 288318 - DNA, 219 bp, Homo sapiens
  chr11:74022460-74022679
  hyper
tcaggtcccgcagccgcgcctcctccccgcgcaggtaccgcctcagcagccccagcagccggcgctcgggcgccagggcgcgcgccacgctggtcagcgccgagaacgtgtcgccccgagccgcagccctttctgggtctcctgtcccgagcgccagcaccgccagcagcgccgccagccgcgccccaggacccatagccagcgctcgcgaacttcccc

SEQ ID NO: 288319 - DNA, 141 bp, Homo sapiens
  chr11:74022716-74022857
  hyper
ccctcgcctgccccgcccctgtctccgccccctcccggctcaggccccgccctctggccccggcccggcccgtcccgtccaccgcccagtctcgctccacgccccctgactccttccttgtttcgacgcctcacctcgctc

SEQ ID NO: 288320 - DNA, 175 bp, Homo sapiens
  chr11:74178231-74178406
  hyper
cacatgctgctccacgatcactgcgctcgggaggatcggggaggatccgggaggactagcttggtatttgcagcgcccacccctcccccactccccctcggttccacagtctcacggagagcgcgccgtggcccttggaagggaggcgggaagacccctcatttccaccccaggc

SEQ ID NO: 288321 - DNA, 120 bp, Homo sapiens
  chr11:74178470-74178590
  hyper
cgtttgctcgctggacacggcgccctctgaccgagggtggcccaagcgctgcgaccctgtgcattccaccagccccgttccactccgcgggtgcccagcaccgcccagcgcgctctctgg

SEQ ID NO: 288322 - DNA, 31 bp, Homo sapiens; identical to SEQ ID NO: 202661
  chr11:74204886-74204917
  hyper

SEQ ID NO: 288323 - DNA, 133 bp, Homo sapiens; identical to SEQ ID NO: 235810
  chr11:74303668-74303801
  hyper

SEQ ID NO: 288324 - DNA, 116 bp, Homo sapiens
  chr11:74394637-74394753
  hyper
tctgggtctgcgccgggagatgggaatcaaagcccccgttcttccagcgcccccaccgcggcccccaccgcggcccccgcctctcggatccccgcggctccgcgcacccctgctgg

SEQ ID NO: 288325 - DNA, 39 bp, Homo sapiens
  chr11:74441796-74441835
  hyper
cacattccaggggccgcatccctcctctgcccacccagc

SEQ ID NO: 288326 - DNA, 214 bp, Homo sapiens; identical to SEQ ID NO: 235813
  chr11:74459626-74459840
  hyper

SEQ ID NO: 288327 - DNA, 424 bp, Homo sapiens; identical to SEQ ID NO: 235814
  chr11:74659856-74660280
  hyper

SEQ ID NO: 288328 - DNA, 58 bp, Homo sapiens; identical to SEQ ID NO: 235815
  chr11:74851768-74851826
  hyper

SEQ ID NO: 288329 - DNA, 324 bp, Homo sapiens; identical to SEQ ID NO: 202663
  chr11:74951799-74952123
  hyper

SEQ ID NO: 288330 - DNA, 714 bp, Homo sapiens; identical to SEQ ID NO: 202664
  chr11:75062273-75062987
  hyper

SEQ ID NO: 288331 - DNA, 220 bp, Homo sapiens; identical to SEQ ID NO: 202665
  chr11:75140982-75141202
  hyper

SEQ ID NO: 288332 - DNA, 206 bp, Homo sapiens
  chr11:75294169-75294375
  hyper
gccgtgtggggcgtcggcaggtatcacgggtggggtccattgtgtgaggactaacatcgcggcctttccccagaccagccaccggggactccagagaggcctcggcccagctcccggaaagggtctcccagccaggccttctagcggcccaaagcgggtaggcagagcgcagataccggggcctctttcgcccaccctcgccaggg

SEQ ID NO: 288333 - DNA, 107 bp, Homo sapiens; identical to SEQ ID NO: 202666
  chr11:75380110-75380217
  hyper

SEQ ID NO: 288334 - DNA, 134 bp, Homo sapiens; identical to SEQ ID NO: 224170
  chr11:75480048-75480182
  hyper

SEQ ID NO: 288335 - DNA, 81 bp, Homo sapiens; identical to SEQ ID NO: 235821
  chr11:75526101-75526182
  hyper

SEQ ID NO: 288336 - DNA, 253 bp, Homo sapiens; identical to SEQ ID NO: 224171
  chr11:75921931-75922184
  hyper

SEQ ID NO: 288337 - DNA, 75 bp, Homo sapiens
  chr11:76033216-76033291
  hyper
ggcccgtccgcaaccgaagaggaggcgaccgcagcctggaaaagaagagcccccagctgtttccttccacccggg

SEQ ID NO: 288338 - DNA, 513 bp, Homo sapiens; identical to SEQ ID NO: 202667
  chr11:76381508-76382021
  hyper

SEQ ID NO: 288339 - DNA, 51 bp, Homo sapiens; identical to SEQ ID NO: 202668
  chr11:76382264-76382315
  hyper

SEQ ID NO: 288340 - DNA, 374 bp, Homo sapiens; identical to SEQ ID NO: 202669
  chr11:76494603-76494977
  hyper

SEQ ID NO: 288341 - DNA, 151 bp, Homo sapiens; identical to SEQ ID NO: 202670
  chr11:76510330-76510481
  hyper

SEQ ID NO: 288342 - DNA, 1569 bp, Homo sapiens
  chr11:77184261-77185830
  hyper
actcggtcccggaccggtactcgtgtggcctcccggctccagcctggcctggccccgccccgccccttccctctcccaggtctctcgaatcgcccggcgtctgagacccgcgaccccgccggtacgcgcacagggggcctttgttggcccgacgggagcgggcctcgcggggcgccgcccgcctcaccttacctggcgcctcctcccgcccaggcgcccggccccgcaacgcgaaataaatgggcccagacccccactccacccgtccccacccccgcgccccagccctggcagcccgggacgcgaggggtactgggcggtaggcccgctctcaccttccgcgctcgctcagctcctctcggctcctcctcctcctcccggcggtgggtgccgcctagccgggagtgagggcgcgagtgtgcgcgagctaccgcttcactttctccctcctgccgccgccgccgcgctgcccgtggcggggctcccctcaggacaggggaactgcgagggaagggatgatgggggggcgggagggagcgaggcgacgcgggcggggggggaaggggggactgaggggcgaggtgcgaagggctcagatggcctctgaggcaggaggtggtaactggatgcggagaccaggttcctcgagggggctcacgaaagcgcggggctccgtggaaaagggaatgagagtccaagggggaaggcgtctgtgggggaggactgcagagcctgtgagggaagcgcgatgggcgagcgagggggcgggagcgtgtgggggaagccgtgagggggcgtctactgtgcagccaccaccttcggctccggctgcagccgcgggagggcagcctcccccgcccacagccgcgctattgtacgccgcccggcaggcctgaccgcctagttcactggctcccctactcctcctcctcccgcctcctcctcccctctgccctttccccttctccccctccccctcccccactccccctccccggcgcggcggcggcggctgcggctccggtggagccgtgcccgccccgcctcccgcaggtgagagggggcggggagggcctgaccgacccgtgggagcgaggccaaaccctggcccgcatgagggcgaacgcctgggattacgtcatcggcgcgtgacgccagaggctggggaatcacccgcttgctgcgtgacgtcatcgcgtcgcgtcactgttctcggtccgctgtccgtggcgggttgtttccgtgcagcctttctatcagacaattttgggacgatttctgggagggctactgtagtagtcaggatggagaaagacggctaacttccggcgctgagggtccttttcaggttaacaaagcaccaccgcatctatgagctcgttgtcaagggctgaatttgaaaactatccgatgtcgtgtgatctcacagccagacatgtattatgttttctttctgtgggagagggggcaggggtgggaggaagacaaagaaattataacggagatgtttgaactaatgtgaactgacatacgaaaagaatgggcttcctttcacgttttttcccctac

SEQ ID NO: 288343 - DNA, 82 bp, Homo sapiens; identical to SEQ ID NO: 235830
  chr11:77300373-77300455
  hyper

SEQ ID NO: 288344 - DNA, 240 bp, Homo sapiens; identical to SEQ ID NO: 235831
  chr11:77348586-77348826
  hyper

SEQ ID NO: 288345 - DNA, 303 bp, Homo sapiens; identical to SEQ ID NO: 235832
  chr11:77790782-77791085
  hyper

SEQ ID NO: 288346 - DNA, 78 bp, Homo sapiens; identical to SEQ ID NO: 235833
  chr11:77850824-77850902
  hyper

SEQ ID NO: 288347 - DNA, 374 bp, Homo sapiens; identical to SEQ ID NO: 235834
  chr11:77899551-77899925
  hyper

SEQ ID NO: 288348 - DNA, 165 bp, Homo sapiens; identical to SEQ ID NO: 235835
  chr11:78127714-78127879
  hyper

SEQ ID NO: 288349 - DNA, 50 bp, Homo sapiens; identical to SEQ ID NO: 235836
  chr11:78128410-78128460
  hyper

SEQ ID NO: 288350 - DNA, 233 bp, Homo sapiens
  chr11:78673318-78673551
  hyper
ttggccggaggggaggggggcggggagggggactgctcaataggggttgatgaagcaggatgaacaatgcaagggagcacctgcgaaccacaaagacaaacacagacagaaaaaataatgaaaattgattttgaggcacacggggagggggagggagcaaaataaaacactcatcaacgggaagggggggctcccaacacggggcgatctactgcacacgtgggccgggggcg

SEQ ID NO: 288351 - DNA, 100 bp, Homo sapiens
  chr11:79148548-79148648
  hyper
gcccaggccccgcccacccggccgccccgctggttcgcaccgctgctccggccaccgaggagcccaaagttggcggcgtcccgcggactccggcggagag

SEQ ID NO: 288352 - DNA, 150 bp, Homo sapiens
  chr11:79148661-79148811
  hyper
cggccgactcctgtaccacgaagacaactggaggccggcgggggaggcgggccacgaggggctggggcgagggagctgggatgcgcgggcccggctcgccgggaaacaggttgccgcggagtcccgtcccctccccctctgcggtccccg

SEQ ID NO: 288353 - DNA, 101 bp, Homo sapiens
  chr11:79149015-79149116
  hyper
catggcagcggcaggaaatccgaagggccccacaggtctgcgggagggaggatttattttacagcaaggaacagattcagacagatcggggatttcagtgg

SEQ ID NO: 288354 - DNA, 338 bp, Homo sapiens
  chr11:79150336-79150674
  hyper
aactgcatttctataaaccctctctccacggttagggggtgggagggagttagagatcgggtgggggcttggcgcggtactgttgagggctctgcacccaactgagcagtaatacactcatccacatggacgcgggtgcataaatcgccttaacattttgccctgaaagcggagccaatttccaaagttaaggaccacgcagctgaatttccagtactttccaacctcgcctaggcgggggcaggcagagaaggggcgggcagcgggcagctaactcgcccgacccccccgccaagaaggactcactaggtgaaccccccgcccttcacccaagtagt

SEQ ID NO: 288355 - DNA, 254 bp, Homo sapiens; identical to SEQ ID NO: 235845
  chr11:82782800-82783054
  hyper

SEQ ID NO: 288356 - DNA, 111 bp, Homo sapiens; identical to SEQ ID NO: 235846
  chr11:82867865-82867976
  hyper

SEQ ID NO: 288357 - DNA, 127 bp, Homo sapiens; identical to SEQ ID NO: 235847
  chr11:82905087-82905214
  hyper

SEQ ID NO: 288358 - DNA, 148 bp, Homo sapiens; identical to SEQ ID NO: 235848
  chr11:82905695-82905843
  hyper

SEQ ID NO: 288359 - DNA, 521 bp, Homo sapiens; identical to SEQ ID NO: 202674
  chr11:84148448-84148969
  hyper

SEQ ID NO: 288360 - DNA, 51 bp, Homo sapiens
  chr11:84431903-84431954
  hyper
catactgcagctcccgatttggtaaaaagccagtggcttgctgcaatccag

SEQ ID NO: 288361 - DNA, 57 bp, Homo sapiens; identical to SEQ ID NO: 202675
  chr11:84432270-84432327
  hyper

SEQ ID NO: 288362 - DNA, 42 bp, Homo sapiens; identical to SEQ ID NO: 235852
  chr11:85339594-85339636
  hyper

SEQ ID NO: 288363 - DNA, 230 bp, Homo sapiens; identical to SEQ ID NO: 235853
  chr11:85359003-85359233
  hyper

SEQ ID NO: 288364 - DNA, 182 bp, Homo sapiens; identical to SEQ ID NO: 235854
  chr11:85521825-85522007
  hyper

SEQ ID NO: 288365 - DNA, 79 bp, Homo sapiens; identical to SEQ ID NO: 235855
  chr11:85522511-85522590
  hyper

SEQ ID NO: 288366 - DNA, 160 bp, Homo sapiens; identical to SEQ ID NO: 202676
  chr11:85780826-85780986
  hyper

SEQ ID NO: 288367 - DNA, 221 bp, Homo sapiens; identical to SEQ ID NO: 202677
  chr11:85955560-85955781
  hyper

SEQ ID NO: 288368 - DNA, 54 bp, Homo sapiens
  chr11:86085687-86085741
  hyper
caacctcgctgcctcgagcttctgaatcgcctgggcaacctggaagccgcccat

SEQ ID NO: 288369 - DNA, 241 bp, Homo sapiens; identical to SEQ ID NO: 202678
  chr11:86382605-86382846
  hyper

SEQ ID NO: 288370 - DNA, 62 bp, Homo sapiens; identical to SEQ ID NO: 202679
  chr11:86383105-86383167
  hyper

SEQ ID NO: 288371 - DNA, 1141 bp, Homo sapiens
  chr11:86510900-86512041
  hyper
tgctttgggccccacgcacagcactgagtgctgtaaggaaatgcaaagcattggtggccctgccatgggaatacaggtttctgttctttggaggcaccggagaaactaggagttcggtcagcaccttaaggcgctaaaagtgtacgtgggggtggggcgcacacaggttctgaaccaattcttcaaatttgcccagggctccccatacaccaggtgtggcccgcgtccctagttctaggctgttgggggaggggtcgccttttgtaggggacctggtctttttgcgagctggcagcgtgctcccagcagcgaaggccgtagtctcgctcaggaggccgcgcgccagacccggggatgcgcggtgttcaaagggtgacggcgcgcgggtcccgggcaggagagcccgccagagccggtgctgcctggcgccgagaggcccggactggcgactgctgccgcgccaccggggcccacctgcgcagggacgctcggcctcaggccctctgggctgctccaccctgctccggccgcaggcgagcggcgaggggaggggggcacggtttatgtgcagtggggcgggcggcgtccgcgcggcttccccgaggccggaggcggggcgggcgggcctcgggtggcgcggggggcggacccgccagctgcctgcgctgctcgccagcttgctcgcactcggctgtgcggcggggcaggcatgggagccgcgcgctctctcccggcgcccacacctgtctgagcggcgcagcgagccgcggcccgggcgggctgctcggcgcgggtgagtgcgggcaccgactggggcatccgcccgggcgcgggagaggcgaggcgccgggaggagcgggacaaagggccgggtatgcgcggggtagggtaactgcgggctgccggaggcaccgcaggacttcgccagggcagtcctcggggttccaggacacgggctgggggcctgaaggagctctggggagacggcgggggctgcaggtcatttggattcatgcagtgtcacccatgaaacggatggggaaagaagatcctgctgtcttgggtgcaggatgttggttgggaagcagagagagccggctctcggcaagctgtccttcggcgggggcgatggctacacccc

SEQ ID NO: 288372 - DNA, 283 bp, Homo sapiens; identical to SEQ ID NO: 224181
  chr11:86513414-86513697
  hyper

SEQ ID NO: 288373 - DNA, 649 bp, Homo sapiens
  chr11:86665886-86666535
  hyper
ttgtcagctgcagctcggcgtccgtctgcagctcgtgcccaaccaggttgggcatcttggtcacgttgtagccgaggttctggcacatggagatgcggatggggtcgcagcgccgctcttcctcgtccccgaagccccgcgccggccccaggagcagcagcaactgcaggagcaaccccagactgagaccgacgcccccgggcgcccccgggacgctcggccctgcgccccgccaggccatggccagcatcgggggtagcagcggcagcggctggggctgctctggcagacacccccagtttgcacgggggcgccggctgcccgcgctgctcccagctcccgggacgggagtgtgatgcggcgacgagggggcagcggccggctctccagcagctgcgcgcgactgtgtgggattttagacgtcccgggccgaggccgagggacaggctgcgagggtcatggctgcaggcggcgagcccacaagccggcgccggccgcgtccgttcggcgtctccgcgaggccagccagcagccagcgctgcgcagctctcaccgccggagccctgcgcggcgctggaggctcgcggcgcggcggcggggcgggacggacagcgggcctctccaatggccgggcgcggtgggcagctag

SEQ ID NO: 288374 - DNA, 44 bp, Homo sapiens; identical to SEQ ID NO: 202683
  chr11:87908223-87908267
  hyper

SEQ ID NO: 288375 - DNA, 220 bp, Homo sapiens; identical to SEQ ID NO: 202684
  chr11:87908484-87908704
  hyper

SEQ ID NO: 288376 - DNA, 148 bp, Homo sapiens; identical to SEQ ID NO: 235863
  chr11:88070647-88070795
  hyper

SEQ ID NO: 288377 - DNA, 31 bp, Homo sapiens; identical to SEQ ID NO: 202685
  chr11:88071023-88071054
  hyper

SEQ ID NO: 288378 - DNA, 190 bp, Homo sapiens; identical to SEQ ID NO: 235865
  chr11:88071606-88071796
  hyper

SEQ ID NO: 288379 - DNA, 89 bp, Homo sapiens; identical to SEQ ID NO: 202686
  chr11:89224224-89224313
  hyper

SEQ ID NO: 288380 - DNA, 32 bp, Homo sapiens; identical to SEQ ID NO: 202687
  chr11:89224788-89224820
  hyper

SEQ ID NO: 288381 - DNA, 270 bp, Homo sapiens
  chr11:91959629-91959899
  hyper
agctaagagagccgcttgggttgctcgggatgagaggaacaggggtgctcccggggtgtgggtgtgctggcggtgacatcctgaggctgcagctcgctggaataatgggctcaaaccaggcggtggagaggggtccccggaatggacgtcgggggcggggaggctgcggagaccctgcgaggtctccgtgaaggactaggaggggctcccgggagggagtggcgcctgcggcccggagcgtgggcggccggtggctctggcacgcggaat

SEQ ID NO: 288382 - DNA, 255 bp, Homo sapiens; identical to SEQ ID NO: 202689
  chr11:91960114-91960369
  hyper

SEQ ID NO: 288383 - DNA, 65 bp, Homo sapiens; identical to SEQ ID NO: 202690
  chr11:92675309-92675374
  hyper

SEQ ID NO: 288384 - DNA, 675 bp, Homo sapiens
  chr11:92930674-92931349
  hyper
cgccccactcaacacacacactcacccacacgcgcgcgcgcaaacacacacacacatattttaacgccctattcaggcctgggcttcgtctgaccaagttctcggggtcagataaccggttcctttgcggatgctgaccacggggtcagttagcaatcgggcctcaactcaggccaagcgcggggcccctggaggtgtgggcgcacccgactcccgcacagacccccgcccacgtcagccccggctccctgcccacgcacaacaccgacctagctcctcgcgcctcgccgccccggcagccgccggcgtcgccgccgcttccatctctcgcgggtctccaggacgccgccgcccgagtgctcactctcccgccgctgcgtggccggcgtcaggcccaggcctacctcccctgcccggagggacccgcgcctggtgcccgcctccctgccccggcgctccccaaccgcgcggcgaggagcatgcgcagtgggacagcccggctcggcgggcaccgccggcgaggggcgggaggggccgaagacccgaggactgctgcgaggccgggttgggtaacccgagaggagggttgggtaacctgagatcagcgagggtgggaccttagagctagccgagacccgggcccatagctccctgggggttttaaagatgacggcg

SEQ ID NO: 288385 - DNA, 61 bp, Homo sapiens
  chr11:92931379-92931440
  hyper
aaggcgttagcgttctgtaagtcaccttggagaatgcgaagaaggacgggatttgtcccct

SEQ ID NO: 288386 - DNA, 70 bp, Homo sapiens
  chr11:93275705-93275775
  hyper
cgctggggaggggcggtagtcggccccagcagcagaggaagcaacgctcagctccctcctccacccaccc

SEQ ID NO: 288387 - DNA, 117 bp, Homo sapiens
  chr11:93474503-93474620
  hyper
gtggccccaaccgcgcacttgctgcttgtaacccaggcctcggcccaaaacccgcgactggcctggtgtcctagagctctgtacacaccaccctcccgacctcagccctccaactcc

SEQ ID NO: 288388 - DNA, 218 bp, Homo sapiens; identical to SEQ ID NO: 121346
  chr11:93474649-93474867
  hyper

SEQ ID NO: 288389 - DNA, 101 bp, Homo sapiens; identical to SEQ ID NO: 202691
  chr11:93861765-93861866
  hyper

SEQ ID NO: 288390 - DNA, 201 bp, Homo sapiens; identical to SEQ ID NO: 235876
  chr11:94227397-94227598
  hyper

SEQ ID NO: 288391 - DNA, 525 bp, Homo sapiens; identical to SEQ ID NO: 235877
  chr11:94245526-94246051
  hyper

SEQ ID NO: 288392 - DNA, 571 bp, Homo sapiens
  chr11:94277135-94277706
  hyper
cgcggcagctgctttagaaggtctcgagcctcctgtaccttcccagggatgaaccgggccttccctctggaaggcgagggttcgggccacagtgagcgagggccagggcggtgggcgcgcgcagagggaaaccggatcagttgagagagaatcaagagtagcggatgaggcgcttgtggggcgcggcccggaagccctcgggcgcgggctgggagaaggagtgggcggaggcgccgcaggaggctcccggggcctggtcgggccggctgggccccgggcgcagtggaagaaagggacgggcggtgcccggttgggcgtcctggccagctcaccttgccctggcggctcgccccgcccggcacttgggaggagcagggcagggcccgcggcctttgcattctgggaccgcccccttccattcccgggccagcggcgagcggcagcgacggctggagccgcagctacagcatgagagccggtgccgctcctccacgcctgcggacgcgtggcgagcggaggcagcgctgcctgttcgcgccatgggggcaccgtggggctcgccgacggcggc

SEQ ID NO: 288393 - DNA, 217 bp, Homo sapiens; identical to SEQ ID NO: 202694
  chr11:94474139-94474356
  hyper

SEQ ID NO: 288394 - DNA, 104 bp, Homo sapiens; identical to SEQ ID NO: 202695
  chr11:94474385-94474489
  hyper

SEQ ID NO: 288395 - DNA, 223 bp, Homo sapiens
  chr11:94474547-94474770
  hyper
tgccaagtacctggcacgagaaggacgtcgtgtgggtcgtccttaccctgaatttaatgaagtcaggggctgaaaacggcggtgtaatcattaaactgtaagacctaggagctgcttccctccctgatttctattcctcagttagcctgtaggtgtctcgagataggacattccatcctcatgcctgtcatggtaagtggagatttgcgatgggtgaaccggg

SEQ ID NO: 288396 - DNA, 191 bp, Homo sapiens; identical to SEQ ID NO: 202697
  chr11:94501254-94501445
  hyper

SEQ ID NO: 288397 - DNA, 234 bp, Homo sapiens; identical to SEQ ID NO: 202698
  chr11:94502100-94502334
  hyper

SEQ ID NO: 288398 - DNA, 166 bp, Homo sapiens; identical to SEQ ID NO: 202699
  chr11:94883964-94884130
  hyper

SEQ ID NO: 288399 - DNA, 498 bp, Homo sapiens
  chr11:94884402-94884900
  hyper
agcggcctcgccctggtgacctccccgggaaaggctgggcggtgcttccacaatgagggccacctgttaatttgcacgagaaagtgctgccgagggcccacacgtgcgaatccacctgtggagtgcgtcccctctctggggccaaggcctaggggaggccgaagcggagaagttgcctgaagactgggaagtaagagtaggggcgtcggaggaatcgaagttgcagtgacatcaggctcggacagccggcggactcctcgcaaggtgatcggatacttccgagagccccacagtcctcctgggcctttgccctcgcgtctgggatgcgctcgggcgcccccagtctgcgatgcgttcgtacctccagtagggtgacgttttcgccgggcccctctgcgaacagtctccgccctcctccactgtgagatatttcacagtttcacccgcagagggcaaccttattccaagttcccgagcgccctaggcctctttctcctc

SEQ ID NO: 288400 - DNA, 1066 bp, Homo sapiens; identical to SEQ ID NO: 235882
  chr11:94963464-94964530
  hyper

SEQ ID NO: 288401 - DNA, 1330 bp, Homo sapiens; identical to SEQ ID NO: 202700
  chr11:96122355-96123685
  hyper

SEQ ID NO: 288402 - DNA, 132 bp, Homo sapiens
  chr11:98891916-98892048
  hyper
tctgaactgtgctgatgggcaggaggatgggagacaggaattgagagtcacagaggaaggacagtggagtctggcatcttattggtaagtggctgacattcctttgccagtgactgcgttctgtgattgtgc

SEQ ID NO: 288403 - DNA, 33 bp, Homo sapiens; identical to SEQ ID NO: 235885
  chr11:100557940-100557973
  hyper

SEQ ID NO: 288404 - DNA, 161 bp, Homo sapiens; identical to SEQ ID NO: 202702
  chr11:100999159-100999320
  hyper

SEQ ID NO: 288405 - DNA, 241 bp, Homo sapiens; identical to SEQ ID NO: 202703
  chr11:100999360-100999601
  hyper

SEQ ID NO: 288406 - DNA, 429 bp, Homo sapiens
  chr11:100999719-101000148
  hyper
gcagtggggatccgacctcgggggagggcgggccgcccgccacgtggggagcccggggaccctttgccttcagctcagtcatgacgactggactccccttttctcctcccccgtctccaggaggagggaaaagggaaggaggagggggtttcgggaatataggggcagagggaggagaaagtgggtgttgaatgtggctggaccggagggatctccacctcctgggtcgggggcgggggagggcggcgctggtcagctcctgcccttggcctccatcctgtcgtcaggggaactgtggctgtcgtttgtcccagcgagcggcaagtggggagcgcaagaaaaagtagtaattgttaggagatctcgtctcctaactcggggagttctccaagagagttctccaacttctgtccgaggactggagacgca

SEQ ID NO: 288407 - DNA, 448 bp, Homo sapiens
  chr11:101000222-101000670
  hyper
ccgactttttctctggcatcaaactcgtgcatgctgtgaagctctcagtccctcgctgagttccactgccccctcactaaaaccctggggctagtcggacctctcggtacagcccattcccaggaagggtcggacttctgctggctccgtactgcgggcgacagtcatctccgaagatctcagatcccagtagtgcgggagcactagccgcctcgggttgtagatttcactcaaatgacaagtgaagctagttctcattgagaatgccacccacacgcacaaatacaacaaggcttaccccgattagtgacagctgtggactggccagacagctttctaacaacgcctcctcctctagggaggccccgcccaaagcccctccctaccccaattaccggtaggatctgaaactctggagttggcatttccacccgttattctgaatgct

SEQ ID NO: 288408 - DNA, 119 bp, Homo sapiens
  chr11:101452971-101453090
  hyper
cttcgaaagggcaccgcagcagggcttgaggctgggcagccctgacacagcacccatctatcaggagggtctgccaggcgcctatggggtggaatcctccctccaactaaagctgttta

SEQ ID NO: 288409 - DNA, 339 bp, Homo sapiens
  chr11:101453715-101454054
  hyper
cgtagcgatcctgtctcttgtagagcgcaggatgaaggggtctggagaaatcgaccacccatctaatcacctgcaatggtggtgttactatgcggtctcactctcgtgggcaaacatatccatgcgtacctacgaggagcaaacctagacaaccccgcctcccccactccccgcgcgcccctccactcactcaggtcccagccctggctctcgcggacctcccagcaccgtcctaggaggtacacacgcgggttcaggacgcgcgcggacggactcggccactcctgcgagcgcacaacctccctccgcgcagcccgcgcccgatccgccccgcgtcgc

SEQ ID NO: 288410 - DNA, 39 bp, Homo sapiens
  chr11:101454747-101454786
  hyper
ctaggaggagccaggcacgcactctttttttcccctcca

SEQ ID NO: 288411 - DNA, 38 bp, Homo sapiens; identical to SEQ ID NO: 235889
  chr11:101785493-101785531
  hyper

SEQ ID NO: 288412 - DNA, 33 bp, Homo sapiens; identical to SEQ ID NO: 202706
  chr11:101918143-101918176
  hyper

SEQ ID NO: 288413 - DNA, 804 bp, Homo sapiens
  chr11:101980830-101981634
  hyper
gcgcccgcgttctccgcagacaccacagttcggacccggattggacccatcgtttgcggttcgcggggcagaatacggggcacgcttcgggcccctgcccggctgagcgcgggcgaagggcggaccgggccagggcgagcgggtcacgtgcggccgggagaggcgccgcgggccgggagtgtgcaggaatgtagcaacttgcagcgaaaagtttccctgcgctgccggccgggccgcggtgcgggcgggcgcgcagaggaaggaagagccgagaggaggcggggccgcggcggcgcgggcgggcgcttctcctaactttagttttggcgtttgaggcgagtttctgtctcagtcgggcgcagccgccgccagggaaaagaaagggaggaaggaaggaacaagaaaaggaaataaagagaaaggggaggcggggaaaggcaacgagctgtccggcctccgtcaagggagttggagggaaaaagttctcaggcgccgcaggtccgagtgcctcgcagcccctcccgaggcgcagccgccagaccagtggagccggggcgcagggcgggggcggaggcgccggggcgggggatgcggggccgcggcgcagccccccggccctgagagcgaggacagcgccgcccggcccgcagccgtcgccgcttctccacctcggcccgtggagccggggcgtccgggcgtagccctcgctcgcctgggtcagggggtgcgcgtcgggggaggcagaagccatggatcccgggcagcagccgccgcctcaaccggccccccagggccaagggcagc

SEQ ID NO: 288414 - DNA, 807 bp, Homo sapiens
  chr11:101981964-101982771
  hyper
gagccgcggccgccagctctggtcaggggaggggggttgcgggaactctagctggggtgggggtcccgaggcgaagtggaactggagtcgtccactccgccgcggtgaccagctccccactcctcccagagtccggggctgagatttgtttttcccttctgagtttctctctgcggttgcagccccggggggcgtgctttccctccttcttcctttctttcttcccggggttcccgagaggttggcgggagtggaggaggggtggggaggaaggaagggggtggggaaaagtcgggcctgggccgcggtgggcttgcacaatgcgcgcgcctccgcgcgctccgcaccttcgctcccgccgggccgggctgggaaagggggaggggggcctctggcatttgtgtgtgggtgtgttgccagcggcggccgagtttgtgaagttgagccctgggcccctttcctttgcggcctctcggtccacttcagtctcctgggggagtcaaataattgttctcttgttttccagtgttgattagaggtgggggtagaaccggtccatttagttttttgctctttctttccttcccccctcccgtttcccctccccctcccgtaagcatttattttcctcgcggctcaggcgatttcggaatacaggtttcgggcttcccctgcccagactttcctggaagttgtttatggagttctttcacccctgctcttcccttgtgtgttggaacttgggccggcttgctcttatcaaacttagtaggtcgcgtgttggtttcccagttgtagactattatt

SEQ ID NO: 288415 - DNA, 31 bp, Homo sapiens; identical to SEQ ID NO: 202708
  chr11:102323923-102323954
  hyper

SEQ ID NO: 288416 - DNA, 767 bp, Homo sapiens
  chr11:102962155-102962922
  hyper
tctagaaaaaggcagaggagcgatacgggagtaggggatcgagggtcggttgtggggtgggggtgggggtggggggaagcgcaatttacatatgcatctgttccccaccctgcagggcacgtagactcttaacgtgggcggctcttctagtctctccataaacgccagcgtgcacacactcgaacacgaggtcgggtcgggcgcggagactcgcggtgttcggcacctacagcctagctcgatcaaaggggcctcacctgtctccagccccagcccggcaggccgggcccgactccttttcctccagttgtccagcaaaggagggaggagggaagcttgaagggtggggggagatggtacctggagattttacactttttgaggcctccgtcttccgctactgctgctgccaccccaggggattttctcttcttcttcaccggcatcttccgccctccccggcagggtgggcaggggagccggggaagggggtccctgtccgctggaagcccctcagcgctggcacccagttcccagagacagcagcaagcggaggagcagagtcgccagcccgcaccggcgcggcccagcccggccgccgcccgctcccaggtatcctcgtcgtctttctctgaccgggacagggctggctcctcgccggtggacactgcggttcgttctcaccgggaggagataacgcggacagcgcggcagctccaccagtcacagcaagcaagaggctcagcctaacccggaggcgaatcgct

SEQ ID NO: 288417 - DNA, 114 bp, Homo sapiens
  chr11:102963062-102963176
  hyper
ctgtccagggtatcctgacctttctcatgaagcttctaccgcgctctgatgctggcagtcaccgccaaaaagtgaaactactaatactttgcagttgacgttaaaaacaacctg

SEQ ID NO: 288418 - DNA, 35 bp, Homo sapiens; identical to SEQ ID NO: 202710
  chr11:102980488-102980523
  hyper

SEQ ID NO: 288419 - DNA, 126 bp, Homo sapiens; identical to SEQ ID NO: 202711
  chr11:105481877-105482003
  hyper

SEQ ID NO: 288420 - DNA, 116 bp, Homo sapiens; identical to SEQ ID NO: 235897
  chr11:105893007-105893123
  hyper

SEQ ID NO: 288421 - DNA, 523 bp, Homo sapiens; identical to SEQ ID NO: 235898
  chr11:105948198-105948721
  hyper

SEQ ID NO: 288422 - DNA, 226 bp, Homo sapiens
  chr11:106889091-106889317
  hyper
ccgtgcgccgcgctcccgctcacggggaggctccgagagtgtgtgaccgcggtcggcggggcggggagggctgcggcccaagcagaaggggaggcagaggcagaggcttctgccgcctgcgcgcctatctcgccccctttccctctctgctcccgcctctctccacttgctgccctgcctccctccttctccctttatccccccgcccccccccatgctctccctc

SEQ ID NO: 288423 - DNA, 127 bp, Homo sapiens; identical to SEQ ID NO: 235901
  chr11:107328545-107328672
  hyper

SEQ ID NO: 288424 - DNA, 182 bp, Homo sapiens
  chr11:107462735-107462917
  hyper
ggacagccgagtggggagtgacagctgacagctgacggggctgttaaaagcagagcagtggagtgtggtggtggggtgagctgttgtgggtgcttttttttgttttccaagtgtgggtacgggctgttctgactcagtgtttatgctcaacctctaagcggcgagttcggtaacacatctta

SEQ ID NO: 288425 - DNA, 127 bp, Homo sapiens; identical to SEQ ID NO: 235904
  chr11:107992141-107992268
  hyper

SEQ ID NO: 288426 - DNA, 127 bp, Homo sapiens; identical to SEQ ID NO: 235905
  chr11:108092858-108092985
  hyper

SEQ ID NO: 288427 - DNA, 133 bp, Homo sapiens; identical to SEQ ID NO: 202714
  chr11:108093204-108093337
  hyper

SEQ ID NO: 288428 - DNA, 49 bp, Homo sapiens; identical to SEQ ID NO: 121412
  chr11:108093385-108093434
  hyper

SEQ ID NO: 288429 - DNA, 644 bp, Homo sapiens
  chr11:108368605-108369249
  hyper
acactccttgtaacgcccgggcgccgtccattcgcaacatcagtccctgcacattaaatgcggaagggcccttcaagttcattcattcattcattccacaaactttcgtggtgatttttgcccgctttgagtatgggcgggaggagggaagaggagctgaccagacccaaaaaggggcgacacacgccggggagggacgccacgcaggccgcgggcggactcccgggcggcggggacgcgcggggacccggccgcgggacgagggaggccggcggctggacactacctgcgggagagcgagtgaggttctggccctccgagttgaccgcctgcaggtagaaatagcggaccggcaggacgacggccgcctgcagcccgggcccccacaccaggctccgcggcgcgctgaccagcacctccggggcccccgcggccaccagcagggcgaggcgcagctgcagcagcagggcccgcgggaggcggcgcatggtcggcggggcacaactgcggtccagctccgcggcggcgaggaggggccggcagcgccgcggaccgggcggggactggggcccaccgcggggcgggtctttcgggcgggaaagattgcggcgcaggctccctttcccgcccgctgtcccgcctcg

SEQ ID NO: 288430 - DNA, 1042 bp, Homo sapiens; identical to SEQ ID NO: 235908
  chr11:108463471-108464513
  hyper

SEQ ID NO: 288431 - DNA, 90 bp, Homo sapiens; identical to SEQ ID NO: 235909
  chr11:108535765-108535855
  hyper

SEQ ID NO: 288432 - DNA, 214 bp, Homo sapiens; identical to SEQ ID NO: 202716
  chr11:109293899-109294113
  hyper

SEQ ID NO: 288433 - DNA, 282 bp, Homo sapiens
  chr11:109294189-109294471
  hyper
cgccttgcttgccagcagttgctcccttagtccttggctcgctcgcacaccccctcccgctacagggagcagttttgggtggcgtgggctccgtcctcttcttggctggtaggaacggtgtgcccaagaggggaagcctagtgggcctggcccctcccagccccgcgccaatgagtgccagggcgccgaaggagctgaggctggcgttgccgccgtgtctcctcaaccggacctttgcttcccccaacgccagcggcagcggcaacacgggtgcccgcggcc

SEQ ID NO: 288434 - DNA, 837 bp, Homo sapiens
  chr11:110166935-110167772
  hyper
caggcacgttcgggccgcggctcagccacgactcgggcagggcctcgcggcccctaccagccccgggaggagcctggccggccgggccgttaccacagtggcgcctcggccagctgggcgcgagcggaggcgcgccaagccctggcggcggcgccacggccgggcagcacgggccccgcaacttcgcgccgccaccttagcgtctccggaggaaccgggagcggggagtgggggaagggagggcgccgcgccttacccggagagcgggcggcttctgcccgccggcgtgtggctggggcgctgcgcggcggcgcggctgcgacagggagggagaagcggtggtgcgagcgctggcccgcgggagacgagaggcgccgccgccaccgcagacagctccgcaatatggccgctcggcgcctccgcgggaaaaggcggggctgcccggcgcccccccgcctccccctgccggccggccgtcctcgcgccgcggactgagcgccaacgccgccgctgggggccgcccccgccccgcccctcccgcaggctcgcagccgcaggcctggctccgggcgtggccgggggtcgcggtctggggccggccaacgcgaggtgggtggctgcgggctcgggagcgcccagggaaatagggcgaatgcgccggagggtcgagcccttccagagagcgctgggctccagctaaacctgcggtcgagggaagcggagccgcccagcccaaagctcggagtgtgcccgccgcctccccaacgagtggaaacttgaaactcccgctggtgccagcaaactcactgagggcgttgccgtcgcccccagaggagg

SEQ ID NO: 288435 - DNA, 232 bp, Homo sapiens; identical to SEQ ID NO: 235913
  chr11:110300415-110300647
  hyper

SEQ ID NO: 288436 - DNA, 452 bp, Homo sapiens; identical to SEQ ID NO: 202720
  chr11:111169520-111169972
  hyper

SEQ ID NO: 288437 - DNA, 214 bp, Homo sapiens
  chr11:111170351-111170565
  hyper
tcgggagccccggacggctttccccagctcgcgctgcgcggactcgccccggagcctcagtgcgcctcggagaaacgcctgccccagaaagggagggggtagggagagaggggaagaaggggagagtaggagcgggggcgaaggagggaggagggcaagatggagcgcggaaaaggcggagaaaagggacgagggagagcgggcagaaggcaaa

SEQ ID NO: 288438 - DNA, 290 bp, Homo sapiens
  chr11:111412304-111412594
  hyper
gaggaggtaaagtgctctggcttctggcttctttcagttgttctgcatgtcggggggagaacatccgtgcccttttctcagatcctttttgcgggtgccaacagcttgaccaaacgggacagaggagactgggaacctcctctactctggcatcctggcttgcgaaactaatttaaagaatgtaaagttggtttcaggatgggggcggggcggcaaaagaggtgggaagctgaattgagctgcttgggttagggctgcgtgggctctgtccttggtcgcggggaacagaa

SEQ ID NO: 288439 - DNA, 62 bp, Homo sapiens
  chr11:111412624-111412686
  hyper
gagaagagaaggacacttcctgaaggcaggagaaccagataggcccgcgggcctccttccag

SEQ ID NO: 288440 - DNA, 140 bp, Homo sapiens; identical to SEQ ID NO: 235922
  chr11:111472616-111472756
  hyper

SEQ ID NO: 288441 - DNA, 422 bp, Homo sapiens; identical to SEQ ID NO: 235923
  chr11:112096873-112097295
  hyper

SEQ ID NO: 288442 - DNA, 144 bp, Homo sapiens
  chr11:113258498-113258642
  hyper
ccattcccctctcccggacccgaggagcaggaagcggcggctccttcggccacccaggcagcagccacagcggggagtgcgcggcgcggggacaggaagagaggggcaatggctgccgaccccaccgagctgcggctgggcagc

SEQ ID NO: 288443 - DNA, 501 bp, Homo sapiens
  chr11:113345738-113346239
  hyper
tccctcctcctctccccgtgacactgagtcgcccgccgctccatccggccggtgcttaccttcaagccatagggcgcccgggggcagagacggcgccggctgcttgaggcttccagctcccgccgcatccacgcgcggccgcccctccggcagccgtccggggccgccactctcctcggccggtccctggctcccggccccgccgcgccgttcagagccccggcgggcagcagctcggccggctctggcccgcggggagcagtggacgggccgcggcggggcggggcggggcggggccgggcgcggggcgggcgggcaggagggagcgcggggacggggcggaggcggcgcggtgcgcgcgtgaggctgccggttcggcactgaagctggacagctctgcggcgcccgagcgcggggagcgcgggagggaggtgccccggtccccgcccctgagacaggccccgcccccgccccccaccaaaggagctgtacctcctcggc

SEQ ID NO: 288444 - DNA, 251 bp, Homo sapiens; identical to SEQ ID NO: 235926
  chr11:113644420-113644671
  hyper

SEQ ID NO: 288445 - DNA, 108 bp, Homo sapiens; identical to SEQ ID NO: 202725
  chr11:113746574-113746682
  hyper

SEQ ID NO: 288446 - DNA, 41 bp, Homo sapiens; identical to SEQ ID NO: 202726
  chr11:113930326-113930367
  hyper

SEQ ID NO: 288447 - DNA, 229 bp, Homo sapiens
  chr11:113930801-113931030
  hyper
gccccggctgtcagcctgggcgcagctgcctccccagcccttcctcttcagggcacggtcggggtgagaggtggggggcgtagcggtgtgcgggggctgagggcgtgagcagaggggtcggggatccggaggctttgtaccgccaggggctggcggagcaacagagcccgtgggtgctcttatgtatgcggaccggtgcgcgggcgcaagataaggttgtggtttattt

SEQ ID NO: 288448 - DNA, 232 bp, Homo sapiens
  chr11:113931067-113931299
  hyper
aatcggaggagctgacgagtagatctgggggcggaggggagcaggactgggactgcttacgttttgtttctctttgagaaaacgtggtgggctttttcttgattggacttgatccccaccccccttttgcaggggagggagggaagctccagagggtctgcagcgctgcgggccctcctcggctctcggcgggaccggcggtgacaccggagctcgccgtgcgctcccggcc

SEQ ID NO: 288449 - DNA, 130 bp, Homo sapiens; identical to SEQ ID NO: 202727
  chr11:113932120-113932250
  hyper

SEQ ID NO: 288450 - DNA, 246 bp, Homo sapiens; identical to SEQ ID NO: 235930
  chr11:114271097-114271343
  hyper

SEQ ID NO: 288451 - DNA, 154 bp, Homo sapiens; identical to SEQ ID NO: 235931
  chr11:114309918-114310072
  hyper

SEQ ID NO: 288452 - DNA, 279 bp, Homo sapiens
  chr11:115372960-115373239
  hyper
cttctgctgccaagcgtcattgcacgactcccatttttagtcaaaaagcaatatccccgaccacagctttccaccgccccccggcttttttttttttttttttttttttttttgcagccaatacaagtctattgttgcctctattatgcgccagttaccgagcctttactcacgctcacgtttaactgacactggcgctttttacaatgcagcagcacgagggatctctttcaggaacattttattgaacccatccagtcagaggcatcacctgaaatg

SEQ ID NO: 288453 - DNA, 238 bp, Homo sapiens; identical to SEQ ID NO: 202728
  chr11:115374753-115374991
  hyper

SEQ ID NO: 288454 - DNA, 398 bp, Homo sapiens; identical to SEQ ID NO: 202729
  chr11:115375434-115375832
  hyper

SEQ ID NO: 288455 - DNA, 303 bp, Homo sapiens; identical to SEQ ID NO: 202730
  chr11:115375894-115376197
  hyper

SEQ ID NO: 288456 - DNA, 64 bp, Homo sapiens; identical to SEQ ID NO: 202731
  chr11:115529918-115529982
  hyper

SEQ ID NO: 288457 - DNA, 160 bp, Homo sapiens; identical to SEQ ID NO: 235937
  chr11:115846301-115846461
  hyper

SEQ ID NO: 288458 - DNA, 288 bp, Homo sapiens
  chr11:116450735-116451023
  hyper
agcagatcctagaccgaggaaaaacagtcccccaacacagccccgggtgggcagggggcacggtttattttagagccggcgactcgcagcccagggagcggcgctaaaacccgcggacccggcgggcgcagcgggtccgaggagcggcgggggcggccggcaaagttaacttggcaccaccggcgcttcaaagcggtgcagctgtggctagcagagccggcgccgctttcttctcgccgcttccttctccccgattaatcagcggctacagccgtcgctttgatcccc

SEQ ID NO: 288459 - DNA, 123 bp, Homo sapiens
  chr11:116451190-116451313
  hyper
ccgcccacccggcagcgcgcgctccgccgcccgccttcgtccctgcgcccggaggccacgagccgggcgtttgccccgagcctccccgcgcagggcccgcgaggcgcccggggaaagcgacca

SEQ ID NO: 288460 - DNA, 186 bp, Homo sapiens; identical to SEQ ID NO: 235938
  chr11:116643252-116643438
  hyper

SEQ ID NO: 288461 - DNA, 253 bp, Homo sapiens; identical to SEQ ID NO: 235939
  chr11:116643719-116643972
  hyper

SEQ ID NO: 288462 - DNA, 88 bp, Homo sapiens
  chr11:116706882-116706970
  hyper
ctgcgcgcagcggctccaccttctggcggtagagctccatctcctcctgccacttcttctggaagtcgtccaggtagggctgcacctt

SEQ ID NO: 288463 - DNA, 505 bp, Homo sapiens; identical to SEQ ID NO: 235942
  chr11:117014686-117015191
  hyper

SEQ ID NO: 288464 - DNA, 369 bp, Homo sapiens; identical to SEQ ID NO: 235943
  chr11:117049879-117050248
  hyper

SEQ ID NO: 288465 - DNA, 83 bp, Homo sapiens; identical to SEQ ID NO: 235944
  chr11:117103812-117103895
  hyper

SEQ ID NO: 288466 - DNA, 679 bp, Homo sapiens
  chr11:117186458-117187137
  hyper
ggcagcactcccgcgcccatccacagcaggagccagggcagggcttgggccatggtgggccccggccttcgggccctctgggctcgcactggcccacgtccgtccctggcgcctgcccccaagtctgggtggtgctggtggcttctcaggagagggagcttgggggcatcaggacgccagggcctgcagggccctgggccagcccccgggtccgggctgtggagagcggtcaggggagatccgcagagcacgggagcaggggagaggctgggatccggagcccgctacatcggcacggcggcggccagcctgggcagcgggcgcgggctcccggcggggctgggaggggcgggcatggcgggccggtggcggcttccctggtccccccggcgggcggcggcgcgggcaggggcaagggctccgggctcctgcggctgcgttggctgctcaggccaccataatccagctcgcggctcgcagctcccgggcgggctggggaggcggaaagacttgtggcggcggctgtcaaagccaaaaggttttcgcttttccctgggatcgctgggaagtgtagtcttcccatggcaggcaatccggcttccggggctggagaggggtctgggatgccctctgccgaggtggagtccgccctgcaaggccctggcgggaagggccagac

SEQ ID NO: 288467 - DNA, 65 bp, Homo sapiens; identical to SEQ ID NO: 235947
  chr11:117198410-117198475
  hyper

SEQ ID NO: 288468 - DNA, 250 bp, Homo sapiens; identical to SEQ ID NO: 224203
  chr11:117352704-117352954
  hyper

SEQ ID NO: 288469 - DNA, 264 bp, Homo sapiens
  chr11:117666746-117667010
  hyper
gccatctgcgcgcccgggggcacgtcctctgcgatagcctggaacccagactacctgcgcctgcctggtcccgactcagtgcccaggtggcttcagtcggaaatgtctgccctcttccaacctcccgatcccggctgcctcgcggatcaggtacgcagcgccccagccgcaggtctggacatgccggacacctggacccacccctagcaaccccctctctccgggaagagggacacgccccccagcctgaagacttgtccccag

SEQ ID NO: 288470 - DNA, 81 bp, Homo sapiens
  chr11:117746539-117746620
  hyper
ccagccaccacttgtaagagccagaagccagcgctgggagctccaggctgcacacccaactctccacggaagcccgggaga

SEQ ID NO: 288471 - DNA, 122 bp, Homo sapiens
  chr11:117747016-117747138
  hyper
ctcaaggcagcaccgagagcaattcccagccaccagcgtcacccccagcgccacagcctgcctcccctagaggctcctctctcttccgacgccgatctccttgtttacatccccagcccggt

SEQ ID NO: 288472 - DNA, 276 bp, Homo sapiens; identical to SEQ ID NO: 224206
  chr11:117856650-117856926
  hyper

SEQ ID NO: 288473 - DNA, 33 bp, Homo sapiens; identical to SEQ ID NO: 235952
  chr11:117857279-117857312
  hyper

SEQ ID NO: 288474 - DNA, 88 bp, Homo sapiens; identical to SEQ ID NO: 202733
  chr11:118023499-118023587
  hyper

SEQ ID NO: 288475 - DNA, 46 bp, Homo sapiens; identical to SEQ ID NO: 235954
  chr11:118230310-118230356
  hyper

SEQ ID NO: 288476 - DNA, 70 bp, Homo sapiens; identical to SEQ ID NO: 235955
  chr11:118230635-118230705
  hyper

SEQ ID NO: 288477 - DNA, 34 bp, Homo sapiens; identical to SEQ ID NO: 235956
  chr11:118662152-118662186
  hyper

SEQ ID NO: 288478 - DNA, 162 bp, Homo sapiens
  chr11:118662851-118663013
  hyper
tgcgccgggagaggacggcgggggaccggactgtgagggcgtatcttgggggacctgtctaggaggaaccgggaggtgaaggcacaactgggggtgaggcgggggcaggggccgggctgtgagagtgcgactgaggggggattactccggagagcacggagc

SEQ ID NO: 288479 - DNA, 235 bp, Homo sapiens
  chr11:118663553-118663788
  hyper
acttaatctttaaccggcagcttccctatttcttgcccctgcttccagctctgggccaatcagagaaagccaaatgtgctcctcacaccaatcgcgtaagaagccctgcttctagtatagccctcctccaacttcccgatgccaacatcctccaatcagagccaacctgaagtttctcccttttttcagtatatgtaaagcttttccactcccctgcctgcctatgagtctgtta

SEQ ID NO: 288480 - DNA, 50 bp, Homo sapiens
  chr11:118663820-118663870
  hyper
agctctgagtaaatagcctattctcatttggtggtcgttatttctacaca

SEQ ID NO: 288481 - DNA, 62 bp, Homo sapiens; identical to SEQ ID NO: 235958
  chr11:118799388-118799450
  hyper

SEQ ID NO: 288482 - DNA, 130 bp, Homo sapiens; identical to SEQ ID NO: 235959
  chr11:118800838-118800968
  hyper

SEQ ID NO: 288483 - DNA, 124 bp, Homo sapiens; identical to SEQ ID NO: 235960
  chr11:118811078-118811202
  hyper

SEQ ID NO: 288484 - DNA, 188 bp, Homo sapiens; identical to SEQ ID NO: 235961
  chr11:118972865-118973053
  hyper

SEQ ID NO: 288485 - DNA, 140 bp, Homo sapiens; identical to SEQ ID NO: 235962
  chr11:118977772-118977912
  hyper

SEQ ID NO: 288486 - DNA, 398 bp, Homo sapiens; identical to SEQ ID NO: 202734
  chr11:118992030-118992428
  hyper

SEQ ID NO: 288487 - DNA, 64 bp, Homo sapiens; identical to SEQ ID NO: 202735
  chr11:119039732-119039796
  hyper

SEQ ID NO: 288488 - DNA, 156 bp, Homo sapiens
  chr11:119039957-119040113
  hyper
tgtttgggacccagtttggtggaggagctctggacctgtaggaacaccgcccctgtacgtttcctgcagtgccccctccttttctcattgccctggagacctgggtgatcaccggagaactgccctcggccccgcaagtcccgtcttgactcagtg

SEQ ID NO: 288489 - DNA, 236 bp, Homo sapiens; identical to SEQ ID NO: 202736
  chr11:119103176-119103412
  hyper

SEQ ID NO: 288490 - DNA, 83 bp, Homo sapiens; identical to SEQ ID NO: 202737
  chr11:119142431-119142514
  hyper

SEQ ID NO: 288491 - DNA, 106 bp, Homo sapiens; identical to SEQ ID NO: 202738
  chr11:119144575-119144681
  hyper

SEQ ID NO: 288492 - DNA, 130 bp, Homo sapiens; identical to SEQ ID NO: 202739
  chr11:119145547-119145677
  hyper

SEQ ID NO: 288493 - DNA, 142 bp, Homo sapiens; identical to SEQ ID NO: 202740
  chr11:119146702-119146844
  hyper

SEQ ID NO: 288494 - DNA, 102 bp, Homo sapiens; identical to SEQ ID NO: 202741
  chr11:119148462-119148564
  hyper

SEQ ID NO: 288495 - DNA, 291 bp, Homo sapiens; identical to SEQ ID NO: 202742
  chr11:119148945-119149236
  hyper

SEQ ID NO: 288496 - DNA, 158 bp, Homo sapiens; identical to SEQ ID NO: 202743
  chr11:119149265-119149423
  hyper

SEQ ID NO: 288497 - DNA, 492 bp, Homo sapiens; identical to SEQ ID NO: 202744
  chr11:119155748-119156240
  hyper

SEQ ID NO: 288498 - DNA, 126 bp, Homo sapiens; identical to SEQ ID NO: 202745
  chr11:119167631-119167757
  hyper

SEQ ID NO: 288499 - DNA, 86 bp, Homo sapiens; identical to SEQ ID NO: 202746
  chr11:119168098-119168184
  hyper

SEQ ID NO: 288500 - DNA, 175 bp, Homo sapiens; identical to SEQ ID NO: 202747
  chr11:119169061-119169236
  hyper

SEQ ID NO: 288501 - DNA, 100 bp, Homo sapiens; identical to SEQ ID NO: 202748
  chr11:119170361-119170461
  hyper

SEQ ID NO: 288502 - DNA, 362 bp, Homo sapiens; identical to SEQ ID NO: 235965
  chr11:119204862-119205224
  hyper

SEQ ID NO: 288503 - DNA, 130 bp, Homo sapiens
  chr11:119234947-119235077
  hyper
gacgtcagcgctggggcggggccaggccctaagccccgccccacctcgcctctaccccgcccccggcgccggcacgcggacccgaacgaggcgacaaggtcggtcctcccccgccgggccttccccgcgc

SEQ ID NO: 288504 - DNA, 402 bp, Homo sapiens; identical to SEQ ID NO: 235967
  chr11:119252460-119252862
  hyper

SEQ ID NO: 288505 - DNA, 101 bp, Homo sapiens; identical to SEQ ID NO: 202749
  chr11:119293204-119293305
  hyper

SEQ ID NO: 288506 - DNA, 62 bp, Homo sapiens; identical to SEQ ID NO: 202750
  chr11:119294072-119294134
  hyper

SEQ ID NO: 288507 - DNA, 772 bp, Homo sapiens; identical to SEQ ID NO: 235970
  chr11:119455154-119455926
  hyper

SEQ ID NO: 288508 - DNA, 312 bp, Homo sapiens; identical to SEQ ID NO: 202752
  chr11:119587838-119588150
  hyper

SEQ ID NO: 288509 - DNA, 269 bp, Homo sapiens; identical to SEQ ID NO: 202753
  chr11:119598243-119598512
  hyper

SEQ ID NO: 288510 - DNA, 314 bp, Homo sapiens; identical to SEQ ID NO: 8414
  chr11:119599011-119599325
  hyper

SEQ ID NO: 288511 - DNA, 57 bp, Homo sapiens; identical to SEQ ID NO: 202755
  chr11:119600032-119600089
  hyper

SEQ ID NO: 288512 - DNA, 190 bp, Homo sapiens
  chr11:119600421-119600611
  hyper
cagaacccagtctccggagatccctctcctctgcaccacttggacgttccacggagaggcagcggtgcgcggggcgacggggagctgccagagaagtcagtggtgggcatgagtgggtgagacgggcccactgaggtttctggtagagtttcttttctaatccctgctcccttcgggggttccttttcca

SEQ ID NO: 288513 - DNA, 191 bp, Homo sapiens
  chr11:119600648-119600839
  hyper
atagcctgaaaacgagctctcctccagtttccaggaccttagttttgagagatttgtgggattcccgcgaaagtggatcgtccagtcagtgtccctggcagggcagggactctccgccccatcccgttcaccacccactacatccgggtgtggtaggatttctgccaaggcgactgcgccctccgggcctt

SEQ ID NO: 288514 - DNA, 103 bp, Homo sapiens; identical to SEQ ID NO: 202756
  chr11:119612432-119612535
  hyper

SEQ ID NO: 288515 - DNA, 79 bp, Homo sapiens
  chr11:120039673-120039752
  hyper
gctagcctaggaagcgcatcgagggagcccgctcaagctgaagcgctgcacgagctgtgtcttccttctctccgccgcg

SEQ ID NO: 288516 - DNA, 215 bp, Homo sapiens
  chr11:120039974-120040189
  hyper
gagcgcgcccccgtgtggccaggcggggaggcgccacggccggggccgtgggggcggtgggaagcgctccgcgtccgggctctcagcgttccctggcctgccccggctcgctaggctttgatggctgcttccgctccccataaaggcctgtttcatggccgacgccggcatgggctttacgtctgccctcgggctccctgcgggctgcagagggc

SEQ ID NO: 288517 - DNA, 225 bp, Homo sapiens
  chr11:120110624-120110849
  hyper
ggcgccactccgggcgcggtgaggaggtgctgccaggctgggttggagcaggcaggtgttccgcgggatcgagacccgccccggcagcacccccggccccctccccaggtccccagctccatgtatgcaaatcactgctttgcatgggcctggggccaggcgcggggctcctgccagggggcgtggccggcggcccccgccccgcgccgcgtgctcacctgggga

SEQ ID NO: 288518 - DNA, 169 bp, Homo sapiens
  chr11:120110967-120111136
  hyper
ggagaccctggcttcgcaggggccccggctggggcagaggcgaggggcctgggggggcgctggctttggccccgcctggggcaggatggtgaatctggagtccatgcacacaggtgaggggcggagggaatgagctctgacaggtgtcactgcgcgtgggcaggggtga

SEQ ID NO: 288519 - DNA, 629 bp, Homo sapiens
  chr11:120195891-120196520
  hyper
ggtggcccggctccggctctgcgctccatcctcccagccagcaggtgcccccagacccccggctcctcctccgccgccgtcacagcctcgtcctccgcctctggctcctccgcttcctgttgccgcgatccgggccgggagctgcgggcgcccgggcgcccgaggcttcccggtgcgctccgccaggtaaccgctcggcgcgaactgcccggccggggtgggcacggggcccgcgcggcccattggtggggaaggaggcggcagagggcccgggctcgcctccgaaggggagcgggcctcctcctgcctcggacgcccgaggccttcctgcgccaggctgcggcgccagcgggatgcggggataacggtgcctggctccggctcttggtccgggcgtggccgagcgtcgcaggcaccgccgcgcggagatgcgatcgccgtccctgcgaggccccggggcccgcgctcgccgccagccacgcctgctccaaggctcctcctcgccagtctggccctggaacgggagaaaccaggagaggagccttggacctctgagccgcgatggccttccaaatgcccttccgttctttggcaaaaaccaagagcaaaaagccgaaacccacacaggg

SEQ ID NO: 288520 - DNA, 142 bp, Homo sapiens; identical to SEQ ID NO: 202758
  chr11:120206447-120206589
  hyper

SEQ ID NO: 288521 - DNA, 274 bp, Homo sapiens; identical to SEQ ID NO: 202759
  chr11:120207766-120208040
  hyper

SEQ ID NO: 288522 - DNA, 271 bp, Homo sapiens
  chr11:120382097-120382368
  hyper
cccctagcctctgccgggcgccgctccccagccgggcgcctctcgctcggccccgggcccccgggcagccgcaagtttgcccccggccgcgcggacccgcgcccgccctgcccgcagcagcccccgccgttcccgccgcccccgccgcccccgcgcctgggctcccgggcgacgctccgaggggcgctggggggcgcgtgcagctgcccgcggggctccggcccggccccgaaggggcgcccccccggccggccgtgcgcggggccgcagc

SEQ ID NO: 288523 - DNA, 206 bp, Homo sapiens
  chr11:120382448-120382654
  hyper
ccggacacagactgccttcagctgcgggcggatcgggctggagccgccacggctgctgcggaagaggaaaaacggccaacagcagccccgcggccggcccggcagcgcccggcccccggctcagcccccggagtgcggagccgaccaggtaagggcagcggccccccgcggcgcccccggcccgctccctgcgctgcccccgcgcc

SEQ ID NO: 288524 - DNA, 179 bp, Homo sapiens; identical to SEQ ID NO: 202760
  chr11:120435029-120435208
  hyper

SEQ ID NO: 288525 - DNA, 181 bp, Homo sapiens; identical to SEQ ID NO: 202761
  chr11:120894619-120894800
  hyper

SEQ ID NO: 288526 - DNA, 99 bp, Homo sapiens; identical to SEQ ID NO: 202762
  chr11:120895026-120895125
  hyper

SEQ ID NO: 288527 - DNA, 188 bp, Homo sapiens; identical to SEQ ID NO: 235980
  chr11:121163081-121163269
  hyper

SEQ ID NO: 288528 - DNA, 189 bp, Homo sapiens; identical to SEQ ID NO: 235981
  chr11:121163483-121163672
  hyper

SEQ ID NO: 288529 - DNA, 105 bp, Homo sapiens; identical to SEQ ID NO: 224232
  chr11:121323530-121323635
  hyper

SEQ ID NO: 288530 - DNA, 826 bp, Homo sapiens; identical to SEQ ID NO: 235982
  chr11:121526134-121526960
  hyper

SEQ ID NO: 288531 - DNA, 59 bp, Homo sapiens
  chr11:121593320-121593379
  hyper
agagcacgtggtcccgccaaacaaaggaacatgtgtgctgcaaaccatccccctatcac

SEQ ID NO: 288532 - DNA, 237 bp, Homo sapiens
  chr11:121593636-121593873
  hyper
actctcccgggatgctgtcgtgggggagggggcccggcactgtatacagctgtcaaaacgtctccgacaggagacgaaggcacatctgcacaagcctgtctcaggctgcggggcacacagggagcgcctcaaacctatcagtgtaatgccgagcggtaattgcattaggattagttatctcctgtgctctgctcattagcccggaggatggctcgcatccagcgagagggtggcaca

SEQ ID NO: 288533 - DNA, 67 bp, Homo sapiens; identical to SEQ ID NO: 235984
  chr11:121800445-121800512
  hyper

SEQ ID NO: 288534 - DNA, 206 bp, Homo sapiens; identical to SEQ ID NO: 235985
  chr11:122526547-122526753
  hyper

SEQ ID NO: 288535 - DNA, 95 bp, Homo sapiens; identical to SEQ ID NO: 235987
  chr11:122849414-122849509
  hyper

SEQ ID NO: 288536 - DNA, 133 bp, Homo sapiens
  chr11:122854782-122854915
  hyper
ctcagagtgtttgcgggatcgggaagggagtggggggcaatgtagaccgcctcctccgtccttatctttcccttgtttcgtgagccctggactcagcgtcctgctttcccccaaagctaaggcaatctcccca

SEQ ID NO: 288537 - DNA, 238 bp, Homo sapiens; identical to SEQ ID NO: 202766
  chr11:122855057-122855295
  hyper

SEQ ID NO: 288538 - DNA, 234 bp, Homo sapiens
  chr11:122855432-122855666
  hyper
agctgtgtcccaaagcctaggggagacagcgaggctggggacgccgggaagtttctctgaggtgtggggctcctgagcagaaacgcgcgggggattgccagggctgcagaaactttggctcgaggcggtggctggcccgccttacttccgtggtggggttagggaggcccctctgaaattcaatcttggtattgaatctggtatcttcctgtggcaggcaacgcataccaaagg

SEQ ID NO: 288539 - DNA, 187 bp, Homo sapiens; identical to SEQ ID NO: 235992
  chr11:122932840-122933027
  hyper

SEQ ID NO: 288540 - DNA, 203 bp, Homo sapiens
  chr11:123066197-123066400
  hyper
ttgcaggaggcattggtgacacctcggctgagagcccatggacgaggccttgtccgttcctagagctctgctctcacttggtccttctctccacttctctctcgcttcttttttactctcgtttctctctgcttccacgtctctcacaaatctggcgtttctctcttccatctcttcctctctaggtctccttgttcgcattc

SEQ ID NO: 288541 - DNA, 244 bp, Homo sapiens
  chr11:123066463-123066707
  hyper
tcctctccctccccgtctggttctgttagtgtaaagccaccagactgaccaggccgacggcggggcgcggaagtgggtgcgaaggcagccagcggccggccgaccagggctctccccaccgactgcctgctttggcacccggctaccccccttggcctggctttcctggggcctttcgcgttcgctcgctttctactgtcggtatttgcagcagcgctccctcaggtcccgagcagagctaagc

SEQ ID NO: 288542 - DNA, 41 bp, Homo sapiens; identical to SEQ ID NO: 202769
  chr11:123172413-123172454
  hyper

SEQ ID NO: 288543 - DNA, 35 bp, Homo sapiens; identical to SEQ ID NO: 202770
  chr11:123173029-123173064
  hyper

SEQ ID NO: 288544 - DNA, 417 bp, Homo sapiens
  chr11:123524977-123525394
  hyper
cagccccgcggctcctgcttcgtccgccctaactgcttctccagctgggcgtgaccccactcccgaagccgccggggccgcccgtctgggctacagaatgcgttccacgtcggtcccgtccacgcccgccctcggctccctggggaggtgcagcggggccgggaaggaagcggcagctcccgttcggccggcgatgtcagaggttggggggtgggtgtagaggcggagccccttcccgggagctcgcccccggatggtgcggggccccgaccctgggtggcaggtgatcagcaacccttctctaggcccccaggccgtgtgtgctgtcagccctgacatgcgcaggcggctctccgccaccaccaccgccccggaccctccccctagtgcacactccccaccccctgatgggcgtgc

SEQ ID NO: 288545 - DNA, 139 bp, Homo sapiens
  chr11:123525473-123525612
  hyper
cgcgcgctcgctggtctctccaggtctccctctcgcgcctccgcacctcccccgagctcgggcgcaccgccgccctcggctcacgccctccaggcaaacccactccgctcccgcacggacttgccgggtgtagctccgg

SEQ ID NO: 288546 - DNA, 160 bp, Homo sapiens; identical to SEQ ID NO: 235997
  chr11:124492594-124492754
  hyper

SEQ ID NO: 288547 - DNA, 405 bp, Homo sapiens; identical to SEQ ID NO: 235998
  chr11:124587805-124588210
  hyper

SEQ ID NO: 288548 - DNA, 219 bp, Homo sapiens; identical to SEQ ID NO: 202772
  chr11:124616911-124617130
  hyper

SEQ ID NO: 288549 - DNA, 259 bp, Homo sapiens; identical to SEQ ID NO: 202773
  chr11:124630113-124630372
  hyper

SEQ ID NO: 288550 - DNA, 162 bp, Homo sapiens; identical to SEQ ID NO: 49082
  chr11:124630410-124630572
  hyper

SEQ ID NO: 288551 - DNA, 85 bp, Homo sapiens
  chr11:124631910-124631995
  hyper
agttctccctcagggtcgaactcaccccatcccgcatcccaagtcccctccaggtccgggtttcactcaccgagggcactcagcc

SEQ ID NO: 288552 - DNA, 47 bp, Homo sapiens
  chr11:124709070-124709117
  hyper
gtgtccaaagtcccgggtcacctcggcctggaatccatctaactcag

SEQ ID NO: 288553 - DNA, 249 bp, Homo sapiens; identical to SEQ ID NO: 202775
  chr11:124709233-124709482
  hyper

SEQ ID NO: 288554 - DNA, 210 bp, Homo sapiens; identical to SEQ ID NO: 202776
  chr11:124709856-124710066
  hyper

SEQ ID NO: 288555 - DNA, 48 bp, Homo sapiens
  chr11:124736457-124736505
  hyper
tagtgacgagcactgtgctggggactcgaaggtggagagaaaggagac

SEQ ID NO: 288556 - DNA, 42 bp, Homo sapiens; identical to SEQ ID NO: 236006
  chr11:124746304-124746346
  hyper

SEQ ID NO: 288557 - DNA, 617 bp, Homo sapiens
  chr11:124932779-124933396
  hyper
cgagattagtcatgcagggccgctgagtgtgacttccagccctccagcgtctcgtgtcccgcccgtgtcggagcccatggctttttaggacaggaagcgctgcggggtagtgcgggcaggcaggcacgtcacaccggacagcgtcgagattgctgctttcggttccccagcgggtggtgaggcagaaagtgcagggcggaatgaggagccccagcacctcagagctgtcgggcagtggcggggaagcaaagcacaggagcgctgtggtgccagcggccgggctagggacgactggcgggtttgcgctggacccgaccccgagggcgggcgcaagggggcgggcgctgccgtactcaggccgcggggccagggcgggccggccggcggggcatttaaaccccgctgacagccagtccagcccgggacacgcgcccagctctgtagcctcctccgtcgactcagccttaggtaccggtcaggcaaaatgcggtcctccctggctccgggagtctggttcttccgggccttctccagggacagctggtgagcggggcaggggagggaggcgtgccgggacctcctgggctcggggcttgcaggggccgcggggggcctcg

SEQ ID NO: 288558 - DNA, 41 bp, Homo sapiens; identical to SEQ ID NO: 236009
  chr11:125034413-125034454
  hyper

SEQ ID NO: 288559 - DNA, 380 bp, Homo sapiens
  chr11:125034978-125035358
  hyper
ccgggcacggaggctgcgagagccccgcgggccgcccgctcccctgcccggccagcgctcagccccgccgccgccgccgccgccgcctcgccgcgcttgggcccgtggccggccgcgcattgtcctcgggtgcaaggagccgggctgcggactcgaatcgccgcgggcccaaccccgtagcgggcgggcggggagctgtgcgccaggagcgccaggggacccgagaataggaacaggcacgccggcccgagcccgggtgcagaaggctcccggccgggcgctccgcggggagaggctgggaaccgcgggcaggctccaggttctctttctcccggcttcgggcgtccttggggccggcgcttactccgcgccaccagcct

SEQ ID NO: 288560 - DNA, 371 bp, Homo sapiens; identical to SEQ ID NO: 202778
  chr11:125133244-125133615
  hyper

SEQ ID NO: 288561 - DNA, 145 bp, Homo sapiens
  chr11:125773517-125773662
  hyper
aacagagcggggagcgttgcttcagcaccacggagagatcatgactgcagtttcgtgtgggtttttgtatttttgcccccaattccagaaatgctgatcaaaatctcaaaattacaattagaaaactggggggcgggggggaggt

SEQ ID NO: 288562 - DNA, 179 bp, Homo sapiens; identical to SEQ ID NO: 236016
  chr11:125812008-125812187
  hyper

SEQ ID NO: 288563 - DNA, 56 bp, Homo sapiens; identical to SEQ ID NO: 202779
  chr11:125932494-125932550
  hyper

SEQ ID NO: 288564 - DNA, 436 bp, Homo sapiens; identical to SEQ ID NO: 8456
  chr11:125932556-125932992
  hyper

SEQ ID NO: 288565 - DNA, 127 bp, Homo sapiens; identical to SEQ ID NO: 202781
  chr11:125933201-125933328
  hyper

SEQ ID NO: 288566 - DNA, 207 bp, Homo sapiens; identical to SEQ ID NO: 236017
  chr11:126081471-126081678
  hyper

SEQ ID NO: 288567 - DNA, 70 bp, Homo sapiens
  chr11:126138755-126138825
  hyper
ccgcttcctgctgcgccaagcgcgggacacgtcacaccagtggccccggaaatcggctcaaccgtacttc

SEQ ID NO: 288568 - DNA, 156 bp, Homo sapiens; identical to SEQ ID NO: 121658
  chr11:126138866-126139022
  hyper

SEQ ID NO: 288569 - DNA, 53 bp, Homo sapiens; identical to SEQ ID NO: 236019
  chr11:126152945-126152998
  hyper

SEQ ID NO: 288570 - DNA, 691 bp, Homo sapiens
  chr11:126225361-126226052
  hyper
tctggcacccacggcgcccctgcttgcctctgtccgggtctcggaggcgcgaacaccatcccaagcctgcgaccgcgcggcatcacccccgcccttccccctcctccaccccgccctttctacccctcccgggagctcctgggagtcgggccgccgtgtgcgcaagcgtgtccagccccttccccgcccccaacccgggcccgggtccccgcctcccctgcaggcggactcgcccgctcccaggccggacccgcgcccgggacagggacccggccgagtcgagccgtcgcgccagcgctgcgccgccggtcggtgcgcctagcggatcggagctgcgcgcggaaccgtgctgccccgccccgctccacccgtgagggtgagtacgcggcggcggtgcgcgggggcccgcggggcggggcggggcggggagccgcggggtcctcggccgcctgaccccagccggcgccgcgcctcccggagggggtcgggccctgcacgtgggcgcagcgcgggtcggggtggggctgccacagccctgcggagctgctttccggggtccctttccctggaccagattttcgcgggaagccggatcctctccgttcccttggagtgagcaagcgggacagttctgcggaaagtttccgcccccaatcccccagccctgcgcccggactgaagcggcggcccc

SEQ ID NO: 288571 - DNA, 43 bp, Homo sapiens
  chr11:126870751-126870794
  hyper
ctcctttcactgaagctgaggcgaggggagagggaggggagac

SEQ ID NO: 288572 - DNA, 138 bp, Homo sapiens
  chr11:128391755-128391893
  hyper
ccccggcctctggccgagagcttgggtgggggcctcggccgtcgccactcacccggggaggggaaaagctccagatcgactttttccgtcttgatgatggtgagagtcggcttgagatcgacggccgccttcatggtg

SEQ ID NO: 288573 - DNA, 637 bp, Homo sapiens; identical to SEQ ID NO: 202784
  chr11:128392116-128392753
  hyper

SEQ ID NO: 288574 - DNA, 126 bp, Homo sapiens; identical to SEQ ID NO: 236023
  chr11:128418568-128418694
  hyper

SEQ ID NO: 288575 - DNA, 148 bp, Homo sapiens; identical to SEQ ID NO: 202785
  chr11:128562615-128562763
  hyper

SEQ ID NO: 288576 - DNA, 776 bp, Homo sapiens; identical to SEQ ID NO: 236028
  chr11:128760450-128761226
  hyper

SEQ ID NO: 288577 - DNA, 541 bp, Homo sapiens; identical to SEQ ID NO: 202786
  chr11:129148499-129149040
  hyper

SEQ ID NO: 288578 - DNA, 835 bp, Homo sapiens; identical to SEQ ID NO: 49138
  chr11:129149096-129149931
  hyper

SEQ ID NO: 288579 - DNA, 161 bp, Homo sapiens; identical to SEQ ID NO: 202788
  chr11:129234231-129234392
  hyper

SEQ ID NO: 288580 - DNA, 570 bp, Homo sapiens
  chr11:129245103-129245673
  hyper
tcttacgctcggagcgcgcaggctcagcgcgggctgcgagactgcgagtggagggcttgggaagccgcggtcttcgggaaaccgtccacgcggggaaggagaaaggcacggtgggtcctcgggggcactggctctgtggcccgaagtcccgggagcctagtgaggactagacttctttctagtaagagacctgaacgtgccctcccgctgggctgcggacactgggagccgggccggcgggtggcaggacaggcagtaaggtgctcatggggaacactgccccggggagctaccggcctgggccttggccgcgggctggggcggtgcgcgctccccgcaccgcgcgcacactcctgcacacacacctggagcgcgtcccgggggggagggggaggagagccaaaacgagcgtcttaaaatagagagccaggcagaggagcgcgagacaccagagcgggaggcagcgactgagagccgccgggcactaggcgcgcaggtcggcgccggagtggcacgggcgggcgggggcggggtgggcgcggacgcccctcagcacacactccgcacccg

SEQ ID NO: 288581 - DNA, 111 bp, Homo sapiens
  chr11:129245959-129246070
  hyper
ctcgcccggccagctcaaagcagccaggcggcgctacaagactttcatgatcgacgagatcctctccaaggagacctgcgattactttgagaaactttccctctactccgt

SEQ ID NO: 288582 - DNA, 334 bp, Homo sapiens
  chr11:129246129-129246463
  hyper
gctaggggataagtggggttcggtagctttcacgtccgtgtaggtggcctgtgctttgcgatccgagggcgagaggaagggttaagttaagggattcttttcctgcgcctcagcaagcggtgggcattgcaaaggcatctgcgacgtggccgggaaggaccacgcaaggtgtggatggcacgagtggaaataaaggcggcagggccttaggagtgggctgctcgcgcaacgcctgattgtcctgctcggaggagaacgcttcctcgtttcctgctgaaagttcaaacacttgagcaggttcagcgtctaaatcgttgtttcaggaagtggtggt

SEQ ID NO: 288583 - DNA, 226 bp, Homo sapiens
  chr11:129685680-129685906
  hyper
ggagcggggcggggcgcagcggggcggggcgggcctggagctgcacctgcttctgggcggacgcacttggcgcgcggcgcgggctgcagacggctgcgaggcgctgggcacaggtcagacgtccgtacccgcagggggctcgaacctggaggagggctcgaagggagagggggccccgccaaggagcggggctgtgatggagaggaggttccgactcgcaggggac

SEQ ID NO: 288584 - DNA, 286 bp, Homo sapiens
  chr11:129685938-129686224
  hyper
tctgggacaggggtgaaggctgcgctaggggaggacgggaggggatggagggccctggtgtcgcggaagcccagctggggccccctccgggctgcggaaccggtgcgcacactactcccaccgcccccgagtgcctctgtccggctggccgcggccctggaacgaatattgctcagtcccccgcgagtcaggtctgccgcgttgcccggtgaggggaaggtgtgaagccccgggcctccgtctgcccggtgagtccggggacgcgcgcccccggggatgccatctg

SEQ ID NO: 288585 - DNA, 216 bp, Homo sapiens; identical to SEQ ID NO: 202789
  chr11:129765560-129765776
  hyper

SEQ ID NO: 288586 - DNA, 266 bp, Homo sapiens; identical to SEQ ID NO: 236037
  chr11:129793271-129793537
  hyper

SEQ ID NO: 288587 - DNA, 41 bp, Homo sapiens; identical to SEQ ID NO: 236038
  chr11:129872812-129872853
  hyper

SEQ ID NO: 288588 - DNA, 238 bp, Homo sapiens; identical to SEQ ID NO: 224248
  chr11:129939594-129939832
  hyper

SEQ ID NO: 288589 - DNA, 171 bp, Homo sapiens; identical to SEQ ID NO: 202790
  chr11:130029947-130030118
  hyper

SEQ ID NO: 288590 - DNA, 53 bp, Homo sapiens; identical to SEQ ID NO: 224249
  chr11:130083121-130083174
  hyper

SEQ ID NO: 288591 - DNA, 263 bp, Homo sapiens; identical to SEQ ID NO: 236040
  chr11:130183474-130183737
  hyper

SEQ ID NO: 288592 - DNA, 288 bp, Homo sapiens
  chr11:130298420-130298708
  hyper
ggcccgcgtgcgcccgtcctccgcccctgcccgcgccagccccgcgcagccgcctcctgcctcctccccaccccgggaagcaccgagtgggctgccgagcccttcttatttatacttccttcccggcttgacataagaggtttatttttgatctctcactattcccgtttcccctcccctgggatcagagagagaaactgaaaagagggagagagagtggagaaaaaaaaattgggatgaaatgcaaaaccaatcaggcagcgagacccgtccgccacccgcccccct

SEQ ID NO: 288593 - DNA, 359 bp, Homo sapiens
  chr11:130319158-130319517
  hyper
cctgcgacgctgcttctattctggggacgtgaacgccgagccggactcgttcgctgctgtgagcctgtgcggggggctccgcggagcctttggctaccgaggcgccgagtatgtcattagcccgctgcccaatgctagcgcgccggcggcgcagcgcaacagccagggcgcacaccttctccagcgccggggtgttccgggcgggccttccggagaccccacctctcgctgcggggtggcctcgggctggaaccccgccatcctacgggccctggacccttacaagccgcggcgggcgggcttcggggagagtcgtagccggcgcaggtctgggcgcgccaagcgtttcgtgtctatcc

SEQ ID NO: 288594 - DNA, 124 bp, Homo sapiens; identical to SEQ ID NO: 202793
  chr11:130319633-130319757
  hyper

SEQ ID NO: 288595 - DNA, 563 bp, Homo sapiens; identical to SEQ ID NO: 236044
  chr11:130786091-130786654
  hyper

SEQ ID NO: 288596 - DNA, 200 bp, Homo sapiens; identical to SEQ ID NO: 202795
  chr11:131056756-131056956
  hyper

SEQ ID NO: 288597 - DNA, 173 bp, Homo sapiens; identical to SEQ ID NO: 202796
  chr11:131564788-131564961
  hyper

SEQ ID NO: 288598 - DNA, 33 bp, Homo sapiens
  chr11:131565073-131565106
  hyper
aatctctgtgacgagataggcactgggtttgta

SEQ ID NO: 288599 - DNA, 237 bp, Homo sapiens
  chr11:131781335-131781572
  hyper
gtgcggctgccggagttcggggaagttgtggctgtcgagaatgggggtctgtgggtacctgttcctgccctggaagtgcctcgtggtcgtgtctctcaggctgctgttccttgtacccacaggagtgcccgtgcgcagcggagatgccaccttccccaaagctatggacaacgtgacggtccggcagggggagagcgccaccctcaggtagggagctgacattgttctgcgaactga

SEQ ID NO: 288600 - DNA, 172 bp, Homo sapiens
  chr11:132813317-132813489
  hyper
tctgcctctctcttcgagacgctactttaagattcagttgggcacgttctgcagagctctggcatcaaaagtttataacccaaagaagaaggcaagtgtctctgacatacaggagctgtcataaaaagctgcggcttcaaggagaggaggaaatggtttattagatcacaca

SEQ ID NO: 288601 - DNA, 166 bp, Homo sapiens
  chr11:132814249-132814415
  hyper
cggtgtgcgtgtccatcgcgctgcgaacggctccccgcccagccaagtccagccctgacggcgcgctgtcctgggcccgcgcagaggtggagtgcacccacctccgaggacccacctcggaaacgcccgtgcccctccactggacgcctgtccccaaagtggcaaa

SEQ ID NO: 288602 - DNA, 157 bp, Homo sapiens
  chr11:132864209-132864366
  hyper
acttttgatacaggaccacacaaaagactaaacctaccaggtcagcgtgagtacacggaggaggagcctaggagagaagagggaagggctggggaaaaggggcggcctcaccggaggagctgctgggggctcgccgtgcaggcgcctcgtgggtacc

SEQ ID NO: 288603 - DNA, 66 bp, Homo sapiens
  chr11:132934608-132934674
  hyper
gggaaggctgaggtctcctctgcctccgcagccacacggcccggcgcggggcgggccggcagtaaa

SEQ ID NO: 288604 - DNA, 90 bp, Homo sapiens; identical to SEQ ID NO: 202798
  chr11:133402290-133402380
  hyper

SEQ ID NO: 288605 - DNA, 157 bp, Homo sapiens; identical to SEQ ID NO: 236052
  chr11:133797628-133797785
  hyper

SEQ ID NO: 288606 - DNA, 31 bp, Homo sapiens; identical to SEQ ID NO: 202799
  chr11:133827440-133827471
  hyper

SEQ ID NO: 288607 - DNA, 279 bp, Homo sapiens; identical to SEQ ID NO: 202800
  chr11:133920426-133920705
  hyper

SEQ ID NO: 288608 - DNA, 36 bp, Homo sapiens; identical to SEQ ID NO: 202801
  chr11:133938736-133938772
  hyper

SEQ ID NO: 288609 - DNA, 175 bp, Homo sapiens; identical to SEQ ID NO: 202802
  chr11:133939437-133939612
  hyper

SEQ ID NO: 288610 - DNA, 212 bp, Homo sapiens; identical to SEQ ID NO: 236057
  chr11:134093743-134093955
  hyper

SEQ ID NO: 288611 - DNA, 36 bp, Homo sapiens; identical to SEQ ID NO: 236058
  chr11:134094348-134094384
  hyper

SEQ ID NO: 288612 - DNA, 60 bp, Homo sapiens; identical to SEQ ID NO: 202803
  chr11:134094606-134094666
  hyper

SEQ ID NO: 288613 - DNA, 232 bp, Homo sapiens; identical to SEQ ID NO: 236060
  chr11:134123196-134123428
  hyper

SEQ ID NO: 288614 - DNA, 241 bp, Homo sapiens; identical to SEQ ID NO: 202804
  chr11:134201549-134201790
  hyper

SEQ ID NO: 288615 - DNA, 244 bp, Homo sapiens; identical to SEQ ID NO: 202805
  chr11:134202154-134202398
  hyper

SEQ ID NO: 288616 - DNA, 237 bp, Homo sapiens; identical to SEQ ID NO: 236064
  chr11:134230255-134230492
  hyper

SEQ ID NO: 288617 - DNA, 70 bp, Homo sapiens
  chr11:134281810-134281880
  hyper
ccccggggactgtcgggctccgggcccccgggggccacttcatagccgcggggtccgcgcgcccgcccgc

SEQ ID NO: 288618 - DNA, 205 bp, Homo sapiens
  chr11:134282101-134282306
  hyper
ggtggcggcggatgcgccggtgccgccgcggctctgccggcgcctcccgccccgcccccacccgctctccgcccccgccccgcccccgccccgagcccgcgccagcgccggcgggacccgagctgctaatggtcggtaccaacctcgccagcctaggcgggggcgcgaggagggaggccggcgaggggacccccccccgggattg

SEQ ID NO: 288619 - DNA, 514 bp, Homo sapiens
  chr11:134282336-134282850
  hyper
cccggcaccgtcccccgcggaggcggctcccgcttcaggcggcggagcaggggtggcgggcaggggccgagcgcacccccagatctcggctctcgagagttaaagctcggcccccgcctgcacccccattccaccccgcctccatcctggctgctcctggcgcccagcttggcagcctctctcaaagggtgattgtttccggccgggctgctgcaggagggcggggggcggcgctctgggaccgagaggccgagctgggaagccggtgggggatgcggctccttccttggctccaggcaccccggatgggaggtggccggtgggggcggacggtgccgtgccggggtacggggtctgctgccccgtggaagggcacctcgagccgccgcgcgtcagcctcaccccagcctccccttccgggccggtgcacccggcgttccggagagaggcccgggaggcctgcgtgggcggacgggcgcggggaggccgggggcagcgggatctccaggagttt

SEQ ID NO: 288620 - DNA, 72 bp, Homo sapiens; identical to SEQ ID NO: 202806
  chr12:568903-568975
  hyper

SEQ ID NO: 288621 - DNA, 305 bp, Homo sapiens
  chr12:569665-569970
  hyper
gaactggtggcgtcggcccaggtcggcgggaaccccctgaaccggagtaagtagcacccaggggaggcgaagggcgcgggggtgggcggcggcggcggctcctgcgttggggggacccgcctctcatcccatcctcagacccgatttcccacccatttctccctcaggtgcccggcgtcgccccgcgcgtactcggggagagctgcgggcgggggaagccgcggggccgagcgcagaattcccgagcccgggcctgcccgccggccacgtgggtccggggcaccctgggggctcctcgcgtctcc

SEQ ID NO: 288622 - DNA, 209 bp, Homo sapiens; identical to SEQ ID NO: 202807
  chr12:694940-695149
  hyper

SEQ ID NO: 288623 - DNA, 153 bp, Homo sapiens
  chr12:708874-709027
  hyper
tcccagcaagtctggaagtgcggaggccctcccagccccacgactgcgcttggcctactgcctctcctcctcagcttggttggacctgcaccccagcacgcccggggggctcacattcctccccgagatgccgccactgattcaccatggtgc

SEQ ID NO: 288624 - DNA, 196 bp, Homo sapiens
  chr12:709062-709258
  hyper
ccgtgcactcaggatacctctgatgccaaggtttgagcagctctggcccagcccgcctccttctgcccagctgccagggccccgatactcagccctcccctgcctggtttctgagtctgaggaatgtgcccagaagcaaattggcgctgagattcacatttactcctttactccttccgaacgcctgagccactgg

SEQ ID NO: 288625 - DNA, 127 bp, Homo sapiens; identical to SEQ ID NO: 202808
  chr12:1059361-1059488
  hyper

SEQ ID NO: 288626 - DNA, 215 bp, Homo sapiens; identical to SEQ ID NO: 236071
  chr12:1099809-1100024
  hyper

SEQ ID NO: 288627 - DNA, 239 bp, Homo sapiens
  chr12:1639655-1639894
  hyper
gcctccctccggatcggccgcaggctgcgcgcccccgaccgtccccgcccgctgagttcgggggtccccggcgcggagcagggagccctccgggcggcaggagggcgcgcagactccgagcgccggggctgcctggccgggctccggtggacacctcggaggctgccccagcatcggggggggggcccgagacgcctcggcgggaccccgggagccgagcacgcccgcccgcgccgcca

SEQ ID NO: 288628 - DNA, 344 bp, Homo sapiens
  chr12:1639977-1640321
  hyper
ccgggccccgccggccgccccctgcgcccccgcgggccgcgcctcgcccgccgacccagcgcagccgggcgcaggaagagccgggccgggccgagcggcgcccggagcccgcgggcctgacacgcggcgggacatgcaggtaagcgccggccctcgcccccggggacggccccgccgccgccgccgccgccccggctgccgaacctcgcgcggctcctccgccttcccggccccgcggccgcgctgggtgtccgccgggtgggtctgcgcgccgcgggcgtcgggtcggggcgggccggggtcaggtcgggggaagggagtcgccccgggccggggcggcgaac

SEQ ID NO: 288629 - DNA, 287 bp, Homo sapiens; identical to SEQ ID NO: 202812
  chr12:1640476-1640763
  hyper

SEQ ID NO: 288630 - DNA, 542 bp, Homo sapiens
  chr12:1739047-1739589
  hyper
ccgggctgggggccggctcacttccgagctggctctgcatgacaaaggggaaggagcaagtgtcttctttgatctgccccctgccggccccacacacctgcctgttggtgcccccgccccagccgaggcttcgagaaggaaaatcaaaagggggcttggggaagggctgtgtcccagctctcctggaccctgctcgggccactgtcctctcctggcggccccaggacaaaaatacttcccgggctgatgacccgaagcacccgccgccccctcccggggagcctggggacgccgacgcgcgagagtggcgcagtgagccggggcgcgcggggctgcgctcgtcaggtccggggccccggggaggccgctgggggcgcgggtcacgcccagacgggggccccggaggaccgcgggggagccgcaggggccgtgtgtcccgaggcgcaggctcgctctagcagcactgacctgctgcgggtcccagggcctggggacaggggctctcgggggcggatagaggaacaggcgtgggttacagcagg

SEQ ID NO: 288631 - DNA, 68 bp, Homo sapiens
  chr12:1739775-1739843
  hyper
ccgcctagggaggcaccacctcagccgccagagctttccgggcgggcggttcgcggcgtggcttgtac

SEQ ID NO: 288632 - DNA, 67 bp, Homo sapiens
  chr12:1762094-1762161
  hyper
tcacggccttaggtcggagcaaatgatcagcctggaacccactccagactggtctgcagttctgcat

SEQ ID NO: 288633 - DNA, 290 bp, Homo sapiens; identical to SEQ ID NO: 236077
  chr12:1799861-1800151
  hyper

SEQ ID NO: 288634 - DNA, 149 bp, Homo sapiens; identical to SEQ ID NO: 202814
  chr12:1905621-1905770
  hyper

SEQ ID NO: 288635 - DNA, 204 bp, Homo sapiens; identical to SEQ ID NO: 202815
  chr12:1905826-1906030
  hyper

SEQ ID NO: 288636 - DNA, 114 bp, Homo sapiens; identical to SEQ ID NO: 202816
  chr12:1906322-1906436
  hyper

SEQ ID NO: 288637 - DNA, 96 bp, Homo sapiens; identical to SEQ ID NO: 121773
  chr12:1906476-1906572
  hyper

SEQ ID NO: 288638 - DNA, 285 bp, Homo sapiens
  chr12:2113105-2113390
  hyper
tgctctactttctcgagcacatcggtcttccggccataaggtatcaggtccttcctttccttcggctcttatggtgccgtacccgatcggtctggtctcccagcgttgggtacgttagagatttaagtcttttccccaactccaggtagctccacagatccgccttccttcccccaaacccccgagaccccatctccacaacttcggcctcagtccccagatccacccacttccagggcgtcaacgtctcctccccctcaccgggtcctcaagtcctgagtctga

SEQ ID NO: 288639 - DNA, 457 bp, Homo sapiens; identical to SEQ ID NO: 121775
  chr12:2113432-2113889
  hyper

SEQ ID NO: 288640 - DNA, 246 bp, Homo sapiens; identical to SEQ ID NO: 202818
  chr12:2144046-2144292
  hyper

SEQ ID NO: 288641 - DNA, 64 bp, Homo sapiens; identical to SEQ ID NO: 202819
  chr12:2144442-2144506
  hyper

SEQ ID NO: 288642 - DNA, 103 bp, Homo sapiens
  chr12:2161357-2161460
  hyper
tcctagtagaacacgtgctcggctgcctccaaggaattattaaacctgggtctaggaatctgttcagacatctgggcaccgctgcctcgcctaccaggctccg

SEQ ID NO: 288643 - DNA, 73 bp, Homo sapiens; identical to SEQ ID NO: 202820
  chr12:2163510-2163583
  hyper

SEQ ID NO: 288644 - DNA, 286 bp, Homo sapiens; identical to SEQ ID NO: 202821
  chr12:2692228-2692514
  hyper

SEQ ID NO: 288645 - DNA, 278 bp, Homo sapiens; identical to SEQ ID NO: 202822
  chr12:2800167-2800445
  hyper

SEQ ID NO: 288646 - DNA, 238 bp, Homo sapiens; identical to SEQ ID NO: 202823
  chr12:2800603-2800841
  hyper

SEQ ID NO: 288647 - DNA, 259 bp, Homo sapiens; identical to SEQ ID NO: 49213
  chr12:2801019-2801278
  hyper

SEQ ID NO: 288648 - DNA, 32 bp, Homo sapiens; identical to SEQ ID NO: 236084
  chr12:2904079-2904111
  hyper

SEQ ID NO: 288649 - DNA, 260 bp, Homo sapiens; identical to SEQ ID NO: 236085
  chr12:2999768-3000028
  hyper

SEQ ID NO: 288650 - DNA, 170 bp, Homo sapiens; identical to SEQ ID NO: 236086
  chr12:3053922-3054092
  hyper

SEQ ID NO: 288651 - DNA, 257 bp, Homo sapiens; identical to SEQ ID NO: 202825
  chr12:3067872-3068129
  hyper

SEQ ID NO: 288652 - DNA, 52 bp, Homo sapiens; identical to SEQ ID NO: 236088
  chr12:3068385-3068437
  hyper

SEQ ID NO: 288653 - DNA, 678 bp, Homo sapiens; identical to SEQ ID NO: 202826
  chr12:3068770-3069448
  hyper

SEQ ID NO: 288654 - DNA, 224 bp, Homo sapiens
  chr12:3129381-3129605
  hyper
acgtccccgtctctccgggatgatgccatattgtaatagtggattcatctggttatttccccgactggaacagaagttgcttgagggcaggaacttaacagtgcctgttctggaagcctctcggtcctgcagggccccagctgccctccagaatccagtcttgctcggcggttccatgcagagtgctgagtggcccgagttgtaccaggcgagcccctccccac

SEQ ID NO: 288655 - DNA, 1058 bp, Homo sapiens
  chr12:3186012-3187070
  hyper
gcgctgtcagcatctcgcacagtccgcccgaaacaccagggaaggggttcgtaggtgtgggggtggggtggcgaggccaggcagcctggcgcgagggagagagccgaggcctgggccaggaaggcccttgggtgccgtgtgggcgcagagcccaggagagcgcactgccaggcccggacctccccgcccctaccccgggaagaggcccgttcgccgcagggggaaggcgggatcatagcacctcggaggagcggccggtccgggcatgcgggcggcggggcggggagggaggcttccggaaccccgagagagcacccgtgcctcgcgggccccgtgccccgtccccgggctccccttcctctaacgcaggggacccagcccggggcagtgccgggcactggcgctggcgccccgctcagccctgcgatccttctccgccccgcccctccccgctccgccccgcccctccccgctccgcccccgggccgccccgccccgcaggctcgccattcccgggcaggccccgccccctgtttccgctggcggcggcggcggcggcggtgccggagcgcgagcagagcggagacccccaggtcctgcgggcgcggtgagtgcggcccgggcggcgggcggcgaggcgggtctcgagagcgtgcggagtcgcgcggccttgagccggcgccgggcgggctgggcacccccaggccgagacccgagaagggggagcggccgggggcgcccacgggaggcagtgtgggcagggcggcggtgggacgagaggacgaggaacagagtaggcgccgtgcgggaagcgggccgggaaggggagggtgggtgcggggcccgggcaccgagcgaagtggggtcctccaggggatggctccgaggaagaccgtttcagaaagggagtaacccggggccggcaagggtttccgactgtgtgaccccgtgcaccgcttgggacagtccatacaaggaccccagagagggccagggggccttcgggcagggctgggatatggcctgcagccccccggcacccgcgaccgctccctggg

SEQ ID NO: 288656 - DNA, 234 bp, Homo sapiens; identical to SEQ ID NO: 202829
  chr12:3600534-3600768
  hyper

SEQ ID NO: 288657 - DNA, 44 bp, Homo sapiens
  chr12:3600982-3601026
  hyper
tctgccggcctcctcctgtgtgtgtgtgtgtgtgtgtgtgtgtg

SEQ ID NO: 288658 - DNA, 86 bp, Homo sapiens; identical to SEQ ID NO: 202830
  chr12:3601256-3601342
  hyper

SEQ ID NO: 288659 - DNA, 101 bp, Homo sapiens; identical to SEQ ID NO: 202831
  chr12:3601377-3601478
  hyper

SEQ ID NO: 288660 - DNA, 396 bp, Homo sapiens
  chr12:3601625-3602021
  hyper
atgggtctgcagccacccgtcccgcaagggcttttgaggaggtcgctctagctccgcaaattgtgttctcggcccccgccttcggcagcctttttctctactctccagctggccctgagccgcagagagccctgctgggctttgcgtcccgagactcgaggctgtgatccctcgcctccctctgaccccgctgtcattacaacaaccggactattccgtaggctctgggcacctgtagtcacgaaggggatcagcgtgggcagcccccttaccttcctggagaaacggtgcgccgagatgggggcggagtggggcatgtgtgtgaagatcatcccttactcagtggcaggaaaaagacacagagagcaaactcccaggctctattaatagctgggt

SEQ ID NO: 288661 - DNA, 42 bp, Homo sapiens; identical to SEQ ID NO: 202833
  chr12:3602961-3603003
  hyper

SEQ ID NO: 288662 - DNA, 70 bp, Homo sapiens
  chr12:3862298-3862368
  hyper
cctcagcggagctgaacgggaagcggcgccccctggacgccctccgggacgtgcgcgcgccaagcggtgg

SEQ ID NO: 288663 - DNA, 156 bp, Homo sapiens; identical to SEQ ID NO: 202834
  chr12:4140249-4140405
  hyper

SEQ ID NO: 288664 - DNA, 145 bp, Homo sapiens; identical to SEQ ID NO: 202835
  chr12:4273726-4273871
  hyper

SEQ ID NO: 288665 - DNA, 105 bp, Homo sapiens; identical to SEQ ID NO: 202836
  chr12:4377789-4377894
  hyper

SEQ ID NO: 288666 - DNA, 244 bp, Homo sapiens; identical to SEQ ID NO: 202837
  chr12:4378558-4378802
  hyper

SEQ ID NO: 288667 - DNA, 246 bp, Homo sapiens; identical to SEQ ID NO: 202838
  chr12:4379920-4380166
  hyper

SEQ ID NO: 288668 - DNA, 284 bp, Homo sapiens; identical to SEQ ID NO: 202839
  chr12:4380196-4380480
  hyper

SEQ ID NO: 288669 - DNA, 400 bp, Homo sapiens
  chr12:4381033-4381433
  hyper
tcccctttctttacatataggagatgggatactcattcccgctgctattgataaggtcggaggcggccgggcctctccccagctttcgcccgccccagcgcccgctctccctccgccctcccttggcttccttttgatgtagtggggaacgcgtcctactaaaaaaaaaaaaaaaaaaaaaaaaaaaaagtaatctgcccggtaacaatcagcgcgcagtagcaggagccccagagctattggctatgcaaatagagggaggggagacggcgccccaaactcttcctcacccttttaaagcgatatcccctcctttcccccccaccaccccttccgccccaccctcgtttaaagaggctggctccggggcctgagttaatcgcttgcacctctagtttat

SEQ ID NO: 288670 - DNA, 181 bp, Homo sapiens
  chr12:4382439-4382620
  hyper
ctaaaatcaccccctcccttatttttcacttaagggacctatttctaaattgtctgaggtcaccccatcttcagataatctaccctacattcctggatcttaaatacaagggcaggaggattaggatccgttttgaagaagccaaagttggagggtcgtattttggcgtgctacacctaca

SEQ ID NO: 288671 - DNA, 65 bp, Homo sapiens; identical to SEQ ID NO: 202842
  chr12:4382900-4382965
  hyper

SEQ ID NO: 288672 - DNA, 209 bp, Homo sapiens; identical to SEQ ID NO: 202843
  chr12:4382999-4383208
  hyper

SEQ ID NO: 288673 - DNA, 254 bp, Homo sapiens; identical to SEQ ID NO: 202844
  chr12:4384059-4384313
  hyper

SEQ ID NO: 288674 - DNA, 100 bp, Homo sapiens; identical to SEQ ID NO: 202845
  chr12:4384533-4384633
  hyper

SEQ ID NO: 288675 - DNA, 112 bp, Homo sapiens; identical to SEQ ID NO: 202846
  chr12:4647831-4647943
  hyper

SEQ ID NO: 288676 - DNA, 275 bp, Homo sapiens; identical to SEQ ID NO: 236105
  chr12:4758236-4758511
  hyper

SEQ ID NO: 288677 - DNA, 125 bp, Homo sapiens; identical to SEQ ID NO: 202847
  chr12:4918558-4918683
  hyper

SEQ ID NO: 288678 - DNA, 176 bp, Homo sapiens; identical to SEQ ID NO: 202848
  chr12:4918713-4918889
  hyper

SEQ ID NO: 288679 - DNA, 583 bp, Homo sapiens; identical to SEQ ID NO: 202849
  chr12:4920225-4920808
  hyper

SEQ ID NO: 288680 - DNA, 171 bp, Homo sapiens; identical to SEQ ID NO: 236106
  chr12:4967026-4967197
  hyper

SEQ ID NO: 288681 - DNA, 179 bp, Homo sapiens
  chr12:5020472-5020651
  hyper
cacccctggtccctggctgcttcccaccccgggctctctcctggcctcccacccccgcgcccggcttccaccatgacggtgatgtctggggagaacgtggacgaggcttcggccgccccgggccacccccaggatggcagctacccccggcaggccgaccacgacgaccacgagtgctg

SEQ ID NO: 288682 - DNA, 54 bp, Homo sapiens; identical to SEQ ID NO: 202850
  chr12:5131854-5131908
  hyper

SEQ ID NO: 288683 - DNA, 97 bp, Homo sapiens
  chr12:5152818-5152915
  hyper
aatttcagcgctgtcggtacaacctgttcctccatcctccccactccttccctccctccgctgggctgcacccttctcagcccctcctttcccttgc

SEQ ID NO: 288684 - DNA, 285 bp, Homo sapiens; identical to SEQ ID NO: 236111
  chr12:5540359-5540644
  hyper

SEQ ID NO: 288685 - DNA, 322 bp, Homo sapiens; identical to SEQ ID NO: 202852
  chr12:5541693-5542015
  hyper

SEQ ID NO: 288686 - DNA, 57 bp, Homo sapiens; identical to SEQ ID NO: 202853
  chr12:5542974-5543031
  hyper

SEQ ID NO: 288687 - DNA, 823 bp, Homo sapiens; identical to SEQ ID NO: 202854
  chr12:6309398-6310221
  hyper

SEQ ID NO: 288688 - DNA, 184 bp, Homo sapiens; identical to SEQ ID NO: 202855
  chr12:6387950-6388134
  hyper

SEQ ID NO: 288689 - DNA, 525 bp, Homo sapiens; identical to SEQ ID NO: 121841
  chr12:6419603-6420128
  hyper

SEQ ID NO: 288690 - DNA, 116 bp, Homo sapiens
  chr12:6445038-6445154
  hyper
ccacacacagaaacacaacagcagcccccgcaggtggaggcgtgtgcccctgctcagaggacaacaaccttcccctgcccgcaccagccaacaccgtgccacctctgctgagaaca

SEQ ID NO: 288691 - DNA, 354 bp, Homo sapiens; identical to SEQ ID NO: 202857
  chr12:6449620-6449974
  hyper

SEQ ID NO: 288692 - DNA, 315 bp, Homo sapiens; identical to SEQ ID NO: 236120
  chr12:6450830-6451145
  hyper

SEQ ID NO: 288693 - DNA, 241 bp, Homo sapiens; identical to SEQ ID NO: 202859
  chr12:6472613-6472854
  hyper

SEQ ID NO: 288694 - DNA, 94 bp, Homo sapiens; identical to SEQ ID NO: 202860
  chr12:6472900-6472994
  hyper

SEQ ID NO: 288695 - DNA, 403 bp, Homo sapiens
  chr12:6492950-6493353
  hyper
ccttgcagtccccgcgccctgccctctccatgactgcccgtcctgggcccctcgctttccagatcccgcacccagctgtcccttgcgctctctggaactccctctgctctccctgcgaggcttgtccaagggctgaccccgggcccgccgcccttccctcggctgggccagggctgtccgcagtccgctctcccgatcgggcttccgaagaagggaggaggccggttccggccccgcggccctcacgtgctttcccggccgcccctcccgccccgcatcgaggcagacaagcctgttcctcttccctgggctgcgattgcgacaggccggcctggctcccagcgctccctgtccccgccccgcggccagctcgctccactcccacttcctgagctccgccatg

SEQ ID NO: 288696 - DNA, 33 bp, Homo sapiens; identical to SEQ ID NO: 202862
  chr12:6493416-6493449
  hyper

SEQ ID NO: 288697 - DNA, 117 bp, Homo sapiens; identical to SEQ ID NO: 121849
  chr12:6493504-6493621
  hyper

SEQ ID NO: 288698 - DNA, 216 bp, Homo sapiens; identical to SEQ ID NO: 202863
  chr12:6560780-6560996
  hyper

SEQ ID NO: 288699 - DNA, 224 bp, Homo sapiens; identical to SEQ ID NO: 236123
  chr12:6561338-6561562
  hyper

SEQ ID NO: 288700 - DNA, 233 bp, Homo sapiens; identical to SEQ ID NO: 236124
  chr12:6579634-6579867
  hyper

SEQ ID NO: 288701 - DNA, 259 bp, Homo sapiens; identical to SEQ ID NO: 236126
  chr12:6772303-6772562
  hyper

SEQ ID NO: 288702 - DNA, 339 bp, Homo sapiens; identical to SEQ ID NO: 236127
  chr12:6798812-6799151
  hyper

SEQ ID NO: 288703 - DNA, 106 bp, Homo sapiens
  chr12:6809093-6809199
  hyper
gcgaaccagtgaagcggagaagggctcccagggcgcatctgtggccagctgactctaggactatcgcccctccgcctgtgcatccccacccccagccagcgccaac

SEQ ID NO: 288704 - DNA, 124 bp, Homo sapiens
  chr12:6809692-6809816
  hyper
ggaggggcaggaggcgcagggcgcggagccgggaagggcagggccgggctccccgcgggtgggggcgtgggggtccctctcactcacctgcatgcttggcgcggcggcgcgacgactgcgggcg

SEQ ID NO: 288705 - DNA, 341 bp, Homo sapiens; identical to SEQ ID NO: 236128
  chr12:6832842-6833183
  hyper

SEQ ID NO: 288706 - DNA, 54 bp, Homo sapiens; identical to SEQ ID NO: 236129
  chr12:6862687-6862741
  hyper

SEQ ID NO: 288707 - DNA, 549 bp, Homo sapiens; identical to SEQ ID NO: 236130
  chr12:7260779-7261328
  hyper

SEQ ID NO: 288708 - DNA, 505 bp, Homo sapiens; identical to SEQ ID NO: 236131
  chr12:7282302-7282807
  hyper

SEQ ID NO: 288709 - DNA, 45 bp, Homo sapiens; identical to SEQ ID NO: 236132
  chr12:7342757-7342802
  hyper

SEQ ID NO: 288710 - DNA, 145 bp, Homo sapiens; identical to SEQ ID NO: 236134
  chr12:8113445-8113590
  hyper

SEQ ID NO: 288711 - DNA, 69 bp, Homo sapiens
  chr12:8123528-8123597
  hyper
ttttcaggaatcggcgtcttctctggaaagccgccaaaggttttaagagggtttcgccttaagggcaga

SEQ ID NO: 288712 - DNA, 247 bp, Homo sapiens; identical to SEQ ID NO: 236135
  chr12:8185699-8185946
  hyper

SEQ ID NO: 288713 - DNA, 771 bp, Homo sapiens
  chr12:8849730-8850501
  hyper
caacaaaggctcagaggaagcgtagcaactaacttgtccaaggtttacgccggtttctagggggcagagctggcgctatccaccccgcctgtatctccaaacccgcttcagccaggaaatttatcatgtggttttaaatttgcctctcaatatacagaggtactgtctttactccagtcccggataaagaccttctaggtatgaatgatctttgtctccatatctttgcctaccggagggaggaaccaccgtaagcggagactccgggcggcggccggcggaagggctgggcgggaggcgtcgggatgccggcaggaccctgcgcccgagggggtagggggctcgtgtcggggttccaggcgcagattgatggggcctaagcagggaatgtgagggcggggagggcgtacaacggaagggactaatctcgcggtttcgagttgggagcaaacctcgccccccaccccccccatccgtttccctttctcagtgaagacggtttgggggcgggtggggaggcgcgtcctcggagcgccctcgcgctcccttttcgctccccgcgcgcgatccatcgcctctcttcccccgaggccagcgatggctcgggtgcgggcgaggagctgggagggcggctctcgacgcaggtgtcagatccgctcggcagtgctcggcgcgctggcccggcccccagctcctccggccgccgccccccgcccgccgcgccgcggcgccaggagggcggggccggggcgcgcgccgctcctcagcaag

SEQ ID NO: 288714 - DNA, 310 bp, Homo sapiens; identical to SEQ ID NO: 202867
  chr12:8850744-8851054
  hyper

SEQ ID NO: 288715 - DNA, 119 bp, Homo sapiens; identical to SEQ ID NO: 202868
  chr12:8851275-8851394
  hyper

SEQ ID NO: 288716 - DNA, 292 bp, Homo sapiens; identical to SEQ ID NO: 224290
  chr12:9216953-9217245
  hyper

SEQ ID NO: 288717 - DNA, 309 bp, Homo sapiens
  chr12:10306047-10306356
  hyper
cgagctcgcaacaacgtcctgtggtgtggcccagcgcggggagctgaccccaccagctccgctctcaagccttcggagagtcctctccagtcactatcgtcattcccgcatttcctttgctaggctgtccgggctgggcagctccctcaggcggacacccatggctggcagaccttccgcgcctgcccctaatctgggcatatcactccctcggttttctgagactcgggactccttgcccgctggagcgcaggccatgaatctgggtcccgcactgcggcgctgcacgccgcagcccagggctttggc

SEQ ID NO: 288718 - DNA, 99 bp, Homo sapiens; identical to SEQ ID NO: 236138
  chr12:10516946-10517045
  hyper

SEQ ID NO: 288719 - DNA, 159 bp, Homo sapiens; identical to SEQ ID NO: 236139
  chr12:10517105-10517264
  hyper

SEQ ID NO: 288720 - DNA, 155 bp, Homo sapiens; identical to SEQ ID NO: 236140
  chr12:10517555-10517710
  hyper

SEQ ID NO: 288721 - DNA, 234 bp, Homo sapiens; identical to SEQ ID NO: 236141
  chr12:10766266-10766500
  hyper

SEQ ID NO: 288722 - DNA, 290 bp, Homo sapiens; identical to SEQ ID NO: 236142
  chr12:10826739-10827029
  hyper

SEQ ID NO: 288723 - DNA, 903 bp, Homo sapiens; identical to SEQ ID NO: 236143
  chr12:10875354-10876257
  hyper

SEQ ID NO: 288724 - DNA, 44 bp, Homo sapiens; identical to SEQ ID NO: 202870
  chr12:11801643-11801687
  hyper

SEQ ID NO: 288725 - DNA, 427 bp, Homo sapiens; identical to SEQ ID NO: 202871
  chr12:11802787-11803214
  hyper

SEQ ID NO: 288726 - DNA, 198 bp, Homo sapiens; identical to SEQ ID NO: 202872
  chr12:11905383-11905581
  hyper

SEQ ID NO: 288727 - DNA, 165 bp, Homo sapiens; identical to SEQ ID NO: 202873
  chr12:11992073-11992238
  hyper

SEQ ID NO: 288728 - DNA, 382 bp, Homo sapiens; identical to SEQ ID NO: 202874
  chr12:12006113-12006495
  hyper

SEQ ID NO: 288729 - DNA, 546 bp, Homo sapiens; identical to SEQ ID NO: 202875
  chr12:12022357-12022903
  hyper

SEQ ID NO: 288730 - DNA, 147 bp, Homo sapiens; identical to SEQ ID NO: 202876
  chr12:12037378-12037525
  hyper

SEQ ID NO: 288731 - DNA, 101 bp, Homo sapiens; identical to SEQ ID NO: 202877
  chr12:12038859-12038960
  hyper

SEQ ID NO: 288732 - DNA, 2801 bp, Homo sapiens; identical to SEQ ID NO: 202878
  chr12:12043874-12046675
  hyper

SEQ ID NO: 288733 - DNA, 1481 bp, Homo sapiens; identical to SEQ ID NO: 202879
  chr12:12046855-12048336
  hyper

SEQ ID NO: 288734 - DNA, 444 bp, Homo sapiens
  chr12:12419476-12419920
  hyper
ccccctccccacgaccaggcctctccccgctcctctccccttctcccttcctccgtccctcccctccccctagacacatacaacaaggccacctccccccgaaccccaccaactttccagtgcccccactcttcccacctctcaggagcacacagaagctgcaggccaggaggctcctcaggacggcccccatcttcccttctcgcgttctcttctctcaccggcgaggggtggccagaagtgggggaggcgaggagccggggcggccgccgcagcggcagggctgcacgctcatacttcccagcttcccagcgagagaagaaagaaaggggcacgtcaaggttccgcgcgcgccgccgccgccctctctaccgcgccgctcggccccgggctcgcgcgacgccagcgtctgcttccatcccgccgcctcctcccccggcgccc

SEQ ID NO: 288735 - DNA, 625 bp, Homo sapiens; identical to SEQ ID NO: 121923
  chr12:12419964-12420589
  hyper

SEQ ID NO: 288736 - DNA, 586 bp, Homo sapiens
  chr12:12502885-12503471
  hyper
gtcctttggatgctcgggtgtgggtgaaggagcctcggcccctggaaaggaggggaccgactctctccgcaggtagcgacgtcgcctgcggccggtcgggggtgggtattggggagacccctttacctggcgtcgagaggaccccggcgcccctgctgccatccaggtgcgaggacagctctgtcgcgcccgcgggaaggaccggcgaatccgcgcgggggtctcggcgaggaccgcagcggatgctccgcagctcccgcaccggcctggcgggttttgtggttagcaagttcctgcttccgtcgcagcgacggcaagtttgccgcgggggaagggcacgttcctgccctgcaacccggagctgcttcccggcaacattagcgcgtccctccccgcggaggctccgggctcccggccccagcgctgagccccgcagggaggtggctccccccaccgccccgcgctcccccccagctcagccacaccgctgaccccgggctgggcgcgctgcgagggggagtgcgtgcctccctgctggtggcccgagggtctgcaggtgagccttgcctcgcggcccgcgcaagtt

SEQ ID NO: 288737 - DNA, 206 bp, Homo sapiens; identical to SEQ ID NO: 236147
  chr12:12510050-12510256
  hyper

SEQ ID NO: 288738 - DNA, 219 bp, Homo sapiens; identical to SEQ ID NO: 236148
  chr12:12715424-12715643
  hyper

SEQ ID NO: 288739 - DNA, 292 bp, Homo sapiens; identical to SEQ ID NO: 236149
  chr12:12764617-12764909
  hyper

SEQ ID NO: 288740 - DNA, 59 bp, Homo sapiens
  chr12:12869129-12869188
  hyper
tggaatactagtatcggacgttaggacatggttgtggtgttttaaaaatcatttcatca

SEQ ID NO: 288741 - DNA, 189 bp, Homo sapiens
  chr12:12869412-12869601
  hyper
agccaatgtccatggccttaactgtgcttgggaaggaagatcctgggccaggggtgtaccctcgtttttcaaaactaaacgtgtctgagacagctacaaagtttattaagggacttgagagactagagttttttgttttttttttttaatcttgagttcctttcttattttcattgagggagagcttga

SEQ ID NO: 288742 - DNA, 421 bp, Homo sapiens; identical to SEQ ID NO: 236150
  chr12:12871738-12872159
  hyper

SEQ ID NO: 288743 - DNA, 103 bp, Homo sapiens; identical to SEQ ID NO: 236151
  chr12:12876593-12876696
  hyper

SEQ ID NO: 288744 - DNA, 286 bp, Homo sapiens
  chr12:12877458-12877744
  hyper
cgtgggcttcacaggcgaggagcggggcgagaggcctctcaggccggggtgcgcccaccgccccggcctcagggagcgactttcccggaggccgggggacgctgccttcgccatttcatcttcatcatcacagcgcccacacttgctcttctctcaagctctttgcacagaaaaagtgattctaaatctcctctaggatctcctgtctggtgttcagagtatgaatttctttttaaaacttgctgtgtctttcacctgggccacaccctacgcccacccaccccct

SEQ ID NO: 288745 - DNA, 410 bp, Homo sapiens; identical to SEQ ID NO: 236153
  chr12:12939505-12939915
  hyper

SEQ ID NO: 288746 - DNA, 443 bp, Homo sapiens; identical to SEQ ID NO: 236154
  chr12:13044060-13044503
  hyper

SEQ ID NO: 288747 - DNA, 71 bp, Homo sapiens
  chr12:13069193-13069264
  hyper
ctcctttgacctaaacgggcgatgatgaaataaaactcaacagcctttctctcatcttgcattgtgagatg

SEQ ID NO: 288748 - DNA, 108 bp, Homo sapiens; identical to SEQ ID NO: 121940
  chr12:13069316-13069424
  hyper

SEQ ID NO: 288749 - DNA, 447 bp, Homo sapiens; identical to SEQ ID NO: 202885
  chr12:13152998-13153445
  hyper

SEQ ID NO: 288750 - DNA, 93 bp, Homo sapiens; identical to SEQ ID NO: 224308
  chr12:13154241-13154334
  hyper

SEQ ID NO: 288751 - DNA, 31 bp, Homo sapiens; identical to SEQ ID NO: 202886
  chr12:13197534-13197565
  hyper

SEQ ID NO: 288752 - DNA, 244 bp, Homo sapiens; identical to SEQ ID NO: 236157
  chr12:13254493-13254737
  hyper

SEQ ID NO: 288753 - DNA, 43 bp, Homo sapiens; identical to SEQ ID NO: 236161
  chr12:14518512-14518555
  hyper

SEQ ID NO: 288754 - DNA, 257 bp, Homo sapiens; identical to SEQ ID NO: 236162
  chr12:14520248-14520505
  hyper

SEQ ID NO: 288755 - DNA, 71 bp, Homo sapiens
  chr12:14720395-14720466
  hyper
gagttcacccaggaaccagacgcccgctggacgtcaactcggccggacgcggggcacgggcgctaacaggc

SEQ ID NO: 288756 - DNA, 313 bp, Homo sapiens
  chr12:14720507-14720820
  hyper
ctgctcacctgcaggtttcggcggctccgcggtgactaacaacagcggcagcagcagcagcagcagcagaagcggtggcggctgtggcagccccgggcgcccgcccggaccgccgcgggtcatcgctccacggccgcgaccttcctctgcgggatcaggcggccgcggtggcccgcggtggcagaagttgcaagagaggctcctggcctactcaggggcgccgcctctccgaggtggggcgtcctcaactttcctctttcttgagcccggcctgctccgggctctgaggggcgaggacgcttcacgtggtggc

SEQ ID NO: 288757 - DNA, 55 bp, Homo sapiens; identical to SEQ ID NO: 202888
  chr12:14923205-14923260
  hyper

SEQ ID NO: 288758 - DNA, 150 bp, Homo sapiens; identical to SEQ ID NO: 236165
  chr12:14924062-14924212
  hyper

SEQ ID NO: 288759 - DNA, 121 bp, Homo sapiens; identical to SEQ ID NO: 202889
  chr12:14928211-14928332
  hyper

SEQ ID NO: 288760 - DNA, 90 bp, Homo sapiens; identical to SEQ ID NO: 202890
  chr12:15374053-15374143
  hyper

SEQ ID NO: 288761 - DNA, 41 bp, Homo sapiens; identical to SEQ ID NO: 202891
  chr12:15475222-15475263
  hyper

SEQ ID NO: 288762 - DNA, 354 bp, Homo sapiens; identical to SEQ ID NO: 202892
  chr12:15475336-15475690
  hyper

SEQ ID NO: 288763 - DNA, 60 bp, Homo sapiens; identical to SEQ ID NO: 202893
  chr12:15475691-15475751
  hyper

SEQ ID NO: 288764 - DNA, 1112 bp, Homo sapiens; identical to SEQ ID NO: 202894
  chr12:15941609-15942721
  hyper

SEQ ID NO: 288765 - DNA, 140 bp, Homo sapiens; identical to SEQ ID NO: 236170
  chr12:16064015-16064155
  hyper

SEQ ID NO: 288766 - DNA, 292 bp, Homo sapiens; identical to SEQ ID NO: 236171
  chr12:16064519-16064811
  hyper

SEQ ID NO: 288767 - DNA, 101 bp, Homo sapiens; identical to SEQ ID NO: 202895
  chr12:16500382-16500483
  hyper

SEQ ID NO: 288768 - DNA, 407 bp, Homo sapiens; identical to SEQ ID NO: 202896
  chr12:16500621-16501028
  hyper

SEQ ID NO: 288769 - DNA, 307 bp, Homo sapiens; identical to SEQ ID NO: 202897
  chr12:16758091-16758398
  hyper

SEQ ID NO: 288770 - DNA, 51 bp, Homo sapiens
  chr12:16758428-16758479
  hyper
attttgttattatggctgcgtggagagaggcagaagcgtcaacaaggacca

SEQ ID NO: 288771 - DNA, 883 bp, Homo sapiens
  chr12:16758732-16759615
  hyper
tccttccatcaacatcttccgcctgcatctatttcatgtctcatcataaaaataatgaagcctcacatgatttaaacaaaaccgtctcagtagagctgcagcccgagtgaaagttgcagtgcggagctgggttgcagctccagtttatgcctcattagcagaggttggggaagaaaaaaatacccacatccgcacacgcacgcgcgcacccgcagacacacacaccacaaataagccgacgcgtgtgtacacagttgctgcacttaccttctcaattaagcgatacagggggaggccgttcagtaagcacagtggctgctttgtagcgcttctccttgggaaaggtcaaaaagaagcattgtttgaaaaaaaaaaaaaagacgggggagggaatgtctatttttttttaagtttaaaataatgaggtcctcaaggatacgccaagcaatggtgttgaccgcatctgagccacaggtgtcctccttttaggcaactgcagtccgaggctgtctctctccgtcctggttcaagacaacttaccccagcagcgtgcgaggagccgagctgaaggaagctccggctctcagctgcaaaatgcaatcccttcccagccagacataatacagccaaagaaaaggtcactcagttattagtgagccggcggagcccaggcagcgcttgtcaagaccacagagaagcagctcccttccgatttaagactatttacctctcgcccccacccctcccctcttctttccttctctccctccctctctcgctggctccctcgctcgctctcgtgtgcctgttctgcagctcagtcaagtacagccgccctcggaaagtgcaaagcagccacgagacagatcgggctttgttgcta

SEQ ID NO: 288772 - DNA, 86 bp, Homo sapiens; identical to SEQ ID NO: 202899
  chr12:19282247-19282333
  hyper

SEQ ID NO: 288773 - DNA, 840 bp, Homo sapiens; identical to SEQ ID NO: 202900
  chr12:19282363-19283203
  hyper

SEQ ID NO: 288774 - DNA, 249 bp, Homo sapiens; identical to SEQ ID NO: 202901
  chr12:19283425-19283674
  hyper

SEQ ID NO: 288775 - DNA, 240 bp, Homo sapiens; identical to SEQ ID NO: 202902
  chr12:19283783-19284023
  hyper

SEQ ID NO: 288776 - DNA, 260 bp, Homo sapiens; identical to SEQ ID NO: 236178
  chr12:19593439-19593699
  hyper

SEQ ID NO: 288777 - DNA, 72 bp, Homo sapiens; identical to SEQ ID NO: 202903
  chr12:20521072-20521144
  hyper

SEQ ID NO: 288778 - DNA, 267 bp, Homo sapiens; identical to SEQ ID NO: 202904
  chr12:20521841-20522108
  hyper

SEQ ID NO: 288779 - DNA, 182 bp, Homo sapiens; identical to SEQ ID NO: 202905
  chr12:20522891-20523073
  hyper

SEQ ID NO: 288780 - DNA, 162 bp, Homo sapiens; identical to SEQ ID NO: 202906
  chr12:20523117-20523279
  hyper

SEQ ID NO: 288781 - DNA, 637 bp, Homo sapiens; identical to SEQ ID NO: 236180
  chr12:21590454-21591091
  hyper

SEQ ID NO: 288782 - DNA, 131 bp, Homo sapiens; identical to SEQ ID NO: 202908
  chr12:21681020-21681151
  hyper

SEQ ID NO: 288783 - DNA, 53 bp, Homo sapiens; identical to SEQ ID NO: 202909
  chr12:21927952-21928005
  hyper

SEQ ID NO: 288784 - DNA, 78 bp, Homo sapiens; identical to SEQ ID NO: 202910
  chr12:22095196-22095274
  hyper

SEQ ID NO: 288785 - DNA, 86 bp, Homo sapiens; identical to SEQ ID NO: 236185
  chr12:22199508-22199594
  hyper

SEQ ID NO: 288786 - DNA, 139 bp, Homo sapiens; identical to SEQ ID NO: 202911
  chr12:22488705-22488844
  hyper

SEQ ID NO: 288787 - DNA, 137 bp, Homo sapiens; identical to SEQ ID NO: 226549
  chr12:22529506-22529643
  hyper

SEQ ID NO: 288788 - DNA, 267 bp, Homo sapiens; identical to SEQ ID NO: 236188
  chr12:22778929-22779196
  hyper

SEQ ID NO: 288789 - DNA, 199 bp, Homo sapiens; identical to SEQ ID NO: 236189
  chr12:24103311-24103510
  hyper

SEQ ID NO: 288790 - DNA, 252 bp, Homo sapiens; identical to SEQ ID NO: 202912
  chr12:24715505-24715757
  hyper

SEQ ID NO: 288791 - DNA, 256 bp, Homo sapiens; identical to SEQ ID NO: 202913
  chr12:24716473-24716729
  hyper

SEQ ID NO: 288792 - DNA, 44 bp, Homo sapiens; identical to SEQ ID NO: 202914
  chr12:25102288-25102332
  hyper

SEQ ID NO: 288793 - DNA, 33 bp, Homo sapiens; identical to SEQ ID NO: 202915
  chr12:25347677-25347710
  hyper

SEQ ID NO: 288794 - DNA, 308 bp, Homo sapiens; identical to SEQ ID NO: 202916
  chr12:25347959-25348267
  hyper

SEQ ID NO: 288795 - DNA, 223 bp, Homo sapiens; identical to SEQ ID NO: 236199
  chr12:25348633-25348856
  hyper

SEQ ID NO: 288796 - DNA, 259 bp, Homo sapiens; identical to SEQ ID NO: 202917
  chr12:25404339-25404598
  hyper

SEQ ID NO: 288797 - DNA, 142 bp, Homo sapiens; identical to SEQ ID NO: 224326
  chr12:25538253-25538395
  hyper

SEQ ID NO: 288798 - DNA, 363 bp, Homo sapiens
  chr12:26111918-26112281
  hyper
agccggtgcggggcgcgcggcgcggggagcgccggggagtgccggggagtgcggcgcggggacgggcgctgggcggccgcggagctccgggtgccgccgcgtccccagcgccccggccggcccctctgggcggcctgcgggggcggcgcagttgcgaaactgagtaagtattaactttacttagcggcggcgatccgggctgcgccggggaccccgcccgtcccgcctgcagcctcggagctgccctccgcccggttgcccctctctccgcaccttgggtacctcgtccgttccgcccccaccctgccccgccgcgggctcccgctccctctgcgttcacctttcctggtgtgtcaccctttg

SEQ ID NO: 288799 - DNA, 495 bp, Homo sapiens; identical to SEQ ID NO: 122008
  chr12:26112305-26112800
  hyper

SEQ ID NO: 288800 - DNA, 232 bp, Homo sapiens; identical to SEQ ID NO: 236201
  chr12:26277911-26278143
  hyper

SEQ ID NO: 288801 - DNA, 448 bp, Homo sapiens; identical to SEQ ID NO: 202919
  chr12:26379638-26380086
  hyper

SEQ ID NO: 288802 - DNA, 88 bp, Homo sapiens; identical to SEQ ID NO: 202920
  chr12:26986791-26986879
  hyper

SEQ ID NO: 288803 - DNA, 46 bp, Homo sapiens; identical to SEQ ID NO: 202921
  chr12:27038033-27038079
  hyper

SEQ ID NO: 288804 - DNA, 136 bp, Homo sapiens; identical to SEQ ID NO: 236205
  chr12:27091342-27091478
  hyper

SEQ ID NO: 288805 - DNA, 163 bp, Homo sapiens; identical to SEQ ID NO: 236206
  chr12:27166929-27167092
  hyper

SEQ ID NO: 288806 - DNA, 278 bp, Homo sapiens; identical to SEQ ID NO: 236207
  chr12:27175266-27175544
  hyper

SEQ ID NO: 288807 - DNA, 93 bp, Homo sapiens; identical to SEQ ID NO: 236208
  chr12:27397408-27397501
  hyper

SEQ ID NO: 288808 - DNA, 106 bp, Homo sapiens
  chr12:27486689-27486795
  hyper
aaagccgtcagtggagttagcttgttcgattatgtatttctgtggtatttttgtgaatggagttggaagtttgcggtgctttttccttctcgctagtattcactgg

SEQ ID NO: 288809 - DNA, 115 bp, Homo sapiens
  chr12:28122526-28122641
  hyper
gcccgctctcaaaaagcctcttcaacatcaagggcatctcccaagttgaaaagaaaaaaaatttctctggagcctctcagcacttacttatttagcaaccggctactccaactgt

SEQ ID NO: 288810 - DNA, 178 bp, Homo sapiens
  chr12:28122887-28123065
  hyper
gaaccaggccctttcgttccagagccacttgtagcgaaacccacatatatatacatagctgtctgtctacctcctctggtgggctggttgcttccggaaagttgattccacacaccctgagaacaagtttcaagtgcgtgtgtcgtcgatcaggagggccaggtggcggcgagggcgg

SEQ ID NO: 288811 - DNA, 343 bp, Homo sapiens
  chr12:28123205-28123548
  hyper
ggagaagtgagctagtcgcaaagaggtggcgccctaggaacgcgcgcggggcgagcgagggcgcaggcgggctggcgggcgggcgcgcggggggcgggggcggcgacgggcggcccgaacgggccccgcgccgcccgagcgagtggaggggagccccgagccgggaatgagcggcgagcggcggagctcccccctcccgcgctgccgaccccggagctgtcaggagctctgccgagccccaccccggagcccgggccctgtcgcgccatccccgtgccgggggcgtgggcgcatccgcttgctccctccaggcccggccggctcctgccggcgcggcggatcc

SEQ ID NO: 288812 - DNA, 210 bp, Homo sapiens
  chr12:28123786-28123996
  hyper
ttcctccctggcccattcccgggatgaactgagtggggagcatcggctagagagagggagatcttttgcttagaagaacaaaaacagttccagatttcatatctaaattgcactttttgctgtttcagaactgctgggagacatctggagccggtcccaaaaaacccgcgcacaggagagatcccccttttgaattgcagagggggaccg

SEQ ID NO: 288813 - DNA, 91 bp, Homo sapiens; identical to SEQ ID NO: 202922
  chr12:28129084-28129175
  hyper

SEQ ID NO: 288814 - DNA, 203 bp, Homo sapiens
  chr12:29301531-29301734
  hyper
gggtcactgcagggcgcctccgcaatgtctttagcagatacaagagcatccctcccacgggatgtgcagtgtagtcaagctgagtaaactgggatttttggctgccttttctgctagggtgggtggggaaaggtatgtcccccaagcgttcagttcagactagaacctttgaatctctctcctgtctcggtctctccctccac

SEQ ID NO: 288815 - DNA, 670 bp, Homo sapiens
  chr12:29301986-29302656
  hyper
aacgaatggaagcgcggggcgggcctgcgcgcgcggccgccctgcccacgatgctgtcgcccccgcgacctgtagggccttcgctggcccctcaccctcctcccgccccgggctgaggctgccgccggtttcgcgcccagtgccgaggcagcggcggagccggggaaggtcggagggagggtggtttcctcccgccccacacccagtctccgagccggatatatagagtgtcacgtttgggagccgaaagactggagccgtttccttgtggctggagcgcttcccgtagcctcggggaaggagcaggatttagaggaccactagttggaccccatcctcgtgctggaggaacaggtattccagggtccccagccctggcgctcgcagagcccacgcgctccaaaagcagagaccggactgggggtggcccaggagggagggctcggctgggttcgcagggcggggcggttcccggcgggacctcgaggagggtgggtgtgaggccgggtgggaggagagaagcatttgcggaggctctgccccctgaagctgcccccggctgcaccccaatcgtcaccggccgtttacgcgcggttggcgtcggcggagcccgccaaggtggggcgcgcgggggttgcaaagggcagaaagccgggaaggacccagcaag

SEQ ID NO: 288816 - DNA, 85 bp, Homo sapiens
  chr12:29302688-29302773
  hyper
ggacccgggaagagaggcgcggggccgagtcccacccaggcctcctgggcccttggggctattcctggagagagcgcgaaaatgc

SEQ ID NO: 288817 - DNA, 121 bp, Homo sapiens; identical to SEQ ID NO: 202924
  chr12:29534144-29534265
  hyper

SEQ ID NO: 288818 - DNA, 157 bp, Homo sapiens
  chr12:29935682-29935839
  hyper
aagaaaaactatttcggctggggccccagggtccctggagaagcctaggctctgcgttacctctctctgcaccttctaaagtctagatccagagaagtctggcagattggagagcctctgggagcagccaagggtgcaaggcgggggctggggggct

SEQ ID NO: 288819 - DNA, 49 bp, Homo sapiens
  chr12:30353956-30354005
  hyper
cgtctcccctgcgccaatgctgttgttccgggtgctgaaaagccgggaa

SEQ ID NO: 288820 - DNA, 342 bp, Homo sapiens
  chr12:30354117-30354459
  hyper
tcctcagccccattttggggagaacgatgggggcgggggcgtgggggtgagcacagccgggcacccccgcacacccgcaggcgggaccccggggtgcccttgccctcctctcctgggcagccgcacgccgggatccccactccacctgcgcgcgaactttcgccatctgggactcaagcgcccgcggcttgagcgctgcggtaaacagaaggcacccgcgtgggttcccaagggtgtttgtgtgttgggtctgggggagcatgatcggggcattcgcagtggggaggaagaggtgctgctggccggggcgagctgcctgtgctaaggccgctccctgcaggg

SEQ ID NO: 288821 - DNA, 53 bp, Homo sapiens
  chr12:30948572-30948625
  hyper
cccacttgtctcgacgcaggggacgcccacttgtctgacgcaggggacgtggc

SEQ ID NO: 288822 - DNA, 307 bp, Homo sapiens; identical to SEQ ID NO: 202926
  chr12:30948670-30948977
  hyper

SEQ ID NO: 288823 - DNA, 962 bp, Homo sapiens; identical to SEQ ID NO: 122062
  chr12:30948988-30949950
  hyper

SEQ ID NO: 288824 - DNA, 35 bp, Homo sapiens; identical to SEQ ID NO: 202928
  chr12:31079223-31079258
  hyper

SEQ ID NO: 288825 - DNA, 251 bp, Homo sapiens; identical to SEQ ID NO: 236221
  chr12:31479082-31479333
  hyper

SEQ ID NO: 288826 - DNA, 138 bp, Homo sapiens; identical to SEQ ID NO: 236222
  chr12:32112315-32112453
  hyper

SEQ ID NO: 288827 - DNA, 105 bp, Homo sapiens; identical to SEQ ID NO: 236223
  chr12:32831955-32832060
  hyper

SEQ ID NO: 288828 - DNA, 80 bp, Homo sapiens; identical to SEQ ID NO: 202930
  chr12:32908757-32908837
  hyper

SEQ ID NO: 288829 - DNA, 33 bp, Homo sapiens; identical to SEQ ID NO: 202931
  chr12:33048899-33048932
  hyper

SEQ ID NO: 288830 - DNA, 188 bp, Homo sapiens
  chr12:33049138-33049326
  hyper
accagtgaggggcgcggaccggcggagtagaaaaagaaaggggtgaaatcttgaagtgagttagttaacattgatagatatgtacaatatttaatatacataggtacctatatgacaaagctgagtaataggttatggaaaagagtgctttccacaagcaagtcggtcataccgaagacggcgagcaa

SEQ ID NO: 288831 - DNA, 234 bp, Homo sapiens; identical to SEQ ID NO: 202933
  chr12:33049390-33049624
  hyper

SEQ ID NO: 288832 - DNA, 349 bp, Homo sapiens; identical to SEQ ID NO: 202934
  chr12:33049652-33050001
  hyper

SEQ ID NO: 288833 - DNA, 90 bp, Homo sapiens; identical to SEQ ID NO: 202935
  chr12:33050245-33050335
  hyper

SEQ ID NO: 288834 - DNA, 173 bp, Homo sapiens
  chr12:33591575-33591748
  hyper
tggatgtctgagagcgtgcgtgtgctagggattttaaacgtctcccctctcttccacttcttcgatatgtgctctgagctttaggtgtcgcctcacaaatgggatcaataatccttgttttaccaactttgtcatgaaaccctagaaaatcatatatattaaaagggctttag

SEQ ID NO: 288835 - DNA, 136 bp, Homo sapiens; identical to SEQ ID NO: 202937
  chr12:33592092-33592228
  hyper

SEQ ID NO: 288836 - DNA, 59 bp, Homo sapiens; identical to SEQ ID NO: 202938
  chr12:33592320-33592379
  hyper

SEQ ID NO: 288837 - DNA, 115 bp, Homo sapiens; identical to SEQ ID NO: 202939
  chr12:33592401-33592516
  hyper

SEQ ID NO: 288838 - DNA, 71 bp, Homo sapiens; identical to SEQ ID NO: 202940
  chr12:34260770-34260841
  hyper

SEQ ID NO: 288839 - DNA, 157 bp, Homo sapiens; identical to SEQ ID NO: 8678
  chr12:34260905-34261062
  hyper

SEQ ID NO: 288840 - DNA, 43 bp, Homo sapiens; identical to SEQ ID NO: 236232
  chr12:34261353-34261396
  hyper

SEQ ID NO: 288841 - DNA, 40 bp, Homo sapiens; identical to SEQ ID NO: 202942
  chr12:39298516-39298556
  hyper

SEQ ID NO: 288842 - DNA, 221 bp, Homo sapiens; identical to SEQ ID NO: 202943
  chr12:39298687-39298908
  hyper

SEQ ID NO: 288843 - DNA, 322 bp, Homo sapiens
  chr12:39300008-39300330
  hyper
ggtcccagcttctggactgcccactgtcggccacttgagagttggggacggtggggcattgtgacgctctccaaccttggaacacggtggcaaagtggccgatcaatatatgggacaagtgggggcgggggggcggactctaaggtggaaaaaacaatactacttgggatttaaggaagcaatctggattctgtctccccttggttcttcggagcttagaggtctaacggcgacattcctcctacagtaagggctcttctgggtccctcgtttccaaaggcatgaaagttctgacctgaaaatgggggccggggagggtgat

SEQ ID NO: 288844 - DNA, 406 bp, Homo sapiens
  chr12:39300405-39300811
  hyper
aggagtcagagtgagcgctgcgtttgggaaactgcattccagggcagcaagactggtgccaagacggagtcgtggcaaaagcatccggaggtagacgaggcgcccctccactgcagggacctttgttccccgcgccttccctcctgcctcacccgagcgcctgcgggtcccgggagctcgccaccaggcggcgacggagaacaggatgcggcgcagctggaaggcagagggtggagagggggcgggtgtccgtccgatttaacgctccaagcacggagtttccagctggttgggctaagtctgggaggagcagtttttgcggtggaggacttgccttgcgttgtaacattttaatccacttgcagcctcctgcctagagaatctatagaggcgggtgagagtgtgt

SEQ ID NO: 288845 - DNA, 166 bp, Homo sapiens; identical to SEQ ID NO: 236235
  chr12:39836134-39836300
  hyper

SEQ ID NO: 288846 - DNA, 327 bp, Homo sapiens; identical to SEQ ID NO: 202944
  chr12:39837348-39837675
  hyper

SEQ ID NO: 288847 - DNA, 91 bp, Homo sapiens; identical to SEQ ID NO: 202945
  chr12:40618249-40618340
  hyper

SEQ ID NO: 288848 - DNA, 43 bp, Homo sapiens; identical to SEQ ID NO: 202946
  chr12:40619048-40619091
  hyper

SEQ ID NO: 288849 - DNA, 67 bp, Homo sapiens; identical to SEQ ID NO: 202947
  chr12:41086115-41086182
  hyper

SEQ ID NO: 288850 - DNA, 210 bp, Homo sapiens
  chr12:41086454-41086664
  hyper
ttgcttcccttcccccagccccgcccagccctcgtcacccccaaatctcctgtggtccctgcagctctcgccgtgcggcgcgggaaggactggggcggaggtggctggggtgcggggaagcaggggtgcgggatgccggagccctggggtgccgggcaaggcaggacggcagtgccctagaagagggctccgagctcggggtctgtgtct

SEQ ID NO: 288851 - DNA, 86 bp, Homo sapiens; identical to SEQ ID NO: 202949
  chr12:41087106-41087192
  hyper

SEQ ID NO: 288852 - DNA, 60 bp, Homo sapiens; identical to SEQ ID NO: 202950
  chr12:41582147-41582207
  hyper

SEQ ID NO: 288853 - DNA, 53 bp, Homo sapiens; identical to SEQ ID NO: 236240
  chr12:42719560-42719613
  hyper

SEQ ID NO: 288854 - DNA, 121 bp, Homo sapiens
  chr12:42982745-42982866
  hyper
agcaaacaccatcgcggggcagggggttggggagagtggtgggagttgattcgcctctgccaaaaagccaccagcccctttccccagcgctagaggagagaatcggtaccctccctccgga

SEQ ID NO: 288855 - DNA, 61 bp, Homo sapiens
  chr12:42982950-42983011
  hyper
cgggctacagaacctgtttccacgccggagaaaaccaagggaagagttggttgtgatgcag

SEQ ID NO: 288856 - DNA, 384 bp, Homo sapiens
  chr12:42983874-42984258
  hyper
gcccccgattataagcctttttttttttttttttttaaccaacaatcccgatggactgaaacacaggaagagtgaagggacggggtggggggtgggggagagacaaacccaatttcctctgatcaaacgatttgggtaggggtgcctatttgagttccttctccttcggggggtgtgtgaagggggcagttaattaaacacttagattccttccggcgcgccttgccgagctggggacccgtttggactcgatcctgtctcgtgtaatcccacaggctggtctgagtctctgccccggaaccggaggagtgatctttcagagcaagaagccaaagttcagcctctagtccgttcccttccccgcctcgacggccctggtcgtct

SEQ ID NO: 288857 - DNA, 68 bp, Homo sapiens
  chr12:43944720-43944788
  hyper
gcataagctgacgacggccttgtaatcctcctgtgagttgacctggccgcggtagaagcagtggcgca

SEQ ID NO: 288858 - DNA, 120 bp, Homo sapiens; identical to SEQ ID NO: 236243
  chr12:44200419-44200539
  hyper

SEQ ID NO: 288859 - DNA, 292 bp, Homo sapiens
  chr12:45270086-45270378
  hyper
ggcagagacaatggagaaagctccgggagacgcgcggagagactgctcctccggggagggaggggcgggccgggggaggcggggtaaggaggagggaggggccgccgagggcgaggccggcgctcagcgtcggtctcccgcacggtctcctggatgccaaacccggtctagggagcccaggagccgttgcagcctcagctcttctccctccctctctcgatgacccgggcaatgccaacctcctttcgggattgaaagctctaaatccaaggtgctaagttgatgggcggtc

SEQ ID NO: 288860 - DNA, 165 bp, Homo sapiens; identical to SEQ ID NO: 236248
  chr12:45609639-45609804
  hyper

SEQ ID NO: 288861 - DNA, 150 bp, Homo sapiens; identical to SEQ ID NO: 236249
  chr12:46120764-46120914
  hyper

SEQ ID NO: 288862 - DNA, 130 bp, Homo sapiens; identical to SEQ ID NO: 236250
  chr12:46123555-46123685
  hyper

SEQ ID NO: 288863 - DNA, 75 bp, Homo sapiens; identical to SEQ ID NO: 202952
  chr12:46663347-46663422
  hyper

SEQ ID NO: 288864 - DNA, 348 bp, Homo sapiens; identical to SEQ ID NO: 202953
  chr12:46766925-46767273
  hyper

SEQ ID NO: 288865 - DNA, 211 bp, Homo sapiens; identical to SEQ ID NO: 236254
  chr12:47473961-47474172
  hyper

SEQ ID NO: 288866 - DNA, 225 bp, Homo sapiens
  chr12:48099380-48099605
  hyper
cccgctgtcccggcgaacaccgcacacccacgccgcaagggggcgggccccacctcggtctttgcgggagggcggctctgccttcccgagcactgcaaaatcgcagcagggtggagggtccgcctgcaaagcagagcgcgcaggcccgggttgcgggggcgagcccctccgggaacgcgcgacccgagacgccgctgccctggacaccgacgcgccgcctcaacg

SEQ ID NO: 288867 - DNA, 117 bp, Homo sapiens
  chr12:48099674-48099791
  hyper
cggccaccccaaggatctcctacgctgctccgggcagcgagaaccgcaacgcccgctcacctgaccaggccgtaacccgccgcactgccaccccgtcagccccgcagcgactcacgc

SEQ ID NO: 288868 - DNA, 75 bp, Homo sapiens; identical to SEQ ID NO: 49480
  chr12:48099829-48099904
  hyper

SEQ ID NO: 288869 - DNA, 192 bp, Homo sapiens
  chr12:48299194-48299386
  hyper
ggccaggacttcgtcgtccgcgggacgctggggggcgcctgccgactggcaccggcggctagctccgcacgaatgggaaatcccgggctccgctcgccaacctgttactgctgcagaacgccaggaagctcagcctgatcccacagattagggtaaaatatcccggggggccgaagtggaaaccggagttgc

SEQ ID NO: 288870 - DNA, 32 bp, Homo sapiens
  chr12:48299387-48299419
  hyper
tcattgctcccacccgatatcaccttggcagc

SEQ ID NO: 288871 - DNA, 49 bp, Homo sapiens
  chr12:48299465-48299514
  hyper
ggagctgagtctcagcttccctggtccctggtcccgagttccgccttcc

SEQ ID NO: 288872 - DNA, 48 bp, Homo sapiens; identical to SEQ ID NO: 236257
  chr12:48395457-48395505
  hyper

SEQ ID NO: 288873 - DNA, 162 bp, Homo sapiens
  chr12:48396586-48396748
  hyper
gcttagcgcactaccgggtgacccggccagagtctcctgctcccggctcctcgcagctgcgccgcaggctccagccctgcccccgctgcgctaatgaccggaaagcccgcctgagcccgccgccttccacgctatccctggaaacagcctggtggcaggaga

SEQ ID NO: 288874 - DNA, 60 bp, Homo sapiens; identical to SEQ ID NO: 202955
  chr12:48397086-48397146
  hyper

SEQ ID NO: 288875 - DNA, 190 bp, Homo sapiens
  chr12:48398744-48398934
  hyper
acagggaggagcccacagagattcagagtcctaaatcttggagacaggctagctgagccagatctgaagggttaccccgacctatcttttagcccttccctgcagtacctggtccccagactcccacctggacgttcacagcgactgccctccacccctcccccatccagctctgcgttgaaggcttcct

SEQ ID NO: 288876 - DNA, 267 bp, Homo sapiens; identical to SEQ ID NO: 236260
  chr12:48551342-48551609
  hyper

SEQ ID NO: 288877 - DNA, 493 bp, Homo sapiens; identical to SEQ ID NO: 202958
  chr12:48576976-48577469
  hyper

SEQ ID NO: 288878 - DNA, 956 bp, Homo sapiens; identical to SEQ ID NO: 236264
  chr12:48591592-48592548
  hyper

SEQ ID NO: 288879 - DNA, 214 bp, Homo sapiens
  chr12:48690460-48690674
  hyper
tccaggacacaggacgccttgagactacatttcccacaggccacagcccagcctcccgtcttctaacagtcttcctagaaaggtgcgcatgttccgaccattagcacacggctggtgcgctcggtgcaggctatcggagcccgggacagggccgatccagccaggcttcagggtgcgggaaacgggtgcgccatgagatagaagctttctgctt

SEQ ID NO: 288880 - DNA, 335 bp, Homo sapiens; identical to SEQ ID NO: 202960
  chr12:49182447-49182782
  hyper

SEQ ID NO: 288881 - DNA, 326 bp, Homo sapiens
  chr12:49183004-49183330
  hyper
agcggggtaggggcggaggaggccaaataatgggacccctccctccgcgcgccccctcctctcctccggccgcttcctcccccagtcctgggaagacaagcagctactgttctgggatcaagaccccgcggggaggggacctcgcagcccggtccccttcccttcaccccggccgcctcctccggcattcctctcccgccctcaccccgggggtccccgagcgcgcccgcaaacccacccctcacggctacatcccccgccccgcccaccgagggtcgccttccttcctgtcagggtcccaggggttgggccggcgccccgcgccc

SEQ ID NO: 288882 - DNA, 101 bp, Homo sapiens; identical to SEQ ID NO: 202962
  chr12:49259401-49259502
  hyper

SEQ ID NO: 288883 - DNA, 119 bp, Homo sapiens; identical to SEQ ID NO: 236268
  chr12:49284755-49284874
  hyper

SEQ ID NO: 288884 - DNA, 81 bp, Homo sapiens
  chr12:49297935-49298016
  hyper
gagctcagcctcactgatagccggggatctctcctgttcgagggctgagatctccggtcccacaaccgcccacaaccaggg

SEQ ID NO: 288885 - DNA, 481 bp, Homo sapiens; identical to SEQ ID NO: 202963
  chr12:49351242-49351723
  hyper

SEQ ID NO: 288886 - DNA, 60 bp, Homo sapiens; identical to SEQ ID NO: 202964
  chr12:49364178-49364238
  hyper

SEQ ID NO: 288887 - DNA, 527 bp, Homo sapiens
  chr12:49371614-49372141
  hyper
ggtttctctccaccgctaggctccttttggttagctcacccccacaactcatccccgggatttccctgaccacagccgcactcacgcccccgtctcccctttttccttctctgtccagccatcgggggttcctgggcggttaagcatctccccggagtcgctgcccagaaccacagctttccttccgacactcaggatgggggagagaggggacgtcggaggggcccggggtgacgtcgaggggacaaccccaccgcgggcggcgaggcgggctgggcccctggcgggctctccccgcagcacactctcgccgcgccccctggcggatgctagtcctcgacgggctccggacgctcagctgagtgaggcgggcgcgcgtgggagggtgtcccaaggggaggggtccgcggccagtgcaggcccggaggcgggggccaccgggcagggggcgggggtgagccccgacggccaacccgtcagctctcggctcagacgggcgggaaccacagccccgctcgctgcccatt

SEQ ID NO: 288888 - DNA, 76 bp, Homo sapiens
  chr12:49372236-49372312
  hyper
cggtgccgcccgccgtggccgcctcagcccaccagccgggaccgcgagccatgctgtccgccgcccgcccccaggg

SEQ ID NO: 288889 - DNA, 41 bp, Homo sapiens; identical to SEQ ID NO: 202966
  chr12:49375529-49375570
  hyper

SEQ ID NO: 288890 - DNA, 60 bp, Homo sapiens; identical to SEQ ID NO: 202967
  chr12:49392537-49392597
  hyper

SEQ ID NO: 288891 - DNA, 306 bp, Homo sapiens; identical to SEQ ID NO: 202968
  chr12:49392636-49392942
  hyper

SEQ ID NO: 288892 - DNA, 271 bp, Homo sapiens; identical to SEQ ID NO: 236274
  chr12:49393152-49393423
  hyper

SEQ ID NO: 288893 - DNA, 48 bp, Homo sapiens
  chr12:49484227-49484275
  hyper
cccggaaagcagccgcccgcccggaccgccagtgagttatctgcaggg

SEQ ID NO: 288894 - DNA, 169 bp, Homo sapiens
  chr12:49485547-49485716
  hyper
ttgagcctggcccccgccccaggcaccggctcccctccctccgcctgattcatcttttgtttcattgccttccctggcaccgggcatcgcttccttccttccttcctcctcctcctttgggcccttagcattaaccccttcgtgctctgggtgccccccagagaggtgc

SEQ ID NO: 288895 - DNA, 272 bp, Homo sapiens
  chr12:49485914-49486186
  hyper
aaagggcagaaagccgcgcccccaatccctgctccgtccgggtaggtcccctccccccgcgcgtccagtcttcccagttccagctaaggctctgccagtccggagagcccctatctctcccatctctgctctagatgcagcccagaagggcgtgggagtagcacctgagaataacggtctccttgtgcggatctggggagccccctgcagggtgagagcggagaagaggaaaagaagctgcggctggaagcctgcacctgggggagtgagac

SEQ ID NO: 288896 - DNA, 91 bp, Homo sapiens
  chr12:49487980-49488071
  hyper
ggccctccttacctcggtcatcaggcggtcggctccactgttctcctcatccttgaagatgatgtcggggttgtagttgggcacgaggtcc

SEQ ID NO: 288897 - DNA, 78 bp, Homo sapiens; identical to SEQ ID NO: 122207
  chr12:49488131-49488209
  hyper

SEQ ID NO: 288898 - DNA, 48 bp, Homo sapiens; identical to SEQ ID NO: 202970
  chr12:49524764-49524812
  hyper

SEQ ID NO: 288899 - DNA, 97 bp, Homo sapiens; identical to SEQ ID NO: 236278
  chr12:49525460-49525557
  hyper

SEQ ID NO: 288900 - DNA, 411 bp, Homo sapiens; identical to SEQ ID NO: 236279
  chr12:49582693-49583104
  hyper

SEQ ID NO: 288901 - DNA, 559 bp, Homo sapiens; identical to SEQ ID NO: 202971
  chr12:49658689-49659248
  hyper

SEQ ID NO: 288902 - DNA, 66 bp, Homo sapiens
  chr12:49689031-49689097
  hyper
taccgccgtaccttcggtccaccgccctcactatcccccggggccttctcctactcgtccagctcc

SEQ ID NO: 288903 - DNA, 151 bp, Homo sapiens; identical to SEQ ID NO: 122218
  chr12:49689134-49689285
  hyper

SEQ ID NO: 288904 - DNA, 171 bp, Homo sapiens
  chr12:49690392-49690563
  hyper
cctggggatcaggacgatgctgggtagacgcagcccctccaccctagtctacaggtggttagactcccacccttgcgccacctggcggcgggcagcggggctgtacctccgaaacctggcctctggtctcgcgcccgcgggggcgcagggctgtacgccctgccctccctg

SEQ ID NO: 288905 - DNA, 382 bp, Homo sapiens
  chr12:49690601-49690983
  hyper
ctgtgcacgaactgcgtggcccgcgtggaatttgcgccgctgtccatcctctgcctgctcccggccgtaggagctgcgagacctgcaggtgagtgtggagagccagcaggtgcagcaggtggaggtggaagccacggtgaagcccgagctgacggcagcgctgagggacatccgcgcgcagtacgagagcatcgccgcgaagaacctgcaggaggcggaggagtggtacaagtccaaggtgcaagagccgggagggcctgcgaggcgggacgctggggtggtgtcgcgcgtcccagccgactaaagcctgggttacccccacttctcagtacgcggacctgtccgacgctgccaaccggaaccacgaggccctgcgccaggc

SEQ ID NO: 288906 - DNA, 340 bp, Homo sapiens
  chr12:49691092-49691432
  hyper
gacgatgaaatgttctgcaactggccccttccactctcctaccccagaacgaggcgctgctcaggcagttgagagagctggaggagcagttcgccctggaggcggggggctaccaggcgggcgctgcgcggctcgaggaggagctgcgacagctaaaagaggagatggcgcggcacctgagggagtaccaggagctcctcaacgtcaagatggccctggacatcgagatcgccacctaccgcaagctgctggagggcgaggagagccggtgagggtggagctgctggggcggggcagggcggggtcgggactgggccgggcagggcggggcctgggcagg

SEQ ID NO: 288907 - DNA, 66 bp, Homo sapiens; identical to SEQ ID NO: 236284
  chr12:49731138-49731204
  hyper

SEQ ID NO: 288908 - DNA, 144 bp, Homo sapiens; identical to SEQ ID NO: 202973
  chr12:49735822-49735966
  hyper

SEQ ID NO: 288909 - DNA, 709 bp, Homo sapiens
  chr12:49736083-49736792
  hyper
ataatcaccggccgcccgtcactcagccggccgcccagggagctcctgggcccggcccgggagagggcggggtgcggctgcagcctaggcgcccaggacagggcgagggcggacctgcggcaggagcgcctcctgcggggcagtggaggactgtggcctgaggcattggccgaagggtgggggattatggccccgggcactccccgaagggaaactggggctagcggcttggggcctcccagtggggaagagggaacaaaagctgcggagaccggaggcccggggtccagggcgccccctgctgggaagctgggaaccaagccttagaggtccggcaggtacagatggaaccaggcccagggcgacccctcctagggaaaccaagggtttctagcctggcgcgcctcctgccggctttgaatgacactgcgcttctatgcccgctccgttcagtgaaatccaaccaatccgcatccgctcaaaaaaggctccaagtcctggcgaacccgaggggagccgagagggagttcaaggagtccaggttttactgcagattctttggcgctagctcccagctgacaaatcaacatctcaatctgacaattagtggtcaagatgcggggtgaggggctcttacagccccggccgcttagccctcccggcgggaggcagaggggtgggcggtgctggcagtgatgaacgactccag

SEQ ID NO: 288910 - DNA, 350 bp, Homo sapiens
  chr12:49736828-49737178
  hyper
actgacaggcgggtggcgggccgggcgggctgcgagtggacgtgccgggaaagaggccagtagcaggaggggactaaggcaagcgtttaacagtcccactgctccatctgctcccggtccttcgccttgaccctgggacttgacttccttgagctcggcctcccagttgttggagctggccctggctgggaagcaagggcggggacctaagccctcttctggggttaggtgatttaaggtctgagatgtcaaggaagggtattaggcaggtctcaagactaggcgattcggcctgacctctgagagattgtgcgtgactgtgcactcagagatggcgtgtatgacaggga

SEQ ID NO: 288911 - DNA, 1824 bp, Homo sapiens; identical to SEQ ID NO: 236286
  chr12:49738836-49740660
  hyper

SEQ ID NO: 288912 - DNA, 197 bp, Homo sapiens; identical to SEQ ID NO: 236287
  chr12:49740982-49741179
  hyper

SEQ ID NO: 288913 - DNA, 125 bp, Homo sapiens; identical to SEQ ID NO: 236288
  chr12:49741513-49741638
  hyper

SEQ ID NO: 288914 - DNA, 301 bp, Homo sapiens; identical to SEQ ID NO: 202975
  chr12:49761541-49761842
  hyper

SEQ ID NO: 288915 - DNA, 460 bp, Homo sapiens
  chr12:49931603-49932063
  hyper
gatgctggtgactgtgagtgcgtctcgagggatgggggtgctgagcctaccgcttcgctcgttagggaacaaattgctgttttggccccggcggctcctctgggcgcgggcggcagccgcgctcgctggcaaatcgtgggagggaggaggagcggcgctggcaggcaagtccgggggaccgtcgcagcgcgggaggccaagaaaagacggccgccccgggcccggctccgccccgccgggaaggggctccctgcagccgccccagggcagcaccccgcgcggcgccgcgcggagctctccaggacgagctgcgtgaggcgcggggctcggccttcctcgctctcctggtgccaggacccgcacgcacaaggttcggaagttttttcgcagtgtctgacccctgccggtcccctgtatttaccacctgaccctctagcgcgcttaggagaggcaagaggtg

SEQ ID NO: 288916 - DNA, 92 bp, Homo sapiens; identical to SEQ ID NO: 224355
  chr12:49932286-49932378
  hyper

SEQ ID NO: 288917 - DNA, 233 bp, Homo sapiens
  chr12:49933026-49933259
  hyper
cccctcgcgcgccagcgtccggcgcgaccccggatcccggtctgcgcattgccccccgacggctgcgctagggagcgcggggcccggcggggggcggccgagctgggcgccctcccccggcgcggagtccccgcaccccggagggatggggcgggcagccgcgggcgcctaagatgccggccatgcggggcctcctggcgccgcagaacaccttcctggacaccatcgctacg

SEQ ID NO: 288918 - DNA, 141 bp, Homo sapiens
  chr12:49933289-49933430
  hyper
cgcccacttgcacccgggccgccggaccctcgccagggctcccgccttccccgaacccccagcagcccagcttggcgccagcctattctcaccctctcctccctacccgcccctcttgaggctggggccatcgtctcctgc

SEQ ID NO: 288919 - DNA, 544 bp, Homo sapiens; identical to SEQ ID NO: 236291
  chr12:49961430-49961974
  hyper

SEQ ID NO: 288920 - DNA, 182 bp, Homo sapiens; identical to SEQ ID NO: 236292
  chr12:50016479-50016661
  hyper

SEQ ID NO: 288921 - DNA, 328 bp, Homo sapiens; identical to SEQ ID NO: 202977
  chr12:50339293-50339621
  hyper

SEQ ID NO: 288922 - DNA, 68 bp, Homo sapiens; identical to SEQ ID NO: 236296
  chr12:50349342-50349410
  hyper

SEQ ID NO: 288923 - DNA, 201 bp, Homo sapiens; identical to SEQ ID NO: 236298
  chr12:50361387-50361588
  hyper

SEQ ID NO: 288924 - DNA, 78 bp, Homo sapiens; identical to SEQ ID NO: 202978
  chr12:50419370-50419448
  hyper

SEQ ID NO: 288925 - DNA, 106 bp, Homo sapiens
  chr12:50426642-50426748
  hyper
gcgcccccctcccacgcgctcccccgcgcccaggcaccaatgatggggttggtgctgataggtggttgcgggtgacctcccgagcgcgcccgtaccccaccggccc

SEQ ID NO: 288926 - DNA, 122 bp, Homo sapiens; identical to SEQ ID NO: 236301
  chr12:50505850-50505972
  hyper

SEQ ID NO: 288927 - DNA, 505 bp, Homo sapiens
  chr12:50677034-50677539
  hyper
gaagtgaggaaagaacggaggatcagcgtccctcgaccccttatctcgagggggagggactcacactccttgcactccccccgccccaaaagtcgaaggagaaagagggtgtggagagaagccggggtcttcccgcactctccggttgtggagagagaaggcccttacctggctaaaagccgcctttcctctgcgctgctaccagccctgtcacaggtcccggcgctctacctagcgcacctgtcgcgaccaagctgctaacacctactgctcctgcggccccgccccggaccccgcccaccgccgcgggggcgcgcacgccagacagcctcccgtgcggcctcgggctgagcgtgcgcgccaccggctacgtgcccagcgctcgcgtctgctccagtcgctctggcggtgcggggcgctggcgacgggacagggtttttgctgcccggggcctagtctacctcggcacgcttttctctgaaggagacacgcacttgcacgacgt

SEQ ID NO: 288928 - DNA, 201 bp, Homo sapiens; identical to SEQ ID NO: 236303
  chr12:50899499-50899700
  hyper

SEQ ID NO: 288929 - DNA, 95 bp, Homo sapiens; identical to SEQ ID NO: 236304
  chr12:50926642-50926737
  hyper

SEQ ID NO: 288930 - DNA, 267 bp, Homo sapiens; identical to SEQ ID NO: 202979
  chr12:51157702-51157969
  hyper

SEQ ID NO: 288931 - DNA, 239 bp, Homo sapiens; identical to SEQ ID NO: 202980
  chr12:51318416-51318655
  hyper

SEQ ID NO: 288932 - DNA, 108 bp, Homo sapiens; identical to SEQ ID NO: 236307
  chr12:51419807-51419915
  hyper

SEQ ID NO: 288933 - DNA, 41 bp, Homo sapiens; identical to SEQ ID NO: 236308
  chr12:51477513-51477554
  hyper

SEQ ID NO: 288934 - DNA, 32 bp, Homo sapiens; identical to SEQ ID NO: 224358
  chr12:51610959-51610991
  hyper

SEQ ID NO: 288935 - DNA, 98 bp, Homo sapiens; identical to SEQ ID NO: 236309
  chr12:51632361-51632459
  hyper

SEQ ID NO: 288936 - DNA, 686 bp, Homo sapiens; identical to SEQ ID NO: 236310
  chr12:51785149-51785835
  hyper

SEQ ID NO: 288937 - DNA, 689 bp, Homo sapiens
  chr12:51818412-51819101
  hyper
agcagttggaaggaccttcacgcccagaggcccctgaagggagggaggcggtttccaaggcaaccgggcccgggagcggttggctccccggctcctccccctccccgcggtagcccagggtaccgccggacagcgtcctcccgtgctccgcgccctgattggctgcgcaggcctctcgctgattggttgcggcggatgcctcgcgggccggtggctatggaggcggcggcggttgatggttgaccgttggctccggggtgggggtcgccgttcgagtgatctgctcagacccgaccagagggcgcgggctgctgatgcttggcttggagcccgtgggggagacctagttcggctccgccatgccggccgccgggagtaacgagccggacggcgtcctcagctatcaggtagggccccgcctcccgcgcctcccgctcctccccggggcgcagcctcctcatcctctgcccaccctccttccttctgcccccgagcccaggcttcccaggccgctccctgagggcgaggggaggccagcccgggacaccagggggcgctccgggcggttggggaccaggccagggctgcgagagagtgaccttgggccgaacctgggatctggcccatctctgccgcatcccttgcgccgcccgcccaggagccctgacagccggcgggcggcgacctct

SEQ ID NO: 288938 - DNA, 264 bp, Homo sapiens
  chr12:52208404-52208668
  hyper
ctctcgccgccgccgccggctcggagaccccgacgtggtgttgagcggctcaggccgcgccagccggtcttcagaaagccgggacaactcggcctccacgtcgggctcgggcgcctccaggagcgaccggaaatggccgcactcctccggggtcagcagctcggccagacggacggctgcgtgagggcccatagcgtccacggcccccgccggagccagcgcccaaacccagagcgtgaggaccaaggcgctcgccagagtccg

SEQ ID NO: 288939 - DNA, 62 bp, Homo sapiens
  chr12:52208753-52208815
  hyper
ggttccgaacgcccgcggattgtgggagggaggaggctccgaacagtcgggaagcctagtgg

SEQ ID NO: 288940 - DNA, 230 bp, Homo sapiens; identical to SEQ ID NO: 202983
  chr12:52294168-52294398
  hyper

SEQ ID NO: 288941 - DNA, 147 bp, Homo sapiens
  chr12:52345764-52345911
  hyper
cccagtcagcttccccgatctccgaggcgcagccgcccggcggcgacggagctcacgccgggcccctggggacccgagccctgttccaggcggaactggattcgggcagttctcaggggtcgcgctcccagcgccctcgtgttccag

SEQ ID NO: 288942 - DNA, 53 bp, Homo sapiens; identical to SEQ ID NO: 122297
  chr12:52401605-52401658
  hyper

SEQ ID NO: 288943 - DNA, 149 bp, Homo sapiens
  chr12:52416804-52416953
  hyper
ccagtgctcaggggcgagcggaatggagaggaggcggggctggggcgcacagccggcaggggatccctgccggagtctgcttttcacgggttcccgtctagaccagagttggggctcagcttggagagatgggacaggtggaggtgctg

SEQ ID NO: 288944 - DNA, 179 bp, Homo sapiens
  chr12:52416985-52417164
  hyper
tgcaggctggccttcaaggcctgggctagactgcggcggttgggggctggcggtgcggctcgggtggagtccgccgggcaccgccctccctctccaccctcgcccaccccggggccgcgaggctgtgggttgagctgcagaggcgagctccctcctgggcgtgccgccgccgcgagtgg

SEQ ID NO: 288945 - DNA, 191 bp, Homo sapiens
  chr12:52427134-52427325
  hyper
tgggagtgcgattacgggcctctcacttcgtaaatcacgcaggcctgaaacgctcacatttgtttaccacgagcatgtttgattttgtaatttaacaaataaaattgcagaggatttttaagagccctggcctggatttaggggaaatctcgcattaattccagctctgccatttccggtctggagacctt

SEQ ID NO: 288946 - DNA, 58 bp, Homo sapiens; identical to SEQ ID NO: 202985
  chr12:52463634-52463692
  hyper

SEQ ID NO: 288947 - DNA, 192 bp, Homo sapiens; identical to SEQ ID NO: 236318
  chr12:52464067-52464259
  hyper

SEQ ID NO: 288948 - DNA, 50 bp, Homo sapiens; identical to SEQ ID NO: 236319
  chr12:52615994-52616044
  hyper

SEQ ID NO: 288949 - DNA, 71 bp, Homo sapiens; identical to SEQ ID NO: 202986
  chr12:52627438-52627509
  hyper

SEQ ID NO: 288950 - DNA, 51 bp, Homo sapiens; identical to SEQ ID NO: 236321
  chr12:52627539-52627590
  hyper

SEQ ID NO: 288951 - DNA, 138 bp, Homo sapiens; identical to SEQ ID NO: 236323
  chr12:52672850-52672988
  hyper

SEQ ID NO: 288952 - DNA, 319 bp, Homo sapiens
  chr12:52702043-52702362
  hyper
tgtctgtaagtagtggggtccgtcccctcctcccgctgggcgggtctgggagcctctgggcaaagggcgcgtgggctcgcagcaaagccactcacccaggtcgcggctgcgcctgacgcgcgcctccgtctctttcccctgcaggcgtcagcagctcccgcggtggcgttgtctgtggcgatctctgcgcctccactactgcccctgttgtctccaccagagtcagtagcgtccccagcaacagcaacgtggtggtgggcactactaacgcctgcgccccctccgcccgggttggcgtctgcggcggcagctgtaagag

SEQ ID NO: 288953 - DNA, 74 bp, Homo sapiens
  chr12:53004326-53004400
  hyper
gcccccaaccacactctgggaaactttaaggtggagacttgcagtttcttccagtccctcggtcccacccacct

SEQ ID NO: 288954 - DNA, 291 bp, Homo sapiens
  chr12:53085061-53085352
  hyper
agccgctgccataaccgcctccactcctgcctcgtgccccgcctccgcggtagcttcttccgccgccatagcccccaccgctgccgccgccgtagcctcctgagccgtagctgccgccgcctcccgcgccgccgttgacgctcacctggctgttctgcacggctgtgggtaggggacagtgcacacggggtcagagggaccgggcaaggcccccacctgcacccgcccctgcacctgcagcctcctccatcctcgatcacccgtggcatcgacttgcaaaccccatacatt

SEQ ID NO: 288955 - DNA, 70 bp, Homo sapiens
  chr12:53107929-53107999
  hyper
ctactcatccttcgcggcaactttcgggctgctgcgatgccagcagtctgggaaggtggggctccggggc

SEQ ID NO: 288956 - DNA, 313 bp, Homo sapiens; identical to SEQ ID NO: 202988
  chr12:53135226-53135539
  hyper

SEQ ID NO: 288957 - DNA, 325 bp, Homo sapiens; identical to SEQ ID NO: 236329
  chr12:53267967-53268292
  hyper

SEQ ID NO: 288958 - DNA, 185 bp, Homo sapiens; identical to SEQ ID NO: 224367
  chr12:53272443-53272628
  hyper

SEQ ID NO: 288959 - DNA, 168 bp, Homo sapiens; identical to SEQ ID NO: 236330
  chr12:53273344-53273512
  hyper

SEQ ID NO: 288960 - DNA, 192 bp, Homo sapiens; identical to SEQ ID NO: 236331
  chr12:53297370-53297562
  hyper

SEQ ID NO: 288961 - DNA, 209 bp, Homo sapiens; identical to SEQ ID NO: 202990
  chr12:53342670-53342879
  hyper

SEQ ID NO: 288962 - DNA, 36 bp, Homo sapiens; identical to SEQ ID NO: 202991
  chr12:53342911-53342947
  hyper

SEQ ID NO: 288963 - DNA, 373 bp, Homo sapiens; identical to SEQ ID NO: 236334
  chr12:53472778-53473151
  hyper

SEQ ID NO: 288964 - DNA, 236 bp, Homo sapiens; identical to SEQ ID NO: 236335
  chr12:53574316-53574552
  hyper

SEQ ID NO: 288965 - DNA, 66 bp, Homo sapiens; identical to SEQ ID NO: 236336
  chr12:53607267-53607333
  hyper

SEQ ID NO: 288966 - DNA, 739 bp, Homo sapiens; identical to SEQ ID NO: 236337
  chr12:53613776-53614515
  hyper

SEQ ID NO: 288967 - DNA, 355 bp, Homo sapiens; identical to SEQ ID NO: 236338
  chr12:53662065-53662420
  hyper

SEQ ID NO: 288968 - DNA, 176 bp, Homo sapiens; identical to SEQ ID NO: 202993
  chr12:53714987-53715163
  hyper

SEQ ID NO: 288969 - DNA, 216 bp, Homo sapiens; identical to SEQ ID NO: 236340
  chr12:53718312-53718528
  hyper

SEQ ID NO: 288970 - DNA, 191 bp, Homo sapiens
  chr12:53719362-53719553
  hyper
ggggcgggagtggcgtcagggtggggagggggctcgtaacccgagcccccccaggatcgccggccccctcccacccgtagcagcccctcttgcgacccgtgcggtggacagtccgacgcggggcgcagctgggagtcgggcccaggccggggggagcggcctgtgagccccctcagcccagcggggtaacc

SEQ ID NO: 288971 - DNA, 138 bp, Homo sapiens; identical to SEQ ID NO: 202995
  chr12:53765064-53765202
  hyper

SEQ ID NO: 288972 - DNA, 141 bp, Homo sapiens; identical to SEQ ID NO: 236342
  chr12:53765510-53765651
  hyper

SEQ ID NO: 288973 - DNA, 145 bp, Homo sapiens; identical to SEQ ID NO: 236343
  chr12:53835282-53835427
  hyper

SEQ ID NO: 288974 - DNA, 133 bp, Homo sapiens; identical to SEQ ID NO: 236344
  chr12:53892936-53893069
  hyper

SEQ ID NO: 288975 - DNA, 97 bp, Homo sapiens; identical to SEQ ID NO: 202996
  chr12:53894678-53894775
  hyper

SEQ ID NO: 288976 - DNA, 136 bp, Homo sapiens; identical to SEQ ID NO: 236346
  chr12:53895055-53895191
  hyper

SEQ ID NO: 288977 - DNA, 170 bp, Homo sapiens
  chr12:54070830-54071000
  hyper
cgagaaagacgggaaaagctcaccaaaccccataaaaaataaaaaataaaaagaaagccgcggctgtaaataaaggcaaatccgccactctctgaggggccgtttgtcctcccctccttggccccgtccttcccgccgccccctcccggctcccgggccccgcggcgccc

SEQ ID NO: 288978 - DNA, 121 bp, Homo sapiens
  chr12:54088960-54089081
  hyper
cagggcccggccggacgagatttactgggcctcgaacacggcgacagttcaaacctttgattaatcatgtttttctgcctaccccataatttagttgctctttttccctccctgccttttt

SEQ ID NO: 288979 - DNA, 384 bp, Homo sapiens; identical to SEQ ID NO: 202997
  chr12:54090210-54090594
  hyper

SEQ ID NO: 288980 - DNA, 182 bp, Homo sapiens; identical to SEQ ID NO: 236350
  chr12:54091028-54091210
  hyper

SEQ ID NO: 288981 - DNA, 56 bp, Homo sapiens; identical to SEQ ID NO: 202998
  chr12:54120862-54120918
  hyper

SEQ ID NO: 288982 - DNA, 57 bp, Homo sapiens; identical to SEQ ID NO: 202999
  chr12:54132526-54132583
  hyper

SEQ ID NO: 288983 - DNA, 71 bp, Homo sapiens
  chr12:54144768-54144839
  hyper
aacattgtaagccccgcgcagactgtccctgtggaggagaaaggcacatgagcagccaaagggacggacac

SEQ ID NO: 288984 - DNA, 204 bp, Homo sapiens; identical to SEQ ID NO: 236354
  chr12:54150987-54151191
  hyper

SEQ ID NO: 288985 - DNA, 69 bp, Homo sapiens; identical to SEQ ID NO: 203000
  chr12:54329187-54329256
  hyper

SEQ ID NO: 288986 - DNA, 67 bp, Homo sapiens; identical to SEQ ID NO: 203001
  chr12:54329947-54330014
  hyper

SEQ ID NO: 288987 - DNA, 115 bp, Homo sapiens
  chr12:54330575-54330690
  hyper
aggcgtctccacccacccacccccaccagccaggccttaggcaagggggccaacgtcatacaacccagtctagacttggccaggccctgtttgctctcctcgttttaccttgacc

SEQ ID NO: 288988 - DNA, 183 bp, Homo sapiens
  chr12:54332040-54332223
  hyper
agagcgctcctgactgttttctattatcttcatttattattttttaaaacctggtttcttccccacccttagcttcaagccccaatccagagacttcagcagtcacagtgatcggcttggcggtagggggtctgtctctccggtgcacatcctatgcctaggcggaggcgcccagttacagcg

SEQ ID NO: 288989 - DNA, 305 bp, Homo sapiens
  chr12:54332435-54332740
  hyper
tcacgtgcgcagagcgggtcacgtgggcgcgggaggggtgctgagaggtggagagcgggagccggcggatttcttaatgaagtgtctccgcatgcgtagagggaatgtagggagggaggtggaagcactaggaggaggggaggggtggagagaaaagaggggagggatggggggaggggaaacaggagcgaggtgtctccctagctcgctgcctctggcaagtggagtttttaaaaagctccagcagatcatgtcatgacgacttcgctgctcctgcatccacgctggccggagagccttatgta

SEQ ID NO: 288990 - DNA, 170 bp, Homo sapiens; identical to SEQ ID NO: 203002
  chr12:54338496-54338666
  hyper

SEQ ID NO: 288991 - DNA, 77 bp, Homo sapiens; identical to SEQ ID NO: 203003
  chr12:54343492-54343569
  hyper

SEQ ID NO: 288992 - DNA, 36 bp, Homo sapiens
  chr12:54345236-54345272
  hyper
tgcctctcccaccagaatcagcgtagattttataat

SEQ ID NO: 288993 - DNA, 47 bp, Homo sapiens
  chr12:54345520-54345567
  hyper
agcaggcaggccaccgctctagccttgtgatctgataaatgtacggg

SEQ ID NO: 288994 - DNA, 224 bp, Homo sapiens
  chr12:54346032-54346256
  hyper
agaggaatcagggtcagctgcaaagaagaaagaggggtttgtgcgtgcttctttgcccgccgaatccaaaacctggggaaaacggccctctttgatgaggctaaatcaggctagaagaaatgcgtgcctggaagaaggacgccttcacccaatcttcatttctcctgcgttgcatccgccgccctgtggccgctgctcctcacgctcagcggcctggcctggga

SEQ ID NO: 288995 - DNA, 336 bp, Homo sapiens; identical to SEQ ID NO: 203004
  chr12:54346835-54347171
  hyper

SEQ ID NO: 288996 - DNA, 45 bp, Homo sapiens; identical to SEQ ID NO: 236369
  chr12:54347924-54347969
  hyper

SEQ ID NO: 288997 - DNA, 46 bp, Homo sapiens
  chr12:54348692-54348738
  hyper
tgccggtcgggccccgcggaaatgggcgagcataatctcctgaatc

SEQ ID NO: 288998 - DNA, 240 bp, Homo sapiens
  chr12:54349391-54349631
  hyper
tgagctagggacgcccagggtgacagaatgtgtggcgaggaagagcttcttataaaatgaagtgcgggtggggggagcctataaacatgtaaacatccccacaaaagaaatggagagtgttcctttttcgtctgcctgcggctggaggcggcagggattccggagttgggggatcctgacggggactccccaggcctgggggtgaggaggtggggacagaaagcccggccctagttctcc

SEQ ID NO: 288999 - DNA, 107 bp, Homo sapiens; identical to SEQ ID NO: 236371
  chr12:54350138-54350245
  hyper

SEQ ID NO: 289000 - DNA, 53 bp, Homo sapiens; identical to SEQ ID NO: 122404
  chr12:54351375-54351428
  hyper

SEQ ID NO: 289001 - DNA, 200 bp, Homo sapiens
  chr12:54357368-54357568
  hyper
cccagtccccccaccgaccgctgctcggctgagcgggcgcggctgagatagaggtgcttggccagctctctggtcttgttaacaagcctcatcataaagatggagatgataagaagagcaaggaagccccggtggccgcgaggggcggggcttggtgggcccggtgtggggcagtggctgacccgagccgggtgctgccc

SEQ ID NO: 289002 - DNA, 295 bp, Homo sapiens; identical to SEQ ID NO: 122410
  chr12:54357603-54357898
  hyper

SEQ ID NO: 289003 - DNA, 438 bp, Homo sapiens
  chr12:54360131-54360569
  hyper
gttccattccactgcgaagcggagcaggacctaagaattggagagaaaattaaacgtcataaagaaaagttcatttacagcttaaatgtctgaatgttacggtttccttcagaaaacaaggcggtacactcggtaaggagaagtgaggcagcaggggtggggagggctggtgcggtaggaggcttggttttatttctttctcagatccagaggcggaaagaaagggggagaagcaggaaagtgcgacagaagcgttttacccgggcagctagcaaagaaagatgctgcagtcggtggaactggaagcaaagcgcataagggcccagtgcgggggcagcgatccccgagcgctgagctggctgcgctgaggcctggcgtgcggagaaacaaatatattggatatttgctggtctaggggaggggtgaggcaagaatgga

SEQ ID NO: 289004 - DNA, 49 bp, Homo sapiens
  chr12:54360649-54360698
  hyper
agcctttggcggtgggcagtgggcaggctcagctcgaaggctcagggag

SEQ ID NO: 289005 - DNA, 201 bp, Homo sapiens
  chr12:54366648-54366849
  hyper
cccttcccagccaccaccctcgcccatcccaccgcccaccccaccccaaccctctctctcctcctttgctcgtgctgtggtatggagagaaggggagtgacgagagaaaaacgaatacaaatctgcaattgattttcataatgtttctgcggtgtttgcaaaccaatcgcctgaacgtccccgatcttacctaagagagaa

SEQ ID NO: 289006 - DNA, 213 bp, Homo sapiens; identical to SEQ ID NO: 203007
  chr12:54367630-54367843
  hyper

SEQ ID NO: 289007 - DNA, 46 bp, Homo sapiens
  chr12:54368251-54368297
  hyper
aaatgttcaaactatgtgttcgcgggtcctcgagcagaaacccaag

SEQ ID NO: 289008 - DNA, 215 bp, Homo sapiens
  chr12:54368432-54368647
  hyper
tgccccgcgggcttcccggggcgccagggccccggaagcggctctctggtgtctcggtgcctgctggccggcttcctccccgcctcccgactgctctcgccagatttcactgcttcgcgcctgttctcagctttccccccagatttctgggggaggggttgggctttccgaaccactaggagggcggcccaggaagggcccgagggcggaggggg

SEQ ID NO: 289009 - DNA, 257 bp, Homo sapiens
  chr12:54369002-54369259
  hyper
aaattccagatccgggaactggagcgagagtttttcttcaacgtgtatatcaacaaagagaagcggctgcagctgtcccggatgctgaacctgacggaccgacaagtgaaaatttggtttcagaacagaaggatgaaagaaaagaaactgagcagagaccggctgcagtatttctcgggaaatcctctgctgtaacctgcagaccgggcccttttgggggcggggggaggggaaaattattttattttatttttatt

SEQ ID NO: 289010 - DNA, 375 bp, Homo sapiens
  chr12:54369303-54369678
  hyper
ctgtggccagggctggcccccaccgctgtggccggcactccattccggaacctcctggaccctctatctgactctcgctgtgggacagggaccgggcctggaaagggggtgaagggaagtgtctgatgcacggcgagtgaacaccgttggcgccgaggccaagactttgatttaaaagaaaacacacctcggcgacaatgtcttgctgctcggattaggtgggggaggggcgacagtagtgagcgcctgagccgaacaatcctcgaactaaaagccttcccttgcccatgtgaaaagatccgctaagacagcatgtctgccagcggaaacttctcgagctcccccctctaccccgccccaccttgcagctaaatg

SEQ ID NO: 289011 - DNA, 367 bp, Homo sapiens; identical to SEQ ID NO: 236379
  chr12:54371956-54372323
  hyper

SEQ ID NO: 289012 - DNA, 614 bp, Homo sapiens
  chr12:54377239-54377853
  hyper
ctggggcctaaacagcctaaccttgccctggataacccccatgctgaggccacggtgaccctgcatatgaaaacacaaaaccatttcaaatctcccctggccggtcctgcaagcaaatcatacactccacatttccttccagttttccggaggttcaggaacccctgcgtcttctctctccacccctggatggggaaattcggcggatttctttctgcggtcttctagccgcagcgggcttgggcctccttagaaacggtctagcctcctcactcctccactccagggcgctgggctccagtcctttccccgccaaactccagcccttcggaaagtctgaaccctaggctctgtccaaggaaaaatgtggggcgacaggaaagacaagttgttctccagattccgtttcctgaggaaggggtggagagtttagttcgctttggaagaaggcgatggagaaacggaaataactgtttgaaacatacggttccccttatttcttccttttatttaaaaacaaccacaaaaatagactggtctgtcttctttcaaacatgctcccagcccgtgcgctctgtaaaggacgcttctctgggtcgggttttgttgcgtct

SEQ ID NO: 289013 - DNA, 393 bp, Homo sapiens
  chr12:54378327-54378720
  hyper
tttagtcctgtttggtattccttaactttttttcccctttctctgctcatcagatccccccaaacccccccccccacaaacctcaccccactcccatccccaaggtaagaagtgggagtcgggtccggggatatggaaaggggagatgaagagtggggagaagtacctgattcgtgtctcgaccttttaatttgaatttgactgttttgagccccgggttgcctcgctctctccctctctcccgcatttcccccctctccgcccccttctccccaggagttacaggctggttactggataaacaaaccccactcttcctagaacccccacccccacccccacccccctccacccctctacctcccctgccgcccggggggcgcttcctttgtt

SEQ ID NO: 289014 - DNA, 405 bp, Homo sapiens; identical to SEQ ID NO: 236381
  chr12:54383374-54383779
  hyper

SEQ ID NO: 289015 - DNA, 37 bp, Homo sapiens; identical to SEQ ID NO: 203009
  chr12:54387781-54387818
  hyper

SEQ ID NO: 289016 - DNA, 250 bp, Homo sapiens
  chr12:54388354-54388604
  hyper
aggccctgcacgcctctgcagctgccgggccgtgtccgggacgtctgaactgaggccgaccaatggtcacagcatgaaaaataaatgcaatggaaggtctttctgtcttttcttttccgcgtaaaaggtcctttcttttttctctctttcggatatacctggatttggtccagaccaggttgcccgcgggagggccccgcgagcggcagcgcgcgagggagggagagagagggagggcgagaaggaggga

SEQ ID NO: 289017 - DNA, 256 bp, Homo sapiens; identical to SEQ ID NO: 203011
  chr12:54388855-54389111
  hyper

SEQ ID NO: 289018 - DNA, 320 bp, Homo sapiens; identical to SEQ ID NO: 203012
  chr12:54389321-54389641
  hyper

SEQ ID NO: 289019 - DNA, 75 bp, Homo sapiens
  chr12:54391192-54391267
  hyper
tgaggcctagagtacccatccgagcaagtctcctgggaggggcaggagaggagccctcttccgcctttgtgtcca

SEQ ID NO: 289020 - DNA, 134 bp, Homo sapiens; identical to SEQ ID NO: 203013
  chr12:54392869-54393003
  hyper

SEQ ID NO: 289021 - DNA, 116 bp, Homo sapiens; identical to SEQ ID NO: 203014
  chr12:54393243-54393359
  hyper

SEQ ID NO: 289022 - DNA, 434 bp, Homo sapiens
  chr12:54400007-54400441
  hyper
cccgcgcctcggccggcccggccccactggctctgagcaaatcaatcctctcacctgcgaggtgtaaataattcgcgagtggcagcgggagatgggccctcgatctggcagcgggctcggaaggctcaggagggcaggcattaaaaataatcgctttgtggaggagataagtgcaaagcaggcagcgcgtaattaacacaaaaaggcagaatgacccggacaaacgaacataaatccgtggtacctatgagggcggtgcaggcctcggggagagggacagagacggcctcggcgaggatggctgctttcggttcctttatttccaggctcggggagcgaaataaaccagataacgtgtaaaagaaagcaaacaaacaaatgaaagaacggtgagggatccccaaaaggggaaaccaagtccggccaggggttgc

SEQ ID NO: 289023 - DNA, 60 bp, Homo sapiens
  chr12:54402812-54402872
  hyper
gccgccgccgccgccgcccgctcgccgcccgccgccgccgccgcccgcgccccagccccg

SEQ ID NO: 289024 - DNA, 230 bp, Homo sapiens; identical to SEQ ID NO: 203015
  chr12:54404861-54405091
  hyper

SEQ ID NO: 289025 - DNA, 63 bp, Homo sapiens; identical to SEQ ID NO: 203016
  chr12:54408253-54408316
  hyper

SEQ ID NO: 289026 - DNA, 49 bp, Homo sapiens
  chr12:54410237-54410286
  hyper
aagctttgaattccgcctgatccaaccttaatgcccccatttattaagg

SEQ ID NO: 289027 - DNA, 283 bp, Homo sapiens; identical to SEQ ID NO: 203017
  chr12:54410364-54410647
  hyper

SEQ ID NO: 289028 - DNA, 79 bp, Homo sapiens
  chr12:54420508-54420587
  hyper
acactgtctgcttttgggttcgaaactttatttttcccccctagcgacactccagggaaaccttaacgttacagaagat

SEQ ID NO: 289029 - DNA, 205 bp, Homo sapiens; identical to SEQ ID NO: 203018
  chr12:54422141-54422346
  hyper

SEQ ID NO: 289030 - DNA, 55 bp, Homo sapiens; identical to SEQ ID NO: 203019
  chr12:54422376-54422431
  hyper

SEQ ID NO: 289031 - DNA, 425 bp, Homo sapiens; identical to SEQ ID NO: 203020
  chr12:54422525-54422950
  hyper

SEQ ID NO: 289032 - DNA, 122 bp, Homo sapiens
  chr12:54424624-54424746
  hyper
attcgctcgcccgccggcctcagggtgagagctggagcaggctccaagcgctcccgcgcctgccggccccctgcaagcccccagccctctgcactcgccttccccggagcccaggcgcccgg

SEQ ID NO: 289033 - DNA, 584 bp, Homo sapiens; identical to SEQ ID NO: 203021
  chr12:54426523-54427107
  hyper

SEQ ID NO: 289034 - DNA, 329 bp, Homo sapiens; identical to SEQ ID NO: 203022
  chr12:54427307-54427636
  hyper

SEQ ID NO: 289035 - DNA, 91 bp, Homo sapiens; identical to SEQ ID NO: 203023
  chr12:54427974-54428065
  hyper

SEQ ID NO: 289036 - DNA, 56 bp, Homo sapiens; identical to SEQ ID NO: 203024
  chr12:54428083-54428139
  hyper

SEQ ID NO: 289037 - DNA, 43 bp, Homo sapiens
  chr12:54428224-54428267
  hyper
caggatgaagtggaagaaagattccaaaatgaaaagcaaagag

SEQ ID NO: 289038 - DNA, 225 bp, Homo sapiens; identical to SEQ ID NO: 203025
  chr12:54446874-54447099
  hyper

SEQ ID NO: 289039 - DNA, 219 bp, Homo sapiens; identical to SEQ ID NO: 203026
  chr12:54447599-54447818
  hyper

SEQ ID NO: 289040 - DNA, 275 bp, Homo sapiens
  chr12:54448041-54448316
  hyper
agccccgccagcctgcagccagccagcccccgaccatccctccagcgccgccagcaagcaacccatagtctacccatggatgaaaaaaattcacgttagcacgggtaggcaactttgctttttgctccccccctccctcccttcttccctagcgctccccaccctcctcggccccctctggcccccgtcctcctttctctccttccccctctctctccaggagcgactctgggttagcacaattgaactggatttacgagcgagaatgggtaatt

SEQ ID NO: 289041 - DNA, 189 bp, Homo sapiens; identical to SEQ ID NO: 236403
  chr12:54475616-54475805
  hyper

SEQ ID NO: 289042 - DNA, 142 bp, Homo sapiens; identical to SEQ ID NO: 203028
  chr12:54519788-54519930
  hyper

SEQ ID NO: 289043 - DNA, 51 bp, Homo sapiens
  chr12:54521011-54521062
  hyper
gagcggtcccctgctgtcctgggcccttacgttgattctaagttaggagtg

SEQ ID NO: 289044 - DNA, 101 bp, Homo sapiens; identical to SEQ ID NO: 236405
  chr12:54582781-54582882
  hyper

SEQ ID NO: 289045 - DNA, 55 bp, Homo sapiens; identical to SEQ ID NO: 203029
  chr12:54608668-54608723
  hyper

SEQ ID NO: 289046 - DNA, 88 bp, Homo sapiens; identical to SEQ ID NO: 236407
  chr12:54674339-54674427
  hyper

SEQ ID NO: 289047 - DNA, 41 bp, Homo sapiens; identical to SEQ ID NO: 203030
  chr12:54686414-54686455
  hyper

SEQ ID NO: 289048 - DNA, 103 bp, Homo sapiens
  chr12:54811879-54811982
  hyper
cgaccccagccccagaagtcccggtctcagcacagctccagccgaccagctacaggaaaccagcttttctcttcctcccaagagccagaggaagagggaaacc

SEQ ID NO: 289049 - DNA, 277 bp, Homo sapiens
  chr12:54812879-54813156
  hyper
gcggcagcagcagcaacagcagcggcagcagcgggggtcggcgccgggggccccagcgcagctgcacggcgtggagaggggactctggcgtccggctccccatagcgcccgctcttccctgtcctggggccaccgacccggagccgcttcctaaacctcccagaggcgaatgactcaacgcggggaggagtttgccaaactcccggctgagccctccccccgcctgccgagggggctggcgggggggcattcctgggtccctggaactctgagcccg

SEQ ID NO: 289050 - DNA, 235 bp, Homo sapiens
  chr12:54943116-54943351
  hyper
cgcctccgctgcactctgtaaacacgcactcacatccgccagtacagggcacacgcagccactcgtccccggcgcctgtgtgcgtgcgctcgcccttgggcgcttctgtctgtgtgtgcccccggcttccaatcgttcctttgggagggggaggagtggctgtgaggagtgagagactggcgggcaggctgaggagaagggagggagagcagagggaggggggaacccggccggg

SEQ ID NO: 289051 - DNA, 204 bp, Homo sapiens
  chr12:54943423-54943627
  hyper
cggtgcggagagcttggactgggagcccaaagctcggctgggcagcgggagaggaggagccgcaggagctgcagctctgccagcttgggccgagcctagagacaccggcctggctggtccacgccagccgcaggtgggaagggcctgggatggggggtgagggtctctcggctggggctgaagctgagccgaggtgctgtctcc

SEQ ID NO: 289052 - DNA, 527 bp, Homo sapiens
  chr12:54982005-54982532
  hyper
gatgtggctccgacggtgggggaggggacagaagacccccccccgccccccgcaaactgagcgttcgtcctcaaaagggcgcactgctaagggaggactaggcagggatcctgggtcccaccagtccaggggtccctcgtccttggctgggcgagtgccctgccgccccgccctgctccgcacctgctccgccgcctcggggtcaaggtgcggctccagcagcgggaccgtgaactggatctttcgggggctgttgtcttgctccatggctggggcggcggccggtgggcccgcgctgcggcgggagggaaggcggcgggactcggggctggggcgggcgcgctccctctccgctccgctccggccccggccccagcccggcgcgctcggctcccggctcccggcacagcgctcccagctcgcggctccggggactctgccgccgccgattggctccgcacccgcccctcccggccccctccccctcccccagcccggaaccttaaccccgtcgtggctgcaccggc

SEQ ID NO: 289053 - DNA, 78 bp, Homo sapiens; identical to SEQ ID NO: 236411
  chr12:55413596-55413674
  hyper

SEQ ID NO: 289054 - DNA, 244 bp, Homo sapiens; identical to SEQ ID NO: 236412
  chr12:56101314-56101558
  hyper

SEQ ID NO: 289055 - DNA, 93 bp, Homo sapiens; identical to SEQ ID NO: 236413
  chr12:56123024-56123117
  hyper

SEQ ID NO: 289056 - DNA, 404 bp, Homo sapiens; identical to SEQ ID NO: 236414
  chr12:56137579-56137983
  hyper

SEQ ID NO: 289057 - DNA, 222 bp, Homo sapiens; identical to SEQ ID NO: 236415
  chr12:56210929-56211151
  hyper

SEQ ID NO: 289058 - DNA, 96 bp, Homo sapiens; identical to SEQ ID NO: 236416
  chr12:56211700-56211796
  hyper

SEQ ID NO: 289059 - DNA, 148 bp, Homo sapiens; identical to SEQ ID NO: 236417
  chr12:56320837-56320985
  hyper

SEQ ID NO: 289060 - DNA, 42 bp, Homo sapiens; identical to SEQ ID NO: 224382
  chr12:56326151-56326193
  hyper

SEQ ID NO: 289061 - DNA, 193 bp, Homo sapiens; identical to SEQ ID NO: 236418
  chr12:56360051-56360244
  hyper

SEQ ID NO: 289062 - DNA, 138 bp, Homo sapiens; identical to SEQ ID NO: 236419
  chr12:56367675-56367813
  hyper

SEQ ID NO: 289063 - DNA, 151 bp, Homo sapiens; identical to SEQ ID NO: 203036
  chr12:56390556-56390707
  hyper

SEQ ID NO: 289064 - DNA, 226 bp, Homo sapiens; identical to SEQ ID NO: 236420
  chr12:56401112-56401338
  hyper

SEQ ID NO: 289065 - DNA, 304 bp, Homo sapiens
  chr12:56472732-56473036
  hyper
aggctcaactgttttcgaagtcttcaggcttgaagttctggagaaaacaactaggctctccgggcgagatcccgaataccagtttaagggatttgaaatgcaaggccgtctgggactccactgccacggatgggcaccaggcggcgccggtcggatccgtcccgggactagcagggctttgggcagcaacccgcagggagcccgaccgcctctggccaggtccgggcagctggtgggggaggttccagaggtccacgccattcgtggacgcagtctctagtgtcctctccgcgtcccacttcac

SEQ ID NO: 289066 - DNA, 79 bp, Homo sapiens
  chr12:56473739-56473818
  hyper
ctccgccaagttgcgggaccgcggggcgtggcacgctcggggcaggcggtccgaggctccgcaatccctactccagcct

SEQ ID NO: 289067 - DNA, 131 bp, Homo sapiens
  chr12:56473838-56473969
  hyper
cgtgactcacccccttccctctgcgttcctccctccctctctctctctctctcacacacacacacccctcccctgccatccctccccggactccggctccggctccgattgcaatttgcaacctccgctgc

SEQ ID NO: 289068 - DNA, 348 bp, Homo sapiens; identical to SEQ ID NO: 122505
  chr12:56473998-56474346
  hyper

SEQ ID NO: 289069 - DNA, 201 bp, Homo sapiens; identical to SEQ ID NO: 203038
  chr12:56497906-56498107
  hyper

SEQ ID NO: 289070 - DNA, 335 bp, Homo sapiens; identical to SEQ ID NO: 236424
  chr12:56511633-56511968
  hyper

SEQ ID NO: 289071 - DNA, 304 bp, Homo sapiens; identical to SEQ ID NO: 236425
  chr12:56521403-56521707
  hyper

SEQ ID NO: 289072 - DNA, 64 bp, Homo sapiens; identical to SEQ ID NO: 236426
  chr12:56522028-56522092
  hyper

SEQ ID NO: 289073 - DNA, 120 bp, Homo sapiens; identical to SEQ ID NO: 203040
  chr12:56552005-56552125
  hyper

SEQ ID NO: 289074 - DNA, 83 bp, Homo sapiens; identical to SEQ ID NO: 236428
  chr12:56614495-56614578
  hyper

SEQ ID NO: 289075 - DNA, 354 bp, Homo sapiens; identical to SEQ ID NO: 236429
  chr12:56615721-56616075
  hyper

SEQ ID NO: 289076 - DNA, 213 bp, Homo sapiens; identical to SEQ ID NO: 236430
  chr12:56618043-56618256
  hyper

SEQ ID NO: 289077 - DNA, 236 bp, Homo sapiens; identical to SEQ ID NO: 236431
  chr12:56652044-56652280
  hyper

SEQ ID NO: 289078 - DNA, 63 bp, Homo sapiens
  chr12:56660466-56660529
  hyper
tctgcggtagacacgcccacgaagtcgcctctgtgcctacctatcgggtcctgtgaccacagg

SEQ ID NO: 289079 - DNA, 52 bp, Homo sapiens; identical to SEQ ID NO: 122523
  chr12:56660589-56660641
  hyper

SEQ ID NO: 289080 - DNA, 52 bp, Homo sapiens; identical to SEQ ID NO: 236433
  chr12:56660884-56660936
  hyper

SEQ ID NO: 289081 - DNA, 84 bp, Homo sapiens; identical to SEQ ID NO: 236434
  chr12:56694265-56694349
  hyper

SEQ ID NO: 289082 - DNA, 244 bp, Homo sapiens; identical to SEQ ID NO: 236435
  chr12:56754009-56754253
  hyper

SEQ ID NO: 289083 - DNA, 388 bp, Homo sapiens; identical to SEQ ID NO: 236436
  chr12:56862356-56862744
  hyper

SEQ ID NO: 289084 - DNA, 73 bp, Homo sapiens
  chr12:56881839-56881912
  hyper
tcctcgcccgcagtgactgccagcccggctcagggccttctgcagagccttcatggagcgcatgccccagcaa

SEQ ID NO: 289085 - DNA, 59 bp, Homo sapiens; identical to SEQ ID NO: 203042
  chr12:56882380-56882439
  hyper

SEQ ID NO: 289086 - DNA, 168 bp, Homo sapiens; identical to SEQ ID NO: 203043
  chr12:57081172-57081340
  hyper

SEQ ID NO: 289087 - DNA, 332 bp, Homo sapiens; identical to SEQ ID NO: 236440
  chr12:57472541-57472873
  hyper

SEQ ID NO: 289088 - DNA, 353 bp, Homo sapiens
  chr12:57504126-57504479
  hyper
gggaggagccacggcgtgaggggcggggccagtgttacctcccaaactcagaagggaagcgcaaggtctgggatcctcgtccgcccgcttggtggcctaaactcgcttatctcaacccctatctgcccgagtcctctgattgtgggaccacaggatcgaaagttaaaacagcttctctgagttgcccaatgcgtgaatgtggcggtgggggcaggcggggaggtggagccagttcagcacgaggagggttaactcggcgccgccgctgggaaatctcagcgtctacagcagccaagcgtggagcagttttgagggggaaattccccctcgtctgggccaccatgaggtctaca

SEQ ID NO: 289089 - DNA, 239 bp, Homo sapiens
  chr12:57504764-57505003
  hyper
ccagtgccaccagccaccaacactagctgaaaccatctcttggggaccatccacccagccaggggaggatcccgagagctccccccacgaatccacccccatgcactcatagaggcccccgcacccacctcggaggcaacccctcacctcggcaacccctctgctgtcttctccctttctcagcgggcacttccaggccccataggtctgtagctctgtccagcgagttcaaggctggc

SEQ ID NO: 289090 - DNA, 35 bp, Homo sapiens; identical to SEQ ID NO: 236443
  chr12:57521847-57521882
  hyper

SEQ ID NO: 289091 - DNA, 188 bp, Homo sapiens; identical to SEQ ID NO: 203046
  chr12:57619157-57619345
  hyper

SEQ ID NO: 289092 - DNA, 255 bp, Homo sapiens
  chr12:57631781-57632036
  hyper
gtggggaggctcacagcccccgtctctggggaatttgggtcttagggacgtaggaaccgagtcctaatatctctccccactcccacgataacctccaccaccccctccctcctcgcagccgatcctgcagagcacctccccctccagagcccgccctgtggagggcgcgggcgggagcgagctatgcacccgtctctgggatcgtcggggtacagggagggagagggcgctttctagggtccgcctccctttcct

SEQ ID NO: 289093 - DNA, 355 bp, Homo sapiens
  chr12:57632124-57632479
  hyper
gataatgagataaagtgtcagagacacggcgagaacaaagagacagagactcgctgcgatgtgtgtggggggggcgggggagcggggctgacgggctgttagagcctccagcagcccagccctcccgagagcccgcgcctccagggcccaggaagggagggcgtgtcctgtcacccgcgcaccccagccctccagtctctgggaccaaaaaacaatcccagagctcaaactcgagcggccgcacaactgggctgcacatctggttctctgtggcacagctggggagccaggacgccggaaggggcgcctggtccttgcgcctttgctcacaggccctcgcctgcttccttgtgcc

SEQ ID NO: 289094 - DNA, 245 bp, Homo sapiens; identical to SEQ ID NO: 203049
  chr12:57634396-57634641
  hyper

SEQ ID NO: 289095 - DNA, 213 bp, Homo sapiens; identical to SEQ ID NO: 203050
  chr12:57635250-57635463
  hyper

SEQ ID NO: 289096 - DNA, 137 bp, Homo sapiens; identical to SEQ ID NO: 236449
  chr12:57824120-57824257
  hyper

SEQ ID NO: 289097 - DNA, 173 bp, Homo sapiens; identical to SEQ ID NO: 236450
  chr12:57853382-57853555
  hyper

SEQ ID NO: 289098 - DNA, 167 bp, Homo sapiens; identical to SEQ ID NO: 236451
  chr12:57855186-57855353
  hyper

SEQ ID NO: 289099 - DNA, 132 bp, Homo sapiens; identical to SEQ ID NO: 236452
  chr12:57881679-57881811
  hyper

SEQ ID NO: 289100 - DNA, 188 bp, Homo sapiens; identical to SEQ ID NO: 203051
  chr12:57941136-57941324
  hyper

SEQ ID NO: 289101 - DNA, 131 bp, Homo sapiens; identical to SEQ ID NO: 203052
  chr12:57984705-57984836
  hyper

SEQ ID NO: 289102 - DNA, 229 bp, Homo sapiens; identical to SEQ ID NO: 236456
  chr12:57998567-57998796
  hyper

SEQ ID NO: 289103 - DNA, 60 bp, Homo sapiens
  chr12:58004947-58005007
  hyper
gagacctgggcagaccctgcagacaggctgaaccccgaccccagcgctccgcagagcccg

SEQ ID NO: 289104 - DNA, 212 bp, Homo sapiens
  chr12:58015267-58015479
  hyper
tcgaaaagggaggaaggacggagggtggaggggtagtatgtgacaagggagcaggaaaggaggttggagccacgtggctgaacgagggcgctgaggaggtgtaagccctggtggcactgggtagagagggcctcgctctgggggtcccgcgccggggcgcatgagccctggcacggggccctctgctcatcgcccctgccctcagacgctgg

SEQ ID NO: 289105 - DNA, 203 bp, Homo sapiens
  chr12:58015548-58015751
  hyper
tgctcgtgccggtcaaggaattgaacgtgagattccgagaccggctacccacgccgatcccgggggaagtcgtcttggtgaggatggccgtgcgcgccggccccctgcccgcgcagaccctgcggtcctgtgggaactggccgctgccgccccctggtggagtgcagagaggccacggaacagagggccggctcacactttcc

SEQ ID NO: 289106 - DNA, 301 bp, Homo sapiens
  chr12:58026315-58026616
  hyper
agcatcacctgggccggggtgggctgcggagggcggctccacacctagcctgtcaggaaaaaatgcagaatcatgcccgtgctggcgggcgcccccggcggaggtgacccgatgagtggcctcggcaagcggcgcgggggacagagtggaccgggaagcgcgcctcctcccgcctcctcccgcctcctcctcctcccctcaccaaccaatcccacccccacccacccccgggcactgacctgtctaacgctctaaggcagcggcaaaatttcggtccgggctgtgccgggctctcgccccg

SEQ ID NO: 289107 - DNA, 280 bp, Homo sapiens; identical to SEQ ID NO: 236461
  chr12:58146166-58146446
  hyper

SEQ ID NO: 289108 - DNA, 36 bp, Homo sapiens
  chr12:58158676-58158712
  hyper
cctctgcctctcgccgctccacgtgcctctgagctg

SEQ ID NO: 289109 - DNA, 173 bp, Homo sapiens; identical to SEQ ID NO: 203053
  chr12:58158778-58158951
  hyper

SEQ ID NO: 289110 - DNA, 251 bp, Homo sapiens; identical to SEQ ID NO: 203054
  chr12:58159038-58159289
  hyper

SEQ ID NO: 289111 - DNA, 147 bp, Homo sapiens; identical to SEQ ID NO: 203055
  chr12:58159346-58159493
  hyper

SEQ ID NO: 289112 - DNA, 31 bp, Homo sapiens
  chr12:58159870-58159901
  hyper
ccctcctgtcgcagcagctcctcgacgagtg

SEQ ID NO: 289113 - DNA, 430 bp, Homo sapiens; identical to SEQ ID NO: 203056
  chr12:58166379-58166809
  hyper

SEQ ID NO: 289114 - DNA, 214 bp, Homo sapiens; identical to SEQ ID NO: 236466
  chr12:58176244-58176458
  hyper

SEQ ID NO: 289115 - DNA, 217 bp, Homo sapiens; identical to SEQ ID NO: 236467
  chr12:58239310-58239527
  hyper

SEQ ID NO: 289116 - DNA, 374 bp, Homo sapiens; identical to SEQ ID NO: 224387
  chr12:58259123-58259497
  hyper

SEQ ID NO: 289117 - DNA, 280 bp, Homo sapiens; identical to SEQ ID NO: 224388
  chr12:58290227-58290507
  hyper

SEQ ID NO: 289118 - DNA, 188 bp, Homo sapiens; identical to SEQ ID NO: 203059
  chr12:59313474-59313662
  hyper

SEQ ID NO: 289119 - DNA, 216 bp, Homo sapiens
  chr12:59313943-59314159
  hyper
cagcgcgccccagcaccgcgcacagcagcagccccaaccccgcggcgcgcgcacggaggctcggcgcgctcatcgcggtccagcggcctaggtctctacccgaagctcccagccggcgcgcgctcggggcccggcacaaacttccagccgagggtgcacgcccgccctcgcggtcgcgtgcgcgctcctccctcgcgctgcccggtcaattccttc

SEQ ID NO: 289120 - DNA, 356 bp, Homo sapiens
  chr12:59314189-59314545
  hyper
cccccaaacagcaggagggaaaccgaaaagaactgccaactgcaacagagttgcagcttgagcagcgtcggctcgccgaagccccttcttgtctgcaaaagaaactttttcgcctccaccccgcggcactgcgccaagtccccgcgcggcggagtagcaaggcgggcgggtagaggccgacgcgcgcccattggccgactcggctgcgggcgtccccgtggccacgtgacaataacaccgctccagccgggggcctacgcgcgggagaaagtggagctgagattgtaggaaattcagagttatattttccagcctctccagccagaagtctccactacgtcgtgggaaacatatat

SEQ ID NO: 289121 - DNA, 35 bp, Homo sapiens
  chr12:59989521-59989556
  hyper
tgcacagagctaccgcacatctgtcttctaggtca

SEQ ID NO: 289122 - DNA, 451 bp, Homo sapiens
  chr12:59989602-59990053
  hyper
gacagatctacctgccttttggctttcttccttggtcaaaactaaaatccgaagtggagtgccccgagcgatagagaaagtgcctatagctttgacagccgcttggagcatgctcagtcggtctccaggcaccgggaggcggctcccccccaccaccccccgggccggcctccaccgcagcctgtccggcccccacccctggcgcgcgctcctccgcacccacaagggcgttcagcagccgcgcctccccttcccgccaccgcctccttctccgctggctgtggcgggcgaggacacgtcaggggccataaataaataaataattccattcacccgttgacagcgaggcgaatcggctgcggtttgctgggaacggagggctgcagcgcccaccctgcgccagagaccagataaagtaagtacagctggggagggaggggagaggaggagg

SEQ ID NO: 289123 - DNA, 449 bp, Homo sapiens; identical to SEQ ID NO: 203063
  chr12:59990544-59990993
  hyper

SEQ ID NO: 289124 - DNA, 31 bp, Homo sapiens; identical to SEQ ID NO: 236474
  chr12:59991053-59991084
  hyper

SEQ ID NO: 289125 - DNA, 175 bp, Homo sapiens; identical to SEQ ID NO: 203064
  chr12:62586338-62586513
  hyper

SEQ ID NO: 289126 - DNA, 391 bp, Homo sapiens
  chr12:62829334-62829725
  hyper
caggagtgcagccaccacgggactgcaccctgccctgggaaccacagcccccgtatctccacatcccaggatctcctgctgacattccccagtgtccactggacagctgcaatggtacagcgctggctggacccaaaaggtgctgcaggggctccagtactctagcccacagggagtacgactccctaaggaaaggacgaaaggctgcagctgctgcaaaagaaaccagagcaagttttccagagcccgaagcttcctttcctggggctgtgagaagtcactctgcccccagcggcagcacaaactctgctccgctttgtaagagaagagagaagtccccatccagaggccgagcagcatctgcaccttgtgctaacgctgtagagagtga

SEQ ID NO: 289127 - DNA, 308 bp, Homo sapiens; identical to SEQ ID NO: 236477
  chr12:62860158-62860466
  hyper

SEQ ID NO: 289128 - DNA, 182 bp, Homo sapiens; identical to SEQ ID NO: 203066
  chr12:63026256-63026438
  hyper

SEQ ID NO: 289129 - DNA, 75 bp, Homo sapiens; identical to SEQ ID NO: 203067
  chr12:63327112-63327187
  hyper

SEQ ID NO: 289130 - DNA, 1396 bp, Homo sapiens
  chr12:63327326-63328722
  hyper
tccctggttcattaataaccttgaattctattctaaatgtctcctagttttcccgtttcgtacagctgaggtagtagatagaagggaaaacgttacttatcttaccattcataagatggttattaatagtcagtggaaaagtggccatggagctgggggaagggcaataaaatcctccacctctcctttcccgattccactctgggtcgtcaacctaactcagtcggttcctgaaatagctgatcagtcaaacgcaagcttaatcaccaaagcggattaccaaaatgttatattagacagttggaataagtttccccctccccaagggctgagggaaatagtactggcatttaccgaaagcgcagcattttactacctgctaaaggagaagcggaggaactcgcgggctgaaagtgagagaaactgagaccttcggaaatgtacaaccacgcactcggacacggccacctcccggaatcggacacaagctcccaggcgcagtgacatctcctccaagcctccacccccataaactcttcatcacgcgggggcgtcaactatattttgggagggtgggggtacagatagcagattttccttatgtgtttcaaacttcagagcttttctgcccgttttttttccccaagtgacagagaccccggattcacagacctgtctcaccttagctttcccacgctccagcgctgccacccacccctccaccacccataccggggctggagacgccgcgtccttgggctgggggaagagggagtggggagaagagggaaatggccagtgtaagtaaagagctccccgccgaggcctggacgccggcagctagtgagagccctgaggccgagaagcagggagagaagagggctggaaccgtgcggggaagggccgcgaggagagcaggggcgccgccggtgtcgctgcactcactctgcgtagccagtggcccagggcagccgccgagtctccttgaggatgaggatggggcgggcgatgtggtcggcgctgcactccacctcgtcctgagacagccccaggaactctggccgcccgtaggggaaacgcaggggcaggtccgagcctccgcagctgccgccgccgtgctcggagcctgagctgccagccatgatgccgcccatgaaattggccacggcagatttcactcgagtgagcatattactccggcgcccggctgcagcggtgcgagcaggaggcggcgggggccgggcaaggcgcagcgcggggcatgcaggctgcggtgggcgccgggcgcacggcgagtcgggccactgggacgcgccgcgcgcggctcccagagcctagtgctgcagggggccgagccccggcctctcgtgcttagtgccgcggtggccgccgcctc

SEQ ID NO: 289131 - DNA, 214 bp, Homo sapiens; identical to SEQ ID NO: 236480
  chr12:63328941-63329155
  hyper

SEQ ID NO: 289132 - DNA, 261 bp, Homo sapiens; identical to SEQ ID NO: 203070
  chr12:63545006-63545267
  hyper

SEQ ID NO: 289133 - DNA, 449 bp, Homo sapiens
  chr12:63545586-63546035
  hyper
gtgtctcctggttttctctatggagactagggacttaaggagttttctctagattcctggggttttctgcgggaaaagcctgattcccacagcggggatggcggaaatttggccgcagtggtccgtggggaccgtctggttactactgagtcgtggggacatctttttgggtggacaaagagcagctgccggacagcggccatccaggcagtgctgtccagggcaagggacagaaaacccgcccggctcctgtgctcaggagtaagaaagaggcaatctcaaagagaggaaagaggccctgggaaggaggggaaacaaccacctacctagtaatccgttactctgaacagctggagcccctctgcagggcgggagggaggcagaaatgcgatctccctcagctctgttttaacgttggtgaagatatgcctcgacggacagcaaggggg

SEQ ID NO: 289134 - DNA, 329 bp, Homo sapiens; identical to SEQ ID NO: 203072
  chr12:64237615-64237944
  hyper

SEQ ID NO: 289135 - DNA, 110 bp, Homo sapiens; identical to SEQ ID NO: 203073
  chr12:64238195-64238305
  hyper

SEQ ID NO: 289136 - DNA, 98 bp, Homo sapiens; identical to SEQ ID NO: 203074
  chr12:64238524-64238622
  hyper

SEQ ID NO: 289137 - DNA, 114 bp, Homo sapiens; identical to SEQ ID NO: 236484
  chr12:64616270-64616384
  hyper

SEQ ID NO: 289138 - DNA, 111 bp, Homo sapiens; identical to SEQ ID NO: 203075
  chr12:64799099-64799210
  hyper

SEQ ID NO: 289139 - DNA, 396 bp, Homo sapiens; identical to SEQ ID NO: 203076
  chr12:64845175-64845571
  hyper

SEQ ID NO: 289140 - DNA, 58 bp, Homo sapiens; identical to SEQ ID NO: 203077
  chr12:65002989-65003047
  hyper

SEQ ID NO: 289141 - DNA, 102 bp, Homo sapiens; identical to SEQ ID NO: 236488
  chr12:65153389-65153491
  hyper

SEQ ID NO: 289142 - DNA, 314 bp, Homo sapiens; identical to SEQ ID NO: 236489
  chr12:65174361-65174675
  hyper

SEQ ID NO: 289143 - DNA, 35 bp, Homo sapiens; identical to SEQ ID NO: 203079
  chr12:65220439-65220474
  hyper

SEQ ID NO: 289144 - DNA, 53 bp, Homo sapiens
  chr12:65514782-65514835
  hyper
aggacataggcaggggaaggcgctggaggcgggggccttacctatgagtactc

SEQ ID NO: 289145 - DNA, 272 bp, Homo sapiens
  chr12:65564381-65564653
  hyper
gaggcggcggccgcggagcagggaggagggtgtgatcaagtggactccagccccgttcctagataccgtgttaacgctaagaaactgacccctctcctgcccccgccacttactgacatggactcaaccttggattcgtcaacaggctcccttctgaaaaccaataatcatattggcggtggggccttcagtgtggactcccccaggatttattctaacagtctccctcccagtgcggcggtggccgcctctagttcactcaggatcaatca

SEQ ID NO: 289146 - DNA, 50 bp, Homo sapiens; identical to SEQ ID NO: 49821
  chr12:65564722-65564772
  hyper

SEQ ID NO: 289147 - DNA, 203 bp, Homo sapiens; identical to SEQ ID NO: 203080
  chr12:66122570-66122773
  hyper

SEQ ID NO: 289148 - DNA, 39 bp, Homo sapiens
  chr12:66136243-66136282
  hyper
gcggggggaggccgggccagggcgcgtctggggccggct

SEQ ID NO: 289149 - DNA, 302 bp, Homo sapiens
  chr12:66216562-66216864
  hyper
tttttaaatgtgcacgattggcagttaggaaatgtcactgtaatcgttaggtgaaacttcaatccctttgatgaagataccatctttgagccaagccctgacagaaaacctttggttcctgttagacccctccctccccagtcagctgctgggctccatccggagggatggaggctctctctctccattacagctaagcgttcccagacccagcagaaaccctgggttcctgcagagcactcaacgtgcagcaaagtgtcccagctctgcaaagggcagctggaaatggatttaaaatggca

SEQ ID NO: 289150 - DNA, 85 bp, Homo sapiens; identical to SEQ ID NO: 203082
  chr12:66216924-66217009
  hyper

SEQ ID NO: 289151 - DNA, 136 bp, Homo sapiens; identical to SEQ ID NO: 203083
  chr12:66217366-66217502
  hyper

SEQ ID NO: 289152 - DNA, 237 bp, Homo sapiens; identical to SEQ ID NO: 203084
  chr12:66217650-66217887
  hyper

SEQ ID NO: 289153 - DNA, 570 bp, Homo sapiens; identical to SEQ ID NO: 203085
  chr12:66217920-66218490
  hyper

SEQ ID NO: 289154 - DNA, 233 bp, Homo sapiens; identical to SEQ ID NO: 203086
  chr12:66218550-66218783
  hyper

SEQ ID NO: 289155 - DNA, 361 bp, Homo sapiens; identical to SEQ ID NO: 203087
  chr12:66219327-66219688
  hyper

SEQ ID NO: 289156 - DNA, 140 bp, Homo sapiens; identical to SEQ ID NO: 203088
  chr12:66220194-66220334
  hyper

SEQ ID NO: 289157 - DNA, 238 bp, Homo sapiens; identical to SEQ ID NO: 236499
  chr12:66563705-66563943
  hyper

SEQ ID NO: 289158 - DNA, 291 bp, Homo sapiens; identical to SEQ ID NO: 236502
  chr12:66696078-66696369
  hyper

SEQ ID NO: 289159 - DNA, 527 bp, Homo sapiens; identical to SEQ ID NO: 236503
  chr12:68041630-68042157
  hyper

SEQ ID NO: 289160 - DNA, 34 bp, Homo sapiens; identical to SEQ ID NO: 203089
  chr12:68617124-68617158
  hyper

SEQ ID NO: 289161 - DNA, 297 bp, Homo sapiens; identical to SEQ ID NO: 203090
  chr12:68758756-68759053
  hyper

SEQ ID NO: 289162 - DNA, 122 bp, Homo sapiens; identical to SEQ ID NO: 203091
  chr12:68759131-68759253
  hyper

SEQ ID NO: 289163 - DNA, 64 bp, Homo sapiens; identical to SEQ ID NO: 224404
  chr12:69080591-69080655
  hyper

SEQ ID NO: 289164 - DNA, 47 bp, Homo sapiens; identical to SEQ ID NO: 224405
  chr12:69080866-69080913
  hyper

SEQ ID NO: 289165 - DNA, 39 bp, Homo sapiens; identical to SEQ ID NO: 203092
  chr12:69241507-69241546
  hyper

SEQ ID NO: 289166 - DNA, 139 bp, Homo sapiens
  chr12:69326514-69326653
  hyper
cagtcttcaaaaacgcttccatcccttcctggcggtggtagttgaaatccagcgcagctaccaaaggcagcaacagccctagccagaggcacgggaagtccatgttctagagatgaataaaaataagaagaacctgaga

SEQ ID NO: 289167 - DNA, 152 bp, Homo sapiens; identical to SEQ ID NO: 236507
  chr12:69548454-69548606
  hyper

SEQ ID NO: 289168 - DNA, 165 bp, Homo sapiens; identical to SEQ ID NO: 236508
  chr12:69550940-69551105
  hyper

SEQ ID NO: 289169 - DNA, 358 bp, Homo sapiens; identical to SEQ ID NO: 236509
  chr12:69724879-69725237
  hyper

SEQ ID NO: 289170 - DNA, 207 bp, Homo sapiens; identical to SEQ ID NO: 236510
  chr12:70133407-70133614
  hyper

SEQ ID NO: 289171 - DNA, 199 bp, Homo sapiens; identical to SEQ ID NO: 203094
  chr12:70637717-70637916
  hyper

SEQ ID NO: 289172 - DNA, 115 bp, Homo sapiens; identical to SEQ ID NO: 236512
  chr12:70759015-70759130
  hyper

SEQ ID NO: 289173 - DNA, 480 bp, Homo sapiens; identical to SEQ ID NO: 203095
  chr12:70760476-70760956
  hyper

SEQ ID NO: 289174 - DNA, 96 bp, Homo sapiens
  chr12:70761129-70761225
  hyper
cctgcgcctaccggactgggtttggagaagtgcaaggagccaagaaagttaacttttcctccatttaaagccagtggttagcggggatccacctac

SEQ ID NO: 289175 - DNA, 97 bp, Homo sapiens; identical to SEQ ID NO: 203097
  chr12:71004045-71004142
  hyper

SEQ ID NO: 289176 - DNA, 175 bp, Homo sapiens
  chr12:71314193-71314368
  hyper
gagaaactccaccacgaccccacttcaggtaaagtgctattagaaagagccaccgccaagggtcttctagtctccgggattcaggtcctcggctggggtttgcagagcagtcagtctgtggcgccgacagaaaccagcaccagcttcaacctccctaagagagggagagaggaag

SEQ ID NO: 289177 - DNA, 310 bp, Homo sapiens
  chr12:71833003-71833313
  hyper
tttagggcaaaagcgagccagacagtgcggcagacgtaaggatcaaaaaggccacctatcattcgccggggacgcctgcctccttaccctgataacgtaactatttctctgcataggattttagtttttgtgtttttgttttgttttattctgtttaatcacttcaagtatctcatccattatttgaagcgggctcggaggaaacgtgccgcatcctccagtccttgtgcgtctgtttaggtctctccgaagcaggtccctctcgactcttagatctgggtctccagcacgcatgaaggggtaagggtgg

SEQ ID NO: 289178 - DNA, 207 bp, Homo sapiens
  chr12:71833930-71834137
  hyper
ctcccaggtctggtgtgttgctgaggggctgccccacacactgtcattgcgagcccgacggcaggatgttgctcagggtggactgctccgacctggggctctcggagctgccttccaacctcagcgtcttcacctcctacctgtaagtacttccccacgtcactccgggagagagactaagaggggaaggaaggttcgtccaaggcg

SEQ ID NO: 289179 - DNA, 500 bp, Homo sapiens
  chr12:71834289-71834789
  hyper
tcgagtgcaacccgggaaagcgctgctgcgccgcagcttcccagtccagcgctagaaacatcgcagggcgaattcctgcaaatgcaggcatttgcgtgcggagtggacatttgtgacccagagcctggtacccaaaggcaggctgccatctggtccccgccccaaccgcctctctgcgtctagtcgcattccacgaaaagatggtctgtagaaagtttccccaaaggagaaacaacttgcccagctccaaagggtttttagtctgcatcccttgcactgtgacgtgatgtaacctttttggggttttttcctcttttcctcccttccttcctcccttcttccttccttccctccctcctttctttttattttctttcttttttaacggcgtgattaaaatgtggcaaccacaaaccccgattagagctgccagaacgttatctttacctttggctgcccgcgccgccctttgaagtgcccgcggccgctgtgtaatcttt

SEQ ID NO: 289180 - DNA, 128 bp, Homo sapiens; identical to SEQ ID NO: 236517
  chr12:72148402-72148530
  hyper

SEQ ID NO: 289181 - DNA, 166 bp, Homo sapiens; identical to SEQ ID NO: 236518
  chr12:72234299-72234465
  hyper

SEQ ID NO: 289182 - DNA, 116 bp, Homo sapiens; identical to SEQ ID NO: 203102
  chr12:72332525-72332641
  hyper

SEQ ID NO: 289183 - DNA, 77 bp, Homo sapiens; identical to SEQ ID NO: 203103
  chr12:72332696-72332773
  hyper

SEQ ID NO: 289184 - DNA, 60 bp, Homo sapiens; identical to SEQ ID NO: 203104
  chr12:72666465-72666525
  hyper

SEQ ID NO: 289185 - DNA, 276 bp, Homo sapiens
  chr12:72667682-72667958
  hyper
atgaaaagcttgccaagttactgtcgagggaaaatacgtggcgctgaaggccaagacaacagcgcatccaggttagcatgtcagggcaggtcagggacacaccgttctccacccccacccacaacatgcccatcttccctgactattagtctcctgccaggtgcagagcagaggatgggctttggctgcgtcaagtttccccaaacttcaagttgagattcggagtgaaaagagtggtttccagagataggctgagaggaccgggacgggggtgga

SEQ ID NO: 289186 - DNA, 500 bp, Homo sapiens; identical to SEQ ID NO: 236521
  chr12:74931275-74931775
  hyper

SEQ ID NO: 289187 - DNA, 229 bp, Homo sapiens; identical to SEQ ID NO: 236524
  chr12:75723898-75724127
  hyper

SEQ ID NO: 289188 - DNA, 146 bp, Homo sapiens; identical to SEQ ID NO: 236526
  chr12:75905415-75905561
  hyper

SEQ ID NO: 289189 - DNA, 182 bp, Homo sapiens; identical to SEQ ID NO: 236527
  chr12:76425500-76425682
  hyper

SEQ ID NO: 289190 - DNA, 157 bp, Homo sapiens; identical to SEQ ID NO: 236528
  chr12:76426120-76426277
  hyper

SEQ ID NO: 289191 - DNA, 217 bp, Homo sapiens; identical to SEQ ID NO: 236529
  chr12:76742083-76742300
  hyper

SEQ ID NO: 289192 - DNA, 218 bp, Homo sapiens; identical to SEQ ID NO: 236530
  chr12:76952933-76953151
  hyper

SEQ ID NO: 289193 - DNA, 304 bp, Homo sapiens; identical to SEQ ID NO: 236531
  chr12:76953529-76953833
  hyper

SEQ ID NO: 289194 - DNA, 84 bp, Homo sapiens; identical to SEQ ID NO: 203106
  chr12:76954040-76954124
  hyper

SEQ ID NO: 289195 - DNA, 114 bp, Homo sapiens; identical to SEQ ID NO: 203107
  chr12:77272744-77272858
  hyper

SEQ ID NO: 289196 - DNA, 341 bp, Homo sapiens; identical to SEQ ID NO: 203108
  chr12:77718709-77719050
  hyper

SEQ ID NO: 289197 - DNA, 133 bp, Homo sapiens
  chr12:77719613-77719746
  hyper
cttccatttcctctttttttctcccctcatttcctttttttcctttcccttttaaagaaaggggaatcgtttgtaaccctttcgttctaccaacgtggaatagctgtgaaacctgcagcgtggtcacctcagc

SEQ ID NO: 289198 - DNA, 204 bp, Homo sapiens
  chr12:79257510-79257714
  hyper
gagaggaagcagggagagaatctatgctttagtcgtcactgctctggcaaggggtcgagagagatgggggagggaggtggcaaaaaataaaaatgaaaaaataaaaaagcatctccaacaatgttgcacttgacccaagtgtacaaacttattggtcgctgcaatggaaactcccagtgcactctccacggcctggcagccgcc

SEQ ID NO: 289199 - DNA, 200 bp, Homo sapiens
  chr12:79258097-79258297
  hyper
ggcatgctcagtatcagggtaggttttgattgagagtaaaaaaaaaaaaaaaaaagctttgtattatgctctctttctcctgtgcatactgcttgctgaacagcttgtggggcattcctgagtctacctagaggttttatcagacgcccttgattgtgtctccttgggatctgttcccctcttacttcaccccctccccc

SEQ ID NO: 289200 - DNA, 157 bp, Homo sapiens
  chr12:79259099-79259256
  hyper
ggagttgatgttgggcatcccccatcttcttgcttcctctttccttctcttgttctctctcctccgtcccccacccccaatctcaatcttttctctctttctctcccacacctcccctctcgccctcctcccaccctaagcacgcacagcgtttctt

SEQ ID NO: 289201 - DNA, 855 bp, Homo sapiens; identical to SEQ ID NO: 224407
  chr12:80084234-80085089
  hyper

SEQ ID NO: 289202 - DNA, 91 bp, Homo sapiens
  chr12:81102562-81102653
  hyper
ggagctgcttcgtgttccttctttgggtgctatgtttgtgtgttgttttttcgctcaggaggagcaagtattgattcgtcagcctcgagta

SEQ ID NO: 289203 - DNA, 385 bp, Homo sapiens; identical to SEQ ID NO: 203112
  chr12:81330352-81330737
  hyper

SEQ ID NO: 289204 - DNA, 312 bp, Homo sapiens; identical to SEQ ID NO: 203113
  chr12:81331319-81331631
  hyper

SEQ ID NO: 289205 - DNA, 158 bp, Homo sapiens; identical to SEQ ID NO: 203114
  chr12:81471297-81471455
  hyper

SEQ ID NO: 289206 - DNA, 59 bp, Homo sapiens; identical to SEQ ID NO: 203115
  chr12:81472132-81472191
  hyper

SEQ ID NO: 289207 - DNA, 290 bp, Homo sapiens; identical to SEQ ID NO: 203116
  chr12:82152215-82152505
  hyper

SEQ ID NO: 289208 - DNA, 394 bp, Homo sapiens
  chr12:82152598-82152992
  hyper
gggtttgactttcagaaacttaaccacgcggcgccgctccccctccgcgcccgggccacccggggtgtgtggggcgtccctccaaaagaaagcttggagaaaaggcgtgagaagtatctgggagagaagttctccacccagtctcccctcctggagcccctctggagtttaaggctaaccctgggagttagaaacctaaaggaaaacgagtccctagggatgcaaaaagcaggacaggtctcctcctggcccccagcctgtttccgcgcgctcccgtgtctcgtttcacttaaaggaggcgctttttctctggaaaggcaaacatcaccccacgccgtcccccggccccccttccctcccccccgccgcccccccgccgccacagcacacacac

SEQ ID NO: 289209 - DNA, 125 bp, Homo sapiens; identical to SEQ ID NO: 203118
  chr12:83080816-83080941
  hyper

SEQ ID NO: 289210 - DNA, 414 bp, Homo sapiens; identical to SEQ ID NO: 122764
  chr12:83080990-83081404
  hyper

SEQ ID NO: 289211 - DNA, 412 bp, Homo sapiens
  chr12:85305245-85305657
  hyper
tttcccagctagggaggaggatggaaagggaaagcgggacgctggagagcgcgagcctgggggctttgcttcctaaaacgcacatcaaaggctgcttctcagctcaggaaaaataattcccgttcccgcagcctgtgccactgggtgggtcatgcctgttcccgaacgcctcgggcgtcttgattcattcttatgtatccagttggtgcgctacgttagagtgcaaggatttccctgtactcaataccgtcttcttcccagtcacacacagaccagcctagtgaaagaaaggtagaaacgatctgggtttctaactgcttcccatcttcttacagtcccagcagcaccaccctcaccgccacactctcaaattccaggatgcgcagaaacacaggagccgtgatttctccag

SEQ ID NO: 289212 - DNA, 254 bp, Homo sapiens; identical to SEQ ID NO: 203122
  chr12:85305980-85306234
  hyper

SEQ ID NO: 289213 - DNA, 58 bp, Homo sapiens
  chr12:85430011-85430069
  hyper
ccctgaaatgctgcgttcgtttcaatttagaatcgagattgtttgtccttctagagca

SEQ ID NO: 289214 - DNA, 252 bp, Homo sapiens
  chr12:85430099-85430351
  hyper
gtgattggctgttgccatggatacgctttgtgtagcggctatgggcgctgtcttacaacaaagccaaggaatctcgctgctgaggggtgagccggggtcttaagactgggattcccgttgagggaggtgaacagctgtgggagctcaggccgagccgggactctctctgcctggccagacttccagcaaagggagagaccgcgggtcaggggatggctgtgcgactctgcgaagctcgaggctcccttccac

SEQ ID NO: 289215 - DNA, 169 bp, Homo sapiens; identical to SEQ ID NO: 236547
  chr12:85668062-85668231
  hyper

SEQ ID NO: 289216 - DNA, 109 bp, Homo sapiens
  chr12:85674884-85674993
  hyper
acgcgttgaatgtttgttaaacactaaagcacactaaatagcttcgggcaaaccatccccggcctaatcactcattcccagattctacgttttgtatttttatgacttc

SEQ ID NO: 289217 - DNA, 57 bp, Homo sapiens; identical to SEQ ID NO: 236549
  chr12:88429153-88429210
  hyper

SEQ ID NO: 289218 - DNA, 160 bp, Homo sapiens; identical to SEQ ID NO: 203123
  chr12:88973384-88973544
  hyper

SEQ ID NO: 289219 - DNA, 577 bp, Homo sapiens; identical to SEQ ID NO: 203124
  chr12:88973582-88974159
  hyper

SEQ ID NO: 289220 - DNA, 177 bp, Homo sapiens; identical to SEQ ID NO: 203125
  chr12:88974253-88974430
  hyper

SEQ ID NO: 289221 - DNA, 49 bp, Homo sapiens; identical to SEQ ID NO: 203126
  chr12:88974679-88974728
  hyper

SEQ ID NO: 289222 - DNA, 350 bp, Homo sapiens; identical to SEQ ID NO: 236551
  chr12:89744647-89744997
  hyper

SEQ ID NO: 289223 - DNA, 276 bp, Homo sapiens; identical to SEQ ID NO: 236552
  chr12:89746244-89746520
  hyper

SEQ ID NO: 289224 - DNA, 449 bp, Homo sapiens; identical to SEQ ID NO: 203128
  chr12:89747142-89747591
  hyper

SEQ ID NO: 289225 - DNA, 237 bp, Homo sapiens; identical to SEQ ID NO: 236554
  chr12:89919819-89920056
  hyper

SEQ ID NO: 289226 - DNA, 421 bp, Homo sapiens; identical to SEQ ID NO: 203129
  chr12:90101338-90101759
  hyper

SEQ ID NO: 289227 - DNA, 140 bp, Homo sapiens; identical to SEQ ID NO: 236556
  chr12:91502983-91503123
  hyper

SEQ ID NO: 289228 - DNA, 91 bp, Homo sapiens; identical to SEQ ID NO: 49909
  chr12:91775751-91775842
  hyper

SEQ ID NO: 289229 - DNA, 35 bp, Homo sapiens; identical to SEQ ID NO: 236558
  chr12:93323253-93323288
  hyper

SEQ ID NO: 289230 - DNA, 255 bp, Homo sapiens; identical to SEQ ID NO: 236559
  chr12:93835925-93836180
  hyper

SEQ ID NO: 289231 - DNA, 201 bp, Homo sapiens; identical to SEQ ID NO: 236560
  chr12:93964217-93964418
  hyper

SEQ ID NO: 289232 - DNA, 271 bp, Homo sapiens; identical to SEQ ID NO: 203130
  chr12:93966030-93966301
  hyper

SEQ ID NO: 289233 - DNA, 65 bp, Homo sapiens; identical to SEQ ID NO: 49916
  chr12:93967274-93967339
  hyper

SEQ ID NO: 289234 - DNA, 64 bp, Homo sapiens; identical to SEQ ID NO: 203132
  chr12:93985620-93985684
  hyper

SEQ ID NO: 289235 - DNA, 113 bp, Homo sapiens
  chr12:94541784-94541897
  hyper
tcactcatccgacccggggaaacccacaccctgtcacaggggcgccttggtccccggagtctccggctcggccatgtctcccgcgcgcctccccggggcctccctctcgccgc

SEQ ID NO: 289236 - DNA, 1131 bp, Homo sapiens
  chr12:94541957-94543088
  hyper
aaccccttcgcaccctggatcctcgctccgcgcgcctggcgtatccccgacccggctgctgtcgtaaacaaaaccgggcgttggagcagcaccgcgggcggacgggcgcgggagcccgctccgtgcgccgttagcgcgccccgggagccccaggcgagccaagggggcgatggtggcggccgcggcggccgcggcgggcggctgagctttgttatgaatagatgaaagaggccacctacacagtaacccaaattacgagacctccctcctccctatctcaccgaatcaagaggggaggggagatgggcgtggagggagggcgggcgggcgggcaggaggcggagggcggaggaggaagagaggatgaggaagggggccagttgcatcccactttcacaatgggaaagtgaaacgcacaagcgcacccaacctctccagccctccccgcccgcctcgctcctctccgcccgtcccctcccttcccctccgcgcctccccgcgagcgccagcgctgcacacaggaactctccggcgaaggagggcgaggaggaaacggtgccggagcgcgcagggcttgctgccgccaccgccgctgcacaggctgccggagcgagcctgccgcgcgccgccctccccgctctccttcctgggcgagctgcggggatggggcggccgcgggagcccgagcgcgcgcaggaaccgccgccgccgccgcccgcgtctccgttgccgcgcgcctgagccgccgtcgccgccgcgcgccctgcccgggggcggcccccccagccccatggaggtctcccggaggaaggcgccgccgcgccccccgcgccccgcagcgccactgcccctgctcgcctatctgctggcactggcggctcccggccggggcgcggacgagcccgtgtggcggtcggagcaagccatcggagccatcgcggcgagccaggaggacggcgtgtttgtggcgagcggcagctgcctggaccagctggactacagcctggagcacagcctctcgcgcctgtaccgggaccaagcgggcaactgcacagagccggtctcgctggcgccccccgcgcggccccggcccgggagcagcttcagcaagctgctgctgccctaccgcga

SEQ ID NO: 289237 - DNA, 100 bp, Homo sapiens; identical to SEQ ID NO: 203134
  chr12:94544052-94544152
  hyper

SEQ ID NO: 289238 - DNA, 34 bp, Homo sapiens; identical to SEQ ID NO: 203135
  chr12:94544417-94544451
  hyper

SEQ ID NO: 289239 - DNA, 137 bp, Homo sapiens; identical to SEQ ID NO: 236564
  chr12:94853872-94854009
  hyper

SEQ ID NO: 289240 - DNA, 153 bp, Homo sapiens; identical to SEQ ID NO: 203136
  chr12:95397472-95397625
  hyper

SEQ ID NO: 289241 - DNA, 31 bp, Homo sapiens; identical to SEQ ID NO: 236567
  chr12:95467508-95467539
  hyper

SEQ ID NO: 289242 - DNA, 51 bp, Homo sapiens; identical to SEQ ID NO: 236568
  chr12:95867761-95867812
  hyper

SEQ ID NO: 289243 - DNA, 88 bp, Homo sapiens; identical to SEQ ID NO: 203137
  chr12:96183452-96183540
  hyper

SEQ ID NO: 289244 - DNA, 109 bp, Homo sapiens; identical to SEQ ID NO: 203138
  chr12:96183926-96184035
  hyper

SEQ ID NO: 289245 - DNA, 72 bp, Homo sapiens; identical to SEQ ID NO: 203139
  chr12:96184965-96185037
  hyper

SEQ ID NO: 289246 - DNA, 219 bp, Homo sapiens; identical to SEQ ID NO: 203140
  chr12:96185121-96185340
  hyper

SEQ ID NO: 289247 - DNA, 122 bp, Homo sapiens; identical to SEQ ID NO: 203141
  chr12:96252231-96252353
  hyper

SEQ ID NO: 289248 - DNA, 191 bp, Homo sapiens; identical to SEQ ID NO: 236574
  chr12:96252588-96252779
  hyper

SEQ ID NO: 289249 - DNA, 114 bp, Homo sapiens; identical to SEQ ID NO: 203142
  chr12:96336966-96337080
  hyper

SEQ ID NO: 289250 - DNA, 206 bp, Homo sapiens; identical to SEQ ID NO: 224419
  chr12:96587648-96587854
  hyper

SEQ ID NO: 289251 - DNA, 33 bp, Homo sapiens; identical to SEQ ID NO: 224420
  chr12:96618052-96618085
  hyper

SEQ ID NO: 289252 - DNA, 97 bp, Homo sapiens; identical to SEQ ID NO: 236576
  chr12:96794233-96794330
  hyper

SEQ ID NO: 289253 - DNA, 79 bp, Homo sapiens; identical to SEQ ID NO: 236578
  chr12:97300789-97300868
  hyper

SEQ ID NO: 289254 - DNA, 390 bp, Homo sapiens; identical to SEQ ID NO: 236579
  chr12:97379542-97379932
  hyper

SEQ ID NO: 289255 - DNA, 113 bp, Homo sapiens; identical to SEQ ID NO: 236580
  chr12:98897819-98897932
  hyper

SEQ ID NO: 289256 - DNA, 103 bp, Homo sapiens; identical to SEQ ID NO: 236581
  chr12:98987129-98987232
  hyper

SEQ ID NO: 289257 - DNA, 39 bp, Homo sapiens; identical to SEQ ID NO: 236582
  chr12:99037822-99037861
  hyper

SEQ ID NO: 289258 - DNA, 84 bp, Homo sapiens; identical to SEQ ID NO: 236583
  chr12:99038221-99038305
  hyper

SEQ ID NO: 289259 - DNA, 33 bp, Homo sapiens; identical to SEQ ID NO: 236584
  chr12:99038997-99039030
  hyper

SEQ ID NO: 289260 - DNA, 356 bp, Homo sapiens; identical to SEQ ID NO: 122851
  chr12:99139525-99139881
  hyper

SEQ ID NO: 289261 - DNA, 646 bp, Homo sapiens; identical to SEQ ID NO: 203143
  chr12:99287504-99288150
  hyper

SEQ ID NO: 289262 - DNA, 165 bp, Homo sapiens; identical to SEQ ID NO: 203144
  chr12:99289349-99289514
  hyper

SEQ ID NO: 289263 - DNA, 189 bp, Homo sapiens; identical to SEQ ID NO: 236588
  chr12:100594720-100594909
  hyper

SEQ ID NO: 289264 - DNA, 63 bp, Homo sapiens; identical to SEQ ID NO: 236589
  chr12:100660779-100660842
  hyper

SEQ ID NO: 289265 - DNA, 651 bp, Homo sapiens; identical to SEQ ID NO: 203145
  chr12:100967341-100967992
  hyper

SEQ ID NO: 289266 - DNA, 117 bp, Homo sapiens; identical to SEQ ID NO: 236592
  chr12:101673658-101673775
  hyper

SEQ ID NO: 289267 - DNA, 254 bp, Homo sapiens; identical to SEQ ID NO: 236593
  chr12:101673990-101674244
  hyper

SEQ ID NO: 289268 - DNA, 603 bp, Homo sapiens; identical to SEQ ID NO: 203146
  chr12:102455400-102456003
  hyper

SEQ ID NO: 289269 - DNA, 138 bp, Homo sapiens; identical to SEQ ID NO: 236595
  chr12:102878315-102878453
  hyper

SEQ ID NO: 289270 - DNA, 121 bp, Homo sapiens; identical to SEQ ID NO: 203147
  chr12:103311039-103311160
  hyper

SEQ ID NO: 289271 - DNA, 204 bp, Homo sapiens; identical to SEQ ID NO: 203148
  chr12:103311290-103311494
  hyper

SEQ ID NO: 289272 - DNA, 116 bp, Homo sapiens; identical to SEQ ID NO: 203149
  chr12:103311495-103311611
  hyper

SEQ ID NO: 289273 - DNA, 230 bp, Homo sapiens
  chr12:103344363-103344593
  hyper
gacctcagtcacttcggtaaactgcccttgctttccggaggcggcaggaacgtttcaggagctccaaggctctaggcgcctgcattcctcgccccagccggtagtctcctagccctgttgaacgcaagagcatccaagggcgcgcaagtccccaagagctctcagaggttcctgaccctgagcgttaaagcccttcctcgcggatgagacccttggtgcgttccacccgc

SEQ ID NO: 289274 - DNA, 115 bp, Homo sapiens
  chr12:103350083-103350198
  hyper
tttctccgcagcgccgcgtccccagacgtcctgaagctggacggggttctggccagagagcgccagggccgaaggcccaggaaggacgcctgggcaggcgctgtccaagcggtcg

SEQ ID NO: 289275 - DNA, 294 bp, Homo sapiens
  chr12:103350622-103350916
  hyper
ccccacacacttgctcagttatggggagcacatcctagtttttagagctgaatgggacattagagaccatattctgtggctgcagacgaggaagcgaaggctcagagaggatgccacttcgaggagccacagagcattgagaggacgccttgggactagaacccacgttttcacatagtccagcactttttttcactgttctggacggagtccctcccccaaccatgtttctaaacttcaatcgtaatttgctccaatttctagggtcaccgaggaacccgaagagaataacag

SEQ ID NO: 289276 - DNA, 272 bp, Homo sapiens; identical to SEQ ID NO: 203150
  chr12:103351144-103351416
  hyper

SEQ ID NO: 289277 - DNA, 212 bp, Homo sapiens; identical to SEQ ID NO: 203151
  chr12:103355123-103355335
  hyper

SEQ ID NO: 289278 - DNA, 148 bp, Homo sapiens; identical to SEQ ID NO: 236603
  chr12:103355911-103356059
  hyper

SEQ ID NO: 289279 - DNA, 202 bp, Homo sapiens; identical to SEQ ID NO: 122896
  chr12:103696193-103696395
  hyper

SEQ ID NO: 289280 - DNA, 73 bp, Homo sapiens; identical to SEQ ID NO: 203152
  chr12:103890025-103890098
  hyper

SEQ ID NO: 289281 - DNA, 475 bp, Homo sapiens; identical to SEQ ID NO: 236607
  chr12:104235216-104235691
  hyper

SEQ ID NO: 289282 - DNA, 374 bp, Homo sapiens
  chr12:104322592-104322966
  hyper
ccgcacactaaatacgggaagttgtaaaagactgtgacagactgtcactaaaaaacttgtcttcaggaattcggacgattatctgaaaagatattcaaagttcaattttgttggaggaagcaataaggaagtggggtgtctatgtcagagacgggcgcgggtatgcgagggggtaacgtatagagtaggttaaagagacgtagaaaatatttccaaaggcacaagtttagcatgagggacttccctcacaggaaagacacctggtgttttatatgtccttctgagcacagacagggtatttctatgaagttacaaagctgcaatcccgttctcatgtgcagcaccacaggttttgctttcaaatatctgcaggt

SEQ ID NO: 289283 - DNA, 247 bp, Homo sapiens
  chr12:104323141-104323388
  hyper
ggtcgggaaggtcccaaccacgttcttctgtaaaccagataaggaaggcctggggattccggccgcggaaaggcacagaggaggtgaacgctccggctgcccaagtgacgcacttgtaggcggattcggaaactcgtgctcttgagccggaggcggagcccccagactcagaccgaccccccagaaccgggcggccttgcccgaggcatgaaggctttctaggcccgcttctaaaagctgtgtacaa

SEQ ID NO: 289284 - DNA, 309 bp, Homo sapiens; identical to SEQ ID NO: 236609
  chr12:104324276-104324585
  hyper

SEQ ID NO: 289285 - DNA, 366 bp, Homo sapiens; identical to SEQ ID NO: 236610
  chr12:104359127-104359493
  hyper

SEQ ID NO: 289286 - DNA, 240 bp, Homo sapiens; identical to SEQ ID NO: 203155
  chr12:104443911-104444151
  hyper

SEQ ID NO: 289287 - DNA, 98 bp, Homo sapiens; identical to SEQ ID NO: 203156
  chr12:104459023-104459121
  hyper

SEQ ID NO: 289288 - DNA, 67 bp, Homo sapiens; identical to SEQ ID NO: 236612
  chr12:104532325-104532392
  hyper

SEQ ID NO: 289289 - DNA, 115 bp, Homo sapiens; identical to SEQ ID NO: 236614
  chr12:104680592-104680707
  hyper

SEQ ID NO: 289290 - DNA, 727 bp, Homo sapiens; identical to SEQ ID NO: 203157
  chr12:104682328-104683055
  hyper

SEQ ID NO: 289291 - DNA, 102 bp, Homo sapiens
  chr12:104850142-104850244
  hyper
gaaagctcagctgtcgcctgacccgagggtcgtgcagtttccttaaccctgactttaagtcagccctctttaaccccgactcccaagctgggctgtcctttg

SEQ ID NO: 289292 - DNA, 348 bp, Homo sapiens; identical to SEQ ID NO: 203159
  chr12:104851545-104851893
  hyper

SEQ ID NO: 289293 - DNA, 100 bp, Homo sapiens; identical to SEQ ID NO: 203160
  chr12:105477920-105478020
  hyper

SEQ ID NO: 289294 - DNA, 104 bp, Homo sapiens
  chr12:105478419-105478523
  hyper
gccccctagctgtcaagaccccgcccccagctggaaggccccgccccgccagctggctgcgttcggacagccaacctggtgcgacccggcggagcgcgtgggct

SEQ ID NO: 289295 - DNA, 229 bp, Homo sapiens; identical to SEQ ID NO: 236620
  chr12:105629078-105629307
  hyper

SEQ ID NO: 289296 - DNA, 125 bp, Homo sapiens
  chr12:106532092-106532217
  hyper
agagagccccagggcgcacagacccccgcctcgcacgccctcagtccccggccgcgtccacccagcgccccccgcaccctccaggattgccccactcaccactcggccagaaaacctctcggtgg

SEQ ID NO: 289297 - DNA, 588 bp, Homo sapiens
  chr12:106532406-106532994
  hyper
ccacaggcgcggcggccccttccatgtccaagcgcggggcgagccgggctacagagggcaagaccgggcacagcgctgggatgtcggggtccccaccgagggaagccgctgtacgctcaaggtcgcccccgcagcatcagggaggcggcccgataccgctcggactgcggctcggtcactggcggcggcggggactgcacatctggcgcccgcggcgcgcacggtccgcgcaccgccccccggccgcggcgagctgtggagcgtcgggcgaggtggcggcggtggcaggggaggcggtggtgtttgcaggagggaggggagagggtggctcgcagcgcaggagggggagtgttatgtggggcgccgcgccccccaacccctccccgggaggacgcgcagacggggcgggggcggcgctcgcgcggccccaggggagggggagcgaggggcggtgcagccagggcttcccccacctccctgcagccacccggggccggggccgccgtgagctgggagggggatgggagcgtgtcgcgactcgccctttgtgcggcgcggcgtaggccacggcggcggcggcggcggcgg

SEQ ID NO: 289298 - DNA, 103 bp, Homo sapiens
  chr12:106533276-106533379
  hyper
ttttcttgtaggtgtcgccgcagcctggcggccggagctgggggagggggcagggaggcctggtgttcggttacaggcggtgactcacggaccttgcccgccc

SEQ ID NO: 289299 - DNA, 264 bp, Homo sapiens; identical to SEQ ID NO: 203162
  chr12:106640992-106641256
  hyper

SEQ ID NO: 289300 - DNA, 54 bp, Homo sapiens; identical to SEQ ID NO: 203163
  chr12:106641515-106641569
  hyper

SEQ ID NO: 289301 - DNA, 95 bp, Homo sapiens; identical to SEQ ID NO: 236625
  chr12:106695918-106696013
  hyper

SEQ ID NO: 289302 - DNA, 37 bp, Homo sapiens; identical to SEQ ID NO: 236626
  chr12:106751649-106751686
  hyper

SEQ ID NO: 289303 - DNA, 78 bp, Homo sapiens
  chr12:106975168-106975246
  hyper
gggctctgtccagccggtaccgcgcgccgccttcttcctcccgcaccgtgaccttaactcggcacgtgctggcccctc

SEQ ID NO: 289304 - DNA, 221 bp, Homo sapiens
  chr12:106976182-106976403
  hyper
gcttcactccccacgcgtgtctgcggatccgcgtgcaaggggtcaagacataccccctcccgcattctcagggccaccacccgaaatctaacccaggaccaaaatggggggtgggtgggggcgcaagagaaggaagggagtggggccccactcgtggtagcgcaggcgactccccaggctccaggagttccccgcggctccccccccgcccgcgcccccct

SEQ ID NO: 289305 - DNA, 985 bp, Homo sapiens
  chr12:107167936-107168921
  hyper
ccagcatgcccttggcgggaattctttccggctggatgactaccaatcccagcatgccattcggcacgccagtaaattagatggaagagcgggatagccccattgcatgcagggaattgcagtccatttagcggctggttcatagatgggcggggaagagccgggttgctctagtcctttgagaatgattcatagaggagggtcaggaaagaagaacggttcagtctgtgaaagcccccttaaaagactggacagttctccgagggagggagaggcaggagagcaagcagggccttgggcctgactccgcctcggtccgctagccaggcctcgaccgagtcctgggccttgtcaggggcggccgtgaggcgccggttgctgggggagcggtgacgtcgcggggtgaaagttgaggggcggtgacgtcgggccggcccgggcggaggctggcgggttggaggcaggacggagggagggaaagagggaaggaaggaagctgggaaggagcgagcgggggcgcgaggcgtttacctggaggcagcggcttgggcgcgcagagcggccgcggctcccccgcacctgcggccatggatgaggagcgcgccctctacatcgtccgggccggcgaagcaggggctatcgagcgggtcctgagggattacagcgacaaggtaaagagtcctggccccgggcgtgcggtatcgcacccccgggccgccctccgtgcttgcacatcgcatccttccccacccccctcattccggggatgcgcattgctctcccccgaaaacgtttccggcttgggcatgcgtgtttgtgcccccagccttttccatccatgcatcctgcatcccactacccccactgtagcgcccactcctctgattcctggcccagcagcttgacctccggtcctcctctcaagcgtgcaagtcacacccccggaatccgtagatgtgcatctgtgccccgtgccccactcctg

SEQ ID NO: 289306 - DNA, 140 bp, Homo sapiens; identical to SEQ ID NO: 236635
  chr12:107349516-107349656
  hyper

SEQ ID NO: 289307 - DNA, 86 bp, Homo sapiens; identical to SEQ ID NO: 203166
  chr12:107486364-107486450
  hyper

SEQ ID NO: 289308 - DNA, 522 bp, Homo sapiens; identical to SEQ ID NO: 203167
  chr12:107486672-107487194
  hyper

SEQ ID NO: 289309 - DNA, 34 bp, Homo sapiens; identical to SEQ ID NO: 203168
  chr12:107487855-107487889
  hyper

SEQ ID NO: 289310 - DNA, 93 bp, Homo sapiens; identical to SEQ ID NO: 236637
  chr12:107488134-107488227
  hyper

SEQ ID NO: 289311 - DNA, 243 bp, Homo sapiens
  chr12:107711707-107711950
  hyper
gctggagcaaaccccggctgaaagagggccgcactaattggtttgcgtacccgaagtgggaatagagagggaggaaaaccatgtttcaggtgttacggggggaaaaaagtgaaatgcgaaccgcaggggagagagcgaccgtcaggcagacaccttgtgaaccgcggtggagagcacacctaggtggggaggtcaccggcccaacccaccaccctccgggagaatgcgggcagggacagcagc

SEQ ID NO: 289312 - DNA, 868 bp, Homo sapiens; identical to SEQ ID NO: 203169
  chr12:107712337-107713205
  hyper

SEQ ID NO: 289313 - DNA, 648 bp, Homo sapiens; identical to SEQ ID NO: 203170
  chr12:107713427-107714075
  hyper

SEQ ID NO: 289314 - DNA, 305 bp, Homo sapiens; identical to SEQ ID NO: 203171
  chr12:107714115-107714420
  hyper

SEQ ID NO: 289315 - DNA, 34 bp, Homo sapiens
  chr12:107715317-107715351
  hyper
agagcccttccccgtctgctgccagccagggcac

SEQ ID NO: 289316 - DNA, 38 bp, Homo sapiens
  chr12:108079429-108079467
  hyper
ccagaccagcccacgtggattcctcgcccggctgcttc

SEQ ID NO: 289317 - DNA, 115 bp, Homo sapiens; identical to SEQ ID NO: 122946
  chr12:108079515-108079630
  hyper

SEQ ID NO: 289318 - DNA, 308 bp, Homo sapiens
  chr12:108237794-108238102
  hyper
gatcgcctagcttggctgccccagctgccgcatctgtccctctgtccgcgtctctgggagcccggcggggtgggaggttgctggctgttgctgtccactccggatcctgaggccgcccagggtactcctaccccgcctgcctcggtgcccctgacctgcagtcgtcacctgcactccaggcgggcaacaacagcgaggacaccctgcccggccaggctcccagcatcagagacgctgggtggacaacgtggtggcggccaatccaggtggtccgccagaccgcggcagagacaacgcagaggctgcgg

SEQ ID NO: 289319 - DNA, 45 bp, Homo sapiens; identical to SEQ ID NO: 50027
  chr12:108238683-108238728
  hyper

SEQ ID NO: 289320 - DNA, 41 bp, Homo sapiens; identical to SEQ ID NO: 226552
  chr12:108298348-108298389
  hyper

SEQ ID NO: 289321 - DNA, 186 bp, Homo sapiens
  chr12:108523022-108523208
  hyper
ggtaggcagtgctgtggctccgtgcgaggagcgcgccgggctgaggcgcgctgctggtggcggcggcggcagcggcgcgggagctagggctggagacgtgaagtccaggggagcgagcaaggcagccaaggaggcagcggcgaggcagcgagagagagccaggcggccggagctccgcgccgagcc

SEQ ID NO: 289322 - DNA, 173 bp, Homo sapiens
  chr12:108523439-108523612
  hyper
aggcgcacactatcccactttcccgctggaggcgcagaggatgccccttgagccagacctggagaaatagccccagggcccggcaggaggagccttggtggcgagaaaggaaatccaggctcccctttccttaaagccactgcagcagctgggaaggcgcccacagagcgggc

SEQ ID NO: 289323 - DNA, 92 bp, Homo sapiens; identical to SEQ ID NO: 236644
  chr12:108908840-108908932
  hyper

SEQ ID NO: 289324 - DNA, 121 bp, Homo sapiens; identical to SEQ ID NO: 203172
  chr12:108956083-108956204
  hyper

SEQ ID NO: 289325 - DNA, 174 bp, Homo sapiens; identical to SEQ ID NO: 203173
  chr12:109162558-109162732
  hyper

SEQ ID NO: 289326 - DNA, 71 bp, Homo sapiens; identical to SEQ ID NO: 203174
  chr12:109162762-109162833
  hyper

SEQ ID NO: 289327 - DNA, 116 bp, Homo sapiens; identical to SEQ ID NO: 203175
  chr12:109250887-109251003
  hyper

SEQ ID NO: 289328 - DNA, 414 bp, Homo sapiens; identical to SEQ ID NO: 236649
  chr12:109531040-109531454
  hyper

SEQ ID NO: 289329 - DNA, 98 bp, Homo sapiens; identical to SEQ ID NO: 203176
  chr12:109535377-109535475
  hyper

SEQ ID NO: 289330 - DNA, 169 bp, Homo sapiens; identical to SEQ ID NO: 203177
  chr12:109592371-109592540
  hyper

SEQ ID NO: 289331 - DNA, 589 bp, Homo sapiens
  chr12:109746919-109747508
  hyper
gtacctggagccgatcctcgcggggccgccgctgccggcgctccgggggtgggcaggggttccggaggggggctccctcgcgctcgcccctcgcgttccgcaatttggccgccgtcgcagctcgaaccgtttttaaatttccctctctggagctgtccagctcagagcatgcgcagtagccgtgcggggggcttttccccaagggtcagttacagggcagggtcaaggggattgcagcgggcgtttcccagcagccgcgagccttgcacgccccggggttctggggggggggtgtgtgtgaggggggcggggcggaggagtgcaggggtagggacccctcttcaaactttgccaacagtgacaacaactgcatgcccgagagcatgcgttgaggagcagtgggagggtgatttcggccaagggaattaagttgcaaaaggaggctgggtgcattaaaacttgcaatcccgcctggggcaaaggacgtgggcgggcggagagatctgttgcaaccccctctctcccccaaagtggaggacgggccgggaggcagagacggggccccaggtggacgcggattcggtccacc

SEQ ID NO: 289332 - DNA, 136 bp, Homo sapiens; identical to SEQ ID NO: 236653
  chr12:109747913-109748049
  hyper

SEQ ID NO: 289333 - DNA, 175 bp, Homo sapiens; identical to SEQ ID NO: 236654
  chr12:109915370-109915545
  hyper

SEQ ID NO: 289334 - DNA, 268 bp, Homo sapiens; identical to SEQ ID NO: 236655
  chr12:110011228-110011496
  hyper

SEQ ID NO: 289335 - DNA, 680 bp, Homo sapiens; identical to SEQ ID NO: 236656
  chr12:110337997-110338677
  hyper

SEQ ID NO: 289336 - DNA, 165 bp, Homo sapiens; identical to SEQ ID NO: 236657
  chr12:110561795-110561960
  hyper

SEQ ID NO: 289337 - DNA, 322 bp, Homo sapiens; identical to SEQ ID NO: 236658
  chr12:110841360-110841682
  hyper

SEQ ID NO: 289338 - DNA, 200 bp, Homo sapiens; identical to SEQ ID NO: 236659
  chr12:110906303-110906503
  hyper

SEQ ID NO: 289339 - DNA, 48 bp, Homo sapiens
  chr12:110939787-110939835
  hyper
cggctcccaacaacgcagcaccccacccgagagccaggccttggtcgc

SEQ ID NO: 289340 - DNA, 102 bp, Homo sapiens; identical to SEQ ID NO: 122993
  chr12:110939888-110939990
  hyper

SEQ ID NO: 289341 - DNA, 147 bp, Homo sapiens; identical to SEQ ID NO: 203180
  chr12:111021164-111021311
  hyper

SEQ ID NO: 289342 - DNA, 44 bp, Homo sapiens; identical to SEQ ID NO: 236662
  chr12:111051731-111051775
  hyper

SEQ ID NO: 289343 - DNA, 65 bp, Homo sapiens; identical to SEQ ID NO: 203181
  chr12:111052028-111052093
  hyper

SEQ ID NO: 289344 - DNA, 217 bp, Homo sapiens; identical to SEQ ID NO: 236664
  chr12:111126683-111126900
  hyper

SEQ ID NO: 289345 - DNA, 99 bp, Homo sapiens
  chr12:111284505-111284604
  hyper
cagcgattgcatggcgttggccgagggaggggctaagactgttgattgactcaagaagtcacttagcgtcatgagggtccgggtagtctggtaaggggt

SEQ ID NO: 289346 - DNA, 41 bp, Homo sapiens
  chr12:111285034-111285075
  hyper
ggtctcccgcaatcatgcataaataaattgtagtgtgtaaa

SEQ ID NO: 289347 - DNA, 33 bp, Homo sapiens; identical to SEQ ID NO: 203182
  chr12:111471132-111471165
  hyper

SEQ ID NO: 289348 - DNA, 371 bp, Homo sapiens
  chr12:111473017-111473388
  hyper
tctgtttctttcctctcttccctgctctttctctctccttccctagggcgactcttcgaaaccccatcactttctccccatcctccctttgtgggagtctgtgtgcctcccctagatttggaggtgttctctgcggaccccgtaggagccggggctgggaggtggaatctcagagaacgcaccgtggaggcgcggctccggcctctgttctttcccggagtgccccggacgcgcctggcaaggccccccagccttggagtctcgcaaagtctcggcgggtgcggcggggatcaggggcgggaaaatggtgcggataacagggcggttagagcatcctgccttgaccgtgacattcgcggaagacgcgagat

SEQ ID NO: 289349 - DNA, 100 bp, Homo sapiens; identical to SEQ ID NO: 236668
  chr12:111843201-111843301
  hyper

SEQ ID NO: 289350 - DNA, 335 bp, Homo sapiens; identical to SEQ ID NO: 203184
  chr12:111844275-111844610
  hyper

SEQ ID NO: 289351 - DNA, 120 bp, Homo sapiens; identical to SEQ ID NO: 203185
  chr12:111844690-111844810
  hyper

SEQ ID NO: 289352 - DNA, 57 bp, Homo sapiens; identical to SEQ ID NO: 236670
  chr12:112036146-112036203
  hyper

SEQ ID NO: 289353 - DNA, 181 bp, Homo sapiens; identical to SEQ ID NO: 236671
  chr12:112123544-112123725
  hyper

SEQ ID NO: 289354 - DNA, 37 bp, Homo sapiens; identical to SEQ ID NO: 236672
  chr12:112123942-112123979
  hyper

SEQ ID NO: 289355 - DNA, 507 bp, Homo sapiens
  chr12:112204412-112204919
  hyper
gagcatcagccgggaaggtcagggtcgccctggctcgggcctgttcacattggggtcaaaggcacacattgggggctcaaccaaggcgagctgcgttcgcggggccgggtctttccgcacaggcggagggcggtggcgggcgcggaggcgtcgcgcgagccagggggcagccacgggccgggggtacctagcgccacccgcttcgcttgcatcagctgcgcgccccatcccgaggaatggtagaggcagccccgcccccggcccgcccccgcctttccattggctgccgcgcggggcggggagcggggtcggctcagtggccctgagaccctagctctgctctcggtccgctcgctgtccgctagcccgctgcgatgttgcgcgctgccgcccgcttcgggccccgcctgggccgccgcctcttgtcagccgccgccacccaggccgtgcctgcccccaaccagcagcccgaggtcttctgcaaccaggtgagcccaccggccgggc

SEQ ID NO: 289356 - DNA, 192 bp, Homo sapiens
  chr12:112204992-112205184
  hyper
actcatctggggctcgaggggtttgcagaggctgacctggaagcacatctgccccctcctctcctgcaagcattttagccccttcgccgcctctgacagtccccgtcccatttccccgtgacttgggccccctctccgtcttcgcccagcctcggtctgttttccagggccaactctcggggttccgttctc

SEQ ID NO: 289357 - DNA, 42 bp, Homo sapiens; identical to SEQ ID NO: 224443
  chr12:112689847-112689889
  hyper

SEQ ID NO: 289358 - DNA, 48 bp, Homo sapiens; identical to SEQ ID NO: 236674
  chr12:112847008-112847056
  hyper

SEQ ID NO: 289359 - DNA, 55 bp, Homo sapiens; identical to SEQ ID NO: 236675
  chr12:112856480-112856535
  hyper

SEQ ID NO: 289360 - DNA, 35 bp, Homo sapiens; identical to SEQ ID NO: 203186
  chr12:112884177-112884212
  hyper

SEQ ID NO: 289361 - DNA, 58 bp, Homo sapiens; identical to SEQ ID NO: 203187
  chr12:112915451-112915509
  hyper

SEQ ID NO: 289362 - DNA, 116 bp, Homo sapiens; identical to SEQ ID NO: 203188
  chr12:112924321-112924437
  hyper

SEQ ID NO: 289363 - DNA, 49 bp, Homo sapiens; identical to SEQ ID NO: 203189
  chr12:112926827-112926876
  hyper

SEQ ID NO: 289364 - DNA, 65 bp, Homo sapiens; identical to SEQ ID NO: 203190
  chr12:112926914-112926979
  hyper

SEQ ID NO: 289365 - DNA, 190 bp, Homo sapiens; identical to SEQ ID NO: 203191
  chr12:113229230-113229420
  hyper

SEQ ID NO: 289366 - DNA, 137 bp, Homo sapiens
  chr12:113229494-113229631
  hyper
cttggttcccgcttggttccccctgcactgggaagctgccgccccgcttcccttgctcacacagggctttgcagtagtggtggcagccgcggcagaaactggctctggggaagcaattgattcgtctactgccagca

SEQ ID NO: 289367 - DNA, 97 bp, Homo sapiens; identical to SEQ ID NO: 203193
  chr12:113495127-113495224
  hyper

SEQ ID NO: 289368 - DNA, 226 bp, Homo sapiens; identical to SEQ ID NO: 203194
  chr12:113592463-113592689
  hyper

SEQ ID NO: 289369 - DNA, 141 bp, Homo sapiens; identical to SEQ ID NO: 236680
  chr12:113658922-113659063
  hyper

SEQ ID NO: 289370 - DNA, 637 bp, Homo sapiens
  chr12:113796257-113796894
  hyper
gtgggtcccgccccgtaggcctcccctcgcgccagcccctcccatcccggaaaggctcagcccaagcccggccccgcccgccctcggccccgcccatggcagagcgcagtcacgtgacccgggctgcggggcgcagcattgtgcggtcatggtgggccagatgtactgctaccccggcagccacctggcccgggcgctgacgcgggcgctggcgctggccctggtgctggccctgctggtcgggccgttcctgagcggcctggcgggggcgatcccagcgccggggggccgctgggcgcgcgatgggcaggtccctccagcctcccgcagccgctcggtgctcctggacgtctcggcgggccagctgcttatggtggacggacgccaccctgacgccgtggcctgggccaacctcaccaacgccatccgcgagactgggtaagggttggcttatccccacgcggggccatcgggggagggggatgcgtgggcgccggacctcgcctgttcccgggaccggcctcttgccgggtgggaacgcccgtttctctgggggtcagctactcccgaggctgcagcaccgccctgcgggccaagtaccctgtttgggagctggctactgcggcatccctcacct

SEQ ID NO: 289371 - DNA, 146 bp, Homo sapiens; identical to SEQ ID NO: 203196
  chr12:113902353-113902499
  hyper

SEQ ID NO: 289372 - DNA, 157 bp, Homo sapiens
  chr12:113903571-113903728
  hyper
tagggaaagaggcaaatttaggtggagagagtcggtgagtggagactccggaagacacgcccaccatccgggctctccagggttgggggtctgtccggggttgggggtctgtccagggttggggggctgtccagggttgggcggctggggcgctcca

SEQ ID NO: 289373 - DNA, 286 bp, Homo sapiens
  chr12:113904446-113904732
  hyper
gtgcgcacacaccccgccacatggaacaggagttgctgccttcgatgctagtgagcaggcggcttggaatgaatccagacccccatcccctcccctcacactaccctccagcgctcggaatccacctcatgccaagtacaccaggcacagggcggcaggaaggctgtgcgtctgtccgtgggggccgcatgcatgtggatttgccagtactggcctcagtgtgactggtgggagtgtgcgcgtctgtggagttgtgtctccgtgagtgtacctgtgtgtgagaggg

SEQ ID NO: 289374 - DNA, 302 bp, Homo sapiens
  chr12:113905078-113905380
  hyper
gggtggaccccaacatctcagactcgtccaagcggccgcccagcggacgcatgcgccgcggactccggaagaaggcgtgcctccgggcgcctagggcgctcagctgtttcatccggcgttctttggaccgtcggttctgaaaccacacctgggacagaggagggggctgtgaacccaggatcaggagtgtcctctccccccctcttctcccttccctgactgggctgcccctgctgggtccttgcgcctcttccgcaccaggactcccccgaggcggggccgggccggattaggccgggagg

SEQ ID NO: 289375 - DNA, 64 bp, Homo sapiens
  chr12:113906434-113906498
  hyper
tccgcgcgtctcagctagtacctgggtaagggtagggggacgcgtaccctctggagaactccca

SEQ ID NO: 289376 - DNA, 106 bp, Homo sapiens
  chr12:113906998-113907104
  hyper
cgatgacgtagagctcctcgccggtggacagctgcttgttacacaccatgcaggtgaaacagttgaggtgaaagactttgctccgggccttgcgcaccaggtcgct

SEQ ID NO: 289377 - DNA, 121 bp, Homo sapiens
  chr12:113907162-113907283
  hyper
tgtgcctgtcactatggggtgggactgcatccagccctccccagcccctgacctcttcccacccgacctggcttcggtgaagtccccatttccatatctgtcaaacggaaccccaatcctg

SEQ ID NO: 289378 - DNA, 139 bp, Homo sapiens; identical to SEQ ID NO: 236690
  chr12:113910973-113911112
  hyper

SEQ ID NO: 289379 - DNA, 91 bp, Homo sapiens
  chr12:113914528-113914619
  hyper
ccactggcgctaggccgtggattgcttggtttccagaacatctctgcggggcgcagggccttcctgtcagttgaatcgtgctcggcttaat

SEQ ID NO: 289380 - DNA, 161 bp, Homo sapiens
  chr12:113917065-113917226
  hyper
cgggaacaaattccgtgagaataaaatcatagctaggctggcctacttccctaaagcttggtggaagcgagtaactttattgagtctgggctagagggtgtgtgtgtgtttgtgtgtgtgtgcgtgcgtgtgtggtgtttgtttacatatgtgtgtgggat

SEQ ID NO: 289381 - DNA, 165 bp, Homo sapiens; identical to SEQ ID NO: 236698
  chr12:114404167-114404332
  hyper

SEQ ID NO: 289382 - DNA, 31 bp, Homo sapiens; identical to SEQ ID NO: 236700
  chr12:114837908-114837939
  hyper

SEQ ID NO: 289383 - DNA, 90 bp, Homo sapiens
  chr12:114838222-114838312
  hyper
ctgctgcctttctgcgccctggcgcactccaaatttccctccaccttctgaggaacatgccccagaaagcaaagattctcaaggctggcc

SEQ ID NO: 289384 - DNA, 169 bp, Homo sapiens; identical to SEQ ID NO: 203199
  chr12:114838902-114839071
  hyper

SEQ ID NO: 289385 - DNA, 34 bp, Homo sapiens; identical to SEQ ID NO: 203200
  chr12:114841183-114841217
  hyper

SEQ ID NO: 289386 - DNA, 147 bp, Homo sapiens; identical to SEQ ID NO: 203201
  chr12:114841493-114841640
  hyper

SEQ ID NO: 289387 - DNA, 142 bp, Homo sapiens
  chr12:114843805-114843947
  hyper
gcgcagctttcaggattaaagttcccggattcgaggtaagagtcagtctctctcactctctctccctctctctctctctctgaaatacaagccaactcagctgagcacagtgacgttgggttgcctcgatgctcacaaagta

SEQ ID NO: 289388 - DNA, 141 bp, Homo sapiens; identical to SEQ ID NO: 203202
  chr12:114851899-114852040
  hyper

SEQ ID NO: 289389 - DNA, 104 bp, Homo sapiens; identical to SEQ ID NO: 203203
  chr12:114852189-114852293
  hyper

SEQ ID NO: 289390 - DNA, 32 bp, Homo sapiens
  chr12:114877388-114877420
  hyper
agcctggggactgagcccgcagacgcccatgg

SEQ ID NO: 289391 - DNA, 537 bp, Homo sapiens; identical to SEQ ID NO: 203204
  chr12:114877707-114878244
  hyper

SEQ ID NO: 289392 - DNA, 94 bp, Homo sapiens; identical to SEQ ID NO: 203205
  chr12:114879012-114879106
  hyper

SEQ ID NO: 289393 - DNA, 65 bp, Homo sapiens; identical to SEQ ID NO: 203206
  chr12:114882084-114882149
  hyper

SEQ ID NO: 289394 - DNA, 142 bp, Homo sapiens
  chr12:114882413-114882555
  hyper
cctacacttttctacgagctttgcagtcacttaatctcccaacaaccatcggggtagataccgttatatcgccattttacagagaagcaaacgggaggtcaaacaggctgacccaggccgcctagttcctgcggggatttga

SEQ ID NO: 289395 - DNA, 370 bp, Homo sapiens
  chr12:114882646-114883016
  hyper
caattcctacacaagtccccccagcaacaaggagggccagccttcgctcctgcttctctcttagttgtatatctggagccaaggagtccaaaacagctcaccagctctaagtgcacacatatcagggctgggagccggaaccgcctgggcatgcgttcctgcgcgcttactcctgaggccagggaaaaaggtttgcctgcgatcctgaccaaggccacgcattaaaagactgcgtggaatccttaaagcctctaagaatctaacgtcctaagaaagaccaccccagaagtagatgtgatgtacctaagccctggcattcgggctctgcgcctcaccagcgtctttacgcacaggcgcaattgcgccgggc

SEQ ID NO: 289396 - DNA, 109 bp, Homo sapiens; identical to SEQ ID NO: 203209
  chr12:114883302-114883411
  hyper

SEQ ID NO: 289397 - DNA, 318 bp, Homo sapiens
  chr12:114886562-114886880
  hyper
agatgcctgcctaggcgtttctggttacaatcacctcacacaccggcctgcattccgcctccccaacccccatccttaccacgaagtctgaagtcacaccttctccctggctgggaagctttgccagggtgggggcgatgagtgccggccgaggttgttaatctaaggagctccagcaggtccgtaaaaaggaatattttcggtggccagaaaaatcaacattgaattaggtgtgtcacccgcacccccccgcccccgcccatccaccaggagttcattctctactcatttagccgggactgccgtgtgttcctgatt

SEQ ID NO: 289398 - DNA, 83 bp, Homo sapiens
  chr12:114917591-114917674
  hyper
aactccatctagcccgtcctccttaatcaataaaacaagaattaggtctcagatccaagagtcgctttctgtcttccagttta

SEQ ID NO: 289399 - DNA, 76 bp, Homo sapiens; identical to SEQ ID NO: 236716
  chr12:114918239-114918315
  hyper

SEQ ID NO: 289400 - DNA, 74 bp, Homo sapiens; identical to SEQ ID NO: 203211
  chr12:114939043-114939117
  hyper

SEQ ID NO: 289401 - DNA, 209 bp, Homo sapiens
  chr12:115106007-115106216
  hyper
aggcgctggggtgccgagccagctgcggcgacctggacgcattcgtagacgagacagataggtggcactcgaagcccagaaaaaaggcgaaggcgcctgccctgagtggcctctggggcggccgcagccaccataaagcctgcggcgagattgcgaccggcgccaggtgagtaataggcagcaaaatccagagagactgcgagccgttc

SEQ ID NO: 289402 - DNA, 218 bp, Homo sapiens
  chr12:115106246-115106464
  hyper
caggagttactcattaacatcacaatatacaaatgagatacacaggagattaaaaaaaaaaaaaaaaaaaaaagaggaacgccagtaagagaggctggacacaagtctgagcagggtccccaaatcgggggcggggggagagaagggaggaggtaagcaaatttggactgagaaagaagagaaaagcaaagcatttcttcccttttggaggctgagtt

SEQ ID NO: 289403 - DNA, 348 bp, Homo sapiens
  chr12:115106502-115106850
  hyper
accaccttctcagaggcgcggacaccgcgcgttgtcgctggatccagagctgcccccttcaggctgtagccgctgcgcagaaggagcgcgccctggaaatctcccagtcctcgggggagccccagcctcaaaggtccccagggcccgtctcagctcaggccctgccacccccgcagcgcaccccgcccctccccccccccgcgactccgcaccaacatactctggttgtctgtcttccctcccacccccggagacatcgcagaggaggctgtaggggtccccacgtgcctggccagagatggaaggggctttgccccgctctccaaaaggtctcgacctcgatccctt

SEQ ID NO: 289404 - DNA, 824 bp, Homo sapiens; identical to SEQ ID NO: 203213
  chr12:115120681-115121505
  hyper

SEQ ID NO: 289405 - DNA, 341 bp, Homo sapiens; identical to SEQ ID NO: 203214
  chr12:115121544-115121885
  hyper

SEQ ID NO: 289406 - DNA, 221 bp, Homo sapiens; identical to SEQ ID NO: 203215
  chr12:115122015-115122236
  hyper

SEQ ID NO: 289407 - DNA, 441 bp, Homo sapiens; identical to SEQ ID NO: 203216
  chr12:115122524-115122965
  hyper

SEQ ID NO: 289408 - DNA, 129 bp, Homo sapiens
  chr12:115130546-115130675
  hyper
cggtaaagaccttgcggggagccgtggggggcggggaggagtaaccaaaaatgaaagagaaatgtaggactctctgtctcccaaagtggtggaaaagcaattgcaaggagatggctctcgggagaataa

SEQ ID NO: 289409 - DNA, 163 bp, Homo sapiens; identical to SEQ ID NO: 236722
  chr12:115138445-115138608
  hyper

SEQ ID NO: 289410 - DNA, 162 bp, Homo sapiens
  chr12:115889541-115889703
  hyper
atgttgctcaaacacagcagcgtcgtgacagtgccaatagccagcagtctcctgtccgcgtgggttgcgagccccgggcgtggacggagttgggagcggagggcggcaggtgccagcggggcccgcctctccctgcaggcggccccggcaagttcacggccg

SEQ ID NO: 289411 - DNA, 68 bp, Homo sapiens
  chr12:115889776-115889844
  hyper
gcccccgcgcccctcgctcgcgccgtgcctgccgccgccacccgcccggccgccgggccggccactga

SEQ ID NO: 289412 - DNA, 248 bp, Homo sapiens; identical to SEQ ID NO: 236724
  chr12:116354935-116355183
  hyper

SEQ ID NO: 289413 - DNA, 203 bp, Homo sapiens; identical to SEQ ID NO: 236725
  chr12:116713913-116714116
  hyper

SEQ ID NO: 289414 - DNA, 143 bp, Homo sapiens; identical to SEQ ID NO: 236726
  chr12:116714176-116714319
  hyper

SEQ ID NO: 289415 - DNA, 79 bp, Homo sapiens; identical to SEQ ID NO: 203218
  chr12:116946548-116946627
  hyper

SEQ ID NO: 289416 - DNA, 182 bp, Homo sapiens; identical to SEQ ID NO: 203219
  chr12:116971004-116971186
  hyper

SEQ ID NO: 289417 - DNA, 305 bp, Homo sapiens; identical to SEQ ID NO: 123136
  chr12:116971210-116971515
  hyper

SEQ ID NO: 289418 - DNA, 199 bp, Homo sapiens
  chr12:116972230-116972429
  hyper
tctccccttgctcgcgcgttccctctcttcctccgttttctggtgtgctggaacgttcagcggaatatgatgaatgatcacctgtcacagcttgtttattataatgcaggcaatcaattacacatccccaatgctggccggcccgcaggaaatttatatgctcagcacaaaccaatgtgaaaatggaatctcatttgcc

SEQ ID NO: 289419 - DNA, 258 bp, Homo sapiens; identical to SEQ ID NO: 236729
  chr12:117175870-117176128
  hyper

SEQ ID NO: 289420 - DNA, 176 bp, Homo sapiens; identical to SEQ ID NO: 203222
  chr12:117316504-117316680
  hyper

SEQ ID NO: 289421 - DNA, 72 bp, Homo sapiens; identical to SEQ ID NO: 224462
  chr12:117316909-117316981
  hyper

SEQ ID NO: 289422 - DNA, 31 bp, Homo sapiens
  chr12:117317225-117317256
  hyper
cgctttgggcttcgcgtctgtcgctcaactt

SEQ ID NO: 289423 - DNA, 497 bp, Homo sapiens
  chr12:117317288-117317785
  hyper
gttcttcctgtccctgggattgggcagcctcagcctggcccctttcagtcgcgggagcccctggcctctccaacaggagagagagaaggtagggagaagtggatgggacccccggcgcccgggagccgggcagagagcgccccgaagcgcgcatttctcttcgccagcgcccgggctgcgcgggcccacgcgacatctgtcgcctgcggtcccggctcacaccccgcgcacccccgcagctccctgggcgctgccaccccccacgctccggctgccgcctttccccgcgggcgcagacgctcgggcctcgccttcaggcgccgctccaacttcccagggtgtctgcggcgcgcggcggggctcgggggcggggacctaagggcggctggctatgtcaccttcgagcttcaccttccggccctagacccatctatggtgggctcagcctgattctctctccctcattctctgcagcgctcctcgctactccaggatcc

SEQ ID NO: 289424 - DNA, 33 bp, Homo sapiens
  chr12:117320096-117320129
  hyper
tgcacctccagactggagcgtctgcagttgtca

SEQ ID NO: 289425 - DNA, 228 bp, Homo sapiens; identical to SEQ ID NO: 236733
  chr12:117348613-117348841
  hyper

SEQ ID NO: 289426 - DNA, 97 bp, Homo sapiens; identical to SEQ ID NO: 203223
  chr12:117349182-117349279
  hyper

SEQ ID NO: 289427 - DNA, 1024 bp, Homo sapiens; identical to SEQ ID NO: 236735
  chr12:117536375-117537399
  hyper

SEQ ID NO: 289428 - DNA, 151 bp, Homo sapiens; identical to SEQ ID NO: 203225
  chr12:117628333-117628484
  hyper

SEQ ID NO: 289429 - DNA, 41 bp, Homo sapiens; identical to SEQ ID NO: 236737
  chr12:117797360-117797401
  hyper

SEQ ID NO: 289430 - DNA, 37 bp, Homo sapiens; identical to SEQ ID NO: 203226
  chr12:118313953-118313990
  hyper

SEQ ID NO: 289431 - DNA, 367 bp, Homo sapiens; identical to SEQ ID NO: 236741
  chr12:118541717-118542084
  hyper

SEQ ID NO: 289432 - DNA, 613 bp, Homo sapiens; identical to SEQ ID NO: 236742
  chr12:118573924-118574537
  hyper

SEQ ID NO: 289433 - DNA, 42 bp, Homo sapiens
  chr12:119212406-119212448
  hyper
ggagggctgttaccaggcaacgggagagggaccaagacaaag

SEQ ID NO: 289434 - DNA, 170 bp, Homo sapiens
  chr12:119418346-119418516
  hyper
cctccacttgcttgggattacgattgaactgcgaggcggtaaggagatggggaggagagaccgaaaagtaactatccccctgctaatcctcgagattttcctctccaaccctcccactaagcgctttcttttccaaaacgtactcctttcccgagactagcggcattagg

SEQ ID NO: 289435 - DNA, 59 bp, Homo sapiens; identical to SEQ ID NO: 203227
  chr12:119419899-119419958
  hyper

SEQ ID NO: 289436 - DNA, 31 bp, Homo sapiens; identical to SEQ ID NO: 203228
  chr12:119616602-119616633
  hyper

SEQ ID NO: 289437 - DNA, 177 bp, Homo sapiens; identical to SEQ ID NO: 203229
  chr12:119772414-119772591
  hyper

SEQ ID NO: 289438 - DNA, 357 bp, Homo sapiens
  chr12:120031899-120032256
  hyper
gcaggggagtccgcgcgctctctgcggctcccttcctcacggcccggcccgcgctaggtgttctttgtcctcgcacctcctcctcacctttctcgggctctcagagctctccccgcaatcatcagcacctcctctgcactcctcgtggtactcagagccctgatcaagcttcccccaggctagctttcctcttctttccagctcccagggtgcgtttcctctccaacccggggaagttcttccgtggactttgctgactcctctgaccttcctaggcacttgcccggggcttctcaaccctcttttctagagccccagtgcgcgccaccctagcgagcgcagtaagctcataccccg

SEQ ID NO: 289439 - DNA, 182 bp, Homo sapiens; identical to SEQ ID NO: 236750
  chr12:120105358-120105540
  hyper

SEQ ID NO: 289440 - DNA, 253 bp, Homo sapiens; identical to SEQ ID NO: 236751
  chr12:120315130-120315383
  hyper

SEQ ID NO: 289441 - DNA, 750 bp, Homo sapiens; identical to SEQ ID NO: 236752
  chr12:120524639-120525389
  hyper

SEQ ID NO: 289442 - DNA, 477 bp, Homo sapiens; identical to SEQ ID NO: 236753
  chr12:120638748-120639225
  hyper

SEQ ID NO: 289443 - DNA, 117 bp, Homo sapiens; identical to SEQ ID NO: 236754
  chr12:120703715-120703832
  hyper

SEQ ID NO: 289444 - DNA, 52 bp, Homo sapiens; identical to SEQ ID NO: 236755
  chr12:120729780-120729832
  hyper

SEQ ID NO: 289445 - DNA, 76 bp, Homo sapiens; identical to SEQ ID NO: 236756
  chr12:120739996-120740072
  hyper

SEQ ID NO: 289446 - DNA, 133 bp, Homo sapiens; identical to SEQ ID NO: 236757
  chr12:120763473-120763606
  hyper

SEQ ID NO: 289447 - DNA, 55 bp, Homo sapiens; identical to SEQ ID NO: 203232
  chr12:120875858-120875913
  hyper

SEQ ID NO: 289448 - DNA, 42 bp, Homo sapiens; identical to SEQ ID NO: 236759
  chr12:120884034-120884076
  hyper

SEQ ID NO: 289449 - DNA, 48 bp, Homo sapiens; identical to SEQ ID NO: 236760
  chr12:120933807-120933855
  hyper

SEQ ID NO: 289450 - DNA, 253 bp, Homo sapiens; identical to SEQ ID NO: 224466
  chr12:121077958-121078211
  hyper

SEQ ID NO: 289451 - DNA, 90 bp, Homo sapiens; identical to SEQ ID NO: 236761
  chr12:121079468-121079558
  hyper

SEQ ID NO: 289452 - DNA, 311 bp, Homo sapiens; identical to SEQ ID NO: 203233
  chr12:121124597-121124908
  hyper

SEQ ID NO: 289453 - DNA, 168 bp, Homo sapiens; identical to SEQ ID NO: 203234
  chr12:121454119-121454287
  hyper

SEQ ID NO: 289454 - DNA, 200 bp, Homo sapiens; identical to SEQ ID NO: 203235
  chr12:121476535-121476735
  hyper

SEQ ID NO: 289455 - DNA, 171 bp, Homo sapiens; identical to SEQ ID NO: 236765
  chr12:122124826-122124997
  hyper

SEQ ID NO: 289456 - DNA, 203 bp, Homo sapiens; identical to SEQ ID NO: 236766
  chr12:122150705-122150908
  hyper

SEQ ID NO: 289457 - DNA, 213 bp, Homo sapiens
  chr12:122214097-122214310
  hyper
gtgagccccctcctcgcccaccccgccacgtggtgagggttattttaagttctcagagacccaccgcgtctgcctcgtgctcttcttgcccctggagcgctgggggcatcctgagtcaggctgtgagaagattcgccaccagagggcgccccgggccctgggtcgtccaaggggacaaggacgttcccgtctgtgcttcggggttccctgacc

SEQ ID NO: 289458 - DNA, 73 bp, Homo sapiens
  chr12:122231274-122231347
  hyper
ccgagggggcgccccggggtggcggccgcctgtccgtgctcgggacgctggggactgagggtcggggctctgg

SEQ ID NO: 289459 - DNA, 773 bp, Homo sapiens
  chr12:122231523-122232296
  hyper
ccccgggggcatccattgcccggagcccgcagcactggcggcggcgcgccgggcactagcggagccaagaggtcgggggcggggcggggccggaaccagccccgcccactcggagcagcgccgcctccgccaggcagcctcccggccgacctcccagcctcagtttcctttctgctaaggtctcagccctgggtgtgggtattcagctctcagtcccagggatactgcagcaccggaaaaacggggctcagctgcgagcaaagctcccacccccaacccaccgccaccctccgcgcgtcacgtcgcgcccctcgccggcgagacccgatcgtggctgcccagcgactccaggtgcccctgattagcaggctccgccttcggcagggaccctctgattggctggcgcggccagacagggtctcccggattggctggctgtgcctccgcaccgggttcgagaagcccccggcctccagctccgggaagagcccctcaactttgcactgccccagcggtgtggcttggcacatgtccgcctctggcctcagcttccccacaggaggtagcggcggtggcaccagggaagatgctgacgcgagagtcatgtctgcccacctcgcctgggccagggacgccagcgtgcacgcgggttcggggtgagggactgggctccgcttacccgcaccccgaccctgggctgcagggtggacgtctgacgccctctgccgggcaatcgcctcggcgccggccgctccgggcgcaggttggcccga

SEQ ID NO: 289460 - DNA, 75 bp, Homo sapiens; identical to SEQ ID NO: 203239
  chr12:122237447-122237522
  hyper

SEQ ID NO: 289461 - DNA, 140 bp, Homo sapiens; identical to SEQ ID NO: 236770
  chr12:122242481-122242621
  hyper

SEQ ID NO: 289462 - DNA, 95 bp, Homo sapiens; identical to SEQ ID NO: 236771
  chr12:122326469-122326564
  hyper

SEQ ID NO: 289463 - DNA, 110 bp, Homo sapiens; identical to SEQ ID NO: 236772
  chr12:122459495-122459605
  hyper

SEQ ID NO: 289464 - DNA, 238 bp, Homo sapiens; identical to SEQ ID NO: 224470
  chr12:122459882-122460120
  hyper

SEQ ID NO: 289465 - DNA, 602 bp, Homo sapiens; identical to SEQ ID NO: 224471
  chr12:122460949-122461551
  hyper

SEQ ID NO: 289466 - DNA, 96 bp, Homo sapiens
  chr12:122667640-122667736
  hyper
cctgcccccgcgcacgcgtcctagcggttgccgggcaacgcggcccgggccatggaggcgtcgtacgagtccgagtccgagtccgagtctgaggcc

SEQ ID NO: 289467 - DNA, 84 bp, Homo sapiens
  chr12:122688564-122688648
  hyper
ctggggacagaggctggagccgggcgcggtagaccccgccagcctgggccgcccgcgcccgacgcgcagcgctgctgccaaccc

SEQ ID NO: 289468 - DNA, 90 bp, Homo sapiens; identical to SEQ ID NO: 236775
  chr12:122710555-122710645
  hyper

SEQ ID NO: 289469 - DNA, 202 bp, Homo sapiens; identical to SEQ ID NO: 203241
  chr12:122907627-122907829
  hyper

SEQ ID NO: 289470 - DNA, 139 bp, Homo sapiens
  chr12:122907838-122907977
  hyper
cccagggtttgctccgttcgtttgagaaaagccccttttattcgccctggctgcttggacggaagccctggttagtgtcccatcctccttcccccctgggatttcctttaaaagcttttgaaagggacaggagggaagg

SEQ ID NO: 289471 - DNA, 204 bp, Homo sapiens; identical to SEQ ID NO: 236777
  chr12:123011575-123011779
  hyper

SEQ ID NO: 289472 - DNA, 570 bp, Homo sapiens
  chr12:123258812-123259382
  hyper
agtgctgggggcggcgcagcagcctttattgacttcttcattctctgggtagtggtgaacagccggttctttcaggccttccagcgccggagcctcgggcgtgggcaaaaagcgtccatacgcagcctgagccacttgggagcccccagtttccgaggcagaagaacagtgcccaccagcgcagcggggctgcggcccggaaaccctggcggggagccccgagccccggcgggcgcacgccgcgtgggcaccaggcaggcggttggagtacggggcgggggtcggccgagggcgcggggccccggggctccgggctcgcccccgccgctcggggcaggcgcgccgatggcgtttctgaggtgacgccgcccacaccgggcttctccgggggcggaggaaacacctatgaaccctccggcagccttccttgccgggcgccaggtaagcagcggttccgggcgcggcggggcgccgcgggaacggtgcacattggtcgaaatctattgcttctcaagaacggtgtctacttaaaatgtgaaacaggccgggcgcggtggctcacgcctgtaa

SEQ ID NO: 289473 - DNA, 152 bp, Homo sapiens; identical to SEQ ID NO: 236778
  chr12:123319202-123319354
  hyper

SEQ ID NO: 289474 - DNA, 109 bp, Homo sapiens; identical to SEQ ID NO: 236779
  chr12:123321240-123321349
  hyper

SEQ ID NO: 289475 - DNA, 501 bp, Homo sapiens
  chr12:123380319-123380820
  hyper
gcctaagcaccagtcgcggttccctggctcccgcaccccgccccaagcgcccccatttctagcccagtcccctcaacacgaccggaggcgccgcggtcgcctccgcctccggccaccgttcgaggagcgaaccccgctcgaggcctcacagccgccgccttaagcccagctcggctcacctcctccatcttctgcaccatctccgtcagctggccctcgtcctccagcagctcgttgagctgcaccagcgacagcccggcgaaccgggcttcgctcccggcgcccgccatccccacgtctcggccgtcgtcgccaccgccgctgcggccaccaggctccgccgaccggaagcgccgccctcaagggccgccccccgcgggggggacacgtgacgccagccctgggtcgtgacgtcatcaccgcgcgggcgggcggacgtgacgtaagtgtcgcggctcgcttggagtggaatgtgtcagggacagtcgggacttctaaagg

SEQ ID NO: 289476 - DNA, 178 bp, Homo sapiens; identical to SEQ ID NO: 203244
  chr12:123451028-123451206
  hyper

SEQ ID NO: 289477 - DNA, 409 bp, Homo sapiens; identical to SEQ ID NO: 236783
  chr12:123459138-123459547
  hyper

SEQ ID NO: 289478 - DNA, 46 bp, Homo sapiens; identical to SEQ ID NO: 236784
  chr12:123459789-123459835
  hyper

SEQ ID NO: 289479 - DNA, 41 bp, Homo sapiens; identical to SEQ ID NO: 236785
  chr12:123717762-123717803
  hyper

SEQ ID NO: 289480 - DNA, 328 bp, Homo sapiens
  chr12:123754875-123755203
  hyper
tgcccctacacctcagtgtccaagattttttttaggtatcgtttttatgggtcccacttccgatttggggggttacgaggtcaacgtttgcaaacaaggcccaaaactcgagcaggagagccagcgtggcaccggtgaccaacggggccactcctctccccgtcgagtccttccccccatcccgccccgcaacacaaccgccttttgggaagtctgtttccgaccaagtgtcagagaagaagggccccagtgaggtcacaaagcccggcacctacgaatccctcaatgttgtgcccactccccatggctccctcggtcccctgggctc

SEQ ID NO: 289481 - DNA, 255 bp, Homo sapiens; identical to SEQ ID NO: 236787
  chr12:123849887-123850142
  hyper

SEQ ID NO: 289482 - DNA, 330 bp, Homo sapiens; identical to SEQ ID NO: 236788
  chr12:123868413-123868743
  hyper

SEQ ID NO: 289483 - DNA, 342 bp, Homo sapiens; identical to SEQ ID NO: 236789
  chr12:123874197-123874539
  hyper

SEQ ID NO: 289484 - DNA, 411 bp, Homo sapiens
  chr12:123920727-123921138
  hyper
attcaccagcgcctccagcatctccaggacgcggacgactttgaactgcagctgcgtcacccgggggtcgctgcccagggccataagctcgcggcccaacaggtaggagatgtcatacacgtcctcggcggtcagctggaaggggctcttgcccagcgccccctcgggcccaacctcgtccctctcctcgtcctcctctccctcctcctcttcctcttctcgcacagggggctcctccatggccacccagacccccgccgacctcggagctgctgtcttggagtctcccaaaggttagacttcctcccggcacccaaaactttccgctgggcagagtccctacctgcccaatcagcgcggcccgggggtgggcccggggggatggtgcaaggggccgcgcacgcgactctt

SEQ ID NO: 289485 - DNA, 319 bp, Homo sapiens
  chr12:124017664-124017983
  hyper
cccttgggtccccgcggtcccactgcccggacggacagaccgaggccgccgcccaccttctggtgcttgcgctccttctcgatgcggtccatcctctccaggcgcaggcggtccagctccaggcgcagctcgtccagctcgggcgcgacgtggtggcggctgaccagcacctccaggatctccaggacgcgcacgaccttgggcatgaggcgcgcgatggcctcgcagccgtgctggtcaatgacccgctcgaactcgtggcccacaagcgacgcgatgtcgtacacgtccatgacggtcagctcggccacgttcttct

SEQ ID NO: 289486 - DNA, 66 bp, Homo sapiens; identical to SEQ ID NO: 236793
  chr12:124068852-124068918
  hyper

SEQ ID NO: 289487 - DNA, 197 bp, Homo sapiens; identical to SEQ ID NO: 236794
  chr12:124155698-124155895
  hyper

SEQ ID NO: 289488 - DNA, 391 bp, Homo sapiens; identical to SEQ ID NO: 203247
  chr12:124246517-124246908
  hyper

SEQ ID NO: 289489 - DNA, 75 bp, Homo sapiens; identical to SEQ ID NO: 203248
  chr12:124246937-124247012
  hyper

SEQ ID NO: 289490 - DNA, 269 bp, Homo sapiens; identical to SEQ ID NO: 236796
  chr12:124456337-124456606
  hyper

SEQ ID NO: 289491 - DNA, 609 bp, Homo sapiens
  chr12:124779593-124780202
  hyper
ggaggaggaggcgcctagaaaaggaggcgcgggccggggaggtgcggagagggccgggcggcaacgtgcgcctcggggctgggccggcctgcgggatcgcagcgcagcgcagaggcgaggctgggcccggcgggcgggagccgcggagggcggagggcggagggcggcggcgctggcaggagcgcggcccacggcggcgagcaggctgcaggcccgcggggatccggggcgcggggggcgccgggcctgatcgccgcctctcgcggtgcccgcaggtccccgggcgcgcagctctcgccccgccgccgcctgccccgggccccggagcgcggtggagaagcccccggaggagcggggggcccgcgccccgcgccccccagacatggtgggccacctgcatctgcagggcatggaggacagcctgaaggagcagggccgggagggcttgctggacagccccgactccgggctgccccccagccccagccccagcccgcccttctactccctggcgcccggcatcctcgacgcgcgcgcggggggcgccggcgcctcctcggagcccccgggacccagcgaggccagagcggtaaggaggcgctctctctc

SEQ ID NO: 289492 - DNA, 195 bp, Homo sapiens; identical to SEQ ID NO: 203250
  chr12:125093638-125093833
  hyper

SEQ ID NO: 289493 - DNA, 99 bp, Homo sapiens; identical to SEQ ID NO: 203251
  chr12:125198344-125198443
  hyper

SEQ ID NO: 289494 - DNA, 137 bp, Homo sapiens; identical to SEQ ID NO: 236800
  chr12:125256630-125256767
  hyper

SEQ ID NO: 289495 - DNA, 119 bp, Homo sapiens; identical to SEQ ID NO: 236801
  chr12:125473583-125473702
  hyper

SEQ ID NO: 289496 - DNA, 167 bp, Homo sapiens; identical to SEQ ID NO: 236802
  chr12:125477528-125477695
  hyper

SEQ ID NO: 289497 - DNA, 50 bp, Homo sapiens
  chr12:125534422-125534472
  hyper
ctgggaggggatggggtggggacgcgcaggaggcccgtggggttgacttg

SEQ ID NO: 289498 - DNA, 83 bp, Homo sapiens; identical to SEQ ID NO: 203252
  chr12:125670445-125670528
  hyper

SEQ ID NO: 289499 - DNA, 445 bp, Homo sapiens; identical to SEQ ID NO: 236805
  chr12:125815550-125815995
  hyper

SEQ ID NO: 289500 - DNA, 142 bp, Homo sapiens
  chr12:126018009-126018151
  hyper
ggaatgttcctaaacgcttgttttccctttgcatagctgattgcagagcccagcaagtctttctctaaatggctttactttgacaaggggtcgcgatggcattttgattggcatccgcctctcctccggggaaggacctcgt

SEQ ID NO: 289501 - DNA, 37 bp, Homo sapiens
  chr12:126018265-126018302
  hyper
cgtcctcaggccctgcgatttccagggattcccgatt

SEQ ID NO: 289502 - DNA, 192 bp, Homo sapiens
  chr12:127211385-127211577
  hyper
gccacgggcgcgagggactcgatgagctgggagatcgcggccccggcaggtgcggcgcgctggggcgggtgcttggcgccttccccggcacaggtgagactgggcggagagggcatctgtggcgtggcctctctgggtgcggagtgaggggacgcagtaaacgtggggtttggatcccgcggcggcgctgga

SEQ ID NO: 289503 - DNA, 102 bp, Homo sapiens; identical to SEQ ID NO: 203253
  chr12:127865862-127865964
  hyper

SEQ ID NO: 289504 - DNA, 101 bp, Homo sapiens
  chr12:127940587-127940688
  hyper
cgccccagggtgtgggcggccggcagggaccgcgggtgagcggtgggcaggtctcaggactctctccggacgtgcggtccggggccgcgccgggtgctggg

SEQ ID NO: 289505 - DNA, 419 bp, Homo sapiens
  chr12:128750699-128751118
  hyper
aactgctcagaccacgcgtggcagaaagagcagagcatgagcatcaggaaccgcacagggaagccgctgagatcacctgggatcaccaccatgagggaggccagccctggagaaatcagagggaaaagatagagagaacgaagtcgggggggggggggggagggcggatcttccttgtctgagtctgcagagaaattgcctattgcaggagcaagtctagagaggggctattctccacccactgaaaagataataaaacacatgctatgggcggcggggagatgattggggagtggaagccccacagacatgcagtgaaaaatgatcctttcttcccctctgcgttctcgtccccttcccagagacaccgctgtgatctcgtgcctcgccccctccgcacacgcacaggtgcacacccg

SEQ ID NO: 289506 - DNA, 116 bp, Homo sapiens; identical to SEQ ID NO: 236817
  chr12:128753739-128753855
  hyper

SEQ ID NO: 289507 - DNA, 151 bp, Homo sapiens; identical to SEQ ID NO: 203255
  chr12:128850383-128850534
  hyper

SEQ ID NO: 289508 - DNA, 86 bp, Homo sapiens; identical to SEQ ID NO: 203256
  chr12:130387117-130387203
  hyper

SEQ ID NO: 289509 - DNA, 171 bp, Homo sapiens
  chr12:130498554-130498725
  hyper
agccaaagcagggaagcctccggaaagagggcaaggagagtggcggggtgcgagcggggcgctgcggaggaggctgcagcggcagcggtgcgggcaggagctctgatgcgatgcgatgcgatgcgatgctgcccccctgtgtccttcgacgatattgctgcgggaagcttt

SEQ ID NO: 289510 - DNA, 143 bp, Homo sapiens
  chr12:130498755-130498898
  hyper
cagctcagaccttctctgcgaatagctctccgggtggtaaagagatgcatcacatttaaaacttcgagacgtcctggattcacttagaaagatgggaagaggctcacgcctgtaatcccagaactttgggaggctgagatggg

SEQ ID NO: 289511 - DNA, 86 bp, Homo sapiens; identical to SEQ ID NO: 236823
  chr12:130498947-130499033
  hyper

SEQ ID NO: 289512 - DNA, 278 bp, Homo sapiens; identical to SEQ ID NO: 203257
  chr12:130645806-130646084
  hyper

SEQ ID NO: 289513 - DNA, 211 bp, Homo sapiens; identical to SEQ ID NO: 203258
  chr12:130646344-130646555
  hyper

SEQ ID NO: 289514 - DNA, 35 bp, Homo sapiens
  chr12:131199253-131199288
  hyper
gaaggggtgcccgccggccttcccctcacaccgtg

SEQ ID NO: 289515 - DNA, 276 bp, Homo sapiens
  chr12:131199583-131199859
  hyper
cagggcccagagcccggacacctcctcttcccaccgatcttccattttcagagggagccgctctccctcctctcaggcctgctccatctgtgacatttcccttccctggacgaagtggggttttcacccttgtgagcagagtctccttcagggctcctccgtgagagaaatatggggctggacagggtccccttccctccctcctcactcaccctaagaacctccagggacccagaggccacgcaggcacggagccagcacccccgcctcccccgg

SEQ ID NO: 289516 - DNA, 324 bp, Homo sapiens
  chr12:131200007-131200331
  hyper
acctacccagacctaagctcctgggcgggtggtcccgtacgcgctgcctttcccggtgaaatacggtttccactgggagagtctgcccccggccagcagcccgcgcacactgctcacacaggcacacgcatgcacgcacacactctgccggggaacatctgttttgacaaacacattattcaagtcagtccatgggacgtgaattgacagattcctgggcgcagcctgcgggctttgtgcatttgcacctgagccgagctggggactctgatgtgtttgtcccacgtccccttccccccctccaccccgcccccaagaagacaa

SEQ ID NO: 289517 - DNA, 176 bp, Homo sapiens
  chr12:131200645-131200821
  hyper
tttgtctgggcaaagagtttccggctaaccccctgtgatcaacgccgctgcagctcgggtgcagaaaggcgaggggagacgggaagctatttttaggagaaaaaaataaatctcagcctacctttagaagcgagctgtgccaaggctccggaggttcacctcggagacaactgcag

SEQ ID NO: 289518 - DNA, 214 bp, Homo sapiens
  chr12:131201142-131201356
  hyper
cgtcagtgtttgaacgcacacacacacacacacaaatacacatgcacacacacgtgcgcatacacacaccaagatggctatacccctcactgccagtttctttcacagagctgtggtgaaaagctcggacagagatggaggcaaacagctctcagccatgcggggcttggggttggtgcttttctctccatccctgggaaaacagcacaggatc

SEQ ID NO: 289519 - DNA, 73 bp, Homo sapiens
  chr12:131400919-131400992
  hyper
ctcacgctccacgctgtggccacactcttacgcgcctttgttcaaatggtccgcggtaatcacccctccagct

SEQ ID NO: 289520 - DNA, 46 bp, Homo sapiens; identical to SEQ ID NO: 203259
  chr12:131438509-131438555
  hyper

SEQ ID NO: 289521 - DNA, 333 bp, Homo sapiens; identical to SEQ ID NO: 236834
  chr12:132195265-132195598
  hyper

SEQ ID NO: 289522 - DNA, 112 bp, Homo sapiens
  chr12:132312446-132312558
  hyper
aggcccgcagggaccgcagagcctccgccgaggaccccagcccccccaacacccgccctcgccctccagtcccccgcgccccccaagccccaccctccctctcccgcggtcc

SEQ ID NO: 289523 - DNA, 261 bp, Homo sapiens
  chr12:132313659-132313920
  hyper
ccgaaagccttgagcccccgagtttgctcggttgagggtgttgggggcacagggatgctggcccccagctccccactggacaaggacctggccctcagcctccttcccctccaccccaggtcggccaggctggccctgccttgccctggtacagtgctgagccgggggcgcggggagagccttcctcactccacacccagtagctgtccccagctcagcttagaaaccctgcctgggggcagcgacgtggcctcttcctac

SEQ ID NO: 289524 - DNA, 95 bp, Homo sapiens; identical to SEQ ID NO: 236836
  chr12:132379246-132379341
  hyper

SEQ ID NO: 289525 - DNA, 37 bp, Homo sapiens; identical to SEQ ID NO: 203261
  chr12:132380562-132380599
  hyper

SEQ ID NO: 289526 - DNA, 37 bp, Homo sapiens; identical to SEQ ID NO: 203262
  chr12:132380828-132380865
  hyper

SEQ ID NO: 289527 - DNA, 50 bp, Homo sapiens; identical to SEQ ID NO: 224491
  chr12:132480346-132480396
  hyper

SEQ ID NO: 289528 - DNA, 42 bp, Homo sapiens; identical to SEQ ID NO: 236838
  chr12:132628953-132628995
  hyper

SEQ ID NO: 289529 - DNA, 150 bp, Homo sapiens; identical to SEQ ID NO: 236839
  chr12:133136379-133136529
  hyper

SEQ ID NO: 289530 - DNA, 175 bp, Homo sapiens
  chr12:133195984-133196159
  hyper
ccagggtcgcctccggagccggcgccgcccctgcccgcaggtacgtattcatcgtgcagaaaagctaccaggagagcgagacgggccccgagagctccatcatcaccaaggtcaaggggatcaccacgtccgagcacaaagtgtgggacgtggaggagtacgtgaagccccccga

SEQ ID NO: 289531 - DNA, 494 bp, Homo sapiens
  chr12:133286719-133287213
  hyper
ggcaacagggcaagcgtccagcaatgggtaagcggtggggtcggtgcacgcaggcgtccagcaatgggtaagcggtggggtcggtccacccagggagcgctggtccccctggaaggaaacccaggctctaacgcggtccctctgaggaccctgctaggcgaaacgcgccggccatagaaagactgtcccgcaggagagggcggtgttcggcccggggtttgaggggtcgggaccaggaggagggacagcccggccgaacctgaacgcacttcaggccgcttgaacagcacacgcaggaactgcgccgacggaaaactttacttcgtgttccgccaccaaaaaaatatcgtttaaacaaacctgcggcagcttcccagctcccttaaaccaggatcccaagttctccgcgtctccgcccctgcacccagcctccggcctcggcaggcgcttccggtgcggaaccttctggaaagtaccgcgccgccctcccggcg

SEQ ID NO: 289532 - DNA, 442 bp, Homo sapiens; identical to SEQ ID NO: 226553
  chr12:133443618-133444060
  hyper

SEQ ID NO: 289533 - DNA, 133 bp, Homo sapiens; identical to SEQ ID NO: 203264
  chr12:133463975-133464108
  hyper

SEQ ID NO: 289534 - DNA, 237 bp, Homo sapiens; identical to SEQ ID NO: 203265
  chr12:133464166-133464403
  hyper

SEQ ID NO: 289535 - DNA, 218 bp, Homo sapiens; identical to SEQ ID NO: 203266
  chr12:133464555-133464773
  hyper

SEQ ID NO: 289536 - DNA, 241 bp, Homo sapiens; identical to SEQ ID NO: 203267
  chr12:133706775-133707016
  hyper

SEQ ID NO: 289537 - DNA, 81 bp, Homo sapiens; identical to SEQ ID NO: 236849
  chr13:20207704-20207785
  hyper

SEQ ID NO: 289538 - DNA, 192 bp, Homo sapiens; identical to SEQ ID NO: 236850
  chr13:20357046-20357238
  hyper

SEQ ID NO: 289539 - DNA, 41 bp, Homo sapiens
  chr13:20532066-20532107
  hyper
ttgttcccttggccgaatggcagagtccagttggggcttcc

SEQ ID NO: 289540 - DNA, 89 bp, Homo sapiens
  chr13:20701841-20701930
  hyper
tcgggggcgtaccccgagtgggcagcagggccagcccgcgcgtccctcagggtcaatgctggggccctgagggtgaggtcagctgtgag

SEQ ID NO: 289541 - DNA, 414 bp, Homo sapiens
  chr13:20702081-20702495
  hyper
gcctactttcccactctcgagtttgcccctctttgctgcccggcagctgggtgtcccatgtcccctgcccgccagtgtgcgaccgcggcctcccgcggggcggtgacggcccctctccttcagcctgaccgccgccagctccctcggcgtgtccggggtggccaggccttgtttagagtagctccagcgtttgaatcgcgcaggcacaagaaggccgtctcctcaccgcgggccagcggggccggccagggcccgggcggagggggagcccgggttccgcggtcgggttgtggggccggcgctgacctcaccgcatgggcccctgcggccgccgtggcttctcacgcggcctgactttggactcgagtgcaggctcttagctgaatctctgtgtagacagggtgggtgggactc

SEQ ID NO: 289542 - DNA, 253 bp, Homo sapiens
  chr13:20702531-20702784
  hyper
cgcaggcctgtcagcggggcgcttcccgtcgattccaggagcgcccgcgtctctgctcagcgccacgagtccaagcgtgggggaggacgagactttcaaggcggggggtgacagtgccatccagcccagaatacccacccccagtggcgggctgccgtgcccaggccctgatccctgcccctgcaaacatcactttctatcgcccacggggctctgcagatgtggccaggctaagggtccagagttagggaga

SEQ ID NO: 289543 - DNA, 217 bp, Homo sapiens; identical to SEQ ID NO: 203269
  chr13:20702913-20703130
  hyper

SEQ ID NO: 289544 - DNA, 153 bp, Homo sapiens; identical to SEQ ID NO: 236853
  chr13:20711077-20711230
  hyper

SEQ ID NO: 289545 - DNA, 165 bp, Homo sapiens
  chr13:20735267-20735432
  hyper
cgcgcttcccagcacgcacacctaccgcccccgcatccctaccctgtacgcgcagccacagcactcgcccgcgtccgcattccacaccctaccccgcgcgcacgtccatgcctagcgcctgcatccccatcccgcacctgcgcgggccctggggatgtggacgcg

SEQ ID NO: 289546 - DNA, 1420 bp, Homo sapiens
  chr13:20766341-20767761
  hyper
aaaaagggaagccactgaaatcttggccccggggtaggccgggatcggctggctccgcgttagttctaggcaaactccgcccaaatctctgcccggggatttttctgcagaagccgctccaagaggtaaaggtcagttcctgcagcgaaggcttcctgcttcaccggcgaaacggagctttgcttcgaagctaagctttcggtgaatttaaaacgtttggtggcagtgggtcaagtagccaggcggctgcgctagagtaccccgaagggacatcggcgacaccacaaacctcgcgctggcggctcgcccgcgcctttttcccctcccgcgcgcgcccggccccactcgcaccccgggcggtgccatcgcgtccacttccccggccgccccattccagctccggagctcggccgcagaaacgcccgctccagaaggcggcccccgccccccggcccaaggacgtgtgttggtccagccccccggttccccgagacccacgcggccgggcaaccgctctgggtctcgcggtccctccccgcgccaggttcctggccgggcagtccggggccggcgggctcacctgcgtcgggaggaagcgcggcggggccggggcgggggtctcggcgttggggtctctgcgctggggctcctgcgctcctaggcgggtcctgggccgggcgccgccgaggggctccgagtcggggagaggagcgcgcgggcgctgcggggccgcaacacctgtctcccgccgtggcgccttttaaccgcaccccacaccccgcctcttccctcggagactgggaaagttacggagggggcggcgccgcgggcggagcgcgcccggcctctgggtcctcagagcttcccgggtccgcgaacccccgaccgcccccgaaagccccgaaccccccaagtccccttcgaggtcccgatctcctagttcctttgagcccccatgagttccccaagtgcccccagcgccctgagtctcccccggttaccccgagcgccgcctcccccagccccttggcggcccgggtgaagcgggggcggctgagagtcgggaccccccaggaagcggcgccccagaccccggctccggcgctgtgccgtgggcggggttcagggatggctgtggtcgttgtcctctgtactccgcatagtgcgagaggacttggcatttatgagcgcttctttaattttttattgttagagaaacaggcattcctccaaggactgaagatctgttcgagtcgcggaggctgcgcgggcccgcgaggctctcgcagggggacctaggctgggtggcggggcagtgccctctggaatgggggttaacggtggccgaggagggggcgccgctggtgccggcgaagtccccgcttctttctcccctcaaaatctcaccaatccgaacgaa

SEQ ID NO: 289547 - DNA, 88 bp, Homo sapiens; identical to SEQ ID NO: 123412
  chr13:20767827-20767915
  hyper

SEQ ID NO: 289548 - DNA, 89 bp, Homo sapiens; identical to SEQ ID NO: 203274
  chr13:20805881-20805970
  hyper

SEQ ID NO: 289549 - DNA, 721 bp, Homo sapiens
  chr13:21099487-21100208
  hyper
ggatgagaacacagtcgtcgcaggatcgcagccagaattcgtttcattcaacacggtgcctggcacttctatgtggacctgcgggcagacgcggcgacattcaacagagtccaggaaccgcaggccccgcggcctgggcggtcaacctcggaacctcctgcaacgctggctcccgggaagcagacccaactccgcggggcgcctccacctgccaagcccctccagccgcgcctctccccgagcccgccagcgccgtaggggccgcagggcgcagggcttcggaggaccggaggccggggcggggacagcgacccggcgcccaccccgagggccccacgcgagggcaccacgtccccggcgtctccccgggctccaggggcagcagcgcggctcggagccctttacctgccaacgatcaccacgcagccggccgcggaggacgccatggttgggccggggacgcggcgccgcgggcgctgggaccaggcgccggcggagctgcgagctctgggctccggggagggcgggtcccgcgcccattggctgcgcgcgcggaccgggagggcggggagggccgcttggtccctgagtggggtgcgcgccgcgggcccgagacaccgggagacacacggcgcgccgaccctcgtgggcaggggcaggaccagcgcgggggcacgtcggggggtggaaagcgggaagaccacgcgcttgtgactgtcag

SEQ ID NO: 289550 - DNA, 38 bp, Homo sapiens; identical to SEQ ID NO: 236861
  chr13:21141043-21141081
  hyper

SEQ ID NO: 289551 - DNA, 111 bp, Homo sapiens
  chr13:21141668-21141779
  hyper
cgggcgtcgctgaccgcttggcgatgtcccaagtcccagtcacgcctgacggggaaacttaaaacccagttagattactgcgccagctctggaatcgcacagcagagatgg

SEQ ID NO: 289552 - DNA, 309 bp, Homo sapiens; identical to SEQ ID NO: 236862
  chr13:21347826-21348135
  hyper

SEQ ID NO: 289553 - DNA, 156 bp, Homo sapiens
  chr13:21634591-21634747
  hyper
tgcgcctcgggccgcgtcccgccaagaccgtgagcaaactcgcagagttggcgcggcagccggccgggagacgccgagcagggcctggccgcccgcagcccgggaggaacggcgcccccagggtccggtggcctctgaggggctgactggcccgtg

SEQ ID NO: 289554 - DNA, 791 bp, Homo sapiens
  chr13:21634965-21635756
  hyper
ggatccgtgggaccgctgcgccgccggaccgggggtcccgaggctgtcaggggcgcccggccgggcgtctagtgaaaagccgatcccccggagacagcggaagcagaggcgcgcccggcgctacggcctttcgggtctaggacaccgcccccggcccgcgccgcccctgccccgccgggatcccggccgccccggtcgccgcacaacaaagcggcgcagccccgctgcccccgcccgacgccggcctccaacttccccggctcctctggaaccggctccgcgggctccgtacggcctggactacgagccgccgggcgggggcggctccgggcgggcgcggaccgtgggggcagggcgcagggctccgtccggacaaacttcctcggccgccccgccgggcgcccttcccggagcctcggcaccacagtaggtgcgcggagccgcagggctcgaccgcttcgcggaaactctcgccaccctccgagctgccgccccgaccccagctcccagccccctcacctccaggggcgcggtctacaccctcgggggcgtcctggccggcggctcccgggcctctcgcgccgggagaccgggcactggtggctggagctgctgctggccccgcagggacgggggagccccgggcggcggcggtggcgtggacggcgactgctccatcttcccggggcgctcacgccgcggttccaaagcgcagacccaagtgggacattcgctacattgttggcattccacgggcgtcacgtgaccccgcctcccgcgtcactctcggc

SEQ ID NO: 289555 - DNA, 228 bp, Homo sapiens; identical to SEQ ID NO: 9203
  chr13:21635777-21636005
  hyper

SEQ ID NO: 289556 - DNA, 247 bp, Homo sapiens; identical to SEQ ID NO: 236866
  chr13:21714415-21714662
  hyper

SEQ ID NO: 289557 - DNA, 147 bp, Homo sapiens; identical to SEQ ID NO: 236867
  chr13:21750215-21750362
  hyper

SEQ ID NO: 289558 - DNA, 68 bp, Homo sapiens; identical to SEQ ID NO: 203279
  chr13:21872166-21872234
  hyper

SEQ ID NO: 289559 - DNA, 178 bp, Homo sapiens; identical to SEQ ID NO: 236869
  chr13:21872501-21872679
  hyper

SEQ ID NO: 289560 - DNA, 148 bp, Homo sapiens; identical to SEQ ID NO: 236870
  chr13:22178312-22178460
  hyper

SEQ ID NO: 289561 - DNA, 150 bp, Homo sapiens; identical to SEQ ID NO: 203280
  chr13:22243864-22244014
  hyper

SEQ ID NO: 289562 - DNA, 556 bp, Homo sapiens; identical to SEQ ID NO: 203281
  chr13:22244074-22244630
  hyper

SEQ ID NO: 289563 - DNA, 400 bp, Homo sapiens
  chr13:22244999-22245399
  hyper
ggtttcttcctcccgcctctcgcagtgcatctttcatttgcttttctttgtaaagccagggctcctcgactgcctcccaggaagtcctgcgctctggcgcgccgcacctcgcctgccgcagagcggcgcgggcagtaagccgggcgctaggaccgcggggagcccgggctgcggcggcgctaccttaaacccagcccaatgccgctgcctgcgccactctgcgcgccggcgggggctgcgcaggaggagcgctccgcccggctacaacgctccgcgagccggcgcggcaacacctgttcgcggcagcctgggcggcacgcgagctcccggacgcggctctcctcgctcgccgctcgccacccgttctaagccaatggacatctgccgagcctctggagaa

SEQ ID NO: 289564 - DNA, 96 bp, Homo sapiens; identical to SEQ ID NO: 203283
  chr13:22247845-22247941
  hyper

SEQ ID NO: 289565 - DNA, 132 bp, Homo sapiens; identical to SEQ ID NO: 236875
  chr13:22248800-22248932
  hyper

SEQ ID NO: 289566 - DNA, 223 bp, Homo sapiens; identical to SEQ ID NO: 203284
  chr13:23949731-23949954
  hyper

SEQ ID NO: 289567 - DNA, 44 bp, Homo sapiens
  chr13:24041016-24041060
  hyper
cccgaacagcctgatgacttcacgctcaaccactggagggcaca

SEQ ID NO: 289568 - DNA, 227 bp, Homo sapiens
  chr13:24152955-24153182
  hyper
ccgctgcgagggtgcggccgtctcggggcgagtgcttcccggcctgcaggaggcgaactcgggcttccccgggaggcgtccgtgggaacgcgcacctgcgagtccctgccggctgaggagccgaggtctgcgacctctgccgacctgagctcaggcgcagcagcgcagacctggccgccgtatcccctctggctgggatgcgggcccacgcgggaaaggctgaaagg

SEQ ID NO: 289569 - DNA, 202 bp, Homo sapiens
  chr13:24153336-24153538
  hyper
caaagaacccagctgcagagcaagtccggctgacgcagtgtgcgctgggggcggggctctggacgggggcggagccacggcgagagccgcggtgagggcggggcccgggtgggcggtgccctgagcggggctcctagtgggcggggctctggggtggcggccgttgccgggctacgggagagcgcggagccctgcgctggga

SEQ ID NO: 289570 - DNA, 302 bp, Homo sapiens
  chr13:24153751-24154053
  hyper
gggagtggaggcggccgccctagggagggaggagcgcaggcgggggctgctcacgggcggagtactgcgcggcgaagggaacccccgaaggggctgaccgggtctcggggccgtgacaggcggcgaggcggtgggaggggagcgtgtgaattcacgccgggtccccgcgggcgacgcgagcgacgcgacctggactcctatccgggatattgtaaatagatctgcttgtgaggctcacgactgggagcctgtcactctgcccaagcccgacccggccccggcgcccgcccgcgtcctgcgga

SEQ ID NO: 289571 - DNA, 152 bp, Homo sapiens
  chr13:24154123-24154275
  hyper
agcgttgtctgtgagcggcccagggtatattccttctgtgggaaagagttccttagagttcagcaggaattattagtatattgatgagtagagcctgtgatagatttagagagtgagaaagccagctcttacaatgcgtgtaatgccatctc

SEQ ID NO: 289572 - DNA, 132 bp, Homo sapiens; identical to SEQ ID NO: 203285
  chr13:24553697-24553829
  hyper

SEQ ID NO: 289573 - DNA, 1102 bp, Homo sapiens
  chr13:24734667-24735769
  hyper
ccactgcgcctggccggggaactgtttttgatgggtggggtccccggctgtggttggtagtgtgggggcgtggccgagggtgtggcctgagggagtgagctaaccgggggcgtggcctgatatggggcggggggaagagccgggctgggggcgtggcctggtggggagcggggctggggcgtggcttggctgagtgtgctgccgcggcgcgggaggagagtgtgcgttgcgctttctcccgcgatcgccctgccggtcgctagctccgagggcgcgcactggatcccaggctcctccgagagtgcggcgacctcggggctccgccggcaccggaggtggctctgagggcagggacgtgttggacacgctgactttgtaggctccgccaagaggcgccgcaggaggtaagacggcttcgggcgcgcggctctgccgggcgggcgcgggcatgggctgttaggtagaatatcgggaggatttgagtcccagtggactgcctcggggcttcgggatgtccagctcccagctgcttggcctctgcttcccccgccggtggaggctaccgggtgctcacctgttaggtccgtgcgcccgctccctgcccggcggtggctctgcgccctctgggccacccggcaccatcgcttttgggaggacatgcacgtggtgttctcgcaaaaggccgtttccagccggaagcctgcagggaggtcgccttgtaacttcacccgcgctcccagctcgcggggcctggcctacaggggcggccgtgggggtggcagagtctggggagcctggcgcggcggagccctgtaacgctctgctccatcgggtggcgtggctggtgcctccggggacccggagcgatgcggttggagagcttagtttagaaagcaagtttctcttggtaccagcggagtctcgtcccaggggaaagattttgggacccggtgcccatcgtctgtggactgcagggaatgcattggcggagttggtttggtcccattctgtgcaggaggtgggggaattggtactccagccccaggcaggtagaagcccgcgctgctgccagcgtcagggggagctcgggtgacttgggctg

SEQ ID NO: 289574 - DNA, 94 bp, Homo sapiens; identical to SEQ ID NO: 236887
  chr13:25254433-25254527
  hyper

SEQ ID NO: 289575 - DNA, 308 bp, Homo sapiens; identical to SEQ ID NO: 236890
  chr13:25497030-25497338
  hyper

SEQ ID NO: 289576 - DNA, 190 bp, Homo sapiens; identical to SEQ ID NO: 203287
  chr13:25497658-25497848
  hyper

SEQ ID NO: 289577 - DNA, 78 bp, Homo sapiens
  chr13:25592165-25592243
  hyper
ctctcagcgcctcccgcctctcagcagaaacgcccaacagaaccgttagaaccagcgagcacgcgcaccttagccggc

SEQ ID NO: 289578 - DNA, 81 bp, Homo sapiens; identical to SEQ ID NO: 203288
  chr13:25746000-25746081
  hyper

SEQ ID NO: 289579 - DNA, 48 bp, Homo sapiens; identical to SEQ ID NO: 203289
  chr13:25861519-25861567
  hyper

SEQ ID NO: 289580 - DNA, 93 bp, Homo sapiens; identical to SEQ ID NO: 203290
  chr13:25946858-25946951
  hyper

SEQ ID NO: 289581 - DNA, 174 bp, Homo sapiens; identical to SEQ ID NO: 236899
  chr13:26623880-26624054
  hyper

SEQ ID NO: 289582 - DNA, 94 bp, Homo sapiens
  chr13:26624294-26624388
  hyper
agaagatgggaatccgcggcgtctggcacggggcagcagccccgggaaagccctgaggagctgccttcctttcggggagccttcaggggagcac

SEQ ID NO: 289583 - DNA, 281 bp, Homo sapiens; identical to SEQ ID NO: 203291
  chr13:26624917-26625198
  hyper

SEQ ID NO: 289584 - DNA, 271 bp, Homo sapiens; identical to SEQ ID NO: 236905
  chr13:26760408-26760679
  hyper

SEQ ID NO: 289585 - DNA, 50 bp, Homo sapiens; identical to SEQ ID NO: 236906
  chr13:26828724-26828774
  hyper

SEQ ID NO: 289586 - DNA, 83 bp, Homo sapiens; identical to SEQ ID NO: 203292
  chr13:27131470-27131553
  hyper

SEQ ID NO: 289587 - DNA, 239 bp, Homo sapiens; identical to SEQ ID NO: 203293
  chr13:27334980-27335219
  hyper

SEQ ID NO: 289588 - DNA, 275 bp, Homo sapiens; identical to SEQ ID NO: 203294
  chr13:27744759-27745034
  hyper

SEQ ID NO: 289589 - DNA, 114 bp, Homo sapiens; identical to SEQ ID NO: 203295
  chr13:27825512-27825626
  hyper

SEQ ID NO: 289590 - DNA, 291 bp, Homo sapiens; identical to SEQ ID NO: 236910
  chr13:28024612-28024903
  hyper

SEQ ID NO: 289591 - DNA, 203 bp, Homo sapiens; identical to SEQ ID NO: 236911
  chr13:28194643-28194846
  hyper

SEQ ID NO: 289592 - DNA, 102 bp, Homo sapiens; identical to SEQ ID NO: 236912
  chr13:28195534-28195636
  hyper

SEQ ID NO: 289593 - DNA, 58 bp, Homo sapiens
  chr13:28364282-28364340
  hyper
accatttaaacatttcagcacaaaacccgatccattgtggggccgcacattaaaaagt

SEQ ID NO: 289594 - DNA, 236 bp, Homo sapiens; identical to SEQ ID NO: 203297
  chr13:28371461-28371697
  hyper

SEQ ID NO: 289595 - DNA, 239 bp, Homo sapiens
  chr13:28394423-28394662
  hyper
gcccacaccgacccgagccaacagaatggggaggaagcaggtgcagggagtcagcttcatcttccccttctcttgatgatgctcttcagccattagggtttcaaaagagtgggcgtgagcaagcgagaaaagccccttcaattctgggaaacttaaagacagtttcttccagcaggaacacctggagaggcaaaaaaaaaagcaaaaaacaaaacaaaacaaaacaaacaaacaaaaaa

SEQ ID NO: 289596 - DNA, 40 bp, Homo sapiens
  chr13:28395743-28395783
  hyper
taaaagctgaatgcgcacctcaaagagatgtggtgtttgc

SEQ ID NO: 289597 - DNA, 281 bp, Homo sapiens
  chr13:28396896-28397177
  hyper
tctgttagacggtgcggtgcctgcagctgatttgatgggttggaaatgcgcacgaaacaaaatacttgaatcctgaaaaagaccctttgtaagtttctttagaaatcaagcaattctgcatgacaaagaacaattaataagccgtcttttcacaaaccagcagctggtttccccgtcaaggaaagttggaaaaaattcaggctgaatgcgcgcagaagctctttgcgcacagacatctctccaaggtgacccatttggcacagctgaaataaataaccccg

SEQ ID NO: 289598 - DNA, 147 bp, Homo sapiens; identical to SEQ ID NO: 203299
  chr13:28491468-28491615
  hyper

SEQ ID NO: 289599 - DNA, 177 bp, Homo sapiens; identical to SEQ ID NO: 203300
  chr13:28491616-28491793
  hyper

SEQ ID NO: 289600 - DNA, 226 bp, Homo sapiens; identical to SEQ ID NO: 203301
  chr13:28493981-28494207
  hyper

SEQ ID NO: 289601 - DNA, 508 bp, Homo sapiens
  chr13:28494265-28494773
  hyper
ggccgcagccatgaacggcgaggagcagtactacgcggccacgcagctttacaaggacccatgcgcgttccagcgaggcccggcgccggagttcagcgccagcccccctgcgtgcctgtacatgggccgccagcccccgccgccgccgccgcacccgttccctggcgccctgggcgcgctggagcagggcagccccccggacatctccccgtacgaggtgccccccctcgccgacgaccccgcggtggcgcaccttcaccaccacctcccggctcagctcgcgctcccccacccgcccgccgggcccttcccggagggagccgagccgggcgtcctggaggagcccaaccgcgtccagctgcctttcccatggatgaagtctaccaaagctcacgcgtggaaaggccagtgggcaggtaagcctggctccccacccctttctcctttccggttctcacccggccgccttacctccaagcgctcccaggagccttctctctgttcccgg

SEQ ID NO: 289602 - DNA, 263 bp, Homo sapiens
  chr13:28495754-28496017
  hyper
atcctcagcgcccatctgcggggtctggccagccctgcctgacactgaccccaggcgcagccaggaggggctttgtgcgggagagggagggggaccccagcttgcctggggtccacgggactctcttcttcctagttcactttcttgctaaggcgaaggtcctgaggcaggacgagggctgaactgcgctgcaatcgtccccacctccagcgaaacccagttgacaggggcgccagaagctgccgcggcgcctctgcaaattt

SEQ ID NO: 289603 - DNA, 51 bp, Homo sapiens; identical to SEQ ID NO: 203303
  chr13:28527188-28527239
  hyper

SEQ ID NO: 289604 - DNA, 461 bp, Homo sapiens; identical to SEQ ID NO: 203304
  chr13:28527384-28527845
  hyper

SEQ ID NO: 289605 - DNA, 706 bp, Homo sapiens
  chr13:28534554-28535260
  hyper
tctcttcccagagcgcgcgcgccctctggcgcctgaaccggcgactggacgcggtggaggcgtgggattcggaggccgggaccccaagctctgcgctggaggcgtcaggagccgcgaggtcatccggtctcaacctcaggcgcccctgtgcaggcctccctacactcctcaagctgcgctccctactcgtgccacatcccttgttccgtaggtattgcttcgggggtgacacagttggcgttagaagcgcggtggcctcacttgccggagagggtcttggttttgcgcctttttccgtggcccgggaggcttgccaggcgctcgcagcagcgagccgggtgcttgcatctcagagagcagccgagctcccttccctggccccgtacccgcgtgcaaggggaccgagccccgggaaggggaagaacttgtaatcgcttgcagcgggacaatgtcgacttttgaacctctaaccactaagcaaacaacccatgtgctcttgctccactgtccaaacagggtttattgacaggcgtttcacggcaacgcatagcaaccccggcggctagggggcgggcctgtgggcgcggccggggcgcggggagacctgcggggcaccggggctcagaccggccctgacccaggacccctgacccaggacccctcgcccagcggacccggacacggcttcctcctctgcccggcaccc

SEQ ID NO: 289606 - DNA, 58 bp, Homo sapiens; identical to SEQ ID NO: 203305
  chr13:28535573-28535631
  hyper

SEQ ID NO: 289607 - DNA, 53 bp, Homo sapiens; identical to SEQ ID NO: 203306
  chr13:28540420-28540473
  hyper

SEQ ID NO: 289608 - DNA, 126 bp, Homo sapiens; identical to SEQ ID NO: 203307
  chr13:28541283-28541409
  hyper

SEQ ID NO: 289609 - DNA, 227 bp, Homo sapiens; identical to SEQ ID NO: 203308
  chr13:28542128-28542355
  hyper

SEQ ID NO: 289610 - DNA, 258 bp, Homo sapiens; identical to SEQ ID NO: 203309
  chr13:28542395-28542653
  hyper

SEQ ID NO: 289611 - DNA, 99 bp, Homo sapiens; identical to SEQ ID NO: 203310
  chr13:28543436-28543535
  hyper

SEQ ID NO: 289612 - DNA, 57 bp, Homo sapiens; identical to SEQ ID NO: 236932
  chr13:28544071-28544128
  hyper

SEQ ID NO: 289613 - DNA, 34 bp, Homo sapiens; identical to SEQ ID NO: 203311
  chr13:28592658-28592692
  hyper

SEQ ID NO: 289614 - DNA, 210 bp, Homo sapiens; identical to SEQ ID NO: 203312
  chr13:28608023-28608233
  hyper

SEQ ID NO: 289615 - DNA, 167 bp, Homo sapiens; identical to SEQ ID NO: 203313
  chr13:28608355-28608522
  hyper

SEQ ID NO: 289616 - DNA, 106 bp, Homo sapiens; identical to SEQ ID NO: 203314
  chr13:28636040-28636146
  hyper

SEQ ID NO: 289617 - DNA, 224 bp, Homo sapiens; identical to SEQ ID NO: 236938
  chr13:28712328-28712552
  hyper

SEQ ID NO: 289618 - DNA, 58 bp, Homo sapiens; identical to SEQ ID NO: 203315
  chr13:29069851-29069909
  hyper

SEQ ID NO: 289619 - DNA, 34 bp, Homo sapiens; identical to SEQ ID NO: 203316
  chr13:29233057-29233091
  hyper

SEQ ID NO: 289620 - DNA, 220 bp, Homo sapiens; identical to SEQ ID NO: 203317
  chr13:29292471-29292691
  hyper

SEQ ID NO: 289621 - DNA, 256 bp, Homo sapiens; identical to SEQ ID NO: 203318
  chr13:29293342-29293598
  hyper

SEQ ID NO: 289622 - DNA, 117 bp, Homo sapiens
  chr13:29393539-29393656
  hyper
agcttgcttctagaaagaaacgcctgccttttgcgcaaatcttttcagagactggctttgggctcctatgaatcaggcaccctagcgtcctccaaagttcttcccgatgctgaaccc

SEQ ID NO: 289623 - DNA, 215 bp, Homo sapiens; identical to SEQ ID NO: 236947
  chr13:30002457-30002672
  hyper

SEQ ID NO: 289624 - DNA, 140 bp, Homo sapiens; identical to SEQ ID NO: 236948
  chr13:30424807-30424947
  hyper

SEQ ID NO: 289625 - DNA, 225 bp, Homo sapiens; identical to SEQ ID NO: 236949
  chr13:30880886-30881111
  hyper

SEQ ID NO: 289626 - DNA, 390 bp, Homo sapiens; identical to SEQ ID NO: 203319
  chr13:30982478-30982868
  hyper

SEQ ID NO: 289627 - DNA, 236 bp, Homo sapiens; identical to SEQ ID NO: 236952
  chr13:31039902-31040138
  hyper

SEQ ID NO: 289628 - DNA, 173 bp, Homo sapiens; identical to SEQ ID NO: 236953
  chr13:31191666-31191839
  hyper

SEQ ID NO: 289629 - DNA, 303 bp, Homo sapiens
  chr13:32889501-32889804
  hyper
aggaatttcctttcgccacactgagaaatacccgcagcggcccacccaggcctgacttccgggtggtgcgtgtgctgcgtgtcgcgtcacggcgtcacgtggccagcgcgggcttgtggcgcgagcttctgaaactaggcggcagaggcggagccgctgtggcactgctgcgcctctgctgcgcctcgggtgtcttttgcggcggtgggtcgccgccgggagaagcgtgaggggacagatttgtgaccggcgcggtttttgtcagcttactccggccaaaaaagaactgcacctctggagcgg

SEQ ID NO: 289630 - DNA, 106 bp, Homo sapiens; identical to SEQ ID NO: 224534
  chr13:32890558-32890664
  hyper

SEQ ID NO: 289631 - DNA, 249 bp, Homo sapiens; identical to SEQ ID NO: 224535
  chr13:32893213-32893462
  hyper

SEQ ID NO: 289632 - DNA, 109 bp, Homo sapiens; identical to SEQ ID NO: 224536
  chr13:32899212-32899321
  hyper

SEQ ID NO: 289633 - DNA, 182 bp, Homo sapiens; identical to SEQ ID NO: 224537
  chr13:32900237-32900419
  hyper

SEQ ID NO: 289634 - DNA, 115 bp, Homo sapiens; identical to SEQ ID NO: 224538
  chr13:32900635-32900750
  hyper

SEQ ID NO: 289635 - DNA, 50 bp, Homo sapiens; identical to SEQ ID NO: 224539
  chr13:32903579-32903629
  hyper

SEQ ID NO: 289636 - DNA, 159 bp, Homo sapiens
  chr13:32905055-32905214
  hyper
aatgtgaaaagctatttttccaatcatgatgaaagtctgaagaaaaatgatagatttatcgcttctgtgacagacagtgaaaacacaaatcaaagagaagctgcaagtcatggtaagtcctctgtttagttgaactacaggtttttttgttgttgttgt

SEQ ID NO: 289637 - DNA, 1116 bp, Homo sapiens; identical to SEQ ID NO: 224541
  chr13:32906408-32907524
  hyper

SEQ ID NO: 289638 - DNA, 4932 bp, Homo sapiens; identical to SEQ ID NO: 224542
  chr13:32910401-32915333
  hyper

SEQ ID NO: 289639 - DNA, 96 bp, Homo sapiens; identical to SEQ ID NO: 224543
  chr13:32918694-32918790
  hyper

SEQ ID NO: 289640 - DNA, 70 bp, Homo sapiens; identical to SEQ ID NO: 224544
  chr13:32920963-32921033
  hyper

SEQ ID NO: 289641 - DNA, 428 bp, Homo sapiens; identical to SEQ ID NO: 224545
  chr13:32928997-32929425
  hyper

SEQ ID NO: 289642 - DNA, 182 bp, Homo sapiens; identical to SEQ ID NO: 224546
  chr13:32930564-32930746
  hyper

SEQ ID NO: 289643 - DNA, 188 bp, Homo sapiens; identical to SEQ ID NO: 224547
  chr13:32931878-32932066
  hyper

SEQ ID NO: 289644 - DNA, 171 bp, Homo sapiens; identical to SEQ ID NO: 224548
  chr13:32936659-32936830
  hyper

SEQ ID NO: 289645 - DNA, 355 bp, Homo sapiens; identical to SEQ ID NO: 224549
  chr13:32937315-32937670
  hyper

SEQ ID NO: 289646 - DNA, 156 bp, Homo sapiens; identical to SEQ ID NO: 224550
  chr13:32944538-32944694
  hyper

SEQ ID NO: 289647 - DNA, 145 bp, Homo sapiens; identical to SEQ ID NO: 224551
  chr13:32945092-32945237
  hyper

SEQ ID NO: 289648 - DNA, 122 bp, Homo sapiens; identical to SEQ ID NO: 224552
  chr13:32950806-32950928
  hyper

SEQ ID NO: 289649 - DNA, 199 bp, Homo sapiens; identical to SEQ ID NO: 224553
  chr13:32953453-32953652
  hyper

SEQ ID NO: 289650 - DNA, 396 bp, Homo sapiens; identical to SEQ ID NO: 224554
  chr13:32953886-32954282
  hyper

SEQ ID NO: 289651 - DNA, 245 bp, Homo sapiens; identical to SEQ ID NO: 224555
  chr13:32968825-32969070
  hyper

SEQ ID NO: 289652 - DNA, 147 bp, Homo sapiens; identical to SEQ ID NO: 224556
  chr13:32971034-32971181
  hyper

SEQ ID NO: 289653 - DNA, 876 bp, Homo sapiens; identical to SEQ ID NO: 224557
  chr13:32972298-32973174
  hyper

SEQ ID NO: 289654 - DNA, 515 bp, Homo sapiens; identical to SEQ ID NO: 224558
  chr13:32973294-32973809
  hyper

SEQ ID NO: 289655 - DNA, 191 bp, Homo sapiens
  chr13:33000877-33001068
  hyper
ctgaacagctactacgtgccagacaatgtgcttggcagggtaagacatggctcctaccttcaagaaacttacagaaggataagaaaaaccatgtgcaaaaaagtaagcacagtcacgtaggtataaacaggaagccaaggagcccagaagaggggcatatactggcggggtgggatagctgcccggtctta

SEQ ID NO: 289656 - DNA, 201 bp, Homo sapiens
  chr13:33001228-33001429
  hyper
aggtggccacaggcacaagcccgcgtaattcccagaggttgggtaccggagggccgcttacgcaattcgcaagtgaacgaatttgggcgcccatggcgaggctctgtcagtgacggtcggtggtggcgccgccagccagccccccgcccccgtgcacctgtgcgccttcgcagctgccaaagcaaacgcaggctccccgac

SEQ ID NO: 289657 - DNA, 431 bp, Homo sapiens; identical to SEQ ID NO: 236955
  chr13:33001996-33002427
  hyper

SEQ ID NO: 289658 - DNA, 135 bp, Homo sapiens
  chr13:33589987-33590122
  hyper
ctttcagcgcacggcgaagttccccctcggctgtcccacctggcagtccctctaggatttcggccagtccctaattggctccagcaatgtccagccggagcttctttgggcctccgagtgggagaaaagtgagag

SEQ ID NO: 289659 - DNA, 259 bp, Homo sapiens
  chr13:33590208-33590467
  hyper
ccgacgaagccgctccagggctgctctcagaggacgcgcggcaggcaaagagaatgaacctgagcgtccacgaaacgtcctgcacggctcccgggagctgggagaaacaggtgcctttctccgacgtccgcgggcgacgcctgccgcaccttgcccgctgccgcgcccctcccgggcacccctcgccctcggcgcccctgcccccgcccccagtgccagggcggaggcagtcccggctcgcaggtaattattgccagcg

SEQ ID NO: 289660 - DNA, 65 bp, Homo sapiens; identical to SEQ ID NO: 203321
  chr13:33591441-33591506
  hyper

SEQ ID NO: 289661 - DNA, 218 bp, Homo sapiens; identical to SEQ ID NO: 203322
  chr13:33924391-33924609
  hyper

SEQ ID NO: 289662 - DNA, 130 bp, Homo sapiens; identical to SEQ ID NO: 203323
  chr13:33924790-33924920
  hyper

SEQ ID NO: 289663 - DNA, 284 bp, Homo sapiens
  chr13:35516209-35516493
  hyper
ccactacccgccccgcctctgccagcttgccccagtgtctggcagcagtccccatgcacctgctcacctgtctatccgttcggggtggttgggggagggacgaggggtgtcggggtgggtgggtgggaagagaaggagggcagggcaaaagagggggtgcaccgagggctccgcccccccggaggctgtgcgcaggcgcagtggctgctaccgcaggcagggggcggcaacatggcggagtgagcggcggcgtcggggcttcacaacaacagtggtggccgtag

SEQ ID NO: 289664 - DNA, 469 bp, Homo sapiens
  chr13:35516535-35517004
  hyper
cttcagcaccggccagcgtcgtggccagctgctcgcgtcctcgggcttctcggagcggctgcagcatctccgcggggggcgggccgggccggacagaccgggagagggagagagcagaggcagcggcggcggcagcggcagcggcagcggcacacctgctgggcgggcacagccgcttgcccggcagcggttagcggtaccgccaccgccgagaataagcctgcggatcccccgccgcctccgcgggggagagcgccggagcgggccgggctgaggcgcaggcggggagcgggcccggcgccgcggcgctggtggatgctggggctccgaggcgacggccggggggcgggggccgaggcaggtataacggtaccggcggcggcagcgccgctgctcttcccttctcctcaggaggggggccaatggctagcgagaagccgggcccgggcccggggctcgagcctcagcc

SEQ ID NO: 289665 - DNA, 80 bp, Homo sapiens; identical to SEQ ID NO: 203325
  chr13:35517052-35517132
  hyper

SEQ ID NO: 289666 - DNA, 200 bp, Homo sapiens; identical to SEQ ID NO: 203326
  chr13:35517173-35517373
  hyper

SEQ ID NO: 289667 - DNA, 248 bp, Homo sapiens; identical to SEQ ID NO: 203327
  chr13:36704552-36704800
  hyper

SEQ ID NO: 289668 - DNA, 91 bp, Homo sapiens; identical to SEQ ID NO: 203328
  chr13:36705636-36705727
  hyper

SEQ ID NO: 289669 - DNA, 157 bp, Homo sapiens
  chr13:37004574-37004731
  hyper
aaagtggatcaaaacgacaggttccacgaacaaacactgcgccggcgcctctactttggagaaaaggaaaagggcgtgaggtttcggtcatttttgtcaaaggaaatcagatgaaaaggggtgtacaaaggaccaggtctcgtgagcgcagccaatc

SEQ ID NO: 289670 - DNA, 42 bp, Homo sapiens; identical to SEQ ID NO: 203330
  chr13:37005431-37005473
  hyper

SEQ ID NO: 289671 - DNA, 38 bp, Homo sapiens
  chr13:37247935-37247973
  hyper
agatgggctccctgcgcaacgcctcctcgtcctccgag

SEQ ID NO: 289672 - DNA, 193 bp, Homo sapiens; identical to SEQ ID NO: 203331
  chr13:37248319-37248512
  hyper

SEQ ID NO: 289673 - DNA, 304 bp, Homo sapiens; identical to SEQ ID NO: 203332
  chr13:37393232-37393536
  hyper

SEQ ID NO: 289674 - DNA, 32 bp, Homo sapiens
  chr13:37493431-37493463
  hyper
gatcacaaagctggcgtcaggcagtctcctgt

SEQ ID NO: 289675 - DNA, 165 bp, Homo sapiens
  chr13:37493530-37493695
  hyper
acaaacaccccggctccgacacagtccaagcgcgagcccggagacacttcaacaacattcctaactttttttctcagttcgcatgcctcaaaggtaaacaaagcaaaaagcctacgaaacagaaggcaagtgaggccaattcggcgctggcgagtttaaaagtgg

SEQ ID NO: 289676 - DNA, 101 bp, Homo sapiens
  chr13:37493903-37494004
  hyper
aaggcgagctgcgccgcggccaactccccagagcagtcccctccggccccgcgcccaccccaccccaccccactccaccccagacaggctccaccaaaaaa

SEQ ID NO: 289677 - DNA, 61 bp, Homo sapiens; identical to SEQ ID NO: 236970
  chr13:37572855-37572916
  hyper

SEQ ID NO: 289678 - DNA, 119 bp, Homo sapiens; identical to SEQ ID NO: 236971
  chr13:37574643-37574762
  hyper

SEQ ID NO: 289679 - DNA, 118 bp, Homo sapiens
  chr13:38443934-38444052
  hyper
cgaagccatgggaggcgggggaggggcggcccgggagggggaggtaaccgccaggggaggagaacctctcccacccccgcctgcacagatccctctggataaagttaagagttcccac

SEQ ID NO: 289680 - DNA, 35 bp, Homo sapiens; identical to SEQ ID NO: 236973
  chr13:38923590-38923625
  hyper

SEQ ID NO: 289681 - DNA, 138 bp, Homo sapiens; identical to SEQ ID NO: 236974
  chr13:38924354-38924492
  hyper

SEQ ID NO: 289682 - DNA, 360 bp, Homo sapiens
  chr13:39260647-39261007
  hyper
tggagtgcaacctgctctagctatggcttttaattccagctgtccttttgcaaatatgccccagaatttcttctcaaacgctctgggtttcgcttcaaactcaaaaagcattgcgtctaactttcccctgggtttgcaagtttccttgggaaatggccatgccctgcgcgggatttcattgactagggcggaggggtgggggtggctaaaatgggtaaccctcggtcgccggcagatgaagtgaacccagcacagcagtgtgttccggctcctctgcaggagtaccagatctattaatagcagcccagagagtagcgcaagcaggggtgggcaactcctggccacttcttccctcacttc

SEQ ID NO: 289683 - DNA, 243 bp, Homo sapiens; identical to SEQ ID NO: 203334
  chr13:39261446-39261689
  hyper

SEQ ID NO: 289684 - DNA, 101 bp, Homo sapiens; identical to SEQ ID NO: 203335
  chr13:39610513-39610614
  hyper

SEQ ID NO: 289685 - DNA, 345 bp, Homo sapiens; identical to SEQ ID NO: 203336
  chr13:39610817-39611162
  hyper

SEQ ID NO: 289686 - DNA, 33 bp, Homo sapiens; identical to SEQ ID NO: 203337
  chr13:39612009-39612042
  hyper

SEQ ID NO: 289687 - DNA, 120 bp, Homo sapiens; identical to SEQ ID NO: 236978
  chr13:39612313-39612433
  hyper

SEQ ID NO: 289688 - DNA, 1233 bp, Homo sapiens; identical to SEQ ID NO: 236979
  chr13:40176535-40177768
  hyper

SEQ ID NO: 289689 - DNA, 253 bp, Homo sapiens; identical to SEQ ID NO: 236980
  chr13:40976492-40976745
  hyper

SEQ ID NO: 289690 - DNA, 99 bp, Homo sapiens
  chr13:41238386-41238485
  hyper
cgacagagcgagactccgtctcggaggaggggagggaggtgtttagctcaactagacagcctttacagcaattccgccaccggtgacagtgagaaactg

SEQ ID NO: 289691 - DNA, 136 bp, Homo sapiens
  chr13:41238533-41238669
  hyper
tccccggagccgagggcccccgggccttctcctcggagtcgggaagtgcctgcccccacgctaagtctctcctggccacgctctgaaaggcaaaaatggcaaaaatcctccttcaaggcaccgctccctcgacgcg

SEQ ID NO: 289692 - DNA, 163 bp, Homo sapiens
  chr13:41345169-41345332
  hyper
tgagtagcataatcgcagccgctgatgtctccgggcttccagaggacaaagggtggcgggaaagggggcgaagaggtaggaacgtcgagactctaggaaacatcgccgagacacgaaatgaaccaagaacacaactgaaatggtgcgtcccgctgccaaacac

SEQ ID NO: 289693 - DNA, 223 bp, Homo sapiens
  chr13:41345361-41345584
  hyper
ggcgccttcctccccctttgcgctccggtgggctacaggggcgggtaactgtgttccggactcgcccgcggccgggcggagccagttgcctccaagcgacccgacccaccccgcgattgtagtcctagaggcggagtcctcgccagagttcagcaaaggttcgctggccgaggcgggtcccagaccggcgaacccgacagtggagggcgtgaccagttgtgca

SEQ ID NO: 289694 - DNA, 206 bp, Homo sapiens; identical to SEQ ID NO: 203340
  chr13:41364043-41364249
  hyper

SEQ ID NO: 289695 - DNA, 225 bp, Homo sapiens; identical to SEQ ID NO: 236984
  chr13:41635650-41635875
  hyper

SEQ ID NO: 289696 - DNA, 277 bp, Homo sapiens; identical to SEQ ID NO: 236985
  chr13:41706714-41706991
  hyper

SEQ ID NO: 289697 - DNA, 326 bp, Homo sapiens
  chr13:41767766-41768092
  hyper
aattgaacccattcggctgagctgcttgaagttgtgagctatgtaggactgggcctgagatcgaagcttgtgatggtcgaaggcgtctgcaaacttgaggatggcggtgcagttggtcaggtcaagacgtcgggctaagaaggaggcacaggcttcccgcacatattccagctgtagcatgtcggaggccgcgtacaggcgctgcacattggcctcactgagagacacacgacccgtgtagcagtagtcgaccaacacctcgaaggactcggcgtccacatcgtgcatggtcacgctggcctgctggctctcgtacatgccacctg

SEQ ID NO: 289698 - DNA, 164 bp, Homo sapiens; identical to SEQ ID NO: 236986
  chr13:41837649-41837813
  hyper

SEQ ID NO: 289699 - DNA, 172 bp, Homo sapiens; identical to SEQ ID NO: 236987
  chr13:41885138-41885310
  hyper

SEQ ID NO: 289700 - DNA, 480 bp, Homo sapiens
  chr13:42032016-42032496
  hyper
ccggtcttcccgcgcgggcggctgcagcctcctttccggcccgggctggcccccatgtcccaccttccctccaccaccagctccgcgcgcgcccggggttggggggagcggcggggacaggtaaccggcagcgcctggggaggaatctggccgcgccaagtcgctgggtgaccctgggcctggcgaaggctcagttttcttgtctgtaaaacggacttggtaatagaacgcacttcgggggtggtggagaagattacaaggtaacagcgactgcgtggctgtcacttggcagaggcgccaagtgtcagttatcttcgggaaccgtggcggcccctcctggccctgggaggtggtcccgctgcccccctgacttccgtgcactgagcccctggccctgcccgcagccccggccctggactcggcggccgcggaggacctgtcggacgcgctgtgcgagtttgacgcggtgctggccgactt

SEQ ID NO: 289701 - DNA, 111 bp, Homo sapiens
  chr13:42032649-42032760
  hyper
cccaggacctgccccgcgaaggctgcggcctcagttttcttatcagtaaactgaggaatggtttcctgaagctcaacgcagtaggccgagtggtggcggggcccctgacga

SEQ ID NO: 289702 - DNA, 162 bp, Homo sapiens; identical to SEQ ID NO: 224571
  chr13:42615145-42615307
  hyper

SEQ ID NO: 289703 - DNA, 202 bp, Homo sapiens
  chr13:42615560-42615762
  hyper
gggcgtctggagggtgcaacgggttttgccggggacgaagcagaaagctgacttcgctttcgcctgggatttcgctgcacacgcaacgcggaggttgagtaattttaggaaccaagagtagtgtgtgtgcgtgtcttaagtgtgcgaggataaggaggaagagaccagggggctttggatttgttccctcaaactccctcaa

SEQ ID NO: 289704 - DNA, 182 bp, Homo sapiens
  chr13:42615836-42616018
  hyper
actcagagctctggaagcctgtgtgggctgccttttccctggcgtcgaattttgactctccacgccctgcctcgatatttgctactccttcttggttgacattgtgagccagtctgaaaagccccgtccgaaatttctggcctcacccatgttccggtcaacgtgttcggatgctgttttcc

SEQ ID NO: 289705 - DNA, 738 bp, Homo sapiens; identical to SEQ ID NO: 236990
  chr13:42621978-42622716
  hyper

SEQ ID NO: 289706 - DNA, 174 bp, Homo sapiens; identical to SEQ ID NO: 203345
  chr13:43148495-43148669
  hyper

SEQ ID NO: 289707 - DNA, 473 bp, Homo sapiens; identical to SEQ ID NO: 203346
  chr13:43148698-43149171
  hyper

SEQ ID NO: 289708 - DNA, 43 bp, Homo sapiens; identical to SEQ ID NO: 203347
  chr13:43149172-43149215
  hyper

SEQ ID NO: 289709 - DNA, 34 bp, Homo sapiens
  chr13:43149333-43149367
  hyper
tgtgggcggaggaaggaagcgaggtgagtgtgat

SEQ ID NO: 289710 - DNA, 318 bp, Homo sapiens; identical to SEQ ID NO: 203348
  chr13:44361226-44361544
  hyper

SEQ ID NO: 289711 - DNA, 74 bp, Homo sapiens; identical to SEQ ID NO: 203349
  chr13:44361578-44361652
  hyper

SEQ ID NO: 289712 - DNA, 205 bp, Homo sapiens; identical to SEQ ID NO: 203350
  chr13:44453169-44453374
  hyper

SEQ ID NO: 289713 - DNA, 33 bp, Homo sapiens; identical to SEQ ID NO: 236995
  chr13:44453844-44453877
  hyper

SEQ ID NO: 289714 - DNA, 312 bp, Homo sapiens; identical to SEQ ID NO: 224575
  chr13:44544247-44544559
  hyper

SEQ ID NO: 289715 - DNA, 205 bp, Homo sapiens; identical to SEQ ID NO: 224576
  chr13:44991619-44991824
  hyper

SEQ ID NO: 289716 - DNA, 296 bp, Homo sapiens; identical to SEQ ID NO: 236997
  chr13:45009499-45009795
  hyper

SEQ ID NO: 289717 - DNA, 59 bp, Homo sapiens; identical to SEQ ID NO: 236998
  chr13:45011210-45011269
  hyper

SEQ ID NO: 289718 - DNA, 122 bp, Homo sapiens; identical to SEQ ID NO: 203352
  chr13:45149891-45150013
  hyper

SEQ ID NO: 289719 - DNA, 140 bp, Homo sapiens
  chr13:45150276-45150416
  hyper
ggagacgccggagaggaaaacgggacctgacgctccgcctggcgcgattcctccttctcctcctcctcagccaaaggcgccggtcgctcctgccttcgagagcgagcttcggaaaggaggatgaacgagggtgaacaggg

SEQ ID NO: 289720 - DNA, 104 bp, Homo sapiens; identical to SEQ ID NO: 9329
  chr13:45150766-45150870
  hyper

SEQ ID NO: 289721 - DNA, 476 bp, Homo sapiens
  chr13:45491763-45492239
  hyper
tgtatttcggcatgcgaccgcttggttcccccgctttccttcacctctgacctaatctctcacttcaaaaactgacttcaagctgttgccagatacgtcccttccgccgcctgccgcaggtggctagggtctgagcacacttgaacctcacacccgccccaggggtagctccttggttcccttcagccccgatgtgtccctcgtgctttgaaatggaattacagttttggttaaaaacatgccttttccgagttaggaagaatctaaatcgactgaacgccagtctaaaatttcggcgttcccacaccgggagtcgaacccgggccgcctgggtgaaaaccaggaatcctaaccgctagaccatgtgggagacggcaatagcgactccaagcctagacaaattgagtcttctcggtcggcttccgcccactccatcgcgttcatccgtaggcgtcaaacctgctcctgcgcctgcg

SEQ ID NO: 289722 - DNA, 560 bp, Homo sapiens; identical to SEQ ID NO: 123735
  chr13:45492271-45492831
  hyper

SEQ ID NO: 289723 - DNA, 164 bp, Homo sapiens; identical to SEQ ID NO: 237001
  chr13:45563658-45563822
  hyper

SEQ ID NO: 289724 - DNA, 31 bp, Homo sapiens; identical to SEQ ID NO: 237002
  chr13:45694566-45694597
  hyper

SEQ ID NO: 289725 - DNA, 145 bp, Homo sapiens; identical to SEQ ID NO: 203354
  chr13:45991445-45991590
  hyper

SEQ ID NO: 289726 - DNA, 122 bp, Homo sapiens; identical to SEQ ID NO: 237004
  chr13:45992566-45992688
  hyper

SEQ ID NO: 289727 - DNA, 135 bp, Homo sapiens; identical to SEQ ID NO: 237005
  chr13:46038853-46038988
  hyper

SEQ ID NO: 289728 - DNA, 205 bp, Homo sapiens; identical to SEQ ID NO: 123752
  chr13:46626295-46626500
  hyper

SEQ ID NO: 289729 - DNA, 486 bp, Homo sapiens; identical to SEQ ID NO: 237009
  chr13:46626732-46627218
  hyper

SEQ ID NO: 289730 - DNA, 37 bp, Homo sapiens; identical to SEQ ID NO: 237010
  chr13:46756059-46756096
  hyper

SEQ ID NO: 289731 - DNA, 36 bp, Homo sapiens; identical to SEQ ID NO: 203356
  chr13:46785661-46785697
  hyper

SEQ ID NO: 289732 - DNA, 224 bp, Homo sapiens; identical to SEQ ID NO: 203357
  chr13:46786103-46786327
  hyper

SEQ ID NO: 289733 - DNA, 146 bp, Homo sapiens; identical to SEQ ID NO: 203358
  chr13:46960938-46961084
  hyper

SEQ ID NO: 289734 - DNA, 149 bp, Homo sapiens; identical to SEQ ID NO: 203359
  chr13:46961683-46961832
  hyper

SEQ ID NO: 289735 - DNA, 318 bp, Homo sapiens; identical to SEQ ID NO: 237013
  chr13:48807036-48807354
  hyper

SEQ ID NO: 289736 - DNA, 218 bp, Homo sapiens; identical to SEQ ID NO: 237014
  chr13:48877516-48877734
  hyper

SEQ ID NO: 289737 - DNA, 499 bp, Homo sapiens; identical to SEQ ID NO: 237016
  chr13:50018030-50018529
  hyper

SEQ ID NO: 289738 - DNA, 63 bp, Homo sapiens; identical to SEQ ID NO: 203360
  chr13:50070357-50070420
  hyper

SEQ ID NO: 289739 - DNA, 63 bp, Homo sapiens; identical to SEQ ID NO: 203361
  chr13:50070717-50070780
  hyper

SEQ ID NO: 289740 - DNA, 88 bp, Homo sapiens; identical to SEQ ID NO: 237018
  chr13:50264906-50264994
  hyper

SEQ ID NO: 289741 - DNA, 159 bp, Homo sapiens; identical to SEQ ID NO: 203362
  chr13:50265731-50265890
  hyper

SEQ ID NO: 289742 - DNA, 312 bp, Homo sapiens; identical to SEQ ID NO: 237020
  chr13:50367043-50367355
  hyper

SEQ ID NO: 289743 - DNA, 182 bp, Homo sapiens; identical to SEQ ID NO: 237021
  chr13:50510537-50510719
  hyper

SEQ ID NO: 289744 - DNA, 209 bp, Homo sapiens; identical to SEQ ID NO: 203364
  chr13:50570752-50570961
  hyper

SEQ ID NO: 289745 - DNA, 553 bp, Homo sapiens; identical to SEQ ID NO: 203365
  chr13:50571189-50571742
  hyper

SEQ ID NO: 289746 - DNA, 51 bp, Homo sapiens; identical to SEQ ID NO: 237024
  chr13:50654635-50654686
  hyper

SEQ ID NO: 289747 - DNA, 85 bp, Homo sapiens
  chr13:50701604-50701689
  hyper
ggacacgcgcttttcgcccctactttgttcttgcgcagtcttcccagctgcggagaggagggagcgaaagcaaaacgaaagcacc

SEQ ID NO: 289748 - DNA, 293 bp, Homo sapiens
  chr13:50704196-50704489
  hyper
aggggttaaaatggcgcggctggatgggcgtggggaatgttgccagtgttcggtcccgactcaggggagaaacggggtgggggtgtggggatcccggaaagggccggaaaagccgggagcaccgggaggtgtgaggccagagtttctgctactgggggctcttccagggaagacgctggcgggaataggatggggctggcagctggggagcctcgcggtggctattgcacgtctcggcccccctggacagggttatgtcaggagagcgccctggcaccgagctctggccgctg

SEQ ID NO: 289749 - DNA, 247 bp, Homo sapiens
  chr13:50704800-50705047
  hyper
ccatttccccttccagaagaaaactgaaggcgtattcctccaaaggaaggctgcagtcaggcgccacacagaacacaggcagtcctctccggccgatctcgggctcgcctctcccagggccgtagggagcatcttttctgagcagccccgggagggcagctccgggcgctctccgcgctgggccctgccgcggccggtgcgttacatcaggaaacgcttggtccggttttctgtctgctagtcaaaa

SEQ ID NO: 289750 - DNA, 47 bp, Homo sapiens
  chr13:50705099-50705146
  hyper
acaaatagactcaccatcaggcttgcgtcagagaaccattttcccca

SEQ ID NO: 289751 - DNA, 47 bp, Homo sapiens; identical to SEQ ID NO: 203366
  chr13:51086772-51086819
  hyper

SEQ ID NO: 289752 - DNA, 127 bp, Homo sapiens; identical to SEQ ID NO: 203367
  chr13:51483755-51483882
  hyper

SEQ ID NO: 289753 - DNA, 78 bp, Homo sapiens; identical to SEQ ID NO: 50667
  chr13:52027258-52027336
  hyper

SEQ ID NO: 289754 - DNA, 121 bp, Homo sapiens; identical to SEQ ID NO: 237031
  chr13:52028195-52028316
  hyper

SEQ ID NO: 289755 - DNA, 257 bp, Homo sapiens; identical to SEQ ID NO: 237032
  chr13:52159090-52159347
  hyper

SEQ ID NO: 289756 - DNA, 124 bp, Homo sapiens; identical to SEQ ID NO: 237033
  chr13:52377716-52377840
  hyper

SEQ ID NO: 289757 - DNA, 291 bp, Homo sapiens; identical to SEQ ID NO: 224578
  chr13:52585269-52585560
  hyper

SEQ ID NO: 289758 - DNA, 223 bp, Homo sapiens; identical to SEQ ID NO: 237034
  chr13:52586275-52586498
  hyper

SEQ ID NO: 289759 - DNA, 85 bp, Homo sapiens; identical to SEQ ID NO: 224579
  chr13:52702430-52702515
  hyper

SEQ ID NO: 289760 - DNA, 545 bp, Homo sapiens
  chr13:52702767-52703312
  hyper
agacaccggaggatcgggttctgagagagacgcatacggacttggggccgggggtgactcgccgggaactgagggcccgcgaccctcccgcccaagtggcaccaaagggtggaagcccccaaattaggaaaattccttctcccctagggccgcccctggaagcggccgcgggtgagtggcaagacgcttacccgtacccgacctccgcgtgtggagcgttgccatagagaccgacgcgccctggacgctacacccacacagcccaggacgctaggccttttctgggccgcccccgccgccccaggccgaaactccatccctttcccccaccctgccgagctcccgaagccctgtggcggctccgggcaagaactaagggcggcccctgcaagcgtacctgctccgccggctccgcggggccaacgaagcgtcccggaaggatccgggttcccggggccgctgcgcctccctgcggccggggcggagccgcgcaaggaaacgcgggcggggcgcgggtctggaatggcctggggaccagtccacct

SEQ ID NO: 289761 - DNA, 71 bp, Homo sapiens; identical to SEQ ID NO: 123817
  chr13:52703361-52703432
  hyper

SEQ ID NO: 289762 - DNA, 649 bp, Homo sapiens; identical to SEQ ID NO: 237036
  chr13:52733271-52733920
  hyper

SEQ ID NO: 289763 - DNA, 64 bp, Homo sapiens; identical to SEQ ID NO: 203370
  chr13:52980451-52980515
  hyper

SEQ ID NO: 289764 - DNA, 58 bp, Homo sapiens; identical to SEQ ID NO: 237038
  chr13:53024891-53024949
  hyper

SEQ ID NO: 289765 - DNA, 256 bp, Homo sapiens; identical to SEQ ID NO: 237039
  chr13:53029197-53029453
  hyper

SEQ ID NO: 289766 - DNA, 122 bp, Homo sapiens; identical to SEQ ID NO: 203372
  chr13:53226636-53226758
  hyper

SEQ ID NO: 289767 - DNA, 123 bp, Homo sapiens
  chr13:53420877-53421000
  hyper
cgcagcgcgtagatggctccggtagctgggtccaccgagacataagtggacacggcgcccccggcgcggcccacctcggcctccagcagccggtaggtgacctggccgttgcggcccaggtcc

SEQ ID NO: 289768 - DNA, 85 bp, Homo sapiens; identical to SEQ ID NO: 237044
  chr13:53422121-53422206
  hyper

SEQ ID NO: 289769 - DNA, 202 bp, Homo sapiens; identical to SEQ ID NO: 203373
  chr13:53422432-53422634
  hyper

SEQ ID NO: 289770 - DNA, 231 bp, Homo sapiens; identical to SEQ ID NO: 203374
  chr13:53422885-53423116
  hyper

SEQ ID NO: 289771 - DNA, 79 bp, Homo sapiens; identical to SEQ ID NO: 203375
  chr13:53423198-53423277
  hyper

SEQ ID NO: 289772 - DNA, 96 bp, Homo sapiens
  chr13:53424663-53424759
  hyper
acaggagcccaaatcgcagccctttcttccgctgtcttccatctcccaagtgcgatttagtatgtagccctcccaccgtccccgcccaagagatat

SEQ ID NO: 289773 - DNA, 45 bp, Homo sapiens
  chr13:53426008-53426053
  hyper
ctccaggaaagttttcaaagaggcgacaatggggggctcagactg

SEQ ID NO: 289774 - DNA, 110 bp, Homo sapiens
  chr13:53775438-53775548
  hyper
ggtgcacttccggctgcagcgggcctacgcgggcagctgcctggtggtgaccgcggggtcgttggaccgcgagcccatcgcctagtacaacctgacgctggtgaccgcgg

SEQ ID NO: 289775 - DNA, 53 bp, Homo sapiens; identical to SEQ ID NO: 203377
  chr13:58204884-58204937
  hyper

SEQ ID NO: 289776 - DNA, 191 bp, Homo sapiens; identical to SEQ ID NO: 50692
  chr13:58205044-58205235
  hyper

SEQ ID NO: 289777 - DNA, 352 bp, Homo sapiens; identical to SEQ ID NO: 203379
  chr13:58205443-58205795
  hyper

SEQ ID NO: 289778 - DNA, 303 bp, Homo sapiens
  chr13:58207012-58207315
  hyper
cgacaaggagatctgcatgatcaaggtagagatccaggacatcaacgacaacgcgccctccttctcctcggaccagatcgaaatggacatctcggagaacgctgctccgggcacccgcttccccctcaccagcgcacatgaccccgacgccggcgagaatgggctccgcacctacctgctcacgcgcgacgatcacggcctctttggactggacgttaagtcccgcggcgacggcaccaagttcccagaactggtcatccagaaggctctggaccgcgagcaacagaatcaccatacgctcgt

SEQ ID NO: 289779 - DNA, 149 bp, Homo sapiens; identical to SEQ ID NO: 237056
  chr13:60738356-60738505
  hyper

SEQ ID NO: 289780 - DNA, 186 bp, Homo sapiens; identical to SEQ ID NO: 203380
  chr13:60970305-60970491
  hyper

SEQ ID NO: 289781 - DNA, 213 bp, Homo sapiens; identical to SEQ ID NO: 224583
  chr13:60972272-60972485
  hyper

SEQ ID NO: 289782 - DNA, 404 bp, Homo sapiens
  chr13:61988789-61989193
  hyper
aagcaaagtaaacgcggaaaatggctatgcaaaaacaatttgtcaattgcagtaggcattcatagccagacgccagcagcaggaaacgatcccgaacccctgtagctaaagcggattgagcgcacccccgatgccctcgaccttatctggatacatttcttgcttcagaaacttcctctcatgacccacggacttccctattccttgttaaaaggaagacacattatcccaaactccctttccctcccggcgccatccttcccgtgaagtttagataaaggtagaaggtttgaaaaaccatccgagtgggaattgcttcacaatactgcaacttgtcggggtcgcggggttccttgaccctaacccttaccggcaggttcctgtagctggtgctgctcctggga

SEQ ID NO: 289783 - DNA, 225 bp, Homo sapiens; identical to SEQ ID NO: 203382
  chr13:61989329-61989554
  hyper

SEQ ID NO: 289784 - DNA, 243 bp, Homo sapiens; identical to SEQ ID NO: 224584
  chr13:67799457-67799700
  hyper

SEQ ID NO: 289785 - DNA, 32 bp, Homo sapiens; identical to SEQ ID NO: 224585
  chr13:67801107-67801139
  hyper

SEQ ID NO: 289786 - DNA, 254 bp, Homo sapiens; identical to SEQ ID NO: 224586
  chr13:67801447-67801701
  hyper

SEQ ID NO: 289787 - DNA, 154 bp, Homo sapiens
  chr13:67804074-67804228
  hyper
gcaactccagagaacaaattcacggatttgtcgttagtcattctctccacatttcgtctctcttacccactgggtctgggttcttctgggcatttagcacacacaacacatagttgcacttcttcagctcagggatattttccacagcagcatg

SEQ ID NO: 289788 - DNA, 217 bp, Homo sapiens; identical to SEQ ID NO: 203384
  chr13:67805438-67805655
  hyper

SEQ ID NO: 289789 - DNA, 185 bp, Homo sapiens
  chr13:72438285-72438470
  hyper
catacttttgagcgcgcgcgcgcacatacacacacacacacacacacacacacacacacacaacatttaccccaaaatagtcgaaggttcaaagcccaaacacacccaagtcccatggaaggaagaatacctaaacacggaaaagaatttctggctaggtcaggataggacatttgctggactgg

SEQ ID NO: 289790 - DNA, 206 bp, Homo sapiens
  chr13:72438563-72438769
  hyper
atgtccttctggtctccttgctacacttcctttccacctaagtttccctatctctgcgggagcacacactaactccgctccttctctcaatcttcaaacttatttggagggtaccgaagtttctgcgcaaattttgcgcgcagttcccacgtgcccgcttcaggtcttcaactttccctattttctttctcccggaatctcactct

SEQ ID NO: 289791 - DNA, 288 bp, Homo sapiens
  chr13:72439250-72439538
  hyper
ggttgccctcgcatctgccccggggccaccgtacccctttatttcctttgcacacgcactcgctcacacgcggacacacgcacacatgcgcgaacacacagacccctcccctcggctggcttcccctccgggcttcggagctcaagtccccggagcccatcccccgggatggacccggtctctcagcttcgcgggtcatttccctcccgacctcaaagtgccctcctcgggtgctggtccgctccctcgcctttcccagcggggccctcacccggagcgcgtctcccc

SEQ ID NO: 289792 - DNA, 391 bp, Homo sapiens
  chr13:72439568-72439959
  hyper
cctccccccgcccccgggacaccgctcggcgccacagatcagccctgtcggtgccgggaggctggccgtggaacccaggtcctggggagcgcacgaacgcggacagcagcgctgagaggggtctccaggcgcccgcgcgcccggggcagggggctgtggctccagcaaaggcgccgtcctcctccctctcgtcccctccgccccgaggctcggctttcccacatcccacagcagcccatccccgggacccagagggcaaggggaggaccgggccgaagagcgaggtctgggcagggtgaggtgccaacttctcagggggtcgggcgcggctggcgagccccgagcagggagaggagagggccgcgctcgccggggcgcgcggctcgcgggc

SEQ ID NO: 289793 - DNA, 359 bp, Homo sapiens
  chr13:72440072-72440431
  hyper
tgtagagggtctcgaagtccttcctggagatgagtttgcagcggttcactcctggctggatggcgcccagtcccctcaggatgcgaacttgttccacattgcacaccaccggcgtgatctccagccgcttcagcttggtgtagaccgtatgcaagccccccaccaagtgcttcaggaacaggtcgaaagcctggggcaggcagatcagctcgcagccctccaccgtgaaggaagccactttggcccccctcagatccaccattttgcactcattattctgaggggtgttttccactggggacggggttgagtacacgggtttcccggggagggggccgcagctgctgctgctactgctg

SEQ ID NO: 289794 - DNA, 213 bp, Homo sapiens
  chr13:72440491-72440704
  hyper
ctggcgttgatgggggtgctggaagcgacgccgccgccagcgctgatgccgccgccgccgccgccgctgccgttgctcgcggccgccaggttggggttgcagttgctgccaccgccgccgccgccaccgccgcctccgttgccgctgctgccgccgccgcctccgctgccgccgccgccgccgccgccgccgccgccggtagaggtgactgtg

SEQ ID NO: 289795 - DNA, 445 bp, Homo sapiens
  chr13:72440741-72441186
  hyper
ggaacagagttggcccagaggacgccgggggtccgatggaaggagccggagacgaagtcgccgaagaggtggaggtggtggtgccagaggaggaagcagacgtggagattgggggttgaggggggaccagctgggtcggagggatcaaagccgccggcactgccatggtcacatataaggggaaacagacggaggagaagcgagaggaaaagttgccacacacccccgggaggggaaggggaaaaaaggggggagaaggagcgaggggggcaacaacaactccgggagagaacgagaaggagaaagggagagaagggggagaaaaggaggtgaaggtaataaagagcgagcgcaagaggggcgagcacgagaggcgctctggagaggaacgcacaaaagtgtcccgcaagtcgaaatgcgagtcctctccgggggctgggatcga

SEQ ID NO: 289796 - DNA, 89 bp, Homo sapiens
  chr13:72441410-72441499
  hyper
gaggggaggagctccggaaacttgaaataccctttgaagccgcaaaaacctcactcactagtattaacccaaattatccaaccaggaac

SEQ ID NO: 289797 - DNA, 76 bp, Homo sapiens
  chr13:72441690-72441766
  hyper
ctcacattccatttcgtccgcggggactggtaattttttccaaagcttctaaacaatcgcccgccaacttaaagag

SEQ ID NO: 289798 - DNA, 117 bp, Homo sapiens
  chr13:73632748-73632865
  hyper
acaacacctaagacgtgcaatactctttttcttcctaatcctggcagagaacagtgcgaagagatctccctccgcgtctccaccctaattccccctcttcccagattccacccgctc

SEQ ID NO: 289799 - DNA, 69 bp, Homo sapiens; identical to SEQ ID NO: 123880
  chr13:73632890-73632959
  hyper

SEQ ID NO: 289800 - DNA, 152 bp, Homo sapiens; identical to SEQ ID NO: 203385
  chr13:74707109-74707261
  hyper

SEQ ID NO: 289801 - DNA, 211 bp, Homo sapiens; identical to SEQ ID NO: 203386
  chr13:74707414-74707625
  hyper

SEQ ID NO: 289802 - DNA, 926 bp, Homo sapiens; identical to SEQ ID NO: 203387
  chr13:74707668-74708594
  hyper

SEQ ID NO: 289803 - DNA, 200 bp, Homo sapiens; identical to SEQ ID NO: 203388
  chr13:74709334-74709534
  hyper

SEQ ID NO: 289804 - DNA, 85 bp, Homo sapiens
  chr13:75149819-75149904
  hyper
gcaaatgttcaggcgtgcagcatttcaattgatgaaatttctttgtggaaccctgttcccaagggcagggaaaattggagagtga

SEQ ID NO: 289805 - DNA, 75 bp, Homo sapiens
  chr13:75150115-75150190
  hyper
gtggggacagcgagggggagggccgggaagcaatgaagtcagaggcacagcagcgactgcagctgaatcaatttg

SEQ ID NO: 289806 - DNA, 35 bp, Homo sapiens; identical to SEQ ID NO: 203389
  chr13:75794021-75794056
  hyper

SEQ ID NO: 289807 - DNA, 47 bp, Homo sapiens; identical to SEQ ID NO: 203390
  chr13:76054892-76054939
  hyper

SEQ ID NO: 289808 - DNA, 1065 bp, Homo sapiens; identical to SEQ ID NO: 203391
  chr13:76055056-76056121
  hyper

SEQ ID NO: 289809 - DNA, 31 bp, Homo sapiens; identical to SEQ ID NO: 237071
  chr13:76056405-76056436
  hyper

SEQ ID NO: 289810 - DNA, 101 bp, Homo sapiens; identical to SEQ ID NO: 237072
  chr13:76123767-76123868
  hyper

SEQ ID NO: 289811 - DNA, 134 bp, Homo sapiens; identical to SEQ ID NO: 203392
  chr13:76450655-76450789
  hyper

SEQ ID NO: 289812 - DNA, 131 bp, Homo sapiens
  chr13:77459236-77459367
  hyper
gaggctctgtaatcatctctcgggcaggagaaggactgggcgctggagtggcgagggggtctggggagctcactccctgcagaagacgtactcggtgtagctggtccagatcttgtcctcgctctggtcgg

SEQ ID NO: 289813 - DNA, 717 bp, Homo sapiens
  chr13:77459628-77460345
  hyper
tgtaggagccgcggtagccgatggtgatgtagcccgagcgccggctgccgtccagcgactgggacggcgtgagcagcgggcccgccgcgcccccggacggactgcggctagccagctccagcgtgggcgacggcgccccggcagaggcgccctcctgctgttcgggctccgagtagccaagcggcagcagctcgtcacccagcgagccctccttgtgcaccccgcgccgcgagggcggcggccccgggccgggctgctggggcgccccgaggcggcgcacgagctctggcagctcgaagtactcggcctcgcgctgcagccggctgcgctcggggaagtagtcgggcagcacgagctgcaagtcccgcaggtaatccaggatgtagcggaagaggaagccgtcccggtccagaaagaagcggcctttgctgtcccgggccagctcctgcggctgctgctgcgtgaacatgcgccagagcagcgagtcgggcaccgacaccaccgtgcagcgccgggtcacgtacacctggccccccacgttcagctccacgatgtcggggaagagcggtggctccgcggaggacgacgaggagccactgccgcccccgccgccgcccccgttgggtaatccacgtgtgctgtccgccagagccatgacagagaggtggccgggccgggacagtggcaggaagccgcgctgcactcaggagctgcaac

SEQ ID NO: 289814 - DNA, 87 bp, Homo sapiens
  chr13:77601288-77601375
  hyper
gagtctaaaatggcgcccagggctcgcggccgcgcgcttccctggcgcgtccccgcccaagggggcgggaagggggcgggggggggg

SEQ ID NO: 289815 - DNA, 59 bp, Homo sapiens; identical to SEQ ID NO: 123905
  chr13:77601407-77601466
  hyper

SEQ ID NO: 289816 - DNA, 171 bp, Homo sapiens; identical to SEQ ID NO: 203393
  chr13:77901202-77901373
  hyper

SEQ ID NO: 289817 - DNA, 32 bp, Homo sapiens
  chr13:78271862-78271894
  hyper
gtggtggctgccgcggccggaggcgagggccc

SEQ ID NO: 289818 - DNA, 422 bp, Homo sapiens
  chr13:78272232-78272654
  hyper
tgccgccgccgccgcccgccgcgccgccccccgctggcctgcagcctttgggtcctcggagccccccggccgccacggccaccgccgcggcctcagggggcctggggctcgggctggcgctgggcgcggggggcggtggcggcagcggtagtggcagcggcggtggctccagccccgcgttcccgggcaccttctgcctgcctagccccgcgccctccctgctttgcagcctggcgcagccacccgaggcgcccttcgtctacttcaagccggcagcaggcttcttcggcgcgggcggtggcgggccggagccggggggcgcggggacgccgccaggggcagctgcagcgccgccctcgccgccccccacgctgctggacgaggtggaattgctggatctggagagcgtagccgcctggcgg

SEQ ID NO: 289819 - DNA, 47 bp, Homo sapiens
  chr13:79160900-79160947
  hyper
aggcaggaagtctgcgaaaagccccagacagccactgcagtgccaag

SEQ ID NO: 289820 - DNA, 63 bp, Homo sapiens
  chr13:79161096-79161159
  hyper
cgccaaccagccagccctgccctgtgtagacgggtcgccagagcgcggcgcagggatcgagct

SEQ ID NO: 289821 - DNA, 154 bp, Homo sapiens
  chr13:79161684-79161838
  hyper
agcacacacacacacgcacacacacacacacaaacgcgcatccctgagcaagaaggcaaaaaagaatccaaaacttgagcaggtcgccaggcccttttcctctctcagccaaagtatgcccagtctacatccccgccccaccaccccagccacg

SEQ ID NO: 289822 - DNA, 204 bp, Homo sapiens
  chr13:79171244-79171448
  hyper
ggcaataacaccgatggcagaactgtaccagtattaattgtcatcacctttatcatcccgctggccaccaaggccgttcgaatggggtgggaaaggctagttttagccaggatcagaagccccagttccaacttcacggacgaaaaactgcgaaagcctatcaacttgaaagatgagtagggatacttcacgcaggtgccaggt

SEQ ID NO: 289823 - DNA, 294 bp, Homo sapiens; identical to SEQ ID NO: 237085
  chr13:79181160-79181454
  hyper

SEQ ID NO: 289824 - DNA, 106 bp, Homo sapiens; identical to SEQ ID NO: 123928
  chr13:79183745-79183851
  hyper

SEQ ID NO: 289825 - DNA, 44 bp, Homo sapiens; identical to SEQ ID NO: 203396
  chr13:79980677-79980721
  hyper

SEQ ID NO: 289826 - DNA, 42 bp, Homo sapiens; identical to SEQ ID NO: 237088
  chr13:80055214-80055256
  hyper

SEQ ID NO: 289827 - DNA, 50 bp, Homo sapiens; identical to SEQ ID NO: 237089
  chr13:80055634-80055684
  hyper

SEQ ID NO: 289828 - DNA, 724 bp, Homo sapiens; identical to SEQ ID NO: 237090
  chr13:80913011-80913735
  hyper

SEQ ID NO: 289829 - DNA, 79 bp, Homo sapiens; identical to SEQ ID NO: 203397
  chr13:80914000-80914079
  hyper

SEQ ID NO: 289830 - DNA, 437 bp, Homo sapiens
  chr13:80914144-80914581
  hyper
ccaggcagggcgacgctcccacccgctccgggctagactgtccacacggagcagaggcgggcactccctccacccggcaccctgcctttttctcaccctggaagtctcctgcccccgaggcgggcaacctgtgtcccccagccccaccagcgccccgcctagggacagcctctccctggactttgccttccaccaagaggaagaacaggttagaaatgcgggcgcctgcaaaggcaacctggaaaatacaaagtgtttttctctccctctcccgctctcagcgccgaattcgcggccagtgcacggctgggagcagacttcaggctagctgtcctccgtcccaaccccctagagcgcgggcgcgcggggtcgcctgtcggggacactgcacggggtgcatacagaagtccccgcagaggcaggccgagcccaagccc

SEQ ID NO: 289831 - DNA, 928 bp, Homo sapiens
  chr13:80914613-80915541
  hyper
atcctcgcgaagaccctgcgggatttgagaaagggaggctcggggagagacggacccaactcctggtccggctgcacctactccatgttgcccacaacgcgccggccgcggcgccaggaggggaagagccaaacgtgcctcaccgtgatcgcggctttgcaccaacccctctcccttggattctcttctttctgcgatgtgcaaataaatccagtctcgatgcaaacttttttcctttctttccaacctctgctttagaccaacttccgagcaatcggcgggagaaaaaaagagaattcggagccagattccccgctgatgaacactccggggttcggagctggagacgactccccttctacaagcgcacgcggagtatttcctcttttttctcaatgaacaagaggccgaagcgccaacggcaagtcccttttcctggcagatgagcgaatgggaaaagaaaacggccttacggagaacctaaagccagatcgccaagtggtgcggccggggccgcgtcgtagcggaggcggcgcgggggcgcgggccgggccgggccgggcgggcgcgggggcctgggcgctgcgcgctccgccggcccctctcctccgctagcgctgcggcgcgcagctctcggcggtgcagactgggcgttgtggaggcgaggcagcgaggccgaggcgggggcggtgggtgcggaggaggaggaagaggaggaggaggaggaggaggagggtctggggcccgcccggggggggctcgccgttggcctgcgccctcgcctttccggaggaggcagggagctctgcggcggccgcggcagcagtaaatggcgtcatgtggatccgaggcggaacagagcagttgttgtcccagaggatatatcgcatccggtcccagctcattggctccgcggggctacattcac

SEQ ID NO: 289832 - DNA, 93 bp, Homo sapiens; identical to SEQ ID NO: 203401
  chr13:80915582-80915675
  hyper

SEQ ID NO: 289833 - DNA, 201 bp, Homo sapiens; identical to SEQ ID NO: 237092
  chr13:80915906-80916107
  hyper

SEQ ID NO: 289834 - DNA, 499 bp, Homo sapiens; identical to SEQ ID NO: 203402
  chr13:80916947-80917446
  hyper

SEQ ID NO: 289835 - DNA, 49 bp, Homo sapiens
  chr13:84455511-84455560
  hyper
ttttcacagtctacgtgtaggtccccttctatctcattgcaggaacaga

SEQ ID NO: 289836 - DNA, 226 bp, Homo sapiens
  chr13:84456480-84456706
  hyper
gggggcggagggcggggggcgagttgtctgagggaggaagagagcgcgagaatgaggggaggggggcggagaagagagttgctaagaagctctgctcgttccagcctggtgcactctgaaagatctgacaccctctgctgatctgcagtagcaaaaatccatctggctagggaatgctgaaagaaaaaaaaatcaatccacgtacagggcaagcgttaaaaatgtg

SEQ ID NO: 289837 - DNA, 251 bp, Homo sapiens
  chr13:88326061-88326312
  hyper
gagcaaggtctccaggcttgaacccgctgtctcggaaacatcttggctttagtttggagttgcaattcgatattagacttcggtagtgaggcaaaggcaaggttgaccagagaaaaggcataggttcctagagtccagcatttctatcaaatgtcctccaccccattaaccaacgcagcatgcgcgcgcgcgcacacacaaacacacacacacacacacacacacacacacacacgctcattccatttatg

SEQ ID NO: 289838 - DNA, 353 bp, Homo sapiens; identical to SEQ ID NO: 237100
  chr13:92001426-92001779
  hyper

SEQ ID NO: 289839 - DNA, 161 bp, Homo sapiens; identical to SEQ ID NO: 203406
  chr13:92050814-92050975
  hyper

SEQ ID NO: 289840 - DNA, 253 bp, Homo sapiens; identical to SEQ ID NO: 203407
  chr13:93878955-93879208
  hyper

SEQ ID NO: 289841 - DNA, 151 bp, Homo sapiens; identical to SEQ ID NO: 203408
  chr13:95201109-95201260
  hyper

SEQ ID NO: 289842 - DNA, 287 bp, Homo sapiens; identical to SEQ ID NO: 203409
  chr13:95201339-95201626
  hyper

SEQ ID NO: 289843 - DNA, 229 bp, Homo sapiens; identical to SEQ ID NO: 203410
  chr13:95201662-95201891
  hyper

SEQ ID NO: 289844 - DNA, 301 bp, Homo sapiens; identical to SEQ ID NO: 203411
  chr13:95202013-95202314
  hyper

SEQ ID NO: 289845 - DNA, 281 bp, Homo sapiens
  chr13:95202344-95202625
  hyper
tgtgactatccacattcgtcaccttgctccccgaaaagttccaggccccaggtgaggagccgtgtaggcccaatacgattggatgaaggagtgtacggggcaggaatcgtcagactggcctctggagaggagtttgcagcctctccgtgctccgggcccgggaaatgtccaccttaatcatcacctctttgcatggagcctgactggcaaataaatgctgggtgagctcactaacgatgattattcagtcaatgctatttcccacacgagtcaacaaatgt

SEQ ID NO: 289846 - DNA, 460 bp, Homo sapiens
  chr13:95354380-95354840
  hyper
gctttgacacttctcgtaggttccaaagacgaagacacggtggcttcagggagacaagtcgcaagggcgacttttccaagcgggagatggtgaagtctttggacgtgtagtgggtaggtgatgatccccgcagccgcctgtaggcccgcagacttcagaaaacaagggccttctgtgagcgctgtgtcctccccggaatccgcggcttaacacattctttccagctgcggggccaggatctccaccccgcgcatccgtggacacacttagggtcgcctttgttttgcgcagtgattcaagttgggtaacccttgctcaacacttgggaaatggggagaatctcccccacccgcaacctcccgcaccccaggttcccaaaatctgaatctgtatcctagagtggaggcagcgtctagaaagcaaagaaacggtgtccaaagaccccggagagttgagtgag

SEQ ID NO: 289847 - DNA, 175 bp, Homo sapiens; identical to SEQ ID NO: 50787
  chr13:95355116-95355291
  hyper

SEQ ID NO: 289848 - DNA, 469 bp, Homo sapiens
  chr13:95355494-95355963
  hyper
ggggttaaattagcggggggagaggccgcacctaatttcagacacttttctttctaatgtggctccagccccagagggaggggtcaccgggactggaggctggggtgtcctctaagaccctctctcccttccagatctctctgttccgtgcggatcctgccagagcccgcgtgatcatcgcctcccacacccctccctccctgacctggccagtctcttctcccagggaggaactttgcggaggggtcagtgttgggaaccctggggtcctccgccgcctcctgatcttccgccagtcccgccactcctccgccctgggcgtgccttccgcaggtgaacctgaaggtgcgtctgcaatgctgctgttgcattctcgttcttgtagattcttcttctattctctctctttgccttccgtttcacccagcacccacttttcctacgctgctctgaagaagttctctatctt

SEQ ID NO: 289849 - DNA, 271 bp, Homo sapiens
  chr13:95356019-95356290
  hyper
ggcagagtaaggccatatgggcgaccattcggataatccaatttaaaagaaacccccttacaaaaatccagctaagcgagagggggcgagggagagcgctcgcgcaaatgtttgttgtgcagaattcccctgtgtttgtgcgcagtcccaaccccacacagtctcccctggatcctgatgcgcgcccgcatagtgatgacttccaaatctggggtttaccacgtggtgacaaataaacaggggtacactccaaacccgctggatgtctatg

SEQ ID NO: 289850 - DNA, 313 bp, Homo sapiens; identical to SEQ ID NO: 237112
  chr13:95359104-95359417
  hyper

SEQ ID NO: 289851 - DNA, 389 bp, Homo sapiens
  chr13:95360413-95360802
  hyper
cttctgcacagtctaacttggcaggaggctctctgcaggcgcaaaacccgccaacttgttagcaagaccattggagtcagaatgggtgataaacgagtctgtggggcctgtggaggtcctcaaacagccgcacaatctgttggcgatatgacctcggtgctccccctcggcatcctcacccctcctcttacccatctttccagtcctcttctcattcatcaacaactccggagcgtttctcccagaaaacgctgatctttgggaaaaggggagggggcgggaggaggcggggagtcttcaggccgaggaggcggccgagctggaaggctcagggtggtaactaagatttagggctggggtgatttccagcgagccgcaggaagttccgt

SEQ ID NO: 289852 - DNA, 289 bp, Homo sapiens
  chr13:95365776-95366065
  hyper
gatcagcggagccgcctcccgctcccacacccccaggacctcgaattaacagatcccctccgccccccgccccctcccaatcctcctcctcccactccttttcacttgagagcaggtttaggcgagtggagagtccggagcgcgccggggagtctgcgccctgtttggcgttggcaaaccctggtgtcatcccggctacccaggccggcctggcgtgcagctgccctggttgtggccctggaatcctcgccgggaggaagaaggcggcgggcacgagtaggagagcctc

SEQ ID NO: 289853 - DNA, 112 bp, Homo sapiens; identical to SEQ ID NO: 203415
  chr13:96205363-96205475
  hyper

SEQ ID NO: 289854 - DNA, 625 bp, Homo sapiens
  chr13:96705319-96705944
  hyper
ccagacacccgctgcgagcacgaagaaagcgcggctgagggtggcagcgcgcccacacccgcccggacgagggcccggcccgcacccaccttgcctccagcagcagcggggtctcgggccacttcgcggccaagtgggcagtcaccgacttggacgcggcgaccgtcccggagccgagctgcgaaagccacagcgctgtggagcctagtagcagccgcaccacgttcgtggctttcgctggcgccatggcacggagagaaaagcgcgagtccctcggacccggtacccacagtctgtggccgccacgcttcggccggctcttcccgctgcgcggctgcccacttccggtgggaggagctcgagtccgttactgggtgccgggtccagaccggcgcatgcgtgtcccgctccggcgcggtttagtgggtgcggcctggagagcccacgccagccggacactgggccacgtcggagccgccggggcggcgccgggttgctgagcggcgtcacagatgctcccgcgggtccgctcccgcgggtccattcccaggactttgggttctcggacagaggccttaggacacggggcgggaagctggctctccagaccgaactagggctctgg

SEQ ID NO: 289855 - DNA, 234 bp, Homo sapiens
  chr13:96743113-96743347
  hyper
accatggatgaaaggttcaacaagtggctgctgacgccggtgctcactctcctcttcgtggtcatcatgtaccagtacgtgtccccctcctgcaccagctcctgcaccaacttcggggagcagccccgcgcgggggaggccggcccgcccgccgtcccgggtcccgcccgccgggctcaggcgccgccggaggagtgggagcggcggccccagttgcccccgccgccccggggg

SEQ ID NO: 289856 - DNA, 245 bp, Homo sapiens; identical to SEQ ID NO: 203417
  chr13:98085205-98085450
  hyper

SEQ ID NO: 289857 - DNA, 702 bp, Homo sapiens
  chr13:98795069-98795771
  hyper
cagtggcgctccccgcgctgcattaggtagcgccgcgcggagcccggccctggccggaagcccaagagaggcgcagatccccggcggcgcgctgggctcgggaggcccctgggcgcacctgcccgggcggagcggagcggggcggggcgggcgcagggcgcgggcccggacgctggagggggctgtggctctcccgcgtccccgctgctcgggctgcgcggcgcccgcctccccccgccgaggggccggcccagacccggggaggggcggtggccactgcacttcccgctcgccggcctcagaggcggcgggtccggcgcgggcgcagcggtgcgggcgctcggctggggcgcggggcggggacgcggccgctgcccgctttgcgccgctcctccctgcgcgagtagcgctggccccggcgtcgaggcggccatggcgacccggagcccgctccccacccaccccgcctgctccgccctcccctccgccccgcgccacctttgatggctcggacctcagccggccaccgccagccctgctcgcgcgcccgcgccgccgccgcccgcgggtattaatagccggcgccgccgcgccctcggccgccgggggcttgggagccgccgatcccggagcccgagccgggagagggagccgccgcagccgccggcgctgtggaggtaggaggcgcgcggtgaacaatga

SEQ ID NO: 289858 - DNA, 194 bp, Homo sapiens
  chr13:99128923-99129117
  hyper
agtgtgggggcaaccgagacagcccttgtcaccgaaaccacagcctgactcatacctggccctgctttccggcccatgggtgagctgtgctgccttggctcgcaggcctgccctggtctacacagcaatcccagggtcagggccactctcagaggtggcctctcctcacacactggcctcgctgggactctggc

SEQ ID NO: 289859 - DNA, 329 bp, Homo sapiens; identical to SEQ ID NO: 203419
  chr13:99229764-99230093
  hyper

SEQ ID NO: 289860 - DNA, 124 bp, Homo sapiens; identical to SEQ ID NO: 203420
  chr13:99404492-99404616
  hyper

SEQ ID NO: 289861 - DNA, 354 bp, Homo sapiens; identical to SEQ ID NO: 203421
  chr13:99739098-99739452
  hyper

SEQ ID NO: 289862 - DNA, 38 bp, Homo sapiens; identical to SEQ ID NO: 203422
  chr13:99740140-99740178
  hyper

SEQ ID NO: 289863 - DNA, 100 bp, Homo sapiens; identical to SEQ ID NO: 237132
  chr13:99852544-99852644
  hyper

SEQ ID NO: 289864 - DNA, 82 bp, Homo sapiens; identical to SEQ ID NO: 237133
  chr13:99853142-99853224
  hyper

SEQ ID NO: 289865 - DNA, 201 bp, Homo sapiens; identical to SEQ ID NO: 237134
  chr13:100153680-100153881
  hyper

SEQ ID NO: 289866 - DNA, 112 bp, Homo sapiens; identical to SEQ ID NO: 237135
  chr13:100259205-100259317
  hyper

SEQ ID NO: 289867 - DNA, 207 bp, Homo sapiens
  chr13:100609269-100609476
  hyper
accctcgcgccctcttcttgtagcgcccttgtgccccgccgcccgcgccccgcgccggccagcttacccacgccactcccagccctgtcgccagctcccgagggcctctccaaagggatcccgggtctcgttaagagcgggaagttgagcactgaacttgtgctcaccgccagcagtcggcggcgtgcaccgccgcccacccctccc

SEQ ID NO: 289868 - DNA, 52 bp, Homo sapiens
  chr13:100620292-100620344
  hyper
gcccgcgggacggttataaacgggactgggggcacgtgggtcaggaaagggg

SEQ ID NO: 289869 - DNA, 111 bp, Homo sapiens
  chr13:100620374-100620485
  hyper
ttgatcaatccgttccgggatcccggataacccccaaaagggagagcggcgtggcagggagggaaagaagtccggatgggccctctcagaacacaatgtccaatagctgag

SEQ ID NO: 289870 - DNA, 105 bp, Homo sapiens; identical to SEQ ID NO: 203424
  chr13:100620515-100620620
  hyper

SEQ ID NO: 289871 - DNA, 219 bp, Homo sapiens; identical to SEQ ID NO: 203425
  chr13:100620916-100621135
  hyper

SEQ ID NO: 289872 - DNA, 350 bp, Homo sapiens; identical to SEQ ID NO: 203426
  chr13:100621366-100621716
  hyper

SEQ ID NO: 289873 - DNA, 67 bp, Homo sapiens; identical to SEQ ID NO: 203427
  chr13:100622155-100622222
  hyper

SEQ ID NO: 289874 - DNA, 718 bp, Homo sapiens
  chr13:100623181-100623899
  hyper
ccgcgtaggtgccgctggcggagatgaacatgccggccgagtggggaggcggggccgggtgctggggggagccggtgccggaccgctgctcccctccgagcggggccccgtgcatggccgccgcgggggccgtggcggaaaggtccctccggaggacgaagtccctgctgtggcctttgccgctgctgccgccgccgccactgttggtggtggtgtagcccgagagggcaggaggaggaggaggcgggggagggggagggggtgaaggggtgggaggaagaggaggggctgggggcgggggcgcggagggctgcgcgccactgctgcccccgccgcaggggtagctgcccgcgccggggtgcgcgaccaaggctgcagcacgggcggcggctgccggagcctccgggtgtgccgggaacgcctgggagggagggctgaggcccagcgtgctcgcctgggccatgtgctcgggtccgagcggagtggtggccacgccggggtcagcgcccaggtcccgcaggcggaggtgcgcgacggcggcccggagttgggagtgggcgggcgggccggccagcgccgggaagcctgtcatattctgaagcggctggacctgagccgttgccaaatccgctaatctcagcgctggcgggttcctcttgctcaaagggggctccatcagaactacacaatcaggcccatagaccctcactggggggac

SEQ ID NO: 289875 - DNA, 79 bp, Homo sapiens; identical to SEQ ID NO: 203428
  chr13:100631531-100631610
  hyper

SEQ ID NO: 289876 - DNA, 241 bp, Homo sapiens
  chr13:100631642-100631883
  hyper
catttcagaacataattctgaaaaatttattattttctcttcgtttaattttatttcaactcctagagatttataaataaaagcagttctccaggccagccaggagaacacgcccgaggcgctggcctcaggctgtcccttcacacctccgcagcctctgggccctccgttccctctctagttacctcgggagcgcgagatttgggcggcgggacaggaaacgtccgcagcggtcagccag

SEQ ID NO: 289877 - DNA, 492 bp, Homo sapiens
  chr13:100631937-100632429
  hyper
gctcctggagaaggagtggatggatatatatgctttctagaaggtttaagccctgccgtgtctgacggcttcttctcccgagaccctgagcctgacccgcagccaaactccggcctgagtctcgcttggtctcgggcgttcccacacttctcagcccaaggatgcgcggcccggcttctgggcatttaccctgagggtgacactgtctttaaacgacttccgaacaacccccttccacgcaggggccgctgcccagtgtttactgctgtaaacggagcaggacgcaagcggcgggtggggagctcagcgcgccgaggggcggacggggacgccgcggggggcggggaaggcggtgtctgggtgggcgtccggagggtgggaagaaggggcatgcctggctttctctgtgcccacggtcctgcacctgtggtttcaatgccacagagcaagtttacaaaggcggggtgaaagtagggagcgtgccaagcgggc

SEQ ID NO: 289878 - DNA, 575 bp, Homo sapiens
  chr13:100632514-100633089
  hyper
caggcgacccagctgttagccacctctcgagcggcctggagtgctcgggccaggcgtccccggggttttcggtgtccgctgggagctgctcagatcccggggaagtcggtggcctacgcagaaagactggagcgctgggttgcctcccattcctgacccggctgagggcgccctgaccccgcggcccgggcccgcgtccgagccacgctggacgcccggctcccgggagcgccgcggtcggccaggactagaagccgcggcgccgaggtctcgggagaagcgcggcaggatggcaggccgggcccacgggcacgttcggcggctgcctgagccggcagcagctcagggagcgcgaggactgaggggcgggcccggcagcggggcgggggcgcgggactgactaggccgcggcggccaatcgcggcgccgggagggcgggcggggcgggagccgccgttaaaggggcggtttgaccgggggggcccggcctcgagctggagggagggagggaggccggggcgggagactagggggtgcggggggaggggagaggaaaaggaggagacaaaaaataa

SEQ ID NO: 289879 - DNA, 36 bp, Homo sapiens
  chr13:100633184-100633220
  hyper
cgcctgggcctcacactccctcgggtcgcggactgc

SEQ ID NO: 289880 - DNA, 422 bp, Homo sapiens; identical to SEQ ID NO: 203432
  chr13:100633420-100633842
  hyper

SEQ ID NO: 289881 - DNA, 145 bp, Homo sapiens
  chr13:100634132-100634277
  hyper
gaggcagatccaggcggcggcggaggcggcgggcgcaggagagcggctcccagggctgaagtggccgccaccaccgccgcctgcgcctggagcccggtggccgccggacgcaccgcgcggatcgggagcgggagtcgaggcggcg

SEQ ID NO: 289882 - DNA, 128 bp, Homo sapiens; identical to SEQ ID NO: 203434
  chr13:100634617-100634745
  hyper

SEQ ID NO: 289883 - DNA, 338 bp, Homo sapiens
  chr13:100635597-100635935
  hyper
cgagttttgaatgattagcctcacatcaaatgtatgcttgggtcatgcaattgcttcgtttgctcagccccggttaataatttccgttttaagtagaaagcacaaaataaaactgctcgctaattcggtgcccgggaagcgagcctagagaggattttgccagcttgtctgaatgtgcttttctgctcggagtgtatgtctgtctgagtggtttgtgtgttttcccacttcttttactcggggtccaaacgcccttcccgggactgtttcccatgaaatgagtctggtgtgagccgaagctgtaatgcgtttctcatttttaaagtgtttttaaagcc

SEQ ID NO: 289884 - DNA, 272 bp, Homo sapiens; identical to SEQ ID NO: 203435
  chr13:100642614-100642886
  hyper

SEQ ID NO: 289885 - DNA, 72 bp, Homo sapiens
  chr13:100650019-100650091
  hyper
ctagggtgggccgaggacagagcgcctcaggcatcgtcggcttcccacggctgcggcccaggcccagcctgc

SEQ ID NO: 289886 - DNA, 160 bp, Homo sapiens; identical to SEQ ID NO: 237156
  chr13:100740896-100741056
  hyper

SEQ ID NO: 289887 - DNA, 129 bp, Homo sapiens
  chr13:102568281-102568410
  hyper
tctacagcagctcccgctgggggcaccgccaggatatccacatttgtccaaggtctgggaacccgggaggtttctaggagaccccagagaccaagtgaggccaggcccaccccatggaaacccccacca

SEQ ID NO: 289888 - DNA, 140 bp, Homo sapiens; identical to SEQ ID NO: 203437
  chr13:103046525-103046665
  hyper

SEQ ID NO: 289889 - DNA, 268 bp, Homo sapiens
  chr13:103054731-103054999
  hyper
aatctcccctccggattcctcgcccagcctcggatgtgagttacaggcattagagggaggaggaggaggagttgaagtttgcattgaaaagactggctttccatgacgtagccacgtgctttcagacccgtcaccagtgagatgcttcaaccagcccagggagggcagtgtcactgcagtctctctgctagggcccctcctgaagtctccccacccgccagctccagccccagccccaaacccagacccaacgcgcgaccctctccct

SEQ ID NO: 289890 - DNA, 123 bp, Homo sapiens; identical to SEQ ID NO: 237164
  chr13:103248986-103249109
  hyper

SEQ ID NO: 289891 - DNA, 146 bp, Homo sapiens; identical to SEQ ID NO: 203438
  chr13:103450867-103451013
  hyper

SEQ ID NO: 289892 - DNA, 1602 bp, Homo sapiens
  chr13:103451043-103452645
  hyper
atccaccgataaatgaagaagtgtaagaggtggacagaagcagccgagccttcggcagggacccgccggccgatcgcagcagccaacgcgactgcaaaggttgccgcccggcgtgcagggcaggcgcgcgggtctccgcgaccccaggacaatcaaagcccgtgccccggcgcgcccaggtgagggtcccctggcgttctgctgtcccggccgagaaccgcgctgctcctctctctcaggacaatgatgaacttgagttgctcctgccactggagcatcatttgggagcgaatccgtctcaggttccagccaaggtgtagggcgaggggattggcccgtgcgtcgggccaggctcagtaacgccttctccaagtggatggcggggtggacacgcgtcccggcgccccgggctccctgggatatgtagttcgcgacaggacgagcggaaatactgccaggattttaccacctctcgcccatttatttacttctcggtcaccgctttcgggggacagataaacaccacagatgcccatcaaaggggcgcacgggtctggaggcgcagctcaggtttttgcgttggtcaccctgccctccgcacgtggagagggcaggcataaagcaccttgaaaggaaggtgctgtcaatgctatccgacgacctgtcgccgggcaccgcagcatcctcgctcgctccgatgggacgagggacgccggccccagggtaacaggaggcgcctcgccggccgcgcgctggatgctgtgatccaggtccggagccgggttccgccgcggccgcagcgacccgaccccacccgacaggccagaggtaccccggggcggggggcaggggccgaggtggcggccggctgtgcgctctgagcgcctggccctccgctgggcacctgggcgccgccagcccggcctgctgccgctctacgcgcagccacctgggcattcaaaatttttacttaattcgataccggcctgggctgccaggggtcatcgcctctccgagccccgtggcgtccagatggaggccactgcatgggtgcgcgctctcccgggaaggagtagggggaagagctgtgtcgcggggggaagagaagcgccagggaaagaagggcctagccctctggtgaacaaagctcgattaggaggtgtccatgtggataccggtgacccctgtgcggccgtcggtctccacgccacgctgggcagggtccgggaaccagcgcgcagcggccgtcgccttcccctgcacgccagcacccgggtctgggccgccgccaggagtcacgggctcaccgccctggtcagcttggcagtcggacccggagccgcctcctctgcctgcctccctcttgccagctgccccgaaaacccagaagagccggtggctccgagccaaggcgggcctggttcggcgccaggaaagggggtttctttcctattttcttttgtgcaattgtcattattaatgataccgactcgtttactcaaacagtcgaatcggagccccagctcttagcccggatgcagcaattgcccgtgggccccctttaacaccaacagcgtccccggggcccggggcaagcatgtt

SEQ ID NO: 289893 - DNA, 406 bp, Homo sapiens; identical to SEQ ID NO: 124058
  chr13:103452670-103453076
  hyper

SEQ ID NO: 289894 - DNA, 124 bp, Homo sapiens; identical to SEQ ID NO: 203441
  chr13:107001524-107001648
  hyper

SEQ ID NO: 289895 - DNA, 127 bp, Homo sapiens; identical to SEQ ID NO: 203442
  chr13:107001687-107001814
  hyper

SEQ ID NO: 289896 - DNA, 193 bp, Homo sapiens; identical to SEQ ID NO: 237167
  chr13:107185497-107185690
  hyper

SEQ ID NO: 289897 - DNA, 216 bp, Homo sapiens; identical to SEQ ID NO: 203443
  chr13:107186448-107186664
  hyper

SEQ ID NO: 289898 - DNA, 240 bp, Homo sapiens; identical to SEQ ID NO: 203444
  chr13:107187426-107187666
  hyper

SEQ ID NO: 289899 - DNA, 546 bp, Homo sapiens; identical to SEQ ID NO: 203445
  chr13:107187695-107188241
  hyper

SEQ ID NO: 289900 - DNA, 308 bp, Homo sapiens; identical to SEQ ID NO: 203446
  chr13:107188430-107188738
  hyper

SEQ ID NO: 289901 - DNA, 279 bp, Homo sapiens; identical to SEQ ID NO: 203447
  chr13:107188808-107189087
  hyper

SEQ ID NO: 289902 - DNA, 220 bp, Homo sapiens; identical to SEQ ID NO: 203448
  chr13:108518134-108518354
  hyper

SEQ ID NO: 289903 - DNA, 321 bp, Homo sapiens; identical to SEQ ID NO: 203449
  chr13:108518933-108519254
  hyper

SEQ ID NO: 289904 - DNA, 58 bp, Homo sapiens; identical to SEQ ID NO: 203450
  chr13:108519564-108519622
  hyper

SEQ ID NO: 289905 - DNA, 165 bp, Homo sapiens; identical to SEQ ID NO: 203451
  chr13:108519932-108520097
  hyper

SEQ ID NO: 289906 - DNA, 67 bp, Homo sapiens; identical to SEQ ID NO: 203452
  chr13:108520309-108520376
  hyper

SEQ ID NO: 289907 - DNA, 33 bp, Homo sapiens; identical to SEQ ID NO: 203453
  chr13:108520946-108520979
  hyper

SEQ ID NO: 289908 - DNA, 84 bp, Homo sapiens; identical to SEQ ID NO: 237176
  chr13:108868007-108868091
  hyper

SEQ ID NO: 289909 - DNA, 668 bp, Homo sapiens
  chr13:110437578-110438246
  hyper
cgcctgcatccacagctcgccggggcctgtgacggccgagcggcccacctcgatgaagaagaagctgtccgagtggccgcagcggcggatgttcatgagctgcagcgtcaccgacggctgctcgcagttgagcttcacgaagccgatggtgcgcgcagacaggcacagacggtacacccccgtcaggttcttgctctggcccagacccttgggcttcaggttcacctgccacacctcacggtaggcggccgtggcgggagccaccagcccgtagctgtcctcggccccggcggcgccggcagagccgcccagggcgccgggcagggaggcgctgcaggacgcggcgggcgcggcggcggggggcgcgtctccggcggccgcgcggccctcgctgaccaggtcggtgagcgcgcggtaccagccctcctgctcctgctcgttctcggcggccacggcgaagtactcgtccttggtgtagagggcgatcaggtacttgtgcttggcgtcggcgcgcttgttgatgttcaggcagcagtcgagagcgatcacccgtttcggcgcgcctgccttgctccgccactttttctcgctctcgtagtactcgagccgcggcggttgcggcgccgaccccccgcccgccgtcgcctcgtcgccgcccgcgccgggtc

SEQ ID NO: 289910 - DNA, 634 bp, Homo sapiens
  chr13:110438287-110438921
  hyper
cgcaggtagccgcacttgcgcacgctgtggttgttgttgttgttgttgttgttgaggttggggccgtctccgctcgccggcccgggcggcccgtgccgcggcgggctcgccatcgcgggcgcttcaggccgcgcggcccgggcccggcgcccaggggttggggcgaggggcggagggggcgcgggcgggggcggctccctcccacccttgcgcccggccgcccgcccgatcacgcgtccctcgggcccaggcggtggggaaggtccggggaggcccgcgggggccagcaccgctcggcggcgccgcgccctccgcgctctggggctcctgaggatgcccggcgcgggcggtggccgcccccctccccggctgcctgcggccgctgcctcctcgggctctcgggcggcgccgggggacgcgctcgctgggccgggagtcggggtccccgagccgcggggccgagcctaaggcgcgcgcggccgcaccggggctgctgccgccgcgtcgcgctccgggaagccggggtgcgcccgggcgctcggggtccgcgccgccgccggggctgctgctgctgctggtgttgctgctgctgctgccaacggcgacccgggctcgtcgcggtccccgccgcaca

SEQ ID NO: 289911 - DNA, 863 bp, Homo sapiens
  chr13:110438956-110439819
  hyper
agaagagcaaaacaacatgtgactcggcgttacgcaggcacacacagcgcggccgccccgccccgctgcctcgcattggcgccgcgccccccgacggacggcgcgctcggccaatcggcgcggcgctcgcgggggcgggccgcgcgcccccgccccgcccccctttctccccgggccgcgtttcccgccgtcccctccccctcccgcgaaggccccggcccggccgggcggggtggggcggccccggcctcattaatcagcggcttgttgtggatgccggcggaggagatgccacccagggcgggaaaaggggcgcggaagaggggcggggcgggccacggcgcgcagggcccttccctcccgcctcggactcaattaattgggcttgagcttccgccggggagggggcgccgggcggggccgcggctgggcggggcgggggatcgggatcggcggcgggggctgcggccttgcagtggaagcatgggcggcgagccgggccgtgctctcggggcgcggggtccccattttgggcgagggcggccgctcccgcgctcggggtgggcgcgccccatccccgtcccccgtttcccgtccccgtctcccggccgcatctccgtccccccgcagccgcgaaacgcggggaggttccagggcccgcggccgcgggttcgcgagcaccgcgctccagatcgagagcggcgcgcgcccttccgtggaggacagaggggcgcggagggggcgcctgtgtcccacccgctcgcgggcgctttacggggcgtcctctgcgccattcacttgtcagcttgtcgggaagttgaaatcgcgtttgggaggtaataggagaaagagatcggggacgg

SEQ ID NO: 289912 - DNA, 329 bp, Homo sapiens
  chr13:110439864-110440193
  hyper
cccgcgagccagcggtccctgagccgggagaccgcgcgggcgtctctccagcccccgcaggagcgccgccttccttccgcaggggcgtcctctccccccaccgctgcaggagcacccccttccttcctcggaagcgtcctctcaccacaccgcttcaagagcccccccttccttccacaggggcgtcctttccccctccgaggcaggagcgccccttttccccccacaggagcgccctccccaccccaggagcgccctgcgcccagcagacgggcaggtgggcgggcgtccactacctgtgtgcgcggtgcgggcggtgactgccaagt

SEQ ID NO: 289913 - DNA, 186 bp, Homo sapiens; identical to SEQ ID NO: 237180
  chr13:110790766-110790952
  hyper

SEQ ID NO: 289914 - DNA, 306 bp, Homo sapiens; identical to SEQ ID NO: 203454
  chr13:110960603-110960909
  hyper

SEQ ID NO: 289915 - DNA, 54 bp, Homo sapiens
  chr13:110961130-110961184
  hyper
cgactgcactgcgaggctttgtccattttatacgttttgtttaaagagtaggag

SEQ ID NO: 289916 - DNA, 828 bp, Homo sapiens; identical to SEQ ID NO: 203455
  chr13:111213552-111214380
  hyper

SEQ ID NO: 289917 - DNA, 343 bp, Homo sapiens
  chr13:111267965-111268308
  hyper
ctgtggggcaatccgggcttgcagacgaggtaaggtcgattccatttggcccggggatggtcacacgcgcgggggccggaactgccgtcgccggcgcggtcgttgtcgcattgctctcggccgcactcgcgctgtacgggccgccactggacgcaggtacccgaccgctgaccgcctctgctggctcgcgggggggaagcgccgccgaggggcagcccgcgcgcggggccggggcgccgtgtggcctgcggggcggagtagggagaggacggaggcctcctggaacggcgcggcgacggctgggcgcggcttgggtgatgggagcctccgtgcggggtgacag

SEQ ID NO: 289918 - DNA, 58 bp, Homo sapiens; identical to SEQ ID NO: 237187
  chr13:111268659-111268717
  hyper

SEQ ID NO: 289919 - DNA, 150 bp, Homo sapiens; identical to SEQ ID NO: 203457
  chr13:111358789-111358939
  hyper

SEQ ID NO: 289920 - DNA, 210 bp, Homo sapiens
  chr13:111365469-111365679
  hyper
ggggcattactcacggtctccccgcctcctcttcatcgtgattgggctgtcaaagtgatgttggcaagtagattggctactgcggttgccagttctgtttcgggccctacttatactgctctgtggggcggggacgaagagtcaggggctgaggagcgagttgcggtagttgctgtgtaccatggtctcggaggtttctgtcccgcggcc

SEQ ID NO: 289921 - DNA, 107 bp, Homo sapiens; identical to SEQ ID NO: 237190
  chr13:111527014-111527121
  hyper

SEQ ID NO: 289922 - DNA, 268 bp, Homo sapiens
  chr13:111766945-111767213
  hyper
acagcccagatcttcggcgtccccgagacgcagccaggcgcccggcccggcccggcccggccctctgcacagccccacttcaggccacgccgtttccttgaccttcccccggcagggtctgaagcgtcaccgtccgtctagagcagagtcgcgcaggcccctgccctgccggtgaggtcggcgccgcgctccggagagtcggttcctcccgattcagacccatatggcttcagatggaaccatcatttctgttccgtcatgaccggct

SEQ ID NO: 289923 - DNA, 33 bp, Homo sapiens
  chr13:111768508-111768541
  hyper
tttaaagaggcacgcatctgtagctgagggctg

SEQ ID NO: 289924 - DNA, 84 bp, Homo sapiens; identical to SEQ ID NO: 237192
  chr13:111806516-111806600
  hyper

SEQ ID NO: 289925 - DNA, 38 bp, Homo sapiens
  chr13:112716639-112716677
  hyper
cgcgcgtgcgcgcgcgcgcacacacacatacacacaca

SEQ ID NO: 289926 - DNA, 107 bp, Homo sapiens
  chr13:112716721-112716828
  hyper
accgcccgaaagaaagcctgggtcgcttttgaggagaaggagtttcttgacccttccccgcaaacgctactggaacggcctccaaactaggacgcctagtcaggcaa

SEQ ID NO: 289927 - DNA, 247 bp, Homo sapiens
  chr13:112722597-112722844
  hyper
cgcagctggcctacgggcagcacccgggcgcgggcggcgcgcacccgcacgcgcaccccgcgcacccgcacccgcaccacccgcacgcgcacccgcacaacccgcagcccatgcaccgctacgacatgggcgcgctgcagtacagccccatctccaactcgcagggctacatgagcgcgtcgccctcgggctacggcggcctcccctacggcgccgcggccgccgccgccgccgctgcgggcggcgc

SEQ ID NO: 289928 - DNA, 100 bp, Homo sapiens
  chr13:112728350-112728450
  hyper
ggcagagctgcggctcccgggcgttgcgcgtggcgtttttcatcacggagggaaagccgcggctccgcgggaaaggagtgaaaaccgagtgtgggtgaag

SEQ ID NO: 289929 - DNA, 122 bp, Homo sapiens; identical to SEQ ID NO: 237209
  chr13:112728785-112728907
  hyper

SEQ ID NO: 289930 - DNA, 351 bp, Homo sapiens
  chr13:112760444-112760795
  hyper
agctgccctggctggtgattggaggtttaacgtccggaattcaggcgcttctgcagctcagatttgccggccaaggggcctcagttgcaacttttcaaaatggtgtttctggaaaataacaaattcagactcaactggtgacagcttttggctatagagaatgaaactgcttccctttggcggtggaactcttaaacttcgaagagtgaaagaatacaatgaaataaaatgccataagatcactggatttttcagaaaaaggaagaccccaaattactcccaaaatgaggctttgtaaattcttgttaaaaatctttaaatctcgaatttccccctacaacatctgatgag

SEQ ID NO: 289931 - DNA, 35 bp, Homo sapiens; identical to SEQ ID NO: 224653
  chr13:113261127-113261162
  hyper

SEQ ID NO: 289932 - DNA, 100 bp, Homo sapiens; identical to SEQ ID NO: 237212
  chr13:113295149-113295249
  hyper

SEQ ID NO: 289933 - DNA, 141 bp, Homo sapiens; identical to SEQ ID NO: 203460
  chr13:113547249-113547390
  hyper

SEQ ID NO: 289934 - DNA, 710 bp, Homo sapiens; identical to SEQ ID NO: 224654
  chr13:113597560-113598270
  hyper

SEQ ID NO: 289935 - DNA, 408 bp, Homo sapiens; identical to SEQ ID NO: 203462
  chr13:113622876-113623284
  hyper

SEQ ID NO: 289936 - DNA, 655 bp, Homo sapiens; identical to SEQ ID NO: 203463
  chr13:113623348-113624003
  hyper

SEQ ID NO: 289937 - DNA, 87 bp, Homo sapiens; identical to SEQ ID NO: 237215
  chr13:113683950-113684037
  hyper

SEQ ID NO: 289938 - DNA, 47 bp, Homo sapiens
  chr13:113807345-113807392
  hyper
gcgttcagaggccgcgctgcctgggtgctgagccgtcccggggttca

SEQ ID NO: 289939 - DNA, 465 bp, Homo sapiens; identical to SEQ ID NO: 124157
  chr13:113807542-113808007
  hyper

SEQ ID NO: 289940 - DNA, 313 bp, Homo sapiens; identical to SEQ ID NO: 237217
  chr13:113862929-113863242
  hyper

SEQ ID NO: 289941 - DNA, 87 bp, Homo sapiens; identical to SEQ ID NO: 203465
  chr13:113951225-113951312
  hyper

SEQ ID NO: 289942 - DNA, 34 bp, Homo sapiens; identical to SEQ ID NO: 203466
  chr13:114017782-114017816
  hyper

SEQ ID NO: 289943 - DNA, 228 bp, Homo sapiens; identical to SEQ ID NO: 203467
  chr13:114017991-114018219
  hyper

SEQ ID NO: 289944 - DNA, 138 bp, Homo sapiens; identical to SEQ ID NO: 203468
  chr13:114018330-114018468
  hyper

SEQ ID NO: 289945 - DNA, 179 bp, Homo sapiens
  chr13:114145958-114146137
  hyper
gcctaggcgctcttcgctgaggcccacgttctaacctggaatggaacctgcgttcccaccctggccgcccgggtggactcggggcctccagggccggccgcagagatgcagccctgtccctggcccccctcctgtgactcctaacggctcctcacggtgtccatgacccagggtgtgga

SEQ ID NO: 289946 - DNA, 725 bp, Homo sapiens; identical to SEQ ID NO: 203469
  chr13:114285627-114286352
  hyper

SEQ ID NO: 289947 - DNA, 301 bp, Homo sapiens; identical to SEQ ID NO: 203470
  chr13:114565970-114566271
  hyper

SEQ ID NO: 289948 - DNA, 113 bp, Homo sapiens; identical to SEQ ID NO: 124172
  chr13:114566409-114566522
  hyper

SEQ ID NO: 289949 - DNA, 138 bp, Homo sapiens; identical to SEQ ID NO: 237222
  chr13:114566904-114567042
  hyper

SEQ ID NO: 289950 - DNA, 52 bp, Homo sapiens; identical to SEQ ID NO: 203472
  chr13:114776448-114776500
  hyper

SEQ ID NO: 289951 - DNA, 228 bp, Homo sapiens; identical to SEQ ID NO: 203473
  chr13:114776782-114777010
  hyper

SEQ ID NO: 289952 - DNA, 313 bp, Homo sapiens; identical to SEQ ID NO: 237224
  chr14:20773921-20774234
  hyper

SEQ ID NO: 289953 - DNA, 418 bp, Homo sapiens; identical to SEQ ID NO: 237225
  chr14:20811405-20811823
  hyper

SEQ ID NO: 289954 - DNA, 87 bp, Homo sapiens; identical to SEQ ID NO: 237226
  chr14:20922851-20922938
  hyper

SEQ ID NO: 289955 - DNA, 239 bp, Homo sapiens; identical to SEQ ID NO: 237227
  chr14:20929632-20929871
  hyper

SEQ ID NO: 289956 - DNA, 407 bp, Homo sapiens; identical to SEQ ID NO: 237228
  chr14:20937480-20937887
  hyper

SEQ ID NO: 289957 - DNA, 86 bp, Homo sapiens; identical to SEQ ID NO: 203476
  chr14:21093067-21093153
  hyper

SEQ ID NO: 289958 - DNA, 260 bp, Homo sapiens
  chr14:21098604-21098864
  hyper
accttaaggatggccgtagttggaaattcttagagtcctccgctctaccaggtgagctatcggaaagtgtctgtgacattcgttagcgtagatttttgtgcattgagtagcggctggtgagactcctgacttctttgcatttgggctcagattactgttcaagaagttccagagagccaggtctatagttaactgagtcccgggagcagccttgaggcagtaggaagtgagatctgagtcggaggtagtgagaatggaaa

SEQ ID NO: 289959 - DNA, 210 bp, Homo sapiens; identical to SEQ ID NO: 203478
  chr14:21099147-21099357
  hyper

SEQ ID NO: 289960 - DNA, 714 bp, Homo sapiens; identical to SEQ ID NO: 237232
  chr14:21099779-21100493
  hyper

SEQ ID NO: 289961 - DNA, 119 bp, Homo sapiens; identical to SEQ ID NO: 203480
  chr14:21101056-21101175
  hyper

SEQ ID NO: 289962 - DNA, 88 bp, Homo sapiens; identical to SEQ ID NO: 203481
  chr14:21101235-21101323
  hyper

SEQ ID NO: 289963 - DNA, 41 bp, Homo sapiens; identical to SEQ ID NO: 237235
  chr14:21101619-21101660
  hyper

SEQ ID NO: 289964 - DNA, 138 bp, Homo sapiens
  chr14:21121262-21121400
  hyper
cgagccggaatcgaaccagcgacctaaggatgtccacaaatgtttctacaggctacagtcctccgctctaccagctgagctatcgaagggcgcacgtttctggggttgggtcattgatctttcagcaaatgcaagact

SEQ ID NO: 289965 - DNA, 119 bp, Homo sapiens
  chr14:21121460-21121579
  hyper
atcctgcgccgatcgccaccgcgctccttttgcggcggaacaaaatcctctggctgtggttgactggctttccccggcatcgataacaacgacccatgaggggcgagccgggtaggggg

SEQ ID NO: 289966 - DNA, 107 bp, Homo sapiens; identical to SEQ ID NO: 237237
  chr14:21131529-21131636
  hyper

SEQ ID NO: 289967 - DNA, 420 bp, Homo sapiens
  chr14:21150255-21150675
  hyper
gggtctgggcatatttggagtagagatcaaggttccacttctgaaacgggaagagccagcaatggccgctccggccaggcgtccagaagagagatgcacgttgtgaggcaaggtttcatgtgccagtggggttttgggaaattaagggcccgactttaggggcgagacttgggtcactaaatttgattttaacgcagagaaatgtggccttccttttgaatgagctgcaaatattatctccaaaagcgaattcacacagaaacattgggtttgcccagatgtcctctatttcaggggttcccaacccttgggccgcgcacctgtccatggcctgttagggacccggctgtacagcaggaggtgaactccgggctagctaccagtaccgcctgagctccgcctcctgtgagatcagtggtg

SEQ ID NO: 289968 - DNA, 1320 bp, Homo sapiens; identical to SEQ ID NO: 237240
  chr14:21150855-21152175
  hyper

SEQ ID NO: 289969 - DNA, 816 bp, Homo sapiens
  chr14:21152235-21153051
  hyper
cggacgagccctcgtggctactgtttttccacccccttttgtcaactactgaaaaaaagtctccgttaaatttgaaacacaaactgtctcgcgatgggctgtcctgccaaagaaagcagcagcgaataagtacgtggcagatggtgctgtcgaccagtgtcaagaccaagtttcatgggttcctggacgctcagccaggggtagtctctgaagggccgcctggcaattgggagcagaagccagtttcccgccatctgctctccgtggaggcagtgctctcgcggctgctgcccgttggggtccagctgaggaaggagcgcggatcccaggctcgttctttgcctgggctgcccctgcggcccctggggcgggtgctgctgcggcgccagctccaagggcggatccaggcgggaggggcctcctcggagaagcggggcgcggtcccaactacgcagaggctggcacgccgaccctccacacctcaccacgcccccatctccgtccgtgtacacacactcacacaaggacgccaaccccacctagatgcaaagcaggattcaaaagaacatctttgcgttttctaccggctccccatcatcgtactagggaggaagaagcgggtgagaaacaaaacttctttccattgtcctgcccgtttctgcggacttgttctgaggccgaggtaggttcacactcctgctcctcctcctcctctctggtagcttcataaggggcgtttaggccggggagtcctttcctagtagaggcagcttgggactccttggggaggagtttgcgggacggggctggagaggg

SEQ ID NO: 289970 - DNA, 131 bp, Homo sapiens
  chr14:21341857-21341988
  hyper
attatcgtctacccgtgtcagcaaccaagaaacctgcagcctgtctcaaaggaaaccaagaaagaagttttggactcttgtgcaggaagcttgtggcgcggcgccccctgccgaccaatacgacggccacg

SEQ ID NO: 289971 - DNA, 126 bp, Homo sapiens; identical to SEQ ID NO: 203484
  chr14:21439059-21439185
  hyper

SEQ ID NO: 289972 - DNA, 605 bp, Homo sapiens; identical to SEQ ID NO: 203485
  chr14:21439317-21439922
  hyper

SEQ ID NO: 289973 - DNA, 159 bp, Homo sapiens; identical to SEQ ID NO: 237244
  chr14:21458483-21458642
  hyper

SEQ ID NO: 289974 - DNA, 153 bp, Homo sapiens; identical to SEQ ID NO: 203486
  chr14:21493030-21493183
  hyper

SEQ ID NO: 289975 - DNA, 249 bp, Homo sapiens
  chr14:21493821-21494070
  hyper
cagagtcctggtacctctcctctctttgctgcgtcccgacgcctgctctccggctgctccgggagaagttggacaacaaggcggggaggtgggggcggggaatgcggggggccgctataaatagagggcgatcgcgggcaggcggggggtggggagaggatggccaacagggactctggggtcaatgcctcaaggggcgcgggggaggggccggggacccccagaggctctgactcctgggtaaacagg

SEQ ID NO: 289976 - DNA, 105 bp, Homo sapiens; identical to SEQ ID NO: 124214
  chr14:21494160-21494265
  hyper

SEQ ID NO: 289977 - DNA, 64 bp, Homo sapiens; identical to SEQ ID NO: 203487
  chr14:21539066-21539130
  hyper

SEQ ID NO: 289978 - DNA, 626 bp, Homo sapiens
  chr14:21539343-21539969
  hyper
cttggggcgctggacgctggagggtacgctaaggagaagcccacaccaacaggagtgaacactgccctgggaactttcactgcagagtactctgaagcaccgctgcgagagtgggcactgccagagagagcgcccactgcaaagagggcgggggcatggccaaggggccgctcgctgcagagtggaggagggggagaggccttgccagggggagctcaccgcagggagtggaggaggggcaggggcactactggggccgcccctctacggagggaagggcaccctctggcagggaggctggaggaaaaagaaagaggaactgggccagggagagctgactcagtctctctggtctcctctctggtccccgccggcaggaggctgggtctccgtgctcccgcccgccgcctccctccccagacccctcctcccctcctgccgcggccgtttcctgtggctgagactctcgctcagccatgagctcaccgcccctaatgggttgcagctgcctcgctgctcaagccctagctccgcactccctgccttggagcagacggccccactctgcctcacccccgcccatctccaccttccccccacccacgcgcactgcgtccgcctggtcc

SEQ ID NO: 289979 - DNA, 35 bp, Homo sapiens
  chr14:21768995-21769030
  hyper
aaagtgtggttaatagatcacggtagatgaataca

SEQ ID NO: 289980 - DNA, 112 bp, Homo sapiens; identical to SEQ ID NO: 203488
  chr14:21852940-21853052
  hyper

SEQ ID NO: 289981 - DNA, 301 bp, Homo sapiens; identical to SEQ ID NO: 237250
  chr14:21905266-21905567
  hyper

SEQ ID NO: 289982 - DNA, 168 bp, Homo sapiens; identical to SEQ ID NO: 237251
  chr14:21924475-21924643
  hyper

SEQ ID NO: 289983 - DNA, 64 bp, Homo sapiens; identical to SEQ ID NO: 237252
  chr14:21945161-21945225
  hyper

SEQ ID NO: 289984 - DNA, 240 bp, Homo sapiens; identical to SEQ ID NO: 237253
  chr14:21979450-21979690
  hyper

SEQ ID NO: 289985 - DNA, 381 bp, Homo sapiens
  chr14:21994388-21994769
  hyper
gcagcggcgggggcagggagcagcggcggagggggaggggagcgaggaggcggggagaagctggagtgagaaagcggggagaggggagatctgggaggagctgatgaggaggggagtttatggggaggagctgctggggagggaggcgggagctagaggaggcgggagaagggagcgctagcgggggcgtgggggcgggagctcagagctcgggagagtttccggaggcgcagtgacaggtgctgtgaagcactgcgggggtccacctttcccggtccctggccagctccccccatctgcagatgcctttgcccaggcctaccctcctccccccgccctcccctcctaagctctaggggcacagtgggaaacgtagccctg

SEQ ID NO: 289986 - DNA, 31 bp, Homo sapiens; identical to SEQ ID NO: 203491
  chr14:22004962-22004993
  hyper

SEQ ID NO: 289987 - DNA, 162 bp, Homo sapiens; identical to SEQ ID NO: 237256
  chr14:23057965-23058127
  hyper

SEQ ID NO: 289988 - DNA, 362 bp, Homo sapiens; identical to SEQ ID NO: 237257
  chr14:23066988-23067350
  hyper

SEQ ID NO: 289989 - DNA, 177 bp, Homo sapiens; identical to SEQ ID NO: 237258
  chr14:23067565-23067742
  hyper

SEQ ID NO: 289990 - DNA, 391 bp, Homo sapiens
  chr14:23291965-23292356
  hyper
acgggaagccccttgttgggggggcgggggcgggaggcggggcgaggaatgtgcctcctcggagccggaggaggggtctcccgaaggccgtctcttccaccccgggttcccgactccccgccccctcggggtagctgttgcatcagcttccagattccaaaccaaagaaagtgggctccactaagctgggaaggcgtcgggcagcaaagccgccgccaggaggcagcgcttaatcaaaaatgtccgggccgagggggcccaggataccggagtccccggagcgtctttcatctgaagtcttagcagcagcgcggacctaacaaaaaagggagttgctgaattagttcaagaaaaggcaactggaaatgcttcatcacgttttaaggctaaa

SEQ ID NO: 289991 - DNA, 48 bp, Homo sapiens; identical to SEQ ID NO: 237260
  chr14:23299071-23299119
  hyper

SEQ ID NO: 289992 - DNA, 39 bp, Homo sapiens
  chr14:23355351-23355390
  hyper
ccgggctgggaggccgcaccacgacctacccgttatcct

SEQ ID NO: 289993 - DNA, 63 bp, Homo sapiens
  chr14:23355484-23355547
  hyper
gctctcccttccaagtcacctcttctccctaaggcctttttaccatcgcggacgcactcactt

SEQ ID NO: 289994 - DNA, 223 bp, Homo sapiens
  chr14:23355821-23356044
  hyper
gagggccgccacctggccgggacgctgagctgcaagcacatcgagacgtcggccgcactgcaccacaacacgagggagctcttcgagggcgcggtgcgccagatccggctgcggcggggccgaaaccacgccggaggccagaggcccgatccgggcagccccgagggccctgcgccacctgcacgccgcgagagcctcaccaagaaagccaagaggttcctcg

SEQ ID NO: 289995 - DNA, 173 bp, Homo sapiens; identical to SEQ ID NO: 237262
  chr14:23388421-23388594
  hyper

SEQ ID NO: 289996 - DNA, 38 bp, Homo sapiens; identical to SEQ ID NO: 237263
  chr14:23388823-23388861
  hyper

SEQ ID NO: 289997 - DNA, 285 bp, Homo sapiens; identical to SEQ ID NO: 237264
  chr14:23398577-23398862
  hyper

SEQ ID NO: 289998 - DNA, 204 bp, Homo sapiens
  chr14:23450224-23450428
  hyper
agaaacggactcacgagataccaggggggttgaatttagcagaaataaggagccctggttcatctgaaaactagcaggaaggggacagtgctctggggccgcccccatccatccctcttgcttctttcctagtcccgcgtcttcacctcggaccccggggcaccggcactttgggccgtcggggcagtggagaaccgaataccg

SEQ ID NO: 289999 - DNA, 107 bp, Homo sapiens; identical to SEQ ID NO: 203495
  chr14:23450746-23450853
  hyper

SEQ ID NO: 290000 - DNA, 737 bp, Homo sapiens; identical to SEQ ID NO: 237266
  chr14:23450883-23451620
  hyper

SEQ ID NO: 290001 - DNA, 479 bp, Homo sapiens; identical to SEQ ID NO: 203497
  chr14:23451829-23452308
  hyper

SEQ ID NO: 290002 - DNA, 186 bp, Homo sapiens; identical to SEQ ID NO: 237268
  chr14:23503914-23504100
  hyper

SEQ ID NO: 290003 - DNA, 130 bp, Homo sapiens; identical to SEQ ID NO: 237269
  chr14:23527202-23527332
  hyper

SEQ ID NO: 290004 - DNA, 35 bp, Homo sapiens; identical to SEQ ID NO: 237270
  chr14:23540715-23540750
  hyper

SEQ ID NO: 290005 - DNA, 244 bp, Homo sapiens; identical to SEQ ID NO: 237271
  chr14:23755249-23755493
  hyper

SEQ ID NO: 290006 - DNA, 202 bp, Homo sapiens
  chr14:23770438-23770640
  hyper
gcttctttggttccgctcactccccccgcccccacgcccccacgcccccacgcccctgatttccccacccttttcgccctccccggcttgactcccttggaccgctcccgccaatcctggtctctcctactcctccccgccacatcgggtcgccccgcccccgggtgcctttggtgttttccgccgtcggccgcaggcgcct

SEQ ID NO: 290007 - DNA, 144 bp, Homo sapiens; identical to SEQ ID NO: 237273
  chr14:23772082-23772226
  hyper

SEQ ID NO: 290008 - DNA, 101 bp, Homo sapiens; identical to SEQ ID NO: 203498
  chr14:23775763-23775864
  hyper

SEQ ID NO: 290009 - DNA, 188 bp, Homo sapiens; identical to SEQ ID NO: 203499
  chr14:23776071-23776259
  hyper

SEQ ID NO: 290010 - DNA, 125 bp, Homo sapiens; identical to SEQ ID NO: 237275
  chr14:23790484-23790609
  hyper

SEQ ID NO: 290011 - DNA, 67 bp, Homo sapiens; identical to SEQ ID NO: 203500
  chr14:23821317-23821384
  hyper

SEQ ID NO: 290012 - DNA, 87 bp, Homo sapiens
  chr14:23822193-23822280
  hyper
ggggggccagggcccaggggagggagggaaggggggctctgtcgtctctttcctgggtctgcgggccattgcggtaaaaaagaaaaa

SEQ ID NO: 290013 - DNA, 85 bp, Homo sapiens; identical to SEQ ID NO: 51020
  chr14:23835314-23835399
  hyper

SEQ ID NO: 290014 - DNA, 51 bp, Homo sapiens; identical to SEQ ID NO: 237278
  chr14:23938810-23938861
  hyper

SEQ ID NO: 290015 - DNA, 196 bp, Homo sapiens; identical to SEQ ID NO: 237279
  chr14:24020943-24021139
  hyper

SEQ ID NO: 290016 - DNA, 285 bp, Homo sapiens
  chr14:24024866-24025151
  hyper
tacgcgctgcccccgcccccttccctccccccaccccaacccccctcgccaccattgccactggcctgcgcttagctggctgctatagcagatatctgttggacggtgtgaatggcttgtattccaggcccatctgcctgcgttgggggtgcggcggggggtgttggagacgggactggggcttgagctccttgcacccgactctccccgccgccttgtagccccagttcagctttaggtagagtaccgcaggcaccaagtgcagctttcctgtcgccatagcga

SEQ ID NO: 290017 - DNA, 105 bp, Homo sapiens; identical to SEQ ID NO: 124289
  chr14:24025214-24025319
  hyper

SEQ ID NO: 290018 - DNA, 36 bp, Homo sapiens; identical to SEQ ID NO: 237281
  chr14:24025555-24025591
  hyper

SEQ ID NO: 290019 - DNA, 574 bp, Homo sapiens; identical to SEQ ID NO: 237282
  chr14:24036495-24037069
  hyper

SEQ ID NO: 290020 - DNA, 47 bp, Homo sapiens; identical to SEQ ID NO: 237284
  chr14:24505639-24505686
  hyper

SEQ ID NO: 290021 - DNA, 106 bp, Homo sapiens
  chr14:24550912-24551018
  hyper
acgcagtctgtttcggtccagagcccgccccaggccccgacgctccccgggccccccagctgaccgttgctccagtcaggcgggcgccccacggtgcagggccggc

SEQ ID NO: 290022 - DNA, 257 bp, Homo sapiens; identical to SEQ ID NO: 237285
  chr14:24583740-24583997
  hyper

SEQ ID NO: 290023 - DNA, 223 bp, Homo sapiens; identical to SEQ ID NO: 237286
  chr14:24605551-24605774
  hyper

SEQ ID NO: 290024 - DNA, 103 bp, Homo sapiens; identical to SEQ ID NO: 237287
  chr14:24610778-24610881
  hyper

SEQ ID NO: 290025 - DNA, 100 bp, Homo sapiens; identical to SEQ ID NO: 237288
  chr14:24611143-24611243
  hyper

SEQ ID NO: 290026 - DNA, 72 bp, Homo sapiens; identical to SEQ ID NO: 237289
  chr14:24658235-24658307
  hyper

SEQ ID NO: 290027 - DNA, 120 bp, Homo sapiens; identical to SEQ ID NO: 203503
  chr14:24685267-24685387
  hyper

SEQ ID NO: 290028 - DNA, 248 bp, Homo sapiens; identical to SEQ ID NO: 237291
  chr14:24701155-24701403
  hyper

SEQ ID NO: 290029 - DNA, 114 bp, Homo sapiens; identical to SEQ ID NO: 237292
  chr14:24701640-24701754
  hyper

SEQ ID NO: 290030 - DNA, 225 bp, Homo sapiens; identical to SEQ ID NO: 237293
  chr14:24702080-24702305
  hyper

SEQ ID NO: 290031 - DNA, 143 bp, Homo sapiens; identical to SEQ ID NO: 237294
  chr14:24711905-24712048
  hyper

SEQ ID NO: 290032 - DNA, 33 bp, Homo sapiens; identical to SEQ ID NO: 237295
  chr14:24740923-24740956
  hyper

SEQ ID NO: 290033 - DNA, 42 bp, Homo sapiens; identical to SEQ ID NO: 237296
  chr14:24768607-24768649
  hyper

SEQ ID NO: 290034 - DNA, 91 bp, Homo sapiens; identical to SEQ ID NO: 237297
  chr14:24769098-24769189
  hyper

SEQ ID NO: 290035 - DNA, 82 bp, Homo sapiens
  chr14:24808629-24808711
  hyper
agattgcggctggggtcaaccggggtcactcacgagtttacgatcttgaccgccacatcgtagccccacttcctatgttgcg

SEQ ID NO: 290036 - DNA, 94 bp, Homo sapiens
  chr14:24808863-24808957
  hyper
ccctgtgactcggcgttctcactgcaatccccagcctccctcgccggcccccaccgtccccggactcaaagacgttctctgagcgagtctgtgg

SEQ ID NO: 290037 - DNA, 194 bp, Homo sapiens
  chr14:24837550-24837744
  hyper
gggcggccagctgcgaggatgaggagctggaatttaagctggtgttcggggaggaaaaggaggcccccccgctgggcgcggggggattgggggaaggttagtgctgggctgggaaggggtcttggggtcagtgagaggagggccggggatcctgagtctggggaatttaaggcagcgagcctagggtggggggt

SEQ ID NO: 290038 - DNA, 82 bp, Homo sapiens
  chr14:24837824-24837906
  hyper
cctttttaggtcgtgactggggtgggggtgggggtgctgttggctgtgcgccgcctcccggctgggccgcctgtcactgaac

SEQ ID NO: 290039 - DNA, 219 bp, Homo sapiens; identical to SEQ ID NO: 237301
  chr14:25148244-25148463
  hyper

SEQ ID NO: 290040 - DNA, 313 bp, Homo sapiens
  chr14:25518669-25518982
  hyper
cgcagcgaccccgagctcccccacactgggagcctcggggcagcattctcggggcccatgccatcgcggggacggtgcggaaaaaaaggctccatcctcaactttctcggaggaaatcgctccgttctgcggcttgcccaatactgcccgcacaacgggtcccagggttggagagaaccagggacacgagtccctctctgcgcgcacaaagcagctgcgccggggcgcgcggccccctctcccgccacccgccaacttggaagaatctctctgggagcctgcctactcccctggcctcacagccacccgcctc

SEQ ID NO: 290041 - DNA, 304 bp, Homo sapiens; identical to SEQ ID NO: 237303
  chr14:25601970-25602274
  hyper

SEQ ID NO: 290042 - DNA, 71 bp, Homo sapiens
  chr14:26674237-26674308
  hyper
agggtgggtgtttgccaagtcgccggtcccctgcgtccccgcccgccggtcccttctccgacccgagaccc

SEQ ID NO: 290043 - DNA, 280 bp, Homo sapiens
  chr14:27065772-27066052
  hyper
attcacctctgcttcgatgcattgggtgcattgttaagatgattccagtgcaaatgaagaagcgatatcggtcccgttaaaactcatcttccaaggaagcgcaggatgttaactaacaagtcaccgttccagacacccccaccctcgtatgcacccccctgaagacaaatcaatgaaatatttgcaccgacaatctaagtgcggtaagggcatgcactcatcaagattttgcatactacttgtggcccaaagcaagaggatggagagaggaaaaactctc

SEQ ID NO: 290044 - DNA, 78 bp, Homo sapiens
  chr14:27066140-27066218
  hyper
cggccatcacctcactccggggtcatcctcctcctcctcctgaatggaccttcttgcccaggtctaggatatttacat

SEQ ID NO: 290045 - DNA, 62 bp, Homo sapiens
  chr14:27066342-27066404
  hyper
ggggagggggcgcggggcaggggcgcaggggccgccgggttcgggctggaggtgtccgggcc

SEQ ID NO: 290046 - DNA, 157 bp, Homo sapiens; identical to SEQ ID NO: 203505
  chr14:27066405-27066562
  hyper

SEQ ID NO: 290047 - DNA, 60 bp, Homo sapiens; identical to SEQ ID NO: 203506
  chr14:27066704-27066764
  hyper

SEQ ID NO: 290048 - DNA, 90 bp, Homo sapiens; identical to SEQ ID NO: 203507
  chr14:27067007-27067097
  hyper

SEQ ID NO: 290049 - DNA, 218 bp, Homo sapiens; identical to SEQ ID NO: 203508
  chr14:27067386-27067604
  hyper

SEQ ID NO: 290050 - DNA, 202 bp, Homo sapiens; identical to SEQ ID NO: 203509
  chr14:27067699-27067901
  hyper

SEQ ID NO: 290051 - DNA, 265 bp, Homo sapiens; identical to SEQ ID NO: 203510
  chr14:29225768-29226033
  hyper

SEQ ID NO: 290052 - DNA, 60 bp, Homo sapiens; identical to SEQ ID NO: 203511
  chr14:29236194-29236254
  hyper

SEQ ID NO: 290053 - DNA, 60 bp, Homo sapiens
  chr14:29236614-29236674
  hyper
cacccccagcaccaccaccaccaccaccaccatcaccaccacccgccgccgcccgccccg

SEQ ID NO: 290054 - DNA, 71 bp, Homo sapiens
  chr14:29242908-29242979
  hyper
cggagaaggggtagtgggagactgaaataggtcctaaagtgtaaattaattcatttcgtggaaatatgatt

SEQ ID NO: 290055 - DNA, 220 bp, Homo sapiens
  chr14:29243293-29243513
  hyper
agggaaatgaacaccgttctgggcttgactttgtccctgctgggaatatcccagttcctggctttggaaatctcaggcaaataattgattcttaatgcacacttaggagacgtcggtagtacgctcgagagcctctctgtcccagagtggctgagagcacgcgccagacacaggttggctcggcccgaagcgaatttgggactctcgtcgcggtgtccta

SEQ ID NO: 290056 - DNA, 247 bp, Homo sapiens; identical to SEQ ID NO: 203512
  chr14:30396133-30396380
  hyper

SEQ ID NO: 290057 - DNA, 412 bp, Homo sapiens
  chr14:30396508-30396920
  hyper
cccggacgagtcctgcagcagcagcaccggctcacggctcaggccgatctgcagatggaacgagatgcccccgaccggggccgcgacaggagccaagaacggcgcgggcccgggcccggaccctgggaccagtgcggcggccgctgcggcagctgccgccgccacgggcagcagcggactgggcggccgcaggaccggaggggcgctcatcgctcggcggggcgcagggccgggcagcggagggcgggggctggcggcgcggcagcaggaaagttttgcagccgctgagccaggagcttctttctccgagagcccagacggaaaataaaaactttccggaaaagtccctgggctgggggagggcaaggggatgaggatcgggaggggaggggactaaggggaggagatgggg

SEQ ID NO: 290058 - DNA, 42 bp, Homo sapiens
  chr14:30397398-30397440
  hyper
tcctggggtcgcgaacttcccgggccccaaggtccctgccac

SEQ ID NO: 290059 - DNA, 101 bp, Homo sapiens
  chr14:30739845-30739946
  hyper
aagctgaaagacctcggaacacaagcgttttgcttggtcactaagcctagacaaatgtaagtttccccgccccagctcccctcagcctgtcacacaaaagc

SEQ ID NO: 290060 - DNA, 83 bp, Homo sapiens
  chr14:30740003-30740086
  hyper
tgggaaagctttagcttctcaagccaattgcactgcattgtcagtaggggtgtccgtgagctccccctcgtggctgaaggcca

SEQ ID NO: 290061 - DNA, 183 bp, Homo sapiens; identical to SEQ ID NO: 203514
  chr14:31027986-31028169
  hyper

SEQ ID NO: 290062 - DNA, 362 bp, Homo sapiens; identical to SEQ ID NO: 237323
  chr14:31091325-31091687
  hyper

SEQ ID NO: 290063 - DNA, 118 bp, Homo sapiens; identical to SEQ ID NO: 237325
  chr14:31494513-31494631
  hyper

SEQ ID NO: 290064 - DNA, 255 bp, Homo sapiens; identical to SEQ ID NO: 237326
  chr14:31677205-31677460
  hyper

SEQ ID NO: 290065 - DNA, 196 bp, Homo sapiens; identical to SEQ ID NO: 237327
  chr14:31888988-31889184
  hyper

SEQ ID NO: 290066 - DNA, 169 bp, Homo sapiens; identical to SEQ ID NO: 237328
  chr14:31889898-31890067
  hyper

SEQ ID NO: 290067 - DNA, 136 bp, Homo sapiens; identical to SEQ ID NO: 237329
  chr14:32030565-32030701
  hyper

SEQ ID NO: 290068 - DNA, 125 bp, Homo sapiens; identical to SEQ ID NO: 237330
  chr14:32030902-32031027
  hyper

SEQ ID NO: 290069 - DNA, 324 bp, Homo sapiens; identical to SEQ ID NO: 237331
  chr14:32670301-32670625
  hyper

SEQ ID NO: 290070 - DNA, 106 bp, Homo sapiens
  chr14:32670851-32670957
  hyper
agacttcggggagacgccaagcgctccaggccggccctgtcctctgcgctccactgctgccgcacggactgccagactcccggcatgctctgcggactgaagtccg

SEQ ID NO: 290071 - DNA, 298 bp, Homo sapiens; identical to SEQ ID NO: 124376
  chr14:32670996-32671294
  hyper

SEQ ID NO: 290072 - DNA, 99 bp, Homo sapiens
  chr14:32671354-32671453
  hyper
ttgcgcggttcaacgaaggtcgttgggcaagatacggtggtgttcctagaggttgttcaagatctctcggggcctgcattttcctgctcgcgagcttgg

SEQ ID NO: 290073 - DNA, 128 bp, Homo sapiens; identical to SEQ ID NO: 203517
  chr14:33402917-33403045
  hyper

SEQ ID NO: 290074 - DNA, 345 bp, Homo sapiens
  chr14:33404418-33404763
  hyper
ctttgccctttgcctggccccaaatccagagcttcagccccgagtagcggaggagttgcagcgaagtctgagacgccgcacaaggtgcttttgcaaagtttaggatcctcatccctttccagtggaattttctcaatgcctcagccggatgcggacccgcgcatacggacagctaggggggcaattgatcactggaggctgattgatcatttgtttccaaacagaataggaacgattttcatgtgtagctgtaaacttgcaattctacataatagtgttatcatgtcacctgttactacagggaaatacagcatgaaatccgagtctcttcggcgctgttaagta

SEQ ID NO: 290075 - DNA, 524 bp, Homo sapiens
  chr14:33407779-33408303
  hyper
cagctggaaaatgcccagaaatactttcacagcggtcaagctggaaccccccgcgtgtcctcccccttcccgctcctcccggcctagaccccgcgccccccgcagggagggtgtgcgccccacctgccaccgggctgctccgggtggtagaaaggggtgacgggggacgggggcgggggcgggtggcggcgcgggggtgagaacccggaggcggcggggccctgggccgggctgcccgcgggaccgcgcggccgcctccccccgccgccgccgccgcctccccctcctcctcctccgccgccgccgccggtcgcctgtctccgcgccgggcatgcctcgggagccggggcggcccgggccgcgggcgctctgcggcgcatggacggcggcggcgccgggcgagcagcgggaggagaaggcgcaggcggcggcggaagcggcgacccacggctgggagcaccggcggcgcgaggggacggccggccgcccgcgaggctccggccccactacttttccgtagcctc

SEQ ID NO: 290076 - DNA, 222 bp, Homo sapiens
  chr14:33408401-33408623
  hyper
gccgcgcacggccgcactctcccgccaccccacgcacacgcacacccccgcccgcccacgccccccacccgggaggggggagagaggcaaaaagtaagagaggaaaaaaaatagcaggaagatggcgcccaccaagcccagctttcagcaggatccttccaggcgagaacggtaacacttttctgtttattgaacctgccgccgggccgctgctcccgccgc

SEQ ID NO: 290077 - DNA, 60 bp, Homo sapiens
  chr14:33408827-33408887
  hyper
acaaaaaaaaaaaaaaaaagaagaaagaaacagaaaagagaaaaagaaaaagaaacaaac

SEQ ID NO: 290078 - DNA, 204 bp, Homo sapiens
  chr14:33408971-33409175
  hyper
agctgctctcgaggaagggaatgaggctggggagggggagggaaggcggcgagcagggggaggaggcgaggagcaggaggaggaggccgggggcggggagcgcggagctcgcgccaggcccggaatgtgtcgcggaggggccggctccgtctccgcgcgagcagctaggccgggccgagcccagaggagcgcggccgccgcctc

SEQ ID NO: 290079 - DNA, 259 bp, Homo sapiens; identical to SEQ ID NO: 203518
  chr14:34419302-34419561
  hyper

SEQ ID NO: 290080 - DNA, 184 bp, Homo sapiens; identical to SEQ ID NO: 203519
  chr14:34419820-34420004
  hyper

SEQ ID NO: 290081 - DNA, 149 bp, Homo sapiens; identical to SEQ ID NO: 203520
  chr14:34420371-34420520
  hyper

SEQ ID NO: 290082 - DNA, 459 bp, Homo sapiens
  chr14:34529232-34529691
  hyper
tggtgccctcgcttcggatgcaagatcccagctctgctgcagctttcgagccggagggacaatcgaaatgatcaaaaatgcccggcgggcagccttggcgagcgcgcggcggggcgcggggtgaagtctcgccagggcgcgccgcggcggacaccgagccacacgcactgtgcctgcgcccgcggccgccccgaaggtagtcggtaactgcggcgggcggcggccggggctggacagccagccccgcccggcaggctcgcagctcacgtagcgctagcgtgagtcagcgcgttccagcgcagccccgggccgagggagggctcccgcgcgcagcgccagcagcccgcacgtaccggccccgggagggggcgcctaggtggttccactcgcgggtgccctgtgccctgcagtgtccccacgccccaggttgtccccctcgaaagccacgtgggcgtgggg

SEQ ID NO: 290083 - DNA, 198 bp, Homo sapiens; identical to SEQ ID NO: 237339
  chr14:34931784-34931982
  hyper

SEQ ID NO: 290084 - DNA, 156 bp, Homo sapiens; identical to SEQ ID NO: 203521
  chr14:35008736-35008892
  hyper

SEQ ID NO: 290085 - DNA, 346 bp, Homo sapiens; identical to SEQ ID NO: 237341
  chr14:35451779-35452125
  hyper

SEQ ID NO: 290086 - DNA, 116 bp, Homo sapiens
  chr14:35591558-35591674
  hyper
tcattgttcattgcggatatctggaagccttccaggtcccctgaatgtagtagacacttcagcagccgtctcctaccccttttgccactaaatgcttcaaaactgccttttttcct

SEQ ID NO: 290087 - DNA, 151 bp, Homo sapiens; identical to SEQ ID NO: 124397
  chr14:35591704-35591855
  hyper

SEQ ID NO: 290088 - DNA, 103 bp, Homo sapiens; identical to SEQ ID NO: 237343
  chr14:35761313-35761416
  hyper

SEQ ID NO: 290089 - DNA, 44 bp, Homo sapiens; identical to SEQ ID NO: 237344
  chr14:35872861-35872905
  hyper

SEQ ID NO: 290090 - DNA, 52 bp, Homo sapiens; identical to SEQ ID NO: 237345
  chr14:35874140-35874192
  hyper

SEQ ID NO: 290091 - DNA, 173 bp, Homo sapiens
  chr14:36002427-36002600
  hyper
atgctgattccgccggcatttctcactcaatctactccatgctaaacaggccggttaggaattaagtcatactctgggtagtacaagtggaaagtgtgaacagagaaaccactttatgcgaggacagtggaaaatgagatcctcctttcctctccctactcctgctcctatcg

SEQ ID NO: 290092 - DNA, 438 bp, Homo sapiens
  chr14:36003004-36003442
  hyper
gcggagggcgtcgtgaggtggccttttcgcccggctccccagtgggacgctccgcggaggcagccaaggcggggagtgtcgagctccctcacactctggaccttaccttctggcgtcttcgcccgggaggctgcagggggaggcggacccagccggccacaggggcaggttcgcggcgctgtgaggcggggctgggcgtgcgccgccgccgccgccagattcgtctactccagtgaatcggcacgggagaaagccccgcccccggcgcccgctcccactcctgattggccgggccagcccggggaggcccggcgggaccccggcccgcgtctcagctataaagatagccccggcatgacagccgcggcgaagctcttctagttcatctgctggccggctctcagtccccgtggcgccccctttcctcttgtcccagag

SEQ ID NO: 290093 - DNA, 122 bp, Homo sapiens; identical to SEQ ID NO: 203524
  chr14:36005014-36005136
  hyper

SEQ ID NO: 290094 - DNA, 152 bp, Homo sapiens; identical to SEQ ID NO: 237349
  chr14:36278470-36278622
  hyper

SEQ ID NO: 290095 - DNA, 191 bp, Homo sapiens; identical to SEQ ID NO: 237350
  chr14:36295494-36295685
  hyper

SEQ ID NO: 290096 - DNA, 233 bp, Homo sapiens; identical to SEQ ID NO: 51101
  chr14:36789412-36789645
  hyper

SEQ ID NO: 290097 - DNA, 45 bp, Homo sapiens
  chr14:36977298-36977343
  hyper
aaacagcagtagttcgctggctttgtttggtttcgtttatttgta

SEQ ID NO: 290098 - DNA, 62 bp, Homo sapiens; identical to SEQ ID NO: 203526
  chr14:36979680-36979742
  hyper

SEQ ID NO: 290099 - DNA, 62 bp, Homo sapiens; identical to SEQ ID NO: 203527
  chr14:36979809-36979871
  hyper

SEQ ID NO: 290100 - DNA, 51 bp, Homo sapiens
  chr14:36981788-36981839
  hyper
cacagctgcacaaggaggaacgcgtcagccagaaggcagggagagccagag

SEQ ID NO: 290101 - DNA, 93 bp, Homo sapiens
  chr14:36985939-36986032
  hyper
ggggagggggcacttcctttgtgtcagtgacaagtgggttatgttgaagactctttcctctccccagctcccgtcctcccttcaaaaaaaaaa

SEQ ID NO: 290102 - DNA, 275 bp, Homo sapiens
  chr14:36988153-36988428
  hyper
cagcccgcggccccgcagtggggcggcctcacttactggcggggaagcgcgggtctgggttggcgccgtaccatccggggccagaggcgctgttcctcatggtgtcctggtacggcggcagctcgctcatgttgcccaggttgccgttgcagtagccccccacggcggagtgcgagagctggggcacccccgccgccgtcatgtggtaggcggcggtgacggcgccgtggtgccccacggcgtgctgctgcatggccgctgttggcggtgccgcc

SEQ ID NO: 290103 - DNA, 91 bp, Homo sapiens
  chr14:36988460-36988551
  hyper
gaggccgccgccctccatgcccactttcttgtagctttcctccaggggactcaagatgtcagacactgagaacggagtcgtgtgctttgga

SEQ ID NO: 290104 - DNA, 225 bp, Homo sapiens
  chr14:36988644-36988869
  hyper
ctccctttgccaaatattctggtgttaccttaacgccgatcttgttggatgtacacgtaacggagtggaccgagtcctccttaattggcttgagtggaggctcgggggctgcctcgcgtttgttttagcccggcgccaggttttaggcagccaccagaggcggggcgtaagcgctaaagcaacaagacaatagaagcctacatcttgcccgagataattagctta

SEQ ID NO: 290105 - DNA, 254 bp, Homo sapiens; identical to SEQ ID NO: 203528
  chr14:37050246-37050500
  hyper

SEQ ID NO: 290106 - DNA, 213 bp, Homo sapiens; identical to SEQ ID NO: 203529
  chr14:37050539-37050752
  hyper

SEQ ID NO: 290107 - DNA, 250 bp, Homo sapiens
  chr14:37050794-37051044
  hyper
gaggccatttcctgagtccacatctggacatccacctctccgaatgcggtgacctcattcataccacagcggtcatcagcgggcctgagatcgtgccccgaaaaaacccaccccggggccctcttaacatgtccgcaccggtagttgcgctggccgaccagtttatcacaagctgggtcaccagcgccggcctcctccaggtcgactgcactgcagtgtgccgaggtttgcggagccctgagtgggaacg

SEQ ID NO: 290108 - DNA, 403 bp, Homo sapiens
  chr14:37051196-37051599
  hyper
gtcagacacagaaaccccaaatctcggagcaccagtgccaggcagggatctgctcttaggatgtgccgaccgggatgaatgcgttaggggttcgaggacagggctcccgtttccaagactgaggaaatctagactctgggctgggatttcggctttccggcccctcgtgggctgggcccttgattctgctgccccacgcctcctacctcccaccccgcaccgcaatccaccacgcacttacaagggtagtggccgcgctccgaatccagccaggcggcgcaggggtcgggctggggggcgcgtggttctggctcccgcctcggcaggtgttgcgcgtcctgctcgggtaaatctagaaggctgcgcacggtgaagctcaggcgtccagaggtggccatggccg

SEQ ID NO: 290109 - DNA, 70 bp, Homo sapiens; identical to SEQ ID NO: 203531
  chr14:37116035-37116105
  hyper

SEQ ID NO: 290110 - DNA, 114 bp, Homo sapiens
  chr14:37129247-37129361
  hyper
gtctgtgaggggggaggaggattccttcctggtcaagttgccgggcatgttcattccctcccgcaagcctaaggcagagtcataagctcccctacgatgcggcaaagtctcaac

SEQ ID NO: 290111 - DNA, 326 bp, Homo sapiens
  chr14:37130817-37131143
  hyper
attcagcattttaccagcctgattttgctgtctttttgtgccgcttctgggaagatgtcaaacacccattttcattgtatttagtcacccaggtggggagctagcctgaaagagacagcggaaggagtttcctggactgcgctgtcgctcaccgacccgcaccaatcaccatgcagcttgccctcggacccgccccttttagggcgtgtccccagtgagtgatagacggagccgccctgccctgctcagcccagcccacgttgctgcttagattgaaatgcagaactcaagcctctttcatcggggcacagacttccttttacttc

SEQ ID NO: 290112 - DNA, 491 bp, Homo sapiens
  chr14:37131343-37131834
  hyper
ggagcgagcgggcaagggagggagggagggagggagcgcgagggcgcgcgccactaggcgctcacattctctattgactttgctcgtgttcctacaagttgtaggaacacgctaagggtcagcggcgcacagcagttcaatgtgaacgctggctactgggtggctgttgatgccattttctgattttaagagaagggagctgtggcatcagcgagcccctcagcccgagtagcaaaccaagttttgtttcacacgcgcgcacacatgcaaacaaaacaggaaaagaaaagaaaagaaaacaaacaacaacaaataaaacaccctctagcttcccctagactttgtttaactggccgggtctccagaaggaacgctggggatgggatgggtggagagagggagcggctcaaggactttagtgaggagcaggcgagaaggagcacgttcaggcgtcaagaccgatttctccccctgcttcgggagacttttga

SEQ ID NO: 290113 - DNA, 174 bp, Homo sapiens; identical to SEQ ID NO: 203534
  chr14:37131888-37132062
  hyper

SEQ ID NO: 290114 - DNA, 99 bp, Homo sapiens
  chr14:37133569-37133668
  hyper
ggtccccgggtccccgagaatgcaagtggatatctatctagttcctgcatgttttaagcagtgccaccccactgtttctttcctttctcacccctgacc

SEQ ID NO: 290115 - DNA, 216 bp, Homo sapiens
  chr14:37135420-37135636
  hyper
tgtcttccctcaggcgtgggtcagagaatttggaaaggcctactctgaggggagtaaaacttcaccaggccctgggctggaagcacaggaggtcgcggctgggcccagcgccctcgggaggccaagggcagggagccgacccaaggtctaagccctccagctctccgtcgcgggtttgggtcccgtctcaagagtggggcgcgcgggctgggcctc

SEQ ID NO: 290116 - DNA, 36 bp, Homo sapiens; identical to SEQ ID NO: 203536
  chr14:37136618-37136654
  hyper

SEQ ID NO: 290117 - DNA, 590 bp, Homo sapiens
  chr14:37641120-37641710
  hyper
aactaagtcagaccgaactggatcattttcaagtaaaataggtagcaaggcaaaaagaccgcctcaaagtcgctgcccttggggctctgccacttgctttacaggctaggaacggacaatgccgggaacccgagagcggccggcgcggacgccgaggcaactttacttggggcacccactactcgcaatcaactcccggcctcctctgctctcgcgcctctaggggctcaagcactgctccgggagcgctgaattttgaggaagagggcagaacttcagtaaggagacctgtctgggcaacggtttcaggacacgcggtggggaaagcgactagcctccggcggggcagggcgggctgtccttacctgcagaaccaccggccacgatctgccgagaagcctcgcgcactaagctgacttcaggcttggcggacatcttcgccaggcgggaggacaagggagtgggctgagatgcgtcaacgagctcgcagcctgcacagcctactgatccagagagccccggctgggctggtcctcaagcgcgttggctccctgtggagcagcaatccggcgactgctggaaagcgaggg

SEQ ID NO: 290118 - DNA, 200 bp, Homo sapiens; identical to SEQ ID NO: 203537
  chr14:37641762-37641962
  hyper

SEQ ID NO: 290119 - DNA, 118 bp, Homo sapiens; identical to SEQ ID NO: 203538
  chr14:37666992-37667110
  hyper

SEQ ID NO: 290120 - DNA, 232 bp, Homo sapiens; identical to SEQ ID NO: 203539
  chr14:38052533-38052765
  hyper

SEQ ID NO: 290121 - DNA, 185 bp, Homo sapiens; identical to SEQ ID NO: 203540
  chr14:38053203-38053388
  hyper

SEQ ID NO: 290122 - DNA, 124 bp, Homo sapiens; identical to SEQ ID NO: 203541
  chr14:38056999-38057123
  hyper

SEQ ID NO: 290123 - DNA, 299 bp, Homo sapiens; identical to SEQ ID NO: 203542
  chr14:38057503-38057802
  hyper

SEQ ID NO: 290124 - DNA, 176 bp, Homo sapiens; identical to SEQ ID NO: 203543
  chr14:38057832-38058008
  hyper

SEQ ID NO: 290125 - DNA, 100 bp, Homo sapiens; identical to SEQ ID NO: 203544
  chr14:38058220-38058320
  hyper

SEQ ID NO: 290126 - DNA, 230 bp, Homo sapiens; identical to SEQ ID NO: 203545
  chr14:38058546-38058776
  hyper

SEQ ID NO: 290127 - DNA, 101 bp, Homo sapiens; identical to SEQ ID NO: 203546
  chr14:38060543-38060644
  hyper

SEQ ID NO: 290128 - DNA, 599 bp, Homo sapiens; identical to SEQ ID NO: 203547
  chr14:38061332-38061931
  hyper

SEQ ID NO: 290129 - DNA, 230 bp, Homo sapiens; identical to SEQ ID NO: 203548
  chr14:38062091-38062321
  hyper

SEQ ID NO: 290130 - DNA, 424 bp, Homo sapiens
  chr14:38063549-38063973
  hyper
ctagcgccacccagcggttttagagaaggagcacacttctccccaaatagggcttttgaagaacaagttttacaaaatttagaaatcgtttcattattgagacacccaacttggcggcagagcgctttaatcagaagacgtctgcgaattaaacggtgggacgaagaggtcgccttgtgggtatgctccggctttctcagagttgcttccaactcgcaccggcgctcgcccgcccgctgcaccccgggcccggctcctgctcccgctcgctgctgggaagaggcaagcgcttcctagagccgctgttttcaaagcccggagtttcctaaaactccctctccggctgcgagagtcgggacagagcagggcagcaggtcccgcttccaggcccggccaaggcccggccggggccacaccggcgggc

SEQ ID NO: 290131 - DNA, 304 bp, Homo sapiens
  chr14:38064003-38064307
  hyper
ggcccgcctgcctgccttgcctggcgcccaccgctccccggcctcccccggcacgggctccagcggcgccccaccggccgcccgcctcgccttgcctctcacctcctgcgtgtctgcgtagtagctgttccagtcgctggtttcatgcccttccatcttcacagttcctaacatcctggagccaccctgcccaatacaaccatccagccctgtgcgaagcgacgggcggccgcgcggcgcggggcgggggaggggagctgagcagctgcagtcacccgagcgcccgcgcgggcccaacgccacc

SEQ ID NO: 290132 - DNA, 446 bp, Homo sapiens; identical to SEQ ID NO: 203551
  chr14:38064549-38064995
  hyper

SEQ ID NO: 290133 - DNA, 643 bp, Homo sapiens; identical to SEQ ID NO: 203552
  chr14:38065025-38065668
  hyper

SEQ ID NO: 290134 - DNA, 68 bp, Homo sapiens
  chr14:38072483-38072551
  hyper
ctggacctgatgcccggattctggcaatcgtcagttgtaggaacaaagtctggagtagtggctggcat

SEQ ID NO: 290135 - DNA, 42 bp, Homo sapiens
  chr14:38072679-38072721
  hyper
ggaggaagactctgggataattggcaccgcaaaaatttcctt

SEQ ID NO: 290136 - DNA, 179 bp, Homo sapiens; identical to SEQ ID NO: 203553
  chr14:38677134-38677313
  hyper

SEQ ID NO: 290137 - DNA, 31 bp, Homo sapiens; identical to SEQ ID NO: 203554
  chr14:38677488-38677519
  hyper

SEQ ID NO: 290138 - DNA, 213 bp, Homo sapiens; identical to SEQ ID NO: 203555
  chr14:38677548-38677761
  hyper

SEQ ID NO: 290139 - DNA, 382 bp, Homo sapiens; identical to SEQ ID NO: 203556
  chr14:38677790-38678172
  hyper

SEQ ID NO: 290140 - DNA, 316 bp, Homo sapiens; identical to SEQ ID NO: 203557
  chr14:38678202-38678518
  hyper

SEQ ID NO: 290141 - DNA, 52 bp, Homo sapiens; identical to SEQ ID NO: 203558
  chr14:38725469-38725521
  hyper

SEQ ID NO: 290142 - DNA, 83 bp, Homo sapiens; identical to SEQ ID NO: 203559
  chr14:39583445-39583528
  hyper

SEQ ID NO: 290143 - DNA, 243 bp, Homo sapiens; identical to SEQ ID NO: 203560
  chr14:39735535-39735778
  hyper

SEQ ID NO: 290144 - DNA, 242 bp, Homo sapiens; identical to SEQ ID NO: 203561
  chr14:42076386-42076628
  hyper

SEQ ID NO: 290145 - DNA, 51 bp, Homo sapiens; identical to SEQ ID NO: 203562
  chr14:42077719-42077770
  hyper

SEQ ID NO: 290146 - DNA, 53 bp, Homo sapiens; identical to SEQ ID NO: 237393
  chr14:45366374-45366427
  hyper

SEQ ID NO: 290147 - DNA, 215 bp, Homo sapiens; identical to SEQ ID NO: 203563
  chr14:45431367-45431582
  hyper

SEQ ID NO: 290148 - DNA, 85 bp, Homo sapiens; identical to SEQ ID NO: 237395
  chr14:45553394-45553479
  hyper

SEQ ID NO: 290149 - DNA, 89 bp, Homo sapiens; identical to SEQ ID NO: 203564
  chr14:45603790-45603879
  hyper

SEQ ID NO: 290150 - DNA, 34 bp, Homo sapiens; identical to SEQ ID NO: 237397
  chr14:45722603-45722637
  hyper

SEQ ID NO: 290151 - DNA, 144 bp, Homo sapiens; identical to SEQ ID NO: 237399
  chr14:50053096-50053240
  hyper

SEQ ID NO: 290152 - DNA, 242 bp, Homo sapiens; identical to SEQ ID NO: 237400
  chr14:50234378-50234620
  hyper

SEQ ID NO: 290153 - DNA, 315 bp, Homo sapiens; identical to SEQ ID NO: 237401
  chr14:50319666-50319981
  hyper

SEQ ID NO: 290154 - DNA, 115 bp, Homo sapiens; identical to SEQ ID NO: 237402
  chr14:50329599-50329714
  hyper

SEQ ID NO: 290155 - DNA, 256 bp, Homo sapiens; identical to SEQ ID NO: 237403
  chr14:50359202-50359458
  hyper

SEQ ID NO: 290156 - DNA, 615 bp, Homo sapiens; identical to SEQ ID NO: 237404
  chr14:50469903-50470518
  hyper

SEQ ID NO: 290157 - DNA, 118 bp, Homo sapiens; identical to SEQ ID NO: 203565
  chr14:50511811-50511929
  hyper

SEQ ID NO: 290158 - DNA, 239 bp, Homo sapiens; identical to SEQ ID NO: 237406
  chr14:50698773-50699012
  hyper

SEQ ID NO: 290159 - DNA, 205 bp, Homo sapiens; identical to SEQ ID NO: 237407
  chr14:50778818-50779023
  hyper

SEQ ID NO: 290160 - DNA, 276 bp, Homo sapiens
  chr14:50999522-50999798
  hyper
gaaataaggcacacgcctgggcattcgtgggccaacgggccttggctaaaccgtccccacatttgtcaggtaggcctgtagggtgacgggtagaggaagaagggcgatgggaacgtagccctccaagttaaacacggaaaaggtacgttaagggcaccgggccagaagtaacctggcagcggggcgccggggaaggaggtgggggagtgccaggttaactaagtcccggcacaccctactgcaccttcctgttttgcaaaccgatcccggtggtac

SEQ ID NO: 290161 - DNA, 711 bp, Homo sapiens
  chr14:51027134-51027845
  hyper
gacgggccgtagccgagccgctccctgtttgggcggaggaaccatggccgagcggtacccgcgtcaccgaatcgcgctgtcggggtgagggctgcagcttcgcgcaggccgggcctccagctccttcttccccacccccctcccgcctcctcccagcatttggacagcacccaccaggcgcctccggggacttgtgggttccgccttagcgatcggttgggaggaaggctatgggggtgggcagggggctgttgttactcggccccagaggggcgaggggtcggggatctagagcaggccaagccccaacccccctccccgggagccgccaactcgctggctctgcagggcgcgggctcccggcggcgggcggcgggcggcgcgctggaacaatgaggcggagcgcgccgggtcccggacggacggtagcagaccgagcaactgggagaagggccaccctcttgggaattcctgagcactgcagtactcctcttaatttgggggttgggtgggggaattggggaagaaggagagcaaagttgtggtttccagccttctgccccaccccgacgtggtaccccattcagaccagccccaagggtggctttgttctttgattttaccttttggagacattgggctcatgattcagcaccaggccgaggggaggggaaaggagaggcgagacccagtatgttcacaccgcgagtg

SEQ ID NO: 290162 - DNA, 125 bp, Homo sapiens; identical to SEQ ID NO: 203568
  chr14:51027881-51028006
  hyper

SEQ ID NO: 290163 - DNA, 97 bp, Homo sapiens
  chr14:51410199-51410296
  hyper
ggagtgtgtgtcttcggggaggacgagtccagggcattgcctggccctgggccgcctttgcgaaagactcacggaattccaggagctacacccactc

SEQ ID NO: 290164 - DNA, 224 bp, Homo sapiens; identical to SEQ ID NO: 203569
  chr14:51410345-51410569
  hyper

SEQ ID NO: 290165 - DNA, 293 bp, Homo sapiens; identical to SEQ ID NO: 203570
  chr14:51410740-51411033
  hyper

SEQ ID NO: 290166 - DNA, 274 bp, Homo sapiens
  chr14:51411159-51411433
  hyper
gctggaagtgcggccggaggcgctgggctgccgggcaggggtggagtccgccccgccgcgccagcagctttcaacgcgcacgaaagtttggggcccgccccctcgggcggtgccgtccccgctgcactcccaccgcgtcccggcccctgccccaggccggagggcagaggaagtgcccggcccctcccgaggctctggggccgcagtgggctcgggggtgggagacgaggtccaagcgccggcgagacccctgccagcccgggacctgggctcg

SEQ ID NO: 290167 - DNA, 223 bp, Homo sapiens; identical to SEQ ID NO: 203572
  chr14:51562012-51562235
  hyper

SEQ ID NO: 290168 - DNA, 1663 bp, Homo sapiens
  chr14:52117843-52119506
  hyper
ccccaaagccactatcgggaggggacaaaaataatttctgaggggccatgggcactaaaaccacagcagacagaggctgtgtctacctgaggaactggagaggtagaattagagggggaggctgggcatcctcggcggcgccccctccatccagcgtgaaacccacgaggcgcggcgtctcgagtggcgggcgggcagggggctgcaggattcacgaagccacctccgccggggaccgccttctctcggagtggcctcccctccggcgttccgctttagtaagacgacactcaggccaaacagccgcccccggccagcccgactcggctctggagggagcgccccgagggagtccagccggaggcggagaaggccactcggccagaaggtggggagccgccggcgtcccctcgcacctccgtctccacagcagggggaaaggccctgatcgccgtggtccacaccaccgcgtccacctgaggctcgcctcgcttcctgggtccctagaggggtggcgtactccgctttctcctgcccccaagtggccgcacccctccgcgggacgcttggttgggtccagggcggggcgggcgggcgctccccgtactgccgcgagctcagcgcgcagctcccgcggctcggctgccgccgcggccagttggggcgggtcgggggcggggtctcagggggcggggattcgggggggcgggtcgggtcgggaggcgtgggtggggggcggggcggacgcggagcgcccctctggctggcggggccaaggggctgagaggagtggggcaggctcggcgccggtaggaagagtcagaggggtgaccagagagcccaacgcctggtgctcaagactttctccgaggtatgaacaagaaccaggcgtctgggccctttccgctcgccccatcgctcagccgccgcgccccggacgcccgctgtgccccctgccggcggggcggcggcgggactgggtttcgggagggtttctggaagtcgcgagtcccagcgaaggcagtgcaccgctctccgcctctttcttcgccttcttctcgctcccttagctctgggtgtcgggcaccggtggtaaggtcgcttctccgtgagtcggaggtcgctcactctgggacgggcggacgaggccctagggcagccgagcccggcagcgggggaggcgtggagctcggggcggcttcagcggcgggggcgggaggctggtcctggctgcagactgcgcgcctgggctccgtgcgcggtccctggttctctgcatcgcggaggtccccggatcacagggctccctggcgggccccggcacccaggtctgtgtcgctgtggctgggcgccgggactagcacccgagtcccgcgctcccgggggctgcgccgtgccgcctgttgtgcgcgcgcagaggccggacagcccggctgcgggaagggacccgagcgcagggtctgccccgcgtcccggaaagtgcctagtctgcggagccggaggttgagctggggcagatcggcgccagacgggggcctgggtgagatacgagttgggggtgcggcctgcagaatttgggtttctggaggagcttacggcgcgctggcggagccccaggcgaacaggagcaccggattcggctccgggagggccaggcactgtc

SEQ ID NO: 290169 - DNA, 39 bp, Homo sapiens
  chr14:52119545-52119584
  hyper
tctacagagattaaaacaacacctcgagtcctgggacag

SEQ ID NO: 290170 - DNA, 402 bp, Homo sapiens; identical to SEQ ID NO: 203574
  chr14:52313655-52314057
  hyper

SEQ ID NO: 290171 - DNA, 301 bp, Homo sapiens; identical to SEQ ID NO: 203575
  chr14:52327326-52327627
  hyper

SEQ ID NO: 290172 - DNA, 44 bp, Homo sapiens; identical to SEQ ID NO: 203576
  chr14:52455679-52455723
  hyper

SEQ ID NO: 290173 - DNA, 75 bp, Homo sapiens; identical to SEQ ID NO: 203577
  chr14:52455753-52455828
  hyper

SEQ ID NO: 290174 - DNA, 146 bp, Homo sapiens
  chr14:52536504-52536650
  hyper
catgaaatactactgtgtgtgatccgctccgtttggggagtaggatgaggcatcccgcttggttaccaggcagaaaggggcgagtcgcggggatgggaagaccctgatctcttgcccattgctgcggccgtcggagatgccctccc

SEQ ID NO: 290175 - DNA, 210 bp, Homo sapiens; identical to SEQ ID NO: 203579
  chr14:52734271-52734481
  hyper

SEQ ID NO: 290176 - DNA, 136 bp, Homo sapiens
  chr14:52735582-52735718
  hyper
ttagagaaaggaagggaaaggctgagcccggcggtgtctccctagcccagcaaaaccctctccatgtggcagaactccctcctctctgcttccttctggggagatctcgaggtcatttttgcgccttaggaggagc

SEQ ID NO: 290177 - DNA, 88 bp, Homo sapiens
  chr14:52780743-52780831
  hyper
cgagaaacgccgctcccgccggtcgcgggcagcttcagtacaccggcaacacgcgcgcctctgcccagtgccgcgcccagcgggtgct

SEQ ID NO: 290178 - DNA, 325 bp, Homo sapiens; identical to SEQ ID NO: 203581
  chr14:52781103-52781428
  hyper

SEQ ID NO: 290179 - DNA, 79 bp, Homo sapiens; identical to SEQ ID NO: 203582
  chr14:52782046-52782125
  hyper

SEQ ID NO: 290180 - DNA, 38 bp, Homo sapiens; identical to SEQ ID NO: 203583
  chr14:52782173-52782211
  hyper

SEQ ID NO: 290181 - DNA, 40 bp, Homo sapiens; identical to SEQ ID NO: 203584
  chr14:53161604-53161644
  hyper

SEQ ID NO: 290182 - DNA, 82 bp, Homo sapiens; identical to SEQ ID NO: 237425
  chr14:53162609-53162691
  hyper

SEQ ID NO: 290183 - DNA, 202 bp, Homo sapiens; identical to SEQ ID NO: 203585
  chr14:53173877-53174079
  hyper

SEQ ID NO: 290184 - DNA, 169 bp, Homo sapiens; identical to SEQ ID NO: 203586
  chr14:53196918-53197087
  hyper

SEQ ID NO: 290185 - DNA, 544 bp, Homo sapiens; identical to SEQ ID NO: 237428
  chr14:53257754-53258298
  hyper

SEQ ID NO: 290186 - DNA, 511 bp, Homo sapiens
  chr14:53417820-53418331
  hyper
ccgccccctctgtccgagcctggctgggctgggcgcgctggctccctccttcgccgcccgcagagctgccctgagcgggtccggccggcctcgcctctgcccccgccctcccggcgccgcgctcgggggagggggctgcgggtcccgggcggggcggggcggcgtggggcggggcggcgcgggggtggcggggggcgcggcggggcggcaatctcggccccgcggagcgctgcccttttatggaaatgaaggacccggctcaggaattgaatccaacatccgggctctaggcggcgggccctgaggagggggagcgggggagcgcgggcggcctttcccggggcgctggtggccggcggggcgtctagagctcaggctggactggggcccccgcggcgtgtgtccgcgctggcagcagggagagggggcttgtccgtgagaaacggccccaggaaattcccagggcaaggtcgttttcggagaacaaagtcctctcgccccctccccacgc

SEQ ID NO: 290187 - DNA, 40 bp, Homo sapiens; identical to SEQ ID NO: 237430
  chr14:53619297-53619337
  hyper

SEQ ID NO: 290188 - DNA, 71 bp, Homo sapiens; identical to SEQ ID NO: 237431
  chr14:53619544-53619615
  hyper

SEQ ID NO: 290189 - DNA, 1007 bp, Homo sapiens
  chr14:54420072-54421079
  hyper
gaagctgcagcagtgcgttgctcgggatggcactacggaatggctcctaaaaggaatatttgaatataatgagactccaccgcagacaggctctgtttttcttccagcccctcggagtcacgtgagcgccgaggcccctcccgcggcaggcggcgaaagggcttgcgcgccctcccctcctccacagccccccgcccctcgcgggcccgcccctccaggcgaggccaacctccgcgcccgccgcccgagcctcagcggtccgggaggagctcccggcggcgctcggcagagccctcggccggtgccccgcggccgccgcgctcccagggctactggcgcagcgcacggagaacccggttctcggcgcggtgcgtcgtgctgggcccccgcgccgggccacctgaagccagaggatttggggcgcactgaagggactgcgtctcccagctcgaacccggcttaagtggggccgggagcgaggtcgggaaagtctcacccgcccaaagcctcaccaccgagaggcacttaaaaaggaaagcgcagagggaccctgcccacgcgcgtgtacacacacacccccccacacacacacaagcaaacacgagctccccgccacttcctccccagggtctcctcaaggccaaatattgctcccaatgacagccagtcaccccttggcgaacgcctgctaaggctccgaagagccgggccaccgatctagctcccggctgaaagcagccgaccttgtcacgcgcggggccgggaatgggagggagggtgttagagggtgatcgctgtgggaaagtgagagggagcggctgttagtcattgctccgggtccattaccgagaatccccaaacctagtccgccgctgcgtggcccctctccccatgcaaagcagacccccgaagaagccatgccaggctgagggacagacgccggggctcgaagctccgggcagattcagaaagaggcgtcgctgcagaaaggacgcatcacagttttc

SEQ ID NO: 290190 - DNA, 420 bp, Homo sapiens
  chr14:54421301-54421721
  hyper
agagtcgcacgcagcaaatactccttcaagaattttacctacctacagttcaagcagttactgggatgtcctgactaatcgaagatgctgccgcgcgcgtgggtcgctctgcgcaagggcctcttcgaaaacccgactaggcgcaactcagcgttcagcagggccgggagcgccaggtcgtccccggggcccgggccccatgactcctgccccaaagcccactccacccgacctccctttcctgaggctgttcccagttgctgctttgggtcgctccggagctcaagaactcgggttgcctgccgccccactctccacgcacatacttggttttcttcttaggggcattggcaggtagactttgaggaagaaaagtaaaggatcgaacagctcagccctccctcccgaccgtggatgccc

SEQ ID NO: 290191 - DNA, 510 bp, Homo sapiens
  chr14:54421831-54422341
  hyper
cgctggggcgggctgcgaaagggttgggaagagcaaagggtttttttgttttgttttgagacgcagaagccctttaaaaagcccggcgaggagaggtccagaagtagagaaagcagacggaggcaagctgtgcccgcggggcaaagggacagtagaaggggcgggcgcccgggttccccggaaaaccctcggccccaaggaatctcctggggcgggagagcgcggttctaaaaccgagaggataggaaggggaagggggagttgtgtttcaatttcggattcaccaggattcatctctagtcacatttttcttctcaaatttttaaatcgaaaagataaaagccaaaagaactttcatccccagagctttttattgggggaaaggaatgtaactcggggtggttgtccttcacttccctactcgaatcttctcctaatgccgaaatgtgtttacaggtagcctcagtttaccaagtatgtatcttttgggggtttaacctctcacaaagc

SEQ ID NO: 290192 - DNA, 39 bp, Homo sapiens; identical to SEQ ID NO: 203590
  chr14:54422971-54423010
  hyper

SEQ ID NO: 290193 - DNA, 104 bp, Homo sapiens
  chr14:54423265-54423369
  hyper
accataggtccctgcagtagcgggctcgccagcagcagctcctggggacctctgaacggttgcagtgaacctgggcgagggccggggactgtggcgctgcaggc

SEQ ID NO: 290194 - DNA, 45 bp, Homo sapiens
  chr14:54423475-54423520
  hyper
cctagcttccgggccgggctccgcgctccttccctccctccctcc

SEQ ID NO: 290195 - DNA, 76 bp, Homo sapiens; identical to SEQ ID NO: 203591
  chr14:54430607-54430683
  hyper

SEQ ID NO: 290196 - DNA, 101 bp, Homo sapiens
  chr14:54686919-54687020
  hyper
actgacttgatttgcgaagacacgcatgccttttccgagttggactgacgcacgccctcccggagcccgccccccatccgcagcccagttcggcgctcaca

SEQ ID NO: 290197 - DNA, 204 bp, Homo sapiens
  chr14:54687050-54687254
  hyper
aatgagcatccccctggaactgcctgccctttatcttgctggggggacccgcaccttttgaactgccatctgtagattgtgttggtgcactgacttgttaactgtgccacgctgtgaaggaaatggcatgatttagatcaagtgctcacgacggctgttcataagaaacacttgagccaagctgttgctgctcagaatgtgccc

SEQ ID NO: 290198 - DNA, 33 bp, Homo sapiens; identical to SEQ ID NO: 203593
  chr14:54687296-54687329
  hyper

SEQ ID NO: 290199 - DNA, 290 bp, Homo sapiens; identical to SEQ ID NO: 237436
  chr14:54908014-54908304
  hyper

SEQ ID NO: 290200 - DNA, 432 bp, Homo sapiens; identical to SEQ ID NO: 237437
  chr14:54976301-54976733
  hyper

SEQ ID NO: 290201 - DNA, 44 bp, Homo sapiens
  chr14:55032358-55032402
  hyper
ggccccagaagggccgagggtcagccgagcggacgaaccacatt

SEQ ID NO: 290202 - DNA, 576 bp, Homo sapiens; identical to SEQ ID NO: 237438
  chr14:55367881-55368457
  hyper

SEQ ID NO: 290203 - DNA, 196 bp, Homo sapiens; identical to SEQ ID NO: 237439
  chr14:55493977-55494173
  hyper

SEQ ID NO: 290204 - DNA, 87 bp, Homo sapiens; identical to SEQ ID NO: 124608
  chr14:55518071-55518158
  hyper

SEQ ID NO: 290205 - DNA, 128 bp, Homo sapiens; identical to SEQ ID NO: 203595
  chr14:55595810-55595938
  hyper

SEQ ID NO: 290206 - DNA, 133 bp, Homo sapiens; identical to SEQ ID NO: 203596
  chr14:55595968-55596101
  hyper

SEQ ID NO: 290207 - DNA, 458 bp, Homo sapiens; identical to SEQ ID NO: 203597
  chr14:55596153-55596611
  hyper

SEQ ID NO: 290208 - DNA, 179 bp, Homo sapiens
  chr14:56047800-56047979
  hyper
agtttccaaaagtgagatttttggccttggggacctcgccggaaaactacgcgggaagtctagagaagtcgtctggctctcagccatacgtctggtgtgggatgtgcagccccgcatgctggcggtgaaggcgctgggtgcactagatgtgggcagccccggacgcgggcagcggcgtc

SEQ ID NO: 290209 - DNA, 567 bp, Homo sapiens; identical to SEQ ID NO: 224694
  chr14:56585472-56586039
  hyper

SEQ ID NO: 290210 - DNA, 195 bp, Homo sapiens; identical to SEQ ID NO: 237442
  chr14:57046229-57046424
  hyper

SEQ ID NO: 290211 - DNA, 158 bp, Homo sapiens; identical to SEQ ID NO: 124629
  chr14:57265912-57266070
  hyper

SEQ ID NO: 290212 - DNA, 42 bp, Homo sapiens; identical to SEQ ID NO: 203599
  chr14:57270894-57270936
  hyper

SEQ ID NO: 290213 - DNA, 110 bp, Homo sapiens; identical to SEQ ID NO: 203600
  chr14:57272911-57273021
  hyper

SEQ ID NO: 290214 - DNA, 206 bp, Homo sapiens
  chr14:57277241-57277447
  hyper
caatggcagggagagaatgattgacacatctaagccagagggaaaataataaaaacacacaacagggggaggaaaacaggccgctgctgcacggggggacgagcaggcaacaaatccaggcctccgacattaccagaatgttctttaaagacactgggctttgcttaaaatatacattatgggccggagcatgtgaactaattgta

SEQ ID NO: 290215 - DNA, 33 bp, Homo sapiens; identical to SEQ ID NO: 203601
  chr14:57279657-57279690
  hyper

SEQ ID NO: 290216 - DNA, 39 bp, Homo sapiens; identical to SEQ ID NO: 237453
  chr14:57281266-57281305
  hyper

SEQ ID NO: 290217 - DNA, 513 bp, Homo sapiens; identical to SEQ ID NO: 237455
  chr14:57735567-57736080
  hyper

SEQ ID NO: 290218 - DNA, 88 bp, Homo sapiens; identical to SEQ ID NO: 237456
  chr14:57858261-57858349
  hyper

SEQ ID NO: 290219 - DNA, 145 bp, Homo sapiens
  chr14:58331877-58332022
  hyper
cctcctaaagatactgtaaccggagtaactcccgcgctggcagcgtctcaacagcccggagtgaacgagctgaccccaccagcgccgggacccacgtctgggtcggccgcccccgccagccccacccccgagcctccccagcctg

SEQ ID NO: 290220 - DNA, 108 bp, Homo sapiens; identical to SEQ ID NO: 203603
  chr14:58332055-58332163
  hyper

SEQ ID NO: 290221 - DNA, 113 bp, Homo sapiens
  chr14:58332405-58332518
  hyper
cccgcctcgcgcagggcagccgcgcggcgtcttacttttctggctggagtaacctggataatagccatagtagccggtgatccgcaggatccggtcctcgatagtggccaccc

SEQ ID NO: 290222 - DNA, 47 bp, Homo sapiens
  chr14:58332593-58332640
  hyper
cggggcccgggagctggtgcaggtgccggagccgctggtgctgatct

SEQ ID NO: 290223 - DNA, 174 bp, Homo sapiens; identical to SEQ ID NO: 124657
  chr14:58332908-58333082
  hyper

SEQ ID NO: 290224 - DNA, 35 bp, Homo sapiens; identical to SEQ ID NO: 237458
  chr14:58619016-58619051
  hyper

SEQ ID NO: 290225 - DNA, 244 bp, Homo sapiens; identical to SEQ ID NO: 237459
  chr14:58711341-58711585
  hyper

SEQ ID NO: 290226 - DNA, 121 bp, Homo sapiens; identical to SEQ ID NO: 237460
  chr14:58766356-58766477
  hyper

SEQ ID NO: 290227 - DNA, 240 bp, Homo sapiens; identical to SEQ ID NO: 224696
  chr14:58862950-58863190
  hyper

SEQ ID NO: 290228 - DNA, 172 bp, Homo sapiens; identical to SEQ ID NO: 237461
  chr14:59655229-59655401
  hyper

SEQ ID NO: 290229 - DNA, 174 bp, Homo sapiens
  chr14:60043607-60043781
  hyper
taccctcctggttctctaattttatccacgataattaagcagtctgggaagaatgactctctctttagctaatttttcccctttcaatttccattgcgttagttcaggcctgtatcttttttgtgggccactggaatcataataatgatcacttttgagcgcatctttgtgccg

SEQ ID NO: 290230 - DNA, 83 bp, Homo sapiens; identical to SEQ ID NO: 203605
  chr14:60097110-60097193
  hyper

SEQ ID NO: 290231 - DNA, 652 bp, Homo sapiens
  chr14:60337053-60337705
  hyper
actggggggccctggtccccgacgccatttgaggggcagcggcgcccgccttacctgtggatgcagtttccatggcaacgggcgactgccgggcggggcccgagccggcttcccgcgacgccgcttcccgggccctggcgcccaaccccgggctgggctccccagcctgcggcgccggcgtggcccctttcggcgtcaccgcttcgttctccccctccccccggtgcctgagccactgggacccggggccggccagcggcagcagctcgtcctgcggatcccccggcgcggccatggctggcggtcccccggcgcggcgacggcggcttggctgggcagaggctcggtggctgcgcgggcgctccctgctgctgtccccggagggactcggcgctcagggaagctgcggtgtctcagcgtcgccgccgcctctgctgcaactccgccgagccgctgcctgccgctcttcccgcttcagctcctccttctcccccctcctcttcctccggccccgccgcggccgctgcctgcgctcctcctcctactccactcgctgctgccgccgctgcttcgctattcccaatcctgttattacgcaggtgaaaatggcctgcttggtccgggtcctcctgggcacgtcagcccccaacct

SEQ ID NO: 290232 - DNA, 58 bp, Homo sapiens; identical to SEQ ID NO: 203606
  chr14:60385921-60385979
  hyper

SEQ ID NO: 290233 - DNA, 197 bp, Homo sapiens; identical to SEQ ID NO: 203607
  chr14:60558407-60558604
  hyper

SEQ ID NO: 290234 - DNA, 75 bp, Homo sapiens; identical to SEQ ID NO: 203608
  chr14:60794398-60794473
  hyper

SEQ ID NO: 290235 - DNA, 64 bp, Homo sapiens
  chr14:60798393-60798457
  hyper
ggctgctctggggacttggccgctttgtcacccgtgccggaagctcacaggccccggagatccc

SEQ ID NO: 290236 - DNA, 40 bp, Homo sapiens; identical to SEQ ID NO: 237471
  chr14:60972828-60972868
  hyper

SEQ ID NO: 290237 - DNA, 276 bp, Homo sapiens
  chr14:60974092-60974368
  hyper
aaagttgtccttccggctgattcggaagtcgctccaagggaaagaaggtttatgctttgtcattatcttcatcgccctctttattttgcccctgccttgtcgtatttcaagaaaatgaactcttagaaaagaaagcctctccgttgaggcggttggcaatctcacagaaatgatgtaaatggtttcagggcttttttcttcccctctgctatttttttcgagtgaactgtgaagatctgtgaaaataatatcagggttttccgtcagaacgagctt

SEQ ID NO: 290238 - DNA, 131 bp, Homo sapiens
  chr14:60974415-60974546
  hyper
tctgtgctatctatctgccttctgatttaccagatctgtacaagccgcatacaaattgtacttgatactaaagaaaagacagtcgggtccagtccagttcggctgtgaacgttctcacctgatttctgtct

SEQ ID NO: 290239 - DNA, 136 bp, Homo sapiens; identical to SEQ ID NO: 203610
  chr14:60982999-60983135
  hyper

SEQ ID NO: 290240 - DNA, 188 bp, Homo sapiens; identical to SEQ ID NO: 203611
  chr14:61104864-61105052
  hyper

SEQ ID NO: 290241 - DNA, 281 bp, Homo sapiens; identical to SEQ ID NO: 203612
  chr14:61108286-61108567
  hyper

SEQ ID NO: 290242 - DNA, 115 bp, Homo sapiens
  chr14:61108996-61109111
  hyper
gcgggaagcgcggggcctgggaggcagggagcgctcacacctgcggtcgggcaggaggcgcaacgcgctgccagggcggctttatcctgccgccacagggcggggaccagcccgg

SEQ ID NO: 290243 - DNA, 240 bp, Homo sapiens
  chr14:61110268-61110508
  hyper
gattcagttaaactgcgacgcccagaaggtaaactggaggtcccttaacagctggttctcgaagatttcctcgagggaagaaaaaaatatggttagtttcccctaatgatctctctgaaatgattgccaaaaaaactcaaagcaatatccagctttctcgcctcctcctgctcgccccttttacccagactgagccgaggatggcggaaggaggcacattgtgcaatttcttattaaaca

SEQ ID NO: 290244 - DNA, 188 bp, Homo sapiens
  chr14:61113926-61114114
  hyper
ctggagtcggccctcgggcctggcttataggacggccgttttgtaactaaaggctaactgcaaccatacaatccctgttcctgtgttacttgctaactcttcagcccctcgtgtccccctctcaaacttcctaccaacacccaccccaacccatcctttctgggcaggggaaacttcgccgccccgca

SEQ ID NO: 290245 - DNA, 275 bp, Homo sapiens
  chr14:61114722-61114997
  hyper
tcttaatttggggcgccggggagtaaatgcagcgccaactctccccaaagctctctttttgttgtatctttaaaagtctcctccatttgtccagctagtgagaaatgaagcaggctacctctaaaccaaaagactatcaagagagagctgtggagaaccaggcgggagtgggggcagagccaatgtctcaggccagcttcacccctctggggagcaagaggagagaggttcgcgaacctcagctcccaccaaacccctttccttgcgacaccaat

SEQ ID NO: 290246 - DNA, 144 bp, Homo sapiens
  chr14:61116724-61116868
  hyper
cagaccagggtccgcgcatgcagcctctggaagagtggcttcgggttggcttcagctcgaggagtccaaccctatttcctcctccctccccccaccaactaccactgtcctccccccactgctgcacaccaccctccaaagggc

SEQ ID NO: 290247 - DNA, 207 bp, Homo sapiens; identical to SEQ ID NO: 203615
  chr14:61117028-61117235
  hyper

SEQ ID NO: 290248 - DNA, 400 bp, Homo sapiens; identical to SEQ ID NO: 203616
  chr14:61119136-61119536
  hyper

SEQ ID NO: 290249 - DNA, 616 bp, Homo sapiens; identical to SEQ ID NO: 203617
  chr14:61119639-61120255
  hyper

SEQ ID NO: 290250 - DNA, 192 bp, Homo sapiens; identical to SEQ ID NO: 237485
  chr14:61120573-61120765
  hyper

SEQ ID NO: 290251 - DNA, 98 bp, Homo sapiens; identical to SEQ ID NO: 237486
  chr14:61122759-61122857
  hyper

SEQ ID NO: 290252 - DNA, 368 bp, Homo sapiens
  chr14:61123172-61123540
  hyper
gcctgtacctcagtcggtgcatacccaagccgtgggatctgtttttgcattctcacacgagcatattgctcgggttctaaaggatccagattttcgcagacagaagctcgaccgcctctgttcccaaaagggccgagcggcgtttgtctgaatcaccagtcctctgagcagtgggaaaagagatactgggtagagggtgctgggaaggtgcccactcatccatgcccctctgcgcgtctcgcccactcgcttaggcttggactttgcaacaaggtttccaacaccgctgcagtgcttgacaaagccctcctggaagccagcagggtgaggctgccagcaagcaggcgggctgcgagggacgcttttag

SEQ ID NO: 290253 - DNA, 623 bp, Homo sapiens
  chr14:61123681-61124304
  hyper
gcgcgcgcagccaagtatccgcgcgcggacgccggggaggcttcaccgcccggtgtgctggcggccccgcccgctggctcgcagagcggggtctcgcagagctgggcctcacccgtcgccccgccgcctgcaccagaaactccctccccgggctgtgcgggagctcttgggcgccgcgtctgcgccggggccgactccgcccaggcttgtagccagaggtcgcgctatctcgccgggctggcccggcgctctctggggttgttccctcgggcggtgcatggggcccacaggcgtcggggcttgagggaagaggggccggggcctgaagggcggggaccacaacgaggcgcggggaggtcagtggagcggagagccggcgcaggccggcggcggcgcggccggaggagaaagagggcgctgtcttcctggcaaaggagttttcgcctggccggcaggaaccgaaacaacaacaacaacaaaaaaaaaagaaagaaagaaaatctgctccgccgagtccccggagtgaagagcgcgcggcgggaagggtctggggtagcggagcggattctcggcccaaagcctggggaccgctcagcccaccttggcttcgccagcgccacgta

SEQ ID NO: 290254 - DNA, 670 bp, Homo sapiens
  chr14:61188627-61189297
  hyper
tttggttaccgcgagggccggatagggcaccaagcctccctcccagccttgggcgaggaacgccggagcccgagccgtcggacccccacaggggcccagaagcggcaagggcgggctgagaccggctctggaatgcgctggtgatcaccttcacctggcgcaggcgggctggatccccggctcccagtttgcttccccgagaagaaccttcgagctgcttttggattctttctctcctatccccgcggggctggagacaccaggtctttaggcgaccttctccttactttgtttcgtccaacaaaacacacagacgcacacaccaagtgtctgactcgggaggacgcacaaaagaggtggaaaatccggtattttttttaccagagggggaaagcagtctgccaggcaaaaagctcaaacccagtggggtgggagcgcccccactcctttgctgccgcccgccgtaagccggcctgccccccacccataactaccgtaccaggagggagccaagcagcgttcgggggccgagggaggaagcagcccttcagccctgctaccccggctgcgctgaaacccgatcctaaggagttcagaatcaggtttcaaaacatgacagagccgagctgcaccagcaccccacgttgccgcggccgctaagggaaccata

SEQ ID NO: 290255 - DNA, 616 bp, Homo sapiens; identical to SEQ ID NO: 237490
  chr14:61201376-61201992
  hyper

SEQ ID NO: 290256 - DNA, 90 bp, Homo sapiens; identical to SEQ ID NO: 237491
  chr14:61447492-61447582
  hyper

SEQ ID NO: 290257 - DNA, 64 bp, Homo sapiens; identical to SEQ ID NO: 203621
  chr14:61748033-61748097
  hyper

SEQ ID NO: 290258 - DNA, 124 bp, Homo sapiens; identical to SEQ ID NO: 203622
  chr14:61788057-61788181
  hyper

SEQ ID NO: 290259 - DNA, 304 bp, Homo sapiens; identical to SEQ ID NO: 203623
  chr14:61788418-61788722
  hyper

SEQ ID NO: 290260 - DNA, 252 bp, Homo sapiens; identical to SEQ ID NO: 203624
  chr14:61789205-61789457
  hyper

SEQ ID NO: 290261 - DNA, 144 bp, Homo sapiens; identical to SEQ ID NO: 203625
  chr14:61943723-61943867
  hyper

SEQ ID NO: 290262 - DNA, 259 bp, Homo sapiens
  chr14:62105861-62106120
  hyper
gcattaatcgtaaccgctaactgcatcaaattaactgtagtacatactgtactactgtcatcattttatagccatctcctgttgccgttgtggtgagctcaactgttgcaggtatccacttaaaacgcgtgtgttgctaatcgtctccaagtaagcagtttatctctctactagatttcttattgttgtaaaaagtgatcttgcggttctcctgtgtctttcatcctgtttagtgcaatactgtaaaccttgaataaca

SEQ ID NO: 290263 - DNA, 88 bp, Homo sapiens; identical to SEQ ID NO: 224706
  chr14:62161813-62161901
  hyper

SEQ ID NO: 290264 - DNA, 920 bp, Homo sapiens
  chr14:62162324-62163244
  hyper
ggagaggctcggagccgggcccggaccccggcgattgccgcccgcttctctctagtctcacgaggggtttcccgcctcgcacccccacctctggacttgcctttccttctcttctccgcgtgtggagggagccagcgcttaggccggagcgagcctgggggccgcccgccgtgaagacatcgcggggaccgattcaccatggagggcgccggcggcgcgaacgacaagaaaaagtaagcccattccctcggcccgccgccttctcccccggcgaccccgcccgcctgcccgccctgggctcctgggccggcctcggcgttaatgggattggggggggcagcctttttgtttctgctgctgctcccctcccctctcttcccccaacctcgccggccgggctcccccgctgtccacgtcgccatcttgtcgtggggggtgggagacgcctcgaaagtgctttcaggggccggggtctgagccctgcttgccctccccgccggccgtgggggcctcgcgccgcccacctacccgcctcaaaaacccagcctgctctgtggccccatccggaggggactttacccagcctgaaaaccccgggaagagaaatgagctgcagctcggtagccgcggtttgcacccggagcttccgctccttcccgcccccatcctctccagttccattgaaaactcggccctggggcggaccctgcacgctggtcctggctttccagtggacttggggccttgagttcccgactgagggactcgcgtggtcggatgcgatcttgtcctgtagttgtccagccgtcgcgggtgtctttgcctttgtgcattagggatttgccgcgatggccttaagatgcgaactttttagtttgcacgtgcaggttttgtttcgttttaatcgccttgaaaaactt

SEQ ID NO: 290265 - DNA, 188 bp, Homo sapiens; identical to SEQ ID NO: 237499
  chr14:62229157-62229345
  hyper

SEQ ID NO: 290266 - DNA, 118 bp, Homo sapiens
  chr14:62584399-62584517
  hyper
caccccgcccccaaccactgaagagtagccagctgctggtcccaaatgacctgattcgattttttaaatgtaaaccttaggattggttcttgggtgaagagtccgctgctcttcgcta

SEQ ID NO: 290267 - DNA, 31 bp, Homo sapiens; identical to SEQ ID NO: 203629
  chr14:63511825-63511856
  hyper

SEQ ID NO: 290268 - DNA, 533 bp, Homo sapiens; identical to SEQ ID NO: 237504
  chr14:64108074-64108607
  hyper

SEQ ID NO: 290269 - DNA, 267 bp, Homo sapiens; identical to SEQ ID NO: 237505
  chr14:64109073-64109340
  hyper

SEQ ID NO: 290270 - DNA, 35 bp, Homo sapiens; identical to SEQ ID NO: 224711
  chr14:64182960-64182995
  hyper

SEQ ID NO: 290271 - DNA, 221 bp, Homo sapiens
  chr14:64760852-64761073
  hyper
aggaaagcgagcgcacctcctgcagctcaggctccgggcgccagccctgccccgcagccccagagcccgtcgcagctcgggtggtccctccccggcccagcgctcgccgcctgctcttcgccctgcaagtttcaagaggcagttatttctcgcagcctccgcgcttgcaactgcctcctggcgggggagtgggtgtccaaaaagccagcagctggagaaac

SEQ ID NO: 290272 - DNA, 504 bp, Homo sapiens
  chr14:64761254-64761758
  hyper
ccacaaggatagtggcgcacagatggcgctccccgcagccccagtctcagatttaagaggtctggagtagggcctgagaatatgcatttccaaccaggtcctgggggatgccgacactgatacagccagtctggggaccacacttcgaggatcacgtcctcagcccctgactcacataagtgtcattcagaacagatgtctgattctaaggagccagtggtgaaaccagagaggctttgggtttgtcaaatccccagcagcaaacgtaacctcgggccctggagtggcaaagccgtggactagaggtggagggagtgggttctcagctctcaagaggtcactgggaaggcctttcgcgttagatcaaagatcccaggtacttcctcgaactcacttgaagtggcaccggggagacctgtgcctccggccacggcgcccttctccgctggaggcacctgcccacccctcttctcgggcgaaggcccctcgcgccccctggtggca

SEQ ID NO: 290273 - DNA, 187 bp, Homo sapiens; identical to SEQ ID NO: 203631
  chr14:64805571-64805758
  hyper

SEQ ID NO: 290274 - DNA, 213 bp, Homo sapiens; identical to SEQ ID NO: 203632
  chr14:64931838-64932051
  hyper

SEQ ID NO: 290275 - DNA, 43 bp, Homo sapiens; identical to SEQ ID NO: 203633
  chr14:65005557-65005600
  hyper

SEQ ID NO: 290276 - DNA, 97 bp, Homo sapiens
  chr14:65006319-65006416
  hyper
gccagccgccctcacgcggcgcgggaaaacggtcggcctcgccctgggctcaggttctctccgcccgccaggcagtggggtttttttttgttttttt

SEQ ID NO: 290277 - DNA, 535 bp, Homo sapiens
  chr14:65006776-65007311
  hyper
cgccggttcagactttttcttttctttaatccccgtccaagggatccgccctcaccccccaccccagccaccccaattccctattccctccccttggacggcgccggggaaaacaagctgctcgagctttatttcttcggtgcaaccaactcagaatgaattcctccgcccctgcgtgctcagtgagtcggcaccctagcagtgaactgcatttaaaacctcaggaattgagcgaactctcccagtggctctcctcaccgggatccccttccacgcctcctccccgtgccgcgcctcagtccgcactgctcattggccgcgtgccctgccaatccgatgcacgtcggctagggcaaagaccgcgaaaaagcgcgtacacctggctctgggagcgcgcgcctaacgccagccagcagcaggaggcgcgcgaggcaccacggcctggcggccgagagtcagggaggaacctcatttacataacggccgcccctctgtctcctggcgggggccggagtcccgcccctcgtccaacttg

SEQ ID NO: 290278 - DNA, 138 bp, Homo sapiens; identical to SEQ ID NO: 237510
  chr14:65008388-65008526
  hyper

SEQ ID NO: 290279 - DNA, 120 bp, Homo sapiens; identical to SEQ ID NO: 203635
  chr14:65008556-65008676
  hyper

SEQ ID NO: 290280 - DNA, 217 bp, Homo sapiens; identical to SEQ ID NO: 203636
  chr14:65008720-65008937
  hyper

SEQ ID NO: 290281 - DNA, 171 bp, Homo sapiens
  chr14:65009279-65009450
  hyper
caagatcctcgacaagtgtcaggaggtgatcaactggctcgaccgaaaccagatggcagagaaagatgagtatgaacacaagcagaaagagctcgaaagagtttgcaaccccatcatcagcaaactttaccaaggtggtcctggcggcggcagcggcggcggcggttcagg

SEQ ID NO: 290282 - DNA, 113 bp, Homo sapiens; identical to SEQ ID NO: 203638
  chr14:65016816-65016929
  hyper

SEQ ID NO: 290283 - DNA, 201 bp, Homo sapiens; identical to SEQ ID NO: 203639
  chr14:65171074-65171275
  hyper

SEQ ID NO: 290284 - DNA, 305 bp, Homo sapiens
  chr14:65171373-65171678
  hyper
agccccgcacgccgtgcgcgtcccgagcccgcggggcagctaccgctcggtgagtgtcccctgattctcctctctcccctcttatctccctgcattaggctgagcggcggtgccggcagtcacgctggggccccagtcccttcgcggcccccgtgccagccccctgcggggtgaggaccggggcgaccgaggagggcctggaactgtgttggctgcttcccgggccaccctgccgcagagtgcgcgagcgcaggagggtcgtatggggagactttttctgtctttttttccctccactccggaaa

SEQ ID NO: 290285 - DNA, 183 bp, Homo sapiens; identical to SEQ ID NO: 203641
  chr14:65171770-65171953
  hyper

SEQ ID NO: 290286 - DNA, 271 bp, Homo sapiens; identical to SEQ ID NO: 237514
  chr14:65346619-65346890
  hyper

SEQ ID NO: 290287 - DNA, 347 bp, Homo sapiens; identical to SEQ ID NO: 237515
  chr14:65381011-65381358
  hyper

SEQ ID NO: 290288 - DNA, 65 bp, Homo sapiens; identical to SEQ ID NO: 203643
  chr14:65438693-65438758
  hyper

SEQ ID NO: 290289 - DNA, 113 bp, Homo sapiens; identical to SEQ ID NO: 237517
  chr14:65565399-65565512
  hyper

SEQ ID NO: 290290 - DNA, 34 bp, Homo sapiens; identical to SEQ ID NO: 237518
  chr14:65569329-65569363
  hyper

SEQ ID NO: 290291 - DNA, 181 bp, Homo sapiens; identical to SEQ ID NO: 237519
  chr14:65569737-65569918
  hyper

SEQ ID NO: 290292 - DNA, 121 bp, Homo sapiens; identical to SEQ ID NO: 237520
  chr14:66869959-66870080
  hyper

SEQ ID NO: 290293 - DNA, 288 bp, Homo sapiens; identical to SEQ ID NO: 237521
  chr14:66974387-66974675
  hyper

SEQ ID NO: 290294 - DNA, 74 bp, Homo sapiens; identical to SEQ ID NO: 237522
  chr14:66974895-66974969
  hyper

SEQ ID NO: 290295 - DNA, 429 bp, Homo sapiens; identical to SEQ ID NO: 237523
  chr14:66975358-66975787
  hyper

SEQ ID NO: 290296 - DNA, 193 bp, Homo sapiens; identical to SEQ ID NO: 237524
  chr14:67708297-67708490
  hyper

SEQ ID NO: 290297 - DNA, 251 bp, Homo sapiens; identical to SEQ ID NO: 203646
  chr14:67825995-67826246
  hyper

SEQ ID NO: 290298 - DNA, 236 bp, Homo sapiens; identical to SEQ ID NO: 237526
  chr14:67826866-67827102
  hyper

SEQ ID NO: 290299 - DNA, 86 bp, Homo sapiens
  chr14:67878634-67878720
  hyper
agagcatgcccgttccggggcgcgcgtctggccccgctctagggagccgcgtcggcggggccccacccgggcaatgtcccgaagct

SEQ ID NO: 290300 - DNA, 40 bp, Homo sapiens
  chr14:67878763-67878803
  hyper
cgccgtcctccatgtcgccgcccgcacgccagggccaccc

SEQ ID NO: 290301 - DNA, 32 bp, Homo sapiens; identical to SEQ ID NO: 237528
  chr14:67982132-67982164
  hyper

SEQ ID NO: 290302 - DNA, 37 bp, Homo sapiens; identical to SEQ ID NO: 237529
  chr14:68067076-68067113
  hyper

SEQ ID NO: 290303 - DNA, 435 bp, Homo sapiens; identical to SEQ ID NO: 237530
  chr14:68086297-68086732
  hyper

SEQ ID NO: 290304 - DNA, 126 bp, Homo sapiens; identical to SEQ ID NO: 203647
  chr14:68141650-68141776
  hyper

SEQ ID NO: 290305 - DNA, 302 bp, Homo sapiens; identical to SEQ ID NO: 237532
  chr14:68162290-68162592
  hyper

SEQ ID NO: 290306 - DNA, 293 bp, Homo sapiens; identical to SEQ ID NO: 237533
  chr14:68283048-68283341
  hyper

SEQ ID NO: 290307 - DNA, 227 bp, Homo sapiens; identical to SEQ ID NO: 203648
  chr14:69259278-69259505
  hyper

SEQ ID NO: 290308 - DNA, 56 bp, Homo sapiens; identical to SEQ ID NO: 237535
  chr14:69260259-69260315
  hyper

SEQ ID NO: 290309 - DNA, 230 bp, Homo sapiens; identical to SEQ ID NO: 237536
  chr14:69261379-69261609
  hyper

SEQ ID NO: 290310 - DNA, 458 bp, Homo sapiens; identical to SEQ ID NO: 237537
  chr14:69262251-69262709
  hyper

SEQ ID NO: 290311 - DNA, 565 bp, Homo sapiens; identical to SEQ ID NO: 203650
  chr14:69444743-69445308
  hyper

SEQ ID NO: 290312 - DNA, 299 bp, Homo sapiens; identical to SEQ ID NO: 203651
  chr14:69445727-69446026
  hyper

SEQ ID NO: 290313 - DNA, 561 bp, Homo sapiens; identical to SEQ ID NO: 203652
  chr14:69446238-69446799
  hyper

SEQ ID NO: 290314 - DNA, 104 bp, Homo sapiens; identical to SEQ ID NO: 203653
  chr14:69618203-69618307
  hyper

SEQ ID NO: 290315 - DNA, 312 bp, Homo sapiens; identical to SEQ ID NO: 237540
  chr14:69620502-69620814
  hyper

SEQ ID NO: 290316 - DNA, 245 bp, Homo sapiens; identical to SEQ ID NO: 237541
  chr14:69658126-69658371
  hyper

SEQ ID NO: 290317 - DNA, 95 bp, Homo sapiens; identical to SEQ ID NO: 203654
  chr14:69658738-69658833
  hyper

SEQ ID NO: 290318 - DNA, 48 bp, Homo sapiens; identical to SEQ ID NO: 237543
  chr14:69728075-69728123
  hyper

SEQ ID NO: 290319 - DNA, 362 bp, Homo sapiens; identical to SEQ ID NO: 203655
  chr14:69864916-69865278
  hyper

SEQ ID NO: 290320 - DNA, 143 bp, Homo sapiens
  chr14:69950636-69950779
  hyper
aactccgaaaggagcggaagcggatggaacagctggtcccagggagcgcgggccaggcgcgcagataaatcacggacacacactgcacggatagctccagactggcgttgagtgccaaatgccgacacagacacggtcaggtt

SEQ ID NO: 290321 - DNA, 74 bp, Homo sapiens
  chr14:69951034-69951108
  hyper
agtgtgtgaccctacgccctagctccgtcctctcctccaccccgaggcgagcaggtgtctgcaggagtgcctcc

SEQ ID NO: 290322 - DNA, 518 bp, Homo sapiens
  chr14:69951336-69951854
  hyper
tcccagccaatcggggccaccagaattggggctgtcgccgggggggtgggtggctagggcgggaggggaggagatgctgccggcccgaggctgagccaccctccccgcggagttcccgcccggccctctgcaatccggagcccaagccgccggctacgcgccctgcgcccccttggtgccgcgtccagtgcccagcgcgctttgatgctgcagctccgggccgggccgctctgcttctctgctcgctgggacgctctccgacggctccgccctcgcctctcgccccgagtccctgctgaccccggggaggtggggtccgggccgggcacagccccgctgaggcaggatgttcacgtccaagtccaactcggtgtcgccctcgccgtccctggagcaggctgactcggacgccctggatatcagcaccaaagtgcagctctacggcgtgctgtggaagaggcctttcggcaggccgtcggccaagtggtcccggcggtgagtgcgcccccgcgccccaa

SEQ ID NO: 290323 - DNA, 65 bp, Homo sapiens; identical to SEQ ID NO: 124847
  chr14:70039199-70039264
  hyper

SEQ ID NO: 290324 - DNA, 353 bp, Homo sapiens; identical to SEQ ID NO: 224719
  chr14:70041211-70041564
  hyper

SEQ ID NO: 290325 - DNA, 365 bp, Homo sapiens; identical to SEQ ID NO: 203656
  chr14:70193443-70193808
  hyper

SEQ ID NO: 290326 - DNA, 81 bp, Homo sapiens; identical to SEQ ID NO: 237550
  chr14:70233585-70233666
  hyper

SEQ ID NO: 290327 - DNA, 116 bp, Homo sapiens
  chr14:70346883-70346999
  hyper
caggcggcgggggttgggacgggggcgggtgcagctctgcctggagagttttaggttacccgcgagccacacaaggaccttgtgttgttgttttaaaaagcgatcactgctcgtaa

SEQ ID NO: 290328 - DNA, 526 bp, Homo sapiens
  chr14:70826032-70826558
  hyper
gagtgggggacagcggcggggaagtgggggtgtggaaaagactggtggaagagcttttaggaaagctctcaccccgtcgctagctccttcctagcccgagtgccagcccttaacttcacattttacagattccctcccaggtcttgatcctgccaaggaggagggtcccaccccttgcggaagatcctcctcactccactcaccaacatggggactccatagccgagagtcttgttcttgcgaaaagcacgcatcaccgcgggtgcaaacatgagtgaactcttccatcggctcagaactccaagcgggcctagcgcagactcccaaatctcagcagctcacgctctcaccaagacgagtacgtccttaactcacttccttttccttggttatttggtgctcggtccttagtgaatggtttccgctaggcaaaagcaatcgagccatcgtaacatacttgtgcgtccgcccagaaatgtgggcgtcagcgtttttggttccgtaacgtcggcgtgcaattgggatt

SEQ ID NO: 290329 - DNA, 136 bp, Homo sapiens; identical to SEQ ID NO: 237556
  chr14:71067681-71067817
  hyper

SEQ ID NO: 290330 - DNA, 60 bp, Homo sapiens; identical to SEQ ID NO: 224724
  chr14:71108798-71108858
  hyper

SEQ ID NO: 290331 - DNA, 129 bp, Homo sapiens; identical to SEQ ID NO: 237557
  chr14:71786797-71786926
  hyper

SEQ ID NO: 290332 - DNA, 47 bp, Homo sapiens; identical to SEQ ID NO: 237558
  chr14:71787538-71787585
  hyper

SEQ ID NO: 290333 - DNA, 126 bp, Homo sapiens; identical to SEQ ID NO: 203657
  chr14:72399486-72399612
  hyper

SEQ ID NO: 290334 - DNA, 50 bp, Homo sapiens; identical to SEQ ID NO: 203658
  chr14:72400239-72400289
  hyper

SEQ ID NO: 290335 - DNA, 75 bp, Homo sapiens
  chr14:73358889-73358964
  hyper
tttaccaggtggcatcagcccggttatgtgatttcggctggaaatggggaaactgaaaatcagttgtgggttcgg

SEQ ID NO: 290336 - DNA, 254 bp, Homo sapiens
  chr14:73359040-73359294
  hyper
ccataaaacattttctttcttgggtgaaacgctgtggcgttcaagcgcagtgtatccgagcttccgagccagaactgaagccaggagctcctatctgatcagcctcagcttccaacgtcctcttaacggcagctttcatataaatatatttgaaacctggggccttcctacccctttccctatttctgatgggcgacgagctggcgcaaacacgtccgattctccctgtgcattcctttgcgttaggaaccccc

SEQ ID NO: 290337 - DNA, 200 bp, Homo sapiens
  chr14:73359490-73359690
  hyper
cgaaggggtgaggaccccccagcccacctcggatacggagggagccaccctctgccgacatcacccaatagcacccctttcagagcgacactagttttccgaggccacccctggctccgcgatcgcgagcggacttggcggcttaacagttccactgactggaaggaaggaaggaaggaaggaaggaaggaaggaaggaa

SEQ ID NO: 290338 - DNA, 500 bp, Homo sapiens
  chr14:73359750-73360250
  hyper
gcaggcaggcagaaattggctgttggacccggggctggcccccgcgagtcctcgcccggcccgccccactctgtccaggatctgggcaagcgctcaaagtctccccgaggcggccagaggcacctgcccctcgcccggccgggagcagacgctgccccctcgggccaggagccccaaaaccgcctctccgcctgcctcagcgcctcacccagaggtggcgagaacaccattcataagacctgcggcttccctgcctccaaatccaccccaagttaacccgagtcgttaatccactaaagccagctcgctcgcaaatacacgagcagacacacgctcgatcgcccggagcgcctccgagatccgggggctgccggggaaagcccggggcgaccacctgggccccagcacgcccgggacccgctgcttcccccgcggtgctccaactccggaaggtttgcacaaactccccgcgagcgatcggaaggcgaagagcgccctgc

SEQ ID NO: 290339 - DNA, 255 bp, Homo sapiens; identical to SEQ ID NO: 237562
  chr14:73360750-73361005
  hyper

SEQ ID NO: 290340 - DNA, 107 bp, Homo sapiens; identical to SEQ ID NO: 237563
  chr14:73361733-73361840
  hyper

SEQ ID NO: 290341 - DNA, 474 bp, Homo sapiens
  chr14:73393144-73393618
  hyper
cctaactggctgacgctacaccttggtctttccgggtccttgcacgcttcgctccaactcctgcagagctgagccggaggggaatccggaagggacacgctgaacaggtaagactgtgctgcctggggtgcctactggcatcgattcgagggctgccgcgctcccgctgcagagctcggggtgggagacaggcgcggcgaggaaggccagggaaaggggcggggaggggcggggaggagtgagcacgtggaacgccggcgccaccgggcctaggtggcagctgggccggcgcgctccgcccgttctggggcgcgtggggccctccggccggatcagtgctgcaaccgtaaacacgcagggagggcaccccgagtgtcgccgctgagggcgtttctctaagcgcttctctgagacctgctgctgaaggccccacccgacacctggcgggggctgggctgcgggccttggggcggt

SEQ ID NO: 290342 - DNA, 213 bp, Homo sapiens; identical to SEQ ID NO: 237565
  chr14:73706332-73706545
  hyper

SEQ ID NO: 290343 - DNA, 42 bp, Homo sapiens; identical to SEQ ID NO: 237566
  chr14:73925198-73925240
  hyper

SEQ ID NO: 290344 - DNA, 674 bp, Homo sapiens
  chr14:73957467-73958141
  hyper
atttttaaattgctctctgagtgtagattccttgtttgtttggcaagggttcttgccgctgccgctacagcttgaagccaaacatttaatgaaagagagcgggaggggccgaatagaagaatgatgggcgtggccaaccccgaggtggctggaggccgcgcccccttcccagagtgcaccgcagccgctgcattcaggaaccgctttagcttcgcccccggccggccgggcggggaagactggtgtggtctggccatggatgggctccaggccagtgcagggccgttgaggcgcgggcggccgaagcgccggcgcaagccccagccacacagcgggtcggtcctggccctgcccttgaggtccaggaagatacgaaagcagctgcgaagtgttgtatcccgcatggcagcgctgaggacgcagacgctgcctagcgagaactcggaggaatcgagggtggagtcgacggccgacgacctgggggacgcgctacccggtggggcggcggtggcggcgtcccggacgcagcccggcgagagccatacggccacctggggcccgcagagctgctggaggcctcgcccgccgcgcgctccctgcagaccccgtcggcgcgcctggtgcccgcttccgcgccgcccgcgcgcctggtggaggtgcccgccgcgccggtc

SEQ ID NO: 290345 - DNA, 149 bp, Homo sapiens
  chr14:73958379-73958528
  hyper
ggcgcctatgggagcgcgaggcggtgctggtgcggcggcaggaccacacctactaccagggacttttctctaccgctgacctggattcgatgctgcgcaacgaggaggtgcagttcggccagcatttggacgccgctcgctacatcaac

SEQ ID NO: 290346 - DNA, 417 bp, Homo sapiens; identical to SEQ ID NO: 224728
  chr14:74100395-74100812
  hyper

SEQ ID NO: 290347 - DNA, 154 bp, Homo sapiens; identical to SEQ ID NO: 203662
  chr14:74111425-74111579
  hyper

SEQ ID NO: 290348 - DNA, 521 bp, Homo sapiens
  chr14:74180377-74180898
  hyper
gactgtggctcaccgtgctcctggccttagaacaataccagacactcccaccaagtaggcccgagggaggcgaccttcatgcagtcacgattaacaaagacagagtcctgatctcgcccttctctgcccccacagtcagtccgtaggtgcactcggagccgagctcggggacgctgaggcagtcacgcggccgtcgccatcttgcgtctgggtctgggtccggtcgggtccgccgcctgcagcaggggcgtcgcgtcgtcgtgcagcgggcgaggagcgacggcgggcggcgaaggcaggcgcgctgggccgagagccgccggggtgtggtcgcggggcgtggccgccgggcgctcgctgcggctcctggagaggatcgggcgttcgcggtcgcagcctggtcttcccgcgggcgaggagcggccgtttgggagactagccagagggagaaactgtgccgaagtcgcggcggctgcgggccagcggaaagcggcttcttggcgggcgcggggactcctctg

SEQ ID NO: 290349 - DNA, 63 bp, Homo sapiens
  chr14:74208146-74208209
  hyper
aggggaaaacagctcgggcggctctgaagaggaaatctcaggccctagatgctacaggtcatt

SEQ ID NO: 290350 - DNA, 40 bp, Homo sapiens
  chr14:74208319-74208359
  hyper
accaggaatgcccctcccaggctatcgctcctctgcaggc

SEQ ID NO: 290351 - DNA, 44 bp, Homo sapiens; identical to SEQ ID NO: 203664
  chr14:74225613-74225657
  hyper

SEQ ID NO: 290352 - DNA, 156 bp, Homo sapiens; identical to SEQ ID NO: 237572
  chr14:74226413-74226569
  hyper

SEQ ID NO: 290353 - DNA, 126 bp, Homo sapiens; identical to SEQ ID NO: 203665
  chr14:74238690-74238816
  hyper

SEQ ID NO: 290354 - DNA, 116 bp, Homo sapiens; identical to SEQ ID NO: 203666
  chr14:74252875-74252991
  hyper

SEQ ID NO: 290355 - DNA, 136 bp, Homo sapiens; identical to SEQ ID NO: 9841
  chr14:74253328-74253464
  hyper

SEQ ID NO: 290356 - DNA, 98 bp, Homo sapiens; identical to SEQ ID NO: 203668
  chr14:74254304-74254402
  hyper

SEQ ID NO: 290357 - DNA, 390 bp, Homo sapiens; identical to SEQ ID NO: 237577
  chr14:74318399-74318789
  hyper

SEQ ID NO: 290358 - DNA, 224 bp, Homo sapiens; identical to SEQ ID NO: 237578
  chr14:74486146-74486370
  hyper

SEQ ID NO: 290359 - DNA, 69 bp, Homo sapiens; identical to SEQ ID NO: 237579
  chr14:74551628-74551697
  hyper

SEQ ID NO: 290360 - DNA, 241 bp, Homo sapiens; identical to SEQ ID NO: 203669
  chr14:74708533-74708774
  hyper

SEQ ID NO: 290361 - DNA, 58 bp, Homo sapiens; identical to SEQ ID NO: 203670
  chr14:74709107-74709165
  hyper

SEQ ID NO: 290362 - DNA, 222 bp, Homo sapiens; identical to SEQ ID NO: 237584
  chr14:74724285-74724507
  hyper

SEQ ID NO: 290363 - DNA, 44 bp, Homo sapiens; identical to SEQ ID NO: 237586
  chr14:74959041-74959085
  hyper

SEQ ID NO: 290364 - DNA, 259 bp, Homo sapiens
  chr14:74960116-74960375
  hyper
ccgcccccggctccggaaagccagctccagccctctcaggcccagaagcctgcagtctccgcccatgccatcccctcagaggcctgacccgcccggacccacctccgccccgccccgcctcactcctccccgccccgttccttccctttagagcacctctccggcttcctgggtgcgtccccgccgctgccgtctggagcattcctagccaatcagacaccttctcctcccgcactacccaataggcatgttggggggg

SEQ ID NO: 290365 - DNA, 111 bp, Homo sapiens
  chr14:75079225-75079336
  hyper
ccccgaatcgttctcccgcccctcgcctcagggaccgtctttggatcgggggacccaggctgcagccttgcaggtctgaaggaagccgggaggggcgccgaggcccgcgta

SEQ ID NO: 290366 - DNA, 144 bp, Homo sapiens; identical to SEQ ID NO: 203671
  chr14:75179349-75179493
  hyper

SEQ ID NO: 290367 - DNA, 100 bp, Homo sapiens; identical to SEQ ID NO: 203672
  chr14:75179845-75179945
  hyper

SEQ ID NO: 290368 - DNA, 106 bp, Homo sapiens; identical to SEQ ID NO: 237591
  chr14:75229919-75230025
  hyper

SEQ ID NO: 290369 - DNA, 145 bp, Homo sapiens; identical to SEQ ID NO: 203673
  chr14:75230400-75230545
  hyper

SEQ ID NO: 290370 - DNA, 163 bp, Homo sapiens; identical to SEQ ID NO: 237593
  chr14:75348311-75348474
  hyper

SEQ ID NO: 290371 - DNA, 124 bp, Homo sapiens; identical to SEQ ID NO: 237594
  chr14:75349046-75349170
  hyper

SEQ ID NO: 290372 - DNA, 734 bp, Homo sapiens; identical to SEQ ID NO: 237595
  chr14:75469162-75469896
  hyper

SEQ ID NO: 290373 - DNA, 507 bp, Homo sapiens; identical to SEQ ID NO: 237596
  chr14:75517724-75518231
  hyper

SEQ ID NO: 290374 - DNA, 198 bp, Homo sapiens; identical to SEQ ID NO: 237597
  chr14:75530723-75530921
  hyper

SEQ ID NO: 290375 - DNA, 369 bp, Homo sapiens; identical to SEQ ID NO: 237598
  chr14:75535863-75536232
  hyper

SEQ ID NO: 290376 - DNA, 242 bp, Homo sapiens; identical to SEQ ID NO: 237599
  chr14:75593511-75593753
  hyper

SEQ ID NO: 290377 - DNA, 276 bp, Homo sapiens; identical to SEQ ID NO: 237600
  chr14:75725634-75725910
  hyper

SEQ ID NO: 290378 - DNA, 196 bp, Homo sapiens; identical to SEQ ID NO: 203675
  chr14:75743668-75743864
  hyper

SEQ ID NO: 290379 - DNA, 165 bp, Homo sapiens; identical to SEQ ID NO: 203676
  chr14:75743897-75744062
  hyper

SEQ ID NO: 290380 - DNA, 355 bp, Homo sapiens; identical to SEQ ID NO: 237601
  chr14:75745344-75745699
  hyper

SEQ ID NO: 290381 - DNA, 51 bp, Homo sapiens; identical to SEQ ID NO: 237602
  chr14:75761835-75761886
  hyper

SEQ ID NO: 290382 - DNA, 141 bp, Homo sapiens; identical to SEQ ID NO: 237603
  chr14:75894269-75894410
  hyper

SEQ ID NO: 290383 - DNA, 208 bp, Homo sapiens; identical to SEQ ID NO: 237604
  chr14:76044577-76044785
  hyper

SEQ ID NO: 290384 - DNA, 171 bp, Homo sapiens
  chr14:76597725-76597896
  hyper
gaagacagcgtgactgcggtctgatctacagtgacgagtaccaatgttaactgtcacctctcatctccaaactaaatcacacctggaattggaggagccgaggagctgatagagtcagcctcgcagaggcgacaagtcaatcagcgcggagatgcccgcggagacaccggc

SEQ ID NO: 290385 - DNA, 128 bp, Homo sapiens; identical to SEQ ID NO: 237606
  chr14:76603108-76603236
  hyper

SEQ ID NO: 290386 - DNA, 72 bp, Homo sapiens; identical to SEQ ID NO: 203678
  chr14:76605465-76605537
  hyper

SEQ ID NO: 290387 - DNA, 52 bp, Homo sapiens
  chr14:76819085-76819137
  hyper
acttttctatgtcctcggccccggttgctctgagctagctgattggaaagcc

SEQ ID NO: 290388 - DNA, 68 bp, Homo sapiens; identical to SEQ ID NO: 203679
  chr14:77227531-77227599
  hyper

SEQ ID NO: 290389 - DNA, 62 bp, Homo sapiens; identical to SEQ ID NO: 203680
  chr14:77228494-77228556
  hyper

SEQ ID NO: 290390 - DNA, 482 bp, Homo sapiens
  chr14:77422360-77422842
  hyper
tgtcctcctggtgtcgtttttaatagctcatcctttcacaatcaagagtggctcatgccggagatgagttacccgcaatgaggggctggatttattctaagggcagagggaagccatcacaggaaatgatgtgattgatgttttgaaaagaactcgctggctgttccgtgaagaataaattagaggggcaggagggaagaagtctgcctggggcggctgcagcaacccaggcgtgctgcgaggtgccctttgactagattccagtgggggctttcgggcgagcagaagaaccccagggatcagctctagccacgctcagctccctgggccggccctgggcatttctgagacggccctcgcgctcagggacctctcctcgcagttccattgtctgttcttgcggagtcctgccacactgggagggccaccccctcctcttgctcccctcccctccccgggtccagcccctcccctgcctggcc

SEQ ID NO: 290391 - DNA, 361 bp, Homo sapiens; identical to SEQ ID NO: 203681
  chr14:77428119-77428480
  hyper

SEQ ID NO: 290392 - DNA, 295 bp, Homo sapiens; identical to SEQ ID NO: 203682
  chr14:77493464-77493759
  hyper

SEQ ID NO: 290393 - DNA, 282 bp, Homo sapiens; identical to SEQ ID NO: 237617
  chr14:77499644-77499926
  hyper

SEQ ID NO: 290394 - DNA, 201 bp, Homo sapiens; identical to SEQ ID NO: 203684
  chr14:77564278-77564479
  hyper

SEQ ID NO: 290395 - DNA, 132 bp, Homo sapiens; identical to SEQ ID NO: 203685
  chr14:77591041-77591173
  hyper

SEQ ID NO: 290396 - DNA, 116 bp, Homo sapiens; identical to SEQ ID NO: 203686
  chr14:77591751-77591867
  hyper

SEQ ID NO: 290397 - DNA, 568 bp, Homo sapiens
  chr14:77605688-77606256
  hyper
gaggcagaacaggacgaagttgcgcatgttcctgctgccgatgcagttgccggtgaagaaacagtgatggtcgtgcctcagggtgactctggcgcacactcggcagaagtgggtgctaggtgaggggcatggagtcttcctggccgaggccccctggcaggcccccaggtcgtctggggagttctggatgacaaggacgtaattgcccagggcgttggccgagaggaataggaagagcgccccgtggagcagggcgggcgagaagagccgggcggccgcggggtcctcgcgcatgctgggcaggaagaggaagagctgcagcacgaaggtcaccagggagatgcacaagaagtaggcgggggccaccacgttgagcagccgcagggccagcatcctcgattacattcctgcggggcccggggtgagaagaggactgactgactacggcgtccagggggcgccctcgcccgctcctccgtgccgcgcgtctggggcactgcacgcgactccacgcccccaaccccctgtcccgcggatttcccctccccagttccctaaccccggatca

SEQ ID NO: 290398 - DNA, 177 bp, Homo sapiens; identical to SEQ ID NO: 203687
  chr14:77606580-77606757
  hyper

SEQ ID NO: 290399 - DNA, 565 bp, Homo sapiens; identical to SEQ ID NO: 237622
  chr14:77647941-77648506
  hyper

SEQ ID NO: 290400 - DNA, 138 bp, Homo sapiens
  chr14:77736729-77736867
  hyper
agaccgctcacacgcgggcgcaggagctcgccccacacatctcccttccccggctctcggggcaccccagtaccctgataccggcagcggggtgcacccctgcagtcgctacctaaggaagacgcaggaggcacaagg

SEQ ID NO: 290401 - DNA, 97 bp, Homo sapiens
  chr14:77736883-77736980
  hyper
cgcagggacggaggtccacccgcccagatgtggggagatccgcgggaggggatcccgcccggcccggtgagccccgctgggagagtggtgtgcggcg

SEQ ID NO: 290402 - DNA, 52 bp, Homo sapiens; identical to SEQ ID NO: 237624
  chr14:77787314-77787366
  hyper

SEQ ID NO: 290403 - DNA, 33 bp, Homo sapiens; identical to SEQ ID NO: 237625
  chr14:77787594-77787627
  hyper

SEQ ID NO: 290404 - DNA, 184 bp, Homo sapiens; identical to SEQ ID NO: 237626
  chr14:77843606-77843790
  hyper

SEQ ID NO: 290405 - DNA, 82 bp, Homo sapiens
  chr14:77965137-77965219
  hyper
gtctcggttccgaggctgctctgcctgcacctctgcacgcggccgcgaacccagtcgcgccccgcctcgcctcctccggggg

SEQ ID NO: 290406 - DNA, 180 bp, Homo sapiens
  chr14:77965244-77965424
  hyper
cgcggggcacggggccgcgcggggcgggggcgcgcagctcgcacagcctctctggccccggctcctcgcgtgggcgcccgcacagctctagggtccgcgcacctggacgtcccccaccctcctccgaggggcccctcggcgctccccgacccgtcttgaccctgtgggcggctctctttg

SEQ ID NO: 290407 - DNA, 55 bp, Homo sapiens; identical to SEQ ID NO: 203688
  chr14:78266694-78266749
  hyper

SEQ ID NO: 290408 - DNA, 254 bp, Homo sapiens; identical to SEQ ID NO: 203689
  chr14:78432197-78432451
  hyper

SEQ ID NO: 290409 - DNA, 233 bp, Homo sapiens
  chr14:79745242-79745475
  hyper
agcgcgcgtgcggcaccaccgcgtgcagcagctccagcgctcgcgctgcctcaaggggtttatttttatttctatttggagctacttcggccttagccgccgcccttacttttcctccgaaattgtgagaaggtgccttcatggctggagtttggtttcacgcgcctgggagaagagcagggcacgggtgataaagaaggcgcagtgtcggtctgtcggtgtcacacacgcgc

SEQ ID NO: 290410 - DNA, 223 bp, Homo sapiens
  chr14:79745557-79745780
  hyper
ctgtgcttgaatgggaagggccgggattccgggtcgctctggcccctccttcctccggagccagccagtccctcggcagagcgctggggctgcactgatttgctctcgggagtgcgctatttgcatatgacttgcccatttgtgaatttggctccccaactcctcgcttcacttcacctgtgcctccctggtccgcgcacttcgcaggcgcccgcccgcctct

SEQ ID NO: 290411 - DNA, 332 bp, Homo sapiens; identical to SEQ ID NO: 237630
  chr14:81421283-81421615
  hyper

SEQ ID NO: 290412 - DNA, 41 bp, Homo sapiens; identical to SEQ ID NO: 237631
  chr14:81687740-81687781
  hyper

SEQ ID NO: 290413 - DNA, 139 bp, Homo sapiens; identical to SEQ ID NO: 203692
  chr14:81901893-81902032
  hyper

SEQ ID NO: 290414 - DNA, 587 bp, Homo sapiens; identical to SEQ ID NO: 203693
  chr14:81902236-81902823
  hyper

SEQ ID NO: 290415 - DNA, 156 bp, Homo sapiens; identical to SEQ ID NO: 203694
  chr14:81903005-81903161
  hyper

SEQ ID NO: 290416 - DNA, 53 bp, Homo sapiens; identical to SEQ ID NO: 203695
  chr14:82000012-82000065
  hyper

SEQ ID NO: 290417 - DNA, 148 bp, Homo sapiens; identical to SEQ ID NO: 237634
  chr14:82000298-82000446
  hyper

SEQ ID NO: 290418 - DNA, 61 bp, Homo sapiens; identical to SEQ ID NO: 203696
  chr14:85996080-85996141
  hyper

SEQ ID NO: 290419 - DNA, 102 bp, Homo sapiens; identical to SEQ ID NO: 203697
  chr14:85998186-85998288
  hyper

SEQ ID NO: 290420 - DNA, 91 bp, Homo sapiens
  chr14:85999426-85999517
  hyper
ctgggtagcagccgcgcctcccaagcattctttaaaccagaaaagtaggagggactccgggagagagggagggaatgagggagggagagaa

SEQ ID NO: 290421 - DNA, 163 bp, Homo sapiens
  chr14:88458964-88459127
  hyper
atctccgcgatgaagacagcctgtgccccactgcctgggacgagggttccagccccggctacttcactacttagacctgtcactttactctctgcacctatactctctggacctccggatcctcatttgttcaaacctaactgcctgtctggttcgtgttaaa

SEQ ID NO: 290422 - DNA, 239 bp, Homo sapiens
  chr14:88459170-88459409
  hyper
cgcctgctgactggcaccctaggggaatgcggcggagagtggagccggtggaaacgcagggcaacgccgcgggggcttgtggggctggccccacggggcgggctcttgccgccccccgcgtatccccgcagcttgccgctcaccccgccgccgctgaccgcgccgatgccgtcgaactcccggcccagcccgtcggagtcgtcgagcacgtacgcgccgccgggcgccagcagcgcaca

SEQ ID NO: 290423 - DNA, 78 bp, Homo sapiens; identical to SEQ ID NO: 203698
  chr14:88459631-88459709
  hyper

SEQ ID NO: 290424 - DNA, 306 bp, Homo sapiens
  chr14:88789656-88789962
  hyper
ccccaccccggccgcggctcctcgcccccggcgacgccccccacttcccgctccccgaaagccattggatgtaggggtggcgcggcgcccgggcagcgcgcggcgagggcgaccctccccgcggcgcgccccagacgccgcgccccggcaagagggagcagggcgagcagcggaccgaggctcccagctgggaaggcgcgctgagcccccggcacccggctcggggcagcgggaggcggtcgcggacttgcccgcggggcggcgggaggcggtgggcggtggcggggaagccgcggaggggcgggg

SEQ ID NO: 290425 - DNA, 65 bp, Homo sapiens
  chr14:88792792-88792857
  hyper
aaaacatccaagaaagatgccgctccaagcggttctgtctccctctgtgccgccgcaacttccat

SEQ ID NO: 290426 - DNA, 154 bp, Homo sapiens; identical to SEQ ID NO: 237640
  chr14:88851824-88851978
  hyper

SEQ ID NO: 290427 - DNA, 782 bp, Homo sapiens; identical to SEQ ID NO: 203701
  chr14:89020631-89021413
  hyper

SEQ ID NO: 290428 - DNA, 352 bp, Homo sapiens; identical to SEQ ID NO: 237642
  chr14:89029588-89029940
  hyper

SEQ ID NO: 290429 - DNA, 376 bp, Homo sapiens; identical to SEQ ID NO: 237643
  chr14:89258194-89258570
  hyper

SEQ ID NO: 290430 - DNA, 725 bp, Homo sapiens
  chr14:89290490-89291215
  hyper
gtgggaaggacctcgagaaacagcggacaatttcaggatttaggactttaggtcttgatgggtggatggtactgtggaagctgtttacttgtttgtatttctagaatcggaaggtaaagcgaaagggatggaaacgagcgaatggaagaagtaggacagacaccagacagagatcaactccagggactcttccggacctgcagggcaggcagagcattcggttgctaggcagctgcgcctcctgggagggtgggggaccccaggggcaggtgtctaactcactacctttttgtttagccgcggtgccttcttttcaaaatcaatgaaacctgtagcctttaaaagtagacatctttttccaaccaagtttaggcaagccctgtagccgagttctgcttgcggttgtttttctttttcctgttctcaggcgcgctgcgggcacctctcggacaaggccccagccgtcgcgggttgccgggcagagtcggacgccgccagctcttcactccacgcccacctctctcctggagcgctgggccttcgctggccgcaccggcagccatgagctcggagatggagccgctgctcctggcctggagctattttaggcgcaggaagttccagctctgcgccgatctatgcacgcagatgctggagaagtccccttatgaccaggtaccggccagctcccgtcagcctgtgcatcctgacgctgaggctgcggg

SEQ ID NO: 290431 - DNA, 409 bp, Homo sapiens
  chr14:89493490-89493899
  hyper
acgcagaacccggacctcggaatgggacgatgcgacgggcggggaaggcctggcccggccgaggtgccctcggccccgccctccaccgagggcagggaggcactgcctccgctccgtccactcgtaactggtgacgctggcagccccgccggggggcggggggagtgcaagaaaatcctgaggtgtgtcgggggacctggaccagatgccctcctgcaccgccctagctccggggaagtcgctctccggctccgcggcgcgggacccgccagcgggcagaggcgcggcgctttgatgtcgcgcggccacacggtggcgctgccgcaccgcccgctggcggagactgggggccaggggtgcccggggtggggtggagccgggacgcgcgcactccccagccacgcccggg

SEQ ID NO: 290432 - DNA, 144 bp, Homo sapiens
  chr14:89494054-89494198
  hyper
ctgcatttagtccactctcctgtccgtaagaagaaaggggcgcgactaaggggaagggaaggagccacagggattcattcccagccggtcccagtagccgccacaacacccggcaggtccgagttaatccgttctgcaagctag

SEQ ID NO: 290433 - DNA, 238 bp, Homo sapiens; identical to SEQ ID NO: 203703
  chr14:89506861-89507099
  hyper

SEQ ID NO: 290434 - DNA, 81 bp, Homo sapiens; identical to SEQ ID NO: 203704
  chr14:89818034-89818115
  hyper

SEQ ID NO: 290435 - DNA, 243 bp, Homo sapiens; identical to SEQ ID NO: 237648
  chr14:89884048-89884291
  hyper

SEQ ID NO: 290436 - DNA, 481 bp, Homo sapiens
  chr14:90085316-90085797
  hyper
acaatgctaaacccgagcagattaggaggcaggaaatgagccccattttcgttaccttcgatcgcctgcccccccgctgcttctcgcggccgcattggggggctgcggcgacgctggactcgcgggtggccccgccgccgggtcgcgccgtctcccggccgagctgcagcagatcgcggccggaaccccggctcctgcgcccggcgcccgcccggggtcggcggcgcggctcccaccccggcctggagccctgctgggtcctagtgcgcgccgcgcgcccgcctcgcggcccggtctgcagcccgcaccgagggcaggcagctcccagcgccgcgagtctccgggcgaggccgccaccctctcggtcccttgcgaaagcggccgcggggtgtgcggatgaactggagcttaatgtcaaatcctggcacaagatgttcaaaagaaagacattggctccaactgaactcttagaaggcagatg

SEQ ID NO: 290437 - DNA, 182 bp, Homo sapiens; identical to SEQ ID NO: 224749
  chr14:90167708-90167890
  hyper

SEQ ID NO: 290438 - DNA, 360 bp, Homo sapiens
  chr14:90420659-90421019
  hyper
tggctttgaaaggcgggagagatgcagactcaaggttaccattaatagactatatagagagaaaggagatggaacttggaggtagccgtagtcctggacggggagccaggagccctgcagctccaggatcagtcattaaccacgaccctttggacaggcagcccaggtcttatctgcacacccggcagagtgagacccagacacgggagaggaagcgagaggcccaggccaagctgaagtccgaggctcagtcgccctccggaaacctacttccacccacttcctgtgttccgagggactggcttcccacgtccgcgacctggctctggcctcggagaagaacatcgcgactacaacaac

SEQ ID NO: 290439 - DNA, 200 bp, Homo sapiens; identical to SEQ ID NO: 9902
  chr14:90421129-90421329
  hyper

SEQ ID NO: 290440 - DNA, 727 bp, Homo sapiens; identical to SEQ ID NO: 203709
  chr14:90422068-90422795
  hyper

SEQ ID NO: 290441 - DNA, 332 bp, Homo sapiens; identical to SEQ ID NO: 203710
  chr14:90527180-90527512
  hyper

SEQ ID NO: 290442 - DNA, 226 bp, Homo sapiens; identical to SEQ ID NO: 203711
  chr14:90527931-90528157
  hyper

SEQ ID NO: 290443 - DNA, 96 bp, Homo sapiens; identical to SEQ ID NO: 237657
  chr14:90529393-90529489
  hyper

SEQ ID NO: 290444 - DNA, 146 bp, Homo sapiens; identical to SEQ ID NO: 237658
  chr14:90722847-90722993
  hyper

SEQ ID NO: 290445 - DNA, 255 bp, Homo sapiens; identical to SEQ ID NO: 237659
  chr14:90723211-90723466
  hyper

SEQ ID NO: 290446 - DNA, 241 bp, Homo sapiens; identical to SEQ ID NO: 237660
  chr14:90798342-90798583
  hyper

SEQ ID NO: 290447 - DNA, 59 bp, Homo sapiens; identical to SEQ ID NO: 203713
  chr14:90849381-90849440
  hyper

SEQ ID NO: 290448 - DNA, 382 bp, Homo sapiens; identical to SEQ ID NO: 203714
  chr14:90849476-90849858
  hyper

SEQ ID NO: 290449 - DNA, 53 bp, Homo sapiens; identical to SEQ ID NO: 203715
  chr14:90849897-90849950
  hyper

SEQ ID NO: 290450 - DNA, 81 bp, Homo sapiens
  chr14:90850476-90850557
  hyper
tcccatgggccacatccgctgccatggtctgtgtcgtgccagaaggtacctctcagccctcagtgccgtgaaaaatctgac

SEQ ID NO: 290451 - DNA, 90 bp, Homo sapiens; identical to SEQ ID NO: 237663
  chr14:91224517-91224607
  hyper

SEQ ID NO: 290452 - DNA, 223 bp, Homo sapiens; identical to SEQ ID NO: 237664
  chr14:91224896-91225119
  hyper

SEQ ID NO: 290453 - DNA, 76 bp, Homo sapiens; identical to SEQ ID NO: 237665
  chr14:91526953-91527029
  hyper

SEQ ID NO: 290454 - DNA, 86 bp, Homo sapiens; identical to SEQ ID NO: 203717
  chr14:91580266-91580352
  hyper

SEQ ID NO: 290455 - DNA, 215 bp, Homo sapiens; identical to SEQ ID NO: 203718
  chr14:91580494-91580709
  hyper

SEQ ID NO: 290456 - DNA, 498 bp, Homo sapiens; identical to SEQ ID NO: 237667
  chr14:91581049-91581547
  hyper

SEQ ID NO: 290457 - DNA, 288 bp, Homo sapiens; identical to SEQ ID NO: 224757
  chr14:91755343-91755631
  hyper

SEQ ID NO: 290458 - DNA, 118 bp, Homo sapiens
  chr14:91883379-91883497
  hyper
cgagacaggaggaaaaacttcctcgccacttttctcccgcgttccagagcggaagaaataaaaataaaaaggacttttcaataaatgtctcacgtctcaaatccattgtaaatcagtg

SEQ ID NO: 290459 - DNA, 420 bp, Homo sapiens; identical to SEQ ID NO: 125084
  chr14:91883530-91883950
  hyper

SEQ ID NO: 290460 - DNA, 49 bp, Homo sapiens; identical to SEQ ID NO: 125086
  chr14:91975897-91975946
  hyper

SEQ ID NO: 290461 - DNA, 479 bp, Homo sapiens
  chr14:91976436-91976915
  hyper
ccagtggctcccttccgctccccctgttttaaacgtcagaagccgacaggcgcctgatcctgctgcaactgctaccactgcccgggagactctgagggcccccggccgcccaagcgacccggactagtggaagtcggtttccctccgccgccgtctcttccgtcttcctcacacagccaaaaccgccgccatcttggttcgcccctcaaaagcggcgcgcggggccacccagggagcagctgcaggggcggctcgtagccccaccatttaaagagacagcagcgagaccgggagccttactgcggcggaggcttccgacggaggcgggaggcgggcgcggagttgccgaggtggcgggagcgcagggagcggaggaggcgggacgcagattgcgccggtgacagcccgaggctccctcccgcctccttgcacgcaccgtcgtgcgagcgctgggcggtgtgtgcgtccgtcgcgccctg

SEQ ID NO: 290462 - DNA, 565 bp, Homo sapiens; identical to SEQ ID NO: 237672
  chr14:92302195-92302760
  hyper

SEQ ID NO: 290463 - DNA, 225 bp, Homo sapiens
  chr14:92413707-92413932
  hyper
agtcgtggagaggacacggggagagcgccggggtcctcccagccactgcagagccctcagcgcaagcacctggttttgcttagccctcttcagtaattcagcattaaaccaattggaggaggaatgttaaaaatgaacacttcattttctaagtatgttaaacaatgcaaatggggcctcagtctggacacagctggttcagattacagcgctcaccaactggct

SEQ ID NO: 290464 - DNA, 101 bp, Homo sapiens; identical to SEQ ID NO: 237675
  chr14:92573061-92573162
  hyper

SEQ ID NO: 290465 - DNA, 41 bp, Homo sapiens
  chr14:92588220-92588261
  hyper
cgaggcgtgcaggcgtgaccgccgtcgccttccgacagcac

SEQ ID NO: 290466 - DNA, 187 bp, Homo sapiens; identical to SEQ ID NO: 203723
  chr14:92980770-92980957
  hyper

SEQ ID NO: 290467 - DNA, 357 bp, Homo sapiens; identical to SEQ ID NO: 203724
  chr14:93214736-93215093
  hyper

SEQ ID NO: 290468 - DNA, 147 bp, Homo sapiens; identical to SEQ ID NO: 203725
  chr14:93582647-93582794
  hyper

SEQ ID NO: 290469 - DNA, 32 bp, Homo sapiens; identical to SEQ ID NO: 237683
  chr14:93799560-93799592
  hyper

SEQ ID NO: 290470 - DNA, 192 bp, Homo sapiens
  chr14:93896833-93897025
  hyper
cgtgggacgcacctgggtccctctctggtcaccctgctgaggctccgggggctgctccgggagcaggatttacaggcccggagaacgccaatgggagatccaaatggtcggggactccggcgctttaagaggcttttctctgggaaacacccgtcccctccgtgcgccttatgaatggaaatactcctcccc

SEQ ID NO: 290471 - DNA, 47 bp, Homo sapiens; identical to SEQ ID NO: 203727
  chr14:93897078-93897125
  hyper

SEQ ID NO: 290472 - DNA, 97 bp, Homo sapiens
  chr14:94226411-94226508
  hyper
catatttagacaggagcagacggagaggcagcataaatcaagccccacagcctgggctgccagggggaacaaaacaaggcaacgtcttggcacaatc

SEQ ID NO: 290473 - DNA, 144 bp, Homo sapiens
  chr14:94254150-94254294
  hyper
cgcgcaccaatatacctcccagcccgggtcggacgggcacgccccgcacccaggggcaccctagtaaaccaagcctgcacttacactccagcttacaccttcactgactcttcgtcagtcccagaattcacactcttcttacgc

SEQ ID NO: 290474 - DNA, 196 bp, Homo sapiens
  chr14:94406037-94406233
  hyper
gcgcgggtgaggggagggtcggggtgtggacgggtagggccggccccgccagcaggagagctcgggcgccaggctcggctggtcgccctgaccgcgggctgcgacgcggatcccaccggcagggggcgccgcgggtcaaccattctcaccccactgggcagggtgggtcggctgccgtctccgctttacagataag

SEQ ID NO: 290475 - DNA, 260 bp, Homo sapiens; identical to SEQ ID NO: 237688
  chr14:94492880-94493140
  hyper

SEQ ID NO: 290476 - DNA, 260 bp, Homo sapiens; identical to SEQ ID NO: 203729
  chr14:94547568-94547828
  hyper

SEQ ID NO: 290477 - DNA, 100 bp, Homo sapiens; identical to SEQ ID NO: 237690
  chr14:94595900-94596000
  hyper

SEQ ID NO: 290478 - DNA, 71 bp, Homo sapiens; identical to SEQ ID NO: 203730
  chr14:94640376-94640447
  hyper

SEQ ID NO: 290479 - DNA, 123 bp, Homo sapiens; identical to SEQ ID NO: 51636
  chr14:94889915-94890038
  hyper

SEQ ID NO: 290480 - DNA, 144 bp, Homo sapiens
  chr14:95233561-95233705
  hyper
agctggaaagctctctaagccttagctttaagtctataaaatggtaaaccgaagaaagttgaaagccattcctgctggcccttagtctccactttcatccccacgacggcctgggaaaccatacagagggcaggctcttgtctt

SEQ ID NO: 290481 - DNA, 260 bp, Homo sapiens
  chr14:95233765-95234025
  hyper
caccagcgctctgggcgcgttcccgggagctcccttctccgcccagctggtgcagaggaaagacagtctggggaagaagcaggaggtgtcggtactgccacctagaagtgaccccaccagcggtgcgctcttagacaagactggccttgagtgcatcacgtgcggccctggtcactccagatgcccagggagcagcacctggtcccggtcagccctagggcgcacagctcagaaatgccagagcagaaacgcttgccctg

SEQ ID NO: 290482 - DNA, 69 bp, Homo sapiens
  chr14:95234055-95234124
  hyper
gcagctggagcatctgtggaagttccaggaaagcgctgggggaggtggcatgcccgctgcctaattccc

SEQ ID NO: 290483 - DNA, 294 bp, Homo sapiens
  chr14:95235695-95235989
  hyper
cagggaaaaggaggaggcgtgttagagcatccatccgcacacccgccaaagccagtaagagaattcaaaacaaaacaaaacaaaacaaaacccagtttccccgggcaggcactgaattccagttttcgcgaactctggccaaaagtttgcagcaagaagtttgcaaactcctgcgcccgatcggcaaaagcggaggggggagttgcaagaggagcaaagtttgaggaaggtgaattaaccaaccggctccatgggctaaggaccgcagtgggcggcagaggccggagcgagcgc

SEQ ID NO: 290484 - DNA, 266 bp, Homo sapiens
  chr14:95236553-95236819
  hyper
acccgcgggtaggacggagctcagaccagctgaacctcttgttggttttatactgagtcgacgtcatcctggatttagttcctggtaatatgcagatgacaaacagaaccagatttggccctttcttttcctttgggtgggggaagagggttggggggagggggagaggtgccaaggggagggggttacaaggcctgaaaagagattgtggattgcgaattaatgaaattaacctaatcttttccattcggcagccgggccgcggg

SEQ ID NO: 290485 - DNA, 46 bp, Homo sapiens
  chr14:95236848-95236894
  hyper
ccttggttaatctcattaattcctttgtgccgccgcagttaacaac

SEQ ID NO: 290486 - DNA, 46 bp, Homo sapiens
  chr14:95237576-95237622
  hyper
taggcctgcccttccgcctggcaggcccagagtggattccctgggc

SEQ ID NO: 290487 - DNA, 85 bp, Homo sapiens
  chr14:95237782-95237867
  hyper
cgacggtacgcgcggaacaaaagcagtcccccagatcctgtggaccgggtgcaagctcccggcttgcaactcaggccactccagg

SEQ ID NO: 290488 - DNA, 302 bp, Homo sapiens
  chr14:95237922-95238224
  hyper
ggttgcgggagacctcgggtttcctgaaggaagtccgcctttaactcacacctatttttcgcgatttctctcaggctaattaaccaagggaccccgcaaagttgtctgaagtcgccgccgtaaggctaagtaagtgggctgcccactccccggctcaggggcaaaggggaaagcccacttgtcaatttctgttcgggtttcaaagagccattgcacggaggtttagtcctgtccgagggcactactgtggcggcgcgcagaagcggcccagtggagccaggcggcgacgtttctcctcctag

SEQ ID NO: 290489 - DNA, 46 bp, Homo sapiens
  chr14:95240181-95240227
  hyper
cggatttttcgtgtcatgtgcaaaaagccggtgtgtccttttcaag

SEQ ID NO: 290490 - DNA, 38 bp, Homo sapiens
  chr14:95240354-95240392
  hyper
gtttgtattgggacttttaaaaaatccagtctcaaagc

SEQ ID NO: 290491 - DNA, 62 bp, Homo sapiens
  chr14:95240422-95240484
  hyper
ctgctttctggaggacatctccggtagccccaggggattgtccgtgtgaggttgggtgggtg

SEQ ID NO: 290492 - DNA, 163 bp, Homo sapiens; identical to SEQ ID NO: 237697
  chr14:95240581-95240744
  hyper

SEQ ID NO: 290493 - DNA, 253 bp, Homo sapiens; identical to SEQ ID NO: 237698
  chr14:95241783-95242036
  hyper

SEQ ID NO: 290494 - DNA, 299 bp, Homo sapiens; identical to SEQ ID NO: 237699
  chr14:95623685-95623984
  hyper

SEQ ID NO: 290495 - DNA, 36 bp, Homo sapiens; identical to SEQ ID NO: 203734
  chr14:95864478-95864514
  hyper

SEQ ID NO: 290496 - DNA, 274 bp, Homo sapiens
  chr14:95932315-95932589
  hyper
ggcatcttcgtccacgctggggtccccgatcctgttgaacagggaggctgcctcctccagcagccggtccaggagcaccgcctggttgtccacgttgtgcagcagcacctgggcgtggctcagctgccactgcttctccttcaggcccagctggagctcgatgtggggctccagtgtgaccatcatcttctggaaccagcggtagaactcatctcgggccagcaggtactcgctccagtgcagccacacccactcgatgcggctgtgggcacag

SEQ ID NO: 290497 - DNA, 116 bp, Homo sapiens; identical to SEQ ID NO: 237700
  chr14:96001254-96001370
  hyper

SEQ ID NO: 290498 - DNA, 295 bp, Homo sapiens; identical to SEQ ID NO: 203736
  chr14:96152751-96153046
  hyper

SEQ ID NO: 290499 - DNA, 40 bp, Homo sapiens; identical to SEQ ID NO: 203737
  chr14:96342210-96342250
  hyper

SEQ ID NO: 290500 - DNA, 60 bp, Homo sapiens; identical to SEQ ID NO: 203738
  chr14:96342530-96342590
  hyper

SEQ ID NO: 290501 - DNA, 209 bp, Homo sapiens
  chr14:96505691-96505900
  hyper
tggagccagaagcccagagacagccgagtgcgccgtgcggtctccggacgctcgctgctcagcccgatccccgccaactgtgcaggcggctgacccgcagcggcagcggcagcagcgaggactcgagcgctggctgcagcgacaccatggatctctcctttatggccgcgcaggtaacggggcgtcccccccacgcgccccgggccgcc

SEQ ID NO: 290502 - DNA, 290 bp, Homo sapiens
  chr14:96506053-96506343
  hyper
ggggcgggctgcgcgccccgcacccccgcggctcgagctgttcccgcccgggcccctctcgttggcaggaaggctgcgaggagcctgggcagcccgagtcgcccccttctgcccatcccccactgctgtcccccttctggggtcccggagccctccaaggccgggccagctcagacccgcgcgaacgtggatgggcacacagtctcgcccttccccactctgttttcccgaggcgccagtaatctgtctcttgccggtgacctcgggcgccccctttgccgccgcctgag

SEQ ID NO: 290503 - DNA, 130 bp, Homo sapiens; identical to SEQ ID NO: 237704
  chr14:96670922-96671052
  hyper

SEQ ID NO: 290504 - DNA, 56 bp, Homo sapiens; identical to SEQ ID NO: 203740
  chr14:96678043-96678099
  hyper

SEQ ID NO: 290505 - DNA, 152 bp, Homo sapiens; identical to SEQ ID NO: 237706
  chr14:96968600-96968752
  hyper

SEQ ID NO: 290506 - DNA, 114 bp, Homo sapiens; identical to SEQ ID NO: 237707
  chr14:97050713-97050827
  hyper

SEQ ID NO: 290507 - DNA, 63 bp, Homo sapiens
  chr14:97059129-97059192
  hyper
tggatgcttcacgcagtaagcgagtaagcgagccctggagaccggggccctgggtgtgcggtc

SEQ ID NO: 290508 - DNA, 158 bp, Homo sapiens
  chr14:97059193-97059351
  hyper
gctcagtgccacgcggtgagataggcatggttatcaacccacgccaaggcggttgtgtacctggcatagaaaacactgctgttgaatgttgtttccatagtcattcgccagcgtccactgatgagaggtgccaccacggacacccggccttgctccgt

SEQ ID NO: 290509 - DNA, 79 bp, Homo sapiens; identical to SEQ ID NO: 237709
  chr14:97207757-97207836
  hyper

SEQ ID NO: 290510 - DNA, 182 bp, Homo sapiens; identical to SEQ ID NO: 237710
  chr14:97263999-97264181
  hyper

SEQ ID NO: 290511 - DNA, 57 bp, Homo sapiens; identical to SEQ ID NO: 203741
  chr14:97685959-97686016
  hyper

SEQ ID NO: 290512 - DNA, 95 bp, Homo sapiens; identical to SEQ ID NO: 203742
  chr14:99736020-99736115
  hyper

SEQ ID NO: 290513 - DNA, 60 bp, Homo sapiens; identical to SEQ ID NO: 203743
  chr14:99736213-99736273
  hyper

SEQ ID NO: 290514 - DNA, 149 bp, Homo sapiens; identical to SEQ ID NO: 203744
  chr14:99736431-99736580
  hyper

SEQ ID NO: 290515 - DNA, 138 bp, Homo sapiens
  chr14:99736842-99736980
  hyper
ccggcaaacagccgcgcagctggattattttgcaaatagcaggaggaggggagagaaaggcggctgcggaatcctaggactggcgcggccggcaccctgctgggccgggcgcagggaccggggacccggagccggcgg

SEQ ID NO: 290516 - DNA, 336 bp, Homo sapiens
  chr14:99737062-99737398
  hyper
gccaacttttccccacttcccggctccccctccccctccgctcccccagccccctccccctcctctccaaaccccgccaccagcgccgccgccgccacacacgccgctcggaggggcgagcgtccagccgggctcggcgcgcacacacacacactcctccagcctgcatgccccctccccggcccggagccggctccgcaggcccccgagcccgaggcgcgtccggctgctcggcgccccaactccccgggctgcaaagaaactttcctatggcccccgccccccgccatgctccaggccgacgccgtagactctgccagccagcgggcggccccg

SEQ ID NO: 290517 - DNA, 559 bp, Homo sapiens
  chr14:99737462-99738021
  hyper
ctccggcccctcgcgcgcactccgcagacacttacgggtgatgagctccctctgggacaagtgctgcgggttgccctgtttgcggcgggacattgccccggcatctattctggcatcgcccggagagctgcactgatggggggagccgggggagggggtccgagccgccgccgcgccgctgccgccgctgccgccgccgccgccgccgccgcacctcctcctctgcccgggttggtgttttttttcccttcctctctttccctctcttcctcctcttcttcttctttattttgctctttcttctatgctgttttttgttttgtttgcaaaaagaaaaaaaagggaagaaaagcaagaaaaacctctcgatctaaaataagaaaaagaggcaaaaaaaaaaaaaactgctgttgctttccgcggactggctggtttctttaaaaatatattctttcgaaggaaaaaaaatctcttacacttcttcaaactgcttggcctcttgcacttgcaaatgtcttcttgaacttaaactgggttttgcaccggctcctgacacttt

SEQ ID NO: 290518 - DNA, 323 bp, Homo sapiens
  chr14:99738533-99738856
  hyper
tggggctgcctctgtacaatgggataaaattcaagttcaagtgcggacgtgacgtttaatctgcactagagacaaaaagacccagagagtcggagcactgggggcgactagcggtggctttttaacattgtaccctgtaagagaacaagaaagcacacacagagacacactcgcgcgcgcgcgcacactcacacacacacacacacagtcgccagttgcgcacacccgcagcccaagccggacacacgtgcaaaccgcgtttttgtgcgctcatctcccccgagccccggctgcgcaacagcgggagggggttggggggggcc

SEQ ID NO: 290519 - DNA, 180 bp, Homo sapiens
  chr14:99739438-99739618
  hyper
accggggcgctccacgtgggagagggacttggacttgccagcccaggagtaggtgtggccaaatctccgcagatactcgggtgggtgactccaggaggcgcccctgacaatcacagcaacctggaagtcacaccccgccccccgcgctcctcggcccagggtaggacttggaaatgcctg

SEQ ID NO: 290520 - DNA, 459 bp, Homo sapiens; identical to SEQ ID NO: 203747
  chr14:99740032-99740491
  hyper

SEQ ID NO: 290521 - DNA, 500 bp, Homo sapiens; identical to SEQ ID NO: 203748
  chr14:99740713-99741213
  hyper

SEQ ID NO: 290522 - DNA, 80 bp, Homo sapiens; identical to SEQ ID NO: 51669
  chr14:99741277-99741357
  hyper

SEQ ID NO: 290523 - DNA, 128 bp, Homo sapiens; identical to SEQ ID NO: 237717
  chr14:99947369-99947497
  hyper

SEQ ID NO: 290524 - DNA, 1691 bp, Homo sapiens; identical to SEQ ID NO: 51671
  chr14:100069898-100071589
  hyper

SEQ ID NO: 290525 - DNA, 1115 bp, Homo sapiens
  chr14:100149732-100150847
  hyper
tgggcaaggagacgcgggttacgacagagggggaagccctggtcattatttcgaaaataccttctcctccgctacccccgcctccccggcacatttcccgctttccctggagggcggacccagattttcatccctccaactccaactccttcgggcctgagccagcgcctcagatggggcttcgcctggtctaggagggtccgcaggcccccgagtctctgggagaacagcctccggccacgccgtgcgctctcggtcgcagacacaggcgtccctgggtcccgcaggatcctgccaccagcccgcgggccccgctggcggaccacgggcgctaggcgtggactgtccgggcggaggaggcgccccggggcaactggagaacaactttgggggtctggggttccaaggagaagtttgggaacagtcggcgttatgcggacttttgcaggctgggatggggtttccgggcaggtttgggggaaaaaggaaggggcctaagaccgcgcgcggaaagatgccgttatttggaggcgccgaagcgggcggagccagccagcaggacttcgcgccgccgccgggccagagcgctgaggatcggcgttgccagggacaacgcgttctgggcggagctgctgctggggcggacctgagtctgaagaggtgggggcggagcctggggggctgagccagaagcggagttgtgattggtgaagaccacatgctcggggtggggcctgggctggggcggtgtggaggttggggcggagctctggggggcggggcggggcgggggagggcccggagcgccggagccggaggcggagacgtggttggcggggactgtgcgccctgggaggggtcggagtcggcgggggcggagccgagcgggcggggagggtgctgggtcgcgcctggcctggggccgaggcggcgcgcggcgctgacagctgagtcggctcgcggcctcccggccccctcggcgcccggcccgaccctggcctggcctgccctgccccggagccatgagccccgggctgctgctgctcggcagcgccgtcctgctcgccttcggcctctgctgcaccttcgtgcaccgcgctcgcagccgctacgag

SEQ ID NO: 290526 - DNA, 279 bp, Homo sapiens; identical to SEQ ID NO: 203753
  chr14:100259401-100259680
  hyper

SEQ ID NO: 290527 - DNA, 38 bp, Homo sapiens; identical to SEQ ID NO: 203754
  chr14:100260262-100260300
  hyper

SEQ ID NO: 290528 - DNA, 162 bp, Homo sapiens
  chr14:100437167-100437329
  hyper
gaactgtgtcttcttacacacggggagtgagaccctggaggatctggggtttccagccaccagtgagattcactaacctttaggaaagatggggatttaaaaaccagagacaacctggacgaactacttgacgctgtgtacggtaaatgtgatttttcacag

SEQ ID NO: 290529 - DNA, 55 bp, Homo sapiens; identical to SEQ ID NO: 203755
  chr14:100438971-100439026
  hyper

SEQ ID NO: 290530 - DNA, 66 bp, Homo sapiens; identical to SEQ ID NO: 203756
  chr14:100613202-100613268
  hyper

SEQ ID NO: 290531 - DNA, 169 bp, Homo sapiens
  chr14:100625299-100625468
  hyper
tgcttttttcaaagaaaacacgcgcgcctctcattcgcgtttgctcccttcccggcgctcatccgccctgaactccagcctggggcgcccgtggccgcgagacccaggggctctgagcgcagcaggcgcccagtgactgcgggtggaggccccgcgtcgcgcaagctgc

SEQ ID NO: 290532 - DNA, 248 bp, Homo sapiens
  chr14:100625926-100626174
  hyper
tggggcgggaggcgccgttcggagcgcggccggctcggctctgctgcacctgtcgcggcggccgcggcgcggaaccagctctgattagggcgggggcggggtcccggcggggcggggccaggtgcgccaggcttggggcggggcacctctggctgggcggggcggccgggccccggcgctctccagaccccggcgggtagctggcgctttgggaacctcagttgcctcggttggaaatggggctcccc

SEQ ID NO: 290533 - DNA, 64 bp, Homo sapiens; identical to SEQ ID NO: 125211
  chr14:100626295-100626359
  hyper

SEQ ID NO: 290534 - DNA, 224 bp, Homo sapiens; identical to SEQ ID NO: 237727
  chr14:100688018-100688242
  hyper

SEQ ID NO: 290535 - DNA, 206 bp, Homo sapiens; identical to SEQ ID NO: 224782
  chr14:100751381-100751587
  hyper

SEQ ID NO: 290536 - DNA, 402 bp, Homo sapiens
  chr14:100771908-100772310
  hyper
ccagagccgcgaccgcgcctcggagaaggtgccccacaccggctcgcccgacccacccaccaccccccttccgcccccaacagctcacaaaaccgcgtaggaaggggcggcgttccaaggcgtgactcggcgccagagtggttcagtgccctccaaggccagccgagtagggggtcggctccgtagccccaaccccgctggatggctgcgcgggacggggtggagtcagtcccgaaatatacggccgggggaggggaccctgctcccagtgcgcaacggatggggatgggggaggggaaggagatgagcccgggacctcggcgcggggggcagtggggcatcctcccggcagtcctggcctccgctcagccacggtgctgccccggcgccccagacctcccg

SEQ ID NO: 290537 - DNA, 370 bp, Homo sapiens; identical to SEQ ID NO: 203757
  chr14:100773262-100773632
  hyper

SEQ ID NO: 290538 - DNA, 239 bp, Homo sapiens
  chr14:101034173-101034412
  hyper
tcccccgccttccccagcgccctcacccccgacccggcccccgcgagccgcggcacgggagacgctccactcacctgagtttctccatgtctgcggcagaggcctgcgagaaaccaaacgagagggtcagcaggcaggaggcgtgcgctccgcggccgcgccgggcagagccgggcacagcgggcacggccgggcaaccccgcggggccccgtccgtgggaagcccggcgccgcgcgtc

SEQ ID NO: 290539 - DNA, 76 bp, Homo sapiens
  chr14:101034471-101034547
  hyper
gagtaacaggtgagcccgcccgggccgccgcgctccccgcaccgagttacgccccccggggcgaagaaggggccgg

SEQ ID NO: 290540 - DNA, 130 bp, Homo sapiens; identical to SEQ ID NO: 237730
  chr14:101053020-101053150
  hyper

SEQ ID NO: 290541 - DNA, 78 bp, Homo sapiens; identical to SEQ ID NO: 203758
  chr14:101192402-101192480
  hyper

SEQ ID NO: 290542 - DNA, 178 bp, Homo sapiens
  chr14:101192969-101193147
  hyper
gtgcgcggcggccgcgtgctgtacagtgtgagggaacgtgtaccaaacgctcgcgggatacctgtgcccgtctagccaagagtgcacccgtgtgcgcgagcgggcttctgggacgccgccgtggtcgggggcggccctgcgaggggagggggtcacagggactggccggcgccggccc

SEQ ID NO: 290543 - DNA, 37 bp, Homo sapiens; identical to SEQ ID NO: 203759
  chr14:101544235-101544272
  hyper

SEQ ID NO: 290544 - DNA, 52 bp, Homo sapiens
  chr14:101923286-101923338
  hyper
aaaccccgtggttcccaatgagccagcgaaagtctgtcgaagtattgagcac

SEQ ID NO: 290545 - DNA, 213 bp, Homo sapiens; identical to SEQ ID NO: 203760
  chr14:101924579-101924792
  hyper

SEQ ID NO: 290546 - DNA, 101 bp, Homo sapiens
  chr14:102026077-102026178
  hyper
cgttccttcgctgccgaaagcgattcgcccgcgctctaccgagcccagccagctcctacctcggcccgggcggcgagcgctgtctccgtcccgagaagaag

SEQ ID NO: 290547 - DNA, 131 bp, Homo sapiens; identical to SEQ ID NO: 203761
  chr14:102027041-102027172
  hyper

SEQ ID NO: 290548 - DNA, 75 bp, Homo sapiens; identical to SEQ ID NO: 51702
  chr14:102027654-102027729
  hyper

SEQ ID NO: 290549 - DNA, 228 bp, Homo sapiens
  chr14:102029161-102029389
  hyper
ggagactctcagctcagctgagctagttgcctggcacccacctgtcgcgcgcggagagggggttccctgttgcttttgtgtctgtttcctgtccctggtaggggaagtgatgtcgtggatggggaggggtgggcagggtagtttcccccgcttgttttgggtgcacaggagccccactgctgatgacgaactatctctaactggtcttgaccacgagctagttctgaa

SEQ ID NO: 290550 - DNA, 230 bp, Homo sapiens
  chr14:102030325-102030555
  hyper
aggtccgctggaggcgcgccttggcagaggggcgccctcactccagctgcggctcctactgccgggccagcgtgctgctgggtgcgccccctgcccaggacccccctcctcctgtccctcctccgcttccccaagctccagtcaaaccccaccacccgctccgtgctgggaagcagaggtgggaggccgctgggatgaagagagagagaccagggagaggtgaatggtgg

SEQ ID NO: 290551 - DNA, 107 bp, Homo sapiens; identical to SEQ ID NO: 203762
  chr14:102030909-102031016
  hyper

SEQ ID NO: 290552 - DNA, 179 bp, Homo sapiens
  chr14:102031271-102031450
  hyper
tccctgacctccccgcacgcgcggctggccgggactggagcttggtggcgcggagggtggcctgggacagcgtcagcctcccggcccagcagagaccgctccagccgctccgcgtccctaccggtggcttgggggtccccttggacgcgccaagcgacctctcctacccggaaagcctg

SEQ ID NO: 290553 - DNA, 86 bp, Homo sapiens
  chr14:102247586-102247672
  hyper
ttgtttacagctgccgtatttcccgggaccctggcttctgtcctcagggaccccttcagaccttccccaccctccgaagcctcaac

SEQ ID NO: 290554 - DNA, 47 bp, Homo sapiens
  chr14:102248214-102248261
  hyper
cggagcggcacccaggagcccgccctagcacccgctcccgctcccac

SEQ ID NO: 290555 - DNA, 83 bp, Homo sapiens; identical to SEQ ID NO: 237742
  chr14:102276019-102276102
  hyper

SEQ ID NO: 290556 - DNA, 141 bp, Homo sapiens; identical to SEQ ID NO: 237743
  chr14:102605815-102605956
  hyper

SEQ ID NO: 290557 - DNA, 32 bp, Homo sapiens; identical to SEQ ID NO: 203763
  chr14:102606251-102606283
  hyper

SEQ ID NO: 290558 - DNA, 241 bp, Homo sapiens; identical to SEQ ID NO: 237745
  chr14:102771431-102771672
  hyper

SEQ ID NO: 290559 - DNA, 60 bp, Homo sapiens; identical to SEQ ID NO: 237746
  chr14:102829077-102829137
  hyper

SEQ ID NO: 290560 - DNA, 159 bp, Homo sapiens; identical to SEQ ID NO: 237747
  chr14:102829774-102829933
  hyper

SEQ ID NO: 290561 - DNA, 377 bp, Homo sapiens; identical to SEQ ID NO: 203764
  chr14:102975681-102976058
  hyper

SEQ ID NO: 290562 - DNA, 219 bp, Homo sapiens
  chr14:103010922-103011141
  hyper
cctgaaacgctgcccggaacgccccgcgggagaacatctgcgccaggggccgggggccgggggccgcggcgggcgaaatccgagaggcccgggctcctcctgctgcgcggccggggaggggggcgcctgccgggtcggggctggaggacctgcgcgcggccccgggaggccccgcctcgccttccagtctgtgaaatggggcgacggcctgggcgtggc

SEQ ID NO: 290563 - DNA, 96 bp, Homo sapiens; identical to SEQ ID NO: 125264
  chr14:103011360-103011456
  hyper

SEQ ID NO: 290564 - DNA, 231 bp, Homo sapiens; identical to SEQ ID NO: 237751
  chr14:103057881-103058112
  hyper

SEQ ID NO: 290565 - DNA, 173 bp, Homo sapiens; identical to SEQ ID NO: 203767
  chr14:103242390-103242563
  hyper

SEQ ID NO: 290566 - DNA, 61 bp, Homo sapiens; identical to SEQ ID NO: 203768
  chr14:103394622-103394683
  hyper

SEQ ID NO: 290567 - DNA, 212 bp, Homo sapiens
  chr14:103430222-103430434
  hyper
tcccttccaggtcctcgcctgcctcatggcacagcagagctggcctggtttttatgaaactgacgttcattatcgtatcctcgtaaaaccagatctgcaaagaggagactctcagcaaatactgactgaatcactgctgtgtgaaaatggcgttctcgttactgcttggagttagggaaaaatttcaagtgagaatgccatcttcaacctct

SEQ ID NO: 290568 - DNA, 124 bp, Homo sapiens
  chr14:103430509-103430633
  hyper
agtgagaggggctcctgtcagacagcggtgtgagtctcgctacccagcgtgggggcacaagcacccgctgccgtcaaaacacggctcgcaccgcaccacacccccccgcggcaggcaaggccct

SEQ ID NO: 290569 - DNA, 1541 bp, Homo sapiens; identical to SEQ ID NO: 203770
  chr14:103523058-103524599
  hyper

SEQ ID NO: 290570 - DNA, 77 bp, Homo sapiens; identical to SEQ ID NO: 203771
  chr14:103541957-103542034
  hyper

SEQ ID NO: 290571 - DNA, 272 bp, Homo sapiens; identical to SEQ ID NO: 237756
  chr14:103557877-103558149
  hyper

SEQ ID NO: 290572 - DNA, 38 bp, Homo sapiens; identical to SEQ ID NO: 237757
  chr14:103571012-103571050
  hyper

SEQ ID NO: 290573 - DNA, 439 bp, Homo sapiens; identical to SEQ ID NO: 237758
  chr14:103571080-103571519
  hyper

SEQ ID NO: 290574 - DNA, 109 bp, Homo sapiens; identical to SEQ ID NO: 237759
  chr14:103590101-103590210
  hyper

SEQ ID NO: 290575 - DNA, 219 bp, Homo sapiens
  chr14:103593755-103593974
  hyper
ttctgcacttgggccgcaccatgaaggaggacctggaggccgtggtggagcggctgaagccgctgttccccgccgagttcggcgtcgtggcggcctacgccgagagctaccaccagcacttcgcggcccacctggccgccgtggcgcagttcgagctgtgcgagcgcgacacctacatgctgctgctctgggtgcagaacctctaccccaagtgagcag

SEQ ID NO: 290576 - DNA, 289 bp, Homo sapiens
  chr14:103594004-103594293
  hyper
ggtgtcctctgtaggaggggtgtcgaggggtgtcgaggtgtgccgccggcagcttttagtgaggtcggtgtttgcagagttttgggtccgagaatgcaggggtgggacttggactccctggggcagagcctggacaggcagagactgggcctggacacagggataaggctggggctgggtctgcgttgctcttggaatccttaatttcctgggcctcagtcacattctgctgttggggaaactgaggcacagaaaatggtagggatttcattcacgagcgcccagtctg

SEQ ID NO: 290577 - DNA, 43 bp, Homo sapiens
  chr14:103686663-103686706
  hyper
ccgcgctcccgggccgaccctctgcggcctctgctctgcgcag

SEQ ID NO: 290578 - DNA, 34 bp, Homo sapiens; identical to SEQ ID NO: 203774
  chr14:103739884-103739918
  hyper

SEQ ID NO: 290579 - DNA, 89 bp, Homo sapiens
  chr14:103740611-103740700
  hyper
ccaggcctctgtcttcacacaggaggaactccaggccctcgtttaggactccaggccaaaggctgtgtcagccgcgggtcccccgccac

SEQ ID NO: 290580 - DNA, 49 bp, Homo sapiens; identical to SEQ ID NO: 203775
  chr14:103745189-103745238
  hyper

SEQ ID NO: 290581 - DNA, 85 bp, Homo sapiens; identical to SEQ ID NO: 203776
  chr14:103745819-103745904
  hyper

SEQ ID NO: 290582 - DNA, 52 bp, Homo sapiens; identical to SEQ ID NO: 237766
  chr14:103800152-103800204
  hyper

SEQ ID NO: 290583 - DNA, 111 bp, Homo sapiens; identical to SEQ ID NO: 237767
  chr14:103851531-103851642
  hyper

SEQ ID NO: 290584 - DNA, 270 bp, Homo sapiens
  chr14:103988425-103988695
  hyper
ctcgatgatggggtcgaagagatccttgaacacttcgtaggactcctcgtcgcccgccacgcagcccacggtcatgatgtacgggtggcctgggggagggggcgcgggacggggacagtgacgtcactgccgggcccgagcgcgctgctgaggaccctgcggctgcgcggggggagggggggccgggaccccggccccgaggggtcgcgtacccgggttgtccacgcctgtctggatgacgtcgtccagcgtgaagccgctcggcgtgct

SEQ ID NO: 290585 - DNA, 418 bp, Homo sapiens
  chr14:103988736-103989154
  hyper
tggccatgtggttgttgtgggcgctcaggtcggggaactcgtcctcggccgggaagcgcagcttcagtgcgttgtggctgttggagaagggcatggcggcggcgggctgcggggagacgcggggtcagaggggaccggcacgccggggttcccgggctcccgcgtaccactcaggcccccgccgccgggccccccggcgccccccgggacgcggccaaggtcagcggggtccgcagcgcgcgcggggagcgccatcatcgccggggacccccggccggtccggcgcgcgctccaggcgacgcgccccctttgcacgcagcgcccctagcccgggcgcggacgcccccggcccccgggcccactcaccgggcggccgggcgggggcgggggcgctccgtccgtcggcagctcccggagc

SEQ ID NO: 290586 - DNA, 122 bp, Homo sapiens; identical to SEQ ID NO: 203778
  chr14:103989597-103989719
  hyper

SEQ ID NO: 290587 - DNA, 361 bp, Homo sapiens; identical to SEQ ID NO: 237769
  chr14:104029513-104029874
  hyper

SEQ ID NO: 290588 - DNA, 119 bp, Homo sapiens
  chr14:104094604-104094723
  hyper
ctggcagcagcgagcggagcctcgcccattgaatcagcatgccctcccggctggctgctgagtcaggcctgcggagccggcgaagccgcaggacttgacccaggcgcgctccgctgccc

SEQ ID NO: 290589 - DNA, 174 bp, Homo sapiens; identical to SEQ ID NO: 237771
  chr14:104181915-104182089
  hyper

SEQ ID NO: 290590 - DNA, 231 bp, Homo sapiens
  chr14:104582801-104583032
  hyper
tcaggcccttgctgcgtgagggggtagggcgtccctccccccgcgtgggaaatgaggaggcaggtacggggctacccctgtgggctgcggggtgggggttcagggtctgagaagcagaaacctccctccctccagtttcactttctctttacccctccccttccccctcccacgaagttccctttgaagtgagaggggctggggtgggtgtgtccagcccagcccccacac

SEQ ID NO: 290591 - DNA, 987 bp, Homo sapiens; identical to SEQ ID NO: 125314
  chr14:104583110-104584097
  hyper

SEQ ID NO: 290592 - DNA, 125 bp, Homo sapiens
  chr14:104601612-104601737
  hyper
ggacggccttgcggcgccgccggagcagtggggttgtggggcgtggccatggtccttcccaggggagagtagaggagtgcagggggcagagagcacagaaagtctagcccagccttagcacccca

SEQ ID NO: 290593 - DNA, 340 bp, Homo sapiens
  chr14:104603375-104603715
  hyper
aggggcgcaggaccggtgctcccgaccgctgcgtgcttctgtgttgcgtgtgtgggtggggggacgggatatagagagtgtgtgtcccggagcagtggagcggcgggaggcggtgctgtctgccggcagtgcggggtggggtttgggtgttgtcctcagtacccagatccagatgtgggctgacgcccgttttcattctccaggctgcgaagagacgggtaggggaagcgcttccggccccccaggctgggtggaaagcgactgcaggcttacggatctcagaaagagtggagagcccctgccactttattccatacccccttgcgttttcgaaccccta

SEQ ID NO: 290594 - DNA, 352 bp, Homo sapiens
  chr14:104603753-104604105
  hyper
caccccactttctggggagtgcgtgcgtgggcggggaggcttatccaagtaaaagggggtgggcaaaacggaaagggtcactttgacgtactgagtctctgcgaaggcctcaccgtatgtgccggcagccgcgtgtcctggtctccgccgggtcacgaccttcggagtttccgagtgcgcctcaggcctgggacgcgcggcgctgtctccccagtctcggagccgtgtgcgcagcggccggcagggggcactcgcgtcacggggagcccgcccgccgcgcccgcctggcttgacccgggctttggggctgacccggagcctggcccggagctgcctgcggccgcggatgccg

SEQ ID NO: 290595 - DNA, 199 bp, Homo sapiens; identical to SEQ ID NO: 203782
  chr14:105070705-105070904
  hyper

SEQ ID NO: 290596 - DNA, 62 bp, Homo sapiens
  chr14:105071236-105071298
  hyper
ccgcggacagctcctggtgcgcgcgggccaggagcccggggtccaggggccagagaagggcg

SEQ ID NO: 290597 - DNA, 34 bp, Homo sapiens
  chr14:105071396-105071430
  hyper
ccgactctgggtcgtcagttcctcatcagctcga

SEQ ID NO: 290598 - DNA, 81 bp, Homo sapiens; identical to SEQ ID NO: 237775
  chr14:105155746-105155827
  hyper

SEQ ID NO: 290599 - DNA, 200 bp, Homo sapiens; identical to SEQ ID NO: 203783
  chr14:105156381-105156581
  hyper

SEQ ID NO: 290600 - DNA, 213 bp, Homo sapiens; identical to SEQ ID NO: 125321
  chr14:105189960-105190173
  hyper

SEQ ID NO: 290601 - DNA, 37 bp, Homo sapiens; identical to SEQ ID NO: 203785
  chr14:105190455-105190492
  hyper

SEQ ID NO: 290602 - DNA, 337 bp, Homo sapiens
  chr14:105195466-105195803
  hyper
tgggccaagcagacgctgtggccagaggagtcatccatggcagtaaagggcctatggactgcagggcagagaagggcagtggcaagtgggccgggagtggagggggccctggcaggtcaaaggaggtcaatggacagcccccaagccaggcagatggcaggtggcatcccaaggatttagggacggggtggacaggagcaggacgatggctgcagggcaaggctgggacccgcacgggtgacaagctcagtgcaggggcagggcatgcgccatctgggcagtgtggaggtgaggagcaaggacaaagcctgtgtgtggagacgccttgcacgtgtca

SEQ ID NO: 290603 - DNA, 148 bp, Homo sapiens; identical to SEQ ID NO: 203786
  chr14:105196124-105196272
  hyper

SEQ ID NO: 290604 - DNA, 317 bp, Homo sapiens
  chr14:105269022-105269339
  hyper
ctctccaactcattccggcccccaggctgtgccctgcctaggctgtgacactatcttcctctcccgtcccctccagccaagttctgaggggtgtccaaccagcacctggctctgcccccgtttctccgtgtgagatggcacatccatctcccggcccgggactttcctgaccacctctctggcaggcttggggaggtcttcatgagcctggccccacgctaggtgaattattcacatgtcagaaaagttgttggtgtgcgtcccaatggggcgctgggagggaacaggacactcctggggagcggcagcaggaaccc

SEQ ID NO: 290605 - DNA, 678 bp, Homo sapiens; identical to SEQ ID NO: 237779
  chr14:105293563-105294241
  hyper

SEQ ID NO: 290606 - DNA, 484 bp, Homo sapiens; identical to SEQ ID NO: 203787
  chr14:105330456-105330940
  hyper

SEQ ID NO: 290607 - DNA, 727 bp, Homo sapiens; identical to SEQ ID NO: 203788
  chr14:105330980-105331707
  hyper

SEQ ID NO: 290608 - DNA, 154 bp, Homo sapiens; identical to SEQ ID NO: 51765
  chr14:105331744-105331898
  hyper

SEQ ID NO: 290609 - DNA, 199 bp, Homo sapiens; identical to SEQ ID NO: 237782
  chr14:105332329-105332528
  hyper

SEQ ID NO: 290610 - DNA, 103 bp, Homo sapiens
  chr14:105444349-105444452
  hyper
gagactccagcggccgggaaggcccagaaccacgcgcgagtcccgcaggcgtctccgagtcccccgcccccaaggcccgcactgcgcgcccctggacacgccc

SEQ ID NO: 290611 - DNA, 138 bp, Homo sapiens
  chr14:105444808-105444946
  hyper
tgccgtcggcctcattcagcccattggctgccgtcgccgcggccccgcccctcccagccaggccccgccccaccccgcgcccccggcccgcctgtcgcgtccgcagaattaactttggactcccgccagggagcgacc

SEQ ID NO: 290612 - DNA, 230 bp, Homo sapiens; identical to SEQ ID NO: 237785
  chr14:105487900-105488130
  hyper

SEQ ID NO: 290613 - DNA, 97 bp, Homo sapiens
  chr14:105511596-105511693
  hyper
aggacaggaatatccgggtctctttgcacggtgtttgccaccttctgtaaattgggattttttttttttttttttttttttttgagacggagtctca

SEQ ID NO: 290614 - DNA, 44 bp, Homo sapiens; identical to SEQ ID NO: 203790
  chr14:105511922-105511966
  hyper

SEQ ID NO: 290615 - DNA, 92 bp, Homo sapiens; identical to SEQ ID NO: 203791
  chr14:105512395-105512487
  hyper

SEQ ID NO: 290616 - DNA, 220 bp, Homo sapiens; identical to SEQ ID NO: 237788
  chr14:105559994-105560214
  hyper

SEQ ID NO: 290617 - DNA, 155 bp, Homo sapiens
  chr14:105647609-105647764
  hyper
cccgacaggagccttcgggcgggcgcgtgaccgcggctctgagcatgctccgtgggcgcgcggggcggggcggccgaggtgggcggggcggccgaggtgggcggggctcgcaggtgccacctgtcgggtgccgcgcgcctcggggcgctggtcgc

SEQ ID NO: 290618 - DNA, 164 bp, Homo sapiens
  chr14:105662773-105662937
  hyper
cacccgcccccagcgccgcaggatctggaggcgggagccccgccctcacagtgtccccctggaggggacatcccgctcctgcccccgccctgcagaccgcacaccgagccccagcctcactccccagcccccgggagccccgagccaggtctgccgtcgcctct

SEQ ID NO: 290619 - DNA, 36 bp, Homo sapiens; identical to SEQ ID NO: 51778
  chr14:105715538-105715574
  hyper

SEQ ID NO: 290620 - DNA, 180 bp, Homo sapiens; identical to SEQ ID NO: 203794
  chr14:105781805-105781985
  hyper

SEQ ID NO: 290621 - DNA, 202 bp, Homo sapiens; identical to SEQ ID NO: 224811
  chr15:20478123-20478325
  hyper

SEQ ID NO: 290622 - DNA, 760 bp, Homo sapiens
  chr15:22892004-22892764
  hyper
agttttcctaaacacgcctgtgaccagctgactccactcagcgtttccgtgtgaggtatgtttcttcaccggcctttcaagattgttttttggcacgagctcaaatcaggttttcttccgtccgccgttcccgcaggtctgcgcacggatttgtccctggttcccgcaggcaatggggccgcaggggccggccgggggggtccccagcgggctctgcgcgccgacctgcagctgggacccgcgcctggaaccctcccgacgagcgcaggtgagcgcctcctgccaagtggggcggcgccacacgggcgtcctgggtgtccccctgagctccttccgcagctcaggccaacccccgccctgacccggtggagccccgggacagggtgcggaccccgttccttcgcgctccgaaccggacggacccgcaggaggaccccacgcccgctccgctccgaccccgccgtcccgcgcaggctgcggtgacccaggccggcaggtagccaggggctctctgcctgggaggacaccttcggcggctggcgtggggaaaggggccgcccggccggggatgccccgccaggaggagggagcggccggggccgcggccgggagggaggagcgccgggaggaagaggccgagccgggagagcccccgccccgggaggaaggggaggaggccgagtgtttcctggcgcattcccggccagcccgagtgactcactcggccaaggaaactcccagggcccgcccaggaccccca

SEQ ID NO: 290623 - DNA, 677 bp, Homo sapiens; identical to SEQ ID NO: 203796
  chr15:22893131-22893808
  hyper

SEQ ID NO: 290624 - DNA, 325 bp, Homo sapiens; identical to SEQ ID NO: 237794
  chr15:25683895-25684220
  hyper

SEQ ID NO: 290625 - DNA, 587 bp, Homo sapiens; identical to SEQ ID NO: 237795
  chr15:26095517-26096104
  hyper

SEQ ID NO: 290626 - DNA, 433 bp, Homo sapiens; identical to SEQ ID NO: 237797
  chr15:26178857-26179290
  hyper

SEQ ID NO: 290627 - DNA, 127 bp, Homo sapiens
  chr15:27016782-27016909
  hyper
caaaagcccgcttcgcacctcggggtactgacctccgcttcccacaggtcagaatattgaatccagtctgcattcacagaagacctaagtgacactgtgtcaccagcctccgactctcccggtagag

SEQ ID NO: 290628 - DNA, 39 bp, Homo sapiens
  chr15:27016944-27016983
  hyper
cgctctctgaagcagcggaagcctgtcagcacctcggac

SEQ ID NO: 290629 - DNA, 192 bp, Homo sapiens; identical to SEQ ID NO: 203797
  chr15:27017019-27017211
  hyper

SEQ ID NO: 290630 - DNA, 77 bp, Homo sapiens
  chr15:27017828-27017905
  hyper
cccgaagtcgggtcttaggcgaatgtcgtagcctttcaacagcttgtccaccgtctccttcacaaaggacatgttcc

SEQ ID NO: 290631 - DNA, 135 bp, Homo sapiens
  chr15:27018876-27019011
  hyper
tgttcctccggcctaacctgctgggatccgctctcccccctactctccgagcagccaaacggcgacgcagggatccccgcccctacccccacccccacccccaggctttcccgcctgacccgtcttccagcccct

SEQ ID NO: 290632 - DNA, 67 bp, Homo sapiens
  chr15:27216000-27216067
  hyper
tcaaccccgggcgacggcgggcacgggaggtcagggagcgctggaggaaacctgcactggggtagaa

SEQ ID NO: 290633 - DNA, 46 bp, Homo sapiens; identical to SEQ ID NO: 203798
  chr15:28339717-28339763
  hyper

SEQ ID NO: 290634 - DNA, 275 bp, Homo sapiens; identical to SEQ ID NO: 203799
  chr15:28340034-28340309
  hyper

SEQ ID NO: 290635 - DNA, 303 bp, Homo sapiens
  chr15:28340905-28341208
  hyper
tctgacataataccggcaaggaacgagaagcaccaggtttaggcgctgaggtgaaaatttggctgttgaaaggcagtccctctgcagccaactcccctctggtggacagtgtctaacatccagagaaaacacccgtcactgaacgctcccctccccacaaagcgctgcttggccccaaatcgtccctaatgcgctgctcagccccaaggcgtccctctgagcgagaaaccgcccctggctatgcttgcaggggcctggctgggtccacagggcatggctgtgtctctcggagcacggcccttc

SEQ ID NO: 290636 - DNA, 99 bp, Homo sapiens
  chr15:28341521-28341620
  hyper
gcgtagccgtgtctcgggagcctggcggtgtccgcaggagcgatgctgtgaccgttgcatttgaagcattccttctagttcccggatcccagggagggg

SEQ ID NO: 290637 - DNA, 49 bp, Homo sapiens; identical to SEQ ID NO: 237807
  chr15:28344695-28344744
  hyper

SEQ ID NO: 290638 - DNA, 91 bp, Homo sapiens; identical to SEQ ID NO: 203801
  chr15:28351667-28351758
  hyper

SEQ ID NO: 290639 - DNA, 119 bp, Homo sapiens; identical to SEQ ID NO: 125411
  chr15:29033933-29034052
  hyper

SEQ ID NO: 290640 - DNA, 45 bp, Homo sapiens; identical to SEQ ID NO: 203802
  chr15:29107356-29107401
  hyper

SEQ ID NO: 290641 - DNA, 51 bp, Homo sapiens
  chr15:29130656-29130707
  hyper
gaggccgcgatccccgagagttcttcgctcgagggttcttcgctctagggt

SEQ ID NO: 290642 - DNA, 39 bp, Homo sapiens
  chr15:29395819-29395858
  hyper
gctccccgggcttggagcttccgcgggggcggaggatgt

SEQ ID NO: 290643 - DNA, 65 bp, Homo sapiens
  chr15:29396084-29396149
  hyper
agccccatcagctcgccaactccgcaggccagcccggcggcgccatctggcggtccccgggcgtc

SEQ ID NO: 290644 - DNA, 172 bp, Homo sapiens; identical to SEQ ID NO: 237811
  chr15:29432129-29432301
  hyper

SEQ ID NO: 290645 - DNA, 60 bp, Homo sapiens
  chr15:29561185-29561245
  hyper
cggtgtggggtatccgccggtattccaggtaacgctgtcgcacaaagtcctcagtaatga

SEQ ID NO: 290646 - DNA, 1055 bp, Homo sapiens
  chr15:29561316-29562371
  hyper
gcttcagtttccttgatggtgttgcccttcataaagatgagccctaagacgatcatcaggaggcccgtagtgggcgtgccttggtcacccctcatctcggcatcctcctccacaggctccagggtgttgatgaggatgtaagtgttgctcttgggttcaagttccaccagcttatacccgaagacgtactggaggcgctcggcggcccgtttgaagaggtcggggaagatgtccttgtagtccccgatgacgtgcttcagtatgtcggcccgcttgatcggaatcttcttctggtctttaatcagcaagaactgcaccagctcggacactttcagctccagctgcttctggctcctgggccccacggcgggggcggcctgggcccggcgggcgccctgaggcgaggggccctgcgacccctgcgagccgcccggcccgcgggacgtgctcggggcctcctcggcaaagccgtctctgagaacccgggcgtcttccccggcccgcgaagccccggggtttccgctatggctccagtctctgtccctctcggcctggccgccagagcggccccggttcctcggtttttgcaacatgtctccggcggcaggtgccggcgcacactccggtaggcaagcagccgcggcggggattgcgggtcggcgacccgctaacgccggtgcctggaggcgcgcgcagtgtcggctgagactgcgtgctgcgtcatgaagcctgcgccttgcgtcagggcggctgggcggtgcgcctgcgcggctgcggcgggtaccaaaaggaacagcgttttccgtgcagccctgcaggtccgggcgatgatttttagtatagtgaagtgttgttaccaaaccatgcaaacagagagcgagaaccgaaactcctaaacaagtgtgtcgctaaattcagaccacacaggctcaggcaagttttacagacagtattatgagtttctaaatcgggagcatttgtaaacggaaagaattcagaggatgaacgtgtgagaaaaaaaaaaggtgaagaggaagggccgaccgtggaagtaa

SEQ ID NO: 290647 - DNA, 63 bp, Homo sapiens; identical to SEQ ID NO: 203804
  chr15:29862439-29862502
  hyper

SEQ ID NO: 290648 - DNA, 288 bp, Homo sapiens
  chr15:29862582-29862870
  hyper
ctactcggccccggcgttggccgccggaacttgccgcccgcggtggcgtcccggcggccgcagcgcctagcccccccggcccgcgcagtccccggagcccgtccccgcctggtcgcggacactcaccgagaagcctgcccagaaggggcaggagtggcggacgcgggccgaggtggtgagcgccagcgcggcgaagctgactgccacgatgaggcatccgagcgccatctgcgtggccccgagcgccagcacgatgcgggagcggcccgggcactcgcgcaggcggga

SEQ ID NO: 290649 - DNA, 297 bp, Homo sapiens
  chr15:29863222-29863519
  hyper
cgcgagccgccgccgctgctgccgtaccgggcgcgagccgctgccgtccccgggcgcgagccccgccgccgtgcgctgggccccagctggggcgggagcgggagccgggacccgggagccgggagaggggcggggaaggcgcaggtgcggtcctggcgtcccagcctccgcgctcacgcctcgcgccctggcggctgcaggtctgcggaaggagagcgggggcggcagcgcatcaagggcaacggcatcagcctccgcggcggagccctgggtcggctgcgcggaggggcccgatag

SEQ ID NO: 290650 - DNA, 58 bp, Homo sapiens; identical to SEQ ID NO: 203807
  chr15:29864126-29864184
  hyper

SEQ ID NO: 290651 - DNA, 45 bp, Homo sapiens; identical to SEQ ID NO: 203808
  chr15:29966982-29967027
  hyper

SEQ ID NO: 290652 - DNA, 343 bp, Homo sapiens
  chr15:30113523-30113866
  hyper
tcttattgtccattcgtaggaatactttgtattacttgtgaaagtttaattcaagttaaattattaaatgttaaagaggttattttcaaagttaccttaaataagtaatacagcatgaaagaaaacccgacctactacgcctcacaggctgagtggagtgttttgcagtctcaaagccttatcgctggcgtgcgcataccgcagggagtgacatcagatcgaaactacagggtttcgccggggaccaaccactcctccaaagacagcagctcccggccagcaggaggtggcaccccaagccccgacccgctgagagccggcttccagcccccgaaccctcact

SEQ ID NO: 290653 - DNA, 319 bp, Homo sapiens; identical to SEQ ID NO: 203810
  chr15:30113984-30114303
  hyper

SEQ ID NO: 290654 - DNA, 431 bp, Homo sapiens; identical to SEQ ID NO: 203811
  chr15:30114349-30114780
  hyper

SEQ ID NO: 290655 - DNA, 375 bp, Homo sapiens
  chr15:30114810-30115185
  hyper
aagcgcggaaggaaaagccgggtaacccaagtaacttggaagacagtttccgctgccgtgcgagtcttcctgtttgtttttatccaaggtctggcagaattcgcccccaaggagaaagcgcctgtgcaccaaagctttccttaagagacttgtccacttgctcctcgacaagccacgcacatcatggggtgagccccatgcatgagtgcggctggaaaggccggcagagccgatacccgacagttgtttccttcactgggcaaacagcatggtcacggctgtcaccgcgtgcctcggcgttgttcccacggaaggcggaatgcattttctgcaaggcgcgtcatggctttcatctccgaggagctccggcagggt

SEQ ID NO: 290656 - DNA, 31 bp, Homo sapiens
  chr15:30260516-30260547
  hyper
tctgagccagaacccgccgtaatggagcaga

SEQ ID NO: 290657 - DNA, 131 bp, Homo sapiens; identical to SEQ ID NO: 203813
  chr15:31507691-31507822
  hyper

SEQ ID NO: 290658 - DNA, 161 bp, Homo sapiens; identical to SEQ ID NO: 224818
  chr15:31508793-31508954
  hyper

SEQ ID NO: 290659 - DNA, 261 bp, Homo sapiens; identical to SEQ ID NO: 125434
  chr15:31620800-31621061
  hyper

SEQ ID NO: 290660 - DNA, 340 bp, Homo sapiens; identical to SEQ ID NO: 237823
  chr15:31621315-31621655
  hyper

SEQ ID NO: 290661 - DNA, 44 bp, Homo sapiens; identical to SEQ ID NO: 203816
  chr15:31621685-31621729
  hyper

SEQ ID NO: 290662 - DNA, 524 bp, Homo sapiens
  chr15:31774610-31775134
  hyper
caggggcccgccagcgacagtccactgtggaagtgccttcaaaggagaaatgtgagcagcctgtcctatctgctcctctatgagcaaatccaaattgtgagatgggaaccctgctttttggaccctaggtgtctttggaaagctcctgtcacctgaactgcccggcactgggagccatcgctgtacctcacggcgcccgcgagacgggtggtccagtgccctttccacggccgcccgcggcttggatggcagtgtgaatggtgcttgagccggggctgggggaggaggttttgcttatgaaatggagctgtgtgtttctaaagggccacagtgaccaccagggcgtcagctggcggccaggtacccgccttctcctaggcctcgggatgggaggcaggtagagctcacagaggagcctccaccgcagccccgggtgcgcgctcgctctaagccctgggtactaccaaccgcgcacaagggaccgctacctggaagaggtcatcgctagggtaggagaaaaaaaa

SEQ ID NO: 290663 - DNA, 209 bp, Homo sapiens
  chr15:32162282-32162491
  hyper
cgtctgcaagagccgcgggacccccgacgcgcgcgcacggaccgaggggtcggtcgccccacgcctggcatcacgttccagtgcggacagccaaagggctgagcggaggcagcagccccgacccagcggtagcgccgcgccctgcccgagagaggcgcgccacgccgggccggagccggtggcccgggagcccgcggggtccggagcgg

SEQ ID NO: 290664 - DNA, 775 bp, Homo sapiens
  chr15:32162523-32163298
  hyper
ccggggcccgcgccccccgcgtccccgcgccccggccccgcggtcgcccggcctcaacgcccacctgcctcgccacggagctcgggaaggagacggcgccggccccgcgcccggagagcgcacctgcctggtccgcgggcccggccccgccgcccgccggcagcaccgcggccagcgccgtcttacctgccgcgccgcgccgctccgctccgccagcccgcagcgccgcagtcgccgctacccgacttccattttctctcgctttaaaggaaaaccagatcagctgttttgctcccgctcgggctccgcggccccctccccagctgccgctcgcggtcccggtggcctctcctcccccgcctcctcccgcgctccgctccgcccctcgcgcccctccgctccgcccgcggccgcgcacaacgcccgcctcccggctccgcctgctgcctccgggcgcgcgccctcctctgacgtcaccggtcgcgttcgcgccccgcccccgccccgcgcggacgtgcgcgcgccgcgcctgtgccccgcccccgcccctccggggccgggcacggagagcgcgtgctcgcggccgcgagccgaggaggggacgtacagcgcccgcgcgcccgcgagcccgctccggctctcccatgcttgcccctcggggtgctccttctgcgctctccgcctggactgcaggaaaaggctgcttaaacagcctgccttttcctgctgcctgactcgcgccatctgcggccacctgtctcgtttcttccccctg

SEQ ID NO: 290665 - DNA, 159 bp, Homo sapiens
  chr15:32322773-32322932
  hyper
ctcgctgcagctccgggactcaacatgcgctgctcgccgggaggcgtctggctggcgctggccgcgtcgctcctgcacggtaaagccactgcctccccgccctccactcctccgtgggatcccgggcacatcccgggcgcctctgtgcgccccgcgcct

SEQ ID NO: 290666 - DNA, 38 bp, Homo sapiens; identical to SEQ ID NO: 203818
  chr15:33011671-33011709
  hyper

SEQ ID NO: 290667 - DNA, 210 bp, Homo sapiens; identical to SEQ ID NO: 51852
  chr15:33603879-33604089
  hyper

SEQ ID NO: 290668 - DNA, 257 bp, Homo sapiens; identical to SEQ ID NO: 237830
  chr15:34394021-34394278
  hyper

SEQ ID NO: 290669 - DNA, 203 bp, Homo sapiens; identical to SEQ ID NO: 237831
  chr15:34635316-34635519
  hyper

SEQ ID NO: 290670 - DNA, 43 bp, Homo sapiens; identical to SEQ ID NO: 203820
  chr15:34729901-34729944
  hyper

SEQ ID NO: 290671 - DNA, 93 bp, Homo sapiens; identical to SEQ ID NO: 203821
  chr15:34730043-34730136
  hyper

SEQ ID NO: 290672 - DNA, 234 bp, Homo sapiens; identical to SEQ ID NO: 203822
  chr15:34806641-34806875
  hyper

SEQ ID NO: 290673 - DNA, 100 bp, Homo sapiens
  chr15:34807388-34807488
  hyper
ccctcctcccttgacccagcacctttctgcccgacccatctggttccttcctcacactcgccgactggaagctcagggcggcacagccactaactctctc

SEQ ID NO: 290674 - DNA, 103 bp, Homo sapiens
  chr15:35014048-35014151
  hyper
ttctatacaagggccgcgcaactggagagggcccttctgcaggagagaagagggaatgtgctgaatgagttaaagtgccctttgtccaccccccccccccgcc

SEQ ID NO: 290675 - DNA, 124 bp, Homo sapiens; identical to SEQ ID NO: 203824
  chr15:35014287-35014411
  hyper

SEQ ID NO: 290676 - DNA, 102 bp, Homo sapiens
  chr15:35046505-35046607
  hyper
gaggaggcagaggacggactggggattggagcgggagactcagtccaggtgtgagaagggactcccgggggccgcccgacggggccccctgaccgccggctt

SEQ ID NO: 290677 - DNA, 181 bp, Homo sapiens
  chr15:35046689-35046870
  hyper
cgctgtgcatccggaggcagcagacaaagactgggcagcaccgggcacgttcccgctcctggcccctccccgggccgcacttccagaatgggagtgaattgcctcccaattaaagaagcaattttttaaaaaatcctcgaatccccctttccttttattgtacttaaaagagaagaaatgg

SEQ ID NO: 290678 - DNA, 103 bp, Homo sapiens; identical to SEQ ID NO: 203826
  chr15:35087492-35087595
  hyper

SEQ ID NO: 290679 - DNA, 137 bp, Homo sapiens; identical to SEQ ID NO: 237838
  chr15:35279816-35279953
  hyper

SEQ ID NO: 290680 - DNA, 65 bp, Homo sapiens; identical to SEQ ID NO: 203827
  chr15:35280590-35280655
  hyper

SEQ ID NO: 290681 - DNA, 42 bp, Homo sapiens; identical to SEQ ID NO: 237840
  chr15:35280893-35280935
  hyper

SEQ ID NO: 290682 - DNA, 101 bp, Homo sapiens
  chr15:37174937-37175038
  hyper
caaaagtcgttccgcggtgtagattgacactcgttatgtgggggtctggttgcggttggaagacttatccgagtcagggctgcattgccagcgcctttccc

SEQ ID NO: 290683 - DNA, 243 bp, Homo sapiens
  chr15:37175296-37175539
  hyper
acttcagctaccttttccgtttccagcaaaattgagaagtacgaccccaaaaagaatagacacacccatggaaaagacgtgtgtgtgtgtgtgtgtgtgtgtgtgtgtgtgtgtgtgtgtgtagctatggtgacaacttttaaacactttttctgcttaaaaaaaaagattcggacagggtctggtattgctttgcgttgcaggaaagggtcattctggacaaggaaccgtctgaattccgaa

SEQ ID NO: 290684 - DNA, 398 bp, Homo sapiens; identical to SEQ ID NO: 237842
  chr15:37175818-37176216
  hyper

SEQ ID NO: 290685 - DNA, 272 bp, Homo sapiens; identical to SEQ ID NO: 237843
  chr15:37179523-37179795
  hyper

SEQ ID NO: 290686 - DNA, 80 bp, Homo sapiens
  chr15:37180023-37180103
  hyper
aaacaaaggcagcatctgggcgacaccccccttcctgcgttccccccagttatttactgggtgaccccgtcctttctctt

SEQ ID NO: 290687 - DNA, 171 bp, Homo sapiens
  chr15:37180138-37180309
  hyper
tggattttgcgattgttcttgtcagggaaaaaaatctccacagaaccccacgttttcatctttcaactgttttatttaagccaatgggaaggtattgagggcagtaattgattcataatgatccataaatcgatgtcggaaagcggggggagagggtggaggtgtactaag

SEQ ID NO: 290688 - DNA, 508 bp, Homo sapiens; identical to SEQ ID NO: 237845
  chr15:37391107-37391615
  hyper

SEQ ID NO: 290689 - DNA, 679 bp, Homo sapiens; identical to SEQ ID NO: 224830
  chr15:37393563-37394242
  hyper

SEQ ID NO: 290690 - DNA, 120 bp, Homo sapiens; identical to SEQ ID NO: 203831
  chr15:37394737-37394857
  hyper

SEQ ID NO: 290691 - DNA, 148 bp, Homo sapiens; identical to SEQ ID NO: 203832
  chr15:37403336-37403484
  hyper

SEQ ID NO: 290692 - DNA, 135 bp, Homo sapiens; identical to SEQ ID NO: 203833
  chr15:38365202-38365337
  hyper

SEQ ID NO: 290693 - DNA, 561 bp, Homo sapiens
  chr15:38543129-38543690
  hyper
cttcattcttaggtcgcacaaatctgagaaggaagagaaaaacattgcacgcagggcgagacttatatctgggaagatgcgtcaggaacttgggagcacttgggattcagtcccctaaggtggttcatgtacaggctggttttctaagtggagaacagataatagaatttgcagagccaggagctctgactcctgtggctgggctgaccttaggctccagcccgcaaccccagtaggtttctgtgcaaaaatcttttgagatgaatgcatactttgtcttctaacaatgcattcgtgacagctgtctatccaatcggtccgcctccgttcagagcagttcgtgccacagaagcatctcctgcgctatagttatgcaacctcactcgcagcgggagttatttcctccgttctggctgcgccagattcatgtaacacgcctaccctgggcttcaatggaagtcgttctccattaacaatcactccagctttccgagatgaatgccctgatagcataccccttgcgcagtaagaatccaggcagcgaggcgaggtgttaaaaca

SEQ ID NO: 290694 - DNA, 63 bp, Homo sapiens; identical to SEQ ID NO: 237851
  chr15:38746261-38746324
  hyper

SEQ ID NO: 290695 - DNA, 136 bp, Homo sapiens; identical to SEQ ID NO: 224833
  chr15:38857268-38857404
  hyper

SEQ ID NO: 290696 - DNA, 309 bp, Homo sapiens
  chr15:39872814-39873123
  hyper
tgtcccctgcgccccgtcggcccatttttctttttacaaaacgggcccagtctctagtatccacctctcgccatcaaccaggcattccgggagatcagctcgcccgaaagcccctgcgccaccccgcgggccctcctaggtggtctccccagccccgtcccttttcgggatgcttgctgatcaccccgagcccgcgtggcgcaagagtacgagcgccgagcccgtgcgcgccaaggctgcgtgggcgggcaccgacttttctgagaagttctagtgctcccaagccccgacccccgcccccttcacttt

SEQ ID NO: 290697 - DNA, 45 bp, Homo sapiens; identical to SEQ ID NO: 224834
  chr15:39958298-39958343
  hyper

SEQ ID NO: 290698 - DNA, 149 bp, Homo sapiens; identical to SEQ ID NO: 237853
  chr15:40074512-40074661
  hyper

SEQ ID NO: 290699 - DNA, 344 bp, Homo sapiens; identical to SEQ ID NO: 203835
  chr15:40074971-40075315
  hyper

SEQ ID NO: 290700 - DNA, 66 bp, Homo sapiens; identical to SEQ ID NO: 224836
  chr15:40094250-40094316
  hyper

SEQ ID NO: 290701 - DNA, 357 bp, Homo sapiens
  chr15:40212244-40212601
  hyper
ggctccgcgcgccgcccgcctcggagccccgcgcggagcctctcctcctccgggtgaggagggacgcgcgggcgcctggcggagtcctggagaagccggagcagccgacgggtcccctcacgtctccacatcgccaaccccggcgcccgggaggcggggagggagggaggcgcggctgcgccccatgcccactccctcctggatcccagtcagcagccacaagaaggcggcacggtcagagcccgccgagcgtcgtccgtccctcctccagggtggtcagcgtggcccagcccactcgacaggaatggaaacacagaaggaggcattcgatggtcaaggagggcgctctccgctccc

SEQ ID NO: 290702 - DNA, 470 bp, Homo sapiens
  chr15:40212954-40213424
  hyper
gcactggcgacggggaccccgttccgcagcgcctttttgcctctgcatggctgggcgccccctttcttagcccccctcggtccctcggccgctagaacacagcttgacagccgggcggggacgaaggaggacgcccccagtggggcagtggcaccgtctgcgcggccgccagactcggtgcgcgcctggggcagccgggggcgcgcggctggcgaggatggtcacgtggcacgcgcgaccccgcccctcgcgcccaggctgccgcggggagggcgccatcttggccccgcggagcgtgactgtctcggctggaagcgtgggaggccggaggatcagtgactggctgtcgtggacatgctcgctacacctcccggggcttcgcttcgtttactattaactgtcgttactcctctgtatctcgtcagcaggggctgcctgcggtgttagaattacacgcccctgccacctgg

SEQ ID NO: 290703 - DNA, 148 bp, Homo sapiens; identical to SEQ ID NO: 237856
  chr15:40225953-40226101
  hyper

SEQ ID NO: 290704 - DNA, 171 bp, Homo sapiens; identical to SEQ ID NO: 237857
  chr15:40401049-40401220
  hyper

SEQ ID NO: 290705 - DNA, 36 bp, Homo sapiens; identical to SEQ ID NO: 203836
  chr15:40559555-40559591
  hyper

SEQ ID NO: 290706 - DNA, 171 bp, Homo sapiens
  chr15:40575342-40575513
  hyper
gggggctcagcggcgcgggagctgccgcccgcctagatacctgactttatagccttgggggtctccatggcaatggctgtcctgggagcggactgcgccgtcagggcagagacggacggggcgggggagaccgctcctgacccccaccccttcgtgggccacgaagtaggg

SEQ ID NO: 290707 - DNA, 50 bp, Homo sapiens; identical to SEQ ID NO: 125537
  chr15:40651001-40651051
  hyper

SEQ ID NO: 290708 - DNA, 54 bp, Homo sapiens; identical to SEQ ID NO: 237860
  chr15:40698353-40698407
  hyper

SEQ ID NO: 290709 - DNA, 265 bp, Homo sapiens; identical to SEQ ID NO: 237861
  chr15:40762823-40763088
  hyper

SEQ ID NO: 290710 - DNA, 162 bp, Homo sapiens; identical to SEQ ID NO: 237862
  chr15:40861435-40861597
  hyper

SEQ ID NO: 290711 - DNA, 41 bp, Homo sapiens; identical to SEQ ID NO: 237863
  chr15:40886162-40886203
  hyper

SEQ ID NO: 290712 - DNA, 56 bp, Homo sapiens; identical to SEQ ID NO: 203838
  chr15:41046993-41047049
  hyper

SEQ ID NO: 290713 - DNA, 312 bp, Homo sapiens; identical to SEQ ID NO: 237864
  chr15:41055853-41056165
  hyper

SEQ ID NO: 290714 - DNA, 156 bp, Homo sapiens; identical to SEQ ID NO: 224840
  chr15:41136285-41136441
  hyper

SEQ ID NO: 290715 - DNA, 415 bp, Homo sapiens
  chr15:41136702-41137117
  hyper
ggaacccagaggcccgcgctctgaaggtgacccccctggggaggaaggcgatggcccctgcgaggacgatggcccgcgcccgcctcgccccggccggcatccctgccgtcgccttgtggcttctgtgcacgctcggcctccagggcacccaggccgggccaccgcccgcgccccctgggctgcccgcgggagccgactgcctgaacagctttaccgccggggtgcctggcttcgtgctggacaccaacgcctcggtcagcaacggagctaccttcctggagtcccccaccgtgcgccggggctgggactgcgtgcgcgcctgctgcaccacccagaactgcaacttggcgctagtggagctgcagcccgaccgcggggaggacgccatcgccgcctgcttcctcatcaactgcct

SEQ ID NO: 290716 - DNA, 44 bp, Homo sapiens; identical to SEQ ID NO: 203840
  chr15:41137147-41137191
  hyper

SEQ ID NO: 290717 - DNA, 329 bp, Homo sapiens; identical to SEQ ID NO: 237865
  chr15:41245392-41245721
  hyper

SEQ ID NO: 290718 - DNA, 472 bp, Homo sapiens; identical to SEQ ID NO: 237866
  chr15:41522911-41523383
  hyper

SEQ ID NO: 290719 - DNA, 181 bp, Homo sapiens; identical to SEQ ID NO: 203842
  chr15:41576046-41576227
  hyper

SEQ ID NO: 290720 - DNA, 85 bp, Homo sapiens; identical to SEQ ID NO: 237868
  chr15:41576677-41576762
  hyper

SEQ ID NO: 290721 - DNA, 467 bp, Homo sapiens; identical to SEQ ID NO: 237869
  chr15:41624809-41625276
  hyper

SEQ ID NO: 290722 - DNA, 380 bp, Homo sapiens; identical to SEQ ID NO: 203843
  chr15:41786424-41786804
  hyper

SEQ ID NO: 290723 - DNA, 46 bp, Homo sapiens
  chr15:41788242-41788288
  hyper
gcttccaggccttccccacccccaggcccgccggggcctccccgaa

SEQ ID NO: 290724 - DNA, 526 bp, Homo sapiens
  chr15:41804115-41804641
  hyper
cggctcgagactccccgaggcagacgagctggctctccgggctaccctgcgggcagcgggggagggaatcggcggggcccgggagcctcccctcgctgtgctggtgacccggcaccgaggaaagcacgctcccccggcccccaggcagccctcgcccccggcgccggcgccgccccatccccactggctgcgctcactccgggacaggcgtcctctccctgctgccccaccaggatgtacagcgactccccgagaccgagggagaagattgctgagacgaagacgccatgcgcccgcgacaggtggttcttggcgcctttgccgcccgcggctccgtaggctgagatcctgcggggaacggacggtgagtccccggccttcggtgctcaggccggccgctccgggcagaagttggcgacagaggaggctccagaattattttttatctgagggacttggaggctgcaatcgactctgacgggatgggaagggtaggtttgcacaccgaaaaatcagatattacact

SEQ ID NO: 290725 - DNA, 205 bp, Homo sapiens
  chr15:41805869-41806074
  hyper
gctccgaaccacaccagcagctgtccccagcagcccatccctgttgggtccacccggcaacaaaagcccttgcggtcgcggccacacccctgtcaacctaaagttgacagctcattttgccacggcagccctggccaccacttacaggggtgtgctgccgctggcgagacactccccggacctaaagctggtctggccacgccca

SEQ ID NO: 290726 - DNA, 34 bp, Homo sapiens; identical to SEQ ID NO: 237872
  chr15:41851950-41851984
  hyper

SEQ ID NO: 290727 - DNA, 81 bp, Homo sapiens
  chr15:41913246-41913327
  hyper
tgaaagtgcctggtatacctcgccacactcccataattacccaaaccgtctcattccaagcccaaggaccgggctttcaag

SEQ ID NO: 290728 - DNA, 361 bp, Homo sapiens
  chr15:41913372-41913733
  hyper
agaggtgcctttcccggcatgctctgcagcacaccgaggggcgccaggcgtatcccggcgtgcatcggggagcgcccaagggcgatggttcccggctcctggagaggcgtgcgaagttaagccggtaggtgcgagcttccttagctttgagcctctggtttctcgtttcctctttatgggtttaaatccataacggcagaaaaggatggccctctaactaccctccctctccgcgtgcgaacgactcggcgccgcttcgagctcggtgccaggtgattagcgggtaggggcgggcttgcgaccagcacgtgacccgaactggcagccaatgactagccgggtggtccagcagcgcgaggat

SEQ ID NO: 290729 - DNA, 210 bp, Homo sapiens
  chr15:41913957-41914167
  hyper
caggccgaggcgcacccacagctttccccggcgccccggggtgcgacgtgttcactgaggttcgaccgggccctgacggcctgagcggtctttcgaagcgcgtgtgcggcctgtaaattctggccgcggcttttcgtggcgtcctgctccgcggtgagcacagacgacaagttctcagcaaaatggctgctggaaagagtcgccaagcag

SEQ ID NO: 290730 - DNA, 32 bp, Homo sapiens
  chr15:41914240-41914272
  hyper
gggtggggggcgtggcgggtcacgtgccttcg

SEQ ID NO: 290731 - DNA, 156 bp, Homo sapiens; identical to SEQ ID NO: 203846
  chr15:41953174-41953330
  hyper

SEQ ID NO: 290732 - DNA, 200 bp, Homo sapiens; identical to SEQ ID NO: 224842
  chr15:42112223-42112423
  hyper

SEQ ID NO: 290733 - DNA, 160 bp, Homo sapiens; identical to SEQ ID NO: 203847
  chr15:42119937-42120097
  hyper

SEQ ID NO: 290734 - DNA, 36 bp, Homo sapiens; identical to SEQ ID NO: 203848
  chr15:42263898-42263934
  hyper

SEQ ID NO: 290735 - DNA, 71 bp, Homo sapiens; identical to SEQ ID NO: 237877
  chr15:42349322-42349393
  hyper

SEQ ID NO: 290736 - DNA, 200 bp, Homo sapiens; identical to SEQ ID NO: 237878
  chr15:42565687-42565887
  hyper

SEQ ID NO: 290737 - DNA, 97 bp, Homo sapiens; identical to SEQ ID NO: 203849
  chr15:42841085-42841182
  hyper

SEQ ID NO: 290738 - DNA, 481 bp, Homo sapiens; identical to SEQ ID NO: 237881
  chr15:42873437-42873918
  hyper

SEQ ID NO: 290739 - DNA, 125 bp, Homo sapiens; identical to SEQ ID NO: 237882
  chr15:43213001-43213126
  hyper

SEQ ID NO: 290740 - DNA, 88 bp, Homo sapiens; identical to SEQ ID NO: 203850
  chr15:43394990-43395078
  hyper

SEQ ID NO: 290741 - DNA, 101 bp, Homo sapiens; identical to SEQ ID NO: 203851
  chr15:43397760-43397861
  hyper

SEQ ID NO: 290742 - DNA, 55 bp, Homo sapiens
  chr15:43415143-43415198
  hyper
cattgaagtccaaacgtaaatccttccagtttttggcgcccgggtatttgacttg

SEQ ID NO: 290743 - DNA, 291 bp, Homo sapiens; identical to SEQ ID NO: 125611
  chr15:43415273-43415564
  hyper

SEQ ID NO: 290744 - DNA, 95 bp, Homo sapiens; identical to SEQ ID NO: 237886
  chr15:43425869-43425964
  hyper

SEQ ID NO: 290745 - DNA, 58 bp, Homo sapiens
  chr15:43622047-43622105
  hyper
gggcattaggaaaacgctgggctgcccaggcgatgagggccgcggcactctccggctc

SEQ ID NO: 290746 - DNA, 297 bp, Homo sapiens
  chr15:43622140-43622437
  hyper
tgggtgaggctgcgtcgagccccgcggcgcccagggcctcctccactcgctggagctgccgcaagtccagacccaggatgcagtagtctgcgctctcaaagcacagcgcggacgcgggctcccccctctcgaaaggcccggttaacgcgcacagctctggcgtctctccaatcctttctgctttgcgccgcgccacgtccggaaaatccacctcccagactgcagcccgggccaggcggcccgcggtttttaagcgaaaatagagcgagtcgaagccagcgccgagagacaagatct

SEQ ID NO: 290747 - DNA, 355 bp, Homo sapiens; identical to SEQ ID NO: 237888
  chr15:43622638-43622993
  hyper

SEQ ID NO: 290748 - DNA, 68 bp, Homo sapiens; identical to SEQ ID NO: 237889
  chr15:43785355-43785423
  hyper

SEQ ID NO: 290749 - DNA, 152 bp, Homo sapiens; identical to SEQ ID NO: 203852
  chr15:43802598-43802750
  hyper

SEQ ID NO: 290750 - DNA, 270 bp, Homo sapiens
  chr15:43803490-43803760
  hyper
ctaccaatgcatacgtctgcatctccatccctagtgtgcacttcctgagatctgcgcccttgtcacctgcatcttccatgccatgtgtccgtatcctctcgctctactaacatctcgcttgcccatccttactgcacactccatggcgttccgcagtctccctgaggcagcggagctctatgcagcccctggggcccctctggtcacaccctccaccgcagtgttttggaccaggtgtcctgaaagtcctcaccatccctggagaatcca

SEQ ID NO: 290751 - DNA, 147 bp, Homo sapiens; identical to SEQ ID NO: 125621
  chr15:43803825-43803972
  hyper

SEQ ID NO: 290752 - DNA, 185 bp, Homo sapiens; identical to SEQ ID NO: 203853
  chr15:43809675-43809860
  hyper

SEQ ID NO: 290753 - DNA, 157 bp, Homo sapiens; identical to SEQ ID NO: 224843
  chr15:44038552-44038709
  hyper

SEQ ID NO: 290754 - DNA, 49 bp, Homo sapiens; identical to SEQ ID NO: 203854
  chr15:44068769-44068818
  hyper

SEQ ID NO: 290755 - DNA, 380 bp, Homo sapiens; identical to SEQ ID NO: 237894
  chr15:44119067-44119447
  hyper

SEQ ID NO: 290756 - DNA, 794 bp, Homo sapiens; identical to SEQ ID NO: 203855
  chr15:44486896-44487690
  hyper

SEQ ID NO: 290757 - DNA, 57 bp, Homo sapiens; identical to SEQ ID NO: 237896
  chr15:44580503-44580560
  hyper

SEQ ID NO: 290758 - DNA, 76 bp, Homo sapiens; identical to SEQ ID NO: 237897
  chr15:44828876-44828952
  hyper

SEQ ID NO: 290759 - DNA, 79 bp, Homo sapiens; identical to SEQ ID NO: 237898
  chr15:45003638-45003717
  hyper

SEQ ID NO: 290760 - DNA, 48 bp, Homo sapiens
  chr15:45404190-45404238
  hyper
gtattgcgccctccccacggccagggcggcctccaagtgtcctcagga

SEQ ID NO: 290761 - DNA, 84 bp, Homo sapiens
  chr15:45404749-45404833
  hyper
accaaagaagacccccagtacggtgcggttgtggagcgacggcaggccggctatgccccgcgtggctgcgttgctgagccggcg

SEQ ID NO: 290762 - DNA, 241 bp, Homo sapiens
  chr15:45405166-45405407
  hyper
cgggcccccagaacgcaccaacagcaccacgctcgtggtgcctcaggttgttaaaccagccgtcatagcgctgcacttcccagggcagtgagagtgcgtcctgactgcctgtgggcacagagaagggcctcctcagcactacgctcccagctacccctcccgagcaacgaaggccttggccagtccttccccagctcgcggagcgcccctaaccggacccaagtgtcgggccgcactggga

SEQ ID NO: 290763 - DNA, 104 bp, Homo sapiens
  chr15:45406348-45406452
  hyper
caggacagacctgcgccagtgtgagcatctggacctagggctcaccctcctgccgtggaggtggggcccttatttgcacaacctcttccagctcagaccagccc

SEQ ID NO: 290764 - DNA, 59 bp, Homo sapiens
  chr15:45406895-45406954
  hyper
tttggctctagcagcaagcttcctgctcatcttgccggggatccgtggccactcggtaa

SEQ ID NO: 290765 - DNA, 488 bp, Homo sapiens
  chr15:45408666-45409154
  hyper
gaggtctccgaccgcgggcagccccatgagcccgcctcaccccacagggaccccagtgcatcagctgaacgagaccattgactacaacgagcagttcacctggcgtctgaaagagaattacgccgcggagtacgcgaacgcactggagaaggggctgccggacccagtgctctacctggcggagaagttcacaccgagtagcccttgcggcctgtaccaccagtaccacctggcgggacactacgcctcggccacgctatggtaagtgctggagggaaggctgtgtgcacgtgtgtgtgtgccaggagctgggccgtatgagcgggaggatgcaggcctcggaggcgctgagcagctgcagccagacccgacgcgctcggggtgggcatgacagcctcgcgggttagaagatccacgagatctgcacagacggaatccggagagactccagccaccgcctggacctcaggagcccgcttctcccccgg

SEQ ID NO: 290766 - DNA, 161 bp, Homo sapiens
  chr15:45409211-45409372
  hyper
aaagaagagcgcagctgtgggaaccccggtgggctgggagaagcccgctcacagcgggtccccccactccccggcagggtggcgttctgcttctggctcctctccaacgtgctgctctccacgccggccccgctctacggaggcctggcactgctgaccac

SEQ ID NO: 290767 - DNA, 104 bp, Homo sapiens
  chr15:45421846-45421950
  hyper
tggagcccagacccgacggtgtcgagaggatctgaggagagtctcccctccccataccctctccgcctcccaccctctccccagccccatgggacttgtgaagg

SEQ ID NO: 290768 - DNA, 92 bp, Homo sapiens; identical to SEQ ID NO: 203856
  chr15:45459390-45459482
  hyper

SEQ ID NO: 290769 - DNA, 204 bp, Homo sapiens; identical to SEQ ID NO: 203857
  chr15:45479833-45480037
  hyper

SEQ ID NO: 290770 - DNA, 47 bp, Homo sapiens; identical to SEQ ID NO: 237908
  chr15:45480415-45480462
  hyper

SEQ ID NO: 290771 - DNA, 544 bp, Homo sapiens
  chr15:45492665-45493209
  hyper
cactatacgatcacggcgagctactagggacacaggacctcggcttgtcgcctgaactcttctctgttgaaagccccgcccccttgcaatgtcattgatttgtcattgtttgttctagcctatctccaccctcgcagccatctgagggcacgcaagagcattaatctctgctttctcgattttggtccacacttgcctgcgcaccagacacggtggccgatttctccaccgtggaggctgctcttggggttccccttacctcgcgcctcaaggaagttgtatggtggtgggtcagaactgattttccttcttgtaaaatttaagagctccagtcccagccaaagtcgttcagatagcatgatagtcagggcatggtgagcgtcagagagactttgggccaccattcgggcgtcctcaggggcttcacatcattgcaggcccggcctcataggaatcctttggttgcaaagcactttcatgtcccttcttttgcggtccgtgcgtacagccaagaggagacttcgggctagggagtccacagcgc

SEQ ID NO: 290772 - DNA, 174 bp, Homo sapiens; identical to SEQ ID NO: 203859
  chr15:45493371-45493545
  hyper

SEQ ID NO: 290773 - DNA, 224 bp, Homo sapiens; identical to SEQ ID NO: 203860
  chr15:45669906-45670130
  hyper

SEQ ID NO: 290774 - DNA, 274 bp, Homo sapiens; identical to SEQ ID NO: 203861
  chr15:45670188-45670462
  hyper

SEQ ID NO: 290775 - DNA, 34 bp, Homo sapiens; identical to SEQ ID NO: 203862
  chr15:45671015-45671049
  hyper

SEQ ID NO: 290776 - DNA, 153 bp, Homo sapiens; identical to SEQ ID NO: 203863
  chr15:45722445-45722598
  hyper

SEQ ID NO: 290777 - DNA, 360 bp, Homo sapiens; identical to SEQ ID NO: 203864
  chr15:45722599-45722959
  hyper

SEQ ID NO: 290778 - DNA, 165 bp, Homo sapiens; identical to SEQ ID NO: 237912
  chr15:45815255-45815420
  hyper

SEQ ID NO: 290779 - DNA, 31 bp, Homo sapiens; identical to SEQ ID NO: 237913
  chr15:45879207-45879238
  hyper

SEQ ID NO: 290780 - DNA, 247 bp, Homo sapiens
  chr15:47476468-47476715
  hyper
cgcggaggccgggcggcaaggggagtttccagtcctcgataagtggagtccctgctctgcgctgcgccagcgccttccgcctgggcccgcggtgctagacacctgccgagtccgaagcgggagtcaggctgagccttcggcccccaagtaagtcttcccttttctctccatttctcctccgtcgcctttacttctttatctgcgaagcgaggagctgctgacggaggttctgcgcgaaaagcgcacc

SEQ ID NO: 290781 - DNA, 226 bp, Homo sapiens; identical to SEQ ID NO: 203866
  chr15:48009298-48009524
  hyper

SEQ ID NO: 290782 - DNA, 211 bp, Homo sapiens; identical to SEQ ID NO: 203867
  chr15:48009670-48009881
  hyper

SEQ ID NO: 290783 - DNA, 120 bp, Homo sapiens
  chr15:48009969-48010089
  hyper
gtgtgtgtgtgtgtgtgtgtgtgcgcgcggtgggggtcggaacctgagatcccgaatcgctgtgtgtgtgtgtgtgtgtgtgtgtgtgtgtgtgtgtgtgtgtgtgttgccactggacag

SEQ ID NO: 290784 - DNA, 222 bp, Homo sapiens; identical to SEQ ID NO: 203868
  chr15:48010897-48011119
  hyper

SEQ ID NO: 290785 - DNA, 75 bp, Homo sapiens
  chr15:48011457-48011532
  hyper
cagcatcccgagccctcagcgccgtcagctggatgatctcacagggaaggcgcagcacatcgttactatagatat

SEQ ID NO: 290786 - DNA, 127 bp, Homo sapiens; identical to SEQ ID NO: 203869
  chr15:48469937-48470064
  hyper

SEQ ID NO: 290787 - DNA, 52 bp, Homo sapiens; identical to SEQ ID NO: 203870
  chr15:48470094-48470146
  hyper

SEQ ID NO: 290788 - DNA, 158 bp, Homo sapiens; identical to SEQ ID NO: 203871
  chr15:48470215-48470373
  hyper

SEQ ID NO: 290789 - DNA, 190 bp, Homo sapiens; identical to SEQ ID NO: 237918
  chr15:48483066-48483256
  hyper

SEQ ID NO: 290790 - DNA, 50 bp, Homo sapiens
  chr15:48483906-48483956
  hyper
cgctaaccagggccctgtgactctacgcaggttccagaacacgccttcta

SEQ ID NO: 290791 - DNA, 156 bp, Homo sapiens; identical to SEQ ID NO: 237920
  chr15:48623408-48623564
  hyper

SEQ ID NO: 290792 - DNA, 87 bp, Homo sapiens
  chr15:48936639-48936726
  hyper
agtttaaccacgaacggggtggggactaaacaaccctagcacctctaaggtgcccccaggaggtcttgccaaggagtcttccacagg

SEQ ID NO: 290793 - DNA, 54 bp, Homo sapiens; identical to SEQ ID NO: 237921
  chr15:49102693-49102747
  hyper

SEQ ID NO: 290794 - DNA, 207 bp, Homo sapiens; identical to SEQ ID NO: 237922
  chr15:49170052-49170259
  hyper

SEQ ID NO: 290795 - DNA, 137 bp, Homo sapiens; identical to SEQ ID NO: 237923
  chr15:49255441-49255578
  hyper

SEQ ID NO: 290796 - DNA, 135 bp, Homo sapiens; identical to SEQ ID NO: 237924
  chr15:49255861-49255996
  hyper

SEQ ID NO: 290797 - DNA, 227 bp, Homo sapiens; identical to SEQ ID NO: 237925
  chr15:49447914-49448141
  hyper

SEQ ID NO: 290798 - DNA, 34 bp, Homo sapiens; identical to SEQ ID NO: 203873
  chr15:49448552-49448586
  hyper

SEQ ID NO: 290799 - DNA, 366 bp, Homo sapiens; identical to SEQ ID NO: 224849
  chr15:50474766-50475132
  hyper

SEQ ID NO: 290800 - DNA, 99 bp, Homo sapiens; identical to SEQ ID NO: 237927
  chr15:50716741-50716840
  hyper

SEQ ID NO: 290801 - DNA, 45 bp, Homo sapiens; identical to SEQ ID NO: 237928
  chr15:50978873-50978918
  hyper

SEQ ID NO: 290802 - DNA, 79 bp, Homo sapiens; identical to SEQ ID NO: 203874
  chr15:51058036-51058115
  hyper

SEQ ID NO: 290803 - DNA, 62 bp, Homo sapiens; identical to SEQ ID NO: 237930
  chr15:51200800-51200862
  hyper

SEQ ID NO: 290804 - DNA, 353 bp, Homo sapiens
  chr15:51386268-51386621
  hyper
gacccctgccccaaccactcgcgaggccttttctgttcagagcccccagtcacgttcttggacccagtcacctgcgccgcagcgcagtcccggcgccccaggttcgaggacccggcccgcgctcggaaagttatttcaaaaggcagatgtgttgcaaccctctctgcagcaaactacagtacgcggattcccgaacccttccccgcccccacccagcccgggcgaccagagcccgccgcgggagactggcagcaaggagagccacccctaaatgcaccttccctccctcccgcgcgcccaagtgcaatggggttgggggaagccccaaagcaaactcacgacgcggagcaatc

SEQ ID NO: 290805 - DNA, 56 bp, Homo sapiens
  chr15:51559324-51559380
  hyper
tctgtcactcccaagcagggcgaatcgagccagatttttgttggacgctttcagga

SEQ ID NO: 290806 - DNA, 290 bp, Homo sapiens
  chr15:51559797-51560087
  hyper
aacctgtcccaggaagacgcaggagacgcgaccggggtgagacaagagtccaagctctcaagcatccactgtgttattgcacttcacttacaatacacgaatttgaaggaaaaatgattaagaatttcatatggtgactgcagagcattcattagattccaagcgggaccccttctgagcgcgggaccctatggcggattgccattgaaaccagccctgccggctccccatgccccggggaagggtcttccctgtgcccaccccagcttagcaggcgagagcactggaag

SEQ ID NO: 290807 - DNA, 115 bp, Homo sapiens
  chr15:51633851-51633966
  hyper
aagccctgccctgcccaaggcgcatagagcatggcccgaggcgctgagggaggccgtggggacgcgggttggggcctgcgtggcgccctggcggccgtggcgctgctctcggcgc

SEQ ID NO: 290808 - DNA, 153 bp, Homo sapiens
  chr15:51634175-51634328
  hyper
gagcccgcgccgcatatccgcgccgagagccatgacatgctgatgatgatgacctactccatggtgccggtaggcggggtctctgttccccgtggcgccccggccaggtgggcggctgggggtgtggggcgaggacgccgacgccctcttctc

SEQ ID NO: 290809 - DNA, 237 bp, Homo sapiens; identical to SEQ ID NO: 237934
  chr15:51915459-51915696
  hyper

SEQ ID NO: 290810 - DNA, 126 bp, Homo sapiens; identical to SEQ ID NO: 203875
  chr15:51973520-51973646
  hyper

SEQ ID NO: 290811 - DNA, 47 bp, Homo sapiens
  chr15:51974094-51974141
  hyper
tggcataatacgtgagctgtaaatcaccctgacgcgttttctgatca

SEQ ID NO: 290812 - DNA, 264 bp, Homo sapiens; identical to SEQ ID NO: 203876
  chr15:52028982-52029246
  hyper

SEQ ID NO: 290813 - DNA, 42 bp, Homo sapiens; identical to SEQ ID NO: 237937
  chr15:52029519-52029561
  hyper

SEQ ID NO: 290814 - DNA, 193 bp, Homo sapiens; identical to SEQ ID NO: 237938
  chr15:52121766-52121959
  hyper

SEQ ID NO: 290815 - DNA, 88 bp, Homo sapiens; identical to SEQ ID NO: 237939
  chr15:52122375-52122463
  hyper

SEQ ID NO: 290816 - DNA, 181 bp, Homo sapiens; identical to SEQ ID NO: 203877
  chr15:52404392-52404573
  hyper

SEQ ID NO: 290817 - DNA, 828 bp, Homo sapiens
  chr15:52587421-52588249
  hyper
gaggcgctccagtcccgggagatggggacgcacgcgcgacccctgggcactggggattctaggccccgaggccggagcggcggagggggcggcccctcccacagggtcttcccacccacagggcacccaggcgcagcggagccaggagggggcttacccgcgggcagggacggagcacgccggggccctggaggggcgacgctcgctcgtgtccccggtccccgtggcccctccgcggcgcctccgcggcccccagcgcgcgcccgcccgccctgccgtgtcaggtgcgcaggtgtggcaggtgtggcccgggcgccaggtcgagtcagcgttagcagggccggctcccccacagcgctcccaggagcccagcggaccctcctacctgcgtgtacagctcggccaccgccatgggcaggaggggccggggccaggccggggctgccgaacgtgcgaggctcgggggctgggcctgcgccgcagaggccgggcgcaggagagaccgccgcggaaatcaccgccgggccatcttgcccaaagttttccaacggcctcctgttcccgttcccgagttggcggcgaggggagggggcagcggcgggattggtccctccaagcttggcccggctagtcggcgctgccattggccggggccgggcggctgcacctggcgggagcgcgggtggagaaggttggggcccggggcgcgctgccaggcaggaacagatgcatccggaggctgcccggcccgagtgttagctcctcaaagagcagaggatacgaccatttaaatggaagacccaagggaatcaacgtactgaacacaaa

SEQ ID NO: 290818 - DNA, 605 bp, Homo sapiens
  chr15:52820415-52821020
  hyper
gcagcatctttccccggggctcgccacccccagcgcagctaaactggggagctaaaggtgatacggccaccgtttgcaggattcaaaataacctcacagaaaggctagctggcggtagaagcggcactgcataccaacacaagacgttattttaagcgcgtgtccccacgagagaacccatccgatctactggagcaagcatctcccacccgccgggaattttccaaagccaagcaggaggggaggcacgcccgccctgctaaatccacatgggccccctttccactccgaagcccgctctgcccccagctcgagcagcgcggcaggggcctgggagacccccgaggcgggccaccttccgccgccttcaccatctcgcccgaaagaggaaggtgccgcagcgggcgaccggctggtagggccgagggttctgaggcgctgaaggggatggcgctggtggggctcgcctgggcccggcgctcccgccccctccccagcctgacagctggcggcgagggccgcacagccccagtcctcgacgccggccgcggggtgccttacctttgtgtagagctccgacgcagccatggcgggccccgcgcgcc

SEQ ID NO: 290819 - DNA, 279 bp, Homo sapiens; identical to SEQ ID NO: 203879
  chr15:52821287-52821566
  hyper

SEQ ID NO: 290820 - DNA, 41 bp, Homo sapiens
  chr15:53075362-53075403
  hyper
gggactgaattgaacgttttagcttaatgatccaacccctg

SEQ ID NO: 290821 - DNA, 227 bp, Homo sapiens; identical to SEQ ID NO: 203880
  chr15:53078992-53079219
  hyper

SEQ ID NO: 290822 - DNA, 217 bp, Homo sapiens; identical to SEQ ID NO: 203881
  chr15:53080082-53080299
  hyper

SEQ ID NO: 290823 - DNA, 159 bp, Homo sapiens; identical to SEQ ID NO: 203882
  chr15:53082144-53082303
  hyper

SEQ ID NO: 290824 - DNA, 206 bp, Homo sapiens
  chr15:53090066-53090272
  hyper
tgatggaaaaaggaaaacaacggcccacccgacttagaaacttcttagccgctgaaaccccgcaataaaaacgggaagggggcaggaatcgggcttaagtgtaataagaaaattatttatgaaaccggataaatgacttcagagccttgatgcatttgaacctaacgctctcggctcctggcagccccggctccagctggggagac

SEQ ID NO: 290825 - DNA, 109 bp, Homo sapiens; identical to SEQ ID NO: 52046
  chr15:53090305-53090414
  hyper

SEQ ID NO: 290826 - DNA, 126 bp, Homo sapiens; identical to SEQ ID NO: 203883
  chr15:53091078-53091204
  hyper

SEQ ID NO: 290827 - DNA, 68 bp, Homo sapiens
  chr15:53095560-53095628
  hyper
atttttaaaagataccaagacgtaaaagacgagaaaaacatcccgggtgctctgcataaaccacacgc

SEQ ID NO: 290828 - DNA, 144 bp, Homo sapiens; identical to SEQ ID NO: 237952
  chr15:53489679-53489823
  hyper

SEQ ID NO: 290829 - DNA, 486 bp, Homo sapiens; identical to SEQ ID NO: 237955
  chr15:55489070-55489556
  hyper

SEQ ID NO: 290830 - DNA, 89 bp, Homo sapiens; identical to SEQ ID NO: 203885
  chr15:55699900-55699989
  hyper

SEQ ID NO: 290831 - DNA, 54 bp, Homo sapiens; identical to SEQ ID NO: 237956
  chr15:55700704-55700758
  hyper

SEQ ID NO: 290832 - DNA, 79 bp, Homo sapiens
  chr15:56035510-56035589
  hyper
cctgggggaagggtacgggtcccgccggacaatgcacctgggggtcaagccccggctgagggtctccggcccgcgtccc

SEQ ID NO: 290833 - DNA, 82 bp, Homo sapiens; identical to SEQ ID NO: 125767
  chr15:56035677-56035759
  hyper

SEQ ID NO: 290834 - DNA, 504 bp, Homo sapiens; identical to SEQ ID NO: 203886
  chr15:56285864-56286368
  hyper

SEQ ID NO: 290835 - DNA, 404 bp, Homo sapiens; identical to SEQ ID NO: 237959
  chr15:56657423-56657827
  hyper

SEQ ID NO: 290836 - DNA, 161 bp, Homo sapiens; identical to SEQ ID NO: 237960
  chr15:56757166-56757327
  hyper

SEQ ID NO: 290837 - DNA, 340 bp, Homo sapiens; identical to SEQ ID NO: 224859
  chr15:57210212-57210552
  hyper

SEQ ID NO: 290838 - DNA, 391 bp, Homo sapiens
  chr15:57598789-57599180
  hyper
ccttctgggaggacgcgcacagcccgaggaggcagagccccagacgggaatgggcttttcagaggtggggtgcgggcgaggggacgatgcattatttttaatatttgatttatttttccaactggacttcttcccggggctctttctgggcccagctgcctttgtgatcccgcgccccggtcctcggcctctcacctccagcgccggggcgccccctgctgtcggaagcggctgtgaccgggcagaggtgctatctgggactctgggttctcagcccggggacagcgaaccgaggggcagatgatccatcagaaaagagccggcactgcccagccccgcgcccctgcccctgcctttttccgggagcgcgccgcgccgcacccgctacggc

SEQ ID NO: 290839 - DNA, 787 bp, Homo sapiens; identical to SEQ ID NO: 237962
  chr15:57668407-57669194
  hyper

SEQ ID NO: 290840 - DNA, 151 bp, Homo sapiens; identical to SEQ ID NO: 203890
  chr15:57883948-57884099
  hyper

SEQ ID NO: 290841 - DNA, 32 bp, Homo sapiens; identical to SEQ ID NO: 237964
  chr15:57998720-57998752
  hyper

SEQ ID NO: 290842 - DNA, 165 bp, Homo sapiens; identical to SEQ ID NO: 237967
  chr15:59062963-59063128
  hyper

SEQ ID NO: 290843 - DNA, 255 bp, Homo sapiens; identical to SEQ ID NO: 237968
  chr15:59225884-59226139
  hyper

SEQ ID NO: 290844 - DNA, 39 bp, Homo sapiens; identical to SEQ ID NO: 203892
  chr15:59396925-59396964
  hyper

SEQ ID NO: 290845 - DNA, 453 bp, Homo sapiens; identical to SEQ ID NO: 203893
  chr15:59397170-59397623
  hyper

SEQ ID NO: 290846 - DNA, 132 bp, Homo sapiens; identical to SEQ ID NO: 203894
  chr15:59663973-59664105
  hyper

SEQ ID NO: 290847 - DNA, 512 bp, Homo sapiens
  chr15:59664435-59664947
  hyper
gcagccatagcaacccggccacagaaagtttcgcgacgcagaaaccgacttggaataaagttttccttggcccctcgctcgctctcccccggcccgggtttacggaaagcggcaggaaatcagagctcgcgacgtgccggctcccgcgtccaccttctccacccctggccccggcagcgcgcccaaggtgggtgcaccacgccggggtttcctgccccgtccccgggtccggcgtcctaggacgcggcgcggccaactcaccatggtgactcgcgccgcggtcgcgtcttcgccgggtcccgctgccggggaactggggctggaacgcagtcttctgggcgaacttcaaaagttggttcccctcgccaaaaacaggctcccgacacccaagcactcacaggagccaatgggaacccagaggggactccatccaggcgggattggcggtgctaggtgagggcgagacggcggcgacttagcaggcggggcgcatgctgcggagggcaagagtc

SEQ ID NO: 290848 - DNA, 83 bp, Homo sapiens; identical to SEQ ID NO: 237972
  chr15:59665217-59665300
  hyper

SEQ ID NO: 290849 - DNA, 102 bp, Homo sapiens; identical to SEQ ID NO: 203896
  chr15:59729554-59729656
  hyper

SEQ ID NO: 290850 - DNA, 106 bp, Homo sapiens
  chr15:59729815-59729921
  hyper
cacatggcagccccggagggttcgttcacctgcacaggtggggcgtcaccgtggcctaatcaaataacttctccccaatttgaggtggggcgggggagagaactat

SEQ ID NO: 290851 - DNA, 78 bp, Homo sapiens
  chr15:60286352-60286430
  hyper
cccggggcatttcccgggtccctaggcaaatcgctcctcgcccagtggtcctcactcctgggagccagtgacactttc

SEQ ID NO: 290852 - DNA, 44 bp, Homo sapiens
  chr15:60286510-60286554
  hyper
gaggtagtggcccttccttccaggcgtcgcgctgatccccaact

SEQ ID NO: 290853 - DNA, 78 bp, Homo sapiens
  chr15:60288334-60288412
  hyper
actcctggtattccggagtgttccttaaagactgtgaacccaaactgctttcaggggtgaagtaagtgacgagaaggt

SEQ ID NO: 290854 - DNA, 32 bp, Homo sapiens
  chr15:60288754-60288786
  hyper
tcgggccagtgaacgacgtcagccgcaactct

SEQ ID NO: 290855 - DNA, 85 bp, Homo sapiens; identical to SEQ ID NO: 203897
  chr15:60289225-60289310
  hyper

SEQ ID NO: 290856 - DNA, 36 bp, Homo sapiens; identical to SEQ ID NO: 203898
  chr15:60289626-60289662
  hyper

SEQ ID NO: 290857 - DNA, 342 bp, Homo sapiens
  chr15:60291859-60292201
  hyper
tggcaccacagtgcaggggtcgctggcgggggtagggggtgtgggtgggtacggagtcctttcactgcccgtcggcagttggcaccagagcggaaagtgtgtcccctcccccgcctctctcccttgggcagtttgatttcccgccagactcagtcggagtggcctggaagagcgggctcaaactccaaaggcagtcgtgggagagtcgtagcggatacgtttcccctgacatgcgccgggtgctcgtctctgccccccacccgcccccaaaacccaaacctgcaagtcgatgttgtccggtgaccccgggaaaggagaactttctgagctagttccctctgg

SEQ ID NO: 290858 - DNA, 231 bp, Homo sapiens
  chr15:60292249-60292480
  hyper
ggtgggggaggcgcacagactccgaggacaaacagcccccaggacactcgggatggccatttttttaattgaccactgacaggctgagggagtttgttttagtgctgaataccccaggaacgaaatccttttgaaagggaggctaagtcgtttcacgccaccaaagtgcagatttgaagaatgactgatgggacaaagaggcgcgatgcgttagcgcgggttcccagagcg

SEQ ID NO: 290859 - DNA, 355 bp, Homo sapiens
  chr15:60298179-60298534
  hyper
cacctcactcgccttccctggctcccagtcctgccggcccccacctgggaccgccaccctaacttgttcatttcaccttcggccaacccgccttgccccaagagaactttgttttggacccaggagaccaaacacaaacttgcagatgggccgagaggcgcgtgggagttgtcctcgcccccacatcaaggaaggccggggccacctgagccgaaccatcccctccctgaggccccgaaaccccctcctatttgaccggcgggggaaaccctgtcaccccctcttcgccgagaaaagcgcgtcttccctccgcccagatcggcggagccccgaactctgcgcagtttcaagacta

SEQ ID NO: 290860 - DNA, 78 bp, Homo sapiens; identical to SEQ ID NO: 203901
  chr15:60690265-60690343
  hyper

SEQ ID NO: 290861 - DNA, 219 bp, Homo sapiens; identical to SEQ ID NO: 237980
  chr15:60771301-60771520
  hyper

SEQ ID NO: 290862 - DNA, 1568 bp, Homo sapiens
  chr15:60883785-60885353
  hyper
gactaacccgcgcccgtcggccctcaccacggtctaacctccgcccctgcccgcggatcccgtgggctgccgagttcctccccacctccatccaccagccaaagtgtcaagcggggtgcgccgcggctccctgggccgcccagagcgtcttggcacgctcgaggcgcccgtctcgctccggcccgcgcgctttcggaagtggccgcggcgggacacagcgcgggacacagcgcggacctgcggcacttgcccggccggcggccgctgaggcgctcggggacgcaggggcagggcgcaaggcctggggcgctgaccagtccccggggatgacatcgcgacaacgcgcacgcacggccctgcccggccgcggcgcctccccgacctaggccggagctgtcccgggtgcgggccctggggaccggccgcgggcgtccccggcttcctctgaactccgcagaccctccccttcctttccgaagcgcggcgactcccggcaaactttcttttgggagacccgcccggtgccaagcggacccaagagactgacaggagccggagggggcagcagagggggatccaccccgtgcgcctttgccccccaatcggaggcaggccgatcccgtggccgggctcaggtggcgccgcggcggtggcccagaaggccctggcagggcccccgcgccgagccccgggcagtacgtgcgttcgggcaggcgcgcccacccctccccctgcgcgccctcctccccgccccccggagccgccagcccacccggccccggcggggcgcccgggctcacctttcatcgctgcgatcacaaaatacatcatttaagccgcggtgcggagagcgcagggagagcggatggtccgaccccggagccccctctgccgccgccgcgccgccgccgcccgagccacagcagcagctgccgcagctgcccgcccgccgagagccatcccgagccataagaggctccatgtgaccggctgacatcacggccgccgctctgtttacaccgcgcccctccgcttcctcccggggcgggaggcgggaggcgggaggcgggaggcaggcgcgccccagcgccgcgccccgccccgcccccgcgggcaggtgagtagcagcggcggctctgctggcccaccccggccgggcctgccctcccgcgccccgggccctcgcccgggcgcccgccttcccctcgccttcgggatcacctgtggccgccggtcgcttttctgcacgcagcgccccgcggaacgcgcctctgaccactttctgcccccactcggtggggcaagaggctcgcaacccgacgccactctcccgctggcttgccggagcactcgggggcgataaatgcgccagctcgttggtggaaaagacaggtttggtctggggagctacggtcacccgcatttcctagagtgccccagctctaatcggaaggtacggcccacttctgggccgtggagaacgaagccactgggaccgtccggggagtggagtaagctcctccgaagtctttctggagagactcggcctgggcgggggaactccgccc

SEQ ID NO: 290863 - DNA, 389 bp, Homo sapiens; identical to SEQ ID NO: 203903
  chr15:61519472-61519861
  hyper

SEQ ID NO: 290864 - DNA, 52 bp, Homo sapiens; identical to SEQ ID NO: 203904
  chr15:61520356-61520408
  hyper

SEQ ID NO: 290865 - DNA, 58 bp, Homo sapiens; identical to SEQ ID NO: 203905
  chr15:61520497-61520555
  hyper

SEQ ID NO: 290866 - DNA, 178 bp, Homo sapiens; identical to SEQ ID NO: 203906
  chr15:61520576-61520754
  hyper

SEQ ID NO: 290867 - DNA, 60 bp, Homo sapiens; identical to SEQ ID NO: 203907
  chr15:61521496-61521556
  hyper

SEQ ID NO: 290868 - DNA, 43 bp, Homo sapiens; identical to SEQ ID NO: 203908
  chr15:61521578-61521621
  hyper

SEQ ID NO: 290869 - DNA, 111 bp, Homo sapiens; identical to SEQ ID NO: 203909
  chr15:62358992-62359103
  hyper

SEQ ID NO: 290870 - DNA, 402 bp, Homo sapiens; identical to SEQ ID NO: 203910
  chr15:62359104-62359506
  hyper

SEQ ID NO: 290871 - DNA, 121 bp, Homo sapiens; identical to SEQ ID NO: 203911
  chr15:62359734-62359855
  hyper

SEQ ID NO: 290872 - DNA, 97 bp, Homo sapiens; identical to SEQ ID NO: 203912
  chr15:62456139-62456236
  hyper

SEQ ID NO: 290873 - DNA, 291 bp, Homo sapiens; identical to SEQ ID NO: 203913
  chr15:62456395-62456686
  hyper

SEQ ID NO: 290874 - DNA, 130 bp, Homo sapiens; identical to SEQ ID NO: 203914
  chr15:62457008-62457138
  hyper

SEQ ID NO: 290875 - DNA, 271 bp, Homo sapiens
  chr15:62457296-62457567
  hyper
cccagaccctgtaaacgtcccccacgtgtttaagaccccagaccagttccagccttcctctcccctgcacccacaacaaatcagccccgcttcagacctttctctcttcttcagtgtctctggatctggttgcaagctcagtgccagtggcctctagcccgctgccgaggcgccaccttcagtactgcggccaggagagtggcgctcccctcttataccgtaggctgagtcccgcccagccgccagcggcccaacccggaggtgctgcaca

SEQ ID NO: 290876 - DNA, 208 bp, Homo sapiens; identical to SEQ ID NO: 237988
  chr15:62683364-62683572
  hyper

SEQ ID NO: 290877 - DNA, 37 bp, Homo sapiens
  chr15:62684313-62684350
  hyper
ccgcggctgcgtgttctgctctcgcagctcgtagagg

SEQ ID NO: 290878 - DNA, 211 bp, Homo sapiens; identical to SEQ ID NO: 203916
  chr15:63130456-63130667
  hyper

SEQ ID NO: 290879 - DNA, 129 bp, Homo sapiens
  chr15:63334348-63334477
  hyper
ccagagcgtgagcgcgcaggatgacacctggctggctgagagctgccggggaggcgctggcgggtgccgagagcgcactgaccctgacgcggggtgcagcacggctgggaagcccccgggcctttggct

SEQ ID NO: 290880 - DNA, 201 bp, Homo sapiens
  chr15:63334720-63334921
  hyper
ggtccccatatatagtcatatccaccgtcaactgggaggccggcggccggcagcgaatgggcgagcggcccccgcgggaggagcggggagggggcacggggcggagggaggagaggaggaaggggggcaggagaaaaaagcttttccaaaaaagtattggctgtcttgaggaatgcggtcgcccccttgggaaagtacata

SEQ ID NO: 290881 - DNA, 202 bp, Homo sapiens; identical to SEQ ID NO: 203918
  chr15:63448918-63449120
  hyper

SEQ ID NO: 290882 - DNA, 37 bp, Homo sapiens; identical to SEQ ID NO: 237992
  chr15:63449921-63449958
  hyper

SEQ ID NO: 290883 - DNA, 48 bp, Homo sapiens
  chr15:63779725-63779773
  hyper
agctctgcgcggaaggcccgagagaattggtcccgcagagcttttaca

SEQ ID NO: 290884 - DNA, 91 bp, Homo sapiens; identical to SEQ ID NO: 203919
  chr15:63795380-63795471
  hyper

SEQ ID NO: 290885 - DNA, 350 bp, Homo sapiens; identical to SEQ ID NO: 203920
  chr15:63795501-63795851
  hyper

SEQ ID NO: 290886 - DNA, 343 bp, Homo sapiens; identical to SEQ ID NO: 203921
  chr15:63795894-63796237
  hyper

SEQ ID NO: 290887 - DNA, 98 bp, Homo sapiens; identical to SEQ ID NO: 237997
  chr15:64126646-64126744
  hyper

SEQ ID NO: 290888 - DNA, 134 bp, Homo sapiens; identical to SEQ ID NO: 237998
  chr15:64443636-64443770
  hyper

SEQ ID NO: 290889 - DNA, 217 bp, Homo sapiens
  chr15:64454728-64454945
  hyper
aggagagaaaggattcggaatccggcaggcgtgatctttcaccatctccccagcactgaggggtgtttgcaaaaagcctgctctgagactgccagtgtcggccccagatgggtatccggggatccaactaactccctgggtcagggcaggggctgggggtgtcggggtgggtccgggtcgttccctggactgaatgggcaggacggcccagacgcca

SEQ ID NO: 290890 - DNA, 336 bp, Homo sapiens; identical to SEQ ID NO: 238000
  chr15:64455663-64455999
  hyper

SEQ ID NO: 290891 - DNA, 414 bp, Homo sapiens; identical to SEQ ID NO: 238001
  chr15:64648210-64648624
  hyper

SEQ ID NO: 290892 - DNA, 83 bp, Homo sapiens; identical to SEQ ID NO: 238002
  chr15:64752567-64752650
  hyper

SEQ ID NO: 290893 - DNA, 56 bp, Homo sapiens; identical to SEQ ID NO: 203922
  chr15:65067772-65067828
  hyper

SEQ ID NO: 290894 - DNA, 256 bp, Homo sapiens; identical to SEQ ID NO: 238004
  chr15:65117948-65118204
  hyper

SEQ ID NO: 290895 - DNA, 220 bp, Homo sapiens; identical to SEQ ID NO: 238005
  chr15:65186316-65186536
  hyper

SEQ ID NO: 290896 - DNA, 419 bp, Homo sapiens
  chr15:65203768-65204187
  hyper
cgagtcccgagaggcgcgaggaggatgagcctgccagatgccttgtgcgcatctatctccagggccggggaggctgggcgaactcccggggaggagactgggtcagggacacctgcggaactcggcgtggccccgacccgccggcctcgggcgcggaggggtgggcaggttaagagagcaggaggagggacctgcgtcctggtccgggactggggtggccggggcagctgcgctcctagcaggcggggcgtggagtctggaggagcgaccgccccgtcctctcggctccccgggccccgccccggcggacgcgcgcctcgcgcccgggcaccagcgcgcgcaggggctgcggagcggcaggatgcaggaggagctggcgtgggagaccgacggccgtgagtctgcctggaggagggagg

SEQ ID NO: 290897 - DNA, 40 bp, Homo sapiens
  chr15:65204235-65204275
  hyper
aggggtgaggttggcgccctccgaacggccacctccgtgt

SEQ ID NO: 290898 - DNA, 79 bp, Homo sapiens; identical to SEQ ID NO: 203923
  chr15:65281790-65281869
  hyper

SEQ ID NO: 290899 - DNA, 43 bp, Homo sapiens; identical to SEQ ID NO: 238008
  chr15:65282476-65282519
  hyper

SEQ ID NO: 290900 - DNA, 110 bp, Homo sapiens; identical to SEQ ID NO: 203924
  chr15:65321808-65321918
  hyper

SEQ ID NO: 290901 - DNA, 38 bp, Homo sapiens; identical to SEQ ID NO: 238010
  chr15:65426171-65426209
  hyper

SEQ ID NO: 290902 - DNA, 39 bp, Homo sapiens
  chr15:65477569-65477608
  hyper
gctgactcggttccgaaccctttcgcgggccctagaccc

SEQ ID NO: 290903 - DNA, 188 bp, Homo sapiens; identical to SEQ ID NO: 238012
  chr15:65578946-65579134
  hyper

SEQ ID NO: 290904 - DNA, 89 bp, Homo sapiens
  chr15:65647775-65647864
  hyper
agccaccggagccccggtccaagcggccccaggctccccggcccagggcgcggcaggggcggcgggcgagggcgcgagcccggaggacg

SEQ ID NO: 290905 - DNA, 241 bp, Homo sapiens
  chr15:65648151-65648392
  hyper
ggtttgatgtcgctggggcgagcgaggcaccatttcccgccaccccctcccccagagcctcggattccccagctgggcccggccccggcgcactcgcggcggcggagggaaactgaggaagcggtgcctgtctccccgaggaaataggcccttcaccttccgtggaagctgggcggacacgcgcggcccccggactcgccctcgtccctccctccgggcccctccccgagccttctccacc

SEQ ID NO: 290906 - DNA, 44 bp, Homo sapiens; identical to SEQ ID NO: 238014
  chr15:65669009-65669053
  hyper

SEQ ID NO: 290907 - DNA, 390 bp, Homo sapiens; identical to SEQ ID NO: 203925
  chr15:65670244-65670634
  hyper

SEQ ID NO: 290908 - DNA, 96 bp, Homo sapiens
  chr15:65714323-65714419
  hyper
cctgctgacctcgtccacgcttccctggtcggtccctggggggtggggccggggtgacacgcgtcccatcgtgagaacaagcgctggacatgtcca

SEQ ID NO: 290909 - DNA, 267 bp, Homo sapiens
  chr15:65714831-65715098
  hyper
ctgcggacacgacaggagcactcccaacacacacacacacacacacacacacacacacacacacgactccagactctgcgaaccaaaggcacacacccactgcggacaagcacgccccacaaacgccccccggccgcagctcgcagacccccgcgcaggcatcgcgggcacctggacgcgcagcccccgcacttgctcgggactccggcttgagccagccccgcagcccgatgcagaccagggcgcgggcgcaccagcactccgcag

SEQ ID NO: 290910 - DNA, 182 bp, Homo sapiens; identical to SEQ ID NO: 238021
  chr15:65809983-65810165
  hyper

SEQ ID NO: 290911 - DNA, 236 bp, Homo sapiens; identical to SEQ ID NO: 238022
  chr15:66083363-66083599
  hyper

SEQ ID NO: 290912 - DNA, 198 bp, Homo sapiens; identical to SEQ ID NO: 203927
  chr15:66084910-66085108
  hyper

SEQ ID NO: 290913 - DNA, 141 bp, Homo sapiens; identical to SEQ ID NO: 238024
  chr15:66585520-66585661
  hyper

SEQ ID NO: 290914 - DNA, 65 bp, Homo sapiens; identical to SEQ ID NO: 203928
  chr15:66586477-66586542
  hyper

SEQ ID NO: 290915 - DNA, 165 bp, Homo sapiens; identical to SEQ ID NO: 203929
  chr15:66678950-66679115
  hyper

SEQ ID NO: 290916 - DNA, 108 bp, Homo sapiens; identical to SEQ ID NO: 238027
  chr15:66797136-66797244
  hyper

SEQ ID NO: 290917 - DNA, 507 bp, Homo sapiens; identical to SEQ ID NO: 203930
  chr15:66992920-66993427
  hyper

SEQ ID NO: 290918 - DNA, 261 bp, Homo sapiens
  chr15:66994356-66994617
  hyper
acgcgaggcagaaagcgggccgcgggcgctgtcaggccctgggcgggggtgccggggtggtgtggggcgggggcccgagctcggcccgccccgggagccggccccttggagcctccggccctgcaatgggacgtgttctcctttaagagttaagaaacttgaaaccttgtttgcgcaacaatcagcgccgcggagccgccaaagtgtctagactggcatatgatgggaggcagccaatgactccgcggcgctcctccgggg

SEQ ID NO: 290919 - DNA, 322 bp, Homo sapiens
  chr15:66994912-66995234
  hyper
atgtgttgacacccgcgtccaggagaaactcgctccaagtgcatctagcgcctgggacctgagacggcgttggcctttcgtgcatgcaaatccagggatttaggttttgtttgggatttccttttctttctttccttttttttttctttttgcagggagtaagaagggagctgggggtatcaacaagcctgcctttcggatcctgcgggaaaagcccatgtagttaagcgctttggtttaaaaaaaaggcaaggtaaaggcagggctttccagacacatttaggggttcgcgcgagcgctttgtgctcatggaccagccgca

SEQ ID NO: 290920 - DNA, 910 bp, Homo sapiens
  chr15:66995267-66996177
  hyper
ctttctggcggcgcgccgcctgcagcccccctaaagcgcgggggctggagttgttgagcagccccgccgctgtggtccatgtagccgctggccgcgcgcggactgcggctcggcgtgcgcgtgttcccggccgtcccgcctcggcgagctccctcatgttgtcgccctgcggcgccccttcgacgacaggctgtgcgcggtctgcacggcgctccgcggcggagcttcatgtggggctgcgacccgcgcagccggcgcctcgctgagggaacggacccccggtaaccggagaccgcctcccccccacccctggcgccaaaggatatcgtatgttcaggtccaaacgctcggggctggtgcggcgactttggcgaagtcgtgtggtccccgaccgggaggaaggcggcagcggcggcggcggtggcggcgacgaggatgggagcttgggcagccgagctgagccggccccgcgggcaagagagggcggaggctgcggccgctccgaagtccgcccggtagccccgcggcggccccgggacgcagtgggacagcgaggcgcccagggcgcggggaggcgccggcgcgcagggggccccccgaggcccatgtcggagccaggggccggcgctgggagctccctgctggacgtggcggagccgggaggcccgggctggctgcccgagagtgactgcgagacggtgacctgctgtctcttttcggagcgggacgccgccggcgcgccccgggacgccagcgaccccctggccggggcggccctggagccggcgggcggcgggcggagtcgcgaagcgcgctcgcggctgctgctgctggagcaggaactcaaaaccgtcacgtactcgctgctgaagcggctcaaggagcgctcgctggacacgctgctggaggc

SEQ ID NO: 290921 - DNA, 102 bp, Homo sapiens; identical to SEQ ID NO: 238032
  chr15:67058139-67058241
  hyper

SEQ ID NO: 290922 - DNA, 196 bp, Homo sapiens
  chr15:67357337-67357533
  hyper
tccgcacacgttcccgaggctctcggccggtgtgatctcaccgactagagaataaaaacagcccaggggcgccggcgccggccaagggccttgacggggatcagcaagcgcgaggccaagtgcgggccccaacttcctgggcccgggccttccgcgcgccccctctcgggctcgggtcctctccagggtgcactcg

SEQ ID NO: 290923 - DNA, 199 bp, Homo sapiens; identical to SEQ ID NO: 52169
  chr15:67357544-67357743
  hyper

SEQ ID NO: 290924 - DNA, 61 bp, Homo sapiens; identical to SEQ ID NO: 238034
  chr15:67359191-67359252
  hyper

SEQ ID NO: 290925 - DNA, 125 bp, Homo sapiens; identical to SEQ ID NO: 203933
  chr15:67547184-67547309
  hyper

SEQ ID NO: 290926 - DNA, 229 bp, Homo sapiens; identical to SEQ ID NO: 238036
  chr15:67813118-67813347
  hyper

SEQ ID NO: 290927 - DNA, 165 bp, Homo sapiens; identical to SEQ ID NO: 203934
  chr15:68112674-68112839
  hyper

SEQ ID NO: 290928 - DNA, 192 bp, Homo sapiens
  chr15:68118684-68118876
  hyper
caagctgcccgagaacttcgccttcgatgtggtgcacgagtgcgcgtggggctcgcgtggtagcttcatccctgcgcgttacaacagctctcgtgccaagtgcatcaagtgcggctactgcagcatgtacttctcgcccaacaagttcatcttccactcgcaccgaacacccgacgccaagtacacgcagcc

SEQ ID NO: 290929 - DNA, 60 bp, Homo sapiens; identical to SEQ ID NO: 203935
  chr15:68125163-68125223
  hyper

SEQ ID NO: 290930 - DNA, 224 bp, Homo sapiens; identical to SEQ ID NO: 203936
  chr15:68126244-68126468
  hyper

SEQ ID NO: 290931 - DNA, 50 bp, Homo sapiens; identical to SEQ ID NO: 203937
  chr15:68126855-68126905
  hyper

SEQ ID NO: 290932 - DNA, 363 bp, Homo sapiens; identical to SEQ ID NO: 203938
  chr15:68127129-68127492
  hyper

SEQ ID NO: 290933 - DNA, 92 bp, Homo sapiens; identical to SEQ ID NO: 203939
  chr15:68128502-68128594
  hyper

SEQ ID NO: 290934 - DNA, 71 bp, Homo sapiens; identical to SEQ ID NO: 224883
  chr15:68177208-68177279
  hyper

SEQ ID NO: 290935 - DNA, 51 bp, Homo sapiens; identical to SEQ ID NO: 203940
  chr15:68260709-68260760
  hyper

SEQ ID NO: 290936 - DNA, 315 bp, Homo sapiens; identical to SEQ ID NO: 238048
  chr15:68347700-68348015
  hyper

SEQ ID NO: 290937 - DNA, 40 bp, Homo sapiens; identical to SEQ ID NO: 203941
  chr15:68521278-68521318
  hyper

SEQ ID NO: 290938 - DNA, 201 bp, Homo sapiens
  chr15:68569511-68569712
  hyper
aacggaggttctgccggctcaggatgagattcctgctctgtctgaacgcgggactcgctttccttcccaggatacctcgctccttccaccgcgagcgcagctccccttcgctcccatctttctctcacacttaacccctttctccgggaaagtcaggccgtacttccagtcccttctcagagcctggtgttgtggctctca

SEQ ID NO: 290939 - DNA, 49 bp, Homo sapiens
  chr15:68569792-68569841
  hyper
aaccccggctcaggggcagaagcaggacccgcaccgtctatagtaaaat

SEQ ID NO: 290940 - DNA, 46 bp, Homo sapiens; identical to SEQ ID NO: 238052
  chr15:68598773-68598819
  hyper

SEQ ID NO: 290941 - DNA, 57 bp, Homo sapiens; identical to SEQ ID NO: 203942
  chr15:68723466-68723523
  hyper

SEQ ID NO: 290942 - DNA, 109 bp, Homo sapiens
  chr15:68724333-68724442
  hyper
ggcagagggtgggcacctacctggccacaggctgagcgcccaggccaccaccaggcccctgggcaggtccatggcccgcggcacggcggctgggtccggtgtgcagcgg

SEQ ID NO: 290943 - DNA, 191 bp, Homo sapiens; identical to SEQ ID NO: 125957
  chr15:68724480-68724671
  hyper

SEQ ID NO: 290944 - DNA, 230 bp, Homo sapiens; identical to SEQ ID NO: 238054
  chr15:68821324-68821554
  hyper

SEQ ID NO: 290945 - DNA, 73 bp, Homo sapiens
  chr15:68870281-68870354
  hyper
gaagccagcacttccgggcttgccaggctgtcctgcttggagaacccctctgcttccacctctgctaactcct

SEQ ID NO: 290946 - DNA, 413 bp, Homo sapiens
  chr15:68870407-68870820
  hyper
gcttgggagggagactcctttctcaagacttgcgaggtcaccttcaggtgactgtccctcaaatctccgcagcagctccaggacacactgtgccccgagtcaggattggatcaacacacaggacgcacctgtgttatcactccaccagtagagcggcactcagtggtagtgtagacagtcctagggcagggcagcttctataacaagaggttccttagggagctagcggccgagtggaaagagcgggaggaacggctcgggcaggcaggtcctgtgctgtggtctaagtcacttcccacgtccgtcccactctgatcgtcagtttcctcctctgcaaaactcactaaggcggccttcgggcaagtcatcgcggcgggaattagattcgaaagagtgcttacacaaatccgtct

SEQ ID NO: 290947 - DNA, 301 bp, Homo sapiens
  chr15:68871085-68871386
  hyper
gccagcctcgcccagccgcgtggcgtccgcaggcccgaaggggttaaggccgcggacccgggcgcccgtccggactccgggagcagcggtgcccggcggccggcgatcgagcgggaggctcggggcacggccgctggcgggctgcgcttcctcctcctcctccctccgcctcctcctttgtagcgagttcccggcccctcttcctccccccgccccccagcccgggccctctccctctctccctttcttcctgcctcgccttcctgcggcgaaggaggctcatctattataaatgcacatt

SEQ ID NO: 290948 - DNA, 262 bp, Homo sapiens; identical to SEQ ID NO: 238056
  chr15:69109438-69109700
  hyper

SEQ ID NO: 290949 - DNA, 173 bp, Homo sapiens; identical to SEQ ID NO: 238057
  chr15:69111353-69111526
  hyper

SEQ ID NO: 290950 - DNA, 127 bp, Homo sapiens; identical to SEQ ID NO: 238058
  chr15:69113815-69113942
  hyper

SEQ ID NO: 290951 - DNA, 304 bp, Homo sapiens; identical to SEQ ID NO: 203943
  chr15:69114202-69114506
  hyper

SEQ ID NO: 290952 - DNA, 42 bp, Homo sapiens; identical to SEQ ID NO: 203944
  chr15:69136422-69136464
  hyper

SEQ ID NO: 290953 - DNA, 159 bp, Homo sapiens
  chr15:69366379-69366538
  hyper
agatgggctgtggagggggacgttgggaactgcccgaccccattctcgccttttcccgctggatgtgcagctttcggaacgtgcaggggcgggagtgtctacaacctaagaaaagggccgcggtggggagcccggagcagggctgggtgcagggagcgc

SEQ ID NO: 290954 - DNA, 79 bp, Homo sapiens; identical to SEQ ID NO: 203945
  chr15:69366730-69366809
  hyper

SEQ ID NO: 290955 - DNA, 102 bp, Homo sapiens; identical to SEQ ID NO: 238062
  chr15:69452709-69452811
  hyper

SEQ ID NO: 290956 - DNA, 453 bp, Homo sapiens; identical to SEQ ID NO: 238063
  chr15:69453523-69453976
  hyper

SEQ ID NO: 290957 - DNA, 68 bp, Homo sapiens; identical to SEQ ID NO: 203947
  chr15:69591245-69591313
  hyper

SEQ ID NO: 290958 - DNA, 45 bp, Homo sapiens; identical to SEQ ID NO: 238065
  chr15:69591723-69591768
  hyper

SEQ ID NO: 290959 - DNA, 82 bp, Homo sapiens; identical to SEQ ID NO: 238066
  chr15:69706605-69706687
  hyper

SEQ ID NO: 290960 - DNA, 79 bp, Homo sapiens; identical to SEQ ID NO: 238067
  chr15:69744999-69745078
  hyper

SEQ ID NO: 290961 - DNA, 70 bp, Homo sapiens; identical to SEQ ID NO: 224884
  chr15:70388126-70388196
  hyper

SEQ ID NO: 290962 - DNA, 285 bp, Homo sapiens
  chr15:70388412-70388697
  hyper
cccctccgtccccgcgggggatggcaggagccgcgcaggggacccacccctccccgccagccccggggcggcccccaccggccttacctgtgatactgagcttgcaggaactggaattcgtctttgatcctgtcacaagactcagccaccgtgaatttaaatcccggctgcccgggttgatggggagcctggagcccgcgaagacaagacaggggagggggcgggggcatgagaccgcgctcagagcggccccggcccctccccaacggcgcccaaccaaaagag

SEQ ID NO: 290963 - DNA, 76 bp, Homo sapiens; identical to SEQ ID NO: 203948
  chr15:70391279-70391355
  hyper

SEQ ID NO: 290964 - DNA, 80 bp, Homo sapiens; identical to SEQ ID NO: 203949
  chr15:71054803-71054883
  hyper

SEQ ID NO: 290965 - DNA, 298 bp, Homo sapiens; identical to SEQ ID NO: 203950
  chr15:71054929-71055227
  hyper

SEQ ID NO: 290966 - DNA, 366 bp, Homo sapiens; identical to SEQ ID NO: 203951
  chr15:71055270-71055636
  hyper

SEQ ID NO: 290967 - DNA, 42 bp, Homo sapiens; identical to SEQ ID NO: 203952
  chr15:71055815-71055857
  hyper

SEQ ID NO: 290968 - DNA, 263 bp, Homo sapiens; identical to SEQ ID NO: 203953
  chr15:71055980-71056243
  hyper

SEQ ID NO: 290969 - DNA, 119 bp, Homo sapiens; identical to SEQ ID NO: 203954
  chr15:71056447-71056566
  hyper

SEQ ID NO: 290970 - DNA, 114 bp, Homo sapiens
  chr15:71146199-71146313
  hyper
cacctcccgggccagccgccgcgcctacctgtgcccgcggctcggctcctcctcgctcgcgctgccccagccggggctgaggtaccgggccgggtccccggcgccccgagtctc

SEQ ID NO: 290971 - DNA, 81 bp, Homo sapiens
  chr15:71146345-71146426
  hyper
cgtcctcggcctcctggatggcgacgcggatctgcaccgccgtcttgggcccgggccgagcctccccgccggactgggcca

SEQ ID NO: 290972 - DNA, 80 bp, Homo sapiens
  chr15:71146754-71146834
  hyper
gcccgagaggaggtgtcagggctccctcctcctgcgccttctttcacggcgccgcagggatgggcgcagcacagctgact

SEQ ID NO: 290973 - DNA, 195 bp, Homo sapiens; identical to SEQ ID NO: 203955
  chr15:71184274-71184469
  hyper

SEQ ID NO: 290974 - DNA, 766 bp, Homo sapiens
  chr15:71184499-71185265
  hyper
gcacgaagcggtcccagagcagccgcacggcccggtccttgggaaagcggaacagcgacttcccagacttggtggtgttgccgcagtgggcggccacacaacgggccggcatggcggccgtcttcggtgcgcgggagccgggttccctggaccttcgcccttgggcacgctcctcgcagcggcctcggcgaggcaagtcctcccctcctcacctgtccactccgggtcgggattgtttccttccctacctctggtcaccggaagtggcgatctggggcccccaatgggagggctctttgatatcttcctcctcctcctccctgcgctgctccccaggagccagtggacacaagcagagggatacaaatttcgcgcgggcagcgctgaggtgggccgtaaagaggaacggaccggaagtggtggtggttatagcaaccagtgtggccagcctcttccccagcttatcctcctcccaatactcccgctctgtttttatgaggctgggaaaatagaacgaggaagtggtgacgcactgggctctcacgaatacaactagaagctgcaacgactgtgtggctctatcgattcgggagaggtccagaccggaaatggtcgtttccatggtaaccctgagcaggttgcctgggagatgacctctttcgggtctctttgaatctccgctgtagcgtcacctggaaggcagatctaacagagaacctggactgtctcctatcatgattcccgggaaatatcgctctgtttctgg

SEQ ID NO: 290975 - DNA, 141 bp, Homo sapiens; identical to SEQ ID NO: 203957
  chr15:71185295-71185436
  hyper

SEQ ID NO: 290976 - DNA, 585 bp, Homo sapiens
  chr15:71407571-71408156
  hyper
ccccctcccgccctcgtggcctctgtctagaccgtactccctcctactgggtgatgtctcttcccctgggacccagggaccatcccgttgttgacctccggggtcaggggtgcggatgggggccggcccttcccgcggtcgccgccagggggcggcaggagcggctccagatgacagcgggaggccgcaagaggggagggaggaaggaccgagggagcgcggatcccgctctcggatcgcaaactctgagccagagctctccgcgcgcgcctgaaccgctggccgcccgcgcagcccgacgcggaatcggggcacagcgggagcccgtgcagggcgggcgcggggcggctgggcggcggtggcggccgtccatgcggcggcgctcggggctgcccggcgccgggaaccacgcgggggcgaggcgaggcgaggcggccgccggtcgctccgggacgcggaccgccaggtgagcagagccgcgcgccccgcgtcccctgcgcgccgcccgcgcggccccgacccggcttccgctgcccaggctccggctcccgctctctggccggcggggcgggctggcgcgggcta

SEQ ID NO: 290977 - DNA, 231 bp, Homo sapiens; identical to SEQ ID NO: 238073
  chr15:72072597-72072828
  hyper

SEQ ID NO: 290978 - DNA, 141 bp, Homo sapiens; identical to SEQ ID NO: 203960
  chr15:72409488-72409629
  hyper

SEQ ID NO: 290979 - DNA, 309 bp, Homo sapiens; identical to SEQ ID NO: 203961
  chr15:72522193-72522502
  hyper

SEQ ID NO: 290980 - DNA, 1074 bp, Homo sapiens; identical to SEQ ID NO: 203962
  chr15:72522952-72524026
  hyper

SEQ ID NO: 290981 - DNA, 123 bp, Homo sapiens; identical to SEQ ID NO: 203963
  chr15:72612098-72612221
  hyper

SEQ ID NO: 290982 - DNA, 100 bp, Homo sapiens; identical to SEQ ID NO: 203964
  chr15:72612906-72613006
  hyper

SEQ ID NO: 290983 - DNA, 336 bp, Homo sapiens; identical to SEQ ID NO: 238081
  chr15:72668399-72668735
  hyper

SEQ ID NO: 290984 - DNA, 101 bp, Homo sapiens; identical to SEQ ID NO: 203965
  chr15:72978671-72978772
  hyper

SEQ ID NO: 290985 - DNA, 297 bp, Homo sapiens
  chr15:73344008-73344305
  hyper
gggggaagcgcgcggcgacggcggcccggcttgggagccggaggtcagcggctgcgcggccggccccctcccacgggagccgcgccagggcccagcaagagtcgggcgggatcgctattgtttttggcgagcacataaatccccgggccgacccactgcgcacccaggtttcctcccggaggcctttcggtttcctctgaggccctatatagaggctccaggcccggactgtgcagaggtgcgcgcccacgccggcctcccggaccagcctgagctcggagcgcctctcgccctcag

SEQ ID NO: 290986 - DNA, 283 bp, Homo sapiens
  chr15:73611203-73611486
  hyper
cgccctgcctctgccgctccgggggtccccaaggaagcaccaacgcctggccgcagggggcagttgtcatggggacgccagggcccgctgagctgcctccttagcaacgggactccccggccagttgccatggaaacagcatcccctggcaagcggtgatggggaacggctgggtttcctgcccttttccgaggactttcccctcctagggcgggagacacggcactccctataccggcgggagccgcgaggacttggtttttccagtcgcccgtcgccaccc

SEQ ID NO: 290987 - DNA, 462 bp, Homo sapiens
  chr15:73660925-73661387
  hyper
cgcccccgcggggaacaatgggcgccggccggagaggctctgcggccgcggcgctcagggaaccgctccggagtgcagagcgcacggcccgcgcgggtcccgggcgtgcgtcccgcgggagggctggctgtccgtctgtctcgccgcccgggctttgtggctggccacccgcgagctcgcctcgcctcctctgccccggcccgtccggcccgtcccggggctcccgccgcaaccgagcggagcccagcgacccgccgggcttacatcagcggccgcctcccccgaagcgccctccggcagcgctcgggctcccgcgccccggaatattcatgaagccgccgcagctcgcgggttgccataggagcggctccagcagccgggcctgcctacctgggcttcttaaaggggcagcggcgcacgggccgggggctggaaaggggcggggggcgggcctggcaaggg

SEQ ID NO: 290988 - DNA, 981 bp, Homo sapiens; identical to SEQ ID NO: 203968
  chr15:73976465-73977446
  hyper

SEQ ID NO: 290989 - DNA, 412 bp, Homo sapiens
  chr15:74045243-74045655
  hyper
cgccgggcggaggagaggagaggaggcgagaagaggcgaggggaggaggcgcggcgaggggaagggaggggagggggcgagcggcgggccgggccgggccggggcgcactaggctcgcagcctccgctcggctccgctacctcccgtccgttcgctctcggctccccgcctcagcagcccccgggcgccgggtcgccgccggtggggcaaacaggcgccgggtcggggctgggcctcccttcaccgcctcgccctgccctgccccgccgggctcccggggcctgggcccgctccccaagcgccgcggcgccgcgccgcccgcgccccggccgcccccggcccgccccgccgccccccgccggactggccgcccgggcgggcgctggctcccttaaaggccgcccggctcgct

SEQ ID NO: 290990 - DNA, 67 bp, Homo sapiens
  chr15:74219416-74219483
  hyper
cgtccctgcccctgccggggcgcgtgggctcggacaccgtgcgcggccaggcgcggcacccattcgg

SEQ ID NO: 290991 - DNA, 64 bp, Homo sapiens
  chr15:74219620-74219684
  hyper
cctaccgccagcagccctcctacccgcagcagttcccctacccgcaggcgcccttcgtcagcca

SEQ ID NO: 290992 - DNA, 376 bp, Homo sapiens; identical to SEQ ID NO: 238089
  chr15:74219934-74220310
  hyper

SEQ ID NO: 290993 - DNA, 190 bp, Homo sapiens; identical to SEQ ID NO: 203971
  chr15:74268224-74268414
  hyper

SEQ ID NO: 290994 - DNA, 148 bp, Homo sapiens
  chr15:74420293-74420441
  hyper
ccctctgcgctagcggcttggaaccttgtcaccctcccctcccccacccctacttccacacacctgattagttgtctgtttctttaatgatcaaagacgtgggcggcggcgggatgaggtcttggttcccggctccacagccctccct

SEQ ID NO: 290995 - DNA, 41 bp, Homo sapiens
  chr15:74420734-74420775
  hyper
cagctcccgcccaggggtggtcaccgcgtccttaaccaccc

SEQ ID NO: 290996 - DNA, 229 bp, Homo sapiens
  chr15:74421725-74421954
  hyper
gtattgatctccacggaagccccaaaccctcgccatcgagagacccccatggcccggggtgatggctgtggggcttggtgctcccagagagctcagtggctacagaatgggtggggattctgcgtgtctcccggagcctgaacccctttcctggttatggccggtagctgtctccagggctaacgtgggcagcgcaggggggcggaaaccgggttttagccaaatgcct

SEQ ID NO: 290997 - DNA, 448 bp, Homo sapiens
  chr15:74428235-74428683
  hyper
tccttctgtcctcccacccccaccccacttctggccagttggagtccagcccggtgcctggggcgcctttcagctccgcgctcagattttcctgttttcgttgttttcaaagacagcgacatttcgggtctggtgctaacacccccttcccagcctctgggaaaatcgagtgtgtgtgtcggggggtagggagggaatgcgttttctgtcgtctctctcctaacttaaagcgccgcaggaccgcgcgccccttggcggctgagcctgtggacttggtcgcgggccaatttcgttgtccgtgtgttgggctttccggaggtctgtgcgcccaacagcgccgctcccgcggctccacccgacccagaccctagctggaaagcgccggaggcggaggaagctgactgtggcctcccgggccgcggctctctggagggctcgcgccctagtt

SEQ ID NO: 290998 - DNA, 167 bp, Homo sapiens
  chr15:74429123-74429290
  hyper
aataaaacaatcgatttgaactgggctcggtgactttttgtcaggggacagagggaggaggcctgggcgatgaaggaggaaaccgcggaaggaaggagcccccccagagcctcccgttggaatcttttgagtgatttcctgtttgcgtgaccatcctgtgatttttt

SEQ ID NO: 290999 - DNA, 126 bp, Homo sapiens; identical to SEQ ID NO: 238094
  chr15:74537933-74538059
  hyper

SEQ ID NO: 291000 - DNA, 76 bp, Homo sapiens; identical to SEQ ID NO: 203974
  chr15:74685108-74685184
  hyper

SEQ ID NO: 291001 - DNA, 389 bp, Homo sapiens
  chr15:74725114-74725503
  hyper
tttggggacagagccgaatcggactgggggcggggaggcatttgtgtgcaatgcaggggaggggagatcagttcctcgcggcagaaagcctcaaacccccgcctaaccggctttctgtcccatagtacagggtctaaactgaggtgccctgggggagactccagtcccccaggttcttattatctaccctggcctaaaggctgcacccccgccctagatccaccgcctgggggtcccaacggccgtgccccacccaacgggcactgccccccaacgctggagccgatttctggtgacaactgccacgtgcgggcaaggggggagcggccggtcccggcattgctgaggcagcgccctggtaccccaagccgccgcaccgcaccatgtcc

SEQ ID NO: 291002 - DNA, 680 bp, Homo sapiens; identical to SEQ ID NO: 126050
  chr15:74725548-74726228
  hyper

SEQ ID NO: 291003 - DNA, 229 bp, Homo sapiens; identical to SEQ ID NO: 238098
  chr15:74753655-74753884
  hyper

SEQ ID NO: 291004 - DNA, 176 bp, Homo sapiens
  chr15:74912313-74912489
  hyper
cccagctgaccagcgtccccatcccccttttggcagccatgaccgcctgccctaccagaggaggtaccgggagcgccgtgacagcgatacataccggtgtgaagagcggagcccatcctttggagaggactactatggaccttcacgttctcgtcatcgtcggcgatcgcgggaga

SEQ ID NO: 291005 - DNA, 277 bp, Homo sapiens; identical to SEQ ID NO: 238099
  chr15:74988541-74988818
  hyper

SEQ ID NO: 291006 - DNA, 137 bp, Homo sapiens; identical to SEQ ID NO: 238100
  chr15:75017910-75018047
  hyper

SEQ ID NO: 291007 - DNA, 45 bp, Homo sapiens; identical to SEQ ID NO: 238102
  chr15:75018660-75018705
  hyper

SEQ ID NO: 291008 - DNA, 486 bp, Homo sapiens; identical to SEQ ID NO: 238103
  chr15:75075780-75076266
  hyper

SEQ ID NO: 291009 - DNA, 229 bp, Homo sapiens
  chr15:75118920-75119149
  hyper
gccaagcgtggggcgcgggcccgcggcgggagctgtccgcgaaacctagtgctgaagtaggcgcggacgtgcccggtgcctggcgcgtggtagcaggcgcccggtgccccggccggcgaagaccatggcgttcatggtgaagaccatggtgggcggccagctgaagaacctcactgggagcctgggaggcggcgaggataagggagatggggacaagtcggcagccgaa

SEQ ID NO: 291010 - DNA, 129 bp, Homo sapiens; identical to SEQ ID NO: 238105
  chr15:75119190-75119319
  hyper

SEQ ID NO: 291011 - DNA, 226 bp, Homo sapiens; identical to SEQ ID NO: 238107
  chr15:75165610-75165836
  hyper

SEQ ID NO: 291012 - DNA, 320 bp, Homo sapiens; identical to SEQ ID NO: 238108
  chr15:75230421-75230741
  hyper

SEQ ID NO: 291013 - DNA, 247 bp, Homo sapiens
  chr15:75248843-75249090
  hyper
ggggccggagcccgggccgcctccctcggccccgcaccccgctggcgcctcttcggagcgcaccttacggaagttctccatgcgccgtcgtcgccgggaccgccggctttgccatggggcggcctcagccccggggctgcatggccgccggtcgcgccttgcaagggccagcaggggtaagggcgccggagcagcgcagacgccggcgggcgggctgggacggcgcgatctcggccccacttctctc

SEQ ID NO: 291014 - DNA, 127 bp, Homo sapiens; identical to SEQ ID NO: 238109
  chr15:75249802-75249929
  hyper

SEQ ID NO: 291015 - DNA, 56 bp, Homo sapiens
  chr15:75250989-75251045
  hyper
ttgggagcggccctcggtccctgctgttcagaaccgggatttaccctcttaccact

SEQ ID NO: 291016 - DNA, 89 bp, Homo sapiens; identical to SEQ ID NO: 203978
  chr15:75251811-75251900
  hyper

SEQ ID NO: 291017 - DNA, 158 bp, Homo sapiens; identical to SEQ ID NO: 238111
  chr15:75316097-75316255
  hyper

SEQ ID NO: 291018 - DNA, 134 bp, Homo sapiens
  chr15:75470762-75470896
  hyper
tggctcggccactgcgccaggtcttggaacatctaaggcagaaacaggaccaacacccgcaagcctccaacagcccctggggctccgtccagccgttggggtggaggggttggggggaggtgcaggggcgggca

SEQ ID NO: 291019 - DNA, 91 bp, Homo sapiens; identical to SEQ ID NO: 203980
  chr15:75495098-75495189
  hyper

SEQ ID NO: 291020 - DNA, 373 bp, Homo sapiens; identical to SEQ ID NO: 238114
  chr15:75639263-75639636
  hyper

SEQ ID NO: 291021 - DNA, 455 bp, Homo sapiens; identical to SEQ ID NO: 126081
  chr15:75640520-75640975
  hyper

SEQ ID NO: 291022 - DNA, 210 bp, Homo sapiens; identical to SEQ ID NO: 238116
  chr15:75661045-75661255
  hyper

SEQ ID NO: 291023 - DNA, 202 bp, Homo sapiens; identical to SEQ ID NO: 238117
  chr15:75744075-75744277
  hyper

SEQ ID NO: 291024 - DNA, 108 bp, Homo sapiens; identical to SEQ ID NO: 238118
  chr15:75748049-75748157
  hyper

SEQ ID NO: 291025 - DNA, 182 bp, Homo sapiens; identical to SEQ ID NO: 238119
  chr15:75932855-75933037
  hyper

SEQ ID NO: 291026 - DNA, 356 bp, Homo sapiens
  chr15:75939285-75939641
  hyper
ccacttgcctcttctcgaagattctctacctgaccacttctctccttgctgccgctggctagcacagaacatccagtccccgctgctgtactaagcaacacggaaccgggtggcacctagacttgttccctgtcgctgcagatgtagagtagtgtctttccctccttccaagctagtcgcccagggcagggtcgccctgtctggctagggtgctgcacccgcagctctcggtatcttaggtcagacgcctggaacgcgcaggccgtttctgttcctccggaaaacaatctctgagctgcgccacgacccgtccctgcggagcaggagtggggaatgggaaggtgggaaggcgagtc

SEQ ID NO: 291027 - DNA, 73 bp, Homo sapiens; identical to SEQ ID NO: 52299
  chr15:75939671-75939744
  hyper

SEQ ID NO: 291028 - DNA, 219 bp, Homo sapiens; identical to SEQ ID NO: 224900
  chr15:75976176-75976395
  hyper

SEQ ID NO: 291029 - DNA, 58 bp, Homo sapiens; identical to SEQ ID NO: 238121
  chr15:76136832-76136890
  hyper

SEQ ID NO: 291030 - DNA, 299 bp, Homo sapiens
  chr15:76351370-76351669
  hyper
ctgcctccaaggggcgcaatgttactttttatgcatcaagcacggataacacatacagcacataagcaggtcgacagtgtatctgcggtactgggatttcacggggaaaggagatggggacgtgtaaaaagcctttttaagagtcagataacgaaaaacggaaaaagaggagaaacacggtcctacaagggtcctgagctgaggccatcaaatgaatgtactgacaggtatttttctcccaggcagccaactgagagtcaaggcactctgaccgtgctatgactccggccacacagaaa

SEQ ID NO: 291031 - DNA, 126 bp, Homo sapiens
  chr15:76351769-76351895
  hyper
agagctctggaaactgcaaagcgctgcgccaaagcgacgggaggttcccattctcagctgtacgaaatcccgcgggggtcctccgcttccccgagcgacgccctcggcctccgcacttgttgcttc

SEQ ID NO: 291032 - DNA, 159 bp, Homo sapiens; identical to SEQ ID NO: 238123
  chr15:76352475-76352634
  hyper

SEQ ID NO: 291033 - DNA, 43 bp, Homo sapiens; identical to SEQ ID NO: 238124
  chr15:76627465-76627508
  hyper

SEQ ID NO: 291034 - DNA, 49 bp, Homo sapiens
  chr15:76628038-76628087
  hyper
actgtaaattacccagcgccttacgttcgtttctgattatttgcattgc

SEQ ID NO: 291035 - DNA, 134 bp, Homo sapiens; identical to SEQ ID NO: 203983
  chr15:76629531-76629665
  hyper

SEQ ID NO: 291036 - DNA, 367 bp, Homo sapiens; identical to SEQ ID NO: 203984
  chr15:76632803-76633170
  hyper

SEQ ID NO: 291037 - DNA, 540 bp, Homo sapiens
  chr15:76633206-76633746
  hyper
cggcagctgcagaaaggtgggagtgcaggtcttgcctttcctcaccgggcggttggcttccagcaccgaggctgacctatcgtggcaagtttgcggcccccgcagatccccagtggagaaagagggctcttccgatgcgatcgagtgtgcgcctccccgcaaagcaatgcagaccctaaatcactcaaggcctggagctccagtctcaaaggtggcagaaaaggccagacctaactcgagcacctactgccttctgcttgccccgcagagccttcagggactgactgggacgcccctggtggcgggcagtcccatccgccatgagaacgccgtgcagggcagcgcagtggaggtgcagacgtaccagccgccgtggaaggcgctcagcgagtttgccctccagagcgacctggaccaacccgccttccaacagctggtgaggccctgccctacccgccccgacctcgggactctgcgggttggggatttagccacttagcctggcagagaggggagggggtggccttgggctgaggggct

SEQ ID NO: 291038 - DNA, 209 bp, Homo sapiens
  chr15:76633776-76633985
  hyper
aacagtggcgggctctgaaacctcacctcggcccattacgcgccctaaaccaggtctccctggattaaagtgctcacaagagaggtcgcaggattaaccaacccgctcccccgccctaatccccccctcgtgcgcctggggacctggcctccttctccgcagggcttgctctcagctggcggccggtccccaagggacactttccgact

SEQ ID NO: 291039 - DNA, 200 bp, Homo sapiens; identical to SEQ ID NO: 126118
  chr15:76634013-76634213
  hyper

SEQ ID NO: 291040 - DNA, 295 bp, Homo sapiens
  chr15:76634517-76634812
  hyper
cccacgcggacccccgccctgccccagctcagcgctccctggcggcttcgcccgggctcctagcggggaaaaggaaggggataactcagaggaacagacactcaaactcccaaagcgcatgattgctgggaaacagtagaaaccagacttgccttgaaagtgtttaagttattcgacggaggacagagtatgtgagcctttgccgaacaaacaaacgtaagttattgttatttattgtgagaacagccagttcatagtgggacttgtattttgatcttaataaaaaataataacc

SEQ ID NO: 291041 - DNA, 109 bp, Homo sapiens
  chr15:76634842-76634951
  hyper
cgcggcgggagggccggcggaggccagttcaggggtcaggctggcgtcggctgccggggctccgcgtgctgcgggcggggcgggcccggtggggattgggcgcggccga

SEQ ID NO: 291042 - DNA, 81 bp, Homo sapiens; identical to SEQ ID NO: 203987
  chr15:76638236-76638317
  hyper

SEQ ID NO: 291043 - DNA, 107 bp, Homo sapiens; identical to SEQ ID NO: 203988
  chr15:76639126-76639233
  hyper

SEQ ID NO: 291044 - DNA, 209 bp, Homo sapiens; identical to SEQ ID NO: 238132
  chr15:77711492-77711701
  hyper

SEQ ID NO: 291045 - DNA, 115 bp, Homo sapiens; identical to SEQ ID NO: 238133
  chr15:77924998-77925113
  hyper

SEQ ID NO: 291046 - DNA, 53 bp, Homo sapiens
  chr15:77925412-77925465
  hyper
aggggcgccccagccgctgccctgcacgcttagggcagcgaaacaggcagggg

SEQ ID NO: 291047 - DNA, 67 bp, Homo sapiens
  chr15:77925725-77925792
  hyper
acacgaacagggttgtttggagggcggcatggggaggccgaccgggagcccccgtcctggccctgtc

SEQ ID NO: 291048 - DNA, 130 bp, Homo sapiens
  chr15:77927041-77927171
  hyper
cgcaggcgactccccggtccctcaactccgcgctgcctggacccctccccagactccccagcccccccaccccggctgtttgtgagctacccgtgcgctcccgccctcccgcgccgcctcctcccaccag

SEQ ID NO: 291049 - DNA, 143 bp, Homo sapiens
  chr15:78110977-78111120
  hyper
cccgggcacgtcgccgcactcccccaactgaaccttggtgtcttcctcctgcctgcaaagacatcccaggccctgggcctgggagctgtccccgcgcggtcctgcctgaccctagcggggtcatagtagtctggcgcccggag

SEQ ID NO: 291050 - DNA, 80 bp, Homo sapiens
  chr15:78111210-78111290
  hyper
gccagacggcccggcccgcgcccccgccccactcccctcgcgttctcttctctggaaaggaaggccggagttgcaccctc

SEQ ID NO: 291051 - DNA, 186 bp, Homo sapiens
  chr15:78112377-78112563
  hyper
tctccgcattacagcgggtgccgcccgccgctcgcggggcccagggttcgagcgcgcagtgggcggcgaggggacccgccacgcccggccccgccgccccctccgctctccgcggctccgcggctgctagctccggcctggcgctagggtggcgacgtcccgcgctagcctcggctgccgctgaca

SEQ ID NO: 291052 - DNA, 49 bp, Homo sapiens
  chr15:78236699-78236748
  hyper
agccggccggcctgcgctgtcttacccgccccgtacccccgcccctgtc

SEQ ID NO: 291053 - DNA, 107 bp, Homo sapiens
  chr15:78633394-78633501
  hyper
catgctgaggaaagtggccgtagcggctgcgtccaagccgcacgtggagatccgccaggacggggatcagttctacatcaagacatccaccacggtgcgcaccactg

SEQ ID NO: 291054 - DNA, 161 bp, Homo sapiens
  chr15:79103104-79103265
  hyper
ggtaaaccgcgctccgtccagcccactcggacgagagctctcccgggagccaggcgcgttgctgcacccgaggtggggaaaccggagcccgaagagcggaaggggcttattccaggcgacaggcagtgtcagtaactgaatcaggggccgaggaagtttcc

SEQ ID NO: 291055 - DNA, 101 bp, Homo sapiens; identical to SEQ ID NO: 203989
  chr15:79237308-79237409
  hyper

SEQ ID NO: 291056 - DNA, 60 bp, Homo sapiens; identical to SEQ ID NO: 203990
  chr15:79383268-79383328
  hyper

SEQ ID NO: 291057 - DNA, 63 bp, Homo sapiens
  chr15:79384146-79384209
  hyper
gcgcagccctgtgaaggaaagacaccatctttccgcacggaaactgcgtatacccctcccccg

SEQ ID NO: 291058 - DNA, 110 bp, Homo sapiens; identical to SEQ ID NO: 203991
  chr15:79603182-79603292
  hyper

SEQ ID NO: 291059 - DNA, 75 bp, Homo sapiens; identical to SEQ ID NO: 203992
  chr15:79723976-79724051
  hyper

SEQ ID NO: 291060 - DNA, 85 bp, Homo sapiens; identical to SEQ ID NO: 203993
  chr15:79725539-79725624
  hyper

SEQ ID NO: 291061 - DNA, 1247 bp, Homo sapiens; identical to SEQ ID NO: 203994
  chr15:80215297-80216544
  hyper

SEQ ID NO: 291062 - DNA, 55 bp, Homo sapiens; identical to SEQ ID NO: 203995
  chr15:80285825-80285880
  hyper

SEQ ID NO: 291063 - DNA, 35 bp, Homo sapiens; identical to SEQ ID NO: 203996
  chr15:80351965-80352000
  hyper

SEQ ID NO: 291064 - DNA, 146 bp, Homo sapiens; identical to SEQ ID NO: 203997
  chr15:80352850-80352996
  hyper

SEQ ID NO: 291065 - DNA, 157 bp, Homo sapiens; identical to SEQ ID NO: 238153
  chr15:80445215-80445372
  hyper

SEQ ID NO: 291066 - DNA, 206 bp, Homo sapiens
  chr15:80543997-80544203
  hyper
acagcaccacactctcccggtttctgagccccgagccccgcagtggaactcgggccgctgcgacgcggctcccgtgcggctcccaccgaggctgctgtcccctgccgcgcgggtccggccctccccgccgaccgaggcgcgccccgggcgcagtgccgccgaggaggggatcggtcccagtgtccacgcgggtctcctcgccgccg

SEQ ID NO: 291067 - DNA, 265 bp, Homo sapiens; identical to SEQ ID NO: 203998
  chr15:80988126-80988391
  hyper

SEQ ID NO: 291068 - DNA, 440 bp, Homo sapiens
  chr15:81071387-81071827
  hyper
cggggacttgctctccgcggtccgccgcggccgctccaccgagtcctggcctccagcgccctcacctggctgctgcgggcgggactctgcgcacccgggctccgcgggctcaggtctgcgtctcccagagccgccgccagagcccgccccggtccggcccgggcacagggcccccgccccacttgggcaaggcgggggcgcgtggagggaagtttcatcggggggcgagggagggagcttcggtgccgcgcgggcgtcaggggctcctcgggggaggagtcagtaaaagtggctataaaagcggcctctcggctgagggccggggagctagcgctcaagcagagcccagcgcggtgctatcggacagagcctggcgagcgcaagcggcgcggggagccagcggggctgagcgcggccagggtctgaacccagatttccca

SEQ ID NO: 291069 - DNA, 853 bp, Homo sapiens
  chr15:81071867-81072720
  hyper
cggcgcctggcggtcagcgaccagacgtccggggccgctgcgctcctggcccgcgaggcgtgacactgtctcggctacagacccagaggtaagagggcctggctgggggcgtcagggatgagctgacggcccatgccacggaagagaggtaagaagtgggggcccgcgcctccacccggcacagggtaaacgttacccgcctcagtttctgtttgtctgtccaccctgtgctgtgcagtctacctctatctgtctgtttgtccatgcgtctgttgatgggcacacgctcttggcactgtcctctgtgggatttctctgagatcttgtgatgctttacaagctgcaggtgccggggggcgctggagtccccagagggcatccagagggggcagactcctgctttccgtagattttcccccttctgaatggcaccgggggcttgcgcccgggagagtgtctcgccgaggagggagtaccacaagggtcaggtctcggtgtcctgccgactgggagccagctcacgccgagctctagcgggcgtgcgcctagcaacaggtctgcgccctgctgctcctgcctcagcacgctcttcctcccagtttccctcgcctcccagtgcctccgggacagcgctaggcacccagcgacgcgctggcgcggggccgagctgaggcaattgcaatgttagatgaacccggggggctctgctgatgtttagactgagactccaaacgtggcatcgctggaagaaggtctggtggtccctggcaaaggacgtcggctccaagaaaggtcgcgttaggttgtgaggaaaggcagagagtcctggcagaacgctggccaggtctccagc

SEQ ID NO: 291070 - DNA, 371 bp, Homo sapiens
  chr15:81072789-81073160
  hyper
gaggagcgctgtgcgccctgggtcctcagccgcagacactctctgcgacagccgctgttccccaagggtcggacgctacggcagtcccaggagttccgccagctgccgggtttgaggtcctgagtccttctccaagcagccaacgctacccacaggtgagagctccctttaaaaactaatcttctgatgtgtgagccagtgcctggctgcagccccataccagggacggtgagccggggagcgcgtctctccatccctgcggtctggaaagtgatccagggcgcgcccgagggcggggagccggcggctctgcgtgcccaggcgcgacgccaccatggacagctcccagccacttcctccactcggggtct

SEQ ID NO: 291071 - DNA, 105 bp, Homo sapiens; identical to SEQ ID NO: 238157
  chr15:81282496-81282601
  hyper

SEQ ID NO: 291072 - DNA, 370 bp, Homo sapiens; identical to SEQ ID NO: 238158
  chr15:81292679-81293049
  hyper

SEQ ID NO: 291073 - DNA, 207 bp, Homo sapiens; identical to SEQ ID NO: 204002
  chr15:81294107-81294314
  hyper

SEQ ID NO: 291074 - DNA, 162 bp, Homo sapiens; identical to SEQ ID NO: 238160
  chr15:81616530-81616692
  hyper

SEQ ID NO: 291075 - DNA, 445 bp, Homo sapiens; identical to SEQ ID NO: 204003
  chr15:82337283-82337728
  hyper

SEQ ID NO: 291076 - DNA, 51 bp, Homo sapiens; identical to SEQ ID NO: 204004
  chr15:82338056-82338107
  hyper

SEQ ID NO: 291077 - DNA, 104 bp, Homo sapiens; identical to SEQ ID NO: 238163
  chr15:82338504-82338608
  hyper

SEQ ID NO: 291078 - DNA, 214 bp, Homo sapiens; identical to SEQ ID NO: 204005
  chr15:82339664-82339878
  hyper

SEQ ID NO: 291079 - DNA, 49 bp, Homo sapiens
  chr15:83315393-83315442
  hyper
gcgtctgcctggcttttctcggtcacggggtcaacgcggggccgctcac

SEQ ID NO: 291080 - DNA, 86 bp, Homo sapiens; identical to SEQ ID NO: 204006
  chr15:83377915-83378001
  hyper

SEQ ID NO: 291081 - DNA, 125 bp, Homo sapiens; identical to SEQ ID NO: 204007
  chr15:83378087-83378212
  hyper

SEQ ID NO: 291082 - DNA, 46 bp, Homo sapiens; identical to SEQ ID NO: 204008
  chr15:83379042-83379088
  hyper

SEQ ID NO: 291083 - DNA, 58 bp, Homo sapiens
  chr15:83620896-83620954
  hyper
caaacgtggagaacgacaaactgcttagactcacacaggccctggagttgactgcgcc

SEQ ID NO: 291084 - DNA, 333 bp, Homo sapiens
  chr15:83621407-83621740
  hyper
gccgctccattccgcggggctgcgcggctgccactgctgccactgccgccaccgccgccaggcgcgggcgggcgggggctgggcggccgcgctggggcggtgcccgccccgccctccccagccgctacccccgcccggctccttacgtaacctcgtggcccccgggccgcggcagcgagccaagaggcggggggcgcagcactgtgtgcaccgtcccccgcgcagccgcgcagtcgccgcttttctcccgggccacccagtcctcggtgccggccccgcgttggcgcgcccccgccccacgccgacccggggccctggcgcagtgccatcaac

SEQ ID NO: 291085 - DNA, 375 bp, Homo sapiens
  chr15:83654593-83654968
  hyper
gtctactcttcaccgcctgctctcacctcacgttccccacgaagactccgggagcaggcggccggaaggagcccttccctcccttctccggtgattcccagaacttccgtctctacccgtcacctgctcccaatcaaaggagcttaatagacggcgacgttttcgactgcccagccaccaggcaggctgaaagtgcatggagggcatcatccacctttagacagctacttgcccacacctcatcgagctctgggcgttgtgccagcatttgaagaagcgatctgttgcaaagcgatccacacggagagccttagttatcgcgagacttgacaggcaccctcaactttagcccgccggaagcggaagtcaggtggt

SEQ ID NO: 291086 - DNA, 134 bp, Homo sapiens; identical to SEQ ID NO: 224915
  chr15:83680651-83680785
  hyper

SEQ ID NO: 291087 - DNA, 126 bp, Homo sapiens; identical to SEQ ID NO: 204010
  chr15:83875522-83875648
  hyper

SEQ ID NO: 291088 - DNA, 79 bp, Homo sapiens
  chr15:83951702-83951781
  hyper
gaggcctggctgagaccaggcgtctgggccgctttaaatgccctggccttcagaggactgaggcgagcacagccataaa

SEQ ID NO: 291089 - DNA, 227 bp, Homo sapiens; identical to SEQ ID NO: 204012
  chr15:83952822-83953049
  hyper

SEQ ID NO: 291090 - DNA, 139 bp, Homo sapiens
  chr15:84034239-84034378
  hyper
ttctgcaggctaacgctgatcttccccagacgctaaatcataatcttcgtgtttttcgtatttcacattctagccacaatttcaacatcccatccccgtgacattagggaatgataaatcagcaggcgggacagttccc

SEQ ID NO: 291091 - DNA, 86 bp, Homo sapiens
  chr15:84034412-84034498
  hyper
caacgccctcgctcctgccagatgtcggcgcccgcggggttaaccctttccggcagcgcagccttcccctgcgtccggccgcttct

SEQ ID NO: 291092 - DNA, 96 bp, Homo sapiens; identical to SEQ ID NO: 204013
  chr15:84115617-84115713
  hyper

SEQ ID NO: 291093 - DNA, 139 bp, Homo sapiens; identical to SEQ ID NO: 204014
  chr15:84116949-84117088
  hyper

SEQ ID NO: 291094 - DNA, 60 bp, Homo sapiens
  chr15:84322262-84322322
  hyper
cgagccagcggttccgggcaaacctctgtgtggctgctgggcctgactttgcagagctgg

SEQ ID NO: 291095 - DNA, 195 bp, Homo sapiens; identical to SEQ ID NO: 126268
  chr15:84323434-84323629
  hyper

SEQ ID NO: 291096 - DNA, 577 bp, Homo sapiens
  chr15:85143661-85144238
  hyper
gcggcagaggaggcggggcagggcgttcctccaaacacaggaataccacgtgcgaaaacaaaggggtgtgcgaagaccgggtgcatgtgtacagctgcaaactgggggaaaggcgccaggcttgggcgatgaggatttgttcccccatggattcccttcctgcccagggtccgctctcgccggtcgagggtgcctaacaatactccttgccacaaggttcgcagccgaaaaggtccttcaagtccggccatccaactttcactttttatagacaaatatacagaggccttagataagtgaaacggcttgtctcgggttacagctctagccaacacagggtttctgacggtcagtctgcggattttcctgcctctggtccgcaggcactgcccaggctgtcagccccaaaccctactccggggaccgcggtcaggttcgtctccgggcggactacatctcccacaatgccttgggcccagcctccctcctgccgcccggctgggtgccgtctccaccaacagaaaggcagaatttccagggccgttctcggcagccaatgagcgcggcggtgggcggg

SEQ ID NO: 291097 - DNA, 90 bp, Homo sapiens; identical to SEQ ID NO: 238181
  chr15:85197334-85197424
  hyper

SEQ ID NO: 291098 - DNA, 148 bp, Homo sapiens; identical to SEQ ID NO: 204015
  chr15:85200368-85200516
  hyper

SEQ ID NO: 291099 - DNA, 123 bp, Homo sapiens
  chr15:85258869-85258992
  hyper
aacctcgtctctcccgaaaccacctggagtcgctccgactggagaaatcaagagtccgccgccttaaaatgactaaaacaataagcaaccccaactcccacttcaagcgcgtacggtttccat

SEQ ID NO: 291100 - DNA, 31 bp, Homo sapiens; identical to SEQ ID NO: 238182
  chr15:85524762-85524793
  hyper

SEQ ID NO: 291101 - DNA, 437 bp, Homo sapiens
  chr15:85525136-85525573
  hyper
caggaagggcatgttcggaggggcggcctcggcacgccacccgcctaagcgcccccttcccaccgcagccgccgccgccgcagcgcccgcaccgcgataaaaggggcggccgcgtttcctgacgcgagatccgcgctcgccgccgcccgcccaggcggcgatgacacggcgcccgcggcggcccggaggcgccgggtgggccgtttgctgaccggatcgcggctacccgccagcgtgtccgcggcgccgccgccagcatgggctgtgccccgagcatccacatttccgagcgcctggtggccgaggacgcgcctagccccgcggcaccgccgctgtcgtccggcgggccgcgcctcccgcagggccagaagacggccgccttgccccggacccgcggcgccggcctcttggagtcggagcttcgcgacggcagcggc

SEQ ID NO: 291102 - DNA, 56 bp, Homo sapiens; identical to SEQ ID NO: 126306
  chr15:85923617-85923673
  hyper

SEQ ID NO: 291103 - DNA, 98 bp, Homo sapiens; identical to SEQ ID NO: 238185
  chr15:86126184-86126282
  hyper

SEQ ID NO: 291104 - DNA, 130 bp, Homo sapiens
  chr15:88798434-88798564
  hyper
agggatctgtaggcgcccagatgcagatgagggtggcaaaggggtgtctcggaaatgcccaaaatggggctggagagggcgggctgcaggaggggaagggaagaggtaggcgtccatgacggcctccaca

SEQ ID NO: 291105 - DNA, 120 bp, Homo sapiens
  chr15:88801240-88801360
  hyper
gaagaaagggttaggggagtccgagcaggcagacacactacagcattcacacgcagaagaaagcagggttctccttcccgagcttggaggagggcaggcgaggaagcaaaatacattgaa

SEQ ID NO: 291106 - DNA, 68 bp, Homo sapiens; identical to SEQ ID NO: 238189
  chr15:89010447-89010515
  hyper

SEQ ID NO: 291107 - DNA, 265 bp, Homo sapiens; identical to SEQ ID NO: 238190
  chr15:89010954-89011219
  hyper

SEQ ID NO: 291108 - DNA, 62 bp, Homo sapiens
  chr15:89149448-89149510
  hyper
tctctcccccttcctttttcccttccttccttcctccccgcgctctctgtatgccttaatag

SEQ ID NO: 291109 - DNA, 162 bp, Homo sapiens; identical to SEQ ID NO: 238192
  chr15:89164363-89164525
  hyper

SEQ ID NO: 291110 - DNA, 99 bp, Homo sapiens
  chr15:89312884-89312983
  hyper
ctccccgcccggctggaagaggaacacagccctcccttgtccctcctcttgatatttccagtaaaagcacctcgaacacaatctcgctgccacaaccct

SEQ ID NO: 291111 - DNA, 493 bp, Homo sapiens
  chr15:89437837-89438330
  hyper
cgtcgagggagagaagccagggcccctctcaatcgctgccccctactccagggagcacaggcactcccgcgggtcagcgctggacaccaaggtcccaacaggtttacaggctgcctgtggcctgtggctgccaacgagctggtggcaggactgggtccaagtgccgtgctgtttccatactggctgcgcacaagcctacgtttctccctgagggtcgccatctcccacccagggctctgccctccaccctccctacccttctggcctcgctgtccctggggcaagaaccccggtgagcgaggtctggaacccataggcatcagttgcctttgccccaggcgcccagagccggccagctgcggtccagaggcgcaggtccgccagccgcctcgcaggttgccctcagcccctcccaggactcccggggcccccggagcatccaacagatacccaggggcagggcctggggcgccgcggacggcactggaggcag

SEQ ID NO: 291112 - DNA, 250 bp, Homo sapiens; identical to SEQ ID NO: 204020
  chr15:89438421-89438671
  hyper

SEQ ID NO: 291113 - DNA, 107 bp, Homo sapiens; identical to SEQ ID NO: 204021
  chr15:89438672-89438779
  hyper

SEQ ID NO: 291114 - DNA, 122 bp, Homo sapiens; identical to SEQ ID NO: 204022
  chr15:89438863-89438985
  hyper

SEQ ID NO: 291115 - DNA, 397 bp, Homo sapiens; identical to SEQ ID NO: 238197
  chr15:89787063-89787460
  hyper

SEQ ID NO: 291116 - DNA, 257 bp, Homo sapiens; identical to SEQ ID NO: 238198
  chr15:89877892-89878149
  hyper

SEQ ID NO: 291117 - DNA, 251 bp, Homo sapiens; identical to SEQ ID NO: 238199
  chr15:89878847-89879098
  hyper

SEQ ID NO: 291118 - DNA, 124 bp, Homo sapiens; identical to SEQ ID NO: 204023
  chr15:89902214-89902338
  hyper

SEQ ID NO: 291119 - DNA, 327 bp, Homo sapiens; identical to SEQ ID NO: 238201
  chr15:89902764-89903091
  hyper

SEQ ID NO: 291120 - DNA, 345 bp, Homo sapiens
  chr15:89905400-89905745
  hyper
ccattcttcccaaagcagctcggatccctaagtctggagctgccagcgaggcttccaacccgctgcttgccatcacctcccaggtcgttggtggctccgagtgagtctggcagcgcggggaggagaggggggacgaatggcgttgcgactcccagggaaaagctgggaggcaagcggggcgtggggaggaaaggccaaggcacacggctgggcgcccctcacagccttcctccgccgcctccattccgcactggtcggggtgaaggggggggcggggggagccgcgctgacgtcactgcgggccgtgcccgcccgagaaggcggcgctgggagccgctcagagcc

SEQ ID NO: 291121 - DNA, 234 bp, Homo sapiens
  chr15:89905890-89906124
  hyper
gtggcggagccgcggtccccacagccgccccacccgcgccgctgcctcgctggggcccgggcccccttcccggtccgtaagtgccactgcccgctgtgtctcggcgaggctggggagcgagggctagggagtgagggcggtggcttcggccagggcagcgtcagggagctgggctggactgagagagggggctggggcatccctgcccggcccccttgggcagctcaggcagct

SEQ ID NO: 291122 - DNA, 89 bp, Homo sapiens
  chr15:89913879-89913968
  hyper
ggccagaggccaacccatccgatttcggcctcctggtacgaatgcctgcccctactagagcaatgttcgaatcccctttggacacttaa

SEQ ID NO: 291123 - DNA, 148 bp, Homo sapiens
  chr15:89921791-89921939
  hyper
agctgggagtggcgcggctgcttcccgcccgcgcaggatcaggccggcccccgcgggcctggagctggatccagagctagggaaactggaaaaacaggcacaaactcggaagccgcggtacggcaagagcctaagcaaagaatccttt

SEQ ID NO: 291124 - DNA, 54 bp, Homo sapiens; identical to SEQ ID NO: 204026
  chr15:89942572-89942626
  hyper

SEQ ID NO: 291125 - DNA, 80 bp, Homo sapiens; identical to SEQ ID NO: 52488
  chr15:89943816-89943896
  hyper

SEQ ID NO: 291126 - DNA, 294 bp, Homo sapiens
  chr15:89949942-89950236
  hyper
atcataattattttatctataatttattctaaccccaaggttccaagaaaatctgtaatgaacgttaatatctacagcctcctggtcaatctgcatcgggcgagagagccgtcgggttcttcgcagtgggtgacttcaggtccctgtgccttgtttcctatcactctgaaagaattttctccccaaaggaaatccaacttgtttgaaacaggtttctcctctctgactttctgcactggagaaaaatctggatctgcttttcgaaaagattttttttttttaagaggcatccgg

SEQ ID NO: 291127 - DNA, 84 bp, Homo sapiens; identical to SEQ ID NO: 204028
  chr15:89956216-89956300
  hyper

SEQ ID NO: 291128 - DNA, 66 bp, Homo sapiens; identical to SEQ ID NO: 204029
  chr15:89959772-89959838
  hyper

SEQ ID NO: 291129 - DNA, 46 bp, Homo sapiens; identical to SEQ ID NO: 204030
  chr15:89962759-89962805
  hyper

SEQ ID NO: 291130 - DNA, 81 bp, Homo sapiens; identical to SEQ ID NO: 238217
  chr15:90016167-90016248
  hyper

SEQ ID NO: 291131 - DNA, 91 bp, Homo sapiens
  chr15:90198066-90198157
  hyper
cgttaattcaatcacccagcccctattgggctcccgaccctgggcacacagcggtaaactctgcctcgcaataccgtgtgggccttcgcgc

SEQ ID NO: 291132 - DNA, 49 bp, Homo sapiens
  chr15:90198414-90198463
  hyper
agcccccagatgtcgggaagacggcgccggccagtccaaggaagagctt

SEQ ID NO: 291133 - DNA, 37 bp, Homo sapiens; identical to SEQ ID NO: 238220
  chr15:90234210-90234247
  hyper

SEQ ID NO: 291134 - DNA, 322 bp, Homo sapiens
  chr15:90293566-90293888
  hyper
tcctctgcgtggcctttccctgccttcgcttcttggagccctgggcatactatggtggccaggtggccaggctgccggcggggagcagcagggtgcctggtcctcaccttggcgggcggtggggctgtgcgcgggggcacggacgaagggggcgcggggaaggggacactaaccggggacggtgggcttggctccatcgcctgcccttcagggcacgccgcctcggcgaacagcgcaggcgggtcgcgcggctcgggtgcagctcgggctccggggcaggcaggcggggatccccaggacgccccggcgcggacggcggata

SEQ ID NO: 291135 - DNA, 292 bp, Homo sapiens
  chr15:90319563-90319855
  hyper
gcctcccagagcctgcagcccggccatggcccagtcgcctcctccgcagagcctcctcggccacgaccactggatcttcgcccagggctggggctgggccggccactgggactccacgtccccggcctcctcctccgattcgtcgggttcgtgcccctgcgacggcgcccgcggactcccgcagccacagcctccgagctgcagctcccgagccgcagaggcagccgcgacgacgcccagacgagcgcgcaccggaccagcgggcggacagcggcagagcgccagcgagcgg

SEQ ID NO: 291136 - DNA, 140 bp, Homo sapiens
  chr15:90455670-90455810
  hyper
gtggggccggaggtcggcgtgaggcgaagcccagccttcggagacctgtctgggggtcgggaccctctctcgagggcaggcggacaggcggggagctttaagccgatctgtgtcatggggtcgctgggcgggcgcggcgg

SEQ ID NO: 291137 - DNA, 242 bp, Homo sapiens; identical to SEQ ID NO: 204031
  chr15:90455967-90456209
  hyper

SEQ ID NO: 291138 - DNA, 68 bp, Homo sapiens; identical to SEQ ID NO: 204032
  chr15:90628227-90628295
  hyper

SEQ ID NO: 291139 - DNA, 243 bp, Homo sapiens; identical to SEQ ID NO: 204033
  chr15:90631580-90631823
  hyper

SEQ ID NO: 291140 - DNA, 81 bp, Homo sapiens; identical to SEQ ID NO: 204034
  chr15:90634777-90634858
  hyper

SEQ ID NO: 291141 - DNA, 217 bp, Homo sapiens; identical to SEQ ID NO: 204035
  chr15:90792593-90792810
  hyper

SEQ ID NO: 291142 - DNA, 194 bp, Homo sapiens; identical to SEQ ID NO: 238225
  chr15:90808537-90808731
  hyper

SEQ ID NO: 291143 - DNA, 60 bp, Homo sapiens
  chr15:90891947-90892007
  hyper
aaagtttctatatgtcttcaccttctgtctcctcacggtgggagccgccctctctttccc

SEQ ID NO: 291144 - DNA, 137 bp, Homo sapiens; identical to SEQ ID NO: 238226
  chr15:90895267-90895404
  hyper

SEQ ID NO: 291145 - DNA, 33 bp, Homo sapiens; identical to SEQ ID NO: 238227
  chr15:91072783-91072816
  hyper

SEQ ID NO: 291146 - DNA, 179 bp, Homo sapiens; identical to SEQ ID NO: 238228
  chr15:91260439-91260618
  hyper

SEQ ID NO: 291147 - DNA, 72 bp, Homo sapiens; identical to SEQ ID NO: 204036
  chr15:91414358-91414430
  hyper

SEQ ID NO: 291148 - DNA, 121 bp, Homo sapiens
  chr15:91427348-91427469
  hyper
cccctcagtacccgcggacaccctgggcttccctgggcccagcatctgcctggggcctcgccctgggctccccctcctgacccccaccttgcgccccttcccggtgttcccggggcgctgc

SEQ ID NO: 291149 - DNA, 87 bp, Homo sapiens
  chr15:91427979-91428066
  hyper
gggtgtccctgtaaggggtggtgggtggaagggcctggggagggaggctccaggttggctcctgttcccgaacgtgcggaggagacc

SEQ ID NO: 291150 - DNA, 164 bp, Homo sapiens; identical to SEQ ID NO: 204037
  chr15:91475572-91475736
  hyper

SEQ ID NO: 291151 - DNA, 38 bp, Homo sapiens; identical to SEQ ID NO: 204038
  chr15:91643799-91643837
  hyper

SEQ ID NO: 291152 - DNA, 123 bp, Homo sapiens; identical to SEQ ID NO: 204039
  chr15:92459207-92459330
  hyper

SEQ ID NO: 291153 - DNA, 36 bp, Homo sapiens; identical to SEQ ID NO: 204040
  chr15:93198354-93198390
  hyper

SEQ ID NO: 291154 - DNA, 221 bp, Homo sapiens; identical to SEQ ID NO: 204041
  chr15:93199039-93199260
  hyper

SEQ ID NO: 291155 - DNA, 115 bp, Homo sapiens; identical to SEQ ID NO: 238235
  chr15:93352980-93353095
  hyper

SEQ ID NO: 291156 - DNA, 143 bp, Homo sapiens; identical to SEQ ID NO: 238236
  chr15:93353296-93353439
  hyper

SEQ ID NO: 291157 - DNA, 229 bp, Homo sapiens; identical to SEQ ID NO: 238237
  chr15:93363550-93363779
  hyper

SEQ ID NO: 291158 - DNA, 974 bp, Homo sapiens; identical to SEQ ID NO: 238238
  chr15:93443566-93444540
  hyper

SEQ ID NO: 291159 - DNA, 210 bp, Homo sapiens
  chr15:93615691-93615901
  hyper
cgggaactcggctgggacctcaggggcgaccctggctccacccctgggcacccggcaggtttgcaaactgctgggcgaggagctgaagaaagtgtccccagcaccgagggcgtgcctccccttctccccctcttcccgagcccctaggaggcacgttcccagccaccccctttctcggaaaaagggaagggagtgaggcaccccggcccc

SEQ ID NO: 291160 - DNA, 87 bp, Homo sapiens; identical to SEQ ID NO: 204043
  chr15:93616753-93616840
  hyper

SEQ ID NO: 291161 - DNA, 1065 bp, Homo sapiens
  chr15:94774274-94775339
  hyper
ctgtggatctgggcgggcatcttccacccacagtcgcgcacacgtggcataggttaataggctgtctggctcgggtacctcttcccagggtcagggcgttacaaagggaggctgctgtcttcccatgaatctattagggacctacaggagcgaagagaacccttctgagtatcagcgaagacagcttattaagactttacgagtttgcaagccatcctcgtcctatttcctcacttcggactttttggacacaccttccttttcctgtgagccaacccaaacgaatgagttacaagtaatcgccttctctacgcccagccagtgcccagcaccaagcatagcgcctccttgcaacacccggccgagctcccggcggcagcgcgggcgcttgggtcggaggctgctcaaaggtgacgcgcggccgcctcctcccctttaggcggggctcgcaagggcggtgggggggcccgaggaagtccgggggccctcggtgatgcccccgcccccgccgcgtcagggttgctccctgcgcttccgagtggcgactgcagcgggtccggtgcaggtgaggggcgcgcgcctgcccagctttgcagcccccgaacgcggcctcgcacaggtgagggcggtgccgggttcacctggcagcgcgcgtgggccgggcagcacggtcgccgcctgggggtgggcgtcttctctcaaccgaagctgggagttggggagctggagggtccaggatgagaattcagtggcgctactaccccggagctgcttgtggttcagagatcagaaaggtgtcctgaggactggaggcagaaatccaggcgtggcgtactggaaggcgcactaggggagggcagcctggcccagaatttctttgcattttaaaggccacacattcagtctccccggggcgctacggaggtagtcaccgccacatccaggactccttccacagaggtcagttcctcagctgggtgggctttaatacgctctcttcgtagagacccggaggttcaactttaattctttgcgctgacatttgctcaacgacaccggagcaga

SEQ ID NO: 291162 - DNA, 102 bp, Homo sapiens
  chr15:95388253-95388355
  hyper
gcgggcccagggccgccagtcccccgtcccccggtcgcccgccgccccctggccaggccccgccgccgccgcccgctgcttcctcccgctcttcctccctgc

SEQ ID NO: 291163 - DNA, 236 bp, Homo sapiens; identical to SEQ ID NO: 204044
  chr15:96596585-96596821
  hyper

SEQ ID NO: 291164 - DNA, 349 bp, Homo sapiens
  chr15:96864605-96864954
  hyper
ccttttcttaccttttgcccctcctttcccctcccgaaatttgcgcctacttgattatttgcagctgtttcgaacctcaaggtttgttcacagtagcgagagagacttgcgcttggagaagtgaaaagccattttcgcgccagggcttcgctgcttgagtttgggggttttgctctccctcccagcaaactcccctcaaagccttgctaacttcgtcaagccctgccagcctttactccttggccacttgggttcgcagtacccagccaagggccccgggcgggtttccatcgctgggggtggcctggtacccccaaagctgagttcccgcctaggagaggacgctgac

SEQ ID NO: 291165 - DNA, 468 bp, Homo sapiens
  chr15:96865222-96865690
  hyper
tcgcggctgggaggagtacccgaaatgccagcaggagaaatgcaacctgtttaggccacaccttcaatccccgaggctgtctggagagactgcgtgcgggggacttgccggcgttcccacaccgcgcctgcaatccactcccgcggctgcctggcctctgccactcgcggcttgaagccagtggctctcaagccctcggccccgcggcggcccgcgcagccttcacccggcgccggcaccacgaagcctggccgcagtggactccccgcagctcgctgcgccctggcgtctcccgtcgaggagggagggacggaggcctgagccgggagctccctggcggtggtcgggccgccccccttgaggcctgctcccccctctcggcctcgccaaatccctgaaagcccagtcccccttcgtcaccccgggggcttctaatcactcggtatcgatttccctaactcttttcat

SEQ ID NO: 291166 - DNA, 837 bp, Homo sapiens
  chr15:96873421-96874258
  hyper
gggtggtgcgcgagcggcggaattcgtgacatcgccaagttgcgagaggcaaactccccgattccatccaaagcctctcgcggagcctttaagagacgttgtgtgtgcgcgctgcgctagtctccccgccggggcggaaacctcgggtgcgggatgtggggagagcagaggcagcgctcgcagggccagcacgggcccatccccctctcggcggcggcggcggcggcggcgcggccaccccgtccccgcccccccaacccccggtcccccgcgtgccccgcgccgcgccggcgacgccgctcgcgctaggaccgggctgcgcccgcggccgccatggcggggccgccgcagtccggccaatgacggcgagggggcggcgcgcgcgcgcctggccaggccaaccccggctgctgccttataaggcgcgccgtcgccatggcaacgtgcgctaagttgcagcagtcgtgtcaaagttcactatatagagagctcagtgagctgatcgcggagaagccacttctgccagccccggcgcctataaatcgcattccctcccgcgcccccctttttagcatatttgatcactttgattctctgttcttttctctccgcggtgtgtgtgtgcgtgcgcgcgtgtgtgttttcttcttctcctcctcctctccccgagttgcctcctttctccgggtgccgtactgccttttttcccctctttcattctttctctccgtctttttctcccccctctgcgcacgaaggatgtgcttctaggtggtgatctgccctcctctctctcttttatcatttctcccccgccgccggcgagttgactctttc

SEQ ID NO: 291167 - DNA, 160 bp, Homo sapiens
  chr15:96874514-96874674
  hyper
gcggcggcggcggcccagcgccaggacgacgccgcgcagcgcccgacgcggaccactttcatgctgattcccccggacccgggcagcgctccggccactccgcgggccgccggcctccgccccggcctgcctggctccctgggcgcgcccgcacccggcg

SEQ ID NO: 291168 - DNA, 634 bp, Homo sapiens; identical to SEQ ID NO: 238246
  chr15:96875062-96875696
  hyper

SEQ ID NO: 291169 - DNA, 89 bp, Homo sapiens
  chr15:96876448-96876537
  hyper
aattcgccgagcgccgcgagccgtgctttgccaatggcgcgctcggcgcggggcgcgggctccgggttggggcgagccaacgccggggt

SEQ ID NO: 291170 - DNA, 199 bp, Homo sapiens; identical to SEQ ID NO: 204047
  chr15:96876621-96876820
  hyper

SEQ ID NO: 291171 - DNA, 597 bp, Homo sapiens
  chr15:96883828-96884425
  hyper
agctgctaaacatggcgactctttccctttaagtgtctctttttccttgctgggtttttttttttttttttttttcatctgatctgagctcgctttatttcttttcccaaccccgctccccctcctcctcgtggcgctcgggggtgtgagagaacccagttagacgcgaaatgcaacaatagtgcaaggagagagaggggcgctcgctgcttctcgccactttcaaacaaacctgggggaagattgagcccgggggggattccagcctgctcgctcggctcgcggtcgccctgcctcggcctttcaccattagctctccctgggccgcgaggagctggggctcaaagttagcgggcgacgtccgaggcttagcctctagccggctgcagggacgggggcctggagttggcagctgctacgggaaagtgcctgccccccagcccccgcccccacttacgtgcggcagaattccgccagcgccccgggaaagtccggggtgccgggcgcgcggagctgcactcctgggatgtgcattaagcggcgacaggcggggggggcgagggcgggggcggggggcggtcagggggagctcgagcg

SEQ ID NO: 291172 - DNA, 164 bp, Homo sapiens; identical to SEQ ID NO: 204049
  chr15:96884499-96884663
  hyper

SEQ ID NO: 291173 - DNA, 248 bp, Homo sapiens; identical to SEQ ID NO: 204050
  chr15:96897605-96897853
  hyper

SEQ ID NO: 291174 - DNA, 754 bp, Homo sapiens; identical to SEQ ID NO: 238250
  chr15:96899904-96900658
  hyper

SEQ ID NO: 291175 - DNA, 133 bp, Homo sapiens; identical to SEQ ID NO: 204051
  chr15:96903477-96903610
  hyper

SEQ ID NO: 291176 - DNA, 154 bp, Homo sapiens
  chr15:96911212-96911366
  hyper
aggggacagcaatgcgtttcaaaaaaaagttgcgttcctggccagcagttgcctaagctcctcctggagtcactggttgcctgctagatagagctgccccaaggggatggggacacagggctggttgggtcctcgggtggggctcgaggaacct

SEQ ID NO: 291177 - DNA, 517 bp, Homo sapiens
  chr15:96952092-96952609
  hyper
caggaggaggccaagccagacgtccagctcaggggcacttggccatgctgaggactgcgcacctgggccacgtggtccgtgggacaccctggagctcgggatccctttgcaagggttggggagagataatgaaacccgcatttgcgcgctccccaacccgggccatctgattagtcatctgagttagcccttcacgtgcacacgtgggacagaaaaactccaacagatcttcatgtttcagttccaggtttatgaaaataataataggatgggtttggctaattaggaaaatggtttgaaccagttacatcaccagcccagtgaaaagccgccgggatgccggctgacgtgaccttggtatcagtcttctatttcacttatcccttgtgttgctctcggtcaggcccccctccaattaaaaaagaagaagaagaaaaaggacaagtgcaaataggcgcctctcgttttgaggaacgcgcctgagcagcacgtgtgtacgcagccccagaggcccaga

SEQ ID NO: 291178 - DNA, 173 bp, Homo sapiens
  chr15:96959376-96959549
  hyper
gcctttcctcttgtcgctctcgctttattacattagcgcgggcttccccgcgccggcgtgggctcagaagccgaggcgccgggtcacccatgacaaatgtccccgtgtctcgccaacaggccccgcctggccctgccactccatctgcccaacaggaccccggagagtgcttg

SEQ ID NO: 291179 - DNA, 187 bp, Homo sapiens
  chr15:96960189-96960376
  hyper
cgtcaacacctcgagctgccccggcgagttatttcaacagactgggagagagccgtactatttgagtggcaggcgacgcctttccccactctcggtatttatgttgcaccgacggcacttaggagagcttagttttagatgcggcattaatcttcacttgttaagagatagtctgtcagcctttacc

SEQ ID NO: 291180 - DNA, 99 bp, Homo sapiens
  chr15:96960409-96960508
  hyper
cccagcgcgcggccacccccaagctggtcctcgcaaaggcgcgcggagccgcactgccgaggagaggagcccggggttaaactggggcaaggcgagcga

SEQ ID NO: 291181 - DNA, 303 bp, Homo sapiens; identical to SEQ ID NO: 204052
  chr15:96960826-96961129
  hyper

SEQ ID NO: 291182 - DNA, 119 bp, Homo sapiens; identical to SEQ ID NO: 204053
  chr15:97491101-97491220
  hyper

SEQ ID NO: 291183 - DNA, 204 bp, Homo sapiens; identical to SEQ ID NO: 126457
  chr15:97491238-97491442
  hyper

SEQ ID NO: 291184 - DNA, 200 bp, Homo sapiens
  chr15:98503355-98503555
  hyper
cattcattaaagtcccgatgcggccggcccccaagatctcaaaaggaaatattgccgagttccgtttcccagagcatctatttcccctcgagtattgcagatgtaatcataaacacaagccagttacagccacaacttcatgctttagcgagaacccagtggctcctgcaaagtccttacgctgctagaaaccccgcccc

SEQ ID NO: 291185 - DNA, 268 bp, Homo sapiens
  chr15:98503609-98503877
  hyper
cgccccctccctgacagatactgtttcccactgtctgtccacatgggcgcaccgcctcactattggccagggctccaggactgtgcctggcctcagccagtaaacggcctgtgcacgtgcacgccggagcctcccgattggccaacactccctgatcacgcacggccttcctgcgcccacccacgcgtgggagcgccaatgaaatgactcagtgaccatctacaacaaatcagcaagaagcagggctcgcagctgaccaatggccgcc

SEQ ID NO: 291186 - DNA, 168 bp, Homo sapiens
  chr15:98503946-98504114
  hyper
cgagccggtgccccatcgggtaccgcacggctgccgcggcggccttaccctgccgcgagcgcctgtgacagcggcgccgctgtgctcgcgaccccggctccgggcctctgccgacctcaggggcaggaaagagtcgcccggcgggatgggcggggaggctgggtgcgc

SEQ ID NO: 291187 - DNA, 560 bp, Homo sapiens
  chr15:98504228-98504788
  hyper
gtccgagccggtggccctgcgcgcgctgcgcctggaggcccaggggcgcgccaccgccgcctggggcccgagcacctgcccccgcgcctcggccagcaccgcggccctggctgtcttctcggaggtggagtacctgaacgtgcgcctcagcctgcgggagcccccggccggtaagcgcaggcgagcgcctggggttcccccgccaggctgcggggccggggaggggctgggaggccgcgcaccctcgggatgcccacctggcaggtgagatcagggcgggcttccgggggtggggtccggcctaccctcgcgggtaaggagagaccgcaagtcctgggtgcgcagctcttcctggcgccccgcccctggcccgccgggcctgaccgggaccagtggctcgggattttctaggaccgcgacgggagggggccattgggtgcggtgggaacctgtgattggacaatgggggatccagaaatctaggtcctgttccttctggtccaagaaagggacggtggaaccggcggctatgaggttccattctgcggtgcccgtgtcct

SEQ ID NO: 291188 - DNA, 34 bp, Homo sapiens
  chr15:98836393-98836427
  hyper
cctcggtggtaataagcctcgcacagaacacagc

SEQ ID NO: 291189 - DNA, 276 bp, Homo sapiens
  chr15:98971414-98971690
  hyper
agaagaagaaaagacacgcgagcccctttgaagaataaatctcagctgtgttatctgtcttgtcacagcactgaaacgtggggatggggagaacgtagttccacgttggcacagatgagctgtttacatcgaggcggacgagcaggcaggagcgtgcagtccgtgcggctctgtttctttcccctgttaagcgcagagtttctagctgcagctaaagacgcccacccaggccgagcgcccttggattctgtgggagggcggccccgcgtccaccgc

SEQ ID NO: 291190 - DNA, 338 bp, Homo sapiens
  chr15:99090780-99091118
  hyper
ggtatagccaatagcgtcatattcagccctgtttaattcccactgtcttgggtctagaatttaggcttttgagaaatctttattgaattaatgaaaactcaaagaccacgattctgcattcccccaaatcctgaagtgcagtaggagcccatgcagggcttgggacgggctttttgcctcagcagccaggacagcctctgcatccgtgaccacctccccgcccccctcgcattcccccccatcccctggtgatatccttctagcgcaggctcgtgctctggaggcggggtggggccgggattctgcagctgtaaccaactcccccgctgggggcatgg

SEQ ID NO: 291191 - DNA, 236 bp, Homo sapiens; identical to SEQ ID NO: 204059
  chr15:99091372-99091608
  hyper

SEQ ID NO: 291192 - DNA, 425 bp, Homo sapiens
  chr15:99091663-99092088
  hyper
ggcaggcgttacataaacccggcgagctcacaccgtgcggcggggagcagcgcgaacgctcgacccggacacctcccttccaggtcccgttccgtaggcggggccgctcccgaggcacaaggaggcctgcgcggcgcccgaggtgtccggatcccaaaacaggaccccaggagtttctcacactcaggactggcccctagttgtcaatccagaaaaggcatcctccgtcctagatccagcctgtatttcacggaaagcgtttcctcccccatccccaaagccggcaggggtggggcggagaggggaggcccggggagactgactctattatataaacttgtaattggctccggttcctgcggctcgggcggcactgcaggacgtttccaaccagatgggttgtgaggccccgcggcttcctcctc

SEQ ID NO: 291193 - DNA, 510 bp, Homo sapiens
  chr15:99191216-99191726
  hyper
aatgccgcatgcacgcatttatttattttgcaacagctgcaagaaacaatgaagcttttcaagaaccggggaaacgcgctttccagccgcgctgttgttgttttcaatgaacctctcccagccccgcactccccgcccacccctcccctctcctgcccacccctcccctgcctagcctttccctggctacccacccctgccccgccgagaccggaccggcggcgggggcattgtttttggagtcgggcgggaggggagggcgcgtgcggggtggccggcgcagtgcggtgggggcgggagcgggtgggcacgcgcgcgtgtctctgtgtgcgcgcgggaggcggtggggcgggagatgggggcggcgcctcgcagtctcgcgccccacgcccgggctccgctccgcacgtcttggggaaccgggctccggttttttgcgcgcgccggcctgggccgggccctcggcgcgccgctgctgcggcggtggccgctcgagtgtgcgagcgggcg

SEQ ID NO: 291194 - DNA, 210 bp, Homo sapiens; identical to SEQ ID NO: 126471
  chr15:99191748-99191958
  hyper

SEQ ID NO: 291195 - DNA, 582 bp, Homo sapiens
  chr15:99192162-99192744
  hyper
cgcggccggcccgccgctttgtgtgtgtcctggatttgggaaggagctcgccgcggcggcggcggcgctgagggaggaggcggcggcgagcggagccaggaggaggaggaggagggggagccgctcattcattttgactccgcgtttctgcccctcgccggcctcgcctgtgacccggacttcggggcgatcttgcgaactgcgtcgcgccctcccgcggcggaagctcgggcgtccggccgcctcccgcgcggccagggccgggcttgtttttcctcgcctaggcagatttgggctttgccccctttctttgcagttttccccccttcctgcctctccgggtttgaaaatggaggccgacgacgccgacagcccgccccggcgcgcctcgggttcccgactccgccgagccctgggccgctgctgccggcgctgaggggccgccccgcgccgcccgccccgtccgcgcacccggagggccccggcggcgccgccttcggagtattgtttccttcgcccttgtttttggagggggagcgaagactgagtttgagacttgtttcctttcatttcctttttttc

SEQ ID NO: 291196 - DNA, 110 bp, Homo sapiens; identical to SEQ ID NO: 204064
  chr15:99192792-99192902
  hyper

SEQ ID NO: 291197 - DNA, 265 bp, Homo sapiens; identical to SEQ ID NO: 204065
  chr15:99192941-99193206
  hyper

SEQ ID NO: 291198 - DNA, 247 bp, Homo sapiens; identical to SEQ ID NO: 204066
  chr15:99193667-99193914
  hyper

SEQ ID NO: 291199 - DNA, 375 bp, Homo sapiens
  chr15:99194186-99194561
  hyper
ttttattcttctgaaaaagttgaaagtgtggcttactggtacattcaagatggtagggtaatttgaacacgattaaaagtttaaatgtcgcagaactgggactgggaacggtgagggcgtgttggtgagtaatggttgccgagggtatgcaggtggtgccgattaactttgaaaaaatcacgactgagccttcacgagtgaggcggggaaggaggaggcagcggaggttgtatggccccatcaccggggcaattcagaaaggctgtttctataaacaaatccttaaacgtctggtaagaaatgagtccgcgacggaacgagagcagatcgtggttcgcgtgtttactgccgagtgggacgcggactggggccgga

SEQ ID NO: 291200 - DNA, 52 bp, Homo sapiens; identical to SEQ ID NO: 238266
  chr15:99791471-99791523
  hyper

SEQ ID NO: 291201 - DNA, 60 bp, Homo sapiens
  chr15:100273844-100273904
  hyper
taccaggtctacccgcgcgggccctggcttgttttcgcgtctgttcggagtaataaggca

SEQ ID NO: 291202 - DNA, 51 bp, Homo sapiens; identical to SEQ ID NO: 204069
  chr15:100273946-100273997
  hyper

SEQ ID NO: 291203 - DNA, 97 bp, Homo sapiens; identical to SEQ ID NO: 204070
  chr15:100881161-100881258
  hyper

SEQ ID NO: 291204 - DNA, 474 bp, Homo sapiens; identical to SEQ ID NO: 204071
  chr15:100882092-100882566
  hyper

SEQ ID NO: 291205 - DNA, 561 bp, Homo sapiens; identical to SEQ ID NO: 238269
  chr15:100889932-100890493
  hyper

SEQ ID NO: 291206 - DNA, 246 bp, Homo sapiens; identical to SEQ ID NO: 238271
  chr15:101142345-101142591
  hyper

SEQ ID NO: 291207 - DNA, 270 bp, Homo sapiens; identical to SEQ ID NO: 238273
  chr15:101419539-101419809
  hyper

SEQ ID NO: 291208 - DNA, 309 bp, Homo sapiens
  chr15:101420039-101420348
  hyper
ggctgcgcagtgtccgggccgagccggtgcgccgcagactagggcgcctcgggccagggagcgcggaggagccatggccaccgctaacggggccgtggaaaacgggcagccggacaggaagccgccggccctgccgcgccccatccgcaacctggaggtcaagttcaccaaggtgaggcgggcgcccctcccacccgacggccgcgggcccctgcgctgggcagccagactcggggcggcgggggcgagggagcagcgggccgggggtccgccgggcgccgccgagacccgagcctccctgcccgggcg

SEQ ID NO: 291209 - DNA, 67 bp, Homo sapiens
  chr15:101421003-101421070
  hyper
taaaagaagatggtgaggcctccgaggcctctgagctggggctgaggagggccgagagacccgggtc

SEQ ID NO: 291210 - DNA, 524 bp, Homo sapiens
  chr15:101458274-101458798
  hyper
atcttcacctgccgcgtcccctccagcgtctgcccgggccctgggcctgcgctccctcgcggtggcgccaggtggcggggctgcgcgccctggaggagctgcaccgccgtcgcggggctctctcagcactgaggacaccacgccctgcaaattgttgggaacttgtcggtggcaatcacactgctggctcctgcaaactggtgtgaggccctcaggggtgagaacaggattgcagaactgcgctcacccttttggaaagtcgtccagtggcagaagtagcctcccaggagcagagcgaagctgctcggtggtcccctctccaaccagggacccaagaagccgctcaagggaacacggccccgcggcgtccgggaggtcctgcaggagccctgcggctgccccggttctgtgaaatggcagtgagggtgggggagatgtgcgctaaatcctgggaacgtgcgagtcataactttccaggagaggggcccagggcgctggtcctgcagggcgtggaaccctctgct

SEQ ID NO: 291211 - DNA, 693 bp, Homo sapiens
  chr15:101459313-101460006
  hyper
gtgcccgaacctgaaggaggacccggtgccggaagggcccgcggaccccggcgtctcccggggcatcgagcgccatcgcccgcgttttacggccagggaaactgaggcggccgccgaggggacgcctcgcgacggttcctgggagagctggcggcggccttgctctgcgcgctcttcgcgccgccctccccgcccgcccgcctcaggattgaggaagtgcgtctgggcccggccccggcgcggggggcagacggcggtgggacggccaggccccggccccgccagtgtgtccgcccggccccgcgtcccggagcgcccgcacccggccccgccgccgcctcaggtaagcgccgctcctgccggcgccccccggcggcctggctgcctcccggccccgcccggggaacccagagcccgcgcccggcgcccgcggggagcctcggcctctgcctgcccgcgggcccctgcgctccgggcggccgcgtggtcgggcacggggggccgttgcgcaggggccgcggcccgaggggcgcggagggcgtgtggggcgaccccggtctcacgtccccgctgcctcccgccgcgcccggagcccagccagcctgtgggaggggagcgcgcggggcccgagcagggaaccccgaaaccccgtccgggcagggtcgggaaagctgggaagcggaggcaagagac

SEQ ID NO: 291212 - DNA, 64 bp, Homo sapiens
  chr15:101460335-101460399
  hyper
ggaaggccggggtcagcgaggagacgctggtggagaatctgagaacccccgtggccatctcaac

SEQ ID NO: 291213 - DNA, 143 bp, Homo sapiens
  chr15:101513869-101514012
  hyper
ggggccacccctctctcttcctgaagcccccgcgatcgtgcaacgggccgcgccgcctcctgctgtgttccacggtgattctcaagagcacgcgggcagtgggcggtgacgccgtgtgtgtgtgcttcctcccgcgcaggtgc

SEQ ID NO: 291214 - DNA, 154 bp, Homo sapiens; identical to SEQ ID NO: 224959
  chr15:101791012-101791166
  hyper

SEQ ID NO: 291215 - DNA, 338 bp, Homo sapiens
  chr15:101835610-101835948
  hyper
ctagggtgtgtttcggagtctggaggacccctgattccagacgttggtgtttaaaagttaaggcgaatgtggaaacacccgaggggaactttctcatgcattagcgcacctcgaggtgggaggggaagcggtgactgtcctccctccaccagccgtcgcgggaacccgtggggttcagtgaagggtccagcagttcaggtgcccgccccgggcctgggccttggctccgggctacagtgtgagatcccgggctaggtggcccgcctggggcaggtcgccgggacaaccccaccgccccgcaagtccagcccggcctcgggcacggtagggtttgcggt

SEQ ID NO: 291216 - DNA, 64 bp, Homo sapiens
  chr15:102028777-102028841
  hyper
ttccgacaacccagcggtgtagacattgccactgactgcaaaggagcttgtcaggggagcgact

SEQ ID NO: 291217 - DNA, 502 bp, Homo sapiens
  chr15:102028992-102029494
  hyper
aggctcccggccatctacccccgggagccgcggacaccgagggagcgcgagtccccgagacgccgggccacgctcatgtcacccaagcagcggccgcggccgccttggcgcgcgcaccgggtccggagctcgcgccgcccgtcgagggcagaggggccgctcccccgcgggggagagccgggtgggcgcccaggacccagcggcggacggcgcgcgacgcctgaggcagcccagactcccccggagcccggcaggtgtccgcgccgccccggcttctgaggccacacttccgagcgcggggttgggcggcactgccgggggacttgcggtcggcgcgccggacctgcgtgggcgcccacgcgggaccccagtcccccccaccccgccgagtgtcccgcgcgcgcccccccgggcgacacccccccccgcagggcgccccggccgcccgccgtccccaagcggtcccggagccttcccacgcgcgcgcggggccggggccggg

SEQ ID NO: 291218 - DNA, 139 bp, Homo sapiens; identical to SEQ ID NO: 126507
  chr15:102030030-102030169
  hyper

SEQ ID NO: 291219 - DNA, 66 bp, Homo sapiens; identical to SEQ ID NO: 204073
  chr16:103517-103583
  hyper

SEQ ID NO: 291220 - DNA, 46 bp, Homo sapiens; identical to SEQ ID NO: 238282
  chr16:122248-122294
  hyper

SEQ ID NO: 291221 - DNA, 365 bp, Homo sapiens
  chr16:204521-204886
  hyper
tgttgtccgtgggcggcgggcgcttggggaggcggagcgggaggagggcgccccggctgtctcggggccactgctgggccgcagggatccttgcaccgaccccagggtctctaagaggcagagggatgtgcagctcccggggcgggagcgggggtcactcgggacccaggcgtggtggagaaggggtgcagttaggcctttgcggaggggggagcagtgctggcgcccacccgccgcggctctccctgggacctccgtggtcttccttctttatttctcccgaatgtgtactatttcctgatttcagaacgatcaggacgaagaggggagggatgggcgtctgcgctcactcattccttcttcca

SEQ ID NO: 291222 - DNA, 356 bp, Homo sapiens
  chr16:231052-231408
  hyper
gctggacaagttcctgagccacgttatctcggcgctggtttccgagtaccgctgaactgtgggtgggtggccgcgggatccccaggcgaccttccccgtgtttgagtaaagcctctcccaggagcagccttcttgccgtgctctctcgaggtcaggacgcgagaggaaggcgccgcccctccccaaggaaaggcgagggcctggggcacacccccagtgcccagatccaggcgcgcctctttccacctccagcaggtttggggcctcggccatgggggcaccgaactgcgtgcagcctgaccctcccgaatggggtggtaggtgagggccgcgggacgccccgggcggcgggctgc

SEQ ID NO: 291223 - DNA, 387 bp, Homo sapiens
  chr16:325111-325498
  hyper
gccgcggaagcgggcgagggcgggacgagccgggcctcctctcccctatgtgctccccacccttgcacagcgcgctcagcagggctctgagaactgccagactccaggaaaacccaggcctaggccaccagcccagtgaccccagggcccagtgggaggcagggcgctcaccctcctccgagacgcagaacttctgggccaaccactgcacgacgtcgctgcctgcacgggagagacagaggtggagggaggccgaggcgcgcacgcacccccgccccggcgcgcctcacctgtcaccgcgtggggaatgacggtgaccagcaggcgctggctccgcatcttcacgccctggtcggggtcctgcatgctcacgaccacccgctccat

SEQ ID NO: 291224 - DNA, 53 bp, Homo sapiens
  chr16:325546-325599
  hyper
attccctggcaccggccgggatgccccggatccgggagcgcggagattaacgc

SEQ ID NO: 291225 - DNA, 212 bp, Homo sapiens; identical to SEQ ID NO: 224967
  chr16:325890-326102
  hyper

SEQ ID NO: 291226 - DNA, 84 bp, Homo sapiens
  chr16:347192-347276
  hyper
ggcatttcttttgcacgccacgcccaccttcccactgcaagggcaagagctgcgagtcgccctggcctccggtggccgaggctg

SEQ ID NO: 291227 - DNA, 261 bp, Homo sapiens; identical to SEQ ID NO: 52626
  chr16:374858-375119
  hyper

SEQ ID NO: 291228 - DNA, 83 bp, Homo sapiens; identical to SEQ ID NO: 204074
  chr16:475426-475509
  hyper

SEQ ID NO: 291229 - DNA, 103 bp, Homo sapiens
  chr16:565623-565726
  hyper
gcatctcggagcagccacacgggcgacacacaccggtgtttgcatctcggagcagccacacgggcgacacgcaccggtgtttgcatctcggagcagccacacg

SEQ ID NO: 291230 - DNA, 251 bp, Homo sapiens
  chr16:577428-577679
  hyper
cggctgcaggccccgcccctccgtgcccctcgcaaggccctctgggagttgtagttccagctcctcctcgggccgccccactccctgataatcctggagcgcggcgcctcccggggaccgaggcctcgggcccggccgtctccagcagcgagggcaggagaagtggcccgggcggtcggcggactgggagggcgccacccgaggactacaactcccggcctgcctcgcgcaggcaccgccccgagcttccg

SEQ ID NO: 291231 - DNA, 37 bp, Homo sapiens; identical to SEQ ID NO: 204076
  chr16:619792-619829
  hyper

SEQ ID NO: 291232 - DNA, 294 bp, Homo sapiens; identical to SEQ ID NO: 238293
  chr16:698981-699275
  hyper

SEQ ID NO: 291233 - DNA, 50 bp, Homo sapiens; identical to SEQ ID NO: 204077
  chr16:717960-718010
  hyper

SEQ ID NO: 291234 - DNA, 76 bp, Homo sapiens
  chr16:745046-745122
  hyper
ctgaggccagtgtccgtgatgcgtacacacctgtggttgcaccagaggggacccccaccttcaaatcacctggccc

SEQ ID NO: 291235 - DNA, 97 bp, Homo sapiens
  chr16:745316-745413
  hyper
ggaagcccccgcccccggccccgtgcagccccgccccgccccgccccgtgcagccccgcccggcccagccccgcccggcgcggcccgggggcgcgca

SEQ ID NO: 291236 - DNA, 104 bp, Homo sapiens; identical to SEQ ID NO: 204078
  chr16:755704-755808
  hyper

SEQ ID NO: 291237 - DNA, 111 bp, Homo sapiens; identical to SEQ ID NO: 204079
  chr16:765207-765318
  hyper

SEQ ID NO: 291238 - DNA, 62 bp, Homo sapiens; identical to SEQ ID NO: 224976
  chr16:765586-765648
  hyper

SEQ ID NO: 291239 - DNA, 255 bp, Homo sapiens
  chr16:778111-778366
  hyper
gcagggaccacgcgcggggaaacccggagctggcgcggcttcgtcccgggctggcggtgctgggcgcggacgagcgcatcttctcgctgacgcgcaggctggcgcacggcgaggagctgcgggtgagcgcgcgctcccgggaggggcggggagggcgccccgggtccacccgccctcacaggtccgcctgctcctccgccgcagttcggggccatccacgtgcgttgcctcctgacgcccggccacaccgccggc

SEQ ID NO: 291240 - DNA, 121 bp, Homo sapiens; identical to SEQ ID NO: 224978
  chr16:778761-778882
  hyper

SEQ ID NO: 291241 - DNA, 177 bp, Homo sapiens
  chr16:1035474-1035651
  hyper
tggctgagctccaagtgcctgctgaagtctgcagggaaacacgcttgctgcccgtggccctcggcctccagatggccacacctctgccgacgacggaccagctccctctcccttctatctttctttttgaggtggtgggattattccacaaagaagggctgccgtttggtccctctt

SEQ ID NO: 291242 - DNA, 226 bp, Homo sapiens; identical to SEQ ID NO: 238302
  chr16:1359098-1359324
  hyper

SEQ ID NO: 291243 - DNA, 48 bp, Homo sapiens
  chr16:1383142-1383190
  hyper
caccagagccccagggacgatcgccccacagaccgtccgcgtgggcgt

SEQ ID NO: 291244 - DNA, 144 bp, Homo sapiens
  chr16:1384098-1384242
  hyper
cgcgcctccctccccgggggagcagacgggcccggggcctcccagcacccctcccgggcgggctgcaccccccagcgtcctcgtcccttccctcctcccgcaggtcctcgtaaggccctttagtccccccgaaatccctgcgag

SEQ ID NO: 291245 - DNA, 42 bp, Homo sapiens; identical to SEQ ID NO: 238305
  chr16:1402306-1402348
  hyper

SEQ ID NO: 291246 - DNA, 243 bp, Homo sapiens; identical to SEQ ID NO: 204080
  chr16:1429037-1429280
  hyper

SEQ ID NO: 291247 - DNA, 434 bp, Homo sapiens; identical to SEQ ID NO: 224987
  chr16:1660449-1660883
  hyper

SEQ ID NO: 291248 - DNA, 426 bp, Homo sapiens; identical to SEQ ID NO: 238306
  chr16:1661890-1662316
  hyper

SEQ ID NO: 291249 - DNA, 121 bp, Homo sapiens; identical to SEQ ID NO: 204082
  chr16:1663980-1664101
  hyper

SEQ ID NO: 291250 - DNA, 700 bp, Homo sapiens; identical to SEQ ID NO: 224988
  chr16:1664481-1665181
  hyper

SEQ ID NO: 291251 - DNA, 188 bp, Homo sapiens; identical to SEQ ID NO: 238308
  chr16:1832740-1832928
  hyper

SEQ ID NO: 291252 - DNA, 65 bp, Homo sapiens; identical to SEQ ID NO: 204083
  chr16:1875917-1875982
  hyper

SEQ ID NO: 291253 - DNA, 153 bp, Homo sapiens
  chr16:1877136-1877289
  hyper
ctgcgggggacagcgttccgaggcagttggtcctctccgggatgccgtaggcatcagctgaccggcccagcccacgtgactacaggggcacttgatgggaatcatggcagcatccaggccattgtcccgcttctgggagtggggaaagaacat

SEQ ID NO: 291254 - DNA, 112 bp, Homo sapiens; identical to SEQ ID NO: 238311
  chr16:1877591-1877703
  hyper

SEQ ID NO: 291255 - DNA, 52 bp, Homo sapiens
  chr16:1967767-1967819
  hyper
ggcccccacagggcggtcccaaccccactgcccggagcgcacccctgctccc

SEQ ID NO: 291256 - DNA, 223 bp, Homo sapiens
  chr16:1967909-1968132
  hyper
accggtaccaggcgaggccgcgctcgtagcacctgtcgaagaagtggggctcagagcccagcgcgcggacgtcggggtgcagccgcagaaactccagcagggcgcgcgtgccgcccttcttcacgccaacgatgagcgcttgcgggaagcgccggcggccgggaccgctggccaaaggcaggccgggtgctcccgggcggtggacggagctggacggctcgga

SEQ ID NO: 291257 - DNA, 276 bp, Homo sapiens; identical to SEQ ID NO: 238313
  chr16:2014896-2015172
  hyper

SEQ ID NO: 291258 - DNA, 74 bp, Homo sapiens; identical to SEQ ID NO: 238314
  chr16:2033652-2033726
  hyper

SEQ ID NO: 291259 - DNA, 105 bp, Homo sapiens; identical to SEQ ID NO: 204084
  chr16:2040742-2040847
  hyper

SEQ ID NO: 291260 - DNA, 96 bp, Homo sapiens; identical to SEQ ID NO: 204085
  chr16:2042503-2042599
  hyper

SEQ ID NO: 291261 - DNA, 230 bp, Homo sapiens; identical to SEQ ID NO: 126632
  chr16:2042617-2042847
  hyper

SEQ ID NO: 291262 - DNA, 171 bp, Homo sapiens; identical to SEQ ID NO: 238316
  chr16:2054057-2054228
  hyper

SEQ ID NO: 291263 - DNA, 158 bp, Homo sapiens; identical to SEQ ID NO: 204087
  chr16:2058558-2058716
  hyper

SEQ ID NO: 291264 - DNA, 170 bp, Homo sapiens; identical to SEQ ID NO: 238318
  chr16:2097196-2097366
  hyper

SEQ ID NO: 291265 - DNA, 176 bp, Homo sapiens; identical to SEQ ID NO: 238319
  chr16:2198065-2198241
  hyper

SEQ ID NO: 291266 - DNA, 316 bp, Homo sapiens; identical to SEQ ID NO: 238320
  chr16:2198819-2199135
  hyper

SEQ ID NO: 291267 - DNA, 160 bp, Homo sapiens; identical to SEQ ID NO: 238321
  chr16:2245390-2245550
  hyper

SEQ ID NO: 291268 - DNA, 34 bp, Homo sapiens; identical to SEQ ID NO: 238322
  chr16:2245973-2246007
  hyper

SEQ ID NO: 291269 - DNA, 68 bp, Homo sapiens; identical to SEQ ID NO: 238323
  chr16:2265374-2265442
  hyper

SEQ ID NO: 291270 - DNA, 31 bp, Homo sapiens; identical to SEQ ID NO: 238324
  chr16:2273284-2273315
  hyper

SEQ ID NO: 291271 - DNA, 146 bp, Homo sapiens; identical to SEQ ID NO: 224992
  chr16:2295263-2295409
  hyper

SEQ ID NO: 291272 - DNA, 228 bp, Homo sapiens; identical to SEQ ID NO: 204088
  chr16:2301867-2302095
  hyper

SEQ ID NO: 291273 - DNA, 58 bp, Homo sapiens; identical to SEQ ID NO: 238326
  chr16:2318222-2318280
  hyper

SEQ ID NO: 291274 - DNA, 274 bp, Homo sapiens
  chr16:2391769-2392043
  hyper
cgggagtggggaggtgggtcggggtgtccctgggccggaccgggtcgtgggactgggtcgccccaggcaggagagcctgggaggggcgggcccccttggcgtggcagggagaggtggagtgagggactcccgggctccagcatgagggcgggcgccgcgcggggccgacagttgccgcgggccggggccaatgggtccccgagcgccgccagcggccggaccacagtgaggtgcgtccgtggtcccggcgccccgggtgagggagggctgctgc

SEQ ID NO: 291275 - DNA, 196 bp, Homo sapiens; identical to SEQ ID NO: 238328
  chr16:2510306-2510502
  hyper

SEQ ID NO: 291276 - DNA, 268 bp, Homo sapiens
  chr16:2521459-2521727
  hyper
ggagcgggggcgacgcctgtcatcgctctaggcccagcgggaggacgcgccaacatccccgctgctgtgctgggcccggggcgtgcccgccgctgctcccacctctgggccgggctggggccgcccgggggccctgttcctcggcattgcgggcctggtgggcagagccgcggagagggcttcttttccccaagggcagcgtcttggggcccggccactggctgacccgcagcggctccggccatgcctggctggccctgggggctgc

SEQ ID NO: 291277 - DNA, 119 bp, Homo sapiens
  chr16:2521857-2521976
  hyper
ggtgctggcttccagcacgtgcgggcggccggccactcgggcctgcgacgcctccgacccgcgacgggcacactcccccgccctccttacttccccagggggcacggccagccctctgt

SEQ ID NO: 291278 - DNA, 550 bp, Homo sapiens; identical to SEQ ID NO: 238330
  chr16:2732189-2732739
  hyper

SEQ ID NO: 291279 - DNA, 222 bp, Homo sapiens; identical to SEQ ID NO: 238331
  chr16:2888902-2889124
  hyper

SEQ ID NO: 291280 - DNA, 71 bp, Homo sapiens
  chr16:3068100-3068171
  hyper
ccggccccaagaggcgtctctccaacacgcacactagccccggactcacctgcgaaggagataagggaaat

SEQ ID NO: 291281 - DNA, 33 bp, Homo sapiens; identical to SEQ ID NO: 238334
  chr16:3070231-3070264
  hyper

SEQ ID NO: 291282 - DNA, 102 bp, Homo sapiens; identical to SEQ ID NO: 204091
  chr16:3078252-3078354
  hyper

SEQ ID NO: 291283 - DNA, 344 bp, Homo sapiens; identical to SEQ ID NO: 204092
  chr16:3078384-3078728
  hyper

SEQ ID NO: 291284 - DNA, 239 bp, Homo sapiens; identical to SEQ ID NO: 238336
  chr16:3086764-3087003
  hyper

SEQ ID NO: 291285 - DNA, 271 bp, Homo sapiens; identical to SEQ ID NO: 238337
  chr16:3095340-3095611
  hyper

SEQ ID NO: 291286 - DNA, 40 bp, Homo sapiens; identical to SEQ ID NO: 238338
  chr16:3096463-3096503
  hyper

SEQ ID NO: 291287 - DNA, 37 bp, Homo sapiens
  chr16:3097009-3097046
  hyper
tgggcgtggtgagcgcggggtccgcaggctcctgggg

SEQ ID NO: 291288 - DNA, 146 bp, Homo sapiens; identical to SEQ ID NO: 204093
  chr16:3184680-3184826
  hyper

SEQ ID NO: 291289 - DNA, 235 bp, Homo sapiens; identical to SEQ ID NO: 126708
  chr16:3184880-3185115
  hyper

SEQ ID NO: 291290 - DNA, 322 bp, Homo sapiens; identical to SEQ ID NO: 204094
  chr16:3200663-3200985
  hyper

SEQ ID NO: 291291 - DNA, 317 bp, Homo sapiens
  chr16:3208782-3209099
  hyper
gttggggtgtggccgggacccgggcggggaggggtaggggtggagtgaaggcggggtctgggggggtgcgcgtggacggggagagtggaaccgcgggtgtggacctccaagtacagacgtcagagaacgtttgtcgtcctggctcgttggtctaggggtatgattctcgctttgggtgcgagaggtcccgggttcaaatcccggacgagcccgcttttttttttttttctgaacaccatcattttctcgcggtgaagattgaggagcttcacggagtctcggccgcagggaacttggtctctccgtggcagctgcag

SEQ ID NO: 291292 - DNA, 45 bp, Homo sapiens; identical to SEQ ID NO: 52739
  chr16:3209411-3209456
  hyper

SEQ ID NO: 291293 - DNA, 226 bp, Homo sapiens; identical to SEQ ID NO: 204096
  chr16:3222239-3222465
  hyper

SEQ ID NO: 291294 - DNA, 48 bp, Homo sapiens; identical to SEQ ID NO: 204097
  chr16:3238043-3238091
  hyper

SEQ ID NO: 291295 - DNA, 151 bp, Homo sapiens
  chr16:3241321-3241472
  hyper
gggagatcgcagagcggtgagcaaagtcttgcaccagcggggatgtcggggtggaactgaacctgttgtaggggacccccagtgtgccctggtttctggggctgattcattacgtcacttagtttctactattctcatgccaccccgccaa

SEQ ID NO: 291296 - DNA, 549 bp, Homo sapiens; identical to SEQ ID NO: 204098
  chr16:3550753-3551302
  hyper

SEQ ID NO: 291297 - DNA, 63 bp, Homo sapiens; identical to SEQ ID NO: 238351
  chr16:3766893-3766956
  hyper

SEQ ID NO: 291298 - DNA, 171 bp, Homo sapiens; identical to SEQ ID NO: 238352
  chr16:3767713-3767884
  hyper

SEQ ID NO: 291299 - DNA, 1164 bp, Homo sapiens; identical to SEQ ID NO: 204099
  chr16:3781398-3782562
  hyper

SEQ ID NO: 291300 - DNA, 309 bp, Homo sapiens; identical to SEQ ID NO: 204100
  chr16:3931082-3931391
  hyper

SEQ ID NO: 291301 - DNA, 111 bp, Homo sapiens; identical to SEQ ID NO: 225001
  chr16:3989147-3989258
  hyper

SEQ ID NO: 291302 - DNA, 284 bp, Homo sapiens
  chr16:4165532-4165816
  hyper
cacgcctagaggcccgggacctgctcctgtcctaaggggcggctccagcacgcgacctggacaggcaccatctgttcctgtggttcccggctcagcggtgctcccaccgcccccaccgcccccaccttcgaggcgcacgagaaccgctcgggacggacctagaacgcccgggggtccccgccgcgtggccgccgtggctccgggaccgctttgctcgctcgccttccgcgcctctcgccccgagggtggcctccgcgccgcgcggcttctcctcctcgcgcgct

SEQ ID NO: 291303 - DNA, 1128 bp, Homo sapiens
  chr16:4165852-4166980
  hyper
accttgagcgctcccagccccgcgagccgcctgcgcacaaacaactccgctggcggcgcggagccctccatcctgcaggagccgcgctccgatgcgtcaaaggcggcgcgcggccggccccgggcccggaccccgacccggagcagcgagcttcggcgggcgcccccggctcgcgctccccggccgccccccgcgctccgggccggccctgcccgcggcggcgggcgctgggggtgggggcgccccgggctgcgagtgcgcggagcccgtcggcgcggcccgtctagtggggcctgcttccccccgagtgcgccgccgctcccgccgcggccgcagctgtcccgggaccgagcgcgtggaaccacggacgcgggcccctcgccgggcggcggtgcagacgctgccgcagagccgggctcccgcgacgccggccgggacgcccgcccgcccgcgcccacgccgggggccgcctccccgagctagagatgcggccgccgccgcgcccgccgccgtgtcccccgcggccgctgcctcatgtcggaagagctgccgccgccaccatctccggcccctgccccgcccgctgtcactgacagacgcgcgcccgcgccgcccctcgcccagccgcagcgcgcacgcgcggcccgcgctcgccgccaccgcctcctggccccggacacgcgcacgggccgcgcgccgccccgccttggtgcgcgcgctgggctggggctgcggggcggggcggggcggggcggggcgcgcgctcggctccgccccccgccccgggcggcgccgcttctaggcggcgggctgtggccgctgtccgcgctccgggcgctgtgggcccgccctccctcggcgtcccagaggccgcgcgccgcccggggtcccgaccctgcggagagacctgaaggcgcctgccgtggaagaagccgctggccgcaacgtttgggaaatcaaaatgttgccttcccactcggcacgcctttgggataaatcgaagtttccaaccgttggatttccctcccgggaggctccccttgctctgtaagcaatgaatgcgggccccggggcactcggcctgccctggacctgctcacggggcgaccttcacgggcctagcctcca

SEQ ID NO: 291304 - DNA, 553 bp, Homo sapiens; identical to SEQ ID NO: 225004
  chr16:4233232-4233785
  hyper

SEQ ID NO: 291305 - DNA, 204 bp, Homo sapiens; identical to SEQ ID NO: 204104
  chr16:4234087-4234291
  hyper

SEQ ID NO: 291306 - DNA, 208 bp, Homo sapiens; identical to SEQ ID NO: 238355
  chr16:4321188-4321396
  hyper

SEQ ID NO: 291307 - DNA, 377 bp, Homo sapiens; identical to SEQ ID NO: 225006
  chr16:4357423-4357800
  hyper

SEQ ID NO: 291308 - DNA, 69 bp, Homo sapiens; identical to SEQ ID NO: 204105
  chr16:4363851-4363920
  hyper

SEQ ID NO: 291309 - DNA, 172 bp, Homo sapiens; identical to SEQ ID NO: 204106
  chr16:4364080-4364252
  hyper

SEQ ID NO: 291310 - DNA, 341 bp, Homo sapiens
  chr16:4377552-4377893
  hyper
cggggactgcgggcggggggccgggtggctccgccagcgctgcagctgggggccgtctgctcgggctgcggtcgggcacacaatagcagccattgtctcggccagggtggcggggggcccgcccagcccaccctccgggtgacccccgccctgcggtgggtgggaagggcagggcccggtcccccgaagcccccgccgtcccggtggtccccgcggccgcccccgcgcgcttcctccctcgccgcagccgcttcctcccgctcgccccgctctaattagttccttttgcagctggaggagccgcgcagcggccggttccgcggccacccccaccccccacc

SEQ ID NO: 291311 - DNA, 448 bp, Homo sapiens
  chr16:4421674-4422122
  hyper
gcaggtcaggtggccgcagggtgagggccagggcaacccggcccacgagcccctcggtggggaaggggcgtgtctccacgcggctccgccccggccaatggggagaggccccgcccctgccgcggcgggcccgccccccgggactcttaaggcgcgacctgcctccagcgagccgactccggagcccgagcccggggcgggtggacgcggactcgaacgcagttgcttcgggacccaggaccccctcgggcccgacccgccaggaaagactgaggccgcggcctgccccgcccggctccctgcgccgccgccgcctcccggtgagtttctgtggggctggggggctgcgggcggggaagggggcgccacggccaggctgtgcacacgcgcggggaccgccgccgcgcgcacacacgcactctcgggcgggaccgcggccccagcccca

SEQ ID NO: 291312 - DNA, 64 bp, Homo sapiens
  chr16:4422253-4422317
  hyper
acaaaataaacaccccgtcccatgcttcctcctcccacggctgggcctccggcatgaccagttt

SEQ ID NO: 291313 - DNA, 97 bp, Homo sapiens; identical to SEQ ID NO: 204107
  chr16:4465717-4465814
  hyper

SEQ ID NO: 291314 - DNA, 219 bp, Homo sapiens; identical to SEQ ID NO: 238360
  chr16:4475918-4476137
  hyper

SEQ ID NO: 291315 - DNA, 156 bp, Homo sapiens; identical to SEQ ID NO: 238361
  chr16:4526213-4526369
  hyper

SEQ ID NO: 291316 - DNA, 119 bp, Homo sapiens
  chr16:4588823-4588942
  hyper
cacggtggggggtggggtctcgggaggcacgtgatgcgccgtgatgacgtcagtgggagcggaggcgatttggcctagagctggggctgagcacgtgggatggtcggggcctgtttgcc

SEQ ID NO: 291317 - DNA, 46 bp, Homo sapiens; identical to SEQ ID NO: 238363
  chr16:4665023-4665069
  hyper

SEQ ID NO: 291318 - DNA, 134 bp, Homo sapiens; identical to SEQ ID NO: 238364
  chr16:4666535-4666669
  hyper

SEQ ID NO: 291319 - DNA, 140 bp, Homo sapiens; identical to SEQ ID NO: 238365
  chr16:4743270-4743410
  hyper

SEQ ID NO: 291320 - DNA, 393 bp, Homo sapiens
  chr16:4852797-4853190
  hyper
cagactggcggctgcgggagtgaggctcgctccgcctggccagggacgcggccggcggctgcacgagtcaggcttgctccggctggccagggacgcggccggcaccagcctggggcgcccgcttgggggcggagctcccggggcgcccccaggatatgatagggcgctctgctccactcgcgctcactcattggccggcaggacagtctgtccccgctcctcctccctattggcccgcttggctccattggtcgtggttccaaccctgccgcggacctcgccgccactcccaagtccgtctcaccccggacgcggaggtcccgaaaacccaccccggccccgccgctgccttctcctcccacccatctcgccgaggacgagggaagcaggact

SEQ ID NO: 291321 - DNA, 907 bp, Homo sapiens; identical to SEQ ID NO: 204108
  chr16:4986646-4987553
  hyper

SEQ ID NO: 291322 - DNA, 681 bp, Homo sapiens; identical to SEQ ID NO: 204109
  chr16:5007929-5008610
  hyper

SEQ ID NO: 291323 - DNA, 141 bp, Homo sapiens
  chr16:5121865-5122006
  hyper
ttggtcctgctggcgctgtgtctgctgctgccgctgctgctgctgggaggatggaagcgctggcgccgggggcgggcggcccggcatgtagtagcggtggtgctgggcgacgtgggccgcagcccccgtatgcagtaccac

SEQ ID NO: 291324 - DNA, 43 bp, Homo sapiens; identical to SEQ ID NO: 238373
  chr16:5122223-5122266
  hyper

SEQ ID NO: 291325 - DNA, 42 bp, Homo sapiens
  chr16:6068977-6069019
  hyper
ggcggcgctggcgaggggaagggggagggggcgctccctcgc

SEQ ID NO: 291326 - DNA, 36 bp, Homo sapiens
  chr16:6069020-6069056
  hyper
caccagattatttttggctccgcagccggggctgct

SEQ ID NO: 291327 - DNA, 103 bp, Homo sapiens
  chr16:6069094-6069197
  hyper
cgcacacacacacatgcacacattttctcgcgctctctccggctctcctttgtttattttctaatctatatttttactggaagatttcctctttattctctcc

SEQ ID NO: 291328 - DNA, 243 bp, Homo sapiens
  chr16:6069249-6069492
  hyper
cgatcaccccagcccccttcctggtctcccgagcgcggggtttgaaggtcacctcctttccagtccccgtgcgagccgcgctgccgccgcctcctccagccagagtcggtgggactggctgcgctgccctgaagtggttctccaagcagcgcggagggtggcggacggcggacggagcccaggggccgcgtcgggtggggaaacccgaactcgcggaggggaatccctccccctccgccccag

SEQ ID NO: 291329 - DNA, 91 bp, Homo sapiens; identical to SEQ ID NO: 204110
  chr16:6069594-6069685
  hyper

SEQ ID NO: 291330 - DNA, 48 bp, Homo sapiens; identical to SEQ ID NO: 204111
  chr16:6070019-6070067
  hyper

SEQ ID NO: 291331 - DNA, 185 bp, Homo sapiens; identical to SEQ ID NO: 204112
  chr16:6070269-6070454
  hyper

SEQ ID NO: 291332 - DNA, 213 bp, Homo sapiens
  chr16:6533082-6533295
  hyper
ccgacccgtaggggcgggacccacgcagccccagtatccactgccttcccccagctgcaagagtttgcaaaaacattgggcgtctcatttggcgagcgttttggcgcggacagaggccgaggccggccggggaagccggacccgggccctggcgccgccgtggcctccctttgtgcgcgcccgggtgttgattgcctccttgcacgggctgct

SEQ ID NO: 291333 - DNA, 75 bp, Homo sapiens
  chr16:6533714-6533789
  hyper
tgtgcaaattgacatttttggctgcctgtggcagaggagcagccgtcagccgctgtccaacgttagcgcagacac

SEQ ID NO: 291334 - DNA, 78 bp, Homo sapiens
  chr16:6533790-6533868
  hyper
gtggcggcgtgtgcgcctccggggctgctgattagaataggggacttggccgtggatggaatccgggaaacccaaacc

SEQ ID NO: 291335 - DNA, 54 bp, Homo sapiens; identical to SEQ ID NO: 204113
  chr16:7354124-7354178
  hyper

SEQ ID NO: 291336 - DNA, 150 bp, Homo sapiens; identical to SEQ ID NO: 204114
  chr16:7354238-7354388
  hyper

SEQ ID NO: 291337 - DNA, 45 bp, Homo sapiens; identical to SEQ ID NO: 52800
  chr16:7354699-7354744
  hyper

SEQ ID NO: 291338 - DNA, 829 bp, Homo sapiens
  chr16:8767886-8768715
  hyper
acctctgactcccagcgccctgtttgtcttccggagcgctggggccaggcggaggaaagtagctgggagcaagaagggctggcagggccctgagcgccgagatggggagtgaggtggggagggcgggatgctccttcccttctccgcaaaggaaccccttctgattccgactctggagctccagagaccggatccgagacgcgggtggaggtggagttacactcgcctgcagccctgagggtgtaaatggcccattaagatccaggttaaatcaacctatggagctgccccccagagggtcagggtccccacaacttgacgggggtcctcagccgtctcctccccagtcccaggactccctcccagccctcgcggtccctctggtgggtcccgccccagcccccgtctcccccgcccccggaggctggactctgcccccgccccgcctgccacctccctcctgggggcggtggcccgtggcgggcgcacccattggctgtggcgaaagcgagggccggggctggcggcgctgattggccgggacgctcggcggagccagggagtccggcgagtcgctgggggaagtcgagcagacacccagcgctgccggaactcggggcgcgcatcccgcaagtcggaacccggcggatcggatcccgcagatcggagacggggcctggaggtgagcgcgaggcgccgggtggcttgggacgggcccttccgaggggagccgagaggaggtccttctgccctgcccccaggagcaaaacctgggcatcttctcctggaaacggagccctcatcttcccaagacgcggggccctccccc

SEQ ID NO: 291339 - DNA, 39 bp, Homo sapiens; identical to SEQ ID NO: 204116
  chr16:9053887-9053926
  hyper

SEQ ID NO: 291340 - DNA, 214 bp, Homo sapiens; identical to SEQ ID NO: 204117
  chr16:9056293-9056507
  hyper

SEQ ID NO: 291341 - DNA, 327 bp, Homo sapiens; identical to SEQ ID NO: 204118
  chr16:9186867-9187194
  hyper

SEQ ID NO: 291342 - DNA, 91 bp, Homo sapiens
  chr16:9229669-9229760
  hyper
agctcactcctgtatcgatggactgaggttacgaatctcttctctgatttaacccaaagtttagatgaggacactgcggatcaagtattca

SEQ ID NO: 291343 - DNA, 45 bp, Homo sapiens
  chr16:10274220-10274265
  hyper
cagaagggccggcagcaccagcagggtccaatagcccactctgcc

SEQ ID NO: 291344 - DNA, 38 bp, Homo sapiens; identical to SEQ ID NO: 204119
  chr16:10480336-10480374
  hyper

SEQ ID NO: 291345 - DNA, 772 bp, Homo sapiens; identical to SEQ ID NO: 204120
  chr16:10673913-10674685
  hyper

SEQ ID NO: 291346 - DNA, 101 bp, Homo sapiens; identical to SEQ ID NO: 238389
  chr16:10837591-10837692
  hyper

SEQ ID NO: 291347 - DNA, 114 bp, Homo sapiens; identical to SEQ ID NO: 204121
  chr16:11035552-11035666
  hyper

SEQ ID NO: 291348 - DNA, 416 bp, Homo sapiens; identical to SEQ ID NO: 225015
  chr16:11348663-11349079
  hyper

SEQ ID NO: 291349 - DNA, 125 bp, Homo sapiens; identical to SEQ ID NO: 238390
  chr16:11350261-11350386
  hyper

SEQ ID NO: 291350 - DNA, 36 bp, Homo sapiens; identical to SEQ ID NO: 238391
  chr16:11351144-11351180
  hyper

SEQ ID NO: 291351 - DNA, 78 bp, Homo sapiens
  chr16:11439013-11439091
  hyper
tgatctgcatccacgccaaattttgagatgcgttgaaagaggaagttctttacctctctgccttcaattatttattct

SEQ ID NO: 291352 - DNA, 147 bp, Homo sapiens; identical to SEQ ID NO: 126824
  chr16:11439156-11439303
  hyper

SEQ ID NO: 291353 - DNA, 193 bp, Homo sapiens; identical to SEQ ID NO: 204122
  chr16:11762783-11762976
  hyper

SEQ ID NO: 291354 - DNA, 305 bp, Homo sapiens; identical to SEQ ID NO: 126829
  chr16:11836647-11836952
  hyper

SEQ ID NO: 291355 - DNA, 110 bp, Homo sapiens; identical to SEQ ID NO: 238395
  chr16:11944971-11945081
  hyper

SEQ ID NO: 291356 - DNA, 88 bp, Homo sapiens; identical to SEQ ID NO: 204123
  chr16:12211191-12211279
  hyper

SEQ ID NO: 291357 - DNA, 449 bp, Homo sapiens; identical to SEQ ID NO: 204124
  chr16:12897345-12897794
  hyper

SEQ ID NO: 291358 - DNA, 31 bp, Homo sapiens; identical to SEQ ID NO: 238396
  chr16:12913374-12913405
  hyper

SEQ ID NO: 291359 - DNA, 177 bp, Homo sapiens; identical to SEQ ID NO: 225021
  chr16:13877530-13877707
  hyper

SEQ ID NO: 291360 - DNA, 39 bp, Homo sapiens; identical to SEQ ID NO: 238401
  chr16:14164836-14164875
  hyper

SEQ ID NO: 291361 - DNA, 140 bp, Homo sapiens; identical to SEQ ID NO: 238402
  chr16:14379226-14379366
  hyper

SEQ ID NO: 291362 - DNA, 379 bp, Homo sapiens; identical to SEQ ID NO: 204125
  chr16:14396710-14397089
  hyper

SEQ ID NO: 291363 - DNA, 91 bp, Homo sapiens; identical to SEQ ID NO: 238404
  chr16:14727905-14727996
  hyper

SEQ ID NO: 291364 - DNA, 71 bp, Homo sapiens; identical to SEQ ID NO: 238405
  chr16:15188339-15188410
  hyper

SEQ ID NO: 291365 - DNA, 115 bp, Homo sapiens; identical to SEQ ID NO: 238407
  chr16:15737214-15737329
  hyper

SEQ ID NO: 291366 - DNA, 32 bp, Homo sapiens
  chr16:15951337-15951369
  hyper
gagggccggctgtgcagcgtgaagggtaggga

SEQ ID NO: 291367 - DNA, 33 bp, Homo sapiens; identical to SEQ ID NO: 238409
  chr16:15982613-15982646
  hyper

SEQ ID NO: 291368 - DNA, 130 bp, Homo sapiens; identical to SEQ ID NO: 204126
  chr16:16043203-16043333
  hyper

SEQ ID NO: 291369 - DNA, 103 bp, Homo sapiens; identical to SEQ ID NO: 204127
  chr16:16155950-16156053
  hyper

SEQ ID NO: 291370 - DNA, 71 bp, Homo sapiens; identical to SEQ ID NO: 238412
  chr16:17510577-17510648
  hyper

SEQ ID NO: 291371 - DNA, 234 bp, Homo sapiens; identical to SEQ ID NO: 238413
  chr16:18812906-18813140
  hyper

SEQ ID NO: 291372 - DNA, 392 bp, Homo sapiens
  chr16:18995158-18995550
  hyper
ctgcttgtcgccaccgctggatggagccttgccggatctcccgggctctgcagcccctctgcggtccctgatgctcggctcctcgcgggggcgccccactccggcttctgtgatgtcagcgccggaacctggaatcccggctccgcgagggaaggccggggaggcggcggcggcggcggcggctggagagggtcctcggcagcctctgaggagcgcggggcgcggccatgagcgagtccagcggcagtgcgctccagcccggcaggcccagccggcagccggcggtccatccaggtagggcggcagggagcgcgcgcggggacggtgcccctggggtccgagggcgcacggagggagccgggtgctggaggctcggcctggccgctgttccc

SEQ ID NO: 291373 - DNA, 36 bp, Homo sapiens; identical to SEQ ID NO: 238415
  chr16:19179237-19179273
  hyper

SEQ ID NO: 291374 - DNA, 32 bp, Homo sapiens; identical to SEQ ID NO: 204130
  chr16:19179914-19179946
  hyper

SEQ ID NO: 291375 - DNA, 142 bp, Homo sapiens; identical to SEQ ID NO: 204131
  chr16:19421882-19422024
  hyper

SEQ ID NO: 291376 - DNA, 217 bp, Homo sapiens; identical to SEQ ID NO: 204132
  chr16:19422166-19422383
  hyper

SEQ ID NO: 291377 - DNA, 453 bp, Homo sapiens
  chr16:19566588-19567041
  hyper
ttgcgtcttcgctccgccgccttctggagtcctttctgcccctagaggacgcaggtgagctaagcagcagtcatgccctttaccatcatgacgcccgcaggcgggaccacccggcactgtagacagctgccctttacaatcatgactcatagaaactacggcactctggccgtggccgacgttgctcctccgaagcatggcgccggcgggagttgtaacccgggctgtccggagcggggagctgcccctcacaagcatggcgtcagctgaaaatgaagcctgtgctgtgcggagcgtcgcctgcccctcacaagcatggcgtctgcagaaggtgctgtgcggccgctgcggggcggccagctgcccttcacaaacatggcggccgaggggtgcggggagtggcggggtaaggatgggaagccgagcagacggccccagaacaagcggtcatgt

SEQ ID NO: 291378 - DNA, 220 bp, Homo sapiens
  chr16:20085432-20085652
  hyper
gctatccccaatctccaaccccgagggaggggcgtggtgtgggtaggatctgcctctcccgcagcggctcctcactcctccagcgtgtcctcagtttgcctttctccactctcctcgcagccacctctcttgcccctctccaatgcttccagtccatctccggatagaggattctatacctagggcaaagaacgggggaaggggtggggctgttggagca

SEQ ID NO: 291379 - DNA, 203 bp, Homo sapiens
  chr16:20359935-20360138
  hyper
catgggggcggccgtgttgcagcgcaggactggcacgcaggtctcggccatgcgcgcaccgccctggcccacgaagcggtaccagccgcgcaggtccgtgtcgcaggcgtagccctccccgtactcggtgctgcgccagtactcgtccagggtgcggtgcgcctggcacggatccgcgcacacgagcgcgtcgccctcgggca

SEQ ID NO: 291380 - DNA, 36 bp, Homo sapiens; identical to SEQ ID NO: 238423
  chr16:20753258-20753294
  hyper

SEQ ID NO: 291381 - DNA, 182 bp, Homo sapiens; identical to SEQ ID NO: 204133
  chr16:20817451-20817633
  hyper

SEQ ID NO: 291382 - DNA, 199 bp, Homo sapiens; identical to SEQ ID NO: 238424
  chr16:20911813-20912012
  hyper

SEQ ID NO: 291383 - DNA, 194 bp, Homo sapiens
  chr16:21295374-21295568
  hyper
ccgctgcccgtggtcggcgcgcggagctcgaaagcgcgcgcctctaacaaatgaaaacccatagggacttagggttgaattttaacttttttttttttttggcttattgtttagtgctagatagaagggtttgagcggtgtagtcaattttggtgctagtctgacttgaggcaacgtgacgtgacctacgcgtc

SEQ ID NO: 291384 - DNA, 216 bp, Homo sapiens; identical to SEQ ID NO: 204134
  chr16:21531391-21531607
  hyper

SEQ ID NO: 291385 - DNA, 84 bp, Homo sapiens; identical to SEQ ID NO: 204135
  chr16:21964475-21964559
  hyper

SEQ ID NO: 291386 - DNA, 230 bp, Homo sapiens
  chr16:22217232-22217462
  hyper
acatacaaacaagcgatgggcttggatcactaatgattttggaaaggacaggaatacaggaactaagcgagaagcaggcgagaatggcgaggcgcggcgggagaggacggaagttggtcactccctcgaattgccccctcgctgccggatgctaggccagccttgagcaggagaaccggacactgtgtactcagcagggggagccaagacttagcgctaaccattgcacc

SEQ ID NO: 291387 - DNA, 57 bp, Homo sapiens; identical to SEQ ID NO: 238431
  chr16:22308550-22308607
  hyper

SEQ ID NO: 291388 - DNA, 59 bp, Homo sapiens; identical to SEQ ID NO: 204136
  chr16:23159923-23159982
  hyper

SEQ ID NO: 291389 - DNA, 202 bp, Homo sapiens
  chr16:23193696-23193898
  hyper
gcaggcacctgccatctggacgggagtggaaggaagtcgcggggcagtaatagggggcagcaggcgctttgaggcgccttggggtaagtgccgcagagacccagcgggaatgcaggatggcagggcggcctcggggcggcagcaggcactgcgcggtggcccaggaagacgcagcgcggccgggctggggcgcagggcggct

SEQ ID NO: 291390 - DNA, 198 bp, Homo sapiens
  chr16:23194201-23194399
  hyper
agggcgtcggacgccgtcagcgcggtgggtggccgagccagcatcagccggtggcggcttcccggtgcccgggatgctgggacaccttgcccgggcggtagcggccagctctcccgggtctacccacgccgtggcccggagcacgaagccagtcgagagccactcagagtccgggggtctgggggtcccgggccacac

SEQ ID NO: 291391 - DNA, 201 bp, Homo sapiens
  chr16:23194436-23194637
  hyper
cttccctgccggggtgagtcgcgtggacctgtccgctactgttccttctaccctctggaatgctttctccggggtgacttggtgcagaaagaagcaaacacttgaagtgggctggttggattcgctccagcgccttcagccggcgctcccccggggcagacgtggcttccgccacaggacagcgcccgctcgctccgcgca

SEQ ID NO: 291392 - DNA, 136 bp, Homo sapiens
  chr16:23313253-23313389
  hyper
tgagcgcgatgcttcgcctaggtgaacgggacaggtacacgcgtggggtgggatggagtgttcatatatgtggcttgtgatatgtactgaggggacgtggggtacactcggatgaggggtctgtggacatattcgt

SEQ ID NO: 291393 - DNA, 66 bp, Homo sapiens
  chr16:23314010-23314076
  hyper
cggcgtgtctgggacctcagagacggcggcaaagtcctggcatagagtgggcggggcaagaagttg

SEQ ID NO: 291394 - DNA, 228 bp, Homo sapiens; identical to SEQ ID NO: 238437
  chr16:23464125-23464353
  hyper

SEQ ID NO: 291395 - DNA, 92 bp, Homo sapiens; identical to SEQ ID NO: 238438
  chr16:23464614-23464706
  hyper

SEQ ID NO: 291396 - DNA, 143 bp, Homo sapiens; identical to SEQ ID NO: 238439
  chr16:23568685-23568828
  hyper

SEQ ID NO: 291397 - DNA, 92 bp, Homo sapiens; identical to SEQ ID NO: 238440
  chr16:23607741-23607833
  hyper

SEQ ID NO: 291398 - DNA, 248 bp, Homo sapiens; identical to SEQ ID NO: 238441
  chr16:23652254-23652502
  hyper

SEQ ID NO: 291399 - DNA, 391 bp, Homo sapiens; identical to SEQ ID NO: 238443
  chr16:23724337-23724728
  hyper

SEQ ID NO: 291400 - DNA, 97 bp, Homo sapiens; identical to SEQ ID NO: 204138
  chr16:23766000-23766097
  hyper

SEQ ID NO: 291401 - DNA, 103 bp, Homo sapiens; identical to SEQ ID NO: 204139
  chr16:23766130-23766233
  hyper

SEQ ID NO: 291402 - DNA, 44 bp, Homo sapiens; identical to SEQ ID NO: 204140
  chr16:24354628-24354672
  hyper

SEQ ID NO: 291403 - DNA, 191 bp, Homo sapiens; identical to SEQ ID NO: 238446
  chr16:24550403-24550594
  hyper

SEQ ID NO: 291404 - DNA, 137 bp, Homo sapiens; identical to SEQ ID NO: 238447
  chr16:24551563-24551700
  hyper

SEQ ID NO: 291405 - DNA, 386 bp, Homo sapiens; identical to SEQ ID NO: 238448
  chr16:24740563-24740949
  hyper

SEQ ID NO: 291406 - DNA, 231 bp, Homo sapiens; identical to SEQ ID NO: 238449
  chr16:25025361-25025592
  hyper

SEQ ID NO: 291407 - DNA, 417 bp, Homo sapiens; identical to SEQ ID NO: 238450
  chr16:25078044-25078461
  hyper

SEQ ID NO: 291408 - DNA, 83 bp, Homo sapiens; identical to SEQ ID NO: 238451
  chr16:25123186-25123269
  hyper

SEQ ID NO: 291409 - DNA, 169 bp, Homo sapiens; identical to SEQ ID NO: 238452
  chr16:25268733-25268902
  hyper

SEQ ID NO: 291410 - DNA, 165 bp, Homo sapiens; identical to SEQ ID NO: 204141
  chr16:25704644-25704809
  hyper

SEQ ID NO: 291411 - DNA, 143 bp, Homo sapiens; identical to SEQ ID NO: 204142
  chr16:27121251-27121394
  hyper

SEQ ID NO: 291412 - DNA, 54 bp, Homo sapiens; identical to SEQ ID NO: 204143
  chr16:27215267-27215321
  hyper

SEQ ID NO: 291413 - DNA, 258 bp, Homo sapiens; identical to SEQ ID NO: 204144
  chr16:27280121-27280379
  hyper

SEQ ID NO: 291414 - DNA, 290 bp, Homo sapiens; identical to SEQ ID NO: 204145
  chr16:27413511-27413801
  hyper

SEQ ID NO: 291415 - DNA, 190 bp, Homo sapiens; identical to SEQ ID NO: 238458
  chr16:27561384-27561574
  hyper

SEQ ID NO: 291416 - DNA, 127 bp, Homo sapiens; identical to SEQ ID NO: 238459
  chr16:28223525-28223652
  hyper

SEQ ID NO: 291417 - DNA, 157 bp, Homo sapiens; identical to SEQ ID NO: 204146
  chr16:28304161-28304318
  hyper

SEQ ID NO: 291418 - DNA, 403 bp, Homo sapiens; identical to SEQ ID NO: 238461
  chr16:28502991-28503394
  hyper

SEQ ID NO: 291419 - DNA, 307 bp, Homo sapiens; identical to SEQ ID NO: 238462
  chr16:28874813-28875120
  hyper

SEQ ID NO: 291420 - DNA, 443 bp, Homo sapiens
  chr16:28891072-28891515
  hyper
tcccctgcaccccagaggcaggttttattttaagctttaagggtgttctcagccaaaacaccgaagctaagccaccctcgcggcttcaagagcttggagagctcgggttacccacccgaactccgggctccgggtcccgccgcgatgccggctgcggcgcggggggccactgccactcccggcatgcgccgggcggacggccgctccaccaatccccgcgcccgtcggcgcccctgccccgccctccccagcctcctgacgctgattggtcgaggggaggactcgctcctagtggcgggaaagcgcggcggtgtgatgatgactccaaggagcccggcgcccggtcagggagggcactggcatccctcattacccgcccagcctggccttagcccttccccgcgctccctaggcacccccacccccgcagggcatctccaggg

SEQ ID NO: 291421 - DNA, 93 bp, Homo sapiens; identical to SEQ ID NO: 204149
  chr16:28936699-28936792
  hyper

SEQ ID NO: 291422 - DNA, 79 bp, Homo sapiens; identical to SEQ ID NO: 204150
  chr16:29606232-29606311
  hyper

SEQ ID NO: 291423 - DNA, 117 bp, Homo sapiens; identical to SEQ ID NO: 204151
  chr16:29607010-29607127
  hyper

SEQ ID NO: 291424 - DNA, 537 bp, Homo sapiens; identical to SEQ ID NO: 204152
  chr16:29624654-29625191
  hyper

SEQ ID NO: 291425 - DNA, 156 bp, Homo sapiens; identical to SEQ ID NO: 238466
  chr16:29691162-29691318
  hyper

SEQ ID NO: 291426 - DNA, 35 bp, Homo sapiens; identical to SEQ ID NO: 225043
  chr16:29691806-29691841
  hyper

SEQ ID NO: 291427 - DNA, 124 bp, Homo sapiens; identical to SEQ ID NO: 238467
  chr16:29721781-29721905
  hyper

SEQ ID NO: 291428 - DNA, 285 bp, Homo sapiens; identical to SEQ ID NO: 204153
  chr16:29822515-29822800
  hyper

SEQ ID NO: 291429 - DNA, 231 bp, Homo sapiens; identical to SEQ ID NO: 238471
  chr16:29827281-29827512
  hyper

SEQ ID NO: 291430 - DNA, 136 bp, Homo sapiens; identical to SEQ ID NO: 204154
  chr16:29836031-29836167
  hyper

SEQ ID NO: 291431 - DNA, 504 bp, Homo sapiens; identical to SEQ ID NO: 238472
  chr16:29874494-29874998
  hyper

SEQ ID NO: 291432 - DNA, 112 bp, Homo sapiens; identical to SEQ ID NO: 204155
  chr16:29888512-29888624
  hyper

SEQ ID NO: 291433 - DNA, 74 bp, Homo sapiens; identical to SEQ ID NO: 204156
  chr16:29888772-29888846
  hyper

SEQ ID NO: 291434 - DNA, 168 bp, Homo sapiens; identical to SEQ ID NO: 204157
  chr16:29910605-29910773
  hyper

SEQ ID NO: 291435 - DNA, 62 bp, Homo sapiens; identical to SEQ ID NO: 204158
  chr16:29910888-29910950
  hyper

SEQ ID NO: 291436 - DNA, 112 bp, Homo sapiens
  chr16:29938085-29938197
  hyper
aaaaaaaaaacagaggccaaaacgggtagcagtggtgcccgggcaccaaggatggaaggcctctctgaggaggtgatgccgagctgaagctgggaagcggatgtgagggaag

SEQ ID NO: 291437 - DNA, 240 bp, Homo sapiens; identical to SEQ ID NO: 238476
  chr16:29973075-29973315
  hyper

SEQ ID NO: 291438 - DNA, 129 bp, Homo sapiens; identical to SEQ ID NO: 238477
  chr16:29984757-29984886
  hyper

SEQ ID NO: 291439 - DNA, 193 bp, Homo sapiens; identical to SEQ ID NO: 238478
  chr16:29985280-29985473
  hyper

SEQ ID NO: 291440 - DNA, 342 bp, Homo sapiens; identical to SEQ ID NO: 238479
  chr16:30006505-30006847
  hyper

SEQ ID NO: 291441 - DNA, 206 bp, Homo sapiens; identical to SEQ ID NO: 238480
  chr16:30007370-30007576
  hyper

SEQ ID NO: 291442 - DNA, 40 bp, Homo sapiens; identical to SEQ ID NO: 238481
  chr16:30032528-30032568
  hyper

SEQ ID NO: 291443 - DNA, 285 bp, Homo sapiens; identical to SEQ ID NO: 238482
  chr16:30075774-30076059
  hyper

SEQ ID NO: 291444 - DNA, 325 bp, Homo sapiens; identical to SEQ ID NO: 204159
  chr16:30077527-30077852
  hyper

SEQ ID NO: 291445 - DNA, 125 bp, Homo sapiens; identical to SEQ ID NO: 238484
  chr16:30103514-30103639
  hyper

SEQ ID NO: 291446 - DNA, 296 bp, Homo sapiens; identical to SEQ ID NO: 238485
  chr16:30379992-30380288
  hyper

SEQ ID NO: 291447 - DNA, 81 bp, Homo sapiens; identical to SEQ ID NO: 238486
  chr16:30382503-30382584
  hyper

SEQ ID NO: 291448 - DNA, 809 bp, Homo sapiens; identical to SEQ ID NO: 238487
  chr16:30411405-30412214
  hyper

SEQ ID NO: 291449 - DNA, 195 bp, Homo sapiens
  chr16:30428811-30429006
  hyper
gagacccaggtctctggctccggggcctgccgctaagggctgacctatccccctctccccgcaggtcccgggcgaggcgcccgcgccgtccgccgacccggcgcgtccccacgcgtgccccgactgcggccgcgccttcgcgcgccgctccacgctggcgaagcacgcgcgcacgcacacgggcgaacggccctt

SEQ ID NO: 291450 - DNA, 98 bp, Homo sapiens; identical to SEQ ID NO: 52973
  chr16:30429060-30429158
  hyper

SEQ ID NO: 291451 - DNA, 220 bp, Homo sapiens; identical to SEQ ID NO: 238489
  chr16:30545486-30545706
  hyper

SEQ ID NO: 291452 - DNA, 45 bp, Homo sapiens
  chr16:30545948-30545993
  hyper
gggccagaggcggcgccatggggactgtcagccccagcgacggat

SEQ ID NO: 291453 - DNA, 167 bp, Homo sapiens; identical to SEQ ID NO: 127066
  chr16:30546036-30546203
  hyper

SEQ ID NO: 291454 - DNA, 177 bp, Homo sapiens; identical to SEQ ID NO: 204161
  chr16:30583154-30583331
  hyper

SEQ ID NO: 291455 - DNA, 52 bp, Homo sapiens; identical to SEQ ID NO: 238492
  chr16:30583722-30583774
  hyper

SEQ ID NO: 291456 - DNA, 689 bp, Homo sapiens
  chr16:30596384-30597073
  hyper
gagtgagttgggggcgggggttggggcttctccacggctacttatccaaatgaagtacctgcttcctgtccttggcccctgctgaaagctgcagagctctcaccgtcgggatcctgggcctccgggctccacgcctccacttctccttccacccacgagataaaagcgggtttgggaactgaaaatcctgcgaaggagaaacaatgggctcggctgagcgcacgggaggggagaatgagactgctccctcggcgccccgcttccagcccactagcctctggggacaccgatcaccgcttcccaccgacggactgggggtcccggccggagggcccggcctcacccagcgcgcccaggtggccgaaggtctcccgcatcacgtcccggtacagggccctctgcgctggccgcaggcattcccactcctcgggagagaagtacacggccacgtccgcgaagctcacggcgcccggcctgctttccctcgtcctccggggcccggcctccccgggtacgtgggccgggcgcggcgccaggggcggccccatgggaaaccctttctgcctggcaaagggaggcttccggggaaggtggagatgctggcgctttcctgtctttcctcagacaagtccgtaagggactcctgcccttaaccaagatggaaccttcctggcgtcaacacccctcgc

SEQ ID NO: 291457 - DNA, 188 bp, Homo sapiens; identical to SEQ ID NO: 204162
  chr16:30620879-30621067
  hyper

SEQ ID NO: 291458 - DNA, 905 bp, Homo sapiens; identical to SEQ ID NO: 10625
  chr16:30621123-30622028
  hyper

SEQ ID NO: 291459 - DNA, 78 bp, Homo sapiens; identical to SEQ ID NO: 238495
  chr16:30669805-30669883
  hyper

SEQ ID NO: 291460 - DNA, 379 bp, Homo sapiens; identical to SEQ ID NO: 238496
  chr16:30670364-30670743
  hyper

SEQ ID NO: 291461 - DNA, 76 bp, Homo sapiens; identical to SEQ ID NO: 204164
  chr16:30786651-30786727
  hyper

SEQ ID NO: 291462 - DNA, 231 bp, Homo sapiens; identical to SEQ ID NO: 204165
  chr16:30787247-30787478
  hyper

SEQ ID NO: 291463 - DNA, 307 bp, Homo sapiens; identical to SEQ ID NO: 238499
  chr16:30797729-30798036
  hyper

SEQ ID NO: 291464 - DNA, 472 bp, Homo sapiens; identical to SEQ ID NO: 238500
  chr16:30798319-30798791
  hyper

SEQ ID NO: 291465 - DNA, 162 bp, Homo sapiens; identical to SEQ ID NO: 204168
  chr16:30816842-30817004
  hyper

SEQ ID NO: 291466 - DNA, 200 bp, Homo sapiens; identical to SEQ ID NO: 204169
  chr16:30817038-30817238
  hyper

SEQ ID NO: 291467 - DNA, 153 bp, Homo sapiens; identical to SEQ ID NO: 225049
  chr16:30905625-30905778
  hyper

SEQ ID NO: 291468 - DNA, 134 bp, Homo sapiens; identical to SEQ ID NO: 238502
  chr16:30934320-30934454
  hyper

SEQ ID NO: 291469 - DNA, 60 bp, Homo sapiens; identical to SEQ ID NO: 238503
  chr16:30934682-30934742
  hyper

SEQ ID NO: 291470 - DNA, 100 bp, Homo sapiens; identical to SEQ ID NO: 204170
  chr16:30935543-30935643
  hyper

SEQ ID NO: 291471 - DNA, 556 bp, Homo sapiens
  chr16:30959757-30960313
  hyper
cccttcctcgagcgcggggtggggcttcgggaccccggggatgagccgggccaggtcccgcccctccgcgcaggcctccggggggccggggcttaccatgtaggggaggggagatctatccacatacctcaggtaacagggaggtgcgcgggtggggggagggctgggcggaccaaaggccggaggggtggggcctggggatagcgagaggcttgagaatggggccgcttgggggagggaagaggcagcccggcgaggggcaagcgggggacccagccgggctgggcccctgggccccgggtctgtacaatacggtttgctataaaactcaaaatcttccagccggggctgcggagttcgtgtgtgtatctgcggggtccctacctacagatgagtgggctcacctctcctggactcattttgggagggatttggaagtgtggacacctggggtgtccagctgtaccttggagggggctggggttggcgtgcacctcggtggggtccgggcgcttggataacgttcttggtgggtaggggtcgcggggaatctctg

SEQ ID NO: 291472 - DNA, 267 bp, Homo sapiens
  chr16:30964613-30964880
  hyper
ctcatggtctccacgtgtctgctgccccacattgaagctgtgagcaacatccacaacctcaactctgtccaccagtcgccacaccagagactgcaccgctacgtggagctggcctggggcttctccactgccctgggcacctttctcttccttgctgaagttgtcctggttggttgggtcaagtttgtgcccattggggctcccttggacacaccgacccccatggtgcccacatcccgggtgcccgggactctggcaccagtggct

SEQ ID NO: 291473 - DNA, 216 bp, Homo sapiens; identical to SEQ ID NO: 238506
  chr16:31044530-31044746
  hyper

SEQ ID NO: 291474 - DNA, 334 bp, Homo sapiens; identical to SEQ ID NO: 225052
  chr16:31075206-31075540
  hyper

SEQ ID NO: 291475 - DNA, 212 bp, Homo sapiens; identical to SEQ ID NO: 238507
  chr16:31085565-31085777
  hyper

SEQ ID NO: 291476 - DNA, 319 bp, Homo sapiens; identical to SEQ ID NO: 204175
  chr16:31117073-31117392
  hyper

SEQ ID NO: 291477 - DNA, 31 bp, Homo sapiens; identical to SEQ ID NO: 238509
  chr16:31128844-31128875
  hyper

SEQ ID NO: 291478 - DNA, 271 bp, Homo sapiens; identical to SEQ ID NO: 204176
  chr16:31153837-31154108
  hyper

SEQ ID NO: 291479 - DNA, 188 bp, Homo sapiens; identical to SEQ ID NO: 238510
  chr16:31191155-31191343
  hyper

SEQ ID NO: 291480 - DNA, 477 bp, Homo sapiens; identical to SEQ ID NO: 204177
  chr16:31213467-31213944
  hyper

SEQ ID NO: 291481 - DNA, 45 bp, Homo sapiens; identical to SEQ ID NO: 204178
  chr16:31214140-31214185
  hyper

SEQ ID NO: 291482 - DNA, 40 bp, Homo sapiens
  chr16:31227398-31227438
  hyper
gctgttgtcttacgcgactggtgcgcgcgtggggctggct

SEQ ID NO: 291483 - DNA, 84 bp, Homo sapiens; identical to SEQ ID NO: 204179
  chr16:31228313-31228397
  hyper

SEQ ID NO: 291484 - DNA, 403 bp, Homo sapiens
  chr16:31453960-31454363
  hyper
tgaggtcccgtgcccgcgtacctcccgcatgacacttgggcgtgcggccgagccgggagcgcccctgccccgcgagccgcccccgagagacacggcggatcggaacccagccgggcgcgtagctccgggaaggggacgtggcgaggacccggcagccgcggggcctgtggggaaacatggtccccgcaagggaccctgggagctggaggcgtcctggcccggcgtccggagcccacggcccaggactaggatgccgggggtctcgggcgtcctccctaacctcagtcatagggcgctccgtatccagcccgccctgcttgcctctcgcttcccccaaatactgccccgacctgtcccctggccctcaccaagacagggagaaacgaccgagacactgaggact

SEQ ID NO: 291485 - DNA, 293 bp, Homo sapiens; identical to SEQ ID NO: 238514
  chr16:31469969-31470262
  hyper

SEQ ID NO: 291486 - DNA, 43 bp, Homo sapiens; identical to SEQ ID NO: 238515
  chr16:31483758-31483801
  hyper

SEQ ID NO: 291487 - DNA, 184 bp, Homo sapiens; identical to SEQ ID NO: 225056
  chr16:31487758-31487942
  hyper

SEQ ID NO: 291488 - DNA, 204 bp, Homo sapiens
  chr16:31498818-31499022
  hyper
aaggagggtcccctgacggccttgcccggcagccttccacgaggtgggcgggtattcgggtctcttcgacaaatacctgggagcagcgacttcgctgacggtgtccgaggatccagccgtgggaaacatctccagcttctgctatcgaccccggcccgactcctaccacctgctccggcaccccgtgaccggggatctgccgtg

SEQ ID NO: 291489 - DNA, 290 bp, Homo sapiens
  chr16:31499204-31499494
  hyper
ttggtgctaaaccagacagaaggctccatctactccaagcgtgcagctgaacttggggcactcacgagccagaggcggggcacagagcggaacggggcgcggggcggggccgaggggaggcccgcaagcgggcagctgaacgcccctcccgtaggtcatcgtgcagcgctgcctggccgggaagagcctgacccacatcaaggcgggctgcatcctgtgtgggtacctgaagctgacgcccatgtttctcatggtcatgccaggcatgatcagccgcattctgtacccag

SEQ ID NO: 291490 - DNA, 82 bp, Homo sapiens; identical to SEQ ID NO: 238517
  chr16:31519859-31519941
  hyper

SEQ ID NO: 291491 - DNA, 257 bp, Homo sapiens
  chr16:31548823-31549080
  hyper
ccggcgtttccccgcggaggtcatgaggtccccacggcccaggccccgtccccggacagccccgggtgccccaggagctccggccgcagctcacctgggaccggcctcccgtggagccaccccttgcccagccgcccccaagttcccgcaggaggaactggcgacagacacgtccagcccgcagccgccggccgcaccggcgctgcactaactgggacgcgccccggggccgcgctggctcggatccgcccagaccc

SEQ ID NO: 291492 - DNA, 63 bp, Homo sapiens; identical to SEQ ID NO: 127134
  chr16:31549116-31549179
  hyper

SEQ ID NO: 291493 - DNA, 410 bp, Homo sapiens; identical to SEQ ID NO: 225057
  chr16:31712179-31712589
  hyper

SEQ ID NO: 291494 - DNA, 603 bp, Homo sapiens; identical to SEQ ID NO: 238520
  chr16:31885057-31885660
  hyper

SEQ ID NO: 291495 - DNA, 302 bp, Homo sapiens; identical to SEQ ID NO: 238521
  chr16:46723139-46723441
  hyper

SEQ ID NO: 291496 - DNA, 34 bp, Homo sapiens; identical to SEQ ID NO: 238522
  chr16:46917869-46917903
  hyper

SEQ ID NO: 291497 - DNA, 110 bp, Homo sapiens; identical to SEQ ID NO: 204181
  chr16:47175828-47175938
  hyper

SEQ ID NO: 291498 - DNA, 310 bp, Homo sapiens
  chr16:47176462-47176772
  hyper
ctcagccgtaccctcgaaatttttaaaaaaagaacatgttacgacattacaaacacgtcagctttcaatttaaatcagcagggggaaaaagggaagtcctttactgagtggtggtgctgttttccctctggaaattgaaaagacgatttattcagtccgagtttcaggagcaactttgtatcccaatcctaattatctatgtatataaattttcatctaaattaccacctcctgggaaatgcaaagccggtggagtaggttttagagctctgtgctctggacaagccaactgttttaattcccagtacaa

SEQ ID NO: 291499 - DNA, 256 bp, Homo sapiens; identical to SEQ ID NO: 238526
  chr16:47495527-47495783
  hyper

SEQ ID NO: 291500 - DNA, 94 bp, Homo sapiens; identical to SEQ ID NO: 238527
  chr16:48399755-48399849
  hyper

SEQ ID NO: 291501 - DNA, 90 bp, Homo sapiens
  chr16:49308920-49309010
  hyper
agtgcagggcacacgtccgcagttcagggtctttagccttccattgggtccgccccgccccaggacccaacctgcaatctgtgggagagt

SEQ ID NO: 291502 - DNA, 65 bp, Homo sapiens; identical to SEQ ID NO: 204185
  chr16:49316711-49316776
  hyper

SEQ ID NO: 291503 - DNA, 209 bp, Homo sapiens
  chr16:49316844-49317053
  hyper
cgatttttcgagaataatttttaccctaagtggattttcgtgccacgcatggacttggaactacacacacgtagtccaaaacgtgaaagtcaaaatgcagctttgccaagtggcagggagaaaggagagctgagaagatgaggagaggaagggcgcgctccaggctttccagcccgggtgcggtagacgtagccctgaaggatgaaccc

SEQ ID NO: 291504 - DNA, 118 bp, Homo sapiens
  chr16:49317235-49317353
  hyper
tggagagacgcggggcgccggctgagcgctcctgccctctgcctctgggctagcctctggcccggcctcccggcctcccccagggtacgctctcccccaagagcgaacaccagctttg

SEQ ID NO: 291505 - DNA, 188 bp, Homo sapiens; identical to SEQ ID NO: 127168
  chr16:49889658-49889846
  hyper

SEQ ID NO: 291506 - DNA, 880 bp, Homo sapiens
  chr16:49890526-49891406
  hyper
gggcccctggctcacgcccccttctctggctctcggatcggcccggcgccggccccccggaggaggaaggggcgcgcgggggcgctcaggcggcggccggcaggcgcgcccgtgccccgggcatcgctcagcccgtgcgccgggccgccgctgcctgccctcgggctgcggtgctcagcgcgaggcgcgcagccgatccccaggccggtgccaagtcgccggccccgctagctgcctccatgggccaggggctcggagaggggggaggcggcggccgcggtggcggaagaggaggacgagcaggcggcggcggcggcggccgggctcccgtcctcctgggcagcggcggcggcggctgcgccccggctcctccgcgctccagccggcgccggcccgcccgccagcctccctcgcgctcctgtcttctttgtggtcgctggctctcctcctcccgatccggctgctggggctgcactgcagagacacataataaagccaggcttggctggaaatgtagccgggtcccagcaggaggatgtgaggagcggagtcccggcgggggagcgctctgatcccgtggggcgccccgcactgctccggctcggatcagacggagagagggccaacagcaccgagcgatggacagcgctggaaatacagctccggccgcccgcaaaacccggaccgtggtggcggcggcggcggcggcggcaggcacggcgcgggcgcgggcaccgcaccagcacgcggggccggggctcgggcgctggctgcaccgggggcaggaggagggaacacacttagggcccacgcggctgtcaagctcgccaagacgcatgagcctcacaaactgtaaaaagtgaaagaatgggggagcaaa

SEQ ID NO: 291507 - DNA, 192 bp, Homo sapiens; identical to SEQ ID NO: 127170
  chr16:49891452-49891644
  hyper

SEQ ID NO: 291508 - DNA, 109 bp, Homo sapiens; identical to SEQ ID NO: 238536
  chr16:50188126-50188235
  hyper

SEQ ID NO: 291509 - DNA, 210 bp, Homo sapiens
  chr16:50581390-50581600
  hyper
gacgagcgtaacacggacccacagtgtccccagaagggggcaggcgttctgagagccacaaaggtggggtggaatcccttgatgtcgaccgccaccatccccctccccccgcgcgacctccccgcagagacctccccagacaaaacaaacaaacccttgggtctggcgaactgcagcggggagcggaaaccaaggaagatcaaagactca

SEQ ID NO: 291510 - DNA, 587 bp, Homo sapiens
  chr16:50581666-50582253
  hyper
ccccggacgaggagatcccagagactggctgataacggggcgctttggacatttgtcgctgcctggagagggctgggctcacactggcccggggtgcgctgggggctcctcctggactccccaaataagaaactagaggagtgcggtggtggggggcgggtcacggggcgggtaatgaacactttctgcagaaggtaggtcgtgggaagactgggaaaaggcagcgctgccgaagcttgcacctgagcagctaaggtctccgctcccgacctcagtttccccacctgtaaattggagccgccgagtcccgccctgcccgtttagagagaacgtggagcggagggaagtgacagtacagttagcgatggccgggctgttctgtcccaatacgcctcctggacaagccgccccgccgggtcgccagccctggagctcggcccccggccccagaccgcggcagggagcgcggactgtgtcccgcccctcccgtcagcgccccgccctcgtccccgccctgccccgcctccggccccgcccccgccgcaaccagccttgcctttgatgcgccgcaccggccaatgggcgcg

SEQ ID NO: 291511 - DNA, 66 bp, Homo sapiens; identical to SEQ ID NO: 204188
  chr16:50773734-50773800
  hyper

SEQ ID NO: 291512 - DNA, 236 bp, Homo sapiens; identical to SEQ ID NO: 238538
  chr16:50775657-50775893
  hyper

SEQ ID NO: 291513 - DNA, 44 bp, Homo sapiens; identical to SEQ ID NO: 238539
  chr16:50840618-50840662
  hyper

SEQ ID NO: 291514 - DNA, 119 bp, Homo sapiens
  chr16:51167810-51167929
  hyper
cctcaaccctgttgctttgtaaatgtaaatccagttctgttctgcgggccgagcccaaaggctgagtgtatttttcacactgggaggagaagcagggcagagggcgatttcttattttg

SEQ ID NO: 291515 - DNA, 76 bp, Homo sapiens; identical to SEQ ID NO: 204189
  chr16:51184601-51184677
  hyper

SEQ ID NO: 291516 - DNA, 99 bp, Homo sapiens
  chr16:51189084-51189183
  hyper
cagaccctcttttccgttccgttgacggtgcttggccaccctaccccagaaatggaggacgtctccaagtgctctccctgcacccctgtttcctcagtc

SEQ ID NO: 291517 - DNA, 58 bp, Homo sapiens; identical to SEQ ID NO: 204191
  chr16:51189374-51189432
  hyper

SEQ ID NO: 291518 - DNA, 198 bp, Homo sapiens; identical to SEQ ID NO: 204192
  chr16:51189680-51189878
  hyper

SEQ ID NO: 291519 - DNA, 240 bp, Homo sapiens
  chr16:51190251-51190491
  hyper
agtgcctcgccaaggggcctctgggtatgaaattcctcccagaggaaatgtcccgacgtagagaaagtggaaaaggctaatcgaatttataaaaagaaaatctttcctccttttggttaaatccctttgcggttttctgagcgcgaaaaaaaaattatcaccatgtaatagagtgtagctaattcttagaacctagtagtaggatgttcaggaagcccagcaggacgcacagattcccat

SEQ ID NO: 291520 - DNA, 195 bp, Homo sapiens; identical to SEQ ID NO: 238545
  chr16:52579148-52579343
  hyper

SEQ ID NO: 291521 - DNA, 1080 bp, Homo sapiens
  chr16:52579631-52580711
  hyper
gttttcgacaaattcggcgctgggggcttcagggaggacagaggacaccggatggtgggggggaattccgcgcggcccgggtaccagggctgcgactctcgcccgcctcgctgctccgagcgacgcccgctgcccttctgaggtccacctcgccacctggaacgctcggtcctcgaagttggcgcagggggaggtggagaaggtggagtgaccccagggtgtggtgtggaggtctccaatcccgatctccccgaaatgcaaaacttagcccccccaaaaaaatgagaggaaagaagccacttactctaagcggggaggggcgggcaccccggttccgaggtccaaagtgccctaacgaaagggcagcaaaggccacctgcggggtcccaccacttccccccactcccctgtccaggcatactcaaaagtttgttcctttccgtccgtaagcggccccgaggccggctctggagtaggtgggggaggtaagaaggactgggggtgggggagggcaagatcatcggaccaggagatcagggacccctgcgtagcccccactcagtccaggggggctgcgatcgtgtttactaataacagcaacaaacaatcacacgccagcccttctttcagtcctcgggctctcttcgctttttgggggcagcaaaggagagtctggcggggaggtgggagggagcggaggggctgaggagagcgccggctgggggacaaaaagcggcgtgggatggggcagaaagagaagcggggagagctggacagagacgaaggctcaaaggtagaagagacatgggaggaaagaggccaaagaaaagtgcagcaggcggtgagcccgagcgcggggcgcgcccaggatggggaggtggcccccgccccccggcccaccggcccagcccggtcaccttgctgtagccgtagtaccccaggcactgcgcgaagtccaggctggcagggtccccggccgccgcggggtagaacctcacatccatgccgaagctgggcccggggccgggggccgggactggggttcgccggggccgggacccgcctcctcgccgccgctag

SEQ ID NO: 291522 - DNA, 152 bp, Homo sapiens
  chr16:52581020-52581172
  hyper
tccccgggcggactgaggagacgagccgcggagacaaggggcccggcccctcccctccttctccccctcctgcctcagccgccggtcccctccccgcgccgccgccgctccgcccctcccaccgcgggcagctggcgcgccgcccgccccgc

SEQ ID NO: 291523 - DNA, 238 bp, Homo sapiens; identical to SEQ ID NO: 238548
  chr16:53088451-53088689
  hyper

SEQ ID NO: 291524 - DNA, 33 bp, Homo sapiens; identical to SEQ ID NO: 204196
  chr16:53468698-53468731
  hyper

SEQ ID NO: 291525 - DNA, 307 bp, Homo sapiens; identical to SEQ ID NO: 238550
  chr16:53537311-53537618
  hyper

SEQ ID NO: 291526 - DNA, 401 bp, Homo sapiens; identical to SEQ ID NO: 238551
  chr16:53737492-53737893
  hyper

SEQ ID NO: 291527 - DNA, 90 bp, Homo sapiens; identical to SEQ ID NO: 238552
  chr16:53738159-53738249
  hyper

SEQ ID NO: 291528 - DNA, 782 bp, Homo sapiens; identical to SEQ ID NO: 127219
  chr16:54316061-54316843
  hyper

SEQ ID NO: 291529 - DNA, 72 bp, Homo sapiens
  chr16:54318433-54318505
  hyper
ccgagcgaaggcggcggcggcagccgggtggcccgcggctccgggaagtcccagcaggtgcggaggggcaga

SEQ ID NO: 291530 - DNA, 45 bp, Homo sapiens
  chr16:54318853-54318898
  hyper
cgctggagccagactcaggaccggtagtggccggtcctctaagcc

SEQ ID NO: 291531 - DNA, 301 bp, Homo sapiens
  chr16:54319053-54319354
  hyper
cagccaggccctcgccccccgtgtcctcctcctcccccccgagctcctcctcctccagctctagctcgcgtttgccgtcctcctcgtcctcctcttcgtcttcctcctcgcgctcgctcccataagcgtttccctcctcgtcagtgcggctgcgaggcgcccaagtcatcttattctccttcttgaggcgccggcgcgcgttggcgaaccaggtggacacctgggtgagggtcatcttggtgatgatggccagcatgatcttctcgcccttggtggggtaggggttcttgcggtgctcgtt

SEQ ID NO: 291532 - DNA, 1090 bp, Homo sapiens
  chr16:54319649-54320739
  hyper
gcgccccagcgccaacccctccttccctggctccgcgggctcttaccagctgcgggaagatgggcagctccgcggcgtagggcaggaaggcgccgtagccttgggcggcggcggccgcagcggccgcggcgtagggcgccccgtacacggacgagagcacgttggacagggaccccgaggcgttcagctccgaggctccggcacccaggccgccccgggcccccgcgctgccgccgctgccgccagcggcccccgggcgctcggacgggtaaagcgggcggatgtattggtatcccagctgggggaaggacatggtggcccgcggggcacggacggagaggggggccgacccccgggccgcccagctcagcgccgcccgcgggctccggcgcgcatcgggggctgggccgggcttggggccgcgctgccgcccgcgctgcgctgtgctccgcgttcgcctattgatctgctccgcggcggcgacggcggcggcgagggcggcggcgaggagccaggtcaggtccgaacagattggcggagattcccggggctccgggctctgattgacatttctacggggcgcaagcccctcctctctgcgccgcgctccctcctctcggccgccggagctgcctctgcccgctcctcgctcctcactgccctcctctccccagcagtgtcgcgcctcgcttccttcgccctcctctagttttcactccccctcctcgcccttcctctcccctcccctctccgcactcctcttccccccaggatcgcttccgctgcttcgggctcctgcactgccctggacgctatgaaactctcctttctcctctccccttctctttccctttctcacgagggcttttgctctccggtccgttcccttcacttcttcctttctcactacttctattttgtaaatctctctctttactcacacgatactccccgcgacctttccagcctctgcgccctgggctaagtaaggcagccaaaagttgtggacacttagggtgccgcgcggggggtgtgtgtcggtgtctgtctgtccatccccgcccttccaccccctccctcgcctttcccc

SEQ ID NO: 291533 - DNA, 206 bp, Homo sapiens; identical to SEQ ID NO: 204201
  chr16:54321080-54321286
  hyper

SEQ ID NO: 291534 - DNA, 123 bp, Homo sapiens
  chr16:54324470-54324593
  hyper
ggtgggctctttgctcctccgcttcgcccctgcgcctcccgcgacccgtctcacttccctgcgtctctgagcggcccgagaggcgcagcgctcagagtggccttgatggaagaacctggccct

SEQ ID NO: 291535 - DNA, 61 bp, Homo sapiens; identical to SEQ ID NO: 238556
  chr16:54404674-54404735
  hyper

SEQ ID NO: 291536 - DNA, 242 bp, Homo sapiens; identical to SEQ ID NO: 204202
  chr16:54962409-54962651
  hyper

SEQ ID NO: 291537 - DNA, 494 bp, Homo sapiens
  chr16:54962936-54963430
  hyper
ggcgaggccgccactggccggctgcgcgctcccccaggctcgggccgcctgggccgctccgcctcgcttagacattggccggctggcagccacctcggccccacggtccccgccgccgctgcagccagcttcccgtctccatgacaatagcgcgatcgagaccccgcccctccccgcccctctggcgccgagactcggaggaaagcggggttacgtcaccagggggcggagcccagggaggccagcgcccaatcataggtgaaggaggtgtcaggcactgggctgggcggacccaggggctctcggagaatgtagtctgaaccgctcaggcctcttggtgggcggtgtctgggggaggggagcagacggaggggaggagccaacgcgcgtgcacgagagcgcagcaccgagcgggtgccggtgcggcgctgggttagtgtgagatcgcgaaataaagtacatctcgcccgtcaaagtcaatgcgagaaactttg

SEQ ID NO: 291538 - DNA, 265 bp, Homo sapiens
  chr16:54963876-54964141
  hyper
gagaaagaggctgcgaggcgtgggagtggagctggggacggtcccgagatctcctcgggtgtagctgattctctgtctggcagttcttgcccaccacccctactctagaaaaaggctaccccggtagttccaggaaccagtgtcttctccctcgccgtccggcggggggtcggtagaaggaaggcgaggcggagacgtgcagacgtctgaggcctgtctctcgcccacctgctgctgccggcgcagaggggcagtcatcccggac

SEQ ID NO: 291539 - DNA, 285 bp, Homo sapiens
  chr16:54964663-54964948
  hyper
gccgggttggctgcggccgcccagaagctcctgccagtcctcccaccgactacaccccgggaaggaggagcttcgggcgcgcacaaggcgtcagaatcctcaatttccaacttagcatcttggcaggacctttgcaaaggcaaaagcagagccccccggtgcaaagagcgaggggaaaaaagagaaagcagcaagggaggggaggggaggggaaaaaaagcccagctggggcgagcgaggcgcgcagaggagcgggcgcggcggtcgcagccggaggcgcgcggg

SEQ ID NO: 291540 - DNA, 431 bp, Homo sapiens
  chr16:54965135-54965566
  hyper
accagccgtccgcctcgctggcgctctactcgtgcccggcgtacagcaccagcgtcatttcggggccccgcacggatgagctcggccgctcttcttcgggctccgcgttctcgccctacgctggctcgactgccttcacggcgccctcgccgggctacaactcgcacctccagtacggcgccgaccccgcggccgccgccgccgccgccttctcctcgtacgtggtaagtgagcgggatccgcggcgggcgaggggcagcaggggccgggcgggaggacgggggcggagggggacacgggcctaggcgccaacaccgacctcccccgccaagcttcgcggccccttcaaacttgggcgattgtctccgccagcttcgcccaggccttggactcaagagttgctcgcaaaagagagccgcgtcttgctcgga

SEQ ID NO: 291541 - DNA, 300 bp, Homo sapiens; identical to SEQ ID NO: 204204
  chr16:54965776-54966076
  hyper

SEQ ID NO: 291542 - DNA, 106 bp, Homo sapiens; identical to SEQ ID NO: 204205
  chr16:54966659-54966765
  hyper

SEQ ID NO: 291543 - DNA, 69 bp, Homo sapiens; identical to SEQ ID NO: 204206
  chr16:55090597-55090666
  hyper

SEQ ID NO: 291544 - DNA, 32 bp, Homo sapiens; identical to SEQ ID NO: 204207
  chr16:55091068-55091100
  hyper

SEQ ID NO: 291545 - DNA, 119 bp, Homo sapiens
  chr16:55359125-55359244
  hyper
atcctcctcttgtgttctgggggaagccagaaggagcaaggaccagggtaatgtgtcacagcctcctctgacatccccagtccctaaatgagaacgtttcaccccggagtgcacgctgg

SEQ ID NO: 291546 - DNA, 195 bp, Homo sapiens
  chr16:55362578-55362773
  hyper
gggcttttctcactcgctcttgatttcctgcagaagttactgctagccaggaggcccgggggctccggctgagtgacctggaagacctggaggaagaggaggaggaggaggaggaagctgaagacgaggaggtagtggccacagctggggacaggctgacggagttccgaaagggcgcgcagtcactgcctgggc

SEQ ID NO: 291547 - DNA, 99 bp, Homo sapiens
  chr16:55363256-55363355
  hyper
tgcaaaagacacccacctaccgccccgcccggcaattgcacaccctctgccattccagtctgcccaggtctcccacagaactgacgggagattgcttta

SEQ ID NO: 291548 - DNA, 79 bp, Homo sapiens
  chr16:55365468-55365547
  hyper
ttccaggccagcgcggaggccagactatcagtcactgaaatccaggcgagcatagtccgcctcctgggcaggatgattg

SEQ ID NO: 291549 - DNA, 59 bp, Homo sapiens; identical to SEQ ID NO: 238567
  chr16:55365833-55365892
  hyper

SEQ ID NO: 291550 - DNA, 112 bp, Homo sapiens; identical to SEQ ID NO: 204209
  chr16:55404803-55404915
  hyper

SEQ ID NO: 291551 - DNA, 38 bp, Homo sapiens; identical to SEQ ID NO: 204210
  chr16:55405244-55405282
  hyper

SEQ ID NO: 291552 - DNA, 138 bp, Homo sapiens; identical to SEQ ID NO: 204211
  chr16:55499096-55499234
  hyper

SEQ ID NO: 291553 - DNA, 142 bp, Homo sapiens; identical to SEQ ID NO: 204212
  chr16:55513539-55513681
  hyper

SEQ ID NO: 291554 - DNA, 129 bp, Homo sapiens
  chr16:55513947-55514076
  hyper
ggctcttgccaagcgtctaggtaagcctttggcaaacagctacaggggtcgtttttgctaatgtaggactttgggaacggtgctctggcacacaatttgggtaaacttatgcgcgcataaggatgggag

SEQ ID NO: 291555 - DNA, 160 bp, Homo sapiens
  chr16:55689618-55689778
  hyper
tggagagtctgtcactcgctccccgtggtgggagatcagaggcctggtgtccttgggagcggcgagcggtgctcggcgcaggatagaaagggagtgcgcgcccgagtcccccagatccctgggaacccgcgccaccctcccgcccctgcccatccccggc

SEQ ID NO: 291556 - DNA, 84 bp, Homo sapiens
  chr16:55690809-55690893
  hyper
cgtagtcggcttcgcagtggacctggccaacgtgtggcgcttcccctacctctgctacaagaacggcggcggtgagcgtggggt

SEQ ID NO: 291557 - DNA, 60 bp, Homo sapiens; identical to SEQ ID NO: 204213
  chr16:56225663-56225723
  hyper

SEQ ID NO: 291558 - DNA, 268 bp, Homo sapiens; identical to SEQ ID NO: 204214
  chr16:56225881-56226149
  hyper

SEQ ID NO: 291559 - DNA, 55 bp, Homo sapiens; identical to SEQ ID NO: 225070
  chr16:56227984-56228039
  hyper

SEQ ID NO: 291560 - DNA, 89 bp, Homo sapiens; identical to SEQ ID NO: 204215
  chr16:56228280-56228369
  hyper

SEQ ID NO: 291561 - DNA, 71 bp, Homo sapiens; identical to SEQ ID NO: 204216
  chr16:56228591-56228662
  hyper

SEQ ID NO: 291562 - DNA, 577 bp, Homo sapiens; identical to SEQ ID NO: 238573
  chr16:56390319-56390896
  hyper

SEQ ID NO: 291563 - DNA, 217 bp, Homo sapiens
  chr16:56642231-56642448
  hyper
tacactgtgtcctcccgctgcacccagccccttccgcgccgaggcgtccccgaggcgcaagtgggccgccttcagggaactgaccgcccgcggcccgtgtgcagagccgggtgcgcccggcccagtgcgcgcggccgggtgtttcgcctggagccgcaagtgactcagcgcggggcgtgtgcaggcagcgcccggccggggcggggcttttgcactc

SEQ ID NO: 291564 - DNA, 58 bp, Homo sapiens
  chr16:56659821-56659879
  hyper
atttcccagccctattacagagggtctctgggtttcaggaagtcgcattttaagttct

SEQ ID NO: 291565 - DNA, 69 bp, Homo sapiens
  chr16:56666592-56666661
  hyper
agcagtcgctccatttatcgcttgagatctccagccttaccgcggctcgaaatggaccccaactgctcc

SEQ ID NO: 291566 - DNA, 165 bp, Homo sapiens; identical to SEQ ID NO: 204218
  chr16:56671949-56672114
  hyper

SEQ ID NO: 291567 - DNA, 32 bp, Homo sapiens
  chr16:56677568-56677600
  hyper
ccgcctcctaccggcccgcctgttttttcgcc

SEQ ID NO: 291568 - DNA, 223 bp, Homo sapiens; identical to SEQ ID NO: 238578
  chr16:56691536-56691759
  hyper

SEQ ID NO: 291569 - DNA, 113 bp, Homo sapiens
  chr16:56701843-56701956
  hyper
gcatcccaaggcacagaacccgggcgtcccttaccagcggcacaggagcagttggggtccattgcaacccgaggcgagactagagttcccaagcgagaagggaagaggcagtg

SEQ ID NO: 291570 - DNA, 71 bp, Homo sapiens
  chr16:56702221-56702292
  hyper
tgccaggccttcccagcttccctgaggttgcctgctacacccgccccttggcgttccgcctaccccagtat

SEQ ID NO: 291571 - DNA, 122 bp, Homo sapiens; identical to SEQ ID NO: 204219
  chr16:56703438-56703560
  hyper

SEQ ID NO: 291572 - DNA, 237 bp, Homo sapiens; identical to SEQ ID NO: 10711
  chr16:56703621-56703858
  hyper

SEQ ID NO: 291573 - DNA, 72 bp, Homo sapiens; identical to SEQ ID NO: 204221
  chr16:56709742-56709814
  hyper

SEQ ID NO: 291574 - DNA, 97 bp, Homo sapiens; identical to SEQ ID NO: 238582
  chr16:56763915-56764012
  hyper

SEQ ID NO: 291575 - DNA, 67 bp, Homo sapiens; identical to SEQ ID NO: 204222
  chr16:57023303-57023370
  hyper

SEQ ID NO: 291576 - DNA, 360 bp, Homo sapiens
  chr16:57126699-57127059
  hyper
gcggtgagtggggcccgggcaggcggggcagcttggcgtgagtgcccaacttcggccttggggctgggctctttgatccagctgcgggtccgaaggaacccgggttccgcctcggggggctgcggcgctctagcccccgccgccagcgcgaacccggactccggcgcttcggtgactcagctccgacccggccacgcgggggcgccccgccggctcccggactgcggggaagggcgggcggggtccctggggaggggggcgccctcgggggtccgagcccagctgctttggggacccttccacccgccccgaggggcttggagggcgtacgggaggtggagacccgccgctgccgcagct

SEQ ID NO: 291577 - DNA, 95 bp, Homo sapiens; identical to SEQ ID NO: 238585
  chr16:57220055-57220150
  hyper

SEQ ID NO: 291578 - DNA, 230 bp, Homo sapiens
  chr16:57318149-57318379
  hyper
gtccgtgcgggaagcgccctaggggtacgcgcagcgcgtcggtgacagtgtgagcccgggtggggagcgcaaggttcgcgaaaaatgaacgcagcgccggagtccctcacccatcctggccggaccgggagcccccggccaaccccgtgggcccgcgcgtgctctcaccagctgcagcagcatgagcgccccgaggcgggagcgcacgaagcccaggtccgggcgcagcg

SEQ ID NO: 291579 - DNA, 206 bp, Homo sapiens
  chr16:57318412-57318618
  hyper
tgctggtccgcgtgctaactttcgacgggaactcggccatggcggctccgcttgcctcccgaggtcgctacggccgccgtcgccgcccctccagcggtgggtgccggctcccgcgccgcttttcccccaggctccggatccctgtgtggctccaggcgctgcaggaggcgtcggggctgggagcctggggcgccaggtgcggccga

SEQ ID NO: 291580 - DNA, 273 bp, Homo sapiens; identical to SEQ ID NO: 238587
  chr16:57481495-57481768
  hyper

SEQ ID NO: 291581 - DNA, 336 bp, Homo sapiens; identical to SEQ ID NO: 238588
  chr16:57496650-57496986
  hyper

SEQ ID NO: 291582 - DNA, 311 bp, Homo sapiens; identical to SEQ ID NO: 204226
  chr16:57519803-57520114
  hyper

SEQ ID NO: 291583 - DNA, 145 bp, Homo sapiens; identical to SEQ ID NO: 238590
  chr16:57570647-57570792
  hyper

SEQ ID NO: 291584 - DNA, 616 bp, Homo sapiens; identical to SEQ ID NO: 238591
  chr16:57769284-57769900
  hyper

SEQ ID NO: 291585 - DNA, 241 bp, Homo sapiens; identical to SEQ ID NO: 238592
  chr16:58035172-58035413
  hyper

SEQ ID NO: 291586 - DNA, 206 bp, Homo sapiens; identical to SEQ ID NO: 238594
  chr16:58059307-58059513
  hyper

SEQ ID NO: 291587 - DNA, 749 bp, Homo sapiens
  chr16:58059829-58060578
  hyper
cccgtgcaggaggcgcgcgctccgggcagcgcccggccccgggcatggacagagggagctgggcgcgcagggagcgccgcgggaccgggcggccggagcgctgagccagacaaaggctccggagttgcgcttgctctcgggagccgggccccaggcgctgggcgccgaggctgcggaacctcgccgggggcagctccggtcggccccctttcccgccggctggttccgagctcccggacctgccctgcccgcttctcctcgggcttgggaatttgccgaggcgacctaggcggctccggcggggaccgggagcccgaggtccgcggcgcgcctgccgggccaggagccagggagcgtcgcaagtttccaaggcgcgtgcgaggatccggcgtgcagtgttccgagctgggctgggcgccgagagcatgggcagcgacccgagcgcgcccggacggccgggctggacgggcagcctcctcggcgaccgggaggaggcggcgcggccgcgactgctgccgctgctcctggtgcttctgggctgcctgggccttggcgtagcggccgaagacgcggaggtccatgccgaggtaagacccccgccctgccctttggctgcgggctgggggcttggagggagaggcgccacgtccgcaggctgggacttggaggtggagggagcggagacgcgccccctgttctgggccgtggcggggaagcaagcggacttggcagtctgcccctccccagct

SEQ ID NO: 291588 - DNA, 366 bp, Homo sapiens; identical to SEQ ID NO: 204228
  chr16:58060638-58061004
  hyper

SEQ ID NO: 291589 - DNA, 193 bp, Homo sapiens; identical to SEQ ID NO: 204229
  chr16:58061107-58061300
  hyper

SEQ ID NO: 291590 - DNA, 144 bp, Homo sapiens; identical to SEQ ID NO: 238596
  chr16:58283895-58284039
  hyper

SEQ ID NO: 291591 - DNA, 124 bp, Homo sapiens; identical to SEQ ID NO: 204230
  chr16:58426260-58426384
  hyper

SEQ ID NO: 291592 - DNA, 45 bp, Homo sapiens
  chr16:58498724-58498769
  hyper
ggacccgcgccatggacctcttatttctgcgccctgtgacaatct

SEQ ID NO: 291593 - DNA, 212 bp, Homo sapiens
  chr16:58548939-58549151
  hyper
tccaggagccctctaggccacgccactctgaaacacacacgaaaactgctctgaacgaataccaccagtaaaagggttccatggccatcggcaacaaggggtcgagatcaggaggtcgctcgccgcccagttgcgtcgctcaccaccggccggccaccagaccctcggcttccgatccagaaaccgtattttgttcttgcacccagaccgca

SEQ ID NO: 291594 - DNA, 876 bp, Homo sapiens
  chr16:58549238-58550114
  hyper
gcactcgcagcgcgtgagtgcaattggagatcctggactcaagatgttttcatgaggaacgattccagcccgcggtaactccggccagtctgcagcgtggacgacaaaacaggcaccacgtggttccggcgccggggcggggccagagacgccggaagtgaccgcgcggtgcgccggcccgcgaggaaacgcgctcttagaccatggcgacccaggcgaagcgtccacgggtgagtggcgggcgcggggtccagccttttcctccgcgcctcaccccttctccgttcgcagaaccgtccgcctgcgccccctccgctccctcccgcgggtcccgcgcccctctccgctcgtcccctcctccacccaaagcccgttctgcgctcgcgccgcggtctcctgcagttcccagcggcctctctgggggtcggacctggtcactgcgcgcacttatctcaggtggcggggcccgtggacggcggcgacctggatcctgtggcctgcttcctgagctggtgccggcgggtggggctggagctgagtcccaaggtgagcgagcgagccggcgggcggaggacccgcggcggggcgcgggctgccctgaccagccctcctgctcaggtggcggtcagccggcagggcacggtggccggctacggcatggtggcccgggagagcgtgcaggccggagagctgttgttcgtggtgccgcgggccgcgctcctgtcgcagcacacctgctccatcggcggcctgctggagcgaggtgggcacggcggcgggctagggccctggggcggggcggggcggggcggggcgggcccggcccgcgaggccgcgccggggcgctcacacctgtgtcttcctcagagcgagttg

SEQ ID NO: 291595 - DNA, 76 bp, Homo sapiens; identical to SEQ ID NO: 204233
  chr16:62068387-62068463
  hyper

SEQ ID NO: 291596 - DNA, 404 bp, Homo sapiens
  chr16:62068548-62068952
  hyper
agcagctgatctgattagcagctcgggcgcgctaagggattgtcgaatcatgcctcctaaggaggaaactcttgtggaatcttcaggaaagggtggtaaagttgaaaggacctttcctccctcccgctgtcttggtgataagctctatcgtttaattggtgctgaagtgagcagctgccagcccgattttccattacggactaatattgtgcgtttgcaacaataaacaattaatgtggtttgatttcttacatttagcaacccaagcaaacagctgccatctccgctggtggaggcaaacggctagtccttgacatgccgccggctccgtgcctgcgggggaagggtcaaccgcaaggaaactttgaggattctgccagactgggtgggggaaggctctggtg

SEQ ID NO: 291597 - DNA, 676 bp, Homo sapiens; identical to SEQ ID NO: 204236
  chr16:62069435-62070111
  hyper

SEQ ID NO: 291598 - DNA, 458 bp, Homo sapiens; identical to SEQ ID NO: 127331
  chr16:62070245-62070703
  hyper

SEQ ID NO: 291599 - DNA, 401 bp, Homo sapiens; identical to SEQ ID NO: 204238
  chr16:65155276-65155677
  hyper

SEQ ID NO: 291600 - DNA, 205 bp, Homo sapiens
  chr16:65157317-65157522
  hyper
gtttgaaagggctagaggggaggagacgggcccaggagttaacggaaaaagaggccgaaaacggaagagaaagcttgggatcctgagcgcatggggaaggaaccccagtgcggggctaaggcaagagcggccgagccctgccctccagctcctggtcaccagcccgcgggtcccgagcgcccgcagccgcccgggtttccacacg

SEQ ID NO: 291601 - DNA, 185 bp, Homo sapiens; identical to SEQ ID NO: 238603
  chr16:66440409-66440594
  hyper

SEQ ID NO: 291602 - DNA, 764 bp, Homo sapiens
  chr16:66460620-66461384
  hyper
gcccagcctagcctcggtccaacctgtctggctgtccttccctgacacctcgtttgtctacccttctctgcacgtgtcagtggctccccgctcgcgtccgtgtgtcattccctacacacgcctgtgtgtcctcttcacacgtctgactggagcgtcggcctcccgcatttcccggcctcctcgccgccctgccccgcctgctgctgtgtgggtgtcgggctggctgtgcgcaaaggggcgcggctcggccctcccccgcacccgcgccccccgccccgcatctcggagtgacccgggccgcggcgccgcggtgctgaggcccgggagccgcgccgccgccgaggggggccggggccggtgacggtggcgtgggcggcggcgcggggacgacgggcggccgggcggggctgcggcagggcagggccagggccagggccggggcctgggaagccgccgccgccgctgcctcggcccgggatcgcgggcggctggtcggcccggctcgcctggccccgcctggcccgccccgccccgcccctgcgcgcccagcaggccgaagcgtagcggcgcgccccccgcgacgcccgagcccgagcgcagtggcctccgagcgggaaccggactgggagccggagccggggcgggaaccggagctggagccgaagctggagccggcactgcggcgcacggagcggagcgctgcagccaagccgagtaaggggcgtggggctgggcggcgcgggggaggggcgggcggggggtcc

SEQ ID NO: 291603 - DNA, 127 bp, Homo sapiens
  chr16:66461989-66462116
  hyper
ccgaggctgagtacgaggcgaggcggcaggcagctcaggctggctgcgcagcgctgagtggcaccgccgccgctccccaggggcagggcccaccccacacccggctgactctcgctgcccttcctcc

SEQ ID NO: 291604 - DNA, 49 bp, Homo sapiens
  chr16:66638026-66638075
  hyper
tttgcgcgcgcgcgcgcgtgtgtgtgtgtctgtgtgtgtgcctggagct

SEQ ID NO: 291605 - DNA, 569 bp, Homo sapiens
  chr16:66638452-66639021
  hyper
aagaaggtggagtctgcggaggccccaggccggggagggggcgggtcgggcccagcatcccccgcagccggggtccgagggggaggggcgggctggaggagcgggtgggggcggggcggggcgtggcggcgggggatgcgcccctgcgcgagccagtgtcgcctgccctccttccgcacagcccgggtttccgcttccctccgggcgcgagaagaggggagccaggccgagccccggccctaccgccgccgccgccatgtggcccccagaccccgaccccgacccggaccccgagcctgccggcggctcccgtcccggccccgcggtccccgggctccgcgccctgctgccggcgcgggctttcctctgctctctcaaaggccgcctcctgctggccgagtcggtgagtgcggcgggaccctcggccgccccgctaggactgcgcggctcctttcggaggaggacgtcggggcgcgggtggggtccgggggcggccgccgtgctccgataccccctctccgcgccgcctcggccgacttctctcgggcgcctggcgaagttgggtcgag

SEQ ID NO: 291606 - DNA, 316 bp, Homo sapiens
  chr16:66730083-66730399
  hyper
gctgcagagtggtcccgggaccccacgagggagagggggcgcgaggagcgggctccggcctgggcaagcgggtacgcggcggaggccccgcagcggggcggggagggaggcgtgcggctaggccgccctcgggcacctggggccccgcccggcacctaccacttgggcgaccttgaggcggccgagcgcgccgcgcaggtagtcggggtcgcagcgcaggccggccagcccgcggcgctggctcaccggctcggtggtgggctggtacgggctgctggcgcccgagatcatggaggtgctcgaggcctcgccctcg

SEQ ID NO: 291607 - DNA, 129 bp, Homo sapiens; identical to SEQ ID NO: 238608
  chr16:66914360-66914489
  hyper

SEQ ID NO: 291608 - DNA, 50 bp, Homo sapiens; identical to SEQ ID NO: 238609
  chr16:66914767-66914817
  hyper

SEQ ID NO: 291609 - DNA, 246 bp, Homo sapiens
  chr16:66959003-66959249
  hyper
tgctgccccgacggcgctcgcgctcctggcccccaccgcggctcccgcccgctccgctgccgccgccgttcagggtcatcgcgtccgggaccgtctaggggatcaggaacccgagtggccgtgtaagccgcgagggaggcgggacccggggcgcacctgcccaacccggagtcaggcgggatgctccggccgaggtcccgccgcagccctcccccagcccccaggtcgcggcgccctcacccggga

SEQ ID NO: 291610 - DNA, 180 bp, Homo sapiens; identical to SEQ ID NO: 238611
  chr16:66968462-66968642
  hyper

SEQ ID NO: 291611 - DNA, 203 bp, Homo sapiens
  chr16:67183854-67184057
  hyper
ccagtgggttcgcgcgccctccccaacttcgtcggccccgcccgagcctgcgcccctgggcacgcccagcaagaacacgcggcgcaccagcgccccctgcacgcgaccctccgcgccccacgtctggcgcacggcttggcgccgctcgaagtcctctgccaccgacttgacagcaataagcaggtccgggcggccaccgggtg

SEQ ID NO: 291612 - DNA, 130 bp, Homo sapiens
  chr16:67184512-67184642
  hyper
cggttgagccccttgcgttgttctcctcctcccggccgtgtcgcaccgccgggaccggcagcctgaagggacaagaagttcacccatgtagccaactcccccgcggcctcagctccggcccaggactgcg

SEQ ID NO: 291613 - DNA, 150 bp, Homo sapiens; identical to SEQ ID NO: 204242
  chr16:67189018-67189168
  hyper

SEQ ID NO: 291614 - DNA, 374 bp, Homo sapiens; identical to SEQ ID NO: 204243
  chr16:67189259-67189633
  hyper

SEQ ID NO: 291615 - DNA, 232 bp, Homo sapiens; identical to SEQ ID NO: 238613
  chr16:67193001-67193233
  hyper

SEQ ID NO: 291616 - DNA, 420 bp, Homo sapiens; identical to SEQ ID NO: 238614
  chr16:67194621-67195041
  hyper

SEQ ID NO: 291617 - DNA, 303 bp, Homo sapiens
  chr16:67197290-67197593
  hyper
tgcacgcgcgtccccgctgcccaacgaagcctgggtcgcgttgcgccgccgccaccctgggctggcagtggagctggagctggagcccgcgctgcccgctgagagcgtgacgcgcgtcctgcagccagccgtccccgtggctgcgctgcgcctcaacctctcaggcgacaccgtaggcccagtgcgcttcgcagcacaccactacgccgcaaccctgtgcgcgctcgaggtgcgcgcagccgcttcggccgagctgaacgccgcgctggaggagctggcggcgcgctgcgcggccctgcgcga

SEQ ID NO: 291618 - DNA, 270 bp, Homo sapiens; identical to SEQ ID NO: 204245
  chr16:67198282-67198552
  hyper

SEQ ID NO: 291619 - DNA, 59 bp, Homo sapiens
  chr16:67199532-67199591
  hyper
tgtgagtccctacggccgggcggggagcggggatgggggactcggtgccggggatgggg

SEQ ID NO: 291620 - DNA, 298 bp, Homo sapiens
  chr16:67204018-67204316
  hyper
ggctggcgcggggccgctgcaatctctgggaagcgggggcttctgggtcgcgctcagctctgcaatgcatgcgttctgtgatcctggtgagttggtatccttctctgaacttcctctgtgacaggcagagaagaggggtcgatgacaagatagatggaaagcacctggaaattggcaggccctgagtgggcgctggacgtgtggggccgcgggccgaactgccccctcctggcctcatctcctggtgcgccccgggtggggagggaaagctgactacatgcacgtccccagccagcgc

SEQ ID NO: 291621 - DNA, 504 bp, Homo sapiens
  chr16:67204317-67204821
  hyper
cggcctccgcggtgtggctcctagtgcccggggaagaaccctcaccctccctattcccagcagccctggccgccccgcccccgccgcagctgctgcacccacccccaccctgcccggccctttctgcaccgtcatctcctgccccgccgaggcttgacccgtgagtggggacgcccaaaacgggccagaccgggagccccactcccggctgtgggagggaagggaaaccgagattgggcagaatcagcgccccaccacccgctgcggcgctcgggggtcgggggggcggggtgggtaggactgtgggccccgccctgccgcaggactctcaagctctgggactgggtggagggaggtaaggggcggggggggaaaatccgtgcagtcgcacatgcgcaaaggctcttcactgtcccaagaccctggcttcctggccaaagagcccgcgcagcgaggtggggttgggggctgggacccagctccgtgccccgccacctggctctc

SEQ ID NO: 291622 - DNA, 152 bp, Homo sapiens; identical to SEQ ID NO: 238618
  chr16:67218041-67218193
  hyper

SEQ ID NO: 291623 - DNA, 101 bp, Homo sapiens; identical to SEQ ID NO: 238619
  chr16:67225901-67226002
  hyper

SEQ ID NO: 291624 - DNA, 105 bp, Homo sapiens; identical to SEQ ID NO: 204248
  chr16:67261057-67261162
  hyper

SEQ ID NO: 291625 - DNA, 215 bp, Homo sapiens; identical to SEQ ID NO: 204249
  chr16:67280008-67280223
  hyper

SEQ ID NO: 291626 - DNA, 74 bp, Homo sapiens; identical to SEQ ID NO: 204250
  chr16:67280819-67280893
  hyper

SEQ ID NO: 291627 - DNA, 457 bp, Homo sapiens; identical to SEQ ID NO: 204251
  chr16:67281140-67281597
  hyper

SEQ ID NO: 291628 - DNA, 149 bp, Homo sapiens
  chr16:67427472-67427621
  hyper
aggctgtctcggcgggagagtgaccaaggtcacgccggccccgcccacgaggccccgccctccccgagactctccgggagccgcatcccgcccctcccccgcaactccgcggtcctcgcgacggcgagaccagcgctctgcagttcggg

SEQ ID NO: 291629 - DNA, 95 bp, Homo sapiens
  chr16:67433472-67433567
  hyper
agccccgagcgaggcgacgaggagcgcgcgcgccctctgcaggcgctgcggggtgggtcccctggaggaggcagcgctcccgaagagctggggga

SEQ ID NO: 291630 - DNA, 131 bp, Homo sapiens; identical to SEQ ID NO: 204253
  chr16:67464693-67464824
  hyper

SEQ ID NO: 291631 - DNA, 345 bp, Homo sapiens; identical to SEQ ID NO: 238627
  chr16:67465267-67465612
  hyper

SEQ ID NO: 291632 - DNA, 201 bp, Homo sapiens; identical to SEQ ID NO: 225094
  chr16:67563142-67563343
  hyper

SEQ ID NO: 291633 - DNA, 65 bp, Homo sapiens; identical to SEQ ID NO: 225095
  chr16:67563576-67563641
  hyper

SEQ ID NO: 291634 - DNA, 145 bp, Homo sapiens; identical to SEQ ID NO: 225096
  chr16:67564103-67564248
  hyper

SEQ ID NO: 291635 - DNA, 219 bp, Homo sapiens; identical to SEQ ID NO: 204255
  chr16:67571279-67571498
  hyper

SEQ ID NO: 291636 - DNA, 467 bp, Homo sapiens
  chr16:67571536-67572003
  hyper
tggccccaggggaagcaggccgggtttgggggccaggagtgtgtgtttcgccgaagcggggtgggggtctgccgaggagctctccccgccgatgccggggtggaggcgcacgtccgtgactcagtttccaggtgggagcctcaggaaagaggagggggcggggcccttctcggcatcgcgcccagctctgggaatccccctgcctggagggcgccgggacgcccgggccggtgggggctgggggcagcaggtcacgctggcaggcggggggcgggcgacaaacccgcaccggctgggcctgtcgggcagctccgcagggctccgagcgtggccccgccccgccccgtgacctccttgggctcccggggtggggggccccgagctccgggtgccctggggggggaaatcgggggcagggctggggaggctgccccgcccccgggtaaacaggcgcttccgcacattct

SEQ ID NO: 291637 - DNA, 255 bp, Homo sapiens
  chr16:67678786-67679041
  hyper
ggcggggtggaagccgggggcaaggacccgctggaggcccgccacacccgcgaccctcccggccacgccactgcccaccccgacgtctaccctggcggagaagctcctgggcgacggggcgggcgggcaggtgggactcggcccccctcccacaaccccgctcccgggcaagctctcgagccgcgaggccggggcggggaggggccgggccgggggcggcctggcaggaagcggcgcgcaccttccgccgccgga

SEQ ID NO: 291638 - DNA, 119 bp, Homo sapiens
  chr16:67700713-67700832
  hyper
cttgtagtttcggccgagggtgggctccgcggtcgccggtttctcttcccagctctgccctcgcttgctggccggtctccggggtcagcgcggggccaccatccagccccttggggccc

SEQ ID NO: 291639 - DNA, 271 bp, Homo sapiens
  chr16:67701091-67701362
  hyper
gctggtgtccttattcccgtttcggtgtctaacgttaggtgttcagtgacggatccctatgtcctttgcccggccatggtgaccgatggcctgtgtgtcatctctagtgtccagtggcgggagaccagttcctggtgcctgcccatgaggcccgcggaacccagagtgaagaccagcgcccagcaggcgcagcttcggagtcggagctccaggaggaaggacccaagctgggggaggagcggcccaagccgcatgccggggcgctagagga

SEQ ID NO: 291640 - DNA, 164 bp, Homo sapiens; identical to SEQ ID NO: 238630
  chr16:67753296-67753460
  hyper

SEQ ID NO: 291641 - DNA, 84 bp, Homo sapiens; identical to SEQ ID NO: 238631
  chr16:67867774-67867858
  hyper

SEQ ID NO: 291642 - DNA, 39 bp, Homo sapiens; identical to SEQ ID NO: 204258
  chr16:67876117-67876156
  hyper

SEQ ID NO: 291643 - DNA, 378 bp, Homo sapiens; identical to SEQ ID NO: 238633
  chr16:67881198-67881576
  hyper

SEQ ID NO: 291644 - DNA, 92 bp, Homo sapiens; identical to SEQ ID NO: 238634
  chr16:67907296-67907388
  hyper

SEQ ID NO: 291645 - DNA, 66 bp, Homo sapiens; identical to SEQ ID NO: 204259
  chr16:67969396-67969462
  hyper

SEQ ID NO: 291646 - DNA, 109 bp, Homo sapiens; identical to SEQ ID NO: 204260
  chr16:67969492-67969601
  hyper

SEQ ID NO: 291647 - DNA, 35 bp, Homo sapiens; identical to SEQ ID NO: 238637
  chr16:67970754-67970789
  hyper

SEQ ID NO: 291648 - DNA, 76 bp, Homo sapiens; identical to SEQ ID NO: 238638
  chr16:68057151-68057227
  hyper

SEQ ID NO: 291649 - DNA, 155 bp, Homo sapiens; identical to SEQ ID NO: 204261
  chr16:68118915-68119070
  hyper

SEQ ID NO: 291650 - DNA, 72 bp, Homo sapiens; identical to SEQ ID NO: 204262
  chr16:68269813-68269885
  hyper

SEQ ID NO: 291651 - DNA, 112 bp, Homo sapiens; identical to SEQ ID NO: 204263
  chr16:68269896-68270008
  hyper

SEQ ID NO: 291652 - DNA, 105 bp, Homo sapiens; identical to SEQ ID NO: 204264
  chr16:68270022-68270127
  hyper

SEQ ID NO: 291653 - DNA, 146 bp, Homo sapiens; identical to SEQ ID NO: 204265
  chr16:68270157-68270303
  hyper

SEQ ID NO: 291654 - DNA, 637 bp, Homo sapiens
  chr16:68270867-68271504
  hyper
gcgagcgctctggccgatggggggctagcgttgagcgtgtgtgcgcgcatgcgggctgcagatcctcccttttccatcccgcacctacaacccaattgacagccccgcatttggggctcccattcctccctttgcccagtggagcttggtgaggctcctttatggcgcgtttcccggccgttccttactttcccaaactctcccagggaggtgactgagaaactgaataagtgactgagaaactgaataatccagcaggaaggagggggctccagcgtggcgggaactgagtcacgcggttgcctagcccgactcgagactgagacgggagccgcaccacgcgctttcggacaaggagggtgctgcggcccggcccctggacaatggagagagcggggcacccgggcgcatcaccagagctcatgcccgggaaaggggcgaggcccggggggagagagctcagcgtagctccacttggcagctaaagaaacaggcgcccgggacggaaatgactcgcgcccggacacggcgacagggagagcatgggaagtgcttccttcgcccggcgggttcgagcgagtagcactttactttccctacaggtggaggcgggccttggtgcgcggctgtccatctc

SEQ ID NO: 291655 - DNA, 57 bp, Homo sapiens; identical to SEQ ID NO: 204267
  chr16:68298829-68298886
  hyper

SEQ ID NO: 291656 - DNA, 566 bp, Homo sapiens; identical to SEQ ID NO: 238641
  chr16:68344575-68345141
  hyper

SEQ ID NO: 291657 - DNA, 810 bp, Homo sapiens; identical to SEQ ID NO: 53222
  chr16:68481955-68482765
  hyper

SEQ ID NO: 291658 - DNA, 116 bp, Homo sapiens; identical to SEQ ID NO: 204269
  chr16:68504292-68504408
  hyper

SEQ ID NO: 291659 - DNA, 91 bp, Homo sapiens; identical to SEQ ID NO: 225106
  chr16:68564224-68564315
  hyper

SEQ ID NO: 291660 - DNA, 218 bp, Homo sapiens; identical to SEQ ID NO: 238644
  chr16:68573158-68573376
  hyper

SEQ ID NO: 291661 - DNA, 315 bp, Homo sapiens
  chr16:68678667-68678982
  hyper
gttgtatccaattcagaaacgcggtccttcgggacctgctagttttataccccggaggatcctccccggcgggctggcacgggaggtggagaaagaggcttgggcggccccgctgtagccgcgtgtgggaggacgcacgggcctgcttcaaagctttgggataacagcgcctccgggggataatgaatgcggagcctccgttttcagtcgacttcagatgtgtctccacttttttccgctgtagccgcaaggcaaggaaacatttctcttcccgtactgaggaggctgaggagtgcactgggtgttcttttctcc

SEQ ID NO: 291662 - DNA, 178 bp, Homo sapiens
  chr16:68679166-68679344
  hyper
cgctcacctggcctcctcccgctggctcccgggggctgcggtgctcaaaggggcaagagctgagcggaacaccggcccgccgtcgcggcagctgcttcacccctctctctgcagccatggggctccctcgtggacctctcgcgtctctcctccttctccaggtactccacagcctcgc

SEQ ID NO: 291663 - DNA, 597 bp, Homo sapiens
  chr16:68679362-68679959
  hyper
cgctccctggggggcgggcggggtccgcatggggcagtggcgtcggggagagcgcggggctgcgctccctggggccaagggagtcccggaaggcccgtgaggaccctgcggtgtggggagtgcagggccgggcacgcctggacccagcctccttcactctctgccctcgggcgcaggtttgctggctgcagtgcgcggcctccgagccgtgccgggcggtcttcagggaggctgaagtgaccttggaggcgggaggcgcggagcaggagcccggccaggcgctggggaaaggtaagatcctcagggtggaaccgcagggtaggggccgcacgtgaccattttggtgtggaccgcgcgaggggtgttcgggccggggcaagggactcctggcgccacctcagttcccggggaggcgcagaacgcgcctcgggggctgggattgggggtggtggctgacggagaaggctgggcagcagagcgcctatgacatccagccccttgtccggtagccactgcttaccttgaccccctcctccgagatgccggatggctgagcccctcacccagtctcgacgtgggaagttctcccccgctggc

SEQ ID NO: 291664 - DNA, 198 bp, Homo sapiens
  chr16:68680067-68680265
  hyper
aaccgtgctttgtgtctccgacagacagaccgggtctgtttcttttctccgagcttccctaccccgccccccttcttcctcggcagctggaatgcactcttaaccctgctcttcccggagggcctgcgcccttgtagcctgcctggaaactgggccctggcacacctgggctggggccatcacgtacgggaaccaccc

SEQ ID NO: 291665 - DNA, 714 bp, Homo sapiens
  chr16:68771324-68772038
  hyper
ccttggagccgcagcctctcggcgctgctgctgctgctgcaggtaccccggatcccctgacttgcgagggacgcattcgggccgcaagctccgcgccccagccctgcgccccttcctctcccgtcgtcaccgcttcccttcttccaagaaagttcgggtcctgaggagcggagcggcctggaagcctcgcgcgctccggaccccccagtgatgggagtggggggtgggtggtgaggggcgagcgcggctttcctgccccctccagcgcagaccgaggcgggggcgtctggccgcggagtccgcggggtgggctcgcgcgggcggtgggggcgtgaagcggggtgtagggggtggggtgtggagaaggggtgccctggtgcaagtcgagggggagccaggagtcgtggggacgatcttcgagggaaggagaggggcatccgtagaaataaaggcacctgccatgccaagaaaggtcgtaaataggagtgagggtcccggggataagaaagtgaggtcggaggaggtgggagcgcccctcgctctgaggagtggtgcattcccggtctaaggaaagtggggtactggagaataaagacatctccaataaaatgagaaaggagactgaaagggaacggtgggctaggtcttgagggggtgactcggcggccccctcccgggagttcctgggggctcggcggccgtaggtttcggggt

SEQ ID NO: 291666 - DNA, 85 bp, Homo sapiens
  chr16:69139467-69139552
  hyper
ttaaagtcatcagcgccccactgcggaattcaaagctaagctgtcacaattgttaacaccttctttgaccagcctttttacattt

SEQ ID NO: 291667 - DNA, 963 bp, Homo sapiens
  chr16:69139582-69140545
  hyper
agcaggaaggttttgctgccttggctttcgggagccccctagacagcgaactgccccttcgcgtgcagaagtcggggaagagtgctctcagctcgccttccttgcagggtgagtaggttttgcgggttagagagcggggcgtgggggcggggagggagagtaacaattttggaagtccctgcgtggtatctggaaagttaacgacgcttcaggttctaggttgagcccaatgaccgtcttgccttggcagctggtcccagggcgattgcagagccgcgtggccttcggccccactcgggggacccagcttcggagagggcgcaggggctgcgagtcttgcgagccggagccgcgtccacccgggactaggcgtccccgccgagcgctggcttgtggcgctccctgggaccgcgcggggtcgggggtgcgcccgcgggggccctcccactctggtcaactttcccggccccagggccgggggaggcgcctctcctggcgggcacgcgccgggtacttaagggcggctcggctgggcaggcggcagtcggagcgcgcggcggcgcggagcggagcgggaggaggggcatggagccgccgcgggcctgctgagctccggagcgcggcagccggcggcacggtgagcgcgggccggccggcacccaggaggggagggccgcgcggggctgcgccgaggccggggcgcgccgggtggcaggggtgcctctcgccgagccccccgcacccggccagctcccagccctgcgggcgccgcgtccggcgcggggaggcgggttgggggcggcggcagccccgggcttcccggcggccgttcctgcagccccctccccactgacccctcctccctttcttcctgcatcctctcctcttccagcctcgcctccctcctccccggcggctcctgttttgtgaatgaattaggaggcggacgccggtgcggggctc

SEQ ID NO: 291668 - DNA, 86 bp, Homo sapiens; identical to SEQ ID NO: 238650
  chr16:69166893-69166979
  hyper

SEQ ID NO: 291669 - DNA, 89 bp, Homo sapiens; identical to SEQ ID NO: 204274
  chr16:69373055-69373144
  hyper

SEQ ID NO: 291670 - DNA, 205 bp, Homo sapiens; identical to SEQ ID NO: 238651
  chr16:69373484-69373689
  hyper

SEQ ID NO: 291671 - DNA, 255 bp, Homo sapiens; identical to SEQ ID NO: 238653
  chr16:69458315-69458570
  hyper

SEQ ID NO: 291672 - DNA, 117 bp, Homo sapiens; identical to SEQ ID NO: 238654
  chr16:69760286-69760403
  hyper

SEQ ID NO: 291673 - DNA, 94 bp, Homo sapiens; identical to SEQ ID NO: 238655
  chr16:70333388-70333482
  hyper

SEQ ID NO: 291674 - DNA, 64 bp, Homo sapiens; identical to SEQ ID NO: 238656
  chr16:70380544-70380608
  hyper

SEQ ID NO: 291675 - DNA, 457 bp, Homo sapiens; identical to SEQ ID NO: 238657
  chr16:70415351-70415808
  hyper

SEQ ID NO: 291676 - DNA, 376 bp, Homo sapiens; identical to SEQ ID NO: 204275
  chr16:70472227-70472603
  hyper

SEQ ID NO: 291677 - DNA, 361 bp, Homo sapiens; identical to SEQ ID NO: 238659
  chr16:70473302-70473663
  hyper

SEQ ID NO: 291678 - DNA, 337 bp, Homo sapiens; identical to SEQ ID NO: 204276
  chr16:70719172-70719509
  hyper

SEQ ID NO: 291679 - DNA, 788 bp, Homo sapiens; identical to SEQ ID NO: 204277
  chr16:70719541-70720329
  hyper

SEQ ID NO: 291680 - DNA, 119 bp, Homo sapiens; identical to SEQ ID NO: 238661
  chr16:70834931-70835050
  hyper

SEQ ID NO: 291681 - DNA, 33 bp, Homo sapiens; identical to SEQ ID NO: 238662
  chr16:70835271-70835304
  hyper

SEQ ID NO: 291682 - DNA, 52 bp, Homo sapiens
  chr16:71264524-71264576
  hyper
caactcacagaccccgccgccgctgaggggctccatacccagcttgaagccg

SEQ ID NO: 291683 - DNA, 130 bp, Homo sapiens; identical to SEQ ID NO: 204278
  chr16:71323303-71323433
  hyper

SEQ ID NO: 291684 - DNA, 31 bp, Homo sapiens; identical to SEQ ID NO: 238666
  chr16:71496369-71496400
  hyper

SEQ ID NO: 291685 - DNA, 929 bp, Homo sapiens; identical to SEQ ID NO: 204279
  chr16:71659878-71660807
  hyper

SEQ ID NO: 291686 - DNA, 141 bp, Homo sapiens; identical to SEQ ID NO: 238668
  chr16:71841910-71842051
  hyper

SEQ ID NO: 291687 - DNA, 141 bp, Homo sapiens; identical to SEQ ID NO: 238669
  chr16:71842652-71842793
  hyper

SEQ ID NO: 291688 - DNA, 187 bp, Homo sapiens; identical to SEQ ID NO: 238670
  chr16:71880267-71880454
  hyper

SEQ ID NO: 291689 - DNA, 249 bp, Homo sapiens; identical to SEQ ID NO: 238671
  chr16:72127405-72127654
  hyper

SEQ ID NO: 291690 - DNA, 208 bp, Homo sapiens; identical to SEQ ID NO: 238672
  chr16:72127870-72128078
  hyper

SEQ ID NO: 291691 - DNA, 208 bp, Homo sapiens; identical to SEQ ID NO: 204280
  chr16:72699010-72699218
  hyper

SEQ ID NO: 291692 - DNA, 334 bp, Homo sapiens
  chr16:73091551-73091885
  hyper
agcggcgcagccccgagcccccgggagcccctagtgtccagggcagagtcccctctgggcgctcgcggcgctgccagtggggcagggcggagagcgcacaggtagaggatcgcgcggccgcctcgccccctccgggaccccgtggctccgaacgggctcccgcgtcgccggcaagtcgagccccagcgcggaaggcgctcgcccggccagcggtggcggccgcggcagcagcagtggctgcgaccgcggcgactgctccgggccgggtgcgcgccccgcgcggctgctcagcccggggccccggcgcctctcggggtggggcaaagttgggggc

SEQ ID NO: 291693 - DNA, 217 bp, Homo sapiens; identical to SEQ ID NO: 53263
  chr16:73091900-73092117
  hyper

SEQ ID NO: 291694 - DNA, 166 bp, Homo sapiens
  chr16:73092380-73092546
  hyper
gcggcggcggcggcgggaaaaaaaaaagagggaaaagttgccacttacgcggttgcttctccggcggcggcggctgcagcggcgctgctggcgacggcggcggcggcgggagctggcggcgcttttaatcccgaaaagaggcgctcgggccgcggagcccatcaag

SEQ ID NO: 291695 - DNA, 49 bp, Homo sapiens; identical to SEQ ID NO: 204283
  chr16:73100590-73100639
  hyper

SEQ ID NO: 291696 - DNA, 37 bp, Homo sapiens; identical to SEQ ID NO: 204284
  chr16:74352126-74352163
  hyper

SEQ ID NO: 291697 - DNA, 161 bp, Homo sapiens; identical to SEQ ID NO: 238676
  chr16:74640802-74640963
  hyper

SEQ ID NO: 291698 - DNA, 213 bp, Homo sapiens; identical to SEQ ID NO: 204285
  chr16:74659412-74659625
  hyper

SEQ ID NO: 291699 - DNA, 166 bp, Homo sapiens; identical to SEQ ID NO: 204286
  chr16:74700794-74700960
  hyper

SEQ ID NO: 291700 - DNA, 79 bp, Homo sapiens; identical to SEQ ID NO: 225115
  chr16:74808949-74809028
  hyper

SEQ ID NO: 291701 - DNA, 231 bp, Homo sapiens; identical to SEQ ID NO: 238678
  chr16:74847108-74847339
  hyper

SEQ ID NO: 291702 - DNA, 40 bp, Homo sapiens; identical to SEQ ID NO: 204287
  chr16:75018963-75019003
  hyper

SEQ ID NO: 291703 - DNA, 45 bp, Homo sapiens; identical to SEQ ID NO: 204288
  chr16:75032744-75032789
  hyper

SEQ ID NO: 291704 - DNA, 363 bp, Homo sapiens; identical to SEQ ID NO: 225117
  chr16:75033799-75034162
  hyper

SEQ ID NO: 291705 - DNA, 90 bp, Homo sapiens; identical to SEQ ID NO: 238680
  chr16:75267942-75268032
  hyper

SEQ ID NO: 291706 - DNA, 51 bp, Homo sapiens
  chr16:75284495-75284546
  hyper
caacatcttccaggccgtaagcccctcaccccgcacccctaggcaaatctc

SEQ ID NO: 291707 - DNA, 66 bp, Homo sapiens; identical to SEQ ID NO: 53281
  chr16:75284629-75284695
  hyper

SEQ ID NO: 291708 - DNA, 41 bp, Homo sapiens; identical to SEQ ID NO: 204290
  chr16:75285013-75285054
  hyper

SEQ ID NO: 291709 - DNA, 110 bp, Homo sapiens
  chr16:75285279-75285389
  hyper
tccggcaggaaatgccgctcgcttaaccccttccagcccgctgccgcctccaagcccgtacgcggcccggccccacctggcgccctcaccaggtggttcatggtgtccgg

SEQ ID NO: 291710 - DNA, 306 bp, Homo sapiens; identical to SEQ ID NO: 53284
  chr16:75285434-75285740
  hyper

SEQ ID NO: 291711 - DNA, 244 bp, Homo sapiens; identical to SEQ ID NO: 238684
  chr16:75299145-75299389
  hyper

SEQ ID NO: 291712 - DNA, 307 bp, Homo sapiens
  chr16:75299751-75300058
  hyper
gggcctggcgggcagcggcgccagcgggctgggggctcgggtccgcccgcgccgctcagaggccccgcgaggggtcccggcgctttccggctcctccggctcctgagcgttcccggacgccggactgtccggccgctccagccgcgccgcgcatgcgccgcccgcgccgccccccccaccgtctccgcggccagggacgcgttaaaggtgaggaccccggacctaggcctttttctgtcggcccaacgcggcggggaggcgcggtctcctccgctcctcgccgatccctcgcgggccacctccagtc

SEQ ID NO: 291713 - DNA, 176 bp, Homo sapiens
  chr16:75529727-75529903
  hyper
agtgtcccaactgggaagagcggagagaccaggtggccttaggagctgggtccgcagcttttcccctcctcctgcgcattccctgccctagcctaggcccagaggcgcaggttcatagcaggtccagataaagacatgatacgtttcaataaataagatatttccggccagggctg

SEQ ID NO: 291714 - DNA, 84 bp, Homo sapiens; identical to SEQ ID NO: 204294
  chr16:75600000-75600084
  hyper

SEQ ID NO: 291715 - DNA, 68 bp, Homo sapiens; identical to SEQ ID NO: 204295
  chr16:75681563-75681631
  hyper

SEQ ID NO: 291716 - DNA, 125 bp, Homo sapiens
  chr16:76311036-76311161
  hyper
cagaaggctccaccgccttgtcccttcccccactcacacctccagctgggagaaaagggttaaggattattggaaaatagaagagaagggagggagccccaaggaggcccacgaacgggaggccg

SEQ ID NO: 291717 - DNA, 79 bp, Homo sapiens
  chr16:76311202-76311281
  hyper
ggaaggaaggatgctgctgccaatttgtgggaccgctgctgcgaggagtgggcgtggcctcggcggtgtggatgcttgt

SEQ ID NO: 291718 - DNA, 122 bp, Homo sapiens; identical to SEQ ID NO: 238690
  chr16:77224184-77224306
  hyper

SEQ ID NO: 291719 - DNA, 82 bp, Homo sapiens; identical to SEQ ID NO: 204296
  chr16:77246930-77247012
  hyper

SEQ ID NO: 291720 - DNA, 204 bp, Homo sapiens; identical to SEQ ID NO: 204297
  chr16:77247511-77247715
  hyper

SEQ ID NO: 291721 - DNA, 95 bp, Homo sapiens
  chr16:77469120-77469215
  hyper
ggagtgatagggagggagggaccgaccgccatgagaaggaggggagcgcccagggtcaggcttggaaaacgtaatttaagcgcactgggagatga

SEQ ID NO: 291722 - DNA, 255 bp, Homo sapiens
  chr16:77747179-77747434
  hyper
actcatgctattctcgcgatctttccgctaatagcagtcaatcacagtggctgtacattctgtgtgtacaccctgtgatgttacgcaggataccctcgcaatctttttactaatatctatcaatcacaatggctgcacaccctgtgtgtacaccctgcgtgtataatctgtgatattatgcatatttatgcatagtatcctcacgatctttttgctaatgtcacagtaagtgtacacctgcgatattaactatgg

SEQ ID NO: 291723 - DNA, 744 bp, Homo sapiens; identical to SEQ ID NO: 204299
  chr16:77756211-77756955
  hyper

SEQ ID NO: 291724 - DNA, 49 bp, Homo sapiens; identical to SEQ ID NO: 204300
  chr16:77822068-77822117
  hyper

SEQ ID NO: 291725 - DNA, 44 bp, Homo sapiens
  chr16:78139958-78140002
  hyper
aaagtgctgggattacaggcgtgagccaccgtaccccgccactc

SEQ ID NO: 291726 - DNA, 343 bp, Homo sapiens
  chr16:78322868-78323211
  hyper
aagcaaaactaacacgcagtgggaaggttctgcttttctcacaaattctcggttaacacaaggcgtgccaacagctggtagagcgagagtcagggtgccaggctgaaatggagtggaaggcagccctggctggaagtcttgctgggaacctggagcgctgggaggtaaaactttacttggtgctggcagcgtcactatgccagtctgtttcttcccgagcttcaggccatgctgatgttcaagttgaataaatgagagctaatgattttttaaggcgtttttagtgaattgccgtgggaatgctaagttggcaagaataaaacctaggcgaggagagttgatt

SEQ ID NO: 291727 - DNA, 32 bp, Homo sapiens; identical to SEQ ID NO: 225129
  chr16:78425003-78425035
  hyper

SEQ ID NO: 291728 - DNA, 108 bp, Homo sapiens; identical to SEQ ID NO: 238695
  chr16:78804565-78804673
  hyper

SEQ ID NO: 291729 - DNA, 125 bp, Homo sapiens
  chr16:79623477-79623602
  hyper
agggttcctggggccgcgatcgggtggagtgagggggtctcaaggtgaagggcggagccttgcgggaccgagtcttgctccctccctccaggcgcccgcccacccaggagagcggcgcaccgggg

SEQ ID NO: 291730 - DNA, 179 bp, Homo sapiens; identical to SEQ ID NO: 204301
  chr16:79633613-79633792
  hyper

SEQ ID NO: 291731 - DNA, 491 bp, Homo sapiens; identical to SEQ ID NO: 204302
  chr16:79633843-79634334
  hyper

SEQ ID NO: 291732 - DNA, 394 bp, Homo sapiens
  chr16:79634364-79634758
  hyper
ttggctctctttattattttttttctttcctctctctccctcgcgcgctctctacctctgtgcaaagtgcaaggcagaggtgcagcccgactggaggagagggaggggggagtttagttctttcttgcctttttttaaaaaagcaaaatagcgaagtcctggggaaagacgaggcagagagcaaaggggggagggggaggccaagccgacaagcagcccgagctacagctagaagatgaaaaaagattttaaagcctctgatccagcaagaagagtttaaagcaattgctgagttttatagcactcgtgacgtcaggtccaaatgagaaattgactggcactccgggccaatgggaggcggcgagagcggccgcgattagcataatagtataga

SEQ ID NO: 291733 - DNA, 93 bp, Homo sapiens
  chr16:79635694-79635787
  hyper
gggggaaaaacaataccccagccctcaccagctaccctcgaagggttaaattttaaaccgcggtttctggaactagtccggaaacgcagagtg

SEQ ID NO: 291734 - DNA, 103 bp, Homo sapiens; identical to SEQ ID NO: 204305
  chr16:79636191-79636294
  hyper

SEQ ID NO: 291735 - DNA, 91 bp, Homo sapiens
  chr16:79804151-79804242
  hyper
gctcagcgtgtgtgcgtgtgtgcgtgtgttcaagggctgggggctcaattgtgagaggtggcccaggggccggttagagactgggaaggac

SEQ ID NO: 291736 - DNA, 101 bp, Homo sapiens
  chr16:79804457-79804558
  hyper
cgcgcccccagccccgccccgccttaaaaaaaaaaaaaaaaaagaagaagagaaagagccgccgggagaagcgcggacgccgccgcttcccgggctccagc

SEQ ID NO: 291737 - DNA, 212 bp, Homo sapiens
  chr16:79804596-79804808
  hyper
cgccattggtccatccgcctagcaacagccgcggccggaccaatgggagccgcgaagcggccggccccgctccagaaacttggctgcggagaagttcgctgtcccagccaggaaaacaaaccaagagacccttcacaccccagccctaagttttctttcttaccctgcctaccctccccctttccctttgcaacttgtcaccattcccagct

SEQ ID NO: 291738 - DNA, 70 bp, Homo sapiens; identical to SEQ ID NO: 204306
  chr16:80574538-80574608
  hyper

SEQ ID NO: 291739 - DNA, 93 bp, Homo sapiens; identical to SEQ ID NO: 204307
  chr16:80575052-80575145
  hyper

SEQ ID NO: 291740 - DNA, 538 bp, Homo sapiens
  chr16:80837424-80837962
  hyper
gggggtgagggaggtggcccggggaccccggggagcggtttggcggttgtccccccgaacccccacccagcctcccccttcgcagccccccgggaccccgcctcgccccggccaggctccgctccgatcgcccgcccccctcctcccccgcgcccccggcccagccgggccgcgcaacccccgccccacacccccgccggccgcggcgcgcccccccgcattcccagcacgtccggcgccgacttttacctgtactttctgtactcgaggcggctcgtcgggcgagaaacacctccccgggaccgctacctcccccgccccggctccgcccggcttcctccttcccctccaaggccgcaaagtagatggagtaagagagtgtgtgtgcgagagaaagagaaagagggagcgggcgcgggcgccgcgggaggcggcgggcggcgggcggcgggcgggaggcgcgcccggcccccgccaccctccggccgccgccgccgccgccgcgggctcggcaactccggattgcgcccggccccgg

SEQ ID NO: 291741 - DNA, 776 bp, Homo sapiens
  chr16:80838193-80838969
  hyper
tgttgagtaaactgtgtttttgcagaatgacaggcttgggggctgcctatgcgcagaatcagagcgggcggcggcggggctggcgtaaccggcagcagcggcggcggcggcggcggcggcacgagcgcgggcagcagcgacggccgcgcagcgcgcccgggaggcacggacgcggcccgagcgccgcggcccccgcgacccggcgacccggcggcggtggctgcagccggcaacggctcgccccggcgccgcctgcaggaagccgcccggcgcccgccgccggcccggacgctgctgccactgggcgagtccccgccccccgggagcccggcccggcccccggggcggggaggcgggggctgctgcccggccgcgccccgggggaccggtcccagagtcgactagcgctcgggcccgccccgccaccccgggccggcttcgggagcagctggcggggcccccggggggcggcgggccaggtgcccgccgggtgcgcccgatctggggccgcgaaggggcggccggggagccaggtagagggctgcggctgcagacctcagggaaggggccccagccgagccccgccggcccggggtccccacctacctcctccaccctcgaggggagtggacgccgcctgggagacctggcccctcggggctgcgcggcccctccctccaggctgggttgtaagatgtggaggccacagggaggaaggatgaaatggcccatccagaggcaccatggggatccaggacaggcgtggccaccccata

SEQ ID NO: 291742 - DNA, 396 bp, Homo sapiens
  chr16:80966003-80966399
  hyper
gggggccaggggagcgggggagtcggcagcgccgcctgggacagagcttgccgcacgctgacctactttctggggccgatgtgtttgcagccagaggtaccgcggagccaagcccggagcctcggggagccgccagcgagcgcagactgggagggagccggccgggctccccgccaccccttcctccgcgcgccaagacctgtcagtttcacccagcccggcttccctggaaaggcgggatccctctgcagatttccaggctcttggaagaggaccggcgcgtctattaaacccgagtcgctccacgggctctccgcccagagcacaagctgccttcccccgggaactggacctcggcagcggcctgcgcagagccgggctccggggccctggccg

SEQ ID NO: 291743 - DNA, 74 bp, Homo sapiens
  chr16:80966431-80966505
  hyper
ccagagggagaaccaccaggaggccgcgcgcgcgcacacgccgggcgccctcctcgtgccgaggtggaaagagc

SEQ ID NO: 291744 - DNA, 301 bp, Homo sapiens; identical to SEQ ID NO: 238705
  chr16:81039731-81040032
  hyper

SEQ ID NO: 291745 - DNA, 132 bp, Homo sapiens; identical to SEQ ID NO: 204313
  chr16:81040580-81040712
  hyper

SEQ ID NO: 291746 - DNA, 445 bp, Homo sapiens; identical to SEQ ID NO: 238707
  chr16:81110796-81111241
  hyper

SEQ ID NO: 291747 - DNA, 126 bp, Homo sapiens; identical to SEQ ID NO: 238708
  chr16:81130106-81130232
  hyper

SEQ ID NO: 291748 - DNA, 35 bp, Homo sapiens; identical to SEQ ID NO: 238709
  chr16:81348358-81348393
  hyper

SEQ ID NO: 291749 - DNA, 214 bp, Homo sapiens; identical to SEQ ID NO: 238710
  chr16:81348862-81349076
  hyper

SEQ ID NO: 291750 - DNA, 75 bp, Homo sapiens; identical to SEQ ID NO: 204314
  chr16:81779773-81779848
  hyper

SEQ ID NO: 291751 - DNA, 134 bp, Homo sapiens; identical to SEQ ID NO: 204315
  chr16:81780013-81780147
  hyper

SEQ ID NO: 291752 - DNA, 161 bp, Homo sapiens; identical to SEQ ID NO: 204316
  chr16:81812592-81812753
  hyper

SEQ ID NO: 291753 - DNA, 155 bp, Homo sapiens; identical to SEQ ID NO: 238713
  chr16:82204032-82204187
  hyper

SEQ ID NO: 291754 - DNA, 275 bp, Homo sapiens; identical to SEQ ID NO: 204317
  chr16:82660904-82661179
  hyper

SEQ ID NO: 291755 - DNA, 38 bp, Homo sapiens; identical to SEQ ID NO: 204318
  chr16:82661795-82661833
  hyper

SEQ ID NO: 291756 - DNA, 122 bp, Homo sapiens; identical to SEQ ID NO: 238715
  chr16:83986688-83986810
  hyper

SEQ ID NO: 291757 - DNA, 50 bp, Homo sapiens; identical to SEQ ID NO: 238716
  chr16:84151074-84151124
  hyper

SEQ ID NO: 291758 - DNA, 177 bp, Homo sapiens; identical to SEQ ID NO: 238717
  chr16:84179011-84179188
  hyper

SEQ ID NO: 291759 - DNA, 128 bp, Homo sapiens; identical to SEQ ID NO: 204319
  chr16:84328194-84328322
  hyper

SEQ ID NO: 291760 - DNA, 282 bp, Homo sapiens; identical to SEQ ID NO: 204320
  chr16:84401741-84402023
  hyper

SEQ ID NO: 291761 - DNA, 817 bp, Homo sapiens; identical to SEQ ID NO: 204321
  chr16:84650976-84651793
  hyper

SEQ ID NO: 291762 - DNA, 61 bp, Homo sapiens; identical to SEQ ID NO: 238720
  chr16:84733968-84734029
  hyper

SEQ ID NO: 291763 - DNA, 204 bp, Homo sapiens; identical to SEQ ID NO: 204322
  chr16:84853661-84853865
  hyper

SEQ ID NO: 291764 - DNA, 91 bp, Homo sapiens; identical to SEQ ID NO: 238722
  chr16:85045410-85045501
  hyper

SEQ ID NO: 291765 - DNA, 97 bp, Homo sapiens; identical to SEQ ID NO: 225138
  chr16:85143894-85143991
  hyper

SEQ ID NO: 291766 - DNA, 844 bp, Homo sapiens
  chr16:85202555-85203399
  hyper
tgaatcatcgcgcgcggctccggctggacacaaaatagatagaggagccggccgctattgtgcgcagtttgggacgcggggggaggcggcggcgggcgggagggaggcaggcttggaggaggagggcggggggagggagcgcgcggggagggattcccccgcccgccgcgcgcccgccctccgcccctccccgcccctcccgcccgccgccgccccgccccctcctccccaattaaatgaccccacgccttggcaggcgccggagctcgcacatgcggctgccgctccagccgcccgggccccgccgccgccgccgccgccgccgccgccgccgccgcgttccgggcgcgctcgccgcggcgccgcctcggcccgcgccgccgccggggggtgctcggcaggcccgggggggcgccgctgcgaggggccgtgcgcccgcgcccgcgccggccgcccgccgccaaactttgcggcgcgcacacatgctccaagttgggcgcggcggcggcggcctgggcgggagctgagggcggcccggggcgcgcgggggcccgggcgggcggcgcggcgcggccatgagcgggcggccggccccggtctcccgcaagcagcggctcatggcagccgtgggcgagcgggctgcgggcggcgcgccgctctcctgcttcatctgcggcggcggcatcgggcgcggcaaggagctgaagctgcaggtgaagcagccggcggcgggcgcggggaccccggcgcagcccttcttcccgttcctgcagcagcaggagccggcgcccggcgcgcgcgagctgtccccggccgacggctgcgtgttggtgtgcgccgtgtg

SEQ ID NO: 291767 - DNA, 106 bp, Homo sapiens
  chr16:85203606-85203712
  hyper
ccggctgcgcggggccgcggaggagacgcgagactccgacctgtcggagctgtcggacaccgaccccctttccgagcccgacccgcccgcgcgggacgccgccagc

SEQ ID NO: 291768 - DNA, 151 bp, Homo sapiens; identical to SEQ ID NO: 238725
  chr16:85205738-85205889
  hyper

SEQ ID NO: 291769 - DNA, 110 bp, Homo sapiens; identical to SEQ ID NO: 204323
  chr16:85482269-85482379
  hyper

SEQ ID NO: 291770 - DNA, 1060 bp, Homo sapiens
  chr16:85589833-85590893
  hyper
gcgccgtggcttgaacggtgctttttgttcattcctgggttttaatattattttccttcttcatccctctctggccactatggaattctaatttgaaccatgtttggattgaagccgcctctgtattacttaccaggtaagcgagccgtgcgcctccctgggtcccgcgcggcgccggcgcgcccgggaccctccctcacccgacccccctccgccagacccccgagccagggtcggggcattgggtccgccggtgccccccgcagacgcgcgcggcctcggatcctcccgctgcggtcaagcccgcggtgtgcgcggctacgtgcggcggggagcgcccacctggcccgccgcccccatcgcgccgccgccgggggttgcgcgtctcgctccttttgtctgccgggagccggctccgccgcggcggcggagcgagcggccgaggcacttaaaccttccaaggtgaagtaagcgccgagtgtgaagttactttcctgcaggccgccccgatcgggtagcatgccccccccccccccagtcctggggtttatttccctctccctccagccaacccccttgcgcggtctcggcgcgagcgtggctcgccggcccccccgccgccccccttcctgcctgggattccctggaaggttttgttccgccgaggtcggaggagggggccggggaagctcaggagggtatttggcgtggcttcctgtttccttaaccttcctgcgcggtgacagccgcttgccctgtaactttctgtttcggggcaagtcgcgctttcagcctggaggggaggggaggggagggggttgacagctggaggtttggggagcccctcctgaattcaccttatttggatttctaaaccttaaaaaaaattaagtgtaggctacatggaagctggtgatccaggaattcaggcgagggagccctgggtggtgaaccccagggttcttccccaccgcgcgccgtcacccccactcctgtgccccctggggtcggggagaaacgcacaggcctgccccaggtggggccacgtgacgcaggtcag

SEQ ID NO: 291771 - DNA, 111 bp, Homo sapiens; identical to SEQ ID NO: 238729
  chr16:85645214-85645325
  hyper

SEQ ID NO: 291772 - DNA, 444 bp, Homo sapiens; identical to SEQ ID NO: 238730
  chr16:85722385-85722829
  hyper

SEQ ID NO: 291773 - DNA, 178 bp, Homo sapiens; identical to SEQ ID NO: 204326
  chr16:85932120-85932298
  hyper

SEQ ID NO: 291774 - DNA, 208 bp, Homo sapiens; identical to SEQ ID NO: 238731
  chr16:86273134-86273342
  hyper

SEQ ID NO: 291775 - DNA, 95 bp, Homo sapiens
  chr16:86320170-86320265
  hyper
ccccacgcgccccccgccccttcgcgcaccgaggtcgtcctgcgtctccgggatcccaggccagcgggaggaggggccgcaggggcgctgcgggc

SEQ ID NO: 291776 - DNA, 49 bp, Homo sapiens; identical to SEQ ID NO: 204327
  chr16:86321068-86321117
  hyper

SEQ ID NO: 291777 - DNA, 439 bp, Homo sapiens
  chr16:86334431-86334870
  hyper
caaataggattttgtttccccgacgtccaggctgagtgcagccagatgggatgacttgacaaagtcacaaacgctgacaaatcccggcgggggagttgtggcttcctccaaaggaaggtaggtctgtgtttgtcaattgatcagctcagcggtggccctgagtgaggccgtgaggaaagtaactccgtagttttaattctgatgattacttcctgaaaaaggaccctgcaatggtgggtccaacctcctccttccctccgtctctgccagtcgctcggtctctgtctgtgctcccctccagctgcctgtccctccccctcaatgggggcttaggggcccagctcaccactcacgctcccacaacgtccagcgtccatgcctgcagcctgtttcctgggaatttcagtccatgtggagcaagaggccagtctcctgctct

SEQ ID NO: 291778 - DNA, 243 bp, Homo sapiens; identical to SEQ ID NO: 53421
  chr16:86531701-86531944
  hyper

SEQ ID NO: 291779 - DNA, 562 bp, Homo sapiens; identical to SEQ ID NO: 127698
  chr16:86532408-86532970
  hyper

SEQ ID NO: 291780 - DNA, 284 bp, Homo sapiens
  chr16:86542673-86542957
  hyper
tgcgctttgaaaacggggccgcggggccaaataggcgggttttcagtgtgtgttgggggtgggggagggcaactgaactacgtgtgagttcagatccgagcgtggcgtgtgtacgcgtgagtgggagtgagtgcgaacttaagctcctgtgggccttaagcttccgtgtcaacgagtgcattagtgggtgcgcacatgcctgagcgccctctgcatatgagtgtgcacacacgcatgggtgtgtttacacgtctgtttgcgtaatttaccgggtttgcatgtgc

SEQ ID NO: 291781 - DNA, 259 bp, Homo sapiens
  chr16:86543364-86543623
  hyper
gctacagggctgtgcgcgtcggggaaggccccggcccagggagcgtttcccgccgcgccgcccgggcggggaaggcggggtccagcgcgcaccggggctgaaccgcgggcggagggcgcattaacacttgctcgccaggttggtggaggcggggcggattctgctggcggccgcggggcggcgagagtgggggctctttaagcgcccaccaacgcgggggcccgaggggggcagggacggagggagggaactccgggag

SEQ ID NO: 291782 - DNA, 352 bp, Homo sapiens
  chr16:86543822-86544174
  hyper
ctgccctcggcctcagctcggctcctttccttgtgggagggcgagaaagaaagagggaggagagaggtgggggaggcgggagttggagagagaggggctctgagccaaccgccggcggatccagcagctcctcggggagggcgggcgggagcgcgggggcgggcgcgccgcggctcgctcgggagaagtggccgccgatgacggcagaggtgcagccagccccgcgcgcgcagccccctccccttcgccctcctcccccccgtcgtcctcttcctcctcctcctcctcctcctcccggcccgtccgcggcgcagagcagcggcggcagcggcggcggcggcagcagccaccc

SEQ ID NO: 291783 - DNA, 53 bp, Homo sapiens
  chr16:86549503-86549556
  hyper
gttgcgcgtggctttggcgccgctggactagcgtccagggcggcggcaaagcc

SEQ ID NO: 291784 - DNA, 88 bp, Homo sapiens; identical to SEQ ID NO: 53433
  chr16:86549624-86549712
  hyper

SEQ ID NO: 291785 - DNA, 112 bp, Homo sapiens; identical to SEQ ID NO: 238742
  chr16:86597561-86597673
  hyper

SEQ ID NO: 291786 - DNA, 77 bp, Homo sapiens
  chr16:86602514-86602591
  hyper
attaaggggctgcagagacgcaaaaaagaaacaaaacatgtccaccaaccttttctcagacccgggagcagagagcg

SEQ ID NO: 291787 - DNA, 413 bp, Homo sapiens
  chr16:86609633-86610046
  hyper
gagcggggctggggcgcaaagccggagttctacagctgaaacctcccggagactttgcacacttctgcaaacgcgcggggctgggtgtgcgtctccaaaccgcgactagagcgtgggcatttgttttttgttttttggtttttctctctctctcctaatctctctctgtctctttctcgctctcttttttttttttttttttttgctttactatcggtgccccgcccaccagcctcccgtgtctccgcccacgtcccgcccattaccaaatcgggcagtatttatcaccgtacaaattcaagctcggatttgccttagagtttagaagacgcgccgggacggcgggagtttcggtagaggcagggatgtgcgtgctggacttcgggtgccgcgtggggagctccaggaggggc

SEQ ID NO: 291788 - DNA, 237 bp, Homo sapiens; identical to SEQ ID NO: 238749
  chr16:87350811-87351048
  hyper

SEQ ID NO: 291789 - DNA, 467 bp, Homo sapiens
  chr16:87417701-87418168
  hyper
gctcggcgaccacttcgcgccgcggcttttgtggagataggggtcgcccctcgcgcccgtgcgtcccgcttccggcgcccgaaactgtgccgcgccggccggtgagtagaaagatgcgccttacagcctccaaatacagaggcagcagccagaaccccaaagggcgcctagaagcccttttgtccattgaaacaacgcgcgttccatcgtctccgccttatggtaaccaaaaggcccgagctgcggagctctgcagggaccttcggggatcccgagctccctgcggaagccccggggagggcttggaggggcggcggccggcgcggcccaagagatccggggatgcgcgcccggtctggaaagggaggccctgccatgcggcgccgcccaaagggcgcctgttcctgcagctgctgggagccgcgcacgcctgctccagctgggctccgccgaggccgctgagcggg

SEQ ID NO: 291790 - DNA, 64 bp, Homo sapiens; identical to SEQ ID NO: 204330
  chr16:87418200-87418264
  hyper

SEQ ID NO: 291791 - DNA, 800 bp, Homo sapiens; identical to SEQ ID NO: 204331
  chr16:87525701-87526501
  hyper

SEQ ID NO: 291792 - DNA, 523 bp, Homo sapiens; identical to SEQ ID NO: 204332
  chr16:87526561-87527084
  hyper

SEQ ID NO: 291793 - DNA, 183 bp, Homo sapiens; identical to SEQ ID NO: 238751
  chr16:87577567-87577750
  hyper

SEQ ID NO: 291794 - DNA, 279 bp, Homo sapiens
  chr16:87635461-87635740
  hyper
caagatacacgcgtgtgtcccgactctcactcaatttataggggagagggactcgccaaatccctgttttctggggtaagcccccctccccccactcttggacccaagctgcccggaaggaagaaggaagcattgtttgtcaccggagaaaaccacctgtggtttgcaaagggcctcagtcgagtcaggggcaggcggggcagatccgagcccggcgggaggggcgaggcgcgggggcgggcaggggcgagggtaggggcgctcagctggcaggtcctg

SEQ ID NO: 291795 - DNA, 144 bp, Homo sapiens
  chr16:87635827-87635971
  hyper
tttaaatcccactcccggagggggcgggggcgccccggctggaccccggtttccagtccggcgggggccccggggaagcccagggcggggagcgcggggctgggggcgcggagggcggggcgcccggggtccccgcccgcgcgc

SEQ ID NO: 291796 - DNA, 189 bp, Homo sapiens
  chr16:87636008-87636197
  hyper
cgccgcgctccgggggcgggggcgggggcgggggcggggggcggggggcggggggcgggcgggggcgcgcgggcgggcggggtgcgggcgcgcgccgcgcggcccgagcgcgcgagccgggcccggagcgcacgccgccgccgccaccgccgccgccgccgcccgagccgccgcattgctgctgctgct

SEQ ID NO: 291797 - DNA, 221 bp, Homo sapiens
  chr16:87637320-87637541
  hyper
acagtgcccctgtgccagctgaagggtgttgggggctttccaggggcagagccaggcggggcccagcagagcctccgtgcgtcggacacagcaggccggagacctgcgggaagggccaggctgggcccgcggccctggggaacccagcaagggcagagggggctgggagaagggcccctccccttgttggctttgccccccaccctggaggccgcccttcg

SEQ ID NO: 291798 - DNA, 83 bp, Homo sapiens; identical to SEQ ID NO: 238756
  chr16:87695288-87695371
  hyper

SEQ ID NO: 291799 - DNA, 490 bp, Homo sapiens; identical to SEQ ID NO: 225160
  chr16:87902836-87903326
  hyper

SEQ ID NO: 291800 - DNA, 133 bp, Homo sapiens; identical to SEQ ID NO: 238757
  chr16:87984528-87984661
  hyper

SEQ ID NO: 291801 - DNA, 130 bp, Homo sapiens; identical to SEQ ID NO: 225161
  chr16:88031994-88032124
  hyper

SEQ ID NO: 291802 - DNA, 280 bp, Homo sapiens
  chr16:88060796-88061076
  hyper
cacctggtgtgggccgaccgagtcagagggatcgagaagttaagtaaatggaaagagtgtgtcatgacaccttagtgagcatttatatctcgtggggagccccgcctgtgggccagctaagcaccttctgtgcagtgggcctttccagacccttgcaggaagacggggccggcctggcgggctggggtgcctgggtgaggcctcttcagcgggccccggccctgcagccaggcagctcctggtggctgtcccgaacaggcctcaccgcttctccttggat

SEQ ID NO: 291803 - DNA, 101 bp, Homo sapiens; identical to SEQ ID NO: 238758
  chr16:88292854-88292955
  hyper

SEQ ID NO: 291804 - DNA, 49 bp, Homo sapiens
  chr16:88450453-88450502
  hyper
agctcagctgccaagtccgctcctgcagcggaggcggttaactgcttca

SEQ ID NO: 291805 - DNA, 271 bp, Homo sapiens; identical to SEQ ID NO: 225164
  chr16:88519038-88519309
  hyper

SEQ ID NO: 291806 - DNA, 174 bp, Homo sapiens; identical to SEQ ID NO: 238760
  chr16:88522425-88522599
  hyper

SEQ ID NO: 291807 - DNA, 107 bp, Homo sapiens; identical to SEQ ID NO: 204337
  chr16:88636352-88636459
  hyper

SEQ ID NO: 291808 - DNA, 91 bp, Homo sapiens; identical to SEQ ID NO: 225166
  chr16:88721558-88721649
  hyper

SEQ ID NO: 291809 - DNA, 526 bp, Homo sapiens; identical to SEQ ID NO: 238762
  chr16:88729457-88729983
  hyper

SEQ ID NO: 291810 - DNA, 182 bp, Homo sapiens
  chr16:88752793-88752975
  hyper
caccaggaaggagcgcggcatgttcccctcccgggcggcaggccggggtgggctggggcgggaggggcgcgcctgggtccggactgctgcgtccgccggcgcttgaaggggtcaggctcattagcatagcgcgccgcctccgccaaccagcgcccggcgcgagtggggcggggccacggggg

SEQ ID NO: 291811 - DNA, 133 bp, Homo sapiens; identical to SEQ ID NO: 225167
  chr16:88764923-88765056
  hyper

SEQ ID NO: 291812 - DNA, 105 bp, Homo sapiens; identical to SEQ ID NO: 225168
  chr16:88817839-88817944
  hyper

SEQ ID NO: 291813 - DNA, 114 bp, Homo sapiens; identical to SEQ ID NO: 204339
  chr16:88851818-88851932
  hyper

SEQ ID NO: 291814 - DNA, 507 bp, Homo sapiens; identical to SEQ ID NO: 204340
  chr16:88878527-88879034
  hyper

SEQ ID NO: 291815 - DNA, 381 bp, Homo sapiens; identical to SEQ ID NO: 204341
  chr16:88950011-88950392
  hyper

SEQ ID NO: 291816 - DNA, 399 bp, Homo sapiens
  chr16:89006909-89007308
  hyper
ccgcggccgtcaggaccccagggaccgcatgccaggcagggtccaggacccccagcgcggaccacctttagcctgcggggcagcgccggggacccgggcaggagggagaggagcaggagggagctctggacccccctccccagaccggccgccgccacctctgcctctcccagggccgccctcggcctccccactcccgggtctccgtcacgcgggccgcggggcctttgttaggaaaaccgggcggccccaggggagcccgcgagactcccagcgcccgggcgcgtcgttcccctcgaagtttcgccgcagcccccgcaggtcaggctctgctcacggggggctgcgctcagcccggatgggtgggcgctgggcgggttggctccaccctgccgtggg

SEQ ID NO: 291817 - DNA, 91 bp, Homo sapiens; identical to SEQ ID NO: 204343
  chr16:89007789-89007880
  hyper

SEQ ID NO: 291818 - DNA, 373 bp, Homo sapiens; identical to SEQ ID NO: 204344
  chr16:89007995-89008368
  hyper

SEQ ID NO: 291819 - DNA, 274 bp, Homo sapiens; identical to SEQ ID NO: 204345
  chr16:89189485-89189759
  hyper

SEQ ID NO: 291820 - DNA, 40 bp, Homo sapiens; identical to SEQ ID NO: 204346
  chr16:89266729-89266769
  hyper

SEQ ID NO: 291821 - DNA, 157 bp, Homo sapiens; identical to SEQ ID NO: 127778
  chr16:89267957-89268114
  hyper

SEQ ID NO: 291822 - DNA, 423 bp, Homo sapiens
  chr16:89323587-89324010
  hyper
gacgggcgtgagcgcagaagccgcagagcccctcgcgcgcctcgcgggggtgtggtggggggtggccgcctccggggacgggcgggctgcggggctccgaccccgcggcagcgtctcgcggcgcctgaggccccggtgggcgtgggttccaggctgcacggctggtttgccgtctgggggtggtttgtgctgggacccccgcctcgccgcaaggaccgacgctttccgtatcccgggttcctgcttcggtgtaccggcagaatctgatcacgcgtggcctggagaatgcgcccagggtcgtattgcctggaaggagctctcagccgctgggggagccggaagggagacggttctgccctggacgcgggctgctcggcggccccggctctcctccaaccggccaaaccccgcctggtcccgccg

SEQ ID NO: 291823 - DNA, 263 bp, Homo sapiens; identical to SEQ ID NO: 204348
  chr16:89614907-89615170
  hyper

SEQ ID NO: 291824 - DNA, 75 bp, Homo sapiens; identical to SEQ ID NO: 238769
  chr16:89626701-89626776
  hyper

SEQ ID NO: 291825 - DNA, 153 bp, Homo sapiens; identical to SEQ ID NO: 204349
  chr16:89627717-89627870
  hyper

SEQ ID NO: 291826 - DNA, 113 bp, Homo sapiens
  chr16:89641242-89641355
  hyper
gcctgtgctgcctcccgccggcggggccctgagcctcctcgccctgtcggcggcggtcccctctgaccgcagggtcttcttctagagtcctgatcgccgaggctgagcggagg

SEQ ID NO: 291827 - DNA, 126 bp, Homo sapiens
  chr16:89641704-89641830
  hyper
agccccagacgagcgcggcgcctgcacacaacaggcgcccactaaatgcttgttgatggaggtggcgagtacccgaaaccagcggagcctggaaatgggatcctagagatccgggaagggcgcggg

SEQ ID NO: 291828 - DNA, 490 bp, Homo sapiens
  chr16:89778233-89778723
  hyper
accccgcccccctcgctgggctcctcctacaaagcctgggcccgtgggggacgcacatggtcctgttcgtactccaggatggcggcgtaaagggcccgctgctcccgttcctccggggtcagggcgacttggctgcaaaacctcctggggagaaaggcacgcggtgggtgccggggccaggccctccccgcagcggccccaggggcgggcaggagtcccacctgttggcggcctcctggagccgcagccggcgctcctccatctttctctggagctgggtgcagagtcaaggggccgagcgtgggatctgagcgggccctcggttcccaaccccgtcccacacccggagaggccgggacgtcccagggacctcctctcggtgaggggctgtccccaggtaaggcttctggggcagaaggcagcctgcgctcaagccaggagggccgggccagagaacatgggggacggcggccgggccttcccctgagac

SEQ ID NO: 291829 - DNA, 32 bp, Homo sapiens; identical to SEQ ID NO: 238772
  chr16:89787466-89787498
  hyper

SEQ ID NO: 291830 - DNA, 200 bp, Homo sapiens; identical to SEQ ID NO: 238773
  chr16:89788695-89788895
  hyper

SEQ ID NO: 291831 - DNA, 94 bp, Homo sapiens; identical to SEQ ID NO: 238774
  chr16:89882314-89882408
  hyper

SEQ ID NO: 291832 - DNA, 237 bp, Homo sapiens
  chr16:89894335-89894572
  hyper
accccagccaccctgcgacaacccctggaggtcaccttgcccggggctcggggaggccactgcgggctttgtctgctcagctcctcccggctccctcccgcgttcccagcggcaaacctcccaggccccccgcggtcaccgcagtgtcccgggctggatgccggcccgggcttttgtgggcatcggccgtctgggtctgcgggggagcgccgggggtgtcaccgcgtgtccgagcgc

SEQ ID NO: 291833 - DNA, 45 bp, Homo sapiens; identical to SEQ ID NO: 204351
  chr16:89927371-89927416
  hyper

SEQ ID NO: 291834 - DNA, 50 bp, Homo sapiens; identical to SEQ ID NO: 238777
  chr16:89984233-89984283
  hyper

SEQ ID NO: 291835 - DNA, 84 bp, Homo sapiens; identical to SEQ ID NO: 238778
  chr16:89984503-89984587
  hyper

SEQ ID NO: 291836 - DNA, 202 bp, Homo sapiens; identical to SEQ ID NO: 204352
  chr16:89989101-89989303
  hyper

SEQ ID NO: 291837 - DNA, 253 bp, Homo sapiens; identical to SEQ ID NO: 238780
  chr16:89990062-89990315
  hyper

SEQ ID NO: 291838 - DNA, 90 bp, Homo sapiens
  chr16:89992768-89992858
  hyper
gcgggaaccgcattcgggtcctggaggggcttggaggccccagtctcgcagccccttcatcggggacccccgctcccacctgccttggcc

SEQ ID NO: 291839 - DNA, 123 bp, Homo sapiens; identical to SEQ ID NO: 204354
  chr16:90085456-90085579
  hyper

SEQ ID NO: 291840 - DNA, 72 bp, Homo sapiens; identical to SEQ ID NO: 53511
  chr16:90086126-90086198
  hyper

SEQ ID NO: 291841 - DNA, 45 bp, Homo sapiens; identical to SEQ ID NO: 225179
  chr16:90087050-90087095
  hyper

SEQ ID NO: 291842 - DNA, 528 bp, Homo sapiens; identical to SEQ ID NO: 204355
  chr16:90088770-90089298
  hyper

SEQ ID NO: 291843 - DNA, 383 bp, Homo sapiens; identical to SEQ ID NO: 204356
  chr17:523544-523927
  hyper

SEQ ID NO: 291844 - DNA, 491 bp, Homo sapiens
  chr17:576352-576843
  hyper
aaaaaaaaacaaaaacaaaaacaaaaaaaaaacaacggcagcatcatttcgaaagccaggaggtcctccagagagcagaaacatggatgagtgctaccacatctgataagccctacacggaagccctcaccacatccactgagggtggacaccaagggtcaagtcgcctctctttagagaaagtctcttcttttgttactgctgaccaccccggcatcactgagagctgttgctatggaaacgaggtatccccagctgaaacagaggtgcttcagccagcctcagcaatgctaacaatgcagcccgctctccacgacggtgctcaacagcagcagaggctgcgggactctcacacacccagcctcagcaatgccaacaacgcagcccactccccatgatggtgctcaacagcagcagaggctgtcggactctcacagccacagatggctgcacgtctacagctctttgcttccctacgtgtccgagaactc

SEQ ID NO: 291845 - DNA, 78 bp, Homo sapiens; identical to SEQ ID NO: 225182
  chr17:635476-635554
  hyper

SEQ ID NO: 291846 - DNA, 138 bp, Homo sapiens; identical to SEQ ID NO: 204358
  chr17:635798-635936
  hyper

SEQ ID NO: 291847 - DNA, 299 bp, Homo sapiens; identical to SEQ ID NO: 53517
  chr17:635959-636258
  hyper

SEQ ID NO: 291848 - DNA, 91 bp, Homo sapiens
  chr17:655679-655770
  hyper
ggtcccagcgggtcgggctcatgattccccggccccgcattcaccctcacccggtaaccccgggcgtgccccgcacacagttcacccccac

SEQ ID NO: 291849 - DNA, 90 bp, Homo sapiens; identical to SEQ ID NO: 127827
  chr17:655880-655970
  hyper

SEQ ID NO: 291850 - DNA, 58 bp, Homo sapiens; identical to SEQ ID NO: 238786
  chr17:685406-685464
  hyper

SEQ ID NO: 291851 - DNA, 151 bp, Homo sapiens
  chr17:850231-850382
  hyper
gccagtcggccccacggtgcgtcctccaggggccgcatgaggagagacgatacacgccagcactcagggcccagcacgggccccccactcagtgaaaagcatcctctcactcttaggcttgtcatgatcatgcaccggcagcgtccccctc

SEQ ID NO: 291852 - DNA, 84 bp, Homo sapiens; identical to SEQ ID NO: 225185
  chr17:883202-883286
  hyper

SEQ ID NO: 291853 - DNA, 236 bp, Homo sapiens; identical to SEQ ID NO: 238787
  chr17:900017-900253
  hyper

SEQ ID NO: 291854 - DNA, 212 bp, Homo sapiens; identical to SEQ ID NO: 204361
  chr17:1011776-1011988
  hyper

SEQ ID NO: 291855 - DNA, 73 bp, Homo sapiens; identical to SEQ ID NO: 225186
  chr17:1132222-1132295
  hyper

SEQ ID NO: 291856 - DNA, 91 bp, Homo sapiens; identical to SEQ ID NO: 204362
  chr17:1390869-1390960
  hyper

SEQ ID NO: 291857 - DNA, 182 bp, Homo sapiens; identical to SEQ ID NO: 204363
  chr17:1420195-1420377
  hyper

SEQ ID NO: 291858 - DNA, 183 bp, Homo sapiens; identical to SEQ ID NO: 204364
  chr17:1588082-1588265
  hyper

SEQ ID NO: 291859 - DNA, 802 bp, Homo sapiens
  chr17:1613225-1614027
  hyper
tcgaggccccggccgcagtctccctgtgcgcacccccaccccagtctcagctctggagacgcccggcgggtctcccggcctcagcctcccacccctcgccctcgccccgtgcgcctcgagcccccaagcccgcacccgagcagcgccccggtccccgagagcaggctgtgcgccagggagacgcagaggttccaccactgccagcggtcccgagcggccgattccggcgtgggcagccgccgcaacccccagtgcagcccccggaacgcgaggaaggaggcgccggccaccaggagccccgtgggcgccatggcctggcggttggggggttgcggggagtccgggtcggtcccctcggcgcccgcgctctcggccgggactgggaacccgtttcccggcagggctggggccccggctcccctccccgccgcgcctttgggatcagcaggaacttttccccgttcgtccacgcccagtccctcgcctgggcggtgattggagcagccgcggggccgccgcccccggagccttggccaccgattgcgtcttgctccagccgggggagcggttcgggggctccgggcagtagaccatgccctggagctcggggggcctccgggatgttcgccaataggggtcctccccagctccaagcgtcctgaagcgctggagttgcagacctgggtctccagtctaacctcaactgacactcccgggccccacccacgaaccttgacctcttcccggctcccgcgactttcacctgctgagcgtcatcaccacccaccgccacaccctgcaa

SEQ ID NO: 291860 - DNA, 403 bp, Homo sapiens; identical to SEQ ID NO: 238796
  chr17:1619656-1620059
  hyper

SEQ ID NO: 291861 - DNA, 231 bp, Homo sapiens; identical to SEQ ID NO: 238797
  chr17:1667771-1668002
  hyper

SEQ ID NO: 291862 - DNA, 251 bp, Homo sapiens; identical to SEQ ID NO: 238798
  chr17:1881120-1881371
  hyper

SEQ ID NO: 291863 - DNA, 154 bp, Homo sapiens
  chr17:1901339-1901493
  hyper
tccgccccaggccgcgatcgatcccggcctctcccggcctcattaccgagggagagctgccggggctggcaggggagccagacggcggcggagggggcggggaggcctccttggctccctggcccggattaaatatttactatgttttgtttgg

SEQ ID NO: 291864 - DNA, 114 bp, Homo sapiens
  chr17:1901970-1902084
  hyper
ctgcccaagctggcgctgccggagcgcccgggccccgctcccctcacgggcctcgcagcacagacggggacaggggcggcctcgcgcgcacggggaccccggggtgggggtggg

SEQ ID NO: 291865 - DNA, 234 bp, Homo sapiens
  chr17:1927172-1927406
  hyper
ccagccgcaggcgccgcggcttctcagcctcctggccgggccaggcgcgggggggatcccggcggggcgccacagcctgctcgggcctgggaggggagaggcagacgcagaggctggaacagctggtggcggggcccgtgggctcccggcgtgatcacctgccctcccagggcccgggggacggcgccccgcgtggcaaccacgtgggggcgcggcgggacttccccggtgccc

SEQ ID NO: 291866 - DNA, 284 bp, Homo sapiens
  chr17:1927706-1927990
  hyper
cgggccgcgcggtcactgaccgctggctgcacgggggcgccgtgcggactcggcctccacaaagcggcagaagcaagggcgtgtgcccgcgcagggaatggaggctgcaagtgcaaaactttatcccagcaaagcaaaggtcccaggaggccggctccccttccaccaccggccgctcactctggtctccgactgacccctccgggccggatctctaggcctggccactcgatccatggagaaaaccccgtgtctcacaactggccgctgacgggagctgagcc

SEQ ID NO: 291867 - DNA, 144 bp, Homo sapiens
  chr17:1928280-1928424
  hyper
gatccgctcgtgcccggtggcccggccccgcaggggcatggtgagctccagccccgcgccgagggcaccggcgcccgcaagcaaccgtggtgctgcccggcagccccgcgcgcttgctcagccccggggcgagcggcttgctcc

SEQ ID NO: 291868 - DNA, 295 bp, Homo sapiens; identical to SEQ ID NO: 238801
  chr17:1929078-1929373
  hyper

SEQ ID NO: 291869 - DNA, 82 bp, Homo sapiens; identical to SEQ ID NO: 238802
  chr17:1933404-1933486
  hyper

SEQ ID NO: 291870 - DNA, 328 bp, Homo sapiens; identical to SEQ ID NO: 225189
  chr17:1954662-1954990
  hyper

SEQ ID NO: 291871 - DNA, 129 bp, Homo sapiens
  chr17:1957351-1957480
  hyper
tgcggggcggaggcggagcgtgggccgcggagatccggcgttcgcaggaggcttggtgcgcggcggggctgcacggggccacttccggagtagtactgcgagcagcggcgcgacagtgcggggtcccct

SEQ ID NO: 291872 - DNA, 118 bp, Homo sapiens
  chr17:1957595-1957713
  hyper
agaagtccacgcgggattcttcaaaacggcgtacagggggattctagggccccatggttacttctttggaccccccggaggcgctgtccagccacttccagtcgccctgatgactcgt

SEQ ID NO: 291873 - DNA, 665 bp, Homo sapiens
  chr17:1961434-1962099
  hyper
tgctgcggccctaccgctgcgcgtcgtgcgacaagagctacaaggacccggccacgctgcggcagcacgagaagacgcactggctgacccggccctacccatgcaccatctgcgggaagaagttcacgcagcgtgggaccatgacgcgccacatgcgcagccacctgggcctcaagcccttcgcgtgcgacgcgtgcggcatgcggttcacgcgccagtaccgcctcacggagcacatgcgcatccactcgggcgagaagccctacgagtgccaggtgtgcggcggcaagttcgcacagcaacgcaacctcatcagccacatgaagatgcacgccgtggggggcgcggccggcgcggccggggcgctggcgggcttgggggggctccccggcgtccccggccccgacggcaagggcaagctcgacttccccgagggcgtctttgctgtggctcgcctcacggccgagcagctgagcctgaagcagcaggacaaggcggccgcggccgagctgctggcgcagaccacgcacttcctgcacgaccccaaggtggcgctggagagcctctacccgctggccaagttcacggccgagctgggcctcagccccgacaaggcggccgaggtgctgagccagggcgctcacctggcggccgggcccgacggc

SEQ ID NO: 291874 - DNA, 162 bp, Homo sapiens
  chr17:2156702-2156864
  hyper
gcctaaaatatttactatccagatcgttacagaaaaaaaatgtctgctgatacctgggctaaataatctacaacgctggtgtctcaaaagatgtttcttcctgcaccgcacttcagagctaccacacacgtgtactggaaacagtcacgattctcatgagct

SEQ ID NO: 291875 - DNA, 91 bp, Homo sapiens; identical to SEQ ID NO: 204368
  chr17:2206903-2206994
  hyper

SEQ ID NO: 291876 - DNA, 50 bp, Homo sapiens; identical to SEQ ID NO: 204369
  chr17:2302239-2302289
  hyper

SEQ ID NO: 291877 - DNA, 248 bp, Homo sapiens; identical to SEQ ID NO: 238806
  chr17:2303774-2304022
  hyper

SEQ ID NO: 291878 - DNA, 77 bp, Homo sapiens; identical to SEQ ID NO: 204370
  chr17:2627362-2627439
  hyper

SEQ ID NO: 291879 - DNA, 202 bp, Homo sapiens
  chr17:2658619-2658821
  hyper
gtagtttacttctttaggcatcacttcctgggtagaacgggtttcctaagggagtaaggcacagaacgaggcaatgggccgcctggtctctccgcgcgtcagtaggactcggggaaccagactccgcccagtgctccccagaaacccggctcctcggcgcggcggggagagacccggacggggagaggccgctgtcccgccc

SEQ ID NO: 291880 - DNA, 256 bp, Homo sapiens
  chr17:2658859-2659115
  hyper
ccaggggcggggtctgagcgccgcgccctccccgcgccctccccgcgccctccccgcgccctccccgcgagcgcgccccggacacccgcctgcggcagccgagcctcctccaccgtgcggcccgcggagggcagggagcggccgggcgaggcatggcgggccgccgggcgccgggggagaagcgctggcagctggtgcgctggtgagtgggcgccgggcggcgcggggcctaatgcgggagcgaaccccgaggccc

SEQ ID NO: 291881 - DNA, 87 bp, Homo sapiens; identical to SEQ ID NO: 238809
  chr17:2679493-2679580
  hyper

SEQ ID NO: 291882 - DNA, 983 bp, Homo sapiens
  chr17:2756601-2757584
  hyper
ggggaccgcgcgcgggcagtttcgtttggacggaggaggacgcgcgtttcctcttggtgcctgttttctctccctctgttttaaaagcagtgacagcatcggggaagtatccggggccgggccggggagggcggcagccgcctctgcctggggagggagctcggggccgccggcgggagtgcgggcggggaccagaaggagcgggcgaggggaggcagggccggggccggggagggcgcctgggagccgggcaggggggtcccgggagcgctgtccgcctcctcctgcgcttcgcccgctccctgtgccccgcgtcctccaccatccgggcggccgaggccggggcgcgggaggcggggccggggcgggtcccggcgcgggcggcgcgtctgagcgggagccgggagccgccggcccgggccgcgccccgagcgagcctcggaaatgcccgcgccgggggagcggacggcggctgccccgcgggccccgaggagacgctgaaggtcgccgggagggaggggagagcgcgcggtcacctgacccccggggcgcacctaggcggggcggggcccatgcgaggcggaggccgggggccggggcgcgggctcaggggccgggtgcggagcgcgcggagccggggctgcggggacgcgggcgggcgaggtcgggcaccgcgggcggcctcgccatgtcccagcccgcggggaggaggcattgccgaaaggcggggatccgcgccgccgtggtgctcatcggactcctgcacaaatcccggaggcagaataaagagaaaaggtaaacccctgcagcgccggccgcttccctccgctctcctgctgcatgccagttttctttggggtggacttttccgatgggtgtttggttccgtgttggttagaaaaaagcctcctctccaggtaccgtcgtgcgaaccgagttcggagcttcgccccggaccctggctggtgcgaggagcctgggca

SEQ ID NO: 291883 - DNA, 121 bp, Homo sapiens
  chr17:2757704-2757825
  hyper
cagccgcggatgccattgatccagcccaggcggctccatgcgccggtgttgccatttgcttcctgcaacttggctgagccctcgaggtgcctgcctggccgagatccgcttgctctgcgct

SEQ ID NO: 291884 - DNA, 140 bp, Homo sapiens; identical to SEQ ID NO: 204372
  chr17:2951983-2952123
  hyper

SEQ ID NO: 291885 - DNA, 279 bp, Homo sapiens
  chr17:2952280-2952559
  hyper
ctcattggctgtcgcctccgggcctgcgactttgctcagcccctccggggagtggaatcgggtgtgcaacaggccgtgaggtccggctttgcgaggaactcccattggtcagtcaaacaggagtcccaccctcctgggcttcccattggttgctgtcccaccgctgctctcagtttcccagcggctggggatctgggttttctgggggtggaggggtgcagtacgctgctggaagctcgtttctctttccaccgttgtgtgcctcgggctcgcggtcaa

SEQ ID NO: 291886 - DNA, 258 bp, Homo sapiens; identical to SEQ ID NO: 238813
  chr17:3539485-3539743
  hyper

SEQ ID NO: 291887 - DNA, 70 bp, Homo sapiens
  chr17:3571907-3571977
  hyper
gccccgctcggcccgccccctcatgaatagttaacaaacctccagccaatcactggccggagcgccactc

SEQ ID NO: 291888 - DNA, 48 bp, Homo sapiens; identical to SEQ ID NO: 127913
  chr17:3572001-3572049
  hyper

SEQ ID NO: 291889 - DNA, 54 bp, Homo sapiens; identical to SEQ ID NO: 238815
  chr17:3572297-3572351
  hyper

SEQ ID NO: 291890 - DNA, 141 bp, Homo sapiens
  chr17:3599032-3599173
  hyper
gctcacagacccccagctaccgggaaaaccgcgtgcacgcctgcgaattccaggaccctggagaaggacgcggcggctggcacccgccctgcccctcccccgccttcccaaaagtccgcggagaacttacacgaccaggta

SEQ ID NO: 291891 - DNA, 391 bp, Homo sapiens
  chr17:3599244-3599635
  hyper
cggtcttgtagtcgaacagcgacaggcagagccccttgcagcccgcctgccccatggcgcgctctcagccgggcttgcggaccgcccggcccacgtgcgctcatggggagcactcggtccctcggtccctgcgcgcccggcgcccgcctcggcccgtctgcgcccgctcagctgcagcccggggtgtccggcagggctgcggggcgcgggggcgggtcggggcggccttttattgacgcggttgagaaagcctcggctgggagctgggcggcggcgagcaccggaacctcagaccgcgaccttgccgctacctcttcttcctcctcctcctcctcctcccctgacacagtgacacccctgcaacctactccccagccaccggtctgggagc

SEQ ID NO: 291892 - DNA, 155 bp, Homo sapiens; identical to SEQ ID NO: 225197
  chr17:3778891-3779046
  hyper

SEQ ID NO: 291893 - DNA, 457 bp, Homo sapiens
  chr17:3867210-3867667
  hyper
aagtccgggaggaccgcgcagagggtgccaggcgtccggtctccccagctggaacccgctcccagcccccagcccccagccccggcgccggcgaaggtggccgcgcagccccgccgggtgccccaggagcatccgaagaggtttccggagccctcgcttcctgcccgcccagagccgggtggggaggcaggaggggaaactgagactgcggcgcgcgcggcccccgctccccggcccggcccggcccgcgcgctcaccgttggggccgtagcgctcccgcgcgccggtcacctgcgccgggctcaggccgccctcggctgtcaccgagaagtggcgcagcacgtcggcggccgggagcagatgcgccgcctccatgccgcccgcccggccgtctgcgccgtccgcaccgtcgaggccgcctctccgccggggggctacaaagcggggcgcgggggac

SEQ ID NO: 291894 - DNA, 229 bp, Homo sapiens
  chr17:3867879-3868108
  hyper
ggggaaactgagaccgcccgcggggcgcgtgctgggcctgtcgggagccgggggcgcgtggcccgggggtcctcggtcccggtccgcggagctgctaggggtgggatctggccgagagctggggcggtctgcggagcacccggctctgggctgcgcgtcgcctcctctgggctctcctgggcccggggcgtcctgcttcccagctcgaattctgcgaagtgactccaga

SEQ ID NO: 291895 - DNA, 114 bp, Homo sapiens; identical to SEQ ID NO: 238818
  chr17:3868443-3868557
  hyper

SEQ ID NO: 291896 - DNA, 81 bp, Homo sapiens; identical to SEQ ID NO: 204377
  chr17:3908049-3908130
  hyper

SEQ ID NO: 291897 - DNA, 290 bp, Homo sapiens; identical to SEQ ID NO: 238820
  chr17:4046209-4046499
  hyper

SEQ ID NO: 291898 - DNA, 148 bp, Homo sapiens; identical to SEQ ID NO: 204378
  chr17:4402640-4402788
  hyper

SEQ ID NO: 291899 - DNA, 247 bp, Homo sapiens
  chr17:4545056-4545303
  hyper
aggtctccaatcaactccgcctaccgctggggcccccagctccaaggagcagagcttcaaggggcagaattcagccccagtccaaaaggcggtgtcctggcgagagcagggagtggaaaccactatcttgacgggagggagaaaaagaaaaggatttggaccgaaaacacgcaggaagagggaatcaacgcctggtacagcaggcaggcgaggtgggggtaggagttatgcacgtgtgtaccacgga

SEQ ID NO: 291900 - DNA, 98 bp, Homo sapiens; identical to SEQ ID NO: 238823
  chr17:4607657-4607755
  hyper

SEQ ID NO: 291901 - DNA, 139 bp, Homo sapiens; identical to SEQ ID NO: 238824
  chr17:4614298-4614437
  hyper

SEQ ID NO: 291902 - DNA, 118 bp, Homo sapiens; identical to SEQ ID NO: 238825
  chr17:4634531-4634649
  hyper

SEQ ID NO: 291903 - DNA, 42 bp, Homo sapiens; identical to SEQ ID NO: 225200
  chr17:4647512-4647554
  hyper

SEQ ID NO: 291904 - DNA, 172 bp, Homo sapiens; identical to SEQ ID NO: 238826
  chr17:4843519-4843691
  hyper

SEQ ID NO: 291905 - DNA, 517 bp, Homo sapiens
  chr17:4853393-4853910
  hyper
gcgggggtgagtcaccgggcgcgcgctgccccggcgccgacgggaagggcctccgagtcgggccgaggcgccgtgtgtcccccgccggtcggctggtatggctgcagaggagctcggggcagaccccgcactggccccagagccggcaaagtggagatctctaccgagggcagagacctacctccccgcagtgctacaagtggggcgccggaagagccccaggcgtgcagaagctcacaaaaggccacccgtcctcggtccattcatttttgttcactgttgattcagccccattcattgatgggctggggccgtgcgctgagcgcccacagtcgatggggaaaggggctctgaccgacagtccccacgccgggcgacaagtgctgtcccagcgttatcagtcgggcgccttgccagccgaaagggcctgtctaaattcgtttcctgtcccctaactcatcccggcgctggctggcctggagagggtaggatggggcggcgccgagaatggccgtta

SEQ ID NO: 291906 - DNA, 105 bp, Homo sapiens; identical to SEQ ID NO: 238828
  chr17:4871286-4871391
  hyper

SEQ ID NO: 291907 - DNA, 358 bp, Homo sapiens; identical to SEQ ID NO: 204381
  chr17:4890353-4890711
  hyper

SEQ ID NO: 291908 - DNA, 118 bp, Homo sapiens; identical to SEQ ID NO: 204382
  chr17:4901561-4901679
  hyper

SEQ ID NO: 291909 - DNA, 281 bp, Homo sapiens
  chr17:4938733-4939014
  hyper
ttgctgaggcaggtcgagttggagaggggagtggctggggcgggctctgcccggaggggcgtctccgtgctgccctcccgcctgcctcaggggggcatcccgggagccgccaggtgcgcaggggtccccgcacctccggatccggcagtccccggacccagcggctggcggtctgcctgagagggagccccctccgccggggaggcggcccagcccagagcccacacagctggggttttgttgtttgttgttttaattaattaattaattttgagacgggg

SEQ ID NO: 291910 - DNA, 55 bp, Homo sapiens; identical to SEQ ID NO: 204383
  chr17:4981985-4982040
  hyper

SEQ ID NO: 291911 - DNA, 256 bp, Homo sapiens; identical to SEQ ID NO: 238833
  chr17:5094998-5095254
  hyper

SEQ ID NO: 291912 - DNA, 394 bp, Homo sapiens; identical to SEQ ID NO: 238834
  chr17:5322761-5323155
  hyper

SEQ ID NO: 291913 - DNA, 106 bp, Homo sapiens; identical to SEQ ID NO: 204384
  chr17:5389578-5389684
  hyper

SEQ ID NO: 291914 - DNA, 34 bp, Homo sapiens; identical to SEQ ID NO: 204385
  chr17:5390233-5390267
  hyper

SEQ ID NO: 291915 - DNA, 196 bp, Homo sapiens; identical to SEQ ID NO: 238837
  chr17:5972267-5972463
  hyper

SEQ ID NO: 291916 - DNA, 204 bp, Homo sapiens; identical to SEQ ID NO: 204386
  chr17:5974393-5974597
  hyper

SEQ ID NO: 291917 - DNA, 134 bp, Homo sapiens; identical to SEQ ID NO: 204387
  chr17:6347035-6347169
  hyper

SEQ ID NO: 291918 - DNA, 337 bp, Homo sapiens; identical to SEQ ID NO: 204388
  chr17:6347453-6347790
  hyper

SEQ ID NO: 291919 - DNA, 214 bp, Homo sapiens
  chr17:6347820-6348034
  hyper
tgggcacaagtttcgcccttgttgcccaggctggagtgcaatggcgcgatctggactcaaaacaatttttttgttcggaggggagggcatcaggttctgttcacaggggagggcatcaggttcggacacgcacggcctgtggggtcgtctgggtaccacaagaagtcggatcgaaatcggggcgtctggtgggaaggccggggtctgggcgggt

SEQ ID NO: 291920 - DNA, 70 bp, Homo sapiens; identical to SEQ ID NO: 238842
  chr17:6399733-6399803
  hyper

SEQ ID NO: 291921 - DNA, 603 bp, Homo sapiens
  chr17:6459172-6459775
  hyper
ggggcggccagcagccggcgcggcacggggctcccctccttcccgagaaggaatctgggtctctggactgagctggtgacgggggctggggcggggggttgtggcgtcctggatggagagagctgcaggagcagggggcgcgtcccggtttgcgttggggtgtgggacgaagcggcggccgcgggacatccccttcggtggcgaagcccgggtctgcccggggcctccgcggggtgcagagggctcccaacggcgggactggcccggggcgccgcagacctggccctttccggcggggccgtggagaaggggacgcggtgtcccccgaggtgaccgggggcgcaggaaggacggggggcgcgcggagccccctctccacgcgcgggaggtccagccccgctaccgccccctacgccctcccgggacctccgcccacctgcgcgaggggttcacctgggccggcggcccctcctctagacgcgcgagtccctcccccgggccccggccctgccctccccgcgcccgccctcacctgcacggcccgccttggccatgtcccgggcggcgggctccggcggcgctacgcgcgctcctcgcgcttcc

SEQ ID NO: 291922 - DNA, 31 bp, Homo sapiens; identical to SEQ ID NO: 53621
  chr17:6459791-6459822
  hyper

SEQ ID NO: 291923 - DNA, 192 bp, Homo sapiens; identical to SEQ ID NO: 238845
  chr17:6460089-6460281
  hyper

SEQ ID NO: 291924 - DNA, 241 bp, Homo sapiens; identical to SEQ ID NO: 238846
  chr17:6544040-6544281
  hyper

SEQ ID NO: 291925 - DNA, 389 bp, Homo sapiens; identical to SEQ ID NO: 238847
  chr17:6554828-6555217
  hyper

SEQ ID NO: 291926 - DNA, 204 bp, Homo sapiens
  chr17:6734926-6735130
  hyper
tgcgggtaggggtcggtggggtggggtcatggtttacttacctcagcgccacacagaaccactacgcaagctcgggatgggagcctccttaccccaactggagcttccagctcttgcagaacagagaggtaaacaacgcggtctccatgacaacaagtgacgcgttgccagggcaaagagggctggttccgccactgagcagcc

SEQ ID NO: 291927 - DNA, 273 bp, Homo sapiens; identical to SEQ ID NO: 238852
  chr17:6915580-6915853
  hyper

SEQ ID NO: 291928 - DNA, 434 bp, Homo sapiens; identical to SEQ ID NO: 238854
  chr17:6939629-6940063
  hyper

SEQ ID NO: 291929 - DNA, 237 bp, Homo sapiens
  chr17:6945870-6946107
  hyper
acagggggtgaggtggagggtgatcgcgccgaggaggagcagagcgccccgccagccgaaagtatcgagaagaagctgcaaggcgggcgccaggagcagcgaggaggccccgttgccggtgagcgccagccccaccgccaagactcgacggcgggagaagtaacgcgagagggtgcctagggcgggggcgaacaccagggcccaaccaaagcctgcgaatgaataggaggggatggg

SEQ ID NO: 291930 - DNA, 37 bp, Homo sapiens
  chr17:6946175-6946212
  hyper
cgctaccccagatcccaacaagctcctgtcacctcct

SEQ ID NO: 291931 - DNA, 51 bp, Homo sapiens
  chr17:6946491-6946542
  hyper
tctccttgacctcaagatgcactcttttctagagccggttgccctttctca

SEQ ID NO: 291932 - DNA, 166 bp, Homo sapiens
  chr17:7137843-7138009
  hyper
tctcctcatgtcacgtgacttaaaggcagccaccccgcgctcctcagccgccctccgtcacgtgatcccctcccaatcacgtgaccgtctgactccgcctagtgcccccgccacatgatcgctgccttcagcaacggtctcccagcccccaaacgtgtaccccagc

SEQ ID NO: 291933 - DNA, 105 bp, Homo sapiens; identical to SEQ ID NO: 238858
  chr17:7145849-7145954
  hyper

SEQ ID NO: 291934 - DNA, 190 bp, Homo sapiens
  chr17:7146325-7146515
  hyper
cggaggaacactgcgggacttgagttaaatcatgtgatctcaaagagggcggagcgtcacgtggcgggtgcgcgaagtagggccggcttgggagggcgccggggaggcggggccggctgggcgacagctgggagggggaccgacgccttcccggacagcggaggtcggggcgccagccacctgggggcag

SEQ ID NO: 291935 - DNA, 76 bp, Homo sapiens
  chr17:7146588-7146664
  hyper
caggtttctcctttcgtgcttccatagccggtttctcctttcgtgcttccatagcctgcttctccgaaggtgtcct

SEQ ID NO: 291936 - DNA, 258 bp, Homo sapiens; identical to SEQ ID NO: 238860
  chr17:7155207-7155465
  hyper

SEQ ID NO: 291937 - DNA, 105 bp, Homo sapiens; identical to SEQ ID NO: 238861
  chr17:7155683-7155788
  hyper

SEQ ID NO: 291938 - DNA, 564 bp, Homo sapiens
  chr17:7165742-7166306
  hyper
ccgaggctgcggtgcgcagcagaggtggctcggaggtgagccagcaggtgcgggcggacaggtggggcgcacctgagtatatgtagggcgtcgggggcgcggcccgcgcgccccgggagcgcgggagggggaggcgggaccggaggggcggccgaggatgacctgacgtcaccgaagggacactcacctgaaccggaagtcgtggcccccacccctccttgcccaggtgaggaggaagaaacctgagcaccagggtcacgccccttcgcttgcccggttttgaccgccgctggggaggaggcggtggctccccaggagtcccaagctccgagtcagcccctccggactggatttccctcgaacaccgggaagccccttcctttcttcccaacaggtgcgcctgggacgctgcggggcgcccctgacaagcctcggcgccgccctttccccgccgggttctgtccaaagtgctctctcctcggccctgctttcgcccccacccgctgctctccttttttttcctgtctcctaccctggtcgatcccaccttcgggggccctggct

SEQ ID NO: 291939 - DNA, 369 bp, Homo sapiens; identical to SEQ ID NO: 128019
  chr17:7166376-7166745
  hyper

SEQ ID NO: 291940 - DNA, 133 bp, Homo sapiens; identical to SEQ ID NO: 204394
  chr17:7184885-7185018
  hyper

SEQ ID NO: 291941 - DNA, 87 bp, Homo sapiens; identical to SEQ ID NO: 238864
  chr17:7198333-7198420
  hyper

SEQ ID NO: 291942 - DNA, 293 bp, Homo sapiens
  chr17:7199730-7200023
  hyper
ttagccagggcagcgcgccccggggcagcacacgtgcccccaggcgctgctgggcaagccccacgtgcgcttcccaagggctggcgtcctccgcgtctccttcgccgccagctgcccgcagcagccgcagtcgcctctcccggtcccggcgcgccctctgccggccgctcccggaggccgccggattccgcttcctcgctgaccctccacttgctatctatcgcccgccgcacccctccggccctttcagagttgaagattcggatttccggggcatcgggcacagtggacag

SEQ ID NO: 291943 - DNA, 99 bp, Homo sapiens; identical to SEQ ID NO: 238866
  chr17:7218861-7218960
  hyper

SEQ ID NO: 291944 - DNA, 130 bp, Homo sapiens; identical to SEQ ID NO: 238867
  chr17:7232755-7232885
  hyper

SEQ ID NO: 291945 - DNA, 1357 bp, Homo sapiens
  chr17:7254485-7255842
  hyper
cagtgcccgcggcgcgcacgttcccacccaggctcggagcgcgaggtccccaggtgggccccaaccgccggatcctgcccttctgcactggggcccagccgcctcccggcctttcctccctcccccaggagatgagacgtatcttgacatcttccgcgacttctccctcatggcgtcagacgacccggagaagctgagccgtcgcagtcatgacctccacacgctgtgacccgaggcccacggggcccgcgcctgcctcccttccccgccaccgggccctctgccattaaagcctccgtgcttcgctcttcccttctggttcacttcttgggcgccaccttcgggcccgtagggtgttgggcgctgcggctcccgaggtgcggggagcagctgggggtttgcgagctccagtccagcaaggtgcgactccggggagcgaggcggcagcttcggccgcggcctgagcgcagggcgctgcggggcgggggctctcgggctggggcgacgtggccagcccagtcctgccgaggggtggggctggccctggggctcgctggccccgcgccgccgcggagagagcgcgcccgggccaccccggctggaaggcatccccggaatgcggcggctcagcacccgccccctcgggaattccccgggggagccgctgggagggactcggctcccgggctgggccggccgggcctcgggctctgagcggtgggattagaggctccagccccgccgacttgcagacgtgagatcgggcacacctgagcggcggcggggcggtcgtggccacatccggggcgacgtgcctgagtcaccccgtcccgccagcgtctgccagtccagccagtccgcccagtctctcgcgtccgagactcgcctccagcctcccacctccgcccgggccgcgcgagcctcgcgggggcgggggcggggcgccaaggggcggggctgtctcttaaagggccccgggccgctgcccttaggccacttcctgggggcggagaggacctcagcggctgcggcgacacccagggaaggcggcgcggccgggtcccgaaactcctggctgtttccatcagagccctcggacactcccagcccgggctgagcacgcatcgtcgctccccggcggatacaagggggctccgccatccgctcccgtcagttcggcctccatctcctgggacccgcgccggcagccaggccaggcctctgagtggccccagagccctggctggactcgtccacggcggcagcgatctgcccggggtctcggaggccatcccttcagagtcggccctgtgctcgccaccgtcacctgctggttggattccggaaacccactgtc

SEQ ID NO: 291946 - DNA, 491 bp, Homo sapiens; identical to SEQ ID NO: 238868
  chr17:7284208-7284699
  hyper

SEQ ID NO: 291947 - DNA, 102 bp, Homo sapiens; identical to SEQ ID NO: 238869
  chr17:7307383-7307485
  hyper

SEQ ID NO: 291948 - DNA, 629 bp, Homo sapiens
  chr17:7340252-7340881
  hyper
atcccagtggtgtccgtggcgggctggcccgagggggctcggagccactcgtgggccggtccgctggcctctgagtcggcttccttctacctggtgcccggtggcggcaccgagcggccgtgcgcctccgcctggcagctctgttttgcccgccaggagctggcgctcaaagcgcgcataccagcgccgctgctgcaggcgcacgcggcggcccaggcgctactgcgcccgctggtggccgggacccgggcggcggcgccctacctcctgcggacgctgctgtactgggcgtgcgagcggctgcctgcgctctacctggcgcggccagaaaatgcgggcgcctgctgcctcgggctgctagacgagctcggccgagtgctcgaggccgggacgttgcctcactattttctgaacggccgacagctccgtacgggggacgactccgctgcgctgctcggagaattggcccggctccgcggggacccggcccgggccctccgtgccgcggtggaggaggccaaagtggcccgcaaggggggcggtttggcgggcgtggggggcggggcccattaaagacgctgttcctaccagtggaaagtgcctctgtgggcgagcgggacgtggggggc

SEQ ID NO: 291949 - DNA, 229 bp, Homo sapiens
  chr17:7348518-7348747
  hyper
cgaaggggcagtgacggggccagcggtcgtggccaggcaccagggctgcacttattctctcctcccccaggcgtccgcggctcggaggcggagggtcgactccgggagaaacttttctctggctatgatagctccgtgcggccagcgcgggaggtgggagaccgtgtcagggtcagcgttggtctcatcctggcgcaactcatcagcctggtgagggcgcgcggggggt

SEQ ID NO: 291950 - DNA, 229 bp, Homo sapiens
  chr17:7348997-7349226
  hyper
gggacggacctcgacgtagggccacatgagtcctgagtgcccagggtggggcggagcttggtgctcaggggtcaataaatggcagcgggtggaggttcggggctgggtggattatgagctgaaggcagggccggggacagagctaggcggagggctaggcaggggcgggtctggtaggttgataggctgggagtgtagacggcaggaagaggtgtttctgagatagagg

SEQ ID NO: 291951 - DNA, 56 bp, Homo sapiens; identical to SEQ ID NO: 204399
  chr17:7349259-7349315
  hyper

SEQ ID NO: 291952 - DNA, 370 bp, Homo sapiens
  chr17:7387161-7387531
  hyper
gcccacccgtctccgggggccgtttgacaaacatcggctacttccggacaagccactggtcctgccatcttggtttgttcatgcatattcagcaagagaactgcatattcatgagcaaccgcccttccccgggaggacccgccccgccccgccgccattaccgattcgcagagcagaccattttccagctggggggggctacgaatgagaggcttttgctgaagatgaaaccgttgtccaaactagaatgaaagcggcccaattttaccctcgagtcttcaaaccttaagcctcagtgcaaaagggagcagcgaggagaggcggtgggattaaagaaaaaaattcttctctccctgtcacttcaaaaggt

SEQ ID NO: 291953 - DNA, 201 bp, Homo sapiens; identical to SEQ ID NO: 238873
  chr17:7475777-7475978
  hyper

SEQ ID NO: 291954 - DNA, 385 bp, Homo sapiens
  chr17:7486279-7486664
  hyper
ccacagcggaatgacgcacgggtgggcaccgtgggttggcgtcccggcggtcggtaacgaagcacaacgcccccaccaggtagtccaaggtgccctttcccaagcagcgctgcagggtccactcggcctcgccgaagtctctgcccagcacgtggtgcgccctcgggccagcggggagggggcgaatcccgggactgcctcgccaggcctcggctccccggagactcttgggggtctgggccccaagggtgattcaggtgctgcccttccccgacctgggctcgcctcccccacctcctcctctgcttcactgtcccgggcccagcagttgccggcgcactcatgctccgaggcctgagccaaccggaggcgagacaagcacagg

SEQ ID NO: 291955 - DNA, 317 bp, Homo sapiens
  chr17:7486947-7487264
  hyper
aggcgtgcagcttcggcaagctttacaattccaacagcgcgtccaaaacgtggtccctgactgagacttattttacgccactagagtgagggtgggtagcgtcagaaagagcggggcacggggcgggccagcttcgccgcgggaaaagaacgggaggcggagtgtccgcagcgcgcacgcgcaacgaaagtcaatggcggtctggagagactggcggaagctagctttgcaatatggcggccgaggcggacggaccgcttaaacggctgctcgtgccgattcttttacctgagaaatgctacgaccaacttttcgtt

SEQ ID NO: 291956 - DNA, 92 bp, Homo sapiens
  chr17:7554499-7554591
  hyper
ttgcaccccatttcgttttgtttctagacggtttggtggggggtgaagctgcattcataccccttcctcttgttattctcccctgctctgac

SEQ ID NO: 291957 - DNA, 49 bp, Homo sapiens; identical to SEQ ID NO: 204401
  chr17:7554793-7554842
  hyper

SEQ ID NO: 291958 - DNA, 165 bp, Homo sapiens; identical to SEQ ID NO: 204402
  chr17:7571719-7571884
  hyper

SEQ ID NO: 291959 - DNA, 773 bp, Homo sapiens; identical to SEQ ID NO: 204403
  chr17:7572184-7572957
  hyper

SEQ ID NO: 291960 - DNA, 46 bp, Homo sapiens; identical to SEQ ID NO: 204404
  chr17:7573922-7573968
  hyper

SEQ ID NO: 291961 - DNA, 301 bp, Homo sapiens; identical to SEQ ID NO: 204405
  chr17:7576546-7576847
  hyper

SEQ ID NO: 291962 - DNA, 163 bp, Homo sapiens; identical to SEQ ID NO: 204406
  chr17:7578570-7578733
  hyper

SEQ ID NO: 291963 - DNA, 36 bp, Homo sapiens; identical to SEQ ID NO: 204407
  chr17:7579249-7579285
  hyper

SEQ ID NO: 291964 - DNA, 60 bp, Homo sapiens; identical to SEQ ID NO: 204408
  chr17:7579880-7579940
  hyper

SEQ ID NO: 291965 - DNA, 329 bp, Homo sapiens; identical to SEQ ID NO: 204409
  chr17:7590625-7590954
  hyper

SEQ ID NO: 291966 - DNA, 35 bp, Homo sapiens; identical to SEQ ID NO: 238876
  chr17:7591550-7591585
  hyper

SEQ ID NO: 291967 - DNA, 138 bp, Homo sapiens; identical to SEQ ID NO: 238877
  chr17:7591824-7591962
  hyper

SEQ ID NO: 291968 - DNA, 53 bp, Homo sapiens; identical to SEQ ID NO: 238878
  chr17:7621507-7621560
  hyper

SEQ ID NO: 291969 - DNA, 48 bp, Homo sapiens; identical to SEQ ID NO: 204410
  chr17:7739847-7739895
  hyper

SEQ ID NO: 291970 - DNA, 49 bp, Homo sapiens; identical to SEQ ID NO: 204411
  chr17:7744964-7745013
  hyper

SEQ ID NO: 291971 - DNA, 66 bp, Homo sapiens; identical to SEQ ID NO: 238881
  chr17:7748393-7748459
  hyper

SEQ ID NO: 291972 - DNA, 657 bp, Homo sapiens
  chr17:7760505-7761162
  hyper
ccgtccgaatcctgcgcggggtgtaacaagcgctcagaccgcgcagcccaggctgcccgcccgcggaaccacagctcccggcagcccgcggggcactcacacaaagcccagaggctgccgggagctgcagttccccaccccctccatcttgctgcttgactgcccctcagtcccagaaccagagcccgtgctaaccccagcactggagctgctctgacgccgactgcaacagccattctcttctcgtagcagcatggtcggtccagctccggccatttgcccggaggcctcctctgggcctttcaacttcctaagcacctttcaggttgggtggtccgagatctcgcgagcgctcccgacctctttcctttcgcgagatcccctctcctccccctcctagtctcctcggcaacggcacagatctcgcgagcttctcctacttctctagcgctgtggctcactgaagcgtactacgccggatgtcttaagatatcgcgagacctttacctctggtttcttacacatcctttagaaactggaatttagcgagaatacattctttcatactgcctcctcccttgtttttctgtctcagagagatagtctgtcctaaatatcccatgtagcccaggccactgaattaaaacggagcgtatt

SEQ ID NO: 291973 - DNA, 406 bp, Homo sapiens; identical to SEQ ID NO: 128073
  chr17:7761197-7761603
  hyper

SEQ ID NO: 291974 - DNA, 41 bp, Homo sapiens; identical to SEQ ID NO: 238883
  chr17:7791235-7791276
  hyper

SEQ ID NO: 291975 - DNA, 55 bp, Homo sapiens; identical to SEQ ID NO: 238884
  chr17:7835479-7835534
  hyper

SEQ ID NO: 291976 - DNA, 199 bp, Homo sapiens; identical to SEQ ID NO: 238885
  chr17:7905914-7906113
  hyper

SEQ ID NO: 291977 - DNA, 433 bp, Homo sapiens
  chr17:7975836-7976269
  hyper
gcagagaacggaatcgcggtgagagcgcgcggcacagcctgcacctgcaccccgcggcgccagccctgccgccagcgccccagtaacttgccgcgcgcattcacagccagacccagggaaaggaaggttttttgtttttttgtttgtttggtgttttggtctctgaggtttttgtgttttttgcttgtttgttttgttttgttgaaaatagtagggcacagaatggggagaggagagacgggaagcgcgctcctaaatagaaatgctgttctcaatcagcaccgggtccaggtagtagtaggggatgggaaggcacttgttgcgctggcggatgtcgtgtgagatctggttcaggcgctggcggaacgcctctatgctcctccgcggggcctcctccacgaagtgaatgtccgggaagtgtcccaggggccgc

SEQ ID NO: 291978 - DNA, 320 bp, Homo sapiens
  chr17:7976318-7976638
  hyper
cctcctgccggtggccctggcccctccaccctttggtttcagtggcctctcactccctgctcccctcttgacgccgctagttatcctcccccatccccggcttctggtcccctccctgtgctcagagtcccccatcccgtctcgcaccctgtcgtcaggctctcggctgagggtccagagcaccagcagcgtgatgcacgtggtcttcacatccggcaacgtgtccatgaaggtctccagagtggtcagccccttagtctgaatcggtggattccgcatggacgctgggaagttgggcatccaggcggtgaactccatct

SEQ ID NO: 291979 - DNA, 56 bp, Homo sapiens; identical to SEQ ID NO: 238888
  chr17:8021862-8021918
  hyper

SEQ ID NO: 291980 - DNA, 100 bp, Homo sapiens; identical to SEQ ID NO: 204413
  chr17:8022390-8022490
  hyper

SEQ ID NO: 291981 - DNA, 40 bp, Homo sapiens; identical to SEQ ID NO: 238890
  chr17:8022550-8022590
  hyper

SEQ ID NO: 291982 - DNA, 211 bp, Homo sapiens; identical to SEQ ID NO: 238891
  chr17:8026217-8026428
  hyper

SEQ ID NO: 291983 - DNA, 63 bp, Homo sapiens
  chr17:8027809-8027872
  hyper
tgaattttatacatcatctccgaagttcgcttcctagtcgagacagggagcaacccgagtgcg

SEQ ID NO: 291984 - DNA, 127 bp, Homo sapiens
  chr17:8027922-8028049
  hyper
gcgctctcttctatctaagccagttacattcaagtccgcgaacatctgcgcgcccactctgcggacagggcacttgtctaggctcgggcgagtcatagtgagatacgcaggagagacccagcttatc

SEQ ID NO: 291985 - DNA, 37 bp, Homo sapiens; identical to SEQ ID NO: 204414
  chr17:8055129-8055166
  hyper

SEQ ID NO: 291986 - DNA, 83 bp, Homo sapiens; identical to SEQ ID NO: 204415
  chr17:8055823-8055906
  hyper

SEQ ID NO: 291987 - DNA, 91 bp, Homo sapiens; identical to SEQ ID NO: 204416
  chr17:8093691-8093782
  hyper

SEQ ID NO: 291988 - DNA, 35 bp, Homo sapiens; identical to SEQ ID NO: 204417
  chr17:8191800-8191835
  hyper

SEQ ID NO: 291989 - DNA, 43 bp, Homo sapiens; identical to SEQ ID NO: 204418
  chr17:8280080-8280123
  hyper

SEQ ID NO: 291990 - DNA, 34 bp, Homo sapiens; identical to SEQ ID NO: 238898
  chr17:8286558-8286592
  hyper

SEQ ID NO: 291991 - DNA, 149 bp, Homo sapiens; identical to SEQ ID NO: 238899
  chr17:8287112-8287261
  hyper

SEQ ID NO: 291992 - DNA, 213 bp, Homo sapiens
  chr17:8532948-8533161
  hyper
ccgattttatgggatcagggtgtgacccccaactgcagaaggcaatgaagagactgcggcgagccattcccagctcgcttacacaataaagggatcccgaggcgagtgctgaccctccccccggccgtcctgctgcagcgcgccccgccacatttcccgcctcgccccctcaaaccgcctgggcctcgcagggcgtccacccccggcctaggc

SEQ ID NO: 291993 - DNA, 192 bp, Homo sapiens; identical to SEQ ID NO: 204420
  chr17:8533199-8533391
  hyper

SEQ ID NO: 291994 - DNA, 168 bp, Homo sapiens
  chr17:8533392-8533560
  hyper
ccaggcctaacccacccagcaacccacgcaggggcccttcctgcccagcgcccccccaccctaccgccgggactgcgctttccagccccgcttagaatcccctctcttcctgggaggcagacactggctcgcggggcacgccgagacctccgccgggacactagcccc

SEQ ID NO: 291995 - DNA, 631 bp, Homo sapiens
  chr17:8533862-8534493
  hyper
gtcctccagagccgcccgggacccctcagcccaggagccattcctccctccacaaactgtcccccagccctgggccgtgcactcggacccgggtagccgcacctctcaccttcagccgaagatggtggcgcgggcgcacgtccccagccgcgaccacagatccagcgcctcagtcccaaacccaccgctgcctccgccgggctcctttagcactgctgctcggggctgccccacccacccctaccctcattgggccagctccacgcccatcaccgccgcccccagacccactggttggtttgcgcgcccatctccaagggaagacgttagcaacccgaacgaagctaccttcccgagtccggctccctccacccacctggaatgacgctcattggctcccgctcccagcccaggccacagaggccccaatctcatgggctggctcttacgcccgtcataggctccgggaggtgcggccggggcagtggcgcgggattggctggctcgtgcgtagatggacagctgaggctggctgaacgcccggcgatcccgcgaggctgcgggtgcgggccccgcggcggccggcgcgctgcgctgacattggctgtgcgggccgcggggcaggtgggcc

SEQ ID NO: 291996 - DNA, 365 bp, Homo sapiens
  chr17:8534582-8534947
  hyper
cccctgtgcttgcggcagccggcatgtaccgcagcgggacggggttccaccgcggagtcgcgggccctcagcgttgcctgcaggggcggggcggagcgcggtccagagtcctgacgtcacccccggggctgcgcggggttggggccgcggcgctgcgactcacctgcagtgggggaaggaacgcgggggagggcgctgctccgcccatgcgcacagggtttggcccgggacccggctgcgctccacgctgcggccactgtcccgaccccggccccaggcggactctgccgggatcggccgagcgccaggcgcaggacacggtcctccaaggtcgcagttttggtgttagcggggtgagaggctct

SEQ ID NO: 291997 - DNA, 90 bp, Homo sapiens; identical to SEQ ID NO: 204421
  chr17:8649035-8649125
  hyper

SEQ ID NO: 291998 - DNA, 33 bp, Homo sapiens; identical to SEQ ID NO: 225226
  chr17:8759640-8759673
  hyper

SEQ ID NO: 291999 - DNA, 37 bp, Homo sapiens; identical to SEQ ID NO: 204422
  chr17:8869471-8869508
  hyper

SEQ ID NO: 292000 - DNA, 143 bp, Homo sapiens; identical to SEQ ID NO: 238905
  chr17:8901426-8901569
  hyper

SEQ ID NO: 292001 - DNA, 218 bp, Homo sapiens; identical to SEQ ID NO: 204423
  chr17:8907838-8908056
  hyper

SEQ ID NO: 292002 - DNA, 530 bp, Homo sapiens
  chr17:8925060-8925590
  hyper
agctggcaagcccgcgctgaggcgggacgcgcctgctagcagcgagcgagaggctctccggcgaccggcgcgcgggctccccggaggggccaggcaaacttttctttctcttttgccccctccagaggtaaagtcccgaacgcggactttccggcggggacgcgatcggggggcatctgagagggaccccgggctgcgagacgaaggggcgcgggccgtgcagagtcggggtcccccagctctcctgcgcccgaaacttggggtgcgaggggggctggtcgcggacggggagaccggctcaggcatgcccctcgggcggcgtgggggcggcggtggcggggaagcagagcgttctcccgccgggcggggaagaaggggcgcgagcggtgcggacttggagggccccggcttcgccgcccgcgggactttgggggagagaggcgggcagtcggctgcggggtgggtgcccaggaagccgggcgttctcccgcatctccgctcgccaccccgccgagagctggagggcgcgg

SEQ ID NO: 292003 - DNA, 227 bp, Homo sapiens
  chr17:8925833-8926060
  hyper
gcgccgctgcatcccggactttgtcaatgcggccttcggcaaggacgtgcgcgtgtccagcacctgcggccggcccccggcgcgctactgcgtggtgagcgagcgcggcgaggagcggctgcgctcgtgccacctctgcaacgcgtccgaccccaagaaggcgcacccgcccgccttcctcaccgacctcaacaacccgcacaacctgacgtgctggcagtccgaga

SEQ ID NO: 292004 - DNA, 54 bp, Homo sapiens
  chr17:9143012-9143066
  hyper
gtgaacatcatctccgtgtataagcagggcacgagccgcatccgccgcggtgac

SEQ ID NO: 292005 - DNA, 186 bp, Homo sapiens
  chr17:9143110-9143296
  hyper
caaaatcaagcccctcaagaagtacctgctgctgggcaacgcggaggactctccggaccagagcggcatcgtggccgataaaagcagcctggtgatccagtggcgggacacgtgggcgcggcggctgcgcaagttccagcagcgtgagaagaagggcaagtgcaagaaggcctagcgccgaggcag

SEQ ID NO: 292006 - DNA, 89 bp, Homo sapiens
  chr17:9143376-9143465
  hyper
cgagggctttcccaggtggggggagggagggggcggggccgcacggcgcggggggcgggaccctcggcggcccctccccctacccccac

SEQ ID NO: 292007 - DNA, 33 bp, Homo sapiens
  chr17:9143504-9143537
  hyper
gggtgcgccgccggccgggccctggagaaatga

SEQ ID NO: 292008 - DNA, 183 bp, Homo sapiens
  chr17:9143607-9143790
  hyper
cgtggaggggctgggggcagcctgccctggggcccgggggcgggcgcagaatcgcacaactggggccccaggcgcggggcgtggatggcgcggagacgtggacgggaggagaactgtgaattctcaagcccgtagtgtgggcggggcgcggagcacccaccaaaccaccacccgacacgcagc

SEQ ID NO: 292009 - DNA, 1476 bp, Homo sapiens
  chr17:9548035-9549511
  hyper
tgagagcctgaaaacttcctggttagcaaatactgaggctggaaagggcctgaacttggcagtccatagatccaggtcgagttccggtttccctgcttacggatcgggcggcctccctacgttgcgataacctctctgagcccccttccttgccgattaaagcaagggtgatcaagtcttgcaagtttttggaaaatgattctaacccaatctgtggtgtaaaaaagcaaaccacaaccactcgggggcttttttcacagggcaacacgtggctcccagttcaggtcccgggttggcgggtgcaggcacagactctgcctccccccaaggggcagacggtctggaaggaggtggcgacacctgtccgcacacacctgagcctgcggaggaaccagcggtgcacaaaagcgctccccacccccacacagcgcccagcgcgcgcctctcaccacgcccgaggctgtgctctggagatgcctgccttgcccttttcttcctgcagtagccaggcctttaccatttactaggcgctttcagaatgttcatttctccgtaatttccactgcttgaaggctgctcgaggaacaggagcagcggcgaaacccaggtctgtcggtttacgaggtaaggaagggtggggaatccgaccacgaagactcccagtcagcgcagcgggggcggcaccaggcaggggtaggggtggcccggcgctgccctggagggggctggtcgtgccgccggattcccgcgcggggcggggctgccccgcccttggctccgcctccgccccgtccccgcacacctggcccgcaggtagccggcaccaggagccttagagaagctgtagggcctgctggccgctcgtccgcctcgcgcccgggggctccgcgcctggagctgcgccggcggcagccatggacctgggccccggggacgcggcaggagggggaccgctcgcgccccggccccgccgccgccgctccctgcgccgcctgttcagccgcttcctgctggcgctgggcagccgctcacgccccggggactcaccgccccggccccagccgggacactgtgatggcgacggtgaggggggcttcgcctgcgccccgggcccagttccagcggcccccgggagccccggggaggaacgcccgcccggaccccagccccagctccagctccccgccggcgatggggcgcggccgccgggcgctcagggcttgaagaaccacggcaacacctgtttcatgaacgcggtggtgcagtgtctcagcaacaccgacctgctggccgagttcctggcgctggggcgctaccgggcggctccgggccgcgccgaggtcaccgagcagctggcggcgctggtgcgcgcgctctggactcgcgaatacacgccccaactttccgcggagttcaaggtaggcagcgctgcgccgccgaccgccctgtccccctggtttcgcctcttgaaaagtg

SEQ ID NO: 292010 - DNA, 149 bp, Homo sapiens; identical to SEQ ID NO: 238913
  chr17:9862885-9863034
  hyper

SEQ ID NO: 292011 - DNA, 41 bp, Homo sapiens; identical to SEQ ID NO: 204428
  chr17:10600737-10600778
  hyper

SEQ ID NO: 292012 - DNA, 187 bp, Homo sapiens; identical to SEQ ID NO: 204429
  chr17:10632700-10632887
  hyper

SEQ ID NO: 292013 - DNA, 295 bp, Homo sapiens; identical to SEQ ID NO: 204430
  chr17:10633350-10633645
  hyper

SEQ ID NO: 292014 - DNA, 281 bp, Homo sapiens
  chr17:11501656-11501937
  hyper
cagcgacgcgaccccgccccttcccgcgtacacctcctaccttattagcctggaaggggcgggaccaggggtccgtgcccaataggaagggagcagaggagtgagtcctggccgcgtccccgtcgctagggaaaccgatgcagctggaggccgcgcgcgatgcggctcgcggaggagcgggccgcgctcgcggcggagaacgcggatggggaacccggcgccgaccgacgactgcgactcctggggacctacgtggccatgagcctgcggccggctgcggg

SEQ ID NO: 292015 - DNA, 146 bp, Homo sapiens
  chr17:11502034-11502180
  hyper
gtgcggcccgggcccaggggcctggcaatacgccccgggctggaggtgggacctgagtcgggcctggctggcgctaaggcgctttttttccttcgcaccgggcccgagcctccagggcccgacagcttccgcggcgcagtggtctg

SEQ ID NO: 292016 - DNA, 213 bp, Homo sapiens
  chr17:12568512-12568725
  hyper
tggatctccagatgcgccgtgtcacatttgtccccccaaaaagcatatcctagaaaatgaaagcctttccatttccccgtggaaatgcatctaagtccagtattggagctgcgagatacagaatcgtctctgccagtgccctgagcccctcaaaccgaggggaatgcgtgggcttcggtccgtcggaagcttttcttctcaggggtccagctt

SEQ ID NO: 292017 - DNA, 381 bp, Homo sapiens
  chr17:12568791-12569172
  hyper
cggctggcgggagatcccggccgcttccctttcgccggcagaagcccggccggggaagccccggctgcgcacgcccatccccaggacctcggagctcccagcggctgccgcagccccgcgaaccacctgcaagccccgcggcgtcgcagcccttccttctttcctccgggcatccgctctttagctcgcgcccctctcccagattcccgacccctggccctgctcccgccctctgtgcctcggcggctgcggggcccgccgcaaagagttaagagccggttcccgagacggcttcggcggctccgggtccccagaccccgctcgccgctcctgattggctgagcgcctgtcagtagtaaagggtatcagatggcaaagttg

SEQ ID NO: 292018 - DNA, 49 bp, Homo sapiens
  chr17:12569402-12569451
  hyper
attctgggttgttagctgcggtcagctgggctcccgggagcctgttgct

SEQ ID NO: 292019 - DNA, 545 bp, Homo sapiens; identical to SEQ ID NO: 204431
  chr17:12692658-12693203
  hyper

SEQ ID NO: 292020 - DNA, 140 bp, Homo sapiens
  chr17:12693500-12693640
  hyper
tccccgggactcccttctccctctggccgcctgtcttcctggaaacaggtgtttgctctgattgtgctggaggcagccgaaccgcagtcggtctccggagatctcttccctcccctcccctgcgccgagttcagggctgc

SEQ ID NO: 292021 - DNA, 135 bp, Homo sapiens; identical to SEQ ID NO: 204432
  chr17:12877185-12877320
  hyper

SEQ ID NO: 292022 - DNA, 48 bp, Homo sapiens; identical to SEQ ID NO: 204433
  chr17:12877650-12877698
  hyper

SEQ ID NO: 292023 - DNA, 35 bp, Homo sapiens
  chr17:12877746-12877781
  hyper
gcattcatatttggcttctgcgtcgcgctggcacc

SEQ ID NO: 292024 - DNA, 268 bp, Homo sapiens; identical to SEQ ID NO: 238920
  chr17:12921256-12921524
  hyper

SEQ ID NO: 292025 - DNA, 109 bp, Homo sapiens; identical to SEQ ID NO: 204434
  chr17:13505656-13505765
  hyper

SEQ ID NO: 292026 - DNA, 154 bp, Homo sapiens
  chr17:14203857-14204011
  hyper
tccgaatgagtccccggcgtgggttggggggggggttccagtgcctagtgcatctcctaccctgctctccctcctccaaccgcctccctactctgcaacacgtaagcatcacgaaacctcctgcgaaacatctggatggggactggtgtcccaa

SEQ ID NO: 292027 - DNA, 260 bp, Homo sapiens; identical to SEQ ID NO: 204436
  chr17:14204242-14204502
  hyper

SEQ ID NO: 292028 - DNA, 168 bp, Homo sapiens; identical to SEQ ID NO: 204437
  chr17:14204834-14205002
  hyper

SEQ ID NO: 292029 - DNA, 86 bp, Homo sapiens
  chr17:14212387-14212473
  hyper
ccagctgcccccgacgttgccacgtgtccgctcctttcgggagctaggggggcgttggcttggacatcccgttctggaagggtggc

SEQ ID NO: 292030 - DNA, 32 bp, Homo sapiens
  chr17:14212686-14212718
  hyper
ggccacgtgaccagcctcgccgtccggcctca

SEQ ID NO: 292031 - DNA, 206 bp, Homo sapiens; identical to SEQ ID NO: 238924
  chr17:15164106-15164312
  hyper

SEQ ID NO: 292032 - DNA, 122 bp, Homo sapiens; identical to SEQ ID NO: 204438
  chr17:15164530-15164652
  hyper

SEQ ID NO: 292033 - DNA, 164 bp, Homo sapiens
  chr17:15164715-15164879
  hyper
ggctccggagaggtggtgcagagccagagtagtgtggaaagaaaagaatggctcgagagggttgcccggaccctgcgcttcccgtccaccgcgcgcttccccaggcagcccctggggtcagggggcattctgctcttgcgctagacccacgtgctcgcctaggg

SEQ ID NO: 292034 - DNA, 160 bp, Homo sapiens; identical to SEQ ID NO: 204440
  chr17:15165789-15165949
  hyper

SEQ ID NO: 292035 - DNA, 266 bp, Homo sapiens; identical to SEQ ID NO: 204441
  chr17:15244586-15244852
  hyper

SEQ ID NO: 292036 - DNA, 67 bp, Homo sapiens
  chr17:15821030-15821097
  hyper
cctgcctagcctggcccatgctggtcgcatcaggggctccattcaacagacgaccgctccgggcctg

SEQ ID NO: 292037 - DNA, 264 bp, Homo sapiens; identical to SEQ ID NO: 204442
  chr17:15848879-15849143
  hyper

SEQ ID NO: 292038 - DNA, 207 bp, Homo sapiens; identical to SEQ ID NO: 204443
  chr17:15849211-15849418
  hyper

SEQ ID NO: 292039 - DNA, 81 bp, Homo sapiens; identical to SEQ ID NO: 238930
  chr17:15903673-15903754
  hyper

SEQ ID NO: 292040 - DNA, 116 bp, Homo sapiens; identical to SEQ ID NO: 238931
  chr17:16120414-16120530
  hyper

SEQ ID NO: 292041 - DNA, 35 bp, Homo sapiens; identical to SEQ ID NO: 204444
  chr17:16256906-16256941
  hyper

SEQ ID NO: 292042 - DNA, 111 bp, Homo sapiens
  chr17:16257038-16257149
  hyper
tgaatccagcgggctcttcgtaccttcccgacctggaggggcctgggttgggcctgaattcgcaggctcatccgagcgggcagcctggggtaacttcgtctccaaaaacga

SEQ ID NO: 292043 - DNA, 52 bp, Homo sapiens; identical to SEQ ID NO: 204446
  chr17:16283875-16283927
  hyper

SEQ ID NO: 292044 - DNA, 674 bp, Homo sapiens; identical to SEQ ID NO: 204447
  chr17:16283956-16284630
  hyper

SEQ ID NO: 292045 - DNA, 53 bp, Homo sapiens; identical to SEQ ID NO: 204448
  chr17:16285065-16285118
  hyper

SEQ ID NO: 292046 - DNA, 420 bp, Homo sapiens; identical to SEQ ID NO: 238933
  chr17:16290017-16290437
  hyper

SEQ ID NO: 292047 - DNA, 338 bp, Homo sapiens; identical to SEQ ID NO: 238934
  chr17:16342655-16342993
  hyper

SEQ ID NO: 292048 - DNA, 57 bp, Homo sapiens; identical to SEQ ID NO: 225243
  chr17:16395229-16395286
  hyper

SEQ ID NO: 292049 - DNA, 101 bp, Homo sapiens; identical to SEQ ID NO: 238935
  chr17:16439048-16439149
  hyper

SEQ ID NO: 292050 - DNA, 86 bp, Homo sapiens; identical to SEQ ID NO: 238936
  chr17:16439419-16439505
  hyper

SEQ ID NO: 292051 - DNA, 271 bp, Homo sapiens
  chr17:16440043-16440314
  hyper
gaaaaggggactcacttcggagaagctgccctctctgcaaacttatttgagtaagggactgaagactgaagttagggagaggaaagggatacacgtctgttagtgcgagttgcgtgtcttgttagtgcgaactggaacccaagtttcctttgggaagactttggcgaaagagtacaggaacaccagccactccagaaagagaccgctcctcttgaacccgcccacttaactcctcccgcaggctctacgttcgaatgcctccaccctgatt

SEQ ID NO: 292052 - DNA, 458 bp, Homo sapiens; identical to SEQ ID NO: 238938
  chr17:16487636-16488094
  hyper

SEQ ID NO: 292053 - DNA, 45 bp, Homo sapiens
  chr17:16570628-16570673
  hyper
tgaggaggctgaggaggctgaggcggctgaggagctgaggggctg

SEQ ID NO: 292054 - DNA, 133 bp, Homo sapiens; identical to SEQ ID NO: 204449
  chr17:17140479-17140612
  hyper

SEQ ID NO: 292055 - DNA, 113 bp, Homo sapiens; identical to SEQ ID NO: 238941
  chr17:17184594-17184707
  hyper

SEQ ID NO: 292056 - DNA, 75 bp, Homo sapiens
  chr17:17204069-17204144
  hyper
cggcctgatggatggagtttttaaaaaactgcaacggcaacccaatatagaaggcacagcaggagccccgcccct

SEQ ID NO: 292057 - DNA, 38 bp, Homo sapiens
  chr17:17204211-17204249
  hyper
atctctgtgctcttgggaacctgtgaaggctccactgc

SEQ ID NO: 292058 - DNA, 52 bp, Homo sapiens
  chr17:17287173-17287225
  hyper
cgcggggcgcggggcgatgcggcgcgccttggcttgccgggccttacgtctg

SEQ ID NO: 292059 - DNA, 81 bp, Homo sapiens; identical to SEQ ID NO: 204450
  chr17:17398323-17398404
  hyper

SEQ ID NO: 292060 - DNA, 166 bp, Homo sapiens; identical to SEQ ID NO: 204451
  chr17:17398440-17398606
  hyper

SEQ ID NO: 292061 - DNA, 480 bp, Homo sapiens
  chr17:17399572-17400052
  hyper
cggggtgagcggctggagggctctgctcgggctgggcgcggctcgggcttggggctccggctccgctcgggctgggctcgggctaggctgggctcggctggggttctcccaggatctgggcacaggccgcttgctctggctttggcgcccggccgccgcccttatatgcagcctgctcggctgccccgccccggccctcccagctcggtgcgtcacgccccgcggggcccgcctcccccgcaccggctcccagtcccggcgacctcgtcacccgctgccgggctcctgctctctgggcgcgggggctggggggagcagtccagggtcgggctgaggctggaggcgctcggactccgcttttccactgccgcgggctcggcggccgcaggggcgtcggggttctggtcccggcggtgcccctgtccctctgcgacttcgggcaaggacccccattcctgcacctcccgcgcgcgtacactt

SEQ ID NO: 292062 - DNA, 227 bp, Homo sapiens; identical to SEQ ID NO: 238946
  chr17:17596965-17597192
  hyper

SEQ ID NO: 292063 - DNA, 525 bp, Homo sapiens; identical to SEQ ID NO: 238947
  chr17:17655444-17655969
  hyper

SEQ ID NO: 292064 - DNA, 1755 bp, Homo sapiens; identical to SEQ ID NO: 204453
  chr17:17685254-17687009
  hyper

SEQ ID NO: 292065 - DNA, 378 bp, Homo sapiens; identical to SEQ ID NO: 204454
  chr17:17687055-17687433
  hyper

SEQ ID NO: 292066 - DNA, 68 bp, Homo sapiens; identical to SEQ ID NO: 238949
  chr17:17876012-17876080
  hyper

SEQ ID NO: 292067 - DNA, 81 bp, Homo sapiens; identical to SEQ ID NO: 204455
  chr17:17991153-17991234
  hyper

SEQ ID NO: 292068 - DNA, 144 bp, Homo sapiens; identical to SEQ ID NO: 238951
  chr17:18086430-18086574
  hyper

SEQ ID NO: 292069 - DNA, 42 bp, Homo sapiens; identical to SEQ ID NO: 238952
  chr17:18163702-18163744
  hyper

SEQ ID NO: 292070 - DNA, 218 bp, Homo sapiens; identical to SEQ ID NO: 238953
  chr17:18164239-18164457
  hyper

SEQ ID NO: 292071 - DNA, 392 bp, Homo sapiens; identical to SEQ ID NO: 238954
  chr17:18218744-18219136
  hyper

SEQ ID NO: 292072 - DNA, 258 bp, Homo sapiens; identical to SEQ ID NO: 238955
  chr17:18266750-18267008
  hyper

SEQ ID NO: 292073 - DNA, 230 bp, Homo sapiens; identical to SEQ ID NO: 238956
  chr17:18761717-18761947
  hyper

SEQ ID NO: 292074 - DNA, 887 bp, Homo sapiens; identical to SEQ ID NO: 204458
  chr17:18907421-18908308
  hyper

SEQ ID NO: 292075 - DNA, 328 bp, Homo sapiens; identical to SEQ ID NO: 204459
  chr17:19140730-19141058
  hyper

SEQ ID NO: 292076 - DNA, 111 bp, Homo sapiens; identical to SEQ ID NO: 238959
  chr17:19141268-19141379
  hyper

SEQ ID NO: 292077 - DNA, 45 bp, Homo sapiens; identical to SEQ ID NO: 238960
  chr17:19141603-19141648
  hyper

SEQ ID NO: 292078 - DNA, 144 bp, Homo sapiens; identical to SEQ ID NO: 204460
  chr17:19265481-19265625
  hyper

SEQ ID NO: 292079 - DNA, 138 bp, Homo sapiens; identical to SEQ ID NO: 204461
  chr17:19281498-19281636
  hyper

SEQ ID NO: 292080 - DNA, 424 bp, Homo sapiens; identical to SEQ ID NO: 225251
  chr17:19282073-19282497
  hyper

SEQ ID NO: 292081 - DNA, 240 bp, Homo sapiens; identical to SEQ ID NO: 238965
  chr17:19552168-19552408
  hyper

SEQ ID NO: 292082 - DNA, 224 bp, Homo sapiens
  chr17:19648279-19648503
  hyper
ccttgtgcaggtctgcggccagcgcgcccaccagctcctgctcctgctcctggatcaggcgctgcagcgcctccagctgctggatccggaactgcagcggacgggtcctgcccgagctgaaggcggcgcgggcgcgcttcacggcctcgctgatcttgctcatggcgcctggggacagagagcacctgcagctggctgaggggcacgagcgcgccctgcctccc

SEQ ID NO: 292083 - DNA, 265 bp, Homo sapiens
  chr17:19770124-19770389
  hyper
gggggaaaacggtacgggggctcttcggggtgcaggggaccagtgctgggaaaggtgacacctcccaggctgcgaaagcctgaggctaatgggacatccgcccattttccgctgggtctgtaattatcaacctcaaaagtgaccagccctgggcacggggaaaaaaaccaaaggtccattcacgcccaaccctcgagtctgcacggtgcagtaccgtctattttgggtccagggtaacctgggtgcaaacgctcctgcgggcgga

SEQ ID NO: 292084 - DNA, 415 bp, Homo sapiens
  chr17:19770859-19771274
  hyper
gggcggactctcatgccgagagaccggagcggaaactggggaagctgccgcgcggagccagggtcagcgaggcccggcccggcccctgccgctcatggcccggcctgccgccggccgctggctgtctggcgaagcggcctcggcgctgccgggccaggggtgccgtcaccgtcactgtgcgcgcccagagccgcacacgcgctctgaggcagtgaggggcccggtactctccatccccagctcgtcgggcctcctcggccctccccgctcggggcgctgctgcgacggcgacggccgccgccctagaacccgcaccgccgcggccccgcgcttccccgcctcgcggcggcgcccaacgccctcgcgcgcgctacccgctcccgcgcgactggctgccctccgcgacgtccgcgcg

SEQ ID NO: 292085 - DNA, 462 bp, Homo sapiens; identical to SEQ ID NO: 238968
  chr17:19881063-19881525
  hyper

SEQ ID NO: 292086 - DNA, 79 bp, Homo sapiens; identical to SEQ ID NO: 238969
  chr17:19912416-19912495
  hyper

SEQ ID NO: 292087 - DNA, 246 bp, Homo sapiens; identical to SEQ ID NO: 204463
  chr17:20059180-20059426
  hyper

SEQ ID NO: 292088 - DNA, 110 bp, Homo sapiens; identical to SEQ ID NO: 238971
  chr17:20744391-20744501
  hyper

SEQ ID NO: 292089 - DNA, 120 bp, Homo sapiens
  chr17:20756146-20756266
  hyper
cttacttggggagaaaacagagctggtggcgctgctgagtgtcaaaccctggagcccatcgtcaagacgttatattggtggcagttctgctgtgagtgcacttgccgaattgaacagagc

SEQ ID NO: 292090 - DNA, 69 bp, Homo sapiens; identical to SEQ ID NO: 238973
  chr17:20945959-20946028
  hyper

SEQ ID NO: 292091 - DNA, 132 bp, Homo sapiens; identical to SEQ ID NO: 204464
  chr17:21030040-21030172
  hyper

SEQ ID NO: 292092 - DNA, 86 bp, Homo sapiens; identical to SEQ ID NO: 238975
  chr17:21069251-21069337
  hyper

SEQ ID NO: 292093 - DNA, 83 bp, Homo sapiens; identical to SEQ ID NO: 238976
  chr17:21117925-21118008
  hyper

SEQ ID NO: 292094 - DNA, 111 bp, Homo sapiens; identical to SEQ ID NO: 238977
  chr17:21187754-21187865
  hyper

SEQ ID NO: 292095 - DNA, 212 bp, Homo sapiens; identical to SEQ ID NO: 204465
  chr17:21189752-21189964
  hyper

SEQ ID NO: 292096 - DNA, 202 bp, Homo sapiens; identical to SEQ ID NO: 204466
  chr17:25659906-25660108
  hyper

SEQ ID NO: 292097 - DNA, 48 bp, Homo sapiens
  chr17:26120916-26120964
  hyper
caggggcccgcagccggcgtctgccgcggagtttggatggcactggac

SEQ ID NO: 292098 - DNA, 38 bp, Homo sapiens; identical to SEQ ID NO: 238980
  chr17:26220451-26220489
  hyper

SEQ ID NO: 292099 - DNA, 171 bp, Homo sapiens
  chr17:26555139-26555310
  hyper
tcgtggaagtggagggtggaggcgtgggggccagaggagagaaaacctactcggacagaggcgctccaggacaaggctggggcgagcgcgggggttccctctgctcggagcccaaggaaaattcgaccacccagcctggggctggacagcgcccagaccaggggctgctgt

SEQ ID NO: 292100 - DNA, 292 bp, Homo sapiens
  chr17:26578647-26578939
  hyper
cggggagacacctctaaggtgtacgcacgaggacggcataaaaccattggtcagctccctaatctcaccgacctctctcccgcaaattccttatcgccctcctttctccctgcccttccctcaaagtgtcagtcaggttgtcctcagcccagaagactcttcctccagacatcctcatggccggctctgtcgccccctggaggcattagctcaaaatccaccttttaaatgggtcttatcctgacacccctgtttaaaattgcaacccggcagcgtgcggtagatgacgcct

SEQ ID NO: 292101 - DNA, 60 bp, Homo sapiens; identical to SEQ ID NO: 238983
  chr17:26879852-26879912
  hyper

SEQ ID NO: 292102 - DNA, 145 bp, Homo sapiens
  chr17:26903726-26903871
  hyper
cggagtcccaggtagcaggacgaggatggcaggggaagagccaaggaaatgaagcggagatgttgagtggctcccgccttgcctggccttacctgtgcgcagccagttagcagccgcagccacaagcacagctcgggttctgatc

SEQ ID NO: 292103 - DNA, 239 bp, Homo sapiens; identical to SEQ ID NO: 53814
  chr17:26903937-26904176
  hyper

SEQ ID NO: 292104 - DNA, 332 bp, Homo sapiens; identical to SEQ ID NO: 204469
  chr17:26925694-26926026
  hyper

SEQ ID NO: 292105 - DNA, 342 bp, Homo sapiens; identical to SEQ ID NO: 11045
  chr17:26926083-26926425
  hyper

SEQ ID NO: 292106 - DNA, 56 bp, Homo sapiens; identical to SEQ ID NO: 204471
  chr17:26926827-26926883
  hyper

SEQ ID NO: 292107 - DNA, 326 bp, Homo sapiens; identical to SEQ ID NO: 238987
  chr17:26988802-26989128
  hyper

SEQ ID NO: 292108 - DNA, 358 bp, Homo sapiens
  chr17:27038291-27038649
  hyper
gtccgatagccgagcgttccagctctggctggaaccagacttcccgcccatcccgcgggcgacccagcagggcctcaggaccccagtcctcaatcattggcccgcggctcgacgcgagcccgcccccggccctagctccgccccggccctagctccgccccggcccagcactgggccccgcctctctcgttggtttgcccgtctccctcgtcggtttgccggcttcccgcgtgcgccgctcggggtctgcgagccgggccgcgccctctgcccagcccctgccccgcccctcttaccgcggcatctgctctcatcccacgagcgggccttgggctcggtcttttccttagtccatctt

SEQ ID NO: 292109 - DNA, 72 bp, Homo sapiens; identical to SEQ ID NO: 238989
  chr17:27039397-27039469
  hyper

SEQ ID NO: 292110 - DNA, 72 bp, Homo sapiens; identical to SEQ ID NO: 204473
  chr17:27044882-27044954
  hyper

SEQ ID NO: 292111 - DNA, 52 bp, Homo sapiens; identical to SEQ ID NO: 238991
  chr17:27046942-27046994
  hyper

SEQ ID NO: 292112 - DNA, 399 bp, Homo sapiens; identical to SEQ ID NO: 238992
  chr17:27070824-27071223
  hyper

SEQ ID NO: 292113 - DNA, 448 bp, Homo sapiens; identical to SEQ ID NO: 238993
  chr17:27181909-27182357
  hyper

SEQ ID NO: 292114 - DNA, 304 bp, Homo sapiens; identical to SEQ ID NO: 238994
  chr17:27230104-27230408
  hyper

SEQ ID NO: 292115 - DNA, 65 bp, Homo sapiens
  chr17:27332301-27332366
  hyper
ggtgagcgaggtcccaaccccgggtccggccgccatccggccccgtctcccctcagtaagaacac

SEQ ID NO: 292116 - DNA, 136 bp, Homo sapiens
  chr17:27332733-27332869
  hyper
gggcagccagatgcccgaagctgggcaccgggtctcccttcccacccctggggccccgctcccgcccccgtcctgccgccggatgccggggtcccttaccgtgagccaggagcgccagcagcgagggcaggagcag

SEQ ID NO: 292117 - DNA, 87 bp, Homo sapiens
  chr17:27333201-27333288
  hyper
tgtgggcacacggcccctgcccttctgcgctgcccacccccagccaagcatgccaccctctttcccgttaacggcctgctaaggaac

SEQ ID NO: 292118 - DNA, 293 bp, Homo sapiens; identical to SEQ ID NO: 238995
  chr17:27621158-27621451
  hyper

SEQ ID NO: 292119 - DNA, 54 bp, Homo sapiens; identical to SEQ ID NO: 204475
  chr17:27893141-27893195
  hyper

SEQ ID NO: 292120 - DNA, 402 bp, Homo sapiens; identical to SEQ ID NO: 53841
  chr17:27893344-27893746
  hyper

SEQ ID NO: 292121 - DNA, 127 bp, Homo sapiens; identical to SEQ ID NO: 204477
  chr17:27940911-27941038
  hyper

SEQ ID NO: 292122 - DNA, 41 bp, Homo sapiens; identical to SEQ ID NO: 238998
  chr17:27941068-27941109
  hyper

SEQ ID NO: 292123 - DNA, 903 bp, Homo sapiens
  chr17:27942512-27943415
  hyper
ctccctaggccagctccagccgagtcccagacgaggctcgcagtccagcctccgctggagcgacgtgggtctcccctaagctccaagagttctggtctcccgcgaggggcggagttccctccccagtcccgcccccgggcccagcccaagaaggcggggtccggagttcgggactaaaagccggggcggggccgagcttgtgcgccccgccccgctccgcctgcctggcgcgcggggctagtccgtgccgtccaccagctcgcacagcatgttctccagagccgtgatgcgctgctcctgggcctgcacccgctcgcggagggccttgatctcttccagcagcgtctccagggtgtgctgctgctggggcggaggacagagaggccgtgtcgtataggggcggttgggggagatgtagattgggccagagtgcagcagggccgatcttaccgacaagggggcgtcgctggccgactggctgcggcgggggccggagggcgggcgcacgtccaggatgttgcgcttcgtgacccggagctcgcggtgcttggggggcacatagccgtccctcagcgaaatgagcacgggttcggcgtcctggccggatagccattcgtccgcttctagggccggctccgggcctggcgtatccgggtacagatcgtcctggaagaggtctgactgcgggggtgggtggacaggaggacttgcgtgagagggtgcggggcttgctccgctcccttccgcctcgtagccctgcccaacccttctcccggcccctcaccttgcggggcacagtcatgatgataggttcacactttctttcgtgtagcttgtagaacctataagggagcagggttcagcaccctcgcagacttccacgtccttaacttctcctgtcta

SEQ ID NO: 292124 - DNA, 73 bp, Homo sapiens; identical to SEQ ID NO: 204479
  chr17:28088056-28088129
  hyper

SEQ ID NO: 292125 - DNA, 325 bp, Homo sapiens; identical to SEQ ID NO: 239003
  chr17:28256763-28257088
  hyper

SEQ ID NO: 292126 - DNA, 329 bp, Homo sapiens; identical to SEQ ID NO: 239004
  chr17:28443742-28444071
  hyper

SEQ ID NO: 292127 - DNA, 37 bp, Homo sapiens; identical to SEQ ID NO: 204480
  chr17:28562514-28562551
  hyper

SEQ ID NO: 292128 - DNA, 242 bp, Homo sapiens; identical to SEQ ID NO: 204481
  chr17:28563016-28563258
  hyper

SEQ ID NO: 292129 - DNA, 98 bp, Homo sapiens
  chr17:28563901-28563999
  hyper
tgcagctccagagaagccaccgccccttgtacttggaggaactgacccctgaaaactgtgcggccggttgggctgagcgtctagagggactgagctgg

SEQ ID NO: 292130 - DNA, 107 bp, Homo sapiens
  chr17:28705456-28705563
  hyper
gacaaggcgcctaggagactgggctaaggctttgagtgtccgaacgaagattctttcgaacctattgattttttctagtcttatgattctttcgaaccttttgattc

SEQ ID NO: 292131 - DNA, 212 bp, Homo sapiens
  chr17:29033064-29033276
  hyper
tggggtgtctcaggcgcggggctcatgggaatcccaaggcgcaaggtgggaggctggaagcgaggagcgccctgggagcagggtgtccgaagcgcgggtaccgatctgggcagcgcggggcacgcggcgcgcgggcgagtctgcgtgcgcgcgcggacgccttggttcccggagcccagttgctggcgcggcctccactgcggctgcgaagc

SEQ ID NO: 292132 - DNA, 347 bp, Homo sapiens
  chr17:29248940-29249287
  hyper
ctggctgaggcgccgcggccgggtccctctccacctgccgggcggagcgcacgggccatgggctgagccccgctgagcccgccgggccggccatgggcgatcgcgagcgcaacaagaagcggctgctggagctgctgcgggcgccggacacaggcaacgcgcactgcgccgactgcggggcggcaggtaagggcgcggcggcgcgggcagcgcgagacccccggccggaccccaggcccacccgactcctcccctcggccccaccgggtcccgccctcggccccctggacccagacgtggcacctgcgggccccgacccctcccacccacaccgtgaacctctcacc

SEQ ID NO: 292133 - DNA, 251 bp, Homo sapiens; identical to SEQ ID NO: 204482
  chr17:29297829-29298080
  hyper

SEQ ID NO: 292134 - DNA, 31 bp, Homo sapiens; identical to SEQ ID NO: 204483
  chr17:29298581-29298612
  hyper

SEQ ID NO: 292135 - DNA, 488 bp, Homo sapiens; identical to SEQ ID NO: 128356
  chr17:29421899-29422387
  hyper

SEQ ID NO: 292136 - DNA, 59 bp, Homo sapiens; identical to SEQ ID NO: 204485
  chr17:29422762-29422821
  hyper

SEQ ID NO: 292137 - DNA, 144 bp, Homo sapiens; identical to SEQ ID NO: 204486
  chr17:29483000-29483144
  hyper

SEQ ID NO: 292138 - DNA, 91 bp, Homo sapiens; identical to SEQ ID NO: 204487
  chr17:29486027-29486118
  hyper

SEQ ID NO: 292139 - DNA, 191 bp, Homo sapiens; identical to SEQ ID NO: 204488
  chr17:29490203-29490394
  hyper

SEQ ID NO: 292140 - DNA, 109 bp, Homo sapiens; identical to SEQ ID NO: 204489
  chr17:29496908-29497017
  hyper

SEQ ID NO: 292141 - DNA, 68 bp, Homo sapiens; identical to SEQ ID NO: 204490
  chr17:29508439-29508507
  hyper

SEQ ID NO: 292142 - DNA, 46 bp, Homo sapiens; identical to SEQ ID NO: 204491
  chr17:29508715-29508761
  hyper

SEQ ID NO: 292143 - DNA, 163 bp, Homo sapiens; identical to SEQ ID NO: 204492
  chr17:29509520-29509683
  hyper

SEQ ID NO: 292144 - DNA, 174 bp, Homo sapiens; identical to SEQ ID NO: 204493
  chr17:29527439-29527613
  hyper

SEQ ID NO: 292145 - DNA, 123 bp, Homo sapiens; identical to SEQ ID NO: 204494
  chr17:29528054-29528177
  hyper

SEQ ID NO: 292146 - DNA, 75 bp, Homo sapiens; identical to SEQ ID NO: 204495
  chr17:29528428-29528503
  hyper

SEQ ID NO: 292147 - DNA, 140 bp, Homo sapiens; identical to SEQ ID NO: 204496
  chr17:29533249-29533389
  hyper

SEQ ID NO: 292148 - DNA, 59 bp, Homo sapiens; identical to SEQ ID NO: 204497
  chr17:29541468-29541527
  hyper

SEQ ID NO: 292149 - DNA, 47 bp, Homo sapiens; identical to SEQ ID NO: 204498
  chr17:29541556-29541603
  hyper

SEQ ID NO: 292150 - DNA, 136 bp, Homo sapiens; identical to SEQ ID NO: 204499
  chr17:29546009-29546145
  hyper

SEQ ID NO: 292151 - DNA, 80 bp, Homo sapiens; identical to SEQ ID NO: 204500
  chr17:29548867-29548947
  hyper

SEQ ID NO: 292152 - DNA, 124 bp, Homo sapiens; identical to SEQ ID NO: 204501
  chr17:29550461-29550585
  hyper

SEQ ID NO: 292153 - DNA, 156 bp, Homo sapiens; identical to SEQ ID NO: 204502
  chr17:29552112-29552268
  hyper

SEQ ID NO: 292154 - DNA, 250 bp, Homo sapiens; identical to SEQ ID NO: 204503
  chr17:29553452-29553702
  hyper

SEQ ID NO: 292155 - DNA, 74 bp, Homo sapiens; identical to SEQ ID NO: 204504
  chr17:29554235-29554309
  hyper

SEQ ID NO: 292156 - DNA, 84 bp, Homo sapiens; identical to SEQ ID NO: 204505
  chr17:29554540-29554624
  hyper

SEQ ID NO: 292157 - DNA, 441 bp, Homo sapiens; identical to SEQ ID NO: 204506
  chr17:29556042-29556483
  hyper

SEQ ID NO: 292158 - DNA, 140 bp, Homo sapiens; identical to SEQ ID NO: 204507
  chr17:29556852-29556992
  hyper

SEQ ID NO: 292159 - DNA, 123 bp, Homo sapiens; identical to SEQ ID NO: 204508
  chr17:29557277-29557400
  hyper

SEQ ID NO: 292160 - DNA, 84 bp, Homo sapiens; identical to SEQ ID NO: 204509
  chr17:29557859-29557943
  hyper

SEQ ID NO: 292161 - DNA, 117 bp, Homo sapiens; identical to SEQ ID NO: 204510
  chr17:29559090-29559207
  hyper

SEQ ID NO: 292162 - DNA, 514 bp, Homo sapiens; identical to SEQ ID NO: 204511
  chr17:29559717-29560231
  hyper

SEQ ID NO: 292163 - DNA, 104 bp, Homo sapiens; identical to SEQ ID NO: 204512
  chr17:29562628-29562732
  hyper

SEQ ID NO: 292164 - DNA, 278 bp, Homo sapiens; identical to SEQ ID NO: 204513
  chr17:29562761-29563039
  hyper

SEQ ID NO: 292165 - DNA, 136 bp, Homo sapiens; identical to SEQ ID NO: 204514
  chr17:29576001-29576137
  hyper

SEQ ID NO: 292166 - DNA, 63 bp, Homo sapiens; identical to SEQ ID NO: 204515
  chr17:29579955-29580018
  hyper

SEQ ID NO: 292167 - DNA, 159 bp, Homo sapiens; identical to SEQ ID NO: 204516
  chr17:29585361-29585520
  hyper

SEQ ID NO: 292168 - DNA, 98 bp, Homo sapiens; identical to SEQ ID NO: 204517
  chr17:29586049-29586147
  hyper

SEQ ID NO: 292169 - DNA, 147 bp, Homo sapiens; identical to SEQ ID NO: 204518
  chr17:29587386-29587533
  hyper

SEQ ID NO: 292170 - DNA, 147 bp, Homo sapiens; identical to SEQ ID NO: 204519
  chr17:29588728-29588875
  hyper

SEQ ID NO: 292171 - DNA, 111 bp, Homo sapiens; identical to SEQ ID NO: 204520
  chr17:29592246-29592357
  hyper

SEQ ID NO: 292172 - DNA, 433 bp, Homo sapiens; identical to SEQ ID NO: 204521
  chr17:29652837-29653270
  hyper

SEQ ID NO: 292173 - DNA, 341 bp, Homo sapiens; identical to SEQ ID NO: 204522
  chr17:29654516-29654857
  hyper

SEQ ID NO: 292174 - DNA, 203 bp, Homo sapiens; identical to SEQ ID NO: 204523
  chr17:29657313-29657516
  hyper

SEQ ID NO: 292175 - DNA, 194 bp, Homo sapiens; identical to SEQ ID NO: 204524
  chr17:29661855-29662049
  hyper

SEQ ID NO: 292176 - DNA, 582 bp, Homo sapiens; identical to SEQ ID NO: 204525
  chr17:29663350-29663932
  hyper

SEQ ID NO: 292177 - DNA, 215 bp, Homo sapiens; identical to SEQ ID NO: 204526
  chr17:29664385-29664600
  hyper

SEQ ID NO: 292178 - DNA, 321 bp, Homo sapiens; identical to SEQ ID NO: 204527
  chr17:29664836-29665157
  hyper

SEQ ID NO: 292179 - DNA, 102 bp, Homo sapiens; identical to SEQ ID NO: 204528
  chr17:29665721-29665823
  hyper

SEQ ID NO: 292180 - DNA, 141 bp, Homo sapiens; identical to SEQ ID NO: 204529
  chr17:29667522-29667663
  hyper

SEQ ID NO: 292181 - DNA, 127 bp, Homo sapiens; identical to SEQ ID NO: 204530
  chr17:29670026-29670153
  hyper

SEQ ID NO: 292182 - DNA, 141 bp, Homo sapiens; identical to SEQ ID NO: 204531
  chr17:29676130-29676271
  hyper

SEQ ID NO: 292183 - DNA, 142 bp, Homo sapiens; identical to SEQ ID NO: 204532
  chr17:29677200-29677342
  hyper

SEQ ID NO: 292184 - DNA, 158 bp, Homo sapiens; identical to SEQ ID NO: 204533
  chr17:29679274-29679432
  hyper

SEQ ID NO: 292185 - DNA, 123 bp, Homo sapiens; identical to SEQ ID NO: 204534
  chr17:29683477-29683600
  hyper

SEQ ID NO: 292186 - DNA, 410 bp, Homo sapiens; identical to SEQ ID NO: 204535
  chr17:29683977-29684387
  hyper

SEQ ID NO: 292187 - DNA, 143 bp, Homo sapiens; identical to SEQ ID NO: 204536
  chr17:29685497-29685640
  hyper

SEQ ID NO: 292188 - DNA, 47 bp, Homo sapiens; identical to SEQ ID NO: 204537
  chr17:29685986-29686033
  hyper

SEQ ID NO: 292189 - DNA, 217 bp, Homo sapiens; identical to SEQ ID NO: 204538
  chr17:29687504-29687721
  hyper

SEQ ID NO: 292190 - DNA, 3665 bp, Homo sapiens; identical to SEQ ID NO: 204539
  chr17:29701030-29704695
  hyper

SEQ ID NO: 292191 - DNA, 143 bp, Homo sapiens; identical to SEQ ID NO: 204540
  chr17:30454644-30454787
  hyper

SEQ ID NO: 292192 - DNA, 266 bp, Homo sapiens; identical to SEQ ID NO: 239016
  chr17:30469088-30469354
  hyper

SEQ ID NO: 292193 - DNA, 1559 bp, Homo sapiens
  chr17:30592474-30594033
  hyper
cgtccttacaacatcgcgcccccaattcactcctagttaaccctgacgtcgccaacatagtgtctccatcacatatctgccacctccaagtgatggttaagccgatggaagagccaagcccgggcccggagtgcaggccggtggtgaccgggccggggacggcgcagtccccatccccgccccgggcagcgccaccacttcctcgccagccccgccgcagccctcccgctcccgggccgcgccgctctgaccgactgggcccgggtggcggcgcccggggtggggtgcggggcgggggccggcgttccccgcgagcagccccgcccccgcccgcgcgccgcccccgaggactccgcggggaggaggagactcgggcgcagagcgggggccgcgagaagcgggaagggagcgcggggagcggcggggccggggccggcccaagggcgccctcgcctcggagccgggcgcgagggccggggcggaggcggaggccggcggggcagctagcgcagtgaagtttggcggcggaggggccgggcgtcccggggtcgcgaggaggcggcggcggcgcggggaccggggccatgggggcgggcgcgggctgcggagcgggcgcggaggcggcgcggcgcgcactgagcccctggagcggcgcggccgccgcggcgcaaagttagcccggcgccccgggacgagccccgcagccgccgccgcccccggaccccgtctcggccatgggcgagcaccccagcccgggccccgcggtggccgcctgcgccgaggcggagcgcatcgaggagctggaacccgaggccgaggagcggctgcccgcggcgccggaggacgtgagtgccccctccccgcccggcaaactttctagggggcgccggggggaaaagccgcccctgtctcgccccacgccgggcaacttggaggtttcagggtgacgcgggagcgccccggattggccgggtccccgcgggcaggagggggcggagggaccggtctccccgaaacgcgcgcgcaccgcttcccccgctctggttcccgcggcttccctgcgggacacagcaccgccactgcgccgcggacctgtcaccgccggagccccctccccgccgctggtgcagtgcccgggacacggcgttttcccgcagaggcggccgcgtcacggcggtgactccccctcccctcacgcccgcgacctgcgagctcccggagctggggaaggagcggacgccgcagagtccccgtccctggccatgcaagccggcctggcgaccccttcctccgctcccggattagctcccgcccggcacctgccttgccgcgacactgattgaaattcaagccggcccccgcctctgaccccggccggagcagggaggcaaagagtgctgggagcggctttgctcctagaaggaggcccgggagtccaagaccgtggcggtgccaggggacggtcccctgggcgaggagagggaggggctgccccgagggcttccccgccgtctgctgctcgggtctccatccctccggtcctgcgggccggccctgcg

SEQ ID NO: 292194 - DNA, 89 bp, Homo sapiens; identical to SEQ ID NO: 204542
  chr17:30813422-30813511
  hyper

SEQ ID NO: 292195 - DNA, 31 bp, Homo sapiens; identical to SEQ ID NO: 204543
  chr17:30846452-30846483
  hyper

SEQ ID NO: 292196 - DNA, 90 bp, Homo sapiens; identical to SEQ ID NO: 204544
  chr17:30846659-30846749
  hyper

SEQ ID NO: 292197 - DNA, 108 bp, Homo sapiens; identical to SEQ ID NO: 204545
  chr17:31203740-31203848
  hyper

SEQ ID NO: 292198 - DNA, 57 bp, Homo sapiens; identical to SEQ ID NO: 204546
  chr17:31254914-31254971
  hyper

SEQ ID NO: 292199 - DNA, 377 bp, Homo sapiens; identical to SEQ ID NO: 204547
  chr17:31255335-31255712
  hyper

SEQ ID NO: 292200 - DNA, 190 bp, Homo sapiens; identical to SEQ ID NO: 239022
  chr17:31264131-31264321
  hyper

SEQ ID NO: 292201 - DNA, 124 bp, Homo sapiens; identical to SEQ ID NO: 204548
  chr17:32483868-32483992
  hyper

SEQ ID NO: 292202 - DNA, 226 bp, Homo sapiens; identical to SEQ ID NO: 204549
  chr17:32906078-32906304
  hyper

SEQ ID NO: 292203 - DNA, 78 bp, Homo sapiens; identical to SEQ ID NO: 204550
  chr17:32907146-32907224
  hyper

SEQ ID NO: 292204 - DNA, 161 bp, Homo sapiens
  chr17:32909146-32909307
  hyper
tttcttaaccagcaaggcgtggcggggttggggggcgggggtgtttcgatgctccacgctgaggggtgagcctcaggcagaatggagggcgcttagatggagggggcagtgggctctccgcattggtggagcgccctcggtgtgccgggctcagctcttgc

SEQ ID NO: 292205 - DNA, 130 bp, Homo sapiens
  chr17:32965109-32965239
  hyper
tgactcggtgcccgcgggcgaagaggacgaggaggaggaagaggacctgggttggggctgcccggatgtggcgggccccacgcggcccactgcacccccggacctgcacaattacatgcgcagaatcaaa

SEQ ID NO: 292206 - DNA, 325 bp, Homo sapiens
  chr17:32965303-32965628
  hyper
gtaggacacagccgggaccccggttcacactgactctgggcggctgaattgattttgtactccctgcccctgcagcttggctccgtgcggagcgggccgcctcagtgtctgggccttccctcgcctcacgccattaccctcttctgccccctgcaggtggagggctcttcctccagtggctcgtaaggaggaaagcaaccccagcctctgttctgccctttccaaacctcctcccatcttaagcaaccccctgccccaagagtgaggcaaggaggtccagcttggggtcaggtgggcccacgctgtgtcccgggcccgcctcccg

SEQ ID NO: 292207 - DNA, 177 bp, Homo sapiens; identical to SEQ ID NO: 239031
  chr17:33213946-33214123
  hyper

SEQ ID NO: 292208 - DNA, 539 bp, Homo sapiens
  chr17:33288351-33288890
  hyper
ccaaagctgcccgggcccgcgccacctcagccttggagttgacggcctttatcgcagccatagcctaaccgttcagagggagaaaaaaaaaaagccttagtcgcgattctgagcaaaaacggcaatgcgacgccacgctctcttgagcctcggccaatcatcgcccttacaggaagtgacgttatcatgcctcgcccgacggaaaccagaatcgttttgggtctggtcgccaagatggcgtcctccgcctccgcccggactccggcagggaagcgagtgataaatcaggaagaattgcggcggttaatgaaggagaagcagcgtctgagcaccagtcggaaacggatagaatctccattcgcgaagtacaaccgtttggggcagctgagttgtgccctgtgtaacactccggttaagagcgagctcctgtggcagactcacgtcctgggaaagcagcaccgagagaaagtggccgagctgaaaggcgcgaaggaagccagccagggttcgtccgccagttcagcgcctcattccgtcaa

SEQ ID NO: 292209 - DNA, 166 bp, Homo sapiens
  chr17:33288988-33289154
  hyper
ttgacaaaataggaaaggagttcattagagcgactcccagtaagccttcaggactcagtttactccccgattatgaagatgaggaggaggaggaagaggaggaggaaggagatggagaaagaaaaaggggggacgccagcaagccgctctccgacgcacagggcaa

SEQ ID NO: 292210 - DNA, 111 bp, Homo sapiens; identical to SEQ ID NO: 204551
  chr17:33446952-33447063
  hyper

SEQ ID NO: 292211 - DNA, 188 bp, Homo sapiens; identical to SEQ ID NO: 239035
  chr17:33469240-33469428
  hyper

SEQ ID NO: 292212 - DNA, 307 bp, Homo sapiens; identical to SEQ ID NO: 204552
  chr17:33700165-33700472
  hyper

SEQ ID NO: 292213 - DNA, 206 bp, Homo sapiens; identical to SEQ ID NO: 204553
  chr17:33701376-33701582
  hyper

SEQ ID NO: 292214 - DNA, 179 bp, Homo sapiens; identical to SEQ ID NO: 204554
  chr17:33701612-33701791
  hyper

SEQ ID NO: 292215 - DNA, 53 bp, Homo sapiens
  chr17:33775274-33775327
  hyper
gaaacaagagtcccaaccttcgcaacgggggaagcctccaggacgcacttggc

SEQ ID NO: 292216 - DNA, 387 bp, Homo sapiens; identical to SEQ ID NO: 239039
  chr17:33787454-33787841
  hyper

SEQ ID NO: 292217 - DNA, 743 bp, Homo sapiens
  chr17:33814244-33814987
  hyper
ccaccgcgcccggccgccctgcggctttttaaggcgctccccagcccacgcacgggcggaagttttgtcatctacagctttcaagtcctccattgctaagtctacaacagcctgcggttttgacagacattgctacagagacaggagccaactttcccagaagggagagaaagcagcctcgggtctccccgagatcggtggggttgctctggcagcgccccacctcgtcccggagcccacggaccaccccccccggacccccggaataagaaacggaggctggaaggtttggcagtggagcgggacgaatttatctgccagcaattccctggaaacaggattccttgcaggcgctgtgccagcgcgggcccttaagcaactgaaagttaaacgcccacgtgaatagctctgagggatcacggagaagttctcgtttcgtctgtacctatttgtattttctaaggcgaaaaaaaagttatttaaagaaaaagagaacgaacctggcgaggtccatgtctgcgcactcttcaccaagtagggggacctgagttcttttccactttcctgctctccgcgtccgtgtgcggctagcccctcgctcagctgcatttctatcgggcactcgactccccggaagtggtggcaccgcacgcgctgttatcgactctgcgcctttggaaacggtgtgtctgcgaatccaacgacgggcgcggtgactcacgcctgtaatcccagcactttgg

SEQ ID NO: 292218 - DNA, 252 bp, Homo sapiens; identical to SEQ ID NO: 239041
  chr17:33905430-33905682
  hyper

SEQ ID NO: 292219 - DNA, 189 bp, Homo sapiens; identical to SEQ ID NO: 204556
  chr17:33914229-33914418
  hyper

SEQ ID NO: 292220 - DNA, 62 bp, Homo sapiens
  chr17:34400043-34400105
  hyper
cccccattgtattgactccacattgccccctgctggtgaaacaagtgcgaaggtcagcgtct

SEQ ID NO: 292221 - DNA, 55 bp, Homo sapiens
  chr17:35014642-35014697
  hyper
tggggggctgtttccctcacttccccgtcgccccggcctcctcccaaagctgctt

SEQ ID NO: 292222 - DNA, 119 bp, Homo sapiens; identical to SEQ ID NO: 204557
  chr17:35078956-35079075
  hyper

SEQ ID NO: 292223 - DNA, 222 bp, Homo sapiens
  chr17:35241874-35242096
  hyper
ctgccaccagggcccgctccccctccagtatgatgggtgaggggttgtcagacggaggagcagtgggggctgcaggagagacgtccgagatgggacgggacatttgggcagttggggccgatttgtcgccattttcacgggcagacttgtgaattaagtggcatgaaattgagcacagaccaggctcccccccagagacggggcagcccccgcccaggaggg

SEQ ID NO: 292224 - DNA, 134 bp, Homo sapiens
  chr17:35290200-35290334
  hyper
gtgctctgacctagggatctcggacaagcctcctaacttgggcctcctggccgggaaagtggagatagtacccttctcttccaccccccaccaccctcttgctatacggttcaggggagaccgtgatacaagct

SEQ ID NO: 292225 - DNA, 211 bp, Homo sapiens
  chr17:35291109-35291320
  hyper
aatgtacaggtcctgggcggtgtaagtggctgtgggtctgtggaggacattgggtaggaaaacgcttgcgtagttgaggatgcagacaataaatgtggccgggaaggtgaggagggaaggttggtgctcttcgctgaacggaactggcttaaatgcagagctgagctgagcggcttcggagaaggcgaatttagaaagcctggtcaatttt

SEQ ID NO: 292226 - DNA, 58 bp, Homo sapiens; identical to SEQ ID NO: 204558
  chr17:35292661-35292719
  hyper

SEQ ID NO: 292227 - DNA, 646 bp, Homo sapiens
  chr17:35293023-35293669
  hyper
gggggcggcggtcccgagttcctagccagagcgggattagggagttacgggttccctgaggagtgaactatggagggtgtggtttgctgttgtctggggaagccggtgccaacccgaagcctggacaggggaggactggaatcccggcacacgctgcccatgcactgcacgcccatctactgcagcctcttcgtggcgtcccggcaccccccctcctccttccctcttcccaacgccacgaccaccacccccagccgccgctggagcccccggtttcccgcctagtcgtttgtttttgtacgtaaaaggtgtctccggatcacagttttctcacaactttctcgccagggttgcaactcctcacccgaggcgcttcccggtccactccttcccccgcgccggcgccgcgcctccggtctccccgcccccatcaggaaaccgcccgaatcaactttgcaagagtgctctgcgggagacagacactcagctcgcccaggacccggaccctgtggactttggatggattgggggagggggcacagaaagagggacgggaggagggagattctgctgctaagagcctcctccccctccaaagatgtgcgctgcgcttgggacaaacttccaggtcaagaaagtacggggg

SEQ ID NO: 292228 - DNA, 456 bp, Homo sapiens
  chr17:35716404-35716860
  hyper
ggcccggccttcgcggccccttctgccacagccgggtacggggccaacccctcggctcctcctcctggcggagaggggagtgggggaagcggtcccgcatgcgcctcgcatcagggacagaggcgtcccaagtgaggggccaggactagccggcctgtagaggcggggaaagggaacccagaattaaggcgggctagaatggggcaggcggtgtgcgggcccgtttgtctgtttaatcctaacacattaacaaggggtgggcaatcgcgtccactacctgtcctcatcacgctggctggtttccaagtctgggcgagctaagtaaccccatgctggaactccataaccagccccccgtttcgctcctcagccccgagacagcccactccaaaggtgttatacatgctggatcctggcgtgttgaggagaagcctcagtaaacgaagctcagtaaga

SEQ ID NO: 292229 - DNA, 64 bp, Homo sapiens; identical to SEQ ID NO: 239062
  chr17:35849757-35849821
  hyper

SEQ ID NO: 292230 - DNA, 424 bp, Homo sapiens; identical to SEQ ID NO: 239063
  chr17:35969347-35969771
  hyper

SEQ ID NO: 292231 - DNA, 387 bp, Homo sapiens; identical to SEQ ID NO: 239064
  chr17:36003202-36003589
  hyper

SEQ ID NO: 292232 - DNA, 88 bp, Homo sapiens; identical to SEQ ID NO: 204561
  chr17:36101943-36102031
  hyper

SEQ ID NO: 292233 - DNA, 202 bp, Homo sapiens; identical to SEQ ID NO: 204562
  chr17:36102080-36102282
  hyper

SEQ ID NO: 292234 - DNA, 86 bp, Homo sapiens
  chr17:36204361-36204447
  hyper
agtcatgccaaagtcgggtgtcagtaaccaggggggccgcctgaggcgtcgcatccaacccccgcccaggtttccgccccgggcca

SEQ ID NO: 292235 - DNA, 81 bp, Homo sapiens
  chr17:36204541-36204622
  hyper
ctgactgtccagccccgggtggtgcccatcctgcctgttgttccctctcaaaccaaataaacctcccgacgtatggactct

SEQ ID NO: 292236 - DNA, 143 bp, Homo sapiens; identical to SEQ ID NO: 204563
  chr17:36714788-36714931
  hyper

SEQ ID NO: 292237 - DNA, 445 bp, Homo sapiens; identical to SEQ ID NO: 204564
  chr17:36715092-36715537
  hyper

SEQ ID NO: 292238 - DNA, 255 bp, Homo sapiens; identical to SEQ ID NO: 53978
  chr17:36716048-36716303
  hyper

SEQ ID NO: 292239 - DNA, 75 bp, Homo sapiens
  chr17:36729187-36729262
  hyper
gcgcggccccgccggcgcagccccgcagaggagcggcggaggctggtggctgcgtcgccgcggtcacccgatacg

SEQ ID NO: 292240 - DNA, 171 bp, Homo sapiens; identical to SEQ ID NO: 239072
  chr17:36735071-36735242
  hyper

SEQ ID NO: 292241 - DNA, 46 bp, Homo sapiens; identical to SEQ ID NO: 11164
  chr17:36762362-36762408
  hyper

SEQ ID NO: 292242 - DNA, 173 bp, Homo sapiens
  chr17:36829804-36829977
  hyper
aggctgaaggtgctcgtggtggggagcgtcggtgcagggcggcggggctgcgcggtgcgcggagggggcgccggcagccggcgtttcttggcggctccccgagccggccctttcgcaggcggccgctctggcccccggcgcaaactcggagtgtccaaggcgaagcccttcgc

SEQ ID NO: 292243 - DNA, 301 bp, Homo sapiens
  chr17:36830051-36830352
  hyper
ccgggctggccgtcgaggggctggccgctggagcctcgggggcggccggcggggggtttccatcgacttcggcaggctggccgggcaggaacggccgcggcgccgtcccgggacccgcgggctcggtggagaggcccgcaggtggcgacggaggccgggaactgggttcctgaggcgggctggcggctgggccacgctgaggctcgagacccggggccgggcgaggcggggccgaggcgaagctggtcgtagattcccgagggtgcgggggcgcagggcagcggcccggaggtgcacagga

SEQ ID NO: 292244 - DNA, 284 bp, Homo sapiens; identical to SEQ ID NO: 239074
  chr17:36859556-36859840
  hyper

SEQ ID NO: 292245 - DNA, 222 bp, Homo sapiens; identical to SEQ ID NO: 204568
  chr17:36886754-36886976
  hyper

SEQ ID NO: 292246 - DNA, 37 bp, Homo sapiens; identical to SEQ ID NO: 204569
  chr17:36904350-36904387
  hyper

SEQ ID NO: 292247 - DNA, 450 bp, Homo sapiens; identical to SEQ ID NO: 204570
  chr17:36905017-36905467
  hyper

SEQ ID NO: 292248 - DNA, 834 bp, Homo sapiens; identical to SEQ ID NO: 204571
  chr17:36905507-36906341
  hyper

SEQ ID NO: 292249 - DNA, 249 bp, Homo sapiens; identical to SEQ ID NO: 239078
  chr17:36981592-36981841
  hyper

SEQ ID NO: 292250 - DNA, 241 bp, Homo sapiens; identical to SEQ ID NO: 239079
  chr17:37009959-37010200
  hyper

SEQ ID NO: 292251 - DNA, 198 bp, Homo sapiens; identical to SEQ ID NO: 239080
  chr17:37025964-37026162
  hyper

SEQ ID NO: 292252 - DNA, 91 bp, Homo sapiens; identical to SEQ ID NO: 204573
  chr17:37183607-37183698
  hyper

SEQ ID NO: 292253 - DNA, 239 bp, Homo sapiens
  chr17:37307753-37307992
  hyper
tggctcaggctgcggccgcgcggtccccggggctggcggaggggcgggcggcgaggagacggcggagcgcggggccgggcgagccggcaggagcggcgagagcgcgagcggagctggaggctgcggcctccgggagcaggcggggagctgggggggccgctgggtcggtgggggtgggggggagctggggcagggggcggggcggggggcgcggcgtcgttgggggctctcccggcgcc

SEQ ID NO: 292254 - DNA, 147 bp, Homo sapiens; identical to SEQ ID NO: 204574
  chr17:37310273-37310420
  hyper

SEQ ID NO: 292255 - DNA, 384 bp, Homo sapiens; identical to SEQ ID NO: 239085
  chr17:37353469-37353853
  hyper

SEQ ID NO: 292256 - DNA, 67 bp, Homo sapiens; identical to SEQ ID NO: 204575
  chr17:37365973-37366040
  hyper

SEQ ID NO: 292257 - DNA, 39 bp, Homo sapiens; identical to SEQ ID NO: 204576
  chr17:37382418-37382457
  hyper

SEQ ID NO: 292258 - DNA, 60 bp, Homo sapiens; identical to SEQ ID NO: 239089
  chr17:37617659-37617719
  hyper

SEQ ID NO: 292259 - DNA, 935 bp, Homo sapiens; identical to SEQ ID NO: 239090
  chr17:37618440-37619375
  hyper

SEQ ID NO: 292260 - DNA, 454 bp, Homo sapiens
  chr17:37755736-37756190
  hyper
cacccccacccctcgcttttaatgcgactctggcgagaacagatgtcccaaaccgggcgaactgcccagaccccgcccagctgtgcccttggtgaagacttggctaagagtaggaactggcatgcaggtccccaaaggggttcgggggttcccgcgacccctgtgggacctgacctagcagccttggcctcctggccagctcagcctcaggcgggaggcggaagagacccggaaagacccgttcctaattcaattaattccgaaaagaggaatgagacgcagacagatactgacagaagctgggagagaggtttaaatacccgaacaccagacacacactctggtatggaactccgcagcccctgtcagcgcggggagacctcgctgcgctcccgcgctggagagggcaggagagttggctgcgctagagccataccctggctcacatctgggc

SEQ ID NO: 292261 - DNA, 252 bp, Homo sapiens
  chr17:37756404-37756656
  hyper
ggctggcgcccctgtcccagtgctttaggttggagaaagtttccagagcagaacagccctcccaaggcagctgcgccctttcttaccacttctcacccagggaaactttgtcgagaatttttaaagctgcaggacagaaaggcagaagctgcttcaggattcagaaccggggcagggttttaaggtttctcacagttcaggtgtcatttctgctctggccccgtggccagcgcctgggtatcccagccctga

SEQ ID NO: 292262 - DNA, 606 bp, Homo sapiens; identical to SEQ ID NO: 204579
  chr17:37757285-37757891
  hyper

SEQ ID NO: 292263 - DNA, 141 bp, Homo sapiens; identical to SEQ ID NO: 204580
  chr17:37759987-37760128
  hyper

SEQ ID NO: 292264 - DNA, 146 bp, Homo sapiens
  chr17:37762839-37762985
  hyper
ggcgggtcagcatggtgcctgagggcgccccgcgggcgggaaggggagacagacagcacaaagtgaggggcgcgctggggtaccgacgcccccccacaaccctcctccacccccgagtctcgtgcgggctcctgcctaggctaccc

SEQ ID NO: 292265 - DNA, 211 bp, Homo sapiens
  chr17:37764307-37764518
  hyper
tctgtcactctctactccaaaaaaaaaaaaaaaaattaaataaataaaggaaataaataaatatttctgccgccctcccctccccgcccaacgcagggaaagcagggattgagaggaaggtgggaggagttgccccctgtatatagagaccccctcacgggaacaatggggtggcaaggctggacactgggggctcgtggtggccaattct

SEQ ID NO: 292266 - DNA, 339 bp, Homo sapiens; identical to SEQ ID NO: 204583
  chr17:37774745-37775084
  hyper

SEQ ID NO: 292267 - DNA, 336 bp, Homo sapiens; identical to SEQ ID NO: 204584
  chr17:37782849-37783185
  hyper

SEQ ID NO: 292268 - DNA, 118 bp, Homo sapiens
  chr17:37783775-37783893
  hyper
ggcttcttcgccctcccaaggcgctgccccggccggactggcctgggggtgggggcgcaaggagagccgggctctgcctcggtcaggacggggcgcggggccgcgtgtgaagttagct

SEQ ID NO: 292269 - DNA, 32 bp, Homo sapiens; identical to SEQ ID NO: 239099
  chr17:37793198-37793230
  hyper

SEQ ID NO: 292270 - DNA, 50 bp, Homo sapiens; identical to SEQ ID NO: 204586
  chr17:37793985-37794035
  hyper

SEQ ID NO: 292271 - DNA, 52 bp, Homo sapiens; identical to SEQ ID NO: 204587
  chr17:37823746-37823798
  hyper

SEQ ID NO: 292272 - DNA, 525 bp, Homo sapiens
  chr17:37823945-37824470
  hyper
cacagctcacctcccctatcgcgcctgccatcggacgggcagtgccgcgccctgctctggggcccccggagcgaccacagcggaggccggaacggactgtcctttctggggcggggtggggagggggtgtcgctggagggcccggtggcatagcaacggacgagagaggcctggaggaggggcggggagggggagttgtgtggcagttctaagggaagggtgggtgctgggacgggtgtccgggagggaggggagcctggcggggtctggggcctcgtcgcggagggcgctgcgagggggaaactggggaaagggcctaattccccagtctccacctcgaatcaggaaagagaaggggcgggctgctgggcaaaagaggtgaatggctgcggggggctggagaagagagatgggaggggccggccggcgggggtgagggggtctaaagattgtgggggtgaggaactgagggtggggggcgcccagaggcgggactcggggcggggcaggcgaggcggagggcga

SEQ ID NO: 292273 - DNA, 93 bp, Homo sapiens
  chr17:37844398-37844491
  hyper
ggatttttgtgggcgcctgccccgcccctcgtccccctgctgtgtccatatatcgaggcgatagggttaagggaaggcggacgcctgatgggt

SEQ ID NO: 292274 - DNA, 63 bp, Homo sapiens; identical to SEQ ID NO: 204589
  chr17:37856349-37856412
  hyper

SEQ ID NO: 292275 - DNA, 322 bp, Homo sapiens; identical to SEQ ID NO: 204590
  chr17:37856726-37857048
  hyper

SEQ ID NO: 292276 - DNA, 88 bp, Homo sapiens; identical to SEQ ID NO: 239103
  chr17:37886988-37887076
  hyper

SEQ ID NO: 292277 - DNA, 444 bp, Homo sapiens
  chr17:37895514-37895958
  hyper
ggacctcatggaggcgggcagcctgtaatgattaactgcagagacactccagcattcttcccgaattaaactttaaaagagctgccccgccttctcccattgggtatttttcctgagtgagagtgggcggggcctcagagtcctgggtcctcccttatactaggagtcatccaggggtttctcaccttctcacctgggccctgcaccctaaaaaattataagcctctcccgtgggggcggggcgtggagtactgggcggacgggggctctcccgccacatccaggcccctggcccaggcctcagtcccgcaagcccttccccctgctctgggaagcagagttgttttctgttggccctgaacaccgggccccgccacctgcccttagggccagccaggtggggcgtgattcaggaagtaaacaaggaggttgggaggacgggaa

SEQ ID NO: 292278 - DNA, 79 bp, Homo sapiens; identical to SEQ ID NO: 128574
  chr17:37896009-37896088
  hyper

SEQ ID NO: 292279 - DNA, 319 bp, Homo sapiens; identical to SEQ ID NO: 239105
  chr17:38020386-38020705
  hyper

SEQ ID NO: 292280 - DNA, 47 bp, Homo sapiens; identical to SEQ ID NO: 225345
  chr17:38024015-38024062
  hyper

SEQ ID NO: 292281 - DNA, 172 bp, Homo sapiens; identical to SEQ ID NO: 239106
  chr17:38210766-38210938
  hyper

SEQ ID NO: 292282 - DNA, 78 bp, Homo sapiens; identical to SEQ ID NO: 239107
  chr17:38219347-38219425
  hyper

SEQ ID NO: 292283 - DNA, 39 bp, Homo sapiens; identical to SEQ ID NO: 204593
  chr17:38228513-38228552
  hyper

SEQ ID NO: 292284 - DNA, 37 bp, Homo sapiens; identical to SEQ ID NO: 204594
  chr17:38228861-38228898
  hyper

SEQ ID NO: 292285 - DNA, 83 bp, Homo sapiens
  chr17:38255680-38255763
  hyper
aacaaacgcagcacgtgggcccggctctagagccatgtgagccctcccggcggccggagccctgtaggtgccctccctcgggc

SEQ ID NO: 292286 - DNA, 56 bp, Homo sapiens; identical to SEQ ID NO: 128592
  chr17:38255830-38255886
  hyper

SEQ ID NO: 292287 - DNA, 127 bp, Homo sapiens; identical to SEQ ID NO: 239110
  chr17:38256107-38256234
  hyper

SEQ ID NO: 292288 - DNA, 119 bp, Homo sapiens; identical to SEQ ID NO: 239111
  chr17:38256918-38257037
  hyper

SEQ ID NO: 292289 - DNA, 89 bp, Homo sapiens; identical to SEQ ID NO: 239113
  chr17:38296368-38296457
  hyper

SEQ ID NO: 292290 - DNA, 163 bp, Homo sapiens; identical to SEQ ID NO: 204595
  chr17:38348018-38348181
  hyper

SEQ ID NO: 292291 - DNA, 109 bp, Homo sapiens; identical to SEQ ID NO: 239115
  chr17:38375105-38375214
  hyper

SEQ ID NO: 292292 - DNA, 165 bp, Homo sapiens; identical to SEQ ID NO: 239116
  chr17:38443942-38444107
  hyper

SEQ ID NO: 292293 - DNA, 252 bp, Homo sapiens; identical to SEQ ID NO: 204596
  chr17:38474111-38474363
  hyper

SEQ ID NO: 292294 - DNA, 143 bp, Homo sapiens
  chr17:38478452-38478595
  hyper
agccaaggtgccctcgtctgggcgggcaccttggagcagtgagggggattcctcaagcacaaaaggcaggggagaagtggcagggaagaggtggcaggggagaggtggcaggggctaggcacagttgggaccttgcttgcctg

SEQ ID NO: 292295 - DNA, 436 bp, Homo sapiens; identical to SEQ ID NO: 204598
  chr17:38498112-38498548
  hyper

SEQ ID NO: 292296 - DNA, 584 bp, Homo sapiens
  chr17:38498596-38499180
  hyper
cggcctgcggacttggggagccgctgtactctgcctcggacgccacgagactctagacgggagtcccctcgaggtgaagccgctgagttcccgggccccgccaggcttccctgggagagccgacggaccccccctcccagcacacacaacttccctgcttttcaccgggactggcggagcggccggcggacttagacgcggggacttcagggcagggggcgccccctgcccgggtcaccagtcggggcgaggggacgtctcctctcccccagctgctctgctcggatggcgccgccggctgagtgacgggggcggcgcgcaggacttcccagctcggacctcttgccttcgaggggaaagatgtacgagagtgtagaagtggggggtcccacccctaatcccttcctagtggtggatttttataaccagaaccgggcctgtttgctcccagagaaggggctccccgccccgggtccgtactccaccccgctccggactccgctttggaatggctcaaaccactgtacgtaccggcctctcagtctgctgttgtagggggtgggagtgggcggtagggcttccac

SEQ ID NO: 292297 - DNA, 151 bp, Homo sapiens; identical to SEQ ID NO: 239119
  chr17:38501383-38501534
  hyper

SEQ ID NO: 292298 - DNA, 91 bp, Homo sapiens; identical to SEQ ID NO: 239120
  chr17:38573797-38573888
  hyper

SEQ ID NO: 292299 - DNA, 89 bp, Homo sapiens; identical to SEQ ID NO: 239121
  chr17:38574211-38574300
  hyper

SEQ ID NO: 292300 - DNA, 203 bp, Homo sapiens; identical to SEQ ID NO: 239122
  chr17:38599494-38599697
  hyper

SEQ ID NO: 292301 - DNA, 159 bp, Homo sapiens; identical to SEQ ID NO: 204600
  chr17:38604453-38604612
  hyper

SEQ ID NO: 292302 - DNA, 137 bp, Homo sapiens; identical to SEQ ID NO: 239124
  chr17:38739098-38739235
  hyper

SEQ ID NO: 292303 - DNA, 264 bp, Homo sapiens; identical to SEQ ID NO: 239125
  chr17:38804062-38804326
  hyper

SEQ ID NO: 292304 - DNA, 293 bp, Homo sapiens; identical to SEQ ID NO: 204601
  chr17:39683516-39683809
  hyper

SEQ ID NO: 292305 - DNA, 815 bp, Homo sapiens
  chr17:39683839-39684654
  hyper
ccccacccacttatctgccctgcccagttctcctcccctttccaccaccccggcctctgcatccagccccgaggtcctgccccgcacgtctcctgtccccctttactcggccccacctgtggaccttcccacgtcctaacgggctcctgcccgccgccccgcctggaacctcgcccggcccgcggggctgggtttccgcggcaggtgcactgcacttcccgcggccgggcctccgcccaccttgtcccgcaggtcctggatggtcgtgtagtagtggctgtagtcgcgggagggcccaggcccctgcttctggtaccagtcgcggatcttcacctctagctcgccgttggccgcctccagggcgcgcaccttgtccaggtaggaggccaggcggtcgttgaggttctgcatggttagcttctcgttgcccgccagcagcccgtcggacgcggtcaggacgccgccgtagccgccgccgtaggcccccgaggaggacgaggacacaaagcgggcggaggacacggatacgccgcggccgccggagcccccgtgaatgctgggcgcgcgaaaggcgacccccggcccaaaacgcacggagccgccgcccaggcctccgaaggacgacgtggccgacgactggcgatagctgtaggaagtcatggcgaggcggagcacggacggagcaaccctggtctcagaagctgcgattcgcgggaggagcggcgaggccctcacctggcgccttttatgcccgcggccggtggaggggggaagggaggaatggtgtcaggggcggatatctgagccctgaggaa

SEQ ID NO: 292306 - DNA, 565 bp, Homo sapiens; identical to SEQ ID NO: 239127
  chr17:40306686-40307251
  hyper

SEQ ID NO: 292307 - DNA, 50 bp, Homo sapiens
  chr17:40332756-40332806
  hyper
ggagttcctagacccgcacctccattctctcccctcgcctcgggtctcac

SEQ ID NO: 292308 - DNA, 53 bp, Homo sapiens; identical to SEQ ID NO: 225351
  chr17:40333432-40333485
  hyper

SEQ ID NO: 292309 - DNA, 69 bp, Homo sapiens
  chr17:40400757-40400826
  hyper
ggcggcactgttaccggaagaagcgaagagcagcgatttccttccaaaaggtcagctgcctcagacaga

SEQ ID NO: 292310 - DNA, 77 bp, Homo sapiens; identical to SEQ ID NO: 204604
  chr17:40427488-40427565
  hyper

SEQ ID NO: 292311 - DNA, 517 bp, Homo sapiens
  chr17:40428745-40429262
  hyper
agcagggctagggcgcactgtcgtggtcgttttggttggccccctccgcggcccgcccacctctctccctgggagcccaggcccgcgttccgggtcctctcccgccgaggccgaggtcagaagtccacaggggccccgatcaataattatcctgggtttgcccccgggagggcgtctcagccagggctcctgccgcctgcatgggcacggcaggaattcacattcgcccaggccgaattcacctgtccgagttccagggtgaacctacgggggacggggcgcctggggccggttcccttcctgggaaaatctggctggctcccaccagtcagagctgcgggagggactgctctctctagagaagaaagaataaacagggtcatctgtaggatccaggggaagggggtcccccagatcctttccacgtgctgaggagggggttgcggttgtgggaagccaggctgagtcacccactctcctttcctctgctacgtctatctcccggagctggccagcg

SEQ ID NO: 292312 - DNA, 56 bp, Homo sapiens
  chr17:40441311-40441367
  hyper
gcctggcctggccgcggtccagggataggtaggcatggcaaggccaggggcaggcc

SEQ ID NO: 292313 - DNA, 58 bp, Homo sapiens; identical to SEQ ID NO: 239132
  chr17:40540529-40540587
  hyper

SEQ ID NO: 292314 - DNA, 98 bp, Homo sapiens
  chr17:40558069-40558167
  hyper
aggggaccaaacttcgggtcggagatggggttgcgtaataattgcacttgggctaaaatctctgtggtcgtccaaccctgtcctgatccctttccacc

SEQ ID NO: 292315 - DNA, 51 bp, Homo sapiens; identical to SEQ ID NO: 54071
  chr17:40558226-40558277
  hyper

SEQ ID NO: 292316 - DNA, 212 bp, Homo sapiens; identical to SEQ ID NO: 204606
  chr17:40573874-40574086
  hyper

SEQ ID NO: 292317 - DNA, 183 bp, Homo sapiens
  chr17:40574658-40574841
  hyper
ctttaaagttgcggcgccgcagcagctcggcctcgttgacctccagcttcttgatctgccccgcctggcgctccaggctgccgcgcacggtcttcacgttgacgctgaccttgcgcaccttctccagcagcttgctcaccgtattgctcgtggtggcgtgcgccttgcccagcttgctcagct

SEQ ID NO: 292318 - DNA, 557 bp, Homo sapiens; identical to SEQ ID NO: 128645
  chr17:40574882-40575439
  hyper

SEQ ID NO: 292319 - DNA, 115 bp, Homo sapiens; identical to SEQ ID NO: 239136
  chr17:40610751-40610866
  hyper

SEQ ID NO: 292320 - DNA, 63 bp, Homo sapiens; identical to SEQ ID NO: 239137
  chr17:40713961-40714024
  hyper

SEQ ID NO: 292321 - DNA, 199 bp, Homo sapiens; identical to SEQ ID NO: 239138
  chr17:40719398-40719597
  hyper

SEQ ID NO: 292322 - DNA, 967 bp, Homo sapiens; identical to SEQ ID NO: 239139
  chr17:40760808-40761775
  hyper

SEQ ID NO: 292323 - DNA, 93 bp, Homo sapiens; identical to SEQ ID NO: 239140
  chr17:40829163-40829256
  hyper

SEQ ID NO: 292324 - DNA, 311 bp, Homo sapiens; identical to SEQ ID NO: 204609
  chr17:40831605-40831916
  hyper

SEQ ID NO: 292325 - DNA, 62 bp, Homo sapiens; identical to SEQ ID NO: 204610
  chr17:40897135-40897197
  hyper

SEQ ID NO: 292326 - DNA, 121 bp, Homo sapiens; identical to SEQ ID NO: 239143
  chr17:40925326-40925447
  hyper

SEQ ID NO: 292327 - DNA, 59 bp, Homo sapiens; identical to SEQ ID NO: 239145
  chr17:40932939-40932998
  hyper

SEQ ID NO: 292328 - DNA, 211 bp, Homo sapiens
  chr17:40950645-40950856
  hyper
cggggcctctccacgcttagaatccagagggtcaccagctcccgaagacgccatgttgccactcctcccttcgcggtgccgccgcgcgggcctcgctgggaacagtagcccttggccgctgcagtggactctgggagttgtagtccgcgtgccctttgcggggcagagccgcggttcccgggcacaggggatggacgcgggaggtgagaag

SEQ ID NO: 292329 - DNA, 56 bp, Homo sapiens; identical to SEQ ID NO: 239146
  chr17:40985217-40985273
  hyper

SEQ ID NO: 292330 - DNA, 191 bp, Homo sapiens; identical to SEQ ID NO: 239147
  chr17:41116341-41116532
  hyper

SEQ ID NO: 292331 - DNA, 38 bp, Homo sapiens; identical to SEQ ID NO: 239148
  chr17:41132449-41132487
  hyper

SEQ ID NO: 292332 - DNA, 362 bp, Homo sapiens; identical to SEQ ID NO: 204611
  chr17:41150140-41150502
  hyper

SEQ ID NO: 292333 - DNA, 514 bp, Homo sapiens; identical to SEQ ID NO: 225356
  chr17:41196311-41196825
  hyper

SEQ ID NO: 292334 - DNA, 589 bp, Homo sapiens
  chr17:41197125-41197714
  hyper
gtttccttttcatttctaatacctgcctcagaatttcctccccaatgttccactccaacatttgagaactgcccaaggactattctgactttaagtcacataatcgatcccaagcactctccttccattgaagggtctgactctctgcctttgtgaacacagggttttagagaagtaaacttagggaaaccagctattctcttgaggccaagccactctgtgcttccagccctaagccaacaacagcctgaatagaaagaatagggctgataaataatgaatcagcatcttgctcaattggtggcgtttaaatggttttaaaatcttctcaggtgaaaaattaccataattttgtgctcatggcagatttccaagggagacttcaagcagaaaatctttaagggacccttgcatagccagaagtccttttcaggctgatgtacataaaatatttagtagccaggacagtagaaggactgaagagtgagaggagctcccagggcctggaaaggccactttgtaagctcattcttggggtcctgtggctctgtacctgtggctggctgcagtcagtagtggctgtggggga

SEQ ID NO: 292335 - DNA, 76 bp, Homo sapiens
  chr17:41197743-41197819
  hyper
tggcactggtagagtgctacactgtccaacacccactctcgggtcaccacaggtgcctcacacatctgcccaattg

SEQ ID NO: 292336 - DNA, 61 bp, Homo sapiens; identical to SEQ ID NO: 225358
  chr17:41199659-41199720
  hyper

SEQ ID NO: 292337 - DNA, 32 bp, Homo sapiens
  chr17:41203102-41203134
  hyper
ccatagcaacagatttctagccccctgaagat

SEQ ID NO: 292338 - DNA, 38 bp, Homo sapiens
  chr17:41209114-41209152
  hyper
cttccattgaccacatctcctctgacttcaaaatcatg

SEQ ID NO: 292339 - DNA, 41 bp, Homo sapiens; identical to SEQ ID NO: 225362
  chr17:41215349-41215390
  hyper

SEQ ID NO: 292340 - DNA, 88 bp, Homo sapiens; identical to SEQ ID NO: 225364
  chr17:41219624-41219712
  hyper

SEQ ID NO: 292341 - DNA, 311 bp, Homo sapiens; identical to SEQ ID NO: 225365
  chr17:41222944-41223255
  hyper

SEQ ID NO: 292342 - DNA, 191 bp, Homo sapiens; identical to SEQ ID NO: 225366
  chr17:41226347-41226538
  hyper

SEQ ID NO: 292343 - DNA, 127 bp, Homo sapiens; identical to SEQ ID NO: 225367
  chr17:41228504-41228631
  hyper

SEQ ID NO: 292344 - DNA, 172 bp, Homo sapiens; identical to SEQ ID NO: 225368
  chr17:41234420-41234592
  hyper

SEQ ID NO: 292345 - DNA, 89 bp, Homo sapiens; identical to SEQ ID NO: 225369
  chr17:41242960-41243049
  hyper

SEQ ID NO: 292346 - DNA, 3426 bp, Homo sapiens; identical to SEQ ID NO: 225370
  chr17:41243451-41246877
  hyper

SEQ ID NO: 292347 - DNA, 77 bp, Homo sapiens; identical to SEQ ID NO: 225371
  chr17:41247862-41247939
  hyper

SEQ ID NO: 292348 - DNA, 46 bp, Homo sapiens; identical to SEQ ID NO: 225372
  chr17:41249260-41249306
  hyper

SEQ ID NO: 292349 - DNA, 106 bp, Homo sapiens; identical to SEQ ID NO: 225373
  chr17:41251791-41251897
  hyper

SEQ ID NO: 292350 - DNA, 140 bp, Homo sapiens; identical to SEQ ID NO: 225374
  chr17:41256138-41256278
  hyper

SEQ ID NO: 292351 - DNA, 89 bp, Homo sapiens; identical to SEQ ID NO: 225375
  chr17:41256884-41256973
  hyper

SEQ ID NO: 292352 - DNA, 78 bp, Homo sapiens; identical to SEQ ID NO: 225376
  chr17:41258472-41258550
  hyper

SEQ ID NO: 292353 - DNA, 57 bp, Homo sapiens
  chr17:41276075-41276132
  hyper
ttttgtacttcttcaacgcgaagagcagataaatccatttctttctgttccaatgaa

SEQ ID NO: 292354 - DNA, 92 bp, Homo sapiens; identical to SEQ ID NO: 239150
  chr17:41323035-41323127
  hyper

SEQ ID NO: 292355 - DNA, 120 bp, Homo sapiens; identical to SEQ ID NO: 239151
  chr17:41393018-41393138
  hyper

SEQ ID NO: 292356 - DNA, 330 bp, Homo sapiens; identical to SEQ ID NO: 239152
  chr17:41446506-41446836
  hyper

SEQ ID NO: 292357 - DNA, 95 bp, Homo sapiens; identical to SEQ ID NO: 239153
  chr17:41471596-41471691
  hyper

SEQ ID NO: 292358 - DNA, 166 bp, Homo sapiens; identical to SEQ ID NO: 239154
  chr17:41476228-41476394
  hyper

SEQ ID NO: 292359 - DNA, 85 bp, Homo sapiens; identical to SEQ ID NO: 204612
  chr17:41624075-41624160
  hyper

SEQ ID NO: 292360 - DNA, 101 bp, Homo sapiens
  chr17:41723353-41723454
  hyper
gggtgccaccgttccgggaactcgagaaggcgggggaggggcccgatagtcccggtgcccgggtcaggggtgtcgtggcaccctggcccgggggtccgcgt

SEQ ID NO: 292361 - DNA, 244 bp, Homo sapiens
  chr17:41723534-41723778
  hyper
gcggcctctggctccaggccggagaaggcaggtccagacccctccggaagcgggagcgtgggcagcagggaaggacgcgcagccccgggccggggtccccgaggagccctccggccttggccgccgccagcgccgcgccccctcctggcagcgggccggggagggtcggtcacgagcggatgacgggcttcccggagcacagcccggcccacgggcccggagagaggcaggaaacccgggctta

SEQ ID NO: 292362 - DNA, 195 bp, Homo sapiens; identical to SEQ ID NO: 204614
  chr17:41790829-41791024
  hyper

SEQ ID NO: 292363 - DNA, 259 bp, Homo sapiens; identical to SEQ ID NO: 204615
  chr17:41791085-41791344
  hyper

SEQ ID NO: 292364 - DNA, 39 bp, Homo sapiens; identical to SEQ ID NO: 204616
  chr17:41791412-41791451
  hyper

SEQ ID NO: 292365 - DNA, 143 bp, Homo sapiens
  chr17:41832729-41832872
  hyper
cggcctggttggctttggcgctccgggcgcggggccgcggcttccggcccttctgcggccgagcggcctcggtcccgaagtccttgagctccgactggttgtggaagcgggtgaggcgcttgcacttgcacgaggccaccagg

SEQ ID NO: 292366 - DNA, 657 bp, Homo sapiens
  chr17:41910022-41910679
  hyper
agccagcccgcagcgccgagccccggtgccactaagaggcgtaagagcggccccgggccctccagcctccgccccgccccgccccgccacgccacgccggactcaccctcgggctgctccccgcaggaggccgagcaccgactcccgctcgctctccgaaggaacctgtgggagaacaaggagcgcactgggcgcaggagcagcgaccccgggggacctcggagggcggtcccggaggacgcggagcagcagggagcggggggcgcgcggcggggcgggcgcgggaagagggaggcgggggccgaggggcggggttgagactcccgcggtgggctcggtgggccgcgaggctgtccgggagcacgggaggagggtctcggcccggcctcccgcccctcccgccgcggcgcccagctccctcgtccgttcccctcgcggcctcctacctcgtcgcgccgggatgtgtgctccgcgaacgggagccgcgcgagtgcccagagcctgggccgccgctggctccgccttcccggacccctccctgcggctgccgcgccgggcgggggtggcggagcctgaggaggcgcggcgcggggaggaggcgcggcgcggggaggaggcgggggaggagcggaggccgccctccgcgtctggcaccgc

SEQ ID NO: 292367 - DNA, 283 bp, Homo sapiens; identical to SEQ ID NO: 54132
  chr17:41910700-41910983
  hyper

SEQ ID NO: 292368 - DNA, 296 bp, Homo sapiens; identical to SEQ ID NO: 239159
  chr17:41977937-41978233
  hyper

SEQ ID NO: 292369 - DNA, 404 bp, Homo sapiens; identical to SEQ ID NO: 204619
  chr17:41984572-41984976
  hyper

SEQ ID NO: 292370 - DNA, 286 bp, Homo sapiens; identical to SEQ ID NO: 204620
  chr17:41985015-41985301
  hyper

SEQ ID NO: 292371 - DNA, 363 bp, Homo sapiens; identical to SEQ ID NO: 239163
  chr17:41995084-41995447
  hyper

SEQ ID NO: 292372 - DNA, 122 bp, Homo sapiens
  chr17:42015411-42015533
  hyper
tcccttaaggcgtccgtgctctggtgtgtgtcccagaaatagacacgaccctcggtctgagcgcccctgcaccccagcctgcccaccgcgcggaacacctgcaagctccggtccgggtgccg

SEQ ID NO: 292373 - DNA, 291 bp, Homo sapiens
  chr17:42015571-42015862
  hyper
ctctgtctgccccgccccctccagacgcctgctctgcgctgcgcattcgctctggccatagcgggcctcgtgtcgctgctgatgcagcccgagggcgccctcggcgaggagctgcaagtgccgcagcccagggccgccagttggctgaacttaggctccatcaagaagtacttggggaagctcttcaacagcaggtgggccggcggagggtgtgaggaagggagggagggagggaggaaagcggggggtggggggggcgcgggggggggacacggacgccaccaggcaccc

SEQ ID NO: 292374 - DNA, 84 bp, Homo sapiens; identical to SEQ ID NO: 204621
  chr17:42030245-42030329
  hyper

SEQ ID NO: 292375 - DNA, 92 bp, Homo sapiens; identical to SEQ ID NO: 204622
  chr17:42030794-42030886
  hyper

SEQ ID NO: 292376 - DNA, 207 bp, Homo sapiens
  chr17:42061026-42061233
  hyper
caacaagctcagacacccaacgctccccggggccgggtcttaggcgcacattggctcgcggtgcacgtccactctcctgtaggctcgtgcccttgacatatccggggctgtcacagtcccatgccccgaccccgaccccgcgcgagtctgcttgatgacgtcgctgtcgcaccccaccggcctccccgggtcctccccaggcgcgcg

SEQ ID NO: 292377 - DNA, 163 bp, Homo sapiens
  chr17:42061420-42061583
  hyper
aggcccttatcgcccgcgtttatcgggccatcgctgataagaaaccgagggggcggcggggcggcccctctccttggatccaagaagcgatggggtcgctgttagggggggcgccagccccggggatgcggggagccttcgcagcctccgggtcagccctgct

SEQ ID NO: 292378 - DNA, 125 bp, Homo sapiens; identical to SEQ ID NO: 239166
  chr17:42072190-42072315
  hyper

SEQ ID NO: 292379 - DNA, 237 bp, Homo sapiens; identical to SEQ ID NO: 204623
  chr17:42081912-42082149
  hyper

SEQ ID NO: 292380 - DNA, 323 bp, Homo sapiens; identical to SEQ ID NO: 204624
  chr17:42083719-42084042
  hyper

SEQ ID NO: 292381 - DNA, 267 bp, Homo sapiens; identical to SEQ ID NO: 204625
  chr17:42091861-42092128
  hyper

SEQ ID NO: 292382 - DNA, 191 bp, Homo sapiens; identical to SEQ ID NO: 204626
  chr17:42092357-42092548
  hyper

SEQ ID NO: 292383 - DNA, 208 bp, Homo sapiens
  chr17:42200974-42201182
  hyper
ctccggctccgctcgccgccgccaccaacaacaacattcggagacgtcactcccgtcacgtgacccgacccggagctaaaaatagacccagaccccccccccagccccccccgccttccccttgcccgcagccaccaccaacccctcccctgcctctcggccctccccgccgggcggggccagcgacgccatcgtgacagctccttaa

SEQ ID NO: 292384 - DNA, 128 bp, Homo sapiens; identical to SEQ ID NO: 239170
  chr17:42219140-42219268
  hyper

SEQ ID NO: 292385 - DNA, 169 bp, Homo sapiens; identical to SEQ ID NO: 239171
  chr17:42263792-42263961
  hyper

SEQ ID NO: 292386 - DNA, 111 bp, Homo sapiens; identical to SEQ ID NO: 204627
  chr17:42264411-42264522
  hyper

SEQ ID NO: 292387 - DNA, 433 bp, Homo sapiens
  chr17:42287874-42288307
  hyper
cacccccagggggcgcgcgctccccgcgcagcagcccaggcgctcccgccggcgggcagaagcatgggctggtgcagatgtctcccgcctggggctcgcccccgcctggtctgcggcgctcagctgacagcttcccgccttccggctgctgggcgccggccccacgtcccagcccaggcaccgcgtggctcaggcggccaggggcgaggtggcacggcccgccaaggggaagagggggccctggcagcccccctgggggcacagcgctccgccaggcagcctgaccttcttcttctcagacaggtcgttccacattcgggccagcaggcgggtcagctcgctctcggagagctcaggccgctcctcctgcagctgccgccgtttctcctccgagaagatgaacatggccgacacgggccgcttgggcttctcg

SEQ ID NO: 292388 - DNA, 149 bp, Homo sapiens; identical to SEQ ID NO: 239174
  chr17:42295577-42295726
  hyper

SEQ ID NO: 292389 - DNA, 201 bp, Homo sapiens; identical to SEQ ID NO: 239175
  chr17:42297965-42298166
  hyper

SEQ ID NO: 292390 - DNA, 614 bp, Homo sapiens
  chr17:42298856-42299470
  hyper
gacggcgtgaggccggagggggatttgcaaggaaacctgcctgcttcccgctcccattgctccatccccgctgcctcctgcctcctgcttctctcctgcgtctttccaactctcccctgtcgccactggtgtgtgtctgagtgtgtgcgcggttttttttttttaattgctctttgcttttgcaaccctgaagcaaaagggggggggggtagttacagggaaaaaaaaagcgagaaagaagctcttagatttgcaacacatcggaaaaccgggggagcaccccgccttatccgatctccatgctccgcaagggccttccgggttttaggacaagcttctcaatgtcccgtttcgctgggtttaggatccgaggagtccgagcaaaaagttctccccctgggtcgtagtgacgggtgtcggggtgggagttgcggggatttttcaagaagcagcagctaccccggcgtcggtcactgggccggggtaggggaaagagcaaaatcccagtgggtttgcgcgagggatcttctagggtcgaggcgggtgtggggggagttggaaccgggagacaccgcttggcgcatctctccctcggtctctacctcctgtcctat

SEQ ID NO: 292391 - DNA, 124 bp, Homo sapiens; identical to SEQ ID NO: 239177
  chr17:42385180-42385304
  hyper

SEQ ID NO: 292392 - DNA, 232 bp, Homo sapiens; identical to SEQ ID NO: 204628
  chr17:42386109-42386341
  hyper

SEQ ID NO: 292393 - DNA, 62 bp, Homo sapiens; identical to SEQ ID NO: 204629
  chr17:42402710-42402772
  hyper

SEQ ID NO: 292394 - DNA, 195 bp, Homo sapiens; identical to SEQ ID NO: 204630
  chr17:42402917-42403112
  hyper

SEQ ID NO: 292395 - DNA, 62 bp, Homo sapiens; identical to SEQ ID NO: 239182
  chr17:42422395-42422457
  hyper

SEQ ID NO: 292396 - DNA, 152 bp, Homo sapiens; identical to SEQ ID NO: 204631
  chr17:42441042-42441194
  hyper

SEQ ID NO: 292397 - DNA, 44 bp, Homo sapiens; identical to SEQ ID NO: 239183
  chr17:42441403-42441447
  hyper

SEQ ID NO: 292398 - DNA, 149 bp, Homo sapiens; identical to SEQ ID NO: 204632
  chr17:42462944-42463093
  hyper

SEQ ID NO: 292399 - DNA, 445 bp, Homo sapiens; identical to SEQ ID NO: 239185
  chr17:42633725-42634170
  hyper

SEQ ID NO: 292400 - DNA, 75 bp, Homo sapiens; identical to SEQ ID NO: 204634
  chr17:42635073-42635148
  hyper

SEQ ID NO: 292401 - DNA, 100 bp, Homo sapiens; identical to SEQ ID NO: 204635
  chr17:42635760-42635860
  hyper

SEQ ID NO: 292402 - DNA, 57 bp, Homo sapiens; identical to SEQ ID NO: 239188
  chr17:42635890-42635947
  hyper

SEQ ID NO: 292403 - DNA, 201 bp, Homo sapiens; identical to SEQ ID NO: 239190
  chr17:42766993-42767194
  hyper

SEQ ID NO: 292404 - DNA, 124 bp, Homo sapiens
  chr17:42906458-42906582
  hyper
actcgatttcacatcgtcttgatgctaacaaaattaagcatgagcataatgaaatcggtatcactgccagttctcaatgaacaaaaagaaaaccaaattcgcccatttcgcaaaggaaaagtac

SEQ ID NO: 292405 - DNA, 44 bp, Homo sapiens; identical to SEQ ID NO: 239192
  chr17:42977088-42977132
  hyper

SEQ ID NO: 292406 - DNA, 197 bp, Homo sapiens; identical to SEQ ID NO: 204637
  chr17:42988798-42988995
  hyper

SEQ ID NO: 292407 - DNA, 87 bp, Homo sapiens
  chr17:42989016-42989103
  hyper
cgtcctgccctggccgcgctcaccgtgccgcgcagagactccaggtcgcaggtcaaggactgcaactggcgccggtagtcgttggct

SEQ ID NO: 292408 - DNA, 349 bp, Homo sapiens; identical to SEQ ID NO: 239194
  chr17:43025009-43025358
  hyper

SEQ ID NO: 292409 - DNA, 119 bp, Homo sapiens
  chr17:43044389-43044508
  hyper
cgcctaggcgcccgcgggcgcggatgctgcttctccctgttccatacgccagagcccatccttgccctccccttatcgcccactgctgtcggcccgaatccacttcccaaggggcaagc

SEQ ID NO: 292410 - DNA, 43 bp, Homo sapiens; identical to SEQ ID NO: 204639
  chr17:43045529-43045572
  hyper

SEQ ID NO: 292411 - DNA, 169 bp, Homo sapiens; identical to SEQ ID NO: 239198
  chr17:43212859-43213028
  hyper

SEQ ID NO: 292412 - DNA, 178 bp, Homo sapiens; identical to SEQ ID NO: 204640
  chr17:43239156-43239334
  hyper

SEQ ID NO: 292413 - DNA, 48 bp, Homo sapiens
  chr17:43298577-43298625
  hyper
cactggcctgcgtccgcgccccccaccctgtttaggagttcctgtttg

SEQ ID NO: 292414 - DNA, 235 bp, Homo sapiens
  chr17:43298666-43298901
  hyper
caggggaggagagaaataaaaggtggggggcctggaagggggttcccaccttctcagtccgggacgcgagacgggaacgcagccctggcgccccaacgctgcaccaccgtgggtctccgagccgtgctcgcagtcgctgagatcctcggtgcggagaagatgtgcccctccaatccccaggccgtgatccccttcacccagacccggccaatccctcgcccgaggcgagcgggag

SEQ ID NO: 292415 - DNA, 876 bp, Homo sapiens; identical to SEQ ID NO: 54190
  chr17:43324795-43325671
  hyper

SEQ ID NO: 292416 - DNA, 75 bp, Homo sapiens; identical to SEQ ID NO: 204642
  chr17:43339333-43339408
  hyper

SEQ ID NO: 292417 - DNA, 134 bp, Homo sapiens; identical to SEQ ID NO: 204643
  chr17:43339475-43339609
  hyper

SEQ ID NO: 292418 - DNA, 115 bp, Homo sapiens; identical to SEQ ID NO: 204644
  chr17:44849686-44849801
  hyper

SEQ ID NO: 292419 - DNA, 94 bp, Homo sapiens; identical to SEQ ID NO: 128812
  chr17:44849831-44849925
  hyper

SEQ ID NO: 292420 - DNA, 104 bp, Homo sapiens; identical to SEQ ID NO: 204646
  chr17:44919338-44919442
  hyper

SEQ ID NO: 292421 - DNA, 180 bp, Homo sapiens
  chr17:44928883-44929063
  hyper
tcctttcccagcgccgcctgccccgccccacccgggtttaaagtcccgcgggcgggtggtggcggagctgcgagcttgagcggcgcgaggagatgctagagggcgcagcgccgccagcaccatgcgccccccgcccgcgctggccctggccgggctctgcctgctggcgctgcccgccgc

SEQ ID NO: 292422 - DNA, 207 bp, Homo sapiens
  chr17:44929360-44929567
  hyper
gcgcacgcctcggaccctggccccgtccgccccggccccgcccgttcaggcgtcagtcccgctctctgatgccctctcgggatcctcacgccggtgccctgtctgccgccatcctggcctccggcgagccgtccttgcctcggactccttccccaccctccgccttcgccctgcggagcggagaccgagagggctgggtggatgggt

SEQ ID NO: 292423 - DNA, 60 bp, Homo sapiens; identical to SEQ ID NO: 239207
  chr17:45000263-45000323
  hyper

SEQ ID NO: 292424 - DNA, 46 bp, Homo sapiens
  chr17:45055673-45055719
  hyper
aactcccacgcgagcgaccgcagtcccaaattgcatctccataccc

SEQ ID NO: 292425 - DNA, 269 bp, Homo sapiens
  chr17:45056305-45056574
  hyper
gccccggcgccgccgcccacgccgtccacctcctccaagccgctgtggttcaggaaggtcgcgttcatcgccgcgcggcgccgggggtctcggcgcgcagtcccgggtgcactgggctgctcgccggggtccgcgctctcagggacgctccggacccctcggaccggctcctgcggtacggggaggggacgaaggcgggaggctggctgcctgcgcgctctcgggccgcctacccctgggcaccgggcgggaagcgaccgcccggagga

SEQ ID NO: 292426 - DNA, 154 bp, Homo sapiens; identical to SEQ ID NO: 204647
  chr17:45056851-45057005
  hyper

SEQ ID NO: 292427 - DNA, 142 bp, Homo sapiens; identical to SEQ ID NO: 239209
  chr17:45266823-45266965
  hyper

SEQ ID NO: 292428 - DNA, 66 bp, Homo sapiens; identical to SEQ ID NO: 204648
  chr17:45330948-45331014
  hyper

SEQ ID NO: 292429 - DNA, 119 bp, Homo sapiens; identical to SEQ ID NO: 204649
  chr17:45331313-45331432
  hyper

SEQ ID NO: 292430 - DNA, 98 bp, Homo sapiens; identical to SEQ ID NO: 204650
  chr17:45331675-45331773
  hyper

SEQ ID NO: 292431 - DNA, 37 bp, Homo sapiens; identical to SEQ ID NO: 239211
  chr17:45401134-45401171
  hyper

SEQ ID NO: 292432 - DNA, 37 bp, Homo sapiens
  chr17:45500789-45500826
  hyper
gtcggctgcgcccgcggcccggggcggagttggccac

SEQ ID NO: 292433 - DNA, 379 bp, Homo sapiens
  chr17:45500865-45501244
  hyper
cgcaggtggctcctccttcgcttctcccgatccccggccgtgccaggcacggtgccggctgccgagggaacgcctttgtgcccggtcctgggaacccgcgacggccgccgcgcgccccggtccattgtttcgcttctctgggttccaggtaggtgcgggcggcgcgcggggtccgcacgacgtgtcaccccggcggttggggcgccgggacccgcgggcgccggcaggggcgttcccgggcgcacggcggcggtgcagcacctgaagcggtggtggtcggccagcggcggcctcctgcacctcaccctcctgcaccttaccctcctgctgagctttgctgggctccgtgtagacctagacctttacctgctactgccgc

SEQ ID NO: 292434 - DNA, 39 bp, Homo sapiens; identical to SEQ ID NO: 204651
  chr17:45609732-45609771
  hyper

SEQ ID NO: 292435 - DNA, 166 bp, Homo sapiens; identical to SEQ ID NO: 239214
  chr17:45772372-45772538
  hyper

SEQ ID NO: 292436 - DNA, 117 bp, Homo sapiens; identical to SEQ ID NO: 204652
  chr17:45867584-45867701
  hyper

SEQ ID NO: 292437 - DNA, 69 bp, Homo sapiens; identical to SEQ ID NO: 239216
  chr17:45918751-45918820
  hyper

SEQ ID NO: 292438 - DNA, 619 bp, Homo sapiens
  chr17:45928210-45928829
  hyper
gcgcgttcggagtgcgttttttcgagacaatctccgtagcgctcacccctggccaccccgacccgcgctcctacctcgaggctgcggcgggctccgggcacggctggctggtgcgctactgacggtcgctcataggccctgtgcgccggcgagctctccagcggtaaggggcaggagcccagggcgagccagacccggcggctggcggcaggcggcaggcggcggaggtgagcgctggcgagagggcggaggacggagggcgggcaggagccagcgagcgaacaaggccagctccgcccgtgactcacccgcgctctctgccttcatcctctccccagcgctgctttttcccccggactcgcggccccgcccacctcacctgcggccgcctttaacccttgagggctcggctggaccggagcccagccagggccgcgaggagggggtgggcgggagtgggggaggaaagataactagggcgtgcgccgcccgctccctcgctcctccctggtcccctccactcccagggagaggggcccgggtggggtgattcccaggttctaagacccgccccgccgggtggaaaactgccctggagctagctcggtctagcagagga

SEQ ID NO: 292439 - DNA, 239 bp, Homo sapiens; identical to SEQ ID NO: 239217
  chr17:45973403-45973642
  hyper

SEQ ID NO: 292440 - DNA, 162 bp, Homo sapiens; identical to SEQ ID NO: 239218
  chr17:46048350-46048512
  hyper

SEQ ID NO: 292441 - DNA, 48 bp, Homo sapiens; identical to SEQ ID NO: 204654
  chr17:46089197-46089245
  hyper

SEQ ID NO: 292442 - DNA, 298 bp, Homo sapiens
  chr17:46089283-46089581
  hyper
tccagcggtcccctctcttccatcccgccatctctctgaggggcttgcgtctccctgatgcgctctggtgtctgtctgagccatccatcaaggatggcaggctgggggaaacatgaaaaagagcctatttggctattaacatcccctcccgctttgttgtctctctcctccccagtcccctaccagcccctcacccaacccctcccttttccccttttgcaggagacaaaaccagactgacaagctgaagactcaaacattaatcaaactgcgctccggaacaacctttccctcgcat

SEQ ID NO: 292443 - DNA, 233 bp, Homo sapiens; identical to SEQ ID NO: 204656
  chr17:46124668-46124901
  hyper

SEQ ID NO: 292444 - DNA, 165 bp, Homo sapiens; identical to SEQ ID NO: 204657
  chr17:46125148-46125313
  hyper

SEQ ID NO: 292445 - DNA, 82 bp, Homo sapiens; identical to SEQ ID NO: 239221
  chr17:46125608-46125690
  hyper

SEQ ID NO: 292446 - DNA, 199 bp, Homo sapiens; identical to SEQ ID NO: 239222
  chr17:46178731-46178930
  hyper

SEQ ID NO: 292447 - DNA, 140 bp, Homo sapiens
  chr17:46570076-46570216
  hyper
cctggggtggagccgcgccggagccgggccggcagcgctggcgaggaggttcgggtgttgtgtttccactgtaactataattaggcggattcagtgtttatttaggctgagagctgtaagataaatgacagcttcgaaga

SEQ ID NO: 292448 - DNA, 73 bp, Homo sapiens; identical to SEQ ID NO: 204658
  chr17:46620279-46620352
  hyper

SEQ ID NO: 292449 - DNA, 321 bp, Homo sapiens; identical to SEQ ID NO: 204659
  chr17:46621458-46621779
  hyper

SEQ ID NO: 292450 - DNA, 189 bp, Homo sapiens; identical to SEQ ID NO: 204660
  chr17:46659085-46659274
  hyper

SEQ ID NO: 292451 - DNA, 45 bp, Homo sapiens; identical to SEQ ID NO: 204661
  chr17:46659384-46659429
  hyper

SEQ ID NO: 292452 - DNA, 411 bp, Homo sapiens; identical to SEQ ID NO: 239227
  chr17:46662740-46663151
  hyper

SEQ ID NO: 292453 - DNA, 77 bp, Homo sapiens; identical to SEQ ID NO: 204663
  chr17:46663887-46663964
  hyper

SEQ ID NO: 292454 - DNA, 111 bp, Homo sapiens; identical to SEQ ID NO: 204664
  chr17:46670738-46670849
  hyper

SEQ ID NO: 292455 - DNA, 103 bp, Homo sapiens; identical to SEQ ID NO: 204665
  chr17:46675757-46675860
  hyper

SEQ ID NO: 292456 - DNA, 297 bp, Homo sapiens; identical to SEQ ID NO: 225401
  chr17:46683517-46683814
  hyper

SEQ ID NO: 292457 - DNA, 83 bp, Homo sapiens; identical to SEQ ID NO: 204666
  chr17:46687507-46687590
  hyper

SEQ ID NO: 292458 - DNA, 335 bp, Homo sapiens; identical to SEQ ID NO: 204667
  chr17:46688806-46689141
  hyper

SEQ ID NO: 292459 - DNA, 151 bp, Homo sapiens; identical to SEQ ID NO: 204668
  chr17:46689520-46689671
  hyper

SEQ ID NO: 292460 - DNA, 163 bp, Homo sapiens; identical to SEQ ID NO: 204669
  chr17:46690905-46691068
  hyper

SEQ ID NO: 292461 - DNA, 162 bp, Homo sapiens; identical to SEQ ID NO: 204670
  chr17:46696376-46696538
  hyper

SEQ ID NO: 292462 - DNA, 266 bp, Homo sapiens
  chr17:46696643-46696909
  hyper
aggaggctcctcgtttccgacgcctgattctggagggggtgtgaagaacaaagacaagagccccagttgcaatttctgaagcatttgcgacaacaaagtgttctttcccggcttctctcttctccctctctgccccctgccaccccccgccccggaagcccggagccccgtgttctgtgcgggtgagggtgaaggctgccggagcggggcccacccattcccccgccaggccgggagccccggcccagctgcggctctctcagctc

SEQ ID NO: 292463 - DNA, 269 bp, Homo sapiens
  chr17:46702260-46702529
  hyper
ccccccacccctcctctccccggggtcccttcgagatgccccgatattcggaagcgattccccgactccccaagaggcggacagcccgggctggggctcgggagccccgcagagagcagcgggggaccgcagaaaaggaagcggtagcccctgcgaggacgccgaggaggagaggggccaccggagggaaggctcccggggaggggccggcgcatccggggagggggctcagtcaccgcgtcctgggcttcccccgcccctcctgtcgc

SEQ ID NO: 292464 - DNA, 1174 bp, Homo sapiens; identical to SEQ ID NO: 204672
  chr17:46702755-46703929
  hyper

SEQ ID NO: 292465 - DNA, 109 bp, Homo sapiens; identical to SEQ ID NO: 204673
  chr17:46703959-46704068
  hyper

SEQ ID NO: 292466 - DNA, 105 bp, Homo sapiens; identical to SEQ ID NO: 204674
  chr17:46713828-46713933
  hyper

SEQ ID NO: 292467 - DNA, 171 bp, Homo sapiens; identical to SEQ ID NO: 204675
  chr17:46724200-46724371
  hyper

SEQ ID NO: 292468 - DNA, 92 bp, Homo sapiens
  chr17:46724660-46724752
  hyper
atgggcgtctgaagcgagcgacaagttatccttgggagttggaaatgtgagagggaggggcgaggccgaaggaggctgagaaggggaggggg

SEQ ID NO: 292469 - DNA, 32 bp, Homo sapiens
  chr17:46724904-46724936
  hyper
gttgttcgaccgggatggctgcaccaggctga

SEQ ID NO: 292470 - DNA, 325 bp, Homo sapiens
  chr17:46755701-46756026
  hyper
caggagatgctcggggtcggggcccagggcagggaaaaccctcagctctggtcaaaagccaagtgagcgaaggaggcgatgcaacgtcaccctggtggccaaggcaggcacccaggtctcgaggttccaggagagggacgcgctgtgaccaccagccccctaggctcctgtctgctcgatgagcgtccactcgccagttccagccgcgagcgcccccagcactcccggagctgggccgggcgccgccttccctcgggcggccggcaggggtcagtgtttggccgcaggtgaacagacagcggccggggctgaatctggttcttct

SEQ ID NO: 292471 - DNA, 175 bp, Homo sapiens
  chr17:46801832-46802007
  hyper
cattcgagatggctcgtaccgaacctccttgccttcttcctgggtctctcgggggctggaccaatacatctgccgatgccctggccgaatggcaggcgacatcgggtcctggacccccacacgcagctcagtacccacgaggccccaggccgctggaagcctgtagctccgcgga

SEQ ID NO: 292472 - DNA, 113 bp, Homo sapiens
  chr17:46805459-46805572
  hyper
caggcaacagggagtcatgtcgcggttctccaggagcacccagagtctgcaccacagacacgtccaggtaactggccataggctggtaggttcccggatatcccggatagaag

SEQ ID NO: 292473 - DNA, 57 bp, Homo sapiens; identical to SEQ ID NO: 204678
  chr17:46806111-46806168
  hyper

SEQ ID NO: 292474 - DNA, 357 bp, Homo sapiens
  chr17:46806431-46806788
  hyper
tcatttacacgtccggggggaggggaggcgtggtgggcggaggaagaggggacgaggagccgggccccacctccttctcctcctctccctccctagctttctgtctcctgcgctttgacaggtttaacgagagaataaaaagctctctctataaagtgtccatctcctgggggggaaggggagtcgggggtggggctgggaggccgctcccggcctcagaggagaacccgggaatgcgcctgtgtaagaggaggctgggaaatgggggttaataggtatttctggcagcccctggctttgggtcctgggtactagcaccccagttcattcccggtacccttcctgtcccagatgtcc

SEQ ID NO: 292475 - DNA, 97 bp, Homo sapiens
  chr17:46812471-46812568
  hyper
cagaagagtgacgacgggcagcaggagggaagggagctttaccggaaggagagggaagaaaactgtagaaggaacaagaaagagtccaggaagctgc

SEQ ID NO: 292476 - DNA, 204 bp, Homo sapiens; identical to SEQ ID NO: 204680
  chr17:46816036-46816240
  hyper

SEQ ID NO: 292477 - DNA, 87 bp, Homo sapiens
  chr17:46826843-46826930
  hyper
ctcttacggaattccgaccttattgaaaaaaatgaggagaggtttgttttgtttcttaatcatttcttcgccatctctgactctctt

SEQ ID NO: 292478 - DNA, 324 bp, Homo sapiens
  chr17:46829655-46829979
  hyper
acctgggacaaggtagtggctgggttaggggctggggtgtgtcttggagcccccaggtgacaggagagggaggaagggagtgactggtgaaacattaaccccctcagggttctgaagggaaggggaacatccttagaggacacagggagaagacaaacgtcccttcatcctgagattcacttggaaatcccctgaacttccaactcctggctgatgaaacggagcaagttgtctctgccttatggcctccatcaccaagcctgaaggagagtctctcagcccggtttgggagtaaacccaaaaccgttcattcgtcagggaatg

SEQ ID NO: 292479 - DNA, 66 bp, Homo sapiens; identical to SEQ ID NO: 204682
  chr17:46830655-46830721
  hyper

SEQ ID NO: 292480 - DNA, 507 bp, Homo sapiens
  chr17:46831219-46831726
  hyper
gcgctgcagagccccgtgcttagtgaccaaaataatgtcccgcctgcctcatcttcctctcggatttttgccaaggccaaactgcgcgtgtcccagaaaaaaaccctcggacacttggcctctgccctgtctcagccgagtgactaggatgactgggaagtgaatcacaggaaaatcacccaagcccactcttctccacagccggtgagcagaaggaaggaagcaaagaaggaagggaggaagggaagaagggagagttcagttccctttcgtcgttcacacagtggtcctccacaccaggaaacctaagggctctgtggagggccaggtgccgtggcagcaacactcctcagggcctgtttcagcaccccatttacgtggcacatgaaaaattcaggatgaacgccctggctgaaagctcttcctgggtttgggacatcagaagaccttcccgggatgggctcttgtctctgcagtagctatgacctgcacataaacctgtttcct

SEQ ID NO: 292481 - DNA, 69 bp, Homo sapiens; identical to SEQ ID NO: 204684
  chr17:46832887-46832956
  hyper

SEQ ID NO: 292482 - DNA, 43 bp, Homo sapiens; identical to SEQ ID NO: 239263
  chr17:46891977-46892020
  hyper

SEQ ID NO: 292483 - DNA, 225 bp, Homo sapiens; identical to SEQ ID NO: 239264
  chr17:46894280-46894505
  hyper

SEQ ID NO: 292484 - DNA, 321 bp, Homo sapiens; identical to SEQ ID NO: 204685
  chr17:46970399-46970720
  hyper

SEQ ID NO: 292485 - DNA, 199 bp, Homo sapiens; identical to SEQ ID NO: 204686
  chr17:46985398-46985597
  hyper

SEQ ID NO: 292486 - DNA, 348 bp, Homo sapiens
  chr17:47073560-47073908
  hyper
aggaacggcgggaggaggaggggagtggccgccgccccctcccctaagctcccgcccctcgcttccccgtgcgcggagcggaaattaccccctccccccgcgggtctgacctggggacgtgggcggggcttcccgcttagccccccgccctccgtccctctcccgccttcccgccaggatcggaatcctgcaccccaaacaaagttccgagacccgaacctagggcctagagagctgccagcagtgtcccgggtggtgcaggctctggaaactccacctgtctgtccccgactctgggagggaaaaggggaccattcaaatctccacccggtcactccctccctaaga

SEQ ID NO: 292487 - DNA, 152 bp, Homo sapiens; identical to SEQ ID NO: 204688
  chr17:47074409-47074561
  hyper

SEQ ID NO: 292488 - DNA, 160 bp, Homo sapiens
  chr17:47209860-47210020
  hyper
gaggaaggaacggtagggaccgtggtgatagactaggggtggacgcggggattgtgtttttctttaagcgggagagagaagcccgatcaccggcagcggaggagaaaagtccagggtagagatgggggcgctggtgtgggggcggtcaggagagaagggc

SEQ ID NO: 292489 - DNA, 113 bp, Homo sapiens
  chr17:47210500-47210613
  hyper
cggggctctctgcttggaactcagaggcgctgacccagcctggggcccgtttgctgcccacgggaggagccgccgtcaggggtatgtgagtgcccgggcgcggggactgcggg

SEQ ID NO: 292490 - DNA, 125 bp, Homo sapiens
  chr17:47301641-47301766
  hyper
cgcacatctgcagccgtttcccagggcaccacgctggcgcggaacgagctgggctcggccttctgggcctcctgaatgaggcggtgcatggggtagccgcggcgcgggaaggccacgtcgccgcc

SEQ ID NO: 292491 - DNA, 434 bp, Homo sapiens; identical to SEQ ID NO: 128936
  chr17:47301801-47302235
  hyper

SEQ ID NO: 292492 - DNA, 643 bp, Homo sapiens
  chr17:47307801-47308444
  hyper
cccctatctcccggagcccaggactcacgtgggggcggcggcagcagaggtctgtcccggctgagtttggagtgtaagaagtggggaagggggctagctgaggtattggggcgcaggatggagcaaggggtgcttacgggaattggaggggacgcggtgtcttatccacccccggatttctgggctccggctcacgagtccctccagtcccgagggactgaggatgatgtgcgtctgagccgtcccctccacttgcccctcatcccccccgggcagccgccgcgtcccctttaaatgcccgggagccggagccggagccggagccgcggccggcgctgcggctgctgcagcagcggagcccaccgcagtccccaacgtcacaagcgactgtccaatcgcagcggtgccggcgcacatcaaaggggcgggccgcccgaggccacgcctccctcctgccccggaggctccgggagcgccagctaaggtgggattaggctctcggggaaagggtagcagggtggggatggagcgctgcccttccgaggaacgtgggtgggggcaccctcactagagcggctgtggacatacgctaaatccctgcctacacacccaaaattgctagggctgtggactttctcatccg

SEQ ID NO: 292493 - DNA, 398 bp, Homo sapiens; identical to SEQ ID NO: 239273
  chr17:47439788-47440186
  hyper

SEQ ID NO: 292494 - DNA, 202 bp, Homo sapiens; identical to SEQ ID NO: 239274
  chr17:47492339-47492541
  hyper

SEQ ID NO: 292495 - DNA, 53 bp, Homo sapiens
  chr17:47547746-47547799
  hyper
cgttccaagggaccgctgcccggcatccatcacggctgacagactggggatcg

SEQ ID NO: 292496 - DNA, 150 bp, Homo sapiens; identical to SEQ ID NO: 204691
  chr17:47563693-47563843
  hyper

SEQ ID NO: 292497 - DNA, 375 bp, Homo sapiens
  chr17:47572596-47572971
  hyper
ggcggggcggaggcggggccgcagcactggcttcacccagcctctcccgcccgcagccagagcgagccgagccgcggccagctccggcgggcagggggggcgctggagcgcagcgcagcgcagccccatcagtccgcaaagcggaccgagctggaagtcgagcgctgccgcgggaggcgggcgatgggggcaggtgccaccggccgcgccatggacgggccgcgcctgctgctgttgctgcttctgggggtgagtgttagccggagggggcccgctccctttcccgggatcagaactccgagaagagccgggcgccgccaccaaggaaacagaacagagcattggggtcccagatactgagggtgggtggtggga

SEQ ID NO: 292498 - DNA, 76 bp, Homo sapiens; identical to SEQ ID NO: 204692
  chr17:47575254-47575330
  hyper

SEQ ID NO: 292499 - DNA, 215 bp, Homo sapiens; identical to SEQ ID NO: 239278
  chr17:47647459-47647674
  hyper

SEQ ID NO: 292500 - DNA, 67 bp, Homo sapiens
  chr17:47653242-47653309
  hyper
ggcgagagcggcgccgctggagccgaggggggcgccgagcgcagatctggagcagcagagccacggc

SEQ ID NO: 292501 - DNA, 720 bp, Homo sapiens
  chr17:47653373-47654093
  hyper
gcgcagctggaccaggggaggggggcggcggctgcacagctggaccgaagggggcggggtcggccctgggcgacccgctgaggggagggccgcgggccgccggggactggagcatgggacggcgcgcctgaaggagcaggaaggggaaggaggcctgggaccccgaaaagagaaggggagagcgaggggacgagagcggaggaggaagatgcaactgactcgctgctgcttcgtgttcctggtgcagggtagcctctatctggtgagtggtccgaggggagctgcgcagaggggcgggggcccggaggatcgggggagagcgcgggaagcttgcgagccctgaaactttctcccttcccccgacatcccggggatggcggggaagactggaggctgggggagagggcgggtccgaggccggagactggacagatagggttaataggggcggggagagggtgcttggctggcccacccactccgcagcgggtggctggaggtgcgaccagcgctcggaaaaaggcctggagccgggtcgccagggttaccctaccccttcccagagcctcaggaccgctgaagccgggggcgagtggggcgcgggtcgtggagctggtgacctgcaggcttttcccctgacctctgggactcagagagcctcgggttctgggtcccccagagcacagagccggtccaggcggggggcggcccccgcgtccc

SEQ ID NO: 292502 - DNA, 43 bp, Homo sapiens; identical to SEQ ID NO: 239279
  chr17:47785463-47785506
  hyper

SEQ ID NO: 292503 - DNA, 109 bp, Homo sapiens; identical to SEQ ID NO: 128956
  chr17:47841693-47841802
  hyper

SEQ ID NO: 292504 - DNA, 154 bp, Homo sapiens; identical to SEQ ID NO: 204695
  chr17:47865600-47865754
  hyper

SEQ ID NO: 292505 - DNA, 281 bp, Homo sapiens
  chr17:47928527-47928808
  hyper
cggccgagcccgccgcccctcccggtgccctcggccacccgggcacggccctggccggtgcgtccagctccgcccggtccccgcggccccggcggcgggtgggctgcggcgctgccgccagaggagggacccggccgatccggggtgggctggggcagggccgtgcgcaagtcggggtgcgacccccggcggggtatgtcgcggcggtggcgcccccgcgggagccgggccgggggcgggtcgcggccgcggcgaggctcccagggcgccgggtgggcgca

SEQ ID NO: 292506 - DNA, 173 bp, Homo sapiens; identical to SEQ ID NO: 225421
  chr17:47929093-47929266
  hyper

SEQ ID NO: 292507 - DNA, 152 bp, Homo sapiens; identical to SEQ ID NO: 239284
  chr17:47968110-47968262
  hyper

SEQ ID NO: 292508 - DNA, 248 bp, Homo sapiens; identical to SEQ ID NO: 204696
  chr17:47979497-47979745
  hyper

SEQ ID NO: 292509 - DNA, 135 bp, Homo sapiens
  chr17:48041904-48042039
  hyper
cgatggtggagcgggagacgggcgtggggagccccactgcagtgctgggatcgaagtggtgctgaccccaagacctctcccctcctcctcccccgggagcttctccagggttatttgggaaatgagggggaactc

SEQ ID NO: 292510 - DNA, 94 bp, Homo sapiens; identical to SEQ ID NO: 204698
  chr17:48042984-48043078
  hyper

SEQ ID NO: 292511 - DNA, 73 bp, Homo sapiens
  chr17:48046649-48046722
  hyper
tttcccaggcgcgcgttctccgctgaaagaggctcagagagacactttctccgggatcttaagtgtgggggct

SEQ ID NO: 292512 - DNA, 319 bp, Homo sapiens; identical to SEQ ID NO: 128973
  chr17:48047056-48047375
  hyper

SEQ ID NO: 292513 - DNA, 545 bp, Homo sapiens
  chr17:48072070-48072615
  hyper
acgccccgtattgccggtaggaggctccgtaggtatattccgacttgggcgagtaagcgcccgtgcctgcaagcccattgagattgaattggtggtggtaggtgtaggggttcaccgtctggccatagggctggcccgagtagtaatcgtgctggggagcgctgtagtagcccaggtcagtgacagaagactcgggcagggtaggcgagtccttggagcccgcatggcagctaagggagctggagatgtcggtgaggatgctgctgagcttgcgatcgaaggagccactcatcctggcgggcgctgcacctccccagggctggcctccgcagaggacaggaacggaccggagtgcgagagaggcggaagagacgaggcaggggtgtgtgtccagaaggcgaagggaggacccggccgcgtctggggggagggggaggccgagaggcgcttacaccattgcctgccgtcaggcggtcgctgcgcgcctctcctcgcgtcccaagccacaatcaaatgctgccagctccgcccggccagccggttat

SEQ ID NO: 292514 - DNA, 85 bp, Homo sapiens; identical to SEQ ID NO: 239297
  chr17:48133040-48133125
  hyper

SEQ ID NO: 292515 - DNA, 243 bp, Homo sapiens; identical to SEQ ID NO: 239298
  chr17:48133662-48133905
  hyper

SEQ ID NO: 292516 - DNA, 243 bp, Homo sapiens; identical to SEQ ID NO: 239299
  chr17:48172654-48172897
  hyper

SEQ ID NO: 292517 - DNA, 202 bp, Homo sapiens
  chr17:48206096-48206298
  hyper
gaaggaagtgaggagtaggaagaagcagagacagacacacaaactggcggagagtccacagggctgctgagaagaaagagatcacaccgagagtggggccacgggaactggcactgggaacaagggcttccgccgctctaagtgacgcccgagggtgggagagaagggagaagcccttcgggcaggcgataggaaagggccc

SEQ ID NO: 292518 - DNA, 88 bp, Homo sapiens
  chr17:48207630-48207718
  hyper
cattcaacaaacgtccgccgagcagccggggcgccgaggctggaggggacagcggtgaacagaacccccgccccctaactgcgctcaa

SEQ ID NO: 292519 - DNA, 100 bp, Homo sapiens
  chr17:48207748-48207848
  hyper
gtggggaggccctcacgagcctgggcgccatgggcccagctaacagagggcacttcttgccggaagggagagcgcacccctggcccggcctgggtccagg

SEQ ID NO: 292520 - DNA, 131 bp, Homo sapiens; identical to SEQ ID NO: 239302
  chr17:48226428-48226559
  hyper

SEQ ID NO: 292521 - DNA, 177 bp, Homo sapiens; identical to SEQ ID NO: 204703
  chr17:48278764-48278941
  hyper

SEQ ID NO: 292522 - DNA, 59 bp, Homo sapiens; identical to SEQ ID NO: 239304
  chr17:48350454-48350513
  hyper

SEQ ID NO: 292523 - DNA, 220 bp, Homo sapiens
  chr17:48503201-48503421
  hyper
cagcacgtgacccgagggggcaggggatggatggatcttgaccttgccatctggcccctcacggatgtgctgctggctctccctctaggaaatcaacaaatttttgcgcttctaacatccaggcccctgaggatggtcgcgaggaagatctgtttcggactgcagctggggccttcggatccagaggaaaccagggctattcttcgagggtgggaggggg

SEQ ID NO: 292524 - DNA, 39 bp, Homo sapiens; identical to SEQ ID NO: 204705
  chr17:48585621-48585660
  hyper

SEQ ID NO: 292525 - DNA, 218 bp, Homo sapiens; identical to SEQ ID NO: 204706
  chr17:48619736-48619954
  hyper

SEQ ID NO: 292526 - DNA, 242 bp, Homo sapiens; identical to SEQ ID NO: 239309
  chr17:48624467-48624709
  hyper

SEQ ID NO: 292527 - DNA, 437 bp, Homo sapiens
  chr17:48637269-48637706
  hyper
ccctaggggcaaagggatgaagcccaggagcgtcaatgtgaggtcaggtccagcgggttagggttacgaggtcagggtcgaagtctcagaattgactcgggagtatgaccaataagcccaagagatttgtggaggccacgcccagaccatgcctaccctagcctttctcgagctccgcccgtttctccaagactgggcccctccagcctgaagccccacccccaggacatccagctccgctccttccctcccccagtcccgcagccaagctcaactccagggtgggagattaaccaggtggagacctgggatttcgctctgggaccccctggtgacaaccctcacccccgtgccgcctgtctcctttcttccccaggcccgcccagagctgagctccgtcctccggctgctgcccaaatcaggggtcgtggacaaag

SEQ ID NO: 292528 - DNA, 96 bp, Homo sapiens
  chr17:48637777-48637873
  hyper
ggagtcccaaagaccccaatggccaataggaaagtgggttcggtctgggcagcagtctgattggctccagccttcgggagcggacccaggggcaag

SEQ ID NO: 292529 - DNA, 138 bp, Homo sapiens; identical to SEQ ID NO: 239311
  chr17:48638580-48638718
  hyper

SEQ ID NO: 292530 - DNA, 96 bp, Homo sapiens
  chr17:48639235-48639331
  hyper
acgcgagcaggtctcgtcggtaacccgggcttaccccacctgcgtacacacacctcagtcttcctgggttgggggggtggggatccaggccaggag

SEQ ID NO: 292531 - DNA, 51 bp, Homo sapiens; identical to SEQ ID NO: 204707
  chr17:48639832-48639883
  hyper

SEQ ID NO: 292532 - DNA, 468 bp, Homo sapiens
  chr17:48711976-48712444
  hyper
ttggaaatagactcgactcctggactgttagcctcggtatttagagagacatccccctggcttggcccaggggccgctcgcaggggctgtcgccgtgccaagggcccccccacctctgccccaaagtccctcccagggaggcgctgtcgcaacccgcgggacgggggcagggagaccggacccagaggcactggggtagggctcggcagggcgggtccgggcggagcgcggggtgcggagggcggaggcggctccggcgcccgctctgcccgccgctgggtccgaccgcgctcgccttccttgcagccgcgcctcggccccatggacgccctgtgcggttccggggagctcggctccaagttctgggtaaggcgcggggctccggggtcactgcgcgggggccagggtcggccggcttcgcccggtccccgccgcctgccttcccgcggggccggcaggtatcccggg

SEQ ID NO: 292533 - DNA, 104 bp, Homo sapiens
  chr17:48712602-48712706
  hyper
gagtgcgcggctggggcgcaaaggcacagtgcgtggctgggtgagtcggctccatcccagcccctccgtcgggtgcggaaggggcgtttcgcaatcagccgcgg

SEQ ID NO: 292534 - DNA, 104 bp, Homo sapiens; identical to SEQ ID NO: 239314
  chr17:48785241-48785345
  hyper

SEQ ID NO: 292535 - DNA, 45 bp, Homo sapiens; identical to SEQ ID NO: 239315
  chr17:48796758-48796803
  hyper

SEQ ID NO: 292536 - DNA, 37 bp, Homo sapiens; identical to SEQ ID NO: 204709
  chr17:48997201-48997238
  hyper

SEQ ID NO: 292537 - DNA, 264 bp, Homo sapiens
  chr17:49008887-49009151
  hyper
atgaagtctatattctgggctacaggcacactaaaaacggcagcgccagggcccagcgccgctcgcgcgtgcaccacgcgccggctttttttggttcctccgaggcgcgggcagctctgcagccgcgggggccgcaggaggtgggggctggacccgcccggagctcgggagggcccgggatggccccggggagcgcaggtcccggcaggggccgagcgaacaagggccggcctggggcgcccagagacgcgggggaccgttctg

SEQ ID NO: 292538 - DNA, 615 bp, Homo sapiens; identical to SEQ ID NO: 204710
  chr17:49021815-49022430
  hyper

SEQ ID NO: 292539 - DNA, 115 bp, Homo sapiens; identical to SEQ ID NO: 204711
  chr17:49028000-49028115
  hyper

SEQ ID NO: 292540 - DNA, 187 bp, Homo sapiens; identical to SEQ ID NO: 239318
  chr17:49197806-49197993
  hyper

SEQ ID NO: 292541 - DNA, 130 bp, Homo sapiens; identical to SEQ ID NO: 239319
  chr17:49199266-49199396
  hyper

SEQ ID NO: 292542 - DNA, 188 bp, Homo sapiens
  chr17:49337243-49337431
  hyper
tgctccccgagcccgcggcgccccctccccgggctgggggcaggtgcctctccccgggactgcggcgactacagggggcccccggctgggcccagaccggtggcgggtgcagcagcccccggatttcccccctttaactcgggtggccccaggatatcaacaacattagcatagccctccctccccag

SEQ ID NO: 292543 - DNA, 215 bp, Homo sapiens
  chr17:50235416-50235631
  hyper
cgcgtgtctcttctcttcgcaccagcggcggaaaccgcactagcagcggcggcggcggcggcggcggcagcagccacctgaagccaccaacactgggctcttccagcaaaaacgagaccccgattcgtctggcgccccaagaagacatagacgatagccccccgccgggctgcgccgtgcaattccgggctcccgggagcgcgtagctcgctggc

SEQ ID NO: 292544 - DNA, 729 bp, Homo sapiens
  chr17:52977561-52978290
  hyper
gcacacctcccctcccggatctctaggacaaaggcaggtcgagggtaaatatttctagttattcagtatattcagtggctaactatttattttgtgggtaccagacaccgacataatcggttacgtccttcccttaattctcataattctgaggtttgtgttattaaccccctattatctttggtctacccagggcagccaaagaggcgcagagaagaatgacaaggtgcccagcaagcggcaggatcaaagcctgggtctctaattcccaggctggagattctgggctgcctgctcctcctgcacggggcgaaaagcccacctgggatccgagcgggcggccgcgccactctcgcaggctccatacacccgccactacccgcctgtaccacctgcagccggcagcgcagcctcctcgcgggtcccgcagggcgcgctgcaggtgcgctgggcgtcccgaagccccgccctcgcgtccctgccccgcgcccagctcctcacgctcggtgcccgcgccccgcagcggcagcgcagaacgcaccgcctctgccagagcccgggaagcgctcgggcgaagaggaggagccaagggtaccgagcgggtggagtcgggagccggagagcggtggaggcggatttcctgggcccggccctctggcgctaccatggcgtttggcaagagtcaccgggatccctacgcgacctccgtgggccacctcataggtaagg

SEQ ID NO: 292545 - DNA, 88 bp, Homo sapiens; identical to SEQ ID NO: 204713
  chr17:52978340-52978428
  hyper

SEQ ID NO: 292546 - DNA, 144 bp, Homo sapiens; identical to SEQ ID NO: 11387
  chr17:52978453-52978597
  hyper

SEQ ID NO: 292547 - DNA, 140 bp, Homo sapiens; identical to SEQ ID NO: 239325
  chr17:53316183-53316323
  hyper

SEQ ID NO: 292548 - DNA, 169 bp, Homo sapiens
  chr17:53341536-53341705
  hyper
ggatactttacaaaattattttaatcaccgtgcaaacctaataacttgacccaagcgcaatcacctgtattcacccagagtaaatattcctaaaatcccgttcagtgtgtctgtgtctctcccgcctctttccgtttcaggcaaatgtctaccccccctctccccccac

SEQ ID NO: 292549 - DNA, 109 bp, Homo sapiens; identical to SEQ ID NO: 204715
  chr17:53343657-53343766
  hyper

SEQ ID NO: 292550 - DNA, 39 bp, Homo sapiens; identical to SEQ ID NO: 239328
  chr17:54670214-54670253
  hyper

SEQ ID NO: 292551 - DNA, 32 bp, Homo sapiens
  chr17:54672364-54672396
  hyper
caccctctagcgagggttttcaatgaactttt

SEQ ID NO: 292552 - DNA, 234 bp, Homo sapiens
  chr17:54673684-54673918
  hyper
gactaagggccatggtttcggaggggtccgaatctgggtgaaaatcaccacctctggcatctgcttttgggaagagagtatgcctgtgctcgggcactttctccccttgaggggtggggaggagggagaaatcggaaccggaatctttgcgctttaagattagataggggcagaaggcacgtaacccattaaagggacgtgcaaaacatcactcccaccccaccccttaaaaag

SEQ ID NO: 292553 - DNA, 280 bp, Homo sapiens
  chr17:54674073-54674353
  hyper
cctccccacctccctgccacctctccgcgcctccctcccggcgttccttccaccccaccccccaccccccccaaccccccaagtccggagtcccggcgaatctatgctaattatttcaaacctgcgcctggtccccagcgcagtctcaatgcccccggccccgcccgccctgtccctccagcccggcgctttcttccctcccgacgcagcctcgatggctcctcatttcaatagcctggccccggagccgagccccctccccggcgctgcctccgtcagc

SEQ ID NO: 292554 - DNA, 61 bp, Homo sapiens
  chr17:54756198-54756259
  hyper
gggggccccctccctcccccggctcccctcccccctcctccccgaaatttgcagacatctg

SEQ ID NO: 292555 - DNA, 169 bp, Homo sapiens; identical to SEQ ID NO: 239333
  chr17:54857395-54857564
  hyper

SEQ ID NO: 292556 - DNA, 84 bp, Homo sapiens; identical to SEQ ID NO: 239334
  chr17:54857791-54857875
  hyper

SEQ ID NO: 292557 - DNA, 353 bp, Homo sapiens; identical to SEQ ID NO: 204717
  chr17:54910847-54911200
  hyper

SEQ ID NO: 292558 - DNA, 295 bp, Homo sapiens; identical to SEQ ID NO: 204718
  chr17:54911484-54911779
  hyper

SEQ ID NO: 292559 - DNA, 527 bp, Homo sapiens; identical to SEQ ID NO: 204719
  chr17:54911874-54912401
  hyper

SEQ ID NO: 292560 - DNA, 359 bp, Homo sapiens; identical to SEQ ID NO: 239336
  chr17:55038098-55038457
  hyper

SEQ ID NO: 292561 - DNA, 130 bp, Homo sapiens; identical to SEQ ID NO: 239337
  chr17:55055244-55055374
  hyper

SEQ ID NO: 292562 - DNA, 50 bp, Homo sapiens; identical to SEQ ID NO: 239338
  chr17:55162841-55162891
  hyper

SEQ ID NO: 292563 - DNA, 50 bp, Homo sapiens; identical to SEQ ID NO: 239339
  chr17:55335001-55335051
  hyper

SEQ ID NO: 292564 - DNA, 119 bp, Homo sapiens; identical to SEQ ID NO: 239340
  chr17:55927364-55927483
  hyper

SEQ ID NO: 292565 - DNA, 420 bp, Homo sapiens; identical to SEQ ID NO: 204720
  chr17:55938684-55939104
  hyper

SEQ ID NO: 292566 - DNA, 462 bp, Homo sapiens; identical to SEQ ID NO: 225439
  chr17:56032083-56032545
  hyper

SEQ ID NO: 292567 - DNA, 167 bp, Homo sapiens; identical to SEQ ID NO: 239342
  chr17:56084355-56084522
  hyper

SEQ ID NO: 292568 - DNA, 75 bp, Homo sapiens; identical to SEQ ID NO: 239343
  chr17:56084800-56084875
  hyper

SEQ ID NO: 292569 - DNA, 38 bp, Homo sapiens
  chr17:56234840-56234878
  hyper
gttgctccagaaacagtacctctccattgcagagggtg

SEQ ID NO: 292570 - DNA, 476 bp, Homo sapiens
  chr17:56296380-56296856
  hyper
aagaagtggggagcccggagaagtggtcgggattgtaagcagaaagtggggacctcagaacaccgagctcaggttggaatgatctaaggacacaaaagcatggggcctcggggctggggcggtgcgactaccggaggcgcaagttgcgcacggggtcccgggagcgatacactgcctccccggtgtcagtgctccagacggtctccgccatgacagctgcgacgcgccgcgactgcgccggaaagcgcgccgctctgttttcctggcaacggagacgctggatcgggaggcgacggaggtgctgcgcgcgcaacccgccgttcccgtcacggcgccacggtcgcagttggccacacagtgcaagtgcagcccaagccgaacgcccaagagggctccggggtcctaccgatcaccgcttaccatgtatgcgataaaagctcaccgaaagcgggacctcgtgcgctgtgcaaatgagg

SEQ ID NO: 292571 - DNA, 215 bp, Homo sapiens
  chr17:56327007-56327222
  hyper
cttcggctggacgccggggaagacgcgcaacggcttccctctcccgctggtgagggcaggccgggccggggtgaaggatgggagccagaggggacgggatgcactacccaaacacgcagtgaaaggaggaggagggatcggtgggggcagcaggggtgcgcgatggagatctgcacagacccccaccttccgctagagggcagcagagctcggag

SEQ ID NO: 292572 - DNA, 610 bp, Homo sapiens; identical to SEQ ID NO: 204722
  chr17:56401719-56402329
  hyper

SEQ ID NO: 292573 - DNA, 314 bp, Homo sapiens; identical to SEQ ID NO: 204723
  chr17:56405995-56406309
  hyper

SEQ ID NO: 292574 - DNA, 1162 bp, Homo sapiens; identical to SEQ ID NO: 204724
  chr17:56429044-56430206
  hyper

SEQ ID NO: 292575 - DNA, 230 bp, Homo sapiens; identical to SEQ ID NO: 239352
  chr17:56595391-56595621
  hyper

SEQ ID NO: 292576 - DNA, 627 bp, Homo sapiens; identical to SEQ ID NO: 239353
  chr17:56736331-56736958
  hyper

SEQ ID NO: 292577 - DNA, 67 bp, Homo sapiens; identical to SEQ ID NO: 239356
  chr17:57184398-57184465
  hyper

SEQ ID NO: 292578 - DNA, 469 bp, Homo sapiens; identical to SEQ ID NO: 239357
  chr17:57784633-57785102
  hyper

SEQ ID NO: 292579 - DNA, 420 bp, Homo sapiens; identical to SEQ ID NO: 239358
  chr17:57970251-57970671
  hyper

SEQ ID NO: 292580 - DNA, 142 bp, Homo sapiens; identical to SEQ ID NO: 239359
  chr17:58156217-58156359
  hyper

SEQ ID NO: 292581 - DNA, 99 bp, Homo sapiens; identical to SEQ ID NO: 204726
  chr17:58228397-58228496
  hyper

SEQ ID NO: 292582 - DNA, 94 bp, Homo sapiens; identical to SEQ ID NO: 204727
  chr17:58498603-58498697
  hyper

SEQ ID NO: 292583 - DNA, 50 bp, Homo sapiens; identical to SEQ ID NO: 204728
  chr17:58676701-58676751
  hyper

SEQ ID NO: 292584 - DNA, 801 bp, Homo sapiens; identical to SEQ ID NO: 204729
  chr17:58677543-58678344
  hyper

SEQ ID NO: 292585 - DNA, 242 bp, Homo sapiens; identical to SEQ ID NO: 204730
  chr17:58700868-58701110
  hyper

SEQ ID NO: 292586 - DNA, 125 bp, Homo sapiens; identical to SEQ ID NO: 204731
  chr17:58711213-58711338
  hyper

SEQ ID NO: 292587 - DNA, 191 bp, Homo sapiens; identical to SEQ ID NO: 204732
  chr17:58725252-58725443
  hyper

SEQ ID NO: 292588 - DNA, 250 bp, Homo sapiens; identical to SEQ ID NO: 204733
  chr17:58733952-58734202
  hyper

SEQ ID NO: 292589 - DNA, 1530 bp, Homo sapiens; identical to SEQ ID NO: 204734
  chr17:58740342-58741872
  hyper

SEQ ID NO: 292590 - DNA, 749 bp, Homo sapiens; identical to SEQ ID NO: 204735
  chr17:58742892-58743641
  hyper

SEQ ID NO: 292591 - DNA, 144 bp, Homo sapiens; identical to SEQ ID NO: 239368
  chr17:58754612-58754756
  hyper

SEQ ID NO: 292592 - DNA, 35 bp, Homo sapiens; identical to SEQ ID NO: 204736
  chr17:59467391-59467426
  hyper

SEQ ID NO: 292593 - DNA, 72 bp, Homo sapiens
  chr17:59475144-59475216
  hyper
gctatggatggactaatgaaatggactaatgtctaaaacgcacacatttagatgtacacatactcttacaag

SEQ ID NO: 292594 - DNA, 81 bp, Homo sapiens
  chr17:59475276-59475357
  hyper
cgcgcgcgactttgcgaatgtattcacggattcctaggccggtacctgggttcccggctaaggaaagctgccctggttatt

SEQ ID NO: 292595 - DNA, 59 bp, Homo sapiens; identical to SEQ ID NO: 204737
  chr17:59478678-59478737
  hyper

SEQ ID NO: 292596 - DNA, 692 bp, Homo sapiens; identical to SEQ ID NO: 54445
  chr17:59489181-59489873
  hyper

SEQ ID NO: 292597 - DNA, 131 bp, Homo sapiens
  chr17:59532387-59532518
  hyper
ttcgcacgtggcccgaggcgggtgctggcgctggccatgtccagcgagtctcactccctgcaggctgtggccgaagactggtccgcctgtcaaccttatctttatgggtttttcccaacccagactggccc

SEQ ID NO: 292598 - DNA, 259 bp, Homo sapiens
  chr17:59535267-59535526
  hyper
gctccagcacttttggccccctggggggctgctttgccctcctctctttgaggacctgaggaggtttctcaggaatgcattgattggagacccagagatgcctctcagcagatggggagagggaaatagactatgctgttcagttttcatacattttcgtgagtgactcgaaccccaagtttttcatcccaggggcgccgctcttctgtttccatccccatctctggccaacgggaaagcactacgttgggctccgtgt

SEQ ID NO: 292599 - DNA, 53 bp, Homo sapiens
  chr17:59539943-59539996
  hyper
ctggctggggcggacccagaggtagagcgcagagtgcccgggacaggcgggct

SEQ ID NO: 292600 - DNA, 32 bp, Homo sapiens; identical to SEQ ID NO: 239381
  chr17:59941038-59941070
  hyper

SEQ ID NO: 292601 - DNA, 130 bp, Homo sapiens; identical to SEQ ID NO: 204740
  chr17:60142477-60142607
  hyper

SEQ ID NO: 292602 - DNA, 89 bp, Homo sapiens; identical to SEQ ID NO: 239383
  chr17:60143463-60143552
  hyper

SEQ ID NO: 292603 - DNA, 51 bp, Homo sapiens; identical to SEQ ID NO: 225460
  chr17:60771357-60771408
  hyper

SEQ ID NO: 292604 - DNA, 192 bp, Homo sapiens
  chr17:60781450-60781642
  hyper
ccggccgcggctggacggagcgcggggccgcagcaaccaggccgggctccccgtcgcgccccttccggagcgggaggccctcgccgaggcggaggctgggacgcgcggggcgggcggcggcggggagccgcggggccgaggcgcagggcgttttccccggaggtgcggcgtgcgcccgcgacacaaaggtct

SEQ ID NO: 292605 - DNA, 46 bp, Homo sapiens; identical to SEQ ID NO: 204741
  chr17:60885402-60885448
  hyper

SEQ ID NO: 292606 - DNA, 322 bp, Homo sapiens
  chr17:60885548-60885870
  hyper
gctcctcttcctcctcctctttttgcttcttcactccctacacctgcccctcttcctcctccttccccgaggctgctttccgcggcgccggccggccttgcctggggcggaggcggtgggggcggctaccgggcgtcctccggtttccctagcaaccgcgcctccccgcccccgcgcgaccaggtgcagccgccgagagcacggggcggggcggggcggggctgtggccccggggtcccaagccagtcgtgggcgcccgccggttgccgtgggaacgaggcgggctgcagtcggggagtcagagccacgctggtgggcagag

SEQ ID NO: 292607 - DNA, 54 bp, Homo sapiens; identical to SEQ ID NO: 239385
  chr17:61043210-61043264
  hyper

SEQ ID NO: 292608 - DNA, 125 bp, Homo sapiens; identical to SEQ ID NO: 204743
  chr17:61043854-61043979
  hyper

SEQ ID NO: 292609 - DNA, 96 bp, Homo sapiens; identical to SEQ ID NO: 204744
  chr17:61044393-61044489
  hyper

SEQ ID NO: 292610 - DNA, 75 bp, Homo sapiens; identical to SEQ ID NO: 239388
  chr17:61522994-61523069
  hyper

SEQ ID NO: 292611 - DNA, 118 bp, Homo sapiens; identical to SEQ ID NO: 204745
  chr17:61553820-61553938
  hyper

SEQ ID NO: 292612 - DNA, 48 bp, Homo sapiens; identical to SEQ ID NO: 204746
  chr17:61553939-61553987
  hyper

SEQ ID NO: 292613 - DNA, 334 bp, Homo sapiens
  chr17:61554094-61554428
  hyper
gagccggaggccgctaggctcccaggccccggccgaggctgcgcggccgcacggtgggcaggctcgggtgttccggcaaactgccgggtccccatcttctaaagagaggaggccctttctccagcttcctctgcgggagcccgacccagccccatcccgccacccccgggctgcacctcggcccctccccggcccgcgcccctgcccggggcgggccaggaacctcggcccgcgccgctggggactctggagcggaggaggaagcgcggcggggcgggggcgggggtgtgtcgggttttataacccgcagggcggccgcggcgcaggagaaggg

SEQ ID NO: 292614 - DNA, 381 bp, Homo sapiens; identical to SEQ ID NO: 239390
  chr17:61615574-61615955
  hyper

SEQ ID NO: 292615 - DNA, 237 bp, Homo sapiens; identical to SEQ ID NO: 239391
  chr17:61678078-61678315
  hyper

SEQ ID NO: 292616 - DNA, 330 bp, Homo sapiens; identical to SEQ ID NO: 239392
  chr17:61776666-61776996
  hyper

SEQ ID NO: 292617 - DNA, 109 bp, Homo sapiens
  chr17:61777763-61777872
  hyper
gcgtggggaagcaacggtggcagggacaggatggaagggccgcgctccgcatcctactgggaggggacgagttcaggctgcggcggctgcggtcgcgggacactgggcg

SEQ ID NO: 292618 - DNA, 73 bp, Homo sapiens; identical to SEQ ID NO: 129188
  chr17:61778423-61778496
  hyper

SEQ ID NO: 292619 - DNA, 232 bp, Homo sapiens; identical to SEQ ID NO: 239394
  chr17:61818856-61819088
  hyper

SEQ ID NO: 292620 - DNA, 289 bp, Homo sapiens; identical to SEQ ID NO: 239395
  chr17:61851078-61851367
  hyper

SEQ ID NO: 292621 - DNA, 224 bp, Homo sapiens; identical to SEQ ID NO: 239396
  chr17:61920536-61920760
  hyper

SEQ ID NO: 292622 - DNA, 283 bp, Homo sapiens
  chr17:61921000-61921283
  hyper
aaaaaaaaaaaaaaaaagactcagctgctctgtggggcagaacagcagccaactcaacttcctgtaaaagctcatgctggtagctcggaactgccaagggacctaggaggctccagacttgacccagctggtgaacggtcgacttggccaaggctgagttctaccgcacatttttaacgtggctccgcctcactttaaggaagcctggtactttactccccagaaaatgcttctagtcaaaagaaatttggcttatgagaaacctccccgcagtttaaaaaaa

SEQ ID NO: 292623 - DNA, 164 bp, Homo sapiens; identical to SEQ ID NO: 239399
  chr17:62075060-62075224
  hyper

SEQ ID NO: 292624 - DNA, 181 bp, Homo sapiens; identical to SEQ ID NO: 239400
  chr17:62103203-62103384
  hyper

SEQ ID NO: 292625 - DNA, 408 bp, Homo sapiens; identical to SEQ ID NO: 239401
  chr17:62223211-62223619
  hyper

SEQ ID NO: 292626 - DNA, 288 bp, Homo sapiens; identical to SEQ ID NO: 239402
  chr17:62223930-62224218
  hyper

SEQ ID NO: 292627 - DNA, 117 bp, Homo sapiens; identical to SEQ ID NO: 204751
  chr17:62776306-62776423
  hyper

SEQ ID NO: 292628 - DNA, 60 bp, Homo sapiens; identical to SEQ ID NO: 204752
  chr17:62776446-62776506
  hyper

SEQ ID NO: 292629 - DNA, 62 bp, Homo sapiens; identical to SEQ ID NO: 204753
  chr17:62915906-62915968
  hyper

SEQ ID NO: 292630 - DNA, 75 bp, Homo sapiens; identical to SEQ ID NO: 239404
  chr17:62971851-62971926
  hyper

SEQ ID NO: 292631 - DNA, 1721 bp, Homo sapiens
  chr17:63555673-63557394
  hyper
agaagcctcggaaccgtcgcccccgtgcccccaacccacctcccggatccgcgaaacctacaaaactggatcaccagccgtctcacgccactactgcctgtgccaagaatcccaaactctactgatttcaagcctgtcttttttccaaagaaaaaagtcttatctaaccaataaacaagctgctttccctagcacggaaaagatcaaactaagaagggtaggggctgaacggggtgcaaccccgggcgagaagccagggaccccggatctgggatgggtgcacgctgaacccgaccagagcctcgagccgcggggctgggcggcgcggcccacggagaagtggggctgccgttggcaccgcgctacccgggcggtgggaggtggagcggccccgttacctggaagacgaaggccgccgaagccaggctctcatgtcctccgagcccctccggcccggtcccccggcccaaatgcaactgaacgcctccagagccctggcgggcacacctcgaggccggaaccccgggacacgccagcagcgccccgagcccgggcggggggtcggtccccggcgccgccgtttgcagaggcgcccgcagaaaaagcacagaaagcagcagcctagtccagaaatggcgacgcgcggagtctctgcctctccgcaaaaggggccggggcggccacgggcgaggggcccgggccgggaggagggacgcgagggacacgggcgccccggacttgggccggtcctgcgcgcagactgagcctccgccagcgctgtgggccccttagcgcggacccgcggcagggaggggaaaaggggagggggaagagaagtaggaggagaggatggggcggaggagaggcggggggcgggggagggcaagcggggggcgccgctaccctttcatcccacctcccaaaggcactcccgcgcgcactcacacgccgactcacatccataaccgcgacagcgacgcgacccccggggggtatctgccccctctccgcccccgccactgccgccactcggataagtctcctctctgggccccccgccaacccggtcaccgcgctggggagggggctccggcgcagggcgcgcaaggctgcccggccaagccccccggaacgctgggcgccgggtccgccgctcccctccgcgccggcccctagcgcgccccgaaatagccggcctgccaacttcaaagggccgccccgcacatcaaagcgcgcggtccgcccggccgcctcggcctcggcactcaccattgatccccgcgcgcgctcggcggcgagacctcgcaggcgcccctggcaggggcccggccccggcccccggctcggctcgcggcggcagccccgggcccccccgggccggccgcggcgtcggggaacatggggagtcgtgcggcgggggagggggtgcgggaaacaacaatcccgggttcagagcgaaagccaccggccggggagggggaacggcgcgccccgccgccccttttatgcaaaagatccgagcgggcctccgcccccgcccggcccggctttcaacgcaggtcctgtttccagcagtcactcggcgcaccaaatgtcctccgggcgcttccaacaaaaactgcgctgtggatttaactgtgcacttcaaaggcgcgagccgagcgcacggtcctgaaagggaggtacgcgccggccgcgccccgggccgccccccgcagccc

SEQ ID NO: 292632 - DNA, 687 bp, Homo sapiens; identical to SEQ ID NO: 225470
  chr17:64187875-64188562
  hyper

SEQ ID NO: 292633 - DNA, 121 bp, Homo sapiens; identical to SEQ ID NO: 204755
  chr17:64257870-64257991
  hyper

SEQ ID NO: 292634 - DNA, 173 bp, Homo sapiens; identical to SEQ ID NO: 225472
  chr17:64298539-64298712
  hyper

SEQ ID NO: 292635 - DNA, 685 bp, Homo sapiens; identical to SEQ ID NO: 225473
  chr17:64298989-64299674
  hyper

SEQ ID NO: 292636 - DNA, 60 bp, Homo sapiens; identical to SEQ ID NO: 204756
  chr17:64961305-64961365
  hyper

SEQ ID NO: 292637 - DNA, 202 bp, Homo sapiens
  chr17:64961625-64961827
  hyper
aggtggaggctggcgagggggcgggaggaggctggggttggggggagcggacgggagggggggaggggttgcttggcaaccggtgtctgtgctattgctatgggaactggccatcctggggcggggccggccgggggcggggcgcgtcggtgccgctgggcgctttctacaggctcgggctgaggggtgggggcagaagtag

SEQ ID NO: 292638 - DNA, 97 bp, Homo sapiens
  chr17:64962141-64962238
  hyper
cgacccccaaatgcgactggaggctgagtagtaggtgtcatgaggctggaatgctaggggaccaggatttcagccccgggaccgtggggacagctcc

SEQ ID NO: 292639 - DNA, 56 bp, Homo sapiens; identical to SEQ ID NO: 225474
  chr17:65242142-65242198
  hyper

SEQ ID NO: 292640 - DNA, 41 bp, Homo sapiens; identical to SEQ ID NO: 204758
  chr17:65352419-65352460
  hyper

SEQ ID NO: 292641 - DNA, 257 bp, Homo sapiens; identical to SEQ ID NO: 239410
  chr17:65362659-65362916
  hyper

SEQ ID NO: 292642 - DNA, 165 bp, Homo sapiens; identical to SEQ ID NO: 239411
  chr17:65713844-65714009
  hyper

SEQ ID NO: 292643 - DNA, 434 bp, Homo sapiens; identical to SEQ ID NO: 204759
  chr17:65822942-65823376
  hyper

SEQ ID NO: 292644 - DNA, 43 bp, Homo sapiens; identical to SEQ ID NO: 204760
  chr17:66434420-66434463
  hyper

SEQ ID NO: 292645 - DNA, 146 bp, Homo sapiens; identical to SEQ ID NO: 204761
  chr17:66596140-66596286
  hyper

SEQ ID NO: 292646 - DNA, 104 bp, Homo sapiens
  chr17:67410686-67410790
  hyper
acgcaatctttgtcgcacccagttatctcgctcagcgaccggggcgaccacgtttccttaaatcagagccccgtggactccgccggagaactacattacccagc

SEQ ID NO: 292647 - DNA, 53 bp, Homo sapiens
  chr17:68164454-68164507
  hyper
accccgactgcgccgtccacaataccagctagtttgctgaattagttcagcga

SEQ ID NO: 292648 - DNA, 196 bp, Homo sapiens
  chr17:68164537-68164733
  hyper
ctgcacaaaagacacatttgatcgctcgagaaaataaacatttaaaaaactcagtggaaagaaagactcctaaaatatatcctgtcctttaggagcaaagcttcgttaggacaccgaagtactcagaaataataggcacttactcttcggtttacacacacacacacacacacacacacggattagtttataaagt

SEQ ID NO: 292649 - DNA, 204 bp, Homo sapiens; identical to SEQ ID NO: 204763
  chr17:68164928-68165132
  hyper

SEQ ID NO: 292650 - DNA, 158 bp, Homo sapiens; identical to SEQ ID NO: 204764
  chr17:70026735-70026893
  hyper

SEQ ID NO: 292651 - DNA, 404 bp, Homo sapiens; identical to SEQ ID NO: 239418
  chr17:70115369-70115773
  hyper

SEQ ID NO: 292652 - DNA, 151 bp, Homo sapiens; identical to SEQ ID NO: 239419
  chr17:70116068-70116219
  hyper

SEQ ID NO: 292653 - DNA, 79 bp, Homo sapiens; identical to SEQ ID NO: 239420
  chr17:70116991-70117070
  hyper

SEQ ID NO: 292654 - DNA, 51 bp, Homo sapiens; identical to SEQ ID NO: 204765
  chr17:70270193-70270244
  hyper

SEQ ID NO: 292655 - DNA, 39 bp, Homo sapiens; identical to SEQ ID NO: 204766
  chr17:70553092-70553131
  hyper

SEQ ID NO: 292656 - DNA, 271 bp, Homo sapiens
  chr17:70587739-70588010
  hyper
tattcagaaagcccgtccacaccctggccaaacgcgtaccagcgtcagcctgacgggtggcccagtcctcgccggaaagctgcttgccaaacgcccccgctcaccccctagccccaacggtgagaggggctcggctgagtcgcgttctccaaccgctgcgccccagcagcgtccccggtcgccagtgggcggacgccaggagctcacggaggcggcaccgctcccgaagtaacggagcccggagggcgcccaggcgttaaggcaagtgcaa

SEQ ID NO: 292657 - DNA, 762 bp, Homo sapiens
  chr17:70588131-70588893
  hyper
tggggtggtcgctgaccaccgtgtcccaggtgaatcagctccgcttggaggcagggggatgactaaaatgacctccaagaagatgtcaattacaagaacaaaaatttcaacccggaatctcgagaccttcgaaaaacgacgcggaggaaaaaaggaaagaaagaaaagaaagtaaatcagatcccttccccgaaccgcagggaaacttacctccagcttggcgacccagctgttaagcagaacaaatcaatccacggatggagaagaggtcgtgggtcttctgagcccagctgatacacaccaagtaatccacgttaaggggtccgcagccccccacccaattccccactttccatccaaggccaaagagcagccagaccctgtcctctgcgctccagactcgcggaggtcgcgggcgggggtcctcaggcggccgccttctcgtccccaggggtgggcgcgcgacgcgggcagggaccgggcgcccggaggaccaagcgagcgcatcccgcctactcgtgctgggacatcacccagcctggacgccgctcctcgcctttcttccccgcgcatcgccagcgccaaccaaagatccccgccgggaaagcctctctgccaagctggaaagcgctgaaggcggatcgtctctcagacttgggtttgcaggttcacaaggcccgggaggcttacggtgggcgcctgcctaacagagggtccttgcggagaagcgcagaacgacaaatgccagaggcggtgaccgcg

SEQ ID NO: 292658 - DNA, 81 bp, Homo sapiens; identical to SEQ ID NO: 239424
  chr17:71088837-71088918
  hyper

SEQ ID NO: 292659 - DNA, 43 bp, Homo sapiens; identical to SEQ ID NO: 239425
  chr17:71128278-71128321
  hyper

SEQ ID NO: 292660 - DNA, 240 bp, Homo sapiens
  chr17:71160878-71161118
  hyper
agagggaaaatagcgcttgtccttgccatgagtcttgaggagaccgaaaacgcttaaccttttacgcccccgcaggcgggtcccctctctccccgctccccggctgtctgtaagctctgcctgcggccacccgcaggcgtttcagccggtctcacccctgtccttctgcaggacccgggaggaggggttgggggggcggagcgaagccgctgtgacgtagcgggaggggggcgtggggaa

SEQ ID NO: 292661 - DNA, 100 bp, Homo sapiens; identical to SEQ ID NO: 54533
  chr17:71227555-71227655
  hyper

SEQ ID NO: 292662 - DNA, 253 bp, Homo sapiens; identical to SEQ ID NO: 239430
  chr17:71228588-71228841
  hyper

SEQ ID NO: 292663 - DNA, 241 bp, Homo sapiens; identical to SEQ ID NO: 204769
  chr17:71306521-71306762
  hyper

SEQ ID NO: 292664 - DNA, 1600 bp, Homo sapiens
  chr17:71306967-71308567
  hyper
ctcagccccggctcccgcccagctctccagccctcccggccggggcactcaccggctgacgggatccccgcgggcaggatggctcctgggggacgcgccgggggcagggggcagttttgtaaccccggctgggggcgctccggagagggggcggggccagggacggccgatccgcgcgcacccgccccaagcgggcgattaaatcattaaccgaccgctcccgcctgcgatcccgctgagcgcgctgagctcggggcgcactagcccaggagcggccgtctccccggctccaagggggcgggtggctcgactgccctccccccgcaccccgccaggaggcgcctcggcctcccgggcttccgagggagcgggcggggcgggagcctggcgggggagggaagggttcgcggggcgggagtaggggaaaggaggaccatttgttccttcggccattcccttccagacagctccttccctctggcttcccggccgggtgacattgggtggcgtgtgctgcagtgtgtgtacgagagcgagatgtgtacacgcctctgcccgtacaggcggagaattcggttcttattcatggagaactccgggcgcacacacgcccccctcgcggagatcgcgggccgcgcgccgccgattgctgcgctcctgcccacaccgacacacaccccattcctgggaagggggaggccctttaaaaccggcccccaaccccctcagcggcacccttggccagggccgggagttccagcgtggagagaggaaatggagtcccggcaacgctgcgcccggctccctgccacctcctcctccacacatcccgctctgccaggacactaggtgcgcagcttagggtcccaggcaccgcggtgggcgcggtgaaaagcgcgagcgccgagaagtgggggctccgcgcccttctccccgcgccgcggcctcgcatccccagcttcgatcctctctgccccacagggggactcgagacccccaagcccacccagggcacccagcgcgaaggcggctaccacagacagaggcggttgcccgtcgcctacctcggtccccggagacccgagctctgggccggctgcgctgtccccttcgtgggctccgcgcggcggaggggctggcggcccctgtcagcgccggcgtttgtttccctctggctctcgggctttcagggctgggagcctccaggacactccccttccaggctccgcccgcgcccgccccgcgcaaccctccccgcgcacccctctgcgctgatgtcacggcgccgcagcagccaatggccgtcgggaacctctgcccgactgctcggcctcctcggttcaaactgaaagcctgagactttcccaactccgtatggggcagcctgggcccgcccggcttccgggagacactcccgccccagcctgcgctccggccgcgaacccccactggggcccccagggccaggggcgcgtctccctccgggggcctggcgcgaggctcttttgaggctcttccccattcgagccggggcaagaaaccaagaactccagcccgggtggcgttcctcgttcctgctccctcccggacctgctaacca

SEQ ID NO: 292665 - DNA, 203 bp, Homo sapiens
  chr17:71640267-71640470
  hyper
ctccgccctgttttataatcctggtggggtccgataccccgtggcttagtcccaggaaacagtcagtctacgcggctccgtgccccggggtgtaatatgcccgggaggggcagcgcttggctaccccaacccttcctcctcttctgtactagtccgagcccggcagcgcgcccggaaggcgaggggcgagcagggagaaagag

SEQ ID NO: 292666 - DNA, 239 bp, Homo sapiens
  chr17:71640593-71640832
  hyper
acttcaggaaacttcctcccgtggccacgttgcccgccccctccccgccccctggttgggttctcccggccgacgcagtcaccgccgttccaggcgccgggcccccgggacccggccagagccgagcgcagtggcagacgcgggtgcgggggttcttttaggggcgccggtttcgggggacgcggtgagcatagcggtccgaatctccctggagctgaagttttcttctctctaacttt

SEQ ID NO: 292667 - DNA, 48 bp, Homo sapiens
  chr17:71641133-71641181
  hyper
ccgcgccccggccggagctctcgggaagacgcacggagagcccggcgg

SEQ ID NO: 292668 - DNA, 65 bp, Homo sapiens
  chr17:71897914-71897979
  hyper
tatacatcttggttctgcagcgagtggagggaatgaggagggcctttcaagggaggcgggattgc

SEQ ID NO: 292669 - DNA, 114 bp, Homo sapiens; identical to SEQ ID NO: 239438
  chr17:72199626-72199740
  hyper

SEQ ID NO: 292670 - DNA, 472 bp, Homo sapiens
  chr17:72208668-72209140
  hyper
ctcctgcttgtcctgcagcctgggctcctccctccgctggccaagtcacgccaagcagtttgcggttacaggacgggtgggggcctctgcatatgtgcagagtacggagggcccagggacgcgaggctccccgatgggcaacctcccctgcctttgcttttccccagagccccctcctggcctgcgttcggcatcttctcgggtcgtcatcgccctctgcggtgcctgcgctcggggtgagggtttttgtcggcttttgttacatcaccgatgtaacagtgcctggacgtagtaggtgctcaataaatatgttgttgaatgcgcttcagtctccccgaatgcttgtcccttccgggcgctctcatcgctctcctaccttccccgctacacagctcgaaggtcccctcctccgggaagctcaccctgtcccacttgccaggaagaatcaagcaaattttctgagtgagacacc

SEQ ID NO: 292671 - DNA, 51 bp, Homo sapiens; identical to SEQ ID NO: 239440
  chr17:72209566-72209617
  hyper

SEQ ID NO: 292672 - DNA, 515 bp, Homo sapiens; identical to SEQ ID NO: 239441
  chr17:72209873-72210388
  hyper

SEQ ID NO: 292673 - DNA, 76 bp, Homo sapiens; identical to SEQ ID NO: 204773
  chr17:72427016-72427092
  hyper

SEQ ID NO: 292674 - DNA, 219 bp, Homo sapiens; identical to SEQ ID NO: 204774
  chr17:72427594-72427813
  hyper

SEQ ID NO: 292675 - DNA, 332 bp, Homo sapiens; identical to SEQ ID NO: 204775
  chr17:72427999-72428331
  hyper

SEQ ID NO: 292676 - DNA, 340 bp, Homo sapiens; identical to SEQ ID NO: 204776
  chr17:72428489-72428829
  hyper

SEQ ID NO: 292677 - DNA, 70 bp, Homo sapiens; identical to SEQ ID NO: 204777
  chr17:72428872-72428942
  hyper

SEQ ID NO: 292678 - DNA, 374 bp, Homo sapiens; identical to SEQ ID NO: 204778
  chr17:72449939-72450313
  hyper

SEQ ID NO: 292679 - DNA, 337 bp, Homo sapiens; identical to SEQ ID NO: 54557
  chr17:72450330-72450667
  hyper

SEQ ID NO: 292680 - DNA, 300 bp, Homo sapiens; identical to SEQ ID NO: 239448
  chr17:72732898-72733198
  hyper

SEQ ID NO: 292681 - DNA, 532 bp, Homo sapiens; identical to SEQ ID NO: 239449
  chr17:72733408-72733940
  hyper

SEQ ID NO: 292682 - DNA, 475 bp, Homo sapiens
  chr17:72856466-72856941
  hyper
gctgggggaccgagccagaagtccccttggacgaccagggctgggaaaccgagtggacgaatggggtgggcatcagggcctggcgggaattcccgtcttgctcacccagcagctccttgcagggtcgcgggacgcacctgggggttcaggttgccgggtgcctttgctccgcgtgtccccgccctgcccgcgtaggcaggaaacaggagactcggggcttcccctccccgccgtcggggatcctgggcgaagcccccagagaccggcgcaggcggctggtgcgcagccagggcccagcgccaggtcttgctcgcccagtgccctctctgcctacccttccctttgcgctctggaagcccgggagccgggcacgggccagcatctgcaagatgccactactctggaagcccactccgattctcccaggtcgcaggaaggagagagctaggctggggcaaaggagatggggcagagc

SEQ ID NO: 292683 - DNA, 102 bp, Homo sapiens; identical to SEQ ID NO: 239452
  chr17:72919304-72919406
  hyper

SEQ ID NO: 292684 - DNA, 258 bp, Homo sapiens; identical to SEQ ID NO: 204780
  chr17:72920292-72920550
  hyper

SEQ ID NO: 292685 - DNA, 216 bp, Homo sapiens
  chr17:72920580-72920796
  hyper
ccgaagccccaaccctgcgggtcaggaactccctagtccccaagtctagggatgagatgggggaaggagagccgtcagggttgacctggagttttgtccgctcctcccctacagtgatccctctagccttctccagtcgcctccgccatgtccgaggagctggcccagggccccaaggagagccccccggcgccgcgtgcgggccccagggaggtg

SEQ ID NO: 292686 - DNA, 90 bp, Homo sapiens; identical to SEQ ID NO: 204781
  chr17:72931819-72931909
  hyper

SEQ ID NO: 292687 - DNA, 183 bp, Homo sapiens; identical to SEQ ID NO: 239456
  chr17:72968521-72968704
  hyper

SEQ ID NO: 292688 - DNA, 127 bp, Homo sapiens; identical to SEQ ID NO: 204782
  chr17:72968954-72969081
  hyper

SEQ ID NO: 292689 - DNA, 904 bp, Homo sapiens
  chr17:72983606-72984510
  hyper
acaccaggagggtcccgccctcggccccgcctccagctttgcatacatctcctgattggtcggcggcggcaggccccaccccgcggagccgagctccgcaagctgcaggcgggctccgccaagatgcagcggcggctccggttgtcgccgggcgggccaggagcagcgcggacccgagccgggcagggggcgcccgccacggcacccgcgcgctcctagcgccccagacccgcctgcgggcccggatcctccttgccactgtcccacccgccgtccctgccactccaccctttgtgtcgccgcagcccggtgcccccggctctgcgggaccccggccgggccggaccctggcaaagcgccaggccccgcgtgggctcccggcgagcggttgatggcgagggggcgcggcgcgggctctgtagcccgagttcccgacgctggaggcccggcccgcctcagccgcattgtcccgggccgcgcgcaccggccctgagctgcgccgccgcagcacccgcccgccgcccgcggggccatgcggagagccgccgggatggaggacttctccgcggaggaagaggagtcctggtacgaccagcaggacctggagcagggtgagcgcgggggcgaccgggacaggaaggcggggagcgcccggtgacccctgtccgcttctccattgttgggcgctatcaccccgggaggggctgggctggaccgggcgcgcccgactcggaggagggacgcgtctggagaaccgggacgtggagagagggggcgctgccggagaagacgcggaccggacgggcggagacctgcaaaagtggggggcggggggcggtcttcctattttcccagacgaccgggcatccgtcatccagctcgcccaccccgtcctggaggcagc

SEQ ID NO: 292690 - DNA, 116 bp, Homo sapiens; identical to SEQ ID NO: 54574
  chr17:73008759-73008875
  hyper

SEQ ID NO: 292691 - DNA, 99 bp, Homo sapiens; identical to SEQ ID NO: 239460
  chr17:73009128-73009227
  hyper

SEQ ID NO: 292692 - DNA, 1419 bp, Homo sapiens; identical to SEQ ID NO: 239461
  chr17:73029789-73031208
  hyper

SEQ ID NO: 292693 - DNA, 81 bp, Homo sapiens; identical to SEQ ID NO: 204786
  chr17:73043061-73043142
  hyper

SEQ ID NO: 292694 - DNA, 86 bp, Homo sapiens; identical to SEQ ID NO: 11496
  chr17:73073967-73074053
  hyper

SEQ ID NO: 292695 - DNA, 363 bp, Homo sapiens; identical to SEQ ID NO: 225497
  chr17:73084122-73084485
  hyper

SEQ ID NO: 292696 - DNA, 82 bp, Homo sapiens; identical to SEQ ID NO: 239464
  chr17:73105914-73105996
  hyper

SEQ ID NO: 292697 - DNA, 232 bp, Homo sapiens; identical to SEQ ID NO: 239465
  chr17:73127281-73127513
  hyper

SEQ ID NO: 292698 - DNA, 252 bp, Homo sapiens; identical to SEQ ID NO: 239466
  chr17:73127892-73128144
  hyper

SEQ ID NO: 292699 - DNA, 248 bp, Homo sapiens; identical to SEQ ID NO: 239467
  chr17:73150719-73150967
  hyper

SEQ ID NO: 292700 - DNA, 92 bp, Homo sapiens; identical to SEQ ID NO: 239468
  chr17:73201313-73201405
  hyper

SEQ ID NO: 292701 - DNA, 296 bp, Homo sapiens; identical to SEQ ID NO: 239469
  chr17:73257643-73257939
  hyper

SEQ ID NO: 292702 - DNA, 80 bp, Homo sapiens; identical to SEQ ID NO: 239470
  chr17:73401911-73401991
  hyper

SEQ ID NO: 292703 - DNA, 83 bp, Homo sapiens; identical to SEQ ID NO: 204789
  chr17:73422368-73422451
  hyper

SEQ ID NO: 292704 - DNA, 236 bp, Homo sapiens; identical to SEQ ID NO: 239471
  chr17:73452534-73452770
  hyper

SEQ ID NO: 292705 - DNA, 483 bp, Homo sapiens; identical to SEQ ID NO: 225499
  chr17:73511002-73511485
  hyper

SEQ ID NO: 292706 - DNA, 33 bp, Homo sapiens; identical to SEQ ID NO: 204792
  chr17:73521010-73521043
  hyper

SEQ ID NO: 292707 - DNA, 98 bp, Homo sapiens; identical to SEQ ID NO: 239473
  chr17:73522040-73522138
  hyper

SEQ ID NO: 292708 - DNA, 71 bp, Homo sapiens; identical to SEQ ID NO: 54595
  chr17:73522482-73522553
  hyper

SEQ ID NO: 292709 - DNA, 80 bp, Homo sapiens
  chr17:73584287-73584367
  hyper
ggcggccgagcctgccaccgccgggggccagggaacccctggtggccgcaggaagcccactgcagaggggaacggcggct

SEQ ID NO: 292710 - DNA, 178 bp, Homo sapiens
  chr17:73584951-73585129
  hyper
actgggccggccaaggacgcgagcgacaaccgggcgcagcggggcgccgagccagaaacaatgcaggcctcgacggcccgggctccgcgccaccaggtcggaaaggcggtggggcaggtgccagcggcggcaggcgagggcgaagcgggagccgcagcaggagcggggccggaggacc

SEQ ID NO: 292711 - DNA, 214 bp, Homo sapiens; identical to SEQ ID NO: 225501
  chr17:73585691-73585905
  hyper

SEQ ID NO: 292712 - DNA, 245 bp, Homo sapiens; identical to SEQ ID NO: 239475
  chr17:73663127-73663372
  hyper

SEQ ID NO: 292713 - DNA, 121 bp, Homo sapiens; identical to SEQ ID NO: 204796
  chr17:73781201-73781322
  hyper

SEQ ID NO: 292714 - DNA, 35 bp, Homo sapiens; identical to SEQ ID NO: 239478
  chr17:73851964-73851999
  hyper

SEQ ID NO: 292715 - DNA, 45 bp, Homo sapiens; identical to SEQ ID NO: 225503
  chr17:73874667-73874712
  hyper

SEQ ID NO: 292716 - DNA, 38 bp, Homo sapiens; identical to SEQ ID NO: 239479
  chr17:73937163-73937201
  hyper

SEQ ID NO: 292717 - DNA, 56 bp, Homo sapiens; identical to SEQ ID NO: 204797
  chr17:73993576-73993632
  hyper

SEQ ID NO: 292718 - DNA, 162 bp, Homo sapiens; identical to SEQ ID NO: 239481
  chr17:74068653-74068815
  hyper

SEQ ID NO: 292719 - DNA, 31 bp, Homo sapiens
  chr17:74071729-74071760
  hyper
gggtgcgtgaagtgaccgtctgtctcctgca

SEQ ID NO: 292720 - DNA, 132 bp, Homo sapiens
  chr17:74072091-74072223
  hyper
ctggggaggaaatccgggtatttcccctctccatcctctggaaaaacagagaggcgaggccagactgcccccacacctcctgtagccactgagcgcgaagtgcgttggttccgagcgcgctggtgggatcca

SEQ ID NO: 292721 - DNA, 50 bp, Homo sapiens; identical to SEQ ID NO: 204798
  chr17:74072427-74072477
  hyper

SEQ ID NO: 292722 - DNA, 131 bp, Homo sapiens; identical to SEQ ID NO: 204799
  chr17:74072580-74072711
  hyper

SEQ ID NO: 292723 - DNA, 118 bp, Homo sapiens
  chr17:74073471-74073589
  hyper
caaaggcaggcgacagcatcctgacggttgatgtggcctgaaagcacttagcgggcgcgctgggatgtcacagagttggagtcattgttgggggaccgtggggagagctttgcctgtt

SEQ ID NO: 292724 - DNA, 247 bp, Homo sapiens
  chr17:74136746-74136993
  hyper
tcttttagtgccgaggtatgggaaacagaagcaaggccctggggtcccacccccatcagatctgcctccctcttcctttcctcttcgaggttttattagccaaatgaagagggtaggggcatccgaggctatccttttctcccgaagagcaggaaatcaggacccccttcctcctcgcaacaaatggaagtggggcgagaagtttgggagggcggtacgacggggcgggggcggtggaggtcctctg

SEQ ID NO: 292725 - DNA, 150 bp, Homo sapiens; identical to SEQ ID NO: 239486
  chr17:74137385-74137535
  hyper

SEQ ID NO: 292726 - DNA, 59 bp, Homo sapiens
  chr17:74235822-74235881
  hyper
gccctcggaccccgcgaggcaggtaggctttgggccgggccggccgggtccgtgcgggg

SEQ ID NO: 292727 - DNA, 973 bp, Homo sapiens; identical to SEQ ID NO: 129386
  chr17:74235976-74236949
  hyper

SEQ ID NO: 292728 - DNA, 150 bp, Homo sapiens; identical to SEQ ID NO: 239488
  chr17:74261114-74261264
  hyper

SEQ ID NO: 292729 - DNA, 141 bp, Homo sapiens; identical to SEQ ID NO: 239489
  chr17:74350254-74350395
  hyper

SEQ ID NO: 292730 - DNA, 172 bp, Homo sapiens; identical to SEQ ID NO: 239490
  chr17:74379765-74379937
  hyper

SEQ ID NO: 292731 - DNA, 176 bp, Homo sapiens; identical to SEQ ID NO: 129394
  chr17:74381119-74381295
  hyper

SEQ ID NO: 292732 - DNA, 261 bp, Homo sapiens; identical to SEQ ID NO: 239492
  chr17:74381538-74381799
  hyper

SEQ ID NO: 292733 - DNA, 46 bp, Homo sapiens; identical to SEQ ID NO: 204803
  chr17:74581701-74581747
  hyper

SEQ ID NO: 292734 - DNA, 170 bp, Homo sapiens; identical to SEQ ID NO: 239494
  chr17:74620091-74620261
  hyper

SEQ ID NO: 292735 - DNA, 47 bp, Homo sapiens; identical to SEQ ID NO: 239495
  chr17:74707239-74707286
  hyper

SEQ ID NO: 292736 - DNA, 77 bp, Homo sapiens; identical to SEQ ID NO: 239496
  chr17:74722035-74722112
  hyper

SEQ ID NO: 292737 - DNA, 224 bp, Homo sapiens; identical to SEQ ID NO: 204804
  chr17:74732259-74732483
  hyper

SEQ ID NO: 292738 - DNA, 232 bp, Homo sapiens; identical to SEQ ID NO: 204805
  chr17:74732973-74733205
  hyper

SEQ ID NO: 292739 - DNA, 51 bp, Homo sapiens; identical to SEQ ID NO: 239497
  chr17:74733646-74733697
  hyper

SEQ ID NO: 292740 - DNA, 189 bp, Homo sapiens; identical to SEQ ID NO: 239498
  chr17:74734106-74734295
  hyper

SEQ ID NO: 292741 - DNA, 88 bp, Homo sapiens; identical to SEQ ID NO: 204806
  chr17:74864229-74864317
  hyper

SEQ ID NO: 292742 - DNA, 40 bp, Homo sapiens
  chr17:74864603-74864643
  hyper
gcgcgggttgccctcgtcgagagccatgggcgcggcgcgg

SEQ ID NO: 292743 - DNA, 226 bp, Homo sapiens
  chr17:74865294-74865520
  hyper
cccctggtgatgaccagtggggctgggctgggggaacggatggcgttggggttcggggtgcggatggggagggttgtgttattcggggacctgtcccgagttgggcagggttggagaggactcggggtgcagaggtaagaatgggggcagaaaacccccaggtcgtggtcctgggcccagaaagttgccccagcctgcgcgccccttcccagcccctcagggtcct

SEQ ID NO: 292744 - DNA, 92 bp, Homo sapiens
  chr17:74965155-74965247
  hyper
ccgcagccggcctcggctgtttaccaggcacccgttacgctaattgaaatgtgccaaatagctgcccggggcggggccgagcggagcagcgg

SEQ ID NO: 292745 - DNA, 113 bp, Homo sapiens; identical to SEQ ID NO: 204808
  chr17:75082778-75082891
  hyper

SEQ ID NO: 292746 - DNA, 47 bp, Homo sapiens; identical to SEQ ID NO: 204809
  chr17:75368668-75368715
  hyper

SEQ ID NO: 292747 - DNA, 114 bp, Homo sapiens; identical to SEQ ID NO: 204810
  chr17:75447727-75447841
  hyper

SEQ ID NO: 292748 - DNA, 135 bp, Homo sapiens
  chr17:75953609-75953744
  hyper
acaaaattgcattgcgaaagtactagtgtgttattatctcctcttcaagacagggacacgtagacagggaatggcctcttccaataccaacttccaagtagcactgctgatcctccactgaacgatgggggaaaa

SEQ ID NO: 292749 - DNA, 471 bp, Homo sapiens; identical to SEQ ID NO: 204812
  chr17:75953982-75954453
  hyper

SEQ ID NO: 292750 - DNA, 188 bp, Homo sapiens; identical to SEQ ID NO: 239508
  chr17:75954655-75954843
  hyper

SEQ ID NO: 292751 - DNA, 65 bp, Homo sapiens
  chr17:76123732-76123797
  hyper
ctcccagccaccagcgagtcctgccggcctctgccctggactcctcctgcgctcaccctcaggaa

SEQ ID NO: 292752 - DNA, 357 bp, Homo sapiens
  chr17:76123831-76124188
  hyper
tttcctcggacaggcaaagcccgggggcgccccgacagagcagctccttgcaggggtgccagtcacaggaccggacggcgccctccctcagtgtcctgggtgccatcttcgggcccaggccccacaccaccccctccctccagcaggagcaaagacgtgggaaaaccagcccagagctgggtccgaggcggccccacccagcctaacacgggacagctgccgaaagaggggctgaggacgccccacccagtccctagagctggaatcccttcctccagacaggcccttctaagctcagggaacccggggactcgggcacccagcgccccagcactccgccccgaggcccaggcaagt

SEQ ID NO: 292753 - DNA, 59 bp, Homo sapiens
  chr17:76254668-76254727
  hyper
gctggctggagggggccttgcgacataagccccaggtgggctgcctttcacggcgcccc

SEQ ID NO: 292754 - DNA, 61 bp, Homo sapiens
  chr17:76254854-76254915
  hyper
tgggaacccagggctggccccgctgagataaagggaggcagcagatcgcagctggagatag

SEQ ID NO: 292755 - DNA, 164 bp, Homo sapiens; identical to SEQ ID NO: 225518
  chr17:76337744-76337908
  hyper

SEQ ID NO: 292756 - DNA, 384 bp, Homo sapiens; identical to SEQ ID NO: 225519
  chr17:76338191-76338575
  hyper

SEQ ID NO: 292757 - DNA, 166 bp, Homo sapiens; identical to SEQ ID NO: 204813
  chr17:76349231-76349397
  hyper

SEQ ID NO: 292758 - DNA, 206 bp, Homo sapiens; identical to SEQ ID NO: 204814
  chr17:76355660-76355866
  hyper

SEQ ID NO: 292759 - DNA, 125 bp, Homo sapiens; identical to SEQ ID NO: 239513
  chr17:76356800-76356925
  hyper

SEQ ID NO: 292760 - DNA, 57 bp, Homo sapiens; identical to SEQ ID NO: 239514
  chr17:76374528-76374585
  hyper

SEQ ID NO: 292761 - DNA, 381 bp, Homo sapiens; identical to SEQ ID NO: 239515
  chr17:76588313-76588694
  hyper

SEQ ID NO: 292762 - DNA, 274 bp, Homo sapiens; identical to SEQ ID NO: 204816
  chr17:76921081-76921355
  hyper

SEQ ID NO: 292763 - DNA, 130 bp, Homo sapiens; identical to SEQ ID NO: 54663
  chr17:76921422-76921552
  hyper

SEQ ID NO: 292764 - DNA, 104 bp, Homo sapiens; identical to SEQ ID NO: 54664
  chr17:76921859-76921963
  hyper

SEQ ID NO: 292765 - DNA, 120 bp, Homo sapiens; identical to SEQ ID NO: 239518
  chr17:76967524-76967644
  hyper

SEQ ID NO: 292766 - DNA, 45 bp, Homo sapiens; identical to SEQ ID NO: 204819
  chr17:77020152-77020197
  hyper

SEQ ID NO: 292767 - DNA, 83 bp, Homo sapiens
  chr17:77020426-77020509
  hyper
tcttctgcactgccgtcctccggaagaccttttcccctgctctgtttccttcaccgagtctgtgcatcgccccggacctggcc

SEQ ID NO: 292768 - DNA, 80 bp, Homo sapiens; identical to SEQ ID NO: 225522
  chr17:77070949-77071029
  hyper

SEQ ID NO: 292769 - DNA, 263 bp, Homo sapiens; identical to SEQ ID NO: 204820
  chr17:77071240-77071503
  hyper

SEQ ID NO: 292770 - DNA, 99 bp, Homo sapiens; identical to SEQ ID NO: 239522
  chr17:77189188-77189287
  hyper

SEQ ID NO: 292771 - DNA, 241 bp, Homo sapiens
  chr17:77216473-77216714
  hyper
caggtcctctctccctctccctgtgtctctgcctctcgctttatttccccaggttgctcagctccgtgcctgctctccgctcgcccatcgatggggtcctgcccggcactgccctgtcgcagtcactcctgctgcctggatctctgttcagagttgaactacagcgtcctgattccagcgctcatcaagcaggggacccaggggagggtgtgtgtgtgtgtgtgtcggggggacacaaaac

SEQ ID NO: 292772 - DNA, 124 bp, Homo sapiens
  chr17:77290658-77290782
  hyper
agcgtgagccaccacgccccgctagatacctttgcttcttggagaaacaggaaagatgcggaatgggggaaggcaggagttcagcaccacggacagcgacctgcgggtgggagacgctgccagc

SEQ ID NO: 292773 - DNA, 190 bp, Homo sapiens; identical to SEQ ID NO: 204821
  chr17:77766025-77766215
  hyper

SEQ ID NO: 292774 - DNA, 188 bp, Homo sapiens; identical to SEQ ID NO: 239526
  chr17:77770287-77770475
  hyper

SEQ ID NO: 292775 - DNA, 174 bp, Homo sapiens; identical to SEQ ID NO: 204822
  chr17:77771456-77771630
  hyper

SEQ ID NO: 292776 - DNA, 367 bp, Homo sapiens
  chr17:77772891-77773258
  hyper
atacagctgtttctgtttaagcttaaatactttccaacagtttgggcagtaaaaataaagtcggcctcagccgcctgtaagtgtctggtttccccgcccagagaaagcccaccctccgccctgggcccgggtccctctgcctgtcccgcccgcctcctcttggaatccgctgcccgccaaggacaacagcgccccagccccgcaccggccgcctcagcccctcgagctggctccagggccactgtggaagtgggagggagggggccttcccagagtgggccggggggacctgacccgcctggcctcgcgccctacccccacccctggcaagctctcccgcacccgcgaagagcggtgattttccttc

SEQ ID NO: 292777 - DNA, 350 bp, Homo sapiens
  chr17:77773692-77774042
  hyper
tgcaaacgtcggggaatcctgcaaagcttgtggcaaaggtggaactcgattcagaaggaaggaagaggtatagaatgatctgagggcagggagcctggctcttgtcagtagcagacgcgctcagtcccgccaaggaaggcaatccccaacggggcagagtgtgtctcatccctgcctggcgcaacccctgccccccaacccgtgagagagcagcgttgcagggggtgtgaaaacaggtcaccgggcaacctcattcctcgacagtttggagacaaagcgggaggtggcggtctgagaaatgggagcccacctcccgggctctggctgggtgggcgcgggaggaagccctg

SEQ ID NO: 292778 - DNA, 386 bp, Homo sapiens; identical to SEQ ID NO: 225527
  chr17:77774854-77775240
  hyper

SEQ ID NO: 292779 - DNA, 403 bp, Homo sapiens
  chr17:77778031-77778434
  hyper
ggggctcggctggcgtcgaggctccgcggccagagcgcggcggctccgcgcacgcccagaagccgtgttgccggttccggggctgccggaaagcgtggggccaagctgctgctctgtgcccgcgcaagcgcctcgctacccgggcgggaccttgctctctccggccgccctgggccgaggggtggctcagcatcgtgggggcggacgcagacggccactcggccgggacaccgtcggcccgggagccgtgatgccttttctctctgcagctgaagcctccgatcggtttccccgcccttctgtaggaaatcaaattcagggaacatggtaccgtatttacccgcacaacttcctcccttgacattttgcactctcgaagttggggcagaagtaattatgcaaa

SEQ ID NO: 292780 - DNA, 184 bp, Homo sapiens; identical to SEQ ID NO: 204824
  chr17:77786283-77786467
  hyper

SEQ ID NO: 292781 - DNA, 62 bp, Homo sapiens; identical to SEQ ID NO: 204825
  chr17:77786805-77786867
  hyper

SEQ ID NO: 292782 - DNA, 61 bp, Homo sapiens
  chr17:77788285-77788346
  hyper
aaggtcctgtccacaacaaccgatcgtatttcctggggacagctcgacccccaggggagca

SEQ ID NO: 292783 - DNA, 233 bp, Homo sapiens; identical to SEQ ID NO: 204826
  chr17:77788400-77788633
  hyper

SEQ ID NO: 292784 - DNA, 382 bp, Homo sapiens
  chr17:77813600-77813982
  hyper
ctccccctcgcggcacgttctcagtgttcacggccccgggacccctgctgggggccacggaagcatccgccgccgctcccagttgcaccgaattgcgtcaccagcgccccgggacgcgcgggccccgccggcagggggcggaatggggcaggggcagctcgcgccccactgcgggccccgcctcgcctccaggctccgggcattttggagcgcgaggagggaaagggacagggcggagagaaggccgaggactgggtgccaaggagagattgaagaacgcacgaggaaggggaccgaggagcagccaatcccggggccctggcgcccaagaacctcggcagaaagggctccaaatccgatcccaccccgatcctcaatggct

SEQ ID NO: 292785 - DNA, 257 bp, Homo sapiens; identical to SEQ ID NO: 204828
  chr17:77814493-77814750
  hyper

SEQ ID NO: 292786 - DNA, 221 bp, Homo sapiens; identical to SEQ ID NO: 204829
  chr17:77814929-77815150
  hyper

SEQ ID NO: 292787 - DNA, 50 bp, Homo sapiens; identical to SEQ ID NO: 204830
  chr17:77815935-77815985
  hyper

SEQ ID NO: 292788 - DNA, 187 bp, Homo sapiens; identical to SEQ ID NO: 54699
  chr17:77816033-77816220
  hyper

SEQ ID NO: 292789 - DNA, 417 bp, Homo sapiens; identical to SEQ ID NO: 239536
  chr17:77816435-77816852
  hyper

SEQ ID NO: 292790 - DNA, 402 bp, Homo sapiens; identical to SEQ ID NO: 239537
  chr17:77817073-77817475
  hyper

SEQ ID NO: 292791 - DNA, 100 bp, Homo sapiens; identical to SEQ ID NO: 204832
  chr17:78009418-78009518
  hyper

SEQ ID NO: 292792 - DNA, 579 bp, Homo sapiens; identical to SEQ ID NO: 204833
  chr17:78009924-78010503
  hyper

SEQ ID NO: 292793 - DNA, 53 bp, Homo sapiens; identical to SEQ ID NO: 204834
  chr17:78010812-78010865
  hyper

SEQ ID NO: 292794 - DNA, 52 bp, Homo sapiens
  chr17:78011046-78011098
  hyper
ggcctgggtggaagcactgagcgcgcacagggagggcggctgagtgaagatc

SEQ ID NO: 292795 - DNA, 89 bp, Homo sapiens; identical to SEQ ID NO: 239540
  chr17:78194131-78194220
  hyper

SEQ ID NO: 292796 - DNA, 178 bp, Homo sapiens; identical to SEQ ID NO: 204835
  chr17:78388504-78388682
  hyper

SEQ ID NO: 292797 - DNA, 90 bp, Homo sapiens; identical to SEQ ID NO: 225538
  chr17:78389461-78389551
  hyper

SEQ ID NO: 292798 - DNA, 496 bp, Homo sapiens
  chr17:78428377-78428873
  hyper
tactgcctccagagccgcttcggggccgaccccggggactcttcccgcctgcggcctcgcgccagcccggccggctcgcctagtgcccggcgcccagaaacgcgtggagctgggagaggccacacaacccacgccggaagcctaaccccgtcggcccccgcggccggcaccggccggaagcccgcgaagcctaactctcgcgagacgcctcctgagtcccgcctctccgcggttccgccagtcgccgcgctcctgtctgcgttgctgtggcagccccgccgtgcgtccgcgttcccggagccagcgcggcggcgcgcctgtgctcggggcttggccgtagcttttcctcaggtcccgcgcggcgcgcccctgtgtcgcaggcgccctgccgctgcccgcagcttttggggggttcgggggcgggggaagcagggccgcagaaggcccaatcggagccttctgacacccgccccggcccgccgccctcccggagctt

SEQ ID NO: 292799 - DNA, 343 bp, Homo sapiens
  chr17:78450959-78451302
  hyper
cgtgtgctattgagaagccgccgggcagcctgggtacagggacttcccacgggtcggggcccccggcgcctcccctcccccagctcccgggctctgtggacccggccccgtccccgggggactgtcagtccccaccccgtgcgggcggggcgctggggacttctcggaggcagacctagctgatcgagcctttcctgtccgcggcgccggcccgatcgcgggcaggcggcgtcgccggggctggacgttcgcagcggcgcttcggaagggggccccgcgggagcagccgcccgcgtctccagcagcttccccttgccaggcgccgcgcgcgcccggtatcccc

SEQ ID NO: 292800 - DNA, 188 bp, Homo sapiens; identical to SEQ ID NO: 225542
  chr17:78720009-78720197
  hyper

SEQ ID NO: 292801 - DNA, 47 bp, Homo sapiens; identical to SEQ ID NO: 239547
  chr17:78954936-78954983
  hyper

SEQ ID NO: 292802 - DNA, 300 bp, Homo sapiens
  chr17:78977824-78978124
  hyper
agcggcgctgccccaggccctgcgggagggaccgtgggacccgagacatccccgcctggcctccgctccccacccgggagtggggctcgcacccccccaacctcgggtaaagacgcttctggaaggaagggcgccccgcggaccccgcccaaccctgcccagcccagcccagcccagcccagcccttcccggggcggcggcgcgggaagcaggcggcggcgcacgggcgtcgtcatggcaaccccaccggctccgggggccgggaccgctgccccctccgcccctcgacccccgcccccc

SEQ ID NO: 292803 - DNA, 1047 bp, Homo sapiens
  chr17:79007514-79008561
  hyper
agccagcacaactgcgtctcccccaggggcctgactcgttgaaggaatgaatgaatgaatgattttgcagggatgggaggctgggagactgagaggtttcattaaacggaaacgctcagatctggtgtttcacaacgtaaaacaaataattcctctatgttagcctaatttatgtaaatatttctccacgggaattgtaccgggagacctgtgtgccaactcggccagcttccccggcagaatctccccttgggaggacccttaagcaggacccttcctaaaaattggaggcagctctgactcctccattcctcctacaaggttcccccaccccctagggctttccaccgcatgagagtcctccgggcccctcgtttcctactgccctcgacccttccttcccgagacctctctctctcagtaaactgcctccaacgagaatcttctgacggcaggagggtcctccccgtccctaagggtcgccctgtccccaggccttccagcaggacactcccctgtcccctctccagatcctccttcccagggccctcctccaagatcctcttccccaaccctcctctcccagggtcctcccctctccagaatcccggccccaagcccccaagcgctgtctgcctgtctggggtcctccccagagttcaccttctgcaggatcctccctccaagtcctctcctcacgatgctcccccgaaatcctccttctccaagtcgtcccccactccagggccgagctctctccagggtcctcctgcagcaccccctcccccagggttctcctctctgccccgaggggccggccggggggtcgccgcccgcccggcgggcttacctgcgaagcggcggggtcggggcctctcccacctgtaagcccggcccgcggcgtcctgcgtccgagccgctccccgccccgcagcgccaggccgcgacccggcgggccgcccgccccgaagtgccacttcgcgaagtgccgcctccacgcgcgctgccgccggcgccccccgctctcctccccgcaccttctgctcc

SEQ ID NO: 292804 - DNA, 754 bp, Homo sapiens; identical to SEQ ID NO: 204838
  chr17:79008841-79009595
  hyper

SEQ ID NO: 292805 - DNA, 57 bp, Homo sapiens
  chr17:79009691-79009748
  hyper
ctaaggtgggaggtcggagcgcgggcaggctggatgggtggacggataatctatcat

SEQ ID NO: 292806 - DNA, 33 bp, Homo sapiens
  chr17:79205174-79205207
  hyper
tcccgcccgcgtgtgcagctcaccagctgcgtg

SEQ ID NO: 292807 - DNA, 45 bp, Homo sapiens; identical to SEQ ID NO: 204839
  chr17:79317325-79317370
  hyper

SEQ ID NO: 292808 - DNA, 75 bp, Homo sapiens; identical to SEQ ID NO: 204840
  chr17:79317464-79317539
  hyper

SEQ ID NO: 292809 - DNA, 283 bp, Homo sapiens; identical to SEQ ID NO: 204841
  chr17:79317890-79318173
  hyper

SEQ ID NO: 292810 - DNA, 40 bp, Homo sapiens; identical to SEQ ID NO: 204842
  chr17:79318209-79318249
  hyper

SEQ ID NO: 292811 - DNA, 180 bp, Homo sapiens; identical to SEQ ID NO: 204843
  chr17:79319124-79319304
  hyper

SEQ ID NO: 292812 - DNA, 71 bp, Homo sapiens; identical to SEQ ID NO: 129557
  chr17:79650872-79650943
  hyper

SEQ ID NO: 292813 - DNA, 82 bp, Homo sapiens
  chr17:79762672-79762754
  hyper
caagcgggtcactgccctgcccggctccggcccccccggcgccccaccacccggccgactcggccaccgggcttatgctccg

SEQ ID NO: 292814 - DNA, 111 bp, Homo sapiens; identical to SEQ ID NO: 239558
  chr17:79791491-79791602
  hyper

SEQ ID NO: 292815 - DNA, 42 bp, Homo sapiens; identical to SEQ ID NO: 239559
  chr17:79849415-79849457
  hyper

SEQ ID NO: 292816 - DNA, 47 bp, Homo sapiens; identical to SEQ ID NO: 239560
  chr17:79884793-79884840
  hyper

SEQ ID NO: 292817 - DNA, 80 bp, Homo sapiens; identical to SEQ ID NO: 239561
  chr17:79885579-79885659
  hyper

SEQ ID NO: 292818 - DNA, 187 bp, Homo sapiens; identical to SEQ ID NO: 204844
  chr17:79885890-79886077
  hyper

SEQ ID NO: 292819 - DNA, 80 bp, Homo sapiens
  chr17:79917289-79917369
  hyper
gcgcggcttcctcccgggcctcacgtcgagacgccttccccagggcccgccgctgacctgtgcgagtgcgcggccagtcc

SEQ ID NO: 292820 - DNA, 45 bp, Homo sapiens
  chr17:79917435-79917480
  hyper
cagccgcctgcggacacgaccgccgctcaggcccgcgcgcacaga

SEQ ID NO: 292821 - DNA, 293 bp, Homo sapiens
  chr17:79918208-79918501
  hyper
ggacgccagcagagcggctgggcccagaggccgaggggtcagtgcccgagctggccggggaccagcccttccagcgccgctccgctccccacgcggagagtcaccgaaccgggcactcctcggggccaggaccgcggggcgcccgacggaagccctttctccccggggagagaacggccgcggcccgcagggaaggtccagccggagaccgggcgcgtcgggcggggcggggaggtgcagggcgcgggccttacccggcggggctgccgtcgttgcaggtcaccgaggtgttg

SEQ ID NO: 292822 - DNA, 362 bp, Homo sapiens
  chr17:79918641-79919003
  hyper
gggctgtccggccgccggcgccgcctcggtccgcgggggaggaggcggctgctgaccccggcgccgccaggtcttcctgccctcgctgcccccggcgcagtgcagcaggctcagcagcagcagcacgcgcacccctcggcccatggccgcgtccacctgcggggagcgggcggccttgaggcggcggcggcggcggcgggggatgccgggccgggggtgccgggccgggggtgtcgggggcactggccgctcctgctccctcgcccccgctcccgcccgccgggcctggcggagaaggcgcgcgcggctcggcgtcgaggcgctcggggccgggtgccgtcggcctccgcagctggggctcc

SEQ ID NO: 292823 - DNA, 36 bp, Homo sapiens; identical to SEQ ID NO: 239564
  chr17:79981250-79981286
  hyper

SEQ ID NO: 292824 - DNA, 125 bp, Homo sapiens; identical to SEQ ID NO: 204845
  chr17:79988350-79988475
  hyper

SEQ ID NO: 292825 - DNA, 521 bp, Homo sapiens; identical to SEQ ID NO: 204846
  chr17:79989097-79989618
  hyper

SEQ ID NO: 292826 - DNA, 40 bp, Homo sapiens; identical to SEQ ID NO: 204847
  chr17:79989900-79989940
  hyper

SEQ ID NO: 292827 - DNA, 180 bp, Homo sapiens; identical to SEQ ID NO: 225553
  chr17:80009037-80009217
  hyper

SEQ ID NO: 292828 - DNA, 225 bp, Homo sapiens
  chr17:80186330-80186555
  hyper
ggcagcgcaggccgcgggccgctcccctagccaggaagagccgccgtccgcaccgggaccggagaggaagcggaggtctgaagggggacaggtcggacgtggcctcagagagggaggatgtgggccccggagctgagccaggcggccggaaccccacgggacccgcgcgcacctccccaccaaaggggccccggcgttggggggcgaggggtcgctgccctggag

SEQ ID NO: 292829 - DNA, 818 bp, Homo sapiens
  chr17:80186618-80187436
  hyper
gcgaagcgagcctggactccgggggaggcgaggccgggaagacccagtcccgaggagcagagggggcgggccagctccgggccgggggcgccgacggggccggttccggttgggggggtccctgggcccggcggggttgcgggacgcgccgtcggggagctgcggcccgggagcccgtccggaggcggcgcggggtccgggcggggcgcgcaggggcggcgccaggcggtgacgtgcgcgggggacgtgccgcgccagcgacccgagcacttaaagtcgcccccggcgcggagcggaccggcagaggcgggcagaggcggcgagaggcggcgagaggcgggctgaggcggcccagcggcggcaggtaggcgcggccgcgatgctcgcgcgcgggccggggcccaggagctcccccgtgccgggcaagggggcgacctcggggtccgcgctctcacccccaccccgcccactttgtccatcaggtccgggggcgcccggggcatggactagccttctcgaccccgagcgggccccaccgagggctcccgagagccagccgcgcccctccgcgccctcgcatacctggctgcccagtctcgtctcccccggtccggcccggcgcccacccgtcgggctgccctcaggggctgggctcgggccaggagatggctgcgccggcggccaagcccggtccgggtataaatagctcggtccgcggtggcggggggcgcgggctatatttggtggggctgctgcagccctccctgtatgggtggcctccccgagggagtggggagcacttgcgctcgggccgtggc

SEQ ID NO: 292830 - DNA, 759 bp, Homo sapiens
  chr17:80189391-80190150
  hyper
ggtccaggaggcctcggaggtgggggacggcggctctggaccagctccggcccccaccacctcccggccccagggcggtgacagccttgcggagaaggggtcttcaaagctctgagaccccgcagtgccagctcaggattgaagcctgcggcggcacatgcagccttcctttcccaaaggggacttgcgcccagccccacttggggcaccagtgggggctcctggccctggccctgggtgggagtggccaatccgcaaatgaggcctgtgtgtctgccccgccggcccctgccgtcgtgatgtaagcggacacagagcggcagggcacgggctgcgcgaggggtctgcgggggtcagaggtggggcgcagggcccaggcctggggcagccccttgcgcagcgtccaccccctgcaagctcggccccgacacctttgcaggcgcctggggcggggctgccgggagttgctcactgctccttccttgtttgcacaacaggggctgcgggggaagaagggaactgagggaggcccctcccccggtgcagcgccctcccgccctcggcacccctcggcagccaggcgctggccacagaggccgcttccttggtcctcaggcagctcatgggatccaggaaggaaacgaattacccttttcctgccccgcctcctgcctgggccacaaaggcagggccaaagcccatccttcaagggctggagtcagttaggtaacaggccacgggccccgggctcaggccact

SEQ ID NO: 292831 - DNA, 67 bp, Homo sapiens
  chr17:80277698-80277765
  hyper
gcgtgtgtgcagagacgggtgcgcgactccatgcgtgtgtgcagaaacgggtgcatgtggacacgtg

SEQ ID NO: 292832 - DNA, 174 bp, Homo sapiens; identical to SEQ ID NO: 239567
  chr17:80291220-80291394
  hyper

SEQ ID NO: 292833 - DNA, 62 bp, Homo sapiens
  chr17:80291597-80291659
  hyper
cctctgggatgcagcttctccgcgccccggagccccaggaaaatgaaagacacgagagggag

SEQ ID NO: 292834 - DNA, 246 bp, Homo sapiens
  chr17:80291702-80291948
  hyper
agatgaggaaggagctgggtttacgggaagcctccaagtttcgggaaccacccgcgttcacaacaagcgtgacggtgaatttattattttcacgggaggcaccgcacccgcggttcacgctaaaggaagcaggaaagccgccgggagcatttttccaggagagttcgtgcctgggcgggtccagctcgcgtgcggcgcgcgttccccgcggggctgtttggctccgctcctggaggcctcgagtct

SEQ ID NO: 292835 - DNA, 410 bp, Homo sapiens
  chr17:80332292-80332702
  hyper
cctcaacagctcctgggccagcccgaccgagcccagctccctggaggacctggtggccacgggcaccattgggactctgctgtcggccatgggcgtggtgggcgtggtgggcaacgcctacacgctggtggtcacctgccgctccctgcgtgcggtggcctccatgtacgtctacgtggtcaacctggcgctggccgacctgctgtacctgctcagcatccccttcatcgtggccacctacgtcaccaaggagtggcacttcggggacgtgggctgccgcgtgctcttcggcctggacttcctgaccatgcacgccagcatcttcacgctgaccgtcatgagcagcgagcgctacgctgcggtgctgcggccgctggacaccgtgcagcgccccaagggctaccgcaagc

SEQ ID NO: 292836 - DNA, 387 bp, Homo sapiens; identical to SEQ ID NO: 239570
  chr17:80452515-80452902
  hyper

SEQ ID NO: 292837 - DNA, 216 bp, Homo sapiens; identical to SEQ ID NO: 204848
  chr17:80503130-80503346
  hyper

SEQ ID NO: 292838 - DNA, 1320 bp, Homo sapiens
  chr17:80655727-80657047
  hyper
cttccgcacgcgagtcacctgtgctccttcctctcccccggacacgcgggacccctggcctcgggaccggaccctggtctcccctcccctccgacccacgcgcagacccagcacctgggcgcctgctcgccgcgctccgccccaggagccccggagctcgcgtcccctcccgcccctcctgccccgcggccgaacgcgcacttgcggactcgagcccccgccccgggtccccacagcagcggccccaggtcgggaggagcccagcgcccggcccagccgcgggctcccgctgcgcgcagactgcggagaaggatggagactgcgccgcggggcctcgagtggaactgggggtgcaacagggacgccgcagcacgagggccagggccgggcggagaaaggcccgcccgcgaaccgcgctcctcctcagccccgcgcccccggaccgggactcctaccctccccggccacgcgccccggcctcttcccgacccctgcccggtctcgcgtccccggacccggacccccacccgcaccccctccccagccccgcgcccctccccggccccgcgcccgcaccccggcacgccctccgcccgcgctcacccgccgggtggccgtacggggactcggccgcgccatcctgcaggctcgccaggatctcgcccttgcccacgtcgctgtcgcccaccagcaggaacttgagcagaaagtcgtaggcccggaccgggctgcccagggcgctcatcgtgacggcccggcgcccccacccatgcccggcctgcggggctgagcgcagaggcggcggcccggccccgagaggcgccgcgcgggccccgagtccttgctcgcctccggccccgccccgccgcccagcgctgacagcgcgcatccccgcccggccccgccattggtggaccgcagttgctagggcagctgcgcgctttcactggcttggttgtccgtccatcttactctcgtcaccgcctccgggctgtcgcccacccgcccctcctgaaaggtcgctgtcaccacagccaatggaggcccggagacggggcaggggcggagccagaacaagcaggaggcggggactctgctcccgcagccaatggcggggcggggtgggggcgatcagggggtggggccgggtgtttacactctcgcgtgcgcccgtgagcgccacgaactcgctcccacggtcgtcgggtctgcacgccccgagtcgggaggggcgaggggcggtgcagggtcccagcgtggggcctccccacctgcccaccagggagacctcgggtgcctggccgggtggggctcggggtc

SEQ ID NO: 292839 - DNA, 100 bp, Homo sapiens; identical to SEQ ID NO: 204851
  chr17:80657094-80657194
  hyper

SEQ ID NO: 292840 - DNA, 335 bp, Homo sapiens
  chr17:80692982-80693317
  hyper
tatgcatgcatgggcgcgcgtgggcattcctgtgtctcaagtccctttcccaggacatcctggaatcagcagccccaccctgggccgggtcagcgcgtgccatcggagcccccacgtcagcctctctctccgatcggcacctggcgtcccagtgcgcaagccccacgtcatcacgggggccgctgggcccggcctggtctgcagtgtgggaagccggccaggcctgtgaccagcgcccgggccgagggccggacctgcgtccgctgcggggcagggataccgggtccctgcagggagctcaagccccagcgcgcccgcgaagagctgcgcggact

SEQ ID NO: 292841 - DNA, 299 bp, Homo sapiens
  chr17:80693554-80693853
  hyper
cgggccttcggcggccccggcgccggctgcatcagcgagggccgagcctacgacacggacgcaggcccagtgttcgtcaaagtcaaccgcaggacgcaggtgctggcccgtgcgcaggcgggggctctgcgggtctctgcggggcctgggaaggcggaggggtcgggggcaggcgcatttcctggggctgggcctggggaggggtcagctttggcccttgggaggtggcacctgctgggtgagcccggctcaagcgttctgtgaaggtttgtgtctgcacgatccgtgaccttcctttg

SEQ ID NO: 292842 - DNA, 114 bp, Homo sapiens; identical to SEQ ID NO: 239575
  chr17:80876633-80876747
  hyper

SEQ ID NO: 292843 - DNA, 36 bp, Homo sapiens; identical to SEQ ID NO: 225566
  chr17:81009162-81009198
  hyper

SEQ ID NO: 292844 - DNA, 142 bp, Homo sapiens; identical to SEQ ID NO: 239576
  chr17:81009744-81009886
  hyper

SEQ ID NO: 292845 - DNA, 456 bp, Homo sapiens
  chr17:81036702-81037158
  hyper
ttgtcaaagctggggcgggggttgctactgatacccagagtgcgggggccagggtgctgccaacatcccaccatgcgcaggacgtccccaccccaagaaccacccggccccgcgtatccggagcgaggagtgggcagcgctcggcagaggccccggcgcggcggctgcacgtcctccgggaggagggagggaagccgggctcaccgccgggcctcccccccggtcaggagggagccgggaactcccgaggcaccaactctgcggaacgcggggcgcccggatcgcccctgatcaccgcccgctggcgaggcgcgggggacccagaaccggcggggccgggagcctcctttaccgctccgcgccggggctgcccgcaggatggggcgcaggatggggcgcaggatgcggccccggcaccgcctcgcgggggtctgcggggggcgaccgcggctcgcg

SEQ ID NO: 292846 - DNA, 602 bp, Homo sapiens
  chr17:81038242-81038844
  hyper
cagagcgggaagggacggccgcgggagggagcggcggtttcggggatcgggcgcggaccgcagcgggggccacttccgtctcggggagccgcgggcgggcacctgtgagccgggccgagtgtggctccggccgggccccccgcccctgccccgtgaaggtcaggccgcccttggccgcggcgcgcgctgcgctgggcgaccccccccccccccacccgcggtggcggccgaggactttttttttttttttttttttttgactcaagcgtggccgccgagagcggcgccgaccgcgactgcccctcgggagccgccgccgctcccacgcgaagcccagggcgccgagggcaccgcggccgaacccgccctgcgcgagcctcgcagtcgccagttccggggttcgcagatgcgcggggacccgagtgacgcgcgcctcccggagagccgtggccgggctggcccgggcctgggtcccgcttcccctcggcgcggcccccgcccccgcccccgcccccgccgcgggccgagtcacgcggtgatgtcgagcgaagctgttttccgagaaggtcggggcagagccggtgcggggcgggtggtgtccg

SEQ ID NO: 292847 - DNA, 522 bp, Homo sapiens; identical to SEQ ID NO: 129625
  chr17:81038865-81039387
  hyper

SEQ ID NO: 292848 - DNA, 82 bp, Homo sapiens; identical to SEQ ID NO: 239579
  chr18:268117-268199
  hyper

SEQ ID NO: 292849 - DNA, 53 bp, Homo sapiens
  chr18:499314-499367
  hyper
ccgaggtctcccgacgtggacacctaacgcccttggaaagggagtgaattggt

SEQ ID NO: 292850 - DNA, 46 bp, Homo sapiens
  chr18:499482-499528
  hyper
gcaaccctagaagtcaaagcgattgcatcgccaggtctgtggcggc

SEQ ID NO: 292851 - DNA, 484 bp, Homo sapiens
  chr18:499558-500042
  hyper
tttcgcacccacgcagggctgtgttatcctagcacagaaccagcaactctcacacgaagccttgtgtaaacaccacgcgggcccattcctgaacgactctttgatgcctccgctgcggttacttatctcatacataaatcaggattccgctgacaaatctccgtgtttccactaaacagaaggctgccctgcagtccttctcgtgcttctttctaaagtacgataacatctgacacttccataaaccggcctgcagaggacaccgcgcagggggcgactaaccagctgaggtgtgtcaccccaaaacaccagtgggcacaccccaaggcgggcacgtggaagggacgcggaaccgagggcaactattttccagtcggtgaatctgatggagaaagatgccaaatgcacttcccgagccagctgaactcctcgggcacctaatcattgccagatgtggcgagggcgcacggagaacatccccagt

SEQ ID NO: 292852 - DNA, 141 bp, Homo sapiens; identical to SEQ ID NO: 239581
  chr18:657235-657376
  hyper

SEQ ID NO: 292853 - DNA, 31 bp, Homo sapiens; identical to SEQ ID NO: 239582
  chr18:658431-658462
  hyper

SEQ ID NO: 292854 - DNA, 422 bp, Homo sapiens
  chr18:712016-712438
  hyper
tacagaggaagccagcgagcgctgtgctctagggtttccactggcgggaacccaacaaaatcattttgctgctattgcctattatgcattctaccatttccagcaaaatgtgagtcgtaaaagtaaaaccaggatattctaaactccagcaaagaaaaaacccaggagagtggaaagtttctggatacttatacaattgctccaaggcatgaaaagcgagtgtctcccccaggcgcgcctcccactttacagaagcaatgggttcgaagtcgggaagctgcccggggcccgcagagctgcagtcggcggggcgggagggacccgggccgcaagccgcgcgtaccatggcgtccgcgcttaccatggcgtccgcgcttaccatggcgtccgcgcttaccatggcgtccgcgcttaccatggcg

SEQ ID NO: 292855 - DNA, 1313 bp, Homo sapiens; identical to SEQ ID NO: 204857
  chr18:811503-812816
  hyper

SEQ ID NO: 292856 - DNA, 205 bp, Homo sapiens; identical to SEQ ID NO: 204858
  chr18:812869-813074
  hyper

SEQ ID NO: 292857 - DNA, 382 bp, Homo sapiens
  chr18:906932-907314
  hyper
aaacaccctggtttcaccctcagctattttcaagttcccgtgtgcctggcactttctccgtgcgagaagcaccggagggtgcggacgcgccacagtctgagccgccgccgaactggctaagtttaggggcatttattattcatgttcctgccagatcctcgcctgcccaaaatagaaaccgaggttctccgtgacctacatctgctcggagaagggctcccctgggctcggaggctggggtgggggtggctgaggagttggcccccgcacgccccacgcatcctctcctttgctttctgggcctccccattcgggtcttcgcgtgggtcagcgcccggtctcccagggcctttctcgtccccgcccgttgctgctttgggga

SEQ ID NO: 292858 - DNA, 285 bp, Homo sapiens
  chr18:2571378-2571663
  hyper
cctaactttaggggtcgtgccagtcttcgtagagacggccacactggcccacagaccccagttcctggggtgacgcagctgggcgcgaccagcacgcagccttccagcgacgaggcggtcgcatggaagttactgcgcgcgtcgtgcgtaatgacgtcagcgccggcggagaatttcaaattcgaacggctttggcgggccgaggaaggacctggtgttttgatgaccgctgtcctgtctagcagatacttgcacggtttacagaaattcggtccctgggtcgtg

SEQ ID NO: 292859 - DNA, 259 bp, Homo sapiens
  chr18:2848166-2848425
  hyper
gcgggggcgtaggagaggatgaacaaagctcccactcccacttctgttttctccctttcaatgtttgtttgtaacataaggcagctgaatctaattggatccatattgtgtgttctggggcacacagaagattccaaaatgtatactgctaaagactattccgtataggattcgctgagaggtttggctaagtagtgttctaaaacgagtgagttctgtccgtatgtccccataaaacggaatcttccagttttgtaga

SEQ ID NO: 292860 - DNA, 366 bp, Homo sapiens; identical to SEQ ID NO: 204860
  chr18:2906430-2906796
  hyper

SEQ ID NO: 292861 - DNA, 136 bp, Homo sapiens; identical to SEQ ID NO: 204861
  chr18:2907034-2907170
  hyper

SEQ ID NO: 292862 - DNA, 164 bp, Homo sapiens; identical to SEQ ID NO: 204862
  chr18:3012399-3012563
  hyper

SEQ ID NO: 292863 - DNA, 419 bp, Homo sapiens; identical to SEQ ID NO: 239592
  chr18:3246159-3246578
  hyper

SEQ ID NO: 292864 - DNA, 817 bp, Homo sapiens; identical to SEQ ID NO: 239593
  chr18:3246852-3247669
  hyper

SEQ ID NO: 292865 - DNA, 44 bp, Homo sapiens; identical to SEQ ID NO: 239594
  chr18:3248119-3248163
  hyper

SEQ ID NO: 292866 - DNA, 32 bp, Homo sapiens; identical to SEQ ID NO: 239595
  chr18:3261695-3261727
  hyper

SEQ ID NO: 292867 - DNA, 59 bp, Homo sapiens; identical to SEQ ID NO: 204864
  chr18:3262505-3262564
  hyper

SEQ ID NO: 292868 - DNA, 631 bp, Homo sapiens; identical to SEQ ID NO: 204865
  chr18:3447898-3448529
  hyper

SEQ ID NO: 292869 - DNA, 35 bp, Homo sapiens; identical to SEQ ID NO: 225577
  chr18:3448760-3448795
  hyper

SEQ ID NO: 292870 - DNA, 3099 bp, Homo sapiens
  chr18:3449165-3452264
  hyper
ataagccaacaggaacgggtgtttacttaatggctagtttctgtttgaaatgggaggagggatcccctagcagggttccaatccgaagagtagacactgttgaccgaaacagacgagcaggcacggcgtggtcaccccttagctataaaagtggccgctgccggggttcggcgactcggggtgtcaggcggagtcttggtgaggcaggcgcgcgcccggccgtccccgggcagagacgtttaaagagcatgtgagcgtgacaagtgtctgtccgcaacgtgtcagatttcgaaactgccttgcaatccagtccggaactcgcagctttagcccgggggaacagacgttcgtttaggctgtgtctcatcattcccccccgccccacccccgccgacctcccactgtcgctgctggaggaagagccccgggaggagaagggtgcgccgcgccgcgcccgcgtgtcaatggcagccgcgcattctggaagaagttggttcttgtctcgaatacttttcctcccgtgccccgccccttgaatcagaggcggctgtctcgtgcggctagagcagggccagtagagttcggggcagctgtcaaaaacgagacggggaggcttttcttcccgggggtggaggagggaaggagggaggtgtccttttttccatctgttgcagtttccgaaccaaacgcaccctcgccagccccgggaagaaaggcccaagggagaaacctggggcgctcggctggtgcccccaccgccgggcgagggatgcgggcggtccgtgcgcggcaggcggaaaggatcgtgtttctggacccggccaccccccgcgtccgcaccgccgcccccgagggacgagtgacagcggccgccgcgctcggtccagtcttcccggctggaaggtgcgggggaggggcggaggagcggcggggcgggagggggacggggcgggcggctgggggcggaggcaggacctcctgtaccttccctcctcgcctctctcactctgacagcgccgaggtgcgccgagcaggagcagggaacaaaggagcggagaggggaggggagagagttgggcgagggagagcccccggccggctgccagaagatcccggcgggaggaagcccaagtgtcacttgaattccacccaaggagcgggcgcctgggatcagagcgtcctgtttagcaataacggctggagcacgtcctacaagttacgggagagtcggctgtgaaggagacgttcgcttatcccctgtgtccccgctcctggcccctccagacccccgccttgcctcgcgctgggaggggagatccagaatgaaaggcaagaaaggtaaggcggccgcgggctgcgcgcaccagaagacgcgagtccggggaaacgtgctggccgggccgcgccgcgcggagtcacttggtggacttttccgcccaggggctctcatgctggagtggcggccgtgctctttgttgaggctgcgtctgaaacggcagcggctgttttcctgctagacacaacacgaggggctgttgtggggcgagcctctccacgctgctggcacgttgtcaagaaacacgctcagcgccttgtttgtgcgcctgcaagtttcattgtctccgccgacaccccacgctcggcccagccgccgcgtggcttctcgctctttctcgcgtgctggggatatggggtccgagtagggaggacccagcccctcgtttttcccgatccggacccaggcggccggggccgcgggaccgccgcggctttgtctgaaagttccactcctaggctccccccgcccccgcccccgccgcccccctactcccagccgggccctagcactgttctttagggatgtggtgtttttacgatcgaaggaatgcgattctggaccccctcatcgccctcgggtgtaaacagctttggaaagctagacttttacaaatccccagtctctaaaagttttcccacgatgaattttggggcaggaggaagagttagcacccagggccagcagcttcaagcggcatgcagtcaaaatgcgtccaaatgtgacaagcaggcttggttgtaagtgcaaagagcaaggctgtcattgtttccacgaagtgttctggaagctttacaactaaaacttgccgtcagtttggtttaaaaacaaaatacaccggagggggacggggggtggagaaaccacacaaaacaccccgaaaggtcagagtgtgaagtcccttttgaagttaacaaaaattgagtccctggctgggaggtcccccgagtgttccgctgtgggctggaggtggcgtttctgtcgtgatttatgtggagtggttcaaaacagaagttaatcactcgggaagcggacgggaggggcggcgctactgcgcatgcccgggagccgcctggagtttggaactccacattctttcagacccggcccgctgcggggcgttcctggggggtagcctcaaggccagcggggttccttcggctgcgtttctgtgggaggccctgaaacgcgcggagcttccctctgcctccaggctttcccagcgagagtgaaattaaacttgaaactcggatcaactggcagtcgttgttggtagaacgccctaaggacccctccccgcgggacggagggaggactcgggacagggaattggccctgggagaaaacgcgcggggggcgtccgagacgccccgtgaaagccgtgccgacccttgggaggactgacaggtctagagacacgcgctgtctgttgtggtgggcctcccgggaataagtgaggggctctgtgtttcgaggatggttctagcgcagagccgggtgtctgccggggtgggctccccgcattgttcgggctccggcgggggcggctctgattcctttccatggcccgcctcccaccccgggaatccccagtgctccttttccacggcttttctggcgtccccccgactctcccgcggcactttggcctaccttcccccagcgccgtggtcctccctggcgaccccctctgcgctcctggggtcctcctgcgccccccctcctccaccggcgcgctgcccacagccgcgtgccctctcccc

SEQ ID NO: 292871 - DNA, 65 bp, Homo sapiens; identical to SEQ ID NO: 204868
  chr18:3498978-3499043
  hyper

SEQ ID NO: 292872 - DNA, 1036 bp, Homo sapiens; identical to SEQ ID NO: 204869
  chr18:3879110-3880146
  hyper

SEQ ID NO: 292873 - DNA, 46 bp, Homo sapiens
  chr18:4454645-4454691
  hyper
gacatgaccgggacaggggaccggtgttctcctcccctcccccttc

SEQ ID NO: 292874 - DNA, 254 bp, Homo sapiens
  chr18:4454777-4455031
  hyper
cgcccccgagatcccaggttacccggagggcccgggagtgcaccccgggcggctgaaagggtaaggagcgcggactctcgagccagcggccgggggagcccagcccgcagcccctccgcgggcgagggaagcggcgaccgcgcggcaggcagcagccaggagccacccagcgcgccgcgaccgccgccgccgcgcacgccccagccccgcggcgcagcccggcgttacctggccgcgtcccgcagtccggccct

SEQ ID NO: 292875 - DNA, 90 bp, Homo sapiens
  chr18:4455561-4455651
  hyper
gggtgggaagtgcgctcgccccggaccgaggggaaagcccaacatccccgggatggaacagagaggcggccacccgtgagtgggcgtgac

SEQ ID NO: 292876 - DNA, 47 bp, Homo sapiens
  chr18:4455681-4455728
  hyper
gaattaagctttcccctcctctcttgccagccgttgttcctaatctt

SEQ ID NO: 292877 - DNA, 580 bp, Homo sapiens; identical to SEQ ID NO: 204870
  chr18:5237298-5237878
  hyper

SEQ ID NO: 292878 - DNA, 536 bp, Homo sapiens; identical to SEQ ID NO: 204871
  chr18:5238247-5238783
  hyper

SEQ ID NO: 292879 - DNA, 43 bp, Homo sapiens; identical to SEQ ID NO: 204872
  chr18:5295777-5295820
  hyper

SEQ ID NO: 292880 - DNA, 65 bp, Homo sapiens; identical to SEQ ID NO: 204873
  chr18:5543453-5543518
  hyper

SEQ ID NO: 292881 - DNA, 113 bp, Homo sapiens
  chr18:5896132-5896245
  hyper
cccgccgggacgggcgcaccgcgggacgcttggaagcctctgccagatgcgctcgcgctccagccccgccgggctttgtgaccagcctgaccgggacccggcagctggggctc

SEQ ID NO: 292882 - DNA, 48 bp, Homo sapiens
  chr18:6414079-6414127
  hyper
agagcaggcgagggcgactgtggccggcgcgccccccgcagttccagg

SEQ ID NO: 292883 - DNA, 242 bp, Homo sapiens
  chr18:6414203-6414445
  hyper
cgctcccgaggctgggcagaactcgcagaggaagacaagggcagaaagcgggtggagggaggcagcgctcgcccgtccgggcacacgacacttgtcggctgagggggacacgcgggcagacgggggcgttagccccagaggaaacaaaagccaaatgcccaccgccgggcgctcgatggccggaggactgcctgggggccctcaggagtcccgtcccgtcccgctcccccggtcccaggctg

SEQ ID NO: 292884 - DNA, 570 bp, Homo sapiens
  chr18:6414697-6415267
  hyper
cccctctacctgcccggggatggggccaccccgcgcggcggcggccgtgggcacccacgcgggctcgcgaccatcccacgcgggcggcggcgtccttcttacccccagcggagcggcgcctgcccgcaacgccgaccgagctacaggcggggggcgagtcggagcgcgaggttccgccagcccaggctgcggcgccgctgccccgcggtgcccggcgggaggggcgcgagggtgcacgcgcggggtgggggcgcgggagccgccccctgcccgccccgcgcgcatgctcccgccgcacctgcctcgctcagtgttccacaccccggggagccgggtggcgctgggcccgccgaggtcggggctttcccatgggagggaggtggctgcggcggaattttcagatgcgtccttctctgtattcgttccctgggaaggattcccccaaatcttggctacttcctgcctgccagcttgctccctggcagcgaagtcccagtagctcacccatgcttcatcccagctcttggggttcaccgtctgaaggctctctcctccggatccctctcggtc

SEQ ID NO: 292885 - DNA, 232 bp, Homo sapiens; identical to SEQ ID NO: 204876
  chr18:6729209-6729441
  hyper

SEQ ID NO: 292886 - DNA, 232 bp, Homo sapiens; identical to SEQ ID NO: 204877
  chr18:6729720-6729952
  hyper

SEQ ID NO: 292887 - DNA, 74 bp, Homo sapiens; identical to SEQ ID NO: 204878
  chr18:6730139-6730213
  hyper

SEQ ID NO: 292888 - DNA, 41 bp, Homo sapiens
  chr18:7116449-7116490
  hyper
cgtttccagctccggtccagtgcttccatcatgaatgcttg

SEQ ID NO: 292889 - DNA, 134 bp, Homo sapiens; identical to SEQ ID NO: 204879
  chr18:7116637-7116771
  hyper

SEQ ID NO: 292890 - DNA, 148 bp, Homo sapiens
  chr18:7117374-7117522
  hyper
cgaagtcccgcaaaagccagaggcgaggctgggctttaaccccaaagcccgaggaggttaaagcctaagcctgcaaagagcgggcagcgtccggcaggagcggcgtccccatccagccctccccggcaagcgcgggagacccacgtgg

SEQ ID NO: 292891 - DNA, 38 bp, Homo sapiens
  chr18:7566544-7566582
  hyper
ttggtgtgaccaccgccttccgtgtactgcctgcggct

SEQ ID NO: 292892 - DNA, 216 bp, Homo sapiens
  chr18:7566793-7567009
  hyper
ctcgcagccctccggagcctcagcgatctcctggctcgcttttcccgcagccgccgagcagcgcaggcccggcgactccgggtgcagctggccctgtgcggtgacatcgccgtccggcgccaggctcgaagccgcctggccgcgcccgcggggtcgcaggccgctggtcccgcccggccgcgctcacaaactactcgcggctcgtgacccgggaca

SEQ ID NO: 292893 - DNA, 415 bp, Homo sapiens; identical to SEQ ID NO: 204882
  chr18:7567335-7567750
  hyper

SEQ ID NO: 292894 - DNA, 85 bp, Homo sapiens; identical to SEQ ID NO: 204883
  chr18:7568821-7568906
  hyper

SEQ ID NO: 292895 - DNA, 50 bp, Homo sapiens; identical to SEQ ID NO: 225593
  chr18:8016761-8016811
  hyper

SEQ ID NO: 292896 - DNA, 200 bp, Homo sapiens
  chr18:8367259-8367459
  hyper
gagatggggaggaccggattcgaaatgcctgggccgcctgttctgggcccgccccgccaggtgcctgtgctcgggaggggccttgcccagcacgcattctagaaggaagcggccccgcgcctcctccctcgcaattaccgccgggtcggaggcatccgggcggtgcgaagtcagcaccgtgccgagcagttgagagcaga

SEQ ID NO: 292897 - DNA, 81 bp, Homo sapiens; identical to SEQ ID NO: 129727
  chr18:8367503-8367584
  hyper

SEQ ID NO: 292898 - DNA, 199 bp, Homo sapiens; identical to SEQ ID NO: 204884
  chr18:8705987-8706186
  hyper

SEQ ID NO: 292899 - DNA, 43 bp, Homo sapiens; identical to SEQ ID NO: 204885
  chr18:8748272-8748315
  hyper

SEQ ID NO: 292900 - DNA, 67 bp, Homo sapiens; identical to SEQ ID NO: 239624
  chr18:9102407-9102474
  hyper

SEQ ID NO: 292901 - DNA, 38 bp, Homo sapiens; identical to SEQ ID NO: 239625
  chr18:9136542-9136580
  hyper

SEQ ID NO: 292902 - DNA, 70 bp, Homo sapiens; identical to SEQ ID NO: 204886
  chr18:9474876-9474946
  hyper

SEQ ID NO: 292903 - DNA, 168 bp, Homo sapiens; identical to SEQ ID NO: 204887
  chr18:9475347-9475515
  hyper

SEQ ID NO: 292904 - DNA, 56 bp, Homo sapiens
  chr18:9707862-9707918
  hyper
gggacccagaatgtcgcttgaggatgggacccccgcagacctccacgcgctgccac

SEQ ID NO: 292905 - DNA, 275 bp, Homo sapiens
  chr18:9708063-9708338
  hyper
cggatgccggagggcgctgggggaggccgacccgcgcggggctggtccgagggcggaggcaatccgccggcgacgccgcaggtcccgggtggctgacgccgtccgggggcgttcctgggagctgggggccggcgaggctggacccgacgcgcccgggaggagccggccggcggccacgtgacccaccgcggcggggccggcggcccagaaatagcagcggcggcggttccgcccgcgggcggcgcgagcgaggggcagaggcgagagacgccggc

SEQ ID NO: 292906 - DNA, 203 bp, Homo sapiens
  chr18:9709406-9709609
  hyper
gctggtctcatgaaaaccatttcctaaaaaagggcagcgaaagggtcgcattcttgtgcgaactgatctgtcaagatgggggtacaagaactgtagaaagaggaaatgatttcggtgaggactgaattgtgccagcgtctctaggcttcctctaggctcttgtggaacctccggcaggctcccatcatcggctcccatcaccg

SEQ ID NO: 292907 - DNA, 100 bp, Homo sapiens; identical to SEQ ID NO: 204889
  chr18:9913711-9913811
  hyper

SEQ ID NO: 292908 - DNA, 95 bp, Homo sapiens
  chr18:10032590-10032685
  hyper
gcaggccccaggaccgctctaggagcccggaaggcctgcgcaggtggggggcaccgtgttccggaagcctggccccgagcgctgtgcggggcgcc

SEQ ID NO: 292909 - DNA, 36 bp, Homo sapiens; identical to SEQ ID NO: 129750
  chr18:10032841-10032877
  hyper

SEQ ID NO: 292910 - DNA, 308 bp, Homo sapiens; identical to SEQ ID NO: 204890
  chr18:10455170-10455478
  hyper

SEQ ID NO: 292911 - DNA, 68 bp, Homo sapiens; identical to SEQ ID NO: 239634
  chr18:10525828-10525896
  hyper

SEQ ID NO: 292912 - DNA, 189 bp, Homo sapiens; identical to SEQ ID NO: 204891
  chr18:11148436-11148625
  hyper

SEQ ID NO: 292913 - DNA, 200 bp, Homo sapiens; identical to SEQ ID NO: 204892
  chr18:11149298-11149498
  hyper

SEQ ID NO: 292914 - DNA, 123 bp, Homo sapiens
  chr18:11689067-11689190
  hyper
tgtccgcagctgcgcgccgggctcagacggcattatttacggtacagaatactcgcccgcgcgacggtatttacggtaacggggaccagcctgggcggcagtatttacggtaacgaaagccag

SEQ ID NO: 292915 - DNA, 575 bp, Homo sapiens
  chr18:11689220-11689795
  hyper
cggcggcatttacggtaacgggggccgggctcgcggaggcccgtcggttcggtccgctctgggcgttagcaagtgatctccagccaaggcggccgccaccccttgcacacagcagaaaatgcaaaatgaccctctggggcagtgaggggctgtggccctcggccccggcctgccgcacccccttcccgcagctggcggccggcagcgccgaacagggtccgggtgcagccccctcccgcccctccgctgaggcgccggcctgaactgggcgcgggaaccaggccgccctcggcgcccagcctgccctagtcccgcgcgccgcccccgctgtgccgcgcccacatgggtctgtgctacagtctgcggccgctgcttttcgggggcccaggggacgacccctgcgcggcctcggagccgccggtggaggacgcgcagcccgccccggccccggccctggccccagtccgggcggccgcaagggacacggcccggaccctgctccctcggggcggcgaagggagcccggcatgcgctcggcccaaagcagacaagccgaaggagaagcggcagcgcac

SEQ ID NO: 292916 - DNA, 269 bp, Homo sapiens
  chr18:11689834-11690103
  hyper
gcgcgaggcggtcaaggaggcgaggaaagtgagccggggcatcgaccgcatgctgcgcgaccagaagcgcgacctgcagcagacgcaccggctcctgctgctcggtaggtcccggccgcgaggtcggctgacgccccggggacagcgcgccgggcccgcgggggcggcgggcaccggggagcggtggcgggcaccggggagcggcggcgggaggggctcctgaatcccgggactggacccggacgggcggcgggcgcggacgggctaca

SEQ ID NO: 292917 - DNA, 75 bp, Homo sapiens
  chr18:11752769-11752844
  hyper
ggattgctcagacccggctagtggtgagagatggcagcgatatccggacacagatcacagcgttctttctgtttg

SEQ ID NO: 292918 - DNA, 560 bp, Homo sapiens
  chr18:11947488-11948048
  hyper
tttttaaaatcactcttcctggagatcttcaaaccagaagcaccgcgggccctccccaacgggcttctgcttacctccactacgtgatgcagtatggcccccgggaggccgcccccagattctagaggggcttaccccagacacacccgaaggaccacctcgtgacctcagaggaacagccctagacccaggagagactgccagacacccccgtggcagcccgccagggcccagctctacttgtcgcctggaggtgctgcctcccttccacgccgccccagggaatggccgcccctctggggctcctcccaatcccccttcccaggactgacaatggcccggcgccctgctttgggccaggatcggcctcgagccttcctcactagcggccaagagccggaaaccttgcgtctcagattccccgggtctgtgcacccccaccccaaccggtcttcccacccaggccccccctgatgccagctgcgggcctggacctagcccggggccctgcccctccgcccctctcgctggacagcccaggccggcgcccgagggatagg

SEQ ID NO: 292919 - DNA, 212 bp, Homo sapiens
  chr18:12253892-12254104
  hyper
aaccagcggctcgctgagcctggggctgggctctgggggactccagagctggaggcaagtggcgctcacatccgtctcctcacctgccccacccgtggcctgggtttaaaatccacatacccgtctttccgcggccaaagtgatgctgccaggattggttatgaccccaactgccccgacccccagaagtgcaaaacgaacaggctggcaag

SEQ ID NO: 292920 - DNA, 56 bp, Homo sapiens
  chr18:12287382-12287438
  hyper
accgtgctcccgcccgccctgcgcccagacctccgcctgccctggaggtgaaggac

SEQ ID NO: 292921 - DNA, 340 bp, Homo sapiens
  chr18:12287452-12287792
  hyper
ctcccccgagtgatggtgcagaggcgtactccctctcggggtccccactccacattccggcgtcctcggaacagccggcacaggcagggcgggcgtcagctgtccggtcgcacctccctgcaggggcattccttggcctgctgctgcctgccaggctgacccaggcgcaggcgctcaggtaaaggcagtggccagcccaagctgccgacccagccgctcctcccagcagaggccaggtgaggaggcgaggatggtgggggtcgcccagggagaaaaatctcatccgacaaggaaagcctggtgaccccctgtctgcctgggcagaactcccctcccagga

SEQ ID NO: 292922 - DNA, 165 bp, Homo sapiens
  chr18:12287963-12288128
  hyper
cccagactcggcaccctcatctgtaagaacgtgaacgatgtccgccctggacaggactgcggtcgcgagaggtgcccgggccaggcaagggacacagcgcggatctgctggtttcccccttgattccatgcgtgggcgtgaagcgtattcttgggagtcaggcac

SEQ ID NO: 292923 - DNA, 688 bp, Homo sapiens; identical to SEQ ID NO: 204895
  chr18:12308209-12308897
  hyper

SEQ ID NO: 292924 - DNA, 129 bp, Homo sapiens; identical to SEQ ID NO: 204896
  chr18:12308927-12309056
  hyper

SEQ ID NO: 292925 - DNA, 313 bp, Homo sapiens; identical to SEQ ID NO: 204897
  chr18:12407708-12408021
  hyper

SEQ ID NO: 292926 - DNA, 206 bp, Homo sapiens; identical to SEQ ID NO: 204898
  chr18:12408117-12408323
  hyper

SEQ ID NO: 292927 - DNA, 42 bp, Homo sapiens; identical to SEQ ID NO: 11652
  chr18:12408339-12408381
  hyper

SEQ ID NO: 292928 - DNA, 261 bp, Homo sapiens; identical to SEQ ID NO: 239643
  chr18:12656810-12657071
  hyper

SEQ ID NO: 292929 - DNA, 54 bp, Homo sapiens; identical to SEQ ID NO: 204901
  chr18:12657375-12657429
  hyper

SEQ ID NO: 292930 - DNA, 439 bp, Homo sapiens; identical to SEQ ID NO: 239645
  chr18:12658130-12658569
  hyper

SEQ ID NO: 292931 - DNA, 112 bp, Homo sapiens; identical to SEQ ID NO: 239646
  chr18:12702645-12702757
  hyper

SEQ ID NO: 292932 - DNA, 1037 bp, Homo sapiens
  chr18:13217136-13218173
  hyper
actaagtgtcctgccgcccgactgcacgtctctaggcggctgcccgaggtcccgcggcccgtggtgcacacgcagcccgcgaggtactctgtgctggaacgcgcccccagcctcccgaaaccgcccccggcctgcgggcagcgagccggctcctccgggcgcccctgcagcgtactctgcgctcggcttggagttccccgtgcggccggcggtgggcgcgcgccacgcgggcccgagccctgggcgggagtgcggccccgggtcccgcggcctcggcgcccgcgcgcctcccccactgcccacccccggcctccgggcccgccccccgcaggggtcggcgcagcctgtgagccggggacccctgagcccccgccacggcggccccggtacccgcggcctggccgcgcgccgggtccccaccgcggagtgggaaggaggaggagagactggaggagttggagacagacacagccgcggcgcgcagtcacggctggagacagacggcggcgacggcggcgggaggcgggacactcccccctccggcgactggaggcgggacacctccccggcggccgcagcgccgcgtcccctctctccccgcgctgaggctgcggaccgggcccggcgggattagcaggcgagtgcgttggccctgcccgctccgcgcgccgccgcggccggccggggatcccctgcaagccactgagccgctgccgccgctgcagccagacaggctgcgggtgcctgggaaagtggaagcagggcggggagcgcgggggaggcccgggggtgaggtcctcagctcttaaagaaccccggcgcgccgcgctccccgccggcccgccgcgcgccccctgccgcgccccgcacagcgcccctccccctggccagcagggccggtggccgcggagccgcactgcgggcagtccccgcctccgctccgggggggcggcccaggtgagtgcggacccgaggtggccgcagtggtcggggcttctggcccaagttcaccgctgcgctccggagggaggggtggc

SEQ ID NO: 292933 - DNA, 90 bp, Homo sapiens
  chr18:13823935-13824025
  hyper
ccgacccaccgacccgaccgaccaaccaaccaaccaagcaaccatccaaccattcaagagtgtgttcggggggattttcgctcggggctg

SEQ ID NO: 292934 - DNA, 112 bp, Homo sapiens
  chr18:13824102-13824214
  hyper
cggaggcgggcccggcgcgggcaggcaggaggcttaaagccccgcagagccgcagccgcctagctgggggagaggcccgtccggggctggctctgagcgccgcacggccgtc

SEQ ID NO: 292935 - DNA, 34 bp, Homo sapiens
  chr18:13868512-13868546
  hyper
aatgggccctctcagaggcccgggcaaccgcaca

SEQ ID NO: 292936 - DNA, 105 bp, Homo sapiens; identical to SEQ ID NO: 239652
  chr18:14431303-14431408
  hyper

SEQ ID NO: 292937 - DNA, 53 bp, Homo sapiens; identical to SEQ ID NO: 239654
  chr18:14450817-14450870
  hyper

SEQ ID NO: 292938 - DNA, 86 bp, Homo sapiens; identical to SEQ ID NO: 204905
  chr18:18821314-18821400
  hyper

SEQ ID NO: 292939 - DNA, 213 bp, Homo sapiens; identical to SEQ ID NO: 204906
  chr18:18821485-18821698
  hyper

SEQ ID NO: 292940 - DNA, 32 bp, Homo sapiens; identical to SEQ ID NO: 239657
  chr18:19321116-19321148
  hyper

SEQ ID NO: 292941 - DNA, 76 bp, Homo sapiens; identical to SEQ ID NO: 239658
  chr18:19577705-19577781
  hyper

SEQ ID NO: 292942 - DNA, 112 bp, Homo sapiens
  chr18:19745613-19745725
  hyper
cgccggcggcgcacgggggtcggccgggggctgcgccgggcaaggggcctccgggccgggcctggcctgcgcaacgcgccgggcctcgattccgaccgcccggggaccccgg

SEQ ID NO: 292943 - DNA, 167 bp, Homo sapiens
  chr18:19748121-19748288
  hyper
aactgggaaaacacgaaaatagaaacaaaacaaaaaaccagagcctaaacgctttctaggagaccgaccttcagaaaatcatttacttggatttacctgggcggggggtagggggtggggtcggggtaaagtataaaaattcattctcacaaaaacaacgcctcttg

SEQ ID NO: 292944 - DNA, 85 bp, Homo sapiens
  chr18:19748376-19748461
  hyper
ggctcctgcagcggacgagcctgcggccgcgcgagttgccgctgacagatcggcgctgataaccccgcgacgttcatttccagtc

SEQ ID NO: 292945 - DNA, 112 bp, Homo sapiens; identical to SEQ ID NO: 204907
  chr18:19748742-19748854
  hyper

SEQ ID NO: 292946 - DNA, 525 bp, Homo sapiens; identical to SEQ ID NO: 204908
  chr18:19748884-19749409
  hyper

SEQ ID NO: 292947 - DNA, 418 bp, Homo sapiens; identical to SEQ ID NO: 204909
  chr18:19749446-19749864
  hyper

SEQ ID NO: 292948 - DNA, 384 bp, Homo sapiens; identical to SEQ ID NO: 204910
  chr18:19749924-19750308
  hyper

SEQ ID NO: 292949 - DNA, 349 bp, Homo sapiens; identical to SEQ ID NO: 204911
  chr18:19750390-19750739
  hyper

SEQ ID NO: 292950 - DNA, 460 bp, Homo sapiens; identical to SEQ ID NO: 204912
  chr18:19750806-19751266
  hyper

SEQ ID NO: 292951 - DNA, 62 bp, Homo sapiens
  chr18:19751774-19751836
  hyper
ggctggcctcaggcctcggccgacagccctccatacggcagcggaggcggcgcggctggcgg

SEQ ID NO: 292952 - DNA, 168 bp, Homo sapiens; identical to SEQ ID NO: 129825
  chr18:19751869-19752037
  hyper

SEQ ID NO: 292953 - DNA, 494 bp, Homo sapiens; identical to SEQ ID NO: 239662
  chr18:19928405-19928899
  hyper

SEQ ID NO: 292954 - DNA, 229 bp, Homo sapiens; identical to SEQ ID NO: 239663
  chr18:20139428-20139657
  hyper

SEQ ID NO: 292955 - DNA, 210 bp, Homo sapiens; identical to SEQ ID NO: 204913
  chr18:20512628-20512838
  hyper

SEQ ID NO: 292956 - DNA, 1246 bp, Homo sapiens; identical to SEQ ID NO: 11673
  chr18:20512902-20514148
  hyper

SEQ ID NO: 292957 - DNA, 242 bp, Homo sapiens
  chr18:20715395-20715637
  hyper
cgcgagcgcggggcgcgcgcacctataaatacggacacccggccccggagcccgcgagccagcggccaggcgaccggcgggcggccagccagcgagccgaactagccgagctaggtagcgaggcgtgcgcgtgggccggggcggcggcgcccccatccccagcaccgaggggcgagcatggcccgcccgcgggggggctggaccgccgcgcacgccgcccgatccccgcgccctacccagcc

SEQ ID NO: 292958 - DNA, 721 bp, Homo sapiens
  chr18:20715851-20716572
  hyper
cgcgccggcccagccgccgcccgaacccccccggaagccgcgcatggacccgcggcgccgccaggctgccctctccttcctcaccaacatctcgctggacggccggctgccgccgcaggacgcggagtggggcggtggcgaggagggcggcgcggccaagccgggcgccggcggcgcctgcggcgcgaggactcggttcagcttgctcgccgctgccgagcggggcggctgcatcgcgctcgccgcgccgggcacgccggctgcggggttagccgctgggtccggcccctgcctcccacagccctcgtcgctgccgcccttgattcctggcggccatgcgaccgtgtccggccccggggtggcgcgggggttcgcgagtcccctgggcgccggccgggcgtcgggggagcagtggcagccgccccggccggcgcctctcgccgcctgtgcccaactgcagctgctcgacgggtccggggccgccgggcaggaggagttggaggaggacgatgcctttatcagcgtgcaggtgccggcggccgcctttttgggctccgggacccccgggagtgggagcggcagtcggggacgcctcaactcgttcactcagggaatcctgcccatcgccttctccaggccgacttcgcagaactactgctccctggagcagccaggccagggcggcagcaccagcgccttcgagcagctgcagaggtcccgg

SEQ ID NO: 292959 - DNA, 200 bp, Homo sapiens
  chr18:20716690-20716890
  hyper
cctgtgctccgggcccgaatcccaaaccacgagggcacccaaaagagggggcgtccccagggagtgcggggttacacgtgtttgcacgagcccagcattcgcagaggagcaccgcgcttgtgcagtgggtcgggaattgggagttgcaggagcccagtagaaagcggcgtccgagcctccccacacgagatcacaaactt

SEQ ID NO: 292960 - DNA, 383 bp, Homo sapiens; identical to SEQ ID NO: 239668
  chr18:21033058-21033441
  hyper

SEQ ID NO: 292961 - DNA, 175 bp, Homo sapiens; identical to SEQ ID NO: 239669
  chr18:21083481-21083656
  hyper

SEQ ID NO: 292962 - DNA, 575 bp, Homo sapiens; identical to SEQ ID NO: 204919
  chr18:21242241-21242816
  hyper

SEQ ID NO: 292963 - DNA, 138 bp, Homo sapiens; identical to SEQ ID NO: 204920
  chr18:21242871-21243009
  hyper

SEQ ID NO: 292964 - DNA, 283 bp, Homo sapiens; identical to SEQ ID NO: 204921
  chr18:21269066-21269349
  hyper

SEQ ID NO: 292965 - DNA, 33 bp, Homo sapiens; identical to SEQ ID NO: 204922
  chr18:21269390-21269423
  hyper

SEQ ID NO: 292966 - DNA, 212 bp, Homo sapiens; identical to SEQ ID NO: 204923
  chr18:21269740-21269952
  hyper

SEQ ID NO: 292967 - DNA, 174 bp, Homo sapiens; identical to SEQ ID NO: 204924
  chr18:21270135-21270309
  hyper

SEQ ID NO: 292968 - DNA, 211 bp, Homo sapiens; identical to SEQ ID NO: 239673
  chr18:21594007-21594218
  hyper

SEQ ID NO: 292969 - DNA, 247 bp, Homo sapiens; identical to SEQ ID NO: 225613
  chr18:21594467-21594714
  hyper

SEQ ID NO: 292970 - DNA, 85 bp, Homo sapiens
  chr18:21851440-21851525
  hyper
actctgcacacacacgtccaactattcttggatctactcacatccctggatcaagtctggccgccctccccgctccgtcccccgg

SEQ ID NO: 292971 - DNA, 759 bp, Homo sapiens; identical to SEQ ID NO: 54959
  chr18:21851561-21852320
  hyper

SEQ ID NO: 292972 - DNA, 325 bp, Homo sapiens
  chr18:21977677-21978002
  hyper
cgtccgcccgccccacgtcgaggaagtggtcgtcaccaactctggctggcactccccgaggacgctcgagcccgcgtaacgtctgtctccgggacccggcgccgggaccacggcggagcgcgaggtggcgccgcccctccccgcagcccgcccctggaacgcgcatcctcctggcgagctggcatccctcccgacacgtgaccgcagcggggacacgcccgttccccgcccactccccgcccctgcctggcctgcccacgcccccggcccgctcctgtcccgcctgggccaccggcgctggttccaggttttgccagctactagg

SEQ ID NO: 292973 - DNA, 90 bp, Homo sapiens
  chr18:21978034-21978124
  hyper
accccgagggaagaagtggcaggccttacccggagactacaaggaaccgcccgtgtgagccagtggaagactcgcgtccccaggcaaaat

SEQ ID NO: 292974 - DNA, 247 bp, Homo sapiens; identical to SEQ ID NO: 204927
  chr18:22006301-22006548
  hyper

SEQ ID NO: 292975 - DNA, 102 bp, Homo sapiens
  chr18:22006775-22006877
  hyper
ctgtctctccaggctcggctccggctcgcctcgccatgccagtcctcctcagccgaggggccctccgcctggggccgccccgggttccgccagcactggcca

SEQ ID NO: 292976 - DNA, 147 bp, Homo sapiens; identical to SEQ ID NO: 204928
  chr18:22653839-22653986
  hyper

SEQ ID NO: 292977 - DNA, 39 bp, Homo sapiens; identical to SEQ ID NO: 239680
  chr18:22932062-22932101
  hyper

SEQ ID NO: 292978 - DNA, 252 bp, Homo sapiens; identical to SEQ ID NO: 239681
  chr18:22932436-22932688
  hyper

SEQ ID NO: 292979 - DNA, 1124 bp, Homo sapiens
  chr18:23806175-23807299
  hyper
aaggagaggaacacggatgccgcagttttccaagtgcagcttgcccctcccacgtgataggtttctggcatcgcccctccttgctggcgattctggggaagattttaacgctccctggagccgtccccagtgacgtcacgggcgcggctccgctccttggccaatcacgcggccggatcccggggaaacccggggcggtggcggcggcctgggcgcgtgcgcgaggtctccgcgtggctatataaacatggctggcgtggccgcgcggcggggccgtgccaatcgcgcgtagggggctgtgggcactcggggttcgtagttttgaaatttctggcgggggagcagctgcgcagttaggctcgaggtgtgagcgacgaccttccgggagccgcaagtccaggctcccccgcagcgggacccgagcctgaggcgcagggctgaggcagcgcacgtgtgagcgccgctgaggaagctgcgagaggtcgggcgggtgtcgctccgggggcagcccaggctcgcgcggacgagaggaaggtccgggacgcgcgtgtcctgccgtgcagcgggcgcccgtcactgacttcgctgctgcggcccccgcgcctctccccagcgatgctgtggaacccgaaccgcaccggagtcggctgccgcgcgccaagcctcccctcacctctgctcccggaaccgcagcgccaaagctgccgctgagcccctgggggatgcccgccggcctcaccgaacccgccggcgccgctcccccggctgctgtgagcgcctcggggaccgtgaccatggccccggccggggcgctgccggtgcgggtggagagcactccggtggccctgggcgccgtgactaaggctcctgtcagcgtctgcgtggagcccacggcgtcccagcccctgcggtcccccgtggggaccctggtgaccaaagtggctccggtcagcgcccctcctaaagtcagcagcggccctaggctgcctgctcctcagatagtcgccgtgaaagcccccaacaccacgacaatccagtttcctgctaatttgcagcttcctccaggtatgttgataaccctttccagccttgtctgtcggtccagctggcggcgacgggaaaat

SEQ ID NO: 292980 - DNA, 31 bp, Homo sapiens; identical to SEQ ID NO: 239684
  chr18:24128609-24128640
  hyper

SEQ ID NO: 292981 - DNA, 268 bp, Homo sapiens; identical to SEQ ID NO: 239685
  chr18:24129548-24129816
  hyper

SEQ ID NO: 292982 - DNA, 134 bp, Homo sapiens; identical to SEQ ID NO: 204929
  chr18:24130253-24130387
  hyper

SEQ ID NO: 292983 - DNA, 164 bp, Homo sapiens; identical to SEQ ID NO: 239688
  chr18:24235704-24235868
  hyper

SEQ ID NO: 292984 - DNA, 59 bp, Homo sapiens; identical to SEQ ID NO: 239689
  chr18:24236254-24236313
  hyper

SEQ ID NO: 292985 - DNA, 122 bp, Homo sapiens
  chr18:24764493-24764615
  hyper
gctctggccacgatcgcacctggcctcccggtccccctaacttccctcccacctctcccgcagcctgcgcctgagcctgagccaggtcgcggagtttgagactgacgcaaaggaggcacccc

SEQ ID NO: 292986 - DNA, 147 bp, Homo sapiens
  chr18:24765230-24765377
  hyper
cgcgccgggagcggggacagctcggagtcgggcgctcaccctggccctgaccctcccgcgtccggcccggctggggctgcggcgccgcctccgcgcccgctcccgcccgcgcccccgcccccgcccgcccgggcagctccgcctccc

SEQ ID NO: 292987 - DNA, 100 bp, Homo sapiens
  chr18:24765420-24765520
  hyper
agctctgcctttgtggctctctggtcccctctttcctctgactttctggcctcgcctccgctggcgactcgccctcccagccccgcgtgccagggctcag

SEQ ID NO: 292988 - DNA, 455 bp, Homo sapiens; identical to SEQ ID NO: 204931
  chr18:25756040-25756495
  hyper

SEQ ID NO: 292989 - DNA, 201 bp, Homo sapiens
  chr18:25756986-25757187
  hyper
ggaggcggagaggggccgagcgaagagccggaggaggcggcggcggcggcggcggcggcggaggaggaggaggcagcggcagcaccaacagcggcgcggagaaacggctccaggcagtttccacccccttcccttcccctcccctccccacccccttcttcgctgctctccgctccccgccaatggagagcgagctgatga

SEQ ID NO: 292990 - DNA, 290 bp, Homo sapiens
  chr18:28622129-28622419
  hyper
gagggggcagcccctaaatcccttttcaagtctgtgctttgagctctcagggatcctctccacccaaaggcgccctccaaccaccatcaccaccagctccaccacctggggagaagcgtgaatcccaaccccctgcccaacccgcgacggcgcccgccagagcgcagcgaagcctgagcgcgactcagaattccaacaatcgaacaccttgtctcaaaacaaaaagctcagtccagagtcgacccgcaaacacacgttttctctcctcactcctgcaggcccgaacttgg

SEQ ID NO: 292991 - DNA, 124 bp, Homo sapiens
  chr18:28622874-28622998
  hyper
ccgagcctgcccctctgctccccagcagccacccgggcgttcgcgctcgggaaagcggtctctggcgcaccctctgccagttctcccacgcccctcggctgccccgcggcgctgccgccccgcc

SEQ ID NO: 292992 - DNA, 177 bp, Homo sapiens
  chr18:28680887-28681064
  hyper
ttcaggctccccaacgagatcccatcggtcaagcctgggaaaggggctgtcccgccccaaataaggccaaccacttaggctcccagctctgggaaggggtagggtcattgctgtagtgctctttaaagaaagaaagaacctggggcaaggggcggtggcgcggggggcgggtggtga

SEQ ID NO: 292993 - DNA, 781 bp, Homo sapiens; identical to SEQ ID NO: 204934
  chr18:28681213-28681994
  hyper

SEQ ID NO: 292994 - DNA, 217 bp, Homo sapiens; identical to SEQ ID NO: 204935
  chr18:28682029-28682246
  hyper

SEQ ID NO: 292995 - DNA, 73 bp, Homo sapiens; identical to SEQ ID NO: 54990
  chr18:28682286-28682359
  hyper

SEQ ID NO: 292996 - DNA, 358 bp, Homo sapiens; identical to SEQ ID NO: 204937
  chr18:29077773-29078131
  hyper

SEQ ID NO: 292997 - DNA, 418 bp, Homo sapiens; identical to SEQ ID NO: 204938
  chr18:29078255-29078673
  hyper

SEQ ID NO: 292998 - DNA, 36 bp, Homo sapiens; identical to SEQ ID NO: 204939
  chr18:29265160-29265196
  hyper

SEQ ID NO: 292999 - DNA, 170 bp, Homo sapiens; identical to SEQ ID NO: 204940
  chr18:29598282-29598452
  hyper

SEQ ID NO: 293000 - DNA, 51 bp, Homo sapiens; identical to SEQ ID NO: 225622
  chr18:29598683-29598734
  hyper

SEQ ID NO: 293001 - DNA, 211 bp, Homo sapiens; identical to SEQ ID NO: 239697
  chr18:29599218-29599429
  hyper

SEQ ID NO: 293002 - DNA, 52 bp, Homo sapiens; identical to SEQ ID NO: 204941
  chr18:29599824-29599876
  hyper

SEQ ID NO: 293003 - DNA, 1425 bp, Homo sapiens
  chr18:30050221-30051646
  hyper
ggagacggctgtcctcgcccgtctgccccgcgccccagctgggactcaccgttgtccaggcgcgcgatctggggcagccggtaagtgctgaccaggaggtcgagcggcacggccaccgagctccacttcacatccttgaggctgcagcccagcgagggcgccgggtccatcttccccgaagcctcctgtcccgcgctcccccgccgccgccaccggcaccacccgcgcctcggcggccgccgctgctcgcgctcgcggtctggggcgcgcgggaggcgccgggcagctccggccgcgggcagccgggggggcgcggcgactggggcggcccggagggagggggccggcgcccggctcagctgccgctgcggggcatggctggggcgccccgcgtgccctcacgcccggagaagactcagagcagccgcgcggctgcgggcggcggcggcggcccgggtggctgcggcggctcccgctccgcctcctcctctggccctgggtctgcagctgcggcggccgcccgctcgcctcctcctcctcttacccctccttccctccgcctcgagcgtgtgaggaggagccgcgggtctgagaaacgccatagcagcgctcccagcactgactaatcaacaaggtgcgagcaacgcctgcgcagctctgggagacaccgcctccgcctcccaggcgccgcccgctccgcccccagctcggcctccgcctcccgcagctcccgcggcccggcaggctcgcgtcagctccccggccggggccgccagcgcccgcggctcggcgcgctccgcaagctttagctctcgctcccccgtccgaccactcgggcgccctgcagtctcgccgggtgctgctgcgcgccccggctccttccccgcccaggcccgtccccggagcccgggaattgccgagcgagctcaggtatcgctccctgagtcgtggtgtcgggcaccgtccgcctccactcccatcctggcaatgcggtggctaaatacaaggcacaaaagatacctttagtggcgctccctcttgcttcccggtgacccagactttggtcagaagagtaccacagcccaacggggctgcggacggcaggcgtggagcacgccttggcgtttcccctcaaccctactcctctaccatcggagctggaaatgactcccaacagtctcagctttggctactagataagataaaaagggcaaagcaccgaaaagcggaaaggtggtgggtgatgagtacccacatacaggaaggtggccattcggtctaggaccttcactgagtgaacgagctgctggaggcgacgggagttgatgaggccaccaaacaccgtagacacggagatgggaagggaaaactaggttactgggaggctgctggggtcagctgttctcacccgcttttcccattcag

SEQ ID NO: 293004 - DNA, 281 bp, Homo sapiens
  chr18:30349781-30350062
  hyper
ggcgcatactgcatgcgggtctcgcggtcgtgctccagccacagcacggacatctggaagagcgccagctccgactccacggggggcggcagcgagtccagcagggcgcgcatctcctcgaagttgagcagcagcacatcctccaccaggtacttgttggccagcttcttggtctcctccaggccgtgcagcgcggcgatcttgcacacctgcttgtagttctgcaccgagatctggtcgttgaggaactgcacgcagagcttggtgacctgggggatgtg

SEQ ID NO: 293005 - DNA, 282 bp, Homo sapiens
  chr18:30351074-30351356
  hyper
aacttgtgcccgaagctttgcttttcgcagttggcccagtttgggggagggggtaggaacaggggcccgaccagcgtgcggggtgtgcgaatcttagctctccaaaagctgggacccccttcgattatccatgctgccccgagaaactcctaggctaatagtctgagggaggagataaagccctttcttctcccgggaaagtgcagcggagcgcggtgaggacccgctcagtggaatcggcagaggcgggagctgtccttatcaattcgagctcatttccct

SEQ ID NO: 293006 - DNA, 271 bp, Homo sapiens
  chr18:30351399-30351670
  hyper
tccccgtcaccactcagtttggctaattttccagagatggctttaaacctggcaggagaatccttccaccaccgccacccccacccggtggccccctctcccccgtctcgctcatttcaaagcgcggaagttcaggcatcaatctccccttccagcgaggggcggcaccgaggactcagggggaggaagtggggctgcgaggacgcgtttggagagggagccgggaggcctggaggccgggagggattcgtgtgcacggtttcccctcccg

SEQ ID NO: 293007 - DNA, 263 bp, Homo sapiens
  chr18:30352257-30352520
  hyper
ctaccctccctcgcgctccctccgccggcagcacccccacgcccgcccccaaagctctggcttgcctgaaacatcttacagagtctctctccctttaagaggacccggtcatacctctctctagctctctccgcttcgttgtctccccccgccccatcttttcctattccccttccttcttgttcttctcccttgcctttcctcctcatctgcttatttcttgcaataggagttttttctttatgagcgtttgccatacaact

SEQ ID NO: 293008 - DNA, 258 bp, Homo sapiens; identical to SEQ ID NO: 239703
  chr18:30781559-30781817
  hyper

SEQ ID NO: 293009 - DNA, 130 bp, Homo sapiens
  chr18:31020194-31020324
  hyper
gaagttcctctaggcggccagcggagggagactctgcttcccttcccccggcagtggggactgggggactgggggactgggggactgggggactgggggactgggggactggggacaggggttggaggac

SEQ ID NO: 293010 - DNA, 220 bp, Homo sapiens; identical to SEQ ID NO: 204946
  chr18:31157630-31157850
  hyper

SEQ ID NO: 293011 - DNA, 146 bp, Homo sapiens; identical to SEQ ID NO: 204947
  chr18:31157947-31158093
  hyper

SEQ ID NO: 293012 - DNA, 331 bp, Homo sapiens; identical to SEQ ID NO: 204948
  chr18:31158158-31158489
  hyper

SEQ ID NO: 293013 - DNA, 97 bp, Homo sapiens; identical to SEQ ID NO: 204949
  chr18:31159050-31159147
  hyper

SEQ ID NO: 293014 - DNA, 294 bp, Homo sapiens; identical to SEQ ID NO: 204950
  chr18:31802381-31802675
  hyper

SEQ ID NO: 293015 - DNA, 200 bp, Homo sapiens; identical to SEQ ID NO: 204951
  chr18:31803102-31803302
  hyper

SEQ ID NO: 293016 - DNA, 178 bp, Homo sapiens; identical to SEQ ID NO: 55008
  chr18:31803673-31803851
  hyper

SEQ ID NO: 293017 - DNA, 307 bp, Homo sapiens
  chr18:31804502-31804809
  hyper
ctctttattctactctcacccgaggcccgcgcccgtcccggggagcggctctgccaggaaaacggcccgaccagtgcccggcgcctgggctgcgtccgagcccaccttcttccctcgtcgtcgtctcccagactaaatcccggaaagggaaagcgggatgtttgcgcccaccgcgctgtagctggtcctgacacttgcaaaatggtcagtggctcctgctcggccaggctgagtgtgtgcgtgtgtgtgagcaagggagcgagggtgtgcggtgtgcagggggtgcgctgtgtgtgcgcgcgtctcc

SEQ ID NO: 293018 - DNA, 137 bp, Homo sapiens
  chr18:32073098-32073235
  hyper
tttttttcaatgacgagcgtgcccactatttccctagaggaatatttcggtccaggaaggaagatagtgcattcagcatgagtgtgtgtgtgagtgtgtgtgtgtgtgctgtgcgtgcgcgcccgcggagagagggg

SEQ ID NO: 293019 - DNA, 102 bp, Homo sapiens; identical to SEQ ID NO: 11723
  chr18:32074337-32074439
  hyper

SEQ ID NO: 293020 - DNA, 1227 bp, Homo sapiens; identical to SEQ ID NO: 204954
  chr18:32556605-32557832
  hyper

SEQ ID NO: 293021 - DNA, 45 bp, Homo sapiens; identical to SEQ ID NO: 204955
  chr18:32557883-32557928
  hyper

SEQ ID NO: 293022 - DNA, 466 bp, Homo sapiens; identical to SEQ ID NO: 204956
  chr18:32558003-32558469
  hyper

SEQ ID NO: 293023 - DNA, 612 bp, Homo sapiens; identical to SEQ ID NO: 239712
  chr18:32621210-32621822
  hyper

SEQ ID NO: 293024 - DNA, 225 bp, Homo sapiens; identical to SEQ ID NO: 239713
  chr18:33077287-33077512
  hyper

SEQ ID NO: 293025 - DNA, 78 bp, Homo sapiens; identical to SEQ ID NO: 225628
  chr18:33077970-33078048
  hyper

SEQ ID NO: 293026 - DNA, 440 bp, Homo sapiens
  chr18:33530135-33530575
  hyper
ccccgcgggcttgggcgtacgctcatctggatcccactgggacccgggcgcagcctcacctggtcccccgagttcccgggcgcggccacactgggtccccctcctgctcgcgccgccctgggcgccccggaggaagctctgtgcggctgcaaccctgagtcccaggcggagcggtcagcggagagttccagccaacttattccgtgcgcctcgaaagggagggttgctgggcgtatagatattctatttcgcggggcctttgcgctccgagtggcccctctaggccagttcctccgaacgctaatcgggggctccgcgctctcccctcgcttccctttgcttggggaattggcagcggggcgcagggatccatcggaaacgcaaaactactttttccccctgctggtcactgtgaggaactgcacgtggtggaactaacc

SEQ ID NO: 293027 - DNA, 40 bp, Homo sapiens; identical to SEQ ID NO: 239715
  chr18:33709430-33709470
  hyper

SEQ ID NO: 293028 - DNA, 656 bp, Homo sapiens
  chr18:33766769-33767425
  hyper
ttaatagagagggcccggccacacccacgtgcgggaagtgcggggcgggatgcagggttggggaggcaagggcaggaagtagggcccaggacgcggttgggagggcggggaagctcagctcacttggatcccagctgcagggcccgctccgggggaagcccccgagcttcccggttccgaaagtgtgcagccactgagaatttattagcctcgtggatccctaatctttccccttttctaccctttggtcagccgcattctaacaaacggcaagcacacgccccgctgggtagcagcaacccgagaacgcccccacccccgcccccgccagacgccggttcccgcttgagagggtgagggtcccgagacccctgcgaggaggagggtcgcggggttccaggatgccgatgccaagcaggaaagatcacctcgttgcttcttccaccggcctctccgcgagacatagctaaacttgaacttggcattccaagggtctggaaacatcttcgtgggacccatcgagaggttgtttaaagactggcacccgctcccgcgcccaggtggggaaagggctggccagaagtgaaagtccggtcggggcgccacacctaggctgcggattccgagagactgggaggctggaggcctgggaggcg

SEQ ID NO: 293029 - DNA, 148 bp, Homo sapiens
  chr18:33767912-33768060
  hyper
gggcttaggatggttcttgccctctcttgcgggagacccctcactgtaaagggcctgctggggccggggttgcaaaagacagcatgtccagcggccgtgacccttcggatgtcctcccgaggtaggagcggtgcgtggaccgccagcg

SEQ ID NO: 293030 - DNA, 359 bp, Homo sapiens
  chr18:33876589-33876948
  hyper
cgcgttatagagtcgccttgaaaacactcggatgttaagagagactgggtgttatgagggcgatctatataaggggggaggaaccaggaacttggctgtggcctgggaatagggagaaccgtgaatttttcttgaaaacgaagggggtcgcccgtgagcagcgaggagagcggtgggaggcagcgccgagtcttgccgctcccgcctggcaggggcgggcaggacgcaaaccttccttcccagtccctcggttaccagggcatccccggctctctgcaattcgggaaccttgccagaagggctcccacctccccaagcccccgcggccccacaaggtccaattagggctttcggcggcc

SEQ ID NO: 293031 - DNA, 32 bp, Homo sapiens
  chr18:33877119-33877151
  hyper
cttagcttctttgtccctaagggaaacctccc

SEQ ID NO: 293032 - DNA, 477 bp, Homo sapiens
  chr18:33877206-33877683
  hyper
cggctccctggccacctggtgccctgccggggtattccaaatctgggcagcagaagccggccgccgccgccttcatctggaaaggcttaagccttctccgggtggggaagaagtcagaaggccgcctgtctccccgtcccccaaccccccaactccccaactcggtcctccaggctccgaggggtgcagctcggccctgggccgcggggcgcacgtgcagcagagtccggccgcccggcctccccgccccgcctccgccgccggcctttggcgcagggctgcggatgccgcgcgagccgtctcctttgcactttcccggctgcggtccggtcgttcggggcagcccggccgggggtagaggacccggaggaggggaggagccggagggagaggggaaggagggggcccgccggccccgcccccgccccgccccccgcggccggagcccgggctgcagcccggcgcgcctgagcctgc

SEQ ID NO: 293033 - DNA, 123 bp, Homo sapiens
  chr18:33877754-33877877
  hyper
ccccgctaaccccggggcccgcgcccccgcggcagggatgcatcatggccacgctggcttgccgggtgcagttcttggacgacacggaccctttcaacagcaccaacttccccgagcccagcc

SEQ ID NO: 293034 - DNA, 367 bp, Homo sapiens
  chr18:33877929-33878296
  hyper
gggggtccataggctgctgcaggcgccgcacaaggtacgacccggcggggtgggctgggccccctggactcagccccctgccgcggtgcgcgccggggtgggtcccggggcttcgtgggccccctgggctgggctgggcgcggcccggggggaccatcgctcgagggcaaatccccctccccgttagacagaagggctcgaggcacccgctggttggcgcaggaccctccggggcgggcgggaaggaacagctagagccgggggcgggcgtggcagagcaggtgccgagccggtccgaggcgggatggagaaggctcccccgagccgcgccgttagctcggccgggtgggcggggtggggctaggac

SEQ ID NO: 293035 - DNA, 62 bp, Homo sapiens; identical to SEQ ID NO: 239719
  chr18:34408854-34408916
  hyper

SEQ ID NO: 293036 - DNA, 32 bp, Homo sapiens
  chr18:34823862-34823894
  hyper
cgaggatgacggcggcggcggcggcggcgacc

SEQ ID NO: 293037 - DNA, 148 bp, Homo sapiens; identical to SEQ ID NO: 239723
  chr18:34855019-34855167
  hyper

SEQ ID NO: 293038 - DNA, 52 bp, Homo sapiens
  chr18:35104466-35104518
  hyper
gtgttgacttgacgcgccctaatccctgactcagctcccacttcttgttaaa

SEQ ID NO: 293039 - DNA, 51 bp, Homo sapiens
  chr18:35145809-35145860
  hyper
ctcccccctctctctctccctccctccctctcctctctctctccctctctc

SEQ ID NO: 293040 - DNA, 59 bp, Homo sapiens; identical to SEQ ID NO: 204960
  chr18:35145926-35145985
  hyper

SEQ ID NO: 293041 - DNA, 411 bp, Homo sapiens; identical to SEQ ID NO: 204961
  chr18:35146241-35146652
  hyper

SEQ ID NO: 293042 - DNA, 200 bp, Homo sapiens; identical to SEQ ID NO: 204962
  chr18:35147249-35147449
  hyper

SEQ ID NO: 293043 - DNA, 68 bp, Homo sapiens; identical to SEQ ID NO: 204963
  chr18:39172188-39172256
  hyper

SEQ ID NO: 293044 - DNA, 150 bp, Homo sapiens
  chr18:40857242-40857392
  hyper
ccattttttactgcgtgttctgtccgaggtgctgaagggaaaactgcctggctggattcacttgcctggatctcaagcgccggctttcggagcgctgaaaacaacagcgcagagcccagggcaccagctcctggaacagggaggaggcaa

SEQ ID NO: 293045 - DNA, 57 bp, Homo sapiens; identical to SEQ ID NO: 204965
  chr18:40857422-40857479
  hyper

SEQ ID NO: 293046 - DNA, 759 bp, Homo sapiens; identical to SEQ ID NO: 204966
  chr18:42258979-42259738
  hyper

SEQ ID NO: 293047 - DNA, 120 bp, Homo sapiens; identical to SEQ ID NO: 204967
  chr18:42259821-42259941
  hyper

SEQ ID NO: 293048 - DNA, 1178 bp, Homo sapiens
  chr18:42260083-42261261
  hyper
tgatatctctctccataaatcggtggcgcggcggaggcggcagagtcgggcgggaagcgcggggccggccggggcgcccgccgctcgccgccgcctccgcgcgcccgggggccccggcgccccccgagctagggcggccagctcgcggctcgccgtttgacagatgctcatcgccatggagttgccgcagcagcacctttgggggctcgggcgagcgacgggagccgggatctgagcgagcgccggggccagcggagccggagccgccgggacatgggtgagcacgcgcggcgaccttggcccgggagcccgggcgcccagcctccctccgcgccgcgggcccccgcactcccggaaccgggggcgacgtgtgtgccctgcatgcaaaagttcacgtcgccttgctgggtctttgactttgcacccggcgggaagggggagaccgggccgagggggcgggatgccggtccgggcgaggttgcaggagatgggcgcgattccggcgggccggcgggtgggcggcgatgctggctcaattggagtggctcgttggtggcggcgatggtggaagctttgggctggagggctgggagcttattgagtttcgcctaatctgatctaccccccctccgccccccgccttttgcaccctccctcggtcctgcagccggctggcggggctggcgggtttggcgttggtggagtggactcgggagggggagggggtaaggaaaggggtgggaaggcaggattttttttttctctctttgtaacttgcaggttaagtggagctagagagctacattgtaacctagttggatttttttggggggggaatgtatcagaatctaacgtgtcgttaatagaaagaagaacaggcaagaagtggtccagccggcgaaggttggtgtgtgcttgtgttgtgcctgtgtgttagtctttttcttaaaaatcttaatcaatggatttgagtctctttcttgtgctctctggttttgggactctgaaaagataggaattcccttaaaagcagacgaatgcctttttgaaagcacgcattgtgtgcgtttctagaggagccgtgggcttgggaatgaacggcaggcttccccgttcggtggtttccagtgggaaatcactccggaaagggaacccttcggtatcgatttattgttttt

SEQ ID NO: 293049 - DNA, 67 bp, Homo sapiens; identical to SEQ ID NO: 204969
  chr18:42531892-42531959
  hyper

SEQ ID NO: 293050 - DNA, 142 bp, Homo sapiens; identical to SEQ ID NO: 239735
  chr18:43547678-43547820
  hyper

SEQ ID NO: 293051 - DNA, 198 bp, Homo sapiens; identical to SEQ ID NO: 239736
  chr18:43678499-43678697
  hyper

SEQ ID NO: 293052 - DNA, 36 bp, Homo sapiens; identical to SEQ ID NO: 239737
  chr18:43753517-43753553
  hyper

SEQ ID NO: 293053 - DNA, 186 bp, Homo sapiens; identical to SEQ ID NO: 239738
  chr18:43753875-43754061
  hyper

SEQ ID NO: 293054 - DNA, 274 bp, Homo sapiens
  chr18:43914608-43914882
  hyper
gatcgaaaggagaaagatacatgaccgtgtgtgtgtgtgtgtgtgtgtgtgtgtgtgtgtgtgtgtgtgtgagagagagagagagcgcgcgcgcgagagcatgcttggttttctgtggtttgctttttttgaggtatatgtgtgttttgtgttatgtgtgttttgtattcattttttgttcattagtaccgatggctggctagctgggacctgggtctctgccctatcccatgccccagcccccaccctctcgtgggcacttgcacgattttcc

SEQ ID NO: 293055 - DNA, 33 bp, Homo sapiens; identical to SEQ ID NO: 225641
  chr18:43924114-43924147
  hyper

SEQ ID NO: 293056 - DNA, 93 bp, Homo sapiens
  chr18:44335941-44336034
  hyper
aacaaacaaacaatcgatacgattttgagccctccgaccccggagtccaaacaaatggccatagaactgtgggtctggaggacaccgctccga

SEQ ID NO: 293057 - DNA, 53 bp, Homo sapiens
  chr18:44676978-44677031
  hyper
gcaccgccgctgacggaaagctaggcccttctggagacccgctttcccaaggg

SEQ ID NO: 293058 - DNA, 196 bp, Homo sapiens; identical to SEQ ID NO: 129980
  chr18:44677055-44677251
  hyper

SEQ ID NO: 293059 - DNA, 241 bp, Homo sapiens; identical to SEQ ID NO: 239747
  chr18:44702531-44702772
  hyper

SEQ ID NO: 293060 - DNA, 69 bp, Homo sapiens; identical to SEQ ID NO: 204972
  chr18:44786784-44786853
  hyper

SEQ ID NO: 293061 - DNA, 79 bp, Homo sapiens
  chr18:44787333-44787412
  hyper
ctgctgggctgtgccgggggctagaaattcctggagtccctttggtccccgtattctccaaaggaagggaggccgaggg

SEQ ID NO: 293062 - DNA, 400 bp, Homo sapiens
  chr18:44787851-44788251
  hyper
catcaccccacccttcacccctccatgcccagtggtcgaaggaggacagatatgaggcgagggctggaggcctagtaattgaagtaggaccaggggcaggagggagcaatccgccctgggggcgcgcagcctgggccggcagcttgaactcccttgccagaagggttgtcccaggacgcgcaggtgcgcttctcctgtgccgccctagggcagtccactaggagggggcaccatttccacactttcccggggaacgaccacctgaggtgagatgagaacctattgtgcgtctccaggaggggagctgggaagattggatacggaagactgagcccttctcagcatctccaggaaggaaagctttagggccaaacataggctgctttaaaaaaaaaaaaaa

SEQ ID NO: 293063 - DNA, 260 bp, Homo sapiens
  chr18:44788281-44788541
  hyper
acgaagtgtcagactgcgtgtcagggagaccgcgggccaggggttccagttggagcccagcgttccaggaggggatgaagaccgagttcggtaaaacagcgtggtattacaaagtttgcctttcaggctccggcctagctccttccttggcaactttgcaagtgccggcaaccctcactggatcatcctacccttggaacttcttgggaagcctcggtttagccttgggtccaccaagacttcggcgaaatggaggcgtt

SEQ ID NO: 293064 - DNA, 289 bp, Homo sapiens; identical to SEQ ID NO: 129995
  chr18:44788908-44789197
  hyper

SEQ ID NO: 293065 - DNA, 301 bp, Homo sapiens
  chr18:44790173-44790474
  hyper
cggttcgaaaccttagctggggtgggggaagggatgtctttaaccttctgtctaccgtccccctcttccctctctcagcctagaggcaggggatgctgcggaatcagactgggtgcaccaaggcggagggccatgccgggcttcgcccttcctgggtgtcccggagtccgttccggagaaaccctggcattgccagaactgggtccccgcactcactcctccataattcgcggcggatcagcgggaggagggcagagggcgggggcgaggcagcttcctggcgggtgtggcgcaaagtgtg

SEQ ID NO: 293066 - DNA, 76 bp, Homo sapiens
  chr18:44790495-44790571
  hyper
cggacccgggtcctggaccgaagatttagcccagggtttcgtgtgtgttgctccctgttgctttctacggggtctg

SEQ ID NO: 293067 - DNA, 42 bp, Homo sapiens; identical to SEQ ID NO: 204973
  chr18:45275509-45275551
  hyper

SEQ ID NO: 293068 - DNA, 99 bp, Homo sapiens
  chr18:45275733-45275832
  hyper
gcgatgccgcactgacccgcggacggacgggaggcctacggatccaggatggctccttcgactctccccacgccccccgccctctgcttctccccaggg

SEQ ID NO: 293069 - DNA, 241 bp, Homo sapiens
  chr18:45534406-45534647
  hyper
atctcggccgggagtcgggtctctgccagcccagcgctcggaatggagctttgtggggctggggaagcaacctttgccaatgggaagggggtgtcacagcgcctcattccctcccagcttgcgctcctcggaataatctccaacagcgtgcctagaagcacagctgcttttgtttcgggcgtcggtgcttcccagaatcccggtgcccggacccagccgccgaaccgaccccgccccgccg

SEQ ID NO: 293070 - DNA, 260 bp, Homo sapiens
  chr18:45534675-45534935
  hyper
cgagcggcggccacgcgggggcgctgggccgggggcgggggccagggctgggggtggggcgcgcccccgggccacctcccccgcccctcccggctcctccccgctcctcctcccatgccccggcccccgcctcgcagctgggctcggactcaggcttagccgcagtctgtgagcctcctccccgcacctggccggccaggccagcccagcctacttgtctcgctgcgcccggctgctgcctccgctccaggggtcggcgc

SEQ ID NO: 293071 - DNA, 43 bp, Homo sapiens
  chr18:45534976-45535019
  hyper
cgcacacccgtggcgcgccctccaggggcggtttttctcccgg

SEQ ID NO: 293072 - DNA, 232 bp, Homo sapiens
  chr18:45662351-45662583
  hyper
caggacaacggaagccaggaacagaaaggagcgaccctggagccctcaccacagagcacggcgtgggggacccgacgctggatgctccgcgcggggtgggcggcgggcaggggggcgtgggtgctgggttagggggaagctctctccatcgtccttcccaggccagccccgcggccgctgcgcccgcctgcaggaactcaggcgctccagtgggtgacgccggcccgggcgc

SEQ ID NO: 293073 - DNA, 258 bp, Homo sapiens; identical to SEQ ID NO: 204975
  chr18:45663079-45663337
  hyper

SEQ ID NO: 293074 - DNA, 812 bp, Homo sapiens
  chr18:45687757-45688569
  hyper
gacagggtggggccgggatgagaggaaactgtaaaaccaacggggcggattcacgaaaaattcccgagcgtggtgagggtagagggtgctgggcagcaccccagttcgccgggcccacgctcctccagttgcccggcctgttcagactggttcgcccacctttctctccctgccggccccactcgcctgacctctgagaaagcagaatccgggacatgaagcaaccacagccgctccgcccggccacaagcgccccggactccgtgcctgcccgcagcccccttcctgcagcgttcactcggctgcccggcccggcccggcccgggcgccccgccccagccccgccccgctccggaggcccctcctctatccccgccccttcccgggcgccccgccctctccctccactctgcgcccccgcggcctctctctcctcctgcgggagccatcgccctcctcccgggcgcccctccccgcggccgcagcctgtttcccgggcctctcctccgcattctcacatcgctccagctcgacctccccacccgcccgcctccccgggaggccgcggcccggcgcggcaccgcccctgcccacggttacccggttaccgcctgagaggccggcgcctgcccgggcgggcgggacccgcactgaccccgcagggggcgaggcggggctgagaggggcgaacgcagagccagaccccccgccgccgcaggccgcccacctccaggcagggcttcgtgccagacccggctgtagttatcagctgggtggagggcagtgccagctgcaggcgtccccgaggcgca

SEQ ID NO: 293075 - DNA, 164 bp, Homo sapiens; identical to SEQ ID NO: 204977
  chr18:45934609-45934773
  hyper

SEQ ID NO: 293076 - DNA, 221 bp, Homo sapiens; identical to SEQ ID NO: 204978
  chr18:45934810-45935031
  hyper

SEQ ID NO: 293077 - DNA, 1885 bp, Homo sapiens; identical to SEQ ID NO: 204979
  chr18:45935196-45937081
  hyper

SEQ ID NO: 293078 - DNA, 76 bp, Homo sapiens; identical to SEQ ID NO: 204980
  chr18:45937111-45937187
  hyper

SEQ ID NO: 293079 - DNA, 64 bp, Homo sapiens; identical to SEQ ID NO: 239764
  chr18:45938869-45938933
  hyper

SEQ ID NO: 293080 - DNA, 273 bp, Homo sapiens; identical to SEQ ID NO: 204981
  chr18:46065116-46065389
  hyper

SEQ ID NO: 293081 - DNA, 2253 bp, Homo sapiens
  chr18:46065664-46067917
  hyper
cggccagaggaaccccgaggtgagcatctcctcgcccgtcctcctcttatagtcatctcagcttgctgatcgattcggggacccgggaggagggctgcgtgacgtgggcgtgcttatagataaatccgggaaaaccgccccaaacaatcagcccccttccccccatccctgctcctgggccagcggggtgtccgcacccatctaccatcccctcctccccctcggtggggaactgcactccacagtgtcgccccctccctgggtttgtcccattccctgccgggttccccgccccgcggggtgtcgtggccctggagctccggcgccaaggggggctcttgggggacgcacggctggagcccggctcgctttggagctgcgcggtgtagccgctgtcatgtgccgggttccgacctgggaggaggaaaagagcgagcgcgattcctctcccttttgttttgaagcccgcatttgctgcatcgagcagttggtttagtatcagccaaacttgcagctgttcagaccgcgctccgccgaggtagggagcccgtctcggggtggcgtttgggggccgggggctgcggcactcggggctgcgggagggaccccgagagtgtgtcgccacgccgcccctcccttccccggtgactgattgtgtctgtggcagcgggcgtgtgtgagtgtgcgcgcccgtccccgcgggctcggggatgtctgtggatggctgtcgtctagacagggcgcagccccctccctgcgtccccggtgagcccgcgggccgcggggggagcgggggatgggagcagaggaagaaaccaaatcggtggacccgttgcggtctcccctttggttattcccaacggttgtggttctgttggctttttttattattcctgtcgctgcggtgcaatcgggcctggggaatagatacgcccggcggagaggggttcacttgacaggctctgaaaagccacctctgggtggcgagtgacccgagaggccgtggggtgggctccggctcgggttcatcaggacgacgagcaggtaactgtcccgggcgccggtcatgggggagggcgggcgggggggcgatggcttgggctgcggcgaaggtctggggcctcggagggccgcgtgccggtgcctggatgtggccggagggggcgtccgggacaccgcgcgcctgagccgagtgtttctctattgatggtaaaagacaatcgggaggggggtggtccgagcccgttatctgggcggcgttggctctgtttggttccgcggagttttcagggttggggctggggggtgtgagcaccgcggggtgtgcggcgtgtagaggggagggctgactggcggcgccgcgtgcgtctccaccccgaggagtgaggcgtcgcctcccccgcccggctgtttgtgtgtacacacggctccggtgtgtgtggggggcggggaccgcagaccgcggcgtagtggggacaagcgtgggccccgatcctccgcgcgacctgtcccgccagccccctccttgtctaagtcggggtcgtgtgtccccgcgcgcgcgcgcccgagttacttggagaggggaccgtgcggctgtgggccggggaagaccgtagggtcgcgtgtgctggtcttcggtgcaggagtcccaggtccgctgtgcggccggagtcacacagcccctccctccgcgtccgcgacgccccgtgacccggcagactgggggtccacccggcggcgcggggggttggtttggctgcgccgcccccagtccacgctggggtgaccccgcaccgaggcgttctatgggtgtgcgtgcccgcgctcgccgccgctgccttcgcagaccggggagagagtcagcgactgccaaccgcagccccggctcttcagtctggggacagtgggagcccaagcccagcgcgccccagcccggcccaggccgccgcccgcccggcgctgtgtctctgcggcccgaggattatcccccagtccaggggcccgcgcgaccaaggaggaagccgctggagccgccggctcggccgcggctagagcctccgtagggcgaaagtgacacagcgcgagagagcgccgccgctgctggagccagggccgagaggaaggagccgcccagagcgcagggaggggccgccggctgtccgttcccagttcctcctgcccagggcccgatctgggctgaaaacctcaggaatccaggctcctagcaggctcgggctgcgcgaggagatggcc

SEQ ID NO: 293082 - DNA, 144 bp, Homo sapiens; identical to SEQ ID NO: 204985
  chr18:46476808-46476952
  hyper

SEQ ID NO: 293083 - DNA, 104 bp, Homo sapiens; identical to SEQ ID NO: 204986
  chr18:46501913-46502017
  hyper

SEQ ID NO: 293084 - DNA, 583 bp, Homo sapiens
  chr18:46502487-46503070
  hyper
ctcaggttccagccgccaggcttggccctcagcgggcgctgtcagagggcgggcccgcgggagcggggcggcggcggcggcggcagaggagcgcagggcgggcggagaccgtcggggtcacctctccagccccccgcggtggccgagccacccgcagttgcgctcgaggcgccgaggcggggtggccgagcgagacccgggccgggcgcggctcgggccgcacagccgcggcggcggctgcagacctgtaaaccttaatgacagcaatcttgcccgtctgcgcctctgactcacgtggtgacccagcctccagtcacccggcggccgccctccggcctcagtttcccccgccgccgaacaatgaagccactgtgtcgccgttcatttctgagcgccgtttcacacgcggagcgccgccgcctccctggggaagggaccgaggcgtccggcttttaattatccccggtgggcgggcgtggggaggccgcgctctgctggataattgaaccctgggactattccctcgtcagcccaagctctttatcttaagccgtcctttcctcttcatcgtatttaaatttta

SEQ ID NO: 293085 - DNA, 80 bp, Homo sapiens; identical to SEQ ID NO: 204987
  chr18:47087067-47087147
  hyper

SEQ ID NO: 293086 - DNA, 357 bp, Homo sapiens; identical to SEQ ID NO: 204988
  chr18:47087704-47088061
  hyper

SEQ ID NO: 293087 - DNA, 256 bp, Homo sapiens
  chr18:47088502-47088758
  hyper
cctgccaccgcccgggctccgtgccgccaagttttcattttccaccttctctgcctccagtcccccagcccctggccgagagaagggtcttaccggccgggattgctggaaacaccaagaggtggtttttgttttttaaaacttctgtttcttgggagggggtgtggcggggcaggatgagcaactccgttcctctgctctgtttctggagcctctgctattgctttgctgcggggagccccgtaccttttggtcc

SEQ ID NO: 293088 - DNA, 215 bp, Homo sapiens; identical to SEQ ID NO: 204990
  chr18:47339391-47339606
  hyper

SEQ ID NO: 293089 - DNA, 400 bp, Homo sapiens; identical to SEQ ID NO: 204991
  chr18:47339758-47340158
  hyper

SEQ ID NO: 293090 - DNA, 220 bp, Homo sapiens
  chr18:47719963-47720183
  hyper
ccgggcgggtgtcccgggaatcgcatacccacgcaacgcgcgtggacaccacacgcacacacaactctgcatggaggcgtgtgcataggcactgttaaacgtgttttggccacccaagaagacgaacaggaaaaccaggcattggactatccaaaacttgttttcttaaaggtgcatagggcacatgtgaagaaaaggcctttgcccctctcactactga

SEQ ID NO: 293091 - DNA, 173 bp, Homo sapiens
  chr18:47720319-47720492
  hyper
cccgattcggagcacccagcctcacacatcccttctgaccttgaaggcatcctgaaactcacaccctgctcccggttcgactttactccaaccccctccccgcagtcactgaagccctctttgtaccaaagaggccgcgtcaaaacatccatccccagcaaattcacaatgct

SEQ ID NO: 293092 - DNA, 279 bp, Homo sapiens
  chr18:47720522-47720801
  hyper
acccctctacccattgcttaccctcactccatccagccgccgcgccctcacgccaggttgtctcctccctctccaccaagtccagaacccccacctctcccaagtccagggttccctgttgtgggtatgcgggaggaaaggacgcctcggaggcgcgccctcgagagccggcgccgcagagcccctggggtggggtccacggcggggacaggggacagcagcgggagcaccgcgggggcccgtcccgcgcacggcgctcagagctggcagggtcgccct

SEQ ID NO: 293093 - DNA, 828 bp, Homo sapiens
  chr18:47720908-47721736
  hyper
cctctaggagccgggtggccggtcagtgcgggcgttcccggaaccgccaaactttctccgccaaccgaagttagggactccgaggacagtgacgaggaggacaccgcggaggggggtctcccgtcacctcccgcctccagtagccgagggagaaggcgaccctgagtactaggtggccccgagcgcgccaccccggccccggggcgcctccctcgcggccgcgctcacctggctgtagagctcgcccaccgacatggcccgggccgggcggggctcgggccccggctcctggctgccccgcggctctcagtccgcggctggcccgcctggcgccatgttcccgggctggcctggagtttctcgatcttctcgctcttctccgacctgccccgccggcttcccgcaggcgccgcggccggctcgctcccggcggcgcgacctttactcccgccgcggcggcgcagctacggccggacaggagttgcgagcgccgggggaggaggccgcgccgcaccactcccctcccaggtgtggggaggaggcgagggccggcgaggagggaggacccgctcgcgtcagagcggacggcccgtgcgccgccgcgcctctgagccctgccggtgcccggcccgacgcgccctcccgcgcccccgctgccacctgggcctccgggccgggggcggggcgctcagagaggagctccgggaccggcgcgggccgccccctgctggacgccgcgcgcgcgcaggcacaggtgcgccccggcgcccgcacctgccctgccgcgctccgcttccacccgcaccgggccccgcggagtccggcatg

SEQ ID NO: 293094 - DNA, 221 bp, Homo sapiens; identical to SEQ ID NO: 225654
  chr18:47813482-47813703
  hyper

SEQ ID NO: 293095 - DNA, 228 bp, Homo sapiens; identical to SEQ ID NO: 204993
  chr18:48494204-48494432
  hyper

SEQ ID NO: 293096 - DNA, 296 bp, Homo sapiens; identical to SEQ ID NO: 239777
  chr18:48723995-48724291
  hyper

SEQ ID NO: 293097 - DNA, 70 bp, Homo sapiens; identical to SEQ ID NO: 204995
  chr18:49866290-49866360
  hyper

SEQ ID NO: 293098 - DNA, 426 bp, Homo sapiens
  chr18:49866421-49866847
  hyper
tccctaagccatagtctgtctgcccccacccccttcccgtggaatctttgcctgatccagttcgtttccctccggtctccacattttcccttccagccctccacttctccggatcaatgtgtagtacggttccaactcccagctcgcacaccgctggcggacaccccagtaacaagtgagagcgctccaccccgcagtcccccccgcctctcctccctgggtcccctcggctctcggaagaaaaaccaacagcatctccagctctcgcgcggaattgtctcttcaactttacccaaccgacgacaaggaaccagcctcaaccttttaatgcacagcccggccacaggattgccttccatctcctcttggtccctcctggatgtggtttattgatgacttgcgagcccctcagagagctgtcttccc

SEQ ID NO: 293099 - DNA, 204 bp, Homo sapiens; identical to SEQ ID NO: 204997
  chr18:49868095-49868299
  hyper

SEQ ID NO: 293100 - DNA, 315 bp, Homo sapiens
  chr18:49868356-49868671
  hyper
aacagggaatggcacatcaatcgcggccaagcccccagcctccccggagtccgcagctccggctttctcttctctgctaagtgctgcatggccaagggttgcgaacgcgagcagaaaatgcgcctctcactgtcgcgagggattcagacagtcaagcgccaaggcagcccgaggctccccaaagcctcgctcggccgcacgcgggcaggaatctgcgcttgcactcgggctcagctcctcatcttcctttggccagagacagagagagcaggcaggaggggtgtgtgtgtgtgcgtgtgtgtgtgtgtgtgtgtg

SEQ ID NO: 293101 - DNA, 36 bp, Homo sapiens
  chr18:49868767-49868803
  hyper
ctcccctggctcttctctcccggagctttgtcctca

SEQ ID NO: 293102 - DNA, 79 bp, Homo sapiens; identical to SEQ ID NO: 239781
  chr18:51795698-51795777
  hyper

SEQ ID NO: 293103 - DNA, 366 bp, Homo sapiens
  chr18:52495527-52495893
  hyper
gagacttcatccccgagaggagtgtgtttctcactgcagcagttgagtcaccagcaagacttgcctgaggtgagctccgcacatccgcgttgggacttgcagacacgccttcttctcacacaaaccttacccagccccgccgccgcggcggactccgagggtggtgccaccagccctgccactcgcagtcctgacgggcaggggctgcggaccgcccggccttggacccatccggagccacaggttggaggagataagtagctgtccccgtgctcatcgccctgtggagcagatcctgtctccttgctgacggtggagcccgggagttccagggcttgggaaggggaaggaaacctctctgaaatc

SEQ ID NO: 293104 - DNA, 65 bp, Homo sapiens; identical to SEQ ID NO: 205000
  chr18:52496020-52496085
  hyper

SEQ ID NO: 293105 - DNA, 89 bp, Homo sapiens
  chr18:52988831-52988920
  hyper
acctaggatgctcatccctgcgacaataaaacttgtcaaaaatccccctcgcagcccgcattcgcttaccgctttcccattatagtagt

SEQ ID NO: 293106 - DNA, 152 bp, Homo sapiens; identical to SEQ ID NO: 205001
  chr18:52989589-52989741
  hyper

SEQ ID NO: 293107 - DNA, 456 bp, Homo sapiens
  chr18:53256017-53256473
  hyper
atactttctttcccctcccttttaagtcacagaatagtataactgcaaacttcgaaaaaaaaaaagggcaatttttgggggtggatgttgttttgtttttgcacttgagttcctaggcacgctaagtccctgttcgccagcactgtaagtttttaattcaacatttaccattataggccctgcatgctcttaaaacatactttttcacatcactttttaggataaaatttaagcttcataattctatcgtttcgtaataacaagcgtgctttatccggtatatgcaacataagctattttaacgtgtgtttgaaaaaaaaaacacacattctacaaatcctggtattgctagatgtgcgagtacatacacaaaatgcatgcacacactttttcccattggcaattatttaataggttgtcccttttgttttaataaaacatcgggatcgacatttt

SEQ ID NO: 293108 - DNA, 74 bp, Homo sapiens; identical to SEQ ID NO: 205003
  chr18:53257322-53257396
  hyper

SEQ ID NO: 293109 - DNA, 40 bp, Homo sapiens; identical to SEQ ID NO: 205004
  chr18:53257761-53257801
  hyper

SEQ ID NO: 293110 - DNA, 58 bp, Homo sapiens; identical to SEQ ID NO: 205005
  chr18:53446769-53446827
  hyper

SEQ ID NO: 293111 - DNA, 354 bp, Homo sapiens; identical to SEQ ID NO: 239788
  chr18:54318601-54318955
  hyper

SEQ ID NO: 293112 - DNA, 82 bp, Homo sapiens
  chr18:54789287-54789369
  hyper
tcctacagttttgcagagaagtctatgagtgatcgttttcataaatcccaaagtaggagtggaagcaacctcccttcttcct

SEQ ID NO: 293113 - DNA, 273 bp, Homo sapiens
  chr18:55020166-55020439
  hyper
cgtgtccctgaaaaaggagaacatcttcaccactcccaagtacgccagcccgggggcgccccgaatgtacatgttccacgcgggattccggtgagtgcgggcctctgtgttagtgccctcgggaatttggttgatggggtgtttggggaagggaaggcgtgggggaggggtgttttggcctctccgagactctttgggccagataactgcgcggtccttccactcctctctctaattctcccttccccctccctgttattttttttttaaccc

SEQ ID NO: 293114 - DNA, 117 bp, Homo sapiens
  chr18:55021430-55021547
  hyper
tgcagatggggttccctagttttctttttttctctcgggtgtgtgtgggagcagagggtggaccaaatgagaggggctccgggacggaacggagcccgcacgcgtaccagccgccct

SEQ ID NO: 293115 - DNA, 178 bp, Homo sapiens; identical to SEQ ID NO: 239792
  chr18:55101491-55101669
  hyper

SEQ ID NO: 293116 - DNA, 1271 bp, Homo sapiens
  chr18:55102066-55103337
  hyper
accatgcattagaatacattagcgcctgcattttaaaaggctaaactattggctcccagctagggactctcggtaagtggcttgttagtgacgagtgtttgtctatactggcacatagcggagtcttttgctcccggcttactcgcctccaggaaagctttggggtgaggcgaaggcgattgaagcaatgccccttcccccagatcgcagctgctcaggggggacacagcacggcatctttcaccgaatctctctcgctcgctcgcactccagcctccctctccccagcgacccccccaccttctcctccctccctctccttgacgtttgattccagtagcaaaggaggtaaaaaaggcaccgagccgtcagccaaacctgaaaagtgcggccccgccccctccacagccactggtagcttcccgtggaaggcccgcctcccggggcagctgcggcctcggagtggttgcgcttggcgcccgtcgggcgtggccccgccccaggtccgggagggtaggttggctgccccggcgagcggcagagcccttctggacagctcccgctcacccaaacagaagacgtcggcgccggagcgggctcggacatggcgaggctgcgagccggcccgagcggcggggcccggtgatccctccctccctccccgtcccctcccctctcccgcacgcacgccccgtccgcccccaccccgcccccaccccgggcgagcccgcccgcagcccggggcgcacacccgcacgcgcactcctctccactcactcccgcgcccgcccccactcccgcagccgagccccgccacgcgcgccttgcccgcccgccggccgcccccgccgcccccgccgcccccgggccctgatggactgaatgaaggctgcctacaccgcctatcgatgcctcaccaaagacctagaaggctgcgccatgaacccggagctgacaatggaaagtctgggcactttgcacgggccggccggcggcggcagtggcgggggcggcggcgggggcggcgggggcggcggcgggggcccgggccatgagcaggagctgctggccagccccagcccccaccacgcgggccgcggcgccgctggctcgctgcggggccctccgccgcctccaaccgcgcaccaggagctgggcacggcggcagcggcggcagcggcggcgtcgcgctcggccatggtcaccagcatggcctcgatcctggacggcggcgactaccggcccgagctctccatcccgctgcaccacgc

SEQ ID NO: 293117 - DNA, 120 bp, Homo sapiens
  chr18:55103761-55103881
  hyper
cgcggtgagcaacacctgtcccgcggcctgggcaccccacctgcggccatgatgtcgcacctgaacggcctgcaccacccgggccacactcagtctcacgggccggtgctggcacccagt

SEQ ID NO: 293118 - DNA, 165 bp, Homo sapiens
  chr18:55103897-55104062
  hyper
cgtcctcatcgggctcgcaggtggccacgtcgggccagctggaagaaatcaacaccaaagaggtggcccagcgcatcacagcggagctgaagcgctacagtatcccccaggcgatctttgcgcagagggtgctgtgccggtctcaggggactctctccgacctgc

SEQ ID NO: 293119 - DNA, 49 bp, Homo sapiens
  chr18:55104092-55104141
  hyper
aatctggcagggagaccttccgcaggatgtggaagtggcttcaggagcc

SEQ ID NO: 293120 - DNA, 203 bp, Homo sapiens; identical to SEQ ID NO: 55129
  chr18:55104166-55104369
  hyper

SEQ ID NO: 293121 - DNA, 69 bp, Homo sapiens; identical to SEQ ID NO: 205010
  chr18:55104739-55104808
  hyper

SEQ ID NO: 293122 - DNA, 279 bp, Homo sapiens; identical to SEQ ID NO: 205011
  chr18:55105185-55105464
  hyper

SEQ ID NO: 293123 - DNA, 71 bp, Homo sapiens
  chr18:55106090-55106161
  hyper
cgggaaatgaactggagactggctgacagttcttaacattttgtcatagatccccccgaatgtcccaggct

SEQ ID NO: 293124 - DNA, 65 bp, Homo sapiens; identical to SEQ ID NO: 239796
  chr18:55254078-55254143
  hyper

SEQ ID NO: 293125 - DNA, 65 bp, Homo sapiens; identical to SEQ ID NO: 239797
  chr18:55289330-55289395
  hyper

SEQ ID NO: 293126 - DNA, 670 bp, Homo sapiens
  chr18:55469664-55470334
  hyper
agtacctggccctgccacaggagctggggaggagagcgatctcaccccctccatccctcccggcaggtgggccgcggtcagatacgtttggcccgcaagtccttttcggacacgttggcatctgctcccaaagagcgccccagcaggacccggtcaccggggtcttccagaggggcggtagccaccgcacaggagccagcggcatcccccaaggagccgcaagccctacctggcttaacccccggacatgtgtgtcgctaccgatcgaagaacccaaacaccccgagatttccctcctctaggcaggtgaaaaccccacggaactctccgcagcgctgcctgcccagccggccgtgtctcgccgtccccgaggcctcgggggctcccagcacctccacccaaatcccacctgtgcgggctcgggagtccgagggcgctgacagctgctgccgccgcatcccggatctccaaagtgcggcgggagcggccagggaacctgcaggacaccgccgggccaaggggcttgggaaggtctgggggcccccggcgccgcacccctgcttacctggcgttcgctgggccccggctggggcatccgcctggtgcgcgccgctcggagcgctcgctgcgcacctggccgctgccgccgcccgcccggccccagccctgg

SEQ ID NO: 293127 - DNA, 249 bp, Homo sapiens; identical to SEQ ID NO: 205013
  chr18:55470592-55470841
  hyper

SEQ ID NO: 293128 - DNA, 249 bp, Homo sapiens; identical to SEQ ID NO: 205014
  chr18:55470954-55471203
  hyper

SEQ ID NO: 293129 - DNA, 245 bp, Homo sapiens; identical to SEQ ID NO: 239800
  chr18:55710765-55711010
  hyper

SEQ ID NO: 293130 - DNA, 235 bp, Homo sapiens; identical to SEQ ID NO: 239801
  chr18:56807204-56807439
  hyper

SEQ ID NO: 293131 - DNA, 45 bp, Homo sapiens; identical to SEQ ID NO: 205016
  chr18:56887424-56887469
  hyper

SEQ ID NO: 293132 - DNA, 202 bp, Homo sapiens; identical to SEQ ID NO: 205017
  chr18:56887502-56887704
  hyper

SEQ ID NO: 293133 - DNA, 43 bp, Homo sapiens
  chr18:56888694-56888737
  hyper
ttcctcactcccccacctacccgccccacaaaagccaactaca

SEQ ID NO: 293134 - DNA, 80 bp, Homo sapiens
  chr18:56934820-56934900
  hyper
catcctgaaagcacgcttagggacgggggttgtggggtggacgccccccccccccccgtgccaggacctgttggcgggca

SEQ ID NO: 293135 - DNA, 100 bp, Homo sapiens; identical to SEQ ID NO: 205019
  chr18:56976025-56976125
  hyper

SEQ ID NO: 293136 - DNA, 154 bp, Homo sapiens; identical to SEQ ID NO: 205020
  chr18:57069712-57069866
  hyper

SEQ ID NO: 293137 - DNA, 182 bp, Homo sapiens; identical to SEQ ID NO: 205021
  chr18:57069918-57070100
  hyper

SEQ ID NO: 293138 - DNA, 152 bp, Homo sapiens; identical to SEQ ID NO: 205022
  chr18:57363523-57363675
  hyper

SEQ ID NO: 293139 - DNA, 44 bp, Homo sapiens
  chr18:57365411-57365455
  hyper
tactgtttccacgccgcgcacatcagagctggaaacgccccccc

SEQ ID NO: 293140 - DNA, 100 bp, Homo sapiens
  chr18:57566993-57567093
  hyper
gccgagcgctctgcgccccccgccgcgggtcggcgccgccgcgggtcgggagcgtgtccgggcaggtcgcgctcagcggggtacttccccgcccgcgtcc

SEQ ID NO: 293141 - DNA, 255 bp, Homo sapiens; identical to SEQ ID NO: 130108
  chr18:57567153-57567408
  hyper

SEQ ID NO: 293142 - DNA, 163 bp, Homo sapiens; identical to SEQ ID NO: 239813
  chr18:57567942-57568105
  hyper

SEQ ID NO: 293143 - DNA, 60 bp, Homo sapiens
  chr18:59000631-59000691
  hyper
ggaatgaggacccgcggtacaggcaggcagcagccactcctgctagggaaggcgcgaggg

SEQ ID NO: 293144 - DNA, 162 bp, Homo sapiens; identical to SEQ ID NO: 239816
  chr18:59500717-59500879
  hyper

SEQ ID NO: 293145 - DNA, 92 bp, Homo sapiens; identical to SEQ ID NO: 205023
  chr18:59560076-59560168
  hyper

SEQ ID NO: 293146 - DNA, 664 bp, Homo sapiens
  chr18:59560572-59561236
  hyper
cgtttgcccctgtccgccacctcatcaagtcaccgccacctcatcaagtcaccgtcacctcatcaagtcaccgtcactctgctttggcgatttctctactctctccagacccaggcagcgctccccaagccatgccccgaccccaggcgggattggggaccgccgcttcccgagcagcgccccacgagtccagctggctttgtcctgccgctgtccttccaggagcaagcgccccaggcgcgtgtgtctgcacaaaagacccccaacatctggcccttcacagcgctctctaatcccgggaggggccctggggcaacttctagggctggagaaggcgcgagacaaggggaccgggagaagatgagccggggtgtgtgcgggccgggggcgcaactggggcgggcgcgcgcgcacgtgcacacccaggggcgcgcgcggcgcgggcacgaggaaagctccctcggaccggagctccagggggcatccgaggactcggccgagcagccgacagcgccgctccccgccgcggccgcccgcccaactccgccagctctcaggagacacgcaactcccgggaccacctcccccgtgccccgccagaccccgcgctcccctccccgggaccctgcggccccgccaccccctccgcggtccagaagatctc

SEQ ID NO: 293147 - DNA, 164 bp, Homo sapiens; identical to SEQ ID NO: 205025
  chr18:59992238-59992402
  hyper

SEQ ID NO: 293148 - DNA, 39 bp, Homo sapiens; identical to SEQ ID NO: 205026
  chr18:59992691-59992730
  hyper

SEQ ID NO: 293149 - DNA, 113 bp, Homo sapiens; identical to SEQ ID NO: 239819
  chr18:59992968-59993081
  hyper

SEQ ID NO: 293150 - DNA, 501 bp, Homo sapiens
  chr18:60189547-60190048
  hyper
cggccggccgggtcccgctgcgcacctcccggccgcgcgtccccacctgcgcacggtgcctccagcctgggcgtgggcgcggcccgggatcgcggcgccggggccgcaaaccggggccgcaaaccagcgccgccacccgcgtccggacccagtcccctgtgagcgacacctggcaaagtttcacaaggtgggagacagcccaccgccggctttcaggaagtgcactgggcggtgaggactcgaacgagctcgtcccggggctggcgcactcacttcggagaaacccctgctcccgggacgcgttcactccggccgcgcaggcagcccgggcaccactggcggaggcggggcggcagctggcaagcagaggagaatcaggagtccaaagccgggccagggccctcaggaaaggtgagagcggccgcgtccctccgctcacgtgggcctcgcacgctcctcaccgctcccgggctaccctcacgccgccccacggccccagcc

SEQ ID NO: 293151 - DNA, 1612 bp, Homo sapiens; identical to SEQ ID NO: 55170
  chr18:60190084-60191696
  hyper

SEQ ID NO: 293152 - DNA, 95 bp, Homo sapiens; identical to SEQ ID NO: 225665
  chr18:60191979-60192074
  hyper

SEQ ID NO: 293153 - DNA, 97 bp, Homo sapiens; identical to SEQ ID NO: 205029
  chr18:60194122-60194219
  hyper

SEQ ID NO: 293154 - DNA, 53 bp, Homo sapiens; identical to SEQ ID NO: 239822
  chr18:60382505-60382558
  hyper

SEQ ID NO: 293155 - DNA, 1435 bp, Homo sapiens; identical to SEQ ID NO: 205030
  chr18:60382939-60384374
  hyper

SEQ ID NO: 293156 - DNA, 150 bp, Homo sapiens; identical to SEQ ID NO: 239823
  chr18:60805530-60805680
  hyper

SEQ ID NO: 293157 - DNA, 97 bp, Homo sapiens
  chr18:60985401-60985498
  hyper
catctcccggttgacgctctccacacacatgaccccaccgaactcaaagaaggccacaatcctcccccagttcaccccgtccctgaagagctcctcc

SEQ ID NO: 293158 - DNA, 89 bp, Homo sapiens
  chr18:60985973-60986062
  hyper
gaagaggagttataatccagctattttattggatgtgctttgcattcttggacgagggggtgtcttcaatcacgcggaacacttgattc

SEQ ID NO: 293159 - DNA, 286 bp, Homo sapiens; identical to SEQ ID NO: 239825
  chr18:60986640-60986926
  hyper

SEQ ID NO: 293160 - DNA, 140 bp, Homo sapiens; identical to SEQ ID NO: 205033
  chr18:60987971-60988111
  hyper

SEQ ID NO: 293161 - DNA, 79 bp, Homo sapiens
  chr18:61603405-61603484
  hyper
agcgcaatgcagcgcgcgttcctcctcctgggcgcccatcctcggctgctgcctcttcctttcgggccccgggacctga

SEQ ID NO: 293162 - DNA, 200 bp, Homo sapiens
  chr18:61603701-61603901
  hyper
ggtctccttagggtgtatgaggtgtcccttgacccttctctccccgaagtggacatcaaggtgatcctccccccatgacctcctacccgtggcatcctgcgacccccacccccgctgccagcccagtcctcccaggagccctcgaggggagcacggggttggctgaggggatgggggagcttccgcggacacagtccagc

SEQ ID NO: 293163 - DNA, 220 bp, Homo sapiens
  chr18:61603985-61604205
  hyper
ggcgggcgagttcccgcaaggccagcgcggaagggaagaacacggtgtggggaggcaggggctcaggagggcgccatcagctggtgctcagagcccggaggaaggaactccccccggagttggggggggtggccctagggatgcctcaccggccccatctctccacggagctacgggtagcatcgcccatcgctcctacaccccacgcgccctggcccag

SEQ ID NO: 293164 - DNA, 366 bp, Homo sapiens
  chr18:63417370-63417736
  hyper
agggtcctctgtcccgcactgcgagtaaatcatacactttggaagtttagcattagagagcccagcaggggagaaaattgtctgcaagttaaaaaaaaaaaaaaaaaaaaagtagaactagggcagtccgaggagattgaaagggcaaaactatcaagcaagaaaactgtaagttctgattagttttatgactttgccttcatgcctcaggagctcaactgatcacggctttcacgacaggctaaggtgggtgttggaggggcagcttgaaaataccctcaaaactctcctccagctccgtgctttcagatgcaaatgcctcacggagagatggatgggctgcagcccctcctactttcacccctc

SEQ ID NO: 293165 - DNA, 620 bp, Homo sapiens
  chr18:63418336-63418956
  hyper
cgcccgggtccctggcgtctgacgccgtggggagggcagcgaggccccaggtgagtgtgtctgcctgcgcggggctggggaggcgccgctgggcagatgtgcgcccttgctgtgcgcctttggaagcaggactaatcagtgagcggagagcgggcggggatgtccgtgtggagtttcccttggcgtccccaagttactgcgtgttgcagtgagatgtggctctgcaaggcaggacaggcttgtggacggaggcgggggcgtttggcccggaaagccggtgttgacagacaccaggtgcgacacgaggagtagtagttgagggtaagagcaaatcccggcactctccaggtgcagcggcaaacatgggcaggctggagcactctcctcaaagaggaccacaagcaggctcctccctcaacctcggactgatgggggcacaactccgcgccggctgtgccgccgggttctgcagaggtctgaggctggaagggggtatgcgccgctttgggcaggagtcctttgaaccattcgctctggacaccttttacctttcgtgaaggtggagctcacttcagggtgctttgcttttttcccctgtaattagtattctgctgatctgg

SEQ ID NO: 293166 - DNA, 83 bp, Homo sapiens; identical to SEQ ID NO: 205036
  chr18:67069292-67069375
  hyper

SEQ ID NO: 293167 - DNA, 408 bp, Homo sapiens; identical to SEQ ID NO: 239834
  chr18:67872732-67873140
  hyper

SEQ ID NO: 293168 - DNA, 149 bp, Homo sapiens
  chr18:67955797-67955946
  hyper
cagggggacagggaccgcagccgccaaatccgcggggccggggaacgaggagactttcctttccgcgttagccggggccacccccgccagagggaaagcaccaaaggaaaaaccaggacagggactctgggggccggaggagcggcctc

SEQ ID NO: 293169 - DNA, 353 bp, Homo sapiens; identical to SEQ ID NO: 205037
  chr18:67956670-67957023
  hyper

SEQ ID NO: 293170 - DNA, 84 bp, Homo sapiens
  chr18:70208929-70209013
  hyper
gacagagcctgggaactccacgtccaagaagcctgaaccccagcccgcgcgcgcaggtccccgcccctctccccgggctggggg

SEQ ID NO: 293171 - DNA, 151 bp, Homo sapiens; identical to SEQ ID NO: 205038
  chr18:70210267-70210418
  hyper

SEQ ID NO: 293172 - DNA, 52 bp, Homo sapiens; identical to SEQ ID NO: 205039
  chr18:70210508-70210560
  hyper

SEQ ID NO: 293173 - DNA, 86 bp, Homo sapiens; identical to SEQ ID NO: 205040
  chr18:70211724-70211810
  hyper

SEQ ID NO: 293174 - DNA, 211 bp, Homo sapiens; identical to SEQ ID NO: 239840
  chr18:71815059-71815270
  hyper

SEQ ID NO: 293175 - DNA, 100 bp, Homo sapiens; identical to SEQ ID NO: 239841
  chr18:71815684-71815784
  hyper

SEQ ID NO: 293176 - DNA, 222 bp, Homo sapiens
  chr18:71958562-71958784
  hyper
gccgccgcgcagggcgctcccaggtgtgcacgcgcaggtgtacggattcggggagcgctcccaggtgtacacgcgcaggtgtgcggactcagggagcgctccccaggtgtgcacgcgcaggtgtgcggactcgaggagagcgcccaggtgtacactagcaggtgtgcggactcggggagcgctcccaggtgtgagcgcgcaggtgtgcggacttggggcggt

SEQ ID NO: 293177 - DNA, 442 bp, Homo sapiens
  chr18:72124285-72124727
  hyper
gcgggacctaccagcgcggccaggatgcgccggctcttctcgtcggtgcagcgctcggagaggacacccgggtgcgcgcggagcagcagcgcggccgccagcacccagcccgcggtccacgcggcgaaggcgaggagcgtgccccgcccgcagcgcccgcgcctcctgcaccacccggcagggccccgcgcgcccgccgcccgcgccatggccagccctgcccgcgcccgggccccaccgccgcccgcgccccgagttccgcactcgcgtagctgctccgcggctcaggcccgctcggcggggagggggaacgggggaggggccgcgcgagggttggggcaggccccgcgcctggggcggaggtgcggggagggcgtccagcagcagcaacaccccgcgcgccccgagcacccactgggggtccactcgccgcatcccctgc

SEQ ID NO: 293178 - DNA, 78 bp, Homo sapiens; identical to SEQ ID NO: 239844
  chr18:72163135-72163213
  hyper

SEQ ID NO: 293179 - DNA, 85 bp, Homo sapiens; identical to SEQ ID NO: 239845
  chr18:72167086-72167171
  hyper

SEQ ID NO: 293180 - DNA, 33 bp, Homo sapiens; identical to SEQ ID NO: 239846
  chr18:72265004-72265037
  hyper

SEQ ID NO: 293181 - DNA, 237 bp, Homo sapiens
  chr18:72921091-72921328
  hyper
tctgctcggctagggcgggcgggtccgcccctcctccggccggcgccctccccctggctccccccttccccgcgtcgcccgctcccgctccccccgcctccccggcgccggcgcagcccccgcgaacccgggcgcaccaccccgggtgtcccggcctggggaccgctgccgccccggccgctgctcctttaatctttttgttttggtttgaatctgctcggcgcagactggccaagg

SEQ ID NO: 293182 - DNA, 42 bp, Homo sapiens; identical to SEQ ID NO: 239849
  chr18:74162764-74162806
  hyper

SEQ ID NO: 293183 - DNA, 157 bp, Homo sapiens; identical to SEQ ID NO: 239850
  chr18:74163246-74163403
  hyper

SEQ ID NO: 293184 - DNA, 240 bp, Homo sapiens; identical to SEQ ID NO: 239851
  chr18:74202735-74202975
  hyper

SEQ ID NO: 293185 - DNA, 776 bp, Homo sapiens; identical to SEQ ID NO: 239852
  chr18:74203667-74204443
  hyper

SEQ ID NO: 293186 - DNA, 219 bp, Homo sapiens; identical to SEQ ID NO: 239853
  chr18:74206708-74206927
  hyper

SEQ ID NO: 293187 - DNA, 147 bp, Homo sapiens; identical to SEQ ID NO: 205044
  chr18:74207202-74207349
  hyper

SEQ ID NO: 293188 - DNA, 129 bp, Homo sapiens; identical to SEQ ID NO: 205045
  chr18:74843247-74843376
  hyper

SEQ ID NO: 293189 - DNA, 828 bp, Homo sapiens; identical to SEQ ID NO: 225683
  chr18:74844288-74845116
  hyper

SEQ ID NO: 293190 - DNA, 82 bp, Homo sapiens
  chr18:77153102-77153184
  hyper
aaaagctctcaagtgaccaccgctgtgggccagaatgcaaaactgcaggaacagaacattcgcaggaacagaacacagtcgt

SEQ ID NO: 293191 - DNA, 55 bp, Homo sapiens
  chr18:77153516-77153571
  hyper
aaatattggacggggtggatgaacacccaagtgcgctccaggagaagggatttgg

SEQ ID NO: 293192 - DNA, 308 bp, Homo sapiens
  chr18:77156454-77156762
  hyper
gagaacgaggtcggccgggtctgtgcgcccagggaggggcgcggcgcggaccgggaacggcgtcccccagctcccagcagcccggttccgagcgcgccttctgccaataggtgtctcctctgccccagcgctgagggcgcgaggcgaggccgccgcgggtcccgccgaggaagcggctcgcaggccggcgatttggggacgggcgaggctgggccgtcaggaccacagagggcacgtgggagggaggaagggaggcttccttgggagtgaaggatgccccgtgtcttcctgagcgaggcagagccacc

SEQ ID NO: 293193 - DNA, 57 bp, Homo sapiens
  chr18:77156828-77156885
  hyper
gtctccctcgcgccgcgcccctgaattccccagggccgagcccgtcacgccggctcc

SEQ ID NO: 293194 - DNA, 583 bp, Homo sapiens
  chr18:77160022-77160605
  hyper
ctggtgccgctcgtggggtcccgacgcccctacccccgggtccggaggagcctgcgccgggccgggacccccagggcacaagaggccgggggacccctgcggtcgcgcgcgcgcgagggggcgggggcgggggggacacgagtttatttaaaaactcgtgtccggggagtttatttaaaactcggaagccggcggccgcgagccggttgtttatgtaaacccggaaacgccccggggggcgggggcggggcggggacggggggaggggcgggggtcacgttacgcggaggacgcgcgggcagcgccgggagaaccgaacccctggcggccgcgaccccggctcccgccccggccccggcccgacccgccatgacggggctggaggaccaggagttcgacttcgagttcctcttcgagtttaaccagcgcgacgagggcgccgccgcggccgccccaggtgggtcagtcccggagggcgcggggggcgcggggccaggtcggggtttgggggcgcccaggccccctccgcgtcctcgtcgctccccggggaccccaggagtccccggcgcgcccgggaccgagg

SEQ ID NO: 293195 - DNA, 81 bp, Homo sapiens
  chr18:77160661-77160742
  hyper
cgagcgctcgcggcggggtcctgggggaagagcgcagcccggacacgggcgtggacgaagtggtcccggacagagggctgg

SEQ ID NO: 293196 - DNA, 356 bp, Homo sapiens
  chr18:77193428-77193784
  hyper
gcattgacacaggcttctccatctccatgtcaggacgtgcactcgccgatgaagtgtccacccaagatggcgacgggtgagcacgggcacgtgtggcccgggcgaggtctgtgtggtgctgaacgcctcctctgctctgttcccttccagcccgaccctgcccgccctggactggcagctgccgtcccactcaggcccgtatgagcttcggattgaggtgcagcccaagtcccaccaccgagcccactacgagacggagggcagccggggggccgtgaaggcgtcggccggaggacaccccatcgtgcaggtaggcactgcggccagactcgcacgtcacttggtgcttttgtggt

SEQ ID NO: 293197 - DNA, 31 bp, Homo sapiens
  chr18:77557777-77557808
  hyper
ctccgtgctccctccgagtggacttggcccc

SEQ ID NO: 293198 - DNA, 158 bp, Homo sapiens; identical to SEQ ID NO: 205049
  chr18:77710773-77710931
  hyper

SEQ ID NO: 293199 - DNA, 35 bp, Homo sapiens; identical to SEQ ID NO: 225692
  chr18:77712073-77712108
  hyper

SEQ ID NO: 293200 - DNA, 80 bp, Homo sapiens; identical to SEQ ID NO: 205050
  chr18:77724414-77724494
  hyper

SEQ ID NO: 293201 - DNA, 305 bp, Homo sapiens; identical to SEQ ID NO: 239866
  chr18:77748471-77748776
  hyper

SEQ ID NO: 293202 - DNA, 135 bp, Homo sapiens; identical to SEQ ID NO: 225693
  chr18:77794468-77794603
  hyper

SEQ ID NO: 293203 - DNA, 31 bp, Homo sapiens; identical to SEQ ID NO: 205051
  chr18:77867028-77867059
  hyper

SEQ ID NO: 293204 - DNA, 251 bp, Homo sapiens; identical to SEQ ID NO: 205052
  chr18:78004742-78004993
  hyper

SEQ ID NO: 293205 - DNA, 33 bp, Homo sapiens; identical to SEQ ID NO: 205053
  chr18:78005051-78005084
  hyper

SEQ ID NO: 293206 - DNA, 405 bp, Homo sapiens; identical to SEQ ID NO: 205054
  chr18:78005162-78005567
  hyper

SEQ ID NO: 293207 - DNA, 330 bp, Homo sapiens
  chr19:267237-267567
  hyper
cgctgcgctgcgctgtcaggacgcgcagttcccgccccgctgaagggacaccgttttacaacacgccgcgtagaccgtgacagggaagtaaggcccacggcagcgctccctcctcagcactcgcggccgcggacaggacgccttttcctcctcctctcacctggtgaccgggtgtcccgaaccgcggccgctcccgggcgggtcctgaagagaccgtggctccgtcttcccggtcgacgccccggggcgacgagtgcggatccgccgcggttcccgcgcgtgctccaggttgggcgggagccgggcgccccctcgcggcagtcctgggga

SEQ ID NO: 293208 - DNA, 384 bp, Homo sapiens
  chr19:290581-290965
  hyper
cagagcaaacactcggcctttgttcccgggaccctgcgggaggggggcctcgggatgcccattccgccagtgtggcccgcaaacccgccggacaggtttggttctcctggcctcccggccccccgccaccccgttcacccgaagcctgggacccagccttcatccccagtgtctcccccgcccgagccagcagggcggctgggcctccccgcacgtgcacgggttcgaatcccgccgacgcaccgggtgccaggaccgagggtcagccctctccgcgcgcagcgggagcgcccaccccaggggcggaggcgcggacgtcctgccggggtaacccgcggccgcccccacctcccgggcccgcgtgactcacctcccaggccaggc

SEQ ID NO: 293209 - DNA, 341 bp, Homo sapiens
  chr19:291052-291393
  hyper
ctcgcgacccccatccccctgggcctgggacgcggggacccccgagcctgggagggcgcgcgcagtgcggggcgcggagggaggtctggtcctcacgcgaggtccccgcctccagggtcctcggagggacgagggcgcgcagcctccgcgttcccctgcaaacttgcgcgcagccgggggcgtgtccgtcccgggagggtccccccaacacccgggtccccaaggctcttaccgaccagtaagcacagcacgtcgagcagcacgaagacccacctccgctgcatggtccccgcgacccccgacgccggtcccagcgcgtcccgtcgcgtcccggcccggcc

SEQ ID NO: 293210 - DNA, 78 bp, Homo sapiens
  chr19:294976-295054
  hyper
agaccccaaggacctggttccgactcaaggaagaacaaggacggtggtggcggaggggctccagagaactcgtaatgc

SEQ ID NO: 293211 - DNA, 102 bp, Homo sapiens; identical to SEQ ID NO: 130225
  chr19:384078-384180
  hyper

SEQ ID NO: 293212 - DNA, 178 bp, Homo sapiens; identical to SEQ ID NO: 205057
  chr19:460121-460299
  hyper

SEQ ID NO: 293213 - DNA, 153 bp, Homo sapiens; identical to SEQ ID NO: 205058
  chr19:460522-460675
  hyper

SEQ ID NO: 293214 - DNA, 405 bp, Homo sapiens
  chr19:460726-461131
  hyper
gggcgcggcgcagcggggctcgcaggcgcccaggacggcggccgccagcgccgggacgccccccgggcccgccggctcgggttgggggtccgcgccccccgaggccccagccgcccgcgccgccgccgggccgcggcccaggaagccgcccggggccgcgaacttccactgcggcattcggggcagcaacgcgcagaaggtggtgggcgcctcgggctcggggggcgcggggggcgccgggggcgcgcgcccgcccggaccctgcgtcatggccgcggccgcccgacggagcccgaccgggcgctgcgcctggcgcggaggaagccctcccgctccgcccgctccctcccgccccccggcccggtgatgtcatccgcccggcccagcgcgcagccgcggggggct

SEQ ID NO: 293215 - DNA, 601 bp, Homo sapiens
  chr19:461187-461788
  hyper
actgaggccctccgaggacaccgggcgctggcctggaacccgcagccaaggcgggacggggctttgaacccagaaccccgtcagcgaccctccccgctgcgccccccacccccgcccgccgcccaagttcgcagaaggaccgagctggagaagcttagaaattccacatcccttctttcccctatttcctagtggggaaactgaggccccgggaggcgcggccagggaaaagagaaccccagaccctaaggtcagcccctccctctccgttgttgcagctagaaggtaccttagggtcacccctatttcttagtggggaaactgaggcgcggggaggggaaggggcgcggccgagggctcacagacgaagctcaaacccaggagtgccggctcgggggtggggggggggggcggggctaggagcggagccgggcccctgctctgcggcctgtcccggcctcagtttctccggctgtaactcaggggagcgggctggagggtcgcggcccttcttccctcacttctggggagcccagtcccgcaccagctcatctgagctctgggcctcagcctcccaggccggtcgctccatccccagcct

SEQ ID NO: 293216 - DNA, 284 bp, Homo sapiens
  chr19:461846-462130
  hyper
cagaaaacggggtgtcactgtcaccccgggacccagcctcctggcccgacttggctggagctcccctgcacctgccccgccccaagcagggctgattgccgggaacaaagggaggggccgggacgcgctggcaggtggggagggagggaggggcgaggctgcccggagcccgatcgataattcaggggatgagatcacagccggcgccgcccgcggggccggggaggtgggggaggggagcgaggcgcgcggtcgcgatcggccgtctctgccgcggcgcgtgt

SEQ ID NO: 293217 - DNA, 41 bp, Homo sapiens; identical to SEQ ID NO: 205062
  chr19:507106-507147
  hyper

SEQ ID NO: 293218 - DNA, 58 bp, Homo sapiens; identical to SEQ ID NO: 205063
  chr19:591588-591646
  hyper

SEQ ID NO: 293219 - DNA, 408 bp, Homo sapiens; identical to SEQ ID NO: 205064
  chr19:603408-603816
  hyper

SEQ ID NO: 293220 - DNA, 173 bp, Homo sapiens; identical to SEQ ID NO: 205065
  chr19:603846-604019
  hyper

SEQ ID NO: 293221 - DNA, 159 bp, Homo sapiens; identical to SEQ ID NO: 239877
  chr19:633641-633800
  hyper

SEQ ID NO: 293222 - DNA, 237 bp, Homo sapiens
  chr19:639660-639897
  hyper
aaacgcgcggaggccgagcgcggagtcccgcacggccgcgcccctgtgcacctggcccccgcccccgagacgtcccattggccggcgccctagcctggtcccgcccaagtggaccccgcccccgccccgaggcaccccattggccggcgtccccgccccagcgaacccggccccgcccccgaggcgccccattggccccgccgcgcgaaggcagagccgcggacgcccgggagcgac

SEQ ID NO: 293223 - DNA, 31 bp, Homo sapiens
  chr19:640138-640169
  hyper
agtgagtgcggggcggcgggggcctggggtg

SEQ ID NO: 293224 - DNA, 178 bp, Homo sapiens
  chr19:660980-661158
  hyper
aaggaatctaccaacgtccatgattaaatatttgtcaatcactgttccatgctggctccctggccagcctgtaaattctgtgagggcaaagaccacagcggcctgtcaccacagagttcctttcactacaggaaggccctccccaggcccagtgacagtcggaggaggtcaaggtcct

SEQ ID NO: 293225 - DNA, 169 bp, Homo sapiens
  chr19:661417-661586
  hyper
ggaagaggcaagagcgagacccctgggagacagaggagtaaggcaaggctcagtctcagctccccaaccttcgccccacacccgagatttcactttatttgttcctcctgctggggaggggaagccctgtggcttcagtagagaggaaaccacacctctctctttccac

SEQ ID NO: 293226 - DNA, 310 bp, Homo sapiens
  chr19:661720-662030
  hyper
cttctggggggcttggacttctcttacgggtcaaagcgtagcaacagccgggcggctacgtacacagcacagtaaatcctcaatgcctgcagcctcttcccctgggcacagggtggggagtccagacccctccacctcctgcggctgctcccctcaagctggccaagcggctcccgactgagccggctctgccactttcccgctgagccaccacgcgcctcagtttccccatctataaagcacgggtggctcgactaaatcaccactttgcacgtcagcctggcgaagggcaacacgggttaaaaatgca

SEQ ID NO: 293227 - DNA, 88 bp, Homo sapiens; identical to SEQ ID NO: 239880
  chr19:676322-676410
  hyper

SEQ ID NO: 293228 - DNA, 132 bp, Homo sapiens
  chr19:680400-680532
  hyper
cgccacctaccgcgacgagtgcgagctgcgcgccgcgcgctgccgcggccacccggacctgagcgtcatgtaccggggccgctgccgcagtacgtgggggcgtggtctgtggaggggcggggcgggacctac

SEQ ID NO: 293229 - DNA, 287 bp, Homo sapiens
  chr19:813409-813696
  hyper
catgggttcggcgggcgcgcgcaggtgcccggggctggcgtcgtcgggcagccccaggccgcggccctccaggctcttctgcttccactcgctgatgagctgcttggagcgcgaggcgtccagcggcacgtggatggtcatgtggcggcgcgcggggtcgtccagcgagggcgcgctggccctgggcagcgtgtggctgaaggtcaccatgttctccttggccatggggctgcgcggggccagcaggtccacgtccacgctggcgcgcttcaggctgcccagcgagg

SEQ ID NO: 293230 - DNA, 336 bp, Homo sapiens
  chr19:813830-814166
  hyper
gcgggggccggggccgcgggcttctctgcaggtggggcctggaagttgcccaccgcgtggcaggcctgtcggggagaggggtctgggggtgaggcctggggctcagagggctcctcccctgtgatcgttggacttgccgcggggggctctggaccgggggtgggggctggcaagctcttgtccagtgggaccggttcccaccccaaggttgctgacccagcacatcgggcaggtctgagcccacgggattctgactccagcattccaagggcgagacacttcagcacccatgccttccccctaagaccccttcgggacccacgtctatcccctcag

SEQ ID NO: 293231 - DNA, 38 bp, Homo sapiens; identical to SEQ ID NO: 205069
  chr19:814391-814429
  hyper

SEQ ID NO: 293232 - DNA, 66 bp, Homo sapiens; identical to SEQ ID NO: 239882
  chr19:913485-913551
  hyper

SEQ ID NO: 293233 - DNA, 174 bp, Homo sapiens
  chr19:919387-919561
  hyper
gtgcctgagtgttcgcacacgtagggggatcagcagggcgggcggacagggcaggctcccaaccgcgcaggtggccacacgcccggctggcggctcccgcaggtctcggtgcaggccacgtgtgccactctgaccgccatgagtgtggaccgctggtacgtgacggtgttcccg

SEQ ID NO: 293234 - DNA, 518 bp, Homo sapiens
  chr19:919591-920109
  hyper
ctggcgctggctgtcagcctcagcatctgggtaggtgagtacagctcaggggcctcacgggagaaggcggacacgtcctagtgccctgggcgcccggagccacctgccgcctcggtccagcatctggaaaatgggcgcaatagctctgcctgcctagggccagcgaggctgcagacggggcgcccgggcctttgcagggtggctgggtgaacgcctcccggggaggcacgtgggggaccgctggttccccgagcggggtcttcatcctggcttgtggcacaggctctgcggcggtgtctgcgccggtgctcgccctgcaccgcctgtcacccgggccgcgcgcctactgcagtgaggccttccccagccgcgccctggagcgcgccttcgcactgtacaacctgctggcgctgtacctgctgccgctgctcgccacctgcgcctgctatgcggccatgctgcgccacctgggccgggtcgccgtgcgccccgcgcccgccgatagcgccctgcaggtg

SEQ ID NO: 293235 - DNA, 777 bp, Homo sapiens; identical to SEQ ID NO: 205070
  chr19:941804-942581
  hyper

SEQ ID NO: 293236 - DNA, 228 bp, Homo sapiens
  chr19:942807-943035
  hyper
agcaagtaagaacccgccttccgggaggagccccgtctggattggatggcatcgcccaaaactcacgtccacccagaacctcaagatgggactgcatttggaaatagggtctctgaagatgttagtttcagtgaggtcctgcagcgtacggtggccccaaatcccatgccggtcggttgtcctctaagggggaggtcacacctgtgatccccgcgctttggaaggcca

SEQ ID NO: 293237 - DNA, 83 bp, Homo sapiens; identical to SEQ ID NO: 239884
  chr19:982965-983048
  hyper

SEQ ID NO: 293238 - DNA, 31 bp, Homo sapiens; identical to SEQ ID NO: 239885
  chr19:984152-984183
  hyper

SEQ ID NO: 293239 - DNA, 160 bp, Homo sapiens
  chr19:1000337-1000497
  hyper
cggagcgcggagggcgcgtcggaacctggccggggccctccacccgcgccgtggtcccggtggttgcgccccgtggcgagcgacgccgacaactttgcgatggagtttgtgcgggcgctgtggctgggcctggcgctggcgctggggccggggtccgcgg

SEQ ID NO: 293240 - DNA, 370 bp, Homo sapiens
  chr19:1000630-1001000
  hyper
gctgccgcacaacctgagcttggagctggtggtcgccgcgccccccgcccgcgaccccgcctcgctgacccgcggcctgtgccaggcgctggtgcctccgggcgtggcggccctgctcgcctttcccgaggctcggcccgagctgctgcagctgcacttcctggcggcggccaccgagacccccgtgctcagcctgctgcggcgggaggcgcgcgcgcccctcggagccccggtacgcgggacgcccggagtcaggacgagggggacccggggcgggagcggggtcgggagccctggggacgtccggagtcaggatgggggtgccgggactacgcagggaagggggatcccgggacgctggacgggcccc

SEQ ID NO: 293241 - DNA, 90 bp, Homo sapiens; identical to SEQ ID NO: 239886
  chr19:1021293-1021383
  hyper

SEQ ID NO: 293242 - DNA, 275 bp, Homo sapiens; identical to SEQ ID NO: 239887
  chr19:1039817-1040092
  hyper

SEQ ID NO: 293243 - DNA, 36 bp, Homo sapiens; identical to SEQ ID NO: 239888
  chr19:1041004-1041040
  hyper

SEQ ID NO: 293244 - DNA, 162 bp, Homo sapiens; identical to SEQ ID NO: 225704
  chr19:1071620-1071782
  hyper

SEQ ID NO: 293245 - DNA, 365 bp, Homo sapiens; identical to SEQ ID NO: 225705
  chr19:1173036-1173401
  hyper

SEQ ID NO: 293246 - DNA, 33 bp, Homo sapiens; identical to SEQ ID NO: 225706
  chr19:1173617-1173650
  hyper

SEQ ID NO: 293247 - DNA, 968 bp, Homo sapiens
  chr19:1206691-1207659
  hyper
cgcagaccctgcaccgggcttggactcgcagccgggactgacgtgtagaacaatcgtttctgttggaagaagggtttttcccttccttttggggtttttgttgccttttttttttcttttttctttgtaaaattttggagaagggaagtcggaacacaaggaaggaccgctcacccgcggactcagggctggcggcgggactccaggaccctgggtccagcatggaggtggtggacccgcagcagctgggcatgttcacggagggcgagctgatgtcggtgggtatggacacgttcatccaccgcatcgactccaccgaggtcatctaccagccgcgccgcaagcgggccaagctcatcggcaagtacctgatgggggacctgctgggggaaggctcttacggcaaggtgaaggaggtgctggactcggagacgctgtgcaggagggccgtcaagatcctcaagaagaagaagttgcgaaggatccccaacggggaggccaacgtgaagaagtaagtatggcttgctggggtcggggccgggccgggccagtcacggtgctgatggttctgtcttccttccttctctcctccctccctcccttacttcctcttaacaccctgagctggacccgtctggcgcctgtgtcctccgtgccagggagagcgtggttgggggcctgcgttacggactttcactcaggcaaggccagttgtcgcagcggggcgtgcgtttgcatgggctcttggactccagttaaaatgccctggtagcgaaaccctcctgagaagggagcggcccccaatcccctaagactagccccttggctcccccagctgtccaaggagcagaggcgcccagtggaatcagcctgtgtttgtttgggccccgagagtttgtgtgcggccgccaacacgttttctgcgcagtgtgtggccgttaccggggccaggcgaaatgtgatttgtt

SEQ ID NO: 293248 - DNA, 195 bp, Homo sapiens; identical to SEQ ID NO: 239890
  chr19:1237439-1237634
  hyper

SEQ ID NO: 293249 - DNA, 53 bp, Homo sapiens; identical to SEQ ID NO: 130290
  chr19:1241589-1241642
  hyper

SEQ ID NO: 293250 - DNA, 67 bp, Homo sapiens; identical to SEQ ID NO: 205073
  chr19:1260499-1260566
  hyper

SEQ ID NO: 293251 - DNA, 204 bp, Homo sapiens; identical to SEQ ID NO: 239893
  chr19:1269059-1269263
  hyper

SEQ ID NO: 293252 - DNA, 87 bp, Homo sapiens; identical to SEQ ID NO: 239894
  chr19:1270262-1270349
  hyper

SEQ ID NO: 293253 - DNA, 174 bp, Homo sapiens; identical to SEQ ID NO: 239895
  chr19:1354508-1354682
  hyper

SEQ ID NO: 293254 - DNA, 47 bp, Homo sapiens
  chr19:1401653-1401700
  hyper
ggtcggggccccggccgccccctccccaaggagcctcggtgccccct

SEQ ID NO: 293255 - DNA, 242 bp, Homo sapiens; identical to SEQ ID NO: 205074
  chr19:1438211-1438453
  hyper

SEQ ID NO: 293256 - DNA, 149 bp, Homo sapiens
  chr19:1444964-1445113
  hyper
cgcttctcacatccccgcggcctcccccctggacggcagtttacactgaactcggcgccctcccctgacttctgaaggaggagtcctgggtggccccgaagcctccccggcagccgcacggctccgtccccgctccagggttcagctga

SEQ ID NO: 293257 - DNA, 97 bp, Homo sapiens
  chr19:1446334-1446431
  hyper
gaccaggtagggcgcgtgggtcgagccgttggggagggctccgggccgcgcaggaacggggcggggtccacaccgcgggaacagcgggcgcggcggc

SEQ ID NO: 293258 - DNA, 40 bp, Homo sapiens
  chr19:1447079-1447119
  hyper
ccatagcggcggtcaggcttcagggcgcggcctggaccgg

SEQ ID NO: 293259 - DNA, 133 bp, Homo sapiens; identical to SEQ ID NO: 205075
  chr19:1449908-1450041
  hyper

SEQ ID NO: 293260 - DNA, 118 bp, Homo sapiens; identical to SEQ ID NO: 205076
  chr19:1455093-1455211
  hyper

SEQ ID NO: 293261 - DNA, 126 bp, Homo sapiens; identical to SEQ ID NO: 205077
  chr19:1469945-1470071
  hyper

SEQ ID NO: 293262 - DNA, 92 bp, Homo sapiens; identical to SEQ ID NO: 55315
  chr19:1470383-1470475
  hyper

SEQ ID NO: 293263 - DNA, 278 bp, Homo sapiens
  chr19:1470675-1470953
  hyper
gggcctttgcggcgcgcaggggcgaagcctgtaatcactgcagccgccggtaattcgctaatgagggctttgcagggattgttttcattctcagccccagctgtgggagtgcgggtgggggtgtggccgagccccggcaggaagccccgcccagacggtgttcagggaacccggagcccaagcgctccggcggagcccaaaagggtgggggtgggaggggcagaggccaacggatccccctgcctgtcgcaccccttggcgggagacgggaaggcagc

SEQ ID NO: 293264 - DNA, 70 bp, Homo sapiens
  chr19:1471094-1471164
  hyper
gaggccaatggaaaggagactgaggggagtcccggcagtgagcccgaggccctgggacctggagcccgcg

SEQ ID NO: 293265 - DNA, 133 bp, Homo sapiens; identical to SEQ ID NO: 130328
  chr19:1490513-1490646
  hyper

SEQ ID NO: 293266 - DNA, 264 bp, Homo sapiens; identical to SEQ ID NO: 205080
  chr19:1491116-1491380
  hyper

SEQ ID NO: 293267 - DNA, 296 bp, Homo sapiens
  chr19:1491429-1491725
  hyper
catgggcctgggggtcgcagaccggactccttccccggctacggggtccggtccggccggtggagcgcgcgaggtgactgggacctcgaggtccgcccgcagcccttcccttgcccgcgccctgcgaccctgctcccgggccacccctctctagcttccgcccctggccgccccccgacgcctccttccgggcgctgggtgcctgccatgccgaagtccggttcttccagttgcccagtggccccagaggggtcgggatgccagtgtcctgcgcgtttcgccgtcccccttccccc

SEQ ID NO: 293268 - DNA, 202 bp, Homo sapiens; identical to SEQ ID NO: 239904
  chr19:1507917-1508119
  hyper

SEQ ID NO: 293269 - DNA, 183 bp, Homo sapiens; identical to SEQ ID NO: 205082
  chr19:1546217-1546400
  hyper

SEQ ID NO: 293270 - DNA, 375 bp, Homo sapiens; identical to SEQ ID NO: 205083
  chr19:1567149-1567524
  hyper

SEQ ID NO: 293271 - DNA, 99 bp, Homo sapiens; identical to SEQ ID NO: 205084
  chr19:1567554-1567653
  hyper

SEQ ID NO: 293272 - DNA, 104 bp, Homo sapiens; identical to SEQ ID NO: 225714
  chr19:1568463-1568567
  hyper

SEQ ID NO: 293273 - DNA, 89 bp, Homo sapiens; identical to SEQ ID NO: 239906
  chr19:1605604-1605693
  hyper

SEQ ID NO: 293274 - DNA, 37 bp, Homo sapiens; identical to SEQ ID NO: 239907
  chr19:1672517-1672554
  hyper

SEQ ID NO: 293275 - DNA, 182 bp, Homo sapiens; identical to SEQ ID NO: 239908
  chr19:1675933-1676115
  hyper

SEQ ID NO: 293276 - DNA, 195 bp, Homo sapiens
  chr19:1718940-1719135
  hyper
aggtcgatgggagcgggggcccaggctgcggtttacactgaatccacaaaaatcaccgaagcttgaaaagtgctcaataagccatcgatcgctctctgctgatcggtgccgccgccgcagcggggctggggggaaaggcggggcgagcagacccaggctccctgcctgtgccccacgcgggaccgcggccctgca

SEQ ID NO: 293277 - DNA, 99 bp, Homo sapiens
  chr19:1725427-1725526
  hyper
gcgggtggtgggaacgggattggaatcccgactgtggggcccctgcggccacctccaggatacagcggaccccgatgaagccctggcctgggtgctggg

SEQ ID NO: 293278 - DNA, 280 bp, Homo sapiens; identical to SEQ ID NO: 205085
  chr19:1748599-1748879
  hyper

SEQ ID NO: 293279 - DNA, 349 bp, Homo sapiens
  chr19:1748939-1749288
  hyper
ctgtcagccgagccctggagtggggcgttctccaggcccccaacccctgatccaggccgttcccctcccgcgcaccctccggcgggggctgcagcccgcgcccctcgccgccaagccccattttcccacagtgcaaactgcagcaaacgaactggttttctcctgagcgcacgctgcggggagacgattccaacggcgtccagtgaggaggggcccaggcctgcgagacggggcgcgttcctgtccccagacccctccggctgcgcctcaacccccagcccggctctctgacctgcatcggtcgggccgggcacagaggaggcaaagcaggcggaggccgcgagaggag

SEQ ID NO: 293280 - DNA, 200 bp, Homo sapiens
  chr19:1749318-1749518
  hyper
ccttcccctcgggcaccctcggacgcccccgccccagcgtgttactttctagatggggaaactgaggcgcggccagggcgatgcggcggaagtcccgcgcccggccgtctcccgcgcctgccagacagagccccgagaagagggcatagaattccctcctctaattgtgtcccagaactctgggacgacggaggccaagc

SEQ ID NO: 293281 - DNA, 220 bp, Homo sapiens
  chr19:1749556-1749776
  hyper
caacccctccgctccccggccagccgcggccgcccagcctcggtgccccggcgcaaacaagcgcggtgtttgccgagcgcgaggcgggcggcgcggcccgagagcgatgaggattcgatggagccgctcgccgcggcgggggcaacggagcccgggcgggcgcggggatcgatcgggcacagctgtcgcctaagagcccgcgggagcatccacccgcggg

SEQ ID NO: 293282 - DNA, 231 bp, Homo sapiens
  chr19:1751178-1751409
  hyper
ggccctcttcctctcggagtccctgaccctcgtcttctctttcaaaatggatgctttccctgctagaaaagccacacacgcttgctattaaaatgaacacgatcatcaagctgtaaaaaatatatttaaaaggaagcctgcaaaatcccagctccctaggagctcccccacattggcatttgggggaacttccttccaccttgttatcctcccacccgtagagacccccag

SEQ ID NO: 293283 - DNA, 133 bp, Homo sapiens
  chr19:1751497-1751630
  hyper
atctgtgattgttggagggtgagaatgaggagcgcaggctggggctctgtgcagccacatcccccccgccgagattcagcatctgcacggggagtggggtacgcgactgttcggacctgcccctctcttccca

SEQ ID NO: 293284 - DNA, 149 bp, Homo sapiens; identical to SEQ ID NO: 239913
  chr19:1752192-1752341
  hyper

SEQ ID NO: 293285 - DNA, 299 bp, Homo sapiens
  chr19:1753203-1753502
  hyper
aatcacacagagacgcgaaatcggagactctgggtcgaggcccccagccccacctgggcagagtctgtcctcggacccccgcccgctgtcccccgggtacggcctgccccagcgggcgcgggcgggcgcagtggccagggacgccgaagccccaagtctggccgacttcggcctgcttggtgctcgagtggggccggggcgggcggagagcgaggctgcgggaggcagcggtggcaggagcgggtgggcgggggcgctgacgtcagacccgggcccgggcgccggcggccgctcccctg

SEQ ID NO: 293286 - DNA, 227 bp, Homo sapiens; identical to SEQ ID NO: 205087
  chr19:1754950-1755177
  hyper

SEQ ID NO: 293287 - DNA, 378 bp, Homo sapiens
  chr19:1755227-1755605
  hyper
gctgtgtccccgaacgagctgctgttgtcggctaaggtgccactcccctcctccagagtgggtggagaggggctgttgagcccccagccccgggccacagagctccgagacgttgcggcgggcgcctgcagctcagcagcagaggccgagcccgcgctcatccccccacctgccccagcgcgcgcttctttgtagttcggccccgcgatcgataccccctccctctcccctccggccgctggcaaaggtcacccgagaatggcgggggaggggcggccccggggaccctcggcccgcgccgcccggaggccttcacaccccgacccggcgcccgccccgcgcagtttggtcgtggctcgggtgcgcgcgcccctgccc

SEQ ID NO: 293288 - DNA, 123 bp, Homo sapiens
  chr19:1757099-1757222
  hyper
cagaagggcaaaccgcaggcgagaagtcccatggggggggggtgggctccccgcagccgggtcagcagcacccagcacccgccctgagtggacaccgcctgcttcgcctgcacctgaccctgc

SEQ ID NO: 293289 - DNA, 187 bp, Homo sapiens
  chr19:1758062-1758249
  hyper
tcctgccgggcgccggggccaggacagagacggggacagggagggagaaagacccgcaggtgcagacggagagggagggggagacggggagatggagagagagggaggggtcgcgagacaaaaccagagagtggggagggagagaccgggagcgggagaaacagacggggagaagagaaaaagaagc

SEQ ID NO: 293290 - DNA, 94 bp, Homo sapiens
  chr19:1761759-1761853
  hyper
gggcagccttgggacacctacggcctcagttttccctctgccaagtaggtgctaatgtgagaggggctgagaaaccggcacccctcctgagtcc

SEQ ID NO: 293291 - DNA, 189 bp, Homo sapiens; identical to SEQ ID NO: 205090
  chr19:1761983-1762172
  hyper

SEQ ID NO: 293292 - DNA, 68 bp, Homo sapiens; identical to SEQ ID NO: 205091
  chr19:1762820-1762888
  hyper

SEQ ID NO: 293293 - DNA, 335 bp, Homo sapiens
  chr19:1763934-1764269
  hyper
cggctgcaatgaatacgtccggggcggatcattttacgagtgtgagtttatctgtggattaatttcccaataattgaaacgctgggtcagcctccccagcccctttctgggtggccgcttcagccgcttcttatcactgattcctttcctgtcatctttttcaaatccatttcccactgcaggcgctgtgtctccgtaacattttttttaaaaatcaacgccttgtgcgtgcgtgtgtttgcccactggctttgctcctgtttgagggtgcctgaatggggtgggtctctgtagctgaatgtccgagggtgagaggtgccccctgacacccccat

SEQ ID NO: 293294 - DNA, 119 bp, Homo sapiens
  chr19:1765514-1765633
  hyper
tcccaggcagccgccgcttcacgctgtcctgtgactgtgagtggaggccagctcctggagctgcctctctctggcctcacgcagcagctgctccctgaatggtgaatggatgagtcggt

SEQ ID NO: 293295 - DNA, 343 bp, Homo sapiens; identical to SEQ ID NO: 205092
  chr19:1766024-1766367
  hyper

SEQ ID NO: 293296 - DNA, 119 bp, Homo sapiens
  chr19:1768372-1768491
  hyper
agagaggcggctggtggtggatggggagagggaagcggctggaagagctcaggagcccaggaaggactggcctgcaccgggacatgcctgaagggggcgcactgtctttacaaaggaag

SEQ ID NO: 293297 - DNA, 88 bp, Homo sapiens; identical to SEQ ID NO: 205093
  chr19:1769649-1769737
  hyper

SEQ ID NO: 293298 - DNA, 312 bp, Homo sapiens; identical to SEQ ID NO: 205094
  chr19:1775735-1776047
  hyper

SEQ ID NO: 293299 - DNA, 223 bp, Homo sapiens; identical to SEQ ID NO: 205095
  chr19:1776743-1776966
  hyper

SEQ ID NO: 293300 - DNA, 295 bp, Homo sapiens; identical to SEQ ID NO: 239923
  chr19:1812452-1812747
  hyper

SEQ ID NO: 293301 - DNA, 34 bp, Homo sapiens; identical to SEQ ID NO: 239924
  chr19:1848728-1848762
  hyper

SEQ ID NO: 293302 - DNA, 346 bp, Homo sapiens; identical to SEQ ID NO: 239925
  chr19:1853355-1853701
  hyper

SEQ ID NO: 293303 - DNA, 108 bp, Homo sapiens; identical to SEQ ID NO: 205096
  chr19:1857456-1857564
  hyper

SEQ ID NO: 293304 - DNA, 384 bp, Homo sapiens; identical to SEQ ID NO: 239927
  chr19:1862236-1862620
  hyper

SEQ ID NO: 293305 - DNA, 76 bp, Homo sapiens; identical to SEQ ID NO: 239928
  chr19:1864237-1864313
  hyper

SEQ ID NO: 293306 - DNA, 360 bp, Homo sapiens; identical to SEQ ID NO: 239929
  chr19:1874693-1875053
  hyper

SEQ ID NO: 293307 - DNA, 170 bp, Homo sapiens
  chr19:1876315-1876485
  hyper
cgccaccgcctggtcgcgcgacacaggctgaaccctgcccaaccctaaggtggacaacaggccaccggttcccgagtcctcccggtcctaagccttctgccctagagatcgtaggaactcttctcgtgatcccagctccagtgtcggctccctcttccaggggagaccct

SEQ ID NO: 293308 - DNA, 156 bp, Homo sapiens; identical to SEQ ID NO: 130373
  chr19:1876538-1876694
  hyper

SEQ ID NO: 293309 - DNA, 456 bp, Homo sapiens; identical to SEQ ID NO: 239930
  chr19:1941691-1942147
  hyper

SEQ ID NO: 293310 - DNA, 119 bp, Homo sapiens; identical to SEQ ID NO: 205097
  chr19:1979018-1979137
  hyper

SEQ ID NO: 293311 - DNA, 101 bp, Homo sapiens; identical to SEQ ID NO: 239931
  chr19:2163579-2163680
  hyper

SEQ ID NO: 293312 - DNA, 755 bp, Homo sapiens
  chr19:2164918-2165673
  hyper
tgggacttctccccgatcttgagtgggcaggattgggctcacccccggagttagtaaattttgtcttcttcatcttggtgaccgttggaaaatgacaggccgggtggaatgttacagaggcaccccaccgggtggttccagaaacccgcgtgcggctcccggggtgcgagtcccggcgtggcccctgaggaggcggggcgcgtgcgtccgcgcttgggaccctctggccacgctccgggctgggcagggcgcgttttcggggaaaagtgaagcaggcgctgtcagcgagcgtgtccggggcgcgagttttggggggcgcgtctgcagggcccggccgggcatccccgcgcgccctgggactcccgcgcgcgctgggcttgtgtcagtttttggaaacgtgctcgctgggggcggggtcaggacgcggagagcgctggggagcccgggctggctcactgccccgggtcggtgcgagtggatgggagagggagcgcagcttccagcctggccgcacgtcccgcgcgcggggctggcggggtagggccctggggctctggcttctctggttgggcagctccgggtgtgcgcctgggcggcctgagccgggatcccgccaggagaggtcctaggacaaaaactgaaagcagaggccgcgcttcagcgccccgaccggtttcctccctcgaaagttcaaactccagaacccttccagcctccacttctctctgttgggctctcatcgttttaggtggtag

SEQ ID NO: 293313 - DNA, 143 bp, Homo sapiens; identical to SEQ ID NO: 239934
  chr19:2168520-2168663
  hyper

SEQ ID NO: 293314 - DNA, 443 bp, Homo sapiens; identical to SEQ ID NO: 205099
  chr19:2168903-2169346
  hyper

SEQ ID NO: 293315 - DNA, 187 bp, Homo sapiens; identical to SEQ ID NO: 239936
  chr19:2236299-2236486
  hyper

SEQ ID NO: 293316 - DNA, 49 bp, Homo sapiens; identical to SEQ ID NO: 239938
  chr19:2269132-2269181
  hyper

SEQ ID NO: 293317 - DNA, 315 bp, Homo sapiens; identical to SEQ ID NO: 239939
  chr19:2270793-2271108
  hyper

SEQ ID NO: 293318 - DNA, 217 bp, Homo sapiens
  chr19:2273764-2273981
  hyper
gccgtgttactggccgcccctagggacctgcagcgccgttcggggcagcagcacttccggcggggtcgtggcctggagcgcttccgggtctgcaaccccgccgtctgcccggccgcagcgccacctgccggccgcatccgggagcgccacccggaaaatcagggccaggcctggccgggaaaccggctggaaagaggaggaaaggaggaactcgaaa

SEQ ID NO: 293319 - DNA, 49 bp, Homo sapiens
  chr19:2302510-2302559
  hyper
cgcgaagccggagctggggttggcgaccgagaaccttcctgcctcccct

SEQ ID NO: 293320 - DNA, 122 bp, Homo sapiens
  chr19:2302951-2303073
  hyper
cagcggcttccacgcagacgcccgcagcaccacagcctgtgcacggcgcatccacgccctgttacaaatgttccattcaacgccttctagcacattcacagatcgtccgcccgcacctctag

SEQ ID NO: 293321 - DNA, 276 bp, Homo sapiens
  chr19:2328966-2329242
  hyper
cctttccccgcctcggaggccctccgccgctgcagcgccactcacttcccaccgggtctgaaatttgtgccccctccatcctccggttctgcttctccgtttcggggtctccagttgccgccggggacgcctctctccggctctgtggccttgagcaggcggctgcccacccctctccgagcctcagtttccccttaggcggaacgggcacggtgctaagctaacctcaccctagggggtgcggtgggggaacccagaggcgtcccgcgcgtcccc

SEQ ID NO: 293322 - DNA, 625 bp, Homo sapiens; identical to SEQ ID NO: 239943
  chr19:2461978-2462603
  hyper

SEQ ID NO: 293323 - DNA, 52 bp, Homo sapiens; identical to SEQ ID NO: 205102
  chr19:2462945-2462997
  hyper

SEQ ID NO: 293324 - DNA, 84 bp, Homo sapiens; identical to SEQ ID NO: 239945
  chr19:2476063-2476147
  hyper

SEQ ID NO: 293325 - DNA, 37 bp, Homo sapiens; identical to SEQ ID NO: 205103
  chr19:2488411-2488448
  hyper

SEQ ID NO: 293326 - DNA, 432 bp, Homo sapiens
  chr19:2488689-2489121
  hyper
agcagctcagcaaaagcgtgactcagtttccctcgtccataaaagggaaagccgaatcgccctcccacgtgtcgaggtgaaactagacagtgcactaaggcacttagcaaaacgcgctgccttgagaacccttattacgccttccttccttccacctcaccccctggccagacactctgggggtggagaggggcgctgacccaggccccagacgcccctcccgtccgccctccctagcaggcaggagtcccggctttcccgttccttaaattggataattggagacagaggcgggtgctcgagacggagaaatccccaagtgggcgaaaggcaaggggcctgtcctagtttccctgcactgggggcccccaccctcgccagcgctccctccggtgcgccctgggcgcgcagtctgtgcgctcgggagccccc

SEQ ID NO: 293327 - DNA, 608 bp, Homo sapiens; identical to SEQ ID NO: 205105
  chr19:2579151-2579759
  hyper

SEQ ID NO: 293328 - DNA, 178 bp, Homo sapiens
  chr19:2598981-2599159
  hyper
tttctagcatacagttccaccgagggcccatgatgaagagggggagaggcgggcacgaggcgaagcgggtgccccgcgctcggctggaaaaagccaatgtcaccgggctgtgctatttgcttgtgggagggacgcctggggtgggggcgtgccgctggttgctccgccgcagacacca

SEQ ID NO: 293329 - DNA, 74 bp, Homo sapiens
  chr19:2702443-2702517
  hyper
ttcgaccccctaagcgcagccccgtccccaattccaaccccagcctccagttgcagcccgggtccccagaccca

SEQ ID NO: 293330 - DNA, 467 bp, Homo sapiens
  chr19:2702553-2703020
  hyper
tccgcagccgaatccgagctgtcccagtcccctctccgggacgccggccgcgccctcacttcccctggcccggttcgcgggcgcccttacctgcgctcgggccccgcggccgcctcagccccgccgcgcagccgaaccctccgccccggcccgcgagcgctcgctcccctctgcgggggcggggccgacactcggggggcgggccctggcgtcccggcaaggccaatcgcgagccccggctgcgggaggccggagcgggggcggggcgcggggcaggcagcggggtaggctgcgcccaggagagtggggcggggctccgggcgcgggcggggccgggggcggggcgaagagcggctttccagggtgacttcgtgacgtcaggaaggcgcgagtagtttcgcgagttcgaatcccgcgctaggtgagctggttcgaatcctgcatgccagctccgggggctcatttgc

SEQ ID NO: 293331 - DNA, 314 bp, Homo sapiens; identical to SEQ ID NO: 239950
  chr19:2740072-2740386
  hyper

SEQ ID NO: 293332 - DNA, 292 bp, Homo sapiens; identical to SEQ ID NO: 239952
  chr19:2783367-2783659
  hyper

SEQ ID NO: 293333 - DNA, 196 bp, Homo sapiens; identical to SEQ ID NO: 239953
  chr19:2819627-2819823
  hyper

SEQ ID NO: 293334 - DNA, 131 bp, Homo sapiens; identical to SEQ ID NO: 239954
  chr19:2900632-2900763
  hyper

SEQ ID NO: 293335 - DNA, 835 bp, Homo sapiens; identical to SEQ ID NO: 205108
  chr19:2944614-2945449
  hyper

SEQ ID NO: 293336 - DNA, 632 bp, Homo sapiens; identical to SEQ ID NO: 205109
  chr19:2950418-2951050
  hyper

SEQ ID NO: 293337 - DNA, 141 bp, Homo sapiens; identical to SEQ ID NO: 205110
  chr19:2977372-2977513
  hyper

SEQ ID NO: 293338 - DNA, 211 bp, Homo sapiens; identical to SEQ ID NO: 239958
  chr19:3036207-3036418
  hyper

SEQ ID NO: 293339 - DNA, 121 bp, Homo sapiens; identical to SEQ ID NO: 205111
  chr19:3061487-3061608
  hyper

SEQ ID NO: 293340 - DNA, 87 bp, Homo sapiens; identical to SEQ ID NO: 205112
  chr19:3094304-3094391
  hyper

SEQ ID NO: 293341 - DNA, 174 bp, Homo sapiens; identical to SEQ ID NO: 205113
  chr19:3094777-3094951
  hyper

SEQ ID NO: 293342 - DNA, 217 bp, Homo sapiens; identical to SEQ ID NO: 239961
  chr19:3098866-3099083
  hyper

SEQ ID NO: 293343 - DNA, 185 bp, Homo sapiens; identical to SEQ ID NO: 239962
  chr19:3275828-3276013
  hyper

SEQ ID NO: 293344 - DNA, 50 bp, Homo sapiens
  chr19:3285993-3286043
  hyper
cgcccctcctgcagcagcagcagcgagaaggtgaggcggccgcaacctcc

SEQ ID NO: 293345 - DNA, 98 bp, Homo sapiens
  chr19:3286084-3286182
  hyper
caggctccgtgtctggcccgggcctctgggacccgcggggctgagagtgcggcctgggggctggacaggccagagttgagtcccggtgcagccgctga

SEQ ID NO: 293346 - DNA, 234 bp, Homo sapiens
  chr19:3360718-3360952
  hyper
ctgggcgactgtgcgcgcgtccctgcgggacggtgttgtgaaactatggctgggctgcgtgtccgcggagccgcgtgtccctgggtgaccgtggggtgtccccgtgtgggtgtgtggcggttggggggggtcgccagggagtggagaactgtcgagtggccgcgttccaggggacagttgggtgccgcttgctgtgtgcgagtgactggcgctgagcctccccctagggaaggg

SEQ ID NO: 293347 - DNA, 481 bp, Homo sapiens; identical to SEQ ID NO: 225733
  chr19:3367271-3367752
  hyper

SEQ ID NO: 293348 - DNA, 38 bp, Homo sapiens; identical to SEQ ID NO: 239966
  chr19:3500930-3500968
  hyper

SEQ ID NO: 293349 - DNA, 148 bp, Homo sapiens; identical to SEQ ID NO: 205115
  chr19:3506425-3506573
  hyper

SEQ ID NO: 293350 - DNA, 33 bp, Homo sapiens; identical to SEQ ID NO: 239968
  chr19:3572855-3572888
  hyper

SEQ ID NO: 293351 - DNA, 57 bp, Homo sapiens; identical to SEQ ID NO: 225734
  chr19:3573237-3573294
  hyper

SEQ ID NO: 293352 - DNA, 326 bp, Homo sapiens; identical to SEQ ID NO: 239969
  chr19:3573529-3573855
  hyper

SEQ ID NO: 293353 - DNA, 269 bp, Homo sapiens
  chr19:3585428-3585697
  hyper
ccctgcgcaccccgcggtgtcgccttcccgggaggctcgggttcccagatccccttacccgggcgtctcggctgtcgcgccctgggccgggggaggggaggctgcaggaagcggcggatccggcggcggcggcgagggcccgggtgggtggccgaacttctcccgccatggagggagcagcggcccgggaggcccgggggaccgagaccccgcgcgcgtctgcgcccccgcccgcgccctcggagcccccggccgcgccccgcgcccgc

SEQ ID NO: 293354 - DNA, 118 bp, Homo sapiens
  chr19:3606360-3606478
  hyper
accatgccacccgccgggccacacaggggacacctggcacctggccgctgtcaccgcgggctttgcgacacacccacagcagggcagggccagcgccggatgcgcccagcagcccggg

SEQ ID NO: 293355 - DNA, 489 bp, Homo sapiens; identical to SEQ ID NO: 225737
  chr19:3606743-3607232
  hyper

SEQ ID NO: 293356 - DNA, 139 bp, Homo sapiens
  chr19:3670990-3671129
  hyper
cgtgatgtttgggttggcggcccgggagcagaacaattcacggttttacgtccagggtgtgggggaaggaaaagaagagagggcaggaagccagcggtgggccggggcgggacgttccagacctcatcgggggcccggg

SEQ ID NO: 293357 - DNA, 72 bp, Homo sapiens
  chr19:3671894-3671966
  hyper
agccaccccgttttcgaggaaattaggttttaaaaatagtcgggggaggaaaggcgagccgcgctgcggagc

SEQ ID NO: 293358 - DNA, 56 bp, Homo sapiens; identical to SEQ ID NO: 130472
  chr19:3672066-3672122
  hyper

SEQ ID NO: 293359 - DNA, 72 bp, Homo sapiens; identical to SEQ ID NO: 239970
  chr19:3700599-3700671
  hyper

SEQ ID NO: 293360 - DNA, 76 bp, Homo sapiens; identical to SEQ ID NO: 205116
  chr19:3721511-3721587
  hyper

SEQ ID NO: 293361 - DNA, 228 bp, Homo sapiens; identical to SEQ ID NO: 239972
  chr19:3761495-3761723
  hyper

SEQ ID NO: 293362 - DNA, 188 bp, Homo sapiens; identical to SEQ ID NO: 239973
  chr19:3762567-3762755
  hyper

SEQ ID NO: 293363 - DNA, 66 bp, Homo sapiens; identical to SEQ ID NO: 205117
  chr19:3785491-3785557
  hyper

SEQ ID NO: 293364 - DNA, 52 bp, Homo sapiens
  chr19:3801382-3801434
  hyper
ggcatcttagcggccgcctctcgctcctgtccgtgaccttgcagatgcaggt

SEQ ID NO: 293365 - DNA, 181 bp, Homo sapiens
  chr19:3801708-3801889
  hyper
acgggtcaggagcgaccgcgtttcaggcccgtggactccgcagcccagacggtccatccatctgcaccgaatcccttcgctaaccaactgcttgattttgctgtcgcgccgcctaaacttggttttttggagttgctaggagggccgacttaactctttgtcagccgggctggttttcacc

SEQ ID NO: 293366 - DNA, 107 bp, Homo sapiens
  chr19:3868744-3868851
  hyper
ctcagccggagccccggagcccgcatcccgcccggtgcctaacctgaggccgccccgcctgcttctcccggcgccgcggcttccctcaggccggggttccaggttgg

SEQ ID NO: 293367 - DNA, 178 bp, Homo sapiens; identical to SEQ ID NO: 205118
  chr19:3970722-3970900
  hyper

SEQ ID NO: 293368 - DNA, 35 bp, Homo sapiens
  chr19:3971170-3971205
  hyper
tggccggtgcgcccgccgctcgtgccgcacctcga

SEQ ID NO: 293369 - DNA, 191 bp, Homo sapiens; identical to SEQ ID NO: 130492
  chr19:3971241-3971432
  hyper

SEQ ID NO: 293370 - DNA, 40 bp, Homo sapiens
  chr19:4053794-4053834
  hyper
tgtgtaggtgacgtgcatgtgtctgtgcgtgtacgtgtct

SEQ ID NO: 293371 - DNA, 265 bp, Homo sapiens; identical to SEQ ID NO: 205120
  chr19:4054040-4054305
  hyper

SEQ ID NO: 293372 - DNA, 55 bp, Homo sapiens; identical to SEQ ID NO: 205121
  chr19:4054380-4054435
  hyper

SEQ ID NO: 293373 - DNA, 170 bp, Homo sapiens; identical to SEQ ID NO: 205122
  chr19:4054471-4054641
  hyper

SEQ ID NO: 293374 - DNA, 541 bp, Homo sapiens; identical to SEQ ID NO: 205123
  chr19:4054917-4055458
  hyper

SEQ ID NO: 293375 - DNA, 46 bp, Homo sapiens; identical to SEQ ID NO: 239980
  chr19:4064373-4064419
  hyper

SEQ ID NO: 293376 - DNA, 97 bp, Homo sapiens; identical to SEQ ID NO: 205124
  chr19:4064872-4064969
  hyper

SEQ ID NO: 293377 - DNA, 87 bp, Homo sapiens; identical to SEQ ID NO: 239981
  chr19:4066804-4066891
  hyper

SEQ ID NO: 293378 - DNA, 212 bp, Homo sapiens; identical to SEQ ID NO: 130504
  chr19:4182605-4182817
  hyper

SEQ ID NO: 293379 - DNA, 38 bp, Homo sapiens
  chr19:4246831-4246869
  hyper
tacaaaattttaacgagccgctgcccgcttctaggggg

SEQ ID NO: 293380 - DNA, 212 bp, Homo sapiens; identical to SEQ ID NO: 130509
  chr19:4246926-4247138
  hyper

SEQ ID NO: 293381 - DNA, 176 bp, Homo sapiens
  chr19:4278909-4279085
  hyper
cctctgctggtcaatttcaccccttttggcggtcaagtgcagtcccccatttcccgggcaatttccccctcccctccttctccctctcccctcccctccccagcagtgtcactcccagctgctccccacctcccgcgctccgcgctcgctgcggccagtctcgggcgtcccggtca

SEQ ID NO: 293382 - DNA, 352 bp, Homo sapiens
  chr19:4279785-4280137
  hyper
tgcgaggtccccccttcccccgcggtgcttcccaagctgggctaaggcgggcttctcttcctccctcctctgtcgcctccttttcctccccctcgttcaccttttccttccctctatccatccagagccccgccaaagggcgcacctgatctttctcatccttccctgctcttcccttcctctccacctcctcctcctccttggggaaaggggcccggagaagggcatgtgggggcccctctgacagtggcccgattggggtgacaggcgcccaaatggccaagtggctacgggactacctgagctttgggggtcggaggccccctccgcagccgcccaccccggactacac

SEQ ID NO: 293383 - DNA, 34 bp, Homo sapiens; identical to SEQ ID NO: 205126
  chr19:4304684-4304718
  hyper

SEQ ID NO: 293384 - DNA, 149 bp, Homo sapiens; identical to SEQ ID NO: 239986
  chr19:4402295-4402444
  hyper

SEQ ID NO: 293385 - DNA, 148 bp, Homo sapiens; identical to SEQ ID NO: 205127
  chr19:4432845-4432993
  hyper

SEQ ID NO: 293386 - DNA, 185 bp, Homo sapiens; identical to SEQ ID NO: 205128
  chr19:4471582-4471767
  hyper

SEQ ID NO: 293387 - DNA, 150 bp, Homo sapiens; identical to SEQ ID NO: 205129
  chr19:4472045-4472195
  hyper

SEQ ID NO: 293388 - DNA, 248 bp, Homo sapiens; identical to SEQ ID NO: 225751
  chr19:4523781-4524029
  hyper

SEQ ID NO: 293389 - DNA, 95 bp, Homo sapiens; identical to SEQ ID NO: 239989
  chr19:4558485-4558580
  hyper

SEQ ID NO: 293390 - DNA, 452 bp, Homo sapiens
  chr19:4580776-4581228
  hyper
cgcccaaggtgcggcggccggacgcgaagtggggcggaggggcctcccagtgccaggacccccacaccagccccgggtcgcctcgacttggctctcaggaccccgccccccaacgccacccccaacccccgaccaacaggccccctgcctgccccgaaccccccacctgggccccaatccagctccccagcggcgcagccgcgagcctcattattgtgtcttctccgggcccccccaggacaaaatctccacccgctgcggtgccgacagaacccccaacctagctgcacatacaggcccccagtcaacaatccaagcgccccccccacgttgcggtgccattagacacccccataatggaggctcagggagcgccccaggccaaaatccagcccctccaaagcgatgccaccggacccccaccggatccctccatacggccagcgaccccc

SEQ ID NO: 293391 - DNA, 166 bp, Homo sapiens; identical to SEQ ID NO: 239991
  chr19:4636194-4636360
  hyper

SEQ ID NO: 293392 - DNA, 177 bp, Homo sapiens; identical to SEQ ID NO: 205130
  chr19:4639830-4640007
  hyper

SEQ ID NO: 293393 - DNA, 179 bp, Homo sapiens; identical to SEQ ID NO: 239993
  chr19:4669764-4669943
  hyper

SEQ ID NO: 293394 - DNA, 77 bp, Homo sapiens; identical to SEQ ID NO: 205131
  chr19:4769517-4769594
  hyper

SEQ ID NO: 293395 - DNA, 176 bp, Homo sapiens; identical to SEQ ID NO: 239995
  chr19:4791538-4791714
  hyper

SEQ ID NO: 293396 - DNA, 131 bp, Homo sapiens
  chr19:4815776-4815907
  hyper
catgtgattatattctggccaatgggatgagggcaaaggccggtctatgccctccaagaagaggcgtgcacttcccgcttcctgttcccttttgcgggagcgggagccacgtgttttataacaaatagcca

SEQ ID NO: 293397 - DNA, 83 bp, Homo sapiens; identical to SEQ ID NO: 239997
  chr19:4831871-4831954
  hyper

SEQ ID NO: 293398 - DNA, 623 bp, Homo sapiens; identical to SEQ ID NO: 239998
  chr19:4867023-4867646
  hyper

SEQ ID NO: 293399 - DNA, 132 bp, Homo sapiens; identical to SEQ ID NO: 239999
  chr19:4867954-4868086
  hyper

SEQ ID NO: 293400 - DNA, 303 bp, Homo sapiens
  chr19:5293673-5293976
  hyper
gttcccctcccagtctgggtgggaccggaggcacggtgatgggggcggggggcgtcccctcttccccctcttagaccagagggtaggggagaggtgcgggcgcagaggcttccctcccgctgggggtccaggggaatgaatggggggacaccgtggcagaggcccccaccctcgccacaagcctgaggagggggcggagagcacagggccagattggaaacagatggggccgccgtgccaggcccgcgacaccggagcagagggagaggaggagggagagggaggggcagacctgtccgggcg

SEQ ID NO: 293401 - DNA, 38 bp, Homo sapiens; identical to SEQ ID NO: 240001
  chr19:5313531-5313569
  hyper

SEQ ID NO: 293402 - DNA, 72 bp, Homo sapiens
  chr19:5338674-5338746
  hyper
acagaaggcaggcgcgattggcagggggaggggggcacaaaggaagggaccctgggagggggaggggactta

SEQ ID NO: 293403 - DNA, 549 bp, Homo sapiens
  chr19:5339889-5340438
  hyper
gtgctgggcgtgcgcgtctgcctgccagagcccctggggctgggggctgaggctcgcccctgggtggggaggctggaagggggcgccgaggccgcagaagggtggggcaatgcccgagtgccggaggggcgacctcccataaggcaacgacagggcccggagtgttccaggggagacggcgtagactagggggtctccaggggagggagacccggagagggaaggcggcgggcgcagcagccctggagccaccccgcctggagccacccgtcccggctcctctccgctccggggcgcccgcatgccccccatcccccggcacagcgccccctgcctccaggacccgcccggggacccgggccgggcgccgccggggccggcaccggctccgcacacacgcgcgcccccctccgcgcctctgccccgcccgcagcccggggtggtgcagccggcggcgctgggcagcttccaatgccgcgctctgggcgcttccagcccagccccctcccacgccgcggacgaagcccccccagcaccccctgccgagcg

SEQ ID NO: 293404 - DNA, 124 bp, Homo sapiens; identical to SEQ ID NO: 240005
  chr19:5436796-5436920
  hyper

SEQ ID NO: 293405 - DNA, 373 bp, Homo sapiens; identical to SEQ ID NO: 240006
  chr19:5536537-5536910
  hyper

SEQ ID NO: 293406 - DNA, 430 bp, Homo sapiens
  chr19:5567703-5568133
  hyper
agccgtcctgcaggcgcgcgtcgcgcaccgtctggtggtcgtccagccgccgcgcgttgtagtagaaggcgcgcttccaggagctcacgccctggcccaccagctgggcgcgcaggtcgctgagcgtgtcccgcggccgcacggtcagcggtagcagcagcgcctcgtccgccaggtgcaccttgatgtggtagcgcttccagcgcgacagcccccgccgcagcccctccatggcgcccgcccggctccggctccagctctggccccgggccccgagcgccccgcgcacccgcccgactagcctggccgcccgcccccgccgcgcccgcgctccgcccgcccggacacgcccggcacgcagtgggcaggcccggcccggcggggcggggcgggtgccacggtcccctcaggcgtccgctccccactgctg

SEQ ID NO: 293407 - DNA, 453 bp, Homo sapiens; identical to SEQ ID NO: 205135
  chr19:5608066-5608519
  hyper

SEQ ID NO: 293408 - DNA, 444 bp, Homo sapiens; identical to SEQ ID NO: 240008
  chr19:5680742-5681186
  hyper

SEQ ID NO: 293409 - DNA, 424 bp, Homo sapiens; identical to SEQ ID NO: 240009
  chr19:5686659-5687083
  hyper

SEQ ID NO: 293410 - DNA, 103 bp, Homo sapiens; identical to SEQ ID NO: 205136
  chr19:5691108-5691211
  hyper

SEQ ID NO: 293411 - DNA, 141 bp, Homo sapiens; identical to SEQ ID NO: 205137
  chr19:5804852-5804993
  hyper

SEQ ID NO: 293412 - DNA, 110 bp, Homo sapiens; identical to SEQ ID NO: 205138
  chr19:5828315-5828425
  hyper

SEQ ID NO: 293413 - DNA, 154 bp, Homo sapiens; identical to SEQ ID NO: 240012
  chr19:5892118-5892272
  hyper

SEQ ID NO: 293414 - DNA, 302 bp, Homo sapiens; identical to SEQ ID NO: 205139
  chr19:5961935-5962237
  hyper

SEQ ID NO: 293415 - DNA, 59 bp, Homo sapiens; identical to SEQ ID NO: 205140
  chr19:5962455-5962514
  hyper

SEQ ID NO: 293416 - DNA, 399 bp, Homo sapiens; identical to SEQ ID NO: 240014
  chr19:6108898-6109297
  hyper

SEQ ID NO: 293417 - DNA, 776 bp, Homo sapiens; identical to SEQ ID NO: 205141
  chr19:6110226-6111002
  hyper

SEQ ID NO: 293418 - DNA, 131 bp, Homo sapiens; identical to SEQ ID NO: 240015
  chr19:6279430-6279561
  hyper

SEQ ID NO: 293419 - DNA, 223 bp, Homo sapiens; identical to SEQ ID NO: 240016
  chr19:6459946-6460169
  hyper

SEQ ID NO: 293420 - DNA, 199 bp, Homo sapiens; identical to SEQ ID NO: 205142
  chr19:6464135-6464334
  hyper

SEQ ID NO: 293421 - DNA, 75 bp, Homo sapiens; identical to SEQ ID NO: 205143
  chr19:6464628-6464703
  hyper

SEQ ID NO: 293422 - DNA, 326 bp, Homo sapiens
  chr19:6530738-6531064
  hyper
caagagacccacagagataccgggaaagagcggcagagagggagaaccagggcgatggagagacagcagggagaaaggaacctggagccgagcttggaaggccggaaacggaaaggagagcgaaaagcggagagagatccgagtggagaaaattccgcagagtcacggggacgaggggaaaggctctgggctgggaaggggcgtggccgcgggcggaggggcgtggccgcgggcggaggggcgtggcctccttttgtagccaagcagctataaaaagcggcgcgctgtgtcttcccgcagtctctcgtcatggaatacgcctctga

SEQ ID NO: 293423 - DNA, 118 bp, Homo sapiens
  chr19:6531295-6531413
  hyper
cctcttggacctgcggcaggtgagacgtgccccgaccctcggtagctggtctcgcgggagacccctaccgcccctctgggactcccttctccctcccgcacccccagggacacctgtt

SEQ ID NO: 293424 - DNA, 80 bp, Homo sapiens; identical to SEQ ID NO: 205144
  chr19:6590245-6590325
  hyper

SEQ ID NO: 293425 - DNA, 337 bp, Homo sapiens; identical to SEQ ID NO: 205145
  chr19:6590881-6591218
  hyper

SEQ ID NO: 293426 - DNA, 237 bp, Homo sapiens; identical to SEQ ID NO: 240022
  chr19:6737655-6737892
  hyper

SEQ ID NO: 293427 - DNA, 213 bp, Homo sapiens; identical to SEQ ID NO: 240023
  chr19:6739799-6740012
  hyper

SEQ ID NO: 293428 - DNA, 178 bp, Homo sapiens; identical to SEQ ID NO: 205146
  chr19:6767996-6768174
  hyper

SEQ ID NO: 293429 - DNA, 164 bp, Homo sapiens
  chr19:6862817-6862981
  hyper
gatatagacttcaaacgccgtcagacagacacccactagatcaaacagggacattcctaaacatcacacagacacatcgccaggcagtcccaccgcagacagccacaaattaaagccgcgcttgccccctgatggacagcagcagtagtgcgccacctcgatag

SEQ ID NO: 293430 - DNA, 253 bp, Homo sapiens; identical to SEQ ID NO: 240026
  chr19:7069469-7069722
  hyper

SEQ ID NO: 293431 - DNA, 159 bp, Homo sapiens; identical to SEQ ID NO: 205147
  chr19:7098896-7099055
  hyper

SEQ ID NO: 293432 - DNA, 74 bp, Homo sapiens
  chr19:7197429-7197503
  hyper
atatactgcgcacgcagaggcccggaaggaggcggggtcccaggggtctcctcgctagagcagccccaggattg

SEQ ID NO: 293433 - DNA, 1375 bp, Homo sapiens
  chr19:7293746-7295121
  hyper
tggggtcctctccccatcgcggcgctccccgcccacgcccgcgcccccagactcaccctctccggggtacaggtggcccgcggcgcccagtagcagcgcggccaccgccaccagcagcggcgcggccgccgccccccgccggcccccggtggccatggctgcgggagcgcggggtctcctcggatcagagcgcgcggcgctggcccgcgggggtcatgctccgaggcggccacccaagaggcgctgggggccgcgcgtccttctcttccacgcccgcgacccgcgggccgcagcccccctgccggggagggcccagaggcagccccgggaagggcgcgcgcggcttcgccagctacaaatactgagcggaggcccttgcggtggtggccccgaccccccggccgctgcggcccgggccccgtcccaggatctcggggcccggagctccgcgctgcgcccgggactgtctctcggctctcggccccgcgcgctctgggtcgcgatctgcgggctccgggacagagggacgcgcggaccgacggactagctgactggcgggcgggcacctgggctggcgggtggcgggcgggcggcgggagagagggctgctcgggcccgtaaacaacgcggcccgtcagctgggccccgtgcgggccgcgggaaaaggcggcgcggatctggcctaggaagggactctgcgcccgggagaggcccaggagagggagggaaagcttgcaggggagggaggtgccgcccggccccgccccgccccgcccgcctccccgcctccctgtgccgggccccgcgcgggaggccctgggcgcgccgggaccgagggcgcgccccagatccgcgcgccctacagccccgagtctcctccagtttcagacccccggaggcgccccacaggcccgacgcagcggcacagatcctttctctaccattttgctattttgttcatagtgggctttggaggattcctgttgattttttaaaaaatactgcattaaaatgtttattttggtgactcgaggtggttttggtttctttctttttttttttttttcactcccttaaattttgcaccccaggcgagtagtgtctcactcgcctttcctcagtccgggcctggccagcgacactcgtcccagagcgcgtgggcgcccccagatgtcccgcccgcgagtgcgccccggcccaggggcgagacccaagccaggcccctggggacagccacgtgcccgcgtgcccagtgcgctccctgtgttcaagttggagaaatgacacctggaaaaatgtgcagacgcttctgaaagggcaaagacgacgccaaagaagacgccggagacctcgaatagggcgcaggtggacatct

SEQ ID NO: 293434 - DNA, 1066 bp, Homo sapiens
  chr19:7459630-7460696
  hyper
atcacccaggcttccgttaaccccacaaaacgcccacctaaccctgctgctctccctctggatccccgcaacccagctgtcccctcagagcccccggccctactgacagccaggctcgcattgctctccttcaaaaagccccccaaccccgctgacccgcccctcaaaagtcgccctcaccctcgccgcgagcaccctcccacttcggtgcccgcgcccctctcaaggccgagccgacgccccctcaccacggctcggggagcagcagccccaggtccccgggagcgccccgccctcgagggcacgcctccttccgggtcacgccctctgccccgcctccgaggcgggatcgcgcatgcgctgctctcctcgcgcggcttcccgcttccggctcccagctgctagctactgtggatctgggggggccggacggaggcatcggaggcggctgcgagagtggcagaggagctggcggagagcggcctgcgggcgatcgggccgaggtgaggacggcggcggggcggtcccgaggaaaacggggctcaggagggggccctcggtctcttcagggggtggcctggggcgcgggacccccggggctgcctcgggcctcccgccggctcctgggggacttctccaggcaggcgaacgggtgctggggtgcaggctgctccttcaatgcatggaggctctaggcggcgattgcagggtgcagaggtgcagacgatgcccgcccgctccgtccgagccccagccagtcctggggtgctacggcttactctcctccaggagaggagaggaggggtcacttgggccccagcctctgctcctcgttcaggagcgcccggggcaggaccagggatggaatggaacccaccacaatacccagcaccgtcgtatttcaggcctcccgggagaaccctcacaccccggagcagacagccctccctggcagggagcgtttgggtgcaaaaccgtgagaactatctgtgccatgggttttagtttcttgtataagaactcagttggtgctttcattgcggacgggaacgagaagctttcccct

SEQ ID NO: 293435 - DNA, 242 bp, Homo sapiens
  chr19:7553842-7554084
  hyper
gtcccggcccctgtacgactccagcgccgacgccaggccgctcagcgacgccatggcaactccgtgacgtcaccgcgacgtcggcgcgccgcgccagggggcggggccaggccggggtaccgggagcgccccaaaggcttgcgcgcaggcgcggccgcaggcctttgtccccctgaccggctttttgtccgctgtaggggagggacagagtttgcagaggtggggccgacacgtgtgtgctc

SEQ ID NO: 293436 - DNA, 172 bp, Homo sapiens
  chr19:7565792-7565964
  hyper
gggcctgacctgcggctgcacgagggcaccatgcgcaccacgtcgcaccgggactttgcctacccggctgccacccgggagccgccgagcctgcagccgccgcccgcgctgcttttcccaatggacccgcgctgggaccgggaagagcgcgtgtcggaggcgcaccgcgcgt

SEQ ID NO: 293437 - DNA, 90 bp, Homo sapiens
  chr19:7566243-7566333
  hyper
acgacgcgcgcccgcagcctcgcgcgcccagttgccacctcggtgagcgcgcgcccgggctgagtgggcgatttgcttcacattgtggtt

SEQ ID NO: 293438 - DNA, 60 bp, Homo sapiens; identical to SEQ ID NO: 240033
  chr19:7580809-7580869
  hyper

SEQ ID NO: 293439 - DNA, 186 bp, Homo sapiens; identical to SEQ ID NO: 240034
  chr19:7598773-7598959
  hyper

SEQ ID NO: 293440 - DNA, 65 bp, Homo sapiens; identical to SEQ ID NO: 240035
  chr19:7600088-7600153
  hyper

SEQ ID NO: 293441 - DNA, 83 bp, Homo sapiens; identical to SEQ ID NO: 205151
  chr19:7660603-7660686
  hyper

SEQ ID NO: 293442 - DNA, 278 bp, Homo sapiens; identical to SEQ ID NO: 55532
  chr19:7660714-7660992
  hyper

SEQ ID NO: 293443 - DNA, 172 bp, Homo sapiens; identical to SEQ ID NO: 240036
  chr19:7661305-7661477
  hyper

SEQ ID NO: 293444 - DNA, 1166 bp, Homo sapiens; identical to SEQ ID NO: 205153
  chr19:7676864-7678030
  hyper

SEQ ID NO: 293445 - DNA, 128 bp, Homo sapiens; identical to SEQ ID NO: 205154
  chr19:7701788-7701916
  hyper

SEQ ID NO: 293446 - DNA, 314 bp, Homo sapiens; identical to SEQ ID NO: 240038
  chr19:7702164-7702478
  hyper

SEQ ID NO: 293447 - DNA, 242 bp, Homo sapiens; identical to SEQ ID NO: 240039
  chr19:7745712-7745954
  hyper

SEQ ID NO: 293448 - DNA, 169 bp, Homo sapiens; identical to SEQ ID NO: 240040
  chr19:7746642-7746811
  hyper

SEQ ID NO: 293449 - DNA, 430 bp, Homo sapiens
  chr19:7933745-7934175
  hyper
ctgtgggtaggtcccgagcctccgaggccaaaggctcaggctctagggagctaagactaatccacccagcggggctccagggcagtggaggcggggtctaaaacaaacggcgtacccggaggggcggatcctaaggcaggggtggggtgtagcaggcggggctgtggtctggctcagtggaaggtctccacctccaccacggtccagtcaccctgcggggaggccacgtcgtccggagagaagctggtgaccgaggtgatgctggcacgggactcgtccaggggagacagtagttcggcccagcggccgagttcggcgtcgctgagtgcagcccgggcgccccctgtgacgccaccaccctccgcacctcctgggcccccgccgctgccgcccgcggcaccctcggcagccgccagcagcagcgtccggc

SEQ ID NO: 293450 - DNA, 289 bp, Homo sapiens
  chr19:7934257-7934546
  hyper
cgccccggccccggccccagccgccgccttcccaccgctcgtgccgggactgggccccggatccagtgcgccaggggcgggggtcgccgactcgggcccttcagtctcgtagatggtgcacagaccgtcagcagagcccggtccggtagcgggaggccacggcaggggcgcacctgcggggagagacgccaggtgggccgtgggggtgataagccccgcccctgcctcaaggtcccgcctccttgtctaagctccgccccggacccagctgtcccgcccctgagctgcg

SEQ ID NO: 293451 - DNA, 152 bp, Homo sapiens; identical to SEQ ID NO: 240045
  chr19:7937038-7937190
  hyper

SEQ ID NO: 293452 - DNA, 206 bp, Homo sapiens
  chr19:7938935-7939141
  hyper
cgggctcaggatgtcgcatccctccagacccggagcgcacgcccgggtctccccgccagcccccatcggcctcccctggcctccccgagggatgcctgcacctgccgggaggcagagcggccccgctgcccgcgaacgggctccgggagacaaagagccgcgtcccgggcccgacccctcccccagccgggcctggcccgcgccca

SEQ ID NO: 293453 - DNA, 201 bp, Homo sapiens
  chr19:7939220-7939421
  hyper
ccgggccggagcgacgcggtggccgccagcggcgaggaggcgaggggagggggctgcgggctgcggcgccgggggagccgagccggtcccgcccctcggccgcgggcgggagagccgggggcgcgcgctcgatccggacccgggagcgcggccggcggaagcgcgccgagggggatgggggagaagcgcgctttggagaga

SEQ ID NO: 293454 - DNA, 197 bp, Homo sapiens
  chr19:7939456-7939653
  hyper
tccccagctgcgcctgaggaacccagatagtcaacggttgggactgggggagcaaatccctggggtcctccactgtccttcccaacacatacacctgccccgacccccaccacaaccacctggcaccaaggaccgcctggacgcggataggctgggccctggcaaccaggaggcgggaccaccgcgcctctggccca

SEQ ID NO: 293455 - DNA, 194 bp, Homo sapiens; identical to SEQ ID NO: 240048
  chr19:7968415-7968609
  hyper

SEQ ID NO: 293456 - DNA, 153 bp, Homo sapiens; identical to SEQ ID NO: 240049
  chr19:7982945-7983098
  hyper

SEQ ID NO: 293457 - DNA, 170 bp, Homo sapiens; identical to SEQ ID NO: 205157
  chr19:7990126-7990296
  hyper

SEQ ID NO: 293458 - DNA, 300 bp, Homo sapiens; identical to SEQ ID NO: 205158
  chr19:7990894-7991194
  hyper

SEQ ID NO: 293459 - DNA, 52 bp, Homo sapiens
  chr19:8067288-8067340
  hyper
ctctccagagcctagcgggggcccaggacacagcagcggagcagggagagtc

SEQ ID NO: 293460 - DNA, 32 bp, Homo sapiens
  chr19:8067370-8067402
  hyper
tcccacaggctggcttccgttggtcttcccct

SEQ ID NO: 293461 - DNA, 80 bp, Homo sapiens; identical to SEQ ID NO: 205159
  chr19:8115155-8115235
  hyper

SEQ ID NO: 293462 - DNA, 48 bp, Homo sapiens; identical to SEQ ID NO: 205160
  chr19:8273923-8273971
  hyper

SEQ ID NO: 293463 - DNA, 706 bp, Homo sapiens; identical to SEQ ID NO: 225771
  chr19:8274271-8274977
  hyper

SEQ ID NO: 293464 - DNA, 723 bp, Homo sapiens; identical to SEQ ID NO: 205162
  chr19:8372857-8373580
  hyper

SEQ ID NO: 293465 - DNA, 182 bp, Homo sapiens; identical to SEQ ID NO: 240053
  chr19:8432388-8432570
  hyper

SEQ ID NO: 293466 - DNA, 40 bp, Homo sapiens; identical to SEQ ID NO: 240054
  chr19:8478144-8478184
  hyper

SEQ ID NO: 293467 - DNA, 227 bp, Homo sapiens; identical to SEQ ID NO: 225772
  chr19:8579005-8579232
  hyper

SEQ ID NO: 293468 - DNA, 124 bp, Homo sapiens; identical to SEQ ID NO: 205163
  chr19:8942732-8942856
  hyper

SEQ ID NO: 293469 - DNA, 207 bp, Homo sapiens
  chr19:9419935-9420142
  hyper
tgaaccaccgcgcttggcccaaacactacctaatgcataaagaggggacaggaggggaccgagccgaggcaaatgtcaccccgtgctcacccgacacgccgcgatccacagatcagctcacagagaacgaggctgaagcgcttgtccttgagacacgaatggcagagatgctcttcctttctggaaagagagcaaaggatgctttcg

SEQ ID NO: 293470 - DNA, 431 bp, Homo sapiens
  chr19:9420240-9420671
  hyper
gggaccagccgcggccacaggggcagctgacccgggctctctgaggaggcgccgcggcggcgggaggccccgggcgcggggtccggacaaggagtggcggggaggcagcccttagaccgccgattcccaaacccagccctcggtctcccgcggacccgacccggggcaggcagggcggggcggggcagggcaggacaggaagcgggcggaggcaaaaatgttcctcagacgcgggcggaggcgtagggtgacaaggctgtcgactcgcgcatgcgcagaagcacacttctgattcctctttcggcgctgcaaatggcgtatggggcggggcctgggaagcgggacttgaggtgaagggggtggagcaggtaggagcgggatgcaaaggagcgccaaggctggttccagccgcaagtggatgagaaatccta

SEQ ID NO: 293471 - DNA, 160 bp, Homo sapiens
  chr19:9434651-9434811
  hyper
tttgttcaaaacgccagtaacctggacagcttgcagtcaagaccccctaccggtgacacttgcgctcttcggggaggtaaacagcatttcctctcagctctgggttggaaaaagccgcagcagctgatgggcccgggaacccgaggccccgccccctagg

SEQ ID NO: 293472 - DNA, 237 bp, Homo sapiens
  chr19:9434969-9435206
  hyper
ggaaaggggaggtgcccagtgaaatggagcctgtcccgtgcactttcgggcatttcgagcatcttgtgggctctcccaagtcgcggcccctcctctgagagccacagtcaggtctgtcctcaggggtcgaggcggctgcgctggggcctcggcccgggaggaggcggggggcacggcctttccattttccctgctcccctctgcagaagcctcatagggcccggcgcggcggctcac

SEQ ID NO: 293473 - DNA, 62 bp, Homo sapiens
  chr19:9517501-9517563
  hyper
ccgcactcccgacccgccttttacctggacccaagcccccagcggcgcaggtgggagtctgg

SEQ ID NO: 293474 - DNA, 446 bp, Homo sapiens; identical to SEQ ID NO: 240060
  chr19:9545895-9546341
  hyper

SEQ ID NO: 293475 - DNA, 217 bp, Homo sapiens; identical to SEQ ID NO: 205164
  chr19:9648914-9649131
  hyper

SEQ ID NO: 293476 - DNA, 101 bp, Homo sapiens
  chr19:9649390-9649491
  hyper
tgccgtgtaatacctcctcgaggcagaaaaattctactttccatctgcttggctgcggaggaccttggggtgggctcagcgtgggggctgcaggcagaaat

SEQ ID NO: 293477 - DNA, 36 bp, Homo sapiens; identical to SEQ ID NO: 240063
  chr19:9732221-9732257
  hyper

SEQ ID NO: 293478 - DNA, 123 bp, Homo sapiens; identical to SEQ ID NO: 205166
  chr19:9879601-9879724
  hyper

SEQ ID NO: 293479 - DNA, 256 bp, Homo sapiens; identical to SEQ ID NO: 240065
  chr19:9929306-9929562
  hyper

SEQ ID NO: 293480 - DNA, 260 bp, Homo sapiens; identical to SEQ ID NO: 240066
  chr19:9938402-9938662
  hyper

SEQ ID NO: 293481 - DNA, 321 bp, Homo sapiens
  chr19:10024010-10024331
  hyper
gtcccctacccaggcgtgccgggcagggtcgtgggaagcacaggggtagagggggacaggtgggggccccgggggctgcggcggcggcagcggctgtggcgcgggtaccacgccccccgggagcgccccccgcgcggcggccactcacgattttctcagaggcgcccgcacgggacacggtgccgttgagccccacgagcgagggcagcgtctgcgacatccagttggtgaccatggccatggtgctcagcacggccccgatcttgagcagcggcaccgacatcgcgcctccgcctcatgccccgcggccgcccgccgcgc

SEQ ID NO: 293482 - DNA, 76 bp, Homo sapiens; identical to SEQ ID NO: 205167
  chr19:10024728-10024804
  hyper

SEQ ID NO: 293483 - DNA, 226 bp, Homo sapiens; identical to SEQ ID NO: 205168
  chr19:10197446-10197672
  hyper

SEQ ID NO: 293484 - DNA, 186 bp, Homo sapiens; identical to SEQ ID NO: 205169
  chr19:10207020-10207206
  hyper

SEQ ID NO: 293485 - DNA, 50 bp, Homo sapiens; identical to SEQ ID NO: 240071
  chr19:10216840-10216890
  hyper

SEQ ID NO: 293486 - DNA, 262 bp, Homo sapiens; identical to SEQ ID NO: 225775
  chr19:10252656-10252918
  hyper

SEQ ID NO: 293487 - DNA, 210 bp, Homo sapiens
  chr19:10253329-10253539
  hyper
cccagttatggaaccgcagggtaaagacctccccagttagggagtcatagggtaaagacccccctacttagggaaccgcaggtaaagataacccctccccaaatgagggaactgcaaggtagattcgcccccaattagggaaccacagggtagagaccccccaaccattaggtcagcttggctgcttgctctgcacgcctggccctgccc

SEQ ID NO: 293488 - DNA, 166 bp, Homo sapiens; identical to SEQ ID NO: 240072
  chr19:10305760-10305926
  hyper

SEQ ID NO: 293489 - DNA, 50 bp, Homo sapiens; identical to SEQ ID NO: 205170
  chr19:10340887-10340937
  hyper

SEQ ID NO: 293490 - DNA, 146 bp, Homo sapiens; identical to SEQ ID NO: 240074
  chr19:10342109-10342255
  hyper

SEQ ID NO: 293491 - DNA, 138 bp, Homo sapiens
  chr19:10346995-10347133
  hyper
aggctgcagacatatgtggccgtctgccaggggaaccgtggctcccagacaaaggtgatgtccccggggacacacagacacaccgacatgcaacttccgcctccctcccacttctgaggcaacacaatgtcttcgcca

SEQ ID NO: 293492 - DNA, 113 bp, Homo sapiens; identical to SEQ ID NO: 240076
  chr19:10362531-10362644
  hyper

SEQ ID NO: 293493 - DNA, 184 bp, Homo sapiens; identical to SEQ ID NO: 225777
  chr19:10363159-10363343
  hyper

SEQ ID NO: 293494 - DNA, 87 bp, Homo sapiens; identical to SEQ ID NO: 240077
  chr19:10380738-10380825
  hyper

SEQ ID NO: 293495 - DNA, 1014 bp, Homo sapiens
  chr19:10381049-10382063
  hyper
gtaaagacgcctccgcggccaaggccgaaaggggaagcgaggaggccgccggggtgagtgccctcgggtgtagagagaggacgccgatttccccggacgtggtgagaccgcgcttcgtcactcccacggttagcggtcgccgggaggtgcctggctctgctctggccgcttctcgagaaatgcccgtgtcagctaggtgtggacgtgacctagggggaggggcatccctcagtggagggagcccggggaggattcctgggcccccacccaggcagggggctcatccactcgattaaagaggcctgcgtaagctggagagggaggacttgagttcggaccccctcgcagcctggagtctcagtttaccgctttgtgaaatggacacaataacagtctccactctccggggaagttggcagtatttaaaagtacttaataaaccgcttagcgcggtgtagaccgtgattcaagcttagcctggccgggaaacgggaggcgtggaggccgggagcagcccccggggtcatcgccctgccaccgccgcccgattgctttagcttggaaattccggagctgaagcggccagcgagggaggatgaccctctcggcccgggcaccctgtcagtccggaaataactgcagcatttgttccggaggggaaggcgcgaggtttccgggaaagcagcaccgccccttggcccccaggtggctagcgctataaaggatcacgcgccccagtcgacgctgagctcctctgctactcagagttgcaacctcagcctcgctatggctcccagcagcccccggcccgcgctgcccgcactcctggtcctgctcggggctctgttcccaggtgagtcggggtggggattgccgtcgggccagttctccgaagccccgggaggaccggctcccgggtcaggtcatgcatgcttaggtagctgtttatgggaaggaggggctagagacagcgattgaaaggcaacagccagtaggttcgaatccagaccctgc

SEQ ID NO: 293496 - DNA, 38 bp, Homo sapiens; identical to SEQ ID NO: 205173
  chr19:10397588-10397626
  hyper

SEQ ID NO: 293497 - DNA, 284 bp, Homo sapiens
  chr19:10399791-10400075
  hyper
ccagccagatgagcgcatggagttgggggtggggggtgtcaaagcttggggcccggaagcggagtcaaaagcatcaccctcggtcccttgttctcgcgtggatgtcagggcccccacccaccgagcagaaggcggactcaggggcgctccagggtggctcgagctcacacacgctgagtagacacgtgcccgctgcaccctgggtaaatacagacccggagccgagcggattctaatttagacgcccgcgaacgctgcgcgcacgcacacgtgtcctcggctcg

SEQ ID NO: 293498 - DNA, 214 bp, Homo sapiens; identical to SEQ ID NO: 205174
  chr19:10400761-10400975
  hyper

SEQ ID NO: 293499 - DNA, 278 bp, Homo sapiens
  chr19:10401208-10401486
  hyper
cctggcaaccgggtccctcagctgttcccgcggttccttccatgagcccagccttgcgtcccggctccgtgttcttcaccgggtgtagggtccttcctgatccttgacccagcctcgtctctcctttgcccttgccgcaaacgcactctcctcgtatcccggcattctgccaggaccctgagaactggttcatcccccatcccccatcccgggtccccttctctcagccttgctgtgttcatccaagaacccacctttcctctcctctacgccctccc

SEQ ID NO: 293500 - DNA, 290 bp, Homo sapiens
  chr19:10402604-10402894
  hyper
cccctccgtgccttgaggatgataatacgataagatagtgcatgtcaagtgcttaggacatattgagcgctcggagttagttcaaacttggttcttcgacccctagccctgtctccggatgccccgcgcctcgctgctccccggctcttggaagttggctcggaaaggcccgtgagctgcactctggacggactgtttccagcctcagaggccagggtctacctcgcactgggggaccagaatctgagtcctgatgtcaccctcgaaggggacgcattcgtggccactgc

SEQ ID NO: 293501 - DNA, 340 bp, Homo sapiens
  chr19:10402960-10403300
  hyper
cgaaaaccgggagacccgggagaacgtgaccatctacagtaaggaaggaggcggggtctccgcggctccgaggtgggaccagaggaatgcgaaggcggggcgaagagtgggcgggacctcagtaccggaacaggcgtggcccgaggggcggggcaggtgggggcggagacgtaatcgctggggaggaggagcctgtacagcctgagaggcggggcgccgtaccctagttcgttctcagcaccccgaggattcgggcagataaggggcgggccttgaccggagggaggggtatggtcagtatactacgaccaaatgctccgcccccaggcttcccggcacc

SEQ ID NO: 293502 - DNA, 138 bp, Homo sapiens
  chr19:10403330-10403468
  hyper
cgaggggcagatggtgacagtaacctgcgcagctggggcccaagctctggtcacactggagggagttccagccgcggtcccggggcagcccgcccagcttcagctaaatgccaccgagaacgacgacagacgcagctt

SEQ ID NO: 293503 - DNA, 177 bp, Homo sapiens; identical to SEQ ID NO: 240085
  chr19:10443527-10443704
  hyper

SEQ ID NO: 293504 - DNA, 316 bp, Homo sapiens; identical to SEQ ID NO: 240086
  chr19:10491159-10491475
  hyper

SEQ ID NO: 293505 - DNA, 497 bp, Homo sapiens
  chr19:10529636-10530133
  hyper
ctgatgggggggccggtttttgctcggcgttcgcccacgccgggagccccctctggcggggagaaaagtggctgtgggggttgaagaccggcagtcttttttttttttttttttttttttcaaataaggagaagggcgcggggggagggcggtggcaaacggcatcgcgtgccctggggagcccgtgacagggggcgcacgggggcaggggtctggtccccgggtcccgcagcagagcagtttcgcgttcgagctcttatcggcgtggggggggggggcggtgggacacgcgggcgcgtgcactccccccgcccagcagccatccttgggggggttgagggggatgggggcgcactcggatcccgctcgctctctgcttgctcgctcggcgcggcgctgggggaggcgggagcgtgagtcacggcgactcccgatttaggtgccggaaggggggctctgctggcgggggccgcagggaggaggctcgcctgtttact

SEQ ID NO: 293506 - DNA, 758 bp, Homo sapiens; identical to SEQ ID NO: 205178
  chr19:10530526-10531284
  hyper

SEQ ID NO: 293507 - DNA, 433 bp, Homo sapiens; identical to SEQ ID NO: 240091
  chr19:10535126-10535559
  hyper

SEQ ID NO: 293508 - DNA, 145 bp, Homo sapiens; identical to SEQ ID NO: 225785
  chr19:10589794-10589939
  hyper

SEQ ID NO: 293509 - DNA, 35 bp, Homo sapiens
  chr19:10616223-10616258
  hyper
gagactacgtctcgaaaggaaaagaaaaaaaaaaa

SEQ ID NO: 293510 - DNA, 251 bp, Homo sapiens; identical to SEQ ID NO: 240094
  chr19:10654404-10654655
  hyper

SEQ ID NO: 293511 - DNA, 66 bp, Homo sapiens; identical to SEQ ID NO: 240095
  chr19:10676719-10676785
  hyper

SEQ ID NO: 293512 - DNA, 369 bp, Homo sapiens; identical to SEQ ID NO: 240096
  chr19:10679763-10680132
  hyper

SEQ ID NO: 293513 - DNA, 130 bp, Homo sapiens; identical to SEQ ID NO: 205179
  chr19:10691749-10691879
  hyper

SEQ ID NO: 293514 - DNA, 125 bp, Homo sapiens; identical to SEQ ID NO: 240098
  chr19:10812215-10812340
  hyper

SEQ ID NO: 293515 - DNA, 170 bp, Homo sapiens; identical to SEQ ID NO: 240099
  chr19:10812677-10812847
  hyper

SEQ ID NO: 293516 - DNA, 537 bp, Homo sapiens; identical to SEQ ID NO: 240100
  chr19:10828651-10829188
  hyper

SEQ ID NO: 293517 - DNA, 77 bp, Homo sapiens; identical to SEQ ID NO: 240101
  chr19:10946959-10947036
  hyper

SEQ ID NO: 293518 - DNA, 139 bp, Homo sapiens; identical to SEQ ID NO: 240102
  chr19:11039290-11039429
  hyper

SEQ ID NO: 293519 - DNA, 528 bp, Homo sapiens
  chr19:11144003-11144531
  hyper
gcagaacgaggtgcgtgtgctccgcctctgcaccgtcaacagcgtggaggagaagatcctagctgcagccaagtacaagctcaacgtggaccagaaggtgatccaggccggcatgttcgaccagaagtcctccagccatgagcggcgcgccttcctgcaggccatcctggagcacgaggagcaggatgaggtgagcccagcaccggccccgacccctccccagcgtgaatggtggacgcgtgagcggctttcatttttgtttttttaccttttttgcactcttattttttttgcatccctttggagtaaagggagtgtgggctgaacggaaagaggatgagtacttgctttttctttgaagtggtttttttttctaaactgctggtgaaagacgccggattgacagccctggagactgaagtcctctatttatccacagagcagacactgcagcacgggcagcggcagtgccagcttcgcccacactgcccctccgccagcgggcgtcaaccccgacttggaggagcc

SEQ ID NO: 293520 - DNA, 274 bp, Homo sapiens
  chr19:11199837-11200111
  hyper
aacagttaaacatcgagaaatttcaggaggatctttcagaagatgcgtttccaattttgagggggcgtcagctcttcaccggagacccaaatacaacaaatcaagtcgcctgccctggcgacactttcgaaggactggagtgggaatcagagcttcacgggttaaaaagccgatgtcacatcggccgttcgaaactcctcctcttgcagtgaggtgaagacatttgaaaatcaccccactgcaaactcctccccctgctagaaacctcacattg

SEQ ID NO: 293521 - DNA, 460 bp, Homo sapiens; identical to SEQ ID NO: 205181
  chr19:11200842-11201302
  hyper

SEQ ID NO: 293522 - DNA, 69 bp, Homo sapiens; identical to SEQ ID NO: 205182
  chr19:11253288-11253357
  hyper

SEQ ID NO: 293523 - DNA, 73 bp, Homo sapiens; identical to SEQ ID NO: 240105
  chr19:11266486-11266559
  hyper

SEQ ID NO: 293524 - DNA, 330 bp, Homo sapiens; identical to SEQ ID NO: 205183
  chr19:11308102-11308432
  hyper

SEQ ID NO: 293525 - DNA, 42 bp, Homo sapiens; identical to SEQ ID NO: 225794
  chr19:11373072-11373114
  hyper

SEQ ID NO: 293526 - DNA, 314 bp, Homo sapiens; identical to SEQ ID NO: 240107
  chr19:11456951-11457265
  hyper

SEQ ID NO: 293527 - DNA, 174 bp, Homo sapiens
  chr19:11465993-11466167
  hyper
gttccttcctacaatcgatgctaacacgccccgcctccaagatcacggaggccccgccccacggggctatgcaaatgagacgcccggaggccccgcccctccctccacctcggagtctgcgcggcgcggccaggcccggccgaccgcgtctcggtcttcgcgtctgccagcctg

SEQ ID NO: 293528 - DNA, 512 bp, Homo sapiens; identical to SEQ ID NO: 240109
  chr19:11486038-11486550
  hyper

SEQ ID NO: 293529 - DNA, 594 bp, Homo sapiens; identical to SEQ ID NO: 205185
  chr19:11491658-11492252
  hyper

SEQ ID NO: 293530 - DNA, 134 bp, Homo sapiens; identical to SEQ ID NO: 205186
  chr19:11492528-11492662
  hyper

SEQ ID NO: 293531 - DNA, 176 bp, Homo sapiens
  chr19:11529238-11529414
  hyper
cctcccttccttccgcccactgcacctggcggcctgtgctcggctctccagctccgccctcaactggtcgcttccggccccgcgccacccaccaaaccccctcctcacctggctgcccccggggccctccgccgggctcctgcgctgactgcgctgccgccgcagggagacactgt

SEQ ID NO: 293532 - DNA, 70 bp, Homo sapiens; identical to SEQ ID NO: 205188
  chr19:11531258-11531328
  hyper

SEQ ID NO: 293533 - DNA, 37 bp, Homo sapiens
  chr19:11531888-11531925
  hyper
ggatgggaagcgagagaggaaggtgggcggggccagg

SEQ ID NO: 293534 - DNA, 40 bp, Homo sapiens
  chr19:11532654-11532694
  hyper
aggccacgtctgtgatgggggagcctctgaactctaactc

SEQ ID NO: 293535 - DNA, 299 bp, Homo sapiens
  chr19:11532724-11533023
  hyper
ggaacagtaaggattcgagggaggccattgtgggatggcctcctgaagaaatggccctctgctgcgggcaggataggtcttctgtctcgggctgctccagaactgcagataggtctccgagcttttcggggacagggtgggacttctttcccttggaggcggagcttgagacgggacagggtctctgacgtcttgggcttccttggggagtgagagcttccccagggaggtggggcggggactctgaggaatggggtggggcttcccctgtgggcggggcctctgacgtccgggacaga

SEQ ID NO: 293536 - DNA, 179 bp, Homo sapiens; identical to SEQ ID NO: 240115
  chr19:11545952-11546131
  hyper

SEQ ID NO: 293537 - DNA, 297 bp, Homo sapiens
  chr19:11590395-11590692
  hyper
ccccgggatacgcccgggctgccgagtgggaatccgagggctcgggcgaggccgggcccccggggccctgggggcggggcctagatgggcgtgcccgggcgtggccaggcagggcgtggcagggcgggaggggctgcgcgctcgggagctgaccagctccgtggctgctgaaagcaccgagcgcggggctagcggtgcgggcgagcaggcgggcgggccgcgctcaaggtcacctcgcggcccagagccttggcgaggtggggagcctggacctggcctaagggggctgtctcggcc

SEQ ID NO: 293538 - DNA, 96 bp, Homo sapiens
  chr19:11591204-11591300
  hyper
taaggccctctcagaccaagctctaagcgccctcagcactctgggcgcggccctgcccactctcaggccccgaggcttggtcctacccccccaacc

SEQ ID NO: 293539 - DNA, 184 bp, Homo sapiens
  chr19:11591353-11591537
  hyper
cggagcctgggcccaactcctccccgtcccgattccctttcggcgacaggggaatacctacagtgaccattcttgtgtgcccggcgggcgcggtccgtgttgaggggggctccgggggtggtgcactcctaggggggcgcccgatgctcacgctggggtcccgcccgggcggcctctggtgcgg

SEQ ID NO: 293540 - DNA, 87 bp, Homo sapiens
  chr19:11592584-11592671
  hyper
atgtcctggctttctaggctcgtgattggtcctcctgactgtggagtcatgctcgctctctgctagggggaacctggcctctctcta

SEQ ID NO: 293541 - DNA, 203 bp, Homo sapiens
  chr19:11593453-11593656
  hyper
actggtgaggaaccggcggggccaatctgcgcgtggcgccacagggctcccccgggcacgtgcctgagctcgcggctgcggtccccagggtcacgtggctgcggccaccagggcctacgcgcctcgcacgccacctagcggccgcgcctcgctccccgcccctctctctagcggcccgcaggaggcggcggcctcagcatcct

SEQ ID NO: 293542 - DNA, 358 bp, Homo sapiens; identical to SEQ ID NO: 240117
  chr19:11639727-11640085
  hyper

SEQ ID NO: 293543 - DNA, 57 bp, Homo sapiens
  chr19:11689628-11689685
  hyper
acccctcccacggggccgcccgcatctcacctgccgtcgcggggcgggcgttgcggc

SEQ ID NO: 293544 - DNA, 223 bp, Homo sapiens; identical to SEQ ID NO: 240119
  chr19:11750896-11751119
  hyper

SEQ ID NO: 293545 - DNA, 185 bp, Homo sapiens; identical to SEQ ID NO: 205191
  chr19:11805241-11805426
  hyper

SEQ ID NO: 293546 - DNA, 390 bp, Homo sapiens; identical to SEQ ID NO: 205192
  chr19:11805597-11805987
  hyper

SEQ ID NO: 293547 - DNA, 132 bp, Homo sapiens; identical to SEQ ID NO: 240121
  chr19:11849763-11849895
  hyper

SEQ ID NO: 293548 - DNA, 649 bp, Homo sapiens; identical to SEQ ID NO: 240122
  chr19:11877700-11878349
  hyper

SEQ ID NO: 293549 - DNA, 164 bp, Homo sapiens; identical to SEQ ID NO: 205193
  chr19:11909169-11909333
  hyper

SEQ ID NO: 293550 - DNA, 60 bp, Homo sapiens; identical to SEQ ID NO: 205194
  chr19:11909732-11909792
  hyper

SEQ ID NO: 293551 - DNA, 714 bp, Homo sapiens
  chr19:11924845-11925559
  hyper
gggctcaaggaaggcgctcgcttagagaggctgttcgcttagagaggctgctcgcttagagaggctgctcgctcagagacgctgtggccagaacaagtcagacatgatctgcaggacccggttacccagggcttctgctgtcactcagcacggaggaggcggggcctggcgccccatccaatcaggggtgctggggcggggccctgtcaactgtccatccggggaagggggaagggacagtcgccctccgtccattcctttagtgctgcgccgacagcggtcaggatctcggctttcttgcttcgagagggactaggtgcctccaccagagcttctgtcgctctgtaacctgcactgtgacctacactagtcgcgggagccacgcagaggacgccggaacaccctggaagccgagaaatggtgtgtgtgagggggctggcgtccgggcgactgggagaggggctggaatcggccggaaccggctgaggcgggacccgggcctccacgcggcgactccggggtcgtggacgcgagtcccctcggtcgcagggtggggctgggccggcagccgggaccccgggcctcctgtcccgtcccttcacggcgactgcggccccggctccggagcctaatctgggcagctccgcgtctccccacattatgcgggggccacgggagggatatggggggatcccgcctcggatatggggtttg

SEQ ID NO: 293552 - DNA, 63 bp, Homo sapiens; identical to SEQ ID NO: 205195
  chr19:11959364-11959427
  hyper

SEQ ID NO: 293553 - DNA, 33 bp, Homo sapiens; identical to SEQ ID NO: 205196
  chr19:11998436-11998469
  hyper

SEQ ID NO: 293554 - DNA, 263 bp, Homo sapiens
  chr19:11999219-11999482
  hyper
catttgagcaaacagcgattcacgaatgagacacacccagtcctggcttgtggtttgtcaacggaaaaagccaaactatgtaaaataaagaagtttattcggagccgaataggagagaccttggccgagggaaaaacaaccccaagaagcctggagtaagtggtcccgaggcggctcaagacagtttggttttattcattttagagagacaggaattgcagggaaaatcatgaattagtgcctggaaggtgtaatttccttag

SEQ ID NO: 293555 - DNA, 254 bp, Homo sapiens; identical to SEQ ID NO: 205198
  chr19:12075818-12076072
  hyper

SEQ ID NO: 293556 - DNA, 331 bp, Homo sapiens; identical to SEQ ID NO: 205199
  chr19:12098301-12098632
  hyper

SEQ ID NO: 293557 - DNA, 523 bp, Homo sapiens
  chr19:12146021-12146544
  hyper
ccccacacccgaggcgggatccccccatgaccctcgcgtagtccccgcacaatgtggggagacgcggggcagcgggcgcggagctgcccagagagggctctgggaactgggtgacagtcaccgcgcagggacaggacgagacgcccgggtcccggcggccggcccagccccactgtggggccaaggggaccaagggccgagctgtcccacgggaaatcgggtcccagaccccggagtcgccgcggggaggcccgggtcccaccacagccggttccggccggttccaaccagctcctcccccgcctcgggacccctggcccgcacgctcaccatttcttgcctttcaggtgactcccacgaccagtgcgggtcacagcacaggcgacagaagctatggcagaggcacctgaaccctctcggaggggaaagccaggctcccaacctcagctcgccgcctggagccgggaaccgaggagagcagggccttcgccctccccgatggacactcggcaggccccgccca

SEQ ID NO: 293558 - DNA, 44 bp, Homo sapiens; identical to SEQ ID NO: 205201
  chr19:12163011-12163055
  hyper

SEQ ID NO: 293559 - DNA, 117 bp, Homo sapiens; identical to SEQ ID NO: 205202
  chr19:12163331-12163448
  hyper

SEQ ID NO: 293560 - DNA, 37 bp, Homo sapiens; identical to SEQ ID NO: 205203
  chr19:12203656-12203693
  hyper

SEQ ID NO: 293561 - DNA, 33 bp, Homo sapiens; identical to SEQ ID NO: 205204
  chr19:12204551-12204584
  hyper

SEQ ID NO: 293562 - DNA, 454 bp, Homo sapiens; identical to SEQ ID NO: 240133
  chr19:12250827-12251281
  hyper

SEQ ID NO: 293563 - DNA, 79 bp, Homo sapiens
  chr19:12305760-12305839
  hyper
aatcagaggcgccacgtggaaggtgggtggggcaatgcggcataaaagaggtgggcgtcgtacgtcgttacgcagcgcg

SEQ ID NO: 293564 - DNA, 592 bp, Homo sapiens; identical to SEQ ID NO: 240135
  chr19:12444058-12444650
  hyper

SEQ ID NO: 293565 - DNA, 162 bp, Homo sapiens
  chr19:12475620-12475782
  hyper
gccccactgcctcgcgggggccgccttcctgagagtcaggtcacagaagacactgaccgccggcttctgcattgtgcctggggataagatctcggagagctgctcgagttgcccaagttctttctcagatcttgaattccaacggaaaggctggcgccaagc

SEQ ID NO: 293566 - DNA, 124 bp, Homo sapiens
  chr19:12476368-12476492
  hyper
cccgtgttctccccaaggttccccgctgccagcataggactcagcgtgacagtgcctgccactgacctgccagggcttctctcagctacagagccaggagcgggagctcagaggggtgtagaaa

SEQ ID NO: 293567 - DNA, 46 bp, Homo sapiens
  chr19:12476556-12476602
  hyper
ttgggtagagctccaaattccgcccccccagggaactgattgacag

SEQ ID NO: 293568 - DNA, 163 bp, Homo sapiens
  chr19:12476697-12476860
  hyper
cctcccaggggacatttgcatttaagcggaatttcctgcctgtactcaatgggctcttcctgctccttcttcctggacggggacccacaagtgtgtgctgggaattcgagactcactgcccagtggagccatcccctggcctcagagcggtaggggaggccca

SEQ ID NO: 293569 - DNA, 240 bp, Homo sapiens; identical to SEQ ID NO: 205205
  chr19:12551184-12551424
  hyper

SEQ ID NO: 293570 - DNA, 403 bp, Homo sapiens; identical to SEQ ID NO: 130831
  chr19:12551485-12551888
  hyper

SEQ ID NO: 293571 - DNA, 109 bp, Homo sapiens
  chr19:12595000-12595109
  hyper
aggctggaggacacggtcgtgggtttgagatctggcttcccatacacttggaaaccttgagaaacgagtcctcccttgggaagaaaagagggactgaggaccccacaca

SEQ ID NO: 293572 - DNA, 538 bp, Homo sapiens; identical to SEQ ID NO: 205207
  chr19:12595307-12595845
  hyper

SEQ ID NO: 293573 - DNA, 216 bp, Homo sapiens
  chr19:12595896-12596112
  hyper
gctcagtttccagaaaaaggctctttgtccacagcgaaaaaggacgcccgggccatgccagactagaacggaagggtcagacgctcccagacttagcataaggctgcgaggccattcatggatttctgactcttgtttacaaatacagacacttagagtgacagagtgacctcatcatacctaacaaagagtgactacgttttaatctttgacaac

SEQ ID NO: 293574 - DNA, 204 bp, Homo sapiens
  chr19:12605963-12606167
  hyper
cacacctatgtccccgttcagaagcttcttcggtaaacgccagtgtccggtctgagggcctttatatctagcatataaagttctggtataatgcaaatgtctctggcaggacagtttcagggacaaaagtggaagctggatcgctcagctacctgacctccgtctgagatgtgactcaggcaacagggggtggaacctcacaaa

SEQ ID NO: 293575 - DNA, 135 bp, Homo sapiens
  chr19:12606511-12606646
  hyper
tcccgccgcagagtgaagctgggccggcagccaggatcccgggagtcctgtcctgtccccgcgcggctactgaggcccgggtcccggagccctgtgtgggcagctccatgcccgtagccccgcgtcttccaagat

SEQ ID NO: 293576 - DNA, 248 bp, Homo sapiens; identical to SEQ ID NO: 240140
  chr19:12662263-12662511
  hyper

SEQ ID NO: 293577 - DNA, 132 bp, Homo sapiens; identical to SEQ ID NO: 225804
  chr19:12707774-12707906
  hyper

SEQ ID NO: 293578 - DNA, 73 bp, Homo sapiens; identical to SEQ ID NO: 205209
  chr19:12721074-12721147
  hyper

SEQ ID NO: 293579 - DNA, 238 bp, Homo sapiens; identical to SEQ ID NO: 240142
  chr19:12721435-12721673
  hyper

SEQ ID NO: 293580 - DNA, 267 bp, Homo sapiens; identical to SEQ ID NO: 240144
  chr19:12777553-12777820
  hyper

SEQ ID NO: 293581 - DNA, 280 bp, Homo sapiens
  chr19:12806992-12807272
  hyper
ccactgggtagggcgcgcgtacgcggcgtagcgcgcgtagcctccaggtgacatggtcagacacgaggtcgcggagcgcgtggcacacccgcgacaggacgtggagcacgaggcgggcgtccaggtaggagcagatctcgagcagcagctccgggggaaggctcagaaggcccggctcacttacggccgaaaccctggacgcggcccgaggctccgaagcgctcggggacgcggcgggtgtggatagctgcgaggggcgcgagaacgccagcccggattt

SEQ ID NO: 293582 - DNA, 261 bp, Homo sapiens; identical to SEQ ID NO: 240146
  chr19:12848078-12848339
  hyper

SEQ ID NO: 293583 - DNA, 86 bp, Homo sapiens; identical to SEQ ID NO: 205211
  chr19:12885894-12885980
  hyper

SEQ ID NO: 293584 - DNA, 237 bp, Homo sapiens; identical to SEQ ID NO: 205212
  chr19:12899529-12899766
  hyper

SEQ ID NO: 293585 - DNA, 638 bp, Homo sapiens; identical to SEQ ID NO: 205213
  chr19:12900114-12900752
  hyper

SEQ ID NO: 293586 - DNA, 251 bp, Homo sapiens; identical to SEQ ID NO: 240150
  chr19:12902439-12902690
  hyper

SEQ ID NO: 293587 - DNA, 121 bp, Homo sapiens; identical to SEQ ID NO: 240151
  chr19:12912810-12912931
  hyper

SEQ ID NO: 293588 - DNA, 36 bp, Homo sapiens; identical to SEQ ID NO: 240152
  chr19:12917228-12917264
  hyper

SEQ ID NO: 293589 - DNA, 125 bp, Homo sapiens; identical to SEQ ID NO: 240153
  chr19:12943483-12943608
  hyper

SEQ ID NO: 293590 - DNA, 55 bp, Homo sapiens
  chr19:12946214-12946269
  hyper
caggttgggtccgcgccgtcgggtttctgagaaaagggaggaaagaggcggggcc

SEQ ID NO: 293591 - DNA, 121 bp, Homo sapiens
  chr19:12946314-12946435
  hyper
gctcagcgccacgcgggactttaaactcccgctcgagacaccgcccccaacgcggaatgcttccactcacccacccacccactcaaccccaggcttgctctgggtccggcgatccctgtcg

SEQ ID NO: 293592 - DNA, 182 bp, Homo sapiens
  chr19:12946881-12947063
  hyper
atatgtagacagcatcctgagttcgaatgccctgtctgcagtgtcaactattaatcctgtgcgggagaagcggaatccacttggccgagcggctctgcagctgagattggaggtggcgtctgtttacactgacgccaaagacccgaacttccgccgctccagtttgaccctttcttcgtccc

SEQ ID NO: 293593 - DNA, 273 bp, Homo sapiens
  chr19:12947127-12947400
  hyper
agccctccaggggcttaccctccaaggccggttacccggatctggacaccctgggctctgtggccagaaaatccaggtcttgatttcgcttgggccattgcagacacgcagccaggtcgactggtcctcattcactccggtcatgcaaagacagagggaaaacctggtttggattatcggtcacccgtggctcgggagggcagggctgccctttggccccgcctatatgtttgtccgttgtacaacggggtgggaggacgctgtggcccatcc

SEQ ID NO: 293594 - DNA, 213 bp, Homo sapiens; identical to SEQ ID NO: 205215
  chr19:12951463-12951676
  hyper

SEQ ID NO: 293595 - DNA, 144 bp, Homo sapiens
  chr19:12978576-12978720
  hyper
ggagggagaggccagtccccctttgggcgcccgccgccgtttctcggcgctgctggagcccagccgcttcagcgccccccaagaggacgaggatgaggcccggctgcgcaggcctccccggcccagctccgaccccgcgggatc

SEQ ID NO: 293596 - DNA, 460 bp, Homo sapiens; identical to SEQ ID NO: 240158
  chr19:12991904-12992364
  hyper

SEQ ID NO: 293597 - DNA, 220 bp, Homo sapiens
  chr19:12995851-12996071
  hyper
cgtgcaggcgtatggcttctcccctaggggacaaggaagccataagcgccactgtctgcccagtcatgtccccgggtcccctgcatctggccacacccctttactcagcctgggctgggactaggatgaacaaagtgaggcccctagggcacaaaatttaaggaggcactcactctcagaggccagccaagtccaagtcccgccctctgcaacccttctt

SEQ ID NO: 293598 - DNA, 40 bp, Homo sapiens; identical to SEQ ID NO: 240160
  chr19:13002468-13002508
  hyper

SEQ ID NO: 293599 - DNA, 36 bp, Homo sapiens; identical to SEQ ID NO: 226559
  chr19:13029431-13029467
  hyper

SEQ ID NO: 293600 - DNA, 106 bp, Homo sapiens
  chr19:13029767-13029873
  hyper
aaaaaaaaaaaaaagaaatgaaagaaacgggtgcggtgcgtgggtgtttgtgcctttctctactccgttccggccacgcgccatgtgtggaaatcagacccgtcag

SEQ ID NO: 293601 - DNA, 77 bp, Homo sapiens; identical to SEQ ID NO: 205218
  chr19:13030316-13030393
  hyper

SEQ ID NO: 293602 - DNA, 49 bp, Homo sapiens; identical to SEQ ID NO: 240161
  chr19:13044624-13044673
  hyper

SEQ ID NO: 293603 - DNA, 513 bp, Homo sapiens; identical to SEQ ID NO: 205219
  chr19:13049935-13050448
  hyper

SEQ ID NO: 293604 - DNA, 828 bp, Homo sapiens; identical to SEQ ID NO: 205220
  chr19:13050858-13051686
  hyper

SEQ ID NO: 293605 - DNA, 931 bp, Homo sapiens; identical to SEQ ID NO: 205221
  chr19:13054373-13055304
  hyper

SEQ ID NO: 293606 - DNA, 61 bp, Homo sapiens; identical to SEQ ID NO: 240162
  chr19:13067540-13067601
  hyper

SEQ ID NO: 293607 - DNA, 54 bp, Homo sapiens; identical to SEQ ID NO: 240163
  chr19:13068137-13068191
  hyper

SEQ ID NO: 293608 - DNA, 131 bp, Homo sapiens; identical to SEQ ID NO: 205222
  chr19:13094456-13094587
  hyper

SEQ ID NO: 293609 - DNA, 983 bp, Homo sapiens
  chr19:13106028-13107011
  hyper
atgtgtggcggggtccgagtcccgctgcgtgtcagcgtgtgtctgcgctggaacgcgggccagcacgtgtcagggcggccgcgtcggtgtgcgcccccgcgcgcgcgtgtgcgtgtgttcgtgtgtgtgtgtgcatgtgtgtgcttgtgtgtgtgcgccggccgccgctcccccgccctgcccgcccctccccgcgcccctcctcccgcccgcgccgcccgcccgctccctctccccggagtgcgccgcttccaaactttgtctaaactttcactttcacagcgcggcggctgcggcggcggcggcggcgggcgagggtgaccggccgagcggcggcggcatggagtagacgcgcggcggcagcggcggcggcggcggacgcgagaggcagcggcgagcgcggcggcggcggcggcagcggcggccccggagccggcggggccgagcttgcgagcggcgagcgcggagcggcgccgggccgagcgcggggccgcgggccgggcgggcgcagcgcggcggaggccggaggagccgagccggagcccgagcccgagcgcggccgccgcctgccgggcctcccctcgccgcggccggccgccgcgctcccgcccgggcgcccagctatgtactccccgtactgcctcacccaggtaccggccgccgcccccgcgcgaccgggggaggggagcgggcgcgggaggccggccggcggcgcgggcggaggggacgcgcggcggccgggaagggggggccgagagcccgcgggccgccgaggggtgcaggctgtgccgcggggagcccaggcacgcgtgcgggcgtcaccgtgcgcgtgcgaccctggccaccgggcggactccttttgggggttccgggggtggccagctgcgtcgtggcgctgcccgtggagcgcaggcgggagtgcgtgtacgtgtgtgtgtgtgtgtgtgtgtgtgtgtgcgcgctcgactggggtgcgatgggca

SEQ ID NO: 293610 - DNA, 354 bp, Homo sapiens
  chr19:13107035-13107389
  hyper
ctactgtagcgcgcacccgggcagcgtggtcgctggcagtgtttgcggggttgacagagtggcaagagggtggtcccgagggcgcagaggggacactgggtcccgcgacgcttcctggggagggcgcagcggttcccgagggtggcagtggccggcgtgcgtggcggcggcccttgcgtgcggccggggtgcctggggtgggccgagcggcccgggcgtctccccaaagtctttgtttaggcctcacatgggagcggggctaagaaaatggcggggctcccaaatttcggaggggcaggggaggggagaggggggcgggcgcgctgccagcggtggccgcgcctctccgacccc

SEQ ID NO: 293611 - DNA, 56 bp, Homo sapiens
  chr19:13208374-13208430
  hyper
tggactgctccggccgcgggtctccccgggcgcccctccctggggcccagcacccc

SEQ ID NO: 293612 - DNA, 205 bp, Homo sapiens
  chr19:13208478-13208683
  hyper
gcccctcccccgcagaggtcaatgccaacgaacaaacgtcccctccctccctccctctccgccccgagcgcccttctttgagccagacgccaacttgaccctcaccagcattatcaggagcgcgctcagcaagttggtagtttcctcccccctttcccggcgcccctcccgcccccattcaacatctctcatcctatccccgacc

SEQ ID NO: 293613 - DNA, 284 bp, Homo sapiens; identical to SEQ ID NO: 205227
  chr19:13208945-13209229
  hyper

SEQ ID NO: 293614 - DNA, 446 bp, Homo sapiens
  chr19:13209259-13209705
  hyper
tatctctatatatagtactaatggatttggtgtgcttcccccttagcgtccccctccctctgctcctcctccttcagcctggtctccccctcttctctgccctccacccccgtctctgcactgagatacataagaaacaagggtagtttactgtctgttttgttttctgggttttcagtgtcctagcggaatgcaagtaggcagccagcccgtctgttccctctccgccccgccccgccccgcccccgtcactgcgcttctgttataccatctttgcctgactctctccggcttctccattgaatggctaatgtgtatgtgaaataaagaaataaagaaaaacaaacgcgagagcgcctgacccttcgctaacgcgaccgtgcgggactgggtcggggtcggtagggtgcgtccccgacttggattctgcgcctctgtccaagcgc

SEQ ID NO: 293615 - DNA, 202 bp, Homo sapiens; identical to SEQ ID NO: 205229
  chr19:13213414-13213616
  hyper

SEQ ID NO: 293616 - DNA, 126 bp, Homo sapiens
  chr19:13213834-13213960
  hyper
tgtagggaccccgggcctctggggacccgggccccagggcagccggggagggaggtgcctggatgcacgcagggggtaaactgaggcagggaagctgcctcctcttatgtccgagtctgccctttg

SEQ ID NO: 293617 - DNA, 194 bp, Homo sapiens; identical to SEQ ID NO: 240168
  chr19:13260761-13260955
  hyper

SEQ ID NO: 293618 - DNA, 167 bp, Homo sapiens; identical to SEQ ID NO: 240169
  chr19:13262833-13263000
  hyper

SEQ ID NO: 293619 - DNA, 119 bp, Homo sapiens; identical to SEQ ID NO: 225817
  chr19:13263755-13263874
  hyper

SEQ ID NO: 293620 - DNA, 817 bp, Homo sapiens
  chr19:13264169-13264986
  hyper
ccgaggtgtcgttgccggccgccctcccctctgaccctcgcctgcacccgccccgagaagccgagtccacggccgagacagcgacccccgacggtgagcacccgtttccggagccaatggacacgcaggaggcgccgacagccgaggagacctccgcctgctgtgccccgcgccccgccaaagtcagccgcaaacgacgcagcagcagcctgagcgacggcggggacgctggactggtcccgagcaagaaagcccgtctggaagaaaaggaagaagaggagggagcgtcatccgaagtcgccgatcgcctgcagccccctccggcgcaagcggagggcgcctttcccaacctggcccgcgtcctgcagaggcgcttctccggcctcctgaactgcagccccgcggcccctccgacggcgccgcccgcgtgcgaggcaaagcccgcttgccgcccggcggacagcatgctcaacgtgctcgtgcgggccgtggtggccttctgaggaccccgagcggcgctgccggagcccagagcgcgcgtcgaaccgtcggcccgagggcgcagacctgaggcgaggccacccccctccatcctgggggaagcgcccgcgaaaaccgtggagagaagccgccgcccgggctgctgagaggcccggagagggactctgtccccggggagccatcgccttcagtgtgcagggacggcaccgaggagtctgagccgggggcgcgggcgccttccgcagagacctgcgcccacaggtgctgtcttagtggactgggacgtgaacctttcgctctccttctggactgggag

SEQ ID NO: 293621 - DNA, 1275 bp, Homo sapiens; identical to SEQ ID NO: 205231
  chr19:13265775-13267050
  hyper

SEQ ID NO: 293622 - DNA, 62 bp, Homo sapiens; identical to SEQ ID NO: 205232
  chr19:13274019-13274081
  hyper

SEQ ID NO: 293623 - DNA, 169 bp, Homo sapiens; identical to SEQ ID NO: 240174
  chr19:13388248-13388417
  hyper

SEQ ID NO: 293624 - DNA, 195 bp, Homo sapiens; identical to SEQ ID NO: 205233
  chr19:13954425-13954620
  hyper

SEQ ID NO: 293625 - DNA, 418 bp, Homo sapiens; identical to SEQ ID NO: 205234
  chr19:13961290-13961708
  hyper

SEQ ID NO: 293626 - DNA, 221 bp, Homo sapiens; identical to SEQ ID NO: 225824
  chr19:13975797-13976018
  hyper

SEQ ID NO: 293627 - DNA, 227 bp, Homo sapiens
  chr19:13983608-13983835
  hyper
gctgcgagagagggcgccccactccagctccagacagaggggtgggaacgtgaccccgacccggggcgggtgagagggcgggctctggggaaagggctctagaaggtgccgggaggcgggaggggggcttcgggagggcgagttagccgggatcgggcttgaggggccctacgaaattcggtttgggggcgtgcccggtcggggcggaccttagtggggggttgggc

SEQ ID NO: 293628 - DNA, 433 bp, Homo sapiens
  chr19:13983865-13984298
  hyper
tctatagagcaggcttttgtggagggctctaagggggcgggccctaagggagctgggctctttgaggactggcttaggggtttggcggtgggctccgtgggagtctatatgggcgggttttagagggagtgtgttctggggaacaggtcaaaagcgacggggctctaaggggcagggcctgggctggggccttggctggtggctccagactgtgggtggggctctcgggggcggggctctcgggggcgcgtcctcgggggctcggccgggttccgttgccaccaccgtgaggggtgtggtgggggggtggttcacgcagctcggcacacttgggggtccctcatctaccttggggttatgccaggcggttattttgggcctcagtattcccctcggtgaaatgccaggggccaggaaattacttatttttttg

SEQ ID NO: 293629 - DNA, 1343 bp, Homo sapiens; identical to SEQ ID NO: 205235
  chr19:14073501-14074844
  hyper

SEQ ID NO: 293630 - DNA, 234 bp, Homo sapiens
  chr19:14089418-14089652
  hyper
tggggagtcagaggcgggtccctagaccgacccgtcgggcggaggtggggtctacagggcttgcggggcctggtgggcggcccagactgggcgcccccgcccccgcccgcccgctgccccccgcccgtgcgtccgccacctactttgagggccgtggcggccgtgccgaacactagcacctgggggattctctggatcctgaccctctggtcggggctggctcgggccgggagc

SEQ ID NO: 293631 - DNA, 57 bp, Homo sapiens
  chr19:14089812-14089869
  hyper
ggggcggcggctccggcggcggcgtgggccggggatctcgctgctctgccttcctag

SEQ ID NO: 293632 - DNA, 174 bp, Homo sapiens; identical to SEQ ID NO: 205236
  chr19:14202317-14202491
  hyper

SEQ ID NO: 293633 - DNA, 48 bp, Homo sapiens; identical to SEQ ID NO: 225827
  chr19:14316561-14316609
  hyper

SEQ ID NO: 293634 - DNA, 169 bp, Homo sapiens; identical to SEQ ID NO: 240182
  chr19:14358695-14358864
  hyper

SEQ ID NO: 293635 - DNA, 443 bp, Homo sapiens; identical to SEQ ID NO: 225828
  chr19:14516821-14517264
  hyper

SEQ ID NO: 293636 - DNA, 214 bp, Homo sapiens; identical to SEQ ID NO: 240183
  chr19:14542785-14542999
  hyper

SEQ ID NO: 293637 - DNA, 81 bp, Homo sapiens; identical to SEQ ID NO: 205237
  chr19:14583720-14583801
  hyper

SEQ ID NO: 293638 - DNA, 32 bp, Homo sapiens; identical to SEQ ID NO: 205238
  chr19:14584167-14584199
  hyper

SEQ ID NO: 293639 - DNA, 205 bp, Homo sapiens
  chr19:14586138-14586343
  hyper
ggctctccggcaagccgcttcctccctccctcttcctggggcggctcctcagctcctcccgccgcccttgctggcctccaggggccgctccaccccgcgcacgcccgctgggggcctggagtggcagagacccccctctctgctcctggcaatgggcgggggccactctgggccccagcggctccctccacgaggagtgaggctc

SEQ ID NO: 293640 - DNA, 143 bp, Homo sapiens; identical to SEQ ID NO: 205239
  chr19:14607038-14607181
  hyper

SEQ ID NO: 293641 - DNA, 117 bp, Homo sapiens; identical to SEQ ID NO: 240187
  chr19:14629110-14629227
  hyper

SEQ ID NO: 293642 - DNA, 268 bp, Homo sapiens; identical to SEQ ID NO: 240188
  chr19:14640086-14640354
  hyper

SEQ ID NO: 293643 - DNA, 140 bp, Homo sapiens; identical to SEQ ID NO: 240189
  chr19:14682852-14682992
  hyper

SEQ ID NO: 293644 - DNA, 46 bp, Homo sapiens; identical to SEQ ID NO: 205241
  chr19:14887561-14887607
  hyper

SEQ ID NO: 293645 - DNA, 69 bp, Homo sapiens
  chr19:15089971-15090040
  hyper
cctctgacagagaaggcaaccgagccctataaatgcacaaggcatcgggctcggtgctggaaacgtgcc

SEQ ID NO: 293646 - DNA, 36 bp, Homo sapiens
  chr19:15091053-15091089
  hyper
ttaaagctgagaaaattaaagcgcgtgaggctggaa

SEQ ID NO: 293647 - DNA, 37 bp, Homo sapiens; identical to SEQ ID NO: 205242
  chr19:15121588-15121625
  hyper

SEQ ID NO: 293648 - DNA, 353 bp, Homo sapiens
  chr19:15235615-15235968
  hyper
ccctctggactagtcggggctcgctttcccaccctgcacaatgagtgagctggaagcagcaccacgaggcccctccctctttgactgcccccagcccacctcccattctgtgccccgcaccttgtgcagcagctgatagaagagccccaggcggtgagcggcgcccagcaaggcggccaccagcgtcccgcaggccaggagcaggaaggaggggaataagctcccagcgggggcggcggccgcgggggtctccatgaggtggtacctaagagagaaagggcacttcccagacttgggcgcgacagggaacctctccggaagaaatcgcgccccttctcgcagcaggatccagg

SEQ ID NO: 293649 - DNA, 367 bp, Homo sapiens; identical to SEQ ID NO: 240195
  chr19:15306318-15306685
  hyper

SEQ ID NO: 293650 - DNA, 379 bp, Homo sapiens; identical to SEQ ID NO: 205244
  chr19:15310946-15311325
  hyper

SEQ ID NO: 293651 - DNA, 238 bp, Homo sapiens
  chr19:15311355-15311593
  hyper
ggactcctgggtcccttcatcttcagctctaatcgctcaagggtccctgttccttgggcctctggggtcctccccattctgaatctctgggtcctccaggactggcatgaagcccggggctcctgcgccccttccccgaccctggttcctgcctcccatgaacccccgccagccccggccttgggggttcttgcactccccctctgccgccctcgtcccatccgccaggtcccggccc

SEQ ID NO: 293652 - DNA, 609 bp, Homo sapiens; identical to SEQ ID NO: 205246
  chr19:15334102-15334711
  hyper

SEQ ID NO: 293653 - DNA, 87 bp, Homo sapiens
  chr19:15479821-15479908
  hyper
ggccagggacggacgctgaaaaaaggttggagaagcatctgaactgtaacccctacccctgatgccagtcccgagactgtcccacga

SEQ ID NO: 293654 - DNA, 117 bp, Homo sapiens; identical to SEQ ID NO: 240201
  chr19:15490556-15490673
  hyper

SEQ ID NO: 293655 - DNA, 307 bp, Homo sapiens; identical to SEQ ID NO: 240202
  chr19:15529685-15529992
  hyper

SEQ ID NO: 293656 - DNA, 36 bp, Homo sapiens; identical to SEQ ID NO: 226560
  chr19:15694860-15694896
  hyper

SEQ ID NO: 293657 - DNA, 120 bp, Homo sapiens; identical to SEQ ID NO: 205247
  chr19:15695669-15695789
  hyper

SEQ ID NO: 293658 - DNA, 169 bp, Homo sapiens; identical to SEQ ID NO: 205248
  chr19:16186794-16186963
  hyper

SEQ ID NO: 293659 - DNA, 102 bp, Homo sapiens; identical to SEQ ID NO: 205249
  chr19:16187000-16187102
  hyper

SEQ ID NO: 293660 - DNA, 517 bp, Homo sapiens; identical to SEQ ID NO: 205250
  chr19:16187103-16187620
  hyper

SEQ ID NO: 293661 - DNA, 655 bp, Homo sapiens; identical to SEQ ID NO: 55781
  chr19:16187640-16188295
  hyper

SEQ ID NO: 293662 - DNA, 256 bp, Homo sapiens
  chr19:16222189-16222445
  hyper
cgagctgtgagggcgggacccagagacacccgccccaactactggcgtgcgccctctgctgtcgcctaacggaactccgggcgcgcgtgcgcacgcaccccaagccacgccccgccaggctgccggcgcgcgagcggttggcgccgctccctgccttccctctcctacagtggggcggggccgggccgcccgagtcgggggtggaaggcgggggccacataatgccacgcccccgcctcgtccccatttgaagccc

SEQ ID NO: 293663 - DNA, 214 bp, Homo sapiens; identical to SEQ ID NO: 131000
  chr19:16222493-16222707
  hyper

SEQ ID NO: 293664 - DNA, 235 bp, Homo sapiens; identical to SEQ ID NO: 240207
  chr19:16296081-16296316
  hyper

SEQ ID NO: 293665 - DNA, 178 bp, Homo sapiens; identical to SEQ ID NO: 240208
  chr19:16308331-16308509
  hyper

SEQ ID NO: 293666 - DNA, 88 bp, Homo sapiens; identical to SEQ ID NO: 240209
  chr19:16583044-16583132
  hyper

SEQ ID NO: 293667 - DNA, 409 bp, Homo sapiens; identical to SEQ ID NO: 240210
  chr19:16606941-16607350
  hyper

SEQ ID NO: 293668 - DNA, 120 bp, Homo sapiens; identical to SEQ ID NO: 205254
  chr19:16638141-16638261
  hyper

SEQ ID NO: 293669 - DNA, 61 bp, Homo sapiens; identical to SEQ ID NO: 205255
  chr19:16771042-16771103
  hyper

SEQ ID NO: 293670 - DNA, 672 bp, Homo sapiens; identical to SEQ ID NO: 240212
  chr19:16772106-16772778
  hyper

SEQ ID NO: 293671 - DNA, 31 bp, Homo sapiens; identical to SEQ ID NO: 205257
  chr19:17007055-17007086
  hyper

SEQ ID NO: 293672 - DNA, 225 bp, Homo sapiens; identical to SEQ ID NO: 205258
  chr19:17008134-17008359
  hyper

SEQ ID NO: 293673 - DNA, 31 bp, Homo sapiens; identical to SEQ ID NO: 55797
  chr19:17008820-17008851
  hyper

SEQ ID NO: 293674 - DNA, 76 bp, Homo sapiens; identical to SEQ ID NO: 225842
  chr19:17137592-17137668
  hyper

SEQ ID NO: 293675 - DNA, 80 bp, Homo sapiens; identical to SEQ ID NO: 240215
  chr19:17326050-17326130
  hyper

SEQ ID NO: 293676 - DNA, 611 bp, Homo sapiens
  chr19:17355714-17356325
  hyper
ggggtgcacggcggcggcgcgcggatggggggctcaccggcaggtgtagctgaggttgcggcggatgcttcgcttgaaaaagctcttgcagccctcgcaggtgaagacaccgtaatgcttgccgctcgacttgtccccgcacaccacgcagtccacctgcagccccggccgctcctcgtcgcccggctcggcgtcgctggcggcaccggggggcgaggccgagtcgtcctcggccgcgcgcgggtagccgcccgccttgtccacgccgttcgtgtcgccgccggggccgccccagccgccggtcaccatggccatagccccagggcagcggggccggggcgcccccaccgcgctcttccctccgggcacccctctcggcccgggggaccctacgcggcgcgcattcggccccggcgcgcggggggcacgggctgcaccccccaaaaaagttttgcagcaacttcctgcggccggtcctcgcgcccgggcggaactggtcgggccggttccaggccaactttcccacgcgtgcgcggggccgggcccggggccgggaggggcacgctagaggcgcgggccgggggcccagaggactcgcgtcccgccgccct

SEQ ID NO: 293677 - DNA, 265 bp, Homo sapiens; identical to SEQ ID NO: 225844
  chr19:17357470-17357735
  hyper

SEQ ID NO: 293678 - DNA, 146 bp, Homo sapiens; identical to SEQ ID NO: 240217
  chr19:17378082-17378228
  hyper

SEQ ID NO: 293679 - DNA, 103 bp, Homo sapiens
  chr19:17392399-17392502
  hyper
tagctccacccactcgagccgggtgccttcgcgtttcccgtttttaaatgagatagtggcacacccggtggcatcctcccacccgggctcttatcggcggtcc

SEQ ID NO: 293680 - DNA, 139 bp, Homo sapiens; identical to SEQ ID NO: 205262
  chr19:17420265-17420404
  hyper

SEQ ID NO: 293681 - DNA, 512 bp, Homo sapiens; identical to SEQ ID NO: 240221
  chr19:17448123-17448635
  hyper

SEQ ID NO: 293682 - DNA, 200 bp, Homo sapiens
  chr19:17531154-17531354
  hyper
tttggcaagagcttcgcgcagaaatctggctacttcctgtgccttagttctctgggcagcctagaggtaagaggtgcccaccttcggaaccaccagggtctgcccacctcccctgcccattcacggtgccctatgccaggtgcgctgtccccgctgctagccaccctcgccgtgtcccccttccacccccagaacccgca

SEQ ID NO: 293683 - DNA, 160 bp, Homo sapiens; identical to SEQ ID NO: 240224
  chr19:17581046-17581206
  hyper

SEQ ID NO: 293684 - DNA, 186 bp, Homo sapiens; identical to SEQ ID NO: 240225
  chr19:17607095-17607281
  hyper

SEQ ID NO: 293685 - DNA, 185 bp, Homo sapiens; identical to SEQ ID NO: 205265
  chr19:17622145-17622330
  hyper

SEQ ID NO: 293686 - DNA, 392 bp, Homo sapiens; identical to SEQ ID NO: 225848
  chr19:17649952-17650344
  hyper

SEQ ID NO: 293687 - DNA, 101 bp, Homo sapiens; identical to SEQ ID NO: 240227
  chr19:17666360-17666461
  hyper

SEQ ID NO: 293688 - DNA, 239 bp, Homo sapiens; identical to SEQ ID NO: 205266
  chr19:17716539-17716778
  hyper

SEQ ID NO: 293689 - DNA, 38 bp, Homo sapiens; identical to SEQ ID NO: 205267
  chr19:17790867-17790905
  hyper

SEQ ID NO: 293690 - DNA, 52 bp, Homo sapiens; identical to SEQ ID NO: 205268
  chr19:17792549-17792601
  hyper

SEQ ID NO: 293691 - DNA, 229 bp, Homo sapiens; identical to SEQ ID NO: 240232
  chr19:17797519-17797748
  hyper

SEQ ID NO: 293692 - DNA, 330 bp, Homo sapiens
  chr19:17799069-17799399
  hyper
ggccgctgggctggggcatctcccggctgcagcccgcgcttggctcacgccggggcccggccgccaccggccatcttggttcagcaccgggggcgcggacagcgcctgacgtggcgctgatgcggggcgggcaggcggagcccagggacgcctgatggggcgggggcgctgcgggctgggggggcgttaaagggcctggctccgggaaggggcgcctcgccccacacctcctcgttgcagggggacaaggggcgacggcggcccccaagcaggtttcctcctgtgcagaccctcacctgcactgaaatggtgcacgtgcccccgccaccc

SEQ ID NO: 293693 - DNA, 232 bp, Homo sapiens; identical to SEQ ID NO: 240233
  chr19:17830034-17830266
  hyper

SEQ ID NO: 293694 - DNA, 129 bp, Homo sapiens; identical to SEQ ID NO: 205270
  chr19:17958346-17958475
  hyper

SEQ ID NO: 293695 - DNA, 171 bp, Homo sapiens; identical to SEQ ID NO: 240235
  chr19:17970699-17970870
  hyper

SEQ ID NO: 293696 - DNA, 93 bp, Homo sapiens
  chr19:17982693-17982786
  hyper
tggaggcggagtcgcggtgacccgggagcccaataaatctgcaacccacaatcacgagctgctcccgtaagccccaaggcgacctccagctgt

SEQ ID NO: 293697 - DNA, 34 bp, Homo sapiens; identical to SEQ ID NO: 12152
  chr19:17983839-17983873
  hyper

SEQ ID NO: 293698 - DNA, 164 bp, Homo sapiens
  chr19:17984912-17985076
  hyper
gactgtccaggtgacctcgagtccctccttgcagtacctggagatgcgcttcagccgcgcagtgcggctctgcgggactttgcagtacattgtagccacggtgagtggcctcggccccgccctccgctcagggccccgagagcgtcagccttcactagcccggc

SEQ ID NO: 293699 - DNA, 303 bp, Homo sapiens; identical to SEQ ID NO: 240238
  chr19:18043467-18043770
  hyper

SEQ ID NO: 293700 - DNA, 121 bp, Homo sapiens; identical to SEQ ID NO: 240239
  chr19:18059918-18060039
  hyper

SEQ ID NO: 293701 - DNA, 89 bp, Homo sapiens; identical to SEQ ID NO: 205272
  chr19:18062904-18062993
  hyper

SEQ ID NO: 293702 - DNA, 355 bp, Homo sapiens
  chr19:18117802-18118157
  hyper
tccgatccccatcacgggctgagggtgaccgtgtttgtttatgaccgccccctccacccacacacctcactgaggtggtggaagtctcctgagccaggctcagaggcggacagtcacggcaggggatgggttcagcggcagcgcattacgctgccacgagagggcgccagcgtcccgcagacgacgcagaggcaactcccgctggagaaactccatgcgacttttctttggggaaactgaagcccagagagaggtcacgccgtcccgtggccacaccgcagctgtggacctgggggtgcccgagcgtcccctgcattcagctctgtggcgggacgggggctgaggatgactggag

SEQ ID NO: 293703 - DNA, 50 bp, Homo sapiens; identical to SEQ ID NO: 205274
  chr19:18118523-18118573
  hyper

SEQ ID NO: 293704 - DNA, 99 bp, Homo sapiens; identical to SEQ ID NO: 205275
  chr19:18119043-18119142
  hyper

SEQ ID NO: 293705 - DNA, 124 bp, Homo sapiens
  chr19:18271975-18272099
  hyper
ggcgcgccgggccctgcggggtgagcctggcgggtagcccgggggaaggagggggctgtagcgggtgggagggcccaggcctggctcaccctgccctggccatctgtccgcagaggccgcgggg

SEQ ID NO: 293706 - DNA, 198 bp, Homo sapiens; identical to SEQ ID NO: 240248
  chr19:18313919-18314117
  hyper

SEQ ID NO: 293707 - DNA, 104 bp, Homo sapiens; identical to SEQ ID NO: 240249
  chr19:18314978-18315082
  hyper

SEQ ID NO: 293708 - DNA, 263 bp, Homo sapiens; identical to SEQ ID NO: 240250
  chr19:18335415-18335678
  hyper

SEQ ID NO: 293709 - DNA, 209 bp, Homo sapiens; identical to SEQ ID NO: 240251
  chr19:18335915-18336124
  hyper

SEQ ID NO: 293710 - DNA, 225 bp, Homo sapiens; identical to SEQ ID NO: 205276
  chr19:18336505-18336730
  hyper

SEQ ID NO: 293711 - DNA, 202 bp, Homo sapiens
  chr19:18337130-18337332
  hyper
accaaaagcttcctgaagagcccgggggagccgcgcggggatccccgaggggagccgggcccggggaccggggcgggcgcgggggggccctgcatcgccaggactgcgtggaggctggaccgagcgccggctgcgcgggaccttttctggacagctgcgggggcggggcccagcggggagggggcaaagggcgcatcggccc

SEQ ID NO: 293712 - DNA, 136 bp, Homo sapiens; identical to SEQ ID NO: 205278
  chr19:18343303-18343439
  hyper

SEQ ID NO: 293713 - DNA, 199 bp, Homo sapiens
  chr19:18344017-18344216
  hyper
tctgggatagcagggagcaggactcgtccccgtgagcgggcgccgaggagcgtctgctcccgggtccggcccagggccgggagtggaggcgacagcgaggagctgtccgcgccggaggtgctgaagcggtagaaggtggaactggggctcaaggtggggccgacaccgaggagctgtcgatgcccagatggtgctgaag

SEQ ID NO: 293714 - DNA, 330 bp, Homo sapiens; identical to SEQ ID NO: 205279
  chr19:18420497-18420827
  hyper

SEQ ID NO: 293715 - DNA, 226 bp, Homo sapiens; identical to SEQ ID NO: 240255
  chr19:18434128-18434354
  hyper

SEQ ID NO: 293716 - DNA, 125 bp, Homo sapiens; identical to SEQ ID NO: 240256
  chr19:18451214-18451339
  hyper

SEQ ID NO: 293717 - DNA, 137 bp, Homo sapiens
  chr19:18528685-18528822
  hyper
gtgggggcggggggttctcacgtactggggggcggcctctatcggggaggcatctgcggggtcagctggcagcgagagacatccagacattcacacacaaacacacacacgaaacgtgagcacagagccacacacag

SEQ ID NO: 293718 - DNA, 255 bp, Homo sapiens
  chr19:18528975-18529230
  hyper
ttattgggtgtttgcccgccccccacgcacaaggatgcacacgtgcactcacacgggagccgcgtgtttgcacacacgcgggcttgcctaggaaaaaagaggaatagccgtggcaaacacagaaacatctagacccagagtcaaccgcaccgccttcccctaccctgcccatccacacacgacccactggtacccgggcatccctgccctgcgggggtccctgactcagtatccgcccccaccctctctgaacac

SEQ ID NO: 293719 - DNA, 40 bp, Homo sapiens; identical to SEQ ID NO: 205280
  chr19:18547990-18548030
  hyper

SEQ ID NO: 293720 - DNA, 571 bp, Homo sapiens; identical to SEQ ID NO: 205281
  chr19:18548568-18549139
  hyper

SEQ ID NO: 293721 - DNA, 238 bp, Homo sapiens; identical to SEQ ID NO: 240259
  chr19:18632770-18633008
  hyper

SEQ ID NO: 293722 - DNA, 63 bp, Homo sapiens; identical to SEQ ID NO: 240260
  chr19:18682793-18682856
  hyper

SEQ ID NO: 293723 - DNA, 150 bp, Homo sapiens; identical to SEQ ID NO: 240261
  chr19:18705872-18706022
  hyper

SEQ ID NO: 293724 - DNA, 104 bp, Homo sapiens; identical to SEQ ID NO: 205283
  chr19:18714351-18714455
  hyper

SEQ ID NO: 293725 - DNA, 89 bp, Homo sapiens; identical to SEQ ID NO: 205284
  chr19:18715135-18715224
  hyper

SEQ ID NO: 293726 - DNA, 448 bp, Homo sapiens
  chr19:18715790-18716238
  hyper
gggtccccatctcccgtcccgctggtacctgcagacactttacgacccacccgcctgctggtcaggtgctaagacacaccgtaagtagaaacatattgccgaggtgtgagaatcttttatttaatttcttccccccttaaaggaaaaaacacacttacagtgcccccccaccccctacaccttcgcctgctgctctactggctgaaaacaaagcttggcgctcacagtggcactcacaggcgctgcccaccgcctggcagagccgtcaggggccctgggagggcccgaggtagcccctcacctgaaagccaggggagagccaggctttcagcaagtgcccctagaagatgcccggaccctgccccttcccggaggagccctacaggcagcccgcaaacagcccagcacagggtggatgagcctgggagcagtgtgtgcccggcgaccc

SEQ ID NO: 293727 - DNA, 452 bp, Homo sapiens
  chr19:18716283-18716735
  hyper
catctggggcgagtggtgcctgcctctgtgcccctgggtcgcctcccctgtgggatgtgtgtgaccgtgaatgtgtgtgtcggggatggaatgtgtgtgcgtccgcgatggtgcgcgaatgtgcacctgggatgcagtgtgcgcgagtttgagggcgagggtgacgggccacaagccagtgtgattctttgtgtgtctctgggtgtgtcccagagcgggtctgcatacggagacgtatccttgcgggggtgttccttggatggggggccccagagtgcctgaggccagaagtccctccagggcaggggtcttggcccgtagggcagcgggttcccagtgggccccctcaaagtttgggcccgctggtgcccggactcactggctcccgctccctctccctctcacccactcgctcacaaagattcctctcgctggaggctctccgcccgacg

SEQ ID NO: 293728 - DNA, 355 bp, Homo sapiens
  chr19:18716847-18717202
  hyper
cccccgggaccccgggctgcgcgccaggcggccagagcggcccccctgcagccccgccctccccgtggggctcatccctccgcctgggggggcccgctgggggcccgcacccagcgcgccaaccgcgtgcgcccccgcctgggagcggtgccctgcagtcccaggggcccagagtccaccgaagcagacgcgtgcgcccgccacgtcctggcatgcagagggtctcaggccgcgatccccccagcccccgggggcctggcctggcgccctcggcccagctgcccaggtaacagggcctcgggcgcggaagcaggactctctggacagtggactgcggcgccgtgtgccccgcagg

SEQ ID NO: 293729 - DNA, 374 bp, Homo sapiens; identical to SEQ ID NO: 240265
  chr19:18717411-18717785
  hyper

SEQ ID NO: 293730 - DNA, 747 bp, Homo sapiens
  chr19:18721516-18722263
  hyper
gcttgtccgctgcccgccttgacctcggctgctgtggcttcccggacgcctggcctgccgctgattcacgcccaggccggcctcagcgccccccgcctgccgcccccagccaggccgccccggggggtaggaagtgggggggggggcgagggcggcgccgagtcaactttccctcttaagccccgaaggaatgtcggcggatttcctgaaacccgaccctggccgcccgccggccctcccgcccctcacctggaccggctcccccgggaacagcaggaggggcgcgggggctcaccttgggggccggggtcaagtcctctttccgctcacccccccagcggcctagtgcagcggaaagggggctgggtgtgcggcaatcagcctctttcccttctcccctcaggcgacctgggtgatcgacccactcctccagcctcagtttctccttctgcaaaagggcgcggggtgtccctcctccctgatgcgttttaagcaatgcccaaaggtcacctcccatcattggcagggctctgccggcttttctttgcttctctccctgtcacctggacagaaccactttgcagtctgagcatcagtttcctcacccatataaaagggcaacgctaccggtacctgtcttatacggttgttgcaagaaaaagtgtttcgttggaatgaatgaaagacagtaattgtggaggggttaggcgcgcgcgggcctctggaattagcatgtgtgggcttgaa

SEQ ID NO: 293731 - DNA, 64 bp, Homo sapiens
  chr19:18722425-18722489
  hyper
ggaggccctcgccgccgggtcgcagcggcctagcatgggaggggaggggaggggcggggcgggg

SEQ ID NO: 293732 - DNA, 154 bp, Homo sapiens
  chr19:18722521-18722675
  hyper
cggggtccgccaggcacagccgcgcctgattaagccacgtgggggccggccgggggccgctgagatgaaagcgcggccgcaggccagagtagggggtgcgccgggcccccacccgggacaccctcttcccaggccgaaacctgagccgccctct

SEQ ID NO: 293733 - DNA, 209 bp, Homo sapiens
  chr19:18722768-18722977
  hyper
cgccaggcatgccagcgaaagcgggggcatctttgcagaggatccgggtttagaggggcgtccccactcccttatctggcggagaggaagctgggggtaccctctaaccgagattcggctcctggggctacagtccatcgccctggggtgtgatggttatggaagtcagaagtgtcgctatttgccccgttttcccatgagaattagac

SEQ ID NO: 293734 - DNA, 31 bp, Homo sapiens
  chr19:18723960-18723991
  hyper
gtgccagcgggggacgcgggatctctccgaa

SEQ ID NO: 293735 - DNA, 50 bp, Homo sapiens; identical to SEQ ID NO: 205286
  chr19:18811449-18811499
  hyper

SEQ ID NO: 293736 - DNA, 76 bp, Homo sapiens
  chr19:18899652-18899728
  hyper
tgttgatgcacacggagttggggacgcagttatgttgcccggtctcacactcgttgatgtccgtgcaaacctaggg

SEQ ID NO: 293737 - DNA, 178 bp, Homo sapiens
  chr19:19005838-19006016
  hyper
ctctctcgcaggggcgatggtctccgcagaaactggggaattctgctgtcgcctcttggaggcagcacagtccaaccctgaagccccgggccatgtcacctccaagggagcgaccactggcgtggccagagcacccaggcccttgccatccctggtcggagggtggcgctgaccccag

SEQ ID NO: 293738 - DNA, 326 bp, Homo sapiens; identical to SEQ ID NO: 240275
  chr19:19030080-19030406
  hyper

SEQ ID NO: 293739 - DNA, 182 bp, Homo sapiens; identical to SEQ ID NO: 240276
  chr19:19144430-19144612
  hyper

SEQ ID NO: 293740 - DNA, 111 bp, Homo sapiens; identical to SEQ ID NO: 240277
  chr19:19174943-19175054
  hyper

SEQ ID NO: 293741 - DNA, 222 bp, Homo sapiens; identical to SEQ ID NO: 240278
  chr19:19314201-19314423
  hyper

SEQ ID NO: 293742 - DNA, 119 bp, Homo sapiens; identical to SEQ ID NO: 205287
  chr19:19336136-19336255
  hyper

SEQ ID NO: 293743 - DNA, 352 bp, Homo sapiens; identical to SEQ ID NO: 240281
  chr19:19431245-19431597
  hyper

SEQ ID NO: 293744 - DNA, 31 bp, Homo sapiens; identical to SEQ ID NO: 240282
  chr19:19626942-19626973
  hyper

SEQ ID NO: 293745 - DNA, 68 bp, Homo sapiens
  chr19:19648966-19649034
  hyper
ggcgacccagaggggttgctcgagcgccgtcacccagggccagggggcgtggcctgaatggggcgtgg

SEQ ID NO: 293746 - DNA, 84 bp, Homo sapiens; identical to SEQ ID NO: 205289
  chr19:19651027-19651111
  hyper

SEQ ID NO: 293747 - DNA, 99 bp, Homo sapiens; identical to SEQ ID NO: 205290
  chr19:19729152-19729251
  hyper

SEQ ID NO: 293748 - DNA, 135 bp, Homo sapiens; identical to SEQ ID NO: 205291
  chr19:19729395-19729530
  hyper

SEQ ID NO: 293749 - DNA, 162 bp, Homo sapiens; identical to SEQ ID NO: 12178
  chr19:19729585-19729747
  hyper

SEQ ID NO: 293750 - DNA, 50 bp, Homo sapiens; identical to SEQ ID NO: 205293
  chr19:19738572-19738622
  hyper

SEQ ID NO: 293751 - DNA, 504 bp, Homo sapiens
  chr19:19738668-19739172
  hyper
cgggcggggcaataggctgttccgggtgggacggaggacactggcggtctccgggacaaagacagcggttggggaagggatggatggccgggcctccaggcgtctccagactggggaaggggtagggggttaagggatcagagggcggcgtcctggccccgcaggcacgtgccgcgcccttcccccgggcccaggcccgcacccgcccgcctcccgtccgtgcaggcctcacctgggcctccagtcacgccgcagacaaggcgggctcgcgggggttcggggcgggctcgaggcccatggcccggcgactgcggcgggagcggtagagcgtccgggtgcgccctgtgcgggttgctgagagggcgcgggaggcggggtctccccggcgccccgcccccaccacctgggggagccctgccccgccccgccacctgggggagccccgcctccacggccgcgtcgggggcggtgtcgcccggaaccgcagcccccctgtttcctccc

SEQ ID NO: 293752 - DNA, 247 bp, Homo sapiens; identical to SEQ ID NO: 205295
  chr19:19739428-19739675
  hyper

SEQ ID NO: 293753 - DNA, 261 bp, Homo sapiens; identical to SEQ ID NO: 205296
  chr19:19843330-19843591
  hyper

SEQ ID NO: 293754 - DNA, 68 bp, Homo sapiens; identical to SEQ ID NO: 205297
  chr19:19844044-19844112
  hyper

SEQ ID NO: 293755 - DNA, 259 bp, Homo sapiens; identical to SEQ ID NO: 205298
  chr19:19887242-19887501
  hyper

SEQ ID NO: 293756 - DNA, 79 bp, Homo sapiens; identical to SEQ ID NO: 205299
  chr19:19932101-19932180
  hyper

SEQ ID NO: 293757 - DNA, 44 bp, Homo sapiens; identical to SEQ ID NO: 205300
  chr19:19932461-19932505
  hyper

SEQ ID NO: 293758 - DNA, 52 bp, Homo sapiens; identical to SEQ ID NO: 205301
  chr19:19932709-19932761
  hyper

SEQ ID NO: 293759 - DNA, 695 bp, Homo sapiens; identical to SEQ ID NO: 205302
  chr19:19976554-19977249
  hyper

SEQ ID NO: 293760 - DNA, 60 bp, Homo sapiens; identical to SEQ ID NO: 205303
  chr19:19977294-19977354
  hyper

SEQ ID NO: 293761 - DNA, 101 bp, Homo sapiens
  chr19:19977572-19977673
  hyper
aaaggggtttttaaccctaaacgccgttattgcctctgtgtccttcccccattggccggggtctgacctcacaatctaggctgacccgattggctactttc

SEQ ID NO: 293762 - DNA, 323 bp, Homo sapiens; identical to SEQ ID NO: 205305
  chr19:20011267-20011590
  hyper

SEQ ID NO: 293763 - DNA, 71 bp, Homo sapiens; identical to SEQ ID NO: 205306
  chr19:20011650-20011721
  hyper

SEQ ID NO: 293764 - DNA, 108 bp, Homo sapiens; identical to SEQ ID NO: 205307
  chr19:20011722-20011830
  hyper

SEQ ID NO: 293765 - DNA, 180 bp, Homo sapiens; identical to SEQ ID NO: 240298
  chr19:20012430-20012610
  hyper

SEQ ID NO: 293766 - DNA, 73 bp, Homo sapiens; identical to SEQ ID NO: 205308
  chr19:20162581-20162654
  hyper

SEQ ID NO: 293767 - DNA, 145 bp, Homo sapiens; identical to SEQ ID NO: 205309
  chr19:20188872-20189017
  hyper

SEQ ID NO: 293768 - DNA, 120 bp, Homo sapiens; identical to SEQ ID NO: 205310
  chr19:20189077-20189197
  hyper

SEQ ID NO: 293769 - DNA, 142 bp, Homo sapiens; identical to SEQ ID NO: 240305
  chr19:21512074-21512216
  hyper

SEQ ID NO: 293770 - DNA, 120 bp, Homo sapiens; identical to SEQ ID NO: 205311
  chr19:21541709-21541829
  hyper

SEQ ID NO: 293771 - DNA, 180 bp, Homo sapiens; identical to SEQ ID NO: 205312
  chr19:21542069-21542249
  hyper

SEQ ID NO: 293772 - DNA, 120 bp, Homo sapiens; identical to SEQ ID NO: 205313
  chr19:21542309-21542429
  hyper

SEQ ID NO: 293773 - DNA, 335 bp, Homo sapiens; identical to SEQ ID NO: 205314
  chr19:21579819-21580154
  hyper

SEQ ID NO: 293774 - DNA, 101 bp, Homo sapiens; identical to SEQ ID NO: 12199
  chr19:21580233-21580334
  hyper

SEQ ID NO: 293775 - DNA, 40 bp, Homo sapiens; identical to SEQ ID NO: 205316
  chr19:21646195-21646235
  hyper

SEQ ID NO: 293776 - DNA, 97 bp, Homo sapiens; identical to SEQ ID NO: 205317
  chr19:21646437-21646534
  hyper

SEQ ID NO: 293777 - DNA, 46 bp, Homo sapiens
  chr19:21657508-21657554
  hyper
tgcactaatgctggggaagccgcgctgggaggtgggtcctgaagct

SEQ ID NO: 293778 - DNA, 173 bp, Homo sapiens
  chr19:21657590-21657763
  hyper
atcaggcgcggagttggagaggagggcgtggcctccggcatttggcgggccctttgtctcgctcctgccagagttttagttgcctgtctctgctattctgcgtcctccacctcgggagccccaggtgactttgtcacagccggtgggtgtgcgggttgagcatcccgagatgg

SEQ ID NO: 293779 - DNA, 211 bp, Homo sapiens; identical to SEQ ID NO: 205318
  chr19:21688290-21688501
  hyper

SEQ ID NO: 293780 - DNA, 73 bp, Homo sapiens
  chr19:21688741-21688814
  hyper
ctgtgctgacagccgggccccgggcgtcctgtcttccctccgcagtgactgtgcctgacgtgtagccctgtct

SEQ ID NO: 293781 - DNA, 170 bp, Homo sapiens; identical to SEQ ID NO: 205319
  chr19:21769119-21769289
  hyper

SEQ ID NO: 293782 - DNA, 83 bp, Homo sapiens
  chr19:21769600-21769683
  hyper
gccggcgccccgctccgctccccccaggcctcaaccccgctggctacccgcgctgaaacctcacctgccgccggctgcaaacg

SEQ ID NO: 293783 - DNA, 34 bp, Homo sapiens; identical to SEQ ID NO: 205320
  chr19:22018874-22018908
  hyper

SEQ ID NO: 293784 - DNA, 60 bp, Homo sapiens; identical to SEQ ID NO: 205321
  chr19:22019028-22019088
  hyper

SEQ ID NO: 293785 - DNA, 99 bp, Homo sapiens
  chr19:22610387-22610486
  hyper
ataattcaggcccgcggggccaccagccctccctcaagcccccccacactcatcaggtgacgacctccctgtgtgtggctgccaggctgggggtggggg

SEQ ID NO: 293786 - DNA, 92 bp, Homo sapiens
  chr19:22610883-22610975
  hyper
gggcaggggctggtcttagctgacaccctcacctccgccctccagattccagcctctgactctggccaatctggccaggacctggggtctgg

SEQ ID NO: 293787 - DNA, 185 bp, Homo sapiens
  chr19:22611005-22611190
  hyper
ctaccagctggggcctcgcacttggatggggaccttaaggctccaggcgccacacacaccagtgcgccctctctggccgtgaatttcagggaggggcggcagcagagcccgcgggctggcctggtggggacgatcaccttttcccacctagtcgcccttgccagtccccgcgtcgcctgcagggc

SEQ ID NO: 293788 - DNA, 42 bp, Homo sapiens; identical to SEQ ID NO: 131204
  chr19:22611241-22611283
  hyper

SEQ ID NO: 293789 - DNA, 117 bp, Homo sapiens
  chr19:22817085-22817202
  hyper
gcagctggagcggaaagggcggcttccgggatgtggcggggtctttgtctctcgctgcagtcggagtatggtctagtgttcgctgttctgcgtcctctggtcctagaggcccatcct

SEQ ID NO: 293790 - DNA, 87 bp, Homo sapiens; identical to SEQ ID NO: 205322
  chr19:23299824-23299911
  hyper

SEQ ID NO: 293791 - DNA, 120 bp, Homo sapiens; identical to SEQ ID NO: 205323
  chr19:23432613-23432733
  hyper

SEQ ID NO: 293792 - DNA, 169 bp, Homo sapiens; identical to SEQ ID NO: 205324
  chr19:23432793-23432962
  hyper

SEQ ID NO: 293793 - DNA, 120 bp, Homo sapiens; identical to SEQ ID NO: 205325
  chr19:23433023-23433143
  hyper

SEQ ID NO: 293794 - DNA, 132 bp, Homo sapiens; identical to SEQ ID NO: 205326
  chr19:23433296-23433428
  hyper

SEQ ID NO: 293795 - DNA, 124 bp, Homo sapiens; identical to SEQ ID NO: 205327
  chr19:23456491-23456615
  hyper

SEQ ID NO: 293796 - DNA, 237 bp, Homo sapiens; identical to SEQ ID NO: 205328
  chr19:23456881-23457118
  hyper

SEQ ID NO: 293797 - DNA, 58 bp, Homo sapiens; identical to SEQ ID NO: 205329
  chr19:23577691-23577749
  hyper

SEQ ID NO: 293798 - DNA, 120 bp, Homo sapiens; identical to SEQ ID NO: 205330
  chr19:23578195-23578315
  hyper

SEQ ID NO: 293799 - DNA, 82 bp, Homo sapiens; identical to SEQ ID NO: 205331
  chr19:23598013-23598095
  hyper

SEQ ID NO: 293800 - DNA, 89 bp, Homo sapiens; identical to SEQ ID NO: 205332
  chr19:23598868-23598957
  hyper

SEQ ID NO: 293801 - DNA, 221 bp, Homo sapiens
  chr19:23653859-23654080
  hyper
gagcttctcccgctcgaacaatttgcagctagttccggggcttcccttcctcctcccacaccggcccgcatcctagtgttgctttctctgcccccagcaccagcctcttcttgggctccctcctccccttcccactcgcgtctcttaggaaactgcgaccctagtgtttgctaaggagcaggggaggtccttcccgtcgccgacgccccccgcccggaaag

SEQ ID NO: 293802 - DNA, 180 bp, Homo sapiens; identical to SEQ ID NO: 205333
  chr19:23869522-23869702
  hyper

SEQ ID NO: 293803 - DNA, 283 bp, Homo sapiens; identical to SEQ ID NO: 205334
  chr19:23869882-23870165
  hyper

SEQ ID NO: 293804 - DNA, 700 bp, Homo sapiens; identical to SEQ ID NO: 205335
  chr19:24216104-24216804
  hyper

SEQ ID NO: 293805 - DNA, 75 bp, Homo sapiens; identical to SEQ ID NO: 205336
  chr19:28284060-28284135
  hyper

SEQ ID NO: 293806 - DNA, 811 bp, Homo sapiens; identical to SEQ ID NO: 205337
  chr19:28284338-28285149
  hyper

SEQ ID NO: 293807 - DNA, 32 bp, Homo sapiens; identical to SEQ ID NO: 205338
  chr19:30019081-30019113
  hyper

SEQ ID NO: 293808 - DNA, 235 bp, Homo sapiens; identical to SEQ ID NO: 240349
  chr19:30096855-30097090
  hyper

SEQ ID NO: 293809 - DNA, 99 bp, Homo sapiens; identical to SEQ ID NO: 205339
  chr19:30155980-30156079
  hyper

SEQ ID NO: 293810 - DNA, 87 bp, Homo sapiens; identical to SEQ ID NO: 205340
  chr19:30156299-30156386
  hyper

SEQ ID NO: 293811 - DNA, 268 bp, Homo sapiens; identical to SEQ ID NO: 225875
  chr19:30165119-30165387
  hyper

SEQ ID NO: 293812 - DNA, 55 bp, Homo sapiens; identical to SEQ ID NO: 240352
  chr19:30206577-30206632
  hyper

SEQ ID NO: 293813 - DNA, 39 bp, Homo sapiens
  chr19:30215474-30215513
  hyper
gctcagccctgcagacgcgagcagtggggaaataattaa

SEQ ID NO: 293814 - DNA, 42 bp, Homo sapiens; identical to SEQ ID NO: 205341
  chr19:30716161-30716203
  hyper

SEQ ID NO: 293815 - DNA, 60 bp, Homo sapiens; identical to SEQ ID NO: 205342
  chr19:30718934-30718994
  hyper

SEQ ID NO: 293816 - DNA, 33 bp, Homo sapiens
  chr19:31210819-31210852
  hyper
ctaggcccgtatggggcgcgctgtggcctgggc

SEQ ID NO: 293817 - DNA, 72 bp, Homo sapiens; identical to SEQ ID NO: 205343
  chr19:31839494-31839566
  hyper

SEQ ID NO: 293818 - DNA, 233 bp, Homo sapiens
  chr19:31841177-31841410
  hyper
cccccaggacccgccgtagccacttcccccaattttttttccccggacaaactttcctgggcccgtcccgggggtcggtgtgggagggggttccttcaagtttcctctcctgactttgggatgatcagggtccctccaccccgcccctcgcccccgggagccgggccgcgccccccatccacggcgcgggccgatcctagggcgggacgggggcgggagaaggaaaccgggct

SEQ ID NO: 293819 - DNA, 325 bp, Homo sapiens
  chr19:31841583-31841908
  hyper
ggctgggcggcgtgggcggcggggcgacgcgggctcacttacgggcggcggtgagggcgcgggtgggccggagctcatgcgggcgacccccgggcggcggcggctgagcgggagccggagcccgagcggcgcgggcggcggcgcatcgatgcgctgcgggctcgattgcgtctccctgggccagctctcaggccgggaatggggcggccgcgccggggccggctccgggcgctgccgggcggcggctgctggagcgcgggggcggcctccgggcccactatccccgaggcggccctgcgcccgggcgcgccggctggggctctgg

SEQ ID NO: 293820 - DNA, 46 bp, Homo sapiens
  chr19:32532872-32532918
  hyper
tgctgcgagatcctgcagcacggcgagcggcaaagcgttgctcaaa

SEQ ID NO: 293821 - DNA, 41 bp, Homo sapiens
  chr19:32533002-32533043
  hyper
acagcgccacgcaagttgacggaggcttttgattgaattga

SEQ ID NO: 293822 - DNA, 113 bp, Homo sapiens; identical to SEQ ID NO: 240369
  chr19:33166109-33166222
  hyper

SEQ ID NO: 293823 - DNA, 124 bp, Homo sapiens; identical to SEQ ID NO: 205346
  chr19:33166794-33166918
  hyper

SEQ ID NO: 293824 - DNA, 320 bp, Homo sapiens; identical to SEQ ID NO: 205347
  chr19:33167523-33167843
  hyper

SEQ ID NO: 293825 - DNA, 107 bp, Homo sapiens; identical to SEQ ID NO: 205348
  chr19:33167907-33168014
  hyper

SEQ ID NO: 293826 - DNA, 144 bp, Homo sapiens; identical to SEQ ID NO: 205349
  chr19:33182512-33182656
  hyper

SEQ ID NO: 293827 - DNA, 53 bp, Homo sapiens; identical to SEQ ID NO: 240373
  chr19:33462904-33462957
  hyper

SEQ ID NO: 293828 - DNA, 39 bp, Homo sapiens; identical to SEQ ID NO: 205350
  chr19:33555231-33555270
  hyper

SEQ ID NO: 293829 - DNA, 584 bp, Homo sapiens
  chr19:33555491-33556075
  hyper
acctgcccgggacgccggggacatcgccgcccccactcctccccgccagcctccgtccggccagcgccggcccagtgcgccccctccccctcccggcctagtggaccccgactgcgcgctcccacggcccctgcagggcccgggggaaaggaggtctggagcccgcaggtccccgcccgcccgcccgaagccgcccaccttccgaaagtagccgtcgttctccttctccagcggctggggggccgcgggcaacagcgcgtcggtcatgctagcggcgcgggcgcggagggcggacggcggactgaggcgcggcggctgaggctggcccgagaggacgtgcggccccgcccctgtccccgcccttccccgcccctccactcccaccccgtcccgcggcccttctagccccgcctgaggccgagcactggagccctggagacgcgccccgccccgtcgcgggccccgaacccgcgccccttgaggcgctcgtcacccggagagctgcgccctgggcgcggcgcctcggggttgtctgtgggcgtcgtggctgactcaactttgcgagtgccgcgagagcgcaggaa

SEQ ID NO: 293830 - DNA, 308 bp, Homo sapiens
  chr19:33685236-33685544
  hyper
acagacccacggacgctctaccggcggcacccggccgggcgggctgggcgcagcgcggggcggcccggggacgccggggccgggcgggctgcgcgccgcggggcatgggcgcgccgggggtccccgggcccaggccggccgcggcggggctcccggggcgcgggggcagcggcgggcgggggtcttccctggcggccgccgctgagcccccgcagggcccgtgacgccgcggccgatgtggccgcgcgcgccctacgggcctgcaccgccaccgcacaaagacgcctcgggagccgccgcctgcaccc

SEQ ID NO: 293831 - DNA, 249 bp, Homo sapiens
  chr19:33685653-33685902
  hyper
ggggcaggaggcggcgcccgcgggcggccgggcccggcatggagaagcgcgcggccgcggggctggagggcgcgccgggcgcccgggcgcagctggccgtcgtctgtctgggtgagtgggccgcgcgggccgggcaggtccgggtcccccgcatggcagtccgcgccgcgccctgaccgacctcctctccggccgcggcatcccgagccccccaccgcggtggctcccgcgcggagacccagagagggg

SEQ ID NO: 293832 - DNA, 137 bp, Homo sapiens; identical to SEQ ID NO: 205354
  chr19:33686020-33686157
  hyper

SEQ ID NO: 293833 - DNA, 116 bp, Homo sapiens; identical to SEQ ID NO: 131290
  chr19:33717938-33718054
  hyper

SEQ ID NO: 293834 - DNA, 1320 bp, Homo sapiens; identical to SEQ ID NO: 205355
  chr19:33790839-33792159
  hyper

SEQ ID NO: 293835 - DNA, 1246 bp, Homo sapiens; identical to SEQ ID NO: 205356
  chr19:33792630-33793876
  hyper

SEQ ID NO: 293836 - DNA, 440 bp, Homo sapiens; identical to SEQ ID NO: 205357
  chr19:33793960-33794400
  hyper

SEQ ID NO: 293837 - DNA, 70 bp, Homo sapiens; identical to SEQ ID NO: 205358
  chr19:34114303-34114373
  hyper

SEQ ID NO: 293838 - DNA, 112 bp, Homo sapiens; identical to SEQ ID NO: 205359
  chr19:34175322-34175434
  hyper

SEQ ID NO: 293839 - DNA, 89 bp, Homo sapiens
  chr19:34262994-34263083
  hyper
ggggaacccgtctgcggctccgccagcgccgtcgccgtctgctcatcaagaaaatgccagctgcggcgaccatcccggccaacagctcg

SEQ ID NO: 293840 - DNA, 566 bp, Homo sapiens
  chr19:34263272-34263838
  hyper
tactgcgaggtgcccaaggccggctgctccaattggaagcgggtgctcatggtgctggccggcctggcctcgtccactgccgacatccagcacaacaccgtccactatggcagcgctctcaagcgcctggacaccttcgaccgccagggtatcttgcaccgtctcagcacctacaccaagatgctctttgtccgcgagcccttcgagaggctggtgtccgccttccgcgacaagtttgagcaccccaacagctactatcacccggtcttcggcaaggccatcctggcccggtaccgcgccaatgcctctcgggaggccctgcggaccggctctggggtgcgttttcccgagttcgtccagtacctgctggacgtgcaccggcccgtggggatggacattcactgggaccatgtcagccggctctgcagcccctgcctcatcgactacgatttcgtaggcaagttcgagagcatggaggacgatgccaacttcttcctgagcctcatccgcgcgccgcggaacctgaccttcccccggttcaaggaccggcactcgcaggaggcgcg

SEQ ID NO: 293841 - DNA, 217 bp, Homo sapiens; identical to SEQ ID NO: 225894
  chr19:34269016-34269233
  hyper

SEQ ID NO: 293842 - DNA, 997 bp, Homo sapiens; identical to SEQ ID NO: 225895
  chr19:34286493-34287490
  hyper

SEQ ID NO: 293843 - DNA, 279 bp, Homo sapiens
  chr19:34287808-34288087
  hyper
aggcggcgaagctgcgcccggcgcccgagaccggcagctgcgtggggcgggggctgcgcccgagcccgatctgccggctccgaggtaagctcagcgcgggcggccaccgctcagagccgcgcaaccctgccccgaagtggctgcgataccgagaaagtcgcccggccagggtctggacctgggcgggggcggccgctttgtccctctgctgggcggcgggggctggcggcgcgggggtgcccagcacaaaggcctggtgcaagagtggggttgcccacg

SEQ ID NO: 293844 - DNA, 107 bp, Homo sapiens
  chr19:34288675-34288782
  hyper
catgaaggaatttaactgcacgagtgaataacagcattagtttcaattaatttttttttaatcccggcaacaataaactttgagaacaaaagcgcttttacgtcctt

SEQ ID NO: 293845 - DNA, 576 bp, Homo sapiens; identical to SEQ ID NO: 205361
  chr19:34310890-34311466
  hyper

SEQ ID NO: 293846 - DNA, 78 bp, Homo sapiens; identical to SEQ ID NO: 205362
  chr19:34311498-34311576
  hyper

SEQ ID NO: 293847 - DNA, 190 bp, Homo sapiens; identical to SEQ ID NO: 240385
  chr19:34895108-34895298
  hyper

SEQ ID NO: 293848 - DNA, 85 bp, Homo sapiens; identical to SEQ ID NO: 240386
  chr19:34919058-34919143
  hyper

SEQ ID NO: 293849 - DNA, 116 bp, Homo sapiens; identical to SEQ ID NO: 205363
  chr19:34972067-34972183
  hyper

SEQ ID NO: 293850 - DNA, 149 bp, Homo sapiens; identical to SEQ ID NO: 205364
  chr19:35168260-35168409
  hyper

SEQ ID NO: 293851 - DNA, 39 bp, Homo sapiens; identical to SEQ ID NO: 205365
  chr19:35168868-35168907
  hyper

SEQ ID NO: 293852 - DNA, 94 bp, Homo sapiens; identical to SEQ ID NO: 205366
  chr19:35168992-35169086
  hyper

SEQ ID NO: 293853 - DNA, 103 bp, Homo sapiens; identical to SEQ ID NO: 205367
  chr19:35169517-35169620
  hyper

SEQ ID NO: 293854 - DNA, 87 bp, Homo sapiens
  chr19:35263998-35264085
  hyper
tatcctcctcactgtccgtctctactcggtctcgaaaagtggcccctgtctggcgttctacccagtgtagcgttggcaaccacagca

SEQ ID NO: 293855 - DNA, 84 bp, Homo sapiens
  chr19:35264119-35264203
  hyper
ggaagtcccgcccacgccgctacgggaacgcccctctgcgccttccgtctatggcttggggtcggcttccgtcccttgtagcac

SEQ ID NO: 293856 - DNA, 542 bp, Homo sapiens; identical to SEQ ID NO: 240392
  chr19:35417688-35418230
  hyper

SEQ ID NO: 293857 - DNA, 489 bp, Homo sapiens
  chr19:35454533-35455022
  hyper
ctgcgcggggtcccgcagcgccgccgctgccatcggagtctgtggtcagagcagggccccacggtgcgggaaaccacggggcgggggtagggggtctcgcaggctgaggctaccacccacctggccgtgccccagacgaggtgtgaccccgggctgagggtcgcactcctagcctcagtctcccccgtgcaaaatgcgcaaggggcccggggcgcaggctccgggggcgccgagagcgcgcagctccgctgggtacccccgttgcaaggggtcacggctggtgcaaaggcgcggagggggtcccggcctcactgtccccctcgcggtccgggaaagccggcggggcagcttcacgggcgtagccccagccgccccgcccccaactcggggtccccagctcctggggactcagcctccccgccgggaaatgacctgcgaggctgcagtgcaggaagttccggcccccaccgtggcggccgggagagttgc

SEQ ID NO: 293858 - DNA, 343 bp, Homo sapiens; identical to SEQ ID NO: 240394
  chr19:35490295-35490638
  hyper

SEQ ID NO: 293859 - DNA, 236 bp, Homo sapiens; identical to SEQ ID NO: 205369
  chr19:35531876-35532112
  hyper

SEQ ID NO: 293860 - DNA, 135 bp, Homo sapiens
  chr19:35581614-35581749
  hyper
cccagggtgccaggcgctgtcccaaccacttaatttattttaacttgcttaaccctcaaagtcagtttgaggtcagtactcttttcggagagatgggtacggagtcctggagaggttaagcaccacgacagagcc

SEQ ID NO: 293861 - DNA, 149 bp, Homo sapiens
  chr19:35581779-35581928
  hyper
gcaaatgtggcctgcagatcatgtttccttacccgcgctttttctcctccctgcatagccgccacgtgtcctaagcacagcagctaccagcaacgcttggacccgcgccgggtgcagctctgcgtccccgcggccgccctgcctgctcc

SEQ ID NO: 293862 - DNA, 261 bp, Homo sapiens
  chr19:35738724-35738985
  hyper
gtagaacaaagcacgcctgggtaccgaaaccagccactggccagttggcaacctgggggagtctaacgcgaggaagcgcccagggttcccccaggatgcgctttccctcgccgccacctggagacagcagagtcacgcccagcgctgcgcaggctgatcgccgcgccgcgcccccgccctcggtcgcaggtggctcgttccgggaattcctaagcggaaaccggtcccaagccccgcgccttcgctcggcccctttaagag

SEQ ID NO: 293863 - DNA, 383 bp, Homo sapiens; identical to SEQ ID NO: 240398
  chr19:35758213-35758596
  hyper

SEQ ID NO: 293864 - DNA, 69 bp, Homo sapiens
  chr19:36049462-36049531
  hyper
gccccctggctctcaccttgggcacaggcactgcatcctggccggacttgaaggcggcgcggttgcaca

SEQ ID NO: 293865 - DNA, 116 bp, Homo sapiens; identical to SEQ ID NO: 205371
  chr19:36123862-36123978
  hyper

SEQ ID NO: 293866 - DNA, 405 bp, Homo sapiens; identical to SEQ ID NO: 240404
  chr19:36164097-36164502
  hyper

SEQ ID NO: 293867 - DNA, 194 bp, Homo sapiens; identical to SEQ ID NO: 205372
  chr19:36236368-36236562
  hyper

SEQ ID NO: 293868 - DNA, 419 bp, Homo sapiens; identical to SEQ ID NO: 240406
  chr19:36239184-36239603
  hyper

SEQ ID NO: 293869 - DNA, 197 bp, Homo sapiens; identical to SEQ ID NO: 240407
  chr19:36248725-36248922
  hyper

SEQ ID NO: 293870 - DNA, 119 bp, Homo sapiens
  chr19:36336291-36336410
  hyper
ggagctcacggtttcgcggagctcggcgctgtgggcgcggcaggtcacgcgctggccatgatcgcgggatgacacttgcagaaggacgctcctggcggcggcggagcctttgaatgggg

SEQ ID NO: 293871 - DNA, 220 bp, Homo sapiens
  chr19:36336769-36336989
  hyper
caccccaggctccgcccagtctcgggtcccccaccccgcctccgcccgctttccccgggtccagggttcgctgggtccctgccccacctggctctgtccctcccgccccgcccccgggcctcagcagtgcgagccctcacactgcaccgccagctgcgtggacgcgctgagctgtccagccttgcacgtgaacttggcctggttgtccgacggccctgtg

SEQ ID NO: 293872 - DNA, 125 bp, Homo sapiens
  chr19:36347684-36347809
  hyper
ggatcccgccctgcgtcccccattcatccgcgtctcagccgcgggagtttctcaacgggaagagggcggagctcccggggggcggacccgggcggggcgagcgggatcgggccctcttggggtct

SEQ ID NO: 293873 - DNA, 49 bp, Homo sapiens
  chr19:36348065-36348114
  hyper
cttcagagggagagcaggtaccgcacgaggggagcggaggaatatgggg

SEQ ID NO: 293874 - DNA, 229 bp, Homo sapiens
  chr19:36351559-36351788
  hyper
gatgtgctgtgtgagctggggccggcctgtgggtgtggtcaaaggtggccgtggctttcagggctgttgagggtcggggcctggaggggcggggccgggagagcgagcgtggggtattaggaggaggagagtgtggagctggggcatattcttgcgccctagagggtgtggtgtttctgtggggctggctgatcccaggtcagtggctgcattccgccccggccatgtg

SEQ ID NO: 293875 - DNA, 88 bp, Homo sapiens
  chr19:36360475-36360563
  hyper
gtgctgggggtctcggtcctagggagcaaagaaccaggggaccctcatgccaacgccccccgagccctcactgtcctttccacttcca

SEQ ID NO: 293876 - DNA, 101 bp, Homo sapiens
  chr19:36361310-36361411
  hyper
caaggagcttggatatctaaggctggtgctagggagaagcagggcctagggaagcgatgtcctcatgaatactagagccttgaaaacggacctggccgggc

SEQ ID NO: 293877 - DNA, 113 bp, Homo sapiens; identical to SEQ ID NO: 240416
  chr19:36391019-36391132
  hyper

SEQ ID NO: 293878 - DNA, 67 bp, Homo sapiens; identical to SEQ ID NO: 240417
  chr19:36422567-36422634
  hyper

SEQ ID NO: 293879 - DNA, 174 bp, Homo sapiens; identical to SEQ ID NO: 205375
  chr19:36427160-36427334
  hyper

SEQ ID NO: 293880 - DNA, 68 bp, Homo sapiens; identical to SEQ ID NO: 240419
  chr19:36427554-36427622
  hyper

SEQ ID NO: 293881 - DNA, 77 bp, Homo sapiens
  chr19:36478303-36478380
  hyper
ccctgcggcccccgcccccgcgctccgcccctgtgctctcccttgctggcccgcaccattcccgggctcaaaaaaat

SEQ ID NO: 293882 - DNA, 188 bp, Homo sapiens; identical to SEQ ID NO: 240421
  chr19:36485952-36486140
  hyper

SEQ ID NO: 293883 - DNA, 55 bp, Homo sapiens
  chr19:36523212-36523267
  hyper
tctcctcggggtggcggggccatcggggcaggatctgtcttagtcatggtcctcg

SEQ ID NO: 293884 - DNA, 80 bp, Homo sapiens
  chr19:36523921-36524001
  hyper
gaagagatggctacggaaaggagcgagatgagcagatacaacggcaaaagagagggctgagagagcggacacagatcttc

SEQ ID NO: 293885 - DNA, 214 bp, Homo sapiens; identical to SEQ ID NO: 240423
  chr19:36705178-36705392
  hyper

SEQ ID NO: 293886 - DNA, 102 bp, Homo sapiens; identical to SEQ ID NO: 240424
  chr19:36705646-36705748
  hyper

SEQ ID NO: 293887 - DNA, 63 bp, Homo sapiens; identical to SEQ ID NO: 205376
  chr19:36736769-36736832
  hyper

SEQ ID NO: 293888 - DNA, 173 bp, Homo sapiens
  chr19:36822892-36823065
  hyper
ctgccgcgccaaatcaaaatttacaatcacccttggtgctgtttcctgcactttcttggagatttgcaccaggcgctggagaccctcccacctggcccatgcctgccacccggtgaacaccaagacccaaccttctgcaccaccagtcttgttgtcagcgaacaggctagtaa

SEQ ID NO: 293889 - DNA, 219 bp, Homo sapiens
  chr19:36912593-36912812
  hyper
gcccgcggcgagctggacctggagcgcgcgcccgtgctgggcggcagctttagggggctagagtccatggggctgctctgggccctggaatccaagaaacctttttggcgctttctgaagcgggacgtacagattccctttatcgtggagttggaggtgctggacggccacgaccccgagcctggacggctgttgtgacaggcgcggcacgagcgcgac

SEQ ID NO: 293890 - DNA, 31 bp, Homo sapiens; identical to SEQ ID NO: 240428
  chr19:36980445-36980476
  hyper

SEQ ID NO: 293891 - DNA, 214 bp, Homo sapiens; identical to SEQ ID NO: 240429
  chr19:36980718-36980932
  hyper

SEQ ID NO: 293892 - DNA, 304 bp, Homo sapiens
  chr19:37063785-37064089
  hyper
ctcctacaggctcacggaaaaaaacgaacaaacaaacaaacaaaaaaaaacaaaaaaacacttctaccccgttcacacttatagttggtcacaacagtgctgtcacacgatcacgtcaccgtagaccagggtcacacgatagaccccgcccctactcaccgtcctgagtccgatcaaacagcacccacggcacacactagggtctccgtctctcacacacacacaccacaatgacgtcgtaaacaatagcactaaccaccatcgtccgcagctcccgcgtacagaggcctcaggctcccggctc

SEQ ID NO: 293893 - DNA, 275 bp, Homo sapiens
  chr19:37064360-37064635
  hyper
tcagcagaggctgccgctgcgcgtcccctaggcgcggaagaggcggctggtggtccctgacggcaaggtgaagtcgaggcagtaatcgggaacccaggttgggaggacagaatggggaacaggaagctggggcgagggtggtcttgggggaggtggggggccgcggaattctaggtggcccctgcctcacctctggaaagaaccggaagcccgggccggggagggtgaagggagtcgcggacccggctgctcagccgaggaggaaacccggaccc

SEQ ID NO: 293894 - DNA, 51 bp, Homo sapiens; identical to SEQ ID NO: 205378
  chr19:37095614-37095665
  hyper

SEQ ID NO: 293895 - DNA, 103 bp, Homo sapiens; identical to SEQ ID NO: 205379
  chr19:37096594-37096697
  hyper

SEQ ID NO: 293896 - DNA, 162 bp, Homo sapiens
  chr19:37262838-37263000
  hyper
ccccagcctggaagcggcagtgggctctggcatttagttggtccccgccatagagccgccaactctctctctttctttaaccctcgccttcccttcaaaatctaacagagcccaccgtgtacatgcccacaaaagaagcgactatttcgtggaagcccgctg

SEQ ID NO: 293897 - DNA, 155 bp, Homo sapiens; identical to SEQ ID NO: 225914
  chr19:37266863-37267018
  hyper

SEQ ID NO: 293898 - DNA, 43 bp, Homo sapiens; identical to SEQ ID NO: 205380
  chr19:37287861-37287904
  hyper

SEQ ID NO: 293899 - DNA, 170 bp, Homo sapiens; identical to SEQ ID NO: 205381
  chr19:37329462-37329632
  hyper

SEQ ID NO: 293900 - DNA, 156 bp, Homo sapiens; identical to SEQ ID NO: 205382
  chr19:37342189-37342345
  hyper

SEQ ID NO: 293901 - DNA, 36 bp, Homo sapiens; identical to SEQ ID NO: 205383
  chr19:37406729-37406765
  hyper

SEQ ID NO: 293902 - DNA, 191 bp, Homo sapiens; identical to SEQ ID NO: 205384
  chr19:37407590-37407781
  hyper

SEQ ID NO: 293903 - DNA, 61 bp, Homo sapiens; identical to SEQ ID NO: 205385
  chr19:37463932-37463993
  hyper

SEQ ID NO: 293904 - DNA, 292 bp, Homo sapiens
  chr19:37568997-37569289
  hyper
acctgcctggccggcgggtcccaccctctctcctgccaggggtagaccctgggaccactcagctcgctctcgcaggccctgagcgtctgacgcctgcgcactgagcgcgggcgggcgggcactcccagaaacctccggggcgctgcaggcgggacaagcaggttccacaggccgagcccacgagcccctcgaggggtgagcggcccgggcctcctggcgttctggccggctagccaagcgctggactacatttcccagaggcacggcgtccggagcgctggactacatttcc

SEQ ID NO: 293905 - DNA, 197 bp, Homo sapiens
  chr19:37569554-37569751
  hyper
gtgtgcaggctacagcctgcctggtattggcgactgcctgtgcatacacgactggacgtgtgtggctgtggttttgtgtatgagcatttgtatgagtgtgagttgtgactctgagggtgtttgtgactgtttgcttacctggctgggatatacttatgtgactgtgattttatgtgtgccgcgtgtataattggggt

SEQ ID NO: 293906 - DNA, 120 bp, Homo sapiens
  chr19:37663374-37663494
  hyper
catcaatgacctgagaaatccgtcacaatcaacaacggacgccacagaaccccatcaccgaagcctgaaaccgcaatcactaactccacaggcaacctcgacaccccctattactggctc

SEQ ID NO: 293907 - DNA, 73 bp, Homo sapiens
  chr19:37663804-37663877
  hyper
atatccattccgtagagcagaggaattggccgctggcagggtttcctagagcgaggcaggtatagttacatag

SEQ ID NO: 293908 - DNA, 497 bp, Homo sapiens; identical to SEQ ID NO: 240446
  chr19:37701189-37701686
  hyper

SEQ ID NO: 293909 - DNA, 215 bp, Homo sapiens; identical to SEQ ID NO: 240447
  chr19:37708870-37709085
  hyper

SEQ ID NO: 293910 - DNA, 85 bp, Homo sapiens; identical to SEQ ID NO: 205387
  chr19:37957586-37957671
  hyper

SEQ ID NO: 293911 - DNA, 54 bp, Homo sapiens; identical to SEQ ID NO: 205388
  chr19:37998138-37998192
  hyper

SEQ ID NO: 293912 - DNA, 112 bp, Homo sapiens
  chr19:38085128-38085240
  hyper
gaaactgcagcagctgtaaccgcacgattctcagctggcttaatgatgtccgtgtcacacgaggagtactgcggcccgggaggggccaagcgctaggagcattaacaggcgg

SEQ ID NO: 293913 - DNA, 52 bp, Homo sapiens
  chr19:38086162-38086214
  hyper
ggtgcagagtgggtagtggccatgcctgtgtgatgtgcgtcagattatgctt

SEQ ID NO: 293914 - DNA, 424 bp, Homo sapiens; identical to SEQ ID NO: 205389
  chr19:38145586-38146010
  hyper

SEQ ID NO: 293915 - DNA, 57 bp, Homo sapiens; identical to SEQ ID NO: 205390
  chr19:38182700-38182757
  hyper

SEQ ID NO: 293916 - DNA, 195 bp, Homo sapiens
  chr19:38210751-38210946
  hyper
taggaggcgagtctgagtagaaactgatccaggtagcctcggaagggatcacctgctggatgggtgtgagctcctcagggtggggcgccgaaaccctcatggctcctgaggtagagccggcctccttggtaacacatgggactgggacttttaataccacccgacaggcccagcttgtctcgtcaagcgctaagt

SEQ ID NO: 293917 - DNA, 120 bp, Homo sapiens; identical to SEQ ID NO: 240458
  chr19:38270325-38270445
  hyper

SEQ ID NO: 293918 - DNA, 62 bp, Homo sapiens
  chr19:38307858-38307920
  hyper
ccctaagaacacaggaacaccgcccttgacctagcgtcagaaacgttccctcacgggttggc

SEQ ID NO: 293919 - DNA, 103 bp, Homo sapiens
  chr19:38307977-38308080
  hyper
cggcggtgggcgtggcgggcggtcgccgtggtcaccacggcttttctcagaggttttaacgcccctagacttcatttcccgacagggactgcgggtctggata

SEQ ID NO: 293920 - DNA, 57 bp, Homo sapiens; identical to SEQ ID NO: 225920
  chr19:38398221-38398278
  hyper

SEQ ID NO: 293921 - DNA, 126 bp, Homo sapiens; identical to SEQ ID NO: 205392
  chr19:38700328-38700454
  hyper

SEQ ID NO: 293922 - DNA, 40 bp, Homo sapiens; identical to SEQ ID NO: 205393
  chr19:38700557-38700597
  hyper

SEQ ID NO: 293923 - DNA, 295 bp, Homo sapiens
  chr19:38701255-38701550
  hyper
atgtctgggtctgggatgacacctcctgacacccccgttccccaccccagcctcaggaggggccaacccaccgtcctcttcccagcccttcccttcccccggcccggctcccgcctccctcccggctgcgcccgctgcagctgcagcagcccgttgccagggcaaccacagctggctgggcgggagcccctccaccccatcccccttctcctcctttctggcaaagcagggcggagctgggacaaagccggggagaggcagggtgcaggcaggggaagaaggaggtggatggagg

SEQ ID NO: 293924 - DNA, 34 bp, Homo sapiens
  chr19:38702212-38702246
  hyper
aaattggggttggggcgcccggcggggggccggc

SEQ ID NO: 293925 - DNA, 163 bp, Homo sapiens; identical to SEQ ID NO: 205394
  chr19:38715050-38715213
  hyper

SEQ ID NO: 293926 - DNA, 85 bp, Homo sapiens
  chr19:38719834-38719919
  hyper
cgagctttcagccccggccggggcaggcccggcacctccggagaccctgagggagagatggaggagagggaaacccctaccccca

SEQ ID NO: 293927 - DNA, 263 bp, Homo sapiens
  chr19:38719956-38720219
  hyper
gcgccgcattccttcactgacagcgacaaagaagaggcgcccccgcgaccctggaggggctcccgcccccaaccccagggggcgacagggggtggggacccccggggcaagggttcgcgctgggggcccccattcaactacggtccgcgcgctgcgtccccctcctcagccccagggcgggcgggggaagggctcctggtgggggggtctggacagggggcggggacggcagggacactcacgacttgagcgggttctgaatg

SEQ ID NO: 293928 - DNA, 208 bp, Homo sapiens
  chr19:38720439-38720647
  hyper
cgcgcggcggcgcccgagggcgcccctgcccggactacacgtcccagggggcgtcaggaggaccgcgctcccattggctgctggggatacagggaggggcggggctccccccagagcatctttcctccctccctgggagtgctcggtctccaactcgggatctccaccctccaggcaccgcgggcgcggaagcaggtggtccctagct

SEQ ID NO: 293929 - DNA, 401 bp, Homo sapiens; identical to SEQ ID NO: 205395
  chr19:38754871-38755272
  hyper

SEQ ID NO: 293930 - DNA, 184 bp, Homo sapiens; identical to SEQ ID NO: 205396
  chr19:38755344-38755528
  hyper

SEQ ID NO: 293931 - DNA, 41 bp, Homo sapiens; identical to SEQ ID NO: 240466
  chr19:38806820-38806861
  hyper

SEQ ID NO: 293932 - DNA, 232 bp, Homo sapiens
  chr19:38852095-38852327
  hyper
ctcagggatcaagggagggacgtccgaggggatgtgtgcagaggcctctgggcagcaggggctgacgctgaggaggaagattcgggctggattcgatacgggaagtgggtggggtgggaaagaggcctgcggaagcttccagtgcgcggggtgccttagagccagcagcctttcccccttgccactgcccaggggctacttgatgctctccttcatcgacttctgccccttc

SEQ ID NO: 293933 - DNA, 141 bp, Homo sapiens
  chr19:38852387-38852528
  hyper
cgggcgcggccgccgcgcgtcctggagcgctcgggcttccacaacgagaactcgctcgccatctaccagggcctggtctactacctgctgtggctgcactccgtgtacgacaaggtgggcgtccggcggcgggcgggcagg

SEQ ID NO: 293934 - DNA, 201 bp, Homo sapiens; identical to SEQ ID NO: 205397
  chr19:38852766-38852967
  hyper

SEQ ID NO: 293935 - DNA, 312 bp, Homo sapiens; identical to SEQ ID NO: 205398
  chr19:38853193-38853505
  hyper

SEQ ID NO: 293936 - DNA, 427 bp, Homo sapiens; identical to SEQ ID NO: 240468
  chr19:38865006-38865433
  hyper

SEQ ID NO: 293937 - DNA, 41 bp, Homo sapiens; identical to SEQ ID NO: 240470
  chr19:38878539-38878580
  hyper

SEQ ID NO: 293938 - DNA, 50 bp, Homo sapiens
  chr19:38879530-38879580
  hyper
ctgcccacccaggcgcccccaaggccccggctaggaggactagagagtgg

SEQ ID NO: 293939 - DNA, 76 bp, Homo sapiens
  chr19:38879612-38879688
  hyper
gtaccagtcttcatttgtggggtctggactttctccgaggatgccccattcacaaaattccgtcctggaccctcac

SEQ ID NO: 293940 - DNA, 82 bp, Homo sapiens; identical to SEQ ID NO: 205399
  chr19:38976232-38976314
  hyper

SEQ ID NO: 293941 - DNA, 58 bp, Homo sapiens; identical to SEQ ID NO: 205400
  chr19:38976790-38976848
  hyper

SEQ ID NO: 293942 - DNA, 265 bp, Homo sapiens; identical to SEQ ID NO: 240472
  chr19:39109442-39109707
  hyper

SEQ ID NO: 293943 - DNA, 507 bp, Homo sapiens; identical to SEQ ID NO: 205402
  chr19:39139398-39139905
  hyper

SEQ ID NO: 293944 - DNA, 63 bp, Homo sapiens; identical to SEQ ID NO: 205403
  chr19:39140557-39140620
  hyper

SEQ ID NO: 293945 - DNA, 676 bp, Homo sapiens; identical to SEQ ID NO: 240475
  chr19:39322018-39322694
  hyper

SEQ ID NO: 293946 - DNA, 447 bp, Homo sapiens; identical to SEQ ID NO: 240476
  chr19:39341808-39342255
  hyper

SEQ ID NO: 293947 - DNA, 183 bp, Homo sapiens; identical to SEQ ID NO: 240477
  chr19:39390792-39390975
  hyper

SEQ ID NO: 293948 - DNA, 215 bp, Homo sapiens; identical to SEQ ID NO: 240478
  chr19:39421219-39421434
  hyper

SEQ ID NO: 293949 - DNA, 682 bp, Homo sapiens
  chr19:39574108-39574790
  hyper
tcaggaaggggaaacgactggaaatccgggcccccccagttcttccctgcttctctttttgtggcagccgctcctcacgttcaaacagattgcaaaggtttacaggggagaaccctaacttgttccctagacgtcagtttctggagttcctgcattaatacgattaaaaagaacagctgattcttatccagcccttactctgggccgggccctgttatcggcatgaaatttcatgcagcaactcgtttactcctcacaacagcccacggggtatatacgagcatcacctcctttttacaggtgaaaaaacccaaggtccagcgaggttgaataactcacctaggtcgcacagctcagaaagcccactgcaattccgggattctggttttgttttgaggttgccccgggcttctgaggaggggtcagtgggctcagcatggaaaggaaggaagccggaaggctggaggaagatgcagcgaggctggaaaggttggggatcccccggtcctgcacacctgggtacctggggatcgggcagggccaggataggggccggtgtccgtgccctggggctccccagctgatgagtgggcgcctgagggacgagcgcagggttacctgcctgggctctcacctggtggccggctcagaggtggcgcgccggagacgtatcataaccttc

SEQ ID NO: 293950 - DNA, 54 bp, Homo sapiens
  chr19:39575044-39575098
  hyper
gccggggtccgggagggcgtcccctttcccggatggtcccgacccggctccatc

SEQ ID NO: 293951 - DNA, 42 bp, Homo sapiens
  chr19:39589841-39589883
  hyper
gggcgcgcgggtcgggggcgcgcgggtcgggggcggtgctag

SEQ ID NO: 293952 - DNA, 218 bp, Homo sapiens; identical to SEQ ID NO: 240482
  chr19:39616203-39616421
  hyper

SEQ ID NO: 293953 - DNA, 35 bp, Homo sapiens
  chr19:39687547-39687582
  hyper
cagggtgccctgccccttcccgctcccagttaacc

SEQ ID NO: 293954 - DNA, 45 bp, Homo sapiens
  chr19:39687977-39688022
  hyper
cagccaggaggcaccaccctgaccgtctgtctcttcctctttccc

SEQ ID NO: 293955 - DNA, 32 bp, Homo sapiens; identical to SEQ ID NO: 205405
  chr19:39754842-39754874
  hyper

SEQ ID NO: 293956 - DNA, 117 bp, Homo sapiens; identical to SEQ ID NO: 240486
  chr19:39818898-39819015
  hyper

SEQ ID NO: 293957 - DNA, 258 bp, Homo sapiens; identical to SEQ ID NO: 240487
  chr19:39881951-39882209
  hyper

SEQ ID NO: 293958 - DNA, 32 bp, Homo sapiens; identical to SEQ ID NO: 205407
  chr19:39898001-39898033
  hyper

SEQ ID NO: 293959 - DNA, 72 bp, Homo sapiens; identical to SEQ ID NO: 131504
  chr19:39898533-39898605
  hyper

SEQ ID NO: 293960 - DNA, 107 bp, Homo sapiens; identical to SEQ ID NO: 240489
  chr19:39902955-39903062
  hyper

SEQ ID NO: 293961 - DNA, 137 bp, Homo sapiens; identical to SEQ ID NO: 131510
  chr19:39936090-39936227
  hyper

SEQ ID NO: 293962 - DNA, 710 bp, Homo sapiens; identical to SEQ ID NO: 240492
  chr19:39988486-39989196
  hyper

SEQ ID NO: 293963 - DNA, 199 bp, Homo sapiens; identical to SEQ ID NO: 205409
  chr19:39989528-39989727
  hyper

SEQ ID NO: 293964 - DNA, 44 bp, Homo sapiens
  chr19:39990142-39990186
  hyper
gctggaggcctaaccctgccagcgaaacctccacctcctctccc

SEQ ID NO: 293965 - DNA, 98 bp, Homo sapiens
  chr19:39992838-39992936
  hyper
aaaaaaaaacaaatatctgggtcaaaatacaggagtattacggtttctatgagataactgtttattttttatttttatttttttgagagggagtcttg

SEQ ID NO: 293966 - DNA, 64 bp, Homo sapiens
  chr19:39997624-39997688
  hyper
gcaggtgggtccccggctcccggactgcgccctctgatgctcccttccccacaggcggactctg

SEQ ID NO: 293967 - DNA, 70 bp, Homo sapiens
  chr19:40005581-40005651
  hyper
gctgaacacctgagtgtcaccgacagctgcggaggcactggggcaatctgtgtgtttctcagcctggcgt

SEQ ID NO: 293968 - DNA, 39 bp, Homo sapiens; identical to SEQ ID NO: 205410
  chr19:40022937-40022976
  hyper

SEQ ID NO: 293969 - DNA, 254 bp, Homo sapiens
  chr19:40324000-40324254
  hyper
gctgaaaaggcgaccgcctgtctctggcccggccggccccgcggcggggagggcaagcgggacaggaggcccggtgggtgacaacagcagccgccactgccaccgggggcggggagaggaggggacaagggtcagcccagggcacgcgggggaagagtagagcaggtggacgggggaggggcgacacgccccaccctgagtgaccaccagcccctagggacccggcgtcccgccccccacccaggaggccctcc

SEQ ID NO: 293970 - DNA, 49 bp, Homo sapiens; identical to SEQ ID NO: 205412
  chr19:40325018-40325067
  hyper

SEQ ID NO: 293971 - DNA, 227 bp, Homo sapiens; identical to SEQ ID NO: 240499
  chr19:40336895-40337122
  hyper

SEQ ID NO: 293972 - DNA, 1030 bp, Homo sapiens; identical to SEQ ID NO: 205413
  chr19:40561466-40562496
  hyper

SEQ ID NO: 293973 - DNA, 121 bp, Homo sapiens
  chr19:40722968-40723089
  hyper
tagaagcagctccgcgggaggagggctctgctattctgccctgatcttcctgcctgttccctccgctgcagcccctttccccgccctgggcccagccctcacctctgccccgccccgccac

SEQ ID NO: 293974 - DNA, 301 bp, Homo sapiens
  chr19:40723125-40723426
  hyper
tagcgcagcgcgcgtgcgtagtcgcccaggtggtagaaggcaatgccggcacggtaggtggccttgaagttgccctgctgcttctccagtaccttgagacagtactcgcgcacgcgctcgtagtttaccagctccgactgcagcaggcaagctgcgagggccccgcggccggcactctcagagcctgctggcacccccagaacccacctgactgcgaggagccgaggctccaggcggcagggaaccaggcctaagggattgctccggcaaccaggggcgccaatccgctcgcctatcgaaa

SEQ ID NO: 293975 - DNA, 66 bp, Homo sapiens; identical to SEQ ID NO: 240502
  chr19:40732062-40732128
  hyper

SEQ ID NO: 293976 - DNA, 409 bp, Homo sapiens; identical to SEQ ID NO: 240503
  chr19:40791307-40791716
  hyper

SEQ ID NO: 293977 - DNA, 373 bp, Homo sapiens; identical to SEQ ID NO: 240504
  chr19:40854360-40854733
  hyper

SEQ ID NO: 293978 - DNA, 75 bp, Homo sapiens; identical to SEQ ID NO: 240505
  chr19:40910078-40910153
  hyper

SEQ ID NO: 293979 - DNA, 186 bp, Homo sapiens; identical to SEQ ID NO: 205416
  chr19:40932005-40932191
  hyper

SEQ ID NO: 293980 - DNA, 150 bp, Homo sapiens; identical to SEQ ID NO: 205417
  chr19:40939939-40940089
  hyper

SEQ ID NO: 293981 - DNA, 439 bp, Homo sapiens; identical to SEQ ID NO: 240507
  chr19:40948767-40949206
  hyper

SEQ ID NO: 293982 - DNA, 121 bp, Homo sapiens; identical to SEQ ID NO: 240508
  chr19:40971818-40971939
  hyper

SEQ ID NO: 293983 - DNA, 120 bp, Homo sapiens
  chr19:40972622-40972742
  hyper
ctgtttgtgactgccggggagtgtgcggctgtgtgtgacaggtgcatttgtgtgtgacgccgcgtgggcggtggttaccctattggatttgtgtggtggtgggtgacaccgttccagtgt

SEQ ID NO: 293984 - DNA, 85 bp, Homo sapiens; identical to SEQ ID NO: 205419
  chr19:41025294-41025379
  hyper

SEQ ID NO: 293985 - DNA, 79 bp, Homo sapiens; identical to SEQ ID NO: 240511
  chr19:41036239-41036318
  hyper

SEQ ID NO: 293986 - DNA, 50 bp, Homo sapiens; identical to SEQ ID NO: 205420
  chr19:41055420-41055470
  hyper

SEQ ID NO: 293987 - DNA, 32 bp, Homo sapiens; identical to SEQ ID NO: 205421
  chr19:41060353-41060385
  hyper

SEQ ID NO: 293988 - DNA, 34 bp, Homo sapiens; identical to SEQ ID NO: 205422
  chr19:41074213-41074247
  hyper

SEQ ID NO: 293989 - DNA, 104 bp, Homo sapiens; identical to SEQ ID NO: 205423
  chr19:41082277-41082381
  hyper

SEQ ID NO: 293990 - DNA, 36 bp, Homo sapiens; identical to SEQ ID NO: 240517
  chr19:41082735-41082771
  hyper

SEQ ID NO: 293991 - DNA, 97 bp, Homo sapiens; identical to SEQ ID NO: 240518
  chr19:41105082-41105179
  hyper

SEQ ID NO: 293992 - DNA, 77 bp, Homo sapiens; identical to SEQ ID NO: 240519
  chr19:41105406-41105483
  hyper

SEQ ID NO: 293993 - DNA, 44 bp, Homo sapiens; identical to SEQ ID NO: 205424
  chr19:41105942-41105986
  hyper

SEQ ID NO: 293994 - DNA, 107 bp, Homo sapiens; identical to SEQ ID NO: 205425
  chr19:41106420-41106527
  hyper

SEQ ID NO: 293995 - DNA, 698 bp, Homo sapiens; identical to SEQ ID NO: 205426
  chr19:41111117-41111815
  hyper

SEQ ID NO: 293996 - DNA, 76 bp, Homo sapiens; identical to SEQ ID NO: 205427
  chr19:41115811-41115887
  hyper

SEQ ID NO: 293997 - DNA, 65 bp, Homo sapiens; identical to SEQ ID NO: 205428
  chr19:41119112-41119177
  hyper

SEQ ID NO: 293998 - DNA, 67 bp, Homo sapiens
  chr19:41119735-41119802
  hyper
agagccgaggggcggtggaggggtgtggcctagaatgttaggcggagcgggaggtgggccgggcctt

SEQ ID NO: 293999 - DNA, 46 bp, Homo sapiens; identical to SEQ ID NO: 240524
  chr19:41120296-41120342
  hyper

SEQ ID NO: 294000 - DNA, 389 bp, Homo sapiens
  chr19:41190146-41190535
  hyper
gtatttctagtagagccggggtttcaccgtgatagccaggactgccggcctcacgctttttaacaccaacttcaaacgacttgggctggtgtcccagccaggccgcgcacccgcacagcacagcacagcggcccccgtccccctcgccccgccgcaccctgccgcgcccactcaccctgaccgggaagctgcacgtgcccttccgcaccgcgtcctcgtctgcctgccactggtgcgggcgcgacgcctcgggcacgtaggctggcttcctccgccgcaggctctgccgtaacttgttcatggtgcccgccccgtctggtgacacaggacagtgatgtgggtcaagggtgggggtcagaaggtatggagctcaacggggagggaccagt

SEQ ID NO: 294001 - DNA, 34 bp, Homo sapiens; identical to SEQ ID NO: 240525
  chr19:41196715-41196749
  hyper

SEQ ID NO: 294002 - DNA, 73 bp, Homo sapiens; identical to SEQ ID NO: 205430
  chr19:41222270-41222343
  hyper

SEQ ID NO: 294003 - DNA, 106 bp, Homo sapiens; identical to SEQ ID NO: 205431
  chr19:41223422-41223528
  hyper

SEQ ID NO: 294004 - DNA, 33 bp, Homo sapiens; identical to SEQ ID NO: 225936
  chr19:41304119-41304152
  hyper

SEQ ID NO: 294005 - DNA, 191 bp, Homo sapiens; identical to SEQ ID NO: 205432
  chr19:41698920-41699111
  hyper

SEQ ID NO: 294006 - DNA, 173 bp, Homo sapiens; identical to SEQ ID NO: 205433
  chr19:41699206-41699379
  hyper

SEQ ID NO: 294007 - DNA, 390 bp, Homo sapiens
  chr19:41732021-41732411
  hyper
gggaagggggatcccggctctggctccgcgcccccgaagccggccggaagcgctggggtggggaggtgcccccggtgactcacgcgggggcaggaatgctgcggtcggaacgggacccggctccagaacccacctccagccccagggcttctccggccggcggcgccagctcccgcgcgctgaccctggcggggccccacgtgccaggtggctggacccgacccaggctccccgcccccactcgggccgcccgcccgggactgtactgtttctcctccgggcggcgcgggggctgcgggcgcggggccttcagggcgcggaggctgcgggagcgggcacctgaccttgtctgggaacggccacctaggaagccgcgactgaggagctccc

SEQ ID NO: 294008 - DNA, 117 bp, Homo sapiens
  chr19:41732441-41732558
  hyper
ttgcaccattccactccctccgctgacggagaaaaggaaactttgtgtctgcggatggagagcctcccttgccaacgcggtgggaacagaggcgtacacgcacggagcaaacacgag

SEQ ID NO: 294009 - DNA, 101 bp, Homo sapiens; identical to SEQ ID NO: 240531
  chr19:41815855-41815956
  hyper

SEQ ID NO: 294010 - DNA, 326 bp, Homo sapiens; identical to SEQ ID NO: 240532
  chr19:41831045-41831371
  hyper

SEQ ID NO: 294011 - DNA, 333 bp, Homo sapiens; identical to SEQ ID NO: 240533
  chr19:41831742-41832075
  hyper

SEQ ID NO: 294012 - DNA, 594 bp, Homo sapiens; identical to SEQ ID NO: 240534
  chr19:41857122-41857716
  hyper

SEQ ID NO: 294013 - DNA, 458 bp, Homo sapiens
  chr19:41859852-41860310
  hyper
ttttgaagccgcccccggccccacccaggaagcgcacggggcgggagcgggggcggcccccagggggagggcatgggggggctgggccaccgtcctcatctcgcgtgggcgggctccgaggggggtcccttcagccctgggggaaagggggcgggcaccccggctccgccccgcaaacagggtgctgcctcctggcggccaagcgccaccaaagcgggtgatccagatgcgctgtggctttgcgggcggtgtgggtcaccagagaaagaggaccaggcggagaaggcttaatccgggggatgagacacaggggagccgaccagaggagggggacccagaacggaaggagagtcaggctgggaaacaaggtaggagaagagggtctgtcaacatgggggcctccggagggtgtcagtgggaggagggggcaacaggacacctgaaggatggaagggtca

SEQ ID NO: 294014 - DNA, 221 bp, Homo sapiens; identical to SEQ ID NO: 205438
  chr19:41870211-41870432
  hyper

SEQ ID NO: 294015 - DNA, 33 bp, Homo sapiens; identical to SEQ ID NO: 240537
  chr19:41882553-41882586
  hyper

SEQ ID NO: 294016 - DNA, 337 bp, Homo sapiens; identical to SEQ ID NO: 240538
  chr19:41945338-41945675
  hyper

SEQ ID NO: 294017 - DNA, 48 bp, Homo sapiens; identical to SEQ ID NO: 240539
  chr19:42257256-42257304
  hyper

SEQ ID NO: 294018 - DNA, 181 bp, Homo sapiens; identical to SEQ ID NO: 205439
  chr19:42297160-42297341
  hyper

SEQ ID NO: 294019 - DNA, 35 bp, Homo sapiens; identical to SEQ ID NO: 240541
  chr19:42364647-42364682
  hyper

SEQ ID NO: 294020 - DNA, 187 bp, Homo sapiens; identical to SEQ ID NO: 205440
  chr19:42444456-42444643
  hyper

SEQ ID NO: 294021 - DNA, 117 bp, Homo sapiens; identical to SEQ ID NO: 205441
  chr19:42498159-42498276
  hyper

SEQ ID NO: 294022 - DNA, 106 bp, Homo sapiens; identical to SEQ ID NO: 205442
  chr19:42498571-42498677
  hyper

SEQ ID NO: 294023 - DNA, 135 bp, Homo sapiens; identical to SEQ ID NO: 205443
  chr19:42501286-42501421
  hyper

SEQ ID NO: 294024 - DNA, 167 bp, Homo sapiens
  chr19:42501451-42501618
  hyper
ccccgggccgccgcccaggaacgggcgcagcctcgctctctctgggacctttccagtcaggctttcctttccgttccagtcccctccaggttccatttagttttttatggcttcctgtctctcaccccaactccgggtgtatcttaccctcccgcttcacctctggt

SEQ ID NO: 294025 - DNA, 179 bp, Homo sapiens; identical to SEQ ID NO: 205445
  chr19:42636653-42636832
  hyper

SEQ ID NO: 294026 - DNA, 370 bp, Homo sapiens; identical to SEQ ID NO: 205446
  chr19:42680242-42680612
  hyper

SEQ ID NO: 294027 - DNA, 347 bp, Homo sapiens; identical to SEQ ID NO: 240548
  chr19:42724177-42724524
  hyper

SEQ ID NO: 294028 - DNA, 111 bp, Homo sapiens; identical to SEQ ID NO: 225940
  chr19:42749161-42749272
  hyper

SEQ ID NO: 294029 - DNA, 39 bp, Homo sapiens; identical to SEQ ID NO: 205447
  chr19:42754954-42754993
  hyper

SEQ ID NO: 294030 - DNA, 88 bp, Homo sapiens; identical to SEQ ID NO: 240550
  chr19:42758962-42759050
  hyper

SEQ ID NO: 294031 - DNA, 116 bp, Homo sapiens; identical to SEQ ID NO: 205448
  chr19:42774659-42774775
  hyper

SEQ ID NO: 294032 - DNA, 129 bp, Homo sapiens; identical to SEQ ID NO: 240552
  chr19:42784479-42784608
  hyper

SEQ ID NO: 294033 - DNA, 194 bp, Homo sapiens; identical to SEQ ID NO: 240553
  chr19:42806829-42807023
  hyper

SEQ ID NO: 294034 - DNA, 344 bp, Homo sapiens; identical to SEQ ID NO: 240554
  chr19:42830248-42830592
  hyper

SEQ ID NO: 294035 - DNA, 597 bp, Homo sapiens; identical to SEQ ID NO: 240555
  chr19:42901074-42901671
  hyper

SEQ ID NO: 294036 - DNA, 171 bp, Homo sapiens
  chr19:42906199-42906370
  hyper
cgtccagcatggggtccagcgcgcacgcctacgggacagcggggagggacgtggagagagggtgggggacagacagaccggggtcgggtagagcgaggaggggtttgatgaacaaagggagcgggaaatacggatacagacggagtggacggaggcaggagacatggtggg

SEQ ID NO: 294037 - DNA, 73 bp, Homo sapiens
  chr19:42927304-42927377
  hyper
ggaaccctggtccacgaagctcgcattccggactctgctcccaagccgatccgggcgtcagctagtccctgtg

SEQ ID NO: 294038 - DNA, 247 bp, Homo sapiens
  chr19:42927478-42927725
  hyper
ccctgtggcagtgggccagtccacgctgtccccactgccccgtaggatgtacgaggttccttccgggctgctgccggtctccgcgcgctcacctttggccttgtcttttcgccaccgccggcgaccgtggctccttgagccctctttggcattcttcgaggccggggccatagcggcctcggcgggctccgttcccccggccaactccatcaattccccgcggtcctcccgcgggggccaattccag

SEQ ID NO: 294039 - DNA, 45 bp, Homo sapiens; identical to SEQ ID NO: 240558
  chr19:42942663-42942708
  hyper

SEQ ID NO: 294040 - DNA, 243 bp, Homo sapiens; identical to SEQ ID NO: 225942
  chr19:43967267-43967510
  hyper

SEQ ID NO: 294041 - DNA, 441 bp, Homo sapiens
  chr19:43967734-43968175
  hyper
cccggcccccacggacctgccgggtcgagcgcccgcgaggtgaggttgagcttggcgttgcagcgatcctgagcgcattgctgcagctggatgaacgccagaagcccgtgaagatccaggccgcggtcattcttgccggggagtcccgaaccgcaaccccgcactgccagcgagaattgtccgtggactagggagagggacaagggcgggattagctgtgggcgtggtctcagatggggcgtggcccagagttgggtagggtctgggaggggcggggcctcaaataggccaacaccacaggaccgacaggcaggaattggcggatggacgcccccaaagagccgctcagagcggaaagaacgaccgaagcagggaggagcggggtcacggaacgggggcggaacctcaaagagctgagtcggaggagacagcctggttgac

SEQ ID NO: 294042 - DNA, 359 bp, Homo sapiens; identical to SEQ ID NO: 240560
  chr19:44008462-44008821
  hyper

SEQ ID NO: 294043 - DNA, 272 bp, Homo sapiens; identical to SEQ ID NO: 205451
  chr19:44029739-44030011
  hyper

SEQ ID NO: 294044 - DNA, 179 bp, Homo sapiens
  chr19:44030438-44030617
  hyper
cagggaggagggaacggagcagccccgagcctgtaatgtggtccgcgtggcagtgggtattcactgggagagagaggagggacaggtccggagggtacagaaaggacctgggagtcccagcccagatccttctccctcagactcaggagttctgggccccagcttcccattccactgac

SEQ ID NO: 294045 - DNA, 139 bp, Homo sapiens
  chr19:44030819-44030958
  hyper
gggggacccaggtgagggcgcagaaccggacttccacccactggaggccaagtagtccagactgaccctatcctcttcctaagatccagaagcagaaaccccagcccactctttccccgggagtcgggagtccggagcc

SEQ ID NO: 294046 - DNA, 233 bp, Homo sapiens; identical to SEQ ID NO: 240563
  chr19:44031371-44031604
  hyper

SEQ ID NO: 294047 - DNA, 398 bp, Homo sapiens; identical to SEQ ID NO: 240564
  chr19:44099001-44099399
  hyper

SEQ ID NO: 294048 - DNA, 222 bp, Homo sapiens; identical to SEQ ID NO: 240565
  chr19:44100424-44100646
  hyper

SEQ ID NO: 294049 - DNA, 778 bp, Homo sapiens
  chr19:44143630-44144408
  hyper
ggccctttgtccccgccgggatccagcctgcgcgggtgggggggctgcggcacggcggccgggccccgcgccccctcccccgctcgtcgctcccggctcccggcccgcgctgcgctttgtcccggggagggggcccggcccggccccgcgcgcattgttcggcctctgcggccccgaggctgccgggctgtcaccacagcgcgccccccgccccagcccggccggccgaccccggcccccgaccctacctggccccgccgcggccgcccacagcagcagcagcggccactggaagcgccgggcccggcccatggtgccgccgccgccgccgccgccgctcgctcccggcccggcacctgcaccgcccgcgccgcccgccccgccccccgcgccccgccccctgcccgcccgggggcggggcgccgaggccggggcggggccggggaggggagggggagacggaggagaggcccggagacaatcggggggacggcacggtgggggaacggtgcggggtgcgaaagctggagaggagaggggtgaggagggcgggaaggggtgcgcgggagggcgacagcggcgtgggagcaggtgggggatctcggtgagcgcgggaaatggagggtgttgggtgagggtgctgcgtgcgggcccaggtgctgcgcgcgagggtgcggagttgctggcatgcagggtgcttgcgctgcgcggaggggagggtggcagggtgttgctggaggctgtgcgagggtgggggcgcgggcgtcgtggggtgcgg

SEQ ID NO: 294050 - DNA, 362 bp, Homo sapiens; identical to SEQ ID NO: 240568
  chr19:44174057-44174419
  hyper

SEQ ID NO: 294051 - DNA, 105 bp, Homo sapiens
  chr19:44302745-44302850
  hyper
gtcgggtgctggcaagagagcgtagatgcacactcaggcagtggtaccctggcacagtcgtgcgggctgcgcactgcgccagagcccgcgcctagcacgtctcgg

SEQ ID NO: 294052 - DNA, 54 bp, Homo sapiens
  chr19:44303168-44303222
  hyper
gcttcccgaaacccttctccctccagtctcagcgttcttcctcctccctctatc

SEQ ID NO: 294053 - DNA, 111 bp, Homo sapiens; identical to SEQ ID NO: 205455
  chr19:44405797-44405908
  hyper

SEQ ID NO: 294054 - DNA, 54 bp, Homo sapiens; identical to SEQ ID NO: 205456
  chr19:44406123-44406177
  hyper

SEQ ID NO: 294055 - DNA, 129 bp, Homo sapiens; identical to SEQ ID NO: 240571
  chr19:44439732-44439861
  hyper

SEQ ID NO: 294056 - DNA, 40 bp, Homo sapiens
  chr19:44455256-44455296
  hyper
ctggagggtaaaactgtgaacgtttactccttgggcattc

SEQ ID NO: 294057 - DNA, 280 bp, Homo sapiens
  chr19:44455341-44455621
  hyper
aggcaggcggatccggggaattctgggaaatgtagtccagacgctctgtggagtcgcgggagctacggctgcgggagttaccctttattctgtgatattttgagctgttctgcgtctcgcaggcccttctgaatttcctggacctactctcggaaccctcaacgagctagcgatagatttagaggaaaggaagcaccgtcggaaagcaaaggtttggaagggtgagggcggcggtttgcgatccccgcggcagagccttcttgcgtttagggctgtccta

SEQ ID NO: 294058 - DNA, 93 bp, Homo sapiens
  chr19:44455667-44455760
  hyper
tttctggggctctcagctcgcccaatccgcatccctccactactggcgcggggccgattcccccggtacaacgttggggtgttacttaatctc

SEQ ID NO: 294059 - DNA, 212 bp, Homo sapiens; identical to SEQ ID NO: 205457
  chr19:44506686-44506898
  hyper

SEQ ID NO: 294060 - DNA, 72 bp, Homo sapiens; identical to SEQ ID NO: 205458
  chr19:44507929-44508001
  hyper

SEQ ID NO: 294061 - DNA, 269 bp, Homo sapiens
  chr19:44529438-44529707
  hyper
agtggagtccacacgctctgtggaggctcgagcacttccggtccccaactgtgacgttgctatttcatttaccacagtagtttgagtcatttccacatcttgcgagtccttccgaacgagtctcctttccttggggctcgcaaccacccaatgatcgattcaggagaaaagaagcctgggcggagagcagaggtttggaggggcgcgggcggggattgccgttccagtcagctgagccttctggcgtcggggggctctgctagggtctc

SEQ ID NO: 294062 - DNA, 63 bp, Homo sapiens; identical to SEQ ID NO: 205460
  chr19:44529774-44529837
  hyper

SEQ ID NO: 294063 - DNA, 65 bp, Homo sapiens
  chr19:44576036-44576101
  hyper
agtccatattccaaaccaggcgcttgggtctatgggattcattcctcgtgggcattgcaggaagt

SEQ ID NO: 294064 - DNA, 221 bp, Homo sapiens
  chr19:44576405-44576626
  hyper
gttgactaaggggagaaggagtctcgttggaaaacggaggtttggagggacaacggcctctcttttcgttcttgtcagcggagccttcttggtcttggggctgtcctcgcgtccccgggcatgaggctgggggttgggacttggtcgggacgcgtctcgcctggtttgagggtttttggggctctcagctcgctcagtccgcctccctccatcccacctgt

SEQ ID NO: 294065 - DNA, 250 bp, Homo sapiens; identical to SEQ ID NO: 205461
  chr19:44617149-44617399
  hyper

SEQ ID NO: 294066 - DNA, 364 bp, Homo sapiens; identical to SEQ ID NO: 240579
  chr19:44617607-44617971
  hyper

SEQ ID NO: 294067 - DNA, 185 bp, Homo sapiens
  chr19:44645331-44645516
  hyper
ccttgaagattgtatctcctcgcttgttctctttccaataatcctccgtagtcctgggaggcgtttagacttcaggaattgctgtctattcaatattttcgctcaaggactcaggcagagggaaggacgactctcagggtcacagtccacattccctaccaagcgctcagcgatataggattcgt

SEQ ID NO: 294068 - DNA, 611 bp, Homo sapiens
  chr19:44645571-44646182
  hyper
tttccctgaagggtgagattctgaacgtttttccctcagcattctgagtgtaatccaaacgctcagtggagtcgtggtccatttgacccacgcagggggatccggggaattctgggaaatgtagtcccgccaatcagtggagtcgcgggcacttccgctccagggaagagggggcgattgtcacggcacattccacggtagtttcttccagttccgcgactcgcgggcccctcctaatgtcagggacttaagattggggctcgctgggacctggtggtccggttatgggaaaagaagcctcgtgggagagcagaggtttggtggggcgagggcggcggcttttgttgtgtcagcggagccttcttgggctggggctcccctcgtgtcccgcggcgggaggcggggggcattgggacttggttgggtcgcgtctcgcctggtttgagggtttccggggctctgagctcgcccactccgcctccctgcactccaggcgcgcagtcacttttttacagtgcaaggttggcgtgttaatctccctgggcctctccttgctgttctttaaaatggggacgttaggaccatctttgtagaatcgttttggtaactgg

SEQ ID NO: 294069 - DNA, 195 bp, Homo sapiens; identical to SEQ ID NO: 240581
  chr19:44669064-44669259
  hyper

SEQ ID NO: 294070 - DNA, 89 bp, Homo sapiens; identical to SEQ ID NO: 205463
  chr19:44711963-44712052
  hyper

SEQ ID NO: 294071 - DNA, 380 bp, Homo sapiens; identical to SEQ ID NO: 205464
  chr19:44763972-44764352
  hyper

SEQ ID NO: 294072 - DNA, 327 bp, Homo sapiens; identical to SEQ ID NO: 240584
  chr19:44808916-44809243
  hyper

SEQ ID NO: 294073 - DNA, 103 bp, Homo sapiens
  chr19:44905611-44905714
  hyper
ggttaccagtcccctcttccactcctcctacttcagtccacagggacgggtcacagctgcacatcctacacccctactcctggctacgcctccaagaggggcg

SEQ ID NO: 294074 - DNA, 218 bp, Homo sapiens; identical to SEQ ID NO: 205465
  chr19:44905783-44906001
  hyper

SEQ ID NO: 294075 - DNA, 796 bp, Homo sapiens; identical to SEQ ID NO: 225945
  chr19:45004125-45004921
  hyper

SEQ ID NO: 294076 - DNA, 155 bp, Homo sapiens; identical to SEQ ID NO: 205467
  chr19:45146961-45147116
  hyper

SEQ ID NO: 294077 - DNA, 332 bp, Homo sapiens; identical to SEQ ID NO: 205468
  chr19:45147367-45147699
  hyper

SEQ ID NO: 294078 - DNA, 109 bp, Homo sapiens; identical to SEQ ID NO: 205469
  chr19:45147734-45147843
  hyper

SEQ ID NO: 294079 - DNA, 306 bp, Homo sapiens; identical to SEQ ID NO: 240588
  chr19:45195331-45195637
  hyper

SEQ ID NO: 294080 - DNA, 175 bp, Homo sapiens
  chr19:45207399-45207574
  hyper
cttcaacggtggggccctgcccgtcgctctccgcctgggcctgtcccctgacggccgggtgctggccaggcatggcatccgccgggaggaggccggcgcctatcagtgtgaggtgtggaacccggtcagtgtcagccgcagcgagcccatcaacctgaccgtgtactgtgagtcc

SEQ ID NO: 294081 - DNA, 158 bp, Homo sapiens
  chr19:45257690-45257848
  hyper
cagggtagatccccggcgggacaggcttccctcccccgggagcaggaagcagagccccgcccagcagacctgttactggaagtccgagggctgggtcgcccctcccgtccccacttcctccagccccgccccaccccctgcggcccgcgcgtttatgg

SEQ ID NO: 294082 - DNA, 60 bp, Homo sapiens; identical to SEQ ID NO: 205471
  chr19:45281278-45281338
  hyper

SEQ ID NO: 294083 - DNA, 198 bp, Homo sapiens; identical to SEQ ID NO: 205472
  chr19:45312126-45312324
  hyper

SEQ ID NO: 294084 - DNA, 368 bp, Homo sapiens
  chr19:45347906-45348274
  hyper
ccggcctcccgcttcgcgccctcatcccgccccccggcgcggcctcaccagctccccctgggcagcccaaagaatgcgaagaggtaggtgggggtagggaggagggcgagccgctgggagagacaaagggcccgagtctgagcgagagacacaaagacgcgaggaggctggggagataggggaagtgggacaaggacgcggggagtgaccaggtccggaggccggactggagcccagccccacccagcccggccgggccagcgcagcgcgggggccggtctctgctgccccctggcgggtggctgcggtgagaaggcggcgcggagcaggtgttgggaggggaggaccagggcgcgcagggaggtagg

SEQ ID NO: 294085 - DNA, 264 bp, Homo sapiens
  chr19:45348808-45349072
  hyper
agaccagaaacagagcgacaccgaagcatgaggacggaaagacccagagaggcagaaatacagggacagagaggaagacccaaagagagtgagagagacacaaagacacgtaagagagacagagaaatccagaaagaaacgagtgcagcgacacctagagttcggggcagagattagaaacgcacgagggtacgagaaacaggctcagggcgatgggctcgacctgcggggaggtcgcacaaccgggacgtgctgggggcagaa

SEQ ID NO: 294086 - DNA, 1013 bp, Homo sapiens
  chr19:45349505-45350518
  hyper
ggccggagccagggtcggcttgactcgggggagcagcgggtggatcctgtgacgtcagcgggttcgaaccgccggagctgagcgagaggccgggggtgccgagccgggcggggagagctgggccgggagagcagaacagggaggctagagcgcagcgggaaccggcccggagccggagccggagccccacaggcacctactaaaccgcccagccgatcggcccccacagagtggcccgcgggcctccggccgggcccagtcccctcccgggccctccatggcccgggccgctgccctcctgccgtcgagatcgccgccgacgccgctgctgtggccgctgctgctgctgctgctcctggaaaccggtgagacgagcggacggccccctgccctcgcgcggaccccctccaaccttaccttccgagctggggaagccgagcaccttccccgcccacccccggctccccgagccccctctcgcgtgcccccttcctggctggccccacagactccgaccccctacacgtccgattctctcgaggagactctgacccctcctttctgcatctctctcaccaccacccccatccttcttaatccaattgcccatcctacgcctgcttgtctgtccccctccccatttctcggattcccgcgccgaaagggttaaatcccaggaaggcctggtgccccctccccaccccgcgccgagtagttcacccggatctgggtctctgtctcctctacccctctcaggaatgtggggaatgttccccccacctaccgcagtaaggtctcgaggaagaggcgagaccacctccctcccctatttttccttcttcccggcttgggcgtctgaggcccggagagaactgaggacaagcggacctgattcgggtcccttggagggctaaggataagagttctggcgacttagggggaagggcctgagctcggagctccaaccccgaacctcagggagttgggggttctgactccgtggactccagaaa

SEQ ID NO: 294087 - DNA, 238 bp, Homo sapiens; identical to SEQ ID NO: 205475
  chr19:45418006-45418244
  hyper

SEQ ID NO: 294088 - DNA, 571 bp, Homo sapiens; identical to SEQ ID NO: 240595
  chr19:45579319-45579890
  hyper

SEQ ID NO: 294089 - DNA, 1119 bp, Homo sapiens
  chr19:45647692-45648811
  hyper
accgtgcctggttttcagtttttatgtggtgcttaaagcaagccactcaggtacagagactctcagggcgagcactcgtgtgctcaaaccccgggataagagttgccctccttgggggcttcagggcgctcaaggtccaggccctggccaggggcccaggctgtggggggtagggactgactgggtgcctggggagctgggagtggacgggggacctggcatttggggagacttcaggcacaggagggacttcaggccaggcctgcggcagggcaggacggcgccggtgttcacgcaggcgcgcgaaagaaaaggagcgcccgggcctggctctcttcccggcttctttcctgacttggcctcctgggtctcctccgccatcacggcctcctcctcaccctcacaccccctccctccagccgcacactcagagcctggagacgctgaacctgggccacaaccccatcgggaacgagggtgtgcggcacctcaagaacgggctcatcagcaaccgcagcgtgctgcgcctcgggctggcctccaccaagctcacgtgcgagggtagggtacggggccgggccagggtgcgggctggtgggctcagccgggcggccagccgggtgtggggcccgtggccagcccctgcggtgcccccccaggcgcggtggcggtggcggagttcatcgctgagagcccccgcctcctgagactggaccttcgggagaacgagatcaagacaggcgggctcatggcactgtcgttggccctcaaggtgaaccactcactgctgcgcctggacctcgaccgtgaacccaagaaagaggcggtgagcaggggacggtcctgcagccctggggcgggcggaaggccgggtggtggggccggcctgagagccctagccaggcgctcccgccacaggtgaagagcttcatcgagacgcagaaggcgctgctggccgagatccagaacggctgcaagcgcaacttggtgctggcgcgggagagggaggagaaggagcagccgccacagctgtcggcctccatgcctgagaccaccgccaccgagccccagcccgacgacgagcccgccgctggggtgcagaacggggcccccagcccc

SEQ ID NO: 294090 - DNA, 56 bp, Homo sapiens
  chr19:45655081-45655137
  hyper
tgggcctcacagggctcattcggaccctgggttgcggccccagtccagccccctat

SEQ ID NO: 294091 - DNA, 200 bp, Homo sapiens; identical to SEQ ID NO: 205477
  chr19:45656461-45656661
  hyper

SEQ ID NO: 294092 - DNA, 77 bp, Homo sapiens
  chr19:45681393-45681470
  hyper
cccgggccggggtcggggtcgtgagcccacagctcagccaccatctccgtgtgaagaaactcaaacaacacagtatc

SEQ ID NO: 294093 - DNA, 62 bp, Homo sapiens; identical to SEQ ID NO: 205478
  chr19:45755078-45755140
  hyper

SEQ ID NO: 294094 - DNA, 46 bp, Homo sapiens; identical to SEQ ID NO: 240599
  chr19:45843863-45843909
  hyper

SEQ ID NO: 294095 - DNA, 61 bp, Homo sapiens; identical to SEQ ID NO: 240600
  chr19:45844196-45844257
  hyper

SEQ ID NO: 294096 - DNA, 465 bp, Homo sapiens; identical to SEQ ID NO: 240601
  chr19:45873582-45874047
  hyper

SEQ ID NO: 294097 - DNA, 90 bp, Homo sapiens; identical to SEQ ID NO: 240603
  chr19:45907691-45907781
  hyper

SEQ ID NO: 294098 - DNA, 34 bp, Homo sapiens; identical to SEQ ID NO: 240604
  chr19:45908310-45908344
  hyper

SEQ ID NO: 294099 - DNA, 46 bp, Homo sapiens; identical to SEQ ID NO: 225953
  chr19:45908810-45908856
  hyper

SEQ ID NO: 294100 - DNA, 38 bp, Homo sapiens; identical to SEQ ID NO: 240605
  chr19:45927243-45927281
  hyper

SEQ ID NO: 294101 - DNA, 51 bp, Homo sapiens
  chr19:45931061-45931112
  hyper
aagtgttggggagccggggcctctctgctccgccagaacccagcgggggca

SEQ ID NO: 294102 - DNA, 156 bp, Homo sapiens
  chr19:45931579-45931735
  hyper
ctcctgggctcaagcgatcctcccttctcgccctcccaaagtgtcgggattactgtagtgagccactgctcccagcctaagctgtttcaaaactaaactttggaatcccggattcgaatctccccggctcccagagttgcgcgttcgaatccccca

SEQ ID NO: 294103 - DNA, 135 bp, Homo sapiens
  chr19:45931788-45931923
  hyper
aattcagccgcaactccagtttgggccactccccagctacggcccctgctcccatcccaaaccttcccctcctctcaacttcgagccctttgttcgccccggaacgggtggggtggggacggagactgtaaggac

SEQ ID NO: 294104 - DNA, 230 bp, Homo sapiens; identical to SEQ ID NO: 225954
  chr19:45947821-45948051
  hyper

SEQ ID NO: 294105 - DNA, 262 bp, Homo sapiens; identical to SEQ ID NO: 205479
  chr19:45959073-45959335
  hyper

SEQ ID NO: 294106 - DNA, 219 bp, Homo sapiens; identical to SEQ ID NO: 240608
  chr19:45971036-45971255
  hyper

SEQ ID NO: 294107 - DNA, 85 bp, Homo sapiens; identical to SEQ ID NO: 205480
  chr19:45996037-45996122
  hyper

SEQ ID NO: 294108 - DNA, 106 bp, Homo sapiens; identical to SEQ ID NO: 240610
  chr19:46000728-46000834
  hyper

SEQ ID NO: 294109 - DNA, 204 bp, Homo sapiens; identical to SEQ ID NO: 205481
  chr19:46002502-46002706
  hyper

SEQ ID NO: 294110 - DNA, 90 bp, Homo sapiens; identical to SEQ ID NO: 240612
  chr19:46088261-46088351
  hyper

SEQ ID NO: 294111 - DNA, 239 bp, Homo sapiens; identical to SEQ ID NO: 205482
  chr19:46142560-46142799
  hyper

SEQ ID NO: 294112 - DNA, 863 bp, Homo sapiens
  chr19:46144643-46145506
  hyper
cctcacccagtagacctgaccgtccagcttctaaaaactctggccacgcccctcaatattgactccgccctcccagaccttccactgttaccgtgccacctcaagattggtccctccaaggctctggcaccgtccccgcttttgaactagctggccccactctaggttacgacctcgtggcctggggcatgactacatttctcgaccatttcctccctatctctttctgcggcttgacgccgccccagtccttacccttcctttttggcgctacagttgctgctggaggatgtggtccggctgcgggggtcctcacggcgcaccgaggcgaggcgctctggtgacaagtagcggcggacactgctaaaagagagcacacaggtgggggcagagccttctaggccagcaggcgagtgccgtgagcaagcgagattctccctgcaccctctgctgctggagctcaggcaaacaaaccacctctgtctcccacgaggtcttggaagaggctgggggtcccggccttgtgccttacctgcgcccggaggtcgcctccttcttgggagaggatggggacgtggcatagccacccacgcgccgcgggggtcccgagccattaaggggcgtcctggtgggaaggcctttcaagagctgacacactggagggatggggttaggggacagaagagggtgagtataaggaccaggccccggtcctccccatcccacccctccagtctaacggggatacccgaggcagtggtgcctaagcgcggaggcgcccggcccttgggggtgccccgcgcgcgtagcgccgctccctgttcttcgcatgcccgcaggcgacgcagagcatccgccagcgc

SEQ ID NO: 294113 - DNA, 88 bp, Homo sapiens; identical to SEQ ID NO: 56341
  chr19:46145557-46145645
  hyper

SEQ ID NO: 294114 - DNA, 153 bp, Homo sapiens
  chr19:46148670-46148823
  hyper
cgttgccatagcaacgcccttcgttccagcatccccagctcagctcgcctggcatcaggcggccggcgccgggcccggcgctggggtcatccccaggatgcccagaaaggggggtcgggacaccgcctgccaagccccccaacacaatcctag

SEQ ID NO: 294115 - DNA, 168 bp, Homo sapiens; identical to SEQ ID NO: 205486
  chr19:46180191-46180359
  hyper

SEQ ID NO: 294116 - DNA, 93 bp, Homo sapiens; identical to SEQ ID NO: 205487
  chr19:46180559-46180652
  hyper

SEQ ID NO: 294117 - DNA, 540 bp, Homo sapiens; identical to SEQ ID NO: 240617
  chr19:46180865-46181405
  hyper

SEQ ID NO: 294118 - DNA, 348 bp, Homo sapiens
  chr19:46271267-46271615
  hyper
gagctggacttgcgccgcccgaggcccctcacctcttgcagggcgcgccgcctccggccccggtccggtcgcgctgtcgccggttcttgaaccagttgctgacctgcgtgagcgacaggccggtgagtgtggccaggcggcgcttctcgtccggcgtggggtagcggttgccgcggtagcaggccttgagcgctgcgcgggagcgctccttgaagcagtagactgtctcctcgccgtcccagatggtcttgggcagcgggaacttcttgcgcagtcgatacttgtccactgcgccaagcgcgcggccgcgggcccgctcggcctcatggtagcgcgcgcgcaggtaga

SEQ ID NO: 294119 - DNA, 221 bp, Homo sapiens; identical to SEQ ID NO: 240619
  chr19:46272454-46272675
  hyper

SEQ ID NO: 294120 - DNA, 33 bp, Homo sapiens; identical to SEQ ID NO: 225958
  chr19:46273813-46273846
  hyper

SEQ ID NO: 294121 - DNA, 35 bp, Homo sapiens; identical to SEQ ID NO: 240620
  chr19:46295860-46295895
  hyper

SEQ ID NO: 294122 - DNA, 55 bp, Homo sapiens; identical to SEQ ID NO: 240621
  chr19:46357489-46357544
  hyper

SEQ ID NO: 294123 - DNA, 47 bp, Homo sapiens; identical to SEQ ID NO: 240622
  chr19:46357574-46357621
  hyper

SEQ ID NO: 294124 - DNA, 222 bp, Homo sapiens; identical to SEQ ID NO: 240624
  chr19:46389400-46389622
  hyper

SEQ ID NO: 294125 - DNA, 345 bp, Homo sapiens; identical to SEQ ID NO: 205489
  chr19:46404950-46405295
  hyper

SEQ ID NO: 294126 - DNA, 147 bp, Homo sapiens; identical to SEQ ID NO: 205490
  chr19:46476433-46476580
  hyper

SEQ ID NO: 294127 - DNA, 108 bp, Homo sapiens; identical to SEQ ID NO: 205491
  chr19:46519147-46519255
  hyper

SEQ ID NO: 294128 - DNA, 420 bp, Homo sapiens
  chr19:46519582-46520002
  hyper
cgcgctccgcttcgaccccacggcctttgtgaaagccaaggaaaggaagcagagagagatccagatgaagtcagtgccccttcctccctcacctgcccctgtccctggcccgtgcccgctcccgggctctcatctctccacgccaccatcagtctccatcccctgccacctgctcgcttctcgccggataccccgcctgctctcccttccgtccgtcctacctcctcgtctgtgtttctgcgtgctttccgctcgtaggcctgtcacctcaggctttcgctggcgtggctgtgacctttaggggcgcagtgacccccttgcctgcaggagttgggcgtacagaccggcgtctcctttcttttttcccaggcagcagcagcggaaccgcttaggcagtgggggaagcggggacggtccgtc

SEQ ID NO: 294129 - DNA, 141 bp, Homo sapiens; identical to SEQ ID NO: 205493
  chr19:46580427-46580568
  hyper

SEQ ID NO: 294130 - DNA, 224 bp, Homo sapiens; identical to SEQ ID NO: 205494
  chr19:46580598-46580822
  hyper

SEQ ID NO: 294131 - DNA, 324 bp, Homo sapiens; identical to SEQ ID NO: 240632
  chr19:46850468-46850792
  hyper

SEQ ID NO: 294132 - DNA, 83 bp, Homo sapiens
  chr19:46907104-46907187
  hyper
gggagctgctgtctcgtgaggattggaggagccacgtggaaaatgctgctgcccggagcccaggtggctgcgctggccaggga

SEQ ID NO: 294133 - DNA, 249 bp, Homo sapiens
  chr19:46907822-46908071
  hyper
tttgcagtcatcgtaaacggggcggcatggaaagccctcactgagaaggtgccaaagaccccaaggaggtgaggggttgcggccggcagatgcctggggaaagcgcatgaccggaagcgcaggaagagccaggttaaaagccccaagccagagtgtgataatatggggctgttaatgtgtgactactgcccctcccgtgccaggctcggtgctggcgtaggggaggcagtggggccaaagaaggccacc

SEQ ID NO: 294134 - DNA, 53 bp, Homo sapiens; identical to SEQ ID NO: 205496
  chr19:46929942-46929995
  hyper

SEQ ID NO: 294135 - DNA, 144 bp, Homo sapiens
  chr19:46931909-46932053
  hyper
tgactcgtggctcccgggtcctgggcaaggctgcaccaaggagggtctaaagatgatgcttcccctttcttggcgtggcctccgaaggtctcacaggccccaacggtctctccggatctgggactgctgatctccctgggacaa

SEQ ID NO: 294136 - DNA, 68 bp, Homo sapiens; identical to SEQ ID NO: 205497
  chr19:46974960-46975028
  hyper

SEQ ID NO: 294137 - DNA, 192 bp, Homo sapiens; identical to SEQ ID NO: 240638
  chr19:46991213-46991405
  hyper

SEQ ID NO: 294138 - DNA, 78 bp, Homo sapiens; identical to SEQ ID NO: 205498
  chr19:46992620-46992698
  hyper

SEQ ID NO: 294139 - DNA, 70 bp, Homo sapiens; identical to SEQ ID NO: 205499
  chr19:46996431-46996501
  hyper

SEQ ID NO: 294140 - DNA, 56 bp, Homo sapiens; identical to SEQ ID NO: 56372
  chr19:46997221-46997277
  hyper

SEQ ID NO: 294141 - DNA, 83 bp, Homo sapiens; identical to SEQ ID NO: 240641
  chr19:47040895-47040978
  hyper

SEQ ID NO: 294142 - DNA, 155 bp, Homo sapiens; identical to SEQ ID NO: 240642
  chr19:47104723-47104878
  hyper

SEQ ID NO: 294143 - DNA, 229 bp, Homo sapiens; identical to SEQ ID NO: 205500
  chr19:47137304-47137533
  hyper

SEQ ID NO: 294144 - DNA, 595 bp, Homo sapiens; identical to SEQ ID NO: 240644
  chr19:47137787-47138382
  hyper

SEQ ID NO: 294145 - DNA, 364 bp, Homo sapiens; identical to SEQ ID NO: 240645
  chr19:47217682-47218046
  hyper

SEQ ID NO: 294146 - DNA, 751 bp, Homo sapiens
  chr19:47258852-47259603
  hyper
tcaccgtcctggtgcgggagttcgaggcatttgacaacgcggtgcccgagctggtagactccttcctgcagcaagacccagcccagcccgtggtggtggcagccgacacgctcccctacccgcccctggccctgccccgcatccccaacgtgcgtctggcgctgctccagcccgccctggaccggccagccgcagcctcgcgcccggagacctacgtggccaccgagtttgtggccctagtacctgatggggcgcgggctgaggcacctggcctgctggagcgcatggtggaggcgctccgcgcaggaagcgcacgtctggtggccgccccggttgccacggccaaccctgccaggtgcctggccctgaacgtcagcctgcgagagtggaccgcccgctatggcgcagcccccgccgcgccccgctgcgacgccctggacggagatgctgtggtgctcctgcgcgcccgcgacctcttcaacctctcggcgcccctggcccggccggtgggcaccagcctctttctgcagaccgcccttcgcggctgggcggtgcagctgctggacttgaccttcgccgcggcgcgccagcccccgctggccacggcccacgcgcgctggaaggctgagcgcgagggacgcgctcggcgggcggcgctgctccgcgcgctgggcatccgcctagtgagctgggaaggcgggcggctggagtggttcggctgcaacaaggagaccacgcgctgcttcggaac

SEQ ID NO: 294147 - DNA, 71 bp, Homo sapiens; identical to SEQ ID NO: 240646
  chr19:47290660-47290731
  hyper

SEQ ID NO: 294148 - DNA, 139 bp, Homo sapiens; identical to SEQ ID NO: 240647
  chr19:47292036-47292175
  hyper

SEQ ID NO: 294149 - DNA, 270 bp, Homo sapiens; identical to SEQ ID NO: 225965
  chr19:47359761-47360031
  hyper

SEQ ID NO: 294150 - DNA, 117 bp, Homo sapiens; identical to SEQ ID NO: 205503
  chr19:47363286-47363403
  hyper

SEQ ID NO: 294151 - DNA, 43 bp, Homo sapiens; identical to SEQ ID NO: 205504
  chr19:47494573-47494616
  hyper

SEQ ID NO: 294152 - DNA, 69 bp, Homo sapiens
  chr19:47522920-47522989
  hyper
attctgacccccgacgttaccgtggggcaagggaactcggaccccagggtagcttggccccctaccagg

SEQ ID NO: 294153 - DNA, 264 bp, Homo sapiens
  chr19:47523724-47523988
  hyper
ctggggggatccctgggcaggacacaggatgggggtccctgccctctgccccctgcctccttagcccagccgggaaaacagggtgcagatccggggagtcagacaccggggatgggcttggggggcgggtcctcggggcagagggctccgggggctggggcgtgcgtgcctggcccgggaggcgcccgccccccgcccggcttgggcatgcttggcacgcagcgcgcgggccggttcgatccgtatgcgcgccgcgtgcgccca

SEQ ID NO: 294154 - DNA, 46 bp, Homo sapiens; identical to SEQ ID NO: 240651
  chr19:47524452-47524498
  hyper

SEQ ID NO: 294155 - DNA, 34 bp, Homo sapiens; identical to SEQ ID NO: 240652
  chr19:47551879-47551913
  hyper

SEQ ID NO: 294156 - DNA, 141 bp, Homo sapiens
  chr19:47675972-47676113
  hyper
aaacagagtcaatcacagatcatctactccagagttgaaaagtgtacacgccaaaaaaaaaaaagagaaaagaaaaaaagcacatatcttcacggatgacagagttctctaggacttgctctgtgccgggcgttttccatg

SEQ ID NO: 294157 - DNA, 283 bp, Homo sapiens
  chr19:47729541-47729824
  hyper
ccgcgggccacgggcgcgcagctccactcctcggcggcctagtccctggccctggccctggccctggctcgggctccggctatgccagccgcggcgcggagtccttgggcggctctgcgggcgcgcgattcccccccacccacttaccccccacctgcctgtccgcggagcgacccagccgcgcagggcagcagctgccgcacatctggcgggggccgcctgccgccccctcctccggcggaagtcccacctgccgtctaccccacccccagcactcacccgc

SEQ ID NO: 294158 - DNA, 693 bp, Homo sapiens; identical to SEQ ID NO: 131848
  chr19:47729850-47730543
  hyper

SEQ ID NO: 294159 - DNA, 152 bp, Homo sapiens; identical to SEQ ID NO: 225972
  chr19:47730760-47730912
  hyper

SEQ ID NO: 294160 - DNA, 293 bp, Homo sapiens; identical to SEQ ID NO: 205506
  chr19:47731298-47731591
  hyper

SEQ ID NO: 294161 - DNA, 86 bp, Homo sapiens; identical to SEQ ID NO: 240656
  chr19:47750797-47750883
  hyper

SEQ ID NO: 294162 - DNA, 206 bp, Homo sapiens
  chr19:47776507-47776713
  hyper
ggctcgaactggatgagagacgtggctagacgggggaggggtgctgggccgggggggaggtgggaagactgctcccctccgctgactcagccccttctctcctcagaggcaggccccgaaggccaggagacggcggagatcaccgacttccagagggtgcgtttctgcaaggtggtggcggcccctccgctgccgggggccgctcg

SEQ ID NO: 294163 - DNA, 428 bp, Homo sapiens
  chr19:47776742-47777170
  hyper
gcgctctgcactaacctcccaccgcctcgctcctctgtcctctgcttctgccacactccagccaggagagggttaaatctaaggggggaggagccagggtctgcgagccgggcggggccagggcagtagtcgggtgcaggccccaccaacgggggacgtcacggcactgggacggctgggacgcttccgcgttagtctcccatggaggccctgggcggctcgagccagtcttcaggccgaatctcccgcctccaggattgcatccgaggcctggcagccggtgacacttccgaagggcttgaattactcgggcgccagccctgtcgtattaaacgcagtgcttccgctcacccttgaactgtgtttctggagggggcaggctgggtcgctgtgcttggcgggcttttctgtggcggaagaggcggaag

SEQ ID NO: 294164 - DNA, 216 bp, Homo sapiens; identical to SEQ ID NO: 205507
  chr19:47910163-47910379
  hyper

SEQ ID NO: 294165 - DNA, 58 bp, Homo sapiens; identical to SEQ ID NO: 56409
  chr19:47910679-47910737
  hyper

SEQ ID NO: 294166 - DNA, 151 bp, Homo sapiens
  chr19:47922894-47923045
  hyper
cttccggtgggagtcggggaggggcaggctgtggggggaggagaggaagagaccgcggccctggtgcccccaggcccctcctctcctacccagggctggggttcctgctccgggtttctcagtctccctctttcccagtctctctctcctt

SEQ ID NO: 294167 - DNA, 260 bp, Homo sapiens
  chr19:47923084-47923344
  hyper
ctggctctctgttctccgagccccctggacacaccacggaccccctccctggccatctccaggggtcacgtgggaatctggagtctggtcccaccgtaggctctcccctctctgaggctcgattccccctctgcaggatgggcagtgcgctgggggcggcgggggtgggctgtggataacggagaaacagttaagctagagggtgccaggactcagggtcttggctgagtctgggggtccccatgccggcgggctctgcc

SEQ ID NO: 294168 - DNA, 114 bp, Homo sapiens; identical to SEQ ID NO: 240660
  chr19:47923668-47923782
  hyper

SEQ ID NO: 294169 - DNA, 142 bp, Homo sapiens
  chr19:47925411-47925553
  hyper
ccccttcccctcccgccccaccaagcaatcataccattagccacggctcagcggtggcgggaaggacccggcctgacccgggcggggggcggggcacaggctgcggctcccaccgagacccctctctccctcttttccttcc

SEQ ID NO: 294170 - DNA, 41 bp, Homo sapiens
  chr19:47925592-47925633
  hyper
aatctgctttcctctgccagtttctcgctgtgcctctgggt

SEQ ID NO: 294171 - DNA, 313 bp, Homo sapiens; identical to SEQ ID NO: 240662
  chr19:47931515-47931828
  hyper

SEQ ID NO: 294172 - DNA, 165 bp, Homo sapiens
  chr19:47951123-47951288
  hyper
cgccgcgcgccgtgccgtccaccgtgcggtagggaaggcgcacggtgccgcgcgcgcccgagctgcgcacgacgcgcacgtccacggtgcccatgcactcgctcacgtgcagcaggcggtcctggaaggagaagatgcctgcgtggtcgtcgtccaggatggtga

SEQ ID NO: 294173 - DNA, 175 bp, Homo sapiens
  chr19:47951318-47951493
  hyper
ccttgggccgcccgccgccgtccggctcgaacatgccctgcgcgtcgcccacgcgcaggttcagcagccgcacgaagaaatgctcgtcctcctcgaagatgtcgtcgtcgatgatgccgatgcgcagctccttctgcgtctcgcctggtttgaacaccagcgtgccctcgctgcg

SEQ ID NO: 294174 - DNA, 51 bp, Homo sapiens
  chr19:47987534-47987585
  hyper
cggaagctgccggcgttgccctctcccaagatggcggccaggtcgcctgct

SEQ ID NO: 294175 - DNA, 104 bp, Homo sapiens; identical to SEQ ID NO: 131878
  chr19:47987618-47987722
  hyper

SEQ ID NO: 294176 - DNA, 300 bp, Homo sapiens; identical to SEQ ID NO: 240668
  chr19:48018496-48018796
  hyper

SEQ ID NO: 294177 - DNA, 99 bp, Homo sapiens
  chr19:48076347-48076446
  hyper
gggggctcgcgcgccgggcctcgcgcctggcgcctcgcggggctcccagcggcctcccgccttccccgcgccgcccggggcgcacgcgcagcccggccc

SEQ ID NO: 294178 - DNA, 141 bp, Homo sapiens; identical to SEQ ID NO: 240669
  chr19:48103693-48103834
  hyper

SEQ ID NO: 294179 - DNA, 202 bp, Homo sapiens; identical to SEQ ID NO: 240670
  chr19:48104041-48104243
  hyper

SEQ ID NO: 294180 - DNA, 81 bp, Homo sapiens; identical to SEQ ID NO: 240671
  chr19:48216436-48216517
  hyper

SEQ ID NO: 294181 - DNA, 271 bp, Homo sapiens; identical to SEQ ID NO: 225978
  chr19:48229020-48229291
  hyper

SEQ ID NO: 294182 - DNA, 263 bp, Homo sapiens; identical to SEQ ID NO: 240672
  chr19:48281435-48281698
  hyper

SEQ ID NO: 294183 - DNA, 169 bp, Homo sapiens; identical to SEQ ID NO: 205511
  chr19:48613936-48614105
  hyper

SEQ ID NO: 294184 - DNA, 317 bp, Homo sapiens; identical to SEQ ID NO: 240674
  chr19:48774331-48774648
  hyper

SEQ ID NO: 294185 - DNA, 110 bp, Homo sapiens; identical to SEQ ID NO: 205512
  chr19:48823626-48823736
  hyper

SEQ ID NO: 294186 - DNA, 383 bp, Homo sapiens; identical to SEQ ID NO: 240675
  chr19:48833439-48833822
  hyper

SEQ ID NO: 294187 - DNA, 250 bp, Homo sapiens
  chr19:48867042-48867292
  hyper
ggggtctagacagcgaggtagatcttaggagagcaggaaatgctcgtaaaggttacctagggggtgcagggccgccctccctggccatgcaatcccccgatttctccctcaccttagccaaagctcgactgtcattgagcctcctgcgcatgtgcaggagggcgtcctgggctcccgaggttcggcttcacccagcagtaaaacgcatgcgcaaagcttcggtcaatgcgggctgtccatttctcaccgc

SEQ ID NO: 294188 - DNA, 142 bp, Homo sapiens; identical to SEQ ID NO: 131903
  chr19:48867354-48867496
  hyper

SEQ ID NO: 294189 - DNA, 140 bp, Homo sapiens; identical to SEQ ID NO: 240677
  chr19:48894905-48895045
  hyper

SEQ ID NO: 294190 - DNA, 322 bp, Homo sapiens; identical to SEQ ID NO: 205513
  chr19:48901493-48901815
  hyper

SEQ ID NO: 294191 - DNA, 51 bp, Homo sapiens; identical to SEQ ID NO: 240682
  chr19:48949427-48949478
  hyper

SEQ ID NO: 294192 - DNA, 179 bp, Homo sapiens; identical to SEQ ID NO: 240683
  chr19:48972233-48972412
  hyper

SEQ ID NO: 294193 - DNA, 183 bp, Homo sapiens
  chr19:48994398-48994581
  hyper
ccccggggtctccagcgcaggcgagacggagaagcgggagaagcacagcggggggcctggaggggggaggagggggaaatcctccgcccactcgaaactgcctcctgcggcagaaggaaagaccgcggtcaggctgcagacacctgcggcactcccgccctctggtcccgcccctcccgacca

SEQ ID NO: 294194 - DNA, 182 bp, Homo sapiens; identical to SEQ ID NO: 205514
  chr19:48996833-48997015
  hyper

SEQ ID NO: 294195 - DNA, 204 bp, Homo sapiens; identical to SEQ ID NO: 225982
  chr19:49014628-49014832
  hyper

SEQ ID NO: 294196 - DNA, 107 bp, Homo sapiens; identical to SEQ ID NO: 205515
  chr19:49127266-49127373
  hyper

SEQ ID NO: 294197 - DNA, 216 bp, Homo sapiens; identical to SEQ ID NO: 205516
  chr19:49141163-49141379
  hyper

SEQ ID NO: 294198 - DNA, 53 bp, Homo sapiens; identical to SEQ ID NO: 240688
  chr19:49149535-49149588
  hyper

SEQ ID NO: 294199 - DNA, 508 bp, Homo sapiens; identical to SEQ ID NO: 205517
  chr19:49199689-49200197
  hyper

SEQ ID NO: 294200 - DNA, 504 bp, Homo sapiens; identical to SEQ ID NO: 205518
  chr19:49216985-49217489
  hyper

SEQ ID NO: 294201 - DNA, 51 bp, Homo sapiens; identical to SEQ ID NO: 12499
  chr19:49217526-49217577
  hyper

SEQ ID NO: 294202 - DNA, 97 bp, Homo sapiens; identical to SEQ ID NO: 240691
  chr19:49217819-49217916
  hyper

SEQ ID NO: 294203 - DNA, 141 bp, Homo sapiens
  chr19:49242393-49242534
  hyper
cgcccgccgccgcgggccggcccagagcgtcgcacaaagcgaaggcgtccacgcagctgctctcgccggggccaccgccggggctgcctgctaggccgtagcgctctagcgcctcggccacgagctcgcgcgccgtggagc

SEQ ID NO: 294204 - DNA, 35 bp, Homo sapiens
  chr19:49242773-49242808
  hyper
atgcgcttggcgcggctaccggaggctcccccggc

SEQ ID NO: 294205 - DNA, 33 bp, Homo sapiens; identical to SEQ ID NO: 131935
  chr19:49242911-49242944
  hyper

SEQ ID NO: 294206 - DNA, 70 bp, Homo sapiens
  chr19:49244870-49244940
  hyper
ggaacccctgtcctcggggccagaggccacgcccccggcaggaagccacaccccgtgccccgaaaccaca

SEQ ID NO: 294207 - DNA, 632 bp, Homo sapiens; identical to SEQ ID NO: 205520
  chr19:49255764-49256396
  hyper

SEQ ID NO: 294208 - DNA, 556 bp, Homo sapiens; identical to SEQ ID NO: 240694
  chr19:49298357-49298913
  hyper

SEQ ID NO: 294209 - DNA, 153 bp, Homo sapiens; identical to SEQ ID NO: 205522
  chr19:49314168-49314321
  hyper

SEQ ID NO: 294210 - DNA, 210 bp, Homo sapiens; identical to SEQ ID NO: 205523
  chr19:49436772-49436982
  hyper

SEQ ID NO: 294211 - DNA, 585 bp, Homo sapiens; identical to SEQ ID NO: 56462
  chr19:49467050-49467635
  hyper

SEQ ID NO: 294212 - DNA, 205 bp, Homo sapiens; identical to SEQ ID NO: 240698
  chr19:49474212-49474417
  hyper

SEQ ID NO: 294213 - DNA, 170 bp, Homo sapiens; identical to SEQ ID NO: 240699
  chr19:49496546-49496716
  hyper

SEQ ID NO: 294214 - DNA, 193 bp, Homo sapiens; identical to SEQ ID NO: 205525
  chr19:49577262-49577455
  hyper

SEQ ID NO: 294215 - DNA, 32 bp, Homo sapiens; identical to SEQ ID NO: 240702
  chr19:49588345-49588377
  hyper

SEQ ID NO: 294216 - DNA, 84 bp, Homo sapiens; identical to SEQ ID NO: 205526
  chr19:49646032-49646116
  hyper

SEQ ID NO: 294217 - DNA, 83 bp, Homo sapiens; identical to SEQ ID NO: 12509
  chr19:49646245-49646328
  hyper

SEQ ID NO: 294218 - DNA, 796 bp, Homo sapiens
  chr19:49652265-49653061
  hyper
caatgagcgggtcatgggttgggtgtccgggctgggcctgaaggaatttgccacgaacctcacggagagcggggtacacggggcactgctcgccctggacgagaccttcgactactccgacctggccttgctcctgcagatccccacgcagaatgcacaggtgagctgccgctgggcccggagcatgctgggcgtccccacctcgcagactgcacgctccaaccgccccctccacctcctctttccaggcccggcagcttctggagaaggaattcagcaaccttatctccttaggcacagacaggcggctggacgaggtgggcgcggcaacagctcagagggctctgctcccagcggctcctcgagaggctgagctgagggggcggggcctgactattaatggtcacggttggaggcggggccaggagaggggcggggttaaaggagaggtgagacccggagaggggtggagtcaaaggaaggggcggagtcagacaaggcaggagtccctcaccggctgtccggctcctatacctaggacagcgccaagtctttcagccgctccccatcctggcggaagatgttccgggagaaggacctccgaggcgtaactcccgactcagctgagatgttgccccccaactttcgttcggctgcagcgggagccctgggctctccggggctccctctccgcaagctgcagccagaaggtggggggctcccaaatgcgacagcccttcctcgcttccctagggtggggcatggaccacctcagtagtccgggttctggaatggc

SEQ ID NO: 294219 - DNA, 222 bp, Homo sapiens; identical to SEQ ID NO: 240705
  chr19:49654220-49654442
  hyper

SEQ ID NO: 294220 - DNA, 145 bp, Homo sapiens; identical to SEQ ID NO: 240706
  chr19:49654472-49654617
  hyper

SEQ ID NO: 294221 - DNA, 164 bp, Homo sapiens; identical to SEQ ID NO: 240707
  chr19:49655173-49655337
  hyper

SEQ ID NO: 294222 - DNA, 446 bp, Homo sapiens; identical to SEQ ID NO: 205528
  chr19:49660928-49661374
  hyper

SEQ ID NO: 294223 - DNA, 34 bp, Homo sapiens; identical to SEQ ID NO: 205529
  chr19:49925606-49925640
  hyper

SEQ ID NO: 294224 - DNA, 108 bp, Homo sapiens; identical to SEQ ID NO: 205530
  chr19:49926734-49926842
  hyper

SEQ ID NO: 294225 - DNA, 232 bp, Homo sapiens; identical to SEQ ID NO: 240711
  chr19:49929636-49929868
  hyper

SEQ ID NO: 294226 - DNA, 192 bp, Homo sapiens; identical to SEQ ID NO: 240714
  chr19:49954990-49955182
  hyper

SEQ ID NO: 294227 - DNA, 108 bp, Homo sapiens; identical to SEQ ID NO: 205532
  chr19:49956760-49956868
  hyper

SEQ ID NO: 294228 - DNA, 82 bp, Homo sapiens; identical to SEQ ID NO: 240716
  chr19:49999403-49999485
  hyper

SEQ ID NO: 294229 - DNA, 273 bp, Homo sapiens; identical to SEQ ID NO: 225987
  chr19:50058957-50059230
  hyper

SEQ ID NO: 294230 - DNA, 96 bp, Homo sapiens; identical to SEQ ID NO: 240719
  chr19:50083836-50083932
  hyper

SEQ ID NO: 294231 - DNA, 83 bp, Homo sapiens; identical to SEQ ID NO: 240720
  chr19:50143412-50143495
  hyper

SEQ ID NO: 294232 - DNA, 104 bp, Homo sapiens; identical to SEQ ID NO: 240721
  chr19:50169139-50169243
  hyper

SEQ ID NO: 294233 - DNA, 302 bp, Homo sapiens
  chr19:50312465-50312767
  hyper
cacagctccaggctcggcagcagagtcagggtcaggagccggtgtgggacctgaagcagggcacaggctggggctcatcgcggcccggcccctttccatcgcagatcccgcctcctcgcgactcggcccccaggtcacatccctccgtcggtgcccgccacccactcaccgtggggctcccgtgcggcaggtacaccgggtagtcgcgagcggtctgcggcggcagggaccccaccagccaggggagcagcacggcctcgggcgtccccagccgccaccaaccctctgttgctgccaccacc

SEQ ID NO: 294234 - DNA, 347 bp, Homo sapiens
  chr19:50316721-50317068
  hyper
atcctgtaggctttgatgatttacattctaaacggaaaaaacagctgtgcccggatcaaagattgcgatggtcccaaagcattgcctagcaaccacattccctgtaggtttccagtatatagtagtaaacaatgtgccctactcaaagatggcgaccgtggcggggcgttgccaagcaaccaccattcagcctgatatccattccaaggctgtaaacagctgtgccctgctcaaagatggcggcacgtcgaagtccgagcaccctccttggggcgaaatcgagaaaaacaccatctcccctacaaccttcgagggtggttgagtccagcgatcgttgcctagtaacc

SEQ ID NO: 294235 - DNA, 194 bp, Homo sapiens; identical to SEQ ID NO: 205534
  chr19:50321281-50321475
  hyper

SEQ ID NO: 294236 - DNA, 186 bp, Homo sapiens
  chr19:50353784-50353970
  hyper
gcagagcgaatgagcgaatccacggaaggccggggagcgacgtgagtggcgagaagcttggagtcgccagggacggcgggcggagcctgggcgccggggctaatgggcggagcctccagggacagctggccccgcccaggccgcgcggggcccgctgggagttggagtcccttgcccacctcgcca

SEQ ID NO: 294237 - DNA, 213 bp, Homo sapiens; identical to SEQ ID NO: 240725
  chr19:50380586-50380799
  hyper

SEQ ID NO: 294238 - DNA, 251 bp, Homo sapiens; identical to SEQ ID NO: 240727
  chr19:50529274-50529525
  hyper

SEQ ID NO: 294239 - DNA, 232 bp, Homo sapiens
  chr19:50553765-50553997
  hyper
tccttgtgctgactcggctcctggccacgccctaaccccacccccgctgcctctaaacccgtccccacccctgcagcctcacaggctgccgtcagattctcaagcccctattcctctcggtggcctaaatccccaactgctcggggccacttttcaggccaaaatgggcccaaaatggggagggcaagtgatgaatgtcactagacagtggggccctcaaggacctggcaaa

SEQ ID NO: 294240 - DNA, 182 bp, Homo sapiens
  chr19:50651066-50651248
  hyper
gaatctgggttgcagctctgccagcctgagagaaatcgcggagtctccccgactctcagtttcttcaactgcaaagtgaggaaaggtaggttccccttcctagggatcgcagcagtcccacgctccgccggactcctggcaaacagcagacgcccaattcctgcgcgccgagtcgtctgagc

SEQ ID NO: 294241 - DNA, 190 bp, Homo sapiens
  chr19:50651358-50651548
  hyper
tgctagcctgtctggcccggcctgcacccacctgctccggtcgggtccgcgagttccgtgcgtccaggcggattccgctggacagccaggccttcccttcctccgccgggtcccggaacgcgcctgagcagtccctgtctcggaactgtaagtcccggtaccttaaacgcggcatcgcagctggactaca

SEQ ID NO: 294242 - DNA, 346 bp, Homo sapiens
  chr19:50706518-50706864
  hyper
ggtcggcccccccacgccggcccttacaaaggcccccattcatgccttgcgcacaaagcggcccattcaccctggccccttgggcctcccgcccccggccgccccccgcgcctcgctattggtggcgccccgtgcccatcaggcctcggcttccacccccgaccgcgccgcctagctccgcgcccgggccgcgttcttttcccacggctggcacccttcgacaacttctgattggcccagcccgccagccgctctttttgattggcggctcccgtcccccaggggcggggccgtagcttgccgcagcgggcgccgattggcctctgctgctctcttgggggcgggg

SEQ ID NO: 294243 - DNA, 188 bp, Homo sapiens
  chr19:50706894-50707082
  hyper
ccaggccgaagcctcgggacggccctggaagccggtgagtgcccggggccggcagccctccgggggcggcggaacgggactgagccaggggaagctggagcctgggggctgcgatcggggcccgggagcccgggcaggcggccggggacggcggggaggtgacgcggacactcaccttgggcgcgcag

SEQ ID NO: 294244 - DNA, 93 bp, Homo sapiens; identical to SEQ ID NO: 132016
  chr19:50707093-50707186
  hyper

SEQ ID NO: 294245 - DNA, 380 bp, Homo sapiens; identical to SEQ ID NO: 205537
  chr19:50708476-50708856
  hyper

SEQ ID NO: 294246 - DNA, 380 bp, Homo sapiens
  chr19:50816051-50816431
  hyper
aagaagttgaaccctttggcaatataatcagtccccaccccgtaccctggtgtctggagcccctagccctttgccccgcccccaccaaaacccgccccacccctcacccctgcttcaccagggtttagggtccgagggaaggatgggggggactcaaaatgccccttgcataggaatcgttgcatcgagaatcgtgctcagtgacgccccccatccaccctcgggtggggggttcctgaggccgtgggagcagagggagggaggtggctaattccgtgggaccccggctccaaaaggggggtccgctaaagagtctgggaccggtgtggtctctgggcttgggggaggtagcgcatccttgagccaggataggaggtggg

SEQ ID NO: 294247 - DNA, 31 bp, Homo sapiens; identical to SEQ ID NO: 240733
  chr19:50817682-50817713
  hyper

SEQ ID NO: 294248 - DNA, 224 bp, Homo sapiens
  chr19:50817943-50818167
  hyper
gggggtgaggggcccgggggtgtctgctggcatcgtcatctcggttgcatattattaatgactttttgattttttttaaaaaaacccttttccccaccccccacccccagctcctttgaccttcttcccggtcacccccgagtccccccacaggggggaggggagcgctaaaggatggagggcagggtcgggggagcgcggcgggcggcccggggagagccagg

SEQ ID NO: 294249 - DNA, 42 bp, Homo sapiens
  chr19:50818204-50818246
  hyper
ctcaggcccgcgatgctgctgaggctgcgggatttctcgtaa

SEQ ID NO: 294250 - DNA, 31 bp, Homo sapiens
  chr19:50819158-50819189
  hyper
ggcttttccaggcaacgctaagggagctgtc

SEQ ID NO: 294251 - DNA, 94 bp, Homo sapiens; identical to SEQ ID NO: 240736
  chr19:50819426-50819520
  hyper

SEQ ID NO: 294252 - DNA, 351 bp, Homo sapiens
  chr19:50828891-50829242
  hyper
ggccttcgcagagcgcatgcctagttccccgccccctccgagccgggcgcgcggcgctagctgcggcaccgcagtgggggcgggccagccgggccggggggcggggcgcacggcggccagtaccgcggacagctcccccgccgcagtgcgcagccgcagcggctaggggccgtcttaaccccttccgggccggagcctattcaacgcgcagccgcagtgttgctgctttccggcgggaggccaagggccaagagtctaattaactccttccctcccagggcacagggaaaggtgggcacccgccgcagtgcgcagctgcagaggctggacggcgtcgggctggtttaaccc

SEQ ID NO: 294253 - DNA, 60 bp, Homo sapiens
  chr19:50832039-50832099
  hyper
ctcatggcgcacgccgcccacgttgatcacgatcttgccgctgtcgccaccgccgccgcc

SEQ ID NO: 294254 - DNA, 413 bp, Homo sapiens; identical to SEQ ID NO: 205540
  chr19:50832538-50832951
  hyper

SEQ ID NO: 294255 - DNA, 191 bp, Homo sapiens
  chr19:50833042-50833233
  hyper
cttagactcggtgagaaggtgttgaaacttgagagagtcctggaaacccgagagggtctggataggcctaagggagggagcggggctgaggctccaaggcgggcctggttagtcggggctgggcccggagaatgagtgtccggatggatgagtggtactgaggaaggtgagtggggtcgacaaatagaaaa

SEQ ID NO: 294256 - DNA, 35 bp, Homo sapiens
  chr19:50833793-50833828
  hyper
ggtcacagggtctcaaagggcgaggcgagaacttc

SEQ ID NO: 294257 - DNA, 467 bp, Homo sapiens
  chr19:50833970-50834437
  hyper
aatataggcaggaccgataaaaaatggggtgggctaggagtctcagaggtcgggttctggggaagaatggagtgaggggcggggccagaaaaaggggaccgcctcggagcgggccgtccccgccccctgggcggtcgtaggctccgagaggcagagcgcaggctcagggggctggggcggggccagcggctgcggctggggctgcggagggaggaggcggcgcctgcgggagcgaagggggcgggtcagggggctgcgggcgccctcgggcagcacagtttctggcccgccgcttcctgctgcaggtgcggcggctgattcgtatcgcctcccaaccccatcccacccccgctcccgtttctgggtttcttggcgtctctttttctcccttcttgagtatttgtgccgccgtctctgttcccacccctctgagtctccgacccctcgtttgtaaatctgccctcctg

SEQ ID NO: 294258 - DNA, 92 bp, Homo sapiens; identical to SEQ ID NO: 205541
  chr19:50836199-50836291
  hyper

SEQ ID NO: 294259 - DNA, 588 bp, Homo sapiens; identical to SEQ ID NO: 205542
  chr19:50836451-50837039
  hyper

SEQ ID NO: 294260 - DNA, 137 bp, Homo sapiens; identical to SEQ ID NO: 205543
  chr19:50837389-50837526
  hyper

SEQ ID NO: 294261 - DNA, 240 bp, Homo sapiens; identical to SEQ ID NO: 205544
  chr19:50871938-50872178
  hyper

SEQ ID NO: 294262 - DNA, 212 bp, Homo sapiens; identical to SEQ ID NO: 240742
  chr19:50887230-50887442
  hyper

SEQ ID NO: 294263 - DNA, 154 bp, Homo sapiens; identical to SEQ ID NO: 225995
  chr19:50979534-50979688
  hyper

SEQ ID NO: 294264 - DNA, 83 bp, Homo sapiens; identical to SEQ ID NO: 225997
  chr19:51111319-51111402
  hyper

SEQ ID NO: 294265 - DNA, 32 bp, Homo sapiens; identical to SEQ ID NO: 240743
  chr19:51142309-51142341
  hyper

SEQ ID NO: 294266 - DNA, 111 bp, Homo sapiens
  chr19:51143111-51143222
  hyper
gccggctcggctcctcccctcgccactgtcgcaggtccgcggctcctccccctgcaccccctccttcccccactccgaacccgcggcaagaaagccgaaatcacttggcct

SEQ ID NO: 294267 - DNA, 230 bp, Homo sapiens
  chr19:51161455-51161685
  hyper
gtggttggttttagagcgctgagggacgtggccaagagtgaaagcatgaatgggcggggcccggggcgactagataagagcgtggttggtgtaagggtgctgaggggcgggccccggagccactagataagagcgtggttggtgtaagggtgttgtgaggcggggcgacagtggagtgacagcttgggggggcggggccaggagggactagataagagcgagattggtgc

SEQ ID NO: 294268 - DNA, 118 bp, Homo sapiens
  chr19:51170581-51170699
  hyper
cagcaggggcagcccgttctcttcgctggccctcggggaggtcggggaggggggcacggaccggcgtgggctgggcggcgggacccccggcccgtcctccgaggggggaccccttccg

SEQ ID NO: 294269 - DNA, 49 bp, Homo sapiens
  chr19:51171779-51171828
  hyper
gcggccacggcgggcggcggctgcggggaggccggggacgtgggcgacg

SEQ ID NO: 294270 - DNA, 42 bp, Homo sapiens; identical to SEQ ID NO: 132051
  chr19:51171949-51171991
  hyper

SEQ ID NO: 294271 - DNA, 33 bp, Homo sapiens
  chr19:51198091-51198124
  hyper
gagggtcgccaccgcgggccggggcctgccggc

SEQ ID NO: 294272 - DNA, 48 bp, Homo sapiens
  chr19:51198271-51198319
  hyper
cgccgccgaccgcagacaaagccatcgccgccgcggccccagccccgg

SEQ ID NO: 294273 - DNA, 86 bp, Homo sapiens
  chr19:51199194-51199280
  hyper
gggaggctggggttgggccctggctgccgggcgcacggcacagcacaggccaggccagcgcagacagggtccgggaagagcgggga

SEQ ID NO: 294274 - DNA, 31 bp, Homo sapiens; identical to SEQ ID NO: 240750
  chr19:51221589-51221620
  hyper

SEQ ID NO: 294275 - DNA, 94 bp, Homo sapiens; identical to SEQ ID NO: 205545
  chr19:51228809-51228903
  hyper

SEQ ID NO: 294276 - DNA, 42 bp, Homo sapiens; identical to SEQ ID NO: 240754
  chr19:51307923-51307965
  hyper

SEQ ID NO: 294277 - DNA, 216 bp, Homo sapiens; identical to SEQ ID NO: 205546
  chr19:51324264-51324480
  hyper

SEQ ID NO: 294278 - DNA, 187 bp, Homo sapiens; identical to SEQ ID NO: 205547
  chr19:51412646-51412833
  hyper

SEQ ID NO: 294279 - DNA, 103 bp, Homo sapiens; identical to SEQ ID NO: 205548
  chr19:51415995-51416098
  hyper

SEQ ID NO: 294280 - DNA, 256 bp, Homo sapiens; identical to SEQ ID NO: 205549
  chr19:51416099-51416355
  hyper

SEQ ID NO: 294281 - DNA, 59 bp, Homo sapiens
  chr19:51520079-51520138
  hyper
ttcctgaccacaccggaccctggcttctatccgttgcaggcaaccacctcctcctagag

SEQ ID NO: 294282 - DNA, 248 bp, Homo sapiens
  chr19:51520492-51520740
  hyper
aggcttcggggtccaagcgcgtgtcgttttgggggagcagcgccgcctctgcggctggagaaagaaaggggacggaatcaaagcacggagggcagggtctgggtttggggttggagctgggctgtggcactggactgcgttcggggacgggggacgcagccagaacgcgagggtggtagggaaatattgggggtttcgcgtgcaccgaagggaatgggaggagaagaagcgcgtgaaagtggaaggaa

SEQ ID NO: 294283 - DNA, 241 bp, Homo sapiens; identical to SEQ ID NO: 205551
  chr19:51522935-51523176
  hyper

SEQ ID NO: 294284 - DNA, 117 bp, Homo sapiens; identical to SEQ ID NO: 205552
  chr19:51527588-51527705
  hyper

SEQ ID NO: 294285 - DNA, 32 bp, Homo sapiens
  chr19:51568030-51568062
  hyper
gggaggggctgctgcgagggtattttgggagg

SEQ ID NO: 294286 - DNA, 216 bp, Homo sapiens; identical to SEQ ID NO: 205553
  chr19:51842632-51842848
  hyper

SEQ ID NO: 294287 - DNA, 419 bp, Homo sapiens; identical to SEQ ID NO: 205554
  chr19:51869575-51869994
  hyper

SEQ ID NO: 294288 - DNA, 58 bp, Homo sapiens; identical to SEQ ID NO: 240763
  chr19:51870568-51870626
  hyper

SEQ ID NO: 294289 - DNA, 164 bp, Homo sapiens; identical to SEQ ID NO: 240764
  chr19:51897346-51897510
  hyper

SEQ ID NO: 294290 - DNA, 102 bp, Homo sapiens; identical to SEQ ID NO: 205555
  chr19:51925272-51925374
  hyper

SEQ ID NO: 294291 - DNA, 218 bp, Homo sapiens
  chr19:52074533-52074751
  hyper
gcgaccatttagcttctgttgttaagtggatctaagcctatgtcgcttactggacgctgaagtgattgggaatattagcagtgggggttctgtagggtcaggaaggggcggctggctttgggggagtgatgaggggcttgttgggggtgggggtgcgtgataaagggatttctcggctgaagacgaggctgtgaggtgagtgacgggcttgttttggc

SEQ ID NO: 294292 - DNA, 251 bp, Homo sapiens; identical to SEQ ID NO: 240770
  chr19:52390958-52391209
  hyper

SEQ ID NO: 294293 - DNA, 384 bp, Homo sapiens
  chr19:52407644-52408028
  hyper
agccggcaagggtgggcggttatagtttcacaactcaaccccagccaggggcctgggcttgtaaaataccagattttacaagcctctgagccccacatgcctgggcctccccgaaacacttaacacacatccccgattcaccccaaaacctacaccacacaccctcgtacgctgcccagcaccccggcttcatcaccgactttaaactgcagcatttggagtgataataatggcgtcggtgataaagccggcgtgctgggcagcgtccccctagagttctccatccagtgatccagaggcctactaacagagtgaccctcagagaccccaaactctgacgccgagtctcagtcgctgaactcgacagacctttaacgcccgacc

SEQ ID NO: 294294 - DNA, 144 bp, Homo sapiens
  chr19:52408242-52408386
  hyper
gcggcggacgagggcgcgagtcaattctgccgcgctaggacgatgggacatgggcttctcttcgaggaggtaacatgtccgcgccctgagccacggctctctgggcgcggccatcttggtagatctgccgtacagaagggaaac

SEQ ID NO: 294295 - DNA, 258 bp, Homo sapiens
  chr19:52430305-52430563
  hyper
ctctgtggagaaagcgttttcacttgtacggacacctaagtgttaagatggccgcgcccattgtgtcattcccgtcattctttgtgcaaagcggatgacttttctccccagcccgctaaggtgcacgtagccataccatgtttgtcttggctaagctcgaccctctgaaaataaatgaaacttgggcgcaggatttaggtgccaaaatatggagttcttcaccgtcccgcgctatccctgaatacttgggcagaaaag

SEQ ID NO: 294296 - DNA, 79 bp, Homo sapiens
  chr19:52430646-52430725
  hyper
ccagtcgtccgtgctccgtacacctgcaacttcagaccttcctcggccgccgtaggccggcttggaggctgggggaggg

SEQ ID NO: 294297 - DNA, 97 bp, Homo sapiens
  chr19:52489406-52489503
  hyper
tgaacttgaccccccgatctgtaaatagccaccccaaggatcagaagagtagatatatggtttcgaactaatgctgggggctgtgtcgccttttgcc

SEQ ID NO: 294298 - DNA, 177 bp, Homo sapiens
  chr19:52489533-52489710
  hyper
gacccagggctccaaagtctcgaaagcttcagccctcacaagcctttgtaccacagacactggccccatgcctcttactcatccgaaccacggaccagacactctacagcgatggacatcctcccagactccaacatcactgagttccaaattaaatcctgaacccgaagcagacgc

SEQ ID NO: 294299 - DNA, 367 bp, Homo sapiens
  chr19:52489782-52490149
  hyper
cgttgatcactacagacccttagtcactgtactcacaccaaaggcacgcggaccacagacagggggatcacagactcccaccaggtacctcccaaatgcctataccccggcgctccccagtcttcctgccaaaaactatgtggtccagggtacaccacgtcctcagatctcccaaaccttccactgagacaaaacctgaactaggacaaaaaactttcagggacaaaaccacacactgacctctattttctccagatacacaagaagggcctcaacgttacacttccgtaaactgctcctacttctggagtcctcgcacgggtttatggtccacctacggcggccgaggagaacctaaaatgtttaa

SEQ ID NO: 294300 - DNA, 92 bp, Homo sapiens
  chr19:52490237-52490329
  hyper
aaaattggacgcacagaaggcagtggcaggtttttgagccaggagccagggaagaagagaagtcactgaaatcgcctcgtttcctggcactt

SEQ ID NO: 294301 - DNA, 84 bp, Homo sapiens
  chr19:52511224-52511308
  hyper
cctgcgataggaatcggacccacgctaagctcctgaaagaattccactggcgtcgccaaacgctggcgccgacagataccagtc

SEQ ID NO: 294302 - DNA, 408 bp, Homo sapiens
  chr19:52511384-52511792
  hyper
tgaacttacttcccagaacttggtgggctccggcctcatctctcggcctcctcagtgcctgacggcgactatccagggtcggaggcgttcccagcgtttgcgcagatgcaagatggccgcgccctcgtcgccttggctccatgggggccgccatctttgagtatctgacgtacacaaggcaaagggcgcgttttggcgctggtgaccgggggtgaccgggggtgaccggggatggccgggaagatgaaagagcactgaaactgtcccatttcctggcacctcaacccttcataaatacgggtccatatacagaggctccagtttacacaagacaaaaatggcgtggaggtaaatccctttcagcagctgaatagaaggctaagatggccgcgacgtttacactttgta

SEQ ID NO: 294303 - DNA, 74 bp, Homo sapiens; identical to SEQ ID NO: 205557
  chr19:52531285-52531359
  hyper

SEQ ID NO: 294304 - DNA, 222 bp, Homo sapiens; identical to SEQ ID NO: 205558
  chr19:52531884-52532106
  hyper

SEQ ID NO: 294305 - DNA, 293 bp, Homo sapiens
  chr19:52551811-52552104
  hyper
cccctccaaaaggaaacacccgcccccgcctcccccaacccccgcgctacctccaccatatagcgccaccaacaacgcagacgccctcagaaagctccctcccaccacgtttccacgccctgacccacacactgacctgactctccttggaatcgccgcgacctcttaaaagctgaacttacttccctaaacttcttccacttctgggcccctcgcccaactccctccccctctaaacctccagagacggtcagccgcgtttccatggagagcggaatgcggccttccggctt

SEQ ID NO: 294306 - DNA, 486 bp, Homo sapiens; identical to SEQ ID NO: 56571
  chr19:52552233-52552719
  hyper

SEQ ID NO: 294307 - DNA, 190 bp, Homo sapiens; identical to SEQ ID NO: 240776
  chr19:52642997-52643187
  hyper

SEQ ID NO: 294308 - DNA, 114 bp, Homo sapiens; identical to SEQ ID NO: 205561
  chr19:52643387-52643501
  hyper

SEQ ID NO: 294309 - DNA, 35 bp, Homo sapiens; identical to SEQ ID NO: 226008
  chr19:52674677-52674712
  hyper

SEQ ID NO: 294310 - DNA, 47 bp, Homo sapiens; identical to SEQ ID NO: 240777
  chr19:52674935-52674982
  hyper

SEQ ID NO: 294311 - DNA, 58 bp, Homo sapiens; identical to SEQ ID NO: 240778
  chr19:52693145-52693203
  hyper

SEQ ID NO: 294312 - DNA, 160 bp, Homo sapiens; identical to SEQ ID NO: 205562
  chr19:52715132-52715292
  hyper

SEQ ID NO: 294313 - DNA, 106 bp, Homo sapiens; identical to SEQ ID NO: 205563
  chr19:52800214-52800320
  hyper

SEQ ID NO: 294314 - DNA, 313 bp, Homo sapiens
  chr19:52800380-52800693
  hyper
cccccgcccccgccccgctcggacccctccgctgcgcgcgcagtttcccacaaacccggaagcggatcgcgtggagtgaaggtcacgccgcggcgcgtgagtttccctttgtgtaaattaatctgcgcttcccaactcccccgcgcttctgtacccgggatctgaggggccacacagaccttgaaatcctcgcaccgctccctctaccccgaccaaattcaggcgtctccgtgagagtcaggcggtcgcttccctgtgtgtttaaatcgctcggcggcgggtcctgtcccccgtccttctgccacagggccat

SEQ ID NO: 294315 - DNA, 103 bp, Homo sapiens
  chr19:52800915-52801018
  hyper
gatccagaccctacctttaccctccttgatacggggccccgctactccccaggcctcctcttcccagacaccgcttctcctaaccctgcgtgtggggaggtga

SEQ ID NO: 294316 - DNA, 208 bp, Homo sapiens; identical to SEQ ID NO: 132122
  chr19:52901156-52901364
  hyper

SEQ ID NO: 294317 - DNA, 179 bp, Homo sapiens
  chr19:52956933-52957112
  hyper
ggatcttaaaatcctcccgccgttccctccatcctaggtatattaatacgtcgccaagaaattcggaggttaaaatcgcttggaggctgctggtcctttccctgagctctctgccttcgggccacgtagacgcttttcgtcccgtttacctgcttaaaaccctttactgaccactcctt

SEQ ID NO: 294318 - DNA, 39 bp, Homo sapiens
  chr19:53030696-53030735
  hyper
ctttctggcgctctcgcctccacaacctaaaaacagaga

SEQ ID NO: 294319 - DNA, 395 bp, Homo sapiens
  chr19:53030790-53031185
  hyper
cgccctctgccggttctaaagggcaaggtctcagcgcctcgcgccccgccgctacctcgcccaggccccgcccacctcctcccacctcccgcccaggcctggcttccgtcctgcgcgcggagattaacgcaaacccggaagcggatcgggtggagtgaaggtcacgtcgccatggtgagttttgctctgtgttgcattaagtctccgcttcccaggtccccgccgcttctgtccctgggacgtggggtccccacagacctggaaattctcgcccgtcttccttcgcccagagcaaattgagacagcccagtgagaggccgggtgtcgcttcctttcgggtttaaagtcgtctggaggctggtcccgtcccgggtctgtctgctatagggcaatgt

SEQ ID NO: 294320 - DNA, 79 bp, Homo sapiens
  chr19:53031215-53031294
  hyper
caaaaccttcttctgactcttccctcctcgcgctatttaaagtcttcacccacgaggtggattcttgcccggggcgcac

SEQ ID NO: 294321 - DNA, 178 bp, Homo sapiens
  chr19:53031347-53031525
  hyper
agggaggccgcgtcctctgcctggtcctgggatcttgcagaccccatccttctcccaaggcgccgtcccccctcctcccacctccctactcgtgccagagcctgcggctccccaggtctctcctccgcagtcaccgcttccattgaacccacactgggaaggacgcagggccctgtcc

SEQ ID NO: 294322 - DNA, 277 bp, Homo sapiens; identical to SEQ ID NO: 205568
  chr19:53104069-53104346
  hyper

SEQ ID NO: 294323 - DNA, 76 bp, Homo sapiens; identical to SEQ ID NO: 205569
  chr19:53105086-53105162
  hyper

SEQ ID NO: 294324 - DNA, 60 bp, Homo sapiens; identical to SEQ ID NO: 205570
  chr19:53141353-53141413
  hyper

SEQ ID NO: 294325 - DNA, 70 bp, Homo sapiens; identical to SEQ ID NO: 205571
  chr19:53193125-53193195
  hyper

SEQ ID NO: 294326 - DNA, 824 bp, Homo sapiens
  chr19:53237619-53238443
  hyper
gcatcccggaggagcgcattttccacgccctggagctccgcaggcaagaataccccgtgccgcaggacaggcccctgggacctccccagtgcaggttcaatgaaagcggtgactgcggaggggagacctggggagcagcaggccccggcatgaggaggaaggtgcggggcggggggggggggcgcgacggcgccttaggaccaggatggggtctgcaggatcccaggacctggcagaggactcggcctccccgggactggggctgcggcgcggcgctcccggggctgaggagggggaggctgggaggcgccctgggcaagaatccacatcgcgggtgaagactttaaaaagcgcggggcgcgaggagtcagaacaaggttttcagcaggaaaactacgcaacagaaagtgtatacattgacctatagcagaaagaccggggacgagaccagcctcaggacgactttaaacccaaaaggaagcgaccctcgggctctcacggggatgtctcaatttgctctgggcaaaggaagacgccggagaatttccaggtctgtggggaccccacgtcccagggacagaagccctgggaacctagttagcgcagacttaatacaacacagagcaaaactcaccgcggcgatatgacctacactccacccgatccgcttccgggtttgcgttaatctgcgcgcgcaggacaaaagccaggcctgggcgggaagtgggaggtaggcggggcctgggcgaggtaggggcggggcgcgaggcggagagaccttgccttttagaaccggcagagggcagggccggggcgggatctgc

SEQ ID NO: 294327 - DNA, 159 bp, Homo sapiens; identical to SEQ ID NO: 240792
  chr19:53360444-53360603
  hyper

SEQ ID NO: 294328 - DNA, 34 bp, Homo sapiens; identical to SEQ ID NO: 240793
  chr19:53360913-53360947
  hyper

SEQ ID NO: 294329 - DNA, 287 bp, Homo sapiens
  chr19:53400792-53401079
  hyper
tgggttgagaaagaggggccgcaatttccaggtctgtggggactcaacgtccccggtatagcagcaccacaggactgggaagcacacataaaacagagcgaaactcacgcgctgtggtgtgaccttcagtccctgccatccgcttccgggtctatgccaatcagcgcaggacagaggccaggcctgggcgggacccccgagaaggtaggcggggcctggactaggccgggatgagacgcgaagaggtgggcggggcctgaacaaggccggggcggggttgagaaaca

SEQ ID NO: 294330 - DNA, 346 bp, Homo sapiens
  chr19:53426164-53426510
  hyper
ggtgggggggagatgacgccttcggacaagggtggggtccgcaggatcccaccaccgggcagagaacgcggcctccctgggactgtggtgtcagcgctgggctccaggggccgacgagggtgaggctgggaagcgccagagcagggatccacctctcgggtgaggactttaaaaagcgcggggtgggaggagtcaacaaacggttgtgaacgggaaaactacgcgatacaaactgtatacattgccctatagcaaaaagaccgaggacagggcagcctcagggcgactttaaacccaaaaggaagtgacttccggactcctaggggaatgtctccatttgctcttg

SEQ ID NO: 294331 - DNA, 348 bp, Homo sapiens; identical to SEQ ID NO: 205573
  chr19:53445362-53445710
  hyper

SEQ ID NO: 294332 - DNA, 245 bp, Homo sapiens; identical to SEQ ID NO: 205574
  chr19:53445822-53446067
  hyper

SEQ ID NO: 294333 - DNA, 104 bp, Homo sapiens
  chr19:53446326-53446430
  hyper
gcttaaacacagcaggaatgcgggcgcgggggcggaagtctgaggtcccagctgctcaggaagcagcggcgggaggatgctgagcctgggggtccaagccagcc

SEQ ID NO: 294334 - DNA, 168 bp, Homo sapiens; identical to SEQ ID NO: 205575
  chr19:53465693-53465861
  hyper

SEQ ID NO: 294335 - DNA, 268 bp, Homo sapiens
  chr19:53466513-53466781
  hyper
ctagaatgcgaaatgcaaagccttgcctgagcgaaaggtacaatttcatgctgacggtccacagaacagaatagaaatcctctccctttcaattctccattcactggagtgggagagtccacactgtgctcagctcctgagacttccctagggccaccgtctggggtgcggagcagaggagtgtgcttaaacacagcagggatgcgggcggggtggcaggagtctggggtccccgctactcaggaagcaggggcgagaggatcgctga

SEQ ID NO: 294336 - DNA, 104 bp, Homo sapiens
  chr19:53496055-53496159
  hyper
cgagcagcagggcccggcacgaggagggagttagggggcgacggctccttaagacaagggtggggtctgcaggatcccaggaccaggcagaggatgcggcctcc

SEQ ID NO: 294337 - DNA, 37 bp, Homo sapiens; identical to SEQ ID NO: 205576
  chr19:53496405-53496442
  hyper

SEQ ID NO: 294338 - DNA, 180 bp, Homo sapiens
  chr19:53497109-53497289
  hyper
gcaaaccagaatgtgaaatgcaaagccctgcctgggcggaacgtattatttcatgctgacgaccacagaacagaatagaaatcctctccctttctattctccactcactcaagagggagagtccaccctgtgtcagcttcagagacttccctagagccaccgcctgggatgcgggatgga

SEQ ID NO: 294339 - DNA, 135 bp, Homo sapiens
  chr19:53561218-53561353
  hyper
gcacctccccaacgcgggcgcaggggaagcggtgactgcgaaggggaggcctggggagcagcagggcccggcacgaggaggagggaggtggggggcgacggcgccttaggacagggtagggtctgcaggagccta

SEQ ID NO: 294340 - DNA, 162 bp, Homo sapiens; identical to SEQ ID NO: 205579
  chr19:53561825-53561987
  hyper

SEQ ID NO: 294341 - DNA, 146 bp, Homo sapiens
  chr19:53606066-53606212
  hyper
cacaggacgggccccgggcacctccccaacgagggctcaagggaagcggtgactgcgaaggggaggcctggggagcagcagggcccggcacgaggaggagggaggtggggggcgacggcgccttaggacaggggtgggatgtgcag

SEQ ID NO: 294342 - DNA, 221 bp, Homo sapiens; identical to SEQ ID NO: 205580
  chr19:53606354-53606575
  hyper

SEQ ID NO: 294343 - DNA, 427 bp, Homo sapiens; identical to SEQ ID NO: 205581
  chr19:53606605-53607032
  hyper

SEQ ID NO: 294344 - DNA, 125 bp, Homo sapiens; identical to SEQ ID NO: 205582
  chr19:53607111-53607236
  hyper

SEQ ID NO: 294345 - DNA, 160 bp, Homo sapiens; identical to SEQ ID NO: 205583
  chr19:53635604-53635764
  hyper

SEQ ID NO: 294346 - DNA, 101 bp, Homo sapiens; identical to SEQ ID NO: 205584
  chr19:53635784-53635885
  hyper

SEQ ID NO: 294347 - DNA, 141 bp, Homo sapiens; identical to SEQ ID NO: 205585
  chr19:53636109-53636250
  hyper

SEQ ID NO: 294348 - DNA, 97 bp, Homo sapiens; identical to SEQ ID NO: 205586
  chr19:53696015-53696112
  hyper

SEQ ID NO: 294349 - DNA, 211 bp, Homo sapiens; identical to SEQ ID NO: 205587
  chr19:53700096-53700307
  hyper

SEQ ID NO: 294350 - DNA, 64 bp, Homo sapiens; identical to SEQ ID NO: 205588
  chr19:53758247-53758311
  hyper

SEQ ID NO: 294351 - DNA, 57 bp, Homo sapiens
  chr19:53811771-53811828
  hyper
ctgctctggaagcgcgggtctgcttagatgtcctaagcaacttcttgcaccaggcgc

SEQ ID NO: 294352 - DNA, 232 bp, Homo sapiens
  chr19:53836986-53837218
  hyper
cgcgcagattcgcgcaaacccggaagcggatcgcatggagtgatggtcccaccgcagcggtgagttttgctctgtgttgtgttaagtctgcgcttcccaagtccccggcgcttctgtacctgggacgtggggtccccatagacctggaaattctcacccgtgttccttcacctagagcaaatttagacgtcctcgtcagagtccaggggtcgcttccttttgggtttaaagt

SEQ ID NO: 294353 - DNA, 96 bp, Homo sapiens
  chr19:53837281-53837377
  hyper
cgtagtttccctgctcaaaacctttttctgactcctcccgacccgcactttttaaagtccttaccgcgaggcggattcccgcccttggcgcctccc

SEQ ID NO: 294354 - DNA, 102 bp, Homo sapiens
  chr19:53837432-53837534
  hyper
tgctccccaggtctccccaccgcagtcaccgcttaccctgagcccgcgttggggaggtgcccggggctgtcctatgacaccgggtgttcttgcctgccctgc

SEQ ID NO: 294355 - DNA, 288 bp, Homo sapiens
  chr19:53868340-53868628
  hyper
ggaagggagccctgcgggagggggtgttactttgtcgcccaggctggcctggacccccaggttcagcgatcctcccgccctgcttcctgagtagatgggacctcaggctcccgcgcccgcgtccgcatccttgctgtgtttatccggcaggtggtgacctcactcctcgctggcctgagcactccgtccagcatcccaggcggtggctttagggaagtctctgcagctgagcacagggtggactctccctccggagtgaatggagaatagaaagggagaggatttcta

SEQ ID NO: 294356 - DNA, 146 bp, Homo sapiens
  chr19:53869408-53869554
  hyper
ctctgcctgtcctgggatcctacaaaccccacccttgtcttaaggcgccgtcgccccccacgtccctcctcatgccgggccctgctgctccccaggtctcccatccgcagtcacagcttgccctgagcctgcgttaggggaggtgc

SEQ ID NO: 294357 - DNA, 127 bp, Homo sapiens
  chr19:53934757-53934884
  hyper
tgtgtttatccagcaggtcgcccctggctggcctgagcattccgtcccgcatcccagggggaggccctagggaagtctctgcagctgagcacggggtggactctccctcctgagtgagtggagaata

SEQ ID NO: 294358 - DNA, 104 bp, Homo sapiens; identical to SEQ ID NO: 240811
  chr19:53934944-53935048
  hyper

SEQ ID NO: 294359 - DNA, 272 bp, Homo sapiens
  chr19:53935304-53935576
  hyper
taagtctgctcttccaggttcctggcgcttctgtacctgggacttgggatccccacaaacctggaaattctcagccgtcttccttcactcagagcaaattgagacgacctcgtgagaggccgtgggtcggttccttttgggtttaaggtccccctgaggctggtcccgtcccgggtgtttctgctacagggcaatgtatacactttctaacctgtagttttcctgctgtaaacctttttctgactcctcccgccccgcgctttttaaagtcc

SEQ ID NO: 294360 - DNA, 113 bp, Homo sapiens; identical to SEQ ID NO: 205589
  chr19:53970643-53970756
  hyper

SEQ ID NO: 294361 - DNA, 59 bp, Homo sapiens; identical to SEQ ID NO: 205590
  chr19:54024884-54024943
  hyper

SEQ ID NO: 294362 - DNA, 80 bp, Homo sapiens; identical to SEQ ID NO: 205591
  chr19:54206968-54207048
  hyper

SEQ ID NO: 294363 - DNA, 367 bp, Homo sapiens
  chr19:54371622-54371989
  hyper
gctggaatctggtacgtggaggtcctttaggaggggaagcgcttagggttaggtgtcctgggtttgggaatgagaatggaaggaattcagaattactgacccctccccatccaggggacagacagaatcggaactttgggctcctgaaaggccgagggaggggggtgttaagatccagccccgtgcttccgaagtgcagaaggagctgggaaaggaggagaagacagggctgcgtcccgcacctctgggtgccgagagccgaagctggggttccggggcccgattctcagcgtgagcgatgggtgtggcgtctggagtggacgagggaggacactgaggggctgggtgtggcccggagagtcgggtg

SEQ ID NO: 294364 - DNA, 277 bp, Homo sapiens
  chr19:54372055-54372332
  hyper
tgatctcgggcgatggctggaggccctaagggcggggtggacccctcccctcccctcccctcggcgcgcccccctcccctgcgcgcccccctccgcggctagcccaccttccgcgggggacagaatgagtgacgccctcgctcgtcctcctcccctgcttgggacggggcagtagcccgccttctagagcacgggacgctgggccagtcccgatttccttctccttcgagggtcctggaggggcgtgggggcaggcagtgtctggctccgggtggag

SEQ ID NO: 294365 - DNA, 224 bp, Homo sapiens
  chr19:54372400-54372624
  hyper
ggcctgacgccagcaccgcgtgcagtttccggcctggagcctgagcccctcagaggcccgggtccctgcccactccggtcttagagatgctcttgggggggctctcagcccatgtttatagggatccagaaatgcaggcctccaaccctgagagtcggggtccccaccccccggaaatccgggagagggcgggcagccccggaggcgggcgggggtccgggcac

SEQ ID NO: 294366 - DNA, 281 bp, Homo sapiens
  chr19:54372682-54372963
  hyper
cgcggagacaccggctctggctgggccgcccgcctccacagccgccgcccagggttctcccgccactgccgcccgcacccccgcccccgcggggttaagatcacacacgcgcccacgccggcccgcggggcgtgcactttcgctgggttccgtccgccgcagcccaaacagttaactgaacggggaggggagggggcggggcttacccggggtcaccgccagggccctgctgggttccacgccacgttcctgtctccgcagggcgttcgatccctagaggg

SEQ ID NO: 294367 - DNA, 325 bp, Homo sapiens
  chr19:54382389-54382714
  hyper
tacgttggttaactcgggaaagaactcaaggacactggactagaacgtggtgggattcctaggtcggtttcggggccatccccgccgcctatccttcgccctaggtcacctggaggtggctggaaggccagtggactccacatttagggagagtggttacaagaggactcggattcccccaccttcccttcggctttgggaatcccaggaaacccgccccgaacccctgaaaagtcccagagaaggtaagctgggcgtccagagtccctcccaggcgccgccgcagcgtcccgcccagcctcgcggggcacgccgggaggcggag

SEQ ID NO: 294368 - DNA, 194 bp, Homo sapiens
  chr19:54382804-54382998
  hyper
ttgcccctggcaacagagagggtctcccgggagcggggactgggaagcgctcccgagccggggaggcgcagagcccgaccagagagaggcggggacgcgggtagagcgaccaagaggtgtggaggccggaagagactgaccgcgccggcccttggagagacccctttcctgagagggggcgcacagagaggatg

SEQ ID NO: 294369 - DNA, 600 bp, Homo sapiens; identical to SEQ ID NO: 226022
  chr19:54385476-54386076
  hyper

SEQ ID NO: 294370 - DNA, 88 bp, Homo sapiens
  chr19:54412560-54412648
  hyper
ctcccggctccgtccgccgagtgaggccgcggccgcggggggtggggggtgggaggccgggagggggccgggacgccgggctccgggg

SEQ ID NO: 294371 - DNA, 203 bp, Homo sapiens
  chr19:54445745-54445948
  hyper
acctctccttttcattggtccctctcactcccaaatgactcctccccttcgttggcccgcccctttcctctggcccctcctctccaagaaaattagctcctccctcgttctccacctgctctgagctgggagcagccagaggcggtgcaagcgcccagctccccagagctccccaacctcggacctcaccgcaggggcgctgg

SEQ ID NO: 294372 - DNA, 144 bp, Homo sapiens; identical to SEQ ID NO: 205597
  chr19:54461001-54461145
  hyper

SEQ ID NO: 294373 - DNA, 39 bp, Homo sapiens
  chr19:54461175-54461214
  hyper
atccgtgaaatttggacccaagaccgaactttcagactc

SEQ ID NO: 294374 - DNA, 40 bp, Homo sapiens
  chr19:54466614-54466654
  hyper
ctcggagaagaaggaccccggcggcctcacgcactcgggc

SEQ ID NO: 294375 - DNA, 138 bp, Homo sapiens
  chr19:54486197-54486335
  hyper
ccgtgagcgcgctggagactgctgggcccgccccacgcccaccctccccgcccccctccccctccgaagcagggaccccgagggagggggcaggggagggagggggccgctgtgagggagcgtcgtgttttatttttt

SEQ ID NO: 294376 - DNA, 40 bp, Homo sapiens; identical to SEQ ID NO: 205599
  chr19:55598024-55598064
  hyper

SEQ ID NO: 294377 - DNA, 581 bp, Homo sapiens; identical to SEQ ID NO: 240828
  chr19:55677500-55678081
  hyper

SEQ ID NO: 294378 - DNA, 33 bp, Homo sapiens
  chr19:55690197-55690230
  hyper
ccaggatgacgacccgggatcccagccggattt

SEQ ID NO: 294379 - DNA, 196 bp, Homo sapiens
  chr19:55691158-55691354
  hyper
accgcctcggtctccacgctgcctcttgaccccacataggcgtcttccctgtgtctgcctccccaacccgcctgtctctcttccctatcgcctggcctctgtctccagggtctctccctctcccctccgcctgcgccccactccccgccctcggctctttgtcttctccatacctgtctcgcgtccccagatccct

SEQ ID NO: 294380 - DNA, 96 bp, Homo sapiens; identical to SEQ ID NO: 205601
  chr19:55691680-55691776
  hyper

SEQ ID NO: 294381 - DNA, 676 bp, Homo sapiens; identical to SEQ ID NO: 240832
  chr19:55727966-55728642
  hyper

SEQ ID NO: 294382 - DNA, 189 bp, Homo sapiens; identical to SEQ ID NO: 240833
  chr19:55770718-55770907
  hyper

SEQ ID NO: 294383 - DNA, 249 bp, Homo sapiens; identical to SEQ ID NO: 240834
  chr19:55851026-55851275
  hyper

SEQ ID NO: 294384 - DNA, 352 bp, Homo sapiens; identical to SEQ ID NO: 240835
  chr19:55864914-55865266
  hyper

SEQ ID NO: 294385 - DNA, 413 bp, Homo sapiens
  chr19:55866046-55866459
  hyper
ctgtgggatggtcccggggtgccgctcgcttctgagtccgcggggtgcggtcccacccgggtcaggagaaacgcaccccgcggccggattggctaggacgcccgagccccagccaatgggagccgtcgtgcaccgcggggctggtaggggcgcccccaccccaccccttgctcccccgacgccccctcgggggcctgcgcgtgcacacaggcaccgaggtgcgactcgctgagtctcaggctcaagctttaatctctgcgaagttgggcggctccacgggctcgcccccgcccccccccgccccccaatatataaaggcatatccatagttctggtatctaccagagggggcaaatccccccaagcggctttcaacattccgcttcctacagtcggtgcgcacagaaccctcg

SEQ ID NO: 294386 - DNA, 204 bp, Homo sapiens; identical to SEQ ID NO: 240837
  chr19:55919626-55919830
  hyper

SEQ ID NO: 294387 - DNA, 82 bp, Homo sapiens
  chr19:55951859-55951941
  hyper
gtagggggtgagggcgggtcctgggcgatgggggtggagccgccatggagggcggggctacatgatgaaggggcgtggccag

SEQ ID NO: 294388 - DNA, 81 bp, Homo sapiens
  chr19:55951980-55952061
  hyper
ggttgggggtcttcacggtgttgtagaggttcttgggcgtcctggggggcatgctgtcgggaccgccgatccccggggtca

SEQ ID NO: 294389 - DNA, 146 bp, Homo sapiens
  chr19:55952964-55953110
  hyper
aatccagcgccctctctctcaacactttccgctgattttcttcacagcagtcatctaaaattacactgcacatgcttacggactgggccactgatagttaatgagcccttaccgtgtgccaggaccctgcacgaatcaactcagtt

SEQ ID NO: 294390 - DNA, 181 bp, Homo sapiens
  chr19:55953358-55953539
  hyper
ccctgcatcactccgcaacagccgggccggctctggcgcgactttctcagcccctgcccaccttcagctacgccggcggccgccacctgggtctctgaccaccacgccctatccctgcagcccctcctcctcggatggctccacctcccttgctgggccccgccccaggctcgcagtcctc

SEQ ID NO: 294391 - DNA, 256 bp, Homo sapiens
  chr19:55962684-55962940
  hyper
gcgttcaagaggaggcgggcccgggcgggtggggaaagcccagagggaaggggcgggctcttgctggagggcgcggggaccccagttccgggcgccaggggcggcggggcggggagaccctgggggctgcacgggggcgccgtgcctcgcgggccgcggggaaggcagggaccgagcgagggaggaggaccctcccccgacccgcagcccaggcggcggccggtcccggcgcccccgcccagatccctgcgccgcc

SEQ ID NO: 294392 - DNA, 63 bp, Homo sapiens
  chr19:55963044-55963107
  hyper
cgggggtctcagccctcgtctgtcgctgcgggtctcctcgcatctcggcgtctctctccgcgt

SEQ ID NO: 294393 - DNA, 36 bp, Homo sapiens
  chr19:55963296-55963332
  hyper
tgagtgtctgtgtctccactcgcccccgacccggcc

SEQ ID NO: 294394 - DNA, 38 bp, Homo sapiens; identical to SEQ ID NO: 240844
  chr19:55987549-55987587
  hyper

SEQ ID NO: 294395 - DNA, 37 bp, Homo sapiens
  chr19:56015147-56015184
  hyper
cccgcaggagagtctcgccgcaagcgtcctttcccgc

SEQ ID NO: 294396 - DNA, 110 bp, Homo sapiens
  chr19:56015237-56015347
  hyper
tggagggacgggatggggcaggcgttcatctgcctcgcacctcgtgacgtcacaggcgcgctgcgcctcctgattggccagccggcgcatcgcccgcagtaataatagct

SEQ ID NO: 294397 - DNA, 67 bp, Homo sapiens; identical to SEQ ID NO: 205605
  chr19:56098517-56098584
  hyper

SEQ ID NO: 294398 - DNA, 276 bp, Homo sapiens; identical to SEQ ID NO: 240847
  chr19:56111238-56111514
  hyper

SEQ ID NO: 294399 - DNA, 175 bp, Homo sapiens
  chr19:56112771-56112946
  hyper
atggcatgtctgggcaagtacgtagaactatgtgtcccattttgcaaaagtcttgattaaggcttagagaagcgaacaccttgcccaaggccacgcagagagtaaagatttgaacgaatgatgtcttgactccagggcccaggctcttaacatcgcagatatgtttcctcatcca

SEQ ID NO: 294400 - DNA, 413 bp, Homo sapiens; identical to SEQ ID NO: 240848
  chr19:56151956-56152369
  hyper

SEQ ID NO: 294401 - DNA, 245 bp, Homo sapiens
  chr19:56159669-56159914
  hyper
cctcggaccccgggcacccgcgggcgggggatggtggccgcgtttgcacccccgccctagtgcatgttcccgctggaatcgttccacgaccgctccccctcccacccgcgggacaaagggcgggggcggggggggcgcacccccacgcgtgacctttccccgtactgcgcacgcgcccagcccccaccaccgggggacggtccgcccgcccacgcgagtgcgggggaggggtgtgggggccccga

SEQ ID NO: 294402 - DNA, 80 bp, Homo sapiens
  chr19:56159950-56160030
  hyper
cctaccctgggaagttggggcagtttccccctgcacctgcctcttccttaggcctggcagtggcccgcgatgagagaggg

SEQ ID NO: 294403 - DNA, 85 bp, Homo sapiens; identical to SEQ ID NO: 240850
  chr19:56633034-56633119
  hyper

SEQ ID NO: 294404 - DNA, 32 bp, Homo sapiens; identical to SEQ ID NO: 205607
  chr19:56915935-56915967
  hyper

SEQ ID NO: 294405 - DNA, 120 bp, Homo sapiens; identical to SEQ ID NO: 205608
  chr19:56987582-56987702
  hyper

SEQ ID NO: 294406 - DNA, 172 bp, Homo sapiens; identical to SEQ ID NO: 205609
  chr19:56988112-56988284
  hyper

SEQ ID NO: 294407 - DNA, 412 bp, Homo sapiens
  chr19:57019519-57019931
  hyper
gagctgtgggagagatgggggtgtgcctgtgtgtaaaagatctgtcagagtgtgaggctccgtgagagggtgtggtttctgtgtgtgtgtgtgtgtgtgtgtgacagaccgagagtccagtgtgagaccagggtatgttcgtgtgtgacagagcgagacgggccagtgtgagagaccagtgagtgtgagagagatagggatgtgcctgcatttgaaagagagcgtgtgaagctcagtgagaggttgcgaggtgtgtgggtgtgtaagtgtgtaacagaccaggtgtccagagcgtgagaccaggatgtattcgtgtgagagagtgagacgggctggatggagtgtgagagaccagtgagtgtgagagatgggcgtgtgcctgtgtgtgaaaggccggtcggtcggtgggtga

SEQ ID NO: 294408 - DNA, 159 bp, Homo sapiens; identical to SEQ ID NO: 205610
  chr19:57049618-57049777
  hyper

SEQ ID NO: 294409 - DNA, 34 bp, Homo sapiens; identical to SEQ ID NO: 205611
  chr19:57049807-57049841
  hyper

SEQ ID NO: 294410 - DNA, 102 bp, Homo sapiens
  chr19:57050186-57050288
  hyper
ggggcggggcggggcagcggggaggggtggggaggggcggggcgcggccgggggcggggcggctccgcggcgcggcccagtggatgccgggccatgggggag

SEQ ID NO: 294411 - DNA, 35 bp, Homo sapiens
  chr19:57050428-57050463
  hyper
gctcccgggtagaggcgccccccgcacaaagcccc

SEQ ID NO: 294412 - DNA, 141 bp, Homo sapiens
  chr19:57050493-57050634
  hyper
cagccaccttggccctccctgcccggggaaggccgcgctcaaggaatggcctcgcatccaaaggccagcgaggagcggcccctacggggcctgggcacagaggtgagagtgacaggtgtttggggccgagcggacagggac

SEQ ID NO: 294413 - DNA, 46 bp, Homo sapiens; identical to SEQ ID NO: 205612
  chr19:57079253-57079299
  hyper

SEQ ID NO: 294414 - DNA, 91 bp, Homo sapiens
  chr19:57106909-57107000
  hyper
gggaagctgaggggctaaggagaggctgactggaggctgaggggctgaggagaggccggggccagggagggagaggcgtgagtgggttgga

SEQ ID NO: 294415 - DNA, 32 bp, Homo sapiens
  chr19:57149619-57149651
  hyper
gaaccccgggcggctcaggccagaatggttca

SEQ ID NO: 294416 - DNA, 72 bp, Homo sapiens; identical to SEQ ID NO: 205613
  chr19:57182840-57182912
  hyper

SEQ ID NO: 294417 - DNA, 58 bp, Homo sapiens
  chr19:57276931-57276989
  hyper
gtgtgggcgcgtgatgtgtttgaaggtgtgtttgttcgagagggtgtgtgttggggtc

SEQ ID NO: 294418 - DNA, 206 bp, Homo sapiens; identical to SEQ ID NO: 205614
  chr19:57683360-57683566
  hyper

SEQ ID NO: 294419 - DNA, 118 bp, Homo sapiens; identical to SEQ ID NO: 205615
  chr19:57683899-57684017
  hyper

SEQ ID NO: 294420 - DNA, 70 bp, Homo sapiens; identical to SEQ ID NO: 205616
  chr19:57702682-57702752
  hyper

SEQ ID NO: 294421 - DNA, 49 bp, Homo sapiens
  chr19:57703385-57703434
  hyper
cccaggtatcccctggatttgtcttcgcagtcgtcgttcgctttggtgt

SEQ ID NO: 294422 - DNA, 99 bp, Homo sapiens
  chr19:57751576-57751675
  hyper
tgtataagaggatccggaggggaaataatgcaaggtggaagtcagagtccggagcctggtccagggtctctgcactggccctgaccctggcaaatgtcc

SEQ ID NO: 294423 - DNA, 371 bp, Homo sapiens
  chr19:57751755-57752126
  hyper
ggacagaggcaggtctgagccgggctgtaggcccgctgcgacttttacaccgaggcctgccggctcaggatctgtcccctttgcaggtggtttgtagagaaaaactacattaactacaaggcattgccaggtgcgacggcgggccctggggccaatgatggtccaggacaggggcgtttcctgtgggttgcgaagcttggggcgggacttccggcatttggatgggacgtaatttgggagcgacggttccgtccacgccggctctagggagggggcggtgttccgtggccgcctccctggcggcgctggggaaatgagcaggtaggaggccgacagcgacctccgcgtctcggagcgaaccgtgagcctcc

SEQ ID NO: 294424 - DNA, 177 bp, Homo sapiens; identical to SEQ ID NO: 205618
  chr19:57791725-57791902
  hyper

SEQ ID NO: 294425 - DNA, 90 bp, Homo sapiens; identical to SEQ ID NO: 205619
  chr19:57831523-57831613
  hyper

SEQ ID NO: 294426 - DNA, 33 bp, Homo sapiens; identical to SEQ ID NO: 205620
  chr19:57832400-57832433
  hyper

SEQ ID NO: 294427 - DNA, 35 bp, Homo sapiens; identical to SEQ ID NO: 12660
  chr19:57863221-57863256
  hyper

SEQ ID NO: 294428 - DNA, 475 bp, Homo sapiens; identical to SEQ ID NO: 205622
  chr19:57874397-57874872
  hyper

SEQ ID NO: 294429 - DNA, 217 bp, Homo sapiens; identical to SEQ ID NO: 205623
  chr19:57875005-57875222
  hyper

SEQ ID NO: 294430 - DNA, 58 bp, Homo sapiens; identical to SEQ ID NO: 205624
  chr19:57875252-57875310
  hyper

SEQ ID NO: 294431 - DNA, 83 bp, Homo sapiens; identical to SEQ ID NO: 205625
  chr19:57901385-57901468
  hyper

SEQ ID NO: 294432 - DNA, 459 bp, Homo sapiens
  chr19:57988571-57989030
  hyper
aggaatcgttcattcgaagctttgggattcagagatgggggtcagcgcgcagactcgcagacgcagcacccacctgtgccgggcccatcggctcagccgccgccatcaggcctgtggactacggaagggtggcgacaagtgcaggaacctgggatcagctgtccagggcccagcccagcggctaggtcactcaggcagcgccactgtcaagcctcaggcccacctctcttcagggaagaagacactctctcacgttttcccttttctgtcacctcaggtctgacattgcgttctggaaactaaaccagtggattaatggaaaagcaaacaaaatgtccacccgaggatggtagaggaagtcccgccctgacgttggtgaggaccaacggaaacgcctatttcctgggttttcattggcccagagccgccaagtttcctgggtaatgtagttcccacggc

SEQ ID NO: 294433 - DNA, 76 bp, Homo sapiens; identical to SEQ ID NO: 205626
  chr19:57998876-57998952
  hyper

SEQ ID NO: 294434 - DNA, 32 bp, Homo sapiens; identical to SEQ ID NO: 205627
  chr19:58039267-58039299
  hyper

SEQ ID NO: 294435 - DNA, 54 bp, Homo sapiens; identical to SEQ ID NO: 205628
  chr19:58070515-58070569
  hyper

SEQ ID NO: 294436 - DNA, 97 bp, Homo sapiens; identical to SEQ ID NO: 240879
  chr19:58090383-58090480
  hyper

SEQ ID NO: 294437 - DNA, 37 bp, Homo sapiens; identical to SEQ ID NO: 205629
  chr19:58094924-58094961
  hyper

SEQ ID NO: 294438 - DNA, 39 bp, Homo sapiens; identical to SEQ ID NO: 205630
  chr19:58111073-58111112
  hyper

SEQ ID NO: 294439 - DNA, 50 bp, Homo sapiens; identical to SEQ ID NO: 205631
  chr19:58125365-58125415
  hyper

SEQ ID NO: 294440 - DNA, 189 bp, Homo sapiens; identical to SEQ ID NO: 205632
  chr19:58144181-58144370
  hyper

SEQ ID NO: 294441 - DNA, 209 bp, Homo sapiens; identical to SEQ ID NO: 205633
  chr19:58144745-58144954
  hyper

SEQ ID NO: 294442 - DNA, 32 bp, Homo sapiens; identical to SEQ ID NO: 205634
  chr19:58144987-58145019
  hyper

SEQ ID NO: 294443 - DNA, 223 bp, Homo sapiens; identical to SEQ ID NO: 205635
  chr19:58175983-58176206
  hyper

SEQ ID NO: 294444 - DNA, 314 bp, Homo sapiens; identical to SEQ ID NO: 205636
  chr19:58193123-58193437
  hyper

SEQ ID NO: 294445 - DNA, 366 bp, Homo sapiens
  chr19:58193585-58193951
  hyper
gcagtcgcgctgagggactcggctcaggtgagttgtgcgtcctccgggtctcgcctacctcccccagcagaagccttaaggcccagtgagggatgcctgctcacagccctgcagcccaggccccagtaccctggacaagaaggcgcttgtggattggacccgtttgtgacgcccagtgtgtacggaaatgtgacgggcagttgactggcgcgtgcagaacttggagctgcgactaagctgggggggattcaggagcctggggtccgtctcgggtctgcaggaacatagagtgaggcagagttgcacctgacgaatttgacgattctgaggacactggcagccttcgagatttgtgaacagataggg

SEQ ID NO: 294446 - DNA, 43 bp, Homo sapiens; identical to SEQ ID NO: 205638
  chr19:58239193-58239236
  hyper

SEQ ID NO: 294447 - DNA, 668 bp, Homo sapiens; identical to SEQ ID NO: 205639
  chr19:58258068-58258736
  hyper

SEQ ID NO: 294448 - DNA, 165 bp, Homo sapiens; identical to SEQ ID NO: 205640
  chr19:58280746-58280911
  hyper

SEQ ID NO: 294449 - DNA, 182 bp, Homo sapiens
  chr19:58281371-58281553
  hyper
gggtgggatccctgtttccgacacccagttgatgcggtcggcagagcgagactggcggagggcaaaggcctgcaggcgcgactgaggcaggaggatgcggaacacggggacatcgtgtgtctactgggaaagaagtgtgatacggagttatttctttttttttttttttttgagacggagtc

SEQ ID NO: 294450 - DNA, 77 bp, Homo sapiens; identical to SEQ ID NO: 205642
  chr19:58331143-58331220
  hyper

SEQ ID NO: 294451 - DNA, 115 bp, Homo sapiens
  chr19:58361596-58361711
  hyper
ttcacgttgccagctgcctagacagagccgatttatgaagactggggaattgcgatggagaaatagtaattcacgcagagccgtcctgctgttcgggagacaggagttttattat

SEQ ID NO: 294452 - DNA, 43 bp, Homo sapiens
  chr19:58446253-58446296
  hyper
agcttcgcctcacacgttgttccctacaggcgcctgtggaccc

SEQ ID NO: 294453 - DNA, 67 bp, Homo sapiens; identical to SEQ ID NO: 205643
  chr19:58459305-58459372
  hyper

SEQ ID NO: 294454 - DNA, 67 bp, Homo sapiens
  chr19:58545837-58545904
  hyper
gtttgaggccgaagcccctctacgtacccccattgcccgcccaaacaccgctcggccgcgtccaagt

SEQ ID NO: 294455 - DNA, 145 bp, Homo sapiens; identical to SEQ ID NO: 205644
  chr19:58610001-58610146
  hyper

SEQ ID NO: 294456 - DNA, 188 bp, Homo sapiens; identical to SEQ ID NO: 205645
  chr19:58665953-58666141
  hyper

SEQ ID NO: 294457 - DNA, 224 bp, Homo sapiens; identical to SEQ ID NO: 205646
  chr19:58666733-58666957
  hyper

SEQ ID NO: 294458 - DNA, 355 bp, Homo sapiens
  chr19:58694197-58694552
  hyper
ccccactccccccgcgacttccgtcttccagtccccctccttccccaaaagttgcgtggactctagccccgcctcctacattctccccgccctccctgtccccgcccctccacccagatggacggccagttaggcccgccccctgcacttccggccctacccgcccttcctcttcccaagggacgtcataattaatcccgcccccaccgccacccaaccaagcatcacccattccagcacttccggcctgacccctgtccagcgcctttcctttctccagcttctgctctgccccaagagtggtcgccttcgtggcagggcacgactctctcccagctcgggtcgccgcccacat

SEQ ID NO: 294459 - DNA, 63 bp, Homo sapiens
  chr19:58739674-58739737
  hyper
cacagaaagccaaataggctcgactgagcgatcacctaggacgaatcgcctccagttagcgtg

SEQ ID NO: 294460 - DNA, 34 bp, Homo sapiens; identical to SEQ ID NO: 240904
  chr19:58789724-58789758
  hyper

SEQ ID NO: 294461 - DNA, 1174 bp, Homo sapiens; identical to SEQ ID NO: 240905
  chr19:58789818-58790992
  hyper

SEQ ID NO: 294462 - DNA, 89 bp, Homo sapiens; identical to SEQ ID NO: 240906
  chr19:58838428-58838517
  hyper

SEQ ID NO: 294463 - DNA, 197 bp, Homo sapiens; identical to SEQ ID NO: 205648
  chr19:58858560-58858757
  hyper

SEQ ID NO: 294464 - DNA, 332 bp, Homo sapiens
  chr19:58874184-58874516
  hyper
cgtttctccccactgcgcctgcgtaactatgccgcggctgcgggcgcgcgccttctggttcccatggggacggcgccacagccaagctactcgggcgtcctgcgttgccatggatgcgctccgccccttcctgcacccggccagcctctgcggcacacacccaacagctacacaggcgcctggggctgcccgggtcgcggacgcaagtcgggccaacgtagcttctccctggcggtcctcctccggccccaggccgtctttaccacccctggaaccttgctgagttgacgccactgagctgcgtctcacacccacgcgctgtggaacaccca

SEQ ID NO: 294465 - DNA, 113 bp, Homo sapiens; identical to SEQ ID NO: 240908
  chr19:58892481-58892594
  hyper

SEQ ID NO: 294466 - DNA, 398 bp, Homo sapiens; identical to SEQ ID NO: 240909
  chr19:58898386-58898784
  hyper

SEQ ID NO: 294467 - DNA, 379 bp, Homo sapiens; identical to SEQ ID NO: 56778
  chr19:58919475-58919854
  hyper

SEQ ID NO: 294468 - DNA, 71 bp, Homo sapiens; identical to SEQ ID NO: 226057
  chr19:58920316-58920387
  hyper

SEQ ID NO: 294469 - DNA, 97 bp, Homo sapiens; identical to SEQ ID NO: 240911
  chr19:58962923-58963020
  hyper

SEQ ID NO: 294470 - DNA, 284 bp, Homo sapiens; identical to SEQ ID NO: 240912
  chr19:58987608-58987892
  hyper

SEQ ID NO: 294471 - DNA, 401 bp, Homo sapiens
  chr19:59010487-59010888
  hyper
acctggcacgcacacgccatacacgttaacctgttgcaagaagtccacctgcgacaacacgccctccacctcgtgcgtggacacgttctcgcccttccatctgcaaggagggagccggcgcttgtgaccacgcccccgggaaggagaggccccgcctcttgcccccgccccgccccttttggggatcaggaggcccagtcagccccgccccctcgaaaatcgagaagccccgccttcgcgtgagaagtcctgactccaagttccgccctcttacgacaggaaagtcccgcctcttcagcctgactccctctaggatctgaaagcgtccgtggccccgcgccagccccgccccgagaaaccctgcctcggaccggaaggtgtccccgaggcggtcgcggaag

SEQ ID NO: 294472 - DNA, 50 bp, Homo sapiens
  chr19:59010962-59011012
  hyper
gcgcaccagcttccgttccgacagctctcgggggccgcggtagcccacga

SEQ ID NO: 294473 - DNA, 559 bp, Homo sapiens
  chr19:59049765-59050324
  hyper
gggctggagggggcgggccggctagcgaggcgtggccctatgaaggggcaggctgggcgtggaggcggtgactatgccgcggatggggtgggcccagatctggggggccgcgcgcccgggctggaacaaaggcagaggcggggacaaagccccgcggcccccagtccccatcaggaacaaaggccacacccggcccagcggtcgacgcgcccgtgctgcagccacgtgcggacacctgggagcggggcccggggaggcagtgccccgttaccctcacgccccgcccggctagccacctttacctgtgcgcgccttgggagtggcgaatgggtttcatggttgttcgcgccagtcctcgcggcctccaaacatcctccggaagctgccacctaccccgcccccagccgttgtcacctggaccggagacctcacgaccccaggggcaccgcacagggggctgaggcccacccccccggggccagcctcaatgcacccacccaccacgttttcaacgcgctgatagtccctaggcgggttcgcctctacctacagaccctgc

SEQ ID NO: 294474 - DNA, 206 bp, Homo sapiens; identical to SEQ ID NO: 240914
  chr19:59055682-59055888
  hyper

SEQ ID NO: 294475 - DNA, 308 bp, Homo sapiens; identical to SEQ ID NO: 205651
  chr19:59066308-59066616
  hyper

SEQ ID NO: 294476 - DNA, 149 bp, Homo sapiens; identical to SEQ ID NO: 240916
  chr19:59070407-59070556
  hyper

SEQ ID NO: 294477 - DNA, 64 bp, Homo sapiens; identical to SEQ ID NO: 240917
  chr19:59084981-59085045
  hyper

SEQ ID NO: 294478 - DNA, 291 bp, Homo sapiens
  chr20:327871-328162
  hyper
ggccgtgtcccgccagggccgggacctttgcgcctgagcctcggctttgggaggtgggggtcccagggaagcagcaggggcgggagacagaaacagccccatcgcccctcgacgcctcagggttgataggctgggtagaggcttcaaaggacacccccacccccgccaacacttcaaaaacccattcctacccctctctgcctcagtttctctctagggaaaaggacgcagttggtgtggagcagggcatcggtggtcctgtcaggaagagtggcgcgggtgccggtgggg

SEQ ID NO: 294479 - DNA, 41 bp, Homo sapiens; identical to SEQ ID NO: 205653
  chr20:362798-362839
  hyper

SEQ ID NO: 294480 - DNA, 112 bp, Homo sapiens; identical to SEQ ID NO: 240921
  chr20:388459-388571
  hyper

SEQ ID NO: 294481 - DNA, 426 bp, Homo sapiens; identical to SEQ ID NO: 240922
  chr20:524229-524655
  hyper

SEQ ID NO: 294482 - DNA, 110 bp, Homo sapiens
  chr20:656432-656542
  hyper
atcgcgggagctgcgctcagcactccggctgccggctttatatgggacgcaggctggagatcaggtggtcccctagcaatggaaccgctcggcgctctaatccatcaaat

SEQ ID NO: 294483 - DNA, 224 bp, Homo sapiens; identical to SEQ ID NO: 205655
  chr20:657125-657349
  hyper

SEQ ID NO: 294484 - DNA, 59 bp, Homo sapiens; identical to SEQ ID NO: 205656
  chr20:708541-708600
  hyper

SEQ ID NO: 294485 - DNA, 51 bp, Homo sapiens; identical to SEQ ID NO: 205657
  chr20:708851-708902
  hyper

SEQ ID NO: 294486 - DNA, 474 bp, Homo sapiens; identical to SEQ ID NO: 56810
  chr20:708944-709418
  hyper

SEQ ID NO: 294487 - DNA, 280 bp, Homo sapiens
  chr20:865713-865993
  hyper
cactcacccggggccgaggcgttagccctttcttgcaccaggtgccgcaacaacaccagcagctggcgcaggctgtgctgctggtcctgcaggaggctggagttgtgcctgacaccgcgcaggccgcgctcgatgttggtgagggcggcgctctggcggctcagcgtgttcagcagcttcgccttcttgctgaggatgctggccagctcctcctgctgcttggtctccagggcctgcaaccgcttctcgagcgcgctgcggggtagggggcgcacagagg

SEQ ID NO: 294488 - DNA, 229 bp, Homo sapiens; identical to SEQ ID NO: 240928
  chr20:1099000-1099229
  hyper

SEQ ID NO: 294489 - DNA, 286 bp, Homo sapiens; identical to SEQ ID NO: 240929
  chr20:1165689-1165975
  hyper

SEQ ID NO: 294490 - DNA, 132 bp, Homo sapiens; identical to SEQ ID NO: 240930
  chr20:1206201-1206333
  hyper

SEQ ID NO: 294491 - DNA, 218 bp, Homo sapiens; identical to SEQ ID NO: 205660
  chr20:1207191-1207409
  hyper

SEQ ID NO: 294492 - DNA, 104 bp, Homo sapiens; identical to SEQ ID NO: 240932
  chr20:1294287-1294391
  hyper

SEQ ID NO: 294493 - DNA, 328 bp, Homo sapiens; identical to SEQ ID NO: 240933
  chr20:1372854-1373182
  hyper

SEQ ID NO: 294494 - DNA, 160 bp, Homo sapiens; identical to SEQ ID NO: 205661
  chr20:1874960-1875120
  hyper

SEQ ID NO: 294495 - DNA, 955 bp, Homo sapiens
  chr20:1875155-1876110
  hyper
cggcgcaggtccgggcccggcagggacggggaggggcagagcgggaccggtcggggctggggaccagccgcgcgggcttctgaacgggcacgctgtcggagccggaggctcgtctagtcccgagccccagcgggccgcggcggctcgcggggccgccttcccgggacagcagccggggcccgggcgccggcgcgggggaggacgctgccctccccggccgggcgcgcagctcgcagccctcgctccctcccccggggcgcgcaggcgggcgctcgctcgcagagaaggtgccggcggggccggagccccgaagcctccccgggcggcgggaagacgggaggaggggaaagggaaggagggagggggtcgggctgccgggagggcgggggcagcggccgggactgcgggccgggagcgagcccagccgcccgcgccgtgtggagcccgggcggggcaggtgggcagcggcgggggcggctccgcgcggccgggctcggccgtgctgcccctcgcccctgctcgcgcggtcctctctcccgcgcggtctgtcggtctgcgcgccgcctcgctcctcgctcctcgctctccccctctttctccccctctcgcctctccgtgtctctggctctctgcctggctcccttgggtctgtttctctctcctgccgcctctctctggccgcccctggctttatttctcgcgcgcttggggtctctcccagtctccgtctctccatttctcctggggggcggggagggggggtctccaaaaaccgcggcggcggcggcggccgctccaggcgcccgttccggagtcggggggaggcccagccgggaggggggaagggggggagccttagtcatttccccgctccagcctgctcccgcccgagcgcgcactcacggccgctctccctcctcgctccgcagccgcggcccatggagcccgccggccc

SEQ ID NO: 294496 - DNA, 34 bp, Homo sapiens
  chr20:1876176-1876210
  hyper
gcacccccccgctccccaccgctgcactccccaa

SEQ ID NO: 294497 - DNA, 291 bp, Homo sapiens; identical to SEQ ID NO: 240936
  chr20:2082271-2082562
  hyper

SEQ ID NO: 294498 - DNA, 39 bp, Homo sapiens; identical to SEQ ID NO: 205663
  chr20:2187674-2187713
  hyper

SEQ ID NO: 294499 - DNA, 487 bp, Homo sapiens; identical to SEQ ID NO: 205664
  chr20:2188036-2188523
  hyper

SEQ ID NO: 294500 - DNA, 236 bp, Homo sapiens
  chr20:2444432-2444668
  hyper
agtcctgcaggagcctggggcatgggaaccccagctgggattcctctgccagcagccctgccgatccctgggcccccggcagctccagcaagtggaactcgagcaataccagtctgaaaaataaacaaatatgctctgatgcccagtgatctgaagatcagaagtatactttggaatatcattgccaagagagcccctcgaaatagcttataaatactatcgaaatagcttataaa

SEQ ID NO: 294501 - DNA, 88 bp, Homo sapiens; identical to SEQ ID NO: 240938
  chr20:2502471-2502559
  hyper

SEQ ID NO: 294502 - DNA, 111 bp, Homo sapiens; identical to SEQ ID NO: 205666
  chr20:2539193-2539304
  hyper

SEQ ID NO: 294503 - DNA, 240 bp, Homo sapiens
  chr20:2632928-2633168
  hyper
ggacctcccgccccgacttcacccagctctgctgcccgtaactcatatgacaagaacatcaggaaccggactattaccccgaaagggccttcccaagtcgtttcgccgcctgcagtgcccgaccgggggccgcgcgtccccggcaaccacgcccgcccgcgcagctgcagaggccggaaaaggcccgctcgcccgcgctcggcaccacccagcccgcgctccgggcgataccaccctggg

SEQ ID NO: 294504 - DNA, 56 bp, Homo sapiens; identical to SEQ ID NO: 132452
  chr20:2633217-2633273
  hyper

SEQ ID NO: 294505 - DNA, 113 bp, Homo sapiens; identical to SEQ ID NO: 240941
  chr20:2633591-2633704
  hyper

SEQ ID NO: 294506 - DNA, 36 bp, Homo sapiens; identical to SEQ ID NO: 205667
  chr20:2668734-2668770
  hyper

SEQ ID NO: 294507 - DNA, 68 bp, Homo sapiens
  chr20:2674067-2674135
  hyper
atctccccgcccagcgccccaggaggggaggggacagcgccggcgcccgcggacccgctttctccgag

SEQ ID NO: 294508 - DNA, 165 bp, Homo sapiens; identical to SEQ ID NO: 240943
  chr20:2723863-2724028
  hyper

SEQ ID NO: 294509 - DNA, 119 bp, Homo sapiens; identical to SEQ ID NO: 205668
  chr20:2731110-2731229
  hyper

SEQ ID NO: 294510 - DNA, 225 bp, Homo sapiens; identical to SEQ ID NO: 205669
  chr20:2731391-2731616
  hyper

SEQ ID NO: 294511 - DNA, 765 bp, Homo sapiens; identical to SEQ ID NO: 205670
  chr20:2731675-2732440
  hyper

SEQ ID NO: 294512 - DNA, 37 bp, Homo sapiens
  chr20:2801696-2801733
  hyper
cgtggtcacagacgcgccgggagggagggggccacgt

SEQ ID NO: 294513 - DNA, 241 bp, Homo sapiens; identical to SEQ ID NO: 240948
  chr20:2801877-2802118
  hyper

SEQ ID NO: 294514 - DNA, 143 bp, Homo sapiens
  chr20:2820861-2821004
  hyper
cccggggctccgcggtgttcacccgcgacccgggtatgcctgcgcaccgcgcgcctggcccgcagcgggctcctagccaagcctcatgttcccgcgccccagtcggccagtcggttctgcaaagctcccgccccgcagagacc

SEQ ID NO: 294515 - DNA, 152 bp, Homo sapiens; identical to SEQ ID NO: 240949
  chr20:2821253-2821405
  hyper

SEQ ID NO: 294516 - DNA, 35 bp, Homo sapiens; identical to SEQ ID NO: 240950
  chr20:2853882-2853917
  hyper

SEQ ID NO: 294517 - DNA, 232 bp, Homo sapiens; identical to SEQ ID NO: 240951
  chr20:3026336-3026568
  hyper

SEQ ID NO: 294518 - DNA, 65 bp, Homo sapiens; identical to SEQ ID NO: 205671
  chr20:3052454-3052519
  hyper

SEQ ID NO: 294519 - DNA, 66 bp, Homo sapiens
  chr20:3063059-3063125
  hyper
cgggacctgttgcttctctggggtggatctgcccacgacctcaggtccggggactggccggtgggc

SEQ ID NO: 294520 - DNA, 94 bp, Homo sapiens
  chr20:3063391-3063485
  hyper
tggcgcgggcgcggcggtgaaagccctcgcggcactcgggctcggtcacgcagctctctgccgggaggacgtgtgagcacgggcgccctggggc

SEQ ID NO: 294521 - DNA, 99 bp, Homo sapiens; identical to SEQ ID NO: 205672
  chr20:3140538-3140637
  hyper

SEQ ID NO: 294522 - DNA, 260 bp, Homo sapiens; identical to SEQ ID NO: 205673
  chr20:3154656-3154916
  hyper

SEQ ID NO: 294523 - DNA, 48 bp, Homo sapiens; identical to SEQ ID NO: 240955
  chr20:3185344-3185392
  hyper

SEQ ID NO: 294524 - DNA, 539 bp, Homo sapiens; identical to SEQ ID NO: 205674
  chr20:3220010-3220549
  hyper

SEQ ID NO: 294525 - DNA, 145 bp, Homo sapiens; identical to SEQ ID NO: 205675
  chr20:3229108-3229253
  hyper

SEQ ID NO: 294526 - DNA, 154 bp, Homo sapiens; identical to SEQ ID NO: 205676
  chr20:3229326-3229480
  hyper

SEQ ID NO: 294527 - DNA, 31 bp, Homo sapiens; identical to SEQ ID NO: 205677
  chr20:3229526-3229557
  hyper

SEQ ID NO: 294528 - DNA, 158 bp, Homo sapiens; identical to SEQ ID NO: 205678
  chr20:3229659-3229817
  hyper

SEQ ID NO: 294529 - DNA, 99 bp, Homo sapiens
  chr20:3387902-3388001
  hyper
cattgtggggaaaccgttgcggggttgtccaaaggggagccattgtggggcctctacagagggcgccgttcctgggaaaaattcctccctgagccgttc

SEQ ID NO: 294530 - DNA, 174 bp, Homo sapiens
  chr20:3388181-3388355
  hyper
cggcgcggggggtacacgtccatggcggcggacgactggcggcggaggaggacggtgcagctgcgagggtctcagttgcccgcagggcggctccacgctagctgcggccgggcggggcggcagggcgtgccgggtgggagggggcgcggcgcgcgggcccggcgggggcggggg

SEQ ID NO: 294531 - DNA, 47 bp, Homo sapiens
  chr20:3388397-3388444
  hyper
cgttgggagcggctggagttgggggtcggcgcacggccacagggacc

SEQ ID NO: 294532 - DNA, 350 bp, Homo sapiens
  chr20:3388534-3388884
  hyper
tcaagcccggcatcatagagcggggctctgcgcggcgccccccggccacgcacacggacgcgcccgggggcggagcctctcccagcccggccccgcccctccgcctctgcccgccccgccccgcccgaccagccccggcctccagcgaagtcttccgctccggcgtcaggatccagcgcacctccccagtacccagcgcacctccccagtacccggctcgcttccctgttctccggaacggtgtcttcccgcttcctggtcatcaattccgcacccacccttcaaacatccaatagattcctagccggcctcgggttagcgcagcagtgcgcacccagccctgcgcaggg

SEQ ID NO: 294533 - DNA, 100 bp, Homo sapiens
  chr20:3388967-3389067
  hyper
catgtacaagaaacttgggaaatactgcactgatagttgccaggagtcctgtatatacaggacgtatttaatgattattggcctgcgtccttcgttgacc

SEQ ID NO: 294534 - DNA, 436 bp, Homo sapiens; identical to SEQ ID NO: 205679
  chr20:3451349-3451785
  hyper

SEQ ID NO: 294535 - DNA, 166 bp, Homo sapiens; identical to SEQ ID NO: 205680
  chr20:3452159-3452325
  hyper

SEQ ID NO: 294536 - DNA, 448 bp, Homo sapiens; identical to SEQ ID NO: 132496
  chr20:3653532-3653980
  hyper

SEQ ID NO: 294537 - DNA, 97 bp, Homo sapiens
  chr20:3759182-3759279
  hyper
cggtcccagctggggtgggaagcagcttagcggaggcttggacctcgggccctacactcacccttccagggccctcgaccaggccttcccttctccc

SEQ ID NO: 294538 - DNA, 57 bp, Homo sapiens; identical to SEQ ID NO: 205681
  chr20:3766679-3766736
  hyper

SEQ ID NO: 294539 - DNA, 32 bp, Homo sapiens; identical to SEQ ID NO: 240967
  chr20:3767611-3767643
  hyper

SEQ ID NO: 294540 - DNA, 113 bp, Homo sapiens
  chr20:3801039-3801152
  hyper
caaggccagcccacgccgagggtccaagcatcgggatatgccgccagcacctggctgctgcagcaccgcgctggacatgagcgctccgcccaacccgacggcgtcagctggcg

SEQ ID NO: 294541 - DNA, 171 bp, Homo sapiens; identical to SEQ ID NO: 132507
  chr20:3801162-3801333
  hyper

SEQ ID NO: 294542 - DNA, 183 bp, Homo sapiens; identical to SEQ ID NO: 132509
  chr20:3869510-3869693
  hyper

SEQ ID NO: 294543 - DNA, 979 bp, Homo sapiens
  chr20:4129265-4130244
  hyper
gggagggagggggtgcgggcccagatgtgggcgtgggacccgggtttccgaggcagggatccagcagtctccggcttcaggggcttctagcttcccggctcccggcggggcgggcccggggaggagctcggcgggtccccgcccagaggcggagcggagggccgggccggagcggggtgggtaggggacgcgaggcggagcggggccccacacaggccgcggcggctggctcgggcccctacggtcccggcggcggctggaggaggaagccaggcggctggcggaggaggagagacggaggaggccgagaccggagcgccgctcgccgcagacttacttccccggctcagcagggaaaggtacggtgcgcccgctctccggccccgggccccggctctcagcctcccccgggcgcaggcaggggctgcggccgccgcgagagggtgaggggcccggagcggtccccgagggctcggccggcccggggcttgggcggccagcgcggcgctcgggcgctcgggcgggggtgcggggcgttccgggaggctcgcggggagcagggggcgccgcgcccccctggcttccgccggggtaagcagtggtgtgggccggggtggcggcgatcccggcgccagggctgctcggcccgggccgggcgccgggggtagagggccggacggacccccgggctacgtgcgggaggggagcgtcccgggcgccctgcaggcgcgctccgtgggcgcagacaaagccgggcgcggacgccccgcgacgactcgggctgccgggagggtgggcaccggggagaggacagaaggctcccgggtgatggcccgaacgccaggagaggctgtgctgacttccccctctgggctccgggcgtccgggtggtccccttggggccccgggcagggtgaggagcagctttctcttaagggccaactaggggctcacgggttgtcccgggcttggcgggagc

SEQ ID NO: 294544 - DNA, 413 bp, Homo sapiens; identical to SEQ ID NO: 205684
  chr20:4804008-4804421
  hyper

SEQ ID NO: 294545 - DNA, 1126 bp, Homo sapiens
  chr20:4981401-4982527
  hyper
acactcgaaatgtcattttttccccccgaaaggtggcaaggagggggactcgcgaccccccagggaacaggccagaaaggccccggggtcggaggagctgcttctaaaattacttcgcgcagtctttgtagaagggaagaaagcaagaatgtaaaaggcaccctcttgccgcccctcctgatgcccctgaattccagggggcgagacgatgcccgtgcgcaccaccgggggaggggcgagggaagcgaccccaggacgcgcgggcgcagagcccgggaggaggcggcggcagccagtggggttctgggggcgccccatttgcctccccgctgcgcggcctgagggcccgagcgcgctgtggctcccgtggcgggaaggggtgggtaccccgggggcccggcccggccggcagaacggcaggagctgagggccgccgggcatcttgggccccggggccagggtggccggcgggcgcggggtcccgggagatgggtcggggtgggggcgcgcaggccgcgccgcggggccggtgggtgacagcgcgcgggggccgtgccaggccggcctcgtgggcgcggcgagcacctcgcggccccgccggcaggtgcggcccgcaggccgggcagggggcgcggcggccgggctctcacctggctgcagctcgcgtggttcccgtcctgccgccgcgcctcggcgccgcagtgcccgctgcagcctccgcctccggtccccgcgacagccgcctgcaaaatggcgccgcggaggggcgggccgggggcggggtgcagcggagccgcccgcccccgcgccggtctggggcccacctccctccccgcccccgacccctgccctcgggcctccccccggggaggggctgctccctggcacccggcagcgctccccggaacatcccgggcctcgcacccagccgtccccttcccgttcctttcatttccctcccctgcgcagaaagatcgccccccttcgcgacccttcccaccagtcacacctgttcctggggacccacctggcaagcagagcgctggtccctgagtgtcctggtccaggtcccccctttttaccccgcctgccaccgagccctgtcattgctcgagcgtgataagca

SEQ ID NO: 294546 - DNA, 33 bp, Homo sapiens; identical to SEQ ID NO: 240974
  chr20:5093918-5093951
  hyper

SEQ ID NO: 294547 - DNA, 363 bp, Homo sapiens; identical to SEQ ID NO: 240975
  chr20:5100559-5100922
  hyper

SEQ ID NO: 294548 - DNA, 390 bp, Homo sapiens; identical to SEQ ID NO: 240976
  chr20:5107246-5107636
  hyper

SEQ ID NO: 294549 - DNA, 84 bp, Homo sapiens; identical to SEQ ID NO: 205687
  chr20:5297756-5297840
  hyper

SEQ ID NO: 294550 - DNA, 136 bp, Homo sapiens; identical to SEQ ID NO: 240981
  chr20:5591804-5591940
  hyper

SEQ ID NO: 294551 - DNA, 57 bp, Homo sapiens; identical to SEQ ID NO: 205688
  chr20:5891858-5891915
  hyper

SEQ ID NO: 294552 - DNA, 345 bp, Homo sapiens
  chr20:5892269-5892614
  hyper
gagcggggccatgcagccaacgctgcttctcagcctcctgggagccgtggggctggcgggtgagtgggcgcggcgggccggtcagcaccgcggacagcgccagcctcgctcttccccgccgctcccgcagccaggctggcggatcccgggagagagggagggttgaggggaaggtttacctcttgcttcgtttcttctcctccctgggtgttttccttcagctcctcccacccgtttgacttggaaaaagctagagggcttcctagcccaaccaggggagcctcagtctttctgtatctgagttttcctctagataggaaggaagaaaacgtgccatacctgcaa

SEQ ID NO: 294553 - DNA, 42 bp, Homo sapiens; identical to SEQ ID NO: 240984
  chr20:5931595-5931637
  hyper

SEQ ID NO: 294554 - DNA, 177 bp, Homo sapiens; identical to SEQ ID NO: 240985
  chr20:5986817-5986994
  hyper

SEQ ID NO: 294555 - DNA, 90 bp, Homo sapiens
  chr20:6032595-6032685
  hyper
agaaagtgactcctgtgtggcgcttcaaactgggcccgcttgctcgaaaaatgtagctggtgtctttttgaaccctcctacgagctgggc

SEQ ID NO: 294556 - DNA, 407 bp, Homo sapiens
  chr20:6103388-6103795
  hyper
tagctccccagccctagctccggagcacccacctcctttccaggagcccgtagcgtccagcctcgcagtcgcgcacgtggagagctgcgtccctacaaactaccccgggccgagccgaggagcgggcgctggcgaagtggggagcggggggcgcccagtggcggcggctgctcagctaaggctgcggcaggtgagggctggagccagggcgagcaggcgaagctgcctcgggacctcccacggaggctcggtgcctgcccccagcctggcgcggcgtgcccggtgcactgcacggccccagcggcccggctgagggcagcgcgcagcgtggcaggcgagggcacgcccagccccgggcctgctaggtctcgctcccgcggagaggaggcgcagtctgcagattttta

SEQ ID NO: 294557 - DNA, 110 bp, Homo sapiens
  chr20:6103923-6104033
  hyper
tgttcccccaggcccgccggggactagcccagatgattaaagccgcgccacttcccctcctttcaggcatacccatcactcacaccccggggtgcgtccaggcccaggag

SEQ ID NO: 294558 - DNA, 441 bp, Homo sapiens
  chr20:6747982-6748423
  hyper
tgaaagttgaataacgggcccagcggggaaataagaggccagaccctgaccctgcatttgtcctggatttcgcctccagagtccccgcgagggtccggcgcgccagctgatctctcctttgagagcagggagtggaggcgcgagcgccccccttggcggccgcgcgcccccgccctccgccccaccccgccgcggctgcccgggcgcgccgtccacacccctgcgcgcagctcccgcccgctcggggatccccggcgagccgcgccgcgaagggggaggtgttcggccgcggccgggagggagccggcaggcggcgtcccctttaaaagccgcgagcgccgcgccacggcgccgccgccgccgtcgccgccgccggagtcctcgccccgccgcgctgcgcccggctcgcgctgcgctagtcgctccgcttcccacaccccg

SEQ ID NO: 294559 - DNA, 293 bp, Homo sapiens
  chr20:6748470-6748763
  hyper
cggctacccgaacgttctcggggccagcgccgagtggatcaccggggaccgcgaggcacccgcgcgccgcagaccccgcgcgggctggagcacccggcagagcgcgccacagcgccgtggcctctgctgcccgggctgcgccagagccgcggacgggcgcgcagagcgccggggactccggagccgatccctagcgccgcgatgcggagcacctactgcaggagatcgggggcctgggacgcgctggccgaggtgtgatcggaccccaggctagccacaaagggcacttggcc

SEQ ID NO: 294560 - DNA, 601 bp, Homo sapiens
  chr20:6749063-6749664
  hyper
ggagccggccccgcgcggggccacgcgtccctcgggcgctggttcctaaggaggacgacagcaccagcttctcctttctcccttcccttccctgccccgcactcctccccctgctcgctgttgttgtgtgtcagcacttggctggggacttcttgaacttgcagggagaataacttgcgcaccccactttgcgccggtgcctttgccccagcggagcctgcttcgccatctccgagccccaccgcccctccactcctcggccttgcccgacactgagacgctgttcccagcgtgaaaagagagactgcgcggccggcacccgggagaaggaggaggcaaagaaaaggaacggacattcggtccttgcgccaggtcctttgaccagagtttttccatgtggacgctctttcaatggacgtgtccccgcgtgcttcttagacggactgcggtctcctaaaggtagaggacgcgggccagggcccggggtgggtggtgggtgggagggggatttgggcagccactgcggtagagcccttccttacgtccaggccagaagtaaacagacccctctccagtccacgtgcaacggagccctgcaggg

SEQ ID NO: 294561 - DNA, 140 bp, Homo sapiens
  chr20:9048355-9048495
  hyper
tcctcctggccagccggaccggctcaggcggctgagcatgcctagtgcagctgcgagcatggccccagtccccaatgcgcaggtgccacgtctccgggttttggtggccgccggccgggagaaggaggaggcggagtggg

SEQ ID NO: 294562 - DNA, 631 bp, Homo sapiens
  chr20:9048532-9049163
  hyper
gtgagggtccacacaagggtgatgccagaccgaacaccattagggcctgggtgtgagtgtgactcggaggcacctgggggccgttgtagggccgggaaaagccaggaactggctggagcagcaccccagcatcccagggaccaaagtctgggggatttgcatgtctgaggttgcacttgtgggaagactttttggaaccacttaatctctgtggctctgtgtaagacccgcgaaataaaaagaggcagtagtactctttggaagattgttttagggattaaatgaataaaaagcgtttagaacactgcaggacgcattgtaggcgctgtatgggtttatgaaaccgaatataaacaaataagcacgtcccccacccagccaacggctttgggggccccgttctggccagtcctgagcccctccacacggcccacggcgggctgcgggtctcccatccgaggagggtgccgcttttctgcccccgctccctgggttctgcgcccagcgccatcccgtgcgcccccgacccttgggcatggggcacatgccgcggggagccgccagggagaccccagaggagcgcgccgcgggccggcttccccggatgccccacccacctcctcttggcgct

SEQ ID NO: 294563 - DNA, 229 bp, Homo sapiens
  chr20:9049238-9049467
  hyper
gccctgcgggctcgcggcaactgggcggccggcccggcccctgcccacccccagcccagcccggcgcgccgcactgggcatgctccgtagcctgggcaggttggggctgcgaggcgacagctcgggctctggagccgggaggcgagaacgaggagggaggctcgggggcaggggaggaggaagcggctggccgctgaggggcggcggggcccggagcgggggacgcgca

SEQ ID NO: 294564 - DNA, 546 bp, Homo sapiens
  chr20:9049670-9050216
  hyper
aggagggggtggtggcgccgcgccgggagcagtaagtgagctgcaccgccaacaagatctctcacacacagacacacacacgcacacgcacacacgggcgcgcacacacacgcgcgtacacactgggtctccaggcagcggccgtcgccgcatccccggcagcagctccaggcaaagtgacaggtaggaaaaggcatttcgggtcccgcccgaggatgctcccgcccgccttggccctcagggcttgtttgctttccgcgggtgcgtcccggacgcgcgcgcgcgcgcacccggatgcccagcggggaccccgtgcaggtgccgggtgccaggcgccctgtgcgcgcgggaggcaggggacccagacgccatcccccttcccctgcagtcatcgcctgctgggtttcctcagactctctccagacgttcaccctcttctgggctagaaatagctcggctcgacgtgtatatgattattttggttggaaatagttggcaccgtgcaacgcatgtaaatgtgtatgcgtgtggatcttcttgcctctt

SEQ ID NO: 294565 - DNA, 76 bp, Homo sapiens; identical to SEQ ID NO: 205692
  chr20:9488206-9488282
  hyper

SEQ ID NO: 294566 - DNA, 210 bp, Homo sapiens; identical to SEQ ID NO: 205693
  chr20:9489214-9489424
  hyper

SEQ ID NO: 294567 - DNA, 80 bp, Homo sapiens; identical to SEQ ID NO: 205694
  chr20:9489716-9489796
  hyper

SEQ ID NO: 294568 - DNA, 200 bp, Homo sapiens
  chr20:9494983-9495183
  hyper
caccgttttctttcgggaaccagatgcgttttcagaagacagtactccagtgataaggtatctacaccacttaataactgtacctggtaaggagatttaataaggctgagggtggtattaagtttctcagaacagactcatctttgcggatgcagttgcagaacaggaaacagacccagggagaagtttagtccccccag

SEQ ID NO: 294569 - DNA, 50 bp, Homo sapiens; identical to SEQ ID NO: 205696
  chr20:9495690-9495740
  hyper

SEQ ID NO: 294570 - DNA, 64 bp, Homo sapiens
  chr20:9495962-9496026
  hyper
aacggctcgtagagcgcacagctgctggcagagaactttgtcactccaaagcctgcagagcact

SEQ ID NO: 294571 - DNA, 53 bp, Homo sapiens; identical to SEQ ID NO: 205697
  chr20:9496982-9497035
  hyper

SEQ ID NO: 294572 - DNA, 239 bp, Homo sapiens
  chr20:9497109-9497348
  hyper
ggtcccaggccaagtcttccctcggcttgctctttagggcggaagaggcgggagcgcccatgagtcttctgggtctcaggccttgtagatccgccaggaaccgcaggcgtggggacccaaacgtcacccgtggcctgatcctagataagaagtcccttgaaggcctgtcgttccctggtgcttcaaaacgacctcttatgatttggcctttgaaggaccacggagaagggcaaagctgc

SEQ ID NO: 294573 - DNA, 132 bp, Homo sapiens
  chr20:9497378-9497510
  hyper
tttcttatgcgctaaaactgcaagggggcagtgcgactttccttttcagtcaggatgtgatggccttcagtgtctttttgcgcatggcagcatggctcgcacgggatattcagtcatcgactgcagctacct

SEQ ID NO: 294574 - DNA, 352 bp, Homo sapiens
  chr20:9818837-9819189
  hyper
cacacacacacgcgcgcacacacacacacacacaaataacaaaggaaaacacagcctcataaaggctcagctattgcatcctccagtccacacctgccaaaagacaaaaaccatgcgggaatcctgctctggcaatatgtccaacacttctcgggaaaagcagcgccgtggcacccccagggcgtgcgctgctgtatacacacaaagaactggtgctgggcttgcgagcagttcggggtaccagcacgctctcagggctggaatccggggttctcctccacgccctcccgcccagcaaaatggaaccatcctttatttggttggtagagagcccaggctggatagtagcgca

SEQ ID NO: 294575 - DNA, 511 bp, Homo sapiens; identical to SEQ ID NO: 205698
  chr20:10015468-10015979
  hyper

SEQ ID NO: 294576 - DNA, 49 bp, Homo sapiens; identical to SEQ ID NO: 205699
  chr20:10198955-10199004
  hyper

SEQ ID NO: 294577 - DNA, 74 bp, Homo sapiens; identical to SEQ ID NO: 205700
  chr20:10199241-10199315
  hyper

SEQ ID NO: 294578 - DNA, 305 bp, Homo sapiens
  chr20:10199768-10200073
  hyper
ggtgggggctttataaagtgttttcgaggtgagctgctggggaaaagggaaacgggagccctgcaaatggagcgacggggaggaagagcgagggtacgtaccgaataataacttactcttttgaaacagtagtgggaccccctctttcttccattttgcgatgcagttttcagagatatttaggctgttgagttttcctcccctgtcgttctaaccctattattatgactgttgtcgttagggtgctattatccagggaagaattaagggggagacagggtgtgggtgctggggaggcgaaagga

SEQ ID NO: 294579 - DNA, 131 bp, Homo sapiens
  chr20:10200196-10200327
  hyper
tcgtgccgggtgggagggctctgcggagggctggcgcgggtgggctggcttcggggactgcggcggcccgcgctcagcaccctggatagcaacaccgagggctcgcgcgggcgccctcgacctttcagcac

SEQ ID NO: 294580 - DNA, 97 bp, Homo sapiens; identical to SEQ ID NO: 132561
  chr20:10200350-10200447
  hyper

SEQ ID NO: 294581 - DNA, 756 bp, Homo sapiens; identical to SEQ ID NO: 241004
  chr20:10415353-10416109
  hyper

SEQ ID NO: 294582 - DNA, 400 bp, Homo sapiens
  chr20:10653624-10654024
  hyper
caactcgaactgacccgaggccccacacacctgccggcgagggaaggaggtaggtcagcgcgggagaaagctgttttcttcgagtatagaggtggcgactccctcccactccccgccccgacgagccctcctcgccgagtgaaaataattttgcgaaactacgttcaaggactcaacatgattccggggcaaaaaaaaaaaaaaatgcacgagtgcggaagaaatccgacgacttcccggggggcaacagcggagcgaacgcgcccctgtccggcctggaggggtcaccctcaggaggcaggggctcccgtgggggagttggcgcgctcagcccaggtgcagccgctcgggcgcaggggcgaggagtcgggcgctcgagggctgccgagcctgctcgcgg

SEQ ID NO: 294583 - DNA, 1019 bp, Homo sapiens; identical to SEQ ID NO: 205705
  chr20:10654669-10655688
  hyper

SEQ ID NO: 294584 - DNA, 1239 bp, Homo sapiens; identical to SEQ ID NO: 205706
  chr20:11871115-11872354
  hyper

SEQ ID NO: 294585 - DNA, 440 bp, Homo sapiens
  chr20:11872384-11872824
  hyper
tccctatttatcaagcaacccattgtcctgtgtgtgcctggtgaaagcgagctaattctattattagtcctcaaaagaccaagggagatcacggtgctttttcttttttaaatattccccgccacctcgccaaatcctgtaatacagtttccccaaacttggctgcacagaggagtcgctggggagttttaaaactcttaaagcccaatcgcacaccagaccaattaacacagtgtattttttaaagatccccaggtgatcgcgcagccgagtttggaaacactggtttaatataagaaagtcaaggctttagtttcacatagtagtagcattcagtttgtaattggtgagatgaaactcaaattcattttcctagacaggaactcacaaagagcggtttgtttcccaccagggagggagggaagcgtctctaacggttc

SEQ ID NO: 294586 - DNA, 262 bp, Homo sapiens
  chr20:13200783-13201045
  hyper
gctgggccggcgctggggaggaggaagggagggaacgggtaggaggaggggaagcgcagtataaaagtcccggccggactgagcgtccgctactccgagtcacttcggtaaggcgggagcccgagcaaggtcaaggagggaagtgcgcggtgccacggaccgacacagttcgctctagcatctgacgctcggactccgcgccctcagccggatcccagagcccttccattcgccaaccgcccactgcaaggcatgagccgca

SEQ ID NO: 294587 - DNA, 73 bp, Homo sapiens; identical to SEQ ID NO: 205709
  chr20:13201055-13201128
  hyper

SEQ ID NO: 294588 - DNA, 396 bp, Homo sapiens
  chr20:13201565-13201961
  hyper
acaagggctctacccgcgcccgtcacagcgacctcggcagcgggcacttggtacagcccggcaggctgacgctgccgccgagggcgccccggctaccgccaaaccgtgacaacctcggtgtgcccggggcccccatctggaaccggccctccccgggactccgagtgcggggcggcgcggcaggcggccccgaggagcgcggagagtagtggaggtggcttgccgggtgagtggctcggggcggcgagggcgggggcgccaagcgtggaggtaactcccggccgcagctgaagccctcctactcctcctcctcctcctcctcctcctcctcctcctcctcctccttctccttctcctcctcctcctccccgcgcttctctggcggccgctcccgct

SEQ ID NO: 294589 - DNA, 218 bp, Homo sapiens
  chr20:13202524-13202742
  hyper
cgcggccgcgggcaacgccagccaagcccagctgcaggtgagtgcgccgccggagagggccgtgcgcggctgcggggacggtttgtggggcgggggtgctgagctagtgccgggtggatgcagggaggcaggtcccctgccccacctaagagcaactgttttggcagtagttttgcccgggccacttgacttaggcagaggcggagcgggggcacgtg

SEQ ID NO: 294590 - DNA, 270 bp, Homo sapiens; identical to SEQ ID NO: 241010
  chr20:13619539-13619809
  hyper

SEQ ID NO: 294591 - DNA, 130 bp, Homo sapiens; identical to SEQ ID NO: 241011
  chr20:13765649-13765779
  hyper

SEQ ID NO: 294592 - DNA, 969 bp, Homo sapiens; identical to SEQ ID NO: 241012
  chr20:13976113-13977082
  hyper

SEQ ID NO: 294593 - DNA, 506 bp, Homo sapiens; identical to SEQ ID NO: 241013
  chr20:16553758-16554264
  hyper

SEQ ID NO: 294594 - DNA, 64 bp, Homo sapiens
  chr20:17208123-17208187
  hyper
aaaggtaagctctcccatgcatttcgcatgttgtttcaaaacggggggacgggggggcagccct

SEQ ID NO: 294595 - DNA, 53 bp, Homo sapiens; identical to SEQ ID NO: 205713
  chr20:17208803-17208856
  hyper

SEQ ID NO: 294596 - DNA, 92 bp, Homo sapiens
  chr20:17209635-17209727
  hyper
acaccaacacaataaagaagccgaccttccttcttcactcccccccaccccaaacttggcaagacccaggacccaaacgccattataaaata

SEQ ID NO: 294597 - DNA, 478 bp, Homo sapiens
  chr20:17549573-17550051
  hyper
cccacaaaaacacccgcagcaaaaacgctgggattcatctgggccctctgaaaaccgtgtttccgacgcaaccgcccattagaaaaacacaattccaaattaaaaacccggagaactgagcggcggggctggcgccaccgtcccgggacagcgcggcctttcccagccacacccctgcgcgccgccggcctccttccccggcagttcccaaagataaataaatgctccttgtttttccagacctgaaattaacggtgactcacagagcactctgcatggccacggtcgcctcgggaaggaggaaaaatgtgcagacttttttcccctcacgcgagggcaggacaagccagactgggccaatcaggggagggcggcgggaatcgcaccaaagtaggtaaaaaatgcgggaggcgtccccgctgccgcggcccgcgactccgctcccgtgggtcctcccccagtgcgttccccctcctcg

SEQ ID NO: 294598 - DNA, 187 bp, Homo sapiens; identical to SEQ ID NO: 205715
  chr20:17661564-17661751
  hyper

SEQ ID NO: 294599 - DNA, 116 bp, Homo sapiens
  chr20:17919868-17919984
  hyper
agcggatggtgcaaggtttccttccaaacggaaatcgcccttcacagagctgagcctgggaattaccacaaagaaacctcacaaagaaaaggtgcgcaaggcaaatgttcagaaaa

SEQ ID NO: 294600 - DNA, 295 bp, Homo sapiens; identical to SEQ ID NO: 241019
  chr20:17949251-17949546
  hyper

SEQ ID NO: 294601 - DNA, 134 bp, Homo sapiens; identical to SEQ ID NO: 241020
  chr20:17976773-17976907
  hyper

SEQ ID NO: 294602 - DNA, 711 bp, Homo sapiens
  chr20:18037456-18038167
  hyper
gctgctgctgccgccgtcgctgcggcagtcctcgggggggtcgtggagcaggcggcctaggcccactgtggagggaggggccgcgccccgacacacacactcggcgtcaacccgcacgcccgcggcagtttgacctgcgggcggtgctgccgccgccccgccccggacctgggcacctcgccaagtgggcaacgtcgcgggggaggccagtaagccccgaatcggcccacagagctagcttggggtgctcggagcctctttccggtcccagccaaggcgcccacgaggaaccgggcggccacgagcggcggaggaccccgcgcgccaagtttcctctcagggcgggggaggcggatctgacctctccccagctagccccagaagggttggcgagcctttgtgcacccccatgaggacgtgagattgggggtagcctctgctggctttcaatccctttcctgggccaccttggcccgcgctgcagccaacggtcccgccgccgggcaattagaggctcccactacggggaagggggcgcctagagtctggggcatcccagtccctcattgcctgccctaacccgcctagaagacccccgcgtgccccccggaagagggggatgaggtggggagcccgcccctgccgatgagcagagaagacccgccaccccttcccccaccccgggagcccagcgcccaggcccggcccccg

SEQ ID NO: 294603 - DNA, 129 bp, Homo sapiens; identical to SEQ ID NO: 205718
  chr20:18038209-18038338
  hyper

SEQ ID NO: 294604 - DNA, 138 bp, Homo sapiens
  chr20:18038356-18038494
  hyper
cggctcccggcggccagagcccaccttcccgcctcgcctgccctcttcctccaccccccgccgcggcgcggcccaggcctctcccccgcacgcctggcgactcccagcctcccggctcggcgacacctatgccttaaa

SEQ ID NO: 294605 - DNA, 39 bp, Homo sapiens
  chr20:18038603-18038642
  hyper
cgctacctgtccgaccggttccggcggccggggctgcct

SEQ ID NO: 294606 - DNA, 44 bp, Homo sapiens; identical to SEQ ID NO: 241022
  chr20:18038850-18038894
  hyper

SEQ ID NO: 294607 - DNA, 167 bp, Homo sapiens; identical to SEQ ID NO: 241023
  chr20:18039164-18039331
  hyper

SEQ ID NO: 294608 - DNA, 87 bp, Homo sapiens
  chr20:18039560-18039647
  hyper
gccttgttcgggtgcgcccaggacaaccggcacagcctcttgtgtcgctgcggtcgccctcctccaggaggtcgtcagacgtgtgcc

SEQ ID NO: 294609 - DNA, 91 bp, Homo sapiens; identical to SEQ ID NO: 205721
  chr20:18039936-18040027
  hyper

SEQ ID NO: 294610 - DNA, 105 bp, Homo sapiens; identical to SEQ ID NO: 241024
  chr20:18118330-18118435
  hyper

SEQ ID NO: 294611 - DNA, 35 bp, Homo sapiens; identical to SEQ ID NO: 241025
  chr20:18118692-18118727
  hyper

SEQ ID NO: 294612 - DNA, 295 bp, Homo sapiens; identical to SEQ ID NO: 241026
  chr20:18268964-18269259
  hyper

SEQ ID NO: 294613 - DNA, 91 bp, Homo sapiens; identical to SEQ ID NO: 241027
  chr20:18447681-18447772
  hyper

SEQ ID NO: 294614 - DNA, 60 bp, Homo sapiens; identical to SEQ ID NO: 241028
  chr20:18448016-18448076
  hyper

SEQ ID NO: 294615 - DNA, 157 bp, Homo sapiens; identical to SEQ ID NO: 241029
  chr20:18477825-18477982
  hyper

SEQ ID NO: 294616 - DNA, 83 bp, Homo sapiens; identical to SEQ ID NO: 241030
  chr20:18488298-18488381
  hyper

SEQ ID NO: 294617 - DNA, 107 bp, Homo sapiens; identical to SEQ ID NO: 241031
  chr20:18547799-18547906
  hyper

SEQ ID NO: 294618 - DNA, 100 bp, Homo sapiens
  chr20:19186796-19186896
  hyper
catctggacccaatcattctgcagttctggggctggaaacctgggcgatgaactgagatgaggagatggacacagcactgtataacgtgagaccatccca

SEQ ID NO: 294619 - DNA, 158 bp, Homo sapiens; identical to SEQ ID NO: 205722
  chr20:19192501-19192659
  hyper

SEQ ID NO: 294620 - DNA, 267 bp, Homo sapiens
  chr20:19193616-19193883
  hyper
gagagcagaagggtgagtgcacgctgcctgccccgagtgggcgctgcggctccggcggctcggggctcccggggctgggcgcggggctccttcgggcggcccggccggagccccaggataagcgggctgggttggcggggggagtgggatgccaggcacgaggactccccctgccccacgcagaggcatggaggtggggaccctgagcgccagcagccagcaggcttaggcgtctggccgccctgggaacatttacctgtgcccgcc

SEQ ID NO: 294621 - DNA, 119 bp, Homo sapiens; identical to SEQ ID NO: 205723
  chr20:19673387-19673506
  hyper

SEQ ID NO: 294622 - DNA, 180 bp, Homo sapiens; identical to SEQ ID NO: 205724
  chr20:19738432-19738612
  hyper

SEQ ID NO: 294623 - DNA, 152 bp, Homo sapiens; identical to SEQ ID NO: 205725
  chr20:19739200-19739352
  hyper

SEQ ID NO: 294624 - DNA, 150 bp, Homo sapiens; identical to SEQ ID NO: 205726
  chr20:19739786-19739936
  hyper

SEQ ID NO: 294625 - DNA, 188 bp, Homo sapiens
  chr20:19997708-19997896
  hyper
tggctgcgaactccgctcttctgcttgggtttccgcatcaccagcagcttctttccttcccaggtgtcgccgcctgctttctgcagccgctgcctgggaggggttccgaggttctgggcagccacagccccggaggccttacaggagcgacctggcaattcccgccgccggccgccagaggaagctgc

SEQ ID NO: 294626 - DNA, 40 bp, Homo sapiens; identical to SEQ ID NO: 241038
  chr20:19998405-19998445
  hyper

SEQ ID NO: 294627 - DNA, 188 bp, Homo sapiens; identical to SEQ ID NO: 241039
  chr20:20033011-20033199
  hyper

SEQ ID NO: 294628 - DNA, 176 bp, Homo sapiens; identical to SEQ ID NO: 241040
  chr20:20343529-20343705
  hyper

SEQ ID NO: 294629 - DNA, 58 bp, Homo sapiens; identical to SEQ ID NO: 205727
  chr20:20344271-20344329
  hyper

SEQ ID NO: 294630 - DNA, 93 bp, Homo sapiens; identical to SEQ ID NO: 205728
  chr20:20350750-20350843
  hyper

SEQ ID NO: 294631 - DNA, 120 bp, Homo sapiens; identical to SEQ ID NO: 205729
  chr20:20693388-20693508
  hyper

SEQ ID NO: 294632 - DNA, 219 bp, Homo sapiens
  chr20:21080343-21080562
  hyper
ttacttattttacacgttgtcgtctgctgatgtttaaaagataagaagacatttgtcagggcgggtgcttgaggctctcagaggactccgggagacactgccaaaacgtttccaaactgaatagtcattgggctgccagataattcagaaactatctgtatgagctgtttatcaaattattaaccgcacagatgttgtttggctgaagagcagctgaat

SEQ ID NO: 294633 - DNA, 139 bp, Homo sapiens
  chr20:21084470-21084609
  hyper
gtgtccgaaatcattagacttgagtgatcttgtggacgggggtataagactaactgtttttcctttcgcaactttgggaattgttagtctcctggcatcagtcacgcagcagactgacgataatctgggaaatacaacc

SEQ ID NO: 294634 - DNA, 184 bp, Homo sapiens
  chr20:21086682-21086866
  hyper
ctctaagcccccgtggcagagaaaagaggaatttttaaaaacaaatcttcccttgcctgaggccattttccagccttccacgcgcctttgccggggaaagagtcgatgactcgccctgctcatcggctcagaccagagctaccctgagcccacacctctcctcctctctgcaagacatcccttc

SEQ ID NO: 294635 - DNA, 110 bp, Homo sapiens
  chr20:21087188-21087298
  hyper
tttgggggctgggggatgtctagccactctagagaaacactgcgagccccacgcgggctggtggagcctcttgcctggaaaaagatgtggaaacgcgcaggctgggcgtc

SEQ ID NO: 294636 - DNA, 232 bp, Homo sapiens; identical to SEQ ID NO: 241050
  chr20:21106749-21106981
  hyper

SEQ ID NO: 294637 - DNA, 109 bp, Homo sapiens
  chr20:21489776-21489885
  hyper
ctctggaaacctgagggtctcttgtgatcattctcaccctggaagccctggggcctggaaaagtcaaaatggcctcaggccttctgacagctccgctccaagagacttg

SEQ ID NO: 294638 - DNA, 407 bp, Homo sapiens
  chr20:21495255-21495662
  hyper
agccggaaaattggcgatttgtggcgcctttggaaaagggggagggggcgaaggccgagctgcggaaatctctcctttccatcgttggtggttgcctaaacaagatccggttcaaatggcaagagcccaacttctgtaagcctcctaggtcaatattttggttgaggcttaaggatgagtgctagaaatgacaaggcaagtaattgattccagttaaccgcgagagagcccaaaacccaggagagagctccgctccgggccggccagagccaccaccaagcgacccgcccccttccagccgccctttatttgctaaagactcatttatttccttcactccgcctccccccacctcccacccccaaccccccgcctccacctctctgcggccaaggaggacgcgcagt

SEQ ID NO: 294639 - DNA, 91 bp, Homo sapiens
  chr20:21499015-21499106
  hyper
acgcccgggggaaaggcaggagaggggaggaagagaacctgtgcccctggaagctagaggagagcctcgctctctctgctgctctgggttc

SEQ ID NO: 294640 - DNA, 92 bp, Homo sapiens
  chr20:21499132-21499224
  hyper
cggctggagcgggcgcggggaggctgaacaatcgccggaggcccaggaggggaggcgaatgtacacaggctaagtggccccactccaggaca

SEQ ID NO: 294641 - DNA, 202 bp, Homo sapiens; identical to SEQ ID NO: 205733
  chr20:21501158-21501360
  hyper

SEQ ID NO: 294642 - DNA, 347 bp, Homo sapiens
  chr20:21681908-21682255
  hyper
gtggccagtgtcagcggaaacggtgctccatccaccacagctgacccgactcattttcgataataaacatttccagggtagcgaacatcatggaggcctaggcaaagaaccaactttacgaccgccttggtcagcagcaggccaaaggaaaataagccgcgggaatgggtccgcgaagccaaggacgttatttctcgctcttgggggctctgttttaatgccagttggcagggtcctcaacaccttccatttggggtctggagagtctgtgtgtcctagtcaggagaggcaggttctgtgcaaaacgcactccccacctcgtccttgaggatccactctgttgggag

SEQ ID NO: 294643 - DNA, 56 bp, Homo sapiens
  chr20:21683255-21683311
  hyper
gtaaccccccttgccgccaacccccagtccccagaagggcaggcaccccttcgcgc

SEQ ID NO: 294644 - DNA, 75 bp, Homo sapiens
  chr20:21685758-21685833
  hyper
ggagccctgcaccgcgctggacgctcaccttgacactcccagccagctggggtactgatcccacccttccccggc

SEQ ID NO: 294645 - DNA, 221 bp, Homo sapiens; identical to SEQ ID NO: 205736
  chr20:21686742-21686963
  hyper

SEQ ID NO: 294646 - DNA, 42 bp, Homo sapiens; identical to SEQ ID NO: 241075
  chr20:21689629-21689671
  hyper

SEQ ID NO: 294647 - DNA, 205 bp, Homo sapiens
  chr20:21693262-21693467
  hyper
aatctataagatactgcatacgcacaaagaaaatgtattgcttttatttgttaaagataacttgcagcttcgctccagttacctctgcctcgggattggttcttggaagatcctaaaagtaaactttgtcaaagagcactaggtcgctggcattgtcgcacccggacgctggcaaccccggcctccgtttgacccagccccgggg

SEQ ID NO: 294648 - DNA, 96 bp, Homo sapiens
  chr20:21693512-21693608
  hyper
gccctgcaattgcagttgaatatttaaaaaatgcctctccccattcttagcccctgaattaaatgagcctgacctaggccccggcctccgagggcc

SEQ ID NO: 294649 - DNA, 239 bp, Homo sapiens; identical to SEQ ID NO: 205737
  chr20:21694603-21694842
  hyper

SEQ ID NO: 294650 - DNA, 238 bp, Homo sapiens
  chr20:22557158-22557396
  hyper
gcacattccagatctcatctcggccacccctccctccaagccagggccacctccagacccccggatgtgtagaagcatgcactgccccgaagaaaacgcgttgcccccaggtaacttcaggtacctcctagggctaacgcctccttctatgccatattgagccttatctcttgcttcttcccgcccccctcccacattaaaaggcccccaaagcattgaggagcggcttctctttatg

SEQ ID NO: 294651 - DNA, 258 bp, Homo sapiens
  chr20:22558283-22558541
  hyper
ggtcctacaaactcgcgtcctccggaattcccgagggcaagcccggcacgcgcgagcgtgctcctgcccgtggaaggggggaaatcggcgactgggttgcagggagaatgcgatgataaatggccctgcgtctgctttctgactttctctcctggacccagctcgtaaccccagaggctccccaacctgcctgccgccaagcacggctgtgcgcaaaaggccaccagccgcttcctgcagccagagctaaggttcact

SEQ ID NO: 294652 - DNA, 359 bp, Homo sapiens
  chr20:22558696-22559055
  hyper
caaactcccatgcaccacgcacatcattttctgctgacccccacactagattctggggccaagggggttccccacaccccaccctccactgttctctggaaacatgctgctctcagatcgaatccccagacccgagccgctcgaggggcctgtgtggcttcctcggggccctaccaaactcctctaactgagctcagagcctaagcggtctgagtttgcaactctacgacccctcatccttccaagtcatgcactttccgaaccccctgcaaaaaaacccaacgccttgagtctcagttggctgagcttaccaccagccaagcccgcccgggcgtccgagccctggaagggagaaggac

SEQ ID NO: 294653 - DNA, 380 bp, Homo sapiens; identical to SEQ ID NO: 205740
  chr20:22559242-22559622
  hyper

SEQ ID NO: 294654 - DNA, 201 bp, Homo sapiens; identical to SEQ ID NO: 205741
  chr20:22559772-22559973
  hyper

SEQ ID NO: 294655 - DNA, 64 bp, Homo sapiens
  chr20:22560142-22560206
  hyper
ggcgggtgggaggcggaggcgatgccaaacccccctcaagcgcgtgggaaggccaggcttgttg

SEQ ID NO: 294656 - DNA, 116 bp, Homo sapiens
  chr20:22562393-22562509
  hyper
acaccgtctccccaaagtctcgacccccacttgctctctcacttgtcctcgatccggggtgccagagttagccgggcctgaagccgtcgtcttcttaagaggagttcataatgggc

SEQ ID NO: 294657 - DNA, 325 bp, Homo sapiens
  chr20:22563238-22563563
  hyper
cggatggagttctgccagcgctgctggttctgccggtagaaggggaagaggtccatgatccactggtagatctcgctcagcgtcagcatcttgttggggctctgctggatggccatggtgatgagcgagatgtacgagtagggcggctttgcgtgcgtgtagctgcgcctgtaggtcttggggtcgcgggcgcggctcaggcccgcctgcccgtacatggggctcatggagttcatgttggcgtagggggccaggccgcccatggccccggccgcctgccccccgagcgggctcaggctgggactcaagtgcggccccatgcccg

SEQ ID NO: 294658 - DNA, 34 bp, Homo sapiens; identical to SEQ ID NO: 205743
  chr20:22563602-22563636
  hyper

SEQ ID NO: 294659 - DNA, 101 bp, Homo sapiens; identical to SEQ ID NO: 205744
  chr20:22563663-22563764
  hyper

SEQ ID NO: 294660 - DNA, 360 bp, Homo sapiens; identical to SEQ ID NO: 205745
  chr20:22563794-22564154
  hyper

SEQ ID NO: 294661 - DNA, 47 bp, Homo sapiens; identical to SEQ ID NO: 205746
  chr20:22564188-22564235
  hyper

SEQ ID NO: 294662 - DNA, 1028 bp, Homo sapiens
  chr20:22564265-22565293
  hyper
cggtctccctccagggaccccctcccttgtcccagggaaactgcaaggcagtgcctgtgcggagtgcgggggcggctggaggcactgaacggggcaatagggaaagaaccgagacctgaaccacacgcggctgagctttgcaggcaaaaactttctttctctttgtccactagtctttgactctgcctccacttcagcccccaactcctacccatcttctcctcctcagctccccaccccctcgccggccgacctcccacccctccccagccgcgcgctgccaaacataactctgttaggatagtgcgtggctcggccacgaagaggatttggaggcgccgcaagtcaatatttgatcacaaagttaatattatctcaaggctaacagtgtgtcgtataaaaaagagacccatttgattccaaggagggcggaaaaggcggctgcccagaaaggctggggttgtggggcggggtgggggggtgccagcgagggaagcggtcctgaggttggggaaggagcgagcgccgccgctccacttccccctggaaaagacgagcgcttacctcgggctctgcatagtagctgctccagtcggacggctcgtgcccttccatcttcaccgctcccagcatactggaagccgagtgcatggcagtttaaaatttaacagccacaacaaacgaccagcaatcaccccccacccccaccctcttttaaaaaaaagtcagccaaagcaccgtcccctcctccctccctctctcgcgctccctctccctgggctccactccctctctctccctgggcaggccggaggcggtagttggaagtgggcgggaggtgggggggggcgaggagcggaggaggcccaggccagcgccccgcggtagggagcacccgccgccgccgcgctcacgggctgccgggtggcggctgaggttggcagtgccgagctgccccgaggcggcgggaagcgcgcggcgcgggggctagtgggggggtggggaggaggaggaggaaggaggaggag

SEQ ID NO: 294663 - DNA, 76 bp, Homo sapiens
  chr20:22565353-22565429
  hyper
gtgtggaccgcggagcggacaagtgccgcagtgacgtgggaggctggtgatatagcgcggcgcgctggcgcgggcc

SEQ ID NO: 294664 - DNA, 143 bp, Homo sapiens
  chr20:22565459-22565602
  hyper
gaataatcagctcacacctaggtgagaggtagccgcagccggcgctccgcacctgcccctcagcgcctgccgtccgccccaccgccgcggcgccccgcactcctgggcgggccaggggagcgggctgggcgggcgatcgggca

SEQ ID NO: 294665 - DNA, 318 bp, Homo sapiens
  chr20:22565634-22565952
  hyper
cgggtccacagcgagtcccctgaggaaggagggacctgggaggaaaccaccctctggggcggctccggcctccagcccccgccccgtctcatcgcgccgggcgcccggtgcgcctgtcggagggcgcgtccagcctcagtgcccggcagatccctatgaaagccggatttatttatgccgggtttcttcgctctcagtgctcattctctgtcaaaacagcaagtccatgacagccaatttgcaaagcgctgtcctatttagaaaaactacgtacacacctttaactcgcccgctgctgctcctgcgaggcccctccct

SEQ ID NO: 294666 - DNA, 66 bp, Homo sapiens
  chr20:22567768-22567834
  hyper
cgcctgcccatgggaatgcgagcggggtctacggttagctttaggtagctgggagcgggacaccaa

SEQ ID NO: 294667 - DNA, 259 bp, Homo sapiens; identical to SEQ ID NO: 205750
  chr20:23030486-23030745
  hyper

SEQ ID NO: 294668 - DNA, 326 bp, Homo sapiens; identical to SEQ ID NO: 241089
  chr20:23331168-23331494
  hyper

SEQ ID NO: 294669 - DNA, 276 bp, Homo sapiens
  chr20:23617972-23618248
  hyper
tgtgcctgcccccgcgctgcggcgcagctcgagctggctcctggaagctgatcttaggcgccgggcgcggacctgacgtgtccgtgcggttccaggccaggccagactcagggcattcccggacacgcccgccaagggctcgggggtgacagcgaagaccgggaacagggtccgggtgagaagcccaggcgccggagaggagcagcacggggtccgggagcagcgcggggggaggctgggacggcggggccggggcttcggaccctgcggggggcg

SEQ ID NO: 294670 - DNA, 82 bp, Homo sapiens
  chr20:23618645-23618727
  hyper
caccccaccgcggcctgcactcccttttccggaacgcctcgtccctcccacctcccttctccctccccgcctcccctgcctc

SEQ ID NO: 294671 - DNA, 203 bp, Homo sapiens
  chr20:25065526-25065729
  hyper
atctgtcttcatcagccaggattacccgggatttaactaatgaataaaggttcctcagctcattattttctaaggaagatttccagcccctctgtcgccgaccgcgaatgtgccttggcagcgccaggctgaggttggacctgctgtgagtggctcagcaggcacccctcttgggcttctcagagccgcggctggccaggctg

SEQ ID NO: 294672 - DNA, 109 bp, Homo sapiens; identical to SEQ ID NO: 205752
  chr20:25129521-25129630
  hyper

SEQ ID NO: 294673 - DNA, 317 bp, Homo sapiens; identical to SEQ ID NO: 241096
  chr20:25176135-25176452
  hyper

SEQ ID NO: 294674 - DNA, 83 bp, Homo sapiens; identical to SEQ ID NO: 205753
  chr20:25228118-25228201
  hyper

SEQ ID NO: 294675 - DNA, 40 bp, Homo sapiens; identical to SEQ ID NO: 241098
  chr20:25228555-25228595
  hyper

SEQ ID NO: 294676 - DNA, 150 bp, Homo sapiens
  chr20:25566244-25566394
  hyper
gggggcggggcgagcgaacgggagagggggcgggtcgggtccgggattgcggggcggggtgggggcaaggcggcctccgcaaatctcagggcggctctggccagtttggagcctggggtgacccttggagctgacctcgctggtccctgt

SEQ ID NO: 294677 - DNA, 66 bp, Homo sapiens; identical to SEQ ID NO: 132754
  chr20:25566411-25566477
  hyper

SEQ ID NO: 294678 - DNA, 48 bp, Homo sapiens; identical to SEQ ID NO: 241100
  chr20:25604726-25604774
  hyper

SEQ ID NO: 294679 - DNA, 101 bp, Homo sapiens
  chr20:25677482-25677583
  hyper
gctctgcgccgcccgggactacactacccagaatcctcagcgcggccgggactacgctacccagcatcctcggcgcggcccggaggctatgcgaccctgcg

SEQ ID NO: 294680 - DNA, 113 bp, Homo sapiens
  chr20:26188699-26188812
  hyper
ggaggagagaggatcggcgggcggcgggcggggaagggggcgcagacaggcaagggccggggaccgcgagggcaagggcacctgggagcccgcagaggggcggctgagggaga

SEQ ID NO: 294681 - DNA, 60 bp, Homo sapiens
  chr20:26189532-26189592
  hyper
aggatgggtcacactccccacccgccagccgcccctcgtggggcccgaggggcccgcaga

SEQ ID NO: 294682 - DNA, 126 bp, Homo sapiens
  chr20:26190361-26190487
  hyper
atgccttcccaacgcaccacccgcaggcgaggaagaggagagacaaggggcccccgcgggcgggacgagaagaagggtcccattcgccacgaatgtccgcccctcgcccgtcgcggctcggacacg

SEQ ID NO: 294683 - DNA, 87 bp, Homo sapiens
  chr20:30062956-30063043
  hyper
aaaagtcactgagcggccagggccttggggcggggaccccggggctgccctaatggggcggggctggatggggcggggtcgcggctc

SEQ ID NO: 294684 - DNA, 1022 bp, Homo sapiens; identical to SEQ ID NO: 205755
  chr20:30192834-30193856
  hyper

SEQ ID NO: 294685 - DNA, 203 bp, Homo sapiens; identical to SEQ ID NO: 205756
  chr20:30193992-30194195
  hyper

SEQ ID NO: 294686 - DNA, 303 bp, Homo sapiens; identical to SEQ ID NO: 205757
  chr20:30196329-30196632
  hyper

SEQ ID NO: 294687 - DNA, 247 bp, Homo sapiens; identical to SEQ ID NO: 241107
  chr20:30310626-30310873
  hyper

SEQ ID NO: 294688 - DNA, 447 bp, Homo sapiens; identical to SEQ ID NO: 241108
  chr20:30448991-30449438
  hyper

SEQ ID NO: 294689 - DNA, 304 bp, Homo sapiens; identical to SEQ ID NO: 205758
  chr20:30457820-30458124
  hyper

SEQ ID NO: 294690 - DNA, 54 bp, Homo sapiens; identical to SEQ ID NO: 205759
  chr20:30458610-30458664
  hyper

SEQ ID NO: 294691 - DNA, 70 bp, Homo sapiens; identical to SEQ ID NO: 12901
  chr20:30458690-30458760
  hyper

SEQ ID NO: 294692 - DNA, 495 bp, Homo sapiens; identical to SEQ ID NO: 205761
  chr20:30555391-30555886
  hyper

SEQ ID NO: 294693 - DNA, 269 bp, Homo sapiens; identical to SEQ ID NO: 205762
  chr20:30556403-30556672
  hyper

SEQ ID NO: 294694 - DNA, 43 bp, Homo sapiens
  chr20:30583025-30583068
  hyper
agctcagcctgctggtgcaccgcggtggcgcgcccgacctgct

SEQ ID NO: 294695 - DNA, 59 bp, Homo sapiens
  chr20:30639046-30639105
  hyper
actcctcccctcccccgaccacctcccccagcttgggagtcctctgagctgccaggaag

SEQ ID NO: 294696 - DNA, 138 bp, Homo sapiens
  chr20:30639494-30639632
  hyper
ggtattggaaccctggggtttgtgttctaaatcttagggcagggttagaatccactgaagtgagagttcggatccttccactgggcagattagaatctttgggggcaagttgagtttaaaaatccttcagaggtggga

SEQ ID NO: 294697 - DNA, 298 bp, Homo sapiens; identical to SEQ ID NO: 241113
  chr20:30697227-30697525
  hyper

SEQ ID NO: 294698 - DNA, 36 bp, Homo sapiens
  chr20:30778313-30778349
  hyper
ttcgttggcgctggcggtggaggtggggagaagtgt

SEQ ID NO: 294699 - DNA, 98 bp, Homo sapiens; identical to SEQ ID NO: 241115
  chr20:30795269-30795367
  hyper

SEQ ID NO: 294700 - DNA, 96 bp, Homo sapiens; identical to SEQ ID NO: 205763
  chr20:30946058-30946154
  hyper

SEQ ID NO: 294701 - DNA, 112 bp, Homo sapiens; identical to SEQ ID NO: 205764
  chr20:30946218-30946330
  hyper

SEQ ID NO: 294702 - DNA, 290 bp, Homo sapiens; identical to SEQ ID NO: 12906
  chr20:30946345-30946635
  hyper

SEQ ID NO: 294703 - DNA, 83 bp, Homo sapiens; identical to SEQ ID NO: 205766
  chr20:30954186-30954269
  hyper

SEQ ID NO: 294704 - DNA, 109 bp, Homo sapiens; identical to SEQ ID NO: 205767
  chr20:30956817-30956926
  hyper

SEQ ID NO: 294705 - DNA, 386 bp, Homo sapiens; identical to SEQ ID NO: 205768
  chr20:30959966-30960352
  hyper

SEQ ID NO: 294706 - DNA, 295 bp, Homo sapiens; identical to SEQ ID NO: 205769
  chr20:31015930-31016225
  hyper

SEQ ID NO: 294707 - DNA, 104 bp, Homo sapiens; identical to SEQ ID NO: 205770
  chr20:31017140-31017244
  hyper

SEQ ID NO: 294708 - DNA, 153 bp, Homo sapiens; identical to SEQ ID NO: 205771
  chr20:31017703-31017856
  hyper

SEQ ID NO: 294709 - DNA, 359 bp, Homo sapiens; identical to SEQ ID NO: 205772
  chr20:31019123-31019482
  hyper

SEQ ID NO: 294710 - DNA, 106 bp, Homo sapiens; identical to SEQ ID NO: 205773
  chr20:31020682-31020788
  hyper

SEQ ID NO: 294711 - DNA, 634 bp, Homo sapiens; identical to SEQ ID NO: 205774
  chr20:31021086-31021720
  hyper

SEQ ID NO: 294712 - DNA, 4888 bp, Homo sapiens; identical to SEQ ID NO: 205775
  chr20:31022234-31027122
  hyper

SEQ ID NO: 294713 - DNA, 116 bp, Homo sapiens; identical to SEQ ID NO: 241116
  chr20:31072615-31072731
  hyper

SEQ ID NO: 294714 - DNA, 74 bp, Homo sapiens; identical to SEQ ID NO: 205776
  chr20:31172328-31172402
  hyper

SEQ ID NO: 294715 - DNA, 71 bp, Homo sapiens; identical to SEQ ID NO: 205777
  chr20:31172882-31172953
  hyper

SEQ ID NO: 294716 - DNA, 86 bp, Homo sapiens; identical to SEQ ID NO: 241119
  chr20:31173451-31173537
  hyper

SEQ ID NO: 294717 - DNA, 588 bp, Homo sapiens
  chr20:31350975-31351563
  hyper
gccatgcaggtgggcgtccgccccttgcaactgggatgtggggtcttcaggcgaggcgctgtcccttcccccaatcccagctttaggaaagagctcgtgagtgtgggcttagactcgcgcgggctggggtgtgcgccgtggagggcgtgaggcagagggcgacctcccggggtgctcctgagctgagccatcaagcgcggggagcagcggggctgccctctgcctgtgcacacctggcccgggaggagccggccggaggggcggcgcctccctgtcccggccacgccgcctaccctggggtcttaccttccattcttagcctaactcccgtgtgcggctggccccacttcccagactcgcacactaaggcctcaaaacctctagcaccagctcctggaagataagcttcccggctcgtggttgcatggggagggtgtattgagctccactttatcggggagaaagtggaagcggagaaagacctaacaagttgtaagactgcgctgcccttgggcccaggcttcccgctggaggatctcacctgtggatggagttccgagcccaggtcttgcccgcgcctccagcttt

SEQ ID NO: 294718 - DNA, 41 bp, Homo sapiens; identical to SEQ ID NO: 205779
  chr20:31797761-31797802
  hyper

SEQ ID NO: 294719 - DNA, 179 bp, Homo sapiens; identical to SEQ ID NO: 205780
  chr20:32031787-32031966
  hyper

SEQ ID NO: 294720 - DNA, 349 bp, Homo sapiens; identical to SEQ ID NO: 241122
  chr20:32262417-32262766
  hyper

SEQ ID NO: 294721 - DNA, 363 bp, Homo sapiens; identical to SEQ ID NO: 241123
  chr20:32307859-32308222
  hyper

SEQ ID NO: 294722 - DNA, 240 bp, Homo sapiens; identical to SEQ ID NO: 241124
  chr20:32398868-32399108
  hyper

SEQ ID NO: 294723 - DNA, 104 bp, Homo sapiens; identical to SEQ ID NO: 205782
  chr20:32700168-32700272
  hyper

SEQ ID NO: 294724 - DNA, 88 bp, Homo sapiens; identical to SEQ ID NO: 241126
  chr20:32891251-32891339
  hyper

SEQ ID NO: 294725 - DNA, 112 bp, Homo sapiens; identical to SEQ ID NO: 205783
  chr20:32899334-32899446
  hyper

SEQ ID NO: 294726 - DNA, 339 bp, Homo sapiens
  chr20:32899515-32899854
  hyper
agccggattaagcagttctgtggagttcctcccttcttgtccaccccgctaggggtctctcctttcccgctgtatccacgcccctccctccaggccccctgggcccacctcgaagtcaccgctgggctggggagtacagaggtgggggacttcttagagaccctgggacagggcccccctctctccctcaatccttctcatcccacgcggctccgctgtgagtcgggcgtcccaggagctgccggcccacccatccgcgggtttcttccgttgggggagccctccagactcgtagaatataagagagcgcccctccctagccgcgggccatctctaagc

SEQ ID NO: 294727 - DNA, 633 bp, Homo sapiens; identical to SEQ ID NO: 241128
  chr20:33103991-33104624
  hyper

SEQ ID NO: 294728 - DNA, 33 bp, Homo sapiens; identical to SEQ ID NO: 241129
  chr20:33292057-33292090
  hyper

SEQ ID NO: 294729 - DNA, 68 bp, Homo sapiens; identical to SEQ ID NO: 205786
  chr20:33297165-33297233
  hyper

SEQ ID NO: 294730 - DNA, 398 bp, Homo sapiens; identical to SEQ ID NO: 241131
  chr20:33460460-33460858
  hyper

SEQ ID NO: 294731 - DNA, 483 bp, Homo sapiens; identical to SEQ ID NO: 205787
  chr20:33464343-33464826
  hyper

SEQ ID NO: 294732 - DNA, 131 bp, Homo sapiens; identical to SEQ ID NO: 205788
  chr20:33680634-33680765
  hyper

SEQ ID NO: 294733 - DNA, 66 bp, Homo sapiens; identical to SEQ ID NO: 241133
  chr20:33999825-33999891
  hyper

SEQ ID NO: 294734 - DNA, 300 bp, Homo sapiens; identical to SEQ ID NO: 241134
  chr20:34129687-34129987
  hyper

SEQ ID NO: 294735 - DNA, 59 bp, Homo sapiens; identical to SEQ ID NO: 205789
  chr20:34190072-34190131
  hyper

SEQ ID NO: 294736 - DNA, 495 bp, Homo sapiens; identical to SEQ ID NO: 241136
  chr20:34252602-34253097
  hyper

SEQ ID NO: 294737 - DNA, 137 bp, Homo sapiens; identical to SEQ ID NO: 241137
  chr20:34329369-34329506
  hyper

SEQ ID NO: 294738 - DNA, 256 bp, Homo sapiens; identical to SEQ ID NO: 241138
  chr20:34330350-34330606
  hyper

SEQ ID NO: 294739 - DNA, 469 bp, Homo sapiens; identical to SEQ ID NO: 205791
  chr20:34359742-34360211
  hyper

SEQ ID NO: 294740 - DNA, 550 bp, Homo sapiens; identical to SEQ ID NO: 226133
  chr20:34652340-34652890
  hyper

SEQ ID NO: 294741 - DNA, 237 bp, Homo sapiens; identical to SEQ ID NO: 205792
  chr20:34680127-34680364
  hyper

SEQ ID NO: 294742 - DNA, 987 bp, Homo sapiens
  chr20:34680573-34681560
  hyper
gaggagggggctgagcgccgtgggagggagagcaggagcgagcgcgcgagagagcggggcatttctgcgcagctctagcgcgcctcggagcccgccggggcagccgccggacaccaggaccgcgagccagacagctcccggaagccgcgccgccgccgccaggttagccgcacccgccgtccccctccgcgtcccggggaccccgccgcgtcgggtcccgcgtgtgcgtgtggggtggccgccgagggcggcgggctcgattcccgatctttgggcactgacaggccggcgggccggctccaggagccgcgggcttcggttcgtgtgtgtggggactgtcgcgggtttgtgtgtcggggctccagtctctgggtgtgtgttaggtgtgagcgcgcgtgtgcccgtggatccgtgcgagcggctgctcggtgtgcgcgcgcgtgcgtgtgtgcgccgggtgtgcatctgtgtgtgcgtgtgtgagggtgtgtgccttgcgtgtcttcgcgagtggtgcgtgcgtatctgggtgagggtgcgtgtgtctgcgtgtgtctgtcggtgaatgtatctgtgagagggtgtgtccgaatgtgtagcagtgtgtacacctctgggtgagggcgtgtgccagtggcttcgcttgtggctgcagcctgtggcgggtgtgggtgtgtgtgtgcgcgcgcgtcgctgtgtgcgcgccagtgtaactcccgtgtgtgcgcgtgtgagtgcgggtgtgctcccgcgtagcccccgtgtgcgtgtgcgcggctttgtcttcgcactgccgggaggaagcggtgggggcggcggtccaggcgccgccgccgctgggagctgggcacctggcctgggcggtgggtggcggcggcgggggtgtcccttccccgtcgggcagagactccctgctggcaggtgggcggccacaccccgggggtcgggggaactgggctgacagcagagcccgcgttctgacctgag

SEQ ID NO: 294743 - DNA, 210 bp, Homo sapiens; identical to SEQ ID NO: 241142
  chr20:34824292-34824502
  hyper

SEQ ID NO: 294744 - DNA, 161 bp, Homo sapiens; identical to SEQ ID NO: 205794
  chr20:35201303-35201464
  hyper

SEQ ID NO: 294745 - DNA, 37 bp, Homo sapiens; identical to SEQ ID NO: 205795
  chr20:35201548-35201585
  hyper

SEQ ID NO: 294746 - DNA, 125 bp, Homo sapiens; identical to SEQ ID NO: 12949
  chr20:35201647-35201772
  hyper

SEQ ID NO: 294747 - DNA, 34 bp, Homo sapiens; identical to SEQ ID NO: 241144
  chr20:35234212-35234246
  hyper

SEQ ID NO: 294748 - DNA, 101 bp, Homo sapiens; identical to SEQ ID NO: 241145
  chr20:35374567-35374668
  hyper

SEQ ID NO: 294749 - DNA, 81 bp, Homo sapiens; identical to SEQ ID NO: 241146
  chr20:35402109-35402190
  hyper

SEQ ID NO: 294750 - DNA, 215 bp, Homo sapiens
  chr20:35491515-35491730
  hyper
ccactgcgcgccccttcttgtccggccgtgaggagaacgcggcgctgcaggcgactgctgagcccgggcctgggccgcggcggcccttagccagcgaccagccggccacgtctttgggccgggccggcgacggcgcgcggtggctctttttcctctccggggcaggcgcgggtgcaggcgcgggctggggaccgcagccccggaccgggggctcg

SEQ ID NO: 294751 - DNA, 183 bp, Homo sapiens; identical to SEQ ID NO: 241147
  chr20:35492269-35492452
  hyper

SEQ ID NO: 294752 - DNA, 138 bp, Homo sapiens; identical to SEQ ID NO: 205797
  chr20:35579324-35579462
  hyper

SEQ ID NO: 294753 - DNA, 251 bp, Homo sapiens; identical to SEQ ID NO: 241149
  chr20:35724155-35724406
  hyper

SEQ ID NO: 294754 - DNA, 451 bp, Homo sapiens; identical to SEQ ID NO: 241151
  chr20:36156391-36156842
  hyper

SEQ ID NO: 294755 - DNA, 147 bp, Homo sapiens; identical to SEQ ID NO: 241152
  chr20:36529851-36529998
  hyper

SEQ ID NO: 294756 - DNA, 157 bp, Homo sapiens
  chr20:36530202-36530359
  hyper
gagggtctgtccacggtgtgaaccctagcatcaaagggccagttgagacgctgtccacggtgcccaaaggatgggcccgggtggggcggggggcggggggcggggggggggctggcgctgtcctcctccgtggtgctgaaaccgggaggaccaggct

SEQ ID NO: 294757 - DNA, 244 bp, Homo sapiens; identical to SEQ ID NO: 241154
  chr20:36531041-36531285
  hyper

SEQ ID NO: 294758 - DNA, 293 bp, Homo sapiens
  chr20:36774950-36775243
  hyper
tattggataaaggaccggagagggtggtcacaggctctaggccacatagcgcattgagagtgttggtggcagggggcaggaccagggcagggatgtcctgattcctactccagtgctcttcgtgccccctcccagggctcatgacccacatcccagcgtgcagctcacctgtgcaggccacggcggcgaagacccagcactggccatacttgacgcgctggcagccgtggttcttccagcgccgcaggatgtccacgctgccgatccaggacatggggctgacgccgtccccg

SEQ ID NO: 294759 - DNA, 252 bp, Homo sapiens; identical to SEQ ID NO: 205798
  chr20:36781072-36781324
  hyper

SEQ ID NO: 294760 - DNA, 35 bp, Homo sapiens; identical to SEQ ID NO: 241157
  chr20:36793594-36793629
  hyper

SEQ ID NO: 294761 - DNA, 44 bp, Homo sapiens; identical to SEQ ID NO: 205799
  chr20:36793837-36793881
  hyper

SEQ ID NO: 294762 - DNA, 117 bp, Homo sapiens; identical to SEQ ID NO: 241160
  chr20:37063992-37064109
  hyper

SEQ ID NO: 294763 - DNA, 115 bp, Homo sapiens; identical to SEQ ID NO: 205800
  chr20:37075186-37075301
  hyper

SEQ ID NO: 294764 - DNA, 126 bp, Homo sapiens; identical to SEQ ID NO: 241162
  chr20:37101359-37101485
  hyper

SEQ ID NO: 294765 - DNA, 76 bp, Homo sapiens; identical to SEQ ID NO: 205801
  chr20:37274625-37274701
  hyper

SEQ ID NO: 294766 - DNA, 546 bp, Homo sapiens; identical to SEQ ID NO: 205802
  chr20:37274731-37275277
  hyper

SEQ ID NO: 294767 - DNA, 114 bp, Homo sapiens
  chr20:37303401-37303515
  hyper
cctgtttccctgggtgggagtgggaagggagttttaaactgaattgtgctcagactcccagcccagtcttcccggagccatccgttccttcatccaatgcggacacccatatct

SEQ ID NO: 294768 - DNA, 58 bp, Homo sapiens; identical to SEQ ID NO: 205804
  chr20:37358242-37358300
  hyper

SEQ ID NO: 294769 - DNA, 403 bp, Homo sapiens
  chr20:37433709-37434112
  hyper
cacatctcaaagggcgtcagacgtcagcagaggtacgaccacttccttcctccagcgcttcacctcccttctttccagaaagaggaaatgatgcgagtccacaccgcaggccacagcccccatgtctcggccccagcagctgggggacctggccccacagatctgtccccagcgcaaggccagggccggcccctggacctcctgggaagccttcagactcaggccgcgcaggccttcaagctaggaaccctgagttcctggccctggcattcattctgtgtgaccttgagcaggttaccactcctctctgggcttcaggattcccgtctgtcaaatgggagcagggataccgtccttggcttccctctttccatggtcggggtgggggttaggaaaactattt

SEQ ID NO: 294770 - DNA, 217 bp, Homo sapiens; identical to SEQ ID NO: 205806
  chr20:39318166-39318383
  hyper

SEQ ID NO: 294771 - DNA, 462 bp, Homo sapiens
  chr20:39318415-39318877
  hyper
gggagggcgggctcgaggctccgagagttgtgttcagacccaactcttaacctcaggggacctttctcaggccaagcgagggcccctcctggcgggtgcagtcgcagagccctgaggttcgactccactggccccgccgctccccgcgttcaccccaccgcacaatgttcacagtgaaggcgacgggaaaagcagcagcccaaaggctctgaattcctcttccccgccacacgcacggaatcctgagcccccggagcctcggggccgaggccggcccgggacggtgctccgagtagctctccactgctggggagccggccctgtttttgtttgaacgttttgtaacgattaagcagatcccggcgtcagcccgccgcggagaggctcaaacaggcataaagtgcgaccccaagtggccactgtgcgcaaaggcgccgcgaccgcccggcccacggccggaag

SEQ ID NO: 294772 - DNA, 145 bp, Homo sapiens; identical to SEQ ID NO: 241177
  chr20:39657943-39658088
  hyper

SEQ ID NO: 294773 - DNA, 475 bp, Homo sapiens; identical to SEQ ID NO: 241178
  chr20:39765949-39766424
  hyper

SEQ ID NO: 294774 - DNA, 200 bp, Homo sapiens; identical to SEQ ID NO: 241179
  chr20:39945802-39946002
  hyper

SEQ ID NO: 294775 - DNA, 170 bp, Homo sapiens; identical to SEQ ID NO: 205809
  chr20:39968625-39968795
  hyper

SEQ ID NO: 294776 - DNA, 35 bp, Homo sapiens; identical to SEQ ID NO: 241181
  chr20:39969365-39969400
  hyper

SEQ ID NO: 294777 - DNA, 204 bp, Homo sapiens; identical to SEQ ID NO: 205810
  chr20:40247056-40247260
  hyper

SEQ ID NO: 294778 - DNA, 201 bp, Homo sapiens
  chr20:40321525-40321726
  hyper
tctatttggctgcaagagcgctctgtcgcctgcctcggactctgtttcccagaagtcttcctggaaactacatttcgcagggggctttgcggcgcctacttcctcctggctgattagatgggactggtgccgttggccggacgtttttgggagcttcacaggctgatggggaagggcgaaacctgctcgattaaaacaacc

SEQ ID NO: 294779 - DNA, 220 bp, Homo sapiens
  chr20:41816997-41817217
  hyper
ccttcacagaagtcgcctattccgcttccattttagtaccaagcaaggaaggctctaaagcatttccaacggaatgtccttccagcggcccttaacctcagacgcagcttgtgcaaagacgctgtacctccccacaggttcgttcttttgctctttctttcttcctttccttctttcggtgaaataataaatgggcacagctgttgcttagcgatccgaa

SEQ ID NO: 294780 - DNA, 228 bp, Homo sapiens; identical to SEQ ID NO: 241184
  chr20:42086252-42086480
  hyper

SEQ ID NO: 294781 - DNA, 159 bp, Homo sapiens; identical to SEQ ID NO: 241186
  chr20:42219373-42219532
  hyper

SEQ ID NO: 294782 - DNA, 163 bp, Homo sapiens; identical to SEQ ID NO: 205812
  chr20:42296100-42296263
  hyper

SEQ ID NO: 294783 - DNA, 56 bp, Homo sapiens; identical to SEQ ID NO: 241189
  chr20:42588193-42588249
  hyper

SEQ ID NO: 294784 - DNA, 395 bp, Homo sapiens; identical to SEQ ID NO: 241190
  chr20:42839351-42839746
  hyper

SEQ ID NO: 294785 - DNA, 220 bp, Homo sapiens
  chr20:42876305-42876525
  hyper
caggactgctcacctgggaagcgacaggccctgtctgggccccaggagcacagttctcaattttaggagcatccattctgcctctttccctcccagaaacagccggtctgttggggtgcggggcgggttgggggggctgagaaaagagacaaaggcgaggggaagggaatgggcactgctgggaaggcggcttggtggggtgggaggtgctgctgctgcg

SEQ ID NO: 294786 - DNA, 37 bp, Homo sapiens
  chr20:42876667-42876704
  hyper
gcttggagggtctgtccccagtcgtcgcccacccccc

SEQ ID NO: 294787 - DNA, 144 bp, Homo sapiens; identical to SEQ ID NO: 205814
  chr20:43017166-43017310
  hyper

SEQ ID NO: 294788 - DNA, 131 bp, Homo sapiens; identical to SEQ ID NO: 205815
  chr20:43017399-43017530
  hyper

SEQ ID NO: 294789 - DNA, 140 bp, Homo sapiens; identical to SEQ ID NO: 241193
  chr20:43104449-43104589
  hyper

SEQ ID NO: 294790 - DNA, 80 bp, Homo sapiens; identical to SEQ ID NO: 241194
  chr20:43150903-43150983
  hyper

SEQ ID NO: 294791 - DNA, 292 bp, Homo sapiens; identical to SEQ ID NO: 241195
  chr20:43271169-43271461
  hyper

SEQ ID NO: 294792 - DNA, 48 bp, Homo sapiens; identical to SEQ ID NO: 241196
  chr20:43280693-43280741
  hyper

SEQ ID NO: 294793 - DNA, 72 bp, Homo sapiens; identical to SEQ ID NO: 241197
  chr20:43374344-43374416
  hyper

SEQ ID NO: 294794 - DNA, 46 bp, Homo sapiens; identical to SEQ ID NO: 241199
  chr20:43514296-43514342
  hyper

SEQ ID NO: 294795 - DNA, 119 bp, Homo sapiens; identical to SEQ ID NO: 241200
  chr20:43538513-43538632
  hyper

SEQ ID NO: 294796 - DNA, 131 bp, Homo sapiens; identical to SEQ ID NO: 241201
  chr20:43589113-43589244
  hyper

SEQ ID NO: 294797 - DNA, 81 bp, Homo sapiens; identical to SEQ ID NO: 241202
  chr20:43594829-43594910
  hyper

SEQ ID NO: 294798 - DNA, 227 bp, Homo sapiens
  chr20:43726868-43727095
  hyper
cggggcacgggtccacgctgctcggcgtgtcgctgtcctcgtcccaggcgtgcggctgggtcagccgcctctccaggtagcgcgcgcggcagcacgcggcaagcgcgttctcgcctaggccccagtagtcggcctcctggccaaaggcgaagacgcacagctcgtcgagcacgtgcaggtggccagtgcggtagaagtgcagcaggctcaggaagaagcccgggtgc

SEQ ID NO: 294799 - DNA, 49 bp, Homo sapiens; identical to SEQ ID NO: 205817
  chr20:43729513-43729562
  hyper

SEQ ID NO: 294800 - DNA, 146 bp, Homo sapiens
  chr20:43922022-43922168
  hyper
gccacagcacgctccgtctggcttcccctcccccaggcggcgcagcaagacccaaaaacggaccccgtggaaatcagttttttttatttttttaagaacacaaacaagaaatccaacaaagaactgagcgcagcacgcggcgaggg

SEQ ID NO: 294801 - DNA, 226 bp, Homo sapiens
  chr20:43976986-43977212
  hyper
aagaacagcagcagcgcgaacagacgggcgggggccatggcaccgcggactggagaaggcgcgcaggctgcggcgagtggccccgggcgggcgcgccacccatcttataggcggcctaccggccccgccccggcccgcccccgccccgccgcccgcaccccgcccggaattccccagtggaagcgaggcctgcggggcactgcgcccgcccgcggagttggaaacc

SEQ ID NO: 294802 - DNA, 196 bp, Homo sapiens; identical to SEQ ID NO: 241205
  chr20:43991507-43991703
  hyper

SEQ ID NO: 294803 - DNA, 287 bp, Homo sapiens; identical to SEQ ID NO: 205818
  chr20:44034866-44035153
  hyper

SEQ ID NO: 294804 - DNA, 318 bp, Homo sapiens; identical to SEQ ID NO: 241207
  chr20:44044572-44044890
  hyper

SEQ ID NO: 294805 - DNA, 87 bp, Homo sapiens; identical to SEQ ID NO: 241211
  chr20:44441534-44441621
  hyper

SEQ ID NO: 294806 - DNA, 74 bp, Homo sapiens; identical to SEQ ID NO: 205819
  chr20:44453063-44453137
  hyper

SEQ ID NO: 294807 - DNA, 159 bp, Homo sapiens; identical to SEQ ID NO: 241213
  chr20:44462158-44462317
  hyper

SEQ ID NO: 294808 - DNA, 73 bp, Homo sapiens; identical to SEQ ID NO: 226157
  chr20:44462767-44462840
  hyper

SEQ ID NO: 294809 - DNA, 308 bp, Homo sapiens; identical to SEQ ID NO: 241214
  chr20:44509708-44510016
  hyper

SEQ ID NO: 294810 - DNA, 77 bp, Homo sapiens
  chr20:44519218-44519295
  hyper
gtcggctgggggccgctgcctccgcctccgggcggccctcccggggcacgcggttgtggtggcgcgtgatggcgaag

SEQ ID NO: 294811 - DNA, 71 bp, Homo sapiens
  chr20:44540034-44540105
  hyper
gaactctgcatgtgcgcctgccagcagcgctaggaagagggccccgaagagggccatggcgagcgggcctg

SEQ ID NO: 294812 - DNA, 52 bp, Homo sapiens
  chr20:44540153-44540205
  hyper
cttggacgtccaaccataagtgggaactagcctggatcgttaccctccagat

SEQ ID NO: 294813 - DNA, 149 bp, Homo sapiens; identical to SEQ ID NO: 241216
  chr20:44600903-44601052
  hyper

SEQ ID NO: 294814 - DNA, 45 bp, Homo sapiens; identical to SEQ ID NO: 205820
  chr20:44639093-44639138
  hyper

SEQ ID NO: 294815 - DNA, 170 bp, Homo sapiens; identical to SEQ ID NO: 205821
  chr20:44642199-44642369
  hyper

SEQ ID NO: 294816 - DNA, 579 bp, Homo sapiens
  chr20:44642532-44643111
  hyper
agaaaaatacgccccctggcggacgcagtttagcaaacgtaggggcggctgagtttctgccccctcctctccacgccctcgcgtcgctctacccagcgcctctgcccctgggttgcagggactgcgggcacgcgggctaggaaaggcctcgccggaatctccctcctcgcgttctaggagtacgtgctccctctgcgcccccaaaccgacgtgaccctcctcccctgcagggcgccaggtgtgggtgtacacaggcgcgtcggtgctgggcccgaggcgtctggacaagctgggcctgggagccgacgtggcccaggtgaccggggccctccggagtggcagggggaagatgctgctgttcagcgggcggcgcctctggaggtgagcgccgccgcggccgccggcagggggagcccgggcgccgtcggtccgtccgctagccggctcagcacctgtctcctccgcgcctgcccgcaggttcgacgtgaaggcgcagatggtggatccccggagcgccagcgaggtggaccggatgttccccggggtgcctttggacacgcacgacgtcttccagtaccg

SEQ ID NO: 294817 - DNA, 189 bp, Homo sapiens; identical to SEQ ID NO: 241220
  chr20:44650688-44650877
  hyper

SEQ ID NO: 294818 - DNA, 169 bp, Homo sapiens; identical to SEQ ID NO: 241221
  chr20:44651084-44651253
  hyper

SEQ ID NO: 294819 - DNA, 153 bp, Homo sapiens
  chr20:44658973-44659126
  hyper
tgggtgcggagactcgcaaggagccgaggggcttgggacaagtcctttcgctgctcccgctctcccccgccctcctccgcggcttccttgctccgaggtcttggggccagccaccccctcaggctcccaggccccccgccgcccccgagcggt

SEQ ID NO: 294820 - DNA, 268 bp, Homo sapiens
  chr20:44660337-44660605
  hyper
gcctgcgccgctcgcctgtttcctccccgggagctctggccgccgcagcttaattgaaagccgattcgggttgagagctcccagggggcgggggcggggagggctcagcctcagtctggccctgcctctcgcgcgcgcgccgctcggcgctcccgccatcacccttactccttggctccggggaatcagggcgagtttccccttagctgttctggtcctttgagaactcggaagctcattccccatccccctcaaccagtgcgcctgg

SEQ ID NO: 294821 - DNA, 191 bp, Homo sapiens; identical to SEQ ID NO: 205823
  chr20:44669700-44669891
  hyper

SEQ ID NO: 294822 - DNA, 59 bp, Homo sapiens
  chr20:44686806-44686865
  hyper
gtgactagaagcgcaacagacttctcgccatagtcgagctctcccgctgggggcactgc

SEQ ID NO: 294823 - DNA, 319 bp, Homo sapiens; identical to SEQ ID NO: 241228
  chr20:44718496-44718815
  hyper

SEQ ID NO: 294824 - DNA, 52 bp, Homo sapiens; identical to SEQ ID NO: 205825
  chr20:44879679-44879731
  hyper

SEQ ID NO: 294825 - DNA, 166 bp, Homo sapiens; identical to SEQ ID NO: 205826
  chr20:44935840-44936006
  hyper

SEQ ID NO: 294826 - DNA, 81 bp, Homo sapiens; identical to SEQ ID NO: 205827
  chr20:44937643-44937724
  hyper

SEQ ID NO: 294827 - DNA, 71 bp, Homo sapiens; identical to SEQ ID NO: 241236
  chr20:45035361-45035432
  hyper

SEQ ID NO: 294828 - DNA, 79 bp, Homo sapiens; identical to SEQ ID NO: 205828
  chr20:45142272-45142351
  hyper

SEQ ID NO: 294829 - DNA, 142 bp, Homo sapiens; identical to SEQ ID NO: 241239
  chr20:45440169-45440311
  hyper

SEQ ID NO: 294830 - DNA, 51 bp, Homo sapiens
  chr20:45523120-45523171
  hyper
gtcctctccgagccgtcgttcctttcacaggggtcatgcctgggttgcagg

SEQ ID NO: 294831 - DNA, 106 bp, Homo sapiens
  chr20:45524629-45524735
  hyper
ccttttcttttctttccccttccccgaaatgctatgtaatcttcaattactttttaaaatataacgtggaggtataaatcaccccggtaagaggtaccttttaatt

SEQ ID NO: 294832 - DNA, 186 bp, Homo sapiens; identical to SEQ ID NO: 241243
  chr20:45825083-45825269
  hyper

SEQ ID NO: 294833 - DNA, 149 bp, Homo sapiens; identical to SEQ ID NO: 205829
  chr20:45985481-45985630
  hyper

SEQ ID NO: 294834 - DNA, 473 bp, Homo sapiens; identical to SEQ ID NO: 241245
  chr20:46130570-46131043
  hyper

SEQ ID NO: 294835 - DNA, 47 bp, Homo sapiens
  chr20:46413279-46413326
  hyper
cttccaccccgagacggcatctctctaccctgctgccctcccagtga

SEQ ID NO: 294836 - DNA, 480 bp, Homo sapiens
  chr20:46413619-46414099
  hyper
tccaaccactctgaagatccggcccactgcttccccgagtcctgcccggacaagccccacgtgggctggcatctaccggtcccttgggtctaaaccctaagggtcaacaaggccatgcccctgcggatggccggcccaggcgcgctcccctacccggggccgcctgtgctcggtgtgccgtgtccgcgggtcaggggcgcggcgggaagtcctcgcccgcccgccagccagcggggtcaaacaggtcatccctctgcggacggccggcgccggagcctccctcccgcccgcccggacccacctccgcaagcagcgctggggctggagccgggcggtccggaccagccccggctcacctgggcggcgctcgcggccgggctcacgccggggaaggctccggccgccgcgagcccccgcccgagccccgcgtcccccagccacccacctgccccccacgccccactcaccagcgcgcacggc

SEQ ID NO: 294837 - DNA, 230 bp, Homo sapiens
  chr20:46414405-46414635
  hyper
tggcacggcgctaccgccccccgctcgcctgcccgccggcctccacgcaggggaggcgggcgcgctccggggcggggagcgtcgggccgggagccgcggacggctggggcccggggcgcggggggcccagccgcggtgccctcctcgagccctccgcgcgctagcgcttttacctccggcctgggggacgcgcggcccgcgacccggccctgcctgtccccggcgcacgg

SEQ ID NO: 294838 - DNA, 223 bp, Homo sapiens; identical to SEQ ID NO: 205831
  chr20:46414914-46415137
  hyper

SEQ ID NO: 294839 - DNA, 74 bp, Homo sapiens; identical to SEQ ID NO: 205832
  chr20:46415520-46415594
  hyper

SEQ ID NO: 294840 - DNA, 165 bp, Homo sapiens; identical to SEQ ID NO: 241248
  chr20:47662583-47662748
  hyper

SEQ ID NO: 294841 - DNA, 31 bp, Homo sapiens; identical to SEQ ID NO: 241249
  chr20:47805122-47805153
  hyper

SEQ ID NO: 294842 - DNA, 353 bp, Homo sapiens; identical to SEQ ID NO: 241250
  chr20:47835790-47836143
  hyper

SEQ ID NO: 294843 - DNA, 424 bp, Homo sapiens; identical to SEQ ID NO: 241251
  chr20:47895001-47895425
  hyper

SEQ ID NO: 294844 - DNA, 59 bp, Homo sapiens; identical to SEQ ID NO: 205833
  chr20:47934765-47934824
  hyper

SEQ ID NO: 294845 - DNA, 124 bp, Homo sapiens; identical to SEQ ID NO: 205834
  chr20:48099000-48099124
  hyper

SEQ ID NO: 294846 - DNA, 288 bp, Homo sapiens
  chr20:48099573-48099861
  hyper
gggggagctgcatgaaaactttctttctttatctttttctttctttcttcttcttctttccttcttttttttttttttaacgagttctcttcttttccttccccttctcgagataatcaagattttgggggtgggggaatggcagcgggcttttttccaaatcttaaaagatttgggggaattccgggggttccaggtgcccacctgtccgaggtcacaacagacggggtgtgcacaacagcccctctgtcctggagcgacccctcttcccaaacactggagcatctc

SEQ ID NO: 294847 - DNA, 545 bp, Homo sapiens
  chr20:48100505-48101050
  hyper
gggaccgcgcatcgtcccggccgcccgggcgcccccgcccgtgggcagcggcggtcccggggccgggctgagccgggcctaccccggccgggcaggcaactcgcccgggctgcaggcgccgcggggccggggcgcgctctccgaggcggggggcgccggcgggcgccgggggcgcgggggcaggaccgcggccgcgcggcacctcctccacctcctcctcctcctgctcccgcggcggcggcggcggcggctgcctgggcgagatcaacaagtcggggctgagcttcggctccgcgctcgctgctattctgtcccgcacttcggagcgcccggagccgggcaccaaggcaggacggcgccacctgcgggtcggaagcgagcgcggcttaactcctgcctgcccggcccagcctgccggggaggccgggggcgggctccgggatcgggccaaggagacgcgcgtggccgtgcatccctctccacccaggccacctgcacagctggcctcgcgatcccgccttccttcgtcccgtcaacaacgtgtg

SEQ ID NO: 294848 - DNA, 97 bp, Homo sapiens; identical to SEQ ID NO: 226172
  chr20:48194980-48195077
  hyper

SEQ ID NO: 294849 - DNA, 164 bp, Homo sapiens; identical to SEQ ID NO: 205838
  chr20:48330532-48330696
  hyper

SEQ ID NO: 294850 - DNA, 1007 bp, Homo sapiens
  chr20:48598696-48599703
  hyper
gacccgcctcttaacggtcgccgcgtcccgtctctcccccaccaaagcacacttccctttgcattgtaattatctgtttacttcgtctgtctccctcactggaccagaagctacccttcgggagaggctctgagtgttctgtccggggctgtgccctggccccaggtacagtgccccacacgtgctgggcgctccgtaaacactggataagggaaggaacgggtgctcttggctagctgggccaggctgctttgcaaaaaggccgtggcatttcaagccgccgagagccacgtgcggtgtccctttcctcgcttcctccccagtgatgtgcgtttccctcgtcaatgccacgctctccaggcgccagccgggcggaggaaatttccgccccctcccaagcccgaggcgggggcgggcgtcggaaggtcaggtgtcccggccggcgcgcagcgccagggggcgtcagaagcgctcagaccaccgggcgctgagccggtgggcgcgcggcgtcctgccggggtcccacctcgcagaggcctcgcttcgctcgacgtcccgccccggacagccccagcaccggggacgacccgcgctgcgccagcgaaccccgcctcggaggagtccccgcccgggctctcaccgccacgcggcgcgagcccggccagcagccggcgcacctgctcggggagtggccttcggcggagacgagcctccgattggcgcggaggtgacaaaggggcgtggcagataaggccccgcccctcccaccccccaccacccccccggagtacttaagggagttggcggcgctgctgcattcattgcgccgcggcacggcctagcgagtggttcttctgcgctactgctgcgcgaatcggcgaccccagtgcctcgaccactatgccgcgctctttcctcgtcaggaagccctccgaccccaatcggaagcctaactacagcgagctgcaggactctaatccaggtgcgttggaggggttctgggctcc

SEQ ID NO: 294851 - DNA, 131 bp, Homo sapiens; identical to SEQ ID NO: 205840
  chr20:48729833-48729964
  hyper

SEQ ID NO: 294852 - DNA, 184 bp, Homo sapiens; identical to SEQ ID NO: 205841
  chr20:48771157-48771341
  hyper

SEQ ID NO: 294853 - DNA, 147 bp, Homo sapiens
  chr20:48789173-48789320
  hyper
agcgtcctccccatcccgttcggcctctgcctccaccgtcgtctctgtaacccgttccctgtgggagagtctctgttgcggtgttcaggggtttcggttttctggctgaacagtgattaacgcgagggaaggcgctgacggcaaggt

SEQ ID NO: 294854 - DNA, 588 bp, Homo sapiens; identical to SEQ ID NO: 205842
  chr20:49224900-49225488
  hyper

SEQ ID NO: 294855 - DNA, 323 bp, Homo sapiens; identical to SEQ ID NO: 205843
  chr20:49225976-49226299
  hyper

SEQ ID NO: 294856 - DNA, 166 bp, Homo sapiens
  chr20:49410874-49411040
  hyper
aggaagacgaggaccgtcacactcggccttccctaaattccaggaccctccgcccgatgcaaactagatgctttagtaggatgggaacgggtggggggcgggcggctttgggcttcctctaagctagcgcctctctaacccggacgcccgttagaatcacccgggg

SEQ ID NO: 294857 - DNA, 139 bp, Homo sapiens; identical to SEQ ID NO: 241261
  chr20:49575067-49575206
  hyper

SEQ ID NO: 294858 - DNA, 67 bp, Homo sapiens
  chr20:49575842-49575909
  hyper
tgccgtacactcaggcccttacgccagccactgccctagacctggtccgccgatatgatgtggtggc

SEQ ID NO: 294859 - DNA, 143 bp, Homo sapiens
  chr20:49575939-49576082
  hyper
cctggttaatgacgcatgtgtgctggcgggtcggcccctcgtgtctgccagtgccttgcgcttcgagggccaaatcacagtctaccattatgacggtggcccttgctatcgctgcatattcccccaaccacccccagcggaga

SEQ ID NO: 294860 - DNA, 315 bp, Homo sapiens
  chr20:50158039-50158354
  hyper
aagcattgggcccagcccggggaagtccccagcccccagcaactgagggcagttggaggcacagagtgacaaagttcaggcagaaagagcctgtgtccttctgaatccatgctgcagctgcccctcaccctaccccatcccaccacatccattaggactaagcgtagaagatcacttaatatagctcagaccaatcctcttgtgagtggtaagtgatgggttcagcagcagaacccagggaggaaatgggccggccttataataccaaaggttttaaccctctccagcatcagacagacaacctcttcctcagtt

SEQ ID NO: 294861 - DNA, 976 bp, Homo sapiens; identical to SEQ ID NO: 241267
  chr20:50158713-50159689
  hyper

SEQ ID NO: 294862 - DNA, 382 bp, Homo sapiens; identical to SEQ ID NO: 241268
  chr20:50179176-50179558
  hyper

SEQ ID NO: 294863 - DNA, 590 bp, Homo sapiens; identical to SEQ ID NO: 205847
  chr20:50383655-50384245
  hyper

SEQ ID NO: 294864 - DNA, 249 bp, Homo sapiens; identical to SEQ ID NO: 205848
  chr20:50384400-50384649
  hyper

SEQ ID NO: 294865 - DNA, 243 bp, Homo sapiens; identical to SEQ ID NO: 205849
  chr20:50384928-50385171
  hyper

SEQ ID NO: 294866 - DNA, 88 bp, Homo sapiens; identical to SEQ ID NO: 205850
  chr20:50385230-50385318
  hyper

SEQ ID NO: 294867 - DNA, 126 bp, Homo sapiens; identical to SEQ ID NO: 205851
  chr20:50417183-50417309
  hyper

SEQ ID NO: 294868 - DNA, 265 bp, Homo sapiens; identical to SEQ ID NO: 205852
  chr20:50418076-50418341
  hyper

SEQ ID NO: 294869 - DNA, 296 bp, Homo sapiens; identical to SEQ ID NO: 205853
  chr20:50722302-50722598
  hyper

SEQ ID NO: 294870 - DNA, 119 bp, Homo sapiens; identical to SEQ ID NO: 241275
  chr20:50808101-50808220
  hyper

SEQ ID NO: 294871 - DNA, 98 bp, Homo sapiens; identical to SEQ ID NO: 241276
  chr20:50808683-50808781
  hyper

SEQ ID NO: 294872 - DNA, 266 bp, Homo sapiens; identical to SEQ ID NO: 241277
  chr20:51588707-51588973
  hyper

SEQ ID NO: 294873 - DNA, 673 bp, Homo sapiens
  chr20:51589093-51589766
  hyper
agtgaattccagattttctgtctttccaaaacccgctcctgtcctctcgcatatcactcacagacggggatctgacagcagccacaaacctacagtgagtgatcgctctccccccggcacgaatccgccatagagatcggcgaggaggaggaggaggaggaggaagaaaagaaggaggaggtggaggaggaggtggaggaggaggaggaggagggaaagaggagaaggaagaagaagaaaaagaagaaacccactaccttcccaggattgccttttttttttccttatctttacgcgcgagtgtgcctgtggcgcgtgtgcgcccctcgtcccttccatccgaacccgggcttggatgtttaataaagaaatcaagtgtctcaacagtcaccaaaaaaaaaaaaaaccgcaaaaacaaaaccaaaaaaattccaaaagcaaaaacaaaaaagagagaggaaaaaaaattcaaaataaacaaacaaacaaacaaggcagaaccaacctctacttcaaagcagccggcacaagccacccgtgtctgccacccagagaggggggtctctggcccgtggtggaggagttgcaggggggatcgtcagggggacagaggccgagtgacgtcctaggagccaccgggcaagaggcggaggagacccagagaggccagaga

SEQ ID NO: 294874 - DNA, 77 bp, Homo sapiens; identical to SEQ ID NO: 205854
  chr20:51590002-51590079
  hyper

SEQ ID NO: 294875 - DNA, 166 bp, Homo sapiens; identical to SEQ ID NO: 205855
  chr20:52209197-52209363
  hyper

SEQ ID NO: 294876 - DNA, 407 bp, Homo sapiens; identical to SEQ ID NO: 241280
  chr20:52259563-52259970
  hyper

SEQ ID NO: 294877 - DNA, 191 bp, Homo sapiens
  chr20:52789210-52789401
  hyper
tgccctgttgccagagagaacgcaggtgctgggtgcacagcacggcttttccgtggaccgactctaatctgtacaagagctcagggttgcgatggcacgggagaggggctttggtatccgccctacgtaagaagcttccaaccccagggaactctaactccgcctcttcacaatttccaggcgccgtcagg

SEQ ID NO: 294878 - DNA, 402 bp, Homo sapiens
  chr20:52790210-52790612
  hyper
ctgggaaaaggaagcaaagagggccagctggtgtgatggagcggggtgaggcgggacaggcagcagaaaggacctcggcgaggatgctcgacgctgcaccacgcgacagcctcagagcattggtgcctccttgcactggccgcaggggctggaagagggtggccggtgtctggggacctcttgaaaagggaaagctgggagtcctcctgttggtccgcaaggctgacctctagggtctggctggagccacggggaggtgtcaaggagggtagatgagatgctgctggcgctgcgtttcctcctgtccctctccatgttcctatgcccagggaccatgcatttatggagacagagcatgccctgggtggccaatgagcacgcagaggagggcggagtggcccc

SEQ ID NO: 294879 - DNA, 60 bp, Homo sapiens; identical to SEQ ID NO: 205858
  chr20:53092081-53092141
  hyper

SEQ ID NO: 294880 - DNA, 180 bp, Homo sapiens; identical to SEQ ID NO: 205859
  chr20:54578794-54578974
  hyper

SEQ ID NO: 294881 - DNA, 151 bp, Homo sapiens; identical to SEQ ID NO: 57368
  chr20:54579139-54579290
  hyper

SEQ ID NO: 294882 - DNA, 118 bp, Homo sapiens
  chr20:54579755-54579873
  hyper
caggctgagaagaacgcgaggctgtgttcatggccaggacgccagcgactcccactttcgcctggtcaaaaaaatcccccaaacctggtgtcacccagaggtagggagggaggcagcg

SEQ ID NO: 294883 - DNA, 64 bp, Homo sapiens
  chr20:54919370-54919434
  hyper
ctcagctcccaggccagccgtggctcaggaagcctcccacgtcgggtagaatcccaggaatcca

SEQ ID NO: 294884 - DNA, 393 bp, Homo sapiens; identical to SEQ ID NO: 205861
  chr20:54934126-54934519
  hyper

SEQ ID NO: 294885 - DNA, 871 bp, Homo sapiens; identical to SEQ ID NO: 241287
  chr20:54966815-54967686
  hyper

SEQ ID NO: 294886 - DNA, 275 bp, Homo sapiens; identical to SEQ ID NO: 205862
  chr20:55203829-55204104
  hyper

SEQ ID NO: 294887 - DNA, 216 bp, Homo sapiens; identical to SEQ ID NO: 205863
  chr20:55205088-55205304
  hyper

SEQ ID NO: 294888 - DNA, 135 bp, Homo sapiens; identical to SEQ ID NO: 205864
  chr20:55206463-55206598
  hyper

SEQ ID NO: 294889 - DNA, 109 bp, Homo sapiens; identical to SEQ ID NO: 205865
  chr20:55206774-55206883
  hyper

SEQ ID NO: 294890 - DNA, 124 bp, Homo sapiens; identical to SEQ ID NO: 241291
  chr20:55503342-55503466
  hyper

SEQ ID NO: 294891 - DNA, 70 bp, Homo sapiens
  chr20:55532710-55532780
  hyper
agtaggggcaggggcgggtgtttactgggtcatttaaccgggtttctattttttaaagtttccttttcta

SEQ ID NO: 294892 - DNA, 66 bp, Homo sapiens; identical to SEQ ID NO: 133197
  chr20:55532850-55532916
  hyper

SEQ ID NO: 294893 - DNA, 103 bp, Homo sapiens
  chr20:55588994-55589097
  hyper
ggatcccctatcagagatctccaaggaaggccccgcctccacctgcccctcccgcaggagagcgctgctgcagaatctgccgcctggccggtgttcacccagc

SEQ ID NO: 294894 - DNA, 282 bp, Homo sapiens
  chr20:55839321-55839603
  hyper
ccccaggtgcccagcgtggggcttcagtatcattatttccatgttgacacagcgcccgtgggcgtgagtttgctgtcttgacttggttcgggttttcgcagcaagttacacaagtagaatgaaagcggctcaggaaacagcgctatcggggtgtgttatctcggaaaccaaatatttgatcatcagtcccgcagcgcgctggcgctgccggggggttagtttgagcaagtctggagaatgtgcgcgcacatatggagggggagctccccggccctcgctgca

SEQ ID NO: 294895 - DNA, 37 bp, Homo sapiens
  chr20:55839779-55839816
  hyper
aatacttaaaatagaagactagcggcagggcacagtg

SEQ ID NO: 294896 - DNA, 586 bp, Homo sapiens
  chr20:55840279-55840865
  hyper
cgaggggacaggtagggcttgacagggagggtaagggggtgcgacggccgcgatgccagagccaggcagggctgagaggggcccaggaagggcggcaaggcagcctcgccgggaagggccctttacatccaggtagcgcgagccgcgccggcccgggacagctcacatgaccgagccccgcgctttgaacggcccttgcctccagccccagagatgcggccggcggcgtaacatggaggggacttcggaggatccctccttcccagtaacccctacaggctcaccgaacccagcgcgcccgacctgggggcgcacacagcttgggagtcatagggctgtgggtgggagaccctcgggcaggcactgcgatttcagccaggagcggaaagctgggcgggctgcatagaagaagcggctccctccctcccagtctcaaagtgcccccgaaaggagacgcgtaccctcgcctgcccttactcaccgaggttgacgaagctcatgaccatgtcggcgtcggtgaggaaatggctatcttgcaggctggccagaggggggccctgggtactgaagacggccttgtaggggt

SEQ ID NO: 294897 - DNA, 117 bp, Homo sapiens; identical to SEQ ID NO: 205868
  chr20:55841873-55841990
  hyper

SEQ ID NO: 294898 - DNA, 457 bp, Homo sapiens; identical to SEQ ID NO: 241297
  chr20:55926142-55926599
  hyper

SEQ ID NO: 294899 - DNA, 536 bp, Homo sapiens; identical to SEQ ID NO: 241298
  chr20:55964189-55964725
  hyper

SEQ ID NO: 294900 - DNA, 99 bp, Homo sapiens
  chr20:55965047-55965146
  hyper
tcccatccccactgtgcagagggctagagcgggagctgggggagggagaggtcagaggtcaaggctgccgcgtggagcgtgggccgtggagtgggggag

SEQ ID NO: 294901 - DNA, 145 bp, Homo sapiens; identical to SEQ ID NO: 205870
  chr20:55966824-55966969
  hyper

SEQ ID NO: 294902 - DNA, 431 bp, Homo sapiens; identical to SEQ ID NO: 241300
  chr20:56073581-56074012
  hyper

SEQ ID NO: 294903 - DNA, 847 bp, Homo sapiens; identical to SEQ ID NO: 241301
  chr20:56284038-56284885
  hyper

SEQ ID NO: 294904 - DNA, 545 bp, Homo sapiens; identical to SEQ ID NO: 241302
  chr20:56285253-56285798
  hyper

SEQ ID NO: 294905 - DNA, 123 bp, Homo sapiens
  chr20:56725940-56726063
  hyper
ctggcaaccggtctcccaggagacgcgagacgctgagcccagggccagagcttgcggggcgcacagagcccccaggcctcatggcgcagaaacctctcagcaccgcggcggctgaacgcatga

SEQ ID NO: 294906 - DNA, 448 bp, Homo sapiens
  chr20:56784797-56785245
  hyper
gaaaataatatccacgtggttacatatttttcaaaacagtgtctactatccaaagatcaacagagcacaaaagtaccaagagtggaaaatctctggtgtataacggcctaacgggaaaggagaaaattggggaatgcaacaggatctgcaattcgggtgggggcggatggacgcggatggacggcccgcctggatccgcgcgaggcgccactcggggagttgatctgcggtctcgcagtgacacctacaggccgccgtggccgcgcacctgcggcaactgcgttcgacagcgccacctggcgggagccgacgccggcaggcccggagaggattttcttcgtgaatccaagacagaggggtggaaagtgctcaggacctctggggtgtgtcctgtgggccgctggggctggggtgcagcccacgaggaagtgtccgtggggtgtgcgta

SEQ ID NO: 294907 - DNA, 224 bp, Homo sapiens; identical to SEQ ID NO: 226188
  chr20:56811736-56811960
  hyper

SEQ ID NO: 294908 - DNA, 57 bp, Homo sapiens; identical to SEQ ID NO: 241307
  chr20:56964789-56964846
  hyper

SEQ ID NO: 294909 - DNA, 115 bp, Homo sapiens; identical to SEQ ID NO: 241308
  chr20:57056686-57056801
  hyper

SEQ ID NO: 294910 - DNA, 188 bp, Homo sapiens
  chr20:57090173-57090361
  hyper
gatgcgctccttgcgtcaaagcgcacccctagccaggccgttccctggaagggcaagcggggcggggagttcctctaagccccgccagtcctgggacccctgaagtttctattcaggtcttccagctactcctggaaaagtcgcgtcaacttggatcccagcaaacccagaagcgcagtgaaagtggc

SEQ ID NO: 294911 - DNA, 127 bp, Homo sapiens; identical to SEQ ID NO: 205874
  chr20:57225466-57225593
  hyper

SEQ ID NO: 294912 - DNA, 102 bp, Homo sapiens; identical to SEQ ID NO: 241311
  chr20:57226047-57226149
  hyper

SEQ ID NO: 294913 - DNA, 324 bp, Homo sapiens; identical to SEQ ID NO: 241312
  chr20:57227598-57227922
  hyper

SEQ ID NO: 294914 - DNA, 208 bp, Homo sapiens; identical to SEQ ID NO: 226190
  chr20:57414593-57414801
  hyper

SEQ ID NO: 294915 - DNA, 158 bp, Homo sapiens; identical to SEQ ID NO: 205875
  chr20:57415180-57415338
  hyper

SEQ ID NO: 294916 - DNA, 302 bp, Homo sapiens; identical to SEQ ID NO: 205876
  chr20:57415539-57415841
  hyper

SEQ ID NO: 294917 - DNA, 2076 bp, Homo sapiens; identical to SEQ ID NO: 205877
  chr20:57428311-57430387
  hyper

SEQ ID NO: 294918 - DNA, 86 bp, Homo sapiens; identical to SEQ ID NO: 241313
  chr20:57465844-57465930
  hyper

SEQ ID NO: 294919 - DNA, 100 bp, Homo sapiens; identical to SEQ ID NO: 205878
  chr20:57466877-57466977
  hyper

SEQ ID NO: 294920 - DNA, 33 bp, Homo sapiens; identical to SEQ ID NO: 205879
  chr20:57470653-57470686
  hyper

SEQ ID NO: 294921 - DNA, 251 bp, Homo sapiens; identical to SEQ ID NO: 205880
  chr20:57478608-57478859
  hyper

SEQ ID NO: 294922 - DNA, 397 bp, Homo sapiens; identical to SEQ ID NO: 205881
  chr20:57484445-57484842
  hyper

SEQ ID NO: 294923 - DNA, 204 bp, Homo sapiens; identical to SEQ ID NO: 205882
  chr20:57485751-57485955
  hyper

SEQ ID NO: 294924 - DNA, 63 bp, Homo sapiens; identical to SEQ ID NO: 241315
  chr20:57556038-57556101
  hyper

SEQ ID NO: 294925 - DNA, 228 bp, Homo sapiens; identical to SEQ ID NO: 241316
  chr20:57579614-57579842
  hyper

SEQ ID NO: 294926 - DNA, 674 bp, Homo sapiens; identical to SEQ ID NO: 241317
  chr20:57581889-57582563
  hyper

SEQ ID NO: 294927 - DNA, 57 bp, Homo sapiens; identical to SEQ ID NO: 205883
  chr20:57797335-57797392
  hyper

SEQ ID NO: 294928 - DNA, 347 bp, Homo sapiens
  chr20:57797935-57798282
  hyper
gagcaggctgaagccgaaggaagggagagcagggttttgatcctagttccttggcttctgcaaatcggctgggaccccccgctgagcaagcgactgtcgtcacggcccccgcaccagacgaccccagcctgtggatgatgtttcactgccctcacataaacgccacccagaaatgcaagagtaagaatgttcacgaagaggggaggcaggagccccagctgataacaggaggaggcaggaagggggccttggaggaggtcagaggggggacattatttcagtttcccaggaccagggtgagagatgggggtgaaagaagaaaaaggacaaaacgaggtgccgaaggc

SEQ ID NO: 294929 - DNA, 176 bp, Homo sapiens; identical to SEQ ID NO: 205885
  chr20:57875365-57875541
  hyper

SEQ ID NO: 294930 - DNA, 223 bp, Homo sapiens; identical to SEQ ID NO: 205886
  chr20:57875889-57876112
  hyper

SEQ ID NO: 294931 - DNA, 254 bp, Homo sapiens; identical to SEQ ID NO: 205887
  chr20:57978841-57979095
  hyper

SEQ ID NO: 294932 - DNA, 135 bp, Homo sapiens; identical to SEQ ID NO: 205888
  chr20:58090760-58090895
  hyper

SEQ ID NO: 294933 - DNA, 90 bp, Homo sapiens
  chr20:58152282-58152372
  hyper
cggggaaccggcggctacacctcccgcccggctgtccctttaacgtttctagggcatccctggaaggcccgggcacggcgctgaggtctc

SEQ ID NO: 294934 - DNA, 75 bp, Homo sapiens
  chr20:58152388-58152463
  hyper
cgcccgggcgaggctgcggctccgggcgggtcaaggtcgcagcggagcccctcggagcccccgcccggcggagag

SEQ ID NO: 294935 - DNA, 141 bp, Homo sapiens; identical to SEQ ID NO: 241323
  chr20:58179412-58179553
  hyper

SEQ ID NO: 294936 - DNA, 88 bp, Homo sapiens
  chr20:58180712-58180800
  hyper
ggcagagccgccggcagggagacgaagggcgtgcgccaggacagagcccggtttcgtgacagcgtgtggactccgtccactcttccac

SEQ ID NO: 294937 - DNA, 104 bp, Homo sapiens; identical to SEQ ID NO: 241324
  chr20:58509170-58509274
  hyper

SEQ ID NO: 294938 - DNA, 129 bp, Homo sapiens; identical to SEQ ID NO: 205890
  chr20:58514400-58514529
  hyper

SEQ ID NO: 294939 - DNA, 285 bp, Homo sapiens
  chr20:58514845-58515130
  hyper
cgggctcccagggggcctacaggcccgcggctccagggccacgccgccgtccaggtccgacaggcagctgaggctccgggggccgagcttccgggatcccagggcgctaggcaggaccgcggagctcgggcctctggacatggccccgccggccgtcggaagatgaggcagggatgagagacgacctcccgaccccgcgacagctccctccgtgctcagaagccgcagagagtccaccgtatctgcaacctgcgggggacctctcgggcccggtgcgccctaccc

SEQ ID NO: 294940 - DNA, 111 bp, Homo sapiens
  chr20:58515465-58515576
  hyper
gagctgcgcgcctccgcctccagctcccctgccgcagcgcgccgcagccgggcgtccccgcgcgggcgccggagaggaaggaaggctggcagcctcgtcacgtgtccgctg

SEQ ID NO: 294941 - DNA, 38 bp, Homo sapiens
  chr20:59804278-59804316
  hyper
ggggaaggacgggacgcatcactgctgatgccccttct

SEQ ID NO: 294942 - DNA, 164 bp, Homo sapiens; identical to SEQ ID NO: 205891
  chr20:60552337-60552501
  hyper

SEQ ID NO: 294943 - DNA, 36 bp, Homo sapiens; identical to SEQ ID NO: 205892
  chr20:60639843-60639879
  hyper

SEQ ID NO: 294944 - DNA, 52 bp, Homo sapiens; identical to SEQ ID NO: 241327
  chr20:60697691-60697743
  hyper

SEQ ID NO: 294945 - DNA, 180 bp, Homo sapiens; identical to SEQ ID NO: 205893
  chr20:60757905-60758085
  hyper

SEQ ID NO: 294946 - DNA, 46 bp, Homo sapiens
  chr20:60794655-60794701
  hyper
ggccgggtcccctggtggggcgtgtgcctgcgggagccacccaggt

SEQ ID NO: 294947 - DNA, 93 bp, Homo sapiens; identical to SEQ ID NO: 241330
  chr20:60813107-60813200
  hyper

SEQ ID NO: 294948 - DNA, 243 bp, Homo sapiens; identical to SEQ ID NO: 205894
  chr20:60941671-60941914
  hyper

SEQ ID NO: 294949 - DNA, 511 bp, Homo sapiens
  chr20:60942652-60943163
  hyper
gcgctccccacgacgccctggcccccagagcgcccaccagctcctcccagcccaggggcccactctttgttcccctaacttgggtgcaccactcggctgcccccgctcctcccccaacagcgtccgtcctgctggctgcgggaaggtgccctctgcacccgcgaatgaccatctgcagaggaacggggcagcctaggtgggaaccccctgcttcctggggcagccaggtcaggttcaactcggcctggctcccgcctgccccagcagggcttaaaaatactctcagatagggaaataggggcaggagggactggcctgcagctgcagccccctttagaggacgggggcggtgctcatggccccacagccgccaaattggctcttaaggaggtcgggggctctggtcacagctgctgagcacctgctgggtgcctggaagcacctgtgctccggggcccggtggactccaccagctctctcggcctggcctccaacccgctgcacagccgcg

SEQ ID NO: 294950 - DNA, 176 bp, Homo sapiens
  chr20:60943200-60943376
  hyper
tggcaaacagcacaggacctagaggccgagatcaggtcttcgtctgcctttgggtggctgcggccctgggtctcctacttcccttgggctccggggccaaatctgcctccagggaagccccgagggggtggcggcggggtggggctgcagctgccgagctggcagcaaacccccat

SEQ ID NO: 294951 - DNA, 122 bp, Homo sapiens; identical to SEQ ID NO: 241333
  chr20:60961539-60961661
  hyper

SEQ ID NO: 294952 - DNA, 117 bp, Homo sapiens; identical to SEQ ID NO: 133295
  chr20:60981936-60982053
  hyper

SEQ ID NO: 294953 - DNA, 61 bp, Homo sapiens; identical to SEQ ID NO: 241335
  chr20:61274240-61274301
  hyper

SEQ ID NO: 294954 - DNA, 53 bp, Homo sapiens; identical to SEQ ID NO: 241336
  chr20:61274663-61274716
  hyper

SEQ ID NO: 294955 - DNA, 61 bp, Homo sapiens; identical to SEQ ID NO: 205895
  chr20:61447609-61447670
  hyper

SEQ ID NO: 294956 - DNA, 346 bp, Homo sapiens
  chr20:61447763-61448109
  hyper
gtctgggtttggagtctggtcttagccggtagcaactgacgtggcctgaccacccggcccgtccaggtccacgggtgaggggccgcggtgggggtgctcccagcccagcaggcagcgctggacagtgaccccggagcgggaaccagggctgcgctgggcactgaccgggccctggtaccggggattcaccctccccggggtgttcctgggccttgggtcgcctgggtccgctccggcgcctggggaggggtctgcggcttcggaaactcgcgggtctcccctgcccctccctgaaggcggcccttcagcgccgcgcgcttccgcccccacactcgggttgaggagc

SEQ ID NO: 294957 - DNA, 639 bp, Homo sapiens
  chr20:61492377-61493016
  hyper
gttgagcgccccgcccggctcggggggctcggggccgcgcggcgcgggcggcggctcggcggggatgctgttgaagcggtcctccaggcggacgcgcacggccggcttggcccgggcctcgggcgcgccgtcgggtccagccgcagccgcagccgcgcccgcgccctccttggcggcgccgtcggcccgggccctcgctccgtccccgccgcccgacgtcttctccgccgcgcccgcctcgcttagcagcatcatgcgcagctcctggaagtcgatgtggcccaggcagggcgcgtcggccgccagcgcggacgggcacagcacggggtacacgggcgccgcgcccccctgaccgcccgccgcgaagccgcccgcgcctgcgcccgggcccgccgccgccagcagcgccgagttgaggcgcgtctcgagctcgccgtcagccgccgcctccatgtgcgagcagaggatgtgctgcagctgcgtgtactccacctccgtcatctccaccaggctcaggtcggtggtcgtgaagctcagccccggctcgcccagcgccgcgtccccgccgcccgcgccctcgacggccgcctcgccgcctgccgcgcctgcctccggcggcggctcccgcggtccggggcc

SEQ ID NO: 294958 - DNA, 148 bp, Homo sapiens; identical to SEQ ID NO: 241340
  chr20:61557990-61558138
  hyper

SEQ ID NO: 294959 - DNA, 113 bp, Homo sapiens
  chr20:61560172-61560285
  hyper
catggagaaaaacacgatgggtgcatcacaaataggtgtaaacagtacacttttgtaatgtgtagacaccagtttctgcaacccccatgccacgcaaagtttcagggaaagtc

SEQ ID NO: 294960 - DNA, 158 bp, Homo sapiens; identical to SEQ ID NO: 241342
  chr20:61569192-61569350
  hyper

SEQ ID NO: 294961 - DNA, 103 bp, Homo sapiens
  chr20:61583882-61583985
  hyper
gagccagggcgcgtcggacagtcagggcgacccagccagggcgaccgttggccccgctcctatggggcagcagggaccgacgtcagcagggtggggcgggcac

SEQ ID NO: 294962 - DNA, 316 bp, Homo sapiens
  chr20:61584015-61584331
  hyper
gcccgccctggtggccgtctgggggcgacaagtcctgagagaaccagacggaagcgcgctgggactgacacgtggacttgggcggtgctgcccgggtgggtcagcctgggctgggaggcagccccgggacacagctgtgcccacgccgtctgagcaccccaagcccgatgcagccacccccagacgaggcccgcagggacatggccggggacacccagtggtccaggtgtggcgggggtgaggggagggggggtgggagcggtggagatggggccgtggggagggagctgagatactgccacgtgggacgatgcta

SEQ ID NO: 294963 - DNA, 90 bp, Homo sapiens; identical to SEQ ID NO: 205899
  chr20:61585209-61585299
  hyper

SEQ ID NO: 294964 - DNA, 105 bp, Homo sapiens
  chr20:61664570-61664675
  hyper
gcaggaacaagatgcacatcgtgcaggagccgcagagcacgcgtgcagaggtttcggtggctttgccccgcagctaacgtgtgcgtgtgtgccttgacttatatt

SEQ ID NO: 294965 - DNA, 93 bp, Homo sapiens; identical to SEQ ID NO: 205900
  chr20:61733167-61733260
  hyper

SEQ ID NO: 294966 - DNA, 74 bp, Homo sapiens; identical to SEQ ID NO: 205901
  chr20:61734534-61734608
  hyper

SEQ ID NO: 294967 - DNA, 249 bp, Homo sapiens
  chr20:61759828-61760077
  hyper
tgtcgcgttcccggcgtggccacgccgccacgtattgatctgcccgctgcagacacctggcctattttccaggactctgcaggcaggggcacccttcgccagagtgtgtgcagggcctttctgtagtgccctcccccagaagcacatgggcccgtcggcccccgcgtcctcggacacgcaatgctgtcggtcgttctaaccgggctgtcctgacgggcgcgcagcggcatcccacggcagtgttcacga

SEQ ID NO: 294968 - DNA, 212 bp, Homo sapiens
  chr20:61806196-61806408
  hyper
agctgttcccagatgtgggccgcggcctttcctctttctggaggaatgacaggcctcccgcagaggaggagcgggtggtgacgagggagaaggagcggaaagggaggggttctccacgggttctgttgatttgtttaatcccacgctattcggaggctttcacggatggcggacaagagggagggggagggggtgggggtctcggcccgtgt

SEQ ID NO: 294969 - DNA, 247 bp, Homo sapiens; identical to SEQ ID NO: 205902
  chr20:61810310-61810557
  hyper

SEQ ID NO: 294970 - DNA, 285 bp, Homo sapiens; identical to SEQ ID NO: 133337
  chr20:61810632-61810917
  hyper

SEQ ID NO: 294971 - DNA, 178 bp, Homo sapiens; identical to SEQ ID NO: 205904
  chr20:61847113-61847291
  hyper

SEQ ID NO: 294972 - DNA, 92 bp, Homo sapiens; identical to SEQ ID NO: 241353
  chr20:61847573-61847665
  hyper

SEQ ID NO: 294973 - DNA, 36 bp, Homo sapiens; identical to SEQ ID NO: 205905
  chr20:61886327-61886363
  hyper

SEQ ID NO: 294974 - DNA, 294 bp, Homo sapiens; identical to SEQ ID NO: 241356
  chr20:61903935-61904229
  hyper

SEQ ID NO: 294975 - DNA, 88 bp, Homo sapiens
  chr20:62102699-62102787
  hyper
cgccccccgccagccctgccccaggaggcagccgttccctgagcctcgcccgggaagaggggacagccccttccaggcccagggctgg

SEQ ID NO: 294976 - DNA, 82 bp, Homo sapiens
  chr20:62103897-62103979
  hyper
gccccccggccgggagccgcatggccgaggcggcggttccgcactcctgccgggcttgggccgcgcgcggagacgctgcggc

SEQ ID NO: 294977 - DNA, 252 bp, Homo sapiens; identical to SEQ ID NO: 241358
  chr20:62127503-62127755
  hyper

SEQ ID NO: 294978 - DNA, 42 bp, Homo sapiens; identical to SEQ ID NO: 226226
  chr20:62152087-62152129
  hyper

SEQ ID NO: 294979 - DNA, 291 bp, Homo sapiens; identical to SEQ ID NO: 205906
  chr20:62185031-62185322
  hyper

SEQ ID NO: 294980 - DNA, 393 bp, Homo sapiens; identical to SEQ ID NO: 205907
  chr20:62273400-62273793
  hyper

SEQ ID NO: 294981 - DNA, 176 bp, Homo sapiens
  chr20:62283519-62283695
  hyper
ggggcctgaggggcggggtcaggtcgggcacgcgtgggtgggcggagttctgcgccccgggccaaggcgcccgagttgaaccagtcagctcgggagagggaccgcggcgacctgtcccgggggcgtaagaaaaggtgggagggagtgcggctcgtgaacgggggcggcgatgggaa

SEQ ID NO: 294982 - DNA, 651 bp, Homo sapiens
  chr20:62283836-62284487
  hyper
gtccagaatccgccccccgcccgggcctgcgcccgcccctccgcctgagctccgcgcgggacgggccgggaggccggggtgggcgctaccttcgaaggcggtgggtccgccccgcgggaggtggaggggcgggaggggcggagccctctggtctccggagggtttggggatcgcagtcgcccctcccccatccagaccccgcggcgcaaagggcagtggcttttctggccagagcaggtggcgcgggcgtcgcaaagggtggtccccgaggccgcagcggtgtggggggagggcgcggtccccctcactccgggctccgccgtgtctggcccgcccccctccttcagcgccccctccagcccctgtgctgcactggcgcggggagcgccgggttcccggctggggctttggcagagggtcccaccctctccccgcctccccacgaaggctctggcggacccagatctcgggtcgccggacgccccagggaccccgcccgcacatcgcgagcgcgcccacccggtcgcgagcccacgcccgggtctgggagccaccctgcggcagtcgcgccctgcgtggcacgctgctcccccaggggcgaggcgcccccgcccgacgtcccggtcccgagcgctccccggcgcggcgcct

SEQ ID NO: 294983 - DNA, 69 bp, Homo sapiens
  chr20:62284615-62284684
  hyper
gaggccagacgaggcctctgctcagatcccgccgccccacaaagcccgtggccccggagcctaccggaa

SEQ ID NO: 294984 - DNA, 209 bp, Homo sapiens; identical to SEQ ID NO: 241362
  chr20:62289788-62289997
  hyper

SEQ ID NO: 294985 - DNA, 297 bp, Homo sapiens
  chr20:62368772-62369069
  hyper
gctggaacgggagacgcaggagccccgcagccgcgggaggtgcagatttggggctgccaggtggcgccaggtccccttggccagcccccagcgcccctttcttctgtccccagggcctcggcttcacaggatggggctgccagtgtcctgggcccctcctgccctctgggttctagggtgctgcgccctgctcctctcgctgtgggcgctgtgcacagcctgccgcaggtaggtccctcagccgcgttctgtctggggcctcgctgcggctgccattcacagcccagcgcgggaagg

SEQ ID NO: 294986 - DNA, 40 bp, Homo sapiens; identical to SEQ ID NO: 241364
  chr20:62370782-62370822
  hyper

SEQ ID NO: 294987 - DNA, 154 bp, Homo sapiens; identical to SEQ ID NO: 241365
  chr20:62371936-62372090
  hyper

SEQ ID NO: 294988 - DNA, 380 bp, Homo sapiens; identical to SEQ ID NO: 205909
  chr20:62384603-62384983
  hyper

SEQ ID NO: 294989 - DNA, 63 bp, Homo sapiens; identical to SEQ ID NO: 205910
  chr20:62461228-62461291
  hyper

SEQ ID NO: 294990 - DNA, 265 bp, Homo sapiens
  chr20:62461639-62461904
  hyper
ttgagttgtcagacaccggctcgcgctcccccgcgaaactgacatgtctatttacagagaaacaaagacgcggctcgcagcggaccccgcttcctccgcgcgccccgtccgccccgcgcgccccgagccctccgcgccccgagccgccccgccccgaggcccctgcgccccggttcggccggcgattaagatggagaccaggccggcgcccggcgtccggggagacaatgaccccccggcctcagggcgccgggacccgcccgcg

SEQ ID NO: 294991 - DNA, 339 bp, Homo sapiens; identical to SEQ ID NO: 205912
  chr20:62495239-62495578
  hyper

SEQ ID NO: 294992 - DNA, 419 bp, Homo sapiens; identical to SEQ ID NO: 241369
  chr20:62496242-62496661
  hyper

SEQ ID NO: 294993 - DNA, 361 bp, Homo sapiens; identical to SEQ ID NO: 226233
  chr20:62525784-62526145
  hyper

SEQ ID NO: 294994 - DNA, 759 bp, Homo sapiens; identical to SEQ ID NO: 205913
  chr20:62600809-62601568
  hyper

SEQ ID NO: 294995 - DNA, 79 bp, Homo sapiens; identical to SEQ ID NO: 205914
  chr20:62601569-62601648
  hyper

SEQ ID NO: 294996 - DNA, 238 bp, Homo sapiens; identical to SEQ ID NO: 226235
  chr20:62605238-62605476
  hyper

SEQ ID NO: 294997 - DNA, 83 bp, Homo sapiens; identical to SEQ ID NO: 241370
  chr20:62661737-62661820
  hyper

SEQ ID NO: 294998 - DNA, 79 bp, Homo sapiens; identical to SEQ ID NO: 241371
  chr20:62669743-62669822
  hyper

SEQ ID NO: 294999 - DNA, 205 bp, Homo sapiens
  chr20:62673632-62673837
  hyper
tccccaggaaaagacgcagctccgtaaacacagaaacaaccatcgctccctccccgctcttcccctccccattaaaatccggaagagccagcgggaggtcgcacctgctgggggaagtgagtccttgttttgggggaaatgaggaggtcaggcctctgggcgcagggcagagccgcgtgcgctggggaggtgggcagccctgggg

SEQ ID NO: 295000 - DNA, 322 bp, Homo sapiens
  chr20:62679894-62680216
  hyper
ccgccggggtcccgcgacaactcggtgggcgcgtagggcgcgcggaagggccgcagcgcgcagtcctcgggcgccgcgggcggtgggaagaaggcagcctcgccgggctccaggccgtccagaggcgagcgctcgggcgtgggcagccccaggccgtcgaactcggcgcccagcgggggcagctcgcggaaggcgcgagccgagccagacgccgcggggaaaggctcgggcggtggctgcgggggcgctaatcccgggagcaggaggccgggctccagccgccgggccttgcgcgcctgcttcttgcggcgcggccggtact

SEQ ID NO: 295001 - DNA, 214 bp, Homo sapiens
  chr20:62680443-62680657
  hyper
ccccgccccaccccggcccgagccccccccgccctctcccccttctctgccgccctcccgccgctcacccagcatcttgctgagcaccgcgttgtgcaggtccgggttctgctgagccagccgcttgcgctcgtcctttgcccacaccatgaaggcgttcatgggccgccggatgcgcgactcgtctgccgcctggcgttccccgcggccggcc

SEQ ID NO: 295002 - DNA, 282 bp, Homo sapiens
  chr20:62680896-62681178
  hyper
ggagcgcgggagcgcggcgggcgggcggcgggcactggggagccgggcgcaagggcaggccaggccgggagggcggatggcggtggggacggcggtggcctcgggccgggcgggcgcccagatatagcggctcagggccaatcggcggcggggcgggcgggcgggggcgggtcggggccgcctcctccccgggggctccctttcttctcaggccgggcgggattccgctgaggcctcccccgcgcacagcccccccacctcccccgcgacctctcagaagga

SEQ ID NO: 295003 - DNA, 55 bp, Homo sapiens
  chr20:62694230-62694285
  hyper
gggacagcaaggcccgaagcaggaggagagaagggagcagattcctgggcctcct

SEQ ID NO: 295004 - DNA, 251 bp, Homo sapiens; identical to SEQ ID NO: 205918
  chr20:62694767-62695018
  hyper

SEQ ID NO: 295005 - DNA, 199 bp, Homo sapiens
  chr20:62695048-62695247
  hyper
cccttaactccagacccccagcctggcccgtcgactccttccttggccctgtcccgcctctcggagcccccggggtgttcgggcctcctctgcgggccgcgccagccccttgccttcctccatcccggcctgggcatcctcacaggccgagccccgccccccaactcagccctctcccacgctccgtctcttacagcgt

SEQ ID NO: 295006 - DNA, 148 bp, Homo sapiens; identical to SEQ ID NO: 205920
  chr20:62714866-62715014
  hyper

SEQ ID NO: 295007 - DNA, 102 bp, Homo sapiens; identical to SEQ ID NO: 205921
  chr20:62715069-62715171
  hyper

SEQ ID NO: 295008 - DNA, 175 bp, Homo sapiens; identical to SEQ ID NO: 205922
  chr20:62715621-62715796
  hyper

SEQ ID NO: 295009 - DNA, 67 bp, Homo sapiens; identical to SEQ ID NO: 205923
  chr21:15588289-15588356
  hyper

SEQ ID NO: 295010 - DNA, 87 bp, Homo sapiens; identical to SEQ ID NO: 205924
  chr21:15588911-15588998
  hyper

SEQ ID NO: 295011 - DNA, 115 bp, Homo sapiens; identical to SEQ ID NO: 241379
  chr21:15755438-15755553
  hyper

SEQ ID NO: 295012 - DNA, 220 bp, Homo sapiens; identical to SEQ ID NO: 241380
  chr21:15755917-15756137
  hyper

SEQ ID NO: 295013 - DNA, 208 bp, Homo sapiens
  chr21:16130747-16130955
  hyper
tctagtttttggaaatctagtctactgttgcttgagcttcttggcaggtcatcagtaccaactagaagcgggtaatagattactagggatgccagcggcatttaagcaggacagttttttactggccctaactgctaatcgccagcagtgctccacagatcctaaaacatcccttttagcctgtttcctaatgcgtctgtaggggagc

SEQ ID NO: 295014 - DNA, 254 bp, Homo sapiens; identical to SEQ ID NO: 241381
  chr21:16436424-16436678
  hyper

SEQ ID NO: 295015 - DNA, 57 bp, Homo sapiens; identical to SEQ ID NO: 241382
  chr21:16437726-16437783
  hyper

SEQ ID NO: 295016 - DNA, 268 bp, Homo sapiens
  chr21:16438267-16438535
  hyper
tcacgaggccggggcggcagcgcggtggagcctctcggtttcctgcagcctaatctcactgaacccgcctctaaattgggggggccacagattggtgaaacgagaaagtggaaggaggagagagtcatacgaaaccataatttccccttatccttgtatttgctgtttgaaaaatcgtatcctcaacgctccccagacatctcactagaactattaacaccccctcaacacctccccagatgtcaggtttctttttgacttgagcatc

SEQ ID NO: 295017 - DNA, 117 bp, Homo sapiens; identical to SEQ ID NO: 241383
  chr21:17101957-17102074
  hyper

SEQ ID NO: 295018 - DNA, 83 bp, Homo sapiens; identical to SEQ ID NO: 226247
  chr21:17102748-17102831
  hyper

SEQ ID NO: 295019 - DNA, 1361 bp, Homo sapiens
  chr21:18885047-18886408
  hyper
ccccacccccgcgcgcaaaaccctggtttagcttaagggatggaggcggggacccctgcgcaggcttgcggcgtgggaggcggccgcccgcgacctacgacgccgcgcgccgggaggctgagagttcggcgccgggagggtcccggggacagaagagcgcctcgcccggttgccaaggcaaccccacgcggctggagaagccggcgctcgcagcccggcccgggccgctgccggaagtgacgcgagttcacctgccgagcgggggctgggaggaggggcggagggtgcagaggtgccgccgccgccgcgagccagtcgggagcgcgcgaggcgcggggagcctgggaccaggagcgagagccgcctacctgcagccgccgcccacggcacggcagccaccatggcgctcctgctgtgcttcgtgctcctgtgcggagtagtgggtgagtaggggccatggggtcctcagcacccgcccagcccgggggcgctcgctgcccgcggccacccaggaacaatggggcgtgggggagggggcgggcgcgatttgggggcgctgctgcaggggcggcggggcgggcagaattgcacaggggcgcttttgctgggccgggcgctcctggagccgtcccgtagggagccgcgcagggcgcgcggagtgcccggggacggagccctcggcggggggtggaggcggaggggctcgggcgcggcgtgtcgggtgcgcctcgcagctctcccatagcattctctgccccggtgcgggcttgcctttctttgctctcgccgtctcccttgtcagccttcgtgtcggttctctccagcgttacccgatttcaaaaaccttgggcggcgagttttcaggtgtcgagtcgcccaggcggggaggctgaattgcaaacgccattattcaatggacatggagctgcccggtgcctcggatcggccaggctacctctaggaaagaggcgctgagcgaacgccagcctggacggtgttagtctcctggaagcagctcgcccaggcaggagctgctaaccagacgcgcattgtgaaggagaccgtggaaaatcaaaagtgggttcctgcaaaaatgtagcattggtttctgcagtccttgggcgaagtgcaaaggagaattcagtgacctcgtttttgagtttgtaatgagtcgttcattttggagataagacgggctgagttgtacagggtaattgctagaggatttgccaagtgcgtttgtcgactgctcctttctctgggaggggaaaaaaggcatgtgaaaaatgcgtggaccattaggaggcgtaatcattttgacactttaaaaaacggattttccatgtcggtgttttaaccaa

SEQ ID NO: 295020 - DNA, 319 bp, Homo sapiens; identical to SEQ ID NO: 205928
  chr21:18983992-18984311
  hyper

SEQ ID NO: 295021 - DNA, 98 bp, Homo sapiens
  chr21:18985373-18985471
  hyper
gggcctagccgcacgggaggcgacacaccctcgccctaccctgagcctggcgcagaccctcgaccgcgacggcgcggtccgcagaaccgcgggcttcc

SEQ ID NO: 295022 - DNA, 88 bp, Homo sapiens; identical to SEQ ID NO: 205929
  chr21:22370943-22371031
  hyper

SEQ ID NO: 295023 - DNA, 37 bp, Homo sapiens; identical to SEQ ID NO: 205930
  chr21:26934818-26934855
  hyper

SEQ ID NO: 295024 - DNA, 122 bp, Homo sapiens; identical to SEQ ID NO: 205931
  chr21:27011487-27011609
  hyper

SEQ ID NO: 295025 - DNA, 133 bp, Homo sapiens; identical to SEQ ID NO: 205932
  chr21:27011639-27011772
  hyper

SEQ ID NO: 295026 - DNA, 167 bp, Homo sapiens; identical to SEQ ID NO: 205933
  chr21:27012725-27012892
  hyper

SEQ ID NO: 295027 - DNA, 211 bp, Homo sapiens
  chr21:27541598-27541809
  hyper
aggcgccatcttctccgtcttaatcttcactcaattcgatccttttatctgcaccctaaaaaaaagacccttcggaccctccccagcatcctgtgcccccaggggaactaaaccagagtccccagagctgccagggaagaggccgcgccttaatcagacaaacgcctccttggatgcacaggacagagcccgtgcctccccaccatccgcc

SEQ ID NO: 295028 - DNA, 1562 bp, Homo sapiens; identical to SEQ ID NO: 205935
  chr21:27541871-27543433
  hyper

SEQ ID NO: 295029 - DNA, 160 bp, Homo sapiens; identical to SEQ ID NO: 205936
  chr21:27543508-27543668
  hyper

SEQ ID NO: 295030 - DNA, 104 bp, Homo sapiens; identical to SEQ ID NO: 205937
  chr21:28215838-28215942
  hyper

SEQ ID NO: 295031 - DNA, 226 bp, Homo sapiens
  chr21:28215997-28216223
  hyper
tataagggggaaaggggacagaagtctgcagaacagagatcctagcgtagccgctcagggtaccttcccaggtcaccattgctcctctgccctctccacatccgccctcccgtgagcgcaggatgcacgcacaggcagcggttacaaaactcagcgcaacgttgcaacccgcacaaaaggcgcacacaaaatcattaaaaagaaatacacagagtggaaagaactc

SEQ ID NO: 295032 - DNA, 155 bp, Homo sapiens; identical to SEQ ID NO: 205939
  chr21:28217933-28218088
  hyper

SEQ ID NO: 295033 - DNA, 183 bp, Homo sapiens
  chr21:28218369-28218552
  hyper
ggtgacacttcctacgatctggattttaaaatatgtttgcttatgccttcaccctccaccaacccccaccccgcacgccacctcttcaccagagacgactttgtgagggcccggtttcacatttctggaatgggtgatctgggacgcggctcaattccctagagcataaggagggaattgcgc

SEQ ID NO: 295034 - DNA, 56 bp, Homo sapiens
  chr21:28218718-28218774
  hyper
agaaggaaatcggcttccttcccggacccctccttcctcttcctaccaggaaggga

SEQ ID NO: 295035 - DNA, 83 bp, Homo sapiens; identical to SEQ ID NO: 205942
  chr21:28338753-28338836
  hyper

SEQ ID NO: 295036 - DNA, 275 bp, Homo sapiens
  chr21:28338887-28339162
  hyper
gcgtgcgaacttttctttgttgcttgggaaaatgtttggattcgtgctccagaaagaggtggggtggggggggggggaaagaaaagattaaaaaaaaaaagtcggatagtggagattcagcaaatacgggaaaaggaaaaaaacaaaaaccaaaaaaccaccaaatgcaggcacgatcgctgtttcaagaaaagtaaggaaaggtaccgcgcaccgggctggcaactggtgcgcgcagcctcccgcccccgcgctgcgctggacaagccggctgt

SEQ ID NO: 295037 - DNA, 350 bp, Homo sapiens; identical to SEQ ID NO: 205945
  chr21:28339501-28339851
  hyper

SEQ ID NO: 295038 - DNA, 38 bp, Homo sapiens; identical to SEQ ID NO: 241396
  chr21:30257747-30257785
  hyper

SEQ ID NO: 295039 - DNA, 115 bp, Homo sapiens; identical to SEQ ID NO: 205946
  chr21:30365298-30365413
  hyper

SEQ ID NO: 295040 - DNA, 477 bp, Homo sapiens; identical to SEQ ID NO: 241398
  chr21:30374922-30375399
  hyper

SEQ ID NO: 295041 - DNA, 188 bp, Homo sapiens; identical to SEQ ID NO: 205947
  chr21:30396784-30396972
  hyper

SEQ ID NO: 295042 - DNA, 236 bp, Homo sapiens; identical to SEQ ID NO: 226251
  chr21:30670774-30671010
  hyper

SEQ ID NO: 295043 - DNA, 132 bp, Homo sapiens; identical to SEQ ID NO: 205948
  chr21:31312181-31312313
  hyper

SEQ ID NO: 295044 - DNA, 154 bp, Homo sapiens; identical to SEQ ID NO: 205949
  chr21:31312503-31312657
  hyper

SEQ ID NO: 295045 - DNA, 187 bp, Homo sapiens; identical to SEQ ID NO: 205950
  chr21:32716048-32716235
  hyper

SEQ ID NO: 295046 - DNA, 89 bp, Homo sapiens; identical to SEQ ID NO: 13211
  chr21:32931770-32931859
  hyper

SEQ ID NO: 295047 - DNA, 154 bp, Homo sapiens; identical to SEQ ID NO: 205952
  chr21:32932326-32932480
  hyper

SEQ ID NO: 295048 - DNA, 111 bp, Homo sapiens; identical to SEQ ID NO: 241404
  chr21:33031744-33031855
  hyper

SEQ ID NO: 295049 - DNA, 45 bp, Homo sapiens; identical to SEQ ID NO: 205953
  chr21:33058221-33058266
  hyper

SEQ ID NO: 295050 - DNA, 194 bp, Homo sapiens; identical to SEQ ID NO: 205954
  chr21:33244727-33244921
  hyper

SEQ ID NO: 295051 - DNA, 290 bp, Homo sapiens; identical to SEQ ID NO: 205955
  chr21:33245047-33245337
  hyper

SEQ ID NO: 295052 - DNA, 194 bp, Homo sapiens; identical to SEQ ID NO: 205956
  chr21:33245489-33245683
  hyper

SEQ ID NO: 295053 - DNA, 75 bp, Homo sapiens; identical to SEQ ID NO: 205957
  chr21:33245718-33245793
  hyper

SEQ ID NO: 295054 - DNA, 132 bp, Homo sapiens; identical to SEQ ID NO: 205958
  chr21:33245877-33246009
  hyper

SEQ ID NO: 295055 - DNA, 127 bp, Homo sapiens; identical to SEQ ID NO: 205959
  chr21:33246414-33246541
  hyper

SEQ ID NO: 295056 - DNA, 49 bp, Homo sapiens; identical to SEQ ID NO: 241406
  chr21:33651478-33651527
  hyper

SEQ ID NO: 295057 - DNA, 90 bp, Homo sapiens; identical to SEQ ID NO: 205960
  chr21:33783941-33784031
  hyper

SEQ ID NO: 295058 - DNA, 832 bp, Homo sapiens; identical to SEQ ID NO: 205961
  chr21:33784080-33784912
  hyper

SEQ ID NO: 295059 - DNA, 323 bp, Homo sapiens; identical to SEQ ID NO: 205962
  chr21:33784965-33785288
  hyper

SEQ ID NO: 295060 - DNA, 49 bp, Homo sapiens; identical to SEQ ID NO: 205963
  chr21:33785325-33785374
  hyper

SEQ ID NO: 295061 - DNA, 139 bp, Homo sapiens; identical to SEQ ID NO: 241408
  chr21:33942018-33942157
  hyper

SEQ ID NO: 295062 - DNA, 110 bp, Homo sapiens; identical to SEQ ID NO: 241409
  chr21:33984700-33984810
  hyper

SEQ ID NO: 295063 - DNA, 51 bp, Homo sapiens; identical to SEQ ID NO: 205964
  chr21:34100892-34100943
  hyper

SEQ ID NO: 295064 - DNA, 191 bp, Homo sapiens
  chr21:34400540-34400731
  hyper
ttcggggggggagggggtgttatgggagggggacacattggggccttgctcctcttcctcctttcttggcgggtgggagactccgggtagccgcactgcagaagcaacagcccgaccgcgccctccagggtcgtccctggcccaaggccaggggccacaagttagttggaagccggcgttcggtatcagaa

SEQ ID NO: 295065 - DNA, 33 bp, Homo sapiens
  chr21:34401548-34401581
  hyper
gacgcgataccttgggaccggatttggggatcg

SEQ ID NO: 295066 - DNA, 298 bp, Homo sapiens; identical to SEQ ID NO: 205965
  chr21:34602440-34602738
  hyper

SEQ ID NO: 295067 - DNA, 627 bp, Homo sapiens; identical to SEQ ID NO: 57604
  chr21:34602763-34603390
  hyper

SEQ ID NO: 295068 - DNA, 686 bp, Homo sapiens
  chr21:34776086-34776772
  hyper
aggtgggaacctgcgggtgccccaggtgggggtcttgcggggtgcccagggctagaggggcccgctgggagcccgcagcggggctgggatgggcggccaggagttccagacaggagctgggcagcagcaggaagacggggggcacccctcctggcgtcctggccgccgggacacccctctccgggagaggacactcggtgcccctccgtgaagccggtaacctcggctgcgccacctcccccacccgcgcgcccgcgccgggaaagccagcgtggccccagtctccgaatttctcggaatgaacaacagcaaattgaatccagggctccggcgggggccgcctttgctggccactggttctgcagcctggcgagactgcgcttagtccccgcctggagtgcctcccgaaggcctggctggaagctagactcagtccctttgtagtagcagcggtggagcagggaccagcgtcttggacgggtgacccagactcaattccgactttggccgagggcatgtttgacactgggtgtgaaatctagacagttcccgcggtcatagagatggggcagcagcattcaggcagggctcagaactgtccgggtcccatcagtgttggggcggaagaggaagagtgtcaactgagccaggcatttatttattttattgttgtttgagacagggtg

SEQ ID NO: 295069 - DNA, 41 bp, Homo sapiens
  chr21:34776997-34777038
  hyper
gcgctgggattacaggcttgaggcaccgtgcccagctgagc

SEQ ID NO: 295070 - DNA, 317 bp, Homo sapiens; identical to SEQ ID NO: 241422
  chr21:34915084-34915401
  hyper

SEQ ID NO: 295071 - DNA, 318 bp, Homo sapiens; identical to SEQ ID NO: 241423
  chr21:34960938-34961256
  hyper

SEQ ID NO: 295072 - DNA, 57 bp, Homo sapiens; identical to SEQ ID NO: 205969
  chr21:35013432-35013489
  hyper

SEQ ID NO: 295073 - DNA, 412 bp, Homo sapiens; identical to SEQ ID NO: 241425
  chr21:35014227-35014639
  hyper

SEQ ID NO: 295074 - DNA, 50 bp, Homo sapiens; identical to SEQ ID NO: 205970
  chr21:35747796-35747846
  hyper

SEQ ID NO: 295075 - DNA, 247 bp, Homo sapiens; identical to SEQ ID NO: 205971
  chr21:35986732-35986979
  hyper

SEQ ID NO: 295076 - DNA, 117 bp, Homo sapiens; identical to SEQ ID NO: 241428
  chr21:35987695-35987812
  hyper

SEQ ID NO: 295077 - DNA, 1781 bp, Homo sapiens; identical to SEQ ID NO: 205972
  chr21:36160097-36161878
  hyper

SEQ ID NO: 295078 - DNA, 3166 bp, Homo sapiens
  chr21:36161932-36165098
  hyper
tgagacctatcgccaaaacaactacagtttgattttttttgaaacaattaaatactatatatgctggtaagagtctgtgaaactctaaatgaccaatccagtgagcctacaatagtgacaagccccctccacacatggctttgagagtaaaggttcaatgtaaaagattatctaatcagagcatgaggctggttttgagttggaatatcttcagttaacagaattaaactgaaaaacataattttttccttcatttttctccagcatttttgcaggtcagacatggtaacatgtgctgaaaaaaaacatttacgtttaatttgggggaaatgggctaatggtgcttttcagaaattaaatttttacatttgctgacattttatggtaatttagctgcaaaaatgtaatacggaataatatatgaaactgagttgtggagggaatcctgtcaaaaatgaaagtgaatatattctgagtttgtccgagatctgctatagctcttctctagataagaacgacctgacaacataagctgctttactctttaactcttaccaaagtgctactgcatgtgtgtaaaacaaataatcaatatatatataagaaaactcaaaaacaagttgttttaaataagtccagctgtttttgctgcctgcagccaaagatttgcctaatttgaatgcttaaatttataaaataaaaatcaaacactgttctgaagtcctgctttcaaatactcttcagagttgacctgaaatcgtttcaacgaattttaagaggtacgttaaataaccaccagatcatttggagcacacatgtgtcaaaatcagcagttagtatttatgagttgtacaacaactgcattctgaccaaatcctccaataaaaatagtgccataaaatttacagcgacattggatacctttgaattgtagccacggacagtagtgacatgaatctttcctgtcacactggtgcacaggtaaaagcccatataccccatagggtagggtctcagcctggtgaaagcaacacaaagatgttgttgagtgagcagcacaggacagggggtctcgcacaggtgggaccatgttttcccacttgtctccactgaggcacacagaggcaaattgactcctcgaggcctgcttctggtgggcccttaaattgctataatcgtaacccctaaattcattgatttggttcctatgtaaatgtggctcccctacacagtttactttggctgtgttctgttacacagcatctgtgaaattatcagatgaccttggggtgagcaaatccctgggcagaaatcaaatcctctccaaagatgtaattattggcacctgcctcaaccctctggaactagattgaccttctctgttttaaggaggaagttagatatgagacccttgttgagcctggcagaaaattccatacttctgatccttggagtgaccctcagtgtctaaaaatcctattaaaaacgttgctgcgtgagctactcacttgtttgattaacatgaaagggagtttaatgtaaacaatacttctggataaccaagcgatcacattactcattctttttttctagccttcttcaatgtgatacatttaactttggctactatcaagaacaaaagaaaatgtagtacttgatatttttcttaatataagtacatttaaataattaaaaaattatcaacacataaatgtctgaacatcaagatacataaatatctggggattccttgtgggaatacagtagttaaaaatgacccaaagctgtagctgtttctcaaaaaaacaaaacaaaacaaaaaaaaacaactacccaaaagtccaaaagaaaagttaaataaaacttaaagaaaagggaatcatatttctttccatggtcaaagcaagaaagaagcaagctcaatttatatatatttatataaacgtatataaaaataaaaaccacccaaatgcaaatacgcattttgcaattgataaggtgcggaaaaattaaaaataagaattagatgccaaacagggcgagttgcatccctcctctccccccaccccaaccaaaattccacactctttggaataaacaacttggttaaaaagttaagtcaagggtataaaatctttctttttattcacagcattgctaaatcagaagcattcacagtttccctccgggaatcttcctgtttgctttccagcgcgtcccctgggtgctggggccggcggacaccctcgaggtgcgtcgcctcggacacctccgcgagggccggggcgccagcagacggcggcggcgtgggcttctgggcgcaggaggctgcgcgggcctgacctacagcgagatcctggccgtcgggcgccctcggccccaggacggtggccgggcccagggcccgggatcccggcgggcttgtcgcgaacaggaggcccgcgcgcccggaggcgaaggcggcggcccgcggggcccagccgggccaggcctggcgcctcagtagggcctccacacggcctcctccaggcgcgcggagggcgccatgttggtgggggagttgctgtggctgccctcggcctccaccacgtcgctctggttcgggaggctggggttgagcagcgcggagccggtggaggcgttggtgcagggcggcaggatgcgcggcggcgagcgctcgccgcccaccatggagaactggtaggagccggccgaggcgccgtagtacaggtggtaggagggcgagctggcttggaacgggcctccctgcgcttgcgacgagccggggtagggcggcggcaggtaggtgtggtagcgcgtggccgagcccatggccgacatgccgatgccgatgcccgaggtgaccggcgtcggggagtaggtgaaggcgcctggatagtgcatgcgggggtcggagatggagggcagcgcggggaactggcgcgggtcgctgaacgctgtcaggtcgggtgccgctgcagggcgggcaagagaacggagcggaagtgagtaggaggttgcggaggccacagctcttccctctgccccagggggctacccaggatgataccgcctaggaggatgggaagccacccaggatgctactgctggggaggacggggaccacccgggatgctactcccaagaggacgaggattacccagga

SEQ ID NO: 295079 - DNA, 162 bp, Homo sapiens; identical to SEQ ID NO: 205974
  chr21:36171597-36171759
  hyper

SEQ ID NO: 295080 - DNA, 203 bp, Homo sapiens; identical to SEQ ID NO: 205975
  chr21:36206695-36206898
  hyper

SEQ ID NO: 295081 - DNA, 105 bp, Homo sapiens; identical to SEQ ID NO: 205976
  chr21:36231770-36231875
  hyper

SEQ ID NO: 295082 - DNA, 179 bp, Homo sapiens; identical to SEQ ID NO: 205977
  chr21:36252845-36253024
  hyper

SEQ ID NO: 295083 - DNA, 266 bp, Homo sapiens; identical to SEQ ID NO: 205978
  chr21:36259127-36259393
  hyper

SEQ ID NO: 295084 - DNA, 169 bp, Homo sapiens; identical to SEQ ID NO: 205979
  chr21:36260355-36260524
  hyper

SEQ ID NO: 295085 - DNA, 395 bp, Homo sapiens; identical to SEQ ID NO: 241433
  chr21:36261485-36261880
  hyper

SEQ ID NO: 295086 - DNA, 39 bp, Homo sapiens; identical to SEQ ID NO: 205980
  chr21:36265221-36265260
  hyper

SEQ ID NO: 295087 - DNA, 117 bp, Homo sapiens; identical to SEQ ID NO: 205981
  chr21:36421138-36421255
  hyper

SEQ ID NO: 295088 - DNA, 131 bp, Homo sapiens; identical to SEQ ID NO: 205982
  chr21:36421464-36421595
  hyper

SEQ ID NO: 295089 - DNA, 186 bp, Homo sapiens; identical to SEQ ID NO: 241434
  chr21:37432611-37432797
  hyper

SEQ ID NO: 295090 - DNA, 373 bp, Homo sapiens; identical to SEQ ID NO: 205983
  chr21:37528252-37528625
  hyper

SEQ ID NO: 295091 - DNA, 139 bp, Homo sapiens; identical to SEQ ID NO: 205984
  chr21:37692217-37692356
  hyper

SEQ ID NO: 295092 - DNA, 241 bp, Homo sapiens; identical to SEQ ID NO: 205985
  chr21:37757666-37757907
  hyper

SEQ ID NO: 295093 - DNA, 167 bp, Homo sapiens; identical to SEQ ID NO: 205986
  chr21:38064290-38064457
  hyper

SEQ ID NO: 295094 - DNA, 283 bp, Homo sapiens; identical to SEQ ID NO: 205987
  chr21:38064683-38064966
  hyper

SEQ ID NO: 295095 - DNA, 44 bp, Homo sapiens; identical to SEQ ID NO: 205988
  chr21:38066154-38066198
  hyper

SEQ ID NO: 295096 - DNA, 293 bp, Homo sapiens
  chr21:38066516-38066809
  hyper
gggctgtttcgcgacgtcattaatgaactaatcggttttcagatttcaagacggtgtgtaattgatgtaaccactgaggaatttcagtgcacaccagactaagactcttccagcgcaggggattccagatgcttcttgggccctctggaagccatggggatgtttccagaccgaaaggagggctttgctggggagcagatgtgctgcctctccccgacccaggattttgaggccatgtttccgttaatctggaccgagagccctctgggagagggaggcaggtcgtagggggc

SEQ ID NO: 295097 - DNA, 47 bp, Homo sapiens
  chr21:38069046-38069093
  hyper
tggtgccatcagggaccccagagccacagctgcgtgtgtgtgtggat

SEQ ID NO: 295098 - DNA, 571 bp, Homo sapiens; identical to SEQ ID NO: 205989
  chr21:38071064-38071635
  hyper

SEQ ID NO: 295099 - DNA, 104 bp, Homo sapiens; identical to SEQ ID NO: 205990
  chr21:38071687-38071791
  hyper

SEQ ID NO: 295100 - DNA, 111 bp, Homo sapiens
  chr21:38071905-38072016
  hyper
ccccccgcacctgcccgcggcccactccgcggactcacctggctcccggctcccccttccccatccccgccgccgcagcccgagcggggctccgcgggcctggagcacggc

SEQ ID NO: 295101 - DNA, 248 bp, Homo sapiens; identical to SEQ ID NO: 205992
  chr21:38073877-38074125
  hyper

SEQ ID NO: 295102 - DNA, 31 bp, Homo sapiens
  chr21:38076669-38076700
  hyper
gtttagcagaacaacgtagattttttacaac

SEQ ID NO: 295103 - DNA, 332 bp, Homo sapiens
  chr21:38080753-38081085
  hyper
atgtgacaggagaccctttccagttcggcctgtggcccatccctctctcaccgccggcagattggagtctgctctcggggagcccccaggtaaacccctcacagggagaaggtttcggattggaaggaggaccgcgctcgtggggcgcctgtgagagctgggaagcccaaggggtagcgtgtagggggttttttatgcgggaggagctgcctcctgggcggcggggactttctgtctcagcctgtctgcctttgggaaaacaaggagttgccggagaagcagggaaagaaaggagggagggaaggagggtccttgggggaatatttgcgggt

SEQ ID NO: 295104 - DNA, 44 bp, Homo sapiens; identical to SEQ ID NO: 205994
  chr21:38119710-38119754
  hyper

SEQ ID NO: 295105 - DNA, 199 bp, Homo sapiens
  chr21:38362192-38362391
  hyper
tcccgcagggaagaacgccagcggcgcgcggaggccgcgctgccctgggccgcgaggtccctatggctgctccaccggaagccccgcccccttctggcagctggaggcggctttccggccgtcccggctgcagccccgaggcctcgactcaggagacggctgttccctggcagaggctcgcggtggactgcctgaccct

SEQ ID NO: 295106 - DNA, 300 bp, Homo sapiens; identical to SEQ ID NO: 205995
  chr21:38378628-38378928
  hyper

SEQ ID NO: 295107 - DNA, 260 bp, Homo sapiens; identical to SEQ ID NO: 205996
  chr21:38379263-38379523
  hyper

SEQ ID NO: 295108 - DNA, 321 bp, Homo sapiens; identical to SEQ ID NO: 241452
  chr21:38382168-38382489
  hyper

SEQ ID NO: 295109 - DNA, 244 bp, Homo sapiens; identical to SEQ ID NO: 241453
  chr21:38445155-38445399
  hyper

SEQ ID NO: 295110 - DNA, 415 bp, Homo sapiens
  chr21:38446375-38446790
  hyper
tgtgtgcgtgtcacgactctgttgccacctgttttcgtgtgaactggcagtccagtccagggcctgtccccacggaacggacccaggaggggggtaacctcgccgctcccctcgcccccgcgcctctttctgagcattctctcccacagacgctaatgggaaggggggtggacaggatcgagtctggccagctgctccgcagtgttgacgctgccagtgtggcctcttcagccagcctgttcaggagacagaatagggggatcaaagataaaaaatgaagccgagacgtaggtgaatttgggctggtaccagtgcgccgtgccttttccagtggcgccctggacgccaaaaccccctcagttgcagagacctttcaaaatatatgcactctcctactgggcgatgcggtccttag

SEQ ID NO: 295111 - DNA, 230 bp, Homo sapiens
  chr21:38592844-38593074
  hyper
cagttccctcctcacagggtcgctataacgaggtaacatacagcacttagaagacggcctgacccagaataacactaatgttcacatggctgcgagtctcagaccaaaatcaatagccggtatctactgaaactgcagcaaggcgaaaccacgggaatggcgctccgttgagtagagcaacgcacagcacatcacatcgcatcctccgtagcgggaggctctggcctcac

SEQ ID NO: 295112 - DNA, 258 bp, Homo sapiens
  chr21:38593104-38593362
  hyper
tattcggggacccgcaccggacaggcggcccaggccccctggcgcccagctggccgccctgttgcagctctcatgccaagacctgcgcctaacggcagggattccggcggtcatcatttattcttggcgctaagctgccgcttctcttttttatcaccacagagtaacgcagaccccaccgtttccttccattctgagccaaccactccagcagccaccggggcgccaggttatgctggggctgcaccacccggcccg

SEQ ID NO: 295113 - DNA, 59 bp, Homo sapiens
  chr21:38593729-38593788
  hyper
actgagaacaccagcatctgctgccgccctgaatcagcgttagcatgtggaggcaacct

SEQ ID NO: 295114 - DNA, 109 bp, Homo sapiens; identical to SEQ ID NO: 205998
  chr21:38608386-38608495
  hyper

SEQ ID NO: 295115 - DNA, 428 bp, Homo sapiens; identical to SEQ ID NO: 133563
  chr21:38639615-38640043
  hyper

SEQ ID NO: 295116 - DNA, 253 bp, Homo sapiens; identical to SEQ ID NO: 241457
  chr21:38737938-38738191
  hyper

SEQ ID NO: 295117 - DNA, 137 bp, Homo sapiens
  chr21:38936052-38936189
  hyper
gggccgcgagccgccggcgtaggccgctccagctggaagaccccaccgctagggttccagggggctgcggacgcttccgaggggcccaaggcgaaagaacgcagcccgcttgtcggccacgtgaccgtccccgtccg

SEQ ID NO: 295118 - DNA, 158 bp, Homo sapiens
  chr21:38936266-38936424
  hyper
ccccgggcttcggggggcggtgctgctgcggttgccatggcgtcttccgagcgcgcaggcgtgggcccagagtagcttttcgggtatttgctaccggctctcggtagggctggtcacctttgcttgctgagcttcgcgccctgcgtcctttggtcccc

SEQ ID NO: 295119 - DNA, 64 bp, Homo sapiens; identical to SEQ ID NO: 205999
  chr21:39047606-39047670
  hyper

SEQ ID NO: 295120 - DNA, 310 bp, Homo sapiens; identical to SEQ ID NO: 206000
  chr21:39288394-39288704
  hyper

SEQ ID NO: 295121 - DNA, 279 bp, Homo sapiens; identical to SEQ ID NO: 206001
  chr21:39288901-39289180
  hyper

SEQ ID NO: 295122 - DNA, 35 bp, Homo sapiens; identical to SEQ ID NO: 206002
  chr21:40032286-40032321
  hyper

SEQ ID NO: 295123 - DNA, 158 bp, Homo sapiens; identical to SEQ ID NO: 206003
  chr21:40032367-40032525
  hyper

SEQ ID NO: 295124 - DNA, 66 bp, Homo sapiens; identical to SEQ ID NO: 206004
  chr21:40032848-40032914
  hyper

SEQ ID NO: 295125 - DNA, 132 bp, Homo sapiens; identical to SEQ ID NO: 206005
  chr21:40032974-40033106
  hyper

SEQ ID NO: 295126 - DNA, 75 bp, Homo sapiens; identical to SEQ ID NO: 206006
  chr21:40033358-40033433
  hyper

SEQ ID NO: 295127 - DNA, 152 bp, Homo sapiens; identical to SEQ ID NO: 133575
  chr21:40033449-40033601
  hyper

SEQ ID NO: 295128 - DNA, 142 bp, Homo sapiens; identical to SEQ ID NO: 206008
  chr21:40105802-40105944
  hyper

SEQ ID NO: 295129 - DNA, 341 bp, Homo sapiens; identical to SEQ ID NO: 206009
  chr21:40105997-40106338
  hyper

SEQ ID NO: 295130 - DNA, 1243 bp, Homo sapiens
  chr21:40177485-40178728
  hyper
ctcagggccagccggcgagggacccagccgagtgacagcaggaggcggagggaaggttgggccggaaggtgtcagccccgccccgcgctccctcgccgcctccgccctcctcttctctcccctcgtgcgttccctctcctctccctccgctcccccaaccctcctgctgcccccttccctctcctcccgcttctccccatcctgcctacctcccttcccctcctcttctctctcctccccttccctcccctctctcttctctcctccctcgtttcctcccctcccctccactcggccgtccctccttcctcctccctcctccctcctcctcccgctcctgaagagcgcgccgcgtgggggacggcccggttacttcctccagagactgacgagtgcggtgtcgctccagctcagagctcccggagccgcccggccagcgtccggcctccctgatcgtctctggccggcgccctcgccctcgcccggcgcgcaccgagcagccgcgggcgccgagcagccaccgtcccgaccaagcgccggccctgcccgcagcggcagggtaagagctgggcccgcagagagcgcccggcgcgcggctccagtcccatggagggtcacccggggcctgggcgggggtcgcggggggcactgacacgcagatctcggggcgctgccgggggtgcaggtgggggtggcggctgctgcgaggactctaggggcgcgcgtctgagttccgcgccggctcgttttccggttatggagtggcctccggggctggcggggtcggccggggggttcctgcgtgctagggccgctgtcttcggggtcgcctagcggcgggcgcggccagggcgcgctggcttgtttcgctcgcttttgtttttaaaaggaaacgcaggcctggtagggggtcctgcccagtggatgtcccggcgaacatgatttcgcgaacgggagtgggggcacaggagagcgtgtccgaggtggcctggcgccccggctttgagggtgacttcctggagcggcgccgggcccggaggatctggggcgcccaagacacctgaaggctgcggcaccgcgggaacctgcggggcgcggggtgccatggtcacctgctcgccgcgtccagggcccgggctggggacccctcggtcgtgcgaggagagcgtggggaacctgtcggaaatgagatctggttgcgctgggctgcctttattttctcgttcctacagcatttgaatga

SEQ ID NO: 295131 - DNA, 101 bp, Homo sapiens
  chr21:40751585-40751686
  hyper
ggcctctcaaagtgctgggattacaggcgtgagccacctcgccctgctcactttgcatacatttgagttgggattctttcgctgcaaaacctgatcttcac

SEQ ID NO: 295132 - DNA, 99 bp, Homo sapiens; identical to SEQ ID NO: 206011
  chr21:40752032-40752131
  hyper

SEQ ID NO: 295133 - DNA, 70 bp, Homo sapiens; identical to SEQ ID NO: 206012
  chr21:40941233-40941303
  hyper

SEQ ID NO: 295134 - DNA, 156 bp, Homo sapiens
  chr21:40984529-40984685
  hyper
agttaactttgggacggttctcccggagggccagacagaaactcaaagaaccggcctcaggggatctgagcaaattccaccgtcgtcaattcctggtgctccgtgaaagatgctctttccctcggggcttcggagccggagcatttgtagacagtt

SEQ ID NO: 295135 - DNA, 165 bp, Homo sapiens; identical to SEQ ID NO: 133596
  chr21:42218980-42219145
  hyper

SEQ ID NO: 295136 - DNA, 123 bp, Homo sapiens
  chr21:42539420-42539543
  hyper
cagcggacgggaaacgcctcgaaagcagccagacccggcgactgaaatgaggcggaggagcttggcgaggggaggcgcaggctcggaaaggcgcgcgaggctccaggctccttcccgatccac

SEQ ID NO: 295137 - DNA, 1593 bp, Homo sapiens; identical to SEQ ID NO: 133598
  chr21:42539583-42541176
  hyper

SEQ ID NO: 295138 - DNA, 68 bp, Homo sapiens
  chr21:42688551-42688619
  hyper
ccaccctccgccagcgacctcagagctcccgggcacagcccggggcacagccccgcgcacctgccccg

SEQ ID NO: 295139 - DNA, 819 bp, Homo sapiens
  chr21:42879240-42880059
  hyper
ccggcacggagcgcaagcggaggagccagaccggctcctcccgggcgggttcctgccggtgccgggtgtccaggaggccccggccctgatcgccgccagcgggtcgccgcaacggggcctgagtcgcgagcagtccctccccgagactgactggccgttcgcacctcgcccgggggccctccagcagcctggcccagcggtccccgccgcgccggccgtatcgttcccggcatctcagcgagtttccagtttctccctacctcagtagggaaccaagaagcagaaggagttcaggtaacactgcgggactgcagagatttcccccaaacaaagaagccaaccgacagcactcccagtcctcctccccaaagagaaaaggcgcaccggtgctcccaggcgggggccgtggagggcaggcggactaggagccagctttggggaccccgggggactctcttccaccaactggctagggactcgcaggaccacctgccccaacctcgcgatgccaagccaacaggggcggcgagggctctcggccgtgcgcaaggggtcccaggcgcccagcactctcccagcaccccgggaggcgccctgcccggctggccccagcgctcgaccctcgggcgcactcacctgccgcgccgcgctcctcacacccgctttcacctccgggcggggcagggggcatcggcgggtcccaggcgcccaggttcccctccccagcccggaccccgagccgggaccctggtaccggcgccgctcacctgccgcgctccaggcggcgctccccgcccctcgccctccgcctccgcctcc

SEQ ID NO: 295140 - DNA, 121 bp, Homo sapiens; identical to SEQ ID NO: 206018
  chr21:42880104-42880225
  hyper

SEQ ID NO: 295141 - DNA, 142 bp, Homo sapiens; identical to SEQ ID NO: 206019
  chr21:42880260-42880402
  hyper

SEQ ID NO: 295142 - DNA, 87 bp, Homo sapiens; identical to SEQ ID NO: 226286
  chr21:43067058-43067145
  hyper

SEQ ID NO: 295143 - DNA, 837 bp, Homo sapiens; identical to SEQ ID NO: 133606
  chr21:43181626-43182463
  hyper

SEQ ID NO: 295144 - DNA, 109 bp, Homo sapiens
  chr21:43186325-43186434
  hyper
gaggaagcgctgggcggacggatcaacaccccgggccccgtgccggaccccactgccaggcccgagccccggagctccaccgcgcaagcgccgggcgcccgggaagcct

SEQ ID NO: 295145 - DNA, 106 bp, Homo sapiens; identical to SEQ ID NO: 206022
  chr21:43186592-43186698
  hyper

SEQ ID NO: 295146 - DNA, 507 bp, Homo sapiens; identical to SEQ ID NO: 206023
  chr21:43186889-43187396
  hyper

SEQ ID NO: 295147 - DNA, 294 bp, Homo sapiens
  chr21:43188161-43188455
  hyper
ttcctgagacgcaacggtgagtgaaggcttatttttggccacaggagattaataatgaagacaggagggcggagctaaaggagagggtattttaacgacattaactgtgtttttgtgttagtaactcggaaagagagaggctgccccaagtcagcgcattgaaagccgcagacctagtgtctccaggctcccccttccaaacgggcgcggaccttctttcatagcctgtagcggggagccgcgtctccccactgcctccccactcccatccggccgctctttggagggaactca

SEQ ID NO: 295148 - DNA, 612 bp, Homo sapiens; identical to SEQ ID NO: 241475
  chr21:43188776-43189388
  hyper

SEQ ID NO: 295149 - DNA, 979 bp, Homo sapiens
  chr21:43373386-43374365
  hyper
aggggctgcagcgacgcctccaggaaagacctcggcccggaccgcccgccccggcatctgccgccccccggcccgcagtcccggaaactcacccctttcctctcggcctcctcgttcagggcggtcacccaggccgcctgccactggctcctccagctgcccagcgtcaggatccaggagagcagcgcgtcggaccccgggcgcggcccctctccaggctccaccgcccgccgctggggctggggtcgcgccctggccagcgcccactgcgccaggtacaggcctaccgtggccagggccgcgacgaagagcgacaccagcgcgagccactgcgcctccccgagccacgagcccagccgggccatggccatggcgcatccccggcccgcctcgccccaacttccccggcagccccgggccggaacggcggactcaggacacgcgctggctgcggccacagcgcgctgggggcgtggagggggcgcggcggggtcggagcccggcgaggagcgtggccgggggcctctgggcgggcaagcggggaggaaacgcgcggcggccgcggcccgggctgggcgcaagccccgcacacctgcggaacaggggcgcgagcggaccccgcggcccgcgctcccgactcggcgtctgggaagttcctgggccgctgcgggccgcgcttcctcctgcgcgcgccgccccgggcgtcccgcccgcggcccagcggtggccggaggaggctctggccgcggggcggggcggggcgggggcggtgcccgagggagggggcgcggccgggcctgcgggggccgcagtcctcccccctgctcccaacgcggcgtgcccccgcccccctaaaggcccggccttcccggccccgccacgtgcgcgcgtcgcccgcccctccggcgcctgcccgcgggccgcgaggtgacccgggcctccggattcatcagcccaaccccggcggctgctgtgcggc

SEQ ID NO: 295150 - DNA, 129 bp, Homo sapiens
  chr21:43429158-43429287
  hyper
atcgtgtgaacaatcgctggactattttgtaacacacgcgtgccctcggaggctcggtgccagggctgtgagcgcttgcacgaaaggaaaaaccccaggccgtgtgaagtctaactttccccgtcctct

SEQ ID NO: 295151 - DNA, 66 bp, Homo sapiens; identical to SEQ ID NO: 133616
  chr21:43429338-43429404
  hyper

SEQ ID NO: 295152 - DNA, 112 bp, Homo sapiens; identical to SEQ ID NO: 241478
  chr21:43430369-43430481
  hyper

SEQ ID NO: 295153 - DNA, 46 bp, Homo sapiens; identical to SEQ ID NO: 206025
  chr21:43639848-43639894
  hyper

SEQ ID NO: 295154 - DNA, 65 bp, Homo sapiens
  chr21:44496297-44496362
  hyper
gccacccccacccgcggaccccggtggtgtcttctacctggtgttccgatgctgttttacttggt

SEQ ID NO: 295155 - DNA, 110 bp, Homo sapiens; identical to SEQ ID NO: 206026
  chr21:44513219-44513329
  hyper

SEQ ID NO: 295156 - DNA, 176 bp, Homo sapiens; identical to SEQ ID NO: 206027
  chr21:44514586-44514762
  hyper

SEQ ID NO: 295157 - DNA, 251 bp, Homo sapiens; identical to SEQ ID NO: 241482
  chr21:44527798-44528049
  hyper

SEQ ID NO: 295158 - DNA, 75 bp, Homo sapiens; identical to SEQ ID NO: 241483
  chr21:44845911-44845986
  hyper

SEQ ID NO: 295159 - DNA, 38 bp, Homo sapiens; identical to SEQ ID NO: 206028
  chr21:44847473-44847511
  hyper

SEQ ID NO: 295160 - DNA, 59 bp, Homo sapiens; identical to SEQ ID NO: 206029
  chr21:44847864-44847923
  hyper

SEQ ID NO: 295161 - DNA, 179 bp, Homo sapiens; identical to SEQ ID NO: 226295
  chr21:45182012-45182191
  hyper

SEQ ID NO: 295162 - DNA, 156 bp, Homo sapiens
  chr21:45182669-45182825
  hyper
gaacaaggagaaggcggaaccaggggctgcagaaccagcccctccccaatgaggaccccctctggacgcccctccccatggagaacaccaggagccacagaccccagaccacagagcacacaggggagggcacggggcggccggggcagggtgtct

SEQ ID NO: 295163 - DNA, 159 bp, Homo sapiens; identical to SEQ ID NO: 241486
  chr21:45286201-45286360
  hyper

SEQ ID NO: 295164 - DNA, 429 bp, Homo sapiens
  chr21:45381212-45381641
  hyper
tgtctcgtgggaaacggtaagcgcgtagacactttgtctcacgtgagaaatggtgaacccacatacactttgtctcatatgggaaacggtgagcgcatagacactttgtctcatgtgggaaagggtgagcacgtagacactttgtctcatatggaaaacagtgaacgcgtagacactttgtctcgtgggaaacggtgagcgcgtatacactttgtctcatatggaaaacagtgagcgcgtagacactttgtctcgtgggaaatggtgaacccacatacactttgtctcatatgggaaacggtgagcgcgtatacgctttgtctcatgtgggaaatggtgagcgcatagatactttgtctcatgtgggaaatggtgaacccacatacactttgtctcatatggaaaacggtgagcgcgtatacactttgt

SEQ ID NO: 295165 - DNA, 71 bp, Homo sapiens; identical to SEQ ID NO: 206031
  chr21:45526943-45527014
  hyper

SEQ ID NO: 295166 - DNA, 63 bp, Homo sapiens; identical to SEQ ID NO: 206032
  chr21:45553436-45553499
  hyper

SEQ ID NO: 295167 - DNA, 92 bp, Homo sapiens; identical to SEQ ID NO: 241488
  chr21:45557938-45558030
  hyper

SEQ ID NO: 295168 - DNA, 164 bp, Homo sapiens; identical to SEQ ID NO: 206033
  chr21:45660235-45660399
  hyper

SEQ ID NO: 295169 - DNA, 90 bp, Homo sapiens; identical to SEQ ID NO: 241489
  chr21:45661247-45661337
  hyper

SEQ ID NO: 295170 - DNA, 228 bp, Homo sapiens; identical to SEQ ID NO: 241490
  chr21:45662076-45662304
  hyper

SEQ ID NO: 295171 - DNA, 540 bp, Homo sapiens
  chr21:45662515-45663055
  hyper
gggcgcaggtgagccgggcgggctgcgggcagcgccacctcctcccggaggccctccctgattgaccggccgggaaccgcgcgcctctgggcctgcggctgaggtccggggctgcgccgcgccgatgagctgacgccgggccgagcgctccacccccagggccgggcgcacctgaatcccctccacccgcgggactgcggagagggggacggcccccggataccgcgtgggggctttgggaggatggggaatgggtcctgggggagcagagcctcccaaattaaggcctcccaagagcgcggccggtcatccgcggcggcgaagggaaggtgccctgtcggtgcgtccggaccccgcagccccccagtgccgcccgggggcggtgggagaggggccgacaccgcagggcccgccgtgctgtggccgagggggcaggtccaggctctgcttcccgggcagacgccggagaccccagcaagccaagtgctgcgggcagccccccccccgcccccccgagagaggggacgccgcgtggaggcc

SEQ ID NO: 295172 - DNA, 277 bp, Homo sapiens; identical to SEQ ID NO: 206034
  chr21:45713496-45713773
  hyper

SEQ ID NO: 295173 - DNA, 139 bp, Homo sapiens; identical to SEQ ID NO: 241491
  chr21:45719673-45719812
  hyper

SEQ ID NO: 295174 - DNA, 224 bp, Homo sapiens; identical to SEQ ID NO: 206035
  chr21:45875732-45875956
  hyper

SEQ ID NO: 295175 - DNA, 44 bp, Homo sapiens
  chr21:45875988-45876032
  hyper
agaagctgcagccgtcaccgtcctcctggcgtccaccctgagga

SEQ ID NO: 295176 - DNA, 169 bp, Homo sapiens; identical to SEQ ID NO: 206036
  chr21:46129207-46129376
  hyper

SEQ ID NO: 295177 - DNA, 923 bp, Homo sapiens; identical to SEQ ID NO: 241498
  chr21:46130970-46131893
  hyper

SEQ ID NO: 295178 - DNA, 352 bp, Homo sapiens
  chr21:46143227-46143579
  hyper
gcgcgccttcccctcgggttcaccaagcctgtcattttcagcctgcccgaggcaaagcccaccctacccagccaagcatgttcttaaaattctttacagattaacccacgtgaatctaaacccggtagaggcaaacgctttcccttccactgtgagctgcgttgtaatttaccccaacgacctgttgaaaagaccaagggagcttagcaaccagccgtccccagggccccggggggaagctgcaattaccgggtgcgaggccggcggggccgcagcccccacttcaaaggcgcgggaggagccgagggaggcggagctgtaattagtgcgggccccgccgggcgaccacggg

SEQ ID NO: 295179 - DNA, 275 bp, Homo sapiens; identical to SEQ ID NO: 241500
  chr21:46293549-46293824
  hyper

SEQ ID NO: 295180 - DNA, 208 bp, Homo sapiens; identical to SEQ ID NO: 241501
  chr21:46294044-46294252
  hyper

SEQ ID NO: 295181 - DNA, 216 bp, Homo sapiens
  chr21:46351437-46351653
  hyper
ggaaattcattatgggaatgtgcgcgttgtggagatgctcagaccgcgaacagtactgcgggaacccaaacgatcatttttaaccccagacgtccctgaaccaaagccaaagtctacaggtcactggggcagaggccgcccgaaaccagctgtcccctcccggcctaggcgcgccaggtccccgcccagccggggcgatcctttggtcggacagtg

SEQ ID NO: 295182 - DNA, 394 bp, Homo sapiens
  chr21:46352279-46352673
  hyper
cgctccgagcctggccgcctccctggggcgcgtgaagggagctttccttccccgggaaaggccggggccagagacccgcactcggaccaggcgggggctgcggggccagagtgggctggggagggctgggagggcgtctggggccggctcctccaggctgggggccgccagctccgggaaggcagtcctggcctgcggatggggccgcgcgtggggcccggcggggcggcctcgggaggcgtccaggctgcgggagcgggaggagcggccgtgcgggcgccagcgccgtgggtggaggtcgccgtccctcctgaggggcagccggtgcatttgggacccgggagcagagcccgcgcctccccagcggcctccccgggggtctcaccgggtctcc

SEQ ID NO: 295183 - DNA, 79 bp, Homo sapiens; identical to SEQ ID NO: 241502
  chr21:46359652-46359731
  hyper

SEQ ID NO: 295184 - DNA, 220 bp, Homo sapiens; identical to SEQ ID NO: 133687
  chr21:46360167-46360387
  hyper

SEQ ID NO: 295185 - DNA, 117 bp, Homo sapiens; identical to SEQ ID NO: 226304
  chr21:46686339-46686456
  hyper

SEQ ID NO: 295186 - DNA, 344 bp, Homo sapiens; identical to SEQ ID NO: 206038
  chr21:46800406-46800750
  hyper

SEQ ID NO: 295187 - DNA, 318 bp, Homo sapiens
  chr21:46800780-46801098
  hyper
cactcccctcgcacccagcgtccgtcggtgcacacacgctcacctcccgcacctcccgtggaggcggcatccaggcagggaagcaaggacactctgcgtccattcctctctctaaacaccaaggcccccgcaatccgaggaatatatttgacagaaacaagaaaaaaggatgaaagtggccaagacaagccgatcccttctatctgttttcaggaacatgattttgtggccccaaactccttgaagcccgatgcttccacctccctcccactccactctcccccgacacatccgtccagctcccgttcctcttgggca

SEQ ID NO: 295188 - DNA, 242 bp, Homo sapiens; identical to SEQ ID NO: 226307
  chr21:46801324-46801566
  hyper

SEQ ID NO: 295189 - DNA, 60 bp, Homo sapiens; identical to SEQ ID NO: 241505
  chr21:46824687-46824747
  hyper

SEQ ID NO: 295190 - DNA, 94 bp, Homo sapiens
  chr21:46825731-46825825
  hyper
tcacggcctcgtccccgcagcgccgggtcccgggactgaccgcgggcggaaggcggcggagcgcggggcgtcgtctccgcgtttccaacctgtt

SEQ ID NO: 295191 - DNA, 104 bp, Homo sapiens; identical to SEQ ID NO: 206041
  chr21:46950778-46950882
  hyper

SEQ ID NO: 295192 - DNA, 89 bp, Homo sapiens
  chr21:47010001-47010090
  hyper
gtcggtcacggtgtcgcgtattctccgcgggacggacgtgtcttcaggtccaacccgcccggtgggaagcgcagacactgattttccag

SEQ ID NO: 295193 - DNA, 173 bp, Homo sapiens; identical to SEQ ID NO: 226309
  chr21:47050917-47051090
  hyper

SEQ ID NO: 295194 - DNA, 54 bp, Homo sapiens; identical to SEQ ID NO: 206042
  chr21:47062898-47062952
  hyper

SEQ ID NO: 295195 - DNA, 139 bp, Homo sapiens; identical to SEQ ID NO: 206043
  chr21:47063293-47063432
  hyper

SEQ ID NO: 295196 - DNA, 106 bp, Homo sapiens; identical to SEQ ID NO: 206044
  chr21:47394340-47394446
  hyper

SEQ ID NO: 295197 - DNA, 280 bp, Homo sapiens; identical to SEQ ID NO: 241509
  chr21:47401140-47401420
  hyper

SEQ ID NO: 295198 - DNA, 149 bp, Homo sapiens
  chr21:47401762-47401911
  hyper
acatgagggcggcccgtgctctgctgcccctgctgctgcaggcctgctggacagccgcgcaggatgagccggagaccccgagggccgtggccttccagggtgagtggtggcttggggtgcaggctccagaccccccgctctttgctgcc

SEQ ID NO: 295199 - DNA, 281 bp, Homo sapiens; identical to SEQ ID NO: 226312
  chr21:47649462-47649743
  hyper

SEQ ID NO: 295200 - DNA, 110 bp, Homo sapiens; identical to SEQ ID NO: 206045
  chr21:47717450-47717560
  hyper

SEQ ID NO: 295201 - DNA, 84 bp, Homo sapiens; identical to SEQ ID NO: 206046
  chr21:47717589-47717673
  hyper

SEQ ID NO: 295202 - DNA, 116 bp, Homo sapiens; identical to SEQ ID NO: 206047
  chr21:47717748-47717864
  hyper

SEQ ID NO: 295203 - DNA, 45 bp, Homo sapiens
  chr21:47717865-47717910
  hyper
cgtccttccgtagaaaaggcttgcgtcagtatttcctgcttttac

SEQ ID NO: 295204 - DNA, 165 bp, Homo sapiens; identical to SEQ ID NO: 241512
  chr21:47744098-47744263
  hyper

SEQ ID NO: 295205 - DNA, 44 bp, Homo sapiens; identical to SEQ ID NO: 206048
  chr21:47799137-47799181
  hyper

SEQ ID NO: 295206 - DNA, 52 bp, Homo sapiens; identical to SEQ ID NO: 206049
  chr21:47799225-47799277
  hyper

SEQ ID NO: 295207 - DNA, 110 bp, Homo sapiens; identical to SEQ ID NO: 206050
  chr21:48087089-48087199
  hyper

SEQ ID NO: 295208 - DNA, 40 bp, Homo sapiens; identical to SEQ ID NO: 241515
  chr22:17565650-17565690
  hyper

SEQ ID NO: 295209 - DNA, 285 bp, Homo sapiens
  chr22:17601506-17601791
  hyper
acgggcagcaggaggcgccgctgccggtcccggtgccgcccgcgccccccgccgagcggctcccggggcccccgacggccccggccgcggcgcccccgccgaagtccgcggctgtcatgctgcaggaggaggtgggcgtggaggtggaggaggaggtggccgctgaggaggagaaggcgacaggcgcggggccggcgggggcgcccacctgagccggcggccccaggagcgcggcgttgggcaccagcggcttgctgacgctgaggctctcgtcgtcgtcctcgc

SEQ ID NO: 295210 - DNA, 139 bp, Homo sapiens
  chr22:17602027-17602166
  hyper
ggggctctggggccgcccagctgttccctccccgccaaccccgggcgggcgaggcgggctaggcggccgaggggagccggggcccgccgcctccccagcagtggggactcgcacctgggccgggcggcggcgagatccg

SEQ ID NO: 295211 - DNA, 237 bp, Homo sapiens; identical to SEQ ID NO: 206052
  chr22:17849877-17850114
  hyper

SEQ ID NO: 295212 - DNA, 50 bp, Homo sapiens; identical to SEQ ID NO: 241521
  chr22:18257398-18257448
  hyper

SEQ ID NO: 295213 - DNA, 36 bp, Homo sapiens; identical to SEQ ID NO: 206053
  chr22:18441176-18441212
  hyper

SEQ ID NO: 295214 - DNA, 186 bp, Homo sapiens; identical to SEQ ID NO: 241523
  chr22:18507000-18507186
  hyper

SEQ ID NO: 295215 - DNA, 198 bp, Homo sapiens; identical to SEQ ID NO: 241524
  chr22:18560627-18560825
  hyper

SEQ ID NO: 295216 - DNA, 31 bp, Homo sapiens; identical to SEQ ID NO: 206054
  chr22:18593348-18593379
  hyper

SEQ ID NO: 295217 - DNA, 274 bp, Homo sapiens; identical to SEQ ID NO: 133753
  chr22:18923626-18923900
  hyper

SEQ ID NO: 295218 - DNA, 130 bp, Homo sapiens; identical to SEQ ID NO: 241527
  chr22:19132116-19132246
  hyper

SEQ ID NO: 295219 - DNA, 426 bp, Homo sapiens; identical to SEQ ID NO: 241528
  chr22:19419825-19420251
  hyper

SEQ ID NO: 295220 - DNA, 472 bp, Homo sapiens; identical to SEQ ID NO: 241529
  chr22:19466618-19467090
  hyper

SEQ ID NO: 295221 - DNA, 589 bp, Homo sapiens
  chr22:19701676-19702265
  hyper
ccggacggatggtccgaggaccggcatggacccgggtcccagcgagggcggggggagcgtaaggctgggcctgggctgcggcaccggggaggtggcggggaggaggccggcaggaacagccgtgcagggcgggggcggcgcgggtctggtcgggtgaccccgggcgcggccagggctgtaggaggcgagggcgtcgccccgaggccgtggtctcgggtccatggtgggggacctgggtccccgcccccccgggccgccctgggtcgcgcgtgggcgcggcgggcgccgattggctgccgggcgcgcgggcggagcgggcggcggcggcggcggcgcggaggggccgctcaccccgcagcccggcctcggcctccgccgcttgtcgtcgcgccccgcccgcgagcccgccccgcacgtcccccgccggcggccaccatgagcacaggcctgcggtacaagagcaagctggcgaccccaggtgagcccagcgcctgcccgcgtgcccgcgcgcgcctttgtccccgccgcccgcgcgcctctcaccgtgtctctccgtctctcccccgcccgccggcccggacccgctcgg

SEQ ID NO: 295222 - DNA, 128 bp, Homo sapiens; identical to SEQ ID NO: 206056
  chr22:19706043-19706171
  hyper

SEQ ID NO: 295223 - DNA, 119 bp, Homo sapiens; identical to SEQ ID NO: 241533
  chr22:19718927-19719046
  hyper

SEQ ID NO: 295224 - DNA, 343 bp, Homo sapiens
  chr22:19742992-19743335
  hyper
cgattggggagcgcccgaggctgctgtgttggcgcccgcccccgagggctgggagtcaagaggtgggagtggagaggggaggagagggcagagctcctgggcgcgcggtcctgtccgggttcaggcgaggtttgggcccccagccgcccgcccttctctggggcccggggctgagctgctgatggcgggagggaggacggtgagggcagctcctggcggcgggccttccccgagaccccgaggccgcgtccaaatagggcgctgtaagcaactccaggcggtccatcctaaaacgaattagcagggtcaagtaaagcccggctcctcagtgcttccctttgca

SEQ ID NO: 295225 - DNA, 81 bp, Homo sapiens; identical to SEQ ID NO: 133775
  chr22:19743352-19743433
  hyper

SEQ ID NO: 295226 - DNA, 80 bp, Homo sapiens
  chr22:19743887-19743967
  hyper
ccgccgcgggtcctcggtcgcatccctcccttcagcctcctgcactcagccaagcctctgctccccaccccttacctacc

SEQ ID NO: 295227 - DNA, 59 bp, Homo sapiens; identical to SEQ ID NO: 133778
  chr22:19744034-19744093
  hyper

SEQ ID NO: 295228 - DNA, 288 bp, Homo sapiens
  chr22:19748301-19748589
  hyper
ctcggcccgcggcgcggggcagcgctcagcttggtggcgggggcggcggcggcggcccgcgggtcatgatctccgccgtgtccagcccgtggctcacgcagctctcgcatttctgcgacgttgcagccttcacggccagcagcctgagcagcctgggggccgcggggggcttcccgggcgccgcgtcgcccggcgccgacccgtacggcccgcgcgagcccccgccgccgccgccgcgctacgacccgtgcgccgccgccgcccccggcgccccgggcccgccgccgc

SEQ ID NO: 295229 - DNA, 40 bp, Homo sapiens; identical to SEQ ID NO: 133782
  chr22:19749084-19749124
  hyper

SEQ ID NO: 295230 - DNA, 169 bp, Homo sapiens
  chr22:19753518-19753687
  hyper
gagaaaggtagggccggggtcgtgggatccgggttccggccctgtgcgcgctctaccccgggccggcggcctcgcccgacctcgcctgcgcccccggggcgctccaggctttcgcgccggttgcacaacggccgcggcggcgggcaagcgcgcactcgcccgcccggcc

SEQ ID NO: 295231 - DNA, 105 bp, Homo sapiens; identical to SEQ ID NO: 133785
  chr22:19753869-19753974
  hyper

SEQ ID NO: 295232 - DNA, 38 bp, Homo sapiens; identical to SEQ ID NO: 241536
  chr22:19754288-19754326
  hyper

SEQ ID NO: 295233 - DNA, 36 bp, Homo sapiens
  chr22:19754610-19754646
  hyper
ggtccttccccggccccgagggccaagggggtcccc

SEQ ID NO: 295234 - DNA, 42 bp, Homo sapiens; identical to SEQ ID NO: 241538
  chr22:20004350-20004392
  hyper

SEQ ID NO: 295235 - DNA, 251 bp, Homo sapiens; identical to SEQ ID NO: 241539
  chr22:20104760-20105011
  hyper

SEQ ID NO: 295236 - DNA, 433 bp, Homo sapiens; identical to SEQ ID NO: 206059
  chr22:20255237-20255670
  hyper

SEQ ID NO: 295237 - DNA, 353 bp, Homo sapiens; identical to SEQ ID NO: 241541
  chr22:20286611-20286964
  hyper

SEQ ID NO: 295238 - DNA, 390 bp, Homo sapiens; identical to SEQ ID NO: 206060
  chr22:21319195-21319585
  hyper

SEQ ID NO: 295239 - DNA, 116 bp, Homo sapiens; identical to SEQ ID NO: 241546
  chr22:21336323-21336439
  hyper

SEQ ID NO: 295240 - DNA, 156 bp, Homo sapiens; identical to SEQ ID NO: 241547
  chr22:21356377-21356533
  hyper

SEQ ID NO: 295241 - DNA, 76 bp, Homo sapiens; identical to SEQ ID NO: 206061
  chr22:21368225-21368301
  hyper

SEQ ID NO: 295242 - DNA, 115 bp, Homo sapiens; identical to SEQ ID NO: 206062
  chr22:21368697-21368812
  hyper

SEQ ID NO: 295243 - DNA, 251 bp, Homo sapiens
  chr22:21385764-21386015
  hyper
gctcgcccatggatacgtaggtgaacaggtaggcagagcccgtgcgtggcacacgtgccccaaattctgcatagcatagggctgccagcagggaggccacagcggccacaccgaaggacaagagcacagcagggccagccacctccttggccacggcacctgtgagcacgtagagacccgagcccaccatgccacccacgcccagaagagtcaggtccagcgtggacaggcagcgccgcagtgacgtctcc

SEQ ID NO: 295244 - DNA, 78 bp, Homo sapiens
  chr22:21386501-21386579
  hyper
ccccagagtcgagccggacccggaacaggagccgcggctctgcgtcggggcgggtgtggcccaggcagccacctggcc

SEQ ID NO: 295245 - DNA, 121 bp, Homo sapiens
  chr22:21399922-21400043
  hyper
cccattccatgaaaggggggcgatgctggaaccgcctaggggaggcagggggataaacgcagcaaggcgcccaatccggtgcatggtctgtggcgcatgcagtgtatcagcccgggcgagg

SEQ ID NO: 295246 - DNA, 129 bp, Homo sapiens
  chr22:21400283-21400412
  hyper
ttcctgtgagaggtctggggaggatgaagagcagaaagaagaggctatggtggcctgtgggcgtctttcaggggtccccgaggccgagcagggtcccgaggccaattgggactccgacctggagacgga

SEQ ID NO: 295247 - DNA, 195 bp, Homo sapiens; identical to SEQ ID NO: 241551
  chr22:21922624-21922819
  hyper

SEQ ID NO: 295248 - DNA, 35 bp, Homo sapiens; identical to SEQ ID NO: 206064
  chr22:22005759-22005794
  hyper

SEQ ID NO: 295249 - DNA, 165 bp, Homo sapiens; identical to SEQ ID NO: 206065
  chr22:22006759-22006924
  hyper

SEQ ID NO: 295250 - DNA, 321 bp, Homo sapiens; identical to SEQ ID NO: 206066
  chr22:22012021-22012342
  hyper

SEQ ID NO: 295251 - DNA, 96 bp, Homo sapiens; identical to SEQ ID NO: 241555
  chr22:22020155-22020251
  hyper

SEQ ID NO: 295252 - DNA, 42 bp, Homo sapiens
  chr22:22090486-22090528
  hyper
gttcctccggctcgcggggatgggccgagggcgtgcagggcc

SEQ ID NO: 295253 - DNA, 331 bp, Homo sapiens
  chr22:22220990-22221321
  hyper
gtaaaaacttcaagacggaaatatgccaccaacactggcgtcagtaatccattttagaaagcctgcgcggagaccaccattagcaccgctgaggatatttaatgaaagccgttggctgcaaacagaggcgaagagagaaaaacgattatttcggtgttctgcacacacgcggaggcaaaacgctttcaggacctcagcagccaccgccgccaacaccgacaagcatctgatggaattcacagttttacaatcgaaagtccaaaagaaggccatgatactagcaaattgaggggtggggacccttccgttgccttcccgagggtccagactt

SEQ ID NO: 295254 - DNA, 372 bp, Homo sapiens; identical to SEQ ID NO: 226332
  chr22:22292760-22293132
  hyper

SEQ ID NO: 295255 - DNA, 216 bp, Homo sapiens; identical to SEQ ID NO: 226333
  chr22:22306476-22306692
  hyper

SEQ ID NO: 295256 - DNA, 311 bp, Homo sapiens
  chr22:22307056-22307367
  hyper
ccctccggttcctcggtcccatttcacccctgtgcgccttgggcgctcgcctgaccctcgtcccagccccgtcagccctctaatcccgtcccccccggcctcctcacccctggtctccgcgggcctcagctgtctcctcgcggctccgtgtcccgcaagctgctgccggccggccccgcccacttcccgtccctggccgccgcgggcgccgcgggcgccgcgcaggcgcagtcgggcctccaggctggcggggccggacctctgctgccccctggcggctacgtggacggtgactgcggccctttagtggt

SEQ ID NO: 295257 - DNA, 257 bp, Homo sapiens; identical to SEQ ID NO: 241558
  chr22:22337127-22337384
  hyper

SEQ ID NO: 295258 - DNA, 150 bp, Homo sapiens; identical to SEQ ID NO: 206068
  chr22:22862458-22862608
  hyper

SEQ ID NO: 295259 - DNA, 351 bp, Homo sapiens; identical to SEQ ID NO: 241560
  chr22:23411783-23412134
  hyper

SEQ ID NO: 295260 - DNA, 166 bp, Homo sapiens; identical to SEQ ID NO: 241561
  chr22:23484157-23484323
  hyper

SEQ ID NO: 295261 - DNA, 80 bp, Homo sapiens; identical to SEQ ID NO: 241562
  chr22:23522446-23522526
  hyper

SEQ ID NO: 295262 - DNA, 441 bp, Homo sapiens
  chr22:23523110-23523551
  hyper
cgcgcagcccggcggcgcaggtaaggccggccgcgccatggtggacccggtgggcttcgcggaggcgtggaaggcgcagttcccggactcagagcccccgcgcatggagctgcgctcagtgggcgacatcgagcaggagctggagcgctgcaaggcctccattcggcgcctggagcaggaggtgaaccaggagcgcttccgcatgatctacctgcagacgttgctggccaaggaaaagaagagctatgaccggcagcgatggggcttccggcgcgcggcgcaggcccccgacggcgcctccgagccccgagcgtccgcgtcgcgcccgcagccagcgcccgccgacggagccgacccgccgcccgccgaggagcccgaggcccggcccgacggcgagggttctccgggtaaggccaggcccgggaccgcccgcaggcccgg

SEQ ID NO: 295263 - DNA, 91 bp, Homo sapiens; identical to SEQ ID NO: 241564
  chr22:23864330-23864421
  hyper

SEQ ID NO: 295264 - DNA, 718 bp, Homo sapiens
  chr22:24110159-24110877
  hyper
gcggggccccgggcggggcctcaggaacacgcccccagcgggaggcggcactgcccccaaccctatcccccttctcccgtcctccggacatctcccttccagcagctccgggtctcggctggaaatgggaccctgctccctccctgcgcctggcaggctgtgcgggttctggggacaggggccagtgtcgcaaagcgccgagggcttaaggagggcgacagtgccttctgttaggaccaccgcagagggcagggagcggagttgggggttgttgcgagccctggaggggagaggagacggggaggcgacgggatggggccagctgggaaggggacgcgaggctccaggctggactccgctctctgccccctcccggactcggctgtctgtcccctccctccagacagggtctgctgaccaccgcgtggcctgggagtctccggtggcctagggaagtgaagcgcggccctggggaaggcctggagcaacccatccccagaactcccacgagggggcgtcccaacccgtcttcgactgttggccaaaatgcgctgccaatgctggcagccttacgcagtgcccgcgggggatatgaggccccccgcgcggccctgaaccccaccggattccccgggccggcccgaccgcccccacctagtccctggccccgcgagtgcaacccccgacactaacggcctttacgcgacatccgagcagc

SEQ ID NO: 295265 - DNA, 61 bp, Homo sapiens
  chr22:24181727-24181788
  hyper
acctccccaaacgtccagggccccactcaaatgtgccggccgctgtcggggttcttccccg

SEQ ID NO: 295266 - DNA, 89 bp, Homo sapiens; identical to SEQ ID NO: 206070
  chr22:24236849-24236938
  hyper

SEQ ID NO: 295267 - DNA, 36 bp, Homo sapiens; identical to SEQ ID NO: 241568
  chr22:24372937-24372973
  hyper

SEQ ID NO: 295268 - DNA, 187 bp, Homo sapiens
  chr22:24552924-24553111
  hyper
aattgcaggctttcccagcccttgtctgcagagagaatcattacctgtggatggcgcggggaatcccttgccctcagtagccccgcctggagagacaggaccgcgttgtggggggtggggtgtaggagtgggcggaggccagggcgcccctggtggcctgtgtacaaccctgcggccagagaggccc

SEQ ID NO: 295269 - DNA, 36 bp, Homo sapiens; identical to SEQ ID NO: 206072
  chr22:24643678-24643714
  hyper

SEQ ID NO: 295270 - DNA, 237 bp, Homo sapiens; identical to SEQ ID NO: 241572
  chr22:24666726-24666963
  hyper

SEQ ID NO: 295271 - DNA, 173 bp, Homo sapiens
  chr22:24819901-24820074
  hyper
cgggagccggcgtgcgagcggcaggtcagccggggtgctaggtctggcgtgcggggtcctgggtgccgggtccggggtgcggggtgccgggggtccggggctggtggccgggcggcgtggggccgtcgggggtgcggggccgggaggactgggaggctggggttctgctcccc

SEQ ID NO: 295272 - DNA, 61 bp, Homo sapiens
  chr22:24820486-24820547
  hyper
aggtggaggagccgggcggagaccggttccccgggaaggtgaggcgcgggcagagataccc

SEQ ID NO: 295273 - DNA, 91 bp, Homo sapiens; identical to SEQ ID NO: 206073
  chr22:24989196-24989287
  hyper

SEQ ID NO: 295274 - DNA, 254 bp, Homo sapiens; identical to SEQ ID NO: 206074
  chr22:25348188-25348442
  hyper

SEQ ID NO: 295275 - DNA, 787 bp, Homo sapiens; identical to SEQ ID NO: 206075
  chr22:25348485-25349272
  hyper

SEQ ID NO: 295276 - DNA, 409 bp, Homo sapiens; identical to SEQ ID NO: 206076
  chr22:25349348-25349757
  hyper

SEQ ID NO: 295277 - DNA, 514 bp, Homo sapiens
  chr22:25507304-25507818
  hyper
agccccgagggaccgtgagcgagttgggacttgggggagaaaaaaatgggggcggacgtcagctccctgggcggccgccgccaccgcctccgcctccccgaggcccctcctgcattcctgggcagcgaagcccctcgctaagacgggggctgatgtcatcccgggctgctcagccaggggacccgggggccctggtggctgcctccggaagtgagctagccgcctgccggccgacaggtttggaatctccagccagaggacagaaaacctgcatgggtcaggtgagcggggtctggccgagggcagccgggcagggggcagcagggtgcggcagcttgcccaccggaacctcccagggtgcacctcaggggggctgcctacctgaagggaagtgaggacgagggtgcccaaaggccgccccctccacccccacccccatccccatcccccgcctttcgggaccgtcacgccctggagtgagtgcagccggcttgttcctcaaagctccttgtct

SEQ ID NO: 295278 - DNA, 60 bp, Homo sapiens
  chr22:25678186-25678246
  hyper
cgaggttgggggcccggcccgctgggcgctgttcacaggtagcttggaccagagcagggg

SEQ ID NO: 295279 - DNA, 1252 bp, Homo sapiens
  chr22:25959829-25961081
  hyper
aaagacaccgagaccgaagatcaggaagctggaaattccccccagcttcggtgtttgggctgtatctcgcttttccacttccctaaatcaccctcgtggtgcgagtgtgctcgcagcagatgctccctaattgtctcttgtattgaccgtaaaaccctaacgacaggaatactctctctccttctatttctcaacaccatttcaacacccaaactaaaacctctcacctgagtgtaagggagtggtgaccttcttaagcggagagctcttccatcagagggctccctaagggcatctctgttcctagccggggagccgtcaccccactttgttctgcttagcctaagacacgcaactttttccagcttttactcttcgctgaattctcacggtggggttggggggatgttcaggctcaggagcgaggttgggggcccggcccgctgggcgctgttcaccggtagcccggaccagagcaggagtttcatcattacctgctgggataggtgggacacatgtatttccggggccaccccagacctcccggaggatgctgattgacactgtccagtttgagaactactgtgtccagggagcagaggcctccccataaccccttgggttgtggacgtctggcccagggcttctctgggtgagcggggcgggcatcagagcgcgtggaacctggggcgggaggtcggggcagtgaaggaggaggagaaggaggaggcggagaccgagggggagggaggggaggaggaagaggaggaggagtccctcgtggccaccccgaggggagggcgaccgtagagacttggtcgggaggcgccggcccagcgaggccgctgggactgtgcactgaggggcgctgaccgttggacgcgcgctccccgcagaccctcgctgaaggagcagggggcggcgcgcgtgcgcggggcgccgggcggcgcgcgagggggcggagcggggaggcgtgctgcgaccccggccggctacagcctgcggcgcgcgcagagcgctagtggggcgcgcggcgcgcgcgcggggcgggggcgcgcggaggggggggctgccccggggcggcccccccaggtcggggcgcggcgggcggcggcggcgggcgcgcgtcccgtccaggtccggagtaaccgccgccgccgccgccaaagctcgccaacatggcggacctggaggctgtgctggccgatgtcagttacctgatggccatggagaagagcaaggcgaccccggc

SEQ ID NO: 295280 - DNA, 248 bp, Homo sapiens; identical to SEQ ID NO: 57883
  chr22:25961110-25961358
  hyper

SEQ ID NO: 295281 - DNA, 42 bp, Homo sapiens; identical to SEQ ID NO: 206078
  chr22:26565123-26565165
  hyper

SEQ ID NO: 295282 - DNA, 287 bp, Homo sapiens
  chr22:26565999-26566286
  hyper
tttgcagccaaagaggttctccttggagtggggtcgcctccaaaccccaaattcccggcgcttctctgcaaccgcacccggggctaggtgccagataattatcttcctctccgggagaggacaggaaggggggtgagaagctgacccaccctgcaactgaggactagactcaaacagtgcatttgccgctccccccgacaccacagaaacccttgactcctttggttcaggctaccccgagggtctgtgttcctggatcgatctcagccaagcgtcaggataccgga

SEQ ID NO: 295283 - DNA, 315 bp, Homo sapiens; identical to SEQ ID NO: 206080
  chr22:26756625-26756940
  hyper

SEQ ID NO: 295284 - DNA, 247 bp, Homo sapiens; identical to SEQ ID NO: 206081
  chr22:26763714-26763961
  hyper

SEQ ID NO: 295285 - DNA, 215 bp, Homo sapiens; identical to SEQ ID NO: 241580
  chr22:26773510-26773725
  hyper

SEQ ID NO: 295286 - DNA, 112 bp, Homo sapiens; identical to SEQ ID NO: 206082
  chr22:26825000-26825112
  hyper

SEQ ID NO: 295287 - DNA, 171 bp, Homo sapiens; identical to SEQ ID NO: 206083
  chr22:26879459-26879630
  hyper

SEQ ID NO: 295288 - DNA, 139 bp, Homo sapiens; identical to SEQ ID NO: 206084
  chr22:26880366-26880505
  hyper

SEQ ID NO: 295289 - DNA, 45 bp, Homo sapiens
  chr22:26908201-26908246
  hyper
ccccaagcagcaccgcccctctccgtgcctcggcagagctgtcta

SEQ ID NO: 295290 - DNA, 99 bp, Homo sapiens; identical to SEQ ID NO: 133898
  chr22:26908292-26908391
  hyper

SEQ ID NO: 295291 - DNA, 97 bp, Homo sapiens
  chr22:27053097-27053194
  hyper
gcgcccctggtccgcggtcgcgcgcagcccccgcgcctctccagccctgagctctctgcggcctaatgtggacgggcaagcgttgccatgacagcgc

SEQ ID NO: 295292 - DNA, 267 bp, Homo sapiens; identical to SEQ ID NO: 206085
  chr22:27053250-27053517
  hyper

SEQ ID NO: 295293 - DNA, 236 bp, Homo sapiens
  chr22:27054028-27054264
  hyper
ggtctcggaactggaggtgggggtggggcggtggggcagggtccttgagctccccttccctcatactcagcccgcccccgacccaaccccccgagcctgccattccttcacttcccagatgtccggcgtcaaatttggctccaaaaggatggagagggctggtaggtaacccaccctcgttgaaaacaacagtgacatcagtttatggagaggttactctacgcagggacgtgctt

SEQ ID NO: 295294 - DNA, 345 bp, Homo sapiens; identical to SEQ ID NO: 241585
  chr22:27054544-27054889
  hyper

SEQ ID NO: 295295 - DNA, 313 bp, Homo sapiens
  chr22:27068608-27068921
  hyper
tgcacaggaagtcacgaggggggcgtatcccacgaggaaggcaggagggggcgtgcccctcaccggaaattagcagaggggcgtgtcccacaccggaagtcagaaagcggagcctttcttacaccggaagtcaatgaagcgggtctttcctacgctaaaaaccactgagtggagtatttagtacacaggaagtcggccagagaaacatttctcatatttgaaggccggaaagagggacatttctgacaccggaagtcagtgagaggactctttcccacacaggaagtcagctagagagccgtctcccctctct

SEQ ID NO: 295296 - DNA, 607 bp, Homo sapiens
  chr22:27299049-27299656
  hyper
tcctgagcggctattttgagagcgatggaggggagagggtattagattcctgaccttgaggtcggggaggggagggtgatgctagtggtggacgaaagacttgaagataatgagaaattgcatcaactttacccaggctgtttctgggtctagaagcaagcaaaaataaggcgggagcgggtggggggaagaaaaagaggcatttattttggagccgtatcggaagcacaagtgtcatgggctgaaaggccgccttctcctgcgggctaagggtgtgggcgacagctcgcacattcaaataagggagcgattacacggcgcttgcttctgaagacggatttcctggtagggggagcgggcgggggggctgggccggtgtaaaggggacggcaacattaggctttggcaagttaattagggttcaggagtccagcgagcgagcagggggagaggctggatttgcataaatccatttacataatgttcttcacaaattgtgcagccagaaggcagggagggggtggggagggaaagggctggggagggggaggtggttagacgcccgaggcagccgccgccaaagggggaagggcgaggcccgagatgg

SEQ ID NO: 295297 - DNA, 37 bp, Homo sapiens
  chr22:27299689-27299726
  hyper
ctgctcttgtctgcaccagggccacccctgcctatct

SEQ ID NO: 295298 - DNA, 163 bp, Homo sapiens; identical to SEQ ID NO: 206087
  chr22:27496885-27497048
  hyper

SEQ ID NO: 295299 - DNA, 63 bp, Homo sapiens
  chr22:28196459-28196522
  hyper
gttaaagttcctctcgccctggccagcgttcctgctgttgacctggggctcgaattggtccag

SEQ ID NO: 295300 - DNA, 414 bp, Homo sapiens
  chr22:28196552-28196966
  hyper
gatcaatagggcatgacagccggctctccgcggcgcgcctccggccagctactcgttccagcccaggattgggcgctccgggacgctcagcaccgcgggggctcagcgcgcacctccaccccgcctgatgtgagggacggggggcggggtattagctcctctcctgaagctccgattctgcccggggagggcctctcacatcttgcgaggccgcggggcctctaggagccgtgttggggggcccatgccccgggcggttgtcacagccgcgggtgggtctgcggggaggggacgaagccgcggatgaacggagacaaaaagttaagtggggggaatggggagggaagggggttgggagagcagagcgatcaccttctcaagtccgattgggtctgctggggagccctcaggacg

SEQ ID NO: 295301 - DNA, 210 bp, Homo sapiens
  chr22:28197049-28197259
  hyper
accgacagagcggtccctccccccgccccccggagtccccgcgccccgcagcccgagcctccaccgagcacgatccgctcgcacaatccccgtaggctccgggcgagcggctgctgcttcttcagcgggtcggaggactggaggctccgctcggcatcgccggtgccggcccccgagccgaggacgcagaggggctgcgaggcggcaggc

SEQ ID NO: 295302 - DNA, 66 bp, Homo sapiens; identical to SEQ ID NO: 206089
  chr22:28198503-28198569
  hyper

SEQ ID NO: 295303 - DNA, 48 bp, Homo sapiens; identical to SEQ ID NO: 206090
  chr22:28198605-28198653
  hyper

SEQ ID NO: 295304 - DNA, 267 bp, Homo sapiens; identical to SEQ ID NO: 241593
  chr22:28200773-28201040
  hyper

SEQ ID NO: 295305 - DNA, 188 bp, Homo sapiens
  chr22:28315374-28315562
  hyper
cgggcacacgaggcctccactgcggttgcgcagcctgccgaagagcgtgcggcttctactgcggctgcgcaagctcgacgcgcgcactcttgtctgcttacgagggctcctcccttcagctttggtccctcggggcgtctgggcagcctacgctttccggtgagttttccagttggttctttggaagc

SEQ ID NO: 295306 - DNA, 137 bp, Homo sapiens; identical to SEQ ID NO: 206091
  chr22:28838042-28838179
  hyper

SEQ ID NO: 295307 - DNA, 60 bp, Homo sapiens; identical to SEQ ID NO: 206092
  chr22:28838449-28838509
  hyper

SEQ ID NO: 295308 - DNA, 243 bp, Homo sapiens; identical to SEQ ID NO: 206093
  chr22:28838551-28838794
  hyper

SEQ ID NO: 295309 - DNA, 278 bp, Homo sapiens
  chr22:28838844-28839122
  hyper
ggccccattcccctctccaggacacttaccttcttccggggctgccatttcatcatatttgtaaagccgatacgtggaacatcaagatgttggctgggggctgggggcagatgcagggcagcgacgactgcaagtcatgctgcctccctcccaccccctaattctttcccatattcactgcgaagggaaaagccccaggagagtccagtcttttcgccttcagttcaatgaaaagtatccccaaaccacgaacacacttcccaccaggctaggaagtc

SEQ ID NO: 295310 - DNA, 143 bp, Homo sapiens
  chr22:28839263-28839406
  hyper
aatcccagccgggcttctaccatccaaaccccttttggcgaattctcctcttctcaaaaaagattagacaagcaatcaaaccctcacgcgcagcctggagcaattcccacaattctgggtgtatttctcgtttgtaaaattta

SEQ ID NO: 295311 - DNA, 88 bp, Homo sapiens; identical to SEQ ID NO: 241596
  chr22:28839653-28839741
  hyper

SEQ ID NO: 295312 - DNA, 63 bp, Homo sapiens
  chr22:29075343-29075406
  hyper
cgacaccccccaccccggtgtgcgcaggccaacacccatacacaccctcacacacccacacac

SEQ ID NO: 295313 - DNA, 95 bp, Homo sapiens; identical to SEQ ID NO: 241598
  chr22:29137894-29137989
  hyper

SEQ ID NO: 295314 - DNA, 73 bp, Homo sapiens; identical to SEQ ID NO: 241599
  chr22:29279556-29279629
  hyper

SEQ ID NO: 295315 - DNA, 73 bp, Homo sapiens; identical to SEQ ID NO: 241600
  chr22:29279911-29279984
  hyper

SEQ ID NO: 295316 - DNA, 267 bp, Homo sapiens
  chr22:29426292-29426559
  hyper
gtgcaatggcgccgcgacccggccgcggactccagcctctaaagtcgggtacctttaattaggagaaattaagtggggctgctacatattttgagaataagtaacactatttaaacttaggcagccttaaccactaacttaaccgctgaattctcgctgctacatgtctcctaaatagatcagcataatcttaactaggacttaaaatgcatcatcttcgttccggaactcagaacctgcagccgacgggagcctttggaggcttaa

SEQ ID NO: 295317 - DNA, 233 bp, Homo sapiens
  chr22:29426653-29426886
  hyper
ggcagcccgccccgaaagtcccggcccgctggattgggggttcgggggtggggggaacatagagaagcagggctggtggaggggaggagggaccctgcagggcggtacacgacgggtgggagtggggaggaggagggctcctggcgcggggaggagccgcgggaggggggatgttggccgcagggcctcggagttctgagctgtgtttgtggcttcagcgctttgatctcctg

SEQ ID NO: 295318 - DNA, 320 bp, Homo sapiens
  chr22:29467392-29467712
  hyper
ggagtttgggggtacgcgggctctgggagtggataagggggtggcgcccgggggttgagggggcccaggggcgagtgtacccaaggcgtgccggtcccgcccagccgcgctctgggtgcggcgagtctgcacactggtgcagatgttcccgccgccgcgccgggcgcaggtctgcacttgcaagcccgggaccagggacttgaaagcgcccggcgcgccgcctggacctgccccgccgggcgtcaccgctgcgctttaggcgggaactgtaggaaaatcccctctgcctggcgggagggcgggggaggaggacggcccac

SEQ ID NO: 295319 - DNA, 156 bp, Homo sapiens
  chr22:29467742-29467898
  hyper
ttgccggggtcggggcggggggaggcgggcaaagggcctaccacgctggggccgaaagtttaagcaagccgcgcgctctctgatccctaacatcccaggctgtaggataagcagtactgtctcatccatttctggacgttgcgttgggcgttttac

SEQ ID NO: 295320 - DNA, 425 bp, Homo sapiens; identical to SEQ ID NO: 206095
  chr22:29468748-29469173
  hyper

SEQ ID NO: 295321 - DNA, 202 bp, Homo sapiens; identical to SEQ ID NO: 206096
  chr22:29469213-29469415
  hyper

SEQ ID NO: 295322 - DNA, 45 bp, Homo sapiens; identical to SEQ ID NO: 13392
  chr22:29469460-29469505
  hyper

SEQ ID NO: 295323 - DNA, 180 bp, Homo sapiens
  chr22:29550499-29550679
  hyper
aggagctgcccgcccgcccagctcccgctgcggcagagcccccagccgccgcctcctgccgccctcgcctttcctgcaggagccgtcccagcgcaggcttgctcaccagcgccgccccgtggtaagactgcagatctgcggaagaaggccagccctgaaccgcaactgctctcaagccct

SEQ ID NO: 295324 - DNA, 40 bp, Homo sapiens; identical to SEQ ID NO: 241606
  chr22:29550779-29550819
  hyper

SEQ ID NO: 295325 - DNA, 213 bp, Homo sapiens; identical to SEQ ID NO: 241607
  chr22:29663973-29664186
  hyper

SEQ ID NO: 295326 - DNA, 968 bp, Homo sapiens
  chr22:29702352-29703320
  hyper
ttaaaaagagcccagcggggcttaaccctcccgcgtccggccggcctccgatgccccccgtcccctgttctgtgcggaactccggctttggccatctgcctacttctctgagcttcagtatcctcatctgtaaaaccggttcccctcatttcagggtcaaaaatgagcattcagtgagcacaaggagccctcagtcgccaggggcatcctccccctccccgcggcggtgccgtttatctggccaggggaggtccacccgggaggaggtgactttgcagcctccagccgctatcgcttcctgccttcatcttgggaacaggccgtgctgtgcgccagcccggggagcccaccgtctggggaggggggcgattaaaaggtcccaacctcctccccaggagaccaaagaggttggacggggccccgggtactaggctgggtgggggttgggcgcctgggccggtcgcagttgtctgggggccctggggctctctgcgtcgagagcgctcgaagacccgggattcctggcccgatcgcgggcggggggagaccccagctccaccccagctcccgccggctcggggaaggggcggcccctttaagagcgcgcggccccgcccgccccctccgggcaggatccgaattccagggaggcggggcggagacggcggcgaggaggaggccgcggcgcgggacgcatagagctgcggctcgggcggcgcctccctgcggcggcccggcccggctccggcccccgctggggcaatgctccccggggccgcgggatgagccaggtgagcgcggagacccccagcactccctgcctggtgcgcatggacgggggtggggaggcggggcgggaagcggcgtcctcggcctctgttccccggggctgtgtgaccttgggcggccccgcaccctctctgggcccagagccccagcaccggcagggcctgcggaggccgctctga

SEQ ID NO: 295327 - DNA, 42 bp, Homo sapiens; identical to SEQ ID NO: 241610
  chr22:29710517-29710559
  hyper

SEQ ID NO: 295328 - DNA, 566 bp, Homo sapiens
  chr22:29710589-29711155
  hyper
aaatgatagggcagagaatgaacccctccaccagcccccgtagaaagtacacccctgctcctgaccccagtctctcccattgtagctctgctcaaggccccaaacacaaaacgccacactctcgggaaggcaccgttatgcaccaccaagagctgctccacacccccagccgaggcaggcaaaggtggaggcgctcacaggagcaagggaacgcccctgggcaaaatcgcccggcctccagcctgggcttgggcgtctccaggtcggcgggaagggctgaaacgcaagtatcccaggacgcacacacatccctccatcccggagcacagccaggcgcccgaggcctccacgcggacacgcacgtgtgcaccgagcacgcacacccctcacactgtcacacgcccctgcccgctcctcgagccgctacctccggacccccggggctcgagccggggccagcgacgtcgccgtcgcggatgctcaagtcgtagacggcgccgtcgagcagcaccgcgggtcggtagaggcgcggcccgtccgtgggccggtggcgctcggggtagtca

SEQ ID NO: 295329 - DNA, 197 bp, Homo sapiens; identical to SEQ ID NO: 226357
  chr22:29876678-29876875
  hyper

SEQ ID NO: 295330 - DNA, 39 bp, Homo sapiens; identical to SEQ ID NO: 241612
  chr22:29999383-29999422
  hyper

SEQ ID NO: 295331 - DNA, 105 bp, Homo sapiens
  chr22:30115856-30115961
  hyper
gggagaaggagccccgggcaggtttggggcggccgctcaggggccggcggcgggaaggggcgggctgggggtggggagcgcggagggggcgggcgggcggctggc

SEQ ID NO: 295332 - DNA, 490 bp, Homo sapiens; identical to SEQ ID NO: 241614
  chr22:30162876-30163366
  hyper

SEQ ID NO: 295333 - DNA, 92 bp, Homo sapiens
  chr22:30234279-30234371
  hyper
agacaggaagtctcggcctggccccgcccccagagccgagcaaactaccgccgggaagccggacccgggttgcgcctctcttcttaagactc

SEQ ID NO: 295334 - DNA, 126 bp, Homo sapiens; identical to SEQ ID NO: 133954
  chr22:30234397-30234523
  hyper

SEQ ID NO: 295335 - DNA, 168 bp, Homo sapiens
  chr22:30642417-30642585
  hyper
agaggaggaggaggaaggctcggcgccccctccctcgccgccaacctgccgcggggcgtgcggtgcttgggaccatgtgcccgcgctcgctccgggccgccacccagcgcctccggtggctgcgcgggcgccccaagtgttcgtgtgtctgcggcgggtgggcgtccg

SEQ ID NO: 295336 - DNA, 59 bp, Homo sapiens
  chr22:30642684-30642743
  hyper
tatgggctgcacttcagagggccttggaggaaacctcagatgccggcagttttcagagg

SEQ ID NO: 295337 - DNA, 112 bp, Homo sapiens; identical to SEQ ID NO: 206100
  chr22:30642966-30643078
  hyper

SEQ ID NO: 295338 - DNA, 69 bp, Homo sapiens; identical to SEQ ID NO: 241618
  chr22:30685652-30685721
  hyper

SEQ ID NO: 295339 - DNA, 192 bp, Homo sapiens; identical to SEQ ID NO: 226359
  chr22:30723111-30723303
  hyper

SEQ ID NO: 295340 - DNA, 264 bp, Homo sapiens; identical to SEQ ID NO: 206101
  chr22:30792874-30793138
  hyper

SEQ ID NO: 295341 - DNA, 36 bp, Homo sapiens; identical to SEQ ID NO: 241619
  chr22:30821612-30821648
  hyper

SEQ ID NO: 295342 - DNA, 86 bp, Homo sapiens; identical to SEQ ID NO: 241621
  chr22:30987535-30987621
  hyper

SEQ ID NO: 295343 - DNA, 102 bp, Homo sapiens; identical to SEQ ID NO: 241622
  chr22:30988134-30988236
  hyper

SEQ ID NO: 295344 - DNA, 328 bp, Homo sapiens
  chr22:31002803-31003131
  hyper
tgcagctgcagctcccgttccactccttgtcctgggctaggtgggcactaccaggggctcctttggtaaggagtaccgggtaggcacccggtcctgccaatccaccactggaacagctggggggacagcagacaggcacggtcggacagacttgacagatcaggcatcaggccctctgcgctggtcccgggctctttaagcaggaacgtgaatggcctcaagatgtctcacatggtcccactagccctcctcctccctttgttccctacctccaggagggctgctctgcccttccttcctctgttctttggccttatgttccccgcca

SEQ ID NO: 295345 - DNA, 43 bp, Homo sapiens; identical to SEQ ID NO: 206104
  chr22:31003186-31003229
  hyper

SEQ ID NO: 295346 - DNA, 211 bp, Homo sapiens; identical to SEQ ID NO: 241624
  chr22:31031671-31031882
  hyper

SEQ ID NO: 295347 - DNA, 785 bp, Homo sapiens; identical to SEQ ID NO: 241625
  chr22:31090187-31090972
  hyper

SEQ ID NO: 295348 - DNA, 51 bp, Homo sapiens
  chr22:31198441-31198492
  hyper
agccgtggaccatccgagggcccctcccctgctgggtccaggcaaagggcc

SEQ ID NO: 295349 - DNA, 409 bp, Homo sapiens; identical to SEQ ID NO: 206106
  chr22:31198752-31199161
  hyper

SEQ ID NO: 295350 - DNA, 120 bp, Homo sapiens; identical to SEQ ID NO: 206107
  chr22:31477077-31477197
  hyper

SEQ ID NO: 295351 - DNA, 306 bp, Homo sapiens; identical to SEQ ID NO: 206108
  chr22:31556066-31556372
  hyper

SEQ ID NO: 295352 - DNA, 31 bp, Homo sapiens; identical to SEQ ID NO: 241631
  chr22:31742464-31742495
  hyper

SEQ ID NO: 295353 - DNA, 99 bp, Homo sapiens; identical to SEQ ID NO: 241632
  chr22:31743474-31743573
  hyper

SEQ ID NO: 295354 - DNA, 127 bp, Homo sapiens; identical to SEQ ID NO: 241633
  chr22:31795654-31795781
  hyper

SEQ ID NO: 295355 - DNA, 219 bp, Homo sapiens; identical to SEQ ID NO: 241634
  chr22:31885559-31885778
  hyper

SEQ ID NO: 295356 - DNA, 51 bp, Homo sapiens; identical to SEQ ID NO: 241635
  chr22:31892031-31892082
  hyper

SEQ ID NO: 295357 - DNA, 248 bp, Homo sapiens; identical to SEQ ID NO: 241636
  chr22:31892329-31892577
  hyper

SEQ ID NO: 295358 - DNA, 304 bp, Homo sapiens; identical to SEQ ID NO: 241637
  chr22:32145988-32146292
  hyper

SEQ ID NO: 295359 - DNA, 360 bp, Homo sapiens; identical to SEQ ID NO: 241638
  chr22:32149110-32149470
  hyper

SEQ ID NO: 295360 - DNA, 347 bp, Homo sapiens; identical to SEQ ID NO: 241639
  chr22:32149786-32150133
  hyper

SEQ ID NO: 295361 - DNA, 233 bp, Homo sapiens; identical to SEQ ID NO: 134003
  chr22:32340155-32340388
  hyper

SEQ ID NO: 295362 - DNA, 85 bp, Homo sapiens; identical to SEQ ID NO: 241641
  chr22:32341314-32341399
  hyper

SEQ ID NO: 295363 - DNA, 95 bp, Homo sapiens; identical to SEQ ID NO: 206112
  chr22:32571844-32571939
  hyper

SEQ ID NO: 295364 - DNA, 35 bp, Homo sapiens; identical to SEQ ID NO: 241642
  chr22:32808157-32808192
  hyper

SEQ ID NO: 295365 - DNA, 63 bp, Homo sapiens; identical to SEQ ID NO: 241643
  chr22:32870503-32870566
  hyper

SEQ ID NO: 295366 - DNA, 105 bp, Homo sapiens; identical to SEQ ID NO: 241644
  chr22:32871125-32871230
  hyper

SEQ ID NO: 295367 - DNA, 230 bp, Homo sapiens; identical to SEQ ID NO: 241645
  chr22:33192954-33193184
  hyper

SEQ ID NO: 295368 - DNA, 1102 bp, Homo sapiens
  chr22:34315937-34317039
  hyper
caccacggcgcccccgcggcgactctcgcgctccggggctcttaccttggccgtgactgccgccaggcagagggagacacggaagaacagggtggcgcggcggcgccgccgcctacgaggcgcagggggtccgggtcagggtcccggcaggcgctgccctactcggagcggcggtgccaagcacagagttcgggactgcccccggctccaaatgccgcggcgagggtccgggtcccccaagctgagcactgtcccttcttcctcttcctccggggccgctgcctggagctgctcccggcccgggggactcttccgagccaggggcgccccgcatgggcaggggcctgggtcagcctcgggttgggtccagggagcgaccgccggggccgactccacctcccgcgctccaagccgattcgtcccttcagggcagggcctgcccgcgaacagcccggcgagacgagcgcggccgcgcccccagcttcgggcgcccgggctccggcgcggcggcggggcaggagcagactggccgggccgggcgccgaacgcggcggcgcggggggggctgcaaccggccgcggcgcgctctcccccagggcctgcgccgcccgcccgcggctccgcgggaaagaagcgccggaaaaggcctcgccccggcctggggcgcggggccgggggcgcggggctaggggaggcgccccgggaaggtcacgggagcggaggcgcggcgagtggatcgcggcgcggtgggtgcggggagccgaggcgggcggcccccgccgccgggagcgctcgccggccttggccgccgccgccgcctccgagatgcgccggcttcccggagcgcccggcgctcggagctgggcggccgctgcagccgccgcgggcagccgggcgccgctggccggagccggcgcgcgatccccgcctcccgcgcccggccaggagtgggccgccgcgcgggaaccggcaggggcgggcgctggggtccgggctccgggctggccccgccgcctccgcgtgcccagagcgccggactcgctcagcagctgcagtgactgtgtgtctgtgtcatgtctgtgcagccgggggggaccgcgag

SEQ ID NO: 295369 - DNA, 134 bp, Homo sapiens
  chr22:35420072-35420206
  hyper
cgagggcacggacacggtagaatcccaggtggaagaaggcaaagtgggcgggaggggagaacttgcatgttttaacctttttcctgcacccaaccccgccatccggacgccaagcttccagtcaaacctgagac

SEQ ID NO: 295370 - DNA, 94 bp, Homo sapiens
  chr22:35420315-35420409
  hyper
ttaaattgttttaattaatcacagattgagcagtaaatgaaccactaagtggagagagcgcgcgggagcaagcgagaaagaggtgaggggagga

SEQ ID NO: 295371 - DNA, 348 bp, Homo sapiens; identical to SEQ ID NO: 241649
  chr22:35695611-35695959
  hyper

SEQ ID NO: 295372 - DNA, 262 bp, Homo sapiens
  chr22:35767972-35768234
  hyper
gagtaatcctttcccgagccacgtggccgtgtttttcctgctgagtcacggtcccgaggtctattttcgctaagtcaccgccccgagatctgttttcgctgagtcacggtcccggtgtctgttttcgctgagtcacggtctagagatttgttttcctcagagttccagctgctccaggtttaatcccctggggcaaagtccggactgtccggctggagtctggagtcgggacatgcctcagccagcacgtcctcggcctcgt

SEQ ID NO: 295373 - DNA, 273 bp, Homo sapiens
  chr22:35776987-35777260
  hyper
gcgggtgttgcaacgcccggccagaaagtgggcatcagctgttccgcctggcccacgtgacccgccgagcataaatgtgaccggccgcggctccggcagtcaacgcctgcctcctctcgagcgtcctcagcgcagccgccgcccgcggagccagcacgaacgagcccagcaccggccggatggagcgtccgcaacccgacaggcaagcgcggggcgcgggacgcgggacgggcgcctttctctcccaaccctgcttgcgtcctagccccaccc

SEQ ID NO: 295374 - DNA, 195 bp, Homo sapiens; identical to SEQ ID NO: 206116
  chr22:35796009-35796204
  hyper

SEQ ID NO: 295375 - DNA, 290 bp, Homo sapiens; identical to SEQ ID NO: 241652
  chr22:35937044-35937334
  hyper

SEQ ID NO: 295376 - DNA, 99 bp, Homo sapiens; identical to SEQ ID NO: 241653
  chr22:36424035-36424134
  hyper

SEQ ID NO: 295377 - DNA, 58 bp, Homo sapiens; identical to SEQ ID NO: 206117
  chr22:36424337-36424395
  hyper

SEQ ID NO: 295378 - DNA, 78 bp, Homo sapiens; identical to SEQ ID NO: 57980
  chr22:36424418-36424496
  hyper

SEQ ID NO: 295379 - DNA, 186 bp, Homo sapiens; identical to SEQ ID NO: 206119
  chr22:36425195-36425381
  hyper

SEQ ID NO: 295380 - DNA, 315 bp, Homo sapiens
  chr22:36462014-36462329
  hyper
atggcaggaaatcagcgttttccaagaacgcccagtggcgcgggcacgggcctgagtcccgccgcccactgctctcgagaggccggagcagcagctccgtggcgccccctggaggccgcccctgctggcgccgtcccccgggtgtcaataggccatggcgcgcctccctctcggttgagagctgtgggagcccaggacgtgcctattaaaggtatcttttgaagtgagagggacaagaaaacgccttctctttatgtgactctctgttccccagcaaagttgccagggtccccaacaatcgtagtttctccttca

SEQ ID NO: 295381 - DNA, 333 bp, Homo sapiens; identical to SEQ ID NO: 241656
  chr22:36784309-36784642
  hyper

SEQ ID NO: 295382 - DNA, 185 bp, Homo sapiens
  chr22:36847888-36848073
  hyper
tgtcttggctcatgcgtcgtaagcctttgttccccaacagggggaagtgaaccagcacacaaggcccttccgtcctgcggagctcactgccttcctcagctcctggcccgcacttccgaccacacactggggacacaccctcgggggggccccaccccagcagctgcccatgttcacacctcttc

SEQ ID NO: 295383 - DNA, 40 bp, Homo sapiens
  chr22:36848112-36848152
  hyper
cacttccttcacccaaggaggtcctgttcaaatatcactt

SEQ ID NO: 295384 - DNA, 129 bp, Homo sapiens; identical to SEQ ID NO: 241658
  chr22:36850993-36851122
  hyper

SEQ ID NO: 295385 - DNA, 169 bp, Homo sapiens; identical to SEQ ID NO: 241659
  chr22:36925411-36925580
  hyper

SEQ ID NO: 295386 - DNA, 207 bp, Homo sapiens; identical to SEQ ID NO: 206121
  chr22:37172011-37172218
  hyper

SEQ ID NO: 295387 - DNA, 50 bp, Homo sapiens; identical to SEQ ID NO: 206122
  chr22:37172609-37172659
  hyper

SEQ ID NO: 295388 - DNA, 45 bp, Homo sapiens
  chr22:37212369-37212414
  hyper
gccagttcccctcccctgcccgcctaaggaggctggaggtttgag

SEQ ID NO: 295389 - DNA, 234 bp, Homo sapiens
  chr22:37212906-37213140
  hyper
gccggctgcggggccggcggagtgcaggggcgcgggcggtggacgaggggagagggatggggaggggagcgcgcttgctcaccgctaaaggctcccaccgccttcttgatgtcctcagcgttcagcaagtctgtcatcgacatcctgcaactgtttgagcgggcagagcaagtgcgaaaagattaaaaagtgcttttctcatcatttctgctcatatgaccagcgctgcagtgc

SEQ ID NO: 295390 - DNA, 119 bp, Homo sapiens; identical to SEQ ID NO: 206123
  chr22:37252548-37252667
  hyper

SEQ ID NO: 295391 - DNA, 479 bp, Homo sapiens; identical to SEQ ID NO: 206124
  chr22:37414885-37415364
  hyper

SEQ ID NO: 295392 - DNA, 40 bp, Homo sapiens; identical to SEQ ID NO: 206125
  chr22:37595694-37595734
  hyper

SEQ ID NO: 295393 - DNA, 179 bp, Homo sapiens; identical to SEQ ID NO: 206126
  chr22:37640350-37640529
  hyper

SEQ ID NO: 295394 - DNA, 169 bp, Homo sapiens
  chr22:37720792-37720961
  hyper
gcccatcggccctgcgcgggaacagtgtcacccgggcacccgggccagaacaggccacgcgtgtcccaggagcgcgggaagctcccacgccccctcccccgcaccgctcctttggctggcagagcgggtcctcagcgcgtctcagccgcaccaagcgcctcccgctccc

SEQ ID NO: 295395 - DNA, 93 bp, Homo sapiens
  chr22:37721163-37721256
  hyper
ggagacacccaggatgtcgttctccgcattaaggagggggacggcggtgggggaggtgggagaggccgcggcgcaggtgtagaccaggctcag

SEQ ID NO: 295396 - DNA, 56 bp, Homo sapiens
  chr22:37731278-37731334
  hyper
tcggctcccctctcccgccagactcctgtctctgcgccaggctggccacccatccc

SEQ ID NO: 295397 - DNA, 131 bp, Homo sapiens
  chr22:37816332-37816463
  hyper
cgcccccaggacggacaatcccagccggcctccagacccaggtctgcctccgccaagtggatggaccatatcgagccaccgctacgcggctgtgcgtcggtcgcctcctccaggacgtcttctctgctctc

SEQ ID NO: 295398 - DNA, 272 bp, Homo sapiens; identical to SEQ ID NO: 58004
  chr22:37816501-37816773
  hyper

SEQ ID NO: 295399 - DNA, 65 bp, Homo sapiens
  chr22:37823289-37823354
  hyper
ccccggtcggtcgcggcgctcggatccagaggaattcacttaccccagccccagccgggatccgg

SEQ ID NO: 295400 - DNA, 206 bp, Homo sapiens
  chr22:37823384-37823590
  hyper
gcggggcctgcgcgtgtgagtgtgagtgtgaatgtgagtgtgagcgcgggtgtgggtgcggggtgcgtggccgtggggtggcccgcgtgtgtctgtgtgtgtgtctgggagcgcgcgtgtgcgcgcagacgccgccgccccctcctccccgccgccgcgcctctgcccctgcctcggcggggagggcgcccgggaggggccaaacg

SEQ ID NO: 295401 - DNA, 290 bp, Homo sapiens; identical to SEQ ID NO: 241672
  chr22:37882383-37882673
  hyper

SEQ ID NO: 295402 - DNA, 35 bp, Homo sapiens
  chr22:37914844-37914879
  hyper
ccactctactgatgcggagaccgagccccagggca

SEQ ID NO: 295403 - DNA, 500 bp, Homo sapiens; identical to SEQ ID NO: 206127
  chr22:37914933-37915433
  hyper

SEQ ID NO: 295404 - DNA, 123 bp, Homo sapiens; identical to SEQ ID NO: 226374
  chr22:37915687-37915810
  hyper

SEQ ID NO: 295405 - DNA, 767 bp, Homo sapiens
  chr22:37956436-37957203
  hyper
ccccgcccccgcccccggatccagcccgcggagcccgcggccagggcggcgcagaccggcccagcgactctcccgggctgccagccgggacgcgcggccgccgccgctgcagacgacgagtccgccctcgtcccgcgcccccggggctcgcggagccaggtaacagcccgggcgcgcgggtcctcggggcggaggccgtggaggccggcgggtcccggcgcccgcggggactctgcaccctactaggctcccggggccggaacggggacgggacccgcccgggagaggcgcccccgggtgcccacaggaaggccgggcgcggccgcggagccgcgcgaggaaactccgagctttcgggcttcgtgtcccgttccaggctggtggagggggcagaggatcggacacggctgagcggccaaaatgcgcgaggagggggcgagccgaggggcagagcgggggctgtctccgcgccttcctgcgcgggggaaggaagggccggggcgggcagcgggcgacgcggcggaatgtctcccctccgccgaggcccacgcggagagcgggaagtggggggtggggggcccggggagatggacaggcaccctgcccccctccccgaccgccgcattccaggctggagccgcggatgaggtcatcccgtccggttcccctccggccaagacagccggtcgtccccttcccccgcggagcgaccctccgcgtcctgagccccgtccccccagggaatgttggatggccgaagtctttcc

SEQ ID NO: 295406 - DNA, 375 bp, Homo sapiens; identical to SEQ ID NO: 58009
  chr22:37957264-37957639
  hyper

SEQ ID NO: 295407 - DNA, 210 bp, Homo sapiens; identical to SEQ ID NO: 241674
  chr22:38004378-38004588
  hyper

SEQ ID NO: 295408 - DNA, 83 bp, Homo sapiens; identical to SEQ ID NO: 241675
  chr22:38054576-38054659
  hyper

SEQ ID NO: 295409 - DNA, 216 bp, Homo sapiens; identical to SEQ ID NO: 241676
  chr22:38070987-38071203
  hyper

SEQ ID NO: 295410 - DNA, 34 bp, Homo sapiens; identical to SEQ ID NO: 206130
  chr22:38072875-38072909
  hyper

SEQ ID NO: 295411 - DNA, 47 bp, Homo sapiens; identical to SEQ ID NO: 241678
  chr22:38082317-38082364
  hyper

SEQ ID NO: 295412 - DNA, 199 bp, Homo sapiens; identical to SEQ ID NO: 241679
  chr22:38142984-38143183
  hyper

SEQ ID NO: 295413 - DNA, 114 bp, Homo sapiens; identical to SEQ ID NO: 241680
  chr22:38200880-38200994
  hyper

SEQ ID NO: 295414 - DNA, 204 bp, Homo sapiens; identical to SEQ ID NO: 241681
  chr22:38201307-38201511
  hyper

SEQ ID NO: 295415 - DNA, 94 bp, Homo sapiens; identical to SEQ ID NO: 134095
  chr22:38203676-38203770
  hyper

SEQ ID NO: 295416 - DNA, 125 bp, Homo sapiens
  chr22:38214527-38214652
  hyper
agccagcagctcatgttaagcgccacgggcagctgcggggtgacgtgtggcagtcggtgtgctgcacccggcggggccagaacagagggcccaggtccacccagaccgacgtgaggcggcacgag

SEQ ID NO: 295417 - DNA, 163 bp, Homo sapiens
  chr22:38214685-38214848
  hyper
gccgcccctgtggctcccaggagccgccgctggcgttgccctgctgcgctggcagcgccgcgaccccctgggctagccgatcgcggtagggctccacgccgttggccaacccgcggctcagcgtgtcctgctgcaccagcccgggtccgccgccgcgcttctt

SEQ ID NO: 295418 - DNA, 48 bp, Homo sapiens; identical to SEQ ID NO: 241685
  chr22:38239779-38239827
  hyper

SEQ ID NO: 295419 - DNA, 213 bp, Homo sapiens; identical to SEQ ID NO: 241686
  chr22:38240370-38240583
  hyper

SEQ ID NO: 295420 - DNA, 58 bp, Homo sapiens; identical to SEQ ID NO: 206131
  chr22:38302076-38302134
  hyper

SEQ ID NO: 295421 - DNA, 136 bp, Homo sapiens
  chr22:38349495-38349631
  hyper
gggctcccggaggcggtgaccactgctttacagccgcatccgcaccggtgccacgcagaaatactgcgcgatctgggctgctggagctggcagctagcgcctctcgctactatagaaacgcgcacacaccagtcag

SEQ ID NO: 295422 - DNA, 398 bp, Homo sapiens
  chr22:38577754-38578152
  hyper
gacccccaggccccgcccacccgcgaggtcactcacctcggcttactcagcacttctacttcctcctacttccgcaaacaaacgggcctcgggccacgtgatggcctgaccaccgctctccgccaatcactggtggccctgtcccaggcctcctctaggctccgcccccgcgcccgaggacggcgggaggcggggtccgccattttttttaactgcccaatggaaggggctcccttagccaggaggacgagctttcggcgggagccaatcctcggcggcgaggcgcggccatgtttgtgcggggcagaaggtgcccggcttcttggcagtcctgttgatgagggccaggagtcctaccctagtccgccttccgcctcctaaagcgaccagagcctgga

SEQ ID NO: 295423 - DNA, 155 bp, Homo sapiens; identical to SEQ ID NO: 241691
  chr22:38597888-38598043
  hyper

SEQ ID NO: 295424 - DNA, 320 bp, Homo sapiens; identical to SEQ ID NO: 241692
  chr22:38598861-38599181
  hyper

SEQ ID NO: 295425 - DNA, 305 bp, Homo sapiens; identical to SEQ ID NO: 241693
  chr22:38668915-38669220
  hyper

SEQ ID NO: 295426 - DNA, 31 bp, Homo sapiens; identical to SEQ ID NO: 206133
  chr22:38713592-38713623
  hyper

SEQ ID NO: 295427 - DNA, 39 bp, Homo sapiens; identical to SEQ ID NO: 241696
  chr22:38857560-38857599
  hyper

SEQ ID NO: 295428 - DNA, 95 bp, Homo sapiens; identical to SEQ ID NO: 206134
  chr22:38863833-38863928
  hyper

SEQ ID NO: 295429 - DNA, 72 bp, Homo sapiens; identical to SEQ ID NO: 241698
  chr22:38864201-38864273
  hyper

SEQ ID NO: 295430 - DNA, 370 bp, Homo sapiens; identical to SEQ ID NO: 241699
  chr22:38902268-38902638
  hyper

SEQ ID NO: 295431 - DNA, 135 bp, Homo sapiens
  chr22:38966046-38966181
  hyper
cccccctcgtacccacagtctccccgagattttcaaggtgaagcccctctgccccgcccgacctcctcagctgacaggattctaactcgggcctagaacacggagcctggagacccgcgcgccgttgaccacagg

SEQ ID NO: 295432 - DNA, 236 bp, Homo sapiens; identical to SEQ ID NO: 241701
  chr22:39052538-39052774
  hyper

SEQ ID NO: 295433 - DNA, 166 bp, Homo sapiens; identical to SEQ ID NO: 241702
  chr22:39078160-39078326
  hyper

SEQ ID NO: 295434 - DNA, 233 bp, Homo sapiens; identical to SEQ ID NO: 241703
  chr22:39096461-39096694
  hyper

SEQ ID NO: 295435 - DNA, 71 bp, Homo sapiens; identical to SEQ ID NO: 241704
  chr22:39101417-39101488
  hyper

SEQ ID NO: 295436 - DNA, 95 bp, Homo sapiens
  chr22:39150552-39150647
  hyper
aaagcaggaagttggcctgggtccttgtctctattcctgtccttataaggtaatctcccctcccccctccctgccccgcccgtacggtccctacc

SEQ ID NO: 295437 - DNA, 114 bp, Homo sapiens; identical to SEQ ID NO: 241706
  chr22:39189708-39189822
  hyper

SEQ ID NO: 295438 - DNA, 293 bp, Homo sapiens; identical to SEQ ID NO: 241707
  chr22:39190104-39190397
  hyper

SEQ ID NO: 295439 - DNA, 253 bp, Homo sapiens
  chr22:39239093-39239346
  hyper
aaatccccccgcctcgccagcgaggaaggcgcgatcgtccccggaacacagacgggagaccggaggctcggggaccgccggacgaccgcggccgggcggcccctcacaccacccgggcggctcccccgacggcgcgcggcgctcacctccaggcggtcgatgcggtcccgcagggcgcgcacggcgtcctccagctccagaatgagcgcaggcgagtcccagggcccgtcggccatggtgtcgcggcggggcc

SEQ ID NO: 295440 - DNA, 32 bp, Homo sapiens; identical to SEQ ID NO: 206137
  chr22:39239412-39239444
  hyper

SEQ ID NO: 295441 - DNA, 189 bp, Homo sapiens
  chr22:39239935-39240124
  hyper
cgcgctgggccgagcggggcaggcgcgggagccggagccggagccggagccggagccggagctggagctgtcgccgcggccgctgctgccgccgctctgagcccgggcggcgggaggaggagaagacggcaggcggcggggagggggagcgggcgcggcggccccgccccactcgcttccccgggccgg

SEQ ID NO: 295442 - DNA, 37 bp, Homo sapiens; identical to SEQ ID NO: 241709
  chr22:39268148-39268185
  hyper

SEQ ID NO: 295443 - DNA, 31 bp, Homo sapiens; identical to SEQ ID NO: 206138
  chr22:39268735-39268766
  hyper

SEQ ID NO: 295444 - DNA, 248 bp, Homo sapiens; identical to SEQ ID NO: 226380
  chr22:39268982-39269230
  hyper

SEQ ID NO: 295445 - DNA, 329 bp, Homo sapiens
  chr22:39549058-39549387
  hyper
gactgggcccgaggcgcagcccctcgagttgcaggagagccgggacccaaaaggcttcccaccgtgtccggacgtcgcagggccgaggtctccctaatccggccttctccgcggcgcagtttggccagtgtctccacgtccgtccacccacccctccatccgcccttccatttgtccatccacccgaccctcggtggtcggtgcccagacgcacgggtcagacgcgggcgctgcctcgagggctcccgggccgggccctcgttcgcggcaggagcggccgcggtggagctgaggtcccccggggacggattttgccgccgcgctgcccc

SEQ ID NO: 295446 - DNA, 151 bp, Homo sapiens
  chr22:39549472-39549623
  hyper
ccaccccccttcctttttcgctaacgcgcctccattcctcactgggagcccggcgtcgtccctgctccttcctgtactgaccccaacttctgtcgctccggcatcccctcggggactcgggtctgcctgccctcaccgcacccacctccca

SEQ ID NO: 295447 - DNA, 47 bp, Homo sapiens; identical to SEQ ID NO: 206139
  chr22:39638593-39638640
  hyper

SEQ ID NO: 295448 - DNA, 34 bp, Homo sapiens; identical to SEQ ID NO: 241711
  chr22:39641113-39641147
  hyper

SEQ ID NO: 295449 - DNA, 173 bp, Homo sapiens; identical to SEQ ID NO: 241712
  chr22:39696377-39696550
  hyper

SEQ ID NO: 295450 - DNA, 89 bp, Homo sapiens; identical to SEQ ID NO: 241713
  chr22:39715082-39715171
  hyper

SEQ ID NO: 295451 - DNA, 189 bp, Homo sapiens; identical to SEQ ID NO: 206140
  chr22:39715621-39715810
  hyper

SEQ ID NO: 295452 - DNA, 131 bp, Homo sapiens
  chr22:39745646-39745777
  hyper
ggtttcagcagagccgacggctcagaggggctgcgaccggggcaggggaccggggatgcggggcagggacacggcccacacttgctgtgcacgcaccgccctcccccaaacactttgcaaagaggtcaccg

SEQ ID NO: 295453 - DNA, 278 bp, Homo sapiens
  chr22:39746119-39746397
  hyper
gacggactggccgacggctctgccaggccggggtggtgggggtgtgagcaaaggcggcgcgcccggaccgaccccgaccccgaccccaacgggcccccggcggcggcgcggcggcgggcgaggagctgtcctgcctgcggggcccgctgccgccgctcctccttcccgggcccggggcgggcgggatccctggtgctcgcgggagacgccgctccggctcccggagccctggtttcctggggcccccggttcgtgcgccccccttcccgccccgattg

SEQ ID NO: 295454 - DNA, 147 bp, Homo sapiens
  chr22:39852944-39853091
  hyper
gcccccgcgcaggccgccccgggccgtgggccggcgcacgcacggtcacaggaggggcgcgcgcacactcgcactcacacacactcgctcgcacacgcacacactcgatccagcacgcgcgggcggcgcggggcggcggcggccgga

SEQ ID NO: 295455 - DNA, 225 bp, Homo sapiens
  chr22:39853157-39853382
  hyper
ggttgcggagggggcggggtgggggccggagccgcttgagccggcgggagcgggcacccctgcgcgccgcgctcggcctcgcctccgcgccccccgcgcgcccgccgcggtccctcccccgcgcccgtccgctcgccgggcccccgccgccgccccggggtgcagccgagcggccgcgccgggtccccgggacggggtggaagtgggggtggggggaggggatcg

SEQ ID NO: 295456 - DNA, 31 bp, Homo sapiens
  chr22:39853626-39853657
  hyper
cgcgctgcgcttggcgccccccgcccggctc

SEQ ID NO: 295457 - DNA, 209 bp, Homo sapiens
  chr22:39853690-39853899
  hyper
cgggcgcgggcgcactggggctgggggcccggaggccgcggtgggggcgggatgccggggaagccgctcggcgcgggccccctccccctacccgccgctcctccgagctccccggtccccggagggcagagcctcagcgcccgaccccctcccacggccgggcgggggacgtccccgaggcgcggggctcgagccgtgctttgtgcgcg

SEQ ID NO: 295458 - DNA, 131 bp, Homo sapiens
  chr22:39853934-39854065
  hyper
ctccggcgcggcgcggggctggggtgggaggcctccgcgcccgccttccccacccccgaccccagactgcggcggcggcagccgaggcccaagcgcagtcgggggctgggcgggtgcgggggctgcggccg

SEQ ID NO: 295459 - DNA, 177 bp, Homo sapiens; identical to SEQ ID NO: 134161
  chr22:39898684-39898861
  hyper

SEQ ID NO: 295460 - DNA, 40 bp, Homo sapiens; identical to SEQ ID NO: 241718
  chr22:39928913-39928953
  hyper

SEQ ID NO: 295461 - DNA, 91 bp, Homo sapiens; identical to SEQ ID NO: 206142
  chr22:39930975-39931066
  hyper

SEQ ID NO: 295462 - DNA, 208 bp, Homo sapiens; identical to SEQ ID NO: 241720
  chr22:39941856-39942064
  hyper

SEQ ID NO: 295463 - DNA, 34 bp, Homo sapiens; identical to SEQ ID NO: 206143
  chr22:39953430-39953464
  hyper

SEQ ID NO: 295464 - DNA, 246 bp, Homo sapiens
  chr22:39954151-39954397
  hyper
tcactggggcatttatttatttatttctggggatcgatcctccccacccgcgcgtacccgtcaggtgagccccccatcccgcgccttcggggccatgccttgggaggaaggacaggaaactttgaccggtcctctctccaaggccacgaaagttctctcggtgccaatactgaagccagctgagccagcgctgcagaaatttattcaacaagtcaggctgccggccggggcccgggttgtccgcgc

SEQ ID NO: 295465 - DNA, 149 bp, Homo sapiens; identical to SEQ ID NO: 134172
  chr22:40060841-40060990
  hyper

SEQ ID NO: 295466 - DNA, 181 bp, Homo sapiens
  chr22:40081595-40081776
  hyper
ccctgcggtgacgccgcctaagctggacgtgcggaggggagaagccctgctccgaagggagctccttggatggggtctgcctgctgcctgctgtgcgggggagggcggcgtccaggttgctggggtgggggccgacacaggcggcctccacggctcccacctccccccaggccaccgggag

SEQ ID NO: 295467 - DNA, 77 bp, Homo sapiens
  chr22:40082052-40082129
  hyper
ctcggacgaggagggccgcggtggcgcgggcggcgggggcgcgggcagcgagcactcggagaccctcagcagcctct

SEQ ID NO: 295468 - DNA, 104 bp, Homo sapiens
  chr22:40082159-40082263
  hyper
cgccgccagcccccggcctcacgcccgccaggaagttcagcagcaccagcagcctggccgcccccggccgcccccacgccgccgccctggcccacggcctggcc

SEQ ID NO: 295469 - DNA, 73 bp, Homo sapiens; identical to SEQ ID NO: 241723
  chr22:40440608-40440681
  hyper

SEQ ID NO: 295470 - DNA, 98 bp, Homo sapiens; identical to SEQ ID NO: 241724
  chr22:40742291-40742389
  hyper

SEQ ID NO: 295471 - DNA, 94 bp, Homo sapiens; identical to SEQ ID NO: 241725
  chr22:41215480-41215574
  hyper

SEQ ID NO: 295472 - DNA, 182 bp, Homo sapiens; identical to SEQ ID NO: 241726
  chr22:41252792-41252974
  hyper

SEQ ID NO: 295473 - DNA, 354 bp, Homo sapiens; identical to SEQ ID NO: 241727
  chr22:41418633-41418987
  hyper

SEQ ID NO: 295474 - DNA, 191 bp, Homo sapiens; identical to SEQ ID NO: 206145
  chr22:41593089-41593280
  hyper

SEQ ID NO: 295475 - DNA, 104 bp, Homo sapiens; identical to SEQ ID NO: 241729
  chr22:41593898-41594002
  hyper

SEQ ID NO: 295476 - DNA, 251 bp, Homo sapiens; identical to SEQ ID NO: 241730
  chr22:41601071-41601322
  hyper

SEQ ID NO: 295477 - DNA, 268 bp, Homo sapiens; identical to SEQ ID NO: 241731
  chr22:41682088-41682356
  hyper

SEQ ID NO: 295478 - DNA, 231 bp, Homo sapiens; identical to SEQ ID NO: 206146
  chr22:41682703-41682934
  hyper

SEQ ID NO: 295479 - DNA, 451 bp, Homo sapiens; identical to SEQ ID NO: 206147
  chr22:41697265-41697716
  hyper

SEQ ID NO: 295480 - DNA, 212 bp, Homo sapiens; identical to SEQ ID NO: 206148
  chr22:41763239-41763451
  hyper

SEQ ID NO: 295481 - DNA, 36 bp, Homo sapiens; identical to SEQ ID NO: 241735
  chr22:41843183-41843219
  hyper

SEQ ID NO: 295482 - DNA, 395 bp, Homo sapiens; identical to SEQ ID NO: 206149
  chr22:41864720-41865115
  hyper

SEQ ID NO: 295483 - DNA, 204 bp, Homo sapiens; identical to SEQ ID NO: 241737
  chr22:41940462-41940666
  hyper

SEQ ID NO: 295484 - DNA, 78 bp, Homo sapiens; identical to SEQ ID NO: 241738
  chr22:41985628-41985706
  hyper

SEQ ID NO: 295485 - DNA, 269 bp, Homo sapiens; identical to SEQ ID NO: 206150
  chr22:42016977-42017246
  hyper

SEQ ID NO: 295486 - DNA, 80 bp, Homo sapiens; identical to SEQ ID NO: 206151
  chr22:42228658-42228738
  hyper

SEQ ID NO: 295487 - DNA, 141 bp, Homo sapiens; identical to SEQ ID NO: 241741
  chr22:42229198-42229339
  hyper

SEQ ID NO: 295488 - DNA, 233 bp, Homo sapiens; identical to SEQ ID NO: 226386
  chr22:42229858-42230091
  hyper

SEQ ID NO: 295489 - DNA, 81 bp, Homo sapiens
  chr22:42305985-42306066
  hyper
gcataggggcccggcgcggcagggggcgcgtagaccggcggggcccaggggcaggcgtccagcggcgcaggcaagtccggg

SEQ ID NO: 295490 - DNA, 231 bp, Homo sapiens
  chr22:42306641-42306872
  hyper
gaggccgttcggtgagaacctgggggaccgttctccgggcgaggctgcgagccaagcctgtcttcgccgcagcctccagcgcctggaacagggcctggctccgagtcacgcgcagcggcggcggcagccagcccggggggtgccaccctcatgaacggctcgcccggaggcgacgctcgagccaggcgcggagtcctgggacctgctcccgccgagacgggggatgtctga

SEQ ID NO: 295491 - DNA, 97 bp, Homo sapiens
  chr22:42307267-42307364
  hyper
cctggacacagccacccaggggtgggcccagggtgggaggcagtggctcctgggggcccggctgcttcagaagctctgtcagcgccctgcggggaca

SEQ ID NO: 295492 - DNA, 98 bp, Homo sapiens; identical to SEQ ID NO: 206152
  chr22:42310966-42311064
  hyper

SEQ ID NO: 295493 - DNA, 47 bp, Homo sapiens; identical to SEQ ID NO: 206153
  chr22:42311269-42311316
  hyper

SEQ ID NO: 295494 - DNA, 132 bp, Homo sapiens
  chr22:42315449-42315581
  hyper
ctccctgctggtgcaaatgccgataccaggaggggttctggagggagggcccacggctgtctttgtctcccgcgaggcaactctgactcaggctccagctgcccgtgggagggagggggcgcccgggctcct

SEQ ID NO: 295495 - DNA, 209 bp, Homo sapiens
  chr22:42315681-42315890
  hyper
gacagagctccacggaggccacagcgcgtgcacggggacaggtgcgccctccccggcagcccccctgctcctcggtcacagttctgtgcggaggcgtcttgcgccctcccccctgagcctcgcccttgagtcggggccgtgggccgcatccaggcccccagggctcgggatgcgcgtgaggacccggactcccgagggcgcagaggtcg

SEQ ID NO: 295496 - DNA, 80 bp, Homo sapiens
  chr22:42315949-42316029
  hyper
tcctcgccccttggccttgactccaccccttaggcatgccgctggccccgcccctttccggccaccttgaggcttggggg

SEQ ID NO: 295497 - DNA, 144 bp, Homo sapiens; identical to SEQ ID NO: 206154
  chr22:42322755-42322899
  hyper

SEQ ID NO: 295498 - DNA, 413 bp, Homo sapiens; identical to SEQ ID NO: 206155
  chr22:42470216-42470629
  hyper

SEQ ID NO: 295499 - DNA, 400 bp, Homo sapiens; identical to SEQ ID NO: 206156
  chr22:42669780-42670180
  hyper

SEQ ID NO: 295500 - DNA, 327 bp, Homo sapiens; identical to SEQ ID NO: 226390
  chr22:42765054-42765381
  hyper

SEQ ID NO: 295501 - DNA, 57 bp, Homo sapiens
  chr22:42896454-42896511
  hyper
gggccggcggccctcgggatgggtcctgccagggcgcagagatggcggtggaaaggc

SEQ ID NO: 295502 - DNA, 261 bp, Homo sapiens; identical to SEQ ID NO: 241751
  chr22:43010938-43011199
  hyper

SEQ ID NO: 295503 - DNA, 248 bp, Homo sapiens; identical to SEQ ID NO: 226391
  chr22:43015553-43015801
  hyper

SEQ ID NO: 295504 - DNA, 205 bp, Homo sapiens
  chr22:43115856-43116061
  hyper
gaacaatcactcgacgttggcggaggggaggaagccgcagagagggtgtcgtgagggaaaggtgggtgcaggggaaatggcgctttaacccactcagggccagaggctcagccgagactatccaggtgggaacttgtccctccggatgacaggtgatgaaactgagggaaggggactcgccctggcagtgaaacgggatgggcgc

SEQ ID NO: 295505 - DNA, 105 bp, Homo sapiens
  chr22:43116269-43116374
  hyper
ccaaatcctcaccctccctaaggccggcgccgacgctgccagcccggcagagccccctcctgccggccgctctccatccccgtccccggtcgcatccgctccggg

SEQ ID NO: 295506 - DNA, 117 bp, Homo sapiens; identical to SEQ ID NO: 206158
  chr22:43116624-43116741
  hyper

SEQ ID NO: 295507 - DNA, 47 bp, Homo sapiens; identical to SEQ ID NO: 241754
  chr22:43411069-43411116
  hyper

SEQ ID NO: 295508 - DNA, 296 bp, Homo sapiens; identical to SEQ ID NO: 241755
  chr22:43506224-43506520
  hyper

SEQ ID NO: 295509 - DNA, 126 bp, Homo sapiens; identical to SEQ ID NO: 206159
  chr22:43547284-43547410
  hyper

SEQ ID NO: 295510 - DNA, 88 bp, Homo sapiens; identical to SEQ ID NO: 241757
  chr22:43583724-43583812
  hyper

SEQ ID NO: 295511 - DNA, 491 bp, Homo sapiens; identical to SEQ ID NO: 13484
  chr22:43659642-43660133
  hyper

SEQ ID NO: 295512 - DNA, 55 bp, Homo sapiens
  chr22:43738651-43738706
  hyper
cctctctacccttccgcatctgtcttttctccgggcttccttttgtctgctccct

SEQ ID NO: 295513 - DNA, 157 bp, Homo sapiens
  chr22:43738743-43738900
  hyper
cgccccgtcccggtctctcggtccgtccctttccccgtccacctcctggcgtgtccccctccgcccgccccgccccgcgccccctctcccaggaggagcgcccctctgcgctcggggtcccgccccgcccaggtccgcacgcggggtccccgggaac

SEQ ID NO: 295514 - DNA, 51 bp, Homo sapiens
  chr22:43738928-43738979
  hyper
cgcgcttcccctcccggggccccggcccacccacccctggtgcggccccgc

SEQ ID NO: 295515 - DNA, 400 bp, Homo sapiens
  chr22:44208018-44208418
  hyper
gcgcgtggccaccccgaatacagccttaccgggaacccctcctcgattctccgcctagctgggccggcacccgcgtgcgcggaccccaagccgcggggtctcagaggggctgcccattcggcgtctctaggacgctgttgcccgagagacgacggcagtcgctgactggagaatgagcctacgcgcctggcaagaagctgagctgtgattggtcaattggagataaacgaggagggggcggggccaggtcagtcccgcgcctccgctcccggaagaaatttccgccggaagtcccgttctctggggagcgggaaccctggcgacccgtgtcatgggagcgggtttctgttacgtgggctttagcgcgagctgggcggtcggcccggtcccaccgaactgc

SEQ ID NO: 295516 - DNA, 71 bp, Homo sapiens
  chr22:44208448-44208519
  hyper
ccctgctctgagaagcagactctgcatctgtaaaaggctaagcgtgcccactggggcctgtggtcaggatt

SEQ ID NO: 295517 - DNA, 202 bp, Homo sapiens
  chr22:44258078-44258280
  hyper
cggcgcggggctcaccggacttggggtaggtgacgatccacacgtcgctgggccgcaccgggaagttggcgatctcctccatcttcccgcggcagaagggcggcagccgcacgccatggaactcgaagtacttgctctcgaactcccccggggtgctgggggtctcggcctcgctctccgccatgccgccgccgtcgccgtc

SEQ ID NO: 295518 - DNA, 55 bp, Homo sapiens
  chr22:44258533-44258588
  hyper
tcacccacccgctgccggggctgacagagaccctggcccgcggtctgcagcctcc

SEQ ID NO: 295519 - DNA, 132 bp, Homo sapiens; identical to SEQ ID NO: 206161
  chr22:44287922-44288054
  hyper

SEQ ID NO: 295520 - DNA, 168 bp, Homo sapiens
  chr22:44319565-44319733
  hyper
ccgcccgggagggcgtcctgcccgctcattgggcctcccgccggctcatttgcatggtccgaggggggcggggctgacgtcgcgctgggaatgccctggccgagacactgaggcagggtagagagcgcttgcgggcgccgggcggagctgctgcggatcaggacccga

SEQ ID NO: 295521 - DNA, 98 bp, Homo sapiens; identical to SEQ ID NO: 206162
  chr22:44351287-44351385
  hyper

SEQ ID NO: 295522 - DNA, 559 bp, Homo sapiens
  chr22:44419919-44420478
  hyper
ccggcaccactagcggagccgagcagagcccagggctccaacgcgtagggaaaaggctgcgccgctcccggggtggccccacgccccttctctgagcttgagcggcggcgcgggacggggacggctctggccgggaccagcaggcctcgggcatccgggacgccggggccgcgctccaggccaggggcgggggcgggaccggggcgggggccggcggcggggccgcgccctcggcctctccccggggcgaccgggcggctccacacgcgctgcgcccgccgccggccccacgcgcggcccatgtcctccgcgccgcgctcgcccaccccgcggccccgcaggatgaagaaggacgagtcgttcctgggcaagctgggcggcaccctggccaggaagcggagggcgcgcgagggtgagtgcgcgcccgcgcccgccgacccccggggacctgcccggcggtgcccgccctcggccctagagccccacgaggccgcccccgccctcccccacgcaccccgcccggcccacgcggctgcgcgaccttcgggacaggccaggc

SEQ ID NO: 295523 - DNA, 123 bp, Homo sapiens; identical to SEQ ID NO: 206163
  chr22:44420680-44420803
  hyper

SEQ ID NO: 295524 - DNA, 303 bp, Homo sapiens
  chr22:44727058-44727361
  hyper
cgccggcgcggaccccagtgccgaacaccggctgtcccgcacggttcctgcccccggacccttccccggtcgtccccagcccctttctaaagagccccggacccccgtcatatgccccttacccgcctctcccaaagcgcccacccttcaccccttctccggagccccgcgccgcagaccccgccccccactcgcccagaccctcctccgccaggagctccgccccggcccctttccccgccgctctcggaccccggcccaggcgcgcccctcccccgcgcggcccccgccctgcccgccccg

SEQ ID NO: 295525 - DNA, 642 bp, Homo sapiens; identical to SEQ ID NO: 206164
  chr22:44893741-44894383
  hyper

SEQ ID NO: 295526 - DNA, 215 bp, Homo sapiens
  chr22:45015983-45016198
  hyper
gtgggtgtggtgtgcgtgcccacgggggtgggagaagcccaggggtgagcacagggtcagcgctgtgacggggcccaggccgctctcagtgacgcccgcaaaaccccacgtggcgggaaccaggctcagccacactggcggggtcagcagagcctgtcggtgcaggcggcgttcccggaaactaggaggccgctgtgacccccagacgtgcagac

SEQ ID NO: 295527 - DNA, 34 bp, Homo sapiens
  chr22:45064203-45064237
  hyper
gtctgaccgtctgatttgtcctcccggcttctag

SEQ ID NO: 295528 - DNA, 389 bp, Homo sapiens
  chr22:45064286-45064675
  hyper
cggcccgccgaggggtggggtgagggcgtcacgggccgatccgggccgccgggtgacccgggacgccccctgccccggcgggcgccgcccacagcctgcgcagtgctcaggggcggaggccgggagggggcccaagcgccagccccccagctccggcggacccgggtgggcgtgcccgcggacccgcttgccgcacttaggcgagtctcccctgcagcgccccgagtccctgggggctgcggcggctgcgggcgcccccgcgcgggcccgaggggcgggacgcggcggagcggggcggggcggggcctccgcggccccctcccccggccccgggctccggctccggctccggctctggctctgcgcggtggcagcggcggcggcggcgc

SEQ ID NO: 295529 - DNA, 149 bp, Homo sapiens
  chr22:45064918-45065067
  hyper
aaggtccagcctctcccaccccagcctcccgggacctcccgagctcgttctctcccagcctctctcgctcgccccccgccccgcccccttccctctatctctgagtttgtccgcgtctctgtgggtgggtctccgtccagccgccccgt

SEQ ID NO: 295530 - DNA, 557 bp, Homo sapiens; identical to SEQ ID NO: 206165
  chr22:45097773-45098330
  hyper

SEQ ID NO: 295531 - DNA, 470 bp, Homo sapiens; identical to SEQ ID NO: 206166
  chr22:45098381-45098851
  hyper

SEQ ID NO: 295532 - DNA, 111 bp, Homo sapiens
  chr22:45098900-45099011
  hyper
gggtcgcgcaggcttcctgtgtctctttaagctcccttcggctttcccttgagaggccccctgtcctccagctgtcagcagggggtgcggcagctgcgaggcattctttag

SEQ ID NO: 295533 - DNA, 454 bp, Homo sapiens; identical to SEQ ID NO: 206168
  chr22:45148203-45148657
  hyper

SEQ ID NO: 295534 - DNA, 169 bp, Homo sapiens; identical to SEQ ID NO: 206169
  chr22:45148870-45149039
  hyper

SEQ ID NO: 295535 - DNA, 232 bp, Homo sapiens; identical to SEQ ID NO: 241774
  chr22:45402268-45402500
  hyper

SEQ ID NO: 295536 - DNA, 289 bp, Homo sapiens
  chr22:45403189-45403478
  hyper
ttctctctcgccagggtcaccggcagccgccccaacctcgtccacgtctctcccctacgccagaaaatcccccgggggagggggcgtccgatccggcggcccgggctggggtgggagcgcgggggcaggcccgggcgggggcgcgcgggggcgggcccggagctgtccaagtttggcgctggcggctgcggccggcattccgaaggaaacgcgatcgatggccgggggcgcggcgcgggcgggggcggggcgcgaaggagggagggagggggcagcggagggagggagg

SEQ ID NO: 295537 - DNA, 197 bp, Homo sapiens; identical to SEQ ID NO: 206171
  chr22:45403714-45403911
  hyper

SEQ ID NO: 295538 - DNA, 176 bp, Homo sapiens
  chr22:45405768-45405944
  hyper
gccgcctcctcccgcgcgagcctcccgcgggcagggactatatttcctccggcgcgcgcgcctggatctcgttgggcctcggcaaagttgtgcctcggcacgatgctaattcggcagtgcccggatggagcgggccggggcggcggggggcggtgccgggaccctcagcccgccgc

SEQ ID NO: 295539 - DNA, 175 bp, Homo sapiens
  chr22:45406385-45406560
  hyper
gcaagaaaattgatctcttggctcttcctttaatgatttttttttacacgattaaactctcaacagatgtcactggacattttaagactcttgttaagagtcgtaaacaggcccggtcaatgcgacctaaaacaattataattacagctgcggaggtcgcgtttcagaaccccca

SEQ ID NO: 295540 - DNA, 112 bp, Homo sapiens; identical to SEQ ID NO: 241777
  chr22:45559225-45559337
  hyper

SEQ ID NO: 295541 - DNA, 43 bp, Homo sapiens; identical to SEQ ID NO: 241778
  chr22:45560664-45560707
  hyper

SEQ ID NO: 295542 - DNA, 87 bp, Homo sapiens; identical to SEQ ID NO: 241779
  chr22:45664601-45664688
  hyper

SEQ ID NO: 295543 - DNA, 112 bp, Homo sapiens
  chr22:45899073-45899185
  hyper
agcgccgaggcctcggcgacgcccccctcccccacggccagctccggtcctcatctcctccccggcctggggacttgtttcaaaaccggattcccccacccctcaaacacac

SEQ ID NO: 295544 - DNA, 149 bp, Homo sapiens; identical to SEQ ID NO: 241781
  chr22:45973979-45974128
  hyper

SEQ ID NO: 295545 - DNA, 107 bp, Homo sapiens; identical to SEQ ID NO: 241782
  chr22:46067494-46067601
  hyper

SEQ ID NO: 295546 - DNA, 101 bp, Homo sapiens; identical to SEQ ID NO: 241784
  chr22:46274465-46274566
  hyper

SEQ ID NO: 295547 - DNA, 38 bp, Homo sapiens; identical to SEQ ID NO: 206173
  chr22:46302277-46302315
  hyper

SEQ ID NO: 295548 - DNA, 57 bp, Homo sapiens; identical to SEQ ID NO: 206174
  chr22:46363503-46363560
  hyper

SEQ ID NO: 295549 - DNA, 508 bp, Homo sapiens; identical to SEQ ID NO: 206175
  chr22:46366558-46367066
  hyper

SEQ ID NO: 295550 - DNA, 236 bp, Homo sapiens; identical to SEQ ID NO: 206176
  chr22:46367124-46367360
  hyper

SEQ ID NO: 295551 - DNA, 120 bp, Homo sapiens
  chr22:46367867-46367987
  hyper
agcttaggctggcgaggcgacctaaagtcccccggctcccgcgcgcgacggtcacccggtgccccgcccaggggcctcgctgccgcgttccctgcccgcccggttccagcgctggaggcc

SEQ ID NO: 295552 - DNA, 519 bp, Homo sapiens
  chr22:46371534-46372053
  hyper
acctgcccctcccgcgggtctgttcaccgccttgcctgtggcctggacggggctcgcctcggggcagccggcggcgcacagtaggcgcgcagggcgcggcggggcccgggtccccgcaggtgcgaggagcgcggggccagcagcgggcggtgggcgccccaggcgaggtgcaccgcaccccctctccgtcacgccgtttctccacccccacttcgagcgaagccgagacagattctgtctaaaggagatcgcggctcaacaggtaaggactcggctgggttcaggaatgtggaaatacgactcggagcagctaccgcagagagcagctagcgcggctcgccgggcgcccgcccgccgggccgcgccagggggagcgcggcgagagggggccgggcccagggcccagggccccgggcgggcggggcacgggccccggaccgagcccgaggcggcccggccggccccacggcccatcccgagccagccggacgagttgtcaaggtaatttcaacacgtctg

SEQ ID NO: 295553 - DNA, 304 bp, Homo sapiens
  chr22:46372457-46372761
  hyper
tgcagtggccccctccagtccccacgtccccacggggacgccccggaggcagctccttcgtgctgtcttggcccctggctgctgccctcgcccacggggtactcacccgagcttcacgtacaggacgccaaagcagagaaacacgtagaaaatccacttgcgaaagtttctgtgcatgatccagggaggggggctgcgccatagacagcggcggccggaggggacgcgcgggcccggcagggccgggcaggggccagggggctgcgggcagactgcgctcagcccgcgctgcggctcgggcggc

SEQ ID NO: 295554 - DNA, 175 bp, Homo sapiens
  chr22:46372769-46372944
  hyper
cgcgggcactcggcgcgcgctgccaccatggtgagcccgggatgccgccgccgccaccgccgcgtgagcccggggaattgacccaggctgggggccgcgacctcgaagcccggttgagcgaccgtggacccctgcaagcgcgggccgggggcccgggcgcggctggcgggcgggt

SEQ ID NO: 295555 - DNA, 97 bp, Homo sapiens
  chr22:46372974-46373071
  hyper
ccgtgagcgcctcgccgagcgccgcggcggccaatgtgtccgcacttgtcggccgccccaggtgactcgcggccccggcaagcgagccgcgagcgag

SEQ ID NO: 295556 - DNA, 165 bp, Homo sapiens; identical to SEQ ID NO: 241790
  chr22:46373380-46373545
  hyper

SEQ ID NO: 295557 - DNA, 368 bp, Homo sapiens; identical to SEQ ID NO: 226399
  chr22:46465893-46466261
  hyper

SEQ ID NO: 295558 - DNA, 359 bp, Homo sapiens; identical to SEQ ID NO: 226400
  chr22:46468170-46468529
  hyper

SEQ ID NO: 295559 - DNA, 42 bp, Homo sapiens; identical to SEQ ID NO: 206178
  chr22:46512497-46512539
  hyper

SEQ ID NO: 295560 - DNA, 31 bp, Homo sapiens; identical to SEQ ID NO: 241792
  chr22:46646367-46646398
  hyper

SEQ ID NO: 295561 - DNA, 111 bp, Homo sapiens; identical to SEQ ID NO: 226401
  chr22:46658172-46658283
  hyper

SEQ ID NO: 295562 - DNA, 170 bp, Homo sapiens; identical to SEQ ID NO: 241794
  chr22:46663531-46663701
  hyper

SEQ ID NO: 295563 - DNA, 179 bp, Homo sapiens; identical to SEQ ID NO: 241795
  chr22:46663946-46664125
  hyper

SEQ ID NO: 295564 - DNA, 87 bp, Homo sapiens
  chr22:46933002-46933089
  hyper
ggcagggcggcggcggcggccaggagcagcagcacgggcagcacgggcggcggcggcggcgccatggcccggagcccgagcccgagc

SEQ ID NO: 295565 - DNA, 1537 bp, Homo sapiens
  chr22:46933237-46934774
  hyper
ggcctcccccgcagcttccacttcgagagcactttgcgaaagtttgcgaagttggtttcaagatggctcctccgcgcgtcccgggagggcgccgcgcatcaacctgcggcggcggcggcggctccaggcggctccaggtggctccggcgcgggctcggccggacgggcgtgggaagcggggcgggcccggcgcggggcgggggctgagttcccggagcgggctgggcagctccgcgccgcgcagaccccggcggccggctgctgcctgggcggtgcgcttggcccgcgcccactccgcccgcgctctccccgcccccggcccggccccgccccgcccccggcccagcggcgtattgttcggccccggggggagccggctcggaggtgcgcgccgagaggatcgctatggagacgcgagggcgcggccgggacggggactggggccctactccccggaggcctccccacccagcctcccggtggggcggggccgaggcaacagggccgggaaaggtggggctggggcccccggtggccgctacccgtggggcggtggctccgcacctcgggctcggggccgcggctcagagcctggctccccaccccggcagaacagatccacggagaccgccgccaggagtgccgcgcgggtaggacccgggggcggaggactggggccgagaggccggggagcccccccccacccattaaggactgcggaggctgtcgaggagggttacccattttacagcaagacgcacggaggctaaaatgcttcaccccgactaaaactccctggactttgaagcccaataggcagctaccggatctgcgtcccacttggtttaaagcgcaacttttaaatgaaagaagaaaaccccggttgacataagggatttggagaggacggcggaggcgcgctcatctcccgcgtgcggcccgacccgagcgttcgcggacgcatcgcggaatccccgagcgtccggctcctcccgaagcgggttgcggggaaggcggggggctgcgggtcctggaagctgcctggggcaagcaagcacccgcagggatttagagctgtgccacagcccctgcccagcctcctacggaggacagcggggggcggggggcagagaccttagagctttcagaaaagtgacacacacccccgcctcctgcggggaaccacggggggccgggggcagctttaggtttgcgtgacgggtacacctgcctccggatggggcacagggataaagggggtggaggcttaggacttggcgaccccccgcatgggcggggctttgggactgtgccaccagcggctgggaagggcgcgcactcccttggtggcgctcggggcgccggagtccagtgcagcccttaggcctcccagtggtcggggacggtaggtgggggtcgcctcttctctcctagaagggcttctcctggggccggtcggagcggtgggggtgggagtaatgcgcagtcacccctagaacgggtctttttggcaagggagggtcggatcctgcagcca

SEQ ID NO: 295566 - DNA, 115 bp, Homo sapiens; identical to SEQ ID NO: 241797
  chr22:47158139-47158254
  hyper

SEQ ID NO: 295567 - DNA, 127 bp, Homo sapiens; identical to SEQ ID NO: 241798
  chr22:47158507-47158634
  hyper

SEQ ID NO: 295568 - DNA, 235 bp, Homo sapiens; identical to SEQ ID NO: 134345
  chr22:47199299-47199534
  hyper

SEQ ID NO: 295569 - DNA, 105 bp, Homo sapiens; identical to SEQ ID NO: 134357
  chr22:48972766-48972871
  hyper

SEQ ID NO: 295570 - DNA, 198 bp, Homo sapiens
  chr22:50118499-50118697
  hyper
cctcccaagtcgcacgcgggacccgggcatgggtggccctgctccatacagccccggccaccccacccctggccggtcccacagcctcacaccagccgctccagccatagccacggacggctgagtccggccccgatgctcatccctggagctcgtgctccctcctctggactccccgagaactgtgcccggaccgcg

SEQ ID NO: 295571 - DNA, 66 bp, Homo sapiens; identical to SEQ ID NO: 134360
  chr22:50118722-50118788
  hyper

SEQ ID NO: 295572 - DNA, 73 bp, Homo sapiens; identical to SEQ ID NO: 206182
  chr22:50170510-50170583
  hyper

SEQ ID NO: 295573 - DNA, 87 bp, Homo sapiens; identical to SEQ ID NO: 206183
  chr22:50242069-50242156
  hyper

SEQ ID NO: 295574 - DNA, 104 bp, Homo sapiens
  chr22:50242190-50242294
  hyper
cgctcccacccccggccgccgcctggacagaggcgcgcaatccggagggcgcaggctccggcccggagaagggggtgccgccggcgttccgatttctcaggaat

SEQ ID NO: 295575 - DNA, 200 bp, Homo sapiens
  chr22:50242512-50242712
  hyper
cagagtcacggagacactttcccggtgtgggcgcctcgccgcgcttcctccccgcgggctgcggccaccccagggcaggacagagccgagatgcccgggtgggagcgatgcccgcgtgggggcgatgcaacgggggagatgcctggggggagggtggtaaggtgaaacctggtggagaacaatgggggtgggtgggcgat

SEQ ID NO: 295576 - DNA, 441 bp, Homo sapiens
  chr22:50246433-50246874
  hyper
ccaccgtgcccggccgatatttgaatgtcatatacttttcatatatgctaaaatactgttttaattctcccccaacctcttaaaaacgagaaaagcattcttagctcaggcaccatagaaaacccggctgcaggctggacgtggactttggaacagtcggcgtgcgggtgaaggggcacagccgcggggcaggggcgggctccgggcagaggcggccgtgataactccacgctcccgctccagccggtgaccgccacgcgggctcctctcactctcacactcaggccgagaaaatgccgaaagccgtgtcaccaacgggggacctcggggccacattcagcatgcagagtttatttggtctgctcaaacatttgtgttaggaaataacacattaaaagtgcacatttccttcagaccctgagaagcgggcgagtcccgtgc

SEQ ID NO: 295577 - DNA, 221 bp, Homo sapiens; identical to SEQ ID NO: 241803
  chr22:50311963-50312184
  hyper

SEQ ID NO: 295578 - DNA, 185 bp, Homo sapiens
  chr22:50422041-50422226
  hyper
tgtaagccaagcccgagcctcgcccccgggcccgccccctcctcccgcccccgcagctgctccctctcgcctccccgggaagcgcgacgcccccgccttccctcagggccccgggcgggcggacaccagaccgagaaatccgggcgggaggtcggggcggcgtctgctccgccgggggcaggtat

SEQ ID NO: 295579 - DNA, 223 bp, Homo sapiens
  chr22:50453234-50453457
  hyper
tccctccgcgcccgcgctgggcaccagatgggaggaaacggggtgcggagaccctgggcggcgccgagactcgtcggacgaacgcgggaaggaacgaaccagcgtccgcccgggacccgggctggagccttccccagagcggctcggagggtccggagcgggtgcgggggtgctgggcacgaggttcccaagaaaaccacggcgaggacgcgggttcaccaca

SEQ ID NO: 295580 - DNA, 102 bp, Homo sapiens
  chr22:50453539-50453641
  hyper
gccggtcccgactcacggggtccgcgggctgcagctccgcccgccgagccgcacgaaggacgcgccctgcaggaccgcggcgcagaacgagcggcagcgctt

SEQ ID NO: 295581 - DNA, 35 bp, Homo sapiens
  chr22:50623255-50623290
  hyper
aagcccagcgccagcgccaggtcagccaagaaccc

SEQ ID NO: 295582 - DNA, 282 bp, Homo sapiens; identical to SEQ ID NO: 241806
  chr22:50690037-50690319
  hyper

SEQ ID NO: 295583 - DNA, 189 bp, Homo sapiens; identical to SEQ ID NO: 241807
  chr22:50699694-50699883
  hyper

SEQ ID NO: 295584 - DNA, 209 bp, Homo sapiens; identical to SEQ ID NO: 241808
  chr22:50708933-50709142
  hyper

SEQ ID NO: 295585 - DNA, 84 bp, Homo sapiens; identical to SEQ ID NO: 206187
  chr22:50745645-50745729
  hyper

SEQ ID NO: 295586 - DNA, 183 bp, Homo sapiens; identical to SEQ ID NO: 206188
  chr22:50765110-50765293
  hyper

SEQ ID NO: 295587 - DNA, 44 bp, Homo sapiens; identical to SEQ ID NO: 226414
  chr22:50766078-50766122
  hyper

SEQ ID NO: 295588 - DNA, 130 bp, Homo sapiens; identical to SEQ ID NO: 241809
  chr22:50781872-50782002
  hyper

SEQ ID NO: 295589 - DNA, 219 bp, Homo sapiens
  chr22:50873755-50873974
  hyper
gagacagtccctcccggggtagttggtgactccggagctggcactcagaagccgttagcgccaccgggctccttgcagctcagggagccctgcctggctaggctgtcctggctgtgtgctctgcactcaggtgattggagagtctcattctcactcaggtgtgagatttcgtagcacaagtctcaggggagcaggttgcagcctgtttcttaagaacgc

SEQ ID NO: 295590 - DNA, 385 bp, Homo sapiens
  chr22:50874004-50874389
  hyper
tgtgtggcagaggcgggcccagctgtggcctctcctccctatacccgtgtaaggtgaggaagctctggatagtcctccccgcaccccaggaccatagtgaggggactcctgggttgggctccattagcccctggcgaggtcaggcctgccggctgccatcacaaataataaaagcagggcaggaggagcttccccacatcctggagggcaaagtagatgggtggaggtggaggccagggacagctccccagggcaggggcagtttaaggaggcgaggggcaagcaggaagctgttggatcattccatacgatctccagattgtgaatccttccaggactctgacctccccggaaaaacaggcaggacacgcgcccaggcctgtag

SEQ ID NO: 295591 - DNA, 69 bp, Homo sapiens
  chr22:50919520-50919589
  hyper
ggggtcggcggcaccgcgtcagaggagagcggaatggccagcccgctgcggaatcccgcggacttgctg

SEQ ID NO: 295592 - DNA, 105 bp, Homo sapiens
  chr22:50919629-50919734
  hyper
agggtgggaccgcccggactcgggaggtggttgacggggtgggccccgtcgggtccgagtccgccccagccgtgggatcagctcggacgacggttcgccccccag

SEQ ID NO: 295593 - DNA, 80 bp, Homo sapiens; identical to SEQ ID NO: 226417
  chr22:50920028-50920108
  hyper

SEQ ID NO: 295594 - DNA, 265 bp, Homo sapiens; identical to SEQ ID NO: 206190
  chr22:50964979-50965244
  hyper

SEQ ID NO: 295595 - DNA, 45 bp, Homo sapiens; identical to SEQ ID NO: 241813
  chr22:50968298-50968343
  hyper

SEQ ID NO: 295596 - DNA, 639 bp, Homo sapiens; identical to SEQ ID NO: 206191
  chr22:50970392-50971031
  hyper

SEQ ID NO: 295597 - DNA, 167 bp, Homo sapiens
  chr22:50982556-50982723
  hyper
tcggcctcccacctcgaggcgatccgacacctcggcccaggtcgcacttttttgcccgttttgatcccatcctccaactgcggccacagccggaaatgtagagaaattcgcgctcctggggccggcggggctggcgctggctcacccgctccccgggccctcccagt

SEQ ID NO: 295598 - DNA, 69 bp, Homo sapiens; identical to SEQ ID NO: 134410
  chr22:51021437-51021506
  hyper

SEQ ID NO: 295599 - DNA, 78 bp, Homo sapiens
  chr22:51042182-51042260
  hyper
cgggggaggagggcagggaggatggactggctgctggaagaggcctgggtggtgcagagagggtgaccccacctccct

SEQ ID NO: 295600 - DNA, 234 bp, Homo sapiens; identical to SEQ ID NO: 241817
  chr22:51066542-51066776
  hyper

SEQ ID NO: 295601 - DNA, 234 bp, Homo sapiens
  chr22:51112317-51112551
  hyper
ctggaggtccccgtggtccgacccccaggcctggggcgggggggggtccccgccatctcctccaggcccgaagctgggggtcggtggagtgggggggagaagccgccacctccggaaattaattgtttttctttccccttctcgccctaccttggtcttcgtgccccgacgcggcccccaccccagctccgggaccccttcctccgccgcacccgccccggtggtccgcggatg

SEQ ID NO: 295602 - DNA, 32 bp, Homo sapiens
  chr22:51113372-51113404
  hyper
ccggactccttcggcgggggcccggggctcgg

SEQ ID NO: 295603 - DNA, 265 bp, Homo sapiens
  chr22:51113450-51113715
  hyper
agctcacgagcccgctccgctgcagaagtgcctgcgcctggacccggccgcgcccgtgtgggccgccaagcagcgcgtgctctgcgccctcaaccacagcctccaggacgcgctcaactatgggcttttccagccgccctcccggggccgcgccggcaagttcctggatgaggagcggctcctgcaggagtacccgcccaacctggacacgcccctgccctacctggaggtaagtggccggcgcgggggtgagctgaggagcgcg

SEQ ID NO: 295604 - DNA, 101 bp, Homo sapiens; identical to SEQ ID NO: 241820
  chrX:2747435-2747536
  hyper

SEQ ID NO: 295605 - DNA, 635 bp, Homo sapiens; identical to SEQ ID NO: 241821
  chrX:2815892-2816527
  hyper

SEQ ID NO: 295606 - DNA, 129 bp, Homo sapiens; identical to SEQ ID NO: 206196
  chrX:2846678-2846807
  hyper

SEQ ID NO: 295607 - DNA, 219 bp, Homo sapiens
  chrX:2846856-2847075
  hyper
ctttgaaggccgaatccgggcagcggtgtagctgggcgtggaaggcggaggacccagcagggcgtgaccggcccagtttccgctccctccgggtcccggccagccttcctccgccctcccttcccttcctcctttgttctctttccctgcccttccgccttcccttcagttcggtctcctccacccgcccttcgtcccctcagtcgccccccatccctg

SEQ ID NO: 295608 - DNA, 329 bp, Homo sapiens
  chrX:2847196-2847525
  hyper
tcgccgtgctcgcgaccccctccccaggcccccaccctaggccttagtatgggccgcgtcccggggtcccaggcacctggcggcgggcgcggcgcgtcccctccgcgcggcggatcgcatggccgagcgctggcccagagcgcaggaccttgccctgcgcactccgcgcccgggcgccgctagtgccaaggcttccgccctctcagctgcgggatctgggccgggcgcccgcccctccttcatccgcgtcatctcctggctctcgggacctccgggacctgcgcgtggaaacaggttttcccaggtcgtcacacgggaaggcctgggct

SEQ ID NO: 295609 - DNA, 282 bp, Homo sapiens; identical to SEQ ID NO: 241823
  chrX:3630855-3631137
  hyper

SEQ ID NO: 295610 - DNA, 110 bp, Homo sapiens; identical to SEQ ID NO: 241824
  chrX:3631931-3632041
  hyper

SEQ ID NO: 295611 - DNA, 131 bp, Homo sapiens; identical to SEQ ID NO: 241825
  chrX:3632321-3632452
  hyper

SEQ ID NO: 295612 - DNA, 60 bp, Homo sapiens
  chrX:6143715-6143775
  hyper
ttctttctttttttcttttttttttttttttttttttttttttttttgcttttgccttcc

SEQ ID NO: 295613 - DNA, 624 bp, Homo sapiens
  chrX:6144289-6144913
  hyper
acatacacaaaaagaggctgacacctgccgtaggttcagaggaagaaggcagagaaaaagaaacccgcagtccggaaaaaaaaaaagccttctggggaaggggaggggtatgatgcggaggacgtcctccggctgcccctcgctctccatgcagaacatccgttcccagggtggcccgggccaggcctcgggggtgcaagggttggcctgacccccctgctcccgcccccgccgctccgggaagaaagggcgctgtgtctggcggcgagcaggcgccggaatcgtgcgctcgggcccagggttgcacggagcactgggcccggataccgggggcgcaaagcttcgggtgcggcccaggagaaccccgccgagggaccccagcctaccggttctcggaggggcgaaagagccaggtcaggttgagggacaggaggaggaaggggtgtccaggagactgactgaaggatgagagtgtcctccggggtagcgaccggcctcttggaaaaccagaggcggagggagcagccgcggagtggagggcgcaggccgggacctgggcctctcctcccacagcaagccccccacccacgcatcatctgcagccgagcggcacctacctccctc

SEQ ID NO: 295614 - DNA, 76 bp, Homo sapiens; identical to SEQ ID NO: 206199
  chrX:6145850-6145926
  hyper

SEQ ID NO: 295615 - DNA, 327 bp, Homo sapiens; identical to SEQ ID NO: 206200
  chrX:7065514-7065841
  hyper

SEQ ID NO: 295616 - DNA, 373 bp, Homo sapiens; identical to SEQ ID NO: 206201
  chrX:7066303-7066676
  hyper

SEQ ID NO: 295617 - DNA, 33 bp, Homo sapiens; identical to SEQ ID NO: 206202
  chrX:7895589-7895622
  hyper

SEQ ID NO: 295618 - DNA, 213 bp, Homo sapiens; identical to SEQ ID NO: 206203
  chrX:8699223-8699436
  hyper

SEQ ID NO: 295619 - DNA, 98 bp, Homo sapiens; identical to SEQ ID NO: 206204
  chrX:8699940-8700038
  hyper

SEQ ID NO: 295620 - DNA, 184 bp, Homo sapiens; identical to SEQ ID NO: 206205
  chrX:8700460-8700644
  hyper

SEQ ID NO: 295621 - DNA, 51 bp, Homo sapiens; identical to SEQ ID NO: 241831
  chrX:9310729-9310780
  hyper

SEQ ID NO: 295622 - DNA, 610 bp, Homo sapiens
  chrX:9432816-9433426
  hyper
tcacccaccctaggcgtgggggagcggggcgggcttggtagggacgctggtcccccgaccgtgggacaggggctgggttgggacgcgggtccccactaggagccgcgggggaggggcagggccggagtccctaccctcgtaggggaggggctggttcgggacgcggctcccccggggcgcaggggcggggccgggtggtacgccgggtcccctcccacggccgtgagggaggggccggcggcgggggcggacccctggcggtcctcctggctggggtccgcgcgctcgcggcagctccccgtggaggtcactgtccgtgccagtccctcccgctgtcccgccctctcccgctgccgccgccgccgccgccgcgcccgcctcagcgcccccactccgcgcttgggagcgaggagccgccagcgcccccgccccgccgccgccgcagcgccctcaggccgccattcgccaccgaaactttccagcgcccgcgctctctccgggactcggcggcggcggggcgggggcggcccgggggcggcgcgcggctgctccggggcgccgggccctcttcggccgccgcacggccgggactcggaggctgccggctgga

SEQ ID NO: 295623 - DNA, 241 bp, Homo sapiens; identical to SEQ ID NO: 206206
  chrX:9433471-9433712
  hyper

SEQ ID NO: 295624 - DNA, 583 bp, Homo sapiens; identical to SEQ ID NO: 206207
  chrX:9433838-9434421
  hyper

SEQ ID NO: 295625 - DNA, 152 bp, Homo sapiens
  chrX:9753673-9753825
  hyper
agaggccggacccgcgcccggctcaggctgctggggggcgcccttcccggctctctaagtccagagtgtgagtgcgcgcagggccgcgcgggacgggcggtccctctgccccggggcagcggccacagcgcgggcaccagggcctcccgcgg

SEQ ID NO: 295626 - DNA, 304 bp, Homo sapiens; identical to SEQ ID NO: 134447
  chrX:9753862-9754166
  hyper

SEQ ID NO: 295627 - DNA, 44 bp, Homo sapiens; identical to SEQ ID NO: 206208
  chrX:10023769-10023813
  hyper

SEQ ID NO: 295628 - DNA, 183 bp, Homo sapiens; identical to SEQ ID NO: 241836
  chrX:10583971-10584154
  hyper

SEQ ID NO: 295629 - DNA, 161 bp, Homo sapiens; identical to SEQ ID NO: 226428
  chrX:11776190-11776351
  hyper

SEQ ID NO: 295630 - DNA, 305 bp, Homo sapiens
  chrX:13706948-13707253
  hyper
ccgtttgactagtcgtttttatcattgtaatcacgacatcctgtgactgtgctcatgaggtctgtttatttccactttacgtaaacttttcaaaatgacagttatttcgtactcgctgtcgcccgaacgcagacgggaggacacttcaggagcaatcgacccgaaggaaaagcacgatccaggccccgcctgcctcggctccaccttccccgcgcccgtcccccagggtctcggccgcgggaccccgccttccaggccccgccccgctttttccctggccccgccccggcccgtcgccatgttgt

SEQ ID NO: 295631 - DNA, 583 bp, Homo sapiens
  chrX:13707434-13708017
  hyper
accgggcggagtgcgcgggtgtcggggtctgagggggcggctcgggcctcgggcagctggggcggggtgcggtgcgcgcggggctagcgcgggtcacaaggccgccccgggagagaggacggctggttgtctccctgcctcctctctgacgcaggaggaaagacggtccccacacccttggggagagggactcacagaaacacacacaaacactggagaaagggagatacaaaagcccggacacccgtgcacatacacacggagaaatacacccggtcacctgggaacacacgtacacgccagcctttcccccaaccactccgggacacacatccacagaccccaaaccaaatcctacacccgaatgattaatgtagggaaaacaaaggcgctcccatgacttgattttggcgacctctgaagttccacctagcagaacgtgtttgctcgatgtcttacgaccactcgggtgaggaattcggaaagtaaagccaatcttagaggctgcaggcgttttgggggcattatctgattcagacgctggctaacgtttcacaatcgcgttcccttttttcttccaact

SEQ ID NO: 295632 - DNA, 999 bp, Homo sapiens; identical to SEQ ID NO: 206211
  chrX:13752357-13753356
  hyper

SEQ ID NO: 295633 - DNA, 118 bp, Homo sapiens
  chrX:14048211-14048329
  hyper
tgcaccgggcggggcactgggactgtggcgggcacccgcgccgggggtcggacggtgcttctgcaccggcgagataagggtcgcttctgcaccgcccgggtttccagcctttaacttt

SEQ ID NO: 295634 - DNA, 151 bp, Homo sapiens
  chrX:15511291-15511442
  hyper
gcaggagccccaggtactcacgctgcggtagcggcacctggagccttagcggcgggggtgacgcgaagagccgccgggagcgagtgcagggagggcaggttaagagagtgtgggtccagtagcctcaccgtgactcagcgcttcgcggccg

SEQ ID NO: 295635 - DNA, 161 bp, Homo sapiens
  chrX:15511544-15511705
  hyper
ccaggccagcttggcggccctttggcctccctgcctctcgtgccgggaagagatgctcactcgggtaatttaggcggcacttgctgtgctccaggaggaaatgtgtggcccgggcaggtgctctgatcggcgctccggtcggtcttgtgggaaatctgttt

SEQ ID NO: 295636 - DNA, 130 bp, Homo sapiens
  chrX:15755974-15756104
  hyper
gagatgggaggaaccgagggaaagtcactttttagataaggctctgaagccccaggtctagtttcaatccactaatgcggccagcggcgagcaggaggagggaggattggtccggcgggggcggggccag

SEQ ID NO: 295637 - DNA, 321 bp, Homo sapiens; identical to SEQ ID NO: 206212
  chrX:15756366-15756687
  hyper

SEQ ID NO: 295638 - DNA, 134 bp, Homo sapiens; identical to SEQ ID NO: 206213
  chrX:15808573-15808707
  hyper

SEQ ID NO: 295639 - DNA, 99 bp, Homo sapiens; identical to SEQ ID NO: 206214
  chrX:15809046-15809145
  hyper

SEQ ID NO: 295640 - DNA, 82 bp, Homo sapiens; identical to SEQ ID NO: 206215
  chrX:15817994-15818076
  hyper

SEQ ID NO: 295641 - DNA, 122 bp, Homo sapiens; identical to SEQ ID NO: 206216
  chrX:15821797-15821919
  hyper

SEQ ID NO: 295642 - DNA, 87 bp, Homo sapiens; identical to SEQ ID NO: 206217
  chrX:15822233-15822320
  hyper

SEQ ID NO: 295643 - DNA, 39 bp, Homo sapiens; identical to SEQ ID NO: 206218
  chrX:15826355-15826394
  hyper

SEQ ID NO: 295644 - DNA, 122 bp, Homo sapiens; identical to SEQ ID NO: 206219
  chrX:15827322-15827444
  hyper

SEQ ID NO: 295645 - DNA, 214 bp, Homo sapiens; identical to SEQ ID NO: 206220
  chrX:15833799-15834013
  hyper

SEQ ID NO: 295646 - DNA, 56 bp, Homo sapiens; identical to SEQ ID NO: 206221
  chrX:15836709-15836765
  hyper

SEQ ID NO: 295647 - DNA, 110 bp, Homo sapiens; identical to SEQ ID NO: 206222
  chrX:15838329-15838439
  hyper

SEQ ID NO: 295648 - DNA, 535 bp, Homo sapiens; identical to SEQ ID NO: 206223
  chrX:15840848-15841383
  hyper

SEQ ID NO: 295649 - DNA, 224 bp, Homo sapiens; identical to SEQ ID NO: 206224
  chrX:16730628-16730852
  hyper

SEQ ID NO: 295650 - DNA, 56 bp, Homo sapiens; identical to SEQ ID NO: 206225
  chrX:16730902-16730958
  hyper

SEQ ID NO: 295651 - DNA, 233 bp, Homo sapiens; identical to SEQ ID NO: 241845
  chrX:16805210-16805443
  hyper

SEQ ID NO: 295652 - DNA, 327 bp, Homo sapiens; identical to SEQ ID NO: 206226
  chrX:16888225-16888552
  hyper

SEQ ID NO: 295653 - DNA, 201 bp, Homo sapiens; identical to SEQ ID NO: 226442
  chrX:23801081-23801282
  hyper

SEQ ID NO: 295654 - DNA, 70 bp, Homo sapiens; identical to SEQ ID NO: 206227
  chrX:27999798-27999868
  hyper

SEQ ID NO: 295655 - DNA, 358 bp, Homo sapiens; identical to SEQ ID NO: 206228
  chrX:39680206-39680564
  hyper

SEQ ID NO: 295656 - DNA, 193 bp, Homo sapiens; identical to SEQ ID NO: 58276
  chrX:39680630-39680823
  hyper

SEQ ID NO: 295657 - DNA, 46 bp, Homo sapiens
  chrX:39868176-39868222
  hyper
ggctcccgctgccccgggcggcctcctcttcccggcctgccccaaa

SEQ ID NO: 295658 - DNA, 82 bp, Homo sapiens
  chrX:39868252-39868334
  hyper
ccccgccccgggtgcatgcatggtggaaactccggcttgcagcgaaacagagcgctgcgcgcgggcgcgcagggagcctcgc

SEQ ID NO: 295659 - DNA, 111 bp, Homo sapiens
  chrX:39871649-39871760
  hyper
ccccaggattagcgcggccaggaatccctctgcccgcagctgccgcggaggggttgagggttaaacagacaccgggcagaggagcgagcctgccggctgcggccggcgcgg

SEQ ID NO: 295660 - DNA, 201 bp, Homo sapiens; identical to SEQ ID NO: 58279
  chrX:39871778-39871979
  hyper

SEQ ID NO: 295661 - DNA, 508 bp, Homo sapiens; identical to SEQ ID NO: 241850
  chrX:39873112-39873620
  hyper

SEQ ID NO: 295662 - DNA, 807 bp, Homo sapiens; identical to SEQ ID NO: 241851
  chrX:39873680-39874487
  hyper

SEQ ID NO: 295663 - DNA, 1155 bp, Homo sapiens; identical to SEQ ID NO: 206230
  chrX:39910498-39911653
  hyper

SEQ ID NO: 295664 - DNA, 157 bp, Homo sapiens; identical to SEQ ID NO: 206231
  chrX:39913138-39913295
  hyper

SEQ ID NO: 295665 - DNA, 78 bp, Homo sapiens; identical to SEQ ID NO: 206232
  chrX:39913508-39913586
  hyper

SEQ ID NO: 295666 - DNA, 146 bp, Homo sapiens; identical to SEQ ID NO: 206233
  chrX:39914620-39914766
  hyper

SEQ ID NO: 295667 - DNA, 167 bp, Homo sapiens; identical to SEQ ID NO: 206234
  chrX:39916407-39916574
  hyper

SEQ ID NO: 295668 - DNA, 273 bp, Homo sapiens; identical to SEQ ID NO: 206235
  chrX:39921382-39921655
  hyper

SEQ ID NO: 295669 - DNA, 326 bp, Homo sapiens; identical to SEQ ID NO: 206236
  chrX:39921998-39922324
  hyper

SEQ ID NO: 295670 - DNA, 345 bp, Homo sapiens; identical to SEQ ID NO: 206237
  chrX:39922860-39923205
  hyper

SEQ ID NO: 295671 - DNA, 264 bp, Homo sapiens; identical to SEQ ID NO: 206238
  chrX:39923588-39923852
  hyper

SEQ ID NO: 295672 - DNA, 187 bp, Homo sapiens; identical to SEQ ID NO: 206239
  chrX:39930225-39930412
  hyper

SEQ ID NO: 295673 - DNA, 54 bp, Homo sapiens; identical to SEQ ID NO: 206240
  chrX:39930889-39930943
  hyper

SEQ ID NO: 295674 - DNA, 2832 bp, Homo sapiens; identical to SEQ ID NO: 206241
  chrX:39931601-39934433
  hyper

SEQ ID NO: 295675 - DNA, 79 bp, Homo sapiens; identical to SEQ ID NO: 206242
  chrX:39935706-39935785
  hyper

SEQ ID NO: 295676 - DNA, 126 bp, Homo sapiens; identical to SEQ ID NO: 206243
  chrX:39937096-39937222
  hyper

SEQ ID NO: 295677 - DNA, 927 bp, Homo sapiens; identical to SEQ ID NO: 58295
  chrX:39953710-39954637
  hyper

SEQ ID NO: 295678 - DNA, 1950 bp, Homo sapiens
  chrX:39954906-39956856
  hyper
acctatttgaagcgcgttggtttctttttaaggtttgtttctaaatacacataaccctcctccttccttcttcgctcttccattccccccacccccaccctccagacgccggcggcgcgcgccctggcgcgcgggcactcacagcctctagctggagatcgcggactttctggaaaagattcattaacagcaaattacgcctcgcccggccacggcctacacgctgccagactcgtccgtctccgggaccccgggaagggcccactcgagcgtgcgagcggcgggaagcccgccgggaccacgcgtgacttcggccgccctactccacacacggtgccccaaggctctctccgtaaacagcaggcgctcgtcaccgccgccgcgagcccccgagttggcggaggctctgcggcgcagccgcccgccggctccgagcgcgggccccgcggcgcctcgccctccccgccttggccgaggatcttgccccggtgcgcaagttcctcttcgcctacagcctccttgccacacgccctccgagtgggaccaacttcctccggccgcagactttcacacgcccatcagggctacccaccagactccccattgcccagcggagggcccaggtctcgcccgcccccgccctccctccacgacgctgcccccgcacaagcacattctacacccacccctgggggctcataacttaaaacctacgctgaacatcggggagggagaggagggggaaagcgggagggggatcgcagattataatcttaaaagaacatttacaaaacaaagcgtctgacctggctggcgggcgggccaagtcggaaccccttgctctgctcgatttcttagtagtttttttttttaatccacgtgattcgtgctttggggcaagccaagaaaaaacgggactcccctcccgagttgcgcggcagcggcggcaggtcgagctcggctcggcccgaggcactcgccacacaccctcgcgcacgcacacgccgacgttccacttggaggaacgaccggcccccggagaggcgagacgaggcggcggtggcggcggctgggggtttttacagttctttcccgagtcgaaaaagaaagcagacggcaacccgctgccctccccttcctgctcgcgagctaacgccgaacccagcttcccagcttccagcccacctcccccccctccgcccgactcgcggcgctcagcggcgaccgcgctcccgcgcacagacacacacaggctgcaaacttccactctgcgaactccctgctctcctcctggcccaccgggaggcgccaggcccccagccgcgccccctccctccctggtgcccacgcggggccgcttaggttggctgcattttaaataacatagctatgaaataaaaacgaaagcgagccaagcagccaaagggaagcgcgaggcaaaagcttcgcggggtacgctgcgggagggggccccgggagagggggccgactgcagccctcagcgcgcccgcccgcccacccgtccgcggtctcccgggggaaaggtgttccgggcactgacctgaaatccccggtgggggagtaggcagggagcctgcgatccggctctttgaagttttcccccaagcggactcgaggcggcgagaaggagcggggggcggttgggtgggtggagagagatatgaggggtggggggggttggcgacgttaacgagcggagaaggagccgggccggagaagcgcggcgagcagcaaagtttgcggtccccggctgcccgcagcccgctcgcggcgccgcgctcactcgactccctcgccgtctgctggcagccggctgccctcggggtcggccccgccgaggggtgggctctgggccgggtgggggcggggcggggcgggctcggggcctccgggcaggtggcgacagccccgtgcgatcctccgggctcc

SEQ ID NO: 295679 - DNA, 878 bp, Homo sapiens
  chrX:39957026-39957904
  hyper
cgcggcttgggctctccgcccggcggctcgcgggctccccctccgccgccgccgcccgcctagctcccgctctcggtcgcggtctgggctcctgcgcgtctcccccgcagccgccgagctcggcccgcgttcagcgaggagcgcagctctgcctcaccttgccgctgggagcccaggctccgtctgccgccgcacgccgcgatcccaacgcgtcccccctccctggttccctcctcttcctcctccccctccctccgcccgtcctccctcccgcccgccctacctccctccctcccaacagccgcctcccctccccccgcaggcgcagcgctcgggcgacagccgcccgcccgccgccgcctccagctctcgcaagtttgagctccgccagtctccgctcaccctccgctgcggcgcctccgcggcggggtttcgggaggggtgattccccaggaaaggtttgcccgagtttccccggccgtcatcgatgcacggcccggcacgttttggcctctctggatccgaaccccggaccacttgggtggcgccccccctcctcgtcccccggcctcccctccccagctcgggccgagttggctgcgcacgcccgacccgggcgcacgtcctgggcgagccggagaccgacttgggcggcggcggcggcgagggctgccggcagagccagagccgaagggatgggggcggcgggggcggctctcccagccgcgcgccgagactcccctcgctacccagaaggccagtggaggaccgcaattaccataaagcgcctcgcactccgctcagccaaagctgtcaaaccccagcggcagcagccgctgccgccgcctcttgccaccagcgctgcgctctcccggcct

SEQ ID NO: 295680 - DNA, 528 bp, Homo sapiens; identical to SEQ ID NO: 58299
  chrX:39958064-39958592
  hyper

SEQ ID NO: 295681 - DNA, 645 bp, Homo sapiens; identical to SEQ ID NO: 206248
  chrX:39963955-39964600
  hyper

SEQ ID NO: 295682 - DNA, 297 bp, Homo sapiens; identical to SEQ ID NO: 206249
  chrX:39964630-39964927
  hyper

SEQ ID NO: 295683 - DNA, 1324 bp, Homo sapiens; identical to SEQ ID NO: 241856
  chrX:39965257-39966581
  hyper

SEQ ID NO: 295684 - DNA, 622 bp, Homo sapiens
  chrX:39968298-39968920
  hyper
ccgcacgattcgctcggcggagcgctgcgctgctgggctgggagggcggcggggaggaggagagacgagggggcgggaggcgaacccgggctgcgcgccaagaggcccggagccgcagattagtcaccgctcggctctgcgctcccgggtgcgcccgggaaccgggagggcaggcgtcggccccgctcagccgggctccccggtcctcggcgcgggtgcccccacccccacccccgcgcgctcctggcgcggctggctcgactctcggggacccgcgcagccgagatccacttgtcaggtcaagggcaggacagaaactctgcaagcggagtcttgcttgcgaacaggaaatttctccttgatgaggtgctgcccctcccccacgccgggcttcaaaacaaaactccagagcgggcggccaggtacccagcctcgctcgccatggccggcgacctccgctcctcggccccggccccgggcggcggagccaagccaacagagccggcggacggactcggcgccggccccgcggagggcgccaggctgccaccctccggggcccggacggggtcggcgggggtgcggagccccggagcccccgcgcctccccaggttctacagc

SEQ ID NO: 295685 - DNA, 253 bp, Homo sapiens
  chrX:39968950-39969203
  hyper
ccgccgggtcagcggctccccggagggcgtggggggcggggaggccgcgcggcgccgccgactcggcgaatcccgctgcgggagcccgggagggctgcgagctcggcctggcaaagttcctgtggaaactccatgttttgaaactcctgcggcgtcgcagaaggagggggagaggggagcgcgggaagcgcgcgggggcggtctgcacccgcctctccccgccggggagtgggttccgcggccccccgggcct

SEQ ID NO: 295686 - DNA, 95 bp, Homo sapiens; identical to SEQ ID NO: 206251
  chrX:40005424-40005519
  hyper

SEQ ID NO: 295687 - DNA, 244 bp, Homo sapiens; identical to SEQ ID NO: 206252
  chrX:40005842-40006086
  hyper

SEQ ID NO: 295688 - DNA, 2394 bp, Homo sapiens
  chrX:40012143-40014537
  hyper
aaaagccgagagggcgggaggagacagggagacttccgcgggaggccgatggtcaaagtggggggtgaaaccgctcagggtgaccgggctggagacccaggaacccgattcggcgcgaaggtgccgcgcgagttccagcgagcagcctgcccggccaagtggcgcctgcccagccgtcggccgtgccagcttcctgccctgcccaggaccgcggagcagtcggggacgccgccgcaggctggcccggaatcgcaggacagcggcggggggagggggtagccaggccgcaagtaaactcgcactagagctttctgcacacctccgccctagagagggggcccggacccccggtctgtgaggcgtcggctttggccttccaaccttggggtgcgcgaggaagcaaagacccagggggcacccccaccctcgcccaaggcccgagggtgggggacagctgaaatgtctttggtcttgtttgatgaccgcttggcggatctgctcccatccgggttctgccgttccgagagtgccgggtcagtgatacccaggccggtctgagcaggcatgtggatgagcaaaagcaaatctgtcgctcctccgaccgccacccctcacttaacctttcctgcatccaaggaaggggagggcacccagactctgccccaccccccgcggggcgctccctctgcctcggaagctgagactaagagcgagggttttccccctttcccctgggctcgctgggtttctaacttcctctaaacctccctcctcgctccgaaaagccccgaggagaggagctgagaggaagcacgccgctagtgtgcaaaatgaagaccatgtgtgaggacggcggcatcagagtgcagccgcgggggttagggggtggcaaaggcccccgcgcggccggaggctcggggccgcagcagccagtgcctctgctctgcgttggggactcggagccgcagcgagaggcagtggagaggcagggctggcctcgtggcgggaggcgaggagggggtgcgagggctgccgcgccgtggggggcagggggcggggacgcagccccggcttcctgggccgcagctgcgaccgagggcgcaagagcagatcgtgctctgcggcggtggcggctcgggcccgccgctctagcagctgagaatcaacaaagggaggcggcgggggaggggcgccaccgagcgttcgctggctgctctggaataataaaaaataattaataatgataataagagaaaaatcccccggctttcatggctctgggtttccgtgtggctgcagcgggaagcgcgctgtccttgaggcggcctctctcgcctggcctgcccgcccctccccctcctcgccccctcccctccccaggaaccgggaagagaaaggtctgcagctgacaaatattatccattctccccatcgatcgcggagtgtacagatgtgagcgcttgatgtgcccgcggagcggcggatcctccctgctcgctcgctctcgcccaggctccgctcgccgtccccctcctccccctttgttctcctcccctttccctctctttaaatagatttcagggcgctgcctgttggagagcagctggcgatctctcccgagagagggagcgagcgaagcccgaggtgccctgtcaccagcctcccctcccccacctcggcttttctctacgtcccccccaccccacctttctccagtttccaaaatagaaaacaccgggaacacccacgtccactgcaccgcgagcccctgggagcctttggacccctcgtgctgttccttgtgtctgtgtctgtgcagaggaagggcagtgcagggaggggacccagggccgcggcagaagagccaagggtccggatctttccctggcagcagcagggacgcagcgtgggtcacgctaacagggtacagtttacccattagggaaagtcggcggagacggccctgttattcctcttttgcagatggcagattaatccggcagcacccggcctcaaagggaccggctgctcggcaaagggttaacccgtcggccggtaatcgtggacacgcgcgcacacacacacacgcacgcgcgcgcgcgtcctctccgcctgcccgagcgcccgccgcggcccgcagtgcgcccggggctgggggagtagctgcgggaggggagggggtcgggggaggggcggggcgggcttaaccaggccgctcgactgagccggggccacctcgccgtctgtcacttaaatgattgtcctccgctccgctcagtgcggtcagtacgggctgttaacaggcagttgcaatcagtttccgaaaggtcagccaaggtcctccggctctcgcagacggaaggcattacgaaaccgcttttgtatctgcaggca

SEQ ID NO: 295689 - DNA, 626 bp, Homo sapiens
  chrX:40014669-40015295
  hyper
cggagtgacccagggcctccgggtttcggtggggaagcaggaagggggtggggagcaggcggcaagggaaggaggagtgggaggaagtgggagaggcgtcctggctcctctcctcacccagccaacagcccacacccggacccagacgggagcgggcggccttggacgcgaggagaccccactcggactctcaggccctcctggcgcctggaagtagggagggggtgtgggggggggaaagaccctcgccgagcgagcgagtcccagcgcggtgtctgaagacgctgctgccgccgccgctagaagtcgtccatcagcaaccagtccaacctgccagtgataatgtgcgatcaacaccaaatcacccccgccaggcgcgatccatcatcgcagcgcgccgcgggcccgcgtgaggctgactcgcggctggggtggggagggggggcgcgcggagcaggaggcggtcgcccagcacacccggactctccgcgcacctcgctgcccctcctggaggcctgcacccaggcgctcataactctccaagttccccagctacagagcgaaaacccagtggctccgagttctgggcacagctcacttaggaatccgcgcgtcctccgcgccct

SEQ ID NO: 295690 - DNA, 143 bp, Homo sapiens
  chrX:40017448-40017591
  hyper
gaagtggcaggactggccctcggggtccccgtgggtaaaggaggagcggcttcgcgccctgggacagcgcgcgccccggctgacacggggctgtcgccgcttctcccccggacgcgggcggctgcgcaccggccgccatcttg

SEQ ID NO: 295691 - DNA, 53 bp, Homo sapiens; identical to SEQ ID NO: 206254
  chrX:40017968-40018021
  hyper

SEQ ID NO: 295692 - DNA, 229 bp, Homo sapiens; identical to SEQ ID NO: 206255
  chrX:40030832-40031061
  hyper

SEQ ID NO: 295693 - DNA, 215 bp, Homo sapiens; identical to SEQ ID NO: 206256
  chrX:40031175-40031390
  hyper

SEQ ID NO: 295694 - DNA, 669 bp, Homo sapiens; identical to SEQ ID NO: 206257
  chrX:40031434-40032103
  hyper

SEQ ID NO: 295695 - DNA, 322 bp, Homo sapiens; identical to SEQ ID NO: 241862
  chrX:40033573-40033895
  hyper

SEQ ID NO: 295696 - DNA, 206 bp, Homo sapiens; identical to SEQ ID NO: 206258
  chrX:40034219-40034425
  hyper

SEQ ID NO: 295697 - DNA, 667 bp, Homo sapiens
  chrX:40035057-40035724
  hyper
aagagccgcccttactcgactggggtgaggggcgggaaactttgcaagaagactgttccgcgccttccccgcgtggcacctcagaagaacgtgggtgggtttcccgtccgaggccagaccacgctaccctacttttccaggtttcggacctgaacctcgtggactacgggagggagagtacatttcgggccactgcggggggcggagggacaccaaagacaggcgtcttcaagggttctggcagatggccaagtttgtgtcctttccctcccacgctagagtagcgcacgccactttggggaagcgtgagaccgttcaccaccggccacgaggccaccaatgtcttccaggtggggccgatggtttgtctgcagcactcccttccgccttgcggtcctcgcctggctcccacagtcctggggagcccccagagctagcccgcgtcttccctcgcccgctcttccgggggaaagggaggctgtttgtgtggtgtgtagccccgctccggcttgcacccccgcgagccacctcgcagccctccccggcctcggcctcacggatcccctcccggagtagccccgcgggcccccccgccatgcgtaatggggcgcccctgggacgcaggcggggatggcggttccggtcgttccgggatttgcgtgcaaga

SEQ ID NO: 295698 - DNA, 730 bp, Homo sapiens; identical to SEQ ID NO: 134528
  chrX:40035852-40036582
  hyper

SEQ ID NO: 295699 - DNA, 61 bp, Homo sapiens; identical to SEQ ID NO: 206261
  chrX:40126402-40126463
  hyper

SEQ ID NO: 295700 - DNA, 217 bp, Homo sapiens; identical to SEQ ID NO: 241867
  chrX:40506425-40506642
  hyper

SEQ ID NO: 295701 - DNA, 118 bp, Homo sapiens; identical to SEQ ID NO: 241868
  chrX:40506870-40506988
  hyper

SEQ ID NO: 295702 - DNA, 229 bp, Homo sapiens; identical to SEQ ID NO: 241869
  chrX:40595083-40595312
  hyper

SEQ ID NO: 295703 - DNA, 64 bp, Homo sapiens; identical to SEQ ID NO: 241870
  chrX:40944723-40944787
  hyper

SEQ ID NO: 295704 - DNA, 291 bp, Homo sapiens; identical to SEQ ID NO: 226463
  chrX:41112860-41113151
  hyper

SEQ ID NO: 295705 - DNA, 427 bp, Homo sapiens; identical to SEQ ID NO: 206262
  chrX:41135195-41135622
  hyper

SEQ ID NO: 295706 - DNA, 80 bp, Homo sapiens; identical to SEQ ID NO: 241873
  chrX:44402318-44402398
  hyper

SEQ ID NO: 295707 - DNA, 136 bp, Homo sapiens; identical to SEQ ID NO: 241874
  chrX:44732334-44732470
  hyper

SEQ ID NO: 295708 - DNA, 175 bp, Homo sapiens; identical to SEQ ID NO: 206263
  chrX:44733192-44733367
  hyper

SEQ ID NO: 295709 - DNA, 37 bp, Homo sapiens; identical to SEQ ID NO: 206264
  chrX:54834568-54834605
  hyper

SEQ ID NO: 295710 - DNA, 95 bp, Homo sapiens
  chrX:68758220-68758315
  hyper
gagccctgactgctgttccccgacaccggccgctgggtggcgctgtggctcctcctacccaggctggaggcaccagggaggcggaggcgcagccg

SEQ ID NO: 295711 - DNA, 32 bp, Homo sapiens; identical to SEQ ID NO: 241878
  chrX:71497207-71497239
  hyper

SEQ ID NO: 295712 - DNA, 93 bp, Homo sapiens
  chrX:71524762-71524855
  hyper
aatcgcatttccatcggcatccctggctctgcttccccggctttctgccctcctccaccaccctctagcccgttcgtgggcaaaacttggcaa

SEQ ID NO: 295713 - DNA, 40 bp, Homo sapiens; identical to SEQ ID NO: 134551
  chrX:71524952-71524992
  hyper

SEQ ID NO: 295714 - DNA, 558 bp, Homo sapiens; identical to SEQ ID NO: 206265
  chrX:71525285-71525843
  hyper

SEQ ID NO: 295715 - DNA, 885 bp, Homo sapiens
  chrX:71525998-71526883
  hyper
cagatgcggtccgggagattagcaaagtcggtggaagccaagctggagaaagcgcgggcgcagggagaaaaggtgctgccgtctccccgggagaagcgggcacccggccccgctggccggcaggggggcgcgctggcaagcgaacccgagcgctggcgggcgggcgggcgggcggcccctcgcccccagcagagcagctttccaacagaaagcaagtctccccagaaccctccggcccgcctggcggccgcccactccccatacccgctccacgggagtcctcggccccgccgcccagcccggcgcccagcccggcggcccggcttacctctgagaagccgcctgccctggagagagggaagcgcggagctcggtgagccgcaagagaggcggcggagcccccagcccctggcacgcacgccgccgccaccgctaccgcgaaccggtcgcgctcagcgcccgcggccgcgccgttggccacccgaccccggggcgcctgggaaaagcccgcaccgcgccgcgccgccgctgcaccgcacagtgccgcgccaagcagcccctgaccgagctggtgcccgcccgcccgcccgcagcttcggcgccggactccggggcggtggcggtggcggccaccgcgctcccttcccggcgctggggacccggctctcaagcccccattgccgcccggagagccctgacgcacacgcacacggcagcagactggcctcggctaggaatcccaggaaggacagaccctttttttccctttttttttctcccctcaatttccacgtctttataaccggcttagggcattattagcacatgtcctggctcgtgggcgagttggtggcaaaatctgaactggatactcacggagggccc

SEQ ID NO: 295716 - DNA, 254 bp, Homo sapiens
  chrX:71526917-71527171
  hyper
cctcaccgagaactgcccctcgccggcggactacaagagggcagccgggcagagcgagcttcctctcggcagctcagcggtgccccttctgcagctttgccgccgggcacatttttatagcagcggctggcgtctgtggccctttaaaggcgctcgagctggtgcagtcaccgcggatcgtgtgaaagcaaagggccggctggggaacggagtccacgcggccacgcgagtccggcagccctgtggaccggcca

SEQ ID NO: 295717 - DNA, 562 bp, Homo sapiens; identical to SEQ ID NO: 206269
  chrX:73163983-73164545
  hyper

SEQ ID NO: 295718 - DNA, 83 bp, Homo sapiens; identical to SEQ ID NO: 241882
  chrX:92928028-92928111
  hyper

SEQ ID NO: 295719 - DNA, 224 bp, Homo sapiens; identical to SEQ ID NO: 206270
  chrX:92928171-92928395
  hyper

SEQ ID NO: 295720 - DNA, 101 bp, Homo sapiens; identical to SEQ ID NO: 206271
  chrX:92928507-92928608
  hyper

SEQ ID NO: 295721 - DNA, 86 bp, Homo sapiens; identical to SEQ ID NO: 206272
  chrX:92928609-92928695
  hyper

SEQ ID NO: 295722 - DNA, 417 bp, Homo sapiens
  chrX:92928736-92929153
  hyper
actcctggctccgcccaccttcccagacgccgctcgctggctgaggtgcgaccccttggaaggtgtccccctgccccccaaaaagtctatatttatagttttataattaaaaaagaaaaaaaagcgtagacatgaggtaaaaataccagccatagttcctaacaagggcaaaagaggcgtgtcttccttctcccatccgcccaccctgaattcccgtttagtttgtcacgggtctcttgacaaaaagctgtaaaaaaaaaaaaaaaaaaaaaaaaaaattgaatgaaaatggtccaaatggcgtcattgggtagtgtgactatggacgatttaaaaacaaaacgattttctctaaatattctatgagcatgcatttttacactggataaaaaaggggagagtcggttattggcagag

SEQ ID NO: 295723 - DNA, 264 bp, Homo sapiens
  chrX:95940028-95940292
  hyper
cagggcacaggtgacagggccggagaaagatggagcagcccggggcggcggcgtcgggagcgggaggcggcagcgaggaacccggtgggggccggagcaacaagcggagcgcggggaaccgggccgccaatgaagaggaaacgaaaaacaaacccaaattggtgagtgctcccgcagcccccgccggccttagggacagggagagccccgggatcctcctgccattgaacacgggggcacccggggccccctcccaaggatgac

SEQ ID NO: 295724 - DNA, 434 bp, Homo sapiens; identical to SEQ ID NO: 241885
  chrX:102862894-102863328
  hyper

SEQ ID NO: 295725 - DNA, 41 bp, Homo sapiens; identical to SEQ ID NO: 206274
  chrX:107003164-107003205
  hyper

SEQ ID NO: 295726 - DNA, 115 bp, Homo sapiens; identical to SEQ ID NO: 241887
  chrX:110342113-110342228
  hyper

SEQ ID NO: 295727 - DNA, 88 bp, Homo sapiens
  chrX:110924332-110924420
  hyper
cctggcggccattacggatttccgcctccctcacagaaggcagtcactgcaacgtgcgtggcctcagttgcgtcatatccggcccttg

SEQ ID NO: 295728 - DNA, 162 bp, Homo sapiens; identical to SEQ ID NO: 134576
  chrX:110924466-110924628
  hyper

SEQ ID NO: 295729 - DNA, 87 bp, Homo sapiens
  chrX:123094090-123094177
  hyper
aaccgcggctcgatcgggtccgcggcggaagcgcggccaaacgaatgagtaagtcaggcgcgggcacggcaccttgtttaccccact

SEQ ID NO: 295730 - DNA, 98 bp, Homo sapiens; identical to SEQ ID NO: 134582
  chrX:123094335-123094433
  hyper

SEQ ID NO: 295731 - DNA, 223 bp, Homo sapiens; identical to SEQ ID NO: 206276
  chrX:123094493-123094716
  hyper

SEQ ID NO: 295732 - DNA, 124 bp, Homo sapiens; identical to SEQ ID NO: 206277
  chrX:123095161-123095285
  hyper

SEQ ID NO: 295733 - DNA, 151 bp, Homo sapiens; identical to SEQ ID NO: 206278
  chrX:123095555-123095706
  hyper

SEQ ID NO: 295734 - DNA, 65 bp, Homo sapiens; identical to SEQ ID NO: 206279
  chrX:123155216-123155281
  hyper

SEQ ID NO: 295735 - DNA, 141 bp, Homo sapiens; identical to SEQ ID NO: 206280
  chrX:123156380-123156521
  hyper

SEQ ID NO: 295736 - DNA, 79 bp, Homo sapiens; identical to SEQ ID NO: 206281
  chrX:123159689-123159768
  hyper

SEQ ID NO: 295737 - DNA, 165 bp, Homo sapiens; identical to SEQ ID NO: 206282
  chrX:123164810-123164975
  hyper

SEQ ID NO: 295738 - DNA, 97 bp, Homo sapiens; identical to SEQ ID NO: 206283
  chrX:123171376-123171473
  hyper

SEQ ID NO: 295739 - DNA, 77 bp, Homo sapiens; identical to SEQ ID NO: 206284
  chrX:123176418-123176495
  hyper

SEQ ID NO: 295740 - DNA, 205 bp, Homo sapiens; identical to SEQ ID NO: 206285
  chrX:123179013-123179218
  hyper

SEQ ID NO: 295741 - DNA, 152 bp, Homo sapiens; identical to SEQ ID NO: 206286
  chrX:123181203-123181355
  hyper

SEQ ID NO: 295742 - DNA, 74 bp, Homo sapiens; identical to SEQ ID NO: 206287
  chrX:123182854-123182928
  hyper

SEQ ID NO: 295743 - DNA, 135 bp, Homo sapiens; identical to SEQ ID NO: 206288
  chrX:123184024-123184159
  hyper

SEQ ID NO: 295744 - DNA, 278 bp, Homo sapiens; identical to SEQ ID NO: 206289
  chrX:123184966-123185244
  hyper

SEQ ID NO: 295745 - DNA, 108 bp, Homo sapiens; identical to SEQ ID NO: 206290
  chrX:123189977-123190085
  hyper

SEQ ID NO: 295746 - DNA, 112 bp, Homo sapiens; identical to SEQ ID NO: 206291
  chrX:123191715-123191827
  hyper

SEQ ID NO: 295747 - DNA, 131 bp, Homo sapiens; identical to SEQ ID NO: 206292
  chrX:123195073-123195204
  hyper

SEQ ID NO: 295748 - DNA, 104 bp, Homo sapiens; identical to SEQ ID NO: 206293
  chrX:123195620-123195724
  hyper

SEQ ID NO: 295749 - DNA, 306 bp, Homo sapiens; identical to SEQ ID NO: 206294
  chrX:123196749-123197055
  hyper

SEQ ID NO: 295750 - DNA, 213 bp, Homo sapiens; identical to SEQ ID NO: 206295
  chrX:123197688-123197901
  hyper

SEQ ID NO: 295751 - DNA, 71 bp, Homo sapiens; identical to SEQ ID NO: 206296
  chrX:123199725-123199796
  hyper

SEQ ID NO: 295752 - DNA, 262 bp, Homo sapiens; identical to SEQ ID NO: 206297
  chrX:123200024-123200286
  hyper

SEQ ID NO: 295753 - DNA, 93 bp, Homo sapiens; identical to SEQ ID NO: 206298
  chrX:123202413-123202506
  hyper

SEQ ID NO: 295754 - DNA, 175 bp, Homo sapiens; identical to SEQ ID NO: 206299
  chrX:123204998-123205173
  hyper

SEQ ID NO: 295755 - DNA, 140 bp, Homo sapiens; identical to SEQ ID NO: 206300
  chrX:123210181-123210321
  hyper

SEQ ID NO: 295756 - DNA, 102 bp, Homo sapiens; identical to SEQ ID NO: 206301
  chrX:123211806-123211908
  hyper

SEQ ID NO: 295757 - DNA, 150 bp, Homo sapiens; identical to SEQ ID NO: 206302
  chrX:123215228-123215378
  hyper

SEQ ID NO: 295758 - DNA, 133 bp, Homo sapiens; identical to SEQ ID NO: 206303
  chrX:123217270-123217403
  hyper

SEQ ID NO: 295759 - DNA, 224 bp, Homo sapiens; identical to SEQ ID NO: 206304
  chrX:123220396-123220620
  hyper

SEQ ID NO: 295760 - DNA, 390 bp, Homo sapiens; identical to SEQ ID NO: 206305
  chrX:123224424-123224814
  hyper

SEQ ID NO: 295761 - DNA, 127 bp, Homo sapiens; identical to SEQ ID NO: 206306
  chrX:123227867-123227994
  hyper

SEQ ID NO: 295762 - DNA, 78 bp, Homo sapiens; identical to SEQ ID NO: 206307
  chrX:123229221-123229299
  hyper

SEQ ID NO: 295763 - DNA, 2083 bp, Homo sapiens; identical to SEQ ID NO: 206308
  chrX:123234423-123236506
  hyper

SEQ ID NO: 295764 - DNA, 136 bp, Homo sapiens; identical to SEQ ID NO: 206309
  chrX:129139163-129139299
  hyper

SEQ ID NO: 295765 - DNA, 91 bp, Homo sapiens; identical to SEQ ID NO: 206310
  chrX:129146553-129146644
  hyper

SEQ ID NO: 295766 - DNA, 3264 bp, Homo sapiens; identical to SEQ ID NO: 206311
  chrX:129146925-129150189
  hyper

SEQ ID NO: 295767 - DNA, 177 bp, Homo sapiens; identical to SEQ ID NO: 206312
  chrX:129154948-129155125
  hyper

SEQ ID NO: 295768 - DNA, 81 bp, Homo sapiens; identical to SEQ ID NO: 206313
  chrX:129156871-129156952
  hyper

SEQ ID NO: 295769 - DNA, 392 bp, Homo sapiens; identical to SEQ ID NO: 206314
  chrX:129158962-129159354
  hyper

SEQ ID NO: 295770 - DNA, 227 bp, Homo sapiens; identical to SEQ ID NO: 206315
  chrX:129162609-129162836
  hyper

SEQ ID NO: 295771 - DNA, 222 bp, Homo sapiens; identical to SEQ ID NO: 206316
  chrX:129168429-129168651
  hyper

SEQ ID NO: 295772 - DNA, 167 bp, Homo sapiens; identical to SEQ ID NO: 206317
  chrX:129171341-129171508
  hyper

SEQ ID NO: 295773 - DNA, 148 bp, Homo sapiens; identical to SEQ ID NO: 206318
  chrX:129173111-129173259
  hyper

SEQ ID NO: 295774 - DNA, 78 bp, Homo sapiens; identical to SEQ ID NO: 206319
  chrX:129184691-129184769
  hyper

SEQ ID NO: 295775 - DNA, 157 bp, Homo sapiens; identical to SEQ ID NO: 206320
  chrX:129185834-129185991
  hyper

SEQ ID NO: 295776 - DNA, 2230 bp, Homo sapiens; identical to SEQ ID NO: 206321
  chrX:129189828-129192058
  hyper

SEQ ID NO: 295777 - DNA, 51 bp, Homo sapiens; identical to SEQ ID NO: 206322
  chrX:130110130-130110181
  hyper

SEQ ID NO: 295778 - DNA, 156 bp, Homo sapiens; identical to SEQ ID NO: 206323
  chrX:133507341-133507497
  hyper

SEQ ID NO: 295779 - DNA, 184 bp, Homo sapiens; identical to SEQ ID NO: 206324
  chrX:133511601-133511785
  hyper

SEQ ID NO: 295780 - DNA, 102 bp, Homo sapiens; identical to SEQ ID NO: 206325
  chrX:133512034-133512136
  hyper

SEQ ID NO: 295781 - DNA, 134 bp, Homo sapiens; identical to SEQ ID NO: 206326
  chrX:133527530-133527664
  hyper

SEQ ID NO: 295782 - DNA, 44 bp, Homo sapiens; identical to SEQ ID NO: 206327
  chrX:133527938-133527982
  hyper

SEQ ID NO: 295783 - DNA, 479 bp, Homo sapiens; identical to SEQ ID NO: 206328
  chrX:133547517-133547996
  hyper

SEQ ID NO: 295784 - DNA, 277 bp, Homo sapiens; identical to SEQ ID NO: 206329
  chrX:133549045-133549322
  hyper

SEQ ID NO: 295785 - DNA, 134 bp, Homo sapiens; identical to SEQ ID NO: 206330
  chrX:133551198-133551332
  hyper

SEQ ID NO: 295786 - DNA, 130 bp, Homo sapiens; identical to SEQ ID NO: 206331
  chrX:133559230-133559360
  hyper

SEQ ID NO: 295787 - DNA, 3132 bp, Homo sapiens; identical to SEQ ID NO: 206332
  chrX:133559690-133562822
  hyper

SEQ ID NO: 295788 - DNA, 91 bp, Homo sapiens
  chrY:2655225-2655316
  hyper
ttcggcagcatcttcgccttccgacgaggtcgatacttataattcgggtatttctctctgtgcatggcctgtaatttctgtgcctcctgga

SEQ ID NO: 295789 - DNA, 610 bp, Homo sapiens
  chrY:2655346-2655956
  hyper
ttttccactggtatcccagctgcttgctgatctctgagtttcgcattctgggattctctagagccatcttgcgcctctgatcgcgagaccacacgatgaatgcgttcatgggtcgcttcactctatcctggacgttgcctttactgttttctcccgtttcacactgatacttagagttacagctttcagtgcaaaggaaggaagagcttctccggagagcgggaatattctcttgcacagctggactgtaatcatcgctgttgaatacgcttaacatagcagaagcatatgattgcattgtcaaaaacaaggagagtgcgacaaaattgaaaggtgccagagttcgaaacttattttactatccaaaactcacttctaccagattctttgttacgttaacttttgtaatgaaacttgcatttctccgccctcaacaccccctcaaccccgcccaaccagcctaccccctagtaccctgacaatgtattcattctcaagcaaaacatggtaattcagtaacgttgactacttgccctgctgatctgcctccctgactgctctactgctgtcctgaaaaatgcgaatttgacttaatcgccaattttttcat

SEQ ID NO: 295790 - DNA, 191 bp, Homo sapiens; identical to SEQ ID NO: 206333
  chrY:2802951-2803142
  hyper

SEQ ID NO: 295791 - DNA, 39 bp, Homo sapiens; identical to SEQ ID NO: 206334
  chrY:2804296-2804335
  hyper

SEQ ID NO: 295792 - DNA, 50 bp, Homo sapiens
  chrY:4869597-4869647
  hyper
gcgtagcgataaaacggctcttttttttttcgaggaaagtaatgtacctt

SEQ ID NO: 295793 - DNA, 52 bp, Homo sapiens
  chrY:4869714-4869766
  hyper
gactttagaagagcggagcggcagtccgcccgggttgcggctgggactcgca

SEQ ID NO: 295794 - DNA, 83 bp, Homo sapiens; identical to SEQ ID NO: 206335
  chrY:6778627-6778710
  hyper

SEQ ID NO: 295795 - DNA, 49 bp, Homo sapiens; identical to SEQ ID NO: 241895
  chrY:7140718-7140767
  hyper

SEQ ID NO: 295796 - DNA, 297 bp, Homo sapiens; identical to SEQ ID NO: 241896
  chrY:7140797-7141094
  hyper

SEQ ID NO: 295797 - DNA, 265 bp, Homo sapiens; identical to SEQ ID NO: 206336
  chrY:14532892-14533157
  hyper

SEQ ID NO: 295798 - DNA, 56 bp, Homo sapiens; identical to SEQ ID NO: 206337
  chrY:14533221-14533277
  hyper

SEQ ID NO: 295799 - DNA, 249 bp, Homo sapiens; identical to SEQ ID NO: 206338
  chrY:14533307-14533556
  hyper

SEQ ID NO: 295800 - DNA, 55 bp, Homo sapiens; identical to SEQ ID NO: 206339
  chrY:14533613-14533668
  hyper

SEQ ID NO: 295801 - DNA, 34 bp, Homo sapiens; identical to SEQ ID NO: 206340
  chrY:14774179-14774213
  hyper

SEQ ID NO: 295802 - DNA, 113 bp, Homo sapiens; identical to SEQ ID NO: 206341
  chrY:15591519-15591632
  hyper

SEQ ID NO: 295803 - DNA, 229 bp, Homo sapiens; identical to SEQ ID NO: 206342
  chrY:15863195-15863424
  hyper

SEQ ID NO: 295804 - DNA, 460 bp, Homo sapiens; identical to SEQ ID NO: 241903
  chrY:15863656-15864116
  hyper

SEQ ID NO: 295805 - DNA, 73 bp, Homo sapiens
  chrY:16635744-16635817
  hyper
cgcgctggaaaccccgcgtgaagatgaaatgactgtagctccgtgctgctcctccaaactcgggagcggtatc

SEQ ID NO: 295806 - DNA, 1097 bp, Homo sapiens
  chrY:16636060-16637157
  hyper
ggtatcaggtgatccggagccctagtcggtgcccactaagaacaccccttctcccatcgggggttcggaggagtgttaagcctgcgggtctgccagtccctaaggtagggatgggggaggggtctgaggaatccgttccaataggcacaccatccccacagccctagaaaaggcaaccaccacccgctccttcctcccgcaccatcccatctcaaggctctctgctgacccgggccgatttcatctggtctcttctcccccgcttcccacctcccaattcccgcgcagctcggctccgttccctcccactcccctaggcggaactgaaagcgaagatcagccaagagcacagtcggaggcggcagagacggtggcgggtgagctaggggctgtgagacgaagcagggagagagtgaacttcagccccgtcccctccccactgccacggctggggcaacccaacccgcgcctgaagcggcttggcttgacctgcggaagcgcgggccgggatggcgtggggagagggaggtaggtgccactgggctgcagatgacgagtgggttgggggcttgctgtgggacaagaggttcaggttccggcctgcgccttccactccgcggtggcgctctctgcctgcggttttccaggaggccgatctaccccagggacactctcatccttcaggcggtctcctggacgccctttcctccccttgcctcccagcctgacctggctctttcgcccctcggagaaccggtaggttggggtccctcggcgggggtctagtgagccgagtcgcgagctttgcgcccccggtatctaggccccgtgccgcgcgcaaatccgggcccaggcgtacagttctggagcctagtcgccgccagacacagggccctttgtacccggaggagcgggagcgggagcgggggcgtcagggcaacccttgcaccccagaggcctgcctaggaccaccctgggaacaaatgtctcgctcggaaaacgaggtgaacccggaggatgtcctacgcatcatacccctccccttcttgagaaggctttttctttttttctttttttttcccggtttccttttctct

SEQ ID NO: 295807 - DNA, 61 bp, Homo sapiens; identical to SEQ ID NO: 206346
  chrY:21729023-21729084
  hyper

SEQ ID NO: 295808 - DNA, 44 bp, Homo sapiens; identical to SEQ ID NO: 206347
  AC209420.3_23583-33864:1609-1653
  hyper

SEQ ID NO: 295809 - DNA, 625 bp, Homo sapiens; identical to SEQ ID NO: 241907
  AC211344.3_7702-13588:3923-4548
  hyper

SEQ ID NO: 295810 - DNA, 70 bp, Homo sapiens; identical to SEQ ID NO: 206349
  AC241851.2_88-34049:15063-15133
  hyper

SEQ ID NO: 295811 - DNA, 50 bp, Homo sapiens; identical to SEQ ID NO: 206350
  AC241851.2_88-34049:15553-15603
  hyper

SEQ ID NO: 295812 - DNA, 98 bp, Homo sapiens; identical to SEQ ID NO: 206351
  AC241851.2_88-34049:15843-15941
  hyper

SEQ ID NO: 295813 - DNA, 45 bp, Homo sapiens; identical to SEQ ID NO: 206352
  FP325318.4_87426-89530:1058-1103
  hyper

SEQ ID NO: 295814 - DNA, 7860 bp, Homo sapiens; identical to SEQ ID NO: 58444
  HPV16:0-7860
  hyper

SEQ ID NO: 295815 - DNA, 7800 bp, Homo sapiens; identical to SEQ ID NO: 58445
  HPV18:0-7800
  hyper

SEQ ID NO: 295816 - DNA, 126 bp, Homo sapiens; identical to SEQ ID NO: 206353
  JH636052.4:789299-789425
  hyper

SEQ ID NO: 295817 - DNA, 279 bp, Homo sapiens
  JH636052.4:1361829-1362108
  hyper
agttacgcagctgagcttcccacgttagagaaaatgacagaacagcacacttgaaatgaaatagttgagtcgggtttaaaagccatttcagtaaccacaatatctgccctgccacataaataagattgcacctatctccgccccgccacagctccatacgcctcaccctttaaacgcacagtcacttgccccagcaccactccagccaatccccaaccaccccgagccctcctagccctaacacacagctgggactctcatgtccagccagtggtcctg

SEQ ID NO: 295818 - DNA, 60 bp, Homo sapiens
  JH636052.4:1362132-1362192
  hyper
tccttcgtggcgaagcagcagcccctgcgctgcctcatctacatagaaacgccctatcgg

SEQ ID NO: 295819 - DNA, 96 bp, Homo sapiens; identical to SEQ ID NO: 241915
  JH636052.4:1376242-1376338
  hyper

SEQ ID NO: 295820 - DNA, 112 bp, Homo sapiens; identical to SEQ ID NO: 206354
  NW_001838402.2_289580-297926:6069-6181
  hyper

SEQ ID NO: 295821 - DNA, 33 bp, Homo sapiens; identical to SEQ ID NO: 247270
  chr1:809313-809346
  hypo

SEQ ID NO: 295822 - DNA, 35 bp, Homo sapiens; identical to SEQ ID NO: 247271
  chr1:834689-834724
  hypo

SEQ ID NO: 295823 - DNA, 42 bp, Homo sapiens; identical to SEQ ID NO: 247272
  chr1:851057-851099
  hypo

SEQ ID NO: 295824 - DNA, 64 bp, Homo sapiens; identical to SEQ ID NO: 197231
  chr1:859736-859800
  hypo

SEQ ID NO: 295825 - DNA, 405 bp, Homo sapiens; identical to SEQ ID NO: 247273
  chr1:864734-865139
  hypo

SEQ ID NO: 295826 - DNA, 149 bp, Homo sapiens; identical to SEQ ID NO: 206356
  chr1:872320-872469
  hypo

SEQ ID NO: 295827 - DNA, 37 bp, Homo sapiens; identical to SEQ ID NO: 206357
  chr1:879361-879398
  hypo

SEQ ID NO: 295828 - DNA, 548 bp, Homo sapiens; identical to SEQ ID NO: 247276
  chr1:896870-897418
  hypo

SEQ ID NO: 295829 - DNA, 282 bp, Homo sapiens; identical to SEQ ID NO: 247277
  chr1:897734-898016
  hypo

SEQ ID NO: 295830 - DNA, 411 bp, Homo sapiens
  chr1:898243-898654
  hypo
gccgcacacgtccccggcgctgcgagggggccgggcctgtgctttttgctgtgggtatggccccccgcccgtttccctcttgccctgtgccttctactccccaccagcacaagcccaccccacctgtgccggtcaggtcctgacctgcccctccgcccctccattcaggggcctctccaggagcctggggtgtggcccagcagtgggatccactcacgagtcccgtctccacctgccctccccaggcggcgggagcctgtttgccatccacggagactgtgaggcctacgacacgcgcaccgaccgctggcacgtggtggcctccatgtccacgcgccgggcccgggtgggagtggctgcggtggggaaccggctctatgctgtgggcgggtaagcctggaggctggactt

SEQ ID NO: 295831 - DNA, 38 bp, Homo sapiens; identical to SEQ ID NO: 206360
  chr1:898690-898728
  hypo

SEQ ID NO: 295832 - DNA, 109 bp, Homo sapiens; identical to SEQ ID NO: 206361
  chr1:898776-898885
  hypo

SEQ ID NO: 295833 - DNA, 788 bp, Homo sapiens; identical to SEQ ID NO: 206362
  chr1:899137-899925
  hypo

SEQ ID NO: 295834 - DNA, 617 bp, Homo sapiens; identical to SEQ ID NO: 247280
  chr1:900230-900847
  hypo

SEQ ID NO: 295835 - DNA, 179 bp, Homo sapiens; identical to SEQ ID NO: 247281
  chr1:906924-907103
  hypo

SEQ ID NO: 295836 - DNA, 37 bp, Homo sapiens; identical to SEQ ID NO: 206363
  chr1:913466-913503
  hypo

SEQ ID NO: 295837 - DNA, 1005 bp, Homo sapiens; identical to SEQ ID NO: 247283
  chr1:915023-916028
  hypo

SEQ ID NO: 295838 - DNA, 214 bp, Homo sapiens; identical to SEQ ID NO: 206364
  chr1:918153-918367
  hypo

SEQ ID NO: 295839 - DNA, 53 bp, Homo sapiens; identical to SEQ ID NO: 206365
  chr1:918577-918630
  hypo

SEQ ID NO: 295840 - DNA, 898 bp, Homo sapiens; identical to SEQ ID NO: 221173
  chr1:935362-936260
  hypo

SEQ ID NO: 295841 - DNA, 32 bp, Homo sapiens; identical to SEQ ID NO: 206368
  chr1:942678-942710
  hypo

SEQ ID NO: 295842 - DNA, 392 bp, Homo sapiens; identical to SEQ ID NO: 197235
  chr1:955508-955900
  hypo

SEQ ID NO: 295843 - DNA, 206 bp, Homo sapiens; identical to SEQ ID NO: 247286
  chr1:959107-959313
  hypo

SEQ ID NO: 295844 - DNA, 35 bp, Homo sapiens; identical to SEQ ID NO: 277802
  chr1:975907-975942
  hypo

SEQ ID NO: 295845 - DNA, 221 bp, Homo sapiens; identical to SEQ ID NO: 247287
  chr1:980098-980319
  hypo

SEQ ID NO: 295846 - DNA, 191 bp, Homo sapiens; identical to SEQ ID NO: 206371
  chr1:982294-982485
  hypo

SEQ ID NO: 295847 - DNA, 228 bp, Homo sapiens; identical to SEQ ID NO: 206372
  chr1:984139-984367
  hypo

SEQ ID NO: 295848 - DNA, 266 bp, Homo sapiens
  chr1:984401-984667
  hypo
ctggcattggcgctgctagatggccgcgtgcagctcaggtgggcggggaggggacggggccggggcagctcaggtgggcggggaggggacgggcgggggagggggggccggggcagctcaggtgggtggggtggggacgggggcggggcagctcaggtaggcggggtggggacggggccgggcgatggtcctgagcacctgctcctgccctcaggtttgacacaggttcggggccggcggtgctgaccagtgccgtgccggtagag

SEQ ID NO: 295849 - DNA, 395 bp, Homo sapiens
  chr1:984737-985132
  hypo
cccctgttctgggcgagagtcccagtggcaccgacggcctcaacctggacacagacctctttgtgggcggcgtacccgaggaccaggctgccgtgtgagtcccttggagggtggtgtggccccgaccccggccctttggggtcccggtgtacgaggtggctttgcctgtggcccctgagccctgacccggtgtccctcctggtggcagggcgctggagcggaccttcgtgggcgccggcctgagggggtgcatccgtttgctggacgtcaacaaccagcgcctggagcttggcattgggccgggggctgccacccgaggctctggcgtgggcgagtgcggggaccacccctgcctgcccaacccctgccatggcggggccccatgccagaacctg

SEQ ID NO: 295850 - DNA, 1209 bp, Homo sapiens; identical to SEQ ID NO: 247290
  chr1:987799-989008
  hypo

SEQ ID NO: 295851 - DNA, 197 bp, Homo sapiens; identical to SEQ ID NO: 247291
  chr1:989210-989407
  hypo

SEQ ID NO: 295852 - DNA, 207 bp, Homo sapiens; identical to SEQ ID NO: 247292
  chr1:990294-990501
  hypo

SEQ ID NO: 295853 - DNA, 436 bp, Homo sapiens; identical to SEQ ID NO: 206375
  chr1:990531-990967
  hypo

SEQ ID NO: 295854 - DNA, 46 bp, Homo sapiens; identical to SEQ ID NO: 247294
  chr1:990997-991043
  hypo

SEQ ID NO: 295855 - DNA, 61 bp, Homo sapiens; identical to SEQ ID NO: 221176
  chr1:994999-995060
  hypo

SEQ ID NO: 295856 - DNA, 254 bp, Homo sapiens; identical to SEQ ID NO: 247295
  chr1:1018240-1018494
  hypo

SEQ ID NO: 295857 - DNA, 127 bp, Homo sapiens; identical to SEQ ID NO: 206377
  chr1:1019320-1019447
  hypo

SEQ ID NO: 295858 - DNA, 92 bp, Homo sapiens; identical to SEQ ID NO: 247297
  chr1:1022918-1023010
  hypo

SEQ ID NO: 295859 - DNA, 413 bp, Homo sapiens; identical to SEQ ID NO: 247298
  chr1:1024247-1024660
  hypo

SEQ ID NO: 295860 - DNA, 327 bp, Homo sapiens; identical to SEQ ID NO: 247299
  chr1:1046072-1046399
  hypo

SEQ ID NO: 295861 - DNA, 534 bp, Homo sapiens
  chr1:1046997-1047531
  hypo
aaccctgtaaaagcaaccaccggctggggcagtgggtagaccacacccacgctcaccgtaactccagccgcccaggcagcagtaactgaaaaggggaggcgggagggtccactggcgggtttctcacgctgctgaacctcggtaaacacagccccgagggctggctggagcttccactgcatccgtgtagctaatgctggtcatcttcgtagcaagcaaaggaagccaacgtgaaacgtagctttaagggcccaataagaactgtctggggcctctctacctaaagatccctctcgtgctttgatagaaaacaaataccgcaaaccccttgatggggtgtaaaggagacatccccctttgttgacatgcatggtagtcgctgcccacctacccgtgggctcagcacaccggagtcgggcggttgccgtaggtggctcagcagacgtgagcagggcaggatcgggcccatccccccaccgggaatgtcaggccaccatcaggtgatggtcaggtggctgttaactgtctaaaaga

SEQ ID NO: 295862 - DNA, 668 bp, Homo sapiens
  chr1:1047619-1048287
  hypo
ctcaggaactgggcgagttggctcaagcgtgtgcactgagaggcaaaatggcggcgtgtaaccgttctatgaccttctagggacgtttgacaggtaacggaagaacgcctcaggtgagcatgggcactactccagtgaacacacggcgcacggtccctccctccagtgaacacaacgcacacgctccctccctccagtgaacacacagcgcatgctccctccttccagtgaacacacggcacatgctacctccctccagtgaacacacggcacatgctccctccctccagtgaacacaacgcgcacgctccctccctccagtgaacacacagcgcatgctccctccccccagtgaatacacggggcatgctccctccctccagtgaacacaccgggcatgctccctccctccagggaacacatggcgcatgctcccgcccaagtactagcaagatgctgcatgggtggacagcccaccctgaagaaggatcaggggagaaggggtgcaagaccccagaagcctgccaggctataaaaccccaagtcaaaaggtgaaaccgcacacctgatctctcacatcgcccgtctggccctcctccaagggtacttcctttccttcctgctctaaagcttcttcaacaactttcactcctgctctaaaacttgcc

SEQ ID NO: 295863 - DNA, 45 bp, Homo sapiens
  chr1:1049843-1049888
  hypo
aagctcaggtggagagcagccgcaaggcagggagcagctgggagg

SEQ ID NO: 295864 - DNA, 130 bp, Homo sapiens; identical to SEQ ID NO: 221177
  chr1:1052182-1052312
  hypo

SEQ ID NO: 295865 - DNA, 670 bp, Homo sapiens; identical to SEQ ID NO: 247302
  chr1:1062954-1063624
  hypo

SEQ ID NO: 295866 - DNA, 266 bp, Homo sapiens; identical to SEQ ID NO: 206381
  chr1:1064886-1065152
  hypo

SEQ ID NO: 295867 - DNA, 478 bp, Homo sapiens
  chr1:1065879-1066357
  hypo
ggtgccaggtccaccgtggccgcctgttctcacccgaactctgagctgtttccctgaagttaataatcgcctttgcttttcttcttgcttagctttctctgaactcattactaattcagcctcagactctcccccatgacttaaattccggcacgccaggtatttctgaggggcctccgggagcctcctgccctgcccggggctggtcggctccctcgggcctggggcagggctggcgtcttgcaggcttcgtggtccgtgtcacaaaggtcccattgcttctcccctgggtgggattttcccgggccccacacctcccctttcttgtcttctcagtgttttggtggaacaagcccctcgcagctccccgtgaggtgcagggggtgggcccccaccacgcccacagctgcagctgcctgtgaagggcacagggcgggcccccaccaaggccttcgcttccctgcgagttgagaaaacc

SEQ ID NO: 295868 - DNA, 72 bp, Homo sapiens
  chr1:1066394-1066466
  hypo
tccggcaatggcatcccaaccccggggccttggtatggaacctgtttctgcgggttttttcctgaaagtttt

SEQ ID NO: 295869 - DNA, 99 bp, Homo sapiens; identical to SEQ ID NO: 247305
  chr1:1066721-1066820
  hypo

SEQ ID NO: 295870 - DNA, 316 bp, Homo sapiens; identical to SEQ ID NO: 206382
  chr1:1069739-1070055
  hypo

SEQ ID NO: 295871 - DNA, 57 bp, Homo sapiens; identical to SEQ ID NO: 206383
  chr1:1079129-1079186
  hypo

SEQ ID NO: 295872 - DNA, 171 bp, Homo sapiens; identical to SEQ ID NO: 247310
  chr1:1084062-1084233
  hypo

SEQ ID NO: 295873 - DNA, 113 bp, Homo sapiens; identical to SEQ ID NO: 247311
  chr1:1091616-1091729
  hypo

SEQ ID NO: 295874 - DNA, 153 bp, Homo sapiens; identical to SEQ ID NO: 247312
  chr1:1094263-1094416
  hypo

SEQ ID NO: 295875 - DNA, 213 bp, Homo sapiens
  chr1:1094749-1094962
  hypo
tgctgccaagctcccgcttctccgagcagctccacacaaggagcagaggcagctccagttccacagccagacacagtcattttccctctactcaggaattaggcaggatggtgtggggcctgagtgtcaccatgaagccgggaagcaggtgttcagccagacgcaaatattcctcctcaaagccaggggagcggccacagtggattttattat

SEQ ID NO: 295876 - DNA, 248 bp, Homo sapiens
  chr1:1095004-1095252
  hypo
ccacagcagcgagggtggagggccctgtgctgtgcagggcagagctcggctgcacctgggccaggacacagctgcccaggtgggaggaaccgtggacggggctggggccttcctcgtcccagggctggtgagctgctcgctcactgtttctcagttccaggtagacacagtttataattctgcagaaaactctggggccttttgcctttgtgttttcttttttgagacagggtctgactctgtggccc

SEQ ID NO: 295877 - DNA, 558 bp, Homo sapiens
  chr1:1095497-1096055
  hypo
ttttaccactgaggtcagagggcagacgttgctccaagcgtttcgtctgcgggtggagctttggaactgatggagaaggcagagtcctgaccaggggccgccatcagagcgcagggacggtcgggggggatgcgcagggaggagggaagggaaggaaggaggtgccaagccctccgctcagtggaggtcagtggaggtttgcttcctgctcacactgggcctgattgggtcggagggcacgcgggggccgctgtctgtcctccgtggggccttggcttgtgtccaagggagggagacagtagagggacccacggctctgtgaggcgttccctggcatgacctcacctgtgtgctctctctccctgtctcagtcagagctgaacccaggctcctgtggaccaagagggggtccaggaagaactgctcctgggacccggacagagcggaggccgtgtgcacgagcagcgtggaccagaggggcctcgggggccacctgctccgtccgaccaggcaccagtccttccagactcgcctgaggatgcccgtgggccccagcga

SEQ ID NO: 295878 - DNA, 503 bp, Homo sapiens; identical to SEQ ID NO: 247315
  chr1:1096415-1096918
  hypo

SEQ ID NO: 295879 - DNA, 240 bp, Homo sapiens; identical to SEQ ID NO: 247317
  chr1:1111233-1111473
  hypo

SEQ ID NO: 295880 - DNA, 85 bp, Homo sapiens; identical to SEQ ID NO: 247318
  chr1:1114509-1114594
  hypo

SEQ ID NO: 295881 - DNA, 38 bp, Homo sapiens; identical to SEQ ID NO: 247320
  chr1:1140775-1140813
  hypo

SEQ ID NO: 295882 - DNA, 32 bp, Homo sapiens; identical to SEQ ID NO: 206386
  chr1:1146886-1146918
  hypo

SEQ ID NO: 295883 - DNA, 261 bp, Homo sapiens; identical to SEQ ID NO: 206387
  chr1:1151687-1151948
  hypo

SEQ ID NO: 295884 - DNA, 376 bp, Homo sapiens; identical to SEQ ID NO: 247324
  chr1:1152900-1153276
  hypo

SEQ ID NO: 295885 - DNA, 68 bp, Homo sapiens; identical to SEQ ID NO: 247325
  chr1:1153575-1153643
  hypo

SEQ ID NO: 295886 - DNA, 254 bp, Homo sapiens; identical to SEQ ID NO: 247326
  chr1:1154786-1155040
  hypo

SEQ ID NO: 295887 - DNA, 578 bp, Homo sapiens; identical to SEQ ID NO: 247327
  chr1:1160633-1161211
  hypo

SEQ ID NO: 295888 - DNA, 81 bp, Homo sapiens; identical to SEQ ID NO: 206389
  chr1:1168269-1168350
  hypo

SEQ ID NO: 295889 - DNA, 464 bp, Homo sapiens
  chr1:1168984-1169448
  hypo
gtggtttcacatcaatccgctttcatgggattttggtctctgtccagtgacttcgtggtaaatgtaactcagtgtttgcttgcgacttatttataaatattgtaagtttgtgtcgatgagtgtaagttggcagtgcgcacgtctcggtttttttacatgatttaaggaaagacttttatgtcagaacttggtgcctgtaccgtcaaccccgctgctgcccgtgtttaaacgcaggagaactttaaaactggccatctatcttttcagtgtacaagtcactgaacccattgtttctttctgaagagactttcctttcaaggcttcccatgggtccgcgccacacagggccggtgctgctttatttcagactctgccccaggttccaggaatccgaaccccggagtgctgacgcggttccccaacttccgccttaagaaaacaggaccagccggcaccaggcccgt

SEQ ID NO: 295890 - DNA, 192 bp, Homo sapiens; identical to SEQ ID NO: 277810
  chr1:1181914-1182106
  hypo

SEQ ID NO: 295891 - DNA, 55 bp, Homo sapiens; identical to SEQ ID NO: 277811
  chr1:1182227-1182282
  hypo

SEQ ID NO: 295892 - DNA, 128 bp, Homo sapiens; identical to SEQ ID NO: 206391
  chr1:1190081-1190209
  hypo

SEQ ID NO: 295893 - DNA, 552 bp, Homo sapiens
  chr1:1190395-1190947
  hypo
gctgaggctccagtctcctccaaagcccagtcacacattttggtttttgcttcccctttcaggtttttaaaagctaaacctaggagcctggtgggtctgcctgtgctgggcagtgtgtccagcctgccgaggtcacgctctggtgcgcggtgccctcagtggcgccttgggtctcggcgcctgggcctcactcctgcgcgatgctcctcagcacgtacttgaccgtgtaagcaaaggctgcaaacccaactatcacaaacaagttcgccagggcgccacccaggagtccgtggtgccggttggcctgctggagccctgcgaggtttgggacggcccccggcgcatgcccgttgagcagctgaatcccgttctggacgaggtgcgtctccccgtctggaaccacgtctggcaaggggagagtctggggtctgctactgagttcgtcttgtgctttctgtttttgtttaatctcctaagagaaaaacagcgagaaaagcagctggtctccaaccagcgcctttcaggaccagcactcccgttctcaggagtcca

SEQ ID NO: 295894 - DNA, 402 bp, Homo sapiens; identical to SEQ ID NO: 247330
  chr1:1194376-1194778
  hypo

SEQ ID NO: 295895 - DNA, 209 bp, Homo sapiens; identical to SEQ ID NO: 247331
  chr1:1200459-1200668
  hypo

SEQ ID NO: 295896 - DNA, 58 bp, Homo sapiens; identical to SEQ ID NO: 247332
  chr1:1206788-1206846
  hypo

SEQ ID NO: 295897 - DNA, 67 bp, Homo sapiens; identical to SEQ ID NO: 206393
  chr1:1221510-1221577
  hypo

SEQ ID NO: 295898 - DNA, 31 bp, Homo sapiens; identical to SEQ ID NO: 206394
  chr1:1221607-1221638
  hypo

SEQ ID NO: 295899 - DNA, 751 bp, Homo sapiens; identical to SEQ ID NO: 247335
  chr1:1228254-1229005
  hypo

SEQ ID NO: 295900 - DNA, 408 bp, Homo sapiens
  chr1:1234770-1235178
  hypo
aagccagtgagtgacggctgccaactcctggtgactggtggacccgtccccaactcctggtgactggtggacccgtccccaactcctggggggctctcccctatcccaaaatagccactcctgcctgcagccaacctctgcccgggatggtggccggggctgctgtcccacaggcaagcaaaggccccgcaaggagccagtgactgaggccacagaggtgaccaccgcctcaaaaggagatcccagcagcggccccacccacacgtgcccctccactgcacacatcaaagggagcagccttggtcccctagagagggtgtgggcagggcaggtgggagacaggcaggaggaaggggcggggagggtgtgccgggcatggggtgaggacgcaggggcctcccaggcgcc

SEQ ID NO: 295901 - DNA, 93 bp, Homo sapiens
  chr1:1236078-1236171
  hypo
gccaagtgccaggtggggtgagagatcagggagggcacctgctggatcctggagtctcccacatcgttgtttgtgtgttttttgttttttgag

SEQ ID NO: 295902 - DNA, 226 bp, Homo sapiens; identical to SEQ ID NO: 206396
  chr1:1238482-1238708
  hypo

SEQ ID NO: 295903 - DNA, 466 bp, Homo sapiens
  chr1:1239013-1239479
  hypo
ggggctcatggacacggctcccctctccacggcctgttgccccctctttctcagcccatgtggggctcatggacacggctcccccctccacggcctgttgccccctcccctttctcagccccagccccagccacaccaaggctcagcccacacagcagctgtccccgtgtcaccagcccagcagaggggacgggcagccaccgtgggtcggggactcaccacagcccagcccctcccagatgggacgagactcagggccagccacatgtgtgcatgtgacatgtgcaccctggaacacacatgctaagacacagggaccaggacctggagcaccacacgcatgctccacatatggggggtgtaagtggcttagtaaggcctggagggcgagtctggccatgtggccatcccaagcttggccgggcacagggcgctccaggcccgcccttcaccttgtccagtttgg

SEQ ID NO: 295904 - DNA, 98 bp, Homo sapiens
  chr1:1239667-1239765
  hypo
ggggcaggactgggaccaggttcagtgcacttccccccgcccccccaaccccaggcaggcagaggcagccgctgctgtgccctcggggaagaaggctg

SEQ ID NO: 295905 - DNA, 292 bp, Homo sapiens; identical to SEQ ID NO: 247340
  chr1:1246137-1246429
  hypo

SEQ ID NO: 295906 - DNA, 642 bp, Homo sapiens; identical to SEQ ID NO: 247341
  chr1:1247720-1248362
  hypo

SEQ ID NO: 295907 - DNA, 135 bp, Homo sapiens; identical to SEQ ID NO: 206399
  chr1:1253110-1253245
  hypo

SEQ ID NO: 295908 - DNA, 33 bp, Homo sapiens; identical to SEQ ID NO: 247343
  chr1:1258113-1258146
  hypo

SEQ ID NO: 295909 - DNA, 212 bp, Homo sapiens
  chr1:1264887-1265099
  hypo
agtgcgagtgtgctatttgcgtgtgccgcacgtgtgccgtttgcatgtgctgtttgcatgtaccatgtgcatgtgtgccatctgtgcaatgtgcaggtgccagttgcatgtgccatgcgtgttggccgtgagcgtgtgctgttttcgtgtatgtgccatgcacgtatgtgctgcgtgttggccgtgcacgtgtgccacgtgcatgtgtgcca

SEQ ID NO: 295910 - DNA, 148 bp, Homo sapiens; identical to SEQ ID NO: 247345
  chr1:1265340-1265488
  hypo

SEQ ID NO: 295911 - DNA, 31 bp, Homo sapiens; identical to SEQ ID NO: 247346
  chr1:1265518-1265549
  hypo

SEQ ID NO: 295912 - DNA, 150 bp, Homo sapiens; identical to SEQ ID NO: 206400
  chr1:1266864-1267014
  hypo

SEQ ID NO: 295913 - DNA, 131 bp, Homo sapiens; identical to SEQ ID NO: 247348
  chr1:1271746-1271877
  hypo

SEQ ID NO: 295914 - DNA, 108 bp, Homo sapiens; identical to SEQ ID NO: 206401
  chr1:1272384-1272492
  hypo

SEQ ID NO: 295915 - DNA, 110 bp, Homo sapiens; identical to SEQ ID NO: 206402
  chr1:1273361-1273471
  hypo

SEQ ID NO: 295916 - DNA, 112 bp, Homo sapiens; identical to SEQ ID NO: 247351
  chr1:1277898-1278010
  hypo

SEQ ID NO: 295917 - DNA, 115 bp, Homo sapiens; identical to SEQ ID NO: 206403
  chr1:1280781-1280896
  hypo

SEQ ID NO: 295918 - DNA, 285 bp, Homo sapiens; identical to SEQ ID NO: 206404
  chr1:1280926-1281211
  hypo

SEQ ID NO: 295919 - DNA, 37 bp, Homo sapiens; identical to SEQ ID NO: 247353
  chr1:1329022-1329059
  hypo

SEQ ID NO: 295920 - DNA, 410 bp, Homo sapiens; identical to SEQ ID NO: 247354
  chr1:1354516-1354926
  hypo

SEQ ID NO: 295921 - DNA, 412 bp, Homo sapiens; identical to SEQ ID NO: 247355
  chr1:1377720-1378132
  hypo

SEQ ID NO: 295922 - DNA, 33 bp, Homo sapiens; identical to SEQ ID NO: 247356
  chr1:1388341-1388374
  hypo

SEQ ID NO: 295923 - DNA, 47 bp, Homo sapiens; identical to SEQ ID NO: 206406
  chr1:1389833-1389880
  hypo

SEQ ID NO: 295924 - DNA, 56 bp, Homo sapiens; identical to SEQ ID NO: 247358
  chr1:1390129-1390185
  hypo

SEQ ID NO: 295925 - DNA, 158 bp, Homo sapiens; identical to SEQ ID NO: 206407
  chr1:1400495-1400653
  hypo

SEQ ID NO: 295926 - DNA, 87 bp, Homo sapiens; identical to SEQ ID NO: 206408
  chr1:1421578-1421665
  hypo

SEQ ID NO: 295927 - DNA, 307 bp, Homo sapiens; identical to SEQ ID NO: 247361
  chr1:1476831-1477138
  hypo

SEQ ID NO: 295928 - DNA, 227 bp, Homo sapiens; identical to SEQ ID NO: 247362
  chr1:1487054-1487281
  hypo

SEQ ID NO: 295929 - DNA, 209 bp, Homo sapiens; identical to SEQ ID NO: 206410
  chr1:1491937-1492146
  hypo

SEQ ID NO: 295930 - DNA, 151 bp, Homo sapiens; identical to SEQ ID NO: 206411
  chr1:1492359-1492510
  hypo

SEQ ID NO: 295931 - DNA, 482 bp, Homo sapiens; identical to SEQ ID NO: 247365
  chr1:1494401-1494883
  hypo

SEQ ID NO: 295932 - DNA, 123 bp, Homo sapiens; identical to SEQ ID NO: 247366
  chr1:1496748-1496871
  hypo

SEQ ID NO: 295933 - DNA, 106 bp, Homo sapiens
  chr1:1502409-1502515
  hypo
cctacggacatacacgtgcctctgcaacatggctgcctgcaggatgcccactgccggccttccacagccacaaaagaacagacaagtagaataatccatccatggg

SEQ ID NO: 295934 - DNA, 144 bp, Homo sapiens
  chr1:1502555-1502699
  hypo
gagtagaggaagcaaaagagcccaagggcaccctgctgcgccaccacacacgtcacccacacacacagagaagatgtgctcatctagtgtacgtgaaacacctgagtcccctgaggctgatgacagctgcgtcagtccttacat

SEQ ID NO: 295935 - DNA, 122 bp, Homo sapiens; identical to SEQ ID NO: 247368
  chr1:1519092-1519214
  hypo

SEQ ID NO: 295936 - DNA, 95 bp, Homo sapiens; identical to SEQ ID NO: 247369
  chr1:1525408-1525503
  hypo

SEQ ID NO: 295937 - DNA, 206 bp, Homo sapiens; identical to SEQ ID NO: 247370
  chr1:1552946-1553152
  hypo

SEQ ID NO: 295938 - DNA, 572 bp, Homo sapiens; identical to SEQ ID NO: 247371
  chr1:1562213-1562785
  hypo

SEQ ID NO: 295939 - DNA, 404 bp, Homo sapiens
  chr1:1563259-1563663
  hypo
ctggcctgggttccctctgcccatgtgtgctgctccctggcctgggtgccccctgcccgtgagtgctgctccctgggtgccctggctcttgacccaagcagaagtcacccccaggtgaccactgactccgccccagcaggacgcccactcggacacgcccctgcactccgccatctcggcgggcactggagccagcggcattgtcgaggtcctcacggaggtgccaaacatcgatgttaccgccaccaacagccagggtttcaccctgctgcaccatgcctccctcaagggtcacgcgctgtgagtgtggggtgggcacacagctgcagccggcctcttgctgtgctgcctgggggcagtcccaggtcccagaccaacctccctgctccacagagctgtgagaa

SEQ ID NO: 295940 - DNA, 279 bp, Homo sapiens
  chr1:1563766-1564045
  hypo
cctcatccgggaggtgcggacgcggcccagtcctgcccaaggaccggggagcgggaggcccactggggtccctgggctgagcccgtccccacccctccccagggccgctgtgacgtgaacgtgcgcaaccggaagctgcagtccccgctgcatctcgccgtgcaacaggcccacgtggggctggtgccgctactggtggacgctgggtgcagtgtcaacgccgaggacgaggagggggacacagccctgcacgtggcgctgcagcgtcatcagctgctg

SEQ ID NO: 295941 - DNA, 222 bp, Homo sapiens; identical to SEQ ID NO: 247373
  chr1:1597513-1597735
  hypo

SEQ ID NO: 295942 - DNA, 48 bp, Homo sapiens; identical to SEQ ID NO: 247374
  chr1:1610925-1610973
  hypo

SEQ ID NO: 295943 - DNA, 342 bp, Homo sapiens; identical to SEQ ID NO: 247375
  chr1:1611923-1612265
  hypo

SEQ ID NO: 295944 - DNA, 42 bp, Homo sapiens; identical to SEQ ID NO: 247376
  chr1:1612385-1612427
  hypo

SEQ ID NO: 295945 - DNA, 104 bp, Homo sapiens
  chr1:1625888-1625992
  hypo
gctgggactgtttcctcccgtggggtctttggtggggatgtccccagaggagtggggcaggaggaggggcacggagcgcccccgggagccggtcagagcgcagc

SEQ ID NO: 295946 - DNA, 193 bp, Homo sapiens; identical to SEQ ID NO: 206415
  chr1:1647565-1647758
  hypo

SEQ ID NO: 295947 - DNA, 38 bp, Homo sapiens; identical to SEQ ID NO: 247379
  chr1:1652607-1652645
  hypo

SEQ ID NO: 295948 - DNA, 134 bp, Homo sapiens; identical to SEQ ID NO: 247380
  chr1:1668525-1668659
  hypo

SEQ ID NO: 295949 - DNA, 44 bp, Homo sapiens; identical to SEQ ID NO: 247381
  chr1:1671716-1671760
  hypo

SEQ ID NO: 295950 - DNA, 128 bp, Homo sapiens; identical to SEQ ID NO: 247382
  chr1:1691803-1691931
  hypo

SEQ ID NO: 295951 - DNA, 449 bp, Homo sapiens; identical to SEQ ID NO: 247383
  chr1:1694219-1694668
  hypo

SEQ ID NO: 295952 - DNA, 180 bp, Homo sapiens; identical to SEQ ID NO: 247384
  chr1:1706069-1706249
  hypo

SEQ ID NO: 295953 - DNA, 52 bp, Homo sapiens; identical to SEQ ID NO: 247385
  chr1:1713455-1713507
  hypo

SEQ ID NO: 295954 - DNA, 468 bp, Homo sapiens; identical to SEQ ID NO: 277820
  chr1:1713537-1714005
  hypo

SEQ ID NO: 295955 - DNA, 233 bp, Homo sapiens; identical to SEQ ID NO: 102334
  chr1:1714067-1714300
  hypo

SEQ ID NO: 295956 - DNA, 90 bp, Homo sapiens; identical to SEQ ID NO: 247386
  chr1:1715002-1715092
  hypo

SEQ ID NO: 295957 - DNA, 97 bp, Homo sapiens; identical to SEQ ID NO: 247387
  chr1:1717280-1717377
  hypo

SEQ ID NO: 295958 - DNA, 72 bp, Homo sapiens; identical to SEQ ID NO: 247388
  chr1:1718795-1718867
  hypo

SEQ ID NO: 295959 - DNA, 280 bp, Homo sapiens; identical to SEQ ID NO: 247389
  chr1:1724694-1724974
  hypo

SEQ ID NO: 295960 - DNA, 98 bp, Homo sapiens; identical to SEQ ID NO: 206416
  chr1:1729268-1729366
  hypo

SEQ ID NO: 295961 - DNA, 238 bp, Homo sapiens; identical to SEQ ID NO: 277822
  chr1:1737718-1737956
  hypo

SEQ ID NO: 295962 - DNA, 44 bp, Homo sapiens; identical to SEQ ID NO: 197244
  chr1:1747214-1747258
  hypo

SEQ ID NO: 295963 - DNA, 36 bp, Homo sapiens; identical to SEQ ID NO: 206419
  chr1:1781840-1781876
  hypo

SEQ ID NO: 295964 - DNA, 159 bp, Homo sapiens; identical to SEQ ID NO: 247393
  chr1:1848271-1848430
  hypo

SEQ ID NO: 295965 - DNA, 154 bp, Homo sapiens
  chr1:1861661-1861815
  hypo
tacactgtagccacggaggtgtcgtatagggccgtggcggcaaacttgatctggtagtgggacagctccaggggtgggtggacgcctacagcccggcaagacagcttgaagcacctgcaagcagcagcatgggaggccctcagccgtgcagggc

SEQ ID NO: 295966 - DNA, 214 bp, Homo sapiens; identical to SEQ ID NO: 206420
  chr1:1874787-1875001
  hypo

SEQ ID NO: 295967 - DNA, 144 bp, Homo sapiens; identical to SEQ ID NO: 206421
  chr1:1888228-1888372
  hypo

SEQ ID NO: 295968 - DNA, 503 bp, Homo sapiens; identical to SEQ ID NO: 247397
  chr1:1888803-1889306
  hypo

SEQ ID NO: 295969 - DNA, 367 bp, Homo sapiens; identical to SEQ ID NO: 247398
  chr1:1901958-1902325
  hypo

SEQ ID NO: 295970 - DNA, 159 bp, Homo sapiens
  chr1:1910164-1910323
  hypo
gaactgcaagctcataaatccgcgtcctgctgagctgttaggtttgtggatttgtcactgcagcgatgggatacgggtgcagtcagggaagcctcagagcaggccgggacacagcaccagcgccctgccgtgggtcccatgtggccaagcggggtgcac

SEQ ID NO: 295971 - DNA, 48 bp, Homo sapiens
  chr1:1910367-1910415
  hypo
tgtgacgaggctgcacagaacacgtgtgtcgtgctgagctgggcgtgg

SEQ ID NO: 295972 - DNA, 33 bp, Homo sapiens
  chr1:1914128-1914161
  hypo
ccacaggaggagggcggcaggtgggctccgggc

SEQ ID NO: 295973 - DNA, 368 bp, Homo sapiens
  chr1:1914191-1914559
  hypo
caactacctgcccgaaatgagggtggtgggaggcagggttcacaccatcagagaagggggtgaaatagacctgtggctttggttgcaattggaattacagatgtgaacgggtggttttcaatacaggcaggcagagctgcgtgcgtttcccacctctgtctactgacggttaagggtctgggtccaggcaagggcagggaagaagaagggaacctgagcctctcactgtgcccgaaaacgcccacagagcggcagacacgaacgcaggatgcggaaggatgccaccgccaaacgcaaggcggctggagcacccagaccaatcctgatgggccggatcatacccgcagggacacagcacccccagccta

SEQ ID NO: 295974 - DNA, 59 bp, Homo sapiens
  chr1:1923521-1923580
  hypo
gcactggcaaggctatggaagggctggcatcgtcacgcgttgctggtgggagtgtaaag

SEQ ID NO: 295975 - DNA, 106 bp, Homo sapiens
  chr1:1974742-1974848
  hypo
tgggggcccaccacccagcagcaactgttggaccccgcagcgcaggagtggcagggcccgtctgcagtgcaggagtggcagggcgtgtccgcggtgctgaccggtt

SEQ ID NO: 295976 - DNA, 176 bp, Homo sapiens
  chr1:1974925-1975101
  hypo
gaaggggacgcgcggcgtgttccccagtggtctggaccctggggtcccgccccatccctgccctgcccaggccctgccccctgctggtgtgtgtccctggaccaggcatggagcgaccccggccctggtgtctcatccacagaatagggtcatgattctcacgtcctagggatggg

SEQ ID NO: 295977 - DNA, 647 bp, Homo sapiens; identical to SEQ ID NO: 197247
  chr1:1981169-1981816
  hypo

SEQ ID NO: 295978 - DNA, 494 bp, Homo sapiens; identical to SEQ ID NO: 277829
  chr1:1981817-1982311
  hypo

SEQ ID NO: 295979 - DNA, 197 bp, Homo sapiens; identical to SEQ ID NO: 277830
  chr1:1982427-1982624
  hypo

SEQ ID NO: 295980 - DNA, 139 bp, Homo sapiens
  chr1:1986095-1986234
  hypo
ttatggaattatttaatccccgccacttcaccgctggcaccgtcgaggtctgggggcaggtctgactggtttcctttaccttagtgaagccggcggcctgcaccgacccggctcgcgcccatcccggggtcacccacat

SEQ ID NO: 295981 - DNA, 212 bp, Homo sapiens; identical to SEQ ID NO: 247404
  chr1:1990854-1991066
  hypo

SEQ ID NO: 295982 - DNA, 121 bp, Homo sapiens; identical to SEQ ID NO: 247405
  chr1:1992995-1993116
  hypo

SEQ ID NO: 295983 - DNA, 166 bp, Homo sapiens; identical to SEQ ID NO: 247406
  chr1:1999032-1999198
  hypo

SEQ ID NO: 295984 - DNA, 413 bp, Homo sapiens; identical to SEQ ID NO: 206424
  chr1:2013582-2013995
  hypo

SEQ ID NO: 295985 - DNA, 525 bp, Homo sapiens
  chr1:2014025-2014550
  hypo
aaatgctcccaccacggccgatttcaggctgccgaagtggaggggttcagtgaaggtggagttgggcaagggcgtacacggtcggcttctgagagttggtccccccgcccaaccctcccctggagatgggatgtcaggagacctggttccatttgtttttttgcctgagcgtccgggggtggctttgaggacacctgtcctccttcacaggggcactccggatgtagtagcagggagagggtggaggggcggccaagggcgtgagggagagggtggaggggtggtgtgagggtgcaagggagagggtggagagggtggcagtgagggcgcgagagggtggaggggcggcatgagggagcaagccacctcgggcacaggtgaaggacaggtgtccacaccttgggtgcccccgtcctccctctcctcatgtcctaataggtctgaacaggaagttacatttagggcggctgtacagtgagttttaaataccttggtccaaattttcaaacacgtatcgttagcgtt

SEQ ID NO: 295986 - DNA, 408 bp, Homo sapiens; identical to SEQ ID NO: 206426
  chr1:2016617-2017025
  hypo

SEQ ID NO: 295987 - DNA, 101 bp, Homo sapiens; identical to SEQ ID NO: 247409
  chr1:2025268-2025369
  hypo

SEQ ID NO: 295988 - DNA, 547 bp, Homo sapiens; identical to SEQ ID NO: 206427
  chr1:2025646-2026193
  hypo

SEQ ID NO: 295989 - DNA, 201 bp, Homo sapiens; identical to SEQ ID NO: 206428
  chr1:2039530-2039731
  hypo

SEQ ID NO: 295990 - DNA, 185 bp, Homo sapiens; identical to SEQ ID NO: 206429
  chr1:2041058-2041243
  hypo

SEQ ID NO: 295991 - DNA, 51 bp, Homo sapiens; identical to SEQ ID NO: 247413
  chr1:2058200-2058251
  hypo

SEQ ID NO: 295992 - DNA, 218 bp, Homo sapiens; identical to SEQ ID NO: 206430
  chr1:2065387-2065605
  hypo

SEQ ID NO: 295993 - DNA, 434 bp, Homo sapiens; identical to SEQ ID NO: 206431
  chr1:2065918-2066352
  hypo

SEQ ID NO: 295994 - DNA, 154 bp, Homo sapiens; identical to SEQ ID NO: 247416
  chr1:2068692-2068846
  hypo

SEQ ID NO: 295995 - DNA, 167 bp, Homo sapiens; identical to SEQ ID NO: 247417
  chr1:2069360-2069527
  hypo

SEQ ID NO: 295996 - DNA, 75 bp, Homo sapiens; identical to SEQ ID NO: 206432
  chr1:2103118-2103193
  hypo

SEQ ID NO: 295997 - DNA, 245 bp, Homo sapiens; identical to SEQ ID NO: 247419
  chr1:2103460-2103705
  hypo

SEQ ID NO: 295998 - DNA, 521 bp, Homo sapiens; identical to SEQ ID NO: 247420
  chr1:2107353-2107874
  hypo

SEQ ID NO: 295999 - DNA, 264 bp, Homo sapiens; identical to SEQ ID NO: 247421
  chr1:2111815-2112079
  hypo

SEQ ID NO: 296000 - DNA, 623 bp, Homo sapiens; identical to SEQ ID NO: 247422
  chr1:2116358-2116981
  hypo

SEQ ID NO: 296001 - DNA, 33 bp, Homo sapiens; identical to SEQ ID NO: 206435
  chr1:2121714-2121747
  hypo

SEQ ID NO: 296002 - DNA, 64 bp, Homo sapiens; identical to SEQ ID NO: 247424
  chr1:2123197-2123261
  hypo

SEQ ID NO: 296003 - DNA, 164 bp, Homo sapiens; identical to SEQ ID NO: 247425
  chr1:2123462-2123626
  hypo

SEQ ID NO: 296004 - DNA, 246 bp, Homo sapiens
  chr1:2129650-2129896
  hypo
aattcatgtttacaaaagaacgtttcagctgtgggagtttgcatcccaggcagagcagaaggtgatcgagtgggtgggggcatcagagccacccatctcctactcccgcacctgcagaccggtgggctaggaggccccttaccctctgtggcaaaaaaggacacatttatggatgatgaatcaggccccagcccactgagctggtttcagaagccaggctggccgtaggtcagggagccaggcctc

SEQ ID NO: 296005 - DNA, 380 bp, Homo sapiens; identical to SEQ ID NO: 206436
  chr1:2132534-2132914
  hypo

SEQ ID NO: 296006 - DNA, 114 bp, Homo sapiens; identical to SEQ ID NO: 277832
  chr1:2135930-2136044
  hypo

SEQ ID NO: 296007 - DNA, 251 bp, Homo sapiens; identical to SEQ ID NO: 277833
  chr1:2136088-2136339
  hypo

SEQ ID NO: 296008 - DNA, 37 bp, Homo sapiens; identical to SEQ ID NO: 206438
  chr1:2141559-2141596
  hypo

SEQ ID NO: 296009 - DNA, 123 bp, Homo sapiens; identical to SEQ ID NO: 206439
  chr1:2141684-2141807
  hypo

SEQ ID NO: 296010 - DNA, 239 bp, Homo sapiens; identical to SEQ ID NO: 247430
  chr1:2142328-2142567
  hypo

SEQ ID NO: 296011 - DNA, 100 bp, Homo sapiens; identical to SEQ ID NO: 206441
  chr1:2154150-2154250
  hypo

SEQ ID NO: 296012 - DNA, 337 bp, Homo sapiens; identical to SEQ ID NO: 247432
  chr1:2167223-2167560
  hypo

SEQ ID NO: 296013 - DNA, 62 bp, Homo sapiens; identical to SEQ ID NO: 206443
  chr1:2170983-2171045
  hypo

SEQ ID NO: 296014 - DNA, 91 bp, Homo sapiens; identical to SEQ ID NO: 58672
  chr1:2188947-2189038
  hypo

SEQ ID NO: 296015 - DNA, 496 bp, Homo sapiens; identical to SEQ ID NO: 206444
  chr1:2190967-2191463
  hypo

SEQ ID NO: 296016 - DNA, 131 bp, Homo sapiens; identical to SEQ ID NO: 247436
  chr1:2205382-2205513
  hypo

SEQ ID NO: 296017 - DNA, 125 bp, Homo sapiens; identical to SEQ ID NO: 206445
  chr1:2218535-2218660
  hypo

SEQ ID NO: 296018 - DNA, 472 bp, Homo sapiens; identical to SEQ ID NO: 247438
  chr1:2234639-2235111
  hypo

SEQ ID NO: 296019 - DNA, 564 bp, Homo sapiens; identical to SEQ ID NO: 247439
  chr1:2237785-2238349
  hypo

SEQ ID NO: 296020 - DNA, 162 bp, Homo sapiens; identical to SEQ ID NO: 206447
  chr1:2238918-2239080
  hypo

SEQ ID NO: 296021 - DNA, 595 bp, Homo sapiens; identical to SEQ ID NO: 247441
  chr1:2239611-2240206
  hypo

SEQ ID NO: 296022 - DNA, 204 bp, Homo sapiens; identical to SEQ ID NO: 206450
  chr1:2254568-2254772
  hypo

SEQ ID NO: 296023 - DNA, 474 bp, Homo sapiens; identical to SEQ ID NO: 247443
  chr1:2257929-2258403
  hypo

SEQ ID NO: 296024 - DNA, 522 bp, Homo sapiens; identical to SEQ ID NO: 247444
  chr1:2259051-2259573
  hypo

SEQ ID NO: 296025 - DNA, 104 bp, Homo sapiens
  chr1:2263423-2263527
  hypo
tgcgcctctcccgccgctgcgcctctcccgccgctgcgcctctcccgaaattacaggctggtgtgtcacttttcatctttgtcgatttttttttcagtcatttc

SEQ ID NO: 296026 - DNA, 170 bp, Homo sapiens
  chr1:2265943-2266113
  hypo
gctgcatggagaggcggggctcccttgggggagcaggcctggttttgggctgcctgtcccaacacgacgagagggccctggctgtgtggccgtggagccggcaggaggcaggggaagtggccgctggtcacagatgtgtgccccgaagagacgacatcatttgaacactg

SEQ ID NO: 296027 - DNA, 169 bp, Homo sapiens; identical to SEQ ID NO: 206454
  chr1:2266194-2266363
  hypo

SEQ ID NO: 296028 - DNA, 225 bp, Homo sapiens
  chr1:2267752-2267977
  hypo
cgggggggctctctggagcgaggcccgtgtaggctcactgtcttcccagaccaggcccttggctcccctgggccttccccgtcctcctggcccagctgatgaggaggccacagctgaccctccgaacacctgcaggtggggtgggctcatcctacctgctgcctccaggaggctcctgtgccgtgggtggtgtccccctggggtgcaggccgcctctggatctgc

SEQ ID NO: 296029 - DNA, 329 bp, Homo sapiens
  chr1:2268384-2268713
  hypo
gcagcgggcacagacgccagtcgcgatgccatcttggtgggggcaggtcagggggcagggactgtccatcctgggtgctccctccggccgccgacaggggaggtgggggtcctccgtgtccacggcctctgacgcccccgcccccttctgagtccaccccagcgccagggagcccagcgctttgcagtgggaagggtctcccatcagcagcccccgtcagccgaggcactcgcttccagggtagggccgggaccggggccctggccggagaggctggcgctcaacagtacagctgtgtgccctcctcggagcgcagcatgaggaggaag

SEQ ID NO: 296030 - DNA, 84 bp, Homo sapiens
  chr1:2268743-2268827
  hypo
gacctggcgtcaggacccgttctccacaggcgtggagggagacaccgagggtggctgcgagtccctccacgtggcggcagaccc

SEQ ID NO: 296031 - DNA, 145 bp, Homo sapiens; identical to SEQ ID NO: 206456
  chr1:2269856-2270001
  hypo

SEQ ID NO: 296032 - DNA, 426 bp, Homo sapiens; identical to SEQ ID NO: 206457
  chr1:2270534-2270960
  hypo

SEQ ID NO: 296033 - DNA, 318 bp, Homo sapiens
  chr1:2273549-2273867
  hypo
caagataaaggtcaccgtacgacctcgggggcctcgggaaccgagaggctgagccagcccgggacgggatcgggcagcttgaccgctctggagggaaattccaattcattatctttttacggcggactcaattagactccctagtcacctgtgtagggcaccaggcagcaggcagggatgctgcccgaatcaacaaggctgctcgggccaggccagccccaagaatagccgcggcaggcgcaggacctggccagggggagggcaggccgaagcagaaacgttgacttcgtttaagtggattaaaaacataaaacgtta

SEQ ID NO: 296034 - DNA, 103 bp, Homo sapiens
  chr1:2273909-2274012
  hypo
agacacagggcattagtctttaagagtccatcagtcagccgagaagcgcggctcattagagacgcagggtggggcctggagaagtcagcgggaacacgcgggg

SEQ ID NO: 296035 - DNA, 254 bp, Homo sapiens; identical to SEQ ID NO: 206459
  chr1:2275835-2276089
  hypo

SEQ ID NO: 296036 - DNA, 835 bp, Homo sapiens
  chr1:2276200-2277035
  hypo
gcctgcagagcctgggggcagggctgaagctggccatggaggaccttgggggccacctccaccttccagcagcaaatgccaagtccccgaatgcagaattctgccagagggagcatgaccgtctctctgttggcacaaagcgagagcatcaaagacagcgtcagcccccgcgagggtccacgcatgctcacactctgcgctcatggatggccacacacaccctgaaaacggcgtcagcctccgggagggtccacgcgtgctcacagcactcatagatgaccatatgtgccccgaagacagtgtcagcctccaggagggtccacgcgtgctcacgctctacgctcatggatggccacatgtgccccgaagacaacgtcagcccccgcgagggtccacgtgtgctcacctgcgctcatggatggccacatgtgcccgcaccctcgcacaggcatgggcggtccccaggctgccacactcagggtctgtctgtgccccggcacctccaagccattccttccaccaggccagggccaggcctggacacctgccacctaccacccgctggggcagcagccacgcactcccccactgctccctgttggcggccaggcatgggccggccttgttgggggacacaggacaattcggggcacttgtcttgcctccgtcctccttggagagcctcgggctcaccctacgtggctctgaacaacaagggccaggctctgcaccgggggaccccctgccctgccagccggaccctcaggccgctcagagggccagtcccagcacctgcccctcgccagtggacacaggctgccggcagcattgctac

SEQ ID NO: 296037 - DNA, 693 bp, Homo sapiens; identical to SEQ ID NO: 247453
  chr1:2279094-2279787
  hypo

SEQ ID NO: 296038 - DNA, 37 bp, Homo sapiens; identical to SEQ ID NO: 206461
  chr1:2283082-2283119
  hypo

SEQ ID NO: 296039 - DNA, 324 bp, Homo sapiens; identical to SEQ ID NO: 247455
  chr1:2288153-2288477
  hypo

SEQ ID NO: 296040 - DNA, 35 bp, Homo sapiens; identical to SEQ ID NO: 247456
  chr1:2303587-2303622
  hypo

SEQ ID NO: 296041 - DNA, 504 bp, Homo sapiens
  chr1:2303823-2304327
  hypo
cacatgcaacatctcgtccgcatcttcactgcttaagaacctgctgcctgtttctcttttggaaacgttaggtcatctccccctggagatgcttactcttggcaatttccccgtggtcctgcagcagctgaacgttcaccgagaagggagacccttgggccacttccatcacctccggacccaagatcacgatcctcgtagcttgttctgggagaggacagagtgtggctttagcggtgactggcatggtcccccacccaccccatggctgagtcagcagtgggcaccccaggaaccgaccagagcccagtgtggcagctggaacacaagcacatgcgggggccgaccctccgcaaaccaccttgcagagcagcgacctgggcagtcgtccacactcagaccgtgaggctcggctctgctggcctggagcactgtggaatcgaaccaagtggaccaccggggccacggagcatgcaagagacacaagtgggcggtgtggggctg

SEQ ID NO: 296042 - DNA, 62 bp, Homo sapiens; identical to SEQ ID NO: 206464
  chr1:2304481-2304543
  hypo

SEQ ID NO: 296043 - DNA, 31 bp, Homo sapiens
  chr1:2307894-2307925
  hypo
agggaggtggagctgcggggcagggctgaca

SEQ ID NO: 296044 - DNA, 150 bp, Homo sapiens
  chr1:2307955-2308105
  hypo
cccagtgaggctgtggctgggcaggggaagccagacacactcgagtcatgagaaatgcagaggtgcagagcccgcctttggggtgagtggctcctcccatggttggtctggggctgcggctcacgtatgtggcacgagcctgcctggcat

SEQ ID NO: 296045 - DNA, 195 bp, Homo sapiens
  chr1:2309953-2310148
  hypo
gcaaagccgcccagaaggagccacctgctccgtgcagtgagcaggtgctcggcacccagcggcaactccgggaaagctggcgtgtgagacagccaacactcacggcgcagctgatacagccagggatgcccggagggccgcgctgctgccaacatgggtaggagacactctgatgtgcacacacacgtgtggcct

SEQ ID NO: 296046 - DNA, 162 bp, Homo sapiens
  chr1:2310244-2310406
  hypo
aaactaggagtgtgggggacggagatggctgaggcgtcacaggctggtgggggtgctcgtggcccaggacctctgtggcttccgggaccggcctgagccgcgtggctcctgtccctgtggaagaggagccttctctgctttgggatccgctgttcttatttt

SEQ ID NO: 296047 - DNA, 76 bp, Homo sapiens; identical to SEQ ID NO: 247460
  chr1:2315089-2315165
  hypo

SEQ ID NO: 296048 - DNA, 36 bp, Homo sapiens
  chr1:2316466-2316502
  hypo
ggtcccggacccagtcgccgtcgtacttgtcaccgt

SEQ ID NO: 296049 - DNA, 619 bp, Homo sapiens; identical to SEQ ID NO: 247462
  chr1:2328571-2329190
  hypo

SEQ ID NO: 296050 - DNA, 201 bp, Homo sapiens; identical to SEQ ID NO: 206465
  chr1:2329575-2329776
  hypo

SEQ ID NO: 296051 - DNA, 122 bp, Homo sapiens; identical to SEQ ID NO: 247464
  chr1:2330458-2330580
  hypo

SEQ ID NO: 296052 - DNA, 45 bp, Homo sapiens; identical to SEQ ID NO: 206466
  chr1:2331318-2331363
  hypo

SEQ ID NO: 296053 - DNA, 197 bp, Homo sapiens; identical to SEQ ID NO: 206467
  chr1:2331437-2331634
  hypo

SEQ ID NO: 296054 - DNA, 57 bp, Homo sapiens; identical to SEQ ID NO: 206468
  chr1:2331902-2331959
  hypo

SEQ ID NO: 296055 - DNA, 218 bp, Homo sapiens; identical to SEQ ID NO: 206469
  chr1:2334771-2334989
  hypo

SEQ ID NO: 296056 - DNA, 335 bp, Homo sapiens; identical to SEQ ID NO: 206470
  chr1:2336000-2336335
  hypo

SEQ ID NO: 296057 - DNA, 32 bp, Homo sapiens; identical to SEQ ID NO: 206471
  chr1:2336365-2336397
  hypo

SEQ ID NO: 296058 - DNA, 308 bp, Homo sapiens
  chr1:2336427-2336735
  hypo
ccccccaggagagggctcgggcgcccctggcagcccccatacccccaggacctggctcgtgagtgcgtctgggtcaggaagagacctctctgtgcgtctcaggctgagatgcagatttctgttttctaaaactggaagcgaccttgacgtgtattgaaggtgtgtgtgccaaatgcttccgacggaggtgctggccttggttggtttctctctgccccgtgtggtcatcaagtcctgggggatgtgctctgcccagccgccctcggggagagcagcgccgcctcccatggggccgtggggctgctgtt

SEQ ID NO: 296059 - DNA, 209 bp, Homo sapiens
  chr1:2337854-2338063
  hypo
tgcagccaggtgcatcttgccggcacagccgctgaccaccccaggacggcagcaggctcccacctcaccttgctgctgcaccacgcggtgatgcactcccagcagaacaggtggccgcagggcgtggctgttgggtgcctgcgctcctccaggcacagggtgcacagggggtttctggaaacggctctctcctccaaggaggccctggg

SEQ ID NO: 296060 - DNA, 192 bp, Homo sapiens; identical to SEQ ID NO: 206473
  chr1:2341160-2341352
  hypo

SEQ ID NO: 296061 - DNA, 92 bp, Homo sapiens; identical to SEQ ID NO: 206474
  chr1:2359880-2359972
  hypo

SEQ ID NO: 296062 - DNA, 58 bp, Homo sapiens
  chr1:2360320-2360378
  hypo
gcaccaccaggcttgggtgaggagggaggcctctggtcgagagcgagctgggagtcct

SEQ ID NO: 296063 - DNA, 223 bp, Homo sapiens; identical to SEQ ID NO: 247472
  chr1:2377213-2377436
  hypo

SEQ ID NO: 296064 - DNA, 268 bp, Homo sapiens; identical to SEQ ID NO: 247473
  chr1:2384535-2384803
  hypo

SEQ ID NO: 296065 - DNA, 161 bp, Homo sapiens; identical to SEQ ID NO: 247474
  chr1:2403083-2403244
  hypo

SEQ ID NO: 296066 - DNA, 54 bp, Homo sapiens; identical to SEQ ID NO: 206475
  chr1:2411364-2411418
  hypo

SEQ ID NO: 296067 - DNA, 275 bp, Homo sapiens; identical to SEQ ID NO: 247476
  chr1:2412168-2412443
  hypo

SEQ ID NO: 296068 - DNA, 35 bp, Homo sapiens; identical to SEQ ID NO: 206477
  chr1:2412563-2412598
  hypo

SEQ ID NO: 296069 - DNA, 114 bp, Homo sapiens; identical to SEQ ID NO: 247479
  chr1:2430550-2430664
  hypo

SEQ ID NO: 296070 - DNA, 145 bp, Homo sapiens
  chr1:2437299-2437444
  hypo
gcccagaagacaccccaagaaaagacctggcctgtcctcagagggctgagctggacaggctcccagggtaggctgcaaagcctgctcctcaggacgcaggccctaaccccgggccacaggccccccaacccgggggactgctctg

SEQ ID NO: 296071 - DNA, 149 bp, Homo sapiens; identical to SEQ ID NO: 206478
  chr1:2439887-2440036
  hypo

SEQ ID NO: 296072 - DNA, 200 bp, Homo sapiens; identical to SEQ ID NO: 247482
  chr1:2445342-2445542
  hypo

SEQ ID NO: 296073 - DNA, 361 bp, Homo sapiens; identical to SEQ ID NO: 206479
  chr1:2450394-2450755
  hypo

SEQ ID NO: 296074 - DNA, 457 bp, Homo sapiens; identical to SEQ ID NO: 197255
  chr1:2461988-2462445
  hypo

SEQ ID NO: 296075 - DNA, 177 bp, Homo sapiens; identical to SEQ ID NO: 206481
  chr1:2463122-2463299
  hypo

SEQ ID NO: 296076 - DNA, 109 bp, Homo sapiens
  chr1:2468442-2468551
  hypo
cctgtatgcatgtacttatgtgtgtgcacttgagtacgtgtgtgtgcctgtgtctgtacgagtgtgtgtgtgtgcctgtgtcccagtgtgtgtgtgcgctcatgtgtct

SEQ ID NO: 296077 - DNA, 60 bp, Homo sapiens
  chr1:2468582-2468642
  hypo
tgcccatgtgtctgtgtgtaccagtgtgtgtgtgtgtgcatgtgtgcccatgtgtgtcta

SEQ ID NO: 296078 - DNA, 100 bp, Homo sapiens
  chr1:2468792-2468892
  hypo
ctggggtgactgtggggaaaaaccctgacaggagtgcctctgccctgccctgcccagtaggaacggtgctcaaccaggcccctggcggccctccgaggca

SEQ ID NO: 296079 - DNA, 71 bp, Homo sapiens; identical to SEQ ID NO: 197256
  chr1:2477791-2477862
  hypo

SEQ ID NO: 296080 - DNA, 68 bp, Homo sapiens; identical to SEQ ID NO: 206483
  chr1:2483772-2483840
  hypo

SEQ ID NO: 296081 - DNA, 75 bp, Homo sapiens; identical to SEQ ID NO: 206484
  chr1:2483873-2483948
  hypo

SEQ ID NO: 296082 - DNA, 89 bp, Homo sapiens
  chr1:2507183-2507272
  hypo
gcccacaaccccagtgtggctgcagcctgatgaatccaggagtcttggcccagccccgaagcccctgggaggtccggccccaccctggg

SEQ ID NO: 296083 - DNA, 296 bp, Homo sapiens; identical to SEQ ID NO: 247488
  chr1:2520300-2520596
  hypo

SEQ ID NO: 296084 - DNA, 37 bp, Homo sapiens
  chr1:2520987-2521024
  hypo
ccgccggcagcaacgagccattaaaactgcagttcct

SEQ ID NO: 296085 - DNA, 60 bp, Homo sapiens
  chr1:2521063-2521123
  hypo
ccacagcccccgccttgctcactgttgggccctcagggcgggcagggtggctgtgagtcc

SEQ ID NO: 296086 - DNA, 89 bp, Homo sapiens; identical to SEQ ID NO: 206485
  chr1:2522316-2522405
  hypo

SEQ ID NO: 296087 - DNA, 98 bp, Homo sapiens; identical to SEQ ID NO: 206486
  chr1:2537660-2537758
  hypo

SEQ ID NO: 296088 - DNA, 399 bp, Homo sapiens; identical to SEQ ID NO: 277845
  chr1:2559942-2560341
  hypo

SEQ ID NO: 296089 - DNA, 197 bp, Homo sapiens; identical to SEQ ID NO: 206487
  chr1:2716539-2716736
  hypo

SEQ ID NO: 296090 - DNA, 60 bp, Homo sapiens; identical to SEQ ID NO: 206488
  chr1:2717239-2717299
  hypo

SEQ ID NO: 296091 - DNA, 122 bp, Homo sapiens
  chr1:2719757-2719879
  hypo
gtctcggagggtcccgagctatgatcacagcccctgcctgagagcagcacacctggatgcaggtaatcccagggccgcctccacgccacctcccaatccgcactctcgtctctgattctgcc

SEQ ID NO: 296092 - DNA, 119 bp, Homo sapiens
  chr1:2719918-2720037
  hypo
aggccggtgcctggtagtctcagggtctcgtgttcgggtttgtgctgctttagtttatgagtcaaaaggatttccaacatttccaacttgaggctagcggggggcgggggatactgctc

SEQ ID NO: 296093 - DNA, 224 bp, Homo sapiens; identical to SEQ ID NO: 247497
  chr1:2726375-2726599
  hypo

SEQ ID NO: 296094 - DNA, 97 bp, Homo sapiens
  chr1:2726958-2727055
  hypo
tccctcctgccagctagccgtccccatcgcccggactggggaacagtcctcctggggatgccgcactcctctccatcattctcggtgcccctgctag

SEQ ID NO: 296095 - DNA, 151 bp, Homo sapiens; identical to SEQ ID NO: 247499
  chr1:2746955-2747106
  hypo

SEQ ID NO: 296096 - DNA, 91 bp, Homo sapiens; identical to SEQ ID NO: 247500
  chr1:2752977-2753068
  hypo

SEQ ID NO: 296097 - DNA, 68 bp, Homo sapiens; identical to SEQ ID NO: 247501
  chr1:2798429-2798497
  hypo

SEQ ID NO: 296098 - DNA, 190 bp, Homo sapiens; identical to SEQ ID NO: 247502
  chr1:2810936-2811126
  hypo

SEQ ID NO: 296099 - DNA, 247 bp, Homo sapiens; identical to SEQ ID NO: 247504
  chr1:2823836-2824083
  hypo

SEQ ID NO: 296100 - DNA, 143 bp, Homo sapiens; identical to SEQ ID NO: 206489
  chr1:2833979-2834122
  hypo

SEQ ID NO: 296101 - DNA, 57 bp, Homo sapiens; identical to SEQ ID NO: 206490
  chr1:2846736-2846793
  hypo

SEQ ID NO: 296102 - DNA, 561 bp, Homo sapiens
  chr1:2846823-2847384
  hypo
gtgggcttcttccgtgggcaggcacagaggtcgggtgtcggcccagaggttcatggaggcgctaatgagcggctccgggcccgcaggagatgcggctcacacaggtcagatttcggatggatgatgaaggaaatgagggccaggccagcctctggttacagtttaggaaaaacacgaggcgcccttctctagttcaaaaggcagagagaggcagacccaggagctaggggggccggacgggattccagtccggtttcatctccggatgccctgggaacccgcctggcgtagaccgggtgggggcggtgcagacaggaccctggagaacagggctgcggtgcgcagcagggggtggccccggtcacacagtgtcccccatggaggggcctcgatggccgggctgcgcatggcacgtgtcgtgtgtggatccacagcagggccgctgcccccacccagcgccagccgggaggttgggaagtgttagcgccaggagcagctttcagctgaaaaatccccagtttattaactttgctccagaagccagggcgtctgttatttatg

SEQ ID NO: 296103 - DNA, 463 bp, Homo sapiens; identical to SEQ ID NO: 206493
  chr1:2850532-2850995
  hypo

SEQ ID NO: 296104 - DNA, 53 bp, Homo sapiens; identical to SEQ ID NO: 206494
  chr1:2851025-2851078
  hypo

SEQ ID NO: 296105 - DNA, 129 bp, Homo sapiens
  chr1:2859551-2859680
  hypo
cacaattccaacctcgggaaaaaatgtaatcaatgcgggagggcttaaggataaaatgcacatccgtgtgcacgcacacgcgcgtgaggccatgcacactacccacacgaagctacgagaaggacccag

SEQ ID NO: 296106 - DNA, 276 bp, Homo sapiens; identical to SEQ ID NO: 247511
  chr1:2878440-2878716
  hypo

SEQ ID NO: 296107 - DNA, 186 bp, Homo sapiens; identical to SEQ ID NO: 247512
  chr1:2908573-2908759
  hypo

SEQ ID NO: 296108 - DNA, 240 bp, Homo sapiens; identical to SEQ ID NO: 247514
  chr1:2936252-2936492
  hypo

SEQ ID NO: 296109 - DNA, 530 bp, Homo sapiens; identical to SEQ ID NO: 206495
  chr1:2938631-2939161
  hypo

SEQ ID NO: 296110 - DNA, 183 bp, Homo sapiens; identical to SEQ ID NO: 206496
  chr1:2939191-2939374
  hypo

SEQ ID NO: 296111 - DNA, 316 bp, Homo sapiens; identical to SEQ ID NO: 197259
  chr1:2984307-2984623
  hypo

SEQ ID NO: 296112 - DNA, 570 bp, Homo sapiens; identical to SEQ ID NO: 277849
  chr1:2985452-2986022
  hypo

SEQ ID NO: 296113 - DNA, 576 bp, Homo sapiens; identical to SEQ ID NO: 247516
  chr1:2997502-2998078
  hypo

SEQ ID NO: 296114 - DNA, 101 bp, Homo sapiens; identical to SEQ ID NO: 206498
  chr1:2999262-2999363
  hypo

SEQ ID NO: 296115 - DNA, 46 bp, Homo sapiens
  chr1:2999777-2999823
  hypo
caatggctaggagacgcaggggtcgggtctcctggctgcgccccac

SEQ ID NO: 296116 - DNA, 92 bp, Homo sapiens
  chr1:2999864-2999956
  hypo
ctccccatcatagccctgtcctggactgggcggcgcgctcatttcaaggcagtgcggccatctgggctgggcctggcgctggcggggcctgc

SEQ ID NO: 296117 - DNA, 610 bp, Homo sapiens; identical to SEQ ID NO: 247519
  chr1:3000539-3001149
  hypo

SEQ ID NO: 296118 - DNA, 153 bp, Homo sapiens; identical to SEQ ID NO: 247520
  chr1:3006837-3006990
  hypo

SEQ ID NO: 296119 - DNA, 514 bp, Homo sapiens; identical to SEQ ID NO: 247521
  chr1:3007587-3008101
  hypo

SEQ ID NO: 296120 - DNA, 121 bp, Homo sapiens
  chr1:3008424-3008545
  hypo
gggcctccctctaacgggggtgatggacagttcgcaggtggtcagatgcgagagaattcacatcgcagaacctgccaggaaaatcaatgggaccgtgaggactgctaggtttgggaggccc

SEQ ID NO: 296121 - DNA, 74 bp, Homo sapiens
  chr1:3008575-3008649
  hypo
gggacgcaggtccccatgtagaggataagatggagccagccgtgggtaagggtggaccacgcaggatcgcagga

SEQ ID NO: 296122 - DNA, 43 bp, Homo sapiens; identical to SEQ ID NO: 247523
  chr1:3013633-3013676
  hypo

SEQ ID NO: 296123 - DNA, 100 bp, Homo sapiens; identical to SEQ ID NO: 247524
  chr1:3015909-3016009
  hypo

SEQ ID NO: 296124 - DNA, 259 bp, Homo sapiens
  chr1:3032637-3032896
  hypo
cctcacacggcaggcgtcaggttgagtccttggggttcagggaggtcaaggtcaggcctagcgtgggtggtcatctcaggggcagcactggtggccgttgaattgttccttaccggggagaacaggtggcagggagggatggttccagaccccatggcacccgtgtctctgcagtgtgtccctctcatggggggacagtaggcagagctccccggctgccctgcgccggcgtgctcactccgcggtgcgtgcttaatac

SEQ ID NO: 296125 - DNA, 187 bp, Homo sapiens
  chr1:3032979-3033166
  hypo
ccctgctcccttcctgtgagaattttgccctcaagatggcagcccagcctggatgcccagaccccattcccaagccgcaggtcctggtctgggctctgtcactcggggacgcgcctgcttgtctttccccggctggggcagtgcctggtctgctcagcccttcctctctccccgcccgggacagagg

SEQ ID NO: 296126 - DNA, 260 bp, Homo sapiens; identical to SEQ ID NO: 247526
  chr1:3034298-3034558
  hypo

SEQ ID NO: 296127 - DNA, 269 bp, Homo sapiens
  chr1:3035176-3035445
  hypo
gagtctgtgtggctttcaccacatgctcaggtgctctgtggcatatgaccatgtctccaggactggcagtcggggggtgtcagggacccccagagcggacttgatctcagcctgggggccacgtggatggagtccagggagaccccagctgctggcgtgctagggcgtgcgtgtacacgtttgtgtgcaagtgtgtgtgcacgtgcatgcgctgtgtgtgcacttgcaggtgtttggacacagggcccgaggcacctctgtgcccaagt

SEQ ID NO: 296128 - DNA, 126 bp, Homo sapiens; identical to SEQ ID NO: 247528
  chr1:3037185-3037311
  hypo

SEQ ID NO: 296129 - DNA, 102 bp, Homo sapiens; identical to SEQ ID NO: 247529
  chr1:3037697-3037799
  hypo

SEQ ID NO: 296130 - DNA, 186 bp, Homo sapiens; identical to SEQ ID NO: 247530
  chr1:3050793-3050979
  hypo

SEQ ID NO: 296131 - DNA, 317 bp, Homo sapiens
  chr1:3052580-3052897
  hypo
gagattgtttggctcgctttgtccgggagccacaggacaccaggctggggcggggctgggggcagaacgctcctccagcagcctaggagccacccctgggaagaaagggggtctcgggcagcctcgccatgggaccaccagctttgggccttcgttacaggggtgatgctgccccgctgatagggttgggggcctggggctgcagcgtagctgaagtggaacctgcccagcctgcacttcccagctggccagccccgcgcgatgctccggggtctcggcgaggcacgccaggcactgagtcctcagacccgctgtcc

SEQ ID NO: 296132 - DNA, 54 bp, Homo sapiens; identical to SEQ ID NO: 206500
  chr1:3052927-3052981
  hypo

SEQ ID NO: 296133 - DNA, 329 bp, Homo sapiens; identical to SEQ ID NO: 247532
  chr1:3059516-3059845
  hypo

SEQ ID NO: 296134 - DNA, 189 bp, Homo sapiens; identical to SEQ ID NO: 247533
  chr1:3063570-3063759
  hypo

SEQ ID NO: 296135 - DNA, 448 bp, Homo sapiens
  chr1:3079872-3080320
  hypo
gagaggggatgtccgcagaagcccctggcatgacccccttctagtgggtcagtcagcacaaccatcaagttccaagctcagattcaggtggaggacacagatctccaaggcgtgcacagccggaggcctgagtgagcacctctgacggtccagcccagagtaggtgttgagtaagagcggtcaagcagtgccagttggtaaaacccacgcggcgttagcttcctggggaggtcctaaccgggtaccccagcctgagtggctgaaacaacagatacttctcctcccacggtcctcagggccagaagtctgggatcagctgtgggcggggcggtcctttggaggctctgagaacccttgtcccggcctccttctggctccctggggctgccggcatctttggcgttccctagtttgtaggagcatcgcccagcctcagcctctgtgtgca

SEQ ID NO: 296136 - DNA, 186 bp, Homo sapiens; identical to SEQ ID NO: 247535
  chr1:3086477-3086663
  hypo

SEQ ID NO: 296137 - DNA, 231 bp, Homo sapiens; identical to SEQ ID NO: 247536
  chr1:3094871-3095102
  hypo

SEQ ID NO: 296138 - DNA, 50 bp, Homo sapiens; identical to SEQ ID NO: 247537
  chr1:3106931-3106981
  hypo

SEQ ID NO: 296139 - DNA, 146 bp, Homo sapiens; identical to SEQ ID NO: 206501
  chr1:3107294-3107440
  hypo

SEQ ID NO: 296140 - DNA, 145 bp, Homo sapiens; identical to SEQ ID NO: 206502
  chr1:3109586-3109731
  hypo

SEQ ID NO: 296141 - DNA, 167 bp, Homo sapiens; identical to SEQ ID NO: 247540
  chr1:3110663-3110830
  hypo

SEQ ID NO: 296142 - DNA, 139 bp, Homo sapiens; identical to SEQ ID NO: 206503
  chr1:3111098-3111237
  hypo

SEQ ID NO: 296143 - DNA, 340 bp, Homo sapiens; identical to SEQ ID NO: 206504
  chr1:3111463-3111803
  hypo

SEQ ID NO: 296144 - DNA, 692 bp, Homo sapiens; identical to SEQ ID NO: 247542
  chr1:3114420-3115112
  hypo

SEQ ID NO: 296145 - DNA, 146 bp, Homo sapiens; identical to SEQ ID NO: 247543
  chr1:3122495-3122641
  hypo

SEQ ID NO: 296146 - DNA, 414 bp, Homo sapiens; identical to SEQ ID NO: 247544
  chr1:3122848-3123262
  hypo

SEQ ID NO: 296147 - DNA, 164 bp, Homo sapiens; identical to SEQ ID NO: 206506
  chr1:3124782-3124946
  hypo

SEQ ID NO: 296148 - DNA, 199 bp, Homo sapiens; identical to SEQ ID NO: 247546
  chr1:3125908-3126107
  hypo

SEQ ID NO: 296149 - DNA, 584 bp, Homo sapiens; identical to SEQ ID NO: 206507
  chr1:3127861-3128445
  hypo

SEQ ID NO: 296150 - DNA, 255 bp, Homo sapiens; identical to SEQ ID NO: 206508
  chr1:3128477-3128732
  hypo

SEQ ID NO: 296151 - DNA, 122 bp, Homo sapiens; identical to SEQ ID NO: 247548
  chr1:3130375-3130497
  hypo

SEQ ID NO: 296152 - DNA, 94 bp, Homo sapiens; identical to SEQ ID NO: 247549
  chr1:3147314-3147408
  hypo

SEQ ID NO: 296153 - DNA, 228 bp, Homo sapiens; identical to SEQ ID NO: 247550
  chr1:3172384-3172612
  hypo

SEQ ID NO: 296154 - DNA, 189 bp, Homo sapiens; identical to SEQ ID NO: 206509
  chr1:3179305-3179494
  hypo

SEQ ID NO: 296155 - DNA, 447 bp, Homo sapiens
  chr1:3182322-3182769
  hypo
attatccagctggcacctcacgctctgtcctcaccgcccagaccctaggagcccccagaccctgcctcagtgggtcgtgcccaggtccttcgctctctatgatccctttacggtcgtgcagtgctccccagggctccgcactgctccccagggttccttggtgcgtgtctcataaagcccaggagggcgaggccaggcccagcccccaactcaagggccgccctccagcctagcgacgccacctggcccctctttccattaagtctccgtcgtcttgagtccatccagggcggtgtgcggccggtcgcttagtcagcaagaaccctgtgagctgcagtcatcataaatgcatatttaataactattttcttcctggggaaaatgtgctgcttcagaagttcagaaatgggcttcgctcttcagctggtaatgagaagttaataaaag

SEQ ID NO: 296156 - DNA, 84 bp, Homo sapiens; identical to SEQ ID NO: 206510
  chr1:3182799-3182883
  hypo

SEQ ID NO: 296157 - DNA, 99 bp, Homo sapiens; identical to SEQ ID NO: 206511
  chr1:3182917-3183016
  hypo

SEQ ID NO: 296158 - DNA, 137 bp, Homo sapiens
  chr1:3183106-3183243
  hypo
gagagggccccaggggcaggagccactccctggatctcagacccgcttgtctcgcaggcgggaggcacgggcctgcaccctccgccgctcccacgctccagcagaccacggtggggcatgcattttatttttattta

SEQ ID NO: 296159 - DNA, 41 bp, Homo sapiens; identical to SEQ ID NO: 206512
  chr1:3184584-3184625
  hypo

SEQ ID NO: 296160 - DNA, 300 bp, Homo sapiens; identical to SEQ ID NO: 206513
  chr1:3184697-3184997
  hypo

SEQ ID NO: 296161 - DNA, 191 bp, Homo sapiens; identical to SEQ ID NO: 247554
  chr1:3193760-3193951
  hypo

SEQ ID NO: 296162 - DNA, 133 bp, Homo sapiens; identical to SEQ ID NO: 247555
  chr1:3194281-3194414
  hypo

SEQ ID NO: 296163 - DNA, 498 bp, Homo sapiens; identical to SEQ ID NO: 247556
  chr1:3195278-3195776
  hypo

SEQ ID NO: 296164 - DNA, 190 bp, Homo sapiens; identical to SEQ ID NO: 247557
  chr1:3204234-3204424
  hypo

SEQ ID NO: 296165 - DNA, 79 bp, Homo sapiens
  chr1:3213764-3213843
  hypo
acattaccagcatttctgtccatttcgggtgagacccgaagcagcgagaccctatccaggtcaacgtctggtgagagga

SEQ ID NO: 296166 - DNA, 564 bp, Homo sapiens; identical to SEQ ID NO: 247559
  chr1:3228681-3229245
  hypo

SEQ ID NO: 296167 - DNA, 196 bp, Homo sapiens; identical to SEQ ID NO: 247560
  chr1:3248786-3248982
  hypo

SEQ ID NO: 296168 - DNA, 236 bp, Homo sapiens; identical to SEQ ID NO: 247561
  chr1:3258153-3258389
  hypo

SEQ ID NO: 296169 - DNA, 163 bp, Homo sapiens
  chr1:3315208-3315371
  hypo
tgatttatttttctgttacattcctgctctgccatgaagattgctgatggaacttcagataggcaagtgaggcgcagatatgacaaacaagatgtgaggtcaccacggcgttggcttagttggcgtaggtgacaggtggatgctgtaccgcggcccacgcacc

SEQ ID NO: 296170 - DNA, 874 bp, Homo sapiens; identical to SEQ ID NO: 206516
  chr1:3321124-3321998
  hypo

SEQ ID NO: 296171 - DNA, 119 bp, Homo sapiens; identical to SEQ ID NO: 206517
  chr1:3322260-3322379
  hypo

SEQ ID NO: 296172 - DNA, 228 bp, Homo sapiens; identical to SEQ ID NO: 247565
  chr1:3323791-3324019
  hypo

SEQ ID NO: 296173 - DNA, 56 bp, Homo sapiens; identical to SEQ ID NO: 197260
  chr1:3325182-3325238
  hypo

SEQ ID NO: 296174 - DNA, 238 bp, Homo sapiens; identical to SEQ ID NO: 206519
  chr1:3327630-3327868
  hypo

SEQ ID NO: 296175 - DNA, 214 bp, Homo sapiens
  chr1:3328319-3328533
  hypo
catccttgtacccccggccgcctctgctacctcccacatcgctgctcaagagccccctgaaccacacccaggacgccaagctccccagtcccctggggaacccagccctgcccctggtctccgccgtcagcaacagcagccagggcacgacggcagctgcggggcccgaggagaagttcgagagccgcctggaggactcctgtgtggagaagct

SEQ ID NO: 296176 - DNA, 641 bp, Homo sapiens
  chr1:3328625-3329266
  hypo
gctcggacctggacagcgacgtggacagcgaccctgacaaggacaagggcaagggcaagtccgccgagggccagcccaagtttgggggcggcttggcgcccccgggggccccgaacagcgtggccgaggtgcctgtcttctattcccagcactcattcttcccgccacccgacgagcagctgctgactgcaacgggcgccgccggggactccatcaaggccatcgcatccattgccgagaagtactttggccccggcttcatggggatgcaggagaagaagctgggctcgctcccctaccactcggcgttccccttccagttcctgcccaacttcccccactccctttaccccttcacggaccgagccctcgcccacaacttgctggtcaaggccgagccaaagtcaccccgggacgccctcaaggtgggcggccccagtgccgagtgcccctttgatctcaccaccaagcccaaagacgtgaagcccatcctgcccatgcccaagggcccctcggcccccgcatccggcgaggagcagccgctggacctgagcatcggcagccgggcccgtgccagccaaaacggcggcgggcgggagccccgcaagaaccacgtctatggggaacgcaagctgggcgcc

SEQ ID NO: 296177 - DNA, 174 bp, Homo sapiens; identical to SEQ ID NO: 247568
  chr1:3331026-3331200
  hypo

SEQ ID NO: 296178 - DNA, 109 bp, Homo sapiens
  chr1:3342032-3342141
  hypo
ctgtgcacggggcacggggcaggggcgcgggctcccttccccccaccctctgtggcccggcctgccatgcagagccggggcctgcactgaggagcgcgtgtgccccttc

SEQ ID NO: 296179 - DNA, 498 bp, Homo sapiens
  chr1:3342321-3342819
  hypo
acgcggggtggggcagcccccagagcacccacacgggcaggccccacagagggggagggggaacagcaggggagtgggcgccgggcagggaagagggccacagactacccctcaggaagccaacaggcacccctcaaaccgtggtcattaaagagaacctcgtgctctccggtgtccctaagaaacctgcctccctaacagcaccccaggtgtaccccgttcgcggttggtttgccccacggagggaggggtccagcgagaggccgccccctgatgctcccgcccctccgcagtgagccagcaccccggggtcctcacgaaccacctggggaccagcgcgtcctctcccacctcagagtcggacaaccacgcacttttagacgagaaagaagactcttatttctcggaaatcagaaactttattgccaatagtgagatgaaccaagcatcaacgcgaacagagaaacggtaagaaaactatcgcgggctggggaaagt

SEQ ID NO: 296180 - DNA, 248 bp, Homo sapiens; identical to SEQ ID NO: 247570
  chr1:3343491-3343739
  hypo

SEQ ID NO: 296181 - DNA, 339 bp, Homo sapiens; identical to SEQ ID NO: 247571
  chr1:3344507-3344846
  hypo

SEQ ID NO: 296182 - DNA, 240 bp, Homo sapiens
  chr1:3349849-3350089
  hypo
cctcttccaggctgcggggagaatccgggtcttagtccctcttgttccttctgccccctgtggcccagggcaaggttgagccaggccagggccacgggaggctgggaacggacgaggcttggccctgctggccggggatggcctgtcctgcccacacactcacctgcctgtccaggatggcctgccctgcccatctgctgcctgtctgggatggcccgccctgcccacgcgctcacctgc

SEQ ID NO: 296183 - DNA, 249 bp, Homo sapiens
  chr1:3350158-3350407
  hypo
ctcacctgcctgtctgggatggcccgccctgcccacgcgctcacctgcctgtcctgtgtgtgtgtcatcccctccccgccaggcatatgcaatgatgctgtccctttccgaagacactcctctccacaccccctcccagggttctctggacgcttggttgaaggtcactggagccacgtcggagtctggagcatttcaccccatcaaccacctctgacgggctgggcagccgggggccggtggccagag

SEQ ID NO: 296184 - DNA, 273 bp, Homo sapiens
  chr1:3350462-3350735
  hypo
ctgcgtgtggccactcctcagcatcctccccacccaccatggttcattccgacttttccaatggaaactcagatcccaaaagtccctaaagcagtcgtagagtctcaccatctccaaggattggtcttgagaacactgttcagtgacggccatgcaggtggccgtccaaagacagccaacggagctgcctcgcagaatcagccagtgggcaggtggacgctctgctgagacagaagctggtggccactgccgggtgcccgcgtggggtcgcgg

SEQ ID NO: 296185 - DNA, 596 bp, Homo sapiens; identical to SEQ ID NO: 247573
  chr1:3351130-3351726
  hypo

SEQ ID NO: 296186 - DNA, 187 bp, Homo sapiens; identical to SEQ ID NO: 247574
  chr1:3361093-3361280
  hypo

SEQ ID NO: 296187 - DNA, 341 bp, Homo sapiens; identical to SEQ ID NO: 221196
  chr1:3370921-3371262
  hypo

SEQ ID NO: 296188 - DNA, 77 bp, Homo sapiens; identical to SEQ ID NO: 247575
  chr1:3373241-3373318
  hypo

SEQ ID NO: 296189 - DNA, 42 bp, Homo sapiens; identical to SEQ ID NO: 247576
  chr1:3373606-3373648
  hypo

SEQ ID NO: 296190 - DNA, 63 bp, Homo sapiens; identical to SEQ ID NO: 247577
  chr1:3377102-3377165
  hypo

SEQ ID NO: 296191 - DNA, 128 bp, Homo sapiens; identical to SEQ ID NO: 247578
  chr1:3377828-3377956
  hypo

SEQ ID NO: 296192 - DNA, 110 bp, Homo sapiens; identical to SEQ ID NO: 206525
  chr1:3378249-3378359
  hypo

SEQ ID NO: 296193 - DNA, 365 bp, Homo sapiens; identical to SEQ ID NO: 247580
  chr1:3379761-3380126
  hypo

SEQ ID NO: 296194 - DNA, 152 bp, Homo sapiens; identical to SEQ ID NO: 247581
  chr1:3384392-3384544
  hypo

SEQ ID NO: 296195 - DNA, 378 bp, Homo sapiens; identical to SEQ ID NO: 247582
  chr1:3385465-3385843
  hypo

SEQ ID NO: 296196 - DNA, 275 bp, Homo sapiens; identical to SEQ ID NO: 247583
  chr1:3387193-3387468
  hypo

SEQ ID NO: 296197 - DNA, 424 bp, Homo sapiens; identical to SEQ ID NO: 206528
  chr1:3389566-3389990
  hypo

SEQ ID NO: 296198 - DNA, 73 bp, Homo sapiens; identical to SEQ ID NO: 206529
  chr1:3393357-3393430
  hypo

SEQ ID NO: 296199 - DNA, 379 bp, Homo sapiens; identical to SEQ ID NO: 247586
  chr1:3406736-3407115
  hypo

SEQ ID NO: 296200 - DNA, 82 bp, Homo sapiens; identical to SEQ ID NO: 206530
  chr1:3408704-3408786
  hypo

SEQ ID NO: 296201 - DNA, 517 bp, Homo sapiens
  chr1:3410515-3411032
  hypo
acggggccagggagcgggggttcagggaggcaccaagcactcacccctctcacagaagtggccgtggaagccggcagggcagaggcatcggccactgatggggtcgcagggggctccatgttgacaccagcacaacccctggcagccagccccgtggaagccagggggacaggctgaaggacgccggttaccacgagacaagggcacacggtggcagaaatgtccagtttgcccagagtgagtaaaacccgccaatccaggggcccgagaaaagccccctcctgcccgtcctcgtccctccccactgctgctggctccccacctccccaccacttcactgctgcctggatcacccacacgggaggagtggacagtggctcaaaggggccccagcccagctgcacaggcccccaactcacggtgctcgcaggcctggccatagaagccggggccgcagcggcaggtgcccgtggcaggctcacacgtgctgttgttgtggcaggagcactccagatgg

SEQ ID NO: 296202 - DNA, 344 bp, Homo sapiens; identical to SEQ ID NO: 247589
  chr1:3413536-3413880
  hypo

SEQ ID NO: 296203 - DNA, 493 bp, Homo sapiens; identical to SEQ ID NO: 247590
  chr1:3422675-3423168
  hypo

SEQ ID NO: 296204 - DNA, 263 bp, Homo sapiens; identical to SEQ ID NO: 247591
  chr1:3425528-3425791
  hypo

SEQ ID NO: 296205 - DNA, 646 bp, Homo sapiens; identical to SEQ ID NO: 247592
  chr1:3435617-3436263
  hypo

SEQ ID NO: 296206 - DNA, 187 bp, Homo sapiens; identical to SEQ ID NO: 247593
  chr1:3436853-3437040
  hypo

SEQ ID NO: 296207 - DNA, 523 bp, Homo sapiens; identical to SEQ ID NO: 197262
  chr1:3447461-3447984
  hypo

SEQ ID NO: 296208 - DNA, 160 bp, Homo sapiens; identical to SEQ ID NO: 206533
  chr1:3448901-3449061
  hypo

SEQ ID NO: 296209 - DNA, 252 bp, Homo sapiens; identical to SEQ ID NO: 247596
  chr1:3466090-3466342
  hypo

SEQ ID NO: 296210 - DNA, 201 bp, Homo sapiens
  chr1:3466668-3466869
  hypo
tcagcagaaagtaacggctcccgacacaagacatacccagaggcgccacagacccagcagtcccacccctaagcacctgcccaagataaatagaaacagggactcaaaccacggtgtgtgcacacgctcacagcagacttgtccacagccatcagaaaggggaggccacccgggtgcccaccagcgggtgatgaagacaga

SEQ ID NO: 296211 - DNA, 197 bp, Homo sapiens
  chr1:3467544-3467741
  hypo
agctgcctgtgtgccttggggcctcggagtgtgaggcaggtgaggaagaagatgtggatcccagctctgagagccgggcccgcgtggccatgtggccaggcagctccccgctagcgatgccagcctcctggcctataccaggccagatgccccacagatgtgaggctgccagacccagcccccgtggtggtgagaca

SEQ ID NO: 296212 - DNA, 36 bp, Homo sapiens; identical to SEQ ID NO: 247599
  chr1:3468969-3469005
  hypo

SEQ ID NO: 296213 - DNA, 195 bp, Homo sapiens; identical to SEQ ID NO: 247600
  chr1:3470763-3470958
  hypo

SEQ ID NO: 296214 - DNA, 137 bp, Homo sapiens; identical to SEQ ID NO: 247601
  chr1:3484124-3484261
  hypo

SEQ ID NO: 296215 - DNA, 212 bp, Homo sapiens; identical to SEQ ID NO: 247602
  chr1:3512769-3512981
  hypo

SEQ ID NO: 296216 - DNA, 89 bp, Homo sapiens; identical to SEQ ID NO: 247603
  chr1:3524385-3524474
  hypo

SEQ ID NO: 296217 - DNA, 694 bp, Homo sapiens; identical to SEQ ID NO: 247604
  chr1:3548480-3549174
  hypo

SEQ ID NO: 296218 - DNA, 444 bp, Homo sapiens; identical to SEQ ID NO: 206535
  chr1:3552661-3553105
  hypo

SEQ ID NO: 296219 - DNA, 251 bp, Homo sapiens; identical to SEQ ID NO: 247606
  chr1:3556469-3556720
  hypo

SEQ ID NO: 296220 - DNA, 365 bp, Homo sapiens; identical to SEQ ID NO: 247607
  chr1:3559616-3559981
  hypo

SEQ ID NO: 296221 - DNA, 104 bp, Homo sapiens; identical to SEQ ID NO: 206536
  chr1:3562356-3562460
  hypo

SEQ ID NO: 296222 - DNA, 151 bp, Homo sapiens; identical to SEQ ID NO: 206537
  chr1:3576146-3576297
  hypo

SEQ ID NO: 296223 - DNA, 674 bp, Homo sapiens; identical to SEQ ID NO: 206538
  chr1:3615176-3615850
  hypo

SEQ ID NO: 296224 - DNA, 37 bp, Homo sapiens; identical to SEQ ID NO: 206539
  chr1:3622993-3623030
  hypo

SEQ ID NO: 296225 - DNA, 247 bp, Homo sapiens; identical to SEQ ID NO: 247614
  chr1:3623373-3623620
  hypo

SEQ ID NO: 296226 - DNA, 303 bp, Homo sapiens
  chr1:3644396-3644699
  hypo
acaatgtgagcccgcgtcccagggacagggccagtccctgaacggccccccacgcccagactcctccctgacggagcctgagagcagcccccatataagtcgcttgtcctgggccaagggcacctcagaggcctgggtggcaccgcaggtttgcccgtccctgtgggttgctcaccaccggacccacctggagaatcgattggccccaagggtggggcaggtctccctcctcccggaaggaggcctcaccctctggtcctgcctgctcaccccgcctgccctgcctggccttccagccttcaa

SEQ ID NO: 296227 - DNA, 42 bp, Homo sapiens
  chr1:3644774-3644816
  hypo
ccttcaggtgagtgtgtgctcctgcacggcagccgggagacc

SEQ ID NO: 296228 - DNA, 226 bp, Homo sapiens; identical to SEQ ID NO: 247616
  chr1:3646528-3646754
  hypo

SEQ ID NO: 296229 - DNA, 149 bp, Homo sapiens; identical to SEQ ID NO: 206541
  chr1:3651334-3651483
  hypo

SEQ ID NO: 296230 - DNA, 211 bp, Homo sapiens; identical to SEQ ID NO: 206542
  chr1:3655597-3655808
  hypo

SEQ ID NO: 296231 - DNA, 52 bp, Homo sapiens; identical to SEQ ID NO: 206543
  chr1:3659498-3659550
  hypo

SEQ ID NO: 296232 - DNA, 181 bp, Homo sapiens; identical to SEQ ID NO: 197267
  chr1:3663335-3663516
  hypo

SEQ ID NO: 296233 - DNA, 116 bp, Homo sapiens; identical to SEQ ID NO: 197268
  chr1:3663983-3664099
  hypo

SEQ ID NO: 296234 - DNA, 35 bp, Homo sapiens
  chr1:3664741-3664776
  hypo
cagggctgcctcgcttcccagatacattttctggt

SEQ ID NO: 296235 - DNA, 204 bp, Homo sapiens; identical to SEQ ID NO: 206546
  chr1:3680100-3680304
  hypo

SEQ ID NO: 296236 - DNA, 150 bp, Homo sapiens; identical to SEQ ID NO: 206547
  chr1:3680359-3680509
  hypo

SEQ ID NO: 296237 - DNA, 186 bp, Homo sapiens; identical to SEQ ID NO: 206548
  chr1:3695643-3695829
  hypo

SEQ ID NO: 296238 - DNA, 171 bp, Homo sapiens; identical to SEQ ID NO: 247625
  chr1:3696129-3696300
  hypo

SEQ ID NO: 296239 - DNA, 152 bp, Homo sapiens; identical to SEQ ID NO: 206549
  chr1:3697565-3697717
  hypo

SEQ ID NO: 296240 - DNA, 187 bp, Homo sapiens
  chr1:3700197-3700384
  hypo
atgatacccaacagcgcacggtatggataaaatgctgtgggttgggctggcatttatgtctgtttcctaatggctagtttatatcctgtcctgtcccatcctgagggccacccgccccctgtggaatggccaatacctccgctcctaacaccttccacttccctcacgtcagggccatctagatgac

SEQ ID NO: 296241 - DNA, 608 bp, Homo sapiens
  chr1:3700414-3701022
  hypo
gagaatgctttctttgtaccctgttaagaagcttctgggttctggtagcattaggcggttcctgaggagcacagactaactcagctgaggccagcatgcggcactcccccgggcccggccccaccccaccaggcacgctgcccacctgtgcaggcccgacacactctgccgcttcttctgcttcctctgctcctcggcctccagctgcagctgccgcaccagctccttggccttggcttctttccgccccaaggggacaatctatcgggcagaaacccacaaactccactagggtcacagccacagaactcgcccatcgtgtcgattacggccttaagcctcaatgagccctcccgactcccgccctcattcatctctacagcaggcagggagcatcccacgggaccacgcagcaagaagctgcatgtgggctgccactgcagcgtcccggggagacctgacgcccaaacacaccgatcctactgaggcagggcttaaccttaaagccagctcatgcacaactgtttccagaggtctgccatcctcagaaggccaaaagaggagagaaaggctgagcagccgggacctcgtgcactccacagattcaa

SEQ ID NO: 296242 - DNA, 38 bp, Homo sapiens
  chr1:3701052-3701090
  hypo
ccctactgccaaccccacgcaaacggttttactatcgg

SEQ ID NO: 296243 - DNA, 335 bp, Homo sapiens; identical to SEQ ID NO: 247628
  chr1:3705390-3705725
  hypo

SEQ ID NO: 296244 - DNA, 357 bp, Homo sapiens; identical to SEQ ID NO: 247629
  chr1:3731493-3731850
  hypo

SEQ ID NO: 296245 - DNA, 45 bp, Homo sapiens; identical to SEQ ID NO: 206551
  chr1:3746112-3746157
  hypo

SEQ ID NO: 296246 - DNA, 64 bp, Homo sapiens; identical to SEQ ID NO: 247631
  chr1:3781806-3781870
  hypo

SEQ ID NO: 296247 - DNA, 101 bp, Homo sapiens; identical to SEQ ID NO: 247632
  chr1:3786101-3786202
  hypo

SEQ ID NO: 296248 - DNA, 185 bp, Homo sapiens; identical to SEQ ID NO: 247633
  chr1:3786685-3786870
  hypo

SEQ ID NO: 296249 - DNA, 304 bp, Homo sapiens; identical to SEQ ID NO: 277872
  chr1:3817790-3818094
  hypo

SEQ ID NO: 296250 - DNA, 208 bp, Homo sapiens; identical to SEQ ID NO: 247634
  chr1:3818733-3818941
  hypo

SEQ ID NO: 296251 - DNA, 255 bp, Homo sapiens; identical to SEQ ID NO: 247635
  chr1:4037033-4037288
  hypo

SEQ ID NO: 296252 - DNA, 283 bp, Homo sapiens; identical to SEQ ID NO: 247636
  chr1:4057085-4057368
  hypo

SEQ ID NO: 296253 - DNA, 36 bp, Homo sapiens; identical to SEQ ID NO: 247637
  chr1:4212157-4212193
  hypo

SEQ ID NO: 296254 - DNA, 202 bp, Homo sapiens; identical to SEQ ID NO: 247638
  chr1:4359785-4359987
  hypo

SEQ ID NO: 296255 - DNA, 35 bp, Homo sapiens; identical to SEQ ID NO: 247639
  chr1:4391727-4391762
  hypo

SEQ ID NO: 296256 - DNA, 34 bp, Homo sapiens; identical to SEQ ID NO: 247640
  chr1:4392062-4392096
  hypo

SEQ ID NO: 296257 - DNA, 124 bp, Homo sapiens; identical to SEQ ID NO: 247641
  chr1:4460854-4460978
  hypo

SEQ ID NO: 296258 - DNA, 88 bp, Homo sapiens; identical to SEQ ID NO: 247642
  chr1:4468042-4468130
  hypo

SEQ ID NO: 296259 - DNA, 64 bp, Homo sapiens
  chr1:4542624-4542688
  hypo
tgtgtgaggacccccgtcagggaactggctgctgctgccgctgcttctccccaggaagcactcc

SEQ ID NO: 296260 - DNA, 239 bp, Homo sapiens
  chr1:4542763-4543002
  hypo
aggaccgcccacgagatgctcgctgccctcccgcaaggctgggagtcgacacagtgggcacggaggggtatggggtgggtcggatcagagaactcaggaggtagctctgcccccatgccttcctctgaccttaggctagcacctctcctctctccgctcggcctctacacctttaaaacaggagcgaagtgttcgatcgaggcccctggagacccagtgcaacacggcagtaggtctcc

SEQ ID NO: 296261 - DNA, 34 bp, Homo sapiens; identical to SEQ ID NO: 206554
  chr1:4659113-4659147
  hypo

SEQ ID NO: 296262 - DNA, 373 bp, Homo sapiens; identical to SEQ ID NO: 247645
  chr1:4673892-4674265
  hypo

SEQ ID NO: 296263 - DNA, 283 bp, Homo sapiens; identical to SEQ ID NO: 247646
  chr1:4675281-4675564
  hypo

SEQ ID NO: 296264 - DNA, 53 bp, Homo sapiens; identical to SEQ ID NO: 247647
  chr1:4696907-4696960
  hypo

SEQ ID NO: 296265 - DNA, 98 bp, Homo sapiens; identical to SEQ ID NO: 247649
  chr1:4794016-4794114
  hypo

SEQ ID NO: 296266 - DNA, 61 bp, Homo sapiens; identical to SEQ ID NO: 247650
  chr1:5371595-5371656
  hypo

SEQ ID NO: 296267 - DNA, 95 bp, Homo sapiens; identical to SEQ ID NO: 247651
  chr1:5587302-5587397
  hypo

SEQ ID NO: 296268 - DNA, 357 bp, Homo sapiens; identical to SEQ ID NO: 277873
  chr1:5772043-5772400
  hypo

SEQ ID NO: 296269 - DNA, 289 bp, Homo sapiens; identical to SEQ ID NO: 247653
  chr1:5839922-5840211
  hypo

SEQ ID NO: 296270 - DNA, 714 bp, Homo sapiens; identical to SEQ ID NO: 247654
  chr1:5918382-5919096
  hypo

SEQ ID NO: 296271 - DNA, 235 bp, Homo sapiens; identical to SEQ ID NO: 247655
  chr1:5922581-5922816
  hypo

SEQ ID NO: 296272 - DNA, 188 bp, Homo sapiens
  chr1:5924108-5924296
  hypo
acagggagacgctgcggccactcacgggaacagccactggcccttcctccaagtattccctgagtctcctgtgcaccgtgcacggggacccccacagagataagacagacgctctctggagcttccatccgggagagacacagcacaggagcaaacactcatgcacccggccctgctgggtcagaaca

SEQ ID NO: 296273 - DNA, 139 bp, Homo sapiens
  chr1:5924431-5924570
  hypo
acgagccaggaggccaccagctggtggcaatccacgtccaccaggttgagatggacaaagcggctgccggccctaaggggcctcacgccaacatgcaggtcctgcaccccacgaggcggcagcacgaagacacctttgg

SEQ ID NO: 296274 - DNA, 51 bp, Homo sapiens; identical to SEQ ID NO: 206556
  chr1:5927906-5927957
  hypo

SEQ ID NO: 296275 - DNA, 73 bp, Homo sapiens; identical to SEQ ID NO: 247658
  chr1:5931364-5931437
  hypo

SEQ ID NO: 296276 - DNA, 121 bp, Homo sapiens; identical to SEQ ID NO: 247659
  chr1:5931724-5931845
  hypo

SEQ ID NO: 296277 - DNA, 87 bp, Homo sapiens
  chr1:5932999-5933086
  hypo
gctcaaggagtggccgcaggctgtggcagccaccacgggaactgcggcttcacacccggagagccctgggctgtgagaaggcggcca

SEQ ID NO: 296278 - DNA, 229 bp, Homo sapiens; identical to SEQ ID NO: 206558
  chr1:5933144-5933373
  hypo

SEQ ID NO: 296279 - DNA, 69 bp, Homo sapiens; identical to SEQ ID NO: 206559
  chr1:5935554-5935623
  hypo

SEQ ID NO: 296280 - DNA, 398 bp, Homo sapiens; identical to SEQ ID NO: 206560
  chr1:5940547-5940945
  hypo

SEQ ID NO: 296281 - DNA, 199 bp, Homo sapiens; identical to SEQ ID NO: 247663
  chr1:5941341-5941540
  hypo

SEQ ID NO: 296282 - DNA, 709 bp, Homo sapiens; identical to SEQ ID NO: 247664
  chr1:5942073-5942782
  hypo

SEQ ID NO: 296283 - DNA, 244 bp, Homo sapiens; identical to SEQ ID NO: 206562
  chr1:5943159-5943403
  hypo

SEQ ID NO: 296284 - DNA, 72 bp, Homo sapiens
  chr1:5944449-5944521
  hypo
ggaaaggtcacagaacacaagtaacacacaagctcccagccgaacccccgtcctactcgacaaccaagatca

SEQ ID NO: 296285 - DNA, 85 bp, Homo sapiens; identical to SEQ ID NO: 247667
  chr1:5946366-5946451
  hypo

SEQ ID NO: 296286 - DNA, 216 bp, Homo sapiens; identical to SEQ ID NO: 247668
  chr1:5946683-5946899
  hypo

SEQ ID NO: 296287 - DNA, 263 bp, Homo sapiens; identical to SEQ ID NO: 247669
  chr1:5947296-5947559
  hypo

SEQ ID NO: 296288 - DNA, 143 bp, Homo sapiens; identical to SEQ ID NO: 206564
  chr1:5950822-5950965
  hypo

SEQ ID NO: 296289 - DNA, 145 bp, Homo sapiens; identical to SEQ ID NO: 206565
  chr1:5958567-5958712
  hypo

SEQ ID NO: 296290 - DNA, 78 bp, Homo sapiens; identical to SEQ ID NO: 247672
  chr1:5977997-5978075
  hypo

SEQ ID NO: 296291 - DNA, 129 bp, Homo sapiens; identical to SEQ ID NO: 247673
  chr1:5987704-5987833
  hypo

SEQ ID NO: 296292 - DNA, 91 bp, Homo sapiens; identical to SEQ ID NO: 247674
  chr1:6007181-6007272
  hypo

SEQ ID NO: 296293 - DNA, 45 bp, Homo sapiens; identical to SEQ ID NO: 206566
  chr1:6046166-6046211
  hypo

SEQ ID NO: 296294 - DNA, 142 bp, Homo sapiens; identical to SEQ ID NO: 206567
  chr1:6046277-6046419
  hypo

SEQ ID NO: 296295 - DNA, 394 bp, Homo sapiens; identical to SEQ ID NO: 247676
  chr1:6047768-6048162
  hypo

SEQ ID NO: 296296 - DNA, 924 bp, Homo sapiens; identical to SEQ ID NO: 221205
  chr1:6052412-6053336
  hypo

SEQ ID NO: 296297 - DNA, 111 bp, Homo sapiens; identical to SEQ ID NO: 277877
  chr1:6053655-6053766
  hypo

SEQ ID NO: 296298 - DNA, 104 bp, Homo sapiens
  chr1:6056053-6056157
  hypo
ctcctttgtcgtggcgtgggaagccccacactgctctttccttggtgacgggtgacccgccatgttcaggcccctcctggtctatcttcgggtgagtctattaa

SEQ ID NO: 296299 - DNA, 154 bp, Homo sapiens
  chr1:6056651-6056805
  hypo
tgcaggcagcctcctccacttctccagcacacaggtacccacagagctaactgctttgacgccatgctggttgtagacaaaacaggattgggaaaaggggaaaagtggagaaatggtggggaccaccttcctggccgtccgcctttacctggac

SEQ ID NO: 296300 - DNA, 129 bp, Homo sapiens
  chr1:6059781-6059910
  hypo
caggagccagtcctcgccaccctgttcctgaccatacagagtctgtcacctgcctgtgccctgattgtaccccatctgcaccgtgtctgcaccctgcctgcgccctgtctgtaccccatgtgcgcccca

SEQ ID NO: 296301 - DNA, 127 bp, Homo sapiens
  chr1:6059974-6060101
  hypo
tgtgccccgtccgcatcccgcctgcgccctgtctgtgccccgtccgcaccctgcctgcaccccatccatatcctgctctgctgtctgcaccctctctgcaccctgtctgcgccgtccgtgccccgtc

SEQ ID NO: 296302 - DNA, 299 bp, Homo sapiens; identical to SEQ ID NO: 247680
  chr1:6076558-6076857
  hypo

SEQ ID NO: 296303 - DNA, 68 bp, Homo sapiens; identical to SEQ ID NO: 247681
  chr1:6111618-6111686
  hypo

SEQ ID NO: 296304 - DNA, 148 bp, Homo sapiens; identical to SEQ ID NO: 206568
  chr1:6129708-6129856
  hypo

SEQ ID NO: 296305 - DNA, 52 bp, Homo sapiens
  chr1:6131662-6131714
  hypo
ggaatcgatgtcacgacaagcaaggcgcctgctgcgtagggcacctgccgct

SEQ ID NO: 296306 - DNA, 243 bp, Homo sapiens; identical to SEQ ID NO: 247684
  chr1:6133884-6134127
  hypo

SEQ ID NO: 296307 - DNA, 43 bp, Homo sapiens; identical to SEQ ID NO: 247685
  chr1:6134427-6134470
  hypo

SEQ ID NO: 296308 - DNA, 83 bp, Homo sapiens; identical to SEQ ID NO: 197275
  chr1:6137223-6137306
  hypo

SEQ ID NO: 296309 - DNA, 75 bp, Homo sapiens
  chr1:6148940-6149015
  hypo
aatccgactccacacggcatttgctgaccctgtttttgcgtctaacattgcatcgtaaacgttttttgggagggg

SEQ ID NO: 296310 - DNA, 609 bp, Homo sapiens
  chr1:6149045-6149654
  hypo
acgcggtcggcctgttttccagggcggagacggagcggggcctgtccaggaagcacataatcgaaggtgaggacgcgctcgggcacctcagggcccccatacctgtgggatcatcctcggaggccaaagtgatggcagcacagggcccgacccccccagttaacccactgagggcccaatcccggggcacccggtgctctggcctgaccttctccttccacccaggtagcacagcgggacgctgcagagaacgagggcagcccggtggctgagcacagaccacagaccagcctgggtttcaatccaggtttggccccacactggctgagtgggtcttcagcaggggcaccctgccccatgcctctgccacagtatctgtgcaatagggacagtaagagcgcacccggcgagggtggctgggatgcctgcagcgcccaggagaaggtgccacacagcccggggctcagcactcgcaggcaccggagcaaggcaccggggtgtctggctcttgctgtatctttattgtcttcatgcctttcctgtccgtgttcattttcttcgaggtaatagatcattccattgaaaatcacctggcggggcaagccaccc

SEQ ID NO: 296311 - DNA, 221 bp, Homo sapiens; identical to SEQ ID NO: 247688
  chr1:6155344-6155565
  hypo

SEQ ID NO: 296312 - DNA, 81 bp, Homo sapiens; identical to SEQ ID NO: 206570
  chr1:6171947-6172028
  hypo

SEQ ID NO: 296313 - DNA, 60 bp, Homo sapiens
  chr1:6188971-6189031
  hypo
cccgacttggagccgaggccgggccgcaccaccaggtgggtgagcatcatcttgcgcttg

SEQ ID NO: 296314 - DNA, 73 bp, Homo sapiens
  chr1:6189061-6189134
  hypo
gcccgagtcacgaagcggtagatcatcaccttcttgttctggccgatgcggtgggcgcggctgaaggcctggg

SEQ ID NO: 296315 - DNA, 416 bp, Homo sapiens; identical to SEQ ID NO: 247692
  chr1:6202201-6202617
  hypo

SEQ ID NO: 296316 - DNA, 64 bp, Homo sapiens; identical to SEQ ID NO: 247693
  chr1:6243323-6243387
  hypo

SEQ ID NO: 296317 - DNA, 329 bp, Homo sapiens; identical to SEQ ID NO: 247694
  chr1:6278215-6278544
  hypo

SEQ ID NO: 296318 - DNA, 69 bp, Homo sapiens; identical to SEQ ID NO: 206571
  chr1:6280174-6280243
  hypo

SEQ ID NO: 296319 - DNA, 114 bp, Homo sapiens; identical to SEQ ID NO: 206572
  chr1:6281662-6281776
  hypo

SEQ ID NO: 296320 - DNA, 96 bp, Homo sapiens; identical to SEQ ID NO: 206573
  chr1:6281825-6281921
  hypo

SEQ ID NO: 296321 - DNA, 52 bp, Homo sapiens; identical to SEQ ID NO: 206574
  chr1:6284776-6284828
  hypo

SEQ ID NO: 296322 - DNA, 281 bp, Homo sapiens
  chr1:6284858-6285139
  hypo
ctccccaggtaactctggagggcgctgtggaatattgctgtgatttgccccttactcgtctttcacccatgttccgccttgattcggcataaggacagactgctccagtggggccttgggtcctcaggccttctgaccgcttggtcttgagtgacattccagaagagtgactaatgacataaaacgattaagaaaatccatgtggcagcggccaaccggaaacagttttgtcccaggctgcacagggtcggaggccccaaggtcaccggggccactgcccg

SEQ ID NO: 296323 - DNA, 161 bp, Homo sapiens; identical to SEQ ID NO: 197279
  chr1:6296163-6296324
  hypo

SEQ ID NO: 296324 - DNA, 82 bp, Homo sapiens; identical to SEQ ID NO: 247698
  chr1:6297113-6297195
  hypo

SEQ ID NO: 296325 - DNA, 39 bp, Homo sapiens; identical to SEQ ID NO: 206577
  chr1:6313883-6313922
  hypo

SEQ ID NO: 296326 - DNA, 133 bp, Homo sapiens; identical to SEQ ID NO: 206578
  chr1:6313952-6314085
  hypo

SEQ ID NO: 296327 - DNA, 215 bp, Homo sapiens; identical to SEQ ID NO: 197280
  chr1:6321178-6321393
  hypo

SEQ ID NO: 296328 - DNA, 101 bp, Homo sapiens; identical to SEQ ID NO: 247701
  chr1:6329524-6329625
  hypo

SEQ ID NO: 296329 - DNA, 504 bp, Homo sapiens
  chr1:6331651-6332155
  hypo
tagcggagcctgtccgccatccgctgtggcctctccgccatccgctgtggcctctcccagcagctgcaggcctgggttaattacctcctcctccacacccacccaggactgcaccagcctccagcagaaagcagccggaagtctcaaataatgagatcattgtggagagtcataaacaccctcaccaggggctcccctcacccagcagcaccggctcagactccgaaagaactgcccccaagtggggccaagaaaggaggcgtaaaggccaacgggaggctgctggcggaggcagggagatcgtcaccacaaaggggagaaaaggcattgggacttgggcctgggtggtggcctctcaggagcccctcctgcaggcacggagtgccgtggtcccgggacgctcggctcacagctcttgtgccggagtgtggacatggcggtccccaccctacaacaccaataatgatcatagctgtcacctgctgagtgcccactgtgggctag

SEQ ID NO: 296330 - DNA, 255 bp, Homo sapiens; identical to SEQ ID NO: 247703
  chr1:6333299-6333554
  hypo

SEQ ID NO: 296331 - DNA, 403 bp, Homo sapiens; identical to SEQ ID NO: 206581
  chr1:6333775-6334178
  hypo

SEQ ID NO: 296332 - DNA, 178 bp, Homo sapiens; identical to SEQ ID NO: 206582
  chr1:6334536-6334714
  hypo

SEQ ID NO: 296333 - DNA, 247 bp, Homo sapiens; identical to SEQ ID NO: 247706
  chr1:6338580-6338827
  hypo

SEQ ID NO: 296334 - DNA, 85 bp, Homo sapiens; identical to SEQ ID NO: 247707
  chr1:6340040-6340125
  hypo

SEQ ID NO: 296335 - DNA, 330 bp, Homo sapiens; identical to SEQ ID NO: 206584
  chr1:6345508-6345838
  hypo

SEQ ID NO: 296336 - DNA, 153 bp, Homo sapiens; identical to SEQ ID NO: 206585
  chr1:6347156-6347309
  hypo

SEQ ID NO: 296337 - DNA, 110 bp, Homo sapiens
  chr1:6360870-6360980
  hypo
gcgcggccggtccctctccacaaacacagaatgaccaacaccgggtctcactggacaacacccgatgaggcagcagcctccctgtctccattctacaagtcaggaaccag

SEQ ID NO: 296338 - DNA, 111 bp, Homo sapiens; identical to SEQ ID NO: 247711
  chr1:6361454-6361565
  hypo

SEQ ID NO: 296339 - DNA, 254 bp, Homo sapiens; identical to SEQ ID NO: 247712
  chr1:6361805-6362059
  hypo

SEQ ID NO: 296340 - DNA, 35 bp, Homo sapiens; identical to SEQ ID NO: 206586
  chr1:6363866-6363901
  hypo

SEQ ID NO: 296341 - DNA, 138 bp, Homo sapiens; identical to SEQ ID NO: 206587
  chr1:6382126-6382264
  hypo

SEQ ID NO: 296342 - DNA, 153 bp, Homo sapiens; identical to SEQ ID NO: 247715
  chr1:6385813-6385966
  hypo

SEQ ID NO: 296343 - DNA, 76 bp, Homo sapiens
  chr1:6391354-6391430
  hypo
gaggtcacagcagaatgggacgggccctgagcccagtgacccgtactccggtaagcaggccgtgcgaagatggagg

SEQ ID NO: 296344 - DNA, 108 bp, Homo sapiens
  chr1:6391541-6391649
  hypo
atacctttgcacttctggcctccagaactgtgacagaatcaacttctattgtttgagagctacccagtcagtggcactttgtcacagcagccccgggacactgtcagg

SEQ ID NO: 296345 - DNA, 65 bp, Homo sapiens; identical to SEQ ID NO: 247717
  chr1:6397255-6397320
  hypo

SEQ ID NO: 296346 - DNA, 282 bp, Homo sapiens; identical to SEQ ID NO: 247718
  chr1:6405497-6405779
  hypo

SEQ ID NO: 296347 - DNA, 179 bp, Homo sapiens; identical to SEQ ID NO: 206589
  chr1:6409753-6409932
  hypo

SEQ ID NO: 296348 - DNA, 240 bp, Homo sapiens; identical to SEQ ID NO: 247721
  chr1:6415193-6415433
  hypo

SEQ ID NO: 296349 - DNA, 159 bp, Homo sapiens
  chr1:6422666-6422825
  hypo
ggagaactccgcaacgacatgccctagaatgggaggccacatccctctccccaaccgaaactcactgcctcatgctagaggaagctggtagggtcagaaacttacatccaggctccagaaagatctctcagagctcaatgtgaaaaaaacaaatgacct

SEQ ID NO: 296350 - DNA, 141 bp, Homo sapiens; identical to SEQ ID NO: 247723
  chr1:6434929-6435070
  hypo

SEQ ID NO: 296351 - DNA, 53 bp, Homo sapiens
  chr1:6445425-6445478
  hypo
gctcatccaacacccgaccctactaccctccccaaaactcctccaagttatgc

SEQ ID NO: 296352 - DNA, 205 bp, Homo sapiens; identical to SEQ ID NO: 59004
  chr1:6445510-6445715
  hypo

SEQ ID NO: 296353 - DNA, 329 bp, Homo sapiens; identical to SEQ ID NO: 277898
  chr1:6484602-6484931
  hypo

SEQ ID NO: 296354 - DNA, 328 bp, Homo sapiens; identical to SEQ ID NO: 206590
  chr1:6486768-6487096
  hypo

SEQ ID NO: 296355 - DNA, 55 bp, Homo sapiens; identical to SEQ ID NO: 247727
  chr1:6504649-6504704
  hypo

SEQ ID NO: 296356 - DNA, 138 bp, Homo sapiens; identical to SEQ ID NO: 102452
  chr1:6526181-6526319
  hypo

SEQ ID NO: 296357 - DNA, 115 bp, Homo sapiens; identical to SEQ ID NO: 206591
  chr1:6527795-6527910
  hypo

SEQ ID NO: 296358 - DNA, 242 bp, Homo sapiens; identical to SEQ ID NO: 206592
  chr1:6528247-6528489
  hypo

SEQ ID NO: 296359 - DNA, 368 bp, Homo sapiens; identical to SEQ ID NO: 247730
  chr1:6530601-6530969
  hypo

SEQ ID NO: 296360 - DNA, 70 bp, Homo sapiens; identical to SEQ ID NO: 247731
  chr1:6534098-6534168
  hypo

SEQ ID NO: 296361 - DNA, 372 bp, Homo sapiens; identical to SEQ ID NO: 247732
  chr1:6534593-6534965
  hypo

SEQ ID NO: 296362 - DNA, 62 bp, Homo sapiens; identical to SEQ ID NO: 206593
  chr1:6537439-6537501
  hypo

SEQ ID NO: 296363 - DNA, 190 bp, Homo sapiens; identical to SEQ ID NO: 206594
  chr1:6537537-6537727
  hypo

SEQ ID NO: 296364 - DNA, 160 bp, Homo sapiens; identical to SEQ ID NO: 247734
  chr1:6562949-6563109
  hypo

SEQ ID NO: 296365 - DNA, 73 bp, Homo sapiens; identical to SEQ ID NO: 247735
  chr1:6565119-6565192
  hypo

SEQ ID NO: 296366 - DNA, 135 bp, Homo sapiens; identical to SEQ ID NO: 247736
  chr1:6623398-6623533
  hypo

SEQ ID NO: 296367 - DNA, 32 bp, Homo sapiens; identical to SEQ ID NO: 206595
  chr1:6639452-6639484
  hypo

SEQ ID NO: 296368 - DNA, 348 bp, Homo sapiens; identical to SEQ ID NO: 247738
  chr1:6648178-6648526
  hypo

SEQ ID NO: 296369 - DNA, 89 bp, Homo sapiens; identical to SEQ ID NO: 247739
  chr1:6653433-6653522
  hypo

SEQ ID NO: 296370 - DNA, 194 bp, Homo sapiens; identical to SEQ ID NO: 221214
  chr1:6659237-6659431
  hypo

SEQ ID NO: 296371 - DNA, 40 bp, Homo sapiens; identical to SEQ ID NO: 206596
  chr1:6672155-6672195
  hypo

SEQ ID NO: 296372 - DNA, 470 bp, Homo sapiens; identical to SEQ ID NO: 277908
  chr1:6675268-6675738
  hypo

SEQ ID NO: 296373 - DNA, 141 bp, Homo sapiens; identical to SEQ ID NO: 206597
  chr1:6675989-6676130
  hypo

SEQ ID NO: 296374 - DNA, 94 bp, Homo sapiens; identical to SEQ ID NO: 247742
  chr1:6688528-6688622
  hypo

SEQ ID NO: 296375 - DNA, 41 bp, Homo sapiens; identical to SEQ ID NO: 247743
  chr1:6707158-6707199
  hypo

SEQ ID NO: 296376 - DNA, 352 bp, Homo sapiens; identical to SEQ ID NO: 206598
  chr1:6711963-6712315
  hypo

SEQ ID NO: 296377 - DNA, 105 bp, Homo sapiens; identical to SEQ ID NO: 206599
  chr1:6713809-6713914
  hypo

SEQ ID NO: 296378 - DNA, 307 bp, Homo sapiens; identical to SEQ ID NO: 206600
  chr1:6714041-6714348
  hypo

SEQ ID NO: 296379 - DNA, 155 bp, Homo sapiens; identical to SEQ ID NO: 247746
  chr1:6720536-6720691
  hypo

SEQ ID NO: 296380 - DNA, 134 bp, Homo sapiens; identical to SEQ ID NO: 206602
  chr1:6738112-6738246
  hypo

SEQ ID NO: 296381 - DNA, 125 bp, Homo sapiens; identical to SEQ ID NO: 247748
  chr1:6750366-6750491
  hypo

SEQ ID NO: 296382 - DNA, 74 bp, Homo sapiens
  chr1:6776388-6776462
  hypo
aggggataatccatgagttttaagctgtgcaccattctgggcagcgtgatgagatctctcgctgtaagcttgat

SEQ ID NO: 296383 - DNA, 83 bp, Homo sapiens; identical to SEQ ID NO: 206603
  chr1:6871010-6871093
  hypo

SEQ ID NO: 296384 - DNA, 61 bp, Homo sapiens
  chr1:6964989-6965050
  hypo
ctcgctgtgtgtccaaagccaaacattctttctccaacaggttattcgtgtggtttgctgt

SEQ ID NO: 296385 - DNA, 135 bp, Homo sapiens; identical to SEQ ID NO: 247752
  chr1:7279268-7279403
  hypo

SEQ ID NO: 296386 - DNA, 45 bp, Homo sapiens; identical to SEQ ID NO: 206604
  chr1:7407200-7407245
  hypo

SEQ ID NO: 296387 - DNA, 84 bp, Homo sapiens; identical to SEQ ID NO: 206605
  chr1:7550323-7550407
  hypo

SEQ ID NO: 296388 - DNA, 144 bp, Homo sapiens; identical to SEQ ID NO: 206606
  chr1:7550707-7550851
  hypo

SEQ ID NO: 296389 - DNA, 523 bp, Homo sapiens; identical to SEQ ID NO: 247756
  chr1:7560633-7561156
  hypo

SEQ ID NO: 296390 - DNA, 164 bp, Homo sapiens; identical to SEQ ID NO: 247757
  chr1:7562782-7562946
  hypo

SEQ ID NO: 296391 - DNA, 125 bp, Homo sapiens; identical to SEQ ID NO: 247758
  chr1:7567307-7567432
  hypo

SEQ ID NO: 296392 - DNA, 237 bp, Homo sapiens; identical to SEQ ID NO: 247759
  chr1:7700371-7700608
  hypo

SEQ ID NO: 296393 - DNA, 139 bp, Homo sapiens; identical to SEQ ID NO: 247760
  chr1:7710594-7710733
  hypo

SEQ ID NO: 296394 - DNA, 110 bp, Homo sapiens; identical to SEQ ID NO: 247761
  chr1:7717013-7717123
  hypo

SEQ ID NO: 296395 - DNA, 1614 bp, Homo sapiens; identical to SEQ ID NO: 247762
  chr1:7723194-7724808
  hypo

SEQ ID NO: 296396 - DNA, 80 bp, Homo sapiens; identical to SEQ ID NO: 135597
  chr1:7728716-7728796
  hypo

SEQ ID NO: 296397 - DNA, 162 bp, Homo sapiens; identical to SEQ ID NO: 247764
  chr1:7742818-7742980
  hypo

SEQ ID NO: 296398 - DNA, 34 bp, Homo sapiens; identical to SEQ ID NO: 277911
  chr1:7764522-7764556
  hypo

SEQ ID NO: 296399 - DNA, 42 bp, Homo sapiens; identical to SEQ ID NO: 277912
  chr1:7764737-7764779
  hypo

SEQ ID NO: 296400 - DNA, 197 bp, Homo sapiens; identical to SEQ ID NO: 277913
  chr1:7764990-7765187
  hypo

SEQ ID NO: 296401 - DNA, 267 bp, Homo sapiens; identical to SEQ ID NO: 247765
  chr1:7777934-7778201
  hypo

SEQ ID NO: 296402 - DNA, 190 bp, Homo sapiens; identical to SEQ ID NO: 247766
  chr1:7842588-7842778
  hypo

SEQ ID NO: 296403 - DNA, 123 bp, Homo sapiens; identical to SEQ ID NO: 197290
  chr1:7843509-7843632
  hypo

SEQ ID NO: 296404 - DNA, 40 bp, Homo sapiens; identical to SEQ ID NO: 197291
  chr1:7843653-7843693
  hypo

SEQ ID NO: 296405 - DNA, 188 bp, Homo sapiens; identical to SEQ ID NO: 197292
  chr1:7844213-7844401
  hypo

SEQ ID NO: 296406 - DNA, 57 bp, Homo sapiens; identical to SEQ ID NO: 206612
  chr1:8044539-8044596
  hypo

SEQ ID NO: 296407 - DNA, 255 bp, Homo sapiens; identical to SEQ ID NO: 206613
  chr1:8044977-8045232
  hypo

SEQ ID NO: 296408 - DNA, 377 bp, Homo sapiens; identical to SEQ ID NO: 277921
  chr1:8085715-8086092
  hypo

SEQ ID NO: 296409 - DNA, 34 bp, Homo sapiens; identical to SEQ ID NO: 247769
  chr1:8106657-8106691
  hypo

SEQ ID NO: 296410 - DNA, 147 bp, Homo sapiens; identical to SEQ ID NO: 247770
  chr1:8148903-8149050
  hypo

SEQ ID NO: 296411 - DNA, 82 bp, Homo sapiens
  chr1:8152892-8152974
  hypo
ttcatactcagctgctgcagctgactcaaagactttatatttttgagcagcctgttcaagaggctagcgaggttgacctctg

SEQ ID NO: 296412 - DNA, 170 bp, Homo sapiens; identical to SEQ ID NO: 247772
  chr1:8212952-8213122
  hypo

SEQ ID NO: 296413 - DNA, 42 bp, Homo sapiens; identical to SEQ ID NO: 206616
  chr1:8385723-8385765
  hypo

SEQ ID NO: 296414 - DNA, 105 bp, Homo sapiens; identical to SEQ ID NO: 247774
  chr1:8385999-8386104
  hypo

SEQ ID NO: 296415 - DNA, 69 bp, Homo sapiens; identical to SEQ ID NO: 247775
  chr1:8395503-8395572
  hypo

SEQ ID NO: 296416 - DNA, 213 bp, Homo sapiens; identical to SEQ ID NO: 247776
  chr1:8399490-8399703
  hypo

SEQ ID NO: 296417 - DNA, 206 bp, Homo sapiens; identical to SEQ ID NO: 247777
  chr1:8427365-8427571
  hypo

SEQ ID NO: 296418 - DNA, 300 bp, Homo sapiens; identical to SEQ ID NO: 247778
  chr1:8437575-8437875
  hypo

SEQ ID NO: 296419 - DNA, 61 bp, Homo sapiens; identical to SEQ ID NO: 206617
  chr1:8442482-8442543
  hypo

SEQ ID NO: 296420 - DNA, 41 bp, Homo sapiens; identical to SEQ ID NO: 206618
  chr1:8540771-8540812
  hypo

SEQ ID NO: 296421 - DNA, 38 bp, Homo sapiens; identical to SEQ ID NO: 247781
  chr1:8627113-8627151
  hypo

SEQ ID NO: 296422 - DNA, 120 bp, Homo sapiens; identical to SEQ ID NO: 247782
  chr1:8693558-8693678
  hypo

SEQ ID NO: 296423 - DNA, 98 bp, Homo sapiens; identical to SEQ ID NO: 247783
  chr1:8694712-8694810
  hypo

SEQ ID NO: 296424 - DNA, 146 bp, Homo sapiens; identical to SEQ ID NO: 206619
  chr1:8746806-8746952
  hypo

SEQ ID NO: 296425 - DNA, 89 bp, Homo sapiens; identical to SEQ ID NO: 247785
  chr1:8748134-8748223
  hypo

SEQ ID NO: 296426 - DNA, 69 bp, Homo sapiens; identical to SEQ ID NO: 277924
  chr1:8762992-8763061
  hypo

SEQ ID NO: 296427 - DNA, 130 bp, Homo sapiens; identical to SEQ ID NO: 206620
  chr1:8781130-8781260
  hypo

SEQ ID NO: 296428 - DNA, 32 bp, Homo sapiens; identical to SEQ ID NO: 206621
  chr1:8781290-8781322
  hypo

SEQ ID NO: 296429 - DNA, 35 bp, Homo sapiens; identical to SEQ ID NO: 206622
  chr1:8941149-8941184
  hypo

SEQ ID NO: 296430 - DNA, 32 bp, Homo sapiens; identical to SEQ ID NO: 247789
  chr1:8997092-8997124
  hypo

SEQ ID NO: 296431 - DNA, 123 bp, Homo sapiens; identical to SEQ ID NO: 206623
  chr1:9004947-9005070
  hypo

SEQ ID NO: 296432 - DNA, 152 bp, Homo sapiens; identical to SEQ ID NO: 206624
  chr1:9027898-9028050
  hypo

SEQ ID NO: 296433 - DNA, 150 bp, Homo sapiens; identical to SEQ ID NO: 206625
  chr1:9074712-9074862
  hypo

SEQ ID NO: 296434 - DNA, 81 bp, Homo sapiens; identical to SEQ ID NO: 206626
  chr1:9084938-9085019
  hypo

SEQ ID NO: 296435 - DNA, 223 bp, Homo sapiens; identical to SEQ ID NO: 247794
  chr1:9165435-9165658
  hypo

SEQ ID NO: 296436 - DNA, 279 bp, Homo sapiens; identical to SEQ ID NO: 35016
  chr1:9188943-9189222
  hypo

SEQ ID NO: 296437 - DNA, 52 bp, Homo sapiens; identical to SEQ ID NO: 206629
  chr1:9205248-9205300
  hypo

SEQ ID NO: 296438 - DNA, 77 bp, Homo sapiens; identical to SEQ ID NO: 247796
  chr1:9324850-9324927
  hypo

SEQ ID NO: 296439 - DNA, 48 bp, Homo sapiens; identical to SEQ ID NO: 247797
  chr1:9332433-9332481
  hypo

SEQ ID NO: 296440 - DNA, 189 bp, Homo sapiens; identical to SEQ ID NO: 197299
  chr1:9352965-9353154
  hypo

SEQ ID NO: 296441 - DNA, 68 bp, Homo sapiens; identical to SEQ ID NO: 197300
  chr1:9353809-9353877
  hypo

SEQ ID NO: 296442 - DNA, 87 bp, Homo sapiens; identical to SEQ ID NO: 247798
  chr1:9357986-9358073
  hypo

SEQ ID NO: 296443 - DNA, 194 bp, Homo sapiens; identical to SEQ ID NO: 247799
  chr1:9361976-9362170
  hypo

SEQ ID NO: 296444 - DNA, 203 bp, Homo sapiens; identical to SEQ ID NO: 247800
  chr1:9384384-9384587
  hypo

SEQ ID NO: 296445 - DNA, 368 bp, Homo sapiens; identical to SEQ ID NO: 247801
  chr1:9384863-9385231
  hypo

SEQ ID NO: 296446 - DNA, 187 bp, Homo sapiens; identical to SEQ ID NO: 247802
  chr1:9396673-9396860
  hypo

SEQ ID NO: 296447 - DNA, 62 bp, Homo sapiens; identical to SEQ ID NO: 247803
  chr1:9399461-9399523
  hypo

SEQ ID NO: 296448 - DNA, 224 bp, Homo sapiens; identical to SEQ ID NO: 247804
  chr1:9400677-9400901
  hypo

SEQ ID NO: 296449 - DNA, 137 bp, Homo sapiens; identical to SEQ ID NO: 206633
  chr1:9402328-9402465
  hypo

SEQ ID NO: 296450 - DNA, 191 bp, Homo sapiens
  chr1:9402616-9402807
  hypo
acgtccctctcccgcctcatcctgccttgttcccagtgtagtgatcaccctgacatcggttctcccatgtcctcatcccccgccagcccgcggggtcatcccctccccagaccacagtttgggcccaggggtctggggcacacatccgagatgcaggcacacatcccggactcctccggagaaactccatc

SEQ ID NO: 296451 - DNA, 252 bp, Homo sapiens; identical to SEQ ID NO: 206635
  chr1:9420430-9420682
  hypo

SEQ ID NO: 296452 - DNA, 425 bp, Homo sapiens; identical to SEQ ID NO: 247807
  chr1:9427427-9427852
  hypo

SEQ ID NO: 296453 - DNA, 165 bp, Homo sapiens; identical to SEQ ID NO: 197301
  chr1:9489050-9489215
  hypo

SEQ ID NO: 296454 - DNA, 92 bp, Homo sapiens; identical to SEQ ID NO: 206637
  chr1:9539439-9539531
  hypo

SEQ ID NO: 296455 - DNA, 37 bp, Homo sapiens; identical to SEQ ID NO: 247809
  chr1:9549417-9549454
  hypo

SEQ ID NO: 296456 - DNA, 32 bp, Homo sapiens; identical to SEQ ID NO: 206638
  chr1:9579431-9579463
  hypo

SEQ ID NO: 296457 - DNA, 152 bp, Homo sapiens; identical to SEQ ID NO: 247811
  chr1:9579703-9579855
  hypo

SEQ ID NO: 296458 - DNA, 80 bp, Homo sapiens; identical to SEQ ID NO: 247812
  chr1:9654069-9654149
  hypo

SEQ ID NO: 296459 - DNA, 218 bp, Homo sapiens; identical to SEQ ID NO: 206639
  chr1:9655906-9656124
  hypo

SEQ ID NO: 296460 - DNA, 219 bp, Homo sapiens; identical to SEQ ID NO: 206640
  chr1:9664191-9664410
  hypo

SEQ ID NO: 296461 - DNA, 111 bp, Homo sapiens; identical to SEQ ID NO: 206641
  chr1:9664794-9664905
  hypo

SEQ ID NO: 296462 - DNA, 127 bp, Homo sapiens; identical to SEQ ID NO: 206642
  chr1:9666790-9666917
  hypo

SEQ ID NO: 296463 - DNA, 246 bp, Homo sapiens; identical to SEQ ID NO: 247817
  chr1:9667250-9667496
  hypo

SEQ ID NO: 296464 - DNA, 132 bp, Homo sapiens; identical to SEQ ID NO: 206643
  chr1:9670774-9670906
  hypo

SEQ ID NO: 296465 - DNA, 435 bp, Homo sapiens; identical to SEQ ID NO: 277935
  chr1:9711639-9712074
  hypo

SEQ ID NO: 296466 - DNA, 110 bp, Homo sapiens; identical to SEQ ID NO: 247819
  chr1:9725448-9725558
  hypo

SEQ ID NO: 296467 - DNA, 428 bp, Homo sapiens; identical to SEQ ID NO: 247820
  chr1:9775701-9776129
  hypo

SEQ ID NO: 296468 - DNA, 177 bp, Homo sapiens; identical to SEQ ID NO: 206645
  chr1:9780744-9780921
  hypo

SEQ ID NO: 296469 - DNA, 149 bp, Homo sapiens; identical to SEQ ID NO: 206646
  chr1:9781134-9781283
  hypo

SEQ ID NO: 296470 - DNA, 143 bp, Homo sapiens; identical to SEQ ID NO: 247823
  chr1:9787397-9787540
  hypo

SEQ ID NO: 296471 - DNA, 85 bp, Homo sapiens; identical to SEQ ID NO: 206647
  chr1:9795910-9795995
  hypo

SEQ ID NO: 296472 - DNA, 38 bp, Homo sapiens; identical to SEQ ID NO: 247825
  chr1:9841766-9841804
  hypo

SEQ ID NO: 296473 - DNA, 116 bp, Homo sapiens
  chr1:9897085-9897201
  hypo
ttctttgttctgtggcatattaattgcagatctggtattctggcaattaacacaattatggggtccgtttctcttccggcaggtcgtaagccacatgctttcggccagggagttcg

SEQ ID NO: 296474 - DNA, 347 bp, Homo sapiens; identical to SEQ ID NO: 247828
  chr1:9929961-9930308
  hypo

SEQ ID NO: 296475 - DNA, 43 bp, Homo sapiens; identical to SEQ ID NO: 247829
  chr1:9938566-9938609
  hypo

SEQ ID NO: 296476 - DNA, 120 bp, Homo sapiens; identical to SEQ ID NO: 247830
  chr1:9981142-9981262
  hypo

SEQ ID NO: 296477 - DNA, 49 bp, Homo sapiens; identical to SEQ ID NO: 206649
  chr1:10091839-10091888
  hypo

SEQ ID NO: 296478 - DNA, 70 bp, Homo sapiens; identical to SEQ ID NO: 206650
  chr1:10091914-10091984
  hypo

SEQ ID NO: 296479 - DNA, 43 bp, Homo sapiens; identical to SEQ ID NO: 206651
  chr1:10123669-10123712
  hypo

SEQ ID NO: 296480 - DNA, 82 bp, Homo sapiens; identical to SEQ ID NO: 206652
  chr1:10150449-10150531
  hypo

SEQ ID NO: 296481 - DNA, 219 bp, Homo sapiens
  chr1:10166302-10166521
  hypo
tcccgtgatgggcccgtctcttgcctcaccttcccgtgcagccagccagttggctgtgccttccactcccctcagtcctcacagtgcagcctctggaactgctgcgggaagccagccttcatccccgcggtatcgcccctacactgtcactcacccatgggcgtcctcaggcgtctccattctgtcgagctccccaagtccccctgccctcgccagtag

SEQ ID NO: 296482 - DNA, 64 bp, Homo sapiens
  chr1:10166627-10166691
  hypo
aggatctctcctaggtatttatcccacaggagagttgcatgtgtgtttgcggtgcagggaaagg

SEQ ID NO: 296483 - DNA, 360 bp, Homo sapiens; identical to SEQ ID NO: 206653
  chr1:10174923-10175283
  hypo

SEQ ID NO: 296484 - DNA, 104 bp, Homo sapiens; identical to SEQ ID NO: 247837
  chr1:10189656-10189760
  hypo

SEQ ID NO: 296485 - DNA, 120 bp, Homo sapiens; identical to SEQ ID NO: 247838
  chr1:10190000-10190120
  hypo

SEQ ID NO: 296486 - DNA, 164 bp, Homo sapiens; identical to SEQ ID NO: 247839
  chr1:10190420-10190584
  hypo

SEQ ID NO: 296487 - DNA, 213 bp, Homo sapiens; identical to SEQ ID NO: 247841
  chr1:10238658-10238871
  hypo

SEQ ID NO: 296488 - DNA, 175 bp, Homo sapiens; identical to SEQ ID NO: 197307
  chr1:10271266-10271441
  hypo

SEQ ID NO: 296489 - DNA, 43 bp, Homo sapiens; identical to SEQ ID NO: 247843
  chr1:10310921-10310964
  hypo

SEQ ID NO: 296490 - DNA, 52 bp, Homo sapiens; identical to SEQ ID NO: 247844
  chr1:10355725-10355777
  hypo

SEQ ID NO: 296491 - DNA, 385 bp, Homo sapiens; identical to SEQ ID NO: 206655
  chr1:10495105-10495490
  hypo

SEQ ID NO: 296492 - DNA, 113 bp, Homo sapiens; identical to SEQ ID NO: 247846
  chr1:10556160-10556273
  hypo

SEQ ID NO: 296493 - DNA, 109 bp, Homo sapiens; identical to SEQ ID NO: 247847
  chr1:10591535-10591644
  hypo

SEQ ID NO: 296494 - DNA, 123 bp, Homo sapiens; identical to SEQ ID NO: 247848
  chr1:10597301-10597424
  hypo

SEQ ID NO: 296495 - DNA, 199 bp, Homo sapiens; identical to SEQ ID NO: 206656
  chr1:10653908-10654107
  hypo

SEQ ID NO: 296496 - DNA, 90 bp, Homo sapiens; identical to SEQ ID NO: 206657
  chr1:10659098-10659188
  hypo

SEQ ID NO: 296497 - DNA, 365 bp, Homo sapiens; identical to SEQ ID NO: 247851
  chr1:10676484-10676849
  hypo

SEQ ID NO: 296498 - DNA, 406 bp, Homo sapiens; identical to SEQ ID NO: 206659
  chr1:10680890-10681296
  hypo

SEQ ID NO: 296499 - DNA, 85 bp, Homo sapiens; identical to SEQ ID NO: 206660
  chr1:10692421-10692506
  hypo

SEQ ID NO: 296500 - DNA, 194 bp, Homo sapiens; identical to SEQ ID NO: 206661
  chr1:10692785-10692979
  hypo

SEQ ID NO: 296501 - DNA, 173 bp, Homo sapiens; identical to SEQ ID NO: 206662
  chr1:10699817-10699990
  hypo

SEQ ID NO: 296502 - DNA, 263 bp, Homo sapiens; identical to SEQ ID NO: 206663
  chr1:10703773-10704036
  hypo

SEQ ID NO: 296503 - DNA, 227 bp, Homo sapiens; identical to SEQ ID NO: 247857
  chr1:10706750-10706977
  hypo

SEQ ID NO: 296504 - DNA, 423 bp, Homo sapiens; identical to SEQ ID NO: 247858
  chr1:10707636-10708059
  hypo

SEQ ID NO: 296505 - DNA, 309 bp, Homo sapiens; identical to SEQ ID NO: 206665
  chr1:10708278-10708587
  hypo

SEQ ID NO: 296506 - DNA, 86 bp, Homo sapiens; identical to SEQ ID NO: 247860
  chr1:10713572-10713658
  hypo

SEQ ID NO: 296507 - DNA, 146 bp, Homo sapiens; identical to SEQ ID NO: 247861
  chr1:10713965-10714111
  hypo

SEQ ID NO: 296508 - DNA, 186 bp, Homo sapiens; identical to SEQ ID NO: 206666
  chr1:10714453-10714639
  hypo

SEQ ID NO: 296509 - DNA, 224 bp, Homo sapiens; identical to SEQ ID NO: 247863
  chr1:10715676-10715900
  hypo

SEQ ID NO: 296510 - DNA, 149 bp, Homo sapiens; identical to SEQ ID NO: 206668
  chr1:10716607-10716756
  hypo

SEQ ID NO: 296511 - DNA, 1349 bp, Homo sapiens; identical to SEQ ID NO: 247865
  chr1:10719285-10720634
  hypo

SEQ ID NO: 296512 - DNA, 46 bp, Homo sapiens; identical to SEQ ID NO: 206671
  chr1:10725222-10725268
  hypo

SEQ ID NO: 296513 - DNA, 107 bp, Homo sapiens; identical to SEQ ID NO: 206672
  chr1:10725478-10725585
  hypo

SEQ ID NO: 296514 - DNA, 183 bp, Homo sapiens; identical to SEQ ID NO: 247868
  chr1:10729047-10729230
  hypo

SEQ ID NO: 296515 - DNA, 250 bp, Homo sapiens; identical to SEQ ID NO: 247869
  chr1:10741779-10742029
  hypo

SEQ ID NO: 296516 - DNA, 365 bp, Homo sapiens; identical to SEQ ID NO: 247870
  chr1:10757887-10758252
  hypo

SEQ ID NO: 296517 - DNA, 216 bp, Homo sapiens; identical to SEQ ID NO: 247871
  chr1:10765349-10765565
  hypo

SEQ ID NO: 296518 - DNA, 316 bp, Homo sapiens; identical to SEQ ID NO: 247872
  chr1:10765943-10766259
  hypo

SEQ ID NO: 296519 - DNA, 105 bp, Homo sapiens; identical to SEQ ID NO: 247873
  chr1:10775033-10775138
  hypo

SEQ ID NO: 296520 - DNA, 50 bp, Homo sapiens; identical to SEQ ID NO: 247874
  chr1:10775892-10775942
  hypo

SEQ ID NO: 296521 - DNA, 102 bp, Homo sapiens; identical to SEQ ID NO: 247875
  chr1:10779504-10779606
  hypo

SEQ ID NO: 296522 - DNA, 76 bp, Homo sapiens; identical to SEQ ID NO: 206674
  chr1:10780357-10780433
  hypo

SEQ ID NO: 296523 - DNA, 240 bp, Homo sapiens; identical to SEQ ID NO: 247877
  chr1:10782910-10783150
  hypo

SEQ ID NO: 296524 - DNA, 41 bp, Homo sapiens; identical to SEQ ID NO: 206675
  chr1:10810301-10810342
  hypo

SEQ ID NO: 296525 - DNA, 75 bp, Homo sapiens; identical to SEQ ID NO: 206676
  chr1:10815561-10815636
  hypo

SEQ ID NO: 296526 - DNA, 51 bp, Homo sapiens; identical to SEQ ID NO: 247880
  chr1:10819916-10819967
  hypo

SEQ ID NO: 296527 - DNA, 204 bp, Homo sapiens; identical to SEQ ID NO: 206677
  chr1:10823336-10823540
  hypo

SEQ ID NO: 296528 - DNA, 1216 bp, Homo sapiens; identical to SEQ ID NO: 197311
  chr1:10854661-10855877
  hypo

SEQ ID NO: 296529 - DNA, 612 bp, Homo sapiens; identical to SEQ ID NO: 197312
  chr1:10856315-10856927
  hypo

SEQ ID NO: 296530 - DNA, 254 bp, Homo sapiens; identical to SEQ ID NO: 247883
  chr1:10901208-10901462
  hypo

SEQ ID NO: 296531 - DNA, 211 bp, Homo sapiens; identical to SEQ ID NO: 206680
  chr1:10997239-10997450
  hypo

SEQ ID NO: 296532 - DNA, 363 bp, Homo sapiens; identical to SEQ ID NO: 247885
  chr1:11018648-11019011
  hypo

SEQ ID NO: 296533 - DNA, 280 bp, Homo sapiens; identical to SEQ ID NO: 247886
  chr1:11020521-11020801
  hypo

SEQ ID NO: 296534 - DNA, 38 bp, Homo sapiens; identical to SEQ ID NO: 247887
  chr1:11070724-11070762
  hypo

SEQ ID NO: 296535 - DNA, 139 bp, Homo sapiens
  chr1:11091175-11091314
  hypo
tggctgaactgagggggagtcgtccatgtggaggaagaggtgtgctgcctttcctagagaaagggaatttgaaaccacccagagctccttagcaccctcatgtcaaatataagaaagatctgcggccgggcgcgatggc

SEQ ID NO: 296536 - DNA, 180 bp, Homo sapiens; identical to SEQ ID NO: 247889
  chr1:11092943-11093123
  hypo

SEQ ID NO: 296537 - DNA, 69 bp, Homo sapiens; identical to SEQ ID NO: 247890
  chr1:11115037-11115106
  hypo

SEQ ID NO: 296538 - DNA, 43 bp, Homo sapiens; identical to SEQ ID NO: 247891
  chr1:11118320-11118363
  hypo

SEQ ID NO: 296539 - DNA, 376 bp, Homo sapiens; identical to SEQ ID NO: 206681
  chr1:11130959-11131335
  hypo

SEQ ID NO: 296540 - DNA, 176 bp, Homo sapiens
  chr1:11131899-11132075
  hypo
cattagactgccttctccaaccaccaacgagacagctacagcacctccagcactccccaccaatctctctgcacagcacctgctgccatctgccaggatagatactgattgcccaccatccctcagcagaagggaagccccacaggggcttcattcatcgccgtatctggcacttg

SEQ ID NO: 296541 - DNA, 53 bp, Homo sapiens
  chr1:11139801-11139854
  hypo
aaaaggtgcatttcgttgatctgctgccgcacaaggggcggtactgggttgca

SEQ ID NO: 296542 - DNA, 262 bp, Homo sapiens; identical to SEQ ID NO: 206682
  chr1:11140985-11141247
  hypo

SEQ ID NO: 296543 - DNA, 38 bp, Homo sapiens; identical to SEQ ID NO: 206683
  chr1:11141852-11141890
  hypo

SEQ ID NO: 296544 - DNA, 33 bp, Homo sapiens; identical to SEQ ID NO: 247897
  chr1:11178562-11178595
  hypo

SEQ ID NO: 296545 - DNA, 90 bp, Homo sapiens; identical to SEQ ID NO: 247898
  chr1:11236360-11236450
  hypo

SEQ ID NO: 296546 - DNA, 76 bp, Homo sapiens; identical to SEQ ID NO: 206684
  chr1:11264689-11264765
  hypo

SEQ ID NO: 296547 - DNA, 204 bp, Homo sapiens; identical to SEQ ID NO: 206685
  chr1:11308057-11308261
  hypo

SEQ ID NO: 296548 - DNA, 567 bp, Homo sapiens; identical to SEQ ID NO: 247901
  chr1:11313404-11313971
  hypo

SEQ ID NO: 296549 - DNA, 262 bp, Homo sapiens; identical to SEQ ID NO: 206687
  chr1:11315988-11316250
  hypo

SEQ ID NO: 296550 - DNA, 44 bp, Homo sapiens; identical to SEQ ID NO: 206688
  chr1:11323832-11323876
  hypo

SEQ ID NO: 296551 - DNA, 52 bp, Homo sapiens; identical to SEQ ID NO: 197314
  chr1:11538821-11538873
  hypo

SEQ ID NO: 296552 - DNA, 122 bp, Homo sapiens; identical to SEQ ID NO: 206690
  chr1:11596362-11596484
  hypo

SEQ ID NO: 296553 - DNA, 382 bp, Homo sapiens
  chr1:11596583-11596965
  hypo
gctgggcatcatggcgcccagctctttcactcggacccggacttccttcctcaaggccctgggtgccgtgctgctggcaggggccctggggctgggtgcctgcctcgtgctcctgcagagcggctataagattcccctgcccgcaggggcctccctatagcccgggacgggctctggacacttgcacctttggtcccatgggtgggggacaggagctgcttcccagctcgacttcagctagctgtgtccccaggcctgggcccagggcgccctgcgggccagcgtggaggctgacacccacacagatggtgtggaccatgctgccttgtggagctgggagttggagacagccgccaccccacaggccgggctactggcagcc

SEQ ID NO: 296554 - DNA, 73 bp, Homo sapiens; identical to SEQ ID NO: 206692
  chr1:11809703-11809776
  hypo

SEQ ID NO: 296555 - DNA, 148 bp, Homo sapiens; identical to SEQ ID NO: 247906
  chr1:11825794-11825942
  hypo

SEQ ID NO: 296556 - DNA, 76 bp, Homo sapiens; identical to SEQ ID NO: 247907
  chr1:11848614-11848690
  hypo

SEQ ID NO: 296557 - DNA, 136 bp, Homo sapiens; identical to SEQ ID NO: 247908
  chr1:11852475-11852611
  hypo

SEQ ID NO: 296558 - DNA, 244 bp, Homo sapiens; identical to SEQ ID NO: 206693
  chr1:11856146-11856390
  hypo

SEQ ID NO: 296559 - DNA, 265 bp, Homo sapiens; identical to SEQ ID NO: 206694
  chr1:11861112-11861377
  hypo

SEQ ID NO: 296560 - DNA, 333 bp, Homo sapiens; identical to SEQ ID NO: 247912
  chr1:11940052-11940385
  hypo

SEQ ID NO: 296561 - DNA, 137 bp, Homo sapiens; identical to SEQ ID NO: 247913
  chr1:11982508-11982645
  hypo

SEQ ID NO: 296562 - DNA, 342 bp, Homo sapiens; identical to SEQ ID NO: 247914
  chr1:12004452-12004794
  hypo

SEQ ID NO: 296563 - DNA, 157 bp, Homo sapiens; identical to SEQ ID NO: 247915
  chr1:12030699-12030856
  hypo

SEQ ID NO: 296564 - DNA, 143 bp, Homo sapiens; identical to SEQ ID NO: 206695
  chr1:12041765-12041908
  hypo

SEQ ID NO: 296565 - DNA, 42 bp, Homo sapiens; identical to SEQ ID NO: 206696
  chr1:12075718-12075760
  hypo

SEQ ID NO: 296566 - DNA, 99 bp, Homo sapiens; identical to SEQ ID NO: 206697
  chr1:12078706-12078805
  hypo

SEQ ID NO: 296567 - DNA, 66 bp, Homo sapiens; identical to SEQ ID NO: 197322
  chr1:12123950-12124016
  hypo

SEQ ID NO: 296568 - DNA, 33 bp, Homo sapiens; identical to SEQ ID NO: 247919
  chr1:12183828-12183861
  hypo

SEQ ID NO: 296569 - DNA, 42 bp, Homo sapiens; identical to SEQ ID NO: 206699
  chr1:12188609-12188651
  hypo

SEQ ID NO: 296570 - DNA, 174 bp, Homo sapiens; identical to SEQ ID NO: 247921
  chr1:12194139-12194313
  hypo

SEQ ID NO: 296571 - DNA, 75 bp, Homo sapiens; identical to SEQ ID NO: 247922
  chr1:12205428-12205503
  hypo

SEQ ID NO: 296572 - DNA, 142 bp, Homo sapiens; identical to SEQ ID NO: 247923
  chr1:12218910-12219052
  hypo

SEQ ID NO: 296573 - DNA, 518 bp, Homo sapiens; identical to SEQ ID NO: 197323
  chr1:12226890-12227408
  hypo

SEQ ID NO: 296574 - DNA, 206 bp, Homo sapiens; identical to SEQ ID NO: 197324
  chr1:12227438-12227644
  hypo

SEQ ID NO: 296575 - DNA, 170 bp, Homo sapiens; identical to SEQ ID NO: 247924
  chr1:12241595-12241765
  hypo

SEQ ID NO: 296576 - DNA, 114 bp, Homo sapiens; identical to SEQ ID NO: 206702
  chr1:12251958-12252072
  hypo

SEQ ID NO: 296577 - DNA, 215 bp, Homo sapiens; identical to SEQ ID NO: 247926
  chr1:12252961-12253176
  hypo

SEQ ID NO: 296578 - DNA, 373 bp, Homo sapiens; identical to SEQ ID NO: 247927
  chr1:12260317-12260690
  hypo

SEQ ID NO: 296579 - DNA, 37 bp, Homo sapiens; identical to SEQ ID NO: 206703
  chr1:12267963-12268000
  hypo

SEQ ID NO: 296580 - DNA, 218 bp, Homo sapiens; identical to SEQ ID NO: 247929
  chr1:12285722-12285940
  hypo

SEQ ID NO: 296581 - DNA, 253 bp, Homo sapiens; identical to SEQ ID NO: 206704
  chr1:12304438-12304691
  hypo

SEQ ID NO: 296582 - DNA, 90 bp, Homo sapiens; identical to SEQ ID NO: 247931
  chr1:12333008-12333098
  hypo

SEQ ID NO: 296583 - DNA, 71 bp, Homo sapiens; identical to SEQ ID NO: 247932
  chr1:12368222-12368293
  hypo

SEQ ID NO: 296584 - DNA, 212 bp, Homo sapiens; identical to SEQ ID NO: 247933
  chr1:12368504-12368716
  hypo

SEQ ID NO: 296585 - DNA, 31 bp, Homo sapiens; identical to SEQ ID NO: 247934
  chr1:12440114-12440145
  hypo

SEQ ID NO: 296586 - DNA, 166 bp, Homo sapiens; identical to SEQ ID NO: 206705
  chr1:12460133-12460299
  hypo

SEQ ID NO: 296587 - DNA, 46 bp, Homo sapiens; identical to SEQ ID NO: 247936
  chr1:12510816-12510862
  hypo

SEQ ID NO: 296588 - DNA, 106 bp, Homo sapiens; identical to SEQ ID NO: 206706
  chr1:12565969-12566075
  hypo

SEQ ID NO: 296589 - DNA, 65 bp, Homo sapiens; identical to SEQ ID NO: 247938
  chr1:12567168-12567233
  hypo

SEQ ID NO: 296590 - DNA, 215 bp, Homo sapiens; identical to SEQ ID NO: 247939
  chr1:12573215-12573430
  hypo

SEQ ID NO: 296591 - DNA, 165 bp, Homo sapiens; identical to SEQ ID NO: 206707
  chr1:12607962-12608127
  hypo

SEQ ID NO: 296592 - DNA, 83 bp, Homo sapiens; identical to SEQ ID NO: 247941
  chr1:12628466-12628549
  hypo

SEQ ID NO: 296593 - DNA, 35 bp, Homo sapiens; identical to SEQ ID NO: 206708
  chr1:12629954-12629989
  hypo

SEQ ID NO: 296594 - DNA, 214 bp, Homo sapiens; identical to SEQ ID NO: 206709
  chr1:12630200-12630414
  hypo

SEQ ID NO: 296595 - DNA, 343 bp, Homo sapiens; identical to SEQ ID NO: 247944
  chr1:12638789-12639132
  hypo

SEQ ID NO: 296596 - DNA, 35 bp, Homo sapiens; identical to SEQ ID NO: 247945
  chr1:12639822-12639857
  hypo

SEQ ID NO: 296597 - DNA, 173 bp, Homo sapiens; identical to SEQ ID NO: 206710
  chr1:12663579-12663752
  hypo

SEQ ID NO: 296598 - DNA, 191 bp, Homo sapiens; identical to SEQ ID NO: 206711
  chr1:12711251-12711442
  hypo

SEQ ID NO: 296599 - DNA, 264 bp, Homo sapiens; identical to SEQ ID NO: 197328
  chr1:13840257-13840521
  hypo

SEQ ID NO: 296600 - DNA, 78 bp, Homo sapiens; identical to SEQ ID NO: 247948
  chr1:13852559-13852637
  hypo

SEQ ID NO: 296601 - DNA, 224 bp, Homo sapiens; identical to SEQ ID NO: 247949
  chr1:13881447-13881671
  hypo

SEQ ID NO: 296602 - DNA, 38 bp, Homo sapiens; identical to SEQ ID NO: 247950
  chr1:13937414-13937452
  hypo

SEQ ID NO: 296603 - DNA, 32 bp, Homo sapiens; identical to SEQ ID NO: 206714
  chr1:13952169-13952201
  hypo

SEQ ID NO: 296604 - DNA, 31 bp, Homo sapiens; identical to SEQ ID NO: 247952
  chr1:13952441-13952472
  hypo

SEQ ID NO: 296605 - DNA, 115 bp, Homo sapiens; identical to SEQ ID NO: 247953
  chr1:14021890-14022005
  hypo

SEQ ID NO: 296606 - DNA, 120 bp, Homo sapiens; identical to SEQ ID NO: 247954
  chr1:14025409-14025529
  hypo

SEQ ID NO: 296607 - DNA, 223 bp, Homo sapiens; identical to SEQ ID NO: 247955
  chr1:14087920-14088143
  hypo

SEQ ID NO: 296608 - DNA, 130 bp, Homo sapiens; identical to SEQ ID NO: 247956
  chr1:14105492-14105622
  hypo

SEQ ID NO: 296609 - DNA, 149 bp, Homo sapiens; identical to SEQ ID NO: 247957
  chr1:14114662-14114811
  hypo

SEQ ID NO: 296610 - DNA, 194 bp, Homo sapiens; identical to SEQ ID NO: 206715
  chr1:14121945-14122139
  hypo

SEQ ID NO: 296611 - DNA, 91 bp, Homo sapiens
  chr1:14125477-14125568
  hypo
agatttctccttcaccgtggtgagtcagagctgctgggtaatgtgacttagtcagctggatcaaagggtaacaaacacaagcactccaggc

SEQ ID NO: 296612 - DNA, 56 bp, Homo sapiens
  chr1:14125622-14125678
  hypo
tgcctaaggaagaacagagaattaagaattgtgaggccgggcgcggtggctcacgc

SEQ ID NO: 296613 - DNA, 120 bp, Homo sapiens; identical to SEQ ID NO: 206716
  chr1:14746304-14746424
  hypo

SEQ ID NO: 296614 - DNA, 299 bp, Homo sapiens; identical to SEQ ID NO: 247963
  chr1:15042013-15042312
  hypo

SEQ ID NO: 296615 - DNA, 31 bp, Homo sapiens; identical to SEQ ID NO: 247964
  chr1:15095851-15095882
  hypo

SEQ ID NO: 296616 - DNA, 154 bp, Homo sapiens; identical to SEQ ID NO: 247965
  chr1:15102332-15102486
  hypo

SEQ ID NO: 296617 - DNA, 90 bp, Homo sapiens; identical to SEQ ID NO: 206717
  chr1:15107455-15107545
  hypo

SEQ ID NO: 296618 - DNA, 108 bp, Homo sapiens; identical to SEQ ID NO: 206718
  chr1:15110198-15110306
  hypo

SEQ ID NO: 296619 - DNA, 35 bp, Homo sapiens; identical to SEQ ID NO: 247968
  chr1:15127830-15127865
  hypo

SEQ ID NO: 296620 - DNA, 77 bp, Homo sapiens
  chr1:15128488-15128565
  hypo
aactttttctctgcgctgaagagagctgtcctctgagcccttcctctgtcatgccctgctttttagaatgatctcgt

SEQ ID NO: 296621 - DNA, 210 bp, Homo sapiens; identical to SEQ ID NO: 206719
  chr1:15129598-15129808
  hypo

SEQ ID NO: 296622 - DNA, 86 bp, Homo sapiens
  chr1:15149165-15149251
  hypo
acagcgggtcctgacgtaggatgccccagtggccttctctggaggctccgtcgtgttccggcatctggtctatcccgtctttcctt

SEQ ID NO: 296623 - DNA, 160 bp, Homo sapiens; identical to SEQ ID NO: 247972
  chr1:15149510-15149670
  hypo

SEQ ID NO: 296624 - DNA, 187 bp, Homo sapiens; identical to SEQ ID NO: 206720
  chr1:15151515-15151702
  hypo

SEQ ID NO: 296625 - DNA, 208 bp, Homo sapiens; identical to SEQ ID NO: 247974
  chr1:15178286-15178494
  hypo

SEQ ID NO: 296626 - DNA, 337 bp, Homo sapiens; identical to SEQ ID NO: 206721
  chr1:15194448-15194785
  hypo

SEQ ID NO: 296627 - DNA, 244 bp, Homo sapiens; identical to SEQ ID NO: 247976
  chr1:15262964-15263208
  hypo

SEQ ID NO: 296628 - DNA, 261 bp, Homo sapiens; identical to SEQ ID NO: 206722
  chr1:15283870-15284131
  hypo

SEQ ID NO: 296629 - DNA, 35 bp, Homo sapiens; identical to SEQ ID NO: 247978
  chr1:15344012-15344047
  hypo

SEQ ID NO: 296630 - DNA, 137 bp, Homo sapiens; identical to SEQ ID NO: 247979
  chr1:15356675-15356812
  hypo

SEQ ID NO: 296631 - DNA, 403 bp, Homo sapiens; identical to SEQ ID NO: 206723
  chr1:15374955-15375358
  hypo

SEQ ID NO: 296632 - DNA, 152 bp, Homo sapiens; identical to SEQ ID NO: 247981
  chr1:15397055-15397207
  hypo

SEQ ID NO: 296633 - DNA, 42 bp, Homo sapiens; identical to SEQ ID NO: 247982
  chr1:15524065-15524107
  hypo

SEQ ID NO: 296634 - DNA, 494 bp, Homo sapiens; identical to SEQ ID NO: 247983
  chr1:15541161-15541655
  hypo

SEQ ID NO: 296635 - DNA, 236 bp, Homo sapiens; identical to SEQ ID NO: 247984
  chr1:15556611-15556847
  hypo

SEQ ID NO: 296636 - DNA, 35 bp, Homo sapiens; identical to SEQ ID NO: 247985
  chr1:15751733-15751768
  hypo

SEQ ID NO: 296637 - DNA, 118 bp, Homo sapiens; identical to SEQ ID NO: 247986
  chr1:15755172-15755290
  hypo

SEQ ID NO: 296638 - DNA, 300 bp, Homo sapiens; identical to SEQ ID NO: 247987
  chr1:15836139-15836439
  hypo

SEQ ID NO: 296639 - DNA, 242 bp, Homo sapiens; identical to SEQ ID NO: 247988
  chr1:15844705-15844947
  hypo

SEQ ID NO: 296640 - DNA, 92 bp, Homo sapiens; identical to SEQ ID NO: 247989
  chr1:15885334-15885426
  hypo

SEQ ID NO: 296641 - DNA, 155 bp, Homo sapiens; identical to SEQ ID NO: 206725
  chr1:15892452-15892607
  hypo

SEQ ID NO: 296642 - DNA, 88 bp, Homo sapiens; identical to SEQ ID NO: 247991
  chr1:15904689-15904777
  hypo

SEQ ID NO: 296643 - DNA, 151 bp, Homo sapiens; identical to SEQ ID NO: 277993
  chr1:15905373-15905524
  hypo

SEQ ID NO: 296644 - DNA, 213 bp, Homo sapiens; identical to SEQ ID NO: 247993
  chr1:15919084-15919297
  hypo

SEQ ID NO: 296645 - DNA, 75 bp, Homo sapiens; identical to SEQ ID NO: 277994
  chr1:15928914-15928989
  hypo

SEQ ID NO: 296646 - DNA, 208 bp, Homo sapiens; identical to SEQ ID NO: 277995
  chr1:15929019-15929227
  hypo

SEQ ID NO: 296647 - DNA, 104 bp, Homo sapiens; identical to SEQ ID NO: 206727
  chr1:15930726-15930830
  hypo

SEQ ID NO: 296648 - DNA, 52 bp, Homo sapiens
  chr1:16049774-16049826
  hypo
gcaggagcctgctttgggaccgagagacgcggttttctgtatcttagaactt

SEQ ID NO: 296649 - DNA, 156 bp, Homo sapiens; identical to SEQ ID NO: 206728
  chr1:16053711-16053867
  hypo

SEQ ID NO: 296650 - DNA, 96 bp, Homo sapiens; identical to SEQ ID NO: 247998
  chr1:16058408-16058504
  hypo

SEQ ID NO: 296651 - DNA, 134 bp, Homo sapiens
  chr1:16058893-16059027
  hypo
tcctcacggatgaccgcctctttacgtgccatgaggattgccagaccagcttcttccgctctttgggcacagccaagctgggcgacatcagcgccgtctccaccgagccgggcaaggagtactgcgtcttggtg

SEQ ID NO: 296652 - DNA, 124 bp, Homo sapiens; identical to SEQ ID NO: 248001
  chr1:16092326-16092450
  hypo

SEQ ID NO: 296653 - DNA, 120 bp, Homo sapiens; identical to SEQ ID NO: 206729
  chr1:16101036-16101156
  hypo

SEQ ID NO: 296654 - DNA, 34 bp, Homo sapiens; identical to SEQ ID NO: 248003
  chr1:16138131-16138165
  hypo

SEQ ID NO: 296655 - DNA, 85 bp, Homo sapiens; identical to SEQ ID NO: 206730
  chr1:16165179-16165264
  hypo

SEQ ID NO: 296656 - DNA, 40 bp, Homo sapiens; identical to SEQ ID NO: 248005
  chr1:16250432-16250472
  hypo

SEQ ID NO: 296657 - DNA, 425 bp, Homo sapiens; identical to SEQ ID NO: 248006
  chr1:16254608-16255033
  hypo

SEQ ID NO: 296658 - DNA, 223 bp, Homo sapiens; identical to SEQ ID NO: 248007
  chr1:16259177-16259400
  hypo

SEQ ID NO: 296659 - DNA, 42 bp, Homo sapiens; identical to SEQ ID NO: 248008
  chr1:16264532-16264574
  hypo

SEQ ID NO: 296660 - DNA, 131 bp, Homo sapiens; identical to SEQ ID NO: 248009
  chr1:16270113-16270244
  hypo

SEQ ID NO: 296661 - DNA, 206 bp, Homo sapiens; identical to SEQ ID NO: 248010
  chr1:16272642-16272848
  hypo

SEQ ID NO: 296662 - DNA, 698 bp, Homo sapiens; identical to SEQ ID NO: 206731
  chr1:16273064-16273762
  hypo

SEQ ID NO: 296663 - DNA, 378 bp, Homo sapiens; identical to SEQ ID NO: 206732
  chr1:16274647-16275025
  hypo

SEQ ID NO: 296664 - DNA, 63 bp, Homo sapiens; identical to SEQ ID NO: 248013
  chr1:16276737-16276800
  hypo

SEQ ID NO: 296665 - DNA, 219 bp, Homo sapiens; identical to SEQ ID NO: 206733
  chr1:16283816-16284035
  hypo

SEQ ID NO: 296666 - DNA, 156 bp, Homo sapiens; identical to SEQ ID NO: 248015
  chr1:16314583-16314739
  hypo

SEQ ID NO: 296667 - DNA, 148 bp, Homo sapiens; identical to SEQ ID NO: 206734
  chr1:16457640-16457788
  hypo

SEQ ID NO: 296668 - DNA, 56 bp, Homo sapiens; identical to SEQ ID NO: 206735
  chr1:16458832-16458888
  hypo

SEQ ID NO: 296669 - DNA, 514 bp, Homo sapiens; identical to SEQ ID NO: 206736
  chr1:16464269-16464783
  hypo

SEQ ID NO: 296670 - DNA, 102 bp, Homo sapiens; identical to SEQ ID NO: 206737
  chr1:16466891-16466993
  hypo

SEQ ID NO: 296671 - DNA, 189 bp, Homo sapiens; identical to SEQ ID NO: 206738
  chr1:16474842-16475031
  hypo

SEQ ID NO: 296672 - DNA, 96 bp, Homo sapiens; identical to SEQ ID NO: 206739
  chr1:16475432-16475528
  hypo

SEQ ID NO: 296673 - DNA, 1218 bp, Homo sapiens; identical to SEQ ID NO: 278002
  chr1:16481258-16482476
  hypo

SEQ ID NO: 296674 - DNA, 251 bp, Homo sapiens; identical to SEQ ID NO: 197343
  chr1:16482544-16482795
  hypo

SEQ ID NO: 296675 - DNA, 39 bp, Homo sapiens; identical to SEQ ID NO: 248021
  chr1:16485264-16485303
  hypo

SEQ ID NO: 296676 - DNA, 79 bp, Homo sapiens; identical to SEQ ID NO: 248022
  chr1:16509214-16509293
  hypo

SEQ ID NO: 296677 - DNA, 189 bp, Homo sapiens
  chr1:16534317-16534506
  hypo
tggggcctgggccccggcccaggcaccctgacggcctcaggcggccggtgagtgggcatcgcccacccccacccccacccggcatctggctgccctcagggcccatgggaggagctggtaccttcccgggctgctccggtgcctgacccagagatgagtgcccgggctgctgaattccgccccaggcgc

SEQ ID NO: 296678 - DNA, 92 bp, Homo sapiens
  chr1:16535205-16535297
  hypo
ccctccagagctgggggctgggcaccaggacagtgtggccagctgccagccctgctgggccgcatccccccgctggtgatctctgtatctga

SEQ ID NO: 296679 - DNA, 127 bp, Homo sapiens; identical to SEQ ID NO: 221244
  chr1:16558626-16558753
  hypo

SEQ ID NO: 296680 - DNA, 54 bp, Homo sapiens; identical to SEQ ID NO: 206742
  chr1:16567830-16567884
  hypo

SEQ ID NO: 296681 - DNA, 274 bp, Homo sapiens; identical to SEQ ID NO: 248026
  chr1:16577954-16578228
  hypo

SEQ ID NO: 296682 - DNA, 32 bp, Homo sapiens; identical to SEQ ID NO: 206743
  chr1:16624057-16624089
  hypo

SEQ ID NO: 296683 - DNA, 360 bp, Homo sapiens; identical to SEQ ID NO: 248028
  chr1:16640766-16641126
  hypo

SEQ ID NO: 296684 - DNA, 37 bp, Homo sapiens; identical to SEQ ID NO: 248029
  chr1:16676066-16676103
  hypo

SEQ ID NO: 296685 - DNA, 33 bp, Homo sapiens; identical to SEQ ID NO: 248030
  chr1:16689684-16689717
  hypo

SEQ ID NO: 296686 - DNA, 86 bp, Homo sapiens; identical to SEQ ID NO: 248031
  chr1:16782820-16782906
  hypo

SEQ ID NO: 296687 - DNA, 135 bp, Homo sapiens; identical to SEQ ID NO: 206744
  chr1:16810656-16810791
  hypo

SEQ ID NO: 296688 - DNA, 329 bp, Homo sapiens; identical to SEQ ID NO: 248033
  chr1:16943749-16944078
  hypo

SEQ ID NO: 296689 - DNA, 35 bp, Homo sapiens; identical to SEQ ID NO: 206745
  chr1:16957469-16957504
  hypo

SEQ ID NO: 296690 - DNA, 137 bp, Homo sapiens; identical to SEQ ID NO: 248035
  chr1:17256389-17256526
  hypo

SEQ ID NO: 296691 - DNA, 152 bp, Homo sapiens; identical to SEQ ID NO: 248036
  chr1:17256874-17257026
  hypo

SEQ ID NO: 296692 - DNA, 44 bp, Homo sapiens; identical to SEQ ID NO: 206746
  chr1:17270869-17270913
  hypo

SEQ ID NO: 296693 - DNA, 138 bp, Homo sapiens; identical to SEQ ID NO: 248038
  chr1:17280804-17280942
  hypo

SEQ ID NO: 296694 - DNA, 215 bp, Homo sapiens; identical to SEQ ID NO: 248039
  chr1:17292894-17293109
  hypo

SEQ ID NO: 296695 - DNA, 49 bp, Homo sapiens; identical to SEQ ID NO: 248040
  chr1:17294738-17294787
  hypo

SEQ ID NO: 296696 - DNA, 37 bp, Homo sapiens; identical to SEQ ID NO: 206747
  chr1:17330879-17330916
  hypo

SEQ ID NO: 296697 - DNA, 146 bp, Homo sapiens; identical to SEQ ID NO: 248042
  chr1:17331872-17332018
  hypo

SEQ ID NO: 296698 - DNA, 81 bp, Homo sapiens; identical to SEQ ID NO: 248043
  chr1:17384527-17384608
  hypo

SEQ ID NO: 296699 - DNA, 341 bp, Homo sapiens; identical to SEQ ID NO: 248044
  chr1:17431216-17431557
  hypo

SEQ ID NO: 296700 - DNA, 95 bp, Homo sapiens; identical to SEQ ID NO: 248045
  chr1:17574315-17574410
  hypo

SEQ ID NO: 296701 - DNA, 145 bp, Homo sapiens; identical to SEQ ID NO: 248046
  chr1:17575586-17575731
  hypo

SEQ ID NO: 296702 - DNA, 208 bp, Homo sapiens; identical to SEQ ID NO: 197347
  chr1:17591036-17591244
  hypo

SEQ ID NO: 296703 - DNA, 60 bp, Homo sapiens; identical to SEQ ID NO: 248047
  chr1:17631994-17632054
  hypo

SEQ ID NO: 296704 - DNA, 114 bp, Homo sapiens; identical to SEQ ID NO: 248048
  chr1:17674435-17674549
  hypo

SEQ ID NO: 296705 - DNA, 200 bp, Homo sapiens; identical to SEQ ID NO: 248049
  chr1:17702234-17702434
  hypo

SEQ ID NO: 296706 - DNA, 324 bp, Homo sapiens; identical to SEQ ID NO: 248050
  chr1:17733440-17733764
  hypo

SEQ ID NO: 296707 - DNA, 44 bp, Homo sapiens; identical to SEQ ID NO: 206749
  chr1:17734378-17734422
  hypo

SEQ ID NO: 296708 - DNA, 505 bp, Homo sapiens; identical to SEQ ID NO: 206750
  chr1:17736189-17736694
  hypo

SEQ ID NO: 296709 - DNA, 252 bp, Homo sapiens; identical to SEQ ID NO: 248053
  chr1:17738623-17738875
  hypo

SEQ ID NO: 296710 - DNA, 454 bp, Homo sapiens; identical to SEQ ID NO: 248054
  chr1:17813199-17813653
  hypo

SEQ ID NO: 296711 - DNA, 731 bp, Homo sapiens; identical to SEQ ID NO: 197348
  chr1:17865970-17866701
  hypo

SEQ ID NO: 296712 - DNA, 130 bp, Homo sapiens; identical to SEQ ID NO: 206752
  chr1:17897819-17897949
  hypo

SEQ ID NO: 296713 - DNA, 230 bp, Homo sapiens; identical to SEQ ID NO: 248056
  chr1:17898658-17898888
  hypo

SEQ ID NO: 296714 - DNA, 213 bp, Homo sapiens; identical to SEQ ID NO: 248057
  chr1:17919150-17919363
  hypo

SEQ ID NO: 296715 - DNA, 121 bp, Homo sapiens; identical to SEQ ID NO: 248058
  chr1:17925973-17926094
  hypo

SEQ ID NO: 296716 - DNA, 41 bp, Homo sapiens; identical to SEQ ID NO: 248059
  chr1:17933052-17933093
  hypo

SEQ ID NO: 296717 - DNA, 51 bp, Homo sapiens; identical to SEQ ID NO: 206754
  chr1:17934561-17934612
  hypo

SEQ ID NO: 296718 - DNA, 225 bp, Homo sapiens; identical to SEQ ID NO: 248061
  chr1:17949438-17949663
  hypo

SEQ ID NO: 296719 - DNA, 169 bp, Homo sapiens; identical to SEQ ID NO: 248062
  chr1:17972154-17972323
  hypo

SEQ ID NO: 296720 - DNA, 225 bp, Homo sapiens; identical to SEQ ID NO: 248063
  chr1:17994585-17994810
  hypo

SEQ ID NO: 296721 - DNA, 67 bp, Homo sapiens; identical to SEQ ID NO: 206756
  chr1:17996867-17996934
  hypo

SEQ ID NO: 296722 - DNA, 35 bp, Homo sapiens; identical to SEQ ID NO: 206757
  chr1:17997213-17997248
  hypo

SEQ ID NO: 296723 - DNA, 262 bp, Homo sapiens; identical to SEQ ID NO: 248066
  chr1:18006381-18006643
  hypo

SEQ ID NO: 296724 - DNA, 56 bp, Homo sapiens; identical to SEQ ID NO: 206758
  chr1:18021388-18021444
  hypo

SEQ ID NO: 296725 - DNA, 338 bp, Homo sapiens; identical to SEQ ID NO: 206759
  chr1:18023466-18023804
  hypo

SEQ ID NO: 296726 - DNA, 261 bp, Homo sapiens; identical to SEQ ID NO: 248069
  chr1:18026183-18026444
  hypo

SEQ ID NO: 296727 - DNA, 35 bp, Homo sapiens; identical to SEQ ID NO: 248070
  chr1:18044920-18044955
  hypo

SEQ ID NO: 296728 - DNA, 217 bp, Homo sapiens; identical to SEQ ID NO: 278016
  chr1:18434092-18434309
  hypo

SEQ ID NO: 296729 - DNA, 34 bp, Homo sapiens; identical to SEQ ID NO: 197350
  chr1:18434816-18434850
  hypo

SEQ ID NO: 296730 - DNA, 91 bp, Homo sapiens; identical to SEQ ID NO: 248071
  chr1:18606300-18606391
  hypo

SEQ ID NO: 296731 - DNA, 753 bp, Homo sapiens; identical to SEQ ID NO: 278025
  chr1:18967250-18968003
  hypo

SEQ ID NO: 296732 - DNA, 131 bp, Homo sapiens; identical to SEQ ID NO: 206762
  chr1:19203883-19204014
  hypo

SEQ ID NO: 296733 - DNA, 379 bp, Homo sapiens; identical to SEQ ID NO: 206763
  chr1:19208520-19208899
  hypo

SEQ ID NO: 296734 - DNA, 137 bp, Homo sapiens; identical to SEQ ID NO: 248074
  chr1:19217051-19217188
  hypo

SEQ ID NO: 296735 - DNA, 143 bp, Homo sapiens; identical to SEQ ID NO: 206764
  chr1:19245955-19246098
  hypo

SEQ ID NO: 296736 - DNA, 107 bp, Homo sapiens; identical to SEQ ID NO: 248076
  chr1:19246819-19246926
  hypo

SEQ ID NO: 296737 - DNA, 361 bp, Homo sapiens; identical to SEQ ID NO: 248077
  chr1:19258523-19258884
  hypo

SEQ ID NO: 296738 - DNA, 57 bp, Homo sapiens; identical to SEQ ID NO: 248078
  chr1:19403632-19403689
  hypo

SEQ ID NO: 296739 - DNA, 194 bp, Homo sapiens; identical to SEQ ID NO: 248079
  chr1:19426355-19426549
  hypo

SEQ ID NO: 296740 - DNA, 152 bp, Homo sapiens; identical to SEQ ID NO: 248080
  chr1:19436864-19437016
  hypo

SEQ ID NO: 296741 - DNA, 54 bp, Homo sapiens; identical to SEQ ID NO: 248081
  chr1:19449490-19449544
  hypo

SEQ ID NO: 296742 - DNA, 232 bp, Homo sapiens; identical to SEQ ID NO: 248082
  chr1:19491254-19491486
  hypo

SEQ ID NO: 296743 - DNA, 54 bp, Homo sapiens; identical to SEQ ID NO: 248083
  chr1:19517994-19518048
  hypo

SEQ ID NO: 296744 - DNA, 325 bp, Homo sapiens; identical to SEQ ID NO: 197362
  chr1:19639187-19639512
  hypo

SEQ ID NO: 296745 - DNA, 241 bp, Homo sapiens; identical to SEQ ID NO: 248084
  chr1:19659425-19659666
  hypo

SEQ ID NO: 296746 - DNA, 342 bp, Homo sapiens
  chr1:19676377-19676719
  hypo
ggtcagggtcggctcggtggcaataccaacccaccaaaaacagaaccatttgtgcactgcatatattattacatccttataaaagtggctgccggaaggaaaacattttcatgtgttgtggctgcagatgttccacgaggtggttccaatggcgtctgaagccggagcctggcccgtgtgtccccagcaggcgcctctcctcctccccatggccctaacacaggcaagtgtttggaagctggcagcctttcccccagaggggatgtattacacctcccactgccacgtggcatcttctagcgcgacccgcagggcgtggccctaaggcatgggccccactca

SEQ ID NO: 296747 - DNA, 72 bp, Homo sapiens; identical to SEQ ID NO: 206767
  chr1:19676822-19676894
  hypo

SEQ ID NO: 296748 - DNA, 31 bp, Homo sapiens; identical to SEQ ID NO: 206768
  chr1:19680339-19680370
  hypo

SEQ ID NO: 296749 - DNA, 341 bp, Homo sapiens; identical to SEQ ID NO: 248088
  chr1:19687681-19688022
  hypo

SEQ ID NO: 296750 - DNA, 357 bp, Homo sapiens; identical to SEQ ID NO: 248089
  chr1:19705019-19705376
  hypo

SEQ ID NO: 296751 - DNA, 304 bp, Homo sapiens; identical to SEQ ID NO: 248090
  chr1:19711506-19711810
  hypo

SEQ ID NO: 296752 - DNA, 146 bp, Homo sapiens; identical to SEQ ID NO: 248091
  chr1:19720385-19720531
  hypo

SEQ ID NO: 296753 - DNA, 72 bp, Homo sapiens; identical to SEQ ID NO: 206769
  chr1:19721243-19721315
  hypo

SEQ ID NO: 296754 - DNA, 139 bp, Homo sapiens; identical to SEQ ID NO: 248093
  chr1:19767162-19767301
  hypo

SEQ ID NO: 296755 - DNA, 106 bp, Homo sapiens; identical to SEQ ID NO: 248094
  chr1:19774209-19774315
  hypo

SEQ ID NO: 296756 - DNA, 284 bp, Homo sapiens; identical to SEQ ID NO: 221254
  chr1:19991372-19991656
  hypo

SEQ ID NO: 296757 - DNA, 388 bp, Homo sapiens; identical to SEQ ID NO: 206770
  chr1:20060808-20061196
  hypo

SEQ ID NO: 296758 - DNA, 224 bp, Homo sapiens; identical to SEQ ID NO: 248099
  chr1:20070441-20070665
  hypo

SEQ ID NO: 296759 - DNA, 156 bp, Homo sapiens; identical to SEQ ID NO: 248100
  chr1:20090954-20091110
  hypo

SEQ ID NO: 296760 - DNA, 31 bp, Homo sapiens; identical to SEQ ID NO: 248101
  chr1:20097098-20097129
  hypo

SEQ ID NO: 296761 - DNA, 39 bp, Homo sapiens; identical to SEQ ID NO: 248102
  chr1:20110731-20110770
  hypo

SEQ ID NO: 296762 - DNA, 68 bp, Homo sapiens; identical to SEQ ID NO: 206771
  chr1:20127471-20127539
  hypo

SEQ ID NO: 296763 - DNA, 205 bp, Homo sapiens; identical to SEQ ID NO: 248104
  chr1:20204369-20204574
  hypo

SEQ ID NO: 296764 - DNA, 98 bp, Homo sapiens; identical to SEQ ID NO: 248105
  chr1:20205020-20205118
  hypo

SEQ ID NO: 296765 - DNA, 116 bp, Homo sapiens
  chr1:20205178-20205294
  hypo
actatctgcctacgcgatttcttcttaactcctgtatcacttttgctttgcaataaacttctttgcctgctctttggagtactttggactcactctcaaattcttttacgtggcta

SEQ ID NO: 296766 - DNA, 274 bp, Homo sapiens
  chr1:20205324-20205598
  hypo
cacttggacataccttctagtgcacgtgcatgtaatttgctttaggactatctgcgtctgagagtgtacttttgaaggagctacattgtccggagtatataccctggggttcatcgtcttgcacgaggaaaatttagaatacggatacacacgaggagtttaggaggagatgtaatatttctatttttaggatagatcacgagatgtagacactagacatttaaaatgttaccagatacaggccaggtgcagtggttcatgcctctaatcccag

SEQ ID NO: 296767 - DNA, 44 bp, Homo sapiens; identical to SEQ ID NO: 248107
  chr1:20210240-20210284
  hypo

SEQ ID NO: 296768 - DNA, 152 bp, Homo sapiens; identical to SEQ ID NO: 248108
  chr1:20214381-20214533
  hypo

SEQ ID NO: 296769 - DNA, 289 bp, Homo sapiens; identical to SEQ ID NO: 206772
  chr1:20230247-20230536
  hypo

SEQ ID NO: 296770 - DNA, 118 bp, Homo sapiens; identical to SEQ ID NO: 248110
  chr1:20247673-20247791
  hypo

SEQ ID NO: 296771 - DNA, 199 bp, Homo sapiens; identical to SEQ ID NO: 206773
  chr1:20554750-20554949
  hypo

SEQ ID NO: 296772 - DNA, 34 bp, Homo sapiens; identical to SEQ ID NO: 206774
  chr1:20680360-20680394
  hypo

SEQ ID NO: 296773 - DNA, 140 bp, Homo sapiens; identical to SEQ ID NO: 197371
  chr1:20812696-20812836
  hypo

SEQ ID NO: 296774 - DNA, 178 bp, Homo sapiens; identical to SEQ ID NO: 197374
  chr1:20878727-20878905
  hypo

SEQ ID NO: 296775 - DNA, 34 bp, Homo sapiens; identical to SEQ ID NO: 206777
  chr1:20920113-20920147
  hypo

SEQ ID NO: 296776 - DNA, 92 bp, Homo sapiens; identical to SEQ ID NO: 197376
  chr1:20959849-20959941
  hypo

SEQ ID NO: 296777 - DNA, 156 bp, Homo sapiens; identical to SEQ ID NO: 206779
  chr1:20977499-20977655
  hypo

SEQ ID NO: 296778 - DNA, 136 bp, Homo sapiens; identical to SEQ ID NO: 206780
  chr1:20983634-20983770
  hypo

SEQ ID NO: 296779 - DNA, 256 bp, Homo sapiens; identical to SEQ ID NO: 248116
  chr1:21037714-21037970
  hypo

SEQ ID NO: 296780 - DNA, 218 bp, Homo sapiens; identical to SEQ ID NO: 278063
  chr1:21058417-21058635
  hypo

SEQ ID NO: 296781 - DNA, 157 bp, Homo sapiens; identical to SEQ ID NO: 206781
  chr1:21062548-21062705
  hypo

SEQ ID NO: 296782 - DNA, 41 bp, Homo sapiens; identical to SEQ ID NO: 206782
  chr1:21122639-21122680
  hypo

SEQ ID NO: 296783 - DNA, 79 bp, Homo sapiens; identical to SEQ ID NO: 248119
  chr1:21339357-21339436
  hypo

SEQ ID NO: 296784 - DNA, 370 bp, Homo sapiens; identical to SEQ ID NO: 197378
  chr1:21563147-21563517
  hypo

SEQ ID NO: 296785 - DNA, 101 bp, Homo sapiens
  chr1:21568226-21568327
  hypo
atttgaactcagaaagtccggctccaatgtcttccttcaaagaggccacgctctctgcctacaggtcacgaagtcctggaagtactacaggatggtgagaa

SEQ ID NO: 296786 - DNA, 234 bp, Homo sapiens; identical to SEQ ID NO: 206784
  chr1:21573434-21573668
  hypo

SEQ ID NO: 296787 - DNA, 313 bp, Homo sapiens; identical to SEQ ID NO: 248123
  chr1:21585135-21585448
  hypo

SEQ ID NO: 296788 - DNA, 220 bp, Homo sapiens; identical to SEQ ID NO: 248124
  chr1:21610541-21610761
  hypo

SEQ ID NO: 296789 - DNA, 178 bp, Homo sapiens; identical to SEQ ID NO: 248125
  chr1:21635873-21636051
  hypo

SEQ ID NO: 296790 - DNA, 110 bp, Homo sapiens; identical to SEQ ID NO: 248126
  chr1:21690439-21690549
  hypo

SEQ ID NO: 296791 - DNA, 42 bp, Homo sapiens; identical to SEQ ID NO: 248127
  chr1:21786548-21786590
  hypo

SEQ ID NO: 296792 - DNA, 114 bp, Homo sapiens; identical to SEQ ID NO: 248128
  chr1:21848420-21848534
  hypo

SEQ ID NO: 296793 - DNA, 124 bp, Homo sapiens; identical to SEQ ID NO: 206785
  chr1:21889588-21889712
  hypo

SEQ ID NO: 296794 - DNA, 252 bp, Homo sapiens; identical to SEQ ID NO: 248130
  chr1:21902093-21902345
  hypo

SEQ ID NO: 296795 - DNA, 166 bp, Homo sapiens; identical to SEQ ID NO: 206786
  chr1:21944017-21944183
  hypo

SEQ ID NO: 296796 - DNA, 409 bp, Homo sapiens; identical to SEQ ID NO: 248132
  chr1:21953296-21953705
  hypo

SEQ ID NO: 296797 - DNA, 133 bp, Homo sapiens; identical to SEQ ID NO: 206787
  chr1:22001538-22001671
  hypo

SEQ ID NO: 296798 - DNA, 211 bp, Homo sapiens; identical to SEQ ID NO: 206788
  chr1:22003571-22003782
  hypo

SEQ ID NO: 296799 - DNA, 66 bp, Homo sapiens; identical to SEQ ID NO: 206789
  chr1:22023365-22023431
  hypo

SEQ ID NO: 296800 - DNA, 223 bp, Homo sapiens; identical to SEQ ID NO: 206790
  chr1:22023679-22023902
  hypo

SEQ ID NO: 296801 - DNA, 193 bp, Homo sapiens; identical to SEQ ID NO: 206791
  chr1:22032531-22032724
  hypo

SEQ ID NO: 296802 - DNA, 49 bp, Homo sapiens; identical to SEQ ID NO: 248139
  chr1:22166018-22166067
  hypo

SEQ ID NO: 296803 - DNA, 257 bp, Homo sapiens; identical to SEQ ID NO: 248140
  chr1:22191349-22191606
  hypo

SEQ ID NO: 296804 - DNA, 42 bp, Homo sapiens; identical to SEQ ID NO: 248141
  chr1:22192126-22192168
  hypo

SEQ ID NO: 296805 - DNA, 162 bp, Homo sapiens; identical to SEQ ID NO: 248142
  chr1:22196201-22196363
  hypo

SEQ ID NO: 296806 - DNA, 709 bp, Homo sapiens; identical to SEQ ID NO: 248143
  chr1:22198753-22199462
  hypo

SEQ ID NO: 296807 - DNA, 513 bp, Homo sapiens; identical to SEQ ID NO: 248144
  chr1:22200941-22201454
  hypo

SEQ ID NO: 296808 - DNA, 46 bp, Homo sapiens; identical to SEQ ID NO: 206793
  chr1:22202047-22202093
  hypo

SEQ ID NO: 296809 - DNA, 118 bp, Homo sapiens; identical to SEQ ID NO: 206794
  chr1:22202123-22202241
  hypo

SEQ ID NO: 296810 - DNA, 272 bp, Homo sapiens; identical to SEQ ID NO: 248147
  chr1:22211060-22211332
  hypo

SEQ ID NO: 296811 - DNA, 55 bp, Homo sapiens; identical to SEQ ID NO: 248148
  chr1:22213894-22213949
  hypo

SEQ ID NO: 296812 - DNA, 35 bp, Homo sapiens; identical to SEQ ID NO: 248149
  chr1:22335485-22335520
  hypo

SEQ ID NO: 296813 - DNA, 41 bp, Homo sapiens; identical to SEQ ID NO: 248150
  chr1:22422720-22422761
  hypo

SEQ ID NO: 296814 - DNA, 157 bp, Homo sapiens; identical to SEQ ID NO: 206795
  chr1:22465799-22465956
  hypo

SEQ ID NO: 296815 - DNA, 79 bp, Homo sapiens; identical to SEQ ID NO: 248152
  chr1:22498374-22498453
  hypo

SEQ ID NO: 296816 - DNA, 179 bp, Homo sapiens; identical to SEQ ID NO: 248153
  chr1:22498768-22498947
  hypo

SEQ ID NO: 296817 - DNA, 187 bp, Homo sapiens; identical to SEQ ID NO: 248154
  chr1:22566065-22566252
  hypo

SEQ ID NO: 296818 - DNA, 218 bp, Homo sapiens; identical to SEQ ID NO: 206796
  chr1:22584478-22584696
  hypo

SEQ ID NO: 296819 - DNA, 102 bp, Homo sapiens; identical to SEQ ID NO: 248156
  chr1:22777190-22777292
  hypo

SEQ ID NO: 296820 - DNA, 191 bp, Homo sapiens
  chr1:22777322-22777513
  hypo
attgcagatggaaaaggtataaccacagaggaagctggacattgcactaagatggctggatttgggcacgtaactgtcagggacagaaaaagtggctgcatgtcagtgacagggtgactgtgttcagtgggccagcgcggaggtgactcagtttgttactgctggatctgatttaaatgtttgtgtaagga

SEQ ID NO: 296821 - DNA, 157 bp, Homo sapiens; identical to SEQ ID NO: 206797
  chr1:22777697-22777854
  hypo

SEQ ID NO: 296822 - DNA, 38 bp, Homo sapiens; identical to SEQ ID NO: 248158
  chr1:22823351-22823389
  hypo

SEQ ID NO: 296823 - DNA, 134 bp, Homo sapiens; identical to SEQ ID NO: 248159
  chr1:22852708-22852842
  hypo

SEQ ID NO: 296824 - DNA, 78 bp, Homo sapiens; identical to SEQ ID NO: 248160
  chr1:22854345-22854423
  hypo

SEQ ID NO: 296825 - DNA, 145 bp, Homo sapiens
  chr1:22902957-22903102
  hypo
cacacaagaaagccagttcctcaaaatcgacaccattgcggccgacgagagcttcacaggtgccgaccttggtgtgcggcgtctcaagctcaacacggaggtgcgcagtgtgggtcccctcagcaagcgcggcttctacctggcc

SEQ ID NO: 296826 - DNA, 56 bp, Homo sapiens; identical to SEQ ID NO: 206798
  chr1:22927884-22927940
  hypo

SEQ ID NO: 296827 - DNA, 106 bp, Homo sapiens; identical to SEQ ID NO: 248164
  chr1:23021935-23022041
  hypo

SEQ ID NO: 296828 - DNA, 575 bp, Homo sapiens; identical to SEQ ID NO: 278075
  chr1:23036966-23037541
  hypo

SEQ ID NO: 296829 - DNA, 582 bp, Homo sapiens; identical to SEQ ID NO: 278076
  chr1:23037595-23038177
  hypo

SEQ ID NO: 296830 - DNA, 108 bp, Homo sapiens; identical to SEQ ID NO: 197382
  chr1:23038250-23038358
  hypo

SEQ ID NO: 296831 - DNA, 98 bp, Homo sapiens; identical to SEQ ID NO: 248165
  chr1:23058329-23058427
  hypo

SEQ ID NO: 296832 - DNA, 133 bp, Homo sapiens; identical to SEQ ID NO: 206801
  chr1:23063031-23063164
  hypo

SEQ ID NO: 296833 - DNA, 33 bp, Homo sapiens; identical to SEQ ID NO: 206802
  chr1:23063499-23063532
  hypo

SEQ ID NO: 296834 - DNA, 85 bp, Homo sapiens; identical to SEQ ID NO: 206803
  chr1:23091396-23091481
  hypo

SEQ ID NO: 296835 - DNA, 386 bp, Homo sapiens; identical to SEQ ID NO: 248169
  chr1:23110981-23111367
  hypo

SEQ ID NO: 296836 - DNA, 214 bp, Homo sapiens; identical to SEQ ID NO: 248170
  chr1:23162009-23162223
  hypo

SEQ ID NO: 296837 - DNA, 132 bp, Homo sapiens; identical to SEQ ID NO: 248171
  chr1:23168730-23168862
  hypo

SEQ ID NO: 296838 - DNA, 343 bp, Homo sapiens; identical to SEQ ID NO: 248172
  chr1:23191506-23191849
  hypo

SEQ ID NO: 296839 - DNA, 211 bp, Homo sapiens; identical to SEQ ID NO: 206806
  chr1:23201492-23201703
  hypo

SEQ ID NO: 296840 - DNA, 97 bp, Homo sapiens; identical to SEQ ID NO: 248174
  chr1:23205285-23205382
  hypo

SEQ ID NO: 296841 - DNA, 179 bp, Homo sapiens; identical to SEQ ID NO: 248175
  chr1:23208896-23209075
  hypo

SEQ ID NO: 296842 - DNA, 79 bp, Homo sapiens; identical to SEQ ID NO: 248176
  chr1:23270402-23270481
  hypo

SEQ ID NO: 296843 - DNA, 48 bp, Homo sapiens; identical to SEQ ID NO: 278078
  chr1:23280132-23280180
  hypo

SEQ ID NO: 296844 - DNA, 169 bp, Homo sapiens; identical to SEQ ID NO: 102782
  chr1:23280211-23280380
  hypo

SEQ ID NO: 296845 - DNA, 181 bp, Homo sapiens; identical to SEQ ID NO: 197384
  chr1:23346189-23346370
  hypo

SEQ ID NO: 296846 - DNA, 188 bp, Homo sapiens; identical to SEQ ID NO: 206808
  chr1:23411432-23411620
  hypo

SEQ ID NO: 296847 - DNA, 36 bp, Homo sapiens; identical to SEQ ID NO: 206809
  chr1:23440075-23440111
  hypo

SEQ ID NO: 296848 - DNA, 149 bp, Homo sapiens; identical to SEQ ID NO: 278083
  chr1:23543645-23543794
  hypo

SEQ ID NO: 296849 - DNA, 82 bp, Homo sapiens; identical to SEQ ID NO: 248179
  chr1:23566833-23566915
  hypo

SEQ ID NO: 296850 - DNA, 120 bp, Homo sapiens; identical to SEQ ID NO: 206810
  chr1:23567755-23567875
  hypo

SEQ ID NO: 296851 - DNA, 172 bp, Homo sapiens
  chr1:23693515-23693687
  hypo
aggtagaatccttacttacctagtgagacaacatttccataattctcctgcataacatcccggtaaaggtccctctgtgcagcgtccagaggtctccattcttcccgggtgagatacatggccatatcttcaaacgtcacaggtgcctgaaatcacacgatacttccctact

SEQ ID NO: 296852 - DNA, 168 bp, Homo sapiens
  chr1:23693910-23694078
  hypo
atctggcacttgcatcgctccatacctttactcataatgttcctcttttcctggaatattcttctcacactagagaaattctactactctttaaggtcccgctgcagtactaactgttcttcaatgccccctacccctctgcacggctccactccccttggatgcccc

SEQ ID NO: 296853 - DNA, 137 bp, Homo sapiens; identical to SEQ ID NO: 248183
  chr1:23698583-23698720
  hypo

SEQ ID NO: 296854 - DNA, 138 bp, Homo sapiens; identical to SEQ ID NO: 206811
  chr1:23762544-23762682
  hypo

SEQ ID NO: 296855 - DNA, 78 bp, Homo sapiens; identical to SEQ ID NO: 248185
  chr1:23762922-23763000
  hypo

SEQ ID NO: 296856 - DNA, 203 bp, Homo sapiens; identical to SEQ ID NO: 248186
  chr1:23768673-23768876
  hypo

SEQ ID NO: 296857 - DNA, 197 bp, Homo sapiens; identical to SEQ ID NO: 197388
  chr1:23857853-23858050
  hypo

SEQ ID NO: 296858 - DNA, 101 bp, Homo sapiens; identical to SEQ ID NO: 206813
  chr1:23954418-23954519
  hypo

SEQ ID NO: 296859 - DNA, 143 bp, Homo sapiens; identical to SEQ ID NO: 206814
  chr1:23963133-23963276
  hypo

SEQ ID NO: 296860 - DNA, 34 bp, Homo sapiens; identical to SEQ ID NO: 248189
  chr1:24016636-24016670
  hypo

SEQ ID NO: 296861 - DNA, 105 bp, Homo sapiens; identical to SEQ ID NO: 206815
  chr1:24110632-24110737
  hypo

SEQ ID NO: 296862 - DNA, 45 bp, Homo sapiens; identical to SEQ ID NO: 206816
  chr1:24111037-24111082
  hypo

SEQ ID NO: 296863 - DNA, 380 bp, Homo sapiens; identical to SEQ ID NO: 197392
  chr1:24126329-24126709
  hypo

SEQ ID NO: 296864 - DNA, 38 bp, Homo sapiens; identical to SEQ ID NO: 248194
  chr1:24153112-24153150
  hypo

SEQ ID NO: 296865 - DNA, 268 bp, Homo sapiens; identical to SEQ ID NO: 278101
  chr1:24229167-24229435
  hypo

SEQ ID NO: 296866 - DNA, 268 bp, Homo sapiens; identical to SEQ ID NO: 248195
  chr1:24424243-24424511
  hypo

SEQ ID NO: 296867 - DNA, 205 bp, Homo sapiens; identical to SEQ ID NO: 248196
  chr1:24426174-24426379
  hypo

SEQ ID NO: 296868 - DNA, 175 bp, Homo sapiens
  chr1:24434924-24435099
  hypo
ggaacagggcagtggctgggcggggaccctgtggctcccacctgctgcggaaggtccgcctccgcacagaggagcccatgcgcaggctgtgctgccgctcctccttctgctcctcctcctgccggtgctccagcctgtgaacctccatggcctgggggggccgggggtcccccgc

SEQ ID NO: 296869 - DNA, 39 bp, Homo sapiens
  chr1:24435146-24435185
  hypo
gtgaaggccaaggtccacggtcattccaccaggtgcccg

SEQ ID NO: 296870 - DNA, 45 bp, Homo sapiens; identical to SEQ ID NO: 206819
  chr1:24611879-24611924
  hypo

SEQ ID NO: 296871 - DNA, 106 bp, Homo sapiens; identical to SEQ ID NO: 206820
  chr1:24611967-24612073
  hypo

SEQ ID NO: 296872 - DNA, 52 bp, Homo sapiens; identical to SEQ ID NO: 248199
  chr1:24612363-24612415
  hypo

SEQ ID NO: 296873 - DNA, 105 bp, Homo sapiens; identical to SEQ ID NO: 248200
  chr1:24620325-24620430
  hypo

SEQ ID NO: 296874 - DNA, 32 bp, Homo sapiens; identical to SEQ ID NO: 206821
  chr1:24683006-24683038
  hypo

SEQ ID NO: 296875 - DNA, 142 bp, Homo sapiens; identical to SEQ ID NO: 206822
  chr1:24701524-24701666
  hypo

SEQ ID NO: 296876 - DNA, 58 bp, Homo sapiens; identical to SEQ ID NO: 248203
  chr1:24702011-24702069
  hypo

SEQ ID NO: 296877 - DNA, 88 bp, Homo sapiens; identical to SEQ ID NO: 206823
  chr1:24706236-24706324
  hypo

SEQ ID NO: 296878 - DNA, 33 bp, Homo sapiens; identical to SEQ ID NO: 248205
  chr1:24708666-24708699
  hypo

SEQ ID NO: 296879 - DNA, 399 bp, Homo sapiens; identical to SEQ ID NO: 248206
  chr1:24712879-24713278
  hypo

SEQ ID NO: 296880 - DNA, 43 bp, Homo sapiens; identical to SEQ ID NO: 248207
  chr1:24945574-24945617
  hypo

SEQ ID NO: 296881 - DNA, 35 bp, Homo sapiens; identical to SEQ ID NO: 248208
  chr1:24976035-24976070
  hypo

SEQ ID NO: 296882 - DNA, 287 bp, Homo sapiens; identical to SEQ ID NO: 248209
  chr1:24976291-24976578
  hypo

SEQ ID NO: 296883 - DNA, 135 bp, Homo sapiens; identical to SEQ ID NO: 248210
  chr1:25055531-25055666
  hypo

SEQ ID NO: 296884 - DNA, 257 bp, Homo sapiens; identical to SEQ ID NO: 206824
  chr1:25070657-25070914
  hypo

SEQ ID NO: 296885 - DNA, 39 bp, Homo sapiens; identical to SEQ ID NO: 206825
  chr1:25115718-25115757
  hypo

SEQ ID NO: 296886 - DNA, 42 bp, Homo sapiens; identical to SEQ ID NO: 248213
  chr1:25200671-25200713
  hypo

SEQ ID NO: 296887 - DNA, 570 bp, Homo sapiens
  chr1:25228637-25229207
  hypo
tccatgcggcctggcgtgctcagggccgtgggtgagttgctgtggctgccgtcggcctccacgccatcactctggccgcccaggctggggttcatgaggttgccggcggcgacagaggcagcgctgctggtgcaagaggccagcatgcgggtaggtgagcggtcgcccccactgctgctgccggccaccatggagaactggtaggagccagaggatgtcccgtagtagaggtggtagggggacgggttggcctggaagggcccgctctggttctgcggggcccccgggtagggtggcgggaggtaggtatggtggaagcggctggtggccggcatgcccgccacgctgaggctgctgatgctcgtgcccgagggcgtggcgctgtaggggaaggcagctgacatggccccgggataatgcatcctggggtctgggaagcggctctccgtgagggttggcagcgtggggaaggagcggtcaaactggcgggggtcggagaatgggttcagttccgaggtgcctggaggacagcagggaagaggtcagttccagctcgagacaaccccagga

SEQ ID NO: 296888 - DNA, 31 bp, Homo sapiens; identical to SEQ ID NO: 206827
  chr1:25230202-25230233
  hypo

SEQ ID NO: 296889 - DNA, 42 bp, Homo sapiens; identical to SEQ ID NO: 248216
  chr1:25247524-25247566
  hypo

SEQ ID NO: 296890 - DNA, 334 bp, Homo sapiens; identical to SEQ ID NO: 197395
  chr1:25255277-25255611
  hypo

SEQ ID NO: 296891 - DNA, 230 bp, Homo sapiens; identical to SEQ ID NO: 248217
  chr1:25269413-25269643
  hypo

SEQ ID NO: 296892 - DNA, 133 bp, Homo sapiens; identical to SEQ ID NO: 206829
  chr1:25396320-25396453
  hypo

SEQ ID NO: 296893 - DNA, 191 bp, Homo sapiens; identical to SEQ ID NO: 248219
  chr1:25397931-25398122
  hypo

SEQ ID NO: 296894 - DNA, 192 bp, Homo sapiens; identical to SEQ ID NO: 248220
  chr1:25510193-25510385
  hypo

SEQ ID NO: 296895 - DNA, 185 bp, Homo sapiens; identical to SEQ ID NO: 248221
  chr1:25718494-25718679
  hypo

SEQ ID NO: 296896 - DNA, 61 bp, Homo sapiens; identical to SEQ ID NO: 248222
  chr1:25825875-25825936
  hypo

SEQ ID NO: 296897 - DNA, 52 bp, Homo sapiens; identical to SEQ ID NO: 248223
  chr1:25853937-25853989
  hypo

SEQ ID NO: 296898 - DNA, 179 bp, Homo sapiens; identical to SEQ ID NO: 248224
  chr1:25854470-25854649
  hypo

SEQ ID NO: 296899 - DNA, 201 bp, Homo sapiens; identical to SEQ ID NO: 248225
  chr1:25856754-25856955
  hypo

SEQ ID NO: 296900 - DNA, 110 bp, Homo sapiens; identical to SEQ ID NO: 248226
  chr1:25862319-25862429
  hypo

SEQ ID NO: 296901 - DNA, 90 bp, Homo sapiens; identical to SEQ ID NO: 248227
  chr1:25869054-25869144
  hypo

SEQ ID NO: 296902 - DNA, 168 bp, Homo sapiens; identical to SEQ ID NO: 197396
  chr1:25870618-25870786
  hypo

SEQ ID NO: 296903 - DNA, 263 bp, Homo sapiens; identical to SEQ ID NO: 248228
  chr1:25889407-25889670
  hypo

SEQ ID NO: 296904 - DNA, 158 bp, Homo sapiens; identical to SEQ ID NO: 206831
  chr1:25890394-25890552
  hypo

SEQ ID NO: 296905 - DNA, 76 bp, Homo sapiens; identical to SEQ ID NO: 248230
  chr1:25895704-25895780
  hypo

SEQ ID NO: 296906 - DNA, 87 bp, Homo sapiens; identical to SEQ ID NO: 248231
  chr1:25896264-25896351
  hypo

SEQ ID NO: 296907 - DNA, 124 bp, Homo sapiens; identical to SEQ ID NO: 206832
  chr1:25919183-25919307
  hypo

SEQ ID NO: 296908 - DNA, 117 bp, Homo sapiens; identical to SEQ ID NO: 206833
  chr1:25919337-25919454
  hypo

SEQ ID NO: 296909 - DNA, 76 bp, Homo sapiens; identical to SEQ ID NO: 248233
  chr1:26084118-26084194
  hypo

SEQ ID NO: 296910 - DNA, 231 bp, Homo sapiens; identical to SEQ ID NO: 248234
  chr1:26086991-26087222
  hypo

SEQ ID NO: 296911 - DNA, 214 bp, Homo sapiens; identical to SEQ ID NO: 206834
  chr1:26121478-26121692
  hypo

SEQ ID NO: 296912 - DNA, 120 bp, Homo sapiens; identical to SEQ ID NO: 206835
  chr1:26634350-26634470
  hypo

SEQ ID NO: 296913 - DNA, 841 bp, Homo sapiens; identical to SEQ ID NO: 197401
  chr1:26662518-26663359
  hypo

SEQ ID NO: 296914 - DNA, 194 bp, Homo sapiens; identical to SEQ ID NO: 248239
  chr1:26670609-26670803
  hypo

SEQ ID NO: 296915 - DNA, 142 bp, Homo sapiens; identical to SEQ ID NO: 206837
  chr1:26678029-26678171
  hypo

SEQ ID NO: 296916 - DNA, 207 bp, Homo sapiens; identical to SEQ ID NO: 248241
  chr1:26680626-26680833
  hypo

SEQ ID NO: 296917 - DNA, 54 bp, Homo sapiens; identical to SEQ ID NO: 248242
  chr1:26683592-26683646
  hypo

SEQ ID NO: 296918 - DNA, 44 bp, Homo sapiens; identical to SEQ ID NO: 248243
  chr1:26796229-26796273
  hypo

SEQ ID NO: 296919 - DNA, 97 bp, Homo sapiens; identical to SEQ ID NO: 206838
  chr1:26807958-26808055
  hypo

SEQ ID NO: 296920 - DNA, 106 bp, Homo sapiens; identical to SEQ ID NO: 197405
  chr1:26855980-26856086
  hypo

SEQ ID NO: 296921 - DNA, 43 bp, Homo sapiens; identical to SEQ ID NO: 248245
  chr1:26874361-26874404
  hypo

SEQ ID NO: 296922 - DNA, 68 bp, Homo sapiens; identical to SEQ ID NO: 248246
  chr1:26885364-26885432
  hypo

SEQ ID NO: 296923 - DNA, 39 bp, Homo sapiens; identical to SEQ ID NO: 248247
  chr1:26969659-26969698
  hypo

SEQ ID NO: 296924 - DNA, 50 bp, Homo sapiens; identical to SEQ ID NO: 206840
  chr1:27056297-27056347
  hypo

SEQ ID NO: 296925 - DNA, 117 bp, Homo sapiens; identical to SEQ ID NO: 206841
  chr1:27057988-27058105
  hypo

SEQ ID NO: 296926 - DNA, 190 bp, Homo sapiens; identical to SEQ ID NO: 248250
  chr1:27179351-27179541
  hypo

SEQ ID NO: 296927 - DNA, 275 bp, Homo sapiens; identical to SEQ ID NO: 248251
  chr1:27183356-27183631
  hypo

SEQ ID NO: 296928 - DNA, 240 bp, Homo sapiens; identical to SEQ ID NO: 206842
  chr1:27189668-27189908
  hypo

SEQ ID NO: 296929 - DNA, 272 bp, Homo sapiens; identical to SEQ ID NO: 248253
  chr1:27220858-27221130
  hypo

SEQ ID NO: 296930 - DNA, 125 bp, Homo sapiens; identical to SEQ ID NO: 197408
  chr1:27286497-27286622
  hypo

SEQ ID NO: 296931 - DNA, 313 bp, Homo sapiens; identical to SEQ ID NO: 278145
  chr1:27332673-27332986
  hypo

SEQ ID NO: 296932 - DNA, 141 bp, Homo sapiens; identical to SEQ ID NO: 206845
  chr1:27426938-27427079
  hypo

SEQ ID NO: 296933 - DNA, 79 bp, Homo sapiens; identical to SEQ ID NO: 206846
  chr1:27427840-27427919
  hypo

SEQ ID NO: 296934 - DNA, 168 bp, Homo sapiens; identical to SEQ ID NO: 248257
  chr1:27480389-27480557
  hypo

SEQ ID NO: 296935 - DNA, 44 bp, Homo sapiens; identical to SEQ ID NO: 248258
  chr1:27621918-27621962
  hypo

SEQ ID NO: 296936 - DNA, 68 bp, Homo sapiens; identical to SEQ ID NO: 248259
  chr1:27627840-27627908
  hypo

SEQ ID NO: 296937 - DNA, 154 bp, Homo sapiens; identical to SEQ ID NO: 206847
  chr1:27628429-27628583
  hypo

SEQ ID NO: 296938 - DNA, 87 bp, Homo sapiens; identical to SEQ ID NO: 248261
  chr1:27647873-27647960
  hypo

SEQ ID NO: 296939 - DNA, 102 bp, Homo sapiens; identical to SEQ ID NO: 248262
  chr1:27694479-27694581
  hypo

SEQ ID NO: 296940 - DNA, 95 bp, Homo sapiens; identical to SEQ ID NO: 248263
  chr1:27704688-27704783
  hypo

SEQ ID NO: 296941 - DNA, 372 bp, Homo sapiens; identical to SEQ ID NO: 278147
  chr1:27718844-27719216
  hypo

SEQ ID NO: 296942 - DNA, 52 bp, Homo sapiens; identical to SEQ ID NO: 248264
  chr1:27750893-27750945
  hypo

SEQ ID NO: 296943 - DNA, 44 bp, Homo sapiens; identical to SEQ ID NO: 206849
  chr1:27798548-27798592
  hypo

SEQ ID NO: 296944 - DNA, 75 bp, Homo sapiens
  chr1:27844443-27844518
  hypo
gccacggtgcctggccttattgcgcctattttagaaaggtgattctagccgcagtgtggagcgtgagctgtacga

SEQ ID NO: 296945 - DNA, 207 bp, Homo sapiens
  chr1:27844781-27844988
  hypo
acctgcctgcctcgtcgactggactctggccaagggcagggactgtgtggcactgctcactgctgtatccacaaggccctaaggcataatgcctggagcctcaatccatgatcggtagggaacgaatgaatggctaagcctgttggggcaggtgtgatagtttgagtgaaagtgacagggtctgcggtggcagcgaggagagaagag

SEQ ID NO: 296946 - DNA, 76 bp, Homo sapiens; identical to SEQ ID NO: 248268
  chr1:27862696-27862772
  hypo

SEQ ID NO: 296947 - DNA, 227 bp, Homo sapiens; identical to SEQ ID NO: 248269
  chr1:27863985-27864212
  hypo

SEQ ID NO: 296948 - DNA, 278 bp, Homo sapiens; identical to SEQ ID NO: 206850
  chr1:27875530-27875808
  hypo

SEQ ID NO: 296949 - DNA, 251 bp, Homo sapiens
  chr1:27875838-27876089
  hypo
catagcttgctgctcgtcctggtgggaaggtctggcgcgcggacaggacaggctgaaaggaggggtccgccccagccccgctgctacccactgccactgggctggccttggctccccggctagggaaggtggccaggccccgctgggcaggcagggcactggtgggtggccctgcataggtgcccgatgccttccgggactctgggcgagaggctgagagggcaaagtccaagagatcggaggagtcatcc

SEQ ID NO: 296950 - DNA, 111 bp, Homo sapiens
  chr1:27876333-27876444
  hypo
ctgcctccccaaagcctgggccactgggcacctgctctgggaacagagtcccattcttccgggaccgtctcttgcgctttggcttcccagtcacagcgtctacctcccccc

SEQ ID NO: 296951 - DNA, 705 bp, Homo sapiens; identical to SEQ ID NO: 221279
  chr1:27901986-27902691
  hypo

SEQ ID NO: 296952 - DNA, 230 bp, Homo sapiens; identical to SEQ ID NO: 248273
  chr1:27921335-27921565
  hypo

SEQ ID NO: 296953 - DNA, 95 bp, Homo sapiens; identical to SEQ ID NO: 197415
  chr1:27928761-27928856
  hypo

SEQ ID NO: 296954 - DNA, 279 bp, Homo sapiens; identical to SEQ ID NO: 278153
  chr1:27929078-27929357
  hypo

SEQ ID NO: 296955 - DNA, 128 bp, Homo sapiens; identical to SEQ ID NO: 206855
  chr1:27942073-27942201
  hypo

SEQ ID NO: 296956 - DNA, 228 bp, Homo sapiens; identical to SEQ ID NO: 248275
  chr1:27994765-27994993
  hypo

SEQ ID NO: 296957 - DNA, 33 bp, Homo sapiens; identical to SEQ ID NO: 206857
  chr1:28148833-28148866
  hypo

SEQ ID NO: 296958 - DNA, 31 bp, Homo sapiens
  chr1:28293260-28293291
  hypo
tcagggcacagacttcatgccggaccccagc

SEQ ID NO: 296959 - DNA, 205 bp, Homo sapiens
  chr1:28293404-28293609
  hypo
tgacagcattctcctggtggccacctgggtgactcatagctcctggctgcccagcgggattccactgcagctgtggctgcctgtgggatgcggctgcttctttctgggcctggctctgcggcttgtgtactaccactggctgcaccctagctgctgctggaagcccgaccctgaccaggtagacggggcccggagtctgctttct

SEQ ID NO: 296960 - DNA, 37 bp, Homo sapiens; identical to SEQ ID NO: 206858
  chr1:28364954-28364991
  hypo

SEQ ID NO: 296961 - DNA, 185 bp, Homo sapiens; identical to SEQ ID NO: 248279
  chr1:28447726-28447911
  hypo

SEQ ID NO: 296962 - DNA, 36 bp, Homo sapiens; identical to SEQ ID NO: 248280
  chr1:28560005-28560041
  hypo

SEQ ID NO: 296963 - DNA, 216 bp, Homo sapiens; identical to SEQ ID NO: 278166
  chr1:28586719-28586935
  hypo

SEQ ID NO: 296964 - DNA, 280 bp, Homo sapiens; identical to SEQ ID NO: 102957
  chr1:28586972-28587252
  hypo

SEQ ID NO: 296965 - DNA, 34 bp, Homo sapiens; identical to SEQ ID NO: 248281
  chr1:28626665-28626699
  hypo

SEQ ID NO: 296966 - DNA, 91 bp, Homo sapiens; identical to SEQ ID NO: 206859
  chr1:28663349-28663440
  hypo

SEQ ID NO: 296967 - DNA, 78 bp, Homo sapiens; identical to SEQ ID NO: 206860
  chr1:28727742-28727820
  hypo

SEQ ID NO: 296968 - DNA, 44 bp, Homo sapiens; identical to SEQ ID NO: 248284
  chr1:28807198-28807242
  hypo

SEQ ID NO: 296969 - DNA, 120 bp, Homo sapiens; identical to SEQ ID NO: 248285
  chr1:28827219-28827339
  hypo

SEQ ID NO: 296970 - DNA, 33 bp, Homo sapiens; identical to SEQ ID NO: 248286
  chr1:28853112-28853145
  hypo

SEQ ID NO: 296971 - DNA, 52 bp, Homo sapiens; identical to SEQ ID NO: 206861
  chr1:28853770-28853822
  hypo

SEQ ID NO: 296972 - DNA, 43 bp, Homo sapiens; identical to SEQ ID NO: 206862
  chr1:28854229-28854272
  hypo

SEQ ID NO: 296973 - DNA, 323 bp, Homo sapiens; identical to SEQ ID NO: 206863
  chr1:28857207-28857530
  hypo

SEQ ID NO: 296974 - DNA, 38 bp, Homo sapiens; identical to SEQ ID NO: 248290
  chr1:28867211-28867249
  hypo

SEQ ID NO: 296975 - DNA, 340 bp, Homo sapiens; identical to SEQ ID NO: 278171
  chr1:28879651-28879991
  hypo

SEQ ID NO: 296976 - DNA, 120 bp, Homo sapiens; identical to SEQ ID NO: 248291
  chr1:28881382-28881502
  hypo

SEQ ID NO: 296977 - DNA, 159 bp, Homo sapiens; identical to SEQ ID NO: 248292
  chr1:28887875-28888034
  hypo

SEQ ID NO: 296978 - DNA, 34 bp, Homo sapiens; identical to SEQ ID NO: 206865
  chr1:28891701-28891735
  hypo

SEQ ID NO: 296979 - DNA, 80 bp, Homo sapiens; identical to SEQ ID NO: 278173
  chr1:28919321-28919401
  hypo

SEQ ID NO: 296980 - DNA, 34 bp, Homo sapiens; identical to SEQ ID NO: 248294
  chr1:28986972-28987006
  hypo

SEQ ID NO: 296981 - DNA, 82 bp, Homo sapiens; identical to SEQ ID NO: 248295
  chr1:28997959-28998041
  hypo

SEQ ID NO: 296982 - DNA, 35 bp, Homo sapiens; identical to SEQ ID NO: 248296
  chr1:29007853-29007888
  hypo

SEQ ID NO: 296983 - DNA, 283 bp, Homo sapiens; identical to SEQ ID NO: 278177
  chr1:29062800-29063083
  hypo

SEQ ID NO: 296984 - DNA, 35 bp, Homo sapiens; identical to SEQ ID NO: 206866
  chr1:29074338-29074373
  hypo

SEQ ID NO: 296985 - DNA, 46 bp, Homo sapiens; identical to SEQ ID NO: 206867
  chr1:29116013-29116059
  hypo

SEQ ID NO: 296986 - DNA, 97 bp, Homo sapiens; identical to SEQ ID NO: 248300
  chr1:29273976-29274073
  hypo

SEQ ID NO: 296987 - DNA, 66 bp, Homo sapiens; identical to SEQ ID NO: 206868
  chr1:29422743-29422809
  hypo

SEQ ID NO: 296988 - DNA, 244 bp, Homo sapiens; identical to SEQ ID NO: 278181
  chr1:29448271-29448515
  hypo

SEQ ID NO: 296989 - DNA, 467 bp, Homo sapiens; identical to SEQ ID NO: 278182
  chr1:29448910-29449377
  hypo

SEQ ID NO: 296990 - DNA, 119 bp, Homo sapiens
  chr1:29463322-29463441
  hypo
ttgcatttccttaggactatcccagagttcttcatagactctctaagaaacatcagggtttcctggaaagtgtgaattaaggacaaatattctatctgataaaaaaaaaaaaaaagggc

SEQ ID NO: 296991 - DNA, 114 bp, Homo sapiens
  chr1:29463501-29463615
  hypo
atcctcctgtctcagtctcctgtgttgttctgactacaggaatgcaccactgtaccccactttggaaccctttttattgtgaatataatacacctccaggaaattacataaaac

SEQ ID NO: 296992 - DNA, 79 bp, Homo sapiens; identical to SEQ ID NO: 248304
  chr1:29473803-29473882
  hypo

SEQ ID NO: 296993 - DNA, 31 bp, Homo sapiens; identical to SEQ ID NO: 206869
  chr1:29513701-29513732
  hypo

SEQ ID NO: 296994 - DNA, 54 bp, Homo sapiens; identical to SEQ ID NO: 206870
  chr1:29605969-29606023
  hypo

SEQ ID NO: 296995 - DNA, 177 bp, Homo sapiens; identical to SEQ ID NO: 248307
  chr1:29647168-29647345
  hypo

SEQ ID NO: 296996 - DNA, 86 bp, Homo sapiens; identical to SEQ ID NO: 248308
  chr1:30180749-30180835
  hypo

SEQ ID NO: 296997 - DNA, 620 bp, Homo sapiens; identical to SEQ ID NO: 278192
  chr1:31191732-31192352
  hypo

SEQ ID NO: 296998 - DNA, 157 bp, Homo sapiens; identical to SEQ ID NO: 206872
  chr1:31194412-31194569
  hypo

SEQ ID NO: 296999 - DNA, 34 bp, Homo sapiens; identical to SEQ ID NO: 206873
  chr1:31239979-31240013
  hypo

SEQ ID NO: 297000 - DNA, 87 bp, Homo sapiens; identical to SEQ ID NO: 206874
  chr1:31240595-31240682
  hypo

SEQ ID NO: 297001 - DNA, 116 bp, Homo sapiens
  chr1:31249895-31250011
  hypo
catttaatggtccaaacatcccatgaggacatatggccatcattcccgctttactcatgaggggactgacacgcagaggttaagcaatttgcccaaggtcacgcagctattccgtg

SEQ ID NO: 297002 - DNA, 88 bp, Homo sapiens; identical to SEQ ID NO: 206875
  chr1:31260793-31260881
  hypo

SEQ ID NO: 297003 - DNA, 284 bp, Homo sapiens; identical to SEQ ID NO: 248314
  chr1:31347131-31347415
  hypo

SEQ ID NO: 297004 - DNA, 75 bp, Homo sapiens; identical to SEQ ID NO: 248315
  chr1:31401181-31401256
  hypo

SEQ ID NO: 297005 - DNA, 33 bp, Homo sapiens; identical to SEQ ID NO: 248316
  chr1:31406884-31406917
  hypo

SEQ ID NO: 297006 - DNA, 178 bp, Homo sapiens; identical to SEQ ID NO: 248317
  chr1:31407298-31407476
  hypo

SEQ ID NO: 297007 - DNA, 100 bp, Homo sapiens; identical to SEQ ID NO: 248318
  chr1:31474693-31474793
  hypo

SEQ ID NO: 297008 - DNA, 64 bp, Homo sapiens; identical to SEQ ID NO: 206877
  chr1:31478716-31478780
  hypo

SEQ ID NO: 297009 - DNA, 76 bp, Homo sapiens; identical to SEQ ID NO: 248320
  chr1:31585281-31585357
  hypo

SEQ ID NO: 297010 - DNA, 143 bp, Homo sapiens; identical to SEQ ID NO: 248321
  chr1:31633840-31633983
  hypo

SEQ ID NO: 297011 - DNA, 62 bp, Homo sapiens; identical to SEQ ID NO: 206878
  chr1:31639518-31639580
  hypo

SEQ ID NO: 297012 - DNA, 64 bp, Homo sapiens; identical to SEQ ID NO: 248323
  chr1:31676127-31676191
  hypo

SEQ ID NO: 297013 - DNA, 68 bp, Homo sapiens; identical to SEQ ID NO: 248324
  chr1:31676221-31676289
  hypo

SEQ ID NO: 297014 - DNA, 36 bp, Homo sapiens; identical to SEQ ID NO: 206879
  chr1:31732224-31732260
  hypo

SEQ ID NO: 297015 - DNA, 94 bp, Homo sapiens
  chr1:31863055-31863149
  hypo
gcacgcagcgggcctcatttatgacttagttcaacattacaaaccttcgggagccccaccctccttctctgagagttgccgctccctactaggt

SEQ ID NO: 297016 - DNA, 37 bp, Homo sapiens; identical to SEQ ID NO: 206880
  chr1:31871814-31871851
  hypo

SEQ ID NO: 297017 - DNA, 55 bp, Homo sapiens; identical to SEQ ID NO: 248328
  chr1:32050770-32050825
  hypo

SEQ ID NO: 297018 - DNA, 668 bp, Homo sapiens; identical to SEQ ID NO: 248329
  chr1:32091929-32092597
  hypo

SEQ ID NO: 297019 - DNA, 196 bp, Homo sapiens; identical to SEQ ID NO: 206881
  chr1:32139297-32139493
  hypo

SEQ ID NO: 297020 - DNA, 176 bp, Homo sapiens; identical to SEQ ID NO: 248331
  chr1:32156856-32157032
  hypo

SEQ ID NO: 297021 - DNA, 126 bp, Homo sapiens; identical to SEQ ID NO: 248332
  chr1:32208523-32208649
  hypo

SEQ ID NO: 297022 - DNA, 119 bp, Homo sapiens; identical to SEQ ID NO: 206882
  chr1:32221874-32221993
  hypo

SEQ ID NO: 297023 - DNA, 77 bp, Homo sapiens; identical to SEQ ID NO: 206883
  chr1:32407225-32407302
  hypo

SEQ ID NO: 297024 - DNA, 120 bp, Homo sapiens; identical to SEQ ID NO: 248335
  chr1:32469886-32470006
  hypo

SEQ ID NO: 297025 - DNA, 55 bp, Homo sapiens; identical to SEQ ID NO: 248336
  chr1:32497745-32497800
  hypo

SEQ ID NO: 297026 - DNA, 143 bp, Homo sapiens; identical to SEQ ID NO: 278208
  chr1:32666250-32666393
  hypo

SEQ ID NO: 297027 - DNA, 39 bp, Homo sapiens; identical to SEQ ID NO: 248337
  chr1:32674989-32675028
  hypo

SEQ ID NO: 297028 - DNA, 113 bp, Homo sapiens
  chr1:32705375-32705488
  hypo
ggaccccccgcctcccgccaacacatactcacacacatgtacattcacagagccctgcaggagagggcctgggagagggtgggaggccccttacctctccagggaccagtgca

SEQ ID NO: 297029 - DNA, 82 bp, Homo sapiens
  chr1:32705579-32705661
  hypo
gccccgcgcccaaggacgagcccccgccagcgcagttcgcagcagctcctggtccctgtagcagcgccgcttctggggacca

SEQ ID NO: 297030 - DNA, 67 bp, Homo sapiens
  chr1:32741544-32741611
  hypo
accagaaccagggagaggtggtgaaacattacaagatccgtaatctggacaacggtggcttctacat

SEQ ID NO: 297031 - DNA, 525 bp, Homo sapiens; identical to SEQ ID NO: 248340
  chr1:32741986-32742511
  hypo

SEQ ID NO: 297032 - DNA, 47 bp, Homo sapiens; identical to SEQ ID NO: 206884
  chr1:32751094-32751141
  hypo

SEQ ID NO: 297033 - DNA, 299 bp, Homo sapiens; identical to SEQ ID NO: 197437
  chr1:32757388-32757687
  hypo

SEQ ID NO: 297034 - DNA, 240 bp, Homo sapiens; identical to SEQ ID NO: 248342
  chr1:32764105-32764345
  hypo

SEQ ID NO: 297035 - DNA, 156 bp, Homo sapiens; identical to SEQ ID NO: 248343
  chr1:32788457-32788613
  hypo

SEQ ID NO: 297036 - DNA, 76 bp, Homo sapiens; identical to SEQ ID NO: 248344
  chr1:32804501-32804577
  hypo

SEQ ID NO: 297037 - DNA, 334 bp, Homo sapiens; identical to SEQ ID NO: 248345
  chr1:32826700-32827034
  hypo

SEQ ID NO: 297038 - DNA, 101 bp, Homo sapiens; identical to SEQ ID NO: 197438
  chr1:32852880-32852981
  hypo

SEQ ID NO: 297039 - DNA, 79 bp, Homo sapiens; identical to SEQ ID NO: 248346
  chr1:32893209-32893288
  hypo

SEQ ID NO: 297040 - DNA, 140 bp, Homo sapiens; identical to SEQ ID NO: 248347
  chr1:32950770-32950910
  hypo

SEQ ID NO: 297041 - DNA, 36 bp, Homo sapiens; identical to SEQ ID NO: 197442
  chr1:33005606-33005642
  hypo

SEQ ID NO: 297042 - DNA, 32 bp, Homo sapiens; identical to SEQ ID NO: 248348
  chr1:33016264-33016296
  hypo

SEQ ID NO: 297043 - DNA, 91 bp, Homo sapiens; identical to SEQ ID NO: 248349
  chr1:33016536-33016627
  hypo

SEQ ID NO: 297044 - DNA, 33 bp, Homo sapiens; identical to SEQ ID NO: 248350
  chr1:33154203-33154236
  hypo

SEQ ID NO: 297045 - DNA, 322 bp, Homo sapiens; identical to SEQ ID NO: 248351
  chr1:33169543-33169865
  hypo

SEQ ID NO: 297046 - DNA, 326 bp, Homo sapiens; identical to SEQ ID NO: 278221
  chr1:33207544-33207870
  hypo

SEQ ID NO: 297047 - DNA, 35 bp, Homo sapiens; identical to SEQ ID NO: 248353
  chr1:33225964-33225999
  hypo

SEQ ID NO: 297048 - DNA, 93 bp, Homo sapiens; identical to SEQ ID NO: 248354
  chr1:33226462-33226555
  hypo

SEQ ID NO: 297049 - DNA, 935 bp, Homo sapiens; identical to SEQ ID NO: 248356
  chr1:33235318-33236253
  hypo

SEQ ID NO: 297050 - DNA, 502 bp, Homo sapiens; identical to SEQ ID NO: 248357
  chr1:33237281-33237783
  hypo

SEQ ID NO: 297051 - DNA, 146 bp, Homo sapiens; identical to SEQ ID NO: 248358
  chr1:33264160-33264306
  hypo

SEQ ID NO: 297052 - DNA, 40 bp, Homo sapiens; identical to SEQ ID NO: 248359
  chr1:33271259-33271299
  hypo

SEQ ID NO: 297053 - DNA, 164 bp, Homo sapiens; identical to SEQ ID NO: 206893
  chr1:33415196-33415360
  hypo

SEQ ID NO: 297054 - DNA, 78 bp, Homo sapiens; identical to SEQ ID NO: 206894
  chr1:33431248-33431326
  hypo

SEQ ID NO: 297055 - DNA, 37 bp, Homo sapiens; identical to SEQ ID NO: 206895
  chr1:33432070-33432107
  hypo

SEQ ID NO: 297056 - DNA, 31 bp, Homo sapiens; identical to SEQ ID NO: 278228
  chr1:33438469-33438500
  hypo

SEQ ID NO: 297057 - DNA, 305 bp, Homo sapiens
  chr1:33441642-33441947
  hypo
tagatccttcataactaagactcaccttcaccctcaccagtcccaccgcctccttgcacgggagaccccatccctctggacccggggcccttccagggatagccatcacttgcatacttgcgactgctcttgctgtagggtcccctttccccctttgtgaacctagcgaattcctagaccctacttaattataataaagcaacagagggtagaaactggcactaaaatgccgcttagcaaaggtcacaaaggtgaaagcctgcagaagtcaagcaggagagagaaatacggctggtgtatcaggg

SEQ ID NO: 297058 - DNA, 43 bp, Homo sapiens; identical to SEQ ID NO: 248364
  chr1:33612963-33613006
  hypo

SEQ ID NO: 297059 - DNA, 498 bp, Homo sapiens; identical to SEQ ID NO: 197450
  chr1:33721208-33721706
  hypo

SEQ ID NO: 297060 - DNA, 174 bp, Homo sapiens; identical to SEQ ID NO: 248365
  chr1:33741930-33742104
  hypo

SEQ ID NO: 297061 - DNA, 42 bp, Homo sapiens; identical to SEQ ID NO: 248366
  chr1:33763431-33763473
  hypo

SEQ ID NO: 297062 - DNA, 98 bp, Homo sapiens; identical to SEQ ID NO: 278234
  chr1:33772745-33772843
  hypo

SEQ ID NO: 297063 - DNA, 48 bp, Homo sapiens; identical to SEQ ID NO: 278235
  chr1:33772856-33772904
  hypo

SEQ ID NO: 297064 - DNA, 92 bp, Homo sapiens; identical to SEQ ID NO: 103072
  chr1:33772986-33773078
  hypo

SEQ ID NO: 297065 - DNA, 94 bp, Homo sapiens; identical to SEQ ID NO: 248367
  chr1:33817184-33817278
  hypo

SEQ ID NO: 297066 - DNA, 97 bp, Homo sapiens; identical to SEQ ID NO: 248368
  chr1:33841565-33841662
  hypo

SEQ ID NO: 297067 - DNA, 638 bp, Homo sapiens; identical to SEQ ID NO: 278237
  chr1:33896186-33896824
  hypo

SEQ ID NO: 297068 - DNA, 80 bp, Homo sapiens; identical to SEQ ID NO: 206899
  chr1:33985125-33985205
  hypo

SEQ ID NO: 297069 - DNA, 224 bp, Homo sapiens; identical to SEQ ID NO: 197453
  chr1:34629913-34630137
  hypo

SEQ ID NO: 297070 - DNA, 250 bp, Homo sapiens; identical to SEQ ID NO: 248370
  chr1:35116224-35116474
  hypo

SEQ ID NO: 297071 - DNA, 292 bp, Homo sapiens; identical to SEQ ID NO: 248371
  chr1:35223069-35223361
  hypo

SEQ ID NO: 297072 - DNA, 548 bp, Homo sapiens; identical to SEQ ID NO: 206901
  chr1:35226870-35227418
  hypo

SEQ ID NO: 297073 - DNA, 84 bp, Homo sapiens; identical to SEQ ID NO: 221303
  chr1:35260186-35260270
  hypo

SEQ ID NO: 297074 - DNA, 252 bp, Homo sapiens; identical to SEQ ID NO: 278242
  chr1:35394790-35395042
  hypo

SEQ ID NO: 297075 - DNA, 46 bp, Homo sapiens; identical to SEQ ID NO: 248373
  chr1:35442224-35442270
  hypo

SEQ ID NO: 297076 - DNA, 143 bp, Homo sapiens; identical to SEQ ID NO: 248374
  chr1:35650178-35650321
  hypo

SEQ ID NO: 297077 - DNA, 44 bp, Homo sapiens; identical to SEQ ID NO: 206904
  chr1:35664856-35664900
  hypo

SEQ ID NO: 297078 - DNA, 36 bp, Homo sapiens; identical to SEQ ID NO: 248376
  chr1:35894111-35894147
  hypo

SEQ ID NO: 297079 - DNA, 40 bp, Homo sapiens; identical to SEQ ID NO: 248377
  chr1:35963895-35963935
  hypo

SEQ ID NO: 297080 - DNA, 270 bp, Homo sapiens; identical to SEQ ID NO: 248378
  chr1:36025948-36026218
  hypo

SEQ ID NO: 297081 - DNA, 39 bp, Homo sapiens; identical to SEQ ID NO: 206905
  chr1:36056553-36056592
  hypo

SEQ ID NO: 297082 - DNA, 156 bp, Homo sapiens; identical to SEQ ID NO: 278247
  chr1:36173085-36173241
  hypo

SEQ ID NO: 297083 - DNA, 414 bp, Homo sapiens; identical to SEQ ID NO: 278248
  chr1:36173282-36173696
  hypo

SEQ ID NO: 297084 - DNA, 44 bp, Homo sapiens; identical to SEQ ID NO: 248380
  chr1:36271181-36271225
  hypo

SEQ ID NO: 297085 - DNA, 201 bp, Homo sapiens; identical to SEQ ID NO: 248382
  chr1:36549011-36549212
  hypo

SEQ ID NO: 297086 - DNA, 147 bp, Homo sapiens; identical to SEQ ID NO: 248383
  chr1:36558327-36558474
  hypo

SEQ ID NO: 297087 - DNA, 82 bp, Homo sapiens; identical to SEQ ID NO: 248385
  chr1:36610554-36610636
  hypo

SEQ ID NO: 297088 - DNA, 59 bp, Homo sapiens; identical to SEQ ID NO: 248386
  chr1:36633228-36633287
  hypo

SEQ ID NO: 297089 - DNA, 88 bp, Homo sapiens; identical to SEQ ID NO: 248387
  chr1:36637143-36637231
  hypo

SEQ ID NO: 297090 - DNA, 62 bp, Homo sapiens; identical to SEQ ID NO: 248388
  chr1:36638185-36638247
  hypo

SEQ ID NO: 297091 - DNA, 111 bp, Homo sapiens; identical to SEQ ID NO: 248389
  chr1:36640423-36640534
  hypo

SEQ ID NO: 297092 - DNA, 93 bp, Homo sapiens; identical to SEQ ID NO: 206907
  chr1:36641759-36641852
  hypo

SEQ ID NO: 297093 - DNA, 155 bp, Homo sapiens; identical to SEQ ID NO: 248391
  chr1:36773758-36773913
  hypo

SEQ ID NO: 297094 - DNA, 42 bp, Homo sapiens; identical to SEQ ID NO: 206908
  chr1:36774202-36774244
  hypo

SEQ ID NO: 297095 - DNA, 116 bp, Homo sapiens; identical to SEQ ID NO: 248393
  chr1:36807404-36807520
  hypo

SEQ ID NO: 297096 - DNA, 66 bp, Homo sapiens; identical to SEQ ID NO: 248394
  chr1:36814516-36814582
  hypo

SEQ ID NO: 297097 - DNA, 76 bp, Homo sapiens; identical to SEQ ID NO: 248395
  chr1:36845272-36845348
  hypo

SEQ ID NO: 297098 - DNA, 186 bp, Homo sapiens; identical to SEQ ID NO: 206909
  chr1:36857026-36857212
  hypo

SEQ ID NO: 297099 - DNA, 223 bp, Homo sapiens; identical to SEQ ID NO: 206910
  chr1:36881339-36881562
  hypo

SEQ ID NO: 297100 - DNA, 39 bp, Homo sapiens; identical to SEQ ID NO: 248398
  chr1:36931309-36931348
  hypo

SEQ ID NO: 297101 - DNA, 866 bp, Homo sapiens; identical to SEQ ID NO: 197462
  chr1:36931643-36932509
  hypo

SEQ ID NO: 297102 - DNA, 218 bp, Homo sapiens; identical to SEQ ID NO: 197463
  chr1:36933230-36933448
  hypo

SEQ ID NO: 297103 - DNA, 321 bp, Homo sapiens; identical to SEQ ID NO: 278257
  chr1:36936920-36937241
  hypo

SEQ ID NO: 297104 - DNA, 77 bp, Homo sapiens; identical to SEQ ID NO: 197465
  chr1:36937669-36937746
  hypo

SEQ ID NO: 297105 - DNA, 150 bp, Homo sapiens; identical to SEQ ID NO: 206915
  chr1:36979463-36979613
  hypo

SEQ ID NO: 297106 - DNA, 142 bp, Homo sapiens; identical to SEQ ID NO: 248401
  chr1:37324710-37324852
  hypo

SEQ ID NO: 297107 - DNA, 44 bp, Homo sapiens; identical to SEQ ID NO: 248402
  chr1:37851536-37851580
  hypo

SEQ ID NO: 297108 - DNA, 45 bp, Homo sapiens; identical to SEQ ID NO: 248403
  chr1:37863807-37863852
  hypo

SEQ ID NO: 297109 - DNA, 179 bp, Homo sapiens; identical to SEQ ID NO: 248404
  chr1:37898813-37898992
  hypo

SEQ ID NO: 297110 - DNA, 395 bp, Homo sapiens; identical to SEQ ID NO: 278264
  chr1:37940474-37940869
  hypo

SEQ ID NO: 297111 - DNA, 32 bp, Homo sapiens; identical to SEQ ID NO: 248405
  chr1:38030259-38030291
  hypo

SEQ ID NO: 297112 - DNA, 92 bp, Homo sapiens; identical to SEQ ID NO: 248406
  chr1:38149928-38150020
  hypo

SEQ ID NO: 297113 - DNA, 181 bp, Homo sapiens; identical to SEQ ID NO: 248407
  chr1:38171209-38171390
  hypo

SEQ ID NO: 297114 - DNA, 42 bp, Homo sapiens; identical to SEQ ID NO: 248408
  chr1:38184577-38184619
  hypo

SEQ ID NO: 297115 - DNA, 58 bp, Homo sapiens; identical to SEQ ID NO: 248409
  chr1:38206997-38207055
  hypo

SEQ ID NO: 297116 - DNA, 37 bp, Homo sapiens; identical to SEQ ID NO: 206917
  chr1:38294272-38294309
  hypo

SEQ ID NO: 297117 - DNA, 96 bp, Homo sapiens; identical to SEQ ID NO: 248411
  chr1:38327726-38327822
  hypo

SEQ ID NO: 297118 - DNA, 313 bp, Homo sapiens; identical to SEQ ID NO: 206918
  chr1:38492844-38493157
  hypo

SEQ ID NO: 297119 - DNA, 420 bp, Homo sapiens; identical to SEQ ID NO: 278274
  chr1:38512644-38513064
  hypo

SEQ ID NO: 297120 - DNA, 98 bp, Homo sapiens; identical to SEQ ID NO: 221316
  chr1:38580185-38580283
  hypo

SEQ ID NO: 297121 - DNA, 56 bp, Homo sapiens
  chr1:38673133-38673189
  hypo
cagctcggaggctgcgaggcagagccgtgaacgccaacagtctggaggcaggctcc

SEQ ID NO: 297122 - DNA, 165 bp, Homo sapiens
  chr1:38953154-38953319
  hypo
agatttcacagacaccctctccaagtacaaacacacactcacacacacacagacacatgcgcgcgcctactccatcgcgggctgcgtggtgtgtgcagtcagcagccgtgtggagaatgtgaaatcacacctcgctctccttccgaggcagtgagatctttattg

SEQ ID NO: 297123 - DNA, 60 bp, Homo sapiens; identical to SEQ ID NO: 278277
  chr1:39043984-39044044
  hypo

SEQ ID NO: 297124 - DNA, 75 bp, Homo sapiens; identical to SEQ ID NO: 278278
  chr1:39044466-39044541
  hypo

SEQ ID NO: 297125 - DNA, 144 bp, Homo sapiens; identical to SEQ ID NO: 206919
  chr1:39174396-39174540
  hypo

SEQ ID NO: 297126 - DNA, 367 bp, Homo sapiens; identical to SEQ ID NO: 278279
  chr1:39284066-39284433
  hypo

SEQ ID NO: 297127 - DNA, 44 bp, Homo sapiens; identical to SEQ ID NO: 248417
  chr1:39326752-39326796
  hypo

SEQ ID NO: 297128 - DNA, 120 bp, Homo sapiens; identical to SEQ ID NO: 206920
  chr1:39345657-39345777
  hypo

SEQ ID NO: 297129 - DNA, 82 bp, Homo sapiens; identical to SEQ ID NO: 248420
  chr1:39388385-39388467
  hypo

SEQ ID NO: 297130 - DNA, 35 bp, Homo sapiens; identical to SEQ ID NO: 248422
  chr1:39455439-39455474
  hypo

SEQ ID NO: 297131 - DNA, 31 bp, Homo sapiens; identical to SEQ ID NO: 206921
  chr1:39739272-39739303
  hypo

SEQ ID NO: 297132 - DNA, 31 bp, Homo sapiens; identical to SEQ ID NO: 206922
  chr1:39739543-39739574
  hypo

SEQ ID NO: 297133 - DNA, 491 bp, Homo sapiens; identical to SEQ ID NO: 278284
  chr1:39874757-39875248
  hypo

SEQ ID NO: 297134 - DNA, 39 bp, Homo sapiens; identical to SEQ ID NO: 248425
  chr1:39920597-39920636
  hypo

SEQ ID NO: 297135 - DNA, 716 bp, Homo sapiens; identical to SEQ ID NO: 278285
  chr1:39956620-39957336
  hypo

SEQ ID NO: 297136 - DNA, 134 bp, Homo sapiens; identical to SEQ ID NO: 248427
  chr1:40030074-40030208
  hypo

SEQ ID NO: 297137 - DNA, 101 bp, Homo sapiens; identical to SEQ ID NO: 248428
  chr1:40081557-40081658
  hypo

SEQ ID NO: 297138 - DNA, 33 bp, Homo sapiens; identical to SEQ ID NO: 248429
  chr1:40117400-40117433
  hypo

SEQ ID NO: 297139 - DNA, 248 bp, Homo sapiens; identical to SEQ ID NO: 248430
  chr1:40124818-40125066
  hypo

SEQ ID NO: 297140 - DNA, 182 bp, Homo sapiens; identical to SEQ ID NO: 278287
  chr1:40149563-40149745
  hypo

SEQ ID NO: 297141 - DNA, 31 bp, Homo sapiens; identical to SEQ ID NO: 248431
  chr1:40179273-40179304
  hypo

SEQ ID NO: 297142 - DNA, 344 bp, Homo sapiens; identical to SEQ ID NO: 278290
  chr1:40254463-40254807
  hypo

SEQ ID NO: 297143 - DNA, 121 bp, Homo sapiens; identical to SEQ ID NO: 278291
  chr1:40254922-40255043
  hypo

SEQ ID NO: 297144 - DNA, 35 bp, Homo sapiens; identical to SEQ ID NO: 278292
  chr1:40255068-40255103
  hypo

SEQ ID NO: 297145 - DNA, 81 bp, Homo sapiens; identical to SEQ ID NO: 278293
  chr1:40255104-40255185
  hypo

SEQ ID NO: 297146 - DNA, 280 bp, Homo sapiens; identical to SEQ ID NO: 278294
  chr1:40367951-40368231
  hypo

SEQ ID NO: 297147 - DNA, 31 bp, Homo sapiens; identical to SEQ ID NO: 221329
  chr1:40420568-40420599
  hypo

SEQ ID NO: 297148 - DNA, 122 bp, Homo sapiens; identical to SEQ ID NO: 221330
  chr1:40420932-40421054
  hypo

SEQ ID NO: 297149 - DNA, 148 bp, Homo sapiens; identical to SEQ ID NO: 206923
  chr1:40771002-40771150
  hypo

SEQ ID NO: 297150 - DNA, 162 bp, Homo sapiens; identical to SEQ ID NO: 248435
  chr1:41116838-41117000
  hypo

SEQ ID NO: 297151 - DNA, 32 bp, Homo sapiens; identical to SEQ ID NO: 248436
  chr1:41170004-41170036
  hypo

SEQ ID NO: 297152 - DNA, 363 bp, Homo sapiens; identical to SEQ ID NO: 248437
  chr1:41281553-41281916
  hypo

SEQ ID NO: 297153 - DNA, 79 bp, Homo sapiens; identical to SEQ ID NO: 248438
  chr1:41295714-41295793
  hypo

SEQ ID NO: 297154 - DNA, 36 bp, Homo sapiens; identical to SEQ ID NO: 278303
  chr1:41326954-41326990
  hypo

SEQ ID NO: 297155 - DNA, 434 bp, Homo sapiens; identical to SEQ ID NO: 278304
  chr1:41327080-41327514
  hypo

SEQ ID NO: 297156 - DNA, 89 bp, Homo sapiens
  chr1:41451887-41451976
  hypo
agccactttgggcaggtggtcggggagtctcccaagagaggccatttgagctgagaggccagtcacagcgagagtggaatgagaagtgc

SEQ ID NO: 297157 - DNA, 36 bp, Homo sapiens
  chr1:41452012-41452048
  hypo
aatggaggggaggccggcatagctaaggcagagtga

SEQ ID NO: 297158 - DNA, 394 bp, Homo sapiens; identical to SEQ ID NO: 248440
  chr1:41472915-41473309
  hypo

SEQ ID NO: 297159 - DNA, 137 bp, Homo sapiens; identical to SEQ ID NO: 248441
  chr1:41483523-41483660
  hypo

SEQ ID NO: 297160 - DNA, 119 bp, Homo sapiens
  chr1:41485929-41486048
  hypo
tcaatagcaggtccttcccacgggctgccagctccttgaggattaggtgctcctccagggccgtctgcaggcgccaggggagggaggccagggtgtccctgtggacagtcacctgcacc

SEQ ID NO: 297161 - DNA, 112 bp, Homo sapiens; identical to SEQ ID NO: 206926
  chr1:41486164-41486276
  hypo

SEQ ID NO: 297162 - DNA, 51 bp, Homo sapiens; identical to SEQ ID NO: 248443
  chr1:41488287-41488338
  hypo

SEQ ID NO: 297163 - DNA, 475 bp, Homo sapiens; identical to SEQ ID NO: 197483
  chr1:41832018-41832493
  hypo

SEQ ID NO: 297164 - DNA, 59 bp, Homo sapiens
  chr1:41915194-41915253
  hypo
aggtgtgaggaggccgaaagcccaggcaggttgacgactgtaaaacgccggttggattt

SEQ ID NO: 297165 - DNA, 98 bp, Homo sapiens; identical to SEQ ID NO: 248445
  chr1:41933801-41933899
  hypo

SEQ ID NO: 297166 - DNA, 253 bp, Homo sapiens; identical to SEQ ID NO: 248446
  chr1:41934216-41934469
  hypo

SEQ ID NO: 297167 - DNA, 47 bp, Homo sapiens; identical to SEQ ID NO: 206928
  chr1:41967566-41967613
  hypo

SEQ ID NO: 297168 - DNA, 211 bp, Homo sapiens; identical to SEQ ID NO: 248448
  chr1:41970958-41971169
  hypo

SEQ ID NO: 297169 - DNA, 149 bp, Homo sapiens; identical to SEQ ID NO: 248449
  chr1:41976354-41976503
  hypo

SEQ ID NO: 297170 - DNA, 182 bp, Homo sapiens; identical to SEQ ID NO: 248450
  chr1:41979369-41979551
  hypo

SEQ ID NO: 297171 - DNA, 494 bp, Homo sapiens; identical to SEQ ID NO: 197488
  chr1:41981667-41982161
  hypo

SEQ ID NO: 297172 - DNA, 35 bp, Homo sapiens; identical to SEQ ID NO: 206930
  chr1:42120784-42120819
  hypo

SEQ ID NO: 297173 - DNA, 66 bp, Homo sapiens; identical to SEQ ID NO: 248453
  chr1:42142944-42143010
  hypo

SEQ ID NO: 297174 - DNA, 178 bp, Homo sapiens; identical to SEQ ID NO: 248454
  chr1:42212494-42212672
  hypo

SEQ ID NO: 297175 - DNA, 66 bp, Homo sapiens; identical to SEQ ID NO: 248455
  chr1:42630381-42630447
  hypo

SEQ ID NO: 297176 - DNA, 146 bp, Homo sapiens
  chr1:42633130-42633276
  hypo
tgtgtgtgtgctgacgtgtgtgtatacactgaggtgcgtgtgtgctgaagtgtgtgtatacactgaggtgtgcgtgagtgctgacgtgtgtgtatacactgaggtgtgtgtgagtgctgacgtgtgtgtgtgcactgacgtgtgtg

SEQ ID NO: 297177 - DNA, 35 bp, Homo sapiens; identical to SEQ ID NO: 206931
  chr1:42802314-42802349
  hypo

SEQ ID NO: 297178 - DNA, 189 bp, Homo sapiens; identical to SEQ ID NO: 206932
  chr1:43203989-43204178
  hypo

SEQ ID NO: 297179 - DNA, 183 bp, Homo sapiens; identical to SEQ ID NO: 248460
  chr1:43209438-43209621
  hypo

SEQ ID NO: 297180 - DNA, 88 bp, Homo sapiens; identical to SEQ ID NO: 206933
  chr1:43296453-43296541
  hypo

SEQ ID NO: 297181 - DNA, 195 bp, Homo sapiens; identical to SEQ ID NO: 206934
  chr1:43310138-43310333
  hypo

SEQ ID NO: 297182 - DNA, 293 bp, Homo sapiens; identical to SEQ ID NO: 248463
  chr1:43353271-43353564
  hypo

SEQ ID NO: 297183 - DNA, 319 bp, Homo sapiens
  chr1:43400386-43400705
  hypo
tgtgtgaggtgagacctggcacgtgcctgttctgaacgctcccacctcacatgcccgtcccaagcttaggatttaaacacttgatgctgccaccaccccacatccatccatcaccaggtcctctcgattctgcctccgagtctgtcctacttctctacccaggcagcctgccctgggtctcatctggattctgctcccgactcttcctatccaccaaagtcagaccccatttcccacagtgaaccacccctcagaatgcagtcggagtcctgcacaccaaatgtgccaggctcggccatccacccgcttctctgctccc

SEQ ID NO: 297184 - DNA, 169 bp, Homo sapiens; identical to SEQ ID NO: 248465
  chr1:43412604-43412773
  hypo

SEQ ID NO: 297185 - DNA, 31 bp, Homo sapiens; identical to SEQ ID NO: 97386
  chr1:43478271-43478302
  hypo

SEQ ID NO: 297186 - DNA, 89 bp, Homo sapiens; identical to SEQ ID NO: 206937
  chr1:43521465-43521554
  hypo

SEQ ID NO: 297187 - DNA, 145 bp, Homo sapiens; identical to SEQ ID NO: 248469
  chr1:43532590-43532735
  hypo

SEQ ID NO: 297188 - DNA, 83 bp, Homo sapiens; identical to SEQ ID NO: 206938
  chr1:43533472-43533555
  hypo

SEQ ID NO: 297189 - DNA, 404 bp, Homo sapiens; identical to SEQ ID NO: 206939
  chr1:43534661-43535065
  hypo

SEQ ID NO: 297190 - DNA, 35 bp, Homo sapiens; identical to SEQ ID NO: 248472
  chr1:43626939-43626974
  hypo

SEQ ID NO: 297191 - DNA, 32 bp, Homo sapiens; identical to SEQ ID NO: 206940
  chr1:43702286-43702318
  hypo

SEQ ID NO: 297192 - DNA, 238 bp, Homo sapiens; identical to SEQ ID NO: 248474
  chr1:43738645-43738883
  hypo

SEQ ID NO: 297193 - DNA, 70 bp, Homo sapiens
  chr1:43750607-43750677
  hypo
cagaaccagtcattgctaggcgggcagctccccgtgggcaacggctggctgaaggatctgtaccctggcg

SEQ ID NO: 297194 - DNA, 151 bp, Homo sapiens
  chr1:43750707-43750858
  hypo
tgtggtgcttgtgaaattaacgaggggagcgtgagagtgaatatacaggtgggagcgggagagacgtcctgggaaggagaggtcagctgctcattcattcctcagcctgctgtgggcctcatcctagtactaggtccgcaaaacatgagaa

SEQ ID NO: 297195 - DNA, 163 bp, Homo sapiens; identical to SEQ ID NO: 206942
  chr1:43754321-43754484
  hypo

SEQ ID NO: 297196 - DNA, 201 bp, Homo sapiens; identical to SEQ ID NO: 248477
  chr1:43782856-43783057
  hypo

SEQ ID NO: 297197 - DNA, 151 bp, Homo sapiens; identical to SEQ ID NO: 206943
  chr1:43783572-43783723
  hypo

SEQ ID NO: 297198 - DNA, 43 bp, Homo sapiens; identical to SEQ ID NO: 197492
  chr1:43803509-43803552
  hypo

SEQ ID NO: 297199 - DNA, 208 bp, Homo sapiens; identical to SEQ ID NO: 197493
  chr1:43805020-43805228
  hypo

SEQ ID NO: 297200 - DNA, 67 bp, Homo sapiens; identical to SEQ ID NO: 197494
  chr1:43814927-43814994
  hypo

SEQ ID NO: 297201 - DNA, 268 bp, Homo sapiens; identical to SEQ ID NO: 197495
  chr1:43818177-43818445
  hypo

SEQ ID NO: 297202 - DNA, 57 bp, Homo sapiens; identical to SEQ ID NO: 206948
  chr1:43842607-43842664
  hypo

SEQ ID NO: 297203 - DNA, 891 bp, Homo sapiens; identical to SEQ ID NO: 248481
  chr1:43888923-43889814
  hypo

SEQ ID NO: 297204 - DNA, 332 bp, Homo sapiens; identical to SEQ ID NO: 248482
  chr1:43905359-43905691
  hypo

SEQ ID NO: 297205 - DNA, 34 bp, Homo sapiens; identical to SEQ ID NO: 248483
  chr1:43906214-43906248
  hypo

SEQ ID NO: 297206 - DNA, 287 bp, Homo sapiens; identical to SEQ ID NO: 197497
  chr1:43919241-43919528
  hypo

SEQ ID NO: 297207 - DNA, 119 bp, Homo sapiens; identical to SEQ ID NO: 391
  chr1:43919541-43919660
  hypo

SEQ ID NO: 297208 - DNA, 88 bp, Homo sapiens; identical to SEQ ID NO: 206951
  chr1:43969026-43969114
  hypo

SEQ ID NO: 297209 - DNA, 189 bp, Homo sapiens; identical to SEQ ID NO: 206952
  chr1:43987296-43987485
  hypo

SEQ ID NO: 297210 - DNA, 35 bp, Homo sapiens; identical to SEQ ID NO: 206953
  chr1:43991183-43991218
  hypo

SEQ ID NO: 297211 - DNA, 212 bp, Homo sapiens; identical to SEQ ID NO: 206954
  chr1:44029987-44030199
  hypo

SEQ ID NO: 297212 - DNA, 45 bp, Homo sapiens; identical to SEQ ID NO: 248488
  chr1:44030403-44030448
  hypo

SEQ ID NO: 297213 - DNA, 102 bp, Homo sapiens; identical to SEQ ID NO: 206955
  chr1:44044918-44045020
  hypo

SEQ ID NO: 297214 - DNA, 159 bp, Homo sapiens; identical to SEQ ID NO: 248490
  chr1:44047737-44047896
  hypo

SEQ ID NO: 297215 - DNA, 93 bp, Homo sapiens; identical to SEQ ID NO: 206956
  chr1:44063579-44063672
  hypo

SEQ ID NO: 297216 - DNA, 49 bp, Homo sapiens; identical to SEQ ID NO: 248492
  chr1:44068723-44068772
  hypo

SEQ ID NO: 297217 - DNA, 148 bp, Homo sapiens; identical to SEQ ID NO: 206957
  chr1:44069555-44069703
  hypo

SEQ ID NO: 297218 - DNA, 128 bp, Homo sapiens; identical to SEQ ID NO: 248494
  chr1:44070960-44071088
  hypo

SEQ ID NO: 297219 - DNA, 238 bp, Homo sapiens; identical to SEQ ID NO: 248495
  chr1:44072459-44072697
  hypo

SEQ ID NO: 297220 - DNA, 347 bp, Homo sapiens; identical to SEQ ID NO: 248496
  chr1:44084831-44085178
  hypo

SEQ ID NO: 297221 - DNA, 80 bp, Homo sapiens; identical to SEQ ID NO: 248497
  chr1:44110063-44110143
  hypo

SEQ ID NO: 297222 - DNA, 189 bp, Homo sapiens; identical to SEQ ID NO: 206959
  chr1:44132657-44132846
  hypo

SEQ ID NO: 297223 - DNA, 221 bp, Homo sapiens; identical to SEQ ID NO: 248499
  chr1:44137396-44137617
  hypo

SEQ ID NO: 297224 - DNA, 73 bp, Homo sapiens; identical to SEQ ID NO: 248500
  chr1:44138998-44139071
  hypo

SEQ ID NO: 297225 - DNA, 257 bp, Homo sapiens; identical to SEQ ID NO: 206960
  chr1:44170222-44170479
  hypo

SEQ ID NO: 297226 - DNA, 42 bp, Homo sapiens; identical to SEQ ID NO: 248502
  chr1:44303658-44303700
  hypo

SEQ ID NO: 297227 - DNA, 162 bp, Homo sapiens; identical to SEQ ID NO: 248503
  chr1:44303820-44303982
  hypo

SEQ ID NO: 297228 - DNA, 201 bp, Homo sapiens; identical to SEQ ID NO: 248504
  chr1:44309570-44309771
  hypo

SEQ ID NO: 297229 - DNA, 74 bp, Homo sapiens; identical to SEQ ID NO: 206961
  chr1:44351017-44351091
  hypo

SEQ ID NO: 297230 - DNA, 133 bp, Homo sapiens; identical to SEQ ID NO: 248506
  chr1:44380112-44380245
  hypo

SEQ ID NO: 297231 - DNA, 112 bp, Homo sapiens; identical to SEQ ID NO: 278338
  chr1:44402260-44402372
  hypo

SEQ ID NO: 297232 - DNA, 120 bp, Homo sapiens; identical to SEQ ID NO: 197500
  chr1:44444589-44444709
  hypo

SEQ ID NO: 297233 - DNA, 81 bp, Homo sapiens; identical to SEQ ID NO: 248507
  chr1:44446769-44446850
  hypo

SEQ ID NO: 297234 - DNA, 126 bp, Homo sapiens; identical to SEQ ID NO: 248508
  chr1:44447464-44447590
  hypo

SEQ ID NO: 297235 - DNA, 577 bp, Homo sapiens
  chr1:44463253-44463830
  hypo
ctgcccacaatggggatctgcgccttgtccgggtgcagtggctggacctcgaagccgtcctcaggagagggggctatggtgggggcgtagcgccctgtccggtgctccaggagggcagggccccagtctctgcttggctttgtggcatttttcaaacgctgcatgaggtaggcatggggcacaggggcagggcacgtcaggagggagcccttaagccccttccagctggcccctcccattttgcctggctacccagcctgtccctgccctcacctggaggagggtgtccccgtctgtgcggcagagccggaacatggcgtagagggggatgcagaggacggaggacagagccatgaggaagccaatggccacggcccagcctgggtactggtagtggttgtaggtgatcggctggtactggatcacagtgaaaactagaataaactgcacggggcaggtgtgggagtgggcgtgaggccgacccagagcccagaccccaggccatccctctaccagcaccctttcctctctggtttcccaaactagaaaagggcatttggggcagaacagggacagc

SEQ ID NO: 297236 - DNA, 226 bp, Homo sapiens; identical to SEQ ID NO: 248510
  chr1:44483085-44483311
  hypo

SEQ ID NO: 297237 - DNA, 137 bp, Homo sapiens; identical to SEQ ID NO: 248511
  chr1:44490960-44491097
  hypo

SEQ ID NO: 297238 - DNA, 154 bp, Homo sapiens
  chr1:44717918-44718072
  hypo
gtgccaggcaggcacgcacacacgcttcccttcccctgggctgctgcaatttccatgcacagggaagcaggtgccgagctgctcccggctggctctcccctctcgtggctctgcccgccttggctgctgccccattagcttagtggccagccat

SEQ ID NO: 297239 - DNA, 149 bp, Homo sapiens; identical to SEQ ID NO: 206965
  chr1:44718164-44718313
  hypo

SEQ ID NO: 297240 - DNA, 120 bp, Homo sapiens; identical to SEQ ID NO: 206966
  chr1:44726773-44726893
  hypo

SEQ ID NO: 297241 - DNA, 136 bp, Homo sapiens; identical to SEQ ID NO: 248515
  chr1:44755341-44755477
  hypo

SEQ ID NO: 297242 - DNA, 242 bp, Homo sapiens; identical to SEQ ID NO: 248516
  chr1:44792160-44792402
  hypo

SEQ ID NO: 297243 - DNA, 380 bp, Homo sapiens; identical to SEQ ID NO: 248517
  chr1:44971160-44971540
  hypo

SEQ ID NO: 297244 - DNA, 143 bp, Homo sapiens; identical to SEQ ID NO: 248518
  chr1:45068757-45068900
  hypo

SEQ ID NO: 297245 - DNA, 355 bp, Homo sapiens; identical to SEQ ID NO: 206967
  chr1:45087574-45087929
  hypo

SEQ ID NO: 297246 - DNA, 194 bp, Homo sapiens; identical to SEQ ID NO: 248520
  chr1:45090554-45090748
  hypo

SEQ ID NO: 297247 - DNA, 99 bp, Homo sapiens; identical to SEQ ID NO: 206968
  chr1:45101746-45101845
  hypo

SEQ ID NO: 297248 - DNA, 569 bp, Homo sapiens; identical to SEQ ID NO: 206969
  chr1:45106053-45106622
  hypo

SEQ ID NO: 297249 - DNA, 255 bp, Homo sapiens; identical to SEQ ID NO: 206970
  chr1:45111998-45112253
  hypo

SEQ ID NO: 297250 - DNA, 346 bp, Homo sapiens; identical to SEQ ID NO: 248524
  chr1:45120345-45120691
  hypo

SEQ ID NO: 297251 - DNA, 43 bp, Homo sapiens
  chr1:45156593-45156636
  hypo
ggagtacaggcataagacaccgcgcccagtgaagcttcttgaa

SEQ ID NO: 297252 - DNA, 348 bp, Homo sapiens; identical to SEQ ID NO: 248526
  chr1:45190029-45190377
  hypo

SEQ ID NO: 297253 - DNA, 134 bp, Homo sapiens; identical to SEQ ID NO: 248527
  chr1:45190407-45190541
  hypo

SEQ ID NO: 297254 - DNA, 43 bp, Homo sapiens; identical to SEQ ID NO: 248528
  chr1:45190571-45190614
  hypo

SEQ ID NO: 297255 - DNA, 132 bp, Homo sapiens; identical to SEQ ID NO: 248529
  chr1:45190897-45191029
  hypo

SEQ ID NO: 297256 - DNA, 378 bp, Homo sapiens; identical to SEQ ID NO: 248530
  chr1:45253065-45253443
  hypo

SEQ ID NO: 297257 - DNA, 32 bp, Homo sapiens; identical to SEQ ID NO: 248531
  chr1:45264888-45264920
  hypo

SEQ ID NO: 297258 - DNA, 215 bp, Homo sapiens; identical to SEQ ID NO: 206972
  chr1:45268611-45268826
  hypo

SEQ ID NO: 297259 - DNA, 43 bp, Homo sapiens
  chr1:45280616-45280659
  hypo
cccagcttttccccagctctgcccccatcgtgtttctcatttc

SEQ ID NO: 297260 - DNA, 123 bp, Homo sapiens
  chr1:45293094-45293217
  hypo
agtgcagccaggtgcggggtgcctgggtggccggtgggggcagcaccgccttgagggaactgaagcgctggtgcagatcaaagagggcgcgttgggagtgggcgtagtcaaagccaccctggg

SEQ ID NO: 297261 - DNA, 120 bp, Homo sapiens; identical to SEQ ID NO: 248536
  chr1:45409393-45409513
  hypo

SEQ ID NO: 297262 - DNA, 83 bp, Homo sapiens; identical to SEQ ID NO: 206973
  chr1:45454356-45454439
  hypo

SEQ ID NO: 297263 - DNA, 206 bp, Homo sapiens; identical to SEQ ID NO: 248538
  chr1:45457724-45457930
  hypo

SEQ ID NO: 297264 - DNA, 105 bp, Homo sapiens; identical to SEQ ID NO: 248539
  chr1:45529304-45529409
  hypo

SEQ ID NO: 297265 - DNA, 38 bp, Homo sapiens; identical to SEQ ID NO: 248540
  chr1:45656870-45656908
  hypo

SEQ ID NO: 297266 - DNA, 167 bp, Homo sapiens; identical to SEQ ID NO: 248541
  chr1:45759290-45759457
  hypo

SEQ ID NO: 297267 - DNA, 32 bp, Homo sapiens; identical to SEQ ID NO: 248542
  chr1:45801240-45801272
  hypo

SEQ ID NO: 297268 - DNA, 120 bp, Homo sapiens; identical to SEQ ID NO: 206974
  chr1:45950719-45950839
  hypo

SEQ ID NO: 297269 - DNA, 227 bp, Homo sapiens; identical to SEQ ID NO: 248544
  chr1:46089387-46089614
  hypo

SEQ ID NO: 297270 - DNA, 107 bp, Homo sapiens; identical to SEQ ID NO: 248545
  chr1:46111787-46111894
  hypo

SEQ ID NO: 297271 - DNA, 79 bp, Homo sapiens; identical to SEQ ID NO: 206975
  chr1:46131435-46131514
  hypo

SEQ ID NO: 297272 - DNA, 35 bp, Homo sapiens; identical to SEQ ID NO: 248547
  chr1:46338430-46338465
  hypo

SEQ ID NO: 297273 - DNA, 90 bp, Homo sapiens; identical to SEQ ID NO: 248548
  chr1:46476446-46476536
  hypo

SEQ ID NO: 297274 - DNA, 295 bp, Homo sapiens; identical to SEQ ID NO: 248549
  chr1:46500308-46500603
  hypo

SEQ ID NO: 297275 - DNA, 34 bp, Homo sapiens; identical to SEQ ID NO: 248550
  chr1:46618505-46618539
  hypo

SEQ ID NO: 297276 - DNA, 134 bp, Homo sapiens
  chr1:46653315-46653449
  hypo
acacttctcctctgccgtgtgcctgtgtggaggctgcatgggatttgtttgcccagggcgggcctctacctcatcatgggctaattgctgctcaacctggctgttgtgccacctcaggcactatatccagctcc

SEQ ID NO: 297277 - DNA, 62 bp, Homo sapiens
  chr1:46744595-46744657
  hypo
catggcaggtagcccggagccgccggatggcttccctggctgtgactgcatcctggtccagc

SEQ ID NO: 297278 - DNA, 89 bp, Homo sapiens; identical to SEQ ID NO: 206976
  chr1:46751246-46751335
  hypo

SEQ ID NO: 297279 - DNA, 97 bp, Homo sapiens; identical to SEQ ID NO: 248554
  chr1:46751628-46751725
  hypo

SEQ ID NO: 297280 - DNA, 59 bp, Homo sapiens; identical to SEQ ID NO: 206977
  chr1:46752071-46752130
  hypo

SEQ ID NO: 297281 - DNA, 54 bp, Homo sapiens; identical to SEQ ID NO: 248556
  chr1:46805244-46805298
  hypo

SEQ ID NO: 297282 - DNA, 286 bp, Homo sapiens; identical to SEQ ID NO: 248557
  chr1:46807507-46807793
  hypo

SEQ ID NO: 297283 - DNA, 40 bp, Homo sapiens
  chr1:46921732-46921772
  hypo
gcagccaggcccccgagtgtgcgccgtgtaaagtgacaca

SEQ ID NO: 297284 - DNA, 327 bp, Homo sapiens; identical to SEQ ID NO: 278378
  chr1:46932180-46932507
  hypo

SEQ ID NO: 297285 - DNA, 243 bp, Homo sapiens; identical to SEQ ID NO: 206978
  chr1:46963445-46963688
  hypo

SEQ ID NO: 297286 - DNA, 85 bp, Homo sapiens; identical to SEQ ID NO: 248560
  chr1:47033312-47033397
  hypo

SEQ ID NO: 297287 - DNA, 104 bp, Homo sapiens; identical to SEQ ID NO: 206979
  chr1:47035269-47035373
  hypo

SEQ ID NO: 297288 - DNA, 247 bp, Homo sapiens
  chr1:47035403-47035650
  hypo
actcagtccaggctgcacaaattgagtagcactgctctgcagctcgctgcactaaaagtggaagatattttccattacagcaagtgctcccacagaaggatcacgagccacacacggagccttactctccaaataggcgcccatggcccagtcgtcccttagcctaagaactcagagagccaggctgtaataatggggctgccgtgtgagcacagcagccatcgagctgctccggttcatttcccag

SEQ ID NO: 297289 - DNA, 230 bp, Homo sapiens; identical to SEQ ID NO: 206981
  chr1:47041013-47041243
  hypo

SEQ ID NO: 297290 - DNA, 58 bp, Homo sapiens; identical to SEQ ID NO: 206982
  chr1:47041273-47041331
  hypo

SEQ ID NO: 297291 - DNA, 198 bp, Homo sapiens; identical to SEQ ID NO: 197515
  chr1:47078538-47078736
  hypo

SEQ ID NO: 297292 - DNA, 45 bp, Homo sapiens; identical to SEQ ID NO: 197516
  chr1:47078782-47078827
  hypo

SEQ ID NO: 297293 - DNA, 112 bp, Homo sapiens; identical to SEQ ID NO: 248564
  chr1:47684469-47684581
  hypo

SEQ ID NO: 297294 - DNA, 439 bp, Homo sapiens; identical to SEQ ID NO: 248565
  chr1:47685397-47685836
  hypo

SEQ ID NO: 297295 - DNA, 449 bp, Homo sapiens; identical to SEQ ID NO: 278392
  chr1:47903680-47904129
  hypo

SEQ ID NO: 297296 - DNA, 66 bp, Homo sapiens; identical to SEQ ID NO: 248566
  chr1:47974505-47974571
  hypo

SEQ ID NO: 297297 - DNA, 102 bp, Homo sapiens; identical to SEQ ID NO: 248567
  chr1:48187539-48187641
  hypo

SEQ ID NO: 297298 - DNA, 179 bp, Homo sapiens; identical to SEQ ID NO: 197521
  chr1:48190695-48190874
  hypo

SEQ ID NO: 297299 - DNA, 66 bp, Homo sapiens
  chr1:48246983-48247049
  hypo
caggaaaaaaagccctgcctcgggctgtacaggagcagcagcaaatatttactgactgctgcgcgg

SEQ ID NO: 297300 - DNA, 188 bp, Homo sapiens; identical to SEQ ID NO: 248569
  chr1:48257294-48257482
  hypo

SEQ ID NO: 297301 - DNA, 142 bp, Homo sapiens; identical to SEQ ID NO: 206987
  chr1:48270033-48270175
  hypo

SEQ ID NO: 297302 - DNA, 469 bp, Homo sapiens; identical to SEQ ID NO: 206988
  chr1:48459792-48460261
  hypo

SEQ ID NO: 297303 - DNA, 675 bp, Homo sapiens; identical to SEQ ID NO: 278400
  chr1:48462497-48463172
  hypo

SEQ ID NO: 297304 - DNA, 59 bp, Homo sapiens; identical to SEQ ID NO: 197523
  chr1:48463406-48463465
  hypo

SEQ ID NO: 297305 - DNA, 48 bp, Homo sapiens; identical to SEQ ID NO: 206990
  chr1:50919071-50919119
  hypo

SEQ ID NO: 297306 - DNA, 355 bp, Homo sapiens; identical to SEQ ID NO: 248574
  chr1:51165682-51166037
  hypo

SEQ ID NO: 297307 - DNA, 35 bp, Homo sapiens; identical to SEQ ID NO: 206991
  chr1:51424030-51424065
  hypo

SEQ ID NO: 297308 - DNA, 309 bp, Homo sapiens; identical to SEQ ID NO: 206992
  chr1:51439564-51439873
  hypo

SEQ ID NO: 297309 - DNA, 74 bp, Homo sapiens; identical to SEQ ID NO: 206993
  chr1:51761677-51761751
  hypo

SEQ ID NO: 297310 - DNA, 210 bp, Homo sapiens; identical to SEQ ID NO: 206994
  chr1:51763389-51763599
  hypo

SEQ ID NO: 297311 - DNA, 83 bp, Homo sapiens; identical to SEQ ID NO: 248579
  chr1:51848399-51848482
  hypo

SEQ ID NO: 297312 - DNA, 47 bp, Homo sapiens; identical to SEQ ID NO: 248580
  chr1:52049261-52049308
  hypo

SEQ ID NO: 297313 - DNA, 44 bp, Homo sapiens; identical to SEQ ID NO: 206995
  chr1:52060513-52060557
  hypo

SEQ ID NO: 297314 - DNA, 203 bp, Homo sapiens; identical to SEQ ID NO: 197532
  chr1:52081941-52082144
  hypo

SEQ ID NO: 297315 - DNA, 38 bp, Homo sapiens; identical to SEQ ID NO: 206997
  chr1:52089596-52089634
  hypo

SEQ ID NO: 297316 - DNA, 322 bp, Homo sapiens; identical to SEQ ID NO: 197534
  chr1:52194968-52195290
  hypo

SEQ ID NO: 297317 - DNA, 42 bp, Homo sapiens; identical to SEQ ID NO: 248584
  chr1:52284963-52285005
  hypo

SEQ ID NO: 297318 - DNA, 45 bp, Homo sapiens; identical to SEQ ID NO: 248585
  chr1:52310965-52311010
  hypo

SEQ ID NO: 297319 - DNA, 38 bp, Homo sapiens; identical to SEQ ID NO: 248586
  chr1:52337810-52337848
  hypo

SEQ ID NO: 297320 - DNA, 98 bp, Homo sapiens; identical to SEQ ID NO: 248588
  chr1:52505300-52505398
  hypo

SEQ ID NO: 297321 - DNA, 43 bp, Homo sapiens; identical to SEQ ID NO: 248590
  chr1:52549396-52549439
  hypo

SEQ ID NO: 297322 - DNA, 180 bp, Homo sapiens; identical to SEQ ID NO: 221355
  chr1:52608469-52608649
  hypo

SEQ ID NO: 297323 - DNA, 300 bp, Homo sapiens; identical to SEQ ID NO: 248591
  chr1:52659366-52659666
  hypo

SEQ ID NO: 297324 - DNA, 77 bp, Homo sapiens; identical to SEQ ID NO: 248593
  chr1:52879566-52879643
  hypo

SEQ ID NO: 297325 - DNA, 104 bp, Homo sapiens; identical to SEQ ID NO: 206999
  chr1:53053490-53053594
  hypo

SEQ ID NO: 297326 - DNA, 79 bp, Homo sapiens; identical to SEQ ID NO: 207000
  chr1:53129044-53129123
  hypo

SEQ ID NO: 297327 - DNA, 168 bp, Homo sapiens; identical to SEQ ID NO: 207001
  chr1:53238154-53238322
  hypo

SEQ ID NO: 297328 - DNA, 47 bp, Homo sapiens; identical to SEQ ID NO: 207002
  chr1:53479848-53479895
  hypo

SEQ ID NO: 297329 - DNA, 92 bp, Homo sapiens; identical to SEQ ID NO: 248598
  chr1:53535642-53535734
  hypo

SEQ ID NO: 297330 - DNA, 263 bp, Homo sapiens; identical to SEQ ID NO: 248599
  chr1:53544125-53544388
  hypo

SEQ ID NO: 297331 - DNA, 192 bp, Homo sapiens
  chr1:53561225-53561417
  hypo
gccttggtacactcaccctgcctcgatacactcacacaccccgcctcgttacacacacactgccttggtacacttaaacccgcctcagtacactcacacaacctgcctaggtacactcacacaccccagctcaatacactcacacaccctgcctcggtacacacacacaacttgcctcggtacactcaactg

SEQ ID NO: 297332 - DNA, 91 bp, Homo sapiens; identical to SEQ ID NO: 248601
  chr1:53583644-53583735
  hypo

SEQ ID NO: 297333 - DNA, 212 bp, Homo sapiens; identical to SEQ ID NO: 248602
  chr1:53600839-53601051
  hypo

SEQ ID NO: 297334 - DNA, 326 bp, Homo sapiens; identical to SEQ ID NO: 248604
  chr1:53769484-53769810
  hypo

SEQ ID NO: 297335 - DNA, 236 bp, Homo sapiens; identical to SEQ ID NO: 248605
  chr1:53905598-53905834
  hypo

SEQ ID NO: 297336 - DNA, 56 bp, Homo sapiens; identical to SEQ ID NO: 248606
  chr1:53986260-53986316
  hypo

SEQ ID NO: 297337 - DNA, 77 bp, Homo sapiens; identical to SEQ ID NO: 248607
  chr1:54009675-54009752
  hypo

SEQ ID NO: 297338 - DNA, 82 bp, Homo sapiens; identical to SEQ ID NO: 248608
  chr1:54009966-54010048
  hypo

SEQ ID NO: 297339 - DNA, 37 bp, Homo sapiens; identical to SEQ ID NO: 248609
  chr1:54037530-54037567
  hypo

SEQ ID NO: 297340 - DNA, 75 bp, Homo sapiens; identical to SEQ ID NO: 207004
  chr1:54060385-54060460
  hypo

SEQ ID NO: 297341 - DNA, 128 bp, Homo sapiens; identical to SEQ ID NO: 248611
  chr1:54142673-54142801
  hypo

SEQ ID NO: 297342 - DNA, 620 bp, Homo sapiens; identical to SEQ ID NO: 278432
  chr1:54204704-54205324
  hypo

SEQ ID NO: 297343 - DNA, 160 bp, Homo sapiens; identical to SEQ ID NO: 207005
  chr1:54260083-54260243
  hypo

SEQ ID NO: 297344 - DNA, 266 bp, Homo sapiens; identical to SEQ ID NO: 207006
  chr1:54408679-54408945
  hypo

SEQ ID NO: 297345 - DNA, 240 bp, Homo sapiens; identical to SEQ ID NO: 248614
  chr1:54474564-54474804
  hypo

SEQ ID NO: 297346 - DNA, 166 bp, Homo sapiens; identical to SEQ ID NO: 207008
  chr1:54602338-54602504
  hypo

SEQ ID NO: 297347 - DNA, 204 bp, Homo sapiens; identical to SEQ ID NO: 207009
  chr1:54605374-54605578
  hypo

SEQ ID NO: 297348 - DNA, 50 bp, Homo sapiens; identical to SEQ ID NO: 207010
  chr1:54610116-54610166
  hypo

SEQ ID NO: 297349 - DNA, 245 bp, Homo sapiens
  chr1:54683814-54684059
  hypo
caggatcctaatgaaccgtgttctttccaggaacctgttggcccagttggtttcaagccagagacattcagaaagtttttagctctatatttgcatggtgctgcgtgagcggaggacccctctgaatcctgaaacccctcttgcctctcttccacggaagagggcctgggccccgtggagcctcagtgcccgtttggcctgctgctctcgctgacaataaagagcccttgcgttgcactgaagcc

SEQ ID NO: 297350 - DNA, 119 bp, Homo sapiens; identical to SEQ ID NO: 248620
  chr1:54694092-54694211
  hypo

SEQ ID NO: 297351 - DNA, 63 bp, Homo sapiens
  chr1:54722603-54722666
  hypo
ggcaggtgaactgccgcaccatgggcacagcggggacatggggccctctctggggaacagcta

SEQ ID NO: 297352 - DNA, 416 bp, Homo sapiens; identical to SEQ ID NO: 248622
  chr1:54725170-54725586
  hypo

SEQ ID NO: 297353 - DNA, 60 bp, Homo sapiens; identical to SEQ ID NO: 248623
  chr1:54726656-54726716
  hypo

SEQ ID NO: 297354 - DNA, 207 bp, Homo sapiens; identical to SEQ ID NO: 207012
  chr1:54746227-54746434
  hypo

SEQ ID NO: 297355 - DNA, 358 bp, Homo sapiens; identical to SEQ ID NO: 248625
  chr1:54747983-54748341
  hypo

SEQ ID NO: 297356 - DNA, 105 bp, Homo sapiens; identical to SEQ ID NO: 248626
  chr1:54756002-54756107
  hypo

SEQ ID NO: 297357 - DNA, 43 bp, Homo sapiens; identical to SEQ ID NO: 248627
  chr1:54757160-54757203
  hypo

SEQ ID NO: 297358 - DNA, 92 bp, Homo sapiens; identical to SEQ ID NO: 248628
  chr1:54757486-54757578
  hypo

SEQ ID NO: 297359 - DNA, 60 bp, Homo sapiens
  chr1:54766194-54766254
  hypo
accagtgcaacacagagtaccgcacaggcctgtactcagctccaggatcccaaagaaagg

SEQ ID NO: 297360 - DNA, 31 bp, Homo sapiens; identical to SEQ ID NO: 248630
  chr1:54767237-54767268
  hypo

SEQ ID NO: 297361 - DNA, 257 bp, Homo sapiens; identical to SEQ ID NO: 248631
  chr1:54775634-54775891
  hypo

SEQ ID NO: 297362 - DNA, 279 bp, Homo sapiens; identical to SEQ ID NO: 248632
  chr1:54808633-54808912
  hypo

SEQ ID NO: 297363 - DNA, 121 bp, Homo sapiens; identical to SEQ ID NO: 207014
  chr1:54818601-54818722
  hypo

SEQ ID NO: 297364 - DNA, 78 bp, Homo sapiens; identical to SEQ ID NO: 248634
  chr1:54860655-54860733
  hypo

SEQ ID NO: 297365 - DNA, 138 bp, Homo sapiens; identical to SEQ ID NO: 248635
  chr1:54880303-54880441
  hypo

SEQ ID NO: 297366 - DNA, 36 bp, Homo sapiens; identical to SEQ ID NO: 248636
  chr1:54944840-54944876
  hypo

SEQ ID NO: 297367 - DNA, 44 bp, Homo sapiens; identical to SEQ ID NO: 248637
  chr1:55009517-55009561
  hypo

SEQ ID NO: 297368 - DNA, 94 bp, Homo sapiens; identical to SEQ ID NO: 207015
  chr1:55033218-55033312
  hypo

SEQ ID NO: 297369 - DNA, 155 bp, Homo sapiens; identical to SEQ ID NO: 207016
  chr1:55050846-55051001
  hypo

SEQ ID NO: 297370 - DNA, 72 bp, Homo sapiens; identical to SEQ ID NO: 207017
  chr1:55065738-55065810
  hypo

SEQ ID NO: 297371 - DNA, 189 bp, Homo sapiens; identical to SEQ ID NO: 207018
  chr1:55066933-55067122
  hypo

SEQ ID NO: 297372 - DNA, 293 bp, Homo sapiens; identical to SEQ ID NO: 248642
  chr1:55067377-55067670
  hypo

SEQ ID NO: 297373 - DNA, 206 bp, Homo sapiens; identical to SEQ ID NO: 248643
  chr1:55074067-55074273
  hypo

SEQ ID NO: 297374 - DNA, 205 bp, Homo sapiens; identical to SEQ ID NO: 248644
  chr1:55146065-55146270
  hypo

SEQ ID NO: 297375 - DNA, 269 bp, Homo sapiens; identical to SEQ ID NO: 248645
  chr1:55261713-55261982
  hypo

SEQ ID NO: 297376 - DNA, 134 bp, Homo sapiens; identical to SEQ ID NO: 248646
  chr1:55317920-55318054
  hypo

SEQ ID NO: 297377 - DNA, 236 bp, Homo sapiens; identical to SEQ ID NO: 197543
  chr1:55352448-55352684
  hypo

SEQ ID NO: 297378 - DNA, 97 bp, Homo sapiens; identical to SEQ ID NO: 248647
  chr1:55447258-55447355
  hypo

SEQ ID NO: 297379 - DNA, 485 bp, Homo sapiens; identical to SEQ ID NO: 278443
  chr1:55462188-55462673
  hypo

SEQ ID NO: 297380 - DNA, 198 bp, Homo sapiens; identical to SEQ ID NO: 207022
  chr1:55517831-55518029
  hypo

SEQ ID NO: 297381 - DNA, 50 bp, Homo sapiens
  chr1:55529041-55529091
  hypo
gtgaccgtggcctgcgaggagggctggaccctgactggctgcagtgccct

SEQ ID NO: 297382 - DNA, 75 bp, Homo sapiens; identical to SEQ ID NO: 248650
  chr1:55532714-55532789
  hypo

SEQ ID NO: 297383 - DNA, 118 bp, Homo sapiens; identical to SEQ ID NO: 248651
  chr1:55560944-55561062
  hypo

SEQ ID NO: 297384 - DNA, 41 bp, Homo sapiens; identical to SEQ ID NO: 248652
  chr1:55567199-55567240
  hypo

SEQ ID NO: 297385 - DNA, 40 bp, Homo sapiens; identical to SEQ ID NO: 248653
  chr1:55583107-55583147
  hypo

SEQ ID NO: 297386 - DNA, 183 bp, Homo sapiens; identical to SEQ ID NO: 207023
  chr1:55620060-55620243
  hypo

SEQ ID NO: 297387 - DNA, 293 bp, Homo sapiens; identical to SEQ ID NO: 248655
  chr1:55740624-55740917
  hypo

SEQ ID NO: 297388 - DNA, 331 bp, Homo sapiens; identical to SEQ ID NO: 221363
  chr1:56943370-56943701
  hypo

SEQ ID NO: 297389 - DNA, 747 bp, Homo sapiens; identical to SEQ ID NO: 221364
  chr1:57044295-57045042
  hypo

SEQ ID NO: 297390 - DNA, 134 bp, Homo sapiens; identical to SEQ ID NO: 278448
  chr1:57110514-57110648
  hypo

SEQ ID NO: 297391 - DNA, 168 bp, Homo sapiens; identical to SEQ ID NO: 278449
  chr1:57110714-57110882
  hypo

SEQ ID NO: 297392 - DNA, 121 bp, Homo sapiens; identical to SEQ ID NO: 197553
  chr1:59369443-59369564
  hypo

SEQ ID NO: 297393 - DNA, 190 bp, Homo sapiens; identical to SEQ ID NO: 278458
  chr1:59369778-59369968
  hypo

SEQ ID NO: 297394 - DNA, 34 bp, Homo sapiens; identical to SEQ ID NO: 248656
  chr1:59500703-59500737
  hypo

SEQ ID NO: 297395 - DNA, 46 bp, Homo sapiens; identical to SEQ ID NO: 248657
  chr1:59500767-59500813
  hypo

SEQ ID NO: 297396 - DNA, 190 bp, Homo sapiens; identical to SEQ ID NO: 197554
  chr1:59762030-59762220
  hypo

SEQ ID NO: 297397 - DNA, 54 bp, Homo sapiens; identical to SEQ ID NO: 248658
  chr1:59893085-59893139
  hypo

SEQ ID NO: 297398 - DNA, 155 bp, Homo sapiens
  chr1:59911863-59912018
  hypo
caggggcttcatcacgatcttggaatattttggtggcaactttaagatcttttgttttctgactcttagatctctttcttttggtggcatgggaaaattccctcaactcgattatttattcagttctttcatgctccccatattgtcatggccac

SEQ ID NO: 297399 - DNA, 204 bp, Homo sapiens; identical to SEQ ID NO: 207028
  chr1:60220992-60221196
  hypo

SEQ ID NO: 297400 - DNA, 219 bp, Homo sapiens; identical to SEQ ID NO: 278462
  chr1:60280122-60280341
  hypo

SEQ ID NO: 297401 - DNA, 279 bp, Homo sapiens; identical to SEQ ID NO: 35762
  chr1:60280812-60281091
  hypo

SEQ ID NO: 297402 - DNA, 198 bp, Homo sapiens; identical to SEQ ID NO: 248661
  chr1:60382733-60382931
  hypo

SEQ ID NO: 297403 - DNA, 42 bp, Homo sapiens; identical to SEQ ID NO: 248662
  chr1:61333528-61333570
  hypo

SEQ ID NO: 297404 - DNA, 62 bp, Homo sapiens
  chr1:61339555-61339617
  hypo
gcgagaaacgccctgttatcaggtgtcatagcctgaactccgtcctaataaacagtaaggaa

SEQ ID NO: 297405 - DNA, 76 bp, Homo sapiens; identical to SEQ ID NO: 207030
  chr1:61445392-61445468
  hypo

SEQ ID NO: 297406 - DNA, 216 bp, Homo sapiens; identical to SEQ ID NO: 248665
  chr1:61456417-61456633
  hypo

SEQ ID NO: 297407 - DNA, 133 bp, Homo sapiens; identical to SEQ ID NO: 278466
  chr1:61508554-61508687
  hypo

SEQ ID NO: 297408 - DNA, 215 bp, Homo sapiens; identical to SEQ ID NO: 278467
  chr1:61508954-61509169
  hypo

SEQ ID NO: 297409 - DNA, 40 bp, Homo sapiens; identical to SEQ ID NO: 197558
  chr1:61516034-61516074
  hypo

SEQ ID NO: 297410 - DNA, 36 bp, Homo sapiens; identical to SEQ ID NO: 207033
  chr1:61541526-61541562
  hypo

SEQ ID NO: 297411 - DNA, 359 bp, Homo sapiens; identical to SEQ ID NO: 197560
  chr1:61547845-61548204
  hypo

SEQ ID NO: 297412 - DNA, 771 bp, Homo sapiens; identical to SEQ ID NO: 278471
  chr1:61548437-61549208
  hypo

SEQ ID NO: 297413 - DNA, 267 bp, Homo sapiens; identical to SEQ ID NO: 278472
  chr1:61549310-61549577
  hypo

SEQ ID NO: 297414 - DNA, 252 bp, Homo sapiens; identical to SEQ ID NO: 207037
  chr1:61601535-61601787
  hypo

SEQ ID NO: 297415 - DNA, 63 bp, Homo sapiens; identical to SEQ ID NO: 248668
  chr1:61716877-61716940
  hypo

SEQ ID NO: 297416 - DNA, 133 bp, Homo sapiens; identical to SEQ ID NO: 248669
  chr1:61833608-61833741
  hypo

SEQ ID NO: 297417 - DNA, 159 bp, Homo sapiens; identical to SEQ ID NO: 248670
  chr1:61875330-61875489
  hypo

SEQ ID NO: 297418 - DNA, 416 bp, Homo sapiens; identical to SEQ ID NO: 207038
  chr1:61913159-61913575
  hypo

SEQ ID NO: 297419 - DNA, 117 bp, Homo sapiens; identical to SEQ ID NO: 207039
  chr1:62119988-62120105
  hypo

SEQ ID NO: 297420 - DNA, 420 bp, Homo sapiens; identical to SEQ ID NO: 197564
  chr1:62207842-62208262
  hypo

SEQ ID NO: 297421 - DNA, 519 bp, Homo sapiens; identical to SEQ ID NO: 510
  chr1:62208291-62208810
  hypo

SEQ ID NO: 297422 - DNA, 36 bp, Homo sapiens; identical to SEQ ID NO: 248673
  chr1:62213623-62213659
  hypo

SEQ ID NO: 297423 - DNA, 58 bp, Homo sapiens; identical to SEQ ID NO: 207042
  chr1:62729380-62729438
  hypo

SEQ ID NO: 297424 - DNA, 210 bp, Homo sapiens; identical to SEQ ID NO: 278477
  chr1:62784145-62784355
  hypo

SEQ ID NO: 297425 - DNA, 60 bp, Homo sapiens; identical to SEQ ID NO: 248675
  chr1:62836529-62836589
  hypo

SEQ ID NO: 297426 - DNA, 38 bp, Homo sapiens; identical to SEQ ID NO: 248676
  chr1:63831676-63831714
  hypo

SEQ ID NO: 297427 - DNA, 224 bp, Homo sapiens; identical to SEQ ID NO: 248677
  chr1:63832612-63832836
  hypo

SEQ ID NO: 297428 - DNA, 41 bp, Homo sapiens; identical to SEQ ID NO: 248678
  chr1:64014770-64014811
  hypo

SEQ ID NO: 297429 - DNA, 184 bp, Homo sapiens; identical to SEQ ID NO: 248679
  chr1:64104294-64104478
  hypo

SEQ ID NO: 297430 - DNA, 130 bp, Homo sapiens; identical to SEQ ID NO: 207044
  chr1:64383872-64384002
  hypo

SEQ ID NO: 297431 - DNA, 149 bp, Homo sapiens; identical to SEQ ID NO: 248681
  chr1:64734441-64734590
  hypo

SEQ ID NO: 297432 - DNA, 419 bp, Homo sapiens; identical to SEQ ID NO: 35809
  chr1:65210939-65211358
  hypo

SEQ ID NO: 297433 - DNA, 68 bp, Homo sapiens; identical to SEQ ID NO: 248682
  chr1:65316659-65316727
  hypo

SEQ ID NO: 297434 - DNA, 91 bp, Homo sapiens; identical to SEQ ID NO: 248683
  chr1:65513412-65513503
  hypo

SEQ ID NO: 297435 - DNA, 39 bp, Homo sapiens; identical to SEQ ID NO: 197579
  chr1:65720329-65720368
  hypo

SEQ ID NO: 297436 - DNA, 81 bp, Homo sapiens; identical to SEQ ID NO: 248684
  chr1:65796414-65796495
  hypo

SEQ ID NO: 297437 - DNA, 230 bp, Homo sapiens; identical to SEQ ID NO: 197582
  chr1:66258847-66259077
  hypo

SEQ ID NO: 297438 - DNA, 127 bp, Homo sapiens; identical to SEQ ID NO: 248685
  chr1:66834312-66834439
  hypo

SEQ ID NO: 297439 - DNA, 37 bp, Homo sapiens; identical to SEQ ID NO: 278508
  chr1:67773095-67773132
  hypo

SEQ ID NO: 297440 - DNA, 61 bp, Homo sapiens; identical to SEQ ID NO: 278509
  chr1:67773780-67773841
  hypo

SEQ ID NO: 297441 - DNA, 111 bp, Homo sapiens; identical to SEQ ID NO: 248686
  chr1:68174580-68174691
  hypo

SEQ ID NO: 297442 - DNA, 36 bp, Homo sapiens; identical to SEQ ID NO: 248687
  chr1:68344803-68344839
  hypo

SEQ ID NO: 297443 - DNA, 130 bp, Homo sapiens; identical to SEQ ID NO: 248688
  chr1:68629018-68629148
  hypo

SEQ ID NO: 297444 - DNA, 35 bp, Homo sapiens; identical to SEQ ID NO: 248690
  chr1:69982630-69982665
  hypo

SEQ ID NO: 297445 - DNA, 34 bp, Homo sapiens; identical to SEQ ID NO: 248691
  chr1:69982905-69982939
  hypo

SEQ ID NO: 297446 - DNA, 45 bp, Homo sapiens; identical to SEQ ID NO: 207048
  chr1:70661586-70661631
  hypo

SEQ ID NO: 297447 - DNA, 48 bp, Homo sapiens; identical to SEQ ID NO: 207049
  chr1:70710406-70710454
  hypo

SEQ ID NO: 297448 - DNA, 35 bp, Homo sapiens; identical to SEQ ID NO: 248694
  chr1:70720484-70720519
  hypo

SEQ ID NO: 297449 - DNA, 186 bp, Homo sapiens
  chr1:71519814-71520000
  hypo
cacccagctggaggcggatgggctgcgcttctcaaattgctttgaggaacgttcttttagtggggagggagtgcctttcctgaagaagtccttgggatggacatgctgatcctgaatgagtcttaagaagtacaggtttcccaagacccggagaagacagcaagcctgtgttcccagccagcgcta

SEQ ID NO: 297450 - DNA, 36 bp, Homo sapiens; identical to SEQ ID NO: 207050
  chr1:71555024-71555060
  hypo

SEQ ID NO: 297451 - DNA, 34 bp, Homo sapiens; identical to SEQ ID NO: 207051
  chr1:72383170-72383204
  hypo

SEQ ID NO: 297452 - DNA, 144 bp, Homo sapiens; identical to SEQ ID NO: 248699
  chr1:72740462-72740606
  hypo

SEQ ID NO: 297453 - DNA, 41 bp, Homo sapiens; identical to SEQ ID NO: 207052
  chr1:73222393-73222434
  hypo

SEQ ID NO: 297454 - DNA, 73 bp, Homo sapiens; identical to SEQ ID NO: 248701
  chr1:77165571-77165644
  hypo

SEQ ID NO: 297455 - DNA, 95 bp, Homo sapiens; identical to SEQ ID NO: 248702
  chr1:77510044-77510139
  hypo

SEQ ID NO: 297456 - DNA, 35 bp, Homo sapiens; identical to SEQ ID NO: 248703
  chr1:78152467-78152502
  hypo

SEQ ID NO: 297457 - DNA, 162 bp, Homo sapiens; identical to SEQ ID NO: 207053
  chr1:78254759-78254921
  hypo

SEQ ID NO: 297458 - DNA, 90 bp, Homo sapiens; identical to SEQ ID NO: 207054
  chr1:78458353-78458443
  hypo

SEQ ID NO: 297459 - DNA, 80 bp, Homo sapiens; identical to SEQ ID NO: 207055
  chr1:78463740-78463820
  hypo

SEQ ID NO: 297460 - DNA, 35 bp, Homo sapiens; identical to SEQ ID NO: 248707
  chr1:78510240-78510275
  hypo

SEQ ID NO: 297461 - DNA, 31 bp, Homo sapiens; identical to SEQ ID NO: 248708
  chr1:79267843-79267874
  hypo

SEQ ID NO: 297462 - DNA, 129 bp, Homo sapiens; identical to SEQ ID NO: 207056
  chr1:83243221-83243350
  hypo

SEQ ID NO: 297463 - DNA, 809 bp, Homo sapiens; identical to SEQ ID NO: 197610
  chr1:84543409-84544218
  hypo

SEQ ID NO: 297464 - DNA, 34 bp, Homo sapiens; identical to SEQ ID NO: 278573
  chr1:85358277-85358311
  hypo

SEQ ID NO: 297465 - DNA, 813 bp, Homo sapiens; identical to SEQ ID NO: 278575
  chr1:85462469-85463282
  hypo

SEQ ID NO: 297466 - DNA, 38 bp, Homo sapiens; identical to SEQ ID NO: 248711
  chr1:85646087-85646125
  hypo

SEQ ID NO: 297467 - DNA, 436 bp, Homo sapiens; identical to SEQ ID NO: 278580
  chr1:85666727-85667163
  hypo

SEQ ID NO: 297468 - DNA, 256 bp, Homo sapiens; identical to SEQ ID NO: 248712
  chr1:85743256-85743512
  hypo

SEQ ID NO: 297469 - DNA, 1196 bp, Homo sapiens; identical to SEQ ID NO: 278584
  chr1:85929935-85931131
  hypo

SEQ ID NO: 297470 - DNA, 153 bp, Homo sapiens; identical to SEQ ID NO: 278585
  chr1:86042081-86042234
  hypo

SEQ ID NO: 297471 - DNA, 98 bp, Homo sapiens; identical to SEQ ID NO: 248713
  chr1:86048506-86048604
  hypo

SEQ ID NO: 297472 - DNA, 145 bp, Homo sapiens; identical to SEQ ID NO: 248714
  chr1:86175121-86175266
  hypo

SEQ ID NO: 297473 - DNA, 105 bp, Homo sapiens; identical to SEQ ID NO: 248715
  chr1:86277766-86277871
  hypo

SEQ ID NO: 297474 - DNA, 212 bp, Homo sapiens; identical to SEQ ID NO: 248717
  chr1:86973442-86973654
  hypo

SEQ ID NO: 297475 - DNA, 90 bp, Homo sapiens; identical to SEQ ID NO: 248718
  chr1:87299759-87299849
  hypo

SEQ ID NO: 297476 - DNA, 168 bp, Homo sapiens; identical to SEQ ID NO: 248719
  chr1:87607280-87607448
  hypo

SEQ ID NO: 297477 - DNA, 127 bp, Homo sapiens; identical to SEQ ID NO: 197623
  chr1:87793799-87793926
  hypo

SEQ ID NO: 297478 - DNA, 84 bp, Homo sapiens; identical to SEQ ID NO: 207063
  chr1:89148474-89148558
  hypo

SEQ ID NO: 297479 - DNA, 77 bp, Homo sapiens; identical to SEQ ID NO: 248721
  chr1:89228941-89229018
  hypo

SEQ ID NO: 297480 - DNA, 36 bp, Homo sapiens; identical to SEQ ID NO: 248722
  chr1:89451827-89451863
  hypo

SEQ ID NO: 297481 - DNA, 105 bp, Homo sapiens; identical to SEQ ID NO: 248723
  chr1:89919387-89919492
  hypo

SEQ ID NO: 297482 - DNA, 34 bp, Homo sapiens; identical to SEQ ID NO: 248724
  chr1:89984977-89985011
  hypo

SEQ ID NO: 297483 - DNA, 255 bp, Homo sapiens; identical to SEQ ID NO: 248725
  chr1:90075874-90076129
  hypo

SEQ ID NO: 297484 - DNA, 1191 bp, Homo sapiens; identical to SEQ ID NO: 278602
  chr1:90098146-90099337
  hypo

SEQ ID NO: 297485 - DNA, 143 bp, Homo sapiens; identical to SEQ ID NO: 221399
  chr1:90228347-90228490
  hypo

SEQ ID NO: 297486 - DNA, 146 bp, Homo sapiens; identical to SEQ ID NO: 103789
  chr1:90228980-90229126
  hypo

SEQ ID NO: 297487 - DNA, 439 bp, Homo sapiens; identical to SEQ ID NO: 197628
  chr1:90308853-90309292
  hypo

SEQ ID NO: 297488 - DNA, 162 bp, Homo sapiens; identical to SEQ ID NO: 248726
  chr1:90400241-90400403
  hypo

SEQ ID NO: 297489 - DNA, 198 bp, Homo sapiens; identical to SEQ ID NO: 207066
  chr1:90448905-90449103
  hypo

SEQ ID NO: 297490 - DNA, 45 bp, Homo sapiens; identical to SEQ ID NO: 248728
  chr1:90725982-90726027
  hypo

SEQ ID NO: 297491 - DNA, 34 bp, Homo sapiens; identical to SEQ ID NO: 248729
  chr1:91072761-91072795
  hypo

SEQ ID NO: 297492 - DNA, 201 bp, Homo sapiens; identical to SEQ ID NO: 278616
  chr1:91183993-91184194
  hypo

SEQ ID NO: 297493 - DNA, 35 bp, Homo sapiens; identical to SEQ ID NO: 248730
  chr1:91483484-91483519
  hypo

SEQ ID NO: 297494 - DNA, 216 bp, Homo sapiens; identical to SEQ ID NO: 248731
  chr1:92001228-92001444
  hypo

SEQ ID NO: 297495 - DNA, 32 bp, Homo sapiens; identical to SEQ ID NO: 248732
  chr1:92068723-92068755
  hypo

SEQ ID NO: 297496 - DNA, 195 bp, Homo sapiens; identical to SEQ ID NO: 248733
  chr1:92102535-92102730
  hypo

SEQ ID NO: 297497 - DNA, 44 bp, Homo sapiens; identical to SEQ ID NO: 248734
  chr1:92371564-92371608
  hypo

SEQ ID NO: 297498 - DNA, 43 bp, Homo sapiens; identical to SEQ ID NO: 248735
  chr1:92662385-92662428
  hypo

SEQ ID NO: 297499 - DNA, 190 bp, Homo sapiens; identical to SEQ ID NO: 248736
  chr1:92683500-92683690
  hypo

SEQ ID NO: 297500 - DNA, 35 bp, Homo sapiens; identical to SEQ ID NO: 221405
  chr1:92946278-92946313
  hypo

SEQ ID NO: 297501 - DNA, 60 bp, Homo sapiens; identical to SEQ ID NO: 278633
  chr1:92946605-92946665
  hypo

SEQ ID NO: 297502 - DNA, 924 bp, Homo sapiens; identical to SEQ ID NO: 35990
  chr1:92946768-92947692
  hypo

SEQ ID NO: 297503 - DNA, 328 bp, Homo sapiens; identical to SEQ ID NO: 197643
  chr1:93250604-93250932
  hypo

SEQ ID NO: 297504 - DNA, 34 bp, Homo sapiens; identical to SEQ ID NO: 248737
  chr1:93647454-93647488
  hypo

SEQ ID NO: 297505 - DNA, 1055 bp, Homo sapiens; identical to SEQ ID NO: 197645
  chr1:93913410-93914465
  hypo

SEQ ID NO: 297506 - DNA, 44 bp, Homo sapiens; identical to SEQ ID NO: 248738
  chr1:93973207-93973251
  hypo

SEQ ID NO: 297507 - DNA, 33 bp, Homo sapiens; identical to SEQ ID NO: 248739
  chr1:93975136-93975169
  hypo

SEQ ID NO: 297508 - DNA, 99 bp, Homo sapiens; identical to SEQ ID NO: 248740
  chr1:94033359-94033458
  hypo

SEQ ID NO: 297509 - DNA, 140 bp, Homo sapiens; identical to SEQ ID NO: 248741
  chr1:94041432-94041572
  hypo

SEQ ID NO: 297510 - DNA, 167 bp, Homo sapiens; identical to SEQ ID NO: 248742
  chr1:94043256-94043423
  hypo

SEQ ID NO: 297511 - DNA, 195 bp, Homo sapiens
  chr1:94047863-94048058
  hypo
gtccatgctcagtacgtgctgggcgatgaccttggggtcgttgttggtgaacagttcttttgcacgtttcaacattgctgtttccaggggcttattctcagggggaaggaactttgactcaaactcgttgggcctgaaggaggagacagtctccaggaggggcgtcacaaactcgcccttgtcccactgcccctt

SEQ ID NO: 297512 - DNA, 329 bp, Homo sapiens
  chr1:94048088-94048417
  hypo
tctttccctgtcatcatcatcaaggatcaagtagttgacgccagagttccggggacctggcgcctcattctgcttggctgtgagcagttctgtgtggcttccctgggcacatgagggtagctttgctcccctgccgcagcctgtggcaaacgctgggttcagttcacagtagttggcctctgagttgagccaggcagagggagacgagggaaccttgaggaacggcaccttgcagggcttaggcgggggcttagggcacagttgactgtctgatcccctcagcgcctccccagccctggcgtctgaggagaccctccgaaccactgctg

SEQ ID NO: 297513 - DNA, 307 bp, Homo sapiens; identical to SEQ ID NO: 278647
  chr1:94146398-94146705
  hypo

SEQ ID NO: 297514 - DNA, 150 bp, Homo sapiens; identical to SEQ ID NO: 278648
  chr1:94146706-94146856
  hypo

SEQ ID NO: 297515 - DNA, 52 bp, Homo sapiens
  chr1:94345695-94345747
  hypo
tgtgtgcatgtctttagggacggcatctaaaagagaggaggccgtccctgac

SEQ ID NO: 297516 - DNA, 32 bp, Homo sapiens; identical to SEQ ID NO: 248745
  chr1:94346027-94346059
  hypo

SEQ ID NO: 297517 - DNA, 66 bp, Homo sapiens; identical to SEQ ID NO: 207071
  chr1:94354603-94354669
  hypo

SEQ ID NO: 297518 - DNA, 192 bp, Homo sapiens; identical to SEQ ID NO: 248747
  chr1:94466588-94466780
  hypo

SEQ ID NO: 297519 - DNA, 278 bp, Homo sapiens; identical to SEQ ID NO: 207072
  chr1:94495948-94496226
  hypo

SEQ ID NO: 297520 - DNA, 43 bp, Homo sapiens; identical to SEQ ID NO: 207073
  chr1:94507308-94507351
  hypo

SEQ ID NO: 297521 - DNA, 102 bp, Homo sapiens; identical to SEQ ID NO: 207074
  chr1:94507711-94507813
  hypo

SEQ ID NO: 297522 - DNA, 102 bp, Homo sapiens; identical to SEQ ID NO: 207075
  chr1:94546400-94546502
  hypo

SEQ ID NO: 297523 - DNA, 514 bp, Homo sapiens; identical to SEQ ID NO: 197649
  chr1:94702421-94702935
  hypo

SEQ ID NO: 297524 - DNA, 88 bp, Homo sapiens; identical to SEQ ID NO: 197650
  chr1:94702990-94703078
  hypo

SEQ ID NO: 297525 - DNA, 221 bp, Homo sapiens; identical to SEQ ID NO: 197651
  chr1:94703103-94703324
  hypo

SEQ ID NO: 297526 - DNA, 171 bp, Homo sapiens; identical to SEQ ID NO: 197652
  chr1:94703357-94703528
  hypo

SEQ ID NO: 297527 - DNA, 49 bp, Homo sapiens; identical to SEQ ID NO: 248752
  chr1:94719184-94719233
  hypo

SEQ ID NO: 297528 - DNA, 765 bp, Homo sapiens; identical to SEQ ID NO: 197655
  chr1:95006902-95007667
  hypo

SEQ ID NO: 297529 - DNA, 31 bp, Homo sapiens; identical to SEQ ID NO: 248753
  chr1:95222491-95222522
  hypo

SEQ ID NO: 297530 - DNA, 106 bp, Homo sapiens; identical to SEQ ID NO: 248754
  chr1:95315114-95315220
  hypo

SEQ ID NO: 297531 - DNA, 143 bp, Homo sapiens; identical to SEQ ID NO: 248755
  chr1:95340131-95340274
  hypo

SEQ ID NO: 297532 - DNA, 151 bp, Homo sapiens; identical to SEQ ID NO: 248756
  chr1:95343781-95343932
  hypo

SEQ ID NO: 297533 - DNA, 345 bp, Homo sapiens; identical to SEQ ID NO: 197658
  chr1:95391395-95391740
  hypo

SEQ ID NO: 297534 - DNA, 935 bp, Homo sapiens; identical to SEQ ID NO: 278667
  chr1:95582633-95583568
  hypo

SEQ ID NO: 297535 - DNA, 42 bp, Homo sapiens; identical to SEQ ID NO: 207083
  chr1:97185733-97185775
  hypo

SEQ ID NO: 297536 - DNA, 83 bp, Homo sapiens; identical to SEQ ID NO: 248759
  chr1:98336379-98336462
  hypo

SEQ ID NO: 297537 - DNA, 372 bp, Homo sapiens; identical to SEQ ID NO: 278670
  chr1:98386195-98386567
  hypo

SEQ ID NO: 297538 - DNA, 310 bp, Homo sapiens; identical to SEQ ID NO: 36023
  chr1:98386618-98386928
  hypo

SEQ ID NO: 297539 - DNA, 756 bp, Homo sapiens; identical to SEQ ID NO: 278674
  chr1:99126875-99127631
  hypo

SEQ ID NO: 297540 - DNA, 339 bp, Homo sapiens; identical to SEQ ID NO: 278675
  chr1:99127671-99128010
  hypo

SEQ ID NO: 297541 - DNA, 168 bp, Homo sapiens; identical to SEQ ID NO: 207088
  chr1:99667088-99667256
  hypo

SEQ ID NO: 297542 - DNA, 163 bp, Homo sapiens; identical to SEQ ID NO: 248761
  chr1:100106764-100106927
  hypo

SEQ ID NO: 297543 - DNA, 181 bp, Homo sapiens; identical to SEQ ID NO: 207089
  chr1:100500499-100500680
  hypo

SEQ ID NO: 297544 - DNA, 83 bp, Homo sapiens; identical to SEQ ID NO: 207090
  chr1:100928310-100928393
  hypo

SEQ ID NO: 297545 - DNA, 81 bp, Homo sapiens; identical to SEQ ID NO: 207091
  chr1:100928423-100928504
  hypo

SEQ ID NO: 297546 - DNA, 216 bp, Homo sapiens; identical to SEQ ID NO: 248765
  chr1:100931955-100932171
  hypo

SEQ ID NO: 297547 - DNA, 35 bp, Homo sapiens; identical to SEQ ID NO: 207092
  chr1:101675509-101675544
  hypo

SEQ ID NO: 297548 - DNA, 288 bp, Homo sapiens; identical to SEQ ID NO: 278688
  chr1:101702081-101702369
  hypo

SEQ ID NO: 297549 - DNA, 392 bp, Homo sapiens; identical to SEQ ID NO: 278689
  chr1:101702796-101703188
  hypo

SEQ ID NO: 297550 - DNA, 38 bp, Homo sapiens
  chr1:101721447-101721485
  hypo
ctgctcctgactcaccactgttcgctcttgtgaggaac

SEQ ID NO: 297551 - DNA, 90 bp, Homo sapiens; identical to SEQ ID NO: 248768
  chr1:101721807-101721897
  hypo

SEQ ID NO: 297552 - DNA, 32 bp, Homo sapiens; identical to SEQ ID NO: 248769
  chr1:102292873-102292905
  hypo

SEQ ID NO: 297553 - DNA, 1057 bp, Homo sapiens; identical to SEQ ID NO: 278697
  chr1:107599193-107600250
  hypo

SEQ ID NO: 297554 - DNA, 63 bp, Homo sapiens; identical to SEQ ID NO: 278699
  chr1:107684495-107684558
  hypo

SEQ ID NO: 297555 - DNA, 105 bp, Homo sapiens; identical to SEQ ID NO: 248770
  chr1:108230624-108230729
  hypo

SEQ ID NO: 297556 - DNA, 44 bp, Homo sapiens; identical to SEQ ID NO: 248771
  chr1:108314147-108314191
  hypo

SEQ ID NO: 297557 - DNA, 350 bp, Homo sapiens; identical to SEQ ID NO: 248772
  chr1:108735214-108735564
  hypo

SEQ ID NO: 297558 - DNA, 118 bp, Homo sapiens; identical to SEQ ID NO: 197686
  chr1:109204221-109204339
  hypo

SEQ ID NO: 297559 - DNA, 203 bp, Homo sapiens; identical to SEQ ID NO: 248773
  chr1:109241833-109242036
  hypo

SEQ ID NO: 297560 - DNA, 38 bp, Homo sapiens; identical to SEQ ID NO: 248775
  chr1:109585725-109585763
  hypo

SEQ ID NO: 297561 - DNA, 104 bp, Homo sapiens; identical to SEQ ID NO: 207097
  chr1:109609236-109609340
  hypo

SEQ ID NO: 297562 - DNA, 91 bp, Homo sapiens; identical to SEQ ID NO: 248777
  chr1:109646190-109646281
  hypo

SEQ ID NO: 297563 - DNA, 294 bp, Homo sapiens
  chr1:109646918-109647212
  hypo
tgagtagatgtatccaaacttgcttagcctttcacctctggagaactggagtcaattcgggtgaatccggtcccgccgtgcatcatggcaaagtgagattgttgtcttgccacctggttcagcttggccagatcaagcggagaaatgatgtgttgtccttgaatcgagtaggcatctagaggtggtccctccaggtcacgggtgcctcgggggtagcccacagccttgctgcaacgatcttggccgcccgcgcagatgactggggacttggccggcatgggctggtatggaatg

SEQ ID NO: 297564 - DNA, 33 bp, Homo sapiens; identical to SEQ ID NO: 248779
  chr1:109679037-109679070
  hypo

SEQ ID NO: 297565 - DNA, 92 bp, Homo sapiens; identical to SEQ ID NO: 248780
  chr1:109679130-109679222
  hypo

SEQ ID NO: 297566 - DNA, 76 bp, Homo sapiens; identical to SEQ ID NO: 207098
  chr1:109725168-109725244
  hypo

SEQ ID NO: 297567 - DNA, 145 bp, Homo sapiens; identical to SEQ ID NO: 248782
  chr1:109741855-109742000
  hypo

SEQ ID NO: 297568 - DNA, 600 bp, Homo sapiens; identical to SEQ ID NO: 207099
  chr1:109795509-109796109
  hypo

SEQ ID NO: 297569 - DNA, 287 bp, Homo sapiens
  chr1:109797580-109797867
  hypo
cccagcctgcctttggtgagcgtggccaggcactggcagagaagcgcccccattaagccttcggtctcccaccagggcagagccctagaccttggttccctagtctagagaaggctcggggcaacatccaggacggctcctcctggcccggcagctctggccccaccctctcccttcggccctgacccttggaggcagtcaccacggcaaccccaaagttcagggaggccggggtgagggggagctgactcccactgcccctttgttttcctcctcttgttctttgt

SEQ ID NO: 297570 - DNA, 40 bp, Homo sapiens
  chr1:109797897-109797937
  hypo
ggagccctgcagcactgcctctctccggtgccctctccct

SEQ ID NO: 297571 - DNA, 35 bp, Homo sapiens; identical to SEQ ID NO: 207100
  chr1:109801647-109801682
  hypo

SEQ ID NO: 297572 - DNA, 113 bp, Homo sapiens; identical to SEQ ID NO: 207101
  chr1:109805486-109805599
  hypo

SEQ ID NO: 297573 - DNA, 31 bp, Homo sapiens; identical to SEQ ID NO: 248788
  chr1:109805822-109805853
  hypo

SEQ ID NO: 297574 - DNA, 67 bp, Homo sapiens; identical to SEQ ID NO: 207102
  chr1:109812120-109812187
  hypo

SEQ ID NO: 297575 - DNA, 262 bp, Homo sapiens; identical to SEQ ID NO: 207103
  chr1:109816071-109816333
  hypo

SEQ ID NO: 297576 - DNA, 296 bp, Homo sapiens; identical to SEQ ID NO: 248791
  chr1:109839444-109839740
  hypo

SEQ ID NO: 297577 - DNA, 617 bp, Homo sapiens; identical to SEQ ID NO: 278713
  chr1:109940219-109940836
  hypo

SEQ ID NO: 297578 - DNA, 99 bp, Homo sapiens; identical to SEQ ID NO: 278719
  chr1:110025979-110026078
  hypo

SEQ ID NO: 297579 - DNA, 78 bp, Homo sapiens; identical to SEQ ID NO: 207105
  chr1:110042271-110042349
  hypo

SEQ ID NO: 297580 - DNA, 206 bp, Homo sapiens; identical to SEQ ID NO: 197691
  chr1:110052079-110052285
  hypo

SEQ ID NO: 297581 - DNA, 260 bp, Homo sapiens; identical to SEQ ID NO: 248793
  chr1:110073072-110073332
  hypo

SEQ ID NO: 297582 - DNA, 170 bp, Homo sapiens; identical to SEQ ID NO: 207107
  chr1:110085339-110085509
  hypo

SEQ ID NO: 297583 - DNA, 44 bp, Homo sapiens; identical to SEQ ID NO: 207108
  chr1:110085848-110085892
  hypo

SEQ ID NO: 297584 - DNA, 102 bp, Homo sapiens; identical to SEQ ID NO: 207109
  chr1:110167962-110168064
  hypo

SEQ ID NO: 297585 - DNA, 270 bp, Homo sapiens; identical to SEQ ID NO: 207110
  chr1:110170706-110170976
  hypo

SEQ ID NO: 297586 - DNA, 156 bp, Homo sapiens; identical to SEQ ID NO: 248799
  chr1:110305360-110305516
  hypo

SEQ ID NO: 297587 - DNA, 37 bp, Homo sapiens; identical to SEQ ID NO: 207111
  chr1:110338324-110338361
  hypo

SEQ ID NO: 297588 - DNA, 147 bp, Homo sapiens; identical to SEQ ID NO: 197694
  chr1:110453160-110453307
  hypo

SEQ ID NO: 297589 - DNA, 421 bp, Homo sapiens; identical to SEQ ID NO: 197695
  chr1:110453531-110453952
  hypo

SEQ ID NO: 297590 - DNA, 151 bp, Homo sapiens; identical to SEQ ID NO: 248801
  chr1:110471934-110472085
  hypo

SEQ ID NO: 297591 - DNA, 189 bp, Homo sapiens; identical to SEQ ID NO: 248802
  chr1:110561015-110561204
  hypo

SEQ ID NO: 297592 - DNA, 37 bp, Homo sapiens; identical to SEQ ID NO: 248804
  chr1:110737245-110737282
  hypo

SEQ ID NO: 297593 - DNA, 290 bp, Homo sapiens; identical to SEQ ID NO: 248805
  chr1:110737984-110738274
  hypo

SEQ ID NO: 297594 - DNA, 384 bp, Homo sapiens; identical to SEQ ID NO: 197697
  chr1:110753510-110753894
  hypo

SEQ ID NO: 297595 - DNA, 46 bp, Homo sapiens; identical to SEQ ID NO: 197698
  chr1:110753957-110754003
  hypo

SEQ ID NO: 297596 - DNA, 107 bp, Homo sapiens; identical to SEQ ID NO: 248806
  chr1:110765710-110765817
  hypo

SEQ ID NO: 297597 - DNA, 177 bp, Homo sapiens; identical to SEQ ID NO: 248807
  chr1:110771215-110771392
  hypo

SEQ ID NO: 297598 - DNA, 265 bp, Homo sapiens; identical to SEQ ID NO: 248808
  chr1:110771991-110772256
  hypo

SEQ ID NO: 297599 - DNA, 33 bp, Homo sapiens; identical to SEQ ID NO: 207116
  chr1:110947365-110947398
  hypo

SEQ ID NO: 297600 - DNA, 120 bp, Homo sapiens; identical to SEQ ID NO: 207117
  chr1:110947698-110947818
  hypo

SEQ ID NO: 297601 - DNA, 32 bp, Homo sapiens; identical to SEQ ID NO: 248812
  chr1:111001561-111001593
  hypo

SEQ ID NO: 297602 - DNA, 151 bp, Homo sapiens; identical to SEQ ID NO: 207118
  chr1:111022638-111022789
  hypo

SEQ ID NO: 297603 - DNA, 600 bp, Homo sapiens; identical to SEQ ID NO: 197699
  chr1:111148988-111149588
  hypo

SEQ ID NO: 297604 - DNA, 227 bp, Homo sapiens; identical to SEQ ID NO: 248815
  chr1:111216247-111216474
  hypo

SEQ ID NO: 297605 - DNA, 99 bp, Homo sapiens; identical to SEQ ID NO: 248816
  chr1:111296098-111296197
  hypo

SEQ ID NO: 297606 - DNA, 159 bp, Homo sapiens; identical to SEQ ID NO: 248817
  chr1:111496808-111496967
  hypo

SEQ ID NO: 297607 - DNA, 98 bp, Homo sapiens; identical to SEQ ID NO: 207120
  chr1:112084792-112084890
  hypo

SEQ ID NO: 297608 - DNA, 34 bp, Homo sapiens; identical to SEQ ID NO: 248819
  chr1:112151467-112151501
  hypo

SEQ ID NO: 297609 - DNA, 76 bp, Homo sapiens; identical to SEQ ID NO: 248820
  chr1:112288929-112289005
  hypo

SEQ ID NO: 297610 - DNA, 172 bp, Homo sapiens; identical to SEQ ID NO: 207121
  chr1:112317425-112317597
  hypo

SEQ ID NO: 297611 - DNA, 1035 bp, Homo sapiens; identical to SEQ ID NO: 207122
  chr1:112524370-112525405
  hypo

SEQ ID NO: 297612 - DNA, 426 bp, Homo sapiens; identical to SEQ ID NO: 278753
  chr1:113051157-113051583
  hypo

SEQ ID NO: 297613 - DNA, 161 bp, Homo sapiens; identical to SEQ ID NO: 248823
  chr1:113059791-113059952
  hypo

SEQ ID NO: 297614 - DNA, 150 bp, Homo sapiens; identical to SEQ ID NO: 248824
  chr1:113067109-113067259
  hypo

SEQ ID NO: 297615 - DNA, 197 bp, Homo sapiens; identical to SEQ ID NO: 248825
  chr1:113185130-113185327
  hypo

SEQ ID NO: 297616 - DNA, 117 bp, Homo sapiens; identical to SEQ ID NO: 248826
  chr1:113230414-113230531
  hypo

SEQ ID NO: 297617 - DNA, 205 bp, Homo sapiens; identical to SEQ ID NO: 207124
  chr1:113244294-113244499
  hypo

SEQ ID NO: 297618 - DNA, 190 bp, Homo sapiens; identical to SEQ ID NO: 197708
  chr1:113249226-113249416
  hypo

SEQ ID NO: 297619 - DNA, 155 bp, Homo sapiens; identical to SEQ ID NO: 207126
  chr1:113290951-113291106
  hypo

SEQ ID NO: 297620 - DNA, 91 bp, Homo sapiens; identical to SEQ ID NO: 248829
  chr1:113412275-113412366
  hypo

SEQ ID NO: 297621 - DNA, 35 bp, Homo sapiens; identical to SEQ ID NO: 248830
  chr1:113442040-113442075
  hypo

SEQ ID NO: 297622 - DNA, 154 bp, Homo sapiens; identical to SEQ ID NO: 248831
  chr1:113465948-113466102
  hypo

SEQ ID NO: 297623 - DNA, 1352 bp, Homo sapiens; identical to SEQ ID NO: 278763
  chr1:113498188-113499540
  hypo

SEQ ID NO: 297624 - DNA, 76 bp, Homo sapiens; identical to SEQ ID NO: 248832
  chr1:113630283-113630359
  hypo

SEQ ID NO: 297625 - DNA, 706 bp, Homo sapiens; identical to SEQ ID NO: 197714
  chr1:113932573-113933279
  hypo

SEQ ID NO: 297626 - DNA, 778 bp, Homo sapiens; identical to SEQ ID NO: 36142
  chr1:113933305-113934083
  hypo

SEQ ID NO: 297627 - DNA, 41 bp, Homo sapiens; identical to SEQ ID NO: 248833
  chr1:114246758-114246799
  hypo

SEQ ID NO: 297628 - DNA, 203 bp, Homo sapiens; identical to SEQ ID NO: 221447
  chr1:114302510-114302713
  hypo

SEQ ID NO: 297629 - DNA, 34 bp, Homo sapiens; identical to SEQ ID NO: 248835
  chr1:114435047-114435081
  hypo

SEQ ID NO: 297630 - DNA, 136 bp, Homo sapiens; identical to SEQ ID NO: 207130
  chr1:114522549-114522685
  hypo

SEQ ID NO: 297631 - DNA, 340 bp, Homo sapiens; identical to SEQ ID NO: 248837
  chr1:114522990-114523330
  hypo

SEQ ID NO: 297632 - DNA, 165 bp, Homo sapiens; identical to SEQ ID NO: 278770
  chr1:114695147-114695312
  hypo

SEQ ID NO: 297633 - DNA, 107 bp, Homo sapiens; identical to SEQ ID NO: 197718
  chr1:114697918-114698025
  hypo

SEQ ID NO: 297634 - DNA, 38 bp, Homo sapiens; identical to SEQ ID NO: 248838
  chr1:115184837-115184875
  hypo

SEQ ID NO: 297635 - DNA, 61 bp, Homo sapiens; identical to SEQ ID NO: 197721
  chr1:115258668-115258729
  hypo

SEQ ID NO: 297636 - DNA, 80 bp, Homo sapiens; identical to SEQ ID NO: 248839
  chr1:115261262-115261342
  hypo

SEQ ID NO: 297637 - DNA, 279 bp, Homo sapiens; identical to SEQ ID NO: 248840
  chr1:115829155-115829434
  hypo

SEQ ID NO: 297638 - DNA, 1147 bp, Homo sapiens; identical to SEQ ID NO: 197724
  chr1:116184427-116185574
  hypo

SEQ ID NO: 297639 - DNA, 51 bp, Homo sapiens; identical to SEQ ID NO: 207134
  chr1:116214053-116214104
  hypo

SEQ ID NO: 297640 - DNA, 68 bp, Homo sapiens
  chr1:116214987-116215055
  hypo
gaatttggctgccgaagcttttgtgtagctgaggcaccagcaggcccgaggcacgagtgaatccaggt

SEQ ID NO: 297641 - DNA, 159 bp, Homo sapiens; identical to SEQ ID NO: 248843
  chr1:116219341-116219500
  hypo

SEQ ID NO: 297642 - DNA, 36 bp, Homo sapiens; identical to SEQ ID NO: 207135
  chr1:116224397-116224433
  hypo

SEQ ID NO: 297643 - DNA, 156 bp, Homo sapiens; identical to SEQ ID NO: 248845
  chr1:116225057-116225213
  hypo

SEQ ID NO: 297644 - DNA, 100 bp, Homo sapiens; identical to SEQ ID NO: 207136
  chr1:116226508-116226608
  hypo

SEQ ID NO: 297645 - DNA, 132 bp, Homo sapiens; identical to SEQ ID NO: 248847
  chr1:116233750-116233882
  hypo

SEQ ID NO: 297646 - DNA, 186 bp, Homo sapiens; identical to SEQ ID NO: 248848
  chr1:116295788-116295974
  hypo

SEQ ID NO: 297647 - DNA, 217 bp, Homo sapiens
  chr1:116573985-116574202
  hypo
gattcattcctgaatcacctcgttggttatactcccagggtcgactgagtgaggctgaagaggcgctgtacctcattgccaagaggaaccgcaaactcaagtgcacgttctcactaacacacccagccaacaggagctgcagggagactggaagtttcctggatctctttcgttaccgggtcctgttaggacacactttgatcctgatgttcatctg

SEQ ID NO: 297648 - DNA, 51 bp, Homo sapiens; identical to SEQ ID NO: 248850
  chr1:116840629-116840680
  hypo

SEQ ID NO: 297649 - DNA, 143 bp, Homo sapiens; identical to SEQ ID NO: 248851
  chr1:116935455-116935598
  hypo

SEQ ID NO: 297650 - DNA, 56 bp, Homo sapiens; identical to SEQ ID NO: 248852
  chr1:116952565-116952621
  hypo

SEQ ID NO: 297651 - DNA, 61 bp, Homo sapiens; identical to SEQ ID NO: 248853
  chr1:117060147-117060208
  hypo

SEQ ID NO: 297652 - DNA, 203 bp, Homo sapiens; identical to SEQ ID NO: 207137
  chr1:117076615-117076818
  hypo

SEQ ID NO: 297653 - DNA, 160 bp, Homo sapiens; identical to SEQ ID NO: 207138
  chr1:117077074-117077234
  hypo

SEQ ID NO: 297654 - DNA, 76 bp, Homo sapiens; identical to SEQ ID NO: 248856
  chr1:117127238-117127314
  hypo

SEQ ID NO: 297655 - DNA, 171 bp, Homo sapiens; identical to SEQ ID NO: 207139
  chr1:117131423-117131594
  hypo

SEQ ID NO: 297656 - DNA, 34 bp, Homo sapiens; identical to SEQ ID NO: 207140
  chr1:117157580-117157614
  hypo

SEQ ID NO: 297657 - DNA, 338 bp, Homo sapiens; identical to SEQ ID NO: 197729
  chr1:117209809-117210147
  hypo

SEQ ID NO: 297658 - DNA, 37 bp, Homo sapiens; identical to SEQ ID NO: 248859
  chr1:117250043-117250080
  hypo

SEQ ID NO: 297659 - DNA, 73 bp, Homo sapiens; identical to SEQ ID NO: 207142
  chr1:117297901-117297974
  hypo

SEQ ID NO: 297660 - DNA, 96 bp, Homo sapiens; identical to SEQ ID NO: 248861
  chr1:117450853-117450949
  hypo

SEQ ID NO: 297661 - DNA, 35 bp, Homo sapiens; identical to SEQ ID NO: 207143
  chr1:117451189-117451224
  hypo

SEQ ID NO: 297662 - DNA, 49 bp, Homo sapiens; identical to SEQ ID NO: 248863
  chr1:117490699-117490748
  hypo

SEQ ID NO: 297663 - DNA, 69 bp, Homo sapiens; identical to SEQ ID NO: 207144
  chr1:117503897-117503966
  hypo

SEQ ID NO: 297664 - DNA, 75 bp, Homo sapiens; identical to SEQ ID NO: 248865
  chr1:117527381-117527456
  hypo

SEQ ID NO: 297665 - DNA, 226 bp, Homo sapiens; identical to SEQ ID NO: 248866
  chr1:117529538-117529764
  hypo

SEQ ID NO: 297666 - DNA, 42 bp, Homo sapiens; identical to SEQ ID NO: 248867
  chr1:117560924-117560966
  hypo

SEQ ID NO: 297667 - DNA, 219 bp, Homo sapiens; identical to SEQ ID NO: 248868
  chr1:117630359-117630578
  hypo

SEQ ID NO: 297668 - DNA, 378 bp, Homo sapiens; identical to SEQ ID NO: 278790
  chr1:117664693-117665071
  hypo

SEQ ID NO: 297669 - DNA, 263 bp, Homo sapiens; identical to SEQ ID NO: 278791
  chr1:117665105-117665368
  hypo

SEQ ID NO: 297670 - DNA, 166 bp, Homo sapiens; identical to SEQ ID NO: 248870
  chr1:117918952-117919118
  hypo

SEQ ID NO: 297671 - DNA, 169 bp, Homo sapiens; identical to SEQ ID NO: 248871
  chr1:118083728-118083897
  hypo

SEQ ID NO: 297672 - DNA, 52 bp, Homo sapiens; identical to SEQ ID NO: 248872
  chr1:118114932-118114984
  hypo

SEQ ID NO: 297673 - DNA, 151 bp, Homo sapiens; identical to SEQ ID NO: 207145
  chr1:118147372-118147523
  hypo

SEQ ID NO: 297674 - DNA, 80 bp, Homo sapiens; identical to SEQ ID NO: 207146
  chr1:118163137-118163217
  hypo

SEQ ID NO: 297675 - DNA, 233 bp, Homo sapiens; identical to SEQ ID NO: 207147
  chr1:118163673-118163906
  hypo

SEQ ID NO: 297676 - DNA, 228 bp, Homo sapiens; identical to SEQ ID NO: 207148
  chr1:118166362-118166590
  hypo

SEQ ID NO: 297677 - DNA, 150 bp, Homo sapiens; identical to SEQ ID NO: 207149
  chr1:118172978-118173128
  hypo

SEQ ID NO: 297678 - DNA, 222 bp, Homo sapiens
  chr1:118173564-118173786
  hypo
gtttctgtcagtgccgcccagaatctagggagctggagcctgtcgggaggcttggtttcataccattcctcacccagctcagagcaacgcaggctacctgttctggccatgactggatcacaggtctcccagctcagggcattttcaccacagcaggccatcccagggccaccttttacttaggaagtttccgaaaatgggaaatgtccctaagggaaaggc

SEQ ID NO: 297679 - DNA, 84 bp, Homo sapiens; identical to SEQ ID NO: 207151
  chr1:118173816-118173900
  hypo

SEQ ID NO: 297680 - DNA, 177 bp, Homo sapiens; identical to SEQ ID NO: 248879
  chr1:118198080-118198257
  hypo

SEQ ID NO: 297681 - DNA, 92 bp, Homo sapiens; identical to SEQ ID NO: 248880
  chr1:118223360-118223452
  hypo

SEQ ID NO: 297682 - DNA, 170 bp, Homo sapiens; identical to SEQ ID NO: 207152
  chr1:120166012-120166182
  hypo

SEQ ID NO: 297683 - DNA, 39 bp, Homo sapiens; identical to SEQ ID NO: 207153
  chr1:120166427-120166466
  hypo

SEQ ID NO: 297684 - DNA, 32 bp, Homo sapiens; identical to SEQ ID NO: 248884
  chr1:120321632-120321664
  hypo

SEQ ID NO: 297685 - DNA, 34 bp, Homo sapiens; identical to SEQ ID NO: 207154
  chr1:150283344-150283378
  hypo

SEQ ID NO: 297686 - DNA, 186 bp, Homo sapiens; identical to SEQ ID NO: 248886
  chr1:150484152-150484338
  hypo

SEQ ID NO: 297687 - DNA, 95 bp, Homo sapiens; identical to SEQ ID NO: 248887
  chr1:150502358-150502453
  hypo

SEQ ID NO: 297688 - DNA, 54 bp, Homo sapiens
  chr1:150504349-150504403
  hypo
cccactcctctgcctgccttcgaagctccgtcaaaatgcaagtgcagatggctg

SEQ ID NO: 297689 - DNA, 34 bp, Homo sapiens; identical to SEQ ID NO: 248889
  chr1:150519104-150519138
  hypo

SEQ ID NO: 297690 - DNA, 39 bp, Homo sapiens; identical to SEQ ID NO: 248890
  chr1:150519664-150519703
  hypo

SEQ ID NO: 297691 - DNA, 120 bp, Homo sapiens; identical to SEQ ID NO: 248891
  chr1:150520494-150520614
  hypo

SEQ ID NO: 297692 - DNA, 110 bp, Homo sapiens; identical to SEQ ID NO: 207155
  chr1:150529747-150529857
  hypo

SEQ ID NO: 297693 - DNA, 55 bp, Homo sapiens
  chr1:150565447-150565502
  hypo
tatgtgtcttgaattcatgctttttgctttttatattcaagctggtggttttagg

SEQ ID NO: 297694 - DNA, 87 bp, Homo sapiens; identical to SEQ ID NO: 207156
  chr1:150579404-150579491
  hypo

SEQ ID NO: 297695 - DNA, 43 bp, Homo sapiens; identical to SEQ ID NO: 207157
  chr1:150581803-150581846
  hypo

SEQ ID NO: 297696 - DNA, 138 bp, Homo sapiens; identical to SEQ ID NO: 207158
  chr1:150633720-150633858
  hypo

SEQ ID NO: 297697 - DNA, 38 bp, Homo sapiens; identical to SEQ ID NO: 207159
  chr1:150643983-150644021
  hypo

SEQ ID NO: 297698 - DNA, 34 bp, Homo sapiens; identical to SEQ ID NO: 248899
  chr1:150722022-150722056
  hypo

SEQ ID NO: 297699 - DNA, 136 bp, Homo sapiens; identical to SEQ ID NO: 248900
  chr1:150722391-150722527
  hypo

SEQ ID NO: 297700 - DNA, 41 bp, Homo sapiens; identical to SEQ ID NO: 248901
  chr1:150748731-150748772
  hypo

SEQ ID NO: 297701 - DNA, 120 bp, Homo sapiens; identical to SEQ ID NO: 248902
  chr1:150850362-150850482
  hypo

SEQ ID NO: 297702 - DNA, 37 bp, Homo sapiens; identical to SEQ ID NO: 248903
  chr1:150858612-150858649
  hypo

SEQ ID NO: 297703 - DNA, 77 bp, Homo sapiens; identical to SEQ ID NO: 248904
  chr1:150889716-150889793
  hypo

SEQ ID NO: 297704 - DNA, 42 bp, Homo sapiens; identical to SEQ ID NO: 248905
  chr1:150890073-150890115
  hypo

SEQ ID NO: 297705 - DNA, 66 bp, Homo sapiens; identical to SEQ ID NO: 248906
  chr1:150935072-150935138
  hypo

SEQ ID NO: 297706 - DNA, 37 bp, Homo sapiens; identical to SEQ ID NO: 207160
  chr1:150941388-150941425
  hypo

SEQ ID NO: 297707 - DNA, 34 bp, Homo sapiens; identical to SEQ ID NO: 207161
  chr1:150941756-150941790
  hypo

SEQ ID NO: 297708 - DNA, 37 bp, Homo sapiens; identical to SEQ ID NO: 207162
  chr1:151019715-151019752
  hypo

SEQ ID NO: 297709 - DNA, 31 bp, Homo sapiens; identical to SEQ ID NO: 207163
  chr1:151098357-151098388
  hypo

SEQ ID NO: 297710 - DNA, 243 bp, Homo sapiens
  chr1:151105803-151106046
  hypo
gagagagggcgcgggagccccggagtctcgatgtccttgccccgacgtcggtgggcgcggcgacaagcacaggagaccaggaggccagagactgaggcgcccagggcaaaagctgcggccacactggccaggaggagtgggatggggacggagcgggaggccgaggctgggggcaggtcccggcgcacgcctgccgaccgagagggaggagggaggctcagccaaggggaggcggtgcggggt

SEQ ID NO: 297711 - DNA, 99 bp, Homo sapiens; identical to SEQ ID NO: 248911
  chr1:151146165-151146264
  hypo

SEQ ID NO: 297712 - DNA, 64 bp, Homo sapiens; identical to SEQ ID NO: 207164
  chr1:151148217-151148281
  hypo

SEQ ID NO: 297713 - DNA, 36 bp, Homo sapiens; identical to SEQ ID NO: 248915
  chr1:151173584-151173620
  hypo

SEQ ID NO: 297714 - DNA, 35 bp, Homo sapiens; identical to SEQ ID NO: 248916
  chr1:151231642-151231677
  hypo

SEQ ID NO: 297715 - DNA, 125 bp, Homo sapiens; identical to SEQ ID NO: 207165
  chr1:151252542-151252667
  hypo

SEQ ID NO: 297716 - DNA, 47 bp, Homo sapiens; identical to SEQ ID NO: 207166
  chr1:151252761-151252808
  hypo

SEQ ID NO: 297717 - DNA, 56 bp, Homo sapiens; identical to SEQ ID NO: 248918
  chr1:151293165-151293221
  hypo

SEQ ID NO: 297718 - DNA, 32 bp, Homo sapiens; identical to SEQ ID NO: 248919
  chr1:151322965-151322997
  hypo

SEQ ID NO: 297719 - DNA, 31 bp, Homo sapiens; identical to SEQ ID NO: 248920
  chr1:151323237-151323268
  hypo

SEQ ID NO: 297720 - DNA, 242 bp, Homo sapiens; identical to SEQ ID NO: 248921
  chr1:151338720-151338962
  hypo

SEQ ID NO: 297721 - DNA, 169 bp, Homo sapiens; identical to SEQ ID NO: 207168
  chr1:151339197-151339366
  hypo

SEQ ID NO: 297722 - DNA, 123 bp, Homo sapiens
  chr1:151345676-151345799
  hypo
accagctcgtgctctttagtgggtgcctgggtgtgtgtggatttgtgtgtctgggcatgtgtgtgttcctgtatacctgcgtgttgctcgtgcacgtgcctgcatgagtgtgtatctgtgcct

SEQ ID NO: 297723 - DNA, 237 bp, Homo sapiens
  chr1:151345829-151346066
  hypo
ctgtgagtgtgcttgtgtgtatttgtgcgtgtgtgtgtgtgcgcgcctctgtatgtgcctaccagagtatctacgcctgtgtgtgtgtgtgtgtgtgtgtgcgcgcctctgtgagtatgtgcttgctagagtatctacgcctgtgtggacatgtgcataagtgcttgtgtatgtgtagtgtgtggctatgtggctgtgcatgtgcttgtgtaagcctgcgcacgtatgtgttcctgt

SEQ ID NO: 297724 - DNA, 177 bp, Homo sapiens; identical to SEQ ID NO: 248924
  chr1:151356360-151356537
  hypo

SEQ ID NO: 297725 - DNA, 77 bp, Homo sapiens; identical to SEQ ID NO: 248925
  chr1:151373754-151373831
  hypo

SEQ ID NO: 297726 - DNA, 284 bp, Homo sapiens; identical to SEQ ID NO: 207169
  chr1:151378239-151378523
  hypo

SEQ ID NO: 297727 - DNA, 34 bp, Homo sapiens; identical to SEQ ID NO: 248927
  chr1:151378888-151378922
  hypo

SEQ ID NO: 297728 - DNA, 149 bp, Homo sapiens; identical to SEQ ID NO: 207170
  chr1:151481647-151481796
  hypo

SEQ ID NO: 297729 - DNA, 61 bp, Homo sapiens; identical to SEQ ID NO: 207171
  chr1:151557511-151557572
  hypo

SEQ ID NO: 297730 - DNA, 104 bp, Homo sapiens; identical to SEQ ID NO: 207172
  chr1:151597623-151597727
  hypo

SEQ ID NO: 297731 - DNA, 40 bp, Homo sapiens; identical to SEQ ID NO: 197751
  chr1:151693822-151693862
  hypo

SEQ ID NO: 297732 - DNA, 196 bp, Homo sapiens; identical to SEQ ID NO: 207174
  chr1:151699289-151699485
  hypo

SEQ ID NO: 297733 - DNA, 85 bp, Homo sapiens; identical to SEQ ID NO: 248932
  chr1:151742598-151742683
  hypo

SEQ ID NO: 297734 - DNA, 303 bp, Homo sapiens; identical to SEQ ID NO: 278838
  chr1:151763859-151764162
  hypo

SEQ ID NO: 297735 - DNA, 80 bp, Homo sapiens; identical to SEQ ID NO: 248933
  chr1:151829048-151829128
  hypo

SEQ ID NO: 297736 - DNA, 33 bp, Homo sapiens; identical to SEQ ID NO: 248934
  chr1:151952135-151952168
  hypo

SEQ ID NO: 297737 - DNA, 90 bp, Homo sapiens; identical to SEQ ID NO: 278845
  chr1:152084599-152084689
  hypo

SEQ ID NO: 297738 - DNA, 336 bp, Homo sapiens; identical to SEQ ID NO: 248935
  chr1:152191329-152191665
  hypo

SEQ ID NO: 297739 - DNA, 401 bp, Homo sapiens; identical to SEQ ID NO: 248936
  chr1:152192944-152193345
  hypo

SEQ ID NO: 297740 - DNA, 332 bp, Homo sapiens; identical to SEQ ID NO: 207175
  chr1:152733097-152733429
  hypo

SEQ ID NO: 297741 - DNA, 91 bp, Homo sapiens; identical to SEQ ID NO: 248938
  chr1:153265798-153265889
  hypo

SEQ ID NO: 297742 - DNA, 32 bp, Homo sapiens; identical to SEQ ID NO: 207176
  chr1:153352635-153352667
  hypo

SEQ ID NO: 297743 - DNA, 512 bp, Homo sapiens; identical to SEQ ID NO: 248940
  chr1:153352907-153353419
  hypo

SEQ ID NO: 297744 - DNA, 161 bp, Homo sapiens; identical to SEQ ID NO: 248941
  chr1:153519006-153519167
  hypo

SEQ ID NO: 297745 - DNA, 153 bp, Homo sapiens; identical to SEQ ID NO: 207178
  chr1:153537353-153537506
  hypo

SEQ ID NO: 297746 - DNA, 267 bp, Homo sapiens; identical to SEQ ID NO: 207179
  chr1:153540242-153540509
  hypo

SEQ ID NO: 297747 - DNA, 420 bp, Homo sapiens; identical to SEQ ID NO: 197755
  chr1:153651023-153651443
  hypo

SEQ ID NO: 297748 - DNA, 122 bp, Homo sapiens; identical to SEQ ID NO: 207181
  chr1:153914346-153914468
  hypo

SEQ ID NO: 297749 - DNA, 176 bp, Homo sapiens; identical to SEQ ID NO: 197756
  chr1:153936615-153936791
  hypo

SEQ ID NO: 297750 - DNA, 180 bp, Homo sapiens; identical to SEQ ID NO: 207183
  chr1:153937388-153937568
  hypo

SEQ ID NO: 297751 - DNA, 330 bp, Homo sapiens; identical to SEQ ID NO: 197758
  chr1:153958647-153958977
  hypo

SEQ ID NO: 297752 - DNA, 308 bp, Homo sapiens; identical to SEQ ID NO: 104239
  chr1:153963300-153963608
  hypo

SEQ ID NO: 297753 - DNA, 32 bp, Homo sapiens; identical to SEQ ID NO: 207186
  chr1:154115066-154115098
  hypo

SEQ ID NO: 297754 - DNA, 57 bp, Homo sapiens; identical to SEQ ID NO: 207187
  chr1:154116696-154116753
  hypo

SEQ ID NO: 297755 - DNA, 234 bp, Homo sapiens; identical to SEQ ID NO: 207188
  chr1:154179783-154180017
  hypo

SEQ ID NO: 297756 - DNA, 31 bp, Homo sapiens; identical to SEQ ID NO: 207189
  chr1:154243765-154243796
  hypo

SEQ ID NO: 297757 - DNA, 78 bp, Homo sapiens; identical to SEQ ID NO: 248953
  chr1:154273378-154273456
  hypo

SEQ ID NO: 297758 - DNA, 449 bp, Homo sapiens; identical to SEQ ID NO: 278860
  chr1:154297541-154297990
  hypo

SEQ ID NO: 297759 - DNA, 72 bp, Homo sapiens; identical to SEQ ID NO: 278861
  chr1:154298038-154298110
  hypo

SEQ ID NO: 297760 - DNA, 77 bp, Homo sapiens; identical to SEQ ID NO: 248954
  chr1:154315741-154315818
  hypo

SEQ ID NO: 297761 - DNA, 95 bp, Homo sapiens; identical to SEQ ID NO: 207192
  chr1:154343720-154343815
  hypo

SEQ ID NO: 297762 - DNA, 183 bp, Homo sapiens; identical to SEQ ID NO: 207193
  chr1:154402829-154403012
  hypo

SEQ ID NO: 297763 - DNA, 133 bp, Homo sapiens; identical to SEQ ID NO: 248957
  chr1:154407564-154407697
  hypo

SEQ ID NO: 297764 - DNA, 248 bp, Homo sapiens; identical to SEQ ID NO: 278863
  chr1:154474301-154474549
  hypo

SEQ ID NO: 297765 - DNA, 192 bp, Homo sapiens
  chr1:154685555-154685747
  hypo
gttaccatggccatcgttaccgtctggtccttgctagcatgcttcacagccgtgcaaactcaagcccaacctcaggagtccctcaatgtgcagctcataaaatgacacggaaaaggtttagtcagctcattaatttcacgcagagacacacctgagcgatttcacttaagaaacaaacaccaagtttcaaaa

SEQ ID NO: 297766 - DNA, 80 bp, Homo sapiens
  chr1:154685777-154685857
  hypo
gaaacaaacttgagcctaggtatttttgaaccaagcagaaatttttctttgcttgcctggtcccgcgctgtccagtgcga

SEQ ID NO: 297767 - DNA, 241 bp, Homo sapiens; identical to SEQ ID NO: 207194
  chr1:154931248-154931489
  hypo

SEQ ID NO: 297768 - DNA, 39 bp, Homo sapiens; identical to SEQ ID NO: 248961
  chr1:154933540-154933579
  hypo

SEQ ID NO: 297769 - DNA, 61 bp, Homo sapiens; identical to SEQ ID NO: 248962
  chr1:154933609-154933670
  hypo

SEQ ID NO: 297770 - DNA, 37 bp, Homo sapiens; identical to SEQ ID NO: 248963
  chr1:154944721-154944758
  hypo

SEQ ID NO: 297771 - DNA, 145 bp, Homo sapiens; identical to SEQ ID NO: 207195
  chr1:154954433-154954578
  hypo

SEQ ID NO: 297772 - DNA, 154 bp, Homo sapiens; identical to SEQ ID NO: 248965
  chr1:154965405-154965559
  hypo

SEQ ID NO: 297773 - DNA, 36 bp, Homo sapiens; identical to SEQ ID NO: 207196
  chr1:154987689-154987725
  hypo

SEQ ID NO: 297774 - DNA, 31 bp, Homo sapiens; identical to SEQ ID NO: 248967
  chr1:155005174-155005205
  hypo

SEQ ID NO: 297775 - DNA, 242 bp, Homo sapiens; identical to SEQ ID NO: 248968
  chr1:155012856-155013098
  hypo

SEQ ID NO: 297776 - DNA, 106 bp, Homo sapiens; identical to SEQ ID NO: 248969
  chr1:155065377-155065483
  hypo

SEQ ID NO: 297777 - DNA, 37 bp, Homo sapiens; identical to SEQ ID NO: 207198
  chr1:155082409-155082446
  hypo

SEQ ID NO: 297778 - DNA, 537 bp, Homo sapiens; identical to SEQ ID NO: 278874
  chr1:155099556-155100093
  hypo

SEQ ID NO: 297779 - DNA, 32 bp, Homo sapiens; identical to SEQ ID NO: 207200
  chr1:155149477-155149509
  hypo

SEQ ID NO: 297780 - DNA, 122 bp, Homo sapiens; identical to SEQ ID NO: 207201
  chr1:155149965-155150087
  hypo

SEQ ID NO: 297781 - DNA, 443 bp, Homo sapiens; identical to SEQ ID NO: 278878
  chr1:155152069-155152512
  hypo

SEQ ID NO: 297782 - DNA, 147 bp, Homo sapiens; identical to SEQ ID NO: 248975
  chr1:155156247-155156394
  hypo

SEQ ID NO: 297783 - DNA, 34 bp, Homo sapiens; identical to SEQ ID NO: 207202
  chr1:155161023-155161057
  hypo

SEQ ID NO: 297784 - DNA, 54 bp, Homo sapiens; identical to SEQ ID NO: 60917
  chr1:155162034-155162088
  hypo

SEQ ID NO: 297785 - DNA, 295 bp, Homo sapiens; identical to SEQ ID NO: 197771
  chr1:155164120-155164415
  hypo

SEQ ID NO: 297786 - DNA, 597 bp, Homo sapiens; identical to SEQ ID NO: 197772
  chr1:155164455-155165052
  hypo

SEQ ID NO: 297787 - DNA, 457 bp, Homo sapiens; identical to SEQ ID NO: 221478
  chr1:155294652-155295109
  hypo

SEQ ID NO: 297788 - DNA, 72 bp, Homo sapiens
  chr1:155311712-155311784
  hypo
ggaaggagactcaccgagaaatcttttttgggagtgagcttcttggggaagtgatcaaaagcatagggtttg

SEQ ID NO: 297789 - DNA, 87 bp, Homo sapiens; identical to SEQ ID NO: 248979
  chr1:155362561-155362648
  hypo

SEQ ID NO: 297790 - DNA, 223 bp, Homo sapiens; identical to SEQ ID NO: 248980
  chr1:155363622-155363845
  hypo

SEQ ID NO: 297791 - DNA, 183 bp, Homo sapiens; identical to SEQ ID NO: 207206
  chr1:155403643-155403826
  hypo

SEQ ID NO: 297792 - DNA, 34 bp, Homo sapiens; identical to SEQ ID NO: 248982
  chr1:155412080-155412114
  hypo

SEQ ID NO: 297793 - DNA, 82 bp, Homo sapiens; identical to SEQ ID NO: 207207
  chr1:155466712-155466794
  hypo

SEQ ID NO: 297794 - DNA, 180 bp, Homo sapiens; identical to SEQ ID NO: 248984
  chr1:155516123-155516303
  hypo

SEQ ID NO: 297795 - DNA, 135 bp, Homo sapiens; identical to SEQ ID NO: 248985
  chr1:155518910-155519045
  hypo

SEQ ID NO: 297796 - DNA, 33 bp, Homo sapiens; identical to SEQ ID NO: 248987
  chr1:155620901-155620934
  hypo

SEQ ID NO: 297797 - DNA, 75 bp, Homo sapiens; identical to SEQ ID NO: 207208
  chr1:155640724-155640799
  hypo

SEQ ID NO: 297798 - DNA, 151 bp, Homo sapiens; identical to SEQ ID NO: 248989
  chr1:155654055-155654206
  hypo

SEQ ID NO: 297799 - DNA, 71 bp, Homo sapiens
  chr1:155659996-155660067
  hypo
agaaaggaaaagatctccagatgtggaatcttctactggatcctgtaacagaaagaagacattaggctggg

SEQ ID NO: 297800 - DNA, 33 bp, Homo sapiens; identical to SEQ ID NO: 248991
  chr1:155674456-155674489
  hypo

SEQ ID NO: 297801 - DNA, 265 bp, Homo sapiens; identical to SEQ ID NO: 278886
  chr1:155830059-155830324
  hypo

SEQ ID NO: 297802 - DNA, 127 bp, Homo sapiens; identical to SEQ ID NO: 197775
  chr1:155830382-155830509
  hypo

SEQ ID NO: 297803 - DNA, 82 bp, Homo sapiens; identical to SEQ ID NO: 248992
  chr1:155862237-155862319
  hypo

SEQ ID NO: 297804 - DNA, 34 bp, Homo sapiens; identical to SEQ ID NO: 248993
  chr1:155881927-155881961
  hypo

SEQ ID NO: 297805 - DNA, 50 bp, Homo sapiens; identical to SEQ ID NO: 207211
  chr1:155893764-155893814
  hypo

SEQ ID NO: 297806 - DNA, 350 bp, Homo sapiens
  chr1:155911574-155911924
  hypo
tgctgatgatgctccgatgcctgtcaaattcctagccctgaggctcatggttgccctggcctatgggcttgtgggggccattggcttgctgggaaatttggcggtgctgtgggtactgagtaactgtgcccggagagcccctggcccaccttcagacaccttcgtcttcaacctggctctggcggacctgggactggcactcactctccccttttgggcagccgagtcggcactggactttcactggcccttcggaggtgccctctgcaagatggttctgacggccactgtcctcaacgtctatgccagcatcttcctcatcacagcgctgagcgttgctcgctactggg

SEQ ID NO: 297807 - DNA, 85 bp, Homo sapiens
  chr1:155911954-155912039
  hypo
acctctcactcttctgggcccgaatagccaccctggcagtgtgggcggcggctgccctggtgacggtgcccacagctgtcttcgg

SEQ ID NO: 297808 - DNA, 202 bp, Homo sapiens; identical to SEQ ID NO: 248997
  chr1:155931417-155931619
  hypo

SEQ ID NO: 297809 - DNA, 61 bp, Homo sapiens
  chr1:155954396-155954457
  hypo
gcagagctgaagaatttaggagccatgggaacagagcaccgggttatgtggagacagtggc

SEQ ID NO: 297810 - DNA, 36 bp, Homo sapiens; identical to SEQ ID NO: 248999
  chr1:155972836-155972872
  hypo

SEQ ID NO: 297811 - DNA, 120 bp, Homo sapiens; identical to SEQ ID NO: 249000
  chr1:156009312-156009432
  hypo

SEQ ID NO: 297812 - DNA, 75 bp, Homo sapiens; identical to SEQ ID NO: 207212
  chr1:156010548-156010623
  hypo

SEQ ID NO: 297813 - DNA, 36 bp, Homo sapiens; identical to SEQ ID NO: 207213
  chr1:156032532-156032568
  hypo

SEQ ID NO: 297814 - DNA, 317 bp, Homo sapiens; identical to SEQ ID NO: 207214
  chr1:156047207-156047524
  hypo

SEQ ID NO: 297815 - DNA, 157 bp, Homo sapiens; identical to SEQ ID NO: 197778
  chr1:156084256-156084413
  hypo

SEQ ID NO: 297816 - DNA, 423 bp, Homo sapiens; identical to SEQ ID NO: 278895
  chr1:156084629-156085052
  hypo

SEQ ID NO: 297817 - DNA, 48 bp, Homo sapiens
  chr1:156111314-156111362
  hypo
tgagggcatagggccgcacacaaacactgccccacaagctggcagcac

SEQ ID NO: 297818 - DNA, 201 bp, Homo sapiens; identical to SEQ ID NO: 138312
  chr1:156111379-156111580
  hypo

SEQ ID NO: 297819 - DNA, 143 bp, Homo sapiens; identical to SEQ ID NO: 207216
  chr1:156143323-156143466
  hypo

SEQ ID NO: 297820 - DNA, 196 bp, Homo sapiens; identical to SEQ ID NO: 207217
  chr1:156179133-156179329
  hypo

SEQ ID NO: 297821 - DNA, 38 bp, Homo sapiens; identical to SEQ ID NO: 207218
  chr1:156239861-156239899
  hypo

SEQ ID NO: 297822 - DNA, 37 bp, Homo sapiens; identical to SEQ ID NO: 60959
  chr1:156254134-156254171
  hypo

SEQ ID NO: 297823 - DNA, 495 bp, Homo sapiens; identical to SEQ ID NO: 207220
  chr1:156255262-156255757
  hypo

SEQ ID NO: 297824 - DNA, 190 bp, Homo sapiens; identical to SEQ ID NO: 207221
  chr1:156256080-156256270
  hypo

SEQ ID NO: 297825 - DNA, 36 bp, Homo sapiens; identical to SEQ ID NO: 249012
  chr1:156269034-156269070
  hypo

SEQ ID NO: 297826 - DNA, 84 bp, Homo sapiens; identical to SEQ ID NO: 207222
  chr1:156276623-156276707
  hypo

SEQ ID NO: 297827 - DNA, 150 bp, Homo sapiens; identical to SEQ ID NO: 207223
  chr1:156362387-156362537
  hypo

SEQ ID NO: 297828 - DNA, 49 bp, Homo sapiens; identical to SEQ ID NO: 278902
  chr1:156405318-156405367
  hypo

SEQ ID NO: 297829 - DNA, 95 bp, Homo sapiens; identical to SEQ ID NO: 278903
  chr1:156406613-156406708
  hypo

SEQ ID NO: 297830 - DNA, 106 bp, Homo sapiens; identical to SEQ ID NO: 207224
  chr1:156432018-156432124
  hypo

SEQ ID NO: 297831 - DNA, 144 bp, Homo sapiens; identical to SEQ ID NO: 207225
  chr1:156432942-156433086
  hypo

SEQ ID NO: 297832 - DNA, 122 bp, Homo sapiens
  chr1:156433373-156433495
  hypo
tgagacatgtggaagtgccccgccctgaaggccgccccccattcttccctgctgagatgaagcactgcctctcaccctgatggggccacaccagtccttccttcccatcctcgcggcaccaa

SEQ ID NO: 297833 - DNA, 288 bp, Homo sapiens; identical to SEQ ID NO: 249019
  chr1:156445328-156445616
  hypo

SEQ ID NO: 297834 - DNA, 262 bp, Homo sapiens; identical to SEQ ID NO: 278906
  chr1:156541960-156542222
  hypo

SEQ ID NO: 297835 - DNA, 113 bp, Homo sapiens; identical to SEQ ID NO: 221488
  chr1:156542391-156542504
  hypo

SEQ ID NO: 297836 - DNA, 221 bp, Homo sapiens; identical to SEQ ID NO: 207226
  chr1:156553586-156553807
  hypo

SEQ ID NO: 297837 - DNA, 240 bp, Homo sapiens; identical to SEQ ID NO: 249021
  chr1:156572018-156572258
  hypo

SEQ ID NO: 297838 - DNA, 202 bp, Homo sapiens; identical to SEQ ID NO: 197783
  chr1:156594227-156594429
  hypo

SEQ ID NO: 297839 - DNA, 38 bp, Homo sapiens; identical to SEQ ID NO: 197784
  chr1:156595265-156595303
  hypo

SEQ ID NO: 297840 - DNA, 39 bp, Homo sapiens; identical to SEQ ID NO: 207229
  chr1:156664565-156664604
  hypo

SEQ ID NO: 297841 - DNA, 101 bp, Homo sapiens; identical to SEQ ID NO: 249023
  chr1:156667364-156667465
  hypo

SEQ ID NO: 297842 - DNA, 618 bp, Homo sapiens; identical to SEQ ID NO: 278921
  chr1:156675831-156676449
  hypo

SEQ ID NO: 297843 - DNA, 135 bp, Homo sapiens; identical to SEQ ID NO: 197790
  chr1:156676539-156676674
  hypo

SEQ ID NO: 297844 - DNA, 341 bp, Homo sapiens; identical to SEQ ID NO: 249024
  chr1:156754046-156754387
  hypo

SEQ ID NO: 297845 - DNA, 42 bp, Homo sapiens; identical to SEQ ID NO: 249025
  chr1:156768640-156768682
  hypo

SEQ ID NO: 297846 - DNA, 132 bp, Homo sapiens; identical to SEQ ID NO: 249026
  chr1:156785630-156785762
  hypo

SEQ ID NO: 297847 - DNA, 203 bp, Homo sapiens
  chr1:156823676-156823879
  hypo
cacgatgtggttggcgccaggtgctggctgcagcagtccccagtcaatggtggagaggtggcagagctcctggttcttctccacacgcacagccccacgcagcacggccccaagtgcaggcagtgccacgtcacgcagatgtggcatctcaaagatgaccagtgcatagcccaggaagaggcgcgtcccgcggatgactgcta

SEQ ID NO: 297848 - DNA, 132 bp, Homo sapiens
  chr1:156823935-156824067
  hypo
tagtcggtgacctgggtgaggcgagggaagctgaggccgcggaagtcctccccggtggctgtgaacatgagcaggatctgcaggtggccctccaccacgctgcagttctccagctgacgaagctctgccacc

SEQ ID NO: 297849 - DNA, 47 bp, Homo sapiens
  chr1:156838347-156838394
  hypo
acgacgtgctgctgcggtgccaggtggaggggcggggcctggagcag

SEQ ID NO: 297850 - DNA, 41 bp, Homo sapiens
  chr1:156849661-156849702
  hypo
agtgctgggattacaggcgtgaaccaccgagcttgtgtatt

SEQ ID NO: 297851 - DNA, 177 bp, Homo sapiens; identical to SEQ ID NO: 197793
  chr1:156897224-156897401
  hypo

SEQ ID NO: 297852 - DNA, 222 bp, Homo sapiens; identical to SEQ ID NO: 197794
  chr1:156897431-156897653
  hypo

SEQ ID NO: 297853 - DNA, 167 bp, Homo sapiens; identical to SEQ ID NO: 249031
  chr1:157678816-157678983
  hypo

SEQ ID NO: 297854 - DNA, 488 bp, Homo sapiens
  chr1:157895542-157896030
  hypo
ctacctctttcagttccagtgtcgcgtcttctcctcagcttcattgctcctggcgccctggccttcattggccatgtggtggagcttcactgcgaagacaggagagcgtctgcacccattctgttttggtgttaccatgaaaatgtgactctggggaaagcctcagcaccttctggaggaggagcgtccttcaacctctccgtcgccgcagagcattctgggaactactcctgtgaggccgacaatggctggggatcccagcgcagtgaggtggtggcactcacggtcacaggtgggacatggcaaacagctccttccagagagcttgttgcaattataccaagcaatggctggtgcttcctttccttcggaaatttctgctcctcgaggaatcagagttcctctagaaagcgccttaatgctccagggctctccctgtaattgggttttttgtttgtttgttttgttttttgtttcggcttttgttt

SEQ ID NO: 297855 - DNA, 140 bp, Homo sapiens; identical to SEQ ID NO: 249033
  chr1:158059255-158059395
  hypo

SEQ ID NO: 297856 - DNA, 82 bp, Homo sapiens; identical to SEQ ID NO: 249034
  chr1:158098452-158098534
  hypo

SEQ ID NO: 297857 - DNA, 75 bp, Homo sapiens; identical to SEQ ID NO: 207236
  chr1:158237172-158237247
  hypo

SEQ ID NO: 297858 - DNA, 67 bp, Homo sapiens; identical to SEQ ID NO: 207237
  chr1:158669637-158669704
  hypo

SEQ ID NO: 297859 - DNA, 79 bp, Homo sapiens; identical to SEQ ID NO: 207238
  chr1:158710986-158711065
  hypo

SEQ ID NO: 297860 - DNA, 33 bp, Homo sapiens; identical to SEQ ID NO: 207239
  chr1:158753870-158753903
  hypo

SEQ ID NO: 297861 - DNA, 120 bp, Homo sapiens; identical to SEQ ID NO: 249039
  chr1:158992059-158992179
  hypo

SEQ ID NO: 297862 - DNA, 146 bp, Homo sapiens; identical to SEQ ID NO: 249040
  chr1:159075005-159075151
  hypo

SEQ ID NO: 297863 - DNA, 429 bp, Homo sapiens; identical to SEQ ID NO: 278938
  chr1:159141761-159142190
  hypo

SEQ ID NO: 297864 - DNA, 45 bp, Homo sapiens; identical to SEQ ID NO: 207241
  chr1:159229596-159229641
  hypo

SEQ ID NO: 297865 - DNA, 37 bp, Homo sapiens; identical to SEQ ID NO: 249043
  chr1:159714653-159714690
  hypo

SEQ ID NO: 297866 - DNA, 32 bp, Homo sapiens; identical to SEQ ID NO: 278940
  chr1:159750347-159750379
  hypo

SEQ ID NO: 297867 - DNA, 361 bp, Homo sapiens; identical to SEQ ID NO: 278941
  chr1:159750772-159751133
  hypo

SEQ ID NO: 297868 - DNA, 676 bp, Homo sapiens; identical to SEQ ID NO: 104420
  chr1:159824348-159825024
  hypo

SEQ ID NO: 297869 - DNA, 175 bp, Homo sapiens; identical to SEQ ID NO: 207243
  chr1:159842714-159842889
  hypo

SEQ ID NO: 297870 - DNA, 64 bp, Homo sapiens
  chr1:159869543-159869607
  hypo
accgcgcccggcccaccagtgctttttcccacaccacatccacaatctttggtccacagaggcc

SEQ ID NO: 297871 - DNA, 194 bp, Homo sapiens; identical to SEQ ID NO: 249046
  chr1:159909833-159910027
  hypo

SEQ ID NO: 297872 - DNA, 111 bp, Homo sapiens
  chr1:159931918-159932029
  hypo
gcctggggacagagcaagactccatctcaaaaaaaaaaaaggtttacctttgacggcaaggggaacagaggatgggaggcaaagggaaaacatggggtagagggataattt

SEQ ID NO: 297873 - DNA, 57 bp, Homo sapiens; identical to SEQ ID NO: 207245
  chr1:159932101-159932158
  hypo

SEQ ID NO: 297874 - DNA, 41 bp, Homo sapiens; identical to SEQ ID NO: 207246
  chr1:159932218-159932259
  hypo

SEQ ID NO: 297875 - DNA, 60 bp, Homo sapiens; identical to SEQ ID NO: 207247
  chr1:160063720-160063780
  hypo

SEQ ID NO: 297876 - DNA, 217 bp, Homo sapiens; identical to SEQ ID NO: 249051
  chr1:160121081-160121298
  hypo

SEQ ID NO: 297877 - DNA, 42 bp, Homo sapiens; identical to SEQ ID NO: 249052
  chr1:160121590-160121632
  hypo

SEQ ID NO: 297878 - DNA, 104 bp, Homo sapiens; identical to SEQ ID NO: 249053
  chr1:160155212-160155316
  hypo

SEQ ID NO: 297879 - DNA, 267 bp, Homo sapiens; identical to SEQ ID NO: 249054
  chr1:160255643-160255910
  hypo

SEQ ID NO: 297880 - DNA, 147 bp, Homo sapiens; identical to SEQ ID NO: 207248
  chr1:160293181-160293328
  hypo

SEQ ID NO: 297881 - DNA, 329 bp, Homo sapiens; identical to SEQ ID NO: 278955
  chr1:160370270-160370599
  hypo

SEQ ID NO: 297882 - DNA, 229 bp, Homo sapiens; identical to SEQ ID NO: 278956
  chr1:160370629-160370858
  hypo

SEQ ID NO: 297883 - DNA, 156 bp, Homo sapiens; identical to SEQ ID NO: 249056
  chr1:160385715-160385871
  hypo

SEQ ID NO: 297884 - DNA, 136 bp, Homo sapiens
  chr1:160523269-160523405
  hypo
ggaagcccattgcgatgtctggaaatagaagatgcagtgagtcttgattctcaggaaataggcccaagaggctgggcaggtttgcccacagtcaggggcattatgaaaattgggtgccctccgaaggagtgccaaa

SEQ ID NO: 297885 - DNA, 188 bp, Homo sapiens; identical to SEQ ID NO: 197809
  chr1:160526915-160527103
  hypo

SEQ ID NO: 297886 - DNA, 233 bp, Homo sapiens; identical to SEQ ID NO: 249061
  chr1:160771682-160771915
  hypo

SEQ ID NO: 297887 - DNA, 78 bp, Homo sapiens; identical to SEQ ID NO: 249062
  chr1:160865083-160865161
  hypo

SEQ ID NO: 297888 - DNA, 127 bp, Homo sapiens; identical to SEQ ID NO: 249063
  chr1:160878333-160878460
  hypo

SEQ ID NO: 297889 - DNA, 45 bp, Homo sapiens; identical to SEQ ID NO: 249064
  chr1:160902456-160902501
  hypo

SEQ ID NO: 297890 - DNA, 55 bp, Homo sapiens; identical to SEQ ID NO: 207253
  chr1:160924874-160924929
  hypo

SEQ ID NO: 297891 - DNA, 322 bp, Homo sapiens; identical to SEQ ID NO: 249066
  chr1:160953510-160953832
  hypo

SEQ ID NO: 297892 - DNA, 36 bp, Homo sapiens; identical to SEQ ID NO: 207254
  chr1:160985844-160985880
  hypo

SEQ ID NO: 297893 - DNA, 35 bp, Homo sapiens; identical to SEQ ID NO: 207255
  chr1:160986420-160986455
  hypo

SEQ ID NO: 297894 - DNA, 190 bp, Homo sapiens
  chr1:161044440-161044630
  hypo
ctcattgctgacatggcagacgtagatgccgctgtgctcagtggtcagtgggggaaagcccaaagtgtccccatccactcgtaccccactgggcagaggcccatccagcctggaagacagggaagctgaagggtgccagccgggaagggctgaagccaccaccacccaacgtgtccagacagctctccac

SEQ ID NO: 297895 - DNA, 32 bp, Homo sapiens; identical to SEQ ID NO: 249071
  chr1:161055748-161055780
  hypo

SEQ ID NO: 297896 - DNA, 152 bp, Homo sapiens; identical to SEQ ID NO: 278962
  chr1:161068574-161068726
  hypo

SEQ ID NO: 297897 - DNA, 189 bp, Homo sapiens; identical to SEQ ID NO: 207256
  chr1:161145675-161145864
  hypo

SEQ ID NO: 297898 - DNA, 274 bp, Homo sapiens; identical to SEQ ID NO: 249073
  chr1:161166336-161166610
  hypo

SEQ ID NO: 297899 - DNA, 37 bp, Homo sapiens; identical to SEQ ID NO: 249074
  chr1:161305961-161305998
  hypo

SEQ ID NO: 297900 - DNA, 240 bp, Homo sapiens; identical to SEQ ID NO: 207257
  chr1:161367367-161367607
  hypo

SEQ ID NO: 297901 - DNA, 298 bp, Homo sapiens; identical to SEQ ID NO: 197816
  chr1:161369561-161369859
  hypo

SEQ ID NO: 297902 - DNA, 313 bp, Homo sapiens; identical to SEQ ID NO: 197817
  chr1:161369945-161370258
  hypo

SEQ ID NO: 297903 - DNA, 36 bp, Homo sapiens; identical to SEQ ID NO: 249077
  chr1:161370747-161370783
  hypo

SEQ ID NO: 297904 - DNA, 713 bp, Homo sapiens; identical to SEQ ID NO: 278978
  chr1:161409991-161410704
  hypo

SEQ ID NO: 297905 - DNA, 80 bp, Homo sapiens; identical to SEQ ID NO: 207261
  chr1:161450487-161450567
  hypo

SEQ ID NO: 297906 - DNA, 242 bp, Homo sapiens; identical to SEQ ID NO: 207262
  chr1:161953579-161953821
  hypo

SEQ ID NO: 297907 - DNA, 187 bp, Homo sapiens; identical to SEQ ID NO: 249081
  chr1:161982118-161982305
  hypo

SEQ ID NO: 297908 - DNA, 930 bp, Homo sapiens; identical to SEQ ID NO: 197822
  chr1:162039135-162040065
  hypo

SEQ ID NO: 297909 - DNA, 45 bp, Homo sapiens; identical to SEQ ID NO: 207264
  chr1:162116825-162116870
  hypo

SEQ ID NO: 297910 - DNA, 87 bp, Homo sapiens; identical to SEQ ID NO: 207265
  chr1:162335161-162335248
  hypo

SEQ ID NO: 297911 - DNA, 224 bp, Homo sapiens; identical to SEQ ID NO: 207266
  chr1:162343771-162343995
  hypo

SEQ ID NO: 297912 - DNA, 85 bp, Homo sapiens; identical to SEQ ID NO: 249085
  chr1:162344602-162344687
  hypo

SEQ ID NO: 297913 - DNA, 48 bp, Homo sapiens; identical to SEQ ID NO: 249086
  chr1:162346580-162346628
  hypo

SEQ ID NO: 297914 - DNA, 153 bp, Homo sapiens; identical to SEQ ID NO: 249087
  chr1:162351643-162351796
  hypo

SEQ ID NO: 297915 - DNA, 37 bp, Homo sapiens; identical to SEQ ID NO: 207267
  chr1:162426947-162426984
  hypo

SEQ ID NO: 297916 - DNA, 36 bp, Homo sapiens; identical to SEQ ID NO: 207268
  chr1:162427224-162427260
  hypo

SEQ ID NO: 297917 - DNA, 162 bp, Homo sapiens; identical to SEQ ID NO: 249090
  chr1:162428146-162428308
  hypo

SEQ ID NO: 297918 - DNA, 89 bp, Homo sapiens; identical to SEQ ID NO: 197825
  chr1:163378351-163378440
  hypo

SEQ ID NO: 297919 - DNA, 200 bp, Homo sapiens
  chr1:163392834-163393034
  hypo
attgccttctcagttgtccccgccagtggtattgtggtattgccggcccccacctcccgcacagcggtgcttcacggaattcctgaggcgtactgggagcaccggcacagccgccgccatttcccggcaggggcacatgggagcgacagcgaggcgtcagggccggaagtgtccctgtctttgccctcgttggctactgc

SEQ ID NO: 297920 - DNA, 56 bp, Homo sapiens
  chr1:163393064-163393120
  hypo
aggcctttggtggctgcgcacgttggggaggggacgtagaactcagagtgattttg

SEQ ID NO: 297921 - DNA, 143 bp, Homo sapiens; identical to SEQ ID NO: 249093
  chr1:163662092-163662235
  hypo

SEQ ID NO: 297922 - DNA, 45 bp, Homo sapiens; identical to SEQ ID NO: 207270
  chr1:163872823-163872868
  hypo

SEQ ID NO: 297923 - DNA, 43 bp, Homo sapiens; identical to SEQ ID NO: 249095
  chr1:163900506-163900549
  hypo

SEQ ID NO: 297924 - DNA, 38 bp, Homo sapiens; identical to SEQ ID NO: 249096
  chr1:164079141-164079179
  hypo

SEQ ID NO: 297925 - DNA, 34 bp, Homo sapiens; identical to SEQ ID NO: 207271
  chr1:164518130-164518164
  hypo

SEQ ID NO: 297926 - DNA, 43 bp, Homo sapiens; identical to SEQ ID NO: 207272
  chr1:164550441-164550484
  hypo

SEQ ID NO: 297927 - DNA, 42 bp, Homo sapiens; identical to SEQ ID NO: 249099
  chr1:164550724-164550766
  hypo

SEQ ID NO: 297928 - DNA, 104 bp, Homo sapiens; identical to SEQ ID NO: 207273
  chr1:164590520-164590624
  hypo

SEQ ID NO: 297929 - DNA, 173 bp, Homo sapiens; identical to SEQ ID NO: 207274
  chr1:164604712-164604885
  hypo

SEQ ID NO: 297930 - DNA, 75 bp, Homo sapiens; identical to SEQ ID NO: 207275
  chr1:164637870-164637945
  hypo

SEQ ID NO: 297931 - DNA, 212 bp, Homo sapiens
  chr1:164637985-164638197
  hypo
agccacagcccctcagcttgttagactgaaagaatgtgccgttttaattaatgatatgtaaatatccttgaatgggccgcatttgcatattaagagagatttgcggaatctgcggagtaatatattttaattaaggattaattaaaaataatgggaatttcatttcgcctggcagaatccgtttagattttagcacacgtctgcttgggagt

SEQ ID NO: 297932 - DNA, 125 bp, Homo sapiens; identical to SEQ ID NO: 249103
  chr1:164651958-164652083
  hypo

SEQ ID NO: 297933 - DNA, 63 bp, Homo sapiens; identical to SEQ ID NO: 249104
  chr1:164658204-164658267
  hypo

SEQ ID NO: 297934 - DNA, 71 bp, Homo sapiens
  chr1:164667272-164667343
  hypo
tggattttctagtgtcgggctcttctcttttttaggaagggagaagcgggtctgggaaattaaagtgcctg

SEQ ID NO: 297935 - DNA, 170 bp, Homo sapiens
  chr1:164667373-164667543
  hypo
ttgggacctcagtatgttttttttccattctgccacacctgagatagaaaaaagaaataccacggtccctcgggtagcagtagagggtgagagcaagactcctacctctgaatgccgttagatttagaagttcattttgactgctttacgatacaaagttgagtaataat

SEQ ID NO: 297936 - DNA, 42 bp, Homo sapiens; identical to SEQ ID NO: 249106
  chr1:164723970-164724012
  hypo

SEQ ID NO: 297937 - DNA, 193 bp, Homo sapiens; identical to SEQ ID NO: 207277
  chr1:164753547-164753740
  hypo

SEQ ID NO: 297938 - DNA, 336 bp, Homo sapiens; identical to SEQ ID NO: 207278
  chr1:164761683-164762019
  hypo

SEQ ID NO: 297939 - DNA, 36 bp, Homo sapiens; identical to SEQ ID NO: 207279
  chr1:164765528-164765564
  hypo

SEQ ID NO: 297940 - DNA, 556 bp, Homo sapiens; identical to SEQ ID NO: 249110
  chr1:164768739-164769295
  hypo

SEQ ID NO: 297941 - DNA, 88 bp, Homo sapiens; identical to SEQ ID NO: 249111
  chr1:164776128-164776216
  hypo

SEQ ID NO: 297942 - DNA, 193 bp, Homo sapiens; identical to SEQ ID NO: 207280
  chr1:164790953-164791146
  hypo

SEQ ID NO: 297943 - DNA, 103 bp, Homo sapiens; identical to SEQ ID NO: 278995
  chr1:165204594-165204697
  hypo

SEQ ID NO: 297944 - DNA, 93 bp, Homo sapiens; identical to SEQ ID NO: 278996
  chr1:165204732-165204825
  hypo

SEQ ID NO: 297945 - DNA, 189 bp, Homo sapiens; identical to SEQ ID NO: 279005
  chr1:165345284-165345473
  hypo

SEQ ID NO: 297946 - DNA, 32 bp, Homo sapiens; identical to SEQ ID NO: 249113
  chr1:165495513-165495545
  hypo

SEQ ID NO: 297947 - DNA, 85 bp, Homo sapiens; identical to SEQ ID NO: 249114
  chr1:165711411-165711496
  hypo

SEQ ID NO: 297948 - DNA, 117 bp, Homo sapiens
  chr1:165809119-165809236
  hypo
gtgcagatgtgctgtcagaacaggctggttggccagccttcccccaccccggcccccgccccagacagagtcctgctgtgctgcccaggctggagtgtggcgcgatctcggcccact

SEQ ID NO: 297949 - DNA, 643 bp, Homo sapiens; identical to SEQ ID NO: 279011
  chr1:166135586-166136229
  hypo

SEQ ID NO: 297950 - DNA, 42 bp, Homo sapiens; identical to SEQ ID NO: 249116
  chr1:166266744-166266786
  hypo

SEQ ID NO: 297951 - DNA, 36 bp, Homo sapiens; identical to SEQ ID NO: 249117
  chr1:166479112-166479148
  hypo

SEQ ID NO: 297952 - DNA, 31 bp, Homo sapiens; identical to SEQ ID NO: 249119
  chr1:166958567-166958598
  hypo

SEQ ID NO: 297953 - DNA, 109 bp, Homo sapiens; identical to SEQ ID NO: 249120
  chr1:167032009-167032118
  hypo

SEQ ID NO: 297954 - DNA, 108 bp, Homo sapiens; identical to SEQ ID NO: 279019
  chr1:167090757-167090865
  hypo

SEQ ID NO: 297955 - DNA, 279 bp, Homo sapiens; identical to SEQ ID NO: 207282
  chr1:167096197-167096476
  hypo

SEQ ID NO: 297956 - DNA, 237 bp, Homo sapiens; identical to SEQ ID NO: 197839
  chr1:167190164-167190401
  hypo

SEQ ID NO: 297957 - DNA, 98 bp, Homo sapiens; identical to SEQ ID NO: 207284
  chr1:167221025-167221123
  hypo

SEQ ID NO: 297958 - DNA, 51 bp, Homo sapiens; identical to SEQ ID NO: 207285
  chr1:167393532-167393583
  hypo

SEQ ID NO: 297959 - DNA, 185 bp, Homo sapiens; identical to SEQ ID NO: 207286
  chr1:167393613-167393798
  hypo

SEQ ID NO: 297960 - DNA, 165 bp, Homo sapiens; identical to SEQ ID NO: 197840
  chr1:167423949-167424114
  hypo

SEQ ID NO: 297961 - DNA, 213 bp, Homo sapiens; identical to SEQ ID NO: 249124
  chr1:167430239-167430452
  hypo

SEQ ID NO: 297962 - DNA, 104 bp, Homo sapiens; identical to SEQ ID NO: 249125
  chr1:167443921-167444025
  hypo

SEQ ID NO: 297963 - DNA, 221 bp, Homo sapiens; identical to SEQ ID NO: 249126
  chr1:167486829-167487050
  hypo

SEQ ID NO: 297964 - DNA, 161 bp, Homo sapiens; identical to SEQ ID NO: 207288
  chr1:167487339-167487500
  hypo

SEQ ID NO: 297965 - DNA, 186 bp, Homo sapiens; identical to SEQ ID NO: 207289
  chr1:167524973-167525159
  hypo

SEQ ID NO: 297966 - DNA, 32 bp, Homo sapiens; identical to SEQ ID NO: 249129
  chr1:167690802-167690834
  hypo

SEQ ID NO: 297967 - DNA, 45 bp, Homo sapiens; identical to SEQ ID NO: 249130
  chr1:167732418-167732463
  hypo

SEQ ID NO: 297968 - DNA, 42 bp, Homo sapiens; identical to SEQ ID NO: 249132
  chr1:167844893-167844935
  hypo

SEQ ID NO: 297969 - DNA, 39 bp, Homo sapiens; identical to SEQ ID NO: 249133
  chr1:167852542-167852581
  hypo

SEQ ID NO: 297970 - DNA, 202 bp, Homo sapiens; identical to SEQ ID NO: 138615
  chr1:168054754-168054956
  hypo

SEQ ID NO: 297971 - DNA, 65 bp, Homo sapiens; identical to SEQ ID NO: 207290
  chr1:168058062-168058127
  hypo

SEQ ID NO: 297972 - DNA, 41 bp, Homo sapiens; identical to SEQ ID NO: 249136
  chr1:168062078-168062119
  hypo

SEQ ID NO: 297973 - DNA, 36 bp, Homo sapiens; identical to SEQ ID NO: 249137
  chr1:168104282-168104318
  hypo

SEQ ID NO: 297974 - DNA, 178 bp, Homo sapiens; identical to SEQ ID NO: 207291
  chr1:168150817-168150995
  hypo

SEQ ID NO: 297975 - DNA, 32 bp, Homo sapiens; identical to SEQ ID NO: 207292
  chr1:168151564-168151596
  hypo

SEQ ID NO: 297976 - DNA, 141 bp, Homo sapiens; identical to SEQ ID NO: 249142
  chr1:168198888-168199029
  hypo

SEQ ID NO: 297977 - DNA, 389 bp, Homo sapiens; identical to SEQ ID NO: 249143
  chr1:168250292-168250681
  hypo

SEQ ID NO: 297978 - DNA, 186 bp, Homo sapiens; identical to SEQ ID NO: 249144
  chr1:168260494-168260680
  hypo

SEQ ID NO: 297979 - DNA, 233 bp, Homo sapiens; identical to SEQ ID NO: 249145
  chr1:168399587-168399820
  hypo

SEQ ID NO: 297980 - DNA, 44 bp, Homo sapiens; identical to SEQ ID NO: 249146
  chr1:168445204-168445248
  hypo

SEQ ID NO: 297981 - DNA, 31 bp, Homo sapiens; identical to SEQ ID NO: 249147
  chr1:168698961-168698992
  hypo

SEQ ID NO: 297982 - DNA, 89 bp, Homo sapiens; identical to SEQ ID NO: 207293
  chr1:168878540-168878629
  hypo

SEQ ID NO: 297983 - DNA, 126 bp, Homo sapiens; identical to SEQ ID NO: 249149
  chr1:168882770-168882896
  hypo

SEQ ID NO: 297984 - DNA, 332 bp, Homo sapiens; identical to SEQ ID NO: 197845
  chr1:169076042-169076374
  hypo

SEQ ID NO: 297985 - DNA, 59 bp, Homo sapiens; identical to SEQ ID NO: 249150
  chr1:169096470-169096529
  hypo

SEQ ID NO: 297986 - DNA, 41 bp, Homo sapiens; identical to SEQ ID NO: 249151
  chr1:169355662-169355703
  hypo

SEQ ID NO: 297987 - DNA, 90 bp, Homo sapiens; identical to SEQ ID NO: 207295
  chr1:169457189-169457279
  hypo

SEQ ID NO: 297988 - DNA, 88 bp, Homo sapiens; identical to SEQ ID NO: 249153
  chr1:169575559-169575647
  hypo

SEQ ID NO: 297989 - DNA, 78 bp, Homo sapiens; identical to SEQ ID NO: 249155
  chr1:169850180-169850258
  hypo

SEQ ID NO: 297990 - DNA, 90 bp, Homo sapiens; identical to SEQ ID NO: 207296
  chr1:170064328-170064418
  hypo

SEQ ID NO: 297991 - DNA, 32 bp, Homo sapiens; identical to SEQ ID NO: 249158
  chr1:171519335-171519367
  hypo

SEQ ID NO: 297992 - DNA, 90 bp, Homo sapiens; identical to SEQ ID NO: 249159
  chr1:171554194-171554284
  hypo

SEQ ID NO: 297993 - DNA, 84 bp, Homo sapiens; identical to SEQ ID NO: 207297
  chr1:171554921-171555005
  hypo

SEQ ID NO: 297994 - DNA, 136 bp, Homo sapiens; identical to SEQ ID NO: 207298
  chr1:171555061-171555197
  hypo

SEQ ID NO: 297995 - DNA, 199 bp, Homo sapiens; identical to SEQ ID NO: 249161
  chr1:171570073-171570272
  hypo

SEQ ID NO: 297996 - DNA, 41 bp, Homo sapiens; identical to SEQ ID NO: 207299
  chr1:171640197-171640238
  hypo

SEQ ID NO: 297997 - DNA, 159 bp, Homo sapiens; identical to SEQ ID NO: 207300
  chr1:171707391-171707550
  hypo

SEQ ID NO: 297998 - DNA, 439 bp, Homo sapiens; identical to SEQ ID NO: 249165
  chr1:172357767-172358206
  hypo

SEQ ID NO: 297999 - DNA, 77 bp, Homo sapiens; identical to SEQ ID NO: 207301
  chr1:172449159-172449236
  hypo

SEQ ID NO: 298000 - DNA, 35 bp, Homo sapiens; identical to SEQ ID NO: 207302
  chr1:173714249-173714284
  hypo

SEQ ID NO: 298001 - DNA, 36 bp, Homo sapiens; identical to SEQ ID NO: 249170
  chr1:174048026-174048062
  hypo

SEQ ID NO: 298002 - DNA, 79 bp, Homo sapiens; identical to SEQ ID NO: 207303
  chr1:174166676-174166755
  hypo

SEQ ID NO: 298003 - DNA, 50 bp, Homo sapiens; identical to SEQ ID NO: 249172
  chr1:174634545-174634595
  hypo

SEQ ID NO: 298004 - DNA, 148 bp, Homo sapiens; identical to SEQ ID NO: 249173
  chr1:175014791-175014939
  hypo

SEQ ID NO: 298005 - DNA, 322 bp, Homo sapiens; identical to SEQ ID NO: 279063
  chr1:175048508-175048830
  hypo

SEQ ID NO: 298006 - DNA, 33 bp, Homo sapiens; identical to SEQ ID NO: 207304
  chr1:175365936-175365969
  hypo

SEQ ID NO: 298007 - DNA, 200 bp, Homo sapiens; identical to SEQ ID NO: 207305
  chr1:175372294-175372494
  hypo

SEQ ID NO: 298008 - DNA, 166 bp, Homo sapiens; identical to SEQ ID NO: 207306
  chr1:175372572-175372738
  hypo

SEQ ID NO: 298009 - DNA, 166 bp, Homo sapiens; identical to SEQ ID NO: 207307
  chr1:175375034-175375200
  hypo

SEQ ID NO: 298010 - DNA, 234 bp, Homo sapiens; identical to SEQ ID NO: 249179
  chr1:175384412-175384646
  hypo

SEQ ID NO: 298011 - DNA, 36 bp, Homo sapiens; identical to SEQ ID NO: 249180
  chr1:175385845-175385881
  hypo

SEQ ID NO: 298012 - DNA, 146 bp, Homo sapiens; identical to SEQ ID NO: 207308
  chr1:175957580-175957726
  hypo

SEQ ID NO: 298013 - DNA, 37 bp, Homo sapiens; identical to SEQ ID NO: 249182
  chr1:176694918-176694955
  hypo

SEQ ID NO: 298014 - DNA, 37 bp, Homo sapiens; identical to SEQ ID NO: 249183
  chr1:176695195-176695232
  hypo

SEQ ID NO: 298015 - DNA, 696 bp, Homo sapiens; identical to SEQ ID NO: 279071
  chr1:178062416-178063112
  hypo

SEQ ID NO: 298016 - DNA, 475 bp, Homo sapiens; identical to SEQ ID NO: 197861
  chr1:178063150-178063625
  hypo

SEQ ID NO: 298017 - DNA, 110 bp, Homo sapiens; identical to SEQ ID NO: 197862
  chr1:178063733-178063843
  hypo

SEQ ID NO: 298018 - DNA, 44 bp, Homo sapiens; identical to SEQ ID NO: 249184
  chr1:178099911-178099955
  hypo

SEQ ID NO: 298019 - DNA, 150 bp, Homo sapiens; identical to SEQ ID NO: 207312
  chr1:178271749-178271899
  hypo

SEQ ID NO: 298020 - DNA, 82 bp, Homo sapiens; identical to SEQ ID NO: 249186
  chr1:178362729-178362811
  hypo

SEQ ID NO: 298021 - DNA, 39 bp, Homo sapiens; identical to SEQ ID NO: 249187
  chr1:178465304-178465343
  hypo

SEQ ID NO: 298022 - DNA, 131 bp, Homo sapiens; identical to SEQ ID NO: 249188
  chr1:178469645-178469776
  hypo

SEQ ID NO: 298023 - DNA, 125 bp, Homo sapiens; identical to SEQ ID NO: 249189
  chr1:178514076-178514201
  hypo

SEQ ID NO: 298024 - DNA, 109 bp, Homo sapiens; identical to SEQ ID NO: 207313
  chr1:178531644-178531753
  hypo

SEQ ID NO: 298025 - DNA, 52 bp, Homo sapiens; identical to SEQ ID NO: 207314
  chr1:178531798-178531850
  hypo

SEQ ID NO: 298026 - DNA, 212 bp, Homo sapiens; identical to SEQ ID NO: 221520
  chr1:178693954-178694166
  hypo

SEQ ID NO: 298027 - DNA, 41 bp, Homo sapiens; identical to SEQ ID NO: 249191
  chr1:178828802-178828843
  hypo

SEQ ID NO: 298028 - DNA, 41 bp, Homo sapiens; identical to SEQ ID NO: 249192
  chr1:178829083-178829124
  hypo

SEQ ID NO: 298029 - DNA, 229 bp, Homo sapiens; identical to SEQ ID NO: 207315
  chr1:178928477-178928706
  hypo

SEQ ID NO: 298030 - DNA, 83 bp, Homo sapiens; identical to SEQ ID NO: 207316
  chr1:178988892-178988975
  hypo

SEQ ID NO: 298031 - DNA, 34 bp, Homo sapiens; identical to SEQ ID NO: 207317
  chr1:179046571-179046605
  hypo

SEQ ID NO: 298032 - DNA, 43 bp, Homo sapiens; identical to SEQ ID NO: 207318
  chr1:179229272-179229315
  hypo

SEQ ID NO: 298033 - DNA, 97 bp, Homo sapiens; identical to SEQ ID NO: 249199
  chr1:179333923-179334020
  hypo

SEQ ID NO: 298034 - DNA, 91 bp, Homo sapiens; identical to SEQ ID NO: 279077
  chr1:179545304-179545395
  hypo

SEQ ID NO: 298035 - DNA, 268 bp, Homo sapiens; identical to SEQ ID NO: 249200
  chr1:179557861-179558129
  hypo

SEQ ID NO: 298036 - DNA, 48 bp, Homo sapiens; identical to SEQ ID NO: 207319
  chr1:179782918-179782966
  hypo

SEQ ID NO: 298037 - DNA, 76 bp, Homo sapiens; identical to SEQ ID NO: 249202
  chr1:179835816-179835892
  hypo

SEQ ID NO: 298038 - DNA, 73 bp, Homo sapiens; identical to SEQ ID NO: 249203
  chr1:180039480-180039553
  hypo

SEQ ID NO: 298039 - DNA, 299 bp, Homo sapiens; identical to SEQ ID NO: 249204
  chr1:180097383-180097682
  hypo

SEQ ID NO: 298040 - DNA, 214 bp, Homo sapiens; identical to SEQ ID NO: 197864
  chr1:180123473-180123687
  hypo

SEQ ID NO: 298041 - DNA, 890 bp, Homo sapiens; identical to SEQ ID NO: 975
  chr1:180123700-180124590
  hypo

SEQ ID NO: 298042 - DNA, 291 bp, Homo sapiens; identical to SEQ ID NO: 249205
  chr1:180134709-180135000
  hypo

SEQ ID NO: 298043 - DNA, 216 bp, Homo sapiens; identical to SEQ ID NO: 249206
  chr1:180137306-180137522
  hypo

SEQ ID NO: 298044 - DNA, 173 bp, Homo sapiens; identical to SEQ ID NO: 249207
  chr1:180138813-180138986
  hypo

SEQ ID NO: 298045 - DNA, 96 bp, Homo sapiens; identical to SEQ ID NO: 249208
  chr1:180223403-180223499
  hypo

SEQ ID NO: 298046 - DNA, 128 bp, Homo sapiens
  chr1:180235795-180235923
  hypo
gtgcccttctcatggcgtcccacctgcccatccctcagagccctactcatgcaccgccacctctgagaagcgtcccagatctccacactgagagtaaatgctgaacacctccccggccgttagcactc

SEQ ID NO: 298047 - DNA, 34 bp, Homo sapiens; identical to SEQ ID NO: 249210
  chr1:180302703-180302737
  hypo

SEQ ID NO: 298048 - DNA, 136 bp, Homo sapiens; identical to SEQ ID NO: 249211
  chr1:180404662-180404798
  hypo

SEQ ID NO: 298049 - DNA, 96 bp, Homo sapiens; identical to SEQ ID NO: 207322
  chr1:180477770-180477866
  hypo

SEQ ID NO: 298050 - DNA, 95 bp, Homo sapiens; identical to SEQ ID NO: 207323
  chr1:180478106-180478201
  hypo

SEQ ID NO: 298051 - DNA, 120 bp, Homo sapiens; identical to SEQ ID NO: 207324
  chr1:180497354-180497474
  hypo

SEQ ID NO: 298052 - DNA, 101 bp, Homo sapiens; identical to SEQ ID NO: 207325
  chr1:180497654-180497755
  hypo

SEQ ID NO: 298053 - DNA, 45 bp, Homo sapiens; identical to SEQ ID NO: 197867
  chr1:180881296-180881341
  hypo

SEQ ID NO: 298054 - DNA, 255 bp, Homo sapiens; identical to SEQ ID NO: 197868
  chr1:180881580-180881835
  hypo

SEQ ID NO: 298055 - DNA, 140 bp, Homo sapiens; identical to SEQ ID NO: 279089
  chr1:180881864-180882004
  hypo

SEQ ID NO: 298056 - DNA, 94 bp, Homo sapiens; identical to SEQ ID NO: 207329
  chr1:180885147-180885241
  hypo

SEQ ID NO: 298057 - DNA, 178 bp, Homo sapiens; identical to SEQ ID NO: 249217
  chr1:180888525-180888703
  hypo

SEQ ID NO: 298058 - DNA, 41 bp, Homo sapiens; identical to SEQ ID NO: 207330
  chr1:180891951-180891992
  hypo

SEQ ID NO: 298059 - DNA, 101 bp, Homo sapiens; identical to SEQ ID NO: 207331
  chr1:180892052-180892153
  hypo

SEQ ID NO: 298060 - DNA, 126 bp, Homo sapiens; identical to SEQ ID NO: 207332
  chr1:180896512-180896638
  hypo

SEQ ID NO: 298061 - DNA, 346 bp, Homo sapiens; identical to SEQ ID NO: 249221
  chr1:180917326-180917672
  hypo

SEQ ID NO: 298062 - DNA, 296 bp, Homo sapiens; identical to SEQ ID NO: 249222
  chr1:180918319-180918615
  hypo

SEQ ID NO: 298063 - DNA, 133 bp, Homo sapiens
  chr1:180919549-180919682
  hypo
atcctcgaggtgaacggggccaaggtggcagggctgggcttggctcacattaaggagctcctggcccactcagagagcttgtcaatccgtgtcctgaggcagagacctgtcccacggtgacccagaagtgccg

SEQ ID NO: 298064 - DNA, 61 bp, Homo sapiens
  chr1:180919718-180919779
  hypo
actcagggtggttggcaggaacgtgctgcacagagctgctctgtggcggaaacagatcctg

SEQ ID NO: 298065 - DNA, 32 bp, Homo sapiens
  chr1:180925239-180925271
  hypo
tggcaagaagctctgcccagcgctctctggct

SEQ ID NO: 298066 - DNA, 220 bp, Homo sapiens; identical to SEQ ID NO: 249225
  chr1:180945761-180945981
  hypo

SEQ ID NO: 298067 - DNA, 151 bp, Homo sapiens; identical to SEQ ID NO: 207334
  chr1:181066372-181066523
  hypo

SEQ ID NO: 298068 - DNA, 65 bp, Homo sapiens; identical to SEQ ID NO: 249227
  chr1:181111089-181111154
  hypo

SEQ ID NO: 298069 - DNA, 229 bp, Homo sapiens; identical to SEQ ID NO: 249228
  chr1:181382625-181382854
  hypo

SEQ ID NO: 298070 - DNA, 162 bp, Homo sapiens; identical to SEQ ID NO: 207335
  chr1:181765803-181765965
  hypo

SEQ ID NO: 298071 - DNA, 209 bp, Homo sapiens; identical to SEQ ID NO: 207336
  chr1:181767549-181767758
  hypo

SEQ ID NO: 298072 - DNA, 106 bp, Homo sapiens; identical to SEQ ID NO: 207337
  chr1:181767807-181767913
  hypo

SEQ ID NO: 298073 - DNA, 104 bp, Homo sapiens; identical to SEQ ID NO: 249231
  chr1:181979314-181979418
  hypo

SEQ ID NO: 298074 - DNA, 40 bp, Homo sapiens; identical to SEQ ID NO: 249232
  chr1:182148663-182148703
  hypo

SEQ ID NO: 298075 - DNA, 33 bp, Homo sapiens; identical to SEQ ID NO: 249233
  chr1:182230564-182230597
  hypo

SEQ ID NO: 298076 - DNA, 89 bp, Homo sapiens; identical to SEQ ID NO: 279097
  chr1:182359608-182359697
  hypo

SEQ ID NO: 298077 - DNA, 46 bp, Homo sapiens; identical to SEQ ID NO: 279098
  chr1:182359742-182359788
  hypo

SEQ ID NO: 298078 - DNA, 132 bp, Homo sapiens; identical to SEQ ID NO: 221526
  chr1:182361439-182361571
  hypo

SEQ ID NO: 298079 - DNA, 251 bp, Homo sapiens; identical to SEQ ID NO: 197874
  chr1:182583797-182584048
  hypo

SEQ ID NO: 298080 - DNA, 61 bp, Homo sapiens; identical to SEQ ID NO: 197875
  chr1:182584613-182584674
  hypo

SEQ ID NO: 298081 - DNA, 69 bp, Homo sapiens; identical to SEQ ID NO: 249234
  chr1:182637878-182637947
  hypo

SEQ ID NO: 298082 - DNA, 39 bp, Homo sapiens; identical to SEQ ID NO: 207340
  chr1:182767636-182767675
  hypo

SEQ ID NO: 298083 - DNA, 190 bp, Homo sapiens; identical to SEQ ID NO: 207341
  chr1:182827758-182827948
  hypo

SEQ ID NO: 298084 - DNA, 40 bp, Homo sapiens; identical to SEQ ID NO: 207342
  chr1:182856866-182856906
  hypo

SEQ ID NO: 298085 - DNA, 343 bp, Homo sapiens; identical to SEQ ID NO: 197876
  chr1:182992844-182993187
  hypo

SEQ ID NO: 298086 - DNA, 177 bp, Homo sapiens
  chr1:183129205-183129382
  hypo
ggctccgtcactgggcgtgtgcatgactgtacttccctctgccgcagacacctcagccaccgtctagccaggcaaacctgtttggtgtgctcactgcatgatgaaggcgggtgtggctcccagtgggagtgtcccgcctccagaacatggccagaggctacagaatcagacttttgc

SEQ ID NO: 298087 - DNA, 42 bp, Homo sapiens; identical to SEQ ID NO: 249240
  chr1:183132281-183132323
  hypo

SEQ ID NO: 298088 - DNA, 291 bp, Homo sapiens; identical to SEQ ID NO: 221529
  chr1:183155179-183155470
  hypo

SEQ ID NO: 298089 - DNA, 136 bp, Homo sapiens; identical to SEQ ID NO: 207345
  chr1:183338766-183338902
  hypo

SEQ ID NO: 298090 - DNA, 33 bp, Homo sapiens; identical to SEQ ID NO: 249242
  chr1:183443725-183443758
  hypo

SEQ ID NO: 298091 - DNA, 136 bp, Homo sapiens; identical to SEQ ID NO: 249244
  chr1:183551069-183551205
  hypo

SEQ ID NO: 298092 - DNA, 174 bp, Homo sapiens; identical to SEQ ID NO: 249245
  chr1:183944151-183944325
  hypo

SEQ ID NO: 298093 - DNA, 165 bp, Homo sapiens; identical to SEQ ID NO: 249246
  chr1:184333001-184333166
  hypo

SEQ ID NO: 298094 - DNA, 507 bp, Homo sapiens; identical to SEQ ID NO: 197878
  chr1:184355381-184355888
  hypo

SEQ ID NO: 298095 - DNA, 278 bp, Homo sapiens; identical to SEQ ID NO: 197879
  chr1:184355936-184356214
  hypo

SEQ ID NO: 298096 - DNA, 146 bp, Homo sapiens; identical to SEQ ID NO: 197880
  chr1:184356541-184356687
  hypo

SEQ ID NO: 298097 - DNA, 159 bp, Homo sapiens
  chr1:184442501-184442660
  hypo
ttacctctctctaagcgctgtggtttcaggaaggtaaacaatagagcatgtgaggttgggagagaaaagctgagcaaagcgaatgaaaaaatggaagctaaaaaaaaaaatgctggagtttacgtgaaggatagcataaactgaagggaacgtcttttg

SEQ ID NO: 298098 - DNA, 259 bp, Homo sapiens; identical to SEQ ID NO: 207349
  chr1:184448490-184448749
  hypo

SEQ ID NO: 298099 - DNA, 39 bp, Homo sapiens; identical to SEQ ID NO: 207350
  chr1:184720865-184720904
  hypo

SEQ ID NO: 298100 - DNA, 38 bp, Homo sapiens; identical to SEQ ID NO: 207351
  chr1:184721205-184721243
  hypo

SEQ ID NO: 298101 - DNA, 225 bp, Homo sapiens; identical to SEQ ID NO: 197881
  chr1:184722805-184723030
  hypo

SEQ ID NO: 298102 - DNA, 52 bp, Homo sapiens; identical to SEQ ID NO: 249251
  chr1:184764469-184764521
  hypo

SEQ ID NO: 298103 - DNA, 35 bp, Homo sapiens; identical to SEQ ID NO: 249252
  chr1:184934144-184934179
  hypo

SEQ ID NO: 298104 - DNA, 39 bp, Homo sapiens; identical to SEQ ID NO: 207353
  chr1:185024836-185024875
  hypo

SEQ ID NO: 298105 - DNA, 83 bp, Homo sapiens; identical to SEQ ID NO: 207354
  chr1:185336198-185336281
  hypo

SEQ ID NO: 298106 - DNA, 167 bp, Homo sapiens; identical to SEQ ID NO: 249255
  chr1:185554768-185554935
  hypo

SEQ ID NO: 298107 - DNA, 65 bp, Homo sapiens; identical to SEQ ID NO: 279127
  chr1:186344948-186345013
  hypo

SEQ ID NO: 298108 - DNA, 176 bp, Homo sapiens; identical to SEQ ID NO: 207355
  chr1:188612098-188612274
  hypo

SEQ ID NO: 298109 - DNA, 87 bp, Homo sapiens; identical to SEQ ID NO: 249257
  chr1:191980832-191980919
  hypo

SEQ ID NO: 298110 - DNA, 34 bp, Homo sapiens; identical to SEQ ID NO: 207356
  chr1:192197325-192197359
  hypo

SEQ ID NO: 298111 - DNA, 34 bp, Homo sapiens; identical to SEQ ID NO: 249259
  chr1:192469717-192469751
  hypo

SEQ ID NO: 298112 - DNA, 417 bp, Homo sapiens; identical to SEQ ID NO: 207357
  chr1:193149421-193149838
  hypo

SEQ ID NO: 298113 - DNA, 164 bp, Homo sapiens; identical to SEQ ID NO: 249261
  chr1:193377400-193377564
  hypo

SEQ ID NO: 298114 - DNA, 33 bp, Homo sapiens; identical to SEQ ID NO: 249262
  chr1:195578617-195578650
  hypo

SEQ ID NO: 298115 - DNA, 149 bp, Homo sapiens
  chr1:195732539-195732688
  hypo
catgccctgccgcagcagctggcgtgcctggctgtgtgcagtggccagaccccacgatcacttgctcacaaaccccttgccactctgtacctggctctgtgcctggcttgcctttggcagccgtgggatccagggtggtagcgtgagcc

SEQ ID NO: 298116 - DNA, 105 bp, Homo sapiens; identical to SEQ ID NO: 249264
  chr1:196902782-196902887
  hypo

SEQ ID NO: 298117 - DNA, 53 bp, Homo sapiens; identical to SEQ ID NO: 207358
  chr1:197091652-197091705
  hypo

SEQ ID NO: 298118 - DNA, 32 bp, Homo sapiens; identical to SEQ ID NO: 207359
  chr1:197116742-197116774
  hypo

SEQ ID NO: 298119 - DNA, 169 bp, Homo sapiens; identical to SEQ ID NO: 249267
  chr1:197191297-197191466
  hypo

SEQ ID NO: 298120 - DNA, 38 bp, Homo sapiens; identical to SEQ ID NO: 207360
  chr1:197324919-197324957
  hypo

SEQ ID NO: 298121 - DNA, 39 bp, Homo sapiens; identical to SEQ ID NO: 207361
  chr1:197418769-197418808
  hypo

SEQ ID NO: 298122 - DNA, 92 bp, Homo sapiens; identical to SEQ ID NO: 207362
  chr1:197704760-197704852
  hypo

SEQ ID NO: 298123 - DNA, 42 bp, Homo sapiens; identical to SEQ ID NO: 249273
  chr1:198326487-198326529
  hypo

SEQ ID NO: 298124 - DNA, 181 bp, Homo sapiens; identical to SEQ ID NO: 207363
  chr1:198828046-198828227
  hypo

SEQ ID NO: 298125 - DNA, 156 bp, Homo sapiens; identical to SEQ ID NO: 207364
  chr1:199636236-199636392
  hypo

SEQ ID NO: 298126 - DNA, 41 bp, Homo sapiens; identical to SEQ ID NO: 249276
  chr1:200027878-200027919
  hypo

SEQ ID NO: 298127 - DNA, 184 bp, Homo sapiens; identical to SEQ ID NO: 249277
  chr1:200182774-200182958
  hypo

SEQ ID NO: 298128 - DNA, 283 bp, Homo sapiens; identical to SEQ ID NO: 197898
  chr1:200379703-200379986
  hypo

SEQ ID NO: 298129 - DNA, 32 bp, Homo sapiens; identical to SEQ ID NO: 249278
  chr1:200386099-200386131
  hypo

SEQ ID NO: 298130 - DNA, 81 bp, Homo sapiens; identical to SEQ ID NO: 249279
  chr1:200486650-200486731
  hypo

SEQ ID NO: 298131 - DNA, 34 bp, Homo sapiens; identical to SEQ ID NO: 207366
  chr1:200556912-200556946
  hypo

SEQ ID NO: 298132 - DNA, 92 bp, Homo sapiens; identical to SEQ ID NO: 207367
  chr1:200588800-200588892
  hypo

SEQ ID NO: 298133 - DNA, 39 bp, Homo sapiens; identical to SEQ ID NO: 207368
  chr1:200612481-200612520
  hypo

SEQ ID NO: 298134 - DNA, 235 bp, Homo sapiens; identical to SEQ ID NO: 197899
  chr1:200708632-200708867
  hypo

SEQ ID NO: 298135 - DNA, 76 bp, Homo sapiens; identical to SEQ ID NO: 249283
  chr1:200882273-200882349
  hypo

SEQ ID NO: 298136 - DNA, 111 bp, Homo sapiens; identical to SEQ ID NO: 207370
  chr1:200942600-200942711
  hypo

SEQ ID NO: 298137 - DNA, 50 bp, Homo sapiens; identical to SEQ ID NO: 207371
  chr1:200956136-200956186
  hypo

SEQ ID NO: 298138 - DNA, 176 bp, Homo sapiens; identical to SEQ ID NO: 249287
  chr1:200971316-200971492
  hypo

SEQ ID NO: 298139 - DNA, 78 bp, Homo sapiens; identical to SEQ ID NO: 207372
  chr1:201055718-201055796
  hypo

SEQ ID NO: 298140 - DNA, 259 bp, Homo sapiens; identical to SEQ ID NO: 249289
  chr1:201058348-201058607
  hypo

SEQ ID NO: 298141 - DNA, 816 bp, Homo sapiens; identical to SEQ ID NO: 279158
  chr1:201083266-201084082
  hypo

SEQ ID NO: 298142 - DNA, 36 bp, Homo sapiens; identical to SEQ ID NO: 249290
  chr1:201103243-201103279
  hypo

SEQ ID NO: 298143 - DNA, 202 bp, Homo sapiens; identical to SEQ ID NO: 207375
  chr1:201168310-201168512
  hypo

SEQ ID NO: 298144 - DNA, 363 bp, Homo sapiens; identical to SEQ ID NO: 207376
  chr1:201194901-201195264
  hypo

SEQ ID NO: 298145 - DNA, 31 bp, Homo sapiens; identical to SEQ ID NO: 249293
  chr1:201238522-201238553
  hypo

SEQ ID NO: 298146 - DNA, 47 bp, Homo sapiens
  chr1:201244195-201244242
  hypo
ctggcagagagagccgcaagtgacccgtggctcctgactcaagcctg

SEQ ID NO: 298147 - DNA, 152 bp, Homo sapiens; identical to SEQ ID NO: 249295
  chr1:201244944-201245096
  hypo

SEQ ID NO: 298148 - DNA, 208 bp, Homo sapiens; identical to SEQ ID NO: 207377
  chr1:201261831-201262039
  hypo

SEQ ID NO: 298149 - DNA, 41 bp, Homo sapiens; identical to SEQ ID NO: 207378
  chr1:201276067-201276108
  hypo

SEQ ID NO: 298150 - DNA, 42 bp, Homo sapiens; identical to SEQ ID NO: 249298
  chr1:201325776-201325818
  hypo

SEQ ID NO: 298151 - DNA, 117 bp, Homo sapiens; identical to SEQ ID NO: 249299
  chr1:201328245-201328362
  hypo

SEQ ID NO: 298152 - DNA, 96 bp, Homo sapiens; identical to SEQ ID NO: 249300
  chr1:201351265-201351361
  hypo

SEQ ID NO: 298153 - DNA, 169 bp, Homo sapiens; identical to SEQ ID NO: 207379
  chr1:201355458-201355627
  hypo

SEQ ID NO: 298154 - DNA, 316 bp, Homo sapiens; identical to SEQ ID NO: 249302
  chr1:201380509-201380825
  hypo

SEQ ID NO: 298155 - DNA, 225 bp, Homo sapiens; identical to SEQ ID NO: 249303
  chr1:201400931-201401156
  hypo

SEQ ID NO: 298156 - DNA, 120 bp, Homo sapiens; identical to SEQ ID NO: 249304
  chr1:201432876-201432996
  hypo

SEQ ID NO: 298157 - DNA, 34 bp, Homo sapiens; identical to SEQ ID NO: 207381
  chr1:201797541-201797575
  hypo

SEQ ID NO: 298158 - DNA, 144 bp, Homo sapiens; identical to SEQ ID NO: 249306
  chr1:201851151-201851295
  hypo

SEQ ID NO: 298159 - DNA, 112 bp, Homo sapiens
  chr1:201981199-201981311
  hypo
acgatgtgacatggatggcgccaccctctgcaattgtgcccttgaggagctgcgtctggtctttgggcctctgggggaccaactccatgcccagctgcgagacctcagtgag

SEQ ID NO: 298160 - DNA, 59 bp, Homo sapiens; identical to SEQ ID NO: 249308
  chr1:201981829-201981888
  hypo

SEQ ID NO: 298161 - DNA, 49 bp, Homo sapiens
  chr1:201982339-201982388
  hypo
ccaagcacgggaagcggaaacgaggccggccccgaaagctgagcaaaga

SEQ ID NO: 298162 - DNA, 177 bp, Homo sapiens; identical to SEQ ID NO: 207383
  chr1:201982936-201983113
  hypo

SEQ ID NO: 298163 - DNA, 37 bp, Homo sapiens; identical to SEQ ID NO: 207384
  chr1:201984009-201984046
  hypo

SEQ ID NO: 298164 - DNA, 117 bp, Homo sapiens; identical to SEQ ID NO: 249312
  chr1:201984365-201984482
  hypo

SEQ ID NO: 298165 - DNA, 89 bp, Homo sapiens; identical to SEQ ID NO: 207385
  chr1:201997730-201997819
  hypo

SEQ ID NO: 298166 - DNA, 120 bp, Homo sapiens; identical to SEQ ID NO: 249314
  chr1:202009833-202009953
  hypo

SEQ ID NO: 298167 - DNA, 42 bp, Homo sapiens; identical to SEQ ID NO: 249315
  chr1:202022787-202022829
  hypo

SEQ ID NO: 298168 - DNA, 79 bp, Homo sapiens; identical to SEQ ID NO: 249316
  chr1:202032892-202032971
  hypo

SEQ ID NO: 298169 - DNA, 140 bp, Homo sapiens; identical to SEQ ID NO: 249317
  chr1:202041210-202041350
  hypo

SEQ ID NO: 298170 - DNA, 56 bp, Homo sapiens
  chr1:202042308-202042364
  hypo
aaaaaaaaaagagggccatagatgtactaaggtttctcagaagtgattagagaagc

SEQ ID NO: 298171 - DNA, 79 bp, Homo sapiens
  chr1:202042487-202042566
  hypo
gtcaagtaaacaggctattgccgagcaacgtaagtgcgatattagaggtgtgtactccgcatggaggtagagggagtga

SEQ ID NO: 298172 - DNA, 38 bp, Homo sapiens; identical to SEQ ID NO: 249319
  chr1:202052584-202052622
  hypo

SEQ ID NO: 298173 - DNA, 42 bp, Homo sapiens; identical to SEQ ID NO: 249320
  chr1:202058380-202058422
  hypo

SEQ ID NO: 298174 - DNA, 61 bp, Homo sapiens; identical to SEQ ID NO: 207386
  chr1:202097362-202097423
  hypo

SEQ ID NO: 298175 - DNA, 91 bp, Homo sapiens; identical to SEQ ID NO: 207387
  chr1:202115847-202115938
  hypo

SEQ ID NO: 298176 - DNA, 289 bp, Homo sapiens; identical to SEQ ID NO: 249323
  chr1:202134668-202134957
  hypo

SEQ ID NO: 298177 - DNA, 549 bp, Homo sapiens; identical to SEQ ID NO: 221540
  chr1:202162904-202163453
  hypo

SEQ ID NO: 298178 - DNA, 189 bp, Homo sapiens; identical to SEQ ID NO: 249324
  chr1:202218132-202218321
  hypo

SEQ ID NO: 298179 - DNA, 98 bp, Homo sapiens; identical to SEQ ID NO: 249325
  chr1:202237360-202237458
  hypo

SEQ ID NO: 298180 - DNA, 461 bp, Homo sapiens; identical to SEQ ID NO: 249326
  chr1:202287405-202287866
  hypo

SEQ ID NO: 298181 - DNA, 37 bp, Homo sapiens; identical to SEQ ID NO: 207390
  chr1:202306336-202306373
  hypo

SEQ ID NO: 298182 - DNA, 151 bp, Homo sapiens
  chr1:202531788-202531939
  hypo
tctggccagggctccgaaatacttcttagaaaaggcgcaaactacccctgagcattaccttctccccactactttgttctcaaaaccaatttttatctttaatattatctcccacaggttggaatcgggaggtagtaatcctacaaccagt

SEQ ID NO: 298183 - DNA, 83 bp, Homo sapiens; identical to SEQ ID NO: 279176
  chr1:202611678-202611761
  hypo

SEQ ID NO: 298184 - DNA, 983 bp, Homo sapiens; identical to SEQ ID NO: 279177
  chr1:202612039-202613022
  hypo

SEQ ID NO: 298185 - DNA, 394 bp, Homo sapiens; identical to SEQ ID NO: 279181
  chr1:202830481-202830875
  hypo

SEQ ID NO: 298186 - DNA, 37 bp, Homo sapiens; identical to SEQ ID NO: 249329
  chr1:202830968-202831005
  hypo

SEQ ID NO: 298187 - DNA, 39 bp, Homo sapiens; identical to SEQ ID NO: 249330
  chr1:202831060-202831099
  hypo

SEQ ID NO: 298188 - DNA, 31 bp, Homo sapiens; identical to SEQ ID NO: 249331
  chr1:202859948-202859979
  hypo

SEQ ID NO: 298189 - DNA, 136 bp, Homo sapiens; identical to SEQ ID NO: 207391
  chr1:202934401-202934537
  hypo

SEQ ID NO: 298190 - DNA, 37 bp, Homo sapiens; identical to SEQ ID NO: 249335
  chr1:202940666-202940703
  hypo

SEQ ID NO: 298191 - DNA, 150 bp, Homo sapiens; identical to SEQ ID NO: 207392
  chr1:202995151-202995301
  hypo

SEQ ID NO: 298192 - DNA, 163 bp, Homo sapiens; identical to SEQ ID NO: 249337
  chr1:203014550-203014713
  hypo

SEQ ID NO: 298193 - DNA, 198 bp, Homo sapiens; identical to SEQ ID NO: 249338
  chr1:203017685-203017883
  hypo

SEQ ID NO: 298194 - DNA, 267 bp, Homo sapiens; identical to SEQ ID NO: 249339
  chr1:203098029-203098296
  hypo

SEQ ID NO: 298195 - DNA, 330 bp, Homo sapiens; identical to SEQ ID NO: 249340
  chr1:203134396-203134726
  hypo

SEQ ID NO: 298196 - DNA, 187 bp, Homo sapiens; identical to SEQ ID NO: 249341
  chr1:203139342-203139529
  hypo

SEQ ID NO: 298197 - DNA, 35 bp, Homo sapiens; identical to SEQ ID NO: 249342
  chr1:203140950-203140985
  hypo

SEQ ID NO: 298198 - DNA, 231 bp, Homo sapiens; identical to SEQ ID NO: 249343
  chr1:203192503-203192734
  hypo

SEQ ID NO: 298199 - DNA, 153 bp, Homo sapiens; identical to SEQ ID NO: 249346
  chr1:203455859-203456012
  hypo

SEQ ID NO: 298200 - DNA, 214 bp, Homo sapiens; identical to SEQ ID NO: 249347
  chr1:203524540-203524754
  hypo

SEQ ID NO: 298201 - DNA, 66 bp, Homo sapiens; identical to SEQ ID NO: 61485
  chr1:203525916-203525982
  hypo

SEQ ID NO: 298202 - DNA, 201 bp, Homo sapiens; identical to SEQ ID NO: 207393
  chr1:203690591-203690792
  hypo

SEQ ID NO: 298203 - DNA, 147 bp, Homo sapiens; identical to SEQ ID NO: 249350
  chr1:203708780-203708927
  hypo

SEQ ID NO: 298204 - DNA, 161 bp, Homo sapiens; identical to SEQ ID NO: 249351
  chr1:204003761-204003922
  hypo

SEQ ID NO: 298205 - DNA, 1003 bp, Homo sapiens; identical to SEQ ID NO: 197918
  chr1:204043134-204044137
  hypo

SEQ ID NO: 298206 - DNA, 283 bp, Homo sapiens; identical to SEQ ID NO: 249352
  chr1:204093885-204094168
  hypo

SEQ ID NO: 298207 - DNA, 76 bp, Homo sapiens; identical to SEQ ID NO: 249353
  chr1:204123782-204123858
  hypo

SEQ ID NO: 298208 - DNA, 38 bp, Homo sapiens; identical to SEQ ID NO: 249354
  chr1:204124154-204124192
  hypo

SEQ ID NO: 298209 - DNA, 223 bp, Homo sapiens; identical to SEQ ID NO: 249355
  chr1:204124903-204125126
  hypo

SEQ ID NO: 298210 - DNA, 35 bp, Homo sapiens; identical to SEQ ID NO: 249356
  chr1:204137844-204137879
  hypo

SEQ ID NO: 298211 - DNA, 34 bp, Homo sapiens; identical to SEQ ID NO: 249357
  chr1:204166951-204166985
  hypo

SEQ ID NO: 298212 - DNA, 172 bp, Homo sapiens; identical to SEQ ID NO: 249358
  chr1:204197176-204197348
  hypo

SEQ ID NO: 298213 - DNA, 399 bp, Homo sapiens; identical to SEQ ID NO: 249359
  chr1:204197939-204198338
  hypo

SEQ ID NO: 298214 - DNA, 195 bp, Homo sapiens; identical to SEQ ID NO: 207397
  chr1:204199536-204199731
  hypo

SEQ ID NO: 298215 - DNA, 58 bp, Homo sapiens; identical to SEQ ID NO: 207398
  chr1:204212336-204212394
  hypo

SEQ ID NO: 298216 - DNA, 103 bp, Homo sapiens; identical to SEQ ID NO: 207399
  chr1:204217170-204217273
  hypo

SEQ ID NO: 298217 - DNA, 52 bp, Homo sapiens; identical to SEQ ID NO: 249363
  chr1:204217934-204217986
  hypo

SEQ ID NO: 298218 - DNA, 424 bp, Homo sapiens; identical to SEQ ID NO: 207400
  chr1:204226524-204226948
  hypo

SEQ ID NO: 298219 - DNA, 305 bp, Homo sapiens; identical to SEQ ID NO: 207401
  chr1:204228355-204228660
  hypo

SEQ ID NO: 298220 - DNA, 100 bp, Homo sapiens; identical to SEQ ID NO: 249366
  chr1:204299942-204300042
  hypo

SEQ ID NO: 298221 - DNA, 165 bp, Homo sapiens; identical to SEQ ID NO: 249367
  chr1:204346113-204346278
  hypo

SEQ ID NO: 298222 - DNA, 502 bp, Homo sapiens; identical to SEQ ID NO: 279195
  chr1:204347106-204347608
  hypo

SEQ ID NO: 298223 - DNA, 193 bp, Homo sapiens; identical to SEQ ID NO: 249368
  chr1:204407991-204408184
  hypo

SEQ ID NO: 298224 - DNA, 250 bp, Homo sapiens; identical to SEQ ID NO: 249369
  chr1:204424236-204424486
  hypo

SEQ ID NO: 298225 - DNA, 43 bp, Homo sapiens; identical to SEQ ID NO: 207404
  chr1:204486800-204486843
  hypo

SEQ ID NO: 298226 - DNA, 43 bp, Homo sapiens; identical to SEQ ID NO: 207405
  chr1:204487138-204487181
  hypo

SEQ ID NO: 298227 - DNA, 105 bp, Homo sapiens; identical to SEQ ID NO: 197922
  chr1:204487763-204487868
  hypo

SEQ ID NO: 298228 - DNA, 120 bp, Homo sapiens; identical to SEQ ID NO: 249372
  chr1:204493508-204493628
  hypo

SEQ ID NO: 298229 - DNA, 200 bp, Homo sapiens; identical to SEQ ID NO: 279200
  chr1:204518656-204518856
  hypo

SEQ ID NO: 298230 - DNA, 293 bp, Homo sapiens
  chr1:204530910-204531203
  hypo
gcactgggggataccgtgatgaagatgaacatggttcctgttctcctgtctagggaaactggttaagcatgtaaatattagcatagtgaatgttttgttgtgagactacatgctgctatgagaaatacagaagggggacgtaatgtagccaagagcttctgaacaacctccgggaagagatgagctgagattaaaggaaggttaggagttaggagaggaagggaaaagtgccgtagttaggaggaaacatgccaaggtcttgaggtgagaaaacagtggcatctgggaagaac

SEQ ID NO: 298231 - DNA, 100 bp, Homo sapiens; identical to SEQ ID NO: 207408
  chr1:204531757-204531857
  hypo

SEQ ID NO: 298232 - DNA, 178 bp, Homo sapiens; identical to SEQ ID NO: 207409
  chr1:204537857-204538035
  hypo

SEQ ID NO: 298233 - DNA, 121 bp, Homo sapiens; identical to SEQ ID NO: 249377
  chr1:204540721-204540842
  hypo

SEQ ID NO: 298234 - DNA, 100 bp, Homo sapiens; identical to SEQ ID NO: 249378
  chr1:204607424-204607524
  hypo

SEQ ID NO: 298235 - DNA, 103 bp, Homo sapiens; identical to SEQ ID NO: 249379
  chr1:204665810-204665913
  hypo

SEQ ID NO: 298236 - DNA, 102 bp, Homo sapiens; identical to SEQ ID NO: 207410
  chr1:204913446-204913548
  hypo

SEQ ID NO: 298237 - DNA, 195 bp, Homo sapiens; identical to SEQ ID NO: 249382
  chr1:204915799-204915994
  hypo

SEQ ID NO: 298238 - DNA, 212 bp, Homo sapiens; identical to SEQ ID NO: 207411
  chr1:204948536-204948748
  hypo

SEQ ID NO: 298239 - DNA, 212 bp, Homo sapiens; identical to SEQ ID NO: 249384
  chr1:204950968-204951180
  hypo

SEQ ID NO: 298240 - DNA, 199 bp, Homo sapiens; identical to SEQ ID NO: 207412
  chr1:204954945-204955144
  hypo

SEQ ID NO: 298241 - DNA, 313 bp, Homo sapiens; identical to SEQ ID NO: 207413
  chr1:204955353-204955666
  hypo

SEQ ID NO: 298242 - DNA, 382 bp, Homo sapiens; identical to SEQ ID NO: 249387
  chr1:205038772-205039154
  hypo

SEQ ID NO: 298243 - DNA, 45 bp, Homo sapiens; identical to SEQ ID NO: 249388
  chr1:205144484-205144529
  hypo

SEQ ID NO: 298244 - DNA, 41 bp, Homo sapiens; identical to SEQ ID NO: 249389
  chr1:205186851-205186892
  hypo

SEQ ID NO: 298245 - DNA, 101 bp, Homo sapiens; identical to SEQ ID NO: 249390
  chr1:205210756-205210857
  hypo

SEQ ID NO: 298246 - DNA, 70 bp, Homo sapiens; identical to SEQ ID NO: 249391
  chr1:205238244-205238314
  hypo

SEQ ID NO: 298247 - DNA, 256 bp, Homo sapiens; identical to SEQ ID NO: 249392
  chr1:205245773-205246029
  hypo

SEQ ID NO: 298248 - DNA, 32 bp, Homo sapiens; identical to SEQ ID NO: 207415
  chr1:205269967-205269999
  hypo

SEQ ID NO: 298249 - DNA, 306 bp, Homo sapiens; identical to SEQ ID NO: 249394
  chr1:205273331-205273637
  hypo

SEQ ID NO: 298250 - DNA, 487 bp, Homo sapiens; identical to SEQ ID NO: 279206
  chr1:205313006-205313493
  hypo

SEQ ID NO: 298251 - DNA, 60 bp, Homo sapiens; identical to SEQ ID NO: 197925
  chr1:205425836-205425896
  hypo

SEQ ID NO: 298252 - DNA, 454 bp, Homo sapiens; identical to SEQ ID NO: 279209
  chr1:205425997-205426451
  hypo

SEQ ID NO: 298253 - DNA, 48 bp, Homo sapiens; identical to SEQ ID NO: 249396
  chr1:205476129-205476177
  hypo

SEQ ID NO: 298254 - DNA, 153 bp, Homo sapiens
  chr1:205548953-205549106
  hypo
ccgcgacgtgaaggtgctggcctcagtcatggcgctggcgggcttggccatgggctgcatcgacaccgtggccaacatgcagctggtaaggatgtaccagaaggactcggccgtcttcctccaggtaagcccggccagcaggcacagggctgg

SEQ ID NO: 298255 - DNA, 107 bp, Homo sapiens; identical to SEQ ID NO: 249398
  chr1:205631155-205631262
  hypo

SEQ ID NO: 298256 - DNA, 145 bp, Homo sapiens; identical to SEQ ID NO: 249399
  chr1:205631578-205631723
  hypo

SEQ ID NO: 298257 - DNA, 861 bp, Homo sapiens; identical to SEQ ID NO: 249400
  chr1:205631753-205632614
  hypo

SEQ ID NO: 298258 - DNA, 139 bp, Homo sapiens; identical to SEQ ID NO: 197928
  chr1:205721778-205721917
  hypo

SEQ ID NO: 298259 - DNA, 123 bp, Homo sapiens; identical to SEQ ID NO: 207421
  chr1:207087070-207087193
  hypo

SEQ ID NO: 298260 - DNA, 189 bp, Homo sapiens; identical to SEQ ID NO: 207422
  chr1:207088568-207088757
  hypo

SEQ ID NO: 298261 - DNA, 98 bp, Homo sapiens; identical to SEQ ID NO: 249404
  chr1:207105076-207105174
  hypo

SEQ ID NO: 298262 - DNA, 183 bp, Homo sapiens; identical to SEQ ID NO: 249405
  chr1:207130059-207130242
  hypo

SEQ ID NO: 298263 - DNA, 140 bp, Homo sapiens; identical to SEQ ID NO: 207423
  chr1:207182657-207182797
  hypo

SEQ ID NO: 298264 - DNA, 297 bp, Homo sapiens; identical to SEQ ID NO: 207424
  chr1:207195376-207195673
  hypo

SEQ ID NO: 298265 - DNA, 224 bp, Homo sapiens; identical to SEQ ID NO: 207425
  chr1:207200594-207200818
  hypo

SEQ ID NO: 298266 - DNA, 93 bp, Homo sapiens
  chr1:207227084-207227177
  hypo
ctagggagagggtgcggagcagggcttgagaatgcactagaggagaaatgacgacgtgctagggctgtcttggggtccagttactgtttttcc

SEQ ID NO: 298267 - DNA, 73 bp, Homo sapiens; identical to SEQ ID NO: 207427
  chr1:207227556-207227629
  hypo

SEQ ID NO: 298268 - DNA, 127 bp, Homo sapiens; identical to SEQ ID NO: 249411
  chr1:207240934-207241061
  hypo

SEQ ID NO: 298269 - DNA, 104 bp, Homo sapiens; identical to SEQ ID NO: 249412
  chr1:207405710-207405814
  hypo

SEQ ID NO: 298270 - DNA, 153 bp, Homo sapiens; identical to SEQ ID NO: 207428
  chr1:207478915-207479068
  hypo

SEQ ID NO: 298271 - DNA, 223 bp, Homo sapiens; identical to SEQ ID NO: 249414
  chr1:207596170-207596393
  hypo

SEQ ID NO: 298272 - DNA, 102 bp, Homo sapiens; identical to SEQ ID NO: 249415
  chr1:207596453-207596555
  hypo

SEQ ID NO: 298273 - DNA, 108 bp, Homo sapiens; identical to SEQ ID NO: 249416
  chr1:207819222-207819330
  hypo

SEQ ID NO: 298274 - DNA, 36 bp, Homo sapiens; identical to SEQ ID NO: 249417
  chr1:207880637-207880673
  hypo

SEQ ID NO: 298275 - DNA, 124 bp, Homo sapiens; identical to SEQ ID NO: 249420
  chr1:207936510-207936634
  hypo

SEQ ID NO: 298276 - DNA, 37 bp, Homo sapiens; identical to SEQ ID NO: 207429
  chr1:207963085-207963122
  hypo

SEQ ID NO: 298277 - DNA, 41 bp, Homo sapiens; identical to SEQ ID NO: 249422
  chr1:207974074-207974115
  hypo

SEQ ID NO: 298278 - DNA, 60 bp, Homo sapiens; identical to SEQ ID NO: 207430
  chr1:207991594-207991654
  hypo

SEQ ID NO: 298279 - DNA, 199 bp, Homo sapiens
  chr1:207991753-207991952
  hypo
cctagaacccacagccgccatgatgacgcaaacaaaattaaaagggtcaagaactcaaggcccactgtttcacctaagaagaaaaggaagaagatgaaggggagaagagaagctctgatttgggtcaatatggaaaggggaggctgacgcaggctgcccaagagccagcctttagcttagtgacggtgatgcggatccg

SEQ ID NO: 298280 - DNA, 282 bp, Homo sapiens; identical to SEQ ID NO: 249425
  chr1:207994389-207994671
  hypo

SEQ ID NO: 298281 - DNA, 208 bp, Homo sapiens; identical to SEQ ID NO: 279219
  chr1:207995189-207995397
  hypo

SEQ ID NO: 298282 - DNA, 212 bp, Homo sapiens; identical to SEQ ID NO: 207432
  chr1:208212991-208213203
  hypo

SEQ ID NO: 298283 - DNA, 78 bp, Homo sapiens; identical to SEQ ID NO: 249428
  chr1:208229181-208229259
  hypo

SEQ ID NO: 298284 - DNA, 109 bp, Homo sapiens; identical to SEQ ID NO: 249429
  chr1:208231748-208231857
  hypo

SEQ ID NO: 298285 - DNA, 165 bp, Homo sapiens; identical to SEQ ID NO: 249430
  chr1:208328464-208328629
  hypo

SEQ ID NO: 298286 - DNA, 751 bp, Homo sapiens; identical to SEQ ID NO: 249431
  chr1:208404328-208405079
  hypo

SEQ ID NO: 298287 - DNA, 530 bp, Homo sapiens; identical to SEQ ID NO: 197931
  chr1:208416772-208417302
  hypo

SEQ ID NO: 298288 - DNA, 150 bp, Homo sapiens; identical to SEQ ID NO: 197932
  chr1:208418636-208418786
  hypo

SEQ ID NO: 298289 - DNA, 34 bp, Homo sapiens; identical to SEQ ID NO: 249432
  chr1:208441467-208441501
  hypo

SEQ ID NO: 298290 - DNA, 38 bp, Homo sapiens; identical to SEQ ID NO: 207436
  chr1:208837628-208837666
  hypo

SEQ ID NO: 298291 - DNA, 147 bp, Homo sapiens; identical to SEQ ID NO: 249434
  chr1:209014977-209015124
  hypo

SEQ ID NO: 298292 - DNA, 223 bp, Homo sapiens; identical to SEQ ID NO: 249435
  chr1:209187689-209187912
  hypo

SEQ ID NO: 298293 - DNA, 40 bp, Homo sapiens; identical to SEQ ID NO: 249436
  chr1:209556781-209556821
  hypo

SEQ ID NO: 298294 - DNA, 197 bp, Homo sapiens; identical to SEQ ID NO: 249437
  chr1:209803089-209803286
  hypo

SEQ ID NO: 298295 - DNA, 51 bp, Homo sapiens; identical to SEQ ID NO: 249438
  chr1:209823346-209823397
  hypo

SEQ ID NO: 298296 - DNA, 96 bp, Homo sapiens; identical to SEQ ID NO: 249440
  chr1:209989431-209989527
  hypo

SEQ ID NO: 298297 - DNA, 40 bp, Homo sapiens; identical to SEQ ID NO: 249442
  chr1:210002384-210002424
  hypo

SEQ ID NO: 298298 - DNA, 120 bp, Homo sapiens; identical to SEQ ID NO: 207437
  chr1:210032048-210032168
  hypo

SEQ ID NO: 298299 - DNA, 254 bp, Homo sapiens; identical to SEQ ID NO: 197936
  chr1:210465689-210465943
  hypo

SEQ ID NO: 298300 - DNA, 133 bp, Homo sapiens; identical to SEQ ID NO: 197937
  chr1:210466012-210466145
  hypo

SEQ ID NO: 298301 - DNA, 113 bp, Homo sapiens; identical to SEQ ID NO: 249444
  chr1:210495070-210495183
  hypo

SEQ ID NO: 298302 - DNA, 46 bp, Homo sapiens; identical to SEQ ID NO: 207440
  chr1:210560011-210560057
  hypo

SEQ ID NO: 298303 - DNA, 148 bp, Homo sapiens; identical to SEQ ID NO: 249446
  chr1:210637837-210637985
  hypo

SEQ ID NO: 298304 - DNA, 42 bp, Homo sapiens; identical to SEQ ID NO: 249447
  chr1:210699157-210699199
  hypo

SEQ ID NO: 298305 - DNA, 31 bp, Homo sapiens; identical to SEQ ID NO: 207441
  chr1:210714466-210714497
  hypo

SEQ ID NO: 298306 - DNA, 691 bp, Homo sapiens; identical to SEQ ID NO: 249449
  chr1:210856748-210857439
  hypo

SEQ ID NO: 298307 - DNA, 105 bp, Homo sapiens; identical to SEQ ID NO: 249450
  chr1:211430456-211430561
  hypo

SEQ ID NO: 298308 - DNA, 76 bp, Homo sapiens; identical to SEQ ID NO: 249451
  chr1:211606711-211606787
  hypo

SEQ ID NO: 298309 - DNA, 242 bp, Homo sapiens; identical to SEQ ID NO: 249452
  chr1:211712704-211712946
  hypo

SEQ ID NO: 298310 - DNA, 77 bp, Homo sapiens; identical to SEQ ID NO: 249453
  chr1:211801003-211801080
  hypo

SEQ ID NO: 298311 - DNA, 70 bp, Homo sapiens; identical to SEQ ID NO: 249454
  chr1:211824879-211824949
  hypo

SEQ ID NO: 298312 - DNA, 767 bp, Homo sapiens; identical to SEQ ID NO: 197938
  chr1:212003416-212004183
  hypo

SEQ ID NO: 298313 - DNA, 52 bp, Homo sapiens; identical to SEQ ID NO: 249455
  chr1:212120899-212120951
  hypo

SEQ ID NO: 298314 - DNA, 166 bp, Homo sapiens; identical to SEQ ID NO: 249456
  chr1:212178248-212178414
  hypo

SEQ ID NO: 298315 - DNA, 33 bp, Homo sapiens; identical to SEQ ID NO: 207444
  chr1:212321601-212321634
  hypo

SEQ ID NO: 298316 - DNA, 240 bp, Homo sapiens; identical to SEQ ID NO: 249458
  chr1:212330210-212330450
  hypo

SEQ ID NO: 298317 - DNA, 44 bp, Homo sapiens; identical to SEQ ID NO: 207445
  chr1:212456677-212456721
  hypo

SEQ ID NO: 298318 - DNA, 39 bp, Homo sapiens; identical to SEQ ID NO: 207446
  chr1:212555382-212555421
  hypo

SEQ ID NO: 298319 - DNA, 39 bp, Homo sapiens; identical to SEQ ID NO: 207447
  chr1:212555661-212555700
  hypo

SEQ ID NO: 298320 - DNA, 204 bp, Homo sapiens; identical to SEQ ID NO: 249462
  chr1:212605109-212605313
  hypo

SEQ ID NO: 298321 - DNA, 209 bp, Homo sapiens; identical to SEQ ID NO: 249463
  chr1:212647420-212647629
  hypo

SEQ ID NO: 298322 - DNA, 268 bp, Homo sapiens; identical to SEQ ID NO: 279253
  chr1:212873456-212873724
  hypo

SEQ ID NO: 298323 - DNA, 224 bp, Homo sapiens; identical to SEQ ID NO: 197940
  chr1:212873750-212873974
  hypo

SEQ ID NO: 298324 - DNA, 473 bp, Homo sapiens; identical to SEQ ID NO: 249465
  chr1:213029991-213030464
  hypo

SEQ ID NO: 298325 - DNA, 42 bp, Homo sapiens; identical to SEQ ID NO: 249466
  chr1:213117545-213117587
  hypo

SEQ ID NO: 298326 - DNA, 204 bp, Homo sapiens; identical to SEQ ID NO: 249467
  chr1:213134379-213134583
  hypo

SEQ ID NO: 298327 - DNA, 295 bp, Homo sapiens; identical to SEQ ID NO: 221568
  chr1:214453830-214454125
  hypo

SEQ ID NO: 298328 - DNA, 35 bp, Homo sapiens; identical to SEQ ID NO: 249469
  chr1:214503108-214503143
  hypo

SEQ ID NO: 298329 - DNA, 226 bp, Homo sapiens; identical to SEQ ID NO: 249470
  chr1:214503350-214503576
  hypo

SEQ ID NO: 298330 - DNA, 762 bp, Homo sapiens; identical to SEQ ID NO: 207451
  chr1:214556792-214557554
  hypo

SEQ ID NO: 298331 - DNA, 38 bp, Homo sapiens; identical to SEQ ID NO: 249472
  chr1:214557876-214557914
  hypo

SEQ ID NO: 298332 - DNA, 124 bp, Homo sapiens; identical to SEQ ID NO: 249473
  chr1:214566283-214566407
  hypo

SEQ ID NO: 298333 - DNA, 189 bp, Homo sapiens; identical to SEQ ID NO: 249474
  chr1:214569256-214569445
  hypo

SEQ ID NO: 298334 - DNA, 224 bp, Homo sapiens; identical to SEQ ID NO: 207452
  chr1:214637793-214638017
  hypo

SEQ ID NO: 298335 - DNA, 66 bp, Homo sapiens; identical to SEQ ID NO: 207453
  chr1:214638090-214638156
  hypo

SEQ ID NO: 298336 - DNA, 51 bp, Homo sapiens; identical to SEQ ID NO: 207454
  chr1:214638186-214638237
  hypo

SEQ ID NO: 298337 - DNA, 200 bp, Homo sapiens; identical to SEQ ID NO: 249477
  chr1:214662584-214662784
  hypo

SEQ ID NO: 298338 - DNA, 209 bp, Homo sapiens; identical to SEQ ID NO: 207455
  chr1:214788823-214789032
  hypo

SEQ ID NO: 298339 - DNA, 171 bp, Homo sapiens; identical to SEQ ID NO: 207456
  chr1:214809712-214809883
  hypo

SEQ ID NO: 298340 - DNA, 99 bp, Homo sapiens; identical to SEQ ID NO: 249480
  chr1:214819261-214819360
  hypo

SEQ ID NO: 298341 - DNA, 351 bp, Homo sapiens; identical to SEQ ID NO: 279272
  chr1:215740687-215741038
  hypo

SEQ ID NO: 298342 - DNA, 31 bp, Homo sapiens; identical to SEQ ID NO: 226531
  chr1:215744970-215745001
  hypo

SEQ ID NO: 298343 - DNA, 90 bp, Homo sapiens; identical to SEQ ID NO: 207458
  chr1:215745301-215745391
  hypo

SEQ ID NO: 298344 - DNA, 41 bp, Homo sapiens; identical to SEQ ID NO: 207459
  chr1:215764971-215765012
  hypo

SEQ ID NO: 298345 - DNA, 619 bp, Homo sapiens; identical to SEQ ID NO: 279274
  chr1:216774194-216774813
  hypo

SEQ ID NO: 298346 - DNA, 76 bp, Homo sapiens; identical to SEQ ID NO: 197960
  chr1:219347516-219347592
  hypo

SEQ ID NO: 298347 - DNA, 112 bp, Homo sapiens; identical to SEQ ID NO: 197961
  chr1:220102055-220102167
  hypo

SEQ ID NO: 298348 - DNA, 38 bp, Homo sapiens; identical to SEQ ID NO: 207463
  chr1:220376260-220376298
  hypo

SEQ ID NO: 298349 - DNA, 37 bp, Homo sapiens; identical to SEQ ID NO: 207464
  chr1:220426847-220426884
  hypo

SEQ ID NO: 298350 - DNA, 588 bp, Homo sapiens; identical to SEQ ID NO: 197963
  chr1:220701527-220702115
  hypo

SEQ ID NO: 298351 - DNA, 254 bp, Homo sapiens; identical to SEQ ID NO: 279289
  chr1:220921312-220921566
  hypo

SEQ ID NO: 298352 - DNA, 378 bp, Homo sapiens; identical to SEQ ID NO: 249488
  chr1:221060168-221060546
  hypo

SEQ ID NO: 298353 - DNA, 45 bp, Homo sapiens; identical to SEQ ID NO: 249489
  chr1:221660546-221660591
  hypo

SEQ ID NO: 298354 - DNA, 116 bp, Homo sapiens; identical to SEQ ID NO: 249490
  chr1:221910203-221910319
  hypo

SEQ ID NO: 298355 - DNA, 42 bp, Homo sapiens; identical to SEQ ID NO: 207467
  chr1:222222865-222222907
  hypo

SEQ ID NO: 298356 - DNA, 195 bp, Homo sapiens; identical to SEQ ID NO: 207468
  chr1:222260739-222260934
  hypo

SEQ ID NO: 298357 - DNA, 254 bp, Homo sapiens; identical to SEQ ID NO: 249493
  chr1:222910923-222911177
  hypo

SEQ ID NO: 298358 - DNA, 44 bp, Homo sapiens; identical to SEQ ID NO: 207469
  chr1:223003690-223003734
  hypo

SEQ ID NO: 298359 - DNA, 405 bp, Homo sapiens; identical to SEQ ID NO: 249495
  chr1:223210752-223211157
  hypo

SEQ ID NO: 298360 - DNA, 385 bp, Homo sapiens; identical to SEQ ID NO: 249496
  chr1:223211666-223212051
  hypo

SEQ ID NO: 298361 - DNA, 187 bp, Homo sapiens; identical to SEQ ID NO: 207471
  chr1:223257415-223257602
  hypo

SEQ ID NO: 298362 - DNA, 198 bp, Homo sapiens; identical to SEQ ID NO: 197968
  chr1:223307128-223307326
  hypo

SEQ ID NO: 298363 - DNA, 142 bp, Homo sapiens; identical to SEQ ID NO: 249498
  chr1:223315690-223315832
  hypo

SEQ ID NO: 298364 - DNA, 212 bp, Homo sapiens; identical to SEQ ID NO: 279301
  chr1:223537946-223538158
  hypo

SEQ ID NO: 298365 - DNA, 86 bp, Homo sapiens; identical to SEQ ID NO: 197969
  chr1:223538641-223538727
  hypo

SEQ ID NO: 298366 - DNA, 164 bp, Homo sapiens; identical to SEQ ID NO: 207474
  chr1:223813496-223813660
  hypo

SEQ ID NO: 298367 - DNA, 56 bp, Homo sapiens; identical to SEQ ID NO: 207475
  chr1:223853104-223853160
  hypo

SEQ ID NO: 298368 - DNA, 198 bp, Homo sapiens; identical to SEQ ID NO: 207476
  chr1:223888417-223888615
  hypo

SEQ ID NO: 298369 - DNA, 100 bp, Homo sapiens; identical to SEQ ID NO: 207477
  chr1:223894433-223894533
  hypo

SEQ ID NO: 298370 - DNA, 775 bp, Homo sapiens; identical to SEQ ID NO: 279303
  chr1:223899911-223900686
  hypo

SEQ ID NO: 298371 - DNA, 42 bp, Homo sapiens; identical to SEQ ID NO: 249504
  chr1:223908289-223908331
  hypo

SEQ ID NO: 298372 - DNA, 63 bp, Homo sapiens
  chr1:223927891-223927954
  hypo
gagtgagagaacaccgtgccacctggacgctgaaacaccattgagtcacctctgtttgaaatg

SEQ ID NO: 298373 - DNA, 61 bp, Homo sapiens; identical to SEQ ID NO: 249507
  chr1:223953251-223953312
  hypo

SEQ ID NO: 298374 - DNA, 104 bp, Homo sapiens; identical to SEQ ID NO: 207479
  chr1:224051404-224051508
  hypo

SEQ ID NO: 298375 - DNA, 101 bp, Homo sapiens; identical to SEQ ID NO: 207480
  chr1:224300432-224300533
  hypo

SEQ ID NO: 298376 - DNA, 139 bp, Homo sapiens; identical to SEQ ID NO: 207481
  chr1:224300563-224300702
  hypo

SEQ ID NO: 298377 - DNA, 263 bp, Homo sapiens; identical to SEQ ID NO: 207482
  chr1:224345147-224345410
  hypo

SEQ ID NO: 298378 - DNA, 90 bp, Homo sapiens; identical to SEQ ID NO: 207483
  chr1:224368628-224368718
  hypo

SEQ ID NO: 298379 - DNA, 89 bp, Homo sapiens; identical to SEQ ID NO: 249514
  chr1:224400597-224400686
  hypo

SEQ ID NO: 298380 - DNA, 34 bp, Homo sapiens; identical to SEQ ID NO: 249515
  chr1:224447975-224448009
  hypo

SEQ ID NO: 298381 - DNA, 85 bp, Homo sapiens; identical to SEQ ID NO: 221583
  chr1:224481061-224481146
  hypo

SEQ ID NO: 298382 - DNA, 164 bp, Homo sapiens; identical to SEQ ID NO: 249516
  chr1:224487331-224487495
  hypo

SEQ ID NO: 298383 - DNA, 43 bp, Homo sapiens; identical to SEQ ID NO: 249517
  chr1:224490849-224490892
  hypo

SEQ ID NO: 298384 - DNA, 34 bp, Homo sapiens; identical to SEQ ID NO: 197974
  chr1:224622766-224622800
  hypo

SEQ ID NO: 298385 - DNA, 250 bp, Homo sapiens; identical to SEQ ID NO: 197975
  chr1:224691180-224691430
  hypo

SEQ ID NO: 298386 - DNA, 49 bp, Homo sapiens; identical to SEQ ID NO: 207486
  chr1:225113074-225113123
  hypo

SEQ ID NO: 298387 - DNA, 99 bp, Homo sapiens; identical to SEQ ID NO: 197977
  chr1:225117651-225117750
  hypo

SEQ ID NO: 298388 - DNA, 87 bp, Homo sapiens; identical to SEQ ID NO: 197978
  chr1:225117751-225117838
  hypo

SEQ ID NO: 298389 - DNA, 34 bp, Homo sapiens; identical to SEQ ID NO: 207489
  chr1:225581812-225581846
  hypo

SEQ ID NO: 298390 - DNA, 408 bp, Homo sapiens; identical to SEQ ID NO: 207490
  chr1:225597844-225598252
  hypo

SEQ ID NO: 298391 - DNA, 33 bp, Homo sapiens; identical to SEQ ID NO: 207491
  chr1:225608023-225608056
  hypo

SEQ ID NO: 298392 - DNA, 956 bp, Homo sapiens; identical to SEQ ID NO: 279315
  chr1:225614336-225615292
  hypo

SEQ ID NO: 298393 - DNA, 243 bp, Homo sapiens; identical to SEQ ID NO: 207493
  chr1:225637174-225637417
  hypo

SEQ ID NO: 298394 - DNA, 45 bp, Homo sapiens; identical to SEQ ID NO: 249523
  chr1:225696995-225697040
  hypo

SEQ ID NO: 298395 - DNA, 92 bp, Homo sapiens; identical to SEQ ID NO: 249524
  chr1:225907936-225908028
  hypo

SEQ ID NO: 298396 - DNA, 92 bp, Homo sapiens; identical to SEQ ID NO: 249525
  chr1:225908328-225908420
  hypo

SEQ ID NO: 298397 - DNA, 82 bp, Homo sapiens; identical to SEQ ID NO: 249526
  chr1:225920484-225920566
  hypo

SEQ ID NO: 298398 - DNA, 43 bp, Homo sapiens; identical to SEQ ID NO: 249527
  chr1:225945260-225945303
  hypo

SEQ ID NO: 298399 - DNA, 36 bp, Homo sapiens; identical to SEQ ID NO: 249528
  chr1:225956132-225956168
  hypo

SEQ ID NO: 298400 - DNA, 78 bp, Homo sapiens; identical to SEQ ID NO: 207494
  chr1:225988363-225988441
  hypo

SEQ ID NO: 298401 - DNA, 50 bp, Homo sapiens; identical to SEQ ID NO: 221589
  chr1:225998107-225998157
  hypo

SEQ ID NO: 298402 - DNA, 55 bp, Homo sapiens; identical to SEQ ID NO: 249530
  chr1:226026645-226026700
  hypo

SEQ ID NO: 298403 - DNA, 108 bp, Homo sapiens; identical to SEQ ID NO: 207495
  chr1:226053432-226053540
  hypo

SEQ ID NO: 298404 - DNA, 130 bp, Homo sapiens; identical to SEQ ID NO: 249532
  chr1:226059446-226059576
  hypo

SEQ ID NO: 298405 - DNA, 104 bp, Homo sapiens; identical to SEQ ID NO: 207496
  chr1:226062774-226062878
  hypo

SEQ ID NO: 298406 - DNA, 390 bp, Homo sapiens; identical to SEQ ID NO: 249534
  chr1:226076321-226076711
  hypo

SEQ ID NO: 298407 - DNA, 263 bp, Homo sapiens; identical to SEQ ID NO: 207497
  chr1:226077115-226077378
  hypo

SEQ ID NO: 298408 - DNA, 147 bp, Homo sapiens; identical to SEQ ID NO: 207498
  chr1:226102816-226102963
  hypo

SEQ ID NO: 298409 - DNA, 158 bp, Homo sapiens; identical to SEQ ID NO: 207499
  chr1:226109458-226109616
  hypo

SEQ ID NO: 298410 - DNA, 126 bp, Homo sapiens; identical to SEQ ID NO: 207500
  chr1:226109706-226109832
  hypo

SEQ ID NO: 298411 - DNA, 143 bp, Homo sapiens; identical to SEQ ID NO: 207501
  chr1:226163215-226163358
  hypo

SEQ ID NO: 298412 - DNA, 171 bp, Homo sapiens; identical to SEQ ID NO: 197982
  chr1:226297380-226297551
  hypo

SEQ ID NO: 298413 - DNA, 35 bp, Homo sapiens; identical to SEQ ID NO: 249539
  chr1:226304036-226304071
  hypo

SEQ ID NO: 298414 - DNA, 35 bp, Homo sapiens; identical to SEQ ID NO: 249540
  chr1:226310959-226310994
  hypo

SEQ ID NO: 298415 - DNA, 95 bp, Homo sapiens; identical to SEQ ID NO: 249541
  chr1:226311810-226311905
  hypo

SEQ ID NO: 298416 - DNA, 148 bp, Homo sapiens; identical to SEQ ID NO: 279326
  chr1:226497226-226497374
  hypo

SEQ ID NO: 298417 - DNA, 56 bp, Homo sapiens; identical to SEQ ID NO: 221594
  chr1:226497394-226497450
  hypo

SEQ ID NO: 298418 - DNA, 204 bp, Homo sapiens; identical to SEQ ID NO: 249543
  chr1:226596303-226596507
  hypo

SEQ ID NO: 298419 - DNA, 342 bp, Homo sapiens; identical to SEQ ID NO: 207503
  chr1:226789939-226790281
  hypo

SEQ ID NO: 298420 - DNA, 314 bp, Homo sapiens
  chr1:226826317-226826631
  hypo
cagagcatctatccagtctgcgagccgctgcagcagcaacacacaagacagaactttgtcatgaacttgtacaacccacactcctggactcggagacagctcgccagctcttgctggcagggagcagcgtgacctcgggcacacaagatggggacaagcaggtctacccacagcaggtctgctgtgaagatttgctgcacgcttggcatgacacctggcagacggcgggcactgttctctctctcagggcatgggaaatgctctctggagctatggggccgatggctaagggagagtcagtgagtgtccgccaa

SEQ ID NO: 298421 - DNA, 339 bp, Homo sapiens; identical to SEQ ID NO: 249546
  chr1:226827391-226827730
  hypo

SEQ ID NO: 298422 - DNA, 361 bp, Homo sapiens
  chr1:226829392-226829753
  hypo
agctgggcagggctagaagccactctgctctgaggcctgagccccctacacagccatcccgcctgaggaataggctgatgtctccaaatgtctggccttggggcgggccacccacattctgagcctgtgcctggagaagcttacagcttccaaagggcgctgagagaagccaagccccctgaggtgggcacgggtggggcccgaggctgccctcactcgccggcctcaccttgattccctcgatcctgaaccccagggtggccgtggagctgatggtctcccgccactgcatgtaccgtggcttggtcacagcccgctgtgctttttcctcctcggtgggggcctcggggtccacctcgat

SEQ ID NO: 298423 - DNA, 152 bp, Homo sapiens; identical to SEQ ID NO: 249548
  chr1:226833941-226834093
  hypo

SEQ ID NO: 298424 - DNA, 69 bp, Homo sapiens; identical to SEQ ID NO: 249549
  chr1:226834885-226834954
  hypo

SEQ ID NO: 298425 - DNA, 99 bp, Homo sapiens; identical to SEQ ID NO: 207504
  chr1:226908275-226908374
  hypo

SEQ ID NO: 298426 - DNA, 98 bp, Homo sapiens; identical to SEQ ID NO: 249552
  chr1:226910144-226910242
  hypo

SEQ ID NO: 298427 - DNA, 1206 bp, Homo sapiens; identical to SEQ ID NO: 197984
  chr1:226925659-226926865
  hypo

SEQ ID NO: 298428 - DNA, 70 bp, Homo sapiens; identical to SEQ ID NO: 197985
  chr1:226926951-226927021
  hypo

SEQ ID NO: 298429 - DNA, 144 bp, Homo sapiens; identical to SEQ ID NO: 249553
  chr1:226941995-226942139
  hypo

SEQ ID NO: 298430 - DNA, 71 bp, Homo sapiens; identical to SEQ ID NO: 221598
  chr1:227058816-227058887
  hypo

SEQ ID NO: 298431 - DNA, 121 bp, Homo sapiens; identical to SEQ ID NO: 207507
  chr1:227175823-227175944
  hypo

SEQ ID NO: 298432 - DNA, 195 bp, Homo sapiens; identical to SEQ ID NO: 249555
  chr1:227191027-227191222
  hypo

SEQ ID NO: 298433 - DNA, 82 bp, Homo sapiens; identical to SEQ ID NO: 207508
  chr1:227248038-227248120
  hypo

SEQ ID NO: 298434 - DNA, 171 bp, Homo sapiens; identical to SEQ ID NO: 249557
  chr1:227370569-227370740
  hypo

SEQ ID NO: 298435 - DNA, 44 bp, Homo sapiens; identical to SEQ ID NO: 207509
  chr1:227376422-227376466
  hypo

SEQ ID NO: 298436 - DNA, 35 bp, Homo sapiens; identical to SEQ ID NO: 249559
  chr1:227383163-227383198
  hypo

SEQ ID NO: 298437 - DNA, 119 bp, Homo sapiens; identical to SEQ ID NO: 207510
  chr1:227422355-227422474
  hypo

SEQ ID NO: 298438 - DNA, 34 bp, Homo sapiens; identical to SEQ ID NO: 207511
  chr1:227463301-227463335
  hypo

SEQ ID NO: 298439 - DNA, 152 bp, Homo sapiens; identical to SEQ ID NO: 249562
  chr1:227488575-227488727
  hypo

SEQ ID NO: 298440 - DNA, 210 bp, Homo sapiens; identical to SEQ ID NO: 207512
  chr1:227618270-227618480
  hypo

SEQ ID NO: 298441 - DNA, 205 bp, Homo sapiens; identical to SEQ ID NO: 197990
  chr1:227652539-227652744
  hypo

SEQ ID NO: 298442 - DNA, 181 bp, Homo sapiens; identical to SEQ ID NO: 249565
  chr1:227947116-227947297
  hypo

SEQ ID NO: 298443 - DNA, 204 bp, Homo sapiens; identical to SEQ ID NO: 207514
  chr1:227948693-227948897
  hypo

SEQ ID NO: 298444 - DNA, 204 bp, Homo sapiens; identical to SEQ ID NO: 249568
  chr1:227961299-227961503
  hypo

SEQ ID NO: 298445 - DNA, 747 bp, Homo sapiens; identical to SEQ ID NO: 207515
  chr1:227962631-227963378
  hypo

SEQ ID NO: 298446 - DNA, 78 bp, Homo sapiens; identical to SEQ ID NO: 207516
  chr1:228003875-228003953
  hypo

SEQ ID NO: 298447 - DNA, 84 bp, Homo sapiens; identical to SEQ ID NO: 249571
  chr1:228079084-228079168
  hypo

SEQ ID NO: 298448 - DNA, 289 bp, Homo sapiens
  chr1:228081840-228082129
  hypo
tggactgcattcaatgtttccgcaggagaaggggagcaagtggggcggagtgactgcatcctttgggtactggcatgggacaaggtgggtgcccgagagccctggagcacagatgtctgtgcacggctctgtgcaccagcccaggtgcagggtgtccacagtgcaagagcccacaagcacacaaccacaataggtgttcgcacacgagcccaggatgtgtggtgcctgcaggcatgtgcccaggacccaaggtgtccacaaacgtacccatgcccttcacatggactca

SEQ ID NO: 298449 - DNA, 52 bp, Homo sapiens
  chr1:228083620-228083672
  hypo
gaggggctctgggtgagtgctggccctgtaggtccctcggcctgtcgggaga

SEQ ID NO: 298450 - DNA, 45 bp, Homo sapiens; identical to SEQ ID NO: 249574
  chr1:228092976-228093021
  hypo

SEQ ID NO: 298451 - DNA, 611 bp, Homo sapiens; identical to SEQ ID NO: 249575
  chr1:228109226-228109837
  hypo

SEQ ID NO: 298452 - DNA, 32 bp, Homo sapiens; identical to SEQ ID NO: 207519
  chr1:228111802-228111834
  hypo

SEQ ID NO: 298453 - DNA, 175 bp, Homo sapiens; identical to SEQ ID NO: 207520
  chr1:228111864-228112039
  hypo

SEQ ID NO: 298454 - DNA, 305 bp, Homo sapiens; identical to SEQ ID NO: 207521
  chr1:228112930-228113235
  hypo

SEQ ID NO: 298455 - DNA, 354 bp, Homo sapiens; identical to SEQ ID NO: 249579
  chr1:228126652-228127006
  hypo

SEQ ID NO: 298456 - DNA, 216 bp, Homo sapiens; identical to SEQ ID NO: 197992
  chr1:228134891-228135107
  hypo

SEQ ID NO: 298457 - DNA, 207 bp, Homo sapiens; identical to SEQ ID NO: 197993
  chr1:228135899-228136106
  hypo

SEQ ID NO: 298458 - DNA, 119 bp, Homo sapiens; identical to SEQ ID NO: 197994
  chr1:228136152-228136271
  hypo

SEQ ID NO: 298459 - DNA, 149 bp, Homo sapiens; identical to SEQ ID NO: 279347
  chr1:228193977-228194126
  hypo

SEQ ID NO: 298460 - DNA, 95 bp, Homo sapiens
  chr1:228201126-228201221
  hypo
aaacgtgccgctgccgcccagggaaactggcaagtgcgtggccgcgggcacaggagccgctgtgcctgctgggactcgttcaaagtatgtgtcag

SEQ ID NO: 298461 - DNA, 70 bp, Homo sapiens; identical to SEQ ID NO: 249581
  chr1:228266733-228266803
  hypo

SEQ ID NO: 298462 - DNA, 89 bp, Homo sapiens; identical to SEQ ID NO: 249582
  chr1:228280525-228280614
  hypo

SEQ ID NO: 298463 - DNA, 344 bp, Homo sapiens; identical to SEQ ID NO: 249583
  chr1:228280967-228281311
  hypo

SEQ ID NO: 298464 - DNA, 142 bp, Homo sapiens; identical to SEQ ID NO: 249584
  chr1:228282125-228282267
  hypo

SEQ ID NO: 298465 - DNA, 65 bp, Homo sapiens; identical to SEQ ID NO: 249585
  chr1:228285354-228285419
  hypo

SEQ ID NO: 298466 - DNA, 356 bp, Homo sapiens; identical to SEQ ID NO: 249586
  chr1:228295266-228295622
  hypo

SEQ ID NO: 298467 - DNA, 36 bp, Homo sapiens; identical to SEQ ID NO: 207526
  chr1:228322365-228322401
  hypo

SEQ ID NO: 298468 - DNA, 200 bp, Homo sapiens; identical to SEQ ID NO: 207527
  chr1:228322431-228322631
  hypo

SEQ ID NO: 298469 - DNA, 36 bp, Homo sapiens
  chr1:228342784-228342820
  hypo
tctccagctgtgatcgtcatcacatggaatagtcac

SEQ ID NO: 298470 - DNA, 205 bp, Homo sapiens
  chr1:228342850-228343055
  hypo
agcctcagggaagggctgaacctgtgtgtgtgcgcctgtgcatgtgtgtgtggcgaggccaggtagcaaaggctcctggtgggagtgggctccagccagtgtgggagccgtgggcagagcacacgaggggatatctggagccaggcgtggaatgggggcaggggacctggcactaaggcaggtgaggccgcggcattcgctctgg

SEQ ID NO: 298471 - DNA, 232 bp, Homo sapiens; identical to SEQ ID NO: 249589
  chr1:228361364-228361596
  hypo

SEQ ID NO: 298472 - DNA, 42 bp, Homo sapiens; identical to SEQ ID NO: 249590
  chr1:228406668-228406710
  hypo

SEQ ID NO: 298473 - DNA, 302 bp, Homo sapiens; identical to SEQ ID NO: 279353
  chr1:228444468-228444770
  hypo

SEQ ID NO: 298474 - DNA, 245 bp, Homo sapiens; identical to SEQ ID NO: 249592
  chr1:228459734-228459979
  hypo

SEQ ID NO: 298475 - DNA, 76 bp, Homo sapiens
  chr1:228461082-228461158
  hypo
acatggtacaaggacgggaagaagctgagctccagctcaaaagtgcacatggaggccagcggctacacacggaggc

SEQ ID NO: 298476 - DNA, 864 bp, Homo sapiens; identical to SEQ ID NO: 249594
  chr1:228461596-228462460
  hypo

SEQ ID NO: 298477 - DNA, 94 bp, Homo sapiens; identical to SEQ ID NO: 249595
  chr1:228464861-228464955
  hypo

SEQ ID NO: 298478 - DNA, 330 bp, Homo sapiens; identical to SEQ ID NO: 207530
  chr1:228465319-228465649
  hypo

SEQ ID NO: 298479 - DNA, 40 bp, Homo sapiens
  chr1:228466467-228466507
  hypo
tgtcccgggccagcgcccaggtgcggtggttcaagggcag

SEQ ID NO: 298480 - DNA, 267 bp, Homo sapiens
  chr1:228466537-228466804
  hypo
gctggtcagtgatggcctctaccgcaagctgatcatcagtgatgtccacgcagaggacgaggacacctacacctgtgacgccggtgatgtcaagaccagtgcacagttcttcgtggaaggtgcaggcagggagggcagctctgcaggttgcttttgttggggggagtctcccaggtccatggtttgccctacactcctggagacgctgggtctgggcagctcaggaggatgctagcatgcatctagcagggcgggggcttgttccca

SEQ ID NO: 298481 - DNA, 254 bp, Homo sapiens; identical to SEQ ID NO: 249598
  chr1:228468385-228468639
  hypo

SEQ ID NO: 298482 - DNA, 212 bp, Homo sapiens; identical to SEQ ID NO: 207531
  chr1:228473690-228473902
  hypo

SEQ ID NO: 298483 - DNA, 113 bp, Homo sapiens; identical to SEQ ID NO: 207532
  chr1:228473932-228474045
  hypo

SEQ ID NO: 298484 - DNA, 112 bp, Homo sapiens; identical to SEQ ID NO: 249600
  chr1:228475449-228475561
  hypo

SEQ ID NO: 298485 - DNA, 559 bp, Homo sapiens; identical to SEQ ID NO: 249601
  chr1:228477493-228478052
  hypo

SEQ ID NO: 298486 - DNA, 57 bp, Homo sapiens; identical to SEQ ID NO: 249602
  chr1:228479782-228479839
  hypo

SEQ ID NO: 298487 - DNA, 98 bp, Homo sapiens; identical to SEQ ID NO: 249603
  chr1:228481995-228482093
  hypo

SEQ ID NO: 298488 - DNA, 43 bp, Homo sapiens; identical to SEQ ID NO: 249604
  chr1:228494680-228494723
  hypo

SEQ ID NO: 298489 - DNA, 84 bp, Homo sapiens; identical to SEQ ID NO: 207533
  chr1:228504692-228504776
  hypo

SEQ ID NO: 298490 - DNA, 397 bp, Homo sapiens; identical to SEQ ID NO: 249606
  chr1:228509315-228509712
  hypo

SEQ ID NO: 298491 - DNA, 234 bp, Homo sapiens; identical to SEQ ID NO: 249607
  chr1:228526490-228526724
  hypo

SEQ ID NO: 298492 - DNA, 362 bp, Homo sapiens; identical to SEQ ID NO: 207535
  chr1:228528429-228528791
  hypo

SEQ ID NO: 298493 - DNA, 49 bp, Homo sapiens; identical to SEQ ID NO: 207536
  chr1:228529382-228529431
  hypo

SEQ ID NO: 298494 - DNA, 60 bp, Homo sapiens; identical to SEQ ID NO: 249609
  chr1:228529845-228529905
  hypo

SEQ ID NO: 298495 - DNA, 118 bp, Homo sapiens; identical to SEQ ID NO: 249610
  chr1:228542268-228542386
  hypo

SEQ ID NO: 298496 - DNA, 91 bp, Homo sapiens; identical to SEQ ID NO: 207537
  chr1:228552502-228552593
  hypo

SEQ ID NO: 298497 - DNA, 82 bp, Homo sapiens; identical to SEQ ID NO: 207538
  chr1:228552623-228552705
  hypo

SEQ ID NO: 298498 - DNA, 190 bp, Homo sapiens; identical to SEQ ID NO: 249612
  chr1:228553842-228554032
  hypo

SEQ ID NO: 298499 - DNA, 44 bp, Homo sapiens
  chr1:228559963-228560007
  hypo
cacccaccttgcagcggcctcaggaacaggcgaccatgcgcaag

SEQ ID NO: 298500 - DNA, 51 bp, Homo sapiens; identical to SEQ ID NO: 279356
  chr1:228566672-228566723
  hypo

SEQ ID NO: 298501 - DNA, 87 bp, Homo sapiens; identical to SEQ ID NO: 279357
  chr1:228566969-228567056
  hypo

SEQ ID NO: 298502 - DNA, 38 bp, Homo sapiens; identical to SEQ ID NO: 249615
  chr1:228613059-228613097
  hypo

SEQ ID NO: 298503 - DNA, 37 bp, Homo sapiens; identical to SEQ ID NO: 249616
  chr1:228614003-228614040
  hypo

SEQ ID NO: 298504 - DNA, 120 bp, Homo sapiens; identical to SEQ ID NO: 197999
  chr1:228646026-228646146
  hypo

SEQ ID NO: 298505 - DNA, 253 bp, Homo sapiens; identical to SEQ ID NO: 279361
  chr1:228646941-228647194
  hypo

SEQ ID NO: 298506 - DNA, 117 bp, Homo sapiens; identical to SEQ ID NO: 279362
  chr1:228647317-228647434
  hypo

SEQ ID NO: 298507 - DNA, 35 bp, Homo sapiens; identical to SEQ ID NO: 249617
  chr1:228857021-228857056
  hypo

SEQ ID NO: 298508 - DNA, 328 bp, Homo sapiens; identical to SEQ ID NO: 198004
  chr1:228870899-228871227
  hypo

SEQ ID NO: 298509 - DNA, 133 bp, Homo sapiens; identical to SEQ ID NO: 207541
  chr1:228919237-228919370
  hypo

SEQ ID NO: 298510 - DNA, 44 bp, Homo sapiens; identical to SEQ ID NO: 207542
  chr1:228919416-228919460
  hypo

SEQ ID NO: 298511 - DNA, 150 bp, Homo sapiens; identical to SEQ ID NO: 249619
  chr1:229038504-229038654
  hypo

SEQ ID NO: 298512 - DNA, 54 bp, Homo sapiens; identical to SEQ ID NO: 207543
  chr1:229073283-229073337
  hypo

SEQ ID NO: 298513 - DNA, 267 bp, Homo sapiens; identical to SEQ ID NO: 207544
  chr1:229104403-229104670
  hypo

SEQ ID NO: 298514 - DNA, 90 bp, Homo sapiens; identical to SEQ ID NO: 249622
  chr1:229136329-229136419
  hypo

SEQ ID NO: 298515 - DNA, 130 bp, Homo sapiens; identical to SEQ ID NO: 207545
  chr1:229155568-229155698
  hypo

SEQ ID NO: 298516 - DNA, 163 bp, Homo sapiens; identical to SEQ ID NO: 207546
  chr1:229160202-229160365
  hypo

SEQ ID NO: 298517 - DNA, 158 bp, Homo sapiens; identical to SEQ ID NO: 207547
  chr1:229202157-229202315
  hypo

SEQ ID NO: 298518 - DNA, 145 bp, Homo sapiens; identical to SEQ ID NO: 249626
  chr1:229223744-229223889
  hypo

SEQ ID NO: 298519 - DNA, 113 bp, Homo sapiens; identical to SEQ ID NO: 249627
  chr1:229230354-229230467
  hypo

SEQ ID NO: 298520 - DNA, 148 bp, Homo sapiens; identical to SEQ ID NO: 207548
  chr1:229252027-229252175
  hypo

SEQ ID NO: 298521 - DNA, 86 bp, Homo sapiens; identical to SEQ ID NO: 249629
  chr1:229256678-229256764
  hypo

SEQ ID NO: 298522 - DNA, 51 bp, Homo sapiens; identical to SEQ ID NO: 249630
  chr1:229438667-229438718
  hypo

SEQ ID NO: 298523 - DNA, 143 bp, Homo sapiens; identical to SEQ ID NO: 207549
  chr1:229462409-229462552
  hypo

SEQ ID NO: 298524 - DNA, 150 bp, Homo sapiens; identical to SEQ ID NO: 207550
  chr1:229606406-229606556
  hypo

SEQ ID NO: 298525 - DNA, 390 bp, Homo sapiens; identical to SEQ ID NO: 249633
  chr1:229644848-229645238
  hypo

SEQ ID NO: 298526 - DNA, 160 bp, Homo sapiens; identical to SEQ ID NO: 249634
  chr1:229677940-229678100
  hypo

SEQ ID NO: 298527 - DNA, 35 bp, Homo sapiens; identical to SEQ ID NO: 207552
  chr1:229678578-229678613
  hypo

SEQ ID NO: 298528 - DNA, 120 bp, Homo sapiens; identical to SEQ ID NO: 249636
  chr1:229853311-229853431
  hypo

SEQ ID NO: 298529 - DNA, 62 bp, Homo sapiens; identical to SEQ ID NO: 249637
  chr1:230080283-230080345
  hypo

SEQ ID NO: 298530 - DNA, 61 bp, Homo sapiens; identical to SEQ ID NO: 249638
  chr1:230213776-230213837
  hypo

SEQ ID NO: 298531 - DNA, 200 bp, Homo sapiens; identical to SEQ ID NO: 207553
  chr1:230219680-230219880
  hypo

SEQ ID NO: 298532 - DNA, 219 bp, Homo sapiens; identical to SEQ ID NO: 198009
  chr1:230223230-230223449
  hypo

SEQ ID NO: 298533 - DNA, 99 bp, Homo sapiens; identical to SEQ ID NO: 249640
  chr1:230250129-230250228
  hypo

SEQ ID NO: 298534 - DNA, 307 bp, Homo sapiens; identical to SEQ ID NO: 207555
  chr1:230256221-230256528
  hypo

SEQ ID NO: 298535 - DNA, 296 bp, Homo sapiens; identical to SEQ ID NO: 207556
  chr1:230266283-230266579
  hypo

SEQ ID NO: 298536 - DNA, 105 bp, Homo sapiens; identical to SEQ ID NO: 249643
  chr1:230272604-230272709
  hypo

SEQ ID NO: 298537 - DNA, 253 bp, Homo sapiens; identical to SEQ ID NO: 207557
  chr1:230308282-230308535
  hypo

SEQ ID NO: 298538 - DNA, 289 bp, Homo sapiens; identical to SEQ ID NO: 249645
  chr1:230346848-230347137
  hypo

SEQ ID NO: 298539 - DNA, 219 bp, Homo sapiens; identical to SEQ ID NO: 249646
  chr1:230378964-230379183
  hypo

SEQ ID NO: 298540 - DNA, 264 bp, Homo sapiens; identical to SEQ ID NO: 249647
  chr1:230379468-230379732
  hypo

SEQ ID NO: 298541 - DNA, 41 bp, Homo sapiens; identical to SEQ ID NO: 207558
  chr1:230393113-230393154
  hypo

SEQ ID NO: 298542 - DNA, 76 bp, Homo sapiens; identical to SEQ ID NO: 207559
  chr1:230393524-230393600
  hypo

SEQ ID NO: 298543 - DNA, 312 bp, Homo sapiens; identical to SEQ ID NO: 249650
  chr1:230398099-230398411
  hypo

SEQ ID NO: 298544 - DNA, 206 bp, Homo sapiens; identical to SEQ ID NO: 249651
  chr1:230399606-230399812
  hypo

SEQ ID NO: 298545 - DNA, 213 bp, Homo sapiens; identical to SEQ ID NO: 207561
  chr1:230404004-230404217
  hypo

SEQ ID NO: 298546 - DNA, 210 bp, Homo sapiens; identical to SEQ ID NO: 207562
  chr1:230404365-230404575
  hypo

SEQ ID NO: 298547 - DNA, 245 bp, Homo sapiens; identical to SEQ ID NO: 249653
  chr1:230415001-230415246
  hypo

SEQ ID NO: 298548 - DNA, 72 bp, Homo sapiens
  chr1:230453225-230453297
  hypo
actgtcactctttagtccagcgaggcttgggtgaagacggcagaagaatgaatcaaagactagcgagacgca

SEQ ID NO: 298549 - DNA, 103 bp, Homo sapiens
  chr1:230453705-230453808
  hypo
gccccaccctccccggaacacagttcacacagagctgccaccagcgccagcaccaccgccctacactcaagagaggctgcccggcccccaccagacaggggtc

SEQ ID NO: 298550 - DNA, 210 bp, Homo sapiens; identical to SEQ ID NO: 249656
  chr1:230529557-230529767
  hypo

SEQ ID NO: 298551 - DNA, 118 bp, Homo sapiens; identical to SEQ ID NO: 207564
  chr1:230821541-230821659
  hypo

SEQ ID NO: 298552 - DNA, 109 bp, Homo sapiens; identical to SEQ ID NO: 249658
  chr1:230827245-230827354
  hypo

SEQ ID NO: 298553 - DNA, 42 bp, Homo sapiens; identical to SEQ ID NO: 249659
  chr1:230841595-230841637
  hypo

SEQ ID NO: 298554 - DNA, 35 bp, Homo sapiens; identical to SEQ ID NO: 249660
  chr1:230870971-230871006
  hypo

SEQ ID NO: 298555 - DNA, 509 bp, Homo sapiens; identical to SEQ ID NO: 249661
  chr1:230882795-230883304
  hypo

SEQ ID NO: 298556 - DNA, 131 bp, Homo sapiens; identical to SEQ ID NO: 249662
  chr1:230887782-230887913
  hypo

SEQ ID NO: 298557 - DNA, 196 bp, Homo sapiens; identical to SEQ ID NO: 249663
  chr1:230888881-230889077
  hypo

SEQ ID NO: 298558 - DNA, 147 bp, Homo sapiens; identical to SEQ ID NO: 249664
  chr1:230894274-230894421
  hypo

SEQ ID NO: 298559 - DNA, 359 bp, Homo sapiens; identical to SEQ ID NO: 207566
  chr1:230898511-230898870
  hypo

SEQ ID NO: 298560 - DNA, 100 bp, Homo sapiens; identical to SEQ ID NO: 249666
  chr1:230928474-230928574
  hypo

SEQ ID NO: 298561 - DNA, 799 bp, Homo sapiens; identical to SEQ ID NO: 249667
  chr1:230979103-230979902
  hypo

SEQ ID NO: 298562 - DNA, 120 bp, Homo sapiens; identical to SEQ ID NO: 207568
  chr1:230980022-230980142
  hypo

SEQ ID NO: 298563 - DNA, 124 bp, Homo sapiens; identical to SEQ ID NO: 249669
  chr1:230986635-230986759
  hypo

SEQ ID NO: 298564 - DNA, 68 bp, Homo sapiens; identical to SEQ ID NO: 249670
  chr1:230988836-230988904
  hypo

SEQ ID NO: 298565 - DNA, 131 bp, Homo sapiens
  chr1:230992696-230992827
  hypo
tcagcttttgacagagcctccgccaccctagcttagcctcagacactgggggcaaatgccagggcccacgcagggggagtgcctcaccaacacataagtgtacacattcagccttccagaccccgagtgtg

SEQ ID NO: 298566 - DNA, 199 bp, Homo sapiens; identical to SEQ ID NO: 249672
  chr1:231037666-231037865
  hypo

SEQ ID NO: 298567 - DNA, 499 bp, Homo sapiens; identical to SEQ ID NO: 207570
  chr1:231038105-231038604
  hypo

SEQ ID NO: 298568 - DNA, 146 bp, Homo sapiens; identical to SEQ ID NO: 249674
  chr1:231046052-231046198
  hypo

SEQ ID NO: 298569 - DNA, 201 bp, Homo sapiens; identical to SEQ ID NO: 207571
  chr1:231122192-231122393
  hypo

SEQ ID NO: 298570 - DNA, 40 bp, Homo sapiens; identical to SEQ ID NO: 207572
  chr1:231127690-231127730
  hypo

SEQ ID NO: 298571 - DNA, 248 bp, Homo sapiens
  chr1:231162838-231163086
  hypo
ggtaaacacaggagcctgaacgcttctaggtttcaaaggctctgactccccatgaccccattccagccagacacgtggctccaggcttttctcctgacagtgccatttccaaggtattcccaggcccaccgaggtgatgcacccggcagggagtcgaaagcaaagaggatctctccctggacacttctgcactgtagcacccagatgactcacaaagctgccttgtcgtcaggtggaacactggccta

SEQ ID NO: 298572 - DNA, 50 bp, Homo sapiens; identical to SEQ ID NO: 249678
  chr1:231163531-231163581
  hypo

SEQ ID NO: 298573 - DNA, 584 bp, Homo sapiens; identical to SEQ ID NO: 279380
  chr1:231175065-231175649
  hypo

SEQ ID NO: 298574 - DNA, 707 bp, Homo sapiens; identical to SEQ ID NO: 36954
  chr1:231175692-231176399
  hypo

SEQ ID NO: 298575 - DNA, 228 bp, Homo sapiens; identical to SEQ ID NO: 198012
  chr1:231297569-231297797
  hypo

SEQ ID NO: 298576 - DNA, 132 bp, Homo sapiens; identical to SEQ ID NO: 249679
  chr1:231401053-231401185
  hypo

SEQ ID NO: 298577 - DNA, 31 bp, Homo sapiens; identical to SEQ ID NO: 207574
  chr1:231409278-231409309
  hypo

SEQ ID NO: 298578 - DNA, 126 bp, Homo sapiens; identical to SEQ ID NO: 207575
  chr1:231475548-231475674
  hypo

SEQ ID NO: 298579 - DNA, 90 bp, Homo sapiens; identical to SEQ ID NO: 207576
  chr1:231476372-231476462
  hypo

SEQ ID NO: 298580 - DNA, 64 bp, Homo sapiens; identical to SEQ ID NO: 249683
  chr1:231713057-231713121
  hypo

SEQ ID NO: 298581 - DNA, 79 bp, Homo sapiens; identical to SEQ ID NO: 249685
  chr1:231820898-231820977
  hypo

SEQ ID NO: 298582 - DNA, 131 bp, Homo sapiens; identical to SEQ ID NO: 249686
  chr1:231893611-231893742
  hypo

SEQ ID NO: 298583 - DNA, 138 bp, Homo sapiens; identical to SEQ ID NO: 249687
  chr1:232104130-232104268
  hypo

SEQ ID NO: 298584 - DNA, 204 bp, Homo sapiens; identical to SEQ ID NO: 207577
  chr1:232192429-232192633
  hypo

SEQ ID NO: 298585 - DNA, 87 bp, Homo sapiens; identical to SEQ ID NO: 249689
  chr1:232466923-232467010
  hypo

SEQ ID NO: 298586 - DNA, 217 bp, Homo sapiens; identical to SEQ ID NO: 249690
  chr1:232551394-232551611
  hypo

SEQ ID NO: 298587 - DNA, 198 bp, Homo sapiens; identical to SEQ ID NO: 207578
  chr1:232566620-232566818
  hypo

SEQ ID NO: 298588 - DNA, 192 bp, Homo sapiens; identical to SEQ ID NO: 249692
  chr1:232568782-232568974
  hypo

SEQ ID NO: 298589 - DNA, 60 bp, Homo sapiens; identical to SEQ ID NO: 207579
  chr1:232649854-232649914
  hypo

SEQ ID NO: 298590 - DNA, 889 bp, Homo sapiens; identical to SEQ ID NO: 105229
  chr1:232765595-232766484
  hypo

SEQ ID NO: 298591 - DNA, 89 bp, Homo sapiens; identical to SEQ ID NO: 249694
  chr1:232889011-232889100
  hypo

SEQ ID NO: 298592 - DNA, 61 bp, Homo sapiens; identical to SEQ ID NO: 207581
  chr1:232909165-232909226
  hypo

SEQ ID NO: 298593 - DNA, 203 bp, Homo sapiens; identical to SEQ ID NO: 207582
  chr1:233085194-233085397
  hypo

SEQ ID NO: 298594 - DNA, 153 bp, Homo sapiens; identical to SEQ ID NO: 249697
  chr1:233116464-233116617
  hypo

SEQ ID NO: 298595 - DNA, 32 bp, Homo sapiens; identical to SEQ ID NO: 207583
  chr1:233264703-233264735
  hypo

SEQ ID NO: 298596 - DNA, 120 bp, Homo sapiens; identical to SEQ ID NO: 249699
  chr1:233601759-233601879
  hypo

SEQ ID NO: 298597 - DNA, 39 bp, Homo sapiens; identical to SEQ ID NO: 249700
  chr1:233601999-233602038
  hypo

SEQ ID NO: 298598 - DNA, 314 bp, Homo sapiens; identical to SEQ ID NO: 198020
  chr1:233749768-233750082
  hypo

SEQ ID NO: 298599 - DNA, 82 bp, Homo sapiens; identical to SEQ ID NO: 207585
  chr1:233799535-233799617
  hypo

SEQ ID NO: 298600 - DNA, 245 bp, Homo sapiens; identical to SEQ ID NO: 249702
  chr1:234342550-234342795
  hypo

SEQ ID NO: 298601 - DNA, 127 bp, Homo sapiens; identical to SEQ ID NO: 249703
  chr1:234452341-234452468
  hypo

SEQ ID NO: 298602 - DNA, 211 bp, Homo sapiens; identical to SEQ ID NO: 207586
  chr1:234541033-234541244
  hypo

SEQ ID NO: 298603 - DNA, 161 bp, Homo sapiens; identical to SEQ ID NO: 207587
  chr1:234541509-234541670
  hypo

SEQ ID NO: 298604 - DNA, 277 bp, Homo sapiens; identical to SEQ ID NO: 249706
  chr1:234587511-234587788
  hypo

SEQ ID NO: 298605 - DNA, 91 bp, Homo sapiens; identical to SEQ ID NO: 249707
  chr1:234604775-234604866
  hypo

SEQ ID NO: 298606 - DNA, 92 bp, Homo sapiens
  chr1:234621343-234621435
  hypo
ttaccacctgagctccgcctcctatcaaatcagcagccacccccaccttcccggctccatggaaaaattgtcttccacgaaacctggtccct

SEQ ID NO: 298607 - DNA, 45 bp, Homo sapiens; identical to SEQ ID NO: 249709
  chr1:234690619-234690664
  hypo

SEQ ID NO: 298608 - DNA, 181 bp, Homo sapiens; identical to SEQ ID NO: 207588
  chr1:234691150-234691331
  hypo

SEQ ID NO: 298609 - DNA, 235 bp, Homo sapiens
  chr1:234724571-234724806
  hypo
gtaaaagtgtttcttagaggcggttatgaggattaaatgacccgacagaggcaaaacagctttgtaaaccataaatcattttgttcggagtcaacaggatgactttttcccctcacacaatttagaattatgtacctgttgaggtagcaacgccctcgtttaatcccagccatgtttggtccccaaatgcctctctcactcgcccagagtgatactgaggccacaaaaagctctg

SEQ ID NO: 298610 - DNA, 230 bp, Homo sapiens; identical to SEQ ID NO: 207590
  chr1:234724836-234725066
  hypo

SEQ ID NO: 298611 - DNA, 187 bp, Homo sapiens; identical to SEQ ID NO: 279399
  chr1:234736239-234736426
  hypo

SEQ ID NO: 298612 - DNA, 36 bp, Homo sapiens; identical to SEQ ID NO: 207591
  chr1:234795442-234795478
  hypo

SEQ ID NO: 298613 - DNA, 159 bp, Homo sapiens; identical to SEQ ID NO: 207592
  chr1:234795508-234795667
  hypo

SEQ ID NO: 298614 - DNA, 207 bp, Homo sapiens; identical to SEQ ID NO: 249713
  chr1:234797012-234797219
  hypo

SEQ ID NO: 298615 - DNA, 110 bp, Homo sapiens; identical to SEQ ID NO: 249714
  chr1:234808101-234808211
  hypo

SEQ ID NO: 298616 - DNA, 141 bp, Homo sapiens; identical to SEQ ID NO: 198023
  chr1:234828214-234828355
  hypo

SEQ ID NO: 298617 - DNA, 324 bp, Homo sapiens; identical to SEQ ID NO: 207594
  chr1:234845143-234845467
  hypo

SEQ ID NO: 298618 - DNA, 35 bp, Homo sapiens; identical to SEQ ID NO: 249717
  chr1:234863731-234863766
  hypo

SEQ ID NO: 298619 - DNA, 210 bp, Homo sapiens; identical to SEQ ID NO: 249718
  chr1:234868420-234868630
  hypo

SEQ ID NO: 298620 - DNA, 133 bp, Homo sapiens; identical to SEQ ID NO: 207595
  chr1:234868847-234868980
  hypo

SEQ ID NO: 298621 - DNA, 383 bp, Homo sapiens; identical to SEQ ID NO: 249720
  chr1:234869963-234870346
  hypo

SEQ ID NO: 298622 - DNA, 284 bp, Homo sapiens; identical to SEQ ID NO: 207597
  chr1:234871741-234872025
  hypo

SEQ ID NO: 298623 - DNA, 126 bp, Homo sapiens
  chr1:234881087-234881213
  hypo
ggttttctctcccgcgtattgtattcctgttgtatattgtacatgtaatgcatgctagctgccatttagaatggaaaagcatgccctcaccacagtcaggcccacattttgctttccgtgttaaag

SEQ ID NO: 298624 - DNA, 99 bp, Homo sapiens; identical to SEQ ID NO: 207598
  chr1:234893900-234893999
  hypo

SEQ ID NO: 298625 - DNA, 159 bp, Homo sapiens; identical to SEQ ID NO: 207599
  chr1:234895630-234895789
  hypo

SEQ ID NO: 298626 - DNA, 191 bp, Homo sapiens; identical to SEQ ID NO: 207600
  chr1:234957454-234957645
  hypo

SEQ ID NO: 298627 - DNA, 36 bp, Homo sapiens; identical to SEQ ID NO: 249726
  chr1:234960409-234960445
  hypo

SEQ ID NO: 298628 - DNA, 83 bp, Homo sapiens
  chr1:234964830-234964913
  hypo
ataccctcttctgcttccgtgttgttggtgctgctgcaccatcagcagctgtacctagttactaaacacgcgagtgctgtaca

SEQ ID NO: 298629 - DNA, 85 bp, Homo sapiens; identical to SEQ ID NO: 249729
  chr1:235036868-235036953
  hypo

SEQ ID NO: 298630 - DNA, 169 bp, Homo sapiens; identical to SEQ ID NO: 207601
  chr1:235037109-235037278
  hypo

SEQ ID NO: 298631 - DNA, 79 bp, Homo sapiens; identical to SEQ ID NO: 207602
  chr1:235042107-235042186
  hypo

SEQ ID NO: 298632 - DNA, 280 bp, Homo sapiens; identical to SEQ ID NO: 207603
  chr1:235044523-235044803
  hypo

SEQ ID NO: 298633 - DNA, 76 bp, Homo sapiens; identical to SEQ ID NO: 207604
  chr1:235067968-235068044
  hypo

SEQ ID NO: 298634 - DNA, 177 bp, Homo sapiens; identical to SEQ ID NO: 207605
  chr1:235129830-235130007
  hypo

SEQ ID NO: 298635 - DNA, 121 bp, Homo sapiens
  chr1:235260410-235260531
  hypo
ggcatgagccaccgcgcctggtttgttttttttctttcagattttatggctttatttaaacacaaataatatgtacacatggctgcccattcattttcttggcggggcagcccagcattgg

SEQ ID NO: 298636 - DNA, 34 bp, Homo sapiens
  chr1:235260561-235260595
  hypo
tcttcccgaaacagcgttgcggttcttggttctt

SEQ ID NO: 298637 - DNA, 206 bp, Homo sapiens; identical to SEQ ID NO: 207606
  chr1:235317095-235317301
  hypo

SEQ ID NO: 298638 - DNA, 40 bp, Homo sapiens; identical to SEQ ID NO: 249739
  chr1:235508756-235508796
  hypo

SEQ ID NO: 298639 - DNA, 99 bp, Homo sapiens; identical to SEQ ID NO: 249740
  chr1:235542866-235542965
  hypo

SEQ ID NO: 298640 - DNA, 242 bp, Homo sapiens; identical to SEQ ID NO: 207607
  chr1:235613456-235613698
  hypo

SEQ ID NO: 298641 - DNA, 70 bp, Homo sapiens; identical to SEQ ID NO: 207608
  chr1:235665736-235665806
  hypo

SEQ ID NO: 298642 - DNA, 184 bp, Homo sapiens; identical to SEQ ID NO: 279411
  chr1:235813161-235813345
  hypo

SEQ ID NO: 298643 - DNA, 31 bp, Homo sapiens; identical to SEQ ID NO: 207610
  chr1:235855354-235855385
  hypo

SEQ ID NO: 298644 - DNA, 31 bp, Homo sapiens
  chr1:235872558-235872589
  hypo
gttgacgtgattaacccgttcaccattctga

SEQ ID NO: 298645 - DNA, 175 bp, Homo sapiens; identical to SEQ ID NO: 249745
  chr1:235955184-235955359
  hypo

SEQ ID NO: 298646 - DNA, 68 bp, Homo sapiens; identical to SEQ ID NO: 249746
  chr1:235973154-235973222
  hypo

SEQ ID NO: 298647 - DNA, 94 bp, Homo sapiens; identical to SEQ ID NO: 249747
  chr1:236062548-236062642
  hypo

SEQ ID NO: 298648 - DNA, 39 bp, Homo sapiens; identical to SEQ ID NO: 249748
  chr1:236069953-236069992
  hypo

SEQ ID NO: 298649 - DNA, 351 bp, Homo sapiens
  chr1:236081468-236081819
  hypo
tccagcagggatccaccaggtggctgtaaagctaagaaggtgacctcctgggtgtccctcctgaaacacagagcaccgtttgaactgcccgagcgagcggaccagctggcgcacagatcacagagccctgcagtgatcagctgccatctggatctgcccgggtgcaagcaaacggcacagctctggaagcttcctcagggctccaagagagcatctgcgtgttgggaagcctcggatgtgctgcaagacctttgttctgactgtggcaaagcctatgtatgctaggtgtcacattgaattcttttctattaataataacttatctgagattctgcgcgactgtcgctctag

SEQ ID NO: 298650 - DNA, 120 bp, Homo sapiens; identical to SEQ ID NO: 249750
  chr1:236121531-236121651
  hypo

SEQ ID NO: 298651 - DNA, 185 bp, Homo sapiens; identical to SEQ ID NO: 249751
  chr1:236143072-236143257
  hypo

SEQ ID NO: 298652 - DNA, 247 bp, Homo sapiens; identical to SEQ ID NO: 249752
  chr1:236155722-236155969
  hypo

SEQ ID NO: 298653 - DNA, 535 bp, Homo sapiens; identical to SEQ ID NO: 207611
  chr1:236156643-236157178
  hypo

SEQ ID NO: 298654 - DNA, 202 bp, Homo sapiens; identical to SEQ ID NO: 249754
  chr1:236161321-236161523
  hypo

SEQ ID NO: 298655 - DNA, 97 bp, Homo sapiens; identical to SEQ ID NO: 249755
  chr1:236187366-236187463
  hypo

SEQ ID NO: 298656 - DNA, 181 bp, Homo sapiens; identical to SEQ ID NO: 207612
  chr1:236189253-236189434
  hypo

SEQ ID NO: 298657 - DNA, 282 bp, Homo sapiens; identical to SEQ ID NO: 207613
  chr1:236192826-236193108
  hypo

SEQ ID NO: 298658 - DNA, 84 bp, Homo sapiens; identical to SEQ ID NO: 207614
  chr1:236194737-236194821
  hypo

SEQ ID NO: 298659 - DNA, 268 bp, Homo sapiens; identical to SEQ ID NO: 207615
  chr1:236212016-236212284
  hypo

SEQ ID NO: 298660 - DNA, 179 bp, Homo sapiens; identical to SEQ ID NO: 207616
  chr1:236274571-236274750
  hypo

SEQ ID NO: 298661 - DNA, 180 bp, Homo sapiens; identical to SEQ ID NO: 249761
  chr1:236281071-236281251
  hypo

SEQ ID NO: 298662 - DNA, 43 bp, Homo sapiens; identical to SEQ ID NO: 249762
  chr1:236315001-236315044
  hypo

SEQ ID NO: 298663 - DNA, 33 bp, Homo sapiens; identical to SEQ ID NO: 249763
  chr1:236318110-236318143
  hypo

SEQ ID NO: 298664 - DNA, 103 bp, Homo sapiens; identical to SEQ ID NO: 249764
  chr1:236338712-236338815
  hypo

SEQ ID NO: 298665 - DNA, 210 bp, Homo sapiens; identical to SEQ ID NO: 207617
  chr1:236339561-236339771
  hypo

SEQ ID NO: 298666 - DNA, 709 bp, Homo sapiens; identical to SEQ ID NO: 279414
  chr1:236444198-236444907
  hypo

SEQ ID NO: 298667 - DNA, 450 bp, Homo sapiens; identical to SEQ ID NO: 198030
  chr1:236445121-236445571
  hypo

SEQ ID NO: 298668 - DNA, 199 bp, Homo sapiens; identical to SEQ ID NO: 249766
  chr1:236451640-236451839
  hypo

SEQ ID NO: 298669 - DNA, 44 bp, Homo sapiens; identical to SEQ ID NO: 249767
  chr1:236514730-236514774
  hypo

SEQ ID NO: 298670 - DNA, 120 bp, Homo sapiens; identical to SEQ ID NO: 207621
  chr1:236540755-236540875
  hypo

SEQ ID NO: 298671 - DNA, 56 bp, Homo sapiens; identical to SEQ ID NO: 207622
  chr1:236561305-236561361
  hypo

SEQ ID NO: 298672 - DNA, 153 bp, Homo sapiens; identical to SEQ ID NO: 249770
  chr1:236626420-236626573
  hypo

SEQ ID NO: 298673 - DNA, 75 bp, Homo sapiens; identical to SEQ ID NO: 249771
  chr1:236645856-236645931
  hypo

SEQ ID NO: 298674 - DNA, 312 bp, Homo sapiens; identical to SEQ ID NO: 249772
  chr1:236657369-236657681
  hypo

SEQ ID NO: 298675 - DNA, 59 bp, Homo sapiens; identical to SEQ ID NO: 249773
  chr1:236723110-236723169
  hypo

SEQ ID NO: 298676 - DNA, 134 bp, Homo sapiens; identical to SEQ ID NO: 249774
  chr1:236802444-236802578
  hypo

SEQ ID NO: 298677 - DNA, 106 bp, Homo sapiens; identical to SEQ ID NO: 198031
  chr1:236850212-236850318
  hypo

SEQ ID NO: 298678 - DNA, 100 bp, Homo sapiens; identical to SEQ ID NO: 207624
  chr1:236907979-236908079
  hypo

SEQ ID NO: 298679 - DNA, 137 bp, Homo sapiens; identical to SEQ ID NO: 249776
  chr1:237052580-237052717
  hypo

SEQ ID NO: 298680 - DNA, 161 bp, Homo sapiens; identical to SEQ ID NO: 249777
  chr1:237053951-237054112
  hypo

SEQ ID NO: 298681 - DNA, 271 bp, Homo sapiens; identical to SEQ ID NO: 249778
  chr1:237144673-237144944
  hypo

SEQ ID NO: 298682 - DNA, 36 bp, Homo sapiens; identical to SEQ ID NO: 198032
  chr1:237205188-237205224
  hypo

SEQ ID NO: 298683 - DNA, 38 bp, Homo sapiens; identical to SEQ ID NO: 249779
  chr1:237584239-237584277
  hypo

SEQ ID NO: 298684 - DNA, 181 bp, Homo sapiens
  chr1:237947071-237947252
  hypo
cttaaaactaaaggatttgacgtcgtctgatacttttaaagaatatgaccccgatggcaagggagtcatttccaagagggacttccacaaagcgatggagagccataagcactacacgcagtcagaaacggaatttcttttgtcttgtgcggagacggatgagaatgaaaccctcgactac

SEQ ID NO: 298685 - DNA, 479 bp, Homo sapiens
  chr1:237947323-237947802
  hypo
cctctctgagcacatgcccaacgatacccgacttcagacttttctggaattagcagagagcgtcctgaattatttccagccctttctgggccgcatcgaaatcatgggaagcgccaaacgcatcgagagggtctattttgaaatcagtgagtccagccgaacccagtgggagaagccccaggtcaaggagtccaaaagacagttcatatttgacgtggtcaacgaaggcggagagaaagagaagatggaactctttgtgaacttctgcgaggacaccatctttgaaatgcagctggcggctcagatctcggagtcggacttgaacgagaggtcagcgaataaggaagaaagcgagaaggagaggccggaagagcaggggccgaggatggctttcttctccattctgacggtcaggtcggccctgtttgcgctcaggtacaatatcttgacccttatgcgaatgctcagtctgaagagcc

SEQ ID NO: 298686 - DNA, 45 bp, Homo sapiens; identical to SEQ ID NO: 207626
  chr1:238017558-238017603
  hypo

SEQ ID NO: 298687 - DNA, 520 bp, Homo sapiens; identical to SEQ ID NO: 249782
  chr1:238081767-238082287
  hypo

SEQ ID NO: 298688 - DNA, 162 bp, Homo sapiens; identical to SEQ ID NO: 249783
  chr1:239138492-239138654
  hypo

SEQ ID NO: 298689 - DNA, 82 bp, Homo sapiens; identical to SEQ ID NO: 207627
  chr1:239509033-239509115
  hypo

SEQ ID NO: 298690 - DNA, 121 bp, Homo sapiens; identical to SEQ ID NO: 249785
  chr1:240048929-240049050
  hypo

SEQ ID NO: 298691 - DNA, 200 bp, Homo sapiens; identical to SEQ ID NO: 249786
  chr1:240064135-240064335
  hypo

SEQ ID NO: 298692 - DNA, 83 bp, Homo sapiens; identical to SEQ ID NO: 249789
  chr1:240641239-240641322
  hypo

SEQ ID NO: 298693 - DNA, 126 bp, Homo sapiens
  chr1:241051970-241052096
  hypo
actgcacagccgcgcgttgagaagaggtgctatcaactttcccattttgctgatgaggcaatttaggctggatgagaggacgagactgagtactactttcttggtggaggcgacagtcaaagccag

SEQ ID NO: 298694 - DNA, 45 bp, Homo sapiens; identical to SEQ ID NO: 207628
  chr1:241271635-241271680
  hypo

SEQ ID NO: 298695 - DNA, 150 bp, Homo sapiens; identical to SEQ ID NO: 207629
  chr1:241434339-241434489
  hypo

SEQ ID NO: 298696 - DNA, 50 bp, Homo sapiens; identical to SEQ ID NO: 198037
  chr1:241520533-241520583
  hypo

SEQ ID NO: 298697 - DNA, 147 bp, Homo sapiens; identical to SEQ ID NO: 198038
  chr1:241520612-241520759
  hypo

SEQ ID NO: 298698 - DNA, 97 bp, Homo sapiens; identical to SEQ ID NO: 198039
  chr1:241520789-241520886
  hypo

SEQ ID NO: 298699 - DNA, 84 bp, Homo sapiens; identical to SEQ ID NO: 207633
  chr1:241541312-241541396
  hypo

SEQ ID NO: 298700 - DNA, 88 bp, Homo sapiens; identical to SEQ ID NO: 207634
  chr1:241559203-241559291
  hypo

SEQ ID NO: 298701 - DNA, 33 bp, Homo sapiens; identical to SEQ ID NO: 221633
  chr1:241588237-241588270
  hypo

SEQ ID NO: 298702 - DNA, 80 bp, Homo sapiens; identical to SEQ ID NO: 207635
  chr1:241753331-241753411
  hypo

SEQ ID NO: 298703 - DNA, 49 bp, Homo sapiens; identical to SEQ ID NO: 249797
  chr1:241755369-241755418
  hypo

SEQ ID NO: 298704 - DNA, 161 bp, Homo sapiens; identical to SEQ ID NO: 249798
  chr1:241809726-241809887
  hypo

SEQ ID NO: 298705 - DNA, 129 bp, Homo sapiens; identical to SEQ ID NO: 249799
  chr1:242121115-242121244
  hypo

SEQ ID NO: 298706 - DNA, 87 bp, Homo sapiens; identical to SEQ ID NO: 249800
  chr1:242153594-242153681
  hypo

SEQ ID NO: 298707 - DNA, 144 bp, Homo sapiens; identical to SEQ ID NO: 249801
  chr1:242689621-242689765
  hypo

SEQ ID NO: 298708 - DNA, 325 bp, Homo sapiens; identical to SEQ ID NO: 207636
  chr1:242767712-242768037
  hypo

SEQ ID NO: 298709 - DNA, 77 bp, Homo sapiens; identical to SEQ ID NO: 249803
  chr1:243432191-243432268
  hypo

SEQ ID NO: 298710 - DNA, 161 bp, Homo sapiens; identical to SEQ ID NO: 207637
  chr1:243479808-243479969
  hypo

SEQ ID NO: 298711 - DNA, 131 bp, Homo sapiens; identical to SEQ ID NO: 207638
  chr1:243566401-243566532
  hypo

SEQ ID NO: 298712 - DNA, 685 bp, Homo sapiens; identical to SEQ ID NO: 207639
  chr1:243637530-243638215
  hypo

SEQ ID NO: 298713 - DNA, 335 bp, Homo sapiens; identical to SEQ ID NO: 249807
  chr1:243652442-243652777
  hypo

SEQ ID NO: 298714 - DNA, 39 bp, Homo sapiens; identical to SEQ ID NO: 207640
  chr1:243750610-243750649
  hypo

SEQ ID NO: 298715 - DNA, 856 bp, Homo sapiens; identical to SEQ ID NO: 279432
  chr1:244012279-244013135
  hypo

SEQ ID NO: 298716 - DNA, 168 bp, Homo sapiens; identical to SEQ ID NO: 279435
  chr1:244080795-244080963
  hypo

SEQ ID NO: 298717 - DNA, 353 bp, Homo sapiens
  chr1:244142604-244142957
  hypo
cctcctgtagcagtcgctcatcccaagcagcttctgctgtacagtgcgggtaagtgttcaggagtgaactgccccgctttgttacatttcatggaaggactgtggcctccatgccagagctcttcgaacaaaaacactttcaatcccctcattctcattttgtggggattcccagctgaacgggcctggctttttgggagaagtttccagcccgtagctgccttggccaggagtgtggggggtgggacggaaggtacccacgagggtggcgggtggggccatcggccaggagtgtgggggggtgggacggaaggtacccaggagggtggcgggaggggccatcggccaggagt

SEQ ID NO: 298718 - DNA, 73 bp, Homo sapiens
  chr1:244243852-244243925
  hypo
agtaactgcttgtccggcaggagtaagtgcttcagaaatactgagctcagtgaacctgctaaacacaggcacc

SEQ ID NO: 298719 - DNA, 216 bp, Homo sapiens; identical to SEQ ID NO: 207642
  chr1:244345254-244345470
  hypo

SEQ ID NO: 298720 - DNA, 218 bp, Homo sapiens; identical to SEQ ID NO: 249814
  chr1:244499987-244500205
  hypo

SEQ ID NO: 298721 - DNA, 143 bp, Homo sapiens; identical to SEQ ID NO: 207643
  chr1:244641921-244642064
  hypo

SEQ ID NO: 298722 - DNA, 81 bp, Homo sapiens; identical to SEQ ID NO: 249816
  chr1:244758875-244758956
  hypo

SEQ ID NO: 298723 - DNA, 73 bp, Homo sapiens; identical to SEQ ID NO: 249817
  chr1:244815257-244815330
  hypo

SEQ ID NO: 298724 - DNA, 86 bp, Homo sapiens; identical to SEQ ID NO: 249818
  chr1:244823752-244823838
  hypo

SEQ ID NO: 298725 - DNA, 89 bp, Homo sapiens; identical to SEQ ID NO: 249819
  chr1:244826768-244826857
  hypo

SEQ ID NO: 298726 - DNA, 53 bp, Homo sapiens; identical to SEQ ID NO: 249820
  chr1:244857963-244858016
  hypo

SEQ ID NO: 298727 - DNA, 39 bp, Homo sapiens; identical to SEQ ID NO: 249821
  chr1:244883481-244883520
  hypo

SEQ ID NO: 298728 - DNA, 95 bp, Homo sapiens; identical to SEQ ID NO: 249822
  chr1:244896511-244896606
  hypo

SEQ ID NO: 298729 - DNA, 140 bp, Homo sapiens; identical to SEQ ID NO: 249823
  chr1:244902172-244902312
  hypo

SEQ ID NO: 298730 - DNA, 193 bp, Homo sapiens; identical to SEQ ID NO: 249824
  chr1:244920545-244920738
  hypo

SEQ ID NO: 298731 - DNA, 75 bp, Homo sapiens; identical to SEQ ID NO: 249825
  chr1:244924623-244924698
  hypo

SEQ ID NO: 298732 - DNA, 317 bp, Homo sapiens; identical to SEQ ID NO: 207644
  chr1:245032200-245032517
  hypo

SEQ ID NO: 298733 - DNA, 90 bp, Homo sapiens; identical to SEQ ID NO: 207645
  chr1:245032603-245032693
  hypo

SEQ ID NO: 298734 - DNA, 142 bp, Homo sapiens; identical to SEQ ID NO: 249828
  chr1:245205094-245205236
  hypo

SEQ ID NO: 298735 - DNA, 92 bp, Homo sapiens; identical to SEQ ID NO: 249829
  chr1:245209851-245209943
  hypo

SEQ ID NO: 298736 - DNA, 274 bp, Homo sapiens; identical to SEQ ID NO: 207646
  chr1:245254446-245254720
  hypo

SEQ ID NO: 298737 - DNA, 97 bp, Homo sapiens; identical to SEQ ID NO: 207647
  chr1:245281663-245281760
  hypo

SEQ ID NO: 298738 - DNA, 157 bp, Homo sapiens; identical to SEQ ID NO: 249832
  chr1:245370678-245370835
  hypo

SEQ ID NO: 298739 - DNA, 160 bp, Homo sapiens
  chr1:245377013-245377173
  hypo
cacgtgaccgtgtgccgcacctttgttctgcccgttccttactccttatttaggtgatgaaagatgtggtgccccaactttaagttccacttgacgcagaatttcctgattgaggatggagcctggggctaccttgaggtaattacgggatagtcgttgt

SEQ ID NO: 298740 - DNA, 95 bp, Homo sapiens; identical to SEQ ID NO: 249834
  chr1:245446511-245446606
  hypo

SEQ ID NO: 298741 - DNA, 139 bp, Homo sapiens; identical to SEQ ID NO: 249835
  chr1:245481134-245481273
  hypo

SEQ ID NO: 298742 - DNA, 82 bp, Homo sapiens; identical to SEQ ID NO: 249836
  chr1:245488058-245488140
  hypo

SEQ ID NO: 298743 - DNA, 269 bp, Homo sapiens
  chr1:245494226-245494495
  hypo
gtgcgggaagtccccgcagagagagagcccacgtagtaagtaaggaacgggggcggttagagattctggagaggccggatggaaaatgcacacacggtgagcagaaaccatgatcctgagacgctgatgtccaggagggagcctcagagcaggaacgcagccgcggcagggggcggtgggagtctgcggtatgacgtagggtacgaagggcctgggggtggcagagcagagcctgctgcggaggcacaggcttctcattccgcgcgagt

SEQ ID NO: 298744 - DNA, 52 bp, Homo sapiens; identical to SEQ ID NO: 249838
  chr1:245496614-245496666
  hypo

SEQ ID NO: 298745 - DNA, 99 bp, Homo sapiens; identical to SEQ ID NO: 207648
  chr1:245497279-245497378
  hypo

SEQ ID NO: 298746 - DNA, 104 bp, Homo sapiens
  chr1:245498869-245498973
  hypo
aaaggagagtcccacgcgggaaaaggagagtgccacgcggggaaaggagagtcccacgaggggaaaggagagtcccacgaggggaaaggggggtcccacgcggg

SEQ ID NO: 298747 - DNA, 588 bp, Homo sapiens
  chr1:245499005-245499593
  hypo
cccacgtggggaaagaagagtcccacgaggggaaaggagggtcccacgcagggagagtcccacgcagggaaaggagagtcccacgcagggaaaggaaggtcccacgcagggaaagaagagccccacgcggagaaggaggagtcccacgaagggaaaggagggtcccacgaagggaaaggagggtcccacgcagggaaagaagagtcccacgcggggagagccccatgcagggaaagagggtcccacgcagggaaaggagagtcccacgcagggaaaggagggtcccacgcagggaaaggagagtcccacgcagggagagtcccacgcagggaaaggagggtcccacgcagggaaaggagagtcccacgcagggaaaggagggtcccacgcagggaaaggagggtcccacgcagggaaagaagagtcccacgcagggagagtcccatgcagggaaagaaggtcccacgcagggaaaggagagtcccacgcagggattgctgttccactctgcatagccgctgggctttctgctgcacggatgccatctagaagaagcaccatccactgttctcagaaagaagagagagg

SEQ ID NO: 298748 - DNA, 143 bp, Homo sapiens; identical to SEQ ID NO: 207650
  chr1:245499775-245499918
  hypo

SEQ ID NO: 298749 - DNA, 146 bp, Homo sapiens; identical to SEQ ID NO: 249841
  chr1:245508141-245508287
  hypo

SEQ ID NO: 298750 - DNA, 115 bp, Homo sapiens; identical to SEQ ID NO: 249842
  chr1:245512066-245512181
  hypo

SEQ ID NO: 298751 - DNA, 164 bp, Homo sapiens; identical to SEQ ID NO: 207651
  chr1:245525398-245525562
  hypo

SEQ ID NO: 298752 - DNA, 399 bp, Homo sapiens; identical to SEQ ID NO: 249844
  chr1:245530128-245530527
  hypo

SEQ ID NO: 298753 - DNA, 97 bp, Homo sapiens; identical to SEQ ID NO: 249845
  chr1:245537644-245537741
  hypo

SEQ ID NO: 298754 - DNA, 175 bp, Homo sapiens; identical to SEQ ID NO: 249846
  chr1:245548882-245549057
  hypo

SEQ ID NO: 298755 - DNA, 105 bp, Homo sapiens; identical to SEQ ID NO: 249847
  chr1:245576121-245576226
  hypo

SEQ ID NO: 298756 - DNA, 192 bp, Homo sapiens; identical to SEQ ID NO: 207653
  chr1:245576466-245576658
  hypo

SEQ ID NO: 298757 - DNA, 282 bp, Homo sapiens; identical to SEQ ID NO: 207654
  chr1:245582887-245583169
  hypo

SEQ ID NO: 298758 - DNA, 50 bp, Homo sapiens
  chr1:245627555-245627605
  hypo
aatagcagtgaggggtgagtcgatgtctcaggagaggatggcccagacct

SEQ ID NO: 298759 - DNA, 129 bp, Homo sapiens; identical to SEQ ID NO: 249852
  chr1:245628942-245629071
  hypo

SEQ ID NO: 298760 - DNA, 126 bp, Homo sapiens
  chr1:245633325-245633451
  hypo
gtttgacgtaggccttgaaagaaccgataggattcagacaaacctgagtaatgggagggtgttccgagccacacacactgattgttcagtttggtttgctcagctagaggacgtgttgggaagatg

SEQ ID NO: 298761 - DNA, 35 bp, Homo sapiens; identical to SEQ ID NO: 249854
  chr1:245704935-245704970
  hypo

SEQ ID NO: 298762 - DNA, 37 bp, Homo sapiens; identical to SEQ ID NO: 249855
  chr1:245722717-245722754
  hypo

SEQ ID NO: 298763 - DNA, 112 bp, Homo sapiens; identical to SEQ ID NO: 249856
  chr1:245752683-245752795
  hypo

SEQ ID NO: 298764 - DNA, 128 bp, Homo sapiens
  chr1:245753334-245753462
  hypo
tatttaacgacagtcgtaacacatgagtgagctttactcatgtgggccctttattaacaataagccgcctctgtggcggctgggccccgcggggtcggggggtgggggtgcccaacgtggcagggagg

SEQ ID NO: 298765 - DNA, 147 bp, Homo sapiens
  chr1:245753500-245753647
  hypo
ccacccggcgagtcagagcaggggtcggggcccctggccgcaccgtgccgcgcatgcgcagggtcccggggtccctggggtcccgggtttgtgcccccggggcggctgggccccgcgggaggggacggccaacgcggaaatgggccc

SEQ ID NO: 298766 - DNA, 151 bp, Homo sapiens; identical to SEQ ID NO: 207655
  chr1:245764442-245764593
  hypo

SEQ ID NO: 298767 - DNA, 211 bp, Homo sapiens; identical to SEQ ID NO: 249859
  chr1:245765879-245766090
  hypo

SEQ ID NO: 298768 - DNA, 606 bp, Homo sapiens; identical to SEQ ID NO: 207656
  chr1:245848541-245849147
  hypo

SEQ ID NO: 298769 - DNA, 566 bp, Homo sapiens
  chr1:245849348-245849914
  hypo
cccaggagcgtcccgggcagcagtagccagcacagcgcctccccactcgtgcagagccccagcctccagagcagccgggagagcctcaactcctgcggcttcgtggaaggcaagcccaggcccatgggctccccccggctgggcatcgccagcctgtccaagacctcggagtacaagccacccagctctccttcccagagatgcaaagtctacacccagaagggggtcctgccgtctcccgccccactgcctccctcgagcaaggattccggcgtggcgtctagggagtccttgctgcagcccgaggtgcgtacgcccccggttggaatgagcccccaggttttgaaaaaatccatgtctgctgggagcgaagggttcccggaaactcctgtcgatgatgagcagcaggcagctactccttcagagtccaagaaggagatcctgagcaccacgatggtgacggtgcagcagccactggagctgaacggtgaggacgagctggtgttcacgctggtggaggagctgaccatcagcggggtcctggacagcggccgccccaccagcat

SEQ ID NO: 298770 - DNA, 373 bp, Homo sapiens; identical to SEQ ID NO: 207658
  chr1:245849944-245850317
  hypo

SEQ ID NO: 298771 - DNA, 243 bp, Homo sapiens; identical to SEQ ID NO: 249863
  chr1:245855705-245855948
  hypo

SEQ ID NO: 298772 - DNA, 158 bp, Homo sapiens; identical to SEQ ID NO: 249864
  chr1:245859143-245859301
  hypo

SEQ ID NO: 298773 - DNA, 193 bp, Homo sapiens; identical to SEQ ID NO: 249865
  chr1:245866076-245866269
  hypo

SEQ ID NO: 298774 - DNA, 148 bp, Homo sapiens; identical to SEQ ID NO: 249866
  chr1:245911712-245911860
  hypo

SEQ ID NO: 298775 - DNA, 566 bp, Homo sapiens; identical to SEQ ID NO: 249867
  chr1:245925689-245926255
  hypo

SEQ ID NO: 298776 - DNA, 101 bp, Homo sapiens; identical to SEQ ID NO: 207660
  chr1:245986517-245986618
  hypo

SEQ ID NO: 298777 - DNA, 183 bp, Homo sapiens; identical to SEQ ID NO: 249869
  chr1:246019929-246020112
  hypo

SEQ ID NO: 298778 - DNA, 87 bp, Homo sapiens; identical to SEQ ID NO: 249870
  chr1:246026894-246026981
  hypo

SEQ ID NO: 298779 - DNA, 78 bp, Homo sapiens; identical to SEQ ID NO: 249871
  chr1:246032887-246032965
  hypo

SEQ ID NO: 298780 - DNA, 92 bp, Homo sapiens; identical to SEQ ID NO: 249872
  chr1:246033506-246033598
  hypo

SEQ ID NO: 298781 - DNA, 105 bp, Homo sapiens; identical to SEQ ID NO: 249873
  chr1:246094296-246094401
  hypo

SEQ ID NO: 298782 - DNA, 133 bp, Homo sapiens; identical to SEQ ID NO: 207661
  chr1:246160270-246160403
  hypo

SEQ ID NO: 298783 - DNA, 32 bp, Homo sapiens; identical to SEQ ID NO: 249875
  chr1:246171646-246171678
  hypo

SEQ ID NO: 298784 - DNA, 43 bp, Homo sapiens
  chr1:246171884-246171927
  hypo
tctggcagcaacagcgcttggggagtagccgtacctctgaagt

SEQ ID NO: 298785 - DNA, 57 bp, Homo sapiens
  chr1:246172194-246172251
  hypo
ccaggtgagacaggagagtccggggatgaagaattcggctctggagtcacagactca

SEQ ID NO: 298786 - DNA, 230 bp, Homo sapiens; identical to SEQ ID NO: 249878
  chr1:246310270-246310500
  hypo

SEQ ID NO: 298787 - DNA, 781 bp, Homo sapiens; identical to SEQ ID NO: 249879
  chr1:246310727-246311508
  hypo

SEQ ID NO: 298788 - DNA, 263 bp, Homo sapiens; identical to SEQ ID NO: 249880
  chr1:246320238-246320501
  hypo

SEQ ID NO: 298789 - DNA, 221 bp, Homo sapiens; identical to SEQ ID NO: 249881
  chr1:246324305-246324526
  hypo

SEQ ID NO: 298790 - DNA, 123 bp, Homo sapiens; identical to SEQ ID NO: 249882
  chr1:246324796-246324919
  hypo

SEQ ID NO: 298791 - DNA, 116 bp, Homo sapiens; identical to SEQ ID NO: 207663
  chr1:246330193-246330309
  hypo

SEQ ID NO: 298792 - DNA, 95 bp, Homo sapiens; identical to SEQ ID NO: 249884
  chr1:246518821-246518916
  hypo

SEQ ID NO: 298793 - DNA, 156 bp, Homo sapiens; identical to SEQ ID NO: 249885
  chr1:246569252-246569408
  hypo

SEQ ID NO: 298794 - DNA, 74 bp, Homo sapiens; identical to SEQ ID NO: 207664
  chr1:246582057-246582131
  hypo

SEQ ID NO: 298795 - DNA, 86 bp, Homo sapiens; identical to SEQ ID NO: 249887
  chr1:246611518-246611604
  hypo

SEQ ID NO: 298796 - DNA, 205 bp, Homo sapiens; identical to SEQ ID NO: 249888
  chr1:246652177-246652382
  hypo

SEQ ID NO: 298797 - DNA, 129 bp, Homo sapiens; identical to SEQ ID NO: 249889
  chr1:246655156-246655285
  hypo

SEQ ID NO: 298798 - DNA, 85 bp, Homo sapiens; identical to SEQ ID NO: 207665
  chr1:246783954-246784039
  hypo

SEQ ID NO: 298799 - DNA, 910 bp, Homo sapiens; identical to SEQ ID NO: 279443
  chr1:246887311-246888221
  hypo

SEQ ID NO: 298800 - DNA, 149 bp, Homo sapiens; identical to SEQ ID NO: 249891
  chr1:246899321-246899470
  hypo

SEQ ID NO: 298801 - DNA, 326 bp, Homo sapiens; identical to SEQ ID NO: 249892
  chr1:246918896-246919222
  hypo

SEQ ID NO: 298802 - DNA, 333 bp, Homo sapiens; identical to SEQ ID NO: 207667
  chr1:246930842-246931175
  hypo

SEQ ID NO: 298803 - DNA, 121 bp, Homo sapiens; identical to SEQ ID NO: 249894
  chr1:246931771-246931892
  hypo

SEQ ID NO: 298804 - DNA, 91 bp, Homo sapiens; identical to SEQ ID NO: 249895
  chr1:246944244-246944335
  hypo

SEQ ID NO: 298805 - DNA, 52 bp, Homo sapiens; identical to SEQ ID NO: 249896
  chr1:246954179-246954231
  hypo

SEQ ID NO: 298806 - DNA, 160 bp, Homo sapiens; identical to SEQ ID NO: 249897
  chr1:246969293-246969453
  hypo

SEQ ID NO: 298807 - DNA, 99 bp, Homo sapiens; identical to SEQ ID NO: 207668
  chr1:247017214-247017313
  hypo

SEQ ID NO: 298808 - DNA, 93 bp, Homo sapiens; identical to SEQ ID NO: 207669
  chr1:247027354-247027447
  hypo

SEQ ID NO: 298809 - DNA, 155 bp, Homo sapiens; identical to SEQ ID NO: 249900
  chr1:247109075-247109230
  hypo

SEQ ID NO: 298810 - DNA, 180 bp, Homo sapiens; identical to SEQ ID NO: 249901
  chr1:247146067-247146247
  hypo

SEQ ID NO: 298811 - DNA, 199 bp, Homo sapiens; identical to SEQ ID NO: 198043
  chr1:247170806-247171005
  hypo

SEQ ID NO: 298812 - DNA, 181 bp, Homo sapiens; identical to SEQ ID NO: 249902
  chr1:247253910-247254091
  hypo

SEQ ID NO: 298813 - DNA, 224 bp, Homo sapiens; identical to SEQ ID NO: 207671
  chr1:247348621-247348845
  hypo

SEQ ID NO: 298814 - DNA, 87 bp, Homo sapiens; identical to SEQ ID NO: 249904
  chr1:247399634-247399721
  hypo

SEQ ID NO: 298815 - DNA, 641 bp, Homo sapiens; identical to SEQ ID NO: 279450
  chr1:247495198-247495839
  hypo

SEQ ID NO: 298816 - DNA, 180 bp, Homo sapiens; identical to SEQ ID NO: 249905
  chr1:247527170-247527350
  hypo

SEQ ID NO: 298817 - DNA, 253 bp, Homo sapiens; identical to SEQ ID NO: 249906
  chr1:247542060-247542313
  hypo

SEQ ID NO: 298818 - DNA, 337 bp, Homo sapiens; identical to SEQ ID NO: 207672
  chr1:247587055-247587392
  hypo

SEQ ID NO: 298819 - DNA, 466 bp, Homo sapiens; identical to SEQ ID NO: 207673
  chr1:247587422-247587888
  hypo

SEQ ID NO: 298820 - DNA, 142 bp, Homo sapiens
  chr1:247590117-247590259
  hypo
tgtccccgctcagccagcttccggaggatgggcagtgagagagtgagagaaggaaaggggcagccaggctgggggcttacggtgttgagagagagggcaggtgtgggaaagcagggtacggtttctacggcagcaaacagtt

SEQ ID NO: 298821 - DNA, 289 bp, Homo sapiens; identical to SEQ ID NO: 207674
  chr1:247614675-247614964
  hypo

SEQ ID NO: 298822 - DNA, 37 bp, Homo sapiens; identical to SEQ ID NO: 249910
  chr1:247808861-247808898
  hypo

SEQ ID NO: 298823 - DNA, 32 bp, Homo sapiens; identical to SEQ ID NO: 207675
  chr1:248000443-248000475
  hypo

SEQ ID NO: 298824 - DNA, 180 bp, Homo sapiens; identical to SEQ ID NO: 249912
  chr1:248003051-248003231
  hypo

SEQ ID NO: 298825 - DNA, 35 bp, Homo sapiens; identical to SEQ ID NO: 249914
  chr1:248036242-248036277
  hypo

SEQ ID NO: 298826 - DNA, 61 bp, Homo sapiens; identical to SEQ ID NO: 249915
  chr1:248036964-248037025
  hypo

SEQ ID NO: 298827 - DNA, 87 bp, Homo sapiens; identical to SEQ ID NO: 249916
  chr1:248047446-248047533
  hypo

SEQ ID NO: 298828 - DNA, 87 bp, Homo sapiens; identical to SEQ ID NO: 249917
  chr1:248047953-248048040
  hypo

SEQ ID NO: 298829 - DNA, 125 bp, Homo sapiens; identical to SEQ ID NO: 207676
  chr1:248074927-248075052
  hypo

SEQ ID NO: 298830 - DNA, 345 bp, Homo sapiens
  chr1:248099360-248099705
  hypo
caggccagcaaagacggggtgcagaagagtctcagccagagtgatgtgctgggcagcgtccaattttaccaccctccgcatcaggtcaaacagctgcacgtgctccagagagtcttggagcatgtcactcttcagacgtttgcagttcttcacatatgggctgtcagagctgttctcatcccaaactaggccccatttgtagaaatatttctgcttcttggtacaggagatcacgcgtaatgggatgagccgtagggtcttcaacatcaccaggcgctcttggttttcacaggtctggaagagtgtgaaacctggtagtacttaaagagaaggtagcccatgccc

SEQ ID NO: 298831 - DNA, 50 bp, Homo sapiens
  chr1:248328623-248328673
  hypo
caggcggctccagtcctcagggggctccagtcctcaggagggcgctccag

SEQ ID NO: 298832 - DNA, 400 bp, Homo sapiens; identical to SEQ ID NO: 249921
  chr1:248469372-248469772
  hypo

SEQ ID NO: 298833 - DNA, 79 bp, Homo sapiens; identical to SEQ ID NO: 249922
  chr1:248470214-248470293
  hypo

SEQ ID NO: 298834 - DNA, 222 bp, Homo sapiens; identical to SEQ ID NO: 249923
  chr1:248685314-248685536
  hypo

SEQ ID NO: 298835 - DNA, 338 bp, Homo sapiens; identical to SEQ ID NO: 207678
  chr1:249106193-249106531
  hypo

SEQ ID NO: 298836 - DNA, 98 bp, Homo sapiens; identical to SEQ ID NO: 249925
  chr1:249113999-249114097
  hypo

SEQ ID NO: 298837 - DNA, 174 bp, Homo sapiens; identical to SEQ ID NO: 207679
  chr1:249141905-249142079
  hypo

SEQ ID NO: 298838 - DNA, 234 bp, Homo sapiens; identical to SEQ ID NO: 198045
  chr1:249167654-249167888
  hypo

SEQ ID NO: 298839 - DNA, 38 bp, Homo sapiens; identical to SEQ ID NO: 207681
  chr1:249172380-249172418
  hypo

SEQ ID NO: 298840 - DNA, 123 bp, Homo sapiens; identical to SEQ ID NO: 207682
  chr1:249212002-249212125
  hypo

SEQ ID NO: 298841 - DNA, 192 bp, Homo sapiens; identical to SEQ ID NO: 207683
  chr1:249218264-249218456
  hypo

SEQ ID NO: 298842 - DNA, 79 bp, Homo sapiens; identical to SEQ ID NO: 249932
  chr2:67491-67570
  hypo

SEQ ID NO: 298843 - DNA, 78 bp, Homo sapiens; identical to SEQ ID NO: 249933
  chr2:67750-67828
  hypo

SEQ ID NO: 298844 - DNA, 91 bp, Homo sapiens
  chr2:142722-142813
  hypo
tgaccgcacctgtgactgaaatggccgtgactcctggtaaggactcgaggttgaatccccagacagtaacgtccaggtcaagggtttataa

SEQ ID NO: 298845 - DNA, 136 bp, Homo sapiens; identical to SEQ ID NO: 249935
  chr2:249730-249866
  hypo

SEQ ID NO: 298846 - DNA, 267 bp, Homo sapiens; identical to SEQ ID NO: 198051
  chr2:264204-264471
  hypo

SEQ ID NO: 298847 - DNA, 118 bp, Homo sapiens; identical to SEQ ID NO: 249936
  chr2:272130-272248
  hypo

SEQ ID NO: 298848 - DNA, 88 bp, Homo sapiens; identical to SEQ ID NO: 207685
  chr2:314740-314828
  hypo

SEQ ID NO: 298849 - DNA, 127 bp, Homo sapiens; identical to SEQ ID NO: 207686
  chr2:314858-314985
  hypo

SEQ ID NO: 298850 - DNA, 210 bp, Homo sapiens; identical to SEQ ID NO: 207687
  chr2:315015-315225
  hypo

SEQ ID NO: 298851 - DNA, 270 bp, Homo sapiens; identical to SEQ ID NO: 207688
  chr2:318853-319123
  hypo

SEQ ID NO: 298852 - DNA, 449 bp, Homo sapiens; identical to SEQ ID NO: 207689
  chr2:319183-319632
  hypo

SEQ ID NO: 298853 - DNA, 320 bp, Homo sapiens; identical to SEQ ID NO: 207690
  chr2:364117-364437
  hypo

SEQ ID NO: 298854 - DNA, 42 bp, Homo sapiens; identical to SEQ ID NO: 249942
  chr2:366701-366743
  hypo

SEQ ID NO: 298855 - DNA, 186 bp, Homo sapiens; identical to SEQ ID NO: 249943
  chr2:374752-374938
  hypo

SEQ ID NO: 298856 - DNA, 42 bp, Homo sapiens; identical to SEQ ID NO: 249944
  chr2:416712-416754
  hypo

SEQ ID NO: 298857 - DNA, 277 bp, Homo sapiens; identical to SEQ ID NO: 249945
  chr2:451671-451948
  hypo

SEQ ID NO: 298858 - DNA, 117 bp, Homo sapiens; identical to SEQ ID NO: 249946
  chr2:465771-465888
  hypo

SEQ ID NO: 298859 - DNA, 232 bp, Homo sapiens
  chr2:495958-496190
  hypo
cccctggcgatgcccggccccagaggccactccacatggagtcctgggcctcctatccctggtcccttcccccatgtctcggctaccatgaccttgccaccctccccacccggttgaacgcctctcagcactgctttccttcctgcgccctcagcccctcgcacatccggatggctaatcctcctcctgaggaaattcactctctctattttgcgactgttcccagtcacct

SEQ ID NO: 298860 - DNA, 361 bp, Homo sapiens; identical to SEQ ID NO: 249948
  chr2:497070-497431
  hypo

SEQ ID NO: 298861 - DNA, 204 bp, Homo sapiens
  chr2:502872-503076
  hypo
aaaatggcaaaagtttggggcggtgggcaggaggcccttgccactgtggcgccaggagactgggtaaggcgcccaccacagggctggggatctcaggggcgtctgaagaggaagagctggctcggggcgctcggggtagcacagccacacatccaaccacggcgcgagaatcaaggtgccagaatcacaggacgcgggaatcac

SEQ ID NO: 298862 - DNA, 117 bp, Homo sapiens
  chr2:503145-503262
  hypo
gcgggaatcacgggacgcgggaatcacagggtgccggaatcaagggacgccagaatcacggggcgcgggaatcaagcttctccataaatgactgacgcaggggagacatgccagaat

SEQ ID NO: 298863 - DNA, 60 bp, Homo sapiens; identical to SEQ ID NO: 207691
  chr2:503731-503791
  hypo

SEQ ID NO: 298864 - DNA, 398 bp, Homo sapiens; identical to SEQ ID NO: 207692
  chr2:522158-522556
  hypo

SEQ ID NO: 298865 - DNA, 393 bp, Homo sapiens; identical to SEQ ID NO: 249952
  chr2:582776-583169
  hypo

SEQ ID NO: 298866 - DNA, 32 bp, Homo sapiens
  chr2:720804-720836
  hypo
ttgtggagacagaatttacacgcagtgagatg

SEQ ID NO: 298867 - DNA, 99 bp, Homo sapiens
  chr2:720897-720996
  hypo
cccatcaagacacggagcatttctctcagctgagaaagtcccgcttgggacacttttattcctaatgaataagcgttcgtagttctagtgcccactgat

SEQ ID NO: 298868 - DNA, 103 bp, Homo sapiens; identical to SEQ ID NO: 249955
  chr2:796467-796570
  hypo

SEQ ID NO: 298869 - DNA, 234 bp, Homo sapiens; identical to SEQ ID NO: 249956
  chr2:815047-815281
  hypo

SEQ ID NO: 298870 - DNA, 164 bp, Homo sapiens; identical to SEQ ID NO: 249957
  chr2:816397-816561
  hypo

SEQ ID NO: 298871 - DNA, 72 bp, Homo sapiens; identical to SEQ ID NO: 249958
  chr2:816591-816663
  hypo

SEQ ID NO: 298872 - DNA, 103 bp, Homo sapiens; identical to SEQ ID NO: 207693
  chr2:816916-817019
  hypo

SEQ ID NO: 298873 - DNA, 67 bp, Homo sapiens; identical to SEQ ID NO: 207694
  chr2:817049-817116
  hypo

SEQ ID NO: 298874 - DNA, 183 bp, Homo sapiens; identical to SEQ ID NO: 207695
  chr2:817146-817329
  hypo

SEQ ID NO: 298875 - DNA, 202 bp, Homo sapiens; identical to SEQ ID NO: 207696
  chr2:817621-817823
  hypo

SEQ ID NO: 298876 - DNA, 199 bp, Homo sapiens; identical to SEQ ID NO: 249962
  chr2:858100-858299
  hypo

SEQ ID NO: 298877 - DNA, 90 bp, Homo sapiens; identical to SEQ ID NO: 207697
  chr2:875847-875937
  hypo

SEQ ID NO: 298878 - DNA, 258 bp, Homo sapiens; identical to SEQ ID NO: 207698
  chr2:910392-910650
  hypo

SEQ ID NO: 298879 - DNA, 42 bp, Homo sapiens; identical to SEQ ID NO: 249965
  chr2:911370-911412
  hypo

SEQ ID NO: 298880 - DNA, 43 bp, Homo sapiens; identical to SEQ ID NO: 249966
  chr2:923173-923216
  hypo

SEQ ID NO: 298881 - DNA, 153 bp, Homo sapiens; identical to SEQ ID NO: 207699
  chr2:923246-923399
  hypo

SEQ ID NO: 298882 - DNA, 45 bp, Homo sapiens; identical to SEQ ID NO: 249968
  chr2:982994-983039
  hypo

SEQ ID NO: 298883 - DNA, 35 bp, Homo sapiens; identical to SEQ ID NO: 249969
  chr2:1130681-1130716
  hypo

SEQ ID NO: 298884 - DNA, 269 bp, Homo sapiens; identical to SEQ ID NO: 249970
  chr2:1204032-1204301
  hypo

SEQ ID NO: 298885 - DNA, 162 bp, Homo sapiens; identical to SEQ ID NO: 249971
  chr2:1282738-1282900
  hypo

SEQ ID NO: 298886 - DNA, 409 bp, Homo sapiens; identical to SEQ ID NO: 207700
  chr2:1311461-1311870
  hypo

SEQ ID NO: 298887 - DNA, 332 bp, Homo sapiens; identical to SEQ ID NO: 207701
  chr2:1482074-1482406
  hypo

SEQ ID NO: 298888 - DNA, 271 bp, Homo sapiens; identical to SEQ ID NO: 207702
  chr2:1488388-1488659
  hypo

SEQ ID NO: 298889 - DNA, 69 bp, Homo sapiens; identical to SEQ ID NO: 207703
  chr2:1501008-1501077
  hypo

SEQ ID NO: 298890 - DNA, 177 bp, Homo sapiens; identical to SEQ ID NO: 249976
  chr2:1506966-1507143
  hypo

SEQ ID NO: 298891 - DNA, 257 bp, Homo sapiens; identical to SEQ ID NO: 249977
  chr2:1516283-1516540
  hypo

SEQ ID NO: 298892 - DNA, 132 bp, Homo sapiens; identical to SEQ ID NO: 249978
  chr2:1520208-1520340
  hypo

SEQ ID NO: 298893 - DNA, 278 bp, Homo sapiens; identical to SEQ ID NO: 207704
  chr2:1543306-1543584
  hypo

SEQ ID NO: 298894 - DNA, 230 bp, Homo sapiens; identical to SEQ ID NO: 249980
  chr2:1589539-1589769
  hypo

SEQ ID NO: 298895 - DNA, 108 bp, Homo sapiens; identical to SEQ ID NO: 249981
  chr2:1606633-1606741
  hypo

SEQ ID NO: 298896 - DNA, 296 bp, Homo sapiens; identical to SEQ ID NO: 207705
  chr2:1613967-1614263
  hypo

SEQ ID NO: 298897 - DNA, 279 bp, Homo sapiens; identical to SEQ ID NO: 207706
  chr2:1647057-1647336
  hypo

SEQ ID NO: 298898 - DNA, 232 bp, Homo sapiens; identical to SEQ ID NO: 249984
  chr2:1651997-1652229
  hypo

SEQ ID NO: 298899 - DNA, 96 bp, Homo sapiens; identical to SEQ ID NO: 249985
  chr2:1652504-1652600
  hypo

SEQ ID NO: 298900 - DNA, 318 bp, Homo sapiens; identical to SEQ ID NO: 207707
  chr2:1653230-1653548
  hypo

SEQ ID NO: 298901 - DNA, 121 bp, Homo sapiens; identical to SEQ ID NO: 249987
  chr2:1666260-1666381
  hypo

SEQ ID NO: 298902 - DNA, 197 bp, Homo sapiens
  chr2:1669971-1670168
  hypo
ggatggatacccaccctggacgatgatgaaagcggtggcatggacgctgtcaatgttgttggtcgcagagcacgcatactctccgctgtccccctgtacgacgttctgtatgtaaagcccgccagaaggcgtgatgttcacccgcgggtcaactggcaagggtgtgcggtcacctctcgtccaggagatccgcggcg

SEQ ID NO: 298903 - DNA, 142 bp, Homo sapiens; identical to SEQ ID NO: 207708
  chr2:1688942-1689084
  hypo

SEQ ID NO: 298904 - DNA, 107 bp, Homo sapiens; identical to SEQ ID NO: 207709
  chr2:1689123-1689230
  hypo

SEQ ID NO: 298905 - DNA, 252 bp, Homo sapiens; identical to SEQ ID NO: 207710
  chr2:1709544-1709796
  hypo

SEQ ID NO: 298906 - DNA, 320 bp, Homo sapiens; identical to SEQ ID NO: 207711
  chr2:1771820-1772140
  hypo

SEQ ID NO: 298907 - DNA, 44 bp, Homo sapiens; identical to SEQ ID NO: 249992
  chr2:1793414-1793458
  hypo

SEQ ID NO: 298908 - DNA, 98 bp, Homo sapiens; identical to SEQ ID NO: 249993
  chr2:1796265-1796363
  hypo

SEQ ID NO: 298909 - DNA, 161 bp, Homo sapiens; identical to SEQ ID NO: 249994
  chr2:1816188-1816349
  hypo

SEQ ID NO: 298910 - DNA, 84 bp, Homo sapiens; identical to SEQ ID NO: 249995
  chr2:1828326-1828410
  hypo

SEQ ID NO: 298911 - DNA, 600 bp, Homo sapiens; identical to SEQ ID NO: 207712
  chr2:1846365-1846965
  hypo

SEQ ID NO: 298912 - DNA, 606 bp, Homo sapiens; identical to SEQ ID NO: 249997
  chr2:1863598-1864204
  hypo

SEQ ID NO: 298913 - DNA, 226 bp, Homo sapiens; identical to SEQ ID NO: 249999
  chr2:1887329-1887555
  hypo

SEQ ID NO: 298914 - DNA, 468 bp, Homo sapiens; identical to SEQ ID NO: 250000
  chr2:1895687-1896155
  hypo

SEQ ID NO: 298915 - DNA, 132 bp, Homo sapiens; identical to SEQ ID NO: 250001
  chr2:1915731-1915863
  hypo

SEQ ID NO: 298916 - DNA, 309 bp, Homo sapiens; identical to SEQ ID NO: 207713
  chr2:1926247-1926556
  hypo

SEQ ID NO: 298917 - DNA, 167 bp, Homo sapiens; identical to SEQ ID NO: 207714
  chr2:1932938-1933105
  hypo

SEQ ID NO: 298918 - DNA, 461 bp, Homo sapiens
  chr2:1940949-1941410
  hypo
agcagcccctgcttcctgttcgactcccctgacccccacatcgactctgcctcagggcggcctccatgccttgcccagagcagctgcagccatcatttcgcacatcaagaagttcctaacgtccgcggccatcagatcgcacatcaagaaggtcctaatgtctgcagccatcagatcgcacagcgagaaggccctaatgtccgcggccatcagatcgcacagcgagaaagccctaacgtctgcggccatcagatcgtacatcgagaaggccctaacgtccgcagccatcagatcgtacgtcgagaaggccctaacgtccgcggccatcagattgcacatcgagaaggccctaatgtccgcagccatcagatcgcacagtgagaaggccctaatgtccacagccatcagatcgcaagtcgagaaggccctaatgtccacagccatcagatcgcacactgaga

SEQ ID NO: 298919 - DNA, 128 bp, Homo sapiens
  chr2:1941452-1941580
  hypo
ccctaatgtccacagccatcagatcacaagtcgagaaggccctaacgtccacagccatcagatggcaagtcgagaaggccctaatgtccgcggccatcagatcgcacgtggagaaggccctaaggtga

SEQ ID NO: 298920 - DNA, 64 bp, Homo sapiens; identical to SEQ ID NO: 250005
  chr2:1987513-1987577
  hypo

SEQ ID NO: 298921 - DNA, 44 bp, Homo sapiens; identical to SEQ ID NO: 250006
  chr2:2125518-2125562
  hypo

SEQ ID NO: 298922 - DNA, 135 bp, Homo sapiens; identical to SEQ ID NO: 250007
  chr2:2142636-2142771
  hypo

SEQ ID NO: 298923 - DNA, 156 bp, Homo sapiens; identical to SEQ ID NO: 250009
  chr2:2176564-2176720
  hypo

SEQ ID NO: 298924 - DNA, 953 bp, Homo sapiens; identical to SEQ ID NO: 207715
  chr2:2189143-2190096
  hypo

SEQ ID NO: 298925 - DNA, 54 bp, Homo sapiens; identical to SEQ ID NO: 207716
  chr2:2190245-2190299
  hypo

SEQ ID NO: 298926 - DNA, 115 bp, Homo sapiens; identical to SEQ ID NO: 250011
  chr2:2193568-2193683
  hypo

SEQ ID NO: 298927 - DNA, 64 bp, Homo sapiens; identical to SEQ ID NO: 250012
  chr2:2325021-2325085
  hypo

SEQ ID NO: 298928 - DNA, 71 bp, Homo sapiens
  chr2:2569470-2569541
  hypo
tacctggagtcaccgtcttaccgggggacttgagaggtgggtggagctgaccactttccgggaggaaagga

SEQ ID NO: 298929 - DNA, 174 bp, Homo sapiens; identical to SEQ ID NO: 250014
  chr2:2572706-2572880
  hypo

SEQ ID NO: 298930 - DNA, 325 bp, Homo sapiens
  chr2:2575357-2575682
  hypo
agtccggcagatggcggggccagcacctgagatatcccgttcccctgctatgctggagagggccatggtatgaagtggggggcttcacactgcccccggccctgatctgggaggcccttccaggcgaaggcggctcccggcttccccttcctgctgcccctcttcctccccatgcccgcctctccccccacgcctgcctcctccctcccgctcctcgctgcctcctcgcctccaggccacagtttctgtagctgggtcttcagacttcagaagtgtccttttattgtaaagacttcagtggtttcctagaaagcgccggattttc

SEQ ID NO: 298931 - DNA, 68 bp, Homo sapiens
  chr2:2575769-2575837
  hypo
ccttcgcaggtgtcgaaccaggagtcacctccgcatctgcgcagcagcgggcccggcggaggggctct

SEQ ID NO: 298932 - DNA, 260 bp, Homo sapiens; identical to SEQ ID NO: 250016
  chr2:2584324-2584584
  hypo

SEQ ID NO: 298933 - DNA, 154 bp, Homo sapiens; identical to SEQ ID NO: 207717
  chr2:2584644-2584798
  hypo

SEQ ID NO: 298934 - DNA, 548 bp, Homo sapiens
  chr2:2584836-2585384
  hypo
gcatgtctgtcgagggcgtatgtccagggatgcactgtgcatgtctgtcgaggatgtatgtccaggaggtgcactgtgcatgtctgtcgagggcgtatgtccgggggtgcactgtgcatgtctctcgagggtgtatttccggggggtgcactgtgcatgtctgtcgagggtgtatgaccgggggtgcactgtgcatgtcatgtctgtcgaggttgtatgtctgggggtgcactgtgcatgtctttcgagggtgtatgtccgggggtgtactgtgcatgtcatgtctgtcgaggttgtatgtctgggggtgcactgtgcatgtctgtcgagggcgtatgtccagggggtacactgtgggtgtctgtggagggtgtatgtccgggaggtgcactatgggtgtctgtcgagggcgtatgtccaagtgtgcactgtgcatgtctgtcgaatgaacagatcaacagtacaaagcaggacgctgacgcaggcgcacagacacgctcggcttccatagatactctctacggagcagcctgcgctgcctcggggct

SEQ ID NO: 298935 - DNA, 346 bp, Homo sapiens; identical to SEQ ID NO: 250018
  chr2:2639594-2639940
  hypo

SEQ ID NO: 298936 - DNA, 102 bp, Homo sapiens; identical to SEQ ID NO: 250019
  chr2:2667399-2667501
  hypo

SEQ ID NO: 298937 - DNA, 204 bp, Homo sapiens; identical to SEQ ID NO: 250020
  chr2:2668976-2669180
  hypo

SEQ ID NO: 298938 - DNA, 49 bp, Homo sapiens; identical to SEQ ID NO: 250021
  chr2:2672247-2672296
  hypo

SEQ ID NO: 298939 - DNA, 61 bp, Homo sapiens; identical to SEQ ID NO: 207719
  chr2:2673023-2673084
  hypo

SEQ ID NO: 298940 - DNA, 226 bp, Homo sapiens; identical to SEQ ID NO: 207720
  chr2:2673114-2673340
  hypo

SEQ ID NO: 298941 - DNA, 50 bp, Homo sapiens; identical to SEQ ID NO: 250023
  chr2:2693176-2693226
  hypo

SEQ ID NO: 298942 - DNA, 217 bp, Homo sapiens; identical to SEQ ID NO: 250024
  chr2:2696881-2697098
  hypo

SEQ ID NO: 298943 - DNA, 151 bp, Homo sapiens; identical to SEQ ID NO: 250025
  chr2:2705291-2705442
  hypo

SEQ ID NO: 298944 - DNA, 55 bp, Homo sapiens; identical to SEQ ID NO: 250026
  chr2:2724721-2724776
  hypo

SEQ ID NO: 298945 - DNA, 68 bp, Homo sapiens; identical to SEQ ID NO: 250027
  chr2:2724806-2724874
  hypo

SEQ ID NO: 298946 - DNA, 423 bp, Homo sapiens; identical to SEQ ID NO: 250029
  chr2:2734118-2734541
  hypo

SEQ ID NO: 298947 - DNA, 150 bp, Homo sapiens; identical to SEQ ID NO: 250030
  chr2:2734984-2735134
  hypo

SEQ ID NO: 298948 - DNA, 326 bp, Homo sapiens; identical to SEQ ID NO: 250031
  chr2:2735622-2735948
  hypo

SEQ ID NO: 298949 - DNA, 290 bp, Homo sapiens; identical to SEQ ID NO: 207721
  chr2:2737134-2737424
  hypo

SEQ ID NO: 298950 - DNA, 358 bp, Homo sapiens; identical to SEQ ID NO: 250033
  chr2:2755043-2755401
  hypo

SEQ ID NO: 298951 - DNA, 251 bp, Homo sapiens; identical to SEQ ID NO: 250034
  chr2:2769793-2770044
  hypo

SEQ ID NO: 298952 - DNA, 168 bp, Homo sapiens; identical to SEQ ID NO: 250035
  chr2:2795035-2795203
  hypo

SEQ ID NO: 298953 - DNA, 454 bp, Homo sapiens; identical to SEQ ID NO: 250036
  chr2:2797203-2797657
  hypo

SEQ ID NO: 298954 - DNA, 160 bp, Homo sapiens; identical to SEQ ID NO: 250037
  chr2:2799592-2799752
  hypo

SEQ ID NO: 298955 - DNA, 159 bp, Homo sapiens; identical to SEQ ID NO: 250038
  chr2:2800085-2800244
  hypo

SEQ ID NO: 298956 - DNA, 147 bp, Homo sapiens; identical to SEQ ID NO: 207722
  chr2:2849145-2849292
  hypo

SEQ ID NO: 298957 - DNA, 117 bp, Homo sapiens; identical to SEQ ID NO: 207723
  chr2:2854224-2854341
  hypo

SEQ ID NO: 298958 - DNA, 181 bp, Homo sapiens; identical to SEQ ID NO: 207724
  chr2:2854463-2854644
  hypo

SEQ ID NO: 298959 - DNA, 214 bp, Homo sapiens; identical to SEQ ID NO: 250041
  chr2:2876123-2876337
  hypo

SEQ ID NO: 298960 - DNA, 219 bp, Homo sapiens; identical to SEQ ID NO: 207725
  chr2:2879707-2879926
  hypo

SEQ ID NO: 298961 - DNA, 433 bp, Homo sapiens; identical to SEQ ID NO: 250043
  chr2:2893356-2893789
  hypo

SEQ ID NO: 298962 - DNA, 86 bp, Homo sapiens; identical to SEQ ID NO: 250044
  chr2:2897936-2898022
  hypo

SEQ ID NO: 298963 - DNA, 85 bp, Homo sapiens; identical to SEQ ID NO: 250045
  chr2:2936579-2936664
  hypo

SEQ ID NO: 298964 - DNA, 139 bp, Homo sapiens
  chr2:2939619-2939758
  hypo
tcccatccgacctcactaaacatctgcaccagtttagctgctcccaaactccgggcaagggagaggcagggcttccgggaggcctgggctagcgtgaggaggcgaaggctctgctcctccctgacgggcaccgtccgca

SEQ ID NO: 298965 - DNA, 122 bp, Homo sapiens; identical to SEQ ID NO: 250047
  chr2:2940296-2940418
  hypo

SEQ ID NO: 298966 - DNA, 142 bp, Homo sapiens; identical to SEQ ID NO: 250048
  chr2:2945842-2945984
  hypo

SEQ ID NO: 298967 - DNA, 150 bp, Homo sapiens; identical to SEQ ID NO: 250049
  chr2:3039119-3039269
  hypo

SEQ ID NO: 298968 - DNA, 212 bp, Homo sapiens; identical to SEQ ID NO: 250050
  chr2:3041592-3041804
  hypo

SEQ ID NO: 298969 - DNA, 340 bp, Homo sapiens; identical to SEQ ID NO: 250051
  chr2:3063352-3063692
  hypo

SEQ ID NO: 298970 - DNA, 79 bp, Homo sapiens; identical to SEQ ID NO: 250052
  chr2:3066927-3067006
  hypo

SEQ ID NO: 298971 - DNA, 167 bp, Homo sapiens; identical to SEQ ID NO: 250053
  chr2:3113370-3113537
  hypo

SEQ ID NO: 298972 - DNA, 65 bp, Homo sapiens; identical to SEQ ID NO: 250054
  chr2:3118887-3118952
  hypo

SEQ ID NO: 298973 - DNA, 101 bp, Homo sapiens; identical to SEQ ID NO: 207726
  chr2:3173339-3173440
  hypo

SEQ ID NO: 298974 - DNA, 220 bp, Homo sapiens; identical to SEQ ID NO: 207727
  chr2:3176062-3176282
  hypo

SEQ ID NO: 298975 - DNA, 72 bp, Homo sapiens; identical to SEQ ID NO: 207728
  chr2:3201717-3201789
  hypo

SEQ ID NO: 298976 - DNA, 286 bp, Homo sapiens; identical to SEQ ID NO: 250058
  chr2:3214976-3215262
  hypo

SEQ ID NO: 298977 - DNA, 54 bp, Homo sapiens; identical to SEQ ID NO: 250059
  chr2:3215523-3215577
  hypo

SEQ ID NO: 298978 - DNA, 433 bp, Homo sapiens; identical to SEQ ID NO: 207730
  chr2:3260562-3260995
  hypo

SEQ ID NO: 298979 - DNA, 85 bp, Homo sapiens; identical to SEQ ID NO: 250061
  chr2:3266889-3266974
  hypo

SEQ ID NO: 298980 - DNA, 189 bp, Homo sapiens; identical to SEQ ID NO: 207731
  chr2:3280943-3281132
  hypo

SEQ ID NO: 298981 - DNA, 91 bp, Homo sapiens; identical to SEQ ID NO: 250063
  chr2:3281349-3281440
  hypo

SEQ ID NO: 298982 - DNA, 292 bp, Homo sapiens
  chr2:3285953-3286245
  hypo
gctgggttggtgtcggcaaccatcaccagccccgggccaccgtcaggtgggggcactgcccctctgtgcagcttgcacagaggcctgaagatggacagctctgcggacatggctagcagctgccctggactgaacatgcttttaccctcagaccaagtggtgaaatctgtctttccagccttttgtgtggaaaaaacaaaaaacacagccccacagacttcaatgagcccggcacttcctttcttgtgttccctcgtcactccctcccacctggtgcataaacatacccaga

SEQ ID NO: 298983 - DNA, 428 bp, Homo sapiens
  chr2:3286275-3286703
  hypo
tcattccctcatgtttaaccttgaaacccgactgccaatgcactgacatcggtgcctacagacggccgcacgggctgctgcgccggctcctggcagggtgtgtgctttgatgggctctgggggcagagccagctggcggcggcaactccgttgcccagggaacagccattgaagtgtgcgctcccgagtctgcaccaggccggcgcctgtcgcggtgctggctgaacctcggcgctgcaggggctgtgcccggcgggtgcccattagtgctctccgtgctccaggaacaaggagcaggtccagaggccccgctcttcccactgacaaacgggcttggtttgctgccttattaatgactacgccactctcaccacccaaacaaaatgcacagagtaggaggaaagaattagcttcgaggaggtgctctt

SEQ ID NO: 298984 - DNA, 56 bp, Homo sapiens; identical to SEQ ID NO: 250065
  chr2:3289697-3289753
  hypo

SEQ ID NO: 298985 - DNA, 53 bp, Homo sapiens; identical to SEQ ID NO: 207733
  chr2:3290045-3290098
  hypo

SEQ ID NO: 298986 - DNA, 387 bp, Homo sapiens; identical to SEQ ID NO: 207734
  chr2:3290128-3290515
  hypo

SEQ ID NO: 298987 - DNA, 77 bp, Homo sapiens; identical to SEQ ID NO: 250067
  chr2:3290886-3290963
  hypo

SEQ ID NO: 298988 - DNA, 300 bp, Homo sapiens; identical to SEQ ID NO: 250068
  chr2:3291143-3291443
  hypo

SEQ ID NO: 298989 - DNA, 79 bp, Homo sapiens
  chr2:3292428-3292507
  hypo
tggactttgccaaacgtgaagatcccgagacaagcccaaccttccatcaagaccaggaaacactgctcagcaggcacgg

SEQ ID NO: 298990 - DNA, 473 bp, Homo sapiens; identical to SEQ ID NO: 140516
  chr2:3293007-3293480
  hypo

SEQ ID NO: 298991 - DNA, 103 bp, Homo sapiens; identical to SEQ ID NO: 250070
  chr2:3294541-3294644
  hypo

SEQ ID NO: 298992 - DNA, 191 bp, Homo sapiens; identical to SEQ ID NO: 207736
  chr2:3303473-3303664
  hypo

SEQ ID NO: 298993 - DNA, 309 bp, Homo sapiens; identical to SEQ ID NO: 250072
  chr2:3313498-3313807
  hypo

SEQ ID NO: 298994 - DNA, 187 bp, Homo sapiens; identical to SEQ ID NO: 207738
  chr2:3321054-3321241
  hypo

SEQ ID NO: 298995 - DNA, 167 bp, Homo sapiens; identical to SEQ ID NO: 250074
  chr2:3321984-3322151
  hypo

SEQ ID NO: 298996 - DNA, 91 bp, Homo sapiens; identical to SEQ ID NO: 250075
  chr2:3325164-3325255
  hypo

SEQ ID NO: 298997 - DNA, 188 bp, Homo sapiens
  chr2:3346921-3347109
  hypo
catgcgagctctgccgccccgccacctgccctgtggatgcactctgcagggcggcagcaagccagagtgagaggcagctcccagctggagggaagaaccagtacctcaactctctgttctcagggcaccaccctacacccagctcacctgaaagtataaacaactgttttgttgaataaacatacgca

SEQ ID NO: 298998 - DNA, 104 bp, Homo sapiens; identical to SEQ ID NO: 207740
  chr2:3347154-3347258
  hypo

SEQ ID NO: 298999 - DNA, 37 bp, Homo sapiens; identical to SEQ ID NO: 250077
  chr2:3347546-3347583
  hypo

SEQ ID NO: 299000 - DNA, 42 bp, Homo sapiens; identical to SEQ ID NO: 250078
  chr2:3347859-3347901
  hypo

SEQ ID NO: 299001 - DNA, 70 bp, Homo sapiens; identical to SEQ ID NO: 250079
  chr2:3349537-3349607
  hypo

SEQ ID NO: 299002 - DNA, 219 bp, Homo sapiens; identical to SEQ ID NO: 207741
  chr2:3352458-3352677
  hypo

SEQ ID NO: 299003 - DNA, 307 bp, Homo sapiens
  chr2:3352710-3353017
  hypo
gtgcacatgcgcacaggcgggctgctcgcagccggaaccatggggcccaggctgttcaggatggagctgtcctgattttcaggacatctcaccccagagacacggcatggcaacagcacgggtgcaccctttccacgtgtgtctgtacaaaagtgtacacttcaggtgcaagagcatacccatggcacatgcctcagagctgaactgcaaattcaaaggagagggaagcgagcagagagaggcagacatgcaggtttcagtcccgattctgccacgcaccagctccacactgcgtggggccacctgc

SEQ ID NO: 299004 - DNA, 134 bp, Homo sapiens; identical to SEQ ID NO: 250081
  chr2:3372625-3372759
  hypo

SEQ ID NO: 299005 - DNA, 85 bp, Homo sapiens; identical to SEQ ID NO: 207742
  chr2:3391389-3391474
  hypo

SEQ ID NO: 299006 - DNA, 492 bp, Homo sapiens; identical to SEQ ID NO: 207743
  chr2:3418353-3418845
  hypo

SEQ ID NO: 299007 - DNA, 149 bp, Homo sapiens; identical to SEQ ID NO: 250084
  chr2:3425450-3425599
  hypo

SEQ ID NO: 299008 - DNA, 214 bp, Homo sapiens; identical to SEQ ID NO: 250085
  chr2:3427286-3427500
  hypo

SEQ ID NO: 299009 - DNA, 154 bp, Homo sapiens; identical to SEQ ID NO: 207744
  chr2:3446897-3447051
  hypo

SEQ ID NO: 299010 - DNA, 177 bp, Homo sapiens; identical to SEQ ID NO: 250087
  chr2:3449779-3449956
  hypo

SEQ ID NO: 299011 - DNA, 360 bp, Homo sapiens; identical to SEQ ID NO: 250088
  chr2:3452857-3453217
  hypo

SEQ ID NO: 299012 - DNA, 192 bp, Homo sapiens; identical to SEQ ID NO: 250089
  chr2:3456147-3456339
  hypo

SEQ ID NO: 299013 - DNA, 80 bp, Homo sapiens; identical to SEQ ID NO: 250090
  chr2:3458785-3458865
  hypo

SEQ ID NO: 299014 - DNA, 175 bp, Homo sapiens; identical to SEQ ID NO: 198054
  chr2:3465089-3465264
  hypo

SEQ ID NO: 299015 - DNA, 43 bp, Homo sapiens; identical to SEQ ID NO: 207747
  chr2:3467375-3467418
  hypo

SEQ ID NO: 299016 - DNA, 330 bp, Homo sapiens; identical to SEQ ID NO: 250092
  chr2:3469090-3469420
  hypo

SEQ ID NO: 299017 - DNA, 42 bp, Homo sapiens; identical to SEQ ID NO: 250093
  chr2:3498265-3498307
  hypo

SEQ ID NO: 299018 - DNA, 191 bp, Homo sapiens; identical to SEQ ID NO: 207748
  chr2:3504356-3504547
  hypo

SEQ ID NO: 299019 - DNA, 355 bp, Homo sapiens; identical to SEQ ID NO: 207749
  chr2:3582016-3582371
  hypo

SEQ ID NO: 299020 - DNA, 343 bp, Homo sapiens; identical to SEQ ID NO: 250096
  chr2:3586878-3587221
  hypo

SEQ ID NO: 299021 - DNA, 71 bp, Homo sapiens; identical to SEQ ID NO: 207750
  chr2:3593598-3593669
  hypo

SEQ ID NO: 299022 - DNA, 80 bp, Homo sapiens; identical to SEQ ID NO: 250098
  chr2:3648215-3648295
  hypo

SEQ ID NO: 299023 - DNA, 186 bp, Homo sapiens; identical to SEQ ID NO: 250099
  chr2:3649283-3649469
  hypo

SEQ ID NO: 299024 - DNA, 91 bp, Homo sapiens; identical to SEQ ID NO: 207751
  chr2:3675048-3675139
  hypo

SEQ ID NO: 299025 - DNA, 282 bp, Homo sapiens; identical to SEQ ID NO: 207752
  chr2:3675169-3675451
  hypo

SEQ ID NO: 299026 - DNA, 470 bp, Homo sapiens; identical to SEQ ID NO: 250102
  chr2:3681100-3681570
  hypo

SEQ ID NO: 299027 - DNA, 290 bp, Homo sapiens; identical to SEQ ID NO: 250103
  chr2:3685679-3685969
  hypo

SEQ ID NO: 299028 - DNA, 170 bp, Homo sapiens; identical to SEQ ID NO: 250104
  chr2:3695326-3695496
  hypo

SEQ ID NO: 299029 - DNA, 308 bp, Homo sapiens; identical to SEQ ID NO: 207754
  chr2:3714208-3714516
  hypo

SEQ ID NO: 299030 - DNA, 293 bp, Homo sapiens; identical to SEQ ID NO: 250106
  chr2:3810772-3811065
  hypo

SEQ ID NO: 299031 - DNA, 36 bp, Homo sapiens; identical to SEQ ID NO: 250108
  chr2:3888395-3888431
  hypo

SEQ ID NO: 299032 - DNA, 42 bp, Homo sapiens; identical to SEQ ID NO: 250109
  chr2:3919766-3919808
  hypo

SEQ ID NO: 299033 - DNA, 198 bp, Homo sapiens
  chr2:3990922-3991120
  hypo
ggtgccaccgacattacagctagacttttgctttcctatccaccctgtattctaagctccctgggtcagggtctgcctgttcctcacctgtgtttcctgtgggcccagtggctgctgttgcgcacctggggagaagagactgcaagagggaacctccctgtgcgcccttggggtgcgtttcctcgccttgtcctcact

SEQ ID NO: 299034 - DNA, 184 bp, Homo sapiens; identical to SEQ ID NO: 250111
  chr2:4976754-4976938
  hypo

SEQ ID NO: 299035 - DNA, 102 bp, Homo sapiens; identical to SEQ ID NO: 250112
  chr2:5584526-5584628
  hypo

SEQ ID NO: 299036 - DNA, 79 bp, Homo sapiens; identical to SEQ ID NO: 250113
  chr2:5694955-5695034
  hypo

SEQ ID NO: 299037 - DNA, 141 bp, Homo sapiens; identical to SEQ ID NO: 250114
  chr2:6024405-6024546
  hypo

SEQ ID NO: 299038 - DNA, 57 bp, Homo sapiens; identical to SEQ ID NO: 207755
  chr2:6402889-6402946
  hypo

SEQ ID NO: 299039 - DNA, 110 bp, Homo sapiens; identical to SEQ ID NO: 250116
  chr2:6635591-6635701
  hypo

SEQ ID NO: 299040 - DNA, 279 bp, Homo sapiens; identical to SEQ ID NO: 279480
  chr2:7005154-7005433
  hypo

SEQ ID NO: 299041 - DNA, 729 bp, Homo sapiens; identical to SEQ ID NO: 198059
  chr2:7005469-7006198
  hypo

SEQ ID NO: 299042 - DNA, 305 bp, Homo sapiens; identical to SEQ ID NO: 279482
  chr2:7057748-7058053
  hypo

SEQ ID NO: 299043 - DNA, 48 bp, Homo sapiens; identical to SEQ ID NO: 279483
  chr2:7058391-7058439
  hypo

SEQ ID NO: 299044 - DNA, 270 bp, Homo sapiens; identical to SEQ ID NO: 207757
  chr2:7073081-7073351
  hypo

SEQ ID NO: 299045 - DNA, 130 bp, Homo sapiens; identical to SEQ ID NO: 250118
  chr2:7099078-7099208
  hypo

SEQ ID NO: 299046 - DNA, 98 bp, Homo sapiens; identical to SEQ ID NO: 207758
  chr2:7109819-7109917
  hypo

SEQ ID NO: 299047 - DNA, 136 bp, Homo sapiens; identical to SEQ ID NO: 250120
  chr2:7128200-7128336
  hypo

SEQ ID NO: 299048 - DNA, 46 bp, Homo sapiens; identical to SEQ ID NO: 250121
  chr2:7149569-7149615
  hypo

SEQ ID NO: 299049 - DNA, 50 bp, Homo sapiens; identical to SEQ ID NO: 207759
  chr2:7164398-7164448
  hypo

SEQ ID NO: 299050 - DNA, 33 bp, Homo sapiens; identical to SEQ ID NO: 250123
  chr2:7180010-7180043
  hypo

SEQ ID NO: 299051 - DNA, 112 bp, Homo sapiens; identical to SEQ ID NO: 250124
  chr2:7229710-7229822
  hypo

SEQ ID NO: 299052 - DNA, 102 bp, Homo sapiens; identical to SEQ ID NO: 207760
  chr2:7237053-7237155
  hypo

SEQ ID NO: 299053 - DNA, 182 bp, Homo sapiens; identical to SEQ ID NO: 207761
  chr2:7907358-7907540
  hypo

SEQ ID NO: 299054 - DNA, 41 bp, Homo sapiens; identical to SEQ ID NO: 250127
  chr2:7931304-7931345
  hypo

SEQ ID NO: 299055 - DNA, 101 bp, Homo sapiens; identical to SEQ ID NO: 250128
  chr2:7931525-7931626
  hypo

SEQ ID NO: 299056 - DNA, 151 bp, Homo sapiens; identical to SEQ ID NO: 250129
  chr2:8214269-8214420
  hypo

SEQ ID NO: 299057 - DNA, 155 bp, Homo sapiens; identical to SEQ ID NO: 250130
  chr2:8364597-8364752
  hypo

SEQ ID NO: 299058 - DNA, 57 bp, Homo sapiens; identical to SEQ ID NO: 250131
  chr2:8476167-8476224
  hypo

SEQ ID NO: 299059 - DNA, 120 bp, Homo sapiens; identical to SEQ ID NO: 207762
  chr2:8647532-8647652
  hypo

SEQ ID NO: 299060 - DNA, 125 bp, Homo sapiens; identical to SEQ ID NO: 207763
  chr2:8647900-8648025
  hypo

SEQ ID NO: 299061 - DNA, 31 bp, Homo sapiens; identical to SEQ ID NO: 207764
  chr2:8648363-8648394
  hypo

SEQ ID NO: 299062 - DNA, 105 bp, Homo sapiens
  chr2:8658450-8658555
  hypo
aagctcggaacctggaggctcagaatgcggcggctgctagctgtgtgacaatggacaggtcactgaggtccctggcaatgggtgggaggtcgttagcgctccttg

SEQ ID NO: 299063 - DNA, 68 bp, Homo sapiens; identical to SEQ ID NO: 250136
  chr2:8668756-8668824
  hypo

SEQ ID NO: 299064 - DNA, 165 bp, Homo sapiens; identical to SEQ ID NO: 207765
  chr2:8691181-8691346
  hypo

SEQ ID NO: 299065 - DNA, 183 bp, Homo sapiens; identical to SEQ ID NO: 250138
  chr2:8706973-8707156
  hypo

SEQ ID NO: 299066 - DNA, 192 bp, Homo sapiens; identical to SEQ ID NO: 250139
  chr2:8713198-8713390
  hypo

SEQ ID NO: 299067 - DNA, 102 bp, Homo sapiens; identical to SEQ ID NO: 207766
  chr2:8736064-8736166
  hypo

SEQ ID NO: 299068 - DNA, 48 bp, Homo sapiens; identical to SEQ ID NO: 207767
  chr2:8736256-8736304
  hypo

SEQ ID NO: 299069 - DNA, 145 bp, Homo sapiens; identical to SEQ ID NO: 207768
  chr2:8768417-8768562
  hypo

SEQ ID NO: 299070 - DNA, 302 bp, Homo sapiens; identical to SEQ ID NO: 221656
  chr2:8818278-8818580
  hypo

SEQ ID NO: 299071 - DNA, 665 bp, Homo sapiens; identical to SEQ ID NO: 221657
  chr2:8818829-8819494
  hypo

SEQ ID NO: 299072 - DNA, 169 bp, Homo sapiens; identical to SEQ ID NO: 198061
  chr2:8821592-8821761
  hypo

SEQ ID NO: 299073 - DNA, 709 bp, Homo sapiens; identical to SEQ ID NO: 198062
  chr2:8821976-8822685
  hypo

SEQ ID NO: 299074 - DNA, 208 bp, Homo sapiens; identical to SEQ ID NO: 198064
  chr2:8825635-8825843
  hypo

SEQ ID NO: 299075 - DNA, 274 bp, Homo sapiens; identical to SEQ ID NO: 207773
  chr2:8834448-8834722
  hypo

SEQ ID NO: 299076 - DNA, 142 bp, Homo sapiens; identical to SEQ ID NO: 207774
  chr2:8834896-8835038
  hypo

SEQ ID NO: 299077 - DNA, 171 bp, Homo sapiens; identical to SEQ ID NO: 207775
  chr2:8854102-8854273
  hypo

SEQ ID NO: 299078 - DNA, 231 bp, Homo sapiens; identical to SEQ ID NO: 250148
  chr2:8860513-8860744
  hypo

SEQ ID NO: 299079 - DNA, 62 bp, Homo sapiens; identical to SEQ ID NO: 250149
  chr2:8868790-8868852
  hypo

SEQ ID NO: 299080 - DNA, 160 bp, Homo sapiens; identical to SEQ ID NO: 207776
  chr2:8870179-8870339
  hypo

SEQ ID NO: 299081 - DNA, 57 bp, Homo sapiens; identical to SEQ ID NO: 207777
  chr2:8978298-8978355
  hypo

SEQ ID NO: 299082 - DNA, 187 bp, Homo sapiens; identical to SEQ ID NO: 207778
  chr2:8983020-8983207
  hypo

SEQ ID NO: 299083 - DNA, 166 bp, Homo sapiens; identical to SEQ ID NO: 207779
  chr2:9002474-9002640
  hypo

SEQ ID NO: 299084 - DNA, 104 bp, Homo sapiens; identical to SEQ ID NO: 250154
  chr2:9076991-9077095
  hypo

SEQ ID NO: 299085 - DNA, 389 bp, Homo sapiens; identical to SEQ ID NO: 207780
  chr2:9078568-9078957
  hypo

SEQ ID NO: 299086 - DNA, 101 bp, Homo sapiens; identical to SEQ ID NO: 250157
  chr2:9135654-9135755
  hypo

SEQ ID NO: 299087 - DNA, 210 bp, Homo sapiens; identical to SEQ ID NO: 198066
  chr2:9143658-9143868
  hypo

SEQ ID NO: 299088 - DNA, 459 bp, Homo sapiens; identical to SEQ ID NO: 221662
  chr2:9144090-9144549
  hypo

SEQ ID NO: 299089 - DNA, 96 bp, Homo sapiens; identical to SEQ ID NO: 207783
  chr2:9218664-9218760
  hypo

SEQ ID NO: 299090 - DNA, 31 bp, Homo sapiens; identical to SEQ ID NO: 250159
  chr2:9234917-9234948
  hypo

SEQ ID NO: 299091 - DNA, 796 bp, Homo sapiens; identical to SEQ ID NO: 250160
  chr2:9236516-9237312
  hypo

SEQ ID NO: 299092 - DNA, 75 bp, Homo sapiens
  chr2:9244226-9244301
  hypo
caacactcaacaaacgcttgtggaaggagtgaacaaatgacaagtcacgaaacctaaatacaggtatgtcacaag

SEQ ID NO: 299093 - DNA, 165 bp, Homo sapiens
  chr2:9244331-9244496
  hypo
tgcacaggtagcaactttctaaaatattttacctttagtattgtcatttcatatttctgtctttctcttactttagtgtactattttatggtgtcttaaaccatcacgcaattccacgggtatgcagcacaaagaattgagaagtaattccgataagagcagggg

SEQ ID NO: 299094 - DNA, 265 bp, Homo sapiens; identical to SEQ ID NO: 207784
  chr2:9245035-9245300
  hypo

SEQ ID NO: 299095 - DNA, 141 bp, Homo sapiens; identical to SEQ ID NO: 250163
  chr2:9250220-9250361
  hypo

SEQ ID NO: 299096 - DNA, 174 bp, Homo sapiens; identical to SEQ ID NO: 250164
  chr2:9250674-9250848
  hypo

SEQ ID NO: 299097 - DNA, 59 bp, Homo sapiens; identical to SEQ ID NO: 207785
  chr2:9251105-9251164
  hypo

SEQ ID NO: 299098 - DNA, 141 bp, Homo sapiens; identical to SEQ ID NO: 250166
  chr2:9289579-9289720
  hypo

SEQ ID NO: 299099 - DNA, 36 bp, Homo sapiens
  chr2:9289933-9289969
  hypo
tacttaagcccccagggccccggtttcttgtctgtg

SEQ ID NO: 299100 - DNA, 1192 bp, Homo sapiens; identical to SEQ ID NO: 198068
  chr2:9346368-9347560
  hypo

SEQ ID NO: 299101 - DNA, 316 bp, Homo sapiens; identical to SEQ ID NO: 198069
  chr2:9347677-9347993
  hypo

SEQ ID NO: 299102 - DNA, 187 bp, Homo sapiens; identical to SEQ ID NO: 207788
  chr2:9352815-9353002
  hypo

SEQ ID NO: 299103 - DNA, 174 bp, Homo sapiens; identical to SEQ ID NO: 207789
  chr2:9409365-9409539
  hypo

SEQ ID NO: 299104 - DNA, 95 bp, Homo sapiens; identical to SEQ ID NO: 250170
  chr2:9427258-9427353
  hypo

SEQ ID NO: 299105 - DNA, 470 bp, Homo sapiens; identical to SEQ ID NO: 207790
  chr2:9455454-9455924
  hypo

SEQ ID NO: 299106 - DNA, 138 bp, Homo sapiens; identical to SEQ ID NO: 207791
  chr2:9456808-9456946
  hypo

SEQ ID NO: 299107 - DNA, 231 bp, Homo sapiens; identical to SEQ ID NO: 250173
  chr2:9481656-9481887
  hypo

SEQ ID NO: 299108 - DNA, 180 bp, Homo sapiens; identical to SEQ ID NO: 207792
  chr2:9513162-9513342
  hypo

SEQ ID NO: 299109 - DNA, 488 bp, Homo sapiens; identical to SEQ ID NO: 250175
  chr2:9518892-9519380
  hypo

SEQ ID NO: 299110 - DNA, 42 bp, Homo sapiens; identical to SEQ ID NO: 250176
  chr2:9608090-9608132
  hypo

SEQ ID NO: 299111 - DNA, 401 bp, Homo sapiens; identical to SEQ ID NO: 207793
  chr2:9609462-9609863
  hypo

SEQ ID NO: 299112 - DNA, 216 bp, Homo sapiens; identical to SEQ ID NO: 250178
  chr2:9649999-9650215
  hypo

SEQ ID NO: 299113 - DNA, 131 bp, Homo sapiens; identical to SEQ ID NO: 250179
  chr2:9676812-9676943
  hypo

SEQ ID NO: 299114 - DNA, 32 bp, Homo sapiens; identical to SEQ ID NO: 250180
  chr2:9694210-9694242
  hypo

SEQ ID NO: 299115 - DNA, 260 bp, Homo sapiens; identical to SEQ ID NO: 250181
  chr2:9720411-9720671
  hypo

SEQ ID NO: 299116 - DNA, 49 bp, Homo sapiens; identical to SEQ ID NO: 250182
  chr2:9727412-9727461
  hypo

SEQ ID NO: 299117 - DNA, 42 bp, Homo sapiens; identical to SEQ ID NO: 250183
  chr2:9737397-9737439
  hypo

SEQ ID NO: 299118 - DNA, 104 bp, Homo sapiens; identical to SEQ ID NO: 250184
  chr2:9768526-9768630
  hypo

SEQ ID NO: 299119 - DNA, 100 bp, Homo sapiens; identical to SEQ ID NO: 250185
  chr2:9785031-9785131
  hypo

SEQ ID NO: 299120 - DNA, 134 bp, Homo sapiens; identical to SEQ ID NO: 250186
  chr2:9785578-9785712
  hypo

SEQ ID NO: 299121 - DNA, 90 bp, Homo sapiens; identical to SEQ ID NO: 250187
  chr2:9853195-9853285
  hypo

SEQ ID NO: 299122 - DNA, 144 bp, Homo sapiens
  chr2:9921477-9921621
  hypo
gaaagggagtactgggcgccaggaaaatggggttcccggaagatgactcaggcagccccagaatatgtctccatcactaatagagtccagaagcaagcctgtgcccatccactgcgatgagggtttctacgtgatgttactgtc

SEQ ID NO: 299123 - DNA, 122 bp, Homo sapiens; identical to SEQ ID NO: 250189
  chr2:9937923-9938045
  hypo

SEQ ID NO: 299124 - DNA, 42 bp, Homo sapiens; identical to SEQ ID NO: 250190
  chr2:9942207-9942249
  hypo

SEQ ID NO: 299125 - DNA, 235 bp, Homo sapiens; identical to SEQ ID NO: 250191
  chr2:9948880-9949115
  hypo

SEQ ID NO: 299126 - DNA, 175 bp, Homo sapiens; identical to SEQ ID NO: 250192
  chr2:9952204-9952379
  hypo

SEQ ID NO: 299127 - DNA, 105 bp, Homo sapiens; identical to SEQ ID NO: 207794
  chr2:9960809-9960914
  hypo

SEQ ID NO: 299128 - DNA, 37 bp, Homo sapiens; identical to SEQ ID NO: 207795
  chr2:9977944-9977981
  hypo

SEQ ID NO: 299129 - DNA, 134 bp, Homo sapiens; identical to SEQ ID NO: 250195
  chr2:10008084-10008218
  hypo

SEQ ID NO: 299130 - DNA, 151 bp, Homo sapiens; identical to SEQ ID NO: 250196
  chr2:10047574-10047725
  hypo

SEQ ID NO: 299131 - DNA, 213 bp, Homo sapiens; identical to SEQ ID NO: 207796
  chr2:10110633-10110846
  hypo

SEQ ID NO: 299132 - DNA, 300 bp, Homo sapiens; identical to SEQ ID NO: 207797
  chr2:10150735-10151035
  hypo

SEQ ID NO: 299133 - DNA, 120 bp, Homo sapiens; identical to SEQ ID NO: 207798
  chr2:10151095-10151215
  hypo

SEQ ID NO: 299134 - DNA, 33 bp, Homo sapiens; identical to SEQ ID NO: 198071
  chr2:10151842-10151875
  hypo

SEQ ID NO: 299135 - DNA, 185 bp, Homo sapiens; identical to SEQ ID NO: 279500
  chr2:10152410-10152595
  hypo

SEQ ID NO: 299136 - DNA, 93 bp, Homo sapiens; identical to SEQ ID NO: 207801
  chr2:10152955-10153048
  hypo

SEQ ID NO: 299137 - DNA, 333 bp, Homo sapiens; identical to SEQ ID NO: 207802
  chr2:10153555-10153888
  hypo

SEQ ID NO: 299138 - DNA, 33 bp, Homo sapiens; identical to SEQ ID NO: 207803
  chr2:10154875-10154908
  hypo

SEQ ID NO: 299139 - DNA, 89 bp, Homo sapiens; identical to SEQ ID NO: 207804
  chr2:10155175-10155264
  hypo

SEQ ID NO: 299140 - DNA, 180 bp, Homo sapiens; identical to SEQ ID NO: 207805
  chr2:10155775-10155955
  hypo

SEQ ID NO: 299141 - DNA, 58 bp, Homo sapiens; identical to SEQ ID NO: 207806
  chr2:10156255-10156313
  hypo

SEQ ID NO: 299142 - DNA, 531 bp, Homo sapiens; identical to SEQ ID NO: 250206
  chr2:10161988-10162519
  hypo

SEQ ID NO: 299143 - DNA, 160 bp, Homo sapiens; identical to SEQ ID NO: 250207
  chr2:10178432-10178592
  hypo

SEQ ID NO: 299144 - DNA, 114 bp, Homo sapiens; identical to SEQ ID NO: 250208
  chr2:10181969-10182083
  hypo

SEQ ID NO: 299145 - DNA, 199 bp, Homo sapiens; identical to SEQ ID NO: 198073
  chr2:10183604-10183803
  hypo

SEQ ID NO: 299146 - DNA, 453 bp, Homo sapiens; identical to SEQ ID NO: 37134
  chr2:10183814-10184267
  hypo

SEQ ID NO: 299147 - DNA, 126 bp, Homo sapiens; identical to SEQ ID NO: 250209
  chr2:10195850-10195976
  hypo

SEQ ID NO: 299148 - DNA, 42 bp, Homo sapiens; identical to SEQ ID NO: 250210
  chr2:10226144-10226186
  hypo

SEQ ID NO: 299149 - DNA, 79 bp, Homo sapiens
  chr2:10281194-10281273
  hypo
gagttgtgtgtctgctcactattgtgctgtagcctctggaagttgcttaggagcttgggatttcgtggagaggtgggag

SEQ ID NO: 299150 - DNA, 37 bp, Homo sapiens; identical to SEQ ID NO: 207809
  chr2:10289569-10289606
  hypo

SEQ ID NO: 299151 - DNA, 228 bp, Homo sapiens
  chr2:10302790-10303018
  hypo
cacctgcacccccccgccgccccccacccccctgccgaggcctggggagtcacagctcttcctgatcttgctgtgtggcctcgggcagggcgtttgccctctctgggcctcaggcactccatcttgacaataaggccattgcacttgctattcacattgggccacctgtgccagccatccatgacaggggttctttaggtagagacaaatggcctgcaggggcgggga

SEQ ID NO: 299152 - DNA, 41 bp, Homo sapiens
  chr2:10306804-10306845
  hypo
gcctgcaaagccctcgccctgttccctatggcgcaccagct

SEQ ID NO: 299153 - DNA, 167 bp, Homo sapiens
  chr2:10306915-10307082
  hypo
tgcgtccccgcctgtgtcctaagcactccacaagcatgagcgtgtctagatggtgatggtttgctcatggtctctctctcagagcttttaccctggcggggttgggagcgtggcaatgggtcaccactgaccctgttaggaaacaagtgtgtctgtacgtgccactt

SEQ ID NO: 299154 - DNA, 152 bp, Homo sapiens; identical to SEQ ID NO: 250215
  chr2:10307112-10307264
  hypo

SEQ ID NO: 299155 - DNA, 120 bp, Homo sapiens; identical to SEQ ID NO: 250216
  chr2:10320484-10320604
  hypo

SEQ ID NO: 299156 - DNA, 82 bp, Homo sapiens; identical to SEQ ID NO: 250217
  chr2:10327405-10327487
  hypo

SEQ ID NO: 299157 - DNA, 150 bp, Homo sapiens; identical to SEQ ID NO: 207810
  chr2:10328931-10329081
  hypo

SEQ ID NO: 299158 - DNA, 628 bp, Homo sapiens; identical to SEQ ID NO: 250219
  chr2:10334459-10335087
  hypo

SEQ ID NO: 299159 - DNA, 139 bp, Homo sapiens; identical to SEQ ID NO: 250221
  chr2:10381451-10381590
  hypo

SEQ ID NO: 299160 - DNA, 84 bp, Homo sapiens; identical to SEQ ID NO: 250222
  chr2:10400306-10400390
  hypo

SEQ ID NO: 299161 - DNA, 512 bp, Homo sapiens; identical to SEQ ID NO: 279506
  chr2:10443618-10444130
  hypo

SEQ ID NO: 299162 - DNA, 165 bp, Homo sapiens; identical to SEQ ID NO: 279507
  chr2:10444193-10444358
  hypo

SEQ ID NO: 299163 - DNA, 163 bp, Homo sapiens; identical to SEQ ID NO: 250223
  chr2:10465386-10465549
  hypo

SEQ ID NO: 299164 - DNA, 60 bp, Homo sapiens; identical to SEQ ID NO: 250224
  chr2:10487204-10487264
  hypo

SEQ ID NO: 299165 - DNA, 527 bp, Homo sapiens; identical to SEQ ID NO: 250225
  chr2:10512200-10512727
  hypo

SEQ ID NO: 299166 - DNA, 66 bp, Homo sapiens; identical to SEQ ID NO: 250226
  chr2:10517629-10517695
  hypo

SEQ ID NO: 299167 - DNA, 244 bp, Homo sapiens; identical to SEQ ID NO: 207813
  chr2:10517932-10518176
  hypo

SEQ ID NO: 299168 - DNA, 160 bp, Homo sapiens; identical to SEQ ID NO: 250228
  chr2:10519035-10519195
  hypo

SEQ ID NO: 299169 - DNA, 40 bp, Homo sapiens; identical to SEQ ID NO: 250229
  chr2:10519315-10519355
  hypo

SEQ ID NO: 299170 - DNA, 540 bp, Homo sapiens
  chr2:10525735-10526275
  hypo
acgatggcagaatccggtgtctgcttggccgcgtggtgtcactaataggatttgccgagccttttggatgtttgtggcgcgacggctgctgtgggaacccagaggctgctcatttgcagggaatgaataatttatttctgttttcagatgacttattccttcatctgcagccgagcccccacatgttctgtaggctcctgattaagtgatttcagcaggagaatttggcttaatcccccactgccctggacgcctggttccaggctgctgatttgtcggcctcgtgtcggggggtgtccggagcctctcctctctgggggcttttcttcctgctctgcctgtttgggaagcctctggccactgagcatgtgctggccttgggttttacggctgtctggcaattagaatattaatgtcgataacacagcaggacttgcgtgtgacaagctgagccacataacgtcacagtcgctcttgaacatctcggactttcacatgggccagccacaccccagcctaggttgctccctcacctcctca

SEQ ID NO: 299171 - DNA, 42 bp, Homo sapiens; identical to SEQ ID NO: 250231
  chr2:10536068-10536110
  hypo

SEQ ID NO: 299172 - DNA, 137 bp, Homo sapiens; identical to SEQ ID NO: 250232
  chr2:10536465-10536602
  hypo

SEQ ID NO: 299173 - DNA, 114 bp, Homo sapiens; identical to SEQ ID NO: 15884
  chr2:10545012-10545126
  hypo

SEQ ID NO: 299174 - DNA, 57 bp, Homo sapiens; identical to SEQ ID NO: 250234
  chr2:10554979-10555036
  hypo

SEQ ID NO: 299175 - DNA, 78 bp, Homo sapiens; identical to SEQ ID NO: 250235
  chr2:10566539-10566617
  hypo

SEQ ID NO: 299176 - DNA, 500 bp, Homo sapiens; identical to SEQ ID NO: 250236
  chr2:10566935-10567435
  hypo

SEQ ID NO: 299177 - DNA, 171 bp, Homo sapiens
  chr2:10577346-10577517
  hypo
gtcctctgacctggcttgaatgctgcctcactatctgcgtgacttgagttcatctctgagtttatgtcttcacgcgggaaacctattttacaatcctcgtaaagtcagtaatacattccaatatcaaaagcgcagtgtggagccagtccccactctcggcccaggcctctg

SEQ ID NO: 299178 - DNA, 101 bp, Homo sapiens; identical to SEQ ID NO: 250238
  chr2:10580372-10580473
  hypo

SEQ ID NO: 299179 - DNA, 61 bp, Homo sapiens; identical to SEQ ID NO: 250239
  chr2:10582244-10582305
  hypo

SEQ ID NO: 299180 - DNA, 226 bp, Homo sapiens; identical to SEQ ID NO: 221669
  chr2:10587833-10588059
  hypo

SEQ ID NO: 299181 - DNA, 198 bp, Homo sapiens; identical to SEQ ID NO: 198077
  chr2:10588856-10589054
  hypo

SEQ ID NO: 299182 - DNA, 117 bp, Homo sapiens; identical to SEQ ID NO: 198078
  chr2:10589055-10589172
  hypo

SEQ ID NO: 299183 - DNA, 76 bp, Homo sapiens; identical to SEQ ID NO: 207819
  chr2:10600813-10600889
  hypo

SEQ ID NO: 299184 - DNA, 100 bp, Homo sapiens; identical to SEQ ID NO: 207820
  chr2:10601535-10601635
  hypo

SEQ ID NO: 299185 - DNA, 79 bp, Homo sapiens; identical to SEQ ID NO: 207821
  chr2:10615284-10615363
  hypo

SEQ ID NO: 299186 - DNA, 84 bp, Homo sapiens; identical to SEQ ID NO: 207822
  chr2:10615573-10615657
  hypo

SEQ ID NO: 299187 - DNA, 166 bp, Homo sapiens; identical to SEQ ID NO: 250244
  chr2:10616028-10616194
  hypo

SEQ ID NO: 299188 - DNA, 249 bp, Homo sapiens
  chr2:10634192-10634441
  hypo
agagtcacggagaccgacccttggcacaataagactgtggactgaggccagtgcctgtggactgaggctggtgctgtctaagagtcaccctcccttccgtacatgtgtaccttaccaccacgcaatggccctccgtgagtggccgtgccccccgctcagcaatgacctagcaaggaaactgaggctcacagaggtgacgtgtctgttctaagttcgtgaatgccaacttagaattggtggagctgggaa

SEQ ID NO: 299189 - DNA, 277 bp, Homo sapiens; identical to SEQ ID NO: 207824
  chr2:10634471-10634748
  hypo

SEQ ID NO: 299190 - DNA, 43 bp, Homo sapiens; identical to SEQ ID NO: 250246
  chr2:10642586-10642629
  hypo

SEQ ID NO: 299191 - DNA, 108 bp, Homo sapiens; identical to SEQ ID NO: 250247
  chr2:10645140-10645248
  hypo

SEQ ID NO: 299192 - DNA, 50 bp, Homo sapiens; identical to SEQ ID NO: 250248
  chr2:10654938-10654988
  hypo

SEQ ID NO: 299193 - DNA, 306 bp, Homo sapiens; identical to SEQ ID NO: 207825
  chr2:10666472-10666778
  hypo

SEQ ID NO: 299194 - DNA, 67 bp, Homo sapiens; identical to SEQ ID NO: 250250
  chr2:10672799-10672866
  hypo

SEQ ID NO: 299195 - DNA, 136 bp, Homo sapiens; identical to SEQ ID NO: 250251
  chr2:10673122-10673258
  hypo

SEQ ID NO: 299196 - DNA, 461 bp, Homo sapiens; identical to SEQ ID NO: 250252
  chr2:10686607-10687068
  hypo

SEQ ID NO: 299197 - DNA, 102 bp, Homo sapiens; identical to SEQ ID NO: 250253
  chr2:10687534-10687636
  hypo

SEQ ID NO: 299198 - DNA, 117 bp, Homo sapiens; identical to SEQ ID NO: 207826
  chr2:10732499-10732616
  hypo

SEQ ID NO: 299199 - DNA, 205 bp, Homo sapiens; identical to SEQ ID NO: 207827
  chr2:10742496-10742701
  hypo

SEQ ID NO: 299200 - DNA, 424 bp, Homo sapiens; identical to SEQ ID NO: 279512
  chr2:10862101-10862525
  hypo

SEQ ID NO: 299201 - DNA, 524 bp, Homo sapiens; identical to SEQ ID NO: 250256
  chr2:10897430-10897954
  hypo

SEQ ID NO: 299202 - DNA, 127 bp, Homo sapiens; identical to SEQ ID NO: 250257
  chr2:10916395-10916522
  hypo

SEQ ID NO: 299203 - DNA, 691 bp, Homo sapiens; identical to SEQ ID NO: 250258
  chr2:10917385-10918076
  hypo

SEQ ID NO: 299204 - DNA, 58 bp, Homo sapiens; identical to SEQ ID NO: 250259
  chr2:10920052-10920110
  hypo

SEQ ID NO: 299205 - DNA, 95 bp, Homo sapiens; identical to SEQ ID NO: 207829
  chr2:10926448-10926543
  hypo

SEQ ID NO: 299206 - DNA, 207 bp, Homo sapiens; identical to SEQ ID NO: 279513
  chr2:10953101-10953308
  hypo

SEQ ID NO: 299207 - DNA, 52 bp, Homo sapiens; identical to SEQ ID NO: 279514
  chr2:10953334-10953386
  hypo

SEQ ID NO: 299208 - DNA, 32 bp, Homo sapiens; identical to SEQ ID NO: 250262
  chr2:11030196-11030228
  hypo

SEQ ID NO: 299209 - DNA, 114 bp, Homo sapiens; identical to SEQ ID NO: 207830
  chr2:11053788-11053902
  hypo

SEQ ID NO: 299210 - DNA, 206 bp, Homo sapiens; identical to SEQ ID NO: 250264
  chr2:11105561-11105767
  hypo

SEQ ID NO: 299211 - DNA, 241 bp, Homo sapiens; identical to SEQ ID NO: 250265
  chr2:11238183-11238424
  hypo

SEQ ID NO: 299212 - DNA, 68 bp, Homo sapiens
  chr2:11311987-11312055
  hypo
ctggcctcttttgcttttttaacaaatcgactcgtgactttctcacattttatctgcaaacagaatct

SEQ ID NO: 299213 - DNA, 39 bp, Homo sapiens
  chr2:11312087-11312126
  hypo
cacagctccagtgtctgtggaagacgagagactcaggaa

SEQ ID NO: 299214 - DNA, 67 bp, Homo sapiens
  chr2:11487872-11487939
  hypo
aagtgctgggattacaggggtgagtcacagagccgggcctcaacctggcctttaaaaagacgctacc

SEQ ID NO: 299215 - DNA, 69 bp, Homo sapiens; identical to SEQ ID NO: 250268
  chr2:11489277-11489346
  hypo

SEQ ID NO: 299216 - DNA, 40 bp, Homo sapiens; identical to SEQ ID NO: 250269
  chr2:11536462-11536502
  hypo

SEQ ID NO: 299217 - DNA, 79 bp, Homo sapiens; identical to SEQ ID NO: 250270
  chr2:11702174-11702253
  hypo

SEQ ID NO: 299218 - DNA, 250 bp, Homo sapiens; identical to SEQ ID NO: 250271
  chr2:11774323-11774573
  hypo

SEQ ID NO: 299219 - DNA, 213 bp, Homo sapiens; identical to SEQ ID NO: 250272
  chr2:11774874-11775087
  hypo

SEQ ID NO: 299220 - DNA, 145 bp, Homo sapiens; identical to SEQ ID NO: 250273
  chr2:11929296-11929441
  hypo

SEQ ID NO: 299221 - DNA, 298 bp, Homo sapiens; identical to SEQ ID NO: 250274
  chr2:11965001-11965299
  hypo

SEQ ID NO: 299222 - DNA, 260 bp, Homo sapiens; identical to SEQ ID NO: 207831
  chr2:12005882-12006142
  hypo

SEQ ID NO: 299223 - DNA, 157 bp, Homo sapiens; identical to SEQ ID NO: 250276
  chr2:12078414-12078571
  hypo

SEQ ID NO: 299224 - DNA, 142 bp, Homo sapiens; identical to SEQ ID NO: 207832
  chr2:12103332-12103474
  hypo

SEQ ID NO: 299225 - DNA, 145 bp, Homo sapiens; identical to SEQ ID NO: 250278
  chr2:12145187-12145332
  hypo

SEQ ID NO: 299226 - DNA, 160 bp, Homo sapiens
  chr2:12245941-12246101
  hypo
ttttctggcagtcacggaagtgtttctatatttattatcattacaactctacagggcaggttttgctaaccggttttacagtgggaaacctatagctttagagatttaggcaaggtacacgtagaaaatgtcagagctggtggggtggagggtggaagtc

SEQ ID NO: 299227 - DNA, 41 bp, Homo sapiens; identical to SEQ ID NO: 250280
  chr2:12297695-12297736
  hypo

SEQ ID NO: 299228 - DNA, 147 bp, Homo sapiens; identical to SEQ ID NO: 250281
  chr2:12458692-12458839
  hypo

SEQ ID NO: 299229 - DNA, 158 bp, Homo sapiens; identical to SEQ ID NO: 250282
  chr2:12630982-12631140
  hypo

SEQ ID NO: 299230 - DNA, 38 bp, Homo sapiens; identical to SEQ ID NO: 250283
  chr2:12631200-12631238
  hypo

SEQ ID NO: 299231 - DNA, 182 bp, Homo sapiens; identical to SEQ ID NO: 279524
  chr2:12857962-12858144
  hypo

SEQ ID NO: 299232 - DNA, 96 bp, Homo sapiens; identical to SEQ ID NO: 250284
  chr2:14711510-14711606
  hypo

SEQ ID NO: 299233 - DNA, 255 bp, Homo sapiens; identical to SEQ ID NO: 198088
  chr2:14774684-14774939
  hypo

SEQ ID NO: 299234 - DNA, 42 bp, Homo sapiens; identical to SEQ ID NO: 250285
  chr2:14901341-14901383
  hypo

SEQ ID NO: 299235 - DNA, 38 bp, Homo sapiens; identical to SEQ ID NO: 250286
  chr2:14961050-14961088
  hypo

SEQ ID NO: 299236 - DNA, 37 bp, Homo sapiens; identical to SEQ ID NO: 207835
  chr2:14961328-14961365
  hypo

SEQ ID NO: 299237 - DNA, 179 bp, Homo sapiens; identical to SEQ ID NO: 250288
  chr2:15032512-15032691
  hypo

SEQ ID NO: 299238 - DNA, 87 bp, Homo sapiens; identical to SEQ ID NO: 250289
  chr2:15084089-15084176
  hypo

SEQ ID NO: 299239 - DNA, 453 bp, Homo sapiens; identical to SEQ ID NO: 207836
  chr2:15307076-15307529
  hypo

SEQ ID NO: 299240 - DNA, 90 bp, Homo sapiens; identical to SEQ ID NO: 207837
  chr2:15474600-15474690
  hypo

SEQ ID NO: 299241 - DNA, 100 bp, Homo sapiens; identical to SEQ ID NO: 250292
  chr2:15783082-15783182
  hypo

SEQ ID NO: 299242 - DNA, 45 bp, Homo sapiens; identical to SEQ ID NO: 250293
  chr2:15830329-15830374
  hypo

SEQ ID NO: 299243 - DNA, 74 bp, Homo sapiens; identical to SEQ ID NO: 250294
  chr2:15950473-15950547
  hypo

SEQ ID NO: 299244 - DNA, 312 bp, Homo sapiens; identical to SEQ ID NO: 250295
  chr2:15982989-15983301
  hypo

SEQ ID NO: 299245 - DNA, 231 bp, Homo sapiens; identical to SEQ ID NO: 198090
  chr2:16079905-16080136
  hypo

SEQ ID NO: 299246 - DNA, 87 bp, Homo sapiens; identical to SEQ ID NO: 105506
  chr2:16080304-16080391
  hypo

SEQ ID NO: 299247 - DNA, 168 bp, Homo sapiens; identical to SEQ ID NO: 279534
  chr2:16080606-16080774
  hypo

SEQ ID NO: 299248 - DNA, 42 bp, Homo sapiens; identical to SEQ ID NO: 250296
  chr2:16105582-16105624
  hypo

SEQ ID NO: 299249 - DNA, 434 bp, Homo sapiens; identical to SEQ ID NO: 250297
  chr2:16124558-16124992
  hypo

SEQ ID NO: 299250 - DNA, 42 bp, Homo sapiens; identical to SEQ ID NO: 207841
  chr2:16274079-16274121
  hypo

SEQ ID NO: 299251 - DNA, 144 bp, Homo sapiens; identical to SEQ ID NO: 250299
  chr2:16826647-16826791
  hypo

SEQ ID NO: 299252 - DNA, 39 bp, Homo sapiens; identical to SEQ ID NO: 250300
  chr2:17090481-17090520
  hypo

SEQ ID NO: 299253 - DNA, 68 bp, Homo sapiens; identical to SEQ ID NO: 207842
  chr2:17830610-17830678
  hypo

SEQ ID NO: 299254 - DNA, 254 bp, Homo sapiens; identical to SEQ ID NO: 250302
  chr2:17998149-17998403
  hypo

SEQ ID NO: 299255 - DNA, 284 bp, Homo sapiens; identical to SEQ ID NO: 250303
  chr2:18112741-18113025
  hypo

SEQ ID NO: 299256 - DNA, 63 bp, Homo sapiens; identical to SEQ ID NO: 250304
  chr2:20001578-20001641
  hypo

SEQ ID NO: 299257 - DNA, 119 bp, Homo sapiens; identical to SEQ ID NO: 198102
  chr2:20101402-20101521
  hypo

SEQ ID NO: 299258 - DNA, 169 bp, Homo sapiens; identical to SEQ ID NO: 207844
  chr2:20111757-20111926
  hypo

SEQ ID NO: 299259 - DNA, 737 bp, Homo sapiens; identical to SEQ ID NO: 279562
  chr2:20424156-20424893
  hypo

SEQ ID NO: 299260 - DNA, 107 bp, Homo sapiens; identical to SEQ ID NO: 207846
  chr2:20456228-20456335
  hypo

SEQ ID NO: 299261 - DNA, 81 bp, Homo sapiens; identical to SEQ ID NO: 250308
  chr2:20521041-20521122
  hypo

SEQ ID NO: 299262 - DNA, 120 bp, Homo sapiens; identical to SEQ ID NO: 250309
  chr2:20544755-20544875
  hypo

SEQ ID NO: 299263 - DNA, 276 bp, Homo sapiens; identical to SEQ ID NO: 207847
  chr2:20574694-20574970
  hypo

SEQ ID NO: 299264 - DNA, 163 bp, Homo sapiens; identical to SEQ ID NO: 207848
  chr2:20594843-20595006
  hypo

SEQ ID NO: 299265 - DNA, 95 bp, Homo sapiens; identical to SEQ ID NO: 207849
  chr2:20642251-20642346
  hypo

SEQ ID NO: 299266 - DNA, 361 bp, Homo sapiens; identical to SEQ ID NO: 198108
  chr2:20646413-20646774
  hypo

SEQ ID NO: 299267 - DNA, 423 bp, Homo sapiens; identical to SEQ ID NO: 198109
  chr2:20646843-20647266
  hypo

SEQ ID NO: 299268 - DNA, 139 bp, Homo sapiens; identical to SEQ ID NO: 207852
  chr2:20666559-20666698
  hypo

SEQ ID NO: 299269 - DNA, 48 bp, Homo sapiens; identical to SEQ ID NO: 250314
  chr2:20705785-20705833
  hypo

SEQ ID NO: 299270 - DNA, 533 bp, Homo sapiens; identical to SEQ ID NO: 250315
  chr2:20841042-20841575
  hypo

SEQ ID NO: 299271 - DNA, 64 bp, Homo sapiens; identical to SEQ ID NO: 250316
  chr2:20894621-20894685
  hypo

SEQ ID NO: 299272 - DNA, 162 bp, Homo sapiens; identical to SEQ ID NO: 250317
  chr2:20965392-20965554
  hypo

SEQ ID NO: 299273 - DNA, 101 bp, Homo sapiens; identical to SEQ ID NO: 250318
  chr2:21079879-21079980
  hypo

SEQ ID NO: 299274 - DNA, 130 bp, Homo sapiens; identical to SEQ ID NO: 250319
  chr2:21346724-21346854
  hypo

SEQ ID NO: 299275 - DNA, 299 bp, Homo sapiens
  chr2:23547040-23547339
  hypo
gcaaacacgcggagtgccagatctcccaacacaaacatggtcccaagcctggcgcacctggattgggcttgggatttttaagccaacaaatggggtgggagacagggaaagagagggccgggaagaaaaaccacaggctcccagaatccaaaggaaagtggcatcctcacccgatgagcagggtctggcacagggctgagcacatgacagccagtaagtctctgctgaaggatgcctgaaatctgcgcggttctaccaccgaaactaatcccgactatgtctcccgcctcctccctaca

SEQ ID NO: 299276 - DNA, 72 bp, Homo sapiens; identical to SEQ ID NO: 250321
  chr2:23573445-23573517
  hypo

SEQ ID NO: 299277 - DNA, 109 bp, Homo sapiens; identical to SEQ ID NO: 250322
  chr2:23650984-23651093
  hypo

SEQ ID NO: 299278 - DNA, 79 bp, Homo sapiens; identical to SEQ ID NO: 250323
  chr2:23679398-23679477
  hypo

SEQ ID NO: 299279 - DNA, 434 bp, Homo sapiens; identical to SEQ ID NO: 250324
  chr2:23746911-23747345
  hypo

SEQ ID NO: 299280 - DNA, 355 bp, Homo sapiens; identical to SEQ ID NO: 207855
  chr2:23785004-23785359
  hypo

SEQ ID NO: 299281 - DNA, 214 bp, Homo sapiens; identical to SEQ ID NO: 207856
  chr2:23793022-23793236
  hypo

SEQ ID NO: 299282 - DNA, 76 bp, Homo sapiens; identical to SEQ ID NO: 250327
  chr2:23795841-23795917
  hypo

SEQ ID NO: 299283 - DNA, 150 bp, Homo sapiens; identical to SEQ ID NO: 250328
  chr2:23798774-23798924
  hypo

SEQ ID NO: 299284 - DNA, 206 bp, Homo sapiens; identical to SEQ ID NO: 250329
  chr2:23807140-23807346
  hypo

SEQ ID NO: 299285 - DNA, 175 bp, Homo sapiens; identical to SEQ ID NO: 250330
  chr2:23841357-23841532
  hypo

SEQ ID NO: 299286 - DNA, 210 bp, Homo sapiens; identical to SEQ ID NO: 207857
  chr2:23842953-23843163
  hypo

SEQ ID NO: 299287 - DNA, 179 bp, Homo sapiens; identical to SEQ ID NO: 250332
  chr2:23850377-23850556
  hypo

SEQ ID NO: 299288 - DNA, 35 bp, Homo sapiens; identical to SEQ ID NO: 250333
  chr2:23863678-23863713
  hypo

SEQ ID NO: 299289 - DNA, 65 bp, Homo sapiens; identical to SEQ ID NO: 250334
  chr2:23865088-23865153
  hypo

SEQ ID NO: 299290 - DNA, 44 bp, Homo sapiens; identical to SEQ ID NO: 207858
  chr2:23893204-23893248
  hypo

SEQ ID NO: 299291 - DNA, 149 bp, Homo sapiens; identical to SEQ ID NO: 250336
  chr2:23918665-23918814
  hypo

SEQ ID NO: 299292 - DNA, 174 bp, Homo sapiens; identical to SEQ ID NO: 207859
  chr2:24060295-24060469
  hypo

SEQ ID NO: 299293 - DNA, 98 bp, Homo sapiens; identical to SEQ ID NO: 250338
  chr2:24160944-24161042
  hypo

SEQ ID NO: 299294 - DNA, 97 bp, Homo sapiens; identical to SEQ ID NO: 207860
  chr2:24240164-24240261
  hypo

SEQ ID NO: 299295 - DNA, 39 bp, Homo sapiens; identical to SEQ ID NO: 207861
  chr2:24279835-24279874
  hypo

SEQ ID NO: 299296 - DNA, 34 bp, Homo sapiens; identical to SEQ ID NO: 250341
  chr2:24307975-24308009
  hypo

SEQ ID NO: 299297 - DNA, 38 bp, Homo sapiens; identical to SEQ ID NO: 250342
  chr2:24318006-24318044
  hypo

SEQ ID NO: 299298 - DNA, 214 bp, Homo sapiens; identical to SEQ ID NO: 207862
  chr2:24443622-24443836
  hypo

SEQ ID NO: 299299 - DNA, 44 bp, Homo sapiens; identical to SEQ ID NO: 250344
  chr2:24492774-24492818
  hypo

SEQ ID NO: 299300 - DNA, 305 bp, Homo sapiens; identical to SEQ ID NO: 207863
  chr2:24584025-24584330
  hypo

SEQ ID NO: 299301 - DNA, 40 bp, Homo sapiens; identical to SEQ ID NO: 250346
  chr2:24678878-24678918
  hypo

SEQ ID NO: 299302 - DNA, 256 bp, Homo sapiens; identical to SEQ ID NO: 221689
  chr2:24714925-24715181
  hypo

SEQ ID NO: 299303 - DNA, 36 bp, Homo sapiens; identical to SEQ ID NO: 207864
  chr2:24763333-24763369
  hypo

SEQ ID NO: 299304 - DNA, 43 bp, Homo sapiens; identical to SEQ ID NO: 250348
  chr2:24844611-24844654
  hypo

SEQ ID NO: 299305 - DNA, 155 bp, Homo sapiens; identical to SEQ ID NO: 250349
  chr2:25034777-25034932
  hypo

SEQ ID NO: 299306 - DNA, 516 bp, Homo sapiens; identical to SEQ ID NO: 207865
  chr2:25044265-25044781
  hypo

SEQ ID NO: 299307 - DNA, 205 bp, Homo sapiens; identical to SEQ ID NO: 207866
  chr2:25047257-25047462
  hypo

SEQ ID NO: 299308 - DNA, 348 bp, Homo sapiens; identical to SEQ ID NO: 250352
  chr2:25057323-25057671
  hypo

SEQ ID NO: 299309 - DNA, 275 bp, Homo sapiens; identical to SEQ ID NO: 207868
  chr2:25075399-25075674
  hypo

SEQ ID NO: 299310 - DNA, 38 bp, Homo sapiens; identical to SEQ ID NO: 250354
  chr2:25141802-25141840
  hypo

SEQ ID NO: 299311 - DNA, 79 bp, Homo sapiens; identical to SEQ ID NO: 198120
  chr2:25265055-25265134
  hypo

SEQ ID NO: 299312 - DNA, 59 bp, Homo sapiens; identical to SEQ ID NO: 207870
  chr2:25369951-25370010
  hypo

SEQ ID NO: 299313 - DNA, 32 bp, Homo sapiens; identical to SEQ ID NO: 250356
  chr2:25374806-25374838
  hypo

SEQ ID NO: 299314 - DNA, 120 bp, Homo sapiens; identical to SEQ ID NO: 198121
  chr2:25440006-25440126
  hypo

SEQ ID NO: 299315 - DNA, 149 bp, Homo sapiens; identical to SEQ ID NO: 198122
  chr2:25457152-25457301
  hypo

SEQ ID NO: 299316 - DNA, 139 bp, Homo sapiens; identical to SEQ ID NO: 198123
  chr2:25458563-25458702
  hypo

SEQ ID NO: 299317 - DNA, 95 bp, Homo sapiens; identical to SEQ ID NO: 198124
  chr2:25459791-25459886
  hypo

SEQ ID NO: 299318 - DNA, 108 bp, Homo sapiens; identical to SEQ ID NO: 198125
  chr2:25461984-25462092
  hypo

SEQ ID NO: 299319 - DNA, 448 bp, Homo sapiens; identical to SEQ ID NO: 198126
  chr2:25463164-25463612
  hypo

SEQ ID NO: 299320 - DNA, 172 bp, Homo sapiens; identical to SEQ ID NO: 198127
  chr2:25464417-25464589
  hypo

SEQ ID NO: 299321 - DNA, 774 bp, Homo sapiens; identical to SEQ ID NO: 198128
  chr2:25466755-25467529
  hypo

SEQ ID NO: 299322 - DNA, 98 bp, Homo sapiens; identical to SEQ ID NO: 198129
  chr2:25468111-25468209
  hypo

SEQ ID NO: 299323 - DNA, 310 bp, Homo sapiens; identical to SEQ ID NO: 198130
  chr2:25468877-25469187
  hypo

SEQ ID NO: 299324 - DNA, 173 bp, Homo sapiens; identical to SEQ ID NO: 198131
  chr2:25469474-25469647
  hypo

SEQ ID NO: 299325 - DNA, 123 bp, Homo sapiens; identical to SEQ ID NO: 198132
  chr2:25469906-25470029
  hypo

SEQ ID NO: 299326 - DNA, 162 bp, Homo sapiens; identical to SEQ ID NO: 198133
  chr2:25470449-25470611
  hypo

SEQ ID NO: 299327 - DNA, 192 bp, Homo sapiens; identical to SEQ ID NO: 198134
  chr2:25470892-25471084
  hypo

SEQ ID NO: 299328 - DNA, 90 bp, Homo sapiens; identical to SEQ ID NO: 198135
  chr2:25497816-25497906
  hypo

SEQ ID NO: 299329 - DNA, 237 bp, Homo sapiens; identical to SEQ ID NO: 198136
  chr2:25505304-25505541
  hypo

SEQ ID NO: 299330 - DNA, 188 bp, Homo sapiens; identical to SEQ ID NO: 250358
  chr2:25533430-25533618
  hypo

SEQ ID NO: 299331 - DNA, 100 bp, Homo sapiens; identical to SEQ ID NO: 250359
  chr2:25535161-25535261
  hypo

SEQ ID NO: 299332 - DNA, 161 bp, Homo sapiens; identical to SEQ ID NO: 250360
  chr2:25536307-25536468
  hypo

SEQ ID NO: 299333 - DNA, 180 bp, Homo sapiens; identical to SEQ ID NO: 207887
  chr2:25536757-25536937
  hypo

SEQ ID NO: 299334 - DNA, 84 bp, Homo sapiens; identical to SEQ ID NO: 250362
  chr2:25551561-25551645
  hypo

SEQ ID NO: 299335 - DNA, 70 bp, Homo sapiens; identical to SEQ ID NO: 250363
  chr2:25586741-25586811
  hypo

SEQ ID NO: 299336 - DNA, 119 bp, Homo sapiens; identical to SEQ ID NO: 250364
  chr2:25623182-25623301
  hypo

SEQ ID NO: 299337 - DNA, 89 bp, Homo sapiens; identical to SEQ ID NO: 207888
  chr2:25627711-25627800
  hypo

SEQ ID NO: 299338 - DNA, 129 bp, Homo sapiens; identical to SEQ ID NO: 250366
  chr2:25656662-25656791
  hypo

SEQ ID NO: 299339 - DNA, 209 bp, Homo sapiens; identical to SEQ ID NO: 250367
  chr2:25766960-25767169
  hypo

SEQ ID NO: 299340 - DNA, 44 bp, Homo sapiens; identical to SEQ ID NO: 250368
  chr2:25924790-25924834
  hypo

SEQ ID NO: 299341 - DNA, 40 bp, Homo sapiens; identical to SEQ ID NO: 207889
  chr2:25980217-25980257
  hypo

SEQ ID NO: 299342 - DNA, 104 bp, Homo sapiens; identical to SEQ ID NO: 207890
  chr2:26027551-26027655
  hypo

SEQ ID NO: 299343 - DNA, 99 bp, Homo sapiens; identical to SEQ ID NO: 207891
  chr2:26153169-26153268
  hypo

SEQ ID NO: 299344 - DNA, 249 bp, Homo sapiens; identical to SEQ ID NO: 250372
  chr2:26204216-26204465
  hypo

SEQ ID NO: 299345 - DNA, 115 bp, Homo sapiens; identical to SEQ ID NO: 250373
  chr2:26217601-26217716
  hypo

SEQ ID NO: 299346 - DNA, 37 bp, Homo sapiens; identical to SEQ ID NO: 250374
  chr2:26320144-26320181
  hypo

SEQ ID NO: 299347 - DNA, 163 bp, Homo sapiens; identical to SEQ ID NO: 250375
  chr2:26362293-26362456
  hypo

SEQ ID NO: 299348 - DNA, 330 bp, Homo sapiens; identical to SEQ ID NO: 221709
  chr2:26395999-26396329
  hypo

SEQ ID NO: 299349 - DNA, 31 bp, Homo sapiens; identical to SEQ ID NO: 250377
  chr2:26405760-26405791
  hypo

SEQ ID NO: 299350 - DNA, 171 bp, Homo sapiens; identical to SEQ ID NO: 207893
  chr2:26524653-26524824
  hypo

SEQ ID NO: 299351 - DNA, 200 bp, Homo sapiens; identical to SEQ ID NO: 250379
  chr2:26525985-26526185
  hypo

SEQ ID NO: 299352 - DNA, 94 bp, Homo sapiens; identical to SEQ ID NO: 250380
  chr2:26527933-26528027
  hypo

SEQ ID NO: 299353 - DNA, 33 bp, Homo sapiens; identical to SEQ ID NO: 250381
  chr2:26528087-26528120
  hypo

SEQ ID NO: 299354 - DNA, 59 bp, Homo sapiens; identical to SEQ ID NO: 250382
  chr2:26528393-26528452
  hypo

SEQ ID NO: 299355 - DNA, 175 bp, Homo sapiens; identical to SEQ ID NO: 207894
  chr2:26534837-26535012
  hypo

SEQ ID NO: 299356 - DNA, 193 bp, Homo sapiens; identical to SEQ ID NO: 250384
  chr2:26535371-26535564
  hypo

SEQ ID NO: 299357 - DNA, 112 bp, Homo sapiens; identical to SEQ ID NO: 207895
  chr2:26541946-26542058
  hypo

SEQ ID NO: 299358 - DNA, 43 bp, Homo sapiens; identical to SEQ ID NO: 250386
  chr2:26566584-26566627
  hypo

SEQ ID NO: 299359 - DNA, 63 bp, Homo sapiens; identical to SEQ ID NO: 250387
  chr2:26688524-26688587
  hypo

SEQ ID NO: 299360 - DNA, 131 bp, Homo sapiens; identical to SEQ ID NO: 207896
  chr2:26706036-26706167
  hypo

SEQ ID NO: 299361 - DNA, 92 bp, Homo sapiens; identical to SEQ ID NO: 250389
  chr2:26788281-26788373
  hypo

SEQ ID NO: 299362 - DNA, 203 bp, Homo sapiens; identical to SEQ ID NO: 250390
  chr2:26800292-26800495
  hypo

SEQ ID NO: 299363 - DNA, 94 bp, Homo sapiens; identical to SEQ ID NO: 207897
  chr2:26832824-26832918
  hypo

SEQ ID NO: 299364 - DNA, 187 bp, Homo sapiens; identical to SEQ ID NO: 250392
  chr2:26965249-26965436
  hypo

SEQ ID NO: 299365 - DNA, 461 bp, Homo sapiens; identical to SEQ ID NO: 250393
  chr2:26986220-26986681
  hypo

SEQ ID NO: 299366 - DNA, 120 bp, Homo sapiens; identical to SEQ ID NO: 207899
  chr2:27007230-27007350
  hypo

SEQ ID NO: 299367 - DNA, 120 bp, Homo sapiens; identical to SEQ ID NO: 250395
  chr2:27007590-27007710
  hypo

SEQ ID NO: 299368 - DNA, 233 bp, Homo sapiens; identical to SEQ ID NO: 279619
  chr2:27071919-27072152
  hypo

SEQ ID NO: 299369 - DNA, 42 bp, Homo sapiens; identical to SEQ ID NO: 250396
  chr2:27224548-27224590
  hypo

SEQ ID NO: 299370 - DNA, 247 bp, Homo sapiens; identical to SEQ ID NO: 250397
  chr2:27303537-27303784
  hypo

SEQ ID NO: 299371 - DNA, 250 bp, Homo sapiens; identical to SEQ ID NO: 198140
  chr2:27308893-27309143
  hypo

SEQ ID NO: 299372 - DNA, 111 bp, Homo sapiens; identical to SEQ ID NO: 1396
  chr2:27309206-27309317
  hypo

SEQ ID NO: 299373 - DNA, 68 bp, Homo sapiens
  chr2:27354515-27354583
  hypo
gcctgccctgccccaatgactcacgccgtgagggcaacagatgcagctggcaacgactgtccacagcc

SEQ ID NO: 299374 - DNA, 135 bp, Homo sapiens; identical to SEQ ID NO: 207902
  chr2:27433170-27433305
  hypo

SEQ ID NO: 299375 - DNA, 226 bp, Homo sapiens; identical to SEQ ID NO: 279632
  chr2:27485733-27485959
  hypo

SEQ ID NO: 299376 - DNA, 141 bp, Homo sapiens; identical to SEQ ID NO: 250400
  chr2:27498159-27498300
  hypo

SEQ ID NO: 299377 - DNA, 71 bp, Homo sapiens; identical to SEQ ID NO: 250401
  chr2:27538034-27538105
  hypo

SEQ ID NO: 299378 - DNA, 300 bp, Homo sapiens; identical to SEQ ID NO: 250402
  chr2:27601407-27601707
  hypo

SEQ ID NO: 299379 - DNA, 241 bp, Homo sapiens; identical to SEQ ID NO: 250403
  chr2:27668571-27668812
  hypo

SEQ ID NO: 299380 - DNA, 208 bp, Homo sapiens; identical to SEQ ID NO: 207904
  chr2:27703854-27704062
  hypo

SEQ ID NO: 299381 - DNA, 42 bp, Homo sapiens; identical to SEQ ID NO: 250405
  chr2:27704758-27704800
  hypo

SEQ ID NO: 299382 - DNA, 93 bp, Homo sapiens; identical to SEQ ID NO: 250406
  chr2:27711608-27711701
  hypo

SEQ ID NO: 299383 - DNA, 35 bp, Homo sapiens; identical to SEQ ID NO: 250407
  chr2:27764227-27764262
  hypo

SEQ ID NO: 299384 - DNA, 91 bp, Homo sapiens; identical to SEQ ID NO: 221715
  chr2:27937851-27937942
  hypo

SEQ ID NO: 299385 - DNA, 72 bp, Homo sapiens; identical to SEQ ID NO: 279642
  chr2:27938253-27938325
  hypo

SEQ ID NO: 299386 - DNA, 32 bp, Homo sapiens; identical to SEQ ID NO: 250408
  chr2:27993512-27993544
  hypo

SEQ ID NO: 299387 - DNA, 284 bp, Homo sapiens; identical to SEQ ID NO: 207905
  chr2:28065675-28065959
  hypo

SEQ ID NO: 299388 - DNA, 34 bp, Homo sapiens; identical to SEQ ID NO: 250410
  chr2:28269009-28269043
  hypo

SEQ ID NO: 299389 - DNA, 50 bp, Homo sapiens; identical to SEQ ID NO: 250411
  chr2:28572403-28572453
  hypo

SEQ ID NO: 299390 - DNA, 149 bp, Homo sapiens; identical to SEQ ID NO: 207906
  chr2:28586480-28586629
  hypo

SEQ ID NO: 299391 - DNA, 236 bp, Homo sapiens
  chr2:28676717-28676953
  hypo
tgtatgtgtgtgcgcgcgcgtgcatgtgcgtgtgcataggtatgattcagggagacataagggactttggcaaagtcaggaggatgtgggggctaagcaaacaccactttgaagacttctctttggcatggggtgtgacaagccaggtctggtgccttgttgaggaaagggagaaaactctgagttggtttttgtgttcctcaaaccagtttgcccacatccttggcatcatctgt

SEQ ID NO: 299392 - DNA, 251 bp, Homo sapiens; identical to SEQ ID NO: 250414
  chr2:28819617-28819868
  hypo

SEQ ID NO: 299393 - DNA, 34 bp, Homo sapiens; identical to SEQ ID NO: 207907
  chr2:28919660-28919694
  hypo

SEQ ID NO: 299394 - DNA, 71 bp, Homo sapiens; identical to SEQ ID NO: 198145
  chr2:29033265-29033336
  hypo

SEQ ID NO: 299395 - DNA, 44 bp, Homo sapiens; identical to SEQ ID NO: 250416
  chr2:29062640-29062684
  hypo

SEQ ID NO: 299396 - DNA, 41 bp, Homo sapiens; identical to SEQ ID NO: 198146
  chr2:29337889-29337930
  hypo

SEQ ID NO: 299397 - DNA, 102 bp, Homo sapiens; identical to SEQ ID NO: 207910
  chr2:29469962-29470064
  hypo

SEQ ID NO: 299398 - DNA, 223 bp, Homo sapiens; identical to SEQ ID NO: 279657
  chr2:30369368-30369591
  hypo

SEQ ID NO: 299399 - DNA, 47 bp, Homo sapiens; identical to SEQ ID NO: 198153
  chr2:30453520-30453567
  hypo

SEQ ID NO: 299400 - DNA, 210 bp, Homo sapiens; identical to SEQ ID NO: 250419
  chr2:30480379-30480589
  hypo

SEQ ID NO: 299401 - DNA, 399 bp, Homo sapiens; identical to SEQ ID NO: 250420
  chr2:30481975-30482374
  hypo

SEQ ID NO: 299402 - DNA, 194 bp, Homo sapiens; identical to SEQ ID NO: 207914
  chr2:30495297-30495491
  hypo

SEQ ID NO: 299403 - DNA, 266 bp, Homo sapiens; identical to SEQ ID NO: 207915
  chr2:30525798-30526064
  hypo

SEQ ID NO: 299404 - DNA, 36 bp, Homo sapiens; identical to SEQ ID NO: 250423
  chr2:30587093-30587129
  hypo

SEQ ID NO: 299405 - DNA, 31 bp, Homo sapiens; identical to SEQ ID NO: 250424
  chr2:30634157-30634188
  hypo

SEQ ID NO: 299406 - DNA, 90 bp, Homo sapiens; identical to SEQ ID NO: 250425
  chr2:30794970-30795060
  hypo

SEQ ID NO: 299407 - DNA, 161 bp, Homo sapiens; identical to SEQ ID NO: 250426
  chr2:30863077-30863238
  hypo

SEQ ID NO: 299408 - DNA, 104 bp, Homo sapiens; identical to SEQ ID NO: 250427
  chr2:30863744-30863848
  hypo

SEQ ID NO: 299409 - DNA, 121 bp, Homo sapiens; identical to SEQ ID NO: 250428
  chr2:30982467-30982588
  hypo

SEQ ID NO: 299410 - DNA, 68 bp, Homo sapiens; identical to SEQ ID NO: 198154
  chr2:31361021-31361089
  hypo

SEQ ID NO: 299411 - DNA, 178 bp, Homo sapiens; identical to SEQ ID NO: 198155
  chr2:31361118-31361296
  hypo

SEQ ID NO: 299412 - DNA, 84 bp, Homo sapiens; identical to SEQ ID NO: 198156
  chr2:31361690-31361774
  hypo

SEQ ID NO: 299413 - DNA, 265 bp, Homo sapiens; identical to SEQ ID NO: 207919
  chr2:31477235-31477500
  hypo

SEQ ID NO: 299414 - DNA, 46 bp, Homo sapiens; identical to SEQ ID NO: 250430
  chr2:31480289-31480335
  hypo

SEQ ID NO: 299415 - DNA, 111 bp, Homo sapiens; identical to SEQ ID NO: 250431
  chr2:31480365-31480476
  hypo

SEQ ID NO: 299416 - DNA, 95 bp, Homo sapiens; identical to SEQ ID NO: 207920
  chr2:31550128-31550223
  hypo

SEQ ID NO: 299417 - DNA, 95 bp, Homo sapiens; identical to SEQ ID NO: 207921
  chr2:31551361-31551456
  hypo

SEQ ID NO: 299418 - DNA, 90 bp, Homo sapiens; identical to SEQ ID NO: 250434
  chr2:31560534-31560624
  hypo

SEQ ID NO: 299419 - DNA, 231 bp, Homo sapiens; identical to SEQ ID NO: 207922
  chr2:32142425-32142656
  hypo

SEQ ID NO: 299420 - DNA, 120 bp, Homo sapiens; identical to SEQ ID NO: 207923
  chr2:32244332-32244452
  hypo

SEQ ID NO: 299421 - DNA, 120 bp, Homo sapiens; identical to SEQ ID NO: 207924
  chr2:32291347-32291467
  hypo

SEQ ID NO: 299422 - DNA, 40 bp, Homo sapiens; identical to SEQ ID NO: 250439
  chr2:32315098-32315138
  hypo

SEQ ID NO: 299423 - DNA, 104 bp, Homo sapiens; identical to SEQ ID NO: 250440
  chr2:32361185-32361289
  hypo

SEQ ID NO: 299424 - DNA, 78 bp, Homo sapiens; identical to SEQ ID NO: 250441
  chr2:32367730-32367808
  hypo

SEQ ID NO: 299425 - DNA, 36 bp, Homo sapiens; identical to SEQ ID NO: 250444
  chr2:32798532-32798568
  hypo

SEQ ID NO: 299426 - DNA, 44 bp, Homo sapiens; identical to SEQ ID NO: 250445
  chr2:32980697-32980741
  hypo

SEQ ID NO: 299427 - DNA, 116 bp, Homo sapiens; identical to SEQ ID NO: 250446
  chr2:32983458-32983574
  hypo

SEQ ID NO: 299428 - DNA, 45 bp, Homo sapiens; identical to SEQ ID NO: 250447
  chr2:33215245-33215290
  hypo

SEQ ID NO: 299429 - DNA, 240 bp, Homo sapiens; identical to SEQ ID NO: 207925
  chr2:33281381-33281621
  hypo

SEQ ID NO: 299430 - DNA, 37 bp, Homo sapiens; identical to SEQ ID NO: 250449
  chr2:33304098-33304135
  hypo

SEQ ID NO: 299431 - DNA, 37 bp, Homo sapiens; identical to SEQ ID NO: 250450
  chr2:33317210-33317247
  hypo

SEQ ID NO: 299432 - DNA, 58 bp, Homo sapiens; identical to SEQ ID NO: 250451
  chr2:33346710-33346768
  hypo

SEQ ID NO: 299433 - DNA, 34 bp, Homo sapiens; identical to SEQ ID NO: 250452
  chr2:33513604-33513638
  hypo

SEQ ID NO: 299434 - DNA, 156 bp, Homo sapiens; identical to SEQ ID NO: 250453
  chr2:33534845-33535001
  hypo

SEQ ID NO: 299435 - DNA, 38 bp, Homo sapiens; identical to SEQ ID NO: 250454
  chr2:33637935-33637973
  hypo

SEQ ID NO: 299436 - DNA, 302 bp, Homo sapiens; identical to SEQ ID NO: 250455
  chr2:33952402-33952704
  hypo

SEQ ID NO: 299437 - DNA, 75 bp, Homo sapiens; identical to SEQ ID NO: 250456
  chr2:34065553-34065628
  hypo

SEQ ID NO: 299438 - DNA, 86 bp, Homo sapiens; identical to SEQ ID NO: 250457
  chr2:36071157-36071243
  hypo

SEQ ID NO: 299439 - DNA, 181 bp, Homo sapiens; identical to SEQ ID NO: 250458
  chr2:36668406-36668587
  hypo

SEQ ID NO: 299440 - DNA, 201 bp, Homo sapiens; identical to SEQ ID NO: 250459
  chr2:36805565-36805766
  hypo

SEQ ID NO: 299441 - DNA, 99 bp, Homo sapiens; identical to SEQ ID NO: 250461
  chr2:37027667-37027766
  hypo

SEQ ID NO: 299442 - DNA, 307 bp, Homo sapiens; identical to SEQ ID NO: 250462
  chr2:37035290-37035597
  hypo

SEQ ID NO: 299443 - DNA, 46 bp, Homo sapiens; identical to SEQ ID NO: 250463
  chr2:37076291-37076337
  hypo

SEQ ID NO: 299444 - DNA, 195 bp, Homo sapiens; identical to SEQ ID NO: 207926
  chr2:37076576-37076771
  hypo

SEQ ID NO: 299445 - DNA, 38 bp, Homo sapiens; identical to SEQ ID NO: 207927
  chr2:37149992-37150030
  hypo

SEQ ID NO: 299446 - DNA, 150 bp, Homo sapiens; identical to SEQ ID NO: 250466
  chr2:37195422-37195572
  hypo

SEQ ID NO: 299447 - DNA, 120 bp, Homo sapiens; identical to SEQ ID NO: 250467
  chr2:37227182-37227302
  hypo

SEQ ID NO: 299448 - DNA, 87 bp, Homo sapiens; identical to SEQ ID NO: 207928
  chr2:37241581-37241668
  hypo

SEQ ID NO: 299449 - DNA, 166 bp, Homo sapiens; identical to SEQ ID NO: 250469
  chr2:37287720-37287886
  hypo

SEQ ID NO: 299450 - DNA, 1015 bp, Homo sapiens; identical to SEQ ID NO: 279681
  chr2:37898934-37899949
  hypo

SEQ ID NO: 299451 - DNA, 64 bp, Homo sapiens; identical to SEQ ID NO: 279683
  chr2:38152927-38152991
  hypo

SEQ ID NO: 299452 - DNA, 160 bp, Homo sapiens; identical to SEQ ID NO: 207930
  chr2:38157989-38158149
  hypo

SEQ ID NO: 299453 - DNA, 177 bp, Homo sapiens; identical to SEQ ID NO: 250471
  chr2:38201226-38201403
  hypo

SEQ ID NO: 299454 - DNA, 40 bp, Homo sapiens; identical to SEQ ID NO: 250472
  chr2:38241063-38241103
  hypo

SEQ ID NO: 299455 - DNA, 221 bp, Homo sapiens; identical to SEQ ID NO: 250473
  chr2:38489624-38489845
  hypo

SEQ ID NO: 299456 - DNA, 156 bp, Homo sapiens; identical to SEQ ID NO: 250474
  chr2:38546334-38546490
  hypo

SEQ ID NO: 299457 - DNA, 31 bp, Homo sapiens; identical to SEQ ID NO: 207933
  chr2:38551439-38551470
  hypo

SEQ ID NO: 299458 - DNA, 84 bp, Homo sapiens; identical to SEQ ID NO: 207934
  chr2:38585486-38585570
  hypo

SEQ ID NO: 299459 - DNA, 44 bp, Homo sapiens; identical to SEQ ID NO: 250477
  chr2:38594452-38594496
  hypo

SEQ ID NO: 299460 - DNA, 82 bp, Homo sapiens; identical to SEQ ID NO: 250478
  chr2:38610902-38610984
  hypo

SEQ ID NO: 299461 - DNA, 31 bp, Homo sapiens; identical to SEQ ID NO: 207935
  chr2:38649876-38649907
  hypo

SEQ ID NO: 299462 - DNA, 149 bp, Homo sapiens; identical to SEQ ID NO: 250480
  chr2:38742475-38742624
  hypo

SEQ ID NO: 299463 - DNA, 207 bp, Homo sapiens; identical to SEQ ID NO: 250481
  chr2:38742654-38742861
  hypo

SEQ ID NO: 299464 - DNA, 43 bp, Homo sapiens
  chr2:38762339-38762382
  hypo
agtccaagagaggccggtccaggccttggccagggaagcatcc

SEQ ID NO: 299465 - DNA, 242 bp, Homo sapiens
  chr2:38762412-38762654
  hypo
agacaggtctggatgaggggtgaggccctgccttggaggggctgccctccctctgtggcacggaagccctgctgcctgtgacaggaggcgactgcacctcacccgcggcctgtatgctgcaggacccagcgaagagcttccttagcttgcagctgtgcagacactaggaaagggagcacctaccagggagatttgccttcttggtccggtagcaaatgcagtcccgccggcccacctggtac

SEQ ID NO: 299466 - DNA, 120 bp, Homo sapiens; identical to SEQ ID NO: 207936
  chr2:39016315-39016435
  hypo

SEQ ID NO: 299467 - DNA, 244 bp, Homo sapiens; identical to SEQ ID NO: 207937
  chr2:39186667-39186911
  hypo

SEQ ID NO: 299468 - DNA, 59 bp, Homo sapiens; identical to SEQ ID NO: 207938
  chr2:39188204-39188263
  hypo

SEQ ID NO: 299469 - DNA, 162 bp, Homo sapiens; identical to SEQ ID NO: 250487
  chr2:39406776-39406938
  hypo

SEQ ID NO: 299470 - DNA, 227 bp, Homo sapiens; identical to SEQ ID NO: 221726
  chr2:39663571-39663798
  hypo

SEQ ID NO: 299471 - DNA, 264 bp, Homo sapiens; identical to SEQ ID NO: 250488
  chr2:39944194-39944458
  hypo

SEQ ID NO: 299472 - DNA, 102 bp, Homo sapiens; identical to SEQ ID NO: 250489
  chr2:40560220-40560322
  hypo

SEQ ID NO: 299473 - DNA, 165 bp, Homo sapiens; identical to SEQ ID NO: 207939
  chr2:41223819-41223984
  hypo

SEQ ID NO: 299474 - DNA, 174 bp, Homo sapiens; identical to SEQ ID NO: 250491
  chr2:42155747-42155921
  hypo

SEQ ID NO: 299475 - DNA, 161 bp, Homo sapiens; identical to SEQ ID NO: 250492
  chr2:42157839-42158000
  hypo

SEQ ID NO: 299476 - DNA, 1085 bp, Homo sapiens; identical to SEQ ID NO: 279692
  chr2:42274691-42275776
  hypo

SEQ ID NO: 299477 - DNA, 141 bp, Homo sapiens; identical to SEQ ID NO: 250494
  chr2:42282412-42282553
  hypo

SEQ ID NO: 299478 - DNA, 370 bp, Homo sapiens; identical to SEQ ID NO: 279694
  chr2:42395973-42396343
  hypo

SEQ ID NO: 299479 - DNA, 35 bp, Homo sapiens; identical to SEQ ID NO: 207942
  chr2:42403393-42403428
  hypo

SEQ ID NO: 299480 - DNA, 94 bp, Homo sapiens; identical to SEQ ID NO: 250497
  chr2:42530714-42530808
  hypo

SEQ ID NO: 299481 - DNA, 295 bp, Homo sapiens; identical to SEQ ID NO: 279697
  chr2:42721246-42721541
  hypo

SEQ ID NO: 299482 - DNA, 43 bp, Homo sapiens; identical to SEQ ID NO: 207944
  chr2:43002056-43002099
  hypo

SEQ ID NO: 299483 - DNA, 135 bp, Homo sapiens; identical to SEQ ID NO: 250499
  chr2:43051041-43051176
  hypo

SEQ ID NO: 299484 - DNA, 72 bp, Homo sapiens; identical to SEQ ID NO: 207945
  chr2:43103590-43103662
  hypo

SEQ ID NO: 299485 - DNA, 35 bp, Homo sapiens; identical to SEQ ID NO: 207946
  chr2:43123919-43123954
  hypo

SEQ ID NO: 299486 - DNA, 118 bp, Homo sapiens; identical to SEQ ID NO: 250502
  chr2:43147317-43147435
  hypo

SEQ ID NO: 299487 - DNA, 75 bp, Homo sapiens; identical to SEQ ID NO: 207947
  chr2:43148273-43148348
  hypo

SEQ ID NO: 299488 - DNA, 55 bp, Homo sapiens; identical to SEQ ID NO: 250504
  chr2:43159425-43159480
  hypo

SEQ ID NO: 299489 - DNA, 101 bp, Homo sapiens; identical to SEQ ID NO: 207948
  chr2:43173213-43173314
  hypo

SEQ ID NO: 299490 - DNA, 200 bp, Homo sapiens; identical to SEQ ID NO: 250506
  chr2:43185203-43185403
  hypo

SEQ ID NO: 299491 - DNA, 343 bp, Homo sapiens; identical to SEQ ID NO: 207949
  chr2:43248787-43249130
  hypo

SEQ ID NO: 299492 - DNA, 146 bp, Homo sapiens; identical to SEQ ID NO: 250509
  chr2:43266043-43266189
  hypo

SEQ ID NO: 299493 - DNA, 141 bp, Homo sapiens; identical to SEQ ID NO: 250510
  chr2:43294291-43294432
  hypo

SEQ ID NO: 299494 - DNA, 76 bp, Homo sapiens; identical to SEQ ID NO: 250511
  chr2:43296669-43296745
  hypo

SEQ ID NO: 299495 - DNA, 173 bp, Homo sapiens; identical to SEQ ID NO: 207950
  chr2:43299388-43299561
  hypo

SEQ ID NO: 299496 - DNA, 37 bp, Homo sapiens; identical to SEQ ID NO: 250513
  chr2:43365142-43365179
  hypo

SEQ ID NO: 299497 - DNA, 189 bp, Homo sapiens; identical to SEQ ID NO: 207951
  chr2:43373136-43373325
  hypo

SEQ ID NO: 299498 - DNA, 34 bp, Homo sapiens; identical to SEQ ID NO: 207952
  chr2:43388282-43388316
  hypo

SEQ ID NO: 299499 - DNA, 49 bp, Homo sapiens; identical to SEQ ID NO: 250517
  chr2:43411559-43411608
  hypo

SEQ ID NO: 299500 - DNA, 38 bp, Homo sapiens
  chr2:43413631-43413669
  hypo
ggcccaagagtcctcgcttctaacagagtcccaggtga

SEQ ID NO: 299501 - DNA, 145 bp, Homo sapiens; identical to SEQ ID NO: 250519
  chr2:43420537-43420682
  hypo

SEQ ID NO: 299502 - DNA, 416 bp, Homo sapiens; identical to SEQ ID NO: 198178
  chr2:43452443-43452859
  hypo

SEQ ID NO: 299503 - DNA, 122 bp, Homo sapiens; identical to SEQ ID NO: 250520
  chr2:43496628-43496750
  hypo

SEQ ID NO: 299504 - DNA, 37 bp, Homo sapiens; identical to SEQ ID NO: 250521
  chr2:43523958-43523995
  hypo

SEQ ID NO: 299505 - DNA, 35 bp, Homo sapiens; identical to SEQ ID NO: 207954
  chr2:43820774-43820809
  hypo

SEQ ID NO: 299506 - DNA, 35 bp, Homo sapiens; identical to SEQ ID NO: 207955
  chr2:43821049-43821084
  hypo

SEQ ID NO: 299507 - DNA, 157 bp, Homo sapiens; identical to SEQ ID NO: 250524
  chr2:44047673-44047830
  hypo

SEQ ID NO: 299508 - DNA, 116 bp, Homo sapiens; identical to SEQ ID NO: 250525
  chr2:44104773-44104889
  hypo

SEQ ID NO: 299509 - DNA, 33 bp, Homo sapiens; identical to SEQ ID NO: 207956
  chr2:44113283-44113316
  hypo

SEQ ID NO: 299510 - DNA, 44 bp, Homo sapiens; identical to SEQ ID NO: 207957
  chr2:44126057-44126101
  hypo

SEQ ID NO: 299511 - DNA, 105 bp, Homo sapiens; identical to SEQ ID NO: 207958
  chr2:44126131-44126236
  hypo

SEQ ID NO: 299512 - DNA, 63 bp, Homo sapiens; identical to SEQ ID NO: 250529
  chr2:44315198-44315261
  hypo

SEQ ID NO: 299513 - DNA, 40 bp, Homo sapiens; identical to SEQ ID NO: 250530
  chr2:44402110-44402150
  hypo

SEQ ID NO: 299514 - DNA, 42 bp, Homo sapiens; identical to SEQ ID NO: 250531
  chr2:44436625-44436667
  hypo

SEQ ID NO: 299515 - DNA, 32 bp, Homo sapiens; identical to SEQ ID NO: 207959
  chr2:44439162-44439194
  hypo

SEQ ID NO: 299516 - DNA, 35 bp, Homo sapiens; identical to SEQ ID NO: 250533
  chr2:44468999-44469034
  hypo

SEQ ID NO: 299517 - DNA, 35 bp, Homo sapiens; identical to SEQ ID NO: 250534
  chr2:44469274-44469309
  hypo

SEQ ID NO: 299518 - DNA, 86 bp, Homo sapiens
  chr2:44497613-44497699
  hypo
gaattggacaaaacacgcagcaaagaaagaatgaagcaacaaaagaacgaaagcagctctctcggctttcggctcggaggaggcca

SEQ ID NO: 299519 - DNA, 149 bp, Homo sapiens; identical to SEQ ID NO: 250536
  chr2:44502842-44502991
  hypo

SEQ ID NO: 299520 - DNA, 33 bp, Homo sapiens; identical to SEQ ID NO: 207960
  chr2:44505288-44505321
  hypo

SEQ ID NO: 299521 - DNA, 35 bp, Homo sapiens; identical to SEQ ID NO: 250538
  chr2:44528016-44528051
  hypo

SEQ ID NO: 299522 - DNA, 120 bp, Homo sapiens; identical to SEQ ID NO: 250539
  chr2:44534051-44534171
  hypo

SEQ ID NO: 299523 - DNA, 700 bp, Homo sapiens; identical to SEQ ID NO: 250540
  chr2:44553759-44554459
  hypo

SEQ ID NO: 299524 - DNA, 42 bp, Homo sapiens; identical to SEQ ID NO: 250541
  chr2:44729124-44729166
  hypo

SEQ ID NO: 299525 - DNA, 304 bp, Homo sapiens; identical to SEQ ID NO: 250542
  chr2:44933645-44933949
  hypo

SEQ ID NO: 299526 - DNA, 96 bp, Homo sapiens; identical to SEQ ID NO: 250543
  chr2:44999266-44999362
  hypo

SEQ ID NO: 299527 - DNA, 205 bp, Homo sapiens; identical to SEQ ID NO: 207962
  chr2:45927198-45927403
  hypo

SEQ ID NO: 299528 - DNA, 41 bp, Homo sapiens; identical to SEQ ID NO: 207963
  chr2:45940266-45940307
  hypo

SEQ ID NO: 299529 - DNA, 50 bp, Homo sapiens; identical to SEQ ID NO: 250546
  chr2:46399258-46399308
  hypo

SEQ ID NO: 299530 - DNA, 145 bp, Homo sapiens; identical to SEQ ID NO: 250547
  chr2:46399620-46399765
  hypo

SEQ ID NO: 299531 - DNA, 559 bp, Homo sapiens; identical to SEQ ID NO: 198187
  chr2:46524134-46524693
  hypo

SEQ ID NO: 299532 - DNA, 755 bp, Homo sapiens; identical to SEQ ID NO: 198188
  chr2:46524957-46525712
  hypo

SEQ ID NO: 299533 - DNA, 39 bp, Homo sapiens; identical to SEQ ID NO: 250548
  chr2:46635255-46635294
  hypo

SEQ ID NO: 299534 - DNA, 124 bp, Homo sapiens; identical to SEQ ID NO: 207966
  chr2:46707664-46707788
  hypo

SEQ ID NO: 299535 - DNA, 63 bp, Homo sapiens; identical to SEQ ID NO: 279735
  chr2:46770636-46770699
  hypo

SEQ ID NO: 299536 - DNA, 128 bp, Homo sapiens; identical to SEQ ID NO: 279736
  chr2:46770831-46770959
  hypo

SEQ ID NO: 299537 - DNA, 81 bp, Homo sapiens; identical to SEQ ID NO: 207967
  chr2:46834766-46834847
  hypo

SEQ ID NO: 299538 - DNA, 223 bp, Homo sapiens; identical to SEQ ID NO: 250551
  chr2:47095093-47095316
  hypo

SEQ ID NO: 299539 - DNA, 160 bp, Homo sapiens; identical to SEQ ID NO: 250552
  chr2:47102026-47102186
  hypo

SEQ ID NO: 299540 - DNA, 81 bp, Homo sapiens; identical to SEQ ID NO: 198192
  chr2:47167906-47167987
  hypo

SEQ ID NO: 299541 - DNA, 61 bp, Homo sapiens
  chr2:47200521-47200582
  hypo
agccttccagccaccgcatggtgcagggaaacccttgctaccctcatttatcccccgtcag

SEQ ID NO: 299542 - DNA, 307 bp, Homo sapiens; identical to SEQ ID NO: 250555
  chr2:47232013-47232320
  hypo

SEQ ID NO: 299543 - DNA, 96 bp, Homo sapiens; identical to SEQ ID NO: 141542
  chr2:47234721-47234817
  hypo

SEQ ID NO: 299544 - DNA, 127 bp, Homo sapiens; identical to SEQ ID NO: 250557
  chr2:47238529-47238656
  hypo

SEQ ID NO: 299545 - DNA, 101 bp, Homo sapiens; identical to SEQ ID NO: 207969
  chr2:47247696-47247797
  hypo

SEQ ID NO: 299546 - DNA, 80 bp, Homo sapiens; identical to SEQ ID NO: 250560
  chr2:47370888-47370968
  hypo

SEQ ID NO: 299547 - DNA, 204 bp, Homo sapiens; identical to SEQ ID NO: 250561
  chr2:47419053-47419257
  hypo

SEQ ID NO: 299548 - DNA, 172 bp, Homo sapiens; identical to SEQ ID NO: 207970
  chr2:47475844-47476016
  hypo

SEQ ID NO: 299549 - DNA, 78 bp, Homo sapiens; identical to SEQ ID NO: 250563
  chr2:47574177-47574255
  hypo

SEQ ID NO: 299550 - DNA, 83 bp, Homo sapiens; identical to SEQ ID NO: 250564
  chr2:47595493-47595576
  hypo

SEQ ID NO: 299551 - DNA, 329 bp, Homo sapiens; identical to SEQ ID NO: 198194
  chr2:47596115-47596444
  hypo

SEQ ID NO: 299552 - DNA, 60 bp, Homo sapiens; identical to SEQ ID NO: 198195
  chr2:47596505-47596565
  hypo

SEQ ID NO: 299553 - DNA, 55 bp, Homo sapiens; identical to SEQ ID NO: 198196
  chr2:47596794-47596849
  hypo

SEQ ID NO: 299554 - DNA, 41 bp, Homo sapiens; identical to SEQ ID NO: 37435
  chr2:47596941-47596982
  hypo

SEQ ID NO: 299555 - DNA, 763 bp, Homo sapiens; identical to SEQ ID NO: 279748
  chr2:47629778-47630541
  hypo

SEQ ID NO: 299556 - DNA, 155 bp, Homo sapiens; identical to SEQ ID NO: 221744
  chr2:47635539-47635694
  hypo

SEQ ID NO: 299557 - DNA, 279 bp, Homo sapiens; identical to SEQ ID NO: 221745
  chr2:47637232-47637511
  hypo

SEQ ID NO: 299558 - DNA, 147 bp, Homo sapiens; identical to SEQ ID NO: 221746
  chr2:47639552-47639699
  hypo

SEQ ID NO: 299559 - DNA, 150 bp, Homo sapiens; identical to SEQ ID NO: 221747
  chr2:47641407-47641557
  hypo

SEQ ID NO: 299560 - DNA, 134 bp, Homo sapiens; identical to SEQ ID NO: 221748
  chr2:47643434-47643568
  hypo

SEQ ID NO: 299561 - DNA, 200 bp, Homo sapiens; identical to SEQ ID NO: 221749
  chr2:47656880-47657080
  hypo

SEQ ID NO: 299562 - DNA, 110 bp, Homo sapiens; identical to SEQ ID NO: 221750
  chr2:47672686-47672796
  hypo

SEQ ID NO: 299563 - DNA, 124 bp, Homo sapiens; identical to SEQ ID NO: 221751
  chr2:47690169-47690293
  hypo

SEQ ID NO: 299564 - DNA, 151 bp, Homo sapiens; identical to SEQ ID NO: 221752
  chr2:47693796-47693947
  hypo

SEQ ID NO: 299565 - DNA, 98 bp, Homo sapiens; identical to SEQ ID NO: 221753
  chr2:47698103-47698201
  hypo

SEQ ID NO: 299566 - DNA, 246 bp, Homo sapiens; identical to SEQ ID NO: 221754
  chr2:47702163-47702409
  hypo

SEQ ID NO: 299567 - DNA, 205 bp, Homo sapiens; identical to SEQ ID NO: 221755
  chr2:47703505-47703710
  hypo

SEQ ID NO: 299568 - DNA, 248 bp, Homo sapiens; identical to SEQ ID NO: 221756
  chr2:47705410-47705658
  hypo

SEQ ID NO: 299569 - DNA, 176 bp, Homo sapiens; identical to SEQ ID NO: 221757
  chr2:47707834-47708010
  hypo

SEQ ID NO: 299570 - DNA, 450 bp, Homo sapiens; identical to SEQ ID NO: 221758
  chr2:47709917-47710367
  hypo

SEQ ID NO: 299571 - DNA, 79 bp, Homo sapiens; identical to SEQ ID NO: 198198
  chr2:47747971-47748050
  hypo

SEQ ID NO: 299572 - DNA, 203 bp, Homo sapiens; identical to SEQ ID NO: 279765
  chr2:47748523-47748726
  hypo

SEQ ID NO: 299573 - DNA, 38 bp, Homo sapiens; identical to SEQ ID NO: 207977
  chr2:47802077-47802115
  hypo

SEQ ID NO: 299574 - DNA, 143 bp, Homo sapiens; identical to SEQ ID NO: 250568
  chr2:47845123-47845266
  hypo

SEQ ID NO: 299575 - DNA, 45 bp, Homo sapiens; identical to SEQ ID NO: 207978
  chr2:47918383-47918428
  hypo

SEQ ID NO: 299576 - DNA, 412 bp, Homo sapiens; identical to SEQ ID NO: 221761
  chr2:48010220-48010632
  hypo

SEQ ID NO: 299577 - DNA, 197 bp, Homo sapiens; identical to SEQ ID NO: 221762
  chr2:48018065-48018262
  hypo

SEQ ID NO: 299578 - DNA, 170 bp, Homo sapiens; identical to SEQ ID NO: 221763
  chr2:48023032-48023202
  hypo

SEQ ID NO: 299579 - DNA, 2545 bp, Homo sapiens; identical to SEQ ID NO: 221764
  chr2:48025749-48028294
  hypo

SEQ ID NO: 299580 - DNA, 266 bp, Homo sapiens; identical to SEQ ID NO: 221765
  chr2:48030558-48030824
  hypo

SEQ ID NO: 299581 - DNA, 118 bp, Homo sapiens; identical to SEQ ID NO: 221766
  chr2:48032048-48032166
  hypo

SEQ ID NO: 299582 - DNA, 90 bp, Homo sapiens; identical to SEQ ID NO: 221767
  chr2:48032756-48032846
  hypo

SEQ ID NO: 299583 - DNA, 750 bp, Homo sapiens; identical to SEQ ID NO: 221768
  chr2:48033342-48034092
  hypo

SEQ ID NO: 299584 - DNA, 100 bp, Homo sapiens; identical to SEQ ID NO: 207979
  chr2:48539633-48539733
  hypo

SEQ ID NO: 299585 - DNA, 86 bp, Homo sapiens; identical to SEQ ID NO: 250571
  chr2:48606934-48607020
  hypo

SEQ ID NO: 299586 - DNA, 107 bp, Homo sapiens; identical to SEQ ID NO: 250572
  chr2:48742859-48742966
  hypo

SEQ ID NO: 299587 - DNA, 91 bp, Homo sapiens; identical to SEQ ID NO: 207980
  chr2:49621663-49621754
  hypo

SEQ ID NO: 299588 - DNA, 37 bp, Homo sapiens; identical to SEQ ID NO: 250574
  chr2:53992665-53992702
  hypo

SEQ ID NO: 299589 - DNA, 36 bp, Homo sapiens; identical to SEQ ID NO: 207981
  chr2:54019055-54019091
  hypo

SEQ ID NO: 299590 - DNA, 88 bp, Homo sapiens; identical to SEQ ID NO: 250576
  chr2:54027326-54027414
  hypo

SEQ ID NO: 299591 - DNA, 154 bp, Homo sapiens; identical to SEQ ID NO: 207982
  chr2:54097367-54097521
  hypo

SEQ ID NO: 299592 - DNA, 159 bp, Homo sapiens; identical to SEQ ID NO: 250578
  chr2:54124939-54125098
  hypo

SEQ ID NO: 299593 - DNA, 114 bp, Homo sapiens; identical to SEQ ID NO: 250579
  chr2:54308420-54308534
  hypo

SEQ ID NO: 299594 - DNA, 292 bp, Homo sapiens; identical to SEQ ID NO: 250580
  chr2:54312128-54312420
  hypo

SEQ ID NO: 299595 - DNA, 120 bp, Homo sapiens; identical to SEQ ID NO: 250581
  chr2:54343976-54344096
  hypo

SEQ ID NO: 299596 - DNA, 140 bp, Homo sapiens; identical to SEQ ID NO: 221769
  chr2:54683032-54683172
  hypo

SEQ ID NO: 299597 - DNA, 137 bp, Homo sapiens; identical to SEQ ID NO: 250582
  chr2:54880809-54880946
  hypo

SEQ ID NO: 299598 - DNA, 79 bp, Homo sapiens; identical to SEQ ID NO: 250583
  chr2:54939737-54939816
  hypo

SEQ ID NO: 299599 - DNA, 31 bp, Homo sapiens; identical to SEQ ID NO: 250584
  chr2:55098810-55098841
  hypo

SEQ ID NO: 299600 - DNA, 360 bp, Homo sapiens; identical to SEQ ID NO: 250585
  chr2:55173805-55174165
  hypo

SEQ ID NO: 299601 - DNA, 207 bp, Homo sapiens; identical to SEQ ID NO: 250586
  chr2:55175832-55176039
  hypo

SEQ ID NO: 299602 - DNA, 48 bp, Homo sapiens; identical to SEQ ID NO: 207984
  chr2:55289046-55289094
  hypo

SEQ ID NO: 299603 - DNA, 232 bp, Homo sapiens; identical to SEQ ID NO: 250588
  chr2:55366223-55366455
  hypo

SEQ ID NO: 299604 - DNA, 102 bp, Homo sapiens; identical to SEQ ID NO: 250589
  chr2:55391617-55391719
  hypo

SEQ ID NO: 299605 - DNA, 112 bp, Homo sapiens; identical to SEQ ID NO: 250590
  chr2:55451552-55451664
  hypo

SEQ ID NO: 299606 - DNA, 84 bp, Homo sapiens; identical to SEQ ID NO: 207986
  chr2:55499046-55499130
  hypo

SEQ ID NO: 299607 - DNA, 101 bp, Homo sapiens; identical to SEQ ID NO: 279798
  chr2:55646327-55646428
  hypo

SEQ ID NO: 299608 - DNA, 680 bp, Homo sapiens; identical to SEQ ID NO: 279799
  chr2:55646458-55647138
  hypo

SEQ ID NO: 299609 - DNA, 99 bp, Homo sapiens; identical to SEQ ID NO: 250594
  chr2:55687100-55687199
  hypo

SEQ ID NO: 299610 - DNA, 38 bp, Homo sapiens; identical to SEQ ID NO: 250595
  chr2:55687319-55687357
  hypo

SEQ ID NO: 299611 - DNA, 42 bp, Homo sapiens; identical to SEQ ID NO: 250596
  chr2:55825329-55825371
  hypo

SEQ ID NO: 299612 - DNA, 87 bp, Homo sapiens; identical to SEQ ID NO: 250597
  chr2:55874486-55874573
  hypo

SEQ ID NO: 299613 - DNA, 77 bp, Homo sapiens; identical to SEQ ID NO: 250598
  chr2:57645780-57645857
  hypo

SEQ ID NO: 299614 - DNA, 33 bp, Homo sapiens; identical to SEQ ID NO: 198219
  chr2:58655395-58655428
  hypo

SEQ ID NO: 299615 - DNA, 348 bp, Homo sapiens; identical to SEQ ID NO: 279813
  chr2:58655631-58655979
  hypo

SEQ ID NO: 299616 - DNA, 101 bp, Homo sapiens; identical to SEQ ID NO: 198220
  chr2:58776940-58777041
  hypo

SEQ ID NO: 299617 - DNA, 34 bp, Homo sapiens; identical to SEQ ID NO: 250600
  chr2:58788931-58788965
  hypo

SEQ ID NO: 299618 - DNA, 38 bp, Homo sapiens; identical to SEQ ID NO: 250601
  chr2:59382731-59382769
  hypo

SEQ ID NO: 299619 - DNA, 131 bp, Homo sapiens; identical to SEQ ID NO: 250602
  chr2:60598576-60598707
  hypo

SEQ ID NO: 299620 - DNA, 45 bp, Homo sapiens; identical to SEQ ID NO: 250603
  chr2:60642569-60642614
  hypo

SEQ ID NO: 299621 - DNA, 81 bp, Homo sapiens; identical to SEQ ID NO: 250604
  chr2:60688977-60689058
  hypo

SEQ ID NO: 299622 - DNA, 205 bp, Homo sapiens; identical to SEQ ID NO: 250605
  chr2:60704080-60704285
  hypo

SEQ ID NO: 299623 - DNA, 36 bp, Homo sapiens; identical to SEQ ID NO: 207990
  chr2:60705871-60705907
  hypo

SEQ ID NO: 299624 - DNA, 144 bp, Homo sapiens; identical to SEQ ID NO: 207991
  chr2:60706376-60706520
  hypo

SEQ ID NO: 299625 - DNA, 207 bp, Homo sapiens; identical to SEQ ID NO: 207992
  chr2:60706550-60706757
  hypo

SEQ ID NO: 299626 - DNA, 63 bp, Homo sapiens; identical to SEQ ID NO: 250608
  chr2:60733548-60733611
  hypo

SEQ ID NO: 299627 - DNA, 58 bp, Homo sapiens; identical to SEQ ID NO: 250609
  chr2:60779104-60779162
  hypo

SEQ ID NO: 299628 - DNA, 394 bp, Homo sapiens; identical to SEQ ID NO: 198223
  chr2:60784505-60784899
  hypo

SEQ ID NO: 299629 - DNA, 124 bp, Homo sapiens; identical to SEQ ID NO: 250610
  chr2:60812484-60812608
  hypo

SEQ ID NO: 299630 - DNA, 35 bp, Homo sapiens; identical to SEQ ID NO: 250611
  chr2:60986216-60986251
  hypo

SEQ ID NO: 299631 - DNA, 261 bp, Homo sapiens; identical to SEQ ID NO: 250612
  chr2:61035610-61035871
  hypo

SEQ ID NO: 299632 - DNA, 169 bp, Homo sapiens; identical to SEQ ID NO: 250613
  chr2:61074833-61075002
  hypo

SEQ ID NO: 299633 - DNA, 85 bp, Homo sapiens; identical to SEQ ID NO: 250614
  chr2:61088705-61088790
  hypo

SEQ ID NO: 299634 - DNA, 104 bp, Homo sapiens; identical to SEQ ID NO: 207994
  chr2:61135144-61135248
  hypo

SEQ ID NO: 299635 - DNA, 53 bp, Homo sapiens; identical to SEQ ID NO: 207995
  chr2:61175238-61175291
  hypo

SEQ ID NO: 299636 - DNA, 438 bp, Homo sapiens; identical to SEQ ID NO: 198227
  chr2:61175661-61176099
  hypo

SEQ ID NO: 299637 - DNA, 40 bp, Homo sapiens; identical to SEQ ID NO: 250618
  chr2:61186779-61186819
  hypo

SEQ ID NO: 299638 - DNA, 34 bp, Homo sapiens; identical to SEQ ID NO: 250619
  chr2:61189413-61189447
  hypo

SEQ ID NO: 299639 - DNA, 126 bp, Homo sapiens; identical to SEQ ID NO: 207997
  chr2:61304102-61304228
  hypo

SEQ ID NO: 299640 - DNA, 39 bp, Homo sapiens; identical to SEQ ID NO: 250621
  chr2:61394939-61394978
  hypo

SEQ ID NO: 299641 - DNA, 139 bp, Homo sapiens; identical to SEQ ID NO: 207998
  chr2:61448896-61449035
  hypo

SEQ ID NO: 299642 - DNA, 40 bp, Homo sapiens; identical to SEQ ID NO: 207999
  chr2:61471724-61471764
  hypo

SEQ ID NO: 299643 - DNA, 120 bp, Homo sapiens; identical to SEQ ID NO: 208000
  chr2:61505031-61505151
  hypo

SEQ ID NO: 299644 - DNA, 35 bp, Homo sapiens; identical to SEQ ID NO: 208001
  chr2:61505211-61505246
  hypo

SEQ ID NO: 299645 - DNA, 32 bp, Homo sapiens; identical to SEQ ID NO: 208002
  chr2:61556157-61556189
  hypo

SEQ ID NO: 299646 - DNA, 43 bp, Homo sapiens; identical to SEQ ID NO: 250627
  chr2:61660471-61660514
  hypo

SEQ ID NO: 299647 - DNA, 120 bp, Homo sapiens; identical to SEQ ID NO: 250628
  chr2:61759938-61760058
  hypo

SEQ ID NO: 299648 - DNA, 163 bp, Homo sapiens; identical to SEQ ID NO: 250629
  chr2:61816741-61816904
  hypo

SEQ ID NO: 299649 - DNA, 32 bp, Homo sapiens; identical to SEQ ID NO: 250630
  chr2:61885815-61885847
  hypo

SEQ ID NO: 299650 - DNA, 95 bp, Homo sapiens; identical to SEQ ID NO: 221776
  chr2:61921788-61921883
  hypo

SEQ ID NO: 299651 - DNA, 42 bp, Homo sapiens; identical to SEQ ID NO: 250631
  chr2:61923843-61923885
  hypo

SEQ ID NO: 299652 - DNA, 826 bp, Homo sapiens; identical to SEQ ID NO: 279833
  chr2:61990960-61991786
  hypo

SEQ ID NO: 299653 - DNA, 92 bp, Homo sapiens; identical to SEQ ID NO: 208005
  chr2:62116629-62116721
  hypo

SEQ ID NO: 299654 - DNA, 38 bp, Homo sapiens; identical to SEQ ID NO: 208006
  chr2:62146652-62146690
  hypo

SEQ ID NO: 299655 - DNA, 250 bp, Homo sapiens; identical to SEQ ID NO: 250634
  chr2:62406299-62406549
  hypo

SEQ ID NO: 299656 - DNA, 38 bp, Homo sapiens; identical to SEQ ID NO: 208007
  chr2:62497414-62497452
  hypo

SEQ ID NO: 299657 - DNA, 37 bp, Homo sapiens; identical to SEQ ID NO: 208008
  chr2:62497692-62497729
  hypo

SEQ ID NO: 299658 - DNA, 33 bp, Homo sapiens; identical to SEQ ID NO: 250637
  chr2:62585418-62585451
  hypo

SEQ ID NO: 299659 - DNA, 267 bp, Homo sapiens; identical to SEQ ID NO: 250638
  chr2:62635425-62635692
  hypo

SEQ ID NO: 299660 - DNA, 71 bp, Homo sapiens; identical to SEQ ID NO: 250639
  chr2:62685374-62685445
  hypo

SEQ ID NO: 299661 - DNA, 169 bp, Homo sapiens; identical to SEQ ID NO: 208009
  chr2:63118747-63118916
  hypo

SEQ ID NO: 299662 - DNA, 237 bp, Homo sapiens; identical to SEQ ID NO: 208010
  chr2:63123375-63123612
  hypo

SEQ ID NO: 299663 - DNA, 217 bp, Homo sapiens; identical to SEQ ID NO: 208011
  chr2:63192034-63192251
  hypo

SEQ ID NO: 299664 - DNA, 149 bp, Homo sapiens; identical to SEQ ID NO: 208012
  chr2:63272200-63272349
  hypo

SEQ ID NO: 299665 - DNA, 52 bp, Homo sapiens; identical to SEQ ID NO: 250644
  chr2:63855250-63855302
  hypo

SEQ ID NO: 299666 - DNA, 31 bp, Homo sapiens; identical to SEQ ID NO: 250646
  chr2:64372516-64372547
  hypo

SEQ ID NO: 299667 - DNA, 120 bp, Homo sapiens; identical to SEQ ID NO: 250647
  chr2:64375241-64375361
  hypo

SEQ ID NO: 299668 - DNA, 133 bp, Homo sapiens; identical to SEQ ID NO: 208013
  chr2:64538768-64538901
  hypo

SEQ ID NO: 299669 - DNA, 108 bp, Homo sapiens; identical to SEQ ID NO: 250649
  chr2:64732412-64732520
  hypo

SEQ ID NO: 299670 - DNA, 99 bp, Homo sapiens; identical to SEQ ID NO: 250651
  chr2:64865161-64865260
  hypo

SEQ ID NO: 299671 - DNA, 142 bp, Homo sapiens; identical to SEQ ID NO: 221780
  chr2:64872367-64872509
  hypo

SEQ ID NO: 299672 - DNA, 36 bp, Homo sapiens; identical to SEQ ID NO: 250652
  chr2:65062638-65062674
  hypo

SEQ ID NO: 299673 - DNA, 357 bp, Homo sapiens; identical to SEQ ID NO: 221781
  chr2:65086836-65087193
  hypo

SEQ ID NO: 299674 - DNA, 482 bp, Homo sapiens; identical to SEQ ID NO: 221782
  chr2:65215348-65215830
  hypo

SEQ ID NO: 299675 - DNA, 133 bp, Homo sapiens; identical to SEQ ID NO: 250653
  chr2:65251107-65251240
  hypo

SEQ ID NO: 299676 - DNA, 35 bp, Homo sapiens; identical to SEQ ID NO: 250654
  chr2:65289380-65289415
  hypo

SEQ ID NO: 299677 - DNA, 38 bp, Homo sapiens; identical to SEQ ID NO: 250655
  chr2:65456602-65456640
  hypo

SEQ ID NO: 299678 - DNA, 65 bp, Homo sapiens; identical to SEQ ID NO: 250656
  chr2:65740149-65740214
  hypo

SEQ ID NO: 299679 - DNA, 38 bp, Homo sapiens; identical to SEQ ID NO: 208015
  chr2:65829225-65829263
  hypo

SEQ ID NO: 299680 - DNA, 37 bp, Homo sapiens; identical to SEQ ID NO: 208016
  chr2:65829503-65829540
  hypo

SEQ ID NO: 299681 - DNA, 50 bp, Homo sapiens
  chr2:65868440-65868490
  hypo
ccatctaaaaaaaaaaaaaaaaaaagaatgtttgaaaccaaactggtttg

SEQ ID NO: 299682 - DNA, 92 bp, Homo sapiens; identical to SEQ ID NO: 208017
  chr2:66604303-66604395
  hypo

SEQ ID NO: 299683 - DNA, 1013 bp, Homo sapiens; identical to SEQ ID NO: 279866
  chr2:66660888-66661901
  hypo

SEQ ID NO: 299684 - DNA, 34 bp, Homo sapiens; identical to SEQ ID NO: 250663
  chr2:67721499-67721533
  hypo

SEQ ID NO: 299685 - DNA, 38 bp, Homo sapiens; identical to SEQ ID NO: 208019
  chr2:68287484-68287522
  hypo

SEQ ID NO: 299686 - DNA, 79 bp, Homo sapiens; identical to SEQ ID NO: 208020
  chr2:68433262-68433341
  hypo

SEQ ID NO: 299687 - DNA, 191 bp, Homo sapiens; identical to SEQ ID NO: 250667
  chr2:68486675-68486866
  hypo

SEQ ID NO: 299688 - DNA, 326 bp, Homo sapiens
  chr2:68672363-68672689
  hypo
attctaagtccccagcgaaaacccacaccaaaatcatcaccagcgtgcacatctgttcccttgttgagatttaatcactgaagagcaggtggaagccgtcctgaacgaattaccccatgtacctagaagcctcttcccaaatcaagcagtgatcacctcactcataaacagagcacgcacccaaaggttttgcttgatgtattttgagactagtttcacgtgttgctgctaaacgtttccagggagttgcaaaagttaatccttatggatcggtgattgaaatacagtgacatccctgctgctctgcagtgtgcgcaaaggtcaaa

SEQ ID NO: 299689 - DNA, 37 bp, Homo sapiens; identical to SEQ ID NO: 250669
  chr2:69116719-69116756
  hypo

SEQ ID NO: 299690 - DNA, 40 bp, Homo sapiens; identical to SEQ ID NO: 198257
  chr2:69240028-69240068
  hypo

SEQ ID NO: 299691 - DNA, 505 bp, Homo sapiens; identical to SEQ ID NO: 279875
  chr2:69240720-69241225
  hypo

SEQ ID NO: 299692 - DNA, 64 bp, Homo sapiens; identical to SEQ ID NO: 250670
  chr2:69612624-69612688
  hypo

SEQ ID NO: 299693 - DNA, 45 bp, Homo sapiens; identical to SEQ ID NO: 250671
  chr2:69778023-69778068
  hypo

SEQ ID NO: 299694 - DNA, 33 bp, Homo sapiens; identical to SEQ ID NO: 250672
  chr2:69813143-69813176
  hypo

SEQ ID NO: 299695 - DNA, 142 bp, Homo sapiens; identical to SEQ ID NO: 250673
  chr2:69928487-69928629
  hypo

SEQ ID NO: 299696 - DNA, 374 bp, Homo sapiens; identical to SEQ ID NO: 279879
  chr2:69968429-69968803
  hypo

SEQ ID NO: 299697 - DNA, 120 bp, Homo sapiens; identical to SEQ ID NO: 208024
  chr2:69997975-69998095
  hypo

SEQ ID NO: 299698 - DNA, 45 bp, Homo sapiens; identical to SEQ ID NO: 250675
  chr2:70005612-70005657
  hypo

SEQ ID NO: 299699 - DNA, 141 bp, Homo sapiens
  chr2:70055299-70055440
  hypo
tgggaaacacctgcacgttctttgtgctggcaaattctgtgtatgcaagctgatccctctgcagccattattctccgcctcccacctccaccccaagctgcctcggctagcctctctcggttcagatttctcatgcatgaa

SEQ ID NO: 299700 - DNA, 221 bp, Homo sapiens; identical to SEQ ID NO: 208025
  chr2:70165950-70166171
  hypo

SEQ ID NO: 299701 - DNA, 48 bp, Homo sapiens; identical to SEQ ID NO: 208026
  chr2:70204037-70204085
  hypo

SEQ ID NO: 299702 - DNA, 260 bp, Homo sapiens; identical to SEQ ID NO: 208027
  chr2:70224805-70225065
  hypo

SEQ ID NO: 299703 - DNA, 60 bp, Homo sapiens; identical to SEQ ID NO: 208028
  chr2:70329617-70329677
  hypo

SEQ ID NO: 299704 - DNA, 331 bp, Homo sapiens; identical to SEQ ID NO: 279886
  chr2:70351165-70351496
  hypo

SEQ ID NO: 299705 - DNA, 295 bp, Homo sapiens; identical to SEQ ID NO: 198264
  chr2:70369036-70369331
  hypo

SEQ ID NO: 299706 - DNA, 224 bp, Homo sapiens; identical to SEQ ID NO: 250682
  chr2:70393988-70394212
  hypo

SEQ ID NO: 299707 - DNA, 206 bp, Homo sapiens; identical to SEQ ID NO: 279889
  chr2:70418110-70418316
  hypo

SEQ ID NO: 299708 - DNA, 34 bp, Homo sapiens
  chr2:70418627-70418661
  hypo
tattagcagatgtcagctgcgaatttggagtttg

SEQ ID NO: 299709 - DNA, 101 bp, Homo sapiens; identical to SEQ ID NO: 208032
  chr2:70427484-70427585
  hypo

SEQ ID NO: 299710 - DNA, 53 bp, Homo sapiens
  chr2:70430895-70430948
  hypo
cacttgccaggagggcatacggagataactgagactattaagaagctagagga

SEQ ID NO: 299711 - DNA, 40 bp, Homo sapiens; identical to SEQ ID NO: 250686
  chr2:70521965-70522005
  hypo

SEQ ID NO: 299712 - DNA, 39 bp, Homo sapiens; identical to SEQ ID NO: 250687
  chr2:70557159-70557198
  hypo

SEQ ID NO: 299713 - DNA, 212 bp, Homo sapiens; identical to SEQ ID NO: 250688
  chr2:71355399-71355611
  hypo

SEQ ID NO: 299714 - DNA, 68 bp, Homo sapiens; identical to SEQ ID NO: 279896
  chr2:71502821-71502889
  hypo

SEQ ID NO: 299715 - DNA, 87 bp, Homo sapiens; identical to SEQ ID NO: 250689
  chr2:71564761-71564848
  hypo

SEQ ID NO: 299716 - DNA, 293 bp, Homo sapiens; identical to SEQ ID NO: 250690
  chr2:71753210-71753503
  hypo

SEQ ID NO: 299717 - DNA, 174 bp, Homo sapiens; identical to SEQ ID NO: 208034
  chr2:71763615-71763789
  hypo

SEQ ID NO: 299718 - DNA, 32 bp, Homo sapiens; identical to SEQ ID NO: 250692
  chr2:71792491-71792523
  hypo

SEQ ID NO: 299719 - DNA, 49 bp, Homo sapiens; identical to SEQ ID NO: 250693
  chr2:71839446-71839495
  hypo

SEQ ID NO: 299720 - DNA, 438 bp, Homo sapiens; identical to SEQ ID NO: 250694
  chr2:71899491-71899929
  hypo

SEQ ID NO: 299721 - DNA, 153 bp, Homo sapiens; identical to SEQ ID NO: 250695
  chr2:72310170-72310323
  hypo

SEQ ID NO: 299722 - DNA, 33 bp, Homo sapiens; identical to SEQ ID NO: 250696
  chr2:72316766-72316799
  hypo

SEQ ID NO: 299723 - DNA, 53 bp, Homo sapiens; identical to SEQ ID NO: 250697
  chr2:72358940-72358993
  hypo

SEQ ID NO: 299724 - DNA, 374 bp, Homo sapiens; identical to SEQ ID NO: 208035
  chr2:72359326-72359700
  hypo

SEQ ID NO: 299725 - DNA, 155 bp, Homo sapiens; identical to SEQ ID NO: 208036
  chr2:72359982-72360137
  hypo

SEQ ID NO: 299726 - DNA, 240 bp, Homo sapiens; identical to SEQ ID NO: 250700
  chr2:72366138-72366378
  hypo

SEQ ID NO: 299727 - DNA, 141 bp, Homo sapiens; identical to SEQ ID NO: 279903
  chr2:72374234-72374375
  hypo

SEQ ID NO: 299728 - DNA, 268 bp, Homo sapiens; identical to SEQ ID NO: 279904
  chr2:72374932-72375200
  hypo

SEQ ID NO: 299729 - DNA, 316 bp, Homo sapiens; identical to SEQ ID NO: 279905
  chr2:72375582-72375898
  hypo

SEQ ID NO: 299730 - DNA, 180 bp, Homo sapiens; identical to SEQ ID NO: 250701
  chr2:72430074-72430254
  hypo

SEQ ID NO: 299731 - DNA, 31 bp, Homo sapiens; identical to SEQ ID NO: 250702
  chr2:72459902-72459933
  hypo

SEQ ID NO: 299732 - DNA, 159 bp, Homo sapiens; identical to SEQ ID NO: 250703
  chr2:73042122-73042281
  hypo

SEQ ID NO: 299733 - DNA, 709 bp, Homo sapiens; identical to SEQ ID NO: 198279
  chr2:73052644-73053353
  hypo

SEQ ID NO: 299734 - DNA, 372 bp, Homo sapiens; identical to SEQ ID NO: 279911
  chr2:73114130-73114502
  hypo

SEQ ID NO: 299735 - DNA, 489 bp, Homo sapiens; identical to SEQ ID NO: 198284
  chr2:73142998-73143487
  hypo

SEQ ID NO: 299736 - DNA, 266 bp, Homo sapiens; identical to SEQ ID NO: 250704
  chr2:73217260-73217526
  hypo

SEQ ID NO: 299737 - DNA, 282 bp, Homo sapiens; identical to SEQ ID NO: 208042
  chr2:73302643-73302925
  hypo

SEQ ID NO: 299738 - DNA, 293 bp, Homo sapiens; identical to SEQ ID NO: 250706
  chr2:73308598-73308891
  hypo

SEQ ID NO: 299739 - DNA, 100 bp, Homo sapiens; identical to SEQ ID NO: 208043
  chr2:73440150-73440250
  hypo

SEQ ID NO: 299740 - DNA, 122 bp, Homo sapiens
  chr2:73440293-73440415
  hypo
aacaaaactcacaaaatcaggggacaaggaaacaaaacaaggcttgatagtcaggcctagctgtggggacaaatgccataggtctgtggtttgcagcttcttggggtcctgagagaacaggc

SEQ ID NO: 299741 - DNA, 88 bp, Homo sapiens; identical to SEQ ID NO: 208045
  chr2:73493671-73493759
  hypo

SEQ ID NO: 299742 - DNA, 137 bp, Homo sapiens; identical to SEQ ID NO: 198294
  chr2:73520105-73520242
  hypo

SEQ ID NO: 299743 - DNA, 189 bp, Homo sapiens; identical to SEQ ID NO: 250709
  chr2:74120176-74120365
  hypo

SEQ ID NO: 299744 - DNA, 33 bp, Homo sapiens; identical to SEQ ID NO: 250710
  chr2:74126220-74126253
  hypo

SEQ ID NO: 299745 - DNA, 373 bp, Homo sapiens; identical to SEQ ID NO: 208047
  chr2:74152825-74153198
  hypo

SEQ ID NO: 299746 - DNA, 104 bp, Homo sapiens; identical to SEQ ID NO: 208048
  chr2:74153227-74153331
  hypo

SEQ ID NO: 299747 - DNA, 92 bp, Homo sapiens; identical to SEQ ID NO: 208049
  chr2:74155569-74155661
  hypo

SEQ ID NO: 299748 - DNA, 41 bp, Homo sapiens; identical to SEQ ID NO: 208050
  chr2:74193107-74193148
  hypo

SEQ ID NO: 299749 - DNA, 252 bp, Homo sapiens; identical to SEQ ID NO: 221802
  chr2:74211285-74211537
  hypo

SEQ ID NO: 299750 - DNA, 245 bp, Homo sapiens; identical to SEQ ID NO: 250714
  chr2:74213648-74213893
  hypo

SEQ ID NO: 299751 - DNA, 259 bp, Homo sapiens; identical to SEQ ID NO: 208051
  chr2:74327559-74327818
  hypo

SEQ ID NO: 299752 - DNA, 120 bp, Homo sapiens; identical to SEQ ID NO: 208052
  chr2:74350566-74350686
  hypo

SEQ ID NO: 299753 - DNA, 421 bp, Homo sapiens; identical to SEQ ID NO: 198296
  chr2:74405756-74406177
  hypo

SEQ ID NO: 299754 - DNA, 295 bp, Homo sapiens; identical to SEQ ID NO: 198297
  chr2:74425424-74425719
  hypo

SEQ ID NO: 299755 - DNA, 395 bp, Homo sapiens; identical to SEQ ID NO: 198298
  chr2:74425790-74426185
  hypo

SEQ ID NO: 299756 - DNA, 249 bp, Homo sapiens; identical to SEQ ID NO: 198299
  chr2:74426214-74426463
  hypo

SEQ ID NO: 299757 - DNA, 211 bp, Homo sapiens; identical to SEQ ID NO: 208057
  chr2:74663402-74663613
  hypo

SEQ ID NO: 299758 - DNA, 38 bp, Homo sapiens; identical to SEQ ID NO: 208058
  chr2:74672959-74672997
  hypo

SEQ ID NO: 299759 - DNA, 86 bp, Homo sapiens; identical to SEQ ID NO: 250721
  chr2:74679101-74679187
  hypo

SEQ ID NO: 299760 - DNA, 106 bp, Homo sapiens; identical to SEQ ID NO: 208059
  chr2:74753267-74753373
  hypo

SEQ ID NO: 299761 - DNA, 231 bp, Homo sapiens; identical to SEQ ID NO: 208060
  chr2:74761647-74761878
  hypo

SEQ ID NO: 299762 - DNA, 39 bp, Homo sapiens; identical to SEQ ID NO: 250724
  chr2:74762274-74762313
  hypo

SEQ ID NO: 299763 - DNA, 36 bp, Homo sapiens; identical to SEQ ID NO: 198305
  chr2:74776040-74776076
  hypo

SEQ ID NO: 299764 - DNA, 249 bp, Homo sapiens; identical to SEQ ID NO: 279948
  chr2:74781686-74781935
  hypo

SEQ ID NO: 299765 - DNA, 1611 bp, Homo sapiens; identical to SEQ ID NO: 279951
  chr2:75060918-75062529
  hypo

SEQ ID NO: 299766 - DNA, 134 bp, Homo sapiens; identical to SEQ ID NO: 250726
  chr2:75078340-75078474
  hypo

SEQ ID NO: 299767 - DNA, 105 bp, Homo sapiens; identical to SEQ ID NO: 250727
  chr2:75105986-75106091
  hypo

SEQ ID NO: 299768 - DNA, 222 bp, Homo sapiens; identical to SEQ ID NO: 250728
  chr2:75145462-75145684
  hypo

SEQ ID NO: 299769 - DNA, 74 bp, Homo sapiens; identical to SEQ ID NO: 250729
  chr2:75785491-75785565
  hypo

SEQ ID NO: 299770 - DNA, 151 bp, Homo sapiens; identical to SEQ ID NO: 250730
  chr2:75825236-75825387
  hypo

SEQ ID NO: 299771 - DNA, 138 bp, Homo sapiens; identical to SEQ ID NO: 250731
  chr2:76642426-76642564
  hypo

SEQ ID NO: 299772 - DNA, 37 bp, Homo sapiens; identical to SEQ ID NO: 250732
  chr2:78904026-78904063
  hypo

SEQ ID NO: 299773 - DNA, 38 bp, Homo sapiens; identical to SEQ ID NO: 250733
  chr2:79824567-79824605
  hypo

SEQ ID NO: 299774 - DNA, 89 bp, Homo sapiens; identical to SEQ ID NO: 208063
  chr2:79933147-79933236
  hypo

SEQ ID NO: 299775 - DNA, 105 bp, Homo sapiens
  chr2:81421431-81421536
  hypo
ctcgcctgcaacctgcagtcatcccgcaccgcggcaacaacataaagtcgtcgttgacgtcgaccatgggcacgtagaaggagggcacgtcgttcacgcacaggg

SEQ ID NO: 299776 - DNA, 499 bp, Homo sapiens; identical to SEQ ID NO: 250736
  chr2:81422010-81422509
  hypo

SEQ ID NO: 299777 - DNA, 115 bp, Homo sapiens; identical to SEQ ID NO: 279966
  chr2:85107819-85107934
  hypo

SEQ ID NO: 299778 - DNA, 37 bp, Homo sapiens; identical to SEQ ID NO: 208064
  chr2:85227244-85227281
  hypo

SEQ ID NO: 299779 - DNA, 37 bp, Homo sapiens; identical to SEQ ID NO: 208065
  chr2:85227521-85227558
  hypo

SEQ ID NO: 299780 - DNA, 75 bp, Homo sapiens; identical to SEQ ID NO: 208066
  chr2:85280346-85280421
  hypo

SEQ ID NO: 299781 - DNA, 54 bp, Homo sapiens; identical to SEQ ID NO: 208067
  chr2:85290474-85290528
  hypo

SEQ ID NO: 299782 - DNA, 120 bp, Homo sapiens; identical to SEQ ID NO: 208068
  chr2:85356674-85356794
  hypo

SEQ ID NO: 299783 - DNA, 31 bp, Homo sapiens; identical to SEQ ID NO: 208069
  chr2:85498072-85498103
  hypo

SEQ ID NO: 299784 - DNA, 149 bp, Homo sapiens; identical to SEQ ID NO: 250743
  chr2:85515479-85515628
  hypo

SEQ ID NO: 299785 - DNA, 94 bp, Homo sapiens; identical to SEQ ID NO: 250744
  chr2:85521476-85521570
  hypo

SEQ ID NO: 299786 - DNA, 155 bp, Homo sapiens; identical to SEQ ID NO: 250745
  chr2:85596563-85596718
  hypo

SEQ ID NO: 299787 - DNA, 35 bp, Homo sapiens; identical to SEQ ID NO: 250746
  chr2:85686732-85686767
  hypo

SEQ ID NO: 299788 - DNA, 34 bp, Homo sapiens; identical to SEQ ID NO: 208070
  chr2:85729115-85729149
  hypo

SEQ ID NO: 299789 - DNA, 292 bp, Homo sapiens; identical to SEQ ID NO: 250748
  chr2:85730475-85730767
  hypo

SEQ ID NO: 299790 - DNA, 142 bp, Homo sapiens; identical to SEQ ID NO: 208071
  chr2:85776338-85776480
  hypo

SEQ ID NO: 299791 - DNA, 44 bp, Homo sapiens; identical to SEQ ID NO: 250750
  chr2:85789679-85789723
  hypo

SEQ ID NO: 299792 - DNA, 94 bp, Homo sapiens; identical to SEQ ID NO: 208072
  chr2:85819558-85819652
  hypo

SEQ ID NO: 299793 - DNA, 235 bp, Homo sapiens; identical to SEQ ID NO: 198316
  chr2:85829251-85829486
  hypo

SEQ ID NO: 299794 - DNA, 42 bp, Homo sapiens; identical to SEQ ID NO: 250752
  chr2:85833323-85833365
  hypo

SEQ ID NO: 299795 - DNA, 211 bp, Homo sapiens; identical to SEQ ID NO: 250753
  chr2:85836004-85836215
  hypo

SEQ ID NO: 299796 - DNA, 88 bp, Homo sapiens; identical to SEQ ID NO: 250754
  chr2:85836532-85836620
  hypo

SEQ ID NO: 299797 - DNA, 90 bp, Homo sapiens; identical to SEQ ID NO: 208074
  chr2:85870244-85870334
  hypo

SEQ ID NO: 299798 - DNA, 227 bp, Homo sapiens; identical to SEQ ID NO: 208075
  chr2:85871981-85872208
  hypo

SEQ ID NO: 299799 - DNA, 157 bp, Homo sapiens; identical to SEQ ID NO: 208076
  chr2:85878688-85878845
  hypo

SEQ ID NO: 299800 - DNA, 44 bp, Homo sapiens; identical to SEQ ID NO: 208077
  chr2:85885944-85885988
  hypo

SEQ ID NO: 299801 - DNA, 362 bp, Homo sapiens
  chr2:85890510-85890872
  hypo
tgcctgtggtatggcctgctcgctgctgttcccggcctgggtggtcacggacatgcagaggtggcactcagagtctcgcggcagccattctcctgtcggcgaccctggagatgtgagcattagggggaaagcaggcaaggccaccctacagaggtgtttggtttctgtcctccttggtgcattgcagtgggaccacagagggagagggtcatgcagtggcagggtagggggaggaggagagcaggcattgggctaaggagtgggcagtgggctcacttgggccagcgctgtcatccatggagcaccggaggacgaggcggcagaccagctggggcagcatgcggcccagcagcgtgtcgagc

SEQ ID NO: 299802 - DNA, 102 bp, Homo sapiens; identical to SEQ ID NO: 208079
  chr2:85890902-85891004
  hypo

SEQ ID NO: 299803 - DNA, 841 bp, Homo sapiens; identical to SEQ ID NO: 106285
  chr2:85980859-85981700
  hypo

SEQ ID NO: 299804 - DNA, 32 bp, Homo sapiens; identical to SEQ ID NO: 208080
  chr2:86344875-86344907
  hypo

SEQ ID NO: 299805 - DNA, 92 bp, Homo sapiens; identical to SEQ ID NO: 208081
  chr2:86345207-86345299
  hypo

SEQ ID NO: 299806 - DNA, 60 bp, Homo sapiens; identical to SEQ ID NO: 208082
  chr2:86425628-86425688
  hypo

SEQ ID NO: 299807 - DNA, 147 bp, Homo sapiens; identical to SEQ ID NO: 208083
  chr2:86425718-86425865
  hypo

SEQ ID NO: 299808 - DNA, 123 bp, Homo sapiens; identical to SEQ ID NO: 208084
  chr2:86783960-86784083
  hypo

SEQ ID NO: 299809 - DNA, 89 bp, Homo sapiens; identical to SEQ ID NO: 250767
  chr2:86809396-86809485
  hypo

SEQ ID NO: 299810 - DNA, 53 bp, Homo sapiens; identical to SEQ ID NO: 198319
  chr2:86850368-86850421
  hypo

SEQ ID NO: 299811 - DNA, 141 bp, Homo sapiens; identical to SEQ ID NO: 250768
  chr2:86914545-86914686
  hypo

SEQ ID NO: 299812 - DNA, 81 bp, Homo sapiens; identical to SEQ ID NO: 279988
  chr2:87016937-87017018
  hypo

SEQ ID NO: 299813 - DNA, 167 bp, Homo sapiens; identical to SEQ ID NO: 198320
  chr2:87018396-87018563
  hypo

SEQ ID NO: 299814 - DNA, 76 bp, Homo sapiens; identical to SEQ ID NO: 208087
  chr2:87569214-87569290
  hypo

SEQ ID NO: 299815 - DNA, 120 bp, Homo sapiens; identical to SEQ ID NO: 250770
  chr2:88341849-88341969
  hypo

SEQ ID NO: 299816 - DNA, 67 bp, Homo sapiens; identical to SEQ ID NO: 250771
  chr2:88387492-88387559
  hypo

SEQ ID NO: 299817 - DNA, 196 bp, Homo sapiens; identical to SEQ ID NO: 250773
  chr2:88559425-88559621
  hypo

SEQ ID NO: 299818 - DNA, 100 bp, Homo sapiens; identical to SEQ ID NO: 250774
  chr2:88591078-88591178
  hypo

SEQ ID NO: 299819 - DNA, 126 bp, Homo sapiens; identical to SEQ ID NO: 250775
  chr2:88895917-88896043
  hypo

SEQ ID NO: 299820 - DNA, 39 bp, Homo sapiens; identical to SEQ ID NO: 208088
  chr2:89601945-89601984
  hypo

SEQ ID NO: 299821 - DNA, 85 bp, Homo sapiens; identical to SEQ ID NO: 250778
  chr2:92065784-92065869
  hypo

SEQ ID NO: 299822 - DNA, 34 bp, Homo sapiens; identical to SEQ ID NO: 250779
  chr2:95715631-95715665
  hypo

SEQ ID NO: 299823 - DNA, 133 bp, Homo sapiens; identical to SEQ ID NO: 208089
  chr2:95722588-95722721
  hypo

SEQ ID NO: 299824 - DNA, 540 bp, Homo sapiens; identical to SEQ ID NO: 250781
  chr2:95723256-95723796
  hypo

SEQ ID NO: 299825 - DNA, 345 bp, Homo sapiens; identical to SEQ ID NO: 280001
  chr2:95825283-95825628
  hypo

SEQ ID NO: 299826 - DNA, 63 bp, Homo sapiens; identical to SEQ ID NO: 208090
  chr2:95941852-95941915
  hypo

SEQ ID NO: 299827 - DNA, 153 bp, Homo sapiens; identical to SEQ ID NO: 250783
  chr2:95945593-95945746
  hypo

SEQ ID NO: 299828 - DNA, 246 bp, Homo sapiens; identical to SEQ ID NO: 250784
  chr2:95960727-95960973
  hypo

SEQ ID NO: 299829 - DNA, 245 bp, Homo sapiens; identical to SEQ ID NO: 250785
  chr2:95985468-95985713
  hypo

SEQ ID NO: 299830 - DNA, 160 bp, Homo sapiens; identical to SEQ ID NO: 250786
  chr2:95992199-95992359
  hypo

SEQ ID NO: 299831 - DNA, 578 bp, Homo sapiens; identical to SEQ ID NO: 280006
  chr2:96011863-96012441
  hypo

SEQ ID NO: 299832 - DNA, 47 bp, Homo sapiens; identical to SEQ ID NO: 280007
  chr2:96012683-96012730
  hypo

SEQ ID NO: 299833 - DNA, 42 bp, Homo sapiens; identical to SEQ ID NO: 250787
  chr2:96677724-96677766
  hypo

SEQ ID NO: 299834 - DNA, 241 bp, Homo sapiens; identical to SEQ ID NO: 250788
  chr2:96754442-96754683
  hypo

SEQ ID NO: 299835 - DNA, 313 bp, Homo sapiens; identical to SEQ ID NO: 250789
  chr2:96814766-96815079
  hypo

SEQ ID NO: 299836 - DNA, 223 bp, Homo sapiens; identical to SEQ ID NO: 208092
  chr2:96821757-96821980
  hypo

SEQ ID NO: 299837 - DNA, 121 bp, Homo sapiens; identical to SEQ ID NO: 208093
  chr2:96829031-96829152
  hypo

SEQ ID NO: 299838 - DNA, 37 bp, Homo sapiens; identical to SEQ ID NO: 250792
  chr2:96839116-96839153
  hypo

SEQ ID NO: 299839 - DNA, 534 bp, Homo sapiens; identical to SEQ ID NO: 280014
  chr2:96987312-96987846
  hypo

SEQ ID NO: 299840 - DNA, 33 bp, Homo sapiens; identical to SEQ ID NO: 250793
  chr2:96993131-96993164
  hypo

SEQ ID NO: 299841 - DNA, 189 bp, Homo sapiens; identical to SEQ ID NO: 250794
  chr2:97068616-97068805
  hypo

SEQ ID NO: 299842 - DNA, 210 bp, Homo sapiens; identical to SEQ ID NO: 198323
  chr2:97171202-97171412
  hypo

SEQ ID NO: 299843 - DNA, 286 bp, Homo sapiens; identical to SEQ ID NO: 280020
  chr2:97175214-97175500
  hypo

SEQ ID NO: 299844 - DNA, 62 bp, Homo sapiens; identical to SEQ ID NO: 198326
  chr2:97203314-97203376
  hypo

SEQ ID NO: 299845 - DNA, 37 bp, Homo sapiens; identical to SEQ ID NO: 198327
  chr2:97203545-97203582
  hypo

SEQ ID NO: 299846 - DNA, 101 bp, Homo sapiens; identical to SEQ ID NO: 250795
  chr2:97222251-97222352
  hypo

SEQ ID NO: 299847 - DNA, 104 bp, Homo sapiens; identical to SEQ ID NO: 250796
  chr2:97274644-97274748
  hypo

SEQ ID NO: 299848 - DNA, 228 bp, Homo sapiens; identical to SEQ ID NO: 280023
  chr2:97303973-97304201
  hypo

SEQ ID NO: 299849 - DNA, 148 bp, Homo sapiens; identical to SEQ ID NO: 208099
  chr2:97305376-97305524
  hypo

SEQ ID NO: 299850 - DNA, 143 bp, Homo sapiens; identical to SEQ ID NO: 250798
  chr2:97335818-97335961
  hypo

SEQ ID NO: 299851 - DNA, 77 bp, Homo sapiens; identical to SEQ ID NO: 208100
  chr2:97361031-97361108
  hypo

SEQ ID NO: 299852 - DNA, 154 bp, Homo sapiens; identical to SEQ ID NO: 250800
  chr2:97364039-97364193
  hypo

SEQ ID NO: 299853 - DNA, 36 bp, Homo sapiens; identical to SEQ ID NO: 208101
  chr2:97370003-97370039
  hypo

SEQ ID NO: 299854 - DNA, 91 bp, Homo sapiens; identical to SEQ ID NO: 208102
  chr2:97427363-97427454
  hypo

SEQ ID NO: 299855 - DNA, 35 bp, Homo sapiens; identical to SEQ ID NO: 250803
  chr2:97431125-97431160
  hypo

SEQ ID NO: 299856 - DNA, 136 bp, Homo sapiens; identical to SEQ ID NO: 250804
  chr2:97432863-97432999
  hypo

SEQ ID NO: 299857 - DNA, 88 bp, Homo sapiens; identical to SEQ ID NO: 250805
  chr2:97434629-97434717
  hypo

SEQ ID NO: 299858 - DNA, 305 bp, Homo sapiens
  chr2:97435335-97435640
  hypo
aggacagtgcagggggtgtcagtgtgtaaaagccaggctgaggcgactccttgatggagacgaagagaaccaagggggcacgctattcgggagcctccttggagggtcagatggggtgaagaccatgcacagactgtgggatgggaccttaggctgtggggtgcccagcgagagcagcctcggacaagtggtgcccgaaggcagctttgcaccggttctccgtcagccctgcctggtaatagcctcaatatggtgatttgatctcaagaagctgcctgggggcaggtgtatctgagagtgacagg

SEQ ID NO: 299859 - DNA, 129 bp, Homo sapiens; identical to SEQ ID NO: 250807
  chr2:97436177-97436306
  hypo

SEQ ID NO: 299860 - DNA, 88 bp, Homo sapiens; identical to SEQ ID NO: 208103
  chr2:97437494-97437582
  hypo

SEQ ID NO: 299861 - DNA, 196 bp, Homo sapiens; identical to SEQ ID NO: 250809
  chr2:97437988-97438184
  hypo

SEQ ID NO: 299862 - DNA, 230 bp, Homo sapiens; identical to SEQ ID NO: 250810
  chr2:97454844-97455074
  hypo

SEQ ID NO: 299863 - DNA, 176 bp, Homo sapiens; identical to SEQ ID NO: 208104
  chr2:97463244-97463420
  hypo

SEQ ID NO: 299864 - DNA, 97 bp, Homo sapiens; identical to SEQ ID NO: 208105
  chr2:97479660-97479757
  hypo

SEQ ID NO: 299865 - DNA, 298 bp, Homo sapiens; identical to SEQ ID NO: 198329
  chr2:97482863-97483161
  hypo

SEQ ID NO: 299866 - DNA, 112 bp, Homo sapiens; identical to SEQ ID NO: 208107
  chr2:97485585-97485697
  hypo

SEQ ID NO: 299867 - DNA, 36 bp, Homo sapiens; identical to SEQ ID NO: 208108
  chr2:97485727-97485763
  hypo

SEQ ID NO: 299868 - DNA, 96 bp, Homo sapiens; identical to SEQ ID NO: 208109
  chr2:97489047-97489143
  hypo

SEQ ID NO: 299869 - DNA, 33 bp, Homo sapiens; identical to SEQ ID NO: 208110
  chr2:97511924-97511957
  hypo

SEQ ID NO: 299870 - DNA, 176 bp, Homo sapiens; identical to SEQ ID NO: 250817
  chr2:97530639-97530815
  hypo

SEQ ID NO: 299871 - DNA, 156 bp, Homo sapiens; identical to SEQ ID NO: 198330
  chr2:97535760-97535916
  hypo

SEQ ID NO: 299872 - DNA, 435 bp, Homo sapiens; identical to SEQ ID NO: 208112
  chr2:97544650-97545085
  hypo

SEQ ID NO: 299873 - DNA, 206 bp, Homo sapiens; identical to SEQ ID NO: 208113
  chr2:97545394-97545600
  hypo

SEQ ID NO: 299874 - DNA, 83 bp, Homo sapiens; identical to SEQ ID NO: 250820
  chr2:97550184-97550267
  hypo

SEQ ID NO: 299875 - DNA, 99 bp, Homo sapiens; identical to SEQ ID NO: 250821
  chr2:97552035-97552134
  hypo

SEQ ID NO: 299876 - DNA, 145 bp, Homo sapiens; identical to SEQ ID NO: 250822
  chr2:97552402-97552547
  hypo

SEQ ID NO: 299877 - DNA, 158 bp, Homo sapiens; identical to SEQ ID NO: 208114
  chr2:97558027-97558185
  hypo

SEQ ID NO: 299878 - DNA, 86 bp, Homo sapiens; identical to SEQ ID NO: 250824
  chr2:97568145-97568231
  hypo

SEQ ID NO: 299879 - DNA, 228 bp, Homo sapiens; identical to SEQ ID NO: 250825
  chr2:97572471-97572699
  hypo

SEQ ID NO: 299880 - DNA, 314 bp, Homo sapiens; identical to SEQ ID NO: 250826
  chr2:97576052-97576366
  hypo

SEQ ID NO: 299881 - DNA, 32 bp, Homo sapiens; identical to SEQ ID NO: 250827
  chr2:97578424-97578456
  hypo

SEQ ID NO: 299882 - DNA, 454 bp, Homo sapiens; identical to SEQ ID NO: 250828
  chr2:97586996-97587450
  hypo

SEQ ID NO: 299883 - DNA, 331 bp, Homo sapiens; identical to SEQ ID NO: 250829
  chr2:97588990-97589321
  hypo

SEQ ID NO: 299884 - DNA, 37 bp, Homo sapiens; identical to SEQ ID NO: 208115
  chr2:97651751-97651788
  hypo

SEQ ID NO: 299885 - DNA, 311 bp, Homo sapiens; identical to SEQ ID NO: 208116
  chr2:97651885-97652196
  hypo

SEQ ID NO: 299886 - DNA, 82 bp, Homo sapiens; identical to SEQ ID NO: 208117
  chr2:97652405-97652487
  hypo

SEQ ID NO: 299887 - DNA, 161 bp, Homo sapiens; identical to SEQ ID NO: 250831
  chr2:97655847-97656008
  hypo

SEQ ID NO: 299888 - DNA, 103 bp, Homo sapiens; identical to SEQ ID NO: 198331
  chr2:97779476-97779579
  hypo

SEQ ID NO: 299889 - DNA, 146 bp, Homo sapiens; identical to SEQ ID NO: 250833
  chr2:98330282-98330428
  hypo

SEQ ID NO: 299890 - DNA, 343 bp, Homo sapiens; identical to SEQ ID NO: 250834
  chr2:98349361-98349704
  hypo

SEQ ID NO: 299891 - DNA, 395 bp, Homo sapiens
  chr2:98350739-98351134
  hypo
ataccaatgcacacgcccctagagtccaccctcatgtggcttcatggggcacccacagctgtggccaggagtgtatgccagtgtgtgcgtgtggatgtgcaggaacacgcatgggcacccacctgcttgtgcatgctccagggacggcacccttgtctggggcaggtgcttgtgggggctgaggctgccttgctccccacacccctgcccctgacctgggagtgtaccgctgtgtgtgcccagcacgcataacgtccccagacaaaccgcggccgatgcccatggacacgagcgtgtatgagagcccctacagcgacccagaggagctcaaggacaagaagctcttcctgaagcgcgataacctcctcatagctgacattgaacttggctgcggc

SEQ ID NO: 299892 - DNA, 321 bp, Homo sapiens; identical to SEQ ID NO: 250836
  chr2:98377007-98377328
  hypo

SEQ ID NO: 299893 - DNA, 593 bp, Homo sapiens; identical to SEQ ID NO: 208120
  chr2:98408814-98409407
  hypo

SEQ ID NO: 299894 - DNA, 32 bp, Homo sapiens; identical to SEQ ID NO: 250838
  chr2:98613858-98613890
  hypo

SEQ ID NO: 299895 - DNA, 32 bp, Homo sapiens; identical to SEQ ID NO: 250839
  chr2:98614130-98614162
  hypo

SEQ ID NO: 299896 - DNA, 47 bp, Homo sapiens; identical to SEQ ID NO: 250840
  chr2:98674829-98674876
  hypo

SEQ ID NO: 299897 - DNA, 164 bp, Homo sapiens; identical to SEQ ID NO: 250841
  chr2:98871119-98871283
  hypo

SEQ ID NO: 299898 - DNA, 191 bp, Homo sapiens; identical to SEQ ID NO: 250843
  chr2:99097186-99097377
  hypo

SEQ ID NO: 299899 - DNA, 283 bp, Homo sapiens; identical to SEQ ID NO: 250844
  chr2:99136319-99136602
  hypo

SEQ ID NO: 299900 - DNA, 90 bp, Homo sapiens; identical to SEQ ID NO: 208121
  chr2:99386853-99386943
  hypo

SEQ ID NO: 299901 - DNA, 77 bp, Homo sapiens; identical to SEQ ID NO: 208122
  chr2:99386973-99387050
  hypo

SEQ ID NO: 299902 - DNA, 206 bp, Homo sapiens; identical to SEQ ID NO: 250847
  chr2:99444496-99444702
  hypo

SEQ ID NO: 299903 - DNA, 38 bp, Homo sapiens; identical to SEQ ID NO: 250848
  chr2:99487423-99487461
  hypo

SEQ ID NO: 299904 - DNA, 189 bp, Homo sapiens; identical to SEQ ID NO: 250849
  chr2:99517365-99517554
  hypo

SEQ ID NO: 299905 - DNA, 47 bp, Homo sapiens; identical to SEQ ID NO: 250850
  chr2:99537760-99537807
  hypo

SEQ ID NO: 299906 - DNA, 86 bp, Homo sapiens; identical to SEQ ID NO: 250851
  chr2:99543362-99543448
  hypo

SEQ ID NO: 299907 - DNA, 169 bp, Homo sapiens
  chr2:99796478-99796647
  hypo
aggagctgatcttatcaatttaatacataaatattgagtgtctactgtgagccagggttgtgctgggtgttaaggaatatttgggtatttctcaacattgaataatacgaaaagtctcacttgtctcctccacaaccctgcgcatttctcacaccgaacctcatccgtt

SEQ ID NO: 299908 - DNA, 52 bp, Homo sapiens; identical to SEQ ID NO: 250857
  chr2:100064553-100064605
  hypo

SEQ ID NO: 299909 - DNA, 32 bp, Homo sapiens; identical to SEQ ID NO: 250858
  chr2:100107725-100107757
  hypo

SEQ ID NO: 299910 - DNA, 120 bp, Homo sapiens; identical to SEQ ID NO: 250859
  chr2:100141754-100141874
  hypo

SEQ ID NO: 299911 - DNA, 82 bp, Homo sapiens; identical to SEQ ID NO: 250860
  chr2:100294013-100294095
  hypo

SEQ ID NO: 299912 - DNA, 66 bp, Homo sapiens; identical to SEQ ID NO: 208123
  chr2:100618385-100618451
  hypo

SEQ ID NO: 299913 - DNA, 476 bp, Homo sapiens; identical to SEQ ID NO: 280049
  chr2:100721429-100721905
  hypo

SEQ ID NO: 299914 - DNA, 391 bp, Homo sapiens; identical to SEQ ID NO: 221837
  chr2:100898414-100898805
  hypo

SEQ ID NO: 299915 - DNA, 103 bp, Homo sapiens; identical to SEQ ID NO: 250862
  chr2:100910680-100910783
  hypo

SEQ ID NO: 299916 - DNA, 120 bp, Homo sapiens; identical to SEQ ID NO: 250863
  chr2:101006128-101006248
  hypo

SEQ ID NO: 299917 - DNA, 70 bp, Homo sapiens
  chr2:101009997-101010067
  hypo
gatgtggtccccaaactgaaggtctagccatctgtggttcggatcgccgaggtagcgcacgaaatcttca

SEQ ID NO: 299918 - DNA, 125 bp, Homo sapiens; identical to SEQ ID NO: 250865
  chr2:101013988-101014113
  hypo

SEQ ID NO: 299919 - DNA, 37 bp, Homo sapiens; identical to SEQ ID NO: 250866
  chr2:101021653-101021690
  hypo

SEQ ID NO: 299920 - DNA, 43 bp, Homo sapiens; identical to SEQ ID NO: 208125
  chr2:101022688-101022731
  hypo

SEQ ID NO: 299921 - DNA, 155 bp, Homo sapiens; identical to SEQ ID NO: 198342
  chr2:101033436-101033591
  hypo

SEQ ID NO: 299922 - DNA, 40 bp, Homo sapiens; identical to SEQ ID NO: 250868
  chr2:101035289-101035329
  hypo

SEQ ID NO: 299923 - DNA, 197 bp, Homo sapiens; identical to SEQ ID NO: 208127
  chr2:101362900-101363097
  hypo

SEQ ID NO: 299924 - DNA, 177 bp, Homo sapiens; identical to SEQ ID NO: 208128
  chr2:101520349-101520526
  hypo

SEQ ID NO: 299925 - DNA, 290 bp, Homo sapiens; identical to SEQ ID NO: 250871
  chr2:101552507-101552797
  hypo

SEQ ID NO: 299926 - DNA, 40 bp, Homo sapiens; identical to SEQ ID NO: 250872
  chr2:101574054-101574094
  hypo

SEQ ID NO: 299927 - DNA, 40 bp, Homo sapiens; identical to SEQ ID NO: 250873
  chr2:101574394-101574434
  hypo

SEQ ID NO: 299928 - DNA, 151 bp, Homo sapiens; identical to SEQ ID NO: 208129
  chr2:101612186-101612337
  hypo

SEQ ID NO: 299929 - DNA, 93 bp, Homo sapiens; identical to SEQ ID NO: 250875
  chr2:101638838-101638931
  hypo

SEQ ID NO: 299930 - DNA, 175 bp, Homo sapiens; identical to SEQ ID NO: 208130
  chr2:101696583-101696758
  hypo

SEQ ID NO: 299931 - DNA, 704 bp, Homo sapiens; identical to SEQ ID NO: 198348
  chr2:101767139-101767843
  hypo

SEQ ID NO: 299932 - DNA, 38 bp, Homo sapiens; identical to SEQ ID NO: 208132
  chr2:101772516-101772554
  hypo

SEQ ID NO: 299933 - DNA, 105 bp, Homo sapiens; identical to SEQ ID NO: 208133
  chr2:101875536-101875641
  hypo

SEQ ID NO: 299934 - DNA, 248 bp, Homo sapiens; identical to SEQ ID NO: 250879
  chr2:101882441-101882689
  hypo

SEQ ID NO: 299935 - DNA, 67 bp, Homo sapiens; identical to SEQ ID NO: 208134
  chr2:101889654-101889721
  hypo

SEQ ID NO: 299936 - DNA, 955 bp, Homo sapiens; identical to SEQ ID NO: 198349
  chr2:101924527-101925482
  hypo

SEQ ID NO: 299937 - DNA, 186 bp, Homo sapiens; identical to SEQ ID NO: 208136
  chr2:101970928-101971114
  hypo

SEQ ID NO: 299938 - DNA, 34 bp, Homo sapiens; identical to SEQ ID NO: 250882
  chr2:102226228-102226262
  hypo

SEQ ID NO: 299939 - DNA, 163 bp, Homo sapiens; identical to SEQ ID NO: 250883
  chr2:102232955-102233118
  hypo

SEQ ID NO: 299940 - DNA, 332 bp, Homo sapiens; identical to SEQ ID NO: 198353
  chr2:102313750-102314082
  hypo

SEQ ID NO: 299941 - DNA, 153 bp, Homo sapiens; identical to SEQ ID NO: 37826
  chr2:102314091-102314244
  hypo

SEQ ID NO: 299942 - DNA, 82 bp, Homo sapiens; identical to SEQ ID NO: 250884
  chr2:102320123-102320205
  hypo

SEQ ID NO: 299943 - DNA, 79 bp, Homo sapiens; identical to SEQ ID NO: 208139
  chr2:102356564-102356643
  hypo

SEQ ID NO: 299944 - DNA, 259 bp, Homo sapiens; identical to SEQ ID NO: 250886
  chr2:102486133-102486392
  hypo

SEQ ID NO: 299945 - DNA, 219 bp, Homo sapiens; identical to SEQ ID NO: 250887
  chr2:102486857-102487076
  hypo

SEQ ID NO: 299946 - DNA, 176 bp, Homo sapiens; identical to SEQ ID NO: 208140
  chr2:102636186-102636362
  hypo

SEQ ID NO: 299947 - DNA, 32 bp, Homo sapiens; identical to SEQ ID NO: 208141
  chr2:102640214-102640246
  hypo

SEQ ID NO: 299948 - DNA, 68 bp, Homo sapiens; identical to SEQ ID NO: 250890
  chr2:102681929-102681997
  hypo

SEQ ID NO: 299949 - DNA, 160 bp, Homo sapiens; identical to SEQ ID NO: 208142
  chr2:102683382-102683542
  hypo

SEQ ID NO: 299950 - DNA, 540 bp, Homo sapiens; identical to SEQ ID NO: 280069
  chr2:102758958-102759498
  hypo

SEQ ID NO: 299951 - DNA, 39 bp, Homo sapiens; identical to SEQ ID NO: 250892
  chr2:102804745-102804784
  hypo

SEQ ID NO: 299952 - DNA, 64 bp, Homo sapiens; identical to SEQ ID NO: 250893
  chr2:102866731-102866795
  hypo

SEQ ID NO: 299953 - DNA, 51 bp, Homo sapiens; identical to SEQ ID NO: 208143
  chr2:102867171-102867222
  hypo

SEQ ID NO: 299954 - DNA, 42 bp, Homo sapiens; identical to SEQ ID NO: 208144
  chr2:103130075-103130117
  hypo

SEQ ID NO: 299955 - DNA, 107 bp, Homo sapiens; identical to SEQ ID NO: 250896
  chr2:103548794-103548901
  hypo

SEQ ID NO: 299956 - DNA, 41 bp, Homo sapiens; identical to SEQ ID NO: 250897
  chr2:104111995-104112036
  hypo

SEQ ID NO: 299957 - DNA, 92 bp, Homo sapiens; identical to SEQ ID NO: 280077
  chr2:105468471-105468563
  hypo

SEQ ID NO: 299958 - DNA, 353 bp, Homo sapiens; identical to SEQ ID NO: 280078
  chr2:105471069-105471422
  hypo

SEQ ID NO: 299959 - DNA, 245 bp, Homo sapiens; identical to SEQ ID NO: 198366
  chr2:105478381-105478626
  hypo

SEQ ID NO: 299960 - DNA, 248 bp, Homo sapiens; identical to SEQ ID NO: 208148
  chr2:105528549-105528797
  hypo

SEQ ID NO: 299961 - DNA, 120 bp, Homo sapiens; identical to SEQ ID NO: 250899
  chr2:105695482-105695602
  hypo

SEQ ID NO: 299962 - DNA, 241 bp, Homo sapiens; identical to SEQ ID NO: 208149
  chr2:105697575-105697816
  hypo

SEQ ID NO: 299963 - DNA, 127 bp, Homo sapiens; identical to SEQ ID NO: 208150
  chr2:105719492-105719619
  hypo

SEQ ID NO: 299964 - DNA, 279 bp, Homo sapiens
  chr2:105719654-105719933
  hypo
cggggccacctcatatgagatgcttgaaataattggactgtgactcaggcgacgggtcagcctgctgacagatttgggaggctgctgcgtggaaggggaatttgaaacgtgggctggatcagcacggaggattgggcagggagaaggccaaggctcaagtggagaaacagccatcaagtttaaagtaggaaggagggaagagccagcaaagggggtggtgagcggtgataggaagacagcaagccaggcacagcggtcagggacgtcagtgatgaccaa

SEQ ID NO: 299965 - DNA, 468 bp, Homo sapiens; identical to SEQ ID NO: 280093
  chr2:105760095-105760563
  hypo

SEQ ID NO: 299966 - DNA, 55 bp, Homo sapiens; identical to SEQ ID NO: 250902
  chr2:105859043-105859098
  hypo

SEQ ID NO: 299967 - DNA, 163 bp, Homo sapiens; identical to SEQ ID NO: 250903
  chr2:105885967-105886130
  hypo

SEQ ID NO: 299968 - DNA, 650 bp, Homo sapiens; identical to SEQ ID NO: 250904
  chr2:105887868-105888518
  hypo

SEQ ID NO: 299969 - DNA, 244 bp, Homo sapiens; identical to SEQ ID NO: 250905
  chr2:105910432-105910676
  hypo

SEQ ID NO: 299970 - DNA, 227 bp, Homo sapiens; identical to SEQ ID NO: 250907
  chr2:105987660-105987887
  hypo

SEQ ID NO: 299971 - DNA, 69 bp, Homo sapiens; identical to SEQ ID NO: 250908
  chr2:106011679-106011748
  hypo

SEQ ID NO: 299972 - DNA, 85 bp, Homo sapiens
  chr2:106016398-106016483
  hypo
gaatacatcctccagagaaggcgggaagaactccgtgattgctttcttttaattgatactctccgtctggtaggcctcatgggtc

SEQ ID NO: 299973 - DNA, 91 bp, Homo sapiens; identical to SEQ ID NO: 208154
  chr2:106064705-106064796
  hypo

SEQ ID NO: 299974 - DNA, 36 bp, Homo sapiens; identical to SEQ ID NO: 208155
  chr2:106081974-106082010
  hypo

SEQ ID NO: 299975 - DNA, 241 bp, Homo sapiens; identical to SEQ ID NO: 250913
  chr2:106227199-106227440
  hypo

SEQ ID NO: 299976 - DNA, 214 bp, Homo sapiens; identical to SEQ ID NO: 198372
  chr2:106362018-106362232
  hypo

SEQ ID NO: 299977 - DNA, 200 bp, Homo sapiens; identical to SEQ ID NO: 250914
  chr2:106399856-106400056
  hypo

SEQ ID NO: 299978 - DNA, 97 bp, Homo sapiens; identical to SEQ ID NO: 250915
  chr2:106473751-106473848
  hypo

SEQ ID NO: 299979 - DNA, 380 bp, Homo sapiens; identical to SEQ ID NO: 250916
  chr2:106498148-106498528
  hypo

SEQ ID NO: 299980 - DNA, 167 bp, Homo sapiens; identical to SEQ ID NO: 250917
  chr2:106499100-106499267
  hypo

SEQ ID NO: 299981 - DNA, 240 bp, Homo sapiens; identical to SEQ ID NO: 250918
  chr2:106713428-106713668
  hypo

SEQ ID NO: 299982 - DNA, 61 bp, Homo sapiens; identical to SEQ ID NO: 250919
  chr2:106722162-106722223
  hypo

SEQ ID NO: 299983 - DNA, 105 bp, Homo sapiens; identical to SEQ ID NO: 208157
  chr2:106730106-106730211
  hypo

SEQ ID NO: 299984 - DNA, 181 bp, Homo sapiens; identical to SEQ ID NO: 208158
  chr2:106730256-106730437
  hypo

SEQ ID NO: 299985 - DNA, 168 bp, Homo sapiens; identical to SEQ ID NO: 250921
  chr2:106734893-106735061
  hypo

SEQ ID NO: 299986 - DNA, 51 bp, Homo sapiens; identical to SEQ ID NO: 250922
  chr2:106742074-106742125
  hypo

SEQ ID NO: 299987 - DNA, 152 bp, Homo sapiens; identical to SEQ ID NO: 208159
  chr2:106778555-106778707
  hypo

SEQ ID NO: 299988 - DNA, 299 bp, Homo sapiens; identical to SEQ ID NO: 250924
  chr2:106927123-106927422
  hypo

SEQ ID NO: 299989 - DNA, 64 bp, Homo sapiens; identical to SEQ ID NO: 208160
  chr2:106959095-106959159
  hypo

SEQ ID NO: 299990 - DNA, 61 bp, Homo sapiens; identical to SEQ ID NO: 208161
  chr2:106959839-106959900
  hypo

SEQ ID NO: 299991 - DNA, 32 bp, Homo sapiens; identical to SEQ ID NO: 250927
  chr2:107134450-107134482
  hypo

SEQ ID NO: 299992 - DNA, 78 bp, Homo sapiens; identical to SEQ ID NO: 250928
  chr2:107204235-107204313
  hypo

SEQ ID NO: 299993 - DNA, 57 bp, Homo sapiens; identical to SEQ ID NO: 208162
  chr2:107459358-107459415
  hypo

SEQ ID NO: 299994 - DNA, 585 bp, Homo sapiens; identical to SEQ ID NO: 208163
  chr2:107459445-107460030
  hypo

SEQ ID NO: 299995 - DNA, 56 bp, Homo sapiens; identical to SEQ ID NO: 250930
  chr2:107595241-107595297
  hypo

SEQ ID NO: 299996 - DNA, 156 bp, Homo sapiens; identical to SEQ ID NO: 250931
  chr2:107919281-107919437
  hypo

SEQ ID NO: 299997 - DNA, 180 bp, Homo sapiens; identical to SEQ ID NO: 250932
  chr2:108085838-108086018
  hypo

SEQ ID NO: 299998 - DNA, 75 bp, Homo sapiens; identical to SEQ ID NO: 250933
  chr2:108086318-108086393
  hypo

SEQ ID NO: 299999 - DNA, 37 bp, Homo sapiens; identical to SEQ ID NO: 208164
  chr2:108160841-108160878
  hypo

SEQ ID NO: 300000 - DNA, 722 bp, Homo sapiens
  chr2:108160925-108161647
  hypo
gtggagatggaaggagacctggtgcactgagaggcggatgtgaaactgaggggagatggaaggagacctggcgcactgagaggcggatgtgaaactcaagagagatagaaggagacgtggcgcactgagagccggatgtgaaactgagggaagatggaaggagacctgacgcactgagagccggatgtgaaactgaggggagatggaaggagacgcggcgcactgagagccggatgtgaaactcaggggagatggaaggagacctggtgcactgagaggcggatgtgaaactgaggggagatggaaggagactgggcacactgagagacggatgtgaaactcaggagagatggaaggagacgtggtgcactgagagccggatgtgaaactgagggaagatggaaggggacctggcgcactgagaggcggatgtgaaactcaggagagatggaaggagacgtggcgcactgagagccggatgtgaaactgagtggagatggaaggagactgggcacactgagagacggatgtgaaactcaggagagatggaaggacacatggcgcactgagagccggatgtgaaagtgagtggagatggaggcggggcgcactgagaggcggctgtgaaactcaggagagatggaaggagacgtggcacactgagagccggatgtgaaagtgagtggagatggagacggagcgcactgagaggtggatgtgat

SEQ ID NO: 300001 - DNA, 120 bp, Homo sapiens; identical to SEQ ID NO: 250935
  chr2:108552484-108552604
  hypo

SEQ ID NO: 300002 - DNA, 87 bp, Homo sapiens; identical to SEQ ID NO: 208166
  chr2:108918020-108918107
  hypo

SEQ ID NO: 300003 - DNA, 39 bp, Homo sapiens; identical to SEQ ID NO: 208167
  chr2:109225030-109225069
  hypo

SEQ ID NO: 300004 - DNA, 86 bp, Homo sapiens; identical to SEQ ID NO: 250938
  chr2:109259999-109260085
  hypo

SEQ ID NO: 300005 - DNA, 83 bp, Homo sapiens; identical to SEQ ID NO: 250939
  chr2:109328951-109329034
  hypo

SEQ ID NO: 300006 - DNA, 102 bp, Homo sapiens; identical to SEQ ID NO: 250940
  chr2:109329294-109329396
  hypo

SEQ ID NO: 300007 - DNA, 74 bp, Homo sapiens
  chr2:109335166-109335240
  hypo
aaaaattgtaattgtccaaaacttaatatttgtggtctttttcattatgcagttctaaatctcccttttttttt

SEQ ID NO: 300008 - DNA, 274 bp, Homo sapiens; identical to SEQ ID NO: 280103
  chr2:109335510-109335784
  hypo

SEQ ID NO: 300009 - DNA, 37 bp, Homo sapiens; identical to SEQ ID NO: 208168
  chr2:109536234-109536271
  hypo

SEQ ID NO: 300010 - DNA, 37 bp, Homo sapiens; identical to SEQ ID NO: 208169
  chr2:109556840-109556877
  hypo

SEQ ID NO: 300011 - DNA, 474 bp, Homo sapiens; identical to SEQ ID NO: 250944
  chr2:109558967-109559441
  hypo

SEQ ID NO: 300012 - DNA, 181 bp, Homo sapiens; identical to SEQ ID NO: 250945
  chr2:109588359-109588540
  hypo

SEQ ID NO: 300013 - DNA, 114 bp, Homo sapiens; identical to SEQ ID NO: 250946
  chr2:109604152-109604266
  hypo

SEQ ID NO: 300014 - DNA, 70 bp, Homo sapiens; identical to SEQ ID NO: 198376
  chr2:109647969-109648039
  hypo

SEQ ID NO: 300015 - DNA, 197 bp, Homo sapiens; identical to SEQ ID NO: 250947
  chr2:109723678-109723875
  hypo

SEQ ID NO: 300016 - DNA, 34 bp, Homo sapiens; identical to SEQ ID NO: 250948
  chr2:109737056-109737090
  hypo

SEQ ID NO: 300017 - DNA, 185 bp, Homo sapiens; identical to SEQ ID NO: 250949
  chr2:109741776-109741961
  hypo

SEQ ID NO: 300018 - DNA, 959 bp, Homo sapiens; identical to SEQ ID NO: 250950
  chr2:110007111-110008070
  hypo

SEQ ID NO: 300019 - DNA, 40 bp, Homo sapiens; identical to SEQ ID NO: 208173
  chr2:110008967-110009007
  hypo

SEQ ID NO: 300020 - DNA, 40 bp, Homo sapiens; identical to SEQ ID NO: 208174
  chr2:110009247-110009287
  hypo

SEQ ID NO: 300021 - DNA, 231 bp, Homo sapiens; identical to SEQ ID NO: 250953
  chr2:110011287-110011518
  hypo

SEQ ID NO: 300022 - DNA, 197 bp, Homo sapiens; identical to SEQ ID NO: 208175
  chr2:110015123-110015320
  hypo

SEQ ID NO: 300023 - DNA, 110 bp, Homo sapiens; identical to SEQ ID NO: 208176
  chr2:110015364-110015474
  hypo

SEQ ID NO: 300024 - DNA, 262 bp, Homo sapiens; identical to SEQ ID NO: 208177
  chr2:110016729-110016991
  hypo

SEQ ID NO: 300025 - DNA, 142 bp, Homo sapiens; identical to SEQ ID NO: 208178
  chr2:110017051-110017193
  hypo

SEQ ID NO: 300026 - DNA, 72 bp, Homo sapiens; identical to SEQ ID NO: 250957
  chr2:110021041-110021113
  hypo

SEQ ID NO: 300027 - DNA, 466 bp, Homo sapiens; identical to SEQ ID NO: 208179
  chr2:110021654-110022120
  hypo

SEQ ID NO: 300028 - DNA, 90 bp, Homo sapiens; identical to SEQ ID NO: 250959
  chr2:110022453-110022543
  hypo

SEQ ID NO: 300029 - DNA, 113 bp, Homo sapiens; identical to SEQ ID NO: 250960
  chr2:110025459-110025572
  hypo

SEQ ID NO: 300030 - DNA, 157 bp, Homo sapiens; identical to SEQ ID NO: 250961
  chr2:110026466-110026623
  hypo

SEQ ID NO: 300031 - DNA, 165 bp, Homo sapiens; identical to SEQ ID NO: 208180
  chr2:110028490-110028655
  hypo

SEQ ID NO: 300032 - DNA, 224 bp, Homo sapiens; identical to SEQ ID NO: 250963
  chr2:110040036-110040260
  hypo

SEQ ID NO: 300033 - DNA, 158 bp, Homo sapiens; identical to SEQ ID NO: 250964
  chr2:110048957-110049115
  hypo

SEQ ID NO: 300034 - DNA, 49 bp, Homo sapiens; identical to SEQ ID NO: 208181
  chr2:110256842-110256891
  hypo

SEQ ID NO: 300035 - DNA, 194 bp, Homo sapiens; identical to SEQ ID NO: 208182
  chr2:110259063-110259257
  hypo

SEQ ID NO: 300036 - DNA, 126 bp, Homo sapiens; identical to SEQ ID NO: 250967
  chr2:110260107-110260233
  hypo

SEQ ID NO: 300037 - DNA, 93 bp, Homo sapiens; identical to SEQ ID NO: 250968
  chr2:110274998-110275091
  hypo

SEQ ID NO: 300038 - DNA, 37 bp, Homo sapiens; identical to SEQ ID NO: 208183
  chr2:110352252-110352289
  hypo

SEQ ID NO: 300039 - DNA, 161 bp, Homo sapiens; identical to SEQ ID NO: 250970
  chr2:110483973-110484134
  hypo

SEQ ID NO: 300040 - DNA, 196 bp, Homo sapiens; identical to SEQ ID NO: 250971
  chr2:110853614-110853810
  hypo

SEQ ID NO: 300041 - DNA, 145 bp, Homo sapiens; identical to SEQ ID NO: 250972
  chr2:110855514-110855659
  hypo

SEQ ID NO: 300042 - DNA, 175 bp, Homo sapiens; identical to SEQ ID NO: 250973
  chr2:110861845-110862020
  hypo

SEQ ID NO: 300043 - DNA, 96 bp, Homo sapiens; identical to SEQ ID NO: 250974
  chr2:111438060-111438156
  hypo

SEQ ID NO: 300044 - DNA, 32 bp, Homo sapiens
  chr2:111438523-111438555
  hypo
gggtggatgtttctgcttccttggcctcttga

SEQ ID NO: 300045 - DNA, 293 bp, Homo sapiens; identical to SEQ ID NO: 198383
  chr2:111490023-111490316
  hypo

SEQ ID NO: 300046 - DNA, 170 bp, Homo sapiens; identical to SEQ ID NO: 198384
  chr2:111490689-111490859
  hypo

SEQ ID NO: 300047 - DNA, 85 bp, Homo sapiens; identical to SEQ ID NO: 221856
  chr2:111880646-111880731
  hypo

SEQ ID NO: 300048 - DNA, 86 bp, Homo sapiens; identical to SEQ ID NO: 250976
  chr2:111881445-111881531
  hypo

SEQ ID NO: 300049 - DNA, 111 bp, Homo sapiens; identical to SEQ ID NO: 250977
  chr2:111890892-111891003
  hypo

SEQ ID NO: 300050 - DNA, 310 bp, Homo sapiens; identical to SEQ ID NO: 250978
  chr2:111911293-111911603
  hypo

SEQ ID NO: 300051 - DNA, 162 bp, Homo sapiens; identical to SEQ ID NO: 250979
  chr2:111929172-111929334
  hypo

SEQ ID NO: 300052 - DNA, 45 bp, Homo sapiens; identical to SEQ ID NO: 208186
  chr2:111935999-111936044
  hypo

SEQ ID NO: 300053 - DNA, 90 bp, Homo sapiens; identical to SEQ ID NO: 198389
  chr2:112656487-112656577
  hypo

SEQ ID NO: 300054 - DNA, 32 bp, Homo sapiens; identical to SEQ ID NO: 280126
  chr2:112657092-112657124
  hypo

SEQ ID NO: 300055 - DNA, 147 bp, Homo sapiens; identical to SEQ ID NO: 250981
  chr2:112745416-112745563
  hypo

SEQ ID NO: 300056 - DNA, 33 bp, Homo sapiens
  chr2:112779013-112779046
  hypo
gactgtctgtgttgcggacttcggcctctctaa

SEQ ID NO: 300057 - DNA, 106 bp, Homo sapiens; identical to SEQ ID NO: 250983
  chr2:112785956-112786062
  hypo

SEQ ID NO: 300058 - DNA, 94 bp, Homo sapiens; identical to SEQ ID NO: 208188
  chr2:112786372-112786466
  hypo

SEQ ID NO: 300059 - DNA, 142 bp, Homo sapiens; identical to SEQ ID NO: 250985
  chr2:112810885-112811027
  hypo

SEQ ID NO: 300060 - DNA, 47 bp, Homo sapiens; identical to SEQ ID NO: 208189
  chr2:112945140-112945187
  hypo

SEQ ID NO: 300061 - DNA, 213 bp, Homo sapiens; identical to SEQ ID NO: 208190
  chr2:113103033-113103246
  hypo

SEQ ID NO: 300062 - DNA, 110 bp, Homo sapiens; identical to SEQ ID NO: 208191
  chr2:113103431-113103541
  hypo

SEQ ID NO: 300063 - DNA, 35 bp, Homo sapiens; identical to SEQ ID NO: 208192
  chr2:113168035-113168070
  hypo

SEQ ID NO: 300064 - DNA, 188 bp, Homo sapiens; identical to SEQ ID NO: 208193
  chr2:113286635-113286823
  hypo

SEQ ID NO: 300065 - DNA, 44 bp, Homo sapiens; identical to SEQ ID NO: 250990
  chr2:113349169-113349213
  hypo

SEQ ID NO: 300066 - DNA, 33 bp, Homo sapiens; identical to SEQ ID NO: 208194
  chr2:113494876-113494909
  hypo

SEQ ID NO: 300067 - DNA, 32 bp, Homo sapiens; identical to SEQ ID NO: 250992
  chr2:113498451-113498483
  hypo

SEQ ID NO: 300068 - DNA, 104 bp, Homo sapiens; identical to SEQ ID NO: 250993
  chr2:113611570-113611674
  hypo

SEQ ID NO: 300069 - DNA, 169 bp, Homo sapiens; identical to SEQ ID NO: 250994
  chr2:113707198-113707367
  hypo

SEQ ID NO: 300070 - DNA, 31 bp, Homo sapiens; identical to SEQ ID NO: 208195
  chr2:113804066-113804097
  hypo

SEQ ID NO: 300071 - DNA, 86 bp, Homo sapiens; identical to SEQ ID NO: 250996
  chr2:113908444-113908530
  hypo

SEQ ID NO: 300072 - DNA, 342 bp, Homo sapiens; identical to SEQ ID NO: 250997
  chr2:113967316-113967658
  hypo

SEQ ID NO: 300073 - DNA, 188 bp, Homo sapiens; identical to SEQ ID NO: 208196
  chr2:113973331-113973519
  hypo

SEQ ID NO: 300074 - DNA, 111 bp, Homo sapiens; identical to SEQ ID NO: 250999
  chr2:114060817-114060928
  hypo

SEQ ID NO: 300075 - DNA, 67 bp, Homo sapiens; identical to SEQ ID NO: 251000
  chr2:114467013-114467080
  hypo

SEQ ID NO: 300076 - DNA, 31 bp, Homo sapiens; identical to SEQ ID NO: 251002
  chr2:114736319-114736350
  hypo

SEQ ID NO: 300077 - DNA, 691 bp, Homo sapiens; identical to SEQ ID NO: 251003
  chr2:114736470-114737161
  hypo

SEQ ID NO: 300078 - DNA, 43 bp, Homo sapiens; identical to SEQ ID NO: 251004
  chr2:115183213-115183256
  hypo

SEQ ID NO: 300079 - DNA, 79 bp, Homo sapiens; identical to SEQ ID NO: 251006
  chr2:118736286-118736365
  hypo

SEQ ID NO: 300080 - DNA, 145 bp, Homo sapiens; identical to SEQ ID NO: 251007
  chr2:118743611-118743756
  hypo

SEQ ID NO: 300081 - DNA, 85 bp, Homo sapiens; identical to SEQ ID NO: 251008
  chr2:118743816-118743901
  hypo

SEQ ID NO: 300082 - DNA, 43 bp, Homo sapiens; identical to SEQ ID NO: 251009
  chr2:118875673-118875716
  hypo

SEQ ID NO: 300083 - DNA, 67 bp, Homo sapiens; identical to SEQ ID NO: 251010
  chr2:119028306-119028373
  hypo

SEQ ID NO: 300084 - DNA, 111 bp, Homo sapiens; identical to SEQ ID NO: 280163
  chr2:119769050-119769161
  hypo

SEQ ID NO: 300085 - DNA, 185 bp, Homo sapiens; identical to SEQ ID NO: 251011
  chr2:120003178-120003363
  hypo

SEQ ID NO: 300086 - DNA, 163 bp, Homo sapiens; identical to SEQ ID NO: 208198
  chr2:120005202-120005365
  hypo

SEQ ID NO: 300087 - DNA, 150 bp, Homo sapiens; identical to SEQ ID NO: 208199
  chr2:120011808-120011958
  hypo

SEQ ID NO: 300088 - DNA, 250 bp, Homo sapiens; identical to SEQ ID NO: 208200
  chr2:120020672-120020922
  hypo

SEQ ID NO: 300089 - DNA, 82 bp, Homo sapiens; identical to SEQ ID NO: 208201
  chr2:120069741-120069823
  hypo

SEQ ID NO: 300090 - DNA, 35 bp, Homo sapiens; identical to SEQ ID NO: 251016
  chr2:120230476-120230511
  hypo

SEQ ID NO: 300091 - DNA, 184 bp, Homo sapiens; identical to SEQ ID NO: 208202
  chr2:120247827-120248011
  hypo

SEQ ID NO: 300092 - DNA, 162 bp, Homo sapiens; identical to SEQ ID NO: 251018
  chr2:120282306-120282468
  hypo

SEQ ID NO: 300093 - DNA, 239 bp, Homo sapiens; identical to SEQ ID NO: 251019
  chr2:120317342-120317581
  hypo

SEQ ID NO: 300094 - DNA, 161 bp, Homo sapiens; identical to SEQ ID NO: 208203
  chr2:120754214-120754375
  hypo

SEQ ID NO: 300095 - DNA, 129 bp, Homo sapiens; identical to SEQ ID NO: 198413
  chr2:120770809-120770938
  hypo

SEQ ID NO: 300096 - DNA, 218 bp, Homo sapiens; identical to SEQ ID NO: 106596
  chr2:120770966-120771184
  hypo

SEQ ID NO: 300097 - DNA, 344 bp, Homo sapiens
  chr2:120974105-120974449
  hypo
ccgcctagcacctgcgcaggtgcagtctccacctcaagccagctgggccttatgatagtcaaaattggtattaatcagccacacctagcattccttcacatctgcatccacgccttttaaaaagctatattatttatatgttcaggctccattatccataacctcaatgatgaacaagatatccgtaaaataggaggactattcaagactttacccttcacttcctcttcccttattattggcagccttgcacctacagatatgcctttcctcacaggcttttactctaaagaccttatcatcgaaaccgcaaatacatcatacaccaacgcctgagccctttc

SEQ ID NO: 300098 - DNA, 101 bp, Homo sapiens; identical to SEQ ID NO: 208207
  chr2:120982088-120982189
  hypo

SEQ ID NO: 300099 - DNA, 172 bp, Homo sapiens; identical to SEQ ID NO: 251026
  chr2:120987006-120987178
  hypo

SEQ ID NO: 300100 - DNA, 75 bp, Homo sapiens; identical to SEQ ID NO: 251027
  chr2:120995063-120995138
  hypo

SEQ ID NO: 300101 - DNA, 46 bp, Homo sapiens; identical to SEQ ID NO: 251028
  chr2:120996940-120996986
  hypo

SEQ ID NO: 300102 - DNA, 253 bp, Homo sapiens; identical to SEQ ID NO: 251029
  chr2:121036317-121036570
  hypo

SEQ ID NO: 300103 - DNA, 284 bp, Homo sapiens; identical to SEQ ID NO: 208208
  chr2:121058175-121058459
  hypo

SEQ ID NO: 300104 - DNA, 264 bp, Homo sapiens; identical to SEQ ID NO: 208209
  chr2:121108590-121108854
  hypo

SEQ ID NO: 300105 - DNA, 523 bp, Homo sapiens; identical to SEQ ID NO: 251032
  chr2:121116365-121116888
  hypo

SEQ ID NO: 300106 - DNA, 123 bp, Homo sapiens; identical to SEQ ID NO: 251033
  chr2:121157066-121157189
  hypo

SEQ ID NO: 300107 - DNA, 241 bp, Homo sapiens; identical to SEQ ID NO: 251034
  chr2:121190385-121190626
  hypo

SEQ ID NO: 300108 - DNA, 134 bp, Homo sapiens; identical to SEQ ID NO: 208210
  chr2:121243025-121243159
  hypo

SEQ ID NO: 300109 - DNA, 136 bp, Homo sapiens; identical to SEQ ID NO: 251036
  chr2:121266977-121267113
  hypo

SEQ ID NO: 300110 - DNA, 39 bp, Homo sapiens; identical to SEQ ID NO: 208211
  chr2:121327691-121327730
  hypo

SEQ ID NO: 300111 - DNA, 172 bp, Homo sapiens; identical to SEQ ID NO: 251038
  chr2:121381302-121381474
  hypo

SEQ ID NO: 300112 - DNA, 33 bp, Homo sapiens; identical to SEQ ID NO: 251039
  chr2:121436963-121436996
  hypo

SEQ ID NO: 300113 - DNA, 70 bp, Homo sapiens; identical to SEQ ID NO: 251040
  chr2:121444217-121444287
  hypo

SEQ ID NO: 300114 - DNA, 96 bp, Homo sapiens; identical to SEQ ID NO: 208212
  chr2:121542641-121542737
  hypo

SEQ ID NO: 300115 - DNA, 231 bp, Homo sapiens; identical to SEQ ID NO: 251042
  chr2:121549384-121549615
  hypo

SEQ ID NO: 300116 - DNA, 100 bp, Homo sapiens; identical to SEQ ID NO: 251043
  chr2:121549851-121549951
  hypo

SEQ ID NO: 300117 - DNA, 211 bp, Homo sapiens; identical to SEQ ID NO: 251044
  chr2:121550760-121550971
  hypo

SEQ ID NO: 300118 - DNA, 139 bp, Homo sapiens; identical to SEQ ID NO: 208213
  chr2:121609723-121609862
  hypo

SEQ ID NO: 300119 - DNA, 52 bp, Homo sapiens; identical to SEQ ID NO: 251046
  chr2:121614060-121614112
  hypo

SEQ ID NO: 300120 - DNA, 80 bp, Homo sapiens; identical to SEQ ID NO: 251047
  chr2:121628105-121628185
  hypo

SEQ ID NO: 300121 - DNA, 201 bp, Homo sapiens; identical to SEQ ID NO: 251048
  chr2:121692170-121692371
  hypo

SEQ ID NO: 300122 - DNA, 75 bp, Homo sapiens; identical to SEQ ID NO: 251049
  chr2:121708535-121708610
  hypo

SEQ ID NO: 300123 - DNA, 117 bp, Homo sapiens; identical to SEQ ID NO: 251050
  chr2:121711198-121711315
  hypo

SEQ ID NO: 300124 - DNA, 130 bp, Homo sapiens; identical to SEQ ID NO: 208214
  chr2:121726279-121726409
  hypo

SEQ ID NO: 300125 - DNA, 366 bp, Homo sapiens; identical to SEQ ID NO: 208215
  chr2:121742086-121742452
  hypo

SEQ ID NO: 300126 - DNA, 1125 bp, Homo sapiens; identical to SEQ ID NO: 208216
  chr2:121745649-121746774
  hypo

SEQ ID NO: 300127 - DNA, 42 bp, Homo sapiens; identical to SEQ ID NO: 208217
  chr2:121924778-121924820
  hypo

SEQ ID NO: 300128 - DNA, 197 bp, Homo sapiens; identical to SEQ ID NO: 251055
  chr2:121932346-121932543
  hypo

SEQ ID NO: 300129 - DNA, 94 bp, Homo sapiens; identical to SEQ ID NO: 251056
  chr2:121962011-121962105
  hypo

SEQ ID NO: 300130 - DNA, 332 bp, Homo sapiens; identical to SEQ ID NO: 251057
  chr2:121970083-121970415
  hypo

SEQ ID NO: 300131 - DNA, 208 bp, Homo sapiens; identical to SEQ ID NO: 208218
  chr2:121975957-121976165
  hypo

SEQ ID NO: 300132 - DNA, 161 bp, Homo sapiens; identical to SEQ ID NO: 251059
  chr2:122010688-122010849
  hypo

SEQ ID NO: 300133 - DNA, 253 bp, Homo sapiens; identical to SEQ ID NO: 251060
  chr2:122011448-122011701
  hypo

SEQ ID NO: 300134 - DNA, 36 bp, Homo sapiens; identical to SEQ ID NO: 251062
  chr2:122013597-122013633
  hypo

SEQ ID NO: 300135 - DNA, 85 bp, Homo sapiens; identical to SEQ ID NO: 251063
  chr2:122094225-122094310
  hypo

SEQ ID NO: 300136 - DNA, 289 bp, Homo sapiens; identical to SEQ ID NO: 251064
  chr2:122094602-122094891
  hypo

SEQ ID NO: 300137 - DNA, 106 bp, Homo sapiens; identical to SEQ ID NO: 251065
  chr2:122096092-122096198
  hypo

SEQ ID NO: 300138 - DNA, 88 bp, Homo sapiens; identical to SEQ ID NO: 208219
  chr2:122102164-122102252
  hypo

SEQ ID NO: 300139 - DNA, 103 bp, Homo sapiens; identical to SEQ ID NO: 251068
  chr2:122118646-122118749
  hypo

SEQ ID NO: 300140 - DNA, 358 bp, Homo sapiens; identical to SEQ ID NO: 251069
  chr2:122187627-122187985
  hypo

SEQ ID NO: 300141 - DNA, 46 bp, Homo sapiens; identical to SEQ ID NO: 251070
  chr2:122260203-122260249
  hypo

SEQ ID NO: 300142 - DNA, 31 bp, Homo sapiens; identical to SEQ ID NO: 251071
  chr2:122274305-122274336
  hypo

SEQ ID NO: 300143 - DNA, 261 bp, Homo sapiens; identical to SEQ ID NO: 208220
  chr2:122305114-122305375
  hypo

SEQ ID NO: 300144 - DNA, 237 bp, Homo sapiens; identical to SEQ ID NO: 208221
  chr2:122312635-122312872
  hypo

SEQ ID NO: 300145 - DNA, 31 bp, Homo sapiens; identical to SEQ ID NO: 208222
  chr2:122497730-122497761
  hypo

SEQ ID NO: 300146 - DNA, 90 bp, Homo sapiens; identical to SEQ ID NO: 251075
  chr2:122498001-122498091
  hypo

SEQ ID NO: 300147 - DNA, 155 bp, Homo sapiens; identical to SEQ ID NO: 251076
  chr2:122511908-122512063
  hypo

SEQ ID NO: 300148 - DNA, 98 bp, Homo sapiens; identical to SEQ ID NO: 251077
  chr2:122783865-122783963
  hypo

SEQ ID NO: 300149 - DNA, 320 bp, Homo sapiens; identical to SEQ ID NO: 251078
  chr2:122976046-122976366
  hypo

SEQ ID NO: 300150 - DNA, 103 bp, Homo sapiens; identical to SEQ ID NO: 251079
  chr2:124441079-124441182
  hypo

SEQ ID NO: 300151 - DNA, 101 bp, Homo sapiens; identical to SEQ ID NO: 251080
  chr2:125119894-125119995
  hypo

SEQ ID NO: 300152 - DNA, 381 bp, Homo sapiens; identical to SEQ ID NO: 280195
  chr2:127413347-127413728
  hypo

SEQ ID NO: 300153 - DNA, 266 bp, Homo sapiens; identical to SEQ ID NO: 37981
  chr2:127414108-127414374
  hypo

SEQ ID NO: 300154 - DNA, 112 bp, Homo sapiens
  chr2:127428873-127428985
  hypo
tcactgggcaggtgccggagggagagccagagcaggtgcaagcatgcgaggcaggcttccctgagcccgacagccagggacaaccagctaacacccaagttcagaaaacagt

SEQ ID NO: 300155 - DNA, 245 bp, Homo sapiens
  chr2:127435291-127435536
  hypo
cacgagggtccgggaggggtgcttggagttgggacccagagcaccaggacttactgtcaaatctctctggcaccaaaacgcatgctccctatgccacctatcaggatgcacccttaaagcacttttaagatgctttttggaaagagccatttgttggtgtgcatttgtcttcaccactgccccaaacatagctgtccaatattcaggtgaaaatgtcccccatcggccgggtgcagcggctcacg

SEQ ID NO: 300156 - DNA, 107 bp, Homo sapiens
  chr2:127438526-127438633
  hypo
cgggcaggtcagggcggcgggaagggaccttaacagaccttctagtcggcgactttgaagattcttcaagacaatagccagttctgaagattcatccccgtttcttc

SEQ ID NO: 300157 - DNA, 314 bp, Homo sapiens; identical to SEQ ID NO: 251085
  chr2:127734331-127734645
  hypo

SEQ ID NO: 300158 - DNA, 96 bp, Homo sapiens; identical to SEQ ID NO: 208224
  chr2:127801058-127801154
  hypo

SEQ ID NO: 300159 - DNA, 115 bp, Homo sapiens; identical to SEQ ID NO: 208225
  chr2:127801235-127801350
  hypo

SEQ ID NO: 300160 - DNA, 39 bp, Homo sapiens; identical to SEQ ID NO: 251087
  chr2:127855675-127855714
  hypo

SEQ ID NO: 300161 - DNA, 126 bp, Homo sapiens; identical to SEQ ID NO: 280199
  chr2:127863362-127863488
  hypo

SEQ ID NO: 300162 - DNA, 425 bp, Homo sapiens; identical to SEQ ID NO: 280200
  chr2:127863878-127864303
  hypo

SEQ ID NO: 300163 - DNA, 270 bp, Homo sapiens; identical to SEQ ID NO: 251088
  chr2:127895379-127895649
  hypo

SEQ ID NO: 300164 - DNA, 173 bp, Homo sapiens; identical to SEQ ID NO: 251089
  chr2:127895962-127896135
  hypo

SEQ ID NO: 300165 - DNA, 215 bp, Homo sapiens; identical to SEQ ID NO: 251090
  chr2:127933496-127933711
  hypo

SEQ ID NO: 300166 - DNA, 192 bp, Homo sapiens; identical to SEQ ID NO: 208227
  chr2:128127766-128127958
  hypo

SEQ ID NO: 300167 - DNA, 242 bp, Homo sapiens; identical to SEQ ID NO: 251092
  chr2:128128833-128129075
  hypo

SEQ ID NO: 300168 - DNA, 592 bp, Homo sapiens
  chr2:128158471-128159063
  hypo
cacccgccccttctgatccagtgtcccgcagtcctgcccgcttcaccgccctcgcctagcccccgcgggtggtaaaagtccagcccggcggagcgcccctgcctccttccacgcccctggcctgccctgcgcagctacgcccagcccgcgtccatcccggaccatcctgttgaaggcagtcccctggcacgcagggctgggagctcttagctgaggatggaaccgactgcaccaggagccgctgggaggaaggccgaggggcgcagaggagaggcaaggaaaaaacagcagcccaagaatcgggcctccctgttacagcaggagtcgcatctatttatatatgttatgtcttattgctcagcaaccagctctcggccggggcgtgggccgggaagaggggtctcctggtgcagcgggttggcgtgactcatcaccgccgcgcactctggcctctgggcctaggttaacagactcccgggtttcaggctgggcccaggcggccaggccctccctgctgaggaatctgggttggggcagtgccagctccctgcttctcacctggccacagaaggggtagcgggaggagcgtggg

SEQ ID NO: 300169 - DNA, 45 bp, Homo sapiens; identical to SEQ ID NO: 251094
  chr2:128214276-128214321
  hypo

SEQ ID NO: 300170 - DNA, 78 bp, Homo sapiens; identical to SEQ ID NO: 208229
  chr2:128273731-128273809
  hypo

SEQ ID NO: 300171 - DNA, 77 bp, Homo sapiens; identical to SEQ ID NO: 208230
  chr2:128273869-128273946
  hypo

SEQ ID NO: 300172 - DNA, 31 bp, Homo sapiens; identical to SEQ ID NO: 251097
  chr2:128292847-128292878
  hypo

SEQ ID NO: 300173 - DNA, 63 bp, Homo sapiens; identical to SEQ ID NO: 251098
  chr2:128293882-128293945
  hypo

SEQ ID NO: 300174 - DNA, 83 bp, Homo sapiens; identical to SEQ ID NO: 251099
  chr2:128306301-128306384
  hypo

SEQ ID NO: 300175 - DNA, 187 bp, Homo sapiens; identical to SEQ ID NO: 251100
  chr2:128398930-128399117
  hypo

SEQ ID NO: 300176 - DNA, 365 bp, Homo sapiens; identical to SEQ ID NO: 251101
  chr2:128402978-128403343
  hypo

SEQ ID NO: 300177 - DNA, 128 bp, Homo sapiens; identical to SEQ ID NO: 251102
  chr2:128415009-128415137
  hypo

SEQ ID NO: 300178 - DNA, 69 bp, Homo sapiens; identical to SEQ ID NO: 251103
  chr2:128434220-128434289
  hypo

SEQ ID NO: 300179 - DNA, 105 bp, Homo sapiens; identical to SEQ ID NO: 198431
  chr2:128459399-128459504
  hypo

SEQ ID NO: 300180 - DNA, 32 bp, Homo sapiens; identical to SEQ ID NO: 208233
  chr2:128472923-128472955
  hypo

SEQ ID NO: 300181 - DNA, 218 bp, Homo sapiens; identical to SEQ ID NO: 208234
  chr2:128583666-128583884
  hypo

SEQ ID NO: 300182 - DNA, 84 bp, Homo sapiens; identical to SEQ ID NO: 208235
  chr2:128600135-128600219
  hypo

SEQ ID NO: 300183 - DNA, 33 bp, Homo sapiens; identical to SEQ ID NO: 251108
  chr2:128666472-128666505
  hypo

SEQ ID NO: 300184 - DNA, 41 bp, Homo sapiens; identical to SEQ ID NO: 208236
  chr2:128679951-128679992
  hypo

SEQ ID NO: 300185 - DNA, 40 bp, Homo sapiens; identical to SEQ ID NO: 208237
  chr2:128680172-128680212
  hypo

SEQ ID NO: 300186 - DNA, 67 bp, Homo sapiens; identical to SEQ ID NO: 251111
  chr2:128826373-128826440
  hypo

SEQ ID NO: 300187 - DNA, 35 bp, Homo sapiens; identical to SEQ ID NO: 251112
  chr2:128826705-128826740
  hypo

SEQ ID NO: 300188 - DNA, 200 bp, Homo sapiens; identical to SEQ ID NO: 251113
  chr2:129021514-129021714
  hypo

SEQ ID NO: 300189 - DNA, 56 bp, Homo sapiens; identical to SEQ ID NO: 208238
  chr2:129027719-129027775
  hypo

SEQ ID NO: 300190 - DNA, 31 bp, Homo sapiens; identical to SEQ ID NO: 251115
  chr2:129103148-129103179
  hypo

SEQ ID NO: 300191 - DNA, 170 bp, Homo sapiens; identical to SEQ ID NO: 208239
  chr2:129250623-129250793
  hypo

SEQ ID NO: 300192 - DNA, 68 bp, Homo sapiens; identical to SEQ ID NO: 251117
  chr2:129284176-129284244
  hypo

SEQ ID NO: 300193 - DNA, 71 bp, Homo sapiens; identical to SEQ ID NO: 251118
  chr2:129448155-129448226
  hypo

SEQ ID NO: 300194 - DNA, 152 bp, Homo sapiens; identical to SEQ ID NO: 251119
  chr2:129539249-129539401
  hypo

SEQ ID NO: 300195 - DNA, 158 bp, Homo sapiens; identical to SEQ ID NO: 208240
  chr2:129542648-129542806
  hypo

SEQ ID NO: 300196 - DNA, 42 bp, Homo sapiens; identical to SEQ ID NO: 251121
  chr2:130174992-130175034
  hypo

SEQ ID NO: 300197 - DNA, 94 bp, Homo sapiens; identical to SEQ ID NO: 208241
  chr2:130356761-130356855
  hypo

SEQ ID NO: 300198 - DNA, 195 bp, Homo sapiens; identical to SEQ ID NO: 251123
  chr2:130512122-130512317
  hypo

SEQ ID NO: 300199 - DNA, 76 bp, Homo sapiens; identical to SEQ ID NO: 251124
  chr2:130626912-130626988
  hypo

SEQ ID NO: 300200 - DNA, 93 bp, Homo sapiens; identical to SEQ ID NO: 251125
  chr2:130669924-130670017
  hypo

SEQ ID NO: 300201 - DNA, 36 bp, Homo sapiens; identical to SEQ ID NO: 208242
  chr2:130670341-130670377
  hypo

SEQ ID NO: 300202 - DNA, 78 bp, Homo sapiens
  chr2:130886699-130886777
  hypo
caaacacagcaaggcgagccccaggggctcaggctccagcctccagcatgccgctcccttctactcgtcttcctgcct

SEQ ID NO: 300203 - DNA, 39 bp, Homo sapiens; identical to SEQ ID NO: 251128
  chr2:130919036-130919075
  hypo

SEQ ID NO: 300204 - DNA, 138 bp, Homo sapiens; identical to SEQ ID NO: 208243
  chr2:130943151-130943289
  hypo

SEQ ID NO: 300205 - DNA, 209 bp, Homo sapiens; identical to SEQ ID NO: 221870
  chr2:131113001-131113210
  hypo

SEQ ID NO: 300206 - DNA, 162 bp, Homo sapiens; identical to SEQ ID NO: 280215
  chr2:131114254-131114416
  hypo

SEQ ID NO: 300207 - DNA, 128 bp, Homo sapiens; identical to SEQ ID NO: 251131
  chr2:131116461-131116589
  hypo

SEQ ID NO: 300208 - DNA, 121 bp, Homo sapiens
  chr2:131487004-131487125
  hypo
tctcagacctggcctacattctcctccacatgctcatctcctccagcagcctgggtggctgggagctgggccgcatggcctgtggcattctcactgatgctgtcttcgccgcctgcaccag

SEQ ID NO: 300209 - DNA, 88 bp, Homo sapiens; identical to SEQ ID NO: 208244
  chr2:131502560-131502648
  hypo

SEQ ID NO: 300210 - DNA, 291 bp, Homo sapiens; identical to SEQ ID NO: 251134
  chr2:131583609-131583900
  hypo

SEQ ID NO: 300211 - DNA, 138 bp, Homo sapiens; identical to SEQ ID NO: 208245
  chr2:131639163-131639301
  hypo

SEQ ID NO: 300212 - DNA, 39 bp, Homo sapiens; identical to SEQ ID NO: 208246
  chr2:131639331-131639370
  hypo

SEQ ID NO: 300213 - DNA, 48 bp, Homo sapiens; identical to SEQ ID NO: 251136
  chr2:131674646-131674694
  hypo

SEQ ID NO: 300214 - DNA, 52 bp, Homo sapiens
  chr2:131813471-131813523
  hypo
agggtgttggggaggaggaaaaaataccaaaagagaacgttctacagatgga

SEQ ID NO: 300215 - DNA, 240 bp, Homo sapiens; identical to SEQ ID NO: 251138
  chr2:131818832-131819072
  hypo

SEQ ID NO: 300216 - DNA, 394 bp, Homo sapiens; identical to SEQ ID NO: 208248
  chr2:131878434-131878828
  hypo

SEQ ID NO: 300217 - DNA, 219 bp, Homo sapiens; identical to SEQ ID NO: 251140
  chr2:131883252-131883471
  hypo

SEQ ID NO: 300218 - DNA, 100 bp, Homo sapiens; identical to SEQ ID NO: 251141
  chr2:131962504-131962604
  hypo

SEQ ID NO: 300219 - DNA, 36 bp, Homo sapiens; identical to SEQ ID NO: 251142
  chr2:131966830-131966866
  hypo

SEQ ID NO: 300220 - DNA, 202 bp, Homo sapiens; identical to SEQ ID NO: 251144
  chr2:132269041-132269243
  hypo

SEQ ID NO: 300221 - DNA, 297 bp, Homo sapiens; identical to SEQ ID NO: 251145
  chr2:132270120-132270417
  hypo

SEQ ID NO: 300222 - DNA, 124 bp, Homo sapiens; identical to SEQ ID NO: 251146
  chr2:132274362-132274486
  hypo

SEQ ID NO: 300223 - DNA, 318 bp, Homo sapiens; identical to SEQ ID NO: 208250
  chr2:132301069-132301387
  hypo

SEQ ID NO: 300224 - DNA, 159 bp, Homo sapiens; identical to SEQ ID NO: 208251
  chr2:132348675-132348834
  hypo

SEQ ID NO: 300225 - DNA, 84 bp, Homo sapiens; identical to SEQ ID NO: 251149
  chr2:132403830-132403914
  hypo

SEQ ID NO: 300226 - DNA, 492 bp, Homo sapiens; identical to SEQ ID NO: 208252
  chr2:132415371-132415863
  hypo

SEQ ID NO: 300227 - DNA, 87 bp, Homo sapiens; identical to SEQ ID NO: 208253
  chr2:132586579-132586666
  hypo

SEQ ID NO: 300228 - DNA, 105 bp, Homo sapiens; identical to SEQ ID NO: 280221
  chr2:132767530-132767635
  hypo

SEQ ID NO: 300229 - DNA, 120 bp, Homo sapiens; identical to SEQ ID NO: 198435
  chr2:132795464-132795584
  hypo

SEQ ID NO: 300230 - DNA, 100 bp, Homo sapiens; identical to SEQ ID NO: 198436
  chr2:132796304-132796404
  hypo

SEQ ID NO: 300231 - DNA, 504 bp, Homo sapiens; identical to SEQ ID NO: 251152
  chr2:133174960-133175464
  hypo

SEQ ID NO: 300232 - DNA, 171 bp, Homo sapiens; identical to SEQ ID NO: 251153
  chr2:134897881-134898052
  hypo

SEQ ID NO: 300233 - DNA, 133 bp, Homo sapiens; identical to SEQ ID NO: 251154
  chr2:134948636-134948769
  hypo

SEQ ID NO: 300234 - DNA, 82 bp, Homo sapiens; identical to SEQ ID NO: 251155
  chr2:135293578-135293660
  hypo

SEQ ID NO: 300235 - DNA, 353 bp, Homo sapiens; identical to SEQ ID NO: 198445
  chr2:135476396-135476749
  hypo

SEQ ID NO: 300236 - DNA, 96 bp, Homo sapiens; identical to SEQ ID NO: 208259
  chr2:135707351-135707447
  hypo

SEQ ID NO: 300237 - DNA, 180 bp, Homo sapiens; identical to SEQ ID NO: 251157
  chr2:135718101-135718281
  hypo

SEQ ID NO: 300238 - DNA, 217 bp, Homo sapiens; identical to SEQ ID NO: 251158
  chr2:135926165-135926382
  hypo

SEQ ID NO: 300239 - DNA, 88 bp, Homo sapiens; identical to SEQ ID NO: 198446
  chr2:136288366-136288454
  hypo

SEQ ID NO: 300240 - DNA, 133 bp, Homo sapiens; identical to SEQ ID NO: 251159
  chr2:136555620-136555753
  hypo

SEQ ID NO: 300241 - DNA, 194 bp, Homo sapiens; identical to SEQ ID NO: 251160
  chr2:136602113-136602307
  hypo

SEQ ID NO: 300242 - DNA, 164 bp, Homo sapiens; identical to SEQ ID NO: 251161
  chr2:136721521-136721685
  hypo

SEQ ID NO: 300243 - DNA, 221 bp, Homo sapiens; identical to SEQ ID NO: 208261
  chr2:136785592-136785813
  hypo

SEQ ID NO: 300244 - DNA, 42 bp, Homo sapiens; identical to SEQ ID NO: 251163
  chr2:136845086-136845128
  hypo

SEQ ID NO: 300245 - DNA, 912 bp, Homo sapiens; identical to SEQ ID NO: 198448
  chr2:136874020-136874932
  hypo

SEQ ID NO: 300246 - DNA, 482 bp, Homo sapiens; identical to SEQ ID NO: 198449
  chr2:136875399-136875881
  hypo

SEQ ID NO: 300247 - DNA, 33 bp, Homo sapiens; identical to SEQ ID NO: 251164
  chr2:136911820-136911853
  hypo

SEQ ID NO: 300248 - DNA, 32 bp, Homo sapiens; identical to SEQ ID NO: 251165
  chr2:137088316-137088348
  hypo

SEQ ID NO: 300249 - DNA, 42 bp, Homo sapiens; identical to SEQ ID NO: 208264
  chr2:137195177-137195219
  hypo

SEQ ID NO: 300250 - DNA, 60 bp, Homo sapiens; identical to SEQ ID NO: 198452
  chr2:137523039-137523099
  hypo

SEQ ID NO: 300251 - DNA, 198 bp, Homo sapiens; identical to SEQ ID NO: 251167
  chr2:138689491-138689689
  hypo

SEQ ID NO: 300252 - DNA, 78 bp, Homo sapiens; identical to SEQ ID NO: 208266
  chr2:139436926-139437004
  hypo

SEQ ID NO: 300253 - DNA, 70 bp, Homo sapiens; identical to SEQ ID NO: 280248
  chr2:139538166-139538236
  hypo

SEQ ID NO: 300254 - DNA, 74 bp, Homo sapiens; identical to SEQ ID NO: 251169
  chr2:144227051-144227125
  hypo

SEQ ID NO: 300255 - DNA, 330 bp, Homo sapiens; identical to SEQ ID NO: 208267
  chr2:144478010-144478340
  hypo

SEQ ID NO: 300256 - DNA, 33 bp, Homo sapiens; identical to SEQ ID NO: 198457
  chr2:145090080-145090113
  hypo

SEQ ID NO: 300257 - DNA, 200 bp, Homo sapiens; identical to SEQ ID NO: 251171
  chr2:147344900-147345100
  hypo

SEQ ID NO: 300258 - DNA, 1170 bp, Homo sapiens; identical to SEQ ID NO: 280254
  chr2:148601349-148602519
  hypo

SEQ ID NO: 300259 - DNA, 215 bp, Homo sapiens; identical to SEQ ID NO: 198460
  chr2:148602728-148602943
  hypo

SEQ ID NO: 300260 - DNA, 193 bp, Homo sapiens; identical to SEQ ID NO: 251173
  chr2:148965103-148965296
  hypo

SEQ ID NO: 300261 - DNA, 41 bp, Homo sapiens; identical to SEQ ID NO: 251174
  chr2:149016010-149016051
  hypo

SEQ ID NO: 300262 - DNA, 49 bp, Homo sapiens; identical to SEQ ID NO: 251175
  chr2:149016081-149016130
  hypo

SEQ ID NO: 300263 - DNA, 37 bp, Homo sapiens; identical to SEQ ID NO: 208271
  chr2:149045675-149045712
  hypo

SEQ ID NO: 300264 - DNA, 136 bp, Homo sapiens; identical to SEQ ID NO: 251177
  chr2:149215521-149215657
  hypo

SEQ ID NO: 300265 - DNA, 194 bp, Homo sapiens; identical to SEQ ID NO: 208272
  chr2:149227323-149227517
  hypo

SEQ ID NO: 300266 - DNA, 32 bp, Homo sapiens; identical to SEQ ID NO: 208273
  chr2:149436588-149436620
  hypo

SEQ ID NO: 300267 - DNA, 40 bp, Homo sapiens; identical to SEQ ID NO: 251181
  chr2:149514920-149514960
  hypo

SEQ ID NO: 300268 - DNA, 198 bp, Homo sapiens; identical to SEQ ID NO: 208274
  chr2:149525279-149525477
  hypo

SEQ ID NO: 300269 - DNA, 57 bp, Homo sapiens; identical to SEQ ID NO: 198461
  chr2:149632585-149632642
  hypo

SEQ ID NO: 300270 - DNA, 143 bp, Homo sapiens; identical to SEQ ID NO: 208276
  chr2:150131807-150131950
  hypo

SEQ ID NO: 300271 - DNA, 734 bp, Homo sapiens; identical to SEQ ID NO: 280265
  chr2:150186117-150186851
  hypo

SEQ ID NO: 300272 - DNA, 699 bp, Homo sapiens; identical to SEQ ID NO: 280266
  chr2:150186988-150187687
  hypo

SEQ ID NO: 300273 - DNA, 79 bp, Homo sapiens; identical to SEQ ID NO: 251184
  chr2:150394600-150394679
  hypo

SEQ ID NO: 300274 - DNA, 278 bp, Homo sapiens; identical to SEQ ID NO: 251186
  chr2:152153950-152154228
  hypo

SEQ ID NO: 300275 - DNA, 33 bp, Homo sapiens; identical to SEQ ID NO: 251187
  chr2:152265327-152265360
  hypo

SEQ ID NO: 300276 - DNA, 206 bp, Homo sapiens; identical to SEQ ID NO: 208279
  chr2:152295716-152295922
  hypo

SEQ ID NO: 300277 - DNA, 206 bp, Homo sapiens; identical to SEQ ID NO: 208280
  chr2:152642697-152642903
  hypo

SEQ ID NO: 300278 - DNA, 147 bp, Homo sapiens; identical to SEQ ID NO: 251190
  chr2:152681226-152681373
  hypo

SEQ ID NO: 300279 - DNA, 249 bp, Homo sapiens; identical to SEQ ID NO: 280275
  chr2:152955492-152955741
  hypo

SEQ ID NO: 300280 - DNA, 100 bp, Homo sapiens; identical to SEQ ID NO: 198475
  chr2:152956050-152956150
  hypo

SEQ ID NO: 300281 - DNA, 94 bp, Homo sapiens; identical to SEQ ID NO: 208282
  chr2:153079539-153079633
  hypo

SEQ ID NO: 300282 - DNA, 598 bp, Homo sapiens; identical to SEQ ID NO: 280279
  chr2:153192137-153192735
  hypo

SEQ ID NO: 300283 - DNA, 77 bp, Homo sapiens; identical to SEQ ID NO: 251192
  chr2:153258694-153258771
  hypo

SEQ ID NO: 300284 - DNA, 98 bp, Homo sapiens; identical to SEQ ID NO: 251193
  chr2:153438094-153438192
  hypo

SEQ ID NO: 300285 - DNA, 39 bp, Homo sapiens; identical to SEQ ID NO: 251194
  chr2:153448030-153448069
  hypo

SEQ ID NO: 300286 - DNA, 80 bp, Homo sapiens; identical to SEQ ID NO: 198482
  chr2:155553936-155554016
  hypo

SEQ ID NO: 300287 - DNA, 612 bp, Homo sapiens; identical to SEQ ID NO: 198483
  chr2:155554076-155554688
  hypo

SEQ ID NO: 300288 - DNA, 349 bp, Homo sapiens; identical to SEQ ID NO: 198484
  chr2:155554689-155555038
  hypo

SEQ ID NO: 300289 - DNA, 405 bp, Homo sapiens; identical to SEQ ID NO: 280290
  chr2:157189365-157189770
  hypo

SEQ ID NO: 300290 - DNA, 459 bp, Homo sapiens; identical to SEQ ID NO: 221907
  chr2:157292163-157292622
  hypo

SEQ ID NO: 300291 - DNA, 34 bp, Homo sapiens; identical to SEQ ID NO: 251195
  chr2:157340915-157340949
  hypo

SEQ ID NO: 300292 - DNA, 349 bp, Homo sapiens; identical to SEQ ID NO: 38109
  chr2:158484949-158485298
  hypo

SEQ ID NO: 300293 - DNA, 100 bp, Homo sapiens; identical to SEQ ID NO: 251196
  chr2:158607940-158608040
  hypo

SEQ ID NO: 300294 - DNA, 90 bp, Homo sapiens; identical to SEQ ID NO: 251197
  chr2:158674928-158675018
  hypo

SEQ ID NO: 300295 - DNA, 33 bp, Homo sapiens; identical to SEQ ID NO: 251198
  chr2:158914982-158915015
  hypo

SEQ ID NO: 300296 - DNA, 1840 bp, Homo sapiens; identical to SEQ ID NO: 198490
  chr2:159313054-159314894
  hypo

SEQ ID NO: 300297 - DNA, 157 bp, Homo sapiens; identical to SEQ ID NO: 208291
  chr2:159490660-159490817
  hypo

SEQ ID NO: 300298 - DNA, 153 bp, Homo sapiens; identical to SEQ ID NO: 208292
  chr2:159528148-159528301
  hypo

SEQ ID NO: 300299 - DNA, 119 bp, Homo sapiens; identical to SEQ ID NO: 251201
  chr2:159638827-159638946
  hypo

SEQ ID NO: 300300 - DNA, 288 bp, Homo sapiens; identical to SEQ ID NO: 251202
  chr2:159946996-159947284
  hypo

SEQ ID NO: 300301 - DNA, 39 bp, Homo sapiens; identical to SEQ ID NO: 251203
  chr2:159964843-159964882
  hypo

SEQ ID NO: 300302 - DNA, 154 bp, Homo sapiens; identical to SEQ ID NO: 251204
  chr2:159994717-159994871
  hypo

SEQ ID NO: 300303 - DNA, 86 bp, Homo sapiens; identical to SEQ ID NO: 251205
  chr2:160061390-160061476
  hypo

SEQ ID NO: 300304 - DNA, 244 bp, Homo sapiens; identical to SEQ ID NO: 251206
  chr2:160086244-160086488
  hypo

SEQ ID NO: 300305 - DNA, 506 bp, Homo sapiens; identical to SEQ ID NO: 198493
  chr2:160142449-160142955
  hypo

SEQ ID NO: 300306 - DNA, 42 bp, Homo sapiens; identical to SEQ ID NO: 208296
  chr2:160632631-160632673
  hypo

SEQ ID NO: 300307 - DNA, 678 bp, Homo sapiens; identical to SEQ ID NO: 280304
  chr2:160654215-160654893
  hypo

SEQ ID NO: 300308 - DNA, 79 bp, Homo sapiens; identical to SEQ ID NO: 251208
  chr2:161052031-161052110
  hypo

SEQ ID NO: 300309 - DNA, 115 bp, Homo sapiens; identical to SEQ ID NO: 208298
  chr2:161113756-161113871
  hypo

SEQ ID NO: 300310 - DNA, 657 bp, Homo sapiens; identical to SEQ ID NO: 280306
  chr2:161126281-161126938
  hypo

SEQ ID NO: 300311 - DNA, 91 bp, Homo sapiens; identical to SEQ ID NO: 208299
  chr2:161127528-161127619
  hypo

SEQ ID NO: 300312 - DNA, 152 bp, Homo sapiens; identical to SEQ ID NO: 208300
  chr2:161128081-161128233
  hypo

SEQ ID NO: 300313 - DNA, 38 bp, Homo sapiens; identical to SEQ ID NO: 251212
  chr2:161141483-161141521
  hypo

SEQ ID NO: 300314 - DNA, 63 bp, Homo sapiens; identical to SEQ ID NO: 251213
  chr2:161150182-161150245
  hypo

SEQ ID NO: 300315 - DNA, 126 bp, Homo sapiens; identical to SEQ ID NO: 280307
  chr2:161263704-161263830
  hypo

SEQ ID NO: 300316 - DNA, 270 bp, Homo sapiens; identical to SEQ ID NO: 198497
  chr2:161263896-161264166
  hypo

SEQ ID NO: 300317 - DNA, 203 bp, Homo sapiens; identical to SEQ ID NO: 198498
  chr2:161264419-161264622
  hypo

SEQ ID NO: 300318 - DNA, 165 bp, Homo sapiens; identical to SEQ ID NO: 251215
  chr2:161506269-161506434
  hypo

SEQ ID NO: 300319 - DNA, 161 bp, Homo sapiens; identical to SEQ ID NO: 208303
  chr2:161989985-161990146
  hypo

SEQ ID NO: 300320 - DNA, 208 bp, Homo sapiens; identical to SEQ ID NO: 251217
  chr2:162096297-162096505
  hypo

SEQ ID NO: 300321 - DNA, 623 bp, Homo sapiens; identical to SEQ ID NO: 280318
  chr2:162271679-162272302
  hypo

SEQ ID NO: 300322 - DNA, 59 bp, Homo sapiens; identical to SEQ ID NO: 251218
  chr2:162838347-162838406
  hypo

SEQ ID NO: 300323 - DNA, 262 bp, Homo sapiens; identical to SEQ ID NO: 198502
  chr2:162930659-162930921
  hypo

SEQ ID NO: 300324 - DNA, 38 bp, Homo sapiens; identical to SEQ ID NO: 251219
  chr2:163298803-163298841
  hypo

SEQ ID NO: 300325 - DNA, 138 bp, Homo sapiens; identical to SEQ ID NO: 251220
  chr2:164966392-164966530
  hypo

SEQ ID NO: 300326 - DNA, 129 bp, Homo sapiens; identical to SEQ ID NO: 280331
  chr2:165477434-165477563
  hypo

SEQ ID NO: 300327 - DNA, 574 bp, Homo sapiens; identical to SEQ ID NO: 280332
  chr2:165477596-165478170
  hypo

SEQ ID NO: 300328 - DNA, 214 bp, Homo sapiens; identical to SEQ ID NO: 208307
  chr2:165637158-165637372
  hypo

SEQ ID NO: 300329 - DNA, 1524 bp, Homo sapiens; identical to SEQ ID NO: 280333
  chr2:165697145-165698669
  hypo

SEQ ID NO: 300330 - DNA, 37 bp, Homo sapiens; identical to SEQ ID NO: 198509
  chr2:166650106-166650143
  hypo

SEQ ID NO: 300331 - DNA, 737 bp, Homo sapiens; identical to SEQ ID NO: 198510
  chr2:166650508-166651245
  hypo

SEQ ID NO: 300332 - DNA, 164 bp, Homo sapiens; identical to SEQ ID NO: 251222
  chr2:166726864-166727028
  hypo

SEQ ID NO: 300333 - DNA, 88 bp, Homo sapiens; identical to SEQ ID NO: 208311
  chr2:166790775-166790863
  hypo

SEQ ID NO: 300334 - DNA, 86 bp, Homo sapiens; identical to SEQ ID NO: 208312
  chr2:166894501-166894587
  hypo

SEQ ID NO: 300335 - DNA, 114 bp, Homo sapiens; identical to SEQ ID NO: 280342
  chr2:168148857-168148971
  hypo

SEQ ID NO: 300336 - DNA, 239 bp, Homo sapiens; identical to SEQ ID NO: 198512
  chr2:168149264-168149503
  hypo

SEQ ID NO: 300337 - DNA, 220 bp, Homo sapiens; identical to SEQ ID NO: 198513
  chr2:168149556-168149776
  hypo

SEQ ID NO: 300338 - DNA, 106 bp, Homo sapiens; identical to SEQ ID NO: 251225
  chr2:168921849-168921955
  hypo

SEQ ID NO: 300339 - DNA, 203 bp, Homo sapiens; identical to SEQ ID NO: 208315
  chr2:169073153-169073356
  hypo

SEQ ID NO: 300340 - DNA, 409 bp, Homo sapiens; identical to SEQ ID NO: 198515
  chr2:169312409-169312818
  hypo

SEQ ID NO: 300341 - DNA, 918 bp, Homo sapiens; identical to SEQ ID NO: 280348
  chr2:169312881-169313799
  hypo

SEQ ID NO: 300342 - DNA, 96 bp, Homo sapiens; identical to SEQ ID NO: 208318
  chr2:169337555-169337651
  hypo

SEQ ID NO: 300343 - DNA, 41 bp, Homo sapiens; identical to SEQ ID NO: 208319
  chr2:169436467-169436508
  hypo

SEQ ID NO: 300344 - DNA, 197 bp, Homo sapiens; identical to SEQ ID NO: 251229
  chr2:169533301-169533498
  hypo

SEQ ID NO: 300345 - DNA, 32 bp, Homo sapiens; identical to SEQ ID NO: 251230
  chr2:169561125-169561157
  hypo

SEQ ID NO: 300346 - DNA, 31 bp, Homo sapiens; identical to SEQ ID NO: 251231
  chr2:169561397-169561428
  hypo

SEQ ID NO: 300347 - DNA, 72 bp, Homo sapiens; identical to SEQ ID NO: 251232
  chr2:170031752-170031824
  hypo

SEQ ID NO: 300348 - DNA, 268 bp, Homo sapiens; identical to SEQ ID NO: 198518
  chr2:170218861-170219129
  hypo

SEQ ID NO: 300349 - DNA, 96 bp, Homo sapiens; identical to SEQ ID NO: 208321
  chr2:170282879-170282975
  hypo

SEQ ID NO: 300350 - DNA, 39 bp, Homo sapiens; identical to SEQ ID NO: 208322
  chr2:170283080-170283119
  hypo

SEQ ID NO: 300351 - DNA, 40 bp, Homo sapiens; identical to SEQ ID NO: 251234
  chr2:170283327-170283367
  hypo

SEQ ID NO: 300352 - DNA, 49 bp, Homo sapiens; identical to SEQ ID NO: 251235
  chr2:170337117-170337166
  hypo

SEQ ID NO: 300353 - DNA, 38 bp, Homo sapiens; identical to SEQ ID NO: 251236
  chr2:170337462-170337500
  hypo

SEQ ID NO: 300354 - DNA, 77 bp, Homo sapiens; identical to SEQ ID NO: 208323
  chr2:170373534-170373611
  hypo

SEQ ID NO: 300355 - DNA, 204 bp, Homo sapiens; identical to SEQ ID NO: 198519
  chr2:170430256-170430460
  hypo

SEQ ID NO: 300356 - DNA, 37 bp, Homo sapiens; identical to SEQ ID NO: 208325
  chr2:170552126-170552163
  hypo

SEQ ID NO: 300357 - DNA, 101 bp, Homo sapiens; identical to SEQ ID NO: 208326
  chr2:170569212-170569313
  hypo

SEQ ID NO: 300358 - DNA, 144 bp, Homo sapiens; identical to SEQ ID NO: 208327
  chr2:170569586-170569730
  hypo

SEQ ID NO: 300359 - DNA, 165 bp, Homo sapiens; identical to SEQ ID NO: 208328
  chr2:170584903-170585068
  hypo

SEQ ID NO: 300360 - DNA, 180 bp, Homo sapiens; identical to SEQ ID NO: 208329
  chr2:170620609-170620789
  hypo

SEQ ID NO: 300361 - DNA, 54 bp, Homo sapiens; identical to SEQ ID NO: 208330
  chr2:170682331-170682385
  hypo

SEQ ID NO: 300362 - DNA, 82 bp, Homo sapiens; identical to SEQ ID NO: 251245
  chr2:171542904-171542986
  hypo

SEQ ID NO: 300363 - DNA, 49 bp, Homo sapiens; identical to SEQ ID NO: 198527
  chr2:171627264-171627313
  hypo

SEQ ID NO: 300364 - DNA, 632 bp, Homo sapiens; identical to SEQ ID NO: 38182
  chr2:171627346-171627978
  hypo

SEQ ID NO: 300365 - DNA, 224 bp, Homo sapiens; identical to SEQ ID NO: 208333
  chr2:171730911-171731135
  hypo

SEQ ID NO: 300366 - DNA, 136 bp, Homo sapiens; identical to SEQ ID NO: 251248
  chr2:171815736-171815872
  hypo

SEQ ID NO: 300367 - DNA, 646 bp, Homo sapiens
  chr2:171822567-171823213
  hypo
cggcgactccaccccagtcagcgagaagcctgtttctgcggctgtggatgccaatgcttctgagtcaccttaactttgaaccattctttggaattggcgtggtatatttaaccacgggagcgtgtctggaaacgcaaactatcattaatttcatactagtttgtaccgtatctgtaggcatcctgtaaataattccaaggggaaaactaaacgaggacgtgggttgtatcctgccaggttgagtggggctcacacgctagggtgagatgtcagaaagcgcttgtattttaaacaaccaaaaagaattgtaagggtggcttgctgccaggcttgcactgccgttcctgggggtgtgcatcttcgggaaaggtggtggcggggcgtccactaggtttcctgtcccctgctgctccttccgtaagaaaatgaaatattctatgcctaatactcacacgcaacatttcttgtactttgtaagtcgtttgcgagaatgcagaccacctcactaaactgtaaacggtaaagagatttttacttttggtctccgtgagtcgcatctctactaaggtttacacaggaattccacctgaagacttgtgttaaagttctacagcgcgcactgttaactgaacgtctttttcttcag

SEQ ID NO: 300368 - DNA, 157 bp, Homo sapiens; identical to SEQ ID NO: 251250
  chr2:171860123-171860280
  hypo

SEQ ID NO: 300369 - DNA, 70 bp, Homo sapiens; identical to SEQ ID NO: 251251
  chr2:171860310-171860380
  hypo

SEQ ID NO: 300370 - DNA, 41 bp, Homo sapiens; identical to SEQ ID NO: 251252
  chr2:172302764-172302805
  hypo

SEQ ID NO: 300371 - DNA, 35 bp, Homo sapiens; identical to SEQ ID NO: 198534
  chr2:172379091-172379126
  hypo

SEQ ID NO: 300372 - DNA, 193 bp, Homo sapiens; identical to SEQ ID NO: 280373
  chr2:172379339-172379532
  hypo

SEQ ID NO: 300373 - DNA, 506 bp, Homo sapiens; identical to SEQ ID NO: 280374
  chr2:172379723-172380229
  hypo

SEQ ID NO: 300374 - DNA, 56 bp, Homo sapiens
  chr2:172411069-172411125
  hypo
tgttttcgtaaatacgcttggccttctgatcctggtgttcggggccctcatttttt

SEQ ID NO: 300375 - DNA, 152 bp, Homo sapiens; identical to SEQ ID NO: 251255
  chr2:172424323-172424475
  hypo

SEQ ID NO: 300376 - DNA, 32 bp, Homo sapiens; identical to SEQ ID NO: 251256
  chr2:172424535-172424567
  hypo

SEQ ID NO: 300377 - DNA, 39 bp, Homo sapiens; identical to SEQ ID NO: 208337
  chr2:173422734-173422773
  hypo

SEQ ID NO: 300378 - DNA, 32 bp, Homo sapiens; identical to SEQ ID NO: 251258
  chr2:173422953-173422985
  hypo

SEQ ID NO: 300379 - DNA, 100 bp, Homo sapiens; identical to SEQ ID NO: 208338
  chr2:173423968-173424068
  hypo

SEQ ID NO: 300380 - DNA, 47 bp, Homo sapiens; identical to SEQ ID NO: 251260
  chr2:173894916-173894963
  hypo

SEQ ID NO: 300381 - DNA, 59 bp, Homo sapiens; identical to SEQ ID NO: 251261
  chr2:173909415-173909474
  hypo

SEQ ID NO: 300382 - DNA, 319 bp, Homo sapiens; identical to SEQ ID NO: 198551
  chr2:173940416-173940735
  hypo

SEQ ID NO: 300383 - DNA, 120 bp, Homo sapiens; identical to SEQ ID NO: 251263
  chr2:174049586-174049706
  hypo

SEQ ID NO: 300384 - DNA, 103 bp, Homo sapiens; identical to SEQ ID NO: 221936
  chr2:174147823-174147926
  hypo

SEQ ID NO: 300385 - DNA, 141 bp, Homo sapiens; identical to SEQ ID NO: 251264
  chr2:174204828-174204969
  hypo

SEQ ID NO: 300386 - DNA, 74 bp, Homo sapiens; identical to SEQ ID NO: 251265
  chr2:174278557-174278631
  hypo

SEQ ID NO: 300387 - DNA, 217 bp, Homo sapiens; identical to SEQ ID NO: 198553
  chr2:174349951-174350168
  hypo

SEQ ID NO: 300388 - DNA, 159 bp, Homo sapiens; identical to SEQ ID NO: 251266
  chr2:174522467-174522626
  hypo

SEQ ID NO: 300389 - DNA, 276 bp, Homo sapiens; identical to SEQ ID NO: 251267
  chr2:174890601-174890877
  hypo

SEQ ID NO: 300390 - DNA, 72 bp, Homo sapiens; identical to SEQ ID NO: 251268
  chr2:175113858-175113930
  hypo

SEQ ID NO: 300391 - DNA, 35 bp, Homo sapiens; identical to SEQ ID NO: 208342
  chr2:175383905-175383940
  hypo

SEQ ID NO: 300392 - DNA, 35 bp, Homo sapiens; identical to SEQ ID NO: 208343
  chr2:175384180-175384215
  hypo

SEQ ID NO: 300393 - DNA, 102 bp, Homo sapiens; identical to SEQ ID NO: 251271
  chr2:175431785-175431887
  hypo

SEQ ID NO: 300394 - DNA, 286 bp, Homo sapiens; identical to SEQ ID NO: 208344
  chr2:175927666-175927952
  hypo

SEQ ID NO: 300395 - DNA, 32 bp, Homo sapiens; identical to SEQ ID NO: 208345
  chr2:176569574-176569606
  hypo

SEQ ID NO: 300396 - DNA, 104 bp, Homo sapiens; identical to SEQ ID NO: 280444
  chr2:177022459-177022563
  hypo

SEQ ID NO: 300397 - DNA, 219 bp, Homo sapiens; identical to SEQ ID NO: 280446
  chr2:177052744-177052963
  hypo

SEQ ID NO: 300398 - DNA, 90 bp, Homo sapiens; identical to SEQ ID NO: 208347
  chr2:177178833-177178923
  hypo

SEQ ID NO: 300399 - DNA, 75 bp, Homo sapiens; identical to SEQ ID NO: 198582
  chr2:177502150-177502225
  hypo

SEQ ID NO: 300400 - DNA, 60 bp, Homo sapiens; identical to SEQ ID NO: 198583
  chr2:177502920-177502980
  hypo

SEQ ID NO: 300401 - DNA, 51 bp, Homo sapiens; identical to SEQ ID NO: 198584
  chr2:177503135-177503186
  hypo

SEQ ID NO: 300402 - DNA, 32 bp, Homo sapiens; identical to SEQ ID NO: 251276
  chr2:178089624-178089656
  hypo

SEQ ID NO: 300403 - DNA, 136 bp, Homo sapiens; identical to SEQ ID NO: 251277
  chr2:178090224-178090360
  hypo

SEQ ID NO: 300404 - DNA, 48 bp, Homo sapiens
  chr2:178131810-178131858
  hypo
gcttgagatgtgtcaattgtgataccttgctccagattgctcataaaa

SEQ ID NO: 300405 - DNA, 816 bp, Homo sapiens; identical to SEQ ID NO: 221948
  chr2:178257219-178258035
  hypo

SEQ ID NO: 300406 - DNA, 207 bp, Homo sapiens; identical to SEQ ID NO: 251279
  chr2:178385809-178386016
  hypo

SEQ ID NO: 300407 - DNA, 93 bp, Homo sapiens; identical to SEQ ID NO: 251280
  chr2:178586888-178586981
  hypo

SEQ ID NO: 300408 - DNA, 59 bp, Homo sapiens; identical to SEQ ID NO: 251281
  chr2:178936539-178936598
  hypo

SEQ ID NO: 300409 - DNA, 293 bp, Homo sapiens; identical to SEQ ID NO: 251282
  chr2:178936628-178936921
  hypo

SEQ ID NO: 300410 - DNA, 40 bp, Homo sapiens; identical to SEQ ID NO: 208353
  chr2:179303355-179303395
  hypo

SEQ ID NO: 300411 - DNA, 640 bp, Homo sapiens; identical to SEQ ID NO: 221949
  chr2:179316084-179316724
  hypo

SEQ ID NO: 300412 - DNA, 31 bp, Homo sapiens; identical to SEQ ID NO: 251286
  chr2:180019921-180019952
  hypo

SEQ ID NO: 300413 - DNA, 80 bp, Homo sapiens; identical to SEQ ID NO: 208355
  chr2:180027694-180027774
  hypo

SEQ ID NO: 300414 - DNA, 69 bp, Homo sapiens; identical to SEQ ID NO: 251288
  chr2:180128504-180128573
  hypo

SEQ ID NO: 300415 - DNA, 85 bp, Homo sapiens; identical to SEQ ID NO: 198592
  chr2:180129611-180129696
  hypo

SEQ ID NO: 300416 - DNA, 142 bp, Homo sapiens; identical to SEQ ID NO: 208357
  chr2:180886585-180886727
  hypo

SEQ ID NO: 300417 - DNA, 39 bp, Homo sapiens; identical to SEQ ID NO: 208358
  chr2:180886910-180886949
  hypo

SEQ ID NO: 300418 - DNA, 163 bp, Homo sapiens; identical to SEQ ID NO: 251290
  chr2:182413425-182413588
  hypo

SEQ ID NO: 300419 - DNA, 35 bp, Homo sapiens; identical to SEQ ID NO: 251291
  chr2:183811123-183811158
  hypo

SEQ ID NO: 300420 - DNA, 105 bp, Homo sapiens; identical to SEQ ID NO: 198599
  chr2:183902297-183902402
  hypo

SEQ ID NO: 300421 - DNA, 568 bp, Homo sapiens; identical to SEQ ID NO: 198600
  chr2:183902442-183903010
  hypo

SEQ ID NO: 300422 - DNA, 601 bp, Homo sapiens; identical to SEQ ID NO: 38374
  chr2:183903037-183903638
  hypo

SEQ ID NO: 300423 - DNA, 92 bp, Homo sapiens; identical to SEQ ID NO: 251293
  chr2:185490893-185490985
  hypo

SEQ ID NO: 300424 - DNA, 43 bp, Homo sapiens; identical to SEQ ID NO: 251294
  chr2:186081368-186081411
  hypo

SEQ ID NO: 300425 - DNA, 284 bp, Homo sapiens; identical to SEQ ID NO: 198604
  chr2:187454990-187455274
  hypo

SEQ ID NO: 300426 - DNA, 32 bp, Homo sapiens; identical to SEQ ID NO: 251295
  chr2:188404596-188404628
  hypo

SEQ ID NO: 300427 - DNA, 82 bp, Homo sapiens; identical to SEQ ID NO: 251296
  chr2:190369341-190369423
  hypo

SEQ ID NO: 300428 - DNA, 115 bp, Homo sapiens; identical to SEQ ID NO: 251297
  chr2:190686869-190686984
  hypo

SEQ ID NO: 300429 - DNA, 97 bp, Homo sapiens; identical to SEQ ID NO: 208363
  chr2:190703660-190703757
  hypo

SEQ ID NO: 300430 - DNA, 82 bp, Homo sapiens; identical to SEQ ID NO: 198612
  chr2:191044992-191045074
  hypo

SEQ ID NO: 300431 - DNA, 516 bp, Homo sapiens; identical to SEQ ID NO: 198613
  chr2:191045505-191046021
  hypo

SEQ ID NO: 300432 - DNA, 120 bp, Homo sapiens; identical to SEQ ID NO: 251299
  chr2:191145274-191145394
  hypo

SEQ ID NO: 300433 - DNA, 125 bp, Homo sapiens; identical to SEQ ID NO: 251300
  chr2:191301773-191301898
  hypo

SEQ ID NO: 300434 - DNA, 139 bp, Homo sapiens; identical to SEQ ID NO: 198615
  chr2:191512982-191513121
  hypo

SEQ ID NO: 300435 - DNA, 120 bp, Homo sapiens; identical to SEQ ID NO: 208367
  chr2:191794489-191794609
  hypo

SEQ ID NO: 300436 - DNA, 216 bp, Homo sapiens; identical to SEQ ID NO: 251302
  chr2:191796739-191796955
  hypo

SEQ ID NO: 300437 - DNA, 111 bp, Homo sapiens; identical to SEQ ID NO: 251303
  chr2:191829751-191829862
  hypo

SEQ ID NO: 300438 - DNA, 460 bp, Homo sapiens; identical to SEQ ID NO: 280507
  chr2:192109717-192110177
  hypo

SEQ ID NO: 300439 - DNA, 253 bp, Homo sapiens; identical to SEQ ID NO: 198625
  chr2:192110303-192110556
  hypo

SEQ ID NO: 300440 - DNA, 444 bp, Homo sapiens; identical to SEQ ID NO: 107187
  chr2:192110584-192111028
  hypo

SEQ ID NO: 300441 - DNA, 84 bp, Homo sapiens; identical to SEQ ID NO: 208371
  chr2:192342592-192342676
  hypo

SEQ ID NO: 300442 - DNA, 145 bp, Homo sapiens; identical to SEQ ID NO: 208372
  chr2:192746555-192746700
  hypo

SEQ ID NO: 300443 - DNA, 36 bp, Homo sapiens; identical to SEQ ID NO: 198627
  chr2:193058975-193059011
  hypo

SEQ ID NO: 300444 - DNA, 42 bp, Homo sapiens; identical to SEQ ID NO: 251306
  chr2:196362209-196362251
  hypo

SEQ ID NO: 300445 - DNA, 44 bp, Homo sapiens; identical to SEQ ID NO: 208374
  chr2:196402553-196402597
  hypo

SEQ ID NO: 300446 - DNA, 99 bp, Homo sapiens; identical to SEQ ID NO: 251308
  chr2:196411141-196411240
  hypo

SEQ ID NO: 300447 - DNA, 99 bp, Homo sapiens; identical to SEQ ID NO: 251309
  chr2:196411540-196411639
  hypo

SEQ ID NO: 300448 - DNA, 105 bp, Homo sapiens; identical to SEQ ID NO: 251310
  chr2:196462782-196462887
  hypo

SEQ ID NO: 300449 - DNA, 40 bp, Homo sapiens; identical to SEQ ID NO: 251311
  chr2:196477243-196477283
  hypo

SEQ ID NO: 300450 - DNA, 31 bp, Homo sapiens; identical to SEQ ID NO: 251312
  chr2:197003966-197003997
  hypo

SEQ ID NO: 300451 - DNA, 386 bp, Homo sapiens; identical to SEQ ID NO: 198628
  chr2:197035576-197035962
  hypo

SEQ ID NO: 300452 - DNA, 89 bp, Homo sapiens; identical to SEQ ID NO: 251313
  chr2:197038938-197039027
  hypo

SEQ ID NO: 300453 - DNA, 38 bp, Homo sapiens; identical to SEQ ID NO: 208376
  chr2:197095851-197095889
  hypo

SEQ ID NO: 300454 - DNA, 149 bp, Homo sapiens; identical to SEQ ID NO: 251315
  chr2:197379963-197380112
  hypo

SEQ ID NO: 300455 - DNA, 121 bp, Homo sapiens; identical to SEQ ID NO: 198631
  chr2:198257786-198257907
  hypo

SEQ ID NO: 300456 - DNA, 106 bp, Homo sapiens; identical to SEQ ID NO: 198632
  chr2:198262740-198262846
  hypo

SEQ ID NO: 300457 - DNA, 148 bp, Homo sapiens; identical to SEQ ID NO: 198633
  chr2:198265015-198265163
  hypo

SEQ ID NO: 300458 - DNA, 178 bp, Homo sapiens; identical to SEQ ID NO: 198634
  chr2:198265429-198265607
  hypo

SEQ ID NO: 300459 - DNA, 341 bp, Homo sapiens; identical to SEQ ID NO: 198635
  chr2:198266479-198266820
  hypo

SEQ ID NO: 300460 - DNA, 376 bp, Homo sapiens; identical to SEQ ID NO: 198636
  chr2:198267374-198267750
  hypo

SEQ ID NO: 300461 - DNA, 70 bp, Homo sapiens; identical to SEQ ID NO: 198637
  chr2:198268366-198268436
  hypo

SEQ ID NO: 300462 - DNA, 93 bp, Homo sapiens; identical to SEQ ID NO: 198638
  chr2:198269812-198269905
  hypo

SEQ ID NO: 300463 - DNA, 81 bp, Homo sapiens; identical to SEQ ID NO: 198639
  chr2:198272718-198272799
  hypo

SEQ ID NO: 300464 - DNA, 147 bp, Homo sapiens; identical to SEQ ID NO: 198640
  chr2:198273117-198273264
  hypo

SEQ ID NO: 300465 - DNA, 104 bp, Homo sapiens; identical to SEQ ID NO: 208387
  chr2:198276038-198276142
  hypo

SEQ ID NO: 300466 - DNA, 43 bp, Homo sapiens; identical to SEQ ID NO: 251318
  chr2:198356153-198356196
  hypo

SEQ ID NO: 300467 - DNA, 1110 bp, Homo sapiens; identical to SEQ ID NO: 280531
  chr2:198669112-198670222
  hypo

SEQ ID NO: 300468 - DNA, 928 bp, Homo sapiens; identical to SEQ ID NO: 280533
  chr2:200320441-200321369
  hypo

SEQ ID NO: 300469 - DNA, 222 bp, Homo sapiens; identical to SEQ ID NO: 280534
  chr2:200321661-200321883
  hypo

SEQ ID NO: 300470 - DNA, 52 bp, Homo sapiens; identical to SEQ ID NO: 280535
  chr2:200321998-200322050
  hypo

SEQ ID NO: 300471 - DNA, 59 bp, Homo sapiens; identical to SEQ ID NO: 198644
  chr2:200322611-200322670
  hypo

SEQ ID NO: 300472 - DNA, 781 bp, Homo sapiens; identical to SEQ ID NO: 221975
  chr2:200323016-200323797
  hypo

SEQ ID NO: 300473 - DNA, 582 bp, Homo sapiens; identical to SEQ ID NO: 221976
  chr2:200324029-200324611
  hypo

SEQ ID NO: 300474 - DNA, 57 bp, Homo sapiens; identical to SEQ ID NO: 251320
  chr2:200938957-200939014
  hypo

SEQ ID NO: 300475 - DNA, 1349 bp, Homo sapiens; identical to SEQ ID NO: 198655
  chr2:201171095-201172444
  hypo

SEQ ID NO: 300476 - DNA, 119 bp, Homo sapiens; identical to SEQ ID NO: 198656
  chr2:201172480-201172599
  hypo

SEQ ID NO: 300477 - DNA, 143 bp, Homo sapiens; identical to SEQ ID NO: 208393
  chr2:201218934-201219077
  hypo

SEQ ID NO: 300478 - DNA, 317 bp, Homo sapiens; identical to SEQ ID NO: 251322
  chr2:201273680-201273997
  hypo

SEQ ID NO: 300479 - DNA, 350 bp, Homo sapiens; identical to SEQ ID NO: 251323
  chr2:201281660-201282010
  hypo

SEQ ID NO: 300480 - DNA, 323 bp, Homo sapiens; identical to SEQ ID NO: 208394
  chr2:201354840-201355163
  hypo

SEQ ID NO: 300481 - DNA, 339 bp, Homo sapiens; identical to SEQ ID NO: 251325
  chr2:201652446-201652785
  hypo

SEQ ID NO: 300482 - DNA, 82 bp, Homo sapiens; identical to SEQ ID NO: 208396
  chr2:201712542-201712624
  hypo

SEQ ID NO: 300483 - DNA, 120 bp, Homo sapiens; identical to SEQ ID NO: 251327
  chr2:201809208-201809328
  hypo

SEQ ID NO: 300484 - DNA, 182 bp, Homo sapiens; identical to SEQ ID NO: 251328
  chr2:202003519-202003701
  hypo

SEQ ID NO: 300485 - DNA, 257 bp, Homo sapiens; identical to SEQ ID NO: 251329
  chr2:202004689-202004946
  hypo

SEQ ID NO: 300486 - DNA, 35 bp, Homo sapiens; identical to SEQ ID NO: 251330
  chr2:202119808-202119843
  hypo

SEQ ID NO: 300487 - DNA, 97 bp, Homo sapiens; identical to SEQ ID NO: 251331
  chr2:202261466-202261563
  hypo

SEQ ID NO: 300488 - DNA, 41 bp, Homo sapiens; identical to SEQ ID NO: 251332
  chr2:202270408-202270449
  hypo

SEQ ID NO: 300489 - DNA, 204 bp, Homo sapiens; identical to SEQ ID NO: 221978
  chr2:202644945-202645149
  hypo

SEQ ID NO: 300490 - DNA, 104 bp, Homo sapiens; identical to SEQ ID NO: 251333
  chr2:202888728-202888832
  hypo

SEQ ID NO: 300491 - DNA, 43 bp, Homo sapiens; identical to SEQ ID NO: 251334
  chr2:202893412-202893455
  hypo

SEQ ID NO: 300492 - DNA, 726 bp, Homo sapiens; identical to SEQ ID NO: 198661
  chr2:202898961-202899687
  hypo

SEQ ID NO: 300493 - DNA, 34 bp, Homo sapiens; identical to SEQ ID NO: 198662
  chr2:202900077-202900111
  hypo

SEQ ID NO: 300494 - DNA, 45 bp, Homo sapiens; identical to SEQ ID NO: 251336
  chr2:203163327-203163372
  hypo

SEQ ID NO: 300495 - DNA, 36 bp, Homo sapiens; identical to SEQ ID NO: 251337
  chr2:203242156-203242192
  hypo

SEQ ID NO: 300496 - DNA, 104 bp, Homo sapiens; identical to SEQ ID NO: 221980
  chr2:203242328-203242432
  hypo

SEQ ID NO: 300497 - DNA, 34 bp, Homo sapiens; identical to SEQ ID NO: 208400
  chr2:203250365-203250399
  hypo

SEQ ID NO: 300498 - DNA, 162 bp, Homo sapiens; identical to SEQ ID NO: 208401
  chr2:203431925-203432087
  hypo

SEQ ID NO: 300499 - DNA, 79 bp, Homo sapiens; identical to SEQ ID NO: 251340
  chr2:203467678-203467757
  hypo

SEQ ID NO: 300500 - DNA, 209 bp, Homo sapiens; identical to SEQ ID NO: 208402
  chr2:203484399-203484608
  hypo

SEQ ID NO: 300501 - DNA, 33 bp, Homo sapiens; identical to SEQ ID NO: 208403
  chr2:203498545-203498578
  hypo

SEQ ID NO: 300502 - DNA, 97 bp, Homo sapiens; identical to SEQ ID NO: 251343
  chr2:203621984-203622081
  hypo

SEQ ID NO: 300503 - DNA, 45 bp, Homo sapiens; identical to SEQ ID NO: 208404
  chr2:204055398-204055443
  hypo

SEQ ID NO: 300504 - DNA, 32 bp, Homo sapiens; identical to SEQ ID NO: 251346
  chr2:204190592-204190624
  hypo

SEQ ID NO: 300505 - DNA, 31 bp, Homo sapiens; identical to SEQ ID NO: 251347
  chr2:204206113-204206144
  hypo

SEQ ID NO: 300506 - DNA, 195 bp, Homo sapiens; identical to SEQ ID NO: 198663
  chr2:204399768-204399963
  hypo

SEQ ID NO: 300507 - DNA, 39 bp, Homo sapiens; identical to SEQ ID NO: 251348
  chr2:204475585-204475624
  hypo

SEQ ID NO: 300508 - DNA, 69 bp, Homo sapiens; identical to SEQ ID NO: 251349
  chr2:204803398-204803467
  hypo

SEQ ID NO: 300509 - DNA, 126 bp, Homo sapiens; identical to SEQ ID NO: 251350
  chr2:204803497-204803623
  hypo

SEQ ID NO: 300510 - DNA, 34 bp, Homo sapiens; identical to SEQ ID NO: 208406
  chr2:205984487-205984521
  hypo

SEQ ID NO: 300511 - DNA, 44 bp, Homo sapiens; identical to SEQ ID NO: 208407
  chr2:206166494-206166538
  hypo

SEQ ID NO: 300512 - DNA, 106 bp, Homo sapiens; identical to SEQ ID NO: 280581
  chr2:206546583-206546689
  hypo

SEQ ID NO: 300513 - DNA, 476 bp, Homo sapiens; identical to SEQ ID NO: 280582
  chr2:206546770-206547246
  hypo

SEQ ID NO: 300514 - DNA, 149 bp, Homo sapiens; identical to SEQ ID NO: 251353
  chr2:206586382-206586531
  hypo

SEQ ID NO: 300515 - DNA, 114 bp, Homo sapiens; identical to SEQ ID NO: 208408
  chr2:206605278-206605392
  hypo

SEQ ID NO: 300516 - DNA, 176 bp, Homo sapiens; identical to SEQ ID NO: 251355
  chr2:206608212-206608388
  hypo

SEQ ID NO: 300517 - DNA, 88 bp, Homo sapiens; identical to SEQ ID NO: 251356
  chr2:206609770-206609858
  hypo

SEQ ID NO: 300518 - DNA, 315 bp, Homo sapiens; identical to SEQ ID NO: 251357
  chr2:206611452-206611767
  hypo

SEQ ID NO: 300519 - DNA, 56 bp, Homo sapiens; identical to SEQ ID NO: 251358
  chr2:206614128-206614184
  hypo

SEQ ID NO: 300520 - DNA, 103 bp, Homo sapiens; identical to SEQ ID NO: 251359
  chr2:206670208-206670311
  hypo

SEQ ID NO: 300521 - DNA, 153 bp, Homo sapiens; identical to SEQ ID NO: 208409
  chr2:206826960-206827113
  hypo

SEQ ID NO: 300522 - DNA, 43 bp, Homo sapiens; identical to SEQ ID NO: 208410
  chr2:206830587-206830630
  hypo

SEQ ID NO: 300523 - DNA, 73 bp, Homo sapiens; identical to SEQ ID NO: 208411
  chr2:206830660-206830733
  hypo

SEQ ID NO: 300524 - DNA, 148 bp, Homo sapiens; identical to SEQ ID NO: 208412
  chr2:206890498-206890646
  hypo

SEQ ID NO: 300525 - DNA, 139 bp, Homo sapiens; identical to SEQ ID NO: 251363
  chr2:206896304-206896443
  hypo

SEQ ID NO: 300526 - DNA, 41 bp, Homo sapiens; identical to SEQ ID NO: 208413
  chr2:206971201-206971242
  hypo

SEQ ID NO: 300527 - DNA, 41 bp, Homo sapiens; identical to SEQ ID NO: 208414
  chr2:206971482-206971523
  hypo

SEQ ID NO: 300528 - DNA, 43 bp, Homo sapiens; identical to SEQ ID NO: 208415
  chr2:207021944-207021987
  hypo

SEQ ID NO: 300529 - DNA, 80 bp, Homo sapiens; identical to SEQ ID NO: 251367
  chr2:207068388-207068468
  hypo

SEQ ID NO: 300530 - DNA, 37 bp, Homo sapiens; identical to SEQ ID NO: 251368
  chr2:207068777-207068814
  hypo

SEQ ID NO: 300531 - DNA, 71 bp, Homo sapiens; identical to SEQ ID NO: 198668
  chr2:207307392-207307463
  hypo

SEQ ID NO: 300532 - DNA, 239 bp, Homo sapiens; identical to SEQ ID NO: 198669
  chr2:207308960-207309199
  hypo

SEQ ID NO: 300533 - DNA, 178 bp, Homo sapiens; identical to SEQ ID NO: 251369
  chr2:208003599-208003777
  hypo

SEQ ID NO: 300534 - DNA, 298 bp, Homo sapiens; identical to SEQ ID NO: 251370
  chr2:208286407-208286705
  hypo

SEQ ID NO: 300535 - DNA, 42 bp, Homo sapiens; identical to SEQ ID NO: 251371
  chr2:208317603-208317645
  hypo

SEQ ID NO: 300536 - DNA, 40 bp, Homo sapiens; identical to SEQ ID NO: 251372
  chr2:208339132-208339172
  hypo

SEQ ID NO: 300537 - DNA, 47 bp, Homo sapiens; identical to SEQ ID NO: 208418
  chr2:208410314-208410361
  hypo

SEQ ID NO: 300538 - DNA, 41 bp, Homo sapiens; identical to SEQ ID NO: 251375
  chr2:208577542-208577583
  hypo

SEQ ID NO: 300539 - DNA, 155 bp, Homo sapiens; identical to SEQ ID NO: 208419
  chr2:208580710-208580865
  hypo

SEQ ID NO: 300540 - DNA, 137 bp, Homo sapiens; identical to SEQ ID NO: 208420
  chr2:208622063-208622200
  hypo

SEQ ID NO: 300541 - DNA, 146 bp, Homo sapiens; identical to SEQ ID NO: 208421
  chr2:208688671-208688817
  hypo

SEQ ID NO: 300542 - DNA, 68 bp, Homo sapiens; identical to SEQ ID NO: 208422
  chr2:208692452-208692520
  hypo

SEQ ID NO: 300543 - DNA, 336 bp, Homo sapiens; identical to SEQ ID NO: 251380
  chr2:208696086-208696422
  hypo

SEQ ID NO: 300544 - DNA, 95 bp, Homo sapiens; identical to SEQ ID NO: 251381
  chr2:208865897-208865992
  hypo

SEQ ID NO: 300545 - DNA, 110 bp, Homo sapiens; identical to SEQ ID NO: 251382
  chr2:208993012-208993122
  hypo

SEQ ID NO: 300546 - DNA, 150 bp, Homo sapiens; identical to SEQ ID NO: 208423
  chr2:208994585-208994735
  hypo

SEQ ID NO: 300547 - DNA, 78 bp, Homo sapiens; identical to SEQ ID NO: 198673
  chr2:209108240-209108318
  hypo

SEQ ID NO: 300548 - DNA, 261 bp, Homo sapiens; identical to SEQ ID NO: 198674
  chr2:209113128-209113389
  hypo

SEQ ID NO: 300549 - DNA, 211 bp, Homo sapiens; identical to SEQ ID NO: 198675
  chr2:209118761-209118972
  hypo

SEQ ID NO: 300550 - DNA, 201 bp, Homo sapiens; identical to SEQ ID NO: 208427
  chr2:209224958-209225159
  hypo

SEQ ID NO: 300551 - DNA, 494 bp, Homo sapiens
  chr2:209225393-209225887
  hypo
ggctgccttctgtggtgaaggtgggggccagggttgcaaggccctcctcttgttggcatcagccaggcacgcagtgctgtcgtggctgacccaggccgtgaggcacccgctgactgagaagccaacctgagcacccagccgcacctaccgctggcctcagacatcagcaccccaaagggtatgttggagtcccatggtggaggtgccggccgctcctccacgcacttgatgtataccgaggatcccatgcttgacgtcgcagggggcattagccaggagcacgttgctgggatgccagtccaggctgaggatggtggagccaatgggcttcttgatgtacttgcacacccaccagttattctcccgctggaaataacagatggcgatgacacacagctgccgcccacagcaaacttgtcctgtgggcccagcacacacagcaggcagtgggtgcgggcttaccctcctggcccgtcagcgtccacacagaggcc

SEQ ID NO: 300552 - DNA, 300 bp, Homo sapiens; identical to SEQ ID NO: 251387
  chr2:210673260-210673560
  hypo

SEQ ID NO: 300553 - DNA, 110 bp, Homo sapiens; identical to SEQ ID NO: 251388
  chr2:211036650-211036760
  hypo

SEQ ID NO: 300554 - DNA, 41 bp, Homo sapiens; identical to SEQ ID NO: 208430
  chr2:211055940-211055981
  hypo

SEQ ID NO: 300555 - DNA, 44 bp, Homo sapiens; identical to SEQ ID NO: 251390
  chr2:214000555-214000599
  hypo

SEQ ID NO: 300556 - DNA, 34 bp, Homo sapiens; identical to SEQ ID NO: 251391
  chr2:214458777-214458811
  hypo

SEQ ID NO: 300557 - DNA, 44 bp, Homo sapiens; identical to SEQ ID NO: 251392
  chr2:215581840-215581884
  hypo

SEQ ID NO: 300558 - DNA, 76 bp, Homo sapiens; identical to SEQ ID NO: 251393
  chr2:216179504-216179580
  hypo

SEQ ID NO: 300559 - DNA, 58 bp, Homo sapiens; identical to SEQ ID NO: 251394
  chr2:216195106-216195164
  hypo

SEQ ID NO: 300560 - DNA, 37 bp, Homo sapiens; identical to SEQ ID NO: 208431
  chr2:216196377-216196414
  hypo

SEQ ID NO: 300561 - DNA, 193 bp, Homo sapiens; identical to SEQ ID NO: 251396
  chr2:216274337-216274530
  hypo

SEQ ID NO: 300562 - DNA, 82 bp, Homo sapiens; identical to SEQ ID NO: 251397
  chr2:216824991-216825073
  hypo

SEQ ID NO: 300563 - DNA, 45 bp, Homo sapiens; identical to SEQ ID NO: 208432
  chr2:216852232-216852277
  hypo

SEQ ID NO: 300564 - DNA, 183 bp, Homo sapiens; identical to SEQ ID NO: 208433
  chr2:216885426-216885609
  hypo

SEQ ID NO: 300565 - DNA, 41 bp, Homo sapiens; identical to SEQ ID NO: 198684
  chr2:217008385-217008426
  hypo

SEQ ID NO: 300566 - DNA, 310 bp, Homo sapiens; identical to SEQ ID NO: 280618
  chr2:217236253-217236563
  hypo

SEQ ID NO: 300567 - DNA, 56 bp, Homo sapiens; identical to SEQ ID NO: 208435
  chr2:217472021-217472077
  hypo

SEQ ID NO: 300568 - DNA, 116 bp, Homo sapiens; identical to SEQ ID NO: 251401
  chr2:217475514-217475630
  hypo

SEQ ID NO: 300569 - DNA, 520 bp, Homo sapiens; identical to SEQ ID NO: 251402
  chr2:217528434-217528954
  hypo

SEQ ID NO: 300570 - DNA, 410 bp, Homo sapiens; identical to SEQ ID NO: 280629
  chr2:217559556-217559966
  hypo

SEQ ID NO: 300571 - DNA, 221 bp, Homo sapiens; identical to SEQ ID NO: 208438
  chr2:217674466-217674687
  hypo

SEQ ID NO: 300572 - DNA, 95 bp, Homo sapiens
  chr2:217674954-217675049
  hypo
gagcagaggagcgacgctctggtgtgggcagcccgagaggtgatggggtttcagtaaatcatggcggggagttcaggccaccgccggagtccagt

SEQ ID NO: 300573 - DNA, 201 bp, Homo sapiens; identical to SEQ ID NO: 208439
  chr2:217690998-217691199
  hypo

SEQ ID NO: 300574 - DNA, 75 bp, Homo sapiens; identical to SEQ ID NO: 251406
  chr2:217750176-217750251
  hypo

SEQ ID NO: 300575 - DNA, 405 bp, Homo sapiens; identical to SEQ ID NO: 251407
  chr2:217751663-217752068
  hypo

SEQ ID NO: 300576 - DNA, 274 bp, Homo sapiens; identical to SEQ ID NO: 251408
  chr2:217931328-217931602
  hypo

SEQ ID NO: 300577 - DNA, 193 bp, Homo sapiens; identical to SEQ ID NO: 251409
  chr2:218664472-218664665
  hypo

SEQ ID NO: 300578 - DNA, 61 bp, Homo sapiens
  chr2:218665147-218665208
  hypo
caggcctcacctcccgactcccctcactgctgggcgacattgaatttgaagttccattgcc

SEQ ID NO: 300579 - DNA, 103 bp, Homo sapiens
  chr2:218665238-218665341
  hypo
ctaaagaaatgagcaaaacacacgcacacacatacatccacacttgcacatgcgcacacacgtcctgtgttaccactggccaaggaaacgcgagtctcaggat

SEQ ID NO: 300580 - DNA, 46 bp, Homo sapiens; identical to SEQ ID NO: 208440
  chr2:218676420-218676466
  hypo

SEQ ID NO: 300581 - DNA, 134 bp, Homo sapiens; identical to SEQ ID NO: 208441
  chr2:218678421-218678555
  hypo

SEQ ID NO: 300582 - DNA, 861 bp, Homo sapiens; identical to SEQ ID NO: 208442
  chr2:218682482-218683343
  hypo

SEQ ID NO: 300583 - DNA, 154 bp, Homo sapiens; identical to SEQ ID NO: 208443
  chr2:218686229-218686383
  hypo

SEQ ID NO: 300584 - DNA, 288 bp, Homo sapiens; identical to SEQ ID NO: 251415
  chr2:218694774-218695062
  hypo

SEQ ID NO: 300585 - DNA, 70 bp, Homo sapiens
  chr2:218697819-218697889
  hypo
cctggcctcagagacggtcattcatggaataaccacgaagcagccccagcccacaggtacgcgcatgttt

SEQ ID NO: 300586 - DNA, 192 bp, Homo sapiens; identical to SEQ ID NO: 208444
  chr2:218697937-218698129
  hypo

SEQ ID NO: 300587 - DNA, 108 bp, Homo sapiens; identical to SEQ ID NO: 208445
  chr2:218700732-218700840
  hypo

SEQ ID NO: 300588 - DNA, 308 bp, Homo sapiens; identical to SEQ ID NO: 208446
  chr2:218704293-218704601
  hypo

SEQ ID NO: 300589 - DNA, 1078 bp, Homo sapiens; identical to SEQ ID NO: 251419
  chr2:218712679-218713757
  hypo

SEQ ID NO: 300590 - DNA, 46 bp, Homo sapiens; identical to SEQ ID NO: 251420
  chr2:218749830-218749876
  hypo

SEQ ID NO: 300591 - DNA, 202 bp, Homo sapiens; identical to SEQ ID NO: 208448
  chr2:218757381-218757583
  hypo

SEQ ID NO: 300592 - DNA, 87 bp, Homo sapiens; identical to SEQ ID NO: 251422
  chr2:218762564-218762651
  hypo

SEQ ID NO: 300593 - DNA, 200 bp, Homo sapiens; identical to SEQ ID NO: 208449
  chr2:218765458-218765658
  hypo

SEQ ID NO: 300594 - DNA, 193 bp, Homo sapiens; identical to SEQ ID NO: 251424
  chr2:218819724-218819917
  hypo

SEQ ID NO: 300595 - DNA, 44 bp, Homo sapiens; identical to SEQ ID NO: 251425
  chr2:219080906-219080950
  hypo

SEQ ID NO: 300596 - DNA, 111 bp, Homo sapiens; identical to SEQ ID NO: 251426
  chr2:219129431-219129542
  hypo

SEQ ID NO: 300597 - DNA, 313 bp, Homo sapiens; identical to SEQ ID NO: 251427
  chr2:219145048-219145361
  hypo

SEQ ID NO: 300598 - DNA, 37 bp, Homo sapiens; identical to SEQ ID NO: 251428
  chr2:219180148-219180185
  hypo

SEQ ID NO: 300599 - DNA, 89 bp, Homo sapiens; identical to SEQ ID NO: 251429
  chr2:219204242-219204331
  hypo

SEQ ID NO: 300600 - DNA, 398 bp, Homo sapiens; identical to SEQ ID NO: 208450
  chr2:219209330-219209728
  hypo

SEQ ID NO: 300601 - DNA, 67 bp, Homo sapiens; identical to SEQ ID NO: 251431
  chr2:219210001-219210068
  hypo

SEQ ID NO: 300602 - DNA, 324 bp, Homo sapiens; identical to SEQ ID NO: 280633
  chr2:219232221-219232545
  hypo

SEQ ID NO: 300603 - DNA, 31 bp, Homo sapiens; identical to SEQ ID NO: 198690
  chr2:219232859-219232890
  hypo

SEQ ID NO: 300604 - DNA, 348 bp, Homo sapiens; identical to SEQ ID NO: 208452
  chr2:219256000-219256348
  hypo

SEQ ID NO: 300605 - DNA, 241 bp, Homo sapiens; identical to SEQ ID NO: 221992
  chr2:219262922-219263163
  hypo

SEQ ID NO: 300606 - DNA, 989 bp, Homo sapiens; identical to SEQ ID NO: 280637
  chr2:219263453-219264442
  hypo

SEQ ID NO: 300607 - DNA, 44 bp, Homo sapiens; identical to SEQ ID NO: 208455
  chr2:219267986-219268030
  hypo

SEQ ID NO: 300608 - DNA, 115 bp, Homo sapiens; identical to SEQ ID NO: 208456
  chr2:219294067-219294182
  hypo

SEQ ID NO: 300609 - DNA, 170 bp, Homo sapiens; identical to SEQ ID NO: 251435
  chr2:219295536-219295706
  hypo

SEQ ID NO: 300610 - DNA, 31 bp, Homo sapiens; identical to SEQ ID NO: 208457
  chr2:219577395-219577426
  hypo

SEQ ID NO: 300611 - DNA, 86 bp, Homo sapiens; identical to SEQ ID NO: 251439
  chr2:219599483-219599569
  hypo

SEQ ID NO: 300612 - DNA, 37 bp, Homo sapiens; identical to SEQ ID NO: 251440
  chr2:219609749-219609786
  hypo

SEQ ID NO: 300613 - DNA, 48 bp, Homo sapiens; identical to SEQ ID NO: 251441
  chr2:219694762-219694810
  hypo

SEQ ID NO: 300614 - DNA, 427 bp, Homo sapiens; identical to SEQ ID NO: 280644
  chr2:219748349-219748776
  hypo

SEQ ID NO: 300615 - DNA, 614 bp, Homo sapiens; identical to SEQ ID NO: 198696
  chr2:219757351-219757965
  hypo

SEQ ID NO: 300616 - DNA, 334 bp, Homo sapiens; identical to SEQ ID NO: 280653
  chr2:219824452-219824786
  hypo

SEQ ID NO: 300617 - DNA, 42 bp, Homo sapiens; identical to SEQ ID NO: 280654
  chr2:219825939-219825981
  hypo

SEQ ID NO: 300618 - DNA, 846 bp, Homo sapiens; identical to SEQ ID NO: 280657
  chr2:219845551-219846397
  hypo

SEQ ID NO: 300619 - DNA, 61 bp, Homo sapiens; identical to SEQ ID NO: 198703
  chr2:219857662-219857723
  hypo

SEQ ID NO: 300620 - DNA, 177 bp, Homo sapiens; identical to SEQ ID NO: 208461
  chr2:219892664-219892841
  hypo

SEQ ID NO: 300621 - DNA, 33 bp, Homo sapiens; identical to SEQ ID NO: 251444
  chr2:219919242-219919275
  hypo

SEQ ID NO: 300622 - DNA, 92 bp, Homo sapiens; identical to SEQ ID NO: 251445
  chr2:219994459-219994551
  hypo

SEQ ID NO: 300623 - DNA, 35 bp, Homo sapiens; identical to SEQ ID NO: 251446
  chr2:220039756-220039791
  hypo

SEQ ID NO: 300624 - DNA, 41 bp, Homo sapiens; identical to SEQ ID NO: 208462
  chr2:220049820-220049861
  hypo

SEQ ID NO: 300625 - DNA, 210 bp, Homo sapiens; identical to SEQ ID NO: 251448
  chr2:220066674-220066884
  hypo

SEQ ID NO: 300626 - DNA, 127 bp, Homo sapiens; identical to SEQ ID NO: 251450
  chr2:220092640-220092767
  hypo

SEQ ID NO: 300627 - DNA, 185 bp, Homo sapiens; identical to SEQ ID NO: 208463
  chr2:220150656-220150841
  hypo

SEQ ID NO: 300628 - DNA, 335 bp, Homo sapiens; identical to SEQ ID NO: 208464
  chr2:220150871-220151206
  hypo

SEQ ID NO: 300629 - DNA, 130 bp, Homo sapiens; identical to SEQ ID NO: 251452
  chr2:220161581-220161711
  hypo

SEQ ID NO: 300630 - DNA, 99 bp, Homo sapiens; identical to SEQ ID NO: 251453
  chr2:220161741-220161840
  hypo

SEQ ID NO: 300631 - DNA, 205 bp, Homo sapiens
  chr2:220309514-220309719
  hypo
gtgcctcagtctcacggtgctcctttctctagggggttctgacaccctggtgggcacctccctggacacacccccgacctccgtgacaggcacctcagaggagcaagtgagctggtggggcagcgggcagacggtcctggagcaggaagcgggcagtgggggtggcacccgccgcctcccgggcagcccaaggcaagcacaggca

SEQ ID NO: 300632 - DNA, 129 bp, Homo sapiens
  chr2:220309749-220309878
  hypo
gagccgctggtgcgggcatctcgagctaatctggtgggcgcaagctgggggtcagaggatagcctttccgtggccagtgacctgtacggcagcgcattcagcctgtacagaggacgggcgctctctatc

SEQ ID NO: 300633 - DNA, 131 bp, Homo sapiens; identical to SEQ ID NO: 251455
  chr2:220316366-220316497
  hypo

SEQ ID NO: 300634 - DNA, 39 bp, Homo sapiens; identical to SEQ ID NO: 251456
  chr2:220337590-220337629
  hypo

SEQ ID NO: 300635 - DNA, 83 bp, Homo sapiens; identical to SEQ ID NO: 208465
  chr2:220371685-220371768
  hypo

SEQ ID NO: 300636 - DNA, 111 bp, Homo sapiens; identical to SEQ ID NO: 198717
  chr2:220378982-220379093
  hypo

SEQ ID NO: 300637 - DNA, 199 bp, Homo sapiens; identical to SEQ ID NO: 198718
  chr2:220407985-220408184
  hypo

SEQ ID NO: 300638 - DNA, 56 bp, Homo sapiens; identical to SEQ ID NO: 198719
  chr2:220408723-220408779
  hypo

SEQ ID NO: 300639 - DNA, 234 bp, Homo sapiens; identical to SEQ ID NO: 251458
  chr2:220419207-220419441
  hypo

SEQ ID NO: 300640 - DNA, 79 bp, Homo sapiens; identical to SEQ ID NO: 251459
  chr2:220420853-220420932
  hypo

SEQ ID NO: 300641 - DNA, 86 bp, Homo sapiens; identical to SEQ ID NO: 208469
  chr2:220421317-220421403
  hypo

SEQ ID NO: 300642 - DNA, 117 bp, Homo sapiens; identical to SEQ ID NO: 208470
  chr2:220422087-220422204
  hypo

SEQ ID NO: 300643 - DNA, 176 bp, Homo sapiens; identical to SEQ ID NO: 251462
  chr2:220424030-220424206
  hypo

SEQ ID NO: 300644 - DNA, 401 bp, Homo sapiens; identical to SEQ ID NO: 208471
  chr2:220427079-220427480
  hypo

SEQ ID NO: 300645 - DNA, 125 bp, Homo sapiens; identical to SEQ ID NO: 251464
  chr2:220428140-220428265
  hypo

SEQ ID NO: 300646 - DNA, 57 bp, Homo sapiens; identical to SEQ ID NO: 208472
  chr2:220431758-220431815
  hypo

SEQ ID NO: 300647 - DNA, 337 bp, Homo sapiens; identical to SEQ ID NO: 208473
  chr2:220432724-220433061
  hypo

SEQ ID NO: 300648 - DNA, 367 bp, Homo sapiens; identical to SEQ ID NO: 251467
  chr2:220434651-220435018
  hypo

SEQ ID NO: 300649 - DNA, 80 bp, Homo sapiens; identical to SEQ ID NO: 198721
  chr2:220435309-220435389
  hypo

SEQ ID NO: 300650 - DNA, 237 bp, Homo sapiens; identical to SEQ ID NO: 280691
  chr2:220492470-220492707
  hypo

SEQ ID NO: 300651 - DNA, 148 bp, Homo sapiens; identical to SEQ ID NO: 208476
  chr2:220499163-220499311
  hypo

SEQ ID NO: 300652 - DNA, 119 bp, Homo sapiens; identical to SEQ ID NO: 251469
  chr2:220505456-220505575
  hypo

SEQ ID NO: 300653 - DNA, 34 bp, Homo sapiens; identical to SEQ ID NO: 251470
  chr2:220508877-220508911
  hypo

SEQ ID NO: 300654 - DNA, 86 bp, Homo sapiens; identical to SEQ ID NO: 251471
  chr2:220553963-220554049
  hypo

SEQ ID NO: 300655 - DNA, 230 bp, Homo sapiens; identical to SEQ ID NO: 251472
  chr2:222389989-222390219
  hypo

SEQ ID NO: 300656 - DNA, 406 bp, Homo sapiens; identical to SEQ ID NO: 198725
  chr2:222436961-222437367
  hypo

SEQ ID NO: 300657 - DNA, 827 bp, Homo sapiens; identical to SEQ ID NO: 198726
  chr2:222437421-222438248
  hypo

SEQ ID NO: 300658 - DNA, 1262 bp, Homo sapiens; identical to SEQ ID NO: 280706
  chr2:223183522-223184784
  hypo

SEQ ID NO: 300659 - DNA, 95 bp, Homo sapiens; identical to SEQ ID NO: 280707
  chr2:223185035-223185130
  hypo

SEQ ID NO: 300660 - DNA, 143 bp, Homo sapiens; identical to SEQ ID NO: 208479
  chr2:223562591-223562734
  hypo

SEQ ID NO: 300661 - DNA, 81 bp, Homo sapiens; identical to SEQ ID NO: 251474
  chr2:223652842-223652923
  hypo

SEQ ID NO: 300662 - DNA, 32 bp, Homo sapiens; identical to SEQ ID NO: 251475
  chr2:223743763-223743795
  hypo

SEQ ID NO: 300663 - DNA, 40 bp, Homo sapiens
  chr2:223753603-223753643
  hypo
tagacatgtctgtgcctgcgtctctttgagggatatacgt

SEQ ID NO: 300664 - DNA, 120 bp, Homo sapiens; identical to SEQ ID NO: 251477
  chr2:223764176-223764296
  hypo

SEQ ID NO: 300665 - DNA, 96 bp, Homo sapiens; identical to SEQ ID NO: 251478
  chr2:223772743-223772839
  hypo

SEQ ID NO: 300666 - DNA, 200 bp, Homo sapiens; identical to SEQ ID NO: 208480
  chr2:224640636-224640836
  hypo

SEQ ID NO: 300667 - DNA, 42 bp, Homo sapiens; identical to SEQ ID NO: 251480
  chr2:224759073-224759115
  hypo

SEQ ID NO: 300668 - DNA, 383 bp, Homo sapiens; identical to SEQ ID NO: 222018
  chr2:224808915-224809298
  hypo

SEQ ID NO: 300669 - DNA, 88 bp, Homo sapiens; identical to SEQ ID NO: 251481
  chr2:224856517-224856605
  hypo

SEQ ID NO: 300670 - DNA, 404 bp, Homo sapiens; identical to SEQ ID NO: 280719
  chr2:224904237-224904641
  hypo

SEQ ID NO: 300671 - DNA, 42 bp, Homo sapiens; identical to SEQ ID NO: 251482
  chr2:225229321-225229363
  hypo

SEQ ID NO: 300672 - DNA, 39 bp, Homo sapiens; identical to SEQ ID NO: 208483
  chr2:225390998-225391037
  hypo

SEQ ID NO: 300673 - DNA, 35 bp, Homo sapiens; identical to SEQ ID NO: 251484
  chr2:225463886-225463921
  hypo

SEQ ID NO: 300674 - DNA, 32 bp, Homo sapiens; identical to SEQ ID NO: 251485
  chr2:225482441-225482473
  hypo

SEQ ID NO: 300675 - DNA, 48 bp, Homo sapiens; identical to SEQ ID NO: 208484
  chr2:225692101-225692149
  hypo

SEQ ID NO: 300676 - DNA, 236 bp, Homo sapiens; identical to SEQ ID NO: 198740
  chr2:225906168-225906404
  hypo

SEQ ID NO: 300677 - DNA, 149 bp, Homo sapiens; identical to SEQ ID NO: 251487
  chr2:227750577-227750726
  hypo

SEQ ID NO: 300678 - DNA, 154 bp, Homo sapiens; identical to SEQ ID NO: 251488
  chr2:227769068-227769222
  hypo

SEQ ID NO: 300679 - DNA, 40 bp, Homo sapiens; identical to SEQ ID NO: 251489
  chr2:227818767-227818807
  hypo

SEQ ID NO: 300680 - DNA, 365 bp, Homo sapiens; identical to SEQ ID NO: 251490
  chr2:227841931-227842296
  hypo

SEQ ID NO: 300681 - DNA, 90 bp, Homo sapiens; identical to SEQ ID NO: 208487
  chr2:228185366-228185456
  hypo

SEQ ID NO: 300682 - DNA, 75 bp, Homo sapiens; identical to SEQ ID NO: 208488
  chr2:228212000-228212075
  hypo

SEQ ID NO: 300683 - DNA, 87 bp, Homo sapiens; identical to SEQ ID NO: 251493
  chr2:228255400-228255487
  hypo

SEQ ID NO: 300684 - DNA, 103 bp, Homo sapiens; identical to SEQ ID NO: 251495
  chr2:228466845-228466948
  hypo

SEQ ID NO: 300685 - DNA, 246 bp, Homo sapiens; identical to SEQ ID NO: 251496
  chr2:228632576-228632822
  hypo

SEQ ID NO: 300686 - DNA, 37 bp, Homo sapiens; identical to SEQ ID NO: 208490
  chr2:228638407-228638444
  hypo

SEQ ID NO: 300687 - DNA, 41 bp, Homo sapiens
  chr2:228735639-228735680
  hypo
gttggctgactctgtctctccgcaggctttctcatggaaac

SEQ ID NO: 300688 - DNA, 60 bp, Homo sapiens
  chr2:228735736-228735796
  hypo
agagttttaagcccaggttgagagcacaggtgtaggctttctggtgtaggttccgacgca

SEQ ID NO: 300689 - DNA, 94 bp, Homo sapiens; identical to SEQ ID NO: 251499
  chr2:228741009-228741103
  hypo

SEQ ID NO: 300690 - DNA, 120 bp, Homo sapiens; identical to SEQ ID NO: 208491
  chr2:230743170-230743290
  hypo

SEQ ID NO: 300691 - DNA, 102 bp, Homo sapiens
  chr2:230795433-230795535
  hypo
tcaagcctgggcgacagtgagatgccgtctcaaaacaaaaacaaaagagagatgctttaccccttcgccactgcacctgagaacctcagcccagctcagctg

SEQ ID NO: 300692 - DNA, 45 bp, Homo sapiens; identical to SEQ ID NO: 251502
  chr2:230796254-230796299
  hypo

SEQ ID NO: 300693 - DNA, 41 bp, Homo sapiens; identical to SEQ ID NO: 251503
  chr2:231492418-231492459
  hypo

SEQ ID NO: 300694 - DNA, 250 bp, Homo sapiens; identical to SEQ ID NO: 251504
  chr2:231522219-231522469
  hypo

SEQ ID NO: 300695 - DNA, 268 bp, Homo sapiens; identical to SEQ ID NO: 251505
  chr2:231530668-231530936
  hypo

SEQ ID NO: 300696 - DNA, 34 bp, Homo sapiens; identical to SEQ ID NO: 251506
  chr2:231585404-231585438
  hypo

SEQ ID NO: 300697 - DNA, 160 bp, Homo sapiens; identical to SEQ ID NO: 208493
  chr2:231676879-231677039
  hypo

SEQ ID NO: 300698 - DNA, 237 bp, Homo sapiens; identical to SEQ ID NO: 198744
  chr2:231692871-231693108
  hypo

SEQ ID NO: 300699 - DNA, 31 bp, Homo sapiens; identical to SEQ ID NO: 208495
  chr2:231744875-231744906
  hypo

SEQ ID NO: 300700 - DNA, 458 bp, Homo sapiens; identical to SEQ ID NO: 198745
  chr2:231902081-231902539
  hypo

SEQ ID NO: 300701 - DNA, 141 bp, Homo sapiens; identical to SEQ ID NO: 251509
  chr2:231965554-231965695
  hypo

SEQ ID NO: 300702 - DNA, 82 bp, Homo sapiens; identical to SEQ ID NO: 251510
  chr2:231977475-231977557
  hypo

SEQ ID NO: 300703 - DNA, 38 bp, Homo sapiens; identical to SEQ ID NO: 251511
  chr2:231992333-231992371
  hypo

SEQ ID NO: 300704 - DNA, 42 bp, Homo sapiens; identical to SEQ ID NO: 251512
  chr2:232109613-232109655
  hypo

SEQ ID NO: 300705 - DNA, 140 bp, Homo sapiens; identical to SEQ ID NO: 208497
  chr2:232113118-232113258
  hypo

SEQ ID NO: 300706 - DNA, 42 bp, Homo sapiens; identical to SEQ ID NO: 251514
  chr2:232162354-232162396
  hypo

SEQ ID NO: 300707 - DNA, 99 bp, Homo sapiens; identical to SEQ ID NO: 251515
  chr2:232223174-232223273
  hypo

SEQ ID NO: 300708 - DNA, 125 bp, Homo sapiens; identical to SEQ ID NO: 208498
  chr2:232247495-232247620
  hypo

SEQ ID NO: 300709 - DNA, 154 bp, Homo sapiens; identical to SEQ ID NO: 251517
  chr2:232264149-232264303
  hypo

SEQ ID NO: 300710 - DNA, 75 bp, Homo sapiens
  chr2:232283622-232283697
  hypo
atggcctccggggccccgggagtcgcaggcaccctgcctggacgctgttgtggggcctgaacgaagttcactgct

SEQ ID NO: 300711 - DNA, 44 bp, Homo sapiens
  chr2:232283773-232283817
  hypo
ggtggatctgagagagtggagtctgatcccgcccgcactgaaac

SEQ ID NO: 300712 - DNA, 78 bp, Homo sapiens; identical to SEQ ID NO: 208499
  chr2:232458617-232458695
  hypo

SEQ ID NO: 300713 - DNA, 80 bp, Homo sapiens; identical to SEQ ID NO: 251520
  chr2:232472540-232472620
  hypo

SEQ ID NO: 300714 - DNA, 104 bp, Homo sapiens; identical to SEQ ID NO: 280744
  chr2:232479181-232479285
  hypo

SEQ ID NO: 300715 - DNA, 236 bp, Homo sapiens; identical to SEQ ID NO: 280745
  chr2:232479454-232479690
  hypo

SEQ ID NO: 300716 - DNA, 92 bp, Homo sapiens
  chr2:232485559-232485651
  hypo
gcagaaactgacttcgtttccctgttattgatatgaggctgtgggggctcactgtaattaatcagtagggtcagccgcctttgaaggttact

SEQ ID NO: 300717 - DNA, 129 bp, Homo sapiens; identical to SEQ ID NO: 280746
  chr2:232527239-232527368
  hypo

SEQ ID NO: 300718 - DNA, 551 bp, Homo sapiens; identical to SEQ ID NO: 222027
  chr2:232545577-232546128
  hypo

SEQ ID NO: 300719 - DNA, 182 bp, Homo sapiens; identical to SEQ ID NO: 251522
  chr2:232557590-232557772
  hypo

SEQ ID NO: 300720 - DNA, 245 bp, Homo sapiens; identical to SEQ ID NO: 251523
  chr2:232760319-232760564
  hypo

SEQ ID NO: 300721 - DNA, 637 bp, Homo sapiens; identical to SEQ ID NO: 280753
  chr2:232790016-232790653
  hypo

SEQ ID NO: 300722 - DNA, 263 bp, Homo sapiens; identical to SEQ ID NO: 280754
  chr2:232790784-232791047
  hypo

SEQ ID NO: 300723 - DNA, 131 bp, Homo sapiens; identical to SEQ ID NO: 251524
  chr2:232850673-232850804
  hypo

SEQ ID NO: 300724 - DNA, 120 bp, Homo sapiens; identical to SEQ ID NO: 251525
  chr2:233159520-233159640
  hypo

SEQ ID NO: 300725 - DNA, 94 bp, Homo sapiens; identical to SEQ ID NO: 251526
  chr2:233183056-233183150
  hypo

SEQ ID NO: 300726 - DNA, 112 bp, Homo sapiens; identical to SEQ ID NO: 208501
  chr2:233198441-233198553
  hypo

SEQ ID NO: 300727 - DNA, 143 bp, Homo sapiens; identical to SEQ ID NO: 208502
  chr2:233198583-233198726
  hypo

SEQ ID NO: 300728 - DNA, 41 bp, Homo sapiens; identical to SEQ ID NO: 251528
  chr2:233230827-233230868
  hypo

SEQ ID NO: 300729 - DNA, 78 bp, Homo sapiens; identical to SEQ ID NO: 222030
  chr2:233251508-233251586
  hypo

SEQ ID NO: 300730 - DNA, 40 bp, Homo sapiens; identical to SEQ ID NO: 251529
  chr2:233258360-233258400
  hypo

SEQ ID NO: 300731 - DNA, 262 bp, Homo sapiens; identical to SEQ ID NO: 280757
  chr2:233283897-233284159
  hypo

SEQ ID NO: 300732 - DNA, 82 bp, Homo sapiens; identical to SEQ ID NO: 222033
  chr2:233284387-233284469
  hypo

SEQ ID NO: 300733 - DNA, 365 bp, Homo sapiens; identical to SEQ ID NO: 280759
  chr2:233284687-233285052
  hypo

SEQ ID NO: 300734 - DNA, 238 bp, Homo sapiens; identical to SEQ ID NO: 280760
  chr2:233285131-233285369
  hypo

SEQ ID NO: 300735 - DNA, 235 bp, Homo sapiens; identical to SEQ ID NO: 280762
  chr2:233286008-233286243
  hypo

SEQ ID NO: 300736 - DNA, 45 bp, Homo sapiens; identical to SEQ ID NO: 208506
  chr2:233355393-233355438
  hypo

SEQ ID NO: 300737 - DNA, 42 bp, Homo sapiens; identical to SEQ ID NO: 251531
  chr2:233357813-233357855
  hypo

SEQ ID NO: 300738 - DNA, 37 bp, Homo sapiens; identical to SEQ ID NO: 251532
  chr2:233358340-233358377
  hypo

SEQ ID NO: 300739 - DNA, 108 bp, Homo sapiens; identical to SEQ ID NO: 251533
  chr2:233389942-233390050
  hypo

SEQ ID NO: 300740 - DNA, 339 bp, Homo sapiens; identical to SEQ ID NO: 280765
  chr2:233497841-233498180
  hypo

SEQ ID NO: 300741 - DNA, 143 bp, Homo sapiens; identical to SEQ ID NO: 251534
  chr2:233527389-233527532
  hypo

SEQ ID NO: 300742 - DNA, 149 bp, Homo sapiens; identical to SEQ ID NO: 251535
  chr2:233540161-233540310
  hypo

SEQ ID NO: 300743 - DNA, 48 bp, Homo sapiens; identical to SEQ ID NO: 208508
  chr2:233714270-233714318
  hypo

SEQ ID NO: 300744 - DNA, 116 bp, Homo sapiens; identical to SEQ ID NO: 251537
  chr2:233750024-233750140
  hypo

SEQ ID NO: 300745 - DNA, 63 bp, Homo sapiens
  chr2:233750442-233750505
  hypo
acctaaaaatcccacgcttcctggggctcccgaggactcgttctgaaggaagacaattctgca

SEQ ID NO: 300746 - DNA, 120 bp, Homo sapiens
  chr2:233750555-233750675
  hypo
cacataaatgagcaccatgtccagggaagtgtgcgcgagggcctccctgccatgttgtctggagtgagaaacacgctcgccagcctcaacagccatcagtggattcgattaaaatagtta

SEQ ID NO: 300747 - DNA, 165 bp, Homo sapiens; identical to SEQ ID NO: 251539
  chr2:233753188-233753353
  hypo

SEQ ID NO: 300748 - DNA, 187 bp, Homo sapiens; identical to SEQ ID NO: 251540
  chr2:233753918-233754105
  hypo

SEQ ID NO: 300749 - DNA, 192 bp, Homo sapiens; identical to SEQ ID NO: 208509
  chr2:233764817-233765009
  hypo

SEQ ID NO: 300750 - DNA, 173 bp, Homo sapiens; identical to SEQ ID NO: 251542
  chr2:233767045-233767218
  hypo

SEQ ID NO: 300751 - DNA, 171 bp, Homo sapiens; identical to SEQ ID NO: 251543
  chr2:233845597-233845768
  hypo

SEQ ID NO: 300752 - DNA, 143 bp, Homo sapiens; identical to SEQ ID NO: 208510
  chr2:233945670-233945813
  hypo

SEQ ID NO: 300753 - DNA, 174 bp, Homo sapiens; identical to SEQ ID NO: 251546
  chr2:234055893-234056067
  hypo

SEQ ID NO: 300754 - DNA, 192 bp, Homo sapiens; identical to SEQ ID NO: 208511
  chr2:234093875-234094067
  hypo

SEQ ID NO: 300755 - DNA, 94 bp, Homo sapiens; identical to SEQ ID NO: 251549
  chr2:234121798-234121892
  hypo

SEQ ID NO: 300756 - DNA, 33 bp, Homo sapiens; identical to SEQ ID NO: 251550
  chr2:234122192-234122225
  hypo

SEQ ID NO: 300757 - DNA, 43 bp, Homo sapiens; identical to SEQ ID NO: 208512
  chr2:234206550-234206593
  hypo

SEQ ID NO: 300758 - DNA, 205 bp, Homo sapiens; identical to SEQ ID NO: 208513
  chr2:234206623-234206828
  hypo

SEQ ID NO: 300759 - DNA, 91 bp, Homo sapiens; identical to SEQ ID NO: 208514
  chr2:234355709-234355800
  hypo

SEQ ID NO: 300760 - DNA, 37 bp, Homo sapiens
  chr2:234370112-234370149
  hypo
taccggctgcagtccttcctggcgctgcattctctgc

SEQ ID NO: 300761 - DNA, 639 bp, Homo sapiens; identical to SEQ ID NO: 208515
  chr2:234372716-234373355
  hypo

SEQ ID NO: 300762 - DNA, 360 bp, Homo sapiens
  chr2:234373385-234373745
  hypo
gacccgaggacgcagggcatagcggaccctggggtggagtcacattcttctgcagggagtgctggctgaaggagccctggagagggccgtgtctggacaaggacaaaccccagcctgtctcttggcttccctgcttcagagatagaacacagaggggccctgaggaaagctcatcttgggcagtacagttgcagaaggcaaataactgcaagacgccaaacctgggcacccctgcccagtggggtttgtgagacctgtgggcagcagtaaggcgaggggacagaggtgggcagctgcacaacagcaccctctttccggggccctggggcgttttttgacgcatgcaatcctttcatggga

SEQ ID NO: 300763 - DNA, 304 bp, Homo sapiens; identical to SEQ ID NO: 251556
  chr2:234389316-234389620
  hypo

SEQ ID NO: 300764 - DNA, 291 bp, Homo sapiens; identical to SEQ ID NO: 251557
  chr2:234394404-234394695
  hypo

SEQ ID NO: 300765 - DNA, 103 bp, Homo sapiens; identical to SEQ ID NO: 251558
  chr2:234396520-234396623
  hypo

SEQ ID NO: 300766 - DNA, 283 bp, Homo sapiens; identical to SEQ ID NO: 251559
  chr2:234399624-234399907
  hypo

SEQ ID NO: 300767 - DNA, 154 bp, Homo sapiens; identical to SEQ ID NO: 251560
  chr2:234545055-234545209
  hypo

SEQ ID NO: 300768 - DNA, 46 bp, Homo sapiens; identical to SEQ ID NO: 251561
  chr2:234545415-234545461
  hypo

SEQ ID NO: 300769 - DNA, 62 bp, Homo sapiens
  chr2:234737269-234737331
  hypo
ttccagttcatgagcggcccagttctgtaccaggagaagctgctgaagccggcagctttgct

SEQ ID NO: 300770 - DNA, 284 bp, Homo sapiens
  chr2:234737409-234737693
  hypo
gggcgcccccaagaaggtactgtgcctggccctgggcccaggtcccgggagctgagggtgcaggccgggtgccctggtcagcctgggagggagggtgcaggctgagggctgcccatgcccctccaggtgaagcagtaccggaaggtcttgctggagaagtgcctgggccccctgagggagcccgtgagcaacagcgtgactgccgagggcatggaggccctgaccaagatcctggctgagctccgggaaggggatgtggggtcctctttcgacgccatgtctga

SEQ ID NO: 300771 - DNA, 349 bp, Homo sapiens; identical to SEQ ID NO: 251563
  chr2:234751560-234751909
  hypo

SEQ ID NO: 300772 - DNA, 33 bp, Homo sapiens; identical to SEQ ID NO: 251564
  chr2:234764847-234764880
  hypo

SEQ ID NO: 300773 - DNA, 58 bp, Homo sapiens; identical to SEQ ID NO: 251565
  chr2:235005079-235005137
  hypo

SEQ ID NO: 300774 - DNA, 62 bp, Homo sapiens; identical to SEQ ID NO: 251566
  chr2:235442549-235442611
  hypo

SEQ ID NO: 300775 - DNA, 89 bp, Homo sapiens; identical to SEQ ID NO: 208517
  chr2:235460414-235460503
  hypo

SEQ ID NO: 300776 - DNA, 102 bp, Homo sapiens; identical to SEQ ID NO: 251568
  chr2:235700054-235700156
  hypo

SEQ ID NO: 300777 - DNA, 73 bp, Homo sapiens; identical to SEQ ID NO: 251569
  chr2:235809204-235809277
  hypo

SEQ ID NO: 300778 - DNA, 37 bp, Homo sapiens; identical to SEQ ID NO: 208518
  chr2:235815939-235815976
  hypo

SEQ ID NO: 300779 - DNA, 592 bp, Homo sapiens; identical to SEQ ID NO: 198764
  chr2:235860154-235860746
  hypo

SEQ ID NO: 300780 - DNA, 95 bp, Homo sapiens; identical to SEQ ID NO: 251571
  chr2:235868188-235868283
  hypo

SEQ ID NO: 300781 - DNA, 353 bp, Homo sapiens; identical to SEQ ID NO: 251572
  chr2:235894218-235894571
  hypo

SEQ ID NO: 300782 - DNA, 97 bp, Homo sapiens; identical to SEQ ID NO: 251573
  chr2:235897309-235897406
  hypo

SEQ ID NO: 300783 - DNA, 113 bp, Homo sapiens; identical to SEQ ID NO: 251574
  chr2:235909181-235909294
  hypo

SEQ ID NO: 300784 - DNA, 164 bp, Homo sapiens; identical to SEQ ID NO: 208521
  chr2:235922810-235922974
  hypo

SEQ ID NO: 300785 - DNA, 63 bp, Homo sapiens; identical to SEQ ID NO: 208522
  chr2:235931227-235931290
  hypo

SEQ ID NO: 300786 - DNA, 312 bp, Homo sapiens; identical to SEQ ID NO: 251577
  chr2:235941053-235941365
  hypo

SEQ ID NO: 300787 - DNA, 378 bp, Homo sapiens; identical to SEQ ID NO: 251578
  chr2:235950027-235950405
  hypo

SEQ ID NO: 300788 - DNA, 93 bp, Homo sapiens; identical to SEQ ID NO: 251579
  chr2:235950684-235950777
  hypo

SEQ ID NO: 300789 - DNA, 432 bp, Homo sapiens; identical to SEQ ID NO: 251580
  chr2:235960996-235961428
  hypo

SEQ ID NO: 300790 - DNA, 227 bp, Homo sapiens; identical to SEQ ID NO: 251581
  chr2:236014701-236014928
  hypo

SEQ ID NO: 300791 - DNA, 186 bp, Homo sapiens; identical to SEQ ID NO: 251582
  chr2:236015360-236015546
  hypo

SEQ ID NO: 300792 - DNA, 199 bp, Homo sapiens; identical to SEQ ID NO: 208524
  chr2:236024875-236025074
  hypo

SEQ ID NO: 300793 - DNA, 297 bp, Homo sapiens; identical to SEQ ID NO: 198767
  chr2:236402404-236402701
  hypo

SEQ ID NO: 300794 - DNA, 137 bp, Homo sapiens; identical to SEQ ID NO: 208526
  chr2:236415971-236416108
  hypo

SEQ ID NO: 300795 - DNA, 115 bp, Homo sapiens
  chr2:236417496-236417611
  hypo
ggatgctctgtgcatcaaagcgatttgcccagggttacacagaggaaggtggcagagccggaagtggcagaatccagtgcacgggcgggatgccgagtgtgtcgccaaactccac

SEQ ID NO: 300796 - DNA, 225 bp, Homo sapiens; identical to SEQ ID NO: 251586
  chr2:236443810-236444035
  hypo

SEQ ID NO: 300797 - DNA, 224 bp, Homo sapiens; identical to SEQ ID NO: 251587
  chr2:236452978-236453202
  hypo

SEQ ID NO: 300798 - DNA, 106 bp, Homo sapiens; identical to SEQ ID NO: 208527
  chr2:236456629-236456735
  hypo

SEQ ID NO: 300799 - DNA, 201 bp, Homo sapiens; identical to SEQ ID NO: 208528
  chr2:236459169-236459370
  hypo

SEQ ID NO: 300800 - DNA, 70 bp, Homo sapiens; identical to SEQ ID NO: 251590
  chr2:236512589-236512659
  hypo

SEQ ID NO: 300801 - DNA, 322 bp, Homo sapiens; identical to SEQ ID NO: 208529
  chr2:236541634-236541956
  hypo

SEQ ID NO: 300802 - DNA, 94 bp, Homo sapiens; identical to SEQ ID NO: 208530
  chr2:236553452-236553546
  hypo

SEQ ID NO: 300803 - DNA, 194 bp, Homo sapiens; identical to SEQ ID NO: 251593
  chr2:236571425-236571619
  hypo

SEQ ID NO: 300804 - DNA, 75 bp, Homo sapiens; identical to SEQ ID NO: 208531
  chr2:236602265-236602340
  hypo

SEQ ID NO: 300805 - DNA, 197 bp, Homo sapiens; identical to SEQ ID NO: 208532
  chr2:236603369-236603566
  hypo

SEQ ID NO: 300806 - DNA, 146 bp, Homo sapiens; identical to SEQ ID NO: 208533
  chr2:236613260-236613406
  hypo

SEQ ID NO: 300807 - DNA, 109 bp, Homo sapiens; identical to SEQ ID NO: 208534
  chr2:236616175-236616284
  hypo

SEQ ID NO: 300808 - DNA, 174 bp, Homo sapiens; identical to SEQ ID NO: 208535
  chr2:236617715-236617889
  hypo

SEQ ID NO: 300809 - DNA, 192 bp, Homo sapiens; identical to SEQ ID NO: 208536
  chr2:236618370-236618562
  hypo

SEQ ID NO: 300810 - DNA, 187 bp, Homo sapiens; identical to SEQ ID NO: 208537
  chr2:236619770-236619957
  hypo

SEQ ID NO: 300811 - DNA, 188 bp, Homo sapiens; identical to SEQ ID NO: 208538
  chr2:236624442-236624630
  hypo

SEQ ID NO: 300812 - DNA, 192 bp, Homo sapiens; identical to SEQ ID NO: 208539
  chr2:236637398-236637590
  hypo

SEQ ID NO: 300813 - DNA, 192 bp, Homo sapiens; identical to SEQ ID NO: 208540
  chr2:236647745-236647937
  hypo

SEQ ID NO: 300814 - DNA, 654 bp, Homo sapiens; identical to SEQ ID NO: 251604
  chr2:236648390-236649044
  hypo

SEQ ID NO: 300815 - DNA, 125 bp, Homo sapiens; identical to SEQ ID NO: 251605
  chr2:236656836-236656961
  hypo

SEQ ID NO: 300816 - DNA, 274 bp, Homo sapiens; identical to SEQ ID NO: 208542
  chr2:236660557-236660831
  hypo

SEQ ID NO: 300817 - DNA, 421 bp, Homo sapiens; identical to SEQ ID NO: 251607
  chr2:236663445-236663866
  hypo

SEQ ID NO: 300818 - DNA, 80 bp, Homo sapiens; identical to SEQ ID NO: 208543
  chr2:236669006-236669086
  hypo

SEQ ID NO: 300819 - DNA, 201 bp, Homo sapiens; identical to SEQ ID NO: 208544
  chr2:236672625-236672826
  hypo

SEQ ID NO: 300820 - DNA, 530 bp, Homo sapiens; identical to SEQ ID NO: 251610
  chr2:236673974-236674504
  hypo

SEQ ID NO: 300821 - DNA, 210 bp, Homo sapiens; identical to SEQ ID NO: 208546
  chr2:236675951-236676161
  hypo

SEQ ID NO: 300822 - DNA, 399 bp, Homo sapiens; identical to SEQ ID NO: 208547
  chr2:236685967-236686366
  hypo

SEQ ID NO: 300823 - DNA, 62 bp, Homo sapiens; identical to SEQ ID NO: 251613
  chr2:236708151-236708213
  hypo

SEQ ID NO: 300824 - DNA, 96 bp, Homo sapiens; identical to SEQ ID NO: 251614
  chr2:236715042-236715138
  hypo

SEQ ID NO: 300825 - DNA, 328 bp, Homo sapiens; identical to SEQ ID NO: 251615
  chr2:236716147-236716475
  hypo

SEQ ID NO: 300826 - DNA, 162 bp, Homo sapiens; identical to SEQ ID NO: 208548
  chr2:236722553-236722715
  hypo

SEQ ID NO: 300827 - DNA, 59 bp, Homo sapiens; identical to SEQ ID NO: 208549
  chr2:236727033-236727092
  hypo

SEQ ID NO: 300828 - DNA, 98 bp, Homo sapiens; identical to SEQ ID NO: 208550
  chr2:236733470-236733568
  hypo

SEQ ID NO: 300829 - DNA, 188 bp, Homo sapiens; identical to SEQ ID NO: 208551
  chr2:236738719-236738907
  hypo

SEQ ID NO: 300830 - DNA, 192 bp, Homo sapiens; identical to SEQ ID NO: 208552
  chr2:236739767-236739959
  hypo

SEQ ID NO: 300831 - DNA, 188 bp, Homo sapiens; identical to SEQ ID NO: 208553
  chr2:236741689-236741877
  hypo

SEQ ID NO: 300832 - DNA, 229 bp, Homo sapiens; identical to SEQ ID NO: 208554
  chr2:236750708-236750937
  hypo

SEQ ID NO: 300833 - DNA, 37 bp, Homo sapiens; identical to SEQ ID NO: 208555
  chr2:236751637-236751674
  hypo

SEQ ID NO: 300834 - DNA, 194 bp, Homo sapiens; identical to SEQ ID NO: 251624
  chr2:236751879-236752073
  hypo

SEQ ID NO: 300835 - DNA, 228 bp, Homo sapiens; identical to SEQ ID NO: 251625
  chr2:236759876-236760104
  hypo

SEQ ID NO: 300836 - DNA, 157 bp, Homo sapiens; identical to SEQ ID NO: 208557
  chr2:236760926-236761083
  hypo

SEQ ID NO: 300837 - DNA, 268 bp, Homo sapiens; identical to SEQ ID NO: 251627
  chr2:236765492-236765760
  hypo

SEQ ID NO: 300838 - DNA, 127 bp, Homo sapiens; identical to SEQ ID NO: 251628
  chr2:236777009-236777136
  hypo

SEQ ID NO: 300839 - DNA, 150 bp, Homo sapiens; identical to SEQ ID NO: 251629
  chr2:236791006-236791156
  hypo

SEQ ID NO: 300840 - DNA, 166 bp, Homo sapiens; identical to SEQ ID NO: 208559
  chr2:236796532-236796698
  hypo

SEQ ID NO: 300841 - DNA, 345 bp, Homo sapiens; identical to SEQ ID NO: 251631
  chr2:236801867-236802212
  hypo

SEQ ID NO: 300842 - DNA, 376 bp, Homo sapiens; identical to SEQ ID NO: 251632
  chr2:236826182-236826558
  hypo

SEQ ID NO: 300843 - DNA, 565 bp, Homo sapiens; identical to SEQ ID NO: 208561
  chr2:236839044-236839609
  hypo

SEQ ID NO: 300844 - DNA, 113 bp, Homo sapiens; identical to SEQ ID NO: 251634
  chr2:236840416-236840529
  hypo

SEQ ID NO: 300845 - DNA, 37 bp, Homo sapiens; identical to SEQ ID NO: 208562
  chr2:236842447-236842484
  hypo

SEQ ID NO: 300846 - DNA, 123 bp, Homo sapiens; identical to SEQ ID NO: 208563
  chr2:236847371-236847494
  hypo

SEQ ID NO: 300847 - DNA, 35 bp, Homo sapiens; identical to SEQ ID NO: 208564
  chr2:236853751-236853786
  hypo

SEQ ID NO: 300848 - DNA, 35 bp, Homo sapiens; identical to SEQ ID NO: 208565
  chr2:236854026-236854061
  hypo

SEQ ID NO: 300849 - DNA, 208 bp, Homo sapiens; identical to SEQ ID NO: 208566
  chr2:236857148-236857356
  hypo

SEQ ID NO: 300850 - DNA, 40 bp, Homo sapiens; identical to SEQ ID NO: 208567
  chr2:236863816-236863856
  hypo

SEQ ID NO: 300851 - DNA, 223 bp, Homo sapiens; identical to SEQ ID NO: 251641
  chr2:236868108-236868331
  hypo

SEQ ID NO: 300852 - DNA, 148 bp, Homo sapiens; identical to SEQ ID NO: 208568
  chr2:236870133-236870281
  hypo

SEQ ID NO: 300853 - DNA, 147 bp, Homo sapiens; identical to SEQ ID NO: 251643
  chr2:236870521-236870668
  hypo

SEQ ID NO: 300854 - DNA, 197 bp, Homo sapiens; identical to SEQ ID NO: 208569
  chr2:236872390-236872587
  hypo

SEQ ID NO: 300855 - DNA, 47 bp, Homo sapiens; identical to SEQ ID NO: 208570
  chr2:236877179-236877226
  hypo

SEQ ID NO: 300856 - DNA, 110 bp, Homo sapiens
  chr2:236877399-236877509
  hypo
tttgcaaggtggcacgagagggcccttgggaccttttcatcactgtctgattctcatattacgcaaccaaatctgctgtcatcactcttggccgccgtcgctggtagcgg

SEQ ID NO: 300857 - DNA, 109 bp, Homo sapiens; identical to SEQ ID NO: 208572
  chr2:236881386-236881495
  hypo

SEQ ID NO: 300858 - DNA, 87 bp, Homo sapiens; identical to SEQ ID NO: 251647
  chr2:236897037-236897124
  hypo

SEQ ID NO: 300859 - DNA, 107 bp, Homo sapiens; identical to SEQ ID NO: 251648
  chr2:236897390-236897497
  hypo

SEQ ID NO: 300860 - DNA, 156 bp, Homo sapiens; identical to SEQ ID NO: 208573
  chr2:236900737-236900893
  hypo

SEQ ID NO: 300861 - DNA, 216 bp, Homo sapiens; identical to SEQ ID NO: 251650
  chr2:236901340-236901556
  hypo

SEQ ID NO: 300862 - DNA, 171 bp, Homo sapiens; identical to SEQ ID NO: 208575
  chr2:236909411-236909582
  hypo

SEQ ID NO: 300863 - DNA, 155 bp, Homo sapiens; identical to SEQ ID NO: 251652
  chr2:236945110-236945265
  hypo

SEQ ID NO: 300864 - DNA, 252 bp, Homo sapiens; identical to SEQ ID NO: 208576
  chr2:236949322-236949574
  hypo

SEQ ID NO: 300865 - DNA, 176 bp, Homo sapiens; identical to SEQ ID NO: 251654
  chr2:236950837-236951013
  hypo

SEQ ID NO: 300866 - DNA, 211 bp, Homo sapiens; identical to SEQ ID NO: 251655
  chr2:236954182-236954393
  hypo

SEQ ID NO: 300867 - DNA, 45 bp, Homo sapiens; identical to SEQ ID NO: 251656
  chr2:236970389-236970434
  hypo

SEQ ID NO: 300868 - DNA, 165 bp, Homo sapiens; identical to SEQ ID NO: 208577
  chr2:236970494-236970659
  hypo

SEQ ID NO: 300869 - DNA, 56 bp, Homo sapiens; identical to SEQ ID NO: 251658
  chr2:236976366-236976422
  hypo

SEQ ID NO: 300870 - DNA, 188 bp, Homo sapiens; identical to SEQ ID NO: 251659
  chr2:236994423-236994611
  hypo

SEQ ID NO: 300871 - DNA, 154 bp, Homo sapiens; identical to SEQ ID NO: 208578
  chr2:236996175-236996329
  hypo

SEQ ID NO: 300872 - DNA, 143 bp, Homo sapiens; identical to SEQ ID NO: 251661
  chr2:236997672-236997815
  hypo

SEQ ID NO: 300873 - DNA, 93 bp, Homo sapiens; identical to SEQ ID NO: 251662
  chr2:236999643-236999736
  hypo

SEQ ID NO: 300874 - DNA, 39 bp, Homo sapiens; identical to SEQ ID NO: 208579
  chr2:237007808-237007847
  hypo

SEQ ID NO: 300875 - DNA, 133 bp, Homo sapiens; identical to SEQ ID NO: 208580
  chr2:237015289-237015422
  hypo

SEQ ID NO: 300876 - DNA, 157 bp, Homo sapiens; identical to SEQ ID NO: 208581
  chr2:237018158-237018315
  hypo

SEQ ID NO: 300877 - DNA, 161 bp, Homo sapiens; identical to SEQ ID NO: 208582
  chr2:237020448-237020609
  hypo

SEQ ID NO: 300878 - DNA, 275 bp, Homo sapiens; identical to SEQ ID NO: 251667
  chr2:237022763-237023038
  hypo

SEQ ID NO: 300879 - DNA, 164 bp, Homo sapiens; identical to SEQ ID NO: 208584
  chr2:237032441-237032605
  hypo

SEQ ID NO: 300880 - DNA, 403 bp, Homo sapiens; identical to SEQ ID NO: 208585
  chr2:237032665-237033068
  hypo

SEQ ID NO: 300881 - DNA, 54 bp, Homo sapiens; identical to SEQ ID NO: 251670
  chr2:237034241-237034295
  hypo

SEQ ID NO: 300882 - DNA, 161 bp, Homo sapiens; identical to SEQ ID NO: 208586
  chr2:237037749-237037910
  hypo

SEQ ID NO: 300883 - DNA, 371 bp, Homo sapiens; identical to SEQ ID NO: 198773
  chr2:237076187-237076558
  hypo

SEQ ID NO: 300884 - DNA, 176 bp, Homo sapiens; identical to SEQ ID NO: 280791
  chr2:237076815-237076991
  hypo

SEQ ID NO: 300885 - DNA, 238 bp, Homo sapiens; identical to SEQ ID NO: 280792
  chr2:237077608-237077846
  hypo

SEQ ID NO: 300886 - DNA, 421 bp, Homo sapiens; identical to SEQ ID NO: 222045
  chr2:237476438-237476859
  hypo

SEQ ID NO: 300887 - DNA, 373 bp, Homo sapiens; identical to SEQ ID NO: 251672
  chr2:237489568-237489941
  hypo

SEQ ID NO: 300888 - DNA, 463 bp, Homo sapiens; identical to SEQ ID NO: 251673
  chr2:237496907-237497370
  hypo

SEQ ID NO: 300889 - DNA, 199 bp, Homo sapiens; identical to SEQ ID NO: 208589
  chr2:237542535-237542734
  hypo

SEQ ID NO: 300890 - DNA, 101 bp, Homo sapiens
  chr2:237544239-237544340
  hypo
tttgcggcacattggtagggtagccacgggaggccggtgcacactcctctcacacatcgggacggtgtgaagtgggtgagagcacatgtctgacacaggct

SEQ ID NO: 300891 - DNA, 209 bp, Homo sapiens; identical to SEQ ID NO: 251676
  chr2:237629784-237629993
  hypo

SEQ ID NO: 300892 - DNA, 54 bp, Homo sapiens; identical to SEQ ID NO: 251677
  chr2:237925352-237925406
  hypo

SEQ ID NO: 300893 - DNA, 56 bp, Homo sapiens; identical to SEQ ID NO: 208590
  chr2:237973044-237973100
  hypo

SEQ ID NO: 300894 - DNA, 165 bp, Homo sapiens; identical to SEQ ID NO: 251679
  chr2:237999668-237999833
  hypo

SEQ ID NO: 300895 - DNA, 159 bp, Homo sapiens; identical to SEQ ID NO: 251680
  chr2:238249170-238249329
  hypo

SEQ ID NO: 300896 - DNA, 186 bp, Homo sapiens; identical to SEQ ID NO: 251681
  chr2:238264427-238264613
  hypo

SEQ ID NO: 300897 - DNA, 86 bp, Homo sapiens; identical to SEQ ID NO: 208591
  chr2:238280412-238280498
  hypo

SEQ ID NO: 300898 - DNA, 256 bp, Homo sapiens; identical to SEQ ID NO: 208592
  chr2:238280812-238281068
  hypo

SEQ ID NO: 300899 - DNA, 535 bp, Homo sapiens; identical to SEQ ID NO: 208593
  chr2:238283029-238283564
  hypo

SEQ ID NO: 300900 - DNA, 36 bp, Homo sapiens; identical to SEQ ID NO: 251684
  chr2:238320937-238320973
  hypo

SEQ ID NO: 300901 - DNA, 354 bp, Homo sapiens; identical to SEQ ID NO: 251685
  chr2:238359242-238359596
  hypo

SEQ ID NO: 300902 - DNA, 151 bp, Homo sapiens; identical to SEQ ID NO: 198779
  chr2:238384223-238384374
  hypo

SEQ ID NO: 300903 - DNA, 41 bp, Homo sapiens; identical to SEQ ID NO: 251686
  chr2:238392737-238392778
  hypo

SEQ ID NO: 300904 - DNA, 144 bp, Homo sapiens; identical to SEQ ID NO: 251687
  chr2:238486156-238486300
  hypo

SEQ ID NO: 300905 - DNA, 205 bp, Homo sapiens; identical to SEQ ID NO: 251688
  chr2:238486659-238486864
  hypo

SEQ ID NO: 300906 - DNA, 82 bp, Homo sapiens; identical to SEQ ID NO: 208596
  chr2:238492723-238492805
  hypo

SEQ ID NO: 300907 - DNA, 31 bp, Homo sapiens; identical to SEQ ID NO: 198783
  chr2:238536853-238536884
  hypo

SEQ ID NO: 300908 - DNA, 171 bp, Homo sapiens; identical to SEQ ID NO: 251690
  chr2:238540447-238540618
  hypo

SEQ ID NO: 300909 - DNA, 176 bp, Homo sapiens; identical to SEQ ID NO: 222048
  chr2:238599864-238600040
  hypo

SEQ ID NO: 300910 - DNA, 244 bp, Homo sapiens; identical to SEQ ID NO: 222049
  chr2:238617174-238617418
  hypo

SEQ ID NO: 300911 - DNA, 192 bp, Homo sapiens; identical to SEQ ID NO: 251691
  chr2:238625970-238626162
  hypo

SEQ ID NO: 300912 - DNA, 62 bp, Homo sapiens; identical to SEQ ID NO: 251692
  chr2:238629646-238629708
  hypo

SEQ ID NO: 300913 - DNA, 131 bp, Homo sapiens; identical to SEQ ID NO: 251693
  chr2:238669911-238670042
  hypo

SEQ ID NO: 300914 - DNA, 332 bp, Homo sapiens; identical to SEQ ID NO: 251694
  chr2:238706995-238707327
  hypo

SEQ ID NO: 300915 - DNA, 40 bp, Homo sapiens; identical to SEQ ID NO: 208599
  chr2:238785779-238785819
  hypo

SEQ ID NO: 300916 - DNA, 176 bp, Homo sapiens; identical to SEQ ID NO: 208600
  chr2:238786045-238786221
  hypo

SEQ ID NO: 300917 - DNA, 33 bp, Homo sapiens; identical to SEQ ID NO: 208601
  chr2:238793664-238793697
  hypo

SEQ ID NO: 300918 - DNA, 344 bp, Homo sapiens; identical to SEQ ID NO: 251698
  chr2:238793972-238794316
  hypo

SEQ ID NO: 300919 - DNA, 185 bp, Homo sapiens; identical to SEQ ID NO: 251699
  chr2:238794726-238794911
  hypo

SEQ ID NO: 300920 - DNA, 32 bp, Homo sapiens; identical to SEQ ID NO: 208602
  chr2:238820428-238820460
  hypo

SEQ ID NO: 300921 - DNA, 354 bp, Homo sapiens; identical to SEQ ID NO: 251701
  chr2:238821616-238821970
  hypo

SEQ ID NO: 300922 - DNA, 157 bp, Homo sapiens; identical to SEQ ID NO: 208603
  chr2:238822319-238822476
  hypo

SEQ ID NO: 300923 - DNA, 210 bp, Homo sapiens; identical to SEQ ID NO: 198784
  chr2:238876150-238876360
  hypo

SEQ ID NO: 300924 - DNA, 59 bp, Homo sapiens; identical to SEQ ID NO: 251703
  chr2:238934774-238934833
  hypo

SEQ ID NO: 300925 - DNA, 39 bp, Homo sapiens; identical to SEQ ID NO: 208605
  chr2:239005248-239005287
  hypo

SEQ ID NO: 300926 - DNA, 45 bp, Homo sapiens; identical to SEQ ID NO: 251705
  chr2:239006885-239006930
  hypo

SEQ ID NO: 300927 - DNA, 278 bp, Homo sapiens; identical to SEQ ID NO: 251706
  chr2:239010179-239010457
  hypo

SEQ ID NO: 300928 - DNA, 71 bp, Homo sapiens; identical to SEQ ID NO: 208606
  chr2:239011437-239011508
  hypo

SEQ ID NO: 300929 - DNA, 73 bp, Homo sapiens; identical to SEQ ID NO: 251708
  chr2:239039048-239039121
  hypo

SEQ ID NO: 300930 - DNA, 169 bp, Homo sapiens; identical to SEQ ID NO: 208607
  chr2:239041690-239041859
  hypo

SEQ ID NO: 300931 - DNA, 789 bp, Homo sapiens; identical to SEQ ID NO: 208608
  chr2:239049320-239050109
  hypo

SEQ ID NO: 300932 - DNA, 265 bp, Homo sapiens; identical to SEQ ID NO: 208609
  chr2:239056521-239056786
  hypo

SEQ ID NO: 300933 - DNA, 512 bp, Homo sapiens; identical to SEQ ID NO: 208610
  chr2:239059358-239059870
  hypo

SEQ ID NO: 300934 - DNA, 174 bp, Homo sapiens; identical to SEQ ID NO: 208611
  chr2:239065004-239065178
  hypo

SEQ ID NO: 300935 - DNA, 282 bp, Homo sapiens; identical to SEQ ID NO: 208612
  chr2:239074294-239074576
  hypo

SEQ ID NO: 300936 - DNA, 145 bp, Homo sapiens; identical to SEQ ID NO: 251716
  chr2:239079153-239079298
  hypo

SEQ ID NO: 300937 - DNA, 61 bp, Homo sapiens; identical to SEQ ID NO: 208613
  chr2:239082212-239082273
  hypo

SEQ ID NO: 300938 - DNA, 62 bp, Homo sapiens; identical to SEQ ID NO: 208614
  chr2:239083073-239083135
  hypo

SEQ ID NO: 300939 - DNA, 47 bp, Homo sapiens; identical to SEQ ID NO: 208615
  chr2:239083165-239083212
  hypo

SEQ ID NO: 300940 - DNA, 139 bp, Homo sapiens; identical to SEQ ID NO: 251719
  chr2:239091203-239091342
  hypo

SEQ ID NO: 300941 - DNA, 52 bp, Homo sapiens; identical to SEQ ID NO: 251720
  chr2:239096416-239096468
  hypo

SEQ ID NO: 300942 - DNA, 316 bp, Homo sapiens; identical to SEQ ID NO: 251721
  chr2:239133161-239133477
  hypo

SEQ ID NO: 300943 - DNA, 1056 bp, Homo sapiens; identical to SEQ ID NO: 280814
  chr2:239148240-239149296
  hypo

SEQ ID NO: 300944 - DNA, 95 bp, Homo sapiens; identical to SEQ ID NO: 251723
  chr2:239167995-239168090
  hypo

SEQ ID NO: 300945 - DNA, 190 bp, Homo sapiens; identical to SEQ ID NO: 251724
  chr2:239186416-239186606
  hypo

SEQ ID NO: 300946 - DNA, 115 bp, Homo sapiens; identical to SEQ ID NO: 208617
  chr2:239188886-239189001
  hypo

SEQ ID NO: 300947 - DNA, 131 bp, Homo sapiens; identical to SEQ ID NO: 251726
  chr2:239189367-239189498
  hypo

SEQ ID NO: 300948 - DNA, 78 bp, Homo sapiens; identical to SEQ ID NO: 251727
  chr2:239192200-239192278
  hypo

SEQ ID NO: 300949 - DNA, 55 bp, Homo sapiens; identical to SEQ ID NO: 208618
  chr2:239211886-239211941
  hypo

SEQ ID NO: 300950 - DNA, 206 bp, Homo sapiens; identical to SEQ ID NO: 251729
  chr2:239212968-239213174
  hypo

SEQ ID NO: 300951 - DNA, 164 bp, Homo sapiens; identical to SEQ ID NO: 251730
  chr2:239224075-239224239
  hypo

SEQ ID NO: 300952 - DNA, 64 bp, Homo sapiens; identical to SEQ ID NO: 208619
  chr2:239265787-239265851
  hypo

SEQ ID NO: 300953 - DNA, 241 bp, Homo sapiens; identical to SEQ ID NO: 208620
  chr2:239306052-239306293
  hypo

SEQ ID NO: 300954 - DNA, 212 bp, Homo sapiens; identical to SEQ ID NO: 251733
  chr2:239316288-239316500
  hypo

SEQ ID NO: 300955 - DNA, 153 bp, Homo sapiens; identical to SEQ ID NO: 251734
  chr2:239321159-239321312
  hypo

SEQ ID NO: 300956 - DNA, 38 bp, Homo sapiens; identical to SEQ ID NO: 251735
  chr2:239344603-239344641
  hypo

SEQ ID NO: 300957 - DNA, 56 bp, Homo sapiens; identical to SEQ ID NO: 251736
  chr2:239467687-239467743
  hypo

SEQ ID NO: 300958 - DNA, 95 bp, Homo sapiens
  chr2:239482552-239482647
  hypo
ccaacagggccccccgctgagcctctttgggtctcccagagttggccctgccttccctgagccggaagtatcccgccagcctccctgtgccccat

SEQ ID NO: 300959 - DNA, 240 bp, Homo sapiens; identical to SEQ ID NO: 251738
  chr2:239494957-239495197
  hypo

SEQ ID NO: 300960 - DNA, 159 bp, Homo sapiens; identical to SEQ ID NO: 251739
  chr2:239684265-239684424
  hypo

SEQ ID NO: 300961 - DNA, 467 bp, Homo sapiens; identical to SEQ ID NO: 208621
  chr2:239800520-239800987
  hypo

SEQ ID NO: 300962 - DNA, 124 bp, Homo sapiens; identical to SEQ ID NO: 208622
  chr2:239888394-239888518
  hypo

SEQ ID NO: 300963 - DNA, 75 bp, Homo sapiens; identical to SEQ ID NO: 208623
  chr2:239888789-239888864
  hypo

SEQ ID NO: 300964 - DNA, 78 bp, Homo sapiens; identical to SEQ ID NO: 251742
  chr2:239925671-239925749
  hypo

SEQ ID NO: 300965 - DNA, 43 bp, Homo sapiens; identical to SEQ ID NO: 251743
  chr2:239947345-239947388
  hypo

SEQ ID NO: 300966 - DNA, 321 bp, Homo sapiens; identical to SEQ ID NO: 251744
  chr2:239949578-239949899
  hypo

SEQ ID NO: 300967 - DNA, 56 bp, Homo sapiens; identical to SEQ ID NO: 251746
  chr2:239958980-239959036
  hypo

SEQ ID NO: 300968 - DNA, 933 bp, Homo sapiens; identical to SEQ ID NO: 208624
  chr2:239969832-239970765
  hypo

SEQ ID NO: 300969 - DNA, 152 bp, Homo sapiens; identical to SEQ ID NO: 251748
  chr2:239971451-239971603
  hypo

SEQ ID NO: 300970 - DNA, 839 bp, Homo sapiens; identical to SEQ ID NO: 251749
  chr2:239973899-239974738
  hypo

SEQ ID NO: 300971 - DNA, 205 bp, Homo sapiens; identical to SEQ ID NO: 251750
  chr2:239986521-239986726
  hypo

SEQ ID NO: 300972 - DNA, 169 bp, Homo sapiens
  chr2:239997291-239997460
  hypo
taaggggagagagcggcttctcctcgcggtggcctctgcatttagggaggtcccgtgtgaagccgtggggtgccacgcatccccttcccgtggcctcaatgtggcttctctggcaccttcgttaccgacacagcactgcacccttcactcggtcatcagccaacctgca

SEQ ID NO: 300973 - DNA, 138 bp, Homo sapiens; identical to SEQ ID NO: 208626
  chr2:239999815-239999953
  hypo

SEQ ID NO: 300974 - DNA, 1132 bp, Homo sapiens
  chr2:240002664-240003796
  hypo
gaccccacagccccgttcagccacagaccagtttcagacacgctcatctccaacaagtgcttcctggaatgtgtgcacagaggaaaagctgctacttcaggtgtcatgtgaagccgggaggctcacctgaaggccgccaagtactcagcgtctcccatgggggggtccaggccgccggtgaaagccatgttgacgttgaaacccacgccgggccctgtgcccacctgtggccagaaggagagaaacacacgtcatggaccccgagcgggacctgtctgacaggaacgcctgatgcaggtggcaccgggatgggctcggccttggtgggcccctggggagagcccacgtgtcctgatctcctggtgcatattcattaagacgcgtgtgaaggggccccactgacaggggcacactgacatcagcaagggggcccttttcctggctgctgtaggctctcgccgaccctgcccttggcacaccaaggccctgcactgacatttctgcggacccgccgccctgtgttgtgtgccgtgtgttacatcagggaatcagacctgggtctctctgggcagaaagtgtctccgatgagcctgtcatttcctacttcctctaaaaaaataatatccagaggcagacggagcgtcttcctggatgaaagccctgctgttggagcctctgttcagagtgggcaggctctgaacggggacctggggcgttgtcaaggagccgctgggcctgccgttcctggggccgccatgcagccccgcgccgggcaaaggacagtggacagagccccttgccggagggtgtcctgtggaagacagtggcctgggccctgcccggaggaaaacgggcaccacacacctcctccttcacaaacacctctgtctgcctggatgggaaccagaaacaatatccagcctctcatttgtacttcagacaaaacacaggccacctgtgcacacgcgatacgatgcaggctgacgtctgactgaagttactgtctgggcttaagtgagcacgaaggccgcactcactgctgccgggcagctgtggaccgtctgccccgtgcccccacagcggctccccgcagtccccctttccccccagaggcccttatataccccaccta

SEQ ID NO: 300975 - DNA, 258 bp, Homo sapiens
  chr2:240003826-240004084
  hypo
agttcccatcgtcgtagcggtggagggacatgtacaggacgctggggtcgctgtagaaagcctgctgggtcccgtttccatggtgcacgtccttaaagagcagggacaactacttcagggctgaggcaggtattggagggtggcctcccctgagggccgtccccaaccccagttgtgcttagtgacaacggctcctgctcaggaatgacattaccctccagctgggcccgtacccggcaggcgcgattctggggctgt

SEQ ID NO: 300976 - DNA, 169 bp, Homo sapiens; identical to SEQ ID NO: 251754
  chr2:240014779-240014948
  hypo

SEQ ID NO: 300977 - DNA, 179 bp, Homo sapiens; identical to SEQ ID NO: 208628
  chr2:240015872-240016051
  hypo

SEQ ID NO: 300978 - DNA, 388 bp, Homo sapiens; identical to SEQ ID NO: 251756
  chr2:240016397-240016785
  hypo

SEQ ID NO: 300979 - DNA, 55 bp, Homo sapiens; identical to SEQ ID NO: 251757
  chr2:240029183-240029238
  hypo

SEQ ID NO: 300980 - DNA, 198 bp, Homo sapiens; identical to SEQ ID NO: 251758
  chr2:240029726-240029924
  hypo

SEQ ID NO: 300981 - DNA, 127 bp, Homo sapiens; identical to SEQ ID NO: 251759
  chr2:240031620-240031747
  hypo

SEQ ID NO: 300982 - DNA, 156 bp, Homo sapiens; identical to SEQ ID NO: 251760
  chr2:240032302-240032458
  hypo

SEQ ID NO: 300983 - DNA, 552 bp, Homo sapiens; identical to SEQ ID NO: 251761
  chr2:240054228-240054780
  hypo

SEQ ID NO: 300984 - DNA, 177 bp, Homo sapiens; identical to SEQ ID NO: 251762
  chr2:240061313-240061490
  hypo

SEQ ID NO: 300985 - DNA, 40 bp, Homo sapiens; identical to SEQ ID NO: 208629
  chr2:240064716-240064756
  hypo

SEQ ID NO: 300986 - DNA, 361 bp, Homo sapiens; identical to SEQ ID NO: 251764
  chr2:240066060-240066421
  hypo

SEQ ID NO: 300987 - DNA, 64 bp, Homo sapiens; identical to SEQ ID NO: 208631
  chr2:240067065-240067129
  hypo

SEQ ID NO: 300988 - DNA, 52 bp, Homo sapiens; identical to SEQ ID NO: 208632
  chr2:240067159-240067211
  hypo

SEQ ID NO: 300989 - DNA, 215 bp, Homo sapiens; identical to SEQ ID NO: 251766
  chr2:240077356-240077571
  hypo

SEQ ID NO: 300990 - DNA, 44 bp, Homo sapiens
  chr2:240080565-240080609
  hypo
ctctatccctgctgcaatcacacccgcaccgcacacaattactc

SEQ ID NO: 300991 - DNA, 152 bp, Homo sapiens; identical to SEQ ID NO: 251768
  chr2:240103122-240103274
  hypo

SEQ ID NO: 300992 - DNA, 274 bp, Homo sapiens
  chr2:240103304-240103578
  hypo
ggcagcgctggcctccgaagactcacaggcggcccatagcacgctggctggagggcagtgcccaggccaggctgcctggctgataaaacctgctccacccacctgcttgctgccagcgcacttgcacctaaatatttaacctctccgtgctgggttaaatgtggcacctgcccccaagggttcctgtgaggactggaagaggtggcatggggagaacactcagaagagctggtctgggcttgcctccgtgcggcctgattgtcatcaaaccgtc

SEQ ID NO: 300993 - DNA, 171 bp, Homo sapiens; identical to SEQ ID NO: 251770
  chr2:240105072-240105243
  hypo

SEQ ID NO: 300994 - DNA, 173 bp, Homo sapiens; identical to SEQ ID NO: 251771
  chr2:240107031-240107204
  hypo

SEQ ID NO: 300995 - DNA, 183 bp, Homo sapiens; identical to SEQ ID NO: 251772
  chr2:240112235-240112418
  hypo

SEQ ID NO: 300996 - DNA, 458 bp, Homo sapiens; identical to SEQ ID NO: 208634
  chr2:240116630-240117088
  hypo

SEQ ID NO: 300997 - DNA, 188 bp, Homo sapiens; identical to SEQ ID NO: 208635
  chr2:240117493-240117681
  hypo

SEQ ID NO: 300998 - DNA, 36 bp, Homo sapiens; identical to SEQ ID NO: 251775
  chr2:240129719-240129755
  hypo

SEQ ID NO: 300999 - DNA, 153 bp, Homo sapiens
  chr2:240165157-240165310
  hypo
acattctaaagtgtgtttggtggggggttgctgacatagacaaaaacaatgaaaccgctgtgactcaagagtagtataggtcacacctcactgtgcacaccccactgtgctaacagagctgcttttcagacacgggaacggaagcttagggct

SEQ ID NO: 301000 - DNA, 135 bp, Homo sapiens; identical to SEQ ID NO: 208636
  chr2:240167440-240167575
  hypo

SEQ ID NO: 301001 - DNA, 307 bp, Homo sapiens
  chr2:240167605-240167912
  hypo
tcagcgagcaggccctgagcgtctgggaacgtgagagtgagcaacgcagaggcctggccccggcccagcagaaccggcaacccacactggctgcctgcgtccagtcccgccatggggtctgcctggtgccagcacctgcccagacacagggcagaggagactgcaggggggtgtccagctgctctcacgtgccaggccaggcttgctaacacctgtggcttagtcgggtgatagggacaaaacgtgcaaactgagcccgctggacacgcagactcagcaggcaggcagagcccggtggggaggcaaa

SEQ ID NO: 301002 - DNA, 63 bp, Homo sapiens; identical to SEQ ID NO: 208638
  chr2:240169135-240169198
  hypo

SEQ ID NO: 301003 - DNA, 41 bp, Homo sapiens; identical to SEQ ID NO: 208639
  chr2:240169831-240169872
  hypo

SEQ ID NO: 301004 - DNA, 192 bp, Homo sapiens; identical to SEQ ID NO: 208640
  chr2:240170922-240171114
  hypo

SEQ ID NO: 301005 - DNA, 131 bp, Homo sapiens; identical to SEQ ID NO: 208641
  chr2:240172542-240172673
  hypo

SEQ ID NO: 301006 - DNA, 511 bp, Homo sapiens; identical to SEQ ID NO: 208642
  chr2:240212280-240212791
  hypo

SEQ ID NO: 301007 - DNA, 148 bp, Homo sapiens
  chr2:240213547-240213695
  hypo
ttctccccgggagccgccgattacatttgcatgaaaatagaacctttgtttgcaagagttcccgctccagtggatccctcctttgtctgcagcacagcaactgatggggcaggatgctggtgtgtgcacacagcccagctcaggacag

SEQ ID NO: 301008 - DNA, 45 bp, Homo sapiens
  chr2:240213811-240213856
  hypo
ttgcccatcgtggcaaggcaggcaaggggacggccaggatggtag

SEQ ID NO: 301009 - DNA, 299 bp, Homo sapiens; identical to SEQ ID NO: 208643
  chr2:240226678-240226977
  hypo

SEQ ID NO: 301010 - DNA, 175 bp, Homo sapiens; identical to SEQ ID NO: 208644
  chr2:240227007-240227182
  hypo

SEQ ID NO: 301011 - DNA, 312 bp, Homo sapiens; identical to SEQ ID NO: 251785
  chr2:240232940-240233252
  hypo

SEQ ID NO: 301012 - DNA, 46 bp, Homo sapiens; identical to SEQ ID NO: 208645
  chr2:240234573-240234619
  hypo

SEQ ID NO: 301013 - DNA, 112 bp, Homo sapiens; identical to SEQ ID NO: 251787
  chr2:240262930-240263042
  hypo

SEQ ID NO: 301014 - DNA, 114 bp, Homo sapiens; identical to SEQ ID NO: 251788
  chr2:240265816-240265930
  hypo

SEQ ID NO: 301015 - DNA, 85 bp, Homo sapiens
  chr2:240270280-240270365
  hypo
ccccgtgggctttccgtccacactcccggtttcatgccagggactctggcttcaaggcagaggctctgtgtcctgacaaacgcat

SEQ ID NO: 301016 - DNA, 1312 bp, Homo sapiens
  chr2:240270511-240271823
  hypo
aaatcgttctttagagcaataaaatcccaacagttaagcagctttgacgtcagagaaccagggcctggctctggcaaagttcagcgggaacagcaataaaaccgtaacacaaaactcacccagcagcagaggactttcacagaacacaggagaggaaagccacacacactgcactagaagggcacttcatcagcagggcaaagccaagtcacatgacaaatgtgagagggggcccatgggcggctggactcccccagcccggcctgcccagggagtgagggcggcacgggcacccacaccaggccacacaggagcagggcccccatgccagatgggcaggcaagggtgagccaggcaggcaagagtgagccgggtgggcagggcgaaggacagggccagctagcagaggacggcacgagagacacacggagggaggggaggtgcagccaggtaggccccgaacaccacgttgccaggactcggctcctcggctcaaggaaaagggacagcggttccgtggctgtgctctgacacacctagaaatttcccgctcaagagagcaaactgaatcctttagtattaatgatttctcttcctcccaaaacccactaaaatgatgaaaagcaggattggaaagcacttccagcaatgcctgggagcggacggacaggtgcatcagctgacaagaaacacagaggaacttcccgaaactagagatctctggggatggagctgcttgggaaggcacacaagcgagtgggcctcgcccaggagggagggcacggttctgggcaagccccatcccccgcctgagacgtgggcagaggccgctgggccaccagccagtgtgtgcaggtggtggtatgcacgtgttgggcacaaggggtcctgcctcccaagggacctccgggcggaagggcagacacggcagggaaagatgacagcggacagggcagaggaggcagccagcagacttcaggccccaggcaaaccacctcagctgtaccccctgcacagatggagagcagagaatgggctgggccaaggggcagccctgccctcaccagtgcggcctgtcttcagcctccaacccactgagagagagaatggagaggtcgtgggtggcaataaggcgcacacaacccaactcacatgggcaggacaggcccgggcaggccggtgatcaaactgaaccgcagcggctgaaattcccacagaaaaggccaaacaaacccagcaccccgcggtttccagagctgagcctcaaagaacccggcctgaaaaggttagagacaagcggatggagaaatat

SEQ ID NO: 301017 - DNA, 245 bp, Homo sapiens; identical to SEQ ID NO: 251790
  chr2:240291771-240292016
  hypo

SEQ ID NO: 301018 - DNA, 240 bp, Homo sapiens; identical to SEQ ID NO: 38818
  chr2:240294231-240294471
  hypo

SEQ ID NO: 301019 - DNA, 246 bp, Homo sapiens; identical to SEQ ID NO: 251791
  chr2:240298221-240298467
  hypo

SEQ ID NO: 301020 - DNA, 43 bp, Homo sapiens; identical to SEQ ID NO: 208648
  chr2:240312832-240312875
  hypo

SEQ ID NO: 301021 - DNA, 95 bp, Homo sapiens; identical to SEQ ID NO: 251793
  chr2:240316127-240316222
  hypo

SEQ ID NO: 301022 - DNA, 251 bp, Homo sapiens; identical to SEQ ID NO: 251794
  chr2:240318370-240318621
  hypo

SEQ ID NO: 301023 - DNA, 94 bp, Homo sapiens; identical to SEQ ID NO: 251795
  chr2:240319794-240319888
  hypo

SEQ ID NO: 301024 - DNA, 38 bp, Homo sapiens; identical to SEQ ID NO: 251796
  chr2:240320282-240320320
  hypo

SEQ ID NO: 301025 - DNA, 42 bp, Homo sapiens; identical to SEQ ID NO: 251797
  chr2:240342330-240342372
  hypo

SEQ ID NO: 301026 - DNA, 120 bp, Homo sapiens; identical to SEQ ID NO: 208649
  chr2:240361083-240361203
  hypo

SEQ ID NO: 301027 - DNA, 142 bp, Homo sapiens; identical to SEQ ID NO: 198787
  chr2:240402418-240402560
  hypo

SEQ ID NO: 301028 - DNA, 48 bp, Homo sapiens; identical to SEQ ID NO: 251800
  chr2:240420316-240420364
  hypo

SEQ ID NO: 301029 - DNA, 128 bp, Homo sapiens; identical to SEQ ID NO: 251801
  chr2:240420394-240420522
  hypo

SEQ ID NO: 301030 - DNA, 196 bp, Homo sapiens; identical to SEQ ID NO: 251802
  chr2:240567504-240567700
  hypo

SEQ ID NO: 301031 - DNA, 80 bp, Homo sapiens
  chr2:240582220-240582300
  hypo
caccagtccagagccggcttcgccacccagccttgagtcacctctccacctggccacctacggagaagctcctaggtgat

SEQ ID NO: 301032 - DNA, 259 bp, Homo sapiens; identical to SEQ ID NO: 208651
  chr2:240599653-240599912
  hypo

SEQ ID NO: 301033 - DNA, 114 bp, Homo sapiens; identical to SEQ ID NO: 251805
  chr2:240600458-240600572
  hypo

SEQ ID NO: 301034 - DNA, 34 bp, Homo sapiens; identical to SEQ ID NO: 208652
  chr2:240612328-240612362
  hypo

SEQ ID NO: 301035 - DNA, 110 bp, Homo sapiens; identical to SEQ ID NO: 251807
  chr2:240618673-240618783
  hypo

SEQ ID NO: 301036 - DNA, 225 bp, Homo sapiens; identical to SEQ ID NO: 251808
  chr2:240639523-240639748
  hypo

SEQ ID NO: 301037 - DNA, 151 bp, Homo sapiens; identical to SEQ ID NO: 251809
  chr2:240643423-240643574
  hypo

SEQ ID NO: 301038 - DNA, 206 bp, Homo sapiens; identical to SEQ ID NO: 251811
  chr2:240666723-240666929
  hypo

SEQ ID NO: 301039 - DNA, 120 bp, Homo sapiens; identical to SEQ ID NO: 251812
  chr2:240672186-240672306
  hypo

SEQ ID NO: 301040 - DNA, 130 bp, Homo sapiens; identical to SEQ ID NO: 251813
  chr2:240687707-240687837
  hypo

SEQ ID NO: 301041 - DNA, 63 bp, Homo sapiens
  chr2:240690338-240690401
  hypo
gtctcccatcctgggctggacggtggctcggcaaagtcagtccctcacacatcctcgatccag

SEQ ID NO: 301042 - DNA, 380 bp, Homo sapiens; identical to SEQ ID NO: 208653
  chr2:240700324-240700704
  hypo

SEQ ID NO: 301043 - DNA, 253 bp, Homo sapiens; identical to SEQ ID NO: 251816
  chr2:240725285-240725538
  hypo

SEQ ID NO: 301044 - DNA, 206 bp, Homo sapiens; identical to SEQ ID NO: 208654
  chr2:240733615-240733821
  hypo

SEQ ID NO: 301045 - DNA, 105 bp, Homo sapiens; identical to SEQ ID NO: 208655
  chr2:240734677-240734782
  hypo

SEQ ID NO: 301046 - DNA, 139 bp, Homo sapiens; identical to SEQ ID NO: 251819
  chr2:240735060-240735199
  hypo

SEQ ID NO: 301047 - DNA, 187 bp, Homo sapiens; identical to SEQ ID NO: 251820
  chr2:240747276-240747463
  hypo

SEQ ID NO: 301048 - DNA, 90 bp, Homo sapiens; identical to SEQ ID NO: 251821
  chr2:240750695-240750785
  hypo

SEQ ID NO: 301049 - DNA, 138 bp, Homo sapiens; identical to SEQ ID NO: 251822
  chr2:240756517-240756655
  hypo

SEQ ID NO: 301050 - DNA, 55 bp, Homo sapiens; identical to SEQ ID NO: 208656
  chr2:240809701-240809756
  hypo

SEQ ID NO: 301051 - DNA, 90 bp, Homo sapiens; identical to SEQ ID NO: 251824
  chr2:240905550-240905640
  hypo

SEQ ID NO: 301052 - DNA, 146 bp, Homo sapiens; identical to SEQ ID NO: 251825
  chr2:240905881-240906027
  hypo

SEQ ID NO: 301053 - DNA, 324 bp, Homo sapiens; identical to SEQ ID NO: 251826
  chr2:240906448-240906772
  hypo

SEQ ID NO: 301054 - DNA, 58 bp, Homo sapiens; identical to SEQ ID NO: 251827
  chr2:240927101-240927159
  hypo

SEQ ID NO: 301055 - DNA, 141 bp, Homo sapiens; identical to SEQ ID NO: 251828
  chr2:240928844-240928985
  hypo

SEQ ID NO: 301056 - DNA, 241 bp, Homo sapiens; identical to SEQ ID NO: 251829
  chr2:240930582-240930823
  hypo

SEQ ID NO: 301057 - DNA, 86 bp, Homo sapiens; identical to SEQ ID NO: 251830
  chr2:240940091-240940177
  hypo

SEQ ID NO: 301058 - DNA, 99 bp, Homo sapiens
  chr2:240965863-240965962
  hypo
tcagaaatgatcatgcgattgtaaaacagtgggaatgcagctgtgtaaactacggccggttctatggatgtttctataattgaagaattgctttttgtc

SEQ ID NO: 301059 - DNA, 82 bp, Homo sapiens; identical to SEQ ID NO: 251832
  chr2:240966216-240966298
  hypo

SEQ ID NO: 301060 - DNA, 193 bp, Homo sapiens; identical to SEQ ID NO: 251833
  chr2:241068023-241068216
  hypo

SEQ ID NO: 301061 - DNA, 173 bp, Homo sapiens; identical to SEQ ID NO: 208657
  chr2:241069130-241069303
  hypo

SEQ ID NO: 301062 - DNA, 195 bp, Homo sapiens; identical to SEQ ID NO: 251835
  chr2:241130457-241130652
  hypo

SEQ ID NO: 301063 - DNA, 223 bp, Homo sapiens
  chr2:241157300-241157523
  hypo
gctgtagtccaaccacacgggcactgggcggtggccttgatctcagtccccgttgctcacggggtctcagatcccacctgtgaggggctgtgctgacccgaggccccttccaggacccgcggggttcacaattcaagtgactcaggccctagaaggcttgtaccatacaagtgcaggttgacgccccatagcagggctcacagctttgcgctgttctagatcc

SEQ ID NO: 301064 - DNA, 214 bp, Homo sapiens; identical to SEQ ID NO: 251837
  chr2:241175124-241175338
  hypo

SEQ ID NO: 301065 - DNA, 99 bp, Homo sapiens; identical to SEQ ID NO: 251838
  chr2:241196841-241196940
  hypo

SEQ ID NO: 301066 - DNA, 72 bp, Homo sapiens; identical to SEQ ID NO: 251839
  chr2:241196970-241197042
  hypo

SEQ ID NO: 301067 - DNA, 141 bp, Homo sapiens; identical to SEQ ID NO: 251840
  chr2:241197102-241197243
  hypo

SEQ ID NO: 301068 - DNA, 154 bp, Homo sapiens; identical to SEQ ID NO: 251841
  chr2:241226633-241226787
  hypo

SEQ ID NO: 301069 - DNA, 114 bp, Homo sapiens; identical to SEQ ID NO: 251842
  chr2:241262543-241262657
  hypo

SEQ ID NO: 301070 - DNA, 285 bp, Homo sapiens; identical to SEQ ID NO: 208659
  chr2:241286544-241286829
  hypo

SEQ ID NO: 301071 - DNA, 264 bp, Homo sapiens; identical to SEQ ID NO: 280824
  chr2:241306313-241306577
  hypo

SEQ ID NO: 301072 - DNA, 311 bp, Homo sapiens; identical to SEQ ID NO: 251845
  chr2:241314526-241314837
  hypo

SEQ ID NO: 301073 - DNA, 194 bp, Homo sapiens; identical to SEQ ID NO: 208660
  chr2:241328246-241328440
  hypo

SEQ ID NO: 301074 - DNA, 172 bp, Homo sapiens; identical to SEQ ID NO: 251847
  chr2:241338271-241338443
  hypo

SEQ ID NO: 301075 - DNA, 340 bp, Homo sapiens; identical to SEQ ID NO: 251848
  chr2:241350508-241350848
  hypo

SEQ ID NO: 301076 - DNA, 348 bp, Homo sapiens; identical to SEQ ID NO: 251849
  chr2:241352750-241353098
  hypo

SEQ ID NO: 301077 - DNA, 236 bp, Homo sapiens; identical to SEQ ID NO: 251850
  chr2:241364406-241364642
  hypo

SEQ ID NO: 301078 - DNA, 213 bp, Homo sapiens; identical to SEQ ID NO: 251851
  chr2:241373310-241373523
  hypo

SEQ ID NO: 301079 - DNA, 218 bp, Homo sapiens; identical to SEQ ID NO: 280825
  chr2:241374397-241374615
  hypo

SEQ ID NO: 301080 - DNA, 331 bp, Homo sapiens; identical to SEQ ID NO: 198789
  chr2:241375298-241375629
  hypo

SEQ ID NO: 301081 - DNA, 73 bp, Homo sapiens; identical to SEQ ID NO: 251852
  chr2:241378904-241378977
  hypo

SEQ ID NO: 301082 - DNA, 599 bp, Homo sapiens; identical to SEQ ID NO: 251853
  chr2:241379290-241379889
  hypo

SEQ ID NO: 301083 - DNA, 798 bp, Homo sapiens; identical to SEQ ID NO: 251854
  chr2:241380567-241381365
  hypo

SEQ ID NO: 301084 - DNA, 114 bp, Homo sapiens; identical to SEQ ID NO: 251855
  chr2:241381612-241381726
  hypo

SEQ ID NO: 301085 - DNA, 110 bp, Homo sapiens; identical to SEQ ID NO: 280828
  chr2:241393469-241393579
  hypo

SEQ ID NO: 301086 - DNA, 157 bp, Homo sapiens; identical to SEQ ID NO: 251856
  chr2:241502881-241503038
  hypo

SEQ ID NO: 301087 - DNA, 95 bp, Homo sapiens; identical to SEQ ID NO: 251857
  chr2:241513636-241513731
  hypo

SEQ ID NO: 301088 - DNA, 41 bp, Homo sapiens; identical to SEQ ID NO: 251858
  chr2:241541853-241541894
  hypo

SEQ ID NO: 301089 - DNA, 374 bp, Homo sapiens
  chr2:241542357-241542731
  hypo
agccacagcagttgtggcatctctaccctgcccagcaaaagtggaagtgttgcctgtgccgctaggaacctccaggtttgctccacctccaggggccttgccagggtgtcaaacctgtgtctcgggacactgctgttaggtctccagcttccctatcaggcgcctcagcacccagtcctaccagtgctcccgcctcccgtccccagctggctgggcctgcagccccctcctgtgccccgagctggccgggcccgcagcccactccctggtcactggatgttgctgacacttcactcggtcagagccctagcacccaaggggggccagggcctgacgggggtggagcgaggggtgggccgcgtctgtgcaggctc

SEQ ID NO: 301090 - DNA, 48 bp, Homo sapiens; identical to SEQ ID NO: 208665
  chr2:241543042-241543090
  hypo

SEQ ID NO: 301091 - DNA, 81 bp, Homo sapiens; identical to SEQ ID NO: 251862
  chr2:241544693-241544774
  hypo

SEQ ID NO: 301092 - DNA, 138 bp, Homo sapiens; identical to SEQ ID NO: 208666
  chr2:241545031-241545169
  hypo

SEQ ID NO: 301093 - DNA, 47 bp, Homo sapiens; identical to SEQ ID NO: 208667
  chr2:241555876-241555923
  hypo

SEQ ID NO: 301094 - DNA, 33 bp, Homo sapiens; identical to SEQ ID NO: 208668
  chr2:241581263-241581296
  hypo

SEQ ID NO: 301095 - DNA, 115 bp, Homo sapiens; identical to SEQ ID NO: 251866
  chr2:241631410-241631525
  hypo

SEQ ID NO: 301096 - DNA, 40 bp, Homo sapiens; identical to SEQ ID NO: 208669
  chr2:241655278-241655318
  hypo

SEQ ID NO: 301097 - DNA, 160 bp, Homo sapiens; identical to SEQ ID NO: 251868
  chr2:241660274-241660434
  hypo

SEQ ID NO: 301098 - DNA, 242 bp, Homo sapiens; identical to SEQ ID NO: 251869
  chr2:241661235-241661477
  hypo

SEQ ID NO: 301099 - DNA, 339 bp, Homo sapiens; identical to SEQ ID NO: 208670
  chr2:241689804-241690143
  hypo

SEQ ID NO: 301100 - DNA, 149 bp, Homo sapiens; identical to SEQ ID NO: 251871
  chr2:241697789-241697938
  hypo

SEQ ID NO: 301101 - DNA, 229 bp, Homo sapiens; identical to SEQ ID NO: 208671
  chr2:241721305-241721534
  hypo

SEQ ID NO: 301102 - DNA, 588 bp, Homo sapiens; identical to SEQ ID NO: 208672
  chr2:241721587-241722175
  hypo

SEQ ID NO: 301103 - DNA, 247 bp, Homo sapiens
  chr2:241722242-241722489
  hypo
ccatagccccactttacaggcggggaaactgagggtcccgggagaaaccagggcccctaccccttctccagcatgtgacactctggccatctccgggctctcccttgaacctggccacctcccagacacagggcccggaaacgagggtgacaggggcaggatggggcgccaaagaccctctggggttctggctatggaagccgggccgggccactcaccatttcagccagggcggagatgaccttgc

SEQ ID NO: 301104 - DNA, 457 bp, Homo sapiens; identical to SEQ ID NO: 208674
  chr2:241724229-241724686
  hypo

SEQ ID NO: 301105 - DNA, 173 bp, Homo sapiens; identical to SEQ ID NO: 251874
  chr2:241727448-241727621
  hypo

SEQ ID NO: 301106 - DNA, 156 bp, Homo sapiens; identical to SEQ ID NO: 208675
  chr2:241750153-241750309
  hypo

SEQ ID NO: 301107 - DNA, 112 bp, Homo sapiens; identical to SEQ ID NO: 251876
  chr2:241776236-241776348
  hypo

SEQ ID NO: 301108 - DNA, 208 bp, Homo sapiens; identical to SEQ ID NO: 251877
  chr2:241842760-241842968
  hypo

SEQ ID NO: 301109 - DNA, 115 bp, Homo sapiens; identical to SEQ ID NO: 208676
  chr2:241858348-241858463
  hypo

SEQ ID NO: 301110 - DNA, 38 bp, Homo sapiens
  chr2:241862320-241862358
  hypo
gggagaccccaggccgagtggaaacagtgaaacactca

SEQ ID NO: 301111 - DNA, 268 bp, Homo sapiens; identical to SEQ ID NO: 251882
  chr2:241872036-241872304
  hypo

SEQ ID NO: 301112 - DNA, 75 bp, Homo sapiens; identical to SEQ ID NO: 251883
  chr2:241872595-241872670
  hypo

SEQ ID NO: 301113 - DNA, 160 bp, Homo sapiens; identical to SEQ ID NO: 251884
  chr2:241896341-241896501
  hypo

SEQ ID NO: 301114 - DNA, 112 bp, Homo sapiens; identical to SEQ ID NO: 208678
  chr2:241896820-241896932
  hypo

SEQ ID NO: 301115 - DNA, 39 bp, Homo sapiens; identical to SEQ ID NO: 208679
  chr2:241897078-241897117
  hypo

SEQ ID NO: 301116 - DNA, 85 bp, Homo sapiens
  chr2:241971087-241971172
  hypo
ggcccttactggctctagtccgccctgtcccctagacggtgccaccaccccaattctacggccctcgcgtctttgtttgttttcc

SEQ ID NO: 301117 - DNA, 31 bp, Homo sapiens
  chr2:241971202-241971233
  hypo
agcagagcacgtagtttctctaatgttgact

SEQ ID NO: 301118 - DNA, 91 bp, Homo sapiens; identical to SEQ ID NO: 251887
  chr2:241988026-241988117
  hypo

SEQ ID NO: 301119 - DNA, 210 bp, Homo sapiens; identical to SEQ ID NO: 208680
  chr2:241989264-241989474
  hypo

SEQ ID NO: 301120 - DNA, 250 bp, Homo sapiens; identical to SEQ ID NO: 251889
  chr2:241992477-241992727
  hypo

SEQ ID NO: 301121 - DNA, 476 bp, Homo sapiens; identical to SEQ ID NO: 208682
  chr2:242004393-242004869
  hypo

SEQ ID NO: 301122 - DNA, 168 bp, Homo sapiens
  chr2:242009176-242009344
  hypo
gccagcccacaccccgcctcggcactgtaccattctccataataaagaatctggcttccagcaaggctgcggcagcccatgtccggttctcaaaccgtgttcttgccagaagaccctgtgggcaccccctcacctctccctgctcctgcctcatccagggcccctgcc

SEQ ID NO: 301123 - DNA, 217 bp, Homo sapiens; identical to SEQ ID NO: 208683
  chr2:242010983-242011200
  hypo

SEQ ID NO: 301124 - DNA, 212 bp, Homo sapiens; identical to SEQ ID NO: 208684
  chr2:242011230-242011442
  hypo

SEQ ID NO: 301125 - DNA, 89 bp, Homo sapiens
  chr2:242021672-242021761
  hypo
ctgcccttctttgtcgcagcctgtataaaggtgtcccgcccctgcacaaggctgttctccgagacaaaggcctttccagtctgggaggg

SEQ ID NO: 301126 - DNA, 148 bp, Homo sapiens; identical to SEQ ID NO: 251894
  chr2:242065197-242065345
  hypo

SEQ ID NO: 301127 - DNA, 92 bp, Homo sapiens; identical to SEQ ID NO: 208685
  chr2:242076563-242076655
  hypo

SEQ ID NO: 301128 - DNA, 110 bp, Homo sapiens; identical to SEQ ID NO: 251896
  chr2:242102770-242102880
  hypo

SEQ ID NO: 301129 - DNA, 314 bp, Homo sapiens; identical to SEQ ID NO: 251897
  chr2:242122192-242122506
  hypo

SEQ ID NO: 301130 - DNA, 174 bp, Homo sapiens
  chr2:242128594-242128768
  hypo
tcccagcctggggccggggccgagtcctaacactgagacctggctcgggcttcagggttaggcaggtgcaggcggcccaggctcagtctctgtccctctgggcctccgctaatgtgaagtgaagggtagaactagaaggctgcccctccgacctcctgcggcgcctccatggtc

SEQ ID NO: 301131 - DNA, 680 bp, Homo sapiens
  chr2:242128827-242129507
  hypo
cagggccacagatgtcgtgctcctggccccgttttgccagcccaagactaggagccacggcacctgtcctcccacagagagagacccccggggcgaaggtgcgggaggaagctgggacccccaagagttgtgaggccgggctccatcaggcccgccttgctggggagctcagggcctatgggtcctggcactgggtcctcaggccatgagcgaaggcaggcgacttgaggggtttcctgtccctggctcacatggctccaccctacggataagagagggagaggtgtctgtactccaggcccacctttctgggccttctcaggctccactgagtacccaggcagagtggacggcattcagggctgggggacacgggcactcactggatggacagacagacgcctgctgtgccaggcctgccagacgctcccgccccggcactggtttcttcctggagctcgtggctggctagggggttctccatgtgctcatggccaggagagtctgccgagccagcccagccccattctactccgagtcgagtctgtaaagtgagctcactgcaggcagtgtggtggccccaggaacgggtctcacccatcccctctctgacccccatccccacccggccttgctgggtgcaggagcaggatgctgcggcgacgggcccaggaagagga

SEQ ID NO: 301132 - DNA, 45 bp, Homo sapiens; identical to SEQ ID NO: 251899
  chr2:242130373-242130418
  hypo

SEQ ID NO: 301133 - DNA, 52 bp, Homo sapiens; identical to SEQ ID NO: 251900
  chr2:242142973-242143025
  hypo

SEQ ID NO: 301134 - DNA, 71 bp, Homo sapiens
  chr2:242148880-242148951
  hypo
agggccgccactgagcaccggctcccttccaggagaggcctcggccccagtttgccgcctcagcccccatg

SEQ ID NO: 301135 - DNA, 67 bp, Homo sapiens; identical to SEQ ID NO: 251902
  chr2:242169267-242169334
  hypo

SEQ ID NO: 301136 - DNA, 359 bp, Homo sapiens; identical to SEQ ID NO: 208686
  chr2:242169867-242170226
  hypo

SEQ ID NO: 301137 - DNA, 138 bp, Homo sapiens; identical to SEQ ID NO: 208687
  chr2:242190665-242190803
  hypo

SEQ ID NO: 301138 - DNA, 222 bp, Homo sapiens; identical to SEQ ID NO: 251905
  chr2:242209285-242209507
  hypo

SEQ ID NO: 301139 - DNA, 120 bp, Homo sapiens; identical to SEQ ID NO: 208688
  chr2:242268832-242268952
  hypo

SEQ ID NO: 301140 - DNA, 125 bp, Homo sapiens; identical to SEQ ID NO: 280838
  chr2:242269445-242269570
  hypo

SEQ ID NO: 301141 - DNA, 172 bp, Homo sapiens; identical to SEQ ID NO: 251907
  chr2:242277164-242277336
  hypo

SEQ ID NO: 301142 - DNA, 255 bp, Homo sapiens; identical to SEQ ID NO: 251908
  chr2:242277632-242277887
  hypo

SEQ ID NO: 301143 - DNA, 502 bp, Homo sapiens; identical to SEQ ID NO: 208690
  chr2:242350119-242350621
  hypo

SEQ ID NO: 301144 - DNA, 283 bp, Homo sapiens; identical to SEQ ID NO: 208691
  chr2:242353962-242354245
  hypo

SEQ ID NO: 301145 - DNA, 42 bp, Homo sapiens; identical to SEQ ID NO: 251911
  chr2:242354475-242354517
  hypo

SEQ ID NO: 301146 - DNA, 85 bp, Homo sapiens; identical to SEQ ID NO: 251912
  chr2:242357376-242357461
  hypo

SEQ ID NO: 301147 - DNA, 85 bp, Homo sapiens; identical to SEQ ID NO: 251913
  chr2:242393498-242393583
  hypo

SEQ ID NO: 301148 - DNA, 208 bp, Homo sapiens; identical to SEQ ID NO: 251914
  chr2:242435159-242435367
  hypo

SEQ ID NO: 301149 - DNA, 222 bp, Homo sapiens; identical to SEQ ID NO: 251915
  chr2:242435718-242435940
  hypo

SEQ ID NO: 301150 - DNA, 262 bp, Homo sapiens
  chr2:242436503-242436765
  hypo
gccgtcctcaggcaggccctgccttcaccacctctcacccacatcctccatcctccctccccaggctccaggtggggctcctggagggcacacctgggcccaagcccgctggccacgccctgggcacacagatcctggctgtatcacatttctgaggacggtgctgactgcccatcagcaggtgacgttgatgcagggtcacgtgactaaccagggcggcacctgcccggggatggaccccgactaaaccttctctgctttc

SEQ ID NO: 301151 - DNA, 413 bp, Homo sapiens; identical to SEQ ID NO: 251917
  chr2:242438422-242438835
  hypo

SEQ ID NO: 301152 - DNA, 162 bp, Homo sapiens; identical to SEQ ID NO: 208693
  chr2:242439377-242439539
  hypo

SEQ ID NO: 301153 - DNA, 95 bp, Homo sapiens; identical to SEQ ID NO: 208694
  chr2:242439569-242439664
  hypo

SEQ ID NO: 301154 - DNA, 341 bp, Homo sapiens; identical to SEQ ID NO: 251919
  chr2:242440834-242441175
  hypo

SEQ ID NO: 301155 - DNA, 77 bp, Homo sapiens; identical to SEQ ID NO: 251920
  chr2:242459133-242459210
  hypo

SEQ ID NO: 301156 - DNA, 181 bp, Homo sapiens; identical to SEQ ID NO: 208695
  chr2:242523726-242523907
  hypo

SEQ ID NO: 301157 - DNA, 222 bp, Homo sapiens; identical to SEQ ID NO: 208696
  chr2:242524147-242524369
  hypo

SEQ ID NO: 301158 - DNA, 58 bp, Homo sapiens
  chr2:242554491-242554549
  hypo
ttgaaaacactgcgcgaaaagaaagaagccagacaaaaacgtatatattctatgattc

SEQ ID NO: 301159 - DNA, 68 bp, Homo sapiens
  chr2:242554624-242554692
  hypo
aggggagtgcaaaggagaacctggaccgctggacgtgggtgtggctgcacaagcgcctgcacctgcca

SEQ ID NO: 301160 - DNA, 302 bp, Homo sapiens; identical to SEQ ID NO: 251923
  chr2:242566820-242567122
  hypo

SEQ ID NO: 301161 - DNA, 402 bp, Homo sapiens; identical to SEQ ID NO: 208697
  chr2:242572245-242572647
  hypo

SEQ ID NO: 301162 - DNA, 560 bp, Homo sapiens; identical to SEQ ID NO: 251925
  chr2:242578416-242578976
  hypo

SEQ ID NO: 301163 - DNA, 71 bp, Homo sapiens; identical to SEQ ID NO: 208698
  chr2:242585229-242585300
  hypo

SEQ ID NO: 301164 - DNA, 222 bp, Homo sapiens; identical to SEQ ID NO: 251927
  chr2:242599563-242599785
  hypo

SEQ ID NO: 301165 - DNA, 252 bp, Homo sapiens; identical to SEQ ID NO: 251928
  chr2:242600213-242600465
  hypo

SEQ ID NO: 301166 - DNA, 53 bp, Homo sapiens
  chr2:242602197-242602250
  hypo
atcaataaagcgggccgggcgcggtggctcacgcctataatcccaacttcaaa

SEQ ID NO: 301167 - DNA, 49 bp, Homo sapiens
  chr2:242602349-242602398
  hypo
cttcaaaaccaataaagcgggccgggcgcggtggctcacgcctataatc

SEQ ID NO: 301168 - DNA, 390 bp, Homo sapiens; identical to SEQ ID NO: 251931
  chr2:242608061-242608451
  hypo

SEQ ID NO: 301169 - DNA, 214 bp, Homo sapiens; identical to SEQ ID NO: 251932
  chr2:242608728-242608942
  hypo

SEQ ID NO: 301170 - DNA, 33 bp, Homo sapiens; identical to SEQ ID NO: 251933
  chr2:242609242-242609275
  hypo

SEQ ID NO: 301171 - DNA, 184 bp, Homo sapiens; identical to SEQ ID NO: 208700
  chr2:242610782-242610966
  hypo

SEQ ID NO: 301172 - DNA, 206 bp, Homo sapiens; identical to SEQ ID NO: 208701
  chr2:242611928-242612134
  hypo

SEQ ID NO: 301173 - DNA, 596 bp, Homo sapiens; identical to SEQ ID NO: 251936
  chr2:242616805-242617401
  hypo

SEQ ID NO: 301174 - DNA, 138 bp, Homo sapiens; identical to SEQ ID NO: 208704
  chr2:242617756-242617894
  hypo

SEQ ID NO: 301175 - DNA, 545 bp, Homo sapiens; identical to SEQ ID NO: 208705
  chr2:242617924-242618469
  hypo

SEQ ID NO: 301176 - DNA, 164 bp, Homo sapiens; identical to SEQ ID NO: 208706
  chr2:242618723-242618887
  hypo

SEQ ID NO: 301177 - DNA, 103 bp, Homo sapiens; identical to SEQ ID NO: 251939
  chr2:242618947-242619050
  hypo

SEQ ID NO: 301178 - DNA, 37 bp, Homo sapiens; identical to SEQ ID NO: 251940
  chr2:242620782-242620819
  hypo

SEQ ID NO: 301179 - DNA, 120 bp, Homo sapiens; identical to SEQ ID NO: 251941
  chr2:242636478-242636598
  hypo

SEQ ID NO: 301180 - DNA, 105 bp, Homo sapiens; identical to SEQ ID NO: 208707
  chr2:242637132-242637237
  hypo

SEQ ID NO: 301181 - DNA, 79 bp, Homo sapiens; identical to SEQ ID NO: 251944
  chr2:242648697-242648776
  hypo

SEQ ID NO: 301182 - DNA, 245 bp, Homo sapiens; identical to SEQ ID NO: 251945
  chr2:242664010-242664255
  hypo

SEQ ID NO: 301183 - DNA, 751 bp, Homo sapiens; identical to SEQ ID NO: 251946
  chr2:242664619-242665370
  hypo

SEQ ID NO: 301184 - DNA, 107 bp, Homo sapiens; identical to SEQ ID NO: 251947
  chr2:242712093-242712200
  hypo

SEQ ID NO: 301185 - DNA, 78 bp, Homo sapiens; identical to SEQ ID NO: 208709
  chr2:242713977-242714055
  hypo

SEQ ID NO: 301186 - DNA, 71 bp, Homo sapiens; identical to SEQ ID NO: 208710
  chr2:242714085-242714156
  hypo

SEQ ID NO: 301187 - DNA, 117 bp, Homo sapiens
  chr2:242716188-242716305
  hypo
gagggcgtggctcccgtcccaggaggcaggtgagcttctggggattccagttcacctgccccacagccgcaccctgcctgtgcctgcaccctggggagcccagagccggcaggggcc

SEQ ID NO: 301188 - DNA, 388 bp, Homo sapiens
  chr2:242716335-242716723
  hypo
ctcgactgtcccctcgctggaggccagaggccaagatgatgtccatgctgggcggcttgcagaggtaaggggggcagttggaccccccaggtggacaaagcgcttcatctgtggctattctgagagacggacaggagtgggttttgtttgtctttcgaaggaagtgacttggatttggaggctgttcctactcaggcttccctgaattcacctgtcttggcttcgtttcggaagtagggggcccctcctgcccaggcctggtgctgcttctgggtgtttgggggttctgggatgtggggcccagtgagaaagctgccccccaacactgtggcgtggagacgctcgagtgtccgcgtgacggctggggagggtgagacctgctgggctt

SEQ ID NO: 301189 - DNA, 43 bp, Homo sapiens
  chr2:242716760-242716803
  hypo
gctgggccgtgttggtgggagtgccaggcgcttgctggagcgt

SEQ ID NO: 301190 - DNA, 78 bp, Homo sapiens; identical to SEQ ID NO: 208711
  chr2:242734968-242735046
  hypo

SEQ ID NO: 301191 - DNA, 81 bp, Homo sapiens; identical to SEQ ID NO: 208712
  chr2:242735076-242735157
  hypo

SEQ ID NO: 301192 - DNA, 283 bp, Homo sapiens
  chr2:242735246-242735529
  hypo
tcctctctgtgcctgggaattctagtgtttactgggccttggccgctgggagcctcttcaaggtggttccattttgacgtaaggactggaggggtgcattgaagaattgtagagtgcaggtgaagggagggcctggaagctcctgtcccgtctcctagaagcgtggctgtggtggcactggcattggagtctgaggtgccgcgtgtgccgtgaggatgaagtgtgagaaattttgggaggtcctagttctaccatccccagtgtcttcgagacccacaccctt

SEQ ID NO: 301193 - DNA, 320 bp, Homo sapiens; identical to SEQ ID NO: 251952
  chr2:242754378-242754698
  hypo

SEQ ID NO: 301194 - DNA, 171 bp, Homo sapiens; identical to SEQ ID NO: 208715
  chr2:242755673-242755844
  hypo

SEQ ID NO: 301195 - DNA, 104 bp, Homo sapiens; identical to SEQ ID NO: 208716
  chr2:242762674-242762778
  hypo

SEQ ID NO: 301196 - DNA, 253 bp, Homo sapiens; identical to SEQ ID NO: 208717
  chr2:242762831-242763084
  hypo

SEQ ID NO: 301197 - DNA, 81 bp, Homo sapiens
  chr2:242766033-242766114
  hypo
gtgttcttctccacgacgttctctttgtctgactttctgctcctgccgcgtgcgcagaggggcgaggaggaagcatttgcg

SEQ ID NO: 301198 - DNA, 275 bp, Homo sapiens
  chr2:242766213-242766488
  hypo
gatgtggagatcaaggcccggcaagtcctctgttgttgacggttctcaggtggtagaaacgatctcgcagcgcacctgcgtggcttccgaaaccgttgtctcaagcgtgttccacttgatgtgattaaaaaagttctcgtggccccaagcacctgctttacctgctcagaccagagtgtcgttccgtcccattcattccgcagctttccccgaacgcacacaagtgaaatgtaaatgtcagtgtgtgtgtatctatctcccgtttctcccaaagc

SEQ ID NO: 301199 - DNA, 281 bp, Homo sapiens; identical to SEQ ID NO: 251956
  chr2:242791134-242791415
  hypo

SEQ ID NO: 301200 - DNA, 158 bp, Homo sapiens; identical to SEQ ID NO: 251957
  chr2:242793064-242793222
  hypo

SEQ ID NO: 301201 - DNA, 109 bp, Homo sapiens
  chr2:242815160-242815269
  hypo
agggcggtggccacgttgcctacggcccccagggcaatggctgcttctcccaaggctattaccagaagaggcagctgaggtccaggttccacaaggcccgctgtgggtg

SEQ ID NO: 301202 - DNA, 53 bp, Homo sapiens
  chr2:242836340-242836393
  hypo
cagagtctggagctcgtgggccctcaggccgccttcttgtccttggtgtggag

SEQ ID NO: 301203 - DNA, 85 bp, Homo sapiens; identical to SEQ ID NO: 251963
  chr2:242845592-242845677
  hypo

SEQ ID NO: 301204 - DNA, 175 bp, Homo sapiens; identical to SEQ ID NO: 208719
  chr2:242874827-242875002
  hypo

SEQ ID NO: 301205 - DNA, 189 bp, Homo sapiens; identical to SEQ ID NO: 208720
  chr2:242887764-242887953
  hypo

SEQ ID NO: 301206 - DNA, 47 bp, Homo sapiens
  chr2:242890344-242890391
  hypo
tggcggccacgtcggcctcctgtgagagggtcgagggctccagcccc

SEQ ID NO: 301207 - DNA, 37 bp, Homo sapiens
  chr2:242925459-242925496
  hypo
tgcatgaacttctggcgtccacaatctagtggatgaa

SEQ ID NO: 301208 - DNA, 190 bp, Homo sapiens
  chr2:242925676-242925866
  hypo
ggaaactgtaggagctggaaatatttcatatcttatttggggtgttgtttacaggggaacttgacaaactcatctaatggtacaatcgagacatctgtgtaaataaagtgtcaaaaatcatcctgctgacatccatgctccccgccccacggcacttcccggccctcagccctcccgtgcggctcctgcc

SEQ ID NO: 301209 - DNA, 211 bp, Homo sapiens
  chr2:242933459-242933670
  hypo
tggaatctccagcgttgaaggcggggcctggtgggaggtgattggatcacggccggcgttcccacaaatggcttcgcaccgtcgcctccgtgacgccctcgtgacactgagtgagcaagttattgtgagacctggtcgtttgaaactgagttggggcccagctcagcgggcacgaccctgctctgggccacgcttacgcgcttgttcctaa

SEQ ID NO: 301210 - DNA, 141 bp, Homo sapiens; identical to SEQ ID NO: 251969
  chr2:242938360-242938501
  hypo

SEQ ID NO: 301211 - DNA, 113 bp, Homo sapiens; identical to SEQ ID NO: 251970
  chr2:242948202-242948315
  hypo

SEQ ID NO: 301212 - DNA, 190 bp, Homo sapiens
  chr2:242948375-242948565
  hypo
gttggcaccagggaacaccccggggaacagagcagatccaacaccaggcccaggagagtcggctcccggtgacgcctgagatgtctgtggactccaggcaatacttgtgcaagaggccgtgggggccaatggggcatgatagtgtgaccttcaaattaccagtgtgcacggcacacggaaggaacacaca

SEQ ID NO: 301213 - DNA, 61 bp, Homo sapiens
  chr3:3167927-3167988
  hypo
aaaaactacacattttcgcactttaagggctcaacggctgtattcccactcctttgccact

SEQ ID NO: 301214 - DNA, 209 bp, Homo sapiens; identical to SEQ ID NO: 208721
  chr3:3179063-3179272
  hypo

SEQ ID NO: 301215 - DNA, 37 bp, Homo sapiens; identical to SEQ ID NO: 251975
  chr3:3426022-3426059
  hypo

SEQ ID NO: 301216 - DNA, 41 bp, Homo sapiens; identical to SEQ ID NO: 251976
  chr3:3639126-3639167
  hypo

SEQ ID NO: 301217 - DNA, 165 bp, Homo sapiens; identical to SEQ ID NO: 208722
  chr3:3786390-3786555
  hypo

SEQ ID NO: 301218 - DNA, 232 bp, Homo sapiens; identical to SEQ ID NO: 208723
  chr3:4347747-4347979
  hypo

SEQ ID NO: 301219 - DNA, 83 bp, Homo sapiens; identical to SEQ ID NO: 251979
  chr3:4669493-4669576
  hypo

SEQ ID NO: 301220 - DNA, 218 bp, Homo sapiens; identical to SEQ ID NO: 251980
  chr3:4735234-4735452
  hypo

SEQ ID NO: 301221 - DNA, 96 bp, Homo sapiens; identical to SEQ ID NO: 208724
  chr3:4755878-4755974
  hypo

SEQ ID NO: 301222 - DNA, 279 bp, Homo sapiens
  chr3:4756004-4756283
  hypo
ccgtttccctcctcccatccctgttttctgatgagtggcctcttatggagcttgtcccatgactgacacttccctggtgatgtccagaattgttctgcttctctgccctctcctgagccttcaccgccaaagaatcggatctggaggggccctggcatggcttcttccaactctccctgtgcctacgaggaggctggggctaagagctgagagactgcccgaggtcacgtgtgaagtctagatgagatcaagactaccgtctgggtttcccaaatccct

SEQ ID NO: 301223 - DNA, 62 bp, Homo sapiens; identical to SEQ ID NO: 251982
  chr3:4840917-4840979
  hypo

SEQ ID NO: 301224 - DNA, 760 bp, Homo sapiens; identical to SEQ ID NO: 251983
  chr3:4865776-4866536
  hypo

SEQ ID NO: 301225 - DNA, 340 bp, Homo sapiens; identical to SEQ ID NO: 280861
  chr3:4909948-4910288
  hypo

SEQ ID NO: 301226 - DNA, 224 bp, Homo sapiens; identical to SEQ ID NO: 198807
  chr3:4910550-4910774
  hypo

SEQ ID NO: 301227 - DNA, 37 bp, Homo sapiens; identical to SEQ ID NO: 208728
  chr3:4993606-4993643
  hypo

SEQ ID NO: 301228 - DNA, 234 bp, Homo sapiens; identical to SEQ ID NO: 280863
  chr3:5018751-5018985
  hypo

SEQ ID NO: 301229 - DNA, 157 bp, Homo sapiens; identical to SEQ ID NO: 198809
  chr3:5019132-5019289
  hypo

SEQ ID NO: 301230 - DNA, 176 bp, Homo sapiens; identical to SEQ ID NO: 251985
  chr3:5030720-5030896
  hypo

SEQ ID NO: 301231 - DNA, 31 bp, Homo sapiens; identical to SEQ ID NO: 251986
  chr3:5126485-5126516
  hypo

SEQ ID NO: 301232 - DNA, 79 bp, Homo sapiens; identical to SEQ ID NO: 251987
  chr3:5165843-5165922
  hypo

SEQ ID NO: 301233 - DNA, 174 bp, Homo sapiens; identical to SEQ ID NO: 251988
  chr3:5252798-5252972
  hypo

SEQ ID NO: 301234 - DNA, 42 bp, Homo sapiens; identical to SEQ ID NO: 251989
  chr3:5296187-5296229
  hypo

SEQ ID NO: 301235 - DNA, 93 bp, Homo sapiens; identical to SEQ ID NO: 251990
  chr3:5824093-5824186
  hypo

SEQ ID NO: 301236 - DNA, 35 bp, Homo sapiens; identical to SEQ ID NO: 251991
  chr3:6109803-6109838
  hypo

SEQ ID NO: 301237 - DNA, 35 bp, Homo sapiens; identical to SEQ ID NO: 251992
  chr3:6110078-6110113
  hypo

SEQ ID NO: 301238 - DNA, 84 bp, Homo sapiens; identical to SEQ ID NO: 208730
  chr3:6811742-6811826
  hypo

SEQ ID NO: 301239 - DNA, 237 bp, Homo sapiens; identical to SEQ ID NO: 280870
  chr3:6903188-6903425
  hypo

SEQ ID NO: 301240 - DNA, 125 bp, Homo sapiens; identical to SEQ ID NO: 280871
  chr3:6903463-6903588
  hypo

SEQ ID NO: 301241 - DNA, 161 bp, Homo sapiens; identical to SEQ ID NO: 251994
  chr3:7188149-7188310
  hypo

SEQ ID NO: 301242 - DNA, 47 bp, Homo sapiens; identical to SEQ ID NO: 251995
  chr3:7620289-7620336
  hypo

SEQ ID NO: 301243 - DNA, 76 bp, Homo sapiens; identical to SEQ ID NO: 251996
  chr3:8505219-8505295
  hypo

SEQ ID NO: 301244 - DNA, 43 bp, Homo sapiens; identical to SEQ ID NO: 208731
  chr3:8595738-8595781
  hypo

SEQ ID NO: 301245 - DNA, 223 bp, Homo sapiens; identical to SEQ ID NO: 208732
  chr3:8595841-8596064
  hypo

SEQ ID NO: 301246 - DNA, 45 bp, Homo sapiens; identical to SEQ ID NO: 208733
  chr3:8669371-8669416
  hypo

SEQ ID NO: 301247 - DNA, 213 bp, Homo sapiens; identical to SEQ ID NO: 252000
  chr3:9173888-9174101
  hypo

SEQ ID NO: 301248 - DNA, 148 bp, Homo sapiens; identical to SEQ ID NO: 252001
  chr3:9553508-9553656
  hypo

SEQ ID NO: 301249 - DNA, 36 bp, Homo sapiens; identical to SEQ ID NO: 252002
  chr3:9554924-9554960
  hypo

SEQ ID NO: 301250 - DNA, 127 bp, Homo sapiens; identical to SEQ ID NO: 252003
  chr3:9704771-9704898
  hypo

SEQ ID NO: 301251 - DNA, 154 bp, Homo sapiens; identical to SEQ ID NO: 208734
  chr3:9782960-9783114
  hypo

SEQ ID NO: 301252 - DNA, 39 bp, Homo sapiens; identical to SEQ ID NO: 208735
  chr3:9793443-9793482
  hypo

SEQ ID NO: 301253 - DNA, 257 bp, Homo sapiens; identical to SEQ ID NO: 208736
  chr3:9905283-9905540
  hypo

SEQ ID NO: 301254 - DNA, 120 bp, Homo sapiens; identical to SEQ ID NO: 252007
  chr3:9924114-9924234
  hypo

SEQ ID NO: 301255 - DNA, 33 bp, Homo sapiens; identical to SEQ ID NO: 208737
  chr3:9947648-9947681
  hypo

SEQ ID NO: 301256 - DNA, 155 bp, Homo sapiens; identical to SEQ ID NO: 252010
  chr3:9987359-9987514
  hypo

SEQ ID NO: 301257 - DNA, 229 bp, Homo sapiens; identical to SEQ ID NO: 252011
  chr3:9991408-9991637
  hypo

SEQ ID NO: 301258 - DNA, 86 bp, Homo sapiens; identical to SEQ ID NO: 208739
  chr3:10011411-10011497
  hypo

SEQ ID NO: 301259 - DNA, 203 bp, Homo sapiens; identical to SEQ ID NO: 208740
  chr3:10131932-10132135
  hypo

SEQ ID NO: 301260 - DNA, 139 bp, Homo sapiens; identical to SEQ ID NO: 208741
  chr3:10212191-10212330
  hypo

SEQ ID NO: 301261 - DNA, 112 bp, Homo sapiens; identical to SEQ ID NO: 252017
  chr3:10332492-10332604
  hypo

SEQ ID NO: 301262 - DNA, 41 bp, Homo sapiens; identical to SEQ ID NO: 208742
  chr3:10363448-10363489
  hypo

SEQ ID NO: 301263 - DNA, 242 bp, Homo sapiens; identical to SEQ ID NO: 252019
  chr3:10384503-10384745
  hypo

SEQ ID NO: 301264 - DNA, 227 bp, Homo sapiens; identical to SEQ ID NO: 252020
  chr3:10541007-10541234
  hypo

SEQ ID NO: 301265 - DNA, 131 bp, Homo sapiens; identical to SEQ ID NO: 252021
  chr3:10569429-10569560
  hypo

SEQ ID NO: 301266 - DNA, 119 bp, Homo sapiens; identical to SEQ ID NO: 208743
  chr3:10638628-10638747
  hypo

SEQ ID NO: 301267 - DNA, 201 bp, Homo sapiens; identical to SEQ ID NO: 208744
  chr3:10959983-10960184
  hypo

SEQ ID NO: 301268 - DNA, 33 bp, Homo sapiens; identical to SEQ ID NO: 252024
  chr3:10976104-10976137
  hypo

SEQ ID NO: 301269 - DNA, 127 bp, Homo sapiens; identical to SEQ ID NO: 252025
  chr3:10991635-10991762
  hypo

SEQ ID NO: 301270 - DNA, 120 bp, Homo sapiens; identical to SEQ ID NO: 208745
  chr3:11133518-11133638
  hypo

SEQ ID NO: 301271 - DNA, 215 bp, Homo sapiens; identical to SEQ ID NO: 208746
  chr3:11210148-11210363
  hypo

SEQ ID NO: 301272 - DNA, 42 bp, Homo sapiens; identical to SEQ ID NO: 208747
  chr3:11300932-11300974
  hypo

SEQ ID NO: 301273 - DNA, 37 bp, Homo sapiens; identical to SEQ ID NO: 252029
  chr3:11574543-11574580
  hypo

SEQ ID NO: 301274 - DNA, 257 bp, Homo sapiens; identical to SEQ ID NO: 252030
  chr3:11577995-11578252
  hypo

SEQ ID NO: 301275 - DNA, 179 bp, Homo sapiens; identical to SEQ ID NO: 208748
  chr3:11581143-11581322
  hypo

SEQ ID NO: 301276 - DNA, 88 bp, Homo sapiens; identical to SEQ ID NO: 252032
  chr3:11595081-11595169
  hypo

SEQ ID NO: 301277 - DNA, 357 bp, Homo sapiens; identical to SEQ ID NO: 252033
  chr3:11600065-11600422
  hypo

SEQ ID NO: 301278 - DNA, 38 bp, Homo sapiens; identical to SEQ ID NO: 208750
  chr3:11606285-11606323
  hypo

SEQ ID NO: 301279 - DNA, 32 bp, Homo sapiens; identical to SEQ ID NO: 252035
  chr3:11607101-11607133
  hypo

SEQ ID NO: 301280 - DNA, 574 bp, Homo sapiens; identical to SEQ ID NO: 252036
  chr3:11655424-11655998
  hypo

SEQ ID NO: 301281 - DNA, 135 bp, Homo sapiens; identical to SEQ ID NO: 208752
  chr3:11707751-11707886
  hypo

SEQ ID NO: 301282 - DNA, 99 bp, Homo sapiens; identical to SEQ ID NO: 252038
  chr3:12186545-12186644
  hypo

SEQ ID NO: 301283 - DNA, 81 bp, Homo sapiens; identical to SEQ ID NO: 208753
  chr3:12204374-12204455
  hypo

SEQ ID NO: 301284 - DNA, 119 bp, Homo sapiens; identical to SEQ ID NO: 252040
  chr3:12486439-12486558
  hypo

SEQ ID NO: 301285 - DNA, 120 bp, Homo sapiens; identical to SEQ ID NO: 252041
  chr3:12486827-12486947
  hypo

SEQ ID NO: 301286 - DNA, 39 bp, Homo sapiens; identical to SEQ ID NO: 252042
  chr3:12558547-12558586
  hypo

SEQ ID NO: 301287 - DNA, 43 bp, Homo sapiens; identical to SEQ ID NO: 208754
  chr3:12575984-12576027
  hypo

SEQ ID NO: 301288 - DNA, 60 bp, Homo sapiens; identical to SEQ ID NO: 208755
  chr3:12586167-12586227
  hypo

SEQ ID NO: 301289 - DNA, 144 bp, Homo sapiens; identical to SEQ ID NO: 208756
  chr3:12596374-12596518
  hypo

SEQ ID NO: 301290 - DNA, 101 bp, Homo sapiens; identical to SEQ ID NO: 208757
  chr3:12605273-12605374
  hypo

SEQ ID NO: 301291 - DNA, 122 bp, Homo sapiens; identical to SEQ ID NO: 252047
  chr3:12626572-12626694
  hypo

SEQ ID NO: 301292 - DNA, 118 bp, Homo sapiens; identical to SEQ ID NO: 208758
  chr3:12660087-12660205
  hypo

SEQ ID NO: 301293 - DNA, 40 bp, Homo sapiens; identical to SEQ ID NO: 208759
  chr3:12743273-12743313
  hypo

SEQ ID NO: 301294 - DNA, 40 bp, Homo sapiens; identical to SEQ ID NO: 252050
  chr3:12761057-12761097
  hypo

SEQ ID NO: 301295 - DNA, 94 bp, Homo sapiens; identical to SEQ ID NO: 252051
  chr3:12820702-12820796
  hypo

SEQ ID NO: 301296 - DNA, 78 bp, Homo sapiens; identical to SEQ ID NO: 208760
  chr3:12821389-12821467
  hypo

SEQ ID NO: 301297 - DNA, 125 bp, Homo sapiens; identical to SEQ ID NO: 252053
  chr3:12856636-12856761
  hypo

SEQ ID NO: 301298 - DNA, 43 bp, Homo sapiens; identical to SEQ ID NO: 208761
  chr3:12940404-12940447
  hypo

SEQ ID NO: 301299 - DNA, 102 bp, Homo sapiens; identical to SEQ ID NO: 208762
  chr3:12940862-12940964
  hypo

SEQ ID NO: 301300 - DNA, 215 bp, Homo sapiens; identical to SEQ ID NO: 208763
  chr3:12949721-12949936
  hypo

SEQ ID NO: 301301 - DNA, 75 bp, Homo sapiens; identical to SEQ ID NO: 208764
  chr3:12956289-12956364
  hypo

SEQ ID NO: 301302 - DNA, 92 bp, Homo sapiens; identical to SEQ ID NO: 208765
  chr3:12976953-12977045
  hypo

SEQ ID NO: 301303 - DNA, 206 bp, Homo sapiens
  chr3:12977144-12977350
  hypo
gtcattgtcaccgtctgagtagtccgactcagacttgctctgccggttggctgagccattgatggccaagtggctgtccaggggcctggggggccggggccgcaactcaggctcctcccgggggaggctcttgggggcgccgctgtggggaccatgcttgggactgccctgctgcccgccaaggctgcgctcgtaagcactctgcc

SEQ ID NO: 301304 - DNA, 439 bp, Homo sapiens; identical to SEQ ID NO: 252060
  chr3:12984507-12984946
  hypo

SEQ ID NO: 301305 - DNA, 218 bp, Homo sapiens; identical to SEQ ID NO: 198825
  chr3:13008720-13008938
  hypo

SEQ ID NO: 301306 - DNA, 124 bp, Homo sapiens; identical to SEQ ID NO: 280909
  chr3:13009023-13009147
  hypo

SEQ ID NO: 301307 - DNA, 106 bp, Homo sapiens; identical to SEQ ID NO: 252061
  chr3:13020986-13021092
  hypo

SEQ ID NO: 301308 - DNA, 57 bp, Homo sapiens; identical to SEQ ID NO: 252062
  chr3:13028240-13028297
  hypo

SEQ ID NO: 301309 - DNA, 148 bp, Homo sapiens; identical to SEQ ID NO: 252063
  chr3:13028558-13028706
  hypo

SEQ ID NO: 301310 - DNA, 124 bp, Homo sapiens
  chr3:13028736-13028860
  hypo
gccttgccctcgccctgtccctaccacctcccagcccacagcctgcagttgggccactgcctgccttgtagcgagaggtatggtacgtgctgggggcagtgcaggtagggaaaagaacacggtt

SEQ ID NO: 301311 - DNA, 85 bp, Homo sapiens
  chr3:13028890-13028975
  hypo
tgggtatatgtgtgcacctggggccgtgcatgtgcacacatgtgcatgtgtcagagagagagagagagaccgtagatgaaaatct

SEQ ID NO: 301312 - DNA, 108 bp, Homo sapiens; identical to SEQ ID NO: 208768
  chr3:13083878-13083986
  hypo

SEQ ID NO: 301313 - DNA, 94 bp, Homo sapiens; identical to SEQ ID NO: 208769
  chr3:13205534-13205628
  hypo

SEQ ID NO: 301314 - DNA, 41 bp, Homo sapiens
  chr3:13367327-13367368
  hypo
atagtaaaccgtcacggatcccacggcccgggccacagcca

SEQ ID NO: 301315 - DNA, 170 bp, Homo sapiens
  chr3:13367420-13367590
  hypo
tcctgagaggcctggagaggaagcacaggtgtcagccccctttccatagctggacactccagtcaaagcccagctcacctggatgacaggccagcttcctcgctggctgccgctacccccatgggggctcactcagcagcctcaggagacagccacgctgcctgccccag

SEQ ID NO: 301316 - DNA, 52 bp, Homo sapiens; identical to SEQ ID NO: 252068
  chr3:13501985-13502037
  hypo

SEQ ID NO: 301317 - DNA, 284 bp, Homo sapiens; identical to SEQ ID NO: 208770
  chr3:13611725-13612009
  hypo

SEQ ID NO: 301318 - DNA, 207 bp, Homo sapiens; identical to SEQ ID NO: 208771
  chr3:13612341-13612548
  hypo

SEQ ID NO: 301319 - DNA, 206 bp, Homo sapiens; identical to SEQ ID NO: 252070
  chr3:13669960-13670166
  hypo

SEQ ID NO: 301320 - DNA, 39 bp, Homo sapiens
  chr3:13679093-13679132
  hypo
tggagtgccagaactcgccagcgcgcatcacgcactacc

SEQ ID NO: 301321 - DNA, 482 bp, Homo sapiens; identical to SEQ ID NO: 280919
  chr3:13936738-13937220
  hypo

SEQ ID NO: 301322 - DNA, 130 bp, Homo sapiens; identical to SEQ ID NO: 280920
  chr3:13937250-13937380
  hypo

SEQ ID NO: 301323 - DNA, 216 bp, Homo sapiens; identical to SEQ ID NO: 252072
  chr3:14174613-14174829
  hypo

SEQ ID NO: 301324 - DNA, 44 bp, Homo sapiens; identical to SEQ ID NO: 252073
  chr3:14208688-14208732
  hypo

SEQ ID NO: 301325 - DNA, 93 bp, Homo sapiens; identical to SEQ ID NO: 252074
  chr3:14291143-14291236
  hypo

SEQ ID NO: 301326 - DNA, 35 bp, Homo sapiens; identical to SEQ ID NO: 252075
  chr3:14313488-14313523
  hypo

SEQ ID NO: 301327 - DNA, 144 bp, Homo sapiens; identical to SEQ ID NO: 208773
  chr3:14383872-14384016
  hypo

SEQ ID NO: 301328 - DNA, 265 bp, Homo sapiens; identical to SEQ ID NO: 208774
  chr3:14384852-14385117
  hypo

SEQ ID NO: 301329 - DNA, 191 bp, Homo sapiens; identical to SEQ ID NO: 252078
  chr3:14386838-14387029
  hypo

SEQ ID NO: 301330 - DNA, 105 bp, Homo sapiens; identical to SEQ ID NO: 222074
  chr3:14443833-14443938
  hypo

SEQ ID NO: 301331 - DNA, 600 bp, Homo sapiens; identical to SEQ ID NO: 222075
  chr3:14443998-14444598
  hypo

SEQ ID NO: 301332 - DNA, 105 bp, Homo sapiens; identical to SEQ ID NO: 222076
  chr3:14444658-14444763
  hypo

SEQ ID NO: 301333 - DNA, 91 bp, Homo sapiens; identical to SEQ ID NO: 252079
  chr3:14452944-14453035
  hypo

SEQ ID NO: 301334 - DNA, 36 bp, Homo sapiens; identical to SEQ ID NO: 252080
  chr3:14508072-14508108
  hypo

SEQ ID NO: 301335 - DNA, 176 bp, Homo sapiens; identical to SEQ ID NO: 208776
  chr3:14514231-14514407
  hypo

SEQ ID NO: 301336 - DNA, 270 bp, Homo sapiens; identical to SEQ ID NO: 252082
  chr3:14535135-14535405
  hypo

SEQ ID NO: 301337 - DNA, 112 bp, Homo sapiens; identical to SEQ ID NO: 252083
  chr3:14563228-14563340
  hypo

SEQ ID NO: 301338 - DNA, 131 bp, Homo sapiens; identical to SEQ ID NO: 252084
  chr3:14564198-14564329
  hypo

SEQ ID NO: 301339 - DNA, 210 bp, Homo sapiens; identical to SEQ ID NO: 252085
  chr3:14565824-14566034
  hypo

SEQ ID NO: 301340 - DNA, 40 bp, Homo sapiens; identical to SEQ ID NO: 252086
  chr3:15004944-15004984
  hypo

SEQ ID NO: 301341 - DNA, 39 bp, Homo sapiens; identical to SEQ ID NO: 252087
  chr3:15005224-15005263
  hypo

SEQ ID NO: 301342 - DNA, 81 bp, Homo sapiens; identical to SEQ ID NO: 252088
  chr3:15079928-15080009
  hypo

SEQ ID NO: 301343 - DNA, 213 bp, Homo sapiens
  chr3:15105313-15105526
  hypo
agctcgctgcgggccgcaccgagacccccaccccttcccattatctgcctggcagttgcccggggacaaaggtgtgcacagttgtgcagtaggttatgaaggagtatctgggtgcccatacaccctaagaccaagaccaagtcttccaggaagccatcaagccagctgattccaggcaagcaggtccaagttatcagattcacctgcgcagag

SEQ ID NO: 301344 - DNA, 163 bp, Homo sapiens; identical to SEQ ID NO: 208778
  chr3:15116204-15116367
  hypo

SEQ ID NO: 301345 - DNA, 98 bp, Homo sapiens; identical to SEQ ID NO: 208779
  chr3:15123750-15123848
  hypo

SEQ ID NO: 301346 - DNA, 63 bp, Homo sapiens; identical to SEQ ID NO: 208780
  chr3:15123992-15124055
  hypo

SEQ ID NO: 301347 - DNA, 142 bp, Homo sapiens; identical to SEQ ID NO: 252092
  chr3:15349228-15349370
  hypo

SEQ ID NO: 301348 - DNA, 79 bp, Homo sapiens; identical to SEQ ID NO: 208781
  chr3:15374528-15374607
  hypo

SEQ ID NO: 301349 - DNA, 92 bp, Homo sapiens; identical to SEQ ID NO: 252094
  chr3:15432501-15432593
  hypo

SEQ ID NO: 301350 - DNA, 152 bp, Homo sapiens; identical to SEQ ID NO: 208782
  chr3:15540528-15540680
  hypo

SEQ ID NO: 301351 - DNA, 98 bp, Homo sapiens; identical to SEQ ID NO: 252096
  chr3:15674931-15675029
  hypo

SEQ ID NO: 301352 - DNA, 232 bp, Homo sapiens; identical to SEQ ID NO: 252097
  chr3:16363981-16364213
  hypo

SEQ ID NO: 301353 - DNA, 215 bp, Homo sapiens; identical to SEQ ID NO: 208783
  chr3:16439262-16439477
  hypo

SEQ ID NO: 301354 - DNA, 78 bp, Homo sapiens; identical to SEQ ID NO: 252099
  chr3:16542424-16542502
  hypo

SEQ ID NO: 301355 - DNA, 77 bp, Homo sapiens; identical to SEQ ID NO: 252100
  chr3:16542622-16542699
  hypo

SEQ ID NO: 301356 - DNA, 92 bp, Homo sapiens; identical to SEQ ID NO: 198833
  chr3:16555426-16555518
  hypo

SEQ ID NO: 301357 - DNA, 106 bp, Homo sapiens; identical to SEQ ID NO: 280939
  chr3:16925426-16925532
  hypo

SEQ ID NO: 301358 - DNA, 73 bp, Homo sapiens; identical to SEQ ID NO: 280940
  chr3:16925583-16925656
  hypo

SEQ ID NO: 301359 - DNA, 230 bp, Homo sapiens; identical to SEQ ID NO: 280941
  chr3:16925705-16925935
  hypo

SEQ ID NO: 301360 - DNA, 255 bp, Homo sapiens; identical to SEQ ID NO: 280942
  chr3:16925965-16926220
  hypo

SEQ ID NO: 301361 - DNA, 352 bp, Homo sapiens; identical to SEQ ID NO: 280944
  chr3:16926666-16927018
  hypo

SEQ ID NO: 301362 - DNA, 120 bp, Homo sapiens; identical to SEQ ID NO: 252101
  chr3:17101442-17101562
  hypo

SEQ ID NO: 301363 - DNA, 70 bp, Homo sapiens; identical to SEQ ID NO: 252102
  chr3:17560360-17560430
  hypo

SEQ ID NO: 301364 - DNA, 89 bp, Homo sapiens; identical to SEQ ID NO: 252103
  chr3:18427927-18428016
  hypo

SEQ ID NO: 301365 - DNA, 152 bp, Homo sapiens; identical to SEQ ID NO: 208787
  chr3:18452751-18452903
  hypo

SEQ ID NO: 301366 - DNA, 130 bp, Homo sapiens; identical to SEQ ID NO: 208788
  chr3:18462328-18462458
  hypo

SEQ ID NO: 301367 - DNA, 668 bp, Homo sapiens; identical to SEQ ID NO: 280946
  chr3:18485652-18486320
  hypo

SEQ ID NO: 301368 - DNA, 76 bp, Homo sapiens; identical to SEQ ID NO: 252106
  chr3:19276255-19276331
  hypo

SEQ ID NO: 301369 - DNA, 86 bp, Homo sapiens; identical to SEQ ID NO: 208790
  chr3:19790879-19790965
  hypo

SEQ ID NO: 301370 - DNA, 147 bp, Homo sapiens; identical to SEQ ID NO: 252108
  chr3:19992379-19992526
  hypo

SEQ ID NO: 301371 - DNA, 44 bp, Homo sapiens; identical to SEQ ID NO: 208791
  chr3:20070404-20070448
  hypo

SEQ ID NO: 301372 - DNA, 97 bp, Homo sapiens; identical to SEQ ID NO: 208792
  chr3:20071112-20071209
  hypo

SEQ ID NO: 301373 - DNA, 132 bp, Homo sapiens; identical to SEQ ID NO: 252112
  chr3:20113812-20113944
  hypo

SEQ ID NO: 301374 - DNA, 36 bp, Homo sapiens; identical to SEQ ID NO: 252113
  chr3:20120131-20120167
  hypo

SEQ ID NO: 301375 - DNA, 38 bp, Homo sapiens; identical to SEQ ID NO: 252114
  chr3:20630727-20630765
  hypo

SEQ ID NO: 301376 - DNA, 156 bp, Homo sapiens
  chr3:23031955-23032111
  hypo
cactggtgggcctcgcacgccctccactagccggacggggccccgcaaccctgaagaccttgggcggccacgtgtcccacaggtttcagcagcagtggctttgctcagcgggaaagctgggagccaaggtctgtctctggacgctttgaaacaggc

SEQ ID NO: 301377 - DNA, 133 bp, Homo sapiens
  chr3:23032141-23032274
  hypo
tgccagctgtctgtccccagggctgacgcccctcatcccactctgcagccggatgggagagggcactcctgaacatcagtctcacctccccagcgctgtgcgtcctcgggtctgggccgggtactctgccagc

SEQ ID NO: 301378 - DNA, 57 bp, Homo sapiens; identical to SEQ ID NO: 252116
  chr3:23521987-23522044
  hypo

SEQ ID NO: 301379 - DNA, 162 bp, Homo sapiens; identical to SEQ ID NO: 208793
  chr3:23750593-23750755
  hypo

SEQ ID NO: 301380 - DNA, 94 bp, Homo sapiens; identical to SEQ ID NO: 252118
  chr3:23838424-23838518
  hypo

SEQ ID NO: 301381 - DNA, 45 bp, Homo sapiens; identical to SEQ ID NO: 252119
  chr3:23848677-23848722
  hypo

SEQ ID NO: 301382 - DNA, 284 bp, Homo sapiens; identical to SEQ ID NO: 222084
  chr3:23957824-23958108
  hypo

SEQ ID NO: 301383 - DNA, 204 bp, Homo sapiens; identical to SEQ ID NO: 198843
  chr3:23986746-23986950
  hypo

SEQ ID NO: 301384 - DNA, 82 bp, Homo sapiens; identical to SEQ ID NO: 252120
  chr3:24060721-24060803
  hypo

SEQ ID NO: 301385 - DNA, 441 bp, Homo sapiens; identical to SEQ ID NO: 208795
  chr3:24160975-24161416
  hypo

SEQ ID NO: 301386 - DNA, 169 bp, Homo sapiens; identical to SEQ ID NO: 208796
  chr3:24344850-24345019
  hypo

SEQ ID NO: 301387 - DNA, 31 bp, Homo sapiens; identical to SEQ ID NO: 208797
  chr3:24374243-24374274
  hypo

SEQ ID NO: 301388 - DNA, 195 bp, Homo sapiens; identical to SEQ ID NO: 208798
  chr3:24436870-24437065
  hypo

SEQ ID NO: 301389 - DNA, 254 bp, Homo sapiens; identical to SEQ ID NO: 280960
  chr3:24535595-24535849
  hypo

SEQ ID NO: 301390 - DNA, 1364 bp, Homo sapiens; identical to SEQ ID NO: 280961
  chr3:24535988-24537352
  hypo

SEQ ID NO: 301391 - DNA, 654 bp, Homo sapiens; identical to SEQ ID NO: 280962
  chr3:24562965-24563619
  hypo

SEQ ID NO: 301392 - DNA, 41 bp, Homo sapiens; identical to SEQ ID NO: 198847
  chr3:24563737-24563778
  hypo

SEQ ID NO: 301393 - DNA, 178 bp, Homo sapiens; identical to SEQ ID NO: 252125
  chr3:25619924-25620102
  hypo

SEQ ID NO: 301394 - DNA, 303 bp, Homo sapiens; identical to SEQ ID NO: 252126
  chr3:25728357-25728660
  hypo

SEQ ID NO: 301395 - DNA, 100 bp, Homo sapiens; identical to SEQ ID NO: 208804
  chr3:27519021-27519121
  hypo

SEQ ID NO: 301396 - DNA, 36 bp, Homo sapiens; identical to SEQ ID NO: 252128
  chr3:27563872-27563908
  hypo

SEQ ID NO: 301397 - DNA, 35 bp, Homo sapiens; identical to SEQ ID NO: 208805
  chr3:27564148-27564183
  hypo

SEQ ID NO: 301398 - DNA, 37 bp, Homo sapiens; identical to SEQ ID NO: 208806
  chr3:27587341-27587378
  hypo

SEQ ID NO: 301399 - DNA, 32 bp, Homo sapiens; identical to SEQ ID NO: 252131
  chr3:29664780-29664812
  hypo

SEQ ID NO: 301400 - DNA, 36 bp, Homo sapiens; identical to SEQ ID NO: 208807
  chr3:30574870-30574906
  hypo

SEQ ID NO: 301401 - DNA, 261 bp, Homo sapiens; identical to SEQ ID NO: 222091
  chr3:30648804-30649065
  hypo

SEQ ID NO: 301402 - DNA, 174 bp, Homo sapiens; identical to SEQ ID NO: 208808
  chr3:30713673-30713847
  hypo

SEQ ID NO: 301403 - DNA, 51 bp, Homo sapiens; identical to SEQ ID NO: 252134
  chr3:30885631-30885682
  hypo

SEQ ID NO: 301404 - DNA, 136 bp, Homo sapiens; identical to SEQ ID NO: 252135
  chr3:31494141-31494277
  hypo

SEQ ID NO: 301405 - DNA, 37 bp, Homo sapiens; identical to SEQ ID NO: 208809
  chr3:31717147-31717184
  hypo

SEQ ID NO: 301406 - DNA, 139 bp, Homo sapiens; identical to SEQ ID NO: 252137
  chr3:31786601-31786740
  hypo

SEQ ID NO: 301407 - DNA, 182 bp, Homo sapiens; identical to SEQ ID NO: 108045
  chr3:32279558-32279740
  hypo

SEQ ID NO: 301408 - DNA, 565 bp, Homo sapiens; identical to SEQ ID NO: 198866
  chr3:32433047-32433612
  hypo

SEQ ID NO: 301409 - DNA, 200 bp, Homo sapiens; identical to SEQ ID NO: 198867
  chr3:32433665-32433865
  hypo

SEQ ID NO: 301410 - DNA, 82 bp, Homo sapiens; identical to SEQ ID NO: 198868
  chr3:32434068-32434150
  hypo

SEQ ID NO: 301411 - DNA, 329 bp, Homo sapiens; identical to SEQ ID NO: 280998
  chr3:32612447-32612776
  hypo

SEQ ID NO: 301412 - DNA, 273 bp, Homo sapiens; identical to SEQ ID NO: 252139
  chr3:32663085-32663358
  hypo

SEQ ID NO: 301413 - DNA, 41 bp, Homo sapiens; identical to SEQ ID NO: 252140
  chr3:32886051-32886092
  hypo

SEQ ID NO: 301414 - DNA, 145 bp, Homo sapiens; identical to SEQ ID NO: 208814
  chr3:33012238-33012383
  hypo

SEQ ID NO: 301415 - DNA, 284 bp, Homo sapiens; identical to SEQ ID NO: 252142
  chr3:33104315-33104599
  hypo

SEQ ID NO: 301416 - DNA, 341 bp, Homo sapiens; identical to SEQ ID NO: 252143
  chr3:33216332-33216673
  hypo

SEQ ID NO: 301417 - DNA, 120 bp, Homo sapiens; identical to SEQ ID NO: 252144
  chr3:33437663-33437783
  hypo

SEQ ID NO: 301418 - DNA, 137 bp, Homo sapiens; identical to SEQ ID NO: 252145
  chr3:33689109-33689246
  hypo

SEQ ID NO: 301419 - DNA, 180 bp, Homo sapiens; identical to SEQ ID NO: 252146
  chr3:33818924-33819104
  hypo

SEQ ID NO: 301420 - DNA, 223 bp, Homo sapiens; identical to SEQ ID NO: 252149
  chr3:36778835-36779058
  hypo

SEQ ID NO: 301421 - DNA, 138 bp, Homo sapiens; identical to SEQ ID NO: 208816
  chr3:36984240-36984378
  hypo

SEQ ID NO: 301422 - DNA, 41 bp, Homo sapiens; identical to SEQ ID NO: 208817
  chr3:36984642-36984683
  hypo

SEQ ID NO: 301423 - DNA, 254 bp, Homo sapiens; identical to SEQ ID NO: 281011
  chr3:36985557-36985811
  hypo

SEQ ID NO: 301424 - DNA, 1448 bp, Homo sapiens; identical to SEQ ID NO: 198879
  chr3:37033965-37035413
  hypo

SEQ ID NO: 301425 - DNA, 91 bp, Homo sapiens; identical to SEQ ID NO: 222102
  chr3:37038109-37038200
  hypo

SEQ ID NO: 301426 - DNA, 99 bp, Homo sapiens; identical to SEQ ID NO: 222103
  chr3:37042445-37042544
  hypo

SEQ ID NO: 301427 - DNA, 74 bp, Homo sapiens; identical to SEQ ID NO: 222104
  chr3:37045891-37045965
  hypo

SEQ ID NO: 301428 - DNA, 73 bp, Homo sapiens; identical to SEQ ID NO: 222105
  chr3:37048481-37048554
  hypo

SEQ ID NO: 301429 - DNA, 92 bp, Homo sapiens; identical to SEQ ID NO: 222106
  chr3:37050304-37050396
  hypo

SEQ ID NO: 301430 - DNA, 280 bp, Homo sapiens; identical to SEQ ID NO: 222107
  chr3:37053310-37053590
  hypo

SEQ ID NO: 301431 - DNA, 113 bp, Homo sapiens; identical to SEQ ID NO: 222108
  chr3:37055922-37056035
  hypo

SEQ ID NO: 301432 - DNA, 94 bp, Homo sapiens; identical to SEQ ID NO: 222109
  chr3:37058996-37059090
  hypo

SEQ ID NO: 301433 - DNA, 154 bp, Homo sapiens; identical to SEQ ID NO: 222110
  chr3:37061800-37061954
  hypo

SEQ ID NO: 301434 - DNA, 371 bp, Homo sapiens; identical to SEQ ID NO: 222111
  chr3:37067127-37067498
  hypo

SEQ ID NO: 301435 - DNA, 149 bp, Homo sapiens; identical to SEQ ID NO: 222112
  chr3:37070274-37070423
  hypo

SEQ ID NO: 301436 - DNA, 109 bp, Homo sapiens; identical to SEQ ID NO: 222113
  chr3:37081676-37081785
  hypo

SEQ ID NO: 301437 - DNA, 64 bp, Homo sapiens; identical to SEQ ID NO: 222114
  chr3:37083758-37083822
  hypo

SEQ ID NO: 301438 - DNA, 165 bp, Homo sapiens; identical to SEQ ID NO: 222115
  chr3:37089009-37089174
  hypo

SEQ ID NO: 301439 - DNA, 93 bp, Homo sapiens; identical to SEQ ID NO: 222116
  chr3:37090007-37090100
  hypo

SEQ ID NO: 301440 - DNA, 114 bp, Homo sapiens; identical to SEQ ID NO: 222117
  chr3:37090394-37090508
  hypo

SEQ ID NO: 301441 - DNA, 361 bp, Homo sapiens; identical to SEQ ID NO: 222118
  chr3:37091976-37092337
  hypo

SEQ ID NO: 301442 - DNA, 137 bp, Homo sapiens; identical to SEQ ID NO: 252152
  chr3:37144393-37144530
  hypo

SEQ ID NO: 301443 - DNA, 38 bp, Homo sapiens; identical to SEQ ID NO: 252153
  chr3:37214389-37214427
  hypo

SEQ ID NO: 301444 - DNA, 135 bp, Homo sapiens; identical to SEQ ID NO: 252154
  chr3:37438335-37438470
  hypo

SEQ ID NO: 301445 - DNA, 146 bp, Homo sapiens; identical to SEQ ID NO: 252155
  chr3:37649401-37649547
  hypo

SEQ ID NO: 301446 - DNA, 61 bp, Homo sapiens; identical to SEQ ID NO: 252156
  chr3:37774454-37774515
  hypo

SEQ ID NO: 301447 - DNA, 162 bp, Homo sapiens; identical to SEQ ID NO: 208820
  chr3:38017265-38017427
  hypo

SEQ ID NO: 301448 - DNA, 128 bp, Homo sapiens
  chr3:38030490-38030618
  hypo
ggctactgtggtaggatggtcgtagcggccaggcagacccagagacacagagggaggctggctccggagcaggcaggaggcgtgagagggagggccaggcccaggatccaccatgaaccagctgccga

SEQ ID NO: 301449 - DNA, 90 bp, Homo sapiens; identical to SEQ ID NO: 208822
  chr3:38030782-38030872
  hypo

SEQ ID NO: 301450 - DNA, 539 bp, Homo sapiens; identical to SEQ ID NO: 252160
  chr3:38033410-38033949
  hypo

SEQ ID NO: 301451 - DNA, 176 bp, Homo sapiens; identical to SEQ ID NO: 252161
  chr3:38051945-38052121
  hypo

SEQ ID NO: 301452 - DNA, 129 bp, Homo sapiens; identical to SEQ ID NO: 198883
  chr3:38182655-38182784
  hypo

SEQ ID NO: 301453 - DNA, 123 bp, Homo sapiens; identical to SEQ ID NO: 252162
  chr3:38217259-38217382
  hypo

SEQ ID NO: 301454 - DNA, 143 bp, Homo sapiens; identical to SEQ ID NO: 252163
  chr3:38323910-38324053
  hypo

SEQ ID NO: 301455 - DNA, 100 bp, Homo sapiens; identical to SEQ ID NO: 252164
  chr3:38413411-38413511
  hypo

SEQ ID NO: 301456 - DNA, 40 bp, Homo sapiens; identical to SEQ ID NO: 252165
  chr3:38413541-38413581
  hypo

SEQ ID NO: 301457 - DNA, 78 bp, Homo sapiens; identical to SEQ ID NO: 198884
  chr3:38495097-38495175
  hypo

SEQ ID NO: 301458 - DNA, 52 bp, Homo sapiens; identical to SEQ ID NO: 39102
  chr3:38495213-38495265
  hypo

SEQ ID NO: 301459 - DNA, 101 bp, Homo sapiens; identical to SEQ ID NO: 198886
  chr3:38495679-38495780
  hypo

SEQ ID NO: 301460 - DNA, 1234 bp, Homo sapiens; identical to SEQ ID NO: 198887
  chr3:38496021-38497255
  hypo

SEQ ID NO: 301461 - DNA, 177 bp, Homo sapiens; identical to SEQ ID NO: 252166
  chr3:38674620-38674797
  hypo

SEQ ID NO: 301462 - DNA, 91 bp, Homo sapiens; identical to SEQ ID NO: 252167
  chr3:38755471-38755562
  hypo

SEQ ID NO: 301463 - DNA, 57 bp, Homo sapiens; identical to SEQ ID NO: 252168
  chr3:38984804-38984861
  hypo

SEQ ID NO: 301464 - DNA, 277 bp, Homo sapiens; identical to SEQ ID NO: 222128
  chr3:39148232-39148509
  hypo

SEQ ID NO: 301465 - DNA, 246 bp, Homo sapiens; identical to SEQ ID NO: 252169
  chr3:39185651-39185897
  hypo

SEQ ID NO: 301466 - DNA, 106 bp, Homo sapiens; identical to SEQ ID NO: 208830
  chr3:39234910-39235016
  hypo

SEQ ID NO: 301467 - DNA, 45 bp, Homo sapiens; identical to SEQ ID NO: 208831
  chr3:40172135-40172180
  hypo

SEQ ID NO: 301468 - DNA, 68 bp, Homo sapiens; identical to SEQ ID NO: 208832
  chr3:40231758-40231826
  hypo

SEQ ID NO: 301469 - DNA, 104 bp, Homo sapiens; identical to SEQ ID NO: 252173
  chr3:40374174-40374278
  hypo

SEQ ID NO: 301470 - DNA, 381 bp, Homo sapiens; identical to SEQ ID NO: 252174
  chr3:40429457-40429838
  hypo

SEQ ID NO: 301471 - DNA, 153 bp, Homo sapiens; identical to SEQ ID NO: 208834
  chr3:40510132-40510285
  hypo

SEQ ID NO: 301472 - DNA, 190 bp, Homo sapiens; identical to SEQ ID NO: 208835
  chr3:41119485-41119675
  hypo

SEQ ID NO: 301473 - DNA, 182 bp, Homo sapiens; identical to SEQ ID NO: 222129
  chr3:41240161-41240343
  hypo

SEQ ID NO: 301474 - DNA, 171 bp, Homo sapiens; identical to SEQ ID NO: 252177
  chr3:41283296-41283467
  hypo

SEQ ID NO: 301475 - DNA, 150 bp, Homo sapiens; identical to SEQ ID NO: 208836
  chr3:41289199-41289349
  hypo

SEQ ID NO: 301476 - DNA, 42 bp, Homo sapiens; identical to SEQ ID NO: 252179
  chr3:42159859-42159901
  hypo

SEQ ID NO: 301477 - DNA, 270 bp, Homo sapiens; identical to SEQ ID NO: 208837
  chr3:42190936-42191206
  hypo

SEQ ID NO: 301478 - DNA, 251 bp, Homo sapiens; identical to SEQ ID NO: 252181
  chr3:42207053-42207304
  hypo

SEQ ID NO: 301479 - DNA, 113 bp, Homo sapiens
  chr3:42222606-42222719
  hypo
ctgttggtttctggccgtttgtgtgctggaagccttccgcatccttcaggtgctctggcagtcccttgccatgcctgagccatcttcattattatgctgtgtgcttgatttgt

SEQ ID NO: 301480 - DNA, 96 bp, Homo sapiens; identical to SEQ ID NO: 252183
  chr3:42223003-42223099
  hypo

SEQ ID NO: 301481 - DNA, 133 bp, Homo sapiens; identical to SEQ ID NO: 252184
  chr3:42243987-42244120
  hypo

SEQ ID NO: 301482 - DNA, 62 bp, Homo sapiens; identical to SEQ ID NO: 252185
  chr3:42249920-42249982
  hypo

SEQ ID NO: 301483 - DNA, 88 bp, Homo sapiens; identical to SEQ ID NO: 252186
  chr3:42268588-42268676
  hypo

SEQ ID NO: 301484 - DNA, 37 bp, Homo sapiens; identical to SEQ ID NO: 252187
  chr3:42569053-42569090
  hypo

SEQ ID NO: 301485 - DNA, 104 bp, Homo sapiens; identical to SEQ ID NO: 208838
  chr3:42577666-42577770
  hypo

SEQ ID NO: 301486 - DNA, 87 bp, Homo sapiens; identical to SEQ ID NO: 252189
  chr3:42630386-42630473
  hypo

SEQ ID NO: 301487 - DNA, 39 bp, Homo sapiens; identical to SEQ ID NO: 208839
  chr3:42659548-42659587
  hypo

SEQ ID NO: 301488 - DNA, 382 bp, Homo sapiens; identical to SEQ ID NO: 198897
  chr3:42696177-42696559
  hypo

SEQ ID NO: 301489 - DNA, 71 bp, Homo sapiens; identical to SEQ ID NO: 252192
  chr3:42815889-42815960
  hypo

SEQ ID NO: 301490 - DNA, 71 bp, Homo sapiens
  chr3:42851033-42851104
  hypo
tttctttatggccaattcttagacaaaaagtaggggaagcggttgggcacagtggctcacgcctgtaatcc

SEQ ID NO: 301491 - DNA, 45 bp, Homo sapiens; identical to SEQ ID NO: 252194
  chr3:42860055-42860100
  hypo

SEQ ID NO: 301492 - DNA, 283 bp, Homo sapiens; identical to SEQ ID NO: 252195
  chr3:42905954-42906237
  hypo

SEQ ID NO: 301493 - DNA, 73 bp, Homo sapiens; identical to SEQ ID NO: 208841
  chr3:42906566-42906639
  hypo

SEQ ID NO: 301494 - DNA, 44 bp, Homo sapiens; identical to SEQ ID NO: 208842
  chr3:43075000-43075044
  hypo

SEQ ID NO: 301495 - DNA, 99 bp, Homo sapiens; identical to SEQ ID NO: 252198
  chr3:43121444-43121543
  hypo

SEQ ID NO: 301496 - DNA, 110 bp, Homo sapiens; identical to SEQ ID NO: 208844
  chr3:43121573-43121683
  hypo

SEQ ID NO: 301497 - DNA, 257 bp, Homo sapiens; identical to SEQ ID NO: 198901
  chr3:43147024-43147281
  hypo

SEQ ID NO: 301498 - DNA, 120 bp, Homo sapiens; identical to SEQ ID NO: 198902
  chr3:43147607-43147727
  hypo

SEQ ID NO: 301499 - DNA, 163 bp, Homo sapiens; identical to SEQ ID NO: 208847
  chr3:43655492-43655655
  hypo

SEQ ID NO: 301500 - DNA, 214 bp, Homo sapiens; identical to SEQ ID NO: 198903
  chr3:43663334-43663548
  hypo

SEQ ID NO: 301501 - DNA, 34 bp, Homo sapiens; identical to SEQ ID NO: 252201
  chr3:44237214-44237248
  hypo

SEQ ID NO: 301502 - DNA, 384 bp, Homo sapiens; identical to SEQ ID NO: 252202
  chr3:44283269-44283653
  hypo

SEQ ID NO: 301503 - DNA, 50 bp, Homo sapiens; identical to SEQ ID NO: 198908
  chr3:44379864-44379914
  hypo

SEQ ID NO: 301504 - DNA, 153 bp, Homo sapiens; identical to SEQ ID NO: 252203
  chr3:44461798-44461951
  hypo

SEQ ID NO: 301505 - DNA, 232 bp, Homo sapiens; identical to SEQ ID NO: 281089
  chr3:44518642-44518874
  hypo

SEQ ID NO: 301506 - DNA, 291 bp, Homo sapiens; identical to SEQ ID NO: 252204
  chr3:44752300-44752591
  hypo

SEQ ID NO: 301507 - DNA, 805 bp, Homo sapiens; identical to SEQ ID NO: 222139
  chr3:44802848-44803653
  hypo

SEQ ID NO: 301508 - DNA, 37 bp, Homo sapiens; identical to SEQ ID NO: 252205
  chr3:44807340-44807377
  hypo

SEQ ID NO: 301509 - DNA, 37 bp, Homo sapiens; identical to SEQ ID NO: 208852
  chr3:44808574-44808611
  hypo

SEQ ID NO: 301510 - DNA, 210 bp, Homo sapiens; identical to SEQ ID NO: 208853
  chr3:44816761-44816971
  hypo

SEQ ID NO: 301511 - DNA, 76 bp, Homo sapiens; identical to SEQ ID NO: 208854
  chr3:44882438-44882514
  hypo

SEQ ID NO: 301512 - DNA, 260 bp, Homo sapiens; identical to SEQ ID NO: 208855
  chr3:44945261-44945521
  hypo

SEQ ID NO: 301513 - DNA, 152 bp, Homo sapiens
  chr3:45000029-45000181
  hypo
ttagctaagtcattgagcagaacactactgctttacccacagatattcaccaagaggcacttgctgcggcctgaaacaggcttgtccagcttttcaggaaaagatgcacctcgcccaagcaaagtgaaggccatttccgtgcaggttcctgg

SEQ ID NO: 301514 - DNA, 36 bp, Homo sapiens; identical to SEQ ID NO: 252211
  chr3:45541767-45541803
  hypo

SEQ ID NO: 301515 - DNA, 91 bp, Homo sapiens; identical to SEQ ID NO: 252212
  chr3:45684621-45684712
  hypo

SEQ ID NO: 301516 - DNA, 296 bp, Homo sapiens; identical to SEQ ID NO: 208856
  chr3:45719314-45719610
  hypo

SEQ ID NO: 301517 - DNA, 139 bp, Homo sapiens; identical to SEQ ID NO: 252214
  chr3:45750558-45750697
  hypo

SEQ ID NO: 301518 - DNA, 43 bp, Homo sapiens; identical to SEQ ID NO: 208857
  chr3:45968554-45968597
  hypo

SEQ ID NO: 301519 - DNA, 42 bp, Homo sapiens; identical to SEQ ID NO: 208858
  chr3:45968717-45968759
  hypo

SEQ ID NO: 301520 - DNA, 410 bp, Homo sapiens
  chr3:46009336-46009746
  hypo
gctgttttttctcccgcctcaactctgctagctcctcctcccaggagctcgtgtgggccagcaactcctgcagccgtcgccagagctggtctgcctcctgtcccttcccagacaactcctcctggagtggggccatctccttcaccaggcgctccaggctggcccgggcatcctctttcagctgaagctccttgaccagctgttccagttgggcactctgctgtctgttgacctcctcgaccttggttctctccctttctagggcttgaagcttctcccctagctcctgcatctcctgggccgcatcactgggaataggttcttgccggccctttgtgtctgatgccgtatctgccttctgctgagccatggctagccagcctgggaagctggctaaatgctggtttttc

SEQ ID NO: 301521 - DNA, 330 bp, Homo sapiens
  chr3:46009776-46010106
  hypo
tcctgtgccaagggctgcagcatggactccagccgccgcagggctgtgtggtagtcctcctccttctctgctgctcctagctccaggccctgcaggcatgtctgcagctccttcacagtgttctgggtggcctgggtgacctcccactgcttctggagctcagctaccaagcaagtgaggcgaacgttgtcctccgctgcagtgcgccccctctccctctctgtctgcagttgctccccttgctggctgacagctgccctcagctcctggttctctctgtccagctgctgcatgcgctcccgtagctgcttctcccgcacctccaactgg

SEQ ID NO: 301522 - DNA, 86 bp, Homo sapiens; identical to SEQ ID NO: 252218
  chr3:46020639-46020725
  hypo

SEQ ID NO: 301523 - DNA, 226 bp, Homo sapiens; identical to SEQ ID NO: 252219
  chr3:46230413-46230639
  hypo

SEQ ID NO: 301524 - DNA, 76 bp, Homo sapiens
  chr3:46245385-46245461
  hypo
aacacggcgtggacgatggccaggtacctgtcaatcgtcagcaggatgatgaaaaagatctcgctgtacaagcctg

SEQ ID NO: 301525 - DNA, 102 bp, Homo sapiens; identical to SEQ ID NO: 252221
  chr3:46586214-46586316
  hypo

SEQ ID NO: 301526 - DNA, 36 bp, Homo sapiens; identical to SEQ ID NO: 252222
  chr3:46769541-46769577
  hypo

SEQ ID NO: 301527 - DNA, 35 bp, Homo sapiens; identical to SEQ ID NO: 252223
  chr3:46769817-46769852
  hypo

SEQ ID NO: 301528 - DNA, 54 bp, Homo sapiens; identical to SEQ ID NO: 252224
  chr3:46775530-46775584
  hypo

SEQ ID NO: 301529 - DNA, 352 bp, Homo sapiens; identical to SEQ ID NO: 252225
  chr3:46874965-46875317
  hypo

SEQ ID NO: 301530 - DNA, 195 bp, Homo sapiens; identical to SEQ ID NO: 208859
  chr3:46943639-46943834
  hypo

SEQ ID NO: 301531 - DNA, 182 bp, Homo sapiens; identical to SEQ ID NO: 252227
  chr3:46944572-46944754
  hypo

SEQ ID NO: 301532 - DNA, 31 bp, Homo sapiens; identical to SEQ ID NO: 208860
  chr3:46985694-46985725
  hypo

SEQ ID NO: 301533 - DNA, 159 bp, Homo sapiens; identical to SEQ ID NO: 208861
  chr3:46985755-46985914
  hypo

SEQ ID NO: 301534 - DNA, 38 bp, Homo sapiens; identical to SEQ ID NO: 208862
  chr3:47007698-47007736
  hypo

SEQ ID NO: 301535 - DNA, 199 bp, Homo sapiens; identical to SEQ ID NO: 252231
  chr3:47043982-47044181
  hypo

SEQ ID NO: 301536 - DNA, 78 bp, Homo sapiens; identical to SEQ ID NO: 222142
  chr3:47050739-47050817
  hypo

SEQ ID NO: 301537 - DNA, 80 bp, Homo sapiens; identical to SEQ ID NO: 108238
  chr3:47051151-47051231
  hypo

SEQ ID NO: 301538 - DNA, 36 bp, Homo sapiens; identical to SEQ ID NO: 252232
  chr3:47185204-47185240
  hypo

SEQ ID NO: 301539 - DNA, 36 bp, Homo sapiens; identical to SEQ ID NO: 252233
  chr3:47185480-47185516
  hypo

SEQ ID NO: 301540 - DNA, 92 bp, Homo sapiens; identical to SEQ ID NO: 252234
  chr3:47239322-47239414
  hypo

SEQ ID NO: 301541 - DNA, 32 bp, Homo sapiens; identical to SEQ ID NO: 252235
  chr3:47240137-47240169
  hypo

SEQ ID NO: 301542 - DNA, 120 bp, Homo sapiens; identical to SEQ ID NO: 252236
  chr3:47370605-47370725
  hypo

SEQ ID NO: 301543 - DNA, 138 bp, Homo sapiens; identical to SEQ ID NO: 252237
  chr3:47373436-47373574
  hypo

SEQ ID NO: 301544 - DNA, 96 bp, Homo sapiens; identical to SEQ ID NO: 252238
  chr3:47677842-47677938
  hypo

SEQ ID NO: 301545 - DNA, 81 bp, Homo sapiens; identical to SEQ ID NO: 208863
  chr3:47889946-47890027
  hypo

SEQ ID NO: 301546 - DNA, 581 bp, Homo sapiens; identical to SEQ ID NO: 281120
  chr3:47890801-47891382
  hypo

SEQ ID NO: 301547 - DNA, 89 bp, Homo sapiens; identical to SEQ ID NO: 252241
  chr3:48053067-48053156
  hypo

SEQ ID NO: 301548 - DNA, 168 bp, Homo sapiens; identical to SEQ ID NO: 208865
  chr3:48263634-48263802
  hypo

SEQ ID NO: 301549 - DNA, 32 bp, Homo sapiens; identical to SEQ ID NO: 208866
  chr3:48275732-48275764
  hypo

SEQ ID NO: 301550 - DNA, 35 bp, Homo sapiens; identical to SEQ ID NO: 252245
  chr3:48316727-48316762
  hypo

SEQ ID NO: 301551 - DNA, 76 bp, Homo sapiens; identical to SEQ ID NO: 252246
  chr3:48456672-48456748
  hypo

SEQ ID NO: 301552 - DNA, 257 bp, Homo sapiens; identical to SEQ ID NO: 252247
  chr3:48459418-48459675
  hypo

SEQ ID NO: 301553 - DNA, 70 bp, Homo sapiens; identical to SEQ ID NO: 252248
  chr3:48461257-48461327
  hypo

SEQ ID NO: 301554 - DNA, 296 bp, Homo sapiens; identical to SEQ ID NO: 208868
  chr3:48474263-48474559
  hypo

SEQ ID NO: 301555 - DNA, 187 bp, Homo sapiens; identical to SEQ ID NO: 252250
  chr3:48506154-48506341
  hypo

SEQ ID NO: 301556 - DNA, 84 bp, Homo sapiens; identical to SEQ ID NO: 208869
  chr3:48563029-48563113
  hypo

SEQ ID NO: 301557 - DNA, 132 bp, Homo sapiens; identical to SEQ ID NO: 252252
  chr3:48575984-48576116
  hypo

SEQ ID NO: 301558 - DNA, 39 bp, Homo sapiens; identical to SEQ ID NO: 208870
  chr3:48607711-48607750
  hypo

SEQ ID NO: 301559 - DNA, 106 bp, Homo sapiens; identical to SEQ ID NO: 252254
  chr3:48636553-48636659
  hypo

SEQ ID NO: 301560 - DNA, 76 bp, Homo sapiens; identical to SEQ ID NO: 252255
  chr3:48659179-48659255
  hypo

SEQ ID NO: 301561 - DNA, 33 bp, Homo sapiens; identical to SEQ ID NO: 208871
  chr3:48698431-48698464
  hypo

SEQ ID NO: 301562 - DNA, 257 bp, Homo sapiens; identical to SEQ ID NO: 198926
  chr3:48700956-48701213
  hypo

SEQ ID NO: 301563 - DNA, 40 bp, Homo sapiens; identical to SEQ ID NO: 252257
  chr3:48702183-48702223
  hypo

SEQ ID NO: 301564 - DNA, 164 bp, Homo sapiens; identical to SEQ ID NO: 252258
  chr3:48703692-48703856
  hypo

SEQ ID NO: 301565 - DNA, 129 bp, Homo sapiens; identical to SEQ ID NO: 208874
  chr3:48731397-48731526
  hypo

SEQ ID NO: 301566 - DNA, 73 bp, Homo sapiens
  chr3:48732603-48732676
  hypo
acagggttgtctcattgaagcggagcacgcatgagtgccccccgacctggtggacaaagggctccagaaggac

SEQ ID NO: 301567 - DNA, 35 bp, Homo sapiens; identical to SEQ ID NO: 208875
  chr3:48733584-48733619
  hypo

SEQ ID NO: 301568 - DNA, 31 bp, Homo sapiens; identical to SEQ ID NO: 252262
  chr3:48752182-48752213
  hypo

SEQ ID NO: 301569 - DNA, 39 bp, Homo sapiens; identical to SEQ ID NO: 252263
  chr3:48797086-48797125
  hypo

SEQ ID NO: 301570 - DNA, 34 bp, Homo sapiens; identical to SEQ ID NO: 252264
  chr3:48948535-48948569
  hypo

SEQ ID NO: 301571 - DNA, 120 bp, Homo sapiens; identical to SEQ ID NO: 252265
  chr3:48954852-48954972
  hypo

SEQ ID NO: 301572 - DNA, 33 bp, Homo sapiens; identical to SEQ ID NO: 252266
  chr3:48978307-48978340
  hypo

SEQ ID NO: 301573 - DNA, 31 bp, Homo sapiens; identical to SEQ ID NO: 208876
  chr3:48986829-48986860
  hypo

SEQ ID NO: 301574 - DNA, 120 bp, Homo sapiens; identical to SEQ ID NO: 252268
  chr3:49014624-49014744
  hypo

SEQ ID NO: 301575 - DNA, 85 bp, Homo sapiens; identical to SEQ ID NO: 208877
  chr3:49023684-49023769
  hypo

SEQ ID NO: 301576 - DNA, 33 bp, Homo sapiens; identical to SEQ ID NO: 208878
  chr3:49034171-49034204
  hypo

SEQ ID NO: 301577 - DNA, 323 bp, Homo sapiens; identical to SEQ ID NO: 208879
  chr3:49035605-49035928
  hypo

SEQ ID NO: 301578 - DNA, 42 bp, Homo sapiens; identical to SEQ ID NO: 208880
  chr3:49080008-49080050
  hypo

SEQ ID NO: 301579 - DNA, 180 bp, Homo sapiens; identical to SEQ ID NO: 208881
  chr3:49095131-49095311
  hypo

SEQ ID NO: 301580 - DNA, 31 bp, Homo sapiens; identical to SEQ ID NO: 252274
  chr3:49142764-49142795
  hypo

SEQ ID NO: 301581 - DNA, 32 bp, Homo sapiens; identical to SEQ ID NO: 208882
  chr3:49145906-49145938
  hypo

SEQ ID NO: 301582 - DNA, 31 bp, Homo sapiens; identical to SEQ ID NO: 208883
  chr3:49433706-49433737
  hypo

SEQ ID NO: 301583 - DNA, 32 bp, Homo sapiens; identical to SEQ ID NO: 252277
  chr3:49522230-49522262
  hypo

SEQ ID NO: 301584 - DNA, 36 bp, Homo sapiens; identical to SEQ ID NO: 208884
  chr3:49532336-49532372
  hypo

SEQ ID NO: 301585 - DNA, 368 bp, Homo sapiens; identical to SEQ ID NO: 281158
  chr3:49592076-49592444
  hypo

SEQ ID NO: 301586 - DNA, 97 bp, Homo sapiens; identical to SEQ ID NO: 252279
  chr3:49636112-49636209
  hypo

SEQ ID NO: 301587 - DNA, 126 bp, Homo sapiens; identical to SEQ ID NO: 252280
  chr3:49662399-49662525
  hypo

SEQ ID NO: 301588 - DNA, 181 bp, Homo sapiens; identical to SEQ ID NO: 208885
  chr3:49688341-49688522
  hypo

SEQ ID NO: 301589 - DNA, 117 bp, Homo sapiens; identical to SEQ ID NO: 208886
  chr3:49690065-49690182
  hypo

SEQ ID NO: 301590 - DNA, 57 bp, Homo sapiens; identical to SEQ ID NO: 208887
  chr3:49690212-49690269
  hypo

SEQ ID NO: 301591 - DNA, 57 bp, Homo sapiens; identical to SEQ ID NO: 252284
  chr3:49698935-49698992
  hypo

SEQ ID NO: 301592 - DNA, 210 bp, Homo sapiens; identical to SEQ ID NO: 252285
  chr3:49699563-49699773
  hypo

SEQ ID NO: 301593 - DNA, 569 bp, Homo sapiens; identical to SEQ ID NO: 208889
  chr3:49720264-49720833
  hypo

SEQ ID NO: 301594 - DNA, 159 bp, Homo sapiens
  chr3:49723051-49723210
  hypo
tcgaatggggtccttgggtccatcgtgtagcaccagggcccatggctatccccatctgggttccggcagaagttctcctccagttgtgcatgcggttcggaggtaaacgtgaacctaggcggaagcgggagcaaaatcgtggcagggtagtctcaacca

SEQ ID NO: 301595 - DNA, 33 bp, Homo sapiens
  chr3:49755502-49755535
  hypo
cattgaggcccctccggcctggctccagaaaga

SEQ ID NO: 301596 - DNA, 247 bp, Homo sapiens
  chr3:49755593-49755840
  hypo
tactgaggactgtgcgctcagctcttggagcgggctgggtgtttggggccagcggcggcagcggcaggcacggcggcagcagcggcagggtggggcgaacaggtagagcagcacgagcacaaggcccacggcacagcccagcagtgtggtgaagcctgtgttgaaagcctcgggctctgggcgcggaaagtgcacgctcacgttgtactcgtgcgtctggttgtggtgcaggcggggcccagtggcc

SEQ ID NO: 301597 - DNA, 253 bp, Homo sapiens; identical to SEQ ID NO: 281163
  chr3:49906717-49906970
  hypo

SEQ ID NO: 301598 - DNA, 54 bp, Homo sapiens; identical to SEQ ID NO: 281164
  chr3:49907379-49907433
  hypo

SEQ ID NO: 301599 - DNA, 233 bp, Homo sapiens; identical to SEQ ID NO: 208890
  chr3:49940594-49940827
  hypo

SEQ ID NO: 301600 - DNA, 226 bp, Homo sapiens; identical to SEQ ID NO: 208891
  chr3:49948218-49948444
  hypo

SEQ ID NO: 301601 - DNA, 100 bp, Homo sapiens; identical to SEQ ID NO: 252293
  chr3:50140300-50140400
  hypo

SEQ ID NO: 301602 - DNA, 159 bp, Homo sapiens; identical to SEQ ID NO: 252294
  chr3:50144933-50145092
  hypo

SEQ ID NO: 301603 - DNA, 39 bp, Homo sapiens; identical to SEQ ID NO: 252295
  chr3:50145392-50145431
  hypo

SEQ ID NO: 301604 - DNA, 114 bp, Homo sapiens; identical to SEQ ID NO: 198941
  chr3:50192966-50193080
  hypo

SEQ ID NO: 301605 - DNA, 42 bp, Homo sapiens; identical to SEQ ID NO: 252296
  chr3:50210490-50210532
  hypo

SEQ ID NO: 301606 - DNA, 126 bp, Homo sapiens; identical to SEQ ID NO: 252297
  chr3:50214171-50214297
  hypo

SEQ ID NO: 301607 - DNA, 57 bp, Homo sapiens; identical to SEQ ID NO: 208893
  chr3:50224043-50224100
  hypo

SEQ ID NO: 301608 - DNA, 48 bp, Homo sapiens; identical to SEQ ID NO: 252299
  chr3:50225313-50225361
  hypo

SEQ ID NO: 301609 - DNA, 458 bp, Homo sapiens; identical to SEQ ID NO: 252300
  chr3:50255800-50256258
  hypo

SEQ ID NO: 301610 - DNA, 365 bp, Homo sapiens; identical to SEQ ID NO: 198943
  chr3:50374290-50374655
  hypo

SEQ ID NO: 301611 - DNA, 57 bp, Homo sapiens; identical to SEQ ID NO: 252301
  chr3:50395835-50395892
  hypo

SEQ ID NO: 301612 - DNA, 133 bp, Homo sapiens; identical to SEQ ID NO: 252302
  chr3:50404009-50404142
  hypo

SEQ ID NO: 301613 - DNA, 40 bp, Homo sapiens; identical to SEQ ID NO: 252303
  chr3:50420382-50420422
  hypo

SEQ ID NO: 301614 - DNA, 53 bp, Homo sapiens; identical to SEQ ID NO: 252305
  chr3:50523258-50523311
  hypo

SEQ ID NO: 301615 - DNA, 31 bp, Homo sapiens
  chr3:50575571-50575602
  hypo
cggtatgtggtattcggtgcatggtattgtt

SEQ ID NO: 301616 - DNA, 84 bp, Homo sapiens; identical to SEQ ID NO: 252307
  chr3:50605776-50605860
  hypo

SEQ ID NO: 301617 - DNA, 38 bp, Homo sapiens; identical to SEQ ID NO: 252308
  chr3:51617714-51617752
  hypo

SEQ ID NO: 301618 - DNA, 86 bp, Homo sapiens; identical to SEQ ID NO: 252309
  chr3:51623969-51624055
  hypo

SEQ ID NO: 301619 - DNA, 37 bp, Homo sapiens; identical to SEQ ID NO: 252310
  chr3:51660728-51660765
  hypo

SEQ ID NO: 301620 - DNA, 119 bp, Homo sapiens; identical to SEQ ID NO: 252311
  chr3:51680379-51680498
  hypo

SEQ ID NO: 301621 - DNA, 107 bp, Homo sapiens; identical to SEQ ID NO: 252312
  chr3:51737837-51737944
  hypo

SEQ ID NO: 301622 - DNA, 241 bp, Homo sapiens; identical to SEQ ID NO: 252313
  chr3:51743195-51743436
  hypo

SEQ ID NO: 301623 - DNA, 175 bp, Homo sapiens; identical to SEQ ID NO: 252314
  chr3:51749174-51749349
  hypo

SEQ ID NO: 301624 - DNA, 206 bp, Homo sapiens; identical to SEQ ID NO: 252315
  chr3:51749768-51749974
  hypo

SEQ ID NO: 301625 - DNA, 150 bp, Homo sapiens; identical to SEQ ID NO: 281184
  chr3:51990500-51990650
  hypo

SEQ ID NO: 301626 - DNA, 66 bp, Homo sapiens; identical to SEQ ID NO: 208896
  chr3:51996783-51996849
  hypo

SEQ ID NO: 301627 - DNA, 195 bp, Homo sapiens; identical to SEQ ID NO: 198950
  chr3:52001297-52001492
  hypo

SEQ ID NO: 301628 - DNA, 485 bp, Homo sapiens; identical to SEQ ID NO: 281189
  chr3:52009693-52010178
  hypo

SEQ ID NO: 301629 - DNA, 166 bp, Homo sapiens; identical to SEQ ID NO: 208898
  chr3:52088124-52088290
  hypo

SEQ ID NO: 301630 - DNA, 202 bp, Homo sapiens; identical to SEQ ID NO: 252318
  chr3:52255938-52256140
  hypo

SEQ ID NO: 301631 - DNA, 115 bp, Homo sapiens; identical to SEQ ID NO: 252319
  chr3:52256498-52256613
  hypo

SEQ ID NO: 301632 - DNA, 282 bp, Homo sapiens; identical to SEQ ID NO: 208899
  chr3:52257379-52257661
  hypo

SEQ ID NO: 301633 - DNA, 133 bp, Homo sapiens; identical to SEQ ID NO: 252321
  chr3:52258190-52258323
  hypo

SEQ ID NO: 301634 - DNA, 90 bp, Homo sapiens
  chr3:52415740-52415830
  hypo
tgagccacatctgtcgcatcagccgcaccctacgccaggcgctgggcaatgcactcctgctgggcgtgggtggcagcggccgcagctccc

SEQ ID NO: 301635 - DNA, 36 bp, Homo sapiens; identical to SEQ ID NO: 208900
  chr3:52440357-52440393
  hypo

SEQ ID NO: 301636 - DNA, 249 bp, Homo sapiens; identical to SEQ ID NO: 252324
  chr3:52440846-52441095
  hypo

SEQ ID NO: 301637 - DNA, 286 bp, Homo sapiens; identical to SEQ ID NO: 252325
  chr3:52526249-52526535
  hypo

SEQ ID NO: 301638 - DNA, 303 bp, Homo sapiens; identical to SEQ ID NO: 252326
  chr3:52537789-52538092
  hypo

SEQ ID NO: 301639 - DNA, 422 bp, Homo sapiens; identical to SEQ ID NO: 252327
  chr3:52540175-52540597
  hypo

SEQ ID NO: 301640 - DNA, 471 bp, Homo sapiens
  chr3:52552661-52553132
  hypo
ctgggtgctctggtggtggccctgcgtgggctgaggcggcagtcagggaccccactcccctcgcgactctgctccaggatgagctggcccggattcgtgcgcatcgccagctggtgtttcgctaccacgtggttggctgtcggcggctgcggagcgaggacctgctggagcaggggtacgccacggccctctcagggcacccactgcgcttcagcgagagggaggtgagccctggccctggcctgccccgctccatcccgccccgccccgcccctgcgcgccattgccccaggccccacggcccacgcagtcaagaaccccacctcccctagccagggggcgcctcctgctgagtccagcccgggactccgcccttgacctgggcctcgcccactgctgtgggcctgtcctgcccagcgcccttgtgtccttccgaggactgagccccgccccctgccctgactccgcccc

SEQ ID NO: 301641 - DNA, 45 bp, Homo sapiens
  chr3:52553162-52553207
  hypo
gaaccgggactgcctgcaccctgacttgcccaacccaggttcaac

SEQ ID NO: 301642 - DNA, 53 bp, Homo sapiens; identical to SEQ ID NO: 208905
  chr3:52553499-52553552
  hypo

SEQ ID NO: 301643 - DNA, 113 bp, Homo sapiens; identical to SEQ ID NO: 252330
  chr3:52556286-52556399
  hypo

SEQ ID NO: 301644 - DNA, 59 bp, Homo sapiens
  chr3:52558899-52558958
  hypo
ggggacacaaagtgtgcattgggtgtgtgcacccaggaggctaccgccctggccctccc

SEQ ID NO: 301645 - DNA, 132 bp, Homo sapiens
  chr3:52568498-52568630
  hypo
acggtcactgcgcccgcttggttcggacctcggcaactggccgcactgacccgtcaactcccggtttcccggcgcacgcccctcgtgagatgctgtggtcttttctagcaacgtcgacaggctttccaacaa

SEQ ID NO: 301646 - DNA, 267 bp, Homo sapiens
  chr3:52568668-52568935
  hypo
tttcttctgctcagatccgtattccgagcccgcacgcataccaggctgtgctcagggtccggaggaggccgacccagtagccgtgggccctgtcggaggggagccagctgggcgcgcgttgttttctgaggtggccgcgctgtctttcagggtgtgtgtacattcgaaactccactgaaccttgattgaagacctacagtgtggcagtccatggcctggggactggtaaggattgaggccgtaggatgggctcgagtgtggcggtgt

SEQ ID NO: 301647 - DNA, 49 bp, Homo sapiens
  chr3:52599767-52599816
  hypo
cacatgaaacaatgcttagccaggcgcagtggctcatgtctgtaatccc

SEQ ID NO: 301648 - DNA, 566 bp, Homo sapiens; identical to SEQ ID NO: 208906
  chr3:52899903-52900469
  hypo

SEQ ID NO: 301649 - DNA, 215 bp, Homo sapiens; identical to SEQ ID NO: 208907
  chr3:52900499-52900714
  hypo

SEQ ID NO: 301650 - DNA, 75 bp, Homo sapiens; identical to SEQ ID NO: 252335
  chr3:52901657-52901732
  hypo

SEQ ID NO: 301651 - DNA, 329 bp, Homo sapiens; identical to SEQ ID NO: 208908
  chr3:53032404-53032733
  hypo

SEQ ID NO: 301652 - DNA, 139 bp, Homo sapiens; identical to SEQ ID NO: 208909
  chr3:53054013-53054152
  hypo

SEQ ID NO: 301653 - DNA, 124 bp, Homo sapiens; identical to SEQ ID NO: 208910
  chr3:53132045-53132169
  hypo

SEQ ID NO: 301654 - DNA, 147 bp, Homo sapiens; identical to SEQ ID NO: 222158
  chr3:53190592-53190739
  hypo

SEQ ID NO: 301655 - DNA, 226 bp, Homo sapiens; identical to SEQ ID NO: 198954
  chr3:53195774-53196000
  hypo

SEQ ID NO: 301656 - DNA, 201 bp, Homo sapiens; identical to SEQ ID NO: 252340
  chr3:53216915-53217116
  hypo

SEQ ID NO: 301657 - DNA, 111 bp, Homo sapiens; identical to SEQ ID NO: 208912
  chr3:53276152-53276263
  hypo

SEQ ID NO: 301658 - DNA, 581 bp, Homo sapiens; identical to SEQ ID NO: 281205
  chr3:53527819-53528400
  hypo

SEQ ID NO: 301659 - DNA, 229 bp, Homo sapiens; identical to SEQ ID NO: 281206
  chr3:53528643-53528872
  hypo

SEQ ID NO: 301660 - DNA, 98 bp, Homo sapiens; identical to SEQ ID NO: 252342
  chr3:53560156-53560254
  hypo

SEQ ID NO: 301661 - DNA, 202 bp, Homo sapiens; identical to SEQ ID NO: 252343
  chr3:53675067-53675269
  hypo

SEQ ID NO: 301662 - DNA, 34 bp, Homo sapiens; identical to SEQ ID NO: 208913
  chr3:53842746-53842780
  hypo

SEQ ID NO: 301663 - DNA, 43 bp, Homo sapiens; identical to SEQ ID NO: 252345
  chr3:53844088-53844131
  hypo

SEQ ID NO: 301664 - DNA, 227 bp, Homo sapiens; identical to SEQ ID NO: 252346
  chr3:53845189-53845416
  hypo

SEQ ID NO: 301665 - DNA, 59 bp, Homo sapiens; identical to SEQ ID NO: 208914
  chr3:53857419-53857478
  hypo

SEQ ID NO: 301666 - DNA, 79 bp, Homo sapiens; identical to SEQ ID NO: 252348
  chr3:53857925-53858004
  hypo

SEQ ID NO: 301667 - DNA, 147 bp, Homo sapiens; identical to SEQ ID NO: 252349
  chr3:54067944-54068091
  hypo

SEQ ID NO: 301668 - DNA, 212 bp, Homo sapiens; identical to SEQ ID NO: 208915
  chr3:54237684-54237896
  hypo

SEQ ID NO: 301669 - DNA, 547 bp, Homo sapiens; identical to SEQ ID NO: 252351
  chr3:54660169-54660716
  hypo

SEQ ID NO: 301670 - DNA, 35 bp, Homo sapiens; identical to SEQ ID NO: 208916
  chr3:56093398-56093433
  hypo

SEQ ID NO: 301671 - DNA, 82 bp, Homo sapiens; identical to SEQ ID NO: 208917
  chr3:56691370-56691452
  hypo

SEQ ID NO: 301672 - DNA, 168 bp, Homo sapiens; identical to SEQ ID NO: 208918
  chr3:56718075-56718243
  hypo

SEQ ID NO: 301673 - DNA, 184 bp, Homo sapiens; identical to SEQ ID NO: 208919
  chr3:56718281-56718465
  hypo

SEQ ID NO: 301674 - DNA, 41 bp, Homo sapiens; identical to SEQ ID NO: 252355
  chr3:56792413-56792454
  hypo

SEQ ID NO: 301675 - DNA, 107 bp, Homo sapiens; identical to SEQ ID NO: 252356
  chr3:56840408-56840515
  hypo

SEQ ID NO: 301676 - DNA, 97 bp, Homo sapiens; identical to SEQ ID NO: 208920
  chr3:56882998-56883095
  hypo

SEQ ID NO: 301677 - DNA, 147 bp, Homo sapiens
  chr3:57040317-57040464
  hypo
ctgtcgatgccaatgaccagcgtgaggtatctggagaaccactacaccgacaagatagatttcagttgttttcaaacaagccatcaaagtggctaatggcttccctcaaagaaaccccacaccttcagccaacagacaaggaactca

SEQ ID NO: 301678 - DNA, 325 bp, Homo sapiens
  chr3:57040499-57040824
  hypo
acaagcttcttccaagccgttaggaaaacagctccccagagcccacatgctgacaggcagcatccggggtgatcagatttctatcagtaaagacacatggcatttctctctggctccagttcagaatctcaccccacccacccccaacaggcagatcgtagcttttcataggtcctaaataatccggcctttaagaaaatgctcgtgtatcagtgacacacacaacatcaccaacacagtcactcgttcaatgtgctgcctgctctcgacacccccccaaacacggtcacactttctcatgcccgcctggaaatccatctccatc

SEQ ID NO: 301679 - DNA, 32 bp, Homo sapiens; identical to SEQ ID NO: 208921
  chr3:57101181-57101213
  hypo

SEQ ID NO: 301680 - DNA, 898 bp, Homo sapiens; identical to SEQ ID NO: 281220
  chr3:57112574-57113472
  hypo

SEQ ID NO: 301681 - DNA, 48 bp, Homo sapiens; identical to SEQ ID NO: 252360
  chr3:57117482-57117530
  hypo

SEQ ID NO: 301682 - DNA, 256 bp, Homo sapiens; identical to SEQ ID NO: 252361
  chr3:57131629-57131885
  hypo

SEQ ID NO: 301683 - DNA, 218 bp, Homo sapiens; identical to SEQ ID NO: 281225
  chr3:57261348-57261566
  hypo

SEQ ID NO: 301684 - DNA, 120 bp, Homo sapiens; identical to SEQ ID NO: 208925
  chr3:57529373-57529493
  hypo

SEQ ID NO: 301685 - DNA, 120 bp, Homo sapiens; identical to SEQ ID NO: 252363
  chr3:57536863-57536983
  hypo

SEQ ID NO: 301686 - DNA, 36 bp, Homo sapiens; identical to SEQ ID NO: 208926
  chr3:57539555-57539591
  hypo

SEQ ID NO: 301687 - DNA, 44 bp, Homo sapiens; identical to SEQ ID NO: 252365
  chr3:57544223-57544267
  hypo

SEQ ID NO: 301688 - DNA, 180 bp, Homo sapiens; identical to SEQ ID NO: 252366
  chr3:57544507-57544687
  hypo

SEQ ID NO: 301689 - DNA, 33 bp, Homo sapiens; identical to SEQ ID NO: 252367
  chr3:57600223-57600256
  hypo

SEQ ID NO: 301690 - DNA, 39 bp, Homo sapiens; identical to SEQ ID NO: 252368
  chr3:57674950-57674989
  hypo

SEQ ID NO: 301691 - DNA, 283 bp, Homo sapiens; identical to SEQ ID NO: 208927
  chr3:57679350-57679633
  hypo

SEQ ID NO: 301692 - DNA, 144 bp, Homo sapiens; identical to SEQ ID NO: 208928
  chr3:57679967-57680111
  hypo

SEQ ID NO: 301693 - DNA, 93 bp, Homo sapiens; identical to SEQ ID NO: 208929
  chr3:57906367-57906460
  hypo

SEQ ID NO: 301694 - DNA, 144 bp, Homo sapiens; identical to SEQ ID NO: 252372
  chr3:58090180-58090324
  hypo

SEQ ID NO: 301695 - DNA, 136 bp, Homo sapiens; identical to SEQ ID NO: 208930
  chr3:58109087-58109223
  hypo

SEQ ID NO: 301696 - DNA, 142 bp, Homo sapiens; identical to SEQ ID NO: 252374
  chr3:58136697-58136839
  hypo

SEQ ID NO: 301697 - DNA, 84 bp, Homo sapiens; identical to SEQ ID NO: 252376
  chr3:58652283-58652367
  hypo

SEQ ID NO: 301698 - DNA, 37 bp, Homo sapiens; identical to SEQ ID NO: 252377
  chr3:59041984-59042021
  hypo

SEQ ID NO: 301699 - DNA, 1845 bp, Homo sapiens; identical to SEQ ID NO: 281243
  chr3:61546308-61548153
  hypo

SEQ ID NO: 301700 - DNA, 90 bp, Homo sapiens; identical to SEQ ID NO: 198973
  chr3:61656126-61656216
  hypo

SEQ ID NO: 301701 - DNA, 92 bp, Homo sapiens; identical to SEQ ID NO: 252378
  chr3:63082429-63082521
  hypo

SEQ ID NO: 301702 - DNA, 123 bp, Homo sapiens; identical to SEQ ID NO: 252379
  chr3:64142936-64143059
  hypo

SEQ ID NO: 301703 - DNA, 139 bp, Homo sapiens; identical to SEQ ID NO: 252380
  chr3:64317485-64317624
  hypo

SEQ ID NO: 301704 - DNA, 337 bp, Homo sapiens; identical to SEQ ID NO: 208932
  chr3:64547143-64547480
  hypo

SEQ ID NO: 301705 - DNA, 138 bp, Homo sapiens; identical to SEQ ID NO: 281266
  chr3:64673125-64673263
  hypo

SEQ ID NO: 301706 - DNA, 519 bp, Homo sapiens; identical to SEQ ID NO: 198988
  chr3:64673419-64673938
  hypo

SEQ ID NO: 301707 - DNA, 155 bp, Homo sapiens; identical to SEQ ID NO: 208934
  chr3:65364855-65365010
  hypo

SEQ ID NO: 301708 - DNA, 241 bp, Homo sapiens; identical to SEQ ID NO: 252383
  chr3:65368390-65368631
  hypo

SEQ ID NO: 301709 - DNA, 39 bp, Homo sapiens; identical to SEQ ID NO: 208935
  chr3:65435159-65435198
  hypo

SEQ ID NO: 301710 - DNA, 1318 bp, Homo sapiens; identical to SEQ ID NO: 281269
  chr3:66024122-66025440
  hypo

SEQ ID NO: 301711 - DNA, 62 bp, Homo sapiens; identical to SEQ ID NO: 281270
  chr3:66025506-66025568
  hypo

SEQ ID NO: 301712 - DNA, 83 bp, Homo sapiens; identical to SEQ ID NO: 208937
  chr3:66053363-66053446
  hypo

SEQ ID NO: 301713 - DNA, 103 bp, Homo sapiens; identical to SEQ ID NO: 208938
  chr3:66053766-66053869
  hypo

SEQ ID NO: 301714 - DNA, 254 bp, Homo sapiens; identical to SEQ ID NO: 252387
  chr3:66423428-66423682
  hypo

SEQ ID NO: 301715 - DNA, 456 bp, Homo sapiens; identical to SEQ ID NO: 252388
  chr3:66452223-66452679
  hypo

SEQ ID NO: 301716 - DNA, 134 bp, Homo sapiens; identical to SEQ ID NO: 252389
  chr3:66455988-66456122
  hypo

SEQ ID NO: 301717 - DNA, 51 bp, Homo sapiens; identical to SEQ ID NO: 252390
  chr3:66460441-66460492
  hypo

SEQ ID NO: 301718 - DNA, 96 bp, Homo sapiens; identical to SEQ ID NO: 252391
  chr3:66461118-66461214
  hypo

SEQ ID NO: 301719 - DNA, 196 bp, Homo sapiens; identical to SEQ ID NO: 208940
  chr3:66482908-66483104
  hypo

SEQ ID NO: 301720 - DNA, 178 bp, Homo sapiens; identical to SEQ ID NO: 252393
  chr3:66521940-66522118
  hypo

SEQ ID NO: 301721 - DNA, 1604 bp, Homo sapiens; identical to SEQ ID NO: 198991
  chr3:66550298-66551902
  hypo

SEQ ID NO: 301722 - DNA, 155 bp, Homo sapiens; identical to SEQ ID NO: 252394
  chr3:66852898-66853053
  hypo

SEQ ID NO: 301723 - DNA, 1093 bp, Homo sapiens; identical to SEQ ID NO: 281272
  chr3:67048277-67049370
  hypo

SEQ ID NO: 301724 - DNA, 43 bp, Homo sapiens; identical to SEQ ID NO: 252395
  chr3:67079756-67079799
  hypo

SEQ ID NO: 301725 - DNA, 158 bp, Homo sapiens; identical to SEQ ID NO: 198993
  chr3:69062098-69062256
  hypo

SEQ ID NO: 301726 - DNA, 302 bp, Homo sapiens; identical to SEQ ID NO: 252396
  chr3:69230132-69230434
  hypo

SEQ ID NO: 301727 - DNA, 136 bp, Homo sapiens; identical to SEQ ID NO: 252397
  chr3:69230707-69230843
  hypo

SEQ ID NO: 301728 - DNA, 76 bp, Homo sapiens; identical to SEQ ID NO: 208944
  chr3:69309454-69309530
  hypo

SEQ ID NO: 301729 - DNA, 241 bp, Homo sapiens; identical to SEQ ID NO: 198994
  chr3:69434906-69435147
  hypo

SEQ ID NO: 301730 - DNA, 36 bp, Homo sapiens; identical to SEQ ID NO: 252399
  chr3:69585561-69585597
  hypo

SEQ ID NO: 301731 - DNA, 180 bp, Homo sapiens; identical to SEQ ID NO: 252400
  chr3:69589306-69589486
  hypo

SEQ ID NO: 301732 - DNA, 800 bp, Homo sapiens; identical to SEQ ID NO: 222176
  chr3:69788414-69789214
  hypo

SEQ ID NO: 301733 - DNA, 81 bp, Homo sapiens; identical to SEQ ID NO: 252401
  chr3:69928166-69928247
  hypo

SEQ ID NO: 301734 - DNA, 102 bp, Homo sapiens; identical to SEQ ID NO: 208948
  chr3:69937601-69937703
  hypo

SEQ ID NO: 301735 - DNA, 86 bp, Homo sapiens; identical to SEQ ID NO: 252403
  chr3:69970991-69971077
  hypo

SEQ ID NO: 301736 - DNA, 368 bp, Homo sapiens; identical to SEQ ID NO: 252404
  chr3:69986972-69987340
  hypo

SEQ ID NO: 301737 - DNA, 49 bp, Homo sapiens; identical to SEQ ID NO: 252405
  chr3:70008507-70008556
  hypo

SEQ ID NO: 301738 - DNA, 40 bp, Homo sapiens; identical to SEQ ID NO: 252406
  chr3:70901512-70901552
  hypo

SEQ ID NO: 301739 - DNA, 118 bp, Homo sapiens; identical to SEQ ID NO: 252407
  chr3:71019767-71019885
  hypo

SEQ ID NO: 301740 - DNA, 292 bp, Homo sapiens; identical to SEQ ID NO: 208949
  chr3:71036185-71036477
  hypo

SEQ ID NO: 301741 - DNA, 270 bp, Homo sapiens; identical to SEQ ID NO: 208950
  chr3:71049502-71049772
  hypo

SEQ ID NO: 301742 - DNA, 1738 bp, Homo sapiens; identical to SEQ ID NO: 198997
  chr3:71113096-71114834
  hypo

SEQ ID NO: 301743 - DNA, 449 bp, Homo sapiens; identical to SEQ ID NO: 252410
  chr3:71119374-71119823
  hypo

SEQ ID NO: 301744 - DNA, 77 bp, Homo sapiens; identical to SEQ ID NO: 252411
  chr3:71120998-71121075
  hypo

SEQ ID NO: 301745 - DNA, 454 bp, Homo sapiens; identical to SEQ ID NO: 252412
  chr3:71163557-71164011
  hypo

SEQ ID NO: 301746 - DNA, 77 bp, Homo sapiens
  chr3:71187312-71187389
  hypo
gcgcagaatggtgacgctgtctggagaacacacgtggaggaagaagcgaatgcttctaattgcctcaaaatgggatt

SEQ ID NO: 301747 - DNA, 137 bp, Homo sapiens
  chr3:71187419-71187556
  hypo
aaataagaacacttccaacatcctttataaataagcctttacaaaatattgttagctgttaataatacatcattatcaaaaatggaaagtcatgaatacagtgcatgtaacctttgtattcacgtgaattaacctat

SEQ ID NO: 301748 - DNA, 109 bp, Homo sapiens; identical to SEQ ID NO: 252414
  chr3:71218264-71218373
  hypo

SEQ ID NO: 301749 - DNA, 77 bp, Homo sapiens; identical to SEQ ID NO: 252415
  chr3:71247380-71247457
  hypo

SEQ ID NO: 301750 - DNA, 56 bp, Homo sapiens; identical to SEQ ID NO: 252416
  chr3:71307162-71307218
  hypo

SEQ ID NO: 301751 - DNA, 185 bp, Homo sapiens; identical to SEQ ID NO: 208953
  chr3:71357101-71357286
  hypo

SEQ ID NO: 301752 - DNA, 152 bp, Homo sapiens; identical to SEQ ID NO: 208954
  chr3:71366445-71366597
  hypo

SEQ ID NO: 301753 - DNA, 80 bp, Homo sapiens; identical to SEQ ID NO: 252419
  chr3:71408816-71408896
  hypo

SEQ ID NO: 301754 - DNA, 285 bp, Homo sapiens; identical to SEQ ID NO: 208955
  chr3:71410779-71411064
  hypo

SEQ ID NO: 301755 - DNA, 118 bp, Homo sapiens; identical to SEQ ID NO: 252421
  chr3:71451127-71451245
  hypo

SEQ ID NO: 301756 - DNA, 65 bp, Homo sapiens; identical to SEQ ID NO: 252422
  chr3:71496761-71496826
  hypo

SEQ ID NO: 301757 - DNA, 93 bp, Homo sapiens; identical to SEQ ID NO: 252423
  chr3:71533900-71533993
  hypo

SEQ ID NO: 301758 - DNA, 56 bp, Homo sapiens; identical to SEQ ID NO: 252424
  chr3:71563898-71563954
  hypo

SEQ ID NO: 301759 - DNA, 43 bp, Homo sapiens; identical to SEQ ID NO: 252425
  chr3:71581510-71581553
  hypo

SEQ ID NO: 301760 - DNA, 1334 bp, Homo sapiens; identical to SEQ ID NO: 281279
  chr3:71630565-71631899
  hypo

SEQ ID NO: 301761 - DNA, 38 bp, Homo sapiens; identical to SEQ ID NO: 281282
  chr3:71833528-71833566
  hypo

SEQ ID NO: 301762 - DNA, 225 bp, Homo sapiens; identical to SEQ ID NO: 281283
  chr3:71833751-71833976
  hypo

SEQ ID NO: 301763 - DNA, 381 bp, Homo sapiens; identical to SEQ ID NO: 281284
  chr3:71834745-71835126
  hypo

SEQ ID NO: 301764 - DNA, 115 bp, Homo sapiens; identical to SEQ ID NO: 252426
  chr3:72192477-72192592
  hypo

SEQ ID NO: 301765 - DNA, 71 bp, Homo sapiens; identical to SEQ ID NO: 252427
  chr3:72420267-72420338
  hypo

SEQ ID NO: 301766 - DNA, 272 bp, Homo sapiens; identical to SEQ ID NO: 222183
  chr3:72496511-72496783
  hypo

SEQ ID NO: 301767 - DNA, 38 bp, Homo sapiens; identical to SEQ ID NO: 252428
  chr3:72506011-72506049
  hypo

SEQ ID NO: 301768 - DNA, 206 bp, Homo sapiens; identical to SEQ ID NO: 252429
  chr3:72618811-72619017
  hypo

SEQ ID NO: 301769 - DNA, 98 bp, Homo sapiens; identical to SEQ ID NO: 252430
  chr3:72680453-72680551
  hypo

SEQ ID NO: 301770 - DNA, 79 bp, Homo sapiens; identical to SEQ ID NO: 252431
  chr3:72703939-72704018
  hypo

SEQ ID NO: 301771 - DNA, 41 bp, Homo sapiens; identical to SEQ ID NO: 252432
  chr3:72773317-72773358
  hypo

SEQ ID NO: 301772 - DNA, 241 bp, Homo sapiens; identical to SEQ ID NO: 252433
  chr3:72778073-72778314
  hypo

SEQ ID NO: 301773 - DNA, 84 bp, Homo sapiens; identical to SEQ ID NO: 252434
  chr3:72795276-72795360
  hypo

SEQ ID NO: 301774 - DNA, 152 bp, Homo sapiens; identical to SEQ ID NO: 208959
  chr3:72877846-72877998
  hypo

SEQ ID NO: 301775 - DNA, 31 bp, Homo sapiens; identical to SEQ ID NO: 252436
  chr3:72964698-72964729
  hypo

SEQ ID NO: 301776 - DNA, 126 bp, Homo sapiens; identical to SEQ ID NO: 208960
  chr3:73045605-73045731
  hypo

SEQ ID NO: 301777 - DNA, 818 bp, Homo sapiens; identical to SEQ ID NO: 252439
  chr3:73433224-73434042
  hypo

SEQ ID NO: 301778 - DNA, 391 bp, Homo sapiens; identical to SEQ ID NO: 222184
  chr3:73673262-73673653
  hypo

SEQ ID NO: 301779 - DNA, 448 bp, Homo sapiens; identical to SEQ ID NO: 281292
  chr3:74663366-74663814
  hypo

SEQ ID NO: 301780 - DNA, 92 bp, Homo sapiens; identical to SEQ ID NO: 252440
  chr3:77427993-77428085
  hypo

SEQ ID NO: 301781 - DNA, 198 bp, Homo sapiens; identical to SEQ ID NO: 252441
  chr3:82247999-82248197
  hypo

SEQ ID NO: 301782 - DNA, 40 bp, Homo sapiens; identical to SEQ ID NO: 252442
  chr3:84175659-84175699
  hypo

SEQ ID NO: 301783 - DNA, 91 bp, Homo sapiens; identical to SEQ ID NO: 252444
  chr3:87297460-87297551
  hypo

SEQ ID NO: 301784 - DNA, 42 bp, Homo sapiens; identical to SEQ ID NO: 252445
  chr3:87652052-87652094
  hypo

SEQ ID NO: 301785 - DNA, 36 bp, Homo sapiens; identical to SEQ ID NO: 208963
  chr3:87737840-87737876
  hypo

SEQ ID NO: 301786 - DNA, 53 bp, Homo sapiens; identical to SEQ ID NO: 252447
  chr3:88098566-88098619
  hypo

SEQ ID NO: 301787 - DNA, 77 bp, Homo sapiens; identical to SEQ ID NO: 252448
  chr3:88098649-88098726
  hypo

SEQ ID NO: 301788 - DNA, 38 bp, Homo sapiens; identical to SEQ ID NO: 208964
  chr3:93697929-93697967
  hypo

SEQ ID NO: 301789 - DNA, 155 bp, Homo sapiens; identical to SEQ ID NO: 208965
  chr3:93707709-93707864
  hypo

SEQ ID NO: 301790 - DNA, 78 bp, Homo sapiens; identical to SEQ ID NO: 252452
  chr3:93780314-93780392
  hypo

SEQ ID NO: 301791 - DNA, 84 bp, Homo sapiens; identical to SEQ ID NO: 252453
  chr3:94174884-94174968
  hypo

SEQ ID NO: 301792 - DNA, 112 bp, Homo sapiens; identical to SEQ ID NO: 208966
  chr3:94656925-94657037
  hypo

SEQ ID NO: 301793 - DNA, 108 bp, Homo sapiens; identical to SEQ ID NO: 252455
  chr3:96984570-96984678
  hypo

SEQ ID NO: 301794 - DNA, 37 bp, Homo sapiens; identical to SEQ ID NO: 252456
  chr3:97473826-97473863
  hypo

SEQ ID NO: 301795 - DNA, 271 bp, Homo sapiens; identical to SEQ ID NO: 222186
  chr3:97690771-97691042
  hypo

SEQ ID NO: 301796 - DNA, 105 bp, Homo sapiens; identical to SEQ ID NO: 208968
  chr3:97744980-97745085
  hypo

SEQ ID NO: 301797 - DNA, 45 bp, Homo sapiens; identical to SEQ ID NO: 252458
  chr3:98290224-98290269
  hypo

SEQ ID NO: 301798 - DNA, 82 bp, Homo sapiens; identical to SEQ ID NO: 252459
  chr3:98304459-98304541
  hypo

SEQ ID NO: 301799 - DNA, 292 bp, Homo sapiens; identical to SEQ ID NO: 199024
  chr3:98619762-98620054
  hypo

SEQ ID NO: 301800 - DNA, 73 bp, Homo sapiens; identical to SEQ ID NO: 281333
  chr3:98621126-98621199
  hypo

SEQ ID NO: 301801 - DNA, 115 bp, Homo sapiens; identical to SEQ ID NO: 199025
  chr3:99594776-99594891
  hypo

SEQ ID NO: 301802 - DNA, 86 bp, Homo sapiens; identical to SEQ ID NO: 208971
  chr3:99944288-99944374
  hypo

SEQ ID NO: 301803 - DNA, 184 bp, Homo sapiens; identical to SEQ ID NO: 252461
  chr3:100329428-100329612
  hypo

SEQ ID NO: 301804 - DNA, 45 bp, Homo sapiens; identical to SEQ ID NO: 252462
  chr3:100796978-100797023
  hypo

SEQ ID NO: 301805 - DNA, 127 bp, Homo sapiens; identical to SEQ ID NO: 252464
  chr3:100998459-100998586
  hypo

SEQ ID NO: 301806 - DNA, 153 bp, Homo sapiens
  chr3:101021637-101021790
  hypo
tgaggtgccatgattaaaagttgcgttcattttaaaacacacaaaaccctgcacagcttcaaaacatttataccctcgcaaaatttgtctttggtccacccacgtttatcaaaccatccttctctccccaacgtcccccatttaataagatca

SEQ ID NO: 301807 - DNA, 149 bp, Homo sapiens; identical to SEQ ID NO: 208972
  chr3:101157528-101157677
  hypo

SEQ ID NO: 301808 - DNA, 981 bp, Homo sapiens; identical to SEQ ID NO: 199027
  chr3:101231399-101232380
  hypo

SEQ ID NO: 301809 - DNA, 81 bp, Homo sapiens; identical to SEQ ID NO: 252468
  chr3:101232951-101233032
  hypo

SEQ ID NO: 301810 - DNA, 120 bp, Homo sapiens; identical to SEQ ID NO: 252469
  chr3:101393171-101393291
  hypo

SEQ ID NO: 301811 - DNA, 37 bp, Homo sapiens; identical to SEQ ID NO: 252471
  chr3:101441002-101441039
  hypo

SEQ ID NO: 301812 - DNA, 298 bp, Homo sapiens; identical to SEQ ID NO: 199030
  chr3:101497996-101498294
  hypo

SEQ ID NO: 301813 - DNA, 103 bp, Homo sapiens; identical to SEQ ID NO: 199031
  chr3:101498504-101498607
  hypo

SEQ ID NO: 301814 - DNA, 43 bp, Homo sapiens; identical to SEQ ID NO: 208976
  chr3:101575167-101575210
  hypo

SEQ ID NO: 301815 - DNA, 262 bp, Homo sapiens; identical to SEQ ID NO: 252473
  chr3:101588885-101589147
  hypo

SEQ ID NO: 301816 - DNA, 474 bp, Homo sapiens; identical to SEQ ID NO: 108638
  chr3:105088087-105088561
  hypo

SEQ ID NO: 301817 - DNA, 196 bp, Homo sapiens; identical to SEQ ID NO: 252474
  chr3:105444398-105444594
  hypo

SEQ ID NO: 301818 - DNA, 173 bp, Homo sapiens; identical to SEQ ID NO: 252475
  chr3:106350366-106350539
  hypo

SEQ ID NO: 301819 - DNA, 217 bp, Homo sapiens; identical to SEQ ID NO: 252476
  chr3:106362774-106362991
  hypo

SEQ ID NO: 301820 - DNA, 377 bp, Homo sapiens; identical to SEQ ID NO: 281356
  chr3:107244663-107245040
  hypo

SEQ ID NO: 301821 - DNA, 57 bp, Homo sapiens; identical to SEQ ID NO: 252477
  chr3:107505826-107505883
  hypo

SEQ ID NO: 301822 - DNA, 91 bp, Homo sapiens; identical to SEQ ID NO: 252478
  chr3:107520015-107520106
  hypo

SEQ ID NO: 301823 - DNA, 105 bp, Homo sapiens; identical to SEQ ID NO: 208979
  chr3:107530308-107530413
  hypo

SEQ ID NO: 301824 - DNA, 43 bp, Homo sapiens; identical to SEQ ID NO: 252480
  chr3:107552852-107552895
  hypo

SEQ ID NO: 301825 - DNA, 84 bp, Homo sapiens; identical to SEQ ID NO: 252481
  chr3:107750328-107750412
  hypo

SEQ ID NO: 301826 - DNA, 55 bp, Homo sapiens; identical to SEQ ID NO: 252483
  chr3:107832937-107832992
  hypo

SEQ ID NO: 301827 - DNA, 239 bp, Homo sapiens; identical to SEQ ID NO: 252484
  chr3:108836864-108837103
  hypo

SEQ ID NO: 301828 - DNA, 92 bp, Homo sapiens; identical to SEQ ID NO: 252485
  chr3:109035085-109035177
  hypo

SEQ ID NO: 301829 - DNA, 69 bp, Homo sapiens; identical to SEQ ID NO: 208981
  chr3:109035957-109036026
  hypo

SEQ ID NO: 301830 - DNA, 145 bp, Homo sapiens; identical to SEQ ID NO: 208982
  chr3:109061756-109061901
  hypo

SEQ ID NO: 301831 - DNA, 142 bp, Homo sapiens; identical to SEQ ID NO: 252488
  chr3:109128854-109128996
  hypo

SEQ ID NO: 301832 - DNA, 123 bp, Homo sapiens; identical to SEQ ID NO: 199038
  chr3:111393432-111393555
  hypo

SEQ ID NO: 301833 - DNA, 120 bp, Homo sapiens; identical to SEQ ID NO: 208984
  chr3:112207345-112207465
  hypo

SEQ ID NO: 301834 - DNA, 41 bp, Homo sapiens; identical to SEQ ID NO: 252490
  chr3:112249242-112249283
  hypo

SEQ ID NO: 301835 - DNA, 154 bp, Homo sapiens; identical to SEQ ID NO: 252491
  chr3:112357813-112357967
  hypo

SEQ ID NO: 301836 - DNA, 38 bp, Homo sapiens; identical to SEQ ID NO: 208985
  chr3:112543790-112543828
  hypo

SEQ ID NO: 301837 - DNA, 151 bp, Homo sapiens; identical to SEQ ID NO: 199044
  chr3:112930655-112930806
  hypo

SEQ ID NO: 301838 - DNA, 292 bp, Homo sapiens; identical to SEQ ID NO: 281372
  chr3:112931274-112931566
  hypo

SEQ ID NO: 301839 - DNA, 111 bp, Homo sapiens; identical to SEQ ID NO: 252493
  chr3:113159894-113160005
  hypo

SEQ ID NO: 301840 - DNA, 1190 bp, Homo sapiens; identical to SEQ ID NO: 281374
  chr3:113251174-113252364
  hypo

SEQ ID NO: 301841 - DNA, 252 bp, Homo sapiens; identical to SEQ ID NO: 281376
  chr3:113557555-113557807
  hypo

SEQ ID NO: 301842 - DNA, 252 bp, Homo sapiens; identical to SEQ ID NO: 252494
  chr3:113957889-113958141
  hypo

SEQ ID NO: 301843 - DNA, 230 bp, Homo sapiens; identical to SEQ ID NO: 208990
  chr3:114070278-114070508
  hypo

SEQ ID NO: 301844 - DNA, 351 bp, Homo sapiens; identical to SEQ ID NO: 281381
  chr3:115377288-115377639
  hypo

SEQ ID NO: 301845 - DNA, 37 bp, Homo sapiens; identical to SEQ ID NO: 199050
  chr3:115377953-115377990
  hypo

SEQ ID NO: 301846 - DNA, 40 bp, Homo sapiens
  chr3:118864573-118864613
  hypo
gttttgtggtcctcgtgcagctggttgtgtgttcatctgt

SEQ ID NO: 301847 - DNA, 38 bp, Homo sapiens; identical to SEQ ID NO: 208993
  chr3:119011022-119011060
  hypo

SEQ ID NO: 301848 - DNA, 96 bp, Homo sapiens; identical to SEQ ID NO: 252498
  chr3:119342487-119342583
  hypo

SEQ ID NO: 301849 - DNA, 44 bp, Homo sapiens; identical to SEQ ID NO: 252499
  chr3:119432910-119432954
  hypo

SEQ ID NO: 301850 - DNA, 42 bp, Homo sapiens; identical to SEQ ID NO: 208994
  chr3:119517358-119517400
  hypo

SEQ ID NO: 301851 - DNA, 158 bp, Homo sapiens; identical to SEQ ID NO: 252501
  chr3:119535940-119536098
  hypo

SEQ ID NO: 301852 - DNA, 31 bp, Homo sapiens; identical to SEQ ID NO: 252502
  chr3:119827279-119827310
  hypo

SEQ ID NO: 301853 - DNA, 141 bp, Homo sapiens; identical to SEQ ID NO: 252503
  chr3:120023463-120023604
  hypo

SEQ ID NO: 301854 - DNA, 158 bp, Homo sapiens; identical to SEQ ID NO: 252504
  chr3:120064577-120064735
  hypo

SEQ ID NO: 301855 - DNA, 41 bp, Homo sapiens; identical to SEQ ID NO: 252505
  chr3:120150381-120150422
  hypo

SEQ ID NO: 301856 - DNA, 101 bp, Homo sapiens; identical to SEQ ID NO: 252506
  chr3:120150482-120150583
  hypo

SEQ ID NO: 301857 - DNA, 38 bp, Homo sapiens; identical to SEQ ID NO: 252507
  chr3:120313290-120313328
  hypo

SEQ ID NO: 301858 - DNA, 59 bp, Homo sapiens; identical to SEQ ID NO: 199059
  chr3:120627258-120627317
  hypo

SEQ ID NO: 301859 - DNA, 36 bp, Homo sapiens; identical to SEQ ID NO: 208996
  chr3:121215302-121215338
  hypo

SEQ ID NO: 301860 - DNA, 182 bp, Homo sapiens; identical to SEQ ID NO: 208997
  chr3:121438459-121438641
  hypo

SEQ ID NO: 301861 - DNA, 94 bp, Homo sapiens; identical to SEQ ID NO: 208998
  chr3:121500624-121500718
  hypo

SEQ ID NO: 301862 - DNA, 52 bp, Homo sapiens; identical to SEQ ID NO: 208999
  chr3:121637756-121637808
  hypo

SEQ ID NO: 301863 - DNA, 39 bp, Homo sapiens; identical to SEQ ID NO: 209000
  chr3:121638077-121638116
  hypo

SEQ ID NO: 301864 - DNA, 33 bp, Homo sapiens; identical to SEQ ID NO: 252515
  chr3:121638472-121638505
  hypo

SEQ ID NO: 301865 - DNA, 240 bp, Homo sapiens; identical to SEQ ID NO: 209001
  chr3:122003336-122003576
  hypo

SEQ ID NO: 301866 - DNA, 45 bp, Homo sapiens; identical to SEQ ID NO: 209002
  chr3:122231267-122231312
  hypo

SEQ ID NO: 301867 - DNA, 57 bp, Homo sapiens; identical to SEQ ID NO: 252519
  chr3:122355300-122355357
  hypo

SEQ ID NO: 301868 - DNA, 180 bp, Homo sapiens; identical to SEQ ID NO: 209003
  chr3:122451547-122451727
  hypo

SEQ ID NO: 301869 - DNA, 636 bp, Homo sapiens; identical to SEQ ID NO: 281409
  chr3:122513919-122514555
  hypo

SEQ ID NO: 301870 - DNA, 69 bp, Homo sapiens; identical to SEQ ID NO: 209005
  chr3:122573579-122573648
  hypo

SEQ ID NO: 301871 - DNA, 31 bp, Homo sapiens; identical to SEQ ID NO: 252522
  chr3:122573970-122574001
  hypo

SEQ ID NO: 301872 - DNA, 163 bp, Homo sapiens; identical to SEQ ID NO: 199063
  chr3:122785820-122785983
  hypo

SEQ ID NO: 301873 - DNA, 348 bp, Homo sapiens; identical to SEQ ID NO: 252523
  chr3:123049663-123050011
  hypo

SEQ ID NO: 301874 - DNA, 455 bp, Homo sapiens; identical to SEQ ID NO: 209007
  chr3:123166198-123166653
  hypo

SEQ ID NO: 301875 - DNA, 439 bp, Homo sapiens; identical to SEQ ID NO: 281414
  chr3:123168102-123168541
  hypo

SEQ ID NO: 301876 - DNA, 42 bp, Homo sapiens; identical to SEQ ID NO: 252525
  chr3:123200212-123200254
  hypo

SEQ ID NO: 301877 - DNA, 81 bp, Homo sapiens; identical to SEQ ID NO: 209009
  chr3:123340748-123340829
  hypo

SEQ ID NO: 301878 - DNA, 181 bp, Homo sapiens; identical to SEQ ID NO: 252527
  chr3:123456130-123456311
  hypo

SEQ ID NO: 301879 - DNA, 43 bp, Homo sapiens; identical to SEQ ID NO: 209010
  chr3:123667350-123667393
  hypo

SEQ ID NO: 301880 - DNA, 730 bp, Homo sapiens; identical to SEQ ID NO: 281417
  chr3:123751655-123752385
  hypo

SEQ ID NO: 301881 - DNA, 253 bp, Homo sapiens; identical to SEQ ID NO: 252529
  chr3:123813450-123813703
  hypo

SEQ ID NO: 301882 - DNA, 345 bp, Homo sapiens; identical to SEQ ID NO: 252530
  chr3:124103487-124103832
  hypo

SEQ ID NO: 301883 - DNA, 94 bp, Homo sapiens; identical to SEQ ID NO: 209012
  chr3:124126552-124126646
  hypo

SEQ ID NO: 301884 - DNA, 208 bp, Homo sapiens; identical to SEQ ID NO: 209013
  chr3:124281715-124281923
  hypo

SEQ ID NO: 301885 - DNA, 95 bp, Homo sapiens; identical to SEQ ID NO: 209014
  chr3:124436154-124436249
  hypo

SEQ ID NO: 301886 - DNA, 84 bp, Homo sapiens; identical to SEQ ID NO: 252534
  chr3:124465924-124466008
  hypo

SEQ ID NO: 301887 - DNA, 203 bp, Homo sapiens; identical to SEQ ID NO: 252535
  chr3:124466068-124466271
  hypo

SEQ ID NO: 301888 - DNA, 401 bp, Homo sapiens; identical to SEQ ID NO: 252536
  chr3:124515256-124515657
  hypo

SEQ ID NO: 301889 - DNA, 193 bp, Homo sapiens; identical to SEQ ID NO: 209015
  chr3:124518663-124518856
  hypo

SEQ ID NO: 301890 - DNA, 523 bp, Homo sapiens; identical to SEQ ID NO: 281420
  chr3:124605380-124605903
  hypo

SEQ ID NO: 301891 - DNA, 463 bp, Homo sapiens; identical to SEQ ID NO: 252538
  chr3:124716558-124717021
  hypo

SEQ ID NO: 301892 - DNA, 453 bp, Homo sapiens; identical to SEQ ID NO: 199069
  chr3:124773932-124774385
  hypo

SEQ ID NO: 301893 - DNA, 185 bp, Homo sapiens; identical to SEQ ID NO: 209017
  chr3:124885658-124885843
  hypo

SEQ ID NO: 301894 - DNA, 39 bp, Homo sapiens; identical to SEQ ID NO: 209018
  chr3:125026374-125026413
  hypo

SEQ ID NO: 301895 - DNA, 110 bp, Homo sapiens; identical to SEQ ID NO: 209019
  chr3:125078701-125078811
  hypo

SEQ ID NO: 301896 - DNA, 39 bp, Homo sapiens; identical to SEQ ID NO: 252542
  chr3:125210665-125210704
  hypo

SEQ ID NO: 301897 - DNA, 149 bp, Homo sapiens; identical to SEQ ID NO: 209020
  chr3:125261068-125261217
  hypo

SEQ ID NO: 301898 - DNA, 31 bp, Homo sapiens; identical to SEQ ID NO: 252544
  chr3:125321256-125321287
  hypo

SEQ ID NO: 301899 - DNA, 43 bp, Homo sapiens; identical to SEQ ID NO: 252545
  chr3:125411624-125411667
  hypo

SEQ ID NO: 301900 - DNA, 32 bp, Homo sapiens; identical to SEQ ID NO: 252546
  chr3:125412960-125412992
  hypo

SEQ ID NO: 301901 - DNA, 120 bp, Homo sapiens; identical to SEQ ID NO: 252547
  chr3:125477671-125477791
  hypo

SEQ ID NO: 301902 - DNA, 42 bp, Homo sapiens; identical to SEQ ID NO: 252548
  chr3:125678379-125678421
  hypo

SEQ ID NO: 301903 - DNA, 170 bp, Homo sapiens; identical to SEQ ID NO: 252549
  chr3:125679708-125679878
  hypo

SEQ ID NO: 301904 - DNA, 186 bp, Homo sapiens; identical to SEQ ID NO: 252550
  chr3:125774553-125774739
  hypo

SEQ ID NO: 301905 - DNA, 34 bp, Homo sapiens; identical to SEQ ID NO: 252551
  chr3:125793294-125793328
  hypo

SEQ ID NO: 301906 - DNA, 93 bp, Homo sapiens; identical to SEQ ID NO: 252552
  chr3:125793388-125793481
  hypo

SEQ ID NO: 301907 - DNA, 114 bp, Homo sapiens; identical to SEQ ID NO: 252553
  chr3:125826120-125826234
  hypo

SEQ ID NO: 301908 - DNA, 55 bp, Homo sapiens; identical to SEQ ID NO: 252554
  chr3:125875512-125875567
  hypo

SEQ ID NO: 301909 - DNA, 189 bp, Homo sapiens; identical to SEQ ID NO: 252555
  chr3:125977272-125977461
  hypo

SEQ ID NO: 301910 - DNA, 361 bp, Homo sapiens; identical to SEQ ID NO: 281430
  chr3:126074822-126075183
  hypo

SEQ ID NO: 301911 - DNA, 252 bp, Homo sapiens; identical to SEQ ID NO: 252556
  chr3:126090323-126090575
  hypo

SEQ ID NO: 301912 - DNA, 36 bp, Homo sapiens; identical to SEQ ID NO: 252557
  chr3:126137173-126137209
  hypo

SEQ ID NO: 301913 - DNA, 109 bp, Homo sapiens
  chr3:126157663-126157772
  hypo
agctgaccaggatgtggcccagggctatggaggccccatctagcctgtctcctcctgctacaagaagtgttcctgctgttgcaccatttgactccgggctacggtgatt

SEQ ID NO: 301914 - DNA, 318 bp, Homo sapiens; identical to SEQ ID NO: 281433
  chr3:126195083-126195401
  hypo

SEQ ID NO: 301915 - DNA, 38 bp, Homo sapiens; identical to SEQ ID NO: 252559
  chr3:126195713-126195751
  hypo

SEQ ID NO: 301916 - DNA, 87 bp, Homo sapiens; identical to SEQ ID NO: 209021
  chr3:126218194-126218281
  hypo

SEQ ID NO: 301917 - DNA, 272 bp, Homo sapiens; identical to SEQ ID NO: 252561
  chr3:126253863-126254135
  hypo

SEQ ID NO: 301918 - DNA, 152 bp, Homo sapiens; identical to SEQ ID NO: 209022
  chr3:126254315-126254467
  hypo

SEQ ID NO: 301919 - DNA, 106 bp, Homo sapiens; identical to SEQ ID NO: 209023
  chr3:126261823-126261929
  hypo

SEQ ID NO: 301920 - DNA, 158 bp, Homo sapiens; identical to SEQ ID NO: 252564
  chr3:126274128-126274286
  hypo

SEQ ID NO: 301921 - DNA, 266 bp, Homo sapiens; identical to SEQ ID NO: 252565
  chr3:126439995-126440261
  hypo

SEQ ID NO: 301922 - DNA, 53 bp, Homo sapiens; identical to SEQ ID NO: 252566
  chr3:126465315-126465368
  hypo

SEQ ID NO: 301923 - DNA, 228 bp, Homo sapiens; identical to SEQ ID NO: 252567
  chr3:126472159-126472387
  hypo

SEQ ID NO: 301924 - DNA, 83 bp, Homo sapiens; identical to SEQ ID NO: 252568
  chr3:126501195-126501278
  hypo

SEQ ID NO: 301925 - DNA, 64 bp, Homo sapiens; identical to SEQ ID NO: 252569
  chr3:126516696-126516760
  hypo

SEQ ID NO: 301926 - DNA, 422 bp, Homo sapiens; identical to SEQ ID NO: 209025
  chr3:126577518-126577940
  hypo

SEQ ID NO: 301927 - DNA, 164 bp, Homo sapiens; identical to SEQ ID NO: 209026
  chr3:126676242-126676406
  hypo

SEQ ID NO: 301928 - DNA, 117 bp, Homo sapiens; identical to SEQ ID NO: 252572
  chr3:126707399-126707516
  hypo

SEQ ID NO: 301929 - DNA, 402 bp, Homo sapiens; identical to SEQ ID NO: 209027
  chr3:126724696-126725098
  hypo

SEQ ID NO: 301930 - DNA, 328 bp, Homo sapiens; identical to SEQ ID NO: 252574
  chr3:126730805-126731133
  hypo

SEQ ID NO: 301931 - DNA, 64 bp, Homo sapiens; identical to SEQ ID NO: 252575
  chr3:126736637-126736701
  hypo

SEQ ID NO: 301932 - DNA, 181 bp, Homo sapiens; identical to SEQ ID NO: 252576
  chr3:126747049-126747230
  hypo

SEQ ID NO: 301933 - DNA, 84 bp, Homo sapiens; identical to SEQ ID NO: 252578
  chr3:126796239-126796323
  hypo

SEQ ID NO: 301934 - DNA, 168 bp, Homo sapiens; identical to SEQ ID NO: 209029
  chr3:126894145-126894313
  hypo

SEQ ID NO: 301935 - DNA, 158 bp, Homo sapiens; identical to SEQ ID NO: 252580
  chr3:127285885-127286043
  hypo

SEQ ID NO: 301936 - DNA, 219 bp, Homo sapiens; identical to SEQ ID NO: 252581
  chr3:127286318-127286537
  hypo

SEQ ID NO: 301937 - DNA, 79 bp, Homo sapiens; identical to SEQ ID NO: 209030
  chr3:127292370-127292449
  hypo

SEQ ID NO: 301938 - DNA, 284 bp, Homo sapiens; identical to SEQ ID NO: 252583
  chr3:127325614-127325898
  hypo

SEQ ID NO: 301939 - DNA, 202 bp, Homo sapiens; identical to SEQ ID NO: 209032
  chr3:127326110-127326312
  hypo

SEQ ID NO: 301940 - DNA, 207 bp, Homo sapiens; identical to SEQ ID NO: 199079
  chr3:127348123-127348330
  hypo

SEQ ID NO: 301941 - DNA, 203 bp, Homo sapiens; identical to SEQ ID NO: 252585
  chr3:127349664-127349867
  hypo

SEQ ID NO: 301942 - DNA, 268 bp, Homo sapiens; identical to SEQ ID NO: 252586
  chr3:127366356-127366624
  hypo

SEQ ID NO: 301943 - DNA, 445 bp, Homo sapiens
  chr3:127394387-127394832
  hypo
cctggattataggtgtgagctgccacgcccaggcttgtttttcttaatagtccctgccatcgttaggtagtgggttgattgtcctgcctcactagagtataagttcagcaggacagggacctgtgtctcgttcactgctgtgctccagtgtgtgggacaagcccagccaccaagtcagctctccgttctgtgttgtctgtcttccgtgtgagtgagtatgtgcctgtgtgagtgcacacagacgtgcccattcgcctagcccttgactgggagggtgttggggtcagagtgggcccagggtaatttgggaaggcatcgccagagattcggagccccatgtgtgggaaggtggggaggagggacagggagattagaatttcccccaggccccttccctgctaactggtgagccctgcctcccccaggagcccgctgcgaggccaac

SEQ ID NO: 301944 - DNA, 287 bp, Homo sapiens
  chr3:127394909-127395196
  hypo
cacggcttcctgcaggaggcgggattactatgacgacttcttgcagcggtgagccagggcacacgaggggtgcagcatggggtgcggtggccctggtgggtgtggcgagtctgctctgactgtggcctgcactgggttctgagtgctccgaggaatggggtggggctgtgccaagtatcctccctcctggcttgtccctccccaggcttctagagcagggcatccacagtgacgtggtctttgtagtacacgggaagccattccgggtgcatcgctgcgtcctgggt

SEQ ID NO: 301945 - DNA, 128 bp, Homo sapiens; identical to SEQ ID NO: 209036
  chr3:127395763-127395891
  hypo

SEQ ID NO: 301946 - DNA, 56 bp, Homo sapiens; identical to SEQ ID NO: 252590
  chr3:127439440-127439496
  hypo

SEQ ID NO: 301947 - DNA, 143 bp, Homo sapiens; identical to SEQ ID NO: 252591
  chr3:127439917-127440060
  hypo

SEQ ID NO: 301948 - DNA, 174 bp, Homo sapiens; identical to SEQ ID NO: 252592
  chr3:127505554-127505728
  hypo

SEQ ID NO: 301949 - DNA, 72 bp, Homo sapiens; identical to SEQ ID NO: 252593
  chr3:127515530-127515602
  hypo

SEQ ID NO: 301950 - DNA, 90 bp, Homo sapiens; identical to SEQ ID NO: 209037
  chr3:127534724-127534814
  hypo

SEQ ID NO: 301951 - DNA, 67 bp, Homo sapiens; identical to SEQ ID NO: 209038
  chr3:127534897-127534964
  hypo

SEQ ID NO: 301952 - DNA, 38 bp, Homo sapiens; identical to SEQ ID NO: 252596
  chr3:127537084-127537122
  hypo

SEQ ID NO: 301953 - DNA, 109 bp, Homo sapiens
  chr3:127570889-127570998
  hypo
tcacaggtgggcctcgggctgctcgaggagggaggagccggcagagccaaggaacacagaggcctcacagggggttaatcactccctccacctgccatatggccaggga

SEQ ID NO: 301954 - DNA, 80 bp, Homo sapiens; identical to SEQ ID NO: 252598
  chr3:127637229-127637309
  hypo

SEQ ID NO: 301955 - DNA, 155 bp, Homo sapiens
  chr3:127731083-127731238
  hypo
catcagctatgacgtcatcgcacacattcctctctgtgtgtggtgatgctggtgtacacaaacccactgcactgccagtcggatgaaagcccagcacatgcaattatgtacagtacataatacttgatcctattaataaacgactgtgttactgt

SEQ ID NO: 301956 - DNA, 81 bp, Homo sapiens; identical to SEQ ID NO: 252600
  chr3:127788443-127788524
  hypo

SEQ ID NO: 301957 - DNA, 129 bp, Homo sapiens; identical to SEQ ID NO: 199082
  chr3:127794264-127794393
  hypo

SEQ ID NO: 301958 - DNA, 104 bp, Homo sapiens; identical to SEQ ID NO: 281452
  chr3:127795650-127795754
  hypo

SEQ ID NO: 301959 - DNA, 182 bp, Homo sapiens; identical to SEQ ID NO: 252601
  chr3:127798795-127798977
  hypo

SEQ ID NO: 301960 - DNA, 213 bp, Homo sapiens; identical to SEQ ID NO: 252602
  chr3:127816140-127816353
  hypo

SEQ ID NO: 301961 - DNA, 73 bp, Homo sapiens; identical to SEQ ID NO: 252603
  chr3:127865562-127865635
  hypo

SEQ ID NO: 301962 - DNA, 262 bp, Homo sapiens; identical to SEQ ID NO: 252604
  chr3:127937301-127937563
  hypo

SEQ ID NO: 301963 - DNA, 210 bp, Homo sapiens; identical to SEQ ID NO: 252605
  chr3:127993823-127994033
  hypo

SEQ ID NO: 301964 - DNA, 83 bp, Homo sapiens; identical to SEQ ID NO: 252606
  chr3:128004544-128004627
  hypo

SEQ ID NO: 301965 - DNA, 72 bp, Homo sapiens
  chr3:128056311-128056383
  hypo
catgaggcccctggccgccctctctcacaggaaggctcataaacacaaggatctcgctcaagccccggcacg

SEQ ID NO: 301966 - DNA, 67 bp, Homo sapiens
  chr3:128056497-128056564
  hypo
gtcacaaccaggtttctcagcagctcctgtgctgggcactgaggacgcagcatagggagagcacagt

SEQ ID NO: 301967 - DNA, 308 bp, Homo sapiens; identical to SEQ ID NO: 252608
  chr3:128070501-128070809
  hypo

SEQ ID NO: 301968 - DNA, 136 bp, Homo sapiens; identical to SEQ ID NO: 209041
  chr3:128080966-128081102
  hypo

SEQ ID NO: 301969 - DNA, 117 bp, Homo sapiens; identical to SEQ ID NO: 252610
  chr3:128110728-128110845
  hypo

SEQ ID NO: 301970 - DNA, 62 bp, Homo sapiens; identical to SEQ ID NO: 209042
  chr3:128118207-128118269
  hypo

SEQ ID NO: 301971 - DNA, 361 bp, Homo sapiens; identical to SEQ ID NO: 252612
  chr3:128123187-128123548
  hypo

SEQ ID NO: 301972 - DNA, 102 bp, Homo sapiens; identical to SEQ ID NO: 252613
  chr3:128179465-128179567
  hypo

SEQ ID NO: 301973 - DNA, 205 bp, Homo sapiens; identical to SEQ ID NO: 209043
  chr3:128182027-128182232
  hypo

SEQ ID NO: 301974 - DNA, 39 bp, Homo sapiens; identical to SEQ ID NO: 209044
  chr3:128290742-128290781
  hypo

SEQ ID NO: 301975 - DNA, 188 bp, Homo sapiens; identical to SEQ ID NO: 252616
  chr3:128340982-128341170
  hypo

SEQ ID NO: 301976 - DNA, 45 bp, Homo sapiens; identical to SEQ ID NO: 252617
  chr3:128401972-128402017
  hypo

SEQ ID NO: 301977 - DNA, 120 bp, Homo sapiens; identical to SEQ ID NO: 252618
  chr3:128500450-128500570
  hypo

SEQ ID NO: 301978 - DNA, 120 bp, Homo sapiens; identical to SEQ ID NO: 252619
  chr3:128526383-128526503
  hypo

SEQ ID NO: 301979 - DNA, 142 bp, Homo sapiens; identical to SEQ ID NO: 252620
  chr3:128581911-128582053
  hypo

SEQ ID NO: 301980 - DNA, 226 bp, Homo sapiens; identical to SEQ ID NO: 209045
  chr3:128737541-128737767
  hypo

SEQ ID NO: 301981 - DNA, 271 bp, Homo sapiens; identical to SEQ ID NO: 252623
  chr3:128782774-128783045
  hypo

SEQ ID NO: 301982 - DNA, 163 bp, Homo sapiens; identical to SEQ ID NO: 209046
  chr3:128785014-128785177
  hypo

SEQ ID NO: 301983 - DNA, 84 bp, Homo sapiens; identical to SEQ ID NO: 209047
  chr3:128791633-128791717
  hypo

SEQ ID NO: 301984 - DNA, 120 bp, Homo sapiens; identical to SEQ ID NO: 252626
  chr3:128908773-128908893
  hypo

SEQ ID NO: 301985 - DNA, 67 bp, Homo sapiens; identical to SEQ ID NO: 252627
  chr3:128973540-128973607
  hypo

SEQ ID NO: 301986 - DNA, 31 bp, Homo sapiens; identical to SEQ ID NO: 209048
  chr3:129008731-129008762
  hypo

SEQ ID NO: 301987 - DNA, 478 bp, Homo sapiens; identical to SEQ ID NO: 252629
  chr3:129045163-129045641
  hypo

SEQ ID NO: 301988 - DNA, 106 bp, Homo sapiens; identical to SEQ ID NO: 209049
  chr3:129221882-129221988
  hypo

SEQ ID NO: 301989 - DNA, 171 bp, Homo sapiens; identical to SEQ ID NO: 252631
  chr3:129231141-129231312
  hypo

SEQ ID NO: 301990 - DNA, 194 bp, Homo sapiens
  chr3:129240358-129240552
  hypo
cccaaggagagtggctgcagaggcccccagtgggaagtgtcggagctagagccccatcccagagcccttgccccaccccagaccgcccctcctccctgcctccctccgcatctctctggagatgatggaggaaaataaagaaagggagccagacagttgtgccaacagaactcctccgtcgagtgtctaattac

SEQ ID NO: 301991 - DNA, 166 bp, Homo sapiens; identical to SEQ ID NO: 252633
  chr3:129246205-129246371
  hypo

SEQ ID NO: 301992 - DNA, 82 bp, Homo sapiens; identical to SEQ ID NO: 252634
  chr3:129247538-129247620
  hypo

SEQ ID NO: 301993 - DNA, 166 bp, Homo sapiens; identical to SEQ ID NO: 252635
  chr3:129251136-129251302
  hypo

SEQ ID NO: 301994 - DNA, 111 bp, Homo sapiens; identical to SEQ ID NO: 252636
  chr3:129252488-129252599
  hypo

SEQ ID NO: 301995 - DNA, 181 bp, Homo sapiens; identical to SEQ ID NO: 252637
  chr3:129284111-129284292
  hypo

SEQ ID NO: 301996 - DNA, 138 bp, Homo sapiens; identical to SEQ ID NO: 252638
  chr3:129289962-129290100
  hypo

SEQ ID NO: 301997 - DNA, 359 bp, Homo sapiens; identical to SEQ ID NO: 209050
  chr3:129290347-129290706
  hypo

SEQ ID NO: 301998 - DNA, 124 bp, Homo sapiens; identical to SEQ ID NO: 199088
  chr3:129324048-129324172
  hypo

SEQ ID NO: 301999 - DNA, 365 bp, Homo sapiens; identical to SEQ ID NO: 199089
  chr3:129324202-129324567
  hypo

SEQ ID NO: 302000 - DNA, 234 bp, Homo sapiens; identical to SEQ ID NO: 199090
  chr3:129324659-129324893
  hypo

SEQ ID NO: 302001 - DNA, 52 bp, Homo sapiens; identical to SEQ ID NO: 252640
  chr3:129370402-129370454
  hypo

SEQ ID NO: 302002 - DNA, 86 bp, Homo sapiens; identical to SEQ ID NO: 209054
  chr3:129372595-129372681
  hypo

SEQ ID NO: 302003 - DNA, 52 bp, Homo sapiens; identical to SEQ ID NO: 252642
  chr3:129373806-129373858
  hypo

SEQ ID NO: 302004 - DNA, 87 bp, Homo sapiens; identical to SEQ ID NO: 252643
  chr3:129398051-129398138
  hypo

SEQ ID NO: 302005 - DNA, 33 bp, Homo sapiens; identical to SEQ ID NO: 252644
  chr3:129487992-129488025
  hypo

SEQ ID NO: 302006 - DNA, 87 bp, Homo sapiens; identical to SEQ ID NO: 252645
  chr3:129510237-129510324
  hypo

SEQ ID NO: 302007 - DNA, 39 bp, Homo sapiens; identical to SEQ ID NO: 252646
  chr3:129511160-129511199
  hypo

SEQ ID NO: 302008 - DNA, 39 bp, Homo sapiens; identical to SEQ ID NO: 252647
  chr3:129511379-129511418
  hypo

SEQ ID NO: 302009 - DNA, 37 bp, Homo sapiens; identical to SEQ ID NO: 252648
  chr3:129597082-129597119
  hypo

SEQ ID NO: 302010 - DNA, 144 bp, Homo sapiens
  chr3:129982888-129983032
  hypo
gcctccctgtgctcgagggcttccacttgaccacctatggcaaccggaagcagatgcagagacatgtgcgcgaggcttcagcccgccccttacagggaaccgccccccctgggccacgccctggagtggacgctggagaatgtg

SEQ ID NO: 302011 - DNA, 258 bp, Homo sapiens; identical to SEQ ID NO: 209055
  chr3:129983103-129983361
  hypo

SEQ ID NO: 302012 - DNA, 51 bp, Homo sapiens; identical to SEQ ID NO: 281478
  chr3:130064848-130064899
  hypo

SEQ ID NO: 302013 - DNA, 84 bp, Homo sapiens; identical to SEQ ID NO: 199095
  chr3:130235709-130235793
  hypo

SEQ ID NO: 302014 - DNA, 43 bp, Homo sapiens; identical to SEQ ID NO: 209057
  chr3:130237352-130237395
  hypo

SEQ ID NO: 302015 - DNA, 244 bp, Homo sapiens; identical to SEQ ID NO: 252651
  chr3:130424515-130424759
  hypo

SEQ ID NO: 302016 - DNA, 114 bp, Homo sapiens; identical to SEQ ID NO: 252652
  chr3:130460753-130460867
  hypo

SEQ ID NO: 302017 - DNA, 157 bp, Homo sapiens; identical to SEQ ID NO: 252653
  chr3:130464453-130464610
  hypo

SEQ ID NO: 302018 - DNA, 120 bp, Homo sapiens; identical to SEQ ID NO: 252654
  chr3:131595102-131595222
  hypo

SEQ ID NO: 302019 - DNA, 151 bp, Homo sapiens; identical to SEQ ID NO: 209058
  chr3:132034534-132034685
  hypo

SEQ ID NO: 302020 - DNA, 156 bp, Homo sapiens; identical to SEQ ID NO: 209059
  chr3:132398975-132399131
  hypo

SEQ ID NO: 302021 - DNA, 36 bp, Homo sapiens; identical to SEQ ID NO: 209060
  chr3:132399371-132399407
  hypo

SEQ ID NO: 302022 - DNA, 210 bp, Homo sapiens; identical to SEQ ID NO: 281492
  chr3:132756102-132756312
  hypo

SEQ ID NO: 302023 - DNA, 60 bp, Homo sapiens; identical to SEQ ID NO: 281493
  chr3:132756477-132756537
  hypo

SEQ ID NO: 302024 - DNA, 49 bp, Homo sapiens; identical to SEQ ID NO: 199099
  chr3:133276458-133276507
  hypo

SEQ ID NO: 302025 - DNA, 98 bp, Homo sapiens; identical to SEQ ID NO: 252661
  chr3:133364598-133364696
  hypo

SEQ ID NO: 302026 - DNA, 108 bp, Homo sapiens; identical to SEQ ID NO: 209062
  chr3:133560513-133560621
  hypo

SEQ ID NO: 302027 - DNA, 134 bp, Homo sapiens; identical to SEQ ID NO: 281499
  chr3:133646157-133646291
  hypo

SEQ ID NO: 302028 - DNA, 266 bp, Homo sapiens; identical to SEQ ID NO: 281500
  chr3:133646451-133646717
  hypo

SEQ ID NO: 302029 - DNA, 227 bp, Homo sapiens; identical to SEQ ID NO: 209063
  chr3:133648404-133648631
  hypo

SEQ ID NO: 302030 - DNA, 74 bp, Homo sapiens; identical to SEQ ID NO: 281502
  chr3:133748245-133748319
  hypo

SEQ ID NO: 302031 - DNA, 80 bp, Homo sapiens; identical to SEQ ID NO: 281503
  chr3:133748401-133748481
  hypo

SEQ ID NO: 302032 - DNA, 72 bp, Homo sapiens; identical to SEQ ID NO: 281504
  chr3:133748576-133748648
  hypo

SEQ ID NO: 302033 - DNA, 52 bp, Homo sapiens; identical to SEQ ID NO: 199100
  chr3:133969907-133969959
  hypo

SEQ ID NO: 302034 - DNA, 93 bp, Homo sapiens; identical to SEQ ID NO: 209065
  chr3:134080496-134080589
  hypo

SEQ ID NO: 302035 - DNA, 475 bp, Homo sapiens; identical to SEQ ID NO: 199102
  chr3:134092643-134093118
  hypo

SEQ ID NO: 302036 - DNA, 404 bp, Homo sapiens; identical to SEQ ID NO: 199103
  chr3:134093148-134093552
  hypo

SEQ ID NO: 302037 - DNA, 239 bp, Homo sapiens; identical to SEQ ID NO: 39653
  chr3:134093626-134093865
  hypo

SEQ ID NO: 302038 - DNA, 174 bp, Homo sapiens; identical to SEQ ID NO: 252665
  chr3:134195846-134196020
  hypo

SEQ ID NO: 302039 - DNA, 157 bp, Homo sapiens; identical to SEQ ID NO: 209069
  chr3:134203266-134203423
  hypo

SEQ ID NO: 302040 - DNA, 328 bp, Homo sapiens; identical to SEQ ID NO: 281514
  chr3:134513742-134514070
  hypo

SEQ ID NO: 302041 - DNA, 78 bp, Homo sapiens; identical to SEQ ID NO: 281515
  chr3:134514788-134514866
  hypo

SEQ ID NO: 302042 - DNA, 140 bp, Homo sapiens; identical to SEQ ID NO: 281516
  chr3:134514895-134515035
  hypo

SEQ ID NO: 302043 - DNA, 85 bp, Homo sapiens; identical to SEQ ID NO: 252668
  chr3:135601878-135601963
  hypo

SEQ ID NO: 302044 - DNA, 294 bp, Homo sapiens; identical to SEQ ID NO: 199105
  chr3:135684610-135684904
  hypo

SEQ ID NO: 302045 - DNA, 172 bp, Homo sapiens; identical to SEQ ID NO: 252669
  chr3:135741866-135742038
  hypo

SEQ ID NO: 302046 - DNA, 310 bp, Homo sapiens; identical to SEQ ID NO: 252670
  chr3:135870037-135870347
  hypo

SEQ ID NO: 302047 - DNA, 147 bp, Homo sapiens; identical to SEQ ID NO: 252671
  chr3:135900336-135900483
  hypo

SEQ ID NO: 302048 - DNA, 135 bp, Homo sapiens; identical to SEQ ID NO: 252672
  chr3:136454636-136454771
  hypo

SEQ ID NO: 302049 - DNA, 37 bp, Homo sapiens; identical to SEQ ID NO: 209072
  chr3:136582612-136582649
  hypo

SEQ ID NO: 302050 - DNA, 36 bp, Homo sapiens; identical to SEQ ID NO: 209073
  chr3:136583309-136583345
  hypo

SEQ ID NO: 302051 - DNA, 31 bp, Homo sapiens; identical to SEQ ID NO: 252676
  chr3:136593312-136593343
  hypo

SEQ ID NO: 302052 - DNA, 132 bp, Homo sapiens; identical to SEQ ID NO: 252677
  chr3:136678363-136678495
  hypo

SEQ ID NO: 302053 - DNA, 120 bp, Homo sapiens; identical to SEQ ID NO: 252678
  chr3:137433349-137433469
  hypo

SEQ ID NO: 302054 - DNA, 32 bp, Homo sapiens; identical to SEQ ID NO: 252680
  chr3:137561456-137561488
  hypo

SEQ ID NO: 302055 - DNA, 195 bp, Homo sapiens; identical to SEQ ID NO: 252683
  chr3:137783021-137783216
  hypo

SEQ ID NO: 302056 - DNA, 195 bp, Homo sapiens; identical to SEQ ID NO: 209074
  chr3:137822427-137822622
  hypo

SEQ ID NO: 302057 - DNA, 162 bp, Homo sapiens; identical to SEQ ID NO: 252685
  chr3:137831298-137831460
  hypo

SEQ ID NO: 302058 - DNA, 31 bp, Homo sapiens; identical to SEQ ID NO: 209075
  chr3:137891419-137891450
  hypo

SEQ ID NO: 302059 - DNA, 34 bp, Homo sapiens; identical to SEQ ID NO: 209076
  chr3:138001202-138001236
  hypo

SEQ ID NO: 302060 - DNA, 41 bp, Homo sapiens; identical to SEQ ID NO: 252688
  chr3:138020318-138020359
  hypo

SEQ ID NO: 302061 - DNA, 703 bp, Homo sapiens; identical to SEQ ID NO: 199114
  chr3:138067014-138067717
  hypo

SEQ ID NO: 302062 - DNA, 115 bp, Homo sapiens; identical to SEQ ID NO: 281538
  chr3:138067747-138067862
  hypo

SEQ ID NO: 302063 - DNA, 58 bp, Homo sapiens; identical to SEQ ID NO: 252689
  chr3:138081464-138081522
  hypo

SEQ ID NO: 302064 - DNA, 201 bp, Homo sapiens; identical to SEQ ID NO: 209079
  chr3:138158923-138159124
  hypo

SEQ ID NO: 302065 - DNA, 161 bp, Homo sapiens; identical to SEQ ID NO: 222238
  chr3:138327435-138327596
  hypo

SEQ ID NO: 302066 - DNA, 146 bp, Homo sapiens; identical to SEQ ID NO: 252691
  chr3:138413616-138413762
  hypo

SEQ ID NO: 302067 - DNA, 34 bp, Homo sapiens; identical to SEQ ID NO: 209080
  chr3:138542243-138542277
  hypo

SEQ ID NO: 302068 - DNA, 34 bp, Homo sapiens; identical to SEQ ID NO: 209081
  chr3:138542517-138542551
  hypo

SEQ ID NO: 302069 - DNA, 38 bp, Homo sapiens; identical to SEQ ID NO: 209082
  chr3:138577523-138577561
  hypo

SEQ ID NO: 302070 - DNA, 83 bp, Homo sapiens; identical to SEQ ID NO: 252695
  chr3:138635480-138635563
  hypo

SEQ ID NO: 302071 - DNA, 457 bp, Homo sapiens; identical to SEQ ID NO: 222239
  chr3:138654715-138655172
  hypo

SEQ ID NO: 302072 - DNA, 36 bp, Homo sapiens; identical to SEQ ID NO: 209083
  chr3:138981444-138981480
  hypo

SEQ ID NO: 302073 - DNA, 212 bp, Homo sapiens; identical to SEQ ID NO: 252697
  chr3:139180923-139181135
  hypo

SEQ ID NO: 302074 - DNA, 270 bp, Homo sapiens; identical to SEQ ID NO: 199118
  chr3:139258672-139258942
  hypo

SEQ ID NO: 302075 - DNA, 107 bp, Homo sapiens; identical to SEQ ID NO: 209085
  chr3:139352980-139353087
  hypo

SEQ ID NO: 302076 - DNA, 498 bp, Homo sapiens; identical to SEQ ID NO: 252699
  chr3:140401392-140401890
  hypo

SEQ ID NO: 302077 - DNA, 42 bp, Homo sapiens
  chr3:140434249-140434291
  hypo
ctattaaacctctgctcctaaattcctcgtgtgtgtctatgt

SEQ ID NO: 302078 - DNA, 1525 bp, Homo sapiens; identical to SEQ ID NO: 199120
  chr3:140660223-140661748
  hypo

SEQ ID NO: 302079 - DNA, 38 bp, Homo sapiens; identical to SEQ ID NO: 252701
  chr3:141053875-141053913
  hypo

SEQ ID NO: 302080 - DNA, 232 bp, Homo sapiens; identical to SEQ ID NO: 209087
  chr3:141086062-141086294
  hypo

SEQ ID NO: 302081 - DNA, 313 bp, Homo sapiens; identical to SEQ ID NO: 209088
  chr3:141161722-141162035
  hypo

SEQ ID NO: 302082 - DNA, 122 bp, Homo sapiens; identical to SEQ ID NO: 209089
  chr3:141174174-141174296
  hypo

SEQ ID NO: 302083 - DNA, 61 bp, Homo sapiens; identical to SEQ ID NO: 252705
  chr3:141174927-141174988
  hypo

SEQ ID NO: 302084 - DNA, 33 bp, Homo sapiens; identical to SEQ ID NO: 252706
  chr3:141363515-141363548
  hypo

SEQ ID NO: 302085 - DNA, 110 bp, Homo sapiens; identical to SEQ ID NO: 252708
  chr3:141495378-141495488
  hypo

SEQ ID NO: 302086 - DNA, 143 bp, Homo sapiens; identical to SEQ ID NO: 252709
  chr3:141495874-141496017
  hypo

SEQ ID NO: 302087 - DNA, 38 bp, Homo sapiens; identical to SEQ ID NO: 209090
  chr3:141509677-141509715
  hypo

SEQ ID NO: 302088 - DNA, 130 bp, Homo sapiens; identical to SEQ ID NO: 252711
  chr3:141523991-141524121
  hypo

SEQ ID NO: 302089 - DNA, 213 bp, Homo sapiens; identical to SEQ ID NO: 209091
  chr3:141622402-141622615
  hypo

SEQ ID NO: 302090 - DNA, 223 bp, Homo sapiens; identical to SEQ ID NO: 209092
  chr3:141656809-141657032
  hypo

SEQ ID NO: 302091 - DNA, 135 bp, Homo sapiens; identical to SEQ ID NO: 209093
  chr3:141657079-141657214
  hypo

SEQ ID NO: 302092 - DNA, 91 bp, Homo sapiens; identical to SEQ ID NO: 252714
  chr3:141664267-141664358
  hypo

SEQ ID NO: 302093 - DNA, 104 bp, Homo sapiens; identical to SEQ ID NO: 252715
  chr3:141664566-141664670
  hypo

SEQ ID NO: 302094 - DNA, 204 bp, Homo sapiens; identical to SEQ ID NO: 252716
  chr3:141868982-141869186
  hypo

SEQ ID NO: 302095 - DNA, 35 bp, Homo sapiens; identical to SEQ ID NO: 209094
  chr3:141954424-141954459
  hypo

SEQ ID NO: 302096 - DNA, 89 bp, Homo sapiens; identical to SEQ ID NO: 252718
  chr3:142103578-142103667
  hypo

SEQ ID NO: 302097 - DNA, 102 bp, Homo sapiens; identical to SEQ ID NO: 209095
  chr3:142321774-142321876
  hypo

SEQ ID NO: 302098 - DNA, 40 bp, Homo sapiens; identical to SEQ ID NO: 252720
  chr3:142354392-142354432
  hypo

SEQ ID NO: 302099 - DNA, 143 bp, Homo sapiens
  chr3:142499677-142499820
  hypo
atgattatgaggaactagcccggcaatgtaaaatgtttgctaaggatttacttgcacaagcccggaattctcgtgaattggaagttattctaaaccatacgtctagtgacgagcctcttgacaaacggggattattagaagaa

SEQ ID NO: 302100 - DNA, 63 bp, Homo sapiens; identical to SEQ ID NO: 209096
  chr3:142537575-142537638
  hypo

SEQ ID NO: 302101 - DNA, 76 bp, Homo sapiens; identical to SEQ ID NO: 209097
  chr3:142683683-142683759
  hypo

SEQ ID NO: 302102 - DNA, 33 bp, Homo sapiens; identical to SEQ ID NO: 252726
  chr3:142725294-142725327
  hypo

SEQ ID NO: 302103 - DNA, 39 bp, Homo sapiens; identical to SEQ ID NO: 209098
  chr3:142727625-142727664
  hypo

SEQ ID NO: 302104 - DNA, 38 bp, Homo sapiens; identical to SEQ ID NO: 209099
  chr3:142727844-142727882
  hypo

SEQ ID NO: 302105 - DNA, 44 bp, Homo sapiens; identical to SEQ ID NO: 209100
  chr3:142728140-142728184
  hypo

SEQ ID NO: 302106 - DNA, 131 bp, Homo sapiens; identical to SEQ ID NO: 252730
  chr3:142775176-142775307
  hypo

SEQ ID NO: 302107 - DNA, 35 bp, Homo sapiens; identical to SEQ ID NO: 209101
  chr3:142788519-142788554
  hypo

SEQ ID NO: 302108 - DNA, 158 bp, Homo sapiens; identical to SEQ ID NO: 252733
  chr3:142820241-142820399
  hypo

SEQ ID NO: 302109 - DNA, 34 bp, Homo sapiens; identical to SEQ ID NO: 199122
  chr3:142837797-142837831
  hypo

SEQ ID NO: 302110 - DNA, 606 bp, Homo sapiens
  chr3:142895258-142895864
  hypo
cctcctggtggcggagaccccggtgggggtagcggggggttcccgggaggccgagggaagcaagacatcggggacattctgcagcagataatgaccatcaccgaccagagcctggacgaggcccaggccaagaaacacgccctaaactgccaccgaatgaagcctgctctctttagcgtcctgtgtgaaatcaaggagaaaaccggcctcagcattcggagctcccaggaggaggagccggtggacccacagctgatgcgcttggacaacatgcttctggcagagggtgtggctgggcccgagaaagggggcggctcagcagcagcagctgcagccgctgcagcctctggtggtggcgtgtcccctgacaactccatcgaacactcggactatcgcagcaaacttgcccagatccgtcacatataccactcggaactggagaagtatgagcaggcatgtaatgagttcacgacccatgtcatgaacctgctgagggagcagagccgcaccaggcccgtggcccccaaagagatggaacgcatggtgagcatcatccatcgaaagttcagcgccatccagatgcagctgaagcagagcacctgcgag

SEQ ID NO: 302111 - DNA, 33 bp, Homo sapiens; identical to SEQ ID NO: 252735
  chr3:142930276-142930309
  hypo

SEQ ID NO: 302112 - DNA, 99 bp, Homo sapiens; identical to SEQ ID NO: 209104
  chr3:142957651-142957750
  hypo

SEQ ID NO: 302113 - DNA, 98 bp, Homo sapiens; identical to SEQ ID NO: 209105
  chr3:143027449-143027547
  hypo

SEQ ID NO: 302114 - DNA, 357 bp, Homo sapiens; identical to SEQ ID NO: 252738
  chr3:143316155-143316512
  hypo

SEQ ID NO: 302115 - DNA, 78 bp, Homo sapiens; identical to SEQ ID NO: 252739
  chr3:143316755-143316833
  hypo

SEQ ID NO: 302116 - DNA, 72 bp, Homo sapiens; identical to SEQ ID NO: 252740
  chr3:143317071-143317143
  hypo

SEQ ID NO: 302117 - DNA, 173 bp, Homo sapiens; identical to SEQ ID NO: 281571
  chr3:145878695-145878868
  hypo

SEQ ID NO: 302118 - DNA, 363 bp, Homo sapiens; identical to SEQ ID NO: 199127
  chr3:145878937-145879300
  hypo

SEQ ID NO: 302119 - DNA, 140 bp, Homo sapiens; identical to SEQ ID NO: 252742
  chr3:148394230-148394370
  hypo

SEQ ID NO: 302120 - DNA, 39 bp, Homo sapiens; identical to SEQ ID NO: 252743
  chr3:148472162-148472201
  hypo

SEQ ID NO: 302121 - DNA, 203 bp, Homo sapiens; identical to SEQ ID NO: 252744
  chr3:148556040-148556243
  hypo

SEQ ID NO: 302122 - DNA, 106 bp, Homo sapiens
  chr3:148705305-148705411
  hypo
cctgctgagccttaaacctccgggagatttcctctttgaactccttgaccgaggctcgatcgcagatcacaatttcctccttgtccttgggggtcttgacggtgac

SEQ ID NO: 302123 - DNA, 70 bp, Homo sapiens
  chr3:148705462-148705532
  hypo
gccacccggccgcccgccagcccgcccggctcctcctcctccccgctcgcccggccggcccggctcggct

SEQ ID NO: 302124 - DNA, 214 bp, Homo sapiens; identical to SEQ ID NO: 199133
  chr3:148709993-148710207
  hypo

SEQ ID NO: 302125 - DNA, 33 bp, Homo sapiens; identical to SEQ ID NO: 209110
  chr3:148726132-148726165
  hypo

SEQ ID NO: 302126 - DNA, 54 bp, Homo sapiens; identical to SEQ ID NO: 252747
  chr3:148802384-148802438
  hypo

SEQ ID NO: 302127 - DNA, 342 bp, Homo sapiens; identical to SEQ ID NO: 281594
  chr3:148803822-148804164
  hypo

SEQ ID NO: 302128 - DNA, 365 bp, Homo sapiens; identical to SEQ ID NO: 281595
  chr3:148804199-148804564
  hypo

SEQ ID NO: 302129 - DNA, 238 bp, Homo sapiens; identical to SEQ ID NO: 252749
  chr3:148804769-148805007
  hypo

SEQ ID NO: 302130 - DNA, 58 bp, Homo sapiens; identical to SEQ ID NO: 209111
  chr3:148867081-148867139
  hypo

SEQ ID NO: 302131 - DNA, 62 bp, Homo sapiens; identical to SEQ ID NO: 252751
  chr3:148904409-148904471
  hypo

SEQ ID NO: 302132 - DNA, 143 bp, Homo sapiens; identical to SEQ ID NO: 209112
  chr3:149096959-149097102
  hypo

SEQ ID NO: 302133 - DNA, 32 bp, Homo sapiens; identical to SEQ ID NO: 209113
  chr3:149233987-149234019
  hypo

SEQ ID NO: 302134 - DNA, 120 bp, Homo sapiens; identical to SEQ ID NO: 252754
  chr3:149360170-149360290
  hypo

SEQ ID NO: 302135 - DNA, 44 bp, Homo sapiens; identical to SEQ ID NO: 252755
  chr3:149470937-149470981
  hypo

SEQ ID NO: 302136 - DNA, 288 bp, Homo sapiens; identical to SEQ ID NO: 252756
  chr3:149700884-149701172
  hypo

SEQ ID NO: 302137 - DNA, 173 bp, Homo sapiens; identical to SEQ ID NO: 252757
  chr3:149931181-149931354
  hypo

SEQ ID NO: 302138 - DNA, 189 bp, Homo sapiens; identical to SEQ ID NO: 252759
  chr3:150026518-150026707
  hypo

SEQ ID NO: 302139 - DNA, 150 bp, Homo sapiens; identical to SEQ ID NO: 252760
  chr3:150086093-150086243
  hypo

SEQ ID NO: 302140 - DNA, 103 bp, Homo sapiens; identical to SEQ ID NO: 209114
  chr3:150187004-150187107
  hypo

SEQ ID NO: 302141 - DNA, 163 bp, Homo sapiens; identical to SEQ ID NO: 209115
  chr3:150237438-150237601
  hypo

SEQ ID NO: 302142 - DNA, 227 bp, Homo sapiens; identical to SEQ ID NO: 199137
  chr3:150320966-150321193
  hypo

SEQ ID NO: 302143 - DNA, 430 bp, Homo sapiens; identical to SEQ ID NO: 252764
  chr3:150329378-150329808
  hypo

SEQ ID NO: 302144 - DNA, 159 bp, Homo sapiens; identical to SEQ ID NO: 252765
  chr3:150379955-150380114
  hypo

SEQ ID NO: 302145 - DNA, 41 bp, Homo sapiens; identical to SEQ ID NO: 252766
  chr3:150420384-150420425
  hypo

SEQ ID NO: 302146 - DNA, 136 bp, Homo sapiens
  chr3:150443086-150443222
  hypo
tctgggcagagacacagagtcgtgaaagaactcggtatgtttgtgaactgtgggaagttcagggagactggagcggagggtgccttaggaatgtgctatagaggagtctgtcaagacctgggtgcctgctacactc

SEQ ID NO: 302147 - DNA, 186 bp, Homo sapiens; identical to SEQ ID NO: 209118
  chr3:150497417-150497603
  hypo

SEQ ID NO: 302148 - DNA, 86 bp, Homo sapiens; identical to SEQ ID NO: 209119
  chr3:150670268-150670354
  hypo

SEQ ID NO: 302149 - DNA, 84 bp, Homo sapiens; identical to SEQ ID NO: 281604
  chr3:150802803-150802887
  hypo

SEQ ID NO: 302150 - DNA, 91 bp, Homo sapiens; identical to SEQ ID NO: 199140
  chr3:150805097-150805188
  hypo

SEQ ID NO: 302151 - DNA, 96 bp, Homo sapiens; identical to SEQ ID NO: 252770
  chr3:150848438-150848534
  hypo

SEQ ID NO: 302152 - DNA, 156 bp, Homo sapiens; identical to SEQ ID NO: 209122
  chr3:151112506-151112662
  hypo

SEQ ID NO: 302153 - DNA, 56 bp, Homo sapiens; identical to SEQ ID NO: 252772
  chr3:152786503-152786559
  hypo

SEQ ID NO: 302154 - DNA, 120 bp, Homo sapiens; identical to SEQ ID NO: 252773
  chr3:152830629-152830749
  hypo

SEQ ID NO: 302155 - DNA, 149 bp, Homo sapiens; identical to SEQ ID NO: 209123
  chr3:152877717-152877866
  hypo

SEQ ID NO: 302156 - DNA, 39 bp, Homo sapiens; identical to SEQ ID NO: 252775
  chr3:152891478-152891517
  hypo

SEQ ID NO: 302157 - DNA, 45 bp, Homo sapiens; identical to SEQ ID NO: 209124
  chr3:153010523-153010568
  hypo

SEQ ID NO: 302158 - DNA, 45 bp, Homo sapiens; identical to SEQ ID NO: 209125
  chr3:153010748-153010793
  hypo

SEQ ID NO: 302159 - DNA, 37 bp, Homo sapiens; identical to SEQ ID NO: 252778
  chr3:153403754-153403791
  hypo

SEQ ID NO: 302160 - DNA, 37 bp, Homo sapiens; identical to SEQ ID NO: 252779
  chr3:153404031-153404068
  hypo

SEQ ID NO: 302161 - DNA, 81 bp, Homo sapiens; identical to SEQ ID NO: 209126
  chr3:153824879-153824960
  hypo

SEQ ID NO: 302162 - DNA, 161 bp, Homo sapiens; identical to SEQ ID NO: 252781
  chr3:154907062-154907223
  hypo

SEQ ID NO: 302163 - DNA, 42 bp, Homo sapiens; identical to SEQ ID NO: 252782
  chr3:155315612-155315654
  hypo

SEQ ID NO: 302164 - DNA, 39 bp, Homo sapiens; identical to SEQ ID NO: 209127
  chr3:155454719-155454758
  hypo

SEQ ID NO: 302165 - DNA, 38 bp, Homo sapiens; identical to SEQ ID NO: 209128
  chr3:155454998-155455036
  hypo

SEQ ID NO: 302166 - DNA, 139 bp, Homo sapiens
  chr3:155460891-155461030
  hypo
taagcaagaagctaccgctccttctacataccccttaagatgtgtacttttgccaaatgctaggctgtatgtaaacaaacggattttaaaagaggggatagggctgtcaagattcacaattttatgaaaatgaaaatga

SEQ ID NO: 302167 - DNA, 41 bp, Homo sapiens; identical to SEQ ID NO: 199149
  chr3:155722292-155722333
  hypo

SEQ ID NO: 302168 - DNA, 85 bp, Homo sapiens; identical to SEQ ID NO: 252787
  chr3:156015533-156015618
  hypo

SEQ ID NO: 302169 - DNA, 62 bp, Homo sapiens; identical to SEQ ID NO: 252788
  chr3:156396587-156396649
  hypo

SEQ ID NO: 302170 - DNA, 65 bp, Homo sapiens; identical to SEQ ID NO: 209130
  chr3:156543100-156543165
  hypo

SEQ ID NO: 302171 - DNA, 123 bp, Homo sapiens; identical to SEQ ID NO: 209131
  chr3:156543195-156543318
  hypo

SEQ ID NO: 302172 - DNA, 163 bp, Homo sapiens; identical to SEQ ID NO: 252790
  chr3:156795059-156795222
  hypo

SEQ ID NO: 302173 - DNA, 167 bp, Homo sapiens; identical to SEQ ID NO: 199152
  chr3:156799361-156799528
  hypo

SEQ ID NO: 302174 - DNA, 43 bp, Homo sapiens; identical to SEQ ID NO: 252791
  chr3:156843278-156843321
  hypo

SEQ ID NO: 302175 - DNA, 32 bp, Homo sapiens; identical to SEQ ID NO: 252792
  chr3:156862936-156862968
  hypo

SEQ ID NO: 302176 - DNA, 42 bp, Homo sapiens; identical to SEQ ID NO: 209133
  chr3:157866879-157866921
  hypo

SEQ ID NO: 302177 - DNA, 97 bp, Homo sapiens; identical to SEQ ID NO: 252794
  chr3:158361237-158361334
  hypo

SEQ ID NO: 302178 - DNA, 37 bp, Homo sapiens; identical to SEQ ID NO: 252795
  chr3:158434648-158434685
  hypo

SEQ ID NO: 302179 - DNA, 76 bp, Homo sapiens; identical to SEQ ID NO: 252796
  chr3:158448986-158449062
  hypo

SEQ ID NO: 302180 - DNA, 32 bp, Homo sapiens; identical to SEQ ID NO: 252797
  chr3:158451330-158451362
  hypo

SEQ ID NO: 302181 - DNA, 193 bp, Homo sapiens; identical to SEQ ID NO: 252798
  chr3:158690125-158690318
  hypo

SEQ ID NO: 302182 - DNA, 37 bp, Homo sapiens; identical to SEQ ID NO: 252799
  chr3:159001224-159001261
  hypo

SEQ ID NO: 302183 - DNA, 211 bp, Homo sapiens; identical to SEQ ID NO: 222257
  chr3:159706814-159707025
  hypo

SEQ ID NO: 302184 - DNA, 170 bp, Homo sapiens; identical to SEQ ID NO: 252800
  chr3:159814276-159814446
  hypo

SEQ ID NO: 302185 - DNA, 38 bp, Homo sapiens; identical to SEQ ID NO: 252801
  chr3:160328305-160328343
  hypo

SEQ ID NO: 302186 - DNA, 1581 bp, Homo sapiens; identical to SEQ ID NO: 199171
  chr3:160472497-160474078
  hypo

SEQ ID NO: 302187 - DNA, 31 bp, Homo sapiens; identical to SEQ ID NO: 252802
  chr3:160821777-160821808
  hypo

SEQ ID NO: 302188 - DNA, 35 bp, Homo sapiens; identical to SEQ ID NO: 252803
  chr3:160863217-160863252
  hypo

SEQ ID NO: 302189 - DNA, 214 bp, Homo sapiens; identical to SEQ ID NO: 252804
  chr3:160879673-160879887
  hypo

SEQ ID NO: 302190 - DNA, 112 bp, Homo sapiens; identical to SEQ ID NO: 252805
  chr3:166834368-166834480
  hypo

SEQ ID NO: 302191 - DNA, 39 bp, Homo sapiens; identical to SEQ ID NO: 252806
  chr3:167911807-167911846
  hypo

SEQ ID NO: 302192 - DNA, 122 bp, Homo sapiens
  chr3:167916991-167917113
  hypo
tgatattactctctttacccctgcatactaggaacaatatcacgggttgagagtacagcccatgcgatattgggagtaatattctctcccccccccaccccgttaatattaggaacaatatc

SEQ ID NO: 302193 - DNA, 37 bp, Homo sapiens; identical to SEQ ID NO: 252808
  chr3:168197107-168197144
  hypo

SEQ ID NO: 302194 - DNA, 145 bp, Homo sapiens; identical to SEQ ID NO: 209136
  chr3:168608963-168609108
  hypo

SEQ ID NO: 302195 - DNA, 31 bp, Homo sapiens; identical to SEQ ID NO: 209137
  chr3:169030445-169030476
  hypo

SEQ ID NO: 302196 - DNA, 77 bp, Homo sapiens; identical to SEQ ID NO: 209138
  chr3:169200020-169200097
  hypo

SEQ ID NO: 302197 - DNA, 77 bp, Homo sapiens; identical to SEQ ID NO: 209139
  chr3:169200397-169200474
  hypo

SEQ ID NO: 302198 - DNA, 53 bp, Homo sapiens; identical to SEQ ID NO: 222260
  chr3:169380561-169380614
  hypo

SEQ ID NO: 302199 - DNA, 87 bp, Homo sapiens; identical to SEQ ID NO: 222261
  chr3:169380983-169381070
  hypo

SEQ ID NO: 302200 - DNA, 262 bp, Homo sapiens; identical to SEQ ID NO: 281682
  chr3:169381408-169381670
  hypo

SEQ ID NO: 302201 - DNA, 241 bp, Homo sapiens; identical to SEQ ID NO: 199188
  chr3:169482439-169482680
  hypo

SEQ ID NO: 302202 - DNA, 270 bp, Homo sapiens; identical to SEQ ID NO: 281688
  chr3:169530401-169530671
  hypo

SEQ ID NO: 302203 - DNA, 68 bp, Homo sapiens; identical to SEQ ID NO: 209141
  chr3:169540679-169540747
  hypo

SEQ ID NO: 302204 - DNA, 110 bp, Homo sapiens; identical to SEQ ID NO: 209142
  chr3:169656714-169656824
  hypo

SEQ ID NO: 302205 - DNA, 42 bp, Homo sapiens; identical to SEQ ID NO: 252815
  chr3:169727690-169727732
  hypo

SEQ ID NO: 302206 - DNA, 79 bp, Homo sapiens; identical to SEQ ID NO: 252816
  chr3:169780674-169780753
  hypo

SEQ ID NO: 302207 - DNA, 32 bp, Homo sapiens; identical to SEQ ID NO: 252817
  chr3:169795277-169795309
  hypo

SEQ ID NO: 302208 - DNA, 91 bp, Homo sapiens; identical to SEQ ID NO: 252818
  chr3:169795489-169795580
  hypo

SEQ ID NO: 302209 - DNA, 60 bp, Homo sapiens; identical to SEQ ID NO: 252819
  chr3:169796500-169796560
  hypo

SEQ ID NO: 302210 - DNA, 96 bp, Homo sapiens; identical to SEQ ID NO: 209143
  chr3:169896229-169896325
  hypo

SEQ ID NO: 302211 - DNA, 100 bp, Homo sapiens; identical to SEQ ID NO: 209144
  chr3:169915438-169915538
  hypo

SEQ ID NO: 302212 - DNA, 39 bp, Homo sapiens; identical to SEQ ID NO: 252822
  chr3:169916138-169916177
  hypo

SEQ ID NO: 302213 - DNA, 36 bp, Homo sapiens; identical to SEQ ID NO: 252823
  chr3:169917047-169917083
  hypo

SEQ ID NO: 302214 - DNA, 40 bp, Homo sapiens; identical to SEQ ID NO: 252825
  chr3:170154037-170154077
  hypo

SEQ ID NO: 302215 - DNA, 74 bp, Homo sapiens; identical to SEQ ID NO: 209145
  chr3:170179927-170180001
  hypo

SEQ ID NO: 302216 - DNA, 203 bp, Homo sapiens; identical to SEQ ID NO: 252827
  chr3:170184923-170185126
  hypo

SEQ ID NO: 302217 - DNA, 42 bp, Homo sapiens; identical to SEQ ID NO: 252828
  chr3:170267374-170267416
  hypo

SEQ ID NO: 302218 - DNA, 96 bp, Homo sapiens; identical to SEQ ID NO: 209146
  chr3:170555017-170555113
  hypo

SEQ ID NO: 302219 - DNA, 120 bp, Homo sapiens; identical to SEQ ID NO: 252830
  chr3:170588563-170588683
  hypo

SEQ ID NO: 302220 - DNA, 93 bp, Homo sapiens; identical to SEQ ID NO: 252831
  chr3:170588743-170588836
  hypo

SEQ ID NO: 302221 - DNA, 282 bp, Homo sapiens; identical to SEQ ID NO: 281698
  chr3:170626174-170626456
  hypo

SEQ ID NO: 302222 - DNA, 529 bp, Homo sapiens; identical to SEQ ID NO: 281699
  chr3:170626710-170627239
  hypo

SEQ ID NO: 302223 - DNA, 45 bp, Homo sapiens; identical to SEQ ID NO: 252833
  chr3:170870834-170870879
  hypo

SEQ ID NO: 302224 - DNA, 36 bp, Homo sapiens; identical to SEQ ID NO: 252834
  chr3:171121104-171121140
  hypo

SEQ ID NO: 302225 - DNA, 110 bp, Homo sapiens; identical to SEQ ID NO: 252835
  chr3:171171982-171172092
  hypo

SEQ ID NO: 302226 - DNA, 89 bp, Homo sapiens; identical to SEQ ID NO: 252836
  chr3:171243544-171243633
  hypo

SEQ ID NO: 302227 - DNA, 216 bp, Homo sapiens; identical to SEQ ID NO: 252837
  chr3:171362728-171362944
  hypo

SEQ ID NO: 302228 - DNA, 163 bp, Homo sapiens; identical to SEQ ID NO: 209150
  chr3:171363249-171363412
  hypo

SEQ ID NO: 302229 - DNA, 78 bp, Homo sapiens; identical to SEQ ID NO: 209151
  chr3:171493948-171494026
  hypo

SEQ ID NO: 302230 - DNA, 45 bp, Homo sapiens; identical to SEQ ID NO: 209152
  chr3:171529766-171529811
  hypo

SEQ ID NO: 302231 - DNA, 154 bp, Homo sapiens; identical to SEQ ID NO: 199199
  chr3:171758579-171758733
  hypo

SEQ ID NO: 302232 - DNA, 153 bp, Homo sapiens; identical to SEQ ID NO: 252842
  chr3:171886950-171887103
  hypo

SEQ ID NO: 302233 - DNA, 278 bp, Homo sapiens; identical to SEQ ID NO: 209154
  chr3:171965332-171965610
  hypo

SEQ ID NO: 302234 - DNA, 112 bp, Homo sapiens; identical to SEQ ID NO: 209155
  chr3:171976025-171976137
  hypo

SEQ ID NO: 302235 - DNA, 193 bp, Homo sapiens
  chr3:172033319-172033512
  hypo
ttagagccatggggtttaataactgaccccgcatttttgtagatttttagccgctttcctccttcaggagacaccccattaggagcagaaaggcagaaggtcattttcaagtctttttcacttgaacgttagatgagtcacatcacatttttatttcagtgtccccgcccccgtgtttacactttaatctaca

SEQ ID NO: 302236 - DNA, 38 bp, Homo sapiens; identical to SEQ ID NO: 252846
  chr3:172056805-172056843
  hypo

SEQ ID NO: 302237 - DNA, 50 bp, Homo sapiens; identical to SEQ ID NO: 252847
  chr3:172341459-172341509
  hypo

SEQ ID NO: 302238 - DNA, 421 bp, Homo sapiens; identical to SEQ ID NO: 252848
  chr3:172341539-172341960
  hypo

SEQ ID NO: 302239 - DNA, 35 bp, Homo sapiens; identical to SEQ ID NO: 252849
  chr3:172351503-172351538
  hypo

SEQ ID NO: 302240 - DNA, 90 bp, Homo sapiens; identical to SEQ ID NO: 209158
  chr3:172355805-172355895
  hypo

SEQ ID NO: 302241 - DNA, 141 bp, Homo sapiens; identical to SEQ ID NO: 252851
  chr3:172394009-172394150
  hypo

SEQ ID NO: 302242 - DNA, 38 bp, Homo sapiens; identical to SEQ ID NO: 252852
  chr3:172394537-172394575
  hypo

SEQ ID NO: 302243 - DNA, 80 bp, Homo sapiens; identical to SEQ ID NO: 209159
  chr3:172395702-172395782
  hypo

SEQ ID NO: 302244 - DNA, 33 bp, Homo sapiens; identical to SEQ ID NO: 252854
  chr3:172409440-172409473
  hypo

SEQ ID NO: 302245 - DNA, 77 bp, Homo sapiens; identical to SEQ ID NO: 252855
  chr3:172424594-172424671
  hypo

SEQ ID NO: 302246 - DNA, 41 bp, Homo sapiens; identical to SEQ ID NO: 252858
  chr3:172426415-172426456
  hypo

SEQ ID NO: 302247 - DNA, 83 bp, Homo sapiens; identical to SEQ ID NO: 209160
  chr3:172475922-172476005
  hypo

SEQ ID NO: 302248 - DNA, 108 bp, Homo sapiens; identical to SEQ ID NO: 209161
  chr3:172727654-172727762
  hypo

SEQ ID NO: 302249 - DNA, 36 bp, Homo sapiens; identical to SEQ ID NO: 209162
  chr3:173162774-173162810
  hypo

SEQ ID NO: 302250 - DNA, 180 bp, Homo sapiens; identical to SEQ ID NO: 209163
  chr3:173864875-173865055
  hypo

SEQ ID NO: 302251 - DNA, 133 bp, Homo sapiens; identical to SEQ ID NO: 209164
  chr3:174095072-174095205
  hypo

SEQ ID NO: 302252 - DNA, 912 bp, Homo sapiens; identical to SEQ ID NO: 281718
  chr3:174158358-174159270
  hypo

SEQ ID NO: 302253 - DNA, 125 bp, Homo sapiens; identical to SEQ ID NO: 281719
  chr3:174159306-174159431
  hypo

SEQ ID NO: 302254 - DNA, 32 bp, Homo sapiens; identical to SEQ ID NO: 209167
  chr3:175307701-175307733
  hypo

SEQ ID NO: 302255 - DNA, 43 bp, Homo sapiens
  chr3:175338091-175338134
  hypo
ctgccatggctccacgcttagcacgcagctgagctgggtgtgc

SEQ ID NO: 302256 - DNA, 466 bp, Homo sapiens
  chr3:175338171-175338637
  hypo
gaggggaatgcaatggcacccgaaaactaaaagagatgccagcaatcacagatccctaaggggtgttacagctatagctcggggagtcccggggtctcggcccccagaagttttgctgctctttctcccatagtccactgcttgggagcatattacaagcccatttattcctgccactcacagatcggcaggcagaaaggagtaacactcagtggctttttcactcccgcaattcggcgagcaggagggggtgtgttacagctctcttgttcctgctgcctgcagctcagcgaacaggggcatgtcacagctctcttgttcttaccacctggaacgggtacatgttgccgctctcttcgtgcctgcacatgttgccgctcttttcgtgcctgcaatctggcaggttacaggttcttgtcctgtgaccaagagaaatgaggtatgcggacacaggatagcaaataag

SEQ ID NO: 302257 - DNA, 53 bp, Homo sapiens; identical to SEQ ID NO: 209169
  chr3:176545044-176545097
  hypo

SEQ ID NO: 302258 - DNA, 218 bp, Homo sapiens; identical to SEQ ID NO: 252870
  chr3:176710430-176710648
  hypo

SEQ ID NO: 302259 - DNA, 87 bp, Homo sapiens; identical to SEQ ID NO: 252871
  chr3:176753533-176753620
  hypo

SEQ ID NO: 302260 - DNA, 34 bp, Homo sapiens; identical to SEQ ID NO: 209170
  chr3:176854102-176854136
  hypo

SEQ ID NO: 302261 - DNA, 58 bp, Homo sapiens
  chr3:176869559-176869617
  hypo
acacctgtaatcccagcccaaggcagcagatcacctgagttcagaagtttgagaccaa

SEQ ID NO: 302262 - DNA, 75 bp, Homo sapiens; identical to SEQ ID NO: 209171
  chr3:176890964-176891039
  hypo

SEQ ID NO: 302263 - DNA, 34 bp, Homo sapiens; identical to SEQ ID NO: 252875
  chr3:176893551-176893585
  hypo

SEQ ID NO: 302264 - DNA, 90 bp, Homo sapiens; identical to SEQ ID NO: 199207
  chr3:176915778-176915868
  hypo

SEQ ID NO: 302265 - DNA, 210 bp, Homo sapiens; identical to SEQ ID NO: 252877
  chr3:176963512-176963722
  hypo

SEQ ID NO: 302266 - DNA, 36 bp, Homo sapiens; identical to SEQ ID NO: 252878
  chr3:176990424-176990460
  hypo

SEQ ID NO: 302267 - DNA, 35 bp, Homo sapiens; identical to SEQ ID NO: 252879
  chr3:176990700-176990735
  hypo

SEQ ID NO: 302268 - DNA, 45 bp, Homo sapiens; identical to SEQ ID NO: 252880
  chr3:177001716-177001761
  hypo

SEQ ID NO: 302269 - DNA, 88 bp, Homo sapiens; identical to SEQ ID NO: 252881
  chr3:177030449-177030537
  hypo

SEQ ID NO: 302270 - DNA, 103 bp, Homo sapiens; identical to SEQ ID NO: 252882
  chr3:177085605-177085708
  hypo

SEQ ID NO: 302271 - DNA, 230 bp, Homo sapiens; identical to SEQ ID NO: 252883
  chr3:177094901-177095131
  hypo

SEQ ID NO: 302272 - DNA, 89 bp, Homo sapiens; identical to SEQ ID NO: 209173
  chr3:177158385-177158474
  hypo

SEQ ID NO: 302273 - DNA, 120 bp, Homo sapiens; identical to SEQ ID NO: 252885
  chr3:177238533-177238653
  hypo

SEQ ID NO: 302274 - DNA, 120 bp, Homo sapiens; identical to SEQ ID NO: 209174
  chr3:177238893-177239013
  hypo

SEQ ID NO: 302275 - DNA, 80 bp, Homo sapiens; identical to SEQ ID NO: 252887
  chr3:177239193-177239273
  hypo

SEQ ID NO: 302276 - DNA, 33 bp, Homo sapiens; identical to SEQ ID NO: 252888
  chr3:177269266-177269299
  hypo

SEQ ID NO: 302277 - DNA, 31 bp, Homo sapiens; identical to SEQ ID NO: 252889
  chr3:177308262-177308293
  hypo

SEQ ID NO: 302278 - DNA, 43 bp, Homo sapiens; identical to SEQ ID NO: 252890
  chr3:177829173-177829216
  hypo

SEQ ID NO: 302279 - DNA, 180 bp, Homo sapiens; identical to SEQ ID NO: 209175
  chr3:178860953-178861133
  hypo

SEQ ID NO: 302280 - DNA, 42 bp, Homo sapiens; identical to SEQ ID NO: 252893
  chr3:178978410-178978452
  hypo

SEQ ID NO: 302281 - DNA, 40 bp, Homo sapiens; identical to SEQ ID NO: 199210
  chr3:179064154-179064194
  hypo

SEQ ID NO: 302282 - DNA, 44 bp, Homo sapiens; identical to SEQ ID NO: 209177
  chr3:179085022-179085066
  hypo

SEQ ID NO: 302283 - DNA, 39 bp, Homo sapiens; identical to SEQ ID NO: 252895
  chr3:179159869-179159908
  hypo

SEQ ID NO: 302284 - DNA, 36 bp, Homo sapiens; identical to SEQ ID NO: 209178
  chr3:179203080-179203116
  hypo

SEQ ID NO: 302285 - DNA, 88 bp, Homo sapiens; identical to SEQ ID NO: 252897
  chr3:179319791-179319879
  hypo

SEQ ID NO: 302286 - DNA, 79 bp, Homo sapiens; identical to SEQ ID NO: 230001
  chr3:179367505-179367584
  hypo

SEQ ID NO: 302287 - DNA, 153 bp, Homo sapiens; identical to SEQ ID NO: 252898
  chr3:179377824-179377977
  hypo

SEQ ID NO: 302288 - DNA, 178 bp, Homo sapiens; identical to SEQ ID NO: 252899
  chr3:179383082-179383260
  hypo

SEQ ID NO: 302289 - DNA, 141 bp, Homo sapiens; identical to SEQ ID NO: 209179
  chr3:179391536-179391677
  hypo

SEQ ID NO: 302290 - DNA, 160 bp, Homo sapiens; identical to SEQ ID NO: 252901
  chr3:179398900-179399060
  hypo

SEQ ID NO: 302291 - DNA, 373 bp, Homo sapiens; identical to SEQ ID NO: 252902
  chr3:179449287-179449660
  hypo

SEQ ID NO: 302292 - DNA, 53 bp, Homo sapiens; identical to SEQ ID NO: 222274
  chr3:180396751-180396804
  hypo

SEQ ID NO: 302293 - DNA, 226 bp, Homo sapiens; identical to SEQ ID NO: 199213
  chr3:180397084-180397310
  hypo

SEQ ID NO: 302294 - DNA, 34 bp, Homo sapiens; identical to SEQ ID NO: 252903
  chr3:180502777-180502811
  hypo

SEQ ID NO: 302295 - DNA, 622 bp, Homo sapiens; identical to SEQ ID NO: 252904
  chr3:180546429-180547051
  hypo

SEQ ID NO: 302296 - DNA, 36 bp, Homo sapiens; identical to SEQ ID NO: 199220
  chr3:181430331-181430367
  hypo

SEQ ID NO: 302297 - DNA, 252 bp, Homo sapiens; identical to SEQ ID NO: 199221
  chr3:181430443-181430695
  hypo

SEQ ID NO: 302298 - DNA, 87 bp, Homo sapiens; identical to SEQ ID NO: 252905
  chr3:181466764-181466851
  hypo

SEQ ID NO: 302299 - DNA, 89 bp, Homo sapiens; identical to SEQ ID NO: 209184
  chr3:181521187-181521276
  hypo

SEQ ID NO: 302300 - DNA, 292 bp, Homo sapiens; identical to SEQ ID NO: 199224
  chr3:182510867-182511159
  hypo

SEQ ID NO: 302301 - DNA, 170 bp, Homo sapiens; identical to SEQ ID NO: 199225
  chr3:182511623-182511793
  hypo

SEQ ID NO: 302302 - DNA, 34 bp, Homo sapiens; identical to SEQ ID NO: 209187
  chr3:182650849-182650883
  hypo

SEQ ID NO: 302303 - DNA, 127 bp, Homo sapiens; identical to SEQ ID NO: 209188
  chr3:182656910-182657037
  hypo

SEQ ID NO: 302304 - DNA, 42 bp, Homo sapiens; identical to SEQ ID NO: 252912
  chr3:182725059-182725101
  hypo

SEQ ID NO: 302305 - DNA, 76 bp, Homo sapiens; identical to SEQ ID NO: 209189
  chr3:182778669-182778745
  hypo

SEQ ID NO: 302306 - DNA, 73 bp, Homo sapiens; identical to SEQ ID NO: 209190
  chr3:182788794-182788867
  hypo

SEQ ID NO: 302307 - DNA, 41 bp, Homo sapiens; identical to SEQ ID NO: 252918
  chr3:182882985-182883026
  hypo

SEQ ID NO: 302308 - DNA, 163 bp, Homo sapiens; identical to SEQ ID NO: 252920
  chr3:182935983-182936146
  hypo

SEQ ID NO: 302309 - DNA, 43 bp, Homo sapiens; identical to SEQ ID NO: 252921
  chr3:182976027-182976070
  hypo

SEQ ID NO: 302310 - DNA, 147 bp, Homo sapiens; identical to SEQ ID NO: 209191
  chr3:182976758-182976905
  hypo

SEQ ID NO: 302311 - DNA, 42 bp, Homo sapiens; identical to SEQ ID NO: 252923
  chr3:183014966-183015008
  hypo

SEQ ID NO: 302312 - DNA, 190 bp, Homo sapiens; identical to SEQ ID NO: 209192
  chr3:183035119-183035309
  hypo

SEQ ID NO: 302313 - DNA, 76 bp, Homo sapiens; identical to SEQ ID NO: 209193
  chr3:183035339-183035415
  hypo

SEQ ID NO: 302314 - DNA, 83 bp, Homo sapiens; identical to SEQ ID NO: 252925
  chr3:183052206-183052289
  hypo

SEQ ID NO: 302315 - DNA, 821 bp, Homo sapiens; identical to SEQ ID NO: 199234
  chr3:183165026-183165847
  hypo

SEQ ID NO: 302316 - DNA, 120 bp, Homo sapiens; identical to SEQ ID NO: 209195
  chr3:183183284-183183404
  hypo

SEQ ID NO: 302317 - DNA, 35 bp, Homo sapiens; identical to SEQ ID NO: 252928
  chr3:183199496-183199531
  hypo

SEQ ID NO: 302318 - DNA, 31 bp, Homo sapiens; identical to SEQ ID NO: 252929
  chr3:183208295-183208326
  hypo

SEQ ID NO: 302319 - DNA, 41 bp, Homo sapiens; identical to SEQ ID NO: 209196
  chr3:183209172-183209213
  hypo

SEQ ID NO: 302320 - DNA, 248 bp, Homo sapiens; identical to SEQ ID NO: 252931
  chr3:183209979-183210227
  hypo

SEQ ID NO: 302321 - DNA, 246 bp, Homo sapiens; identical to SEQ ID NO: 209197
  chr3:183217392-183217638
  hypo

SEQ ID NO: 302322 - DNA, 57 bp, Homo sapiens; identical to SEQ ID NO: 252933
  chr3:183245666-183245723
  hypo

SEQ ID NO: 302323 - DNA, 150 bp, Homo sapiens; identical to SEQ ID NO: 209198
  chr3:183275004-183275154
  hypo

SEQ ID NO: 302324 - DNA, 120 bp, Homo sapiens; identical to SEQ ID NO: 209199
  chr3:183357000-183357120
  hypo

SEQ ID NO: 302325 - DNA, 171 bp, Homo sapiens; identical to SEQ ID NO: 209200
  chr3:183381135-183381306
  hypo

SEQ ID NO: 302326 - DNA, 156 bp, Homo sapiens; identical to SEQ ID NO: 209201
  chr3:183419805-183419961
  hypo

SEQ ID NO: 302327 - DNA, 220 bp, Homo sapiens; identical to SEQ ID NO: 209202
  chr3:183479752-183479972
  hypo

SEQ ID NO: 302328 - DNA, 55 bp, Homo sapiens; identical to SEQ ID NO: 209203
  chr3:183525222-183525277
  hypo

SEQ ID NO: 302329 - DNA, 168 bp, Homo sapiens; identical to SEQ ID NO: 209204
  chr3:183525714-183525882
  hypo

SEQ ID NO: 302330 - DNA, 48 bp, Homo sapiens; identical to SEQ ID NO: 252941
  chr3:183529223-183529271
  hypo

SEQ ID NO: 302331 - DNA, 44 bp, Homo sapiens; identical to SEQ ID NO: 252942
  chr3:183529476-183529520
  hypo

SEQ ID NO: 302332 - DNA, 321 bp, Homo sapiens; identical to SEQ ID NO: 281774
  chr3:183602724-183603045
  hypo

SEQ ID NO: 302333 - DNA, 84 bp, Homo sapiens; identical to SEQ ID NO: 252944
  chr3:183639003-183639087
  hypo

SEQ ID NO: 302334 - DNA, 44 bp, Homo sapiens; identical to SEQ ID NO: 252945
  chr3:183642080-183642124
  hypo

SEQ ID NO: 302335 - DNA, 66 bp, Homo sapiens; identical to SEQ ID NO: 209206
  chr3:183642828-183642894
  hypo

SEQ ID NO: 302336 - DNA, 58 bp, Homo sapiens; identical to SEQ ID NO: 209207
  chr3:183643595-183643653
  hypo

SEQ ID NO: 302337 - DNA, 102 bp, Homo sapiens; identical to SEQ ID NO: 209208
  chr3:183648026-183648128
  hypo

SEQ ID NO: 302338 - DNA, 60 bp, Homo sapiens; identical to SEQ ID NO: 252949
  chr3:183652390-183652450
  hypo

SEQ ID NO: 302339 - DNA, 101 bp, Homo sapiens; identical to SEQ ID NO: 209209
  chr3:183670355-183670456
  hypo

SEQ ID NO: 302340 - DNA, 31 bp, Homo sapiens; identical to SEQ ID NO: 209210
  chr3:183676454-183676485
  hypo

SEQ ID NO: 302341 - DNA, 194 bp, Homo sapiens; identical to SEQ ID NO: 252954
  chr3:183688726-183688920
  hypo

SEQ ID NO: 302342 - DNA, 31 bp, Homo sapiens; identical to SEQ ID NO: 252955
  chr3:183698521-183698552
  hypo

SEQ ID NO: 302343 - DNA, 210 bp, Homo sapiens; identical to SEQ ID NO: 252956
  chr3:183703569-183703779
  hypo

SEQ ID NO: 302344 - DNA, 40 bp, Homo sapiens; identical to SEQ ID NO: 209211
  chr3:183710273-183710313
  hypo

SEQ ID NO: 302345 - DNA, 199 bp, Homo sapiens; identical to SEQ ID NO: 252958
  chr3:183720218-183720417
  hypo

SEQ ID NO: 302346 - DNA, 164 bp, Homo sapiens; identical to SEQ ID NO: 252960
  chr3:183731933-183732097
  hypo

SEQ ID NO: 302347 - DNA, 144 bp, Homo sapiens; identical to SEQ ID NO: 252961
  chr3:183775518-183775662
  hypo

SEQ ID NO: 302348 - DNA, 127 bp, Homo sapiens
  chr3:183801859-183801986
  hypo
aggcccaaaggagccgggggagttagcagggaaggaggtgagacccggagagactgagctagatgggggctcaggatggacaaacgcccagctagtggagctgtgggtgcagttcagccacgcgatg

SEQ ID NO: 302349 - DNA, 186 bp, Homo sapiens
  chr3:183802021-183802207
  hypo
gttgagttctgagtgtgcgcgagcagcagggttcagcttcccttggcctcagcgggccatgccaggcgctgcttctgcactgcagtcggcagacccagccccagccatgccatgatccctgctccagcccttcctgtggttaaatagaaccactgctagcactcccagaaacgagaatgtatttcc

SEQ ID NO: 302350 - DNA, 86 bp, Homo sapiens; identical to SEQ ID NO: 199238
  chr3:183851915-183852001
  hypo

SEQ ID NO: 302351 - DNA, 43 bp, Homo sapiens; identical to SEQ ID NO: 209213
  chr3:183872152-183872195
  hypo

SEQ ID NO: 302352 - DNA, 136 bp, Homo sapiens; identical to SEQ ID NO: 18124
  chr3:183891939-183892075
  hypo

SEQ ID NO: 302353 - DNA, 214 bp, Homo sapiens; identical to SEQ ID NO: 252965
  chr3:183898698-183898912
  hypo

SEQ ID NO: 302354 - DNA, 100 bp, Homo sapiens; identical to SEQ ID NO: 252966
  chr3:183921232-183921332
  hypo

SEQ ID NO: 302355 - DNA, 116 bp, Homo sapiens
  chr3:184015973-184016089
  hypo
tcctgacataagcgcgtcagtcacacgcctctaaggcttcacagggaaagacgagaagatagaggacgaagaccttgtcttgttctgcttttagctccagaacttggcggggagca

SEQ ID NO: 302356 - DNA, 291 bp, Homo sapiens; identical to SEQ ID NO: 252970
  chr3:184026067-184026358
  hypo

SEQ ID NO: 302357 - DNA, 73 bp, Homo sapiens; identical to SEQ ID NO: 209217
  chr3:184042661-184042734
  hypo

SEQ ID NO: 302358 - DNA, 143 bp, Homo sapiens; identical to SEQ ID NO: 252973
  chr3:184043272-184043415
  hypo

SEQ ID NO: 302359 - DNA, 86 bp, Homo sapiens; identical to SEQ ID NO: 252974
  chr3:184045150-184045236
  hypo

SEQ ID NO: 302360 - DNA, 196 bp, Homo sapiens; identical to SEQ ID NO: 252975
  chr3:184057052-184057248
  hypo

SEQ ID NO: 302361 - DNA, 163 bp, Homo sapiens; identical to SEQ ID NO: 209219
  chr3:184059511-184059674
  hypo

SEQ ID NO: 302362 - DNA, 184 bp, Homo sapiens; identical to SEQ ID NO: 209220
  chr3:184059893-184060077
  hypo

SEQ ID NO: 302363 - DNA, 189 bp, Homo sapiens; identical to SEQ ID NO: 252978
  chr3:184067618-184067807
  hypo

SEQ ID NO: 302364 - DNA, 107 bp, Homo sapiens; identical to SEQ ID NO: 252979
  chr3:184070507-184070614
  hypo

SEQ ID NO: 302365 - DNA, 325 bp, Homo sapiens; identical to SEQ ID NO: 252980
  chr3:184071379-184071704
  hypo

SEQ ID NO: 302366 - DNA, 33 bp, Homo sapiens; identical to SEQ ID NO: 209222
  chr3:184072073-184072106
  hypo

SEQ ID NO: 302367 - DNA, 224 bp, Homo sapiens; identical to SEQ ID NO: 281784
  chr3:184097688-184097912
  hypo

SEQ ID NO: 302368 - DNA, 280 bp, Homo sapiens; identical to SEQ ID NO: 222284
  chr3:184098372-184098652
  hypo

SEQ ID NO: 302369 - DNA, 86 bp, Homo sapiens; identical to SEQ ID NO: 281786
  chr3:184099331-184099417
  hypo

SEQ ID NO: 302370 - DNA, 34 bp, Homo sapiens; identical to SEQ ID NO: 281787
  chr3:184099446-184099480
  hypo

SEQ ID NO: 302371 - DNA, 212 bp, Homo sapiens; identical to SEQ ID NO: 252982
  chr3:184133791-184134003
  hypo

SEQ ID NO: 302372 - DNA, 146 bp, Homo sapiens; identical to SEQ ID NO: 252983
  chr3:184144868-184145014
  hypo

SEQ ID NO: 302373 - DNA, 86 bp, Homo sapiens; identical to SEQ ID NO: 209225
  chr3:184186552-184186638
  hypo

SEQ ID NO: 302374 - DNA, 218 bp, Homo sapiens; identical to SEQ ID NO: 209226
  chr3:184225975-184226193
  hypo

SEQ ID NO: 302375 - DNA, 101 bp, Homo sapiens; identical to SEQ ID NO: 252987
  chr3:184257024-184257125
  hypo

SEQ ID NO: 302376 - DNA, 171 bp, Homo sapiens; identical to SEQ ID NO: 209227
  chr3:184273717-184273888
  hypo

SEQ ID NO: 302377 - DNA, 1017 bp, Homo sapiens; identical to SEQ ID NO: 199241
  chr3:184278877-184279894
  hypo

SEQ ID NO: 302378 - DNA, 42 bp, Homo sapiens; identical to SEQ ID NO: 252989
  chr3:184282049-184282091
  hypo

SEQ ID NO: 302379 - DNA, 31 bp, Homo sapiens; identical to SEQ ID NO: 252990
  chr3:184294858-184294889
  hypo

SEQ ID NO: 302380 - DNA, 165 bp, Homo sapiens; identical to SEQ ID NO: 209229
  chr3:184295484-184295649
  hypo

SEQ ID NO: 302381 - DNA, 190 bp, Homo sapiens; identical to SEQ ID NO: 252992
  chr3:184316126-184316316
  hypo

SEQ ID NO: 302382 - DNA, 178 bp, Homo sapiens; identical to SEQ ID NO: 281793
  chr3:184319612-184319790
  hypo

SEQ ID NO: 302383 - DNA, 135 bp, Homo sapiens; identical to SEQ ID NO: 281794
  chr3:184320096-184320231
  hypo

SEQ ID NO: 302384 - DNA, 182 bp, Homo sapiens; identical to SEQ ID NO: 252993
  chr3:184331111-184331293
  hypo

SEQ ID NO: 302385 - DNA, 148 bp, Homo sapiens; identical to SEQ ID NO: 209232
  chr3:184340018-184340166
  hypo

SEQ ID NO: 302386 - DNA, 111 bp, Homo sapiens; identical to SEQ ID NO: 252995
  chr3:184347419-184347530
  hypo

SEQ ID NO: 302387 - DNA, 88 bp, Homo sapiens; identical to SEQ ID NO: 252996
  chr3:184357510-184357598
  hypo

SEQ ID NO: 302388 - DNA, 45 bp, Homo sapiens; identical to SEQ ID NO: 209233
  chr3:184378704-184378749
  hypo

SEQ ID NO: 302389 - DNA, 213 bp, Homo sapiens; identical to SEQ ID NO: 252998
  chr3:184434953-184435166
  hypo

SEQ ID NO: 302390 - DNA, 49 bp, Homo sapiens; identical to SEQ ID NO: 209234
  chr3:184459043-184459092
  hypo

SEQ ID NO: 302391 - DNA, 108 bp, Homo sapiens; identical to SEQ ID NO: 253000
  chr3:184580626-184580734
  hypo

SEQ ID NO: 302392 - DNA, 326 bp, Homo sapiens; identical to SEQ ID NO: 209235
  chr3:184626082-184626408
  hypo

SEQ ID NO: 302393 - DNA, 38 bp, Homo sapiens; identical to SEQ ID NO: 253002
  chr3:184630019-184630057
  hypo

SEQ ID NO: 302394 - DNA, 99 bp, Homo sapiens; identical to SEQ ID NO: 209236
  chr3:184661515-184661614
  hypo

SEQ ID NO: 302395 - DNA, 181 bp, Homo sapiens; identical to SEQ ID NO: 209237
  chr3:184784966-184785147
  hypo

SEQ ID NO: 302396 - DNA, 341 bp, Homo sapiens; identical to SEQ ID NO: 253005
  chr3:184800447-184800788
  hypo

SEQ ID NO: 302397 - DNA, 63 bp, Homo sapiens; identical to SEQ ID NO: 209239
  chr3:184800818-184800881
  hypo

SEQ ID NO: 302398 - DNA, 93 bp, Homo sapiens; identical to SEQ ID NO: 209240
  chr3:184833596-184833689
  hypo

SEQ ID NO: 302399 - DNA, 92 bp, Homo sapiens; identical to SEQ ID NO: 209241
  chr3:184833749-184833841
  hypo

SEQ ID NO: 302400 - DNA, 301 bp, Homo sapiens; identical to SEQ ID NO: 199246
  chr3:184870307-184870608
  hypo

SEQ ID NO: 302401 - DNA, 130 bp, Homo sapiens; identical to SEQ ID NO: 253009
  chr3:184880628-184880758
  hypo

SEQ ID NO: 302402 - DNA, 45 bp, Homo sapiens; identical to SEQ ID NO: 253011
  chr3:185055821-185055866
  hypo

SEQ ID NO: 302403 - DNA, 97 bp, Homo sapiens; identical to SEQ ID NO: 253012
  chr3:185061154-185061251
  hypo

SEQ ID NO: 302404 - DNA, 153 bp, Homo sapiens; identical to SEQ ID NO: 253013
  chr3:185069789-185069942
  hypo

SEQ ID NO: 302405 - DNA, 142 bp, Homo sapiens; identical to SEQ ID NO: 209243
  chr3:185191405-185191547
  hypo

SEQ ID NO: 302406 - DNA, 278 bp, Homo sapiens; identical to SEQ ID NO: 253015
  chr3:185245476-185245754
  hypo

SEQ ID NO: 302407 - DNA, 33 bp, Homo sapiens; identical to SEQ ID NO: 209244
  chr3:185266642-185266675
  hypo

SEQ ID NO: 302408 - DNA, 50 bp, Homo sapiens
  chr3:185270832-185270882
  hypo
tgtatttcttcctaccgagaatttctacagctctaataggtcttttttaa

SEQ ID NO: 302409 - DNA, 119 bp, Homo sapiens; identical to SEQ ID NO: 209245
  chr3:185277645-185277764
  hypo

SEQ ID NO: 302410 - DNA, 161 bp, Homo sapiens; identical to SEQ ID NO: 209246
  chr3:185277844-185278005
  hypo

SEQ ID NO: 302411 - DNA, 67 bp, Homo sapiens; identical to SEQ ID NO: 209247
  chr3:185303180-185303247
  hypo

SEQ ID NO: 302412 - DNA, 342 bp, Homo sapiens; identical to SEQ ID NO: 253021
  chr3:185317867-185318209
  hypo

SEQ ID NO: 302413 - DNA, 80 bp, Homo sapiens; identical to SEQ ID NO: 209249
  chr3:185352337-185352417
  hypo

SEQ ID NO: 302414 - DNA, 403 bp, Homo sapiens; identical to SEQ ID NO: 209250
  chr3:185360805-185361208
  hypo

SEQ ID NO: 302415 - DNA, 78 bp, Homo sapiens; identical to SEQ ID NO: 209251
  chr3:185362626-185362704
  hypo

SEQ ID NO: 302416 - DNA, 48 bp, Homo sapiens; identical to SEQ ID NO: 209252
  chr3:185363305-185363353
  hypo

SEQ ID NO: 302417 - DNA, 104 bp, Homo sapiens; identical to SEQ ID NO: 209253
  chr3:185363652-185363756
  hypo

SEQ ID NO: 302418 - DNA, 196 bp, Homo sapiens; identical to SEQ ID NO: 209254
  chr3:185365780-185365976
  hypo

SEQ ID NO: 302419 - DNA, 73 bp, Homo sapiens; identical to SEQ ID NO: 253028
  chr3:185373822-185373895
  hypo

SEQ ID NO: 302420 - DNA, 505 bp, Homo sapiens; identical to SEQ ID NO: 253029
  chr3:185374974-185375479
  hypo

SEQ ID NO: 302421 - DNA, 158 bp, Homo sapiens; identical to SEQ ID NO: 253030
  chr3:185376173-185376331
  hypo

SEQ ID NO: 302422 - DNA, 257 bp, Homo sapiens; identical to SEQ ID NO: 209256
  chr3:185407215-185407472
  hypo

SEQ ID NO: 302423 - DNA, 110 bp, Homo sapiens; identical to SEQ ID NO: 253032
  chr3:185441712-185441822
  hypo

SEQ ID NO: 302424 - DNA, 210 bp, Homo sapiens; identical to SEQ ID NO: 209257
  chr3:185445847-185446057
  hypo

SEQ ID NO: 302425 - DNA, 34 bp, Homo sapiens; identical to SEQ ID NO: 209258
  chr3:185551485-185551519
  hypo

SEQ ID NO: 302426 - DNA, 166 bp, Homo sapiens; identical to SEQ ID NO: 209259
  chr3:185551759-185551925
  hypo

SEQ ID NO: 302427 - DNA, 32 bp, Homo sapiens; identical to SEQ ID NO: 253036
  chr3:185565288-185565320
  hypo

SEQ ID NO: 302428 - DNA, 38 bp, Homo sapiens; identical to SEQ ID NO: 253037
  chr3:185630395-185630433
  hypo

SEQ ID NO: 302429 - DNA, 37 bp, Homo sapiens; identical to SEQ ID NO: 209260
  chr3:185630673-185630710
  hypo

SEQ ID NO: 302430 - DNA, 92 bp, Homo sapiens; identical to SEQ ID NO: 209261
  chr3:185643232-185643324
  hypo

SEQ ID NO: 302431 - DNA, 80 bp, Homo sapiens; identical to SEQ ID NO: 209262
  chr3:185656908-185656988
  hypo

SEQ ID NO: 302432 - DNA, 95 bp, Homo sapiens; identical to SEQ ID NO: 209263
  chr3:185668397-185668492
  hypo

SEQ ID NO: 302433 - DNA, 80 bp, Homo sapiens; identical to SEQ ID NO: 209264
  chr3:185681620-185681700
  hypo

SEQ ID NO: 302434 - DNA, 713 bp, Homo sapiens; identical to SEQ ID NO: 199251
  chr3:185825460-185826173
  hypo

SEQ ID NO: 302435 - DNA, 1075 bp, Homo sapiens; identical to SEQ ID NO: 199252
  chr3:185826425-185827500
  hypo

SEQ ID NO: 302436 - DNA, 290 bp, Homo sapiens; identical to SEQ ID NO: 199253
  chr3:186079331-186079621
  hypo

SEQ ID NO: 302437 - DNA, 43 bp, Homo sapiens; identical to SEQ ID NO: 209268
  chr3:186142830-186142873
  hypo

SEQ ID NO: 302438 - DNA, 36 bp, Homo sapiens; identical to SEQ ID NO: 209269
  chr3:186271905-186271941
  hypo

SEQ ID NO: 302439 - DNA, 34 bp, Homo sapiens; identical to SEQ ID NO: 253046
  chr3:186309945-186309979
  hypo

SEQ ID NO: 302440 - DNA, 191 bp, Homo sapiens; identical to SEQ ID NO: 209270
  chr3:186409540-186409731
  hypo

SEQ ID NO: 302441 - DNA, 99 bp, Homo sapiens; identical to SEQ ID NO: 209271
  chr3:186429029-186429128
  hypo

SEQ ID NO: 302442 - DNA, 109 bp, Homo sapiens; identical to SEQ ID NO: 253049
  chr3:186442810-186442919
  hypo

SEQ ID NO: 302443 - DNA, 224 bp, Homo sapiens; identical to SEQ ID NO: 253050
  chr3:186471842-186472066
  hypo

SEQ ID NO: 302444 - DNA, 83 bp, Homo sapiens; identical to SEQ ID NO: 253051
  chr3:186530263-186530346
  hypo

SEQ ID NO: 302445 - DNA, 47 bp, Homo sapiens; identical to SEQ ID NO: 199254
  chr3:186544979-186545026
  hypo

SEQ ID NO: 302446 - DNA, 167 bp, Homo sapiens; identical to SEQ ID NO: 209273
  chr3:186697396-186697563
  hypo

SEQ ID NO: 302447 - DNA, 149 bp, Homo sapiens; identical to SEQ ID NO: 253053
  chr3:186713655-186713804
  hypo

SEQ ID NO: 302448 - DNA, 202 bp, Homo sapiens; identical to SEQ ID NO: 209274
  chr3:186783728-186783930
  hypo

SEQ ID NO: 302449 - DNA, 50 bp, Homo sapiens; identical to SEQ ID NO: 209275
  chr3:186938675-186938725
  hypo

SEQ ID NO: 302450 - DNA, 165 bp, Homo sapiens; identical to SEQ ID NO: 253056
  chr3:187242734-187242899
  hypo

SEQ ID NO: 302451 - DNA, 143 bp, Homo sapiens; identical to SEQ ID NO: 253057
  chr3:187281941-187282084
  hypo

SEQ ID NO: 302452 - DNA, 375 bp, Homo sapiens; identical to SEQ ID NO: 209276
  chr3:187443048-187443423
  hypo

SEQ ID NO: 302453 - DNA, 65 bp, Homo sapiens; identical to SEQ ID NO: 199255
  chr3:187455277-187455342
  hypo

SEQ ID NO: 302454 - DNA, 446 bp, Homo sapiens; identical to SEQ ID NO: 199256
  chr3:187456666-187457112
  hypo

SEQ ID NO: 302455 - DNA, 367 bp, Homo sapiens; identical to SEQ ID NO: 199260
  chr3:187462445-187462812
  hypo

SEQ ID NO: 302456 - DNA, 227 bp, Homo sapiens; identical to SEQ ID NO: 281825
  chr3:187463100-187463327
  hypo

SEQ ID NO: 302457 - DNA, 171 bp, Homo sapiens; identical to SEQ ID NO: 253060
  chr3:187930467-187930638
  hypo

SEQ ID NO: 302458 - DNA, 83 bp, Homo sapiens; identical to SEQ ID NO: 253061
  chr3:187984522-187984605
  hypo

SEQ ID NO: 302459 - DNA, 164 bp, Homo sapiens; identical to SEQ ID NO: 209280
  chr3:188070251-188070415
  hypo

SEQ ID NO: 302460 - DNA, 38 bp, Homo sapiens; identical to SEQ ID NO: 253063
  chr3:188246127-188246165
  hypo

SEQ ID NO: 302461 - DNA, 94 bp, Homo sapiens; identical to SEQ ID NO: 209281
  chr3:188353741-188353835
  hypo

SEQ ID NO: 302462 - DNA, 69 bp, Homo sapiens; identical to SEQ ID NO: 253065
  chr3:188365074-188365143
  hypo

SEQ ID NO: 302463 - DNA, 32 bp, Homo sapiens; identical to SEQ ID NO: 253066
  chr3:189160152-189160184
  hypo

SEQ ID NO: 302464 - DNA, 202 bp, Homo sapiens; identical to SEQ ID NO: 253067
  chr3:189557797-189557999
  hypo

SEQ ID NO: 302465 - DNA, 132 bp, Homo sapiens; identical to SEQ ID NO: 253068
  chr3:189612057-189612189
  hypo

SEQ ID NO: 302466 - DNA, 93 bp, Homo sapiens; identical to SEQ ID NO: 209282
  chr3:189618732-189618825
  hypo

SEQ ID NO: 302467 - DNA, 297 bp, Homo sapiens; identical to SEQ ID NO: 209283
  chr3:189900376-189900673
  hypo

SEQ ID NO: 302468 - DNA, 80 bp, Homo sapiens; identical to SEQ ID NO: 253071
  chr3:190105540-190105620
  hypo

SEQ ID NO: 302469 - DNA, 161 bp, Homo sapiens; identical to SEQ ID NO: 253072
  chr3:190278465-190278626
  hypo

SEQ ID NO: 302470 - DNA, 540 bp, Homo sapiens; identical to SEQ ID NO: 281835
  chr3:191046935-191047475
  hypo

SEQ ID NO: 302471 - DNA, 37 bp, Homo sapiens; identical to SEQ ID NO: 253074
  chr3:192595829-192595866
  hypo

SEQ ID NO: 302472 - DNA, 546 bp, Homo sapiens; identical to SEQ ID NO: 199265
  chr3:192635622-192636168
  hypo

SEQ ID NO: 302473 - DNA, 31 bp, Homo sapiens; identical to SEQ ID NO: 253075
  chr3:192670616-192670647
  hypo

SEQ ID NO: 302474 - DNA, 87 bp, Homo sapiens; identical to SEQ ID NO: 209285
  chr3:193235538-193235625
  hypo

SEQ ID NO: 302475 - DNA, 378 bp, Homo sapiens; identical to SEQ ID NO: 253077
  chr3:193303430-193303808
  hypo

SEQ ID NO: 302476 - DNA, 147 bp, Homo sapiens; identical to SEQ ID NO: 253078
  chr3:193314534-193314681
  hypo

SEQ ID NO: 302477 - DNA, 175 bp, Homo sapiens; identical to SEQ ID NO: 209286
  chr3:193391748-193391923
  hypo

SEQ ID NO: 302478 - DNA, 219 bp, Homo sapiens; identical to SEQ ID NO: 209287
  chr3:193392562-193392781
  hypo

SEQ ID NO: 302479 - DNA, 61 bp, Homo sapiens; identical to SEQ ID NO: 209288
  chr3:193419641-193419702
  hypo

SEQ ID NO: 302480 - DNA, 285 bp, Homo sapiens; identical to SEQ ID NO: 209289
  chr3:193419732-193420017
  hypo

SEQ ID NO: 302481 - DNA, 87 bp, Homo sapiens; identical to SEQ ID NO: 209290
  chr3:193428478-193428565
  hypo

SEQ ID NO: 302482 - DNA, 67 bp, Homo sapiens; identical to SEQ ID NO: 209291
  chr3:193428950-193429017
  hypo

SEQ ID NO: 302483 - DNA, 45 bp, Homo sapiens; identical to SEQ ID NO: 209292
  chr3:193438390-193438435
  hypo

SEQ ID NO: 302484 - DNA, 374 bp, Homo sapiens; identical to SEQ ID NO: 209293
  chr3:193455063-193455437
  hypo

SEQ ID NO: 302485 - DNA, 99 bp, Homo sapiens; identical to SEQ ID NO: 253086
  chr3:193489691-193489790
  hypo

SEQ ID NO: 302486 - DNA, 251 bp, Homo sapiens; identical to SEQ ID NO: 209294
  chr3:193490130-193490381
  hypo

SEQ ID NO: 302487 - DNA, 35 bp, Homo sapiens; identical to SEQ ID NO: 209295
  chr3:193503310-193503345
  hypo

SEQ ID NO: 302488 - DNA, 208 bp, Homo sapiens; identical to SEQ ID NO: 209296
  chr3:193505272-193505480
  hypo

SEQ ID NO: 302489 - DNA, 102 bp, Homo sapiens; identical to SEQ ID NO: 253090
  chr3:193509945-193510047
  hypo

SEQ ID NO: 302490 - DNA, 160 bp, Homo sapiens; identical to SEQ ID NO: 253091
  chr3:193513920-193514080
  hypo

SEQ ID NO: 302491 - DNA, 390 bp, Homo sapiens; identical to SEQ ID NO: 209297
  chr3:193586965-193587355
  hypo

SEQ ID NO: 302492 - DNA, 105 bp, Homo sapiens; identical to SEQ ID NO: 253095
  chr3:193589776-193589881
  hypo

SEQ ID NO: 302493 - DNA, 147 bp, Homo sapiens; identical to SEQ ID NO: 209298
  chr3:193659935-193660082
  hypo

SEQ ID NO: 302494 - DNA, 55 bp, Homo sapiens; identical to SEQ ID NO: 253097
  chr3:193696015-193696070
  hypo

SEQ ID NO: 302495 - DNA, 169 bp, Homo sapiens; identical to SEQ ID NO: 209299
  chr3:193711554-193711723
  hypo

SEQ ID NO: 302496 - DNA, 648 bp, Homo sapiens; identical to SEQ ID NO: 281842
  chr3:193721033-193721681
  hypo

SEQ ID NO: 302497 - DNA, 366 bp, Homo sapiens; identical to SEQ ID NO: 281844
  chr3:193852644-193853010
  hypo

SEQ ID NO: 302498 - DNA, 635 bp, Homo sapiens; identical to SEQ ID NO: 281845
  chr3:193853736-193854371
  hypo

SEQ ID NO: 302499 - DNA, 33 bp, Homo sapiens; identical to SEQ ID NO: 199270
  chr3:193858570-193858603
  hypo

SEQ ID NO: 302500 - DNA, 246 bp, Homo sapiens; identical to SEQ ID NO: 199271
  chr3:193858636-193858882
  hypo

SEQ ID NO: 302501 - DNA, 282 bp, Homo sapiens; identical to SEQ ID NO: 3063
  chr3:193858949-193859231
  hypo

SEQ ID NO: 302502 - DNA, 121 bp, Homo sapiens; identical to SEQ ID NO: 222312
  chr3:193859656-193859777
  hypo

SEQ ID NO: 302503 - DNA, 94 bp, Homo sapiens; identical to SEQ ID NO: 253099
  chr3:193903174-193903268
  hypo

SEQ ID NO: 302504 - DNA, 160 bp, Homo sapiens; identical to SEQ ID NO: 209306
  chr3:193922615-193922775
  hypo

SEQ ID NO: 302505 - DNA, 111 bp, Homo sapiens; identical to SEQ ID NO: 253101
  chr3:193940699-193940810
  hypo

SEQ ID NO: 302506 - DNA, 331 bp, Homo sapiens; identical to SEQ ID NO: 209307
  chr3:193969963-193970294
  hypo

SEQ ID NO: 302507 - DNA, 151 bp, Homo sapiens; identical to SEQ ID NO: 281850
  chr3:193987504-193987655
  hypo

SEQ ID NO: 302508 - DNA, 92 bp, Homo sapiens; identical to SEQ ID NO: 209308
  chr3:194012769-194012861
  hypo

SEQ ID NO: 302509 - DNA, 392 bp, Homo sapiens; identical to SEQ ID NO: 253105
  chr3:194048948-194049340
  hypo

SEQ ID NO: 302510 - DNA, 93 bp, Homo sapiens; identical to SEQ ID NO: 253106
  chr3:194058380-194058473
  hypo

SEQ ID NO: 302511 - DNA, 171 bp, Homo sapiens; identical to SEQ ID NO: 209310
  chr3:194061694-194061865
  hypo

SEQ ID NO: 302512 - DNA, 202 bp, Homo sapiens; identical to SEQ ID NO: 209311
  chr3:194066805-194067007
  hypo

SEQ ID NO: 302513 - DNA, 82 bp, Homo sapiens; identical to SEQ ID NO: 253109
  chr3:194078512-194078594
  hypo

SEQ ID NO: 302514 - DNA, 405 bp, Homo sapiens; identical to SEQ ID NO: 253110
  chr3:194080454-194080859
  hypo

SEQ ID NO: 302515 - DNA, 148 bp, Homo sapiens; identical to SEQ ID NO: 253111
  chr3:194105561-194105709
  hypo

SEQ ID NO: 302516 - DNA, 160 bp, Homo sapiens
  chr3:194128258-194128418
  hypo
ctccctctcctccctggccccgctgagagcacggtaaacgtgactcaccgctctcaatgttaaaggtctgctagcttaagcctgtcaacaaaacacaatcagctgcactgctaccaagaatttaaaggcaaaaaaggtggacaaaagtaagctacgtggc

SEQ ID NO: 302517 - DNA, 111 bp, Homo sapiens; identical to SEQ ID NO: 253113
  chr3:194166905-194167016
  hypo

SEQ ID NO: 302518 - DNA, 67 bp, Homo sapiens; identical to SEQ ID NO: 253114
  chr3:194208004-194208071
  hypo

SEQ ID NO: 302519 - DNA, 147 bp, Homo sapiens; identical to SEQ ID NO: 253115
  chr3:194228176-194228323
  hypo

SEQ ID NO: 302520 - DNA, 115 bp, Homo sapiens; identical to SEQ ID NO: 199273
  chr3:194278585-194278700
  hypo

SEQ ID NO: 302521 - DNA, 240 bp, Homo sapiens; identical to SEQ ID NO: 209315
  chr3:194301031-194301271
  hypo

SEQ ID NO: 302522 - DNA, 147 bp, Homo sapiens; identical to SEQ ID NO: 253117
  chr3:194316644-194316791
  hypo

SEQ ID NO: 302523 - DNA, 217 bp, Homo sapiens; identical to SEQ ID NO: 253118
  chr3:194324945-194325162
  hypo

SEQ ID NO: 302524 - DNA, 36 bp, Homo sapiens; identical to SEQ ID NO: 253119
  chr3:194335590-194335626
  hypo

SEQ ID NO: 302525 - DNA, 34 bp, Homo sapiens; identical to SEQ ID NO: 253120
  chr3:194341460-194341494
  hypo

SEQ ID NO: 302526 - DNA, 571 bp, Homo sapiens; identical to SEQ ID NO: 222316
  chr3:194353932-194354503
  hypo

SEQ ID NO: 302527 - DNA, 219 bp, Homo sapiens; identical to SEQ ID NO: 209317
  chr3:194365661-194365880
  hypo

SEQ ID NO: 302528 - DNA, 65 bp, Homo sapiens; identical to SEQ ID NO: 209318
  chr3:194374239-194374304
  hypo

SEQ ID NO: 302529 - DNA, 123 bp, Homo sapiens; identical to SEQ ID NO: 209319
  chr3:194374356-194374479
  hypo

SEQ ID NO: 302530 - DNA, 76 bp, Homo sapiens; identical to SEQ ID NO: 253123
  chr3:194558268-194558344
  hypo

SEQ ID NO: 302531 - DNA, 186 bp, Homo sapiens; identical to SEQ ID NO: 209320
  chr3:194596888-194597074
  hypo

SEQ ID NO: 302532 - DNA, 184 bp, Homo sapiens; identical to SEQ ID NO: 253125
  chr3:194669150-194669334
  hypo

SEQ ID NO: 302533 - DNA, 63 bp, Homo sapiens; identical to SEQ ID NO: 209321
  chr3:194766334-194766397
  hypo

SEQ ID NO: 302534 - DNA, 42 bp, Homo sapiens; identical to SEQ ID NO: 253127
  chr3:194778173-194778215
  hypo

SEQ ID NO: 302535 - DNA, 48 bp, Homo sapiens; identical to SEQ ID NO: 253128
  chr3:194783225-194783273
  hypo

SEQ ID NO: 302536 - DNA, 324 bp, Homo sapiens; identical to SEQ ID NO: 253129
  chr3:194786345-194786669
  hypo

SEQ ID NO: 302537 - DNA, 84 bp, Homo sapiens; identical to SEQ ID NO: 209322
  chr3:194790286-194790370
  hypo

SEQ ID NO: 302538 - DNA, 158 bp, Homo sapiens; identical to SEQ ID NO: 253131
  chr3:194790635-194790793
  hypo

SEQ ID NO: 302539 - DNA, 52 bp, Homo sapiens; identical to SEQ ID NO: 253132
  chr3:194793570-194793622
  hypo

SEQ ID NO: 302540 - DNA, 38 bp, Homo sapiens; identical to SEQ ID NO: 209323
  chr3:194799662-194799700
  hypo

SEQ ID NO: 302541 - DNA, 69 bp, Homo sapiens; identical to SEQ ID NO: 209324
  chr3:194818059-194818128
  hypo

SEQ ID NO: 302542 - DNA, 163 bp, Homo sapiens; identical to SEQ ID NO: 253135
  chr3:194825299-194825462
  hypo

SEQ ID NO: 302543 - DNA, 124 bp, Homo sapiens; identical to SEQ ID NO: 253136
  chr3:194832848-194832972
  hypo

SEQ ID NO: 302544 - DNA, 601 bp, Homo sapiens; identical to SEQ ID NO: 253137
  chr3:194835412-194836013
  hypo

SEQ ID NO: 302545 - DNA, 504 bp, Homo sapiens; identical to SEQ ID NO: 209325
  chr3:194851494-194851998
  hypo

SEQ ID NO: 302546 - DNA, 166 bp, Homo sapiens; identical to SEQ ID NO: 209326
  chr3:194866034-194866200
  hypo

SEQ ID NO: 302547 - DNA, 180 bp, Homo sapiens; identical to SEQ ID NO: 209327
  chr3:194927046-194927226
  hypo

SEQ ID NO: 302548 - DNA, 152 bp, Homo sapiens; identical to SEQ ID NO: 209328
  chr3:194935163-194935315
  hypo

SEQ ID NO: 302549 - DNA, 258 bp, Homo sapiens; identical to SEQ ID NO: 222317
  chr3:194980253-194980511
  hypo

SEQ ID NO: 302550 - DNA, 187 bp, Homo sapiens; identical to SEQ ID NO: 209330
  chr3:195012971-195013158
  hypo

SEQ ID NO: 302551 - DNA, 69 bp, Homo sapiens; identical to SEQ ID NO: 253143
  chr3:195058610-195058679
  hypo

SEQ ID NO: 302552 - DNA, 80 bp, Homo sapiens; identical to SEQ ID NO: 209331
  chr3:195093140-195093220
  hypo

SEQ ID NO: 302553 - DNA, 78 bp, Homo sapiens; identical to SEQ ID NO: 209332
  chr3:195134178-195134256
  hypo

SEQ ID NO: 302554 - DNA, 77 bp, Homo sapiens; identical to SEQ ID NO: 253146
  chr3:195139467-195139544
  hypo

SEQ ID NO: 302555 - DNA, 138 bp, Homo sapiens; identical to SEQ ID NO: 209333
  chr3:195172946-195173084
  hypo

SEQ ID NO: 302556 - DNA, 38 bp, Homo sapiens; identical to SEQ ID NO: 209334
  chr3:195183766-195183804
  hypo

SEQ ID NO: 302557 - DNA, 240 bp, Homo sapiens; identical to SEQ ID NO: 209335
  chr3:195194375-195194615
  hypo

SEQ ID NO: 302558 - DNA, 155 bp, Homo sapiens; identical to SEQ ID NO: 209336
  chr3:195393196-195393351
  hypo

SEQ ID NO: 302559 - DNA, 227 bp, Homo sapiens; identical to SEQ ID NO: 209337
  chr3:195419009-195419236
  hypo

SEQ ID NO: 302560 - DNA, 126 bp, Homo sapiens; identical to SEQ ID NO: 253152
  chr3:195448190-195448316
  hypo

SEQ ID NO: 302561 - DNA, 382 bp, Homo sapiens
  chr3:195536288-195536670
  hypo
gggggtgggggctgcccacccgcccttggtgactgcttttcctgccaaggccctggtcatgcccggtcagatgtgtgggtgccatctcccagccacgaccatctcctctcctggcccagctccacttggtccccttagcgacgcaaaggactcagcgctccacgacatgcctagcttcttcgggtcgtcatggagacgcccttgcacaccaacagtccttcactccttctccgggtcacgcccccgtgcttttccacgcccaccccaggtcttgcccctctgcgctcctctccacagaccccacttcctggctccacatggagctgagtgtccagctggtacccagcacatttgggctcagctttaaatcacagatttggaa

SEQ ID NO: 302562 - DNA, 497 bp, Homo sapiens; identical to SEQ ID NO: 253154
  chr3:195537487-195537984
  hypo

SEQ ID NO: 302563 - DNA, 195 bp, Homo sapiens; identical to SEQ ID NO: 209339
  chr3:195539283-195539478
  hypo

SEQ ID NO: 302564 - DNA, 181 bp, Homo sapiens; identical to SEQ ID NO: 253156
  chr3:195573453-195573634
  hypo

SEQ ID NO: 302565 - DNA, 87 bp, Homo sapiens; identical to SEQ ID NO: 253158
  chr3:195591689-195591776
  hypo

SEQ ID NO: 302566 - DNA, 279 bp, Homo sapiens; identical to SEQ ID NO: 253159
  chr3:195592096-195592375
  hypo

SEQ ID NO: 302567 - DNA, 159 bp, Homo sapiens; identical to SEQ ID NO: 253160
  chr3:195592435-195592594
  hypo

SEQ ID NO: 302568 - DNA, 159 bp, Homo sapiens; identical to SEQ ID NO: 209341
  chr3:195595789-195595948
  hypo

SEQ ID NO: 302569 - DNA, 83 bp, Homo sapiens; identical to SEQ ID NO: 253162
  chr3:195597366-195597449
  hypo

SEQ ID NO: 302570 - DNA, 428 bp, Homo sapiens; identical to SEQ ID NO: 253163
  chr3:195597821-195598249
  hypo

SEQ ID NO: 302571 - DNA, 596 bp, Homo sapiens; identical to SEQ ID NO: 281865
  chr3:195599090-195599686
  hypo

SEQ ID NO: 302572 - DNA, 246 bp, Homo sapiens; identical to SEQ ID NO: 209343
  chr3:195599840-195600086
  hypo

SEQ ID NO: 302573 - DNA, 50 bp, Homo sapiens; identical to SEQ ID NO: 209344
  chr3:195601363-195601413
  hypo

SEQ ID NO: 302574 - DNA, 687 bp, Homo sapiens
  chr3:195602576-195603263
  hypo
gccagggctgctacccggccgtgactgaagcaggggcggatgaggacttcctgggggagcaggaaaagggcccaacacctccgcatgaaccttctacctcctgctgcccccgggcctctggtcaacatctctggggtagacaagatggaaaacagaggccggtgctgagaactgcctaaggctgccccagctctggaaatctcagcaccacgttcccgtccgggccgaaggtagtccagaaatggctcaactaatgccggacattctgttcaaaacgcccgcccgctcttctccctaggggtcccaggcgcccaggcctggagggataacccggatgcctggctcccacccaccacaggaagccgaggctccagggccagaccaggccaaggacccgcaatggattccaacacccgctctgtatgcggaacaaaagtgctgccagccaccccttcctccaaacgagcccctgggaaagaccagtcatcatttgtgtctccaaatctagacacagcacgaaacatctaggtgtctcccctctgcccacagcctggtaccctgagaaggactgagcctagactcagtcagagctgcggcaggtggcctcccagactccgcaccaggaaacaaatactggacacagcttcgcaagtgggaagccacggcgaagagaaggccaggctagga

SEQ ID NO: 302575 - DNA, 339 bp, Homo sapiens
  chr3:195603923-195604262
  hypo
gccaggtacttccaggggacccccccacccttaatcttcctatttccagaatgctccccggagcgccacgcttgcaatcccatccctggcccctcagctccaaacctgcagactgtttgcctcctgtccccaggcctctctttctagaaccttctgcattcttccccagcataacacccctaaccacaggccctgcagtctcagtatgtcattcctattcccagaccctgggcccaagggtgagggagccgggcctgggaaggctcggggtgtcggggccacagcggtgcaggtcacactccacacagccccccaggtctcctccacccacccccaaga

SEQ ID NO: 302576 - DNA, 173 bp, Homo sapiens
  chr3:195604388-195604561
  hypo
tcctccacttcactcttcttcctggtcctcaatactgcccctgcctcaaaggtacctgaaacctgccctgccccagccagttgctcagacaccctggggatcagccagcacaaggcagggccagcagtggtggggcctcagggcaggcgctagaactgcgggggctcaggtgg

SEQ ID NO: 302577 - DNA, 115 bp, Homo sapiens; identical to SEQ ID NO: 209347
  chr3:195604987-195605102
  hypo

SEQ ID NO: 302578 - DNA, 204 bp, Homo sapiens; identical to SEQ ID NO: 253168
  chr3:195605370-195605574
  hypo

SEQ ID NO: 302579 - DNA, 141 bp, Homo sapiens; identical to SEQ ID NO: 281866
  chr3:195610106-195610247
  hypo

SEQ ID NO: 302580 - DNA, 33 bp, Homo sapiens; identical to SEQ ID NO: 199281
  chr3:195636198-195636231
  hypo

SEQ ID NO: 302581 - DNA, 97 bp, Homo sapiens
  chr3:195637425-195637522
  hypo
tcagacacatcggaaactgtgtagggctggctctttctgcgctcacactgtccagcaatgggccccagggacttggccagagcgcagtagggcaatg

SEQ ID NO: 302582 - DNA, 180 bp, Homo sapiens; identical to SEQ ID NO: 209350
  chr3:195639452-195639632
  hypo

SEQ ID NO: 302583 - DNA, 267 bp, Homo sapiens; identical to SEQ ID NO: 253172
  chr3:195640366-195640633
  hypo

SEQ ID NO: 302584 - DNA, 99 bp, Homo sapiens; identical to SEQ ID NO: 253173
  chr3:195643956-195644055
  hypo

SEQ ID NO: 302585 - DNA, 80 bp, Homo sapiens; identical to SEQ ID NO: 253175
  chr3:195691554-195691634
  hypo

SEQ ID NO: 302586 - DNA, 342 bp, Homo sapiens; identical to SEQ ID NO: 253176
  chr3:195735474-195735816
  hypo

SEQ ID NO: 302587 - DNA, 488 bp, Homo sapiens; identical to SEQ ID NO: 253177
  chr3:195750600-195751088
  hypo

SEQ ID NO: 302588 - DNA, 71 bp, Homo sapiens; identical to SEQ ID NO: 209351
  chr3:195752039-195752110
  hypo

SEQ ID NO: 302589 - DNA, 259 bp, Homo sapiens; identical to SEQ ID NO: 253179
  chr3:195763583-195763842
  hypo

SEQ ID NO: 302590 - DNA, 94 bp, Homo sapiens; identical to SEQ ID NO: 253180
  chr3:195770516-195770610
  hypo

SEQ ID NO: 302591 - DNA, 344 bp, Homo sapiens; identical to SEQ ID NO: 253181
  chr3:195778818-195779162
  hypo

SEQ ID NO: 302592 - DNA, 505 bp, Homo sapiens; identical to SEQ ID NO: 281869
  chr3:195808865-195809370
  hypo

SEQ ID NO: 302593 - DNA, 100 bp, Homo sapiens; identical to SEQ ID NO: 253182
  chr3:195855353-195855453
  hypo

SEQ ID NO: 302594 - DNA, 36 bp, Homo sapiens; identical to SEQ ID NO: 209354
  chr3:195863857-195863893
  hypo

SEQ ID NO: 302595 - DNA, 37 bp, Homo sapiens; identical to SEQ ID NO: 209355
  chr3:195866855-195866892
  hypo

SEQ ID NO: 302596 - DNA, 197 bp, Homo sapiens; identical to SEQ ID NO: 253185
  chr3:195867976-195868173
  hypo

SEQ ID NO: 302597 - DNA, 35 bp, Homo sapiens; identical to SEQ ID NO: 209356
  chr3:195901887-195901922
  hypo

SEQ ID NO: 302598 - DNA, 97 bp, Homo sapiens; identical to SEQ ID NO: 253187
  chr3:195910787-195910884
  hypo

SEQ ID NO: 302599 - DNA, 169 bp, Homo sapiens; identical to SEQ ID NO: 253188
  chr3:195923150-195923319
  hypo

SEQ ID NO: 302600 - DNA, 32 bp, Homo sapiens; identical to SEQ ID NO: 253189
  chr3:195960904-195960936
  hypo

SEQ ID NO: 302601 - DNA, 32 bp, Homo sapiens; identical to SEQ ID NO: 253190
  chr3:195961176-195961208
  hypo

SEQ ID NO: 302602 - DNA, 44 bp, Homo sapiens; identical to SEQ ID NO: 209357
  chr3:195990771-195990815
  hypo

SEQ ID NO: 302603 - DNA, 39 bp, Homo sapiens; identical to SEQ ID NO: 253192
  chr3:196039339-196039378
  hypo

SEQ ID NO: 302604 - DNA, 98 bp, Homo sapiens; identical to SEQ ID NO: 209358
  chr3:196039618-196039716
  hypo

SEQ ID NO: 302605 - DNA, 123 bp, Homo sapiens
  chr3:196099522-196099645
  hypo
ttttaatgtatgtttaaacatctttacctgaaaaggattcaacaaacttaagatcaacaagtcacgtaattttattctcttgcaacctccatcaacaattttttttttttttgagacgagctt

SEQ ID NO: 302606 - DNA, 38 bp, Homo sapiens; identical to SEQ ID NO: 209359
  chr3:196138792-196138830
  hypo

SEQ ID NO: 302607 - DNA, 138 bp, Homo sapiens; identical to SEQ ID NO: 209360
  chr3:196143804-196143942
  hypo

SEQ ID NO: 302608 - DNA, 77 bp, Homo sapiens; identical to SEQ ID NO: 209361
  chr3:196144182-196144259
  hypo

SEQ ID NO: 302609 - DNA, 242 bp, Homo sapiens; identical to SEQ ID NO: 209362
  chr3:196199259-196199501
  hypo

SEQ ID NO: 302610 - DNA, 81 bp, Homo sapiens; identical to SEQ ID NO: 253202
  chr3:196245241-196245322
  hypo

SEQ ID NO: 302611 - DNA, 120 bp, Homo sapiens; identical to SEQ ID NO: 209363
  chr3:196263349-196263469
  hypo

SEQ ID NO: 302612 - DNA, 44 bp, Homo sapiens; identical to SEQ ID NO: 253204
  chr3:196263529-196263573
  hypo

SEQ ID NO: 302613 - DNA, 240 bp, Homo sapiens; identical to SEQ ID NO: 253205
  chr3:196297367-196297607
  hypo

SEQ ID NO: 302614 - DNA, 149 bp, Homo sapiens; identical to SEQ ID NO: 253206
  chr3:196302878-196303027
  hypo

SEQ ID NO: 302615 - DNA, 148 bp, Homo sapiens
  chr3:196318576-196318724
  hypo
gagggtaacgagtgcggttttgaacatgttaaatcggaggtggaaatacagaaaaggcagttggaactagtgagcctggagttaaggagatcggcagccagctggatgagagagctgctggtgtgccgcgttcctcactggccgtacg

SEQ ID NO: 302616 - DNA, 144 bp, Homo sapiens
  chr3:196318763-196318907
  hypo
tgcaatacccccaaaggacaaccaactgccttctaaaccgtgactctgccaactaaaggctgcgggggtgttttgttgtttcgggatttttcttttccttacataccccacacctctgaataacaatcctagcagttcaatttt

SEQ ID NO: 302617 - DNA, 197 bp, Homo sapiens; identical to SEQ ID NO: 253208
  chr3:196376654-196376851
  hypo

SEQ ID NO: 302618 - DNA, 224 bp, Homo sapiens; identical to SEQ ID NO: 253209
  chr3:196382389-196382613
  hypo

SEQ ID NO: 302619 - DNA, 92 bp, Homo sapiens
  chr3:196387781-196387873
  hypo
ccaatgctaggaacatcactacacttgacatgagccacaatcagatctcactttgtcccctgccagctgcctcggaccgggtgggcccccct

SEQ ID NO: 302620 - DNA, 209 bp, Homo sapiens; identical to SEQ ID NO: 209365
  chr3:196402791-196403000
  hypo

SEQ ID NO: 302621 - DNA, 88 bp, Homo sapiens; identical to SEQ ID NO: 253214
  chr3:196412488-196412576
  hypo

SEQ ID NO: 302622 - DNA, 126 bp, Homo sapiens; identical to SEQ ID NO: 209366
  chr3:196434731-196434857
  hypo

SEQ ID NO: 302623 - DNA, 36 bp, Homo sapiens
  chr3:196440474-196440510
  hypo
gccagaagaatttttaaacagttggatttggtaatc

SEQ ID NO: 302624 - DNA, 42 bp, Homo sapiens; identical to SEQ ID NO: 253217
  chr3:196469496-196469538
  hypo

SEQ ID NO: 302625 - DNA, 163 bp, Homo sapiens; identical to SEQ ID NO: 253218
  chr3:196477978-196478141
  hypo

SEQ ID NO: 302626 - DNA, 202 bp, Homo sapiens; identical to SEQ ID NO: 209367
  chr3:196530355-196530557
  hypo

SEQ ID NO: 302627 - DNA, 245 bp, Homo sapiens; identical to SEQ ID NO: 253220
  chr3:196674980-196675225
  hypo

SEQ ID NO: 302628 - DNA, 223 bp, Homo sapiens; identical to SEQ ID NO: 222323
  chr3:196695305-196695528
  hypo

SEQ ID NO: 302629 - DNA, 89 bp, Homo sapiens; identical to SEQ ID NO: 253221
  chr3:196700062-196700151
  hypo

SEQ ID NO: 302630 - DNA, 291 bp, Homo sapiens; identical to SEQ ID NO: 209368
  chr3:196723696-196723987
  hypo

SEQ ID NO: 302631 - DNA, 298 bp, Homo sapiens
  chr3:196728448-196728746
  hypo
agccagagaaccagtccaggtcgaagaagggcgcggggggcctcactgactagaggatgagagtggtccctgactggctcttggagaatggaatctgcccttctcggtggagcaggtaggcctttgagtgcctaacaaaacgaaagaaatcggcagcagaagtttctatcagggtccaagcctctgcatgtgctggcttgtttggctttattttagaaaccaaccaacatgtttcattagcactgacacagcaggggtcccctgctgccacctgacaatccagcgtcacttacactgc

SEQ ID NO: 302632 - DNA, 613 bp, Homo sapiens; identical to SEQ ID NO: 253224
  chr3:196752264-196752877
  hypo

SEQ ID NO: 302633 - DNA, 124 bp, Homo sapiens; identical to SEQ ID NO: 209371
  chr3:196754392-196754516
  hypo

SEQ ID NO: 302634 - DNA, 139 bp, Homo sapiens; identical to SEQ ID NO: 209372
  chr3:196754758-196754897
  hypo

SEQ ID NO: 302635 - DNA, 112 bp, Homo sapiens; identical to SEQ ID NO: 209373
  chr3:196766007-196766119
  hypo

SEQ ID NO: 302636 - DNA, 86 bp, Homo sapiens; identical to SEQ ID NO: 209374
  chr3:196766195-196766281
  hypo

SEQ ID NO: 302637 - DNA, 61 bp, Homo sapiens
  chr3:196784269-196784330
  hypo
cagtactgtcatcacgcttgtacctgtctttgtaaacacaggtaagcgtttctgtggagtg

SEQ ID NO: 302638 - DNA, 192 bp, Homo sapiens; identical to SEQ ID NO: 209375
  chr3:196817782-196817974
  hypo

SEQ ID NO: 302639 - DNA, 147 bp, Homo sapiens; identical to SEQ ID NO: 253229
  chr3:196907217-196907364
  hypo

SEQ ID NO: 302640 - DNA, 85 bp, Homo sapiens
  chr3:196910545-196910630
  hypo
tgcagttcatctgacgagcccttttttgcccagtgtttctgctttgggcctgctgagccatggctagagctagtattgcctcctc

SEQ ID NO: 302641 - DNA, 156 bp, Homo sapiens; identical to SEQ ID NO: 253231
  chr3:197027476-197027632
  hypo

SEQ ID NO: 302642 - DNA, 158 bp, Homo sapiens; identical to SEQ ID NO: 253232
  chr3:197094180-197094338
  hypo

SEQ ID NO: 302643 - DNA, 380 bp, Homo sapiens; identical to SEQ ID NO: 253233
  chr3:197121210-197121590
  hypo

SEQ ID NO: 302644 - DNA, 283 bp, Homo sapiens; identical to SEQ ID NO: 253234
  chr3:197124819-197125102
  hypo

SEQ ID NO: 302645 - DNA, 86 bp, Homo sapiens; identical to SEQ ID NO: 253235
  chr3:197127430-197127516
  hypo

SEQ ID NO: 302646 - DNA, 251 bp, Homo sapiens; identical to SEQ ID NO: 209376
  chr3:197133872-197134123
  hypo

SEQ ID NO: 302647 - DNA, 31 bp, Homo sapiens; identical to SEQ ID NO: 253237
  chr3:197136800-197136831
  hypo

SEQ ID NO: 302648 - DNA, 74 bp, Homo sapiens; identical to SEQ ID NO: 209377
  chr3:197152285-197152359
  hypo

SEQ ID NO: 302649 - DNA, 160 bp, Homo sapiens; identical to SEQ ID NO: 253239
  chr3:197170406-197170566
  hypo

SEQ ID NO: 302650 - DNA, 94 bp, Homo sapiens; identical to SEQ ID NO: 253240
  chr3:197216365-197216459
  hypo

SEQ ID NO: 302651 - DNA, 34 bp, Homo sapiens; identical to SEQ ID NO: 253241
  chr3:197216699-197216733
  hypo

SEQ ID NO: 302652 - DNA, 96 bp, Homo sapiens; identical to SEQ ID NO: 199284
  chr3:197222652-197222748
  hypo

SEQ ID NO: 302653 - DNA, 141 bp, Homo sapiens; identical to SEQ ID NO: 253242
  chr3:197231739-197231880
  hypo

SEQ ID NO: 302654 - DNA, 300 bp, Homo sapiens; identical to SEQ ID NO: 253243
  chr3:197238899-197239199
  hypo

SEQ ID NO: 302655 - DNA, 360 bp, Homo sapiens; identical to SEQ ID NO: 253244
  chr3:197241231-197241591
  hypo

SEQ ID NO: 302656 - DNA, 223 bp, Homo sapiens; identical to SEQ ID NO: 209380
  chr3:197243349-197243572
  hypo

SEQ ID NO: 302657 - DNA, 100 bp, Homo sapiens; identical to SEQ ID NO: 209381
  chr3:197246890-197246990
  hypo

SEQ ID NO: 302658 - DNA, 211 bp, Homo sapiens; identical to SEQ ID NO: 209382
  chr3:197250416-197250627
  hypo

SEQ ID NO: 302659 - DNA, 156 bp, Homo sapiens; identical to SEQ ID NO: 281883
  chr3:197281702-197281858
  hypo

SEQ ID NO: 302660 - DNA, 238 bp, Homo sapiens; identical to SEQ ID NO: 109572
  chr3:197281920-197282158
  hypo

SEQ ID NO: 302661 - DNA, 31 bp, Homo sapiens; identical to SEQ ID NO: 209383
  chr3:197327324-197327355
  hypo

SEQ ID NO: 302662 - DNA, 132 bp, Homo sapiens
  chr3:197327641-197327773
  hypo
ttgcctctgagccccatgtgcgatccctcagatgccgaggcaggttgcactatcacccaccatgagccctccgaccctggcctgtggagtggagaaaagacgccaactgctcccctgcagcaccctgcgctt

SEQ ID NO: 302663 - DNA, 94 bp, Homo sapiens; identical to SEQ ID NO: 209385
  chr3:197330147-197330241
  hypo

SEQ ID NO: 302664 - DNA, 180 bp, Homo sapiens; identical to SEQ ID NO: 209386
  chr3:197330487-197330667
  hypo

SEQ ID NO: 302665 - DNA, 99 bp, Homo sapiens; identical to SEQ ID NO: 253252
  chr3:197401910-197402009
  hypo

SEQ ID NO: 302666 - DNA, 324 bp, Homo sapiens; identical to SEQ ID NO: 253253
  chr3:197582090-197582414
  hypo

SEQ ID NO: 302667 - DNA, 221 bp, Homo sapiens; identical to SEQ ID NO: 253254
  chr3:197582614-197582835
  hypo

SEQ ID NO: 302668 - DNA, 39 bp, Homo sapiens
  chr3:197608011-197608050
  hypo
gcagcagctgctcacgaggagaaccgtcgtgccttttct

SEQ ID NO: 302669 - DNA, 97 bp, Homo sapiens; identical to SEQ ID NO: 209387
  chr3:197612489-197612586
  hypo

SEQ ID NO: 302670 - DNA, 114 bp, Homo sapiens; identical to SEQ ID NO: 209388
  chr3:197616593-197616707
  hypo

SEQ ID NO: 302671 - DNA, 155 bp, Homo sapiens; identical to SEQ ID NO: 253258
  chr3:197640193-197640348
  hypo

SEQ ID NO: 302672 - DNA, 76 bp, Homo sapiens; identical to SEQ ID NO: 209389
  chr3:197663680-197663756
  hypo

SEQ ID NO: 302673 - DNA, 210 bp, Homo sapiens; identical to SEQ ID NO: 209390
  chr3:197685522-197685732
  hypo

SEQ ID NO: 302674 - DNA, 35 bp, Homo sapiens; identical to SEQ ID NO: 253261
  chr3:197714311-197714346
  hypo

SEQ ID NO: 302675 - DNA, 87 bp, Homo sapiens; identical to SEQ ID NO: 253262
  chr3:197726426-197726513
  hypo

SEQ ID NO: 302676 - DNA, 183 bp, Homo sapiens; identical to SEQ ID NO: 209391
  chr3:197764838-197765021
  hypo

SEQ ID NO: 302677 - DNA, 230 bp, Homo sapiens; identical to SEQ ID NO: 209392
  chr4:503184-503414
  hypo

SEQ ID NO: 302678 - DNA, 406 bp, Homo sapiens
  chr4:512572-512978
  hypo
cccattgtctacaccgtcggggatcctttttcctaaaacaaaatggggtatgtgttctgacactgaaatacgttttagaacccacagccaggcccgtgcagtccctcggtggcgtccagtctgttggaggctttgtgcccacccggctctctcagtgtagtgggaccggctttttctcacctctggacttttgcacatgctgttcccatcagcttgatgctcttcctgcagttttttgcctggcgaattcctgggtaccgtttacatttcagcgtaaacatcagaccttcctggtccagcgcccactcccaatccaaaatcagttcctccccattaccaaaaatccctcattgataccctctacttttccttcctgggaaacttgtaattacagctgtaatgcagt

SEQ ID NO: 302679 - DNA, 696 bp, Homo sapiens; identical to SEQ ID NO: 209394
  chr4:513008-513704
  hypo

SEQ ID NO: 302680 - DNA, 279 bp, Homo sapiens; identical to SEQ ID NO: 209395
  chr4:513734-514013
  hypo

SEQ ID NO: 302681 - DNA, 100 bp, Homo sapiens; identical to SEQ ID NO: 253266
  chr4:529357-529457
  hypo

SEQ ID NO: 302682 - DNA, 135 bp, Homo sapiens; identical to SEQ ID NO: 253267
  chr4:530423-530558
  hypo

SEQ ID NO: 302683 - DNA, 111 bp, Homo sapiens; identical to SEQ ID NO: 253268
  chr4:610967-611078
  hypo

SEQ ID NO: 302684 - DNA, 253 bp, Homo sapiens; identical to SEQ ID NO: 209396
  chr4:616352-616605
  hypo

SEQ ID NO: 302685 - DNA, 167 bp, Homo sapiens; identical to SEQ ID NO: 209397
  chr4:617078-617245
  hypo

SEQ ID NO: 302686 - DNA, 39 bp, Homo sapiens; identical to SEQ ID NO: 209398
  chr4:617281-617320
  hypo

SEQ ID NO: 302687 - DNA, 153 bp, Homo sapiens; identical to SEQ ID NO: 253271
  chr4:618645-618798
  hypo

SEQ ID NO: 302688 - DNA, 53 bp, Homo sapiens; identical to SEQ ID NO: 209399
  chr4:619879-619932
  hypo

SEQ ID NO: 302689 - DNA, 43 bp, Homo sapiens; identical to SEQ ID NO: 209400
  chr4:628787-628830
  hypo

SEQ ID NO: 302690 - DNA, 420 bp, Homo sapiens
  chr4:628950-629370
  hypo
ttctgtgctgcgcgtccacctccttacctgcctgcccgcctgcccgcgtgttctgtgctgcgtgtccacctccttacctgcctgcccgcctgcctgcgtgttctgtgctgcgcgtctgcctccctgcctgcctccctgcccgcctgcccgcgtgttctgtgctgtgcgtccacctccttacctgcctgcctgcctgcccgcgtgttctgtgccacgcgtctgcctccctgcctgcctgcccgtgtgttctgtgctgtgcgtccacctccttacctgcctgcctgcctgcctgcgtgttctgtgccacgcgtctgcctccctgcctgcctgcccgtgtgttctgtgctgtgcgtccacctccttacctgcctgcctgcctgcccgcgtgttctgtgccacgcgtctgcctccctgcctgcc

SEQ ID NO: 302691 - DNA, 48 bp, Homo sapiens
  chr4:629407-629455
  hypo
tgggctccacgtgctcatctgcacatcgctgtgctcctgtgtgtctgt

SEQ ID NO: 302692 - DNA, 43 bp, Homo sapiens; identical to SEQ ID NO: 209402
  chr4:651348-651391
  hypo

SEQ ID NO: 302693 - DNA, 236 bp, Homo sapiens; identical to SEQ ID NO: 209403
  chr4:655879-656115
  hypo

SEQ ID NO: 302694 - DNA, 172 bp, Homo sapiens; identical to SEQ ID NO: 281895
  chr4:657349-657521
  hypo

SEQ ID NO: 302695 - DNA, 114 bp, Homo sapiens; identical to SEQ ID NO: 281896
  chr4:657552-657666
  hypo

SEQ ID NO: 302696 - DNA, 145 bp, Homo sapiens; identical to SEQ ID NO: 199288
  chr4:657712-657857
  hypo

SEQ ID NO: 302697 - DNA, 226 bp, Homo sapiens; identical to SEQ ID NO: 281898
  chr4:667540-667766
  hypo

SEQ ID NO: 302698 - DNA, 254 bp, Homo sapiens; identical to SEQ ID NO: 209406
  chr4:679512-679766
  hypo

SEQ ID NO: 302699 - DNA, 44 bp, Homo sapiens; identical to SEQ ID NO: 253278
  chr4:708090-708134
  hypo

SEQ ID NO: 302700 - DNA, 165 bp, Homo sapiens
  chr4:717887-718052
  hypo
caatggcagagccccggcagaaagactcagggcagatggtggttgtcagccgggagggggcacggagccctgggggtggtcaggcccacgtggccttgggacgagagcgaagaggtgggatcggctgcgggagacagggaagtgggtgacaaggaggctcagggg

SEQ ID NO: 302701 - DNA, 49 bp, Homo sapiens
  chr4:718112-718161
  hypo
ggtcaggggctcagtcctgtgggccaccacagccggccgcacaggcagg

SEQ ID NO: 302702 - DNA, 81 bp, Homo sapiens
  chr4:718240-718321
  hypo
gggctgggtggggtggcagctgccagttcaaagtctgtcttttgtttatttacttcataaaatactccaggtgttttgtta

SEQ ID NO: 302703 - DNA, 187 bp, Homo sapiens; identical to SEQ ID NO: 209407
  chr4:722182-722369
  hypo

SEQ ID NO: 302704 - DNA, 156 bp, Homo sapiens
  chr4:738133-738289
  hypo
ggctccggctgccccgtctctgtctcctgtgctccccacgcctgcaccccacaggcccacacgcccgttctgcatcctggggagacccctgcagacactttgcggacggctttcctttgacgcttactccgctccgggggtccagagtctcttaat

SEQ ID NO: 302705 - DNA, 167 bp, Homo sapiens
  chr4:741787-741954
  hypo
cctccgggcgcgtctctgtgctccgtgaatgttacgtgaaagaaagtaaagcctggcagtgtgttgaaaggaaagtgagagtgaacgtcgagggcctcttcgtgtgtcatttactgtattaccagatgaagacagaaaaactacacggtcacagagatgcagtaaaa

SEQ ID NO: 302706 - DNA, 275 bp, Homo sapiens; identical to SEQ ID NO: 253283
  chr4:744982-745257
  hypo

SEQ ID NO: 302707 - DNA, 185 bp, Homo sapiens; identical to SEQ ID NO: 253284
  chr4:745651-745836
  hypo

SEQ ID NO: 302708 - DNA, 474 bp, Homo sapiens; identical to SEQ ID NO: 209408
  chr4:756822-757296
  hypo

SEQ ID NO: 302709 - DNA, 183 bp, Homo sapiens; identical to SEQ ID NO: 209409
  chr4:757326-757509
  hypo

SEQ ID NO: 302710 - DNA, 216 bp, Homo sapiens; identical to SEQ ID NO: 209410
  chr4:757737-757953
  hypo

SEQ ID NO: 302711 - DNA, 32 bp, Homo sapiens
  chr4:759705-759737
  hypo
tgcatgtggactgtgcctcacgggacgtgatt

SEQ ID NO: 302712 - DNA, 342 bp, Homo sapiens
  chr4:759841-760183
  hypo
acagacccaagatggacttgctgtgaatggtgccacacagcgcccacagactgggccctcgcacccttgggtgctcccggccgccgcgcttaagaacattgcctctgggtgtcatgtggaccagacttctgaatagagaatatttataacttttgtatgagagagaattcacactcaacaagacactaccagcaccacgtttacagaggatgaaaacacttcacagtctcccagagccgatcgtcctctcccccgccccaccccgtgcttcagccttgcagggagagtgatgctccaggcaacacggttctgagtcaccttctgacacgagctccctctgct

SEQ ID NO: 302713 - DNA, 210 bp, Homo sapiens; identical to SEQ ID NO: 209411
  chr4:765529-765739
  hypo

SEQ ID NO: 302714 - DNA, 34 bp, Homo sapiens; identical to SEQ ID NO: 253289
  chr4:793059-793093
  hypo

SEQ ID NO: 302715 - DNA, 139 bp, Homo sapiens; identical to SEQ ID NO: 253290
  chr4:793648-793787
  hypo

SEQ ID NO: 302716 - DNA, 458 bp, Homo sapiens; identical to SEQ ID NO: 253291
  chr4:812189-812647
  hypo

SEQ ID NO: 302717 - DNA, 97 bp, Homo sapiens; identical to SEQ ID NO: 253292
  chr4:815186-815283
  hypo

SEQ ID NO: 302718 - DNA, 297 bp, Homo sapiens; identical to SEQ ID NO: 281901
  chr4:819437-819734
  hypo

SEQ ID NO: 302719 - DNA, 219 bp, Homo sapiens; identical to SEQ ID NO: 253294
  chr4:841555-841774
  hypo

SEQ ID NO: 302720 - DNA, 726 bp, Homo sapiens; identical to SEQ ID NO: 253295
  chr4:843330-844056
  hypo

SEQ ID NO: 302721 - DNA, 121 bp, Homo sapiens; identical to SEQ ID NO: 209413
  chr4:854460-854581
  hypo

SEQ ID NO: 302722 - DNA, 128 bp, Homo sapiens; identical to SEQ ID NO: 253297
  chr4:859215-859343
  hypo

SEQ ID NO: 302723 - DNA, 378 bp, Homo sapiens; identical to SEQ ID NO: 253298
  chr4:860587-860965
  hypo

SEQ ID NO: 302724 - DNA, 114 bp, Homo sapiens; identical to SEQ ID NO: 253299
  chr4:864981-865095
  hypo

SEQ ID NO: 302725 - DNA, 177 bp, Homo sapiens; identical to SEQ ID NO: 253300
  chr4:866140-866317
  hypo

SEQ ID NO: 302726 - DNA, 247 bp, Homo sapiens; identical to SEQ ID NO: 253301
  chr4:872637-872884
  hypo

SEQ ID NO: 302727 - DNA, 149 bp, Homo sapiens; identical to SEQ ID NO: 253302
  chr4:873652-873801
  hypo

SEQ ID NO: 302728 - DNA, 111 bp, Homo sapiens; identical to SEQ ID NO: 253303
  chr4:877548-877659
  hypo

SEQ ID NO: 302729 - DNA, 38 bp, Homo sapiens; identical to SEQ ID NO: 209415
  chr4:881388-881426
  hypo

SEQ ID NO: 302730 - DNA, 135 bp, Homo sapiens; identical to SEQ ID NO: 209416
  chr4:882583-882718
  hypo

SEQ ID NO: 302731 - DNA, 123 bp, Homo sapiens; identical to SEQ ID NO: 253306
  chr4:887622-887745
  hypo

SEQ ID NO: 302732 - DNA, 113 bp, Homo sapiens; identical to SEQ ID NO: 209417
  chr4:891957-892070
  hypo

SEQ ID NO: 302733 - DNA, 224 bp, Homo sapiens; identical to SEQ ID NO: 253308
  chr4:899761-899985
  hypo

SEQ ID NO: 302734 - DNA, 208 bp, Homo sapiens; identical to SEQ ID NO: 209419
  chr4:905662-905870
  hypo

SEQ ID NO: 302735 - DNA, 39 bp, Homo sapiens; identical to SEQ ID NO: 209420
  chr4:905932-905971
  hypo

SEQ ID NO: 302736 - DNA, 36 bp, Homo sapiens; identical to SEQ ID NO: 253310
  chr4:907579-907615
  hypo

SEQ ID NO: 302737 - DNA, 92 bp, Homo sapiens; identical to SEQ ID NO: 253311
  chr4:937313-937405
  hypo

SEQ ID NO: 302738 - DNA, 89 bp, Homo sapiens; identical to SEQ ID NO: 253312
  chr4:937752-937841
  hypo

SEQ ID NO: 302739 - DNA, 41 bp, Homo sapiens; identical to SEQ ID NO: 209421
  chr4:949385-949426
  hypo

SEQ ID NO: 302740 - DNA, 127 bp, Homo sapiens
  chr4:955057-955184
  hypo
cgggagaggccagccgagcagggaccagggacgcccaccctggacctggccctggggcgggagaggccagccgggctcagcggggaccggggacgcccaccctggacctggccctggggcgggagag

SEQ ID NO: 302741 - DNA, 307 bp, Homo sapiens
  chr4:955544-955851
  hypo
cggatctgcttgtgcaggctccgagagtgactgatcttctgcagccccacccgcacgtacacacccttgttgtgcagcctgcaggacggggcaggtcacccatcaccaggggaagccctaccccgccttaggcagcctccgggttccggcccctctgcctgttcctgctgggggacctgagggaggtatgccgttgacaggtggtagcccctgcggctccggtacctgcttgtgaacttgccaggctcctcttcccgtgcctggtggaagtccaggctcagctccgcgtcgatgccaatgccacagt

SEQ ID NO: 302742 - DNA, 359 bp, Homo sapiens
  chr4:957050-957409
  hypo
gacagctgtctgggggcagcttcgcgtgctgacagacagggggctgggttaggatggggacccaaggtggggtgtccccactgctggggttgccaggcagtgcccagcccccaaccctgagcccacctggcttggaccagccccctccccaggaaggcgtggccagcaccctcacatctgaggcctcacacatgagctgcgtggtcaccccatctcgctgctggccagcagggcggcactgaggacagccggctggctgcctggcactcccagcacaaaggcctcagacctgcccactgagctgcgtgtgaacagaccacacccgcctgggccatgcagcgcgagtccaggctggaaat

SEQ ID NO: 302743 - DNA, 137 bp, Homo sapiens
  chr4:957439-957576
  hypo
cagcgagaccaaggcctgtcccctggggggcctctggtgcacacctttggaggatggcggctcccaggccaccgcccacctacacagcagccgagaaaagctcttaactcacagggtggcacgcggcgtccctcgac

SEQ ID NO: 302744 - DNA, 178 bp, Homo sapiens; identical to SEQ ID NO: 253315
  chr4:965203-965381
  hypo

SEQ ID NO: 302745 - DNA, 309 bp, Homo sapiens; identical to SEQ ID NO: 222331
  chr4:966933-967242
  hypo

SEQ ID NO: 302746 - DNA, 333 bp, Homo sapiens; identical to SEQ ID NO: 253316
  chr4:968831-969164
  hypo

SEQ ID NO: 302747 - DNA, 32 bp, Homo sapiens; identical to SEQ ID NO: 209424
  chr4:982809-982841
  hypo

SEQ ID NO: 302748 - DNA, 38 bp, Homo sapiens; identical to SEQ ID NO: 209425
  chr4:995247-995285
  hypo

SEQ ID NO: 302749 - DNA, 396 bp, Homo sapiens; identical to SEQ ID NO: 199291
  chr4:1004393-1004789
  hypo

SEQ ID NO: 302750 - DNA, 250 bp, Homo sapiens; identical to SEQ ID NO: 209427
  chr4:1007048-1007298
  hypo

SEQ ID NO: 302751 - DNA, 39 bp, Homo sapiens; identical to SEQ ID NO: 209428
  chr4:1008902-1008941
  hypo

SEQ ID NO: 302752 - DNA, 133 bp, Homo sapiens; identical to SEQ ID NO: 253321
  chr4:1012455-1012588
  hypo

SEQ ID NO: 302753 - DNA, 220 bp, Homo sapiens; identical to SEQ ID NO: 209429
  chr4:1016366-1016586
  hypo

SEQ ID NO: 302754 - DNA, 67 bp, Homo sapiens; identical to SEQ ID NO: 253323
  chr4:1022505-1022572
  hypo

SEQ ID NO: 302755 - DNA, 232 bp, Homo sapiens
  chr4:1022602-1022834
  hypo
ggagcacagaggccccgtgtgcttcgaggacttgaggcaggaggcgggcagaggcgcccagggcgtgagtgtggccagcaggacagagggcaggactgcgcttctgacagtggtctgctccggccaagcacctgaaagatggggagcccttcaccccaggctcactggccaggaggctcgaagggccgggtggggcttgtgggaggtgggggtgccgctctgtgggccccgt

SEQ ID NO: 302756 - DNA, 83 bp, Homo sapiens; identical to SEQ ID NO: 281905
  chr4:1036539-1036622
  hypo

SEQ ID NO: 302757 - DNA, 181 bp, Homo sapiens; identical to SEQ ID NO: 253327
  chr4:1044472-1044653
  hypo

SEQ ID NO: 302758 - DNA, 97 bp, Homo sapiens; identical to SEQ ID NO: 253328
  chr4:1077032-1077129
  hypo

SEQ ID NO: 302759 - DNA, 31 bp, Homo sapiens; identical to SEQ ID NO: 209430
  chr4:1093369-1093400
  hypo

SEQ ID NO: 302760 - DNA, 61 bp, Homo sapiens; identical to SEQ ID NO: 209431
  chr4:1093475-1093536
  hypo

SEQ ID NO: 302761 - DNA, 128 bp, Homo sapiens; identical to SEQ ID NO: 209432
  chr4:1189100-1189228
  hypo

SEQ ID NO: 302762 - DNA, 42 bp, Homo sapiens; identical to SEQ ID NO: 253331
  chr4:1201010-1201052
  hypo

SEQ ID NO: 302763 - DNA, 240 bp, Homo sapiens; identical to SEQ ID NO: 253332
  chr4:1201278-1201518
  hypo

SEQ ID NO: 302764 - DNA, 333 bp, Homo sapiens; identical to SEQ ID NO: 253333
  chr4:1202638-1202971
  hypo

SEQ ID NO: 302765 - DNA, 520 bp, Homo sapiens; identical to SEQ ID NO: 209433
  chr4:1204211-1204731
  hypo

SEQ ID NO: 302766 - DNA, 63 bp, Homo sapiens; identical to SEQ ID NO: 209434
  chr4:1204981-1205044
  hypo

SEQ ID NO: 302767 - DNA, 143 bp, Homo sapiens
  chr4:1205831-1205974
  hypo
gacacagggcagagcgcccacaggacggacgacgacaagcgacacgaggcccagcgctgccccctcccgcctcctgacagcccggaccagtctctgcagtgccagggccaccacacagatgcctcctccacacactctggtcc

SEQ ID NO: 302768 - DNA, 283 bp, Homo sapiens; identical to SEQ ID NO: 147744
  chr4:1206025-1206308
  hypo

SEQ ID NO: 302769 - DNA, 396 bp, Homo sapiens; identical to SEQ ID NO: 253337
  chr4:1208723-1209119
  hypo

SEQ ID NO: 302770 - DNA, 135 bp, Homo sapiens; identical to SEQ ID NO: 209437
  chr4:1212170-1212305
  hypo

SEQ ID NO: 302771 - DNA, 87 bp, Homo sapiens; identical to SEQ ID NO: 209438
  chr4:1214807-1214894
  hypo

SEQ ID NO: 302772 - DNA, 253 bp, Homo sapiens; identical to SEQ ID NO: 209439
  chr4:1215162-1215415
  hypo

SEQ ID NO: 302773 - DNA, 82 bp, Homo sapiens; identical to SEQ ID NO: 209440
  chr4:1215451-1215533
  hypo

SEQ ID NO: 302774 - DNA, 415 bp, Homo sapiens; identical to SEQ ID NO: 253341
  chr4:1215813-1216228
  hypo

SEQ ID NO: 302775 - DNA, 200 bp, Homo sapiens; identical to SEQ ID NO: 253342
  chr4:1217207-1217407
  hypo

SEQ ID NO: 302776 - DNA, 175 bp, Homo sapiens; identical to SEQ ID NO: 209442
  chr4:1222481-1222656
  hypo

SEQ ID NO: 302777 - DNA, 365 bp, Homo sapiens; identical to SEQ ID NO: 209443
  chr4:1222883-1223248
  hypo

SEQ ID NO: 302778 - DNA, 40 bp, Homo sapiens; identical to SEQ ID NO: 209444
  chr4:1224485-1224525
  hypo

SEQ ID NO: 302779 - DNA, 76 bp, Homo sapiens; identical to SEQ ID NO: 209445
  chr4:1224555-1224631
  hypo

SEQ ID NO: 302780 - DNA, 38 bp, Homo sapiens; identical to SEQ ID NO: 253347
  chr4:1224661-1224699
  hypo

SEQ ID NO: 302781 - DNA, 493 bp, Homo sapiens; identical to SEQ ID NO: 209446
  chr4:1225295-1225788
  hypo

SEQ ID NO: 302782 - DNA, 552 bp, Homo sapiens; identical to SEQ ID NO: 253349
  chr4:1228596-1229148
  hypo

SEQ ID NO: 302783 - DNA, 77 bp, Homo sapiens; identical to SEQ ID NO: 253350
  chr4:1232725-1232802
  hypo

SEQ ID NO: 302784 - DNA, 166 bp, Homo sapiens; identical to SEQ ID NO: 253351
  chr4:1238879-1239045
  hypo

SEQ ID NO: 302785 - DNA, 140 bp, Homo sapiens; identical to SEQ ID NO: 199293
  chr4:1243421-1243561
  hypo

SEQ ID NO: 302786 - DNA, 334 bp, Homo sapiens; identical to SEQ ID NO: 253352
  chr4:1254351-1254685
  hypo

SEQ ID NO: 302787 - DNA, 68 bp, Homo sapiens
  chr4:1282405-1282473
  hypo
gagagtggcagacacgatgcgaaccgtgaaaggacgcaaagagtacagagtgcatgcttccatctcta

SEQ ID NO: 302788 - DNA, 57 bp, Homo sapiens; identical to SEQ ID NO: 209448
  chr4:1290582-1290639
  hypo

SEQ ID NO: 302789 - DNA, 357 bp, Homo sapiens; identical to SEQ ID NO: 209449
  chr4:1290669-1291026
  hypo

SEQ ID NO: 302790 - DNA, 70 bp, Homo sapiens; identical to SEQ ID NO: 253356
  chr4:1304008-1304078
  hypo

SEQ ID NO: 302791 - DNA, 135 bp, Homo sapiens; identical to SEQ ID NO: 253357
  chr4:1305766-1305901
  hypo

SEQ ID NO: 302792 - DNA, 369 bp, Homo sapiens; identical to SEQ ID NO: 253358
  chr4:1309326-1309695
  hypo

SEQ ID NO: 302793 - DNA, 110 bp, Homo sapiens; identical to SEQ ID NO: 209451
  chr4:1309945-1310055
  hypo

SEQ ID NO: 302794 - DNA, 684 bp, Homo sapiens; identical to SEQ ID NO: 253360
  chr4:1317015-1317699
  hypo

SEQ ID NO: 302795 - DNA, 91 bp, Homo sapiens; identical to SEQ ID NO: 209453
  chr4:1322319-1322410
  hypo

SEQ ID NO: 302796 - DNA, 223 bp, Homo sapiens; identical to SEQ ID NO: 209454
  chr4:1323177-1323400
  hypo

SEQ ID NO: 302797 - DNA, 96 bp, Homo sapiens; identical to SEQ ID NO: 209455
  chr4:1323654-1323750
  hypo

SEQ ID NO: 302798 - DNA, 157 bp, Homo sapiens; identical to SEQ ID NO: 253364
  chr4:1324018-1324175
  hypo

SEQ ID NO: 302799 - DNA, 56 bp, Homo sapiens; identical to SEQ ID NO: 253365
  chr4:1324514-1324570
  hypo

SEQ ID NO: 302800 - DNA, 256 bp, Homo sapiens; identical to SEQ ID NO: 253366
  chr4:1324847-1325103
  hypo

SEQ ID NO: 302801 - DNA, 150 bp, Homo sapiens; identical to SEQ ID NO: 253367
  chr4:1326090-1326240
  hypo

SEQ ID NO: 302802 - DNA, 210 bp, Homo sapiens; identical to SEQ ID NO: 253368
  chr4:1326480-1326690
  hypo

SEQ ID NO: 302803 - DNA, 135 bp, Homo sapiens; identical to SEQ ID NO: 209457
  chr4:1330875-1331010
  hypo

SEQ ID NO: 302804 - DNA, 48 bp, Homo sapiens; identical to SEQ ID NO: 209458
  chr4:1331117-1331165
  hypo

SEQ ID NO: 302805 - DNA, 372 bp, Homo sapiens; identical to SEQ ID NO: 209459
  chr4:1331896-1332268
  hypo

SEQ ID NO: 302806 - DNA, 218 bp, Homo sapiens; identical to SEQ ID NO: 199294
  chr4:1332660-1332878
  hypo

SEQ ID NO: 302807 - DNA, 541 bp, Homo sapiens
  chr4:1333183-1333724
  hypo
gcttctgaaaagtactttcaacttgcgaaggaaactcttctttaaagactgacctaaacaccgagggaaacttaagaacgtttaaaatataggagtccgtgatttccctgtgttttcagtttctttccttctgtgaacgatgagacttggagaacgggctggtccttcaccacttcctgttggccctggcctggccggggaaggtggcagcggcaccggactgacctgcagtgacccgcgatgccgcgccacgagggacacttatggcttcattcgagagctgctgccaaaacgcctggcgccgccaccgtcgggggctggcttcgaggacgcccgcctgcctcgcgggtcgtgtccgcgggactgtgttcgtacgtgcatagtttcgatatcacatcgcggggctgtgttcgtagctgcgtcgtttcgatatcacaccctctgtgtgccgccttacttcctgcttcgagaatgtataacgtggaaatccacgggaccaaatttctgcagaggccttgccggatggttccataactgtaga

SEQ ID NO: 302808 - DNA, 220 bp, Homo sapiens; identical to SEQ ID NO: 253372
  chr4:1333934-1334154
  hypo

SEQ ID NO: 302809 - DNA, 68 bp, Homo sapiens; identical to SEQ ID NO: 253373
  chr4:1334471-1334539
  hypo

SEQ ID NO: 302810 - DNA, 150 bp, Homo sapiens; identical to SEQ ID NO: 209464
  chr4:1336902-1337052
  hypo

SEQ ID NO: 302811 - DNA, 74 bp, Homo sapiens; identical to SEQ ID NO: 209465
  chr4:1338812-1338886
  hypo

SEQ ID NO: 302812 - DNA, 33 bp, Homo sapiens; identical to SEQ ID NO: 209466
  chr4:1348027-1348060
  hypo

SEQ ID NO: 302813 - DNA, 248 bp, Homo sapiens; identical to SEQ ID NO: 253378
  chr4:1354334-1354582
  hypo

SEQ ID NO: 302814 - DNA, 132 bp, Homo sapiens; identical to SEQ ID NO: 253379
  chr4:1355307-1355439
  hypo

SEQ ID NO: 302815 - DNA, 69 bp, Homo sapiens; identical to SEQ ID NO: 281916
  chr4:1399564-1399633
  hypo

SEQ ID NO: 302816 - DNA, 58 bp, Homo sapiens; identical to SEQ ID NO: 281917
  chr4:1399665-1399723
  hypo

SEQ ID NO: 302817 - DNA, 222 bp, Homo sapiens; identical to SEQ ID NO: 281918
  chr4:1399768-1399990
  hypo

SEQ ID NO: 302818 - DNA, 136 bp, Homo sapiens; identical to SEQ ID NO: 281919
  chr4:1400112-1400248
  hypo

SEQ ID NO: 302819 - DNA, 124 bp, Homo sapiens; identical to SEQ ID NO: 281921
  chr4:1404605-1404729
  hypo

SEQ ID NO: 302820 - DNA, 408 bp, Homo sapiens; identical to SEQ ID NO: 281922
  chr4:1407532-1407940
  hypo

SEQ ID NO: 302821 - DNA, 101 bp, Homo sapiens; identical to SEQ ID NO: 253380
  chr4:1411588-1411689
  hypo

SEQ ID NO: 302822 - DNA, 137 bp, Homo sapiens; identical to SEQ ID NO: 253381
  chr4:1411719-1411856
  hypo

SEQ ID NO: 302823 - DNA, 283 bp, Homo sapiens; identical to SEQ ID NO: 253382
  chr4:1491943-1492226
  hypo

SEQ ID NO: 302824 - DNA, 120 bp, Homo sapiens; identical to SEQ ID NO: 253383
  chr4:1537043-1537163
  hypo

SEQ ID NO: 302825 - DNA, 94 bp, Homo sapiens; identical to SEQ ID NO: 253384
  chr4:1537283-1537377
  hypo

SEQ ID NO: 302826 - DNA, 119 bp, Homo sapiens; identical to SEQ ID NO: 147828
  chr4:1538148-1538267
  hypo

SEQ ID NO: 302827 - DNA, 300 bp, Homo sapiens; identical to SEQ ID NO: 253386
  chr4:1541582-1541882
  hypo

SEQ ID NO: 302828 - DNA, 484 bp, Homo sapiens
  chr4:1556847-1557331
  hypo
ggctccgagctgagggagaagcacacgccgcccctgccctgtgagctggcgttccaggacagaatcggatatcaaacgagcacacggataccaagtaaaggccccaccgtcacacagcagccgccgctggaaactgagtttggtgggggaggggcctctctgcccagggactgagaccctgggatggtgacaaaggccagcaccgggtcccacacggagatgacgccatttaaccctccccaagacgccagggaagaggcgtccttgttcgtccattttacagaagagtacactgaggcctccagacgctggtggggacctcccaagccaggctccccatgtctctttctgggcctccgaccaccgttgatcagagaagcaaatctgttgggagaaatctcggagccacagagccctggcagggtgctcctggtggggaccagtccgggctggcccgacacttcctgcacgccggcctccctgt

SEQ ID NO: 302829 - DNA, 575 bp, Homo sapiens; identical to SEQ ID NO: 253389
  chr4:1563631-1564206
  hypo

SEQ ID NO: 302830 - DNA, 515 bp, Homo sapiens
  chr4:1578103-1578618
  hypo
cataaccgtgatttgaggggacagcccagagcaccccacagctgcctgcagcacagcgacgtgtcctgataaaacatccttcccaatttacggggccgcgcttgactaatctgcctccgcgcgcacactgtctaatcatgccatcagcaccgcgagaaggggctcaattgggactccaatgaaaggagattggaaaactaccctcaattgaaattacatttgtaaatgaggcagagttttctgttcagagtgtgaacgttacggtaaatctgctccagaaagtcgaagaggcggcagcggtgggcaggccggggacgccgcaggggcgactgggactgtgccccggctggggccagggtccacattctggagaggtgcccggcaccatgctggcccctggggacagccccaggagaggagaggggctgtggcggaagcccggagagttgggcctagtttgtcagacatcagacttcacttcccactctgtaaaatggggcgcagggcggcctcct

SEQ ID NO: 302831 - DNA, 62 bp, Homo sapiens; identical to SEQ ID NO: 253391
  chr4:1585407-1585469
  hypo

SEQ ID NO: 302832 - DNA, 524 bp, Homo sapiens; identical to SEQ ID NO: 253392
  chr4:1600696-1601220
  hypo

SEQ ID NO: 302833 - DNA, 127 bp, Homo sapiens; identical to SEQ ID NO: 209469
  chr4:1616406-1616533
  hypo

SEQ ID NO: 302834 - DNA, 471 bp, Homo sapiens; identical to SEQ ID NO: 253394
  chr4:1621151-1621622
  hypo

SEQ ID NO: 302835 - DNA, 265 bp, Homo sapiens; identical to SEQ ID NO: 253395
  chr4:1626395-1626660
  hypo

SEQ ID NO: 302836 - DNA, 39 bp, Homo sapiens; identical to SEQ ID NO: 253396
  chr4:1638196-1638235
  hypo

SEQ ID NO: 302837 - DNA, 45 bp, Homo sapiens; identical to SEQ ID NO: 253397
  chr4:1642970-1643015
  hypo

SEQ ID NO: 302838 - DNA, 478 bp, Homo sapiens; identical to SEQ ID NO: 253398
  chr4:1645866-1646344
  hypo

SEQ ID NO: 302839 - DNA, 374 bp, Homo sapiens; identical to SEQ ID NO: 253399
  chr4:1651637-1652011
  hypo

SEQ ID NO: 302840 - DNA, 162 bp, Homo sapiens; identical to SEQ ID NO: 209471
  chr4:1656589-1656751
  hypo

SEQ ID NO: 302841 - DNA, 99 bp, Homo sapiens; identical to SEQ ID NO: 209472
  chr4:1658844-1658943
  hypo

SEQ ID NO: 302842 - DNA, 312 bp, Homo sapiens; identical to SEQ ID NO: 253402
  chr4:1672854-1673166
  hypo

SEQ ID NO: 302843 - DNA, 50 bp, Homo sapiens; identical to SEQ ID NO: 209473
  chr4:1684725-1684775
  hypo

SEQ ID NO: 302844 - DNA, 35 bp, Homo sapiens; identical to SEQ ID NO: 209474
  chr4:1684805-1684840
  hypo

SEQ ID NO: 302845 - DNA, 386 bp, Homo sapiens; identical to SEQ ID NO: 209475
  chr4:1738656-1739042
  hypo

SEQ ID NO: 302846 - DNA, 681 bp, Homo sapiens; identical to SEQ ID NO: 253407
  chr4:1760184-1760865
  hypo

SEQ ID NO: 302847 - DNA, 148 bp, Homo sapiens; identical to SEQ ID NO: 253408
  chr4:1763039-1763187
  hypo

SEQ ID NO: 302848 - DNA, 129 bp, Homo sapiens; identical to SEQ ID NO: 253409
  chr4:1768300-1768429
  hypo

SEQ ID NO: 302849 - DNA, 368 bp, Homo sapiens; identical to SEQ ID NO: 209476
  chr4:1778329-1778697
  hypo

SEQ ID NO: 302850 - DNA, 475 bp, Homo sapiens; identical to SEQ ID NO: 253411
  chr4:1781228-1781703
  hypo

SEQ ID NO: 302851 - DNA, 97 bp, Homo sapiens; identical to SEQ ID NO: 209478
  chr4:1782913-1783010
  hypo

SEQ ID NO: 302852 - DNA, 474 bp, Homo sapiens; identical to SEQ ID NO: 253413
  chr4:1784388-1784862
  hypo

SEQ ID NO: 302853 - DNA, 73 bp, Homo sapiens; identical to SEQ ID NO: 253414
  chr4:1785062-1785135
  hypo

SEQ ID NO: 302854 - DNA, 58 bp, Homo sapiens; identical to SEQ ID NO: 209479
  chr4:1787676-1787734
  hypo

SEQ ID NO: 302855 - DNA, 60 bp, Homo sapiens; identical to SEQ ID NO: 209480
  chr4:1791209-1791269
  hypo

SEQ ID NO: 302856 - DNA, 148 bp, Homo sapiens; identical to SEQ ID NO: 209481
  chr4:1791344-1791492
  hypo

SEQ ID NO: 302857 - DNA, 250 bp, Homo sapiens; identical to SEQ ID NO: 209482
  chr4:1791522-1791772
  hypo

SEQ ID NO: 302858 - DNA, 1517 bp, Homo sapiens; identical to SEQ ID NO: 281925
  chr4:1794972-1796489
  hypo

SEQ ID NO: 302859 - DNA, 79 bp, Homo sapiens; identical to SEQ ID NO: 253418
  chr4:1798718-1798797
  hypo

SEQ ID NO: 302860 - DNA, 61 bp, Homo sapiens; identical to SEQ ID NO: 253419
  chr4:1801892-1801953
  hypo

SEQ ID NO: 302861 - DNA, 83 bp, Homo sapiens; identical to SEQ ID NO: 209485
  chr4:1804646-1804729
  hypo

SEQ ID NO: 302862 - DNA, 207 bp, Homo sapiens; identical to SEQ ID NO: 209486
  chr4:1804884-1805091
  hypo

SEQ ID NO: 302863 - DNA, 55 bp, Homo sapiens; identical to SEQ ID NO: 209487
  chr4:1805637-1805692
  hypo

SEQ ID NO: 302864 - DNA, 92 bp, Homo sapiens; identical to SEQ ID NO: 209488
  chr4:1805992-1806084
  hypo

SEQ ID NO: 302865 - DNA, 64 bp, Homo sapiens
  chr4:1806113-1806177
  hypo
gctacggggtgggcttcttcctgttcatcctggtggtggcggctgtgacgctctgccgcctgcg

SEQ ID NO: 302866 - DNA, 159 bp, Homo sapiens
  chr4:1807097-1807256
  hypo
ccccttggggagggctgcttcggccaggtggtcatggcggaggccatcggcattgacaaggaccgggccgccaagcctgtcaccgtagccgtgaagatgctgaaaggtgaggagggggcggccaggggtgcagagcagggctgggggcgccgccgccgc

SEQ ID NO: 302867 - DNA, 239 bp, Homo sapiens; identical to SEQ ID NO: 253424
  chr4:1808362-1808601
  hypo

SEQ ID NO: 302868 - DNA, 327 bp, Homo sapiens; identical to SEQ ID NO: 253425
  chr4:1814434-1814761
  hypo

SEQ ID NO: 302869 - DNA, 92 bp, Homo sapiens; identical to SEQ ID NO: 209489
  chr4:1827205-1827297
  hypo

SEQ ID NO: 302870 - DNA, 508 bp, Homo sapiens; identical to SEQ ID NO: 281927
  chr4:1828221-1828729
  hypo

SEQ ID NO: 302871 - DNA, 140 bp, Homo sapiens; identical to SEQ ID NO: 209491
  chr4:1835054-1835194
  hypo

SEQ ID NO: 302872 - DNA, 141 bp, Homo sapiens; identical to SEQ ID NO: 209492
  chr4:1844710-1844851
  hypo

SEQ ID NO: 302873 - DNA, 246 bp, Homo sapiens; identical to SEQ ID NO: 253430
  chr4:1902451-1902697
  hypo

SEQ ID NO: 302874 - DNA, 79 bp, Homo sapiens; identical to SEQ ID NO: 253431
  chr4:1911667-1911746
  hypo

SEQ ID NO: 302875 - DNA, 285 bp, Homo sapiens; identical to SEQ ID NO: 209493
  chr4:1955051-1955336
  hypo

SEQ ID NO: 302876 - DNA, 91 bp, Homo sapiens; identical to SEQ ID NO: 209494
  chr4:1960866-1960957
  hypo

SEQ ID NO: 302877 - DNA, 98 bp, Homo sapiens
  chr4:1962689-1962787
  hypo
ggagtcttgagccccgacactgaggattggtcagcacgctttttgtcatggccacatgcttgtgatttccagggagaatttgttaacgagtacgttgg

SEQ ID NO: 302878 - DNA, 249 bp, Homo sapiens
  chr4:1962816-1963065
  hypo
cgagaatcaagcacgcacacgagaacgacatcacccacttctacatgctcactatagacaaggtaatgcggaactccactgtgagcttctgcagtgtgctggacctggagccctgatggtcacctgtagaactggactttgccctgtggcagcgccagcatttgtctccttagctgcttattttcaaacatctgcacattttcttctgaggtgcagcgtgtctttcagctgcgccggagggctagagct

SEQ ID NO: 302879 - DNA, 77 bp, Homo sapiens; identical to SEQ ID NO: 253437
  chr4:1973281-1973358
  hypo

SEQ ID NO: 302880 - DNA, 67 bp, Homo sapiens; identical to SEQ ID NO: 253438
  chr4:1976551-1976618
  hypo

SEQ ID NO: 302881 - DNA, 299 bp, Homo sapiens
  chr4:1977126-1977425
  hypo
ggtaaggctgtggcgccctccttccccccaggctctgtgttggcattttgcactcctggagacctgtgtcccccgtgaacagcggcttcctccaggctggcttgttgccgggacaggtgggagcaagttccctgctgtgggctggggaggatggctctcaacaaaggccagtggttaagagttcctcactgaacgtgtttcctggggctgccagaacaatgcctcacagacgcgtggtttcgcagttctgggtgtgggcagggccgtgcgccctctgaaggttccttgggaggctcttt

SEQ ID NO: 302882 - DNA, 77 bp, Homo sapiens
  chr4:1977525-1977602
  hypo
acttgcccttcttataagagcactggtcctgttgacttagcgcctgccctgctaccgtgtgaccccatcttaacaga

SEQ ID NO: 302883 - DNA, 424 bp, Homo sapiens; identical to SEQ ID NO: 253440
  chr4:1980623-1981047
  hypo

SEQ ID NO: 302884 - DNA, 418 bp, Homo sapiens; identical to SEQ ID NO: 253441
  chr4:1986315-1986733
  hypo

SEQ ID NO: 302885 - DNA, 64 bp, Homo sapiens; identical to SEQ ID NO: 209496
  chr4:1993651-1993715
  hypo

SEQ ID NO: 302886 - DNA, 410 bp, Homo sapiens; identical to SEQ ID NO: 209497
  chr4:1994335-1994745
  hypo

SEQ ID NO: 302887 - DNA, 221 bp, Homo sapiens; identical to SEQ ID NO: 209498
  chr4:1994830-1995051
  hypo

SEQ ID NO: 302888 - DNA, 44 bp, Homo sapiens
  chr4:2038292-2038336
  hypo
tggttcagtgttgacggaagctgaagacagacggaagctccact

SEQ ID NO: 302889 - DNA, 155 bp, Homo sapiens
  chr4:2038366-2038521
  hypo
gcgtggagaagaaatcctccctgtgggtataactcggatcagttagcttgcttgtctgcttcacgtagaggcagaagagtcatgaaataagaatatatatggagtcgtgggtggggctgtttggctggttgatgagaacccggaaggagcaagtt

SEQ ID NO: 302890 - DNA, 188 bp, Homo sapiens; identical to SEQ ID NO: 209499
  chr4:2045628-2045816
  hypo

SEQ ID NO: 302891 - DNA, 556 bp, Homo sapiens; identical to SEQ ID NO: 281933
  chr4:2060920-2061476
  hypo

SEQ ID NO: 302892 - DNA, 177 bp, Homo sapiens; identical to SEQ ID NO: 253447
  chr4:2128212-2128389
  hypo

SEQ ID NO: 302893 - DNA, 213 bp, Homo sapiens; identical to SEQ ID NO: 253448
  chr4:2165234-2165447
  hypo

SEQ ID NO: 302894 - DNA, 74 bp, Homo sapiens
  chr4:2251591-2251665
  hypo
tgtctaggtgcgtgcgcgtgtgcgtctgacagtcctaccagagcagacgctgcccagctcggcgtgggctgggc

SEQ ID NO: 302895 - DNA, 528 bp, Homo sapiens
  chr4:2278257-2278785
  hypo
tagcggccaagagacggcagcaactcaggtgtctgttggcagaggcgtggataaaccaaatgtggtccacccatacaacagaatattattcagccttaaaaaggaaggaaattcggatctaggctacagccacggatgaatgttggcaagatcatgctgagtgaaacaacccagctaccaaaggatgcgtcctgcttgagtctccgacacgaggtcctgagagccgtcacgttcatacagatggaaggtagaacggtgggcgccagggtgggcagagggcggggagtcggggggagtgagtgatggggaaacagtttcagtttgggaagatgaggacgttgcggagatgatgttggtgacagttgcacggcactgagtgtgttcaatgccacgaaattgtacgcttaggaagggctaaatagtaaactttatgctacatatattttacaaaaattaaaaatataaaaaaaaaagaattggggcagggagagagcagaggcaagggaacggaggcggcaagtacatggc

SEQ ID NO: 302896 - DNA, 186 bp, Homo sapiens; identical to SEQ ID NO: 253451
  chr4:2303623-2303809
  hypo

SEQ ID NO: 302897 - DNA, 51 bp, Homo sapiens; identical to SEQ ID NO: 253453
  chr4:2306804-2306855
  hypo

SEQ ID NO: 302898 - DNA, 51 bp, Homo sapiens; identical to SEQ ID NO: 253454
  chr4:2337323-2337374
  hypo

SEQ ID NO: 302899 - DNA, 246 bp, Homo sapiens; identical to SEQ ID NO: 253455
  chr4:2362985-2363231
  hypo

SEQ ID NO: 302900 - DNA, 277 bp, Homo sapiens; identical to SEQ ID NO: 253456
  chr4:2396220-2396497
  hypo

SEQ ID NO: 302901 - DNA, 44 bp, Homo sapiens; identical to SEQ ID NO: 209501
  chr4:2427613-2427657
  hypo

SEQ ID NO: 302902 - DNA, 34 bp, Homo sapiens; identical to SEQ ID NO: 253458
  chr4:2459493-2459527
  hypo

SEQ ID NO: 302903 - DNA, 96 bp, Homo sapiens; identical to SEQ ID NO: 209502
  chr4:2459899-2459995
  hypo

SEQ ID NO: 302904 - DNA, 100 bp, Homo sapiens
  chr4:2460373-2460473
  hypo
gccctgggctggggcgggaccaggcagggaagccggagcagccccactcaccgtggcaggtccgctgtctgggcagatggccaagctgatgctgcagcgt

SEQ ID NO: 302905 - DNA, 80 bp, Homo sapiens
  chr4:2460503-2460583
  hypo
aggaaggagctggtggagcaggtgatagaggggcagaagaacgccaaggcggcccagacgaagctcgcgaagggccgaca

SEQ ID NO: 302906 - DNA, 57 bp, Homo sapiens
  chr4:2514728-2514785
  hypo
ggataggggccactcacgtgacagggtataataaaatgtttgcgttgactgagaaac

SEQ ID NO: 302907 - DNA, 81 bp, Homo sapiens; identical to SEQ ID NO: 209503
  chr4:2524117-2524198
  hypo

SEQ ID NO: 302908 - DNA, 120 bp, Homo sapiens; identical to SEQ ID NO: 253463
  chr4:2524746-2524866
  hypo

SEQ ID NO: 302909 - DNA, 58 bp, Homo sapiens
  chr4:2527844-2527902
  hypo
ctgggcgacagggcgagactccgtctcaacaacaacaaaaaaaagactaatctttctc

SEQ ID NO: 302910 - DNA, 87 bp, Homo sapiens
  chr4:2527937-2528024
  hypo
tctcactcattttgtgaggtcaatagtaccctaatactgaagccacctaaagacgttgcaagaaaataaaactgcagaactggccag

SEQ ID NO: 302911 - DNA, 31 bp, Homo sapiens; identical to SEQ ID NO: 209504
  chr4:2559965-2559996
  hypo

SEQ ID NO: 302912 - DNA, 36 bp, Homo sapiens; identical to SEQ ID NO: 253467
  chr4:2567250-2567286
  hypo

SEQ ID NO: 302913 - DNA, 120 bp, Homo sapiens; identical to SEQ ID NO: 209505
  chr4:2568040-2568160
  hypo

SEQ ID NO: 302914 - DNA, 42 bp, Homo sapiens; identical to SEQ ID NO: 253469
  chr4:2592459-2592501
  hypo

SEQ ID NO: 302915 - DNA, 78 bp, Homo sapiens; identical to SEQ ID NO: 209506
  chr4:2622586-2622664
  hypo

SEQ ID NO: 302916 - DNA, 78 bp, Homo sapiens; identical to SEQ ID NO: 209507
  chr4:2626193-2626271
  hypo

SEQ ID NO: 302917 - DNA, 120 bp, Homo sapiens; identical to SEQ ID NO: 253472
  chr4:2626554-2626674
  hypo

SEQ ID NO: 302918 - DNA, 268 bp, Homo sapiens; identical to SEQ ID NO: 209508
  chr4:2626993-2627261
  hypo

SEQ ID NO: 302919 - DNA, 86 bp, Homo sapiens; identical to SEQ ID NO: 253474
  chr4:2638080-2638166
  hypo

SEQ ID NO: 302920 - DNA, 240 bp, Homo sapiens; identical to SEQ ID NO: 209509
  chr4:2639921-2640161
  hypo

SEQ ID NO: 302921 - DNA, 146 bp, Homo sapiens; identical to SEQ ID NO: 209510
  chr4:2640600-2640746
  hypo

SEQ ID NO: 302922 - DNA, 116 bp, Homo sapiens; identical to SEQ ID NO: 253477
  chr4:2672877-2672993
  hypo

SEQ ID NO: 302923 - DNA, 220 bp, Homo sapiens; identical to SEQ ID NO: 253478
  chr4:2687342-2687562
  hypo

SEQ ID NO: 302924 - DNA, 437 bp, Homo sapiens; identical to SEQ ID NO: 253479
  chr4:2688475-2688912
  hypo

SEQ ID NO: 302925 - DNA, 194 bp, Homo sapiens; identical to SEQ ID NO: 253480
  chr4:2698197-2698391
  hypo

SEQ ID NO: 302926 - DNA, 938 bp, Homo sapiens; identical to SEQ ID NO: 253481
  chr4:2704073-2705011
  hypo

SEQ ID NO: 302927 - DNA, 54 bp, Homo sapiens; identical to SEQ ID NO: 253482
  chr4:2745778-2745832
  hypo

SEQ ID NO: 302928 - DNA, 102 bp, Homo sapiens; identical to SEQ ID NO: 253483
  chr4:2746455-2746557
  hypo

SEQ ID NO: 302929 - DNA, 104 bp, Homo sapiens; identical to SEQ ID NO: 253484
  chr4:2806952-2807056
  hypo

SEQ ID NO: 302930 - DNA, 123 bp, Homo sapiens; identical to SEQ ID NO: 253485
  chr4:2907412-2907535
  hypo

SEQ ID NO: 302931 - DNA, 91 bp, Homo sapiens; identical to SEQ ID NO: 253486
  chr4:2925310-2925401
  hypo

SEQ ID NO: 302932 - DNA, 76 bp, Homo sapiens; identical to SEQ ID NO: 209513
  chr4:2926396-2926472
  hypo

SEQ ID NO: 302933 - DNA, 109 bp, Homo sapiens; identical to SEQ ID NO: 209514
  chr4:2926880-2926989
  hypo

SEQ ID NO: 302934 - DNA, 38 bp, Homo sapiens; identical to SEQ ID NO: 209515
  chr4:2957244-2957282
  hypo

SEQ ID NO: 302935 - DNA, 167 bp, Homo sapiens; identical to SEQ ID NO: 253491
  chr4:3120141-3120308
  hypo

SEQ ID NO: 302936 - DNA, 142 bp, Homo sapiens; identical to SEQ ID NO: 209516
  chr4:3208227-3208369
  hypo

SEQ ID NO: 302937 - DNA, 122 bp, Homo sapiens; identical to SEQ ID NO: 209517
  chr4:3216985-3217107
  hypo

SEQ ID NO: 302938 - DNA, 77 bp, Homo sapiens; identical to SEQ ID NO: 209518
  chr4:3217154-3217231
  hypo

SEQ ID NO: 302939 - DNA, 183 bp, Homo sapiens; identical to SEQ ID NO: 253494
  chr4:3220630-3220813
  hypo

SEQ ID NO: 302940 - DNA, 155 bp, Homo sapiens; identical to SEQ ID NO: 209519
  chr4:3240561-3240716
  hypo

SEQ ID NO: 302941 - DNA, 146 bp, Homo sapiens; identical to SEQ ID NO: 253496
  chr4:3241773-3241919
  hypo

SEQ ID NO: 302942 - DNA, 267 bp, Homo sapiens; identical to SEQ ID NO: 209520
  chr4:3245188-3245455
  hypo

SEQ ID NO: 302943 - DNA, 81 bp, Homo sapiens; identical to SEQ ID NO: 253498
  chr4:3249855-3249936
  hypo

SEQ ID NO: 302944 - DNA, 149 bp, Homo sapiens; identical to SEQ ID NO: 253499
  chr4:3251091-3251240
  hypo

SEQ ID NO: 302945 - DNA, 546 bp, Homo sapiens
  chr4:3252197-3252743
  hypo
cacaggcaaggtcacaggtgcggtgagggtcttgcagggtgtgaaggtcataggtgtgcggtgaaggtcacaggtgtggggtgatggttttgggtgtggggagggtcttgcacggagcgagggtggcagcaagagctggaagctgcagggggagaatggcagcagagagcacccggccctgtgggcggcctggacagggctgggcctggggctgccggagagcctgtcagcttccaggatgggagtggcctcactcagctgctccacctccgggtcaggcaggtgagcctggggcagagaggctgagagcacctgagccacttgtgggagaggccacccccactgcccccctcaggcgaggagccggcctccagcacagcagaagggaacccccagtccccagccctagtgggagtggggaagaggcccagcaaggccccggacagaccgccagcctgtgaggtctccgctttcagttgcgttgatttgattttttctgagccttgaaggaggggtccggggcctggccctgcccaaaggccccta

SEQ ID NO: 302946 - DNA, 222 bp, Homo sapiens; identical to SEQ ID NO: 209522
  chr4:3252797-3253019
  hypo

SEQ ID NO: 302947 - DNA, 119 bp, Homo sapiens; identical to SEQ ID NO: 253501
  chr4:3265175-3265294
  hypo

SEQ ID NO: 302948 - DNA, 38 bp, Homo sapiens; identical to SEQ ID NO: 253502
  chr4:3267992-3268030
  hypo

SEQ ID NO: 302949 - DNA, 370 bp, Homo sapiens; identical to SEQ ID NO: 253503
  chr4:3288566-3288936
  hypo

SEQ ID NO: 302950 - DNA, 121 bp, Homo sapiens; identical to SEQ ID NO: 209523
  chr4:3292280-3292401
  hypo

SEQ ID NO: 302951 - DNA, 203 bp, Homo sapiens; identical to SEQ ID NO: 253505
  chr4:3310030-3310233
  hypo

SEQ ID NO: 302952 - DNA, 144 bp, Homo sapiens; identical to SEQ ID NO: 253506
  chr4:3310675-3310819
  hypo

SEQ ID NO: 302953 - DNA, 31 bp, Homo sapiens; identical to SEQ ID NO: 253507
  chr4:3311032-3311063
  hypo

SEQ ID NO: 302954 - DNA, 193 bp, Homo sapiens; identical to SEQ ID NO: 209524
  chr4:3324703-3324896
  hypo

SEQ ID NO: 302955 - DNA, 198 bp, Homo sapiens; identical to SEQ ID NO: 209525
  chr4:3345083-3345281
  hypo

SEQ ID NO: 302956 - DNA, 34 bp, Homo sapiens; identical to SEQ ID NO: 253512
  chr4:3368270-3368304
  hypo

SEQ ID NO: 302957 - DNA, 99 bp, Homo sapiens; identical to SEQ ID NO: 253513
  chr4:3375344-3375443
  hypo

SEQ ID NO: 302958 - DNA, 285 bp, Homo sapiens; identical to SEQ ID NO: 253514
  chr4:3403232-3403517
  hypo

SEQ ID NO: 302959 - DNA, 108 bp, Homo sapiens; identical to SEQ ID NO: 209526
  chr4:3413102-3413210
  hypo

SEQ ID NO: 302960 - DNA, 246 bp, Homo sapiens; identical to SEQ ID NO: 253516
  chr4:3415121-3415367
  hypo

SEQ ID NO: 302961 - DNA, 147 bp, Homo sapiens; identical to SEQ ID NO: 209527
  chr4:3415798-3415945
  hypo

SEQ ID NO: 302962 - DNA, 242 bp, Homo sapiens; identical to SEQ ID NO: 253518
  chr4:3416700-3416942
  hypo

SEQ ID NO: 302963 - DNA, 136 bp, Homo sapiens; identical to SEQ ID NO: 209528
  chr4:3417330-3417466
  hypo

SEQ ID NO: 302964 - DNA, 589 bp, Homo sapiens
  chr4:3417496-3418085
  hypo
ctttaagtatccgtttaaacaatcgtagaggagcccgcgcagtgctgctgcattctggccacacttttatttatttattcaagcaagaggtatttactggggcccgtgagaacacatctgtagagcccgggggtgtcgggccttggcaggcagcaggagtgcggggagaggaagccttgccgggctgctcaggtgcctttcctgtcagctttcctacagggcccgggagattttcagtaagtttctctgcagcaaagccaccaccccggtcaacatcgacagccaggcccagctagcagacgacgtcctccgcgcacctcacccagacatgttcaaggagcagcagctgcaggtaaccgcaggctgtgggagcttgtggggagtccaggctagggctcggggtatagggtccaccttcaaagaacacgtgctatcaggcaggccagtggatcgagagcatcacagacgcaggtagagaaacgcagacagaaagtggggctttcagtagggtagagaaacgcagacagaaagtggggctttcagtagggccatgaaataagtcccgaaccactgcgtgtctgtctgcaat

SEQ ID NO: 302965 - DNA, 269 bp, Homo sapiens; identical to SEQ ID NO: 253520
  chr4:3418657-3418926
  hypo

SEQ ID NO: 302966 - DNA, 199 bp, Homo sapiens; identical to SEQ ID NO: 209531
  chr4:3425119-3425318
  hypo

SEQ ID NO: 302967 - DNA, 274 bp, Homo sapiens; identical to SEQ ID NO: 253523
  chr4:3426136-3426410
  hypo

SEQ ID NO: 302968 - DNA, 165 bp, Homo sapiens; identical to SEQ ID NO: 253524
  chr4:3439563-3439728
  hypo

SEQ ID NO: 302969 - DNA, 221 bp, Homo sapiens; identical to SEQ ID NO: 209533
  chr4:3446222-3446443
  hypo

SEQ ID NO: 302970 - DNA, 72 bp, Homo sapiens; identical to SEQ ID NO: 209534
  chr4:3447170-3447242
  hypo

SEQ ID NO: 302971 - DNA, 49 bp, Homo sapiens; identical to SEQ ID NO: 209535
  chr4:3448500-3448549
  hypo

SEQ ID NO: 302972 - DNA, 99 bp, Homo sapiens; identical to SEQ ID NO: 253528
  chr4:3449286-3449385
  hypo

SEQ ID NO: 302973 - DNA, 77 bp, Homo sapiens; identical to SEQ ID NO: 209536
  chr4:3449842-3449919
  hypo

SEQ ID NO: 302974 - DNA, 149 bp, Homo sapiens; identical to SEQ ID NO: 209537
  chr4:3452962-3453111
  hypo

SEQ ID NO: 302975 - DNA, 47 bp, Homo sapiens
  chr4:3467499-3467546
  hypo
ccaccgcgtcctcactgcggaatgcgtgtctgcgtcccctctctggg

SEQ ID NO: 302976 - DNA, 380 bp, Homo sapiens; identical to SEQ ID NO: 253533
  chr4:3478050-3478430
  hypo

SEQ ID NO: 302977 - DNA, 367 bp, Homo sapiens; identical to SEQ ID NO: 209539
  chr4:3480304-3480671
  hypo

SEQ ID NO: 302978 - DNA, 96 bp, Homo sapiens; identical to SEQ ID NO: 253535
  chr4:3512378-3512474
  hypo

SEQ ID NO: 302979 - DNA, 111 bp, Homo sapiens; identical to SEQ ID NO: 209540
  chr4:3514613-3514724
  hypo

SEQ ID NO: 302980 - DNA, 252 bp, Homo sapiens; identical to SEQ ID NO: 253537
  chr4:3515543-3515795
  hypo

SEQ ID NO: 302981 - DNA, 71 bp, Homo sapiens; identical to SEQ ID NO: 253538
  chr4:3528239-3528310
  hypo

SEQ ID NO: 302982 - DNA, 92 bp, Homo sapiens; identical to SEQ ID NO: 253539
  chr4:3576258-3576350
  hypo

SEQ ID NO: 302983 - DNA, 150 bp, Homo sapiens; identical to SEQ ID NO: 209541
  chr4:3588428-3588578
  hypo

SEQ ID NO: 302984 - DNA, 96 bp, Homo sapiens
  chr4:3616196-3616292
  hypo
agagtgtgcaggcccggggcctgggcctacagaggtggagggttttctactctccccagcaccttcgccattgctgagggaagcagctcgtcccca

SEQ ID NO: 302985 - DNA, 89 bp, Homo sapiens
  chr4:3616322-3616411
  hypo
aaggggacaccccagacccaacggctccagccagccagcctcccggcgcagcccagataaattactgcattgcgcgccgtcgagatttc

SEQ ID NO: 302986 - DNA, 376 bp, Homo sapiens; identical to SEQ ID NO: 253542
  chr4:3671151-3671527
  hypo

SEQ ID NO: 302987 - DNA, 32 bp, Homo sapiens; identical to SEQ ID NO: 253543
  chr4:3681906-3681938
  hypo

SEQ ID NO: 302988 - DNA, 99 bp, Homo sapiens; identical to SEQ ID NO: 253544
  chr4:3682490-3682589
  hypo

SEQ ID NO: 302989 - DNA, 137 bp, Homo sapiens; identical to SEQ ID NO: 253545
  chr4:3685351-3685488
  hypo

SEQ ID NO: 302990 - DNA, 161 bp, Homo sapiens; identical to SEQ ID NO: 253546
  chr4:3729125-3729286
  hypo

SEQ ID NO: 302991 - DNA, 161 bp, Homo sapiens; identical to SEQ ID NO: 253547
  chr4:3729586-3729747
  hypo

SEQ ID NO: 302992 - DNA, 261 bp, Homo sapiens; identical to SEQ ID NO: 209542
  chr4:3748239-3748500
  hypo

SEQ ID NO: 302993 - DNA, 283 bp, Homo sapiens; identical to SEQ ID NO: 281945
  chr4:3768207-3768490
  hypo

SEQ ID NO: 302994 - DNA, 208 bp, Homo sapiens; identical to SEQ ID NO: 253549
  chr4:3776159-3776367
  hypo

SEQ ID NO: 302995 - DNA, 161 bp, Homo sapiens; identical to SEQ ID NO: 199306
  chr4:4389011-4389172
  hypo

SEQ ID NO: 302996 - DNA, 467 bp, Homo sapiens; identical to SEQ ID NO: 281951
  chr4:4389297-4389764
  hypo

SEQ ID NO: 302997 - DNA, 139 bp, Homo sapiens; identical to SEQ ID NO: 281952
  chr4:4389794-4389933
  hypo

SEQ ID NO: 302998 - DNA, 91 bp, Homo sapiens
  chr4:4417394-4417485
  hypo
ctgtagggcagggccgtttctgagccatctcgtatgccagccctgagcggggccgccactccacaggtgttggccgcatcaggtcttgcag

SEQ ID NO: 302999 - DNA, 348 bp, Homo sapiens; identical to SEQ ID NO: 253552
  chr4:4487391-4487739
  hypo

SEQ ID NO: 303000 - DNA, 65 bp, Homo sapiens; identical to SEQ ID NO: 253553
  chr4:4498752-4498817
  hypo

SEQ ID NO: 303001 - DNA, 455 bp, Homo sapiens; identical to SEQ ID NO: 253554
  chr4:4509156-4509611
  hypo

SEQ ID NO: 303002 - DNA, 36 bp, Homo sapiens
  chr4:4614145-4614181
  hypo
cgcagctcatgtagcgccaggtggcctggagtggct

SEQ ID NO: 303003 - DNA, 163 bp, Homo sapiens
  chr4:4614327-4614490
  hypo
cttgcaaagtaattttattccaggtttgggtccttttatgaatgagtaaacgagcttggcaaggttgaatgacctgcccacgggcacttagccaagacgcaagccccatctgcttgcttccacaccgtctggaagcctcactggctgggttcaaaaagggagg

SEQ ID NO: 303004 - DNA, 212 bp, Homo sapiens; identical to SEQ ID NO: 281964
  chr4:4861568-4861780
  hypo

SEQ ID NO: 303005 - DNA, 56 bp, Homo sapiens; identical to SEQ ID NO: 253556
  chr4:4921831-4921887
  hypo

SEQ ID NO: 303006 - DNA, 312 bp, Homo sapiens; identical to SEQ ID NO: 209545
  chr4:5024029-5024341
  hypo

SEQ ID NO: 303007 - DNA, 70 bp, Homo sapiens; identical to SEQ ID NO: 199323
  chr4:5052365-5052435
  hypo

SEQ ID NO: 303008 - DNA, 289 bp, Homo sapiens; identical to SEQ ID NO: 199324
  chr4:5052556-5052845
  hypo

SEQ ID NO: 303009 - DNA, 166 bp, Homo sapiens; identical to SEQ ID NO: 199327
  chr4:5890606-5890772
  hypo

SEQ ID NO: 303010 - DNA, 236 bp, Homo sapiens; identical to SEQ ID NO: 209549
  chr4:5970096-5970332
  hypo

SEQ ID NO: 303011 - DNA, 258 bp, Homo sapiens; identical to SEQ ID NO: 253559
  chr4:6058775-6059033
  hypo

SEQ ID NO: 303012 - DNA, 106 bp, Homo sapiens; identical to SEQ ID NO: 253560
  chr4:6064892-6064998
  hypo

SEQ ID NO: 303013 - DNA, 205 bp, Homo sapiens; identical to SEQ ID NO: 253561
  chr4:6176208-6176413
  hypo

SEQ ID NO: 303014 - DNA, 822 bp, Homo sapiens; identical to SEQ ID NO: 281987
  chr4:6271359-6272181
  hypo

SEQ ID NO: 303015 - DNA, 222 bp, Homo sapiens; identical to SEQ ID NO: 253562
  chr4:6330984-6331206
  hypo

SEQ ID NO: 303016 - DNA, 160 bp, Homo sapiens; identical to SEQ ID NO: 253563
  chr4:6525352-6525512
  hypo

SEQ ID NO: 303017 - DNA, 92 bp, Homo sapiens; identical to SEQ ID NO: 253564
  chr4:6540026-6540118
  hypo

SEQ ID NO: 303018 - DNA, 140 bp, Homo sapiens; identical to SEQ ID NO: 253565
  chr4:6580067-6580207
  hypo

SEQ ID NO: 303019 - DNA, 182 bp, Homo sapiens; identical to SEQ ID NO: 209551
  chr4:6586518-6586700
  hypo

SEQ ID NO: 303020 - DNA, 94 bp, Homo sapiens; identical to SEQ ID NO: 209552
  chr4:6588779-6588873
  hypo

SEQ ID NO: 303021 - DNA, 40 bp, Homo sapiens; identical to SEQ ID NO: 209553
  chr4:6590875-6590915
  hypo

SEQ ID NO: 303022 - DNA, 304 bp, Homo sapiens; identical to SEQ ID NO: 209554
  chr4:6600488-6600792
  hypo

SEQ ID NO: 303023 - DNA, 136 bp, Homo sapiens; identical to SEQ ID NO: 253570
  chr4:6616021-6616157
  hypo

SEQ ID NO: 303024 - DNA, 41 bp, Homo sapiens; identical to SEQ ID NO: 253571
  chr4:6658784-6658825
  hypo

SEQ ID NO: 303025 - DNA, 233 bp, Homo sapiens
  chr4:6669888-6670121
  hypo
gagatctttttacatagtctccacagcatggcaatttcaggggagccagacttcgtatatggtggctttggcgtccaaatgtacaaaacccaggagagtaagcatcggaagtcccatagcatctctttgccatatcaccttcacaaagtcccgccagggtcaaagggaggagacacagactccacctcttgatgggcatggcaaggttctggaagagcaggtgcaactgttag

SEQ ID NO: 303026 - DNA, 53 bp, Homo sapiens
  chr4:6670214-6670267
  hypo
gttgttgtggccgtgatgcgtcccacactccagtggctcgcgcttcctgtacc

SEQ ID NO: 303027 - DNA, 111 bp, Homo sapiens; identical to SEQ ID NO: 253573
  chr4:6686433-6686544
  hypo

SEQ ID NO: 303028 - DNA, 189 bp, Homo sapiens; identical to SEQ ID NO: 253574
  chr4:6695028-6695217
  hypo

SEQ ID NO: 303029 - DNA, 101 bp, Homo sapiens; identical to SEQ ID NO: 253575
  chr4:6699159-6699260
  hypo

SEQ ID NO: 303030 - DNA, 122 bp, Homo sapiens; identical to SEQ ID NO: 222362
  chr4:6717792-6717914
  hypo

SEQ ID NO: 303031 - DNA, 57 bp, Homo sapiens; identical to SEQ ID NO: 253576
  chr4:6726065-6726122
  hypo

SEQ ID NO: 303032 - DNA, 519 bp, Homo sapiens; identical to SEQ ID NO: 253577
  chr4:6733153-6733672
  hypo

SEQ ID NO: 303033 - DNA, 41 bp, Homo sapiens; identical to SEQ ID NO: 253578
  chr4:6735826-6735867
  hypo

SEQ ID NO: 303034 - DNA, 96 bp, Homo sapiens; identical to SEQ ID NO: 209556
  chr4:6738169-6738265
  hypo

SEQ ID NO: 303035 - DNA, 42 bp, Homo sapiens
  chr4:6748304-6748346
  hypo
agatctggggagttctgggccgtccaccggcaaaggacaatg

SEQ ID NO: 303036 - DNA, 99 bp, Homo sapiens; identical to SEQ ID NO: 253581
  chr4:6765324-6765423
  hypo

SEQ ID NO: 303037 - DNA, 170 bp, Homo sapiens; identical to SEQ ID NO: 253582
  chr4:6769434-6769604
  hypo

SEQ ID NO: 303038 - DNA, 34 bp, Homo sapiens; identical to SEQ ID NO: 209557
  chr4:6786668-6786702
  hypo

SEQ ID NO: 303039 - DNA, 34 bp, Homo sapiens; identical to SEQ ID NO: 209558
  chr4:6786942-6786976
  hypo

SEQ ID NO: 303040 - DNA, 93 bp, Homo sapiens; identical to SEQ ID NO: 209559
  chr4:6883785-6883878
  hypo

SEQ ID NO: 303041 - DNA, 35 bp, Homo sapiens; identical to SEQ ID NO: 209560
  chr4:6902912-6902947
  hypo

SEQ ID NO: 303042 - DNA, 211 bp, Homo sapiens; identical to SEQ ID NO: 253587
  chr4:6925274-6925485
  hypo

SEQ ID NO: 303043 - DNA, 156 bp, Homo sapiens; identical to SEQ ID NO: 253588
  chr4:6946476-6946632
  hypo

SEQ ID NO: 303044 - DNA, 178 bp, Homo sapiens; identical to SEQ ID NO: 209561
  chr4:6950156-6950334
  hypo

SEQ ID NO: 303045 - DNA, 172 bp, Homo sapiens; identical to SEQ ID NO: 253590
  chr4:6956967-6957139
  hypo

SEQ ID NO: 303046 - DNA, 114 bp, Homo sapiens; identical to SEQ ID NO: 253592
  chr4:6958171-6958285
  hypo

SEQ ID NO: 303047 - DNA, 104 bp, Homo sapiens; identical to SEQ ID NO: 253593
  chr4:6964580-6964684
  hypo

SEQ ID NO: 303048 - DNA, 161 bp, Homo sapiens; identical to SEQ ID NO: 253594
  chr4:6974648-6974809
  hypo

SEQ ID NO: 303049 - DNA, 282 bp, Homo sapiens; identical to SEQ ID NO: 253595
  chr4:6995747-6996029
  hypo

SEQ ID NO: 303050 - DNA, 218 bp, Homo sapiens; identical to SEQ ID NO: 253596
  chr4:7000531-7000749
  hypo

SEQ ID NO: 303051 - DNA, 83 bp, Homo sapiens; identical to SEQ ID NO: 253597
  chr4:7003855-7003938
  hypo

SEQ ID NO: 303052 - DNA, 190 bp, Homo sapiens; identical to SEQ ID NO: 209562
  chr4:7004175-7004365
  hypo

SEQ ID NO: 303053 - DNA, 319 bp, Homo sapiens; identical to SEQ ID NO: 253599
  chr4:7006525-7006844
  hypo

SEQ ID NO: 303054 - DNA, 104 bp, Homo sapiens; identical to SEQ ID NO: 253600
  chr4:7015398-7015502
  hypo

SEQ ID NO: 303055 - DNA, 134 bp, Homo sapiens; identical to SEQ ID NO: 209563
  chr4:7033374-7033508
  hypo

SEQ ID NO: 303056 - DNA, 108 bp, Homo sapiens; identical to SEQ ID NO: 209564
  chr4:7035497-7035605
  hypo

SEQ ID NO: 303057 - DNA, 123 bp, Homo sapiens; identical to SEQ ID NO: 209565
  chr4:7035978-7036101
  hypo

SEQ ID NO: 303058 - DNA, 220 bp, Homo sapiens; identical to SEQ ID NO: 209566
  chr4:7047283-7047503
  hypo

SEQ ID NO: 303059 - DNA, 119 bp, Homo sapiens; identical to SEQ ID NO: 209567
  chr4:7167402-7167521
  hypo

SEQ ID NO: 303060 - DNA, 109 bp, Homo sapiens; identical to SEQ ID NO: 253606
  chr4:7218650-7218759
  hypo

SEQ ID NO: 303061 - DNA, 210 bp, Homo sapiens; identical to SEQ ID NO: 253607
  chr4:7395597-7395807
  hypo

SEQ ID NO: 303062 - DNA, 217 bp, Homo sapiens; identical to SEQ ID NO: 209568
  chr4:7432357-7432574
  hypo

SEQ ID NO: 303063 - DNA, 118 bp, Homo sapiens; identical to SEQ ID NO: 253609
  chr4:7472895-7473013
  hypo

SEQ ID NO: 303064 - DNA, 482 bp, Homo sapiens; identical to SEQ ID NO: 253610
  chr4:7600670-7601152
  hypo

SEQ ID NO: 303065 - DNA, 280 bp, Homo sapiens; identical to SEQ ID NO: 253612
  chr4:7666010-7666290
  hypo

SEQ ID NO: 303066 - DNA, 32 bp, Homo sapiens
  chr4:7741249-7741281
  hypo
ccccgtctgacccacgccagtcctttgagggg

SEQ ID NO: 303067 - DNA, 91 bp, Homo sapiens; identical to SEQ ID NO: 209569
  chr4:7741694-7741785
  hypo

SEQ ID NO: 303068 - DNA, 69 bp, Homo sapiens; identical to SEQ ID NO: 253614
  chr4:7755968-7756037
  hypo

SEQ ID NO: 303069 - DNA, 42 bp, Homo sapiens; identical to SEQ ID NO: 253615
  chr4:7756596-7756638
  hypo

SEQ ID NO: 303070 - DNA, 1009 bp, Homo sapiens
  chr4:7757467-7758476
  hypo
ggggttggaggagccatgctcggggcgtcagagggtaggggctgggagagcggggactctgcctgggggggatgcccgggtcccgctgacttcccggcgcctcctctggggagtcgccagagcgctgttttacacgtgtgaaggtcacacagaacgttctcagcacagagaaggtgctccgtcaatgtttgctgagtgaataaatgtgctctcttgctctaaatggtcattgcttggctgtgaactcgagggcagagcaggtggaattcatttttgtgctccggggcctgacagctagaaggggcttgggaatcatttgtgtagtgattttcagaataatgtcagggcctaaaactgtaacagcaaaatgcagcacctgctcccccagctcctccttctggggttggcgggtcaggacccgtggagggagggagcccagtgaccccaggggccacggcacccacggcagccacggcacccgtgctttccacagcaggccccagcagctttcggcctgcgctttgctgtcaaacttgtctgtcgcagttgtcccgggcagtaggtcctgcacaaagctgccccaggaggagtggagcagcaggaagaggcaattgtgcttgctcttggtcttgctctgaggcacttacttcccctgggggcagtcggctgcgtgctgccctcctgctgcgacttaggatctcacccgagggccaggagattggcttggtctgtgcaccatcgacccgagggccagaaggttggcttggtctgtgcacaattgacccgagggccagaaggtgggcttggtctgtgcaccatcgacccgagggccagaaggtgggcttggtctgtgcaccatcgacccgagggccagaaggtgggcttggtctgtgcacaatcgacctgagggcgagaaggttggcttggtctgtgcacaatcaggacggccctgagagcagagtggcggcagggctgtcatcccagtgccttcggggactgcgccgaggag

SEQ ID NO: 303071 - DNA, 74 bp, Homo sapiens; identical to SEQ ID NO: 209571
  chr4:7789549-7789623
  hypo

SEQ ID NO: 303072 - DNA, 44 bp, Homo sapiens; identical to SEQ ID NO: 253618
  chr4:7791292-7791336
  hypo

SEQ ID NO: 303073 - DNA, 34 bp, Homo sapiens; identical to SEQ ID NO: 253619
  chr4:7812695-7812729
  hypo

SEQ ID NO: 303074 - DNA, 306 bp, Homo sapiens; identical to SEQ ID NO: 209572
  chr4:7813251-7813557
  hypo

SEQ ID NO: 303075 - DNA, 219 bp, Homo sapiens; identical to SEQ ID NO: 253621
  chr4:7844868-7845087
  hypo

SEQ ID NO: 303076 - DNA, 78 bp, Homo sapiens; identical to SEQ ID NO: 253622
  chr4:7896170-7896248
  hypo

SEQ ID NO: 303077 - DNA, 49 bp, Homo sapiens; identical to SEQ ID NO: 209573
  chr4:7967943-7967992
  hypo

SEQ ID NO: 303078 - DNA, 211 bp, Homo sapiens; identical to SEQ ID NO: 253624
  chr4:7992552-7992763
  hypo

SEQ ID NO: 303079 - DNA, 190 bp, Homo sapiens; identical to SEQ ID NO: 209574
  chr4:8001655-8001845
  hypo

SEQ ID NO: 303080 - DNA, 92 bp, Homo sapiens; identical to SEQ ID NO: 253626
  chr4:8005614-8005706
  hypo

SEQ ID NO: 303081 - DNA, 149 bp, Homo sapiens; identical to SEQ ID NO: 209575
  chr4:8012068-8012217
  hypo

SEQ ID NO: 303082 - DNA, 261 bp, Homo sapiens; identical to SEQ ID NO: 209576
  chr4:8032213-8032474
  hypo

SEQ ID NO: 303083 - DNA, 356 bp, Homo sapiens; identical to SEQ ID NO: 253629
  chr4:8062502-8062858
  hypo

SEQ ID NO: 303084 - DNA, 301 bp, Homo sapiens; identical to SEQ ID NO: 253630
  chr4:8070951-8071252
  hypo

SEQ ID NO: 303085 - DNA, 152 bp, Homo sapiens; identical to SEQ ID NO: 253631
  chr4:8087174-8087326
  hypo

SEQ ID NO: 303086 - DNA, 114 bp, Homo sapiens; identical to SEQ ID NO: 253632
  chr4:8090830-8090944
  hypo

SEQ ID NO: 303087 - DNA, 389 bp, Homo sapiens; identical to SEQ ID NO: 253633
  chr4:8153834-8154223
  hypo

SEQ ID NO: 303088 - DNA, 141 bp, Homo sapiens; identical to SEQ ID NO: 40281
  chr4:8160429-8160570
  hypo

SEQ ID NO: 303089 - DNA, 216 bp, Homo sapiens; identical to SEQ ID NO: 253634
  chr4:8172088-8172304
  hypo

SEQ ID NO: 303090 - DNA, 188 bp, Homo sapiens; identical to SEQ ID NO: 253635
  chr4:8220507-8220695
  hypo

SEQ ID NO: 303091 - DNA, 399 bp, Homo sapiens; identical to SEQ ID NO: 253636
  chr4:8237001-8237400
  hypo

SEQ ID NO: 303092 - DNA, 125 bp, Homo sapiens; identical to SEQ ID NO: 253637
  chr4:8270688-8270813
  hypo

SEQ ID NO: 303093 - DNA, 271 bp, Homo sapiens; identical to SEQ ID NO: 253638
  chr4:8285419-8285690
  hypo

SEQ ID NO: 303094 - DNA, 318 bp, Homo sapiens; identical to SEQ ID NO: 209579
  chr4:8372557-8372875
  hypo

SEQ ID NO: 303095 - DNA, 38 bp, Homo sapiens; identical to SEQ ID NO: 253640
  chr4:8375724-8375762
  hypo

SEQ ID NO: 303096 - DNA, 40 bp, Homo sapiens
  chr4:8386104-8386144
  hypo
atgtggaagtgaaaaagtatcgctgaaacaaactaggcag

SEQ ID NO: 303097 - DNA, 50 bp, Homo sapiens
  chr4:8386315-8386365
  hypo
ccgccctgtgcacccaatgactgcccctcgatctgccccctccccagctg

SEQ ID NO: 303098 - DNA, 111 bp, Homo sapiens; identical to SEQ ID NO: 209580
  chr4:8386732-8386843
  hypo

SEQ ID NO: 303099 - DNA, 173 bp, Homo sapiens; identical to SEQ ID NO: 209581
  chr4:8389738-8389911
  hypo

SEQ ID NO: 303100 - DNA, 121 bp, Homo sapiens; identical to SEQ ID NO: 209582
  chr4:8396396-8396517
  hypo

SEQ ID NO: 303101 - DNA, 172 bp, Homo sapiens; identical to SEQ ID NO: 209583
  chr4:8398723-8398895
  hypo

SEQ ID NO: 303102 - DNA, 154 bp, Homo sapiens; identical to SEQ ID NO: 253646
  chr4:8411915-8412069
  hypo

SEQ ID NO: 303103 - DNA, 31 bp, Homo sapiens; identical to SEQ ID NO: 253647
  chr4:8455077-8455108
  hypo

SEQ ID NO: 303104 - DNA, 90 bp, Homo sapiens; identical to SEQ ID NO: 209584
  chr4:8455168-8455258
  hypo

SEQ ID NO: 303105 - DNA, 178 bp, Homo sapiens; identical to SEQ ID NO: 209585
  chr4:8466217-8466395
  hypo

SEQ ID NO: 303106 - DNA, 56 bp, Homo sapiens; identical to SEQ ID NO: 209586
  chr4:8473097-8473153
  hypo

SEQ ID NO: 303107 - DNA, 262 bp, Homo sapiens; identical to SEQ ID NO: 253651
  chr4:8474998-8475260
  hypo

SEQ ID NO: 303108 - DNA, 131 bp, Homo sapiens; identical to SEQ ID NO: 253652
  chr4:8475645-8475776
  hypo

SEQ ID NO: 303109 - DNA, 142 bp, Homo sapiens
  chr4:8483724-8483866
  hypo
tgaaagaaagccttccgtgttgaggtctatgcttcagacttgttaaggtgcgtgtcgaggtctgcaaagcttttgctaaacccttcactgtaaattttcttggggctcatcttgtttttcgccagttgcctcttctcttgcc

SEQ ID NO: 303110 - DNA, 146 bp, Homo sapiens
  chr4:8483963-8484109
  hypo
ccctagactggagttgtttgccgtcctagccacagccgtgttgagttttgcagcctcctcatcctgggcaaatcctttgaagtcctgggtgaactcttgcgtgtcctcctctggatgccactcacgcacaccttggcaggcacacc

SEQ ID NO: 303111 - DNA, 279 bp, Homo sapiens; identical to SEQ ID NO: 253654
  chr4:8514257-8514536
  hypo

SEQ ID NO: 303112 - DNA, 322 bp, Homo sapiens; identical to SEQ ID NO: 253655
  chr4:8549955-8550277
  hypo

SEQ ID NO: 303113 - DNA, 293 bp, Homo sapiens; identical to SEQ ID NO: 253656
  chr4:8560360-8560653
  hypo

SEQ ID NO: 303114 - DNA, 42 bp, Homo sapiens; identical to SEQ ID NO: 199340
  chr4:8594310-8594352
  hypo

SEQ ID NO: 303115 - DNA, 218 bp, Homo sapiens
  chr4:8603005-8603223
  hypo
gcaacccggacctgcggctgctgggctgtgctgtgctggccccccggtgtgagggcggctgggtgcgcagaccctgccggcacatctgcgagggcctgcgggaggtctgccagcccgccttcgacgccattgacatggcctggccctacttccttgactgccaccgctacttcacgagagaggacgagggctgctatgacccgctggagaagcttcgg

SEQ ID NO: 303116 - DNA, 131 bp, Homo sapiens; identical to SEQ ID NO: 199341
  chr4:8609443-8609574
  hypo

SEQ ID NO: 303117 - DNA, 187 bp, Homo sapiens
  chr4:8615920-8616107
  hypo
ctcacctgcctgctgggcacttggctgacaccccgacgtcccggctgtctctgcgcggctgacaccccggcgtcccggctgtctctgtgcggctgacacccctgacgtcccggctgtctctgtgcggctgacacccctgacgtccccgctgtctctgtgccacaggcatgtccgatttcaactacct

SEQ ID NO: 303118 - DNA, 269 bp, Homo sapiens; identical to SEQ ID NO: 209591
  chr4:8621150-8621419
  hypo

SEQ ID NO: 303119 - DNA, 110 bp, Homo sapiens; identical to SEQ ID NO: 209592
  chr4:8647631-8647741
  hypo

SEQ ID NO: 303120 - DNA, 330 bp, Homo sapiens; identical to SEQ ID NO: 209593
  chr4:8739498-8739828
  hypo

SEQ ID NO: 303121 - DNA, 166 bp, Homo sapiens; identical to SEQ ID NO: 253663
  chr4:8749242-8749408
  hypo

SEQ ID NO: 303122 - DNA, 232 bp, Homo sapiens; identical to SEQ ID NO: 253664
  chr4:8749438-8749670
  hypo

SEQ ID NO: 303123 - DNA, 143 bp, Homo sapiens; identical to SEQ ID NO: 253665
  chr4:8761656-8761799
  hypo

SEQ ID NO: 303124 - DNA, 47 bp, Homo sapiens; identical to SEQ ID NO: 282008
  chr4:8873984-8874031
  hypo

SEQ ID NO: 303125 - DNA, 146 bp, Homo sapiens; identical to SEQ ID NO: 253666
  chr4:9523562-9523708
  hypo

SEQ ID NO: 303126 - DNA, 80 bp, Homo sapiens; identical to SEQ ID NO: 253667
  chr4:9602007-9602087
  hypo

SEQ ID NO: 303127 - DNA, 35 bp, Homo sapiens; identical to SEQ ID NO: 253668
  chr4:9602117-9602152
  hypo

SEQ ID NO: 303128 - DNA, 209 bp, Homo sapiens; identical to SEQ ID NO: 199346
  chr4:9684933-9685142
  hypo

SEQ ID NO: 303129 - DNA, 207 bp, Homo sapiens; identical to SEQ ID NO: 253669
  chr4:9701510-9701717
  hypo

SEQ ID NO: 303130 - DNA, 35 bp, Homo sapiens; identical to SEQ ID NO: 253670
  chr4:9784385-9784420
  hypo

SEQ ID NO: 303131 - DNA, 62 bp, Homo sapiens; identical to SEQ ID NO: 209595
  chr4:10086436-10086498
  hypo

SEQ ID NO: 303132 - DNA, 348 bp, Homo sapiens; identical to SEQ ID NO: 209596
  chr4:10087761-10088109
  hypo

SEQ ID NO: 303133 - DNA, 58 bp, Homo sapiens; identical to SEQ ID NO: 199347
  chr4:10089890-10089948
  hypo

SEQ ID NO: 303134 - DNA, 236 bp, Homo sapiens; identical to SEQ ID NO: 199348
  chr4:10090133-10090369
  hypo

SEQ ID NO: 303135 - DNA, 134 bp, Homo sapiens; identical to SEQ ID NO: 253673
  chr4:10101397-10101531
  hypo

SEQ ID NO: 303136 - DNA, 429 bp, Homo sapiens; identical to SEQ ID NO: 253674
  chr4:10120444-10120873
  hypo

SEQ ID NO: 303137 - DNA, 79 bp, Homo sapiens; identical to SEQ ID NO: 253675
  chr4:10128970-10129049
  hypo

SEQ ID NO: 303138 - DNA, 173 bp, Homo sapiens; identical to SEQ ID NO: 253677
  chr4:10444978-10445151
  hypo

SEQ ID NO: 303139 - DNA, 120 bp, Homo sapiens; identical to SEQ ID NO: 253678
  chr4:10447425-10447545
  hypo

SEQ ID NO: 303140 - DNA, 39 bp, Homo sapiens; identical to SEQ ID NO: 199350
  chr4:10459327-10459366
  hypo

SEQ ID NO: 303141 - DNA, 84 bp, Homo sapiens; identical to SEQ ID NO: 253679
  chr4:10622723-10622807
  hypo

SEQ ID NO: 303142 - DNA, 189 bp, Homo sapiens; identical to SEQ ID NO: 253680
  chr4:11374203-11374392
  hypo

SEQ ID NO: 303143 - DNA, 318 bp, Homo sapiens; identical to SEQ ID NO: 253681
  chr4:13300414-13300732
  hypo

SEQ ID NO: 303144 - DNA, 379 bp, Homo sapiens; identical to SEQ ID NO: 253682
  chr4:13600964-13601343
  hypo

SEQ ID NO: 303145 - DNA, 43 bp, Homo sapiens; identical to SEQ ID NO: 253683
  chr4:13627679-13627722
  hypo

SEQ ID NO: 303146 - DNA, 89 bp, Homo sapiens; identical to SEQ ID NO: 253684
  chr4:14264570-14264659
  hypo

SEQ ID NO: 303147 - DNA, 62 bp, Homo sapiens; identical to SEQ ID NO: 253685
  chr4:15789216-15789278
  hypo

SEQ ID NO: 303148 - DNA, 43 bp, Homo sapiens; identical to SEQ ID NO: 253687
  chr4:15843148-15843191
  hypo

SEQ ID NO: 303149 - DNA, 140 bp, Homo sapiens; identical to SEQ ID NO: 199357
  chr4:16228990-16229130
  hypo

SEQ ID NO: 303150 - DNA, 275 bp, Homo sapiens; identical to SEQ ID NO: 109875
  chr4:16229202-16229477
  hypo

SEQ ID NO: 303151 - DNA, 42 bp, Homo sapiens; identical to SEQ ID NO: 253688
  chr4:17438265-17438307
  hypo

SEQ ID NO: 303152 - DNA, 120 bp, Homo sapiens; identical to SEQ ID NO: 253689
  chr4:17438427-17438547
  hypo

SEQ ID NO: 303153 - DNA, 35 bp, Homo sapiens; identical to SEQ ID NO: 253690
  chr4:17741679-17741714
  hypo

SEQ ID NO: 303154 - DNA, 120 bp, Homo sapiens; identical to SEQ ID NO: 209603
  chr4:17817849-17817969
  hypo

SEQ ID NO: 303155 - DNA, 137 bp, Homo sapiens; identical to SEQ ID NO: 209604
  chr4:17818029-17818166
  hypo

SEQ ID NO: 303156 - DNA, 106 bp, Homo sapiens; identical to SEQ ID NO: 199361
  chr4:18024246-18024352
  hypo

SEQ ID NO: 303157 - DNA, 53 bp, Homo sapiens; identical to SEQ ID NO: 209606
  chr4:19280790-19280843
  hypo

SEQ ID NO: 303158 - DNA, 1009 bp, Homo sapiens; identical to SEQ ID NO: 282052
  chr4:22517045-22518054
  hypo

SEQ ID NO: 303159 - DNA, 75 bp, Homo sapiens; identical to SEQ ID NO: 253694
  chr4:22601450-22601525
  hypo

SEQ ID NO: 303160 - DNA, 158 bp, Homo sapiens; identical to SEQ ID NO: 253695
  chr4:22780297-22780455
  hypo

SEQ ID NO: 303161 - DNA, 33 bp, Homo sapiens; identical to SEQ ID NO: 209608
  chr4:24422943-24422976
  hypo

SEQ ID NO: 303162 - DNA, 33 bp, Homo sapiens; identical to SEQ ID NO: 209609
  chr4:24423216-24423249
  hypo

SEQ ID NO: 303163 - DNA, 133 bp, Homo sapiens; identical to SEQ ID NO: 253698
  chr4:24534548-24534681
  hypo

SEQ ID NO: 303164 - DNA, 141 bp, Homo sapiens; identical to SEQ ID NO: 282058
  chr4:24914265-24914406
  hypo

SEQ ID NO: 303165 - DNA, 70 bp, Homo sapiens; identical to SEQ ID NO: 282059
  chr4:24914804-24914874
  hypo

SEQ ID NO: 303166 - DNA, 76 bp, Homo sapiens
  chr4:25013885-25013961
  hypo
cattcctcctcccgcgggcttgccgcaatgctgaaattagttcaacacatctgatcaaagccacaacacacctgta

SEQ ID NO: 303167 - DNA, 57 bp, Homo sapiens; identical to SEQ ID NO: 253700
  chr4:25014433-25014490
  hypo

SEQ ID NO: 303168 - DNA, 184 bp, Homo sapiens; identical to SEQ ID NO: 253701
  chr4:25025017-25025201
  hypo

SEQ ID NO: 303169 - DNA, 138 bp, Homo sapiens; identical to SEQ ID NO: 253702
  chr4:25360422-25360560
  hypo

SEQ ID NO: 303170 - DNA, 533 bp, Homo sapiens; identical to SEQ ID NO: 253703
  chr4:25677738-25678271
  hypo

SEQ ID NO: 303171 - DNA, 90 bp, Homo sapiens; identical to SEQ ID NO: 253704
  chr4:25681546-25681636
  hypo

SEQ ID NO: 303172 - DNA, 139 bp, Homo sapiens; identical to SEQ ID NO: 253705
  chr4:25811520-25811659
  hypo

SEQ ID NO: 303173 - DNA, 623 bp, Homo sapiens; identical to SEQ ID NO: 222382
  chr4:25863667-25864290
  hypo

SEQ ID NO: 303174 - DNA, 204 bp, Homo sapiens; identical to SEQ ID NO: 253706
  chr4:26223413-26223617
  hypo

SEQ ID NO: 303175 - DNA, 280 bp, Homo sapiens; identical to SEQ ID NO: 253707
  chr4:26466305-26466585
  hypo

SEQ ID NO: 303176 - DNA, 209 bp, Homo sapiens; identical to SEQ ID NO: 209612
  chr4:26823270-26823479
  hypo

SEQ ID NO: 303177 - DNA, 136 bp, Homo sapiens; identical to SEQ ID NO: 253709
  chr4:26855447-26855583
  hypo

SEQ ID NO: 303178 - DNA, 99 bp, Homo sapiens; identical to SEQ ID NO: 209613
  chr4:26856540-26856639
  hypo

SEQ ID NO: 303179 - DNA, 32 bp, Homo sapiens; identical to SEQ ID NO: 253711
  chr4:27077854-27077886
  hypo

SEQ ID NO: 303180 - DNA, 35 bp, Homo sapiens; identical to SEQ ID NO: 253712
  chr4:27486040-27486075
  hypo

SEQ ID NO: 303181 - DNA, 53 bp, Homo sapiens; identical to SEQ ID NO: 253713
  chr4:27570054-27570107
  hypo

SEQ ID NO: 303182 - DNA, 156 bp, Homo sapiens; identical to SEQ ID NO: 253714
  chr4:35039895-35040051
  hypo

SEQ ID NO: 303183 - DNA, 799 bp, Homo sapiens; identical to SEQ ID NO: 199382
  chr4:36245409-36246208
  hypo

SEQ ID NO: 303184 - DNA, 145 bp, Homo sapiens; identical to SEQ ID NO: 109945
  chr4:36246257-36246402
  hypo

SEQ ID NO: 303185 - DNA, 113 bp, Homo sapiens
  chr4:36345195-36345308
  hypo
caactctccctctgcgccgtagcaccattcagctcatcaaactcaagaaccctgatgatctcacagaacagatccacgagtttctttgcttctggaaaaaatcgcttccaact

SEQ ID NO: 303186 - DNA, 101 bp, Homo sapiens; identical to SEQ ID NO: 253716
  chr4:36896147-36896248
  hypo

SEQ ID NO: 303187 - DNA, 37 bp, Homo sapiens; identical to SEQ ID NO: 253717
  chr4:37585278-37585315
  hypo

SEQ ID NO: 303188 - DNA, 86 bp, Homo sapiens; identical to SEQ ID NO: 199386
  chr4:37688564-37688650
  hypo

SEQ ID NO: 303189 - DNA, 225 bp, Homo sapiens; identical to SEQ ID NO: 282091
  chr4:37891998-37892223
  hypo

SEQ ID NO: 303190 - DNA, 49 bp, Homo sapiens; identical to SEQ ID NO: 253718
  chr4:38016579-38016628
  hypo

SEQ ID NO: 303191 - DNA, 188 bp, Homo sapiens; identical to SEQ ID NO: 209617
  chr4:38278935-38279123
  hypo

SEQ ID NO: 303192 - DNA, 130 bp, Homo sapiens; identical to SEQ ID NO: 253720
  chr4:38313304-38313434
  hypo

SEQ ID NO: 303193 - DNA, 213 bp, Homo sapiens; identical to SEQ ID NO: 253721
  chr4:38568875-38569088
  hypo

SEQ ID NO: 303194 - DNA, 42 bp, Homo sapiens; identical to SEQ ID NO: 253722
  chr4:38678869-38678911
  hypo

SEQ ID NO: 303195 - DNA, 206 bp, Homo sapiens; identical to SEQ ID NO: 209618
  chr4:38729967-38730173
  hypo

SEQ ID NO: 303196 - DNA, 740 bp, Homo sapiens; identical to SEQ ID NO: 199390
  chr4:38868924-38869664
  hypo

SEQ ID NO: 303197 - DNA, 346 bp, Homo sapiens; identical to SEQ ID NO: 282098
  chr4:39183810-39184156
  hypo

SEQ ID NO: 303198 - DNA, 89 bp, Homo sapiens; identical to SEQ ID NO: 253724
  chr4:39297607-39297696
  hypo

SEQ ID NO: 303199 - DNA, 322 bp, Homo sapiens; identical to SEQ ID NO: 209621
  chr4:39447939-39448261
  hypo

SEQ ID NO: 303200 - DNA, 153 bp, Homo sapiens; identical to SEQ ID NO: 209622
  chr4:39481996-39482149
  hypo

SEQ ID NO: 303201 - DNA, 249 bp, Homo sapiens; identical to SEQ ID NO: 282101
  chr4:39529736-39529985
  hypo

SEQ ID NO: 303202 - DNA, 120 bp, Homo sapiens; identical to SEQ ID NO: 209624
  chr4:39623588-39623708
  hypo

SEQ ID NO: 303203 - DNA, 37 bp, Homo sapiens; identical to SEQ ID NO: 253728
  chr4:39629633-39629670
  hypo

SEQ ID NO: 303204 - DNA, 97 bp, Homo sapiens; identical to SEQ ID NO: 209625
  chr4:39745202-39745299
  hypo

SEQ ID NO: 303205 - DNA, 39 bp, Homo sapiens; identical to SEQ ID NO: 209626
  chr4:39761181-39761220
  hypo

SEQ ID NO: 303206 - DNA, 254 bp, Homo sapiens; identical to SEQ ID NO: 253731
  chr4:39773069-39773323
  hypo

SEQ ID NO: 303207 - DNA, 149 bp, Homo sapiens; identical to SEQ ID NO: 253733
  chr4:39817116-39817265
  hypo

SEQ ID NO: 303208 - DNA, 37 bp, Homo sapiens; identical to SEQ ID NO: 209627
  chr4:39913158-39913195
  hypo

SEQ ID NO: 303209 - DNA, 255 bp, Homo sapiens; identical to SEQ ID NO: 253735
  chr4:39937634-39937889
  hypo

SEQ ID NO: 303210 - DNA, 38 bp, Homo sapiens; identical to SEQ ID NO: 209629
  chr4:39964135-39964173
  hypo

SEQ ID NO: 303211 - DNA, 83 bp, Homo sapiens; identical to SEQ ID NO: 209630
  chr4:39972695-39972778
  hypo

SEQ ID NO: 303212 - DNA, 104 bp, Homo sapiens; identical to SEQ ID NO: 209631
  chr4:40161797-40161901
  hypo

SEQ ID NO: 303213 - DNA, 91 bp, Homo sapiens; identical to SEQ ID NO: 253739
  chr4:40261225-40261316
  hypo

SEQ ID NO: 303214 - DNA, 107 bp, Homo sapiens; identical to SEQ ID NO: 253740
  chr4:40485048-40485155
  hypo

SEQ ID NO: 303215 - DNA, 199 bp, Homo sapiens; identical to SEQ ID NO: 253741
  chr4:40485402-40485601
  hypo

SEQ ID NO: 303216 - DNA, 83 bp, Homo sapiens; identical to SEQ ID NO: 209632
  chr4:40492771-40492854
  hypo

SEQ ID NO: 303217 - DNA, 39 bp, Homo sapiens; identical to SEQ ID NO: 253743
  chr4:40625666-40625705
  hypo

SEQ ID NO: 303218 - DNA, 744 bp, Homo sapiens; identical to SEQ ID NO: 282109
  chr4:40751829-40752573
  hypo

SEQ ID NO: 303219 - DNA, 40 bp, Homo sapiens; identical to SEQ ID NO: 253744
  chr4:40823880-40823920
  hypo

SEQ ID NO: 303220 - DNA, 100 bp, Homo sapiens; identical to SEQ ID NO: 209633
  chr4:40857394-40857494
  hypo

SEQ ID NO: 303221 - DNA, 95 bp, Homo sapiens
  chr4:40910486-40910581
  hypo
ctttcctgacggagagagggaggccggcatccccaggccacacctataatgcctctcaccccatacacgtgtgcacaacacgcctcctcccctcc

SEQ ID NO: 303222 - DNA, 39 bp, Homo sapiens; identical to SEQ ID NO: 209634
  chr4:40983409-40983448
  hypo

SEQ ID NO: 303223 - DNA, 188 bp, Homo sapiens; identical to SEQ ID NO: 209635
  chr4:41012740-41012928
  hypo

SEQ ID NO: 303224 - DNA, 88 bp, Homo sapiens; identical to SEQ ID NO: 253749
  chr4:41167664-41167752
  hypo

SEQ ID NO: 303225 - DNA, 34 bp, Homo sapiens; identical to SEQ ID NO: 209636
  chr4:41198150-41198184
  hypo

SEQ ID NO: 303226 - DNA, 138 bp, Homo sapiens; identical to SEQ ID NO: 199395
  chr4:41216265-41216403
  hypo

SEQ ID NO: 303227 - DNA, 315 bp, Homo sapiens; identical to SEQ ID NO: 199396
  chr4:41218383-41218698
  hypo

SEQ ID NO: 303228 - DNA, 35 bp, Homo sapiens; identical to SEQ ID NO: 253751
  chr4:41317297-41317332
  hypo

SEQ ID NO: 303229 - DNA, 60 bp, Homo sapiens; identical to SEQ ID NO: 282112
  chr4:41362244-41362304
  hypo

SEQ ID NO: 303230 - DNA, 671 bp, Homo sapiens; identical to SEQ ID NO: 282113
  chr4:41363167-41363838
  hypo

SEQ ID NO: 303231 - DNA, 89 bp, Homo sapiens; identical to SEQ ID NO: 282120
  chr4:41884432-41884521
  hypo

SEQ ID NO: 303232 - DNA, 60 bp, Homo sapiens; identical to SEQ ID NO: 282122
  chr4:41993656-41993716
  hypo

SEQ ID NO: 303233 - DNA, 128 bp, Homo sapiens
  chr4:42316081-42316209
  hypo
gtctcagcggtgagaaatcaggacccatgcagtgcgaggaataacccgagctctcagcaacgcggaaagaaacttgccagcaacctagcttaaaggatcctcacatactaccgcgacgactctgcaca

SEQ ID NO: 303234 - DNA, 108 bp, Homo sapiens
  chr4:42317342-42317450
  hypo
cccagcaggcgcccaccggccgcaccgactgcggggcccacttagcccgtgcccacctggaacctgcgccggcccacaagggccgtgtgcagccccggctcctggtgc

SEQ ID NO: 303235 - DNA, 200 bp, Homo sapiens
  chr4:42348066-42348266
  hypo
gagttggcaggagccgggaacaggcgggagccctgcccgggtcggagctggcgtggcacgagccctgcccgcctgggtgcagcctcccccacaggctcggaaatgcctgctcctgctacctggcctgtatctgttcttggcgcccgctccgatttcggagaaaagttgaggccgagtccgggtgctgtggtaacctggcc

SEQ ID NO: 303236 - DNA, 1078 bp, Homo sapiens; identical to SEQ ID NO: 282124
  chr4:42657889-42658967
  hypo

SEQ ID NO: 303237 - DNA, 138 bp, Homo sapiens; identical to SEQ ID NO: 199401
  chr4:42659535-42659673
  hypo

SEQ ID NO: 303238 - DNA, 34 bp, Homo sapiens; identical to SEQ ID NO: 253757
  chr4:44679263-44679297
  hypo

SEQ ID NO: 303239 - DNA, 181 bp, Homo sapiens; identical to SEQ ID NO: 253758
  chr4:47427738-47427919
  hypo

SEQ ID NO: 303240 - DNA, 439 bp, Homo sapiens; identical to SEQ ID NO: 282140
  chr4:47487073-47487512
  hypo

SEQ ID NO: 303241 - DNA, 150 bp, Homo sapiens; identical to SEQ ID NO: 209641
  chr4:48017182-48017332
  hypo

SEQ ID NO: 303242 - DNA, 227 bp, Homo sapiens; identical to SEQ ID NO: 253761
  chr4:48496110-48496337
  hypo

SEQ ID NO: 303243 - DNA, 151 bp, Homo sapiens; identical to SEQ ID NO: 209642
  chr4:48572779-48572930
  hypo

SEQ ID NO: 303244 - DNA, 148 bp, Homo sapiens; identical to SEQ ID NO: 209643
  chr4:48678685-48678833
  hypo

SEQ ID NO: 303245 - DNA, 136 bp, Homo sapiens; identical to SEQ ID NO: 209644
  chr4:48679320-48679456
  hypo

SEQ ID NO: 303246 - DNA, 196 bp, Homo sapiens; identical to SEQ ID NO: 209645
  chr4:48679696-48679892
  hypo

SEQ ID NO: 303247 - DNA, 88 bp, Homo sapiens; identical to SEQ ID NO: 253766
  chr4:48887292-48887380
  hypo

SEQ ID NO: 303248 - DNA, 44 bp, Homo sapiens; identical to SEQ ID NO: 253767
  chr4:48987268-48987312
  hypo

SEQ ID NO: 303249 - DNA, 33 bp, Homo sapiens; identical to SEQ ID NO: 253768
  chr4:53200853-53200886
  hypo

SEQ ID NO: 303250 - DNA, 93 bp, Homo sapiens; identical to SEQ ID NO: 253769
  chr4:53201066-53201159
  hypo

SEQ ID NO: 303251 - DNA, 89 bp, Homo sapiens; identical to SEQ ID NO: 209646
  chr4:53230797-53230886
  hypo

SEQ ID NO: 303252 - DNA, 43 bp, Homo sapiens; identical to SEQ ID NO: 209647
  chr4:53587809-53587852
  hypo

SEQ ID NO: 303253 - DNA, 394 bp, Homo sapiens; identical to SEQ ID NO: 253772
  chr4:53739882-53740276
  hypo

SEQ ID NO: 303254 - DNA, 32 bp, Homo sapiens; identical to SEQ ID NO: 253773
  chr4:54229705-54229737
  hypo

SEQ ID NO: 303255 - DNA, 32 bp, Homo sapiens; identical to SEQ ID NO: 253774
  chr4:54229977-54230009
  hypo

SEQ ID NO: 303256 - DNA, 39 bp, Homo sapiens; identical to SEQ ID NO: 253775
  chr4:54317441-54317480
  hypo

SEQ ID NO: 303257 - DNA, 37 bp, Homo sapiens; identical to SEQ ID NO: 253776
  chr4:54500677-54500714
  hypo

SEQ ID NO: 303258 - DNA, 142 bp, Homo sapiens; identical to SEQ ID NO: 253777
  chr4:54732285-54732427
  hypo

SEQ ID NO: 303259 - DNA, 247 bp, Homo sapiens; identical to SEQ ID NO: 282174
  chr4:55523973-55524220
  hypo

SEQ ID NO: 303260 - DNA, 224 bp, Homo sapiens; identical to SEQ ID NO: 282175
  chr4:55524294-55524518
  hypo

SEQ ID NO: 303261 - DNA, 229 bp, Homo sapiens; identical to SEQ ID NO: 199420
  chr4:55561714-55561943
  hypo

SEQ ID NO: 303262 - DNA, 91 bp, Homo sapiens; identical to SEQ ID NO: 199421
  chr4:55564469-55564560
  hypo

SEQ ID NO: 303263 - DNA, 75 bp, Homo sapiens; identical to SEQ ID NO: 199422
  chr4:55569950-55570025
  hypo

SEQ ID NO: 303264 - DNA, 45 bp, Homo sapiens; identical to SEQ ID NO: 199423
  chr4:55592094-55592139
  hypo

SEQ ID NO: 303265 - DNA, 43 bp, Homo sapiens; identical to SEQ ID NO: 199424
  chr4:55593675-55593718
  hypo

SEQ ID NO: 303266 - DNA, 34 bp, Homo sapiens; identical to SEQ ID NO: 199425
  chr4:55598031-55598065
  hypo

SEQ ID NO: 303267 - DNA, 96 bp, Homo sapiens; identical to SEQ ID NO: 199426
  chr4:55602683-55602779
  hypo

SEQ ID NO: 303268 - DNA, 204 bp, Homo sapiens; identical to SEQ ID NO: 253780
  chr4:56205291-56205495
  hypo

SEQ ID NO: 303269 - DNA, 35 bp, Homo sapiens; identical to SEQ ID NO: 253782
  chr4:56213651-56213686
  hypo

SEQ ID NO: 303270 - DNA, 103 bp, Homo sapiens; identical to SEQ ID NO: 209657
  chr4:56222930-56223033
  hypo

SEQ ID NO: 303271 - DNA, 103 bp, Homo sapiens; identical to SEQ ID NO: 253784
  chr4:56227951-56228054
  hypo

SEQ ID NO: 303272 - DNA, 34 bp, Homo sapiens; identical to SEQ ID NO: 199431
  chr4:56412390-56412424
  hypo

SEQ ID NO: 303273 - DNA, 705 bp, Homo sapiens; identical to SEQ ID NO: 282194
  chr4:56501725-56502430
  hypo

SEQ ID NO: 303274 - DNA, 397 bp, Homo sapiens; identical to SEQ ID NO: 282195
  chr4:56502467-56502864
  hypo

SEQ ID NO: 303275 - DNA, 980 bp, Homo sapiens; identical to SEQ ID NO: 222417
  chr4:56914935-56915915
  hypo

SEQ ID NO: 303276 - DNA, 105 bp, Homo sapiens; identical to SEQ ID NO: 209659
  chr4:56936357-56936462
  hypo

SEQ ID NO: 303277 - DNA, 37 bp, Homo sapiens; identical to SEQ ID NO: 253786
  chr4:56966393-56966430
  hypo

SEQ ID NO: 303278 - DNA, 38 bp, Homo sapiens; identical to SEQ ID NO: 209660
  chr4:57051388-57051426
  hypo

SEQ ID NO: 303279 - DNA, 31 bp, Homo sapiens; identical to SEQ ID NO: 253788
  chr4:57064132-57064163
  hypo

SEQ ID NO: 303280 - DNA, 89 bp, Homo sapiens; identical to SEQ ID NO: 209661
  chr4:57082785-57082874
  hypo

SEQ ID NO: 303281 - DNA, 115 bp, Homo sapiens; identical to SEQ ID NO: 253790
  chr4:57093714-57093829
  hypo

SEQ ID NO: 303282 - DNA, 174 bp, Homo sapiens; identical to SEQ ID NO: 209662
  chr4:57178037-57178211
  hypo

SEQ ID NO: 303283 - DNA, 92 bp, Homo sapiens; identical to SEQ ID NO: 253792
  chr4:57178241-57178333
  hypo

SEQ ID NO: 303284 - DNA, 930 bp, Homo sapiens
  chr4:57179994-57180924
  hypo
ggaaacagaatacacgtccttttctccattcgcacgacagagtcttgcgtggggtgaccgatgcctgagtttagctatccctgaacttgagaatacctgcttccaggtgttcttgagaaattaagagggtcgctggcactgtgaataggaaaaggaacgactgtgggtggagaaagcaaaaggctaattgtgttttcctttccaatgttaggatccacaacatgagcaaggcggccttgagagtcggccctgcctggaccagaacggacacccaggcgaggacaagccaacgtggcacgaagaggaacccaatccgctggattccgaggaagagagaagacgccaagaagactactggcgagaactggaggccaagtgcaagcggcaaaaggcggaagcagccgagaagagacgcctagaggagcagaggctgcaggcgctggagaggaggctttgggaagagaacagaaggcaggagctcttggaggaggagggcgaggggcaggagccgcctctagaggcggaaagggcgccgcgggaagagcagcagcggagcctggaagcgccaggttgggaggacgcggagcggagggagcgtgaggagcgcgagcgcctggaggcggaggaggagcgaaggcgtctgcaggcccaggcccaagcggaggagaggcggcggctggaggaggacgccaggctggaggagcggaggcggcaggaggaggaggaaggaagatgcgcggaggagctcaaaaggcaggaggaggaggaggctgagggatgggaagagctggaacagcaggaggcggaggtgcaggggccgcccgaggcgttggaggagactggggagggccggcggggcgcggaggaggaggatctgggggaagaggaggaggagggccaggcgcacctggaggactggagggggcagct

SEQ ID NO: 303285 - DNA, 1211 bp, Homo sapiens; identical to SEQ ID NO: 209665
  chr4:57180972-57182183
  hypo

SEQ ID NO: 303286 - DNA, 531 bp, Homo sapiens
  chr4:57182262-57182793
  hypo
acagaagaagaagaagaggcacagcagcaccggagacagcgcggatgcagggccgcctgcagcggggagcgctcgtggagagaaagagatggagggtgtggccctcaagcatggtccatccctcccccaagagcggaagcaagccccttccacccggagggactccgctgaaccttccagcagccgctctgttcctgtggcccaccctgggcctccaccggccagcagccagaccccggctccggagcacgacaaggcagcaaacaaaatgccactggcacaaaagccagcactggctcccaagcccaccagtcagaccccaccagcatccccactttccaaactgagcaggccctacttggtagagctgctgtctcgccgagcggggaggccggacccagagccaagtgagccgtccaaggaggaccaggagagcagtgaccgccggccaccctcgcccccaggccccgaggaaaggaagggacagaagagggacgaggaggaagaggcgacagagaggaaacctgcttc

SEQ ID NO: 303287 - DNA, 38 bp, Homo sapiens; identical to SEQ ID NO: 253794
  chr4:57486552-57486590
  hypo

SEQ ID NO: 303288 - DNA, 37 bp, Homo sapiens; identical to SEQ ID NO: 253795
  chr4:57486830-57486867
  hypo

SEQ ID NO: 303289 - DNA, 106 bp, Homo sapiens; identical to SEQ ID NO: 199432
  chr4:57687532-57687638
  hypo

SEQ ID NO: 303290 - DNA, 187 bp, Homo sapiens
  chr4:57777250-57777437
  hypo
caaaggcaagagctcgaagaccaaaccctttcgctgtaagccatgccaatatgaagcagaatctgaagaacagtttgtgcatcacatcagagttcacagtgctaagaaattttttgtggaagagagtgcagagaagcaggcaaaagccagggaatctggctcttccactgcagaagagggagatttc

SEQ ID NO: 303291 - DNA, 114 bp, Homo sapiens; identical to SEQ ID NO: 253797
  chr4:57812272-57812386
  hypo

SEQ ID NO: 303292 - DNA, 360 bp, Homo sapiens; identical to SEQ ID NO: 253798
  chr4:57813006-57813366
  hypo

SEQ ID NO: 303293 - DNA, 113 bp, Homo sapiens; identical to SEQ ID NO: 253799
  chr4:57896302-57896415
  hypo

SEQ ID NO: 303294 - DNA, 342 bp, Homo sapiens
  chr4:57921794-57922136
  hypo
gtggacagggtcatcgcggttctcctggactgctttccattttcataaaatagggcagtcatctcccacctgcaccctgtccctcttctgccctcctcattcctgcccttgactgttctgtatggagatggggctctgtgtctggagtgcatgggtcttatctaaaatccctcgaacttgggagccgccctttgctcatttctggtccgattgcctctctgttaagacattcggtttggctttaagcgggcaaggaggaggttgaataaagggatctctgtgtgcgaatagcccccttcagacttccatggagcagagcgcagggcgtgatggctgcttggc

SEQ ID NO: 303295 - DNA, 227 bp, Homo sapiens; identical to SEQ ID NO: 199436
  chr4:57977107-57977334
  hypo

SEQ ID NO: 303296 - DNA, 841 bp, Homo sapiens; identical to SEQ ID NO: 253801
  chr4:64214827-64215668
  hypo

SEQ ID NO: 303297 - DNA, 43 bp, Homo sapiens; identical to SEQ ID NO: 253802
  chr4:66107503-66107546
  hypo

SEQ ID NO: 303298 - DNA, 44 bp, Homo sapiens; identical to SEQ ID NO: 199438
  chr4:66536636-66536680
  hypo

SEQ ID NO: 303299 - DNA, 217 bp, Homo sapiens; identical to SEQ ID NO: 209671
  chr4:70647970-70648187
  hypo

SEQ ID NO: 303300 - DNA, 75 bp, Homo sapiens; identical to SEQ ID NO: 209672
  chr4:71566925-71567000
  hypo

SEQ ID NO: 303301 - DNA, 38 bp, Homo sapiens; identical to SEQ ID NO: 209673
  chr4:71642192-71642230
  hypo

SEQ ID NO: 303302 - DNA, 93 bp, Homo sapiens; identical to SEQ ID NO: 253806
  chr4:71705996-71706089
  hypo

SEQ ID NO: 303303 - DNA, 152 bp, Homo sapiens; identical to SEQ ID NO: 253807
  chr4:71706509-71706661
  hypo

SEQ ID NO: 303304 - DNA, 37 bp, Homo sapiens; identical to SEQ ID NO: 209674
  chr4:71756389-71756426
  hypo

SEQ ID NO: 303305 - DNA, 730 bp, Homo sapiens; identical to SEQ ID NO: 199439
  chr4:71767778-71768508
  hypo

SEQ ID NO: 303306 - DNA, 38 bp, Homo sapiens; identical to SEQ ID NO: 253809
  chr4:71774023-71774061
  hypo

SEQ ID NO: 303307 - DNA, 149 bp, Homo sapiens; identical to SEQ ID NO: 209676
  chr4:71857969-71858118
  hypo

SEQ ID NO: 303308 - DNA, 37 bp, Homo sapiens; identical to SEQ ID NO: 253811
  chr4:71894316-71894353
  hypo

SEQ ID NO: 303309 - DNA, 83 bp, Homo sapiens; identical to SEQ ID NO: 253813
  chr4:71986660-71986743
  hypo

SEQ ID NO: 303310 - DNA, 38 bp, Homo sapiens; identical to SEQ ID NO: 253814
  chr4:72004454-72004492
  hypo

SEQ ID NO: 303311 - DNA, 36 bp, Homo sapiens; identical to SEQ ID NO: 253815
  chr4:74402451-74402487
  hypo

SEQ ID NO: 303312 - DNA, 224 bp, Homo sapiens; identical to SEQ ID NO: 199444
  chr4:74702525-74702749
  hypo

SEQ ID NO: 303313 - DNA, 209 bp, Homo sapiens; identical to SEQ ID NO: 209678
  chr4:75137755-75137964
  hypo

SEQ ID NO: 303314 - DNA, 98 bp, Homo sapiens; identical to SEQ ID NO: 253818
  chr4:75260920-75261018
  hypo

SEQ ID NO: 303315 - DNA, 34 bp, Homo sapiens; identical to SEQ ID NO: 209679
  chr4:75949441-75949475
  hypo

SEQ ID NO: 303316 - DNA, 37 bp, Homo sapiens; identical to SEQ ID NO: 253821
  chr4:76553301-76553338
  hypo

SEQ ID NO: 303317 - DNA, 37 bp, Homo sapiens; identical to SEQ ID NO: 253822
  chr4:76553578-76553615
  hypo

SEQ ID NO: 303318 - DNA, 116 bp, Homo sapiens; identical to SEQ ID NO: 209680
  chr4:76554738-76554854
  hypo

SEQ ID NO: 303319 - DNA, 37 bp, Homo sapiens; identical to SEQ ID NO: 209681
  chr4:76917507-76917544
  hypo

SEQ ID NO: 303320 - DNA, 147 bp, Homo sapiens; identical to SEQ ID NO: 253826
  chr4:76932385-76932532
  hypo

SEQ ID NO: 303321 - DNA, 504 bp, Homo sapiens; identical to SEQ ID NO: 199458
  chr4:77227525-77228029
  hypo

SEQ ID NO: 303322 - DNA, 92 bp, Homo sapiens; identical to SEQ ID NO: 282254
  chr4:77228452-77228544
  hypo

SEQ ID NO: 303323 - DNA, 36 bp, Homo sapiens; identical to SEQ ID NO: 209683
  chr4:77448700-77448736
  hypo

SEQ ID NO: 303324 - DNA, 98 bp, Homo sapiens; identical to SEQ ID NO: 253829
  chr4:77596032-77596130
  hypo

SEQ ID NO: 303325 - DNA, 61 bp, Homo sapiens; identical to SEQ ID NO: 253830
  chr4:77661925-77661986
  hypo

SEQ ID NO: 303326 - DNA, 121 bp, Homo sapiens; identical to SEQ ID NO: 253831
  chr4:77662882-77663003
  hypo

SEQ ID NO: 303327 - DNA, 35 bp, Homo sapiens; identical to SEQ ID NO: 253832
  chr4:77776591-77776626
  hypo

SEQ ID NO: 303328 - DNA, 164 bp, Homo sapiens; identical to SEQ ID NO: 253833
  chr4:78034396-78034560
  hypo

SEQ ID NO: 303329 - DNA, 161 bp, Homo sapiens; identical to SEQ ID NO: 253835
  chr4:78839184-78839345
  hypo

SEQ ID NO: 303330 - DNA, 48 bp, Homo sapiens; identical to SEQ ID NO: 253836
  chr4:78924253-78924301
  hypo

SEQ ID NO: 303331 - DNA, 784 bp, Homo sapiens; identical to SEQ ID NO: 282264
  chr4:78979792-78980576
  hypo

SEQ ID NO: 303332 - DNA, 133 bp, Homo sapiens; identical to SEQ ID NO: 253837
  chr4:79345199-79345332
  hypo

SEQ ID NO: 303333 - DNA, 92 bp, Homo sapiens; identical to SEQ ID NO: 209685
  chr4:79702947-79703039
  hypo

SEQ ID NO: 303334 - DNA, 150 bp, Homo sapiens; identical to SEQ ID NO: 209686
  chr4:79828974-79829124
  hypo

SEQ ID NO: 303335 - DNA, 123 bp, Homo sapiens; identical to SEQ ID NO: 209687
  chr4:79832671-79832794
  hypo

SEQ ID NO: 303336 - DNA, 38 bp, Homo sapiens; identical to SEQ ID NO: 253842
  chr4:80273038-80273076
  hypo

SEQ ID NO: 303337 - DNA, 172 bp, Homo sapiens; identical to SEQ ID NO: 282271
  chr4:81124731-81124903
  hypo

SEQ ID NO: 303338 - DNA, 97 bp, Homo sapiens; identical to SEQ ID NO: 253843
  chr4:81205171-81205268
  hypo

SEQ ID NO: 303339 - DNA, 46 bp, Homo sapiens; identical to SEQ ID NO: 209689
  chr4:81307565-81307611
  hypo

SEQ ID NO: 303340 - DNA, 44 bp, Homo sapiens; identical to SEQ ID NO: 209690
  chr4:81605694-81605738
  hypo

SEQ ID NO: 303341 - DNA, 140 bp, Homo sapiens; identical to SEQ ID NO: 253846
  chr4:83301589-83301729
  hypo

SEQ ID NO: 303342 - DNA, 49 bp, Homo sapiens; identical to SEQ ID NO: 209691
  chr4:83323708-83323757
  hypo

SEQ ID NO: 303343 - DNA, 157 bp, Homo sapiens; identical to SEQ ID NO: 253848
  chr4:83407498-83407655
  hypo

SEQ ID NO: 303344 - DNA, 33 bp, Homo sapiens; identical to SEQ ID NO: 253849
  chr4:83448627-83448660
  hypo

SEQ ID NO: 303345 - DNA, 32 bp, Homo sapiens; identical to SEQ ID NO: 209692
  chr4:83700298-83700330
  hypo

SEQ ID NO: 303346 - DNA, 40 bp, Homo sapiens; identical to SEQ ID NO: 253852
  chr4:83760709-83760749
  hypo

SEQ ID NO: 303347 - DNA, 45 bp, Homo sapiens; identical to SEQ ID NO: 209693
  chr4:83808872-83808917
  hypo

SEQ ID NO: 303348 - DNA, 46 bp, Homo sapiens; identical to SEQ ID NO: 253854
  chr4:83839359-83839405
  hypo

SEQ ID NO: 303349 - DNA, 85 bp, Homo sapiens; identical to SEQ ID NO: 222435
  chr4:84292570-84292655
  hypo

SEQ ID NO: 303350 - DNA, 176 bp, Homo sapiens; identical to SEQ ID NO: 253855
  chr4:84310214-84310390
  hypo

SEQ ID NO: 303351 - DNA, 35 bp, Homo sapiens; identical to SEQ ID NO: 253856
  chr4:84468675-84468710
  hypo

SEQ ID NO: 303352 - DNA, 250 bp, Homo sapiens; identical to SEQ ID NO: 199476
  chr4:85503985-85504235
  hypo

SEQ ID NO: 303353 - DNA, 321 bp, Homo sapiens; identical to SEQ ID NO: 199477
  chr4:85886793-85887114
  hypo

SEQ ID NO: 303354 - DNA, 678 bp, Homo sapiens; identical to SEQ ID NO: 282305
  chr4:85887200-85887878
  hypo

SEQ ID NO: 303355 - DNA, 438 bp, Homo sapiens; identical to SEQ ID NO: 282306
  chr4:85887927-85888365
  hypo

SEQ ID NO: 303356 - DNA, 63 bp, Homo sapiens; identical to SEQ ID NO: 199480
  chr4:85888399-85888462
  hypo

SEQ ID NO: 303357 - DNA, 161 bp, Homo sapiens; identical to SEQ ID NO: 209699
  chr4:86167317-86167478
  hypo

SEQ ID NO: 303358 - DNA, 101 bp, Homo sapiens; identical to SEQ ID NO: 222440
  chr4:86396088-86396189
  hypo

SEQ ID NO: 303359 - DNA, 543 bp, Homo sapiens; identical to SEQ ID NO: 222441
  chr4:86396422-86396965
  hypo

SEQ ID NO: 303360 - DNA, 160 bp, Homo sapiens; identical to SEQ ID NO: 209700
  chr4:86801948-86802108
  hypo

SEQ ID NO: 303361 - DNA, 104 bp, Homo sapiens; identical to SEQ ID NO: 253859
  chr4:86877878-86877982
  hypo

SEQ ID NO: 303362 - DNA, 31 bp, Homo sapiens; identical to SEQ ID NO: 253860
  chr4:86958368-86958399
  hypo

SEQ ID NO: 303363 - DNA, 101 bp, Homo sapiens; identical to SEQ ID NO: 253861
  chr4:87468463-87468564
  hypo

SEQ ID NO: 303364 - DNA, 36 bp, Homo sapiens; identical to SEQ ID NO: 209701
  chr4:87797488-87797524
  hypo

SEQ ID NO: 303365 - DNA, 39 bp, Homo sapiens; identical to SEQ ID NO: 209702
  chr4:87922650-87922689
  hypo

SEQ ID NO: 303366 - DNA, 64 bp, Homo sapiens; identical to SEQ ID NO: 253864
  chr4:87946924-87946988
  hypo

SEQ ID NO: 303367 - DNA, 143 bp, Homo sapiens; identical to SEQ ID NO: 209703
  chr4:87993064-87993207
  hypo

SEQ ID NO: 303368 - DNA, 83 bp, Homo sapiens; identical to SEQ ID NO: 209704
  chr4:87993507-87993590
  hypo

SEQ ID NO: 303369 - DNA, 40 bp, Homo sapiens; identical to SEQ ID NO: 253867
  chr4:88009708-88009748
  hypo

SEQ ID NO: 303370 - DNA, 35 bp, Homo sapiens
  chr4:88010168-88010203
  hypo
acaggtgtgagctgctgcgcccggccgcatgtcga

SEQ ID NO: 303371 - DNA, 181 bp, Homo sapiens; identical to SEQ ID NO: 253869
  chr4:88053371-88053552
  hypo

SEQ ID NO: 303372 - DNA, 48 bp, Homo sapiens; identical to SEQ ID NO: 209705
  chr4:88259021-88259069
  hypo

SEQ ID NO: 303373 - DNA, 105 bp, Homo sapiens; identical to SEQ ID NO: 209706
  chr4:88296902-88297007
  hypo

SEQ ID NO: 303374 - DNA, 45 bp, Homo sapiens; identical to SEQ ID NO: 253872
  chr4:88899513-88899558
  hypo

SEQ ID NO: 303375 - DNA, 182 bp, Homo sapiens; identical to SEQ ID NO: 209707
  chr4:88941048-88941230
  hypo

SEQ ID NO: 303376 - DNA, 145 bp, Homo sapiens; identical to SEQ ID NO: 209708
  chr4:88957314-88957459
  hypo

SEQ ID NO: 303377 - DNA, 31 bp, Homo sapiens; identical to SEQ ID NO: 209709
  chr4:90043371-90043402
  hypo

SEQ ID NO: 303378 - DNA, 150 bp, Homo sapiens; identical to SEQ ID NO: 253877
  chr4:90043642-90043792
  hypo

SEQ ID NO: 303379 - DNA, 180 bp, Homo sapiens; identical to SEQ ID NO: 209711
  chr4:91052008-91052188
  hypo

SEQ ID NO: 303380 - DNA, 36 bp, Homo sapiens; identical to SEQ ID NO: 209712
  chr4:91052428-91052464
  hypo

SEQ ID NO: 303381 - DNA, 148 bp, Homo sapiens; identical to SEQ ID NO: 209713
  chr4:91640271-91640419
  hypo

SEQ ID NO: 303382 - DNA, 169 bp, Homo sapiens; identical to SEQ ID NO: 282333
  chr4:91760071-91760240
  hypo

SEQ ID NO: 303383 - DNA, 233 bp, Homo sapiens; identical to SEQ ID NO: 222444
  chr4:95373794-95374027
  hypo

SEQ ID NO: 303384 - DNA, 87 bp, Homo sapiens; identical to SEQ ID NO: 253884
  chr4:95407092-95407179
  hypo

SEQ ID NO: 303385 - DNA, 85 bp, Homo sapiens; identical to SEQ ID NO: 209714
  chr4:95461557-95461642
  hypo

SEQ ID NO: 303386 - DNA, 31 bp, Homo sapiens; identical to SEQ ID NO: 209715
  chr4:95578063-95578094
  hypo

SEQ ID NO: 303387 - DNA, 66 bp, Homo sapiens; identical to SEQ ID NO: 253887
  chr4:95636992-95637058
  hypo

SEQ ID NO: 303388 - DNA, 37 bp, Homo sapiens; identical to SEQ ID NO: 253888
  chr4:99178271-99178308
  hypo

SEQ ID NO: 303389 - DNA, 337 bp, Homo sapiens; identical to SEQ ID NO: 253889
  chr4:99399705-99400042
  hypo

SEQ ID NO: 303390 - DNA, 37 bp, Homo sapiens; identical to SEQ ID NO: 253890
  chr4:99843421-99843458
  hypo

SEQ ID NO: 303391 - DNA, 77 bp, Homo sapiens; identical to SEQ ID NO: 253891
  chr4:99936195-99936272
  hypo

SEQ ID NO: 303392 - DNA, 49 bp, Homo sapiens; identical to SEQ ID NO: 253892
  chr4:99982329-99982378
  hypo

SEQ ID NO: 303393 - DNA, 128 bp, Homo sapiens; identical to SEQ ID NO: 253893
  chr4:100555184-100555312
  hypo

SEQ ID NO: 303394 - DNA, 1033 bp, Homo sapiens; identical to SEQ ID NO: 253894
  chr4:100573592-100574625
  hypo

SEQ ID NO: 303395 - DNA, 80 bp, Homo sapiens; identical to SEQ ID NO: 253895
  chr4:100866007-100866087
  hypo

SEQ ID NO: 303396 - DNA, 257 bp, Homo sapiens; identical to SEQ ID NO: 110403
  chr4:100867945-100868202
  hypo

SEQ ID NO: 303397 - DNA, 32 bp, Homo sapiens; identical to SEQ ID NO: 253896
  chr4:102266906-102266938
  hypo

SEQ ID NO: 303398 - DNA, 43 bp, Homo sapiens; identical to SEQ ID NO: 253897
  chr4:102332863-102332906
  hypo

SEQ ID NO: 303399 - DNA, 120 bp, Homo sapiens; identical to SEQ ID NO: 253898
  chr4:103079069-103079189
  hypo

SEQ ID NO: 303400 - DNA, 38 bp, Homo sapiens; identical to SEQ ID NO: 253899
  chr4:103240080-103240118
  hypo

SEQ ID NO: 303401 - DNA, 220 bp, Homo sapiens; identical to SEQ ID NO: 222446
  chr4:103266878-103267098
  hypo

SEQ ID NO: 303402 - DNA, 199 bp, Homo sapiens; identical to SEQ ID NO: 209718
  chr4:103421132-103421331
  hypo

SEQ ID NO: 303403 - DNA, 42 bp, Homo sapiens; identical to SEQ ID NO: 209719
  chr4:103494439-103494481
  hypo

SEQ ID NO: 303404 - DNA, 81 bp, Homo sapiens; identical to SEQ ID NO: 209720
  chr4:103806371-103806452
  hypo

SEQ ID NO: 303405 - DNA, 323 bp, Homo sapiens; identical to SEQ ID NO: 209721
  chr4:103941524-103941847
  hypo

SEQ ID NO: 303406 - DNA, 712 bp, Homo sapiens; identical to SEQ ID NO: 282375
  chr4:103997159-103997871
  hypo

SEQ ID NO: 303407 - DNA, 81 bp, Homo sapiens; identical to SEQ ID NO: 209722
  chr4:104854486-104854567
  hypo

SEQ ID NO: 303408 - DNA, 42 bp, Homo sapiens; identical to SEQ ID NO: 199516
  chr4:106067031-106067073
  hypo

SEQ ID NO: 303409 - DNA, 281 bp, Homo sapiens; identical to SEQ ID NO: 199517
  chr4:106067220-106067501
  hypo

SEQ ID NO: 303410 - DNA, 295 bp, Homo sapiens; identical to SEQ ID NO: 199518
  chr4:106067841-106068136
  hypo

SEQ ID NO: 303411 - DNA, 277 bp, Homo sapiens; identical to SEQ ID NO: 199519
  chr4:106068588-106068865
  hypo

SEQ ID NO: 303412 - DNA, 146 bp, Homo sapiens; identical to SEQ ID NO: 199520
  chr4:106111516-106111662
  hypo

SEQ ID NO: 303413 - DNA, 4461 bp, Homo sapiens; identical to SEQ ID NO: 199521
  chr4:106155053-106159514
  hypo

SEQ ID NO: 303414 - DNA, 240 bp, Homo sapiens; identical to SEQ ID NO: 199522
  chr4:106159634-106159874
  hypo

SEQ ID NO: 303415 - DNA, 180 bp, Homo sapiens; identical to SEQ ID NO: 199523
  chr4:106160114-106160294
  hypo

SEQ ID NO: 303416 - DNA, 120 bp, Homo sapiens; identical to SEQ ID NO: 199524
  chr4:106161134-106161254
  hypo

SEQ ID NO: 303417 - DNA, 2721 bp, Homo sapiens; identical to SEQ ID NO: 199525
  chr4:106161374-106164095
  hypo

SEQ ID NO: 303418 - DNA, 230 bp, Homo sapiens; identical to SEQ ID NO: 199526
  chr4:106164712-106164942
  hypo

SEQ ID NO: 303419 - DNA, 177 bp, Homo sapiens; identical to SEQ ID NO: 199527
  chr4:106180762-106180939
  hypo

SEQ ID NO: 303420 - DNA, 107 bp, Homo sapiens; identical to SEQ ID NO: 199528
  chr4:106182911-106183018
  hypo

SEQ ID NO: 303421 - DNA, 161 bp, Homo sapiens; identical to SEQ ID NO: 199529
  chr4:106190752-106190913
  hypo

SEQ ID NO: 303422 - DNA, 376 bp, Homo sapiens; identical to SEQ ID NO: 199530
  chr4:106193708-106194084
  hypo

SEQ ID NO: 303423 - DNA, 3101 bp, Homo sapiens; identical to SEQ ID NO: 199531
  chr4:106196198-106199299
  hypo

SEQ ID NO: 303424 - DNA, 1601 bp, Homo sapiens; identical to SEQ ID NO: 199532
  chr4:106199359-106200960
  hypo

SEQ ID NO: 303425 - DNA, 34 bp, Homo sapiens; identical to SEQ ID NO: 209740
  chr4:106335456-106335490
  hypo

SEQ ID NO: 303426 - DNA, 214 bp, Homo sapiens; identical to SEQ ID NO: 209741
  chr4:106335550-106335764
  hypo

SEQ ID NO: 303427 - DNA, 57 bp, Homo sapiens; identical to SEQ ID NO: 209742
  chr4:106631892-106631949
  hypo

SEQ ID NO: 303428 - DNA, 35 bp, Homo sapiens; identical to SEQ ID NO: 253908
  chr4:106689194-106689229
  hypo

SEQ ID NO: 303429 - DNA, 218 bp, Homo sapiens; identical to SEQ ID NO: 209743
  chr4:108132182-108132400
  hypo

SEQ ID NO: 303430 - DNA, 176 bp, Homo sapiens
  chr4:108302304-108302480
  hypo
tcttcctccattcagtgcccccgatcccgctcctctggtttccgtttcaggtccctcccctgcttcctcttcctgctgtccctgatcccgcccctccggttcccatttcaggtacttcccgtgcttgcatccctcttccagcttttccgatcccgctcccccggtttctgttccag

SEQ ID NO: 303431 - DNA, 43 bp, Homo sapiens; identical to SEQ ID NO: 209744
  chr4:108446495-108446538
  hypo

SEQ ID NO: 303432 - DNA, 231 bp, Homo sapiens; identical to SEQ ID NO: 282405
  chr4:108852945-108853176
  hypo

SEQ ID NO: 303433 - DNA, 107 bp, Homo sapiens; identical to SEQ ID NO: 282406
  chr4:108853287-108853394
  hypo

SEQ ID NO: 303434 - DNA, 81 bp, Homo sapiens; identical to SEQ ID NO: 209745
  chr4:108975407-108975488
  hypo

SEQ ID NO: 303435 - DNA, 206 bp, Homo sapiens; identical to SEQ ID NO: 253914
  chr4:109002484-109002690
  hypo

SEQ ID NO: 303436 - DNA, 168 bp, Homo sapiens; identical to SEQ ID NO: 209746
  chr4:109009508-109009676
  hypo

SEQ ID NO: 303437 - DNA, 709 bp, Homo sapiens; identical to SEQ ID NO: 282409
  chr4:109089314-109090023
  hypo

SEQ ID NO: 303438 - DNA, 246 bp, Homo sapiens; identical to SEQ ID NO: 282411
  chr4:109094283-109094529
  hypo

SEQ ID NO: 303439 - DNA, 101 bp, Homo sapiens; identical to SEQ ID NO: 253916
  chr4:110314367-110314468
  hypo

SEQ ID NO: 303440 - DNA, 40 bp, Homo sapiens; identical to SEQ ID NO: 253917
  chr4:110314768-110314808
  hypo

SEQ ID NO: 303441 - DNA, 211 bp, Homo sapiens; identical to SEQ ID NO: 199548
  chr4:110651657-110651868
  hypo

SEQ ID NO: 303442 - DNA, 87 bp, Homo sapiens; identical to SEQ ID NO: 253919
  chr4:111019210-111019297
  hypo

SEQ ID NO: 303443 - DNA, 44 bp, Homo sapiens; identical to SEQ ID NO: 209749
  chr4:111096241-111096285
  hypo

SEQ ID NO: 303444 - DNA, 86 bp, Homo sapiens; identical to SEQ ID NO: 209750
  chr4:111097859-111097945
  hypo

SEQ ID NO: 303445 - DNA, 440 bp, Homo sapiens; identical to SEQ ID NO: 282419
  chr4:111117165-111117605
  hypo

SEQ ID NO: 303446 - DNA, 522 bp, Homo sapiens; identical to SEQ ID NO: 282420
  chr4:111119712-111120234
  hypo

SEQ ID NO: 303447 - DNA, 37 bp, Homo sapiens; identical to SEQ ID NO: 253922
  chr4:111144769-111144806
  hypo

SEQ ID NO: 303448 - DNA, 34 bp, Homo sapiens; identical to SEQ ID NO: 253923
  chr4:111177276-111177310
  hypo

SEQ ID NO: 303449 - DNA, 90 bp, Homo sapiens; identical to SEQ ID NO: 253924
  chr4:111213416-111213506
  hypo

SEQ ID NO: 303450 - DNA, 287 bp, Homo sapiens; identical to SEQ ID NO: 253925
  chr4:111214249-111214536
  hypo

SEQ ID NO: 303451 - DNA, 36 bp, Homo sapiens; identical to SEQ ID NO: 209752
  chr4:111383532-111383568
  hypo

SEQ ID NO: 303452 - DNA, 577 bp, Homo sapiens; identical to SEQ ID NO: 209753
  chr4:111508744-111509321
  hypo

SEQ ID NO: 303453 - DNA, 99 bp, Homo sapiens; identical to SEQ ID NO: 282423
  chr4:111539229-111539328
  hypo

SEQ ID NO: 303454 - DNA, 232 bp, Homo sapiens; identical to SEQ ID NO: 199554
  chr4:111543735-111543967
  hypo

SEQ ID NO: 303455 - DNA, 190 bp, Homo sapiens; identical to SEQ ID NO: 253929
  chr4:113276888-113277078
  hypo

SEQ ID NO: 303456 - DNA, 242 bp, Homo sapiens; identical to SEQ ID NO: 199560
  chr4:113436585-113436827
  hypo

SEQ ID NO: 303457 - DNA, 228 bp, Homo sapiens; identical to SEQ ID NO: 199561
  chr4:113438278-113438506
  hypo

SEQ ID NO: 303458 - DNA, 37 bp, Homo sapiens; identical to SEQ ID NO: 209757
  chr4:113559165-113559202
  hypo

SEQ ID NO: 303459 - DNA, 183 bp, Homo sapiens; identical to SEQ ID NO: 209758
  chr4:114417171-114417354
  hypo

SEQ ID NO: 303460 - DNA, 101 bp, Homo sapiens; identical to SEQ ID NO: 209759
  chr4:114528566-114528667
  hypo

SEQ ID NO: 303461 - DNA, 44 bp, Homo sapiens; identical to SEQ ID NO: 253933
  chr4:115416724-115416768
  hypo

SEQ ID NO: 303462 - DNA, 229 bp, Homo sapiens; identical to SEQ ID NO: 282457
  chr4:115520945-115521174
  hypo

SEQ ID NO: 303463 - DNA, 38 bp, Homo sapiens; identical to SEQ ID NO: 209761
  chr4:119501591-119501629
  hypo

SEQ ID NO: 303464 - DNA, 211 bp, Homo sapiens; identical to SEQ ID NO: 253935
  chr4:119951552-119951763
  hypo

SEQ ID NO: 303465 - DNA, 96 bp, Homo sapiens; identical to SEQ ID NO: 253936
  chr4:120024257-120024353
  hypo

SEQ ID NO: 303466 - DNA, 333 bp, Homo sapiens; identical to SEQ ID NO: 199577
  chr4:120549978-120550311
  hypo

SEQ ID NO: 303467 - DNA, 276 bp, Homo sapiens; identical to SEQ ID NO: 199580
  chr4:121843731-121844007
  hypo

SEQ ID NO: 303468 - DNA, 171 bp, Homo sapiens; identical to SEQ ID NO: 282476
  chr4:121844206-121844377
  hypo

SEQ ID NO: 303469 - DNA, 199 bp, Homo sapiens; identical to SEQ ID NO: 253937
  chr4:122158962-122159161
  hypo

SEQ ID NO: 303470 - DNA, 38 bp, Homo sapiens; identical to SEQ ID NO: 253938
  chr4:122165518-122165556
  hypo

SEQ ID NO: 303471 - DNA, 76 bp, Homo sapiens; identical to SEQ ID NO: 209765
  chr4:122615463-122615539
  hypo

SEQ ID NO: 303472 - DNA, 34 bp, Homo sapiens; identical to SEQ ID NO: 209766
  chr4:122924455-122924489
  hypo

SEQ ID NO: 303473 - DNA, 307 bp, Homo sapiens; identical to SEQ ID NO: 209767
  chr4:123300366-123300673
  hypo

SEQ ID NO: 303474 - DNA, 222 bp, Homo sapiens; identical to SEQ ID NO: 253942
  chr4:124029142-124029364
  hypo

SEQ ID NO: 303475 - DNA, 182 bp, Homo sapiens; identical to SEQ ID NO: 209768
  chr4:124036406-124036588
  hypo

SEQ ID NO: 303476 - DNA, 139 bp, Homo sapiens; identical to SEQ ID NO: 209769
  chr4:124106851-124106990
  hypo

SEQ ID NO: 303477 - DNA, 32 bp, Homo sapiens; identical to SEQ ID NO: 253945
  chr4:124313335-124313367
  hypo

SEQ ID NO: 303478 - DNA, 1571 bp, Homo sapiens; identical to SEQ ID NO: 199587
  chr4:124317731-124319302
  hypo

SEQ ID NO: 303479 - DNA, 157 bp, Homo sapiens; identical to SEQ ID NO: 209771
  chr4:124335555-124335712
  hypo

SEQ ID NO: 303480 - DNA, 209 bp, Homo sapiens; identical to SEQ ID NO: 282491
  chr4:124426861-124427070
  hypo

SEQ ID NO: 303481 - DNA, 79 bp, Homo sapiens; identical to SEQ ID NO: 282492
  chr4:124427137-124427216
  hypo

SEQ ID NO: 303482 - DNA, 481 bp, Homo sapiens; identical to SEQ ID NO: 209772
  chr4:124468461-124468942
  hypo

SEQ ID NO: 303483 - DNA, 39 bp, Homo sapiens; identical to SEQ ID NO: 209773
  chr4:124533356-124533395
  hypo

SEQ ID NO: 303484 - DNA, 34 bp, Homo sapiens; identical to SEQ ID NO: 209774
  chr4:125038668-125038702
  hypo

SEQ ID NO: 303485 - DNA, 34 bp, Homo sapiens; identical to SEQ ID NO: 209775
  chr4:125038942-125038976
  hypo

SEQ ID NO: 303486 - DNA, 620 bp, Homo sapiens; identical to SEQ ID NO: 282494
  chr4:125633097-125633717
  hypo

SEQ ID NO: 303487 - DNA, 283 bp, Homo sapiens; identical to SEQ ID NO: 282495
  chr4:125633784-125634067
  hypo

SEQ ID NO: 303488 - DNA, 118 bp, Homo sapiens; identical to SEQ ID NO: 282499
  chr4:126238436-126238554
  hypo

SEQ ID NO: 303489 - DNA, 218 bp, Homo sapiens; identical to SEQ ID NO: 253952
  chr4:128651504-128651722
  hypo

SEQ ID NO: 303490 - DNA, 196 bp, Homo sapiens; identical to SEQ ID NO: 253953
  chr4:128702503-128702699
  hypo

SEQ ID NO: 303491 - DNA, 137 bp, Homo sapiens; identical to SEQ ID NO: 199594
  chr4:128703235-128703372
  hypo

SEQ ID NO: 303492 - DNA, 568 bp, Homo sapiens; identical to SEQ ID NO: 253954
  chr4:128764580-128765148
  hypo

SEQ ID NO: 303493 - DNA, 31 bp, Homo sapiens; identical to SEQ ID NO: 209780
  chr4:128889349-128889380
  hypo

SEQ ID NO: 303494 - DNA, 42 bp, Homo sapiens; identical to SEQ ID NO: 253958
  chr4:129697834-129697876
  hypo

SEQ ID NO: 303495 - DNA, 37 bp, Homo sapiens; identical to SEQ ID NO: 253959
  chr4:129754820-129754857
  hypo

SEQ ID NO: 303496 - DNA, 52 bp, Homo sapiens; identical to SEQ ID NO: 253960
  chr4:129776887-129776939
  hypo

SEQ ID NO: 303497 - DNA, 167 bp, Homo sapiens; identical to SEQ ID NO: 209781
  chr4:130168457-130168624
  hypo

SEQ ID NO: 303498 - DNA, 43 bp, Homo sapiens; identical to SEQ ID NO: 253962
  chr4:138974561-138974604
  hypo

SEQ ID NO: 303499 - DNA, 35 bp, Homo sapiens; identical to SEQ ID NO: 253963
  chr4:139707316-139707351
  hypo

SEQ ID NO: 303500 - DNA, 31 bp, Homo sapiens; identical to SEQ ID NO: 253964
  chr4:139946032-139946063
  hypo

SEQ ID NO: 303501 - DNA, 102 bp, Homo sapiens; identical to SEQ ID NO: 199600
  chr4:140097254-140097356
  hypo

SEQ ID NO: 303502 - DNA, 286 bp, Homo sapiens; identical to SEQ ID NO: 253966
  chr4:140357386-140357672
  hypo

SEQ ID NO: 303503 - DNA, 180 bp, Homo sapiens; identical to SEQ ID NO: 222492
  chr4:140587058-140587238
  hypo

SEQ ID NO: 303504 - DNA, 40 bp, Homo sapiens; identical to SEQ ID NO: 253968
  chr4:140592642-140592682
  hypo

SEQ ID NO: 303505 - DNA, 82 bp, Homo sapiens; identical to SEQ ID NO: 253969
  chr4:140640071-140640153
  hypo

SEQ ID NO: 303506 - DNA, 39 bp, Homo sapiens; identical to SEQ ID NO: 209784
  chr4:140641398-140641437
  hypo

SEQ ID NO: 303507 - DNA, 90 bp, Homo sapiens; identical to SEQ ID NO: 253971
  chr4:140701211-140701301
  hypo

SEQ ID NO: 303508 - DNA, 531 bp, Homo sapiens; identical to SEQ ID NO: 253972
  chr4:140705006-140705537
  hypo

SEQ ID NO: 303509 - DNA, 35 bp, Homo sapiens; identical to SEQ ID NO: 253973
  chr4:140705888-140705923
  hypo

SEQ ID NO: 303510 - DNA, 141 bp, Homo sapiens; identical to SEQ ID NO: 209785
  chr4:140751843-140751984
  hypo

SEQ ID NO: 303511 - DNA, 287 bp, Homo sapiens; identical to SEQ ID NO: 209786
  chr4:140754365-140754652
  hypo

SEQ ID NO: 303512 - DNA, 407 bp, Homo sapiens; identical to SEQ ID NO: 253976
  chr4:140780992-140781399
  hypo

SEQ ID NO: 303513 - DNA, 108 bp, Homo sapiens; identical to SEQ ID NO: 253977
  chr4:140929945-140930053
  hypo

SEQ ID NO: 303514 - DNA, 207 bp, Homo sapiens; identical to SEQ ID NO: 253978
  chr4:141007379-141007586
  hypo

SEQ ID NO: 303515 - DNA, 37 bp, Homo sapiens; identical to SEQ ID NO: 209787
  chr4:141014855-141014892
  hypo

SEQ ID NO: 303516 - DNA, 138 bp, Homo sapiens; identical to SEQ ID NO: 209788
  chr4:141067295-141067433
  hypo

SEQ ID NO: 303517 - DNA, 1319 bp, Homo sapiens; identical to SEQ ID NO: 199602
  chr4:141071488-141072807
  hypo

SEQ ID NO: 303518 - DNA, 2282 bp, Homo sapiens; identical to SEQ ID NO: 282529
  chr4:141073109-141075391
  hypo

SEQ ID NO: 303519 - DNA, 102 bp, Homo sapiens; identical to SEQ ID NO: 209793
  chr4:141207750-141207852
  hypo

SEQ ID NO: 303520 - DNA, 47 bp, Homo sapiens; identical to SEQ ID NO: 18936
  chr4:141207918-141207965
  hypo

SEQ ID NO: 303521 - DNA, 154 bp, Homo sapiens; identical to SEQ ID NO: 253982
  chr4:141266288-141266442
  hypo

SEQ ID NO: 303522 - DNA, 1377 bp, Homo sapiens; identical to SEQ ID NO: 253983
  chr4:141563899-141565276
  hypo

SEQ ID NO: 303523 - DNA, 1308 bp, Homo sapiens; identical to SEQ ID NO: 222498
  chr4:141676913-141678221
  hypo

SEQ ID NO: 303524 - DNA, 60 bp, Homo sapiens; identical to SEQ ID NO: 199612
  chr4:142054594-142054654
  hypo

SEQ ID NO: 303525 - DNA, 176 bp, Homo sapiens; identical to SEQ ID NO: 199613
  chr4:142054757-142054933
  hypo

SEQ ID NO: 303526 - DNA, 84 bp, Homo sapiens; identical to SEQ ID NO: 253984
  chr4:142134704-142134788
  hypo

SEQ ID NO: 303527 - DNA, 852 bp, Homo sapiens; identical to SEQ ID NO: 282542
  chr4:142557229-142558081
  hypo

SEQ ID NO: 303528 - DNA, 185 bp, Homo sapiens; identical to SEQ ID NO: 209802
  chr4:142677009-142677194
  hypo

SEQ ID NO: 303529 - DNA, 38 bp, Homo sapiens; identical to SEQ ID NO: 253986
  chr4:143073506-143073544
  hypo

SEQ ID NO: 303530 - DNA, 196 bp, Homo sapiens; identical to SEQ ID NO: 209803
  chr4:143477972-143478168
  hypo

SEQ ID NO: 303531 - DNA, 74 bp, Homo sapiens; identical to SEQ ID NO: 209804
  chr4:144141584-144141658
  hypo

SEQ ID NO: 303532 - DNA, 540 bp, Homo sapiens; identical to SEQ ID NO: 199619
  chr4:144256959-144257499
  hypo

SEQ ID NO: 303533 - DNA, 189 bp, Homo sapiens; identical to SEQ ID NO: 199620
  chr4:144257937-144258126
  hypo

SEQ ID NO: 303534 - DNA, 300 bp, Homo sapiens; identical to SEQ ID NO: 199621
  chr4:144258375-144258675
  hypo

SEQ ID NO: 303535 - DNA, 117 bp, Homo sapiens; identical to SEQ ID NO: 253989
  chr4:144265400-144265517
  hypo

SEQ ID NO: 303536 - DNA, 124 bp, Homo sapiens; identical to SEQ ID NO: 253990
  chr4:144507008-144507132
  hypo

SEQ ID NO: 303537 - DNA, 41 bp, Homo sapiens; identical to SEQ ID NO: 253991
  chr4:146047172-146047213
  hypo

SEQ ID NO: 303538 - DNA, 1185 bp, Homo sapiens; identical to SEQ ID NO: 282558
  chr4:146402704-146403889
  hypo

SEQ ID NO: 303539 - DNA, 36 bp, Homo sapiens; identical to SEQ ID NO: 209810
  chr4:146449670-146449706
  hypo

SEQ ID NO: 303540 - DNA, 63 bp, Homo sapiens; identical to SEQ ID NO: 253993
  chr4:146694922-146694985
  hypo

SEQ ID NO: 303541 - DNA, 181 bp, Homo sapiens; identical to SEQ ID NO: 253994
  chr4:146825846-146826027
  hypo

SEQ ID NO: 303542 - DNA, 33 bp, Homo sapiens; identical to SEQ ID NO: 199629
  chr4:148538935-148538968
  hypo

SEQ ID NO: 303543 - DNA, 99 bp, Homo sapiens; identical to SEQ ID NO: 209812
  chr4:148782279-148782378
  hypo

SEQ ID NO: 303544 - DNA, 93 bp, Homo sapiens; identical to SEQ ID NO: 199632
  chr4:149364560-149364653
  hypo

SEQ ID NO: 303545 - DNA, 222 bp, Homo sapiens; identical to SEQ ID NO: 282568
  chr4:149364662-149364884
  hypo

SEQ ID NO: 303546 - DNA, 347 bp, Homo sapiens; identical to SEQ ID NO: 199635
  chr4:149365911-149366258
  hypo

SEQ ID NO: 303547 - DNA, 37 bp, Homo sapiens; identical to SEQ ID NO: 209816
  chr4:149905345-149905382
  hypo

SEQ ID NO: 303548 - DNA, 33 bp, Homo sapiens; identical to SEQ ID NO: 253998
  chr4:151020124-151020157
  hypo

SEQ ID NO: 303549 - DNA, 75 bp, Homo sapiens; identical to SEQ ID NO: 253999
  chr4:151435900-151435975
  hypo

SEQ ID NO: 303550 - DNA, 213 bp, Homo sapiens; identical to SEQ ID NO: 209817
  chr4:151897750-151897963
  hypo

SEQ ID NO: 303551 - DNA, 33 bp, Homo sapiens; identical to SEQ ID NO: 254001
  chr4:151960720-151960753
  hypo

SEQ ID NO: 303552 - DNA, 33 bp, Homo sapiens; identical to SEQ ID NO: 254003
  chr4:152157386-152157419
  hypo

SEQ ID NO: 303553 - DNA, 1078 bp, Homo sapiens; identical to SEQ ID NO: 282579
  chr4:152329809-152330887
  hypo

SEQ ID NO: 303554 - DNA, 36 bp, Homo sapiens; identical to SEQ ID NO: 254004
  chr4:152448689-152448725
  hypo

SEQ ID NO: 303555 - DNA, 141 bp, Homo sapiens; identical to SEQ ID NO: 254005
  chr4:152591280-152591421
  hypo

SEQ ID NO: 303556 - DNA, 297 bp, Homo sapiens; identical to SEQ ID NO: 254006
  chr4:152640710-152641007
  hypo

SEQ ID NO: 303557 - DNA, 57 bp, Homo sapiens
  chr4:153247386-153247443
  hypo
cagagggagaaacagaaaaacaaaacaaaacaaaaaaacccacgtttagaattttta

SEQ ID NO: 303558 - DNA, 62 bp, Homo sapiens; identical to SEQ ID NO: 254008
  chr4:153460846-153460908
  hypo

SEQ ID NO: 303559 - DNA, 37 bp, Homo sapiens
  chr4:153821326-153821363
  hypo
ggagggatcaaagggcgggaactaacactgtaaaaac

SEQ ID NO: 303560 - DNA, 86 bp, Homo sapiens; identical to SEQ ID NO: 209819
  chr4:153889785-153889871
  hypo

SEQ ID NO: 303561 - DNA, 251 bp, Homo sapiens; identical to SEQ ID NO: 254013
  chr4:153896021-153896272
  hypo

SEQ ID NO: 303562 - DNA, 648 bp, Homo sapiens; identical to SEQ ID NO: 254014
  chr4:153897072-153897720
  hypo

SEQ ID NO: 303563 - DNA, 36 bp, Homo sapiens
  chr4:153918912-153918948
  hypo
tcaggacacccactctcaagcggtgcatccctgagg

SEQ ID NO: 303564 - DNA, 394 bp, Homo sapiens
  chr4:153943334-153943728
  hypo
tgactgggacacgggagggctccagacagccgctatttgccacacggaaccaaagcatttcactgttttaacaagcggttcagctggtccggagtatccctgctggctctcagccctaaagtggcgtgagggctgggcacgtcgacagcacttgatccgctccttccctctggaaatgcatttccttccattaccagaacagcctctcacagtttggcctgcctcttctcatgctatgtcgaaacaaagccacctgcctcccatgaaagacggcattgtttttccacctgagccacccacacctgggcaggtagaacagcgggtccccactccagggagctctcccactcgggcctgtcatggctcacaccccgagcagctgctgtgcttgccc

SEQ ID NO: 303565 - DNA, 233 bp, Homo sapiens; identical to SEQ ID NO: 254017
  chr4:153985892-153986125
  hypo

SEQ ID NO: 303566 - DNA, 373 bp, Homo sapiens
  chr4:154216898-154217271
  hypo
gatcctggacaacaagaacggcacctatgagtttttgtacactgtccagaaggaaggggactttaccctgtctctgagactctatgaccagcacatccgaggcagcccgtttaagctgaaagtgatccgatccgctgatgtgtctcccaccacagaaggcgtgaagaggcgcgttaagtccccggggagcggccacgtcaagcagaaagctgtgaaaagacccgcaagcatgtacagcactggaaaacgaaaagagaatcccatcgaagacgatttgatctttcgagtgggtaaggagagggcttctgtgcccgacgcctgagctggcactggttaaggggtaactgggcacgtgtcattgcaaatagcaaca

SEQ ID NO: 303567 - DNA, 150 bp, Homo sapiens; identical to SEQ ID NO: 254019
  chr4:154218327-154218477
  hypo

SEQ ID NO: 303568 - DNA, 35 bp, Homo sapiens; identical to SEQ ID NO: 254020
  chr4:154247837-154247872
  hypo

SEQ ID NO: 303569 - DNA, 239 bp, Homo sapiens; identical to SEQ ID NO: 222516
  chr4:154387495-154387734
  hypo

SEQ ID NO: 303570 - DNA, 226 bp, Homo sapiens; identical to SEQ ID NO: 282589
  chr4:154387970-154388196
  hypo

SEQ ID NO: 303571 - DNA, 40 bp, Homo sapiens; identical to SEQ ID NO: 209825
  chr4:154394646-154394686
  hypo

SEQ ID NO: 303572 - DNA, 96 bp, Homo sapiens; identical to SEQ ID NO: 209826
  chr4:154410569-154410665
  hypo

SEQ ID NO: 303573 - DNA, 222 bp, Homo sapiens; identical to SEQ ID NO: 254023
  chr4:154420387-154420609
  hypo

SEQ ID NO: 303574 - DNA, 102 bp, Homo sapiens; identical to SEQ ID NO: 254024
  chr4:154420849-154420951
  hypo

SEQ ID NO: 303575 - DNA, 126 bp, Homo sapiens; identical to SEQ ID NO: 209828
  chr4:154421943-154422069
  hypo

SEQ ID NO: 303576 - DNA, 85 bp, Homo sapiens; identical to SEQ ID NO: 254026
  chr4:154454428-154454513
  hypo

SEQ ID NO: 303577 - DNA, 230 bp, Homo sapiens; identical to SEQ ID NO: 254027
  chr4:154456109-154456339
  hypo

SEQ ID NO: 303578 - DNA, 103 bp, Homo sapiens; identical to SEQ ID NO: 209829
  chr4:154469359-154469462
  hypo

SEQ ID NO: 303579 - DNA, 143 bp, Homo sapiens; identical to SEQ ID NO: 209830
  chr4:154520339-154520482
  hypo

SEQ ID NO: 303580 - DNA, 137 bp, Homo sapiens; identical to SEQ ID NO: 254030
  chr4:154554211-154554348
  hypo

SEQ ID NO: 303581 - DNA, 204 bp, Homo sapiens; identical to SEQ ID NO: 199649
  chr4:154714010-154714214
  hypo

SEQ ID NO: 303582 - DNA, 61 bp, Homo sapiens; identical to SEQ ID NO: 199652
  chr4:156298073-156298134
  hypo
